(19) United States
(12) Patent Application Publication
(10) Pub. No.: US 2008/0234183 A1
(43) Pub. Date: Sep. 25, 2008

(54) Cell Penetrating Peptides

(76) Inventors: Mattias Hallbrink, Stockholm (SE); Margus Pooga, Tartu (EE); Madis Metsis, Solna (SE); Priit Kogerman, Tabasalu (EE); Andreas Valkna, Viimsi (EE); Anne Meikas, Saku Estonia (EE); Maria Lindgren, Stockholm (SE); Astrid Graslund, Sollentuna (SE); Goran Eriksson, Stockholm (SE); Claes Goran Ostensson, Solna (SE); Metka Budihna, Ljubljana-Sentvid (SI); Matjaz Zorko, Skoffjica (SI); Anna Elmquist, Norrtalje (SE); Ursel Soomets, Tartu (EE); Pontus Lundberg, Solna (SE); Peter Jarver, Stockholm (SE); Kulliki Saar, Stockholm (SE); Samir El-Andaloussi, Stockholm (SE); Kalle Kilk, Danderyd (SE); Ulo Langel, Bandhagen (SE)

Correspondence Address: Andrew K Gonsalves;Nixon Peabody, Clinton Square, PO Box 31051, Rochester, NY, 14603-1051, US

(21) Appl. No.: 10/517,079

(22) PCT Filed: Jun. 18, 2003
(86) PCT No.: PCT/IB03/03163

§ 371 Date: Aug. 11, 2005

Related U.S. Application Data
(60) Provisional application No. 60/391,788, filed on Jun. 25, 2002.

(30) Foreign Application Priority Data
Jun. 18, 2002 (SE) 0201863-8

(51) Int. Cl. A61K 38/16; C12Q 1/02; C07K 7/06; C07K 7/08; C07K 14/00; A61K 31/7052; A61P 25/00; A61P 35/00; A61P 9/00; A61P 31/00; A61P 3/10; C12N 9/00; C12N 15/63; A61K 38/08; A61K 38/10

(52) U.S. Cl. 514/12; 435/29; 530/324; 530/325; 530/326; 530/327; 530/328; 435/183; 435/320.1; 514/13; 514/14; 514/15; 514/16; 514/44

(57) ABSTRACT

The present invention relates to a method for predicting or designing, detecting, and/or verifying a novel cell-penetrating peptide (CPP) and to a method for using said new CPP and/or a novel usage of a known CPP for an improved cellular uptake of a cellular effector, coupled to said CPP. Furthermore, the present invention also relates to a method for predicting or designing, detecting and/or verifying a novel cell-penetrating peptide (CPP) that mimics cellular effector activity and/or inhibits cellular effector activity. The present invention additionally relates to the use of said CPP for treating and/or preventing a medical condition and to the use of said CPP for the manufacture of a pharmaceutical composition for treating a medical condition.

### FIELD OF THE INVENTION

[0001] The present invention relates to a method for predicting, designing, detecting, and/or verifying a novel cell-penetrating peptide (CPP) and to a method for using said new CPP and/or a novel usage of a known CPP for an improved cellular uptake of a cellular effector, coupled to said CPP. Furthermore, the present invention also relates to a method for predicting, designing, detecting and/or verifying a novel cell-penetrating peptide (CPP) that mimics cellular effector activity and/or Inhibits cellular effector activity. The present invention additionally relates to the use of any of said CPP for treating and/or preventing a medical condition and to the use of any of said CPP for the manufacture of a pharmaceutical composition for treating a medical condition.

### BACKGROUND OF THE INVENTION

[0002] A number of techniques have been developed to deliver different cellular effectors into cells. The majority of these techniques are invasive, like electroporation or microinjection. Liposome encapsulation and receptor-mediated endocytosis are milder methods, but they unfortunately suffer from serious drawbacks, in particular, low delivery yield.

[0003] The established view in cellular biology dictates that the cellular Internalsation of hydrophilic macromolecules can only be achieved through the classical endocytosis pathway. However, in the last decade, several peptides have been demonstrated to translocate across the plasma membrane of eukaryotic cells by a seemingly energy-independent pathway. These peptides are defined as cell-penetrating peptides (CPPs) and have been used successfully for intracellular delivery of macromolecules with molecular weights several times greater than their own. (M. Undgren et al, 2000, Cell-penetrating peptides; TIPS, Vol. 21, pg. 99-103)

[0004] Cellular delivery using these cell-penetrating peptides offers several advantages over conventional techniques. It is non-invasive, energy-independent, is efficient for a broad range of cell types and can be applied to cells en masse. Furthermore, it has been found that for certain types of CPPs, cellular internalisation occurs at 37° C., as well as at 4° C. and that it can not be saturated. Also, in most cases, the Internalisation seems not to require a chiral receptor protein, since no enantiomeric discrimination has been observed.

[0005] Until recently, transport of hydrophilic macromolecules into the cytoplasmic and nuclear compartments of living cells without disrupting the plasma membrane seemed a far-off goal. Because of their low biomembrane permeability and their relatively rapid degradation, polypeptides and oligonucleotides were generally considered to be of limited therapeutic value. This is an obstacle in both biomedical research and the pharmaceutical industry.

[0006] An even more difficult, although very important task, is to deliver hydrophilic macromolecules across the blood-brain barrier. Several methods have been envisaged to overcome this hurdle. Nevertheless, they all suffer from limitations, such as their effectiveness being restricted to a subset of molecules, or that they give a too low yield. However, recent reports suggest that CPPs might be able to transport macromolecules across the blood-brain barrier.

[0007] Another essential area for desired delivery of effectors is nuclear import, wherein, in general, it has been found that the signal sequence must contain some positively charged (basic) residues (Moroianu J., J. Cell Biochem, 1999). It seems that such charged amino acids might also be required for plasma membrane translocation.

[0008] Today, a diversity of cell-penetrating peptides, CPPs, is known. Several peptides have been demonstrated to translocate across the plasma membrane of eukaryotic cells by a seemingly energy-independent pathway. Thus, cell-penetrating peptides might be used as delivery vectors for pharmacologically interesting substances, such as peptides, proteins, oligonucleotides, antisense molecules, as well as for research tools.

[0009] Of particular interest among CPPs are those peptides that have low lytic activity. These translocating peptides, also known as Trojan peptides (D. Derossi et al., Trends Cell Biol. 8 (1998) 84-87), have been applied as vectors for the delivery of hydrophilic biomolecules and drugs into cytoplasmic and nuclear compartments of cells, both In vivo and in vitro (for review, see M. Lindgren et al., Trends Pharmacol. Sci. 21 (2000) 99-103). When covalently linked with a cargo, including polypeptides and oligonucleotides with many times their own molecular mass, these peptides are still able to translocate.

[0010] Examples of useful transport peptides are sequences derived from homeodomains of certain transcription factors, as well as so-called Tat-derived peptides and peptides based on signal sequences. The first of the homeodomain-derived translocating peptides was penetratin, denoted pAntp, with a sequence corresponding to the 16 residues of the third α-helix (residues 43-58) from the Antennapedia homeodomain protein of Drosophila (D. Derossi et al., J. Biol. Chem. 269 (1994) 10444-10450; A. Prochiantz, Ann. NY Acad. Sci. 886 (1999) 172-179). The pAntp peptide retains its membrane translocation properties and has therefore been proposed to be a universal Intercellular delivery vector (D. Derossi et al., Trends Cell Biol. 8 (1998) 84-87).

[0011] Purely synthetic or chimeric peptides have also been designed, as reviewed in (D. Derossi et al., Trends Cell Biol. 8 (1998) 84-87, and M. Lindgren et al., Trends Pharmacol. Sci. 21 (2000) 99-103).

[0012] Transportan, e.g., a non-natural peptide, is able to deliver an antibody molecule with a molecular mass of about 150 kDa over the plasma membrane, although Transportan itself is only a 3 kDa peptide. Transportan and penetratin were demonstrated to deliver a non-natural DNA analogue, PNA (peptide nucleic acid) into cytoplasm and nuclei of cells in culture (Pooga et al. 1998, Nature Biotech.).

[0013] Another group of peptides that have surprisingly been shown to be able to transport across the cellular membrane, when coupled to a hydrophobic moiety, are modified receptors, in particular G protein coupled receptors, which are called pepducines (see e.g. WO0181408, Kuliopulos, et. al.). It was discovered that attachment of a hydrophobic moiety to peptides derived from the third intracellular loop of a 7™ receptor yields cellular translocation of said chimeric peptides and full agonist and/or antagonist of receptor G-protein signalling. These pepducines are membrane Inserting, membrane-tethered chimeric peptides and require the presence of their cognate receptor for activity and are highly selective for receptor type.

[0014] Although their astonishing transport capability has put CPPs into the focus of scientific interest for the last years, the most basic mechanisms of translocation for the different CPPs is still unknown. For instance, it is today still not known in the field, whether any particular secondary structure has to be induced in order to allow (energetically) a translocation, involving a concomitant transient membrane destabilization. It is clear, however, that the molecular details of the peptide-membrane interactions must be of fundamental importance for the translocation process.

[0015] The mechanism and requirements for internalisation have been studied on interactions between amphipathic α-helical peptides and lipid (bl)layers. The results of these studies often suggest tryptophan to be responsible for internalisation of a peptide, but although aromatic amino acids may be preferred in CPP sequences, they are not absolutely necessary for cell penetration.

[0016] Apart from the cell penetration capability, little correlation of structure or behaviour has been found between CPPs. Up to now, CPPs have thus not been designed in a rational manner, but have been found serendipitously. However, the sequences of CPPs published so far have a positive net-charge as the only common feature, giving a starting point for the prediction of CPP functionality in a given peptide sequence. Clearly, though, all sequences with a positive net-charge cannot be cell-penetrating, Indicating that further restrictions are needed to select CPPs with any certainty.

[0017] The present invention for the first time provides a novel general principle for predicting, designing, detecting and/or verifying a cell-penetrating peptide and/or a non-peptide analogue thereof, characterised by application of an assortment of novel prediction/selection criteria, optionally in combination with a method for testing the cellular penetration capacity of said found CPP in vitro and/or in vivo.

[0018] The present invention not only facilitates the much more effective and precise selection of CPP-active naturally occurring peptide fragments, that could maybe, but without doubt much more laboriously, have been found through trial and error, but also for the first time makes it at all possible to design such a desired CPP de novo. What is more, the present invention for the first time makes it possible to modify a correctly predicted naturally occurring CPP to improve its cell-penetrating effectiveness or to suit a secondary specific need, without loosing its cell-penetrating ability.

[0019] The present invention relates to a method for predicting, detecting, designing and/or verifying a cell-penetrating peptide (CPP) and/or a non-peptide analogue thereof, characterised by application of novel prediction/selection criteria, optionally in combination with a method for testing the cellular penetration capacity of said found CPP in vitro and/or in vivo.

[0020] A unifying aspect of the invention is thus directed to a method of identifying a cell-penetrating amino acid fragment, comprising assessing the bulk property value Z_{Σ} of said sequence, Z_{Σ} comprising at least 5 individual average interval values Z_{Σ1}; Z_{Σ2}; Z_{Σ3}; Z_{Σ4} and Z_{Σ5}, wherein Z_{Σ1}, Z_{Σ2}, Z_{Σ3}, Z_{Σ4} and Z_{Σ5} are average values of the respective descriptor values for the residues in said amino acid sequence, calculated with the formula

Z_{Σx}=(Zₓᵣₑₛ₁+Zₓᵣₑₛ₂ . . . +Zₓᵣₑₛₙ)/n

Z_{xresy} being the respective descriptor value for amino acid residue y comprised in the selected candidate fragment, and wherein the descriptor value of each residue corresponds to a Z₁, Z₂, Z₃, Z₄, and Z₅ descriptor value in a descriptor value scale, and wherein a cell-penetrating fragment is characterised by having a Z_{Σ} bulk property value essentially consisting of Individual average interval values, wherein Z_{Σ1}<0.2; Z_{Σ2}<1.1; Z_{Σ3}<−0.49; Z_{Σ4}<0.33; and Z_{Σ5}5<1.1 and Z_{Σ5}>0.12.

[0021] In a presently preferred embodiment of the invention, the above selection criteria are furthermore supplemented by a three graded system for successive narrowing of the descriptor interval, wherein two additional descriptors are introduced: Bulkₕₐ being the number of non-hydrogen atoms (e.g. C, N, S and O) in the side chains of the amino acids, and hdb standing for the number of accepting hydrogen bonds for the side chains of the amino acids.

[0022] The invention further relates to a method for using said novel CPP and/or to a novel and improved usage of a known CPP for improved cellular uptake of a cellular effector coupled to said CPP, and to a method for predicting, detecting, designing and/or verifying a novel cell-penetrating peptide (CPP) that has cellular effector activity itself. Furthermore, the present invention also relates to the use of said CPP and/or said improved usage of a known CPP for treating and/or preventing a medical condition, and/or for the manufacture of a pharmaceutical composition for treating a medical condition.

### DETAILED DISCLOSURE

[0023] The present invention for the first time discloses a novel general principle for predicting, designing, detecting and/or verifying a cell-penetrating peptide and/or a non-peptide analogue thereof, characterised by application of a novel prediction/selection criterion, optionally in combination with a method for in vivo and/or in vitro testing the cellular penetration capacity of said found CPP, either derived from a random de novo sequence or a naturally occurring protein, or a non-peptide analogue thereof.

### Evaluation of Predictors Relevant for the Function of Cell-Penetrating Peptides

[0024] In most peptide quantitative structure activity relationship studies (QSAR), a set of dimensionless values is used to describe a composite of the physical characteristics of the amino acids. In the classical literature, 3 values, Z₁, Z₂ and Z₃ are used for this purpose. Recently, Wold and colleagues expanded this descriptor set with 2 more: Z₄ and Z₅; and produced descriptor scales covering 87 natural and non-natural amino acids (Sandberg, M., Eriksson, L., Jonsson, J., Sjastrom, M., and Wold, S., New chemical descriptors relevant for the design of biologically active peptides. A multivariate characterization of 87 amino acids, J. Med. Chem., 41, 2481 (1998).

[0025] The novel methods described in the present application comprise using said expanded QSAR descriptor scales for the evaluation of CPP functionality in any given naturally occurring peptide or for de novo designing a CPP. Said new method thus opens a fast and reliable way to the production of CPPs, consisting of natural as well as non-natural building blocks. Moreover, a rigorous quantification of CPP uptake in a variety of physical tests as disclosed herein, even enables a QSAR model for tissue specificity.

TABLE 1A
Descriptor Scales for the
Characterized Coded and Non-Coded Amino Acids

| no. | abbrev | name^{a} | z₁ | z₂ | z₃ | z₄ | z₅ |
|---|---|---|---|---|---|---|---|
| 1 | Ala | alanine | 0.24 | −2.32 | 0.60 | −0.14 | 1.30 |
| 2 | Arg | arginine | 3.52 | 2.50 | −3.50 | 1.99 | −0.17 |
| 3 | Asn | asparagine | 3.05 | 1.62 | 1.04 | −1.15 | 1.61 |
| 4 | Asp | aspartic acid | 3.98 | 0.93 | 1.93 | −2.46 | 0.75 |
| 5 | Cys | cysteine | 0.84 | −1.67 | 3.71 | 0.18 | −2.65 |
| 6 | Gln | glutamine | 1.75 | 0.50 | −1.44 | −1.34 | 0.66 |
| 7 | Glu | glutamic acid | 3.11 | 0.26 | −0.11 | −3.04 | −0.25 |
| 8 | Gly | glycine | 2.05 | −4.06 | 0.36 | −0.82 | −0.38 |
| 9 | His | histidine | 2.47 | 1.95 | 0.26 | 3.90 | 0.09 |
| 10 | Ile | isoleucine | −3.89 | −1.73 | −1.71 | −0.84 | 0.26 |
| 11 | Leu | leucine | −4.28 | −1.30 | −1.49 | −0.72 | 0.84 |
| 12 | Lys | lysine | 2.29 | 0.89 | −2.49 | 1.49 | 0.31 |
| 13 | Met | methionine | −2.85 | −0.22 | 0.47 | 1.94 | −0.98 |
| 14 | Phe | Phenyl- | −4.22 | 1.94 | 1.06 | 0.54 | −0.62 |
| | | alanine | | | | | |
| 15 | Pro | proline | −1.66 | 0.27 | 1.84 | 0.70 | 2.00 |
| 16 | Ser | serine | 2.39 | −1.07 | 1.15 | −1.39 | 0.67 |
| 17 | Thr | threonine | 0.75 | −2.18 | −1.12 | −1.46 | −0.40 |
| 18 | Trp | tryptophan | −4.36 | 3.94 | 0.59 | 3.44 | −1.59 |
| 19 | Tyr | tyrosine | −2.54 | 2.44 | 0.43 | 0.04 | −1.47 |
| 20 | Val | valine | −2.59 | −2.64 | −1.54 | −0.85 | −0.02 |
| 21 | Acpa | Aminocaprylic | −4.38 | 1.92 | 2.14 | −2.61 | −4.93 |
| | | acid | | | | | |
| 22 | Aecys | (S)-2- | 3.03 | 2.60 | 0.50 | 2.65 | −1.55 |
| | | aminoethyl-L- | | | | | |
| | | cysteine•HCl | | | | | |
| 23 | Afa | aminophenylacetate | −3.51 | 2.93 | 2.94 | 1.17 | 1.22 |
| 24 | Aiba | -aminoiso- | −1.33 | −2.80 | −0.61 | −0.55 | 0.40 |
| | | bytyric acid | | | | | |
| 25 | Aile | alloisoleucine | −4.09 | −1.28 | −1.40 | −0.63 | 0.94 |
| 26 | Alg | L-allylglycine | −2.31 | −1.35 | −0.05 | 0.05 | 1.25 |
| 27 | Aba | aminobutyric | −1.22 | −2.44 | −0.38 | −0.51 | 0.65 |
| | | acid | | | | | |
| 28 | Aphe | p- | −0.62 | 3.28 | −0.11 | 3.24 | −1.51 |
| | | aminophenylalanine | | | | | |
| 29 | Bal | -alanine | 2.16 | −6.54 | −4.46 | −2.66 | −5.93 |
| 30 | Brphe | p- | −5.62 | 3.18 | 0.29 | 0.54 | −1.10 |
| | | bromophenylalanine | | | | | |
| 31 | Cha | cyclohexylalanine | −6.26 | 0.30 | −2.58 | −0.67 | 1.01 |
| 32 | Cit | citrulline | 1.31 | 1.47 | −2.76 | −2.10 | 0.42 |
| 33 | Clala | -chloroalanine | −0.66 | 0.30 | 2.65 | −0.47 | 1.92 |
| 34 | Cle | cycloleucine | −2.95 | −2.16 | −1.66 | −0.65 | 0.19 |
| 35 | Clphe | p- | −5.31 | 2.66 | 0.99 | 0.02 | −1.76 |
| | | chlorophenylalanine | | | | | |
| 36 | Cya | cysteic acid | 4.20 | 3.59 | 3.76 | −5.09 | −1.36 |
| 37 | Dab | 2,4-diamino- | 3.69 | −0.53 | −0.24 | 1.03 | −0.15 |
| | | butyric acid | | | | | |
| 38 | Dap | 2,3- | 4.34 | −0.54 | 0.96 | 1.04 | 0.24 |
| | | diaminopropionic | | | | | |
| | | acid | | | | | |
| 39 | Dhp | 3,4-dehydro- | −1.24 | 0.40 | 2.50 | 1.48 | 1.53 |
| | | proline | | | | | |
| 40 | Dhphe | 3,4- | −0.45 | 3.32 | −0.07 | −0.33 | −1.95 |
| | | dihydroxy- | | | | | |
| | | phenyl- | | | | | |
| | | alanine | | | | | |
| 41 | Fphe | p- | −4.58 | 2.26 | 1.28 | −0.70 | −1.58 |
| | | fluorophenylalanine | | | | | |
| 42 | Gaa | D-glucose- | 4.90 | 3.91 | −1.98 | −4.18 | 0.89 |
| | | aminic acid | | | | | |
| 43 | Hag | Homo- | 2.70 | 3.06 | −4.15 | 2.32 | −0.46 |
| | | arginine | | | | | |
| 44 | Hlys | hydroxyl- | 3.98 | 1.67 | −2.51 | 0.32 | 0.08 |
| | | lysine•HCl | | | | | |
| 45 | Hnvl | DL-hydroxynorvaline | −0.85 | −1.08 | −1.10 | −1.73 | −0.04 |
| 46 | Hog | Homoglutamine | 1.33 | 1.19 | −2.14 | −1.61 | 0.59 |
| 47 | Hoph | homophenylalanine | −5.86 | 2.95 | 0.37 | 1.03 | 0.32 |
| 48 | Hos | homoserine | 0.93 | −0.71 | −0.01 | −1.58 | 0.94 |
| 49 | Hpr | hydroxyl- | −0.24 | 2.27 | 2.47 | 0.18 | 2.94 |
| | | proiine | | | | | |
| 50 | Iphe | p-iodophenylalanine | −6.23 | 6.88 | 3.01 | 1.52 | 1.05 |
| 51 | Ise | isoserine | 3.78 | 2.82 | 2.55 | 0.27 | 2.96 |
| 52 | Mle | -methyl- | −5.40 | −2.07 | −2.86 | −1.15 | −0.27 |
| | | leucine | | | | | |
| 53 | Msmet | DL- | 1.22 | 1.89 | −0.91 | 3.75 | −1.25 |
| | | methionine-s-methyl- | | | | | |
| | | sulfoniumchloride | | | | | |
| 54 | 1Nala | 3-(1- | −5.67 | 6.31 | 3.43 | 3.51 | −0.47 |
| | | naphthyl)alanine | | | | | |
| 55 | 2Nala | 3-(2- | −6.48 | 6.37 | 2.81 | 3.02 | −0.49 |
| | | naphthyl)alanine | | | | | |
| 56 | Nle | norleucine (or | −4.33 | −1.30 | −1.54 | −0.85 | 0.74 |
| | | 2-aminohexanoic | | | | | |
| | | acid) | | | | | |
| 57 | Nmala | N-methyl- | −1.30 | −3.13 | −0.65 | 0.04 | −0.16 |
| | | alanine | | | | | |
| 58 | Nva | norvaline (or | −3.08 | −1.76 | −0.98 | −0.68 | 0.87 |
| | | 2- | | | | | |
| | | aminopentanoic | | | | | |
| | | acid) | | | | | |
| 59 | Obser | O- | −5.20 | 2.54 | −0.60 | 0.32 | −0.48 |
| | | benzylserine | | | | | |
| 60 | Obtyr | O-benzyl- | −7.71 | 7.33 | −1.81 | 2.39 | 0.11 |
| | | tyrosine | | | | | |
| 61 | Oetyr | O- | −5.62 | 3.33 | −0.75 | 0.71 | −1.17 |
| | | ethyltyrosine | | | | | |
| 62 | Omser | O- | −1.02 | −0.30 | 0.36 | −0.97 | 1.70 |
| | | methylserine | | | | | |
| 63 | Omthr | O-methythreonine | −1.75 | −1.63 | −1.55 | −1.60 | −0.20 |
| 64 | Omtyr | O-methyl- | −4.28 | 3.05 | −0.03 | 0.72 | −1.11 |
| | | tyrosine | | | | | |
| 65 | Orn | ornithine | 3.09 | 0.17 | −1.85 | 1.46 | 0.42 |
| 66 | Pen | penicillamine | 0.15 | −0.76 | 0.42 | 0.67 | −2.79 |
| 67 | Pga | pyroglutamic | −3.56 | 2.88 | 2.82 | 1.09 | 3.10 |
| | | acid | | | | | |
| 68 | Pip | pipecolic acid | −2.66 | −2.29 | −1.57 | 0.20 | −0.39 |
| 69 | Sar | sarcosine | 0.30 | −3.55 | −0.09 | 0.29 | −0.35 |
| 70 | Tfa | 3,3,3- | −1.47 | 1.11 | 3.66 | −4.70 | 2.13 |
| | | trifluoro- | | | | | |
| | | alanine | | | | | |
| 71 | Thphe | 6- | 1.29 | 5.13 | 0.89 | −0.93 | −2.06 |
| | | hydroxydopa | | | | | |
| 72 | Vig | L-vinylglycine | −0.81 | 1.17 | 3.54 | 1.20 | 3.43 |
| 73 | AasPa | (−)-(2R)-2- | 5.35 | 6.24 | 2.92 | −1.44 | −2.26 |
| | | amino-3-(2- | | | | | |
| | | aminoethyl- | | | | | |
| | | sulfonyl)propanoic | | | | | |
| | | acid | | | | | |
| | | dihydro- | | | | | |
| | | chloride | | | | | |
| 74 | Ahdna | (2S)-2- | −1.40 | 3.33 | −2.51 | −2.81 | 1.96 |
| | | amino-9- | | | | | |
| | | hydroxy-4,7- | | | | | |
| | | dioxano- | | | | | |
| | | nanoic acid | | | | | |
| 75 | Ahoha | (2S)-2- | 0.05 | 1.17 | −0.74 | −1.96 | 1.64 |
| | | amino-6- | | | | | |
| | | hydroxy-4- | | | | | |
| | | oxahexanoic | | | | | |
| | | acid | | | | | |
| 76 | Ahsopa | (−)-(2R)-2- | 3.01 | 5.82 | 3.85 | −3.86 | −1.72 |
| | | amino-3-(2- | | | | | |
| | | hydroxyethylsulfonyl)- | | | | | |
| | | propanoic | | | | | |
| | | acid | | | | | |

[0026] Using the expanded descriptor scales as listed in table 1A, the inventors assembled the 5 individual average interval values Z_{Σ1}; Z_{Σ2}; Z_{Σ3}; Z_{Σ4} and Z_{Σ5} of 4 known cell-penetrating peptides (CPPs): transportan, penetratin, pVEC and MAP; averaged over the total number of amino acids in the sequence.

[0027] Z_{Σ1}, Z_{Σ2}, Z_{Σ3}, Z_{Σ4} and Z_{Σ5} average values of the respective descriptor values for the residues in said amino acid sequence, calculated with the formula

Z_{Σx}=(Zₓᵣₑₛ₁+Zₓᵣₑₛ₂ . . . +Zₓᵣₑₛₙ)/n

obtained from the training set are listed in Table 1B.

TABLE 1B
Descriptor values for the QSAR training set

| Name | z₁ | z₂ | z₃ | z₄ | z₅ |
|---|---|---|---|---|---|
| Transportan | −0.728 | −0.992 | −0.575 | −0.308 | 0.64 |
| pVEC | 0.191 | −0.118 | −0.499 | −0.950 | 0.881 |
| penetratin | 0.157 | 1.073 | −0.586 | 0.167 | 0.296 |
| MAP | −0.948 | −1.03 | −1.071111 | 0.087 | 1.08 |

[0028] Consequently, the inventors were able to determine that a cell-penetrating amino acid fragment based on its Z_{Σ} bulk property value is characterised by having a Z_{Σ} bulk property value essentially consisting of individual average interval values, wherein Z_{Σ1}<0.2; Z_{Σ2}<1.1; Z_{Σ3}<−0.49; Z_{Σ4}<0.33; and Z_{Σ5}<1.1 and Z_{Σ5}>0.12.

[0029] The present invention thus discloses a first method for predicting, detecting and/or verifying a potential cell-penetrating peptide, comprising obtaining the amino acid sequence of a protein or peptide, selecting an amino acid sequence of at least one candidate fragment and assessing the bulk property value Z_{Σ} of said sequence, Z_{Σ1} comprising at least 5 individual average interval values Zen; Z_{Σ2}; Z_{Σ3}; Z_{Σ4} and Z_{Σ5}, wherein Z_{Σ1}, Z_{Σ2}, Z_{Σ3}, Z_{Σ4} and Z_{Σ5} are average values of the respective descriptor values for the residues in said amino acid sequence, calculated with the formula

Z_{Σx}=(Zₓᵣₑₛ₁+Zₓᵣₑₛ₂ . . . +Zₓᵣₑₛₙ)/fn

Z_{xresy} being the respective descriptor value for amino acid residue y comprised in the selected candidate fragment, and wherein the descriptor value of each residue corresponds to a Z₁, Z₂, Z₃, Z₄, and Z₅ descriptor value in a descriptor value scale as listed in table 1A, and identifying a cell-penetrating fragment from said at least one candidate fragment(s) based on its Z_{Σ} bulk property value. A cell-penetrating fragment is herein characterised by having a Z_{Σ} bulk property value essentially consisting of individual average interval values, wherein Z_{Σ1}<0.2; Z_{Σ2}<1.1; Z_{Σ3}<−0.49; Z_{Σ4}<0.33; and Z_{Σ5}<1.1 and Z_{Σ5}>0.12. Optionally, said cell-penetrating capacity of said identified peptide or protein and/or said fragment is further verified by in vitro and/or in vivo methods.

[0030] What is more, by determining for the first time the necessary qualities for a given peptide to display cell-penetrating activity, the present invention consequently also makes it possible to design an abundance of CPPs de novo, which do not necessarily have to be modelled on a naturally occurring counterpart, but can be designed to take into account any other desired parameter, such as obeying a certain size, insolubility in a given pH environment, degradability in the body, or biological effect on a given target cell/tissue or organ.

[0031] In another, presently preferred embodiment of the present invention, the above selection criteria are furthermore supplemented by a three grade system for successive narrowing of the descriptor interval, and two additional descriptors are introduced: Bulkₕₐ being the number of non-hydrogen atoms (C, A, S and O) in the side chains of the amino acids, and hdb standing for the number of accepting hydrogen bonds for the side chains of the amino acids.

TABLE 10
New descriptors:

| Amino acid | Bulkₕₐ | hdb |
|---|---|---|
| A | +1 | 0 |
| C | +2 | 0 |
| D | +4 | −4 |
| E | +5 | −4 |
| F | +7 | 0 |
| G | 0 | 0 |
| H | +6 | −2 |
| I | +4 | 0 |
| K | +5 | +3 |
| L | +4 | 0 |
| M | +4 | 0 |
| N | +4 | 0 |
| P | +3 | 0 |
| Q | +5 | 0 |
| R | +7 | +5 |
| S | +2 | −1 |
| T | +3 | −1 |
| V | +3 | −0 |
| W | +10 | +1 |
| Y | +8 | 0 |

[0032] The supplemented selection criteria uses Z_{Σ1}, Z_{Σ2}, Z_{Σ3}, Z_{ΣBulkha} and net hydrogen bond donation (hdb) and average hdb Z_{Σhdb}.

[0033] Bulkha is calculated as number of atoms in a side chain of the amino acids, not counting hydrogens. E.g. for CH₂CH₂OH (serine) Bulkₕₐ=2*C+1*O=3. Z_{ΣBukha} is the average value of the number of atoms in side chains of the amino acids, not counting hydrogens, for the residues in said amino acid sequence, calculated with the formula

Z_{Σ Bulkha}=(Z_{Bulkha res1}+Z_{Bulkha res2} . . . +Z_{Bulkha resn})/n

Z_{Bulkha resy} being the respective Bulkₕₐ value for amino acid residue y comprised in the selected candidate fragment.

[0034] hdb is calculated as the donated hydrogen bonds-accepted hydrogen bonds of side chains. E.g. N—H donates and C═O accepts. There are 2 uses of hydrogen bonds in the same set, the total (hdb) and the average (Z_{Σhdb}). Z_{Σhdb} is the average value of the number of donated hydrogen bonds-accepted hydrogen bonds of side chains, for the residues in said amino acid sequence, calculated with the formula

Z_{Σhdb}=(Z_{hdb res1}+Z_{hdb res2} . . . +Z_{hdb resn})/n

Z hdb resy being the respective hdb value for amino acid residue y comprised in the selected candidate fragment.

[0035] The three grades represent a successive narrowing of the descriptor interval. The performance of the grades can be seen from table 11. In short, the higher the grade, the lower the chance that a predicted CPP is a “false” positive. Thus, an amino acid sequence falling into grade 3 (>2), is to a substantially higher degree expected to exhibit a cell-penetrating ability when subsequently tested either in vivo or in vitro.

TABLE 11
Correctly predicted, in %, for the 3 grades

| | Grade is | | |
|---|---|---|---|
| | >0 | >1 | >2 |
| Positives | 100 | 72 | 41 |
| Negative | 50 | 61 | 82 |
| Unrelated | 80 | 90 | 100 |

[0036] Positives correspond to the CPP training-set, negatives correspond to the non functional CPP analogues training-set and unrelated correspond to hormone training-set. See table 12 “training sets”0.2

TABLE 12

| | Non-functional-CPP-analogues | |
|---|---|---|
| CPP training-set | training-set | Hormone training-set |
| GWTLNSAGYLLGKINLKALAALAKKIL | GWTLNSAGYLLGKFLPLILRKIVTAL | QNLGNQWAVGHLM |
| RQIKIWFQNRRMKWKK | LLGKINLKALAALAKIL | RPPGFSPFR |
| KLALKALKALKAALKLA | LNSAGYLLGKALAALAKKIL | LYGNKPRRPYIL |
| LLIILRRRIRKQAHAHSK | LNSAGYLLGKLKALAALAK | GWTNLSAGYLLGPPPGFSPFR |
| AGYLLGKINLKALAALAKKIL | GWTLNSAGYLLGKINLKAPAALAKKIL | GWTLNSAGYLLGPHAI |
| FLGKKFKKYFLQLLK | LLKTTALLKTTALLKTTA | HDEFERHAEGTFTSDVSSYLEGQAA |
| | | KEFIAWLVKGR |
| GRKKRRQRRRPQ | LLKTTELLKTTELLKTTE | WSYGLRPG |
| RRRRRRRRR | GRKKRRQPPQC | TIHCKWREKPLMLM |
| GWTLNSAGYLLGKINLKALAALAKKLL | FITKALGISYGRKKRRQC | FVPIFTHSELQKIREKERNKGQ |
| GWTLNPAGYLLGKINLKALAALAKKIL | QNLGNQWAVGHLM | AGCKNFFWKTFTSC |
| GWTLNPPGYLLGKINLKALAALAKKIL | RPPGFSPFR | CYFQNCPRG |
| LNSAGYLLGKINLKALAALAKKIL | LYGNKPRRPYIL | |
| GWTLNSAGYLLGKLKALAALAKKIL | GWTNLSAGYLLGPPPGFSPFR | |
| RRWRRWWRRWWRRWRR | GIWFAYSRGHFRTKKGT | |
| GWTLNSKINLKALAALAKKIL | LRKKKKKH | |
| LNSAGYLLGKLKALAALAKIL | VATIKSVSFYTRK | |
| AGYLLGKLKALAALAKKIL | KKKQYTSIHHGVVEVD | |
| KLALKLALKALKAALK | RQIKIFFQNRRMKFKK | |
| KLALKLALKAWKAALKLA | KKLSECLKRIGDELDS | |
| KITLKLAIKAWKLALKAA | PVVHLTLRQAGDDFSR | |
| KALAKALAKLWKALAKAA | EILLPNNYNAYESYKYPGMFIALSK | |
| KALKKLLAKWAAAKALL | IAARIKLRSRQHIKLRHL | |
| KLAAALLKKWKKLAAALL | | |
| LKTLATALTKLAKTLTTL | | |
| KALAALLKKWAKLLAALK | | |
| KLALKLALKALQAALQLA | | |
| KLALQLALQALQAALQLA | | |
| QLALQLALQALQAALQLA | | |
| LLKKRKVVRLIKFLLK | | |
| RLIKTLKTLLQKRKTL | | |
| NAKTRRHERRRKLAIER | | |
| LLIILRRPIRKQAHAHSK | | |
| LLIILRARIRKQAHAHSK | | |
| LLIILRRRIRKQAHAHSA | | |
| TRRNKRNRIQEQLNRK | | |
| GGRQIKIWFQNRRMKWKK | | |
| MGLGLHLLVLAAALQGAKKKRKV | | |
| RKKRRQRRR | | |
| GRKKRRQRRRPPC | | |
| GRKKRRQRRRC | | |
| GRKKRRQRRPPQC | | |
| RQPKIWFPNRRMPWKK | | |
| RQIKIWFPNRRMKWKK | | |
| TRQARRNRRRWRERQR | | |
| KMTRAQRRAAARRNRWTAR | | |
| RVIRVWFQNKRCKDKK | | |
| RKSSKPIMEKRRRAR | | |
| YGRKKRRQRRRPPLRKKKKKH | | |
| RQIKIWFQNRRMKWKKLRKKKKKH | | |
| VQAILRRNWNQYKIQ | | |
| MAQDIISTIGDLVKWIIDTVNKFTKK | | |
| KRPAATKKAGQAKKKKL | | |
| RRRRNRTRRNRRRVR | | |
| TRRQRTRRARRNR | | |
| MDAQTRRRERRAEKQAQWKAAN | | |
| TAKTRYKARRAELIAERR | | |
| RQGAARVTSWLGRQLRIAGKRLEGR | | |
| SK | | |
| RQGAARVTSWLGRQLRIAGKRLEGR | | |
| GAARVTSWLGRQLRIAGKRLEGRSK | | |
| RVTSWLGRQLRIAGKRLEGRSK | | |
| SWLGRQLRIAGKRLEGRSK | | |
| GRQLRIAGKRLEGRSK | | |
| KCRKKKRRQRRRKKLSECLKRIGDE | | |
| LDS | | |
| KCRKKKRRQRRRKKPVVHLTLRQAG | | |
| DDFSR | | |
| AAVALLPAVLLALLAPVQRKRQKLMP | | |
| RRRRRRWGRWGRWGRWGRWGR | | |
| WGRPKKKRKV | | |
| ALWMTLLKKVLKAAAKAALNAVLVG | | |
| ANA | | |
| ALWKTLLKKVLKA | | |
| PKKKRKVALWKTLLKKVLKA | | |
| RQARRNRRRALWKTLLKKVLKA | | |
| RQARRNRRRC | | |
| RRLSYSRRRF | | |
| RGGRLSYSRRRFSTSTGR | | |
| YGRKKRRQRRRSVYDFFVWL | | |
| YGRKKRRQRRRGTSSSSDELSWIIE | | |
| LLEK | | |
| IVIAKLKA | | |

[0037] As described previously for the first set of selection criteria, the values for the peptide are averaged (divided by number of amino acid residues in the peptide). Z_{Σ1}, Z_{Σ2}, Z_{Σ3}, Z_{ΣBulkha}, Z_{Σrhdb}

[0038] The intervals for the different grades are:

3: Preferred: Z_{ΣBulkha}>3.1 and Z_{ΣBulkha}<8.13 and Z_{Σ1}>−1.25 and Z_{Σ1}<3.52 and Z_{Σ2}>−3.9 and Z_{Σ2}<3.1 and Z_{Σ3}<−0.5 and Z_{Σ1}3>−3.51 and Z_{Σrhdb}>−0.115 and Z_{Σhdb}<5.1 and hdb>0 and hdb<84
2: More preferred: Z_{ΣBulkha}>3.2 and Z_{ΣBulkha}<5.9 and Z_{Σ1}>−1.25 and Z_{Σ1}<1.92 and Z_{Σ2}>−1.22 and Z_{Σ2}<1.29 and Z_{Σ3}<−0.5 and Z_{Σ3}>−1.94 and Z_{Σhdb}>0.28 and Z_{Σhdb}<2 and hdb>5 and hdb<30
1: Most preferred: Z_{ΣBulkha}>3.2 and Z_{ΣBulkha}<4.8 and Z_{Σ1}>−1.1 and Z_{Σ1}<1.92 and Z_{Σ2}>−1.1 and Z_{Σ2}<0 and Z_{Σ3}<−0.55 and Z_{Σ3}>−1.94 and Z_{Σhdb}>−0.28 and Z_{Σhdb}<1.57 and hdb>7 and hdb<25

[0039] As has been demonstrated for several of the serendipitously found CPPs, as for e.g. Transportan, penetratin and tat, truncation of the original sequence can still give an active CPP. This indicates that the previously found CPPs might contain a shorter sequence acting as the transporter “motor”. Taking this into account, a second aspect of the invention is directed to a method for checking cellular penetration properties of a peptide, or a shorter fragment of a peptide, such as from a known CPP, comprising the steps of obtaining the amino acid sequence of the peptide, assessing the bulk property value Z_{Σ} of said sequence, Z_{Σ} comprising at least 5 individual average interval values Z_{Σ1}; Z_{Σ2}; Z_{Σ3}; Z_{Σ4} and Z_{Σ5}, wherein Z_{Σ1}, Z_{Σ2}, Z_{Σ3}, Z_{Σ4} and Z_{Σ5} are average values of the respective descriptor values for the residues in said amino acid sequence, calculated with the formula

Z_{Σx}=(Zₓᵣₑₛ₁+Zₓᵣₑₛ₂ . . . +Zₓᵣₑₛₙ)/n

Z_{xresy} being the respective descriptor value for amino acid residue y comprised in the selected candidate fragment, and wherein the descriptor value of each residue corresponds to a Z₁, Z₂, Z₃, Z₄, and Z₅ descriptor value in a descriptor value scale as listed in table 1A, and checking the cell-penetrating properties of said peptide based on its Z₄ bulk property value, wherein a cell-penetrating fragment is characterised by having a Z₄ bulk property value essentially consisting of individual average interval values, wherein Z_{Σ}Z_{Σ1}<0.2; Z_{Σ2}<1.1; Z_{Σ3}<−0.49; Z_{Σ4}<0.33; and Z_{Σ5}<1.1 and Z_{93 5}>0.12, synthesizing or Isolating a peptide comprising the amino acid sequence of said Identified cell-penetrating peptide, and optionally verifying the protein-mimicking functionality and/or the cell-penetrating capacity of the synthesized or Isolated peptide by in vitro and/or in vivo methods. And optionally again, one may supplement the above selection criteria by a three grade system for successive narrowing of the descriptor interval, introducing two additional descriptors as described: Bulkₕₐ being the number of non-hydrogen atoms (C, N, S and O) in the side chains of the amino acids, and hdb standing for the number of accepting hydrogen bonds for the side chains of the amino acids.

[0040] Also comprised in the present invention is a method for producing a cell-penetrating and functional protein-mimicking peptide, essentially comprising the steps of selecting a functional protein of interest, obtaining the amino acid sequence of said selected protein, selecting the amino acid sequence of at least one candidate fragment corresponding to an intracellular part of said protein, assessing the bulk property value Z_{Σ4} of said sequence, Z_{Σ4} comprising at least 5 individual average interval values Z_{Σ1}; Z_{Σ2}; Z_{Σ3}; Z_{Σ4} and Z_{Σ5}, wherein Z_{Σ1}, Z_{Σ2}, Z_{Σ3}, Z_{Σ4} and Z_{Σ5} are average values of the respective descriptor values for the residues in said amino acid sequence, calculated with the formula

Z_{Σx}=(Zₓᵣₑₛ₁+Zₓᵣₑₛ₂ . . . +Zₓᵣₑₛₙ)/n

[0041] Z_{xresy} being the respective descriptor value for amino acid residue y comprised in the selected candidate fragment, and wherein the descriptor value of each residue corresponds to a Z₁, Z₂, Z₃, Z₄, and Z₅ descriptor value in a descriptor value scale as listed in table 1A, and identifying a cell-penetrating fragment from said at least one candidate fragment(s) based on its Zy bulk property value, wherein a cell-penetrating fragment is characterised by having a Z bulk property value essentially consisting of individual average interval values, wherein Z_{Σ1}<0.2; Z_{Σ1}2<1.1; Z_{Σ3}<−0.49; Z_{Σ4}<0.33; and Z_{Σ5}<1.1 and Z_{Σ5}>0.12. Finally, synthesizing or isolating a peptide comprising the amino acid sequence of said Identified cell-penetrating peptide, and optionally, verifying the protein-mimicking functionality and/or the cell-penetrating capacity of the synthesized or Isolated peptide by in vitro and/or in vivo methods. And optionally, supplementing the above selection criteria by a three grade system for successive narrowing of the descriptor interval, introducing two additional descriptors as described: Bulkₕₐ being the number of non-hydrogen atoms (C, N, S and O) in the side chains of the amino acids, and hdb standing for the number of accepting hydrogen bonds for the side chains of the amino acids.

[0042] In yet another preferred embodiment, the present invention comprises designing and producing a CPP peptide or fragment de novo, wherein said fragment can either resemble a naturally occurring CPP, and/or be designed to mimic a naturally occurring cellular effector peptide, or be designed essentially randomly, mainly taking into account a predicted cell penetration capability of a random amino acid sequence of a given length, comprising the steps of designing the amino acid sequence of said sequence, assessing the bulk property value Z_{Σ} of said sequence, Z_{Σ} comprising at least 5 Individual average interval values Z_{Σ1}; Z_{Σ2}; Z_{Σ3}; Z_{Σ4} and Z_{Σ5}, wherein Z_{Σ1}: Z_{Σ2}, Z_{Σ3}, Z_{Σ4} and Z_{Σ5} are average values of the respective descriptor values for the residues in said amino acid sequence, calculated with the formula

Z_{Σx}=(Zₓᵣₑₛ₁+Zₓᵣₑₛ₂ . . . +Zₓᵣₑₛₙ)/n

Z_{xresy} being the respective descriptor value for amino acid residue y comprised in the selected candidate fragment, and wherein the descriptor value of each residue corresponds to a Z₁, Z₂, Z₃, Z₄, and Z₅ descriptor value in a descriptor value scale as listed in table 1A, and checking the cell-penetrating properties of said peptide based on its Z_{Σ} bulk property value, wherein a cell-penetrating fragment is characterised by having a Z_{Σ} bulk property value essentially consisting of Individual average interval values, wherein Z_{Σ1}<0.2; Z_{Σ2}<1.1; Z_{Σ3}<−0.49; Z_{Σ4}<0.33; and Z_{Σ5}<1.1 and Z_{Σ5}>0.12, synthesizing or isolating a peptide comprising the amino acid sequence of said identified cell-penetrating peptide, and optionally verifying the protein-mimicking functionality and/or the cell-penetrating capacity of the synthesized or isolated peptide by in vitro and/or in vivo methods. And optionally again, supplementing the above selection criteria by a three grade system for successive narrowing of the descriptor interval, introducing two additional descriptors as described: Bulkₕₐ being the number of non-hydrogen atoms (C, N, S and O) in the side chains of the amino acids, and hdb standing for the number of accepting hydrogen bonds for the side chains of the amino acids.

[0043] Another, equally preferred, embodiment of the present invention relates to a method for producing an artificial cell-penetrating peptide and/or an artificial cell-penetrating and functional protein-mimicking peptide, comprising the steps of designing at least one artificial peptide and/or peptide fragment, assessing the bulk property value Z_{Σ} of the amino acid sequence of said artificial peptide or peptide fragment, Z_{Σ} comprising at least 5 individual average interval values Z_{Σ1}; Z_{Σ2}; Z_{Σ3}; Z_{Σ4} and Z_{Σ5} wherein Z_{Σ1}, Z_{Σ2}, Z_{Σ2}, Z_{Σ3}, Z_{Σ4} and Z_{Σ5} are average values of the respective descriptor values for the residues in said amino acid sequence, calculated with the formula

Z_{Σx}=(Zₓᵣₑₛ₁+Zₓᵣₑₛ₂ . . . +Zₓᵣₑₛₙ)/fn

Z_{xresy} being the respective descriptor value for amino acid residue y comprised in the selected candidate fragment, and wherein the descriptor value of each residue corresponds to a Z₁, Z₂, Z₃, Z₄, and Z₅ descriptor value in a descriptor value scale as listed in table 1A, and checking the cell-penetrating properties of said artificial peptide and/or peptide fragment based on its Z_{Σ} bulk property value, wherein a cell-penetrating fragment is characterised by having a Z_{Σ} bulk property value essentially consisting of individual average interval values, wherein Z_{Σ1}<0.2; Z_{Σ2}<1.1; Z_{Σ3}<−0.49; Z_{Σ5}<0.33; and Z_{Σ5}<1.1 and Z_{Σ5}>0.12. Further synthesizing said peptide and/or peptide fragment comprising the amino acid sequence identified as cell penetrating, and optionally verifying the protein-mimicking functionality and/or the cell-penetrating capacity of the synthesized peptide and/or peptide fragment by in vitro and/or in vivo methods. And optionally again, supplementing the above selection criteria by a three grade system for successive narrowing of the descriptor interval, introducing two additional descriptors as described: Bulkₕₐ being the number of non-hydrogen atoms (C, N, S and O) in the side chains of the amino acids, and hdb standing for the number of accepting hydrogen bonds for the side chains of the amino acids.

[0044] In the present context, a cell-penetrating fragment is characterised by having a Z_{Σ} bulk property value essentially consisting of individual average Interval values, wherein most preferably Z_{Σ1}<0.2; Z_{Σ2<1.1}; Z_{Σ3}<−0.49; Z₄<0.33; and Z_{Σ5}<1.1 and Z_{Σ5}>0.12. In alternative embodiments of the invention, said individual average values can comprise

Z_{Σ1}<0.3, such as Z_{Σ1}<0.21, Z_{Σ1}<0.22, Z_{Σ1}<0.23, Z_{Σ1}<0.24, Z_{Σ1}<0.25, Z_{Σ1}<0.26,

### Z_{Σ1}<0.27, Z_{Σ1}<0.28, or Z_{Σ1}<0.29;

[0045] Z_{Σ2}2<1.2, such as Z_{Σ2}<1.11, Z_{Σ2}<1.12, Z_{Σ2}<1.13, Z_{Σ2<1.14}, Z_{Σ2}<1.15, Z_{Σ2}<1.16, Z_{Σ2}<1.17, Z_{Σ2}<1.18, or Z_{Σ2}<1.19;
Z_{Σ3}<−0.39, such as Z_{Σ3}<−0.4, Z_{Σ3}<−0.41, Z_{Σ3}<−0.42, Z_{Σ3}<−0.43, Z_{Σ3}<−0.45, Z_{Σ3}<0.46, Z_{Σ3}<−0.47, or Z_{Σ3}<−0.48;
Z_{Σ4}<0.43, such as Z_{Σ4}<0.34, Z_{Σ4}<0.35, Z_{Σ4}<0.36, Z_{Σ4}<0.37, Z_{Σ4}<0.38, Z_{Σ4}<0.39, Z_{Σ4}<0.4, Z_{Σ4}<0.41, or Z_{Σ4}<0.42;
Z_{Σ5}<1.05 and Z_{Σ5}>0.22, such as Z_{Σ5}<1.04 and Z_{Σ5}>0.21, Z_{Σ5}<1.03 and Z_{Σ5}>0.20,

### Z_{Σ5}<1.02 and Z_{Σ5}>0.19, Z_{Σ5}<1.01 and Z_{Σ5}>0.11, Z_{Σ5}<1.00 and Z_{Σ5}>0.17, Z_{Σ5}<0.99 and

### Z_{Σ5}>0.16, Z_{Σ5}<0.98 and Z_{Σ5}>0.15, Z_{Σ}<0.97 and Z_{Σ5}>0.14, or Z_{Σ5}<0.96 and Z_{Σ5}>0.13.

[0046] In a presently preferred embodiment, said cell-penetrating fragment is further, or alternatively characterised by descriptor values as described above, essentially consisting of individual average interval values, wherein most preferably Z_{ΣBulkha}>3.1 and Z_{ΣBulkha}<8.13, and Z_{Σ1}>−1.25 and Z_{Σ1}<3.52, and Z_{Σ2}>−3.9 and Z_{Σ2}<3.1, and Z_{Σ3}<−0.5 and Z_{Σ3}>−3.51, and Z_{Σhdb}>−0.115 and Z_{Σhdb}<5.1, and hdb>0 and hdb<84;

or Z_{ΣBulkha}>3.2 and Z_{ΣBulkha}<5.9, and Z_{Σ1}>−1.25 and Z_{Σ1}<1.92, and Z_{Σ2}>−1.22 and Z_{Σ2}<1.29, and Z_{Σ3}<−0.5 and Z_{Σ3}>−1.94, and Z_{Σhdb}>0.28 and Z_{Σhdb}<2, and hdb>5 and hdb<30,
and most preferred; Z_{ΣBulkha}>3.2 and Z_{ΣBulkha}<4.8, and Z_{Σ1}>−1.1 and Z_{Σ1}<1.92, and Z_{Σ2}>−1.1 and Z_{Σ2}<0, and Z_{Σ3}<−0.55 and Z_{Σ3}>−1.94, and Z_{Σhdb}>−0.28 and Z_{Σhdb}<1.57, and hdb>7 and hdb<25.

[0047] Additionally, any conservative variant of the sequence of a CPP found, designed and/or verified by a method according to the present invention, and any cell membrane penetrating analogues of a CPP found, designed and/or verified by a method according to the present invention, is by virtue of its functional relationship to said CPP considered to be inside the scope of the present invention.

[0048] A conservative variant of a sequence is in the present context defined as an amino acid sequence which is conserved at least 70%, such as 75%, 76%, 77%, 78%, 79%, 80%, 81%, 82%, 83%, 84%, 85%, 86%, 87%, 88%, 89%, 90%, 91%, 92%, 93%, 94%, 95%, 96%, 97%, 98%, or 99%, when comparing variants of the same amino acid sequence between different species. The degree of conservation of a variant can, as is well known in the field, be calculated according to its derivation of PAM (see Dayhoff, Schwartz, and Orcutt (1978) Atlas Protein Seq. Struc. 5:345-352), or based on comparisons of Blocks of sequences derived from the Blocks database as described by Henikoff and Henikoff (1992) Proc Natl Acad Sci USA 89(22):10915-9.

[0049] Conservative substitutions may be made, for example according to table 17 below. Amino acids in the same block in the second column and preferably in the same line in the third column may be substituted for each other:

TABLE 17

| | | |
|---|---|---|
| ALIPHATIC | Non-polar | G A P |
| | | I L V |
| | Polar - uncharged | C S T M |
| | | N Q |
| | Polar - charged | D E |
| | | K R |
| AROMATIC | | H F W Y |

[0050] Such replacements may also be made by unnatural amino acids include; alpha* and alpha-disubstituted* amino acids, N-alkyl amino acids*, lactic acid*, halide derivatives of natural amino acids such as trifluorotyrosine*, p-Cl-phenylalanine*, p-Br-phenylalanine*, p-I-phenylalanine*, L-allyl-glycine*, β-alanine*, L-α-amino butyric acid*, L-g-amino butyric acid*, L-α-amino isobutyric acid*, L-e-amino caproic acid#, 7-amino heptanoic acid*, L-methionine sulfone#*, L-norleucine*, L-norvaline*, p-nitro-L-phenylalanine*, L-hydroxyproline#, L-thloproline*, methyl derivatives of phenylalanine (Phe) such as 4-methyl-Phe*, pentamethyl-Phe*, L-Phe (4-amino)#, L-Tyr (methyl)*, L-Phe (4-isopropyl)*, L-Tlc (1,2,3,4-tetrahydroisoquinoline-3-carboxyl acid)*, L-diaminopropionic acid # and L-Phe (4-benzyl)*. The notation* is herein utilised to indicate the hydrophobic nature of the derivative whereas # is utilised to indicate the hydrophilic nature of the derivative, #* indicates amphipathic characteristics.

[0051] Variant amino acid sequences may include suitable spacer groups that may be inserted between any two amino acid residues of the sequence including alkyl groups such as methyl, ethyl or propyl groups in addition to amino acid spacers such as glycine or b-alanine residues. A further form of variation, involves the presence of one or more amino acid residues in peptoid form, which will be well understood by those skilled in the art. For the avoidance of doubt, “the peptoid form” is used to refer to variant amino acid residues wherein the a-carbon substituent group is on the residue's nitrogen atom rather than the α-carbon. Processes for preparing peptides in the peptoid form are known in the art, see for example, Simon R J et al., PNAS (1992) 89 (20), 9367-9371 and Horwell D C, Trends Biotechnol. (1995) 13(4), 132-134.

[0052] Peptides of the invention may be in a substantially isolated form. It will be understood that the peptide may be mixed with carriers or diluents, which will not interfere with the intended purpose of the peptide and still be regarded as substantially Isolated. A peptide of the invention may also be in a substantially purified form, in which case it will generally comprise the peptide or a fragment thereof in a preparation in which more than 90%, e.g. 95%, 98% or 99% of the protein in the preparation is a peptide of the invention.

[0053] Furthermore, any amino acid sequence being at least 70% identical, such as being at least 72%, 75%, 77%, 80%, 82%, 85%, 87%, 90%, 91%, 92%, 93%, 94%, 95%, 96%, 97%, 98%, or 99% identical with the amino acid sequence of a CPP, characterised by having a Z_{Σ} bulk property value essentially consisting of individual average interval values, wherein Z_{Σ1}<0.2; Z_{Σ2}<1.1; Z_{Σ3}<−0.49; Z_{Σ4}<0.33; and Z_{Σ5}<1.1 and Z_{Σ5}>0.12, or fitting into grade 1, 2, or 3, assessed as discussed above, found, designed and/or verified by a method according to the present invention, is also considered to be inside the scope of the present invention.

[0054] By a polypeptide having an amino acid sequence at least, for example 95% identical to a reference amino acid sequence, is intended that the amino acid sequence of the polypeptide is identical to the reference sequence except that the amino acid sequence may include up to 5 point mutations per each 100 amino acids of the reference amino acid sequence. In other words, to obtain a polypeptide having an amino acid sequence at least 95% identical to a reference amino acid sequence: up to 5% of the amino acids in the reference sequence may be deleted or substituted with another amino acid, or a number of amino acids up to 5% of the total amino acids in the reference sequence may be inserted into the reference sequence. These mutations of the reference sequence may occur at the amino or carboxy terminal positions of the reference amino acid sequence or anywhere between those terminal positions, interspersed either individually among amino acids in the reference sequence or in one or more contiguous groups within the reference sequence.

[0055] In the present invention, a local algorithm program is best suited to determine identity. Local algorithm programs, such as (Smith-Waterman) compare a subsequence in one sequence with a subsequence in a second sequence, and find the combination of subsequences and the alignment of those subsequences, which yields the highest overall similarity score. Internal gaps, if allowed, are penalized. Local algorithms work well for comparing two multidomain proteins, which have a single domain, or just a binding site in common.

[0056] Methods to determine Identity and similarity are codified in publicly available programs. Preferred computer program methods to determine identity and similarity between two sequences include, but are not limited to, the GCG program package (Devereux, J., et al., Nucleic Acid Research 12 (1):387 (1984)), BLASTP, BLASTN, and FASTA (Altschul, S. F., et al., J. Molec. Bio 1.215:403-410 (1990)). The BLASTX program is publicly available from NCBI and other sources (BLAST Manual, Altschul, S. F., et al., NCBI NLM NIH Bethesda, Md. 20894; Altschul, S. F., et al., J. Molec. Bio 1.215:403-410 (1990)). Each sequence analysis program has a default scoring matrix and default gap penalties. In general, a molecular biologist would be expected to use the default settings established by the software program used.

[0057] In the present context, an amino acid is any organic compound containing an amino (—NH₂) and a carboxyl (—COOH) group. Amino acids can be in either L- or D-form. There are at present 22 known coded α-amino acids from which proteins are synthesized during ribosomai transiation of mRNA. Additionally, a vast number of non-coded amino adds are constantly emerging, of which 56 examples are given in table 1A. Both coded and non-coded amino acids can of course be part of the amino acid sequences, peptide fragments, peptides, proteins and/or polypeptides included in the present invention.

[0058] Amino acid sequence is in the present context the precisely defined linear order of amino acids (including both coded and/or non-coded amino acids) in a peptide fragment, peptide, protein or polypeptide.

[0059] The term non-peptide analogue is in the present context employed to describe any amino acid sequence comprising at least one non-coded amino acid and/or having a backbone modification resulting in an amino acid sequence without a peptide linkage, i.e. a CO—NH bond formed between the carboxyl group of one amino acid and the amino group of another amino acid.

[0060] Furthermore, the present amino acid sequences may either be amidated or occur as free acids.

[0061] Reporter groups of different characters can be coupled to a putative CPP in order to estimate its cellular translocation and efficiency, such as biotin and different fluorophores, e.g. fluorescein, aminobenzoic acid, and rhodamines.

[0062] The present invention discloses a method for verifying the cell-penetrating capacity of a novel CPP and/or a known but improved CPP, which is efficient, fast and reliable, for screening the cellular uptake of a broad variety of CPPs in vitro and in vivo. The present invention thus in one embodiment relates to a method, wherein the cell-penetrating capacity of a peptide and/or peptide fragment is verified by monitoring the cellular uptake rate of said peptide into said cell after exposure to said peptide and/or peptide fragment. In a particularly applicable embodiment, the invention relates to a method, wherein the CPP itself is coupled to a traceable marker, such as a fluorescence detection marker, which can be detected by staining the target cells immunohistologically after cellular uptake has taken place.

[0063] Illustrative examples of said methods are described in example 10 and In example 16.

[0064] One aspect of the present invention thus comprises a method for screening the cellular uptake of a broad variety of CPPs in vitro, wherein cells are grown on glass cover slips to suitable, such as 50%, density, whereupon the media is changed to serum free and a blotinylated peptide solution is added. The cells are then incubated, washed, fixed and the peptides are visualised by staining with, e.g. avidin-FITC, or streptavidin-TRITC, and the cell nuclei are counterstained, e.g. with Hoechst. Images are preferably obtained with a fluorescence microscope and evaluated.

[0065] The term “cell-penetrating capacity” of a peptide will henceforth be used synonymously to its capability to translocate across the plasma membrane into either cytoplasmic and/or nuclear compartments of eukaryotic and/or prokaryotic cells, such as into cytoplasm, nucleus, lysosome, endoplasmatic reticulum, golgi apparatus, mitocondria and/or chloroplast, seemingly energy-independently. Additionally, the term “cell-penetrating capacity” of a peptide can in some aspects of the invention also be used synonymously to indicate transcellular or transmembrane transport, and thus also stand for e.g. the capability to translocate across an epithelial membrane, such as across the epithelium in the intestinal/buccal system, the mucosa in the mouth, lung, rectum or nose, or the blood-brain barrier of a mammal.

[0066] A detected or de novo designed and verified peptide, displaying cellular penetration capacity according to the present invention is in the present context defined as a “cell penetrating peptide (CPP)” and can e.g. be used for intracellular delivery of macromolecules, such as polypeptides and/or oligonucleotides with molecular weights several times greater than its own.

[0067] In general, cellular delivery using a cell-penetrating peptide and/or a non-peptide analogue thereof is non-invasive, energy-independent, efficient for a broad range of cell types and/or a broad variety of cargo, applicable to cells en masse, non-saturable, and/or receptor independent.

[0068] CPPs detected or de novo designed, and/or verified by a method disclosed in the present application will be useful for the transport of hydrophilic macromolecules into the cytoplasmic and nuclear compartments of a living cell and/or microorganism, without permanently disrupting the plasma membrane, as well as for delivering hydrophilic macromolecules across the blood-brain barrier, permitting e.g. the intracellular transport of conjugated oligopeptides and oligonucleotides and drugs.

[0069] Thus, a cell-penetrating peptide and/or a non-peptide analogue thereof might in the present context be used as a delivery vector for any pharmacologically interesting substance, such as a peptide, polypeptide, protein, small molecular substance, drug, mononucleotide, oligonucleotide, polynucleotide, antisense molecule, double stranded as well as single stranded DNA, RNA and/or any artificial or partly artificial nucleic acid, e.g. PNA, as well as a research tool for delivering e.g. tags and markers and/or for changing membrane potentials and/or properties.

[0070] A CPP found or designed and/or produced according to the present invention can therefore be of use as a vector for the delivery of a hydrophilic biomolecule and/or drug into cytoplasmic and nuclear compartments of a cell and/or a tissue, both in vivo and in vitro.

[0071] When covalently linked with a cargo, including any peptide, polypeptide, protein, small molecular substance, drug, polypeptide and oligonucleotide, with many times its own molecular mass, a CPP might still be able to translocate.

[0072] What is more, a CPP can in itself display intra and/or extracellular effector activity, thus unction as a cell-penetrating functional protein-mimicking peptide, or even display a new, on-predictable function when designed de novo.

[0073] A variety of different molecules have been presented in the technical field that are generated from naturally occurring cellular effectors, and that have been shown to essential retain the biological activity of its original counterpart after translocation into target cells (see e.g. Kuliopulos et al. WO0181408; or Covic et al., 2002, PNAS Vol. 99). Nonetheless, none of these have simultaneously been both CPP and biological effector. Typically, a truncated peptide is coupled to a known CPP or to a hydrophobic moiety, thus creating the necessity of various intermediate synthesis steps and a costly and complicated production.

[0074] A cell-penetrating, functional protein-mimicking peptide in the present context is a peptide that will, due to its Internal CPP capacity, be Internalised into a host cell, and once inside the host cell, will display a mimicking activity of either the original protein or peptide that it has been generated from, or a protein or peptide of choice to that it has been designed to mimic. A cell-penetrating, functional protein-mimicking peptide is thus defined as a CPP that in itself has effector activity and that will activate or inactivate an internal and/or external signalling pathway and/or cascade, resembling the activated functional protein that it is derived from. It is therefore characterised as having both cellular penetrating capability and effector and/or functional protein-mimicking activity.

[0075] A cellular effector can herein be either an intracellular and/or extracellular effector and is in the present context defined as a structure that produces a cellular effect, such as a contraction, secretion, electrical impulse, or activation or Inactivation of an intracellular and/or extracellular signalling cascade, or that induces the up regulation of a cellular level of an mRNA and/or a protein, in response to a stimulation by said effector. A typical effector is in the present context selected from the group consisting of a metabolite, an antagonist, an agonist, a receptor ligand, a receptor coupled protein, an activated receptor, an enzyme inhibitor, activator/inactivator and/or stimulator, a kinase, a phosphatase, an enhancer, or a silencer, a transcription factor, a transporter and/or a transmitter, a hormone, a channel, an ion, a prion, and a viral protein.

[0076] A typical CPP detected and verified by a method according to the present invention can be derived from or designed to resemble a broad variety of proteins and/or peptides. In one embodiment, said protein and/or peptide is a transmembrane protein, and In yet another embodiment, it can as well be a non-membrane-associated protein.

[0077] Consequently, one aspect of the present invention concerns a cell-penetrating functional protein-mimicking peptide, detected and verified by a method according to the present invention that is derived from a transcription factor or designed to closely resemble a transcription factor or at least a functional fragment of a transcription factor.

[0078] A preferred embodiment of the present invention thus relates to a CPP comprised in any of SEQ.ID.NO. 18399-31839, which are detected and verified by a method according to the present invention and as described above, and wherein each CPP is derived from a naturally occurring transcription factor.

[0079] Presently most preferred, though, the CPP detected and verified by a method according to the present invention, is derived from or designed to resemble a transmembraneous protein, such as a membrane-associated receptor or a receptor agonist and/or antagonist. A cell-penetrating functional protein-mimicking peptide is in this embodiment most preferably derived from a membrane-associated receptor or designed to closely resemble a membrane-associated receptor or at least a fragment of a membrane-associated receptor. More preferably still, the CPP is derived from an intracellular part or loop of said membrane-associated receptor.

[0080] As found for many G-protein coupled receptors, some synthetic peptides, derived from their intracellular loops, influence receptor-G-protein interactions in membrane preparation. Thus in a much preferred embodiment of the present invention, said cell-penetrating functional protein-mimicking peptide is derived from or designed to resemble a mammalian receptor, such as a receptor belonging to a protein family which can be classified based on its member's structure and their function and comprises channel receptors, tyrosine kinase receptors, guanylate cyclase receptors, serine/threonine kinase receptors, cytokine receptors, and receptors coupled to guanosine triphosphate (GTP)-binding proteins (G protein-coupled receptors: GPCRS).

[0081] GPCRs are in the present context defined as having seven transmembrane domains, three extracellular loops (e₁, e₂, e₃) and four intracellular loops (i₁, i₂, i₃, i₄). A cell-penetrating functional protein-mimicking peptide is thus preferably derived from or resembles a fragment of any of the intracellular or extracellular loops of said receptors.

[0082] In an even more preferred embodiment, said cell-penetrating functional protein-mimicking peptide is derived from or designed to resemble the group consisting of the GLP-1 receptor, AT1A receptor, CGRP receptor, and Dopamine-2 receptor.

[0083] Nonetheless, a cell-penetrating functional protein-mimicking peptide can equally well be derived from or be designed to resemble any other cellular effector, such as an enzyme, channel, hormone, transcription factor, receptor agonist or antagonist, transporter, or ligand, and can e.g. be derived from or resemble platelet-activating factor (PAF), CGRP, thyroid-stimulating hormone (TSH), luteinizing hormone (LH), or follicle-stimulating hormone (FSH).

[0084] A typical example for the above is given in example 13, wherein 24 peptides are synthesised resembling peptide fragments derived from different secretases believed to be involved in Aβ-production. The peptide sequences particularly comprised in the present invention are listed as SEQ.ID.NO. 31840-31864, and are derived from different secretases with the intention to produce a peptide containing an ability to bind to a consensus sequence in the secretase/APP, thus competing with the naturally occurring secretase binding, which at the same time is cell penetrating.

[0085] As described above, a CPP can stem from or be designed to mimic a receptor activating ligand, or an internal loop, or a transmembraneous loop of a receptor and thus have internal activating/repressing properties, but can also be solely transporting cargo across a membrane. Thus, in the present context, CPPs are divided into two classes:
[0086] a. functional protein-mimicking CPPs
[0087] b. cargo-transporting CPPs

[0088] None withstanding, a CPP belonging to group a) will of course in most cases also be capable and useful for cargo-transport.

[0089] The above described novel transport peptides, or any other receptor derived or resembling CPP, are universal transport peptides, functional protein-mimicking CPPs, as well as cargo-transporting CPPs, and can be used for cellular delivery of a variety of cellular effectors, e.g. general modifiers of intracellular and/or extracellular metabolic and signalling mechanisms, such as peptides, proteins, oligonucleotides and polynucleotides and/or for the delivery of antibiotics and/or antiviral agents into cells and microorganisms.

[0090] The following will exemplify a variety of different CPPs detected, or designed and verified with a method according to the present application. Given the magnitude of potential CPPs that can for the first time be detected, or designed with the different methods disclosed in the present application, naturally, the selection of specific and novel CPPs and improved usage of known CPPs given herein is purely meant to be illustrative and by no means exhaustive.

[0091] Examples for CPPs, detected and verified by a method according to the present application, are given in the experimental section, and are also solely intended to be illustrative and by no means exhaustive.

[0092] References mentioned in the present application are considered to be incorporated.

### Receptor Derived CPPs:

[0093] One preferred embodiment of the present invention comprises a novel synthesized peptide: GOP, derived from the glucagon like peptide 1 receptor, GLP-1 receptor (as described in detail in example 5). The novel CPP acts as a potent mimicker of action of the GLP-1 receptor, i.e. it increases Insulin release, when incubated with rat and human pancreatic islets. Further, the peptide and cell membrane penetrating analogues thereof are able to localize intracellularly, when incubated with cells and act as mimics of an agonist of GLP-1 receptor protein action. Thus, they are potential powerful candidates for treatment of non-insulin dependent diabetes mellitus, NIDDM, and generally for treating both diabetes type I and II.

[0094] Consequently, one specific aspect of the present invention is directed to a peptide selected from the group consisting of peptides comprising or essentially consisting of the amino acid sequence IVIAKLKA (GOP), conservative variants of the sequence and cell membrane penetrating analogues thereof.

[0095] The cell-penetrating analogues of peptide GOP, being in example 5 derived from rat GLP-1 receptor or de novo designed to resemble said receptor, such as GOP-6, which is a completely de novo designed sequence, wherein all amino acids are in D-form, or such as GOP-8, wherein all amino acids are N-methylated, can be seen in table 8, and are listed as SEQ.ID.NO. 31865-31886, may e.g. be corresponding peptides from other mammalian species or individual variants from the same species, and may thus have amino acid extensions, deletions or substitutions in relation to the amino acid sequence of peptide GOP, as long as they have cell-penetrating properties/capability. A representative example of this type of cell-penetrating peptides, held in the scope of the present invention, is IVIAKLKANLMCKTCRLAK-amide (M 569). Cell-penetrating properties of said analogues of GOP can easily be tested by a variety of standard methods, well known to the skilled artisan, or as illustrated in example 2 or 16.

[0096] The above described novel transport peptides, or any other receptor derived or resembling CPP, are universal transport peptides, functional protein-mimicking CPPs, as well as cargo-transporting CPPs, and can be used for cellular delivery of a variety of cellular effectors, e.g. general modifiers of intracellular and/or extracellular metabolic and signalling mechanisms, such as peptides, proteins, oligonucleotides and polynucleotides and/or for the delivery of antibiotics and/or antiviral agents into cells and microorganisms.

[0097] Another aspect of the invention is directed to the above disclosed CPP of the invention for use as a medicament, in particular a medicament for the treatment of Insulin deficiency in non-insulin dependent diabetes mellitus. Consequently, any other receptor-derived CPP can of course be used as a medicament for treating any disease or abnormal condition correlated to the receptor that said CPP is derived from. Typically, such diseases are selected from the group consisting of metabolic diseases or disorders, such as diabetes type I and type II, neurological diseases, such as Alzheimer's Disease, Huntington-Chorea, Parkinson's Disease, or epilepsy, taste and smell disorders, psycotic diseases, such as schitzophrenic diseases, depression, anxiety, a disease with oncogenic properties, ulcer, addiction and abuse disorders, Infectious diseases, inflammations, pain, Immunological diseases or disorders, such as asthma and allergy, immunological suppression, immunological hyper function, or autoimmune diseases.

[0098] In a presently preferred embodiment, wherein said CPP is derived from a G protein-coupled receptor, or designed to mimic a G protein-coupled receptor, said CPP is used for the manufacture of a pharmaceutical composition for the treatment of a disease with oncogenic properties, including toxic thyroid hyperplasia (mutated thyroid-stimulating hormone (TSH) receptor), retinis pigmentosa (mutated rhodopsin), precocious puberty (mutated luteinizing hormone (LH) receptor), hypocalcaemia (mutated Ca²⁺-receptor) and Jansen metaphyseal chondrodysplasia (mutated parathyroid hormone and parathyroid hormone-related peptides (PTH/PTHrP) receptors). Furthermore, said composition can also be used for the treatment of a pathology associated with Inactivation of GPCRs such as X-linked nephrogenic diabetes Insipidus (vasopressin V2 receptor), familial glucocorticoid deficiency (adrenal corticoid hormone (ACTH) receptor), bleeding disorder (thromboxane A₂ receptor), male pseudohermaphroditism (LH receptor), familial hypocalciuric hypercalcaemia, neonatal hyperparathyroidism (Ca²⁺ receptor) or Hirschprung disease (endothelin B receptor).

[0099] Still another aspect of the invention is directed to a method of treating insulin deficiency in a patient having non-insulin dependent diabetes mellitus, comprising the steps of administering to said patient an Insulin release increasing amount of a peptide according to the invention, or a pharmaceutical composition according to the invention. The Insulin release increasing amount will be recommended by the attending physician with guidance from the manufacturer and the response from the patient.

[0100] Yet another aspect of the invention is directed to a pharmaceutical composition comprising, as an active Ingredient, a peptide according to the invention, together with a pharmaceutically acceptable vehicle, and to the use of a peptide according to the invention for the manufacture of a pharmaceutical composition for treating and/or preventing Insulin deficiency in a patient. The vehicle is selected by the manufacturer based on the desired route of administration, and examples of suitable vehicles can be found in the US or European pharmacopoeia.

[0101] In yet another highly preferred embodiment, the present invention relates to a novel vasoconstrictor, more precisely to a synthetic peptide derived from the intracellular C-terminus of angiotensin 1A receptor. The peptide is a functional protein-mimicking CPP and promotes contraction of heart coronary blood vessels of different origin.

[0102] The CPP related to herein is derived from the ATLA receptor, comprising a peptide corresponding to at least one fragment of the C-terminal tail, comprised in the third and/or second intracellular loop of the receptor.

[0103] The disclosed peptide, mimicking agonist-activated ATLA receptor, is of particular interest as potential drug, useful in the situations where vasoconstriction is required, e.g. in chronical hypotension or migraine.

[0104] The present invention thus in one embodiment comprises the synthesized peptide M511, derived from the C-terminal intracellular part of the rat AT1A receptor. M511 is able to translocate into a human melanoma cell line Bowes. The effects of M511 and biotinylated M511 were tested with porcine coronary arteries and veins, as well as with human umbilical blood vessels (as can be seen in example 8). In all cases, peptides triggered contraction of blood vessels. The sequence to which the M511 peptide corresponds is conserved within the AT1 receptor subfamily, but has low similarity to AT2 type receptor (see table 2).

TABLE 2

[chemical structure]

| origin | Segments 291-330 for AT1 and 307-346 for AT2 receptors |
|---|---|
| Rat AT1A | [chemical structure] |
| Mouse AT1A | AYFNNCLNPL FYGFLGKKFK KYFLQLLKYI PPKAKSHSSL |
| Human AT1A | AYFNNCLNPL FYGFLGKKFK RYFLQLLKYI PPKAKSHSNL |
| Rat AT1B | AYFNNCLNPL FYGFLGKKFK RYFLQLLKYI PPKARSHAGL |
| Mouse AT1B | AYFNNCLNPL FYGFLGKKFK RYFLQLLKYI PPKARSHAGL |
| Human AT1B | AYFNNCLNPL FYGFLGKKFK KDILQLLKYI PPKAKSHSNL |
| Rat AT2 | GFTNSCVNPF LYCFVGNRFQ QKLRSVFRVP ITWLQGKRET |
| Mouse AT2 | GFTNSCVNPF LYCFVGNRFQ QKLRSVFRVP ITWLQGKRET |
| Human AT2 | GFTNSCVNPF LYCFVGNRFQ QKLRSVFRVP ITWLQGKRES |

[0105] Although the inventors have not demonstrated its selectivity to AT1 mediated signal transduction, they show that the peptide activates specifically the same type of G-proteins as agonist activated AT1A receptor. Scrambled M511 (as can be seen in table 3) were prepared and tested as a control, with no effect in blood vessel contraction.

TABLE 3A
Sequences of penetratin, M511 and scrambled M511.

| Name | Sequence |
|---|---|
| Penetratin | RQIKIWFQNRRMKWKK |
| M511 | FLGKKFKKYFLQLLK |
| ScrM511 | KGKFQLYLKLKFKFL |

TABLE 3B
novel analogues of M511 that fullfill the selection criteria according
to the present invention and that might potentially be effective
in inducing long-lasting contraction of blood vessel in a similar
manner as M511, see also SEQ. ID. NO. 31887-31894.
(Cit-citrulline, Fph-4-fluoro-phenylalanine)

| Name | Sequence/Name |
|---|---|
| Analogue 1 | KKFKKYFL |
| Analogue 2 | KKYFLQLLK |
| Analogue 3 | FKKYFLQLL |
| Analogue 4 | KKFKKYFLQ |
| Analogue 5 | Cit-Cit-Phe-Cit-Cit-Fph-Ile |
| Analogue 6 | Cit-Cit-Fph-Ile-Cit-Ile-Ile-Cit |
| Analogue 7 | Phe-Cit-Cit-Fph-Ile-Cit-Ile-Ile |
| Analogue 8 | Cit-Cit-Phe-Cit-Cit-Fph-Ile-Cit |

[0106] To determine the biological effects of the above listed M511 analogues, they can easily be tested with porcine coronary arteries and veins, as well as with human umbilical blood vessels (as exemplified in example 8).

[0107] Unique properties of the novel peptide M511 are e.g. that it penetrates cell membranes by non-endocytotic mechanism, it induces long-lasting contraction of blood vessel and this contraction is peptide sequence specific. Furthermore, it interacts with G-proteins and mimics agonist activated ATLA receptor.

[0108] Thus, one aspect of the invention is directed to a peptide selected from the group consisting of peptides having the amino acid sequence FLGKKFKKYFLQLLK (=M511) and to cell membrane penetrating analogues thereof as well as to non-peptide membrane penetrating analogues.

[0109] The cell-penetrating analogues of the peptide M511 (derived from rat ATLA receptor) may be corresponding peptides from other mammalian species or individual variants from the same species, or non-peptide analogues, and may thus have amino acid extensions, deletions or substitutions in relation to the amino acid sequence of the peptide M511, as long as they have cell-penetrating properties.

[0110] Analogue to the above synthetic peptide derived from the 1A receptor, yet another vasoconstrictor is comprised in the scope of the present invention, designed and produced by the inventors, which is derived from CGRP receptor loop iC4, sequences 391-405 (VQAILRRNWNQYKIQ) and named M630, see SEQ.ID.NO. 31895. As shown in example 17, it penetrates cell membranes by a non-endocytotic mechanism, induces long-lasting contraction of blood vessel in a peptide sequence specific mode.

[0111] Thus, another aspect of the invention is directed to a peptide selected from the group consisting of peptides essentially comprising the amino acid sequence VQAILRRNWNQYKIQ (=M630) and to cell membrane penetrating analogues thereof, which can be found using the selection criteria as disclosed herein.

[0112] The cell-penetrating analogues of the peptide M630 may be corresponding peptides from other mammalian species or individual variants from the same species, or non-peptide analogues, and may thus have amino acid extensions, deletions or substitutions in relation to the amino acid sequence of the peptide M630, as long as they display cell-penetrating properties.

[0113] In an additional embodiment of the invention, a CPP as described above is coupled to a cargo. The cargo may be a marker molecule, such ds biotin.

[0114] Another aspect of the invention is directed to a peptide of the invention for use as a vasoconstrictor, and to its use for the manufacture of a pharmaceutical composition for treating and/or preventing vasoconstriction.

[0115] Yet another aspect of the invention is directed to a pharmaceutical composition comprising, as an active ingredient, a peptide according to the invention, together with a pharmaceutically acceptable vehicle. The vehicle is selected by the manufacturer based on the desired route of administration, and examples of suitable vehicles can be found in the US or European pharmacopoeia.

[0116] Still another aspect of the invention is directed to a method of inducing contraction of blood vessels in an individual comprising the steps of administering to said individual a vasoconstricting amount of a peptide according to the invention, or a pharmaceutical composition according to the invention.

### Transmembrane-Protein Derived CPPs:

[0117] In another, equally preferred embodiment, a CPP related to in the present context can stem from any other transmembrane peptide, and is by no means limited to being derived from a receptor. As disclosed in example 6, one embodiment of the present invention thus relates to a CPP derived from mouse PrpC (1-28): MANLG YWLLA LFVTM WTDVG LCKKR PKP, human PrpC(1-28): MANLG CWMLV LFVAT WSDLG LCKKR PKP, or bovine PrpC (1-30): MVKSK IGSWI LVLFV AMWSD VGLCK KRPKP. See SEQ.ID.NO. 31896-31899.

[0118] As disclosed in example 7, even amyloid precursor protein (APP) and presenilin-1 (PS-1) have cell-penetrating sequences and are consequently included as sources for a CPP derived from their amino acid sequence, according to a method described in the present application. See SEQ.ID.NO. 31900-31906.

### Detected Potential CPPs

[0119] In the present context, cell-penetrating peptides can be derived or de novo designed from both random peptide sequences, and from naturally occurring proteins. Typical examples for a de novo designed CPP are given in Table 18 bellow and listed as SEQ.ID.NO.31923-31940.

TABLE 18

| | |
|---|---|
| Evo162 | KTVLLRKLLKLLVRKI |
| Evo163 | KIIKRLIVVRLITLVIK |
| Evo164 | LLKLKLLAILKIKLIV |
| Evo83 | KLIRKRLI |
| Evo86 | RLIKRLIK |
| Evo86 dimer | (RLIKRLIKC)₂ |
| Evo165 | LLKKRKVVRLIKFLLK |
| Evo165 analogue | LLKKRKVVRLIKQKQK |
| Evo165 analogue | LLKKRKVRLIKQKQK |
| Evo165 analogue | LLKKRKVVRLIKAHSK |
| Evo165 analogue | LLKKRKVRLIKAHSK |
| Evo165 analogue | LLKKRKVVRLIKVRK |
| L-407-Abz | LKLLYKNKLLKYNLKamide |
| L-408-Abz | KLFKYKKLKRYFYLQKamide |
| L 409-Abz | YKRLSLVKRLIKamide |
| Evo165-B | Biotin-LLKKRKVVRLIKFLLKamide |
| Evo165 | LLKKRKVVRLIKFLLKamide |

[0120] Furthermore, a naturally occurring sequence can of course be modified to become cell-penetrating or to be optimised with regards to its cell-penetrating capacity.

[0121] A cell-penetrating peptide and/or a non-peptide analogue thereof detected by a method according to the present invention is preferably selected from a 8 to 50 amino acid residues long peptide, such as a 8 to 30 amino acid residues long peptide, or a 14 to 30 amino acid residues long peptide, or a 16 to 20 amino acid residues long peptide.

[0122] In special circumstances, though, said cell-penetrating peptide and/or a non-peptide analogue thereof detected by a method according to the present invention can also consist of at least 2, 3, 4, 5, 6, or 7 amino acids.

[0123] In a typical embodiment of the invention, a cell-penetrating peptide is selected from a 12 to 50 amino acid residues long peptide or a fragment of a peptide of one of the amino acid sequences as listed in the accompanying sequence listing as SEQ.ID.NO. 1-150.

[0124] In another, equally preferred embodiment of the invention, a cell-penetrating peptide is selected from a 8 amino acid residues long peptide or a fragment of a peptide of one of the amino acid sequences as listed in the accompanying sequence listing as SEQ.ID.NO. 6234-7420.

[0125] In yet another embodiment of the invention, a cell-penetrating peptide is selected from a 12 amino acid residues long peptide or a fragment of a peptide of one of the amino acid sequences as listed in the accompanying sequence listing as SEQ.ID.NO. 151-2684, and as SEQ.ID.NO. 7421-11649.

[0126] Additionally, in a further embodiment of the invention, a cell-penetrating peptide is selected from a 16 amino acid residues long peptide or a fragment of a peptide of one of the amino acid sequences as listed in the accompanying sequence listing as SEQ.ID.NO. 2685-6233, and as SEQ.ID.NO. 11650-18398.

### Cargo

[0127] As described previously, a CPP can be coupled to a cargo to function as a carrier of said cargo into cells, various cellular compartments, tissue or organs. The cargo may be selected from the group consisting of any pharmacologically interesting substance, such as a peptide, polypeptide, protein, small molecular substance, drug, mononucleotide, oligonucleotide, polynucleotide, antisense molecule, double stranded as well as single stranded DNA, RNA and/or any artificial or partly artificial nucleic acid, e.g. PNA, a low molecular weight molecule, saccharid, plasmid, antibiotic substance, cytotoxic and/or antiviral agent. Furthermore, the transport of cargo can be useful as a research tool for delivering e.g. tags and markers as well as for changing membrane potentials and/or properties, the cargo may e.g. be a marker molecule, such as biotin.

[0128] With respect to the Intended transport of a cargo across the blood-brain barrier, both intracellular and extracellular substances are equally preferred cargo.

[0129] Naturally, not every CPP will be equally qualified for transporting any and each cargo, such as has e.g. been shown for Tat and Penetratin, not being optimal for transporting highly negative charged cargo, such as DNA. Thus, the selection of most optimal CPP of choice for transporting a certain cargo will have to be estimated and verified by the person skilled in the art, and will be highly dependent on the nature of the specific cargo and the target cell/tissue.

[0130] In a preferred embodiment of the invention, the cell-penetrating peptide is coupled by a S—S bridge to said cargo. Naturally, there are a broad variety of methods for coupling a cargo to a CPP, selected individually depending on the nature of CPP, cargo and intended use. A mode for coupling can be selected from the group consisting of covalent and non-covalent binding, as biotin-avidin binding, ester linkage, amide bond, antibody bindings, etc.

[0131] In some embodiments, a labile binding is preferred, in other embodiments, a stabile binding is elementary, such as in the use of a CPP according to the present invention for use in transport of medical substances, due to the necessary storage of said pharmaceutical compositions before use.

[0132] Illustrative examples for the above described embodiments are given in examples 4, 6, 14 and 15.

[0133] In example 14, a methotrexate (MTX) conjugate with a CPP carrier is described. MTX is a cytotoxic drug, which was developed for the treatment of malignancies but is now also used to treat autoimmune diseases, such as psoriasis. Normally, MTX is present in bodily fluids as negatively charged molecule. Therefore, it can cross the cell membrane only with difficulty.

[0134] Thus one Illustrative example of the use of a CPP for the transport of a cargo according to the present invention comprises MTX-CPP conjugates essentially as comprised in SEQ.ID.NO. 31907-31911, which are e.g. synthesised using a solid phase peptide synthesis strategy as described in example 14, specific examples of which are listed in table 16 below:

TABLE 16
MTX-CPP conjugates

Apa-γGlu-Gly-CPP
Apa-(γGlu)2-5-Gly-CPP
Apa-Cys-S-S-Cys-CPP

[0135] Another example of a molecule being carried across a cellular membrane with a CPP is given in example 15, wherein siRNA uptake is substantially improved.

[0136] In recent years small interfering RNA (siRNA) have gained attention for their highly sensitive ability to regulate gene expression in mammalian cells. siRNA are short strands (about 21-23 bp) of double stranded RNA that induce specific cleavage of their complementary mRNA through activation of the RNA-induced silencing complex (RISC). Although RNA-induced silencing is an endogenous mechanism, synthetically synthesized siRNA's could bee shown to have the same effect both in vitro and in vivo.

[0137] A well known problem when using siRNA, is low yield of uptake in the cell. By coupling cell-penetrating peptides (CPP) to synthetically synthesized siRNA though, the cellular uptake is significantly improved.

[0138] Another specific embodiment of the use of a CPP for cargo transport included in the present invention thus relates to a sIRNA against the GALR-1 mRNA coupled to a CPP, such as Transportan10 (Tp10) via a disulfide linker, e.g. as shown in FIG. 36 and listed as SEQ ID NO. 31912.

### Improvement of a Known Cellular Penetration Method

[0139] Additionally, a CPP discovered by a method according to the present invention can also be used for the improvement of a known cellular penetration method, such as for the improvement of gene delivery in vivo, comprising transfection, microinjection, transduction or electroporation.

[0140] During the past 40 years, DNA delivery, especially via the nonviral route (i.e., transfection), has become a powerful research tool for elucidating gene function and regulation. Nonviral gene delivery systems generally exhibit a superior safety compared to viruses, which are more commonly used especially in clinical trials, however, their relatively low efficiency of transgene expression is a major obstacle (Ma, H. & Diamond, S. L. Nonviral gene therapy and its delivery systems. Curr Parm Biotechnol 2, 1-17. (2001)). The efficiency of DNA delivery is dependent on several steps: adsorption of transfection complex to the cellular surface, uptake by the cell, endosomal release, nuclear translocation and expression of the gene.

### Nonviral Transfection Methods

### Nonviral Transfection Reagents Available Today are Mainly Working in Three Ways:

[0141] Increasing the uptake of the plasmid across the plasma membrane, destabilizing the endosomal membrane and enhancing nuclear uptake. The main transfection protocols and reagents include: 1) calcium phosphate precipitation; 2) cationic polymers as DEAE dextran, polylysine and polyethyleneimine (PEI) (Garnett, M. C. Gene-delivery systems using cationic polymers. Crit. Rev Ther Drug Carrier Syst 16, 147-207 (1999)); 3) physical methods like microinjection and electroporation, DNA gun and similar (Somiari, S. et al. Theory and in vivo application of electroporative gene delivery. Mol Ther 2, 178-87. (2000)); and 4) liposomal vectors like cationic and anionic liposomes (Lee, R. I. & Huang, L. Lipidic vector systems for gene transfer. Crit. Rev. Therap. Drug Carrier Syst. 14, 173-206 (1997)). Many of these methods and transfection reagents are working well in vitro and for ex vivo transfections but are less suitable for in vivo gene transfer (Ma, H. & Diamond, S. L. Nonviral gene therapy and its delivery systems. Curr Pharm Biotechnol 2, 1-17. (2001)). In general, methods with high delivery efficiency are also toxic for the cells. One exception is microinjection, which is both effective in delivery and non-toxic, but unfortunately can not be used en masse (Luo, D. & Saltzman, W. M. Enhancement of transfection by physical concentration of DNA at the cell surface. Nat Blotechnol 18, 893-5). Old chemical reagents and methods like DEAE-dextran and calcium phosphate precipitation are simple, effective and still widely used but both suffer of cytotoxicity and are difficult to apply in vivo. Lipofection lacks cell specific targeting and the structure of DNA-lipid complexes are poorly understood.

[0142] For introduction of DNA into cells, favourite methods have been complexing with different compounds. This approach allows easy preparation of transforming agent and therefore quick modification of DNA construct and transformation conditions. Primary role of complexing agents is neutralization of the negative charge of phosphate groups in the DNA backbone and condensing the large DNA molecule. An average DNA molecule used for delivery of foreign DNA has to be at least 3000 base pair long to be propagated in bacterial cells during preparation. Most of modern plasmids for mammalian cell expression are 4500 to 5000 bp long i.e. have Mw over 3,000,000. After neutralization of negative charge and packing into tight particles DNA molecules are taken up by cells via endocytotic pathways. Classical transfection methods/agents have been modified in many ways attempting to prevent or neutralize degradation pathway activation in response to endocytosis.

[0143] Ca-phosphate transfection method remains still the most popular and widely used. The main reason for the popularity is very low cost. However, the method is extremely cell type specific and toxic for many cell types including neuronal and primary cells. Many attempts have been made to include DNA into liposome-like structures. Other methods relay on complexing of DNA with polymeric molecules that bind to DNA. A major problem with all those approaches have been toxicity to cells.

### Polyplex Technique

[0144] Another approach that has gained a lot of prominence in last years, is the use of transfection systems based on the principle of condensing DNA with polycations. According to renewed nomenclature, this technique is referred to as polyplex (Felgner, P. L. et al. Nomenclature for synthetic gene delivery systems. Hum Gene Ther 8, 511-2. (1997)). Polyplexes are more effective than lipid based vectors and also, in most cases, less toxic (Gebhart, C. L. & Kabanov, A. V. Evaluation of polyplexes as gene transfer agents. J Control Release 73, 401-16. (2001)). One of the cheapest, very effective and most widely used polycation is polyethylenelmine (PEI) (Boussif, O. et al. A versatile vector for gene and oligonucleotide transfer into cells in culture and In vivo: polyethylenimine. Proc Natl Acad Sci U S A 92, 7297-301. (1995), Abdallah, B. et al. A powerful nonviral vector for in vivo gene transfer into the adult mammalian brain: polyethylenimine. Hum Gene Ther 7, 1947-54. (1996), Schatzlein, A. G. Non-viral vectors in cancer gene therapy: principles and progress. Anticancer Drugs 12, 275-304. (2001)). Since it has a high positive net charge, it neutralises negative charges of dsDNA and also condenses DNA. Compact PEI/DNA globules Internalise into cells mostly by endocytosis (Remy-Kristensen, A., Clamme, J. P., Vuilleumier, C., Kuhry, I. G. & Mely, Y. Role of endocytosis in the transfection of L929 fibroblasts by polyethylenimine/DNA complexes. Biochim Blophys Acta 1514, 21-32. (2001)). These complexes also promote transfection by preventing degradation of DNA by lysosomal enzymes and by enhancing the release of DNA from the endocytic vesicles (Gebhart and Kabanov 2001). Unfortunately, though, at concentrations successfully used in vitro, the polycations are still too toxic for systemic in vivo use.

[0145] The approach described in the present application discloses a principally new way of transporting large DNA molecules across a cell membrane. Instead of relying on cell-activity-dependent endocytosis, an active transport of plasmids is proposed, using the capacity of cell-penetrating peptides (CPP) to carry cargoes Into cells. While CPPs are performing the transport action, a second component neutralises phosphate groups and condenses (packs) the large DNA molecule. Further, packing agents that mask the phosphates have always had an additional function as proton buffers. Binding of protons neutralises lysosomes and Inhibits many degradation pathway enzymes. Also, escaping of the degradation pathways by active transport over the cell membrane dramatically reduces the amount of phosphate neutralising/packing agent necessary, and therefore lowers its toxic effects.

[0146] As described in example 9, the invention thus also relates to an improved polyplex mediated gene delivery method, wherein a cell-penetrating peptide and/or a non-peptide analogue thereof. Is conjugated either to a reporter gene or to a transfection reagent, such as e.g. polyethylene amine. In both cases enhanced expression of reporter proteins, GFP and luciferase, are observed.

[0147] In this study the inventors developed a new gene delivery system. By combining the effects of PEI and TP10 or YTA-2 together, substantially higher transfection ratios were achieved than with PEI only. The approach was to crosslink TP10 or YTA-2 to transfection reagent. Thereafter PEI of common transfection protocol was replaced by CPP modified one. Under optimal conditions, the results postulate a significant improvement in gene delivery compared to other systems.

TABLE 4
Comparison of transfection methods with PEI-TP10/YTA-2
methods (+++ being good transfection efficiency).

| | Transfection | Toxicity | | |
|---|---|---|---|---|
| Method | efficiency | in vitro | in vivo | Remarks |
| Viruses | | | | |
| adenovirus | +++ | low | variable | immunogenic |
| Retrovirus | +++ | low | low | revertant risk |
| Lentiviruses | +++ | low | unknown | |
| Microinjection | +++ | low | not | |
| | | | applicable | |
| Electroporation | ++(+) | high | high | |
| Ca₃(PO₄)₂ | ++ | high | high | |
| precipitation | | | | |
| Lipofection | | | | |
| cationic | ++ | medium | high | |
| liposomes | | | | |
| anionic | +(+) | medium | high | |
| liposomes | | | | |
| Polycations | | | | |
| DEAE-dextran | +(+) | medium | medium | |
| Polylysine, | +(+) | low | medium | |
| Polyornithine | | | | |
| Loligomers | +(+) | medium | medium | |
| dendrimers | ++ | medium | medium | |
| polyethyleneimine | ++ | medium | medium | |
| Trasferrin-PEI | ++ | low | medium | cell selective |
| Polyethylene | ++ | low | medium | cell selective |
| glycosylated | | | | |
| PEI | | | | |
| PNA-NLS + PEI | ++(+) | low | unknown | low PEI doses |
| present | ++(+) | low | low | low PEI doses |
| method | | | | |

[0148] Consequently, the present invention in particular relates to a vector for (non-viral) cell transfection, comprising a) a nucleic acid component, b) a polycation conjugate, and c) a cell-penetrating peptide and/or a non-peptide analogue thereof, such as YTA-2 (SEQ.ID.NO. 31913), which is able to enhance the average rate of transfection per cell at identical transfection conditions by a factor of at least 2, such as by a factor of at least 5, 10, or 15, compared to a vector comprising only components a) and b), or only a) and c).

[0149] Also envisioned herein is a vector as described above, for usage in a transient transfection and/or a stable transfection of a cell in vivo and/or in vitro, for transfecting a mammalian cell such as a cell selected from the group consisting of human, rodent, pig, cow.

[0150] A vector as described above will typically comprise DNA as oligonucleotide and/or polynucleotide and said polycation conjugate will be polyethyleneimine (PEI), polyornithine, polylysine, polyamines, dendrimers, spermidine, DEAE-dextran, patricine, transferrin-PEI, polyethylene glycosylated PEI, or loligomers.

[0151] Consequently, the present invention also relates to a method for in vivo transfecting a cell in a host tissue with a nucleic acid, comprising introducing a vector according to the present invention, e.g. as illustrated in example 9, for in vivo transfecting a cell in a host tissue and/or an isolated cell with a nucleic acid.

### Cell-Selective CPPs

[0152] In yet a further embodiment of the present invention, a cell-penetrating peptide and/or a non-peptide analogue thereof is provided that will enter selectively into a certain cell type/tissue/organ, or that transports a cargo that will only be activated in a certain cell type, tissue, or organ type.

[0153] The inventors show that different CPPs are internalised by specific cell lines, such as human melanoma cell line Bowes and others, with significantly different efficacy and rate of uptake, sometimes more than two-fold. This is a prerequisite to define CPPs that are internalised with different efficacy to different cell lines and tissues. Hence, an Important embodiment of the present invention is a method for the development of selective CPPs (selCPPs) characterised e.g. by testing all available natural or de novo designed CPPs for cellular uptake in cell lines, cells, tissues and/or organs into which a selective transport is required. On the other hand, certain selective methods might be employed to artificially enhance the cell selectivity of a CPP of choice for a certain target cell or target cell population, which will be described in detail below.

[0154] As an example, cancer cells expose many cell surface antigens and/or proteins, as well as secrete certain proteins. Usually, tumour cells do not express cell surface markers that are unique but rather over-express common receptors/markers. The signalling through these over-expressed markers and/or over-amplifications of the intracellular and/or extracellular signals is thought to be one of the mechanisms for the loss of control of the cellular machinery over the cell cycle. Thus, in a specific embodiment of the present invention, an over-expressed cell surface protein and/or secreted protein is applied as target for CPP addressing.

[0155] In one embodiment of the invention, a cell-selective CPP (selCPP) is envisioned that comprises an antigen/protein raised against a cellular marker, selected from the group consisting of channel receptors, tyrosine kinase receptors (e.g. EGF, IGF), guanylate cyclase receptors, serine/threonine kinase receptors, cytokine receptors, receptors coupled to guanosine triphosphate (GTP)-binding proteins (G protein-coupled receptors: GPCRS), glycosphingolipids, CD44, neuropeptide receptors, e.g. neurotensin receptors, galanin, and substance P receptors.

[0156] Generally, a cell-selective CPP (selCPP) will of course be extremely useful in the targeted transport of any kind of drug or pharmaceutical substance to a variety of specific eukaryotic and/or prokaryotic cellular targets. A cell-selective transport of such cargo is e.g. envisioned for an improved treatment or prevention of infectious diseases, such as diseases caused by a viral, bacterial or parasital infection.

[0157] In order to avoid non-specific internalisation of CPPs before finding a target cell in vivo, the invention in a further aspect relates to a new variation of the enzyme-prodrug strategy, wherein a selCPP-conjugate is designed so that the cell penetration-active structure of the CPPs is disrupted until the binding event of a peptide part of said selCPP to a cell/tissue or organ specific receptor/marker, or the cleavage of said selCPP-conjugate by a protease secreted by the target cell/tissue or organ, releases the CPP from conformational discrimination.

[0158] The term “enzyme-prodrug strategy/therapy” is in the field of the art used to define a specific approach to delivering a drug, which is focused on the development of amino-acid or nucleic-acid prodrugs, which, before or after delivery, require activation by more or less tissue, organ and/or cell-selective enzymes. Large differences in selectivity are found in the prior art. For some prodrugs, a rapid removal of the released drug from the target tissue/organ/cell explains the low selectivity, whereas for others, cleavage in non-target tissue and Insufficient transport across the cell to the enzyme site seems mainly responsible.

[0159] Especially many anticancer agents are severely toxic, which explains the need of more effective and less toxic prodrugs and/or softdrugs. A typical prodrug/softdrug must therefore be an efficient and selective substrate for the activating enzyme, and be metabolised to a potent cytotoxin and/or cytostatica, which is preferably able to kill cells at all stages of the cell cycle. Many of the early antimetabollte-based prodrugs provided very polar activated forms that had limited abilities to diffuse across cell membranes, and relied on gap junctions between cells for their bystander effects. Prodrugs as described in the present invention, though, have good distributive properties and their activated species are naturally cell penetrating, so that the resulting bystander effects can maximize the effectiveness of the therapy.

[0160] In the present context, the term “enzyme-prodrug strategy/therapy” is additionally used to describe the above revealed method of delivering a drug, wherein the drug itself or Its transporter CPP is rendered non-cell-penetrating in order to avoid non-specific Internalisation of CPPs before finding a target cell in vivo, and wherein only the binding event of a peptide part of said selCPP to a cell/tissue or organ specific receptor/marker, or the cleavage of said selCPP-conjugate by a protease secreted by the target cell/tissue or organ, releases the CPP from conformational discrimination, whereupon it can penetrate the target cell.

[0161] Cell type targeted CPPs can further be modified by a non-covalent intermolecular interaction with the part of a receptor targeting sequence. After binding to the receptor, the CPP is herein displaced by a receptor and the CPP will internalise, see FIG. 1 and FIG. 2. Receptor internalisation is relatively slow, as compared to the CPP translocation.

[0162] In another, equally preferred aspect of the present invention, the selCPP is in contrast to the above, selected or designed particularly not to be cell penetrating. Strictly spoken, such a selCPP should be called a “sel-non-CPP”. The intention being that the non-CPP is released not into the target cell, but after coupling to the specific cell, is released into the surrounding extracellular space. In principal, the selection criteria described in the present application can of course as well be used to predict, verify, design and/or produce a peptide that is not cell penetrating. Said non-CPP should then be characterised by not having a Z_{Σ} bulk property value essentially consisting of individual average interval values, wherein most preferably Z_{Σ1}<0.2; Z_{Σ2}<1.1; Z_{Σ3}<−0.49; Z_{Σ4}<0.33; and Z_{Σ5}<1.1 and Z_{Σ5}>0.12. Neither should it in alternative embodiments of the invention, have individual average values that comprise Z_{Σ1}<0.3, such as Z_{Σ1}<0.21, Z_{Σ1}<0.22, Z_{Σ1}<0.23, Z_{Σ1}<0.24,

### Z_{Σ1}<0.25, Z_{Σ1}<0.26, Z_{Σ1}<0.27, Z_{Σ1}<0.28, or Z_{Σ1}<0.29;

[0163] Z_{Σ2}<1.2, such as Z_{Σ2}<1.11, Z_{Σ2}<1.12, Z_{Σ2}<1.13, Z_{Σ2}<1.14, Z_{Σ2}<1.15, Z_{Σ2}<1.16, Z_{Σ2}<1.17, Z_{Σ2}<1.18, or Z_{Σ2}<1.19;
Z_{Σ3}<−0.39, such as Z_{Σ3}<−0.4, Z_{Σ3}<−0.41, Z_{Σ3}<−0.42, Z_{Σ3}<−0.43, Z_{Σ3}<−0.45, Z_{Σ3}<−0.46, Z_{Σ3}<−0.47, or Z_{Σ3}<−0.48;
Z_{Σ4}<0.43, such as Z_{Σ4}<0.34, Z_{Σ4}<0.35, Z_{Σ4}<0.36, Z_{Σ4}<0.37, Z_{Σ4}<0.38, Z_{Σ4}<0.39,

### Z_{Σ4}<0.4, Z_{Σ4}<0.41, or Z_{Σ4}<0.42;

[0164] Z_{Σ5}<1.05 and Z_{Σ5}>0.22, such as Z_{Σ5}<1.04 and Z_{Σ5}>0.21, Z_{Σ5}<1.03 and Z_{Σ5}>0.20, Z_{Σ5}<1.02 and Z_{Σ5}>0.19, Z_{Σ5}<1.01 and Z_{Σ5}>0.18, Z_{Σ5}<1.00 and Z_{Σ5}>0.17, Z_{Σ5}<0.99 and

### Z_{Σ5}>0.16, Z_{Σ5}<0.98 and Z_{Σ5}>0.15, Z_{Σ5}<0.97 and Z_{Σ5}>0.14, or Z_{Σ5}<0.96 and Z_{Σ5}>0.13.

[0165] An especially preferred embodiment of the present invention thus relates to a cell-selective delivery system for a cytostatic and/or cytotoxic agent, comprising a) a protease consensus site for a protease specifically overexpressed in a target cell, b) a cell penetrating peptide and/or a non-peptide analogue thereof, and c) a cytostatic and/or cytotoxic agent, wherein said cell-selective delivery system additionally comprises an inactivation sequence repressing the cellular penetration capacity of said cell-penetrating peptide, and which is cleaved by said protease specifically overexpressed in the target cell upon introducing said cell-selective delivery system in the near vicinity of said target cell. See e.g. example 12.

[0166] A typical example for the above concept are matrix metallo proteases (MMPs), which are Zn²⁺ metallo endopeptidases. The family contains both membrane bound and secreted members of which both catalyse the breakdown of proteins located either on the cell's plasma membrane or within the extracellular matrix (ECM) (M. D. Stemlicht and Z. Werb How matrix metallo proteinases regulate cell behavior” Annual Review of Cell and Developmental Biology, 17:463-516, 2001). MMPs have been linked to the invasive and metastatic behaviour of a wide variety of malignancies, and these enzymes are generally overexpressed in a variety of tumours (M. D. Sternlicht and Z. Werb “How matrix metallo proteinases regulate cell behavior” Annual Review of Cell and Developmental Biology, 17:463-516; D. V. Rozanov et al., “Mutation analysis of membrane type-1 metalloproteinase (MT1-MMP, alternative name MMP-14)”, Journal of Biological Chemistry (IBC), 276:25705-14, Jul. 13, 2001). Membrane type MMPs (MT-MMP), such as MMP-MT1 have been strongly implicated in oncogenesis. These enzymes localise to the invasive fronts. The soluble MMPs 1-3 and 9 have also been implicated as agonists of tumourigenesis (Smith, L. E., Parks, K. K., Hasegawa, L. S., Eastmond, D. A. & Grosovsky, A. J. Targeted breakage of paracentromeric heterochromatin induces chromosomal instability. Mutagenesis 13, 435-43. (1998)).

[0167] Concomitantly, and as elegantly proven in examples 4 and 12, the present invention relates to a method for designing a selCPP, based on three basic functions: 1) selective cleavage (and thereby activation) by MMP-2 or MMP-MT1, 2) cellular penetration by peptides (CPPs) and 3) killing of nearby, preferably tumour cells or endothelia involved in tumour neovascularisation, by a known cytostatic and/or cytotoxic agent (see FIGS. 3, 4, 25 and 26).

[0168] The present invention thus comprises a selCPP selected from an amino acid sequence contained in table 5 or table 6, and to a combined cell-selective delivery system for a cytostatic and/or cytotoxic agent, comprising an amino acid sequence listed in table 5 or table 6, and a cytostatic and/or cytotoxic agent. See SEQ.ID.NO.31913-31922.

TABLE 5
selCPPs based on MMP-2 (gelatinase-A) cleavage specificity:

| Name | Sequence | MMP site | Penetration | Comment: |
|---|---|---|---|---|
| YTA-2 | YTAIAWVKAFIRKLRK | SGESLAY-YTA | +++ | stain also nuclear |
| | | | | membrane FIG. 3 |
| YTA-2ps* | SGESLAY- | SGESLAY-YTA | + | bind the plasma |
| | YTAIAWVKAFIRKLRK | | | membrane FIG. 4 |

*ps stands for proteinase cleavage site

TABLE 6
selCPPs based on MMP-MT1 cleavage specificity

| Name | Sequence | MMP site |
|---|---|---|
| LRSW-1 | LRSWVISRSIRKAA | GPLG-LRSW |
| LRSW-2 | LRSWIRRLIKAWKS | GPLG-LRSW |
| LRSW-3 | LRSWRVIIRNGQR | GPLG-LRSW |

[0169] Consequently, the present invention also relates to a cell-selective delivery system for a cytostatic and/or cytotoxic agent, comprising a) a cell-penetrating peptide and/or a non-peptide analogue thereof comprising a protease consensus site for a protease specifically overexpressed in a target cell and c) a cytostatic and/or cytotoxic agent, wherein said cell-selective delivery system additionally comprises an Inactivation sequence repressing the activity of said cell-penetrating peptide, and which is cleaved by said protease specifically overexpressed in the target cell upon introducing said cell-selective delivery system in the near vicinity of said target cell.

[0170] In a preferred embodiment of said cell-selective delivery system, as described above, said cell-penetrating peptide comprised in said cell-selective delivery system enhances the average rate of cellular uptake of said cytostatic and/or cytotoxic agent into said selective cell per cell by a factor of at least 1.5 compared to the average rate of cellular uptake into said cell of a cell-selective delivery system comprising only components a) and c), or to the average rate of cellular uptake of component c) alone of said cell.

[0171] In another, equally preferred embodiment of said cell-selective delivery system, as described above, said cell-penetrating peptide comprised in said cell-selective delivery system enhances the average rate of cellular uptake of said cytostatic and/or cytotoxic agent into said selective cell per cell by a factor of at least 1.5, such as at least 2, 3, 4, 5, 6, 7, 8, 9, 10, 15, 20, 25, 30, 35, 40, 50, 60, 70, 80, 90, 100, 1000 or 10 000, compared to the average rate of cellular uptake into said cell of a cell-selective delivery system comprising only components a) and c), or to the average rate of cellular uptake of component c) alone of said cell.

[0172] In another equally preferred embodiment of said cell-selective delivery system as described above, said overexpressed protease is a Zn²⁺ metallo endopeptidase selected from the group consisting of MMP-1, MMP-2, and MMP-MT1.

[0173] In yet another embodiment, said overexpressed protease is selected from the group consisting of bacterial surface proteases and viral enzymes.

[0174] Furthermore enclosed in the scope of the present invention is a method for targeting CPPs to particular cells and tissues, i.e. to design and apply selCPPs. A suitable CPP is herein designed with a unique surface marker, which is specific for the designated cell or tissue type, characterised by selecting a CPP from any suitable CPP sequence that is designed by the prediction/selection criteria or found in any other way, selecting peptide X, or address, as an epitope from the suitable cell surface receptor against which a specific monoclonal antibody has been raised against and which recognizes this particular epitope with high affinity, choosing a linker among polypeptides (Glyₙ, Proₙ, GABAₙ, Ahaₙ, etc.), or suitable organic substances in order to achieve required interactions between Peptide X/antibody and CPP/plasma membrane.

[0175] Enclosed in the present application is also an in vivo and/or in vitro method for stopping cellular proliferation of a specific cellular population and the use of a cell-selective delivery system as described herein for in vivo and/or in vitro stopping cellular proliferation of a specific cellular population.

[0176] A cell-selective delivery system as described above can of course be used for the manufacture of a pharmaceutical composition for stopping cellular proliferation of a specific cellular population in a mammal and for treating a patient suffering from a medical condition characterised by uncontrolled cellular growth, such as any oncological disorder or disease, or immunological and/or metabolic hyperfunction.

[0177] A general aspect of the present invention comprises the use of a cell-selective delivery system, or CPP related to in the present invention for the manufacture of a pharmaceutical composition for gene therapy and to the pharmaceutical composition comprising said cell-selective delivery system, or CPP.

[0178] Another aspect of the invention is directed to a composition comprising a cell-penetrating peptide and/or a non-peptide analogue thereof, or cell-selective delivery system according to the invention or resulting from performing any one of the methods according to the invention, and a compound selected from peptides, oligonucleotides and proteins that are general modifiers of intracellular metabolic or signalling mechanisms, either Inhibiting or activating.

[0179] Yet another aspect of the invention is directed to the use of a cell-penetrating peptide and/or a non-peptide analogue thereof, or cell-selective delivery system according to the invention or resulting from performing any one of the methods according to the invention, for the manufacture of a medicament.

[0180] A further aspect of the invention is directed to the use of a composition according to the invention for the manufacture of a medicament.

[0181] The different aspects and embodiments of the invention will now be illustrated by the following examples. It should be understood that the invention is not limited to any specifically mentioned details.

### ABBREVIATIONS

[0182] Aβ beta-amyloid
[0183] AD Alzhelmer's disease
[0184] APP Amyloid precursor protein
[0185] AT1 angiotensin receptor type AT1
[0186] ATLA angiotensin receptor subtype ATLA
[0187] AT1B angiotensin receptor subtype AT1B
[0188] AT2 angiotensin receptor type AT2
[0189] BACE β-site APP-cleaving enzyme
[0190] Bio biotin, blotinylated
[0191] BSA bovine serum albumin
[0192] CPP cell-penetrating peptide
[0193] CTF C-terminal fragment
[0194] DCC N,N′-dicyclohexylcarbodlimide
[0195] DCM dichloromethane
[0196] DIEA diisopropylethylamine
[0197] DMF dimethylformamide
[0198] DNP dinitrophenyl
[0199] EOFAD early onset Alzheimer's disease
[0200] FITC 5-fluorescein isothiocyanate
[0201] Fmoc 9-fluorenylmethoxycarbonyl
[0202] GOP IVIAKLKA-amide
[0203] GPCR G-protein coupled receptor
[0204] GTP guanosine 5′-triphosphate
[0205] GTPase guanosine triphosphatase
[0206] GTPγS guanosine γ-S-5′-triphosphate
[0207] HKR Hepes-Krebbs-Ringer
[0208] HOBt N-hydroxybenzotriazole
[0209] HPLC high performance liquid chromatography
[0210] IDE insulin degrading enzyme
[0211] LOAD late onset Alzhelmer's disease
[0212] MBHA 4-methylbenzhydrylamine
[0213] NFT neurofibrillary tangles
[0214] NICD notch intracellular domain
[0215] NMP N-methylpyrrolidone
[0216] NTF N-terminal fragment
[0217] PAF paraformaldehyde
[0218] PBS phosphate buffered saline
[0219] PNA peptide nucleic acid
[0220] PS presenilin
[0221] RNA ribonucleic acid
[0222] SAPP secretory APP
[0223] TACE tumour necrosis factor alpha converting eiz-yim-e
[0224] t-Boc tert-butyloxycarbonyl
[0225] TBTU 2-(1H-benzotriazole-1-yl)-1,1,3,3-tetramethyluronium tetrafluoroborate
[0226] TFA trifluoroacetic acid
[0227] TFA trifluoroacetic acid
[0228] TFMSA trifluoromethanesulphonic acid

### LEGENDS TO FIGURES

[0229] FIG. 1. Scheme of addressing selCPP by application of Interaction with single transmembrane (A) or 7-transmembrane (B) receptor.

[0230] FIG. 2. Intramolecularly constrained selCPP looses its constrain upon recognition event by specific receptor and the internalisation takes place.

[0231] FIG. 3. Schematic structure of chimeric selCPP.

[0232] FIG. 4. Incubation of non-covalent selCPP-AB complex with the selected cells exposing the epitope sequence. Peptide X leads to competitive interaction of AB with the Peptide X sequence in the cell surface protein.

[0233] FIG. 5. Example of inactivated selCPP. Internalisation of YTA-2 (A) compared to YTA-2 ps (B) In LoVo cells, both biotynilated peptides detected by TRITC-avidin at 37° C.

[0234] FIG. 6. Example of protease activated selCPP, detection by fluorophore/quencher system. Method of determining the specific cleavage of YTA-2 ps of the matrix metallo proteinase-2 (MMP-2).

[0235] FIG. 7. Schematic structure of 7™ spanning G-protein coupled receptor and trimeric G-protein.

[0236] FIG. 8. Cellular uptake of GOP (M569) in Bowes cells at 37° C., demonstrating both cytosolic and plasma membrane localisation.

[0237] FIG. 9. Stimulation of insulin release in rat pancreatic islets by cell-penetrating peptide GOP

[0238] FIG. 10. Blood glucose concentrations in healthy rats after i.p. injection of GOP (100 nmol/kg) and glucose (1 g/kg)

[0239] FIG. 11. Plasma Insulin levels in healthy rats after i.p. injection of GOP (100 nmol/kg) and glucose (1 g/kg)

[0240] FIG. 12. Internalisation of Prpc-avidin-FrrC. 100 fold dilution of avidin-FITC together with 2.5 FM was incubated with Bowes melanoma cells for 3 h. The plasma and nuclear membrane is clearly outlined.

[0241] FIG. 13. Translocation of 10 μM peptide at 37° C. in LoVo cells (human colon cancer).

[0242] FIG. 14. Cellular Internalisation In N2A cells at a concentration of 10 μM A and B) Cells treated with APP 521-536 coupled to fluorescein. C) Cells treated with APP 725-740 coupled to fluorescein. D) Cells treated with PS-1 97-109 deletion analogue coupled to fluorescein. E) Cells treated with the known CPP penetratin coupled to fluorescein.

[0243] FIG. 15. Localization of biotinyl-M511 (A), blotinyl-scrambled M511 (B), natural background (C) and penetratin (D) in Bowes melanoma cells. Concentration of the peptides was 10 μM, Incubation time 1 h at 4° C. Staining was done using 150 nM streptavidin-FITC.

[0244] FIG. 16. Effect of M511 (upper and middle panel) and scrambled M511 (lower panel) on the contraction of the porcine left anterior descending coronary artery without epithelium (upper panel) and in the presence of Intact epithelium (middle and lower panel). Contraction force is given in the arbitrary units. The meaning of the arrows: 1-administration of 30 mM KCl; 2—administration of substance P; 3-washing-out; 4-administration of 16 μM M511 or scrambled M511.

[0245] FIG. 17. Dependence of maximal observed relative contraction of porcine coronary artery on the concentration of M511 (▪) and blotin coupled M511 (□). Contraction obtained by 90 mM KCl was taken as 100%. Curves were obtained by nonlinear regression procedure using Prism computer package (GraphPad Software Inc., USA), according to the dose-response equation with variable slope (Hill coefficient) but fixed bottom (0%) and top (100%) values.

[0246] FIG. 18. Effect of M511 (▪—no preincubation of membranes with peptide; —25 min. preincubation of the membranes with peptide), blotinylated M511 (◯—no preincubation of membranes with peptide), and scrambled M511 (×—no preincubation of membranes with peptide) on the rate of GTPγS binding to the membranes prepared from the porcine left anterior descending coronary artery.

[0247] FIG. 19. Effect of phospholipase C inhibitor U73122 on the contraction of the porcine left anterior descending coronary artery induced by M511. Contraction force is given in the arbitrary units. The meaning of the arrows: 1—administration of 30 mM KCl; 2—administration of substance P; 3—washing-out; 4—administration of 16 μM M511; 5—administration of 30 μM U73122.

[0248] FIG. 20. Effect of Sar¹-Thr⁸-anglotensin II on the contraction of the porcine left anterior descending coronary artery induced by M511 (upper graph) and anglotensin II (lower graph). Contraction force is given in the arbitrary units. The meaning of the arrows: 1—administration of 30 mM KCl; 2—washing-out; 3—administration of 100 μM M511; 4—administration of 1 μM anglotensin II; 5—administration of 45 μM of Sar¹-Thr⁸-anglotensin II.

[0249] FIG. 21A. GFP expression in N2A cells 3 days after transfection with unmodified 60 kDa PEI (A, B and C), or with TP10 modified (D, E and F). Concentration of plasmide was 0.5 μg/well each time; N/P ratio is 4 (A and D), 8 (B and E) or 16 (C and F).

[0250] FIG. 21B. GFP activities measured on murine fibroblasts C3H 10T1/2. Concentration of plasmid in each case 1.2 μg/well. expression measured 24 h after transfection. B) luciferase activity shown relatively to control to background. Concentration of plasmid 0.5 μg/well, protein expression measured 72 h after transfection.

[0251] FIG. 22. Transfection of mouse neuroblastoma N2A cells with unmodified polyethylenimine (PEI) or chemically crosslinked PEI and cycteinyl YTA2 or TP10 peptide. Two different concentrations of PEI or peptidyl-PEI were tested: 1 or 0.5 μg per 1 ml of media. Transfection was performed for 3 h in serum-free growth media (DMEM) and photos taken 48 h after transfection. Improvement of transfection is registered with application of both, YTA2 and TP10 peptides. YTA2-PEI and PEI-TP10 transfect 2 times more cells than unmodified

[0252] PEI, and also the expression level in transfected cells is higher.

[0253] FIG. 23. Positional scanning of CPP within human 7Tm receptors. Human 7Tm receptor sequences was downloaded from the swissprot/trmbl databases. The sequences was searched for CPPs of the indicated length (8,12 and 17 aa long). The position of the start of the CPP in the protein is divided by the total length of the protein, is plotted against the frequency of occurrence (fraction of CPPs). Here, a search window size of 17 aa produced the most hits. The four peaks in evidence corresponds the four intracellular parts of the 7Tms, with the largest corresponding the IC3. It can be noted that the CPP functionality seems to correlate well, both with the topology of the 7tms, as well as the proposed G protein activation sites.

[0254] FIG. 24. Another example of an Inactivated selCPP. PenMMP14 uptake in Bowes (A) and B)) and Caco-2 (C) and D)). The left column is uptake of fluorescein labelled peptide (A) and C)) and the left with coumarine label (B) and D)).

[0255] FIG. 25. Scheme of selCPP activation by matix metalloproteases (a) representative for any tissue/organ/cell specific protease, leading to tissue-(tumour) selective uptake (b).

[0256] FIG. 26. Scheme of selCPP activation by matix metalloproteases(a) leading to tissue-(tumour) selective uptake (b).

[0257] FIG. 27. Internalization of blotinylated YTA-2 in human colon adenocarcinoma, LoVo cells.A) Detected with streptavidin-FITC B) comparison nuclear staining with Hoechst. B)

[0258] FIG. 28. Internalisation of YTA-2 (A) compared to YTA-2 ps (B) In LoVo cells, both biotynilated peptides detected by TRITC-avidin at 37° C. C) and D) YTA-2 in Caco-2 cells detected with streptavidin TRITC and nuclear stain.

[0259] FIG. 29. Uptake of fluorescently labeled peptide (F). Figures are shown in % uptake of added peptide.

[0260] FIG. 30. Peptide induced luminescence. A., C. The N293 and the C283 cell lines subjected to a 4×8 h interval exposure of PS-1 (7) and PS-1 (11) at concentrations indicated. B., D. The N293 and the C293 cell line after a 4 h peptide exposure.

[0261] FIG. 31. Penetration of Apa-γGlu-Gly-Evo165 into cultured human epidermal keratinocytes, immunofluorescent detection.

[0262] FIG. 32. Effects of different MTX-PVEC conjugates on Bowes cell viability (assayed using Cell-TiterGlo™). Exposure for 24 h in 10% FBS-MEM.

[0263] FIG. 33. Effect of Apa-γGlu-Gly-Evo165 on Bowes cell viability (assayed using Cell TiterGlo™).

[0264] FIG. 34. Effects of MTX, Apa-γGlu-Gly-YTA2 and YTA2 on Bowes cell viability (assayed using Cell-TiterGlo™).

[0265] FIG. 35. Effects of MTX, Apa-γGlu-Gly-YTA2 and YTA2 on K562 cell viability (assayed using Cell-TiterGlo™). Exposure for 2 days in 7.50% FBS-RPMI.

[0266] FIG. 36. siRNA linked with disulfide bonds to Tp10-PNA, schematic view of construct and theoretical mechanism of action in the cell.

[0267] FIG. 37. Uptake of 1 μM peptide-DNA construct, 30 min 37° C. in Bowes cells, 24 well plate.

[0268] FIG. 38. Example of cellular penetration by well studied CPPs. Peptide internalisation in live Caco-2 cells of 1 μM Fluo-peptide.

[0269] FIG. 39. Protein internalisation by YTA-2 of Fluo-Streptavidin 37° C. and T/E, showing the delivery property of a selCPP.

[0270] FIG. 40. Protein internalisation by YTA-2 of Fluo-Streptavidin 4° C. and T/E, showing the delivery property and temperature independency of a selCPP.

[0271] FIG. 41. Effect of M630 (50 μM) on porcine coronary artery. Arrows indicate the following procedures: 1 application of KCl; 2 washing-out; 3 application of 50 μM M630.

[0272] FIG. 42. Cellular internalisation of M630 conjugated to fluorescein in N2a cells, visualised by confocal microscope. The cells were incubated for 1 h at 37° C. with a final peptide concentration of 5 μM.

### EXPERIMENTAL SECTION

### Example 1

### Prediction of Cellular Penetration Properties of a Peptide

### Introduction

[0273] In most peptide quantitative structure activity relationship studies (QSAR), a set of dimensionless values is used to describe a composite of the physical characteristics of the amino acids (descriptors). In the classical literature 3 values, Z₁, Z₂ and Z₃ are used for this purpose. Recently Wold and colleagues expanded this descriptor set with 2 more: Z₄ and Z₅; and produced descriptor scales covering 87 natural and non-natural amino acids.

### Method

[0274] Using the expanded descriptor scales, bulk property values Zy where assembled for 4 cell-penetrating peptides (CPPs): Transportan, penetratin, pVEC and MAP (the training set); and averaged over the total number of amino acids in the sequence. Here, the Z₃ value, mainly describing polarity, had the highest predicting power. A number of protein and random sequences where searched, for sequences falling within the bulk property value Z_{Σ} interval obtained from the training set.

[0275] The descriptor interval used where: Z_{Σ1}<0.2 and Z_{Σ2}<1.1 and Z_{Σ3}<−0.49 and Z_{Σ4}<0.33 and Z_{Σ5}<0.95 and Z_{Σ5}>0.12.

### Results

[0276] Searching either a random- or natural protein sequence, sequences corresponding to CPPs appear clustered in blocks. This behaviour is due to the existence of “transport motors”, i.e. shorter sequences with CPP characteristics, in the search window. For the GLP-1 and Angiotensin receptors, sequences corresponding to CPPs were correctly predicted by the above outlined method. Searching a random sequence of 10,000 amino acid length returns on average 32 block hits for a sliding window length of 18 amino acids. However, the number of hits is dependent of window length. Other CPPs where used as controls. The criteria outlined above holds true for all of them, with the possible exception of the Tat/poly Arg family of CPPs.

TABLE 7
Example of block phenomena in the search of CPPs in AT1
receptor with an sliding window of 18 aa. The transport motor
is the motif included in all sequences.

| Position | Sequence | Block start |
|---|---|---|
| 298 | NPLFYGFLGKKFKKYFLQ | Transport motor |
| 299 | PLFYGFLGKKFKKYFLQL | |
| 300 | LFYGFLGKKFKKYFLQLL | |
| 301 | FYGFLGKKFKKYFLQLLK | |
| 302 | YGFLGKKFKKYFLQLLKY | |
| 303 | GFLGKKFKKYFLQLLKYI | |
| 304 | FLGKKFKKYFLQLLKYIP | M511 |
| 305 | LGKKFKKYFLQLLKYIPP | |
| 306 | GKKFKKYFLQLLKYIPPK | |
| 307 | KKFKKYFLQLLKYIPPKA | |
| 308 | KFKKYFLQLLKYIPPKAK | |
| 309 | FKKYFLQLLKYIPPKAKS | |
| | | Block end |

### Example 2

### Peptide Synthesis (Describing Default Method of the Experiments below if not Indicated Otherwise)

[0277] Peptides were synthesized in a stepwise manner in a 0.1 mmol scale on a peptide synthesizer (Applied Biosystems model 431A, USA) using t-Boc strategy of solid-phase peptide synthesis. tert-Butyloxycarbonyl amino acids (Bachem, Bubendorf, Switzerland) were coupled as hydroxybenzotriazole (HOBt) esters to a p-methylbenzylhydrylamine (MBHA) resin (Bachem, Bubendorf, Switzerland) to obtain C-terminally amidated peptide. Biotin was coupled manually to the N-terminus by adding a threefold excess of HOBt and o-benzotriazole-1-yl-N,N,N′,N′-tetramethyluronium tetrafluorborate (TBTU) activated biotin (Chemicon, Stockholm, Sweden) In DMF to the peptidyl-resin. The peptide was finally cleaved from the resin with liquid HF at 0° C. for 30 min in the presence of p-cresol. The purity of the peptide was >98% as demonstrated by HPLC on an analytical Nucleosil 120-3 C-18 RP-HPLC column (0.4×10 cm) and the correct molecular mass was obtained by using a plasma desorption mass spectrometer (Bioion 20, Applied Biosystems, USA) or MALDI-TOF (Vaager STR-E, Applied Biosystems, USA), as described in (Langel, U., Land, T. & Bartfai, T. Design of chimeric peptide ligands to galanin receptors and substance P receptors. Int J Pept Protein Res 39, 516-22. (1992)).

Cell Culture (Describing Default Method of the Experiments below if not Indicated Otherwise)

[0278] Murine fibroblasts C3H 10T1/2, mouse neuroblastoma N2A cells and COS-7 cells were grown in 10 cm petri dishes in Dulbecco's Modified Eagle's Media (DMEM) supplemented with 10% fetal calf serum (FCS), 2 mM L-Glutamine, 100 U/ml penicillin and 0.1 mg/ml streptomycin at 37° C. in a 5% CO₂ atmosphere. The cells were seeded and replated every fifth day. COS-7 and 10T1/2 cells were trypsinized when seeded while the N2A cells were suspended by mechanical force by adding media to the cells. Before starting the experiments, the cells were grown to confluency and then seeded and diluted two times in media before adding to 24-well plates (approximately 60 000 cells/well).

High throughput Screening (HTS) of Cargo Delivery Efficiency.

[0279] By using CPP—S—S-cargo constructs where the cargo is labelled with the 2-aminobenzoic acid fluorophore and the CPP with the 2-nitrotyrosine quencher, it is possible to monitor, in real time, the intracellular degradation of the disulfide bond resulting from the reducing intracellular milieu, and hence the cellular uptake of the constructs by in increase in apparent fluorescence.

### Peptide Uptake and Outflow Studies in Cells in Suspension or Attached

[0280] Cells were detached with trypsin (Invitrogen, Sweden), dissolved in culture media and centrifuged (1000×g for 10 min at RT). The cells were resuspended, counted and aliqoted in HKR on Ice, 300 000 cells/tube. Abz-labelled peptide was incubated for 15 and 30 min together with the cells in suspension, on a shaking 37° C. water bath. To stop the uptake or outflow, trypsin solution was added for 3 min. The cells were spun down at 1000×g for 10 min at 4° C. The pellets were resuspended in HKR for fluorescence detection, or for the outflow samples, incubated again with peptide-free HKR. Fluorescence was read at 320/420 nm on a Spectramax Gemini XS (Molecular Devices, Calif.). The intracellular concentrations were calculated from a standard curve of Abz-labelled peptides. The average cell volume of Caco-2 cells was determined by using a Coulter 256 channelizer (Coulter Electronics Ltd. CA). Additionally, a varianty of the same assay was applied: the cells were seeded in a 24well plate at a density of 100 000 cells/well, the day before. Cells are incubated at 5 μM peptide concentration for 30 min at 37° C. Trypsin treated, washed and lysed in hydrochloric acid. The fluorescence was measured as described for the suspension assay.

### Materials and Methods

### Cells

[0281] Human melanoma cells Bowes, were cultured in MEM using standard cell culturing techniques, and seeded at density of 100 000 cells/well in 24 well-plates the day before experiments were conducted.

### Results and Discussion

TABLE 20
Examples demonstrating the quantitative measurements for the ability of
various CPPs to enter Bowes cells when added for 30 min at
37° C. at 5 μM concentration.

| Fluoresceinyl peptide | % of added fluorescence in cell lysate |
|---|---|
| Transportan | 10.5 |
| pVEC | 4.6 |
| YTA-2ps | 3.5 |
| LRSW-3 | 1.9 |
| TP10 | 1.8 |
| LRSW-1 | 1.4 |

[0283] Table 20 Shows data from the preferred method to verify that the peptide is in fact a cell-penetrating peptide: Peptide uptake and outflow studies in cells in suspension or attached (see below). Approximately 50 peptides have been screened so far. For negative control the non-membrane permeable sugar polymer fluoresceinyl Dextran is added to the cells in the same manner, the percentage found in cell lysate of Dextran is always<0.5%. Note that YTA-2 ps, LRSW-1 and LRSW-3 are examples of de novo designed artificial peptides.

### Example 3

### Sequence Prediction

[0284] Several randomly generated sequences of 10.000 amino acids length were searched. The amount of hits varied with window length, but held at around 3% of the total sequences. Around 500 G protein coupled receptor sequences were searched, about 0.015% of the possible sequences was found to mach the CPP criteria, perhaps demonstrating that CPPs are selected against in nature.

[0285] The criteria outlined, successfully predicted around 95% of published CPP sequences.

### Example 4

### Cell-Selective CPPs

### Tissue Specificity of CPPS:

[0286] As the cellular uptake of CPPs is likely to depend on membrane properties and membrane potential of the target cell, it is possible to obtain cell specific CPPs. Using the criteria outlined above, a biased library of peptides will be generated. The library is then be tested for uptake/cargo delivery efficiency by e.g. using the method described above. Briefly, by using CPP—S—S-cargo constructs, wherein the cargo is labeled with the 2-aminobenzoic acid fluorophore and the CPP with the 3-nitrotyrosine quencher, it is possible to monitor (in real time) the intracellular degradation of the disulfide bond. Hence the cellular uptake of the constructs and the cargo delivery efficiency of the CPP can be measured by the increase in apparent fluorescence (See FIG. 27). This method eliminates the experimentally difficult step of distinguishing between internalised and outer membrane bound peptide.

### Method of Determining the Specific Cleavage of YTA-2 ps of the Matrix Metallo Proteinase-2 (MMP-2):

[0287] As Illustrated above and In FIG. 27, the inventors have been able to show that the CPP-part of a selective CPP (YTA-2) can efficiently enter cells both at 37° and 4° C. (data not shown). In addition, the “Inactivator” made the peptide less active in translocation over the cell membrane. The next step in the development of this technique is to check the specific cleavage of YTA-2 ps by active MMP-2. It is performed by a fluorescence/quencher assay, wherein the MMP-2 substrate YTA-2 ps upon cleavage increases in fluorescence intensity. The correct cleavage is further checked by mass spectrometry.

### Example 5

[0288] Design of a functional protein mimicking CPP, examplified by a new effector-mimic-CPP for treatment of Insulin deficiency in non-insulin dependent diabetes mellitus:

### Background

[0289] GPCR-ligand interactions and their mimicry in disorders:

[0290] The interactions between 7™ spanning receptors with their respective G-proteins are well defined and specific. In fact, these interactions are the analogues of DNA/DNA interactions between specific and well-defined proteins. 7™ receptors are G-protein coupled receptors (GPCR) and as such, they expose amphipathic α-helical motifs, which are suggested to be responsible for G-protein binding. It has been demonstrated that parts of the GPCR's third intracellular loop, but sometimes also other loops are involved in signaling. On the appended schematic drawing FIG. 7, such a 7™ receptor-G-protein complex is presented. Synthetic peptides from the intracellular parts of GPCRs can mimic the interaction of the GPCR and G-protein, i.e. conveying an activated receptor signal, as has been demonstrated in cellular fragment systems.

[0291] In the present example, the inventors have demonstrated that a novel CPP, derived from one of said intracellular parts of a GPCR, can both act as a cell-penetrating peptide, as well as at the same time mimic the function of an activated receptor in the cells, e.g. mimic the interaction of the GPCR and G-protein in the target cell.

Non-Insulin Dependent Diabetes Mellitus, NIDDM, and Glucagon like Peptide 1 Receptor, GLP-1R

[0292] Non-insulin dependent diabetes mellitus, NIDDM, also known as type 2 diabetes mellitus, T2DM, is characterised by complex hormonal disturbances and insulin resistance.

[0293] Treatment of NIDDM is complicated due to the complexity of the disorder, as well as to poor understanding of the mechanisms behind it. Probably, several key cellular and molecular mechanisms in NIDDM still remain to be defined. Despite the lack of comprehensive knowledge of mechanisms of NIDDM, recent achievements in diabetes research have revealed some promising targets for studies and treatment.

[0294] Non-insulin dependent diabetes mellitus, NIDDM, is currently treated by hormone replacement with insulin, with insulin releasers, or insulin sensitizers. However, none of these treatments is fully satisfactory in controlling serum glucose levels. Glucose dependent insulin release is partly controlled by the activation of the G-protein coupled receptor glucagon like peptide 1 receptor, GLP-1R, rendering it a promising target for a new NIDDM therapeutic agent. The existence of an Ideal endogenous agonist for GLP-1R, the glucagon like peptide 1, GLP-1, has been known for almost 15 years. However, its pharmacological exploitation has so far failed due to short half-life of the peptide when administered i.v. and due to loss of agonist efficacy of most of the synthetic analogues.

[0295] The inventors herein show that GLP-1R agonist-mimics, based on intracellular loop 3 (iC3) peptides of GLP-1R receptors can mimic the active state of the agonist occupied receptor in signalling to initiate Insulin release.

[0296] The design and synthesis of peptides derived from GLP-1R iC3 are demonstrated, which induce insulin release in rat pancreatic islets. These approaches greatly facilitate the study of the mechanisms underlying the activation of insulin-release by GLP-1, and provide physical libraries of substances, which will stimulate insulin release, and thus serve as potent leads for the development of drugs for NIDDM treatment.

### GLP-LR Fragments as GLP-1 Receptor Agonist Mimics.

[0297] Synthetic peptides derived from the third intracellular loop, IC3, of GLP-1 receptor activate GTPase and adenylate cyclase (AC) with EC50=100 nM. The iC3 peptides are powerful enzyme activators, often a 6- to 13-fold activation of the AC is achieved. Additionally, these peptides may serve as tools for study of promiscuity of the GLP-1 receptor in signal transduction to G-proteins.

[0298] The short, 12-20 amino acids long iC3 peptides mimic the interactions of the agonist occupied 7™ receptor proteins in vitro. The peptides can be furthermore be connected to cellular transporters, such as Transportan, for more efficient penetration into the cell interior where these interactions take place in in vivo studies.

### Summary of Results

[0299] The inventors have designed, synthesized and tested for insulin release a novel octapeptide derived from glucagon-like peptide-1 receptor, GLP-1R with sequence IVIAKLKA-amide (GOP). This peptide mimics the action of the parent protein, GLP-1R, a seven transmembrane spanning protein known to initiate insulin release in pancreatic islets followed by recognition of the GLP-1 peptide hormone. Analogues of this peptide are novel cell-penetrating peptides, CPPs, that are able to translocate cell membranes in the tested cells. These data demonstrate a novel possibility to design agonists of a desired protein, which are cell-penetrating by themselves.

### Methods

### Cellular Penetration of Biotin-Labelled Peptide

[0300] The medium containing serum was exchanged for a serum-free medium and water solution of the peptide was added directly into the medium to reach the concentration of 10 μM. A negative control was always used, because living cells all the time have some biotin inside. To control cells pure water instead peptide solution were added, and further handled alike all other. The cells were incubated for 1 h at 37° C. or 4° C. in 5% CO₂ enriched air. The cells were washed three times with PBS, fixed and permeabilised with methanol for 10 min at −20° C., washed again with PBS and Incubated for 1 h in a 5% (w/v) solution of fat-free milk in PBS in order to decrease non-specific binding. The peptides were visualised by staining with 0.1 μM streptavidin-FITC in the same solution for 1 hour at room temperature. The cell nuclei were visualised by staining with DNA with Hoechst 33258 (0.5 μg/ml) for 5 min, thereafter the coverslips were washed 3 times with PBS and mounted in 20% glycerol in PBS. The images were obtained by Zeiss Axioplan 2 microscope (Carl Zeiss Inc., Germany).

### Insulin Release

[0301] Effects of the peptides on insulin secretion were assessed in pancreatic islets from male Wistar rats weighing 200-250 g. Islets were isolated aseptically by colagenase digestion, and then cultured overnight at 37° C. in RPMI 1640 culture medium supplemented with 10% heat-inactivated fetal calf serum. After culturing, analysis of insulin secretion was performed by incubation at 37° C. for 1 h in batches of 3 islets, each in 300 μl of Krebs-Ringer bicarbonate buffer with 10 mM Hepes and 2 mg/ml bovine serum albumin, pH 7.4. The incubation medium contained either 3.3 or 16.7 mM glucose, with or without peptide. In one experimental series, batches of 5×10⁵ Rin m5F cells were incubated under similar conditions, except that glucose was omitted from the medium. Aliquots of the incubation medium were taken for radioimmunoassay of Insulin. Insulin secretion is expressed as IU insulin/islet/h and IU insulin/5×10⁵ cells/h, respectively. Statistical significance was evaluated with the Student's t-test with p<0.05 regarded as significant

### Results and Conclusions

[0302] A short peptide derived from the GLP-1R-sequences is able to dose-dependently and glucose dependendently increase insulin secretion form isolated rat pancreatic islets. Furthermore the peptide is able to increase insulin secretion and decrease blood-glucose levels when injected i.v. in rats.

### Cell Penetration of GLP-1R Loop Derived Peptides

[0303] In FIG. 8, the cellular penetration of the GOP analogue M569 is illustrated. The inventors have been able to further develop the GLP-1R derived peptides described above. A new generation of these peptides, which includes the sequence IVIAKLKA is characterized to have cell-penetrating properties, activate G-proteins and increase insulin release when incubated with rat pancreatic islets. The GLP-1R derived peptide M569 shows temperature independent penetration into the human Bowes melanoma cells and the same intracellular localization of the peptide is registered at 4° C. as well (not shown).

### Insulin Release

[0304] In the absence of the peptide GOP, 16.7 mM glucose stimulated Insulin release almost 3-fold as compared to basal release at 3.3 mM glucose (FIGS. 1 and 11). GOP (10 μM) stimulated insulin release 5-fold (p<0.001) at 3.3 mM glucose, and at 16.7 mM glucose, the stimulation by 1 and 10 FM GOP is 4-fold.

In vivo Effect of GOP (M528) on Insulin Release and Blood Glucose Level

[0305] Healthy male Wistar rats, weighing approximately 250 g, were fasted over-night. After an initial blood sample obtained by incision of the distal tail vein (0 min), GOP (M528, 100 nmol/kg; n=4) was injected intraperitoneally, followed by another i.p. injection of glucose (1 g/kg). Control rats (n=4) were injected with saline and glucose. Additional blood samples were taken from the tail vein after 10 and 30 min. Blood glucose levels were determined by a glucose oxidase method and plasma insulin levels by radioimmunoassay.

[0306] As evident from FIG. 10 and FIG. 11, plasma insulin and blood glucose concentrations were similar in all rats before injections. After 10 min, plasma Insulin had increased significantly in the GOP-injected rats, compared to control rats (p<0.05) and to same group of rats at 0 min (p<0.01) (FIG. 10). In parallel, blood glucose levels were significantly lower in the GOP-injected rats relative to control rats at 10 min (p<0.02) (FIG. 11). After 30 min there were no differences between the two groups of rats regarding Insulin and glucose levels. The present data indicate a marked, however transient, effect of the peptide on insulin release in vivo. In conclusion, the GLP-1R derived peptides of the GOP family penetrate cell membranes, interact specifically with respective G-protein and Increase insulin release from rat pancreatic islets.

TABLE 8
GOP-peptide derivatives

| | | | Insulin release | | Insulin release | |
|---|---|---|---|---|---|---|
| | | | at 3.3 mM | | at 6.7 mM | |
| | | | glucose | | 1 glucose | |
| Peptide | sequence | MW | 10 μM | 100 μM | 10 μM | 100 μM |
| GOP | IVIAKLKA amide | 853.62 | | no | stim+ | stim++ |
| (GOP1) | | | | | | |
| GOP2 | (CIVIAKLKA)₂ amide | 1928.47 | | | | |
| GOP3 | IVIAKLRA amide | 881.63 | | stim++ | stim+ | stim++ |
| GOP4 | IAIAKLKA amide | 825.59 | | inh− | inh−− | inh− |
| GOP5 | IVIAKLAA amide | 796.56 | | no | inh− | no |
| GOP6 | all-D-(IVIAKLKA) amide | 853.62 | | stim+ | inh− | no |
| GOP7 | I-(N-Me-V)-IAKLKA amide | 866 | | | | |
| GOP8 | I(all-N-Me(VIAKLKA)) | 855.63 | | | | |
| | amide | | | | | |
| GOP9 | IV-Oca-KA amide | | | | | |
| GOP10 | AKLKAIVI amide | 853.62 | | | | |
| GOP11 | IAIAKLAA amide | 768.53 | | inh− | inh− | inh−− |
| GOP12 | VIAKLK amide | 669.5 | | | | |
| GOP13 | IVI-(N-Me-A)KLKA amide | | | | | |
| GOP14 | IVIAKLK-(N-Me-A) amide | | | | | |
| GOP15 | IVI-aib-KLKA amide | | | | | |
| GOP16 | IVVSKLKA amide | 855.6 | | no | no | no |
| GOP17 | IVIAKLKA-COOH | | | | | |
| GOP18 | I-norV-IAK-norL-Cit-A- | | | | | |
| | COOH | | | | | |
| GOP25 | I-OmTyr-IAKLKA amide | 931.67 | | | | |
| GOP26 | IVIA-Cit-LKA amide | 882.71 | | | | |
| GOP52 | VVKK amide | 471.37 | | | | |

Series of GOP Analogues will be Chosen Among the Following:

[0307] IVV-X-KLKA, IVI-X-KLKA, IV-X₁-X-KLKA

[0308] Where X₁ is an amino acid and X is a linker.

### Example 6

### Design of a Non-Receptor Functional Protein Mimicking CPP, Exemplified by a new Effector-Mimic-CPP Corresponding to the N-Terminal Sequences of the Prion Protein (PrpC)

### Background

[0309] The N-terminal sequences of the prion protein (PrPC) are very similar to constructed signal peptide-NLS chimera, shown to function as cell-penetrating peptides (CPPs) (Vidal, P. et al. Interactions of primary amphipathic vector peptides with membranes. Conformational consequences and Influence on cellular localization. J Membr Blol 162, 259-64. (1998)). Based on these sequence similarities, the inventors tested the hypothesis that also the PrPC derived sequence from mouse with non-cleaved signal sequence is active as a CPP. The inventors found that mouse PrPC(1-28) is indeed a CPP, with the ability to carry a cargo avidin into cells, based on a standard fluorescence assay technique. In distilled water, the PrPC(1-28) peptide is strongly aggregated above 1 mM concentration, and has a dominating 0 structure. The findings have significant implications for the understanding of how prion proteins with intact N termini may invade cells and of the secondary structure conversion to p structure that is associated with the conversion to the scrapie form of the protein.

[0310] The following peptide sequences were compared:

[0311] The chimeric CPP, i.e. the hydrophobic sequence from gp41 of HIV (1-17)+NLS from SV40 large antigen T (18-24): MGLGL HLLVL AAALQ GAKKK RKVC (1)

[0312] Mouse PrpC(1-28): MANLG YWLLA LFVTM WTDVG LCKKR PKP (2)

[0313] Human PrpC(1-28): MANLG CWMLV LFVAT WSDLG LCKKR PKP (3)

[0314] Bovine PrPC (1-30): MVKSK IGSWI LVLFV AMWSD VGLCK KRPKP (4).

[0315] The general features of both types of sequences is a mainly hydrophobic signal peptide part of 16-23 residues followed by a NLS part of about 7 residues, with high positive charge.

[0316] Mouse PrpC(1-28) was synthezised with a blotin lable in the N terminus to investigate its cell-penetrating properties. The internalisation of the peptide was monitored through the coupled flourescine, as previously described in example 7 and conducted in cultured N2A cells. The cell penetration properties were investigated for the peptide itself and for the peptide carrying a large cargo of the avidin protein (65 kD). The protocol followed was the same as used in previous experiments (Kilk, K. et al. Cellular Internalization of a cargo complex with a novel peptide derived from the third helix of the Islet-1 homeodomain. Comparison with the penetratin peptide. Bioconjug Chem 12, 911-6. (2001), Magzoub, M., Kilk, K., Eriksson, L. E., Langel, U. & Graslund, A. Interaction and structure induction of cell-penetrating peptides in the presence of phospholipid vesicles. Biochim Biophys Acta 1512, 77-89. (2001)) demonstrating CPP properties of the pIsl peptide sequence derived from the homeodomain of the rat transcription factor Islet-1 (Inoue, A., Takahashi, M., Hatta, K., Hotta, Y. & Okamoto, H. Developmental regulation of islet-1 mRNA expression during neuronal differentiation in embryonic zebrafish. Dev Dyn 199, 1-11. (1994)). FIG. 12 shows fluorescence microscope pictures clearly indicating the CPP efficiency and perinuclear localization of both preparations, PrpC(1-28) without and with the avidin cargo.

[0317] The secondary structures of the peptide were further investigated, now without biotin attachment, in aqueous solution and In various membrane mimetic solvents by CD and NMR spectroscopy. FIG. 20B shows a CD spectrum of 1 mM peptide in distilled water, with features typical of a significant 0 structure contribution. Addition of salt increased the β structure contribution (data not shown). Parallel ¹H NMR experiments yielded no evidence of a resolved spectrum and attempts to investigate diffusion showed that peptide aggregates had formed in the sample that were larger than could be measured by the NMR technique. In the presence of negatively charged phospholipid vesicles the in structure contribution of the peptide was considerably increased (FIG. 13). FIG. 20C shows a partial NMR TOCSY spectrum of the peptide in SDS micelles, which dissolves the peptide aggregates so that a well resolved ¹H NMR could be obtained and the resonances assigned. The secondary chemical shifts of the Has along the peptide chain give clear evidence of induced α-helical structure. This chameleon-like behaviour of the peptide in various solvents essentially mirrors observations from other CPPs, like penetratin (Derossi, D., Joliot, A. H., Chassaing, G. & Prochiantz, A. The third helix of the Antennapedia homeodomain translocates through biological membranes. J. Biol. Chem. 269, 10444-10450 (1994)) and pIsl (Kilk, K. et al. Cellular internalization of a cargo complex with a novel peptide derived from the third helix of the islet-1 homeodomain. Comparison with the penetratin peptide. Bioconjug Chem 12, 911-6. (2001)) except that the aggregation and P structure contribution in aqueous solution is more pronounced and even more dependent on ionic strength and peptide concentration for mouse PrPC(1-28) than for penetratin and pIsI.

### Example 7

### Design of a Functional Protein Mimicking CPP, Examplified by New Effector-Mimic-CPPs Corresponding to Amyloid Precursor Protein (APP) and Presenilin-1 (PS-1)

### Background

[0318] Alzheimer's disease is the most common form of dementia in the elderly, and although the disease was discovered almost a century ago, no cure nor exact mechanism of action have been discovered. The most classic hallmark of the disease is protein aggregates, called senile plaques. These senile plaques consist mainly of a peptide derived from the amyloid precursor protein, called β-amyloid. This β-amyloid peptide is created during the processing of the amyloid precursor protein, where two proteins called presenilin-1 and presenlin-2 are thought to be involved.

### Summary

[0319] The example demonstrates that the amyloid precursor protein (APP) and presenilin-1 (PS-1) have specific peptide sequences, so called cell-penetrating sequences, which can help them to translocate across cell membranes and be internalised by living cells. This might be used as a mechanism by which secretory APP, or any other neuroprotective peptide, can be internalised and thereby exert its neuroprotective properties.

### Materials and Methods

### Cellular Assays

### Cell Culture:

[0320] Mouse neuroblastoma cells, N2A, were cultivated in Dulbecco's minimal essential medium with Glutamax-I, supplemented with 10% (v/v) fetal bovine serum, penicillin (100 U/ml) and streptomycin (100 μg/ml).

### Cellular Internalisation Assay:

[0321] The cells used for Internalisation were seeded out on round glass coverslips in 24well plates. One day post seeding, the cells were semi confluent, and the medium was changed to serum-free medium. The fluorescein-labelled peptides were added, with a final concentration of 10 μM. After 60 min of incubation at 37°, the cells were washed 3 times with 1 ml of Hepes-Krebbs-Ringer-(HKR) buffer and fixed with 3% paraformaldehyde solution in phosphate-buffered saline solution (PBS) for 10 minutes. The cells were then washed 3 times with 1 ml of HKR-buffer, and the coverslips were mounted and sealed for microscopy studies.

### Results

### Peptide Synthesis and Purification

[0322] The following peptides were synthesised, coupled to fluorescein, purified on HPLC and analysed on mass spectrometer (as described in Langel, U., Land, T. & Bartfal, T. Design of chimeric peptide ligands to galanin receptors and substance P receptors. Int J Pept Protein Res 39, 516-22. (1992)).

TABLE 9
Sequence, calculated molecular masses and measured molecular masses
of synthesised APP and PS peptides labeled with fluorescein

| Peptide | Sequence |
|---|---|
| APP (521-537) | KKAAQIRSQVMTHLRVI |
| APP (712-726) | IATVIVITLVMLKKK |
| WT | |
| APP (712-726) | IATVIFITLVMLKKK |
| mutant V717F | |
| APP (725-740) | KKKQYTSIHHGVVEVD |
| PS-2 (86-110) | KVHIMLFVPVTLCMIVVVATIKSVR |
| PS-1 (151-162) | VVLYKYRCYKVI |

### Cellular Internalisation Assay

[0323] The cell type used for the internalisation assays with the fluorescein'tagged peptides was N2A mouse neuroblastoma cells. This cell-line is commonly used in association with Alzheimer's disease studies, and serves as a good model cell-line for these internalisation assays where peptides derived from proteins involved in Alzheimer's disease were examined. These Internalisation assays were performed at 37° C., therefore the internalisation by endocytosis cannot be excluded.

[0324] FIG. 21 shows cellular localisation of peptides in N2A cells at a concentration of 10 μM A) and B) Cells treated with APP 521-536 labeled with fluorescein. C) Cells treated with APP 725-740 labeled with fluorescein. D) Cells treated with PS-1 97-109 deletion analogue coupled to fluorescein. E) Cells treated with the known CPP penetratin labeled with fluorescein. F) Untreated cells.

[0325] The internalisation experiments demonstrate that APP (521-536), which is derived from the extracellular part of the protein, has cell-penetrating abilities (FIGS. 14 A and B), localising both in the nucleus and the membrane. This is a putative pathway by which the secretory amyloid precursor protein (sAPP) is internalised. This fact is interesting since this fragment has been shown to protect neurons against hypoglycemic damage and glutamate neurotoxicity thus acting as neuroprotective agent. The presenilin-1 (97-109) deletion analogue, derived from a membrane spanning- and first extracellular loop part, also showed cell-penetrating abilities. However, this peptide is mostly localised in the cytosole, but can also be detected in the plasma-membrane and nucleus (FIG. 14D). APP (725-740) shows an increased fluorescence compared to the background, which seems to be situated mostly to the cytosol. However, this does not seem as clear as in the earlier mentioned peptides, and recent experiments have shown that it is not internalised at 4° C., which suggests that the slight increase in fluorescence that was observed is probably caused by endocytosis. Identical increase in fluorescence could also be observed for presenilin-1 (151-162) (not shown), which is a peptide derived from the first intracellular loop in presenilin-1. The internalisation experiments with APP (712-726) WT and APP (712-726) V717F mutant, do not reveal any no uptake. The reason behind this is probably that as soon as these peptides were added to the 24-well plate, they formed aggregates. This tendency to aggregate was also observed earlier, especially when the crude product was dissolved for purification on HPLC.

### Example 8

[0326] Design of a functional protein mimicking CPP, exemplified by a new effector-mimic-CPP corresponding to a synthetic peptide derived from the intracellular C-terminus of anglotensin 1A receptor.

[0327] Example 8 discloses a novel vasoconstrictor, more precisely to a synthetic peptide derived from the intracellular C-terminus of angiotensin 1A receptor. The peptide is a cell-penetrating peptide and promotes contraction of heart coronary blood vessels.

### Background

[0328] Angiotensin receptors are members of the 7-transmembrane G-protein coupled receptor family and are important components of the blood pressure and electrolyte balance maintaining system in mammals. They exist in two types: AT1 (consists of ATLA and AT1B subtypes) and AT2, among which AT1 seems to be responsible for the mediation of almost all known systemic effects of anglotensin II. AT1 receptors are involved in contraction of smooth muscles in different tissue, e.g. in blood vessels, uterus, bladder, and some endocrine glands, and are widely distributed in kidney, liver, and in CNS. Antagonists of AT1 receptor are potential antihypertensive drugs and some non-peptide antagonists, e.g. lorsatan, have been successfully introduced in clinical use. Selective agonists for AT1 receptor, however, are not available today. Agonists would be of interest as potential drugs useful in the situations where vasoconstriction is required, e.g. chronical hypotension or migraine.

### Methods and Materials

### Cell Culture

[0329] Bowes melanoma cells (American Type Culture Collection CRL-9607) were cultivated in Minimal Essential Medium (MEM, Life technologies, Stockholm, Sweden) with glutamax supplemented with 10% fetal bovine serum, 1% penicillin-streptomycin solution, 1% non-essential amino acids and 1% sodium pyruvate.

### Cellular Internalisation Assay

[0330] The cells used for internalisation experiments were seeded at a density of 10.000 cells/well on round glass coverslips in 24-well plates. After one day, when they had reached about 50% confluency, the medium was changed to serum-free and blotinylated peptides were added directly into the medium. After 60 min of incubation at either 37° C. or 4° C., the cells were washed three times with PBS and fixed with 3% (w/v) paraformaldehyde solution in PBS for 15 min. For indirect detection of the biotin labeled peptide, the fixed cells were permeabilized with 0.5% Triton X-100 in PBS and sites for non-specific binding were blocked with 5% BSA in PBS. The blotin moieties were visuaialized by incubation of the treated cells with streptavidin-TRITC (Molecular Probes, Netherlands, 1:200) for 1 h at room temperature. The cell nuclei were stained with Hoechst 33258 (0.5 μg/ml, Molecular Probes, Holland). The fluorescence was examined by using a Zeiss Axioplan 2 microscope (Carl Zeiss AB, Sweden) equipped with a CCD (C4880, Hamamatsu Photonics, Japan).

### Tissue Preparation

[0331] Dissected porcine hearts (260-390 g) were transported from local slaughterhouse to the laboratory in ice-cold Krebs-Henseleit solution (119 mM NaCl, 23.8 mM NaHCO₃, 3 mM KCl, 1.14 mM NaH₂PO₄, 1.63 mM CaCl₂, and 16.5 mM glucose). Left anterior descending coronary artery and great cardiac vein were isolated. Part of each blood vessel was used immediately after Isolation for contraction assays while part of it was kept frozen in liquid nitrogen for the membrane preparation. In some experiments blood vessels in which endothelium was mechanically removed were used. The same procedure was used also for the preparation of human umbilical blood vessels; umbilical cords were obtained from Obstetric Clinic of Ljubljana Clinical Center, Slovenia.

### Blood Vessel Contraction Measurement

[0332] The measurements were performed as already described (20). Rings (5 mm wide) of blood vessels were cut and mounted into 10 ml tissue chamber filled with Krebs-Henseleit solution (37° C.; pH=7.4) which was oxygenated with the mixture of ⁹⁵% O₂ and 5% CO₂. Initial tension of 50 mN was applied and after equilibration 30 mM KCl was added to obtain stable Isometric contraction. The presence of endothelium was verified with substance P. After washing out of KCl and substance P and after the equilibration of the system was restored, test peptide was added into the tissue chamber and blood vessel contraction was recorded.

### Overexpression of G-Proteins in Sf9 Cells

[0333] Baculovirus transfer vectors harboring the genes for Gsα, Giα1 and β1γ2 were kindly provided by Dr. Tatsuya Haga (University of Tokyo, Tokyo, Japan). The cDNA for bovine Gsα (21) in pVL1392, bovine Giα1 (22) In pVL1392 and bovine β1γ2 (23) in pVL1393 were cotransfected with linearized baculovirus DNA (Pharmingen, San Diego, Calif., USA), and the resulted virus stocks were subjected to one round of plaque purification before generation of high-titer virus stocks. In the expression procedure, Sf9 cells at density of 2 million cells/ml in suspension culture were Infected with a ratio 2:1 of a versus βγ. Cells were harvested 48 h post-infection, washed in PBS and stored at −70° C. until membrane preparation.

### Membrane Preparation

[0334] Frozen pieces of blood vessels were mechanically pulverized. Subsequently membranes were obtained according to the protocol of McKenzie (McKenzie, F. R. Signal Transduction (Milliqan, E., Ed.), Oxford University Press, Oxford, N.Y., Tokyo. (1992)) with minor modifications. Until used, they were kept frozen in the concentration of 1-2 mg protein/ml as determined by the method of Lowry (Lowry, O. H., Rosenbrough, N.Y., Farr, A. L. & Randall, R. J. J. Biol. Chem. 193, 265-275 (1951)). The same procedure (with the exception of pulverization of tissue) was used also for the preparation of membranes from Sf9 cells which overexpressed the G-proteins of different types; protein concentrations of these membrane preparations were between 0.2 and 0.4 mg/ml.

### The Rate of GTPγS Binding

[0335] The binding to G-proteins from blood vessel membranes was followed as described by McKenzie (McKenzie, F. R. Signal Transduction (Milligan, E., Ed.), Oxford University Press, Oxford, N.Y., Tokyo. (1992)). Briefly, the membranes (final protein concentration in the assay mixture was 0.05 mg/ml) were incubated for 3 min in the absence and presence of peptides in different concentrations with 0.5 nM [³⁵S]GTPγS at 13° C. In TE-buffer (10 mM Tris-HCl, 0.1 mM EDTA), pH 7.5. The unbound [355]GTPγS was removed by rapid filtration of the reaction mixture through Millipore GF/C glass-fiber filters under vacuum. The remaining radioactivity contained in the filters was determined in the LKB 1214 Rackbeta liquid scintillation counter. Blank values were determined by replacing the membrane preparations with buffer.

### Measurement of GTPase Activity

[0336] The measurements were performed radiometrically according to Cassel and Selinger (Cassel, D. & Selinger, Z. (1976) 452(2), 538-51. 452, 538-551 (1976, with the modifications suggested by McKenzie (McKenzie, F. R. Signal Transduction (Milligan, E., Ed.), Oxford University Press, Oxford, N.Y., Tokyo. (1992)). To the diluted membranes obtained from Sf9 cells with the overexpressed G-proteins of different types (final protein concentration in the assay mixture was 0.01 mg/ml) the Ice cold reaction cocktail containing ATP (1 mM), 5-adenylylimido-diphosphate (1 mM), ouabain (1 mM), phosphocreatine (10 mM), creatine phospho-kinase (2.5 Units/ml), dithlothreltol (4 mM), MgCl₂ (5 mM), NaCl (100 mM), and trace amounts of [γ-³²P]GTP to give 50.000-100.000 cpm in an aliquot of the reaction cocktail (with the addition of cold GTP to give the required 0.5 μM total concentration of GTP) was added. Incubation medium was standard TE-buffer, pH 7.5. Background low-affinity hydrolysis of [γ-³²P]GTP was assessed by incubating parallel tubes in the presence of 100 μM GTP. Blank values were determined by the replacement of membrane solution with assay buffer. GTPase reaction was started by transferal of the reaction mixtures to 30° C. water bath for 20 min. Unreacted GTP was removed by the 5% suspension of the activated charcoal in 20 mM H₃PO₄. The radioactivity of the yielding radioactive phosphate was determined in Packard 3255 liquid scintillation counter.

[0337] Curve fittings and other calculations as well as graphical presentations of the results were done by using a Prism computer program (GraphPad Software Inc., USA).

### Results

### Cellular Internalisation of Peptides

[0338] Blotinylated M511 internalized into living cells at both 4° C. and 37° C., as judged by indirect immunofluorescence. The peptide translocates in a temperature-independent manner into Bowes melanoma cells and therefore, the main mechanism of uptake could not be endocytosis. The peptide localized preferentially in nuclei (FIG. 15A) but also in the cytoplasm. Scrambled analogue of M511 (also biotinylated) was found to internalize into Bowes cell yielding a similar cellular localization and temperature dependence with M511 (FIG. 15B), with, however, slightly lower efficiency. Penetratin a well-studied cell-penetrating peptide (12-14) was used as positive control (FIG. 15D).

### Blood Vessel Contraction

[0339] It was observed that M511 and blotinylated M511 act as powerful contractors of blood vessels. As seen in upper panel of FIG. 16, M511 at 16 μM concentration promotes intense and long-lasting contraction of porcine left anterior descending coronary artery. The strength of contraction is comparable to the effect of 30 mM K⁺ that is approximately 50% of maximal effect of potassium ion. With higher concentrations the maximal effect approaches the effect of 90 mM KCl that is generally considered to be a maximal attainable contraction effect. Contrary to the contractory effect of potassium, the effect of M511 could not be terminated by washing the contractor out of assay solution. Furthermore it showed a concentration dependent 5 to 15 min lag-period after addition of M511 before contraction occurred. Results (FIG. 16 middle panel) also show that blood vessel endothelium is not essential for the effect of M511.

[0340] Qualitatively the same but quantitatively more pronounced blood vessel contraction as shown in FIG. 16 for M511 was observed also with biotin coupled M511 (diagram not shown). Concentration dependency of the maximal contraction force of porcine left anterior descending coronary artery exerted by M511 and biotin labeled M511 is shown in FIG. 17. Scrambled M511 under same circumstances as M511, did not cause any contraction (FIG. 16 bottom panel).

### GTPγS Binding

[0341] As presented in FIG. 17, the rate of binding of GTPγS to the membranes obtained from the porcine left anterior descending coronary artery was dose-dependently increased in the presence of M511, which was even more pronounced in the presence of blotinylated M511. The upper plateau of the effect was not obtained since the experimental points in the presence of peptides in concentrations over 500 μM could not be used. It is obvious that this effect is sequence specific for M511 (and also blotinylated M511) since the scrambled peptide is not active. Principally the same results were obtained also with membranes prepared from porcine great coronary vein and human umbilical artery (diagrams not shown).

### G-Protein Selectivity

[0342] In order to shed some light on the type of G-proteins that were affected by M511, the inventors used membranes from Sf9 cells overexpressing G-proteins of different types and measured GTPase activity of these membranes in the absence and presence of M511 (100 μM). The results summarized in FIG. 17 show small but significant activation of Gᵢ and Gₒ and, interestingly, also moderate inhibition of G₁₁; Gₛ type of G-proteins seems not to be affected. These findings are in accordance with the suggestion that ATLA receptors function via inhibition of adenylyl cyclase (activation of Gᵢ/Gₒ) and via modulation of phosphoinositide metabolism, most probably through pertussis toxin insensitive G-proteins (G_{q} and G₁₁). Indeed was demonstrated regulation of G₁₁ by M511, however, not by activation of this type of G-proteins but rather by their Inhibition.

### Effect of Sar¹-Thr⁸-Angiotensin II

[0343] Additionally, the inventors could also prove that angiotensin II antagonist Sar¹-Thr⁸-angiotensin II was able to revert the contraction effect of anglotensin II on the porcine left anterior descending coronary artery, but was unable to affect the contraction of blood vessels induced by M511. This is a strong indication that anglotensin 11 and M511 are not acting via the same contraction mechanism and corroborates the finding that M511 does not activate angiotensin receptor but that it probably binds directly to G-proteins and induces activation of phospholipase C.

[0344] Furthermore, it is most likely that in contracting the blood vessels, M511 is more efficient than anglotensin II, since it induced about 40% higher contraction force compared to that induced by 30 mM KCl, while the effect of angiotensin was almost the same as the effect of 30 mM KCl. 1 μM anglotensin and 100 mM M511 were used in order to achieve the maximal effect of both ligands, as is shown in FIG. 20.

### CONCLUSIONS

[0345] M511 is a peptide corresponding to rat AT1A receptor positions 304327 (Table 7). As FIG. 15 demonstrates, biotinylated M511 penetrates into human melanoma cell-line Bowes similarly to a well-studied cell-permeable peptide Penetratin. Moreover, results obtained by porcine artery and vein vessel contraction, confirm Internalization of M511 and suggest, that the Internalized peptide may compete with native receptor and affect its signaling pathway. Interestingly scrambled blotinylated M511 internalize as well into Bowes cells, but does not cause contraction in artery or vein vessel. The observed lag-period in muscle contraction studies could be interpreted as time required for the penetration of sufficient amount of the peptide into the cell and the shortening of lag-period with the increasing concentration of peptides, as well as the Inability to terminate the contraction by washing M511 from the assay solution, would be in accordance with its intracellular action. Virtually Identical effect of M511 in porcine artery and great cardiac vein and human umbilical artery, illustrate that this effect is not restricted only to arteries and Indicating its general nature in blood vessels of different tissues.

[0346] It is well known that AT1A as a member of 7-transmembrane receptors, is coupled to G-proteins via interaction of G subunit and the intracellular parts of the receptor. Increased rate of GTPγS binding (FIG. 18) proves the involvement of G-proteins in the process of blood vessel contraction induced by M511 and corroborate the idea that M511 uncouples G-proteins from the AT1A receptors. The presented results match well with the effect of the peptides on blood vessel contraction (see FIGS. 16 and 17).

[0347] In order to elucidate which G-proteins might be involved in the action of M511, GTPase activity in membranes overexpressing different types of G-proteins was measured. Slight activation of Gᵢ/Gₒ and no effect on Gₛ is in good accordance with previous studies.

[0348] The inventors further inspected the mechanism of M511 action by using phospholipase C inhibitor U73122. As seen in FIG. 26A, U73122 at 30 μM concentration did not affect tonus of the porcine left anterior descending coronary artery (middle panel), and also did not modify blood vessel contraction induced by 16 μM concentration of M511 after posterior administration (upper panel), but it substantially decreased (for more than 50%) the effect of M511 when added 30 minutes prior to M511 administration (lower panel). This indicates that blood vessel contraction by M511 is mediated via phosphoinositole phosphate mechanism, as expected.

[0349] Another intriguing discovery is amplification of the effect of the peptide on blood vessel contraction via biotinylation. It can be proven by principally same effect on GTPγS binding rate (FIG. 18). GTPγS binding rate demonstrates also that N-terminal blotin on M511 does not induce a parallel signaling cascade, leading to contraction, but rather amplifies interactions between G-proteins and the peptide.

[0350] In conclusion, M511 (and even more remarkably, biotinylated M511) seems to be a powerful vasoconstrictor that successfully penetrates the cells and functions via uncoupling of AT1A receptors from Gₗ and Gₒ proteins, and possibly also via Inhibiting G_{q} proteins. As such it is an interesting drug candidate aimed against chronical hypotension and possibly also migraine. Its potential disadvantage is relatively high concentration required for the blood vessel contraction but its advantage could be its spontaneous internalization into the cells and Its long-lasting action. Besides that it gives a new quality for angiotensin studies.

### Summary of Results

[0351] The inventors studied angiotensin and signal transduction via its receptors. By Investigation of cell-penetrating peptides, they succeeded to design a peptide that penetrates cell membranes and Induces ex vivo intracellular signaling cascade similarly to the AT1A type of angiotensin receptor. The peptide, M511, corresponding to the fragment 304-327 of rat AT1A receptor, was found to Internalize into Bowes cells in a temperature Independent manner. This observation was confirmed by contractions of blood vessels from different origins. Induction of long lasting contraction of porcine coronary artery vessel and vessels from several other origins, after concentration dependent lag-period was assigned for the solution of the peptide. In order to discover principles of this action, influence on GTPγS binding rate and Gα-subtype selectivity of the peptide were measured. Results indicate, that the M511 peptide interacts with same selectivity to G-protein subtypes as agonist activated ATLA receptor, activating/inhibiting them. Down-regulation of blood vessel contraction by U73122 indicates that the further pathway involves phospholnositole phosphate system and stimulates phospholipase C for M511 was observed also with biotin coupled M511 (diagram not shown). Concentration dependency of the maximal contraction force of porcine left anterior descending coronary artery exerted by M511 and blotin labeled M511 is shown in FIG. 17. Scrambled sequence M511 under same circumstances as M511, did not cause any contraction (FIG. 16 bottom panel).

### Example 9

### Combining the Effects of PEI and TP10 and/or YTA-2

[0352] In this study the inventors developed a new gene delivery system based on already existing PEI protocols. By combining the effects of PEI and TP10 or YTA-2 together substantially higher transfection ratios were achieved than with PEI only. The approach was to crosslink TP10 to transfection reagent. Thereafter PEI of common transfection protocol was replaced by CPP modified one, and no more changes in protocol were done. Under optimal conditions, the results postulate a significant improvement in gene delivery compared to other systems.

### Materials and Methods

### Synthesis and Purification of TP-10 and YTA-2

[0353] The peptides were synthesized in a stepwise manner on an Perkin Elmer/Applied Biosystem Model 431A peptide synthesizer, using t-Boc strategy according to protocol described previously (Langel, Land et al. 1992). Cysteine or glutamic acid was coupled manually. TP10 sequence is given in (Pooga, 1998, FASEB J.). Cysteine or glutamic acid was coupled manually. TP10 sequence is given in Pooga, 1998, FASEB J. YTA-2 sequence is given in table 5 and listed as SEQ.ID.NO.31913. Prior conjugating peptides to PEI, they were purified on a reversed phase HPLC (Gynkotek) C18 column with AcN/H₂O gradient, and analyzed using a MALDI-TOF Mass spectrometer (Applied Biosystems model Voyager STR). The mass values obtained matched calculated values.

### PEI Modifications

### PEI Modifications

[0354] Conjugation of TP10 or YTA-2 to PEI was done in two alternative ways. In the first case, a cysteine was coupled to Lys7 side chain of TP10 or N-terminus of YTA-2. PEI (1 mg/ml, MW: 60 kDa, Aldrich) was treated with bifunctional crosslinker succinimidyl trans-4-(maleimidylmethyl)cyclohexane 1-carboxylate (SMCC) at concentratios needed for different TP10/PEI molar ratios. In the second case, glutamic acid was coupled to the N-terminus of TP 10 and was further covalently coupled to PEI (MW: 25 kDa, Sigma) using BOP generated Hobt esters. The calculated molecular weight of formed complexes was confirmed by MALDI TOF mass-spectrometry.

### Cell Culture

[0355] Murine fibroblasts C3H 10T1/2, mouse neuroblastoma N2A cells and COS-7 cells were grown in 10 cm petri dishes in Dulbecco's Modified Eagle's Media (DMEM) supplemented with 10% fetal calf serum (FCS), 2 mM L-Glutamine, 100 U/ml penicillin and 0.1 mg/ml streptomycin at 37° C. in a 5% CO₂ atmosphere. The cells were seeded and replated every fifth day. COS-7 and 10T1/2 cells were trypsinized when seeded while the N2A cells were suspended by mechanical force by adding media to the cells. Before starting the experiments, the cells were grown to confluency and then seeded and diluted two times in media before adding to 24-well plates (approximately 60 000 cells/well).

### Propagation of Plasmids

[0356] pEGFP-N1, pEGFP-C2 (both Clontech), pGL3-Promoter Vector (Promega) and pRL-CMV Vector (Promega) plasmids were propagated in replication competent E. coli, according the protocol suggested by the manufacturer. The propagated plasmids were purified using Qiagen midiprep (Qiagen) and then applied on agarose gel in order to estimate the purity and concentration of plasmid. The concentrations were then finally determined by ON spectrometry for each plasmid.

### Transfection

[0357] Transfection of COS-7 and N2A cells and murine fibroblasts C3H 10T½. PEI solution was dialysed by dialysis membrane (MW-cutoff 15 kDa) in order to remove smaller PEI fragments that can be toxic to the cells. Thereafter TP10 was crosslinked to PEI as described above. The PEI and/or CPP-PEI stock solutions (1 mg/ml) were diluted so that the same volume of solution could be taken for each N/P ratio experiment. 10 μl of plasmid (0.05 μg/μl) and 10 μl of transfection reagent were mixed in a 96 well plate, each experimental point separately. The mixture was incubated 15 min at room temperatures. Meanwhile media of 24 hours prior seeded cells was changed to fresh (250 μl/well in 24 well plate). After incubation of plasmid and PEI was finished, 20 μl of the conjugate was added to cells. Transfection was carried out for 3 h at 37° C., followed by media change. Efficiency of transfection was measured 24 or 72 h after transfection.

### Fluorescense Microscopy

[0358] The level of GFP expression was investigated by an inverted fluorescence microscope (Zeiss Axiovert 200 equipped for fluorescence microscopy, or Olympus IMT2 inverted microscope with RFL-1 fluorescence device), 1-3 days after transfection.

### GFP Quantification

[0359] For GFP quantification in murine fibroblasts C3H 10T1/2 cells were lysed and the lysate was exitated at 485 nm, and UV emission was measured at 527 nm using Labsystems. Fluoroscan Ascent CF instrument (Labsystems, FI).

[0360] Cells transfected by renilla or firefly luciferase gene were lysed 36 hours after transfection using passive lysis buffer (Promega). Samples were freeze-thawed once and luciferase activity was measured on the same or next day. Protocol of dual luciferase kit, recommended by manufacturer (Promega) was used on Victor (Wallac, Finland) luminometer. Obtained luciferase activities were transformed into activity per mg of total protein concentration. Determination of total protein concentration was performed by Bradford method.

In vivo Transfection of Chicken Embryo

[0361] Eggs with developing chicken embryos (3 days) were opened and SMV-lacZ reporter genes were injected on embryo near neural tube. After 48 h embryos were removed and fixed for 1-2 hours in 2% paraformaldehyde, 0.25% glutaraldehyde, washed with PBST and stained with staining solution (9 ml spermidine, 1 ml of 2% Xgal in DMF 0.5 ml of 165 mg/ml K-ferricyanide, 0.45 ml 210 mg/mL K-ferrocyanide) until blue color developed (2 h).

### Results

### CPP-PEI and GFP

[0362] TP10-PEI as well as YTA-2-PEI constructs mediated considerably higher levels of GFP transfection compared to unmodified PEI protocol at all tested concentrations. The most significant increase was achieved at concentrations below 1 μg TP10-PEI per well. At higher concentrations, the difference between modified and unmodified PEI was still significant, but not so drastic. FIG. 21A a, b and c. demonstrate the effect of unmodified PEI at concentrations of 0.25, 0.5 and 1.0 μg per well, respectively. d, e and f in the same figure correspond to TP10 modified PEI at same concentrations. In a parallel study, murine fibroblasts C3H 10T1/2 were used instead of N2A cells. The GFP expression was determined up to 14 times higher (ratio of PEI-TP 0.4 μg vs. DNA 1.2 μg) as with PEI alone under given experimental conditions. In fluorescent microscopy, the number of eGFP expressing cells was significantly higher in the samples transfected with PEI-TP.

### TP10-PEI and Luciferase

[0363] Under optimal conditions, in full growth media, TP10 modified PEI (TP10/PEI molar ratio 5) mediated about an 100% Increase in luciferase transfection efficiency (se FIG. 21B) Under nonoptimal conditions no significant positive effect was observed.

[0364] FIG. 22 shows transfection of mouse neuroblastoma N2A cells with unmodified polyethylenimine (PEI) or chemically crosslinked PEI and cycteinyl YTA2 or TP10 peptide. Two different concentrations of PEI or peptidyl-PEI were tested: 1 or 0.5 μg per 1 ml of media. Transfection was performed for 3 h in serum-free growth media (DMEM) and photos were taken 48 h after transfection. Improvement of transfection was registered with application of both, YTA2 and TP10 peptides. YTA2-PEI and PEI-TP10 transfected 2 times more cells than unmodified PEI, and also the expression level in transfected cells was higher.

### TP10/PEI Molar Ratio

[0365] Four different TP10/PEI ratios in the range of 1 to 100 molecules of TP10 per 1 polycationic molecule were tested. Results showed that the delivery yield is depending on the ratio. 5 TP10 per one PEI was found to be the best ratio, followed by 20. The most optimal ratio is probably between 5 and 20. Ratios 1 and 100 had lowest effect.

In vivo Transfection of Chicken Embryo

[0366] When SMV-lacZ alone or in complex with PEI was applied to the embryo, no expression of the reporter gene was observed. If SMV-lacZ was complexed with PEI-TP10 the reporter gene was expressed in a neural tube region as detected by specific staining. The B-galactosidase staining was strong and was distributed with equal intensity all over the neural tube region.

### Example 10

### Positional Scanning of CPP within Human 7™ Receptors

[0367] Human 7™ receptor sequences were downloaded from the swissprot/trmbl databases. The sequences were searched for CPPs of the indicated length (8, 12 and 17 aa long). The position of the start of the CPP in the protein was divided by the total length of the protein, plotted against the frequency of occurrence (fraction of CPPs). Here, a search window in the size of 17 aa produced the most hits. The four peaks in evidence correspond to the four intracellular parts of the 7TM receptors, with the largest peak corresponding to the third internal loop (IC3). It can be noted that the CPP functionality seem to correlate well, both with the topology of the 7™ receptors, as well as with the proposed G protein activation sites. See FIG. 23.

### Example 11

### New Selection Criteria

### Three Graded System

[0368] The three grades represent a successive narrowing of the descriptor interval. The performance of the grades can be seen from table 10. Principally, the higher the grade, the lower the chance that a predicted CPP is a “false” positive. However, the chance that a CPP is missed also increases.

### New “Descriptors”

[0369] Two additional descriptors are introduced: Bulkha being the number of non-hydrogen atoms (C, N, S and O) in the side chains of the amino acids, and hdb standing for the number of accepting hydrogen bonds for the side chains of the amino acids.

TABLE 10
New descriptors:

| Amino acid | Bulkₕₐ | hdb |
|---|---|---|
| A | +1 | 0 |
| C | +2 | 0 |
| D | +4 | −4 |
| E | +5 | −4 |
| F | +7 | 0 |
| G | 0 | 0 |
| H | +6 | −2 |
| I | +4 | 0 |
| K | +5 | +3 |
| L | +4 | 0 |
| M | +4 | 0 |
| N | +4 | 0 |
| P | +3 | 0 |
| Q | +5 | 0 |
| R | +7 | +5 |
| S | +2 | −1 |
| T | +3 | −1 |
| V | +3 | −0 |
| W | +10 | +1 |
| Y | +8 | 0 |

[0370] The supplemented selection criteria uses Z_{Σ1}, Z_{Σ2}, Z_{Σ3}, Z_{ΣBulkha} and net hydrogen bond donation (hdb) and average hdb. Bulkha is calculated as number of atoms in the side chain of the amino acids not counting the hydrogens e.g. for CH₂CH₂OH (serine) Bulkₕₐ=2*C+1*O=3. hdb is calculated as the donated hydrogen bonds-accepted hydrogen bonds of the side chains. E.g. N—H donates and C═O accepts.

[0371] The three grades represent a successive narrowing of the descriptor interval. The performance of the grades can be seen from table 11.

TABLE 11
Correctly predicted, in %, for the 3 grades

| | Grade is | | |
|---|---|---|---|
| | >0 | >1 | >2 |
| Positives | 100 | 72 | 41 |
| Negative | 50 | 61 | 82 |
| Unrelated | 80 | 90 | 100 |

[0372] Positives correspond to the CPP training-set, negatives corresponds to the non functional CPP analogues training-set and unrelated corresponds to hormone training-set.

TABLE 12
“training sets”.

| | Non-functional-CPP-analogues | |
|---|---|---|
| CPP training-set | training-set | Hormone training-set |
| GWTLNSAGYLLGKINLKALAALAKKIL | GWTLNSAGYLLGKFLPLILRKIVTAL | QNLGNQWAVGHLM |
| RQIKIWFQNRRMKWKK | LLGKINLKALAALAKKIL | RPPGFSPFR |
| KLALKALKALKAALKLA | LNSAGYLLGKALAALAKKIL | LYGNKPRRPYIL |
| LLIILRRRIRKQAHAHSK | LNSAGYLLGKLKALAALAK | GWTNLSAGYLLGPPPGFSPFR |
| AGYLLGKINLKALAALAKKIL | GWTLNSAGYLLGKINLKAPAALAKKIL | GWTLNSAGYLLGPHAI |
| FLGKKFKKYFLQLLK | LLKTTALLKTTALLKTTA | HDEFERHAEGTFTSDVSSYLEGQAA |
| | | KEFIAWLVKGR |
| GRKKRRQRRRPQ | LLKTTELLKTTELLKTTE | WSYGLRPG |
| RRRRRRRRR | GRKKRRQPPQC | TIHCKWREKPLMLM |
| GWTLNSAGYLLGKINLKALAALAKKLL | FITKALGISYGRKKRRQC | FVPIFTHSELQKIREKERNKGQ |
| GWTLNPAGYLLGKINLKALAALAKKIL | QNLGNQWAVGHLM | AGCKNFFWKTFTSC |
| GWTLNPPGYLLGKINLKALAALAKKIL | RPPGFSPFR | CYFQNCPRG |
| LNSAGYLLGKINLKALAALAKKIL | LYGNKPRRPYIL | |
| GWTLNSAGYLLGKLKALAALAKKIL | GWTNLSAGYLLGPPPGFSPFR | |
| RRWRRWWRRWWRRWRR | GIWFAYSRGHFRTKKGT | |
| GWTLNSKINLKALAALAKKIL | LRKKKKKH | |
| LNSAGYLLGKLKALAALAKIL | VATIKSVSFYTRK | |
| AGYLLGKLKALAALAKKIL | KKKQYTSIHHGVVEVD | |
| KLALKLALKALKAALK | RQIKIFFQNRRMKFKK | |
| KLALKLALKAWKAALKLA | KKLSECLKRIGDELDS | |
| KITLKLAIKAWKLALKAA | PVVHLTLRQAGDDFSR | |
| KALAKALAKLWKALAKAA | EILLPNNYNAYESYKYPGMFIALSK | |
| KALKKLLAKWAAAKALL | IAARIKLRSRQHIKLRHL | |
| KLAAALLKKWKKLAAALL | | |
| LKTLATALTKLAKTLTTL | | |
| KALAALLKKWAKLLAALK | | |
| KLALKLALKALQAALQLA | | |
| KLALQLALQALQAALQLA | | |
| QLALQLALQALQAALQLA | | |
| LLKKRKVVRLIKFLLK | | |
| RLIKTLKTLLQKRKTL | | |
| NAKTRRHERRRKLAIER | | |
| LLIILRRPIRKQAHAHSK | | |
| LLIILRARIRKQAHAHSK | | |
| LLIILRRRIRKQAHAHSA | | |
| TRRNKRNRIQEQLNRK | | |
| GGRQIKIWFQNRRMKWKK | | |
| MGLGLHLLVLAAALQGAKKKRKV | | |
| RKKRRQRRR | | |
| GRKKRRQRRRPPC | | |
| GRKKRRQRRRC | | |
| GRKKRRQRRPPQC | | |
| RQPKIWFPNRRMPWKK | | |
| RQIKIWFPNRRMKWKK | | |
| TRQARRNRRRWRERQR | | |
| KMTRAQRRAAARRNRWTAR | | |
| RVIRVWFQNKRCKDKK | | |
| RKSSKPIMEKRRRAR | | |
| YGRKKRRQRRRPPLRKKKKKH | | |
| RQIKIWFQNRRMKWKKLRKKKKKH | | |
| VQAILRRNWNQYKIQ | | |
| MAQDIISTIGDLVKWIIDTVNKFTKK | | |
| KRPAATKKAGQAKKKKL | | |
| RRRRNRTRRNRRRVR | | |
| TRRQRTRRARRNR | | |
| MDAQTRRRERRAEKQAQWKAAN | | |
| TAKTRYKARRAELIAERR | | |
| RQGAARVTSWLGRQLRIAGKRLEGR | | |
| SK | | |
| RQGAARVTSWLGRQLRIAGKRLEGR | | |
| GAARVTSWLGRQLRIAGKRLEGRSK | | |
| RVTSWLGRQLRIAGKRLEGRSK | | |
| SWLGRQLRIAGKRLEGRSK | | |
| GRQLRIAGKRLEGRSK | | |
| KCRKKKRRQRRRKKLSECLKRIGDE | | |
| LDS | | |
| KCRKKKRRQRRRKKPVVHLTLRQAG | | |
| DDFSR | | |
| AAVALLPAVLLALLAPVQRKRQKLMP | | |
| RRRRRRWGRWGRWGRWGRWGR | | |
| WGRPKKKRKV | | |
| ALWMTLLKKVLKAAAKAALNAVLVG | | |
| ANA | | |
| ALWKTLLKKVLKA | | |
| PKKKRKVALWKTLLKKVLKA | | |
| RQARRNRRRALWKTLLKKVLKA | | |
| RQARRNRRRC | | |
| RRLSYSRRRF | | |
| RGGRLSYSRRRFSTSTGR | | |
| YGRKKRRQRRRSVYDFFVWL | | |
| YGRKKRRQRRRGTSSSSDELSWIIE | | |
| LLEK | | |
| IVIAKLKA | | |

Non-natural sequences listed as SEQ. ID. NO. 31923-31940:

| | |
|---|---|
| Evo162 | KTVLLRKLLKLLVRKI |
| Evo163 | KIIKRLIVVRLITLVIK |
| Evo164 | LLKLKLLAILKIKLIV |
| Evo83 | KLIRKRLI |
| Evo86 | RLIKRLIK |
| Evo86 dimer | (RLIKRLIKC)₂ |
| Evo165 | LLKKRKVVRLIKFLLK |
| Evo165 analogue | LLKKRKVVRLIKQKQK |
| Evo165 analogue | LLKKRKVRLIKQKQK |
| Evo165 analogue | LLKKRKVVRLIKAHSK |
| Evo165 analogue | LLKKRKVRLIKAHSK |
| Evo165 analogue | LLKKRKVVRLIKVRK |
| L-407-Abz | LKLLYKNKLLKYNLKamide |
| L-408-Abz | KLFKYKKLKRYFYLQKamide |
| L 409-Abz | YKRLSLVKRLIKamide |
| Evo165-B | Biotin-LLKKRKVVRLIKFLLKamide |
| Evo165 amide | LLKKRKVVRLIKFLLKamide |

[0373] As described previously for the first set of selection criteria, the values for the peptide are averaged (divided by number of amino acid residues in the peptide). Z_{Σ1}, Z_{Σ2}, Z_{Σ3}, Z_{ΣBulkha}, Z_{Σhdb}

[0374] The Intervals for the Different Grades are:

3: Preferred: Z_{ΣBulkha}>3.1 and Z_{ΣBulkha}<8.13 and Z_{Σ1}>−1.25 and Z_{Σ1}<3.52 and Z_{Σ2}>−3.9 and Z_{Σ2}<3.1 and Z_{Σ3}<−0.5 and Z_{Σ3}>−3.51 and Z_{Σhdb}>−0.115 and Z_{Σrhdb}<5.1 and hdb>0 and hdb<84
2: More preferred: Z_{ΣBulkha}>3.2 and Z_{ΣBulkha}<5.9 and Z_{Σ1}>−1.25 and Z_{Σ1}1.92 and Z_{Σ2}>−1.22 and Z_{Σ2}<1.29 and Z_{Σ3}<−0.5 and Z_{Σ3}>−1.94 and Z_{Σhdb}>0.28 and Z_{Σhdb}<2 and hdb>5 and hdb<30
1: Most preferred: Z_{ΣBulkha}>3.2 and Z_{ΣBulkha}<4.8 and Z_{Σ1}>−1.1 and Z_{Σ1}<1.92 and Z_{Σ2}>−1.1 and Z_{Σ2}<0 and Z_{Σ3}<−0.55 and Z_{Σ3}>−1.94 and Z_{Σhdb}>−0.28 and Z_{Σ1}<1.57 and hdb>7 and hdb<25

### Example 12

[0375] seICPP

### Introduction

[0376] Matrix metallo proteases (MMPs) are Zn²⁺ metallo endopeptidases. The family contains both membrane bound and secreted members of which both catalyse the breakdown of proteins located either on the cell's plasma membrane or within the extracellular matrix (ECM) (Sternlicht-01).

[0377] Because MMPs can degrade the ECM, MMP's influence cell migration, remodeling, and inflammatory responses. However, these enzymes may also be involved in the underlying causes of invasive and inflammatory diseases, including cancer, rheumatoid arthritis, multiple sclerosis and bacterial meningitis (Leppert-01).

[0378] One characteristic of invasive processes like metastasis and angiogenesis is the degradation of the ECM and basal membranes, which are normally physical barriers to cell migration. MMPs have been linked to the invasive and metastatic behaviour of a wide variety of malignancies, and these enzymes are generally overexpressed in a variety of tumours (Sternlicht-01, Rozanov-01). The number of different MMPs have been found to increase with tumour progression (Hoekstra-01) and correlate to the invasive capacity of certain tumours (Hornebeck 02). Furthermore, expression of MMPs have been correlated to the number of metastatic growth in transgenic mice (Strenlicht-01).

[0379] Membrane type MMPs (MT-MMP) such as MMP-MT1 have been strongly implicated in oncogenesis. These enzymes localise to the invasive fronts. The soluble MMPs 1-3 and 9 have also been implicated as agonists of tumourigenesis (Rozanov-01 and Nabeshima-02). MMP-MT1 is also upregulated during endothelial cell induction and migration during anglogensis (Galvez-01). In addition, MMP-MT1, or MMP14 as it is also called, is involved in the activation of proMMP-2 by its “shedase” activity, thereby releasing active MMP-2 at the inasive front (Sounni-02). MMP-2 appears to have an important role in tumour angiogensis (Chen-01).

seICPPs

[0380] The concept of selective CPPs are based on the tissue specificity of MMPs enzyme activity. One approach is to use endocytotic uptake for specificity and activation of the CPP by conjugating it to any receptor ligand, such as galanin.

TABLE 13
Sequences of sel CPPs

| Name | Sequence | Uptake | In Cells |
|---|---|---|---|
| YTA-2 | biotin-YTAIAWVKAFIRKLRK-amide | +++ | Lovo, bEnd, |
| SelCPP1 | | | Caco |
| YTA2-ps | biotin-SGESLAY-YTAIAWVKAFIRKLRK-amide | + | Lovo, bEnd, |
| | | | Caco |
| LRSW-1 | LRSWVISRSIRKAA-amide | nd | synthesis |
| LRSW-2 | LRSWIRRLIKAWKS-amide | nd | synthesis |
| LRSW-3 | LRSWRVIIRNGQR-amide | nd | synthesis |
| SelCPP2 | coum-DEEQERSEN-IRQIKIWFQNRRMKWK*K-amide | ++ | bEnd, Caco, |
| (FIG. 24) | | | SHS5Y |
| LYP-1 | CGNKRTRGC cyclic | − | Laakkonen |
| | | | 02 |
| Endo CPP | GWTLNSAGGKLKALAALAK | nd | synthesis |
| | Cys-s | | |
| | s-Cys-LLKKRKVVRLIKFLLK-amide | | |

*fluoresceinlabelled

MMP Activated selCPP

[0381] A typical selCPP (FIG. 25) is made up of three parts, the transporter (CPP), the specific protease site and the Inactivator. The Inactivator is added to Inactivate the CPP, so that it cannot enter cells before the inactivator is cleaved off. The CPP carries a toxin, for example a known non-permeable cytostatic and/or cytotoxic agent. For preferred embodiments of sequences and labelling of the peptides see table 13.

[0382] The Idea is based on three basic functions: a) selective cleavage (and thereby activation) by MMP-2 or MMP-MT1, b) cellular penetration by peptide (CPP) carrying the toxin and thereby c) killing of nearby, preferably tumour cells or endothelia involved in tumour neovascularisation (a schematic view is given in FIG. 25).

[0383] As an illustrative example to prove the above concept, the present inventors have successfully been able to show that the CPP-part of the selective CPP (YTA-2) can efficiently enter cells both at 370 (FIGS. 27 and 28) and 4° C. (data not shown). In addition, the “Inactivator”, see FIG. 26, renders the peptide less active in translocation over the cell membrane. The correct cleavage of YTA-2 by MMP2 has also be confirmed by mass spectrometry (data not shown). The attachment and efficiency of cytostatic and/or cytotoxic agent (MTX) to the CPP-part, see example 14.

[0384] There are four new sequences for cleavage of MMP 14 (or MMP-MT1): the LRSW1-3 and penMMP14. The latter has been shown to be taken up in cells expressing MMP14 (Bowes and Caco-2) see FIG. 24.

[0385] Additionally, the 67 kDa protein fluorescein labelled streptavidin was internalised when linked to blotinylated YTA-2 (see FIGS. 39 and 40). This shows that YTA-2 can transport large cargo molecules into cells.

TABLE 14
Epression of MMP2 and MMP14 in cell lines in the lab.

| | MMP2 expression | MMP14 expression |
|---|---|---|
| Cells: | (Experiment): | (Litterature) |
| Caco-2 | − | + |
| Lovo | − | + |
| SHS5Y | + (released inactive) | not determined |
| Bowes | + (released inactive) | + |
| PC 12 | + (released inactive) | not determined |
| Rinm5F | − | not determined |

[0386] All the selCPP tested for uptake so far are confirmed with mass spectrometry. Furthermore the stability of the peptides in cell culture media and in cell lysate are determined. In addition, the selectivity of the peptides are tested in in vitro cell assays, for example with cells expressing the selectively protease mixed with cells that do not express the protease for activation of the CPP part (Table 14.)

### Example 13

### Modification of Aβ-Production by Regulation of Secretase Activity

[0387] Amyloid Precursor Protein is processed in at least three different places by proteases called secretases. The secretases that are responsible for the creation of the Aβ-fragment, which is believed to be the main reason of toxicity in Alzheimer's Disease, are the β- and γ-secretases. Regulation of these secretases nowadays seems to be one of the most appealing approaches for developing a pharmaceutical aimed at reducing the Alzheimer's Disease symptoms.

[0388] Although this approach seems straightforward in inhibiting the AD symptoms, some caution is needed. This is mainly due to the fact that there is still some doubt as to whether the other fragments created in the secretase processing, sAPP (secretory APP) and AICD (APP intracellular domain), have some activity which is needed for the cells to work properly. Another problem to overcome is to be able to separate the Influence on APP from Notch, which in some ways seems to be processed in the same fashion as APP. In one embodiment of the present invention, an approach to this problem is taken comprising synthesising peptide fragments derived from the different secretases to find a peptide containing an ability to bind to a consensus sequence in the secretases/APP, thus competing with the secretase binding, which at the same time contains cell-penetrating ability. Said approach leads a transporter and deactivator in the same sequence, thus yielding a potential pharmaceutical against Alzheimer's Disease.

[0389] The sequences synthesised origin from Presenilin-1, nicastrin, APH-1 and PEN-2, which are important constituents in the γ-secretase complex. Also sequences from BACE, which is believed to be the β-secretase, is synthesised.

### Peptide Sequences.

TABLE 15
Peptides synthesised for affecting β-amyloid production.

| | |
|---|---|
| Ps-1-F 97-109 (6) del-I | VATKSVSVFYTRK deletion-I |
| Ps-1-F 97-109 (6) | VATIKSVSVFYTRK |
| Ps-1-F 151-162 (7) | VVLYKYRCYKVI |
| Ps-1-F 305-317 (11) | AQRRVSKNSKYNA |
| PS-1-F 151-165 | VVLYKYRCYKVIHAW |
| PS-1-F 151-165 H163R | VVLYKYRCYKVIRAW |
| PS-1-F 151-165 H163Y | VVLYKYRCYKVIYAW |
| PS-1-F 147-163 | TILLVVLYKYRCYKVIH |
| PS-1-F 147-163 H163R | TILLVVLYKYRCYKVIR |
| PS-1-F 148-163 H163R | ILLVVLYKYRCYKVIR |
| PS-1-F 149-163 H163R | LLVVLYKYRCYKVIR |
| PS-1-F 150-163 H163R | LVVLYKYRCYKVIR |
| PS-1-F 151-163 H163R | VVLYKYRCYKVIR |
| APP-F 521-537 (1) | KKAAQIRSQVMTHLRVI |
| APP-F 712-726 (3) | IATVIVITLVMLKKK |
| APP-F 712-726 V717F | IATVIVITLVMLKKK |
| APH-1a-F 97-109 | VFRFAYYKLLKKA |
| BACE-F 296-313 | RLPKKVFEAAVKSIKAAS |
| Nct-F 616-635 (I) | RLPRCVRSTARLARALSPAF |
| Nct-F 651-666 (II) | SRWKDIRARIFLIASK |
| Nct-F 414-434 (III) | RRPNQSQPLPPSSLQRFLRAR |
| PEN-2 11-26 | KLNLCRKYYLGGFAFL |
| PEN-2 63-75 | KGYVWRSAVGFLFW |
| PEN-2 78-89 | FQIYRPRWGALG |

### Methods

[0391] The γ-secretase cleavage is monitored through a luciferase reporter assay (Karlstrom et al. J Biol Chem 2002 Mar. 1; 277(9):6763-6)

[0392] The time points of peptide exposure were arbitrarily chosen since no previous data regarding these peptides could be consulted. The peptides were added twice, with 4 hours Incubation between the additions. After the incubation, the cells were washed with PBS, and lysed. After lysation, the luciferase activity and the protein concentrations was measured. The results are shown as % of control, were no peptide was added.

[0393] Luminescence rendered by presence of either peptide is shown in FIG. 30. A result above zero indicates an increase in APP cleavage compared to control, while data lower than zero represent the opposite. A difference can be seen in cleavage effects between the two procedures of peptide administration as well as between cell line responses. N293 is affected, of varying degree, regardless of time point, while the C293 cell line is primarily influenced by the longer exposure time. The two peptides seemingly follow one another in cleavage pattern but diverge in effect.

### Example 14

### Example of Intracellular Drug Delivery Conjugate of Methotrexate and Cell-Penetrating Peptide (MTX-CPP)

### Introduction

[0394] Methotrexate (MTX) is a cytotoxic drug, which was developed for the treatment of malignancies but is now also used to cure autoimmune diseases, such as psoriasis. MTX is a folate antagonist (Formule 1) and enters the cell via folate transporters. The targets of MTX are folate-requiring enzymes.

[0395] The usage of MTX in the treatment of psoriases is hampered due to its side-effects at the systemic administration, most serious is hepatotoxicity. Therefore, a topic administration formulation of MTX is highly desirable.

[chemical structure]

### Formule 1. The Structure of MTX.

[0396] In the biological fluids, MTX is present as negatively charged molecule. Therefore, it can cross the cell membrane only via folate transporters. The present invention for the first time reveals the means to produce an MTX-CPP conjugate which:
[0397] 1) penetrates readily and receptor/carrier-independently into cells and into the skin
[0398] 2) hampers the keratinocyte hyperproliferation, a hallmark of psoriasis
[0399] 3) does not have unwanted side effects (such as histamine release).

[0400] All the MTX-CPP conjugates are synthesised using solid phase peptide synthesis strategy. This is possible due to two reasons:
[0401] 1) MTX (CAS no 59-05-2) can be divided into two structural units: 4-deoxy-4-amino-N10-methylpteroic acid (Apa, CAS no 19741-14-1) and γ-glutamate
[0402] 2) MTX is relatively insensitive to substitutions on its γ-carboxyl group

TABLE 16
MTX-CPP conjugates

Apa-γGlu-Gly-CPP
Apa-(γGlu)2-5-Gly-CPP
Apa-Cys-S-S-Cys-CPP

[0403] As shown in Table 16, several MTX-CPP conjugates are designed. It is expected that the CPP part of the conjugate is degraded in the cell.

### Solid Phase Synthesis of MTX-CPP Conjugates

[0404] Fmoc-chemistry was used due to MTX not being stable under standard cleavage conditions for Boc-chemistry (hydrogen fluoride at 0° C. for 30 min). The couplings of Fmoc-Glu-OtBu and Apa were performed using the standard coupling method (HOBt/TBTU). The conjugates were cleaved from the resing using the Reagent K (82.5% TFA: 5% phenol: 5% thioanisole: 2.5% 1,2-ethanedithiol).

### Cell Cultures

[0405] All cells were cultured at 37° C. in 5% CO₂. The plastic labware was from Corning Inc. (Acton, Mass.). Neonatal human epidermal keratinocytes (HEKn), all growth media components and trypsination reagents necessary for their propagation were obtained from Cascade Biologicsm (Portland, Oreg.). HEKn cells were cultured in Epilife® Medium supplemented with human keratinocyte growth supplement kit (HKGS) and penicillin, streptomycin and amphotericin B. HEKn cells were splitted once a week, seeding 300 000 cells per T75. Growth medium was changed every 1-2 days.

[0406] Bowes human melanoma cells were obtained from American Type Culture Collection (Manassas, Va.). Bowes cells were cultured in Minimal Essential Medium with Earie's sats complemented with Glutamax-I, non-essential amino acids, sodium pyruvate, penicillin, streptomycin (referred on figures as “MEM”) and 10% foetal bovine serum (FBS). All media components for Bowes cells were from invitrogen Corporation (Paisley, UK). Trypsin/EDTA was from PAA laboratories GmbH (Linz, Austria). Cells were subcultured once a week, seeding 200 000 cells per T75. For the viability assays, 50 000 cells (in 300 μl) were seeded per a well in a 24-well-plate a day before the experiment. K562 human erythroleukemia cells were obtained from American Type Culture Collection (Manassas, Va.). K562 cells were cultured in RPMI-1640 medium complemented with Glutamax-I, penicillin, streptomycin (referred in FIG. 32-35 as “RPMI”) and foetal bovine serum (7.5%). All media components for K562 cells were from invitrogen Corporation (Paisley, UK). Trypsin/EDTA was from PAA laboratories GmbH (Linz, Austria). Cells were subcultured every 2^{nd} or 3^{rd} day (when cell density had reached 1 000 000 cells/ml), seeding 100 000 cells per ml. For the viability assays, 30 000 cells in 300 μl were seeded per a well in a 24-well-plate.

### Cell Viability Measurements

[0407] The stock solutions of the conjugates (1 mM) were prepared in sterile water and the stock solution of MTX in 10% DMSO in water. For the exposure, the drugs were diluted in the exposure medium (serum-free OPTIMEM or 1% FBS in MEM or 10% FBS in MEM or 7.5% FBS in RPMI) to the desired concentrations (in the case of Bowes cells) or to 10× final concentration (in the case of K562 cells). 300 μl (for Bowes) or 30 μl (for K562) of the respective exposure mix was used per well. In the case of some experiments with Bowes cells, the exposure mix was removed after 2 h and replaced with prewarmed drug-free exposure medium. After 1-2 days the cell viability was assayed using CellTiter-Glo™ Luminescent Cell Viability Assay (Promega, Madison, Wis.). The plates were equilibrated to the room temperature (approximately 30 min). 300 μl of CellTiter-Glo™ Reagent was added to each well and incubated for 10 min. Then 300 μl was transferred to a white polystyrene FluoroNunc™ plate (Nunc A/S, Roskilde, Denmark) and luminescence was recorded at dual-scanning microplate spectrofluorometer (SPECTRAmax® GEMINI XS, Molecular Devices, Sunnyvale, Calif.).

### Results

[0408] The results obtained so far indicate clearly that conjugation of an MTX to a CPP does not abolish the cell-penetrating nature of a CPP (as exemplified in FIG. 31, wherein Apa-γGlu-Gly-Evo165 is shown to penetrate into human epidermal keratinocytes). Also, the inventors find that the conjugation of a CPP to MTX does not abolish the toxic effect of MTX. Note that the γ-carboxyl group of MTX is more suitable for the conjugation to CPP than the α-carboxyl group of MTX (as seen in FIG. 32, wherein Apa-γGlu-Gly-pVEC is demonstrated to be more toxic than Apa-Glu-Gly-pVEC). What is more, a variety of different CPP-s can be used in the MTX-CPP conjugate as exemplified by all tested conjugates so far: Apa-γGlu-Gly-pVEC in FIG. 32, Apa-γGlu-Gly-Evo165 in FIG. 34 and Apa-γGlu-Gly-YTA2 in FIGS. 34 and 35).

### Example 15

### Improvement of siRNA Uptake using CPP

[0409] In resent years, small Interfering RNA (siRNA) have gained a lot of attention for their highly sensitive ability to regulate gene expression in mammalian cells. siRNA are short strands (about 20 bp) of double stranded RNA that Induce specific cleavage of their complementary mRNA through activation of the RNA-induced silencing complex (RISC). The RNA-induced silencing is an endogenous mechanism, but synthetically synthesized siRNA's have been shown to have the same effect both in vitro and In vivo.

[0410] Unfortunately, a typical problem when using siRNA is the low yield of uptake in the cell. By coupling cell-penetrating peptides (CPP) according to the present invention to synthetically synthesized siRNA the inventors were able to improve the cellular uptake both in vito and in vivo.

[0411] A siRNA was designed against the galanin receptor-1 (GALR-1) mRNA to which a CPP Transportan10 (Tp10) was coupled via a disulfide linker. The properties of the CPP were shown to increase the cellular uptake of the siRNA, thus rendering it more suitable of pharmaceutical usage. A schematic view of the mechanism of action is given in FIG. 39.

### Material and Methods:

[0412] Bowes cells were grown over night in a 24 well plate (100 000 cells/well). The cells were treated with 200 μl, 1 μM fluorescently labelled peptide (pVEC), or fluorescently labelled siRNA-peptide (according to FIG. 37) for 30 min at 37° C. The cells were exposed to 3 times diluted standard trypsin/EDTA to remove any peptide stuck to the outer cell membrane. The cells were then lysed with 0.1% Triton-X and the uptake of peptide/siRNA was measured using Spectramax Gemeni XS fluorescence reader.

### Results:

[0413] As can be seen in FIG. 37, a clear difference was noted in uptake of CPP-conjugated DNA (siRNA) as compared to naked siRNA. The uptake was not due to membrane disruption by the cell-penetrating peptide. Furthermore mixture of un-conjugated pVEC and siRNA did not internalize into the cell.

[0414] As is well known in the field, siRNA has good efficiency even at low concentrations (down to pM) inside the cell, thus the uptake is considered enough to potentially activate the siRNA mediated degradation of the target mRNA.

### Example 16

### General Methods in Characterisation of Cell-Penetrating Peptides

### Transwell™ Experiments

[0415] The human colon cancer cell line Caco-2 (ATCC via LGC, Sweden) was propagated in Dulbeccos modified essential media with Glutamax (Invitrogen, Sweden) supplemented with 10% foetal bovine serum, sodium puruvate 1 mM, non-essential amino acids 1×100, 100 U/ml penicillin and 100 μg/ml streptomycinin air enriched with 5% CO₂ at 37° C.

[0416] Transwell™-clear cups (0.4 μm pores, Corning Costar, The Netherlands) were coated with bovine plasma fibronectin 0.5 μg/ml (Invitrogen, Sweden). 100 000 Caco-2 cells were seeded in each cup of a 12-well Transwell™ (1.13 cm2 filter area) and cultured for at least ten days. The media was changed in both the lower (1.5 ml) and the upper (0.5 ml) chambers every 2-3 days. The cell confluence was examined in a phase contrast microscope and by measuring TEER with a Millicell-ERS (Millipore, Sweden) with alternating current. As controls of the cell layer permeability, FITC-labelled dextran 4,4 kDa (Sigma-Aldrich, Sweden) passage was measured with or without 10 mM EGTA treatment. Before the addition of peptides, the media in the lower well was changed to HEPES buffered Krebbs-Ringer solution (HKR). The resistance reached 600 Ω/cm2 before the experiments were initiated, values over 500 Ω/cm2 are considered as high resistance.

[0417] Fluorophore-labelled peptide at 10 μM concentration, dissolved in phosphate buffered saline (PBS) was added to the upper Transwell™ chamber. At each time point, a 1501 sample was collected from the lower chamber, and the fluorescence was measured at 320/420 nm (Abz) and 492/520 nm (fluorescein) on a Spectramax Gemini XS (Molecular Devices, Calif.).

### Cellular Penetration Studies and Fluorescence Microscopy

[0418] The cells were grown on round glass cover slips (12 mm, GTF, Sweden) in a 24-well plate to approximately 50% confluence. The media was changed to serum free and the biotinylated peptide solutions were added. The cells were incubated for 30 min at 37 or 4° C. The cells were washed twice with PBS, fixed with 4% paraformaldehyde solution 15 min at room temperature (dark) and then permeabilised in 30 mM HEPES buffer containing 0.5% w/v Triton X-100, 3 min on Ice. Sites for unspecific binding were blocked In PBS containing 3% (w/v) bovine serum albumin, overnight at 4° C. The peptides were visualised by staining with avidin-FrTC or streptavidin-TRITC (Molecular Probes, the Netherlands). The cell nuclei were stained with Hoechst 33258 (0.5 μg/ml) for 5 min, after which the cover slips were washed 3 times with PBS and mounted in 25% glycerol in PBS. The images were obtained with a Leica DM IRE2 fluorescence microscope (Leica Microsystem., Sweden) and processed in PhotoShop 6.0 software (Adobe Systems Inc., CA) (See e.g. FIG. 38-40).

### Peptide Uptake and Outflow Studies in Cells in Suspension

[0419] Cells were detached with trypsin (Invitrogen, Sweden), dissolved in culture media and centrifuged (1000×g for 10 min at RT). The cells were resuspended, counted and aliqoted in HKR on Ice, 300 000 cells/tube. Abz-labelled peptide was incubated for 15 and 30 min together with the cells in suspension, on a shaking 37° C. water bath. To stop the uptake or outflow, trypsin solution was added for 3 min. The cells were spun down at 1000×g for 10 min at 4° C. The pellets were resuspended in HKR for fluorescence detection, or for the outflow samples, incubated again with peptide-free HKR. Fluorescence was read at 320/420 nm on a Spectramax Gemini XS (Molecular Devices, Calif.). The Intracellular concentrations were calculated from a standard curve of Abz-labelled peptides. The average cell volume of Caco-2 cells was determined by using a Coulter 256 channelizer (Coulter Electronics Ltd. CA).

### Degradation of Peptides/Uptake in Cells Detected by Mass Spectrometry

[0420] Eighty percent confluent cells in 35-mm cell culture dishes were treated with 10 μM peptide dissolved in serum-free media for different time points. The cells were washed three times with PBS and cell lysates were prepared by treating the cells with 0.1% HCl for 15 min on Ice. The lysates were centrifuged at 13,000 g for 5 min and frozen. Before loading, the samples were purified by using C 18 Zip Tip columns (Millipore, Sweden) and then analysed on a Voyager-DR STR system (Applied Biosystems, Framingham).

### Membrane Disturbance Assays

### 2-deoxyglucose Assay

[0421] Cells were seeded in 12-well plates and used for experiment five days after seeding. First, 0.5 μCi of 2-deoxy-D-[1-3H]-glucose was added to each well (Amersham Pharmacia Biotech, UK) in glucose-free buffer. After 20 min incubation at 37° C. peptides were added in serum-free medium to reach the final concentrations of 5, 10 and 20 μM. As a positive control, cells were treated with 1% Triton X-100 in PBS (to establish the upper boundary of leakage). At 1, 5, 15 and 30 min a 150 μl media samples were collected and Emulsifier Safe scintillation cocktail (Packard, Netherlands) was added and the radioactivity was measured in a Packard 3255 liquid scintillation counter. The relative radioactive efflux from each well was calculated as percentage of untreated cells.

### Lactate Dehydrogenase Assay

[0422] Lactate dehydrogenase leakage was performed using CycioTox-ONEh Homeogeneous Membrane Integrity Assay from Promega Corp. (Promega, Madison, Wis.) and the lactate dehydrogenase activity calculated according to the manufacturer's Instructions.

### Histamine Release Assays

### Cell Culturing.

[0423] RBL-2H3 cells were obtained from American Type Culture Collection (Manassas, Va.). The cells were cultured in Minimal Essential Medium with Earle's salts complemented with Glutamax-I, non-essential amino acids, sodium pyruvate, penicillin, streptomycin and heat-inactivated foetal bovine serum (10%). All media components were from invitrogen Corporation (Paisley, UK). Trypsin/EDTA was from PAA laboratories Gmbh (Linz, Austria). Cells were splitted twice a week, seeding circa 1.2 million cells per T75. For the histamine release assay, 125 000-250 000 cells (in 1 ml) were seeded per a well in a 24-well-plate a day before the experiment.

### Histamine Release

[0424] The following solutions were used: assay buffer (10 mM HEPES, 140 mM NaCl, 5 mM KCl, 0.6 mM MgCl₂, 1 mM CaCl₂, 5.5 mM glucose, pH 7.4), 1 M NaOH, 10 mg/ml o-phthaldialdehyde (OPT) In methanol, 3 M HCl and 0.1% Triton X-100. All chemicals were from Sigma-Aldrich (St. Louis, Mass.). 1 mM peptide stock solutions were prepared in water and diluted further using assay buffer.

[0425] The cells were washed twice with assay buffer and then the peptide was added at desired concentration in 300 μl of assay buffer. For the determination of the total cellular histamine, some wells were exposed to 0.1% Triton X-100. After 20 min incubation at 37° C., the exposure medium was transferred to a 1.5 ml polypropylene tube and centrifuged briefly (2 min at 3000 rpm).

[0426] Histamine determination using OPT OPT was from Sigma-Aldrich Corp., St. Louis, Mo. 200 μl of the supernatant was transferred into a black untreated microwell plate (NUNC) and assayed for hivamine by adding 40 μl of 1 M NaOH and 10 μl of OPT solution and shaking for 4 minutes. To terminate the reaction, 20 μl of 3 M HCl was added. After 30 seconds, the fluorescence intensity was measured using a 355 nm excitation filter and a 455 nm emission filter (SPECTRAmax®GEMINI XS, Molecular Devices, Sunnyvale, Calif.). The histamine released was expressed as a percentage of total cellular histamine.

Histamine Determination using ELISA

[0427] The EUSA kit for the histamine was from IBL GmbH (Hamburg, Germany). The assay was performed following the manufacturers instructions. The absorbance measurements were performed using Digiscan Microplate Reader from ASYS Hitech GmbH (Eugendorf, Austria).

### [³⁵S]-GTPγS Binding Assay

[0428] The effect of the peptides on the initial rate of [³⁵S]-GTPS binding was determined by following the protocol presented by McKenzie with minor modifications. Briefly, the membranes were incubated with 50 000-70 000 cpm of [³⁵S]-GTPγS (Amersham Biosciences) In assay buffer (10 mM Tris-HCl, 0.1 mM EDTA, 5 mM MgCl2, 150 mM NaCl, 1 mM DTT, 10μM GDP, pH 7.5). The final protein concentration in the assay mixture, incubation time and temperature was adjusted to give the window in the linear part of the binding curve. Typically, the respective values were 1-2.5 mg/ml, 2-5 min and 15 or 25° C. The unbound [³⁵S]-GTPγS was removed by the addition of 0.9 ml of ice-cold TE buffer (10 mM Tris-HCl, 0.1 mM EDTA, pH 7.5) and rapid filtration of the reaction mixture through glass fiber filter without binder resin (Millipore, APFA 02500) which had been presoaked in at least 1 h in TE buffer. The filters were washed with 3×5 ml of ice-cold TE-buffer and transferred into counting vials. 10 ml of scintillation cocktail (Emulsifier-Safe, Packard) was added into each vial and the radioactivity counted next day.

### Example 17

### Effect of Intracellular Loop of CGRPR Loop (M630) on Porcine Coronary Artery

[0429] CGRP receptor loop iC4, sequence 391-405 (VQAILRRNWNQYKIQ) was synthesised and tested at blood vessels as described for the ATLAR loop previously.

[0430] Porcine coronary artery was contracted by using KCl. After relaxation of the artery by washing, 50 μM M630 was applied. Contraction started after approximately 10 min and reached maximum in 15 to 20 min after application. Washing did not reverse the contraction. The effect was reproducible and always very clearly observed. The recording of typical experiment is shown in FIG. 41. The lag-period of 10 min could be the time needed for the penetration of M630 into the cells. M630 showed no effect on the contracted arteries.

Methods for this Experiment

### 1. Cell Cultures

[0431] Rin m5F cells were grown as monolayer culture in RPMI-1640 medium supplemented with 10% fetal bovine serum, 2 mM L-glutamine, 100 units/ml penicillin, 100 μml streptomycin at 37° C. in a 5% CO2 atmosphere.

[0432] Sf9 cells were maintained as monolayer culture in Grace's Insect medium supplemented with 10% heat-inactivated fetal bovine serum, 100 units/ml penicillin, 100 μg/ml streptomycin at 28° C. in a 5% CO₂ atmosphere.

### 2. Overexpression of G-Proteins in Sf9 Cells

[0433] Sf9 cells were cotransfected with recombinant Baculoviruses vectors carrying different alpha subunits of heterotrimeric G-proteins (Gαs, Gαi1, Gαo, Gα11) together with β1γ2 subunits as described by Nassman et al, with minor modifications. Briefly, approximately 6×10⁶ cells/75 cm2 flask were infected with high titer recombinant Baculovirus stock solution. After 60 min of incubation at 28° C. the virus stock was removed, the fresh medium was added and cells were grown for three days at 28° C. The expression of G-proteins was analyzed by 11% SDS-PAGE which, in contrast to control non-transfected cells, showed strong protein bands with molecular mass of 36 and 40-45 kDa which corresponded to β-subunits and α subunits of G-proteins, respectively. Each type of the overexpressed G-protein (Gs, Gl1, Go, G11) was further checked by using the corresponding monoclonal antibodies. The yield of the overexpression was assessed by comparison of the rate of [³⁵S]-GTPγS binding to the membranes obtained from transfected and non-transfected cells.

### 3. Plasma Membrane Preparation

[0434] Plasma membranes were obtained according to the protocol of McKenzie et al., 1992 with minor modifications described previously. Monolayer cell cultures were washed and then resuspended in TE buffer (10 mM Tris-HCl, 0.1 mM EDTA, pH 7.5). In the case of brain membranes, Wistar rats were first sacrificed and the whole brains were removed and sliced. The brain cortices were separated and quickly frozen in liquid nitrogen. Immediately before membrane preparation, tissue was chopped in small pieces. Material (tissue or cells) was homogenized in Polytron-type homogenizer (Braun AG, Germany). Homogenate was centrifuged at 500×g for 15 min and membranes were collected by centrifugation of the supernatant at 40 000×g for 30 min in Beckman-L8 70M ultracentrifuge (Beckman Instruments, USA). The whole procedure was undertaken at the temperature below 4° C. The protein concentration in membrane preparations was from 1 to 2.5 mg/ml as determined by the method of Lowry et al., 1952.

[0435] Cellular uptake of M630 was tested as described previously, the result is presented in FIG. 42.

### LIST OF REFERENCES

[0436] 1. Lindgren, M., Hallbrink, M., Prochiantz, A. & Langel, Ü. Cell-penetrating peptides. Trends Pharmacol. Sci. 21, 99-103 (2000).
[0437] 2. Derossi, D., Chassaing, G. & Prochiantz, A. Trojan peptides: the penetratin system for intracellular delivery. Trends Cell. Biol. 8, 8487 (1998).
[0438] 3. Derossi, D., Joliot, A. H., Chassaing, G. & Prochiantz, A. The third helix of the Antennapedia homeodomain translocates through biological membranes. J. Blol. Chem. 269, 10444-10450 (1994).
[0439] 4. Prochiantz, A. Homeodomain-derived peptides. In and out of the cells. Ann N Y Acad Sci 886, 172-9 (1999).
[0440] 5. Sandberg, M., Eriksson, L., Jonsson, J., Sjöstrom, M. & Wold, S, New chemical descriptors relevant for the design of biologically active peptides. A multivariate characterization of 87 amino acids. J. Med. Chem. 41, 2481-2491 (1998).
[0441] 6. Altschul, S. F., Gish, W., Miller, W., Myers, E. W. & Lipman, D. J. Basic local alignment search tool. J Mol Blol 215, 403-10. (1990).
[0442] 7. Ma, H. & Diamond, S. L. Nonviral gene therapy and its delivery systems. Curr Pharm Biotechnol 2, 1-17. (2001).
[0443] 8. Garnett, M. C. Gene-delivery systems using cationic polymers. Crit. Rev Ther Drug Carrier Syst 16, 147-207 (1999).
[0444] 9. Somiarl, S. et al. Theory and in vivo application of electroporative gene delivery. Mol Ther 2, 178-87. (2000).
[0445] 10. Lee, R.). & Huang, L. Uipidic vector systems for gene transfer. Crit. Rev. Therap. Drug Carrier Syst. 14, 173-206 (1997).
[0446] 11. Ropert, C. Liposomes as a gene delivery system. Braz J Med Biol Res 32, 163-9. (1999).
[0447] 12. Luo, D. & Saltzman, W. M. Enhancement of transfection by physical concentration of DNA at the cell surface. Nat Biotechnol 18, 893-5.
[0448] 13. Feigner, P. L. et al. Nomenclature for synthetic gene delivery systems. Hum Gene Ther 8, 511-2. (1997).
[0449] 14. Gebhart, C. L. & Kabanov, A. V. Evaluation of polyplexes as gene transfer agents. J Control Release 73, 401-16. (2001).
[0450] 15. Boussif, O. et al. A versatile vector for gene and oligonucleotide transfer into cells In culture and In vivo: polyethylenimine. Proc Natl Acad Sci USA 92, 7297-301. (1995).
[0451] 16. Abdallah, B. et al. A powerful nonviral vector for in vivo gene transfer into the adult mammalian brain: polyethylenimine. Hum Gene Ther 7, 1947-54. (1996).
[0452] 17. Schatzlein, A. G. Non-viral vectors in cancer gene therapy: principles and progress. Anticancer Drugs 12, 275-304. (2001).
[0453] 18. Remy-Kristensen, A., Clamme, J. P., Vuilleumier, C., Kuhry, J. G. & Mely, Y. Role of endocytosis in the transfection of L929 fibroblasts by polyethylenimine/DNA complexes. Biochim Biophys Acta 1514, 21-32. (2001).
[0454] 19. Rozanov, D. V. et al. Mutation analysis of membrane type-1 matrix metalloproteinase (MT1-MMP). The role of the cytoplasmic tall Cys(574), the active site Glu(240), and furin cleavage motifs in oligomerization, processing, and self-proteolysis of MT1-MMP expressed in breast carcinoma cells. J Biol Chem 276, 25705-14. (2001)ⱼ.
[0455] 20. Smith, L. E., Parks, K. K., Hasegawa, L. S., Eastmond, D. A. & Grosovsky, A. J. Targeted breakage of paracentromeric heterochromatin induces chromosomal Instability. Mutagenesis 13, 435-43. (1998).
[0456] 21. Tang, W. et al. Development and evaluation of high throughput functional assay methods for HERG potassium channel. J Blol Screen 6, 325-31. (2001).
[0457] 22. Hallbrink, M. et al. Cargo delivery kinetics of cell-penetrating peptides. Blochim Biophys Acta 1515, 101-9. (2001).
[0458] 23. Vidal, P. et al. Interactions of primary amphipathic vector peptides with membranes. Conformational consequences and influence on cellular localization. J Membr Biol 162, 259-64. (1998).
[0459] 24. Kilk, K. et al. Cellular Internalization of a cargo complex with a novel peptide derived from the third helix of the islet-1 homeodomain. Comparison with the penetratin peptide. Bioconjug Chem 12, 911-6. (2001).
[0460] 25. Magzoub, M., Kilk, K., Eriksson, L. E., Langel, U. & Graslund, A. Interaction and structure induction of cell-penetrating peptides in the presence of phospholipid vesicles. Biochim Biophys Acta 1512, 77-89. (2001).
[0461] 26. Inoue, A., Takahashi, M., Hatta, K., Hotta, Y. & Okamoto, H. Developmental regulation of islet-1 mRNA expression during neuronal differentiation in embryonic zebraflsh. Dev Dyn 199, 1-11. (1994).
[0462] 27. Langel, U., Land, T. & Bartfal, T. Design of chimeric peptide ligands to galanin receptors and substance P receptors. Int J Pept Protein Res 39, 516-22. (1992).
[0463] 28. McKenzie, F. R. Signal Transduction (Milligan, E., Ed.), Oxford University Press, Oxford, N.Y., Tokyo. (1992).
[0464] 29. Lowry, O. H., Rosenbrough, N.Y., Farr, A. L. & Randall, R. J. J. Biol. Chem. 193, 265-275 (1951).
[0465] 30. Cassel, D. & Selinger, Z. (1976) 452(2), 538-51. 452, 538-551 (1976).
[0466] 31. Stemlicht M D, Werb Z., Annu Rev Cell Dev Biol 2001; 17:463-516 How matrix metalloproteinases regulate cell behavior.
[0467] 32. Leppert D, Lindberg R L, Kappos L, Leib S L., Brain Res Brain Res Rev 2001 October; 36(2-3):249-57Matrix metalloproteinases: multifunctional effectors of Inflammation in multiple sclerosis and bacterial meningitis.
[0468] 33. Rozanov D V, Deryugina E I, Ratnikov B I, Monosov E Z, Marchenko G N, Quigley J P, Strongin A Y., J Biol Chem 2001 Jul. 13; 276(28):25705-14, Mutation analysis of membrane type-1 matrix metalloproteinase (MT1-MMP). The role of the cytoplasmic tall Cys(574), the active site Glu(240), and furin cleavage motifs in oligomerization, processing, and self-proteolysis of MT1-MMP expressed in breast carcinoma cells.
[0469] 34. Hoekstra R, Eskens F A, Verweij J, Oncologist 2001; 6(5):415-27, Matrix metalloproteinase Inhibitors: current developments and future perspectives.
[0470] 35. Hornebeck W, Emonard H, Monboisse J C, Belion G., Semin Cancer Biol 2002 June; 12(3):231-41, Matrix-directed regulation of pericellular proteolysis and tumour progression.
[0471] 36. Nabeshima K, Inoue T, Shimao Y, Sameshima T, Pathol Int 2002 April; 52(4):255-64 Matrix metalloproteinases in tumour invasion: role for cell migration.
[0472] 37. Galvez B G, Matias-Roman S, Albar J P, Sanchez-Madrid F, Arroyo A G, J Biol Chem 2001 Oct. 5; 276(40):37491-500, Membrane type 1-matrix metalloproteinase is activated during migration of human endothelial cells and modulates endothelial motility and matrix remodeling.
[0473] 38. Sounnl N E, Baramova E N, Munaut C, Maquoi E, Frankenne F, Foidart J M, Noel A., Int J Cancer 2002 Mar. 1; 98(1):23-8, Expression of membrane type 1 matrix metalloproteinase (MT1-MMP) In A2058 melanoma cells is associated with MMP-2 activation and increased tumour growth and vascularization.
[0474] 39. Chen C C, Chen N, Lau L F., I Biol Chem 2001 Mar. 30; 276(13):10443-52, The angiogenic factors Cyr61 and connective tissue growth factor induce adhesive signaling in primary human skin fibroblasts.
[0475] 40. Laakkonen P, Porkka K, Hoffman J A, Ruoslahti E, Nat Med 2002 July; 8(7):751-5, A tumour-homing peptide with a targeting specificity related to lymphatic vessels.
[0476] 41. Pooga M., et al., 1998, FASEB 3. 1998 January; 12(1):67-77, Cell penetration by transportan.
[0477] 42. Pooga M., et al., Nat. Biotechnol. 1998 September; 16(9):857-61, Cell-penetrating PNA constructs regulate galanin receptor levels and modify pain transmission in vivo.
[0478] 43. Moroianu J., J. Cell Biochem, 1999, Suppl. 32-33:76-83, Nuclear import and export pathways.
[0479] 44. Dayhoff, Schwartz, and Orcutt (1978) Atlas Protein Seq. Struc. 5:345-352 45. Henikoff and Henikoff (1992) Proc Natl Acad Sci USA 89(22):10915-9.
[0480] 46. Simon R J et al., PNAS (1992) 89(20), 9367-9371 and Horwell D C, Trends Blotechnol. (1995) 13(4), 132-134.

The application's sequence listing, which the Patent Office published only in electronic form, follows.

SEQUENCE LISTING (31933 sequences)

SEQ ID NO: 1 - protein, 21 aa, Artificial Sequence
  peptide
KVAFRWSQFAVRKIHILLIRK

SEQ ID NO: 2 - protein, 21 aa, human
  TRANSMEM
  (211)...(227): 5H1A receptor
VAFRWSQFAVRKIHILLIRKA

SEQ ID NO: 3 - protein, 21 aa, Rat
  5H1A receptor
AFRWSQFAVRKIHILLIRKAN

SEQ ID NO: 4 - protein, 21 aa, Artificial Sequence
  peptide
RWSQFAVRKIHILLIRKANTS

SEQ ID NO: 5 - protein, 21 aa, Artificial Sequence
  peptide
LYSFLHLFLFRKQVSQLNIRK

SEQ ID NO: 6 - protein, 21 aa, Artificial Sequence
  peptide
YSFLHLFLFRKQVSQLNIRKH

SEQ ID NO: 7 - protein, 21 aa, Artificial Sequence
  peptide
FLHLFLFRKQVSQLNIRKHYI

SEQ ID NO: 8 - protein, 21 aa, Artificial Sequence
  peptide
LHLFLFRKQVSQLNIRKHYIA

SEQ ID NO: 9 - protein, 21 aa, Artificial Sequence
  peptide
HLFLFRKQVSQLNIRKHYIAG

SEQ ID NO: 10 - protein, 21 aa, Artificial Sequence
  peptide
QKNFLWHNFHLLIAKKCMKNC

SEQ ID NO: 11 - protein, 21 aa, Artificial Sequence
  peptide
LTQMQYIFITSRWYFRAYNLK

SEQ ID NO: 12 - protein, 21 aa, Artificial Sequence
  peptide
TQMQYIFITSRWYFRAYNLKR

SEQ ID NO: 13 - protein, 21 aa, Artificial Sequence
  peptide
QYIFITSRWYFRAYNLKRNMV

SEQ ID NO: 14 - protein, 21 aa, Artificial Sequence
  peptide
YIFITSRWYFRAYNLKRNMVK

SEQ ID NO: 15 - protein, 21 aa, Artificial Sequence
  peptide
IFITSRWYFRAYNLKRNMVKN

SEQ ID NO: 16 - protein, 21 aa, Artificial Sequence
  peptide
EAICLVAVGQYFHIRAKSTMK

SEQ ID NO: 17 - protein, 21 aa, Artificial Sequence
  peptide
AICLVAVGQYFHIRAKSTMKR

SEQ ID NO: 18 - protein, 21 aa, Artificial Sequence
  peptide
EARFLYWWENILQKQFYKKLF

SEQ ID NO: 19 - protein, 21 aa, Artificial Sequence
  peptide
ARFLYWWENILQKQFYKKLFR

SEQ ID NO: 20 - protein, 21 aa, Artificial Sequence
  peptide
LYWWENILQKQFYKKLFRNWV

SEQ ID NO: 21 - protein, 21 aa, Artificial Sequence
  peptide
KKLFRNWVRWSWIMGYCCRAR

SEQ ID NO: 22 - protein, 21 aa, Artificial Sequence
  peptide
KLFRNWVRWSWIMGYCCRARS

SEQ ID NO: 23 - protein, 21 aa, Artificial Sequence
  peptide
LFRNWVRWSWIMGYCCRARSR

SEQ ID NO: 24 - protein, 21 aa, Artificial Sequence
  peptide
RNWVRWSWIMGYCCRARSRNG

SEQ ID NO: 25 - protein, 21 aa, Artificial Sequence
  peptide
NWVRWSWIMGYCCRARSRNGF

SEQ ID NO: 26 - protein, 21 aa, Artificial Sequence
  peptide
WVRWSWIMGYCCRARSRNGFV

SEQ ID NO: 27 - protein, 21 aa, Artificial Sequence
  peptide
SWIMGYCCRARSRNGFVIITR

SEQ ID NO: 28 - protein, 21 aa, Artificial Sequence
  peptide
WLYGFKWNAFMKMRVYCVTNN

SEQ ID NO: 29 - protein, 21 aa, Artificial Sequence
  peptide
ETQIWKWLYATVIQTAKRKMT

SEQ ID NO: 30 - protein, 21 aa, Artificial Sequence
  peptide
TQIWKWLYATVIQTAKRKMTR

SEQ ID NO: 31 - protein, 21 aa, Artificial Sequence
  peptide
QIWKWLYATVIQTAKRKMTRA

SEQ ID NO: 32 - protein, 21 aa, Artificial Sequence
  peptide
KWLYATVIQTAKRKMTRAFTV

SEQ ID NO: 33 - protein, 21 aa, Artificial Sequence
  peptide
DLEYIWIIINKRWSWLKIMNK

SEQ ID NO: 34 - protein, 21 aa, Artificial Sequence
  peptide
LEYIWIIINKRWSWLKIMNKK

SEQ ID NO: 35 - protein, 21 aa, Artificial Sequence
  peptide
YIWIIINKRWSWLKIMNKKLS

SEQ ID NO: 36 - protein, 21 aa, Artificial Sequence
  peptide
IWIIINKRWSWLKIMNKKLSQ

SEQ ID NO: 37 - protein, 21 aa, Artificial Sequence
  peptide
VLQLNVHCFYWQKNWKIMARH

SEQ ID NO: 38 - protein, 21 aa, Artificial Sequence
  peptide
LQLNVHCFYWQKNWKIMARHR

SEQ ID NO: 39 - protein, 21 aa, Artificial Sequence
  peptide
AVWKQYFVCCYFYKKKNQWWC

SEQ ID NO: 40 - protein, 21 aa, Artificial Sequence
  peptide
KQYFVCCYFYKKKNQWWCNLL

SEQ ID NO: 41 - protein, 21 aa, Artificial Sequence
  peptide
YFVCCYFYKKKNQWWCNLLRF

SEQ ID NO: 42 - protein, 21 aa, Artificial Sequence
  peptide
GYQIQFAKIKMFQFFWKNFGA

SEQ ID NO: 43 - protein, 21 aa, Artificial Sequence
  peptide
QIQFAKIKMFQFFWKNFGAKR

SEQ ID NO: 44 - protein, 21 aa, Artificial Sequence
  peptide
KIKMFQFFWKNFGAKRWIEFR

SEQ ID NO: 45 - protein, 21 aa, Artificial Sequence
  peptide
INRYIWRIWIMTYKQITCFSQ

SEQ ID NO: 46 - protein, 21 aa, Artificial Sequence
  peptide
IWRIWIMTYKQITCFSQKSSC

SEQ ID NO: 47 - protein, 21 aa, Artificial Sequence
  peptide
WRIWIMTYKQITCFSQKSSCK

SEQ ID NO: 48 - protein, 21 aa, Artificial Sequence
  peptide
DIQWINWIKLARKGHAYNLSS

SEQ ID NO: 49 - protein, 21 aa, Artificial Sequence
  peptide
QKNFLWHNFHLLIAKKCMKNC

SEQ ID NO: 50 - protein, 21 aa, Artificial Sequence
  peptide
LTQMQYIFITSRWYFRAYNLK

SEQ ID NO: 51 - protein, 21 aa, Artificial Sequence
  peptide
TQMQYIFITSRWYFRAYNLKR

SEQ ID NO: 52 - protein, 21 aa, Artificial Sequence
  peptide
QYIFITSRWYFRAYNLKRNMV

SEQ ID NO: 53 - protein, 21 aa, Artificial Sequence
  peptide
YIFITSRWYFRAYNLKRNMVK

SEQ ID NO: 54 - protein, 21 aa, Artificial Sequence
  peptide
IFITSRWYFRAYNLKRNMVKN

SEQ ID NO: 55 - protein, 21 aa, Artificial Sequence
  peptide
EAICLVAVGQYFHIRAKSTMK

SEQ ID NO: 56 - protein, 21 aa, Artificial Sequence
  peptide
AICLVAVGQYFHIRAKSTMKR

SEQ ID NO: 57 - protein, 21 aa, Artificial Sequence
  peptide
EARFLYWWENILQKQFYKKLF

SEQ ID NO: 58 - protein, 21 aa, Artificial Sequence
  peptide
ARFLYWWENILQKQFYKKLFR

SEQ ID NO: 59 - protein, 21 aa, Artificial Sequence
  peptide
LYWWENILQKQFYKKLFRNWV

SEQ ID NO: 60 - protein, 21 aa, Artificial Sequence
  peptide
KKLFRNWVRWSWIMGYCCRAR

SEQ ID NO: 61 - protein, 21 aa, Artificial Sequence
  peptide
KLFRNWVRWSWIMGYCCRARS

SEQ ID NO: 62 - protein, 21 aa, Artificial Sequence
  peptide
LFRNWVRWSWIMGYCCRARSR

SEQ ID NO: 63 - protein, 21 aa, Artificial Sequence
  peptide
RNWVRWSWIMGYCCRARSRNG

SEQ ID NO: 64 - protein, 21 aa, Artificial Sequence
  peptide
NWVRWSWIMGYCCRARSRNGF

SEQ ID NO: 65 - protein, 21 aa, Artificial Sequence
  peptide
WVRWSWIMGYCCRARSRNGFV

SEQ ID NO: 66 - protein, 21 aa, Artificial Sequence
  peptide
SWIMGYCCRARSRNGFVIITR

SEQ ID NO: 67 - protein, 21 aa, Artificial Sequence
  peptide
WLYGFKWNAFMKMRVYCVTNN

SEQ ID NO: 68 - protein, 21 aa, Artificial Sequence
  peptide
ETQIWKWLYATVIQTAKRKMT

SEQ ID NO: 69 - protein, 21 aa, Artificial Sequence
  peptide
TQIWKWLYATVIQTAKRKMTR

SEQ ID NO: 70 - protein, 21 aa, Artificial Sequence
  peptide
QIWKWLYATVIQTAKRKMTRA

SEQ ID NO: 71 - protein, 21 aa, Artificial Sequence
  peptide
KWLYATVIQTAKRKMTRAFTV

SEQ ID NO: 72 - protein, 21 aa, Artificial Sequence
  peptide
DLEYIWIIINKRWSWLKIMNK

SEQ ID NO: 73 - protein, 21 aa, Artificial Sequence
  peptide
LEYIWIIINKRWSWLKIMNKK

SEQ ID NO: 74 - protein, 21 aa, Artificial Sequence
  peptide
YIWIIINKRWSWLKIMNKKLS

SEQ ID NO: 75 - protein, 21 aa, Artificial Sequence
  peptide
IWIIINKRWSWLKIMNKKLSQ

SEQ ID NO: 76 - protein, 21 aa, Artificial Sequence
  peptide
VLQLNVHCFYWQKNWKIMARH

SEQ ID NO: 77 - protein, 21 aa, Artificial Sequence
  peptide
LQLNVHCFYWQKNWKIMARHR

SEQ ID NO: 78 - protein, 21 aa, Artificial Sequence
  peptide
AVWKQYFVCCYFYKKKNQWWC

SEQ ID NO: 79 - protein, 21 aa, Artificial Sequence
  peptide
KQYFVCCYFYKKKNQWWCNLL

SEQ ID NO: 80 - protein, 21 aa, Artificial Sequence
  peptide
YFVCCYFYKKKNQWWCNLLRF

SEQ ID NO: 81 - protein, 21 aa, Artificial Sequence
  peptide
GYQIQFAKIKMFQFFWKNFGA

SEQ ID NO: 82 - protein, 21 aa, Artificial Sequence
  peptide
QIQFAKIKMFQFFWKNFGAKR

SEQ ID NO: 83 - protein, 21 aa, Artificial Sequence
  peptide
KIKMFQFFWKNFGAKRWIEFR

SEQ ID NO: 84 - protein, 21 aa, Artificial Sequence
  peptide
INRYIWRIWIMTYKQITCFSQ

SEQ ID NO: 85 - protein, 21 aa, Artificial Sequence
  peptide
IWRIWIMTYKQITCFSQKSSC

SEQ ID NO: 86 - protein, 21 aa, Artificial Sequence
  peptide
WRIWIMTYKQITCFSQKSSCK

SEQ ID NO: 87 - protein, 21 aa, Artificial Sequence
  peptide
DIQWINWIKLARKGHAYNLSS

SEQ ID NO: 88 - protein, 21 aa, Artificial Sequence
  peptide
QKNFLWHNFHLLIAKKCMKNC

SEQ ID NO: 89 - protein, 21 aa, Artificial Sequence
  peptide
LTQMQYIFITSRWYFRAYNLK

SEQ ID NO: 90 - protein, 21 aa, Artificial Sequence
  peptide
TQMQYIFITSRWYFRAYNLKR

SEQ ID NO: 91 - protein, 21 aa, Artificial Sequence
  peptide
QYIFITSRWYFRAYNLKRNMV

SEQ ID NO: 92 - protein, 21 aa, Artificial Sequence
  peptide
YIFITSRWYFRAYNLKRNMVK

SEQ ID NO: 93 - protein, 21 aa, Artificial Sequence
  peptide
IFITSRWYFRAYNLKRNMVKN

SEQ ID NO: 94 - protein, 21 aa, Artificial Sequence
  peptide
EAICLVAVGQYFHIRAKSTMK

SEQ ID NO: 95 - protein, 21 aa, Artificial Sequence
  peptide
AICLVAVGQYFHIRAKSTMKR

SEQ ID NO: 96 - protein, 21 aa, Artificial Sequence
  peptide
EARFLYWWENILQKQFYKKLF

SEQ ID NO: 97 - protein, 21 aa, Artificial Sequence
  peptide
ARFLYWWENILQKQFYKKLFR

SEQ ID NO: 98 - protein, 21 aa, Artificial Sequence
  peptide
LYWWENILQKQFYKKLFRNWV

SEQ ID NO: 99 - protein, 21 aa, Artificial Sequence
  peptide
KKLFRNWVRWSWIMGYCCRAR

SEQ ID NO: 100 - protein, 21 aa, Artificial Sequence
  peptide
KLFRNWVRWSWIMGYCCRARS

SEQ ID NO: 101 - protein, 21 aa, Artificial Sequence
  peptide
LFRNWVRWSWIMGYCCRARSR

SEQ ID NO: 102 - protein, 21 aa, Artificial Sequence
  peptide
RNWVRWSWIMGYCCRARSRNG

SEQ ID NO: 103 - protein, 21 aa, Artificial Sequence
  peptide
NWVRWSWIMGYCCRARSRNGF

SEQ ID NO: 104 - protein, 21 aa, Artificial Sequence
  peptide
WVRWSWIMGYCCRARSRNGFV

SEQ ID NO: 105 - protein, 21 aa, Artificial Sequence
  peptide
SWIMGYCCRARSRNGFVIITR

SEQ ID NO: 106 - protein, 21 aa, Artificial Sequence
  peptide
WLYGFKWNAFMKMRVYCVTNN

SEQ ID NO: 107 - protein, 21 aa, Artificial Sequence
  peptide
ETQIWKWLYATVIQTAKRKMT

SEQ ID NO: 108 - protein, 21 aa, Artificial Sequence
  peptide
TQIWKWLYATVIQTAKRKMTR

SEQ ID NO: 109 - protein, 21 aa, Artificial Sequence
  peptide
QIWKWLYATVIQTAKRKMTRA

SEQ ID NO: 110 - protein, 21 aa, Artificial Sequence
  peptide
KWLYATVIQTAKRKMTRAFTV

SEQ ID NO: 111 - protein, 21 aa, Artificial Sequence
  peptide
DLEYIWIIINKRWSWLKIMNK

SEQ ID NO: 112 - protein, 21 aa, Artificial Sequence
  peptide
LEYIWIIINKRWSWLKIMNKK

SEQ ID NO: 113 - protein, 21 aa, Artificial Sequence
  peptide
YIWIIINKRWSWLKIMNKKLS

SEQ ID NO: 114 - protein, 21 aa, Artificial Sequence
  peptide
IWIIINKRWSWLKIMNKKLSQ

SEQ ID NO: 115 - protein, 21 aa, Artificial Sequence
  peptide
QFHYGTSIRIIVICIYRNKCV

SEQ ID NO: 116 - protein, 21 aa, Artificial Sequence
  peptide
FHYGTSIRIIVICIYRNKCVR

SEQ ID NO: 117 - protein, 21 aa, Artificial Sequence
  peptide
HYGTSIRIIVICIYRNKCVRG

SEQ ID NO: 118 - protein, 21 aa, Artificial Sequence
  peptide
GTSIRIIVICIYRNKCVRGIW

SEQ ID NO: 119 - protein, 21 aa, Artificial Sequence
  peptide
TSIRIIVICIYRNKCVRGIWG

SEQ ID NO: 120 - protein, 21 aa, Artificial Sequence
  peptide
SIRIIVICIYRNKCVRGIWGN

SEQ ID NO: 121 - protein, 21 aa, Artificial Sequence
  peptide
MIYSQLRFKYVNWMFILKDIK

SEQ ID NO: 122 - protein, 20 aa, Artificial Sequence
  peptide
LLRVFSTGKISLSAVRLATK

SEQ ID NO: 123 - protein, 20 aa, Artificial Sequence
  peptide
MGFLHQLQLLLWKNVTLKRR

SEQ ID NO: 124 - protein, 20 aa, Artificial Sequence
  peptide
GFLHQLQLLLWKNVTLKRRS

SEQ ID NO: 125 - protein, 20 aa, Artificial Sequence
  peptide
FLHQLQLLLWKNVTLKRRSP

SEQ ID NO: 126 - protein, 20 aa, Artificial Sequence
  peptide
LHQLQLLLWKNVTLKRRSPW

SEQ ID NO: 127 - protein, 20 aa, Artificial Sequence
  peptide
HQLQLLLWKNVTLKRRSPWV

SEQ ID NO: 128 - protein, 20 aa, Artificial Sequence
  peptide
LVLFFILLGLRQKKPTISVK

SEQ ID NO: 129 - protein, 20 aa, Artificial Sequence
  peptide
GWWLKMRQFHGLLVKRFHCA

SEQ ID NO: 130 - protein, 20 aa, Artificial Sequence
  peptide
WWLKMRQFHGLLVKRFHCAR

SEQ ID NO: 131 - protein, 20 aa, Artificial Sequence
  peptide
FGGLWGAFFIRANIAWCRRR

SEQ ID NO: 132 - protein, 20 aa, Artificial Sequence
  peptide
GGLWGAFFIRANIAWCRRRK

SEQ ID NO: 133 - protein, 20 aa, Artificial Sequence
  peptide
GLWGAFFIRANIAWCRRRKS

SEQ ID NO: 134 - protein, 20 aa, Artificial Sequence
  peptide
LWGAFFIRANIAWCRRRKST

SEQ ID NO: 135 - protein, 20 aa, Artificial Sequence
  peptide
WGAFFIRANIAWCRRRKSTK

SEQ ID NO: 136 - protein, 20 aa, Artificial Sequence
  peptide
AALLFGCIFIVWFAKKKYRS

SEQ ID NO: 137 - protein, 20 aa, Artificial Sequence
  peptide
ALLFGCIFIVWFAKKKYRSS

SEQ ID NO: 138 - protein, 20 aa, Artificial Sequence
  peptide
LFGCIFIVWFAKKKYRSSVH

SEQ ID NO: 139 - protein, 20 aa, Artificial Sequence
  peptide
AALLFGCIFIVWFAKKKYRS

SEQ ID NO: 140 - protein, 20 aa, Artificial Sequence
  peptide
ALLFGCIFIVWFAKKKYRSS

SEQ ID NO: 141 - protein, 20 aa, Artificial Sequence
  peptide
LFGCIFIVWFAKKKYRSSVH

SEQ ID NO: 142 - protein, 20 aa, Artificial Sequence
  peptide
YLSITYFTSTSSYKKKMVLR

SEQ ID NO: 143 - protein, 20 aa, Artificial Sequence
  peptide
LSITYFTSTSSYKKKMVLRV

SEQ ID NO: 144 - protein, 20 aa, Artificial Sequence
  peptide
VVVVIIAVFCTRRTTSHQKK

SEQ ID NO: 145 - protein, 20 aa, Artificial Sequence
  peptide
VVVVIIAVFCTRRTTSHQKK

SEQ ID NO: 146 - protein, 20 aa, Artificial Sequence
  peptide
QPFIYYRFLTLRYSSRRNPY

SEQ ID NO: 147 - protein, 20 aa, Artificial Sequence
  peptide
FIYYRFLTLRYSSRRNPYCR

SEQ ID NO: 148 - protein, 20 aa, Artificial Sequence
  peptide
IYYRFLTLRYSSRRNPYCRN

SEQ ID NO: 149 - protein, 20 aa, Artificial Sequence
  peptide
YLSIFFRKHIAKNLCKQCPV

SEQ ID NO: 150 - skipped

SEQ ID NO: 151 - protein, 12 aa, Homo Sapiens
  ( 405 )...( 417 ): 5H1A_HUMAN
KDFQNAFKKIIK

SEQ ID NO: 152 - protein, 12 aa, Homo Sapiens
  ( 407 )...( 419 ): 5H1A_HUMAN
FQNAFKKIIKCK

SEQ ID NO: 153 - protein, 12 aa, Homo Sapiens
  ( 408 )...( 420 ): 5H1A_HUMAN
QNAFKKIIKCKF

SEQ ID NO: 154 - protein, 12 aa, Homo Sapiens
  ( 69 )...( 81 ): 5H1B_HUMAN
FVIATVYRTRKL

SEQ ID NO: 155 - protein, 12 aa, Homo Sapiens
  ( 70 )...( 82 ): 5H1B_HUMAN
VIATVYRTRKLH

SEQ ID NO: 156 - protein, 12 aa, Homo Sapiens
  ( 71 )...( 83 ): 5H1B_HUMAN
IATVYRTRKLHT

SEQ ID NO: 157 - protein, 12 aa, Homo Sapiens
  ( 297 )...( 309 ): 5H1B_HUMAN
ALLEKKKLMAAR

SEQ ID NO: 158 - protein, 12 aa, Homo Sapiens
  ( 310 )...( 322 ): 5H1B_HUMAN
RKATKTLGIILG

SEQ ID NO: 159 - protein, 12 aa, Homo Sapiens
  ( 376 )...( 388 ): 5H1B_HUMAN
FKQAFHKLIRFK

SEQ ID NO: 160 - protein, 12 aa, Homo Sapiens
  ( 295 )...( 307 ): 5H1D_HUMAN
RERKATKILGII

SEQ ID NO: 161 - protein, 12 aa, Homo Sapiens
  ( 297 )...( 309 ): 5H1D_HUMAN
RKATKILGIILG

SEQ ID NO: 162 - protein, 12 aa, Homo Sapiens
  ( 133 )...( 145 ): 5H1E_HUMAN
KRTAKRAALMIL

SEQ ID NO: 163 - protein, 12 aa, Homo Sapiens
  ( 287 )...( 299 ): 5H1E_HUMAN
RKAARILGLILG

SEQ ID NO: 164 - protein, 12 aa, Homo Sapiens
  ( 134 )...( 146 ): 5H1F_HUMAN
KRTPKHAGIMIT

SEQ ID NO: 165 - protein, 12 aa, Homo Sapiens
  ( 198 )...( 210 ): 5H1F_HUMAN
LILYYKIYRAAK

SEQ ID NO: 166 - protein, 12 aa, Homo Sapiens
  ( 199 )...( 211 ): 5H1F_HUMAN
ILYYKIYRAAKT

SEQ ID NO: 167 - protein, 12 aa, Homo Sapiens
  ( 200 )...( 212 ): 5H1F_HUMAN
LYYKIYRAAKTL

SEQ ID NO: 168 - protein, 12 aa, Homo Sapiens
  ( 203 )...( 215 ): 5H1F_HUMAN
KIYRAAKTLYHK

SEQ ID NO: 169 - protein, 12 aa, Homo Sapiens
  ( 188 )...( 200 ): 5H2A_HUMAN
SRTKAFLKIIAV

SEQ ID NO: 170 - protein, 12 aa, Homo Sapiens
  ( 189 )...( 201 ): 5H2A_HUMAN
RTKAFLKIIAVW

SEQ ID NO: 171 - protein, 12 aa, Homo Sapiens
  ( 153 )...( 165 ): 5H2B_HUMAN
RYIAIKKPIQAN

SEQ ID NO: 172 - protein, 12 aa, Homo Sapiens
  ( 241 )...( 253 ): 5H2B_HUMAN
IHALQKKAYLVK

SEQ ID NO: 173 - protein, 12 aa, Homo Sapiens
  ( 242 )...( 254 ): 5H2B_HUMAN
HALQKKAYLVKN

SEQ ID NO: 174 - protein, 12 aa, Homo Sapiens
  ( 243 )...( 255 ): 5H2B_HUMAN
ALQKKAYLVKNK

SEQ ID NO: 175 - protein, 12 aa, Homo Sapiens
  ( 244 )...( 256 ): 5H2B_HUMAN
LQKKAYLVKNKP

SEQ ID NO: 176 - protein, 12 aa, Homo Sapiens
  ( 245 )...( 257 ): 5H2B_HUMAN
QKKAYLVKNKPP

SEQ ID NO: 177 - protein, 12 aa, Homo Sapiens
  ( 246 )...( 258 ): 5H2B_HUMAN
KKAYLVKNKPPQ

SEQ ID NO: 178 - protein, 12 aa, Homo Sapiens
  ( 166 )...( 178 ): 5H2C_HUMAN
NSRTKAIMKIAI

SEQ ID NO: 179 - protein, 12 aa, Homo Sapiens
  ( 167 )...( 179 ): 5H2C_HUMAN
SRTKAIMKIAIV

SEQ ID NO: 180 - protein, 12 aa, Homo Sapiens
  ( 168 )...( 180 ): 5H2C_HUMAN
RTKAIMKIAIVW

SEQ ID NO: 181 - protein, 12 aa, Homo Sapiens
  ( 307 )...( 319 ): 5H2C_HUMAN
RKASKVLGIVFF

SEQ ID NO: 182 - protein, 12 aa, Homo Sapiens
  ( 387 )...( 399 ): 5H2C_HUMAN
YKVEKKPPVRQI

SEQ ID NO: 183 - protein, 12 aa, Homo Sapiens
  ( 388 )...( 400 ): 5H2C_HUMAN
KVEKKPPVRQIP

SEQ ID NO: 184 - protein, 12 aa, Homo Sapiens
  ( 48 )...( 60 ): 5H4_HUMAN
RQLRKIKTNYFI

SEQ ID NO: 185 - protein, 12 aa, Homo Sapiens
  ( 49 )...( 61 ): 5H4_HUMAN
QLRKIKTNYFIV

SEQ ID NO: 186 - protein, 12 aa, Homo Sapiens
  ( 50 )...( 62 ): 5H4_HUMAN
LRKIKTNYFIVS

SEQ ID NO: 187 - protein, 12 aa, Homo Sapiens
  ( 51 )...( 63 ): 5H4_HUMAN
RKIKTNYFIVSL

SEQ ID NO: 188 - protein, 12 aa, Homo Sapiens
  ( 126 )...( 138 ): 5H6_HUMAN
LLILSPLRYKLR

SEQ ID NO: 189 - protein, 12 aa, Homo Sapiens
  ( 261 )...( 273 ): 5H6_HUMAN
RKALKASLTLGI

SEQ ID NO: 190 - protein, 12 aa, Homo Sapiens
  ( 109 )...( 121 ): 5H7_HUMAN
VKKLRQPSNYLI

SEQ ID NO: 191 - protein, 12 aa, Homo Sapiens
  ( 110 )...( 122 ): 5H7_HUMAN
KKLRQPSNYLIV

SEQ ID NO: 192 - protein, 12 aa, Homo Sapiens
  ( 251 )...( 263 ): A1AA_HUMAN
AKTKTHFSVRLL

SEQ ID NO: 193 - protein, 12 aa, Homo Sapiens
  ( 252 )...( 264 ): A1AA_HUMAN
KTKTHFSVRLLK

SEQ ID NO: 194 - protein, 12 aa, Homo Sapiens
  ( 253 )...( 265 ): A1AA_HUMAN
TKTHFSVRLLKF

SEQ ID NO: 195 - protein, 12 aa, Homo Sapiens
  ( 268 )...( 280 ): A1AA_HUMAN
KKAAKTLGIVVG

SEQ ID NO: 196 - protein, 12 aa, Homo Sapiens
  ( 333 )...( 345 ): A1AA_HUMAN
FKKAFQNVLRIQ

SEQ ID NO: 197 - protein, 12 aa, Homo Sapiens
  ( 152 )...( 164 ): A1AB_HUMAN
QYPTLVTRRKAI

SEQ ID NO: 198 - protein, 12 aa, Homo Sapiens
  ( 153 )...( 165 ): A1AB_HUMAN
YPTLVTRRKAIL

SEQ ID NO: 199 - protein, 12 aa, Homo Sapiens
  ( 155 )...( 167 ): A1AB_HUMAN
TLVTRRKAILAL

SEQ ID NO: 200 - protein, 12 aa, Homo Sapiens
  ( 156 )...( 168 ): A1AB_HUMAN
LVTRRKAILALL

SEQ ID NO: 201 - protein, 12 aa, Homo Sapiens
  ( 157 )...( 169 ): A1AB_HUMAN
VTRRKAILALLS

SEQ ID NO: 202 - protein, 12 aa, Homo Sapiens
  ( 158 )...( 170 ): A1AB_HUMAN
TRRKAILALLSV

SEQ ID NO: 203 - protein, 12 aa, Homo Sapiens
  ( 226 )...( 238 ): A1AB_HUMAN
VYIVAKRTTKNL

SEQ ID NO: 204 - protein, 12 aa, Homo Sapiens
  ( 279 )...( 291 ): A1AB_HUMAN
IAVKLFKFSREK

SEQ ID NO: 205 - protein, 12 aa, Homo Sapiens
  ( 290 )...( 302 ): A1AB_HUMAN
KKAAKTLGIVVG

SEQ ID NO: 206 - protein, 12 aa, Homo Sapiens
  ( 344 )...( 356 ): A1AD_HUMAN
KKAAKTLAIVVG

SEQ ID NO: 207 - protein, 12 aa, Homo Sapiens
  ( 143 )...( 155 ): A2AA_HUMAN
LKRTPRRIKAII

SEQ ID NO: 208 - protein, 12 aa, Homo Sapiens
  ( 144 )...( 156 ): A2AA_HUMAN
KRTPRRIKAIII

SEQ ID NO: 209 - protein, 12 aa, Homo Sapiens
  ( 145 )...( 157 ): A2AA_HUMAN
RTPRRIKAIIIT

SEQ ID NO: 210 - protein, 12 aa, Homo Sapiens
  ( 146 )...( 158 ): A2AA_HUMAN
TPRRIKAIIITV

SEQ ID NO: 211 - protein, 12 aa, Homo Sapiens
  ( 147 )...( 159 ): A2AA_HUMAN
PRRIKAIIITVW

SEQ ID NO: 212 - protein, 12 aa, Homo Sapiens
  ( 148 )...( 160 ): A2AA_HUMAN
RRIKAIIITVWV

SEQ ID NO: 213 - protein, 12 aa, Homo Sapiens
  ( 214 )...( 226 ): A2AA_HUMAN
LVYVRIYQIAKR

SEQ ID NO: 214 - protein, 12 aa, Homo Sapiens
  ( 190 )...( 202 ): A2AB_HUMAN
LVYLRIYLIAKR

SEQ ID NO: 215 - protein, 12 aa, Homo Sapiens
  ( 164 )...( 176 ): A2AC_HUMAN
TPRRVKATIVAV

SEQ ID NO: 216 - protein, 12 aa, Homo Sapiens
  ( 166 )...( 178 ): A2AC_HUMAN
RRVKATIVAVWL

SEQ ID NO: 217 - protein, 12 aa, Homo Sapiens
  ( 228 )...( 240 ): A2AC_HUMAN
LVYARIYRVAKL

SEQ ID NO: 218 - protein, 12 aa, Homo Sapiens
  ( 233 )...( 245 ): A2AC_HUMAN
IYRVAKLRTRTL

SEQ ID NO: 219 - protein, 12 aa, Homo Sapiens
  ( 106 )...( 118 ): AA1R_HUMAN
YLRVKIPLRYKM

SEQ ID NO: 220 - protein, 12 aa, Homo Sapiens
  ( 107 )...( 119 ): AA1R_HUMAN
LRVKIPLRYKMV

SEQ ID NO: 221 - protein, 12 aa, Homo Sapiens
  ( 108 )...( 120 ): AA1R_HUMAN
RVKIPLRYKMVV

SEQ ID NO: 222 - protein, 12 aa, Homo Sapiens
  ( 109 )...( 121 ): AA1R_HUMAN
VKIPLRYKMVVT

SEQ ID NO: 223 - protein, 12 aa, Homo Sapiens
  ( 110 )...( 122 ): AA1R_HUMAN
KIPLRYKMVVTP

SEQ ID NO: 224 - protein, 12 aa, Homo Sapiens
  ( 203 )...( 215 ): AA1R_HUMAN
VFYLIRKQLNKK

SEQ ID NO: 225 - protein, 12 aa, Homo Sapiens
  ( 204 )...( 216 ): AA1R_HUMAN
FYLIRKQLNKKV

SEQ ID NO: 226 - protein, 12 aa, Homo Sapiens
  ( 205 )...( 217 ): AA1R_HUMAN
YLIRKQLNKKVS

SEQ ID NO: 227 - protein, 12 aa, Homo Sapiens
  ( 290 )...( 302 ): AA1R_HUMAN
FRIQKFRVTFLK

SEQ ID NO: 228 - protein, 12 aa, Homo Sapiens
  ( 291 )...( 303 ): AA1R_HUMAN
RIQKFRVTFLKI

SEQ ID NO: 229 - protein, 12 aa, Homo Sapiens
  ( 293 )...( 305 ): AA1R_HUMAN
QKFRVTFLKIWN

SEQ ID NO: 230 - protein, 12 aa, Homo Sapiens
  ( 297 )...( 309 ): AA2A_HUMAN
QTFRKIIRSHVL

SEQ ID NO: 231 - protein, 12 aa, Homo Sapiens
  ( 108 )...( 120 ): AA3R_HUMAN
RYLRVKLTVRYK

SEQ ID NO: 232 - protein, 12 aa, Homo Sapiens
  ( 109 )...( 121 ): AA3R_HUMAN
YLRVKLTVRYKR

SEQ ID NO: 233 - protein, 12 aa, Homo Sapiens
  ( 110 )...( 122 ): AA3R_HUMAN
LRVKLTVRYKRV

SEQ ID NO: 234 - protein, 12 aa, Homo Sapiens
  ( 111 )...( 123 ): AA3R_HUMAN
RVKLTVRYKRVT

SEQ ID NO: 235 - protein, 12 aa, Homo Sapiens
  ( 112 )...( 124 ): AA3R_HUMAN
VKLTVRYKRVTT

SEQ ID NO: 236 - protein, 12 aa, Homo Sapiens
  ( 277 )...( 289 ): AA3R_HUMAN
MNPIVYAYKIKK

SEQ ID NO: 237 - protein, 12 aa, Homo Sapiens
  ( 278 )...( 290 ): AA3R_HUMAN
NPIVYAYKIKKF

SEQ ID NO: 238 - protein, 12 aa, Homo Sapiens
  ( 279 )...( 291 ): AA3R_HUMAN
PIVYAYKIKKFK

SEQ ID NO: 239 - protein, 12 aa, Homo Sapiens
  ( 348 )...( 360 ): ACM1_HUMAN
QLAKRKTFSLVK

SEQ ID NO: 240 - protein, 12 aa, Homo Sapiens
  ( 349 )...( 361 ): ACM1_HUMAN
LAKRKTFSLVKE

SEQ ID NO: 241 - protein, 12 aa, Homo Sapiens
  ( 361 )...( 373 ): ACM1_HUMAN
KKAARTLSAILL

SEQ ID NO: 242 - protein, 12 aa, Homo Sapiens
  ( 125 )...( 137 ): ACM2_HUMAN
VTKPLTYPVKRT

SEQ ID NO: 243 - protein, 12 aa, Homo Sapiens
  ( 126 )...( 138 ): ACM2_HUMAN
TKPLTYPVKRTT

SEQ ID NO: 244 - protein, 12 aa, Homo Sapiens
  ( 127 )...( 139 ): ACM2_HUMAN
KPLTYPVKRTTK

SEQ ID NO: 245 - protein, 12 aa, Homo Sapiens
  ( 129 )...( 141 ): ACM2_HUMAN
LTYPVKRTTKMA

SEQ ID NO: 246 - protein, 12 aa, Homo Sapiens
  ( 357 )...( 369 ): ACM2_HUMAN
KQNIVARKIVKM

SEQ ID NO: 247 - protein, 12 aa, Homo Sapiens
  ( 358 )...( 370 ): ACM2_HUMAN
QNIVARKIVKMT

SEQ ID NO: 248 - protein, 12 aa, Homo Sapiens
  ( 359 )...( 371 ): ACM2_HUMAN
NIVARKIVKMTK

SEQ ID NO: 249 - protein, 12 aa, Homo Sapiens
  ( 360 )...( 372 ): ACM2_HUMAN
IVARKIVKMTKQ

SEQ ID NO: 250 - protein, 12 aa, Homo Sapiens
  ( 361 )...( 373 ): ACM2_HUMAN
VARKIVKMTKQP

SEQ ID NO: 251 - protein, 12 aa, Homo Sapiens
  ( 362 )...( 374 ): ACM2_HUMAN
ARKIVKMTKQPA

SEQ ID NO: 252 - protein, 12 aa, Homo Sapiens
  ( 381 )...( 393 ): ACM2_HUMAN
REKKVTRTILAI

SEQ ID NO: 253 - protein, 12 aa, Homo Sapiens
  ( 383 )...( 395 ): ACM2_HUMAN
KKVTRTILAILL

SEQ ID NO: 254 - protein, 12 aa, Homo Sapiens
  ( 444 )...( 456 ): ACM2_HUMAN
NATFKKTFKHLL

SEQ ID NO: 255 - protein, 12 aa, Homo Sapiens
  ( 445 )...( 457 ): ACM2_HUMAN
ATFKKTFKHLLM

SEQ ID NO: 256 - protein, 12 aa, Homo Sapiens
  ( 89 )...( 101 ): ACM3_HUMAN
VIVSFKVNKQLK

SEQ ID NO: 257 - protein, 12 aa, Homo Sapiens
  ( 90 )...( 102 ): ACM3_HUMAN
IVSFKVNKQLKT

SEQ ID NO: 258 - protein, 12 aa, Homo Sapiens
  ( 91 )...( 103 ): ACM3_HUMAN
VSFKVNKQLKTV

SEQ ID NO: 259 - protein, 12 aa, Homo Sapiens
  ( 459 )...( 471 ): ACM3_HUMAN
KEATLAKRFALK

SEQ ID NO: 260 - protein, 12 aa, Homo Sapiens
  ( 548 )...( 560 ): ACM3_HUMAN
NKTFRTTFKMLL

SEQ ID NO: 261 - protein, 12 aa, Homo Sapiens
  ( 234 )...( 246 ): ACM4_HUMAN
PKEKKAKTLAFL

SEQ ID NO: 262 - protein, 12 aa, Homo Sapiens
  ( 237 )...( 249 ): ACM4_HUMAN
KKAKTLAFLKSP

SEQ ID NO: 263 - protein, 12 aa, Homo Sapiens
  ( 238 )...( 250 ): ACM4_HUMAN
KAKTLAFLKSPL

SEQ ID NO: 264 - protein, 12 aa, Homo Sapiens
  ( 240 )...( 252 ): ACM4_HUMAN
KTLAFLKSPLMK

SEQ ID NO: 265 - protein, 12 aa, Homo Sapiens
  ( 244 )...( 256 ): ACM4_HUMAN
FLKSPLMKQSVK

SEQ ID NO: 266 - protein, 12 aa, Homo Sapiens
  ( 245 )...( 257 ): ACM4_HUMAN
LKSPLMKQSVKK

SEQ ID NO: 267 - protein, 12 aa, Homo Sapiens
  ( 336 )...( 348 ): ACM4_HUMAN
ASRWSKIQIVTK

SEQ ID NO: 268 - protein, 12 aa, Homo Sapiens
  ( 337 )...( 349 ): ACM4_HUMAN
SRWSKIQIVTKQ

SEQ ID NO: 269 - protein, 12 aa, Homo Sapiens
  ( 338 )...( 350 ): ACM4_HUMAN
RWSKIQIVTKQT

SEQ ID NO: 270 - protein, 12 aa, Homo Sapiens
  ( 396 )...( 408 ): ACM4_HUMAN
RKVTRTIFAILL

SEQ ID NO: 271 - protein, 12 aa, Homo Sapiens
  ( 458 )...( 470 ): ACM4_HUMAN
ATFKKTFRHLLL

SEQ ID NO: 272 - protein, 12 aa, Homo Sapiens
  ( 424 )...( 436 ): ACM5_HUMAN
HQMTKRKRVVLV

SEQ ID NO: 273 - protein, 12 aa, Homo Sapiens
  ( 425 )...( 437 ): ACM5_HUMAN
QMTKRKRVVLVK

SEQ ID NO: 274 - protein, 12 aa, Homo Sapiens
  ( 500 )...( 512 ): ACM5_HUMAN
RTFRKTFKMLLL

SEQ ID NO: 275 - protein, 12 aa, Homo Sapiens
  ( 72 )...( 84 ): AG22_HUMAN
QKGPKKVSSIYI

SEQ ID NO: 276 - protein, 12 aa, Homo Sapiens
  ( 73 )...( 85 ): AG22_HUMAN
KGPKKVSSIYIF

SEQ ID NO: 277 - protein, 12 aa, Homo Sapiens
  ( 231 )...( 243 ): AG22_HUMAN
YFGIRKHLLKTN

SEQ ID NO: 278 - protein, 12 aa, Homo Sapiens
  ( 137 )...( 149 ): AG2R_HUMAN
RLRRTMLVAKVT

SEQ ID NO: 279 - protein, 12 aa, Homo Sapiens
  ( 213 )...( 225 ): AG2R_HUMAN
TSYTLIWKALKK

SEQ ID NO: 280 - protein, 12 aa, Homo Sapiens
  ( 214 )...( 226 ): AG2R_HUMAN
SYTLIWKALKKA

SEQ ID NO: 281 - protein, 12 aa, Homo Sapiens
  ( 219 )...( 231 ): AG2R_HUMAN
WKALKKAYEIQK

SEQ ID NO: 282 - protein, 12 aa, Homo Sapiens
  ( 305 )...( 317 ): AG2R_HUMAN
LGKKFKRYFLQL

SEQ ID NO: 283 - protein, 12 aa, Homo Sapiens
  ( 306 )...( 318 ): AG2R_HUMAN
GKKFKRYFLQLL

SEQ ID NO: 284 - protein, 12 aa, Homo Sapiens
  ( 307 )...( 319 ): AG2R_HUMAN
KKFKRYFLQLLK

SEQ ID NO: 285 - protein, 12 aa, Homo Sapiens
  ( 308 )...( 320 ): AG2R_HUMAN
KFKRYFLQLLKY

SEQ ID NO: 286 - protein, 12 aa, Homo Sapiens
  ( 309 )...( 321 ): AG2R_HUMAN
FKRYFLQLLKYI

SEQ ID NO: 287 - protein, 12 aa, Homo Sapiens
  ( 310 )...( 322 ): AG2R_HUMAN
KRYFLQLLKYIP

SEQ ID NO: 288 - protein, 12 aa, Homo Sapiens
  ( 314 )...( 326 ): AG2R_HUMAN
LQLLKYIPPKAK

SEQ ID NO: 289 - protein, 12 aa, Homo Sapiens
  ( 315 )...( 327 ): AG2R_HUMAN
QLLKYIPPKAKS

SEQ ID NO: 290 - protein, 12 aa, Homo Sapiens
  ( 316 )...( 328 ): AG2R_HUMAN
LLKYIPPKAKSH

SEQ ID NO: 291 - protein, 12 aa, Homo Sapiens
  ( 137 )...( 149 ): AG2S_HUMAN
RLRRTMLVAKVT

SEQ ID NO: 292 - protein, 12 aa, Homo Sapiens
  ( 213 )...( 225 ): AG2S_HUMAN
TSYTLIWKALKK

SEQ ID NO: 293 - protein, 12 aa, Homo Sapiens
  ( 214 )...( 226 ): AG2S_HUMAN
SYTLIWKALKKA

SEQ ID NO: 294 - protein, 12 aa, Homo Sapiens
  ( 219 )...( 231 ): AG2S_HUMAN
WKALKKAYEIQK

SEQ ID NO: 295 - protein, 12 aa, Homo Sapiens
  ( 303 )...( 315 ): AG2S_HUMAN
GFLGKKFKKDIL

SEQ ID NO: 296 - protein, 12 aa, Homo Sapiens
  ( 304 )...( 316 ): AG2S_HUMAN
FLGKKFKKDILQ

SEQ ID NO: 297 - protein, 12 aa, Homo Sapiens
  ( 305 )...( 317 ): AG2S_HUMAN
LGKKFKKDILQL

SEQ ID NO: 298 - protein, 12 aa, Homo Sapiens
  ( 306 )...( 318 ): AG2S_HUMAN
GKKFKKDILQLL

SEQ ID NO: 299 - protein, 12 aa, Homo Sapiens
  ( 307 )...( 319 ): AG2S_HUMAN
KKFKKDILQLLK

SEQ ID NO: 300 - protein, 12 aa, Homo Sapiens
  ( 308 )...( 320 ): AG2S_HUMAN
KFKKDILQLLKY

SEQ ID NO: 301 - protein, 12 aa, Homo Sapiens
  ( 314 )...( 326 ): AG2S_HUMAN
LQLLKYIPPKAK

SEQ ID NO: 302 - protein, 12 aa, Homo Sapiens
  ( 315 )...( 327 ): AG2S_HUMAN
QLLKYIPPKAKS

SEQ ID NO: 303 - protein, 12 aa, Homo Sapiens
  ( 316 )...( 328 ): AG2S_HUMAN
LLKYIPPKAKSH

SEQ ID NO: 304 - protein, 12 aa, Homo Sapiens
  ( 240 )...( 252 ): APJ_HUMAN
LRKRRRLLSIIV

SEQ ID NO: 305 - protein, 12 aa, Homo Sapiens
  ( 241 )...( 253 ): APJ_HUMAN
RKRRRLLSIIVV

SEQ ID NO: 306 - protein, 12 aa, Homo Sapiens
  ( 242 )...( 254 ): APJ_HUMAN
KRRRLLSIIVVL

SEQ ID NO: 307 - protein, 12 aa, Homo Sapiens
  ( 243 )...( 255 ): APJ_HUMAN
RRRLLSIIVVLV

SEQ ID NO: 308 - protein, 12 aa, Homo Sapiens
  ( 612 )...( 624 ): ARK2_HUMAN
TQIKDKKCILFR

SEQ ID NO: 309 - protein, 12 aa, Homo Sapiens
  ( 613 )...( 625 ): ARK2_HUMAN
QIKDKKCILFRI

SEQ ID NO: 310 - protein, 12 aa, Homo Sapiens
  ( 614 )...( 626 ): ARK2_HUMAN
IKDKKCILFRIK

SEQ ID NO: 311 - protein, 12 aa, Homo Sapiens
  ( 620 )...( 632 ): ARK2_HUMAN
ILFRIKGGKQFV

SEQ ID NO: 312 - protein, 12 aa, Homo Sapiens
  ( 621 )...( 633 ): ARK2_HUMAN
LFRIKGGKQFVL

SEQ ID NO: 313 - protein, 12 aa, Homo Sapiens
  ( 622 )...( 634 ): ARK2_HUMAN
FRIKGGKQFVLQ

SEQ ID NO: 314 - protein, 12 aa, Homo Sapiens
  ( 313 )...( 325 ): B1AR_HUMAN
RLVALREQKALK

SEQ ID NO: 315 - protein, 12 aa, Homo Sapiens
  ( 138 )...( 150 ): B2AR_HUMAN
PFKYQSLLTKNK

SEQ ID NO: 316 - protein, 12 aa, Homo Sapiens
  ( 139 )...( 151 ): B2AR_HUMAN
FKYQSLLTKNKA

SEQ ID NO: 317 - protein, 12 aa, Homo Sapiens
  ( 142 )...( 154 ): B2AR_HUMAN
QSLLTKNKARVI

SEQ ID NO: 318 - protein, 12 aa, Homo Sapiens
  ( 143 )...( 155 ): B2AR_HUMAN
SLLTKNKARVII

SEQ ID NO: 319 - protein, 12 aa, Homo Sapiens
  ( 144 )...( 156 ): B2AR_HUMAN
LLTKNKARVIIL

SEQ ID NO: 320 - protein, 12 aa, Homo Sapiens
  ( 145 )...( 157 ): B2AR_HUMAN
LTKNKARVIILM

SEQ ID NO: 321 - protein, 12 aa, Homo Sapiens
  ( 146 )...( 158 ): B2AR_HUMAN
TKNKARVIILMV

SEQ ID NO: 322 - protein, 12 aa, Homo Sapiens
  ( 147 )...( 159 ): B2AR_HUMAN
KNKARVIILMVW

SEQ ID NO: 323 - protein, 12 aa, Homo Sapiens
  ( 229 )...( 241 ): B3AR_HUMAN
VVATRQLRLLRG

SEQ ID NO: 324 - protein, 12 aa, Homo Sapiens
  ( 1263 )...( 1275 ): BAI1_HUMAN
KLKLAHAKGPPT

SEQ ID NO: 325 - protein, 12 aa, Homo Sapiens
  ( 968 )...( 980 ): BAI3_HUMAN
MAVTGKIRTRLI

SEQ ID NO: 326 - protein, 12 aa, Homo Sapiens
  ( 969 )...( 981 ): BAI3_HUMAN
AVTGKIRTRLIR

SEQ ID NO: 327 - protein, 12 aa, Homo Sapiens
  ( 973 )...( 985 ): BAI3_HUMAN
KIRTRLIRKRFL

SEQ ID NO: 328 - protein, 12 aa, Homo Sapiens
  ( 330 )...( 342 ): BRB2_HUMAN
LVYVIVGKRFRK

SEQ ID NO: 329 - protein, 12 aa, Homo Sapiens
  ( 331 )...( 343 ): BRB2_HUMAN
VYVIVGKRFRKK

SEQ ID NO: 330 - protein, 12 aa, Homo Sapiens
  ( 333 )...( 345 ): BRB2_HUMAN
VIVGKRFRKKSW

SEQ ID NO: 331 - protein, 12 aa, Homo Sapiens
  ( 65 )...( 77 ): BRS3_HUMAN
NAILIKVFFKTK

SEQ ID NO: 332 - protein, 12 aa, Homo Sapiens
  ( 66 )...( 78 ): BRS3_HUMAN
AILIKVFFKTKS

SEQ ID NO: 333 - protein, 12 aa, Homo Sapiens
  ( 265 )...( 277 ): BRS3_HUMAN
SRKRIARTVLVL

SEQ ID NO: 334 - protein, 12 aa, Homo Sapiens
  ( 266 )...( 278 ): BRS3_HUMAN
RKRIARTVLVLV

SEQ ID NO: 335 - protein, 12 aa, Homo Sapiens
  ( 267 )...( 279 ): BRS3_HUMAN
KRIARTVLVLVA

SEQ ID NO: 336 - protein, 12 aa, Homo Sapiens
  ( 335 )...( 347 ): BRS3_HUMAN
KSFQKHFKAQLF

SEQ ID NO: 337 - protein, 12 aa, Homo Sapiens
  ( 434 )...( 446 ): C3AR_HUMAN
LYALLGKDFRKK

SEQ ID NO: 338 - protein, 12 aa, Homo Sapiens
  ( 52 )...( 64 ): C3X1_HUMAN
VVFALTNSKKPK

SEQ ID NO: 339 - protein, 12 aa, Homo Sapiens
  ( 223 )...( 235 ): C3X1_HUMAN
NHKKAKAIKLIL

SEQ ID NO: 340 - protein, 12 aa, Homo Sapiens
  ( 224 )...( 236 ): C3X1_HUMAN
HKKAKAIKLILL

SEQ ID NO: 341 - protein, 12 aa, Homo Sapiens
  ( 225 )...( 237 ): C3X1_HUMAN
KKAKAIKLILLV

SEQ ID NO: 342 - protein, 12 aa, Homo Sapiens
  ( 226 )...( 238 ): C3X1_HUMAN
KAKAIKLILLVV

SEQ ID NO: 343 - protein, 12 aa, Homo Sapiens
  ( 234 )...( 246 ): C5AR_HUMAN
ATRSTKTLKVVV

SEQ ID NO: 344 - protein, 12 aa, Homo Sapiens
  ( 235 )...( 247 ): C5AR_HUMAN
TRSTKTLKVVVA

SEQ ID NO: 345 - protein, 12 aa, Homo Sapiens
  ( 236 )...( 248 ): C5AR_HUMAN
RSTKTLKVVVAV

SEQ ID NO: 346 - protein, 12 aa, Homo Sapiens
  ( 37 )...( 49 ): CALR_HUMAN
KPFLYVVGRKKM

SEQ ID NO: 347 - protein, 12 aa, Homo Sapiens
  ( 174 )...( 186 ): CALR_HUMAN
RKLTTIFPLNWK

SEQ ID NO: 348 - protein, 12 aa, Homo Sapiens
  ( 333 )...( 345 ): CALR_HUMAN
LNIVRVLVTKMR

SEQ ID NO: 349 - protein, 12 aa, Homo Sapiens
  ( 416 )...( 428 ): CALR_HUMAN
TTVKRQWAQFKI

SEQ ID NO: 350 - protein, 12 aa, Homo Sapiens
  ( 417 )...( 429 ): CALR_HUMAN
TVKRQWAQFKIQ

SEQ ID NO: 351 - protein, 12 aa, Homo Sapiens
  ( 418 )...( 430 ): CALR_HUMAN
VKRQWAQFKIQW

SEQ ID NO: 352 - protein, 12 aa, Homo Sapiens
  ( 419 )...( 431 ): CALR_HUMAN
KRQWAQFKIQWN

SEQ ID NO: 353 - protein, 12 aa, Homo Sapiens
  ( 283 )...( 295 ): CASR_HUMAN
IVRRNITGKIWL

SEQ ID NO: 354 - protein, 12 aa, Homo Sapiens
  ( 633 )...( 645 ): CASR_HUMAN
VFIKFRNTPIVK

SEQ ID NO: 355 - protein, 12 aa, Homo Sapiens
  ( 635 )...( 647 ): CASR_HUMAN
IKFRNTPIVKAT

SEQ ID NO: 356 - protein, 12 aa, Homo Sapiens
  ( 224 )...( 236 ): CB1R_HUMAN
YKRIVTRPKAVV

SEQ ID NO: 357 - protein, 12 aa, Homo Sapiens
  ( 225 )...( 237 ): CB1R_HUMAN
KRIVTRPKAVVA

SEQ ID NO: 358 - protein, 12 aa, Homo Sapiens
  ( 369 )...( 381 ): CB1R_HUMAN
GKMNKLIKTVFA

SEQ ID NO: 359 - protein, 12 aa, Homo Sapiens
  ( 370 )...( 382 ): CB1R_HUMAN
KMNKLIKTVFAF

SEQ ID NO: 360 - protein, 12 aa, Homo Sapiens
  ( 448 )...( 460 ): CB1R_HUMAN
SCIKSTVKIAKV

SEQ ID NO: 361 - protein, 12 aa, Homo Sapiens
  ( 450 )...( 462 ): CB1R_HUMAN
IKSTVKIAKVTM

SEQ ID NO: 362 - protein, 12 aa, Homo Sapiens
  ( 451 )...( 463 ): CB1R_HUMAN
KSTVKIAKVTMS

SEQ ID NO: 363 - protein, 12 aa, Homo Sapiens
  ( 142 )...( 154 ): CB2R_HUMAN
KALLTRGRALVT

SEQ ID NO: 364 - protein, 12 aa, Homo Sapiens
  ( 60 )...( 72 ): CCKR_HUMAN
TLVITVLIRNKR

SEQ ID NO: 365 - protein, 12 aa, Homo Sapiens
  ( 61 )...( 73 ): CCKR_HUMAN
LVITVLIRNKRM

SEQ ID NO: 366 - protein, 12 aa, Homo Sapiens
  ( 62 )...( 74 ): CCKR_HUMAN
VITVLIRNKRMR

SEQ ID NO: 367 - protein, 12 aa, Homo Sapiens
  ( 63 )...( 75 ): CCKR_HUMAN
ITVLIRNKRMRT

SEQ ID NO: 368 - protein, 12 aa, Homo Sapiens
  ( 64 )...( 76 ): CCKR_HUMAN
TVLIRNKRMRTV

SEQ ID NO: 369 - protein, 12 aa, Homo Sapiens
  ( 65 )...( 77 ): CCKR_HUMAN
VLIRNKRMRTVT

SEQ ID NO: 370 - protein, 12 aa, Homo Sapiens
  ( 70 )...( 82 ): CCKR_HUMAN
KRMRTVTNIFLL

SEQ ID NO: 371 - protein, 12 aa, Homo Sapiens
  ( 150 )...( 162 ): CCKR_HUMAN
RVWQTKSHALKV

SEQ ID NO: 372 - protein, 12 aa, Homo Sapiens
  ( 271 )...( 283 ): CCKR_HUMAN
LQKTRPPRKLEL

SEQ ID NO: 373 - protein, 12 aa, Homo Sapiens
  ( 304 )...( 316 ): CCKR_HUMAN
NLMAKKRVIRML

SEQ ID NO: 374 - protein, 12 aa, Homo Sapiens
  ( 305 )...( 317 ): CCKR_HUMAN
LMAKKRVIRMLI

SEQ ID NO: 375 - protein, 12 aa, Homo Sapiens
  ( 306 )...( 318 ): CCKR_HUMAN
MAKKRVIRMLIV

SEQ ID NO: 376 - protein, 12 aa, Homo Sapiens
  ( 307 )...( 319 ): CCKR_HUMAN
AKKRVIRMLIVI

SEQ ID NO: 377 - protein, 12 aa, Homo Sapiens
  ( 308 )...( 320 ): CCKR_HUMAN
KKRVIRMLIVIV

SEQ ID NO: 378 - protein, 12 aa, Homo Sapiens
  ( 309 )...( 321 ): CCKR_HUMAN
KRVIRMLIVIVV

SEQ ID NO: 379 - protein, 12 aa, Homo Sapiens
  ( 250 )...( 262 ): CCR3_HUMAN
RLRAMRLVVVVV

SEQ ID NO: 380 - protein, 12 aa, Homo Sapiens
  ( 59 )...( 71 ): CCR4_HUMAN
VILVMGYQKKLR

SEQ ID NO: 381 - protein, 12 aa, Homo Sapiens
  ( 60 )...( 72 ): CCR4_HUMAN
ILVMGYQKKLRS

SEQ ID NO: 382 - protein, 12 aa, Homo Sapiens
  ( 145 )...( 157 ): CCR4_HUMAN
QRPRKLLAEKVV

SEQ ID NO: 383 - protein, 12 aa, Homo Sapiens
  ( 146 )...( 158 ): CCR4_HUMAN
RPRKLLAEKVVY

SEQ ID NO: 384 - protein, 12 aa, Homo Sapiens
  ( 233 )...( 245 ): CCR4_HUMAN
QKRKALKTTVIL

SEQ ID NO: 385 - protein, 12 aa, Homo Sapiens
  ( 234 )...( 246 ): CCR4_HUMAN
KRKALKTTVILI

SEQ ID NO: 386 - protein, 12 aa, Homo Sapiens
  ( 235 )...( 247 ): CCR4_HUMAN
RKALKTTVILIL

SEQ ID NO: 387 - protein, 12 aa, Homo Sapiens
  ( 253 )...( 265 ): CCR5_HUMAN
QRQKAVRVAILV

SEQ ID NO: 388 - protein, 12 aa, Homo Sapiens
  ( 254 )...( 266 ): CCR5_HUMAN
RQKAVRVAILVT

SEQ ID NO: 389 - protein, 12 aa, Homo Sapiens
  ( 127 )...( 139 ): CCR6_HUMAN
RFIVVVKATKAY

SEQ ID NO: 390 - protein, 12 aa, Homo Sapiens
  ( 142 )...( 154 ): CCR6_HUMAN
AKRMTWGKVTSL

SEQ ID NO: 391 - protein, 12 aa, Homo Sapiens
  ( 222 )...( 234 ): CCR6_HUMAN
GGFQKHRSLKII

SEQ ID NO: 392 - protein, 12 aa, Homo Sapiens
  ( 223 )...( 235 ): CCR6_HUMAN
GFQKHRSLKIIF

SEQ ID NO: 393 - protein, 12 aa, Homo Sapiens
  ( 224 )...( 236 ): CCR6_HUMAN
FQKHRSLKIIFL

SEQ ID NO: 394 - protein, 12 aa, Homo Sapiens
  ( 225 )...( 237 ): CCR6_HUMAN
QKHRSLKIIFLV

SEQ ID NO: 395 - protein, 12 aa, Homo Sapiens
  ( 226 )...( 238 ): CCR6_HUMAN
KHRSLKIIFLVM

SEQ ID NO: 396 - protein, 12 aa, Homo Sapiens
  ( 291 )...( 303 ): CCR6_HUMAN
VSLKFRKNFWKL

SEQ ID NO: 397 - protein, 12 aa, Homo Sapiens
  ( 292 )...( 304 ): CCR6_HUMAN
SLKFRKNFWKLV

SEQ ID NO: 398 - protein, 12 aa, Homo Sapiens
  ( 296 )...( 308 ): CCR6_HUMAN
RKNFWKLVKDIG

SEQ ID NO: 399 - protein, 12 aa, Homo Sapiens
  ( 337 )...( 349 ): CD97_HUMAN
IMRILAKSLPKG

SEQ ID NO: 400 - protein, 12 aa, Homo Sapiens
  ( 729 )...( 741 ): CD97_HUMAN
MKKLKKARALTI

SEQ ID NO: 401 - protein, 12 aa, Homo Sapiens
  ( 730 )...( 742 ): CD97_HUMAN
KKLKKARALTIT

SEQ ID NO: 402 - protein, 12 aa, Homo Sapiens
  ( 731 )...( 743 ): CD97_HUMAN
KLKKARALTITA

SEQ ID NO: 403 - protein, 12 aa, Homo Sapiens
  ( 732 )...( 744 ): CD97_HUMAN
LKKARALTITAI

SEQ ID NO: 404 - protein, 12 aa, Homo Sapiens
  ( 733 )...( 745 ): CD97_HUMAN
KKARALTITAIA

SEQ ID NO: 405 - protein, 12 aa, Homo Sapiens
  ( 783 )...( 795 ): CD97_HUMAN
YLLHCLLNKKVR

SEQ ID NO: 406 - protein, 12 aa, Homo Sapiens
  ( 310 )...( 322 ): CGRR_HUMAN
LNIVRVLITKLK

SEQ ID NO: 407 - protein, 12 aa, Homo Sapiens
  ( 311 )...( 323 ): CGRR_HUMAN
NIVRVLITKLKV

SEQ ID NO: 408 - protein, 12 aa, Homo Sapiens
  ( 312 )...( 324 ): CGRR_HUMAN
IVRVLITKLKVT

SEQ ID NO: 409 - protein, 12 aa, Homo Sapiens
  ( 313 )...( 325 ): CGRR_HUMAN
VRVLITKLKVTH

SEQ ID NO: 410 - protein, 12 aa, Homo Sapiens
  ( 314 )...( 326 ): CGRR_HUMAN
RVLITKLKVTHQ

SEQ ID NO: 411 - protein, 12 aa, Homo Sapiens
  ( 156 )...( 168 ): CKD6_HUMAN
RTRAKNLLLATI

SEQ ID NO: 412 - protein, 12 aa, Homo Sapiens
  ( 55 )...( 67 ): CKR1_HUMAN
VVLVLVQYKRLK

SEQ ID NO: 413 - protein, 12 aa, Homo Sapiens
  ( 56 )...( 68 ): CKR1_HUMAN
VLVLVQYKRLKN

SEQ ID NO: 414 - protein, 12 aa, Homo Sapiens
  ( 57 )...( 69 ): CKR1_HUMAN
LVLVQYKRLKNM

SEQ ID NO: 415 - protein, 12 aa, Homo Sapiens
  ( 58 )...( 70 ): CKR1_HUMAN
VLVQYKRLKNMT

SEQ ID NO: 416 - protein, 12 aa, Homo Sapiens
  ( 59 )...( 71 ): CKR1_HUMAN
LVQYKRLKNMTS

SEQ ID NO: 417 - protein, 12 aa, Homo Sapiens
  ( 60 )...( 72 ): CKR1_HUMAN
VQYKRLKNMTSI

SEQ ID NO: 418 - protein, 12 aa, Homo Sapiens
  ( 61 )...( 73 ): CKR1_HUMAN
QYKRLKNMTSIY

SEQ ID NO: 419 - protein, 12 aa, Homo Sapiens
  ( 62 )...( 74 ): CKR1_HUMAN
YKRLKNMTSIYL

SEQ ID NO: 420 - protein, 12 aa, Homo Sapiens
  ( 63 )...( 75 ): CKR1_HUMAN
KRLKNMTSIYLL

SEQ ID NO: 421 - protein, 12 aa, Homo Sapiens
  ( 219 )...( 231 ): CKR1_HUMAN
YTGIIKILLRRP

SEQ ID NO: 422 - protein, 12 aa, Homo Sapiens
  ( 220 )...( 232 ): CKR1_HUMAN
TGIIKILLRRPN

SEQ ID NO: 423 - protein, 12 aa, Homo Sapiens
  ( 222 )...( 234 ): CKR1_HUMAN
IIKILLRRPNEK

SEQ ID NO: 424 - protein, 12 aa, Homo Sapiens
  ( 223 )...( 235 ): CKR1_HUMAN
IKILLRRPNEKK

SEQ ID NO: 425 - protein, 12 aa, Homo Sapiens
  ( 232 )...( 244 ): CKR1_HUMAN
EKKSKAVRLIFV

SEQ ID NO: 426 - protein, 12 aa, Homo Sapiens
  ( 233 )...( 245 ): CKR1_HUMAN
KKSKAVRLIFVI

SEQ ID NO: 427 - protein, 12 aa, Homo Sapiens
  ( 234 )...( 246 ): CKR1_HUMAN
KSKAVRLIFVIM

SEQ ID NO: 428 - protein, 12 aa, Homo Sapiens
  ( 317 )...( 329 ): CKR1_HUMAN
HRRVAVHLVKWL

SEQ ID NO: 429 - protein, 12 aa, Homo Sapiens
  ( 63 )...( 75 ): CKR2_HUMAN
VVLILINCKKLK

SEQ ID NO: 430 - protein, 12 aa, Homo Sapiens
  ( 53 )...( 65 ): CKR3_HUMAN
VVVVMILIKYRR

SEQ ID NO: 431 - protein, 12 aa, Homo Sapiens
  ( 54 )...( 66 ): CKR3_HUMAN
VVVMILIKYRRL

SEQ ID NO: 432 - protein, 12 aa, Homo Sapiens
  ( 55 )...( 67 ): CKR3_HUMAN
VVMILIKYRRLR

SEQ ID NO: 433 - protein, 12 aa, Homo Sapiens
  ( 56 )...( 68 ): CKR3_HUMAN
VMILIKYRRLRI

SEQ ID NO: 434 - protein, 12 aa, Homo Sapiens
  ( 57 )...( 69 ): CKR3_HUMAN
MILIKYRRLRIM

SEQ ID NO: 435 - protein, 12 aa, Homo Sapiens
  ( 58 )...( 70 ): CKR3_HUMAN
ILIKYRRLRIMT

SEQ ID NO: 436 - protein, 12 aa, Homo Sapiens
  ( 222 )...( 234 ): CKR3_HUMAN
IIKTLLRCPSKK

SEQ ID NO: 437 - protein, 12 aa, Homo Sapiens
  ( 230 )...( 242 ): CKR3_HUMAN
PSKKKYKAIRLI

SEQ ID NO: 438 - protein, 12 aa, Homo Sapiens
  ( 231 )...( 243 ): CKR3_HUMAN
SKKKYKAIRLIF

SEQ ID NO: 439 - protein, 12 aa, Homo Sapiens
  ( 232 )...( 244 ): CKR3_HUMAN
KKKYKAIRLIFV

SEQ ID NO: 440 - protein, 12 aa, Homo Sapiens
  ( 233 )...( 245 ): CKR3_HUMAN
KKYKAIRLIFVI

SEQ ID NO: 441 - protein, 12 aa, Homo Sapiens
  ( 234 )...( 246 ): CKR3_HUMAN
KYKAIRLIFVIM

SEQ ID NO: 442 - protein, 12 aa, Homo Sapiens
  ( 58 )...( 70 ): CKR4_HUMAN
SVVVLVLFKYKR

SEQ ID NO: 443 - protein, 12 aa, Homo Sapiens
  ( 59 )...( 71 ): CKR4_HUMAN
VVVLVLFKYKRL

SEQ ID NO: 444 - protein, 12 aa, Homo Sapiens
  ( 60 )...( 72 ): CKR4_HUMAN
VVLVLFKYKRLR

SEQ ID NO: 445 - protein, 12 aa, Homo Sapiens
  ( 61 )...( 73 ): CKR4_HUMAN
VLVLFKYKRLRS

SEQ ID NO: 446 - protein, 12 aa, Homo Sapiens
  ( 235 )...( 247 ): CKR4_HUMAN
EKKNKAVKMIFA

SEQ ID NO: 447 - protein, 12 aa, Homo Sapiens
  ( 236 )...( 248 ): CKR4_HUMAN
KKNKAVKMIFAV

SEQ ID NO: 448 - protein, 12 aa, Homo Sapiens
  ( 237 )...( 249 ): CKR4_HUMAN
KNKAVKMIFAVV

SEQ ID NO: 449 - protein, 12 aa, Homo Sapiens
  ( 309 )...( 321 ): CKR4_HUMAN
EKFRKYILQLFK

SEQ ID NO: 450 - protein, 12 aa, Homo Sapiens
  ( 310 )...( 322 ): CKR4_HUMAN
KFRKYILQLFKT

SEQ ID NO: 451 - protein, 12 aa, Homo Sapiens
  ( 21 )...( 33 ): CKR5_HUMAN
QKINVKQIAARL

SEQ ID NO: 452 - protein, 12 aa, Homo Sapiens
  ( 22 )...( 34 ): CKR5_HUMAN
KINVKQIAARLL

SEQ ID NO: 453 - protein, 12 aa, Homo Sapiens
  ( 51 )...( 63 ): CKR5_HUMAN
VILILINCKRLK

SEQ ID NO: 454 - protein, 12 aa, Homo Sapiens
  ( 52 )...( 64 ): CKR5_HUMAN
ILILINCKRLKS

SEQ ID NO: 455 - protein, 12 aa, Homo Sapiens
  ( 308 )...( 320 ): CKR5_HUMAN
LLVFFQKHIAKR

SEQ ID NO: 456 - protein, 12 aa, Homo Sapiens
  ( 309 )...( 321 ): CKR5_HUMAN
LVFFQKHIAKRF

SEQ ID NO: 457 - protein, 12 aa, Homo Sapiens
  ( 67 )...( 79 ): CKR6_HUMAN
VVITFAFYKKAR

SEQ ID NO: 458 - protein, 12 aa, Homo Sapiens
  ( 248 )...( 260 ): CKR6_HUMAN
KRHKAIRVIIAV

SEQ ID NO: 459 - protein, 12 aa, Homo Sapiens
  ( 249 )...( 261 ): CKR6_HUMAN
RHKAIRVIIAVV

SEQ ID NO: 460 - protein, 12 aa, Homo Sapiens
  ( 319 )...( 331 ): CKR6_HUMAN
IGQKFRNYFLKI

SEQ ID NO: 461 - protein, 12 aa, Homo Sapiens
  ( 320 )...( 332 ): CKR6_HUMAN
GQKFRNYFLKIL

SEQ ID NO: 462 - protein, 12 aa, Homo Sapiens
  ( 321 )...( 333 ): CKR6_HUMAN
QKFRNYFLKILK

SEQ ID NO: 463 - protein, 12 aa, Homo Sapiens
  ( 258 )...( 270 ): CKR7_HUMAN
RNKAIKVIIAVV

SEQ ID NO: 464 - protein, 12 aa, Homo Sapiens
  ( 56 )...( 68 ): CKR8_HUMAN
VILVLVVCKKLR

SEQ ID NO: 465 - protein, 12 aa, Homo Sapiens
  ( 57 )...( 69 ): CKR8_HUMAN
ILVLVVCKKLRS

SEQ ID NO: 466 - protein, 12 aa, Homo Sapiens
  ( 58 )...( 70 ): CKR8_HUMAN
LVLVVCKKLRSI

SEQ ID NO: 467 - protein, 12 aa, Homo Sapiens
  ( 59 )...( 71 ): CKR8_HUMAN
VLVVCKKLRSIT

SEQ ID NO: 468 - protein, 12 aa, Homo Sapiens
  ( 137 )...( 149 ): CKR8_HUMAN
HAVYALKVRTIR

SEQ ID NO: 469 - protein, 12 aa, Homo Sapiens
  ( 139 )...( 151 ): CKR8_HUMAN
VYALKVRTIRMG

SEQ ID NO: 470 - protein, 12 aa, Homo Sapiens
  ( 141 )...( 153 ): CKR8_HUMAN
ALKVRTIRMGTT

SEQ ID NO: 471 - protein, 12 aa, Homo Sapiens
  ( 142 )...( 154 ): CKR8_HUMAN
LKVRTIRMGTTL

SEQ ID NO: 472 - protein, 12 aa, Homo Sapiens
  ( 218 )...( 230 ): CKR8_HUMAN
YIKILHQLKRCQ

SEQ ID NO: 473 - protein, 12 aa, Homo Sapiens
  ( 219 )...( 231 ): CKR8_HUMAN
IKILHQLKRCQN

SEQ ID NO: 474 - protein, 12 aa, Homo Sapiens
  ( 231 )...( 243 ): CKR8_HUMAN
HNKTKAIRLVLI

SEQ ID NO: 475 - protein, 12 aa, Homo Sapiens
  ( 232 )...( 244 ): CKR8_HUMAN
NKTKAIRLVLIV

SEQ ID NO: 476 - protein, 12 aa, Homo Sapiens
  ( 233 )...( 245 ): CKR8_HUMAN
KTKAIRLVLIVV

SEQ ID NO: 477 - protein, 12 aa, Homo Sapiens
  ( 306 )...( 318 ): CKR8_HUMAN
KFKKHLSEIFQK

SEQ ID NO: 478 - protein, 12 aa, Homo Sapiens
  ( 195 )...( 207 ): CKR9_HUMAN
STKLKSAVLTLK

SEQ ID NO: 479 - protein, 12 aa, Homo Sapiens
  ( 196 )...( 208 ): CKR9_HUMAN
TKLKSAVLTLKV

SEQ ID NO: 480 - protein, 12 aa, Homo Sapiens
  ( 197 )...( 209 ): CKR9_HUMAN
KLKSAVLTLKVI

SEQ ID NO: 481 - protein, 12 aa, Homo Sapiens
  ( 236 )...( 248 ): CKR9_HUMAN
SKHKALKVTITV

SEQ ID NO: 482 - protein, 12 aa, Homo Sapiens
  ( 237 )...( 249 ): CKR9_HUMAN
KHKALKVTITVL

SEQ ID NO: 483 - protein, 12 aa, Homo Sapiens
  ( 312 )...( 324 ): CKR9_HUMAN
FRRDLVKTLKNL

SEQ ID NO: 484 - protein, 12 aa, Homo Sapiens
  ( 62 )...( 74 ): CKRB_HUMAN
VVAIYAYYKKQR

SEQ ID NO: 485 - protein, 12 aa, Homo Sapiens
  ( 63 )...( 75 ): CKRB_HUMAN
VAIYAYYKKQRT

SEQ ID NO: 486 - protein, 12 aa, Homo Sapiens
  ( 64 )...( 76 ): CKRB_HUMAN
AIYAYYKKQRTK

SEQ ID NO: 487 - protein, 12 aa, Homo Sapiens
  ( 231 )...( 243 ): CKRB_HUMAN
PNIKISRPLKVL

SEQ ID NO: 488 - protein, 12 aa, Homo Sapiens
  ( 232 )...( 244 ): CKRB_HUMAN
NIKISRPLKVLL

SEQ ID NO: 489 - protein, 12 aa, Homo Sapiens
  ( 233 )...( 245 ): CKRB_HUMAN
IKISRPLKVLLT

SEQ ID NO: 490 - protein, 12 aa, Homo Sapiens
  ( 234 )...( 246 ): CKRB_HUMAN
KISRPLKVLLTV

SEQ ID NO: 491 - protein, 12 aa, Homo Sapiens
  ( 309 )...( 321 ): CKRB_HUMAN
SFKNYVMKVAKK

SEQ ID NO: 492 - protein, 12 aa, Homo Sapiens
  ( 47 )...( 59 ): CLT1_HUMAN
VLIKTYHKKSAF

SEQ ID NO: 493 - protein, 12 aa, Homo Sapiens
  ( 48 )...( 60 ): CLT1_HUMAN
LIKTYHKKSAFQ

SEQ ID NO: 494 - protein, 12 aa, Homo Sapiens
  ( 49 )...( 61 ): CLT1_HUMAN
IKTYHKKSAFQV

SEQ ID NO: 495 - protein, 12 aa, Homo Sapiens
  ( 131 )...( 143 ): CLT1_HUMAN
NINLVTQKKARF

SEQ ID NO: 496 - protein, 12 aa, Homo Sapiens
  ( 132 )...( 144 ): CLT1_HUMAN
INLVTQKKARFV

SEQ ID NO: 497 - protein, 12 aa, Homo Sapiens
  ( 134 )...( 146 ): CLT1_HUMAN
LVTQKKARFVCV

SEQ ID NO: 498 - protein, 12 aa, Homo Sapiens
  ( 211 )...( 223 ): CLT1_HUMAN
MIILTLLKKSMK

SEQ ID NO: 499 - protein, 12 aa, Homo Sapiens
  ( 212 )...( 224 ): CLT1_HUMAN
IILTLLKKSMKK

SEQ ID NO: 500 - protein, 12 aa, Homo Sapiens
  ( 213 )...( 225 ): CLT1_HUMAN
ILTLLKKSMKKN

SEQ ID NO: 501 - protein, 12 aa, Homo Sapiens
  ( 214 )...( 226 ): CLT1_HUMAN
LTLLKKSMKKNL

SEQ ID NO: 502 - protein, 12 aa, Homo Sapiens
  ( 215 )...( 227 ): CLT1_HUMAN
TLLKKSMKKNLS

SEQ ID NO: 503 - protein, 12 aa, Homo Sapiens
  ( 238 )...( 250 ): CLT2_HUMAN
LRVSHRKALTTI

SEQ ID NO: 504 - protein, 12 aa, Homo Sapiens
  ( 239 )...( 251 ): CLT2_HUMAN
RVSHRKALTTII

SEQ ID NO: 505 - protein, 12 aa, Homo Sapiens
  ( 60 )...( 72 ): CML1_HUMAN
LVIIIATFKMKK

SEQ ID NO: 506 - protein, 12 aa, Homo Sapiens
  ( 63 )...( 75 ): CML1_HUMAN
IIATFKMKKTVN

SEQ ID NO: 507 - protein, 12 aa, Homo Sapiens
  ( 241 )...( 253 ): CML1_HUMAN
LTIVCKLQRNRL

SEQ ID NO: 508 - protein, 12 aa, Homo Sapiens
  ( 251 )...( 263 ): CML1_HUMAN
RLAKTKKPFKII

SEQ ID NO: 509 - protein, 12 aa, Homo Sapiens
  ( 252 )...( 264 ): CML1_HUMAN
LAKTKKPFKIIV

SEQ ID NO: 510 - protein, 12 aa, Homo Sapiens
  ( 253 )...( 265 ): CML1_HUMAN
AKTKKPFKIIVT

SEQ ID NO: 511 - protein, 12 aa, Homo Sapiens
  ( 254 )...( 266 ): CML1_HUMAN
KTKKPFKIIVTI

SEQ ID NO: 512 - protein, 12 aa, Homo Sapiens
  ( 255 )...( 267 ): CML1_HUMAN
TKKPFKIIVTII

SEQ ID NO: 513 - protein, 12 aa, Homo Sapiens
  ( 256 )...( 268 ): CML1_HUMAN
KKPFKIIVTIII

SEQ ID NO: 514 - protein, 12 aa, Homo Sapiens
  ( 323 )...( 335 ): CML1_HUMAN
FKKFKVALFSRL

SEQ ID NO: 515 - protein, 12 aa, Homo Sapiens
  ( 324 )...( 336 ): CML1_HUMAN
KKFKVALFSRLV

SEQ ID NO: 516 - protein, 12 aa, Homo Sapiens
  ( 254 )...( 266 ): CML2_HUMAN
RQKALRMILAVV

SEQ ID NO: 517 - protein, 12 aa, Homo Sapiens
  ( 110 )...( 122 ): CRF1_HUMAN
KKSKVHYHVAVI

SEQ ID NO: 518 - protein, 12 aa, Homo Sapiens
  ( 317 )...( 329 ): CRF1_HUMAN
FNIVRILMTKLR

SEQ ID NO: 519 - protein, 12 aa, Homo Sapiens
  ( 318 )...( 330 ): CRF1_HUMAN
NIVRILMTKLRA

SEQ ID NO: 520 - protein, 12 aa, Homo Sapiens
  ( 319 )...( 331 ): CRF1_HUMAN
IVRILMTKLRAS

SEQ ID NO: 521 - protein, 12 aa, Homo Sapiens
  ( 320 )...( 332 ): CRF1_HUMAN
VRILMTKLRAST

SEQ ID NO: 522 - protein, 12 aa, Homo Sapiens
  ( 321 )...( 333 ): CRF1_HUMAN
RILMTKLRASTT

SEQ ID NO: 523 - protein, 12 aa, Homo Sapiens
  ( 335 )...( 347 ): CRF1_HUMAN
TIQYRKAVKATL

SEQ ID NO: 524 - protein, 12 aa, Homo Sapiens
  ( 336 )...( 348 ): CRF1_HUMAN
IQYRKAVKATLV

SEQ ID NO: 525 - protein, 12 aa, Homo Sapiens
  ( 337 )...( 349 ): CRF1_HUMAN
QYRKAVKATLVL

SEQ ID NO: 526 - protein, 12 aa, Homo Sapiens
  ( 338 )...( 350 ): CRF1_HUMAN
YRKAVKATLVLL

SEQ ID NO: 527 - protein, 12 aa, Homo Sapiens
  ( 339 )...( 351 ): CRF1_HUMAN
RKAVKATLVLLP

SEQ ID NO: 528 - protein, 12 aa, Homo Sapiens
  ( 284 )...( 296 ): CRF2_HUMAN
FNIVRILMTKLR

SEQ ID NO: 529 - protein, 12 aa, Homo Sapiens
  ( 285 )...( 297 ): CRF2_HUMAN
NIVRILMTKLRA

SEQ ID NO: 530 - protein, 12 aa, Homo Sapiens
  ( 286 )...( 298 ): CRF2_HUMAN
IVRILMTKLRAS

SEQ ID NO: 531 - protein, 12 aa, Homo Sapiens
  ( 287 )...( 299 ): CRF2_HUMAN
VRILMTKLRAST

SEQ ID NO: 532 - protein, 12 aa, Homo Sapiens
  ( 288 )...( 300 ): CRF2_HUMAN
RILMTKLRASTT

SEQ ID NO: 533 - protein, 12 aa, Homo Sapiens
  ( 302 )...( 314 ): CRF2_HUMAN
TIQYRKAVKATL

SEQ ID NO: 534 - protein, 12 aa, Homo Sapiens
  ( 303 )...( 315 ): CRF2_HUMAN
IQYRKAVKATLV

SEQ ID NO: 535 - protein, 12 aa, Homo Sapiens
  ( 304 )...( 316 ): CRF2_HUMAN
QYRKAVKATLVL

SEQ ID NO: 536 - protein, 12 aa, Homo Sapiens
  ( 305 )...( 317 ): CRF2_HUMAN
YRKAVKATLVLL

SEQ ID NO: 537 - protein, 12 aa, Homo Sapiens
  ( 306 )...( 318 ): CRF2_HUMAN
RKAVKATLVLLP

SEQ ID NO: 538 - protein, 12 aa, Homo Sapiens
  ( 220 )...( 232 ): CXC1_HUMAN
RHRTVKLIFAIV

SEQ ID NO: 539 - protein, 12 aa, Homo Sapiens
  ( 290 )...( 302 ): CXC1_HUMAN
VGVKFRTHLKHV

SEQ ID NO: 540 - protein, 12 aa, Homo Sapiens
  ( 291 )...( 303 ): CXC1_HUMAN
GVKFRTHLKHVL

SEQ ID NO: 541 - protein, 12 aa, Homo Sapiens
  ( 292 )...( 304 ): CXC1_HUMAN
VKFRTHLKHVLR

SEQ ID NO: 542 - protein, 12 aa, Homo Sapiens
  ( 148 )...( 160 ): D2DR_HUMAN
SKRRVTVMISIV

SEQ ID NO: 543 - protein, 12 aa, Homo Sapiens
  ( 149 )...( 161 ): D2DR_HUMAN
KRRVTVMISIVW

SEQ ID NO: 544 - protein, 12 aa, Homo Sapiens
  ( 207 )...( 219 ): D2DR_HUMAN
LVYIKIYIVLRR

SEQ ID NO: 545 - protein, 12 aa, Homo Sapiens
  ( 208 )...( 220 ): D2DR_HUMAN
VYIKIYIVLRRR

SEQ ID NO: 546 - protein, 12 aa, Homo Sapiens
  ( 210 )...( 222 ): D2DR_HUMAN
IKIYIVLRRRRK

SEQ ID NO: 547 - protein, 12 aa, Homo Sapiens
  ( 207 )...( 219 ): D3DR_HUMAN
VYARIYVVLKQR

SEQ ID NO: 548 - protein, 12 aa, Homo Sapiens
  ( 212 )...( 224 ): DADR_HUMAN
VTYTRIYRIAQK

SEQ ID NO: 549 - protein, 12 aa, Homo Sapiens
  ( 213 )...( 225 ): DADR_HUMAN
TYTRIYRIAQKQ

SEQ ID NO: 550 - protein, 12 aa, Homo Sapiens
  ( 214 )...( 226 ): DADR_HUMAN
YTRIYRIAQKQI

SEQ ID NO: 551 - protein, 12 aa, Homo Sapiens
  ( 217 )...( 229 ): DADR_HUMAN
IYRIAQKQIRRI

SEQ ID NO: 552 - protein, 12 aa, Homo Sapiens
  ( 263 )...( 275 ): DADR_HUMAN
SFKRETKVLKTL

SEQ ID NO: 553 - protein, 12 aa, Homo Sapiens
  ( 264 )...( 276 ): DADR_HUMAN
FKRETKVLKTLS

SEQ ID NO: 554 - protein, 12 aa, Homo Sapiens
  ( 148 )...( 160 ): DBDR_HUMAN
YKRKMTQRMALV

SEQ ID NO: 555 - protein, 12 aa, Homo Sapiens
  ( 149 )...( 161 ): DBDR_HUMAN
KRKMTQRMALVM

SEQ ID NO: 556 - protein, 12 aa, Homo Sapiens
  ( 246 )...( 258 ): DBDR_HUMAN
TRIYRIAQVQIR

SEQ ID NO: 557 - protein, 12 aa, Homo Sapiens
  ( 248 )...( 260 ): DBDR_HUMAN
IYRIAQVQIRRI

SEQ ID NO: 558 - protein, 12 aa, Homo Sapiens
  ( 284 )...( 296 ): DBDR_HUMAN
LRASIKKETKVL

SEQ ID NO: 559 - protein, 12 aa, Homo Sapiens
  ( 287 )...( 299 ): DBDR_HUMAN
SIKKETKVLKTL

SEQ ID NO: 560 - protein, 12 aa, Homo Sapiens
  ( 288 )...( 300 ): DBDR_HUMAN
IKKETKVLKTLS

SEQ ID NO: 561 - protein, 12 aa, Homo Sapiens
  ( 224 )...( 236 ): DUFF_HUMAN
PLGLFGAKGLKK

SEQ ID NO: 562 - protein, 12 aa, Homo Sapiens
  ( 225 )...( 237 ): DUFF_HUMAN
LGLFGAKGLKKA

SEQ ID NO: 563 - protein, 12 aa, Homo Sapiens
  ( 226 )...( 238 ): DUFF_HUMAN
GLFGAKGLKKAL

SEQ ID NO: 564 - protein, 12 aa, Homo Sapiens
  ( 227 )...( 239 ): DUFF_HUMAN
LFGAKGLKKALG

SEQ ID NO: 565 - protein, 12 aa, Homo Sapiens
  ( 228 )...( 240 ): DUFF_HUMAN
FGAKGLKKALGM

SEQ ID NO: 566 - protein, 12 aa, Homo Sapiens
  ( 231 )...( 243 ): DUFF_HUMAN
KGLKKALGMGPG

SEQ ID NO: 567 - protein, 12 aa, Homo Sapiens
  ( 51 )...( 63 ): EBI2_HUMAN
LALVVIVQNRKK

SEQ ID NO: 568 - protein, 12 aa, Homo Sapiens
  ( 52 )...( 64 ): EBI2_HUMAN
ALVVIVQNRKKI

SEQ ID NO: 569 - protein, 12 aa, Homo Sapiens
  ( 53 )...( 65 ): EBI2_HUMAN
LVVIVQNRKKIN

SEQ ID NO: 570 - protein, 12 aa, Homo Sapiens
  ( 132 )...( 144 ): EBI2_HUMAN
AVVHPLRYNKIK

SEQ ID NO: 571 - protein, 12 aa, Homo Sapiens
  ( 222 )...( 234 ): EBI2_HUMAN
KLFRTAKQNPLT

SEQ ID NO: 572 - protein, 12 aa, Homo Sapiens
  ( 262 )...( 274 ): EBI2_HUMAN
VAIIQHMIKKLR

SEQ ID NO: 573 - protein, 12 aa, Homo Sapiens
  ( 263 )...( 275 ): EBI2_HUMAN
AIIQHMIKKLRF

SEQ ID NO: 574 - protein, 12 aa, Homo Sapiens
  ( 264 )...( 276 ): EBI2_HUMAN
IIQHMIKKLRFS

SEQ ID NO: 575 - protein, 12 aa, Homo Sapiens
  ( 265 )...( 277 ): EBI2_HUMAN
IQHMIKKLRFSN

SEQ ID NO: 576 - protein, 12 aa, Homo Sapiens
  ( 318 )...( 330 ): EBI2_HUMAN
KVMRMLKRQVSV

SEQ ID NO: 577 - protein, 12 aa, Homo Sapiens
  ( 67 )...( 79 ): EDG1_HUMAN
LLTIWKTKKFHR

SEQ ID NO: 578 - protein, 12 aa, Homo Sapiens
  ( 68 )...( 80 ): EDG1_HUMAN
LTIWKTKKFHRP

SEQ ID NO: 579 - protein, 12 aa, Homo Sapiens
  ( 142 )...( 154 ): EDG1_HUMAN
RYITMLKMKLHN

SEQ ID NO: 580 - protein, 12 aa, Homo Sapiens
  ( 22 )...( 34 ): EDG3_HUMAN
YQYVGKLAGRLK

SEQ ID NO: 581 - protein, 12 aa, Homo Sapiens
  ( 91 )...( 103 ): EDG3_HUMAN
AYKVNILMSGKK

SEQ ID NO: 582 - protein, 12 aa, Homo Sapiens
  ( 93 )...( 105 ): EDG3_HUMAN
KVNILMSGKKTF

SEQ ID NO: 583 - protein, 12 aa, Homo Sapiens
  ( 507 )...( 519 ): EMR1_HUMAN
IKLKMNSRVVGG

SEQ ID NO: 584 - protein, 12 aa, Homo Sapiens
  ( 508 )...( 520 ): EMR1_HUMAN
KLKMNSRVVGGI

SEQ ID NO: 585 - protein, 12 aa, Homo Sapiens
  ( 320 )...( 332 ): ET1R_HUMAN
FPLHLSRILKKT

SEQ ID NO: 586 - protein, 12 aa, Homo Sapiens
  ( 321 )...( 333 ): ET1R_HUMAN
PLHLSRILKKTV

SEQ ID NO: 587 - protein, 12 aa, Homo Sapiens
  ( 322 )...( 334 ): ET1R_HUMAN
LHLSRILKKTVY

SEQ ID NO: 588 - protein, 12 aa, Homo Sapiens
  ( 323 )...( 335 ): ET1R_HUMAN
HLSRILKKTVYN

SEQ ID NO: 589 - protein, 12 aa, Homo Sapiens
  ( 366 )...( 378 ): ET1R_HUMAN
PIALYFVSKKFK

SEQ ID NO: 590 - protein, 12 aa, Homo Sapiens
  ( 367 )...( 379 ): ET1R_HUMAN
IALYFVSKKFKN

SEQ ID NO: 591 - protein, 12 aa, Homo Sapiens
  ( 119 )...( 131 ): ETBR_HUMAN
NSTLLRIIYKNK

SEQ ID NO: 592 - protein, 12 aa, Homo Sapiens
  ( 208 )...( 220 ): ETBR_HUMAN
RIKGIGVPKWTA

SEQ ID NO: 593 - protein, 12 aa, Homo Sapiens
  ( 300 )...( 312 ): ETBR_HUMAN
MLRKKSGMQIAL

SEQ ID NO: 594 - protein, 12 aa, Homo Sapiens
  ( 301 )...( 313 ): ETBR_HUMAN
LRKKSGMQIALN

SEQ ID NO: 595 - protein, 12 aa, Homo Sapiens
  ( 384 )...( 396 ): ETBR_HUMAN
IALYLVSKRFKN

SEQ ID NO: 596 - protein, 12 aa, Homo Sapiens
  ( 190 )...( 202 ): FML1_HUMAN
RLKVAITMLTAR

SEQ ID NO: 597 - protein, 12 aa, Homo Sapiens
  ( 220 )...( 232 ): FML1_HUMAN
CYGLIAAKIHKK

SEQ ID NO: 598 - protein, 12 aa, Homo Sapiens
  ( 221 )...( 233 ): FML1_HUMAN
YGLIAAKIHKKG

SEQ ID NO: 599 - protein, 12 aa, Homo Sapiens
  ( 222 )...( 234 ): FML1_HUMAN
GLIAAKIHKKGM

SEQ ID NO: 600 - protein, 12 aa, Homo Sapiens
  ( 223 )...( 235 ): FML1_HUMAN
LIAAKIHKKGMI

SEQ ID NO: 601 - protein, 12 aa, Homo Sapiens
  ( 224 )...( 236 ): FML1_HUMAN
IAAKIHKKGMIK

SEQ ID NO: 602 - protein, 12 aa, Homo Sapiens
  ( 136 )...( 148 ): FMLR_HUMAN
HRTVSLAKKVII

SEQ ID NO: 603 - protein, 12 aa, Homo Sapiens
  ( 137 )...( 149 ): FMLR_HUMAN
RTVSLAKKVIIG

SEQ ID NO: 604 - protein, 12 aa, Homo Sapiens
  ( 224 )...( 236 ): FMLR_HUMAN
IATKIHKQGLIK

SEQ ID NO: 605 - protein, 12 aa, Homo Sapiens
  ( 51 )...( 63 ): FSHR_HUMAN
LRFVLTKLRVIQ

SEQ ID NO: 606 - protein, 12 aa, Homo Sapiens
  ( 52 )...( 64 ): FSHR_HUMAN
RFVLTKLRVIQK

SEQ ID NO: 607 - protein, 12 aa, Homo Sapiens
  ( 53 )...( 65 ): FSHR_HUMAN
FVLTKLRVIQKG

SEQ ID NO: 608 - protein, 12 aa, Homo Sapiens
  ( 54 )...( 66 ): FSHR_HUMAN
VLTKLRVIQKGA

SEQ ID NO: 609 - protein, 12 aa, Homo Sapiens
  ( 55 )...( 67 ): FSHR_HUMAN
LTKLRVIQKGAF

SEQ ID NO: 610 - protein, 12 aa, Homo Sapiens
  ( 56 )...( 68 ): FSHR_HUMAN
TKLRVIQKGAFS

SEQ ID NO: 611 - protein, 12 aa, Homo Sapiens
  ( 57 )...( 69 ): FSHR_HUMAN
KLRVIQKGAFSG

SEQ ID NO: 612 - protein, 12 aa, Homo Sapiens
  ( 247 )...( 259 ): FSHR_HUMAN
RSTYNLKKLPTL

SEQ ID NO: 613 - protein, 12 aa, Homo Sapiens
  ( 597 )...( 609 ): FSHR_HUMAN
LKVPLITVSKAK

SEQ ID NO: 614 - protein, 12 aa, Homo Sapiens
  ( 598 )...( 610 ): FSHR_HUMAN
KVPLITVSKAKI

SEQ ID NO: 615 - protein, 12 aa, Homo Sapiens
  ( 363 )...( 375 ): FZ10_HUMAN
AVKTILILVMRR

SEQ ID NO: 616 - protein, 12 aa, Homo Sapiens
  ( 364 )...( 376 ): FZ10_HUMAN
VKTILILVMRRV

SEQ ID NO: 617 - protein, 12 aa, Homo Sapiens
  ( 365 )...( 377 ): FZ10_HUMAN
KTILILVMRRVA

SEQ ID NO: 618 - protein, 12 aa, Homo Sapiens
  ( 472 )...( 484 ): FZ10_HUMAN
WKILAAQHKCKM

SEQ ID NO: 619 - protein, 12 aa, Homo Sapiens
  ( 49 )...( 61 ): FZD1_HUMAN
RRLARQLLLLLW

SEQ ID NO: 620 - protein, 12 aa, Homo Sapiens
  ( 411 )...( 423 ): FZD4_HUMAN
VALFKIRSNLQK

SEQ ID NO: 621 - protein, 12 aa, Homo Sapiens
  ( 424 )...( 436 ): FZD5_HUMAN
VSLFRIRSVIKQ

SEQ ID NO: 622 - protein, 12 aa, Homo Sapiens
  ( 406 )...( 418 ): FZD6_HUMAN
NQEKLKKFMIRI

SEQ ID NO: 623 - protein, 12 aa, Homo Sapiens
  ( 407 )...( 419 ): FZD6_HUMAN
QEKLKKFMIRIG

SEQ ID NO: 624 - protein, 12 aa, Homo Sapiens
  ( 408 )...( 420 ): FZD6_HUMAN
EKLKKFMIRIGV

SEQ ID NO: 625 - protein, 12 aa, Homo Sapiens
  ( 410 )...( 422 ): FZD6_HUMAN
LKKFMIRIGVFS

SEQ ID NO: 626 - protein, 12 aa, Homo Sapiens
  ( 543 )...( 555 ): FZD6_HUMAN
HYKPSSHKLKVI

SEQ ID NO: 627 - protein, 12 aa, Homo Sapiens
  ( 544 )...( 556 ): FZD6_HUMAN
YKPSSHKLKVIS

SEQ ID NO: 628 - protein, 12 aa, Homo Sapiens
  ( 505 )...( 517 ): FZD8_HUMAN
VSLFRIRSVIKQ

SEQ ID NO: 629 - protein, 12 aa, Homo Sapiens
  ( 506 )...( 518 ): FZD8_HUMAN
SLFRIRSVIKQQ

SEQ ID NO: 630 - protein, 12 aa, Homo Sapiens
  ( 521 )...( 533 ): FZD8_HUMAN
TKTHKLEKLMIR

SEQ ID NO: 631 - protein, 12 aa, Homo Sapiens
  ( 522 )...( 534 ): FZD8_HUMAN
KTHKLEKLMIRL

SEQ ID NO: 632 - protein, 12 aa, Homo Sapiens
  ( 367 )...( 379 ): FZD9_HUMAN
ALKTIVILTLRK

SEQ ID NO: 633 - protein, 12 aa, Homo Sapiens
  ( 368 )...( 380 ): FZD9_HUMAN
LKTIVILTLRKV

SEQ ID NO: 634 - protein, 12 aa, Homo Sapiens
  ( 369 )...( 381 ): FZD9_HUMAN
KTIVILTLRKVA

SEQ ID NO: 635 - protein, 12 aa, Homo Sapiens
  ( 421 )...( 433 ): FZD9_HUMAN
FVALFHIRKIMK

SEQ ID NO: 636 - protein, 12 aa, Homo Sapiens
  ( 422 )...( 434 ): FZD9_HUMAN
VALFHIRKIMKT

SEQ ID NO: 637 - protein, 12 aa, Homo Sapiens
  ( 423 )...( 435 ): FZD9_HUMAN
ALFHIRKIMKTG

SEQ ID NO: 638 - protein, 12 aa, Homo Sapiens
  ( 54 )...( 66 ): GALR_HUMAN
VITVLARSKPGK

SEQ ID NO: 639 - protein, 12 aa, Homo Sapiens
  ( 220 )...( 232 ): GALR_HUMAN
YAKVLNHLHKKL

SEQ ID NO: 640 - protein, 12 aa, Homo Sapiens
  ( 221 )...( 233 ): GALR_HUMAN
AKVLNHLHKKLK

SEQ ID NO: 641 - protein, 12 aa, Homo Sapiens
  ( 223 )...( 235 ): GALR_HUMAN
VLNHLHKKLKNM

SEQ ID NO: 642 - protein, 12 aa, Homo Sapiens
  ( 241 )...( 253 ): GALR_HUMAN
SKKKTAQTVLVV

SEQ ID NO: 643 - protein, 12 aa, Homo Sapiens
  ( 242 )...( 254 ): GALR_HUMAN
KKKTAQTVLVVV

SEQ ID NO: 644 - protein, 12 aa, Homo Sapiens
  ( 229 )...( 241 ): GALS_HUMAN
RAKRKVTRMILI

SEQ ID NO: 645 - protein, 12 aa, Homo Sapiens
  ( 230 )...( 242 ): GALS_HUMAN
AKRKVTRMILIV

SEQ ID NO: 646 - protein, 12 aa, Homo Sapiens
  ( 231 )...( 243 ): GALS_HUMAN
KRKVTRMILIVA

SEQ ID NO: 647 - protein, 12 aa, Homo Sapiens
  ( 232 )...( 244 ): GALS_HUMAN
RKVTRMILIVAA

SEQ ID NO: 648 - protein, 12 aa, Homo Sapiens
  ( 290 )...( 302 ): GALS_HUMAN
IVYALVSKHFRK

SEQ ID NO: 649 - protein, 12 aa, Homo Sapiens
  ( 75 )...( 87 ): GASR_HUMAN
IIVVLGLSRRLR

SEQ ID NO: 650 - protein, 12 aa, Homo Sapiens
  ( 320 )...( 332 ): GASR_HUMAN
PTQAKLLAKKRV

SEQ ID NO: 651 - protein, 12 aa, Homo Sapiens
  ( 321 )...( 333 ): GASR_HUMAN
TQAKLLAKKRVV

SEQ ID NO: 652 - protein, 12 aa, Homo Sapiens
  ( 323 )...( 335 ): GASR_HUMAN
AKLLAKKRVVRM

SEQ ID NO: 653 - protein, 12 aa, Homo Sapiens
  ( 324 )...( 336 ): GASR_HUMAN
KLLAKKRVVRML

SEQ ID NO: 654 - protein, 12 aa, Homo Sapiens
  ( 325 )...( 337 ): GASR_HUMAN
LLAKKRVVRMLL

SEQ ID NO: 655 - protein, 12 aa, Homo Sapiens
  ( 326 )...( 338 ): GASR_HUMAN
LAKKRVVRMLLV

SEQ ID NO: 656 - protein, 12 aa, Homo Sapiens
  ( 327 )...( 339 ): GASR_HUMAN
AKKRVVRMLLVI

SEQ ID NO: 657 - protein, 12 aa, Homo Sapiens
  ( 328 )...( 340 ): GASR_HUMAN
KKRVVRMLLVIV

SEQ ID NO: 658 - protein, 12 aa, Homo Sapiens
  ( 329 )...( 341 ): GASR_HUMAN
KRVVRMLLVIVV

SEQ ID NO: 659 - protein, 12 aa, Homo Sapiens
  ( 579 )...( 591 ): GBR1_HUMAN
LVIKTFRFLSQK

SEQ ID NO: 660 - protein, 12 aa, Homo Sapiens
  ( 580 )...( 592 ): GBR1_HUMAN
VIKTFRFLSQKL

SEQ ID NO: 661 - protein, 12 aa, Homo Sapiens
  ( 581 )...( 593 ): GBR1_HUMAN
IKTFRFLSQKLF

SEQ ID NO: 662 - protein, 12 aa, Homo Sapiens
  ( 582 )...( 594 ): GBR1_HUMAN
KTFRFLSQKLFI

SEQ ID NO: 663 - protein, 12 aa, Homo Sapiens
  ( 849 )...( 861 ): GBR1_HUMAN
LVVLFVPKMRRL

SEQ ID NO: 664 - protein, 12 aa, Homo Sapiens
  ( 850 )...( 862 ): GBR1_HUMAN
VVLFVPKMRRLI

SEQ ID NO: 665 - protein, 12 aa, Homo Sapiens
  ( 851 )...( 863 ): GBR1_HUMAN
VLFVPKMRRLIT

SEQ ID NO: 666 - protein, 12 aa, Homo Sapiens
  ( 185 )...( 197 ): GBR2_HUMAN
AILKLLKHYQWK

SEQ ID NO: 667 - protein, 12 aa, Homo Sapiens
  ( 186 )...( 198 ): GBR2_HUMAN
ILKLLKHYQWKR

SEQ ID NO: 668 - protein, 12 aa, Homo Sapiens
  ( 187 )...( 199 ): GBR2_HUMAN
LKLLKHYQWKRV

SEQ ID NO: 669 - protein, 12 aa, Homo Sapiens
  ( 188 )...( 200 ): GBR2_HUMAN
KLLKHYQWKRVG

SEQ ID NO: 670 - protein, 12 aa, Homo Sapiens
  ( 240 )...( 252 ): GBR2_HUMAN
VKKLKGNDVRII

SEQ ID NO: 671 - protein, 12 aa, Homo Sapiens
  ( 241 )...( 253 ): GBR2_HUMAN
KKLKGNDVRIIL

SEQ ID NO: 672 - protein, 12 aa, Homo Sapiens
  ( 574 )...( 586 ): GBR2_HUMAN
KTWRVHAIFKNV

SEQ ID NO: 673 - protein, 12 aa, Homo Sapiens
  ( 575 )...( 587 ): GBR2_HUMAN
TWRVHAIFKNVK

SEQ ID NO: 674 - protein, 12 aa, Homo Sapiens
  ( 577 )...( 589 ): GBR2_HUMAN
RVHAIFKNVKMK

SEQ ID NO: 675 - protein, 12 aa, Homo Sapiens
  ( 578 )...( 590 ): GBR2_HUMAN
VHAIFKNVKMKK

SEQ ID NO: 676 - protein, 12 aa, Homo Sapiens
  ( 580 )...( 592 ): GBR2_HUMAN
AIFKNVKMKKKI

SEQ ID NO: 677 - protein, 12 aa, Homo Sapiens
  ( 581 )...( 593 ): GBR2_HUMAN
IFKNVKMKKKII

SEQ ID NO: 678 - protein, 12 aa, Homo Sapiens
  ( 582 )...( 594 ): GBR2_HUMAN
FKNVKMKKKIIK

SEQ ID NO: 679 - protein, 12 aa, Homo Sapiens
  ( 587 )...( 599 ): GBR2_HUMAN
MKKKIIKDQKLL

SEQ ID NO: 680 - protein, 12 aa, Homo Sapiens
  ( 588 )...( 600 ): GBR2_HUMAN
KKKIIKDQKLLV

SEQ ID NO: 681 - protein, 12 aa, Homo Sapiens
  ( 589 )...( 601 ): GBR2_HUMAN
KKIIKDQKLLVI

SEQ ID NO: 682 - protein, 12 aa, Homo Sapiens
  ( 147 )...( 159 ): GHSR_HUMAN
FPLRAKVVVTKG

SEQ ID NO: 683 - protein, 12 aa, Homo Sapiens
  ( 148 )...( 160 ): GHSR_HUMAN
PLRAKVVVTKGR

SEQ ID NO: 684 - protein, 12 aa, Homo Sapiens
  ( 149 )...( 161 ): GHSR_HUMAN
LRAKVVVTKGRV

SEQ ID NO: 685 - protein, 12 aa, Homo Sapiens
  ( 151 )...( 163 ): GHSR_HUMAN
AKVVVTKGRVKL

SEQ ID NO: 686 - protein, 12 aa, Homo Sapiens
  ( 152 )...( 164 ): GHSR_HUMAN
KVVVTKGRVKLV

SEQ ID NO: 687 - protein, 12 aa, Homo Sapiens
  ( 153 )...( 165 ): GHSR_HUMAN
VVVTKGRVKLVI

SEQ ID NO: 688 - protein, 12 aa, Homo Sapiens
  ( 154 )...( 166 ): GHSR_HUMAN
VVTKGRVKLVIF

SEQ ID NO: 689 - protein, 12 aa, Homo Sapiens
  ( 155 )...( 167 ): GHSR_HUMAN
VTKGRVKLVIFV

SEQ ID NO: 690 - protein, 12 aa, Homo Sapiens
  ( 156 )...( 168 ): GHSR_HUMAN
TKGRVKLVIFVI

SEQ ID NO: 691 - protein, 12 aa, Homo Sapiens
  ( 321 )...( 333 ): GHSR_HUMAN
ILYNIMSKKYRV

SEQ ID NO: 692 - protein, 12 aa, Homo Sapiens
  ( 328 )...( 340 ): GHSR_HUMAN
KKYRVAVFRLLG

SEQ ID NO: 693 - protein, 12 aa, Homo Sapiens
  ( 315 )...( 327 ): GIPR_HUMAN
IRILGILLSKLR

SEQ ID NO: 694 - protein, 12 aa, Homo Sapiens
  ( 316 )...( 328 ): GIPR_HUMAN
RILGILLSKLRT

SEQ ID NO: 695 - protein, 12 aa, Homo Sapiens
  ( 317 )...( 329 ): GIPR_HUMAN
ILGILLSKLRTR

SEQ ID NO: 696 - protein, 12 aa, Homo Sapiens
  ( 318 )...( 330 ): GIPR_HUMAN
LGILLSKLRTRQ

SEQ ID NO: 697 - protein, 12 aa, Homo Sapiens
  ( 319 )...( 331 ): GIPR_HUMAN
GILLSKLRTRQM

SEQ ID NO: 698 - protein, 12 aa, Homo Sapiens
  ( 320 )...( 332 ): GIPR_HUMAN
ILLSKLRTRQMR

SEQ ID NO: 699 - protein, 12 aa, Homo Sapiens
  ( 325 )...( 337 ): GLP1_HUMAN
VRVICIVVSKLK

SEQ ID NO: 700 - protein, 12 aa, Homo Sapiens
  ( 326 )...( 338 ): GLP1_HUMAN
RVICIVVSKLKA

SEQ ID NO: 701 - protein, 12 aa, Homo Sapiens
  ( 331 )...( 343 ): GLP1_HUMAN
VVSKLKANLMCK

SEQ ID NO: 702 - protein, 12 aa, Homo Sapiens
  ( 332 )...( 344 ): GLP1_HUMAN
VSKLKANLMCKT

SEQ ID NO: 703 - protein, 12 aa, Homo Sapiens
  ( 345 )...( 357 ): GLP1_HUMAN
IKCRLAKSTLTL

SEQ ID NO: 704 - protein, 12 aa, Homo Sapiens
  ( 346 )...( 358 ): GLP1_HUMAN
KCRLAKSTLTLI

SEQ ID NO: 705 - protein, 12 aa, Homo Sapiens
  ( 333 )...( 345 ): GLP2_HUMAN
TNGNKKIWWIIR

SEQ ID NO: 706 - protein, 12 aa, Homo Sapiens
  ( 357 )...( 369 ): GLP2_HUMAN
IFLKILKLLISK

SEQ ID NO: 707 - protein, 12 aa, Homo Sapiens
  ( 358 )...( 370 ): GLP2_HUMAN
FLKILKLLISKL

SEQ ID NO: 708 - protein, 12 aa, Homo Sapiens
  ( 359 )...( 371 ): GLP2_HUMAN
LKILKLLISKLK

SEQ ID NO: 709 - protein, 12 aa, Homo Sapiens
  ( 360 )...( 372 ): GLP2_HUMAN
KILKLLISKLKA

SEQ ID NO: 710 - protein, 12 aa, Homo Sapiens
  ( 361 )...( 373 ): GLP2_HUMAN
ILKLLISKLKAH

SEQ ID NO: 711 - protein, 12 aa, Homo Sapiens
  ( 362 )...( 374 ): GLP2_HUMAN
LKLLISKLKAHQ

SEQ ID NO: 712 - protein, 12 aa, Homo Sapiens
  ( 363 )...( 375 ): GLP2_HUMAN
KLLISKLKAHQM

SEQ ID NO: 713 - protein, 12 aa, Homo Sapiens
  ( 379 )...( 391 ): GLP2_HUMAN
YKYRLAKSTLVL

SEQ ID NO: 714 - protein, 12 aa, Homo Sapiens
  ( 380 )...( 392 ): GLP2_HUMAN
KYRLAKSTLVLI

SEQ ID NO: 715 - protein, 12 aa, Homo Sapiens
  ( 323 )...( 335 ): GLR_HUMAN
VRIVQLLVAKLR

SEQ ID NO: 716 - protein, 12 aa, Homo Sapiens
  ( 324 )...( 336 ): GLR_HUMAN
RIVQLLVAKLRA

SEQ ID NO: 717 - protein, 12 aa, Homo Sapiens
  ( 325 )...( 337 ): GLR_HUMAN
IVQLLVAKLRAR

SEQ ID NO: 718 - protein, 12 aa, Homo Sapiens
  ( 326 )...( 338 ): GLR_HUMAN
VQLLVAKLRARQ

SEQ ID NO: 719 - protein, 12 aa, Homo Sapiens
  ( 327 )...( 339 ): GLR_HUMAN
QLLVAKLRARQM

SEQ ID NO: 720 - protein, 12 aa, Homo Sapiens
  ( 328 )...( 340 ): GLR_HUMAN
LLVAKLRARQMH

SEQ ID NO: 721 - protein, 12 aa, Homo Sapiens
  ( 343 )...( 355 ): GLR_HUMAN
YKFRLAKSTLTL

SEQ ID NO: 722 - protein, 12 aa, Homo Sapiens
  ( 344 )...( 356 ): GLR_HUMAN
KFRLAKSTLTLI

SEQ ID NO: 723 - protein, 12 aa, Homo Sapiens
  ( 10 )...( 22 ): GP37_HUMAN
RMSRLLLLLLLK

SEQ ID NO: 724 - protein, 12 aa, Homo Sapiens
  ( 50 )...( 62 ): GP39_HUMAN
ATIRVTQVLQKK

SEQ ID NO: 725 - protein, 12 aa, Homo Sapiens
  ( 51 )...( 63 ): GP39_HUMAN
TIRVTQVLQKKG

SEQ ID NO: 726 - protein, 12 aa, Homo Sapiens
  ( 52 )...( 64 ): GP39_HUMAN
IRVTQVLQKKGY

SEQ ID NO: 727 - protein, 12 aa, Homo Sapiens
  ( 53 )...( 65 ): GP39_HUMAN
RVTQVLQKKGYL

SEQ ID NO: 728 - protein, 12 aa, Homo Sapiens
  ( 55 )...( 67 ): GP39_HUMAN
TQVLQKKGYLQK

SEQ ID NO: 729 - protein, 12 aa, Homo Sapiens
  ( 277 )...( 289 ): GP39_HUMAN
ARRQTIIFLRLI

SEQ ID NO: 730 - protein, 12 aa, Homo Sapiens
  ( 278 )...( 290 ): GP39_HUMAN
RRQTIIFLRLIV

SEQ ID NO: 731 - protein, 12 aa, Homo Sapiens
  ( 35 )...( 47 ): GP41_HUMAN
ALVVFVGKLQRR

SEQ ID NO: 732 - protein, 12 aa, Homo Sapiens
  ( 36 )...( 48 ): GP41_HUMAN
LVVFVGKLQRRP

SEQ ID NO: 733 - protein, 12 aa, Homo Sapiens
  ( 37 )...( 49 ): GP41_HUMAN
VVFVGKLQRRPV

SEQ ID NO: 734 - protein, 12 aa, Homo Sapiens
  ( 176 )...( 188 ): GP72_HUMAN
PLKPRISITKGV

SEQ ID NO: 735 - protein, 12 aa, Homo Sapiens
  ( 177 )...( 189 ): GP72_HUMAN
LKPRISITKGVI

SEQ ID NO: 736 - protein, 12 aa, Homo Sapiens
  ( 178 )...( 190 ): GP72_HUMAN
KPRISITKGVIY

SEQ ID NO: 737 - protein, 12 aa, Homo Sapiens
  ( 254 )...( 266 ): GP72_HUMAN
IISVAYARVAKK

SEQ ID NO: 738 - protein, 12 aa, Homo Sapiens
  ( 255 )...( 267 ): GP72_HUMAN
ISVAYARVAKKL

SEQ ID NO: 739 - protein, 12 aa, Homo Sapiens
  ( 257 )...( 269 ): GP72_HUMAN
VAYARVAKKLWL

SEQ ID NO: 740 - protein, 12 aa, Homo Sapiens
  ( 280 )...( 292 ): GP72_HUMAN
YFALRRKKKKTI

SEQ ID NO: 741 - protein, 12 aa, Homo Sapiens
  ( 285 )...( 297 ): GP72_HUMAN
RKKKKTIKMLML

SEQ ID NO: 742 - protein, 12 aa, Homo Sapiens
  ( 147 )...( 159 ): GPR1_HUMAN
RHRTLKNSLIVI

SEQ ID NO: 743 - protein, 12 aa, Homo Sapiens
  ( 229 )...( 241 ): GPR1_HUMAN
LIFKVKKRTVLI

SEQ ID NO: 744 - protein, 12 aa, Homo Sapiens
  ( 230 )...( 242 ): GPR1_HUMAN
IFKVKKRTVLIS

SEQ ID NO: 745 - protein, 12 aa, Homo Sapiens
  ( 231 )...( 243 ): GPR1_HUMAN
FKVKKRTVLISS

SEQ ID NO: 746 - protein, 12 aa, Homo Sapiens
  ( 303 )...( 315 ): GPR1_HUMAN
LYVLISKKFQAR

SEQ ID NO: 747 - protein, 12 aa, Homo Sapiens
  ( 218 )...( 230 ): GPR4_HUMAN
EKAKIKRLALSL

SEQ ID NO: 748 - protein, 12 aa, Homo Sapiens
  ( 219 )...( 231 ): GPR4_HUMAN
KAKIKRLALSLI

SEQ ID NO: 749 - protein, 12 aa, Homo Sapiens
  ( 221 )...( 233 ): GPR4_HUMAN
KIKRLALSLIAI

SEQ ID NO: 750 - protein, 12 aa, Homo Sapiens
  ( 241 )...( 253 ): GPR7_HUMAN
ALERAKKRVTFL

SEQ ID NO: 751 - protein, 12 aa, Homo Sapiens
  ( 242 )...( 254 ): GPR7_HUMAN
LERAKKRVTFLV

SEQ ID NO: 752 - protein, 12 aa, Homo Sapiens
  ( 243 )...( 255 ): GPR7_HUMAN
ERAKKRVTFLVV

SEQ ID NO: 753 - protein, 12 aa, Homo Sapiens
  ( 244 )...( 256 ): GPR7_HUMAN
RAKKRVTFLVVA

SEQ ID NO: 754 - protein, 12 aa, Homo Sapiens
  ( 245 )...( 257 ): GPR7_HUMAN
AKKRVTFLVVAI

SEQ ID NO: 755 - protein, 12 aa, Homo Sapiens
  ( 246 )...( 258 ): GPR7_HUMAN
KKRVTFLVVAIL

SEQ ID NO: 756 - protein, 12 aa, Homo Sapiens
  ( 66 )...( 78 ): GPR8_HUMAN
VILVILRAPKMK

SEQ ID NO: 757 - protein, 12 aa, Homo Sapiens
  ( 67 )...( 79 ): GPR8_HUMAN
ILVILRAPKMKT

SEQ ID NO: 758 - protein, 12 aa, Homo Sapiens
  ( 68 )...( 80 ): GPR8_HUMAN
LVILRAPKMKTV

SEQ ID NO: 759 - protein, 12 aa, Homo Sapiens
  ( 69 )...( 81 ): GPR8_HUMAN
VILRAPKMKTVT

SEQ ID NO: 760 - protein, 12 aa, Homo Sapiens
  ( 70 )...( 82 ): GPR8_HUMAN
ILRAPKMKTVTN

SEQ ID NO: 761 - protein, 12 aa, Homo Sapiens
  ( 71 )...( 83 ): GPR8_HUMAN
LRAPKMKTVTNV

SEQ ID NO: 762 - protein, 12 aa, Homo Sapiens
  ( 250 )...( 262 ): GPR8_HUMAN
ALGKARRKVTVL

SEQ ID NO: 763 - protein, 12 aa, Homo Sapiens
  ( 251 )...( 263 ): GPR8_HUMAN
LGKARRKVTVLV

SEQ ID NO: 764 - protein, 12 aa, Homo Sapiens
  ( 252 )...( 264 ): GPR8_HUMAN
GKARRKVTVLVL

SEQ ID NO: 765 - protein, 12 aa, Homo Sapiens
  ( 253 )...( 265 ): GPR8_HUMAN
KARRKVTVLVLV

SEQ ID NO: 766 - protein, 12 aa, Homo Sapiens
  ( 254 )...( 266 ): GPR8_HUMAN
ARRKVTVLVLVV

SEQ ID NO: 767 - protein, 12 aa, Homo Sapiens
  ( 255 )...( 267 ): GPR8_HUMAN
RRKVTVLVLVVL

SEQ ID NO: 768 - protein, 12 aa, Homo Sapiens
  ( 80 )...( 92 ): GPRA_HUMAN
LLVLVIARVRRL

SEQ ID NO: 769 - protein, 12 aa, Homo Sapiens
  ( 81 )...( 93 ): GPRA_HUMAN
LVLVIARVRRLH

SEQ ID NO: 770 - protein, 12 aa, Homo Sapiens
  ( 242 )...( 254 ): GPRA_HUMAN
LLSYVRVSVKLR

SEQ ID NO: 771 - protein, 12 aa, Homo Sapiens
  ( 246 )...( 258 ): GPRA_HUMAN
VRVSVKLRNRVV

SEQ ID NO: 772 - protein, 12 aa, Homo Sapiens
  ( 345 )...( 357 ): GPRA_HUMAN
ELRKLLVAWPRK

SEQ ID NO: 773 - protein, 12 aa, Homo Sapiens
  ( 346 )...( 358 ): GPRA_HUMAN
LRKLLVAWPRKI

SEQ ID NO: 774 - protein, 12 aa, Homo Sapiens
  ( 186 )...( 198 ): GPRF_HUMAN
KKATPIKLIWSL

SEQ ID NO: 775 - protein, 12 aa, Homo Sapiens
  ( 233 )...( 245 ): GPRF_HUMAN
NKKLKKSIKIIF

SEQ ID NO: 776 - protein, 12 aa, Homo Sapiens
  ( 234 )...( 246 ): GPRF_HUMAN
KKLKKSIKIIFI

SEQ ID NO: 777 - protein, 12 aa, Homo Sapiens
  ( 235 )...( 247 ): GPRF_HUMAN
KLKKSIKIIFIV

SEQ ID NO: 778 - protein, 12 aa, Homo Sapiens
  ( 236 )...( 248 ): GPRF_HUMAN
LKKSIKIIFIVV

SEQ ID NO: 779 - protein, 12 aa, Homo Sapiens
  ( 237 )...( 249 ): GPRF_HUMAN
KKSIKIIFIVVA

SEQ ID NO: 780 - protein, 12 aa, Homo Sapiens
  ( 132 )...( 144 ): GPRH_HUMAN
AIVHPVKSLKLR

SEQ ID NO: 781 - protein, 12 aa, Homo Sapiens
  ( 133 )...( 145 ): GPRH_HUMAN
IVHPVKSLKLRR

SEQ ID NO: 782 - protein, 12 aa, Homo Sapiens
  ( 213 )...( 225 ): GPRH_HUMAN
LLIIRSLRQGLR

SEQ ID NO: 783 - protein, 12 aa, Homo Sapiens
  ( 214 )...( 226 ): GPRH_HUMAN
LIIRSLRQGLRV

SEQ ID NO: 784 - protein, 12 aa, Homo Sapiens
  ( 227 )...( 239 ): GPRH_HUMAN
KRLKTKAVRMIA

SEQ ID NO: 785 - protein, 12 aa, Homo Sapiens
  ( 228 )...( 240 ): GPRH_HUMAN
RLKTKAVRMIAI

SEQ ID NO: 786 - protein, 12 aa, Homo Sapiens
  ( 229 )...( 241 ): GPRH_HUMAN
LKTKAVRMIAIV

SEQ ID NO: 787 - protein, 12 aa, Homo Sapiens
  ( 230 )...( 242 ): GPRH_HUMAN
KTKAVRMIAIVL

SEQ ID NO: 788 - protein, 12 aa, Homo Sapiens
  ( 222 )...( 234 ): GPRI_HUMAN
LKPKVKEKSIRI

SEQ ID NO: 789 - protein, 12 aa, Homo Sapiens
  ( 223 )...( 235 ): GPRI_HUMAN
KPKVKEKSIRII

SEQ ID NO: 790 - protein, 12 aa, Homo Sapiens
  ( 224 )...( 236 ): GPRI_HUMAN
PKVKEKSIRIII

SEQ ID NO: 791 - protein, 12 aa, Homo Sapiens
  ( 225 )...( 237 ): GPRI_HUMAN
KVKEKSIRIIIT

SEQ ID NO: 792 - protein, 12 aa, Homo Sapiens
  ( 263 )...( 275 ): GPRJ_HUMAN
TMNIVPRTKVKT

SEQ ID NO: 793 - protein, 12 aa, Homo Sapiens
  ( 264 )...( 276 ): GPRJ_HUMAN
MNIVPRTKVKTI

SEQ ID NO: 794 - protein, 12 aa, Homo Sapiens
  ( 265 )...( 277 ): GPRJ_HUMAN
NIVPRTKVKTIK

SEQ ID NO: 795 - protein, 12 aa, Homo Sapiens
  ( 266 )...( 278 ): GPRJ_HUMAN
IVPRTKVKTIKM

SEQ ID NO: 796 - protein, 12 aa, Homo Sapiens
  ( 267 )...( 279 ): GPRJ_HUMAN
VPRTKVKTIKMF

SEQ ID NO: 797 - protein, 12 aa, Homo Sapiens
  ( 268 )...( 280 ): GPRJ_HUMAN
PRTKVKTIKMFL

SEQ ID NO: 798 - protein, 12 aa, Homo Sapiens
  ( 269 )...( 281 ): GPRJ_HUMAN
RTKVKTIKMFLI

SEQ ID NO: 799 - protein, 12 aa, Homo Sapiens
  ( 271 )...( 283 ): GPRJ_HUMAN
KVKTIKMFLILN

SEQ ID NO: 800 - protein, 12 aa, Homo Sapiens
  ( 235 )...( 247 ): GPRK_HUMAN
RRVRAMQLLLTV

SEQ ID NO: 801 - protein, 12 aa, Homo Sapiens
  ( 288 )...( 300 ): GPRM_HUMAN
VSVIIALRRAVK

SEQ ID NO: 802 - protein, 12 aa, Homo Sapiens
  ( 290 )...( 302 ): GPRM_HUMAN
VIIALRRAVKRH

SEQ ID NO: 803 - protein, 12 aa, Homo Sapiens
  ( 308 )...( 320 ): GPRM_HUMAN
QKRVFRMSLLII

SEQ ID NO: 804 - protein, 12 aa, Homo Sapiens
  ( 365 )...( 377 ): GPRM_HUMAN
LLYAFTRQKFQK

SEQ ID NO: 805 - protein, 12 aa, Homo Sapiens
  ( 366 )...( 378 ): GPRM_HUMAN
LYAFTRQKFQKV

SEQ ID NO: 806 - protein, 12 aa, Homo Sapiens
  ( 367 )...( 379 ): GPRM_HUMAN
YAFTRQKFQKVL

SEQ ID NO: 807 - protein, 12 aa, Homo Sapiens
  ( 368 )...( 380 ): GPRM_HUMAN
AFTRQKFQKVLK

SEQ ID NO: 808 - protein, 12 aa, Homo Sapiens
  ( 369 )...( 381 ): GPRM_HUMAN
FTRQKFQKVLKS

SEQ ID NO: 809 - protein, 12 aa, Homo Sapiens
  ( 378 )...( 390 ): GPRM_HUMAN
LKSKMKKRVVSI

SEQ ID NO: 810 - protein, 12 aa, Homo Sapiens
  ( 381 )...( 393 ): GPRM_HUMAN
KMKKRVVSIVEA

SEQ ID NO: 811 - protein, 12 aa, Homo Sapiens
  ( 108 )...( 120 ): GPRO_HUMAN
STVIFAVVKKSK

SEQ ID NO: 812 - protein, 12 aa, Homo Sapiens
  ( 109 )...( 121 ): GPRO_HUMAN
TVIFAVVKKSKL

SEQ ID NO: 813 - protein, 12 aa, Homo Sapiens
  ( 110 )...( 122 ): GPRO_HUMAN
VIFAVVKKSKLH

SEQ ID NO: 814 - protein, 12 aa, Homo Sapiens
  ( 111 )...( 123 ): GPRO_HUMAN
IFAVVKKSKLHW

SEQ ID NO: 815 - protein, 12 aa, Homo Sapiens
  ( 201 )...( 213 ): GPRO_HUMAN
TKFRKPSVATLV

SEQ ID NO: 816 - protein, 12 aa, Homo Sapiens
  ( 202 )...( 214 ): GPRO_HUMAN
KFRKPSVATLVI

SEQ ID NO: 817 - protein, 12 aa, Homo Sapiens
  ( 365 )...( 377 ): GPRO_HUMAN
ETFRKRLVLSVK

SEQ ID NO: 818 - protein, 12 aa, Homo Sapiens
  ( 366 )...( 378 ): GPRO_HUMAN
TFRKRLVLSVKP

SEQ ID NO: 819 - protein, 12 aa, Homo Sapiens
  ( 369 )...( 381 ): GPRO_HUMAN
KRLVLSVKPAAQ

SEQ ID NO: 820 - protein, 12 aa, Homo Sapiens
  ( 114 )...( 126 ): GPRV_HUMAN
LRVVHPRLKVNL

SEQ ID NO: 821 - protein, 12 aa, Homo Sapiens
  ( 115 )...( 127 ): GPRV_HUMAN
RVVHPRLKVNLL

SEQ ID NO: 822 - protein, 12 aa, Homo Sapiens
  ( 276 )...( 288 ): GPRW_HUMAN
LLVHLWRRVMLK

SEQ ID NO: 823 - protein, 12 aa, Homo Sapiens
  ( 163 )...( 175 ): GPRY_HUMAN
RKAITTKQSIYV

SEQ ID NO: 824 - protein, 12 aa, Homo Sapiens
  ( 236 )...( 248 ): GPRY_HUMAN
LSYIKIGKNLLR

SEQ ID NO: 825 - protein, 12 aa, Homo Sapiens
  ( 237 )...( 249 ): GPRY_HUMAN
SYIKIGKNLLRI

SEQ ID NO: 826 - protein, 12 aa, Homo Sapiens
  ( 238 )...( 250 ): GPRY_HUMAN
YIKIGKNLLRIS

SEQ ID NO: 827 - protein, 12 aa, Homo Sapiens
  ( 239 )...( 251 ): GPRY_HUMAN
IKIGKNLLRISK

SEQ ID NO: 828 - protein, 12 aa, Homo Sapiens
  ( 253 )...( 265 ): GPRZ_HUMAN
TIRRALYITSKL

SEQ ID NO: 829 - protein, 12 aa, Homo Sapiens
  ( 299 )...( 311 ): GRFR_HUMAN
LFLNIIRILVRK

SEQ ID NO: 830 - protein, 12 aa, Homo Sapiens
  ( 300 )...( 312 ): GRFR_HUMAN
FLNIIRILVRKL

SEQ ID NO: 831 - protein, 12 aa, Homo Sapiens
  ( 55 )...( 67 ): GRHR_HUMAN
SFLLKLQKWTQK

SEQ ID NO: 832 - protein, 12 aa, Homo Sapiens
  ( 56 )...( 68 ): GRHR_HUMAN
FLLKLQKWTQKK

SEQ ID NO: 833 - protein, 12 aa, Homo Sapiens
  ( 57 )...( 69 ): GRHR_HUMAN
LLKLQKWTQKKE

SEQ ID NO: 834 - protein, 12 aa, Homo Sapiens
  ( 69 )...( 81 ): GRHR_HUMAN
KGKKLSRMKLLL

SEQ ID NO: 835 - protein, 12 aa, Homo Sapiens
  ( 70 )...( 82 ): GRHR_HUMAN
GKKLSRMKLLLK

SEQ ID NO: 836 - protein, 12 aa, Homo Sapiens
  ( 71 )...( 83 ): GRHR_HUMAN
KKLSRMKLLLKH

SEQ ID NO: 837 - protein, 12 aa, Homo Sapiens
  ( 72 )...( 84 ): GRHR_HUMAN
KLSRMKLLLKHL

SEQ ID NO: 838 - protein, 12 aa, Homo Sapiens
  ( 73 )...( 85 ): GRHR_HUMAN
LSRMKLLLKHLT

SEQ ID NO: 839 - protein, 12 aa, Homo Sapiens
  ( 74 )...( 86 ): GRHR_HUMAN
SRMKLLLKHLTL

SEQ ID NO: 840 - protein, 12 aa, Homo Sapiens
  ( 75 )...( 87 ): GRHR_HUMAN
RMKLLLKHLTLA

SEQ ID NO: 841 - protein, 12 aa, Homo Sapiens
  ( 258 )...( 270 ): GRHR_HUMAN
IPRARLKTLKMT

SEQ ID NO: 842 - protein, 12 aa, Homo Sapiens
  ( 259 )...( 271 ): GRHR_HUMAN
PRARLKTLKMTV

SEQ ID NO: 843 - protein, 12 aa, Homo Sapiens
  ( 260 )...( 272 ): GRHR_HUMAN
RARLKTLKMTVA

SEQ ID NO: 844 - protein, 12 aa, Homo Sapiens
  ( 261 )...( 273 ): GRHR_HUMAN
ARLKTLKMTVAF

SEQ ID NO: 845 - protein, 12 aa, Homo Sapiens
  ( 262 )...( 274 ): GRHR_HUMAN
RLKTLKMTVAFA

SEQ ID NO: 846 - protein, 12 aa, Homo Sapiens
  ( 258 )...( 270 ): GRPR_HUMAN
SRKRLAKTVLVF

SEQ ID NO: 847 - protein, 12 aa, Homo Sapiens
  ( 259 )...( 271 ): GRPR_HUMAN
RKRLAKTVLVFV

SEQ ID NO: 848 - protein, 12 aa, Homo Sapiens
  ( 260 )...( 272 ): GRPR_HUMAN
KRLAKTVLVFVG

SEQ ID NO: 849 - protein, 12 aa, Homo Sapiens
  ( 327 )...( 339 ): GRPR_HUMAN
KSFRKQFNTQLL

SEQ ID NO: 850 - protein, 12 aa, Homo Sapiens
  ( 129 )...( 141 ): HH1R_HUMAN
VQQPLRYLKYRT

SEQ ID NO: 851 - protein, 12 aa, Homo Sapiens
  ( 130 )...( 142 ): HH1R_HUMAN
QQPLRYLKYRTK

SEQ ID NO: 852 - protein, 12 aa, Homo Sapiens
  ( 131 )...( 143 ): HH1R_HUMAN
QPLRYLKYRTKT

SEQ ID NO: 853 - protein, 12 aa, Homo Sapiens
  ( 474 )...( 486 ): HH1R_HUMAN
NFKKTFKRILHI

SEQ ID NO: 854 - protein, 12 aa, Homo Sapiens
  ( 475 )...( 487 ): HH1R_HUMAN
FKKTFKRILHIR

SEQ ID NO: 855 - protein, 11 aa, Homo Sapiens
  ( 477 )...( 489 ): HH1R_HUMAN
KTFKRILHIRS

SEQ ID NO: 856 - protein, 12 aa, Homo Sapiens
  ( 151 )...( 163 ): HH3R_HUMAN
RAVRKMLLVWVL

SEQ ID NO: 857 - protein, 12 aa, Homo Sapiens
  ( 354 )...( 366 ): HH3R_HUMAN
RKVAKSLAVIVS

SEQ ID NO: 858 - protein, 12 aa, Homo Sapiens
  ( 422 )...( 434 ): HH3R_HUMAN
AFTKLLCPQKLK

SEQ ID NO: 859 - protein, 12 aa, Homo Sapiens
  ( 423 )...( 435 ): HH3R_HUMAN
FTKLLCPQKLKI

SEQ ID NO: 860 - protein, 12 aa, Homo Sapiens
  ( 424 )...( 436 ): HH3R_HUMAN
TKLLCPQKLKIQ

SEQ ID NO: 861 - protein, 12 aa, Homo Sapiens
  ( 425 )...( 437 ): HH3R_HUMAN
KLLCPQKLKIQP

SEQ ID NO: 862 - protein, 12 aa, Homo Sapiens
  ( 362 )...( 374 ): HH4R_HUMAN
HKRFQKAFLKIF

SEQ ID NO: 863 - protein, 12 aa, Homo Sapiens
  ( 369 )...( 381 ): HH4R_HUMAN
FLKIFCIKKQPL

SEQ ID NO: 864 - protein, 12 aa, Homo Sapiens
  ( 370 )...( 382 ): HH4R_HUMAN
LKIFCIKKQPLP

SEQ ID NO: 865 - protein, 12 aa, Homo Sapiens
  ( 155 )...( 167 ): HM74_HUMAN
TVGLTVHLLKKK

SEQ ID NO: 866 - protein, 12 aa, Homo Sapiens
  ( 156 )...( 168 ): HM74_HUMAN
VGLTVHLLKKKL

SEQ ID NO: 867 - protein, 12 aa, Homo Sapiens
  ( 157 )...( 169 ): HM74_HUMAN
GLTVHLLKKKLL

SEQ ID NO: 868 - protein, 12 aa, Homo Sapiens
  ( 158 )...( 170 ): HM74_HUMAN
LTVHLLKKKLLI

SEQ ID NO: 869 - protein, 12 aa, Homo Sapiens
  ( 159 )...( 171 ): HM74_HUMAN
TVHLLKKKLLIQ

SEQ ID NO: 870 - protein, 12 aa, Homo Sapiens
  ( 160 )...( 172 ): HM74_HUMAN
VHLLKKKLLIQN

SEQ ID NO: 871 - protein, 12 aa, Homo Sapiens
  ( 161 )...( 173 ): HM74_HUMAN
HLLKKKLLIQNG

SEQ ID NO: 872 - protein, 12 aa, Homo Sapiens
  ( 162 )...( 174 ): HM74_HUMAN
LLKKKLLIQNGP

SEQ ID NO: 873 - protein, 12 aa, Homo Sapiens
  ( 163 )...( 175 ): HM74_HUMAN
LKKKLLIQNGPA

SEQ ID NO: 874 - protein, 12 aa, Homo Sapiens
  ( 222 )...( 234 ): HM74_HUMAN
RHAKIKRAITFI

SEQ ID NO: 875 - protein, 12 aa, Homo Sapiens
  ( 223 )...( 235 ): HM74_HUMAN
HAKIKRAITFIM

SEQ ID NO: 876 - protein, 12 aa, Homo Sapiens
  ( 224 )...( 236 ): HM74_HUMAN
AKIKRAITFIMV

SEQ ID NO: 877 - protein, 12 aa, Homo Sapiens
  ( 225 )...( 237 ): HM74_HUMAN
KIKRAITFIMVV

SEQ ID NO: 878 - protein, 12 aa, Homo Sapiens
  ( 144 )...( 156 ): IL8A_HUMAN
RTLTQKRHLVKF

SEQ ID NO: 879 - protein, 12 aa, Homo Sapiens
  ( 145 )...( 157 ): IL8A_HUMAN
TLTQKRHLVKFV

SEQ ID NO: 880 - protein, 12 aa, Homo Sapiens
  ( 226 )...( 238 ): IL8A_HUMAN
LRTLFKAHMGQK

SEQ ID NO: 881 - protein, 12 aa, Homo Sapiens
  ( 151 )...( 163 ): IL8B_HUMAN
ATRTLTQKRYLV

SEQ ID NO: 882 - protein, 12 aa, Homo Sapiens
  ( 152 )...( 164 ): IL8B_HUMAN
TRTLTQKRYLVK

SEQ ID NO: 883 - protein, 12 aa, Homo Sapiens
  ( 153 )...( 165 ): IL8B_HUMAN
RTLTQKRYLVKF

SEQ ID NO: 884 - protein, 12 aa, Homo Sapiens
  ( 154 )...( 166 ): IL8B_HUMAN
TLTQKRYLVKFI

SEQ ID NO: 885 - protein, 12 aa, Homo Sapiens
  ( 235 )...( 247 ): IL8B_HUMAN
LRTLFKAHMGQK

SEQ ID NO: 886 - protein, 12 aa, Homo Sapiens
  ( 316 )...( 328 ): IL8B_HUMAN
FIGQKFRHGLLK

SEQ ID NO: 887 - protein, 12 aa, Homo Sapiens
  ( 317 )...( 329 ): IL8B_HUMAN
IGQKFRHGLLKI

SEQ ID NO: 888 - protein, 12 aa, Homo Sapiens
  ( 318 )...( 330 ): IL8B_HUMAN
GQKFRHGLLKIL

SEQ ID NO: 889 - protein, 12 aa, Homo Sapiens
  ( 319 )...( 331 ): IL8B_HUMAN
QKFRHGLLKILA

SEQ ID NO: 890 - protein, 12 aa, Homo Sapiens
  ( 320 )...( 332 ): IL8B_HUMAN
KFRHGLLKILAI

SEQ ID NO: 891 - protein, 12 aa, Homo Sapiens
  ( 207 )...( 219 ): KI01_HUMAN
TAITKKIFKSHL

SEQ ID NO: 892 - protein, 12 aa, Homo Sapiens
  ( 208 )...( 220 ): KI01_HUMAN
AITKKIFKSHLK

SEQ ID NO: 893 - protein, 12 aa, Homo Sapiens
  ( 209 )...( 221 ): KI01_HUMAN
ITKKIFKSHLKS

SEQ ID NO: 894 - protein, 12 aa, Homo Sapiens
  ( 305 )...( 317 ): KI01_HUMAN
ILCKKLHIPLKA

SEQ ID NO: 895 - protein, 12 aa, Homo Sapiens
  ( 306 )...( 318 ): KI01_HUMAN
LCKKLHIPLKAQ

SEQ ID NO: 896 - protein, 12 aa, Homo Sapiens
  ( 307 )...( 319 ): KI01_HUMAN
CKKLHIPLKAQN

SEQ ID NO: 897 - protein, 12 aa, Homo Sapiens
  ( 1 )...( 13 ): LSHR_HUMAN
MKQRFSALQLLK

SEQ ID NO: 898 - protein, 12 aa, Homo Sapiens
  ( 2 )...( 14 ): LSHR_HUMAN
KQRFSALQLLKL

SEQ ID NO: 899 - protein, 12 aa, Homo Sapiens
  ( 476 )...( 488 ): LSHR_HUMAN
QKLRLRHAILIM

SEQ ID NO: 900 - protein, 12 aa, Homo Sapiens
  ( 477 )...( 489 ): LSHR_HUMAN
KLRLRHAILIML

SEQ ID NO: 901 - protein, 12 aa, Homo Sapiens
  ( 563 )...( 575 ): LSHR_HUMAN
KDTKIAKKMAIL

SEQ ID NO: 902 - protein, 12 aa, Homo Sapiens
  ( 565 )...( 577 ): LSHR_HUMAN
TKIAKKMAILIF

SEQ ID NO: 903 - protein, 12 aa, Homo Sapiens
  ( 566 )...( 578 ): LSHR_HUMAN
KIAKKMAILIFT

SEQ ID NO: 904 - protein, 12 aa, Homo Sapiens
  ( 205 )...( 217 ): MAS_HUMAN
VSSTILVVKIRK

SEQ ID NO: 905 - protein, 12 aa, Homo Sapiens
  ( 206 )...( 218 ): MAS_HUMAN
SSTILVVKIRKN

SEQ ID NO: 906 - protein, 12 aa, Homo Sapiens
  ( 207 )...( 219 ): MAS_HUMAN
STILVVKIRKNT

SEQ ID NO: 907 - protein, 12 aa, Homo Sapiens
  ( 208 )...( 220 ): MAS_HUMAN
TILVVKIRKNTW

SEQ ID NO: 908 - protein, 12 aa, Homo Sapiens
  ( 209 )...( 221 ): MAS_HUMAN
ILVVKIRKNTWA

SEQ ID NO: 909 - protein, 12 aa, Homo Sapiens
  ( 210 )...( 222 ): MAS_HUMAN
LVVKIRKNTWAS

SEQ ID NO: 910 - protein, 12 aa, Homo Sapiens
  ( 288 )...( 300 ): MAS_HUMAN
KKRFKESLKVVL

SEQ ID NO: 911 - protein, 12 aa, Homo Sapiens
  ( 289 )...( 301 ): MAS_HUMAN
KRFKESLKVVLT

SEQ ID NO: 912 - protein, 12 aa, Homo Sapiens
  ( 290 )...( 302 ): MAS_HUMAN
RFKESLKVVLTR

SEQ ID NO: 913 - protein, 12 aa, Homo Sapiens
  ( 217 )...( 229 ): MC4R_HUMAN
LMARLHIKRIAV

SEQ ID NO: 914 - protein, 12 aa, Homo Sapiens
  ( 218 )...( 230 ): MC4R_HUMAN
MARLHIKRIAVL

SEQ ID NO: 915 - protein, 12 aa, Homo Sapiens
  ( 195 )...( 207 ): MGR1_HUMAN
KTLYKYFLRVVP

SEQ ID NO: 916 - protein, 12 aa, Homo Sapiens
  ( 527 )...( 539 ): MGR1_HUMAN
PCLKGQIKVIRK

SEQ ID NO: 917 - protein, 12 aa, Homo Sapiens
  ( 674 )...( 686 ): MGR1_HUMAN
ALVTKTNRIARI

SEQ ID NO: 918 - protein, 12 aa, Homo Sapiens
  ( 675 )...( 687 ): MGR1_HUMAN
LVTKTNRIARIL

SEQ ID NO: 919 - protein, 12 aa, Homo Sapiens
  ( 676 )...( 688 ): MGR1_HUMAN
VTKTNRIARILA

SEQ ID NO: 920 - protein, 12 aa, Homo Sapiens
  ( 682 )...( 694 ): MGR1_HUMAN
IARILAGSKKKI

SEQ ID NO: 921 - protein, 12 aa, Homo Sapiens
  ( 649 )...( 661 ): MGR2_HUMAN
ALLTKTNRIARI

SEQ ID NO: 922 - protein, 12 aa, Homo Sapiens
  ( 650 )...( 662 ): MGR2_HUMAN
LLTKTNRIARIF

SEQ ID NO: 923 - protein, 12 aa, Homo Sapiens
  ( 419 )...( 431 ): MGR3_HUMAN
AMKILDGKKLYK

SEQ ID NO: 924 - protein, 12 aa, Homo Sapiens
  ( 425 )...( 437 ): MGR3_HUMAN
GKKLYKDYLLKI

SEQ ID NO: 925 - protein, 12 aa, Homo Sapiens
  ( 426 )...( 438 ): MGR3_HUMAN
KKLYKDYLLKIN

SEQ ID NO: 926 - protein, 12 aa, Homo Sapiens
  ( 669 )...( 681 ): MGR4_HUMAN
ALLTKTNRIYRI

SEQ ID NO: 927 - protein, 12 aa, Homo Sapiens
  ( 670 )...( 682 ): MGR4_HUMAN
LLTKTNRIYRIF

SEQ ID NO: 928 - protein, 12 aa, Homo Sapiens
  ( 259 )...( 271 ): MGR5_HUMAN
KLLKKLTSHLPK

SEQ ID NO: 929 - protein, 12 aa, Homo Sapiens
  ( 260 )...( 272 ): MGR5_HUMAN
LLKKLTSHLPKA

SEQ ID NO: 930 - protein, 12 aa, Homo Sapiens
  ( 261 )...( 273 ): MGR5_HUMAN
LKKLTSHLPKAR

SEQ ID NO: 931 - protein, 12 aa, Homo Sapiens
  ( 263 )...( 275 ): MGR5_HUMAN
KLTSHLPKARVV

SEQ ID NO: 932 - protein, 12 aa, Homo Sapiens
  ( 661 )...( 673 ): MGR5_HUMAN
ALVTKTNRIARI

SEQ ID NO: 933 - protein, 12 aa, Homo Sapiens
  ( 662 )...( 674 ): MGR5_HUMAN
LVTKTNRIARIL

SEQ ID NO: 934 - protein, 12 aa, Homo Sapiens
  ( 663 )...( 675 ): MGR5_HUMAN
VTKTNRIARILA

SEQ ID NO: 935 - protein, 12 aa, Homo Sapiens
  ( 669 )...( 681 ): MGR5_HUMAN
IARILAGSKKKI

SEQ ID NO: 936 - protein, 12 aa, Homo Sapiens
  ( 929 )...( 941 ): MGR5_HUMAN
LWQRLSIHINKK

SEQ ID NO: 937 - protein, 12 aa, Homo Sapiens
  ( 667 )...( 679 ): MGR6_HUMAN
ALLTKTNRIYRI

SEQ ID NO: 938 - protein, 12 aa, Homo Sapiens
  ( 668 )...( 680 ): MGR6_HUMAN
LLTKTNRIYRIF

SEQ ID NO: 939 - protein, 12 aa, Homo Sapiens
  ( 1 )...( 13 ): MGR7_HUMAN
MVQLRKLLRVLT

SEQ ID NO: 940 - protein, 12 aa, Homo Sapiens
  ( 2 )...( 14 ): MGR7_HUMAN
VQLRKLLRVLTL

SEQ ID NO: 941 - protein, 12 aa, Homo Sapiens
  ( 3 )...( 15 ): MGR7_HUMAN
QLRKLLRVLTLM

SEQ ID NO: 942 - protein, 12 aa, Homo Sapiens
  ( 4 )...( 16 ): MGR7_HUMAN
LRKLLRVLTLMK

SEQ ID NO: 943 - protein, 12 aa, Homo Sapiens
  ( 5 )...( 17 ): MGR7_HUMAN
RKLLRVLTLMKF

SEQ ID NO: 944 - protein, 12 aa, Homo Sapiens
  ( 6 )...( 18 ): MGR7_HUMAN
KLLRVLTLMKFP

SEQ ID NO: 945 - protein, 12 aa, Homo Sapiens
  ( 442 )...( 454 ): MGR7_HUMAN
QAGGKKLLKYIR

SEQ ID NO: 946 - protein, 12 aa, Homo Sapiens
  ( 444 )...( 456 ): MGR7_HUMAN
GGKKLLKYIRNV

SEQ ID NO: 947 - protein, 12 aa, Homo Sapiens
  ( 445 )...( 457 ): MGR7_HUMAN
GKKLLKYIRNVN

SEQ ID NO: 948 - protein, 12 aa, Homo Sapiens
  ( 446 )...( 458 ): MGR7_HUMAN
KKLLKYIRNVNF

SEQ ID NO: 949 - protein, 12 aa, Homo Sapiens
  ( 672 )...( 684 ): MGR7_HUMAN
ALLTKTNRIYRI

SEQ ID NO: 950 - protein, 12 aa, Homo Sapiens
  ( 673 )...( 685 ): MGR7_HUMAN
LLTKTNRIYRIF

SEQ ID NO: 951 - protein, 12 aa, Homo Sapiens
  ( 903 )...( 915 ): MGR7_HUMAN
AKKKYVSYNNLV

SEQ ID NO: 952 - protein, 12 aa, Homo Sapiens
  ( 904 )...( 916 ): MGR7_HUMAN
KKKYVSYNNLVI

SEQ ID NO: 953 - protein, 12 aa, Homo Sapiens
  ( 665 )...( 677 ): MGR8_HUMAN
ALLTKTNRIHRI

SEQ ID NO: 954 - protein, 12 aa, Homo Sapiens
  ( 666 )...( 678 ): MGR8_HUMAN
LLTKTNRIHRIF

SEQ ID NO: 955 - protein, 12 aa, Homo Sapiens
  ( 679 )...( 691 ): MGR8_HUMAN
QGKKSVTAPKFI

SEQ ID NO: 956 - protein, 12 aa, Homo Sapiens
  ( 46 )...( 58 ): ML1A_HUMAN
LLVILSVYRNKK

SEQ ID NO: 957 - protein, 12 aa, Homo Sapiens
  ( 47 )...( 59 ): ML1A_HUMAN
LVILSVYRNKKL

SEQ ID NO: 958 - protein, 12 aa, Homo Sapiens
  ( 48 )...( 60 ): ML1A_HUMAN
VILSVYRNKKLR

SEQ ID NO: 959 - protein, 12 aa, Homo Sapiens
  ( 56 )...( 68 ): ML1A_HUMAN
KKLRNAGNIFVV

SEQ ID NO: 960 - protein, 12 aa, Homo Sapiens
  ( 209 )...( 221 ): ML1A_HUMAN
RIWILVLQVRQR

SEQ ID NO: 961 - protein, 12 aa, Homo Sapiens
  ( 211 )...( 223 ): ML1A_HUMAN
WILVLQVRQRVK

SEQ ID NO: 962 - protein, 12 aa, Homo Sapiens
  ( 212 )...( 224 ): ML1A_HUMAN
ILVLQVRQRVKP

SEQ ID NO: 963 - protein, 12 aa, Homo Sapiens
  ( 59 )...( 71 ): ML1B_HUMAN
LLVILSVLRNRK

SEQ ID NO: 964 - protein, 12 aa, Homo Sapiens
  ( 60 )...( 72 ): ML1B_HUMAN
LVILSVLRNRKL

SEQ ID NO: 965 - protein, 12 aa, Homo Sapiens
  ( 61 )...( 73 ): ML1B_HUMAN
VILSVLRNRKLR

SEQ ID NO: 966 - protein, 12 aa, Homo Sapiens
  ( 221 )...( 233 ): ML1B_HUMAN
LRIWVLVLQARR

SEQ ID NO: 967 - protein, 12 aa, Homo Sapiens
  ( 222 )...( 234 ): ML1B_HUMAN
RIWVLVLQARRK

SEQ ID NO: 968 - protein, 12 aa, Homo Sapiens
  ( 223 )...( 235 ): ML1B_HUMAN
IWVLVLQARRKA

SEQ ID NO: 969 - protein, 12 aa, Homo Sapiens
  ( 224 )...( 236 ): ML1B_HUMAN
WVLVLQARRKAK

SEQ ID NO: 970 - protein, 12 aa, Homo Sapiens
  ( 47 )...( 59 ): ML1X_HUMAN
SMVILAVTKNKK

SEQ ID NO: 971 - protein, 12 aa, Homo Sapiens
  ( 48 )...( 60 ): ML1X_HUMAN
MVILAVTKNKKL

SEQ ID NO: 972 - protein, 12 aa, Homo Sapiens
  ( 49 )...( 61 ): ML1X_HUMAN
VILAVTKNKKLR

SEQ ID NO: 973 - protein, 12 aa, Homo Sapiens
  ( 50 )...( 62 ): ML1X_HUMAN
ILAVTKNKKLRN

SEQ ID NO: 974 - protein, 12 aa, Homo Sapiens
  ( 216 )...( 228 ): MRG_HUMAN
KHVKACVIFLKL

SEQ ID NO: 975 - protein, 12 aa, Homo Sapiens
  ( 315 )...( 327 ): MRG_HUMAN
FFVGSLRKKRLK

SEQ ID NO: 976 - protein, 12 aa, Homo Sapiens
  ( 322 )...( 334 ): MRG_HUMAN
KKRLKESLRVIL

SEQ ID NO: 977 - protein, 12 aa, Homo Sapiens
  ( 323 )...( 335 ): MRG_HUMAN
KRLKESLRVILQ

SEQ ID NO: 978 - protein, 12 aa, Homo Sapiens
  ( 324 )...( 336 ): MRG_HUMAN
RLKESLRVILQR

SEQ ID NO: 979 - protein, 12 aa, Homo Sapiens
  ( 291 )...( 303 ): MTLR_HUMAN
RGHRQTVRVLLV

SEQ ID NO: 980 - protein, 12 aa, Homo Sapiens
  ( 353 )...( 365 ): MTLR_HUMAN
ILYNLISKKYRA

SEQ ID NO: 981 - protein, 12 aa, Homo Sapiens
  ( 360 )...( 372 ): MTLR_HUMAN
KKYRAAAFKLLL

SEQ ID NO: 982 - protein, 12 aa, Homo Sapiens
  ( 149 )...( 161 ): NFF1_HUMAN
FREKLTLRKALV

SEQ ID NO: 983 - protein, 12 aa, Homo Sapiens
  ( 150 )...( 162 ): NFF1_HUMAN
REKLTLRKALVT

SEQ ID NO: 984 - protein, 12 aa, Homo Sapiens
  ( 152 )...( 164 ): NFF1_HUMAN
KLTLRKALVTIA

SEQ ID NO: 985 - protein, 12 aa, Homo Sapiens
  ( 231 )...( 243 ): NFF1_HUMAN
LIVVMYARIARK

SEQ ID NO: 986 - protein, 12 aa, Homo Sapiens
  ( 232 )...( 244 ): NFF1_HUMAN
IVVMYARIARKL

SEQ ID NO: 987 - protein, 12 aa, Homo Sapiens
  ( 249 )...( 261 ): NFF2_HUMAN
VVYPFKPKLTIK

SEQ ID NO: 988 - protein, 12 aa, Homo Sapiens
  ( 250 )...( 262 ): NFF2_HUMAN
VYPFKPKLTIKT

SEQ ID NO: 989 - protein, 12 aa, Homo Sapiens
  ( 251 )...( 263 ): NFF2_HUMAN
YPFKPKLTIKTA

SEQ ID NO: 990 - protein, 12 aa, Homo Sapiens
  ( 252 )...( 264 ): NFF2_HUMAN
PFKPKLTIKTAF

SEQ ID NO: 991 - protein, 12 aa, Homo Sapiens
  ( 253 )...( 265 ): NFF2_HUMAN
FKPKLTIKTAFV

SEQ ID NO: 992 - protein, 12 aa, Homo Sapiens
  ( 254 )...( 266 ): NFF2_HUMAN
KPKLTIKTAFVI

SEQ ID NO: 993 - protein, 12 aa, Homo Sapiens
  ( 364 )...( 376 ): NFF2_HUMAN
WHVVSRKKQKII

SEQ ID NO: 994 - protein, 12 aa, Homo Sapiens
  ( 366 )...( 378 ): NFF2_HUMAN
VVSRKKQKIIKM

SEQ ID NO: 995 - protein, 12 aa, Homo Sapiens
  ( 367 )...( 379 ): NFF2_HUMAN
VSRKKQKIIKML

SEQ ID NO: 996 - protein, 12 aa, Homo Sapiens
  ( 368 )...( 380 ): NFF2_HUMAN
SRKKQKIIKMLL

SEQ ID NO: 997 - protein, 12 aa, Homo Sapiens
  ( 369 )...( 381 ): NFF2_HUMAN
RKKQKIIKMLLI

SEQ ID NO: 998 - protein, 12 aa, Homo Sapiens
  ( 370 )...( 382 ): NFF2_HUMAN
KKQKIIKMLLIV

SEQ ID NO: 999 - protein, 12 aa, Homo Sapiens
  ( 371 )...( 383 ): NFF2_HUMAN
KQKIIKMLLIVA

SEQ ID NO: 1000 - protein, 12 aa, Homo Sapiens
  ( 55 )...( 67 ): NK1R_HUMAN
WIILAHKRMRTV

SEQ ID NO: 1001 - protein, 12 aa, Homo Sapiens
  ( 56 )...( 68 ): NK1R_HUMAN
IILAHKRMRTVT

SEQ ID NO: 1002 - protein, 12 aa, Homo Sapiens
  ( 239 )...( 251 ): NK1R_HUMAN
QVSAKRKVVKMM

SEQ ID NO: 1003 - protein, 12 aa, Homo Sapiens
  ( 240 )...( 252 ): NK1R_HUMAN
VSAKRKVVKMMI

SEQ ID NO: 1004 - protein, 12 aa, Homo Sapiens
  ( 241 )...( 253 ): NK1R_HUMAN
SAKRKVVKMMIV

SEQ ID NO: 1005 - protein, 12 aa, Homo Sapiens
  ( 242 )...( 254 ): NK1R_HUMAN
AKRKVVKMMIVV

SEQ ID NO: 1006 - protein, 12 aa, Homo Sapiens
  ( 239 )...( 251 ): NK2R_HUMAN
LRHLQAKKKFVK

SEQ ID NO: 1007 - protein, 12 aa, Homo Sapiens
  ( 241 )...( 253 ): NK2R_HUMAN
HLQAKKKFVKTM

SEQ ID NO: 1008 - protein, 12 aa, Homo Sapiens
  ( 242 )...( 254 ): NK2R_HUMAN
LQAKKKFVKTMV

SEQ ID NO: 1009 - protein, 12 aa, Homo Sapiens
  ( 243 )...( 255 ): NK2R_HUMAN
QAKKKFVKTMVL

SEQ ID NO: 1010 - protein, 12 aa, Homo Sapiens
  ( 244 )...( 256 ): NK2R_HUMAN
AKKKFVKTMVLV

SEQ ID NO: 1011 - protein, 12 aa, Homo Sapiens
  ( 106 )...( 118 ): NK3R_HUMAN
VIWIILAHKRMR

SEQ ID NO: 1012 - protein, 12 aa, Homo Sapiens
  ( 107 )...( 119 ): NK3R_HUMAN
IWIILAHKRMRT

SEQ ID NO: 1013 - protein, 12 aa, Homo Sapiens
  ( 108 )...( 120 ): NK3R_HUMAN
WIILAHKRMRTV

SEQ ID NO: 1014 - protein, 12 aa, Homo Sapiens
  ( 109 )...( 121 ): NK3R_HUMAN
IILAHKRMRTVT

SEQ ID NO: 1015 - protein, 12 aa, Homo Sapiens
  ( 191 )...( 203 ): NK3R_HUMAN
LKPRLSATATKI

SEQ ID NO: 1016 - protein, 12 aa, Homo Sapiens
  ( 192 )...( 204 ): NK3R_HUMAN
KPRLSATATKIV

SEQ ID NO: 1017 - protein, 12 aa, Homo Sapiens
  ( 290 )...( 302 ): NK3R_HUMAN
QLKAKRKVVKMM

SEQ ID NO: 1018 - protein, 12 aa, Homo Sapiens
  ( 291 )...( 303 ): NK3R_HUMAN
LKAKRKVVKMMI

SEQ ID NO: 1019 - protein, 12 aa, Homo Sapiens
  ( 292 )...( 304 ): NK3R_HUMAN
KAKRKVVKMMII

SEQ ID NO: 1020 - protein, 12 aa, Homo Sapiens
  ( 293 )...( 305 ): NK3R_HUMAN
AKRKVVKMMIIV

SEQ ID NO: 1021 - protein, 12 aa, Homo Sapiens
  ( 81 )...( 93 ): NK4R_HUMAN
VIWIVLAHKRMR

SEQ ID NO: 1022 - protein, 12 aa, Homo Sapiens
  ( 82 )...( 94 ): NK4R_HUMAN
IWIVLAHKRMRT

SEQ ID NO: 1023 - protein, 12 aa, Homo Sapiens
  ( 83 )...( 95 ): NK4R_HUMAN
WIVLAHKRMRTV

SEQ ID NO: 1024 - protein, 12 aa, Homo Sapiens
  ( 84 )...( 96 ): NK4R_HUMAN
IVLAHKRMRTVT

SEQ ID NO: 1025 - protein, 12 aa, Homo Sapiens
  ( 265 )...( 277 ): NK4R_HUMAN
QLKAKRKVVKMM

SEQ ID NO: 1026 - protein, 12 aa, Homo Sapiens
  ( 266 )...( 278 ): NK4R_HUMAN
LKAKRKVVKMMI

SEQ ID NO: 1027 - protein, 12 aa, Homo Sapiens
  ( 267 )...( 279 ): NK4R_HUMAN
KAKRKVVKMMII

SEQ ID NO: 1028 - protein, 12 aa, Homo Sapiens
  ( 268 )...( 280 ): NK4R_HUMAN
AKRKVVKMMIIV

SEQ ID NO: 1029 - protein, 12 aa, Homo Sapiens
  ( 258 )...( 270 ): NMBR_HUMAN
METRKRLAKIVL

SEQ ID NO: 1030 - protein, 12 aa, Homo Sapiens
  ( 259 )...( 271 ): NMBR_HUMAN
ETRKRLAKIVLV

SEQ ID NO: 1031 - protein, 12 aa, Homo Sapiens
  ( 260 )...( 272 ): NMBR_HUMAN
TRKRLAKIVLVF

SEQ ID NO: 1032 - protein, 12 aa, Homo Sapiens
  ( 261 )...( 273 ): NMBR_HUMAN
RKRLAKIVLVFV

SEQ ID NO: 1033 - protein, 12 aa, Homo Sapiens
  ( 262 )...( 274 ): NMBR_HUMAN
KRLAKIVLVFVG

SEQ ID NO: 1034 - protein, 12 aa, Homo Sapiens
  ( 82 )...( 94 ): NTR1_HUMAN
TVTAFTLARKKS

SEQ ID NO: 1035 - protein, 12 aa, Homo Sapiens
  ( 83 )...( 95 ): NTR1_HUMAN
VTAFTLARKKSL

SEQ ID NO: 1036 - protein, 12 aa, Homo Sapiens
  ( 84 )...( 96 ): NTR1_HUMAN
TAFTLARKKSLQ

SEQ ID NO: 1037 - protein, 12 aa, Homo Sapiens
  ( 86 )...( 98 ): NTR1_HUMAN
FTLARKKSLQSL

SEQ ID NO: 1038 - protein, 12 aa, Homo Sapiens
  ( 184 )...( 196 ): NTR1_HUMAN
RTKKFISAIWLA

SEQ ID NO: 1039 - protein, 12 aa, Homo Sapiens
  ( 364 )...( 376 ): NY1R_HUMAN
LKQASPVAFKKI

SEQ ID NO: 1040 - protein, 12 aa, Homo Sapiens
  ( 71 )...( 83 ): NY2R_HUMAN
VIHVVIKFKSMR

SEQ ID NO: 1041 - protein, 12 aa, Homo Sapiens
  ( 72 )...( 84 ): NY2R_HUMAN
IHVVIKFKSMRT

SEQ ID NO: 1042 - protein, 12 aa, Homo Sapiens
  ( 75 )...( 87 ): NY2R_HUMAN
VIKFKSMRTVTN

SEQ ID NO: 1043 - protein, 12 aa, Homo Sapiens
  ( 158 )...( 170 ): NY2R_HUMAN
SKISKRISFLII

SEQ ID NO: 1044 - protein, 12 aa, Homo Sapiens
  ( 159 )...( 171 ): NY2R_HUMAN
KISKRISFLIIG

SEQ ID NO: 1045 - protein, 12 aa, Homo Sapiens
  ( 239 )...( 251 ): NY2R_HUMAN
YTRIWSKLKNHV

SEQ ID NO: 1046 - protein, 12 aa, Homo Sapiens
  ( 69 )...( 81 ): NY5R_HUMAN
NLLILMALMKKR

SEQ ID NO: 1047 - protein, 12 aa, Homo Sapiens
  ( 70 )...( 82 ): NY5R_HUMAN
LLILMALMKKRN

SEQ ID NO: 1048 - protein, 12 aa, Homo Sapiens
  ( 71 )...( 83 ): NY5R_HUMAN
LILMALMKKRNQ

SEQ ID NO: 1049 - protein, 12 aa, Homo Sapiens
  ( 72 )...( 84 ): NY5R_HUMAN
ILMALMKKRNQK

SEQ ID NO: 1050 - protein, 12 aa, Homo Sapiens
  ( 73 )...( 85 ): NY5R_HUMAN
LMALMKKRNQKT

SEQ ID NO: 1051 - protein, 12 aa, Homo Sapiens
  ( 296 )...( 308 ): O1A1_HUMAN
KAALRKLFNKRI

SEQ ID NO: 1052 - protein, 12 aa, Homo Sapiens
  ( 295 )...( 307 ): O1A2_HUMAN
MKAALQKLFSKR

SEQ ID NO: 1053 - protein, 12 aa, Homo Sapiens
  ( 296 )...( 308 ): O1A2_HUMAN
KAALQKLFSKRI

SEQ ID NO: 1054 - protein, 12 aa, Homo Sapiens
  ( 296 )...( 308 ): O1C1_HUMAN
DMKRGLQKMLLK

SEQ ID NO: 1055 - protein, 12 aa, Homo Sapiens
  ( 225 )...( 237 ): O1D2_HUMAN
ILRIPSVSKKYK

SEQ ID NO: 1056 - protein, 12 aa, Homo Sapiens
  ( 226 )...( 238 ): O1D2_HUMAN
LRIPSVSKKYKA

SEQ ID NO: 1057 - protein, 12 aa, Homo Sapiens
  ( 225 )...( 237 ): O1D4_HUMAN
ILQMPSASKKYK

SEQ ID NO: 1058 - protein, 12 aa, Homo Sapiens
  ( 225 )...( 237 ): O1D5_HUMAN
ILQMPSASKKYK

SEQ ID NO: 1059 - protein, 12 aa, Homo Sapiens
  ( 300 )...( 312 ): O1E1_HUMAN
ALSRVIHQKKTF

SEQ ID NO: 1060 - protein, 12 aa, Homo Sapiens
  ( 301 )...( 313 ): O1E1_HUMAN
LSRVIHQKKTFF

SEQ ID NO: 1061 - protein, 12 aa, Homo Sapiens
  ( 303 )...( 315 ): O1E1_HUMAN
RVIHQKKTFFSL

SEQ ID NO: 1062 - protein, 12 aa, Homo Sapiens
  ( 224 )...( 236 ): O1F1_HUMAN
TVLKVPSTKGRW

SEQ ID NO: 1063 - protein, 12 aa, Homo Sapiens
  ( 225 )...( 237 ): O1F1_HUMAN
VLKVPSTKGRWK

SEQ ID NO: 1064 - protein, 12 aa, Homo Sapiens
  ( 294 )...( 306 ): O1F1_HUMAN
NRYLKGALKKVV

SEQ ID NO: 1065 - protein, 12 aa, Homo Sapiens
  ( 295 )...( 307 ): O1F1_HUMAN
RYLKGALKKVVG

SEQ ID NO: 1066 - protein, 12 aa, Homo Sapiens
  ( 296 )...( 308 ): O1F1_HUMAN
YLKGALKKVVGR

SEQ ID NO: 1067 - protein, 12 aa, Homo Sapiens
  ( 297 )...( 309 ): O1F1_HUMAN
LKGALKKVVGRV

SEQ ID NO: 1068 - protein, 12 aa, Homo Sapiens
  ( 298 )...( 310 ): O1F1_HUMAN
KGALKKVVGRVV

SEQ ID NO: 1069 - protein, 12 aa, Homo Sapiens
  ( 299 )...( 311 ): O1F1_HUMAN
GALKKVVGRVVF

SEQ ID NO: 1070 - protein, 12 aa, Homo Sapiens
  ( 300 )...( 312 ): O1F1_HUMAN
ALKKVVGRVVFS

SEQ ID NO: 1071 - protein, 12 aa, Homo Sapiens
  ( 301 )...( 313 ): O1F1_HUMAN
LKKVVGRVVFSV

SEQ ID NO: 1072 - protein, 11 aa, Homo Sapiens
  ( 302 )...( 314 ): O1F1_HUMAN
KKVVGRVVFSV

SEQ ID NO: 1073 - protein, 12 aa, Homo Sapiens
  ( 224 )...( 236 ): O1G1_HUMAN
TILKIPSAQGKR

SEQ ID NO: 1074 - protein, 12 aa, Homo Sapiens
  ( 297 )...( 309 ): O1G1_HUMAN
IKSSLRKLIWVR

SEQ ID NO: 1075 - protein, 12 aa, Homo Sapiens
  ( 298 )...( 310 ): O1G1_HUMAN
KSSLRKLIWVRK

SEQ ID NO: 1076 - protein, 12 aa, Homo Sapiens
  ( 299 )...( 311 ): O1G1_HUMAN
SSLRKLIWVRKI

SEQ ID NO: 1077 - protein, 12 aa, Homo Sapiens
  ( 300 )...( 312 ): O1G1_HUMAN
SLRKLIWVRKIH

SEQ ID NO: 1078 - protein, 12 aa, Homo Sapiens
  ( 301 )...( 313 ): O1G1_HUMAN
LRKLIWVRKIHS

SEQ ID NO: 1079 - protein, 11 aa, Homo Sapiens
  ( 303 )...( 315 ): O1G1_HUMAN
KLIWVRKIHSP

SEQ ID NO: 1080 - protein, 12 aa, Homo Sapiens
  ( 297 )...( 309 ): O1I1_HUMAN
MKAALGKLIGKV

SEQ ID NO: 1081 - protein, 12 aa, Homo Sapiens
  ( 298 )...( 310 ): O1I1_HUMAN
KAALGKLIGKVA

SEQ ID NO: 1082 - protein, 12 aa, Homo Sapiens
  ( 298 )...( 310 ): O2B2_HUMAN
KEAFKRLVAKSL

SEQ ID NO: 1083 - protein, 12 aa, Homo Sapiens
  ( 301 )...( 313 ): O2B2_HUMAN
FKRLVAKSLLNQ

SEQ ID NO: 1084 - protein, 12 aa, Homo Sapiens
  ( 297 )...( 309 ): O2B6_HUMAN
VKEGFKRLVARV

SEQ ID NO: 1085 - protein, 12 aa, Homo Sapiens
  ( 301 )...( 313 ): O2B6_HUMAN
FKRLVARVFLIK

SEQ ID NO: 1086 - protein, 12 aa, Homo Sapiens
  ( 302 )...( 314 ): O2B6_HUMAN
KRLVARVFLIKK

SEQ ID NO: 1087 - protein, 11 aa, Homo Sapiens
  ( 303 )...( 315 ): O2B6_HUMAN
RLVARVFLIKK

SEQ ID NO: 1088 - protein, 10 aa, Homo Sapiens
  ( 304 )...( 316 ): O2B6_HUMAN
LVARVFLIKK

SEQ ID NO: 1089 - protein, 9 aa, Homo Sapiens
  ( 305 )...( 317 ): O2B6_HUMAN
VARVFLIKK

SEQ ID NO: 1090 - protein, 8 aa, Homo Sapiens
  ( 306 )...( 318 ): O2B6_HUMAN
ARVFLIKK

SEQ ID NO: 1091 - protein, 7 aa, Homo Sapiens
  ( 307 )...( 319 ): O2B6_HUMAN
RVFLIKK

SEQ ID NO: 1092 - protein, 12 aa, Homo Sapiens
  ( 79 )...( 91 ): O2D2_HUMAN
PQALVHLLSRKK

SEQ ID NO: 1093 - protein, 12 aa, Homo Sapiens
  ( 80 )...( 92 ): O2D2_HUMAN
QALVHLLSRKKV

SEQ ID NO: 1094 - protein, 12 aa, Homo Sapiens
  ( 81 )...( 93 ): O2D2_HUMAN
ALVHLLSRKKVI

SEQ ID NO: 1095 - protein, 12 aa, Homo Sapiens
  ( 82 )...( 94 ): O2D2_HUMAN
LVHLLSRKKVIA

SEQ ID NO: 1096 - protein, 12 aa, Homo Sapiens
  ( 83 )...( 95 ): O2D2_HUMAN
VHLLSRKKVIAF

SEQ ID NO: 1097 - protein, 12 aa, Homo Sapiens
  ( 84 )...( 96 ): O2D2_HUMAN
HLLSRKKVIAFT

SEQ ID NO: 1098 - protein, 12 aa, Homo Sapiens
  ( 85 )...( 97 ): O2D2_HUMAN
LLSRKKVIAFTL

SEQ ID NO: 1099 - protein, 12 aa, Homo Sapiens
  ( 219 )...( 231 ): O2D2_HUMAN
GRIIVTVVKMKS

SEQ ID NO: 1100 - protein, 12 aa, Homo Sapiens
  ( 220 )...( 232 ): O2D2_HUMAN
RIIVTVVKMKST

SEQ ID NO: 1101 - protein, 12 aa, Homo Sapiens
  ( 227 )...( 239 ): O2D2_HUMAN
KMKSTVGSLKAF

SEQ ID NO: 1102 - protein, 12 aa, Homo Sapiens
  ( 303 )...( 315 ): O2F1_HUMAN
KLLWKFSGLTSK

SEQ ID NO: 1103 - protein, 12 aa, Homo Sapiens
  ( 220 )...( 232 ): O2F2_HUMAN
RIISTILKIQSR

SEQ ID NO: 1104 - protein, 12 aa, Homo Sapiens
  ( 286 )...( 298 ): O2H1_HUMAN
LVYTLRNKEIKR

SEQ ID NO: 1105 - protein, 12 aa, Homo Sapiens
  ( 288 )...( 300 ): O2J2_HUMAN
PLIYTLRNKHVK

SEQ ID NO: 1106 - protein, 12 aa, Homo Sapiens
  ( 289 )...( 301 ): O2J2_HUMAN
LIYTLRNKHVKG

SEQ ID NO: 1107 - protein, 12 aa, Homo Sapiens
  ( 290 )...( 302 ): O2J3_HUMAN
PLIYTLRNKVVR

SEQ ID NO: 1108 - protein, 12 aa, Homo Sapiens
  ( 291 )...( 303 ): O2J3_HUMAN
LIYTLRNKVVRG

SEQ ID NO: 1109 - protein, 12 aa, Homo Sapiens
  ( 297 )...( 309 ): O2J3_HUMAN
NKVVRGAVKRLM

SEQ ID NO: 1110 - protein, 12 aa, Homo Sapiens
  ( 298 )...( 310 ): O2J3_HUMAN
KVVRGAVKRLMG

SEQ ID NO: 1111 - protein, 12 aa, Homo Sapiens
  ( 218 )...( 230 ): O2W1_HUMAN
YGYIAKAVLRTK

SEQ ID NO: 1112 - protein, 12 aa, Homo Sapiens
  ( 219 )...( 231 ): O2W1_HUMAN
GYIAKAVLRTKS

SEQ ID NO: 1113 - protein, 12 aa, Homo Sapiens
  ( 220 )...( 232 ): O2W1_HUMAN
YIAKAVLRTKSK

SEQ ID NO: 1114 - protein, 12 aa, Homo Sapiens
  ( 80 )...( 92 ): O4F3_HUMAN
KMIYDLFRKRKV

SEQ ID NO: 1115 - protein, 12 aa, Homo Sapiens
  ( 294 )...( 306 ): O4F3_HUMAN
MKAAIKRVCKQL

SEQ ID NO: 1116 - protein, 12 aa, Homo Sapiens
  ( 295 )...( 307 ): O4F3_HUMAN
KAAIKRVCKQLV

SEQ ID NO: 1117 - protein, 12 aa, Homo Sapiens
  ( 296 )...( 308 ): O4F3_HUMAN
AAIKRVCKQLVI

SEQ ID NO: 1118 - protein, 12 aa, Homo Sapiens
  ( 297 )...( 309 ): O4F3_HUMAN
AIKRVCKQLVIY

SEQ ID NO: 1119 - protein, 12 aa, Homo Sapiens
  ( 299 )...( 311 ): O4F3_HUMAN
KRVCKQLVIYKR

SEQ ID NO: 1120 - protein, 12 aa, Homo Sapiens
  ( 300 )...( 312 ): O4F3_HUMAN
RVCKQLVIYKRI

SEQ ID NO: 1121 - protein, 10 aa, Homo Sapiens
  ( 303 )...( 315 ): O4F3_HUMAN
KQLVIYKRIS

SEQ ID NO: 1122 - protein, 12 aa, Homo Sapiens
  ( 288 )...( 300 ): O5F1_HUMAN
LIYSLRSKEVKK

SEQ ID NO: 1123 - protein, 12 aa, Homo Sapiens
  ( 295 )...( 307 ): O5U1_HUMAN
MKAALRKMLSKE

SEQ ID NO: 1124 - protein, 12 aa, Homo Sapiens
  ( 79 )...( 91 ): O5V1_HUMAN
PQMMVHLLSKKK

SEQ ID NO: 1125 - protein, 12 aa, Homo Sapiens
  ( 80 )...( 92 ): O5V1_HUMAN
QMMVHLLSKKKS

SEQ ID NO: 1126 - protein, 12 aa, Homo Sapiens
  ( 81 )...( 93 ): O5V1_HUMAN
MMVHLLSKKKSI

SEQ ID NO: 1127 - protein, 12 aa, Homo Sapiens
  ( 82 )...( 94 ): O5V1_HUMAN
MVHLLSKKKSIS

SEQ ID NO: 1128 - protein, 12 aa, Homo Sapiens
  ( 83 )...( 95 ): O5V1_HUMAN
VHLLSKKKSISY

SEQ ID NO: 1129 - protein, 12 aa, Homo Sapiens
  ( 84 )...( 96 ): O5V1_HUMAN
HLLSKKKSISYV

SEQ ID NO: 1130 - protein, 12 aa, Homo Sapiens
  ( 85 )...( 97 ): O5V1_HUMAN
LLSKKKSISYVG

SEQ ID NO: 1131 - protein, 12 aa, Homo Sapiens
  ( 301 )...( 313 ): O7C2_HUMAN
LGRLLLRATSLK

SEQ ID NO: 1132 - protein, 12 aa, Homo Sapiens
  ( 78 )...( 90 ): O8B8_HUMAN
TPKMLMSFVLKK

SEQ ID NO: 1133 - protein, 12 aa, Homo Sapiens
  ( 79 )...( 91 ): O8B8_HUMAN
PKMLMSFVLKKN

SEQ ID NO: 1134 - protein, 12 aa, Homo Sapiens
  ( 80 )...( 92 ): O8B8_HUMAN
KMLMSFVLKKNS

SEQ ID NO: 1135 - protein, 12 aa, Homo Sapiens
  ( 294 )...( 306 ): O8B8_HUMAN
NKDVKVALKKIL

SEQ ID NO: 1136 - protein, 12 aa, Homo Sapiens
  ( 295 )...( 307 ): O8B8_HUMAN
KDVKVALKKILN

SEQ ID NO: 1137 - protein, 12 aa, Homo Sapiens
  ( 296 )...( 308 ): O8B8_HUMAN
DVKVALKKILNK

SEQ ID NO: 1138 - protein, 12 aa, Homo Sapiens
  ( 297 )...( 309 ): O8B8_HUMAN
VKVALKKILNKN

SEQ ID NO: 1139 - protein, 12 aa, Homo Sapiens
  ( 298 )...( 310 ): O8B8_HUMAN
KVALKKILNKNA

SEQ ID NO: 1140 - protein, 12 aa, Homo Sapiens
  ( 299 )...( 311 ): O8B8_HUMAN
VALKKILNKNAF

SEQ ID NO: 1141 - protein, 12 aa, Homo Sapiens
  ( 300 )...( 312 ): O8B8_HUMAN
ALKKILNKNAFS

SEQ ID NO: 1142 - protein, 11 aa, Homo Sapiens
  ( 301 )...( 313 ): O8B8_HUMAN
LKKILNKNAFS

SEQ ID NO: 1143 - protein, 12 aa, Homo Sapiens
  ( 295 )...( 307 ): OAA3_HUMAN
SEMKRTLIKLWR

SEQ ID NO: 1144 - protein, 12 aa, Homo Sapiens
  ( 296 )...( 308 ): OAA3_HUMAN
EMKRTLIKLWRR

SEQ ID NO: 1145 - protein, 12 aa, Homo Sapiens
  ( 297 )...( 309 ): OAA3_HUMAN
MKRTLIKLWRRK

SEQ ID NO: 1146 - protein, 12 aa, Homo Sapiens
  ( 298 )...( 310 ): OAA3_HUMAN
KRTLIKLWRRKV

SEQ ID NO: 1147 - protein, 12 aa, Homo Sapiens
  ( 299 )...( 311 ): OAA3_HUMAN
RTLIKLWRRKVI

SEQ ID NO: 1148 - protein, 12 aa, Homo Sapiens
  ( 300 )...( 312 ): OAA3_HUMAN
TLIKLWRRKVIL

SEQ ID NO: 1149 - protein, 12 aa, Homo Sapiens
  ( 301 )...( 313 ): OAA3_HUMAN
LIKLWRRKVILH

SEQ ID NO: 1150 - protein, 12 aa, Homo Sapiens
  ( 302 )...( 314 ): OAA3_HUMAN
IKLWRRKVILHT

SEQ ID NO: 1151 - protein, 12 aa, Homo Sapiens
  ( 303 )...( 315 ): OAA3_HUMAN
KLWRRKVILHTF

SEQ ID NO: 1152 - protein, 12 aa, Homo Sapiens
  ( 295 )...( 307 ): OAA4_HUMAN
NKEVKAALKRLI

SEQ ID NO: 1153 - protein, 12 aa, Homo Sapiens
  ( 296 )...( 308 ): OAA4_HUMAN
KEVKAALKRLIH

SEQ ID NO: 1154 - protein, 12 aa, Homo Sapiens
  ( 298 )...( 310 ): OAA4_HUMAN
VKAALKRLIHRT

SEQ ID NO: 1155 - protein, 12 aa, Homo Sapiens
  ( 299 )...( 311 ): OAA4_HUMAN
KAALKRLIHRTL

SEQ ID NO: 1156 - protein, 12 aa, Homo Sapiens
  ( 300 )...( 312 ): OAA4_HUMAN
AALKRLIHRTLG

SEQ ID NO: 1157 - protein, 12 aa, Homo Sapiens
  ( 302 )...( 314 ): OAA4_HUMAN
LKRLIHRTLGSQ

SEQ ID NO: 1158 - protein, 12 aa, Homo Sapiens
  ( 304 )...( 316 ): OAA4_HUMAN
RLIHRTLGSQKL

SEQ ID NO: 1159 - protein, 12 aa, Homo Sapiens
  ( 224 )...( 236 ): OAA5_HUMAN
AAILKIPSAKGK

SEQ ID NO: 1160 - protein, 12 aa, Homo Sapiens
  ( 225 )...( 237 ): OAA5_HUMAN
AILKIPSAKGKH

SEQ ID NO: 1161 - protein, 12 aa, Homo Sapiens
  ( 298 )...( 310 ): OAC1_HUMAN
AALKRTIQKTVP

SEQ ID NO: 1162 - protein, 12 aa, Homo Sapiens
  ( 299 )...( 311 ): OAC1_HUMAN
ALKRTIQKTVPM

SEQ ID NO: 1163 - protein, 12 aa, Homo Sapiens
  ( 298 )...( 310 ): OAH1_HUMAN
LKVAMKKTFFSK

SEQ ID NO: 1164 - protein, 12 aa, Homo Sapiens
  ( 299 )...( 311 ): OAH1_HUMAN
KVAMKKTFFSKL

SEQ ID NO: 1165 - protein, 12 aa, Homo Sapiens
  ( 296 )...( 308 ): OAH2_HUMAN
KELKVAMKRTFL

SEQ ID NO: 1166 - protein, 12 aa, Homo Sapiens
  ( 298 )...( 310 ): OAH2_HUMAN
LKVAMKRTFLST

SEQ ID NO: 1167 - protein, 12 aa, Homo Sapiens
  ( 299 )...( 311 ): OAH2_HUMAN
KVAMKRTFLSTL

SEQ ID NO: 1168 - protein, 12 aa, Homo Sapiens
  ( 143 )...( 155 ): OAJ1_HUMAN
YMVIMNKRLRIQ

SEQ ID NO: 1169 - protein, 12 aa, Homo Sapiens
  ( 144 )...( 156 ): OAJ1_HUMAN
MVIMNKRLRIQL

SEQ ID NO: 1170 - protein, 12 aa, Homo Sapiens
  ( 145 )...( 157 ): OAJ1_HUMAN
VIMNKRLRIQLV

SEQ ID NO: 1171 - protein, 12 aa, Homo Sapiens
  ( 146 )...( 158 ): OAJ1_HUMAN
IMNKRLRIQLVL

SEQ ID NO: 1172 - protein, 12 aa, Homo Sapiens
  ( 147 )...( 159 ): OAJ1_HUMAN
MNKRLRIQLVLG

SEQ ID NO: 1173 - protein, 12 aa, Homo Sapiens
  ( 148 )...( 160 ): OAJ1_HUMAN
NKRLRIQLVLGA

SEQ ID NO: 1174 - protein, 12 aa, Homo Sapiens
  ( 298 )...( 310 ): OBA1_HUMAN
VHQALRKILCIK

SEQ ID NO: 1175 - protein, 12 aa, Homo Sapiens
  ( 299 )...( 311 ): OBA1_HUMAN
HQALRKILCIKQ

SEQ ID NO: 1176 - protein, 12 aa, Homo Sapiens
  ( 300 )...( 312 ): OBA1_HUMAN
QALRKILCIKQT

SEQ ID NO: 1177 - protein, 12 aa, Homo Sapiens
  ( 291 )...( 303 ): OCD3_HUMAN
LRNKEVMMALKK

SEQ ID NO: 1178 - protein, 12 aa, Homo Sapiens
  ( 292 )...( 304 ): OCD3_HUMAN
RNKEVMMALKKI

SEQ ID NO: 1179 - protein, 12 aa, Homo Sapiens
  ( 296 )...( 308 ): OCD3_HUMAN
VMMALKKIFGRK

SEQ ID NO: 1180 - protein, 12 aa, Homo Sapiens
  ( 297 )...( 309 ): OCD3_HUMAN
MMALKKIFGRKL

SEQ ID NO: 1181 - protein, 12 aa, Homo Sapiens
  ( 298 )...( 310 ): OCD3_HUMAN
MALKKIFGRKLF

SEQ ID NO: 1182 - protein, 12 aa, Homo Sapiens
  ( 299 )...( 311 ): OCD3_HUMAN
ALKKIFGRKLFK

SEQ ID NO: 1183 - protein, 12 aa, Homo Sapiens
  ( 300 )...( 312 ): OCD3_HUMAN
LKKIFGRKLFKD

SEQ ID NO: 1184 - protein, 12 aa, Homo Sapiens
  ( 302 )...( 314 ): OCD3_HUMAN
KIFGRKLFKDWQ

SEQ ID NO: 1185 - protein, 12 aa, Homo Sapiens
  ( 62 )...( 74 ): OPN3_HUMAN
VLVLYYKFQRLR

SEQ ID NO: 1186 - protein, 12 aa, Homo Sapiens
  ( 63 )...( 75 ): OPN3_HUMAN
LVLYYKFQRLRT

SEQ ID NO: 1187 - protein, 12 aa, Homo Sapiens
  ( 241 )...( 253 ): OPN3_HUMAN
IQVIKILKYEKK

SEQ ID NO: 1188 - protein, 12 aa, Homo Sapiens
  ( 242 )...( 254 ): OPN3_HUMAN
QVIKILKYEKKL

SEQ ID NO: 1189 - protein, 12 aa, Homo Sapiens
  ( 243 )...( 255 ): OPN3_HUMAN
VIKILKYEKKLA

SEQ ID NO: 1190 - protein, 12 aa, Homo Sapiens
  ( 244 )...( 256 ): OPN3_HUMAN
IKILKYEKKLAK

SEQ ID NO: 1191 - protein, 12 aa, Homo Sapiens
  ( 245 )...( 257 ): OPN3_HUMAN
KILKYEKKLAKM

SEQ ID NO: 1192 - protein, 12 aa, Homo Sapiens
  ( 313 )...( 325 ): OPN3_HUMAN
IRKFRRSLLQLL

SEQ ID NO: 1193 - protein, 12 aa, Homo Sapiens
  ( 74 )...( 86 ): OPRD_HUMAN
IVRYTKMKTATN

SEQ ID NO: 1194 - protein, 12 aa, Homo Sapiens
  ( 75 )...( 87 ): OPRD_HUMAN
VRYTKMKTATNI

SEQ ID NO: 1195 - protein, 12 aa, Homo Sapiens
  ( 256 )...( 268 ): OPRD_HUMAN
LRRITRMVLVVV

SEQ ID NO: 1196 - protein, 12 aa, Homo Sapiens
  ( 257 )...( 269 ): OPRD_HUMAN
RRITRMVLVVVG

SEQ ID NO: 1197 - protein, 12 aa, Homo Sapiens
  ( 84 )...( 96 ): OPRK_HUMAN
IIRYTKMKTATN

SEQ ID NO: 1198 - protein, 12 aa, Homo Sapiens
  ( 85 )...( 97 ): OPRK_HUMAN
IRYTKMKTATNI

SEQ ID NO: 1199 - protein, 12 aa, Homo Sapiens
  ( 169 )...( 181 ): OPRK_HUMAN
FRTPLKAKIINI

SEQ ID NO: 1200 - protein, 12 aa, Homo Sapiens
  ( 246 )...( 258 ): OPRK_HUMAN
YTLMILRLKSVR

SEQ ID NO: 1201 - protein, 12 aa, Homo Sapiens
  ( 247 )...( 259 ): OPRK_HUMAN
TLMILRLKSVRL

SEQ ID NO: 1202 - protein, 12 aa, Homo Sapiens
  ( 248 )...( 260 ): OPRK_HUMAN
LMILRLKSVRLL

SEQ ID NO: 1203 - protein, 12 aa, Homo Sapiens
  ( 249 )...( 261 ): OPRK_HUMAN
MILRLKSVRLLS

SEQ ID NO: 1204 - protein, 12 aa, Homo Sapiens
  ( 250 )...( 262 ): OPRK_HUMAN
ILRLKSVRLLSG

SEQ ID NO: 1205 - protein, 12 aa, Homo Sapiens
  ( 268 )...( 280 ): OPRK_HUMAN
NLRRITRLVLVV

SEQ ID NO: 1206 - protein, 12 aa, Homo Sapiens
  ( 269 )...( 281 ): OPRK_HUMAN
LRRITRLVLVVV

SEQ ID NO: 1207 - protein, 12 aa, Homo Sapiens
  ( 270 )...( 282 ): OPRK_HUMAN
RRITRLVLVVVA

SEQ ID NO: 1208 - protein, 12 aa, Homo Sapiens
  ( 95 )...( 107 ): OPRM_HUMAN
IVRYTKMKTATN

SEQ ID NO: 1209 - protein, 12 aa, Homo Sapiens
  ( 96 )...( 108 ): OPRM_HUMAN
VRYTKMKTATNI

SEQ ID NO: 1210 - protein, 12 aa, Homo Sapiens
  ( 256 )...( 268 ): OPRM_HUMAN
LMILRLKSVRML

SEQ ID NO: 1211 - protein, 12 aa, Homo Sapiens
  ( 277 )...( 289 ): OPRM_HUMAN
LRRITRMVLVVV

SEQ ID NO: 1212 - protein, 12 aa, Homo Sapiens
  ( 278 )...( 290 ): OPRM_HUMAN
RRITRMVLVVVA

SEQ ID NO: 1213 - protein, 12 aa, Homo Sapiens
  ( 74 )...( 86 ): OPRX_HUMAN
YVILRHTKMKTA

SEQ ID NO: 1214 - protein, 12 aa, Homo Sapiens
  ( 75 )...( 87 ): OPRX_HUMAN
VILRHTKMKTAT

SEQ ID NO: 1215 - protein, 12 aa, Homo Sapiens
  ( 257 )...( 269 ): OPRX_HUMAN
NLRRITRLVLVV

SEQ ID NO: 1216 - protein, 12 aa, Homo Sapiens
  ( 258 )...( 270 ): OPRX_HUMAN
LRRITRLVLVVV

SEQ ID NO: 1217 - protein, 12 aa, Homo Sapiens
  ( 259 )...( 271 ): OPRX_HUMAN
RRITRLVLVVVA

SEQ ID NO: 1218 - protein, 12 aa, Homo Sapiens
  ( 53 )...( 65 ): OPSB_HUMAN
AMVLVATLRYKK

SEQ ID NO: 1219 - protein, 12 aa, Homo Sapiens
  ( 54 )...( 66 ): OPSB_HUMAN
MVLVATLRYKKL

SEQ ID NO: 1220 - protein, 12 aa, Homo Sapiens
  ( 55 )...( 67 ): OPSB_HUMAN
VLVATLRYKKLR

SEQ ID NO: 1221 - protein, 12 aa, Homo Sapiens
  ( 56 )...( 68 ): OPSB_HUMAN
LVATLRYKKLRQ

SEQ ID NO: 1222 - protein, 12 aa, Homo Sapiens
  ( 57 )...( 69 ): OPSB_HUMAN
VATLRYKKLRQP

SEQ ID NO: 1223 - protein, 12 aa, Homo Sapiens
  ( 58 )...( 70 ): OPSB_HUMAN
ATLRYKKLRQPL

SEQ ID NO: 1224 - protein, 12 aa, Homo Sapiens
  ( 59 )...( 71 ): OPSB_HUMAN
TLRYKKLRQPLN

SEQ ID NO: 1225 - protein, 12 aa, Homo Sapiens
  ( 62 )...( 74 ): OPSB_HUMAN
YKKLRQPLNYIL

SEQ ID NO: 1226 - protein, 12 aa, Homo Sapiens
  ( 63 )...( 75 ): OPSB_HUMAN
KKLRQPLNYILV

SEQ ID NO: 1227 - protein, 12 aa, Homo Sapiens
  ( 58 )...( 70 ): OPSD_HUMAN
TLYVTVQHKKLR

SEQ ID NO: 1228 - protein, 12 aa, Homo Sapiens
  ( 59 )...( 71 ): OPSD_HUMAN
LYVTVQHKKLRT

SEQ ID NO: 1229 - protein, 12 aa, Homo Sapiens
  ( 60 )...( 72 ): OPSD_HUMAN
YVTVQHKKLRTP

SEQ ID NO: 1230 - protein, 12 aa, Homo Sapiens
  ( 61 )...( 73 ): OPSD_HUMAN
VTVQHKKLRTPL

SEQ ID NO: 1231 - protein, 12 aa, Homo Sapiens
  ( 63 )...( 75 ): OPSD_HUMAN
VQHKKLRTPLNY

SEQ ID NO: 1232 - protein, 12 aa, Homo Sapiens
  ( 64 )...( 76 ): OPSD_HUMAN
QHKKLRTPLNYI

SEQ ID NO: 1233 - protein, 12 aa, Homo Sapiens
  ( 65 )...( 77 ): OPSD_HUMAN
HKKLRTPLNYIL

SEQ ID NO: 1234 - protein, 12 aa, Homo Sapiens
  ( 66 )...( 78 ): OPSD_HUMAN
KKLRTPLNYILL

SEQ ID NO: 1235 - protein, 12 aa, Homo Sapiens
  ( 72 )...( 84 ): OPSG_HUMAN
GLVLAATMKFKK

SEQ ID NO: 1236 - protein, 12 aa, Homo Sapiens
  ( 73 )...( 85 ): OPSG_HUMAN
LVLAATMKFKKL

SEQ ID NO: 1237 - protein, 12 aa, Homo Sapiens
  ( 74 )...( 86 ): OPSG_HUMAN
VLAATMKFKKLR

SEQ ID NO: 1238 - protein, 12 aa, Homo Sapiens
  ( 75 )...( 87 ): OPSG_HUMAN
LAATMKFKKLRH

SEQ ID NO: 1239 - protein, 12 aa, Homo Sapiens
  ( 77 )...( 89 ): OPSG_HUMAN
ATMKFKKLRHPL

SEQ ID NO: 1240 - protein, 12 aa, Homo Sapiens
  ( 80 )...( 92 ): OPSG_HUMAN
KFKKLRHPLNWI

SEQ ID NO: 1241 - protein, 12 aa, Homo Sapiens
  ( 82 )...( 94 ): OPSG_HUMAN
KKLRHPLNWILV

SEQ ID NO: 1242 - protein, 12 aa, Homo Sapiens
  ( 243 )...( 255 ): OPSG_HUMAN
WLAIRAVAKQQK

SEQ ID NO: 1243 - protein, 12 aa, Homo Sapiens
  ( 72 )...( 84 ): OPSR_HUMAN
GLVLAATMKFKK

SEQ ID NO: 1244 - protein, 12 aa, Homo Sapiens
  ( 73 )...( 85 ): OPSR_HUMAN
LVLAATMKFKKL

SEQ ID NO: 1245 - protein, 12 aa, Homo Sapiens
  ( 74 )...( 86 ): OPSR_HUMAN
VLAATMKFKKLR

SEQ ID NO: 1246 - protein, 12 aa, Homo Sapiens
  ( 75 )...( 87 ): OPSR_HUMAN
LAATMKFKKLRH

SEQ ID NO: 1247 - protein, 12 aa, Homo Sapiens
  ( 77 )...( 89 ): OPSR_HUMAN
ATMKFKKLRHPL

SEQ ID NO: 1248 - protein, 12 aa, Homo Sapiens
  ( 80 )...( 92 ): OPSR_HUMAN
KFKKLRHPLNWI

SEQ ID NO: 1249 - protein, 12 aa, Homo Sapiens
  ( 82 )...( 94 ): OPSR_HUMAN
KKLRHPLNWILV

SEQ ID NO: 1250 - protein, 12 aa, Homo Sapiens
  ( 243 )...( 255 ): OPSR_HUMAN
WLAIRAVAKQQK

SEQ ID NO: 1251 - protein, 12 aa, Homo Sapiens
  ( 292 )...( 304 ): OX1R_HUMAN
ARRKTAKMLMVV

SEQ ID NO: 1252 - protein, 12 aa, Homo Sapiens
  ( 293 )...( 305 ): OX1R_HUMAN
RRKTAKMLMVVL

SEQ ID NO: 1253 - protein, 12 aa, Homo Sapiens
  ( 294 )...( 306 ): OX1R_HUMAN
RKTAKMLMVVLL

SEQ ID NO: 1254 - protein, 12 aa, Homo Sapiens
  ( 258 )...( 270 ): OX2R_HUMAN
TSSVVQRKWKPL

SEQ ID NO: 1255 - protein, 12 aa, Homo Sapiens
  ( 259 )...( 271 ): OX2R_HUMAN
SSVVQRKWKPLQ

SEQ ID NO: 1256 - protein, 12 aa, Homo Sapiens
  ( 260 )...( 272 ): OX2R_HUMAN
SVVQRKWKPLQP

SEQ ID NO: 1257 - protein, 12 aa, Homo Sapiens
  ( 261 )...( 273 ): OX2R_HUMAN
VVQRKWKPLQPV

SEQ ID NO: 1258 - protein, 12 aa, Homo Sapiens
  ( 262 )...( 274 ): OX2R_HUMAN
VQRKWKPLQPVS

SEQ ID NO: 1259 - protein, 12 aa, Homo Sapiens
  ( 300 )...( 312 ): OX2R_HUMAN
RKTARMLMVVLL

SEQ ID NO: 1260 - protein, 12 aa, Homo Sapiens
  ( 292 )...( 304 ): OXB2_HUMAN
IKTKQIQYGIIR

SEQ ID NO: 1261 - protein, 12 aa, Homo Sapiens
  ( 293 )...( 305 ): OXB2_HUMAN
KTKQIQYGIIRL

SEQ ID NO: 1262 - protein, 12 aa, Homo Sapiens
  ( 298 )...( 310 ): OXB2_HUMAN
QYGIIRLLSKHR

SEQ ID NO: 1263 - protein, 12 aa, Homo Sapiens
  ( 287 )...( 299 ): OXB4_HUMAN
IIYSIKTKQIQR

SEQ ID NO: 1264 - protein, 12 aa, Homo Sapiens
  ( 290 )...( 302 ): OXB4_HUMAN
SIKTKQIQRSII

SEQ ID NO: 1265 - protein, 12 aa, Homo Sapiens
  ( 291 )...( 303 ): OXB4_HUMAN
IKTKQIQRSIIR

SEQ ID NO: 1266 - protein, 12 aa, Homo Sapiens
  ( 292 )...( 304 ): OXB4_HUMAN
KTKQIQRSIIRL

SEQ ID NO: 1267 - protein, 12 aa, Homo Sapiens
  ( 293 )...( 305 ): OXB4_HUMAN
TKQIQRSIIRLF

SEQ ID NO: 1268 - protein, 12 aa, Homo Sapiens
  ( 294 )...( 306 ): OXB4_HUMAN
KQIQRSIIRLFS

SEQ ID NO: 1269 - protein, 12 aa, Homo Sapiens
  ( 288 )...( 300 ): OXE2_HUMAN
PIIYGAKTKQIR

SEQ ID NO: 1270 - protein, 12 aa, Homo Sapiens
  ( 289 )...( 301 ): OXE2_HUMAN
IIYGAKTKQIRT

SEQ ID NO: 1271 - protein, 12 aa, Homo Sapiens
  ( 294 )...( 306 ): OXE2_HUMAN
KTKQIRTRVLAM

SEQ ID NO: 1272 - protein, 12 aa, Homo Sapiens
  ( 295 )...( 307 ): OXE2_HUMAN
TKQIRTRVLAMF

SEQ ID NO: 1273 - protein, 12 aa, Homo Sapiens
  ( 296 )...( 308 ): OXE2_HUMAN
KQIRTRVLAMFK

SEQ ID NO: 1274 - protein, 12 aa, Homo Sapiens
  ( 297 )...( 309 ): OXE2_HUMAN
QIRTRVLAMFKI

SEQ ID NO: 1275 - protein, 12 aa, Homo Sapiens
  ( 292 )...( 304 ): OXI1_HUMAN
IIYSVKTKEIRK

SEQ ID NO: 1276 - protein, 12 aa, Homo Sapiens
  ( 297 )...( 309 ): OXI1_HUMAN
KTKEIRKGILKF

SEQ ID NO: 1277 - protein, 12 aa, Homo Sapiens
  ( 298 )...( 310 ): OXI1_HUMAN
TKEIRKGILKFF

SEQ ID NO: 1278 - protein, 12 aa, Homo Sapiens
  ( 299 )...( 311 ): OXI1_HUMAN
KEIRKGILKFFH

SEQ ID NO: 1279 - protein, 12 aa, Homo Sapiens
  ( 300 )...( 312 ): OXI1_HUMAN
EIRKGILKFFHK

SEQ ID NO: 1280 - protein, 12 aa, Homo Sapiens
  ( 301 )...( 313 ): OXI1_HUMAN
IRKGILKFFHKS

SEQ ID NO: 1281 - protein, 12 aa, Homo Sapiens
  ( 302 )...( 314 ): OXI1_HUMAN
RKGILKFFHKSQ

SEQ ID NO: 1282 - protein, 12 aa, Homo Sapiens
  ( 303 )...( 315 ): OXI1_HUMAN
KGILKFFHKSQA

SEQ ID NO: 1283 - protein, 12 aa, Homo Sapiens
  ( 60 )...( 72 ): OXYR_HUMAN
VLLALRTTRQKH

SEQ ID NO: 1284 - protein, 12 aa, Homo Sapiens
  ( 223 )...( 235 ): OXYR_HUMAN
ISFKIWQNLRLK

SEQ ID NO: 1285 - protein, 12 aa, Homo Sapiens
  ( 224 )...( 236 ): OXYR_HUMAN
SFKIWQNLRLKT

SEQ ID NO: 1286 - protein, 12 aa, Homo Sapiens
  ( 225 )...( 237 ): OXYR_HUMAN
FKIWQNLRLKTA

SEQ ID NO: 1287 - protein, 12 aa, Homo Sapiens
  ( 226 )...( 238 ): OXYR_HUMAN
KIWQNLRLKTAA

SEQ ID NO: 1288 - protein, 12 aa, Homo Sapiens
  ( 257 )...( 269 ): OXYR_HUMAN
LARVSSVKLISK

SEQ ID NO: 1289 - protein, 12 aa, Homo Sapiens
  ( 260 )...( 272 ): OXYR_HUMAN
VSSVKLISKAKI

SEQ ID NO: 1290 - protein, 12 aa, Homo Sapiens
  ( 262 )...( 274 ): OXYR_HUMAN
SVKLISKAKIRT

SEQ ID NO: 1291 - protein, 12 aa, Homo Sapiens
  ( 263 )...( 275 ): OXYR_HUMAN
VKLISKAKIRTV

SEQ ID NO: 1292 - protein, 12 aa, Homo Sapiens
  ( 264 )...( 276 ): OXYR_HUMAN
KLISKAKIRTVK

SEQ ID NO: 1293 - protein, 12 aa, Homo Sapiens
  ( 265 )...( 277 ): OXYR_HUMAN
LISKAKIRTVKM

SEQ ID NO: 1294 - protein, 12 aa, Homo Sapiens
  ( 266 )...( 278 ): OXYR_HUMAN
ISKAKIRTVKMT

SEQ ID NO: 1295 - protein, 12 aa, Homo Sapiens
  ( 267 )...( 279 ): OXYR_HUMAN
SKAKIRTVKMTF

SEQ ID NO: 1296 - protein, 12 aa, Homo Sapiens
  ( 268 )...( 280 ): OXYR_HUMAN
KAKIRTVKMTFI

SEQ ID NO: 1297 - protein, 12 aa, Homo Sapiens
  ( 269 )...( 281 ): OXYR_HUMAN
AKIRTVKMTFII

SEQ ID NO: 1298 - protein, 12 aa, Homo Sapiens
  ( 297 )...( 309 ): OYA1_HUMAN
AKTTQIRIHVVK

SEQ ID NO: 1299 - protein, 12 aa, Homo Sapiens
  ( 298 )...( 310 ): OYA1_HUMAN
KTTQIRIHVVKM

SEQ ID NO: 1300 - protein, 12 aa, Homo Sapiens
  ( 300 )...( 312 ): OYD1_HUMAN
TKEIRSRLLKLL

SEQ ID NO: 1301 - protein, 12 aa, Homo Sapiens
  ( 301 )...( 313 ): OYD1_HUMAN
KEIRSRLLKLLH

SEQ ID NO: 1302 - protein, 12 aa, Homo Sapiens
  ( 303 )...( 315 ): OYD1_HUMAN
IRSRLLKLLHLG

SEQ ID NO: 1303 - protein, 12 aa, Homo Sapiens
  ( 304 )...( 316 ): OYD1_HUMAN
RSRLLKLLHLGK

SEQ ID NO: 1304 - protein, 12 aa, Homo Sapiens
  ( 305 )...( 317 ): OYD1_HUMAN
SRLLKLLHLGKT

SEQ ID NO: 1305 - protein, 12 aa, Homo Sapiens
  ( 306 )...( 318 ): OYD1_HUMAN
RLLKLLHLGKTS

SEQ ID NO: 1306 - protein, 12 aa, Homo Sapiens
  ( 240 )...( 252 ): P2UR_HUMAN
KRKSVRTIAVVL

SEQ ID NO: 1307 - protein, 12 aa, Homo Sapiens
  ( 241 )...( 253 ): P2UR_HUMAN
RKSVRTIAVVLA

SEQ ID NO: 1308 - protein, 12 aa, Homo Sapiens
  ( 118 )...( 130 ): P2Y5_HUMAN
IVYPFKSKTLRT

SEQ ID NO: 1309 - protein, 12 aa, Homo Sapiens
  ( 119 )...( 131 ): P2Y5_HUMAN
VYPFKSKTLRTK

SEQ ID NO: 1310 - protein, 12 aa, Homo Sapiens
  ( 208 )...( 220 ): P2Y5_HUMAN
LKTLTKPVTLSR

SEQ ID NO: 1311 - protein, 12 aa, Homo Sapiens
  ( 209 )...( 221 ): P2Y5_HUMAN
KTLTKPVTLSRS

SEQ ID NO: 1312 - protein, 12 aa, Homo Sapiens
  ( 210 )...( 222 ): P2Y5_HUMAN
TLTKPVTLSRSK

SEQ ID NO: 1313 - protein, 12 aa, Homo Sapiens
  ( 211 )...( 223 ): P2Y5_HUMAN
LTKPVTLSRSKI

SEQ ID NO: 1314 - protein, 12 aa, Homo Sapiens
  ( 220 )...( 232 ): P2Y5_HUMAN
SKINKTKVLKMI

SEQ ID NO: 1315 - protein, 12 aa, Homo Sapiens
  ( 221 )...( 233 ): P2Y5_HUMAN
KINKTKVLKMIF

SEQ ID NO: 1316 - protein, 12 aa, Homo Sapiens
  ( 222 )...( 234 ): P2Y5_HUMAN
INKTKVLKMIFV

SEQ ID NO: 1317 - protein, 12 aa, Homo Sapiens
  ( 223 )...( 235 ): P2Y5_HUMAN
NKTKVLKMIFVH

SEQ ID NO: 1318 - protein, 12 aa, Homo Sapiens
  ( 315 )...( 327 ): P2Y6_HUMAN
LLQKLTAKWQRQ

SEQ ID NO: 1319 - protein, 12 aa, Homo Sapiens
  ( 39 )...( 51 ): P2Y7_HUMAN
VVWSILKRMQKR

SEQ ID NO: 1320 - protein, 12 aa, Homo Sapiens
  ( 216 )...( 228 ): P2Y7_HUMAN
SRRTGRLVVLII

SEQ ID NO: 1321 - protein, 12 aa, Homo Sapiens
  ( 217 )...( 229 ): P2Y7_HUMAN
RRTGRLVVLIIL

SEQ ID NO: 1322 - protein, 12 aa, Homo Sapiens
  ( 193 )...( 205 ): P2Y9_HUMAN
SKRVWKTYLSKI

SEQ ID NO: 1323 - protein, 12 aa, Homo Sapiens
  ( 226 )...( 238 ): P2Y9_HUMAN
VVLRTLRKPATL

SEQ ID NO: 1324 - protein, 12 aa, Homo Sapiens
  ( 237 )...( 249 ): P2Y9_HUMAN
LSQIGTNKKKVL

SEQ ID NO: 1325 - protein, 12 aa, Homo Sapiens
  ( 240 )...( 252 ): P2Y9_HUMAN
IGTNKKKVLKMI

SEQ ID NO: 1326 - protein, 12 aa, Homo Sapiens
  ( 241 )...( 253 ): P2Y9_HUMAN
GTNKKKVLKMIT

SEQ ID NO: 1327 - protein, 12 aa, Homo Sapiens
  ( 242 )...( 254 ): P2Y9_HUMAN
TNKKKVLKMITV

SEQ ID NO: 1328 - protein, 12 aa, Homo Sapiens
  ( 243 )...( 255 ): P2Y9_HUMAN
NKKKVLKMITVH

SEQ ID NO: 1329 - protein, 12 aa, Homo Sapiens
  ( 245 )...( 257 ): P2Y9_HUMAN
KKVLKMITVHMA

SEQ ID NO: 1330 - protein, 12 aa, Homo Sapiens
  ( 153 )...( 165 ): P2YR_HUMAN
VVYPLKSLGRLK

SEQ ID NO: 1331 - protein, 12 aa, Homo Sapiens
  ( 154 )...( 166 ): P2YR_HUMAN
VYPLKSLGRLKK

SEQ ID NO: 1332 - protein, 12 aa, Homo Sapiens
  ( 155 )...( 167 ): P2YR_HUMAN
YPLKSLGRLKKK

SEQ ID NO: 1333 - protein, 12 aa, Homo Sapiens
  ( 160 )...( 172 ): P2YR_HUMAN
LGRLKKKNAICI

SEQ ID NO: 1334 - protein, 12 aa, Homo Sapiens
  ( 162 )...( 174 ): P2YR_HUMAN
RLKKKNAICISV

SEQ ID NO: 1335 - protein, 12 aa, Homo Sapiens
  ( 163 )...( 175 ): P2YR_HUMAN
LKKKNAICISVL

SEQ ID NO: 1336 - protein, 12 aa, Homo Sapiens
  ( 164 )...( 176 ): P2YR_HUMAN
KKKNAICISVLV

SEQ ID NO: 1337 - protein, 12 aa, Homo Sapiens
  ( 253 )...( 265 ): P2YR_HUMAN
PLRRKSIYLVII

SEQ ID NO: 1338 - protein, 12 aa, Homo Sapiens
  ( 254 )...( 266 ): P2YR_HUMAN
LRRKSIYLVIIV

SEQ ID NO: 1339 - protein, 12 aa, Homo Sapiens
  ( 255 )...( 267 ): P2YR_HUMAN
RRKSIYLVIIVL

SEQ ID NO: 1340 - protein, 12 aa, Homo Sapiens
  ( 130 )...( 142 ): PAFR_HUMAN
TRKRGISLSLVI

SEQ ID NO: 1341 - protein, 12 aa, Homo Sapiens
  ( 295 )...( 307 ): PAFR_HUMAN
FLTKKFRKHLTE

SEQ ID NO: 1342 - protein, 12 aa, Homo Sapiens
  ( 123 )...( 135 ): PAR1_HUMAN
AIVVFILKMKVK

SEQ ID NO: 1343 - protein, 12 aa, Homo Sapiens
  ( 125 )...( 137 ): PAR1_HUMAN
VVFILKMKVKKP

SEQ ID NO: 1344 - protein, 12 aa, Homo Sapiens
  ( 126 )...( 138 ): PAR1_HUMAN
VFILKMKVKKPA

SEQ ID NO: 1345 - protein, 12 aa, Homo Sapiens
  ( 127 )...( 139 ): PAR1_HUMAN
FILKMKVKKPAV

SEQ ID NO: 1346 - protein, 12 aa, Homo Sapiens
  ( 128 )...( 140 ): PAR1_HUMAN
ILKMKVKKPAVV

SEQ ID NO: 1347 - protein, 12 aa, Homo Sapiens
  ( 129 )...( 141 ): PAR1_HUMAN
LKMKVKKPAVVY

SEQ ID NO: 1348 - protein, 12 aa, Homo Sapiens
  ( 130 )...( 142 ): PAR1_HUMAN
KMKVKKPAVVYM

SEQ ID NO: 1349 - protein, 12 aa, Homo Sapiens
  ( 131 )...( 143 ): PAR1_HUMAN
MKVKKPAVVYML

SEQ ID NO: 1350 - protein, 12 aa, Homo Sapiens
  ( 132 )...( 144 ): PAR1_HUMAN
KVKKPAVVYMLH

SEQ ID NO: 1351 - protein, 12 aa, Homo Sapiens
  ( 101 )...( 113 ): PAR2_HUMAN
LFRTKKKHPAVI

SEQ ID NO: 1352 - protein, 12 aa, Homo Sapiens
  ( 102 )...( 114 ): PAR2_HUMAN
FRTKKKHPAVIY

SEQ ID NO: 1353 - protein, 12 aa, Homo Sapiens
  ( 103 )...( 115 ): PAR2_HUMAN
RTKKKHPAVIYM

SEQ ID NO: 1354 - protein, 12 aa, Homo Sapiens
  ( 104 )...( 116 ): PAR2_HUMAN
TKKKHPAVIYMA

SEQ ID NO: 1355 - protein, 12 aa, Homo Sapiens
  ( 185 )...( 197 ): PAR2_HUMAN
RKKANIAIGISL

SEQ ID NO: 1356 - protein, 12 aa, Homo Sapiens
  ( 281 )...( 293 ): PAR2_HUMAN
KRKRAIKLIVTV

SEQ ID NO: 1357 - protein, 12 aa, Homo Sapiens
  ( 282 )...( 294 ): PAR2_HUMAN
RKRAIKLIVTVL

SEQ ID NO: 1358 - protein, 12 aa, Homo Sapiens
  ( 283 )...( 295 ): PAR2_HUMAN
KRAIKLIVTVLA

SEQ ID NO: 1359 - protein, 12 aa, Homo Sapiens
  ( 170 )...( 182 ): PE23_HUMAN
KTRATRAVLLGV

SEQ ID NO: 1360 - protein, 12 aa, Homo Sapiens
  ( 344 )...( 356 ): PE23_HUMAN
WVYLLLRKILLR

SEQ ID NO: 1361 - protein, 12 aa, Homo Sapiens
  ( 345 )...( 357 ): PE23_HUMAN
VYLLLRKILLRK

SEQ ID NO: 1362 - protein, 12 aa, Homo Sapiens
  ( 346 )...( 358 ): PE23_HUMAN
YLLLRKILLRKF

SEQ ID NO: 1363 - protein, 12 aa, Homo Sapiens
  ( 347 )...( 359 ): PE23_HUMAN
LLLRKILLRKFC

SEQ ID NO: 1364 - protein, 12 aa, Homo Sapiens
  ( 348 )...( 360 ): PE23_HUMAN
LLRKILLRKFCQ

SEQ ID NO: 1365 - protein, 12 aa, Homo Sapiens
  ( 349 )...( 361 ): PE23_HUMAN
LRKILLRKFCQI

SEQ ID NO: 1366 - protein, 12 aa, Homo Sapiens
  ( 36 )...( 48 ): PE24_HUMAN
LVAIVVLCKSRK

SEQ ID NO: 1367 - protein, 12 aa, Homo Sapiens
  ( 328 )...( 340 ): PE24_HUMAN
IYILLRKTVLSK

SEQ ID NO: 1368 - protein, 12 aa, Homo Sapiens
  ( 329 )...( 341 ): PE24_HUMAN
YILLRKTVLSKA

SEQ ID NO: 1369 - protein, 12 aa, Homo Sapiens
  ( 330 )...( 342 ): PE24_HUMAN
ILLRKTVLSKAI

SEQ ID NO: 1370 - protein, 12 aa, Homo Sapiens
  ( 332 )...( 344 ): PE24_HUMAN
LRKTVLSKAIEK

SEQ ID NO: 1371 - protein, 12 aa, Homo Sapiens
  ( 333 )...( 345 ): PE24_HUMAN
RKTVLSKAIEKI

SEQ ID NO: 1372 - protein, 12 aa, Homo Sapiens
  ( 334 )...( 346 ): PE24_HUMAN
KTVLSKAIEKIK

SEQ ID NO: 1373 - protein, 12 aa, Homo Sapiens
  ( 50 )...( 62 ): PF2R_HUMAN
ILMKAYQRFRQK

SEQ ID NO: 1374 - protein, 12 aa, Homo Sapiens
  ( 139 )...( 151 ): PF2R_HUMAN
KPIFHSTKITSK

SEQ ID NO: 1375 - protein, 12 aa, Homo Sapiens
  ( 222 )...( 234 ): PF2R_HUMAN
ITGITLLRVKFK

SEQ ID NO: 1376 - protein, 12 aa, Homo Sapiens
  ( 223 )...( 235 ): PF2R_HUMAN
TGITLLRVKFKS

SEQ ID NO: 1377 - protein, 12 aa, Homo Sapiens
  ( 224 )...( 236 ): PF2R_HUMAN
GITLLRVKFKSQ

SEQ ID NO: 1378 - protein, 12 aa, Homo Sapiens
  ( 225 )...( 237 ): PF2R_HUMAN
ITLLRVKFKSQQ

SEQ ID NO: 1379 - protein, 12 aa, Homo Sapiens
  ( 226 )...( 238 ): PF2R_HUMAN
TLLRVKFKSQQH

SEQ ID NO: 1380 - protein, 12 aa, Homo Sapiens
  ( 302 )...( 314 ): PF2R_HUMAN
WVYILLRKAVLK

SEQ ID NO: 1381 - protein, 12 aa, Homo Sapiens
  ( 303 )...( 315 ): PF2R_HUMAN
VYILLRKAVLKN

SEQ ID NO: 1382 - protein, 12 aa, Homo Sapiens
  ( 304 )...( 316 ): PF2R_HUMAN
YILLRKAVLKNL

SEQ ID NO: 1383 - protein, 12 aa, Homo Sapiens
  ( 305 )...( 317 ): PF2R_HUMAN
ILLRKAVLKNLY

SEQ ID NO: 1384 - protein, 12 aa, Homo Sapiens
  ( 306 )...( 318 ): PF2R_HUMAN
LLRKAVLKNLYK

SEQ ID NO: 1385 - protein, 12 aa, Homo Sapiens
  ( 307 )...( 319 ): PF2R_HUMAN
LRKAVLKNLYKL

SEQ ID NO: 1386 - protein, 12 aa, Homo Sapiens
  ( 308 )...( 320 ): PF2R_HUMAN
RKAVLKNLYKLA

SEQ ID NO: 1387 - protein, 12 aa, Homo Sapiens
  ( 309 )...( 321 ): PF2R_HUMAN
KAVLKNLYKLAS

SEQ ID NO: 1388 - protein, 12 aa, Homo Sapiens
  ( 293 )...( 305 ): PI2R_HUMAN
ILFRKAVFQRLK

SEQ ID NO: 1389 - protein, 12 aa, Homo Sapiens
  ( 294 )...( 306 ): PI2R_HUMAN
LFRKAVFQRLKL

SEQ ID NO: 1390 - protein, 12 aa, Homo Sapiens
  ( 296 )...( 308 ): PI2R_HUMAN
RKAVFQRLKLWV

SEQ ID NO: 1391 - protein, 12 aa, Homo Sapiens
  ( 356 )...( 368 ): PTR2_HUMAN
KQYRKLAKSTLV

SEQ ID NO: 1392 - protein, 12 aa, Homo Sapiens
  ( 357 )...( 369 ): PTR2_HUMAN
QYRKLAKSTLVL

SEQ ID NO: 1393 - protein, 12 aa, Homo Sapiens
  ( 358 )...( 370 ): PTR2_HUMAN
YRKLAKSTLVLV

SEQ ID NO: 1394 - protein, 12 aa, Homo Sapiens
  ( 359 )...( 371 ): PTR2_HUMAN
RKLAKSTLVLVL

SEQ ID NO: 1395 - protein, 12 aa, Homo Sapiens
  ( 469 )...( 481 ): PTR2_HUMAN
TRMVLISGKAAK

SEQ ID NO: 1396 - protein, 12 aa, Homo Sapiens
  ( 470 )...( 482 ): PTR2_HUMAN
RMVLISGKAAKI

SEQ ID NO: 1397 - protein, 12 aa, Homo Sapiens
  ( 379 )...( 391 ): PTRR_HUMAN
INIVRVLATKLR

SEQ ID NO: 1398 - protein, 12 aa, Homo Sapiens
  ( 401 )...( 413 ): PTRR_HUMAN
QQYRKLLKSTLV

SEQ ID NO: 1399 - protein, 12 aa, Homo Sapiens
  ( 402 )...( 414 ): PTRR_HUMAN
QYRKLLKSTLVL

SEQ ID NO: 1400 - protein, 12 aa, Homo Sapiens
  ( 403 )...( 415 ): PTRR_HUMAN
YRKLLKSTLVLM

SEQ ID NO: 1401 - protein, 12 aa, Homo Sapiens
  ( 404 )...( 416 ): PTRR_HUMAN
RKLLKSTLVLMP

SEQ ID NO: 1402 - protein, 12 aa, Homo Sapiens
  ( 332 )...( 344 ): RDC1_HUMAN
FKYSAKTGLTKL

SEQ ID NO: 1403 - protein, 12 aa, Homo Sapiens
  ( 333 )...( 345 ): RDC1_HUMAN
KYSAKTGLTKLI

SEQ ID NO: 1404 - protein, 12 aa, Homo Sapiens
  ( 133 )...( 145 ): SCRC_HUMAN
EKRHSYLLKLKV

SEQ ID NO: 1405 - protein, 12 aa, Homo Sapiens
  ( 134 )...( 146 ): SCRC_HUMAN
KRHSYLLKLKVM

SEQ ID NO: 1406 - protein, 12 aa, Homo Sapiens
  ( 135 )...( 147 ): SCRC_HUMAN
RHSYLLKLKVMY

SEQ ID NO: 1407 - protein, 12 aa, Homo Sapiens
  ( 312 )...( 324 ): SCRC_HUMAN
LFINILRILMRK

SEQ ID NO: 1408 - protein, 12 aa, Homo Sapiens
  ( 313 )...( 325 ): SCRC_HUMAN
FINILRILMRKL

SEQ ID NO: 1409 - protein, 12 aa, Homo Sapiens
  ( 314 )...( 326 ): SCRC_HUMAN
INILRILMRKLR

SEQ ID NO: 1410 - protein, 12 aa, Homo Sapiens
  ( 315 )...( 327 ): SCRC_HUMAN
NILRILMRKLRT

SEQ ID NO: 1411 - protein, 12 aa, Homo Sapiens
  ( 316 )...( 328 ): SCRC_HUMAN
ILRILMRKLRTQ

SEQ ID NO: 1412 - protein, 12 aa, Homo Sapiens
  ( 317 )...( 329 ): SCRC_HUMAN
LRILMRKLRTQE

SEQ ID NO: 1413 - protein, 12 aa, Homo Sapiens
  ( 337 )...( 349 ): SCRC_HUMAN
YKRLARSTLLLI

SEQ ID NO: 1414 - protein, 12 aa, Homo Sapiens
  ( 536 )...( 548 ): SMO_HUMAN
VWTKATLLIWRR

SEQ ID NO: 1415 - protein, 12 aa, Homo Sapiens
  ( 537 )...( 549 ): SMO_HUMAN
WTKATLLIWRRT

SEQ ID NO: 1416 - protein, 12 aa, Homo Sapiens
  ( 538 )...( 550 ): SMO_HUMAN
TKATLLIWRRTW

SEQ ID NO: 1417 - protein, 12 aa, Homo Sapiens
  ( 562 )...( 574 ): SMO_HUMAN
RIKKSKMIAKAF

SEQ ID NO: 1418 - protein, 12 aa, Homo Sapiens
  ( 563 )...( 575 ): SMO_HUMAN
IKKSKMIAKAFS

SEQ ID NO: 1419 - protein, 12 aa, Homo Sapiens
  ( 342 )...( 354 ): SRB3_HUMAN
LLNKDLKKCLRT

SEQ ID NO: 1420 - protein, 12 aa, Homo Sapiens
  ( 79 )...( 91 ): SSR1_HUMAN
VIYVILRYAKMK

SEQ ID NO: 1421 - protein, 12 aa, Homo Sapiens
  ( 81 )...( 93 ): SSR1_HUMAN
YVILRYAKMKTA

SEQ ID NO: 1422 - protein, 12 aa, Homo Sapiens
  ( 82 )...( 94 ): SSR1_HUMAN
VILRYAKMKTAT

SEQ ID NO: 1423 - protein, 12 aa, Homo Sapiens
  ( 83 )...( 95 ): SSR1_HUMAN
ILRYAKMKTATN

SEQ ID NO: 1424 - protein, 12 aa, Homo Sapiens
  ( 84 )...( 96 ): SSR1_HUMAN
LRYAKMKTATNI

SEQ ID NO: 1425 - protein, 12 aa, Homo Sapiens
  ( 245 )...( 257 ): SSR1_HUMAN
LIIAKMRMVALK

SEQ ID NO: 1426 - protein, 12 aa, Homo Sapiens
  ( 246 )...( 258 ): SSR1_HUMAN
IIAKMRMVALKA

SEQ ID NO: 1427 - protein, 12 aa, Homo Sapiens
  ( 252 )...( 264 ): SSR1_HUMAN
MVALKAGWQQRK

SEQ ID NO: 1428 - protein, 12 aa, Homo Sapiens
  ( 263 )...( 275 ): SSR1_HUMAN
KRSERKITLMVM

SEQ ID NO: 1429 - protein, 12 aa, Homo Sapiens
  ( 64 )...( 76 ): SSR2_HUMAN
VIYVILRYAKMK

SEQ ID NO: 1430 - protein, 12 aa, Homo Sapiens
  ( 67 )...( 79 ): SSR2_HUMAN
VILRYAKMKTIT

SEQ ID NO: 1431 - protein, 12 aa, Homo Sapiens
  ( 68 )...( 80 ): SSR2_HUMAN
ILRYAKMKTITN

SEQ ID NO: 1432 - protein, 12 aa, Homo Sapiens
  ( 69 )...( 81 ): SSR2_HUMAN
LRYAKMKTITNI

SEQ ID NO: 1433 - protein, 12 aa, Homo Sapiens
  ( 70 )...( 82 ): SSR2_HUMAN
RYAKMKTITNIY

SEQ ID NO: 1434 - protein, 12 aa, Homo Sapiens
  ( 230 )...( 242 ): SSR2_HUMAN
FIIIKVKSSGIR

SEQ ID NO: 1435 - protein, 12 aa, Homo Sapiens
  ( 231 )...( 243 ): SSR2_HUMAN
IIIKVKSSGIRV

SEQ ID NO: 1436 - protein, 12 aa, Homo Sapiens
  ( 232 )...( 244 ): SSR2_HUMAN
IIKVKSSGIRVG

SEQ ID NO: 1437 - protein, 12 aa, Homo Sapiens
  ( 252 )...( 264 ): SSR2_HUMAN
KKVTRMVSIVVA

SEQ ID NO: 1438 - protein, 12 aa, Homo Sapiens
  ( 320 )...( 332 ): SSR2_HUMAN
KKSFQNVLCLVK

SEQ ID NO: 1439 - protein, 12 aa, Homo Sapiens
  ( 227 )...( 239 ): SSR3_HUMAN
LLIVVKVRSAGR

SEQ ID NO: 1440 - protein, 12 aa, Homo Sapiens
  ( 68 )...( 80 ): SSR4_HUMAN
VIFVILRYAKMK

SEQ ID NO: 1441 - protein, 12 aa, Homo Sapiens
  ( 69 )...( 81 ): SSR4_HUMAN
IFVILRYAKMKT

SEQ ID NO: 1442 - protein, 12 aa, Homo Sapiens
  ( 70 )...( 82 ): SSR4_HUMAN
FVILRYAKMKTA

SEQ ID NO: 1443 - protein, 12 aa, Homo Sapiens
  ( 71 )...( 83 ): SSR4_HUMAN
VILRYAKMKTAT

SEQ ID NO: 1444 - protein, 12 aa, Homo Sapiens
  ( 72 )...( 84 ): SSR4_HUMAN
ILRYAKMKTATN

SEQ ID NO: 1445 - protein, 12 aa, Homo Sapiens
  ( 73 )...( 85 ): SSR4_HUMAN
LRYAKMKTATNI

SEQ ID NO: 1446 - protein, 12 aa, Homo Sapiens
  ( 233 )...( 245 ): SSR4_HUMAN
LIVGKMRAVALR

SEQ ID NO: 1447 - protein, 12 aa, Homo Sapiens
  ( 252 )...( 264 ): SSR4_HUMAN
RSEKKITRLVLM

SEQ ID NO: 1448 - protein, 12 aa, Homo Sapiens
  ( 255 )...( 267 ): SSR4_HUMAN
KKITRLVLMVVV

SEQ ID NO: 1449 - protein, 12 aa, Homo Sapiens
  ( 61 )...( 73 ): SSR5_HUMAN
VIYVVLRFAKMK

SEQ ID NO: 1450 - protein, 12 aa, Homo Sapiens
  ( 62 )...( 74 ): SSR5_HUMAN
IYVVLRFAKMKT

SEQ ID NO: 1451 - protein, 12 aa, Homo Sapiens
  ( 63 )...( 75 ): SSR5_HUMAN
YVVLRFAKMKTV

SEQ ID NO: 1452 - protein, 12 aa, Homo Sapiens
  ( 64 )...( 76 ): SSR5_HUMAN
VVLRFAKMKTVT

SEQ ID NO: 1453 - protein, 12 aa, Homo Sapiens
  ( 65 )...( 77 ): SSR5_HUMAN
VLRFAKMKTVTN

SEQ ID NO: 1454 - protein, 12 aa, Homo Sapiens
  ( 66 )...( 78 ): SSR5_HUMAN
LRFAKMKTVTNI

SEQ ID NO: 1455 - protein, 12 aa, Homo Sapiens
  ( 223 )...( 235 ): SSR5_HUMAN
LIVVKVRAAGVR

SEQ ID NO: 1456 - protein, 12 aa, Homo Sapiens
  ( 224 )...( 236 ): SSR5_HUMAN
IVVKVRAAGVRV

SEQ ID NO: 1457 - protein, 12 aa, Homo Sapiens
  ( 225 )...( 237 ): SSR5_HUMAN
VVKVRAAGVRVG

SEQ ID NO: 1458 - protein, 12 aa, Homo Sapiens
  ( 244 )...( 256 ): SSR5_HUMAN
RKVTRMVLVVVL

SEQ ID NO: 1459 - protein, 12 aa, Homo Sapiens
  ( 46 )...( 58 ): TRFR_HUMAN
VVLVVMRTKHMR

SEQ ID NO: 1460 - protein, 12 aa, Homo Sapiens
  ( 47 )...( 59 ): TRFR_HUMAN
VLVVMRTKHMRT

SEQ ID NO: 1461 - protein, 12 aa, Homo Sapiens
  ( 138 )...( 150 ): TRFR_HUMAN
TFSRAKKIIIFV

SEQ ID NO: 1462 - protein, 12 aa, Homo Sapiens
  ( 139 )...( 151 ): TRFR_HUMAN
FSRAKKIIIFVW

SEQ ID NO: 1463 - protein, 12 aa, Homo Sapiens
  ( 140 )...( 152 ): TRFR_HUMAN
SRAKKIIIFVWA

SEQ ID NO: 1464 - protein, 12 aa, Homo Sapiens
  ( 141 )...( 153 ): TRFR_HUMAN
RAKKIIIFVWAF

SEQ ID NO: 1465 - protein, 12 aa, Homo Sapiens
  ( 260 )...( 272 ): TRFR_HUMAN
SRKQVTKMLAVV

SEQ ID NO: 1466 - protein, 12 aa, Homo Sapiens
  ( 261 )...( 273 ): TRFR_HUMAN
RKQVTKMLAVVV

SEQ ID NO: 1467 - protein, 12 aa, Homo Sapiens
  ( 305 )...( 317 ): TRP1_HUMAN
MNLSRLKLAIKY

SEQ ID NO: 1468 - protein, 12 aa, Homo Sapiens
  ( 307 )...( 319 ): TRP1_HUMAN
LSRLKLAIKYNQ

SEQ ID NO: 1469 - protein, 12 aa, Homo Sapiens
  ( 302 )...( 314 ): TRP3_HUMAN
HKASLSRVKLAI

SEQ ID NO: 1470 - protein, 12 aa, Homo Sapiens
  ( 303 )...( 315 ): TRP3_HUMAN
KASLSRVKLAIK

SEQ ID NO: 1471 - protein, 12 aa, Homo Sapiens
  ( 304 )...( 316 ): TRP3_HUMAN
ASLSRVKLAIKY

SEQ ID NO: 1472 - protein, 12 aa, Homo Sapiens
  ( 307 )...( 319 ): TRP3_HUMAN
SRVKLAIKYEVK

SEQ ID NO: 1473 - protein, 12 aa, Homo Sapiens
  ( 308 )...( 320 ): TRP3_HUMAN
RVKLAIKYEVKK

SEQ ID NO: 1474 - protein, 12 aa, Homo Sapiens
  ( 309 )...( 321 ): TRP3_HUMAN
VKLAIKYEVKKF

SEQ ID NO: 1475 - protein, 12 aa, Homo Sapiens
  ( 310 )...( 322 ): TRP3_HUMAN
KLAIKYEVKKFV

SEQ ID NO: 1476 - protein, 12 aa, Homo Sapiens
  ( 422 )...( 434 ): TRP3_HUMAN
YPKQIFRVKTTQ

SEQ ID NO: 1477 - protein, 12 aa, Homo Sapiens
  ( 423 )...( 435 ): TRP3_HUMAN
PKQIFRVKTTQF

SEQ ID NO: 1478 - protein, 12 aa, Homo Sapiens
  ( 771 )...( 783 ): TRP3_HUMAN
QPTRYQQIMKRL

SEQ ID NO: 1479 - protein, 12 aa, Homo Sapiens
  ( 772 )...( 784 ): TRP3_HUMAN
PTRYQQIMKRLI

SEQ ID NO: 1480 - protein, 12 aa, Homo Sapiens
  ( 773 )...( 785 ): TRP3_HUMAN
TRYQQIMKRLIK

SEQ ID NO: 1481 - protein, 12 aa, Homo Sapiens
  ( 774 )...( 786 ): TRP3_HUMAN
RYQQIMKRLIKR

SEQ ID NO: 1482 - protein, 12 aa, Homo Sapiens
  ( 775 )...( 787 ): TRP3_HUMAN
YQQIMKRLIKRY

SEQ ID NO: 1483 - protein, 12 aa, Homo Sapiens
  ( 776 )...( 788 ): TRP3_HUMAN
QQIMKRLIKRYV

SEQ ID NO: 1484 - protein, 12 aa, Homo Sapiens
  ( 777 )...( 789 ): TRP3_HUMAN
QIMKRLIKRYVL

SEQ ID NO: 1485 - protein, 12 aa, Homo Sapiens
  ( 778 )...( 790 ): TRP3_HUMAN
IMKRLIKRYVLK

SEQ ID NO: 1486 - protein, 12 aa, Homo Sapiens
  ( 779 )...( 791 ): TRP3_HUMAN
MKRLIKRYVLKA

SEQ ID NO: 1487 - protein, 12 aa, Homo Sapiens
  ( 780 )...( 792 ): TRP3_HUMAN
KRLIKRYVLKAQ

SEQ ID NO: 1488 - protein, 12 aa, Homo Sapiens
  ( 781 )...( 793 ): TRP3_HUMAN
RLIKRYVLKAQV

SEQ ID NO: 1489 - protein, 12 aa, Homo Sapiens
  ( 783 )...( 795 ): TRP3_HUMAN
IKRYVLKAQVDK

SEQ ID NO: 1490 - protein, 12 aa, Homo Sapiens
  ( 159 )...( 171 ): TRP4_HUMAN
KLLVQKGVSVPR

SEQ ID NO: 1491 - protein, 12 aa, Homo Sapiens
  ( 286 )...( 298 ): TRP4_HUMAN
LARLKLAIKYRQ

SEQ ID NO: 1492 - protein, 12 aa, Homo Sapiens
  ( 287 )...( 299 ): TRP4_HUMAN
ARLKLAIKYRQK

SEQ ID NO: 1493 - protein, 12 aa, Homo Sapiens
  ( 289 )...( 301 ): TRP4_HUMAN
LKLAIKYRQKEF

SEQ ID NO: 1494 - protein, 12 aa, Homo Sapiens
  ( 290 )...( 302 ): TRP4_HUMAN
KLAIKYRQKEFV

SEQ ID NO: 1495 - protein, 12 aa, Homo Sapiens
  ( 157 )...( 169 ): TRP5_HUMAN
IIKLLVQKRVTI

SEQ ID NO: 1496 - protein, 12 aa, Homo Sapiens
  ( 158 )...( 170 ): TRP5_HUMAN
IKLLVQKRVTIP

SEQ ID NO: 1497 - protein, 12 aa, Homo Sapiens
  ( 159 )...( 171 ): TRP5_HUMAN
KLLVQKRVTIPR

SEQ ID NO: 1498 - protein, 12 aa, Homo Sapiens
  ( 160 )...( 172 ): TRP5_HUMAN
LLVQKRVTIPRP

SEQ ID NO: 1499 - protein, 12 aa, Homo Sapiens
  ( 287 )...( 299 ): TRP5_HUMAN
LAKLKVAIKYHQ

SEQ ID NO: 1500 - protein, 12 aa, Homo Sapiens
  ( 288 )...( 300 ): TRP5_HUMAN
AKLKVAIKYHQK

SEQ ID NO: 1501 - protein, 12 aa, Homo Sapiens
  ( 321 )...( 333 ): TRP5_HUMAN
GWRRKHWVVKLL

SEQ ID NO: 1502 - protein, 12 aa, Homo Sapiens
  ( 322 )...( 334 ): TRP5_HUMAN
WRRKHWVVKLLT

SEQ ID NO: 1503 - protein, 12 aa, Homo Sapiens
  ( 355 )...( 367 ): TRP5_HUMAN
NLGLFIKKPFIK

SEQ ID NO: 1504 - protein, 12 aa, Homo Sapiens
  ( 356 )...( 368 ): TRP5_HUMAN
LGLFIKKPFIKF

SEQ ID NO: 1505 - protein, 12 aa, Homo Sapiens
  ( 357 )...( 369 ): TRP5_HUMAN
GLFIKKPFIKFI

SEQ ID NO: 1506 - protein, 12 aa, Homo Sapiens
  ( 840 )...( 852 ): TRP5_HUMAN
PSLKKLGLLFSK

SEQ ID NO: 1507 - protein, 12 aa, Homo Sapiens
  ( 841 )...( 853 ): TRP5_HUMAN
SLKKLGLLFSKF

SEQ ID NO: 1508 - protein, 12 aa, Homo Sapiens
  ( 842 )...( 854 ): TRP5_HUMAN
LKKLGLLFSKFN

SEQ ID NO: 1509 - protein, 12 aa, Homo Sapiens
  ( 843 )...( 855 ): TRP5_HUMAN
KKLGLLFSKFNG

SEQ ID NO: 1510 - protein, 12 aa, Homo Sapiens
  ( 234 )...( 246 ): TRP6_HUMAN
IVHTLLRKGARI

SEQ ID NO: 1511 - protein, 12 aa, Homo Sapiens
  ( 364 )...( 376 ): TRP6_HUMAN
SRLKLAIKYEVK

SEQ ID NO: 1512 - protein, 12 aa, Homo Sapiens
  ( 365 )...( 377 ): TRP6_HUMAN
RLKLAIKYEVKK

SEQ ID NO: 1513 - protein, 12 aa, Homo Sapiens
  ( 366 )...( 378 ): TRP6_HUMAN
LKLAIKYEVKKF

SEQ ID NO: 1514 - protein, 12 aa, Homo Sapiens
  ( 367 )...( 379 ): TRP6_HUMAN
KLAIKYEVKKFV

SEQ ID NO: 1515 - protein, 12 aa, Homo Sapiens
  ( 770 )...( 782 ): TRP6_HUMAN
PKSLFYLLLKLK

SEQ ID NO: 1516 - protein, 12 aa, Homo Sapiens
  ( 771 )...( 783 ): TRP6_HUMAN
KSLFYLLLKLKK

SEQ ID NO: 1517 - protein, 12 aa, Homo Sapiens
  ( 772 )...( 784 ): TRP6_HUMAN
SLFYLLLKLKKW

SEQ ID NO: 1518 - protein, 12 aa, Homo Sapiens
  ( 774 )...( 786 ): TRP6_HUMAN
FYLLLKLKKWIS

SEQ ID NO: 1519 - protein, 12 aa, Homo Sapiens
  ( 852 )...( 864 ): TRP6_HUMAN
PRQYQKIMKRLI

SEQ ID NO: 1520 - protein, 12 aa, Homo Sapiens
  ( 853 )...( 865 ): TRP6_HUMAN
RQYQKIMKRLIK

SEQ ID NO: 1521 - protein, 12 aa, Homo Sapiens
  ( 854 )...( 866 ): TRP6_HUMAN
QYQKIMKRLIKR

SEQ ID NO: 1522 - protein, 12 aa, Homo Sapiens
  ( 855 )...( 867 ): TRP6_HUMAN
YQKIMKRLIKRY

SEQ ID NO: 1523 - protein, 12 aa, Homo Sapiens
  ( 856 )...( 868 ): TRP6_HUMAN
QKIMKRLIKRYV

SEQ ID NO: 1524 - protein, 12 aa, Homo Sapiens
  ( 857 )...( 869 ): TRP6_HUMAN
KIMKRLIKRYVL

SEQ ID NO: 1525 - protein, 12 aa, Homo Sapiens
  ( 858 )...( 870 ): TRP6_HUMAN
IMKRLIKRYVLQ

SEQ ID NO: 1526 - protein, 12 aa, Homo Sapiens
  ( 859 )...( 871 ): TRP6_HUMAN
MKRLIKRYVLQA

SEQ ID NO: 1527 - protein, 12 aa, Homo Sapiens
  ( 860 )...( 872 ): TRP6_HUMAN
KRLIKRYVLQAQ

SEQ ID NO: 1528 - protein, 12 aa, Homo Sapiens
  ( 861 )...( 873 ): TRP6_HUMAN
RLIKRYVLQAQI

SEQ ID NO: 1529 - protein, 12 aa, Homo Sapiens
  ( 309 )...( 321 ): TRP7_HUMAN
SRIKLAIKYEVK

SEQ ID NO: 1530 - protein, 12 aa, Homo Sapiens
  ( 310 )...( 322 ): TRP7_HUMAN
RIKLAIKYEVKK

SEQ ID NO: 1531 - protein, 12 aa, Homo Sapiens
  ( 311 )...( 323 ): TRP7_HUMAN
IKLAIKYEVKKF

SEQ ID NO: 1532 - protein, 12 aa, Homo Sapiens
  ( 312 )...( 324 ): TRP7_HUMAN
KLAIKYEVKKFV

SEQ ID NO: 1533 - protein, 12 aa, Homo Sapiens
  ( 424 )...( 436 ): TRP7_HUMAN
YPKQIFRVKTTQ

SEQ ID NO: 1534 - protein, 12 aa, Homo Sapiens
  ( 425 )...( 437 ): TRP7_HUMAN
PKQIFRVKTTQF

SEQ ID NO: 1535 - protein, 12 aa, Homo Sapiens
  ( 426 )...( 438 ): TRP7_HUMAN
KQIFRVKTTQFS

SEQ ID NO: 1536 - protein, 12 aa, Homo Sapiens
  ( 773 )...( 785 ): TRP7_HUMAN
TLSKPTRYQKIM

SEQ ID NO: 1537 - protein, 12 aa, Homo Sapiens
  ( 774 )...( 786 ): TRP7_HUMAN
LSKPTRYQKIMK

SEQ ID NO: 1538 - protein, 12 aa, Homo Sapiens
  ( 776 )...( 788 ): TRP7_HUMAN
KPTRYQKIMKRL

SEQ ID NO: 1539 - protein, 12 aa, Homo Sapiens
  ( 777 )...( 789 ): TRP7_HUMAN
PTRYQKIMKRLI

SEQ ID NO: 1540 - protein, 12 aa, Homo Sapiens
  ( 778 )...( 790 ): TRP7_HUMAN
TRYQKIMKRLIK

SEQ ID NO: 1541 - protein, 12 aa, Homo Sapiens
  ( 779 )...( 791 ): TRP7_HUMAN
RYQKIMKRLIKR

SEQ ID NO: 1542 - protein, 12 aa, Homo Sapiens
  ( 780 )...( 792 ): TRP7_HUMAN
YQKIMKRLIKRY

SEQ ID NO: 1543 - protein, 12 aa, Homo Sapiens
  ( 781 )...( 793 ): TRP7_HUMAN
QKIMKRLIKRYV

SEQ ID NO: 1544 - protein, 12 aa, Homo Sapiens
  ( 782 )...( 794 ): TRP7_HUMAN
KIMKRLIKRYVL

SEQ ID NO: 1545 - protein, 12 aa, Homo Sapiens
  ( 783 )...( 795 ): TRP7_HUMAN
IMKRLIKRYVLK

SEQ ID NO: 1546 - protein, 12 aa, Homo Sapiens
  ( 784 )...( 796 ): TRP7_HUMAN
MKRLIKRYVLKA

SEQ ID NO: 1547 - protein, 12 aa, Homo Sapiens
  ( 785 )...( 797 ): TRP7_HUMAN
KRLIKRYVLKAQ

SEQ ID NO: 1548 - protein, 12 aa, Homo Sapiens
  ( 786 )...( 798 ): TRP7_HUMAN
RLIKRYVLKAQV

SEQ ID NO: 1549 - protein, 12 aa, Homo Sapiens
  ( 788 )...( 800 ): TRP7_HUMAN
IKRYVLKAQVDR

SEQ ID NO: 1550 - protein, 12 aa, Homo Sapiens
  ( 252 )...( 264 ): TSHR_HUMAN
LIARNTWTLKKL

SEQ ID NO: 1551 - protein, 12 aa, Homo Sapiens
  ( 253 )...( 265 ): TSHR_HUMAN
IARNTWTLKKLP

SEQ ID NO: 1552 - protein, 12 aa, Homo Sapiens
  ( 254 )...( 266 ): TSHR_HUMAN
ARNTWTLKKLPL

SEQ ID NO: 1553 - protein, 12 aa, Homo Sapiens
  ( 255 )...( 267 ): TSHR_HUMAN
RNTWTLKKLPLS

SEQ ID NO: 1554 - protein, 12 aa, Homo Sapiens
  ( 285 )...( 297 ): TSHR_HUMAN
AFKNQKKIRGIL

SEQ ID NO: 1555 - protein, 12 aa, Homo Sapiens
  ( 618 )...( 630 ): TSHR_HUMAN
KDTKIAKRMAVL

SEQ ID NO: 1556 - protein, 12 aa, Homo Sapiens
  ( 620 )...( 632 ): TSHR_HUMAN
TKIAKRMAVLIF

SEQ ID NO: 1557 - protein, 12 aa, Homo Sapiens
  ( 621 )...( 633 ): TSHR_HUMAN
KIAKRMAVLIFT

SEQ ID NO: 1558 - protein, 12 aa, Homo Sapiens
  ( 261 )...( 273 ): UL33_HCMVA
LRRTIGTLARVV

SEQ ID NO: 1559 - protein, 12 aa, Homo Sapiens
  ( 121 )...( 133 ): UL33_HSV6U
IIATIRYKTLHR

SEQ ID NO: 1560 - protein, 12 aa, Homo Sapiens
  ( 161 )...( 173 ): UL33_HSV6U
TALFVKTNGMKK

SEQ ID NO: 1561 - protein, 12 aa, Homo Sapiens
  ( 162 )...( 174 ): UL33_HSV6U
ALFVKTNGMKKT

SEQ ID NO: 1562 - protein, 12 aa, Homo Sapiens
  ( 226 )...( 238 ): UL33_HSV6U
KYKKTLFFIRIL

SEQ ID NO: 1563 - protein, 12 aa, Homo Sapiens
  ( 227 )...( 239 ): UL33_HSV6U
YKKTLFFIRILL

SEQ ID NO: 1564 - protein, 12 aa, Homo Sapiens
  ( 228 )...( 240 ): UL33_HSV6U
KKTLFFIRILLL

SEQ ID NO: 1565 - protein, 12 aa, Homo Sapiens
  ( 158 )...( 170 ): UR2R_HUMAN
TVQRPKGYRKLL

SEQ ID NO: 1566 - protein, 12 aa, Homo Sapiens
  ( 162 )...( 174 ): UR2R_HUMAN
PKGYRKLLALGT

SEQ ID NO: 1567 - protein, 12 aa, Homo Sapiens
  ( 163 )...( 175 ): UR2R_HUMAN
KGYRKLLALGTW

SEQ ID NO: 1568 - protein, 12 aa, Homo Sapiens
  ( 50 )...( 62 ): US27_HCMVA
LVITTILYYRRK

SEQ ID NO: 1569 - protein, 12 aa, Homo Sapiens
  ( 52 )...( 64 ): US27_HCMVA
ITTILYYRRKKK

SEQ ID NO: 1570 - protein, 12 aa, Homo Sapiens
  ( 221 )...( 233 ): US28_HCMVA
RHKGRIVRVLIA

SEQ ID NO: 1571 - protein, 12 aa, Homo Sapiens
  ( 222 )...( 234 ): US28_HCMVA
HKGRIVRVLIAV

SEQ ID NO: 1572 - protein, 12 aa, Homo Sapiens
  ( 223 )...( 235 ): US28_HCMVA
KGRIVRVLIAVV

SEQ ID NO: 1573 - protein, 12 aa, Homo Sapiens
  ( 72 )...( 84 ): V1AR_HUMAN
VLLALHRTPRKT

SEQ ID NO: 1574 - protein, 12 aa, Homo Sapiens
  ( 284 )...( 296 ): V1AR_HUMAN
RAKIRTVKMTFV

SEQ ID NO: 1575 - protein, 12 aa, Homo Sapiens
  ( 285 )...( 297 ): V1AR_HUMAN
AKIRTVKMTFVI

SEQ ID NO: 1576 - protein, 12 aa, Homo Sapiens
  ( 55 )...( 67 ): V1BR_HUMAN
VLLTLGQLGRKR

SEQ ID NO: 1577 - protein, 12 aa, Homo Sapiens
  ( 56 )...( 68 ): V1BR_HUMAN
LLTLGQLGRKRS

SEQ ID NO: 1578 - protein, 12 aa, Homo Sapiens
  ( 226 )...( 238 ): V1BR_HUMAN
ICKNLKVKTQAW

SEQ ID NO: 1579 - protein, 12 aa, Homo Sapiens
  ( 229 )...( 241 ): V1BR_HUMAN
NLKVKTQAWRVG

SEQ ID NO: 1580 - protein, 12 aa, Homo Sapiens
  ( 230 )...( 242 ): V1BR_HUMAN
LKVKTQAWRVGG

SEQ ID NO: 1581 - protein, 12 aa, Homo Sapiens
  ( 269 )...( 281 ): V1BR_HUMAN
INTISRAKIRTV

SEQ ID NO: 1582 - protein, 12 aa, Homo Sapiens
  ( 274 )...( 286 ): V1BR_HUMAN
RAKIRTVKMTFV

SEQ ID NO: 1583 - protein, 12 aa, Homo Sapiens
  ( 275 )...( 287 ): V1BR_HUMAN
AKIRTVKMTFVI

SEQ ID NO: 1584 - protein, 12 aa, Homo Sapiens
  ( 243 )...( 255 ): VG74_KSHV
LQARRKVRGVIV

SEQ ID NO: 1585 - protein, 12 aa, Homo Sapiens
  ( 246 )...( 258 ): VG74_KSHV
RRKVRGVIVAVV

SEQ ID NO: 1586 - protein, 12 aa, Homo Sapiens
  ( 247 )...( 259 ): VG74_KSHV
RKVRGVIVAVVL

SEQ ID NO: 1587 - protein, 12 aa, Homo Sapiens
  ( 313 )...( 325 ): VIPR_HUMAN
ICIIRILLQKLR

SEQ ID NO: 1588 - protein, 12 aa, Homo Sapiens
  ( 314 )...( 326 ): VIPR_HUMAN
CIIRILLQKLRP

SEQ ID NO: 1589 - protein, 12 aa, Homo Sapiens
  ( 321 )...( 333 ): VIPS_HUMAN
SQYKRLAKSTLL

SEQ ID NO: 1590 - protein, 12 aa, Homo Sapiens
  ( 322 )...( 334 ): VIPS_HUMAN
QYKRLAKSTLLL

SEQ ID NO: 1591 - protein, 12 aa, Homo Sapiens
  ( 323 )...( 335 ): VIPS_HUMAN
YKRLAKSTLLLI

SEQ ID NO: 1592 - protein, 12 aa, Homo Sapiens
  ( 324 )...( 336 ): VIPS_HUMAN
KRLAKSTLLLIP

SEQ ID NO: 1593 - protein, 12 aa, Homo Sapiens
  ( 135 )...( 147 ): VU51_HSV7J
FQAVQISMKYKK

SEQ ID NO: 1594 - protein, 12 aa, Homo Sapiens
  ( 140 )...( 152 ): VU51_HSV7J
ISMKYKKSQMNL

SEQ ID NO: 1595 - protein, 12 aa, Homo Sapiens
  ( 251 )...( 263 ): Q13675
AKTKTHFSVRLL

SEQ ID NO: 1596 - protein, 12 aa, Homo Sapiens
  ( 252 )...( 264 ): Q13675
KTKTHFSVRLLK

SEQ ID NO: 1597 - protein, 12 aa, Homo Sapiens
  ( 253 )...( 265 ): Q13675
TKTHFSVRLLKF

SEQ ID NO: 1598 - protein, 12 aa, Homo Sapiens
  ( 268 )...( 280 ): Q13675
KKAAKTLGIVVG

SEQ ID NO: 1599 - protein, 12 aa, Homo Sapiens
  ( 333 )...( 345 ): Q13675
FKKAFQNVLRIQ

SEQ ID NO: 1600 - protein, 12 aa, Homo Sapiens
  ( 134 )...( 146 ): O95800
KTVAVIALHRLR

SEQ ID NO: 1601 - protein, 12 aa, Homo Sapiens
  ( 139 )...( 151 ): O95800
IALHRLRMVLGK

SEQ ID NO: 1602 - protein, 12 aa, Homo Sapiens
  ( 140 )...( 152 ): O95800
ALHRLRMVLGKQ

SEQ ID NO: 1603 - protein, 12 aa, Homo Sapiens
  ( 200 )...( 212 ): Q9UD67
AKTKTHFSVRLL

SEQ ID NO: 1604 - protein, 12 aa, Homo Sapiens
  ( 201 )...( 213 ): Q9UD67
KTKTHFSVRLLK

SEQ ID NO: 1605 - protein, 12 aa, Homo Sapiens
  ( 202 )...( 214 ): Q9UD67
TKTHFSVRLLKF

SEQ ID NO: 1606 - protein, 12 aa, Homo Sapiens
  ( 217 )...( 229 ): Q9UD67
KKAAKTLGIVVG

SEQ ID NO: 1607 - protein, 12 aa, Homo Sapiens
  ( 282 )...( 294 ): Q9UD67
FKKAFQNVLRIQ

SEQ ID NO: 1608 - protein, 12 aa, Homo Sapiens
  ( 251 )...( 263 ): Q9UD63
AKTKTHFSVRLL

SEQ ID NO: 1609 - protein, 12 aa, Homo Sapiens
  ( 252 )...( 264 ): Q9UD63
KTKTHFSVRLLK

SEQ ID NO: 1610 - protein, 12 aa, Homo Sapiens
  ( 253 )...( 265 ): Q9UD63
TKTHFSVRLLKF

SEQ ID NO: 1611 - protein, 12 aa, Homo Sapiens
  ( 268 )...( 280 ): Q9UD63
KKAAKTLGIVVG

SEQ ID NO: 1612 - protein, 12 aa, Homo Sapiens
  ( 251 )...( 263 ): O60451
AKTKTHFSVRLL

SEQ ID NO: 1613 - protein, 12 aa, Homo Sapiens
  ( 252 )...( 264 ): O60451
KTKTHFSVRLLK

SEQ ID NO: 1614 - protein, 12 aa, Homo Sapiens
  ( 253 )...( 265 ): O60451
TKTHFSVRLLKF

SEQ ID NO: 1615 - protein, 12 aa, Homo Sapiens
  ( 268 )...( 280 ): O60451
KKAAKTLGIVVG

SEQ ID NO: 1616 - protein, 12 aa, Homo Sapiens
  ( 333 )...( 345 ): O60451
FKKAFQNVLRIQ

SEQ ID NO: 1617 - protein, 12 aa, Homo Sapiens
  ( 148 )...( 160 ): Q9NZR3
SKRRVTVMISIV

SEQ ID NO: 1618 - protein, 12 aa, Homo Sapiens
  ( 149 )...( 161 ): Q9NZR3
KRRVTVMISIVW

SEQ ID NO: 1619 - protein, 12 aa, Homo Sapiens
  ( 207 )...( 219 ): Q9NZR3
LVYIKIYIVLRR

SEQ ID NO: 1620 - protein, 12 aa, Homo Sapiens
  ( 208 )...( 220 ): Q9NZR3
VYIKIYIVLRRR

SEQ ID NO: 1621 - protein, 12 aa, Homo Sapiens
  ( 210 )...( 222 ): Q9NZR3
IKIYIVLRRRRK

SEQ ID NO: 1622 - protein, 12 aa, Homo Sapiens
  ( 134 )...( 146 ): Q9P2Q4
KRTPKHAGIMIT

SEQ ID NO: 1623 - protein, 12 aa, Homo Sapiens
  ( 198 )...( 210 ): Q9P2Q4
LILYYKIYRAAK

SEQ ID NO: 1624 - protein, 12 aa, Homo Sapiens
  ( 199 )...( 211 ): Q9P2Q4
ILYYKIYRAAKT

SEQ ID NO: 1625 - protein, 12 aa, Homo Sapiens
  ( 200 )...( 212 ): Q9P2Q4
LYYKIYRAAKTL

SEQ ID NO: 1626 - protein, 12 aa, Homo Sapiens
  ( 203 )...( 215 ): Q9P2Q4
KIYRAAKTLYHK

SEQ ID NO: 1627 - protein, 12 aa, Homo Sapiens
  ( 99 )...( 111 ): Q9P1X9
VTKPLTYPVKRT

SEQ ID NO: 1628 - protein, 12 aa, Homo Sapiens
  ( 100 )...( 112 ): Q9P1X9
TKPLTYPVKRTT

SEQ ID NO: 1629 - protein, 12 aa, Homo Sapiens
  ( 101 )...( 113 ): Q9P1X9
KPLTYPVKRTTK

SEQ ID NO: 1630 - protein, 12 aa, Homo Sapiens
  ( 103 )...( 115 ): Q9P1X9
LTYPVKRTTKMA

SEQ ID NO: 1631 - protein, 12 aa, Homo Sapiens
  ( 331 )...( 343 ): Q9P1X9
KQNIVARKIVKM

SEQ ID NO: 1632 - protein, 12 aa, Homo Sapiens
  ( 332 )...( 344 ): Q9P1X9
QNIVARKIVKMT

SEQ ID NO: 1633 - protein, 12 aa, Homo Sapiens
  ( 333 )...( 345 ): Q9P1X9
NIVARKIVKMTK

SEQ ID NO: 1634 - protein, 12 aa, Homo Sapiens
  ( 334 )...( 346 ): Q9P1X9
IVARKIVKMTKQ

SEQ ID NO: 1635 - protein, 12 aa, Homo Sapiens
  ( 335 )...( 347 ): Q9P1X9
VARKIVKMTKQP

SEQ ID NO: 1636 - protein, 12 aa, Homo Sapiens
  ( 336 )...( 348 ): Q9P1X9
ARKIVKMTKQPA

SEQ ID NO: 1637 - protein, 12 aa, Homo Sapiens
  ( 355 )...( 367 ): Q9P1X9
REKKVTRTILAI

SEQ ID NO: 1638 - protein, 12 aa, Homo Sapiens
  ( 357 )...( 369 ): Q9P1X9
KKVTRTILAILL

SEQ ID NO: 1639 - protein, 12 aa, Homo Sapiens
  ( 418 )...( 430 ): Q9P1X9
NATFKKTFKHLL

SEQ ID NO: 1640 - protein, 12 aa, Homo Sapiens
  ( 419 )...( 431 ): Q9P1X9
ATFKKTFKHLLM

SEQ ID NO: 1641 - protein, 12 aa, Homo Sapiens
  ( 148 )...( 160 ): Q9UPA9
SKRRVTVMISIV

SEQ ID NO: 1642 - protein, 12 aa, Homo Sapiens
  ( 149 )...( 161 ): Q9UPA9
KRRVTVMISIVW

SEQ ID NO: 1643 - protein, 12 aa, Homo Sapiens
  ( 207 )...( 219 ): Q9UPA9
LVYIKIYIVLRR

SEQ ID NO: 1644 - protein, 12 aa, Homo Sapiens
  ( 208 )...( 220 ): Q9UPA9
VYIKIYIVLRRR

SEQ ID NO: 1645 - protein, 12 aa, Homo Sapiens
  ( 210 )...( 222 ): Q9UPA9
IKIYIVLRRRRK

SEQ ID NO: 1646 - protein, 12 aa, Homo Sapiens
  ( 159 )...( 171 ): Q9UL61
GRHLVSRIIIAK

SEQ ID NO: 1647 - protein, 12 aa, Homo Sapiens
  ( 325 )...( 337 ): Q9UL61
LLITFFVRRVKG

SEQ ID NO: 1648 - protein, 12 aa, Homo Sapiens
  ( 326 )...( 338 ): Q9UL61
LITFFVRRVKGT

SEQ ID NO: 1649 - protein, 12 aa, Homo Sapiens
  ( 1046 )...( 1058 ): Q9UL61
VMRRLHLIVTRQ

SEQ ID NO: 1650 - protein, 12 aa, Homo Sapiens
  ( 1065 )...( 1077 ): Q9UL61
VKVFWRVTLNKT

SEQ ID NO: 1651 - protein, 12 aa, Homo Sapiens
  ( 1066 )...( 1078 ): Q9UL61
KVFWRVTLNKTV

SEQ ID NO: 1652 - protein, 12 aa, Homo Sapiens
  ( 1166 )...( 1178 ): Q9UL61
RLAVAHKKATLI

SEQ ID NO: 1653 - protein, 12 aa, Homo Sapiens
  ( 1172 )...( 1184 ): Q9UL61
KKATLISLQVAR

SEQ ID NO: 1654 - protein, 12 aa, Homo Sapiens
  ( 1475 )...( 1487 ): Q9UL61
TLKNKVLSLSVK

SEQ ID NO: 1655 - protein, 12 aa, Homo Sapiens
  ( 1476 )...( 1488 ): Q9UL61
LKNKVLSLSVKG

SEQ ID NO: 1656 - protein, 12 aa, Homo Sapiens
  ( 53 )...( 65 ): O75963
YKKSYLLTLSNK

SEQ ID NO: 1657 - protein, 12 aa, Homo Sapiens
  ( 54 )...( 66 ): O75963
KKSYLLTLSNKF

SEQ ID NO: 1658 - protein, 12 aa, Homo Sapiens
  ( 211 )...( 223 ): O75963
IFRVARVKARKV

SEQ ID NO: 1659 - protein, 12 aa, Homo Sapiens
  ( 322 )...( 334 ): O75963
LIYGLWNKTVRK

SEQ ID NO: 1660 - protein, 12 aa, Homo Sapiens
  ( 71 )...( 83 ): Q9NZH0
VRLPFIKEKEKK

SEQ ID NO: 1661 - protein, 12 aa, Homo Sapiens
  ( 219 )...( 231 ): Q9NZH0
KRWKLNGAFLLI

SEQ ID NO: 1662 - protein, 12 aa, Homo Sapiens
  ( 49 )...( 61 ): Q9NRB8
SLVIAAVIKNRK

SEQ ID NO: 1663 - protein, 12 aa, Homo Sapiens
  ( 50 )...( 62 ): Q9NRB8
LVIAAVIKNRKF

SEQ ID NO: 1664 - protein, 12 aa, Homo Sapiens
  ( 51 )...( 63 ): Q9NRB8
VIAAVIKNRKFH

SEQ ID NO: 1665 - protein, 12 aa, Homo Sapiens
  ( 95 )...( 107 ): Q9NRB8
KTLTVNRWFLRQ

SEQ ID NO: 1666 - protein, 12 aa, Homo Sapiens
  ( 137 )...( 149 ): Q9NRB8
HSNLTKKRVTLL

SEQ ID NO: 1667 - protein, 12 aa, Homo Sapiens
  ( 138 )...( 150 ): Q9NRB8
SNLTKKRVTLLI

SEQ ID NO: 1668 - protein, 12 aa, Homo Sapiens
  ( 139 )...( 151 ): Q9NRB8
NLTKKRVTLLIL

SEQ ID NO: 1669 - protein, 12 aa, Homo Sapiens
  ( 140 )...( 152 ): Q9NRB8
LTKKRVTLLILL

SEQ ID NO: 1670 - protein, 12 aa, Homo Sapiens
  ( 141 )...( 153 ): Q9NRB8
TKKRVTLLILLV

SEQ ID NO: 1671 - protein, 12 aa, Homo Sapiens
  ( 142 )...( 154 ): Q9NRB8
KKRVTLLILLVW

SEQ ID NO: 1672 - protein, 12 aa, Homo Sapiens
  ( 207 )...( 219 ): Q9NRB8
LRIYVYVKRKTN

SEQ ID NO: 1673 - protein, 12 aa, Homo Sapiens
  ( 208 )...( 220 ): Q9NRB8
RIYVYVKRKTNV

SEQ ID NO: 1674 - protein, 12 aa, Homo Sapiens
  ( 209 )...( 221 ): Q9NRB8
IYVYVKRKTNVL

SEQ ID NO: 1675 - protein, 12 aa, Homo Sapiens
  ( 210 )...( 222 ): Q9NRB8
YVYVKRKTNVLS

SEQ ID NO: 1676 - protein, 12 aa, Homo Sapiens
  ( 211 )...( 223 ): Q9NRB8
VYVKRKTNVLSP

SEQ ID NO: 1677 - protein, 12 aa, Homo Sapiens
  ( 89 )...( 101 ): Q9HB60
VIVSFKVNKQLK

SEQ ID NO: 1678 - protein, 12 aa, Homo Sapiens
  ( 90 )...( 102 ): Q9HB60
IVSFKVNKQLKT

SEQ ID NO: 1679 - protein, 12 aa, Homo Sapiens
  ( 91 )...( 103 ): Q9HB60
VSFKVNKQLKTV

SEQ ID NO: 1680 - protein, 12 aa, Homo Sapiens
  ( 143 )...( 155 ): Q9BZK1
LKRTPRRIKAII

SEQ ID NO: 1681 - protein, 12 aa, Homo Sapiens
  ( 144 )...( 156 ): Q9BZK1
KRTPRRIKAIII

SEQ ID NO: 1682 - protein, 12 aa, Homo Sapiens
  ( 145 )...( 157 ): Q9BZK1
RTPRRIKAIIIT

SEQ ID NO: 1683 - protein, 12 aa, Homo Sapiens
  ( 146 )...( 158 ): Q9BZK1
TPRRIKAIIITV

SEQ ID NO: 1684 - protein, 12 aa, Homo Sapiens
  ( 147 )...( 159 ): Q9BZK1
PRRIKAIIITVW

SEQ ID NO: 1685 - protein, 12 aa, Homo Sapiens
  ( 148 )...( 160 ): Q9BZK1
RRIKAIIITVWV

SEQ ID NO: 1686 - protein, 12 aa, Homo Sapiens
  ( 214 )...( 226 ): Q9BZK1
LVYVRIYQIAKR

SEQ ID NO: 1687 - protein, 12 aa, Homo Sapiens
  ( 190 )...( 202 ): Q9BZK0
LVYLRIYLIAKR

SEQ ID NO: 1688 - protein, 12 aa, Homo Sapiens
  ( 121 )...( 133 ): Q9BXA5
KYPFREHLLQKK

SEQ ID NO: 1689 - protein, 12 aa, Homo Sapiens
  ( 202 )...( 214 ): Q9BXA5
FYYKIALFLKQR

SEQ ID NO: 1690 - protein, 12 aa, Homo Sapiens
  ( 203 )...( 215 ): Q9BXA5
YYKIALFLKQRN

SEQ ID NO: 1691 - protein, 12 aa, Homo Sapiens
  ( 204 )...( 216 ): Q9BXA5
YKIALFLKQRNR

SEQ ID NO: 1692 - protein, 12 aa, Homo Sapiens
  ( 205 )...( 217 ): Q9BXA5
KIALFLKQRNRQ

SEQ ID NO: 1693 - protein, 12 aa, Homo Sapiens
  ( 206 )...( 218 ): Q9BXA5
IALFLKQRNRQV

SEQ ID NO: 1694 - protein, 12 aa, Homo Sapiens
  ( 208 )...( 220 ): Q9BXA5
LFLKQRNRQVAT

SEQ ID NO: 1695 - protein, 12 aa, Homo Sapiens
  ( 59 )...( 71 ): Q9BXA0
VILVMGYQKKLR

SEQ ID NO: 1696 - protein, 12 aa, Homo Sapiens
  ( 60 )...( 72 ): Q9BXA0
ILVMGYQKKLRS

SEQ ID NO: 1697 - protein, 12 aa, Homo Sapiens
  ( 145 )...( 157 ): Q9BXA0
QRPRKLLAEKVV

SEQ ID NO: 1698 - protein, 12 aa, Homo Sapiens
  ( 146 )...( 158 ): Q9BXA0
RPRKLLAEKVVY

SEQ ID NO: 1699 - protein, 12 aa, Homo Sapiens
  ( 233 )...( 245 ): Q9BXA0
QKRKALKTTIIP

SEQ ID NO: 1700 - protein, 12 aa, Homo Sapiens
  ( 234 )...( 246 ): Q9BXA0
KRKALKTTIIPI

SEQ ID NO: 1701 - protein, 12 aa, Homo Sapiens
  ( 235 )...( 247 ): Q9BXA0
RKALKTTIIPIL

SEQ ID NO: 1702 - protein, 12 aa, Homo Sapiens
  ( 15 )...( 27 ): Q9NTT0
TKTRTFFAAKIV

SEQ ID NO: 1703 - protein, 12 aa, Homo Sapiens
  ( 16 )...( 28 ): Q9NTT0
KTRTFFAAKIVI

SEQ ID NO: 1704 - protein, 12 aa, Homo Sapiens
  ( 43 )...( 55 ): Q9NTT0
FVFIAALTRYKK

SEQ ID NO: 1705 - protein, 12 aa, Homo Sapiens
  ( 44 )...( 56 ): Q9NTT0
VFIAALTRYKKL

SEQ ID NO: 1706 - protein, 12 aa, Homo Sapiens
  ( 45 )...( 57 ): Q9NTT0
FIAALTRYKKLR

SEQ ID NO: 1707 - protein, 12 aa, Homo Sapiens
  ( 46 )...( 58 ): Q9NTT0
IAALTRYKKLRN

SEQ ID NO: 1708 - protein, 12 aa, Homo Sapiens
  ( 48 )...( 60 ): Q9NTT0
ALTRYKKLRNLT

SEQ ID NO: 1709 - protein, 12 aa, Homo Sapiens
  ( 51 )...( 63 ): Q9NTT0
RYKKLRNLTNLL

SEQ ID NO: 1710 - protein, 12 aa, Homo Sapiens
  ( 52 )...( 64 ): Q9NTT0
YKKLRNLTNLLI

SEQ ID NO: 1711 - protein, 12 aa, Homo Sapiens
  ( 53 )...( 65 ): Q9NTT0
KKLRNLTNLLIA

SEQ ID NO: 1712 - protein, 12 aa, Homo Sapiens
  ( 241 )...( 253 ): Q9NTT0
RRKTVLVLMCIL

SEQ ID NO: 1713 - protein, 12 aa, Homo Sapiens
  ( 157 )...( 169 ): Q9H573
IVRYTKMKTATN

SEQ ID NO: 1714 - protein, 12 aa, Homo Sapiens
  ( 158 )...( 170 ): Q9H573
VRYTKMKTATNI

SEQ ID NO: 1715 - protein, 12 aa, Homo Sapiens
  ( 318 )...( 330 ): Q9H573
LMILRLKSVRML

SEQ ID NO: 1716 - protein, 12 aa, Homo Sapiens
  ( 339 )...( 351 ): Q9H573
LRRITRMVLVVV

SEQ ID NO: 1717 - protein, 12 aa, Homo Sapiens
  ( 340 )...( 352 ): Q9H573
RRITRMVLVVVA

SEQ ID NO: 1718 - protein, 12 aa, Homo Sapiens
  ( 344 )...( 356 ): Q9H1N4
KKAAKTLAIVVG

SEQ ID NO: 1719 - protein, 12 aa, Homo Sapiens
  ( 87 )...( 99 ): Q9BYZ0
PFKYQSLLTKNK

SEQ ID NO: 1720 - protein, 12 aa, Homo Sapiens
  ( 88 )...( 100 ): Q9BYZ0
FKYQSLLTKNKA

SEQ ID NO: 1721 - protein, 12 aa, Homo Sapiens
  ( 91 )...( 103 ): Q9BYZ0
QSLLTKNKARVI

SEQ ID NO: 1722 - protein, 12 aa, Homo Sapiens
  ( 92 )...( 104 ): Q9BYZ0
SLLTKNKARVII

SEQ ID NO: 1723 - protein, 12 aa, Homo Sapiens
  ( 93 )...( 105 ): Q9BYZ0
LLTKNKARVIIL

SEQ ID NO: 1724 - protein, 12 aa, Homo Sapiens
  ( 94 )...( 106 ): Q9BYZ0
LTKNKARVIILM

SEQ ID NO: 1725 - protein, 12 aa, Homo Sapiens
  ( 95 )...( 107 ): Q9BYZ0
TKNKARVIILMV

SEQ ID NO: 1726 - protein, 12 aa, Homo Sapiens
  ( 96 )...( 108 ): Q9BYZ0
KNKARVIILMVW

SEQ ID NO: 1727 - protein, 12 aa, Homo Sapiens
  ( 251 )...( 263 ): Q13729
AKTKTHFSVRLL

SEQ ID NO: 1728 - protein, 12 aa, Homo Sapiens
  ( 252 )...( 264 ): Q13729
KTKTHFSVRLLK

SEQ ID NO: 1729 - protein, 12 aa, Homo Sapiens
  ( 253 )...( 265 ): Q13729
TKTHFSVRLLKF

SEQ ID NO: 1730 - protein, 12 aa, Homo Sapiens
  ( 268 )...( 280 ): Q13729
KKAAKTLGIVVG

SEQ ID NO: 1731 - protein, 12 aa, Homo Sapiens
  ( 333 )...( 345 ): Q13729
FKKAFQNVLRIQ

SEQ ID NO: 1732 - protein, 12 aa, Homo Sapiens
  ( 320 )...( 332 ): Q9NSD7
RLSKVTKSVTIV

SEQ ID NO: 1733 - protein, 12 aa, Homo Sapiens
  ( 397 )...( 409 ): Q9NSD7
RKALKSLLWRIA

SEQ ID NO: 1734 - protein, 12 aa, Homo Sapiens
  ( 398 )...( 410 ): Q9NSD7
KALKSLLWRIAS

SEQ ID NO: 1735 - protein, 12 aa, Homo Sapiens
  ( 206 )...( 218 ): Q13167
VYARIYVVLKQR

SEQ ID NO: 1736 - protein, 12 aa, Homo Sapiens
  ( 160 )...( 172 ): Q9UE21
AIVHPVKSLKLR

SEQ ID NO: 1737 - protein, 12 aa, Homo Sapiens
  ( 161 )...( 173 ): Q9UE21
IVHPVKSLKLRR

SEQ ID NO: 1738 - protein, 12 aa, Homo Sapiens
  ( 241 )...( 253 ): Q9UE21
LLIIRSLRQGLR

SEQ ID NO: 1739 - protein, 12 aa, Homo Sapiens
  ( 242 )...( 254 ): Q9UE21
LIIRSLRQGLRV

SEQ ID NO: 1740 - protein, 12 aa, Homo Sapiens
  ( 255 )...( 267 ): Q9UE21
KRLKTKAVRMIA

SEQ ID NO: 1741 - protein, 12 aa, Homo Sapiens
  ( 256 )...( 268 ): Q9UE21
RLKTKAVRMIAI

SEQ ID NO: 1742 - protein, 12 aa, Homo Sapiens
  ( 257 )...( 269 ): Q9UE21
LKTKAVRMIAIV

SEQ ID NO: 1743 - protein, 12 aa, Homo Sapiens
  ( 258 )...( 270 ): Q9UE21
KTKAVRMIAIVL

SEQ ID NO: 1744 - protein, 12 aa, Homo Sapiens
  ( 91 )...( 103 ): Q9UDZ6
AIVHPVKSLKLR

SEQ ID NO: 1745 - protein, 12 aa, Homo Sapiens
  ( 92 )...( 104 ): Q9UDZ6
IVHPVKSLKLRR

SEQ ID NO: 1746 - protein, 12 aa, Homo Sapiens
  ( 172 )...( 184 ): Q9UDZ6
LLIIRSLRQGLR

SEQ ID NO: 1747 - protein, 12 aa, Homo Sapiens
  ( 173 )...( 185 ): Q9UDZ6
LIIRSLRQGLRV

SEQ ID NO: 1748 - protein, 12 aa, Homo Sapiens
  ( 186 )...( 198 ): Q9UDZ6
KRLKTKAVRMIA

SEQ ID NO: 1749 - protein, 12 aa, Homo Sapiens
  ( 187 )...( 199 ): Q9UDZ6
RLKTKAVRMIAI

SEQ ID NO: 1750 - protein, 12 aa, Homo Sapiens
  ( 188 )...( 200 ): Q9UDZ6
LKTKAVRMIAIV

SEQ ID NO: 1751 - protein, 12 aa, Homo Sapiens
  ( 189 )...( 201 ): Q9UDZ6
KTKAVRMIAIVL

SEQ ID NO: 1752 - protein, 12 aa, Homo Sapiens
  ( 86 )...( 98 ): O00406
KTKITIVKTFNA

SEQ ID NO: 1753 - protein, 12 aa, Homo Sapiens
  ( 719 )...( 731 ): O00406
ALVKVFNTYIRK

SEQ ID NO: 1754 - protein, 12 aa, Homo Sapiens
  ( 803 )...( 815 ): O00406
IVVLVQLCRIKK

SEQ ID NO: 1755 - protein, 12 aa, Homo Sapiens
  ( 804 )...( 816 ): O00406
VVLVQLCRIKKK

SEQ ID NO: 1756 - protein, 12 aa, Homo Sapiens
  ( 805 )...( 817 ): O00406
VLVQLCRIKKKK

SEQ ID NO: 1757 - protein, 12 aa, Homo Sapiens
  ( 806 )...( 818 ): O00406
LVQLCRIKKKKQ

SEQ ID NO: 1758 - protein, 12 aa, Homo Sapiens
  ( 807 )...( 819 ): O00406
VQLCRIKKKKQL

SEQ ID NO: 1759 - protein, 12 aa, Homo Sapiens
  ( 122 )...( 134 ): Q9BPV8
LKIIRPLRNIFL

SEQ ID NO: 1760 - protein, 12 aa, Homo Sapiens
  ( 123 )...( 135 ): Q9BPV8
KIIRPLRNIFLK

SEQ ID NO: 1761 - protein, 12 aa, Homo Sapiens
  ( 124 )...( 136 ): Q9BPV8
IIRPLRNIFLKK

SEQ ID NO: 1762 - protein, 12 aa, Homo Sapiens
  ( 130 )...( 142 ): Q9BPV8
NIFLKKPVFAKT

SEQ ID NO: 1763 - protein, 12 aa, Homo Sapiens
  ( 131 )...( 143 ): Q9BPV8
IFLKKPVFAKTV

SEQ ID NO: 1764 - protein, 12 aa, Homo Sapiens
  ( 132 )...( 144 ): Q9BPV8
FLKKPVFAKTVS

SEQ ID NO: 1765 - protein, 12 aa, Homo Sapiens
  ( 133 )...( 145 ): Q9BPV8
LKKPVFAKTVSI

SEQ ID NO: 1766 - protein, 12 aa, Homo Sapiens
  ( 134 )...( 146 ): Q9BPV8
KKPVFAKTVSIF

SEQ ID NO: 1767 - protein, 12 aa, Homo Sapiens
  ( 193 )...( 205 ): Q9BY21
SKLKSPLGVKWH

SEQ ID NO: 1768 - protein, 12 aa, Homo Sapiens
  ( 194 )...( 206 ): Q9BY21
KLKSPLGVKWHT

SEQ ID NO: 1769 - protein, 12 aa, Homo Sapiens
  ( 150 )...( 162 ): Q96RV1
VVYPFKPKLTIK

SEQ ID NO: 1770 - protein, 12 aa, Homo Sapiens
  ( 151 )...( 163 ): Q96RV1
VYPFKPKLTIKT

SEQ ID NO: 1771 - protein, 12 aa, Homo Sapiens
  ( 152 )...( 164 ): Q96RV1
YPFKPKLTIKTA

SEQ ID NO: 1772 - protein, 12 aa, Homo Sapiens
  ( 153 )...( 165 ): Q96RV1
PFKPKLTIKTAF

SEQ ID NO: 1773 - protein, 12 aa, Homo Sapiens
  ( 154 )...( 166 ): Q96RV1
FKPKLTIKTAFV

SEQ ID NO: 1774 - protein, 12 aa, Homo Sapiens
  ( 155 )...( 167 ): Q96RV1
KPKLTIKTAFVI

SEQ ID NO: 1775 - protein, 12 aa, Homo Sapiens
  ( 265 )...( 277 ): Q96RV1
WHVVSRKKQKII

SEQ ID NO: 1776 - protein, 12 aa, Homo Sapiens
  ( 267 )...( 279 ): Q96RV1
VVSRKKQKIIKM

SEQ ID NO: 1777 - protein, 12 aa, Homo Sapiens
  ( 268 )...( 280 ): Q96RV1
VSRKKQKIIKML

SEQ ID NO: 1778 - protein, 12 aa, Homo Sapiens
  ( 269 )...( 281 ): Q96RV1
SRKKQKIIKMLL

SEQ ID NO: 1779 - protein, 12 aa, Homo Sapiens
  ( 270 )...( 282 ): Q96RV1
RKKQKIIKMLLI

SEQ ID NO: 1780 - protein, 12 aa, Homo Sapiens
  ( 271 )...( 283 ): Q96RV1
KKQKIIKMLLIV

SEQ ID NO: 1781 - protein, 12 aa, Homo Sapiens
  ( 272 )...( 284 ): Q96RV1
KQKIIKMLLIVA

SEQ ID NO: 1782 - protein, 12 aa, Homo Sapiens
  ( 133 )...( 145 ): Q9BWH1
FIIIKVKSSGIR

SEQ ID NO: 1783 - protein, 12 aa, Homo Sapiens
  ( 134 )...( 146 ): Q9BWH1
IIIKVKSSGIRV

SEQ ID NO: 1784 - protein, 12 aa, Homo Sapiens
  ( 135 )...( 147 ): Q9BWH1
IIKVKSSGIRVG

SEQ ID NO: 1785 - protein, 12 aa, Homo Sapiens
  ( 155 )...( 167 ): Q9BWH1
KKVTRMVSIVVA

SEQ ID NO: 1786 - protein, 12 aa, Homo Sapiens
  ( 223 )...( 235 ): Q9BWH1
KKSFQNVLCLVK

SEQ ID NO: 1787 - protein, 12 aa, Homo Sapiens
  ( 104 )...( 116 ): Q9BXC2
SKLKSPLGVKWH

SEQ ID NO: 1788 - protein, 12 aa, Homo Sapiens
  ( 105 )...( 117 ): Q9BXC2
KLKSPLGVKWHT

SEQ ID NO: 1789 - protein, 12 aa, Homo Sapiens
  ( 244 )...( 256 ): O95977
RKARRLLKTVLM

SEQ ID NO: 1790 - protein, 12 aa, Homo Sapiens
  ( 245 )...( 257 ): O95977
KARRLLKTVLMI

SEQ ID NO: 1791 - protein, 12 aa, Homo Sapiens
  ( 246 )...( 258 ): O95977
ARRLLKTVLMIL

SEQ ID NO: 1792 - protein, 12 aa, Homo Sapiens
  ( 247 )...( 259 ): O95977
RRLLKTVLMILL

SEQ ID NO: 1793 - protein, 12 aa, Homo Sapiens
  ( 81 )...( 93 ): Q9NZG5
TKKRSLLGTQVF

SEQ ID NO: 1794 - protein, 12 aa, Homo Sapiens
  ( 82 )...( 94 ): Q9NZG5
KKRSLLGTQVFF

SEQ ID NO: 1795 - protein, 12 aa, Homo Sapiens
  ( 236 )...( 248 ): Q9NZG5
KRWRKHGVFVLL

SEQ ID NO: 1796 - protein, 12 aa, Homo Sapiens
  ( 228 )...( 240 ): Q9H244
KVPRKKVNVKVF

SEQ ID NO: 1797 - protein, 12 aa, Homo Sapiens
  ( 229 )...( 241 ): Q9H244
VPRKKVNVKVFI

SEQ ID NO: 1798 - protein, 12 aa, Homo Sapiens
  ( 230 )...( 242 ): Q9H244
PRKKVNVKVFII

SEQ ID NO: 1799 - protein, 12 aa, Homo Sapiens
  ( 231 )...( 243 ): Q9H244
RKKVNVKVFIII

SEQ ID NO: 1800 - protein, 12 aa, Homo Sapiens
  ( 232 )...( 244 ): Q9H244
KKVNVKVFIIIA

SEQ ID NO: 1801 - protein, 12 aa, Homo Sapiens
  ( 221 )...( 233 ): Q9IP67
RHKGRIVRVLIA

SEQ ID NO: 1802 - protein, 12 aa, Homo Sapiens
  ( 222 )...( 234 ): Q9IP67
HKGRIVRVLIAV

SEQ ID NO: 1803 - protein, 12 aa, Homo Sapiens
  ( 223 )...( 235 ): Q9IP67
KGRIVRVLIAVV

SEQ ID NO: 1804 - protein, 12 aa, Homo Sapiens
  ( 221 )...( 233 ): Q9IP66
RHKGRIVRVLIA

SEQ ID NO: 1805 - protein, 12 aa, Homo Sapiens
  ( 222 )...( 234 ): Q9IP66
HKGRIVRVLIAV

SEQ ID NO: 1806 - protein, 12 aa, Rattus Norvegicus
  ( 405 )...( 417 ): 5H1A_RAT
KDFQNAFKKIIK

SEQ ID NO: 1807 - protein, 12 aa, Rattus Norvegicus
  ( 407 )...( 419 ): 5H1A_RAT
FQNAFKKIIKCK

SEQ ID NO: 1808 - protein, 12 aa, Rattus Norvegicus
  ( 408 )...( 420 ): 5H1A_RAT
QNAFKKIIKCKF

SEQ ID NO: 1809 - protein, 12 aa, Rattus Norvegicus
  ( 65 )...( 77 ): 5H1B_RAT
FVIATVYRTRKL

SEQ ID NO: 1810 - protein, 12 aa, Rattus Norvegicus
  ( 66 )...( 78 ): 5H1B_RAT
VIATVYRTRKLH

SEQ ID NO: 1811 - protein, 12 aa, Rattus Norvegicus
  ( 67 )...( 79 ): 5H1B_RAT
IATVYRTRKLHT

SEQ ID NO: 1812 - protein, 12 aa, Rattus Norvegicus
  ( 293 )...( 305 ): 5H1B_RAT
ALLEKKKLMAAR

SEQ ID NO: 1813 - protein, 12 aa, Rattus Norvegicus
  ( 306 )...( 318 ): 5H1B_RAT
RKATKTLGIILG

SEQ ID NO: 1814 - protein, 12 aa, Rattus Norvegicus
  ( 372 )...( 384 ): 5H1B_RAT
FKQAFHKLIRFK

SEQ ID NO: 1815 - protein, 12 aa, Rattus Norvegicus
  ( 65 )...( 77 ): 5H1B_SPAEH
FVIATVYRTRKL

SEQ ID NO: 1816 - protein, 12 aa, Rattus Norvegicus
  ( 66 )...( 78 ): 5H1B_SPAEH
VIATVYRTRKLH

SEQ ID NO: 1817 - protein, 12 aa, Rattus Norvegicus
  ( 67 )...( 79 ): 5H1B_SPAEH
IATVYRTRKLHT

SEQ ID NO: 1818 - protein, 12 aa, Rattus Norvegicus
  ( 293 )...( 305 ): 5H1B_SPAEH
ALLEKKKLMAAR

SEQ ID NO: 1819 - protein, 12 aa, Rattus Norvegicus
  ( 306 )...( 318 ): 5H1B_SPAEH
RKATKTLGIILG

SEQ ID NO: 1820 - protein, 12 aa, Rattus Norvegicus
  ( 372 )...( 384 ): 5H1B_SPAEH
FKQAFHKLIRFK

SEQ ID NO: 1821 - protein, 12 aa, Rattus Norvegicus
  ( 294 )...( 306 ): 5H1D_RAT
RKATKTLGIILG

SEQ ID NO: 1822 - protein, 12 aa, Rattus Norvegicus
  ( 188 )...( 200 ): 5H2A_RAT
SRTKAFLKIIAV

SEQ ID NO: 1823 - protein, 12 aa, Rattus Norvegicus
  ( 189 )...( 201 ): 5H2A_RAT
RTKAFLKIIAVW

SEQ ID NO: 1824 - protein, 12 aa, Rattus Norvegicus
  ( 152 )...( 164 ): 5H2B_RAT
RYIAIKKPIQAN

SEQ ID NO: 1825 - protein, 12 aa, Rattus Norvegicus
  ( 235 )...( 247 ): 5H2B_RAT
TYFLTIHALRKK

SEQ ID NO: 1826 - protein, 12 aa, Rattus Norvegicus
  ( 236 )...( 248 ): 5H2B_RAT
YFLTIHALRKKA

SEQ ID NO: 1827 - protein, 12 aa, Rattus Norvegicus
  ( 237 )...( 249 ): 5H2B_RAT
FLTIHALRKKAY

SEQ ID NO: 1828 - protein, 12 aa, Rattus Norvegicus
  ( 238 )...( 250 ): 5H2B_RAT
LTIHALRKKAYL

SEQ ID NO: 1829 - protein, 12 aa, Rattus Norvegicus
  ( 239 )...( 251 ): 5H2B_RAT
TIHALRKKAYLV

SEQ ID NO: 1830 - protein, 12 aa, Rattus Norvegicus
  ( 240 )...( 252 ): 5H2B_RAT
IHALRKKAYLVR

SEQ ID NO: 1831 - protein, 12 aa, Rattus Norvegicus
  ( 167 )...( 179 ): 5H2C_RAT
NSRTKAIMKIAI

SEQ ID NO: 1832 - protein, 12 aa, Rattus Norvegicus
  ( 168 )...( 180 ): 5H2C_RAT
SRTKAIMKIAIV

SEQ ID NO: 1833 - protein, 12 aa, Rattus Norvegicus
  ( 169 )...( 181 ): 5H2C_RAT
RTKAIMKIAIVW

SEQ ID NO: 1834 - protein, 12 aa, Rattus Norvegicus
  ( 240 )...( 252 ): 5H2C_RAT
YVLRRQTLMLLR

SEQ ID NO: 1835 - protein, 12 aa, Rattus Norvegicus
  ( 241 )...( 253 ): 5H2C_RAT
VLRRQTLMLLRG

SEQ ID NO: 1836 - protein, 12 aa, Rattus Norvegicus
  ( 309 )...( 321 ): 5H2C_RAT
KKASKVLGIVFF

SEQ ID NO: 1837 - protein, 12 aa, Rattus Norvegicus
  ( 48 )...( 60 ): 5H4_RAT
RQLRKIKTNYFI

SEQ ID NO: 1838 - protein, 12 aa, Rattus Norvegicus
  ( 49 )...( 61 ): 5H4_RAT
QLRKIKTNYFIV

SEQ ID NO: 1839 - protein, 12 aa, Rattus Norvegicus
  ( 50 )...( 62 ): 5H4_RAT
LRKIKTNYFIVS

SEQ ID NO: 1840 - protein, 12 aa, Rattus Norvegicus
  ( 51 )...( 63 ): 5H4_RAT
RKIKTNYFIVSL

SEQ ID NO: 1841 - protein, 12 aa, Rattus Norvegicus
  ( 154 )...( 166 ): 5H5A_RAT
RKRVSNVMILLT

SEQ ID NO: 1842 - protein, 12 aa, Rattus Norvegicus
  ( 126 )...( 138 ): 5H6_RAT
LLILSPLRYKLR

SEQ ID NO: 1843 - protein, 12 aa, Rattus Norvegicus
  ( 261 )...( 273 ): 5H6_RAT
RKALKASLTLGI

SEQ ID NO: 1844 - protein, 12 aa, Rattus Norvegicus
  ( 112 )...( 124 ): 5H7_RAT
VKKLRQPSNYLI

SEQ ID NO: 1845 - protein, 12 aa, Rattus Norvegicus
  ( 113 )...( 125 ): 5H7_RAT
KKLRQPSNYLIV

SEQ ID NO: 1846 - protein, 12 aa, Rattus Norvegicus
  ( 137 )...( 149 ): A1AA_RAT
IVTQRRGVRALL

SEQ ID NO: 1847 - protein, 12 aa, Rattus Norvegicus
  ( 231 )...( 243 ): A1AA_RAT
QVTLRIHRKNVP

SEQ ID NO: 1848 - protein, 12 aa, Rattus Norvegicus
  ( 268 )...( 280 ): A1AA_RAT
KKAAKTLGIVVG

SEQ ID NO: 1849 - protein, 12 aa, Rattus Norvegicus
  ( 333 )...( 345 ): A1AA_RAT
FKKAFQNVLRIQ

SEQ ID NO: 1850 - protein, 12 aa, Rattus Norvegicus
  ( 152 )...( 164 ): A1AB_RAT
QYPTLVTRRKAI

SEQ ID NO: 1851 - protein, 12 aa, Rattus Norvegicus
  ( 153 )...( 165 ): A1AB_RAT
YPTLVTRRKAIL

SEQ ID NO: 1852 - protein, 12 aa, Rattus Norvegicus
  ( 155 )...( 167 ): A1AB_RAT
TLVTRRKAILAL

SEQ ID NO: 1853 - protein, 12 aa, Rattus Norvegicus
  ( 156 )...( 168 ): A1AB_RAT
LVTRRKAILALL

SEQ ID NO: 1854 - protein, 12 aa, Rattus Norvegicus
  ( 157 )...( 169 ): A1AB_RAT
VTRRKAILALLS

SEQ ID NO: 1855 - protein, 12 aa, Rattus Norvegicus
  ( 158 )...( 170 ): A1AB_RAT
TRRKAILALLSV

SEQ ID NO: 1856 - protein, 12 aa, Rattus Norvegicus
  ( 226 )...( 238 ): A1AB_RAT
VYIVAKRTTKNL

SEQ ID NO: 1857 - protein, 12 aa, Rattus Norvegicus
  ( 279 )...( 291 ): A1AB_RAT
IAVKLFKFSREK

SEQ ID NO: 1858 - protein, 12 aa, Rattus Norvegicus
  ( 290 )...( 302 ): A1AB_RAT
KKAAKTLGIVVG

SEQ ID NO: 1859 - protein, 12 aa, Rattus Norvegicus
  ( 106 )...( 118 ): AA1R_RAT
YLRVKIPLRYKT

SEQ ID NO: 1860 - protein, 12 aa, Rattus Norvegicus
  ( 107 )...( 119 ): AA1R_RAT
LRVKIPLRYKTV

SEQ ID NO: 1861 - protein, 12 aa, Rattus Norvegicus
  ( 108 )...( 120 ): AA1R_RAT
RVKIPLRYKTVV

SEQ ID NO: 1862 - protein, 12 aa, Rattus Norvegicus
  ( 109 )...( 121 ): AA1R_RAT
VKIPLRYKTVVT

SEQ ID NO: 1863 - protein, 12 aa, Rattus Norvegicus
  ( 110 )...( 122 ): AA1R_RAT
KIPLRYKTVVTQ

SEQ ID NO: 1864 - protein, 12 aa, Rattus Norvegicus
  ( 111 )...( 123 ): AA1R_RAT
IPLRYKTVVTQR

SEQ ID NO: 1865 - protein, 12 aa, Rattus Norvegicus
  ( 203 )...( 215 ): AA1R_RAT
VFYLIRKQLNKK

SEQ ID NO: 1866 - protein, 12 aa, Rattus Norvegicus
  ( 204 )...( 216 ): AA1R_RAT
FYLIRKQLNKKV

SEQ ID NO: 1867 - protein, 12 aa, Rattus Norvegicus
  ( 205 )...( 217 ): AA1R_RAT
YLIRKQLNKKVS

SEQ ID NO: 1868 - protein, 12 aa, Rattus Norvegicus
  ( 291 )...( 303 ): AA1R_RAT
RIHKFRVTFLKI

SEQ ID NO: 1869 - protein, 12 aa, Rattus Norvegicus
  ( 292 )...( 304 ): AA2A_RAT
QTFRKIIRTHVL

SEQ ID NO: 1870 - protein, 12 aa, Rattus Norvegicus
  ( 293 )...( 305 ): AA2A_RAT
TFRKIIRTHVLR

SEQ ID NO: 1871 - protein, 12 aa, Rattus Norvegicus
  ( 107 )...( 119 ): AA2B_RAT
IRVPLRYKGLVT

SEQ ID NO: 1872 - protein, 12 aa, Rattus Norvegicus
  ( 35 )...( 47 ): AA3R_RAT
VIWVVKLNRTLR

SEQ ID NO: 1873 - protein, 12 aa, Rattus Norvegicus
  ( 36 )...( 48 ): AA3R_RAT
IWVVKLNRTLRT

SEQ ID NO: 1874 - protein, 12 aa, Rattus Norvegicus
  ( 37 )...( 49 ): AA3R_RAT
WVVKLNRTLRTT

SEQ ID NO: 1875 - protein, 12 aa, Rattus Norvegicus
  ( 38 )...( 50 ): AA3R_RAT
VVKLNRTLRTTT

SEQ ID NO: 1876 - protein, 12 aa, Rattus Norvegicus
  ( 39 )...( 51 ): AA3R_RAT
VKLNRTLRTTTF

SEQ ID NO: 1877 - protein, 12 aa, Rattus Norvegicus
  ( 111 )...( 123 ): AA3R_RAT
YLRVKLTVRYRT

SEQ ID NO: 1878 - protein, 12 aa, Rattus Norvegicus
  ( 112 )...( 124 ): AA3R_RAT
LRVKLTVRYRTV

SEQ ID NO: 1879 - protein, 12 aa, Rattus Norvegicus
  ( 113 )...( 125 ): AA3R_RAT
RVKLTVRYRTVT

SEQ ID NO: 1880 - protein, 12 aa, Rattus Norvegicus
  ( 115 )...( 127 ): AA3R_RAT
KLTVRYRTVTTQ

SEQ ID NO: 1881 - protein, 12 aa, Rattus Norvegicus
  ( 348 )...( 360 ): ACM1_RAT
QLAKRKTFSLVK

SEQ ID NO: 1882 - protein, 12 aa, Rattus Norvegicus
  ( 349 )...( 361 ): ACM1_RAT
LAKRKTFSLVKE

SEQ ID NO: 1883 - protein, 12 aa, Rattus Norvegicus
  ( 361 )...( 373 ): ACM1_RAT
KKAARTLSAILL

SEQ ID NO: 1884 - protein, 12 aa, Rattus Norvegicus
  ( 125 )...( 137 ): ACM2_RAT
VTKPLTYPVKRT

SEQ ID NO: 1885 - protein, 12 aa, Rattus Norvegicus
  ( 126 )...( 138 ): ACM2_RAT
TKPLTYPVKRTT

SEQ ID NO: 1886 - protein, 12 aa, Rattus Norvegicus
  ( 127 )...( 139 ): ACM2_RAT
KPLTYPVKRTTK

SEQ ID NO: 1887 - protein, 12 aa, Rattus Norvegicus
  ( 129 )...( 141 ): ACM2_RAT
LTYPVKRTTKMA

SEQ ID NO: 1888 - protein, 12 aa, Rattus Norvegicus
  ( 357 )...( 369 ): ACM2_RAT
KQNIVARKIVKM

SEQ ID NO: 1889 - protein, 12 aa, Rattus Norvegicus
  ( 358 )...( 370 ): ACM2_RAT
QNIVARKIVKMT

SEQ ID NO: 1890 - protein, 12 aa, Rattus Norvegicus
  ( 359 )...( 371 ): ACM2_RAT
NIVARKIVKMTK

SEQ ID NO: 1891 - protein, 12 aa, Rattus Norvegicus
  ( 360 )...( 372 ): ACM2_RAT
IVARKIVKMTKQ

SEQ ID NO: 1892 - protein, 12 aa, Rattus Norvegicus
  ( 361 )...( 373 ): ACM2_RAT
VARKIVKMTKQP

SEQ ID NO: 1893 - protein, 12 aa, Rattus Norvegicus
  ( 362 )...( 374 ): ACM2_RAT
ARKIVKMTKQPA

SEQ ID NO: 1894 - protein, 12 aa, Rattus Norvegicus
  ( 381 )...( 393 ): ACM2_RAT
REKKVTRTILAI

SEQ ID NO: 1895 - protein, 12 aa, Rattus Norvegicus
  ( 383 )...( 395 ): ACM2_RAT
KKVTRTILAILL

SEQ ID NO: 1896 - protein, 12 aa, Rattus Norvegicus
  ( 444 )...( 456 ): ACM2_RAT
NATFKKTFKHLL

SEQ ID NO: 1897 - protein, 12 aa, Rattus Norvegicus
  ( 445 )...( 457 ): ACM2_RAT
ATFKKTFKHLLM

SEQ ID NO: 1898 - protein, 12 aa, Rattus Norvegicus
  ( 88 )...( 100 ): ACM3_RAT
VIVAFKVNKQLK

SEQ ID NO: 1899 - protein, 12 aa, Rattus Norvegicus
  ( 89 )...( 101 ): ACM3_RAT
IVAFKVNKQLKT

SEQ ID NO: 1900 - protein, 12 aa, Rattus Norvegicus
  ( 90 )...( 102 ): ACM3_RAT
VAFKVNKQLKTV

SEQ ID NO: 1901 - protein, 12 aa, Rattus Norvegicus
  ( 91 )...( 103 ): ACM3_RAT
AFKVNKQLKTVN

SEQ ID NO: 1902 - protein, 12 aa, Rattus Norvegicus
  ( 458 )...( 470 ): ACM3_RAT
KEATLAKRFALK

SEQ ID NO: 1903 - protein, 12 aa, Rattus Norvegicus
  ( 547 )...( 559 ): ACM3_RAT
NKTFRTTFKTLL

SEQ ID NO: 1904 - protein, 12 aa, Rattus Norvegicus
  ( 548 )...( 560 ): ACM3_RAT
KTFRTTFKTLLL

SEQ ID NO: 1905 - protein, 12 aa, Rattus Norvegicus
  ( 233 )...( 245 ): ACM4_RAT
PKEKKAKTLAFL

SEQ ID NO: 1906 - protein, 12 aa, Rattus Norvegicus
  ( 236 )...( 248 ): ACM4_RAT
KKAKTLAFLKSP

SEQ ID NO: 1907 - protein, 12 aa, Rattus Norvegicus
  ( 237 )...( 249 ): ACM4_RAT
KAKTLAFLKSPL

SEQ ID NO: 1908 - protein, 12 aa, Rattus Norvegicus
  ( 239 )...( 251 ): ACM4_RAT
KTLAFLKSPLMK

SEQ ID NO: 1909 - protein, 12 aa, Rattus Norvegicus
  ( 244 )...( 256 ): ACM4_RAT
LKSPLMKPSIKK

SEQ ID NO: 1910 - protein, 12 aa, Rattus Norvegicus
  ( 335 )...( 347 ): ACM4_RAT
ASKWSKIQIVTK

SEQ ID NO: 1911 - protein, 12 aa, Rattus Norvegicus
  ( 336 )...( 348 ): ACM4_RAT
SKWSKIQIVTKQ

SEQ ID NO: 1912 - protein, 12 aa, Rattus Norvegicus
  ( 395 )...( 407 ): ACM4_RAT
RKVTRTIFAILL

SEQ ID NO: 1913 - protein, 12 aa, Rattus Norvegicus
  ( 457 )...( 469 ): ACM4_RAT
ATFKKTFRHLLL

SEQ ID NO: 1914 - protein, 12 aa, Rattus Norvegicus
  ( 423 )...( 435 ): ACM5_RAT
HQMTKRKRMVLV

SEQ ID NO: 1915 - protein, 12 aa, Rattus Norvegicus
  ( 424 )...( 436 ): ACM5_RAT
QMTKRKRMVLVK

SEQ ID NO: 1916 - protein, 12 aa, Rattus Norvegicus
  ( 498 )...( 510 ): ACM5_RAT
NRTFRKTFKLLL

SEQ ID NO: 1917 - protein, 12 aa, Rattus Norvegicus
  ( 499 )...( 511 ): ACM5_RAT
RTFRKTFKLLLL

SEQ ID NO: 1918 - protein, 12 aa, Rattus Norvegicus
  ( 326 )...( 338 ): ADMR_RAT
RLLSLVVRYLPK

SEQ ID NO: 1919 - protein, 12 aa, Rattus Norvegicus
  ( 137 )...( 149 ): AG2R_RAT
RLRRTMLVAKVT

SEQ ID NO: 1920 - protein, 12 aa, Rattus Norvegicus
  ( 213 )...( 225 ): AG2R_RAT
TSYTLIWKALKK

SEQ ID NO: 1921 - protein, 12 aa, Rattus Norvegicus
  ( 214 )...( 226 ): AG2R_RAT
SYTLIWKALKKA

SEQ ID NO: 1922 - protein, 12 aa, Rattus Norvegicus
  ( 219 )...( 231 ): AG2R_RAT
WKALKKAYEIQK

SEQ ID NO: 1923 - protein, 12 aa, Rattus Norvegicus
  ( 310 )...( 322 ): AG2R_RAT
KKYFLQLLKYIP

SEQ ID NO: 1924 - protein, 12 aa, Rattus Norvegicus
  ( 314 )...( 326 ): AG2R_RAT
LQLLKYIPPKAK

SEQ ID NO: 1925 - protein, 12 aa, Rattus Norvegicus
  ( 315 )...( 327 ): AG2R_RAT
QLLKYIPPKAKS

SEQ ID NO: 1926 - protein, 12 aa, Rattus Norvegicus
  ( 316 )...( 328 ): AG2R_RAT
LLKYIPPKAKSH

SEQ ID NO: 1927 - protein, 12 aa, Rattus Norvegicus
  ( 137 )...( 149 ): AG2S_RAT
RLRRTMLVAKVT

SEQ ID NO: 1928 - protein, 12 aa, Rattus Norvegicus
  ( 213 )...( 225 ): AG2S_RAT
TSYTLIWKALKK

SEQ ID NO: 1929 - protein, 12 aa, Rattus Norvegicus
  ( 214 )...( 226 ): AG2S_RAT
SYTLIWKALKKA

SEQ ID NO: 1930 - protein, 12 aa, Rattus Norvegicus
  ( 310 )...( 322 ): AG2S_RAT
KKYFLQLLKYIP

SEQ ID NO: 1931 - protein, 12 aa, Rattus Norvegicus
  ( 238 )...( 250 ): APJ_RAT
LRKRRRLLSIIV

SEQ ID NO: 1932 - protein, 12 aa, Rattus Norvegicus
  ( 239 )...( 251 ): APJ_RAT
RKRRRLLSIIVV

SEQ ID NO: 1933 - protein, 12 aa, Rattus Norvegicus
  ( 240 )...( 252 ): APJ_RAT
KRRRLLSIIVVL

SEQ ID NO: 1934 - protein, 12 aa, Rattus Norvegicus
  ( 241 )...( 253 ): APJ_RAT
RRRLLSIIVVLV

SEQ ID NO: 1935 - protein, 12 aa, Rattus Norvegicus
  ( 38 )...( 50 ): CALR_RAT
PFLYLVGRKKLL

SEQ ID NO: 1936 - protein, 12 aa, Rattus Norvegicus
  ( 354 )...( 366 ): CALR_RAT
LNIVRVLVTKMR

SEQ ID NO: 1937 - protein, 12 aa, Rattus Norvegicus
  ( 355 )...( 367 ): CALR_RAT
NIVRVLVTKMRQ

SEQ ID NO: 1938 - protein, 12 aa, Rattus Norvegicus
  ( 356 )...( 368 ): CALR_RAT
IVRVLVTKMRQT

SEQ ID NO: 1939 - protein, 12 aa, Rattus Norvegicus
  ( 357 )...( 369 ): CALR_RAT
VRVLVTKMRQTH

SEQ ID NO: 1940 - protein, 12 aa, Rattus Norvegicus
  ( 436 )...( 448 ): CALR_RAT
QVTLKRQWAQFK

SEQ ID NO: 1941 - protein, 12 aa, Rattus Norvegicus
  ( 437 )...( 449 ): CALR_RAT
VTLKRQWAQFKI

SEQ ID NO: 1942 - protein, 12 aa, Rattus Norvegicus
  ( 438 )...( 450 ): CALR_RAT
TLKRQWAQFKIQ

SEQ ID NO: 1943 - protein, 12 aa, Rattus Norvegicus
  ( 439 )...( 451 ): CALR_RAT
LKRQWAQFKIQW

SEQ ID NO: 1944 - protein, 12 aa, Rattus Norvegicus
  ( 440 )...( 452 ): CALR_RAT
KRQWAQFKIQWS

SEQ ID NO: 1945 - protein, 12 aa, Rattus Norvegicus
  ( 310 )...( 322 ): CGRR_RAT
LNIVRVLITKLK

SEQ ID NO: 1946 - protein, 12 aa, Rattus Norvegicus
  ( 311 )...( 323 ): CGRR_RAT
NIVRVLITKLKV

SEQ ID NO: 1947 - protein, 12 aa, Rattus Norvegicus
  ( 312 )...( 324 ): CGRR_RAT
IVRVLITKLKVT

SEQ ID NO: 1948 - protein, 12 aa, Rattus Norvegicus
  ( 313 )...( 325 ): CGRR_RAT
VRVLITKLKVTH

SEQ ID NO: 1949 - protein, 12 aa, Rattus Norvegicus
  ( 314 )...( 326 ): CGRR_RAT
RVLITKLKVTHQ

SEQ ID NO: 1950 - protein, 12 aa, Rattus Norvegicus
  ( 110 )...( 122 ): CRF1_RAT
KKSKVHYHVAVI

SEQ ID NO: 1951 - protein, 12 aa, Rattus Norvegicus
  ( 288 )...( 300 ): CRF1_RAT
FNIVRILMTKLR

SEQ ID NO: 1952 - protein, 12 aa, Rattus Norvegicus
  ( 289 )...( 301 ): CRF1_RAT
NIVRILMTKLRA

SEQ ID NO: 1953 - protein, 12 aa, Rattus Norvegicus
  ( 290 )...( 302 ): CRF1_RAT
IVRILMTKLRAS

SEQ ID NO: 1954 - protein, 12 aa, Rattus Norvegicus
  ( 291 )...( 303 ): CRF1_RAT
VRILMTKLRAST

SEQ ID NO: 1955 - protein, 12 aa, Rattus Norvegicus
  ( 292 )...( 304 ): CRF1_RAT
RILMTKLRASTT

SEQ ID NO: 1956 - protein, 12 aa, Rattus Norvegicus
  ( 306 )...( 318 ): CRF1_RAT
TIQYRKAVKATL

SEQ ID NO: 1957 - protein, 12 aa, Rattus Norvegicus
  ( 307 )...( 319 ): CRF1_RAT
IQYRKAVKATLV

SEQ ID NO: 1958 - protein, 12 aa, Rattus Norvegicus
  ( 308 )...( 320 ): CRF1_RAT
QYRKAVKATLVL

SEQ ID NO: 1959 - protein, 12 aa, Rattus Norvegicus
  ( 309 )...( 321 ): CRF1_RAT
YRKAVKATLVLL

SEQ ID NO: 1960 - protein, 12 aa, Rattus Norvegicus
  ( 310 )...( 322 ): CRF1_RAT
RKAVKATLVLLP

SEQ ID NO: 1961 - protein, 12 aa, Rattus Norvegicus
  ( 284 )...( 296 ): CRF2_RAT
FNIVRILMTKLR

SEQ ID NO: 1962 - protein, 12 aa, Rattus Norvegicus
  ( 285 )...( 297 ): CRF2_RAT
NIVRILMTKLRA

SEQ ID NO: 1963 - protein, 12 aa, Rattus Norvegicus
  ( 286 )...( 298 ): CRF2_RAT
IVRILMTKLRAS

SEQ ID NO: 1964 - protein, 12 aa, Rattus Norvegicus
  ( 287 )...( 299 ): CRF2_RAT
VRILMTKLRAST

SEQ ID NO: 1965 - protein, 12 aa, Rattus Norvegicus
  ( 288 )...( 300 ): CRF2_RAT
RILMTKLRASTT

SEQ ID NO: 1966 - protein, 12 aa, Rattus Norvegicus
  ( 302 )...( 314 ): CRF2_RAT
TIQYRKAVKATL

SEQ ID NO: 1967 - protein, 12 aa, Rattus Norvegicus
  ( 303 )...( 315 ): CRF2_RAT
IQYRKAVKATLV

SEQ ID NO: 1968 - protein, 12 aa, Rattus Norvegicus
  ( 304 )...( 316 ): CRF2_RAT
QYRKAVKATLVL

SEQ ID NO: 1969 - protein, 12 aa, Rattus Norvegicus
  ( 305 )...( 317 ): CRF2_RAT
YRKAVKATLVLL

SEQ ID NO: 1970 - protein, 12 aa, Rattus Norvegicus
  ( 306 )...( 318 ): CRF2_RAT
RKAVKATLVLLP

SEQ ID NO: 1971 - protein, 12 aa, Rattus Norvegicus
  ( 320 )...( 332 ): ET1R_RAT
FPLHLSRILKKT

SEQ ID NO: 1972 - protein, 12 aa, Rattus Norvegicus
  ( 321 )...( 333 ): ET1R_RAT
PLHLSRILKKTV

SEQ ID NO: 1973 - protein, 12 aa, Rattus Norvegicus
  ( 322 )...( 334 ): ET1R_RAT
LHLSRILKKTVY

SEQ ID NO: 1974 - protein, 12 aa, Rattus Norvegicus
  ( 366 )...( 378 ): ET1R_RAT
PIALYFVSKKFK

SEQ ID NO: 1975 - protein, 12 aa, Rattus Norvegicus
  ( 367 )...( 379 ): ET1R_RAT
IALYFVSKKFKN

SEQ ID NO: 1976 - protein, 12 aa, Rattus Norvegicus
  ( 92 )...( 104 ): ETBR_RAT
RKIEINKTFKYI

SEQ ID NO: 1977 - protein, 12 aa, Rattus Norvegicus
  ( 119 )...( 131 ): ETBR_RAT
NSTLLRIIYKNK

SEQ ID NO: 1978 - protein, 12 aa, Rattus Norvegicus
  ( 208 )...( 220 ): ETBR_RAT
RIKGIGVPKWTA

SEQ ID NO: 1979 - protein, 12 aa, Rattus Norvegicus
  ( 300 )...( 312 ): ETBR_RAT
MLRKKSGMQIAL

SEQ ID NO: 1980 - protein, 12 aa, Rattus Norvegicus
  ( 301 )...( 313 ): ETBR_RAT
LRKKSGMQIALN

SEQ ID NO: 1981 - protein, 12 aa, Rattus Norvegicus
  ( 384 )...( 396 ): ETBR_RAT
IALYLVSKRFKN

SEQ ID NO: 1982 - protein, 12 aa, Rattus Norvegicus
  ( 51 )...( 63 ): FSHR_RAT
LRFVLTKLRVIP

SEQ ID NO: 1983 - protein, 12 aa, Rattus Norvegicus
  ( 52 )...( 64 ): FSHR_RAT
RFVLTKLRVIPK

SEQ ID NO: 1984 - protein, 12 aa, Rattus Norvegicus
  ( 53 )...( 65 ): FSHR_RAT
FVLTKLRVIPKG

SEQ ID NO: 1985 - protein, 12 aa, Rattus Norvegicus
  ( 54 )...( 66 ): FSHR_RAT
VLTKLRVIPKGS

SEQ ID NO: 1986 - protein, 12 aa, Rattus Norvegicus
  ( 55 )...( 67 ): FSHR_RAT
LTKLRVIPKGSF

SEQ ID NO: 1987 - protein, 12 aa, Rattus Norvegicus
  ( 249 )...( 261 ): FSHR_RAT
TYRLKKLPNLDK

SEQ ID NO: 1988 - protein, 12 aa, Rattus Norvegicus
  ( 251 )...( 263 ): FSHR_RAT
RLKKLPNLDKFV

SEQ ID NO: 1989 - protein, 12 aa, Rattus Norvegicus
  ( 567 )...( 579 ): FSHR_RAT
TKIAKRMATLIF

SEQ ID NO: 1990 - protein, 12 aa, Rattus Norvegicus
  ( 568 )...( 580 ): FSHR_RAT
KIAKRMATLIFT

SEQ ID NO: 1991 - protein, 12 aa, Rattus Norvegicus
  ( 596 )...( 608 ): FSHR_RAT
LKVPLITVSKAK

SEQ ID NO: 1992 - protein, 12 aa, Rattus Norvegicus
  ( 597 )...( 609 ): FSHR_RAT
KVPLITVSKAKI

SEQ ID NO: 1993 - protein, 12 aa, Rattus Norvegicus
  ( 53 )...( 65 ): GALR_RAT
VITVLARSKPGK

SEQ ID NO: 1994 - protein, 12 aa, Rattus Norvegicus
  ( 218 )...( 230 ): GALR_RAT
YAKVLNHLHKKL

SEQ ID NO: 1995 - protein, 12 aa, Rattus Norvegicus
  ( 219 )...( 231 ): GALR_RAT
AKVLNHLHKKLK

SEQ ID NO: 1996 - protein, 12 aa, Rattus Norvegicus
  ( 221 )...( 233 ): GALR_RAT
VLNHLHKKLKNM

SEQ ID NO: 1997 - protein, 12 aa, Rattus Norvegicus
  ( 239 )...( 251 ): GALR_RAT
SKKKTAQTVLVV

SEQ ID NO: 1998 - protein, 12 aa, Rattus Norvegicus
  ( 240 )...( 252 ): GALR_RAT
KKKTAQTVLVVV

SEQ ID NO: 1999 - protein, 12 aa, Rattus Norvegicus
  ( 229 )...( 241 ): GALS_RAT
RAKRKVTRMIII

SEQ ID NO: 2000 - protein, 12 aa, Rattus Norvegicus
  ( 230 )...( 242 ): GALS_RAT
AKRKVTRMIIIV

SEQ ID NO: 2001 - protein, 12 aa, Rattus Norvegicus
  ( 231 )...( 243 ): GALS_RAT
KRKVTRMIIIVA

SEQ ID NO: 2002 - protein, 12 aa, Rattus Norvegicus
  ( 232 )...( 244 ): GALS_RAT
RKVTRMIIIVAV

SEQ ID NO: 2003 - protein, 12 aa, Rattus Norvegicus
  ( 290 )...( 302 ): GALS_RAT
IVYALVSKHFRK

SEQ ID NO: 2004 - protein, 12 aa, Rattus Norvegicus
  ( 75 )...( 87 ): GASR_PRANA
IIVVLGLSRRLR

SEQ ID NO: 2005 - protein, 12 aa, Rattus Norvegicus
  ( 324 )...( 336 ): GASR_PRANA
NQAKLLAKKRVV

SEQ ID NO: 2006 - protein, 12 aa, Rattus Norvegicus
  ( 326 )...( 338 ): GASR_PRANA
AKLLAKKRVVRM

SEQ ID NO: 2007 - protein, 12 aa, Rattus Norvegicus
  ( 327 )...( 339 ): GASR_PRANA
KLLAKKRVVRML

SEQ ID NO: 2008 - protein, 12 aa, Rattus Norvegicus
  ( 328 )...( 340 ): GASR_PRANA
LLAKKRVVRMLL

SEQ ID NO: 2009 - protein, 12 aa, Rattus Norvegicus
  ( 329 )...( 341 ): GASR_PRANA
LAKKRVVRMLLV

SEQ ID NO: 2010 - protein, 12 aa, Rattus Norvegicus
  ( 330 )...( 342 ): GASR_PRANA
AKKRVVRMLLVI

SEQ ID NO: 2011 - protein, 12 aa, Rattus Norvegicus
  ( 331 )...( 343 ): GASR_PRANA
KKRVVRMLLVIV

SEQ ID NO: 2012 - protein, 12 aa, Rattus Norvegicus
  ( 332 )...( 344 ): GASR_PRANA
KRVVRMLLVIVL

SEQ ID NO: 2013 - protein, 12 aa, Rattus Norvegicus
  ( 75 )...( 87 ): GASR_RAT
IIVVLGLSRRLR

SEQ ID NO: 2014 - protein, 12 aa, Rattus Norvegicus
  ( 326 )...( 338 ): GASR_RAT
NQAKLLAKKRVV

SEQ ID NO: 2015 - protein, 12 aa, Rattus Norvegicus
  ( 328 )...( 340 ): GASR_RAT
AKLLAKKRVVRM

SEQ ID NO: 2016 - protein, 12 aa, Rattus Norvegicus
  ( 329 )...( 341 ): GASR_RAT
KLLAKKRVVRML

SEQ ID NO: 2017 - protein, 12 aa, Rattus Norvegicus
  ( 330 )...( 342 ): GASR_RAT
LLAKKRVVRMLL

SEQ ID NO: 2018 - protein, 12 aa, Rattus Norvegicus
  ( 331 )...( 343 ): GASR_RAT
LAKKRVVRMLLV

SEQ ID NO: 2019 - protein, 12 aa, Rattus Norvegicus
  ( 332 )...( 344 ): GASR_RAT
AKKRVVRMLLVI

SEQ ID NO: 2020 - protein, 12 aa, Rattus Norvegicus
  ( 333 )...( 345 ): GASR_RAT
KKRVVRMLLVIV

SEQ ID NO: 2021 - protein, 12 aa, Rattus Norvegicus
  ( 334 )...( 346 ): GASR_RAT
KRVVRMLLVIVL

SEQ ID NO: 2022 - protein, 12 aa, Rattus Norvegicus
  ( 312 )...( 324 ): GIPR_RAT
IRILGILVSKLR

SEQ ID NO: 2023 - protein, 12 aa, Rattus Norvegicus
  ( 313 )...( 325 ): GIPR_RAT
RILGILVSKLRT

SEQ ID NO: 2024 - protein, 12 aa, Rattus Norvegicus
  ( 314 )...( 326 ): GIPR_RAT
ILGILVSKLRTR

SEQ ID NO: 2025 - protein, 12 aa, Rattus Norvegicus
  ( 315 )...( 327 ): GIPR_RAT
LGILVSKLRTRQ

SEQ ID NO: 2026 - protein, 12 aa, Rattus Norvegicus
  ( 316 )...( 328 ): GIPR_RAT
GILVSKLRTRQM

SEQ ID NO: 2027 - protein, 12 aa, Rattus Norvegicus
  ( 317 )...( 329 ): GIPR_RAT
ILVSKLRTRQMR

SEQ ID NO: 2028 - protein, 12 aa, Rattus Norvegicus
  ( 325 )...( 337 ): GLP1_RAT
IRVICIVIAKLK

SEQ ID NO: 2029 - protein, 12 aa, Rattus Norvegicus
  ( 326 )...( 338 ): GLP1_RAT
RVICIVIAKLKA

SEQ ID NO: 2030 - protein, 12 aa, Rattus Norvegicus
  ( 331 )...( 343 ): GLP1_RAT
VIAKLKANLMCK

SEQ ID NO: 2031 - protein, 12 aa, Rattus Norvegicus
  ( 332 )...( 344 ): GLP1_RAT
IAKLKANLMCKT

SEQ ID NO: 2032 - protein, 12 aa, Rattus Norvegicus
  ( 345 )...( 357 ): GLP1_RAT
IKCRLAKSTLTL

SEQ ID NO: 2033 - protein, 12 aa, Rattus Norvegicus
  ( 346 )...( 358 ): GLP1_RAT
KCRLAKSTLTLI

SEQ ID NO: 2034 - protein, 12 aa, Rattus Norvegicus
  ( 357 )...( 369 ): GLP2_RAT
IFLKILKLLISK

SEQ ID NO: 2035 - protein, 12 aa, Rattus Norvegicus
  ( 358 )...( 370 ): GLP2_RAT
FLKILKLLISKL

SEQ ID NO: 2036 - protein, 12 aa, Rattus Norvegicus
  ( 359 )...( 371 ): GLP2_RAT
LKILKLLISKLK

SEQ ID NO: 2037 - protein, 12 aa, Rattus Norvegicus
  ( 360 )...( 372 ): GLP2_RAT
KILKLLISKLKA

SEQ ID NO: 2038 - protein, 12 aa, Rattus Norvegicus
  ( 361 )...( 373 ): GLP2_RAT
ILKLLISKLKAH

SEQ ID NO: 2039 - protein, 12 aa, Rattus Norvegicus
  ( 362 )...( 374 ): GLP2_RAT
LKLLISKLKAHQ

SEQ ID NO: 2040 - protein, 12 aa, Rattus Norvegicus
  ( 363 )...( 375 ): GLP2_RAT
KLLISKLKAHQM

SEQ ID NO: 2041 - protein, 12 aa, Rattus Norvegicus
  ( 379 )...( 391 ): GLP2_RAT
YKYRLAKSTLLL

SEQ ID NO: 2042 - protein, 12 aa, Rattus Norvegicus
  ( 380 )...( 392 ): GLP2_RAT
KYRLAKSTLLLI

SEQ ID NO: 2043 - protein, 12 aa, Rattus Norvegicus
  ( 412 )...( 424 ): GLP2_RAT
FSKRIRLFIQLT

SEQ ID NO: 2044 - protein, 12 aa, Rattus Norvegicus
  ( 413 )...( 425 ): GLP2_RAT
SKRIRLFIQLTL

SEQ ID NO: 2045 - protein, 12 aa, Rattus Norvegicus
  ( 414 )...( 426 ): GLP2_RAT
KRIRLFIQLTLS

SEQ ID NO: 2046 - protein, 12 aa, Rattus Norvegicus
  ( 89 )...( 101 ): GLR_RAT
YHKVQHRLVFKR

SEQ ID NO: 2047 - protein, 12 aa, Rattus Norvegicus
  ( 197 )...( 209 ): GLR_RAT
WLLKTRYSQKIG

SEQ ID NO: 2048 - protein, 12 aa, Rattus Norvegicus
  ( 324 )...( 336 ): GLR_RAT
VRIIHLLVAKLR

SEQ ID NO: 2049 - protein, 12 aa, Rattus Norvegicus
  ( 325 )...( 337 ): GLR_RAT
RIIHLLVAKLRA

SEQ ID NO: 2050 - protein, 12 aa, Rattus Norvegicus
  ( 345 )...( 357 ): GLR_RAT
KFRLARSTLTLI

SEQ ID NO: 2051 - protein, 12 aa, Rattus Norvegicus
  ( 27 )...( 39 ): GRHR_RAT
KLPTLTLSGKIR

SEQ ID NO: 2052 - protein, 12 aa, Rattus Norvegicus
  ( 55 )...( 67 ): GRHR_RAT
SFLVKLQRWTQK

SEQ ID NO: 2053 - protein, 12 aa, Rattus Norvegicus
  ( 56 )...( 68 ): GRHR_RAT
FLVKLQRWTQKR

SEQ ID NO: 2054 - protein, 12 aa, Rattus Norvegicus
  ( 69 )...( 81 ): GRHR_RAT
KGKKLSRMKVLL

SEQ ID NO: 2055 - protein, 12 aa, Rattus Norvegicus
  ( 70 )...( 82 ): GRHR_RAT
GKKLSRMKVLLK

SEQ ID NO: 2056 - protein, 12 aa, Rattus Norvegicus
  ( 71 )...( 83 ): GRHR_RAT
KKLSRMKVLLKH

SEQ ID NO: 2057 - protein, 12 aa, Rattus Norvegicus
  ( 72 )...( 84 ): GRHR_RAT
KLSRMKVLLKHL

SEQ ID NO: 2058 - protein, 12 aa, Rattus Norvegicus
  ( 73 )...( 85 ): GRHR_RAT
LSRMKVLLKHLT

SEQ ID NO: 2059 - protein, 12 aa, Rattus Norvegicus
  ( 74 )...( 86 ): GRHR_RAT
SRMKVLLKHLTL

SEQ ID NO: 2060 - protein, 12 aa, Rattus Norvegicus
  ( 75 )...( 87 ): GRHR_RAT
RMKVLLKHLTLA

SEQ ID NO: 2061 - protein, 12 aa, Rattus Norvegicus
  ( 259 )...( 271 ): GRPR_RAT
SRKRLAKTVLVF

SEQ ID NO: 2062 - protein, 12 aa, Rattus Norvegicus
  ( 260 )...( 272 ): GRPR_RAT
RKRLAKTVLVFV

SEQ ID NO: 2063 - protein, 12 aa, Rattus Norvegicus
  ( 261 )...( 273 ): GRPR_RAT
KRLAKTVLVFVG

SEQ ID NO: 2064 - protein, 12 aa, Rattus Norvegicus
  ( 328 )...( 340 ): GRPR_RAT
KSFRKQFNTQLL

SEQ ID NO: 2065 - protein, 12 aa, Rattus Norvegicus
  ( 567 )...( 579 ): LSHR_RAT
KDTKIAKKMAIL

SEQ ID NO: 2066 - protein, 12 aa, Rattus Norvegicus
  ( 569 )...( 581 ): LSHR_RAT
TKIAKKMAILIF

SEQ ID NO: 2067 - protein, 12 aa, Rattus Norvegicus
  ( 570 )...( 582 ): LSHR_RAT
KIAKKMAILIFT

SEQ ID NO: 2068 - protein, 12 aa, Rattus Norvegicus
  ( 217 )...( 229 ): MC4R_RAT
LMARLHIKRIAV

SEQ ID NO: 2069 - protein, 12 aa, Rattus Norvegicus
  ( 218 )...( 230 ): MC4R_RAT
MARLHIKRIAVL

SEQ ID NO: 2070 - protein, 12 aa, Rattus Norvegicus
  ( 83 )...( 95 ): ML1B_RAT
LRIWILVLQARR

SEQ ID NO: 2071 - protein, 12 aa, Rattus Norvegicus
  ( 84 )...( 96 ): ML1B_RAT
RIWILVLQARRK

SEQ ID NO: 2072 - protein, 12 aa, Rattus Norvegicus
  ( 85 )...( 97 ): ML1B_RAT
IWILVLQARRKA

SEQ ID NO: 2073 - protein, 12 aa, Rattus Norvegicus
  ( 86 )...( 98 ): ML1B_RAT
WILVLQARRKAK

SEQ ID NO: 2074 - protein, 12 aa, Rattus Norvegicus
  ( 67 )...( 79 ): NFF1_RAT
IVLKNRHMRTVT

SEQ ID NO: 2075 - protein, 12 aa, Rattus Norvegicus
  ( 149 )...( 161 ): NFF1_RAT
FREKLTLRKALF

SEQ ID NO: 2076 - protein, 12 aa, Rattus Norvegicus
  ( 150 )...( 162 ): NFF1_RAT
REKLTLRKALFT

SEQ ID NO: 2077 - protein, 12 aa, Rattus Norvegicus
  ( 152 )...( 164 ): NFF1_RAT
KLTLRKALFTIA

SEQ ID NO: 2078 - protein, 12 aa, Rattus Norvegicus
  ( 231 )...( 243 ): NFF1_RAT
LIVVMYVRIARK

SEQ ID NO: 2079 - protein, 12 aa, Rattus Norvegicus
  ( 232 )...( 244 ): NFF1_RAT
IVVMYVRIARKL

SEQ ID NO: 2080 - protein, 12 aa, Rattus Norvegicus
  ( 147 )...( 159 ): NFF2_RAT
VVYPFKPKLTVK

SEQ ID NO: 2081 - protein, 12 aa, Rattus Norvegicus
  ( 148 )...( 160 ): NFF2_RAT
VYPFKPKLTVKT

SEQ ID NO: 2082 - protein, 12 aa, Rattus Norvegicus
  ( 149 )...( 161 ): NFF2_RAT
YPFKPKLTVKTA

SEQ ID NO: 2083 - protein, 12 aa, Rattus Norvegicus
  ( 150 )...( 162 ): NFF2_RAT
PFKPKLTVKTAF

SEQ ID NO: 2084 - protein, 12 aa, Rattus Norvegicus
  ( 151 )...( 163 ): NFF2_RAT
FKPKLTVKTAFV

SEQ ID NO: 2085 - protein, 12 aa, Rattus Norvegicus
  ( 152 )...( 164 ): NFF2_RAT
KPKLTVKTAFVM

SEQ ID NO: 2086 - protein, 12 aa, Rattus Norvegicus
  ( 264 )...( 276 ): NFF2_RAT
VSKKKQKVIKML

SEQ ID NO: 2087 - protein, 12 aa, Rattus Norvegicus
  ( 265 )...( 277 ): NFF2_RAT
SKKKQKVIKMLL

SEQ ID NO: 2088 - protein, 12 aa, Rattus Norvegicus
  ( 266 )...( 278 ): NFF2_RAT
KKKQKVIKMLLT

SEQ ID NO: 2089 - protein, 12 aa, Rattus Norvegicus
  ( 267 )...( 279 ): NFF2_RAT
KKQKVIKMLLTV

SEQ ID NO: 2090 - protein, 12 aa, Rattus Norvegicus
  ( 268 )...( 280 ): NFF2_RAT
KQKVIKMLLTVA

SEQ ID NO: 2091 - protein, 12 aa, Rattus Norvegicus
  ( 53 )...( 65 ): NK1R_RAT
VIWIILAHKRMR

SEQ ID NO: 2092 - protein, 12 aa, Rattus Norvegicus
  ( 54 )...( 66 ): NK1R_RAT
IWIILAHKRMRT

SEQ ID NO: 2093 - protein, 12 aa, Rattus Norvegicus
  ( 55 )...( 67 ): NK1R_RAT
WIILAHKRMRTV

SEQ ID NO: 2094 - protein, 12 aa, Rattus Norvegicus
  ( 56 )...( 68 ): NK1R_RAT
IILAHKRMRTVT

SEQ ID NO: 2095 - protein, 12 aa, Rattus Norvegicus
  ( 239 )...( 251 ): NK1R_RAT
QVSAKRKVVKMM

SEQ ID NO: 2096 - protein, 12 aa, Rattus Norvegicus
  ( 240 )...( 252 ): NK1R_RAT
VSAKRKVVKMMI

SEQ ID NO: 2097 - protein, 12 aa, Rattus Norvegicus
  ( 241 )...( 253 ): NK1R_RAT
SAKRKVVKMMIV

SEQ ID NO: 2098 - protein, 12 aa, Rattus Norvegicus
  ( 242 )...( 254 ): NK1R_RAT
AKRKVVKMMIVV

SEQ ID NO: 2099 - protein, 12 aa, Rattus Norvegicus
  ( 239 )...( 251 ): NK2R_RAT
LRHLQAKKKFVK

SEQ ID NO: 2100 - protein, 12 aa, Rattus Norvegicus
  ( 241 )...( 253 ): NK2R_RAT
HLQAKKKFVKAM

SEQ ID NO: 2101 - protein, 12 aa, Rattus Norvegicus
  ( 242 )...( 254 ): NK2R_RAT
LQAKKKFVKAMV

SEQ ID NO: 2102 - protein, 12 aa, Rattus Norvegicus
  ( 243 )...( 255 ): NK2R_RAT
QAKKKFVKAMVL

SEQ ID NO: 2103 - protein, 12 aa, Rattus Norvegicus
  ( 244 )...( 256 ): NK2R_RAT
AKKKFVKAMVLV

SEQ ID NO: 2104 - protein, 12 aa, Rattus Norvegicus
  ( 245 )...( 257 ): NK2R_RAT
KKKFVKAMVLVV

SEQ ID NO: 2105 - protein, 12 aa, Rattus Norvegicus
  ( 246 )...( 258 ): NK2R_RAT
KKFVKAMVLVVL

SEQ ID NO: 2106 - protein, 12 aa, Rattus Norvegicus
  ( 93 )...( 105 ): NK3R_RAT
VIWIILAHKRMR

SEQ ID NO: 2107 - protein, 12 aa, Rattus Norvegicus
  ( 94 )...( 106 ): NK3R_RAT
IWIILAHKRMRT

SEQ ID NO: 2108 - protein, 12 aa, Rattus Norvegicus
  ( 95 )...( 107 ): NK3R_RAT
WIILAHKRMRTV

SEQ ID NO: 2109 - protein, 12 aa, Rattus Norvegicus
  ( 96 )...( 108 ): NK3R_RAT
IILAHKRMRTVT

SEQ ID NO: 2110 - protein, 12 aa, Rattus Norvegicus
  ( 178 )...( 190 ): NK3R_RAT
LKPRLSATATKI

SEQ ID NO: 2111 - protein, 12 aa, Rattus Norvegicus
  ( 179 )...( 191 ): NK3R_RAT
KPRLSATATKIV

SEQ ID NO: 2112 - protein, 12 aa, Rattus Norvegicus
  ( 277 )...( 289 ): NK3R_RAT
QLKAKRKVVKMM

SEQ ID NO: 2113 - protein, 12 aa, Rattus Norvegicus
  ( 278 )...( 290 ): NK3R_RAT
LKAKRKVVKMMI

SEQ ID NO: 2114 - protein, 12 aa, Rattus Norvegicus
  ( 279 )...( 291 ): NK3R_RAT
KAKRKVVKMMII

SEQ ID NO: 2115 - protein, 12 aa, Rattus Norvegicus
  ( 280 )...( 292 ): NK3R_RAT
AKRKVVKMMIIV

SEQ ID NO: 2116 - protein, 12 aa, Rattus Norvegicus
  ( 84 )...( 96 ): NTR1_RAT
VTAFTLARKKSL

SEQ ID NO: 2117 - protein, 12 aa, Rattus Norvegicus
  ( 85 )...( 97 ): NTR1_RAT
TAFTLARKKSLQ

SEQ ID NO: 2118 - protein, 12 aa, Rattus Norvegicus
  ( 87 )...( 99 ): NTR1_RAT
FTLARKKSLQSL

SEQ ID NO: 2119 - protein, 12 aa, Rattus Norvegicus
  ( 185 )...( 197 ): NTR1_RAT
RTKKFISAIWLA

SEQ ID NO: 2120 - protein, 12 aa, Rattus Norvegicus
  ( 70 )...( 82 ): NY5R_RAT
NLLILMAVMKKR

SEQ ID NO: 2121 - protein, 12 aa, Rattus Norvegicus
  ( 71 )...( 83 ): NY5R_RAT
LLILMAVMKKRN

SEQ ID NO: 2122 - protein, 12 aa, Rattus Norvegicus
  ( 72 )...( 84 ): NY5R_RAT
LILMAVMKKRNQ

SEQ ID NO: 2123 - protein, 12 aa, Rattus Norvegicus
  ( 73 )...( 85 ): NY5R_RAT
ILMAVMKKRNQK

SEQ ID NO: 2124 - protein, 12 aa, Rattus Norvegicus
  ( 71 )...( 83 ): OPRX_RAT
YVILRHTKMKTA

SEQ ID NO: 2125 - protein, 12 aa, Rattus Norvegicus
  ( 72 )...( 84 ): OPRX_RAT
VILRHTKMKTAT

SEQ ID NO: 2126 - protein, 12 aa, Rattus Norvegicus
  ( 254 )...( 266 ): OPRX_RAT
NLRRITRLVLVV

SEQ ID NO: 2127 - protein, 12 aa, Rattus Norvegicus
  ( 255 )...( 267 ): OPRX_RAT
LRRITRLVLVVV

SEQ ID NO: 2128 - protein, 12 aa, Rattus Norvegicus
  ( 256 )...( 268 ): OPRX_RAT
RRITRLVLVVVA

SEQ ID NO: 2129 - protein, 12 aa, Rattus Norvegicus
  ( 60 )...( 72 ): OXYR_RAT
VLLALRTTRHKH

SEQ ID NO: 2130 - protein, 12 aa, Rattus Norvegicus
  ( 223 )...( 235 ): OXYR_RAT
ISFKIWQNLRLK

SEQ ID NO: 2131 - protein, 12 aa, Rattus Norvegicus
  ( 224 )...( 236 ): OXYR_RAT
SFKIWQNLRLKT

SEQ ID NO: 2132 - protein, 12 aa, Rattus Norvegicus
  ( 225 )...( 237 ): OXYR_RAT
FKIWQNLRLKTA

SEQ ID NO: 2133 - protein, 12 aa, Rattus Norvegicus
  ( 226 )...( 238 ): OXYR_RAT
KIWQNLRLKTAA

SEQ ID NO: 2134 - protein, 12 aa, Rattus Norvegicus
  ( 256 )...( 268 ): OXYR_RAT
LARVSSVKLISK

SEQ ID NO: 2135 - protein, 12 aa, Rattus Norvegicus
  ( 259 )...( 271 ): OXYR_RAT
VSSVKLISKAKI

SEQ ID NO: 2136 - protein, 12 aa, Rattus Norvegicus
  ( 261 )...( 273 ): OXYR_RAT
SVKLISKAKIRT

SEQ ID NO: 2137 - protein, 12 aa, Rattus Norvegicus
  ( 262 )...( 274 ): OXYR_RAT
VKLISKAKIRTV

SEQ ID NO: 2138 - protein, 12 aa, Rattus Norvegicus
  ( 263 )...( 275 ): OXYR_RAT
KLISKAKIRTVK

SEQ ID NO: 2139 - protein, 12 aa, Rattus Norvegicus
  ( 264 )...( 276 ): OXYR_RAT
LISKAKIRTVKM

SEQ ID NO: 2140 - protein, 12 aa, Rattus Norvegicus
  ( 265 )...( 277 ): OXYR_RAT
ISKAKIRTVKMT

SEQ ID NO: 2141 - protein, 12 aa, Rattus Norvegicus
  ( 266 )...( 278 ): OXYR_RAT
SKAKIRTVKMTF

SEQ ID NO: 2142 - protein, 12 aa, Rattus Norvegicus
  ( 267 )...( 279 ): OXYR_RAT
KAKIRTVKMTFI

SEQ ID NO: 2143 - protein, 12 aa, Rattus Norvegicus
  ( 268 )...( 280 ): OXYR_RAT
AKIRTVKMTFII

SEQ ID NO: 2144 - protein, 12 aa, Rattus Norvegicus
  ( 315 )...( 327 ): P2Y6_RAT
LLQKLTAKWQRQ

SEQ ID NO: 2145 - protein, 12 aa, Rattus Norvegicus
  ( 346 )...( 358 ): PACR_RAT
IYLTNLRLRVPK

SEQ ID NO: 2146 - protein, 12 aa, Rattus Norvegicus
  ( 347 )...( 359 ): PACR_RAT
YLTNLRLRVPKK

SEQ ID NO: 2147 - protein, 12 aa, Rattus Norvegicus
  ( 348 )...( 360 ): PACR_RAT
LTNLRLRVPKKT

SEQ ID NO: 2148 - protein, 12 aa, Rattus Norvegicus
  ( 129 )...( 141 ): PAFR_RAT
TTRKRGITLSLV

SEQ ID NO: 2149 - protein, 12 aa, Rattus Norvegicus
  ( 130 )...( 142 ): PAFR_RAT
TRKRGITLSLVI

SEQ ID NO: 2150 - protein, 12 aa, Rattus Norvegicus
  ( 131 )...( 143 ): PAFR_RAT
RKRGITLSLVIW

SEQ ID NO: 2151 - protein, 12 aa, Rattus Norvegicus
  ( 294 )...( 306 ): PAFR_RAT
FLTKKFRKHLSE

SEQ ID NO: 2152 - protein, 12 aa, Rattus Norvegicus
  ( 130 )...( 142 ): PAR1_RAT
AIAVFVFRMKVK

SEQ ID NO: 2153 - protein, 12 aa, Rattus Norvegicus
  ( 131 )...( 143 ): PAR1_RAT
IAVFVFRMKVKK

SEQ ID NO: 2154 - protein, 12 aa, Rattus Norvegicus
  ( 132 )...( 144 ): PAR1_RAT
AVFVFRMKVKKP

SEQ ID NO: 2155 - protein, 12 aa, Rattus Norvegicus
  ( 133 )...( 145 ): PAR1_RAT
VFVFRMKVKKPA

SEQ ID NO: 2156 - protein, 12 aa, Rattus Norvegicus
  ( 134 )...( 146 ): PAR1_RAT
FVFRMKVKKPAV

SEQ ID NO: 2157 - protein, 12 aa, Rattus Norvegicus
  ( 135 )...( 147 ): PAR1_RAT
VFRMKVKKPAVV

SEQ ID NO: 2158 - protein, 12 aa, Rattus Norvegicus
  ( 136 )...( 148 ): PAR1_RAT
FRMKVKKPAVVY

SEQ ID NO: 2159 - protein, 12 aa, Rattus Norvegicus
  ( 137 )...( 149 ): PAR1_RAT
RMKVKKPAVVYM

SEQ ID NO: 2160 - protein, 12 aa, Rattus Norvegicus
  ( 138 )...( 150 ): PAR1_RAT
MKVKKPAVVYML

SEQ ID NO: 2161 - protein, 12 aa, Rattus Norvegicus
  ( 139 )...( 151 ): PAR1_RAT
KVKKPAVVYMLH

SEQ ID NO: 2162 - protein, 12 aa, Rattus Norvegicus
  ( 101 )...( 113 ): PAR2_RAT
FFRTKKKHPAVI

SEQ ID NO: 2163 - protein, 12 aa, Rattus Norvegicus
  ( 102 )...( 114 ): PAR2_RAT
FRTKKKHPAVIY

SEQ ID NO: 2164 - protein, 12 aa, Rattus Norvegicus
  ( 103 )...( 115 ): PAR2_RAT
RTKKKHPAVIYM

SEQ ID NO: 2165 - protein, 12 aa, Rattus Norvegicus
  ( 104 )...( 116 ): PAR2_RAT
TKKKHPAVIYMA

SEQ ID NO: 2166 - protein, 12 aa, Rattus Norvegicus
  ( 281 )...( 293 ): PAR2_RAT
KRRRAIRLIITV

SEQ ID NO: 2167 - protein, 12 aa, Rattus Norvegicus
  ( 282 )...( 294 ): PAR2_RAT
RRRAIRLIITVL

SEQ ID NO: 2168 - protein, 12 aa, Rattus Norvegicus
  ( 283 )...( 295 ): PAR2_RAT
RRAIRLIITVLS

SEQ ID NO: 2169 - protein, 12 aa, Rattus Norvegicus
  ( 363 )...( 375 ): PAR2_RAT
SVRTVKRMQISL

SEQ ID NO: 2170 - protein, 12 aa, Rattus Norvegicus
  ( 364 )...( 376 ): PAR2_RAT
VRTVKRMQISLT

SEQ ID NO: 2171 - protein, 12 aa, Rattus Norvegicus
  ( 111 )...( 123 ): PAR3_RAT
IVTLWKLSSRTK

SEQ ID NO: 2172 - protein, 12 aa, Rattus Norvegicus
  ( 112 )...( 124 ): PAR3_RAT
VTLWKLSSRTKS

SEQ ID NO: 2173 - protein, 12 aa, Rattus Norvegicus
  ( 113 )...( 125 ): PAR3_RAT
TLWKLSSRTKSI

SEQ ID NO: 2174 - protein, 12 aa, Rattus Norvegicus
  ( 292 )...( 304 ): PAR3_RAT
RKWLRYIKAVLL

SEQ ID NO: 2175 - protein, 12 aa, Rattus Norvegicus
  ( 293 )...( 305 ): PAR3_RAT
KWLRYIKAVLLI

SEQ ID NO: 2176 - protein, 12 aa, Rattus Norvegicus
  ( 320 )...( 332 ): PE23_RAT
WVYLLLRKILLR

SEQ ID NO: 2177 - protein, 12 aa, Rattus Norvegicus
  ( 321 )...( 333 ): PE23_RAT
VYLLLRKILLRK

SEQ ID NO: 2178 - protein, 12 aa, Rattus Norvegicus
  ( 322 )...( 334 ): PE23_RAT
YLLLRKILLRKF

SEQ ID NO: 2179 - protein, 12 aa, Rattus Norvegicus
  ( 323 )...( 335 ): PE23_RAT
LLLRKILLRKFC

SEQ ID NO: 2180 - protein, 12 aa, Rattus Norvegicus
  ( 324 )...( 336 ): PE23_RAT
LLRKILLRKFCQ

SEQ ID NO: 2181 - protein, 12 aa, Rattus Norvegicus
  ( 325 )...( 337 ): PE23_RAT
LRKILLRKFCQI

SEQ ID NO: 2182 - protein, 12 aa, Rattus Norvegicus
  ( 146 )...( 158 ): PF2R_RAT
KITSKHVKMILS

SEQ ID NO: 2183 - protein, 12 aa, Rattus Norvegicus
  ( 222 )...( 234 ): PF2R_RAT
VTGVTLLRVKFR

SEQ ID NO: 2184 - protein, 12 aa, Rattus Norvegicus
  ( 223 )...( 235 ): PF2R_RAT
TGVTLLRVKFRS

SEQ ID NO: 2185 - protein, 12 aa, Rattus Norvegicus
  ( 224 )...( 236 ): PF2R_RAT
GVTLLRVKFRSQ

SEQ ID NO: 2186 - protein, 12 aa, Rattus Norvegicus
  ( 225 )...( 237 ): PF2R_RAT
VTLLRVKFRSQQ

SEQ ID NO: 2187 - protein, 12 aa, Rattus Norvegicus
  ( 302 )...( 314 ): PF2R_RAT
WVYILLRKAVLR

SEQ ID NO: 2188 - protein, 12 aa, Rattus Norvegicus
  ( 303 )...( 315 ): PF2R_RAT
VYILLRKAVLRN

SEQ ID NO: 2189 - protein, 12 aa, Rattus Norvegicus
  ( 304 )...( 316 ): PF2R_RAT
YILLRKAVLRNL

SEQ ID NO: 2190 - protein, 12 aa, Rattus Norvegicus
  ( 305 )...( 317 ): PF2R_RAT
ILLRKAVLRNLY

SEQ ID NO: 2191 - protein, 12 aa, Rattus Norvegicus
  ( 306 )...( 318 ): PF2R_RAT
LLRKAVLRNLYK

SEQ ID NO: 2192 - protein, 12 aa, Rattus Norvegicus
  ( 307 )...( 319 ): PF2R_RAT
LRKAVLRNLYKL

SEQ ID NO: 2193 - protein, 12 aa, Rattus Norvegicus
  ( 308 )...( 320 ): PF2R_RAT
RKAVLRNLYKLA

SEQ ID NO: 2194 - protein, 12 aa, Rattus Norvegicus
  ( 309 )...( 321 ): PF2R_RAT
KAVLRNLYKLAS

SEQ ID NO: 2195 - protein, 12 aa, Rattus Norvegicus
  ( 353 )...( 365 ): PTH2_RAT
KQYRKLAKSTLV

SEQ ID NO: 2196 - protein, 12 aa, Rattus Norvegicus
  ( 354 )...( 366 ): PTH2_RAT
QYRKLAKSTLVL

SEQ ID NO: 2197 - protein, 12 aa, Rattus Norvegicus
  ( 355 )...( 367 ): PTH2_RAT
YRKLAKSTLVLV

SEQ ID NO: 2198 - protein, 12 aa, Rattus Norvegicus
  ( 356 )...( 368 ): PTH2_RAT
RKLAKSTLVLVL

SEQ ID NO: 2199 - protein, 12 aa, Rattus Norvegicus
  ( 421 )...( 433 ): PTH2_RAT
VKKTWTRWNLSI

SEQ ID NO: 2200 - protein, 12 aa, Rattus Norvegicus
  ( 466 )...( 478 ): PTH2_RAT
TRLVLISSKPAK

SEQ ID NO: 2201 - protein, 12 aa, Rattus Norvegicus
  ( 467 )...( 479 ): PTH2_RAT
RLVLISSKPAKT

SEQ ID NO: 2202 - protein, 12 aa, Rattus Norvegicus
  ( 379 )...( 391 ): PTRR_RAT
INIIRVLATKLR

SEQ ID NO: 2203 - protein, 12 aa, Rattus Norvegicus
  ( 401 )...( 413 ): PTRR_RAT
QQYRKLLRSTLV

SEQ ID NO: 2204 - protein, 12 aa, Rattus Norvegicus
  ( 402 )...( 414 ): PTRR_RAT
QYRKLLRSTLVL

SEQ ID NO: 2205 - protein, 12 aa, Rattus Norvegicus
  ( 403 )...( 415 ): PTRR_RAT
YRKLLRSTLVLV

SEQ ID NO: 2206 - protein, 12 aa, Rattus Norvegicus
  ( 404 )...( 416 ): PTRR_RAT
RKLLRSTLVLVP

SEQ ID NO: 2207 - protein, 12 aa, Rattus Norvegicus
  ( 133 )...( 145 ): SCRC_RAT
ERRHAYLLKLKV

SEQ ID NO: 2208 - protein, 12 aa, Rattus Norvegicus
  ( 134 )...( 146 ): SCRC_RAT
RRHAYLLKLKVM

SEQ ID NO: 2209 - protein, 12 aa, Rattus Norvegicus
  ( 135 )...( 147 ): SCRC_RAT
RHAYLLKLKVMY

SEQ ID NO: 2210 - protein, 12 aa, Rattus Norvegicus
  ( 313 )...( 325 ): SCRC_RAT
FINILRILMRKL

SEQ ID NO: 2211 - protein, 12 aa, Rattus Norvegicus
  ( 314 )...( 326 ): SCRC_RAT
INILRILMRKLR

SEQ ID NO: 2212 - protein, 12 aa, Rattus Norvegicus
  ( 315 )...( 327 ): SCRC_RAT
NILRILMRKLRT

SEQ ID NO: 2213 - protein, 12 aa, Rattus Norvegicus
  ( 316 )...( 328 ): SCRC_RAT
ILRILMRKLRTQ

SEQ ID NO: 2214 - protein, 12 aa, Rattus Norvegicus
  ( 317 )...( 329 ): SCRC_RAT
LRILMRKLRTQE

SEQ ID NO: 2215 - protein, 12 aa, Rattus Norvegicus
  ( 335 )...( 347 ): SCRC_RAT
NHYKRLAKSTLL

SEQ ID NO: 2216 - protein, 12 aa, Rattus Norvegicus
  ( 336 )...( 348 ): SCRC_RAT
HYKRLAKSTLLL

SEQ ID NO: 2217 - protein, 12 aa, Rattus Norvegicus
  ( 337 )...( 349 ): SCRC_RAT
YKRLAKSTLLLI

SEQ ID NO: 2218 - protein, 12 aa, Rattus Norvegicus
  ( 338 )...( 350 ): SCRC_RAT
KRLAKSTLLLIP

SEQ ID NO: 2219 - protein, 12 aa, Rattus Norvegicus
  ( 540 )...( 552 ): SMO_RAT
VWTKATLLIWRR

SEQ ID NO: 2220 - protein, 12 aa, Rattus Norvegicus
  ( 541 )...( 553 ): SMO_RAT
WTKATLLIWRRT

SEQ ID NO: 2221 - protein, 12 aa, Rattus Norvegicus
  ( 542 )...( 554 ): SMO_RAT
TKATLLIWRRTW

SEQ ID NO: 2222 - protein, 12 aa, Rattus Norvegicus
  ( 566 )...( 578 ): SMO_RAT
RIKKSKMIAKAF

SEQ ID NO: 2223 - protein, 12 aa, Rattus Norvegicus
  ( 567 )...( 579 ): SMO_RAT
IKKSKMIAKAFS

SEQ ID NO: 2224 - protein, 12 aa, Rattus Norvegicus
  ( 79 )...( 91 ): SSR1_RAT
VIYVILRYAKMK

SEQ ID NO: 2225 - protein, 12 aa, Rattus Norvegicus
  ( 81 )...( 93 ): SSR1_RAT
YVILRYAKMKTA

SEQ ID NO: 2226 - protein, 12 aa, Rattus Norvegicus
  ( 82 )...( 94 ): SSR1_RAT
VILRYAKMKTAT

SEQ ID NO: 2227 - protein, 12 aa, Rattus Norvegicus
  ( 83 )...( 95 ): SSR1_RAT
ILRYAKMKTATN

SEQ ID NO: 2228 - protein, 12 aa, Rattus Norvegicus
  ( 84 )...( 96 ): SSR1_RAT
LRYAKMKTATNI

SEQ ID NO: 2229 - protein, 12 aa, Rattus Norvegicus
  ( 245 )...( 257 ): SSR1_RAT
LIIAKMRMVALK

SEQ ID NO: 2230 - protein, 12 aa, Rattus Norvegicus
  ( 246 )...( 258 ): SSR1_RAT
IIAKMRMVALKA

SEQ ID NO: 2231 - protein, 12 aa, Rattus Norvegicus
  ( 252 )...( 264 ): SSR1_RAT
MVALKAGWQQRK

SEQ ID NO: 2232 - protein, 12 aa, Rattus Norvegicus
  ( 263 )...( 275 ): SSR1_RAT
KRSERKITLMVM

SEQ ID NO: 2233 - protein, 12 aa, Rattus Norvegicus
  ( 64 )...( 76 ): SSR2_RAT
VIYVILRYAKMK

SEQ ID NO: 2234 - protein, 12 aa, Rattus Norvegicus
  ( 67 )...( 79 ): SSR2_RAT
VILRYAKMKTIT

SEQ ID NO: 2235 - protein, 12 aa, Rattus Norvegicus
  ( 68 )...( 80 ): SSR2_RAT
ILRYAKMKTITN

SEQ ID NO: 2236 - protein, 12 aa, Rattus Norvegicus
  ( 69 )...( 81 ): SSR2_RAT
LRYAKMKTITNI

SEQ ID NO: 2237 - protein, 12 aa, Rattus Norvegicus
  ( 70 )...( 82 ): SSR2_RAT
RYAKMKTITNIY

SEQ ID NO: 2238 - protein, 12 aa, Rattus Norvegicus
  ( 230 )...( 242 ): SSR2_RAT
FIIIKVKSSGIR

SEQ ID NO: 2239 - protein, 12 aa, Rattus Norvegicus
  ( 231 )...( 243 ): SSR2_RAT
IIIKVKSSGIRV

SEQ ID NO: 2240 - protein, 12 aa, Rattus Norvegicus
  ( 232 )...( 244 ): SSR2_RAT
IIKVKSSGIRVG

SEQ ID NO: 2241 - protein, 12 aa, Rattus Norvegicus
  ( 252 )...( 264 ): SSR2_RAT
KKVTRMVSIVVA

SEQ ID NO: 2242 - protein, 12 aa, Rattus Norvegicus
  ( 320 )...( 332 ): SSR2_RAT
KKSFQNVLCLVK

SEQ ID NO: 2243 - protein, 12 aa, Rattus Norvegicus
  ( 228 )...( 240 ): SSR3_RAT
LLIVVKVRSTTR

SEQ ID NO: 2244 - protein, 12 aa, Rattus Norvegicus
  ( 229 )...( 241 ): SSR3_RAT
LIVVKVRSTTRR

SEQ ID NO: 2245 - protein, 12 aa, Rattus Norvegicus
  ( 64 )...( 76 ): SSR4_RAT
VIFVILRYAKMK

SEQ ID NO: 2246 - protein, 12 aa, Rattus Norvegicus
  ( 65 )...( 77 ): SSR4_RAT
IFVILRYAKMKT

SEQ ID NO: 2247 - protein, 12 aa, Rattus Norvegicus
  ( 66 )...( 78 ): SSR4_RAT
FVILRYAKMKTA

SEQ ID NO: 2248 - protein, 12 aa, Rattus Norvegicus
  ( 67 )...( 79 ): SSR4_RAT
VILRYAKMKTAT

SEQ ID NO: 2249 - protein, 12 aa, Rattus Norvegicus
  ( 68 )...( 80 ): SSR4_RAT
ILRYAKMKTATN

SEQ ID NO: 2250 - protein, 12 aa, Rattus Norvegicus
  ( 69 )...( 81 ): SSR4_RAT
LRYAKMKTATNI

SEQ ID NO: 2251 - protein, 12 aa, Rattus Norvegicus
  ( 229 )...( 241 ): SSR4_RAT
LIVGKMRAVALR

SEQ ID NO: 2252 - protein, 12 aa, Rattus Norvegicus
  ( 248 )...( 260 ): SSR4_RAT
RSEKKITRLVLM

SEQ ID NO: 2253 - protein, 12 aa, Rattus Norvegicus
  ( 251 )...( 263 ): SSR4_RAT
KKITRLVLMVVT

SEQ ID NO: 2254 - protein, 12 aa, Rattus Norvegicus
  ( 58 )...( 70 ): SSR5_RAT
VIYVVLRHAKMK

SEQ ID NO: 2255 - protein, 12 aa, Rattus Norvegicus
  ( 59 )...( 71 ): SSR5_RAT
IYVVLRHAKMKT

SEQ ID NO: 2256 - protein, 12 aa, Rattus Norvegicus
  ( 60 )...( 72 ): SSR5_RAT
YVVLRHAKMKTV

SEQ ID NO: 2257 - protein, 12 aa, Rattus Norvegicus
  ( 61 )...( 73 ): SSR5_RAT
VVLRHAKMKTVT

SEQ ID NO: 2258 - protein, 12 aa, Rattus Norvegicus
  ( 222 )...( 234 ): SSR5_RAT
LIVVKVKAAGMR

SEQ ID NO: 2259 - protein, 12 aa, Rattus Norvegicus
  ( 223 )...( 235 ): SSR5_RAT
IVVKVKAAGMRV

SEQ ID NO: 2260 - protein, 12 aa, Rattus Norvegicus
  ( 224 )...( 236 ): SSR5_RAT
VVKVKAAGMRVG

SEQ ID NO: 2261 - protein, 12 aa, Rattus Norvegicus
  ( 46 )...( 58 ): TRFR_RAT
VVLVVMRTKHMR

SEQ ID NO: 2262 - protein, 12 aa, Rattus Norvegicus
  ( 47 )...( 59 ): TRFR_RAT
VLVVMRTKHMRT

SEQ ID NO: 2263 - protein, 12 aa, Rattus Norvegicus
  ( 138 )...( 150 ): TRFR_RAT
TFSRAKKIIIFV

SEQ ID NO: 2264 - protein, 12 aa, Rattus Norvegicus
  ( 139 )...( 151 ): TRFR_RAT
FSRAKKIIIFVW

SEQ ID NO: 2265 - protein, 12 aa, Rattus Norvegicus
  ( 140 )...( 152 ): TRFR_RAT
SRAKKIIIFVWA

SEQ ID NO: 2266 - protein, 12 aa, Rattus Norvegicus
  ( 141 )...( 153 ): TRFR_RAT
RAKKIIIFVWAF

SEQ ID NO: 2267 - protein, 12 aa, Rattus Norvegicus
  ( 260 )...( 272 ): TRFR_RAT
SRKQVTKMLAVV

SEQ ID NO: 2268 - protein, 12 aa, Rattus Norvegicus
  ( 261 )...( 273 ): TRFR_RAT
RKQVTKMLAVVV

SEQ ID NO: 2269 - protein, 12 aa, Rattus Norvegicus
  ( 252 )...( 264 ): TSHR_RAT
LIAKNTWTLKKL

SEQ ID NO: 2270 - protein, 12 aa, Rattus Norvegicus
  ( 253 )...( 265 ): TSHR_RAT
IAKNTWTLKKLP

SEQ ID NO: 2271 - protein, 12 aa, Rattus Norvegicus
  ( 254 )...( 266 ): TSHR_RAT
AKNTWTLKKLPL

SEQ ID NO: 2272 - protein, 12 aa, Rattus Norvegicus
  ( 255 )...( 267 ): TSHR_RAT
KNTWTLKKLPLS

SEQ ID NO: 2273 - protein, 12 aa, Rattus Norvegicus
  ( 285 )...( 297 ): TSHR_RAT
AFKNQKKIRGIL

SEQ ID NO: 2274 - protein, 12 aa, Rattus Norvegicus
  ( 618 )...( 630 ): TSHR_RAT
KDTKIAKRMAVL

SEQ ID NO: 2275 - protein, 12 aa, Rattus Norvegicus
  ( 620 )...( 632 ): TSHR_RAT
TKIAKRMAVLIF

SEQ ID NO: 2276 - protein, 12 aa, Mus Musculus
  ( 405 )...( 417 ): 5H1A_MOUSE
KDFQNAFKKIIK

SEQ ID NO: 2277 - protein, 12 aa, Mus Musculus
  ( 407 )...( 419 ): 5H1A_MOUSE
FQNAFKKIIKCK

SEQ ID NO: 2278 - protein, 12 aa, Mus Musculus
  ( 408 )...( 420 ): 5H1A_MOUSE
QNAFKKIIKCKF

SEQ ID NO: 2279 - protein, 12 aa, Mus Musculus
  ( 65 )...( 77 ): 5H1B_MOUSE
FVIATVYRTRKL

SEQ ID NO: 2280 - protein, 12 aa, Mus Musculus
  ( 66 )...( 78 ): 5H1B_MOUSE
VIATVYRTRKLH

SEQ ID NO: 2281 - protein, 12 aa, Mus Musculus
  ( 67 )...( 79 ): 5H1B_MOUSE
IATVYRTRKLHT

SEQ ID NO: 2282 - protein, 12 aa, Mus Musculus
  ( 293 )...( 305 ): 5H1B_MOUSE
ALLEKKKLMAAR

SEQ ID NO: 2283 - protein, 12 aa, Mus Musculus
  ( 306 )...( 318 ): 5H1B_MOUSE
RKATKTLGIILG

SEQ ID NO: 2284 - protein, 12 aa, Mus Musculus
  ( 372 )...( 384 ): 5H1B_MOUSE
FKQAFHKLIRFK

SEQ ID NO: 2285 - protein, 12 aa, Mus Musculus
  ( 294 )...( 306 ): 5H1D_MOUSE
RKATKTLGIILG

SEQ ID NO: 2286 - protein, 12 aa, Mus Musculus
  ( 362 )...( 374 ): 5H1D_MOUSE
QAFQKVVHFRKA

SEQ ID NO: 2287 - protein, 12 aa, Mus Musculus
  ( 188 )...( 200 ): 5H2A_MOUSE
SRTKAFLKIIAV

SEQ ID NO: 2288 - protein, 12 aa, Mus Musculus
  ( 189 )...( 201 ): 5H2A_MOUSE
RTKAFLKIIAVW

SEQ ID NO: 2289 - protein, 12 aa, Mus Musculus
  ( 152 )...( 164 ): 5H2B_MOUSE
RYIAIKKPIQAN

SEQ ID NO: 2290 - protein, 12 aa, Mus Musculus
  ( 240 )...( 252 ): 5H2B_MOUSE
IHTLQKKAYLVK

SEQ ID NO: 2291 - protein, 12 aa, Mus Musculus
  ( 241 )...( 253 ): 5H2B_MOUSE
HTLQKKAYLVKN

SEQ ID NO: 2292 - protein, 12 aa, Mus Musculus
  ( 242 )...( 254 ): 5H2B_MOUSE
TLQKKAYLVKNK

SEQ ID NO: 2293 - protein, 12 aa, Mus Musculus
  ( 243 )...( 255 ): 5H2B_MOUSE
LQKKAYLVKNKP

SEQ ID NO: 2294 - protein, 12 aa, Mus Musculus
  ( 244 )...( 256 ): 5H2B_MOUSE
QKKAYLVKNKPP

SEQ ID NO: 2295 - protein, 12 aa, Mus Musculus
  ( 245 )...( 257 ): 5H2B_MOUSE
KKAYLVKNKPPQ

SEQ ID NO: 2296 - protein, 12 aa, Mus Musculus
  ( 167 )...( 179 ): 5H2C_MOUSE
NSRTKAIMKIAI

SEQ ID NO: 2297 - protein, 12 aa, Mus Musculus
  ( 168 )...( 180 ): 5H2C_MOUSE
SRTKAIMKIAIV

SEQ ID NO: 2298 - protein, 12 aa, Mus Musculus
  ( 169 )...( 181 ): 5H2C_MOUSE
RTKAIMKIAIVW

SEQ ID NO: 2299 - protein, 12 aa, Mus Musculus
  ( 240 )...( 252 ): 5H2C_MOUSE
YVLRRQTLMLLR

SEQ ID NO: 2300 - protein, 12 aa, Mus Musculus
  ( 241 )...( 253 ): 5H2C_MOUSE
VLRRQTLMLLRG

SEQ ID NO: 2301 - protein, 12 aa, Mus Musculus
  ( 308 )...( 320 ): 5H2C_MOUSE
KKASKVLGIVFF

SEQ ID NO: 2302 - protein, 12 aa, Mus Musculus
  ( 48 )...( 60 ): 5H4_MOUSE
RQLRKIKTNYFI

SEQ ID NO: 2303 - protein, 12 aa, Mus Musculus
  ( 49 )...( 61 ): 5H4_MOUSE
QLRKIKTNYFIV

SEQ ID NO: 2304 - protein, 12 aa, Mus Musculus
  ( 50 )...( 62 ): 5H4_MOUSE
LRKIKTNYFIVS

SEQ ID NO: 2305 - protein, 12 aa, Mus Musculus
  ( 51 )...( 63 ): 5H4_MOUSE
RKIKTNYFIVSL

SEQ ID NO: 2306 - protein, 12 aa, Mus Musculus
  ( 62 )...( 74 ): 5H5A_MOUSE
LATILKVRTFHR

SEQ ID NO: 2307 - protein, 12 aa, Mus Musculus
  ( 63 )...( 75 ): 5H5A_MOUSE
ATILKVRTFHRV

SEQ ID NO: 2308 - protein, 12 aa, Mus Musculus
  ( 153 )...( 165 ): 5H5A_MOUSE
TRKRVSNVMILL

SEQ ID NO: 2309 - protein, 12 aa, Mus Musculus
  ( 154 )...( 166 ): 5H5A_MOUSE
RKRVSNVMILLT

SEQ ID NO: 2310 - protein, 12 aa, Mus Musculus
  ( 126 )...( 138 ): 5H6_MOUSE
LLILSPLRYKLR

SEQ ID NO: 2311 - protein, 12 aa, Mus Musculus
  ( 263 )...( 275 ): 5H6_MOUSE
RKALKASLTLGI

SEQ ID NO: 2312 - protein, 12 aa, Mus Musculus
  ( 137 )...( 149 ): A1AA_MOUSE
IVTQRRGVRALL

SEQ ID NO: 2313 - protein, 12 aa, Mus Musculus
  ( 231 )...( 243 ): A1AA_MOUSE
QVTLRIHRKNVP

SEQ ID NO: 2314 - protein, 12 aa, Mus Musculus
  ( 268 )...( 280 ): A1AA_MOUSE
KKAAKTLGIVVG

SEQ ID NO: 2315 - protein, 12 aa, Mus Musculus
  ( 333 )...( 345 ): A1AA_MOUSE
FKKAFQNVLRIQ

SEQ ID NO: 2316 - protein, 12 aa, Mus Musculus
  ( 151 )...( 163 ): A1AB_MOUSE
QYPTLVTRRKAI

SEQ ID NO: 2317 - protein, 12 aa, Mus Musculus
  ( 152 )...( 164 ): A1AB_MOUSE
YPTLVTRRKAIL

SEQ ID NO: 2318 - protein, 12 aa, Mus Musculus
  ( 154 )...( 166 ): A1AB_MOUSE
TLVTRRKAILAL

SEQ ID NO: 2319 - protein, 12 aa, Mus Musculus
  ( 155 )...( 167 ): A1AB_MOUSE
LVTRRKAILALL

SEQ ID NO: 2320 - protein, 12 aa, Mus Musculus
  ( 156 )...( 168 ): A1AB_MOUSE
VTRRKAILALLS

SEQ ID NO: 2321 - protein, 12 aa, Mus Musculus
  ( 157 )...( 169 ): A1AB_MOUSE
TRRKAILALLSV

SEQ ID NO: 2322 - protein, 12 aa, Mus Musculus
  ( 225 )...( 237 ): A1AB_MOUSE
VYIVAKRTTKNL

SEQ ID NO: 2323 - protein, 12 aa, Mus Musculus
  ( 278 )...( 290 ): A1AB_MOUSE
IAVKLFKFSREK

SEQ ID NO: 2324 - protein, 12 aa, Mus Musculus
  ( 289 )...( 301 ): A1AB_MOUSE
KKAAKTLGIVVG

SEQ ID NO: 2325 - protein, 12 aa, Mus Musculus
  ( 106 )...( 118 ): AA1R_MOUSE
YLRVKIPLRYKT

SEQ ID NO: 2326 - protein, 12 aa, Mus Musculus
  ( 107 )...( 119 ): AA1R_MOUSE
LRVKIPLRYKTV

SEQ ID NO: 2327 - protein, 12 aa, Mus Musculus
  ( 108 )...( 120 ): AA1R_MOUSE
RVKIPLRYKTVV

SEQ ID NO: 2328 - protein, 12 aa, Mus Musculus
  ( 109 )...( 121 ): AA1R_MOUSE
VKIPLRYKTVVT

SEQ ID NO: 2329 - protein, 12 aa, Mus Musculus
  ( 110 )...( 122 ): AA1R_MOUSE
KIPLRYKTVVTQ

SEQ ID NO: 2330 - protein, 12 aa, Mus Musculus
  ( 111 )...( 123 ): AA1R_MOUSE
IPLRYKTVVTQR

SEQ ID NO: 2331 - protein, 12 aa, Mus Musculus
  ( 203 )...( 215 ): AA1R_MOUSE
VFYLIRKQLNKK

SEQ ID NO: 2332 - protein, 12 aa, Mus Musculus
  ( 204 )...( 216 ): AA1R_MOUSE
FYLIRKQLNKKV

SEQ ID NO: 2333 - protein, 12 aa, Mus Musculus
  ( 205 )...( 217 ): AA1R_MOUSE
YLIRKQLNKKVS

SEQ ID NO: 2334 - protein, 12 aa, Mus Musculus
  ( 291 )...( 303 ): AA1R_MOUSE
RIHKFRVTFLKI

SEQ ID NO: 2335 - protein, 12 aa, Mus Musculus
  ( 292 )...( 304 ): AA2A_MOUSE
QTFRKIIRTHVL

SEQ ID NO: 2336 - protein, 12 aa, Mus Musculus
  ( 293 )...( 305 ): AA2A_MOUSE
TFRKIIRTHVLR

SEQ ID NO: 2337 - protein, 12 aa, Mus Musculus
  ( 107 )...( 119 ): AA2B_MOUSE
IRVPLRYKGLVT

SEQ ID NO: 2338 - protein, 12 aa, Mus Musculus
  ( 103 )...( 115 ): AA3R_MOUSE
LAIAVHRYLRVK

SEQ ID NO: 2339 - protein, 12 aa, Mus Musculus
  ( 104 )...( 116 ): AA3R_MOUSE
AIAVHRYLRVKL

SEQ ID NO: 2340 - protein, 12 aa, Mus Musculus
  ( 105 )...( 117 ): AA3R_MOUSE
IAVHRYLRVKLT

SEQ ID NO: 2341 - protein, 12 aa, Mus Musculus
  ( 106 )...( 118 ): AA3R_MOUSE
AVHRYLRVKLTV

SEQ ID NO: 2342 - protein, 12 aa, Mus Musculus
  ( 107 )...( 119 ): AA3R_MOUSE
VHRYLRVKLTVR

SEQ ID NO: 2343 - protein, 12 aa, Mus Musculus
  ( 110 )...( 122 ): AA3R_MOUSE
YLRVKLTVRYRT

SEQ ID NO: 2344 - protein, 12 aa, Mus Musculus
  ( 111 )...( 123 ): AA3R_MOUSE
LRVKLTVRYRTV

SEQ ID NO: 2345 - protein, 12 aa, Mus Musculus
  ( 112 )...( 124 ): AA3R_MOUSE
RVKLTVRYRTVT

SEQ ID NO: 2346 - protein, 12 aa, Mus Musculus
  ( 114 )...( 126 ): AA3R_MOUSE
KLTVRYRTVTTQ

SEQ ID NO: 2347 - protein, 12 aa, Mus Musculus
  ( 348 )...( 360 ): ACM1_MOUSE
QLAKRKTFSLVK

SEQ ID NO: 2348 - protein, 12 aa, Mus Musculus
  ( 349 )...( 361 ): ACM1_MOUSE
LAKRKTFSLVKE

SEQ ID NO: 2349 - protein, 12 aa, Mus Musculus
  ( 361 )...( 373 ): ACM1_MOUSE
KKAARTLSAILL

SEQ ID NO: 2350 - protein, 12 aa, Mus Musculus
  ( 125 )...( 137 ): ACM2_MOUSE
VTKPLTYPVKRT

SEQ ID NO: 2351 - protein, 12 aa, Mus Musculus
  ( 126 )...( 138 ): ACM2_MOUSE
TKPLTYPVKRTT

SEQ ID NO: 2352 - protein, 12 aa, Mus Musculus
  ( 127 )...( 139 ): ACM2_MOUSE
KPLTYPVKRTTK

SEQ ID NO: 2353 - protein, 12 aa, Mus Musculus
  ( 129 )...( 141 ): ACM2_MOUSE
LTYPVKRTTKMA

SEQ ID NO: 2354 - protein, 12 aa, Mus Musculus
  ( 357 )...( 369 ): ACM2_MOUSE
KQNIVARKIVKM

SEQ ID NO: 2355 - protein, 12 aa, Mus Musculus
  ( 358 )...( 370 ): ACM2_MOUSE
QNIVARKIVKMT

SEQ ID NO: 2356 - protein, 12 aa, Mus Musculus
  ( 359 )...( 371 ): ACM2_MOUSE
NIVARKIVKMTK

SEQ ID NO: 2357 - protein, 12 aa, Mus Musculus
  ( 360 )...( 372 ): ACM2_MOUSE
IVARKIVKMTKQ

SEQ ID NO: 2358 - protein, 12 aa, Mus Musculus
  ( 361 )...( 373 ): ACM2_MOUSE
VARKIVKMTKQP

SEQ ID NO: 2359 - protein, 12 aa, Mus Musculus
  ( 362 )...( 374 ): ACM2_MOUSE
ARKIVKMTKQPA

SEQ ID NO: 2360 - protein, 12 aa, Mus Musculus
  ( 381 )...( 393 ): ACM2_MOUSE
REKKVTRTILAI

SEQ ID NO: 2361 - protein, 12 aa, Mus Musculus
  ( 383 )...( 395 ): ACM2_MOUSE
KKVTRTILAILL

SEQ ID NO: 2362 - protein, 12 aa, Mus Musculus
  ( 444 )...( 456 ): ACM2_MOUSE
NATFKKTFKHLL

SEQ ID NO: 2363 - protein, 12 aa, Mus Musculus
  ( 445 )...( 457 ): ACM2_MOUSE
ATFKKTFKHLLM

SEQ ID NO: 2364 - protein, 12 aa, Mus Musculus
  ( 88 )...( 100 ): ACM3_MOUSE
VIVAFKVNKQLK

SEQ ID NO: 2365 - protein, 12 aa, Mus Musculus
  ( 89 )...( 101 ): ACM3_MOUSE
IVAFKVNKQLKT

SEQ ID NO: 2366 - protein, 12 aa, Mus Musculus
  ( 90 )...( 102 ): ACM3_MOUSE
VAFKVNKQLKTV

SEQ ID NO: 2367 - protein, 12 aa, Mus Musculus
  ( 91 )...( 103 ): ACM3_MOUSE
AFKVNKQLKTVN

SEQ ID NO: 2368 - protein, 12 aa, Mus Musculus
  ( 458 )...( 470 ): ACM3_MOUSE
KEATLAKRFALK

SEQ ID NO: 2369 - protein, 12 aa, Mus Musculus
  ( 547 )...( 559 ): ACM3_MOUSE
NKTFRTTFKMLL

SEQ ID NO: 2370 - protein, 12 aa, Mus Musculus
  ( 233 )...( 245 ): ACM4_MOUSE
PKEKKAKTLAFL

SEQ ID NO: 2371 - protein, 12 aa, Mus Musculus
  ( 236 )...( 248 ): ACM4_MOUSE
KKAKTLAFLKSP

SEQ ID NO: 2372 - protein, 12 aa, Mus Musculus
  ( 237 )...( 249 ): ACM4_MOUSE
KAKTLAFLKSPL

SEQ ID NO: 2373 - protein, 12 aa, Mus Musculus
  ( 239 )...( 251 ): ACM4_MOUSE
KTLAFLKSPLMK

SEQ ID NO: 2374 - protein, 12 aa, Mus Musculus
  ( 244 )...( 256 ): ACM4_MOUSE
LKSPLMKPSIKK

SEQ ID NO: 2375 - protein, 12 aa, Mus Musculus
  ( 336 )...( 348 ): ACM4_MOUSE
ASKWSKIQIVTK

SEQ ID NO: 2376 - protein, 12 aa, Mus Musculus
  ( 337 )...( 349 ): ACM4_MOUSE
SKWSKIQIVTKQ

SEQ ID NO: 2377 - protein, 12 aa, Mus Musculus
  ( 396 )...( 408 ): ACM4_MOUSE
RKVTRTIFAILL

SEQ ID NO: 2378 - protein, 12 aa, Mus Musculus
  ( 458 )...( 470 ): ACM4_MOUSE
ATFKKTFRHLLL

SEQ ID NO: 2379 - protein, 12 aa, Mus Musculus
  ( 326 )...( 338 ): ADMR_MOUSE
RLLSLVVRYLPK

SEQ ID NO: 2380 - protein, 12 aa, Mus Musculus
  ( 137 )...( 149 ): AG2R_MOUSE
RLRRTMLVAKVT

SEQ ID NO: 2381 - protein, 12 aa, Mus Musculus
  ( 213 )...( 225 ): AG2R_MOUSE
TSYTLIWKALKK

SEQ ID NO: 2382 - protein, 12 aa, Mus Musculus
  ( 214 )...( 226 ): AG2R_MOUSE
SYTLIWKALKKA

SEQ ID NO: 2383 - protein, 12 aa, Mus Musculus
  ( 219 )...( 231 ): AG2R_MOUSE
WKALKKAYEIQK

SEQ ID NO: 2384 - protein, 12 aa, Mus Musculus
  ( 310 )...( 322 ): AG2R_MOUSE
KKYFLQLLKYIP

SEQ ID NO: 2385 - protein, 12 aa, Mus Musculus
  ( 314 )...( 326 ): AG2R_MOUSE
LQLLKYIPPKAK

SEQ ID NO: 2386 - protein, 12 aa, Mus Musculus
  ( 315 )...( 327 ): AG2R_MOUSE
QLLKYIPPKAKS

SEQ ID NO: 2387 - protein, 12 aa, Mus Musculus
  ( 316 )...( 328 ): AG2R_MOUSE
LLKYIPPKAKSH

SEQ ID NO: 2388 - protein, 12 aa, Mus Musculus
  ( 137 )...( 149 ): AG2S_MOUSE
RLRRTMLVAKVT

SEQ ID NO: 2389 - protein, 12 aa, Mus Musculus
  ( 213 )...( 225 ): AG2S_MOUSE
TSYTLIWKALKK

SEQ ID NO: 2390 - protein, 12 aa, Mus Musculus
  ( 214 )...( 226 ): AG2S_MOUSE
SYTLIWKALKKA

SEQ ID NO: 2391 - protein, 12 aa, Mus Musculus
  ( 305 )...( 317 ): AG2S_MOUSE
LGKKFKRYFLQL

SEQ ID NO: 2392 - protein, 12 aa, Mus Musculus
  ( 306 )...( 318 ): AG2S_MOUSE
GKKFKRYFLQLL

SEQ ID NO: 2393 - protein, 12 aa, Mus Musculus
  ( 307 )...( 319 ): AG2S_MOUSE
KKFKRYFLQLLK

SEQ ID NO: 2394 - protein, 12 aa, Mus Musculus
  ( 308 )...( 320 ): AG2S_MOUSE
KFKRYFLQLLKY

SEQ ID NO: 2395 - protein, 12 aa, Mus Musculus
  ( 309 )...( 321 ): AG2S_MOUSE
FKRYFLQLLKYI

SEQ ID NO: 2396 - protein, 12 aa, Mus Musculus
  ( 310 )...( 322 ): AG2S_MOUSE
KRYFLQLLKYIP

SEQ ID NO: 2397 - protein, 12 aa, Mus Musculus
  ( 314 )...( 326 ): AG2S_MOUSE
LQLLKYIPPKAR

SEQ ID NO: 2398 - protein, 12 aa, Mus Musculus
  ( 238 )...( 250 ): APJ_MOUSE
LRKRRRLLSIIV

SEQ ID NO: 2399 - protein, 12 aa, Mus Musculus
  ( 239 )...( 251 ): APJ_MOUSE
RKRRRLLSIIVV

SEQ ID NO: 2400 - protein, 12 aa, Mus Musculus
  ( 240 )...( 252 ): APJ_MOUSE
KRRRLLSIIVVL

SEQ ID NO: 2401 - protein, 12 aa, Mus Musculus
  ( 241 )...( 253 ): APJ_MOUSE
RRRLLSIIVVLV

SEQ ID NO: 2402 - protein, 12 aa, Mus Musculus
  ( 65 )...( 77 ): BRS3_MOUSE
NAILIKVFFKTK

SEQ ID NO: 2403 - protein, 12 aa, Mus Musculus
  ( 66 )...( 78 ): BRS3_MOUSE
AILIKVFFKTKS

SEQ ID NO: 2404 - protein, 12 aa, Mus Musculus
  ( 265 )...( 277 ): BRS3_MOUSE
SRKRIAKTVLVL

SEQ ID NO: 2405 - protein, 12 aa, Mus Musculus
  ( 266 )...( 278 ): BRS3_MOUSE
RKRIAKTVLVLV

SEQ ID NO: 2406 - protein, 12 aa, Mus Musculus
  ( 267 )...( 279 ): BRS3_MOUSE
KRIAKTVLVLVA

SEQ ID NO: 2407 - protein, 12 aa, Mus Musculus
  ( 38 )...( 50 ): CALR_MOUSE
PFLYLVGRKKLL

SEQ ID NO: 2408 - protein, 12 aa, Mus Musculus
  ( 354 )...( 366 ): CALR_MOUSE
LNIVRVLVTKMR

SEQ ID NO: 2409 - protein, 12 aa, Mus Musculus
  ( 355 )...( 367 ): CALR_MOUSE
NIVRVLVTKMRQ

SEQ ID NO: 2410 - protein, 12 aa, Mus Musculus
  ( 356 )...( 368 ): CALR_MOUSE
IVRVLVTKMRQT

SEQ ID NO: 2411 - protein, 12 aa, Mus Musculus
  ( 357 )...( 369 ): CALR_MOUSE
VRVLVTKMRQTH

SEQ ID NO: 2412 - protein, 12 aa, Mus Musculus
  ( 436 )...( 448 ): CALR_MOUSE
QVTLKRQWTQFK

SEQ ID NO: 2413 - protein, 12 aa, Mus Musculus
  ( 437 )...( 449 ): CALR_MOUSE
VTLKRQWTQFKI

SEQ ID NO: 2414 - protein, 12 aa, Mus Musculus
  ( 438 )...( 450 ): CALR_MOUSE
TLKRQWTQFKIQ

SEQ ID NO: 2415 - protein, 12 aa, Mus Musculus
  ( 2 )...( 14 ): CRF1_MOUSE
GQRPQLRLVKAL

SEQ ID NO: 2416 - protein, 12 aa, Mus Musculus
  ( 110 )...( 122 ): CRF1_MOUSE
KKSKVHYHIAVI

SEQ ID NO: 2417 - protein, 12 aa, Mus Musculus
  ( 288 )...( 300 ): CRF1_MOUSE
FNIVRILMTKLR

SEQ ID NO: 2418 - protein, 12 aa, Mus Musculus
  ( 289 )...( 301 ): CRF1_MOUSE
NIVRILMTKLRA

SEQ ID NO: 2419 - protein, 12 aa, Mus Musculus
  ( 290 )...( 302 ): CRF1_MOUSE
IVRILMTKLRAS

SEQ ID NO: 2420 - protein, 12 aa, Mus Musculus
  ( 291 )...( 303 ): CRF1_MOUSE
VRILMTKLRAST

SEQ ID NO: 2421 - protein, 12 aa, Mus Musculus
  ( 292 )...( 304 ): CRF1_MOUSE
RILMTKLRASTT

SEQ ID NO: 2422 - protein, 12 aa, Mus Musculus
  ( 306 )...( 318 ): CRF1_MOUSE
TIQYRKAVKATL

SEQ ID NO: 2423 - protein, 12 aa, Mus Musculus
  ( 307 )...( 319 ): CRF1_MOUSE
IQYRKAVKATLV

SEQ ID NO: 2424 - protein, 12 aa, Mus Musculus
  ( 308 )...( 320 ): CRF1_MOUSE
QYRKAVKATLVL

SEQ ID NO: 2425 - protein, 12 aa, Mus Musculus
  ( 309 )...( 321 ): CRF1_MOUSE
YRKAVKATLVLL

SEQ ID NO: 2426 - protein, 12 aa, Mus Musculus
  ( 310 )...( 322 ): CRF1_MOUSE
RKAVKATLVLLP

SEQ ID NO: 2427 - protein, 12 aa, Mus Musculus
  ( 304 )...( 316 ): CRF2_MOUSE
FNIVRILMTKLR

SEQ ID NO: 2428 - protein, 12 aa, Mus Musculus
  ( 305 )...( 317 ): CRF2_MOUSE
NIVRILMTKLRA

SEQ ID NO: 2429 - protein, 12 aa, Mus Musculus
  ( 306 )...( 318 ): CRF2_MOUSE
IVRILMTKLRAS

SEQ ID NO: 2430 - protein, 12 aa, Mus Musculus
  ( 307 )...( 319 ): CRF2_MOUSE
VRILMTKLRAST

SEQ ID NO: 2431 - protein, 12 aa, Mus Musculus
  ( 308 )...( 320 ): CRF2_MOUSE
RILMTKLRASTT

SEQ ID NO: 2432 - protein, 12 aa, Mus Musculus
  ( 322 )...( 334 ): CRF2_MOUSE
TIQYRKAVKATL

SEQ ID NO: 2433 - protein, 12 aa, Mus Musculus
  ( 323 )...( 335 ): CRF2_MOUSE
IQYRKAVKATLV

SEQ ID NO: 2434 - protein, 12 aa, Mus Musculus
  ( 324 )...( 336 ): CRF2_MOUSE
QYRKAVKATLVL

SEQ ID NO: 2435 - protein, 12 aa, Mus Musculus
  ( 325 )...( 337 ): CRF2_MOUSE
YRKAVKATLVLL

SEQ ID NO: 2436 - protein, 12 aa, Mus Musculus
  ( 326 )...( 338 ): CRF2_MOUSE
RKAVKATLVLLP

SEQ ID NO: 2437 - protein, 12 aa, Mus Musculus
  ( 222 )...( 234 ): ET1R_MOUSE
FPLHLSRILKKT

SEQ ID NO: 2438 - protein, 12 aa, Mus Musculus
  ( 223 )...( 235 ): ET1R_MOUSE
PLHLSRILKKTV

SEQ ID NO: 2439 - protein, 12 aa, Mus Musculus
  ( 224 )...( 236 ): ET1R_MOUSE
LHLSRILKKTVY

SEQ ID NO: 2440 - protein, 12 aa, Mus Musculus
  ( 119 )...( 131 ): ETBR_MOUSE
NSTLLRIIYKNK

SEQ ID NO: 2441 - protein, 12 aa, Mus Musculus
  ( 208 )...( 220 ): ETBR_MOUSE
RIKGIGVPKWTA

SEQ ID NO: 2442 - protein, 12 aa, Mus Musculus
  ( 300 )...( 312 ): ETBR_MOUSE
MLRKKSGMQIAL

SEQ ID NO: 2443 - protein, 12 aa, Mus Musculus
  ( 301 )...( 313 ): ETBR_MOUSE
LRKKSGMQIALN

SEQ ID NO: 2444 - protein, 12 aa, Mus Musculus
  ( 384 )...( 396 ): ETBR_MOUSE
IALYLVSKRFKN

SEQ ID NO: 2445 - protein, 12 aa, Mus Musculus
  ( 51 )...( 63 ): FSHR_MOUSE
LRFVLTKLRVIP

SEQ ID NO: 2446 - protein, 12 aa, Mus Musculus
  ( 52 )...( 64 ): FSHR_MOUSE
RFVLTKLRVIPK

SEQ ID NO: 2447 - protein, 12 aa, Mus Musculus
  ( 53 )...( 65 ): FSHR_MOUSE
FVLTKLRVIPKG

SEQ ID NO: 2448 - protein, 12 aa, Mus Musculus
  ( 54 )...( 66 ): FSHR_MOUSE
VLTKLRVIPKGS

SEQ ID NO: 2449 - protein, 12 aa, Mus Musculus
  ( 55 )...( 67 ): FSHR_MOUSE
LTKLRVIPKGSF

SEQ ID NO: 2450 - protein, 12 aa, Mus Musculus
  ( 249 )...( 261 ): FSHR_MOUSE
TYRLKKLPSLDK

SEQ ID NO: 2451 - protein, 12 aa, Mus Musculus
  ( 251 )...( 263 ): FSHR_MOUSE
RLKKLPSLDKFV

SEQ ID NO: 2452 - protein, 12 aa, Mus Musculus
  ( 567 )...( 579 ): FSHR_MOUSE
TKIAKRMATLIF

SEQ ID NO: 2453 - protein, 12 aa, Mus Musculus
  ( 568 )...( 580 ): FSHR_MOUSE
KIAKRMATLIFT

SEQ ID NO: 2454 - protein, 12 aa, Mus Musculus
  ( 596 )...( 608 ): FSHR_MOUSE
LKVPLITVSKAK

SEQ ID NO: 2455 - protein, 12 aa, Mus Musculus
  ( 597 )...( 609 ): FSHR_MOUSE
KVPLITVSKAKI

SEQ ID NO: 2456 - protein, 12 aa, Mus Musculus
  ( 54 )...( 66 ): GALR_MOUSE
VITVLARSKPGK

SEQ ID NO: 2457 - protein, 12 aa, Mus Musculus
  ( 189 )...( 201 ): GALR_MOUSE
QWPNKLHKKAYV

SEQ ID NO: 2458 - protein, 12 aa, Mus Musculus
  ( 190 )...( 202 ): GALR_MOUSE
WPNKLHKKAYVV

SEQ ID NO: 2459 - protein, 12 aa, Mus Musculus
  ( 219 )...( 231 ): GALR_MOUSE
YAKVLNHLHKKL

SEQ ID NO: 2460 - protein, 12 aa, Mus Musculus
  ( 220 )...( 232 ): GALR_MOUSE
AKVLNHLHKKLK

SEQ ID NO: 2461 - protein, 12 aa, Mus Musculus
  ( 222 )...( 234 ): GALR_MOUSE
VLNHLHKKLKNM

SEQ ID NO: 2462 - protein, 12 aa, Mus Musculus
  ( 240 )...( 252 ): GALR_MOUSE
SKKKTAQTVLVV

SEQ ID NO: 2463 - protein, 12 aa, Mus Musculus
  ( 241 )...( 253 ): GALR_MOUSE
KKKTAQTVLVVV

SEQ ID NO: 2464 - protein, 12 aa, Mus Musculus
  ( 228 )...( 240 ): GALS_MOUSE
RAKRKVTRMIVI

SEQ ID NO: 2465 - protein, 12 aa, Mus Musculus
  ( 229 )...( 241 ): GALS_MOUSE
AKRKVTRMIVIV

SEQ ID NO: 2466 - protein, 12 aa, Mus Musculus
  ( 230 )...( 242 ): GALS_MOUSE
KRKVTRMIVIVA

SEQ ID NO: 2467 - protein, 12 aa, Mus Musculus
  ( 231 )...( 243 ): GALS_MOUSE
RKVTRMIVIVAV

SEQ ID NO: 2468 - protein, 12 aa, Mus Musculus
  ( 289 )...( 301 ): GALS_MOUSE
IVYALVSKHFRK

SEQ ID NO: 2469 - protein, 12 aa, Mus Musculus
  ( 75 )...( 87 ): GASR_MOUSE
IIVVLGLSRRLR

SEQ ID NO: 2470 - protein, 12 aa, Mus Musculus
  ( 327 )...( 339 ): GASR_MOUSE
NQAKLLAKKRVV

SEQ ID NO: 2471 - protein, 12 aa, Mus Musculus
  ( 329 )...( 341 ): GASR_MOUSE
AKLLAKKRVVRM

SEQ ID NO: 2472 - protein, 12 aa, Mus Musculus
  ( 330 )...( 342 ): GASR_MOUSE
KLLAKKRVVRML

SEQ ID NO: 2473 - protein, 12 aa, Mus Musculus
  ( 331 )...( 343 ): GASR_MOUSE
LLAKKRVVRMLL

SEQ ID NO: 2474 - protein, 12 aa, Mus Musculus
  ( 332 )...( 344 ): GASR_MOUSE
LAKKRVVRMLLV

SEQ ID NO: 2475 - protein, 12 aa, Mus Musculus
  ( 333 )...( 345 ): GASR_MOUSE
AKKRVVRMLLVI

SEQ ID NO: 2476 - protein, 12 aa, Mus Musculus
  ( 334 )...( 346 ): GASR_MOUSE
KKRVVRMLLVIV

SEQ ID NO: 2477 - protein, 12 aa, Mus Musculus
  ( 335 )...( 347 ): GASR_MOUSE
KRVVRMLLVIVL

SEQ ID NO: 2478 - protein, 12 aa, Mus Musculus
  ( 325 )...( 337 ): GLP1_MOUSE
IRVICIVVSKLK

SEQ ID NO: 2479 - protein, 12 aa, Mus Musculus
  ( 326 )...( 338 ): GLP1_MOUSE
RVICIVVSKLKA

SEQ ID NO: 2480 - protein, 12 aa, Mus Musculus
  ( 331 )...( 343 ): GLP1_MOUSE
VVSKLKANLMCK

SEQ ID NO: 2481 - protein, 12 aa, Mus Musculus
  ( 332 )...( 344 ): GLP1_MOUSE
VSKLKANLMCKT

SEQ ID NO: 2482 - protein, 12 aa, Mus Musculus
  ( 345 )...( 357 ): GLP1_MOUSE
IKCRLAKSTLTL

SEQ ID NO: 2483 - protein, 12 aa, Mus Musculus
  ( 346 )...( 358 ): GLP1_MOUSE
KCRLAKSTLTLI

SEQ ID NO: 2484 - protein, 12 aa, Mus Musculus
  ( 197 )...( 209 ): GLR_MOUSE
WLLKTRYSQKIG

SEQ ID NO: 2485 - protein, 12 aa, Mus Musculus
  ( 345 )...( 357 ): GLR_MOUSE
KFRLARSTLTLI

SEQ ID NO: 2486 - protein, 12 aa, Mus Musculus
  ( 27 )...( 39 ): GRHR_MOUSE
KLPTLTVSGKIR

SEQ ID NO: 2487 - protein, 12 aa, Mus Musculus
  ( 55 )...( 67 ): GRHR_MOUSE
SFLLKLQKWTQK

SEQ ID NO: 2488 - protein, 12 aa, Mus Musculus
  ( 56 )...( 68 ): GRHR_MOUSE
FLLKLQKWTQKR

SEQ ID NO: 2489 - protein, 12 aa, Mus Musculus
  ( 57 )...( 69 ): GRHR_MOUSE
LLKLQKWTQKRK

SEQ ID NO: 2490 - protein, 12 aa, Mus Musculus
  ( 69 )...( 81 ): GRHR_MOUSE
KGKKLSRMKVLL

SEQ ID NO: 2491 - protein, 12 aa, Mus Musculus
  ( 70 )...( 82 ): GRHR_MOUSE
GKKLSRMKVLLK

SEQ ID NO: 2492 - protein, 12 aa, Mus Musculus
  ( 71 )...( 83 ): GRHR_MOUSE
KKLSRMKVLLKH

SEQ ID NO: 2493 - protein, 12 aa, Mus Musculus
  ( 72 )...( 84 ): GRHR_MOUSE
KLSRMKVLLKHL

SEQ ID NO: 2494 - protein, 12 aa, Mus Musculus
  ( 73 )...( 85 ): GRHR_MOUSE
LSRMKVLLKHLT

SEQ ID NO: 2495 - protein, 12 aa, Mus Musculus
  ( 74 )...( 86 ): GRHR_MOUSE
SRMKVLLKHLTL

SEQ ID NO: 2496 - protein, 12 aa, Mus Musculus
  ( 75 )...( 87 ): GRHR_MOUSE
RMKVLLKHLTLA

SEQ ID NO: 2497 - protein, 12 aa, Mus Musculus
  ( 259 )...( 271 ): GRPR_MOUSE
SRKRLAKTVLVF

SEQ ID NO: 2498 - protein, 12 aa, Mus Musculus
  ( 260 )...( 272 ): GRPR_MOUSE
RKRLAKTVLVFV

SEQ ID NO: 2499 - protein, 12 aa, Mus Musculus
  ( 261 )...( 273 ): GRPR_MOUSE
KRLAKTVLVFVG

SEQ ID NO: 2500 - protein, 12 aa, Mus Musculus
  ( 328 )...( 340 ): GRPR_MOUSE
KSFRKQFNTQLL

SEQ ID NO: 2501 - protein, 12 aa, Mus Musculus
  ( 121 )...( 133 ): LGR8_MOUSE
NVTLLSLKKNKI

SEQ ID NO: 2502 - protein, 12 aa, Mus Musculus
  ( 122 )...( 134 ): LGR8_MOUSE
VTLLSLKKNKIH

SEQ ID NO: 2503 - protein, 12 aa, Mus Musculus
  ( 123 )...( 135 ): LGR8_MOUSE
TLLSLKKNKIHR

SEQ ID NO: 2504 - protein, 12 aa, Mus Musculus
  ( 124 )...( 136 ): LGR8_MOUSE
LLSLKKNKIHRL

SEQ ID NO: 2505 - protein, 12 aa, Mus Musculus
  ( 125 )...( 137 ): LGR8_MOUSE
LSLKKNKIHRLP

SEQ ID NO: 2506 - protein, 12 aa, Mus Musculus
  ( 126 )...( 138 ): LGR8_MOUSE
SLKKNKIHRLPV

SEQ ID NO: 2507 - protein, 12 aa, Mus Musculus
  ( 127 )...( 139 ): LGR8_MOUSE
LKKNKIHRLPVK

SEQ ID NO: 2508 - protein, 12 aa, Mus Musculus
  ( 129 )...( 141 ): LGR8_MOUSE
KNKIHRLPVKVF

SEQ ID NO: 2509 - protein, 12 aa, Mus Musculus
  ( 137 )...( 149 ): LGR8_MOUSE
VKVFSRYTELRK

SEQ ID NO: 2510 - protein, 12 aa, Mus Musculus
  ( 138 )...( 150 ): LGR8_MOUSE
KVFSRYTELRKI

SEQ ID NO: 2511 - protein, 12 aa, Mus Musculus
  ( 459 )...( 471 ): LGR8_MOUSE
IKYRGQYQKYAL

SEQ ID NO: 2512 - protein, 12 aa, Mus Musculus
  ( 460 )...( 472 ): LGR8_MOUSE
KYRGQYQKYALL

SEQ ID NO: 2513 - protein, 12 aa, Mus Musculus
  ( 514 )...( 526 ): LGR8_MOUSE
LRLGKRQTAVAL

SEQ ID NO: 2514 - protein, 12 aa, Mus Musculus
  ( 680 )...( 692 ): LGR8_MOUSE
FFKDKLKQLLHK

SEQ ID NO: 2515 - protein, 12 aa, Mus Musculus
  ( 688 )...( 700 ): LGR8_MOUSE
LLHKHRRKPIFK

SEQ ID NO: 2516 - protein, 12 aa, Mus Musculus
  ( 689 )...( 701 ): LGR8_MOUSE
LHKHRRKPIFKV

SEQ ID NO: 2517 - protein, 12 aa, Mus Musculus
  ( 694 )...( 706 ): LGR8_MOUSE
RKPIFKVKKKSL

SEQ ID NO: 2518 - protein, 12 aa, Mus Musculus
  ( 695 )...( 707 ): LGR8_MOUSE
KPIFKVKKKSLS

SEQ ID NO: 2519 - protein, 12 aa, Mus Musculus
  ( 696 )...( 708 ): LGR8_MOUSE
PIFKVKKKSLSA

SEQ ID NO: 2520 - protein, 12 aa, Mus Musculus
  ( 697 )...( 709 ): LGR8_MOUSE
IFKVKKKSLSAS

SEQ ID NO: 2521 - protein, 12 aa, Mus Musculus
  ( 698 )...( 710 ): LGR8_MOUSE
FKVKKKSLSASI

SEQ ID NO: 2522 - protein, 12 aa, Mus Musculus
  ( 700 )...( 712 ): LGR8_MOUSE
VKKKSLSASIVW

SEQ ID NO: 2523 - protein, 12 aa, Mus Musculus
  ( 701 )...( 713 ): LGR8_MOUSE
KKKSLSASIVWT

SEQ ID NO: 2524 - protein, 12 aa, Mus Musculus
  ( 567 )...( 579 ): LSHR_MOUSE
KDTKIAKKMAIL

SEQ ID NO: 2525 - protein, 12 aa, Mus Musculus
  ( 569 )...( 581 ): LSHR_MOUSE
TKIAKKMAILIF

SEQ ID NO: 2526 - protein, 12 aa, Mus Musculus
  ( 570 )...( 582 ): LSHR_MOUSE
KIAKKMAILIFT

SEQ ID NO: 2527 - protein, 12 aa, Mus Musculus
  ( 106 )...( 118 ): MC4R_MOUSE
LMARLHIKRIAV

SEQ ID NO: 2528 - protein, 12 aa, Mus Musculus
  ( 107 )...( 119 ): MC4R_MOUSE
MARLHIKRIAVL

SEQ ID NO: 2529 - protein, 12 aa, Mus Musculus
  ( 53 )...( 65 ): NK1R_MOUSE
VIWIILAHKRMR

SEQ ID NO: 2530 - protein, 12 aa, Mus Musculus
  ( 54 )...( 66 ): NK1R_MOUSE
IWIILAHKRMRT

SEQ ID NO: 2531 - protein, 12 aa, Mus Musculus
  ( 55 )...( 67 ): NK1R_MOUSE
WIILAHKRMRTV

SEQ ID NO: 2532 - protein, 12 aa, Mus Musculus
  ( 56 )...( 68 ): NK1R_MOUSE
IILAHKRMRTVT

SEQ ID NO: 2533 - protein, 12 aa, Mus Musculus
  ( 239 )...( 251 ): NK1R_MOUSE
QVSAKRKVVKMM

SEQ ID NO: 2534 - protein, 12 aa, Mus Musculus
  ( 240 )...( 252 ): NK1R_MOUSE
VSAKRKVVKMMI

SEQ ID NO: 2535 - protein, 12 aa, Mus Musculus
  ( 241 )...( 253 ): NK1R_MOUSE
SAKRKVVKMMIV

SEQ ID NO: 2536 - protein, 12 aa, Mus Musculus
  ( 242 )...( 254 ): NK1R_MOUSE
AKRKVVKMMIVV

SEQ ID NO: 2537 - protein, 12 aa, Mus Musculus
  ( 239 )...( 251 ): NK2R_MOUSE
LRHLQAKKKFVK

SEQ ID NO: 2538 - protein, 12 aa, Mus Musculus
  ( 241 )...( 253 ): NK2R_MOUSE
HLQAKKKFVKAM

SEQ ID NO: 2539 - protein, 12 aa, Mus Musculus
  ( 242 )...( 254 ): NK2R_MOUSE
LQAKKKFVKAMV

SEQ ID NO: 2540 - protein, 12 aa, Mus Musculus
  ( 243 )...( 255 ): NK2R_MOUSE
QAKKKFVKAMVL

SEQ ID NO: 2541 - protein, 12 aa, Mus Musculus
  ( 244 )...( 256 ): NK2R_MOUSE
AKKKFVKAMVLV

SEQ ID NO: 2542 - protein, 12 aa, Mus Musculus
  ( 245 )...( 257 ): NK2R_MOUSE
KKKFVKAMVLVV

SEQ ID NO: 2543 - protein, 12 aa, Mus Musculus
  ( 246 )...( 258 ): NK2R_MOUSE
KKFVKAMVLVVV

SEQ ID NO: 2544 - protein, 12 aa, Mus Musculus
  ( 93 )...( 105 ): NK3R_MOUSE
VIWIILAHKRMR

SEQ ID NO: 2545 - protein, 12 aa, Mus Musculus
  ( 94 )...( 106 ): NK3R_MOUSE
IWIILAHKRMRT

SEQ ID NO: 2546 - protein, 12 aa, Mus Musculus
  ( 95 )...( 107 ): NK3R_MOUSE
WIILAHKRMRTV

SEQ ID NO: 2547 - protein, 12 aa, Mus Musculus
  ( 96 )...( 108 ): NK3R_MOUSE
IILAHKRMRTVT

SEQ ID NO: 2548 - protein, 12 aa, Mus Musculus
  ( 178 )...( 190 ): NK3R_MOUSE
LKPRLSATATKI

SEQ ID NO: 2549 - protein, 12 aa, Mus Musculus
  ( 179 )...( 191 ): NK3R_MOUSE
KPRLSATATKIV

SEQ ID NO: 2550 - protein, 12 aa, Mus Musculus
  ( 277 )...( 289 ): NK3R_MOUSE
QLKAKRKVVKMM

SEQ ID NO: 2551 - protein, 12 aa, Mus Musculus
  ( 278 )...( 290 ): NK3R_MOUSE
LKAKRKVVKMMI

SEQ ID NO: 2552 - protein, 12 aa, Mus Musculus
  ( 279 )...( 291 ): NK3R_MOUSE
KAKRKVVKMMII

SEQ ID NO: 2553 - protein, 12 aa, Mus Musculus
  ( 280 )...( 292 ): NK3R_MOUSE
AKRKVVKMMIIV

SEQ ID NO: 2554 - protein, 12 aa, Mus Musculus
  ( 83 )...( 95 ): NTR1_MOUSE
VTAFTLARKKSL

SEQ ID NO: 2555 - protein, 12 aa, Mus Musculus
  ( 84 )...( 96 ): NTR1_MOUSE
TAFTLARKKSLQ

SEQ ID NO: 2556 - protein, 12 aa, Mus Musculus
  ( 86 )...( 98 ): NTR1_MOUSE
FTLARKKSLQSL

SEQ ID NO: 2557 - protein, 12 aa, Mus Musculus
  ( 184 )...( 196 ): NTR1_MOUSE
RTKKFISAIWLA

SEQ ID NO: 2558 - protein, 12 aa, Mus Musculus
  ( 80 )...( 92 ): NY5R_MOUSE
NLLILMAVMKKR

SEQ ID NO: 2559 - protein, 12 aa, Mus Musculus
  ( 81 )...( 93 ): NY5R_MOUSE
LLILMAVMKKRN

SEQ ID NO: 2560 - protein, 12 aa, Mus Musculus
  ( 82 )...( 94 ): NY5R_MOUSE
LILMAVMKKRNQ

SEQ ID NO: 2561 - protein, 12 aa, Mus Musculus
  ( 83 )...( 95 ): NY5R_MOUSE
ILMAVMKKRNQK

SEQ ID NO: 2562 - protein, 12 aa, Mus Musculus
  ( 54 )...( 66 ): NY6R_MOUSE
LSLIIIIFKKQR

SEQ ID NO: 2563 - protein, 12 aa, Mus Musculus
  ( 229 )...( 241 ): NY6R_MOUSE
YLKIVLCLRKRT

SEQ ID NO: 2564 - protein, 12 aa, Mus Musculus
  ( 230 )...( 242 ): NY6R_MOUSE
LKIVLCLRKRTR

SEQ ID NO: 2565 - protein, 12 aa, Mus Musculus
  ( 232 )...( 244 ): NY6R_MOUSE
IVLCLRKRTRQV

SEQ ID NO: 2566 - protein, 12 aa, Mus Musculus
  ( 71 )...( 83 ): OPRX_MOUSE
YVILRHTKMKTA

SEQ ID NO: 2567 - protein, 12 aa, Mus Musculus
  ( 72 )...( 84 ): OPRX_MOUSE
VILRHTKMKTAT

SEQ ID NO: 2568 - protein, 12 aa, Mus Musculus
  ( 254 )...( 266 ): OPRX_MOUSE
NLRRITRLVLVV

SEQ ID NO: 2569 - protein, 12 aa, Mus Musculus
  ( 255 )...( 267 ): OPRX_MOUSE
LRRITRLVLVVV

SEQ ID NO: 2570 - protein, 12 aa, Mus Musculus
  ( 256 )...( 268 ): OPRX_MOUSE
RRITRLVLVVVA

SEQ ID NO: 2571 - protein, 12 aa, Mus Musculus
  ( 60 )...( 72 ): OXYR_MOUSE
VLLALRTTRHKH

SEQ ID NO: 2572 - protein, 12 aa, Mus Musculus
  ( 223 )...( 235 ): OXYR_MOUSE
ISFKIWQNLRLK

SEQ ID NO: 2573 - protein, 12 aa, Mus Musculus
  ( 224 )...( 236 ): OXYR_MOUSE
SFKIWQNLRLKT

SEQ ID NO: 2574 - protein, 12 aa, Mus Musculus
  ( 225 )...( 237 ): OXYR_MOUSE
FKIWQNLRLKTA

SEQ ID NO: 2575 - protein, 12 aa, Mus Musculus
  ( 226 )...( 238 ): OXYR_MOUSE
KIWQNLRLKTAA

SEQ ID NO: 2576 - protein, 12 aa, Mus Musculus
  ( 256 )...( 268 ): OXYR_MOUSE
LARVSSVKLISK

SEQ ID NO: 2577 - protein, 12 aa, Mus Musculus
  ( 259 )...( 271 ): OXYR_MOUSE
VSSVKLISKAKI

SEQ ID NO: 2578 - protein, 12 aa, Mus Musculus
  ( 261 )...( 273 ): OXYR_MOUSE
SVKLISKAKIRT

SEQ ID NO: 2579 - protein, 12 aa, Mus Musculus
  ( 262 )...( 274 ): OXYR_MOUSE
VKLISKAKIRTV

SEQ ID NO: 2580 - protein, 12 aa, Mus Musculus
  ( 263 )...( 275 ): OXYR_MOUSE
KLISKAKIRTVK

SEQ ID NO: 2581 - protein, 12 aa, Mus Musculus
  ( 264 )...( 276 ): OXYR_MOUSE
LISKAKIRTVKM

SEQ ID NO: 2582 - protein, 12 aa, Mus Musculus
  ( 265 )...( 277 ): OXYR_MOUSE
ISKAKIRTVKMT

SEQ ID NO: 2583 - protein, 12 aa, Mus Musculus
  ( 266 )...( 278 ): OXYR_MOUSE
SKAKIRTVKMTF

SEQ ID NO: 2584 - protein, 12 aa, Mus Musculus
  ( 267 )...( 279 ): OXYR_MOUSE
KAKIRTVKMTFI

SEQ ID NO: 2585 - protein, 12 aa, Mus Musculus
  ( 268 )...( 280 ): OXYR_MOUSE
AKIRTVKMTFII

SEQ ID NO: 2586 - protein, 12 aa, Mus Musculus
  ( 129 )...( 141 ): PAFR_MOUSE
TTRKRGISLSLI

SEQ ID NO: 2587 - protein, 12 aa, Mus Musculus
  ( 130 )...( 142 ): PAFR_MOUSE
TRKRGISLSLII

SEQ ID NO: 2588 - protein, 12 aa, Mus Musculus
  ( 294 )...( 306 ): PAFR_MOUSE
FLTKKFRKHLSE

SEQ ID NO: 2589 - protein, 12 aa, Mus Musculus
  ( 128 )...( 140 ): PAR1_MOUSE
AIAVFVLRMKVK

SEQ ID NO: 2590 - protein, 12 aa, Mus Musculus
  ( 129 )...( 141 ): PAR1_MOUSE
IAVFVLRMKVKK

SEQ ID NO: 2591 - protein, 12 aa, Mus Musculus
  ( 130 )...( 142 ): PAR1_MOUSE
AVFVLRMKVKKP

SEQ ID NO: 2592 - protein, 12 aa, Mus Musculus
  ( 131 )...( 143 ): PAR1_MOUSE
VFVLRMKVKKPA

SEQ ID NO: 2593 - protein, 12 aa, Mus Musculus
  ( 132 )...( 144 ): PAR1_MOUSE
FVLRMKVKKPAV

SEQ ID NO: 2594 - protein, 12 aa, Mus Musculus
  ( 133 )...( 145 ): PAR1_MOUSE
VLRMKVKKPAVV

SEQ ID NO: 2595 - protein, 12 aa, Mus Musculus
  ( 134 )...( 146 ): PAR1_MOUSE
LRMKVKKPAVVY

SEQ ID NO: 2596 - protein, 12 aa, Mus Musculus
  ( 135 )...( 147 ): PAR1_MOUSE
RMKVKKPAVVYM

SEQ ID NO: 2597 - protein, 12 aa, Mus Musculus
  ( 136 )...( 148 ): PAR1_MOUSE
MKVKKPAVVYML

SEQ ID NO: 2598 - protein, 12 aa, Mus Musculus
  ( 137 )...( 149 ): PAR1_MOUSE
KVKKPAVVYMLH

SEQ ID NO: 2599 - protein, 12 aa, Mus Musculus
  ( 97 )...( 109 ): PAR2_MOUSE
MALWIFLFRTKK

SEQ ID NO: 2600 - protein, 12 aa, Mus Musculus
  ( 100 )...( 112 ): PAR2_MOUSE
WIFLFRTKKKHP

SEQ ID NO: 2601 - protein, 12 aa, Mus Musculus
  ( 101 )...( 113 ): PAR2_MOUSE
IFLFRTKKKHPA

SEQ ID NO: 2602 - protein, 12 aa, Mus Musculus
  ( 103 )...( 115 ): PAR2_MOUSE
LFRTKKKHPAVI

SEQ ID NO: 2603 - protein, 12 aa, Mus Musculus
  ( 104 )...( 116 ): PAR2_MOUSE
FRTKKKHPAVIY

SEQ ID NO: 2604 - protein, 12 aa, Mus Musculus
  ( 105 )...( 117 ): PAR2_MOUSE
RTKKKHPAVIYM

SEQ ID NO: 2605 - protein, 12 aa, Mus Musculus
  ( 106 )...( 118 ): PAR2_MOUSE
TKKKHPAVIYMA

SEQ ID NO: 2606 - protein, 12 aa, Mus Musculus
  ( 282 )...( 294 ): PAR2_MOUSE
KKRQRAIRLIIT

SEQ ID NO: 2607 - protein, 12 aa, Mus Musculus
  ( 283 )...( 295 ): PAR2_MOUSE
KRQRAIRLIITV

SEQ ID NO: 2608 - protein, 12 aa, Mus Musculus
  ( 284 )...( 296 ): PAR2_MOUSE
RQRAIRLIITVL

SEQ ID NO: 2609 - protein, 12 aa, Mus Musculus
  ( 112 )...( 124 ): PAR3_MOUSE
IVTLWKLSLRTK

SEQ ID NO: 2610 - protein, 12 aa, Mus Musculus
  ( 113 )...( 125 ): PAR3_MOUSE
VTLWKLSLRTKS

SEQ ID NO: 2611 - protein, 12 aa, Mus Musculus
  ( 114 )...( 126 ): PAR3_MOUSE
TLWKLSLRTKSI

SEQ ID NO: 2612 - protein, 12 aa, Mus Musculus
  ( 115 )...( 127 ): PAR3_MOUSE
LWKLSLRTKSIS

SEQ ID NO: 2613 - protein, 12 aa, Mus Musculus
  ( 116 )...( 128 ): PAR3_MOUSE
WKLSLRTKSISL

SEQ ID NO: 2614 - protein, 12 aa, Mus Musculus
  ( 117 )...( 129 ): PAR3_MOUSE
KLSLRTKSISLV

SEQ ID NO: 2615 - protein, 12 aa, Mus Musculus
  ( 284 )...( 296 ): PAR3_MOUSE
LIHKLKSKDRIW

SEQ ID NO: 2616 - protein, 12 aa, Mus Musculus
  ( 285 )...( 297 ): PAR3_MOUSE
IHKLKSKDRIWL

SEQ ID NO: 2617 - protein, 12 aa, Mus Musculus
  ( 287 )...( 299 ): PAR3_MOUSE
KLKSKDRIWLGY

SEQ ID NO: 2618 - protein, 12 aa, Mus Musculus
  ( 289 )...( 301 ): PAR3_MOUSE
KSKDRIWLGYIK

SEQ ID NO: 2619 - protein, 12 aa, Mus Musculus
  ( 320 )...( 332 ): PE23_MOUSE
WVYLLLRKILLR

SEQ ID NO: 2620 - protein, 12 aa, Mus Musculus
  ( 321 )...( 333 ): PE23_MOUSE
VYLLLRKILLRK

SEQ ID NO: 2621 - protein, 12 aa, Mus Musculus
  ( 322 )...( 334 ): PE23_MOUSE
YLLLRKILLRKF

SEQ ID NO: 2622 - protein, 12 aa, Mus Musculus
  ( 323 )...( 335 ): PE23_MOUSE
LLLRKILLRKFC

SEQ ID NO: 2623 - protein, 12 aa, Mus Musculus
  ( 324 )...( 336 ): PE23_MOUSE
LLRKILLRKFCQ

SEQ ID NO: 2624 - protein, 12 aa, Mus Musculus
  ( 325 )...( 337 ): PE23_MOUSE
LRKILLRKFCQI

SEQ ID NO: 2625 - protein, 12 aa, Mus Musculus
  ( 50 )...( 62 ): PF2R_MOUSE
ILMKAYQRFRQK

SEQ ID NO: 2626 - protein, 12 aa, Mus Musculus
  ( 146 )...( 158 ): PF2R_MOUSE
KITSKHVKMILS

SEQ ID NO: 2627 - protein, 12 aa, Mus Musculus
  ( 222 )...( 234 ): PF2R_MOUSE
VTGVTLLRVKFR

SEQ ID NO: 2628 - protein, 12 aa, Mus Musculus
  ( 223 )...( 235 ): PF2R_MOUSE
TGVTLLRVKFRS

SEQ ID NO: 2629 - protein, 12 aa, Mus Musculus
  ( 224 )...( 236 ): PF2R_MOUSE
GVTLLRVKFRSQ

SEQ ID NO: 2630 - protein, 12 aa, Mus Musculus
  ( 225 )...( 237 ): PF2R_MOUSE
VTLLRVKFRSQQ

SEQ ID NO: 2631 - protein, 12 aa, Mus Musculus
  ( 302 )...( 314 ): PF2R_MOUSE
WVYILLRKAVLR

SEQ ID NO: 2632 - protein, 12 aa, Mus Musculus
  ( 303 )...( 315 ): PF2R_MOUSE
VYILLRKAVLRN

SEQ ID NO: 2633 - protein, 12 aa, Mus Musculus
  ( 304 )...( 316 ): PF2R_MOUSE
YILLRKAVLRNL

SEQ ID NO: 2634 - protein, 12 aa, Mus Musculus
  ( 305 )...( 317 ): PF2R_MOUSE
ILLRKAVLRNLY

SEQ ID NO: 2635 - protein, 12 aa, Mus Musculus
  ( 306 )...( 318 ): PF2R_MOUSE
LLRKAVLRNLYK

SEQ ID NO: 2636 - protein, 12 aa, Mus Musculus
  ( 307 )...( 319 ): PF2R_MOUSE
LRKAVLRNLYKL

SEQ ID NO: 2637 - protein, 12 aa, Mus Musculus
  ( 308 )...( 320 ): PF2R_MOUSE
RKAVLRNLYKLA

SEQ ID NO: 2638 - protein, 12 aa, Mus Musculus
  ( 309 )...( 321 ): PF2R_MOUSE
KAVLRNLYKLAS

SEQ ID NO: 2639 - protein, 12 aa, Mus Musculus
  ( 379 )...( 391 ): PTRR_MOUSE
INIIRVLATKLR

SEQ ID NO: 2640 - protein, 12 aa, Mus Musculus
  ( 401 )...( 413 ): PTRR_MOUSE
QQYRKLLRSTLV

SEQ ID NO: 2641 - protein, 12 aa, Mus Musculus
  ( 402 )...( 414 ): PTRR_MOUSE
QYRKLLRSTLVL

SEQ ID NO: 2642 - protein, 12 aa, Mus Musculus
  ( 403 )...( 415 ): PTRR_MOUSE
YRKLLRSTLVLV

SEQ ID NO: 2643 - protein, 12 aa, Mus Musculus
  ( 404 )...( 416 ): PTRR_MOUSE
RKLLRSTLVLVP

SEQ ID NO: 2644 - protein, 12 aa, Mus Musculus
  ( 540 )...( 552 ): SMO_MOUSE
VWTKATLLIWRR

SEQ ID NO: 2645 - protein, 12 aa, Mus Musculus
  ( 541 )...( 553 ): SMO_MOUSE
WTKATLLIWRRT

SEQ ID NO: 2646 - protein, 12 aa, Mus Musculus
  ( 542 )...( 554 ): SMO_MOUSE
TKATLLIWRRTW

SEQ ID NO: 2647 - protein, 12 aa, Mus Musculus
  ( 566 )...( 578 ): SMO_MOUSE
RIKKSKMIAKAF

SEQ ID NO: 2648 - protein, 12 aa, Mus Musculus
  ( 567 )...( 579 ): SMO_MOUSE
IKKSKMIAKAFS

SEQ ID NO: 2649 - protein, 12 aa, Mus Musculus
  ( 79 )...( 91 ): SSR1_MOUSE
VIYVILRYAKMK

SEQ ID NO: 2650 - protein, 12 aa, Mus Musculus
  ( 81 )...( 93 ): SSR1_MOUSE
YVILRYAKMKTA

SEQ ID NO: 2651 - protein, 12 aa, Mus Musculus
  ( 82 )...( 94 ): SSR1_MOUSE
VILRYAKMKTAT

SEQ ID NO: 2652 - protein, 12 aa, Mus Musculus
  ( 83 )...( 95 ): SSR1_MOUSE
ILRYAKMKTATN

SEQ ID NO: 2653 - protein, 12 aa, Mus Musculus
  ( 84 )...( 96 ): SSR1_MOUSE
LRYAKMKTATNI

SEQ ID NO: 2654 - protein, 12 aa, Mus Musculus
  ( 245 )...( 257 ): SSR1_MOUSE
LIIAKMRMVALK

SEQ ID NO: 2655 - protein, 12 aa, Mus Musculus
  ( 246 )...( 258 ): SSR1_MOUSE
IIAKMRMVALKA

SEQ ID NO: 2656 - protein, 12 aa, Mus Musculus
  ( 252 )...( 264 ): SSR1_MOUSE
MVALKAGWQQRK

SEQ ID NO: 2657 - protein, 12 aa, Mus Musculus
  ( 263 )...( 275 ): SSR1_MOUSE
KRSERKITLMVM

SEQ ID NO: 2658 - protein, 12 aa, Mus Musculus
  ( 64 )...( 76 ): SSR2_MOUSE
VIYVILRYAKMK

SEQ ID NO: 2659 - protein, 12 aa, Mus Musculus
  ( 67 )...( 79 ): SSR2_MOUSE
VILRYAKMKTIT

SEQ ID NO: 2660 - protein, 12 aa, Mus Musculus
  ( 68 )...( 80 ): SSR2_MOUSE
ILRYAKMKTITN

SEQ ID NO: 2661 - protein, 12 aa, Mus Musculus
  ( 69 )...( 81 ): SSR2_MOUSE
LRYAKMKTITNI

SEQ ID NO: 2662 - protein, 12 aa, Mus Musculus
  ( 70 )...( 82 ): SSR2_MOUSE
RYAKMKTITNIY

SEQ ID NO: 2663 - protein, 12 aa, Mus Musculus
  ( 230 )...( 242 ): SSR2_MOUSE
FIIIKVKSSGIR

SEQ ID NO: 2664 - protein, 12 aa, Mus Musculus
  ( 231 )...( 243 ): SSR2_MOUSE
IIIKVKSSGIRV

SEQ ID NO: 2665 - protein, 12 aa, Mus Musculus
  ( 232 )...( 244 ): SSR2_MOUSE
IIKVKSSGIRVG

SEQ ID NO: 2666 - protein, 12 aa, Mus Musculus
  ( 252 )...( 264 ): SSR2_MOUSE
KKVTRMVSIVVA

SEQ ID NO: 2667 - protein, 12 aa, Mus Musculus
  ( 320 )...( 332 ): SSR2_MOUSE
KKSFQNVLCLVK

SEQ ID NO: 2668 - protein, 12 aa, Mus Musculus
  ( 228 )...( 240 ): SSR3_MOUSE
LLIVVKVRSTTR

SEQ ID NO: 2669 - protein, 12 aa, Mus Musculus
  ( 229 )...( 241 ): SSR3_MOUSE
LIVVKVRSTTRR

SEQ ID NO: 2670 - protein, 12 aa, Mus Musculus
  ( 64 )...( 76 ): SSR4_MOUSE
VIFVILRYAKMK

SEQ ID NO: 2671 - protein, 12 aa, Mus Musculus
  ( 65 )...( 77 ): SSR4_MOUSE
IFVILRYAKMKT

SEQ ID NO: 2672 - protein, 12 aa, Mus Musculus
  ( 66 )...( 78 ): SSR4_MOUSE
FVILRYAKMKTA

SEQ ID NO: 2673 - protein, 12 aa, Mus Musculus
  ( 67 )...( 79 ): SSR4_MOUSE
VILRYAKMKTAT

SEQ ID NO: 2674 - protein, 12 aa, Mus Musculus
  ( 68 )...( 80 ): SSR4_MOUSE
ILRYAKMKTATN

SEQ ID NO: 2675 - protein, 12 aa, Mus Musculus
  ( 69 )...( 81 ): SSR4_MOUSE
LRYAKMKTATNI

SEQ ID NO: 2676 - protein, 12 aa, Mus Musculus
  ( 229 )...( 241 ): SSR4_MOUSE
LIVGKMRAVALR

SEQ ID NO: 2677 - protein, 12 aa, Mus Musculus
  ( 248 )...( 260 ): SSR4_MOUSE
RSEKKITRLVLM

SEQ ID NO: 2678 - protein, 12 aa, Mus Musculus
  ( 251 )...( 263 ): SSR4_MOUSE
KKITRLVLMVVT

SEQ ID NO: 2679 - protein, 12 aa, Mus Musculus
  ( 61 )...( 73 ): SSR5_MOUSE
VVLRYAKMKTVT

SEQ ID NO: 2680 - protein, 12 aa, Mus Musculus
  ( 62 )...( 74 ): SSR5_MOUSE
VLRYAKMKTVTN

SEQ ID NO: 2681 - protein, 12 aa, Mus Musculus
  ( 63 )...( 75 ): SSR5_MOUSE
LRYAKMKTVTNV

SEQ ID NO: 2682 - protein, 12 aa, Mus Musculus
  ( 221 )...( 233 ): SSR5_MOUSE
LIVVKVKAAGMR

SEQ ID NO: 2683 - protein, 12 aa, Mus Musculus
  ( 222 )...( 234 ): SSR5_MOUSE
IVVKVKAAGMRV

SEQ ID NO: 2684 - protein, 12 aa, Mus Musculus
  ( 223 )...( 235 ): SSR5_MOUSE
VVKVKAAGMRVG

SEQ ID NO: 2685 - protein, 16 aa, Homo Sapiens
  ( 334 )...( 350 ): 5H1A_HUMAN
KMALARERKTVKTLGI

SEQ ID NO: 2686 - protein, 16 aa, Homo Sapiens
  ( 335 )...( 351 ): 5H1A_HUMAN
MALARERKTVKTLGII

SEQ ID NO: 2687 - protein, 16 aa, Homo Sapiens
  ( 336 )...( 352 ): 5H1A_HUMAN
ALARERKTVKTLGIIM

SEQ ID NO: 2688 - protein, 16 aa, Homo Sapiens
  ( 337 )...( 353 ): 5H1A_HUMAN
LARERKTVKTLGIIMG

SEQ ID NO: 2689 - protein, 16 aa, Homo Sapiens
  ( 290 )...( 306 ): 5H1B_HUMAN
VKVRVSDALLEKKKLM

SEQ ID NO: 2690 - protein, 16 aa, Homo Sapiens
  ( 291 )...( 307 ): 5H1B_HUMAN
KVRVSDALLEKKKLMA

SEQ ID NO: 2691 - protein, 16 aa, Homo Sapiens
  ( 304 )...( 320 ): 5H1B_HUMAN
LMAARERKATKTLGII

SEQ ID NO: 2692 - protein, 16 aa, Homo Sapiens
  ( 305 )...( 321 ): 5H1B_HUMAN
MAARERKATKTLGIIL

SEQ ID NO: 2693 - protein, 16 aa, Homo Sapiens
  ( 308 )...( 324 ): 5H1B_HUMAN
RERKATKTLGIILGAF

SEQ ID NO: 2694 - protein, 16 aa, Homo Sapiens
  ( 310 )...( 326 ): 5H1B_HUMAN
RKATKTLGIILGAFIV

SEQ ID NO: 2695 - protein, 16 aa, Homo Sapiens
  ( 291 )...( 307 ): 5H1D_HUMAN
ISAARERKATKILGII

SEQ ID NO: 2696 - protein, 16 aa, Homo Sapiens
  ( 292 )...( 308 ): 5H1D_HUMAN
SAARERKATKILGIIL

SEQ ID NO: 2697 - protein, 16 aa, Homo Sapiens
  ( 293 )...( 309 ): 5H1D_HUMAN
AARERKATKILGIILG

SEQ ID NO: 2698 - protein, 16 aa, Homo Sapiens
  ( 294 )...( 310 ): 5H1D_HUMAN
ARERKATKILGIILGA

SEQ ID NO: 2699 - protein, 16 aa, Homo Sapiens
  ( 295 )...( 311 ): 5H1D_HUMAN
RERKATKILGIILGAF

SEQ ID NO: 2700 - protein, 16 aa, Homo Sapiens
  ( 297 )...( 313 ): 5H1D_HUMAN
RKATKILGIILGAFII

SEQ ID NO: 2701 - protein, 16 aa, Homo Sapiens
  ( 133 )...( 149 ): 5H1E_HUMAN
KRTAKRAALMILTVWT

SEQ ID NO: 2702 - protein, 16 aa, Homo Sapiens
  ( 134 )...( 150 ): 5H1E_HUMAN
RTAKRAALMILTVWTI

SEQ ID NO: 2703 - protein, 16 aa, Homo Sapiens
  ( 287 )...( 303 ): 5H1E_HUMAN
RKAARILGLILGAFIL

SEQ ID NO: 2704 - protein, 16 aa, Homo Sapiens
  ( 134 )...( 150 ): 5H1F_HUMAN
KRTPKHAGIMITIVWI

SEQ ID NO: 2705 - protein, 16 aa, Homo Sapiens
  ( 194 )...( 210 ): 5H1F_HUMAN
LALILILYYKIYRAAK

SEQ ID NO: 2706 - protein, 16 aa, Homo Sapiens
  ( 195 )...( 211 ): 5H1F_HUMAN
ALILILYYKIYRAAKT

SEQ ID NO: 2707 - protein, 16 aa, Homo Sapiens
  ( 196 )...( 212 ): 5H1F_HUMAN
LILILYYKIYRAAKTL

SEQ ID NO: 2708 - protein, 16 aa, Homo Sapiens
  ( 197 )...( 213 ): 5H1F_HUMAN
ILILYYKIYRAAKTLY

SEQ ID NO: 2709 - protein, 16 aa, Homo Sapiens
  ( 198 )...( 214 ): 5H1F_HUMAN
LILYYKIYRAAKTLYH

SEQ ID NO: 2710 - protein, 16 aa, Homo Sapiens
  ( 199 )...( 215 ): 5H1F_HUMAN
ILYYKIYRAAKTLYHK

SEQ ID NO: 2711 - protein, 16 aa, Homo Sapiens
  ( 200 )...( 216 ): 5H1F_HUMAN
LYYKIYRAAKTLYHKR

SEQ ID NO: 2712 - protein, 16 aa, Homo Sapiens
  ( 201 )...( 217 ): 5H1F_HUMAN
YYKIYRAAKTLYHKRQ

SEQ ID NO: 2713 - protein, 16 aa, Homo Sapiens
  ( 187 )...( 203 ): 5H2A_HUMAN
NSRTKAFLKIIAVWTI

SEQ ID NO: 2714 - protein, 16 aa, Homo Sapiens
  ( 188 )...( 204 ): 5H2A_HUMAN
SRTKAFLKIIAVWTIS

SEQ ID NO: 2715 - protein, 16 aa, Homo Sapiens
  ( 189 )...( 205 ): 5H2A_HUMAN
RTKAFLKIIAVWTISV

SEQ ID NO: 2716 - protein, 16 aa, Homo Sapiens
  ( 237 )...( 253 ): 5H2B_HUMAN
YFLTIHALQKKAYLVK

SEQ ID NO: 2717 - protein, 16 aa, Homo Sapiens
  ( 238 )...( 254 ): 5H2B_HUMAN
FLTIHALQKKAYLVKN

SEQ ID NO: 2718 - protein, 16 aa, Homo Sapiens
  ( 239 )...( 255 ): 5H2B_HUMAN
LTIHALQKKAYLVKNK

SEQ ID NO: 2719 - protein, 16 aa, Homo Sapiens
  ( 240 )...( 256 ): 5H2B_HUMAN
TIHALQKKAYLVKNKP

SEQ ID NO: 2720 - protein, 16 aa, Homo Sapiens
  ( 241 )...( 257 ): 5H2B_HUMAN
IHALQKKAYLVKNKPP

SEQ ID NO: 2721 - protein, 16 aa, Homo Sapiens
  ( 242 )...( 258 ): 5H2B_HUMAN
HALQKKAYLVKNKPPQ

SEQ ID NO: 2722 - protein, 16 aa, Homo Sapiens
  ( 243 )...( 259 ): 5H2B_HUMAN
ALQKKAYLVKNKPPQR

SEQ ID NO: 2723 - protein, 16 aa, Homo Sapiens
  ( 244 )...( 260 ): 5H2B_HUMAN
LQKKAYLVKNKPPQRL

SEQ ID NO: 2724 - protein, 16 aa, Homo Sapiens
  ( 246 )...( 262 ): 5H2B_HUMAN
KKAYLVKNKPPQRLTW

SEQ ID NO: 2725 - protein, 16 aa, Homo Sapiens
  ( 247 )...( 263 ): 5H2B_HUMAN
KAYLVKNKPPQRLTWL

SEQ ID NO: 2726 - protein, 16 aa, Homo Sapiens
  ( 249 )...( 265 ): 5H2B_HUMAN
YLVKNKPPQRLTWLTV

SEQ ID NO: 2727 - protein, 16 aa, Homo Sapiens
  ( 250 )...( 266 ): 5H2B_HUMAN
LVKNKPPQRLTWLTVS

SEQ ID NO: 2728 - protein, 16 aa, Homo Sapiens
  ( 251 )...( 267 ): 5H2B_HUMAN
VKNKPPQRLTWLTVST

SEQ ID NO: 2729 - protein, 16 aa, Homo Sapiens
  ( 252 )...( 268 ): 5H2B_HUMAN
KNKPPQRLTWLTVSTV

SEQ ID NO: 2730 - protein, 16 aa, Homo Sapiens
  ( 166 )...( 182 ): 5H2C_HUMAN
NSRTKAIMKIAIVWAI

SEQ ID NO: 2731 - protein, 16 aa, Homo Sapiens
  ( 167 )...( 183 ): 5H2C_HUMAN
SRTKAIMKIAIVWAIS

SEQ ID NO: 2732 - protein, 16 aa, Homo Sapiens
  ( 168 )...( 184 ): 5H2C_HUMAN
RTKAIMKIAIVWAISI

SEQ ID NO: 2733 - protein, 16 aa, Homo Sapiens
  ( 307 )...( 323 ): 5H2C_HUMAN
RKASKVLGIVFFVFLI

SEQ ID NO: 2734 - protein, 16 aa, Homo Sapiens
  ( 48 )...( 64 ): 5H4_HUMAN
RQLRKIKTNYFIVSLA

SEQ ID NO: 2735 - protein, 16 aa, Homo Sapiens
  ( 49 )...( 65 ): 5H4_HUMAN
QLRKIKTNYFIVSLAF

SEQ ID NO: 2736 - protein, 16 aa, Homo Sapiens
  ( 59 )...( 75 ): 5H5A_HUMAN
LLVLATILRVRTFHRV

SEQ ID NO: 2737 - protein, 16 aa, Homo Sapiens
  ( 255 )...( 271 ): 5H6_HUMAN
LATKHSRKALKASLTL

SEQ ID NO: 2738 - protein, 16 aa, Homo Sapiens
  ( 258 )...( 274 ): 5H6_HUMAN
KHSRKALKASLTLGIL

SEQ ID NO: 2739 - protein, 16 aa, Homo Sapiens
  ( 259 )...( 275 ): 5H6_HUMAN
HSRKALKASLTLGILL

SEQ ID NO: 2740 - protein, 16 aa, Homo Sapiens
  ( 260 )...( 276 ): 5H6_HUMAN
SRKALKASLTLGILLG

SEQ ID NO: 2741 - protein, 16 aa, Homo Sapiens
  ( 261 )...( 277 ): 5H6_HUMAN
RKALKASLTLGILLGM

SEQ ID NO: 2742 - protein, 16 aa, Homo Sapiens
  ( 108 )...( 124 ): 5H7_HUMAN
FVKKLRQPSNYLIVSL

SEQ ID NO: 2743 - protein, 16 aa, Homo Sapiens
  ( 109 )...( 125 ): 5H7_HUMAN
VKKLRQPSNYLIVSLA

SEQ ID NO: 2744 - protein, 16 aa, Homo Sapiens
  ( 110 )...( 126 ): 5H7_HUMAN
KKLRQPSNYLIVSLAL

SEQ ID NO: 2745 - protein, 16 aa, Homo Sapiens
  ( 305 )...( 321 ): 5H7_HUMAN
LSRLLKHERKNISIFK

SEQ ID NO: 2746 - protein, 16 aa, Homo Sapiens
  ( 248 )...( 264 ): A1AA_HUMAN
MASAKTKTHFSVRLLK

SEQ ID NO: 2747 - protein, 16 aa, Homo Sapiens
  ( 261 )...( 277 ): A1AA_HUMAN
LLKFSREKKAAKTLGI

SEQ ID NO: 2748 - protein, 16 aa, Homo Sapiens
  ( 262 )...( 278 ): A1AA_HUMAN
LKFSREKKAAKTLGIV

SEQ ID NO: 2749 - protein, 16 aa, Homo Sapiens
  ( 268 )...( 284 ): A1AA_HUMAN
KKAAKTLGIVVGCFVL

SEQ ID NO: 2750 - protein, 16 aa, Homo Sapiens
  ( 151 )...( 167 ): A1AB_HUMAN
LQYPTLVTRRKAILAL

SEQ ID NO: 2751 - protein, 16 aa, Homo Sapiens
  ( 152 )...( 168 ): A1AB_HUMAN
QYPTLVTRRKAILALL

SEQ ID NO: 2752 - protein, 16 aa, Homo Sapiens
  ( 154 )...( 170 ): A1AB_HUMAN
PTLVTRRKAILALLSV

SEQ ID NO: 2753 - protein, 16 aa, Homo Sapiens
  ( 155 )...( 171 ): A1AB_HUMAN
TLVTRRKAILALLSVW

SEQ ID NO: 2754 - protein, 16 aa, Homo Sapiens
  ( 156 )...( 172 ): A1AB_HUMAN
LVTRRKAILALLSVWV

SEQ ID NO: 2755 - protein, 16 aa, Homo Sapiens
  ( 157 )...( 173 ): A1AB_HUMAN
VTRRKAILALLSVWVL

SEQ ID NO: 2756 - protein, 16 aa, Homo Sapiens
  ( 158 )...( 174 ): A1AB_HUMAN
TRRKAILALLSVWVLS

SEQ ID NO: 2757 - protein, 16 aa, Homo Sapiens
  ( 159 )...( 175 ): A1AB_HUMAN
RRKAILALLSVWVLST

SEQ ID NO: 2758 - protein, 16 aa, Homo Sapiens
  ( 279 )...( 295 ): A1AB_HUMAN
IAVKLFKFSREKKAAK

SEQ ID NO: 2759 - protein, 16 aa, Homo Sapiens
  ( 281 )...( 297 ): A1AB_HUMAN
VKLFKFSREKKAAKTL

SEQ ID NO: 2760 - protein, 16 aa, Homo Sapiens
  ( 283 )...( 299 ): A1AB_HUMAN
LFKFSREKKAAKTLGI

SEQ ID NO: 2761 - protein, 16 aa, Homo Sapiens
  ( 284 )...( 300 ): A1AB_HUMAN
FKFSREKKAAKTLGIV

SEQ ID NO: 2762 - protein, 16 aa, Homo Sapiens
  ( 288 )...( 304 ): A1AB_HUMAN
REKKAAKTLGIVVGMF

SEQ ID NO: 2763 - protein, 16 aa, Homo Sapiens
  ( 290 )...( 306 ): A1AB_HUMAN
KKAAKTLGIVVGMFIL

SEQ ID NO: 2764 - protein, 16 aa, Homo Sapiens
  ( 337 )...( 353 ): A1AD_HUMAN
LLKFSREKKAAKTLAI

SEQ ID NO: 2765 - protein, 16 aa, Homo Sapiens
  ( 338 )...( 354 ): A1AD_HUMAN
LKFSREKKAAKTLAIV

SEQ ID NO: 2766 - protein, 16 aa, Homo Sapiens
  ( 339 )...( 355 ): A1AD_HUMAN
KFSREKKAAKTLAIVV

SEQ ID NO: 2767 - protein, 16 aa, Homo Sapiens
  ( 340 )...( 356 ): A1AD_HUMAN
FSREKKAAKTLAIVVG

SEQ ID NO: 2768 - protein, 16 aa, Homo Sapiens
  ( 342 )...( 358 ): A1AD_HUMAN
REKKAAKTLAIVVGVF

SEQ ID NO: 2769 - protein, 16 aa, Homo Sapiens
  ( 344 )...( 360 ): A1AD_HUMAN
KKAAKTLAIVVGVFVL

SEQ ID NO: 2770 - protein, 16 aa, Homo Sapiens
  ( 141 )...( 157 ): A2AA_HUMAN
YNLKRTPRRIKAIIIT

SEQ ID NO: 2771 - protein, 16 aa, Homo Sapiens
  ( 142 )...( 158 ): A2AA_HUMAN
NLKRTPRRIKAIIITV

SEQ ID NO: 2772 - protein, 16 aa, Homo Sapiens
  ( 143 )...( 159 ): A2AA_HUMAN
LKRTPRRIKAIIITVW

SEQ ID NO: 2773 - protein, 16 aa, Homo Sapiens
  ( 144 )...( 160 ): A2AA_HUMAN
KRTPRRIKAIIITVWV

SEQ ID NO: 2774 - protein, 16 aa, Homo Sapiens
  ( 145 )...( 161 ): A2AA_HUMAN
RTPRRIKAIIITVWVI

SEQ ID NO: 2775 - protein, 16 aa, Homo Sapiens
  ( 146 )...( 162 ): A2AA_HUMAN
TPRRIKAIIITVWVIS

SEQ ID NO: 2776 - protein, 16 aa, Homo Sapiens
  ( 147 )...( 163 ): A2AA_HUMAN
PRRIKAIIITVWVISA

SEQ ID NO: 2777 - protein, 16 aa, Homo Sapiens
  ( 148 )...( 164 ): A2AA_HUMAN
RRIKAIIITVWVISAV

SEQ ID NO: 2778 - protein, 16 aa, Homo Sapiens
  ( 210 )...( 226 ): A2AA_HUMAN
LIMILVYVRIYQIAKR

SEQ ID NO: 2779 - protein, 16 aa, Homo Sapiens
  ( 211 )...( 227 ): A2AA_HUMAN
IMILVYVRIYQIAKRR

SEQ ID NO: 2780 - protein, 16 aa, Homo Sapiens
  ( 212 )...( 228 ): A2AA_HUMAN
MILVYVRIYQIAKRRT

SEQ ID NO: 2781 - protein, 16 aa, Homo Sapiens
  ( 213 )...( 229 ): A2AA_HUMAN
ILVYVRIYQIAKRRTR

SEQ ID NO: 2782 - protein, 16 aa, Homo Sapiens
  ( 214 )...( 230 ): A2AA_HUMAN
LVYVRIYQIAKRRTRV

SEQ ID NO: 2783 - protein, 16 aa, Homo Sapiens
  ( 127 )...( 143 ): A2AB_HUMAN
RRIKCIILTVWLIAAV

SEQ ID NO: 2784 - protein, 16 aa, Homo Sapiens
  ( 186 )...( 202 ): A2AB_HUMAN
LIMILVYLRIYLIAKR

SEQ ID NO: 2785 - protein, 16 aa, Homo Sapiens
  ( 187 )...( 203 ): A2AB_HUMAN
IMILVYLRIYLIAKRS

SEQ ID NO: 2786 - protein, 16 aa, Homo Sapiens
  ( 334 )...( 350 ): A2AB_HUMAN
RVLATLRGQVLLGRGV

SEQ ID NO: 2787 - protein, 16 aa, Homo Sapiens
  ( 161 )...( 177 ): A2AC_HUMAN
LKRTPRRVKATIVAVW

SEQ ID NO: 2788 - protein, 16 aa, Homo Sapiens
  ( 162 )...( 178 ): A2AC_HUMAN
KRTPRRVKATIVAVWL

SEQ ID NO: 2789 - protein, 16 aa, Homo Sapiens
  ( 166 )...( 182 ): A2AC_HUMAN
RRVKATIVAVWLISAV

SEQ ID NO: 2790 - protein, 16 aa, Homo Sapiens
  ( 224 )...( 240 ): A2AC_HUMAN
LIMGLVYARIYRVAKL

SEQ ID NO: 2791 - protein, 16 aa, Homo Sapiens
  ( 105 )...( 121 ): AA1R_HUMAN
RYLRVKIPLRYKMVVT

SEQ ID NO: 2792 - protein, 16 aa, Homo Sapiens
  ( 106 )...( 122 ): AA1R_HUMAN
YLRVKIPLRYKMVVTP

SEQ ID NO: 2793 - protein, 16 aa, Homo Sapiens
  ( 199 )...( 215 ): AA1R_HUMAN
IYLEVFYLIRKQLNKK

SEQ ID NO: 2794 - protein, 16 aa, Homo Sapiens
  ( 200 )...( 216 ): AA1R_HUMAN
YLEVFYLIRKQLNKKV

SEQ ID NO: 2795 - protein, 16 aa, Homo Sapiens
  ( 201 )...( 217 ): AA1R_HUMAN
LEVFYLIRKQLNKKVS

SEQ ID NO: 2796 - protein, 16 aa, Homo Sapiens
  ( 202 )...( 218 ): AA1R_HUMAN
EVFYLIRKQLNKKVSA

SEQ ID NO: 2797 - protein, 16 aa, Homo Sapiens
  ( 203 )...( 219 ): AA1R_HUMAN
VFYLIRKQLNKKVSAS

SEQ ID NO: 2798 - protein, 16 aa, Homo Sapiens
  ( 222 )...( 238 ): AA1R_HUMAN
PQKYYGKELKIAKSLA

SEQ ID NO: 2799 - protein, 16 aa, Homo Sapiens
  ( 223 )...( 239 ): AA1R_HUMAN
QKYYGKELKIAKSLAL

SEQ ID NO: 2800 - protein, 16 aa, Homo Sapiens
  ( 224 )...( 240 ): AA1R_HUMAN
KYYGKELKIAKSLALI

SEQ ID NO: 2801 - protein, 16 aa, Homo Sapiens
  ( 286 )...( 302 ): AA1R_HUMAN
IVYAFRIQKFRVTFLK

SEQ ID NO: 2802 - protein, 16 aa, Homo Sapiens
  ( 287 )...( 303 ): AA1R_HUMAN
VYAFRIQKFRVTFLKI

SEQ ID NO: 2803 - protein, 16 aa, Homo Sapiens
  ( 114 )...( 130 ): AA2B_HUMAN
KSLVTGTRARGVIAVL

SEQ ID NO: 2804 - protein, 16 aa, Homo Sapiens
  ( 200 )...( 216 ): AA2B_HUMAN
VIYIKIFLVACRQLQR

SEQ ID NO: 2805 - protein, 16 aa, Homo Sapiens
  ( 201 )...( 217 ): AA2B_HUMAN
IYIKIFLVACRQLQRT

SEQ ID NO: 2806 - protein, 16 aa, Homo Sapiens
  ( 104 )...( 120 ): AA3R_HUMAN
IAVDRYLRVKLTVRYK

SEQ ID NO: 2807 - protein, 16 aa, Homo Sapiens
  ( 106 )...( 122 ): AA3R_HUMAN
VDRYLRVKLTVRYKRV

SEQ ID NO: 2808 - protein, 16 aa, Homo Sapiens
  ( 107 )...( 123 ): AA3R_HUMAN
DRYLRVKLTVRYKRVT

SEQ ID NO: 2809 - protein, 16 aa, Homo Sapiens
  ( 108 )...( 124 ): AA3R_HUMAN
RYLRVKLTVRYKRVTT

SEQ ID NO: 2810 - protein, 16 aa, Homo Sapiens
  ( 109 )...( 125 ): AA3R_HUMAN
YLRVKLTVRYKRVTTH

SEQ ID NO: 2811 - protein, 16 aa, Homo Sapiens
  ( 113 )...( 129 ): AA3R_HUMAN
KLTVRYKRVTTHRRIW

SEQ ID NO: 2812 - protein, 16 aa, Homo Sapiens
  ( 114 )...( 130 ): AA3R_HUMAN
LTVRYKRVTTHRRIWL

SEQ ID NO: 2813 - protein, 16 aa, Homo Sapiens
  ( 277 )...( 293 ): AA3R_HUMAN
MNPIVYAYKIKKFKET

SEQ ID NO: 2814 - protein, 16 aa, Homo Sapiens
  ( 283 )...( 299 ): AA3R_HUMAN
AYKIKKFKETYLLILK

SEQ ID NO: 2815 - protein, 16 aa, Homo Sapiens
  ( 284 )...( 300 ): AA3R_HUMAN
YKIKKFKETYLLILKA

SEQ ID NO: 2816 - protein, 16 aa, Homo Sapiens
  ( 355 )...( 371 ): ACM1_HUMAN
FSLVKEKKAARTLSAI

SEQ ID NO: 2817 - protein, 16 aa, Homo Sapiens
  ( 356 )...( 372 ): ACM1_HUMAN
SLVKEKKAARTLSAIL

SEQ ID NO: 2818 - protein, 16 aa, Homo Sapiens
  ( 357 )...( 373 ): ACM1_HUMAN
LVKEKKAARTLSAILL

SEQ ID NO: 2819 - protein, 16 aa, Homo Sapiens
  ( 358 )...( 374 ): ACM1_HUMAN
VKEKKAARTLSAILLA

SEQ ID NO: 2820 - protein, 16 aa, Homo Sapiens
  ( 359 )...( 375 ): ACM1_HUMAN
KEKKAARTLSAILLAF

SEQ ID NO: 2821 - protein, 16 aa, Homo Sapiens
  ( 361 )...( 377 ): ACM1_HUMAN
KKAARTLSAILLAFIL

SEQ ID NO: 2822 - protein, 16 aa, Homo Sapiens
  ( 125 )...( 141 ): ACM2_HUMAN
VTKPLTYPVKRTTKMA

SEQ ID NO: 2823 - protein, 16 aa, Homo Sapiens
  ( 126 )...( 142 ): ACM2_HUMAN
TKPLTYPVKRTTKMAG

SEQ ID NO: 2824 - protein, 16 aa, Homo Sapiens
  ( 357 )...( 373 ): ACM2_HUMAN
KQNIVARKIVKMTKQP

SEQ ID NO: 2825 - protein, 16 aa, Homo Sapiens
  ( 358 )...( 374 ): ACM2_HUMAN
QNIVARKIVKMTKQPA

SEQ ID NO: 2826 - protein, 16 aa, Homo Sapiens
  ( 359 )...( 375 ): ACM2_HUMAN
NIVARKIVKMTKQPAK

SEQ ID NO: 2827 - protein, 16 aa, Homo Sapiens
  ( 360 )...( 376 ): ACM2_HUMAN
IVARKIVKMTKQPAKK

SEQ ID NO: 2828 - protein, 16 aa, Homo Sapiens
  ( 364 )...( 380 ): ACM2_HUMAN
KIVKMTKQPAKKKPPP

SEQ ID NO: 2829 - protein, 16 aa, Homo Sapiens
  ( 365 )...( 381 ): ACM2_HUMAN
IVKMTKQPAKKKPPPS

SEQ ID NO: 2830 - protein, 16 aa, Homo Sapiens
  ( 379 )...( 395 ): ACM2_HUMAN
PSREKKVTRTILAILL

SEQ ID NO: 2831 - protein, 16 aa, Homo Sapiens
  ( 380 )...( 396 ): ACM2_HUMAN
SREKKVTRTILAILLA

SEQ ID NO: 2832 - protein, 16 aa, Homo Sapiens
  ( 381 )...( 397 ): ACM2_HUMAN
REKKVTRTILAILLAF

SEQ ID NO: 2833 - protein, 16 aa, Homo Sapiens
  ( 383 )...( 399 ): ACM2_HUMAN
KKVTRTILAILLAFII

SEQ ID NO: 2834 - protein, 16 aa, Homo Sapiens
  ( 85 )...( 101 ): ACM3_HUMAN
GNILVIVSFKVNKQLK

SEQ ID NO: 2835 - protein, 16 aa, Homo Sapiens
  ( 86 )...( 102 ): ACM3_HUMAN
NILVIVSFKVNKQLKT

SEQ ID NO: 2836 - protein, 16 aa, Homo Sapiens
  ( 87 )...( 103 ): ACM3_HUMAN
ILVIVSFKVNKQLKTV

SEQ ID NO: 2837 - protein, 16 aa, Homo Sapiens
  ( 88 )...( 104 ): ACM3_HUMAN
LVIVSFKVNKQLKTVN

SEQ ID NO: 2838 - protein, 16 aa, Homo Sapiens
  ( 89 )...( 105 ): ACM3_HUMAN
VIVSFKVNKQLKTVNN

SEQ ID NO: 2839 - protein, 16 aa, Homo Sapiens
  ( 90 )...( 106 ): ACM3_HUMAN
IVSFKVNKQLKTVNNY

SEQ ID NO: 2840 - protein, 16 aa, Homo Sapiens
  ( 91 )...( 107 ): ACM3_HUMAN
VSFKVNKQLKTVNNYF

SEQ ID NO: 2841 - protein, 16 aa, Homo Sapiens
  ( 92 )...( 108 ): ACM3_HUMAN
SFKVNKQLKTVNNYFL

SEQ ID NO: 2842 - protein, 16 aa, Homo Sapiens
  ( 93 )...( 109 ): ACM3_HUMAN
FKVNKQLKTVNNYFLL

SEQ ID NO: 2843 - protein, 16 aa, Homo Sapiens
  ( 94 )...( 110 ): ACM3_HUMAN
KVNKQLKTVNNYFLLS

SEQ ID NO: 2844 - protein, 16 aa, Homo Sapiens
  ( 179 )...( 195 ): ACM3_HUMAN
KRTTKRAGVMIGLAWV

SEQ ID NO: 2845 - protein, 16 aa, Homo Sapiens
  ( 456 )...( 472 ): ACM3_HUMAN
LSFKEATLAKRFALKT

SEQ ID NO: 2846 - protein, 16 aa, Homo Sapiens
  ( 461 )...( 477 ): ACM3_HUMAN
ATLAKRFALKTRSQIT

SEQ ID NO: 2847 - protein, 16 aa, Homo Sapiens
  ( 234 )...( 250 ): ACM4_HUMAN
PKEKKAKTLAFLKSPL

SEQ ID NO: 2848 - protein, 16 aa, Homo Sapiens
  ( 235 )...( 251 ): ACM4_HUMAN
KEKKAKTLAFLKSPLM

SEQ ID NO: 2849 - protein, 16 aa, Homo Sapiens
  ( 236 )...( 252 ): ACM4_HUMAN
EKKAKTLAFLKSPLMK

SEQ ID NO: 2850 - protein, 16 aa, Homo Sapiens
  ( 237 )...( 253 ): ACM4_HUMAN
KKAKTLAFLKSPLMKQ

SEQ ID NO: 2851 - protein, 16 aa, Homo Sapiens
  ( 238 )...( 254 ): ACM4_HUMAN
KAKTLAFLKSPLMKQS

SEQ ID NO: 2852 - protein, 16 aa, Homo Sapiens
  ( 239 )...( 255 ): ACM4_HUMAN
AKTLAFLKSPLMKQSV

SEQ ID NO: 2853 - protein, 16 aa, Homo Sapiens
  ( 240 )...( 256 ): ACM4_HUMAN
KTLAFLKSPLMKQSVK

SEQ ID NO: 2854 - protein, 16 aa, Homo Sapiens
  ( 241 )...( 257 ): ACM4_HUMAN
TLAFLKSPLMKQSVKK

SEQ ID NO: 2855 - protein, 16 aa, Homo Sapiens
  ( 242 )...( 258 ): ACM4_HUMAN
LAFLKSPLMKQSVKKP

SEQ ID NO: 2856 - protein, 16 aa, Homo Sapiens
  ( 333 )...( 349 ): ACM4_HUMAN
LNPASRWSKIQIVTKQ

SEQ ID NO: 2857 - protein, 16 aa, Homo Sapiens
  ( 396 )...( 412 ): ACM4_HUMAN
RKVTRTIFAILLAFIL

SEQ ID NO: 2858 - protein, 16 aa, Homo Sapiens
  ( 372 )...( 388 ): ACM5_HUMAN
KSQKCVAYKFRLVVKA

SEQ ID NO: 2859 - protein, 16 aa, Homo Sapiens
  ( 326 )...( 342 ): AG22_HUMAN
QQKLRSVFRVPITWLQ

SEQ ID NO: 2860 - protein, 16 aa, Homo Sapiens
  ( 328 )...( 344 ): AG22_HUMAN
KLRSVFRVPITWLQGK

SEQ ID NO: 2861 - protein, 16 aa, Homo Sapiens
  ( 137 )...( 153 ): AG2R_HUMAN
RLRRTMLVAKVTCIII

SEQ ID NO: 2862 - protein, 16 aa, Homo Sapiens
  ( 138 )...( 154 ): AG2R_HUMAN
LRRTMLVAKVTCIIIW

SEQ ID NO: 2863 - protein, 16 aa, Homo Sapiens
  ( 139 )...( 155 ): AG2R_HUMAN
RRTMLVAKVTCIIIWL

SEQ ID NO: 2864 - protein, 16 aa, Homo Sapiens
  ( 209 )...( 225 ): AG2R_HUMAN
LIILTSYTLIWKALKK

SEQ ID NO: 2865 - protein, 16 aa, Homo Sapiens
  ( 210 )...( 226 ): AG2R_HUMAN
IILTSYTLIWKALKKA

SEQ ID NO: 2866 - protein, 16 aa, Homo Sapiens
  ( 211 )...( 227 ): AG2R_HUMAN
ILTSYTLIWKALKKAY

SEQ ID NO: 2867 - protein, 16 aa, Homo Sapiens
  ( 215 )...( 231 ): AG2R_HUMAN
YTLIWKALKKAYEIQK

SEQ ID NO: 2868 - protein, 16 aa, Homo Sapiens
  ( 216 )...( 232 ): AG2R_HUMAN
TLIWKALKKAYEIQKN

SEQ ID NO: 2869 - protein, 16 aa, Homo Sapiens
  ( 217 )...( 233 ): AG2R_HUMAN
LIWKALKKAYEIQKNK

SEQ ID NO: 2870 - protein, 16 aa, Homo Sapiens
  ( 218 )...( 234 ): AG2R_HUMAN
IWKALKKAYEIQKNKP

SEQ ID NO: 2871 - protein, 16 aa, Homo Sapiens
  ( 303 )...( 319 ): AG2R_HUMAN
GFLGKKFKRYFLQLLK

SEQ ID NO: 2872 - protein, 16 aa, Homo Sapiens
  ( 305 )...( 321 ): AG2R_HUMAN
LGKKFKRYFLQLLKYI

SEQ ID NO: 2873 - protein, 16 aa, Homo Sapiens
  ( 306 )...( 322 ): AG2R_HUMAN
GKKFKRYFLQLLKYIP

SEQ ID NO: 2874 - protein, 16 aa, Homo Sapiens
  ( 307 )...( 323 ): AG2R_HUMAN
KKFKRYFLQLLKYIPP

SEQ ID NO: 2875 - protein, 16 aa, Homo Sapiens
  ( 308 )...( 324 ): AG2R_HUMAN
KFKRYFLQLLKYIPPK

SEQ ID NO: 2876 - protein, 16 aa, Homo Sapiens
  ( 310 )...( 326 ): AG2R_HUMAN
KRYFLQLLKYIPPKAK

SEQ ID NO: 2877 - protein, 16 aa, Homo Sapiens
  ( 137 )...( 153 ): AG2S_HUMAN
RLRRTMLVAKVTCIII

SEQ ID NO: 2878 - protein, 16 aa, Homo Sapiens
  ( 138 )...( 154 ): AG2S_HUMAN
LRRTMLVAKVTCIIIW

SEQ ID NO: 2879 - protein, 16 aa, Homo Sapiens
  ( 139 )...( 155 ): AG2S_HUMAN
RRTMLVAKVTCIIIWL

SEQ ID NO: 2880 - protein, 16 aa, Homo Sapiens
  ( 209 )...( 225 ): AG2S_HUMAN
LIILTSYTLIWKALKK

SEQ ID NO: 2881 - protein, 16 aa, Homo Sapiens
  ( 210 )...( 226 ): AG2S_HUMAN
IILTSYTLIWKALKKA

SEQ ID NO: 2882 - protein, 16 aa, Homo Sapiens
  ( 211 )...( 227 ): AG2S_HUMAN
ILTSYTLIWKALKKAY

SEQ ID NO: 2883 - protein, 16 aa, Homo Sapiens
  ( 215 )...( 231 ): AG2S_HUMAN
YTLIWKALKKAYEIQK

SEQ ID NO: 2884 - protein, 16 aa, Homo Sapiens
  ( 216 )...( 232 ): AG2S_HUMAN
TLIWKALKKAYEIQKN

SEQ ID NO: 2885 - protein, 16 aa, Homo Sapiens
  ( 217 )...( 233 ): AG2S_HUMAN
LIWKALKKAYEIQKNN

SEQ ID NO: 2886 - protein, 16 aa, Homo Sapiens
  ( 218 )...( 234 ): AG2S_HUMAN
IWKALKKAYEIQKNNP

SEQ ID NO: 2887 - protein, 16 aa, Homo Sapiens
  ( 299 )...( 315 ): AG2S_HUMAN
PLFYGFLGKKFKKDIL

SEQ ID NO: 2888 - protein, 16 aa, Homo Sapiens
  ( 302 )...( 318 ): AG2S_HUMAN
YGFLGKKFKKDILQLL

SEQ ID NO: 2889 - protein, 16 aa, Homo Sapiens
  ( 303 )...( 319 ): AG2S_HUMAN
GFLGKKFKKDILQLLK

SEQ ID NO: 2890 - protein, 16 aa, Homo Sapiens
  ( 304 )...( 320 ): AG2S_HUMAN
FLGKKFKKDILQLLKY

SEQ ID NO: 2891 - protein, 16 aa, Homo Sapiens
  ( 305 )...( 321 ): AG2S_HUMAN
LGKKFKKDILQLLKYI

SEQ ID NO: 2892 - protein, 16 aa, Homo Sapiens
  ( 306 )...( 322 ): AG2S_HUMAN
GKKFKKDILQLLKYIP

SEQ ID NO: 2893 - protein, 16 aa, Homo Sapiens
  ( 307 )...( 323 ): AG2S_HUMAN
KKFKKDILQLLKYIPP

SEQ ID NO: 2894 - protein, 16 aa, Homo Sapiens
  ( 308 )...( 324 ): AG2S_HUMAN
KFKKDILQLLKYIPPK

SEQ ID NO: 2895 - protein, 16 aa, Homo Sapiens
  ( 309 )...( 325 ): AG2S_HUMAN
FKKDILQLLKYIPPKA

SEQ ID NO: 2896 - protein, 16 aa, Homo Sapiens
  ( 310 )...( 326 ): AG2S_HUMAN
KKDILQLLKYIPPKAK

SEQ ID NO: 2897 - protein, 16 aa, Homo Sapiens
  ( 311 )...( 327 ): AG2S_HUMAN
KDILQLLKYIPPKAKS

SEQ ID NO: 2898 - protein, 16 aa, Homo Sapiens
  ( 313 )...( 329 ): AG2S_HUMAN
ILQLLKYIPPKAKSHS

SEQ ID NO: 2899 - protein, 16 aa, Homo Sapiens
  ( 237 )...( 253 ): APJ_HUMAN
IEGLRKRRRLLSIIVV

SEQ ID NO: 2900 - protein, 16 aa, Homo Sapiens
  ( 238 )...( 254 ): APJ_HUMAN
EGLRKRRRLLSIIVVL

SEQ ID NO: 2901 - protein, 16 aa, Homo Sapiens
  ( 239 )...( 255 ): APJ_HUMAN
GLRKRRRLLSIIVVLV

SEQ ID NO: 2902 - protein, 16 aa, Homo Sapiens
  ( 240 )...( 256 ): APJ_HUMAN
LRKRRRLLSIIVVLVV

SEQ ID NO: 2903 - protein, 16 aa, Homo Sapiens
  ( 241 )...( 257 ): APJ_HUMAN
RKRRRLLSIIVVLVVT

SEQ ID NO: 2904 - protein, 16 aa, Homo Sapiens
  ( 242 )...( 258 ): APJ_HUMAN
KRRRLLSIIVVLVVTF

SEQ ID NO: 2905 - protein, 16 aa, Homo Sapiens
  ( 243 )...( 259 ): APJ_HUMAN
RRRLLSIIVVLVVTFA

SEQ ID NO: 2906 - protein, 16 aa, Homo Sapiens
  ( 241 )...( 257 ): B1AR_HUMAN
AFVYLRVFREAQKQVK

SEQ ID NO: 2907 - protein, 16 aa, Homo Sapiens
  ( 242 )...( 258 ): B1AR_HUMAN
FVYLRVFREAQKQVKK

SEQ ID NO: 2908 - protein, 16 aa, Homo Sapiens
  ( 243 )...( 259 ): B1AR_HUMAN
VYLRVFREAQKQVKKI

SEQ ID NO: 2909 - protein, 16 aa, Homo Sapiens
  ( 311 )...( 327 ): B1AR_HUMAN
PSRLVALREQKALKTL

SEQ ID NO: 2910 - protein, 16 aa, Homo Sapiens
  ( 312 )...( 328 ): B1AR_HUMAN
SRLVALREQKALKTLG

SEQ ID NO: 2911 - protein, 16 aa, Homo Sapiens
  ( 313 )...( 329 ): B1AR_HUMAN
RLVALREQKALKTLGI

SEQ ID NO: 2912 - protein, 16 aa, Homo Sapiens
  ( 134 )...( 150 ): B2AR_HUMAN
AITSPFKYQSLLTKNK

SEQ ID NO: 2913 - protein, 16 aa, Homo Sapiens
  ( 135 )...( 151 ): B2AR_HUMAN
ITSPFKYQSLLTKNKA

SEQ ID NO: 2914 - protein, 16 aa, Homo Sapiens
  ( 138 )...( 154 ): B2AR_HUMAN
PFKYQSLLTKNKARVI

SEQ ID NO: 2915 - protein, 16 aa, Homo Sapiens
  ( 139 )...( 155 ): B2AR_HUMAN
FKYQSLLTKNKARVII

SEQ ID NO: 2916 - protein, 16 aa, Homo Sapiens
  ( 140 )...( 156 ): B2AR_HUMAN
KYQSLLTKNKARVIIL

SEQ ID NO: 2917 - protein, 16 aa, Homo Sapiens
  ( 141 )...( 157 ): B2AR_HUMAN
YQSLLTKNKARVIILM

SEQ ID NO: 2918 - protein, 16 aa, Homo Sapiens
  ( 142 )...( 158 ): B2AR_HUMAN
QSLLTKNKARVIILMV

SEQ ID NO: 2919 - protein, 16 aa, Homo Sapiens
  ( 143 )...( 159 ): B2AR_HUMAN
SLLTKNKARVIILMVW

SEQ ID NO: 2920 - protein, 16 aa, Homo Sapiens
  ( 144 )...( 160 ): B2AR_HUMAN
LLTKNKARVIILMVWI

SEQ ID NO: 2921 - protein, 16 aa, Homo Sapiens
  ( 145 )...( 161 ): B2AR_HUMAN
LTKNKARVIILMVWIV

SEQ ID NO: 2922 - protein, 16 aa, Homo Sapiens
  ( 146 )...( 162 ): B2AR_HUMAN
TKNKARVIILMVWIVS

SEQ ID NO: 2923 - protein, 16 aa, Homo Sapiens
  ( 147 )...( 163 ): B2AR_HUMAN
KNKARVIILMVWIVSG

SEQ ID NO: 2924 - protein, 16 aa, Homo Sapiens
  ( 218 )...( 234 ): B2AR_HUMAN
VYSRVFQEAKRQLQKI

SEQ ID NO: 2925 - protein, 16 aa, Homo Sapiens
  ( 262 )...( 278 ): B2AR_HUMAN
SKFCLKEHKALKTLGI

SEQ ID NO: 2926 - protein, 16 aa, Homo Sapiens
  ( 263 )...( 279 ): B2AR_HUMAN
KFCLKEHKALKTLGII

SEQ ID NO: 2927 - protein, 16 aa, Homo Sapiens
  ( 149 )...( 165 ): B3AR_HUMAN
VTKRCARTAVVLVWVV

SEQ ID NO: 2928 - protein, 16 aa, Homo Sapiens
  ( 843 )...( 859 ): BAI1_HUMAN
RNTTVLNSKVISVTVK

SEQ ID NO: 2929 - protein, 16 aa, Homo Sapiens
  ( 778 )...( 794 ): BAI3_HUMAN
RNYTVINSKIIVVTIR

SEQ ID NO: 2930 - protein, 16 aa, Homo Sapiens
  ( 969 )...( 985 ): BAI3_HUMAN
AVTGKIRTRLIRKRFL

SEQ ID NO: 2931 - protein, 16 aa, Homo Sapiens
  ( 327 )...( 343 ): BRB2_HUMAN
LNPLVYVIVGKRFRKK

SEQ ID NO: 2932 - protein, 16 aa, Homo Sapiens
  ( 61 )...( 77 ): BRS3_HUMAN
GILGNAILIKVFFKTK

SEQ ID NO: 2933 - protein, 16 aa, Homo Sapiens
  ( 62 )...( 78 ): BRS3_HUMAN
ILGNAILIKVFFKTKS

SEQ ID NO: 2934 - protein, 16 aa, Homo Sapiens
  ( 63 )...( 79 ): BRS3_HUMAN
LGNAILIKVFFKTKSM

SEQ ID NO: 2935 - protein, 16 aa, Homo Sapiens
  ( 64 )...( 80 ): BRS3_HUMAN
GNAILIKVFFKTKSMQ

SEQ ID NO: 2936 - protein, 16 aa, Homo Sapiens
  ( 65 )...( 81 ): BRS3_HUMAN
NAILIKVFFKTKSMQT

SEQ ID NO: 2937 - protein, 16 aa, Homo Sapiens
  ( 66 )...( 82 ): BRS3_HUMAN
AILIKVFFKTKSMQTV

SEQ ID NO: 2938 - protein, 16 aa, Homo Sapiens
  ( 67 )...( 83 ): BRS3_HUMAN
ILIKVFFKTKSMQTVP

SEQ ID NO: 2939 - protein, 16 aa, Homo Sapiens
  ( 68 )...( 84 ): BRS3_HUMAN
LIKVFFKTKSMQTVPN

SEQ ID NO: 2940 - protein, 16 aa, Homo Sapiens
  ( 69 )...( 85 ): BRS3_HUMAN
IKVFFKTKSMQTVPNI

SEQ ID NO: 2941 - protein, 16 aa, Homo Sapiens
  ( 70 )...( 86 ): BRS3_HUMAN
KVFFKTKSMQTVPNIF

SEQ ID NO: 2942 - protein, 16 aa, Homo Sapiens
  ( 261 )...( 277 ): BRS3_HUMAN
KQIESRKRIARTVLVL

SEQ ID NO: 2943 - protein, 16 aa, Homo Sapiens
  ( 262 )...( 278 ): BRS3_HUMAN
QIESRKRIARTVLVLV

SEQ ID NO: 2944 - protein, 16 aa, Homo Sapiens
  ( 263 )...( 279 ): BRS3_HUMAN
IESRKRIARTVLVLVA

SEQ ID NO: 2945 - protein, 16 aa, Homo Sapiens
  ( 264 )...( 280 ): BRS3_HUMAN
ESRKRIARTVLVLVAL

SEQ ID NO: 2946 - protein, 16 aa, Homo Sapiens
  ( 265 )...( 281 ): BRS3_HUMAN
SRKRIARTVLVLVALF

SEQ ID NO: 2947 - protein, 16 aa, Homo Sapiens
  ( 266 )...( 282 ): BRS3_HUMAN
RKRIARTVLVLVALFA

SEQ ID NO: 2948 - protein, 16 aa, Homo Sapiens
  ( 267 )...( 283 ): BRS3_HUMAN
KRIARTVLVLVALFAL

SEQ ID NO: 2949 - protein, 16 aa, Homo Sapiens
  ( 330 )...( 346 ): BRS3_HUMAN
LYWLSKSFQKHFKAQL

SEQ ID NO: 2950 - protein, 16 aa, Homo Sapiens
  ( 368 )...( 384 ): C3AR_HUMAN
FAKSQSKTFRVAVVVV

SEQ ID NO: 2951 - protein, 16 aa, Homo Sapiens
  ( 369 )...( 385 ): C3AR_HUMAN
AKSQSKTFRVAVVVVA

SEQ ID NO: 2952 - protein, 16 aa, Homo Sapiens
  ( 370 )...( 386 ): C3AR_HUMAN
KSQSKTFRVAVVVVAV

SEQ ID NO: 2953 - protein, 16 aa, Homo Sapiens
  ( 48 )...( 64 ): C3X1_HUMAN
GNLLVVFALTNSKKPK

SEQ ID NO: 2954 - protein, 16 aa, Homo Sapiens
  ( 49 )...( 65 ): C3X1_HUMAN
NLLVVFALTNSKKPKS

SEQ ID NO: 2955 - protein, 16 aa, Homo Sapiens
  ( 50 )...( 66 ): C3X1_HUMAN
LLVVFALTNSKKPKSV

SEQ ID NO: 2956 - protein, 16 aa, Homo Sapiens
  ( 51 )...( 67 ): C3X1_HUMAN
LVVFALTNSKKPKSVT

SEQ ID NO: 2957 - protein, 16 aa, Homo Sapiens
  ( 218 )...( 234 ): C3X1_HUMAN
LFSCKNHKKAKAIKLI

SEQ ID NO: 2958 - protein, 16 aa, Homo Sapiens
  ( 219 )...( 235 ): C3X1_HUMAN
FSCKNHKKAKAIKLIL

SEQ ID NO: 2959 - protein, 16 aa, Homo Sapiens
  ( 220 )...( 236 ): C3X1_HUMAN
SCKNHKKAKAIKLILL

SEQ ID NO: 2960 - protein, 16 aa, Homo Sapiens
  ( 221 )...( 237 ): C3X1_HUMAN
CKNHKKAKAIKLILLV

SEQ ID NO: 2961 - protein, 16 aa, Homo Sapiens
  ( 222 )...( 238 ): C3X1_HUMAN
KNHKKAKAIKLILLVV

SEQ ID NO: 2962 - protein, 16 aa, Homo Sapiens
  ( 223 )...( 239 ): C3X1_HUMAN
NHKKAKAIKLILLVVI

SEQ ID NO: 2963 - protein, 16 aa, Homo Sapiens
  ( 224 )...( 240 ): C3X1_HUMAN
HKKAKAIKLILLVVIV

SEQ ID NO: 2964 - protein, 16 aa, Homo Sapiens
  ( 225 )...( 241 ): C3X1_HUMAN
KKAKAIKLILLVVIVF

SEQ ID NO: 2965 - protein, 16 aa, Homo Sapiens
  ( 226 )...( 242 ): C3X1_HUMAN
KAKAIKLILLVVIVFF

SEQ ID NO: 2966 - protein, 16 aa, Homo Sapiens
  ( 233 )...( 249 ): C5AR_HUMAN
RATRSTKTLKVVVAVV

SEQ ID NO: 2967 - protein, 16 aa, Homo Sapiens
  ( 234 )...( 250 ): C5AR_HUMAN
ATRSTKTLKVVVAVVA

SEQ ID NO: 2968 - protein, 16 aa, Homo Sapiens
  ( 235 )...( 251 ): C5AR_HUMAN
TRSTKTLKVVVAVVAS

SEQ ID NO: 2969 - protein, 16 aa, Homo Sapiens
  ( 236 )...( 252 ): C5AR_HUMAN
RSTKTLKVVVAVVASF

SEQ ID NO: 2970 - protein, 16 aa, Homo Sapiens
  ( 298 )...( 314 ): C5AR_HUMAN
IIYVVAGQGFQGRLRK

SEQ ID NO: 2971 - protein, 16 aa, Homo Sapiens
  ( 33 )...( 49 ): CALR_HUMAN
TIEPKPFLYVVGRKKM

SEQ ID NO: 2972 - protein, 16 aa, Homo Sapiens
  ( 175 )...( 191 ): CALR_HUMAN
KLTTIFPLNWKYRKAL

SEQ ID NO: 2973 - protein, 16 aa, Homo Sapiens
  ( 414 )...( 430 ): CALR_HUMAN
VQTTVKRQWAQFKIQW

SEQ ID NO: 2974 - protein, 16 aa, Homo Sapiens
  ( 415 )...( 431 ): CALR_HUMAN
QTTVKRQWAQFKIQWN

SEQ ID NO: 2975 - protein, 16 aa, Homo Sapiens
  ( 416 )...( 432 ): CALR_HUMAN
TTVKRQWAQFKIQWNQ

SEQ ID NO: 2976 - protein, 16 aa, Homo Sapiens
  ( 278 )...( 294 ): CASR_HUMAN
PLIKEIVRRNITGKIW

SEQ ID NO: 2977 - protein, 16 aa, Homo Sapiens
  ( 279 )...( 295 ): CASR_HUMAN
LIKEIVRRNITGKIWL

SEQ ID NO: 2978 - protein, 16 aa, Homo Sapiens
  ( 280 )...( 296 ): CASR_HUMAN
IKEIVRRNITGKIWLA

SEQ ID NO: 2979 - protein, 16 aa, Homo Sapiens
  ( 281 )...( 297 ): CASR_HUMAN
KEIVRRNITGKIWLAS

SEQ ID NO: 2980 - protein, 16 aa, Homo Sapiens
  ( 322 )...( 338 ): CASR_HUMAN
LKAGQIPGFREFLKKV

SEQ ID NO: 2981 - protein, 16 aa, Homo Sapiens
  ( 452 )...( 468 ): CASR_HUMAN
IKKVEAWQVLKHLRHL

SEQ ID NO: 2982 - protein, 16 aa, Homo Sapiens
  ( 453 )...( 469 ): CASR_HUMAN
KKVEAWQVLKHLRHLN

SEQ ID NO: 2983 - protein, 16 aa, Homo Sapiens
  ( 629 )...( 645 ): CASR_HUMAN
FVLGVFIKFRNTPIVK

SEQ ID NO: 2984 - protein, 16 aa, Homo Sapiens
  ( 630 )...( 646 ): CASR_HUMAN
VLGVFIKFRNTPIVKA

SEQ ID NO: 2985 - protein, 16 aa, Homo Sapiens
  ( 631 )...( 647 ): CASR_HUMAN
LGVFIKFRNTPIVKAT

SEQ ID NO: 2986 - protein, 16 aa, Homo Sapiens
  ( 304 )...( 320 ): CB1R_HUMAN
HAVRMIQRGTQKSIII

SEQ ID NO: 2987 - protein, 16 aa, Homo Sapiens
  ( 305 )...( 321 ): CB1R_HUMAN
AVRMIQRGTQKSIIIH

SEQ ID NO: 2988 - protein, 16 aa, Homo Sapiens
  ( 306 )...( 322 ): CB1R_HUMAN
VRMIQRGTQKSIIIHT

SEQ ID NO: 2989 - protein, 16 aa, Homo Sapiens
  ( 450 )...( 466 ): CB1R_HUMAN
IKSTVKIAKVTMSVST

SEQ ID NO: 2990 - protein, 16 aa, Homo Sapiens
  ( 52 )...( 68 ): CB2R_HUMAN
VAVLYLILSSHQLRRK

SEQ ID NO: 2991 - protein, 16 aa, Homo Sapiens
  ( 141 )...( 157 ): CB2R_HUMAN
YKALLTRGRALVTLGI

SEQ ID NO: 2992 - protein, 16 aa, Homo Sapiens
  ( 142 )...( 158 ): CB2R_HUMAN
KALLTRGRALVTLGIM

SEQ ID NO: 2993 - protein, 16 aa, Homo Sapiens
  ( 56 )...( 72 ): CCKR_HUMAN
VLGNTLVITVLIRNKR

SEQ ID NO: 2994 - protein, 16 aa, Homo Sapiens
  ( 57 )...( 73 ): CCKR_HUMAN
LGNTLVITVLIRNKRM

SEQ ID NO: 2995 - protein, 16 aa, Homo Sapiens
  ( 58 )...( 74 ): CCKR_HUMAN
GNTLVITVLIRNKRMR

SEQ ID NO: 2996 - protein, 16 aa, Homo Sapiens
  ( 59 )...( 75 ): CCKR_HUMAN
NTLVITVLIRNKRMRT

SEQ ID NO: 2997 - protein, 16 aa, Homo Sapiens
  ( 60 )...( 76 ): CCKR_HUMAN
TLVITVLIRNKRMRTV

SEQ ID NO: 2998 - protein, 16 aa, Homo Sapiens
  ( 61 )...( 77 ): CCKR_HUMAN
LVITVLIRNKRMRTVT

SEQ ID NO: 2999 - protein, 16 aa, Homo Sapiens
  ( 62 )...( 78 ): CCKR_HUMAN
VITVLIRNKRMRTVTN

SEQ ID NO: 3000 - protein, 16 aa, Homo Sapiens
  ( 63 )...( 79 ): CCKR_HUMAN
ITVLIRNKRMRTVTNI

SEQ ID NO: 3001 - protein, 16 aa, Homo Sapiens
  ( 146 )...( 162 ): CCKR_HUMAN
PLQSRVWQTKSHALKV

SEQ ID NO: 3002 - protein, 16 aa, Homo Sapiens
  ( 147 )...( 163 ): CCKR_HUMAN
LQSRVWQTKSHALKVI

SEQ ID NO: 3003 - protein, 16 aa, Homo Sapiens
  ( 148 )...( 164 ): CCKR_HUMAN
QSRVWQTKSHALKVIA

SEQ ID NO: 3004 - protein, 16 aa, Homo Sapiens
  ( 150 )...( 166 ): CCKR_HUMAN
RVWQTKSHALKVIAAT

SEQ ID NO: 3005 - protein, 16 aa, Homo Sapiens
  ( 302 )...( 318 ): CCKR_HUMAN
AANLMAKKRVIRMLIV

SEQ ID NO: 3006 - protein, 16 aa, Homo Sapiens
  ( 303 )...( 319 ): CCKR_HUMAN
ANLMAKKRVIRMLIVI

SEQ ID NO: 3007 - protein, 16 aa, Homo Sapiens
  ( 304 )...( 320 ): CCKR_HUMAN
NLMAKKRVIRMLIVIV

SEQ ID NO: 3008 - protein, 16 aa, Homo Sapiens
  ( 305 )...( 321 ): CCKR_HUMAN
LMAKKRVIRMLIVIVV

SEQ ID NO: 3009 - protein, 16 aa, Homo Sapiens
  ( 306 )...( 322 ): CCKR_HUMAN
MAKKRVIRMLIVIVVL

SEQ ID NO: 3010 - protein, 16 aa, Homo Sapiens
  ( 307 )...( 323 ): CCKR_HUMAN
AKKRVIRMLIVIVVLF

SEQ ID NO: 3011 - protein, 16 aa, Homo Sapiens
  ( 308 )...( 324 ): CCKR_HUMAN
KKRVIRMLIVIVVLFF

SEQ ID NO: 3012 - protein, 16 aa, Homo Sapiens
  ( 309 )...( 325 ): CCKR_HUMAN
KRVIRMLIVIVVLFFL

SEQ ID NO: 3013 - protein, 16 aa, Homo Sapiens
  ( 247 )...( 263 ): CCR3_HUMAN
GQRRLRAMRLVVVVVV

SEQ ID NO: 3014 - protein, 16 aa, Homo Sapiens
  ( 55 )...( 71 ): CCR4_HUMAN
GNGLVILVMGYQKKLR

SEQ ID NO: 3015 - protein, 16 aa, Homo Sapiens
  ( 56 )...( 72 ): CCR4_HUMAN
NGLVILVMGYQKKLRS

SEQ ID NO: 3016 - protein, 16 aa, Homo Sapiens
  ( 57 )...( 73 ): CCR4_HUMAN
GLVILVMGYQKKLRSM

SEQ ID NO: 3017 - protein, 16 aa, Homo Sapiens
  ( 58 )...( 74 ): CCR4_HUMAN
LVILVMGYQKKLRSMT

SEQ ID NO: 3018 - protein, 16 aa, Homo Sapiens
  ( 60 )...( 76 ): CCR4_HUMAN
ILVMGYQKKLRSMTDK

SEQ ID NO: 3019 - protein, 16 aa, Homo Sapiens
  ( 145 )...( 161 ): CCR4_HUMAN
QRPRKLLAEKVVYVGV

SEQ ID NO: 3020 - protein, 16 aa, Homo Sapiens
  ( 146 )...( 162 ): CCR4_HUMAN
RPRKLLAEKVVYVGVW

SEQ ID NO: 3021 - protein, 16 aa, Homo Sapiens
  ( 230 )...( 246 ): CCR4_HUMAN
KGHQKRKALKTTVILI

SEQ ID NO: 3022 - protein, 16 aa, Homo Sapiens
  ( 231 )...( 247 ): CCR4_HUMAN
GHQKRKALKTTVILIL

SEQ ID NO: 3023 - protein, 16 aa, Homo Sapiens
  ( 232 )...( 248 ): CCR4_HUMAN
HQKRKALKTTVILILA

SEQ ID NO: 3024 - protein, 16 aa, Homo Sapiens
  ( 233 )...( 249 ): CCR4_HUMAN
QKRKALKTTVILILAF

SEQ ID NO: 3025 - protein, 16 aa, Homo Sapiens
  ( 234 )...( 250 ): CCR4_HUMAN
KRKALKTTVILILAFF

SEQ ID NO: 3026 - protein, 16 aa, Homo Sapiens
  ( 235 )...( 251 ): CCR4_HUMAN
RKALKTTVILILAFFA

SEQ ID NO: 3027 - protein, 16 aa, Homo Sapiens
  ( 252 )...( 268 ): CCR5_HUMAN
PQRQKAVRVAILVTSI

SEQ ID NO: 3028 - protein, 16 aa, Homo Sapiens
  ( 253 )...( 269 ): CCR5_HUMAN
QRQKAVRVAILVTSIF

SEQ ID NO: 3029 - protein, 16 aa, Homo Sapiens
  ( 254 )...( 270 ): CCR5_HUMAN
RQKAVRVAILVTSIFF

SEQ ID NO: 3030 - protein, 16 aa, Homo Sapiens
  ( 127 )...( 143 ): CCR6_HUMAN
RFIVVVKATKAYNQQA

SEQ ID NO: 3031 - protein, 16 aa, Homo Sapiens
  ( 128 )...( 144 ): CCR6_HUMAN
FIVVVKATKAYNQQAK

SEQ ID NO: 3032 - protein, 16 aa, Homo Sapiens
  ( 139 )...( 155 ): CCR6_HUMAN
NQQAKRMTWGKVTSLL

SEQ ID NO: 3033 - protein, 16 aa, Homo Sapiens
  ( 140 )...( 156 ): CCR6_HUMAN
QQAKRMTWGKVTSLLI

SEQ ID NO: 3034 - protein, 16 aa, Homo Sapiens
  ( 141 )...( 157 ): CCR6_HUMAN
QAKRMTWGKVTSLLIW

SEQ ID NO: 3035 - protein, 16 aa, Homo Sapiens
  ( 213 )...( 229 ): CCR6_HUMAN
VIIKTLLHAGGFQKHR

SEQ ID NO: 3036 - protein, 16 aa, Homo Sapiens
  ( 214 )...( 230 ): CCR6_HUMAN
IIKTLLHAGGFQKHRS

SEQ ID NO: 3037 - protein, 16 aa, Homo Sapiens
  ( 215 )...( 231 ): CCR6_HUMAN
IKTLLHAGGFQKHRSL

SEQ ID NO: 3038 - protein, 16 aa, Homo Sapiens
  ( 217 )...( 233 ): CCR6_HUMAN
TLLHAGGFQKHRSLKI

SEQ ID NO: 3039 - protein, 16 aa, Homo Sapiens
  ( 218 )...( 234 ): CCR6_HUMAN
LLHAGGFQKHRSLKII

SEQ ID NO: 3040 - protein, 16 aa, Homo Sapiens
  ( 221 )...( 237 ): CCR6_HUMAN
AGGFQKHRSLKIIFLV

SEQ ID NO: 3041 - protein, 16 aa, Homo Sapiens
  ( 222 )...( 238 ): CCR6_HUMAN
GGFQKHRSLKIIFLVM

SEQ ID NO: 3042 - protein, 16 aa, Homo Sapiens
  ( 223 )...( 239 ): CCR6_HUMAN
GFQKHRSLKIIFLVMA

SEQ ID NO: 3043 - protein, 16 aa, Homo Sapiens
  ( 224 )...( 240 ): CCR6_HUMAN
FQKHRSLKIIFLVMAV

SEQ ID NO: 3044 - protein, 16 aa, Homo Sapiens
  ( 225 )...( 241 ): CCR6_HUMAN
QKHRSLKIIFLVMAVF

SEQ ID NO: 3045 - protein, 16 aa, Homo Sapiens
  ( 226 )...( 242 ): CCR6_HUMAN
KHRSLKIIFLVMAVFL

SEQ ID NO: 3046 - protein, 16 aa, Homo Sapiens
  ( 289 )...( 305 ): CCR6_HUMAN
AFVSLKFRKNFWKLVK

SEQ ID NO: 3047 - protein, 16 aa, Homo Sapiens
  ( 291 )...( 307 ): CCR6_HUMAN
VSLKFRKNFWKLVKDI

SEQ ID NO: 3048 - protein, 16 aa, Homo Sapiens
  ( 292 )...( 308 ): CCR6_HUMAN
SLKFRKNFWKLVKDIG

SEQ ID NO: 3049 - protein, 16 aa, Homo Sapiens
  ( 725 )...( 741 ): CD97_HUMAN
INPDMKKLKKARALTI

SEQ ID NO: 3050 - protein, 16 aa, Homo Sapiens
  ( 727 )...( 743 ): CD97_HUMAN
PDMKKLKKARALTITA

SEQ ID NO: 3051 - protein, 16 aa, Homo Sapiens
  ( 728 )...( 744 ): CD97_HUMAN
DMKKLKKARALTITAI

SEQ ID NO: 3052 - protein, 16 aa, Homo Sapiens
  ( 729 )...( 745 ): CD97_HUMAN
MKKLKKARALTITAIA

SEQ ID NO: 3053 - protein, 16 aa, Homo Sapiens
  ( 730 )...( 746 ): CD97_HUMAN
KKLKKARALTITAIAQ

SEQ ID NO: 3054 - protein, 16 aa, Homo Sapiens
  ( 731 )...( 747 ): CD97_HUMAN
KLKKARALTITAIAQL

SEQ ID NO: 3055 - protein, 16 aa, Homo Sapiens
  ( 732 )...( 748 ): CD97_HUMAN
LKKARALTITAIAQLF

SEQ ID NO: 3056 - protein, 16 aa, Homo Sapiens
  ( 733 )...( 749 ): CD97_HUMAN
KKARALTITAIAQLFL

SEQ ID NO: 3057 - protein, 16 aa, Homo Sapiens
  ( 306 )...( 322 ): CGRR_HUMAN
LFFLLNIVRVLITKLK

SEQ ID NO: 3058 - protein, 16 aa, Homo Sapiens
  ( 307 )...( 323 ): CGRR_HUMAN
FFLLNIVRVLITKLKV

SEQ ID NO: 3059 - protein, 16 aa, Homo Sapiens
  ( 308 )...( 324 ): CGRR_HUMAN
FLLNIVRVLITKLKVT

SEQ ID NO: 3060 - protein, 16 aa, Homo Sapiens
  ( 309 )...( 325 ): CGRR_HUMAN
LLNIVRVLITKLKVTH

SEQ ID NO: 3061 - protein, 16 aa, Homo Sapiens
  ( 310 )...( 326 ): CGRR_HUMAN
LNIVRVLITKLKVTHQ

SEQ ID NO: 3062 - protein, 16 aa, Homo Sapiens
  ( 311 )...( 327 ): CGRR_HUMAN
NIVRVLITKLKVTHQA

SEQ ID NO: 3063 - protein, 16 aa, Homo Sapiens
  ( 153 )...( 169 ): CKD6_HUMAN
HRLRTRAKNLLLATIV

SEQ ID NO: 3064 - protein, 16 aa, Homo Sapiens
  ( 154 )...( 170 ): CKD6_HUMAN
RLRTRAKNLLLATIVW

SEQ ID NO: 3065 - protein, 16 aa, Homo Sapiens
  ( 155 )...( 171 ): CKD6_HUMAN
LRTRAKNLLLATIVWA

SEQ ID NO: 3066 - protein, 16 aa, Homo Sapiens
  ( 156 )...( 172 ): CKD6_HUMAN
RTRAKNLLLATIVWAV

SEQ ID NO: 3067 - protein, 16 aa, Homo Sapiens
  ( 51 )...( 67 ): CKR1_HUMAN
GNILVVLVLVQYKRLK

SEQ ID NO: 3068 - protein, 16 aa, Homo Sapiens
  ( 52 )...( 68 ): CKR1_HUMAN
NILVVLVLVQYKRLKN

SEQ ID NO: 3069 - protein, 16 aa, Homo Sapiens
  ( 53 )...( 69 ): CKR1_HUMAN
ILVVLVLVQYKRLKNM

SEQ ID NO: 3070 - protein, 16 aa, Homo Sapiens
  ( 54 )...( 70 ): CKR1_HUMAN
LVVLVLVQYKRLKNMT

SEQ ID NO: 3071 - protein, 16 aa, Homo Sapiens
  ( 55 )...( 71 ): CKR1_HUMAN
VVLVLVQYKRLKNMTS

SEQ ID NO: 3072 - protein, 16 aa, Homo Sapiens
  ( 56 )...( 72 ): CKR1_HUMAN
VLVLVQYKRLKNMTSI

SEQ ID NO: 3073 - protein, 16 aa, Homo Sapiens
  ( 57 )...( 73 ): CKR1_HUMAN
LVLVQYKRLKNMTSIY

SEQ ID NO: 3074 - protein, 16 aa, Homo Sapiens
  ( 58 )...( 74 ): CKR1_HUMAN
VLVQYKRLKNMTSIYL

SEQ ID NO: 3075 - protein, 16 aa, Homo Sapiens
  ( 59 )...( 75 ): CKR1_HUMAN
LVQYKRLKNMTSIYLL

SEQ ID NO: 3076 - protein, 16 aa, Homo Sapiens
  ( 60 )...( 76 ): CKR1_HUMAN
VQYKRLKNMTSIYLLN

SEQ ID NO: 3077 - protein, 16 aa, Homo Sapiens
  ( 61 )...( 77 ): CKR1_HUMAN
QYKRLKNMTSIYLLNL

SEQ ID NO: 3078 - protein, 16 aa, Homo Sapiens
  ( 63 )...( 79 ): CKR1_HUMAN
KRLKNMTSIYLLNLAI

SEQ ID NO: 3079 - protein, 16 aa, Homo Sapiens
  ( 219 )...( 235 ): CKR1_HUMAN
YTGIIKILLRRPNEKK

SEQ ID NO: 3080 - protein, 16 aa, Homo Sapiens
  ( 220 )...( 236 ): CKR1_HUMAN
TGIIKILLRRPNEKKS

SEQ ID NO: 3081 - protein, 16 aa, Homo Sapiens
  ( 222 )...( 238 ): CKR1_HUMAN
IIKILLRRPNEKKSKA

SEQ ID NO: 3082 - protein, 16 aa, Homo Sapiens
  ( 230 )...( 246 ): CKR1_HUMAN
PNEKKSKAVRLIFVIM

SEQ ID NO: 3083 - protein, 16 aa, Homo Sapiens
  ( 231 )...( 247 ): CKR1_HUMAN
NEKKSKAVRLIFVIMI

SEQ ID NO: 3084 - protein, 16 aa, Homo Sapiens
  ( 232 )...( 248 ): CKR1_HUMAN
EKKSKAVRLIFVIMII

SEQ ID NO: 3085 - protein, 16 aa, Homo Sapiens
  ( 233 )...( 249 ): CKR1_HUMAN
KKSKAVRLIFVIMIIF

SEQ ID NO: 3086 - protein, 16 aa, Homo Sapiens
  ( 234 )...( 250 ): CKR1_HUMAN
KSKAVRLIFVIMIIFF

SEQ ID NO: 3087 - protein, 16 aa, Homo Sapiens
  ( 59 )...( 75 ): CKR2_HUMAN
GNMLVVLILINCKKLK

SEQ ID NO: 3088 - protein, 16 aa, Homo Sapiens
  ( 235 )...( 251 ): CKR2_HUMAN
EKKRHRAVRVIFTIMI

SEQ ID NO: 3089 - protein, 16 aa, Homo Sapiens
  ( 236 )...( 252 ): CKR2_HUMAN
KKRHRAVRVIFTIMIV

SEQ ID NO: 3090 - protein, 16 aa, Homo Sapiens
  ( 336 )...( 352 ): CKR2_HUMAN
GVRPGKNVKVTTQGLL

SEQ ID NO: 3091 - protein, 16 aa, Homo Sapiens
  ( 49 )...( 65 ): CKR3_HUMAN
LLGNVVVVMILIKYRR

SEQ ID NO: 3092 - protein, 16 aa, Homo Sapiens
  ( 50 )...( 66 ): CKR3_HUMAN
LGNVVVVMILIKYRRL

SEQ ID NO: 3093 - protein, 16 aa, Homo Sapiens
  ( 51 )...( 67 ): CKR3_HUMAN
GNVVVVMILIKYRRLR

SEQ ID NO: 3094 - protein, 16 aa, Homo Sapiens
  ( 52 )...( 68 ): CKR3_HUMAN
NVVVVMILIKYRRLRI

SEQ ID NO: 3095 - protein, 16 aa, Homo Sapiens
  ( 53 )...( 69 ): CKR3_HUMAN
VVVVMILIKYRRLRIM

SEQ ID NO: 3096 - protein, 16 aa, Homo Sapiens
  ( 54 )...( 70 ): CKR3_HUMAN
VVVMILIKYRRLRIMT

SEQ ID NO: 3097 - protein, 16 aa, Homo Sapiens
  ( 55 )...( 71 ): CKR3_HUMAN
VVMILIKYRRLRIMTN

SEQ ID NO: 3098 - protein, 16 aa, Homo Sapiens
  ( 56 )...( 72 ): CKR3_HUMAN
VMILIKYRRLRIMTNI

SEQ ID NO: 3099 - protein, 16 aa, Homo Sapiens
  ( 58 )...( 74 ): CKR3_HUMAN
ILIKYRRLRIMTNIYL

SEQ ID NO: 3100 - protein, 16 aa, Homo Sapiens
  ( 59 )...( 75 ): CKR3_HUMAN
LIKYRRLRIMTNIYLL

SEQ ID NO: 3101 - protein, 16 aa, Homo Sapiens
  ( 219 )...( 235 ): CKR3_HUMAN
YTGIIKTLLRCPSKKK

SEQ ID NO: 3102 - protein, 16 aa, Homo Sapiens
  ( 220 )...( 236 ): CKR3_HUMAN
TGIIKTLLRCPSKKKY

SEQ ID NO: 3103 - protein, 16 aa, Homo Sapiens
  ( 221 )...( 237 ): CKR3_HUMAN
GIIKTLLRCPSKKKYK

SEQ ID NO: 3104 - protein, 16 aa, Homo Sapiens
  ( 222 )...( 238 ): CKR3_HUMAN
IIKTLLRCPSKKKYKA

SEQ ID NO: 3105 - protein, 16 aa, Homo Sapiens
  ( 223 )...( 239 ): CKR3_HUMAN
IKTLLRCPSKKKYKAI

SEQ ID NO: 3106 - protein, 16 aa, Homo Sapiens
  ( 226 )...( 242 ): CKR3_HUMAN
LLRCPSKKKYKAIRLI

SEQ ID NO: 3107 - protein, 16 aa, Homo Sapiens
  ( 229 )...( 245 ): CKR3_HUMAN
CPSKKKYKAIRLIFVI

SEQ ID NO: 3108 - protein, 16 aa, Homo Sapiens
  ( 230 )...( 246 ): CKR3_HUMAN
PSKKKYKAIRLIFVIM

SEQ ID NO: 3109 - protein, 16 aa, Homo Sapiens
  ( 231 )...( 247 ): CKR3_HUMAN
SKKKYKAIRLIFVIMA

SEQ ID NO: 3110 - protein, 16 aa, Homo Sapiens
  ( 232 )...( 248 ): CKR3_HUMAN
KKKYKAIRLIFVIMAV

SEQ ID NO: 3111 - protein, 16 aa, Homo Sapiens
  ( 233 )...( 249 ): CKR3_HUMAN
KKYKAIRLIFVIMAVF

SEQ ID NO: 3112 - protein, 16 aa, Homo Sapiens
  ( 234 )...( 250 ): CKR3_HUMAN
KYKAIRLIFVIMAVFF

SEQ ID NO: 3113 - protein, 16 aa, Homo Sapiens
  ( 54 )...( 70 ): CKR4_HUMAN
LLGNSVVVLVLFKYKR

SEQ ID NO: 3114 - protein, 16 aa, Homo Sapiens
  ( 55 )...( 71 ): CKR4_HUMAN
LGNSVVVLVLFKYKRL

SEQ ID NO: 3115 - protein, 16 aa, Homo Sapiens
  ( 56 )...( 72 ): CKR4_HUMAN
GNSVVVLVLFKYKRLR

SEQ ID NO: 3116 - protein, 16 aa, Homo Sapiens
  ( 57 )...( 73 ): CKR4_HUMAN
NSVVVLVLFKYKRLRS

SEQ ID NO: 3117 - protein, 16 aa, Homo Sapiens
  ( 58 )...( 74 ): CKR4_HUMAN
SVVVLVLFKYKRLRSM

SEQ ID NO: 3118 - protein, 16 aa, Homo Sapiens
  ( 59 )...( 75 ): CKR4_HUMAN
VVVLVLFKYKRLRSMT

SEQ ID NO: 3119 - protein, 16 aa, Homo Sapiens
  ( 60 )...( 76 ): CKR4_HUMAN
VVLVLFKYKRLRSMTD

SEQ ID NO: 3120 - protein, 16 aa, Homo Sapiens
  ( 61 )...( 77 ): CKR4_HUMAN
VLVLFKYKRLRSMTDV

SEQ ID NO: 3121 - protein, 16 aa, Homo Sapiens
  ( 233 )...( 249 ): CKR4_HUMAN
KNEKKNKAVKMIFAVV

SEQ ID NO: 3122 - protein, 16 aa, Homo Sapiens
  ( 234 )...( 250 ): CKR4_HUMAN
NEKKNKAVKMIFAVVV

SEQ ID NO: 3123 - protein, 16 aa, Homo Sapiens
  ( 235 )...( 251 ): CKR4_HUMAN
EKKNKAVKMIFAVVVL

SEQ ID NO: 3124 - protein, 16 aa, Homo Sapiens
  ( 236 )...( 252 ): CKR4_HUMAN
KKNKAVKMIFAVVVLF

SEQ ID NO: 3125 - protein, 16 aa, Homo Sapiens
  ( 237 )...( 253 ): CKR4_HUMAN
KNKAVKMIFAVVVLFL

SEQ ID NO: 3126 - protein, 16 aa, Homo Sapiens
  ( 22 )...( 38 ): CKR5_HUMAN
KINVKQIAARLLPPLY

SEQ ID NO: 3127 - protein, 16 aa, Homo Sapiens
  ( 47 )...( 63 ): CKR5_HUMAN
GNMLVILILINCKRLK

SEQ ID NO: 3128 - protein, 16 aa, Homo Sapiens
  ( 48 )...( 64 ): CKR5_HUMAN
NMLVILILINCKRLKS

SEQ ID NO: 3129 - protein, 16 aa, Homo Sapiens
  ( 49 )...( 65 ): CKR5_HUMAN
MLVILILINCKRLKSM

SEQ ID NO: 3130 - protein, 16 aa, Homo Sapiens
  ( 50 )...( 66 ): CKR5_HUMAN
LVILILINCKRLKSMT

SEQ ID NO: 3131 - protein, 16 aa, Homo Sapiens
  ( 227 )...( 243 ): CKR5_HUMAN
EKKRHRAVRLIFTIMI

SEQ ID NO: 3132 - protein, 16 aa, Homo Sapiens
  ( 228 )...( 244 ): CKR5_HUMAN
KKRHRAVRLIFTIMIV

SEQ ID NO: 3133 - protein, 16 aa, Homo Sapiens
  ( 303 )...( 319 ): CKR5_HUMAN
KFRNYLLVFFQKHIAK

SEQ ID NO: 3134 - protein, 16 aa, Homo Sapiens
  ( 63 )...( 79 ): CKR6_HUMAN
GNILVVITFAFYKKAR

SEQ ID NO: 3135 - protein, 16 aa, Homo Sapiens
  ( 234 )...( 250 ): CKR6_HUMAN
YTFIVKTLVQAQNSKR

SEQ ID NO: 3136 - protein, 16 aa, Homo Sapiens
  ( 245 )...( 261 ): CKR6_HUMAN
QNSKRHKAIRVIIAVV

SEQ ID NO: 3137 - protein, 16 aa, Homo Sapiens
  ( 246 )...( 262 ): CKR6_HUMAN
NSKRHKAIRVIIAVVL

SEQ ID NO: 3138 - protein, 16 aa, Homo Sapiens
  ( 247 )...( 263 ): CKR6_HUMAN
SKRHKAIRVIIAVVLV

SEQ ID NO: 3139 - protein, 16 aa, Homo Sapiens
  ( 248 )...( 264 ): CKR6_HUMAN
KRHKAIRVIIAVVLVF

SEQ ID NO: 3140 - protein, 16 aa, Homo Sapiens
  ( 249 )...( 265 ): CKR6_HUMAN
RHKAIRVIIAVVLVFL

SEQ ID NO: 3141 - protein, 16 aa, Homo Sapiens
  ( 317 )...( 333 ): CKR6_HUMAN
AFIGQKFRNYFLKILK

SEQ ID NO: 3142 - protein, 16 aa, Homo Sapiens
  ( 319 )...( 335 ): CKR6_HUMAN
IGQKFRNYFLKILKDL

SEQ ID NO: 3143 - protein, 16 aa, Homo Sapiens
  ( 250 )...( 266 ): CKR7_HUMAN
LLQARNFERNKAIKVI

SEQ ID NO: 3144 - protein, 16 aa, Homo Sapiens
  ( 251 )...( 267 ): CKR7_HUMAN
LQARNFERNKAIKVII

SEQ ID NO: 3145 - protein, 16 aa, Homo Sapiens
  ( 254 )...( 270 ): CKR7_HUMAN
RNFERNKAIKVIIAVV

SEQ ID NO: 3146 - protein, 16 aa, Homo Sapiens
  ( 258 )...( 274 ): CKR7_HUMAN
RNKAIKVIIAVVVVFI

SEQ ID NO: 3147 - protein, 16 aa, Homo Sapiens
  ( 52 )...( 68 ): CKR8_HUMAN
GNSLVILVLVVCKKLR

SEQ ID NO: 3148 - protein, 16 aa, Homo Sapiens
  ( 53 )...( 69 ): CKR8_HUMAN
NSLVILVLVVCKKLRS

SEQ ID NO: 3149 - protein, 16 aa, Homo Sapiens
  ( 54 )...( 70 ): CKR8_HUMAN
SLVILVLVVCKKLRSI

SEQ ID NO: 3150 - protein, 16 aa, Homo Sapiens
  ( 55 )...( 71 ): CKR8_HUMAN
LVILVLVVCKKLRSIT

SEQ ID NO: 3151 - protein, 16 aa, Homo Sapiens
  ( 133 )...( 149 ): CKR8_HUMAN
LAVVHAVYALKVRTIR

SEQ ID NO: 3152 - protein, 16 aa, Homo Sapiens
  ( 134 )...( 150 ): CKR8_HUMAN
AVVHAVYALKVRTIRM

SEQ ID NO: 3153 - protein, 16 aa, Homo Sapiens
  ( 135 )...( 151 ): CKR8_HUMAN
VVHAVYALKVRTIRMG

SEQ ID NO: 3154 - protein, 16 aa, Homo Sapiens
  ( 138 )...( 154 ): CKR8_HUMAN
AVYALKVRTIRMGTTL

SEQ ID NO: 3155 - protein, 16 aa, Homo Sapiens
  ( 142 )...( 158 ): CKR8_HUMAN
LKVRTIRMGTTLCLAV

SEQ ID NO: 3156 - protein, 16 aa, Homo Sapiens
  ( 188 )...( 204 ): CKR8_HUMAN
NQQTLKWKIFTNFKMN

SEQ ID NO: 3157 - protein, 16 aa, Homo Sapiens
  ( 189 )...( 205 ): CKR8_HUMAN
QQTLKWKIFTNFKMNI

SEQ ID NO: 3158 - protein, 16 aa, Homo Sapiens
  ( 190 )...( 206 ): CKR8_HUMAN
QTLKWKIFTNFKMNIL

SEQ ID NO: 3159 - protein, 16 aa, Homo Sapiens
  ( 192 )...( 208 ): CKR8_HUMAN
LKWKIFTNFKMNILGL

SEQ ID NO: 3160 - protein, 16 aa, Homo Sapiens
  ( 193 )...( 209 ): CKR8_HUMAN
KWKIFTNFKMNILGLL

SEQ ID NO: 3161 - protein, 16 aa, Homo Sapiens
  ( 228 )...( 244 ): CKR8_HUMAN
CQNHNKTKAIRLVLIV

SEQ ID NO: 3162 - protein, 16 aa, Homo Sapiens
  ( 229 )...( 245 ): CKR8_HUMAN
QNHNKTKAIRLVLIVV

SEQ ID NO: 3163 - protein, 16 aa, Homo Sapiens
  ( 230 )...( 246 ): CKR8_HUMAN
NHNKTKAIRLVLIVVI

SEQ ID NO: 3164 - protein, 16 aa, Homo Sapiens
  ( 231 )...( 247 ): CKR8_HUMAN
HNKTKAIRLVLIVVIA

SEQ ID NO: 3165 - protein, 16 aa, Homo Sapiens
  ( 232 )...( 248 ): CKR8_HUMAN
NKTKAIRLVLIVVIAS

SEQ ID NO: 3166 - protein, 16 aa, Homo Sapiens
  ( 233 )...( 249 ): CKR8_HUMAN
KTKAIRLVLIVVIASL

SEQ ID NO: 3167 - protein, 16 aa, Homo Sapiens
  ( 195 )...( 211 ): CKR9_HUMAN
STKLKSAVLTLKVILG

SEQ ID NO: 3168 - protein, 16 aa, Homo Sapiens
  ( 196 )...( 212 ): CKR9_HUMAN
TKLKSAVLTLKVILGF

SEQ ID NO: 3169 - protein, 16 aa, Homo Sapiens
  ( 197 )...( 213 ): CKR9_HUMAN
KLKSAVLTLKVILGFF

SEQ ID NO: 3170 - protein, 16 aa, Homo Sapiens
  ( 222 )...( 238 ): CKR9_HUMAN
YTIIIHTLIQAKKSSK

SEQ ID NO: 3171 - protein, 16 aa, Homo Sapiens
  ( 223 )...( 239 ): CKR9_HUMAN
TIIIHTLIQAKKSSKH

SEQ ID NO: 3172 - protein, 16 aa, Homo Sapiens
  ( 224 )...( 240 ): CKR9_HUMAN
IIIHTLIQAKKSSKHK

SEQ ID NO: 3173 - protein, 16 aa, Homo Sapiens
  ( 233 )...( 249 ): CKR9_HUMAN
KKSSKHKALKVTITVL

SEQ ID NO: 3174 - protein, 16 aa, Homo Sapiens
  ( 234 )...( 250 ): CKR9_HUMAN
KSSKHKALKVTITVLT

SEQ ID NO: 3175 - protein, 16 aa, Homo Sapiens
  ( 235 )...( 251 ): CKR9_HUMAN
SSKHKALKVTITVLTV

SEQ ID NO: 3176 - protein, 16 aa, Homo Sapiens
  ( 236 )...( 252 ): CKR9_HUMAN
SKHKALKVTITVLTVF

SEQ ID NO: 3177 - protein, 16 aa, Homo Sapiens
  ( 237 )...( 253 ): CKR9_HUMAN
KHKALKVTITVLTVFV

SEQ ID NO: 3178 - protein, 16 aa, Homo Sapiens
  ( 60 )...( 76 ): CKRB_HUMAN
SMVVAIYAYYKKQRTK

SEQ ID NO: 3179 - protein, 16 aa, Homo Sapiens
  ( 62 )...( 78 ): CKRB_HUMAN
VVAIYAYYKKQRTKTD

SEQ ID NO: 3180 - protein, 16 aa, Homo Sapiens
  ( 63 )...( 79 ): CKRB_HUMAN
VAIYAYYKKQRTKTDV

SEQ ID NO: 3181 - protein, 16 aa, Homo Sapiens
  ( 67 )...( 83 ): CKRB_HUMAN
AYYKKQRTKTDVYILN

SEQ ID NO: 3182 - protein, 16 aa, Homo Sapiens
  ( 68 )...( 84 ): CKRB_HUMAN
YYKKQRTKTDVYILNL

SEQ ID NO: 3183 - protein, 16 aa, Homo Sapiens
  ( 69 )...( 85 ): CKRB_HUMAN
YKKQRTKTDVYILNLA

SEQ ID NO: 3184 - protein, 16 aa, Homo Sapiens
  ( 70 )...( 86 ): CKRB_HUMAN
KKQRTKTDVYILNLAV

SEQ ID NO: 3185 - protein, 16 aa, Homo Sapiens
  ( 226 )...( 242 ): CKRB_HUMAN
TLMKMPNIKISRPLKV

SEQ ID NO: 3186 - protein, 16 aa, Homo Sapiens
  ( 227 )...( 243 ): CKRB_HUMAN
LMKMPNIKISRPLKVL

SEQ ID NO: 3187 - protein, 16 aa, Homo Sapiens
  ( 228 )...( 244 ): CKRB_HUMAN
MKMPNIKISRPLKVLL

SEQ ID NO: 3188 - protein, 16 aa, Homo Sapiens
  ( 229 )...( 245 ): CKRB_HUMAN
KMPNIKISRPLKVLLT

SEQ ID NO: 3189 - protein, 16 aa, Homo Sapiens
  ( 230 )...( 246 ): CKRB_HUMAN
MPNIKISRPLKVLLTV

SEQ ID NO: 3190 - protein, 16 aa, Homo Sapiens
  ( 231 )...( 247 ): CKRB_HUMAN
PNIKISRPLKVLLTVV

SEQ ID NO: 3191 - protein, 16 aa, Homo Sapiens
  ( 232 )...( 248 ): CKRB_HUMAN
NIKISRPLKVLLTVVI

SEQ ID NO: 3192 - protein, 16 aa, Homo Sapiens
  ( 233 )...( 249 ): CKRB_HUMAN
IKISRPLKVLLTVVIV

SEQ ID NO: 3193 - protein, 16 aa, Homo Sapiens
  ( 234 )...( 250 ): CKRB_HUMAN
KISRPLKVLLTVVIVF

SEQ ID NO: 3194 - protein, 16 aa, Homo Sapiens
  ( 44 )...( 60 ): CLT1_HUMAN
VLYVLIKTYHKKSAFQ

SEQ ID NO: 3195 - protein, 16 aa, Homo Sapiens
  ( 45 )...( 61 ): CLT1_HUMAN
LYVLIKTYHKKSAFQV

SEQ ID NO: 3196 - protein, 16 aa, Homo Sapiens
  ( 50 )...( 66 ): CLT1_HUMAN
KTYHKKSAFQVYMINL

SEQ ID NO: 3197 - protein, 16 aa, Homo Sapiens
  ( 126 )...( 142 ): CLT1_HUMAN
VFPVQNINLVTQKKAR

SEQ ID NO: 3198 - protein, 16 aa, Homo Sapiens
  ( 128 )...( 144 ): CLT1_HUMAN
PVQNINLVTQKKARFV

SEQ ID NO: 3199 - protein, 16 aa, Homo Sapiens
  ( 129 )...( 145 ): CLT1_HUMAN
VQNINLVTQKKARFVC

SEQ ID NO: 3200 - protein, 16 aa, Homo Sapiens
  ( 130 )...( 146 ): CLT1_HUMAN
QNINLVTQKKARFVCV

SEQ ID NO: 3201 - protein, 16 aa, Homo Sapiens
  ( 132 )...( 148 ): CLT1_HUMAN
INLVTQKKARFVCVGI

SEQ ID NO: 3202 - protein, 16 aa, Homo Sapiens
  ( 209 )...( 225 ): CLT1_HUMAN
YTMIILTLLKKSMKKN

SEQ ID NO: 3203 - protein, 16 aa, Homo Sapiens
  ( 210 )...( 226 ): CLT1_HUMAN
TMIILTLLKKSMKKNL

SEQ ID NO: 3204 - protein, 16 aa, Homo Sapiens
  ( 211 )...( 227 ): CLT1_HUMAN
MIILTLLKKSMKKNLS

SEQ ID NO: 3205 - protein, 16 aa, Homo Sapiens
  ( 212 )...( 228 ): CLT1_HUMAN
IILTLLKKSMKKNLSS

SEQ ID NO: 3206 - protein, 16 aa, Homo Sapiens
  ( 213 )...( 229 ): CLT1_HUMAN
ILTLLKKSMKKNLSSH

SEQ ID NO: 3207 - protein, 16 aa, Homo Sapiens
  ( 221 )...( 237 ): CLT1_HUMAN
MKKNLSSHKKAIGMIM

SEQ ID NO: 3208 - protein, 16 aa, Homo Sapiens
  ( 222 )...( 238 ): CLT1_HUMAN
KKNLSSHKKAIGMIMV

SEQ ID NO: 3209 - protein, 16 aa, Homo Sapiens
  ( 223 )...( 239 ): CLT1_HUMAN
KNLSSHKKAIGMIMVV

SEQ ID NO: 3210 - protein, 16 aa, Homo Sapiens
  ( 236 )...( 252 ): CLT2_HUMAN
SGLRVSHRKALTTIII

SEQ ID NO: 3211 - protein, 16 aa, Homo Sapiens
  ( 237 )...( 253 ): CLT2_HUMAN
GLRVSHRKALTTIIIT

SEQ ID NO: 3212 - protein, 16 aa, Homo Sapiens
  ( 238 )...( 254 ): CLT2_HUMAN
LRVSHRKALTTIIITL

SEQ ID NO: 3213 - protein, 16 aa, Homo Sapiens
  ( 239 )...( 255 ): CLT2_HUMAN
RVSHRKALTTIIITLI

SEQ ID NO: 3214 - protein, 16 aa, Homo Sapiens
  ( 274 )...( 290 ): CLT2_HUMAN
WKVGLCKDRLHKALVI

SEQ ID NO: 3215 - protein, 16 aa, Homo Sapiens
  ( 275 )...( 291 ): CLT2_HUMAN
KVGLCKDRLHKALVIT

SEQ ID NO: 3216 - protein, 16 aa, Homo Sapiens
  ( 56 )...( 72 ): CML1_HUMAN
LGNGLVIIIATFKMKK

SEQ ID NO: 3217 - protein, 16 aa, Homo Sapiens
  ( 57 )...( 73 ): CML1_HUMAN
GNGLVIIIATFKMKKT

SEQ ID NO: 3218 - protein, 16 aa, Homo Sapiens
  ( 58 )...( 74 ): CML1_HUMAN
NGLVIIIATFKMKKTV

SEQ ID NO: 3219 - protein, 16 aa, Homo Sapiens
  ( 59 )...( 75 ): CML1_HUMAN
GLVIIIATFKMKKTVN

SEQ ID NO: 3220 - protein, 16 aa, Homo Sapiens
  ( 60 )...( 76 ): CML1_HUMAN
LVIIIATFKMKKTVNM

SEQ ID NO: 3221 - protein, 16 aa, Homo Sapiens
  ( 67 )...( 83 ): CML1_HUMAN
FKMKKTVNMVWFLNLA

SEQ ID NO: 3222 - protein, 16 aa, Homo Sapiens
  ( 68 )...( 84 ): CML1_HUMAN
KMKKTVNMVWFLNLAV

SEQ ID NO: 3223 - protein, 16 aa, Homo Sapiens
  ( 240 )...( 256 ): CML1_HUMAN
YLTIVCKLQRNRLAKT

SEQ ID NO: 3224 - protein, 16 aa, Homo Sapiens
  ( 241 )...( 257 ): CML1_HUMAN
LTIVCKLQRNRLAKTK

SEQ ID NO: 3225 - protein, 16 aa, Homo Sapiens
  ( 247 )...( 263 ): CML1_HUMAN
LQRNRLAKTKKPFKII

SEQ ID NO: 3226 - protein, 16 aa, Homo Sapiens
  ( 248 )...( 264 ): CML1_HUMAN
QRNRLAKTKKPFKIIV

SEQ ID NO: 3227 - protein, 16 aa, Homo Sapiens
  ( 249 )...( 265 ): CML1_HUMAN
RNRLAKTKKPFKIIVT

SEQ ID NO: 3228 - protein, 16 aa, Homo Sapiens
  ( 250 )...( 266 ): CML1_HUMAN
NRLAKTKKPFKIIVTI

SEQ ID NO: 3229 - protein, 16 aa, Homo Sapiens
  ( 251 )...( 267 ): CML1_HUMAN
RLAKTKKPFKIIVTII

SEQ ID NO: 3230 - protein, 16 aa, Homo Sapiens
  ( 252 )...( 268 ): CML1_HUMAN
LAKTKKPFKIIVTIII

SEQ ID NO: 3231 - protein, 16 aa, Homo Sapiens
  ( 253 )...( 269 ): CML1_HUMAN
AKTKKPFKIIVTIIIT

SEQ ID NO: 3232 - protein, 16 aa, Homo Sapiens
  ( 254 )...( 270 ): CML1_HUMAN
KTKKPFKIIVTIIITF

SEQ ID NO: 3233 - protein, 16 aa, Homo Sapiens
  ( 256 )...( 272 ): CML1_HUMAN
KKPFKIIVTIIITFFL

SEQ ID NO: 3234 - protein, 16 aa, Homo Sapiens
  ( 252 )...( 268 ): CML2_HUMAN
PRRQKALRMILAVVLV

SEQ ID NO: 3235 - protein, 16 aa, Homo Sapiens
  ( 253 )...( 269 ): CML2_HUMAN
RRQKALRMILAVVLVF

SEQ ID NO: 3236 - protein, 16 aa, Homo Sapiens
  ( 254 )...( 270 ): CML2_HUMAN
RQKALRMILAVVLVFF

SEQ ID NO: 3237 - protein, 16 aa, Homo Sapiens
  ( 110 )...( 126 ): CRF1_HUMAN
KKSKVHYHVAVIINYL

SEQ ID NO: 3238 - protein, 16 aa, Homo Sapiens
  ( 313 )...( 329 ): CRF1_HUMAN
FIFLFNIVRILMTKLR

SEQ ID NO: 3239 - protein, 16 aa, Homo Sapiens
  ( 314 )...( 330 ): CRF1_HUMAN
IFLFNIVRILMTKLRA

SEQ ID NO: 3240 - protein, 16 aa, Homo Sapiens
  ( 335 )...( 351 ): CRF1_HUMAN
TIQYRKAVKATLVLLP

SEQ ID NO: 3241 - protein, 16 aa, Homo Sapiens
  ( 336 )...( 352 ): CRF1_HUMAN
IQYRKAVKATLVLLPL

SEQ ID NO: 3242 - protein, 16 aa, Homo Sapiens
  ( 337 )...( 353 ): CRF1_HUMAN
QYRKAVKATLVLLPLL

SEQ ID NO: 3243 - protein, 16 aa, Homo Sapiens
  ( 338 )...( 354 ): CRF1_HUMAN
YRKAVKATLVLLPLLG

SEQ ID NO: 3244 - protein, 16 aa, Homo Sapiens
  ( 339 )...( 355 ): CRF1_HUMAN
RKAVKATLVLLPLLGI

SEQ ID NO: 3245 - protein, 16 aa, Homo Sapiens
  ( 281 )...( 297 ): CRF2_HUMAN
VFLFNIVRILMTKLRA

SEQ ID NO: 3246 - protein, 16 aa, Homo Sapiens
  ( 302 )...( 318 ): CRF2_HUMAN
TIQYRKAVKATLVLLP

SEQ ID NO: 3247 - protein, 16 aa, Homo Sapiens
  ( 303 )...( 319 ): CRF2_HUMAN
IQYRKAVKATLVLLPL

SEQ ID NO: 3248 - protein, 16 aa, Homo Sapiens
  ( 304 )...( 320 ): CRF2_HUMAN
QYRKAVKATLVLLPLL

SEQ ID NO: 3249 - protein, 16 aa, Homo Sapiens
  ( 305 )...( 321 ): CRF2_HUMAN
YRKAVKATLVLLPLLG

SEQ ID NO: 3250 - protein, 16 aa, Homo Sapiens
  ( 306 )...( 322 ): CRF2_HUMAN
RKAVKATLVLLPLLGI

SEQ ID NO: 3251 - protein, 16 aa, Homo Sapiens
  ( 217 )...( 233 ): CXC1_HUMAN
SKRRHRTVKLIFAIVV

SEQ ID NO: 3252 - protein, 16 aa, Homo Sapiens
  ( 218 )...( 234 ): CXC1_HUMAN
KRRHRTVKLIFAIVVA

SEQ ID NO: 3253 - protein, 16 aa, Homo Sapiens
  ( 284 )...( 300 ): CXC1_HUMAN
PVLYVFVGVKFRTHLK

SEQ ID NO: 3254 - protein, 16 aa, Homo Sapiens
  ( 288 )...( 304 ): CXC1_HUMAN
VFVGVKFRTHLKHVLR

SEQ ID NO: 3255 - protein, 16 aa, Homo Sapiens
  ( 289 )...( 305 ): CXC1_HUMAN
FVGVKFRTHLKHVLRQ

SEQ ID NO: 3256 - protein, 16 aa, Homo Sapiens
  ( 290 )...( 306 ): CXC1_HUMAN
VGVKFRTHLKHVLRQF

SEQ ID NO: 3257 - protein, 16 aa, Homo Sapiens
  ( 291 )...( 307 ): CXC1_HUMAN
GVKFRTHLKHVLRQFW

SEQ ID NO: 3258 - protein, 16 aa, Homo Sapiens
  ( 147 )...( 163 ): D2DR_HUMAN
SSKRRVTVMISIVWVL

SEQ ID NO: 3259 - protein, 16 aa, Homo Sapiens
  ( 148 )...( 164 ): D2DR_HUMAN
SKRRVTVMISIVWVLS

SEQ ID NO: 3260 - protein, 16 aa, Homo Sapiens
  ( 149 )...( 165 ): D2DR_HUMAN
KRRVTVMISIVWVLSF

SEQ ID NO: 3261 - protein, 16 aa, Homo Sapiens
  ( 203 )...( 219 ): D2DR_HUMAN
IVTLLVYIKIYIVLRR

SEQ ID NO: 3262 - protein, 16 aa, Homo Sapiens
  ( 204 )...( 220 ): D2DR_HUMAN
VTLLVYIKIYIVLRRR

SEQ ID NO: 3263 - protein, 16 aa, Homo Sapiens
  ( 205 )...( 221 ): D2DR_HUMAN
TLLVYIKIYIVLRRRR

SEQ ID NO: 3264 - protein, 16 aa, Homo Sapiens
  ( 206 )...( 222 ): D2DR_HUMAN
LLVYIKIYIVLRRRRK

SEQ ID NO: 3265 - protein, 16 aa, Homo Sapiens
  ( 207 )...( 223 ): D2DR_HUMAN
LVYIKIYIVLRRRRKR

SEQ ID NO: 3266 - protein, 16 aa, Homo Sapiens
  ( 208 )...( 224 ): D2DR_HUMAN
VYIKIYIVLRRRRKRV

SEQ ID NO: 3267 - protein, 16 aa, Homo Sapiens
  ( 210 )...( 226 ): D2DR_HUMAN
IKIYIVLRRRRKRVNT

SEQ ID NO: 3268 - protein, 16 aa, Homo Sapiens
  ( 203 )...( 219 ): D3DR_HUMAN
VTVLVYARIYVVLKQR

SEQ ID NO: 3269 - protein, 16 aa, Homo Sapiens
  ( 204 )...( 220 ): D3DR_HUMAN
TVLVYARIYVVLKQRR

SEQ ID NO: 3270 - protein, 16 aa, Homo Sapiens
  ( 205 )...( 221 ): D3DR_HUMAN
VLVYARIYVVLKQRRR

SEQ ID NO: 3271 - protein, 16 aa, Homo Sapiens
  ( 206 )...( 222 ): D3DR_HUMAN
LVYARIYVVLKQRRRK

SEQ ID NO: 3272 - protein, 16 aa, Homo Sapiens
  ( 209 )...( 225 ): D3DR_HUMAN
ARIYVVLKQRRRKRIL

SEQ ID NO: 3273 - protein, 16 aa, Homo Sapiens
  ( 210 )...( 226 ): D3DR_HUMAN
RIYVVLKQRRRKRILT

SEQ ID NO: 3274 - protein, 16 aa, Homo Sapiens
  ( 211 )...( 227 ): D3DR_HUMAN
IYVVLKQRRRKRILTR

SEQ ID NO: 3275 - protein, 16 aa, Homo Sapiens
  ( 318 )...( 334 ): D3DR_HUMAN
RGVPLREKKATQMVAI

SEQ ID NO: 3276 - protein, 16 aa, Homo Sapiens
  ( 208 )...( 224 ): DADR_HUMAN
AIMIVTYTRIYRIAQK

SEQ ID NO: 3277 - protein, 16 aa, Homo Sapiens
  ( 209 )...( 225 ): DADR_HUMAN
IMIVTYTRIYRIAQKQ

SEQ ID NO: 3278 - protein, 16 aa, Homo Sapiens
  ( 210 )...( 226 ): DADR_HUMAN
MIVTYTRIYRIAQKQI

SEQ ID NO: 3279 - protein, 16 aa, Homo Sapiens
  ( 211 )...( 227 ): DADR_HUMAN
IVTYTRIYRIAQKQIR

SEQ ID NO: 3280 - protein, 16 aa, Homo Sapiens
  ( 212 )...( 228 ): DADR_HUMAN
VTYTRIYRIAQKQIRR

SEQ ID NO: 3281 - protein, 16 aa, Homo Sapiens
  ( 213 )...( 229 ): DADR_HUMAN
TYTRIYRIAQKQIRRI

SEQ ID NO: 3282 - protein, 16 aa, Homo Sapiens
  ( 217 )...( 233 ): DADR_HUMAN
IYRIAQKQIRRIAALE

SEQ ID NO: 3283 - protein, 16 aa, Homo Sapiens
  ( 259 )...( 275 ): DADR_HUMAN
SFKMSFKRETKVLKTL

SEQ ID NO: 3284 - protein, 16 aa, Homo Sapiens
  ( 260 )...( 276 ): DADR_HUMAN
FKMSFKRETKVLKTLS

SEQ ID NO: 3285 - protein, 16 aa, Homo Sapiens
  ( 261 )...( 277 ): DADR_HUMAN
KMSFKRETKVLKTLSV

SEQ ID NO: 3286 - protein, 16 aa, Homo Sapiens
  ( 262 )...( 278 ): DADR_HUMAN
MSFKRETKVLKTLSVI

SEQ ID NO: 3287 - protein, 16 aa, Homo Sapiens
  ( 263 )...( 279 ): DADR_HUMAN
SFKRETKVLKTLSVIM

SEQ ID NO: 3288 - protein, 16 aa, Homo Sapiens
  ( 264 )...( 280 ): DADR_HUMAN
FKRETKVLKTLSVIMG

SEQ ID NO: 3289 - protein, 16 aa, Homo Sapiens
  ( 265 )...( 281 ): DADR_HUMAN
KRETKVLKTLSVIMGV

SEQ ID NO: 3290 - protein, 16 aa, Homo Sapiens
  ( 148 )...( 164 ): DBDR_HUMAN
YKRKMTQRMALVMVGL

SEQ ID NO: 3291 - protein, 16 aa, Homo Sapiens
  ( 149 )...( 165 ): DBDR_HUMAN
KRKMTQRMALVMVGLA

SEQ ID NO: 3292 - protein, 16 aa, Homo Sapiens
  ( 242 )...( 258 ): DBDR_HUMAN
IVTYTRIYRIAQVQIR

SEQ ID NO: 3293 - protein, 16 aa, Homo Sapiens
  ( 244 )...( 260 ): DBDR_HUMAN
TYTRIYRIAQVQIRRI

SEQ ID NO: 3294 - protein, 16 aa, Homo Sapiens
  ( 283 )...( 299 ): DBDR_HUMAN
SLRASIKKETKVLKTL

SEQ ID NO: 3295 - protein, 16 aa, Homo Sapiens
  ( 284 )...( 300 ): DBDR_HUMAN
LRASIKKETKVLKTLS

SEQ ID NO: 3296 - protein, 16 aa, Homo Sapiens
  ( 286 )...( 302 ): DBDR_HUMAN
ASIKKETKVLKTLSVI

SEQ ID NO: 3297 - protein, 16 aa, Homo Sapiens
  ( 287 )...( 303 ): DBDR_HUMAN
SIKKETKVLKTLSVIM

SEQ ID NO: 3298 - protein, 16 aa, Homo Sapiens
  ( 220 )...( 236 ): DUFF_HUMAN
FVLLPLGLFGAKGLKK

SEQ ID NO: 3299 - protein, 16 aa, Homo Sapiens
  ( 221 )...( 237 ): DUFF_HUMAN
VLLPLGLFGAKGLKKA

SEQ ID NO: 3300 - protein, 16 aa, Homo Sapiens
  ( 222 )...( 238 ): DUFF_HUMAN
LLPLGLFGAKGLKKAL

SEQ ID NO: 3301 - protein, 16 aa, Homo Sapiens
  ( 223 )...( 239 ): DUFF_HUMAN
LPLGLFGAKGLKKALG

SEQ ID NO: 3302 - protein, 16 aa, Homo Sapiens
  ( 225 )...( 241 ): DUFF_HUMAN
LGLFGAKGLKKALGMG

SEQ ID NO: 3303 - protein, 16 aa, Homo Sapiens
  ( 47 )...( 63 ): EBI2_HUMAN
VGNLLALVVIVQNRKK

SEQ ID NO: 3304 - protein, 16 aa, Homo Sapiens
  ( 48 )...( 64 ): EBI2_HUMAN
GNLLALVVIVQNRKKI

SEQ ID NO: 3305 - protein, 16 aa, Homo Sapiens
  ( 49 )...( 65 ): EBI2_HUMAN
NLLALVVIVQNRKKIN

SEQ ID NO: 3306 - protein, 16 aa, Homo Sapiens
  ( 50 )...( 66 ): EBI2_HUMAN
LLALVVIVQNRKKINS

SEQ ID NO: 3307 - protein, 16 aa, Homo Sapiens
  ( 51 )...( 67 ): EBI2_HUMAN
LALVVIVQNRKKINST

SEQ ID NO: 3308 - protein, 16 aa, Homo Sapiens
  ( 52 )...( 68 ): EBI2_HUMAN
ALVVIVQNRKKINSTT

SEQ ID NO: 3309 - protein, 16 aa, Homo Sapiens
  ( 53 )...( 69 ): EBI2_HUMAN
LVVIVQNRKKINSTTL

SEQ ID NO: 3310 - protein, 16 aa, Homo Sapiens
  ( 54 )...( 70 ): EBI2_HUMAN
VVIVQNRKKINSTTLY

SEQ ID NO: 3311 - protein, 16 aa, Homo Sapiens
  ( 55 )...( 71 ): EBI2_HUMAN
VIVQNRKKINSTTLYS

SEQ ID NO: 3312 - protein, 16 aa, Homo Sapiens
  ( 60 )...( 76 ): EBI2_HUMAN
RKKINSTTLYSTNLVI

SEQ ID NO: 3313 - protein, 16 aa, Homo Sapiens
  ( 131 )...( 147 ): EBI2_HUMAN
IAVVHPLRYNKIKRIE

SEQ ID NO: 3314 - protein, 16 aa, Homo Sapiens
  ( 235 )...( 251 ): EBI2_HUMAN
KSGVNKKALNTIILII

SEQ ID NO: 3315 - protein, 16 aa, Homo Sapiens
  ( 258 )...( 274 ): EBI2_HUMAN
TPYHVAIIQHMIKKLR

SEQ ID NO: 3316 - protein, 16 aa, Homo Sapiens
  ( 259 )...( 275 ): EBI2_HUMAN
PYHVAIIQHMIKKLRF

SEQ ID NO: 3317 - protein, 16 aa, Homo Sapiens
  ( 260 )...( 276 ): EBI2_HUMAN
YHVAIIQHMIKKLRFS

SEQ ID NO: 3318 - protein, 16 aa, Homo Sapiens
  ( 261 )...( 277 ): EBI2_HUMAN
HVAIIQHMIKKLRFSN

SEQ ID NO: 3319 - protein, 16 aa, Homo Sapiens
  ( 262 )...( 278 ): EBI2_HUMAN
VAIIQHMIKKLRFSNF

SEQ ID NO: 3320 - protein, 16 aa, Homo Sapiens
  ( 263 )...( 279 ): EBI2_HUMAN
AIIQHMIKKLRFSNFL

SEQ ID NO: 3321 - protein, 16 aa, Homo Sapiens
  ( 316 )...( 332 ): EBI2_HUMAN
KRKVMRMLKRQVSVSI

SEQ ID NO: 3322 - protein, 16 aa, Homo Sapiens
  ( 63 )...( 79 ): EDG1_HUMAN
NIFVLLTIWKTKKFHR

SEQ ID NO: 3323 - protein, 16 aa, Homo Sapiens
  ( 64 )...( 80 ): EDG1_HUMAN
IFVLLTIWKTKKFHRP

SEQ ID NO: 3324 - protein, 16 aa, Homo Sapiens
  ( 65 )...( 81 ): EDG1_HUMAN
FVLLTIWKTKKFHRPM

SEQ ID NO: 3325 - protein, 16 aa, Homo Sapiens
  ( 113 )...( 129 ): EDG2_HUMAN
TRRLTVSTWLLRQGLI

SEQ ID NO: 3326 - protein, 16 aa, Homo Sapiens
  ( 18 )...( 34 ): EDG3_HUMAN
LREHYQYVGKLAGRLK

SEQ ID NO: 3327 - protein, 16 aa, Homo Sapiens
  ( 87 )...( 103 ): EDG3_HUMAN
LAGIAYKVNILMSGKK

SEQ ID NO: 3328 - protein, 16 aa, Homo Sapiens
  ( 88 )...( 104 ): EDG3_HUMAN
AGIAYKVNILMSGKKT

SEQ ID NO: 3329 - protein, 16 aa, Homo Sapiens
  ( 89 )...( 105 ): EDG3_HUMAN
GIAYKVNILMSGKKTF

SEQ ID NO: 3330 - protein, 16 aa, Homo Sapiens
  ( 90 )...( 106 ): EDG3_HUMAN
IAYKVNILMSGKKTFS

SEQ ID NO: 3331 - protein, 16 aa, Homo Sapiens
  ( 91 )...( 107 ): EDG3_HUMAN
AYKVNILMSGKKTFSL

SEQ ID NO: 3332 - protein, 16 aa, Homo Sapiens
  ( 92 )...( 108 ): EDG3_HUMAN
YKVNILMSGKKTFSLS

SEQ ID NO: 3333 - protein, 16 aa, Homo Sapiens
  ( 507 )...( 523 ): EMR1_HUMAN
IKLKMNSRVVGGIMTG

SEQ ID NO: 3334 - protein, 16 aa, Homo Sapiens
  ( 298 )...( 314 ): ET1R_HUMAN
LKQRREVAKTVFCLVV

SEQ ID NO: 3335 - protein, 16 aa, Homo Sapiens
  ( 299 )...( 315 ): ET1R_HUMAN
KQRREVAKTVFCLVVI

SEQ ID NO: 3336 - protein, 16 aa, Homo Sapiens
  ( 115 )...( 131 ): ETBR_HUMAN
GIIGNSTLLRIIYKNK

SEQ ID NO: 3337 - protein, 16 aa, Homo Sapiens
  ( 315 )...( 331 ): ETBR_HUMAN
LKQRREVAKTVFCLVL

SEQ ID NO: 3338 - protein, 16 aa, Homo Sapiens
  ( 316 )...( 332 ): ETBR_HUMAN
KQRREVAKTVFCLVLV

SEQ ID NO: 3339 - protein, 16 aa, Homo Sapiens
  ( 190 )...( 206 ): FML1_HUMAN
RLKVAITMLTARGIIR

SEQ ID NO: 3340 - protein, 16 aa, Homo Sapiens
  ( 191 )...( 207 ): FML1_HUMAN
LKVAITMLTARGIIRF

SEQ ID NO: 3341 - protein, 16 aa, Homo Sapiens
  ( 192 )...( 208 ): FML1_HUMAN
KVAITMLTARGIIRFV

SEQ ID NO: 3342 - protein, 16 aa, Homo Sapiens
  ( 216 )...( 232 ): FML1_HUMAN
IVAICYGLIAAKIHKK

SEQ ID NO: 3343 - protein, 16 aa, Homo Sapiens
  ( 217 )...( 233 ): FML1_HUMAN
VAICYGLIAAKIHKKG

SEQ ID NO: 3344 - protein, 16 aa, Homo Sapiens
  ( 221 )...( 237 ): FML1_HUMAN
YGLIAAKIHKKGMIKS

SEQ ID NO: 3345 - protein, 16 aa, Homo Sapiens
  ( 222 )...( 238 ): FML1_HUMAN
GLIAAKIHKKGMIKSS

SEQ ID NO: 3346 - protein, 16 aa, Homo Sapiens
  ( 228 )...( 244 ): FML1_HUMAN
IHKKGMIKSSRPLRVL

SEQ ID NO: 3347 - protein, 16 aa, Homo Sapiens
  ( 130 )...( 146 ): FMLR_HUMAN
PVWTQNHRTVSLAKKV

SEQ ID NO: 3348 - protein, 16 aa, Homo Sapiens
  ( 131 )...( 147 ): FMLR_HUMAN
VWTQNHRTVSLAKKVI

SEQ ID NO: 3349 - protein, 16 aa, Homo Sapiens
  ( 132 )...( 148 ): FMLR_HUMAN
WTQNHRTVSLAKKVII

SEQ ID NO: 3350 - protein, 16 aa, Homo Sapiens
  ( 134 )...( 150 ): FMLR_HUMAN
QNHRTVSLAKKVIIGP

SEQ ID NO: 3351 - protein, 16 aa, Homo Sapiens
  ( 136 )...( 152 ): FMLR_HUMAN
HRTVSLAKKVIIGPWV

SEQ ID NO: 3352 - protein, 16 aa, Homo Sapiens
  ( 137 )...( 153 ): FMLR_HUMAN
RTVSLAKKVIIGPWVM

SEQ ID NO: 3353 - protein, 16 aa, Homo Sapiens
  ( 220 )...( 236 ): FMLR_HUMAN
SYGLIATKIHKQGLIK

SEQ ID NO: 3354 - protein, 16 aa, Homo Sapiens
  ( 221 )...( 237 ): FMLR_HUMAN
YGLIATKIHKQGLIKS

SEQ ID NO: 3355 - protein, 16 aa, Homo Sapiens
  ( 222 )...( 238 ): FMLR_HUMAN
GLIATKIHKQGLIKSS

SEQ ID NO: 3356 - protein, 16 aa, Homo Sapiens
  ( 223 )...( 239 ): FMLR_HUMAN
LIATKIHKQGLIKSSR

SEQ ID NO: 3357 - protein, 16 aa, Homo Sapiens
  ( 228 )...( 244 ): FMLR_HUMAN
IHKQGLIKSSRPLRVL

SEQ ID NO: 3358 - protein, 16 aa, Homo Sapiens
  ( 46 )...( 62 ): FSHR_HUMAN
RNAIELRFVLTKLRVI

SEQ ID NO: 3359 - protein, 16 aa, Homo Sapiens
  ( 48 )...( 64 ): FSHR_HUMAN
AIELRFVLTKLRVIQK

SEQ ID NO: 3360 - protein, 16 aa, Homo Sapiens
  ( 49 )...( 65 ): FSHR_HUMAN
IELRFVLTKLRVIQKG

SEQ ID NO: 3361 - protein, 16 aa, Homo Sapiens
  ( 50 )...( 66 ): FSHR_HUMAN
ELRFVLTKLRVIQKGA

SEQ ID NO: 3362 - protein, 16 aa, Homo Sapiens
  ( 51 )...( 67 ): FSHR_HUMAN
LRFVLTKLRVIQKGAF

SEQ ID NO: 3363 - protein, 16 aa, Homo Sapiens
  ( 52 )...( 68 ): FSHR_HUMAN
RFVLTKLRVIQKGAFS

SEQ ID NO: 3364 - protein, 16 aa, Homo Sapiens
  ( 53 )...( 69 ): FSHR_HUMAN
FVLTKLRVIQKGAFSG

SEQ ID NO: 3365 - protein, 16 aa, Homo Sapiens
  ( 54 )...( 70 ): FSHR_HUMAN
VLTKLRVIQKGAFSGF

SEQ ID NO: 3366 - protein, 16 aa, Homo Sapiens
  ( 241 )...( 257 ): FSHR_HUMAN
LKKLRARSTYNLKKLP

SEQ ID NO: 3367 - protein, 16 aa, Homo Sapiens
  ( 243 )...( 259 ): FSHR_HUMAN
KLRARSTYNLKKLPTL

SEQ ID NO: 3368 - protein, 16 aa, Homo Sapiens
  ( 246 )...( 262 ): FSHR_HUMAN
ARSTYNLKKLPTLEKL

SEQ ID NO: 3369 - protein, 16 aa, Homo Sapiens
  ( 247 )...( 263 ): FSHR_HUMAN
RSTYNLKKLPTLEKLV

SEQ ID NO: 3370 - protein, 16 aa, Homo Sapiens
  ( 593 )...( 609 ): FSHR_HUMAN
ISASLKVPLITVSKAK

SEQ ID NO: 3371 - protein, 16 aa, Homo Sapiens
  ( 594 )...( 610 ): FSHR_HUMAN
SASLKVPLITVSKAKI

SEQ ID NO: 3372 - protein, 16 aa, Homo Sapiens
  ( 595 )...( 611 ): FSHR_HUMAN
ASLKVPLITVSKAKIL

SEQ ID NO: 3373 - protein, 16 aa, Homo Sapiens
  ( 596 )...( 612 ): FSHR_HUMAN
SLKVPLITVSKAKILL

SEQ ID NO: 3374 - protein, 16 aa, Homo Sapiens
  ( 597 )...( 613 ): FSHR_HUMAN
LKVPLITVSKAKILLV

SEQ ID NO: 3375 - protein, 16 aa, Homo Sapiens
  ( 598 )...( 614 ): FSHR_HUMAN
KVPLITVSKAKILLVL

SEQ ID NO: 3376 - protein, 16 aa, Homo Sapiens
  ( 359 )...( 375 ): FZ10_HUMAN
WAIPAVKTILILVMRR

SEQ ID NO: 3377 - protein, 16 aa, Homo Sapiens
  ( 360 )...( 376 ): FZ10_HUMAN
AIPAVKTILILVMRRV

SEQ ID NO: 3378 - protein, 16 aa, Homo Sapiens
  ( 361 )...( 377 ): FZ10_HUMAN
IPAVKTILILVMRRVA

SEQ ID NO: 3379 - protein, 16 aa, Homo Sapiens
  ( 362 )...( 378 ): FZ10_HUMAN
PAVKTILILVMRRVAG

SEQ ID NO: 3380 - protein, 16 aa, Homo Sapiens
  ( 424 )...( 440 ): FZD5_HUMAN
VSLFRIRSVIKQGGTK

SEQ ID NO: 3381 - protein, 16 aa, Homo Sapiens
  ( 405 )...( 421 ): FZD6_HUMAN
RNQEKLKKFMIRIGVF

SEQ ID NO: 3382 - protein, 16 aa, Homo Sapiens
  ( 406 )...( 422 ): FZD6_HUMAN
NQEKLKKFMIRIGVFS

SEQ ID NO: 3383 - protein, 16 aa, Homo Sapiens
  ( 407 )...( 423 ): FZD6_HUMAN
QEKLKKFMIRIGVFSG

SEQ ID NO: 3384 - protein, 16 aa, Homo Sapiens
  ( 408 )...( 424 ): FZD6_HUMAN
EKLKKFMIRIGVFSGL

SEQ ID NO: 3385 - protein, 16 aa, Homo Sapiens
  ( 519 )...( 535 ): FZD8_HUMAN
GPTKTHKLEKLMIRLG

SEQ ID NO: 3386 - protein, 16 aa, Homo Sapiens
  ( 520 )...( 536 ): FZD8_HUMAN
PTKTHKLEKLMIRLGL

SEQ ID NO: 3387 - protein, 16 aa, Homo Sapiens
  ( 521 )...( 537 ): FZD8_HUMAN
TKTHKLEKLMIRLGLF

SEQ ID NO: 3388 - protein, 16 aa, Homo Sapiens
  ( 522 )...( 538 ): FZD8_HUMAN
KTHKLEKLMIRLGLFT

SEQ ID NO: 3389 - protein, 16 aa, Homo Sapiens
  ( 363 )...( 379 ): FZD9_HUMAN
WGLPALKTIVILTLRK

SEQ ID NO: 3390 - protein, 16 aa, Homo Sapiens
  ( 364 )...( 380 ): FZD9_HUMAN
GLPALKTIVILTLRKV

SEQ ID NO: 3391 - protein, 16 aa, Homo Sapiens
  ( 365 )...( 381 ): FZD9_HUMAN
LPALKTIVILTLRKVA

SEQ ID NO: 3392 - protein, 16 aa, Homo Sapiens
  ( 366 )...( 382 ): FZD9_HUMAN
PALKTIVILTLRKVAG

SEQ ID NO: 3393 - protein, 16 aa, Homo Sapiens
  ( 417 )...( 433 ): FZD9_HUMAN
LLTGFVALFHIRKIMK

SEQ ID NO: 3394 - protein, 16 aa, Homo Sapiens
  ( 418 )...( 434 ): FZD9_HUMAN
LTGFVALFHIRKIMKT

SEQ ID NO: 3395 - protein, 16 aa, Homo Sapiens
  ( 422 )...( 438 ): FZD9_HUMAN
VALFHIRKIMKTGGTN

SEQ ID NO: 3396 - protein, 16 aa, Homo Sapiens
  ( 423 )...( 439 ): FZD9_HUMAN
ALFHIRKIMKTGGTNT

SEQ ID NO: 3397 - protein, 16 aa, Homo Sapiens
  ( 219 )...( 235 ): GALR_HUMAN
CYAKVLNHLHKKLKNM

SEQ ID NO: 3398 - protein, 16 aa, Homo Sapiens
  ( 220 )...( 236 ): GALR_HUMAN
YAKVLNHLHKKLKNMS

SEQ ID NO: 3399 - protein, 16 aa, Homo Sapiens
  ( 240 )...( 256 ): GALR_HUMAN
ASKKKTAQTVLVVVVV

SEQ ID NO: 3400 - protein, 16 aa, Homo Sapiens
  ( 241 )...( 257 ): GALR_HUMAN
SKKKTAQTVLVVVVVF

SEQ ID NO: 3401 - protein, 16 aa, Homo Sapiens
  ( 242 )...( 258 ): GALR_HUMAN
KKKTAQTVLVVVVVFG

SEQ ID NO: 3402 - protein, 16 aa, Homo Sapiens
  ( 226 )...( 242 ): GALS_HUMAN
GARRAKRKVTRMILIV

SEQ ID NO: 3403 - protein, 16 aa, Homo Sapiens
  ( 229 )...( 245 ): GALS_HUMAN
RAKRKVTRMILIVAAL

SEQ ID NO: 3404 - protein, 16 aa, Homo Sapiens
  ( 230 )...( 246 ): GALS_HUMAN
AKRKVTRMILIVAALF

SEQ ID NO: 3405 - protein, 16 aa, Homo Sapiens
  ( 73 )...( 89 ): GASR_HUMAN
MLIIVVLGLSRRLRTV

SEQ ID NO: 3406 - protein, 16 aa, Homo Sapiens
  ( 74 )...( 90 ): GASR_HUMAN
LIIVVLGLSRRLRTVT

SEQ ID NO: 3407 - protein, 16 aa, Homo Sapiens
  ( 75 )...( 91 ): GASR_HUMAN
IIVVLGLSRRLRTVTN

SEQ ID NO: 3408 - protein, 16 aa, Homo Sapiens
  ( 319 )...( 335 ): GASR_HUMAN
RPTQAKLLAKKRVVRM

SEQ ID NO: 3409 - protein, 16 aa, Homo Sapiens
  ( 320 )...( 336 ): GASR_HUMAN
PTQAKLLAKKRVVRML

SEQ ID NO: 3410 - protein, 16 aa, Homo Sapiens
  ( 321 )...( 337 ): GASR_HUMAN
TQAKLLAKKRVVRMLL

SEQ ID NO: 3411 - protein, 16 aa, Homo Sapiens
  ( 322 )...( 338 ): GASR_HUMAN
QAKLLAKKRVVRMLLV

SEQ ID NO: 3412 - protein, 16 aa, Homo Sapiens
  ( 323 )...( 339 ): GASR_HUMAN
AKLLAKKRVVRMLLVI

SEQ ID NO: 3413 - protein, 16 aa, Homo Sapiens
  ( 324 )...( 340 ): GASR_HUMAN
KLLAKKRVVRMLLVIV

SEQ ID NO: 3414 - protein, 16 aa, Homo Sapiens
  ( 325 )...( 341 ): GASR_HUMAN
LLAKKRVVRMLLVIVV

SEQ ID NO: 3415 - protein, 16 aa, Homo Sapiens
  ( 326 )...( 342 ): GASR_HUMAN
LAKKRVVRMLLVIVVL

SEQ ID NO: 3416 - protein, 16 aa, Homo Sapiens
  ( 327 )...( 343 ): GASR_HUMAN
AKKRVVRMLLVIVVLF

SEQ ID NO: 3417 - protein, 16 aa, Homo Sapiens
  ( 328 )...( 344 ): GASR_HUMAN
KKRVVRMLLVIVVLFF

SEQ ID NO: 3418 - protein, 16 aa, Homo Sapiens
  ( 329 )...( 345 ): GASR_HUMAN
KRVVRMLLVIVVLFFL

SEQ ID NO: 3419 - protein, 16 aa, Homo Sapiens
  ( 294 )...( 310 ): GBR1_HUMAN
NPTRVKLFEKWGWKKI

SEQ ID NO: 3420 - protein, 16 aa, Homo Sapiens
  ( 295 )...( 311 ): GBR1_HUMAN
PTRVKLFEKWGWKKIA

SEQ ID NO: 3421 - protein, 16 aa, Homo Sapiens
  ( 348 )...( 364 ): GBR1_HUMAN
AVPVKNLKRQDARIIV

SEQ ID NO: 3422 - protein, 16 aa, Homo Sapiens
  ( 349 )...( 365 ): GBR1_HUMAN
VPVKNLKRQDARIIVG

SEQ ID NO: 3423 - protein, 16 aa, Homo Sapiens
  ( 350 )...( 366 ): GBR1_HUMAN
PVKNLKRQDARIIVGL

SEQ ID NO: 3424 - protein, 16 aa, Homo Sapiens
  ( 351 )...( 367 ): GBR1_HUMAN
VKNLKRQDARIIVGLF

SEQ ID NO: 3425 - protein, 16 aa, Homo Sapiens
  ( 577 )...( 593 ): GBR1_HUMAN
QTLVIKTFRFLSQKLF

SEQ ID NO: 3426 - protein, 16 aa, Homo Sapiens
  ( 578 )...( 594 ): GBR1_HUMAN
TLVIKTFRFLSQKLFI

SEQ ID NO: 3427 - protein, 16 aa, Homo Sapiens
  ( 579 )...( 595 ): GBR1_HUMAN
LVIKTFRFLSQKLFIS

SEQ ID NO: 3428 - protein, 16 aa, Homo Sapiens
  ( 580 )...( 596 ): GBR1_HUMAN
VIKTFRFLSQKLFISV

SEQ ID NO: 3429 - protein, 16 aa, Homo Sapiens
  ( 698 )...( 714 ): GBR1_HUMAN
KKEWRKTLEPWKLYAT

SEQ ID NO: 3430 - protein, 16 aa, Homo Sapiens
  ( 846 )...( 862 ): GBR1_HUMAN
YITLVVLFVPKMRRLI

SEQ ID NO: 3431 - protein, 16 aa, Homo Sapiens
  ( 847 )...( 863 ): GBR1_HUMAN
ITLVVLFVPKMRRLIT

SEQ ID NO: 3432 - protein, 16 aa, Homo Sapiens
  ( 848 )...( 864 ): GBR1_HUMAN
TLVVLFVPKMRRLITR

SEQ ID NO: 3433 - protein, 16 aa, Homo Sapiens
  ( 181 )...( 197 ): GBR2_HUMAN
AVNPAILKLLKHYQWK

SEQ ID NO: 3434 - protein, 16 aa, Homo Sapiens
  ( 182 )...( 198 ): GBR2_HUMAN
VNPAILKLLKHYQWKR

SEQ ID NO: 3435 - protein, 16 aa, Homo Sapiens
  ( 183 )...( 199 ): GBR2_HUMAN
NPAILKLLKHYQWKRV

SEQ ID NO: 3436 - protein, 16 aa, Homo Sapiens
  ( 184 )...( 200 ): GBR2_HUMAN
PAILKLLKHYQWKRVG

SEQ ID NO: 3437 - protein, 16 aa, Homo Sapiens
  ( 185 )...( 201 ): GBR2_HUMAN
AILKLLKHYQWKRVGT

SEQ ID NO: 3438 - protein, 16 aa, Homo Sapiens
  ( 186 )...( 202 ): GBR2_HUMAN
ILKLLKHYQWKRVGTL

SEQ ID NO: 3439 - protein, 16 aa, Homo Sapiens
  ( 187 )...( 203 ): GBR2_HUMAN
LKLLKHYQWKRVGTLT

SEQ ID NO: 3440 - protein, 16 aa, Homo Sapiens
  ( 188 )...( 204 ): GBR2_HUMAN
KLLKHYQWKRVGTLTQ

SEQ ID NO: 3441 - protein, 16 aa, Homo Sapiens
  ( 237 )...( 253 ): GBR2_HUMAN
CTSVKKLKGNDVRIIL

SEQ ID NO: 3442 - protein, 16 aa, Homo Sapiens
  ( 238 )...( 254 ): GBR2_HUMAN
TSVKKLKGNDVRIILG

SEQ ID NO: 3443 - protein, 16 aa, Homo Sapiens
  ( 240 )...( 256 ): GBR2_HUMAN
VKKLKGNDVRIILGQF

SEQ ID NO: 3444 - protein, 16 aa, Homo Sapiens
  ( 573 )...( 589 ): GBR2_HUMAN
AKTWRVHAIFKNVKMK

SEQ ID NO: 3445 - protein, 16 aa, Homo Sapiens
  ( 574 )...( 590 ): GBR2_HUMAN
KTWRVHAIFKNVKMKK

SEQ ID NO: 3446 - protein, 16 aa, Homo Sapiens
  ( 575 )...( 591 ): GBR2_HUMAN
TWRVHAIFKNVKMKKK

SEQ ID NO: 3447 - protein, 16 aa, Homo Sapiens
  ( 576 )...( 592 ): GBR2_HUMAN
WRVHAIFKNVKMKKKI

SEQ ID NO: 3448 - protein, 16 aa, Homo Sapiens
  ( 577 )...( 593 ): GBR2_HUMAN
RVHAIFKNVKMKKKII

SEQ ID NO: 3449 - protein, 16 aa, Homo Sapiens
  ( 578 )...( 594 ): GBR2_HUMAN
VHAIFKNVKMKKKIIK

SEQ ID NO: 3450 - protein, 16 aa, Homo Sapiens
  ( 579 )...( 595 ): GBR2_HUMAN
HAIFKNVKMKKKIIKD

SEQ ID NO: 3451 - protein, 16 aa, Homo Sapiens
  ( 580 )...( 596 ): GBR2_HUMAN
AIFKNVKMKKKIIKDQ

SEQ ID NO: 3452 - protein, 16 aa, Homo Sapiens
  ( 582 )...( 598 ): GBR2_HUMAN
FKNVKMKKKIIKDQKL

SEQ ID NO: 3453 - protein, 16 aa, Homo Sapiens
  ( 583 )...( 599 ): GBR2_HUMAN
KNVKMKKKIIKDQKLL

SEQ ID NO: 3454 - protein, 16 aa, Homo Sapiens
  ( 584 )...( 600 ): GBR2_HUMAN
NVKMKKKIIKDQKLLV

SEQ ID NO: 3455 - protein, 16 aa, Homo Sapiens
  ( 585 )...( 601 ): GBR2_HUMAN
VKMKKKIIKDQKLLVI

SEQ ID NO: 3456 - protein, 16 aa, Homo Sapiens
  ( 586 )...( 602 ): GBR2_HUMAN
KMKKKIIKDQKLLVIV

SEQ ID NO: 3457 - protein, 16 aa, Homo Sapiens
  ( 587 )...( 603 ): GBR2_HUMAN
MKKKIIKDQKLLVIVG

SEQ ID NO: 3458 - protein, 16 aa, Homo Sapiens
  ( 588 )...( 604 ): GBR2_HUMAN
KKKIIKDQKLLVIVGG

SEQ ID NO: 3459 - protein, 16 aa, Homo Sapiens
  ( 589 )...( 605 ): GBR2_HUMAN
KKIIKDQKLLVIVGGM

SEQ ID NO: 3460 - protein, 16 aa, Homo Sapiens
  ( 147 )...( 163 ): GHSR_HUMAN
FPLRAKVVVTKGRVKL

SEQ ID NO: 3461 - protein, 16 aa, Homo Sapiens
  ( 148 )...( 164 ): GHSR_HUMAN
PLRAKVVVTKGRVKLV

SEQ ID NO: 3462 - protein, 16 aa, Homo Sapiens
  ( 149 )...( 165 ): GHSR_HUMAN
LRAKVVVTKGRVKLVI

SEQ ID NO: 3463 - protein, 16 aa, Homo Sapiens
  ( 150 )...( 166 ): GHSR_HUMAN
RAKVVVTKGRVKLVIF

SEQ ID NO: 3464 - protein, 16 aa, Homo Sapiens
  ( 151 )...( 167 ): GHSR_HUMAN
AKVVVTKGRVKLVIFV

SEQ ID NO: 3465 - protein, 16 aa, Homo Sapiens
  ( 152 )...( 168 ): GHSR_HUMAN
KVVVTKGRVKLVIFVI

SEQ ID NO: 3466 - protein, 16 aa, Homo Sapiens
  ( 154 )...( 170 ): GHSR_HUMAN
VVTKGRVKLVIFVIWA

SEQ ID NO: 3467 - protein, 16 aa, Homo Sapiens
  ( 155 )...( 171 ): GHSR_HUMAN
VTKGRVKLVIFVIWAV

SEQ ID NO: 3468 - protein, 16 aa, Homo Sapiens
  ( 156 )...( 172 ): GHSR_HUMAN
TKGRVKLVIFVIWAVA

SEQ ID NO: 3469 - protein, 16 aa, Homo Sapiens
  ( 157 )...( 173 ): GHSR_HUMAN
KGRVKLVIFVIWAVAF

SEQ ID NO: 3470 - protein, 16 aa, Homo Sapiens
  ( 311 )...( 327 ): GIPR_HUMAN
FLIFIRILGILLSKLR

SEQ ID NO: 3471 - protein, 16 aa, Homo Sapiens
  ( 312 )...( 328 ): GIPR_HUMAN
LIFIRILGILLSKLRT

SEQ ID NO: 3472 - protein, 16 aa, Homo Sapiens
  ( 313 )...( 329 ): GIPR_HUMAN
IFIRILGILLSKLRTR

SEQ ID NO: 3473 - protein, 16 aa, Homo Sapiens
  ( 314 )...( 330 ): GIPR_HUMAN
FIRILGILLSKLRTRQ

SEQ ID NO: 3474 - protein, 16 aa, Homo Sapiens
  ( 315 )...( 331 ): GIPR_HUMAN
IRILGILLSKLRTRQM

SEQ ID NO: 3475 - protein, 16 aa, Homo Sapiens
  ( 316 )...( 332 ): GIPR_HUMAN
RILGILLSKLRTRQMR

SEQ ID NO: 3476 - protein, 16 aa, Homo Sapiens
  ( 322 )...( 338 ): GLP1_HUMAN
LIFVRVICIVVSKLKA

SEQ ID NO: 3477 - protein, 16 aa, Homo Sapiens
  ( 323 )...( 339 ): GLP1_HUMAN
IFVRVICIVVSKLKAN

SEQ ID NO: 3478 - protein, 16 aa, Homo Sapiens
  ( 324 )...( 340 ): GLP1_HUMAN
FVRVICIVVSKLKANL

SEQ ID NO: 3479 - protein, 16 aa, Homo Sapiens
  ( 325 )...( 341 ): GLP1_HUMAN
VRVICIVVSKLKANLM

SEQ ID NO: 3480 - protein, 16 aa, Homo Sapiens
  ( 331 )...( 347 ): GLP1_HUMAN
VVSKLKANLMCKTDIK

SEQ ID NO: 3481 - protein, 16 aa, Homo Sapiens
  ( 342 )...( 358 ): GLP1_HUMAN
KTDIKCRLAKSTLTLI

SEQ ID NO: 3482 - protein, 16 aa, Homo Sapiens
  ( 345 )...( 361 ): GLP1_HUMAN
IKCRLAKSTLTLIPLL

SEQ ID NO: 3483 - protein, 16 aa, Homo Sapiens
  ( 353 )...( 369 ): GLP2_HUMAN
VNFFIFLKILKLLISK

SEQ ID NO: 3484 - protein, 16 aa, Homo Sapiens
  ( 354 )...( 370 ): GLP2_HUMAN
NFFIFLKILKLLISKL

SEQ ID NO: 3485 - protein, 16 aa, Homo Sapiens
  ( 355 )...( 371 ): GLP2_HUMAN
FFIFLKILKLLISKLK

SEQ ID NO: 3486 - protein, 16 aa, Homo Sapiens
  ( 356 )...( 372 ): GLP2_HUMAN
FIFLKILKLLISKLKA

SEQ ID NO: 3487 - protein, 16 aa, Homo Sapiens
  ( 357 )...( 373 ): GLP2_HUMAN
IFLKILKLLISKLKAH

SEQ ID NO: 3488 - protein, 16 aa, Homo Sapiens
  ( 358 )...( 374 ): GLP2_HUMAN
FLKILKLLISKLKAHQ

SEQ ID NO: 3489 - protein, 16 aa, Homo Sapiens
  ( 359 )...( 375 ): GLP2_HUMAN
LKILKLLISKLKAHQM

SEQ ID NO: 3490 - protein, 16 aa, Homo Sapiens
  ( 360 )...( 376 ): GLP2_HUMAN
KILKLLISKLKAHQMC

SEQ ID NO: 3491 - protein, 16 aa, Homo Sapiens
  ( 361 )...( 377 ): GLP2_HUMAN
ILKLLISKLKAHQMCF

SEQ ID NO: 3492 - protein, 16 aa, Homo Sapiens
  ( 362 )...( 378 ): GLP2_HUMAN
LKLLISKLKAHQMCFR

SEQ ID NO: 3493 - protein, 16 aa, Homo Sapiens
  ( 379 )...( 395 ): GLP2_HUMAN
YKYRLAKSTLVLIPLL

SEQ ID NO: 3494 - protein, 16 aa, Homo Sapiens
  ( 380 )...( 396 ): GLP2_HUMAN
KYRLAKSTLVLIPLLG

SEQ ID NO: 3495 - protein, 16 aa, Homo Sapiens
  ( 319 )...( 335 ): GLR_HUMAN
FFIFVRIVQLLVAKLR

SEQ ID NO: 3496 - protein, 16 aa, Homo Sapiens
  ( 320 )...( 336 ): GLR_HUMAN
FIFVRIVQLLVAKLRA

SEQ ID NO: 3497 - protein, 16 aa, Homo Sapiens
  ( 321 )...( 337 ): GLR_HUMAN
IFVRIVQLLVAKLRAR

SEQ ID NO: 3498 - protein, 16 aa, Homo Sapiens
  ( 322 )...( 338 ): GLR_HUMAN
FVRIVQLLVAKLRARQ

SEQ ID NO: 3499 - protein, 16 aa, Homo Sapiens
  ( 323 )...( 339 ): GLR_HUMAN
VRIVQLLVAKLRARQM

SEQ ID NO: 3500 - protein, 16 aa, Homo Sapiens
  ( 324 )...( 340 ): GLR_HUMAN
RIVQLLVAKLRARQMH

SEQ ID NO: 3501 - protein, 16 aa, Homo Sapiens
  ( 325 )...( 341 ): GLR_HUMAN
IVQLLVAKLRARQMHH

SEQ ID NO: 3502 - protein, 16 aa, Homo Sapiens
  ( 326 )...( 342 ): GLR_HUMAN
VQLLVAKLRARQMHHT

SEQ ID NO: 3503 - protein, 16 aa, Homo Sapiens
  ( 343 )...( 359 ): GLR_HUMAN
YKFRLAKSTLTLIPLL

SEQ ID NO: 3504 - protein, 16 aa, Homo Sapiens
  ( 344 )...( 360 ): GLR_HUMAN
KFRLAKSTLTLIPLLG

SEQ ID NO: 3505 - protein, 16 aa, Homo Sapiens
  ( 6 )...( 22 ): GP37_HUMAN
ALLARMSRLLLLLLLK

SEQ ID NO: 3506 - protein, 16 aa, Homo Sapiens
  ( 7 )...( 23 ): GP37_HUMAN
LLARMSRLLLLLLLKV

SEQ ID NO: 3507 - protein, 16 aa, Homo Sapiens
  ( 8 )...( 24 ): GP37_HUMAN
LARMSRLLLLLLLKVS

SEQ ID NO: 3508 - protein, 16 aa, Homo Sapiens
  ( 9 )...( 25 ): GP37_HUMAN
ARMSRLLLLLLLKVSA

SEQ ID NO: 3509 - protein, 16 aa, Homo Sapiens
  ( 10 )...( 26 ): GP37_HUMAN
RMSRLLLLLLLKVSAS

SEQ ID NO: 3510 - protein, 16 aa, Homo Sapiens
  ( 49 )...( 65 ): GP39_HUMAN
SATIRVTQVLQKKGYL

SEQ ID NO: 3511 - protein, 16 aa, Homo Sapiens
  ( 50 )...( 66 ): GP39_HUMAN
ATIRVTQVLQKKGYLQ

SEQ ID NO: 3512 - protein, 16 aa, Homo Sapiens
  ( 51 )...( 67 ): GP39_HUMAN
TIRVTQVLQKKGYLQK

SEQ ID NO: 3513 - protein, 16 aa, Homo Sapiens
  ( 52 )...( 68 ): GP39_HUMAN
IRVTQVLQKKGYLQKE

SEQ ID NO: 3514 - protein, 16 aa, Homo Sapiens
  ( 53 )...( 69 ): GP39_HUMAN
RVTQVLQKKGYLQKEV

SEQ ID NO: 3515 - protein, 16 aa, Homo Sapiens
  ( 275 )...( 291 ): GP39_HUMAN
RTARRQTIIFLRLIVV

SEQ ID NO: 3516 - protein, 16 aa, Homo Sapiens
  ( 276 )...( 292 ): GP39_HUMAN
TARRQTIIFLRLIVVT

SEQ ID NO: 3517 - protein, 16 aa, Homo Sapiens
  ( 277 )...( 293 ): GP39_HUMAN
ARRQTIIFLRLIVVTL

SEQ ID NO: 3518 - protein, 16 aa, Homo Sapiens
  ( 278 )...( 294 ): GP39_HUMAN
RRQTIIFLRLIVVTLA

SEQ ID NO: 3519 - protein, 16 aa, Homo Sapiens
  ( 31 )...( 47 ): GP41_HUMAN
LNLLALVVFVGKLQRR

SEQ ID NO: 3520 - protein, 16 aa, Homo Sapiens
  ( 33 )...( 49 ): GP41_HUMAN
LLALVVFVGKLQRRPV

SEQ ID NO: 3521 - protein, 16 aa, Homo Sapiens
  ( 34 )...( 50 ): GP41_HUMAN
LALVVFVGKLQRRPVA

SEQ ID NO: 3522 - protein, 16 aa, Homo Sapiens
  ( 35 )...( 51 ): GP41_HUMAN
ALVVFVGKLQRRPVAV

SEQ ID NO: 3523 - protein, 16 aa, Homo Sapiens
  ( 133 )...( 149 ): GP68_HUMAN
RTLKAAVGVSVVIWAK

SEQ ID NO: 3524 - protein, 16 aa, Homo Sapiens
  ( 170 )...( 186 ): GP72_HUMAN
HQVIMHPLKPRISITK

SEQ ID NO: 3525 - protein, 16 aa, Homo Sapiens
  ( 171 )...( 187 ): GP72_HUMAN
QVIMHPLKPRISITKG

SEQ ID NO: 3526 - protein, 16 aa, Homo Sapiens
  ( 172 )...( 188 ): GP72_HUMAN
VIMHPLKPRISITKGV

SEQ ID NO: 3527 - protein, 16 aa, Homo Sapiens
  ( 173 )...( 189 ): GP72_HUMAN
IMHPLKPRISITKGVI

SEQ ID NO: 3528 - protein, 16 aa, Homo Sapiens
  ( 175 )...( 191 ): GP72_HUMAN
HPLKPRISITKGVIYI

SEQ ID NO: 3529 - protein, 16 aa, Homo Sapiens
  ( 176 )...( 192 ): GP72_HUMAN
PLKPRISITKGVIYIA

SEQ ID NO: 3530 - protein, 16 aa, Homo Sapiens
  ( 177 )...( 193 ): GP72_HUMAN
LKPRISITKGVIYIAV

SEQ ID NO: 3531 - protein, 16 aa, Homo Sapiens
  ( 178 )...( 194 ): GP72_HUMAN
KPRISITKGVIYIAVI

SEQ ID NO: 3532 - protein, 16 aa, Homo Sapiens
  ( 250 )...( 266 ): GP72_HUMAN
LPLLIISVAYARVAKK

SEQ ID NO: 3533 - protein, 16 aa, Homo Sapiens
  ( 251 )...( 267 ): GP72_HUMAN
PLLIISVAYARVAKKL

SEQ ID NO: 3534 - protein, 16 aa, Homo Sapiens
  ( 252 )...( 268 ): GP72_HUMAN
LLIISVAYARVAKKLW

SEQ ID NO: 3535 - protein, 16 aa, Homo Sapiens
  ( 253 )...( 269 ): GP72_HUMAN
LIISVAYARVAKKLWL

SEQ ID NO: 3536 - protein, 16 aa, Homo Sapiens
  ( 279 )...( 295 ): GP72_HUMAN
QYFALRRKKKKTIKML

SEQ ID NO: 3537 - protein, 16 aa, Homo Sapiens
  ( 280 )...( 296 ): GP72_HUMAN
YFALRRKKKKTIKMLM

SEQ ID NO: 3538 - protein, 16 aa, Homo Sapiens
  ( 281 )...( 297 ): GP72_HUMAN
FALRRKKKKTIKMLML

SEQ ID NO: 3539 - protein, 16 aa, Homo Sapiens
  ( 282 )...( 298 ): GP72_HUMAN
ALRRKKKKTIKMLMLV

SEQ ID NO: 3540 - protein, 16 aa, Homo Sapiens
  ( 283 )...( 299 ): GP72_HUMAN
LRRKKKKTIKMLMLVV

SEQ ID NO: 3541 - protein, 16 aa, Homo Sapiens
  ( 284 )...( 300 ): GP72_HUMAN
RRKKKKTIKMLMLVVV

SEQ ID NO: 3542 - protein, 16 aa, Homo Sapiens
  ( 285 )...( 301 ): GP72_HUMAN
RKKKKTIKMLMLVVVL

SEQ ID NO: 3543 - protein, 16 aa, Homo Sapiens
  ( 287 )...( 303 ): GP72_HUMAN
KKKTIKMLMLVVVLFA

SEQ ID NO: 3544 - protein, 16 aa, Homo Sapiens
  ( 288 )...( 304 ): GP72_HUMAN
KKTIKMLMLVVVLFAL

SEQ ID NO: 3545 - protein, 16 aa, Homo Sapiens
  ( 199 )...( 215 ): GP85_HUMAN
QLVYLKLIFFVHDRRK

SEQ ID NO: 3546 - protein, 16 aa, Homo Sapiens
  ( 201 )...( 217 ): GP85_HUMAN
VYLKLIFFVHDRRKMK

SEQ ID NO: 3547 - protein, 16 aa, Homo Sapiens
  ( 54 )...( 70 ): GPR1_HUMAN
PGNAIVIWFTGLKWKK

SEQ ID NO: 3548 - protein, 16 aa, Homo Sapiens
  ( 65 )...( 81 ): GPR1_HUMAN
LKWKKTVTTLWFLNLA

SEQ ID NO: 3549 - protein, 16 aa, Homo Sapiens
  ( 66 )...( 82 ): GPR1_HUMAN
KWKKTVTTLWFLNLAI

SEQ ID NO: 3550 - protein, 16 aa, Homo Sapiens
  ( 143 )...( 159 ): GPR1_HUMAN
VLSHRHRTLKNSLIVI

SEQ ID NO: 3551 - protein, 16 aa, Homo Sapiens
  ( 144 )...( 160 ): GPR1_HUMAN
LSHRHRTLKNSLIVII

SEQ ID NO: 3552 - protein, 16 aa, Homo Sapiens
  ( 146 )...( 162 ): GPR1_HUMAN
HRHRTLKNSLIVIIFI

SEQ ID NO: 3553 - protein, 16 aa, Homo Sapiens
  ( 147 )...( 163 ): GPR1_HUMAN
RHRTLKNSLIVIIFIW

SEQ ID NO: 3554 - protein, 16 aa, Homo Sapiens
  ( 227 )...( 243 ): GPR1_HUMAN
LCLIFKVKKRTVLISS

SEQ ID NO: 3555 - protein, 16 aa, Homo Sapiens
  ( 228 )...( 244 ): GPR1_HUMAN
CLIFKVKKRTVLISSR

SEQ ID NO: 3556 - protein, 16 aa, Homo Sapiens
  ( 229 )...( 245 ): GPR1_HUMAN
LIFKVKKRTVLISSRH

SEQ ID NO: 3557 - protein, 16 aa, Homo Sapiens
  ( 230 )...( 246 ): GPR1_HUMAN
IFKVKKRTVLISSRHF

SEQ ID NO: 3558 - protein, 16 aa, Homo Sapiens
  ( 232 )...( 248 ): GPR1_HUMAN
KVKKRTVLISSRHFWT

SEQ ID NO: 3559 - protein, 16 aa, Homo Sapiens
  ( 233 )...( 249 ): GPR1_HUMAN
VKKRTVLISSRHFWTI

SEQ ID NO: 3560 - protein, 16 aa, Homo Sapiens
  ( 234 )...( 250 ): GPR1_HUMAN
KKRTVLISSRHFWTIL

SEQ ID NO: 3561 - protein, 16 aa, Homo Sapiens
  ( 235 )...( 251 ): GPR1_HUMAN
KRTVLISSRHFWTILV

SEQ ID NO: 3562 - protein, 16 aa, Homo Sapiens
  ( 299 )...( 315 ): GPR1_HUMAN
LNPILYVLISKKFQAR

SEQ ID NO: 3563 - protein, 16 aa, Homo Sapiens
  ( 216 )...( 232 ): GPR4_HUMAN
RQEKAKIKRLALSLIA

SEQ ID NO: 3564 - protein, 16 aa, Homo Sapiens
  ( 217 )...( 233 ): GPR4_HUMAN
QEKAKIKRLALSLIAI

SEQ ID NO: 3565 - protein, 16 aa, Homo Sapiens
  ( 218 )...( 234 ): GPR4_HUMAN
EKAKIKRLALSLIAIV

SEQ ID NO: 3566 - protein, 16 aa, Homo Sapiens
  ( 219 )...( 235 ): GPR4_HUMAN
KAKIKRLALSLIAIVL

SEQ ID NO: 3567 - protein, 16 aa, Homo Sapiens
  ( 220 )...( 236 ): GPR4_HUMAN
AKIKRLALSLIAIVLV

SEQ ID NO: 3568 - protein, 16 aa, Homo Sapiens
  ( 221 )...( 237 ): GPR4_HUMAN
KIKRLALSLIAIVLVC

SEQ ID NO: 3569 - protein, 16 aa, Homo Sapiens
  ( 238 )...( 254 ): GPR7_HUMAN
HAKALERAKKRVTFLV

SEQ ID NO: 3570 - protein, 16 aa, Homo Sapiens
  ( 239 )...( 255 ): GPR7_HUMAN
AKALERAKKRVTFLVV

SEQ ID NO: 3571 - protein, 16 aa, Homo Sapiens
  ( 240 )...( 256 ): GPR7_HUMAN
KALERAKKRVTFLVVA

SEQ ID NO: 3572 - protein, 16 aa, Homo Sapiens
  ( 241 )...( 257 ): GPR7_HUMAN
ALERAKKRVTFLVVAI

SEQ ID NO: 3573 - protein, 16 aa, Homo Sapiens
  ( 242 )...( 258 ): GPR7_HUMAN
LERAKKRVTFLVVAIL

SEQ ID NO: 3574 - protein, 16 aa, Homo Sapiens
  ( 243 )...( 259 ): GPR7_HUMAN
ERAKKRVTFLVVAILA

SEQ ID NO: 3575 - protein, 16 aa, Homo Sapiens
  ( 244 )...( 260 ): GPR7_HUMAN
RAKKRVTFLVVAILAV

SEQ ID NO: 3576 - protein, 16 aa, Homo Sapiens
  ( 245 )...( 261 ): GPR7_HUMAN
AKKRVTFLVVAILAVC

SEQ ID NO: 3577 - protein, 16 aa, Homo Sapiens
  ( 246 )...( 262 ): GPR7_HUMAN
KKRVTFLVVAILAVCL

SEQ ID NO: 3578 - protein, 16 aa, Homo Sapiens
  ( 62 )...( 78 ): GPR8_HUMAN
GNTAVILVILRAPKMK

SEQ ID NO: 3579 - protein, 16 aa, Homo Sapiens
  ( 63 )...( 79 ): GPR8_HUMAN
NTAVILVILRAPKMKT

SEQ ID NO: 3580 - protein, 16 aa, Homo Sapiens
  ( 64 )...( 80 ): GPR8_HUMAN
TAVILVILRAPKMKTV

SEQ ID NO: 3581 - protein, 16 aa, Homo Sapiens
  ( 65 )...( 81 ): GPR8_HUMAN
AVILVILRAPKMKTVT

SEQ ID NO: 3582 - protein, 16 aa, Homo Sapiens
  ( 66 )...( 82 ): GPR8_HUMAN
VILVILRAPKMKTVTN

SEQ ID NO: 3583 - protein, 16 aa, Homo Sapiens
  ( 67 )...( 83 ): GPR8_HUMAN
ILVILRAPKMKTVTNV

SEQ ID NO: 3584 - protein, 16 aa, Homo Sapiens
  ( 68 )...( 84 ): GPR8_HUMAN
LVILRAPKMKTVTNVF

SEQ ID NO: 3585 - protein, 16 aa, Homo Sapiens
  ( 69 )...( 85 ): GPR8_HUMAN
VILRAPKMKTVTNVFI

SEQ ID NO: 3586 - protein, 16 aa, Homo Sapiens
  ( 70 )...( 86 ): GPR8_HUMAN
ILRAPKMKTVTNVFIL

SEQ ID NO: 3587 - protein, 16 aa, Homo Sapiens
  ( 71 )...( 87 ): GPR8_HUMAN
LRAPKMKTVTNVFILN

SEQ ID NO: 3588 - protein, 16 aa, Homo Sapiens
  ( 72 )...( 88 ): GPR8_HUMAN
RAPKMKTVTNVFILNL

SEQ ID NO: 3589 - protein, 16 aa, Homo Sapiens
  ( 248 )...( 264 ): GPR8_HUMAN
AKALGKARRKVTVLVL

SEQ ID NO: 3590 - protein, 16 aa, Homo Sapiens
  ( 249 )...( 265 ): GPR8_HUMAN
KALGKARRKVTVLVLV

SEQ ID NO: 3591 - protein, 16 aa, Homo Sapiens
  ( 250 )...( 266 ): GPR8_HUMAN
ALGKARRKVTVLVLVV

SEQ ID NO: 3592 - protein, 16 aa, Homo Sapiens
  ( 251 )...( 267 ): GPR8_HUMAN
LGKARRKVTVLVLVVL

SEQ ID NO: 3593 - protein, 16 aa, Homo Sapiens
  ( 252 )...( 268 ): GPR8_HUMAN
GKARRKVTVLVLVVLA

SEQ ID NO: 3594 - protein, 16 aa, Homo Sapiens
  ( 253 )...( 269 ): GPR8_HUMAN
KARRKVTVLVLVVLAV

SEQ ID NO: 3595 - protein, 16 aa, Homo Sapiens
  ( 254 )...( 270 ): GPR8_HUMAN
ARRKVTVLVLVVLAVC

SEQ ID NO: 3596 - protein, 16 aa, Homo Sapiens
  ( 255 )...( 271 ): GPR8_HUMAN
RRKVTVLVLVVLAVCL

SEQ ID NO: 3597 - protein, 16 aa, Homo Sapiens
  ( 80 )...( 96 ): GPRA_HUMAN
LLVLVIARVRRLHNVT

SEQ ID NO: 3598 - protein, 16 aa, Homo Sapiens
  ( 238 )...( 254 ): GPRA_HUMAN
LLVILLSYVRVSVKLR

SEQ ID NO: 3599 - protein, 16 aa, Homo Sapiens
  ( 239 )...( 255 ): GPRA_HUMAN
LVILLSYVRVSVKLRN

SEQ ID NO: 3600 - protein, 16 aa, Homo Sapiens
  ( 240 )...( 256 ): GPRA_HUMAN
VILLSYVRVSVKLRNR

SEQ ID NO: 3601 - protein, 16 aa, Homo Sapiens
  ( 241 )...( 257 ): GPRA_HUMAN
ILLSYVRVSVKLRNRV

SEQ ID NO: 3602 - protein, 16 aa, Homo Sapiens
  ( 186 )...( 202 ): GPRF_HUMAN
KKATPIKLIWSLVALI

SEQ ID NO: 3603 - protein, 16 aa, Homo Sapiens
  ( 230 )...( 246 ): GPRF_HUMAN
GKHNKKLKKSIKIIFI

SEQ ID NO: 3604 - protein, 16 aa, Homo Sapiens
  ( 231 )...( 247 ): GPRF_HUMAN
KHNKKLKKSIKIIFIV

SEQ ID NO: 3605 - protein, 16 aa, Homo Sapiens
  ( 232 )...( 248 ): GPRF_HUMAN
HNKKLKKSIKIIFIVV

SEQ ID NO: 3606 - protein, 16 aa, Homo Sapiens
  ( 233 )...( 249 ): GPRF_HUMAN
NKKLKKSIKIIFIVVA

SEQ ID NO: 3607 - protein, 16 aa, Homo Sapiens
  ( 234 )...( 250 ): GPRF_HUMAN
KKLKKSIKIIFIVVAA

SEQ ID NO: 3608 - protein, 16 aa, Homo Sapiens
  ( 235 )...( 251 ): GPRF_HUMAN
KLKKSIKIIFIVVAAF

SEQ ID NO: 3609 - protein, 16 aa, Homo Sapiens
  ( 236 )...( 252 ): GPRF_HUMAN
LKKSIKIIFIVVAAFL

SEQ ID NO: 3610 - protein, 16 aa, Homo Sapiens
  ( 237 )...( 253 ): GPRF_HUMAN
KKSIKIIFIVVAAFLV

SEQ ID NO: 3611 - protein, 16 aa, Homo Sapiens
  ( 131 )...( 147 ): GPRH_HUMAN
LAIVHPVKSLKLRRPL

SEQ ID NO: 3612 - protein, 16 aa, Homo Sapiens
  ( 212 )...( 228 ): GPRH_HUMAN
YLLIIRSLRQGLRVEK

SEQ ID NO: 3613 - protein, 16 aa, Homo Sapiens
  ( 213 )...( 229 ): GPRH_HUMAN
LLIIRSLRQGLRVEKR

SEQ ID NO: 3614 - protein, 16 aa, Homo Sapiens
  ( 214 )...( 230 ): GPRH_HUMAN
LIIRSLRQGLRVEKRL

SEQ ID NO: 3615 - protein, 16 aa, Homo Sapiens
  ( 222 )...( 238 ): GPRH_HUMAN
GLRVEKRLKTKAVRMI

SEQ ID NO: 3616 - protein, 16 aa, Homo Sapiens
  ( 223 )...( 239 ): GPRH_HUMAN
LRVEKRLKTKAVRMIA

SEQ ID NO: 3617 - protein, 16 aa, Homo Sapiens
  ( 224 )...( 240 ): GPRH_HUMAN
RVEKRLKTKAVRMIAI

SEQ ID NO: 3618 - protein, 16 aa, Homo Sapiens
  ( 225 )...( 241 ): GPRH_HUMAN
VEKRLKTKAVRMIAIV

SEQ ID NO: 3619 - protein, 16 aa, Homo Sapiens
  ( 226 )...( 242 ): GPRH_HUMAN
EKRLKTKAVRMIAIVL

SEQ ID NO: 3620 - protein, 16 aa, Homo Sapiens
  ( 227 )...( 243 ): GPRH_HUMAN
KRLKTKAVRMIAIVLA

SEQ ID NO: 3621 - protein, 16 aa, Homo Sapiens
  ( 228 )...( 244 ): GPRH_HUMAN
RLKTKAVRMIAIVLAI

SEQ ID NO: 3622 - protein, 16 aa, Homo Sapiens
  ( 229 )...( 245 ): GPRH_HUMAN
LKTKAVRMIAIVLAIF

SEQ ID NO: 3623 - protein, 16 aa, Homo Sapiens
  ( 230 )...( 246 ): GPRH_HUMAN
KTKAVRMIAIVLAIFL

SEQ ID NO: 3624 - protein, 16 aa, Homo Sapiens
  ( 52 )...( 68 ): GPRI_HUMAN
KKRTTVTIYMMNVALV

SEQ ID NO: 3625 - protein, 16 aa, Homo Sapiens
  ( 208 )...( 224 ): GPRI_HUMAN
LVIIHNLLHGRTSKLK

SEQ ID NO: 3626 - protein, 16 aa, Homo Sapiens
  ( 209 )...( 225 ): GPRI_HUMAN
VIIHNLLHGRTSKLKP

SEQ ID NO: 3627 - protein, 16 aa, Homo Sapiens
  ( 210 )...( 226 ): GPRI_HUMAN
IIHNLLHGRTSKLKPK

SEQ ID NO: 3628 - protein, 16 aa, Homo Sapiens
  ( 211 )...( 227 ): GPRI_HUMAN
IHNLLHGRTSKLKPKV

SEQ ID NO: 3629 - protein, 16 aa, Homo Sapiens
  ( 219 )...( 235 ): GPRI_HUMAN
TSKLKPKVKEKSIRII

SEQ ID NO: 3630 - protein, 16 aa, Homo Sapiens
  ( 220 )...( 236 ): GPRI_HUMAN
SKLKPKVKEKSIRIII

SEQ ID NO: 3631 - protein, 16 aa, Homo Sapiens
  ( 221 )...( 237 ): GPRI_HUMAN
KLKPKVKEKSIRIIIT

SEQ ID NO: 3632 - protein, 16 aa, Homo Sapiens
  ( 222 )...( 238 ): GPRI_HUMAN
LKPKVKEKSIRIIITL

SEQ ID NO: 3633 - protein, 16 aa, Homo Sapiens
  ( 223 )...( 239 ): GPRI_HUMAN
KPKVKEKSIRIIITLL

SEQ ID NO: 3634 - protein, 16 aa, Homo Sapiens
  ( 224 )...( 240 ): GPRI_HUMAN
PKVKEKSIRIIITLLV

SEQ ID NO: 3635 - protein, 16 aa, Homo Sapiens
  ( 225 )...( 241 ): GPRI_HUMAN
KVKEKSIRIIITLLVQ

SEQ ID NO: 3636 - protein, 16 aa, Homo Sapiens
  ( 167 )...( 183 ): GPRJ_HUMAN
IVYPLSFKVSREKAKK

SEQ ID NO: 3637 - protein, 16 aa, Homo Sapiens
  ( 260 )...( 276 ): GPRJ_HUMAN
VRRTMNIVPRTKVKTI

SEQ ID NO: 3638 - protein, 16 aa, Homo Sapiens
  ( 262 )...( 278 ): GPRJ_HUMAN
RTMNIVPRTKVKTIKM

SEQ ID NO: 3639 - protein, 16 aa, Homo Sapiens
  ( 263 )...( 279 ): GPRJ_HUMAN
TMNIVPRTKVKTIKMF

SEQ ID NO: 3640 - protein, 16 aa, Homo Sapiens
  ( 264 )...( 280 ): GPRJ_HUMAN
MNIVPRTKVKTIKMFL

SEQ ID NO: 3641 - protein, 16 aa, Homo Sapiens
  ( 265 )...( 281 ): GPRJ_HUMAN
NIVPRTKVKTIKMFLI

SEQ ID NO: 3642 - protein, 16 aa, Homo Sapiens
  ( 266 )...( 282 ): GPRJ_HUMAN
IVPRTKVKTIKMFLIL

SEQ ID NO: 3643 - protein, 16 aa, Homo Sapiens
  ( 267 )...( 283 ): GPRJ_HUMAN
VPRTKVKTIKMFLILN

SEQ ID NO: 3644 - protein, 16 aa, Homo Sapiens
  ( 268 )...( 284 ): GPRJ_HUMAN
PRTKVKTIKMFLILNL

SEQ ID NO: 3645 - protein, 16 aa, Homo Sapiens
  ( 269 )...( 285 ): GPRJ_HUMAN
RTKVKTIKMFLILNLL

SEQ ID NO: 3646 - protein, 16 aa, Homo Sapiens
  ( 270 )...( 286 ): GPRJ_HUMAN
TKVKTIKMFLILNLLF

SEQ ID NO: 3647 - protein, 16 aa, Homo Sapiens
  ( 271 )...( 287 ): GPRJ_HUMAN
KVKTIKMFLILNLLFL

SEQ ID NO: 3648 - protein, 16 aa, Homo Sapiens
  ( 233 )...( 249 ): GPRK_HUMAN
RQRRVRAMQLLLTVLI

SEQ ID NO: 3649 - protein, 16 aa, Homo Sapiens
  ( 234 )...( 250 ): GPRK_HUMAN
QRRVRAMQLLLTVLII

SEQ ID NO: 3650 - protein, 16 aa, Homo Sapiens
  ( 235 )...( 251 ): GPRK_HUMAN
RRVRAMQLLLTVLIIF

SEQ ID NO: 3651 - protein, 16 aa, Homo Sapiens
  ( 230 )...( 246 ): GPRM_HUMAN
TYTKILQALNIRIGTR

SEQ ID NO: 3652 - protein, 16 aa, Homo Sapiens
  ( 231 )...( 247 ): GPRM_HUMAN
YTKILQALNIRIGTRF

SEQ ID NO: 3653 - protein, 16 aa, Homo Sapiens
  ( 232 )...( 248 ): GPRM_HUMAN
TKILQALNIRIGTRFS

SEQ ID NO: 3654 - protein, 16 aa, Homo Sapiens
  ( 233 )...( 249 ): GPRM_HUMAN
KILQALNIRIGTRFST

SEQ ID NO: 3655 - protein, 16 aa, Homo Sapiens
  ( 284 )...( 300 ): GPRM_HUMAN
VRTSVSVIIALRRAVK

SEQ ID NO: 3656 - protein, 16 aa, Homo Sapiens
  ( 363 )...( 379 ): GPRM_HUMAN
HPLLYAFTRQKFQKVL

SEQ ID NO: 3657 - protein, 16 aa, Homo Sapiens
  ( 364 )...( 380 ): GPRM_HUMAN
PLLYAFTRQKFQKVLK

SEQ ID NO: 3658 - protein, 16 aa, Homo Sapiens
  ( 365 )...( 381 ): GPRM_HUMAN
LLYAFTRQKFQKVLKS

SEQ ID NO: 3659 - protein, 16 aa, Homo Sapiens
  ( 366 )...( 382 ): GPRM_HUMAN
LYAFTRQKFQKVLKSK

SEQ ID NO: 3660 - protein, 16 aa, Homo Sapiens
  ( 367 )...( 383 ): GPRM_HUMAN
YAFTRQKFQKVLKSKM

SEQ ID NO: 3661 - protein, 16 aa, Homo Sapiens
  ( 374 )...( 390 ): GPRM_HUMAN
FQKVLKSKMKKRVVSI

SEQ ID NO: 3662 - protein, 16 aa, Homo Sapiens
  ( 375 )...( 391 ): GPRM_HUMAN
QKVLKSKMKKRVVSIV

SEQ ID NO: 3663 - protein, 16 aa, Homo Sapiens
  ( 376 )...( 392 ): GPRM_HUMAN
KVLKSKMKKRVVSIVE

SEQ ID NO: 3664 - protein, 16 aa, Homo Sapiens
  ( 377 )...( 393 ): GPRM_HUMAN
VLKSKMKKRVVSIVEA

SEQ ID NO: 3665 - protein, 16 aa, Homo Sapiens
  ( 104 )...( 120 ): GPRO_HUMAN
IIGNSTVIFAVVKKSK

SEQ ID NO: 3666 - protein, 16 aa, Homo Sapiens
  ( 105 )...( 121 ): GPRO_HUMAN
IGNSTVIFAVVKKSKL

SEQ ID NO: 3667 - protein, 16 aa, Homo Sapiens
  ( 106 )...( 122 ): GPRO_HUMAN
GNSTVIFAVVKKSKLH

SEQ ID NO: 3668 - protein, 16 aa, Homo Sapiens
  ( 107 )...( 123 ): GPRO_HUMAN
NSTVIFAVVKKSKLHW

SEQ ID NO: 3669 - protein, 16 aa, Homo Sapiens
  ( 361 )...( 377 ): GPRO_HUMAN
IVLCETFRKRLVLSVK

SEQ ID NO: 3670 - protein, 16 aa, Homo Sapiens
  ( 368 )...( 384 ): GPRO_HUMAN
RKRLVLSVKPAAQGQL

SEQ ID NO: 3671 - protein, 16 aa, Homo Sapiens
  ( 369 )...( 385 ): GPRO_HUMAN
KRLVLSVKPAAQGQLR

SEQ ID NO: 3672 - protein, 16 aa, Homo Sapiens
  ( 213 )...( 229 ): GPRV_HUMAN
KQPKLQRAQALVTLVV

SEQ ID NO: 3673 - protein, 16 aa, Homo Sapiens
  ( 272 )...( 288 ): GPRW_HUMAN
FNVVLLVHLWRRVMLK

SEQ ID NO: 3674 - protein, 16 aa, Homo Sapiens
  ( 159 )...( 175 ): GPRY_HUMAN
SIQQRKAITTKQSIYV

SEQ ID NO: 3675 - protein, 16 aa, Homo Sapiens
  ( 160 )...( 176 ): GPRY_HUMAN
IQQRKAITTKQSIYVC

SEQ ID NO: 3676 - protein, 16 aa, Homo Sapiens
  ( 232 )...( 248 ): GPRY_HUMAN
LLIILSYIKIGKNLLR

SEQ ID NO: 3677 - protein, 16 aa, Homo Sapiens
  ( 233 )...( 249 ): GPRY_HUMAN
LIILSYIKIGKNLLRI

SEQ ID NO: 3678 - protein, 16 aa, Homo Sapiens
  ( 234 )...( 250 ): GPRY_HUMAN
IILSYIKIGKNLLRIS

SEQ ID NO: 3679 - protein, 16 aa, Homo Sapiens
  ( 235 )...( 251 ): GPRY_HUMAN
ILSYIKIGKNLLRISK

SEQ ID NO: 3680 - protein, 16 aa, Homo Sapiens
  ( 236 )...( 252 ): GPRY_HUMAN
LSYIKIGKNLLRISKR

SEQ ID NO: 3681 - protein, 16 aa, Homo Sapiens
  ( 295 )...( 311 ): GRFR_HUMAN
VNFGLFLNIIRILVRK

SEQ ID NO: 3682 - protein, 16 aa, Homo Sapiens
  ( 296 )...( 312 ): GRFR_HUMAN
NFGLFLNIIRILVRKL

SEQ ID NO: 3683 - protein, 16 aa, Homo Sapiens
  ( 51 )...( 67 ): GRHR_HUMAN
TFNASFLLKLQKWTQK

SEQ ID NO: 3684 - protein, 16 aa, Homo Sapiens
  ( 52 )...( 68 ): GRHR_HUMAN
FNASFLLKLQKWTQKK

SEQ ID NO: 3685 - protein, 16 aa, Homo Sapiens
  ( 53 )...( 69 ): GRHR_HUMAN
NASFLLKLQKWTQKKE

SEQ ID NO: 3686 - protein, 16 aa, Homo Sapiens
  ( 54 )...( 70 ): GRHR_HUMAN
ASFLLKLQKWTQKKEK

SEQ ID NO: 3687 - protein, 16 aa, Homo Sapiens
  ( 55 )...( 71 ): GRHR_HUMAN
SFLLKLQKWTQKKEKG

SEQ ID NO: 3688 - protein, 16 aa, Homo Sapiens
  ( 56 )...( 72 ): GRHR_HUMAN
FLLKLQKWTQKKEKGK

SEQ ID NO: 3689 - protein, 16 aa, Homo Sapiens
  ( 68 )...( 84 ): GRHR_HUMAN
EKGKKLSRMKLLLKHL

SEQ ID NO: 3690 - protein, 16 aa, Homo Sapiens
  ( 69 )...( 85 ): GRHR_HUMAN
KGKKLSRMKLLLKHLT

SEQ ID NO: 3691 - protein, 16 aa, Homo Sapiens
  ( 70 )...( 86 ): GRHR_HUMAN
GKKLSRMKLLLKHLTL

SEQ ID NO: 3692 - protein, 16 aa, Homo Sapiens
  ( 71 )...( 87 ): GRHR_HUMAN
KKLSRMKLLLKHLTLA

SEQ ID NO: 3693 - protein, 16 aa, Homo Sapiens
  ( 72 )...( 88 ): GRHR_HUMAN
KLSRMKLLLKHLTLAN

SEQ ID NO: 3694 - protein, 16 aa, Homo Sapiens
  ( 73 )...( 89 ): GRHR_HUMAN
LSRMKLLLKHLTLANL

SEQ ID NO: 3695 - protein, 16 aa, Homo Sapiens
  ( 74 )...( 90 ): GRHR_HUMAN
SRMKLLLKHLTLANLL

SEQ ID NO: 3696 - protein, 16 aa, Homo Sapiens
  ( 255 )...( 271 ): GRHR_HUMAN
KNNIPRARLKTLKMTV

SEQ ID NO: 3697 - protein, 16 aa, Homo Sapiens
  ( 262 )...( 278 ): GRHR_HUMAN
RLKTLKMTVAFATSFT

SEQ ID NO: 3698 - protein, 16 aa, Homo Sapiens
  ( 254 )...( 270 ): GRPR_HUMAN
KQIESRKRLAKTVLVF

SEQ ID NO: 3699 - protein, 16 aa, Homo Sapiens
  ( 255 )...( 271 ): GRPR_HUMAN
QIESRKRLAKTVLVFV

SEQ ID NO: 3700 - protein, 16 aa, Homo Sapiens
  ( 256 )...( 272 ): GRPR_HUMAN
IESRKRLAKTVLVFVG

SEQ ID NO: 3701 - protein, 16 aa, Homo Sapiens
  ( 257 )...( 273 ): GRPR_HUMAN
ESRKRLAKTVLVFVGL

SEQ ID NO: 3702 - protein, 16 aa, Homo Sapiens
  ( 258 )...( 274 ): GRPR_HUMAN
SRKRLAKTVLVFVGLF

SEQ ID NO: 3703 - protein, 16 aa, Homo Sapiens
  ( 259 )...( 275 ): GRPR_HUMAN
RKRLAKTVLVFVGLFA

SEQ ID NO: 3704 - protein, 16 aa, Homo Sapiens
  ( 260 )...( 276 ): GRPR_HUMAN
KRLAKTVLVFVGLFAF

SEQ ID NO: 3705 - protein, 16 aa, Homo Sapiens
  ( 322 )...( 338 ): GRPR_HUMAN
LYLLSKSFRKQFNTQL

SEQ ID NO: 3706 - protein, 16 aa, Homo Sapiens
  ( 323 )...( 339 ): GRPR_HUMAN
YLLSKSFRKQFNTQLL

SEQ ID NO: 3707 - protein, 16 aa, Homo Sapiens
  ( 129 )...( 145 ): HH1R_HUMAN
VQQPLRYLKYRTKTRA

SEQ ID NO: 3708 - protein, 16 aa, Homo Sapiens
  ( 203 )...( 219 ): HH1R_HUMAN
TLLMLWFYAKIYKAVR

SEQ ID NO: 3709 - protein, 16 aa, Homo Sapiens
  ( 204 )...( 220 ): HH1R_HUMAN
LLMLWFYAKIYKAVRQ

SEQ ID NO: 3710 - protein, 13 aa, Homo Sapiens
  ( 475 )...( 491 ): HH1R_HUMAN
FKKTFKRILHIRS

SEQ ID NO: 3711 - protein, 12 aa, Homo Sapiens
  ( 476 )...( 492 ): HH1R_HUMAN
KKTFKRILHIRS

SEQ ID NO: 3712 - protein, 16 aa, Homo Sapiens
  ( 151 )...( 167 ): HH3R_HUMAN
RAVRKMLLVWVLAFLL

SEQ ID NO: 3713 - protein, 16 aa, Homo Sapiens
  ( 354 )...( 370 ): HH3R_HUMAN
RKVAKSLAVIVSIFGL

SEQ ID NO: 3714 - protein, 16 aa, Homo Sapiens
  ( 420 )...( 436 ): HH3R_HUMAN
RRAFTKLLCPQKLKIQ

SEQ ID NO: 3715 - protein, 16 aa, Homo Sapiens
  ( 422 )...( 438 ): HH3R_HUMAN
AFTKLLCPQKLKIQPH

SEQ ID NO: 3716 - protein, 16 aa, Homo Sapiens
  ( 425 )...( 441 ): HH3R_HUMAN
KLLCPQKLKIQPHSSL

SEQ ID NO: 3717 - protein, 16 aa, Homo Sapiens
  ( 362 )...( 378 ): HH4R_HUMAN
HKRFQKAFLKIFCIKK

SEQ ID NO: 3718 - protein, 16 aa, Homo Sapiens
  ( 363 )...( 379 ): HH4R_HUMAN
KRFQKAFLKIFCIKKQ

SEQ ID NO: 3719 - protein, 16 aa, Homo Sapiens
  ( 365 )...( 381 ): HH4R_HUMAN
FQKAFLKIFCIKKQPL

SEQ ID NO: 3720 - protein, 16 aa, Homo Sapiens
  ( 366 )...( 382 ): HH4R_HUMAN
QKAFLKIFCIKKQPLP

SEQ ID NO: 3721 - protein, 16 aa, Homo Sapiens
  ( 153 )...( 169 ): HM74_HUMAN
GITVGLTVHLLKKKLL

SEQ ID NO: 3722 - protein, 16 aa, Homo Sapiens
  ( 154 )...( 170 ): HM74_HUMAN
ITVGLTVHLLKKKLLI

SEQ ID NO: 3723 - protein, 16 aa, Homo Sapiens
  ( 155 )...( 171 ): HM74_HUMAN
TVGLTVHLLKKKLLIQ

SEQ ID NO: 3724 - protein, 16 aa, Homo Sapiens
  ( 156 )...( 172 ): HM74_HUMAN
VGLTVHLLKKKLLIQN

SEQ ID NO: 3725 - protein, 16 aa, Homo Sapiens
  ( 157 )...( 173 ): HM74_HUMAN
GLTVHLLKKKLLIQNG

SEQ ID NO: 3726 - protein, 16 aa, Homo Sapiens
  ( 158 )...( 174 ): HM74_HUMAN
LTVHLLKKKLLIQNGP

SEQ ID NO: 3727 - protein, 16 aa, Homo Sapiens
  ( 159 )...( 175 ): HM74_HUMAN
TVHLLKKKLLIQNGPA

SEQ ID NO: 3728 - protein, 16 aa, Homo Sapiens
  ( 160 )...( 176 ): HM74_HUMAN
VHLLKKKLLIQNGPAN

SEQ ID NO: 3729 - protein, 16 aa, Homo Sapiens
  ( 161 )...( 177 ): HM74_HUMAN
HLLKKKLLIQNGPANV

SEQ ID NO: 3730 - protein, 16 aa, Homo Sapiens
  ( 162 )...( 178 ): HM74_HUMAN
LLKKKLLIQNGPANVC

SEQ ID NO: 3731 - protein, 16 aa, Homo Sapiens
  ( 163 )...( 179 ): HM74_HUMAN
LKKKLLIQNGPANVCI

SEQ ID NO: 3732 - protein, 16 aa, Homo Sapiens
  ( 222 )...( 238 ): HM74_HUMAN
RHAKIKRAITFIMVVA

SEQ ID NO: 3733 - protein, 16 aa, Homo Sapiens
  ( 223 )...( 239 ): HM74_HUMAN
HAKIKRAITFIMVVAI

SEQ ID NO: 3734 - protein, 16 aa, Homo Sapiens
  ( 224 )...( 240 ): HM74_HUMAN
AKIKRAITFIMVVAIV

SEQ ID NO: 3735 - protein, 16 aa, Homo Sapiens
  ( 225 )...( 241 ): HM74_HUMAN
KIKRAITFIMVVAIVF

SEQ ID NO: 3736 - protein, 16 aa, Homo Sapiens
  ( 135 )...( 151 ): IL8A_HUMAN
RYLAIVHATRTLTQKR

SEQ ID NO: 3737 - protein, 16 aa, Homo Sapiens
  ( 136 )...( 152 ): IL8A_HUMAN
YLAIVHATRTLTQKRH

SEQ ID NO: 3738 - protein, 16 aa, Homo Sapiens
  ( 137 )...( 153 ): IL8A_HUMAN
LAIVHATRTLTQKRHL

SEQ ID NO: 3739 - protein, 16 aa, Homo Sapiens
  ( 138 )...( 154 ): IL8A_HUMAN
AIVHATRTLTQKRHLV

SEQ ID NO: 3740 - protein, 16 aa, Homo Sapiens
  ( 139 )...( 155 ): IL8A_HUMAN
IVHATRTLTQKRHLVK

SEQ ID NO: 3741 - protein, 16 aa, Homo Sapiens
  ( 140 )...( 156 ): IL8A_HUMAN
VHATRTLTQKRHLVKF

SEQ ID NO: 3742 - protein, 16 aa, Homo Sapiens
  ( 141 )...( 157 ): IL8A_HUMAN
HATRTLTQKRHLVKFV

SEQ ID NO: 3743 - protein, 16 aa, Homo Sapiens
  ( 142 )...( 158 ): IL8A_HUMAN
ATRTLTQKRHLVKFVC

SEQ ID NO: 3744 - protein, 16 aa, Homo Sapiens
  ( 143 )...( 159 ): IL8A_HUMAN
TRTLTQKRHLVKFVCL

SEQ ID NO: 3745 - protein, 16 aa, Homo Sapiens
  ( 144 )...( 160 ): IL8A_HUMAN
RTLTQKRHLVKFVCLG

SEQ ID NO: 3746 - protein, 16 aa, Homo Sapiens
  ( 235 )...( 251 ): IL8A_HUMAN
GQKHRAMRVIFAVVLI

SEQ ID NO: 3747 - protein, 16 aa, Homo Sapiens
  ( 144 )...( 160 ): IL8B_HUMAN
RYLAIVHATRTLTQKR

SEQ ID NO: 3748 - protein, 16 aa, Homo Sapiens
  ( 145 )...( 161 ): IL8B_HUMAN
YLAIVHATRTLTQKRY

SEQ ID NO: 3749 - protein, 16 aa, Homo Sapiens
  ( 146 )...( 162 ): IL8B_HUMAN
LAIVHATRTLTQKRYL

SEQ ID NO: 3750 - protein, 16 aa, Homo Sapiens
  ( 147 )...( 163 ): IL8B_HUMAN
AIVHATRTLTQKRYLV

SEQ ID NO: 3751 - protein, 16 aa, Homo Sapiens
  ( 148 )...( 164 ): IL8B_HUMAN
IVHATRTLTQKRYLVK

SEQ ID NO: 3752 - protein, 16 aa, Homo Sapiens
  ( 149 )...( 165 ): IL8B_HUMAN
VHATRTLTQKRYLVKF

SEQ ID NO: 3753 - protein, 16 aa, Homo Sapiens
  ( 150 )...( 166 ): IL8B_HUMAN
HATRTLTQKRYLVKFI

SEQ ID NO: 3754 - protein, 16 aa, Homo Sapiens
  ( 151 )...( 167 ): IL8B_HUMAN
ATRTLTQKRYLVKFIC

SEQ ID NO: 3755 - protein, 16 aa, Homo Sapiens
  ( 153 )...( 169 ): IL8B_HUMAN
RTLTQKRYLVKFICLS

SEQ ID NO: 3756 - protein, 16 aa, Homo Sapiens
  ( 244 )...( 260 ): IL8B_HUMAN
GQKHRAMRVIFAVVLI

SEQ ID NO: 3757 - protein, 16 aa, Homo Sapiens
  ( 312 )...( 328 ): IL8B_HUMAN
LIYAFIGQKFRHGLLK

SEQ ID NO: 3758 - protein, 16 aa, Homo Sapiens
  ( 313 )...( 329 ): IL8B_HUMAN
IYAFIGQKFRHGLLKI

SEQ ID NO: 3759 - protein, 16 aa, Homo Sapiens
  ( 314 )...( 330 ): IL8B_HUMAN
YAFIGQKFRHGLLKIL

SEQ ID NO: 3760 - protein, 16 aa, Homo Sapiens
  ( 315 )...( 331 ): IL8B_HUMAN
AFIGQKFRHGLLKILA

SEQ ID NO: 3761 - protein, 16 aa, Homo Sapiens
  ( 316 )...( 332 ): IL8B_HUMAN
FIGQKFRHGLLKILAI

SEQ ID NO: 3762 - protein, 16 aa, Homo Sapiens
  ( 317 )...( 333 ): IL8B_HUMAN
IGQKFRHGLLKILAIH

SEQ ID NO: 3763 - protein, 16 aa, Homo Sapiens
  ( 318 )...( 334 ): IL8B_HUMAN
GQKFRHGLLKILAIHG

SEQ ID NO: 3764 - protein, 16 aa, Homo Sapiens
  ( 319 )...( 335 ): IL8B_HUMAN
QKFRHGLLKILAIHGL

SEQ ID NO: 3765 - protein, 16 aa, Homo Sapiens
  ( 320 )...( 336 ): IL8B_HUMAN
KFRHGLLKILAIHGLI

SEQ ID NO: 3766 - protein, 16 aa, Homo Sapiens
  ( 322 )...( 338 ): IL8B_HUMAN
RHGLLKILAIHGLISK

SEQ ID NO: 3767 - protein, 16 aa, Homo Sapiens
  ( 200 )...( 216 ): KI01_HUMAN
LLLIVFYTAITKKIFK

SEQ ID NO: 3768 - protein, 16 aa, Homo Sapiens
  ( 201 )...( 217 ): KI01_HUMAN
LLIVFYTAITKKIFKS

SEQ ID NO: 3769 - protein, 16 aa, Homo Sapiens
  ( 205 )...( 221 ): KI01_HUMAN
FYTAITKKIFKSHLKS

SEQ ID NO: 3770 - protein, 16 aa, Homo Sapiens
  ( 206 )...( 222 ): KI01_HUMAN
YTAITKKIFKSHLKSS

SEQ ID NO: 3771 - protein, 16 aa, Homo Sapiens
  ( 302 )...( 318 ): KI01_HUMAN
FREILCKKLHIPLKAQ

SEQ ID NO: 3772 - protein, 16 aa, Homo Sapiens
  ( 303 )...( 319 ): KI01_HUMAN
REILCKKLHIPLKAQN

SEQ ID NO: 3773 - protein, 16 aa, Homo Sapiens
  ( 1 )...( 17 ): LSHR_HUMAN
MKQRFSALQLLKLLLL

SEQ ID NO: 3774 - protein, 16 aa, Homo Sapiens
  ( 2 )...( 18 ): LSHR_HUMAN
KQRFSALQLLKLLLLL

SEQ ID NO: 3775 - protein, 16 aa, Homo Sapiens
  ( 244 )...( 260 ): LSHR_HUMAN
SIQRLIATSSYSLKKL

SEQ ID NO: 3776 - protein, 16 aa, Homo Sapiens
  ( 245 )...( 261 ): LSHR_HUMAN
IQRLIATSSYSLKKLP

SEQ ID NO: 3777 - protein, 16 aa, Homo Sapiens
  ( 380 )...( 396 ): LSHR_HUMAN
VLFVLLTSRYKLTVPR

SEQ ID NO: 3778 - protein, 16 aa, Homo Sapiens
  ( 476 )...( 492 ): LSHR_HUMAN
QKLRLRHAILIMLGGW

SEQ ID NO: 3779 - protein, 16 aa, Homo Sapiens
  ( 477 )...( 493 ): LSHR_HUMAN
KLRLRHAILIMLGGWL

SEQ ID NO: 3780 - protein, 16 aa, Homo Sapiens
  ( 558 )...( 574 ): LSHR_HUMAN
LMATNKDTKIAKKMAI

SEQ ID NO: 3781 - protein, 16 aa, Homo Sapiens
  ( 559 )...( 575 ): LSHR_HUMAN
MATNKDTKIAKKMAIL

SEQ ID NO: 3782 - protein, 16 aa, Homo Sapiens
  ( 560 )...( 576 ): LSHR_HUMAN
ATNKDTKIAKKMAILI

SEQ ID NO: 3783 - protein, 16 aa, Homo Sapiens
  ( 561 )...( 577 ): LSHR_HUMAN
TNKDTKIAKKMAILIF

SEQ ID NO: 3784 - protein, 16 aa, Homo Sapiens
  ( 562 )...( 578 ): LSHR_HUMAN
NKDTKIAKKMAILIFT

SEQ ID NO: 3785 - protein, 16 aa, Homo Sapiens
  ( 201 )...( 217 ): MAS_HUMAN
PLMLVSSTILVVKIRK

SEQ ID NO: 3786 - protein, 16 aa, Homo Sapiens
  ( 202 )...( 218 ): MAS_HUMAN
LMLVSSTILVVKIRKN

SEQ ID NO: 3787 - protein, 16 aa, Homo Sapiens
  ( 203 )...( 219 ): MAS_HUMAN
MLVSSTILVVKIRKNT

SEQ ID NO: 3788 - protein, 16 aa, Homo Sapiens
  ( 204 )...( 220 ): MAS_HUMAN
LVSSTILVVKIRKNTW

SEQ ID NO: 3789 - protein, 16 aa, Homo Sapiens
  ( 205 )...( 221 ): MAS_HUMAN
VSSTILVVKIRKNTWA

SEQ ID NO: 3790 - protein, 16 aa, Homo Sapiens
  ( 206 )...( 222 ): MAS_HUMAN
SSTILVVKIRKNTWAS

SEQ ID NO: 3791 - protein, 16 aa, Homo Sapiens
  ( 207 )...( 223 ): MAS_HUMAN
STILVVKIRKNTWASH

SEQ ID NO: 3792 - protein, 16 aa, Homo Sapiens
  ( 208 )...( 224 ): MAS_HUMAN
TILVVKIRKNTWASHS

SEQ ID NO: 3793 - protein, 16 aa, Homo Sapiens
  ( 288 )...( 304 ): MAS_HUMAN
KKRFKESLKVVLTRAF

SEQ ID NO: 3794 - protein, 16 aa, Homo Sapiens
  ( 289 )...( 305 ): MAS_HUMAN
KRFKESLKVVLTRAFK

SEQ ID NO: 3795 - protein, 16 aa, Homo Sapiens
  ( 187 )...( 203 ): MC3R_HUMAN
LRYHSIMTVRKALTLI

SEQ ID NO: 3796 - protein, 16 aa, Homo Sapiens
  ( 188 )...( 204 ): MC3R_HUMAN
RYHSIMTVRKALTLIV

SEQ ID NO: 3797 - protein, 16 aa, Homo Sapiens
  ( 204 )...( 220 ): MC5R_HUMAN
LYIHMFLLARTHVKRI

SEQ ID NO: 3798 - protein, 16 aa, Homo Sapiens
  ( 273 )...( 289 ): MGR1_HUMAN
LLRKLRERLPKARVVV

SEQ ID NO: 3799 - protein, 16 aa, Homo Sapiens
  ( 675 )...( 691 ): MGR1_HUMAN
LVTKTNRIARILAGSK

SEQ ID NO: 3800 - protein, 16 aa, Homo Sapiens
  ( 929 )...( 945 ): MGR1_HUMAN
VIKPLTKSYQGSGKSL

SEQ ID NO: 3801 - protein, 16 aa, Homo Sapiens
  ( 415 )...( 431 ): MGR3_HUMAN
KLCDAMKILDGKKLYK

SEQ ID NO: 3802 - protein, 16 aa, Homo Sapiens
  ( 420 )...( 436 ): MGR3_HUMAN
MKILDGKKLYKDYLLK

SEQ ID NO: 3803 - protein, 16 aa, Homo Sapiens
  ( 421 )...( 437 ): MGR3_HUMAN
KILDGKKLYKDYLLKI

SEQ ID NO: 3804 - protein, 16 aa, Homo Sapiens
  ( 425 )...( 441 ): MGR3_HUMAN
GKKLYKDYLLKINFTA

SEQ ID NO: 3805 - protein, 16 aa, Homo Sapiens
  ( 426 )...( 442 ): MGR3_HUMAN
KKLYKDYLLKINFTAP

SEQ ID NO: 3806 - protein, 16 aa, Homo Sapiens
  ( 670 )...( 686 ): MGR4_HUMAN
LLTKTNRIYRIFEQGK

SEQ ID NO: 3807 - protein, 16 aa, Homo Sapiens
  ( 255 )...( 271 ): MGR5_HUMAN
QSFDKLLKKLTSHLPK

SEQ ID NO: 3808 - protein, 16 aa, Homo Sapiens
  ( 256 )...( 272 ): MGR5_HUMAN
SFDKLLKKLTSHLPKA

SEQ ID NO: 3809 - protein, 16 aa, Homo Sapiens
  ( 257 )...( 273 ): MGR5_HUMAN
FDKLLKKLTSHLPKAR

SEQ ID NO: 3810 - protein, 16 aa, Homo Sapiens
  ( 258 )...( 274 ): MGR5_HUMAN
DKLLKKLTSHLPKARV

SEQ ID NO: 3811 - protein, 16 aa, Homo Sapiens
  ( 259 )...( 275 ): MGR5_HUMAN
KLLKKLTSHLPKARVV

SEQ ID NO: 3812 - protein, 16 aa, Homo Sapiens
  ( 260 )...( 276 ): MGR5_HUMAN
LLKKLTSHLPKARVVA

SEQ ID NO: 3813 - protein, 16 aa, Homo Sapiens
  ( 662 )...( 678 ): MGR5_HUMAN
LVTKTNRIARILAGSK

SEQ ID NO: 3814 - protein, 16 aa, Homo Sapiens
  ( 672 )...( 688 ): MGR5_HUMAN
ILAGSKKKICTKKPRF

SEQ ID NO: 3815 - protein, 16 aa, Homo Sapiens
  ( 668 )...( 684 ): MGR6_HUMAN
LLTKTNRIYRIFEQGK

SEQ ID NO: 3816 - protein, 16 aa, Homo Sapiens
  ( 1 )...( 17 ): MGR7_HUMAN
MVQLRKLLRVLTLMKF

SEQ ID NO: 3817 - protein, 16 aa, Homo Sapiens
  ( 2 )...( 18 ): MGR7_HUMAN
VQLRKLLRVLTLMKFP

SEQ ID NO: 3818 - protein, 16 aa, Homo Sapiens
  ( 440 )...( 456 ): MGR7_HUMAN
MEQAGGKKLLKYIRNV

SEQ ID NO: 3819 - protein, 16 aa, Homo Sapiens
  ( 442 )...( 458 ): MGR7_HUMAN
QAGGKKLLKYIRNVNF

SEQ ID NO: 3820 - protein, 16 aa, Homo Sapiens
  ( 673 )...( 689 ): MGR7_HUMAN
LLTKTNRIYRIFEQGK

SEQ ID NO: 3821 - protein, 16 aa, Homo Sapiens
  ( 846 )...( 862 ): MGR7_HUMAN
YIIIFHPELNVQKRKR

SEQ ID NO: 3822 - protein, 14 aa, Homo Sapiens
  ( 902 )...( 918 ): MGR7_HUMAN
AAKKKYVSYNNLVI

SEQ ID NO: 3823 - protein, 13 aa, Homo Sapiens
  ( 903 )...( 919 ): MGR7_HUMAN
AKKKYVSYNNLVI

SEQ ID NO: 3824 - protein, 12 aa, Homo Sapiens
  ( 904 )...( 920 ): MGR7_HUMAN
KKKYVSYNNLVI

SEQ ID NO: 3825 - protein, 16 aa, Homo Sapiens
  ( 264 )...( 280 ): MGR8_HUMAN
KIIKRLLETPNARAVI

SEQ ID NO: 3826 - protein, 16 aa, Homo Sapiens
  ( 675 )...( 691 ): MGR8_HUMAN
RIFEQGKKSVTAPKFI

SEQ ID NO: 3827 - protein, 16 aa, Homo Sapiens
  ( 839 )...( 855 ): MGR8_HUMAN
YIIIFHPEQNVQKRKR

SEQ ID NO: 3828 - protein, 16 aa, Homo Sapiens
  ( 857 )...( 873 ): MGR8_HUMAN
KAVVTAATMQSKLIQK

SEQ ID NO: 3829 - protein, 16 aa, Homo Sapiens
  ( 42 )...( 58 ): ML1A_HUMAN
ILGNLLVILSVYRNKK

SEQ ID NO: 3830 - protein, 16 aa, Homo Sapiens
  ( 43 )...( 59 ): ML1A_HUMAN
LGNLLVILSVYRNKKL

SEQ ID NO: 3831 - protein, 16 aa, Homo Sapiens
  ( 44 )...( 60 ): ML1A_HUMAN
GNLLVILSVYRNKKLR

SEQ ID NO: 3832 - protein, 16 aa, Homo Sapiens
  ( 45 )...( 61 ): ML1A_HUMAN
NLLVILSVYRNKKLRN

SEQ ID NO: 3833 - protein, 16 aa, Homo Sapiens
  ( 46 )...( 62 ): ML1A_HUMAN
LLVILSVYRNKKLRNA

SEQ ID NO: 3834 - protein, 16 aa, Homo Sapiens
  ( 207 )...( 223 ): ML1A_HUMAN
YLRIWILVLQVRQRVK

SEQ ID NO: 3835 - protein, 16 aa, Homo Sapiens
  ( 208 )...( 224 ): ML1A_HUMAN
LRIWILVLQVRQRVKP

SEQ ID NO: 3836 - protein, 16 aa, Homo Sapiens
  ( 209 )...( 225 ): ML1A_HUMAN
RIWILVLQVRQRVKPD

SEQ ID NO: 3837 - protein, 16 aa, Homo Sapiens
  ( 210 )...( 226 ): ML1A_HUMAN
IWILVLQVRQRVKPDR

SEQ ID NO: 3838 - protein, 16 aa, Homo Sapiens
  ( 211 )...( 227 ): ML1A_HUMAN
WILVLQVRQRVKPDRK

SEQ ID NO: 3839 - protein, 16 aa, Homo Sapiens
  ( 212 )...( 228 ): ML1A_HUMAN
ILVLQVRQRVKPDRKP

SEQ ID NO: 3840 - protein, 16 aa, Homo Sapiens
  ( 55 )...( 71 ): ML1B_HUMAN
VVGNLLVILSVLRNRK

SEQ ID NO: 3841 - protein, 16 aa, Homo Sapiens
  ( 56 )...( 72 ): ML1B_HUMAN
VGNLLVILSVLRNRKL

SEQ ID NO: 3842 - protein, 16 aa, Homo Sapiens
  ( 57 )...( 73 ): ML1B_HUMAN
GNLLVILSVLRNRKLR

SEQ ID NO: 3843 - protein, 16 aa, Homo Sapiens
  ( 220 )...( 236 ): ML1B_HUMAN
YLRIWVLVLQARRKAK

SEQ ID NO: 3844 - protein, 16 aa, Homo Sapiens
  ( 221 )...( 237 ): ML1B_HUMAN
LRIWVLVLQARRKAKP

SEQ ID NO: 3845 - protein, 16 aa, Homo Sapiens
  ( 43 )...( 59 ): ML1X_HUMAN
LIGNSMVILAVTKNKK

SEQ ID NO: 3846 - protein, 16 aa, Homo Sapiens
  ( 44 )...( 60 ): ML1X_HUMAN
IGNSMVILAVTKNKKL

SEQ ID NO: 3847 - protein, 16 aa, Homo Sapiens
  ( 45 )...( 61 ): ML1X_HUMAN
GNSMVILAVTKNKKLR

SEQ ID NO: 3848 - protein, 16 aa, Homo Sapiens
  ( 46 )...( 62 ): ML1X_HUMAN
NSMVILAVTKNKKLRN

SEQ ID NO: 3849 - protein, 16 aa, Homo Sapiens
  ( 47 )...( 63 ): ML1X_HUMAN
SMVILAVTKNKKLRNS

SEQ ID NO: 3850 - protein, 16 aa, Homo Sapiens
  ( 48 )...( 64 ): ML1X_HUMAN
MVILAVTKNKKLRNSG

SEQ ID NO: 3851 - protein, 16 aa, Homo Sapiens
  ( 205 )...( 221 ): MRG_HUMAN
NIVKSLFLTYWKHVKA

SEQ ID NO: 3852 - protein, 16 aa, Homo Sapiens
  ( 216 )...( 232 ): MRG_HUMAN
KHVKACVIFLKLSGLF

SEQ ID NO: 3853 - protein, 16 aa, Homo Sapiens
  ( 312 )...( 328 ): MRG_HUMAN
IIYFFVGSLRKKRLKE

SEQ ID NO: 3854 - protein, 16 aa, Homo Sapiens
  ( 322 )...( 338 ): MRG_HUMAN
KKRLKESLRVILQRAL

SEQ ID NO: 3855 - protein, 16 aa, Homo Sapiens
  ( 323 )...( 339 ): MRG_HUMAN
KRLKESLRVILQRALA

SEQ ID NO: 3856 - protein, 16 aa, Homo Sapiens
  ( 289 )...( 305 ): MTLR_HUMAN
RERGHRQTVRVLLVVV

SEQ ID NO: 3857 - protein, 16 aa, Homo Sapiens
  ( 291 )...( 307 ): MTLR_HUMAN
RGHRQTVRVLLVVVLA

SEQ ID NO: 3858 - protein, 16 aa, Homo Sapiens
  ( 356 )...( 372 ): MTLR_HUMAN
NLISKKYRAAAFKLLL

SEQ ID NO: 3859 - protein, 16 aa, Homo Sapiens
  ( 357 )...( 373 ): MTLR_HUMAN
LISKKYRAAAFKLLLA

SEQ ID NO: 3860 - protein, 16 aa, Homo Sapiens
  ( 145 )...( 161 ): NFF1_HUMAN
IVHPFREKLTLRKALV

SEQ ID NO: 3861 - protein, 16 aa, Homo Sapiens
  ( 146 )...( 162 ): NFF1_HUMAN
VHPFREKLTLRKALVT

SEQ ID NO: 3862 - protein, 16 aa, Homo Sapiens
  ( 147 )...( 163 ): NFF1_HUMAN
HPFREKLTLRKALVTI

SEQ ID NO: 3863 - protein, 16 aa, Homo Sapiens
  ( 148 )...( 164 ): NFF1_HUMAN
PFREKLTLRKALVTIA

SEQ ID NO: 3864 - protein, 16 aa, Homo Sapiens
  ( 149 )...( 165 ): NFF1_HUMAN
FREKLTLRKALVTIAV

SEQ ID NO: 3865 - protein, 16 aa, Homo Sapiens
  ( 150 )...( 166 ): NFF1_HUMAN
REKLTLRKALVTIAVI

SEQ ID NO: 3866 - protein, 16 aa, Homo Sapiens
  ( 152 )...( 168 ): NFF1_HUMAN
KLTLRKALVTIAVIWA

SEQ ID NO: 3867 - protein, 16 aa, Homo Sapiens
  ( 247 )...( 263 ): NFF2_HUMAN
QCVVYPFKPKLTIKTA

SEQ ID NO: 3868 - protein, 16 aa, Homo Sapiens
  ( 249 )...( 265 ): NFF2_HUMAN
VVYPFKPKLTIKTAFV

SEQ ID NO: 3869 - protein, 16 aa, Homo Sapiens
  ( 250 )...( 266 ): NFF2_HUMAN
VYPFKPKLTIKTAFVI

SEQ ID NO: 3870 - protein, 16 aa, Homo Sapiens
  ( 251 )...( 267 ): NFF2_HUMAN
YPFKPKLTIKTAFVII

SEQ ID NO: 3871 - protein, 16 aa, Homo Sapiens
  ( 252 )...( 268 ): NFF2_HUMAN
PFKPKLTIKTAFVIIM

SEQ ID NO: 3872 - protein, 16 aa, Homo Sapiens
  ( 253 )...( 269 ): NFF2_HUMAN
FKPKLTIKTAFVIIMI

SEQ ID NO: 3873 - protein, 16 aa, Homo Sapiens
  ( 254 )...( 270 ): NFF2_HUMAN
KPKLTIKTAFVIIMII

SEQ ID NO: 3874 - protein, 16 aa, Homo Sapiens
  ( 363 )...( 379 ): NFF2_HUMAN
QWHVVSRKKQKIIKML

SEQ ID NO: 3875 - protein, 16 aa, Homo Sapiens
  ( 364 )...( 380 ): NFF2_HUMAN
WHVVSRKKQKIIKMLL

SEQ ID NO: 3876 - protein, 16 aa, Homo Sapiens
  ( 365 )...( 381 ): NFF2_HUMAN
HVVSRKKQKIIKMLLI

SEQ ID NO: 3877 - protein, 16 aa, Homo Sapiens
  ( 366 )...( 382 ): NFF2_HUMAN
VVSRKKQKIIKMLLIV

SEQ ID NO: 3878 - protein, 16 aa, Homo Sapiens
  ( 367 )...( 383 ): NFF2_HUMAN
VSRKKQKIIKMLLIVA

SEQ ID NO: 3879 - protein, 16 aa, Homo Sapiens
  ( 368 )...( 384 ): NFF2_HUMAN
SRKKQKIIKMLLIVAL

SEQ ID NO: 3880 - protein, 16 aa, Homo Sapiens
  ( 369 )...( 385 ): NFF2_HUMAN
RKKQKIIKMLLIVALL

SEQ ID NO: 3881 - protein, 16 aa, Homo Sapiens
  ( 370 )...( 386 ): NFF2_HUMAN
KKQKIIKMLLIVALLF

SEQ ID NO: 3882 - protein, 16 aa, Homo Sapiens
  ( 371 )...( 387 ): NFF2_HUMAN
KQKIIKMLLIVALLFI

SEQ ID NO: 3883 - protein, 16 aa, Homo Sapiens
  ( 51 )...( 67 ): NK1R_HUMAN
VVVMWIILAHKRMRTV

SEQ ID NO: 3884 - protein, 16 aa, Homo Sapiens
  ( 52 )...( 68 ): NK1R_HUMAN
VVMWIILAHKRMRTVT

SEQ ID NO: 3885 - protein, 16 aa, Homo Sapiens
  ( 236 )...( 252 ): NK1R_HUMAN
YHEQVSAKRKVVKMMI

SEQ ID NO: 3886 - protein, 16 aa, Homo Sapiens
  ( 237 )...( 253 ): NK1R_HUMAN
HEQVSAKRKVVKMMIV

SEQ ID NO: 3887 - protein, 16 aa, Homo Sapiens
  ( 238 )...( 254 ): NK1R_HUMAN
EQVSAKRKVVKMMIVV

SEQ ID NO: 3888 - protein, 16 aa, Homo Sapiens
  ( 239 )...( 255 ): NK1R_HUMAN
QVSAKRKVVKMMIVVV

SEQ ID NO: 3889 - protein, 16 aa, Homo Sapiens
  ( 339 )...( 355 ): NK1R_HUMAN
TRYLQTQGSVYKVSRL

SEQ ID NO: 3890 - protein, 16 aa, Homo Sapiens
  ( 53 )...( 69 ): NK2R_HUMAN
IVIWIILAHRRMRTVT

SEQ ID NO: 3891 - protein, 16 aa, Homo Sapiens
  ( 237 )...( 253 ): NK2R_HUMAN
ANLRHLQAKKKFVKTM

SEQ ID NO: 3892 - protein, 16 aa, Homo Sapiens
  ( 238 )...( 254 ): NK2R_HUMAN
NLRHLQAKKKFVKTMV

SEQ ID NO: 3893 - protein, 16 aa, Homo Sapiens
  ( 239 )...( 255 ): NK2R_HUMAN
LRHLQAKKKFVKTMVL

SEQ ID NO: 3894 - protein, 16 aa, Homo Sapiens
  ( 240 )...( 256 ): NK2R_HUMAN
RHLQAKKKFVKTMVLV

SEQ ID NO: 3895 - protein, 16 aa, Homo Sapiens
  ( 241 )...( 257 ): NK2R_HUMAN
HLQAKKKFVKTMVLVV

SEQ ID NO: 3896 - protein, 16 aa, Homo Sapiens
  ( 242 )...( 258 ): NK2R_HUMAN
LQAKKKFVKTMVLVVL

SEQ ID NO: 3897 - protein, 16 aa, Homo Sapiens
  ( 243 )...( 259 ): NK2R_HUMAN
QAKKKFVKTMVLVVLT

SEQ ID NO: 3898 - protein, 16 aa, Homo Sapiens
  ( 102 )...( 118 ): NK3R_HUMAN
GNLIVIWIILAHKRMR

SEQ ID NO: 3899 - protein, 16 aa, Homo Sapiens
  ( 103 )...( 119 ): NK3R_HUMAN
NLIVIWIILAHKRMRT

SEQ ID NO: 3900 - protein, 16 aa, Homo Sapiens
  ( 104 )...( 120 ): NK3R_HUMAN
LIVIWIILAHKRMRTV

SEQ ID NO: 3901 - protein, 16 aa, Homo Sapiens
  ( 105 )...( 121 ): NK3R_HUMAN
IVIWIILAHKRMRTVT

SEQ ID NO: 3902 - protein, 16 aa, Homo Sapiens
  ( 106 )...( 122 ): NK3R_HUMAN
VIWIILAHKRMRTVTN

SEQ ID NO: 3903 - protein, 16 aa, Homo Sapiens
  ( 191 )...( 207 ): NK3R_HUMAN
LKPRLSATATKIVIGS

SEQ ID NO: 3904 - protein, 16 aa, Homo Sapiens
  ( 192 )...( 208 ): NK3R_HUMAN
KPRLSATATKIVIGSI

SEQ ID NO: 3905 - protein, 16 aa, Homo Sapiens
  ( 287 )...( 303 ): NK3R_HUMAN
YHEQLKAKRKVVKMMI

SEQ ID NO: 3906 - protein, 16 aa, Homo Sapiens
  ( 288 )...( 304 ): NK3R_HUMAN
HEQLKAKRKVVKMMII

SEQ ID NO: 3907 - protein, 16 aa, Homo Sapiens
  ( 289 )...( 305 ): NK3R_HUMAN
EQLKAKRKVVKMMIIV

SEQ ID NO: 3908 - protein, 16 aa, Homo Sapiens
  ( 290 )...( 306 ): NK3R_HUMAN
QLKAKRKVVKMMIIVV

SEQ ID NO: 3909 - protein, 16 aa, Homo Sapiens
  ( 291 )...( 307 ): NK3R_HUMAN
LKAKRKVVKMMIIVVM

SEQ ID NO: 3910 - protein, 16 aa, Homo Sapiens
  ( 292 )...( 308 ): NK3R_HUMAN
KAKRKVVKMMIIVVMT

SEQ ID NO: 3911 - protein, 16 aa, Homo Sapiens
  ( 77 )...( 93 ): NK4R_HUMAN
GNLVVIWIVLAHKRMR

SEQ ID NO: 3912 - protein, 16 aa, Homo Sapiens
  ( 78 )...( 94 ): NK4R_HUMAN
NLVVIWIVLAHKRMRT

SEQ ID NO: 3913 - protein, 16 aa, Homo Sapiens
  ( 79 )...( 95 ): NK4R_HUMAN
LVVIWIVLAHKRMRTV

SEQ ID NO: 3914 - protein, 16 aa, Homo Sapiens
  ( 80 )...( 96 ): NK4R_HUMAN
VVIWIVLAHKRMRTVT

SEQ ID NO: 3915 - protein, 16 aa, Homo Sapiens
  ( 81 )...( 97 ): NK4R_HUMAN
VIWIVLAHKRMRTVTN

SEQ ID NO: 3916 - protein, 16 aa, Homo Sapiens
  ( 262 )...( 278 ): NK4R_HUMAN
YQEQLKAKRKVVKMMI

SEQ ID NO: 3917 - protein, 16 aa, Homo Sapiens
  ( 263 )...( 279 ): NK4R_HUMAN
QEQLKAKRKVVKMMII

SEQ ID NO: 3918 - protein, 16 aa, Homo Sapiens
  ( 264 )...( 280 ): NK4R_HUMAN
EQLKAKRKVVKMMIIV

SEQ ID NO: 3919 - protein, 16 aa, Homo Sapiens
  ( 265 )...( 281 ): NK4R_HUMAN
QLKAKRKVVKMMIIVV

SEQ ID NO: 3920 - protein, 16 aa, Homo Sapiens
  ( 266 )...( 282 ): NK4R_HUMAN
LKAKRKVVKMMIIVVV

SEQ ID NO: 3921 - protein, 16 aa, Homo Sapiens
  ( 267 )...( 283 ): NK4R_HUMAN
KAKRKVVKMMIIVVVT

SEQ ID NO: 3922 - protein, 16 aa, Homo Sapiens
  ( 268 )...( 284 ): NK4R_HUMAN
AKRKVVKMMIIVVVTF

SEQ ID NO: 3923 - protein, 16 aa, Homo Sapiens
  ( 269 )...( 285 ): NK4R_HUMAN
KRKVVKMMIIVVVTFA

SEQ ID NO: 3924 - protein, 16 aa, Homo Sapiens
  ( 270 )...( 286 ): NK4R_HUMAN
RKVVKMMIIVVVTFAI

SEQ ID NO: 3925 - protein, 16 aa, Homo Sapiens
  ( 255 )...( 271 ): NMBR_HUMAN
KKQMETRKRLAKIVLV

SEQ ID NO: 3926 - protein, 16 aa, Homo Sapiens
  ( 256 )...( 272 ): NMBR_HUMAN
KQMETRKRLAKIVLVF

SEQ ID NO: 3927 - protein, 16 aa, Homo Sapiens
  ( 257 )...( 273 ): NMBR_HUMAN
QMETRKRLAKIVLVFV

SEQ ID NO: 3928 - protein, 16 aa, Homo Sapiens
  ( 258 )...( 274 ): NMBR_HUMAN
METRKRLAKIVLVFVG

SEQ ID NO: 3929 - protein, 16 aa, Homo Sapiens
  ( 79 )...( 95 ): NTR1_HUMAN
VGNTVTAFTLARKKSL

SEQ ID NO: 3930 - protein, 16 aa, Homo Sapiens
  ( 82 )...( 98 ): NTR1_HUMAN
TVTAFTLARKKSLQSL

SEQ ID NO: 3931 - protein, 16 aa, Homo Sapiens
  ( 83 )...( 99 ): NTR1_HUMAN
VTAFTLARKKSLQSLQ

SEQ ID NO: 3932 - protein, 16 aa, Homo Sapiens
  ( 86 )...( 102 ): NTR1_HUMAN
FTLARKKSLQSLQSTV

SEQ ID NO: 3933 - protein, 16 aa, Homo Sapiens
  ( 295 )...( 311 ): NTR1_HUMAN
VQALRHGVRVLRAVVI

SEQ ID NO: 3934 - protein, 16 aa, Homo Sapiens
  ( 268 )...( 284 ): NTR2_HUMAN
WKKTFIQGGQVSLVRH

SEQ ID NO: 3935 - protein, 16 aa, Homo Sapiens
  ( 289 )...( 305 ): NTR2_HUMAN
IRSLQRSVQVLRAIVV

SEQ ID NO: 3936 - protein, 16 aa, Homo Sapiens
  ( 360 )...( 376 ): NY1R_HUMAN
SKTSLKQASPVAFKKI

SEQ ID NO: 3937 - protein, 16 aa, Homo Sapiens
  ( 67 )...( 83 ): NY2R_HUMAN
GNSLVIHVVIKFKSMR

SEQ ID NO: 3938 - protein, 16 aa, Homo Sapiens
  ( 68 )...( 84 ): NY2R_HUMAN
NSLVIHVVIKFKSMRT

SEQ ID NO: 3939 - protein, 16 aa, Homo Sapiens
  ( 69 )...( 85 ): NY2R_HUMAN
SLVIHVVIKFKSMRTV

SEQ ID NO: 3940 - protein, 16 aa, Homo Sapiens
  ( 71 )...( 87 ): NY2R_HUMAN
VIHVVIKFKSMRTVTN

SEQ ID NO: 3941 - protein, 16 aa, Homo Sapiens
  ( 72 )...( 88 ): NY2R_HUMAN
IHVVIKFKSMRTVTNF

SEQ ID NO: 3942 - protein, 16 aa, Homo Sapiens
  ( 159 )...( 175 ): NY2R_HUMAN
KISKRISFLIIGLAWG

SEQ ID NO: 3943 - protein, 16 aa, Homo Sapiens
  ( 67 )...( 83 ): NY5R_HUMAN
MGNLLILMALMKKRNQ

SEQ ID NO: 3944 - protein, 16 aa, Homo Sapiens
  ( 68 )...( 84 ): NY5R_HUMAN
GNLLILMALMKKRNQK

SEQ ID NO: 3945 - protein, 16 aa, Homo Sapiens
  ( 69 )...( 85 ): NY5R_HUMAN
NLLILMALMKKRNQKT

SEQ ID NO: 3946 - protein, 16 aa, Homo Sapiens
  ( 70 )...( 86 ): NY5R_HUMAN
LLILMALMKKRNQKTT

SEQ ID NO: 3947 - protein, 16 aa, Homo Sapiens
  ( 71 )...( 87 ): NY5R_HUMAN
LILMALMKKRNQKTTV

SEQ ID NO: 3948 - protein, 16 aa, Homo Sapiens
  ( 72 )...( 88 ): NY5R_HUMAN
ILMALMKKRNQKTTVN

SEQ ID NO: 3949 - protein, 16 aa, Homo Sapiens
  ( 73 )...( 89 ): NY5R_HUMAN
LMALMKKRNQKTTVNF

SEQ ID NO: 3950 - protein, 16 aa, Homo Sapiens
  ( 74 )...( 90 ): NY5R_HUMAN
MALMKKRNQKTTVNFL

SEQ ID NO: 3951 - protein, 16 aa, Homo Sapiens
  ( 75 )...( 91 ): NY5R_HUMAN
ALMKKRNQKTTVNFLI

SEQ ID NO: 3952 - protein, 16 aa, Homo Sapiens
  ( 76 )...( 92 ): NY5R_HUMAN
LMKKRNQKTTVNFLIG

SEQ ID NO: 3953 - protein, 16 aa, Homo Sapiens
  ( 266 )...( 282 ): NY5R_HUMAN
NLTLHPSKKSGPQVKL

SEQ ID NO: 3954 - protein, 16 aa, Homo Sapiens
  ( 267 )...( 283 ): NY5R_HUMAN
LTLHPSKKSGPQVKLS

SEQ ID NO: 3955 - protein, 16 aa, Homo Sapiens
  ( 369 )...( 385 ): NY5R_HUMAN
IKKRSRSVFYRLTILI

SEQ ID NO: 3956 - protein, 16 aa, Homo Sapiens
  ( 370 )...( 386 ): NY5R_HUMAN
KKRSRSVFYRLTILIL

SEQ ID NO: 3957 - protein, 16 aa, Homo Sapiens
  ( 221 )...( 237 ): O1C1_HUMAN
IFSTVLKITSTQGKQR

SEQ ID NO: 3958 - protein, 16 aa, Homo Sapiens
  ( 298 )...( 314 ): O1C1_HUMAN
KRGLQKMLLKCTVFQQ

SEQ ID NO: 3959 - protein, 16 aa, Homo Sapiens
  ( 218 )...( 234 ): O1D2_HUMAN
YVLIIRAILRIPSVSK

SEQ ID NO: 3960 - protein, 16 aa, Homo Sapiens
  ( 219 )...( 235 ): O1D2_HUMAN
VLIIRAILRIPSVSKK

SEQ ID NO: 3961 - protein, 16 aa, Homo Sapiens
  ( 220 )...( 236 ): O1D2_HUMAN
LIIRAILRIPSVSKKY

SEQ ID NO: 3962 - protein, 16 aa, Homo Sapiens
  ( 221 )...( 237 ): O1D2_HUMAN
IIRAILRIPSVSKKYK

SEQ ID NO: 3963 - protein, 16 aa, Homo Sapiens
  ( 219 )...( 235 ): O1D4_HUMAN
VRIVRTILQMPSASKK

SEQ ID NO: 3964 - protein, 16 aa, Homo Sapiens
  ( 221 )...( 237 ): O1D4_HUMAN
IVRTILQMPSASKKYK

SEQ ID NO: 3965 - protein, 16 aa, Homo Sapiens
  ( 222 )...( 238 ): O1D4_HUMAN
VRTILQMPSASKKYKT

SEQ ID NO: 3966 - protein, 16 aa, Homo Sapiens
  ( 219 )...( 235 ): O1D5_HUMAN
VRIVRTILQMPSASKK

SEQ ID NO: 3967 - protein, 16 aa, Homo Sapiens
  ( 221 )...( 237 ): O1D5_HUMAN
IVRTILQMPSASKKYK

SEQ ID NO: 3968 - protein, 16 aa, Homo Sapiens
  ( 222 )...( 238 ): O1D5_HUMAN
VRTILQMPSASKKYKT

SEQ ID NO: 3969 - protein, 16 aa, Homo Sapiens
  ( 297 )...( 313 ): O1E1_HUMAN
MKGALSRVIHQKKTFF

SEQ ID NO: 3970 - protein, 16 aa, Homo Sapiens
  ( 298 )...( 314 ): O1E1_HUMAN
KGALSRVIHQKKTFFS

SEQ ID NO: 3971 - protein, 14 aa, Homo Sapiens
  ( 301 )...( 317 ): O1E1_HUMAN
LSRVIHQKKTFFSL

SEQ ID NO: 3972 - protein, 16 aa, Homo Sapiens
  ( 289 )...( 305 ): O1F1_HUMAN
IYSLRNRYLKGALKKV

SEQ ID NO: 3973 - protein, 16 aa, Homo Sapiens
  ( 290 )...( 306 ): O1F1_HUMAN
YSLRNRYLKGALKKVV

SEQ ID NO: 3974 - protein, 16 aa, Homo Sapiens
  ( 291 )...( 307 ): O1F1_HUMAN
SLRNRYLKGALKKVVG

SEQ ID NO: 3975 - protein, 16 aa, Homo Sapiens
  ( 294 )...( 310 ): O1F1_HUMAN
NRYLKGALKKVVGRVV

SEQ ID NO: 3976 - protein, 16 aa, Homo Sapiens
  ( 295 )...( 311 ): O1F1_HUMAN
RYLKGALKKVVGRVVF

SEQ ID NO: 3977 - protein, 16 aa, Homo Sapiens
  ( 296 )...( 312 ): O1F1_HUMAN
YLKGALKKVVGRVVFS

SEQ ID NO: 3978 - protein, 16 aa, Homo Sapiens
  ( 297 )...( 313 ): O1F1_HUMAN
LKGALKKVVGRVVFSV

SEQ ID NO: 3979 - protein, 15 aa, Homo Sapiens
  ( 298 )...( 314 ): O1F1_HUMAN
KGALKKVVGRVVFSV

SEQ ID NO: 3980 - protein, 14 aa, Homo Sapiens
  ( 299 )...( 315 ): O1F1_HUMAN
GALKKVVGRVVFSV

SEQ ID NO: 3981 - protein, 13 aa, Homo Sapiens
  ( 300 )...( 316 ): O1F1_HUMAN
ALKKVVGRVVFSV

SEQ ID NO: 3982 - protein, 12 aa, Homo Sapiens
  ( 301 )...( 317 ): O1F1_HUMAN
LKKVVGRVVFSV

SEQ ID NO: 3983 - protein, 16 aa, Homo Sapiens
  ( 221 )...( 237 ): O1G1_HUMAN
VFSTILKIPSAQGKRK

SEQ ID NO: 3984 - protein, 16 aa, Homo Sapiens
  ( 292 )...( 308 ): O1G1_HUMAN
LRNQEIKSSLRKLIWV

SEQ ID NO: 3985 - protein, 16 aa, Homo Sapiens
  ( 294 )...( 310 ): O1G1_HUMAN
NQEIKSSLRKLIWVRK

SEQ ID NO: 3986 - protein, 16 aa, Homo Sapiens
  ( 295 )...( 311 ): O1G1_HUMAN
QEIKSSLRKLIWVRKI

SEQ ID NO: 3987 - protein, 16 aa, Homo Sapiens
  ( 296 )...( 312 ): O1G1_HUMAN
EIKSSLRKLIWVRKIH

SEQ ID NO: 3988 - protein, 16 aa, Homo Sapiens
  ( 297 )...( 313 ): O1G1_HUMAN
IKSSLRKLIWVRKIHS

SEQ ID NO: 3989 - protein, 16 aa, Homo Sapiens
  ( 294 )...( 310 ): O1I1_HUMAN
NKDMKAALGKLIGKVA

SEQ ID NO: 3990 - protein, 16 aa, Homo Sapiens
  ( 295 )...( 311 ): O1I1_HUMAN
KDMKAALGKLIGKVAV

SEQ ID NO: 3991 - protein, 16 aa, Homo Sapiens
  ( 221 )...( 237 ): O1Q1_HUMAN
IILVVLRIPSAKGRWK

SEQ ID NO: 3992 - protein, 16 aa, Homo Sapiens
  ( 222 )...( 238 ): O1Q1_HUMAN
ILVVLRIPSAKGRWKT

SEQ ID NO: 3993 - protein, 15 aa, Homo Sapiens
  ( 296 )...( 312 ): O2A4_HUMAN
VKNTLKRVLGVERAL

SEQ ID NO: 3994 - protein, 14 aa, Homo Sapiens
  ( 297 )...( 313 ): O2A4_HUMAN
KNTLKRVLGVERAL

SEQ ID NO: 3995 - protein, 16 aa, Homo Sapiens
  ( 288 )...( 304 ): O2B2_HUMAN
LIYTLRNKEVKEAFKR

SEQ ID NO: 3996 - protein, 16 aa, Homo Sapiens
  ( 289 )...( 305 ): O2B2_HUMAN
IYTLRNKEVKEAFKRL

SEQ ID NO: 3997 - protein, 16 aa, Homo Sapiens
  ( 295 )...( 311 ): O2B2_HUMAN
KEVKEAFKRLVAKSLL

SEQ ID NO: 3998 - protein, 16 aa, Homo Sapiens
  ( 297 )...( 313 ): O2B2_HUMAN
VKEAFKRLVAKSLLNQ

SEQ ID NO: 3999 - protein, 16 aa, Homo Sapiens
  ( 302 )...( 318 ): O2B2_HUMAN
KRLVAKSLLNQEIRNM

SEQ ID NO: 4000 - protein, 16 aa, Homo Sapiens
  ( 295 )...( 311 ): O2B6_HUMAN
KEVKEGFKRLVARVFL

SEQ ID NO: 4001 - protein, 16 aa, Homo Sapiens
  ( 297 )...( 313 ): O2B6_HUMAN
VKEGFKRLVARVFLIK

SEQ ID NO: 4002 - protein, 16 aa, Homo Sapiens
  ( 298 )...( 314 ): O2B6_HUMAN
KEGFKRLVARVFLIKK

SEQ ID NO: 4003 - protein, 15 aa, Homo Sapiens
  ( 299 )...( 315 ): O2B6_HUMAN
EGFKRLVARVFLIKK

SEQ ID NO: 4004 - protein, 14 aa, Homo Sapiens
  ( 300 )...( 316 ): O2B6_HUMAN
GFKRLVARVFLIKK

SEQ ID NO: 4005 - protein, 13 aa, Homo Sapiens
  ( 301 )...( 317 ): O2B6_HUMAN
FKRLVARVFLIKK

SEQ ID NO: 4006 - protein, 12 aa, Homo Sapiens
  ( 302 )...( 318 ): O2B6_HUMAN
KRLVARVFLIKK

SEQ ID NO: 4007 - protein, 11 aa, Homo Sapiens
  ( 303 )...( 319 ): O2B6_HUMAN
RLVARVFLIKK

SEQ ID NO: 4008 - protein, 10 aa, Homo Sapiens
  ( 304 )...( 320 ): O2B6_HUMAN
LVARVFLIKK

SEQ ID NO: 4009 - protein, 9 aa, Homo Sapiens
  ( 305 )...( 321 ): O2B6_HUMAN
VARVFLIKK

SEQ ID NO: 4010 - protein, 16 aa, Homo Sapiens
  ( 75 )...( 91 ): O2D2_HUMAN
TNIVPQALVHLLSRKK

SEQ ID NO: 4011 - protein, 16 aa, Homo Sapiens
  ( 76 )...( 92 ): O2D2_HUMAN
NIVPQALVHLLSRKKV

SEQ ID NO: 4012 - protein, 16 aa, Homo Sapiens
  ( 77 )...( 93 ): O2D2_HUMAN
IVPQALVHLLSRKKVI

SEQ ID NO: 4013 - protein, 16 aa, Homo Sapiens
  ( 78 )...( 94 ): O2D2_HUMAN
VPQALVHLLSRKKVIA

SEQ ID NO: 4014 - protein, 16 aa, Homo Sapiens
  ( 79 )...( 95 ): O2D2_HUMAN
PQALVHLLSRKKVIAF

SEQ ID NO: 4015 - protein, 16 aa, Homo Sapiens
  ( 80 )...( 96 ): O2D2_HUMAN
QALVHLLSRKKVIAFT

SEQ ID NO: 4016 - protein, 16 aa, Homo Sapiens
  ( 81 )...( 97 ): O2D2_HUMAN
ALVHLLSRKKVIAFTL

SEQ ID NO: 4017 - protein, 16 aa, Homo Sapiens
  ( 82 )...( 98 ): O2D2_HUMAN
LVHLLSRKKVIAFTLC

SEQ ID NO: 4018 - protein, 16 aa, Homo Sapiens
  ( 220 )...( 236 ): O2D2_HUMAN
RIIVTVVKMKSTVGSL

SEQ ID NO: 4019 - protein, 16 aa, Homo Sapiens
  ( 222 )...( 238 ): O2D2_HUMAN
IVTVVKMKSTVGSLKA

SEQ ID NO: 4020 - protein, 16 aa, Homo Sapiens
  ( 223 )...( 239 ): O2D2_HUMAN
VTVVKMKSTVGSLKAF

SEQ ID NO: 4021 - protein, 16 aa, Homo Sapiens
  ( 224 )...( 240 ): O2D2_HUMAN
TVVKMKSTVGSLKAFS

SEQ ID NO: 4022 - protein, 16 aa, Homo Sapiens
  ( 225 )...( 241 ): O2D2_HUMAN
VVKMKSTVGSLKAFST

SEQ ID NO: 4023 - protein, 16 aa, Homo Sapiens
  ( 288 )...( 304 ): O2F1_HUMAN
MIYSLRNKEVKGAWQK

SEQ ID NO: 4024 - protein, 16 aa, Homo Sapiens
  ( 289 )...( 305 ): O2F1_HUMAN
IYSLRNKEVKGAWQKL

SEQ ID NO: 4025 - protein, 16 aa, Homo Sapiens
  ( 290 )...( 306 ): O2F1_HUMAN
YSLRNKEVKGAWQKLL

SEQ ID NO: 4026 - protein, 16 aa, Homo Sapiens
  ( 291 )...( 307 ): O2F1_HUMAN
SLRNKEVKGAWQKLLW

SEQ ID NO: 4027 - protein, 16 aa, Homo Sapiens
  ( 292 )...( 308 ): O2F1_HUMAN
LRNKEVKGAWQKLLWK

SEQ ID NO: 4028 - protein, 16 aa, Homo Sapiens
  ( 293 )...( 309 ): O2F1_HUMAN
RNKEVKGAWQKLLWKF

SEQ ID NO: 4029 - protein, 16 aa, Homo Sapiens
  ( 294 )...( 310 ): O2F1_HUMAN
NKEVKGAWQKLLWKFS

SEQ ID NO: 4030 - protein, 16 aa, Homo Sapiens
  ( 298 )...( 314 ): O2F1_HUMAN
KGAWQKLLWKFSGLTS

SEQ ID NO: 4031 - protein, 16 aa, Homo Sapiens
  ( 299 )...( 315 ): O2F1_HUMAN
GAWQKLLWKFSGLTSK

SEQ ID NO: 4032 - protein, 16 aa, Homo Sapiens
  ( 300 )...( 316 ): O2F1_HUMAN
AWQKLLWKFSGLTSKL

SEQ ID NO: 4033 - protein, 16 aa, Homo Sapiens
  ( 301 )...( 317 ): O2F1_HUMAN
WQKLLWKFSGLTSKLA

SEQ ID NO: 4034 - protein, 16 aa, Homo Sapiens
  ( 302 )...( 318 ): O2F1_HUMAN
QKLLWKFSGLTSKLAT

SEQ ID NO: 4035 - protein, 15 aa, Homo Sapiens
  ( 303 )...( 319 ): O2F1_HUMAN
KLLWKFSGLTSKLAT

SEQ ID NO: 4036 - protein, 16 aa, Homo Sapiens
  ( 216 )...( 232 ): O2F2_HUMAN
LSYIRIISTILKIQSR

SEQ ID NO: 4037 - protein, 16 aa, Homo Sapiens
  ( 219 )...( 235 ): O2F2_HUMAN
IRIISTILKIQSREGR

SEQ ID NO: 4038 - protein, 16 aa, Homo Sapiens
  ( 289 )...( 305 ): O2F2_HUMAN
IYSLRNKEVKGAWHKL

SEQ ID NO: 4039 - protein, 16 aa, Homo Sapiens
  ( 290 )...( 306 ): O2F2_HUMAN
YSLRNKEVKGAWHKLL

SEQ ID NO: 4040 - protein, 16 aa, Homo Sapiens
  ( 288 )...( 304 ): O2J2_HUMAN
PLIYTLRNKHVKGAAK

SEQ ID NO: 4041 - protein, 16 aa, Homo Sapiens
  ( 224 )...( 240 ): O2J3_HUMAN
IVRAVLRMQSTTGLQK

SEQ ID NO: 4042 - protein, 16 aa, Homo Sapiens
  ( 225 )...( 241 ): O2J3_HUMAN
VRAVLRMQSTTGLQKV

SEQ ID NO: 4043 - protein, 16 aa, Homo Sapiens
  ( 226 )...( 242 ): O2J3_HUMAN
RAVLRMQSTTGLQKVF

SEQ ID NO: 4044 - protein, 16 aa, Homo Sapiens
  ( 290 )...( 306 ): O2J3_HUMAN
PLIYTLRNKVVRGAVK

SEQ ID NO: 4045 - protein, 16 aa, Homo Sapiens
  ( 291 )...( 307 ): O2J3_HUMAN
LIYTLRNKVVRGAVKR

SEQ ID NO: 4046 - protein, 16 aa, Homo Sapiens
  ( 292 )...( 308 ): O2J3_HUMAN
IYTLRNKVVRGAVKRL

SEQ ID NO: 4047 - protein, 16 aa, Homo Sapiens
  ( 222 )...( 238 ): O2S2_HUMAN
IITTILRIPSAEGRKK

SEQ ID NO: 4048 - protein, 16 aa, Homo Sapiens
  ( 223 )...( 239 ): O2S2_HUMAN
ITTILRIPSAEGRKKV

SEQ ID NO: 4049 - protein, 16 aa, Homo Sapiens
  ( 214 )...( 230 ): O2W1_HUMAN
ILISYGYIAKAVLRTK

SEQ ID NO: 4050 - protein, 16 aa, Homo Sapiens
  ( 215 )...( 231 ): O2W1_HUMAN
LISYGYIAKAVLRTKS

SEQ ID NO: 4051 - protein, 16 aa, Homo Sapiens
  ( 216 )...( 232 ): O2W1_HUMAN
ISYGYIAKAVLRTKSK

SEQ ID NO: 4052 - protein, 16 aa, Homo Sapiens
  ( 288 )...( 304 ): O2W1_HUMAN
LIYTLRNKDMKDALKK

SEQ ID NO: 4053 - protein, 16 aa, Homo Sapiens
  ( 289 )...( 305 ): O2W1_HUMAN
IYTLRNKDMKDALKKL

SEQ ID NO: 4054 - protein, 16 aa, Homo Sapiens
  ( 292 )...( 308 ): O4F3_HUMAN
KEMKAAIKRVCKQLVI

SEQ ID NO: 4055 - protein, 16 aa, Homo Sapiens
  ( 293 )...( 309 ): O4F3_HUMAN
EMKAAIKRVCKQLVIY

SEQ ID NO: 4056 - protein, 16 aa, Homo Sapiens
  ( 294 )...( 310 ): O4F3_HUMAN
MKAAIKRVCKQLVIYK

SEQ ID NO: 4057 - protein, 16 aa, Homo Sapiens
  ( 295 )...( 311 ): O4F3_HUMAN
KAAIKRVCKQLVIYKR

SEQ ID NO: 4058 - protein, 16 aa, Homo Sapiens
  ( 296 )...( 312 ): O4F3_HUMAN
AAIKRVCKQLVIYKRI

SEQ ID NO: 4059 - protein, 16 aa, Homo Sapiens
  ( 297 )...( 313 ): O4F3_HUMAN
AIKRVCKQLVIYKRIS

SEQ ID NO: 4060 - protein, 15 aa, Homo Sapiens
  ( 298 )...( 314 ): O4F3_HUMAN
IKRVCKQLVIYKRIS

SEQ ID NO: 4061 - protein, 14 aa, Homo Sapiens
  ( 299 )...( 315 ): O4F3_HUMAN
KRVCKQLVIYKRIS

SEQ ID NO: 4062 - protein, 10 aa, Homo Sapiens
  ( 303 )...( 319 ): O4F3_HUMAN
KQLVIYKRIS

SEQ ID NO: 4063 - protein, 16 aa, Homo Sapiens
  ( 284 )...( 300 ): O5F1_HUMAN
MLNPLIYSLRSKEVKK

SEQ ID NO: 4064 - protein, 16 aa, Homo Sapiens
  ( 285 )...( 301 ): O5F1_HUMAN
LNPLIYSLRSKEVKKA

SEQ ID NO: 4065 - protein, 16 aa, Homo Sapiens
  ( 286 )...( 302 ): O5F1_HUMAN
NPLIYSLRSKEVKKAL

SEQ ID NO: 4066 - protein, 16 aa, Homo Sapiens
  ( 287 )...( 303 ): O5F1_HUMAN
PLIYSLRSKEVKKALA

SEQ ID NO: 4067 - protein, 16 aa, Homo Sapiens
  ( 288 )...( 304 ): O5F1_HUMAN
LIYSLRSKEVKKALAN

SEQ ID NO: 4068 - protein, 16 aa, Homo Sapiens
  ( 289 )...( 305 ): O5F1_HUMAN
IYSLRSKEVKKALANV

SEQ ID NO: 4069 - protein, 16 aa, Homo Sapiens
  ( 290 )...( 306 ): O5F1_HUMAN
YSLRSKEVKKALANVI

SEQ ID NO: 4070 - protein, 16 aa, Homo Sapiens
  ( 223 )...( 239 ): O5I1_HUMAN
ILLSVLKIRSFSGRKK

SEQ ID NO: 4071 - protein, 16 aa, Homo Sapiens
  ( 224 )...( 240 ): O5I1_HUMAN
LLSVLKIRSFSGRKKT

SEQ ID NO: 4072 - protein, 16 aa, Homo Sapiens
  ( 75 )...( 91 ): O5V1_HUMAN
TSNVPQMMVHLLSKKK

SEQ ID NO: 4073 - protein, 16 aa, Homo Sapiens
  ( 77 )...( 93 ): O5V1_HUMAN
NVPQMMVHLLSKKKSI

SEQ ID NO: 4074 - protein, 16 aa, Homo Sapiens
  ( 78 )...( 94 ): O5V1_HUMAN
VPQMMVHLLSKKKSIS

SEQ ID NO: 4075 - protein, 16 aa, Homo Sapiens
  ( 79 )...( 95 ): O5V1_HUMAN
PQMMVHLLSKKKSISY

SEQ ID NO: 4076 - protein, 16 aa, Homo Sapiens
  ( 80 )...( 96 ): O5V1_HUMAN
QMMVHLLSKKKSISYV

SEQ ID NO: 4077 - protein, 16 aa, Homo Sapiens
  ( 297 )...( 313 ): O7A5_HUMAN
IKRALGIHLLWGTMKG

SEQ ID NO: 4078 - protein, 16 aa, Homo Sapiens
  ( 298 )...( 314 ): O7A5_HUMAN
KRALGIHLLWGTMKGQ

SEQ ID NO: 4079 - protein, 16 aa, Homo Sapiens
  ( 298 )...( 314 ): O7C2_HUMAN
KGSLGRLLLRATSLKE

SEQ ID NO: 4080 - protein, 16 aa, Homo Sapiens
  ( 303 )...( 319 ): O7C2_HUMAN
RLLLRATSLKEGTIAK

SEQ ID NO: 4081 - protein, 16 aa, Homo Sapiens
  ( 74 )...( 90 ): O8B8_HUMAN
SSVITPKMLMSFVLKK

SEQ ID NO: 4082 - protein, 16 aa, Homo Sapiens
  ( 75 )...( 91 ): O8B8_HUMAN
SVITPKMLMSFVLKKN

SEQ ID NO: 4083 - protein, 16 aa, Homo Sapiens
  ( 76 )...( 92 ): O8B8_HUMAN
VITPKMLMSFVLKKNS

SEQ ID NO: 4084 - protein, 16 aa, Homo Sapiens
  ( 77 )...( 93 ): O8B8_HUMAN
ITPKMLMSFVLKKNSI

SEQ ID NO: 4085 - protein, 16 aa, Homo Sapiens
  ( 287 )...( 303 ): O8B8_HUMAN
PLIYSLRNKDVKVALK

SEQ ID NO: 4086 - protein, 16 aa, Homo Sapiens
  ( 288 )...( 304 ): O8B8_HUMAN
LIYSLRNKDVKVALKK

SEQ ID NO: 4087 - protein, 16 aa, Homo Sapiens
  ( 289 )...( 305 ): O8B8_HUMAN
IYSLRNKDVKVALKKI

SEQ ID NO: 4088 - protein, 16 aa, Homo Sapiens
  ( 290 )...( 306 ): O8B8_HUMAN
YSLRNKDVKVALKKIL

SEQ ID NO: 4089 - protein, 16 aa, Homo Sapiens
  ( 295 )...( 311 ): O8B8_HUMAN
KDVKVALKKILNKNAF

SEQ ID NO: 4090 - protein, 16 aa, Homo Sapiens
  ( 296 )...( 312 ): O8B8_HUMAN
DVKVALKKILNKNAFS

SEQ ID NO: 4091 - protein, 15 aa, Homo Sapiens
  ( 297 )...( 313 ): O8B8_HUMAN
VKVALKKILNKNAFS

SEQ ID NO: 4092 - protein, 14 aa, Homo Sapiens
  ( 298 )...( 314 ): O8B8_HUMAN
KVALKKILNKNAFS

SEQ ID NO: 4093 - protein, 13 aa, Homo Sapiens
  ( 299 )...( 315 ): O8B8_HUMAN
VALKKILNKNAFS

SEQ ID NO: 4094 - protein, 16 aa, Homo Sapiens
  ( 221 )...( 237 ): OAA3_HUMAN
VLFAILKMPSTTGRQK

SEQ ID NO: 4095 - protein, 16 aa, Homo Sapiens
  ( 295 )...( 311 ): OAA3_HUMAN
SEMKRTLIKLWRRKVI

SEQ ID NO: 4096 - protein, 16 aa, Homo Sapiens
  ( 296 )...( 312 ): OAA3_HUMAN
EMKRTLIKLWRRKVIL

SEQ ID NO: 4097 - protein, 16 aa, Homo Sapiens
  ( 297 )...( 313 ): OAA3_HUMAN
MKRTLIKLWRRKVILH

SEQ ID NO: 4098 - protein, 16 aa, Homo Sapiens
  ( 298 )...( 314 ): OAA3_HUMAN
KRTLIKLWRRKVILHT

SEQ ID NO: 4099 - protein, 16 aa, Homo Sapiens
  ( 299 )...( 315 ): OAA3_HUMAN
RTLIKLWRRKVILHTF

SEQ ID NO: 4100 - protein, 15 aa, Homo Sapiens
  ( 300 )...( 316 ): OAA3_HUMAN
TLIKLWRRKVILHTF

SEQ ID NO: 4101 - protein, 14 aa, Homo Sapiens
  ( 301 )...( 317 ): OAA3_HUMAN
LIKLWRRKVILHTF

SEQ ID NO: 4102 - protein, 13 aa, Homo Sapiens
  ( 302 )...( 318 ): OAA3_HUMAN
IKLWRRKVILHTF

SEQ ID NO: 4103 - protein, 12 aa, Homo Sapiens
  ( 303 )...( 319 ): OAA3_HUMAN
KLWRRKVILHTF

SEQ ID NO: 4104 - protein, 16 aa, Homo Sapiens
  ( 298 )...( 314 ): OAA4_HUMAN
VKAALKRLIHRTLGSQ

SEQ ID NO: 4105 - protein, 16 aa, Homo Sapiens
  ( 300 )...( 316 ): OAA4_HUMAN
AALKRLIHRTLGSQKL

SEQ ID NO: 4106 - protein, 15 aa, Homo Sapiens
  ( 301 )...( 317 ): OAA4_HUMAN
ALKRLIHRTLGSQKL

SEQ ID NO: 4107 - protein, 14 aa, Homo Sapiens
  ( 302 )...( 318 ): OAA4_HUMAN
LKRLIHRTLGSQKL

SEQ ID NO: 4108 - protein, 16 aa, Homo Sapiens
  ( 220 )...( 236 ): OAA5_HUMAN
TRIAAAILKIPSAKGK

SEQ ID NO: 4109 - protein, 16 aa, Homo Sapiens
  ( 222 )...( 238 ): OAA5_HUMAN
IAAAILKIPSAKGKHK

SEQ ID NO: 4110 - protein, 16 aa, Homo Sapiens
  ( 226 )...( 242 ): OAA5_HUMAN
ILKIPSAKGKHKAFST

SEQ ID NO: 4111 - protein, 16 aa, Homo Sapiens
  ( 287 )...( 303 ): OAC1_HUMAN
IIYSLRNTEVKAALKR

SEQ ID NO: 4112 - protein, 16 aa, Homo Sapiens
  ( 294 )...( 310 ): OAC1_HUMAN
TEVKAALKRTIQKTVP

SEQ ID NO: 4113 - protein, 16 aa, Homo Sapiens
  ( 295 )...( 311 ): OAC1_HUMAN
EVKAALKRTIQKTVPM

SEQ ID NO: 4114 - protein, 16 aa, Homo Sapiens
  ( 296 )...( 312 ): OAC1_HUMAN
VKAALKRTIQKTVPME

SEQ ID NO: 4115 - protein, 16 aa, Homo Sapiens
  ( 297 )...( 313 ): OAC1_HUMAN
KAALKRTIQKTVPMEI

SEQ ID NO: 4116 - protein, 16 aa, Homo Sapiens
  ( 288 )...( 304 ): OAH1_HUMAN
PIIFSLRNKELKVAMK

SEQ ID NO: 4117 - protein, 16 aa, Homo Sapiens
  ( 289 )...( 305 ): OAH1_HUMAN
IIFSLRNKELKVAMKK

SEQ ID NO: 4118 - protein, 16 aa, Homo Sapiens
  ( 290 )...( 306 ): OAH1_HUMAN
IFSLRNKELKVAMKKT

SEQ ID NO: 4119 - protein, 16 aa, Homo Sapiens
  ( 291 )...( 307 ): OAH1_HUMAN
FSLRNKELKVAMKKTF

SEQ ID NO: 4120 - protein, 16 aa, Homo Sapiens
  ( 292 )...( 308 ): OAH1_HUMAN
SLRNKELKVAMKKTFF

SEQ ID NO: 4121 - protein, 16 aa, Homo Sapiens
  ( 293 )...( 309 ): OAH1_HUMAN
LRNKELKVAMKKTFFS

SEQ ID NO: 4122 - protein, 16 aa, Homo Sapiens
  ( 295 )...( 311 ): OAH1_HUMAN
NKELKVAMKKTFFSKL

SEQ ID NO: 4123 - protein, 16 aa, Homo Sapiens
  ( 297 )...( 313 ): OAH1_HUMAN
ELKVAMKKTFFSKLYP

SEQ ID NO: 4124 - protein, 16 aa, Homo Sapiens
  ( 298 )...( 314 ): OAH1_HUMAN
LKVAMKKTFFSKLYPE

SEQ ID NO: 4125 - protein, 16 aa, Homo Sapiens
  ( 299 )...( 315 ): OAH1_HUMAN
KVAMKKTFFSKLYPEK

SEQ ID NO: 4126 - protein, 16 aa, Homo Sapiens
  ( 288 )...( 304 ): OAH2_HUMAN
PIIFSLRNKELKVAMK

SEQ ID NO: 4127 - protein, 16 aa, Homo Sapiens
  ( 289 )...( 305 ): OAH2_HUMAN
IIFSLRNKELKVAMKR

SEQ ID NO: 4128 - protein, 16 aa, Homo Sapiens
  ( 290 )...( 306 ): OAH2_HUMAN
IFSLRNKELKVAMKRT

SEQ ID NO: 4129 - protein, 16 aa, Homo Sapiens
  ( 292 )...( 308 ): OAH2_HUMAN
SLRNKELKVAMKRTFL

SEQ ID NO: 4130 - protein, 16 aa, Homo Sapiens
  ( 293 )...( 309 ): OAH2_HUMAN
LRNKELKVAMKRTFLS

SEQ ID NO: 4131 - protein, 16 aa, Homo Sapiens
  ( 295 )...( 311 ): OAH2_HUMAN
NKELKVAMKRTFLSTL

SEQ ID NO: 4132 - protein, 16 aa, Homo Sapiens
  ( 296 )...( 312 ): OAH2_HUMAN
KELKVAMKRTFLSTLY

SEQ ID NO: 4133 - protein, 16 aa, Homo Sapiens
  ( 290 )...( 306 ): OAH3_HUMAN
IIFSLRNKELKNAINK

SEQ ID NO: 4134 - protein, 16 aa, Homo Sapiens
  ( 141 )...( 157 ): OAJ1_HUMAN
LRYMVIMNKRLRIQLV

SEQ ID NO: 4135 - protein, 16 aa, Homo Sapiens
  ( 142 )...( 158 ): OAJ1_HUMAN
RYMVIMNKRLRIQLVL

SEQ ID NO: 4136 - protein, 16 aa, Homo Sapiens
  ( 143 )...( 159 ): OAJ1_HUMAN
YMVIMNKRLRIQLVLG

SEQ ID NO: 4137 - protein, 16 aa, Homo Sapiens
  ( 144 )...( 160 ): OAJ1_HUMAN
MVIMNKRLRIQLVLGA

SEQ ID NO: 4138 - protein, 16 aa, Homo Sapiens
  ( 231 )...( 247 ): OAJ1_HUMAN
IISTILKIASVEGRKK

SEQ ID NO: 4139 - protein, 16 aa, Homo Sapiens
  ( 232 )...( 248 ): OAJ1_HUMAN
ISTILKIASVEGRKKA

SEQ ID NO: 4140 - protein, 16 aa, Homo Sapiens
  ( 233 )...( 249 ): OAJ1_HUMAN
STILKIASVEGRKKAF

SEQ ID NO: 4141 - protein, 16 aa, Homo Sapiens
  ( 234 )...( 250 ): OAJ1_HUMAN
TILKIASVEGRKKAFA

SEQ ID NO: 4142 - protein, 16 aa, Homo Sapiens
  ( 235 )...( 251 ): OAJ1_HUMAN
ILKIASVEGRKKAFAT

SEQ ID NO: 4143 - protein, 16 aa, Homo Sapiens
  ( 290 )...( 306 ): OBA1_HUMAN
IYTMRNKEVHQALRKI

SEQ ID NO: 4144 - protein, 16 aa, Homo Sapiens
  ( 291 )...( 307 ): OBA1_HUMAN
YTMRNKEVHQALRKIL

SEQ ID NO: 4145 - protein, 16 aa, Homo Sapiens
  ( 296 )...( 312 ): OBA1_HUMAN
KEVHQALRKILCIKQT

SEQ ID NO: 4146 - protein, 16 aa, Homo Sapiens
  ( 287 )...( 303 ): OCD2_HUMAN
LIYTLRNKEVKGALGR

SEQ ID NO: 4147 - protein, 16 aa, Homo Sapiens
  ( 288 )...( 304 ): OCD2_HUMAN
IYTLRNKEVKGALGRV

SEQ ID NO: 4148 - protein, 16 aa, Homo Sapiens
  ( 289 )...( 305 ): OCD2_HUMAN
YTLRNKEVKGALGRVI

SEQ ID NO: 4149 - protein, 16 aa, Homo Sapiens
  ( 287 )...( 303 ): OCD3_HUMAN
LIYTLRNKEVMMALKK

SEQ ID NO: 4150 - protein, 16 aa, Homo Sapiens
  ( 288 )...( 304 ): OCD3_HUMAN
IYTLRNKEVMMALKKI

SEQ ID NO: 4151 - protein, 16 aa, Homo Sapiens
  ( 289 )...( 305 ): OCD3_HUMAN
YTLRNKEVMMALKKIF

SEQ ID NO: 4152 - protein, 16 aa, Homo Sapiens
  ( 290 )...( 306 ): OCD3_HUMAN
TLRNKEVMMALKKIFG

SEQ ID NO: 4153 - protein, 16 aa, Homo Sapiens
  ( 293 )...( 309 ): OCD3_HUMAN
NKEVMMALKKIFGRKL

SEQ ID NO: 4154 - protein, 16 aa, Homo Sapiens
  ( 294 )...( 310 ): OCD3_HUMAN
KEVMMALKKIFGRKLF

SEQ ID NO: 4155 - protein, 16 aa, Homo Sapiens
  ( 295 )...( 311 ): OCD3_HUMAN
EVMMALKKIFGRKLFK

SEQ ID NO: 4156 - protein, 16 aa, Homo Sapiens
  ( 296 )...( 312 ): OCD3_HUMAN
VMMALKKIFGRKLFKD

SEQ ID NO: 4157 - protein, 16 aa, Homo Sapiens
  ( 298 )...( 314 ): OCD3_HUMAN
MALKKIFGRKLFKDWQ

SEQ ID NO: 4158 - protein, 16 aa, Homo Sapiens
  ( 299 )...( 315 ): OCD3_HUMAN
ALKKIFGRKLFKDWQQ

SEQ ID NO: 4159 - protein, 16 aa, Homo Sapiens
  ( 300 )...( 316 ): OCD3_HUMAN
LKKIFGRKLFKDWQQH

SEQ ID NO: 4160 - protein, 16 aa, Homo Sapiens
  ( 58 )...( 74 ): OPN3_HUMAN
NNLLVLVLYYKFQRLR

SEQ ID NO: 4161 - protein, 16 aa, Homo Sapiens
  ( 59 )...( 75 ): OPN3_HUMAN
NLLVLVLYYKFQRLRT

SEQ ID NO: 4162 - protein, 16 aa, Homo Sapiens
  ( 60 )...( 76 ): OPN3_HUMAN
LLVLVLYYKFQRLRTP

SEQ ID NO: 4163 - protein, 16 aa, Homo Sapiens
  ( 61 )...( 77 ): OPN3_HUMAN
LVLVLYYKFQRLRTPT

SEQ ID NO: 4164 - protein, 16 aa, Homo Sapiens
  ( 68 )...( 84 ): OPN3_HUMAN
KFQRLRTPTHLLLVNI

SEQ ID NO: 4165 - protein, 16 aa, Homo Sapiens
  ( 238 )...( 254 ): OPN3_HUMAN
LQTIQVIKILKYEKKL

SEQ ID NO: 4166 - protein, 16 aa, Homo Sapiens
  ( 239 )...( 255 ): OPN3_HUMAN
QTIQVIKILKYEKKLA

SEQ ID NO: 4167 - protein, 16 aa, Homo Sapiens
  ( 240 )...( 256 ): OPN3_HUMAN
TIQVIKILKYEKKLAK

SEQ ID NO: 4168 - protein, 16 aa, Homo Sapiens
  ( 241 )...( 257 ): OPN3_HUMAN
IQVIKILKYEKKLAKM

SEQ ID NO: 4169 - protein, 16 aa, Homo Sapiens
  ( 360 )...( 376 ): OPN3_HUMAN
PKKKVTFNSSSIIFII

SEQ ID NO: 4170 - protein, 16 aa, Homo Sapiens
  ( 361 )...( 377 ): OPN3_HUMAN
KKKVTFNSSSIIFIIT

SEQ ID NO: 4171 - protein, 16 aa, Homo Sapiens
  ( 256 )...( 272 ): OPRD_HUMAN
LRRITRMVLVVVGAFV

SEQ ID NO: 4172 - protein, 16 aa, Homo Sapiens
  ( 257 )...( 273 ): OPRD_HUMAN
RRITRMVLVVVGAFVV

SEQ ID NO: 4173 - protein, 16 aa, Homo Sapiens
  ( 164 )...( 180 ): OPRK_HUMAN
VKALDFRTPLKAKIIN

SEQ ID NO: 4174 - protein, 16 aa, Homo Sapiens
  ( 165 )...( 181 ): OPRK_HUMAN
KALDFRTPLKAKIINI

SEQ ID NO: 4175 - protein, 16 aa, Homo Sapiens
  ( 170 )...( 186 ): OPRK_HUMAN
RTPLKAKIINICIWLL

SEQ ID NO: 4176 - protein, 16 aa, Homo Sapiens
  ( 242 )...( 258 ): OPRK_HUMAN
IIVCYTLMILRLKSVR

SEQ ID NO: 4177 - protein, 16 aa, Homo Sapiens
  ( 243 )...( 259 ): OPRK_HUMAN
IVCYTLMILRLKSVRL

SEQ ID NO: 4178 - protein, 16 aa, Homo Sapiens
  ( 244 )...( 260 ): OPRK_HUMAN
VCYTLMILRLKSVRLL

SEQ ID NO: 4179 - protein, 16 aa, Homo Sapiens
  ( 246 )...( 262 ): OPRK_HUMAN
YTLMILRLKSVRLLSG

SEQ ID NO: 4180 - protein, 16 aa, Homo Sapiens
  ( 247 )...( 263 ): OPRK_HUMAN
TLMILRLKSVRLLSGS

SEQ ID NO: 4181 - protein, 16 aa, Homo Sapiens
  ( 265 )...( 281 ): OPRK_HUMAN
KDRNLRRITRLVLVVV

SEQ ID NO: 4182 - protein, 16 aa, Homo Sapiens
  ( 267 )...( 283 ): OPRK_HUMAN
RNLRRITRLVLVVVAV

SEQ ID NO: 4183 - protein, 16 aa, Homo Sapiens
  ( 268 )...( 284 ): OPRK_HUMAN
NLRRITRLVLVVVAVF

SEQ ID NO: 4184 - protein, 16 aa, Homo Sapiens
  ( 269 )...( 285 ): OPRK_HUMAN
LRRITRLVLVVVAVFV

SEQ ID NO: 4185 - protein, 16 aa, Homo Sapiens
  ( 270 )...( 286 ): OPRK_HUMAN
RRITRLVLVVVAVFVV

SEQ ID NO: 4186 - protein, 16 aa, Homo Sapiens
  ( 277 )...( 293 ): OPRM_HUMAN
LRRITRMVLVVVAVFI

SEQ ID NO: 4187 - protein, 16 aa, Homo Sapiens
  ( 278 )...( 294 ): OPRM_HUMAN
RRITRMVLVVVAVFIV

SEQ ID NO: 4188 - protein, 16 aa, Homo Sapiens
  ( 72 )...( 88 ): OPRX_HUMAN
VMYVILRHTKMKTATN

SEQ ID NO: 4189 - protein, 16 aa, Homo Sapiens
  ( 73 )...( 89 ): OPRX_HUMAN
MYVILRHTKMKTATNI

SEQ ID NO: 4190 - protein, 16 aa, Homo Sapiens
  ( 74 )...( 90 ): OPRX_HUMAN
YVILRHTKMKTATNIY

SEQ ID NO: 4191 - protein, 16 aa, Homo Sapiens
  ( 75 )...( 91 ): OPRX_HUMAN
VILRHTKMKTATNIYI

SEQ ID NO: 4192 - protein, 16 aa, Homo Sapiens
  ( 76 )...( 92 ): OPRX_HUMAN
ILRHTKMKTATNIYIF

SEQ ID NO: 4193 - protein, 16 aa, Homo Sapiens
  ( 254 )...( 270 ): OPRX_HUMAN
KDRNLRRITRLVLVVV

SEQ ID NO: 4194 - protein, 16 aa, Homo Sapiens
  ( 256 )...( 272 ): OPRX_HUMAN
RNLRRITRLVLVVVAV

SEQ ID NO: 4195 - protein, 16 aa, Homo Sapiens
  ( 257 )...( 273 ): OPRX_HUMAN
NLRRITRLVLVVVAVF

SEQ ID NO: 4196 - protein, 16 aa, Homo Sapiens
  ( 258 )...( 274 ): OPRX_HUMAN
LRRITRLVLVVVAVFV

SEQ ID NO: 4197 - protein, 16 aa, Homo Sapiens
  ( 259 )...( 275 ): OPRX_HUMAN
RRITRLVLVVVAVFVG

SEQ ID NO: 4198 - protein, 16 aa, Homo Sapiens
  ( 50 )...( 66 ): OPSB_HUMAN
PLNAMVLVATLRYKKL

SEQ ID NO: 4199 - protein, 16 aa, Homo Sapiens
  ( 51 )...( 67 ): OPSB_HUMAN
LNAMVLVATLRYKKLR

SEQ ID NO: 4200 - protein, 16 aa, Homo Sapiens
  ( 52 )...( 68 ): OPSB_HUMAN
NAMVLVATLRYKKLRQ

SEQ ID NO: 4201 - protein, 16 aa, Homo Sapiens
  ( 53 )...( 69 ): OPSB_HUMAN
AMVLVATLRYKKLRQP

SEQ ID NO: 4202 - protein, 16 aa, Homo Sapiens
  ( 54 )...( 70 ): OPSB_HUMAN
MVLVATLRYKKLRQPL

SEQ ID NO: 4203 - protein, 16 aa, Homo Sapiens
  ( 55 )...( 71 ): OPSB_HUMAN
VLVATLRYKKLRQPLN

SEQ ID NO: 4204 - protein, 16 aa, Homo Sapiens
  ( 56 )...( 72 ): OPSB_HUMAN
LVATLRYKKLRQPLNY

SEQ ID NO: 4205 - protein, 16 aa, Homo Sapiens
  ( 57 )...( 73 ): OPSB_HUMAN
VATLRYKKLRQPLNYI

SEQ ID NO: 4206 - protein, 16 aa, Homo Sapiens
  ( 58 )...( 74 ): OPSB_HUMAN
ATLRYKKLRQPLNYIL

SEQ ID NO: 4207 - protein, 16 aa, Homo Sapiens
  ( 59 )...( 75 ): OPSB_HUMAN
TLRYKKLRQPLNYILV

SEQ ID NO: 4208 - protein, 16 aa, Homo Sapiens
  ( 60 )...( 76 ): OPSB_HUMAN
LRYKKLRQPLNYILVN

SEQ ID NO: 4209 - protein, 16 aa, Homo Sapiens
  ( 61 )...( 77 ): OPSB_HUMAN
RYKKLRQPLNYILVNV

SEQ ID NO: 4210 - protein, 16 aa, Homo Sapiens
  ( 62 )...( 78 ): OPSB_HUMAN
YKKLRQPLNYILVNVS

SEQ ID NO: 4211 - protein, 16 aa, Homo Sapiens
  ( 63 )...( 79 ): OPSB_HUMAN
KKLRQPLNYILVNVSF

SEQ ID NO: 4212 - protein, 16 aa, Homo Sapiens
  ( 54 )...( 70 ): OPSD_HUMAN
INFLTLYVTVQHKKLR

SEQ ID NO: 4213 - protein, 16 aa, Homo Sapiens
  ( 55 )...( 71 ): OPSD_HUMAN
NFLTLYVTVQHKKLRT

SEQ ID NO: 4214 - protein, 16 aa, Homo Sapiens
  ( 56 )...( 72 ): OPSD_HUMAN
FLTLYVTVQHKKLRTP

SEQ ID NO: 4215 - protein, 16 aa, Homo Sapiens
  ( 57 )...( 73 ): OPSD_HUMAN
LTLYVTVQHKKLRTPL

SEQ ID NO: 4216 - protein, 16 aa, Homo Sapiens
  ( 58 )...( 74 ): OPSD_HUMAN
TLYVTVQHKKLRTPLN

SEQ ID NO: 4217 - protein, 16 aa, Homo Sapiens
  ( 59 )...( 75 ): OPSD_HUMAN
LYVTVQHKKLRTPLNY

SEQ ID NO: 4218 - protein, 16 aa, Homo Sapiens
  ( 60 )...( 76 ): OPSD_HUMAN
YVTVQHKKLRTPLNYI

SEQ ID NO: 4219 - protein, 16 aa, Homo Sapiens
  ( 61 )...( 77 ): OPSD_HUMAN
VTVQHKKLRTPLNYIL

SEQ ID NO: 4220 - protein, 16 aa, Homo Sapiens
  ( 62 )...( 78 ): OPSD_HUMAN
TVQHKKLRTPLNYILL

SEQ ID NO: 4221 - protein, 16 aa, Homo Sapiens
  ( 63 )...( 79 ): OPSD_HUMAN
VQHKKLRTPLNYILLN

SEQ ID NO: 4222 - protein, 16 aa, Homo Sapiens
  ( 64 )...( 80 ): OPSD_HUMAN
QHKKLRTPLNYILLNL

SEQ ID NO: 4223 - protein, 16 aa, Homo Sapiens
  ( 65 )...( 81 ): OPSD_HUMAN
HKKLRTPLNYILLNLA

SEQ ID NO: 4224 - protein, 16 aa, Homo Sapiens
  ( 66 )...( 82 ): OPSD_HUMAN
KKLRTPLNYILLNLAV

SEQ ID NO: 4225 - protein, 16 aa, Homo Sapiens
  ( 68 )...( 84 ): OPSG_HUMAN
VFTNGLVLAATMKFKK

SEQ ID NO: 4226 - protein, 16 aa, Homo Sapiens
  ( 69 )...( 85 ): OPSG_HUMAN
FTNGLVLAATMKFKKL

SEQ ID NO: 4227 - protein, 16 aa, Homo Sapiens
  ( 70 )...( 86 ): OPSG_HUMAN
TNGLVLAATMKFKKLR

SEQ ID NO: 4228 - protein, 16 aa, Homo Sapiens
  ( 71 )...( 87 ): OPSG_HUMAN
NGLVLAATMKFKKLRH

SEQ ID NO: 4229 - protein, 16 aa, Homo Sapiens
  ( 72 )...( 88 ): OPSG_HUMAN
GLVLAATMKFKKLRHP

SEQ ID NO: 4230 - protein, 16 aa, Homo Sapiens
  ( 73 )...( 89 ): OPSG_HUMAN
LVLAATMKFKKLRHPL

SEQ ID NO: 4231 - protein, 16 aa, Homo Sapiens
  ( 77 )...( 93 ): OPSG_HUMAN
ATMKFKKLRHPLNWIL

SEQ ID NO: 4232 - protein, 16 aa, Homo Sapiens
  ( 78 )...( 94 ): OPSG_HUMAN
TMKFKKLRHPLNWILV

SEQ ID NO: 4233 - protein, 16 aa, Homo Sapiens
  ( 79 )...( 95 ): OPSG_HUMAN
MKFKKLRHPLNWILVN

SEQ ID NO: 4234 - protein, 16 aa, Homo Sapiens
  ( 80 )...( 96 ): OPSG_HUMAN
KFKKLRHPLNWILVNL

SEQ ID NO: 4235 - protein, 16 aa, Homo Sapiens
  ( 82 )...( 98 ): OPSG_HUMAN
KKLRHPLNWILVNLAV

SEQ ID NO: 4236 - protein, 16 aa, Homo Sapiens
  ( 239 )...( 255 ): OPSG_HUMAN
YLQVWLAIRAVAKQQK

SEQ ID NO: 4237 - protein, 16 aa, Homo Sapiens
  ( 68 )...( 84 ): OPSR_HUMAN
VFTNGLVLAATMKFKK

SEQ ID NO: 4238 - protein, 16 aa, Homo Sapiens
  ( 69 )...( 85 ): OPSR_HUMAN
FTNGLVLAATMKFKKL

SEQ ID NO: 4239 - protein, 16 aa, Homo Sapiens
  ( 70 )...( 86 ): OPSR_HUMAN
TNGLVLAATMKFKKLR

SEQ ID NO: 4240 - protein, 16 aa, Homo Sapiens
  ( 71 )...( 87 ): OPSR_HUMAN
NGLVLAATMKFKKLRH

SEQ ID NO: 4241 - protein, 16 aa, Homo Sapiens
  ( 72 )...( 88 ): OPSR_HUMAN
GLVLAATMKFKKLRHP

SEQ ID NO: 4242 - protein, 16 aa, Homo Sapiens
  ( 73 )...( 89 ): OPSR_HUMAN
LVLAATMKFKKLRHPL

SEQ ID NO: 4243 - protein, 16 aa, Homo Sapiens
  ( 77 )...( 93 ): OPSR_HUMAN
ATMKFKKLRHPLNWIL

SEQ ID NO: 4244 - protein, 16 aa, Homo Sapiens
  ( 78 )...( 94 ): OPSR_HUMAN
TMKFKKLRHPLNWILV

SEQ ID NO: 4245 - protein, 16 aa, Homo Sapiens
  ( 79 )...( 95 ): OPSR_HUMAN
MKFKKLRHPLNWILVN

SEQ ID NO: 4246 - protein, 16 aa, Homo Sapiens
  ( 80 )...( 96 ): OPSR_HUMAN
KFKKLRHPLNWILVNL

SEQ ID NO: 4247 - protein, 16 aa, Homo Sapiens
  ( 82 )...( 98 ): OPSR_HUMAN
KKLRHPLNWILVNLAV

SEQ ID NO: 4248 - protein, 16 aa, Homo Sapiens
  ( 239 )...( 255 ): OPSR_HUMAN
YLQVWLAIRAVAKQQK

SEQ ID NO: 4249 - protein, 16 aa, Homo Sapiens
  ( 287 )...( 303 ): OX1R_HUMAN
VKQMRARRKTAKMLMV

SEQ ID NO: 4250 - protein, 16 aa, Homo Sapiens
  ( 288 )...( 304 ): OX1R_HUMAN
KQMRARRKTAKMLMVV

SEQ ID NO: 4251 - protein, 16 aa, Homo Sapiens
  ( 289 )...( 305 ): OX1R_HUMAN
QMRARRKTAKMLMVVL

SEQ ID NO: 4252 - protein, 16 aa, Homo Sapiens
  ( 290 )...( 306 ): OX1R_HUMAN
MRARRKTAKMLMVVLL

SEQ ID NO: 4253 - protein, 16 aa, Homo Sapiens
  ( 291 )...( 307 ): OX1R_HUMAN
RARRKTAKMLMVVLLV

SEQ ID NO: 4254 - protein, 16 aa, Homo Sapiens
  ( 292 )...( 308 ): OX1R_HUMAN
ARRKTAKMLMVVLLVF

SEQ ID NO: 4255 - protein, 16 aa, Homo Sapiens
  ( 293 )...( 309 ): OX1R_HUMAN
RRKTAKMLMVVLLVFA

SEQ ID NO: 4256 - protein, 16 aa, Homo Sapiens
  ( 294 )...( 310 ): OX1R_HUMAN
RKTAKMLMVVLLVFAL

SEQ ID NO: 4257 - protein, 16 aa, Homo Sapiens
  ( 300 )...( 316 ): OX2R_HUMAN
RKTARMLMVVLLVFAI

SEQ ID NO: 4258 - protein, 16 aa, Homo Sapiens
  ( 289 )...( 305 ): OXB2_HUMAN
IYSIKTKQIQYGIIRL

SEQ ID NO: 4259 - protein, 16 aa, Homo Sapiens
  ( 290 )...( 306 ): OXB2_HUMAN
YSIKTKQIQYGIIRLL

SEQ ID NO: 4260 - protein, 16 aa, Homo Sapiens
  ( 291 )...( 307 ): OXB2_HUMAN
SIKTKQIQYGIIRLLS

SEQ ID NO: 4261 - protein, 16 aa, Homo Sapiens
  ( 292 )...( 308 ): OXB2_HUMAN
IKTKQIQYGIIRLLSK

SEQ ID NO: 4262 - protein, 16 aa, Homo Sapiens
  ( 293 )...( 309 ): OXB2_HUMAN
KTKQIQYGIIRLLSKH

SEQ ID NO: 4263 - protein, 16 aa, Homo Sapiens
  ( 294 )...( 310 ): OXB2_HUMAN
TKQIQYGIIRLLSKHR

SEQ ID NO: 4264 - protein, 16 aa, Homo Sapiens
  ( 295 )...( 311 ): OXB2_HUMAN
KQIQYGIIRLLSKHRF

SEQ ID NO: 4265 - protein, 16 aa, Homo Sapiens
  ( 283 )...( 299 ): OXB4_HUMAN
FVNPIIYSIKTKQIQR

SEQ ID NO: 4266 - protein, 16 aa, Homo Sapiens
  ( 284 )...( 300 ): OXB4_HUMAN
VNPIIYSIKTKQIQRS

SEQ ID NO: 4267 - protein, 16 aa, Homo Sapiens
  ( 285 )...( 301 ): OXB4_HUMAN
NPIIYSIKTKQIQRSI

SEQ ID NO: 4268 - protein, 16 aa, Homo Sapiens
  ( 286 )...( 302 ): OXB4_HUMAN
PIIYSIKTKQIQRSII

SEQ ID NO: 4269 - protein, 16 aa, Homo Sapiens
  ( 287 )...( 303 ): OXB4_HUMAN
IIYSIKTKQIQRSIIR

SEQ ID NO: 4270 - protein, 16 aa, Homo Sapiens
  ( 288 )...( 304 ): OXB4_HUMAN
IYSIKTKQIQRSIIRL

SEQ ID NO: 4271 - protein, 16 aa, Homo Sapiens
  ( 289 )...( 305 ): OXB4_HUMAN
YSIKTKQIQRSIIRLF

SEQ ID NO: 4272 - protein, 16 aa, Homo Sapiens
  ( 290 )...( 306 ): OXB4_HUMAN
SIKTKQIQRSIIRLFS

SEQ ID NO: 4273 - protein, 16 aa, Homo Sapiens
  ( 291 )...( 307 ): OXB4_HUMAN
IKTKQIQRSIIRLFSG

SEQ ID NO: 4274 - protein, 16 aa, Homo Sapiens
  ( 220 )...( 236 ): OXE2_HUMAN
IIRTVLQLPSKSERAK

SEQ ID NO: 4275 - protein, 16 aa, Homo Sapiens
  ( 284 )...( 300 ): OXE2_HUMAN
PVINPIIYGAKTKQIR

SEQ ID NO: 4276 - protein, 16 aa, Homo Sapiens
  ( 285 )...( 301 ): OXE2_HUMAN
VINPIIYGAKTKQIRT

SEQ ID NO: 4277 - protein, 16 aa, Homo Sapiens
  ( 286 )...( 302 ): OXE2_HUMAN
INPIIYGAKTKQIRTR

SEQ ID NO: 4278 - protein, 16 aa, Homo Sapiens
  ( 287 )...( 303 ): OXE2_HUMAN
NPIIYGAKTKQIRTRV

SEQ ID NO: 4279 - protein, 16 aa, Homo Sapiens
  ( 288 )...( 304 ): OXE2_HUMAN
PIIYGAKTKQIRTRVL

SEQ ID NO: 4280 - protein, 16 aa, Homo Sapiens
  ( 289 )...( 305 ): OXE2_HUMAN
IIYGAKTKQIRTRVLA

SEQ ID NO: 4281 - protein, 16 aa, Homo Sapiens
  ( 290 )...( 306 ): OXE2_HUMAN
IYGAKTKQIRTRVLAM

SEQ ID NO: 4282 - protein, 16 aa, Homo Sapiens
  ( 292 )...( 308 ): OXE2_HUMAN
GAKTKQIRTRVLAMFK

SEQ ID NO: 4283 - protein, 16 aa, Homo Sapiens
  ( 293 )...( 309 ): OXE2_HUMAN
AKTKQIRTRVLAMFKI

SEQ ID NO: 4284 - protein, 16 aa, Homo Sapiens
  ( 294 )...( 310 ): OXE2_HUMAN
KTKQIRTRVLAMFKIS

SEQ ID NO: 4285 - protein, 16 aa, Homo Sapiens
  ( 288 )...( 304 ): OXI1_HUMAN
MLNPIIYSVKTKEIRK

SEQ ID NO: 4286 - protein, 16 aa, Homo Sapiens
  ( 289 )...( 305 ): OXI1_HUMAN
LNPIIYSVKTKEIRKG

SEQ ID NO: 4287 - protein, 16 aa, Homo Sapiens
  ( 290 )...( 306 ): OXI1_HUMAN
NPIIYSVKTKEIRKGI

SEQ ID NO: 4288 - protein, 16 aa, Homo Sapiens
  ( 291 )...( 307 ): OXI1_HUMAN
PIIYSVKTKEIRKGIL

SEQ ID NO: 4289 - protein, 16 aa, Homo Sapiens
  ( 292 )...( 308 ): OXI1_HUMAN
IIYSVKTKEIRKGILK

SEQ ID NO: 4290 - protein, 16 aa, Homo Sapiens
  ( 293 )...( 309 ): OXI1_HUMAN
IYSVKTKEIRKGILKF

SEQ ID NO: 4291 - protein, 16 aa, Homo Sapiens
  ( 295 )...( 311 ): OXI1_HUMAN
SVKTKEIRKGILKFFH

SEQ ID NO: 4292 - protein, 16 aa, Homo Sapiens
  ( 296 )...( 312 ): OXI1_HUMAN
VKTKEIRKGILKFFHK

SEQ ID NO: 4293 - protein, 15 aa, Homo Sapiens
  ( 300 )...( 316 ): OXI1_HUMAN
EIRKGILKFFHKSQA

SEQ ID NO: 4294 - protein, 14 aa, Homo Sapiens
  ( 301 )...( 317 ): OXI1_HUMAN
IRKGILKFFHKSQA

SEQ ID NO: 4295 - protein, 16 aa, Homo Sapiens
  ( 220 )...( 236 ): OXYR_HUMAN
YGLISFKIWQNLRLKT

SEQ ID NO: 4296 - protein, 16 aa, Homo Sapiens
  ( 221 )...( 237 ): OXYR_HUMAN
GLISFKIWQNLRLKTA

SEQ ID NO: 4297 - protein, 16 aa, Homo Sapiens
  ( 222 )...( 238 ): OXYR_HUMAN
LISFKIWQNLRLKTAA

SEQ ID NO: 4298 - protein, 16 aa, Homo Sapiens
  ( 255 )...( 271 ): OXYR_HUMAN
VALARVSSVKLISKAK

SEQ ID NO: 4299 - protein, 16 aa, Homo Sapiens
  ( 256 )...( 272 ): OXYR_HUMAN
ALARVSSVKLISKAKI

SEQ ID NO: 4300 - protein, 16 aa, Homo Sapiens
  ( 257 )...( 273 ): OXYR_HUMAN
LARVSSVKLISKAKIR

SEQ ID NO: 4301 - protein, 16 aa, Homo Sapiens
  ( 259 )...( 275 ): OXYR_HUMAN
RVSSVKLISKAKIRTV

SEQ ID NO: 4302 - protein, 16 aa, Homo Sapiens
  ( 260 )...( 276 ): OXYR_HUMAN
VSSVKLISKAKIRTVK

SEQ ID NO: 4303 - protein, 16 aa, Homo Sapiens
  ( 261 )...( 277 ): OXYR_HUMAN
SSVKLISKAKIRTVKM

SEQ ID NO: 4304 - protein, 16 aa, Homo Sapiens
  ( 262 )...( 278 ): OXYR_HUMAN
SVKLISKAKIRTVKMT

SEQ ID NO: 4305 - protein, 16 aa, Homo Sapiens
  ( 263 )...( 279 ): OXYR_HUMAN
VKLISKAKIRTVKMTF

SEQ ID NO: 4306 - protein, 16 aa, Homo Sapiens
  ( 264 )...( 280 ): OXYR_HUMAN
KLISKAKIRTVKMTFI

SEQ ID NO: 4307 - protein, 16 aa, Homo Sapiens
  ( 265 )...( 281 ): OXYR_HUMAN
LISKAKIRTVKMTFII

SEQ ID NO: 4308 - protein, 16 aa, Homo Sapiens
  ( 266 )...( 282 ): OXYR_HUMAN
ISKAKIRTVKMTFIIV

SEQ ID NO: 4309 - protein, 16 aa, Homo Sapiens
  ( 267 )...( 283 ): OXYR_HUMAN
SKAKIRTVKMTFIIVL

SEQ ID NO: 4310 - protein, 16 aa, Homo Sapiens
  ( 268 )...( 284 ): OXYR_HUMAN
KAKIRTVKMTFIIVLA

SEQ ID NO: 4311 - protein, 16 aa, Homo Sapiens
  ( 269 )...( 285 ): OXYR_HUMAN
AKIRTVKMTFIIVLAF

SEQ ID NO: 4312 - protein, 16 aa, Homo Sapiens
  ( 270 )...( 286 ): OXYR_HUMAN
KIRTVKMTFIIVLAFI

SEQ ID NO: 4313 - protein, 16 aa, Homo Sapiens
  ( 293 )...( 309 ): OYA1_HUMAN
LVYGAKTTQIRIHVVK

SEQ ID NO: 4314 - protein, 16 aa, Homo Sapiens
  ( 294 )...( 310 ): OYD1_HUMAN
ILYGARTKEIRSRLLK

SEQ ID NO: 4315 - protein, 16 aa, Homo Sapiens
  ( 295 )...( 311 ): OYD1_HUMAN
LYGARTKEIRSRLLKL

SEQ ID NO: 4316 - protein, 16 aa, Homo Sapiens
  ( 296 )...( 312 ): OYD1_HUMAN
YGARTKEIRSRLLKLL

SEQ ID NO: 4317 - protein, 16 aa, Homo Sapiens
  ( 298 )...( 314 ): OYD1_HUMAN
ARTKEIRSRLLKLLHL

SEQ ID NO: 4318 - protein, 16 aa, Homo Sapiens
  ( 299 )...( 315 ): OYD1_HUMAN
RTKEIRSRLLKLLHLG

SEQ ID NO: 4319 - protein, 16 aa, Homo Sapiens
  ( 300 )...( 316 ): OYD1_HUMAN
TKEIRSRLLKLLHLGK

SEQ ID NO: 4320 - protein, 16 aa, Homo Sapiens
  ( 301 )...( 317 ): OYD1_HUMAN
KEIRSRLLKLLHLGKT

SEQ ID NO: 4321 - protein, 16 aa, Homo Sapiens
  ( 302 )...( 318 ): OYD1_HUMAN
EIRSRLLKLLHLGKTS

SEQ ID NO: 4322 - protein, 16 aa, Homo Sapiens
  ( 303 )...( 319 ): OYD1_HUMAN
IRSRLLKLLHLGKTSI

SEQ ID NO: 4323 - protein, 15 aa, Homo Sapiens
  ( 304 )...( 320 ): OYD1_HUMAN
RSRLLKLLHLGKTSI

SEQ ID NO: 4324 - protein, 14 aa, Homo Sapiens
  ( 305 )...( 321 ): OYD1_HUMAN
SRLLKLLHLGKTSI

SEQ ID NO: 4325 - protein, 13 aa, Homo Sapiens
  ( 306 )...( 322 ): OYD1_HUMAN
RLLKLLHLGKTSI

SEQ ID NO: 4326 - protein, 16 aa, Homo Sapiens
  ( 236 )...( 252 ): P2UR_HUMAN
LPRAKRKSVRTIAVVL

SEQ ID NO: 4327 - protein, 16 aa, Homo Sapiens
  ( 238 )...( 254 ): P2UR_HUMAN
RAKRKSVRTIAVVLAV

SEQ ID NO: 4328 - protein, 16 aa, Homo Sapiens
  ( 239 )...( 255 ): P2UR_HUMAN
AKRKSVRTIAVVLAVF

SEQ ID NO: 4329 - protein, 16 aa, Homo Sapiens
  ( 240 )...( 256 ): P2UR_HUMAN
KRKSVRTIAVVLAVFA

SEQ ID NO: 4330 - protein, 16 aa, Homo Sapiens
  ( 241 )...( 257 ): P2UR_HUMAN
RKSVRTIAVVLAVFAL

SEQ ID NO: 4331 - protein, 16 aa, Homo Sapiens
  ( 279 )...( 295 ): P2Y4_HUMAN
RVLNIVNVVYKVTRPL

SEQ ID NO: 4332 - protein, 16 aa, Homo Sapiens
  ( 115 )...( 131 ): P2Y5_HUMAN
FLAIVYPFKSKTLRTK

SEQ ID NO: 4333 - protein, 16 aa, Homo Sapiens
  ( 116 )...( 132 ): P2Y5_HUMAN
LAIVYPFKSKTLRTKR

SEQ ID NO: 4334 - protein, 16 aa, Homo Sapiens
  ( 204 )...( 220 ): P2Y5_HUMAN
SSMVLKTLTKPVTLSR

SEQ ID NO: 4335 - protein, 16 aa, Homo Sapiens
  ( 205 )...( 221 ): P2Y5_HUMAN
SMVLKTLTKPVTLSRS

SEQ ID NO: 4336 - protein, 16 aa, Homo Sapiens
  ( 206 )...( 222 ): P2Y5_HUMAN
MVLKTLTKPVTLSRSK

SEQ ID NO: 4337 - protein, 16 aa, Homo Sapiens
  ( 207 )...( 223 ): P2Y5_HUMAN
VLKTLTKPVTLSRSKI

SEQ ID NO: 4338 - protein, 16 aa, Homo Sapiens
  ( 208 )...( 224 ): P2Y5_HUMAN
LKTLTKPVTLSRSKIN

SEQ ID NO: 4339 - protein, 16 aa, Homo Sapiens
  ( 213 )...( 229 ): P2Y5_HUMAN
KPVTLSRSKINKTKVL

SEQ ID NO: 4340 - protein, 16 aa, Homo Sapiens
  ( 214 )...( 230 ): P2Y5_HUMAN
PVTLSRSKINKTKVLK

SEQ ID NO: 4341 - protein, 16 aa, Homo Sapiens
  ( 215 )...( 231 ): P2Y5_HUMAN
VTLSRSKINKTKVLKM

SEQ ID NO: 4342 - protein, 16 aa, Homo Sapiens
  ( 216 )...( 232 ): P2Y5_HUMAN
TLSRSKINKTKVLKMI

SEQ ID NO: 4343 - protein, 16 aa, Homo Sapiens
  ( 217 )...( 233 ): P2Y5_HUMAN
LSRSKINKTKVLKMIF

SEQ ID NO: 4344 - protein, 16 aa, Homo Sapiens
  ( 218 )...( 234 ): P2Y5_HUMAN
SRSKINKTKVLKMIFV

SEQ ID NO: 4345 - protein, 16 aa, Homo Sapiens
  ( 219 )...( 235 ): P2Y5_HUMAN
RSKINKTKVLKMIFVH

SEQ ID NO: 4346 - protein, 16 aa, Homo Sapiens
  ( 220 )...( 236 ): P2Y5_HUMAN
SKINKTKVLKMIFVHL

SEQ ID NO: 4347 - protein, 16 aa, Homo Sapiens
  ( 221 )...( 237 ): P2Y5_HUMAN
KINKTKVLKMIFVHLI

SEQ ID NO: 4348 - protein, 16 aa, Homo Sapiens
  ( 222 )...( 238 ): P2Y5_HUMAN
INKTKVLKMIFVHLII

SEQ ID NO: 4349 - protein, 16 aa, Homo Sapiens
  ( 223 )...( 239 ): P2Y5_HUMAN
NKTKVLKMIFVHLIIF

SEQ ID NO: 4350 - protein, 14 aa, Homo Sapiens
  ( 315 )...( 331 ): P2Y6_HUMAN
LLQKLTAKWQRQGR

SEQ ID NO: 4351 - protein, 16 aa, Homo Sapiens
  ( 38 )...( 54 ): P2Y7_HUMAN
FVVWSILKRMQKRSVT

SEQ ID NO: 4352 - protein, 16 aa, Homo Sapiens
  ( 39 )...( 55 ): P2Y7_HUMAN
VVWSILKRMQKRSVTA

SEQ ID NO: 4353 - protein, 16 aa, Homo Sapiens
  ( 40 )...( 56 ): P2Y7_HUMAN
VWSILKRMQKRSVTAL

SEQ ID NO: 4354 - protein, 16 aa, Homo Sapiens
  ( 42 )...( 58 ): P2Y7_HUMAN
SILKRMQKRSVTALMV

SEQ ID NO: 4355 - protein, 16 aa, Homo Sapiens
  ( 43 )...( 59 ): P2Y7_HUMAN
ILKRMQKRSVTALMVL

SEQ ID NO: 4356 - protein, 16 aa, Homo Sapiens
  ( 44 )...( 60 ): P2Y7_HUMAN
LKRMQKRSVTALMVLN

SEQ ID NO: 4357 - protein, 16 aa, Homo Sapiens
  ( 45 )...( 61 ): P2Y7_HUMAN
KRMQKRSVTALMVLNL

SEQ ID NO: 4358 - protein, 16 aa, Homo Sapiens
  ( 126 )...( 142 ): P2Y7_HUMAN
QKLRTKAMARRVLAGI

SEQ ID NO: 4359 - protein, 16 aa, Homo Sapiens
  ( 256 )...( 272 ): P2Y7_HUMAN
LGLVGKRLSLARNVLI

SEQ ID NO: 4360 - protein, 16 aa, Homo Sapiens
  ( 258 )...( 274 ): P2Y7_HUMAN
LVGKRLSLARNVLIAL

SEQ ID NO: 4361 - protein, 16 aa, Homo Sapiens
  ( 225 )...( 241 ): P2Y9_HUMAN
SVVLRTLRKPATLSQI

SEQ ID NO: 4362 - protein, 16 aa, Homo Sapiens
  ( 226 )...( 242 ): P2Y9_HUMAN
VVLRTLRKPATLSQIG

SEQ ID NO: 4363 - protein, 16 aa, Homo Sapiens
  ( 227 )...( 243 ): P2Y9_HUMAN
VLRTLRKPATLSQIGT

SEQ ID NO: 4364 - protein, 16 aa, Homo Sapiens
  ( 235 )...( 251 ): P2Y9_HUMAN
ATLSQIGTNKKKVLKM

SEQ ID NO: 4365 - protein, 16 aa, Homo Sapiens
  ( 236 )...( 252 ): P2Y9_HUMAN
TLSQIGTNKKKVLKMI

SEQ ID NO: 4366 - protein, 16 aa, Homo Sapiens
  ( 237 )...( 253 ): P2Y9_HUMAN
LSQIGTNKKKVLKMIT

SEQ ID NO: 4367 - protein, 16 aa, Homo Sapiens
  ( 238 )...( 254 ): P2Y9_HUMAN
SQIGTNKKKVLKMITV

SEQ ID NO: 4368 - protein, 16 aa, Homo Sapiens
  ( 239 )...( 255 ): P2Y9_HUMAN
QIGTNKKKVLKMITVH

SEQ ID NO: 4369 - protein, 16 aa, Homo Sapiens
  ( 241 )...( 257 ): P2Y9_HUMAN
GTNKKKVLKMITVHMA

SEQ ID NO: 4370 - protein, 16 aa, Homo Sapiens
  ( 242 )...( 258 ): P2Y9_HUMAN
TNKKKVLKMITVHMAV

SEQ ID NO: 4371 - protein, 16 aa, Homo Sapiens
  ( 243 )...( 259 ): P2Y9_HUMAN
NKKKVLKMITVHMAVF

SEQ ID NO: 4372 - protein, 16 aa, Homo Sapiens
  ( 150 )...( 166 ): P2YR_HUMAN
YSGVVYPLKSLGRLKK

SEQ ID NO: 4373 - protein, 16 aa, Homo Sapiens
  ( 151 )...( 167 ): P2YR_HUMAN
SGVVYPLKSLGRLKKK

SEQ ID NO: 4374 - protein, 16 aa, Homo Sapiens
  ( 152 )...( 168 ): P2YR_HUMAN
GVVYPLKSLGRLKKKN

SEQ ID NO: 4375 - protein, 16 aa, Homo Sapiens
  ( 153 )...( 169 ): P2YR_HUMAN
VVYPLKSLGRLKKKNA

SEQ ID NO: 4376 - protein, 16 aa, Homo Sapiens
  ( 154 )...( 170 ): P2YR_HUMAN
VYPLKSLGRLKKKNAI

SEQ ID NO: 4377 - protein, 16 aa, Homo Sapiens
  ( 156 )...( 172 ): P2YR_HUMAN
PLKSLGRLKKKNAICI

SEQ ID NO: 4378 - protein, 16 aa, Homo Sapiens
  ( 157 )...( 173 ): P2YR_HUMAN
LKSLGRLKKKNAICIS

SEQ ID NO: 4379 - protein, 16 aa, Homo Sapiens
  ( 159 )...( 175 ): P2YR_HUMAN
SLGRLKKKNAICISVL

SEQ ID NO: 4380 - protein, 16 aa, Homo Sapiens
  ( 160 )...( 176 ): P2YR_HUMAN
LGRLKKKNAICISVLV

SEQ ID NO: 4381 - protein, 16 aa, Homo Sapiens
  ( 161 )...( 177 ): P2YR_HUMAN
GRLKKKNAICISVLVW

SEQ ID NO: 4382 - protein, 16 aa, Homo Sapiens
  ( 162 )...( 178 ): P2YR_HUMAN
RLKKKNAICISVLVWL

SEQ ID NO: 4383 - protein, 16 aa, Homo Sapiens
  ( 163 )...( 179 ): P2YR_HUMAN
LKKKNAICISVLVWLI

SEQ ID NO: 4384 - protein, 16 aa, Homo Sapiens
  ( 164 )...( 180 ): P2YR_HUMAN
KKKNAICISVLVWLIV

SEQ ID NO: 4385 - protein, 16 aa, Homo Sapiens
  ( 252 )...( 268 ): P2YR_HUMAN
SPLRRKSIYLVIIVLT

SEQ ID NO: 4386 - protein, 16 aa, Homo Sapiens
  ( 253 )...( 269 ): P2YR_HUMAN
PLRRKSIYLVIIVLTV

SEQ ID NO: 4387 - protein, 16 aa, Homo Sapiens
  ( 254 )...( 270 ): P2YR_HUMAN
LRRKSIYLVIIVLTVF

SEQ ID NO: 4388 - protein, 16 aa, Homo Sapiens
  ( 255 )...( 271 ): P2YR_HUMAN
RRKSIYLVIIVLTVFA

SEQ ID NO: 4389 - protein, 16 aa, Homo Sapiens
  ( 130 )...( 146 ): PAFR_HUMAN
TRKRGISLSLVIWVAI

SEQ ID NO: 4390 - protein, 16 aa, Homo Sapiens
  ( 131 )...( 147 ): PAFR_HUMAN
RKRGISLSLVIWVAIV

SEQ ID NO: 4391 - protein, 16 aa, Homo Sapiens
  ( 119 )...( 135 ): PAR1_HUMAN
LNIMAIVVFILKMKVK

SEQ ID NO: 4392 - protein, 16 aa, Homo Sapiens
  ( 120 )...( 136 ): PAR1_HUMAN
NIMAIVVFILKMKVKK

SEQ ID NO: 4393 - protein, 16 aa, Homo Sapiens
  ( 121 )...( 137 ): PAR1_HUMAN
IMAIVVFILKMKVKKP

SEQ ID NO: 4394 - protein, 16 aa, Homo Sapiens
  ( 122 )...( 138 ): PAR1_HUMAN
MAIVVFILKMKVKKPA

SEQ ID NO: 4395 - protein, 16 aa, Homo Sapiens
  ( 123 )...( 139 ): PAR1_HUMAN
AIVVFILKMKVKKPAV

SEQ ID NO: 4396 - protein, 16 aa, Homo Sapiens
  ( 124 )...( 140 ): PAR1_HUMAN
IVVFILKMKVKKPAVV

SEQ ID NO: 4397 - protein, 16 aa, Homo Sapiens
  ( 125 )...( 141 ): PAR1_HUMAN
VVFILKMKVKKPAVVY

SEQ ID NO: 4398 - protein, 16 aa, Homo Sapiens
  ( 126 )...( 142 ): PAR1_HUMAN
VFILKMKVKKPAVVYM

SEQ ID NO: 4399 - protein, 16 aa, Homo Sapiens
  ( 127 )...( 143 ): PAR1_HUMAN
FILKMKVKKPAVVYML

SEQ ID NO: 4400 - protein, 16 aa, Homo Sapiens
  ( 128 )...( 144 ): PAR1_HUMAN
ILKMKVKKPAVVYMLH

SEQ ID NO: 4401 - protein, 16 aa, Homo Sapiens
  ( 129 )...( 145 ): PAR1_HUMAN
LKMKVKKPAVVYMLHL

SEQ ID NO: 4402 - protein, 16 aa, Homo Sapiens
  ( 130 )...( 146 ): PAR1_HUMAN
KMKVKKPAVVYMLHLA

SEQ ID NO: 4403 - protein, 16 aa, Homo Sapiens
  ( 131 )...( 147 ): PAR1_HUMAN
MKVKKPAVVYMLHLAT

SEQ ID NO: 4404 - protein, 16 aa, Homo Sapiens
  ( 132 )...( 148 ): PAR1_HUMAN
KVKKPAVVYMLHLATA

SEQ ID NO: 4405 - protein, 16 aa, Homo Sapiens
  ( 97 )...( 113 ): PAR2_HUMAN
LWVFLFRTKKKHPAVI

SEQ ID NO: 4406 - protein, 16 aa, Homo Sapiens
  ( 98 )...( 114 ): PAR2_HUMAN
WVFLFRTKKKHPAVIY

SEQ ID NO: 4407 - protein, 16 aa, Homo Sapiens
  ( 99 )...( 115 ): PAR2_HUMAN
VFLFRTKKKHPAVIYM

SEQ ID NO: 4408 - protein, 16 aa, Homo Sapiens
  ( 104 )...( 120 ): PAR2_HUMAN
TKKKHPAVIYMANLAL

SEQ ID NO: 4409 - protein, 16 aa, Homo Sapiens
  ( 185 )...( 201 ): PAR2_HUMAN
RKKANIAIGISLAIWL

SEQ ID NO: 4410 - protein, 16 aa, Homo Sapiens
  ( 278 )...( 294 ): PAR2_HUMAN
SEKKRKRAIKLIVTVL

SEQ ID NO: 4411 - protein, 16 aa, Homo Sapiens
  ( 279 )...( 295 ): PAR2_HUMAN
EKKRKRAIKLIVTVLA

SEQ ID NO: 4412 - protein, 16 aa, Homo Sapiens
  ( 280 )...( 296 ): PAR2_HUMAN
KKRKRAIKLIVTVLAM

SEQ ID NO: 4413 - protein, 16 aa, Homo Sapiens
  ( 281 )...( 297 ): PAR2_HUMAN
KRKRAIKLIVTVLAMY

SEQ ID NO: 4414 - protein, 16 aa, Homo Sapiens
  ( 282 )...( 298 ): PAR2_HUMAN
RKRAIKLIVTVLAMYL

SEQ ID NO: 4415 - protein, 16 aa, Homo Sapiens
  ( 283 )...( 299 ): PAR2_HUMAN
KRAIKLIVTVLAMYLI

SEQ ID NO: 4416 - protein, 16 aa, Homo Sapiens
  ( 349 )...( 365 ): PE21_HUMAN
WVYILLRQAVLRQLLR

SEQ ID NO: 4417 - protein, 16 aa, Homo Sapiens
  ( 350 )...( 366 ): PE21_HUMAN
VYILLRQAVLRQLLRL

SEQ ID NO: 4418 - protein, 16 aa, Homo Sapiens
  ( 351 )...( 367 ): PE21_HUMAN
YILLRQAVLRQLLRLL

SEQ ID NO: 4419 - protein, 16 aa, Homo Sapiens
  ( 170 )...( 186 ): PE23_HUMAN
KTRATRAVLLGVWLAV

SEQ ID NO: 4420 - protein, 16 aa, Homo Sapiens
  ( 341 )...( 357 ): PE23_HUMAN
LDPWVYLLLRKILLRK

SEQ ID NO: 4421 - protein, 16 aa, Homo Sapiens
  ( 344 )...( 360 ): PE23_HUMAN
WVYLLLRKILLRKFCQ

SEQ ID NO: 4422 - protein, 16 aa, Homo Sapiens
  ( 345 )...( 361 ): PE23_HUMAN
VYLLLRKILLRKFCQI

SEQ ID NO: 4423 - protein, 16 aa, Homo Sapiens
  ( 346 )...( 362 ): PE23_HUMAN
YLLLRKILLRKFCQIR

SEQ ID NO: 4424 - protein, 16 aa, Homo Sapiens
  ( 347 )...( 363 ): PE23_HUMAN
LLLRKILLRKFCQIRY

SEQ ID NO: 4425 - protein, 16 aa, Homo Sapiens
  ( 32 )...( 48 ): PE24_HUMAN
VVGNLVAIVVLCKSRK

SEQ ID NO: 4426 - protein, 16 aa, Homo Sapiens
  ( 35 )...( 51 ): PE24_HUMAN
NLVAIVVLCKSRKEQK

SEQ ID NO: 4427 - protein, 16 aa, Homo Sapiens
  ( 326 )...( 342 ): PE24_HUMAN
PWIYILLRKTVLSKAI

SEQ ID NO: 4428 - protein, 16 aa, Homo Sapiens
  ( 328 )...( 344 ): PE24_HUMAN
IYILLRKTVLSKAIEK

SEQ ID NO: 4429 - protein, 16 aa, Homo Sapiens
  ( 329 )...( 345 ): PE24_HUMAN
YILLRKTVLSKAIEKI

SEQ ID NO: 4430 - protein, 16 aa, Homo Sapiens
  ( 330 )...( 346 ): PE24_HUMAN
ILLRKTVLSKAIEKIK

SEQ ID NO: 4431 - protein, 16 aa, Homo Sapiens
  ( 331 )...( 347 ): PE24_HUMAN
LLRKTVLSKAIEKIKC

SEQ ID NO: 4432 - protein, 16 aa, Homo Sapiens
  ( 332 )...( 348 ): PE24_HUMAN
LRKTVLSKAIEKIKCL

SEQ ID NO: 4433 - protein, 16 aa, Homo Sapiens
  ( 333 )...( 349 ): PE24_HUMAN
RKTVLSKAIEKIKCLF

SEQ ID NO: 4434 - protein, 16 aa, Homo Sapiens
  ( 46 )...( 62 ): PF2R_HUMAN
LAIAILMKAYQRFRQK

SEQ ID NO: 4435 - protein, 16 aa, Homo Sapiens
  ( 48 )...( 64 ): PF2R_HUMAN
IAILMKAYQRFRQKSK

SEQ ID NO: 4436 - protein, 16 aa, Homo Sapiens
  ( 135 )...( 151 ): PF2R_HUMAN
IGVTKPIFHSTKITSK

SEQ ID NO: 4437 - protein, 16 aa, Homo Sapiens
  ( 137 )...( 153 ): PF2R_HUMAN
VTKPIFHSTKITSKHV

SEQ ID NO: 4438 - protein, 16 aa, Homo Sapiens
  ( 139 )...( 155 ): PF2R_HUMAN
KPIFHSTKITSKHVKM

SEQ ID NO: 4439 - protein, 16 aa, Homo Sapiens
  ( 218 )...( 234 ): PF2R_HUMAN
LCNAITGITLLRVKFK

SEQ ID NO: 4440 - protein, 16 aa, Homo Sapiens
  ( 220 )...( 236 ): PF2R_HUMAN
NAITGITLLRVKFKSQ

SEQ ID NO: 4441 - protein, 16 aa, Homo Sapiens
  ( 221 )...( 237 ): PF2R_HUMAN
AITGITLLRVKFKSQQ

SEQ ID NO: 4442 - protein, 16 aa, Homo Sapiens
  ( 222 )...( 238 ): PF2R_HUMAN
ITGITLLRVKFKSQQH

SEQ ID NO: 4443 - protein, 16 aa, Homo Sapiens
  ( 301 )...( 317 ): PF2R_HUMAN
PWVYILLRKAVLKNLY

SEQ ID NO: 4444 - protein, 16 aa, Homo Sapiens
  ( 302 )...( 318 ): PF2R_HUMAN
WVYILLRKAVLKNLYK

SEQ ID NO: 4445 - protein, 16 aa, Homo Sapiens
  ( 303 )...( 319 ): PF2R_HUMAN
VYILLRKAVLKNLYKL

SEQ ID NO: 4446 - protein, 16 aa, Homo Sapiens
  ( 304 )...( 320 ): PF2R_HUMAN
YILLRKAVLKNLYKLA

SEQ ID NO: 4447 - protein, 16 aa, Homo Sapiens
  ( 305 )...( 321 ): PF2R_HUMAN
ILLRKAVLKNLYKLAS

SEQ ID NO: 4448 - protein, 16 aa, Homo Sapiens
  ( 306 )...( 322 ): PF2R_HUMAN
LLRKAVLKNLYKLASQ

SEQ ID NO: 4449 - protein, 16 aa, Homo Sapiens
  ( 290 )...( 306 ): PI2R_HUMAN
WVFILFRKAVFQRLKL

SEQ ID NO: 4450 - protein, 16 aa, Homo Sapiens
  ( 291 )...( 307 ): PI2R_HUMAN
VFILFRKAVFQRLKLW

SEQ ID NO: 4451 - protein, 16 aa, Homo Sapiens
  ( 292 )...( 308 ): PI2R_HUMAN
FILFRKAVFQRLKLWV

SEQ ID NO: 4452 - protein, 16 aa, Homo Sapiens
  ( 354 )...( 370 ): PTR2_HUMAN
TRKQYRKLAKSTLVLV

SEQ ID NO: 4453 - protein, 16 aa, Homo Sapiens
  ( 355 )...( 371 ): PTR2_HUMAN
RKQYRKLAKSTLVLVL

SEQ ID NO: 4454 - protein, 16 aa, Homo Sapiens
  ( 356 )...( 372 ): PTR2_HUMAN
KQYRKLAKSTLVLVLV

SEQ ID NO: 4455 - protein, 16 aa, Homo Sapiens
  ( 357 )...( 373 ): PTR2_HUMAN
QYRKLAKSTLVLVLVF

SEQ ID NO: 4456 - protein, 16 aa, Homo Sapiens
  ( 358 )...( 374 ): PTR2_HUMAN
YRKLAKSTLVLVLVFG

SEQ ID NO: 4457 - protein, 16 aa, Homo Sapiens
  ( 359 )...( 375 ): PTR2_HUMAN
RKLAKSTLVLVLVFGV

SEQ ID NO: 4458 - protein, 16 aa, Homo Sapiens
  ( 375 )...( 391 ): PTRR_HUMAN
FILFINIVRVLATKLR

SEQ ID NO: 4459 - protein, 16 aa, Homo Sapiens
  ( 398 )...( 414 ): PTRR_HUMAN
DTRQQYRKLLKSTLVL

SEQ ID NO: 4460 - protein, 16 aa, Homo Sapiens
  ( 399 )...( 415 ): PTRR_HUMAN
TRQQYRKLLKSTLVLM

SEQ ID NO: 4461 - protein, 16 aa, Homo Sapiens
  ( 400 )...( 416 ): PTRR_HUMAN
RQQYRKLLKSTLVLMP

SEQ ID NO: 4462 - protein, 16 aa, Homo Sapiens
  ( 401 )...( 417 ): PTRR_HUMAN
QQYRKLLKSTLVLMPL

SEQ ID NO: 4463 - protein, 16 aa, Homo Sapiens
  ( 402 )...( 418 ): PTRR_HUMAN
QYRKLLKSTLVLMPLF

SEQ ID NO: 4464 - protein, 16 aa, Homo Sapiens
  ( 403 )...( 419 ): PTRR_HUMAN
YRKLLKSTLVLMPLFG

SEQ ID NO: 4465 - protein, 16 aa, Homo Sapiens
  ( 404 )...( 420 ): PTRR_HUMAN
RKLLKSTLVLMPLFGV

SEQ ID NO: 4466 - protein, 16 aa, Homo Sapiens
  ( 156 )...( 172 ): RDC1_HUMAN
RKKMVRRVVCILVWLL

SEQ ID NO: 4467 - protein, 16 aa, Homo Sapiens
  ( 157 )...( 173 ): RDC1_HUMAN
KKMVRRVVCILVWLLA

SEQ ID NO: 4468 - protein, 16 aa, Homo Sapiens
  ( 326 )...( 342 ): RDC1_HUMAN
LMKAFIFKYSAKTGLT

SEQ ID NO: 4469 - protein, 16 aa, Homo Sapiens
  ( 327 )...( 343 ): RDC1_HUMAN
MKAFIFKYSAKTGLTK

SEQ ID NO: 4470 - protein, 16 aa, Homo Sapiens
  ( 328 )...( 344 ): RDC1_HUMAN
KAFIFKYSAKTGLTKL

SEQ ID NO: 4471 - protein, 16 aa, Homo Sapiens
  ( 329 )...( 345 ): RDC1_HUMAN
AFIFKYSAKTGLTKLI

SEQ ID NO: 4472 - protein, 16 aa, Homo Sapiens
  ( 132 )...( 148 ): SCRC_HUMAN
NEKRHSYLLKLKVMYT

SEQ ID NO: 4473 - protein, 16 aa, Homo Sapiens
  ( 308 )...( 324 ): SCRC_HUMAN
INFILFINILRILMRK

SEQ ID NO: 4474 - protein, 16 aa, Homo Sapiens
  ( 309 )...( 325 ): SCRC_HUMAN
NFILFINILRILMRKL

SEQ ID NO: 4475 - protein, 16 aa, Homo Sapiens
  ( 310 )...( 326 ): SCRC_HUMAN
FILFINILRILMRKLR

SEQ ID NO: 4476 - protein, 16 aa, Homo Sapiens
  ( 311 )...( 327 ): SCRC_HUMAN
ILFINILRILMRKLRT

SEQ ID NO: 4477 - protein, 16 aa, Homo Sapiens
  ( 312 )...( 328 ): SCRC_HUMAN
LFINILRILMRKLRTQ

SEQ ID NO: 4478 - protein, 16 aa, Homo Sapiens
  ( 313 )...( 329 ): SCRC_HUMAN
FINILRILMRKLRTQE

SEQ ID NO: 4479 - protein, 16 aa, Homo Sapiens
  ( 314 )...( 330 ): SCRC_HUMAN
INILRILMRKLRTQET

SEQ ID NO: 4480 - protein, 16 aa, Homo Sapiens
  ( 315 )...( 331 ): SCRC_HUMAN
NILRILMRKLRTQETR

SEQ ID NO: 4481 - protein, 16 aa, Homo Sapiens
  ( 316 )...( 332 ): SCRC_HUMAN
ILRILMRKLRTQETRG

SEQ ID NO: 4482 - protein, 16 aa, Homo Sapiens
  ( 206 )...( 222 ): SRB3_HUMAN
KLLLFEYRHRKMKPVQ

SEQ ID NO: 4483 - protein, 16 aa, Homo Sapiens
  ( 76 )...( 92 ): SSR1_HUMAN
NSMVIYVILRYAKMKT

SEQ ID NO: 4484 - protein, 16 aa, Homo Sapiens
  ( 77 )...( 93 ): SSR1_HUMAN
SMVIYVILRYAKMKTA

SEQ ID NO: 4485 - protein, 16 aa, Homo Sapiens
  ( 79 )...( 95 ): SSR1_HUMAN
VIYVILRYAKMKTATN

SEQ ID NO: 4486 - protein, 16 aa, Homo Sapiens
  ( 80 )...( 96 ): SSR1_HUMAN
IYVILRYAKMKTATNI

SEQ ID NO: 4487 - protein, 16 aa, Homo Sapiens
  ( 81 )...( 97 ): SSR1_HUMAN
YVILRYAKMKTATNIY

SEQ ID NO: 4488 - protein, 16 aa, Homo Sapiens
  ( 82 )...( 98 ): SSR1_HUMAN
VILRYAKMKTATNIYI

SEQ ID NO: 4489 - protein, 16 aa, Homo Sapiens
  ( 83 )...( 99 ): SSR1_HUMAN
ILRYAKMKTATNIYIL

SEQ ID NO: 4490 - protein, 16 aa, Homo Sapiens
  ( 84 )...( 100 ): SSR1_HUMAN
LRYAKMKTATNIYILN

SEQ ID NO: 4491 - protein, 16 aa, Homo Sapiens
  ( 85 )...( 101 ): SSR1_HUMAN
RYAKMKTATNIYILNL

SEQ ID NO: 4492 - protein, 16 aa, Homo Sapiens
  ( 241 )...( 257 ): SSR1_HUMAN
LCYVLIIAKMRMVALK

SEQ ID NO: 4493 - protein, 16 aa, Homo Sapiens
  ( 243 )...( 259 ): SSR1_HUMAN
YVLIIAKMRMVALKAG

SEQ ID NO: 4494 - protein, 16 aa, Homo Sapiens
  ( 244 )...( 260 ): SSR1_HUMAN
VLIIAKMRMVALKAGW

SEQ ID NO: 4495 - protein, 16 aa, Homo Sapiens
  ( 245 )...( 261 ): SSR1_HUMAN
LIIAKMRMVALKAGWQ

SEQ ID NO: 4496 - protein, 16 aa, Homo Sapiens
  ( 246 )...( 262 ): SSR1_HUMAN
IIAKMRMVALKAGWQQ

SEQ ID NO: 4497 - protein, 16 aa, Homo Sapiens
  ( 261 )...( 277 ): SSR1_HUMAN
QRKRSERKITLMVMMV

SEQ ID NO: 4498 - protein, 16 aa, Homo Sapiens
  ( 262 )...( 278 ): SSR1_HUMAN
RKRSERKITLMVMMVV

SEQ ID NO: 4499 - protein, 16 aa, Homo Sapiens
  ( 60 )...( 76 ): SSR2_HUMAN
GNTLVIYVILRYAKMK

SEQ ID NO: 4500 - protein, 16 aa, Homo Sapiens
  ( 61 )...( 77 ): SSR2_HUMAN
NTLVIYVILRYAKMKT

SEQ ID NO: 4501 - protein, 16 aa, Homo Sapiens
  ( 62 )...( 78 ): SSR2_HUMAN
TLVIYVILRYAKMKTI

SEQ ID NO: 4502 - protein, 16 aa, Homo Sapiens
  ( 63 )...( 79 ): SSR2_HUMAN
LVIYVILRYAKMKTIT

SEQ ID NO: 4503 - protein, 16 aa, Homo Sapiens
  ( 64 )...( 80 ): SSR2_HUMAN
VIYVILRYAKMKTITN

SEQ ID NO: 4504 - protein, 16 aa, Homo Sapiens
  ( 65 )...( 81 ): SSR2_HUMAN
IYVILRYAKMKTITNI

SEQ ID NO: 4505 - protein, 16 aa, Homo Sapiens
  ( 67 )...( 83 ): SSR2_HUMAN
VILRYAKMKTITNIYI

SEQ ID NO: 4506 - protein, 16 aa, Homo Sapiens
  ( 68 )...( 84 ): SSR2_HUMAN
ILRYAKMKTITNIYIL

SEQ ID NO: 4507 - protein, 16 aa, Homo Sapiens
  ( 69 )...( 85 ): SSR2_HUMAN
LRYAKMKTITNIYILN

SEQ ID NO: 4508 - protein, 16 aa, Homo Sapiens
  ( 70 )...( 86 ): SSR2_HUMAN
RYAKMKTITNIYILNL

SEQ ID NO: 4509 - protein, 16 aa, Homo Sapiens
  ( 228 )...( 244 ): SSR2_HUMAN
YLFIIIKVKSSGIRVG

SEQ ID NO: 4510 - protein, 16 aa, Homo Sapiens
  ( 229 )...( 245 ): SSR2_HUMAN
LFIIIKVKSSGIRVGS

SEQ ID NO: 4511 - protein, 16 aa, Homo Sapiens
  ( 231 )...( 247 ): SSR2_HUMAN
IIIKVKSSGIRVGSSK

SEQ ID NO: 4512 - protein, 16 aa, Homo Sapiens
  ( 249 )...( 265 ): SSR2_HUMAN
KSEKKVTRMVSIVVAV

SEQ ID NO: 4513 - protein, 16 aa, Homo Sapiens
  ( 252 )...( 268 ): SSR2_HUMAN
KKVTRMVSIVVAVFIF

SEQ ID NO: 4514 - protein, 16 aa, Homo Sapiens
  ( 320 )...( 336 ): SSR2_HUMAN
KKSFQNVLCLVKVSGT

SEQ ID NO: 4515 - protein, 16 aa, Homo Sapiens
  ( 64 )...( 80 ): SSR4_HUMAN
GNALVIFVILRYAKMK

SEQ ID NO: 4516 - protein, 16 aa, Homo Sapiens
  ( 65 )...( 81 ): SSR4_HUMAN
NALVIFVILRYAKMKT

SEQ ID NO: 4517 - protein, 16 aa, Homo Sapiens
  ( 66 )...( 82 ): SSR4_HUMAN
ALVIFVILRYAKMKTA

SEQ ID NO: 4518 - protein, 16 aa, Homo Sapiens
  ( 67 )...( 83 ): SSR4_HUMAN
LVIFVILRYAKMKTAT

SEQ ID NO: 4519 - protein, 16 aa, Homo Sapiens
  ( 68 )...( 84 ): SSR4_HUMAN
VIFVILRYAKMKTATN

SEQ ID NO: 4520 - protein, 16 aa, Homo Sapiens
  ( 69 )...( 85 ): SSR4_HUMAN
IFVILRYAKMKTATNI

SEQ ID NO: 4521 - protein, 16 aa, Homo Sapiens
  ( 70 )...( 86 ): SSR4_HUMAN
FVILRYAKMKTATNIY

SEQ ID NO: 4522 - protein, 16 aa, Homo Sapiens
  ( 71 )...( 87 ): SSR4_HUMAN
VILRYAKMKTATNIYL

SEQ ID NO: 4523 - protein, 16 aa, Homo Sapiens
  ( 72 )...( 88 ): SSR4_HUMAN
ILRYAKMKTATNIYLL

SEQ ID NO: 4524 - protein, 16 aa, Homo Sapiens
  ( 250 )...( 266 ): SSR4_HUMAN
RRRSEKKITRLVLMVV

SEQ ID NO: 4525 - protein, 16 aa, Homo Sapiens
  ( 251 )...( 267 ): SSR4_HUMAN
RRSEKKITRLVLMVVV

SEQ ID NO: 4526 - protein, 16 aa, Homo Sapiens
  ( 252 )...( 268 ): SSR4_HUMAN
RSEKKITRLVLMVVVV

SEQ ID NO: 4527 - protein, 16 aa, Homo Sapiens
  ( 255 )...( 271 ): SSR4_HUMAN
KKITRLVLMVVVVFVL

SEQ ID NO: 4528 - protein, 16 aa, Homo Sapiens
  ( 57 )...( 73 ): SSR5_HUMAN
GNTLVIYVVLRFAKMK

SEQ ID NO: 4529 - protein, 16 aa, Homo Sapiens
  ( 58 )...( 74 ): SSR5_HUMAN
NTLVIYVVLRFAKMKT

SEQ ID NO: 4530 - protein, 16 aa, Homo Sapiens
  ( 59 )...( 75 ): SSR5_HUMAN
TLVIYVVLRFAKMKTV

SEQ ID NO: 4531 - protein, 16 aa, Homo Sapiens
  ( 60 )...( 76 ): SSR5_HUMAN
LVIYVVLRFAKMKTVT

SEQ ID NO: 4532 - protein, 16 aa, Homo Sapiens
  ( 61 )...( 77 ): SSR5_HUMAN
VIYVVLRFAKMKTVTN

SEQ ID NO: 4533 - protein, 16 aa, Homo Sapiens
  ( 62 )...( 78 ): SSR5_HUMAN
IYVVLRFAKMKTVTNI

SEQ ID NO: 4534 - protein, 16 aa, Homo Sapiens
  ( 64 )...( 80 ): SSR5_HUMAN
VVLRFAKMKTVTNIYI

SEQ ID NO: 4535 - protein, 16 aa, Homo Sapiens
  ( 65 )...( 81 ): SSR5_HUMAN
VLRFAKMKTVTNIYIL

SEQ ID NO: 4536 - protein, 16 aa, Homo Sapiens
  ( 66 )...( 82 ): SSR5_HUMAN
LRFAKMKTVTNIYILN

SEQ ID NO: 4537 - protein, 16 aa, Homo Sapiens
  ( 67 )...( 83 ): SSR5_HUMAN
RFAKMKTVTNIYILNL

SEQ ID NO: 4538 - protein, 16 aa, Homo Sapiens
  ( 221 )...( 237 ): SSR5_HUMAN
YLLIVVKVRAAGVRVG

SEQ ID NO: 4539 - protein, 16 aa, Homo Sapiens
  ( 240 )...( 256 ): SSR5_HUMAN
RRSERKVTRMVLVVVL

SEQ ID NO: 4540 - protein, 16 aa, Homo Sapiens
  ( 241 )...( 257 ): SSR5_HUMAN
RSERKVTRMVLVVVLV

SEQ ID NO: 4541 - protein, 16 aa, Homo Sapiens
  ( 244 )...( 260 ): SSR5_HUMAN
RKVTRMVLVVVLVFAG

SEQ ID NO: 4542 - protein, 16 aa, Homo Sapiens
  ( 43 )...( 59 ): TRFR_HUMAN
NIMVVLVVMRTKHMRT

SEQ ID NO: 4543 - protein, 16 aa, Homo Sapiens
  ( 44 )...( 60 ): TRFR_HUMAN
IMVVLVVMRTKHMRTP

SEQ ID NO: 4544 - protein, 16 aa, Homo Sapiens
  ( 45 )...( 61 ): TRFR_HUMAN
MVVLVVMRTKHMRTPT

SEQ ID NO: 4545 - protein, 16 aa, Homo Sapiens
  ( 256 )...( 272 ): TRFR_HUMAN
STVSSRKQVTKMLAVV

SEQ ID NO: 4546 - protein, 16 aa, Homo Sapiens
  ( 257 )...( 273 ): TRFR_HUMAN
TVSSRKQVTKMLAVVV

SEQ ID NO: 4547 - protein, 16 aa, Homo Sapiens
  ( 258 )...( 274 ): TRFR_HUMAN
VSSRKQVTKMLAVVVI

SEQ ID NO: 4548 - protein, 16 aa, Homo Sapiens
  ( 259 )...( 275 ): TRFR_HUMAN
SSRKQVTKMLAVVVIL

SEQ ID NO: 4549 - protein, 16 aa, Homo Sapiens
  ( 260 )...( 276 ): TRFR_HUMAN
SRKQVTKMLAVVVILF

SEQ ID NO: 4550 - protein, 16 aa, Homo Sapiens
  ( 261 )...( 277 ): TRFR_HUMAN
RKQVTKMLAVVVILFA

SEQ ID NO: 4551 - protein, 16 aa, Homo Sapiens
  ( 304 )...( 320 ): TRP1_HUMAN
RMNLSRLKLAIKYNQK

SEQ ID NO: 4552 - protein, 16 aa, Homo Sapiens
  ( 305 )...( 321 ): TRP1_HUMAN
MNLSRLKLAIKYNQKE

SEQ ID NO: 4553 - protein, 16 aa, Homo Sapiens
  ( 306 )...( 322 ): TRP1_HUMAN
NLSRLKLAIKYNQKEF

SEQ ID NO: 4554 - protein, 16 aa, Homo Sapiens
  ( 307 )...( 323 ): TRP1_HUMAN
LSRLKLAIKYNQKEFV

SEQ ID NO: 4555 - protein, 16 aa, Homo Sapiens
  ( 308 )...( 324 ): TRP1_HUMAN
SRLKLAIKYNQKEFVS

SEQ ID NO: 4556 - protein, 16 aa, Homo Sapiens
  ( 309 )...( 325 ): TRP1_HUMAN
RLKLAIKYNQKEFVSQ

SEQ ID NO: 4557 - protein, 16 aa, Homo Sapiens
  ( 343 )...( 359 ): TRP1_HUMAN
RRKPTCKKIMTVLTVG

SEQ ID NO: 4558 - protein, 16 aa, Homo Sapiens
  ( 302 )...( 318 ): TRP3_HUMAN
HKASLSRVKLAIKYEV

SEQ ID NO: 4559 - protein, 16 aa, Homo Sapiens
  ( 303 )...( 319 ): TRP3_HUMAN
KASLSRVKLAIKYEVK

SEQ ID NO: 4560 - protein, 16 aa, Homo Sapiens
  ( 304 )...( 320 ): TRP3_HUMAN
ASLSRVKLAIKYEVKK

SEQ ID NO: 4561 - protein, 16 aa, Homo Sapiens
  ( 305 )...( 321 ): TRP3_HUMAN
SLSRVKLAIKYEVKKF

SEQ ID NO: 4562 - protein, 16 aa, Homo Sapiens
  ( 306 )...( 322 ): TRP3_HUMAN
LSRVKLAIKYEVKKFV

SEQ ID NO: 4563 - protein, 16 aa, Homo Sapiens
  ( 307 )...( 323 ): TRP3_HUMAN
SRVKLAIKYEVKKFVA

SEQ ID NO: 4564 - protein, 16 aa, Homo Sapiens
  ( 308 )...( 324 ): TRP3_HUMAN
RVKLAIKYEVKKFVAH

SEQ ID NO: 4565 - protein, 16 aa, Homo Sapiens
  ( 309 )...( 325 ): TRP3_HUMAN
VKLAIKYEVKKFVAHP

SEQ ID NO: 4566 - protein, 16 aa, Homo Sapiens
  ( 310 )...( 326 ): TRP3_HUMAN
KLAIKYEVKKFVAHPN

SEQ ID NO: 4567 - protein, 16 aa, Homo Sapiens
  ( 768 )...( 784 ): TRP3_HUMAN
ILNQPTRYQQIMKRLI

SEQ ID NO: 4568 - protein, 16 aa, Homo Sapiens
  ( 769 )...( 785 ): TRP3_HUMAN
LNQPTRYQQIMKRLIK

SEQ ID NO: 4569 - protein, 16 aa, Homo Sapiens
  ( 771 )...( 787 ): TRP3_HUMAN
QPTRYQQIMKRLIKRY

SEQ ID NO: 4570 - protein, 16 aa, Homo Sapiens
  ( 772 )...( 788 ): TRP3_HUMAN
PTRYQQIMKRLIKRYV

SEQ ID NO: 4571 - protein, 16 aa, Homo Sapiens
  ( 773 )...( 789 ): TRP3_HUMAN
TRYQQIMKRLIKRYVL

SEQ ID NO: 4572 - protein, 16 aa, Homo Sapiens
  ( 774 )...( 790 ): TRP3_HUMAN
RYQQIMKRLIKRYVLK

SEQ ID NO: 4573 - protein, 16 aa, Homo Sapiens
  ( 775 )...( 791 ): TRP3_HUMAN
YQQIMKRLIKRYVLKA

SEQ ID NO: 4574 - protein, 16 aa, Homo Sapiens
  ( 776 )...( 792 ): TRP3_HUMAN
QQIMKRLIKRYVLKAQ

SEQ ID NO: 4575 - protein, 16 aa, Homo Sapiens
  ( 777 )...( 793 ): TRP3_HUMAN
QIMKRLIKRYVLKAQV

SEQ ID NO: 4576 - protein, 16 aa, Homo Sapiens
  ( 778 )...( 794 ): TRP3_HUMAN
IMKRLIKRYVLKAQVD

SEQ ID NO: 4577 - protein, 16 aa, Homo Sapiens
  ( 779 )...( 795 ): TRP3_HUMAN
MKRLIKRYVLKAQVDK

SEQ ID NO: 4578 - protein, 16 aa, Homo Sapiens
  ( 157 )...( 173 ): TRP4_HUMAN
IIKLLVQKGVSVPRPH

SEQ ID NO: 4579 - protein, 16 aa, Homo Sapiens
  ( 285 )...( 301 ): TRP4_HUMAN
DLARLKLAIKYRQKEF

SEQ ID NO: 4580 - protein, 16 aa, Homo Sapiens
  ( 286 )...( 302 ): TRP4_HUMAN
LARLKLAIKYRQKEFV

SEQ ID NO: 4581 - protein, 16 aa, Homo Sapiens
  ( 287 )...( 303 ): TRP4_HUMAN
ARLKLAIKYRQKEFVA

SEQ ID NO: 4582 - protein, 16 aa, Homo Sapiens
  ( 288 )...( 304 ): TRP4_HUMAN
RLKLAIKYRQKEFVAQ

SEQ ID NO: 4583 - protein, 16 aa, Homo Sapiens
  ( 289 )...( 305 ): TRP4_HUMAN
LKLAIKYRQKEFVAQP

SEQ ID NO: 4584 - protein, 16 aa, Homo Sapiens
  ( 290 )...( 306 ): TRP4_HUMAN
KLAIKYRQKEFVAQPN

SEQ ID NO: 4585 - protein, 16 aa, Homo Sapiens
  ( 155 )...( 171 ): TRP5_HUMAN
YEIIKLLVQKRVTIPR

SEQ ID NO: 4586 - protein, 16 aa, Homo Sapiens
  ( 156 )...( 172 ): TRP5_HUMAN
EIIKLLVQKRVTIPRP

SEQ ID NO: 4587 - protein, 16 aa, Homo Sapiens
  ( 157 )...( 173 ): TRP5_HUMAN
IIKLLVQKRVTIPRPH

SEQ ID NO: 4588 - protein, 16 aa, Homo Sapiens
  ( 158 )...( 174 ): TRP5_HUMAN
IKLLVQKRVTIPRPHQ

SEQ ID NO: 4589 - protein, 16 aa, Homo Sapiens
  ( 159 )...( 175 ): TRP5_HUMAN
KLLVQKRVTIPRPHQI

SEQ ID NO: 4590 - protein, 16 aa, Homo Sapiens
  ( 160 )...( 176 ): TRP5_HUMAN
LLVQKRVTIPRPHQIR

SEQ ID NO: 4591 - protein, 16 aa, Homo Sapiens
  ( 281 )...( 297 ): TRP5_HUMAN
PQKYHDLAKLKVAIKY

SEQ ID NO: 4592 - protein, 16 aa, Homo Sapiens
  ( 282 )...( 298 ): TRP5_HUMAN
QKYHDLAKLKVAIKYH

SEQ ID NO: 4593 - protein, 16 aa, Homo Sapiens
  ( 283 )...( 299 ): TRP5_HUMAN
KYHDLAKLKVAIKYHQ

SEQ ID NO: 4594 - protein, 16 aa, Homo Sapiens
  ( 284 )...( 300 ): TRP5_HUMAN
YHDLAKLKVAIKYHQK

SEQ ID NO: 4595 - protein, 16 aa, Homo Sapiens
  ( 287 )...( 303 ): TRP5_HUMAN
LAKLKVAIKYHQKEFV

SEQ ID NO: 4596 - protein, 16 aa, Homo Sapiens
  ( 288 )...( 304 ): TRP5_HUMAN
AKLKVAIKYHQKEFVA

SEQ ID NO: 4597 - protein, 16 aa, Homo Sapiens
  ( 289 )...( 305 ): TRP5_HUMAN
KLKVAIKYHQKEFVAQ

SEQ ID NO: 4598 - protein, 16 aa, Homo Sapiens
  ( 449 )...( 465 ): TRP5_HUMAN
TISLKIVAYVKYNGSR

SEQ ID NO: 4599 - protein, 16 aa, Homo Sapiens
  ( 360 )...( 376 ): TRP6_HUMAN
RPNLSRLKLAIKYEVK

SEQ ID NO: 4600 - protein, 16 aa, Homo Sapiens
  ( 361 )...( 377 ): TRP6_HUMAN
PNLSRLKLAIKYEVKK

SEQ ID NO: 4601 - protein, 16 aa, Homo Sapiens
  ( 362 )...( 378 ): TRP6_HUMAN
NLSRLKLAIKYEVKKF

SEQ ID NO: 4602 - protein, 16 aa, Homo Sapiens
  ( 363 )...( 379 ): TRP6_HUMAN
LSRLKLAIKYEVKKFV

SEQ ID NO: 4603 - protein, 16 aa, Homo Sapiens
  ( 364 )...( 380 ): TRP6_HUMAN
SRLKLAIKYEVKKFVA

SEQ ID NO: 4604 - protein, 16 aa, Homo Sapiens
  ( 365 )...( 381 ): TRP6_HUMAN
RLKLAIKYEVKKFVAH

SEQ ID NO: 4605 - protein, 16 aa, Homo Sapiens
  ( 366 )...( 382 ): TRP6_HUMAN
LKLAIKYEVKKFVAHP

SEQ ID NO: 4606 - protein, 16 aa, Homo Sapiens
  ( 367 )...( 383 ): TRP6_HUMAN
KLAIKYEVKKFVAHPN

SEQ ID NO: 4607 - protein, 16 aa, Homo Sapiens
  ( 766 )...( 782 ): TRP6_HUMAN
LVPSPKSLFYLLLKLK

SEQ ID NO: 4608 - protein, 16 aa, Homo Sapiens
  ( 767 )...( 783 ): TRP6_HUMAN
VPSPKSLFYLLLKLKK

SEQ ID NO: 4609 - protein, 16 aa, Homo Sapiens
  ( 768 )...( 784 ): TRP6_HUMAN
PSPKSLFYLLLKLKKW

SEQ ID NO: 4610 - protein, 16 aa, Homo Sapiens
  ( 769 )...( 785 ): TRP6_HUMAN
SPKSLFYLLLKLKKWI

SEQ ID NO: 4611 - protein, 16 aa, Homo Sapiens
  ( 770 )...( 786 ): TRP6_HUMAN
PKSLFYLLLKLKKWIS

SEQ ID NO: 4612 - protein, 16 aa, Homo Sapiens
  ( 771 )...( 787 ): TRP6_HUMAN
KSLFYLLLKLKKWISE

SEQ ID NO: 4613 - protein, 16 aa, Homo Sapiens
  ( 777 )...( 793 ): TRP6_HUMAN
LLKLKKWISELFQGHK

SEQ ID NO: 4614 - protein, 16 aa, Homo Sapiens
  ( 778 )...( 794 ): TRP6_HUMAN
LKLKKWISELFQGHKK

SEQ ID NO: 4615 - protein, 16 aa, Homo Sapiens
  ( 852 )...( 868 ): TRP6_HUMAN
PRQYQKIMKRLIKRYV

SEQ ID NO: 4616 - protein, 16 aa, Homo Sapiens
  ( 853 )...( 869 ): TRP6_HUMAN
RQYQKIMKRLIKRYVL

SEQ ID NO: 4617 - protein, 16 aa, Homo Sapiens
  ( 854 )...( 870 ): TRP6_HUMAN
QYQKIMKRLIKRYVLQ

SEQ ID NO: 4618 - protein, 16 aa, Homo Sapiens
  ( 855 )...( 871 ): TRP6_HUMAN
YQKIMKRLIKRYVLQA

SEQ ID NO: 4619 - protein, 16 aa, Homo Sapiens
  ( 856 )...( 872 ): TRP6_HUMAN
QKIMKRLIKRYVLQAQ

SEQ ID NO: 4620 - protein, 16 aa, Homo Sapiens
  ( 857 )...( 873 ): TRP6_HUMAN
KIMKRLIKRYVLQAQI

SEQ ID NO: 4621 - protein, 16 aa, Homo Sapiens
  ( 858 )...( 874 ): TRP6_HUMAN
IMKRLIKRYVLQAQID

SEQ ID NO: 4622 - protein, 16 aa, Homo Sapiens
  ( 859 )...( 875 ): TRP6_HUMAN
MKRLIKRYVLQAQIDK

SEQ ID NO: 4623 - protein, 16 aa, Homo Sapiens
  ( 860 )...( 876 ): TRP6_HUMAN
KRLIKRYVLQAQIDKE

SEQ ID NO: 4624 - protein, 16 aa, Homo Sapiens
  ( 305 )...( 321 ): TRP7_HUMAN
RPSLSRIKLAIKYEVK

SEQ ID NO: 4625 - protein, 16 aa, Homo Sapiens
  ( 306 )...( 322 ): TRP7_HUMAN
PSLSRIKLAIKYEVKK

SEQ ID NO: 4626 - protein, 16 aa, Homo Sapiens
  ( 307 )...( 323 ): TRP7_HUMAN
SLSRIKLAIKYEVKKF

SEQ ID NO: 4627 - protein, 16 aa, Homo Sapiens
  ( 308 )...( 324 ): TRP7_HUMAN
LSRIKLAIKYEVKKFV

SEQ ID NO: 4628 - protein, 16 aa, Homo Sapiens
  ( 309 )...( 325 ): TRP7_HUMAN
SRIKLAIKYEVKKFVA

SEQ ID NO: 4629 - protein, 16 aa, Homo Sapiens
  ( 310 )...( 326 ): TRP7_HUMAN
RIKLAIKYEVKKFVAH

SEQ ID NO: 4630 - protein, 16 aa, Homo Sapiens
  ( 311 )...( 327 ): TRP7_HUMAN
IKLAIKYEVKKFVAHP

SEQ ID NO: 4631 - protein, 16 aa, Homo Sapiens
  ( 312 )...( 328 ): TRP7_HUMAN
KLAIKYEVKKFVAHPN

SEQ ID NO: 4632 - protein, 16 aa, Homo Sapiens
  ( 772 )...( 788 ): TRP7_HUMAN
NTLSKPTRYQKIMKRL

SEQ ID NO: 4633 - protein, 16 aa, Homo Sapiens
  ( 773 )...( 789 ): TRP7_HUMAN
TLSKPTRYQKIMKRLI

SEQ ID NO: 4634 - protein, 16 aa, Homo Sapiens
  ( 774 )...( 790 ): TRP7_HUMAN
LSKPTRYQKIMKRLIK

SEQ ID NO: 4635 - protein, 16 aa, Homo Sapiens
  ( 776 )...( 792 ): TRP7_HUMAN
KPTRYQKIMKRLIKRY

SEQ ID NO: 4636 - protein, 16 aa, Homo Sapiens
  ( 777 )...( 793 ): TRP7_HUMAN
PTRYQKIMKRLIKRYV

SEQ ID NO: 4637 - protein, 16 aa, Homo Sapiens
  ( 778 )...( 794 ): TRP7_HUMAN
TRYQKIMKRLIKRYVL

SEQ ID NO: 4638 - protein, 16 aa, Homo Sapiens
  ( 779 )...( 795 ): TRP7_HUMAN
RYQKIMKRLIKRYVLK

SEQ ID NO: 4639 - protein, 16 aa, Homo Sapiens
  ( 780 )...( 796 ): TRP7_HUMAN
YQKIMKRLIKRYVLKA

SEQ ID NO: 4640 - protein, 16 aa, Homo Sapiens
  ( 781 )...( 797 ): TRP7_HUMAN
QKIMKRLIKRYVLKAQ

SEQ ID NO: 4641 - protein, 16 aa, Homo Sapiens
  ( 782 )...( 798 ): TRP7_HUMAN
KIMKRLIKRYVLKAQV

SEQ ID NO: 4642 - protein, 16 aa, Homo Sapiens
  ( 783 )...( 799 ): TRP7_HUMAN
IMKRLIKRYVLKAQVD

SEQ ID NO: 4643 - protein, 16 aa, Homo Sapiens
  ( 784 )...( 800 ): TRP7_HUMAN
MKRLIKRYVLKAQVDR

SEQ ID NO: 4644 - protein, 16 aa, Homo Sapiens
  ( 248 )...( 264 ): TSHR_HUMAN
HLKELIARNTWTLKKL

SEQ ID NO: 4645 - protein, 16 aa, Homo Sapiens
  ( 249 )...( 265 ): TSHR_HUMAN
LKELIARNTWTLKKLP

SEQ ID NO: 4646 - protein, 16 aa, Homo Sapiens
  ( 250 )...( 266 ): TSHR_HUMAN
KELIARNTWTLKKLPL

SEQ ID NO: 4647 - protein, 16 aa, Homo Sapiens
  ( 252 )...( 268 ): TSHR_HUMAN
LIARNTWTLKKLPLSL

SEQ ID NO: 4648 - protein, 16 aa, Homo Sapiens
  ( 259 )...( 275 ): TSHR_HUMAN
TLKKLPLSLSFLHLTR

SEQ ID NO: 4649 - protein, 16 aa, Homo Sapiens
  ( 260 )...( 276 ): TSHR_HUMAN
LKKLPLSLSFLHLTRA

SEQ ID NO: 4650 - protein, 16 aa, Homo Sapiens
  ( 285 )...( 301 ): TSHR_HUMAN
AFKNQKKIRGILESLM

SEQ ID NO: 4651 - protein, 16 aa, Homo Sapiens
  ( 213 )...( 229 ): UL33_HCMVA
SQKQRSRTLTFVSVLL

SEQ ID NO: 4652 - protein, 16 aa, Homo Sapiens
  ( 214 )...( 230 ): UL33_HCMVA
QKQRSRTLTFVSVLLI

SEQ ID NO: 4653 - protein, 16 aa, Homo Sapiens
  ( 215 )...( 231 ): UL33_HCMVA
KQRSRTLTFVSVLLIS

SEQ ID NO: 4654 - protein, 16 aa, Homo Sapiens
  ( 119 )...( 135 ): UL33_HSV6U
LAIIATIRYKTLHRRK

SEQ ID NO: 4655 - protein, 16 aa, Homo Sapiens
  ( 120 )...( 136 ): UL33_HSV6U
AIIATIRYKTLHRRKK

SEQ ID NO: 4656 - protein, 16 aa, Homo Sapiens
  ( 158 )...( 174 ): UL33_HSV6U
AIPTALFVKTNGMKKT

SEQ ID NO: 4657 - protein, 16 aa, Homo Sapiens
  ( 159 )...( 175 ): UL33_HSV6U
IPTALFVKTNGMKKTG

SEQ ID NO: 4658 - protein, 16 aa, Homo Sapiens
  ( 223 )...( 239 ): UL33_HSV6U
TEKKYKKTLFFIRILL

SEQ ID NO: 4659 - protein, 16 aa, Homo Sapiens
  ( 224 )...( 240 ): UL33_HSV6U
EKKYKKTLFFIRILLL

SEQ ID NO: 4660 - protein, 16 aa, Homo Sapiens
  ( 225 )...( 241 ): UL33_HSV6U
KKYKKTLFFIRILLLS

SEQ ID NO: 4661 - protein, 16 aa, Homo Sapiens
  ( 226 )...( 242 ): UL33_HSV6U
KYKKTLFFIRILLLSF

SEQ ID NO: 4662 - protein, 16 aa, Homo Sapiens
  ( 227 )...( 243 ): UL33_HSV6U
YKKTLFFIRILLLSFL

SEQ ID NO: 4663 - protein, 16 aa, Homo Sapiens
  ( 228 )...( 244 ): UL33_HSV6U
KKTLFFIRILLLSFLL

SEQ ID NO: 4664 - protein, 16 aa, Homo Sapiens
  ( 228 )...( 244 ): UL33_HSV7J
FYVIFGKTLRALTQSK

SEQ ID NO: 4665 - protein, 16 aa, Homo Sapiens
  ( 229 )...( 245 ): UL33_HSV7J
YVIFGKTLRALTQSKH

SEQ ID NO: 4666 - protein, 16 aa, Homo Sapiens
  ( 230 )...( 246 ): UL33_HSV7J
VIFGKTLRALTQSKHN

SEQ ID NO: 4667 - protein, 16 aa, Homo Sapiens
  ( 236 )...( 252 ): UL33_HSV7J
LRALTQSKHNKTLSFI

SEQ ID NO: 4668 - protein, 16 aa, Homo Sapiens
  ( 158 )...( 174 ): UR2R_HUMAN
TVQRPKGYRKLLALGT

SEQ ID NO: 4669 - protein, 16 aa, Homo Sapiens
  ( 163 )...( 179 ): UR2R_HUMAN
KGYRKLLALGTWLLAL

SEQ ID NO: 4670 - protein, 16 aa, Homo Sapiens
  ( 46 )...( 62 ): US27_HCMVA
FLNVLVITTILYYRRK

SEQ ID NO: 4671 - protein, 16 aa, Homo Sapiens
  ( 47 )...( 63 ): US27_HCMVA
LNVLVITTILYYRRKK

SEQ ID NO: 4672 - protein, 16 aa, Homo Sapiens
  ( 48 )...( 64 ): US27_HCMVA
NVLVITTILYYRRKKK

SEQ ID NO: 4673 - protein, 16 aa, Homo Sapiens
  ( 49 )...( 65 ): US27_HCMVA
VLVITTILYYRRKKKS

SEQ ID NO: 4674 - protein, 16 aa, Homo Sapiens
  ( 50 )...( 66 ): US27_HCMVA
LVITTILYYRRKKKSP

SEQ ID NO: 4675 - protein, 16 aa, Homo Sapiens
  ( 51 )...( 67 ): US27_HCMVA
VITTILYYRRKKKSPS

SEQ ID NO: 4676 - protein, 16 aa, Homo Sapiens
  ( 219 )...( 235 ): US28_HCMVA
QSRHKGRIVRVLIAVV

SEQ ID NO: 4677 - protein, 16 aa, Homo Sapiens
  ( 220 )...( 236 ): US28_HCMVA
SRHKGRIVRVLIAVVL

SEQ ID NO: 4678 - protein, 16 aa, Homo Sapiens
  ( 221 )...( 237 ): US28_HCMVA
RHKGRIVRVLIAVVLV

SEQ ID NO: 4679 - protein, 16 aa, Homo Sapiens
  ( 222 )...( 238 ): US28_HCMVA
HKGRIVRVLIAVVLVF

SEQ ID NO: 4680 - protein, 16 aa, Homo Sapiens
  ( 223 )...( 239 ): US28_HCMVA
KGRIVRVLIAVVLVFI

SEQ ID NO: 4681 - protein, 16 aa, Homo Sapiens
  ( 279 )...( 295 ): V1AR_HUMAN
VKSISRAKIRTVKMTF

SEQ ID NO: 4682 - protein, 16 aa, Homo Sapiens
  ( 280 )...( 296 ): V1AR_HUMAN
KSISRAKIRTVKMTFV

SEQ ID NO: 4683 - protein, 16 aa, Homo Sapiens
  ( 281 )...( 297 ): V1AR_HUMAN
SISRAKIRTVKMTFVI

SEQ ID NO: 4684 - protein, 16 aa, Homo Sapiens
  ( 282 )...( 298 ): V1AR_HUMAN
ISRAKIRTVKMTFVIV

SEQ ID NO: 4685 - protein, 16 aa, Homo Sapiens
  ( 283 )...( 299 ): V1AR_HUMAN
SRAKIRTVKMTFVIVT

SEQ ID NO: 4686 - protein, 16 aa, Homo Sapiens
  ( 284 )...( 300 ): V1AR_HUMAN
RAKIRTVKMTFVIVTA

SEQ ID NO: 4687 - protein, 16 aa, Homo Sapiens
  ( 285 )...( 301 ): V1AR_HUMAN
AKIRTVKMTFVIVTAY

SEQ ID NO: 4688 - protein, 16 aa, Homo Sapiens
  ( 51 )...( 67 ): V1BR_HUMAN
GNLAVLLTLGQLGRKR

SEQ ID NO: 4689 - protein, 16 aa, Homo Sapiens
  ( 52 )...( 68 ): V1BR_HUMAN
NLAVLLTLGQLGRKRS

SEQ ID NO: 4690 - protein, 16 aa, Homo Sapiens
  ( 53 )...( 69 ): V1BR_HUMAN
LAVLLTLGQLGRKRSR

SEQ ID NO: 4691 - protein, 16 aa, Homo Sapiens
  ( 269 )...( 285 ): V1BR_HUMAN
INTISRAKIRTVKMTF

SEQ ID NO: 4692 - protein, 16 aa, Homo Sapiens
  ( 270 )...( 286 ): V1BR_HUMAN
NTISRAKIRTVKMTFV

SEQ ID NO: 4693 - protein, 16 aa, Homo Sapiens
  ( 271 )...( 287 ): V1BR_HUMAN
TISRAKIRTVKMTFVI

SEQ ID NO: 4694 - protein, 16 aa, Homo Sapiens
  ( 272 )...( 288 ): V1BR_HUMAN
ISRAKIRTVKMTFVIV

SEQ ID NO: 4695 - protein, 16 aa, Homo Sapiens
  ( 273 )...( 289 ): V1BR_HUMAN
SRAKIRTVKMTFVIVL

SEQ ID NO: 4696 - protein, 16 aa, Homo Sapiens
  ( 274 )...( 290 ): V1BR_HUMAN
RAKIRTVKMTFVIVLA

SEQ ID NO: 4697 - protein, 16 aa, Homo Sapiens
  ( 275 )...( 291 ): V1BR_HUMAN
AKIRTVKMTFVIVLAY

SEQ ID NO: 4698 - protein, 16 aa, Homo Sapiens
  ( 276 )...( 292 ): V1BR_HUMAN
KIRTVKMTFVIVLAYI

SEQ ID NO: 4699 - protein, 16 aa, Homo Sapiens
  ( 241 )...( 257 ): VG74_KSHV
TKLQARRKVRGVIVAV

SEQ ID NO: 4700 - protein, 16 aa, Homo Sapiens
  ( 242 )...( 258 ): VG74_KSHV
KLQARRKVRGVIVAVV

SEQ ID NO: 4701 - protein, 16 aa, Homo Sapiens
  ( 243 )...( 259 ): VG74_KSHV
LQARRKVRGVIVAVVL

SEQ ID NO: 4702 - protein, 16 aa, Homo Sapiens
  ( 244 )...( 260 ): VG74_KSHV
QARRKVRGVIVAVVLL

SEQ ID NO: 4703 - protein, 16 aa, Homo Sapiens
  ( 245 )...( 261 ): VG74_KSHV
ARRKVRGVIVAVVLLF

SEQ ID NO: 4704 - protein, 16 aa, Homo Sapiens
  ( 246 )...( 262 ): VG74_KSHV
RRKVRGVIVAVVLLFF

SEQ ID NO: 4705 - protein, 16 aa, Homo Sapiens
  ( 247 )...( 263 ): VG74_KSHV
RKVRGVIVAVVLLFFV

SEQ ID NO: 4706 - protein, 16 aa, Homo Sapiens
  ( 309 )...( 325 ): VIPR_HUMAN
FILFICIIRILLQKLR

SEQ ID NO: 4707 - protein, 16 aa, Homo Sapiens
  ( 310 )...( 326 ): VIPR_HUMAN
ILFICIIRILLQKLRP

SEQ ID NO: 4708 - protein, 16 aa, Homo Sapiens
  ( 315 )...( 331 ): VIPR_HUMAN
IIRILLQKLRPPDIRK

SEQ ID NO: 4709 - protein, 16 aa, Homo Sapiens
  ( 320 )...( 336 ): VIPS_HUMAN
QSQYKRLAKSTLLLIP

SEQ ID NO: 4710 - protein, 16 aa, Homo Sapiens
  ( 321 )...( 337 ): VIPS_HUMAN
SQYKRLAKSTLLLIPL

SEQ ID NO: 4711 - protein, 16 aa, Homo Sapiens
  ( 322 )...( 338 ): VIPS_HUMAN
QYKRLAKSTLLLIPLF

SEQ ID NO: 4712 - protein, 16 aa, Homo Sapiens
  ( 323 )...( 339 ): VIPS_HUMAN
YKRLAKSTLLLIPLFG

SEQ ID NO: 4713 - protein, 16 aa, Homo Sapiens
  ( 324 )...( 340 ): VIPS_HUMAN
KRLAKSTLLLIPLFGV

SEQ ID NO: 4714 - protein, 16 aa, Homo Sapiens
  ( 131 )...( 147 ): VU51_HSV7J
VTSIFQAVQISMKYKK

SEQ ID NO: 4715 - protein, 16 aa, Homo Sapiens
  ( 132 )...( 148 ): VU51_HSV7J
TSIFQAVQISMKYKKS

SEQ ID NO: 4716 - protein, 16 aa, Homo Sapiens
  ( 133 )...( 149 ): VU51_HSV7J
SIFQAVQISMKYKKSQ

SEQ ID NO: 4717 - protein, 16 aa, Homo Sapiens
  ( 134 )...( 150 ): VU51_HSV7J
IFQAVQISMKYKKSQM

SEQ ID NO: 4718 - protein, 16 aa, Homo Sapiens
  ( 135 )...( 151 ): VU51_HSV7J
FQAVQISMKYKKSQMN

SEQ ID NO: 4719 - protein, 16 aa, Homo Sapiens
  ( 136 )...( 152 ): VU51_HSV7J
QAVQISMKYKKSQMNL

SEQ ID NO: 4720 - protein, 16 aa, Homo Sapiens
  ( 278 )...( 294 ): VU51_HSV7J
LMPSLRKLQQPTKSTQ

SEQ ID NO: 4721 - protein, 13 aa, Homo Sapiens
  ( 282 )...( 298 ): VU51_HSV7J
LRKLQQPTKSTQF

SEQ ID NO: 4722 - protein, 16 aa, Homo Sapiens
  ( 248 )...( 264 ): Q13675
MASAKTKTHFSVRLLK

SEQ ID NO: 4723 - protein, 16 aa, Homo Sapiens
  ( 261 )...( 277 ): Q13675
LLKFSREKKAAKTLGI

SEQ ID NO: 4724 - protein, 16 aa, Homo Sapiens
  ( 262 )...( 278 ): Q13675
LKFSREKKAAKTLGIV

SEQ ID NO: 4725 - protein, 16 aa, Homo Sapiens
  ( 268 )...( 284 ): Q13675
KKAAKTLGIVVGCFVL

SEQ ID NO: 4726 - protein, 16 aa, Homo Sapiens
  ( 130 )...( 146 ): O95800
IMSLKTVAVIALHRLR

SEQ ID NO: 4727 - protein, 16 aa, Homo Sapiens
  ( 132 )...( 148 ): O95800
SLKTVAVIALHRLRMV

SEQ ID NO: 4728 - protein, 16 aa, Homo Sapiens
  ( 133 )...( 149 ): O95800
LKTVAVIALHRLRMVL

SEQ ID NO: 4729 - protein, 16 aa, Homo Sapiens
  ( 134 )...( 150 ): O95800
KTVAVIALHRLRMVLG

SEQ ID NO: 4730 - protein, 16 aa, Homo Sapiens
  ( 135 )...( 151 ): O95800
TVAVIALHRLRMVLGK

SEQ ID NO: 4731 - protein, 16 aa, Homo Sapiens
  ( 136 )...( 152 ): O95800
VAVIALHRLRMVLGKQ

SEQ ID NO: 4732 - protein, 16 aa, Homo Sapiens
  ( 222 )...( 238 ): O95800
YIMIAQTLRKNAQVRK

SEQ ID NO: 4733 - protein, 16 aa, Homo Sapiens
  ( 197 )...( 213 ): Q9UD67
MASAKTKTHFSVRLLK

SEQ ID NO: 4734 - protein, 16 aa, Homo Sapiens
  ( 210 )...( 226 ): Q9UD67
LLKFSREKKAAKTLGI

SEQ ID NO: 4735 - protein, 16 aa, Homo Sapiens
  ( 211 )...( 227 ): Q9UD67
LKFSREKKAAKTLGIV

SEQ ID NO: 4736 - protein, 16 aa, Homo Sapiens
  ( 217 )...( 233 ): Q9UD67
KKAAKTLGIVVGCFVL

SEQ ID NO: 4737 - protein, 16 aa, Homo Sapiens
  ( 248 )...( 264 ): Q9UD63
MASAKTKTHFSVRLLK

SEQ ID NO: 4738 - protein, 16 aa, Homo Sapiens
  ( 261 )...( 277 ): Q9UD63
LLKFSREKKAAKTLGI

SEQ ID NO: 4739 - protein, 16 aa, Homo Sapiens
  ( 262 )...( 278 ): Q9UD63
LKFSREKKAAKTLGIV

SEQ ID NO: 4740 - protein, 16 aa, Homo Sapiens
  ( 268 )...( 284 ): Q9UD63
KKAAKTLGIVVGCFVL

SEQ ID NO: 4741 - protein, 16 aa, Homo Sapiens
  ( 248 )...( 264 ): O60451
MASAKTKTHFSVRLLK

SEQ ID NO: 4742 - protein, 16 aa, Homo Sapiens
  ( 261 )...( 277 ): O60451
LLKFSREKKAAKTLGI

SEQ ID NO: 4743 - protein, 16 aa, Homo Sapiens
  ( 262 )...( 278 ): O60451
LKFSREKKAAKTLGIV

SEQ ID NO: 4744 - protein, 16 aa, Homo Sapiens
  ( 268 )...( 284 ): O60451
KKAAKTLGIVVGCFVL

SEQ ID NO: 4745 - protein, 16 aa, Homo Sapiens
  ( 147 )...( 163 ): Q9NZR3
SSKRRVTVMISIVWVL

SEQ ID NO: 4746 - protein, 16 aa, Homo Sapiens
  ( 148 )...( 164 ): Q9NZR3
SKRRVTVMISIVWVLS

SEQ ID NO: 4747 - protein, 16 aa, Homo Sapiens
  ( 149 )...( 165 ): Q9NZR3
KRRVTVMISIVWVLSF

SEQ ID NO: 4748 - protein, 16 aa, Homo Sapiens
  ( 203 )...( 219 ): Q9NZR3
IVTLLVYIKIYIVLRR

SEQ ID NO: 4749 - protein, 16 aa, Homo Sapiens
  ( 204 )...( 220 ): Q9NZR3
VTLLVYIKIYIVLRRR

SEQ ID NO: 4750 - protein, 16 aa, Homo Sapiens
  ( 205 )...( 221 ): Q9NZR3
TLLVYIKIYIVLRRRR

SEQ ID NO: 4751 - protein, 16 aa, Homo Sapiens
  ( 206 )...( 222 ): Q9NZR3
LLVYIKIYIVLRRRRK

SEQ ID NO: 4752 - protein, 16 aa, Homo Sapiens
  ( 207 )...( 223 ): Q9NZR3
LVYIKIYIVLRRRRKR

SEQ ID NO: 4753 - protein, 16 aa, Homo Sapiens
  ( 208 )...( 224 ): Q9NZR3
VYIKIYIVLRRRRKRV

SEQ ID NO: 4754 - protein, 16 aa, Homo Sapiens
  ( 210 )...( 226 ): Q9NZR3
IKIYIVLRRRRKRVNT

SEQ ID NO: 4755 - protein, 16 aa, Homo Sapiens
  ( 134 )...( 150 ): Q9P2Q4
KRTPKHAGIMITIVWI

SEQ ID NO: 4756 - protein, 16 aa, Homo Sapiens
  ( 194 )...( 210 ): Q9P2Q4
LALILILYYKIYRAAK

SEQ ID NO: 4757 - protein, 16 aa, Homo Sapiens
  ( 195 )...( 211 ): Q9P2Q4
ALILILYYKIYRAAKT

SEQ ID NO: 4758 - protein, 16 aa, Homo Sapiens
  ( 196 )...( 212 ): Q9P2Q4
LILILYYKIYRAAKTL

SEQ ID NO: 4759 - protein, 16 aa, Homo Sapiens
  ( 197 )...( 213 ): Q9P2Q4
ILILYYKIYRAAKTLY

SEQ ID NO: 4760 - protein, 16 aa, Homo Sapiens
  ( 198 )...( 214 ): Q9P2Q4
LILYYKIYRAAKTLYH

SEQ ID NO: 4761 - protein, 16 aa, Homo Sapiens
  ( 199 )...( 215 ): Q9P2Q4
ILYYKIYRAAKTLYHK

SEQ ID NO: 4762 - protein, 16 aa, Homo Sapiens
  ( 200 )...( 216 ): Q9P2Q4
LYYKIYRAAKTLYHKR

SEQ ID NO: 4763 - protein, 16 aa, Homo Sapiens
  ( 201 )...( 217 ): Q9P2Q4
YYKIYRAAKTLYHKRQ

SEQ ID NO: 4764 - protein, 16 aa, Homo Sapiens
  ( 99 )...( 115 ): Q9P1X9
VTKPLTYPVKRTTKMA

SEQ ID NO: 4765 - protein, 16 aa, Homo Sapiens
  ( 100 )...( 116 ): Q9P1X9
TKPLTYPVKRTTKMAG

SEQ ID NO: 4766 - protein, 16 aa, Homo Sapiens
  ( 331 )...( 347 ): Q9P1X9
KQNIVARKIVKMTKQP

SEQ ID NO: 4767 - protein, 16 aa, Homo Sapiens
  ( 332 )...( 348 ): Q9P1X9
QNIVARKIVKMTKQPA

SEQ ID NO: 4768 - protein, 16 aa, Homo Sapiens
  ( 333 )...( 349 ): Q9P1X9
NIVARKIVKMTKQPAK

SEQ ID NO: 4769 - protein, 16 aa, Homo Sapiens
  ( 334 )...( 350 ): Q9P1X9
IVARKIVKMTKQPAKK

SEQ ID NO: 4770 - protein, 16 aa, Homo Sapiens
  ( 338 )...( 354 ): Q9P1X9
KIVKMTKQPAKKKPPP

SEQ ID NO: 4771 - protein, 16 aa, Homo Sapiens
  ( 339 )...( 355 ): Q9P1X9
IVKMTKQPAKKKPPPS

SEQ ID NO: 4772 - protein, 16 aa, Homo Sapiens
  ( 353 )...( 369 ): Q9P1X9
PSREKKVTRTILAILL

SEQ ID NO: 4773 - protein, 16 aa, Homo Sapiens
  ( 354 )...( 370 ): Q9P1X9
SREKKVTRTILAILLA

SEQ ID NO: 4774 - protein, 16 aa, Homo Sapiens
  ( 355 )...( 371 ): Q9P1X9
REKKVTRTILAILLAF

SEQ ID NO: 4775 - protein, 16 aa, Homo Sapiens
  ( 357 )...( 373 ): Q9P1X9
KKVTRTILAILLAFII

SEQ ID NO: 4776 - protein, 16 aa, Homo Sapiens
  ( 147 )...( 163 ): Q9UPA9
SSKRRVTVMISIVWVL

SEQ ID NO: 4777 - protein, 16 aa, Homo Sapiens
  ( 148 )...( 164 ): Q9UPA9
SKRRVTVMISIVWVLS

SEQ ID NO: 4778 - protein, 16 aa, Homo Sapiens
  ( 149 )...( 165 ): Q9UPA9
KRRVTVMISIVWVLSF

SEQ ID NO: 4779 - protein, 16 aa, Homo Sapiens
  ( 203 )...( 219 ): Q9UPA9
IVTLLVYIKIYIVLRR

SEQ ID NO: 4780 - protein, 16 aa, Homo Sapiens
  ( 204 )...( 220 ): Q9UPA9
VTLLVYIKIYIVLRRR

SEQ ID NO: 4781 - protein, 16 aa, Homo Sapiens
  ( 205 )...( 221 ): Q9UPA9
TLLVYIKIYIVLRRRR

SEQ ID NO: 4782 - protein, 16 aa, Homo Sapiens
  ( 206 )...( 222 ): Q9UPA9
LLVYIKIYIVLRRRRK

SEQ ID NO: 4783 - protein, 16 aa, Homo Sapiens
  ( 207 )...( 223 ): Q9UPA9
LVYIKIYIVLRRRRKR

SEQ ID NO: 4784 - protein, 16 aa, Homo Sapiens
  ( 208 )...( 224 ): Q9UPA9
VYIKIYIVLRRRRKRV

SEQ ID NO: 4785 - protein, 16 aa, Homo Sapiens
  ( 210 )...( 226 ): Q9UPA9
IKIYIVLRRRRKRVNT

SEQ ID NO: 4786 - protein, 16 aa, Homo Sapiens
  ( 155 )...( 171 ): Q9UL61
GAVLGRHLVSRIIIAK

SEQ ID NO: 4787 - protein, 16 aa, Homo Sapiens
  ( 1065 )...( 1081 ): Q9UL61
VKVFWRVTLNKTVVVL

SEQ ID NO: 4788 - protein, 16 aa, Homo Sapiens
  ( 1066 )...( 1082 ): Q9UL61
KVFWRVTLNKTVVVLQ

SEQ ID NO: 4789 - protein, 16 aa, Homo Sapiens
  ( 1067 )...( 1083 ): Q9UL61
VFWRVTLNKTVVVLQK

SEQ ID NO: 4790 - protein, 16 aa, Homo Sapiens
  ( 1162 )...( 1178 ): Q9UL61
SVGSRLAVAHKKATLI

SEQ ID NO: 4791 - protein, 16 aa, Homo Sapiens
  ( 1163 )...( 1179 ): Q9UL61
VGSRLAVAHKKATLIS

SEQ ID NO: 4792 - protein, 16 aa, Homo Sapiens
  ( 1164 )...( 1180 ): Q9UL61
GSRLAVAHKKATLISL

SEQ ID NO: 4793 - protein, 16 aa, Homo Sapiens
  ( 1165 )...( 1181 ): Q9UL61
SRLAVAHKKATLISLQ

SEQ ID NO: 4794 - protein, 16 aa, Homo Sapiens
  ( 1166 )...( 1182 ): Q9UL61
RLAVAHKKATLISLQV

SEQ ID NO: 4795 - protein, 16 aa, Homo Sapiens
  ( 1168 )...( 1184 ): Q9UL61
AVAHKKATLISLQVAR

SEQ ID NO: 4796 - protein, 16 aa, Homo Sapiens
  ( 1471 )...( 1487 ): Q9UL61
NNLPTLKNKVLSLSVK

SEQ ID NO: 4797 - protein, 16 aa, Homo Sapiens
  ( 1472 )...( 1488 ): Q9UL61
NLPTLKNKVLSLSVKG

SEQ ID NO: 4798 - protein, 16 aa, Homo Sapiens
  ( 1473 )...( 1489 ): Q9UL61
LPTLKNKVLSLSVKGQ

SEQ ID NO: 4799 - protein, 16 aa, Homo Sapiens
  ( 1474 )...( 1490 ): Q9UL61
PTLKNKVLSLSVKGQS

SEQ ID NO: 4800 - protein, 16 aa, Homo Sapiens
  ( 49 )...( 65 ): O75963
VVTLYKKSYLLTLSNK

SEQ ID NO: 4801 - protein, 16 aa, Homo Sapiens
  ( 50 )...( 66 ): O75963
VTLYKKSYLLTLSNKF

SEQ ID NO: 4802 - protein, 16 aa, Homo Sapiens
  ( 51 )...( 67 ): O75963
TLYKKSYLLTLSNKFV

SEQ ID NO: 4803 - protein, 16 aa, Homo Sapiens
  ( 52 )...( 68 ): O75963
LYKKSYLLTLSNKFVF

SEQ ID NO: 4804 - protein, 16 aa, Homo Sapiens
  ( 54 )...( 70 ): O75963
KKSYLLTLSNKFVFSL

SEQ ID NO: 4805 - protein, 16 aa, Homo Sapiens
  ( 214 )...( 230 ): O75963
VARVKARKVHCGTVVI

SEQ ID NO: 4806 - protein, 16 aa, Homo Sapiens
  ( 215 )...( 231 ): O75963
ARVKARKVHCGTVVIV

SEQ ID NO: 4807 - protein, 16 aa, Homo Sapiens
  ( 67 )...( 83 ): Q9NZH0
LILLVRLPFIKEKEKK

SEQ ID NO: 4808 - protein, 16 aa, Homo Sapiens
  ( 68 )...( 84 ): Q9NZH0
ILLVRLPFIKEKEKKS

SEQ ID NO: 4809 - protein, 16 aa, Homo Sapiens
  ( 69 )...( 85 ): Q9NZH0
LLVRLPFIKEKEKKSP

SEQ ID NO: 4810 - protein, 16 aa, Homo Sapiens
  ( 70 )...( 86 ): Q9NZH0
LVRLPFIKEKEKKSPV

SEQ ID NO: 4811 - protein, 16 aa, Homo Sapiens
  ( 71 )...( 87 ): Q9NZH0
VRLPFIKEKEKKSPVG

SEQ ID NO: 4812 - protein, 16 aa, Homo Sapiens
  ( 72 )...( 88 ): Q9NZH0
RLPFIKEKEKKSPVGL

SEQ ID NO: 4813 - protein, 16 aa, Homo Sapiens
  ( 216 )...( 232 ): Q9NZH0
GKFKRWKLNGAFLLIT

SEQ ID NO: 4814 - protein, 16 aa, Homo Sapiens
  ( 217 )...( 233 ): Q9NZH0
KFKRWKLNGAFLLITA

SEQ ID NO: 4815 - protein, 16 aa, Homo Sapiens
  ( 134 )...( 150 ): Q9NRB8
MRVHSNLTKKRVTLLI

SEQ ID NO: 4816 - protein, 16 aa, Homo Sapiens
  ( 135 )...( 151 ): Q9NRB8
RVHSNLTKKRVTLLIL

SEQ ID NO: 4817 - protein, 16 aa, Homo Sapiens
  ( 136 )...( 152 ): Q9NRB8
VHSNLTKKRVTLLILL

SEQ ID NO: 4818 - protein, 16 aa, Homo Sapiens
  ( 137 )...( 153 ): Q9NRB8
HSNLTKKRVTLLILLV

SEQ ID NO: 4819 - protein, 16 aa, Homo Sapiens
  ( 138 )...( 154 ): Q9NRB8
SNLTKKRVTLLILLVW

SEQ ID NO: 4820 - protein, 16 aa, Homo Sapiens
  ( 139 )...( 155 ): Q9NRB8
NLTKKRVTLLILLVWA

SEQ ID NO: 4821 - protein, 16 aa, Homo Sapiens
  ( 140 )...( 156 ): Q9NRB8
LTKKRVTLLILLVWAI

SEQ ID NO: 4822 - protein, 16 aa, Homo Sapiens
  ( 141 )...( 157 ): Q9NRB8
TKKRVTLLILLVWAIA

SEQ ID NO: 4823 - protein, 16 aa, Homo Sapiens
  ( 142 )...( 158 ): Q9NRB8
KKRVTLLILLVWAIAI

SEQ ID NO: 4824 - protein, 16 aa, Homo Sapiens
  ( 205 )...( 221 ): Q9NRB8
VYLRIYVYVKRKTNVL

SEQ ID NO: 4825 - protein, 16 aa, Homo Sapiens
  ( 206 )...( 222 ): Q9NRB8
YLRIYVYVKRKTNVLS

SEQ ID NO: 4826 - protein, 16 aa, Homo Sapiens
  ( 207 )...( 223 ): Q9NRB8
LRIYVYVKRKTNVLSP

SEQ ID NO: 4827 - protein, 16 aa, Homo Sapiens
  ( 209 )...( 225 ): Q9NRB8
IYVYVKRKTNVLSPHT

SEQ ID NO: 4828 - protein, 16 aa, Homo Sapiens
  ( 230 )...( 246 ): Q9NRB8
RRRTPMKLMKTVMTVL

SEQ ID NO: 4829 - protein, 16 aa, Homo Sapiens
  ( 231 )...( 247 ): Q9NRB8
RRTPMKLMKTVMTVLG

SEQ ID NO: 4830 - protein, 16 aa, Homo Sapiens
  ( 232 )...( 248 ): Q9NRB8
RTPMKLMKTVMTVLGA

SEQ ID NO: 4831 - protein, 16 aa, Homo Sapiens
  ( 85 )...( 101 ): Q9HB60
GNILVIVSFKVNKQLK

SEQ ID NO: 4832 - protein, 16 aa, Homo Sapiens
  ( 86 )...( 102 ): Q9HB60
NILVIVSFKVNKQLKT

SEQ ID NO: 4833 - protein, 16 aa, Homo Sapiens
  ( 87 )...( 103 ): Q9HB60
ILVIVSFKVNKQLKTV

SEQ ID NO: 4834 - protein, 16 aa, Homo Sapiens
  ( 88 )...( 104 ): Q9HB60
LVIVSFKVNKQLKTVN

SEQ ID NO: 4835 - protein, 16 aa, Homo Sapiens
  ( 89 )...( 105 ): Q9HB60
VIVSFKVNKQLKTVNN

SEQ ID NO: 4836 - protein, 16 aa, Homo Sapiens
  ( 90 )...( 106 ): Q9HB60
IVSFKVNKQLKTVNNY

SEQ ID NO: 4837 - protein, 16 aa, Homo Sapiens
  ( 91 )...( 107 ): Q9HB60
VSFKVNKQLKTVNNYF

SEQ ID NO: 4838 - protein, 16 aa, Homo Sapiens
  ( 92 )...( 108 ): Q9HB60
SFKVNKQLKTVNNYFL

SEQ ID NO: 4839 - protein, 16 aa, Homo Sapiens
  ( 93 )...( 109 ): Q9HB60
FKVNKQLKTVNNYFLL

SEQ ID NO: 4840 - protein, 16 aa, Homo Sapiens
  ( 94 )...( 110 ): Q9HB60
KVNKQLKTVNNYFLLS

SEQ ID NO: 4841 - protein, 16 aa, Homo Sapiens
  ( 179 )...( 195 ): Q9HB60
KRTTKRAGVMIGLAWV

SEQ ID NO: 4842 - protein, 16 aa, Homo Sapiens
  ( 141 )...( 157 ): Q9BZK1
YNLKRTPRRIKAIIIT

SEQ ID NO: 4843 - protein, 16 aa, Homo Sapiens
  ( 142 )...( 158 ): Q9BZK1
NLKRTPRRIKAIIITV

SEQ ID NO: 4844 - protein, 16 aa, Homo Sapiens
  ( 143 )...( 159 ): Q9BZK1
LKRTPRRIKAIIITVW

SEQ ID NO: 4845 - protein, 16 aa, Homo Sapiens
  ( 144 )...( 160 ): Q9BZK1
KRTPRRIKAIIITVWV

SEQ ID NO: 4846 - protein, 16 aa, Homo Sapiens
  ( 145 )...( 161 ): Q9BZK1
RTPRRIKAIIITVWVI

SEQ ID NO: 4847 - protein, 16 aa, Homo Sapiens
  ( 146 )...( 162 ): Q9BZK1
TPRRIKAIIITVWVIS

SEQ ID NO: 4848 - protein, 16 aa, Homo Sapiens
  ( 147 )...( 163 ): Q9BZK1
PRRIKAIIITVWVISA

SEQ ID NO: 4849 - protein, 16 aa, Homo Sapiens
  ( 148 )...( 164 ): Q9BZK1
RRIKAIIITVWVISAV

SEQ ID NO: 4850 - protein, 16 aa, Homo Sapiens
  ( 210 )...( 226 ): Q9BZK1
LIMILVYVRIYQIAKR

SEQ ID NO: 4851 - protein, 16 aa, Homo Sapiens
  ( 211 )...( 227 ): Q9BZK1
IMILVYVRIYQIAKRR

SEQ ID NO: 4852 - protein, 16 aa, Homo Sapiens
  ( 212 )...( 228 ): Q9BZK1
MILVYVRIYQIAKRRT

SEQ ID NO: 4853 - protein, 16 aa, Homo Sapiens
  ( 213 )...( 229 ): Q9BZK1
ILVYVRIYQIAKRRTR

SEQ ID NO: 4854 - protein, 16 aa, Homo Sapiens
  ( 214 )...( 230 ): Q9BZK1
LVYVRIYQIAKRRTRV

SEQ ID NO: 4855 - protein, 16 aa, Homo Sapiens
  ( 127 )...( 143 ): Q9BZK0
RRIKCIILTVWLIAAV

SEQ ID NO: 4856 - protein, 16 aa, Homo Sapiens
  ( 186 )...( 202 ): Q9BZK0
LIMILVYLRIYLIAKR

SEQ ID NO: 4857 - protein, 16 aa, Homo Sapiens
  ( 187 )...( 203 ): Q9BZK0
IMILVYLRIYLIAKRS

SEQ ID NO: 4858 - protein, 16 aa, Homo Sapiens
  ( 331 )...( 347 ): Q9BZK0
RVLATLRGQVLLGRGV

SEQ ID NO: 4859 - protein, 16 aa, Homo Sapiens
  ( 116 )...( 132 ): Q9BXA5
RYLIIKYPFREHLLQK

SEQ ID NO: 4860 - protein, 16 aa, Homo Sapiens
  ( 117 )...( 133 ): Q9BXA5
YLIIKYPFREHLLQKK

SEQ ID NO: 4861 - protein, 16 aa, Homo Sapiens
  ( 203 )...( 219 ): Q9BXA5
YYKIALFLKQRNRQVA

SEQ ID NO: 4862 - protein, 16 aa, Homo Sapiens
  ( 204 )...( 220 ): Q9BXA5
YKIALFLKQRNRQVAT

SEQ ID NO: 4863 - protein, 16 aa, Homo Sapiens
  ( 205 )...( 221 ): Q9BXA5
KIALFLKQRNRQVATA

SEQ ID NO: 4864 - protein, 16 aa, Homo Sapiens
  ( 206 )...( 222 ): Q9BXA5
IALFLKQRNRQVATAL

SEQ ID NO: 4865 - protein, 16 aa, Homo Sapiens
  ( 55 )...( 71 ): Q9BXA0
GNGLVILVMGYQKKLR

SEQ ID NO: 4866 - protein, 16 aa, Homo Sapiens
  ( 56 )...( 72 ): Q9BXA0
NGLVILVMGYQKKLRS

SEQ ID NO: 4867 - protein, 16 aa, Homo Sapiens
  ( 57 )...( 73 ): Q9BXA0
GLVILVMGYQKKLRSM

SEQ ID NO: 4868 - protein, 16 aa, Homo Sapiens
  ( 58 )...( 74 ): Q9BXA0
LVILVMGYQKKLRSMT

SEQ ID NO: 4869 - protein, 16 aa, Homo Sapiens
  ( 60 )...( 76 ): Q9BXA0
ILVMGYQKKLRSMTDK

SEQ ID NO: 4870 - protein, 16 aa, Homo Sapiens
  ( 145 )...( 161 ): Q9BXA0
QRPRKLLAEKVVYVGV

SEQ ID NO: 4871 - protein, 16 aa, Homo Sapiens
  ( 146 )...( 162 ): Q9BXA0
RPRKLLAEKVVYVGVW

SEQ ID NO: 4872 - protein, 16 aa, Homo Sapiens
  ( 230 )...( 246 ): Q9BXA0
KGHQKRKALKTTIIPI

SEQ ID NO: 4873 - protein, 16 aa, Homo Sapiens
  ( 231 )...( 247 ): Q9BXA0
GHQKRKALKTTIIPIL

SEQ ID NO: 4874 - protein, 16 aa, Homo Sapiens
  ( 232 )...( 248 ): Q9BXA0
HQKRKALKTTIIPILA

SEQ ID NO: 4875 - protein, 16 aa, Homo Sapiens
  ( 233 )...( 249 ): Q9BXA0
QKRKALKTTIIPILAF

SEQ ID NO: 4876 - protein, 16 aa, Homo Sapiens
  ( 234 )...( 250 ): Q9BXA0
KRKALKTTIIPILAFF

SEQ ID NO: 4877 - protein, 16 aa, Homo Sapiens
  ( 235 )...( 251 ): Q9BXA0
RKALKTTIIPILAFFA

SEQ ID NO: 4878 - protein, 16 aa, Homo Sapiens
  ( 14 )...( 30 ): Q9NTT0
MTKTRTFFAAKIVIGI

SEQ ID NO: 4879 - protein, 16 aa, Homo Sapiens
  ( 15 )...( 31 ): Q9NTT0
TKTRTFFAAKIVIGIA

SEQ ID NO: 4880 - protein, 16 aa, Homo Sapiens
  ( 16 )...( 32 ): Q9NTT0
KTRTFFAAKIVIGIAL

SEQ ID NO: 4881 - protein, 16 aa, Homo Sapiens
  ( 40 )...( 56 ): Q9NTT0
IGNFVFIAALTRYKKL

SEQ ID NO: 4882 - protein, 16 aa, Homo Sapiens
  ( 44 )...( 60 ): Q9NTT0
VFIAALTRYKKLRNLT

SEQ ID NO: 4883 - protein, 16 aa, Homo Sapiens
  ( 46 )...( 62 ): Q9NTT0
IAALTRYKKLRNLTNL

SEQ ID NO: 4884 - protein, 16 aa, Homo Sapiens
  ( 47 )...( 63 ): Q9NTT0
AALTRYKKLRNLTNLL

SEQ ID NO: 4885 - protein, 16 aa, Homo Sapiens
  ( 48 )...( 64 ): Q9NTT0
ALTRYKKLRNLTNLLI

SEQ ID NO: 4886 - protein, 16 aa, Homo Sapiens
  ( 49 )...( 65 ): Q9NTT0
LTRYKKLRNLTNLLIA

SEQ ID NO: 4887 - protein, 16 aa, Homo Sapiens
  ( 50 )...( 66 ): Q9NTT0
TRYKKLRNLTNLLIAN

SEQ ID NO: 4888 - protein, 16 aa, Homo Sapiens
  ( 51 )...( 67 ): Q9NTT0
RYKKLRNLTNLLIANL

SEQ ID NO: 4889 - protein, 16 aa, Homo Sapiens
  ( 52 )...( 68 ): Q9NTT0
YKKLRNLTNLLIANLA

SEQ ID NO: 4890 - protein, 16 aa, Homo Sapiens
  ( 241 )...( 257 ): Q9NTT0
RRKTVLVLMCILTAYV

SEQ ID NO: 4891 - protein, 16 aa, Homo Sapiens
  ( 339 )...( 355 ): Q9H573
LRRITRMVLVVVAVFI

SEQ ID NO: 4892 - protein, 16 aa, Homo Sapiens
  ( 340 )...( 356 ): Q9H573
RRITRMVLVVVAVFIV

SEQ ID NO: 4893 - protein, 16 aa, Homo Sapiens
  ( 337 )...( 353 ): Q9H1N4
LLKFSREKKAAKTLAI

SEQ ID NO: 4894 - protein, 16 aa, Homo Sapiens
  ( 338 )...( 354 ): Q9H1N4
LKFSREKKAAKTLAIV

SEQ ID NO: 4895 - protein, 16 aa, Homo Sapiens
  ( 339 )...( 355 ): Q9H1N4
KFSREKKAAKTLAIVV

SEQ ID NO: 4896 - protein, 16 aa, Homo Sapiens
  ( 340 )...( 356 ): Q9H1N4
FSREKKAAKTLAIVVG

SEQ ID NO: 4897 - protein, 16 aa, Homo Sapiens
  ( 342 )...( 358 ): Q9H1N4
REKKAAKTLAIVVGVF

SEQ ID NO: 4898 - protein, 16 aa, Homo Sapiens
  ( 344 )...( 360 ): Q9H1N4
KKAAKTLAIVVGVFVL

SEQ ID NO: 4899 - protein, 16 aa, Homo Sapiens
  ( 83 )...( 99 ): Q9BYZ0
AITSPFKYQSLLTKNK

SEQ ID NO: 4900 - protein, 16 aa, Homo Sapiens
  ( 84 )...( 100 ): Q9BYZ0
ITSPFKYQSLLTKNKA

SEQ ID NO: 4901 - protein, 16 aa, Homo Sapiens
  ( 87 )...( 103 ): Q9BYZ0
PFKYQSLLTKNKARVI

SEQ ID NO: 4902 - protein, 16 aa, Homo Sapiens
  ( 88 )...( 104 ): Q9BYZ0
FKYQSLLTKNKARVII

SEQ ID NO: 4903 - protein, 16 aa, Homo Sapiens
  ( 89 )...( 105 ): Q9BYZ0
KYQSLLTKNKARVIIL

SEQ ID NO: 4904 - protein, 16 aa, Homo Sapiens
  ( 90 )...( 106 ): Q9BYZ0
YQSLLTKNKARVIILM

SEQ ID NO: 4905 - protein, 16 aa, Homo Sapiens
  ( 91 )...( 107 ): Q9BYZ0
QSLLTKNKARVIILMV

SEQ ID NO: 4906 - protein, 16 aa, Homo Sapiens
  ( 92 )...( 108 ): Q9BYZ0
SLLTKNKARVIILMVW

SEQ ID NO: 4907 - protein, 16 aa, Homo Sapiens
  ( 93 )...( 109 ): Q9BYZ0
LLTKNKARVIILMVWI

SEQ ID NO: 4908 - protein, 16 aa, Homo Sapiens
  ( 94 )...( 110 ): Q9BYZ0
LTKNKARVIILMVWIV

SEQ ID NO: 4909 - protein, 16 aa, Homo Sapiens
  ( 95 )...( 111 ): Q9BYZ0
TKNKARVIILMVWIVS

SEQ ID NO: 4910 - protein, 16 aa, Homo Sapiens
  ( 96 )...( 112 ): Q9BYZ0
KNKARVIILMVWIVSG

SEQ ID NO: 4911 - protein, 16 aa, Homo Sapiens
  ( 167 )...( 183 ): Q9BYZ0
VYSRVFQEAKRQLQKI

SEQ ID NO: 4912 - protein, 16 aa, Homo Sapiens
  ( 211 )...( 227 ): Q9BYZ0
SKFCLKEHKALKTLGI

SEQ ID NO: 4913 - protein, 16 aa, Homo Sapiens
  ( 212 )...( 228 ): Q9BYZ0
KFCLKEHKALKTLGII

SEQ ID NO: 4914 - protein, 16 aa, Homo Sapiens
  ( 248 )...( 264 ): Q13729
MASAKTKTHFSVRLLK

SEQ ID NO: 4915 - protein, 16 aa, Homo Sapiens
  ( 261 )...( 277 ): Q13729
LLKFSREKKAAKTLGI

SEQ ID NO: 4916 - protein, 16 aa, Homo Sapiens
  ( 262 )...( 278 ): Q13729
LKFSREKKAAKTLGIV

SEQ ID NO: 4917 - protein, 16 aa, Homo Sapiens
  ( 268 )...( 284 ): Q13729
KKAAKTLGIVVGCFVL

SEQ ID NO: 4918 - protein, 16 aa, Homo Sapiens
  ( 99 )...( 115 ): Q9NSD7
NLLVLYLMKSMQGWRK

SEQ ID NO: 4919 - protein, 16 aa, Homo Sapiens
  ( 100 )...( 116 ): Q9NSD7
LLVLYLMKSMQGWRKS

SEQ ID NO: 4920 - protein, 16 aa, Homo Sapiens
  ( 317 )...( 333 ): Q9NSD7
SARRLSKVTKSVTIVV

SEQ ID NO: 4921 - protein, 16 aa, Homo Sapiens
  ( 318 )...( 334 ): Q9NSD7
ARRLSKVTKSVTIVVL

SEQ ID NO: 4922 - protein, 16 aa, Homo Sapiens
  ( 319 )...( 335 ): Q9NSD7
RRLSKVTKSVTIVVLS

SEQ ID NO: 4923 - protein, 16 aa, Homo Sapiens
  ( 320 )...( 336 ): Q9NSD7
RLSKVTKSVTIVVLSF

SEQ ID NO: 4924 - protein, 16 aa, Homo Sapiens
  ( 202 )...( 218 ): Q13167
VTVLVYARIYVVLKQR

SEQ ID NO: 4925 - protein, 16 aa, Homo Sapiens
  ( 203 )...( 219 ): Q13167
TVLVYARIYVVLKQRR

SEQ ID NO: 4926 - protein, 16 aa, Homo Sapiens
  ( 204 )...( 220 ): Q13167
VLVYARIYVVLKQRRR

SEQ ID NO: 4927 - protein, 16 aa, Homo Sapiens
  ( 205 )...( 221 ): Q13167
LVYARIYVVLKQRRRK

SEQ ID NO: 4928 - protein, 16 aa, Homo Sapiens
  ( 208 )...( 224 ): Q13167
ARIYVVLKQRRRKRIL

SEQ ID NO: 4929 - protein, 16 aa, Homo Sapiens
  ( 209 )...( 225 ): Q13167
RIYVVLKQRRRKRILT

SEQ ID NO: 4930 - protein, 16 aa, Homo Sapiens
  ( 210 )...( 226 ): Q13167
IYVVLKQRRRKRILTR

SEQ ID NO: 4931 - protein, 16 aa, Homo Sapiens
  ( 317 )...( 333 ): Q13167
RGVPLREKKATQMVAI

SEQ ID NO: 4932 - protein, 16 aa, Homo Sapiens
  ( 159 )...( 175 ): Q9UE21
LAIVHPVKSLKLRRPL

SEQ ID NO: 4933 - protein, 16 aa, Homo Sapiens
  ( 240 )...( 256 ): Q9UE21
YLLIIRSLRQGLRVEK

SEQ ID NO: 4934 - protein, 16 aa, Homo Sapiens
  ( 241 )...( 257 ): Q9UE21
LLIIRSLRQGLRVEKR

SEQ ID NO: 4935 - protein, 16 aa, Homo Sapiens
  ( 242 )...( 258 ): Q9UE21
LIIRSLRQGLRVEKRL

SEQ ID NO: 4936 - protein, 16 aa, Homo Sapiens
  ( 250 )...( 266 ): Q9UE21
GLRVEKRLKTKAVRMI

SEQ ID NO: 4937 - protein, 16 aa, Homo Sapiens
  ( 251 )...( 267 ): Q9UE21
LRVEKRLKTKAVRMIA

SEQ ID NO: 4938 - protein, 16 aa, Homo Sapiens
  ( 252 )...( 268 ): Q9UE21
RVEKRLKTKAVRMIAI

SEQ ID NO: 4939 - protein, 16 aa, Homo Sapiens
  ( 253 )...( 269 ): Q9UE21
VEKRLKTKAVRMIAIV

SEQ ID NO: 4940 - protein, 16 aa, Homo Sapiens
  ( 254 )...( 270 ): Q9UE21
EKRLKTKAVRMIAIVL

SEQ ID NO: 4941 - protein, 16 aa, Homo Sapiens
  ( 255 )...( 271 ): Q9UE21
KRLKTKAVRMIAIVLA

SEQ ID NO: 4942 - protein, 16 aa, Homo Sapiens
  ( 256 )...( 272 ): Q9UE21
RLKTKAVRMIAIVLAI

SEQ ID NO: 4943 - protein, 16 aa, Homo Sapiens
  ( 257 )...( 273 ): Q9UE21
LKTKAVRMIAIVLAIF

SEQ ID NO: 4944 - protein, 16 aa, Homo Sapiens
  ( 258 )...( 274 ): Q9UE21
KTKAVRMIAIVLAIFL

SEQ ID NO: 4945 - protein, 16 aa, Homo Sapiens
  ( 90 )...( 106 ): Q9UDZ6
LAIVHPVKSLKLRRPL

SEQ ID NO: 4946 - protein, 16 aa, Homo Sapiens
  ( 171 )...( 187 ): Q9UDZ6
YLLIIRSLRQGLRVEK

SEQ ID NO: 4947 - protein, 16 aa, Homo Sapiens
  ( 172 )...( 188 ): Q9UDZ6
LLIIRSLRQGLRVEKR

SEQ ID NO: 4948 - protein, 16 aa, Homo Sapiens
  ( 173 )...( 189 ): Q9UDZ6
LIIRSLRQGLRVEKRL

SEQ ID NO: 4949 - protein, 16 aa, Homo Sapiens
  ( 181 )...( 197 ): Q9UDZ6
GLRVEKRLKTKAVRMI

SEQ ID NO: 4950 - protein, 16 aa, Homo Sapiens
  ( 182 )...( 198 ): Q9UDZ6
LRVEKRLKTKAVRMIA

SEQ ID NO: 4951 - protein, 16 aa, Homo Sapiens
  ( 183 )...( 199 ): Q9UDZ6
RVEKRLKTKAVRMIAI

SEQ ID NO: 4952 - protein, 16 aa, Homo Sapiens
  ( 184 )...( 200 ): Q9UDZ6
VEKRLKTKAVRMIAIV

SEQ ID NO: 4953 - protein, 16 aa, Homo Sapiens
  ( 185 )...( 201 ): Q9UDZ6
EKRLKTKAVRMIAIVL

SEQ ID NO: 4954 - protein, 16 aa, Homo Sapiens
  ( 186 )...( 202 ): Q9UDZ6
KRLKTKAVRMIAIVLA

SEQ ID NO: 4955 - protein, 16 aa, Homo Sapiens
  ( 187 )...( 203 ): Q9UDZ6
RLKTKAVRMIAIVLAI

SEQ ID NO: 4956 - protein, 16 aa, Homo Sapiens
  ( 188 )...( 204 ): Q9UDZ6
LKTKAVRMIAIVLAIF

SEQ ID NO: 4957 - protein, 16 aa, Homo Sapiens
  ( 189 )...( 205 ): Q9UDZ6
KTKAVRMIAIVLAIFL

SEQ ID NO: 4958 - protein, 16 aa, Homo Sapiens
  ( 86 )...( 102 ): O00406
KTKITIVKTFNASGVK

SEQ ID NO: 4959 - protein, 16 aa, Homo Sapiens
  ( 87 )...( 103 ): O00406
TKITIVKTFNASGVKP

SEQ ID NO: 4960 - protein, 16 aa, Homo Sapiens
  ( 88 )...( 104 ): O00406
KITIVKTFNASGVKPQ

SEQ ID NO: 4961 - protein, 16 aa, Homo Sapiens
  ( 89 )...( 105 ): O00406
ITIVKTFNASGVKPQR

SEQ ID NO: 4962 - protein, 16 aa, Homo Sapiens
  ( 539 )...( 555 ): O00406
NLTVRNLTRNVTVTLK

SEQ ID NO: 4963 - protein, 16 aa, Homo Sapiens
  ( 540 )...( 556 ): O00406
LTVRNLTRNVTVTLKH

SEQ ID NO: 4964 - protein, 16 aa, Homo Sapiens
  ( 541 )...( 557 ): O00406
TVRNLTRNVTVTLKHI

SEQ ID NO: 4965 - protein, 16 aa, Homo Sapiens
  ( 542 )...( 558 ): O00406
VRNLTRNVTVTLKHIN

SEQ ID NO: 4966 - protein, 16 aa, Homo Sapiens
  ( 715 )...( 731 ): O00406
HMYLALVKVFNTYIRK

SEQ ID NO: 4967 - protein, 16 aa, Homo Sapiens
  ( 717 )...( 733 ): O00406
YLALVKVFNTYIRKYI

SEQ ID NO: 4968 - protein, 16 aa, Homo Sapiens
  ( 718 )...( 734 ): O00406
LALVKVFNTYIRKYIL

SEQ ID NO: 4969 - protein, 16 aa, Homo Sapiens
  ( 719 )...( 735 ): O00406
ALVKVFNTYIRKYILK

SEQ ID NO: 4970 - protein, 16 aa, Homo Sapiens
  ( 802 )...( 818 ): O00406
FIVVLVQLCRIKKKKQ

SEQ ID NO: 4971 - protein, 16 aa, Homo Sapiens
  ( 803 )...( 819 ): O00406
IVVLVQLCRIKKKKQL

SEQ ID NO: 4972 - protein, 16 aa, Homo Sapiens
  ( 804 )...( 820 ): O00406
VVLVQLCRIKKKKQLG

SEQ ID NO: 4973 - protein, 16 aa, Homo Sapiens
  ( 805 )...( 821 ): O00406
VLVQLCRIKKKKQLGA

SEQ ID NO: 4974 - protein, 16 aa, Homo Sapiens
  ( 806 )...( 822 ): O00406
LVQLCRIKKKKQLGAQ

SEQ ID NO: 4975 - protein, 16 aa, Homo Sapiens
  ( 120 )...( 136 ): Q9BPV8
RFLKIIRPLRNIFLKK

SEQ ID NO: 4976 - protein, 16 aa, Homo Sapiens
  ( 121 )...( 137 ): Q9BPV8
FLKIIRPLRNIFLKKP

SEQ ID NO: 4977 - protein, 16 aa, Homo Sapiens
  ( 122 )...( 138 ): Q9BPV8
LKIIRPLRNIFLKKPV

SEQ ID NO: 4978 - protein, 16 aa, Homo Sapiens
  ( 123 )...( 139 ): Q9BPV8
KIIRPLRNIFLKKPVF

SEQ ID NO: 4979 - protein, 16 aa, Homo Sapiens
  ( 127 )...( 143 ): Q9BPV8
PLRNIFLKKPVFAKTV

SEQ ID NO: 4980 - protein, 16 aa, Homo Sapiens
  ( 128 )...( 144 ): Q9BPV8
LRNIFLKKPVFAKTVS

SEQ ID NO: 4981 - protein, 16 aa, Homo Sapiens
  ( 129 )...( 145 ): Q9BPV8
RNIFLKKPVFAKTVSI

SEQ ID NO: 4982 - protein, 16 aa, Homo Sapiens
  ( 130 )...( 146 ): Q9BPV8
NIFLKKPVFAKTVSIF

SEQ ID NO: 4983 - protein, 16 aa, Homo Sapiens
  ( 131 )...( 147 ): Q9BPV8
IFLKKPVFAKTVSIFI

SEQ ID NO: 4984 - protein, 16 aa, Homo Sapiens
  ( 132 )...( 148 ): Q9BPV8
FLKKPVFAKTVSIFIW

SEQ ID NO: 4985 - protein, 16 aa, Homo Sapiens
  ( 133 )...( 149 ): Q9BPV8
LKKPVFAKTVSIFIWF

SEQ ID NO: 4986 - protein, 16 aa, Homo Sapiens
  ( 207 )...( 223 ): Q9BPV8
YVVIAKKVYDSYRKSK

SEQ ID NO: 4987 - protein, 16 aa, Homo Sapiens
  ( 227 )...( 243 ): Q9BPV8
KNNKKLEGKVFVVVAV

SEQ ID NO: 4988 - protein, 16 aa, Homo Sapiens
  ( 70 )...( 86 ): Q9BY21
IRNKTSFIFYLKNIVV

SEQ ID NO: 4989 - protein, 16 aa, Homo Sapiens
  ( 193 )...( 209 ): Q9BY21
SKLKSPLGVKWHTAVT

SEQ ID NO: 4990 - protein, 16 aa, Homo Sapiens
  ( 194 )...( 210 ): Q9BY21
KLKSPLGVKWHTAVTY

SEQ ID NO: 4991 - protein, 16 aa, Homo Sapiens
  ( 148 )...( 164 ): Q96RV1
QCVVYPFKPKLTIKTA

SEQ ID NO: 4992 - protein, 16 aa, Homo Sapiens
  ( 150 )...( 166 ): Q96RV1
VVYPFKPKLTIKTAFV

SEQ ID NO: 4993 - protein, 16 aa, Homo Sapiens
  ( 151 )...( 167 ): Q96RV1
VYPFKPKLTIKTAFVI

SEQ ID NO: 4994 - protein, 16 aa, Homo Sapiens
  ( 152 )...( 168 ): Q96RV1
YPFKPKLTIKTAFVII

SEQ ID NO: 4995 - protein, 16 aa, Homo Sapiens
  ( 153 )...( 169 ): Q96RV1
PFKPKLTIKTAFVIIM

SEQ ID NO: 4996 - protein, 16 aa, Homo Sapiens
  ( 154 )...( 170 ): Q96RV1
FKPKLTIKTAFVIIMI

SEQ ID NO: 4997 - protein, 16 aa, Homo Sapiens
  ( 155 )...( 171 ): Q96RV1
KPKLTIKTAFVIIMII

SEQ ID NO: 4998 - protein, 16 aa, Homo Sapiens
  ( 264 )...( 280 ): Q96RV1
QWHVVSRKKQKIIKML

SEQ ID NO: 4999 - protein, 16 aa, Homo Sapiens
  ( 265 )...( 281 ): Q96RV1
WHVVSRKKQKIIKMLL

SEQ ID NO: 5000 - protein, 16 aa, Homo Sapiens
  ( 266 )...( 282 ): Q96RV1
HVVSRKKQKIIKMLLI

SEQ ID NO: 5001 - protein, 16 aa, Homo Sapiens
  ( 267 )...( 283 ): Q96RV1
VVSRKKQKIIKMLLIV

SEQ ID NO: 5002 - protein, 16 aa, Homo Sapiens
  ( 268 )...( 284 ): Q96RV1
VSRKKQKIIKMLLIVA

SEQ ID NO: 5003 - protein, 16 aa, Homo Sapiens
  ( 269 )...( 285 ): Q96RV1
SRKKQKIIKMLLIVAL

SEQ ID NO: 5004 - protein, 16 aa, Homo Sapiens
  ( 270 )...( 286 ): Q96RV1
RKKQKIIKMLLIVALL

SEQ ID NO: 5005 - protein, 16 aa, Homo Sapiens
  ( 271 )...( 287 ): Q96RV1
KKQKIIKMLLIVALLF

SEQ ID NO: 5006 - protein, 16 aa, Homo Sapiens
  ( 272 )...( 288 ): Q96RV1
KQKIIKMLLIVALLFI

SEQ ID NO: 5007 - protein, 16 aa, Homo Sapiens
  ( 131 )...( 147 ): Q9BWH1
YLFIIIKVKSSGIRVG

SEQ ID NO: 5008 - protein, 16 aa, Homo Sapiens
  ( 132 )...( 148 ): Q9BWH1
LFIIIKVKSSGIRVGS

SEQ ID NO: 5009 - protein, 16 aa, Homo Sapiens
  ( 134 )...( 150 ): Q9BWH1
IIIKVKSSGIRVGSSK

SEQ ID NO: 5010 - protein, 16 aa, Homo Sapiens
  ( 152 )...( 168 ): Q9BWH1
KSEKKVTRMVSIVVAV

SEQ ID NO: 5011 - protein, 16 aa, Homo Sapiens
  ( 155 )...( 171 ): Q9BWH1
KKVTRMVSIVVAVFIF

SEQ ID NO: 5012 - protein, 16 aa, Homo Sapiens
  ( 223 )...( 239 ): Q9BWH1
KKSFQNVLCLVKVSGT

SEQ ID NO: 5013 - protein, 16 aa, Homo Sapiens
  ( 104 )...( 120 ): Q9BXC2
SKLKSPLGVKWHTAVT

SEQ ID NO: 5014 - protein, 16 aa, Homo Sapiens
  ( 105 )...( 121 ): Q9BXC2
KLKSPLGVKWHTAVTY

SEQ ID NO: 5015 - protein, 16 aa, Homo Sapiens
  ( 242 )...( 258 ): O95977
ARRKARRLLKTVLMIL

SEQ ID NO: 5016 - protein, 16 aa, Homo Sapiens
  ( 243 )...( 259 ): O95977
RRKARRLLKTVLMILL

SEQ ID NO: 5017 - protein, 16 aa, Homo Sapiens
  ( 244 )...( 260 ): O95977
RKARRLLKTVLMILLA

SEQ ID NO: 5018 - protein, 16 aa, Homo Sapiens
  ( 245 )...( 261 ): O95977
KARRLLKTVLMILLAF

SEQ ID NO: 5019 - protein, 16 aa, Homo Sapiens
  ( 246 )...( 262 ): O95977
ARRLLKTVLMILLAFL

SEQ ID NO: 5020 - protein, 16 aa, Homo Sapiens
  ( 247 )...( 263 ): O95977
RRLLKTVLMILLAFLV

SEQ ID NO: 5021 - protein, 16 aa, Homo Sapiens
  ( 81 )...( 97 ): Q9NZG5
TKKRSLLGTQVFFLLG

SEQ ID NO: 5022 - protein, 16 aa, Homo Sapiens
  ( 82 )...( 98 ): Q9NZG5
KKRSLLGTQVFFLLGT

SEQ ID NO: 5023 - protein, 16 aa, Homo Sapiens
  ( 235 )...( 251 ): Q9NZG5
YKRWRKHGVFVLLTTA

SEQ ID NO: 5024 - protein, 16 aa, Homo Sapiens
  ( 236 )...( 252 ): Q9NZG5
KRWRKHGVFVLLTTAT

SEQ ID NO: 5025 - protein, 16 aa, Homo Sapiens
  ( 52 )...( 68 ): Q9H244
QIRSKSNFIIFLKNTV

SEQ ID NO: 5026 - protein, 16 aa, Homo Sapiens
  ( 53 )...( 69 ): Q9H244
IRSKSNFIIFLKNTVI

SEQ ID NO: 5027 - protein, 16 aa, Homo Sapiens
  ( 117 )...( 133 ): Q9H244
LITIDRYQKTTRPFKT

SEQ ID NO: 5028 - protein, 16 aa, Homo Sapiens
  ( 131 )...( 147 ): Q9H244
KTSNPKNLLGAKILSV

SEQ ID NO: 5029 - protein, 16 aa, Homo Sapiens
  ( 225 )...( 241 ): Q9H244
GVGKVPRKKVNVKVFI

SEQ ID NO: 5030 - protein, 16 aa, Homo Sapiens
  ( 226 )...( 242 ): Q9H244
VGKVPRKKVNVKVFII

SEQ ID NO: 5031 - protein, 16 aa, Homo Sapiens
  ( 227 )...( 243 ): Q9H244
GKVPRKKVNVKVFIII

SEQ ID NO: 5032 - protein, 16 aa, Homo Sapiens
  ( 228 )...( 244 ): Q9H244
KVPRKKVNVKVFIIIA

SEQ ID NO: 5033 - protein, 16 aa, Homo Sapiens
  ( 229 )...( 245 ): Q9H244
VPRKKVNVKVFIIIAV

SEQ ID NO: 5034 - protein, 16 aa, Homo Sapiens
  ( 230 )...( 246 ): Q9H244
PRKKVNVKVFIIIAVF

SEQ ID NO: 5035 - protein, 16 aa, Homo Sapiens
  ( 231 )...( 247 ): Q9H244
RKKVNVKVFIIIAVFF

SEQ ID NO: 5036 - protein, 16 aa, Homo Sapiens
  ( 232 )...( 248 ): Q9H244
KKVNVKVFIIIAVFFI

SEQ ID NO: 5037 - protein, 16 aa, Homo Sapiens
  ( 219 )...( 235 ): Q9IP67
QSRHKGRIVRVLIAVV

SEQ ID NO: 5038 - protein, 16 aa, Homo Sapiens
  ( 220 )...( 236 ): Q9IP67
SRHKGRIVRVLIAVVL

SEQ ID NO: 5039 - protein, 16 aa, Homo Sapiens
  ( 221 )...( 237 ): Q9IP67
RHKGRIVRVLIAVVLV

SEQ ID NO: 5040 - protein, 16 aa, Homo Sapiens
  ( 222 )...( 238 ): Q9IP67
HKGRIVRVLIAVVLVF

SEQ ID NO: 5041 - protein, 16 aa, Homo Sapiens
  ( 223 )...( 239 ): Q9IP67
KGRIVRVLIAVVLVFI

SEQ ID NO: 5042 - protein, 16 aa, Homo Sapiens
  ( 219 )...( 235 ): Q9IP66
QSRHKGRIVRVLIAVV

SEQ ID NO: 5043 - protein, 16 aa, Homo Sapiens
  ( 220 )...( 236 ): Q9IP66
SRHKGRIVRVLIAVVL

SEQ ID NO: 5044 - protein, 16 aa, Homo Sapiens
  ( 221 )...( 237 ): Q9IP66
RHKGRIVRVLIAVVLV

SEQ ID NO: 5045 - protein, 16 aa, Homo Sapiens
  ( 222 )...( 238 ): Q9IP66
HKGRIVRVLIAVVLVF

SEQ ID NO: 5046 - protein, 16 aa, Rattus Norvegicus
  ( 334 )...( 350 ): 5H1A_RAT
KMALARERKTVKTLGI

SEQ ID NO: 5047 - protein, 16 aa, Rattus Norvegicus
  ( 335 )...( 351 ): 5H1A_RAT
MALARERKTVKTLGII

SEQ ID NO: 5048 - protein, 16 aa, Rattus Norvegicus
  ( 336 )...( 352 ): 5H1A_RAT
ALARERKTVKTLGIIM

SEQ ID NO: 5049 - protein, 16 aa, Rattus Norvegicus
  ( 337 )...( 353 ): 5H1A_RAT
LARERKTVKTLGIIMG

SEQ ID NO: 5050 - protein, 16 aa, Rattus Norvegicus
  ( 156 )...( 172 ): 5H1B_RAT
KRTPKRAAIMIVLVWV

SEQ ID NO: 5051 - protein, 16 aa, Rattus Norvegicus
  ( 286 )...( 302 ): 5H1B_RAT
VKVRVSDALLEKKKLM

SEQ ID NO: 5052 - protein, 16 aa, Rattus Norvegicus
  ( 287 )...( 303 ): 5H1B_RAT
KVRVSDALLEKKKLMA

SEQ ID NO: 5053 - protein, 16 aa, Rattus Norvegicus
  ( 300 )...( 316 ): 5H1B_RAT
LMAARERKATKTLGII

SEQ ID NO: 5054 - protein, 16 aa, Rattus Norvegicus
  ( 301 )...( 317 ): 5H1B_RAT
MAARERKATKTLGIIL

SEQ ID NO: 5055 - protein, 16 aa, Rattus Norvegicus
  ( 304 )...( 320 ): 5H1B_RAT
RERKATKTLGIILGAF

SEQ ID NO: 5056 - protein, 16 aa, Rattus Norvegicus
  ( 306 )...( 322 ): 5H1B_RAT
RKATKTLGIILGAFIV

SEQ ID NO: 5057 - protein, 16 aa, Rattus Norvegicus
  ( 286 )...( 302 ): 5H1B_SPAEH
VKVRVSDALLEKKKLM

SEQ ID NO: 5058 - protein, 16 aa, Rattus Norvegicus
  ( 287 )...( 303 ): 5H1B_SPAEH
KVRVSDALLEKKKLMA

SEQ ID NO: 5059 - protein, 16 aa, Rattus Norvegicus
  ( 300 )...( 316 ): 5H1B_SPAEH
LMAARERKATKTLGII

SEQ ID NO: 5060 - protein, 16 aa, Rattus Norvegicus
  ( 301 )...( 317 ): 5H1B_SPAEH
MAARERKATKTLGIIL

SEQ ID NO: 5061 - protein, 16 aa, Rattus Norvegicus
  ( 304 )...( 320 ): 5H1B_SPAEH
RERKATKTLGIILGAF

SEQ ID NO: 5062 - protein, 16 aa, Rattus Norvegicus
  ( 306 )...( 322 ): 5H1B_SPAEH
RKATKTLGIILGAFIV

SEQ ID NO: 5063 - protein, 16 aa, Rattus Norvegicus
  ( 273 )...( 289 ): 5H1D_RAT
QVKIKLADSILERKRI

SEQ ID NO: 5064 - protein, 16 aa, Rattus Norvegicus
  ( 274 )...( 290 ): 5H1D_RAT
VKIKLADSILERKRIS

SEQ ID NO: 5065 - protein, 16 aa, Rattus Norvegicus
  ( 292 )...( 308 ): 5H1D_RAT
RERKATKTLGIILGAF

SEQ ID NO: 5066 - protein, 16 aa, Rattus Norvegicus
  ( 294 )...( 310 ): 5H1D_RAT
RKATKTLGIILGAFII

SEQ ID NO: 5067 - protein, 16 aa, Rattus Norvegicus
  ( 194 )...( 210 ): 5H1F_RAT
LVLILILYYKIYRAAR

SEQ ID NO: 5068 - protein, 16 aa, Rattus Norvegicus
  ( 195 )...( 211 ): 5H1F_RAT
VLILILYYKIYRAART

SEQ ID NO: 5069 - protein, 16 aa, Rattus Norvegicus
  ( 196 )...( 212 ): 5H1F_RAT
LILILYYKIYRAARTL

SEQ ID NO: 5070 - protein, 16 aa, Rattus Norvegicus
  ( 197 )...( 213 ): 5H1F_RAT
ILILYYKIYRAARTLY

SEQ ID NO: 5071 - protein, 16 aa, Rattus Norvegicus
  ( 187 )...( 203 ): 5H2A_RAT
NSRTKAFLKIIAVWTI

SEQ ID NO: 5072 - protein, 16 aa, Rattus Norvegicus
  ( 188 )...( 204 ): 5H2A_RAT
SRTKAFLKIIAVWTIS

SEQ ID NO: 5073 - protein, 16 aa, Rattus Norvegicus
  ( 189 )...( 205 ): 5H2A_RAT
RTKAFLKIIAVWTISV

SEQ ID NO: 5074 - protein, 16 aa, Rattus Norvegicus
  ( 231 )...( 247 ): 5H2B_RAT
IMIVTYFLTIHALRKK

SEQ ID NO: 5075 - protein, 16 aa, Rattus Norvegicus
  ( 232 )...( 248 ): 5H2B_RAT
MIVTYFLTIHALRKKA

SEQ ID NO: 5076 - protein, 16 aa, Rattus Norvegicus
  ( 233 )...( 249 ): 5H2B_RAT
IVTYFLTIHALRKKAY

SEQ ID NO: 5077 - protein, 16 aa, Rattus Norvegicus
  ( 234 )...( 250 ): 5H2B_RAT
VTYFLTIHALRKKAYL

SEQ ID NO: 5078 - protein, 16 aa, Rattus Norvegicus
  ( 235 )...( 251 ): 5H2B_RAT
TYFLTIHALRKKAYLV

SEQ ID NO: 5079 - protein, 16 aa, Rattus Norvegicus
  ( 236 )...( 252 ): 5H2B_RAT
YFLTIHALRKKAYLVR

SEQ ID NO: 5080 - protein, 16 aa, Rattus Norvegicus
  ( 167 )...( 183 ): 5H2C_RAT
NSRTKAIMKIAIVWAI

SEQ ID NO: 5081 - protein, 16 aa, Rattus Norvegicus
  ( 168 )...( 184 ): 5H2C_RAT
SRTKAIMKIAIVWAIS

SEQ ID NO: 5082 - protein, 16 aa, Rattus Norvegicus
  ( 169 )...( 185 ): 5H2C_RAT
RTKAIMKIAIVWAISI

SEQ ID NO: 5083 - protein, 16 aa, Rattus Norvegicus
  ( 236 )...( 252 ): 5H2C_RAT
FLTIYVLRRQTLMLLR

SEQ ID NO: 5084 - protein, 16 aa, Rattus Norvegicus
  ( 237 )...( 253 ): 5H2C_RAT
LTIYVLRRQTLMLLRG

SEQ ID NO: 5085 - protein, 16 aa, Rattus Norvegicus
  ( 238 )...( 254 ): 5H2C_RAT
TIYVLRRQTLMLLRGH

SEQ ID NO: 5086 - protein, 16 aa, Rattus Norvegicus
  ( 239 )...( 255 ): 5H2C_RAT
IYVLRRQTLMLLRGHT

SEQ ID NO: 5087 - protein, 16 aa, Rattus Norvegicus
  ( 309 )...( 325 ): 5H2C_RAT
KKASKVLGIVFFVFLI

SEQ ID NO: 5088 - protein, 16 aa, Rattus Norvegicus
  ( 48 )...( 64 ): 5H4_RAT
RQLRKIKTNYFIVSLA

SEQ ID NO: 5089 - protein, 16 aa, Rattus Norvegicus
  ( 49 )...( 65 ): 5H4_RAT
QLRKIKTNYFIVSLAF

SEQ ID NO: 5090 - protein, 16 aa, Rattus Norvegicus
  ( 59 )...( 75 ): 5H5A_RAT
LLVLATILRVRTFHRV

SEQ ID NO: 5091 - protein, 16 aa, Rattus Norvegicus
  ( 71 )...( 87 ): 5H5B_RAT
LLVLVTILRVRAFHRV

SEQ ID NO: 5092 - protein, 16 aa, Rattus Norvegicus
  ( 226 )...( 242 ): 5H5B_RAT
LAVVLFVYWKIYKAAK

SEQ ID NO: 5093 - protein, 16 aa, Rattus Norvegicus
  ( 227 )...( 243 ): 5H5B_RAT
AVVLFVYWKIYKAAKF

SEQ ID NO: 5094 - protein, 16 aa, Rattus Norvegicus
  ( 255 )...( 271 ): 5H6_RAT
LATKHSRKALKASLTL

SEQ ID NO: 5095 - protein, 16 aa, Rattus Norvegicus
  ( 258 )...( 274 ): 5H6_RAT
KHSRKALKASLTLGIL

SEQ ID NO: 5096 - protein, 16 aa, Rattus Norvegicus
  ( 259 )...( 275 ): 5H6_RAT
HSRKALKASLTLGILL

SEQ ID NO: 5097 - protein, 16 aa, Rattus Norvegicus
  ( 260 )...( 276 ): 5H6_RAT
SRKALKASLTLGILLG

SEQ ID NO: 5098 - protein, 16 aa, Rattus Norvegicus
  ( 261 )...( 277 ): 5H6_RAT
RKALKASLTLGILLGM

SEQ ID NO: 5099 - protein, 16 aa, Rattus Norvegicus
  ( 111 )...( 127 ): 5H7_RAT
FVKKLRQPSNYLIVSL

SEQ ID NO: 5100 - protein, 16 aa, Rattus Norvegicus
  ( 112 )...( 128 ): 5H7_RAT
VKKLRQPSNYLIVSLA

SEQ ID NO: 5101 - protein, 16 aa, Rattus Norvegicus
  ( 113 )...( 129 ): 5H7_RAT
KKLRQPSNYLIVSLAL

SEQ ID NO: 5102 - protein, 16 aa, Rattus Norvegicus
  ( 308 )...( 324 ): 5H7_RAT
LSRLLKHERKNISIFK

SEQ ID NO: 5103 - protein, 16 aa, Rattus Norvegicus
  ( 261 )...( 277 ): A1AA_RAT
LLKFSREKKAAKTLGI

SEQ ID NO: 5104 - protein, 16 aa, Rattus Norvegicus
  ( 262 )...( 278 ): A1AA_RAT
LKFSREKKAAKTLGIV

SEQ ID NO: 5105 - protein, 16 aa, Rattus Norvegicus
  ( 268 )...( 284 ): A1AA_RAT
KKAAKTLGIVVGCFVL

SEQ ID NO: 5106 - protein, 16 aa, Rattus Norvegicus
  ( 151 )...( 167 ): A1AB_RAT
LQYPTLVTRRKAILAL

SEQ ID NO: 5107 - protein, 16 aa, Rattus Norvegicus
  ( 152 )...( 168 ): A1AB_RAT
QYPTLVTRRKAILALL

SEQ ID NO: 5108 - protein, 16 aa, Rattus Norvegicus
  ( 154 )...( 170 ): A1AB_RAT
PTLVTRRKAILALLSV

SEQ ID NO: 5109 - protein, 16 aa, Rattus Norvegicus
  ( 155 )...( 171 ): A1AB_RAT
TLVTRRKAILALLSVW

SEQ ID NO: 5110 - protein, 16 aa, Rattus Norvegicus
  ( 156 )...( 172 ): A1AB_RAT
LVTRRKAILALLSVWV

SEQ ID NO: 5111 - protein, 16 aa, Rattus Norvegicus
  ( 157 )...( 173 ): A1AB_RAT
VTRRKAILALLSVWVL

SEQ ID NO: 5112 - protein, 16 aa, Rattus Norvegicus
  ( 158 )...( 174 ): A1AB_RAT
TRRKAILALLSVWVLS

SEQ ID NO: 5113 - protein, 16 aa, Rattus Norvegicus
  ( 159 )...( 175 ): A1AB_RAT
RRKAILALLSVWVLST

SEQ ID NO: 5114 - protein, 16 aa, Rattus Norvegicus
  ( 279 )...( 295 ): A1AB_RAT
IAVKLFKFSREKKAAK

SEQ ID NO: 5115 - protein, 16 aa, Rattus Norvegicus
  ( 281 )...( 297 ): A1AB_RAT
VKLFKFSREKKAAKTL

SEQ ID NO: 5116 - protein, 16 aa, Rattus Norvegicus
  ( 283 )...( 299 ): A1AB_RAT
LFKFSREKKAAKTLGI

SEQ ID NO: 5117 - protein, 16 aa, Rattus Norvegicus
  ( 284 )...( 300 ): A1AB_RAT
FKFSREKKAAKTLGIV

SEQ ID NO: 5118 - protein, 16 aa, Rattus Norvegicus
  ( 288 )...( 304 ): A1AB_RAT
REKKAAKTLGIVVGMF

SEQ ID NO: 5119 - protein, 16 aa, Rattus Norvegicus
  ( 290 )...( 306 ): A1AB_RAT
KKAAKTLGIVVGMFIL

SEQ ID NO: 5120 - protein, 16 aa, Rattus Norvegicus
  ( 105 )...( 121 ): AA1R_RAT
RYLRVKIPLRYKTVVT

SEQ ID NO: 5121 - protein, 16 aa, Rattus Norvegicus
  ( 106 )...( 122 ): AA1R_RAT
YLRVKIPLRYKTVVTQ

SEQ ID NO: 5122 - protein, 16 aa, Rattus Norvegicus
  ( 107 )...( 123 ): AA1R_RAT
LRVKIPLRYKTVVTQR

SEQ ID NO: 5123 - protein, 16 aa, Rattus Norvegicus
  ( 108 )...( 124 ): AA1R_RAT
RVKIPLRYKTVVTQRR

SEQ ID NO: 5124 - protein, 16 aa, Rattus Norvegicus
  ( 109 )...( 125 ): AA1R_RAT
VKIPLRYKTVVTQRRA

SEQ ID NO: 5125 - protein, 16 aa, Rattus Norvegicus
  ( 110 )...( 126 ): AA1R_RAT
KIPLRYKTVVTQRRAA

SEQ ID NO: 5126 - protein, 16 aa, Rattus Norvegicus
  ( 113 )...( 129 ): AA1R_RAT
LRYKTVVTQRRAAVAI

SEQ ID NO: 5127 - protein, 16 aa, Rattus Norvegicus
  ( 199 )...( 215 ): AA1R_RAT
IYLEVFYLIRKQLNKK

SEQ ID NO: 5128 - protein, 16 aa, Rattus Norvegicus
  ( 200 )...( 216 ): AA1R_RAT
YLEVFYLIRKQLNKKV

SEQ ID NO: 5129 - protein, 16 aa, Rattus Norvegicus
  ( 201 )...( 217 ): AA1R_RAT
LEVFYLIRKQLNKKVS

SEQ ID NO: 5130 - protein, 16 aa, Rattus Norvegicus
  ( 202 )...( 218 ): AA1R_RAT
EVFYLIRKQLNKKVSA

SEQ ID NO: 5131 - protein, 16 aa, Rattus Norvegicus
  ( 203 )...( 219 ): AA1R_RAT
VFYLIRKQLNKKVSAS

SEQ ID NO: 5132 - protein, 16 aa, Rattus Norvegicus
  ( 222 )...( 238 ): AA1R_RAT
PQKYYGKELKIAKSLA

SEQ ID NO: 5133 - protein, 16 aa, Rattus Norvegicus
  ( 223 )...( 239 ): AA1R_RAT
QKYYGKELKIAKSLAL

SEQ ID NO: 5134 - protein, 16 aa, Rattus Norvegicus
  ( 224 )...( 240 ): AA1R_RAT
KYYGKELKIAKSLALI

SEQ ID NO: 5135 - protein, 16 aa, Rattus Norvegicus
  ( 107 )...( 123 ): AA2A_RAT
LRYNGLVTGVRAKGII

SEQ ID NO: 5136 - protein, 16 aa, Rattus Norvegicus
  ( 105 )...( 121 ): AA2B_RAT
LAIRVPLRYKGLVTGT

SEQ ID NO: 5137 - protein, 16 aa, Rattus Norvegicus
  ( 113 )...( 129 ): AA2B_RAT
YKGLVTGTRARGIIAV

SEQ ID NO: 5138 - protein, 16 aa, Rattus Norvegicus
  ( 114 )...( 130 ): AA2B_RAT
KGLVTGTRARGIIAVL

SEQ ID NO: 5139 - protein, 16 aa, Rattus Norvegicus
  ( 31 )...( 47 ): AA3R_RAT
GNMLVIWVVKLNRTLR

SEQ ID NO: 5140 - protein, 16 aa, Rattus Norvegicus
  ( 32 )...( 48 ): AA3R_RAT
NMLVIWVVKLNRTLRT

SEQ ID NO: 5141 - protein, 16 aa, Rattus Norvegicus
  ( 33 )...( 49 ): AA3R_RAT
MLVIWVVKLNRTLRTT

SEQ ID NO: 5142 - protein, 16 aa, Rattus Norvegicus
  ( 34 )...( 50 ): AA3R_RAT
LVIWVVKLNRTLRTTT

SEQ ID NO: 5143 - protein, 16 aa, Rattus Norvegicus
  ( 35 )...( 51 ): AA3R_RAT
VIWVVKLNRTLRTTTF

SEQ ID NO: 5144 - protein, 16 aa, Rattus Norvegicus
  ( 38 )...( 54 ): AA3R_RAT
VVKLNRTLRTTTFYFI

SEQ ID NO: 5145 - protein, 16 aa, Rattus Norvegicus
  ( 39 )...( 55 ): AA3R_RAT
VKLNRTLRTTTFYFIV

SEQ ID NO: 5146 - protein, 16 aa, Rattus Norvegicus
  ( 110 )...( 126 ): AA3R_RAT
RYLRVKLTVRYRTVTT

SEQ ID NO: 5147 - protein, 16 aa, Rattus Norvegicus
  ( 111 )...( 127 ): AA3R_RAT
YLRVKLTVRYRTVTTQ

SEQ ID NO: 5148 - protein, 16 aa, Rattus Norvegicus
  ( 112 )...( 128 ): AA3R_RAT
LRVKLTVRYRTVTTQR

SEQ ID NO: 5149 - protein, 16 aa, Rattus Norvegicus
  ( 114 )...( 130 ): AA3R_RAT
VKLTVRYRTVTTQRRI

SEQ ID NO: 5150 - protein, 16 aa, Rattus Norvegicus
  ( 115 )...( 131 ): AA3R_RAT
KLTVRYRTVTTQRRIW

SEQ ID NO: 5151 - protein, 16 aa, Rattus Norvegicus
  ( 116 )...( 132 ): AA3R_RAT
LTVRYRTVTTQRRIWL

SEQ ID NO: 5152 - protein, 16 aa, Rattus Norvegicus
  ( 355 )...( 371 ): ACM1_RAT
FSLVKEKKAARTLSAI

SEQ ID NO: 5153 - protein, 16 aa, Rattus Norvegicus
  ( 356 )...( 372 ): ACM1_RAT
SLVKEKKAARTLSAIL

SEQ ID NO: 5154 - protein, 16 aa, Rattus Norvegicus
  ( 357 )...( 373 ): ACM1_RAT
LVKEKKAARTLSAILL

SEQ ID NO: 5155 - protein, 16 aa, Rattus Norvegicus
  ( 358 )...( 374 ): ACM1_RAT
VKEKKAARTLSAILLA

SEQ ID NO: 5156 - protein, 16 aa, Rattus Norvegicus
  ( 359 )...( 375 ): ACM1_RAT
KEKKAARTLSAILLAF

SEQ ID NO: 5157 - protein, 16 aa, Rattus Norvegicus
  ( 361 )...( 377 ): ACM1_RAT
KKAARTLSAILLAFIL

SEQ ID NO: 5158 - protein, 16 aa, Rattus Norvegicus
  ( 125 )...( 141 ): ACM2_RAT
VTKPLTYPVKRTTKMA

SEQ ID NO: 5159 - protein, 16 aa, Rattus Norvegicus
  ( 126 )...( 142 ): ACM2_RAT
TKPLTYPVKRTTKMAG

SEQ ID NO: 5160 - protein, 16 aa, Rattus Norvegicus
  ( 357 )...( 373 ): ACM2_RAT
KQNIVARKIVKMTKQP

SEQ ID NO: 5161 - protein, 16 aa, Rattus Norvegicus
  ( 358 )...( 374 ): ACM2_RAT
QNIVARKIVKMTKQPA

SEQ ID NO: 5162 - protein, 16 aa, Rattus Norvegicus
  ( 359 )...( 375 ): ACM2_RAT
NIVARKIVKMTKQPAK

SEQ ID NO: 5163 - protein, 16 aa, Rattus Norvegicus
  ( 360 )...( 376 ): ACM2_RAT
IVARKIVKMTKQPAKK

SEQ ID NO: 5164 - protein, 16 aa, Rattus Norvegicus
  ( 364 )...( 380 ): ACM2_RAT
KIVKMTKQPAKKKPPP

SEQ ID NO: 5165 - protein, 16 aa, Rattus Norvegicus
  ( 365 )...( 381 ): ACM2_RAT
IVKMTKQPAKKKPPPS

SEQ ID NO: 5166 - protein, 16 aa, Rattus Norvegicus
  ( 379 )...( 395 ): ACM2_RAT
PSREKKVTRTILAILL

SEQ ID NO: 5167 - protein, 16 aa, Rattus Norvegicus
  ( 380 )...( 396 ): ACM2_RAT
SREKKVTRTILAILLA

SEQ ID NO: 5168 - protein, 16 aa, Rattus Norvegicus
  ( 381 )...( 397 ): ACM2_RAT
REKKVTRTILAILLAF

SEQ ID NO: 5169 - protein, 16 aa, Rattus Norvegicus
  ( 383 )...( 399 ): ACM2_RAT
KKVTRTILAILLAFII

SEQ ID NO: 5170 - protein, 16 aa, Rattus Norvegicus
  ( 84 )...( 100 ): ACM3_RAT
GNILVIVAFKVNKQLK

SEQ ID NO: 5171 - protein, 16 aa, Rattus Norvegicus
  ( 85 )...( 101 ): ACM3_RAT
NILVIVAFKVNKQLKT

SEQ ID NO: 5172 - protein, 16 aa, Rattus Norvegicus
  ( 86 )...( 102 ): ACM3_RAT
ILVIVAFKVNKQLKTV

SEQ ID NO: 5173 - protein, 16 aa, Rattus Norvegicus
  ( 87 )...( 103 ): ACM3_RAT
LVIVAFKVNKQLKTVN

SEQ ID NO: 5174 - protein, 16 aa, Rattus Norvegicus
  ( 88 )...( 104 ): ACM3_RAT
VIVAFKVNKQLKTVNN

SEQ ID NO: 5175 - protein, 16 aa, Rattus Norvegicus
  ( 89 )...( 105 ): ACM3_RAT
IVAFKVNKQLKTVNNY

SEQ ID NO: 5176 - protein, 16 aa, Rattus Norvegicus
  ( 90 )...( 106 ): ACM3_RAT
VAFKVNKQLKTVNNYF

SEQ ID NO: 5177 - protein, 16 aa, Rattus Norvegicus
  ( 91 )...( 107 ): ACM3_RAT
AFKVNKQLKTVNNYFL

SEQ ID NO: 5178 - protein, 16 aa, Rattus Norvegicus
  ( 92 )...( 108 ): ACM3_RAT
FKVNKQLKTVNNYFLL

SEQ ID NO: 5179 - protein, 16 aa, Rattus Norvegicus
  ( 93 )...( 109 ): ACM3_RAT
KVNKQLKTVNNYFLLS

SEQ ID NO: 5180 - protein, 16 aa, Rattus Norvegicus
  ( 178 )...( 194 ): ACM3_RAT
KRTTKRAGVMIGLAWV

SEQ ID NO: 5181 - protein, 16 aa, Rattus Norvegicus
  ( 455 )...( 471 ): ACM3_RAT
LSFKEATLAKRFALKT

SEQ ID NO: 5182 - protein, 16 aa, Rattus Norvegicus
  ( 460 )...( 476 ): ACM3_RAT
ATLAKRFALKTRSQIT

SEQ ID NO: 5183 - protein, 16 aa, Rattus Norvegicus
  ( 233 )...( 249 ): ACM4_RAT
PKEKKAKTLAFLKSPL

SEQ ID NO: 5184 - protein, 16 aa, Rattus Norvegicus
  ( 234 )...( 250 ): ACM4_RAT
KEKKAKTLAFLKSPLM

SEQ ID NO: 5185 - protein, 16 aa, Rattus Norvegicus
  ( 235 )...( 251 ): ACM4_RAT
EKKAKTLAFLKSPLMK

SEQ ID NO: 5186 - protein, 16 aa, Rattus Norvegicus
  ( 236 )...( 252 ): ACM4_RAT
KKAKTLAFLKSPLMKP

SEQ ID NO: 5187 - protein, 16 aa, Rattus Norvegicus
  ( 239 )...( 255 ): ACM4_RAT
KTLAFLKSPLMKPSIK

SEQ ID NO: 5188 - protein, 16 aa, Rattus Norvegicus
  ( 240 )...( 256 ): ACM4_RAT
TLAFLKSPLMKPSIKK

SEQ ID NO: 5189 - protein, 16 aa, Rattus Norvegicus
  ( 331 )...( 347 ): ACM4_RAT
TLNPASKWSKIQIVTK

SEQ ID NO: 5190 - protein, 16 aa, Rattus Norvegicus
  ( 332 )...( 348 ): ACM4_RAT
LNPASKWSKIQIVTKQ

SEQ ID NO: 5191 - protein, 16 aa, Rattus Norvegicus
  ( 334 )...( 350 ): ACM4_RAT
PASKWSKIQIVTKQTG

SEQ ID NO: 5192 - protein, 16 aa, Rattus Norvegicus
  ( 395 )...( 411 ): ACM4_RAT
RKVTRTIFAILLAFIL

SEQ ID NO: 5193 - protein, 16 aa, Rattus Norvegicus
  ( 370 )...( 386 ): ACM5_RAT
LKSQKCVAYKFRLVVK

SEQ ID NO: 5194 - protein, 16 aa, Rattus Norvegicus
  ( 371 )...( 387 ): ACM5_RAT
KSQKCVAYKFRLVVKA

SEQ ID NO: 5195 - protein, 16 aa, Rattus Norvegicus
  ( 506 )...( 522 ): ACM5_RAT
KLLLLCRWKKKKVEEK

SEQ ID NO: 5196 - protein, 16 aa, Rattus Norvegicus
  ( 507 )...( 523 ): ACM5_RAT
LLLLCRWKKKKVEEKL

SEQ ID NO: 5197 - protein, 16 aa, Rattus Norvegicus
  ( 137 )...( 153 ): AG2R_RAT
RLRRTMLVAKVTCIII

SEQ ID NO: 5198 - protein, 16 aa, Rattus Norvegicus
  ( 138 )...( 154 ): AG2R_RAT
LRRTMLVAKVTCIIIW

SEQ ID NO: 5199 - protein, 16 aa, Rattus Norvegicus
  ( 139 )...( 155 ): AG2R_RAT
RRTMLVAKVTCIIIWL

SEQ ID NO: 5200 - protein, 16 aa, Rattus Norvegicus
  ( 209 )...( 225 ): AG2R_RAT
LIILTSYTLIWKALKK

SEQ ID NO: 5201 - protein, 16 aa, Rattus Norvegicus
  ( 210 )...( 226 ): AG2R_RAT
IILTSYTLIWKALKKA

SEQ ID NO: 5202 - protein, 16 aa, Rattus Norvegicus
  ( 211 )...( 227 ): AG2R_RAT
ILTSYTLIWKALKKAY

SEQ ID NO: 5203 - protein, 16 aa, Rattus Norvegicus
  ( 215 )...( 231 ): AG2R_RAT
YTLIWKALKKAYEIQK

SEQ ID NO: 5204 - protein, 16 aa, Rattus Norvegicus
  ( 216 )...( 232 ): AG2R_RAT
TLIWKALKKAYEIQKN

SEQ ID NO: 5205 - protein, 16 aa, Rattus Norvegicus
  ( 217 )...( 233 ): AG2R_RAT
LIWKALKKAYEIQKNK

SEQ ID NO: 5206 - protein, 16 aa, Rattus Norvegicus
  ( 218 )...( 234 ): AG2R_RAT
IWKALKKAYEIQKNKP

SEQ ID NO: 5207 - protein, 16 aa, Rattus Norvegicus
  ( 306 )...( 322 ): AG2R_RAT
GKKFKKYFLQLLKYIP

SEQ ID NO: 5208 - protein, 16 aa, Rattus Norvegicus
  ( 307 )...( 323 ): AG2R_RAT
KKFKKYFLQLLKYIPP

SEQ ID NO: 5209 - protein, 16 aa, Rattus Norvegicus
  ( 308 )...( 324 ): AG2R_RAT
KFKKYFLQLLKYIPPK

SEQ ID NO: 5210 - protein, 16 aa, Rattus Norvegicus
  ( 309 )...( 325 ): AG2R_RAT
FKKYFLQLLKYIPPKA

SEQ ID NO: 5211 - protein, 16 aa, Rattus Norvegicus
  ( 310 )...( 326 ): AG2R_RAT
KKYFLQLLKYIPPKAK

SEQ ID NO: 5212 - protein, 16 aa, Rattus Norvegicus
  ( 311 )...( 327 ): AG2R_RAT
KYFLQLLKYIPPKAKS

SEQ ID NO: 5213 - protein, 16 aa, Rattus Norvegicus
  ( 137 )...( 153 ): AG2S_RAT
RLRRTMLVAKVTCIII

SEQ ID NO: 5214 - protein, 16 aa, Rattus Norvegicus
  ( 138 )...( 154 ): AG2S_RAT
LRRTMLVAKVTCIIIW

SEQ ID NO: 5215 - protein, 16 aa, Rattus Norvegicus
  ( 139 )...( 155 ): AG2S_RAT
RRTMLVAKVTCIIIWL

SEQ ID NO: 5216 - protein, 16 aa, Rattus Norvegicus
  ( 209 )...( 225 ): AG2S_RAT
LIILTSYTLIWKALKK

SEQ ID NO: 5217 - protein, 16 aa, Rattus Norvegicus
  ( 210 )...( 226 ): AG2S_RAT
IILTSYTLIWKALKKA

SEQ ID NO: 5218 - protein, 16 aa, Rattus Norvegicus
  ( 211 )...( 227 ): AG2S_RAT
ILTSYTLIWKALKKAY

SEQ ID NO: 5219 - protein, 16 aa, Rattus Norvegicus
  ( 212 )...( 228 ): AG2S_RAT
LTSYTLIWKALKKAYK

SEQ ID NO: 5220 - protein, 16 aa, Rattus Norvegicus
  ( 213 )...( 229 ): AG2S_RAT
TSYTLIWKALKKAYKI

SEQ ID NO: 5221 - protein, 16 aa, Rattus Norvegicus
  ( 214 )...( 230 ): AG2S_RAT
SYTLIWKALKKAYKIQ

SEQ ID NO: 5222 - protein, 16 aa, Rattus Norvegicus
  ( 215 )...( 231 ): AG2S_RAT
YTLIWKALKKAYKIQK

SEQ ID NO: 5223 - protein, 16 aa, Rattus Norvegicus
  ( 216 )...( 232 ): AG2S_RAT
TLIWKALKKAYKIQKN

SEQ ID NO: 5224 - protein, 16 aa, Rattus Norvegicus
  ( 217 )...( 233 ): AG2S_RAT
LIWKALKKAYKIQKNT

SEQ ID NO: 5225 - protein, 16 aa, Rattus Norvegicus
  ( 218 )...( 234 ): AG2S_RAT
IWKALKKAYKIQKNTP

SEQ ID NO: 5226 - protein, 16 aa, Rattus Norvegicus
  ( 306 )...( 322 ): AG2S_RAT
GKKFKKYFLQLLKYIP

SEQ ID NO: 5227 - protein, 16 aa, Rattus Norvegicus
  ( 307 )...( 323 ): AG2S_RAT
KKFKKYFLQLLKYIPP

SEQ ID NO: 5228 - protein, 16 aa, Rattus Norvegicus
  ( 308 )...( 324 ): AG2S_RAT
KFKKYFLQLLKYIPPT

SEQ ID NO: 5229 - protein, 16 aa, Rattus Norvegicus
  ( 309 )...( 325 ): AG2S_RAT
FKKYFLQLLKYIPPTA

SEQ ID NO: 5230 - protein, 16 aa, Rattus Norvegicus
  ( 310 )...( 326 ): AG2S_RAT
KKYFLQLLKYIPPTAK

SEQ ID NO: 5231 - protein, 16 aa, Rattus Norvegicus
  ( 311 )...( 327 ): AG2S_RAT
KYFLQLLKYIPPTAKS

SEQ ID NO: 5232 - protein, 16 aa, Rattus Norvegicus
  ( 235 )...( 251 ): APJ_RAT
IEGLRKRRRLLSIIVV

SEQ ID NO: 5233 - protein, 16 aa, Rattus Norvegicus
  ( 236 )...( 252 ): APJ_RAT
EGLRKRRRLLSIIVVL

SEQ ID NO: 5234 - protein, 16 aa, Rattus Norvegicus
  ( 237 )...( 253 ): APJ_RAT
GLRKRRRLLSIIVVLV

SEQ ID NO: 5235 - protein, 16 aa, Rattus Norvegicus
  ( 238 )...( 254 ): APJ_RAT
LRKRRRLLSIIVVLVV

SEQ ID NO: 5236 - protein, 16 aa, Rattus Norvegicus
  ( 239 )...( 255 ): APJ_RAT
RKRRRLLSIIVVLVVT

SEQ ID NO: 5237 - protein, 16 aa, Rattus Norvegicus
  ( 240 )...( 256 ): APJ_RAT
KRRRLLSIIVVLVVTF

SEQ ID NO: 5238 - protein, 16 aa, Rattus Norvegicus
  ( 241 )...( 257 ): APJ_RAT
RRRLLSIIVVLVVTFA

SEQ ID NO: 5239 - protein, 16 aa, Rattus Norvegicus
  ( 39 )...( 55 ): CALR_RAT
FLYLVGRKKLLDAQYK

SEQ ID NO: 5240 - protein, 16 aa, Rattus Norvegicus
  ( 40 )...( 56 ): CALR_RAT
LYLVGRKKLLDAQYKC

SEQ ID NO: 5241 - protein, 16 aa, Rattus Norvegicus
  ( 351 )...( 367 ): CALR_RAT
FFLLNIVRVLVTKMRQ

SEQ ID NO: 5242 - protein, 16 aa, Rattus Norvegicus
  ( 352 )...( 368 ): CALR_RAT
FLLNIVRVLVTKMRQT

SEQ ID NO: 5243 - protein, 16 aa, Rattus Norvegicus
  ( 353 )...( 369 ): CALR_RAT
LLNIVRVLVTKMRQTH

SEQ ID NO: 5244 - protein, 16 aa, Rattus Norvegicus
  ( 435 )...( 451 ): CALR_RAT
VQVTLKRQWAQFKIQW

SEQ ID NO: 5245 - protein, 16 aa, Rattus Norvegicus
  ( 436 )...( 452 ): CALR_RAT
QVTLKRQWAQFKIQWS

SEQ ID NO: 5246 - protein, 16 aa, Rattus Norvegicus
  ( 437 )...( 453 ): CALR_RAT
VTLKRQWAQFKIQWSH

SEQ ID NO: 5247 - protein, 16 aa, Rattus Norvegicus
  ( 306 )...( 322 ): CGRR_RAT
LFFLLNIVRVLITKLK

SEQ ID NO: 5248 - protein, 16 aa, Rattus Norvegicus
  ( 307 )...( 323 ): CGRR_RAT
FFLLNIVRVLITKLKV

SEQ ID NO: 5249 - protein, 16 aa, Rattus Norvegicus
  ( 308 )...( 324 ): CGRR_RAT
FLLNIVRVLITKLKVT

SEQ ID NO: 5250 - protein, 16 aa, Rattus Norvegicus
  ( 309 )...( 325 ): CGRR_RAT
LLNIVRVLITKLKVTH

SEQ ID NO: 5251 - protein, 16 aa, Rattus Norvegicus
  ( 310 )...( 326 ): CGRR_RAT
LNIVRVLITKLKVTHQ

SEQ ID NO: 5252 - protein, 16 aa, Rattus Norvegicus
  ( 311 )...( 327 ): CGRR_RAT
NIVRVLITKLKVTHQA

SEQ ID NO: 5253 - protein, 16 aa, Rattus Norvegicus
  ( 1 )...( 17 ): CRF1_RAT
MGRRPQLRLVKALLLL

SEQ ID NO: 5254 - protein, 16 aa, Rattus Norvegicus
  ( 2 )...( 18 ): CRF1_RAT
GRRPQLRLVKALLLLG

SEQ ID NO: 5255 - protein, 16 aa, Rattus Norvegicus
  ( 110 )...( 126 ): CRF1_RAT
KKSKVHYHVAVIINYL

SEQ ID NO: 5256 - protein, 16 aa, Rattus Norvegicus
  ( 284 )...( 300 ): CRF1_RAT
FIFLFNIVRILMTKLR

SEQ ID NO: 5257 - protein, 16 aa, Rattus Norvegicus
  ( 285 )...( 301 ): CRF1_RAT
IFLFNIVRILMTKLRA

SEQ ID NO: 5258 - protein, 16 aa, Rattus Norvegicus
  ( 306 )...( 322 ): CRF1_RAT
TIQYRKAVKATLVLLP

SEQ ID NO: 5259 - protein, 16 aa, Rattus Norvegicus
  ( 307 )...( 323 ): CRF1_RAT
IQYRKAVKATLVLLPL

SEQ ID NO: 5260 - protein, 16 aa, Rattus Norvegicus
  ( 308 )...( 324 ): CRF1_RAT
QYRKAVKATLVLLPLL

SEQ ID NO: 5261 - protein, 16 aa, Rattus Norvegicus
  ( 309 )...( 325 ): CRF1_RAT
YRKAVKATLVLLPLLG

SEQ ID NO: 5262 - protein, 16 aa, Rattus Norvegicus
  ( 310 )...( 326 ): CRF1_RAT
RKAVKATLVLLPLLGI

SEQ ID NO: 5263 - protein, 16 aa, Rattus Norvegicus
  ( 281 )...( 297 ): CRF2_RAT
VFLFNIVRILMTKLRA

SEQ ID NO: 5264 - protein, 16 aa, Rattus Norvegicus
  ( 302 )...( 318 ): CRF2_RAT
TIQYRKAVKATLVLLP

SEQ ID NO: 5265 - protein, 16 aa, Rattus Norvegicus
  ( 303 )...( 319 ): CRF2_RAT
IQYRKAVKATLVLLPL

SEQ ID NO: 5266 - protein, 16 aa, Rattus Norvegicus
  ( 304 )...( 320 ): CRF2_RAT
QYRKAVKATLVLLPLL

SEQ ID NO: 5267 - protein, 16 aa, Rattus Norvegicus
  ( 305 )...( 321 ): CRF2_RAT
YRKAVKATLVLLPLLG

SEQ ID NO: 5268 - protein, 16 aa, Rattus Norvegicus
  ( 306 )...( 322 ): CRF2_RAT
RKAVKATLVLLPLLGI

SEQ ID NO: 5269 - protein, 16 aa, Rattus Norvegicus
  ( 298 )...( 314 ): ET1R_RAT
LKQRREVAKTVFCLVV

SEQ ID NO: 5270 - protein, 16 aa, Rattus Norvegicus
  ( 299 )...( 315 ): ET1R_RAT
KQRREVAKTVFCLVVI

SEQ ID NO: 5271 - protein, 16 aa, Rattus Norvegicus
  ( 91 )...( 107 ): ETBR_RAT
QRKIEINKTFKYINTI

SEQ ID NO: 5272 - protein, 16 aa, Rattus Norvegicus
  ( 92 )...( 108 ): ETBR_RAT
RKIEINKTFKYINTIV

SEQ ID NO: 5273 - protein, 16 aa, Rattus Norvegicus
  ( 115 )...( 131 ): ETBR_RAT
GIIGNSTLLRIIYKNK

SEQ ID NO: 5274 - protein, 16 aa, Rattus Norvegicus
  ( 315 )...( 331 ): ETBR_RAT
LKQRREVAKTVFCLVL

SEQ ID NO: 5275 - protein, 16 aa, Rattus Norvegicus
  ( 316 )...( 332 ): ETBR_RAT
KQRREVAKTVFCLVLV

SEQ ID NO: 5276 - protein, 16 aa, Rattus Norvegicus
  ( 46 )...( 62 ): FSHR_RAT
RNAIELRFVLTKLRVI

SEQ ID NO: 5277 - protein, 16 aa, Rattus Norvegicus
  ( 48 )...( 64 ): FSHR_RAT
AIELRFVLTKLRVIPK

SEQ ID NO: 5278 - protein, 16 aa, Rattus Norvegicus
  ( 49 )...( 65 ): FSHR_RAT
IELRFVLTKLRVIPKG

SEQ ID NO: 5279 - protein, 16 aa, Rattus Norvegicus
  ( 50 )...( 66 ): FSHR_RAT
ELRFVLTKLRVIPKGS

SEQ ID NO: 5280 - protein, 16 aa, Rattus Norvegicus
  ( 131 )...( 147 ): FSHR_RAT
GIKHLPAVHKIQSLQK

SEQ ID NO: 5281 - protein, 16 aa, Rattus Norvegicus
  ( 132 )...( 148 ): FSHR_RAT
IKHLPAVHKIQSLQKV

SEQ ID NO: 5282 - protein, 16 aa, Rattus Norvegicus
  ( 133 )...( 149 ): FSHR_RAT
KHLPAVHKIQSLQKVL

SEQ ID NO: 5283 - protein, 16 aa, Rattus Norvegicus
  ( 241 )...( 257 ): FSHR_RAT
LKKLRARSTYRLKKLP

SEQ ID NO: 5284 - protein, 16 aa, Rattus Norvegicus
  ( 249 )...( 265 ): FSHR_RAT
TYRLKKLPNLDKFVTL

SEQ ID NO: 5285 - protein, 16 aa, Rattus Norvegicus
  ( 250 )...( 266 ): FSHR_RAT
YRLKKLPNLDKFVTLM

SEQ ID NO: 5286 - protein, 16 aa, Rattus Norvegicus
  ( 592 )...( 608 ): FSHR_RAT
ISASLKVPLITVSKAK

SEQ ID NO: 5287 - protein, 16 aa, Rattus Norvegicus
  ( 593 )...( 609 ): FSHR_RAT
SASLKVPLITVSKAKI

SEQ ID NO: 5288 - protein, 16 aa, Rattus Norvegicus
  ( 594 )...( 610 ): FSHR_RAT
ASLKVPLITVSKAKIL

SEQ ID NO: 5289 - protein, 16 aa, Rattus Norvegicus
  ( 595 )...( 611 ): FSHR_RAT
SLKVPLITVSKAKILL

SEQ ID NO: 5290 - protein, 16 aa, Rattus Norvegicus
  ( 596 )...( 612 ): FSHR_RAT
LKVPLITVSKAKILLV

SEQ ID NO: 5291 - protein, 16 aa, Rattus Norvegicus
  ( 597 )...( 613 ): FSHR_RAT
KVPLITVSKAKILLVL

SEQ ID NO: 5292 - protein, 16 aa, Rattus Norvegicus
  ( 217 )...( 233 ): GALR_RAT
CYAKVLNHLHKKLKNM

SEQ ID NO: 5293 - protein, 16 aa, Rattus Norvegicus
  ( 218 )...( 234 ): GALR_RAT
YAKVLNHLHKKLKNMS

SEQ ID NO: 5294 - protein, 16 aa, Rattus Norvegicus
  ( 238 )...( 254 ): GALR_RAT
ASKKKTAQTVLVVVVV

SEQ ID NO: 5295 - protein, 16 aa, Rattus Norvegicus
  ( 239 )...( 255 ): GALR_RAT
SKKKTAQTVLVVVVVF

SEQ ID NO: 5296 - protein, 16 aa, Rattus Norvegicus
  ( 240 )...( 256 ): GALR_RAT
KKKTAQTVLVVVVVFG

SEQ ID NO: 5297 - protein, 16 aa, Rattus Norvegicus
  ( 226 )...( 242 ): GALS_RAT
GSQRAKRKVTRMIIIV

SEQ ID NO: 5298 - protein, 16 aa, Rattus Norvegicus
  ( 227 )...( 243 ): GALS_RAT
SQRAKRKVTRMIIIVA

SEQ ID NO: 5299 - protein, 16 aa, Rattus Norvegicus
  ( 228 )...( 244 ): GALS_RAT
QRAKRKVTRMIIIVAV

SEQ ID NO: 5300 - protein, 16 aa, Rattus Norvegicus
  ( 229 )...( 245 ): GALS_RAT
RAKRKVTRMIIIVAVL

SEQ ID NO: 5301 - protein, 16 aa, Rattus Norvegicus
  ( 230 )...( 246 ): GALS_RAT
AKRKVTRMIIIVAVLF

SEQ ID NO: 5302 - protein, 16 aa, Rattus Norvegicus
  ( 231 )...( 247 ): GALS_RAT
KRKVTRMIIIVAVLFC

SEQ ID NO: 5303 - protein, 16 aa, Rattus Norvegicus
  ( 232 )...( 248 ): GALS_RAT
RKVTRMIIIVAVLFCL

SEQ ID NO: 5304 - protein, 16 aa, Rattus Norvegicus
  ( 73 )...( 89 ): GASR_PRANA
MLIIVVLGLSRRLRTV

SEQ ID NO: 5305 - protein, 16 aa, Rattus Norvegicus
  ( 74 )...( 90 ): GASR_PRANA
LIIVVLGLSRRLRTVT

SEQ ID NO: 5306 - protein, 16 aa, Rattus Norvegicus
  ( 75 )...( 91 ): GASR_PRANA
IIVVLGLSRRLRTVTN

SEQ ID NO: 5307 - protein, 16 aa, Rattus Norvegicus
  ( 323 )...( 339 ): GASR_PRANA
ANQAKLLAKKRVVRML

SEQ ID NO: 5308 - protein, 16 aa, Rattus Norvegicus
  ( 324 )...( 340 ): GASR_PRANA
NQAKLLAKKRVVRMLL

SEQ ID NO: 5309 - protein, 16 aa, Rattus Norvegicus
  ( 325 )...( 341 ): GASR_PRANA
QAKLLAKKRVVRMLLV

SEQ ID NO: 5310 - protein, 16 aa, Rattus Norvegicus
  ( 326 )...( 342 ): GASR_PRANA
AKLLAKKRVVRMLLVI

SEQ ID NO: 5311 - protein, 16 aa, Rattus Norvegicus
  ( 327 )...( 343 ): GASR_PRANA
KLLAKKRVVRMLLVIV

SEQ ID NO: 5312 - protein, 16 aa, Rattus Norvegicus
  ( 328 )...( 344 ): GASR_PRANA
LLAKKRVVRMLLVIVL

SEQ ID NO: 5313 - protein, 16 aa, Rattus Norvegicus
  ( 329 )...( 345 ): GASR_PRANA
LAKKRVVRMLLVIVLL

SEQ ID NO: 5314 - protein, 16 aa, Rattus Norvegicus
  ( 330 )...( 346 ): GASR_PRANA
AKKRVVRMLLVIVLLF

SEQ ID NO: 5315 - protein, 16 aa, Rattus Norvegicus
  ( 331 )...( 347 ): GASR_PRANA
KKRVVRMLLVIVLLFF

SEQ ID NO: 5316 - protein, 16 aa, Rattus Norvegicus
  ( 332 )...( 348 ): GASR_PRANA
KRVVRMLLVIVLLFFL

SEQ ID NO: 5317 - protein, 16 aa, Rattus Norvegicus
  ( 71 )...( 87 ): GASR_RAT
GNVLIIVVLGLSRRLR

SEQ ID NO: 5318 - protein, 16 aa, Rattus Norvegicus
  ( 72 )...( 88 ): GASR_RAT
NVLIIVVLGLSRRLRT

SEQ ID NO: 5319 - protein, 16 aa, Rattus Norvegicus
  ( 73 )...( 89 ): GASR_RAT
VLIIVVLGLSRRLRTV

SEQ ID NO: 5320 - protein, 16 aa, Rattus Norvegicus
  ( 74 )...( 90 ): GASR_RAT
LIIVVLGLSRRLRTVT

SEQ ID NO: 5321 - protein, 16 aa, Rattus Norvegicus
  ( 75 )...( 91 ): GASR_RAT
IIVVLGLSRRLRTVTN

SEQ ID NO: 5322 - protein, 16 aa, Rattus Norvegicus
  ( 325 )...( 341 ): GASR_RAT
PNQAKLLAKKRVVRML

SEQ ID NO: 5323 - protein, 16 aa, Rattus Norvegicus
  ( 326 )...( 342 ): GASR_RAT
NQAKLLAKKRVVRMLL

SEQ ID NO: 5324 - protein, 16 aa, Rattus Norvegicus
  ( 327 )...( 343 ): GASR_RAT
QAKLLAKKRVVRMLLV

SEQ ID NO: 5325 - protein, 16 aa, Rattus Norvegicus
  ( 328 )...( 344 ): GASR_RAT
AKLLAKKRVVRMLLVI

SEQ ID NO: 5326 - protein, 16 aa, Rattus Norvegicus
  ( 329 )...( 345 ): GASR_RAT
KLLAKKRVVRMLLVIV

SEQ ID NO: 5327 - protein, 16 aa, Rattus Norvegicus
  ( 330 )...( 346 ): GASR_RAT
LLAKKRVVRMLLVIVL

SEQ ID NO: 5328 - protein, 16 aa, Rattus Norvegicus
  ( 331 )...( 347 ): GASR_RAT
LAKKRVVRMLLVIVLL

SEQ ID NO: 5329 - protein, 16 aa, Rattus Norvegicus
  ( 332 )...( 348 ): GASR_RAT
AKKRVVRMLLVIVLLF

SEQ ID NO: 5330 - protein, 16 aa, Rattus Norvegicus
  ( 333 )...( 349 ): GASR_RAT
KKRVVRMLLVIVLLFF

SEQ ID NO: 5331 - protein, 16 aa, Rattus Norvegicus
  ( 334 )...( 350 ): GASR_RAT
KRVVRMLLVIVLLFFL

SEQ ID NO: 5332 - protein, 16 aa, Rattus Norvegicus
  ( 308 )...( 324 ): GIPR_RAT
FLIFIRILGILVSKLR

SEQ ID NO: 5333 - protein, 16 aa, Rattus Norvegicus
  ( 309 )...( 325 ): GIPR_RAT
LIFIRILGILVSKLRT

SEQ ID NO: 5334 - protein, 16 aa, Rattus Norvegicus
  ( 310 )...( 326 ): GIPR_RAT
IFIRILGILVSKLRTR

SEQ ID NO: 5335 - protein, 16 aa, Rattus Norvegicus
  ( 311 )...( 327 ): GIPR_RAT
FIRILGILVSKLRTRQ

SEQ ID NO: 5336 - protein, 16 aa, Rattus Norvegicus
  ( 312 )...( 328 ): GIPR_RAT
IRILGILVSKLRTRQM

SEQ ID NO: 5337 - protein, 16 aa, Rattus Norvegicus
  ( 313 )...( 329 ): GIPR_RAT
RILGILVSKLRTRQMR

SEQ ID NO: 5338 - protein, 16 aa, Rattus Norvegicus
  ( 321 )...( 337 ): GLP1_RAT
FLVFIRVICIVIAKLK

SEQ ID NO: 5339 - protein, 16 aa, Rattus Norvegicus
  ( 322 )...( 338 ): GLP1_RAT
LVFIRVICIVIAKLKA

SEQ ID NO: 5340 - protein, 16 aa, Rattus Norvegicus
  ( 323 )...( 339 ): GLP1_RAT
VFIRVICIVIAKLKAN

SEQ ID NO: 5341 - protein, 16 aa, Rattus Norvegicus
  ( 324 )...( 340 ): GLP1_RAT
FIRVICIVIAKLKANL

SEQ ID NO: 5342 - protein, 16 aa, Rattus Norvegicus
  ( 325 )...( 341 ): GLP1_RAT
IRVICIVIAKLKANLM

SEQ ID NO: 5343 - protein, 16 aa, Rattus Norvegicus
  ( 327 )...( 343 ): GLP1_RAT
VICIVIAKLKANLMCK

SEQ ID NO: 5344 - protein, 16 aa, Rattus Norvegicus
  ( 328 )...( 344 ): GLP1_RAT
ICIVIAKLKANLMCKT

SEQ ID NO: 5345 - protein, 16 aa, Rattus Norvegicus
  ( 331 )...( 347 ): GLP1_RAT
VIAKLKANLMCKTDIK

SEQ ID NO: 5346 - protein, 16 aa, Rattus Norvegicus
  ( 342 )...( 358 ): GLP1_RAT
KTDIKCRLAKSTLTLI

SEQ ID NO: 5347 - protein, 16 aa, Rattus Norvegicus
  ( 345 )...( 361 ): GLP1_RAT
IKCRLAKSTLTLIPLL

SEQ ID NO: 5348 - protein, 16 aa, Rattus Norvegicus
  ( 353 )...( 369 ): GLP2_RAT
VNFFIFLKILKLLISK

SEQ ID NO: 5349 - protein, 16 aa, Rattus Norvegicus
  ( 354 )...( 370 ): GLP2_RAT
NFFIFLKILKLLISKL

SEQ ID NO: 5350 - protein, 16 aa, Rattus Norvegicus
  ( 355 )...( 371 ): GLP2_RAT
FFIFLKILKLLISKLK

SEQ ID NO: 5351 - protein, 16 aa, Rattus Norvegicus
  ( 356 )...( 372 ): GLP2_RAT
FIFLKILKLLISKLKA

SEQ ID NO: 5352 - protein, 16 aa, Rattus Norvegicus
  ( 357 )...( 373 ): GLP2_RAT
IFLKILKLLISKLKAH

SEQ ID NO: 5353 - protein, 16 aa, Rattus Norvegicus
  ( 358 )...( 374 ): GLP2_RAT
FLKILKLLISKLKAHQ

SEQ ID NO: 5354 - protein, 16 aa, Rattus Norvegicus
  ( 359 )...( 375 ): GLP2_RAT
LKILKLLISKLKAHQM

SEQ ID NO: 5355 - protein, 16 aa, Rattus Norvegicus
  ( 360 )...( 376 ): GLP2_RAT
KILKLLISKLKAHQMC

SEQ ID NO: 5356 - protein, 16 aa, Rattus Norvegicus
  ( 361 )...( 377 ): GLP2_RAT
ILKLLISKLKAHQMCF

SEQ ID NO: 5357 - protein, 16 aa, Rattus Norvegicus
  ( 362 )...( 378 ): GLP2_RAT
LKLLISKLKAHQMCFR

SEQ ID NO: 5358 - protein, 16 aa, Rattus Norvegicus
  ( 379 )...( 395 ): GLP2_RAT
YKYRLAKSTLLLIPLL

SEQ ID NO: 5359 - protein, 16 aa, Rattus Norvegicus
  ( 380 )...( 396 ): GLP2_RAT
KYRLAKSTLLLIPLLG

SEQ ID NO: 5360 - protein, 16 aa, Rattus Norvegicus
  ( 408 )...( 424 ): GLP2_RAT
QVQGFSKRIRLFIQLT

SEQ ID NO: 5361 - protein, 16 aa, Rattus Norvegicus
  ( 409 )...( 425 ): GLP2_RAT
VQGFSKRIRLFIQLTL

SEQ ID NO: 5362 - protein, 16 aa, Rattus Norvegicus
  ( 414 )...( 430 ): GLP2_RAT
KRIRLFIQLTLSSVHG

SEQ ID NO: 5363 - protein, 16 aa, Rattus Norvegicus
  ( 159 )...( 175 ): GLR_RAT
LALVILLGLRKLHCTR

SEQ ID NO: 5364 - protein, 16 aa, Rattus Norvegicus
  ( 320 )...( 336 ): GLR_RAT
FFIFVRIIHLLVAKLR

SEQ ID NO: 5365 - protein, 16 aa, Rattus Norvegicus
  ( 321 )...( 337 ): GLR_RAT
FIFVRIIHLLVAKLRA

SEQ ID NO: 5366 - protein, 16 aa, Rattus Norvegicus
  ( 322 )...( 338 ): GLR_RAT
IFVRIIHLLVAKLRAH

SEQ ID NO: 5367 - protein, 16 aa, Rattus Norvegicus
  ( 323 )...( 339 ): GLR_RAT
FVRIIHLLVAKLRAHQ

SEQ ID NO: 5368 - protein, 16 aa, Rattus Norvegicus
  ( 324 )...( 340 ): GLR_RAT
VRIIHLLVAKLRAHQM

SEQ ID NO: 5369 - protein, 16 aa, Rattus Norvegicus
  ( 325 )...( 341 ): GLR_RAT
RIIHLLVAKLRAHQMH

SEQ ID NO: 5370 - protein, 16 aa, Rattus Norvegicus
  ( 23 )...( 39 ): GRHR_RAT
LTQGKLPTLTLSGKIR

SEQ ID NO: 5371 - protein, 16 aa, Rattus Norvegicus
  ( 24 )...( 40 ): GRHR_RAT
TQGKLPTLTLSGKIRV

SEQ ID NO: 5372 - protein, 16 aa, Rattus Norvegicus
  ( 25 )...( 41 ): GRHR_RAT
QGKLPTLTLSGKIRVT

SEQ ID NO: 5373 - protein, 16 aa, Rattus Norvegicus
  ( 26 )...( 42 ): GRHR_RAT
GKLPTLTLSGKIRVTV

SEQ ID NO: 5374 - protein, 16 aa, Rattus Norvegicus
  ( 27 )...( 43 ): GRHR_RAT
KLPTLTLSGKIRVTVT

SEQ ID NO: 5375 - protein, 16 aa, Rattus Norvegicus
  ( 68 )...( 84 ): GRHR_RAT
KKGKKLSRMKVLLKHL

SEQ ID NO: 5376 - protein, 16 aa, Rattus Norvegicus
  ( 69 )...( 85 ): GRHR_RAT
KGKKLSRMKVLLKHLT

SEQ ID NO: 5377 - protein, 16 aa, Rattus Norvegicus
  ( 70 )...( 86 ): GRHR_RAT
GKKLSRMKVLLKHLTL

SEQ ID NO: 5378 - protein, 16 aa, Rattus Norvegicus
  ( 71 )...( 87 ): GRHR_RAT
KKLSRMKVLLKHLTLA

SEQ ID NO: 5379 - protein, 16 aa, Rattus Norvegicus
  ( 72 )...( 88 ): GRHR_RAT
KLSRMKVLLKHLTLAN

SEQ ID NO: 5380 - protein, 16 aa, Rattus Norvegicus
  ( 73 )...( 89 ): GRHR_RAT
LSRMKVLLKHLTLANL

SEQ ID NO: 5381 - protein, 16 aa, Rattus Norvegicus
  ( 74 )...( 90 ): GRHR_RAT
SRMKVLLKHLTLANLL

SEQ ID NO: 5382 - protein, 16 aa, Rattus Norvegicus
  ( 255 )...( 271 ): GRPR_RAT
KQIESRKRLAKTVLVF

SEQ ID NO: 5383 - protein, 16 aa, Rattus Norvegicus
  ( 256 )...( 272 ): GRPR_RAT
QIESRKRLAKTVLVFV

SEQ ID NO: 5384 - protein, 16 aa, Rattus Norvegicus
  ( 257 )...( 273 ): GRPR_RAT
IESRKRLAKTVLVFVG

SEQ ID NO: 5385 - protein, 16 aa, Rattus Norvegicus
  ( 258 )...( 274 ): GRPR_RAT
ESRKRLAKTVLVFVGL

SEQ ID NO: 5386 - protein, 16 aa, Rattus Norvegicus
  ( 259 )...( 275 ): GRPR_RAT
SRKRLAKTVLVFVGLF

SEQ ID NO: 5387 - protein, 16 aa, Rattus Norvegicus
  ( 260 )...( 276 ): GRPR_RAT
RKRLAKTVLVFVGLFA

SEQ ID NO: 5388 - protein, 16 aa, Rattus Norvegicus
  ( 261 )...( 277 ): GRPR_RAT
KRLAKTVLVFVGLFAF

SEQ ID NO: 5389 - protein, 16 aa, Rattus Norvegicus
  ( 323 )...( 339 ): GRPR_RAT
LYLLSKSFRKQFNTQL

SEQ ID NO: 5390 - protein, 16 aa, Rattus Norvegicus
  ( 324 )...( 340 ): GRPR_RAT
YLLSKSFRKQFNTQLL

SEQ ID NO: 5391 - protein, 16 aa, Rattus Norvegicus
  ( 384 )...( 400 ): LSHR_RAT
VLFVLLTSRYKLTVPR

SEQ ID NO: 5392 - protein, 16 aa, Rattus Norvegicus
  ( 562 )...( 578 ): LSHR_RAT
LTAPNKDTKIAKKMAI

SEQ ID NO: 5393 - protein, 16 aa, Rattus Norvegicus
  ( 563 )...( 579 ): LSHR_RAT
TAPNKDTKIAKKMAIL

SEQ ID NO: 5394 - protein, 16 aa, Rattus Norvegicus
  ( 564 )...( 580 ): LSHR_RAT
APNKDTKIAKKMAILI

SEQ ID NO: 5395 - protein, 16 aa, Rattus Norvegicus
  ( 565 )...( 581 ): LSHR_RAT
PNKDTKIAKKMAILIF

SEQ ID NO: 5396 - protein, 16 aa, Rattus Norvegicus
  ( 566 )...( 582 ): LSHR_RAT
NKDTKIAKKMAILIFT

SEQ ID NO: 5397 - protein, 16 aa, Rattus Norvegicus
  ( 220 )...( 236 ): MC4R_RAT
RLHIKRIAVLPGTGTI

SEQ ID NO: 5398 - protein, 16 aa, Rattus Norvegicus
  ( 221 )...( 237 ): MC4R_RAT
LHIKRIAVLPGTGTIR

SEQ ID NO: 5399 - protein, 16 aa, Rattus Norvegicus
  ( 222 )...( 238 ): MC4R_RAT
HIKRIAVLPGTGTIRQ

SEQ ID NO: 5400 - protein, 16 aa, Rattus Norvegicus
  ( 223 )...( 239 ): MC4R_RAT
IKRIAVLPGTGTIRQG

SEQ ID NO: 5401 - protein, 16 aa, Rattus Norvegicus
  ( 82 )...( 98 ): ML1B_RAT
YLRIWILVLQARRKAK

SEQ ID NO: 5402 - protein, 16 aa, Rattus Norvegicus
  ( 83 )...( 99 ): ML1B_RAT
LRIWILVLQARRKAKA

SEQ ID NO: 5403 - protein, 16 aa, Rattus Norvegicus
  ( 84 )...( 100 ): ML1B_RAT
RIWILVLQARRKAKAE

SEQ ID NO: 5404 - protein, 16 aa, Rattus Norvegicus
  ( 85 )...( 101 ): ML1B_RAT
IWILVLQARRKAKAER

SEQ ID NO: 5405 - protein, 16 aa, Rattus Norvegicus
  ( 149 )...( 165 ): NFF1_RAT
FREKLTLRKALFTIAV

SEQ ID NO: 5406 - protein, 16 aa, Rattus Norvegicus
  ( 150 )...( 166 ): NFF1_RAT
REKLTLRKALFTIAVI

SEQ ID NO: 5407 - protein, 16 aa, Rattus Norvegicus
  ( 152 )...( 168 ): NFF1_RAT
KLTLRKALFTIAVIWA

SEQ ID NO: 5408 - protein, 16 aa, Rattus Norvegicus
  ( 227 )...( 243 ): NFF1_RAT
VPLALIVVMYVRIARK

SEQ ID NO: 5409 - protein, 16 aa, Rattus Norvegicus
  ( 228 )...( 244 ): NFF1_RAT
PLALIVVMYVRIARKL

SEQ ID NO: 5410 - protein, 16 aa, Rattus Norvegicus
  ( 147 )...( 163 ): NFF2_RAT
VVYPFKPKLTVKTAFV

SEQ ID NO: 5411 - protein, 16 aa, Rattus Norvegicus
  ( 148 )...( 164 ): NFF2_RAT
VYPFKPKLTVKTAFVM

SEQ ID NO: 5412 - protein, 16 aa, Rattus Norvegicus
  ( 149 )...( 165 ): NFF2_RAT
YPFKPKLTVKTAFVMI

SEQ ID NO: 5413 - protein, 16 aa, Rattus Norvegicus
  ( 150 )...( 166 ): NFF2_RAT
PFKPKLTVKTAFVMIV

SEQ ID NO: 5414 - protein, 16 aa, Rattus Norvegicus
  ( 151 )...( 167 ): NFF2_RAT
FKPKLTVKTAFVMIVI

SEQ ID NO: 5415 - protein, 16 aa, Rattus Norvegicus
  ( 152 )...( 168 ): NFF2_RAT
KPKLTVKTAFVMIVII

SEQ ID NO: 5416 - protein, 16 aa, Rattus Norvegicus
  ( 261 )...( 277 ): NFF2_RAT
QWHVSKKKQKVIKMLL

SEQ ID NO: 5417 - protein, 16 aa, Rattus Norvegicus
  ( 263 )...( 279 ): NFF2_RAT
HVSKKKQKVIKMLLTV

SEQ ID NO: 5418 - protein, 16 aa, Rattus Norvegicus
  ( 264 )...( 280 ): NFF2_RAT
VSKKKQKVIKMLLTVA

SEQ ID NO: 5419 - protein, 16 aa, Rattus Norvegicus
  ( 265 )...( 281 ): NFF2_RAT
SKKKQKVIKMLLTVAL

SEQ ID NO: 5420 - protein, 16 aa, Rattus Norvegicus
  ( 266 )...( 282 ): NFF2_RAT
KKKQKVIKMLLTVALL

SEQ ID NO: 5421 - protein, 16 aa, Rattus Norvegicus
  ( 267 )...( 283 ): NFF2_RAT
KKQKVIKMLLTVALLF

SEQ ID NO: 5422 - protein, 16 aa, Rattus Norvegicus
  ( 268 )...( 284 ): NFF2_RAT
KQKVIKMLLTVALLFI

SEQ ID NO: 5423 - protein, 16 aa, Rattus Norvegicus
  ( 49 )...( 65 ): NK1R_RAT
GNVVVIWIILAHKRMR

SEQ ID NO: 5424 - protein, 16 aa, Rattus Norvegicus
  ( 50 )...( 66 ): NK1R_RAT
NVVVIWIILAHKRMRT

SEQ ID NO: 5425 - protein, 16 aa, Rattus Norvegicus
  ( 51 )...( 67 ): NK1R_RAT
VVVIWIILAHKRMRTV

SEQ ID NO: 5426 - protein, 16 aa, Rattus Norvegicus
  ( 52 )...( 68 ): NK1R_RAT
VVIWIILAHKRMRTVT

SEQ ID NO: 5427 - protein, 16 aa, Rattus Norvegicus
  ( 53 )...( 69 ): NK1R_RAT
VIWIILAHKRMRTVTN

SEQ ID NO: 5428 - protein, 16 aa, Rattus Norvegicus
  ( 236 )...( 252 ): NK1R_RAT
YHEQVSAKRKVVKMMI

SEQ ID NO: 5429 - protein, 16 aa, Rattus Norvegicus
  ( 237 )...( 253 ): NK1R_RAT
HEQVSAKRKVVKMMIV

SEQ ID NO: 5430 - protein, 16 aa, Rattus Norvegicus
  ( 238 )...( 254 ): NK1R_RAT
EQVSAKRKVVKMMIVV

SEQ ID NO: 5431 - protein, 16 aa, Rattus Norvegicus
  ( 239 )...( 255 ): NK1R_RAT
QVSAKRKVVKMMIVVV

SEQ ID NO: 5432 - protein, 16 aa, Rattus Norvegicus
  ( 237 )...( 253 ): NK2R_RAT
ANLRHLQAKKKFVKAM

SEQ ID NO: 5433 - protein, 16 aa, Rattus Norvegicus
  ( 238 )...( 254 ): NK2R_RAT
NLRHLQAKKKFVKAMV

SEQ ID NO: 5434 - protein, 16 aa, Rattus Norvegicus
  ( 239 )...( 255 ): NK2R_RAT
LRHLQAKKKFVKAMVL

SEQ ID NO: 5435 - protein, 16 aa, Rattus Norvegicus
  ( 240 )...( 256 ): NK2R_RAT
RHLQAKKKFVKAMVLV

SEQ ID NO: 5436 - protein, 16 aa, Rattus Norvegicus
  ( 241 )...( 257 ): NK2R_RAT
HLQAKKKFVKAMVLVV

SEQ ID NO: 5437 - protein, 16 aa, Rattus Norvegicus
  ( 242 )...( 258 ): NK2R_RAT
LQAKKKFVKAMVLVVL

SEQ ID NO: 5438 - protein, 16 aa, Rattus Norvegicus
  ( 243 )...( 259 ): NK2R_RAT
QAKKKFVKAMVLVVLT

SEQ ID NO: 5439 - protein, 16 aa, Rattus Norvegicus
  ( 244 )...( 260 ): NK2R_RAT
AKKKFVKAMVLVVLTF

SEQ ID NO: 5440 - protein, 16 aa, Rattus Norvegicus
  ( 245 )...( 261 ): NK2R_RAT
KKKFVKAMVLVVLTFA

SEQ ID NO: 5441 - protein, 16 aa, Rattus Norvegicus
  ( 246 )...( 262 ): NK2R_RAT
KKFVKAMVLVVLTFAI

SEQ ID NO: 5442 - protein, 16 aa, Rattus Norvegicus
  ( 89 )...( 105 ): NK3R_RAT
GNLIVIWIILAHKRMR

SEQ ID NO: 5443 - protein, 16 aa, Rattus Norvegicus
  ( 90 )...( 106 ): NK3R_RAT
NLIVIWIILAHKRMRT

SEQ ID NO: 5444 - protein, 16 aa, Rattus Norvegicus
  ( 91 )...( 107 ): NK3R_RAT
LIVIWIILAHKRMRTV

SEQ ID NO: 5445 - protein, 16 aa, Rattus Norvegicus
  ( 92 )...( 108 ): NK3R_RAT
IVIWIILAHKRMRTVT

SEQ ID NO: 5446 - protein, 16 aa, Rattus Norvegicus
  ( 93 )...( 109 ): NK3R_RAT
VIWIILAHKRMRTVTN

SEQ ID NO: 5447 - protein, 16 aa, Rattus Norvegicus
  ( 178 )...( 194 ): NK3R_RAT
LKPRLSATATKIVIGS

SEQ ID NO: 5448 - protein, 16 aa, Rattus Norvegicus
  ( 179 )...( 195 ): NK3R_RAT
KPRLSATATKIVIGSI

SEQ ID NO: 5449 - protein, 16 aa, Rattus Norvegicus
  ( 274 )...( 290 ): NK3R_RAT
YHEQLKAKRKVVKMMI

SEQ ID NO: 5450 - protein, 16 aa, Rattus Norvegicus
  ( 275 )...( 291 ): NK3R_RAT
HEQLKAKRKVVKMMII

SEQ ID NO: 5451 - protein, 16 aa, Rattus Norvegicus
  ( 276 )...( 292 ): NK3R_RAT
EQLKAKRKVVKMMIIV

SEQ ID NO: 5452 - protein, 16 aa, Rattus Norvegicus
  ( 277 )...( 293 ): NK3R_RAT
QLKAKRKVVKMMIIVV

SEQ ID NO: 5453 - protein, 16 aa, Rattus Norvegicus
  ( 278 )...( 294 ): NK3R_RAT
LKAKRKVVKMMIIVVV

SEQ ID NO: 5454 - protein, 16 aa, Rattus Norvegicus
  ( 279 )...( 295 ): NK3R_RAT
KAKRKVVKMMIIVVVT

SEQ ID NO: 5455 - protein, 16 aa, Rattus Norvegicus
  ( 280 )...( 296 ): NK3R_RAT
AKRKVVKMMIIVVVTF

SEQ ID NO: 5456 - protein, 16 aa, Rattus Norvegicus
  ( 281 )...( 297 ): NK3R_RAT
KRKVVKMMIIVVVTFA

SEQ ID NO: 5457 - protein, 16 aa, Rattus Norvegicus
  ( 282 )...( 298 ): NK3R_RAT
RKVVKMMIIVVVTFAI

SEQ ID NO: 5458 - protein, 16 aa, Rattus Norvegicus
  ( 83 )...( 99 ): NTR1_RAT
SVTAFTLARKKSLQSL

SEQ ID NO: 5459 - protein, 16 aa, Rattus Norvegicus
  ( 84 )...( 100 ): NTR1_RAT
VTAFTLARKKSLQSLQ

SEQ ID NO: 5460 - protein, 16 aa, Rattus Norvegicus
  ( 87 )...( 103 ): NTR1_RAT
FTLARKKSLQSLQSTV

SEQ ID NO: 5461 - protein, 16 aa, Rattus Norvegicus
  ( 299 )...( 315 ): NTR1_RAT
RVQALRHGVLVLRAVV

SEQ ID NO: 5462 - protein, 16 aa, Rattus Norvegicus
  ( 68 )...( 84 ): NY5R_RAT
MGNLLILMAVMKKRNQ

SEQ ID NO: 5463 - protein, 16 aa, Rattus Norvegicus
  ( 69 )...( 85 ): NY5R_RAT
GNLLILMAVMKKRNQK

SEQ ID NO: 5464 - protein, 16 aa, Rattus Norvegicus
  ( 70 )...( 86 ): NY5R_RAT
NLLILMAVMKKRNQKT

SEQ ID NO: 5465 - protein, 16 aa, Rattus Norvegicus
  ( 71 )...( 87 ): NY5R_RAT
LLILMAVMKKRNQKTT

SEQ ID NO: 5466 - protein, 16 aa, Rattus Norvegicus
  ( 72 )...( 88 ): NY5R_RAT
LILMAVMKKRNQKTTV

SEQ ID NO: 5467 - protein, 16 aa, Rattus Norvegicus
  ( 73 )...( 89 ): NY5R_RAT
ILMAVMKKRNQKTTVN

SEQ ID NO: 5468 - protein, 16 aa, Rattus Norvegicus
  ( 74 )...( 90 ): NY5R_RAT
LMAVMKKRNQKTTVNF

SEQ ID NO: 5469 - protein, 16 aa, Rattus Norvegicus
  ( 75 )...( 91 ): NY5R_RAT
MAVMKKRNQKTTVNFL

SEQ ID NO: 5470 - protein, 16 aa, Rattus Norvegicus
  ( 76 )...( 92 ): NY5R_RAT
AVMKKRNQKTTVNFLI

SEQ ID NO: 5471 - protein, 16 aa, Rattus Norvegicus
  ( 77 )...( 93 ): NY5R_RAT
VMKKRNQKTTVNFLIG

SEQ ID NO: 5472 - protein, 16 aa, Rattus Norvegicus
  ( 369 )...( 385 ): NY5R_RAT
IKKRSRSVFYRLTILI

SEQ ID NO: 5473 - protein, 16 aa, Rattus Norvegicus
  ( 370 )...( 386 ): NY5R_RAT
KKRSRSVFYRLTILIL

SEQ ID NO: 5474 - protein, 16 aa, Rattus Norvegicus
  ( 69 )...( 85 ): OPRX_RAT
VMYVILRHTKMKTATN

SEQ ID NO: 5475 - protein, 16 aa, Rattus Norvegicus
  ( 70 )...( 86 ): OPRX_RAT
MYVILRHTKMKTATNI

SEQ ID NO: 5476 - protein, 16 aa, Rattus Norvegicus
  ( 71 )...( 87 ): OPRX_RAT
YVILRHTKMKTATNIY

SEQ ID NO: 5477 - protein, 16 aa, Rattus Norvegicus
  ( 72 )...( 88 ): OPRX_RAT
VILRHTKMKTATNIYI

SEQ ID NO: 5478 - protein, 16 aa, Rattus Norvegicus
  ( 73 )...( 89 ): OPRX_RAT
ILRHTKMKTATNIYIF

SEQ ID NO: 5479 - protein, 16 aa, Rattus Norvegicus
  ( 251 )...( 267 ): OPRX_RAT
KDRNLRRITRLVLVVV

SEQ ID NO: 5480 - protein, 16 aa, Rattus Norvegicus
  ( 253 )...( 269 ): OPRX_RAT
RNLRRITRLVLVVVAV

SEQ ID NO: 5481 - protein, 16 aa, Rattus Norvegicus
  ( 254 )...( 270 ): OPRX_RAT
NLRRITRLVLVVVAVF

SEQ ID NO: 5482 - protein, 16 aa, Rattus Norvegicus
  ( 255 )...( 271 ): OPRX_RAT
LRRITRLVLVVVAVFV

SEQ ID NO: 5483 - protein, 16 aa, Rattus Norvegicus
  ( 256 )...( 272 ): OPRX_RAT
RRITRLVLVVVAVFVG

SEQ ID NO: 5484 - protein, 16 aa, Rattus Norvegicus
  ( 220 )...( 236 ): OXYR_RAT
YGLISFKIWQNLRLKT

SEQ ID NO: 5485 - protein, 16 aa, Rattus Norvegicus
  ( 221 )...( 237 ): OXYR_RAT
GLISFKIWQNLRLKTA

SEQ ID NO: 5486 - protein, 16 aa, Rattus Norvegicus
  ( 222 )...( 238 ): OXYR_RAT
LISFKIWQNLRLKTAA

SEQ ID NO: 5487 - protein, 16 aa, Rattus Norvegicus
  ( 254 )...( 270 ): OXYR_RAT
AALARVSSVKLISKAK

SEQ ID NO: 5488 - protein, 16 aa, Rattus Norvegicus
  ( 255 )...( 271 ): OXYR_RAT
ALARVSSVKLISKAKI

SEQ ID NO: 5489 - protein, 16 aa, Rattus Norvegicus
  ( 256 )...( 272 ): OXYR_RAT
LARVSSVKLISKAKIR

SEQ ID NO: 5490 - protein, 16 aa, Rattus Norvegicus
  ( 258 )...( 274 ): OXYR_RAT
RVSSVKLISKAKIRTV

SEQ ID NO: 5491 - protein, 16 aa, Rattus Norvegicus
  ( 259 )...( 275 ): OXYR_RAT
VSSVKLISKAKIRTVK

SEQ ID NO: 5492 - protein, 16 aa, Rattus Norvegicus
  ( 260 )...( 276 ): OXYR_RAT
SSVKLISKAKIRTVKM

SEQ ID NO: 5493 - protein, 16 aa, Rattus Norvegicus
  ( 261 )...( 277 ): OXYR_RAT
SVKLISKAKIRTVKMT

SEQ ID NO: 5494 - protein, 16 aa, Rattus Norvegicus
  ( 262 )...( 278 ): OXYR_RAT
VKLISKAKIRTVKMTF

SEQ ID NO: 5495 - protein, 16 aa, Rattus Norvegicus
  ( 263 )...( 279 ): OXYR_RAT
KLISKAKIRTVKMTFI

SEQ ID NO: 5496 - protein, 16 aa, Rattus Norvegicus
  ( 264 )...( 280 ): OXYR_RAT
LISKAKIRTVKMTFII

SEQ ID NO: 5497 - protein, 16 aa, Rattus Norvegicus
  ( 265 )...( 281 ): OXYR_RAT
ISKAKIRTVKMTFIIV

SEQ ID NO: 5498 - protein, 16 aa, Rattus Norvegicus
  ( 266 )...( 282 ): OXYR_RAT
SKAKIRTVKMTFIIVL

SEQ ID NO: 5499 - protein, 16 aa, Rattus Norvegicus
  ( 267 )...( 283 ): OXYR_RAT
KAKIRTVKMTFIIVLA

SEQ ID NO: 5500 - protein, 16 aa, Rattus Norvegicus
  ( 268 )...( 284 ): OXYR_RAT
AKIRTVKMTFIIVLAF

SEQ ID NO: 5501 - protein, 16 aa, Rattus Norvegicus
  ( 269 )...( 285 ): OXYR_RAT
KIRTVKMTFIIVLAFI

SEQ ID NO: 5502 - protein, 15 aa, Rattus Norvegicus
  ( 314 )...( 330 ): P2Y6_RAT
DLLQKLTAKWQRQRV

SEQ ID NO: 5503 - protein, 14 aa, Rattus Norvegicus
  ( 315 )...( 331 ): P2Y6_RAT
LLQKLTAKWQRQRV

SEQ ID NO: 5504 - protein, 13 aa, Rattus Norvegicus
  ( 316 )...( 332 ): P2Y6_RAT
LQKLTAKWQRQRV

SEQ ID NO: 5505 - protein, 16 aa, Rattus Norvegicus
  ( 346 )...( 362 ): PACR_RAT
IYLTNLRLRVPKKTRE

SEQ ID NO: 5506 - protein, 16 aa, Rattus Norvegicus
  ( 126 )...( 142 ): PAFR_RAT
AQATTRKRGITLSLVI

SEQ ID NO: 5507 - protein, 16 aa, Rattus Norvegicus
  ( 127 )...( 143 ): PAFR_RAT
QATTRKRGITLSLVIW

SEQ ID NO: 5508 - protein, 16 aa, Rattus Norvegicus
  ( 128 )...( 144 ): PAFR_RAT
ATTRKRGITLSLVIWI

SEQ ID NO: 5509 - protein, 16 aa, Rattus Norvegicus
  ( 129 )...( 145 ): PAFR_RAT
TTRKRGITLSLVIWIS

SEQ ID NO: 5510 - protein, 16 aa, Rattus Norvegicus
  ( 130 )...( 146 ): PAFR_RAT
TRKRGITLSLVIWISI

SEQ ID NO: 5511 - protein, 16 aa, Rattus Norvegicus
  ( 131 )...( 147 ): PAFR_RAT
RKRGITLSLVIWISIA

SEQ ID NO: 5512 - protein, 16 aa, Rattus Norvegicus
  ( 207 )...( 223 ): PAFR_RAT
MVIIHTLLTRPVRQQR

SEQ ID NO: 5513 - protein, 16 aa, Rattus Norvegicus
  ( 208 )...( 224 ): PAFR_RAT
VIIHTLLTRPVRQQRK

SEQ ID NO: 5514 - protein, 16 aa, Rattus Norvegicus
  ( 209 )...( 225 ): PAFR_RAT
IIHTLLTRPVRQQRKP

SEQ ID NO: 5515 - protein, 16 aa, Rattus Norvegicus
  ( 126 )...( 142 ): PAR1_RAT
LNILAIAVFVFRMKVK

SEQ ID NO: 5516 - protein, 16 aa, Rattus Norvegicus
  ( 127 )...( 143 ): PAR1_RAT
NILAIAVFVFRMKVKK

SEQ ID NO: 5517 - protein, 16 aa, Rattus Norvegicus
  ( 128 )...( 144 ): PAR1_RAT
ILAIAVFVFRMKVKKP

SEQ ID NO: 5518 - protein, 16 aa, Rattus Norvegicus
  ( 129 )...( 145 ): PAR1_RAT
LAIAVFVFRMKVKKPA

SEQ ID NO: 5519 - protein, 16 aa, Rattus Norvegicus
  ( 130 )...( 146 ): PAR1_RAT
AIAVFVFRMKVKKPAV

SEQ ID NO: 5520 - protein, 16 aa, Rattus Norvegicus
  ( 131 )...( 147 ): PAR1_RAT
IAVFVFRMKVKKPAVV

SEQ ID NO: 5521 - protein, 16 aa, Rattus Norvegicus
  ( 132 )...( 148 ): PAR1_RAT
AVFVFRMKVKKPAVVY

SEQ ID NO: 5522 - protein, 16 aa, Rattus Norvegicus
  ( 134 )...( 150 ): PAR1_RAT
FVFRMKVKKPAVVYML

SEQ ID NO: 5523 - protein, 16 aa, Rattus Norvegicus
  ( 135 )...( 151 ): PAR1_RAT
VFRMKVKKPAVVYMLH

SEQ ID NO: 5524 - protein, 16 aa, Rattus Norvegicus
  ( 136 )...( 152 ): PAR1_RAT
FRMKVKKPAVVYMLHL

SEQ ID NO: 5525 - protein, 16 aa, Rattus Norvegicus
  ( 137 )...( 153 ): PAR1_RAT
RMKVKKPAVVYMLHLA

SEQ ID NO: 5526 - protein, 16 aa, Rattus Norvegicus
  ( 138 )...( 154 ): PAR1_RAT
MKVKKPAVVYMLHLAM

SEQ ID NO: 5527 - protein, 16 aa, Rattus Norvegicus
  ( 139 )...( 155 ): PAR1_RAT
KVKKPAVVYMLHLAMA

SEQ ID NO: 5528 - protein, 16 aa, Rattus Norvegicus
  ( 104 )...( 120 ): PAR2_RAT
TKKKHPAVIYMANLAL

SEQ ID NO: 5529 - protein, 16 aa, Rattus Norvegicus
  ( 278 )...( 294 ): PAR2_RAT
SEKKRRRAIRLIITVL

SEQ ID NO: 5530 - protein, 16 aa, Rattus Norvegicus
  ( 279 )...( 295 ): PAR2_RAT
EKKRRRAIRLIITVLS

SEQ ID NO: 5531 - protein, 16 aa, Rattus Norvegicus
  ( 280 )...( 296 ): PAR2_RAT
KKRRRAIRLIITVLSM

SEQ ID NO: 5532 - protein, 16 aa, Rattus Norvegicus
  ( 364 )...( 380 ): PAR2_RAT
VRTVKRMQISLTSNKF

SEQ ID NO: 5533 - protein, 16 aa, Rattus Norvegicus
  ( 109 )...( 125 ): PAR3_RAT
ANIVTLWKLSSRTKSI

SEQ ID NO: 5534 - protein, 16 aa, Rattus Norvegicus
  ( 111 )...( 127 ): PAR3_RAT
IVTLWKLSSRTKSICL

SEQ ID NO: 5535 - protein, 16 aa, Rattus Norvegicus
  ( 113 )...( 129 ): PAR3_RAT
TLWKLSSRTKSICLVI

SEQ ID NO: 5536 - protein, 16 aa, Rattus Norvegicus
  ( 284 )...( 300 ): PAR3_RAT
IHKLNAQDRKWLRYIK

SEQ ID NO: 5537 - protein, 16 aa, Rattus Norvegicus
  ( 286 )...( 302 ): PAR3_RAT
KLNAQDRKWLRYIKAV

SEQ ID NO: 5538 - protein, 16 aa, Rattus Norvegicus
  ( 289 )...( 305 ): PAR3_RAT
AQDRKWLRYIKAVLLI

SEQ ID NO: 5539 - protein, 16 aa, Rattus Norvegicus
  ( 290 )...( 306 ): PAR3_RAT
QDRKWLRYIKAVLLIL

SEQ ID NO: 5540 - protein, 16 aa, Rattus Norvegicus
  ( 291 )...( 307 ): PAR3_RAT
DRKWLRYIKAVLLILV

SEQ ID NO: 5541 - protein, 16 aa, Rattus Norvegicus
  ( 292 )...( 308 ): PAR3_RAT
RKWLRYIKAVLLILVI

SEQ ID NO: 5542 - protein, 16 aa, Rattus Norvegicus
  ( 293 )...( 309 ): PAR3_RAT
KWLRYIKAVLLILVIF

SEQ ID NO: 5543 - protein, 16 aa, Rattus Norvegicus
  ( 317 )...( 333 ): PE23_RAT
LDPWVYLLLRKILLRK

SEQ ID NO: 5544 - protein, 16 aa, Rattus Norvegicus
  ( 320 )...( 336 ): PE23_RAT
WVYLLLRKILLRKFCQ

SEQ ID NO: 5545 - protein, 16 aa, Rattus Norvegicus
  ( 321 )...( 337 ): PE23_RAT
VYLLLRKILLRKFCQI

SEQ ID NO: 5546 - protein, 16 aa, Rattus Norvegicus
  ( 322 )...( 338 ): PE23_RAT
YLLLRKILLRKFCQIR

SEQ ID NO: 5547 - protein, 16 aa, Rattus Norvegicus
  ( 140 )...( 156 ): PF2R_RAT
PLFHSTKITSKHVKMI

SEQ ID NO: 5548 - protein, 16 aa, Rattus Norvegicus
  ( 141 )...( 157 ): PF2R_RAT
LFHSTKITSKHVKMIL

SEQ ID NO: 5549 - protein, 16 aa, Rattus Norvegicus
  ( 142 )...( 158 ): PF2R_RAT
FHSTKITSKHVKMILS

SEQ ID NO: 5550 - protein, 16 aa, Rattus Norvegicus
  ( 144 )...( 160 ): PF2R_RAT
STKITSKHVKMILSGV

SEQ ID NO: 5551 - protein, 16 aa, Rattus Norvegicus
  ( 221 )...( 237 ): PF2R_RAT
AVTGVTLLRVKFRSQQ

SEQ ID NO: 5552 - protein, 16 aa, Rattus Norvegicus
  ( 222 )...( 238 ): PF2R_RAT
VTGVTLLRVKFRSQQH

SEQ ID NO: 5553 - protein, 16 aa, Rattus Norvegicus
  ( 302 )...( 318 ): PF2R_RAT
WVYILLRKAVLRNLYK

SEQ ID NO: 5554 - protein, 16 aa, Rattus Norvegicus
  ( 303 )...( 319 ): PF2R_RAT
VYILLRKAVLRNLYKL

SEQ ID NO: 5555 - protein, 16 aa, Rattus Norvegicus
  ( 304 )...( 320 ): PF2R_RAT
YILLRKAVLRNLYKLA

SEQ ID NO: 5556 - protein, 16 aa, Rattus Norvegicus
  ( 305 )...( 321 ): PF2R_RAT
ILLRKAVLRNLYKLAS

SEQ ID NO: 5557 - protein, 16 aa, Rattus Norvegicus
  ( 350 )...( 366 ): PTH2_RAT
DMRKQYRKLAKSTLVL

SEQ ID NO: 5558 - protein, 16 aa, Rattus Norvegicus
  ( 351 )...( 367 ): PTH2_RAT
MRKQYRKLAKSTLVLV

SEQ ID NO: 5559 - protein, 16 aa, Rattus Norvegicus
  ( 352 )...( 368 ): PTH2_RAT
RKQYRKLAKSTLVLVL

SEQ ID NO: 5560 - protein, 16 aa, Rattus Norvegicus
  ( 353 )...( 369 ): PTH2_RAT
KQYRKLAKSTLVLVLV

SEQ ID NO: 5561 - protein, 16 aa, Rattus Norvegicus
  ( 354 )...( 370 ): PTH2_RAT
QYRKLAKSTLVLVLVF

SEQ ID NO: 5562 - protein, 16 aa, Rattus Norvegicus
  ( 355 )...( 371 ): PTH2_RAT
YRKLAKSTLVLVLVFG

SEQ ID NO: 5563 - protein, 16 aa, Rattus Norvegicus
  ( 356 )...( 372 ): PTH2_RAT
RKLAKSTLVLVLVFGV

SEQ ID NO: 5564 - protein, 16 aa, Rattus Norvegicus
  ( 375 )...( 391 ): PTRR_RAT
FILFINIIRVLATKLR

SEQ ID NO: 5565 - protein, 16 aa, Rattus Norvegicus
  ( 398 )...( 414 ): PTRR_RAT
DTRQQYRKLLRSTLVL

SEQ ID NO: 5566 - protein, 16 aa, Rattus Norvegicus
  ( 399 )...( 415 ): PTRR_RAT
TRQQYRKLLRSTLVLV

SEQ ID NO: 5567 - protein, 16 aa, Rattus Norvegicus
  ( 400 )...( 416 ): PTRR_RAT
RQQYRKLLRSTLVLVP

SEQ ID NO: 5568 - protein, 16 aa, Rattus Norvegicus
  ( 401 )...( 417 ): PTRR_RAT
QQYRKLLRSTLVLVPL

SEQ ID NO: 5569 - protein, 16 aa, Rattus Norvegicus
  ( 402 )...( 418 ): PTRR_RAT
QYRKLLRSTLVLVPLF

SEQ ID NO: 5570 - protein, 16 aa, Rattus Norvegicus
  ( 404 )...( 420 ): PTRR_RAT
RKLLRSTLVLVPLFGV

SEQ ID NO: 5571 - protein, 16 aa, Rattus Norvegicus
  ( 4 )...( 20 ): SCRC_RAT
TMRPRLSLLLLRLLLL

SEQ ID NO: 5572 - protein, 16 aa, Rattus Norvegicus
  ( 5 )...( 21 ): SCRC_RAT
MRPRLSLLLLRLLLLT

SEQ ID NO: 5573 - protein, 16 aa, Rattus Norvegicus
  ( 6 )...( 22 ): SCRC_RAT
RPRLSLLLLRLLLLTK

SEQ ID NO: 5574 - protein, 16 aa, Rattus Norvegicus
  ( 133 )...( 149 ): SCRC_RAT
ERRHAYLLKLKVMYTV

SEQ ID NO: 5575 - protein, 16 aa, Rattus Norvegicus
  ( 134 )...( 150 ): SCRC_RAT
RRHAYLLKLKVMYTVG

SEQ ID NO: 5576 - protein, 16 aa, Rattus Norvegicus
  ( 311 )...( 327 ): SCRC_RAT
IFFINILRILMRKLRT

SEQ ID NO: 5577 - protein, 16 aa, Rattus Norvegicus
  ( 312 )...( 328 ): SCRC_RAT
FFINILRILMRKLRTQ

SEQ ID NO: 5578 - protein, 16 aa, Rattus Norvegicus
  ( 313 )...( 329 ): SCRC_RAT
FINILRILMRKLRTQE

SEQ ID NO: 5579 - protein, 16 aa, Rattus Norvegicus
  ( 314 )...( 330 ): SCRC_RAT
INILRILMRKLRTQET

SEQ ID NO: 5580 - protein, 16 aa, Rattus Norvegicus
  ( 315 )...( 331 ): SCRC_RAT
NILRILMRKLRTQETR

SEQ ID NO: 5581 - protein, 16 aa, Rattus Norvegicus
  ( 316 )...( 332 ): SCRC_RAT
ILRILMRKLRTQETRG

SEQ ID NO: 5582 - protein, 16 aa, Rattus Norvegicus
  ( 334 )...( 350 ): SCRC_RAT
TNHYKRLAKSTLLLIP

SEQ ID NO: 5583 - protein, 16 aa, Rattus Norvegicus
  ( 335 )...( 351 ): SCRC_RAT
NHYKRLAKSTLLLIPL

SEQ ID NO: 5584 - protein, 16 aa, Rattus Norvegicus
  ( 336 )...( 352 ): SCRC_RAT
HYKRLAKSTLLLIPLF

SEQ ID NO: 5585 - protein, 16 aa, Rattus Norvegicus
  ( 337 )...( 353 ): SCRC_RAT
YKRLAKSTLLLIPLFG

SEQ ID NO: 5586 - protein, 16 aa, Rattus Norvegicus
  ( 338 )...( 354 ): SCRC_RAT
KRLAKSTLLLIPLFGI

SEQ ID NO: 5587 - protein, 16 aa, Rattus Norvegicus
  ( 14 )...( 30 ): SMO_RAT
PRRLLQLLLLVLLGGR

SEQ ID NO: 5588 - protein, 16 aa, Rattus Norvegicus
  ( 15 )...( 31 ): SMO_RAT
RRLLQLLLLVLLGGRG

SEQ ID NO: 5589 - protein, 16 aa, Rattus Norvegicus
  ( 16 )...( 32 ): SMO_RAT
RLLQLLLLVLLGGRGR

SEQ ID NO: 5590 - protein, 16 aa, Rattus Norvegicus
  ( 76 )...( 92 ): SSR1_RAT
NSMVIYVILRYAKMKT

SEQ ID NO: 5591 - protein, 16 aa, Rattus Norvegicus
  ( 77 )...( 93 ): SSR1_RAT
SMVIYVILRYAKMKTA

SEQ ID NO: 5592 - protein, 16 aa, Rattus Norvegicus
  ( 79 )...( 95 ): SSR1_RAT
VIYVILRYAKMKTATN

SEQ ID NO: 5593 - protein, 16 aa, Rattus Norvegicus
  ( 80 )...( 96 ): SSR1_RAT
IYVILRYAKMKTATNI

SEQ ID NO: 5594 - protein, 16 aa, Rattus Norvegicus
  ( 81 )...( 97 ): SSR1_RAT
YVILRYAKMKTATNIY

SEQ ID NO: 5595 - protein, 16 aa, Rattus Norvegicus
  ( 82 )...( 98 ): SSR1_RAT
VILRYAKMKTATNIYI

SEQ ID NO: 5596 - protein, 16 aa, Rattus Norvegicus
  ( 83 )...( 99 ): SSR1_RAT
ILRYAKMKTATNIYIL

SEQ ID NO: 5597 - protein, 16 aa, Rattus Norvegicus
  ( 84 )...( 100 ): SSR1_RAT
LRYAKMKTATNIYILN

SEQ ID NO: 5598 - protein, 16 aa, Rattus Norvegicus
  ( 85 )...( 101 ): SSR1_RAT
RYAKMKTATNIYILNL

SEQ ID NO: 5599 - protein, 16 aa, Rattus Norvegicus
  ( 241 )...( 257 ): SSR1_RAT
LCYVLIIAKMRMVALK

SEQ ID NO: 5600 - protein, 16 aa, Rattus Norvegicus
  ( 243 )...( 259 ): SSR1_RAT
YVLIIAKMRMVALKAG

SEQ ID NO: 5601 - protein, 16 aa, Rattus Norvegicus
  ( 244 )...( 260 ): SSR1_RAT
VLIIAKMRMVALKAGW

SEQ ID NO: 5602 - protein, 16 aa, Rattus Norvegicus
  ( 245 )...( 261 ): SSR1_RAT
LIIAKMRMVALKAGWQ

SEQ ID NO: 5603 - protein, 16 aa, Rattus Norvegicus
  ( 246 )...( 262 ): SSR1_RAT
IIAKMRMVALKAGWQQ

SEQ ID NO: 5604 - protein, 16 aa, Rattus Norvegicus
  ( 261 )...( 277 ): SSR1_RAT
QRKRSERKITLMVMMV

SEQ ID NO: 5605 - protein, 16 aa, Rattus Norvegicus
  ( 262 )...( 278 ): SSR1_RAT
RKRSERKITLMVMMVV

SEQ ID NO: 5606 - protein, 16 aa, Rattus Norvegicus
  ( 60 )...( 76 ): SSR2_RAT
GNTLVIYVILRYAKMK

SEQ ID NO: 5607 - protein, 16 aa, Rattus Norvegicus
  ( 61 )...( 77 ): SSR2_RAT
NTLVIYVILRYAKMKT

SEQ ID NO: 5608 - protein, 16 aa, Rattus Norvegicus
  ( 62 )...( 78 ): SSR2_RAT
TLVIYVILRYAKMKTI

SEQ ID NO: 5609 - protein, 16 aa, Rattus Norvegicus
  ( 63 )...( 79 ): SSR2_RAT
LVIYVILRYAKMKTIT

SEQ ID NO: 5610 - protein, 16 aa, Rattus Norvegicus
  ( 64 )...( 80 ): SSR2_RAT
VIYVILRYAKMKTITN

SEQ ID NO: 5611 - protein, 16 aa, Rattus Norvegicus
  ( 65 )...( 81 ): SSR2_RAT
IYVILRYAKMKTITNI

SEQ ID NO: 5612 - protein, 16 aa, Rattus Norvegicus
  ( 67 )...( 83 ): SSR2_RAT
VILRYAKMKTITNIYI

SEQ ID NO: 5613 - protein, 16 aa, Rattus Norvegicus
  ( 68 )...( 84 ): SSR2_RAT
ILRYAKMKTITNIYIL

SEQ ID NO: 5614 - protein, 16 aa, Rattus Norvegicus
  ( 69 )...( 85 ): SSR2_RAT
LRYAKMKTITNIYILN

SEQ ID NO: 5615 - protein, 16 aa, Rattus Norvegicus
  ( 70 )...( 86 ): SSR2_RAT
RYAKMKTITNIYILNL

SEQ ID NO: 5616 - protein, 16 aa, Rattus Norvegicus
  ( 228 )...( 244 ): SSR2_RAT
YLFIIIKVKSSGIRVG

SEQ ID NO: 5617 - protein, 16 aa, Rattus Norvegicus
  ( 229 )...( 245 ): SSR2_RAT
LFIIIKVKSSGIRVGS

SEQ ID NO: 5618 - protein, 16 aa, Rattus Norvegicus
  ( 231 )...( 247 ): SSR2_RAT
IIIKVKSSGIRVGSSK

SEQ ID NO: 5619 - protein, 16 aa, Rattus Norvegicus
  ( 249 )...( 265 ): SSR2_RAT
KSEKKVTRMVSIVVAV

SEQ ID NO: 5620 - protein, 16 aa, Rattus Norvegicus
  ( 252 )...( 268 ): SSR2_RAT
KKVTRMVSIVVAVFIF

SEQ ID NO: 5621 - protein, 16 aa, Rattus Norvegicus
  ( 227 )...( 243 ): SSR3_RAT
YLLIVVKVRSTTRRVR

SEQ ID NO: 5622 - protein, 16 aa, Rattus Norvegicus
  ( 228 )...( 244 ): SSR3_RAT
LLIVVKVRSTTRRVRA

SEQ ID NO: 5623 - protein, 16 aa, Rattus Norvegicus
  ( 60 )...( 76 ): SSR4_RAT
GNALVIFVILRYAKMK

SEQ ID NO: 5624 - protein, 16 aa, Rattus Norvegicus
  ( 61 )...( 77 ): SSR4_RAT
NALVIFVILRYAKMKT

SEQ ID NO: 5625 - protein, 16 aa, Rattus Norvegicus
  ( 62 )...( 78 ): SSR4_RAT
ALVIFVILRYAKMKTA

SEQ ID NO: 5626 - protein, 16 aa, Rattus Norvegicus
  ( 63 )...( 79 ): SSR4_RAT
LVIFVILRYAKMKTAT

SEQ ID NO: 5627 - protein, 16 aa, Rattus Norvegicus
  ( 64 )...( 80 ): SSR4_RAT
VIFVILRYAKMKTATN

SEQ ID NO: 5628 - protein, 16 aa, Rattus Norvegicus
  ( 65 )...( 81 ): SSR4_RAT
IFVILRYAKMKTATNI

SEQ ID NO: 5629 - protein, 16 aa, Rattus Norvegicus
  ( 66 )...( 82 ): SSR4_RAT
FVILRYAKMKTATNIY

SEQ ID NO: 5630 - protein, 16 aa, Rattus Norvegicus
  ( 67 )...( 83 ): SSR4_RAT
VILRYAKMKTATNIYL

SEQ ID NO: 5631 - protein, 16 aa, Rattus Norvegicus
  ( 68 )...( 84 ): SSR4_RAT
ILRYAKMKTATNIYLL

SEQ ID NO: 5632 - protein, 16 aa, Rattus Norvegicus
  ( 246 )...( 262 ): SSR4_RAT
RRRSEKKITRLVLMVV

SEQ ID NO: 5633 - protein, 16 aa, Rattus Norvegicus
  ( 247 )...( 263 ): SSR4_RAT
RRSEKKITRLVLMVVT

SEQ ID NO: 5634 - protein, 16 aa, Rattus Norvegicus
  ( 248 )...( 264 ): SSR4_RAT
RSEKKITRLVLMVVTV

SEQ ID NO: 5635 - protein, 16 aa, Rattus Norvegicus
  ( 251 )...( 267 ): SSR4_RAT
KKITRLVLMVVTVFVL

SEQ ID NO: 5636 - protein, 16 aa, Rattus Norvegicus
  ( 54 )...( 70 ): SSR5_RAT
GNTLVIYVVLRHAKMK

SEQ ID NO: 5637 - protein, 16 aa, Rattus Norvegicus
  ( 55 )...( 71 ): SSR5_RAT
NTLVIYVVLRHAKMKT

SEQ ID NO: 5638 - protein, 16 aa, Rattus Norvegicus
  ( 56 )...( 72 ): SSR5_RAT
TLVIYVVLRHAKMKTV

SEQ ID NO: 5639 - protein, 16 aa, Rattus Norvegicus
  ( 57 )...( 73 ): SSR5_RAT
LVIYVVLRHAKMKTVT

SEQ ID NO: 5640 - protein, 16 aa, Rattus Norvegicus
  ( 58 )...( 74 ): SSR5_RAT
VIYVVLRHAKMKTVTN

SEQ ID NO: 5641 - protein, 16 aa, Rattus Norvegicus
  ( 59 )...( 75 ): SSR5_RAT
IYVVLRHAKMKTVTNV

SEQ ID NO: 5642 - protein, 16 aa, Rattus Norvegicus
  ( 60 )...( 76 ): SSR5_RAT
YVVLRHAKMKTVTNVY

SEQ ID NO: 5643 - protein, 16 aa, Rattus Norvegicus
  ( 61 )...( 77 ): SSR5_RAT
VVLRHAKMKTVTNVYI

SEQ ID NO: 5644 - protein, 16 aa, Rattus Norvegicus
  ( 62 )...( 78 ): SSR5_RAT
VLRHAKMKTVTNVYIL

SEQ ID NO: 5645 - protein, 16 aa, Rattus Norvegicus
  ( 63 )...( 79 ): SSR5_RAT
LRHAKMKTVTNVYILN

SEQ ID NO: 5646 - protein, 16 aa, Rattus Norvegicus
  ( 64 )...( 80 ): SSR5_RAT
RHAKMKTVTNVYILNL

SEQ ID NO: 5647 - protein, 16 aa, Rattus Norvegicus
  ( 218 )...( 234 ): SSR5_RAT
LCYLLIVVKVKAAGMR

SEQ ID NO: 5648 - protein, 16 aa, Rattus Norvegicus
  ( 219 )...( 235 ): SSR5_RAT
CYLLIVVKVKAAGMRV

SEQ ID NO: 5649 - protein, 16 aa, Rattus Norvegicus
  ( 220 )...( 236 ): SSR5_RAT
YLLIVVKVKAAGMRVG

SEQ ID NO: 5650 - protein, 16 aa, Rattus Norvegicus
  ( 221 )...( 237 ): SSR5_RAT
LLIVVKVKAAGMRVGS

SEQ ID NO: 5651 - protein, 16 aa, Rattus Norvegicus
  ( 222 )...( 238 ): SSR5_RAT
LIVVKVKAAGMRVGSS

SEQ ID NO: 5652 - protein, 16 aa, Rattus Norvegicus
  ( 240 )...( 256 ): SSR5_RAT
RRSEPKVTRMVVVVVL

SEQ ID NO: 5653 - protein, 16 aa, Rattus Norvegicus
  ( 43 )...( 59 ): TRFR_RAT
NIMVVLVVMRTKHMRT

SEQ ID NO: 5654 - protein, 16 aa, Rattus Norvegicus
  ( 44 )...( 60 ): TRFR_RAT
IMVVLVVMRTKHMRTA

SEQ ID NO: 5655 - protein, 16 aa, Rattus Norvegicus
  ( 45 )...( 61 ): TRFR_RAT
MVVLVVMRTKHMRTAT

SEQ ID NO: 5656 - protein, 16 aa, Rattus Norvegicus
  ( 46 )...( 62 ): TRFR_RAT
VVLVVMRTKHMRTATN

SEQ ID NO: 5657 - protein, 16 aa, Rattus Norvegicus
  ( 141 )...( 157 ): TRFR_RAT
RAKKIIIFVWAFTSIY

SEQ ID NO: 5658 - protein, 16 aa, Rattus Norvegicus
  ( 256 )...( 272 ): TRFR_RAT
STVSSRKQVTKMLAVV

SEQ ID NO: 5659 - protein, 16 aa, Rattus Norvegicus
  ( 257 )...( 273 ): TRFR_RAT
TVSSRKQVTKMLAVVV

SEQ ID NO: 5660 - protein, 16 aa, Rattus Norvegicus
  ( 258 )...( 274 ): TRFR_RAT
VSSRKQVTKMLAVVVI

SEQ ID NO: 5661 - protein, 16 aa, Rattus Norvegicus
  ( 259 )...( 275 ): TRFR_RAT
SSRKQVTKMLAVVVIL

SEQ ID NO: 5662 - protein, 16 aa, Rattus Norvegicus
  ( 260 )...( 276 ): TRFR_RAT
SRKQVTKMLAVVVILF

SEQ ID NO: 5663 - protein, 16 aa, Rattus Norvegicus
  ( 261 )...( 277 ): TRFR_RAT
RKQVTKMLAVVVILFA

SEQ ID NO: 5664 - protein, 16 aa, Rattus Norvegicus
  ( 248 )...( 264 ): TSHR_RAT
HLKELIAKNTWTLKKL

SEQ ID NO: 5665 - protein, 16 aa, Rattus Norvegicus
  ( 249 )...( 265 ): TSHR_RAT
LKELIAKNTWTLKKLP

SEQ ID NO: 5666 - protein, 16 aa, Rattus Norvegicus
  ( 250 )...( 266 ): TSHR_RAT
KELIAKNTWTLKKLPL

SEQ ID NO: 5667 - protein, 16 aa, Rattus Norvegicus
  ( 252 )...( 268 ): TSHR_RAT
LIAKNTWTLKKLPLSL

SEQ ID NO: 5668 - protein, 16 aa, Rattus Norvegicus
  ( 253 )...( 269 ): TSHR_RAT
IAKNTWTLKKLPLSLS

SEQ ID NO: 5669 - protein, 16 aa, Rattus Norvegicus
  ( 254 )...( 270 ): TSHR_RAT
AKNTWTLKKLPLSLSF

SEQ ID NO: 5670 - protein, 16 aa, Rattus Norvegicus
  ( 255 )...( 271 ): TSHR_RAT
KNTWTLKKLPLSLSFL

SEQ ID NO: 5671 - protein, 16 aa, Rattus Norvegicus
  ( 259 )...( 275 ): TSHR_RAT
TLKKLPLSLSFLHLTR

SEQ ID NO: 5672 - protein, 16 aa, Rattus Norvegicus
  ( 260 )...( 276 ): TSHR_RAT
LKKLPLSLSFLHLTRA

SEQ ID NO: 5673 - protein, 16 aa, Mus Musculus
  ( 334 )...( 350 ): 5H1A_MOUSE
KMALARERKTVKTLGI

SEQ ID NO: 5674 - protein, 16 aa, Mus Musculus
  ( 335 )...( 351 ): 5H1A_MOUSE
MALARERKTVKTLGII

SEQ ID NO: 5675 - protein, 16 aa, Mus Musculus
  ( 336 )...( 352 ): 5H1A_MOUSE
ALARERKTVKTLGIIM

SEQ ID NO: 5676 - protein, 16 aa, Mus Musculus
  ( 337 )...( 353 ): 5H1A_MOUSE
LARERKTVKTLGIIMG

SEQ ID NO: 5677 - protein, 16 aa, Mus Musculus
  ( 156 )...( 172 ): 5H1B_MOUSE
KRTPKRAAIMIVLVWV

SEQ ID NO: 5678 - protein, 16 aa, Mus Musculus
  ( 286 )...( 302 ): 5H1B_MOUSE
VKVRVSDALLEKKKLM

SEQ ID NO: 5679 - protein, 16 aa, Mus Musculus
  ( 287 )...( 303 ): 5H1B_MOUSE
KVRVSDALLEKKKLMA

SEQ ID NO: 5680 - protein, 16 aa, Mus Musculus
  ( 300 )...( 316 ): 5H1B_MOUSE
LMAARERKATKTLGII

SEQ ID NO: 5681 - protein, 16 aa, Mus Musculus
  ( 301 )...( 317 ): 5H1B_MOUSE
MAARERKATKTLGIIL

SEQ ID NO: 5682 - protein, 16 aa, Mus Musculus
  ( 304 )...( 320 ): 5H1B_MOUSE
RERKATKTLGIILGAF

SEQ ID NO: 5683 - protein, 16 aa, Mus Musculus
  ( 306 )...( 322 ): 5H1B_MOUSE
RKATKTLGIILGAFIV

SEQ ID NO: 5684 - protein, 16 aa, Mus Musculus
  ( 273 )...( 289 ): 5H1D_MOUSE
QVKIKLADSILERKRI

SEQ ID NO: 5685 - protein, 16 aa, Mus Musculus
  ( 274 )...( 290 ): 5H1D_MOUSE
VKIKLADSILERKRIS

SEQ ID NO: 5686 - protein, 16 aa, Mus Musculus
  ( 292 )...( 308 ): 5H1D_MOUSE
RERKATKTLGIILGAF

SEQ ID NO: 5687 - protein, 16 aa, Mus Musculus
  ( 294 )...( 310 ): 5H1D_MOUSE
RKATKTLGIILGAFII

SEQ ID NO: 5688 - protein, 16 aa, Mus Musculus
  ( 194 )...( 210 ): 5H1F_MOUSE
LVLILILYYKIYRAAR

SEQ ID NO: 5689 - protein, 16 aa, Mus Musculus
  ( 195 )...( 211 ): 5H1F_MOUSE
VLILILYYKIYRAART

SEQ ID NO: 5690 - protein, 16 aa, Mus Musculus
  ( 196 )...( 212 ): 5H1F_MOUSE
LILILYYKIYRAARTL

SEQ ID NO: 5691 - protein, 16 aa, Mus Musculus
  ( 197 )...( 213 ): 5H1F_MOUSE
ILILYYKIYRAARTLY

SEQ ID NO: 5692 - protein, 16 aa, Mus Musculus
  ( 187 )...( 203 ): 5H2A_MOUSE
NSRTKAFLKIIAVWTI

SEQ ID NO: 5693 - protein, 16 aa, Mus Musculus
  ( 188 )...( 204 ): 5H2A_MOUSE
SRTKAFLKIIAVWTIS

SEQ ID NO: 5694 - protein, 16 aa, Mus Musculus
  ( 189 )...( 205 ): 5H2A_MOUSE
RTKAFLKIIAVWTISV

SEQ ID NO: 5695 - protein, 16 aa, Mus Musculus
  ( 236 )...( 252 ): 5H2B_MOUSE
YFLTIHTLQKKAYLVK

SEQ ID NO: 5696 - protein, 16 aa, Mus Musculus
  ( 237 )...( 253 ): 5H2B_MOUSE
FLTIHTLQKKAYLVKN

SEQ ID NO: 5697 - protein, 16 aa, Mus Musculus
  ( 238 )...( 254 ): 5H2B_MOUSE
LTIHTLQKKAYLVKNK

SEQ ID NO: 5698 - protein, 16 aa, Mus Musculus
  ( 239 )...( 255 ): 5H2B_MOUSE
TIHTLQKKAYLVKNKP

SEQ ID NO: 5699 - protein, 16 aa, Mus Musculus
  ( 240 )...( 256 ): 5H2B_MOUSE
IHTLQKKAYLVKNKPP

SEQ ID NO: 5700 - protein, 16 aa, Mus Musculus
  ( 241 )...( 257 ): 5H2B_MOUSE
HTLQKKAYLVKNKPPQ

SEQ ID NO: 5701 - protein, 16 aa, Mus Musculus
  ( 243 )...( 259 ): 5H2B_MOUSE
LQKKAYLVKNKPPQRL

SEQ ID NO: 5702 - protein, 16 aa, Mus Musculus
  ( 167 )...( 183 ): 5H2C_MOUSE
NSRTKAIMKIAIVWAI

SEQ ID NO: 5703 - protein, 16 aa, Mus Musculus
  ( 168 )...( 184 ): 5H2C_MOUSE
SRTKAIMKIAIVWAIS

SEQ ID NO: 5704 - protein, 16 aa, Mus Musculus
  ( 169 )...( 185 ): 5H2C_MOUSE
RTKAIMKIAIVWAISI

SEQ ID NO: 5705 - protein, 16 aa, Mus Musculus
  ( 236 )...( 252 ): 5H2C_MOUSE
FLTIYVLRRQTLMLLR

SEQ ID NO: 5706 - protein, 16 aa, Mus Musculus
  ( 237 )...( 253 ): 5H2C_MOUSE
LTIYVLRRQTLMLLRG

SEQ ID NO: 5707 - protein, 16 aa, Mus Musculus
  ( 238 )...( 254 ): 5H2C_MOUSE
TIYVLRRQTLMLLRGH

SEQ ID NO: 5708 - protein, 16 aa, Mus Musculus
  ( 239 )...( 255 ): 5H2C_MOUSE
IYVLRRQTLMLLRGHT

SEQ ID NO: 5709 - protein, 16 aa, Mus Musculus
  ( 308 )...( 324 ): 5H2C_MOUSE
KKASKVLGIVFFVFLI

SEQ ID NO: 5710 - protein, 16 aa, Mus Musculus
  ( 48 )...( 64 ): 5H4_MOUSE
RQLRKIKTNYFIVSLA

SEQ ID NO: 5711 - protein, 16 aa, Mus Musculus
  ( 49 )...( 65 ): 5H4_MOUSE
QLRKIKTNYFIVSLAF

SEQ ID NO: 5712 - protein, 16 aa, Mus Musculus
  ( 58 )...( 74 ): 5H5A_MOUSE
NLLVLATILKVRTFHR

SEQ ID NO: 5713 - protein, 16 aa, Mus Musculus
  ( 59 )...( 75 ): 5H5A_MOUSE
LLVLATILKVRTFHRV

SEQ ID NO: 5714 - protein, 16 aa, Mus Musculus
  ( 60 )...( 76 ): 5H5A_MOUSE
LVLATILKVRTFHRVP

SEQ ID NO: 5715 - protein, 16 aa, Mus Musculus
  ( 61 )...( 77 ): 5H5A_MOUSE
VLATILKVRTFHRVPH

SEQ ID NO: 5716 - protein, 16 aa, Mus Musculus
  ( 150 )...( 166 ): 5H5A_MOUSE
TLRTRKRVSNVMILLT

SEQ ID NO: 5717 - protein, 16 aa, Mus Musculus
  ( 153 )...( 169 ): 5H5A_MOUSE
TRKRVSNVMILLTWAL

SEQ ID NO: 5718 - protein, 16 aa, Mus Musculus
  ( 213 )...( 229 ): 5H5A_MOUSE
LWLVLFVYWKIYRAAK

SEQ ID NO: 5719 - protein, 16 aa, Mus Musculus
  ( 71 )...( 87 ): 5H5B_MOUSE
LLVLVTILRVRAFHRV

SEQ ID NO: 5720 - protein, 16 aa, Mus Musculus
  ( 226 )...( 242 ): 5H5B_MOUSE
LAVVLFVYWKIYKAAK

SEQ ID NO: 5721 - protein, 16 aa, Mus Musculus
  ( 227 )...( 243 ): 5H5B_MOUSE
AVVLFVYWKIYKAAKF

SEQ ID NO: 5722 - protein, 16 aa, Mus Musculus
  ( 260 )...( 276 ): 5H6_MOUSE
KHSRKALKASLTLGIL

SEQ ID NO: 5723 - protein, 16 aa, Mus Musculus
  ( 261 )...( 277 ): 5H6_MOUSE
HSRKALKASLTLGILL

SEQ ID NO: 5724 - protein, 16 aa, Mus Musculus
  ( 262 )...( 278 ): 5H6_MOUSE
SRKALKASLTLGILLS

SEQ ID NO: 5725 - protein, 16 aa, Mus Musculus
  ( 263 )...( 279 ): 5H6_MOUSE
RKALKASLTLGILLSM

SEQ ID NO: 5726 - protein, 16 aa, Mus Musculus
  ( 261 )...( 277 ): A1AA_MOUSE
LLKFSREKKAAKTLGI

SEQ ID NO: 5727 - protein, 16 aa, Mus Musculus
  ( 262 )...( 278 ): A1AA_MOUSE
LKFSREKKAAKTLGIV

SEQ ID NO: 5728 - protein, 16 aa, Mus Musculus
  ( 268 )...( 284 ): A1AA_MOUSE
KKAAKTLGIVVGCFVL

SEQ ID NO: 5729 - protein, 16 aa, Mus Musculus
  ( 150 )...( 166 ): A1AB_MOUSE
LQYPTLVTRRKAILAL

SEQ ID NO: 5730 - protein, 16 aa, Mus Musculus
  ( 151 )...( 167 ): A1AB_MOUSE
QYPTLVTRRKAILALL

SEQ ID NO: 5731 - protein, 16 aa, Mus Musculus
  ( 153 )...( 169 ): A1AB_MOUSE
PTLVTRRKAILALLSV

SEQ ID NO: 5732 - protein, 16 aa, Mus Musculus
  ( 154 )...( 170 ): A1AB_MOUSE
TLVTRRKAILALLSVW

SEQ ID NO: 5733 - protein, 16 aa, Mus Musculus
  ( 155 )...( 171 ): A1AB_MOUSE
LVTRRKAILALLSVWV

SEQ ID NO: 5734 - protein, 16 aa, Mus Musculus
  ( 156 )...( 172 ): A1AB_MOUSE
VTRRKAILALLSVWVL

SEQ ID NO: 5735 - protein, 16 aa, Mus Musculus
  ( 157 )...( 173 ): A1AB_MOUSE
TRRKAILALLSVWVLS

SEQ ID NO: 5736 - protein, 16 aa, Mus Musculus
  ( 158 )...( 174 ): A1AB_MOUSE
RRKAILALLSVWVLST

SEQ ID NO: 5737 - protein, 16 aa, Mus Musculus
  ( 278 )...( 294 ): A1AB_MOUSE
IAVKLFKFSREKKAAK

SEQ ID NO: 5738 - protein, 16 aa, Mus Musculus
  ( 280 )...( 296 ): A1AB_MOUSE
VKLFKFSREKKAAKTL

SEQ ID NO: 5739 - protein, 16 aa, Mus Musculus
  ( 282 )...( 298 ): A1AB_MOUSE
LFKFSREKKAAKTLGI

SEQ ID NO: 5740 - protein, 16 aa, Mus Musculus
  ( 283 )...( 299 ): A1AB_MOUSE
FKFSREKKAAKTLGIV

SEQ ID NO: 5741 - protein, 16 aa, Mus Musculus
  ( 287 )...( 303 ): A1AB_MOUSE
REKKAAKTLGIVVGMF

SEQ ID NO: 5742 - protein, 16 aa, Mus Musculus
  ( 289 )...( 305 ): A1AB_MOUSE
KKAAKTLGIVVGMFIL

SEQ ID NO: 5743 - protein, 16 aa, Mus Musculus
  ( 105 )...( 121 ): AA1R_MOUSE
RYLRVKIPLRYKTVVT

SEQ ID NO: 5744 - protein, 16 aa, Mus Musculus
  ( 106 )...( 122 ): AA1R_MOUSE
YLRVKIPLRYKTVVTQ

SEQ ID NO: 5745 - protein, 16 aa, Mus Musculus
  ( 107 )...( 123 ): AA1R_MOUSE
LRVKIPLRYKTVVTQR

SEQ ID NO: 5746 - protein, 16 aa, Mus Musculus
  ( 108 )...( 124 ): AA1R_MOUSE
RVKIPLRYKTVVTQRR

SEQ ID NO: 5747 - protein, 16 aa, Mus Musculus
  ( 109 )...( 125 ): AA1R_MOUSE
VKIPLRYKTVVTQRRA

SEQ ID NO: 5748 - protein, 16 aa, Mus Musculus
  ( 110 )...( 126 ): AA1R_MOUSE
KIPLRYKTVVTQRRAA

SEQ ID NO: 5749 - protein, 16 aa, Mus Musculus
  ( 113 )...( 129 ): AA1R_MOUSE
LRYKTVVTQRRAAVAI

SEQ ID NO: 5750 - protein, 16 aa, Mus Musculus
  ( 199 )...( 215 ): AA1R_MOUSE
IYLEVFYLIRKQLNKK

SEQ ID NO: 5751 - protein, 16 aa, Mus Musculus
  ( 200 )...( 216 ): AA1R_MOUSE
YLEVFYLIRKQLNKKV

SEQ ID NO: 5752 - protein, 16 aa, Mus Musculus
  ( 201 )...( 217 ): AA1R_MOUSE
LEVFYLIRKQLNKKVS

SEQ ID NO: 5753 - protein, 16 aa, Mus Musculus
  ( 202 )...( 218 ): AA1R_MOUSE
EVFYLIRKQLNKKVSA

SEQ ID NO: 5754 - protein, 16 aa, Mus Musculus
  ( 203 )...( 219 ): AA1R_MOUSE
VFYLIRKQLNKKVSAS

SEQ ID NO: 5755 - protein, 16 aa, Mus Musculus
  ( 222 )...( 238 ): AA1R_MOUSE
PQKYYGKELKIAKSLA

SEQ ID NO: 5756 - protein, 16 aa, Mus Musculus
  ( 223 )...( 239 ): AA1R_MOUSE
QKYYGKELKIAKSLAL

SEQ ID NO: 5757 - protein, 16 aa, Mus Musculus
  ( 224 )...( 240 ): AA1R_MOUSE
KYYGKELKIAKSLALI

SEQ ID NO: 5758 - protein, 16 aa, Mus Musculus
  ( 107 )...( 123 ): AA2A_MOUSE
LRYNGLVTGMKAKGII

SEQ ID NO: 5759 - protein, 16 aa, Mus Musculus
  ( 105 )...( 121 ): AA2B_MOUSE
LAIRVPLRYKGLVTGT

SEQ ID NO: 5760 - protein, 16 aa, Mus Musculus
  ( 113 )...( 129 ): AA2B_MOUSE
YKGLVTGTRARGIIAV

SEQ ID NO: 5761 - protein, 16 aa, Mus Musculus
  ( 114 )...( 130 ): AA2B_MOUSE
KGLVTGTRARGIIAVL

SEQ ID NO: 5762 - protein, 16 aa, Mus Musculus
  ( 99 )...( 115 ): AA3R_MOUSE
IMSLLAIAVHRYLRVK

SEQ ID NO: 5763 - protein, 16 aa, Mus Musculus
  ( 101 )...( 117 ): AA3R_MOUSE
SLLAIAVHRYLRVKLT

SEQ ID NO: 5764 - protein, 16 aa, Mus Musculus
  ( 102 )...( 118 ): AA3R_MOUSE
LLAIAVHRYLRVKLTV

SEQ ID NO: 5765 - protein, 16 aa, Mus Musculus
  ( 103 )...( 119 ): AA3R_MOUSE
LAIAVHRYLRVKLTVR

SEQ ID NO: 5766 - protein, 16 aa, Mus Musculus
  ( 107 )...( 123 ): AA3R_MOUSE
VHRYLRVKLTVRYRTV

SEQ ID NO: 5767 - protein, 16 aa, Mus Musculus
  ( 108 )...( 124 ): AA3R_MOUSE
HRYLRVKLTVRYRTVT

SEQ ID NO: 5768 - protein, 16 aa, Mus Musculus
  ( 109 )...( 125 ): AA3R_MOUSE
RYLRVKLTVRYRTVTT

SEQ ID NO: 5769 - protein, 16 aa, Mus Musculus
  ( 110 )...( 126 ): AA3R_MOUSE
YLRVKLTVRYRTVTTQ

SEQ ID NO: 5770 - protein, 16 aa, Mus Musculus
  ( 111 )...( 127 ): AA3R_MOUSE
LRVKLTVRYRTVTTQR

SEQ ID NO: 5771 - protein, 16 aa, Mus Musculus
  ( 113 )...( 129 ): AA3R_MOUSE
VKLTVRYRTVTTQRRI

SEQ ID NO: 5772 - protein, 16 aa, Mus Musculus
  ( 114 )...( 130 ): AA3R_MOUSE
KLTVRYRTVTTQRRIW

SEQ ID NO: 5773 - protein, 16 aa, Mus Musculus
  ( 115 )...( 131 ): AA3R_MOUSE
LTVRYRTVTTQRRIWL

SEQ ID NO: 5774 - protein, 16 aa, Mus Musculus
  ( 286 )...( 302 ): AA3R_MOUSE
KIKKFKETYFLILRAV

SEQ ID NO: 5775 - protein, 16 aa, Mus Musculus
  ( 287 )...( 303 ): AA3R_MOUSE
IKKFKETYFLILRAVR

SEQ ID NO: 5776 - protein, 16 aa, Mus Musculus
  ( 288 )...( 304 ): AA3R_MOUSE
KKFKETYFLILRAVRL

SEQ ID NO: 5777 - protein, 16 aa, Mus Musculus
  ( 355 )...( 371 ): ACM1_MOUSE
FSLVKEKKAARTLSAI

SEQ ID NO: 5778 - protein, 16 aa, Mus Musculus
  ( 356 )...( 372 ): ACM1_MOUSE
SLVKEKKAARTLSAIL

SEQ ID NO: 5779 - protein, 16 aa, Mus Musculus
  ( 357 )...( 373 ): ACM1_MOUSE
LVKEKKAARTLSAILL

SEQ ID NO: 5780 - protein, 16 aa, Mus Musculus
  ( 358 )...( 374 ): ACM1_MOUSE
VKEKKAARTLSAILLA

SEQ ID NO: 5781 - protein, 16 aa, Mus Musculus
  ( 359 )...( 375 ): ACM1_MOUSE
KEKKAARTLSAILLAF

SEQ ID NO: 5782 - protein, 16 aa, Mus Musculus
  ( 361 )...( 377 ): ACM1_MOUSE
KKAARTLSAILLAFIL

SEQ ID NO: 5783 - protein, 16 aa, Mus Musculus
  ( 125 )...( 141 ): ACM2_MOUSE
VTKPLTYPVKRTTKMA

SEQ ID NO: 5784 - protein, 16 aa, Mus Musculus
  ( 126 )...( 142 ): ACM2_MOUSE
TKPLTYPVKRTTKMAG

SEQ ID NO: 5785 - protein, 16 aa, Mus Musculus
  ( 357 )...( 373 ): ACM2_MOUSE
KQNIVARKIVKMTKQP

SEQ ID NO: 5786 - protein, 16 aa, Mus Musculus
  ( 358 )...( 374 ): ACM2_MOUSE
QNIVARKIVKMTKQPA

SEQ ID NO: 5787 - protein, 16 aa, Mus Musculus
  ( 359 )...( 375 ): ACM2_MOUSE
NIVARKIVKMTKQPAK

SEQ ID NO: 5788 - protein, 16 aa, Mus Musculus
  ( 360 )...( 376 ): ACM2_MOUSE
IVARKIVKMTKQPAKK

SEQ ID NO: 5789 - protein, 16 aa, Mus Musculus
  ( 364 )...( 380 ): ACM2_MOUSE
KIVKMTKQPAKKKPPP

SEQ ID NO: 5790 - protein, 16 aa, Mus Musculus
  ( 365 )...( 381 ): ACM2_MOUSE
IVKMTKQPAKKKPPPS

SEQ ID NO: 5791 - protein, 16 aa, Mus Musculus
  ( 379 )...( 395 ): ACM2_MOUSE
PSREKKVTRTILAILL

SEQ ID NO: 5792 - protein, 16 aa, Mus Musculus
  ( 380 )...( 396 ): ACM2_MOUSE
SREKKVTRTILAILLA

SEQ ID NO: 5793 - protein, 16 aa, Mus Musculus
  ( 381 )...( 397 ): ACM2_MOUSE
REKKVTRTILAILLAF

SEQ ID NO: 5794 - protein, 16 aa, Mus Musculus
  ( 383 )...( 399 ): ACM2_MOUSE
KKVTRTILAILLAFII

SEQ ID NO: 5795 - protein, 16 aa, Mus Musculus
  ( 84 )...( 100 ): ACM3_MOUSE
GNILVIVAFKVNKQLK

SEQ ID NO: 5796 - protein, 16 aa, Mus Musculus
  ( 85 )...( 101 ): ACM3_MOUSE
NILVIVAFKVNKQLKT

SEQ ID NO: 5797 - protein, 16 aa, Mus Musculus
  ( 86 )...( 102 ): ACM3_MOUSE
ILVIVAFKVNKQLKTV

SEQ ID NO: 5798 - protein, 16 aa, Mus Musculus
  ( 87 )...( 103 ): ACM3_MOUSE
LVIVAFKVNKQLKTVN

SEQ ID NO: 5799 - protein, 16 aa, Mus Musculus
  ( 88 )...( 104 ): ACM3_MOUSE
VIVAFKVNKQLKTVNN

SEQ ID NO: 5800 - protein, 16 aa, Mus Musculus
  ( 89 )...( 105 ): ACM3_MOUSE
IVAFKVNKQLKTVNNY

SEQ ID NO: 5801 - protein, 16 aa, Mus Musculus
  ( 90 )...( 106 ): ACM3_MOUSE
VAFKVNKQLKTVNNYF

SEQ ID NO: 5802 - protein, 16 aa, Mus Musculus
  ( 91 )...( 107 ): ACM3_MOUSE
AFKVNKQLKTVNNYFL

SEQ ID NO: 5803 - protein, 16 aa, Mus Musculus
  ( 92 )...( 108 ): ACM3_MOUSE
FKVNKQLKTVNNYFLL

SEQ ID NO: 5804 - protein, 16 aa, Mus Musculus
  ( 93 )...( 109 ): ACM3_MOUSE
KVNKQLKTVNNYFLLS

SEQ ID NO: 5805 - protein, 16 aa, Mus Musculus
  ( 178 )...( 194 ): ACM3_MOUSE
KRTTKRAGVMIGLAWV

SEQ ID NO: 5806 - protein, 16 aa, Mus Musculus
  ( 455 )...( 471 ): ACM3_MOUSE
LSFKEATLAKRFALKT

SEQ ID NO: 5807 - protein, 16 aa, Mus Musculus
  ( 460 )...( 476 ): ACM3_MOUSE
ATLAKRFALKTRSQIT

SEQ ID NO: 5808 - protein, 16 aa, Mus Musculus
  ( 233 )...( 249 ): ACM4_MOUSE
PKEKKAKTLAFLKSPL

SEQ ID NO: 5809 - protein, 16 aa, Mus Musculus
  ( 234 )...( 250 ): ACM4_MOUSE
KEKKAKTLAFLKSPLM

SEQ ID NO: 5810 - protein, 16 aa, Mus Musculus
  ( 235 )...( 251 ): ACM4_MOUSE
EKKAKTLAFLKSPLMK

SEQ ID NO: 5811 - protein, 16 aa, Mus Musculus
  ( 236 )...( 252 ): ACM4_MOUSE
KKAKTLAFLKSPLMKP

SEQ ID NO: 5812 - protein, 16 aa, Mus Musculus
  ( 239 )...( 255 ): ACM4_MOUSE
KTLAFLKSPLMKPSIK

SEQ ID NO: 5813 - protein, 16 aa, Mus Musculus
  ( 240 )...( 256 ): ACM4_MOUSE
TLAFLKSPLMKPSIKK

SEQ ID NO: 5814 - protein, 16 aa, Mus Musculus
  ( 332 )...( 348 ): ACM4_MOUSE
TLNPASKWSKIQIVTK

SEQ ID NO: 5815 - protein, 16 aa, Mus Musculus
  ( 333 )...( 349 ): ACM4_MOUSE
LNPASKWSKIQIVTKQ

SEQ ID NO: 5816 - protein, 16 aa, Mus Musculus
  ( 335 )...( 351 ): ACM4_MOUSE
PASKWSKIQIVTKQTG

SEQ ID NO: 5817 - protein, 16 aa, Mus Musculus
  ( 396 )...( 412 ): ACM4_MOUSE
RKVTRTIFAILLAFIL

SEQ ID NO: 5818 - protein, 16 aa, Mus Musculus
  ( 137 )...( 153 ): AG2R_MOUSE
RLRRTMLVAKVTCIII

SEQ ID NO: 5819 - protein, 16 aa, Mus Musculus
  ( 138 )...( 154 ): AG2R_MOUSE
LRRTMLVAKVTCIIIW

SEQ ID NO: 5820 - protein, 16 aa, Mus Musculus
  ( 139 )...( 155 ): AG2R_MOUSE
RRTMLVAKVTCIIIWL

SEQ ID NO: 5821 - protein, 16 aa, Mus Musculus
  ( 209 )...( 225 ): AG2R_MOUSE
LIILTSYTLIWKALKK

SEQ ID NO: 5822 - protein, 16 aa, Mus Musculus
  ( 210 )...( 226 ): AG2R_MOUSE
IILTSYTLIWKALKKA

SEQ ID NO: 5823 - protein, 16 aa, Mus Musculus
  ( 211 )...( 227 ): AG2R_MOUSE
ILTSYTLIWKALKKAY

SEQ ID NO: 5824 - protein, 16 aa, Mus Musculus
  ( 215 )...( 231 ): AG2R_MOUSE
YTLIWKALKKAYEIQK

SEQ ID NO: 5825 - protein, 16 aa, Mus Musculus
  ( 216 )...( 232 ): AG2R_MOUSE
TLIWKALKKAYEIQKN

SEQ ID NO: 5826 - protein, 16 aa, Mus Musculus
  ( 217 )...( 233 ): AG2R_MOUSE
LIWKALKKAYEIQKNK

SEQ ID NO: 5827 - protein, 16 aa, Mus Musculus
  ( 218 )...( 234 ): AG2R_MOUSE
IWKALKKAYEIQKNKP

SEQ ID NO: 5828 - protein, 16 aa, Mus Musculus
  ( 306 )...( 322 ): AG2R_MOUSE
GKKFKKYFLQLLKYIP

SEQ ID NO: 5829 - protein, 16 aa, Mus Musculus
  ( 307 )...( 323 ): AG2R_MOUSE
KKFKKYFLQLLKYIPP

SEQ ID NO: 5830 - protein, 16 aa, Mus Musculus
  ( 308 )...( 324 ): AG2R_MOUSE
KFKKYFLQLLKYIPPK

SEQ ID NO: 5831 - protein, 16 aa, Mus Musculus
  ( 309 )...( 325 ): AG2R_MOUSE
FKKYFLQLLKYIPPKA

SEQ ID NO: 5832 - protein, 16 aa, Mus Musculus
  ( 310 )...( 326 ): AG2R_MOUSE
KKYFLQLLKYIPPKAK

SEQ ID NO: 5833 - protein, 16 aa, Mus Musculus
  ( 311 )...( 327 ): AG2R_MOUSE
KYFLQLLKYIPPKAKS

SEQ ID NO: 5834 - protein, 16 aa, Mus Musculus
  ( 137 )...( 153 ): AG2S_MOUSE
RLRRTMLVAKVTCIII

SEQ ID NO: 5835 - protein, 16 aa, Mus Musculus
  ( 138 )...( 154 ): AG2S_MOUSE
LRRTMLVAKVTCIIIW

SEQ ID NO: 5836 - protein, 16 aa, Mus Musculus
  ( 139 )...( 155 ): AG2S_MOUSE
RRTMLVAKVTCIIIWL

SEQ ID NO: 5837 - protein, 16 aa, Mus Musculus
  ( 209 )...( 225 ): AG2S_MOUSE
VIILTSYTLIWKALKK

SEQ ID NO: 5838 - protein, 16 aa, Mus Musculus
  ( 210 )...( 226 ): AG2S_MOUSE
IILTSYTLIWKALKKA

SEQ ID NO: 5839 - protein, 16 aa, Mus Musculus
  ( 211 )...( 227 ): AG2S_MOUSE
ILTSYTLIWKALKKAY

SEQ ID NO: 5840 - protein, 16 aa, Mus Musculus
  ( 212 )...( 228 ): AG2S_MOUSE
LTSYTLIWKALKKAYK

SEQ ID NO: 5841 - protein, 16 aa, Mus Musculus
  ( 213 )...( 229 ): AG2S_MOUSE
TSYTLIWKALKKAYKI

SEQ ID NO: 5842 - protein, 16 aa, Mus Musculus
  ( 214 )...( 230 ): AG2S_MOUSE
SYTLIWKALKKAYKIQ

SEQ ID NO: 5843 - protein, 16 aa, Mus Musculus
  ( 215 )...( 231 ): AG2S_MOUSE
YTLIWKALKKAYKIQK

SEQ ID NO: 5844 - protein, 16 aa, Mus Musculus
  ( 216 )...( 232 ): AG2S_MOUSE
TLIWKALKKAYKIQKN

SEQ ID NO: 5845 - protein, 16 aa, Mus Musculus
  ( 217 )...( 233 ): AG2S_MOUSE
LIWKALKKAYKIQKNT

SEQ ID NO: 5846 - protein, 16 aa, Mus Musculus
  ( 218 )...( 234 ): AG2S_MOUSE
IWKALKKAYKIQKNTP

SEQ ID NO: 5847 - protein, 16 aa, Mus Musculus
  ( 303 )...( 319 ): AG2S_MOUSE
GFLGKKFKRYFLQLLK

SEQ ID NO: 5848 - protein, 16 aa, Mus Musculus
  ( 305 )...( 321 ): AG2S_MOUSE
LGKKFKRYFLQLLKYI

SEQ ID NO: 5849 - protein, 16 aa, Mus Musculus
  ( 306 )...( 322 ): AG2S_MOUSE
GKKFKRYFLQLLKYIP

SEQ ID NO: 5850 - protein, 16 aa, Mus Musculus
  ( 307 )...( 323 ): AG2S_MOUSE
KKFKRYFLQLLKYIPP

SEQ ID NO: 5851 - protein, 16 aa, Mus Musculus
  ( 308 )...( 324 ): AG2S_MOUSE
KFKRYFLQLLKYIPPK

SEQ ID NO: 5852 - protein, 16 aa, Mus Musculus
  ( 235 )...( 251 ): APJ_MOUSE
IEGLRKRRRLLSIIVV

SEQ ID NO: 5853 - protein, 16 aa, Mus Musculus
  ( 236 )...( 252 ): APJ_MOUSE
EGLRKRRRLLSIIVVL

SEQ ID NO: 5854 - protein, 16 aa, Mus Musculus
  ( 237 )...( 253 ): APJ_MOUSE
GLRKRRRLLSIIVVLV

SEQ ID NO: 5855 - protein, 16 aa, Mus Musculus
  ( 238 )...( 254 ): APJ_MOUSE
LRKRRRLLSIIVVLVV

SEQ ID NO: 5856 - protein, 16 aa, Mus Musculus
  ( 239 )...( 255 ): APJ_MOUSE
RKRRRLLSIIVVLVVT

SEQ ID NO: 5857 - protein, 16 aa, Mus Musculus
  ( 240 )...( 256 ): APJ_MOUSE
KRRRLLSIIVVLVVTF

SEQ ID NO: 5858 - protein, 16 aa, Mus Musculus
  ( 241 )...( 257 ): APJ_MOUSE
RRRLLSIIVVLVVTFA

SEQ ID NO: 5859 - protein, 16 aa, Mus Musculus
  ( 61 )...( 77 ): BRS3_MOUSE
GILGNAILIKVFFKTK

SEQ ID NO: 5860 - protein, 16 aa, Mus Musculus
  ( 62 )...( 78 ): BRS3_MOUSE
ILGNAILIKVFFKTKS

SEQ ID NO: 5861 - protein, 16 aa, Mus Musculus
  ( 63 )...( 79 ): BRS3_MOUSE
LGNAILIKVFFKTKSM

SEQ ID NO: 5862 - protein, 16 aa, Mus Musculus
  ( 64 )...( 80 ): BRS3_MOUSE
GNAILIKVFFKTKSMQ

SEQ ID NO: 5863 - protein, 16 aa, Mus Musculus
  ( 65 )...( 81 ): BRS3_MOUSE
NAILIKVFFKTKSMQT

SEQ ID NO: 5864 - protein, 16 aa, Mus Musculus
  ( 66 )...( 82 ): BRS3_MOUSE
AILIKVFFKTKSMQTV

SEQ ID NO: 5865 - protein, 16 aa, Mus Musculus
  ( 67 )...( 83 ): BRS3_MOUSE
ILIKVFFKTKSMQTVP

SEQ ID NO: 5866 - protein, 16 aa, Mus Musculus
  ( 68 )...( 84 ): BRS3_MOUSE
LIKVFFKTKSMQTVPN

SEQ ID NO: 5867 - protein, 16 aa, Mus Musculus
  ( 69 )...( 85 ): BRS3_MOUSE
IKVFFKTKSMQTVPNI

SEQ ID NO: 5868 - protein, 16 aa, Mus Musculus
  ( 70 )...( 86 ): BRS3_MOUSE
KVFFKTKSMQTVPNIF

SEQ ID NO: 5869 - protein, 16 aa, Mus Musculus
  ( 261 )...( 277 ): BRS3_MOUSE
KQIESRKRIAKTVLVL

SEQ ID NO: 5870 - protein, 16 aa, Mus Musculus
  ( 262 )...( 278 ): BRS3_MOUSE
QIESRKRIAKTVLVLV

SEQ ID NO: 5871 - protein, 16 aa, Mus Musculus
  ( 263 )...( 279 ): BRS3_MOUSE
IESRKRIAKTVLVLVA

SEQ ID NO: 5872 - protein, 16 aa, Mus Musculus
  ( 264 )...( 280 ): BRS3_MOUSE
ESRKRIAKTVLVLVAL

SEQ ID NO: 5873 - protein, 16 aa, Mus Musculus
  ( 265 )...( 281 ): BRS3_MOUSE
SRKRIAKTVLVLVALF

SEQ ID NO: 5874 - protein, 16 aa, Mus Musculus
  ( 266 )...( 282 ): BRS3_MOUSE
RKRIAKTVLVLVALFA

SEQ ID NO: 5875 - protein, 16 aa, Mus Musculus
  ( 267 )...( 283 ): BRS3_MOUSE
KRIAKTVLVLVALFAL

SEQ ID NO: 5876 - protein, 16 aa, Mus Musculus
  ( 39 )...( 55 ): CALR_MOUSE
FLYLVGRKKLLDAQYK

SEQ ID NO: 5877 - protein, 16 aa, Mus Musculus
  ( 40 )...( 56 ): CALR_MOUSE
LYLVGRKKLLDAQYKC

SEQ ID NO: 5878 - protein, 16 aa, Mus Musculus
  ( 351 )...( 367 ): CALR_MOUSE
FFLLNIVRVLVTKMRQ

SEQ ID NO: 5879 - protein, 16 aa, Mus Musculus
  ( 352 )...( 368 ): CALR_MOUSE
FLLNIVRVLVTKMRQT

SEQ ID NO: 5880 - protein, 16 aa, Mus Musculus
  ( 353 )...( 369 ): CALR_MOUSE
LLNIVRVLVTKMRQTH

SEQ ID NO: 5881 - protein, 16 aa, Mus Musculus
  ( 436 )...( 452 ): CALR_MOUSE
QVTLKRQWTQFKIQWS

SEQ ID NO: 5882 - protein, 16 aa, Mus Musculus
  ( 437 )...( 453 ): CALR_MOUSE
VTLKRQWTQFKIQWSQ

SEQ ID NO: 5883 - protein, 16 aa, Mus Musculus
  ( 438 )...( 454 ): CALR_MOUSE
TLKRQWTQFKIQWSQR

SEQ ID NO: 5884 - protein, 16 aa, Mus Musculus
  ( 439 )...( 455 ): CALR_MOUSE
LKRQWTQFKIQWSQRW

SEQ ID NO: 5885 - protein, 16 aa, Mus Musculus
  ( 1 )...( 17 ): CRF1_MOUSE
MGQRPQLRLVKALLLL

SEQ ID NO: 5886 - protein, 16 aa, Mus Musculus
  ( 2 )...( 18 ): CRF1_MOUSE
GQRPQLRLVKALLLLG

SEQ ID NO: 5887 - protein, 16 aa, Mus Musculus
  ( 3 )...( 19 ): CRF1_MOUSE
QRPQLRLVKALLLLGL

SEQ ID NO: 5888 - protein, 16 aa, Mus Musculus
  ( 110 )...( 126 ): CRF1_MOUSE
KKSKVHYHIAVIINYL

SEQ ID NO: 5889 - protein, 16 aa, Mus Musculus
  ( 284 )...( 300 ): CRF1_MOUSE
FIFLFNIVRILMTKLR

SEQ ID NO: 5890 - protein, 16 aa, Mus Musculus
  ( 285 )...( 301 ): CRF1_MOUSE
IFLFNIVRILMTKLRA

SEQ ID NO: 5891 - protein, 16 aa, Mus Musculus
  ( 306 )...( 322 ): CRF1_MOUSE
TIQYRKAVKATLVLLP

SEQ ID NO: 5892 - protein, 16 aa, Mus Musculus
  ( 307 )...( 323 ): CRF1_MOUSE
IQYRKAVKATLVLLPL

SEQ ID NO: 5893 - protein, 16 aa, Mus Musculus
  ( 308 )...( 324 ): CRF1_MOUSE
QYRKAVKATLVLLPLL

SEQ ID NO: 5894 - protein, 16 aa, Mus Musculus
  ( 309 )...( 325 ): CRF1_MOUSE
YRKAVKATLVLLPLLG

SEQ ID NO: 5895 - protein, 16 aa, Mus Musculus
  ( 310 )...( 326 ): CRF1_MOUSE
RKAVKATLVLLPLLGI

SEQ ID NO: 5896 - protein, 16 aa, Mus Musculus
  ( 301 )...( 317 ): CRF2_MOUSE
VFLFNIVRILMTKLRA

SEQ ID NO: 5897 - protein, 16 aa, Mus Musculus
  ( 322 )...( 338 ): CRF2_MOUSE
TIQYRKAVKATLVLLP

SEQ ID NO: 5898 - protein, 16 aa, Mus Musculus
  ( 323 )...( 339 ): CRF2_MOUSE
IQYRKAVKATLVLLPL

SEQ ID NO: 5899 - protein, 16 aa, Mus Musculus
  ( 324 )...( 340 ): CRF2_MOUSE
QYRKAVKATLVLLPLL

SEQ ID NO: 5900 - protein, 16 aa, Mus Musculus
  ( 325 )...( 341 ): CRF2_MOUSE
YRKAVKATLVLLPLLG

SEQ ID NO: 5901 - protein, 16 aa, Mus Musculus
  ( 326 )...( 342 ): CRF2_MOUSE
RKAVKATLVLLPLLGI

SEQ ID NO: 5902 - protein, 16 aa, Mus Musculus
  ( 200 )...( 216 ): ET1R_MOUSE
LKQRREVAKTVFCLVV

SEQ ID NO: 5903 - protein, 16 aa, Mus Musculus
  ( 201 )...( 217 ): ET1R_MOUSE
KQRREVAKTVFCLVVI

SEQ ID NO: 5904 - protein, 16 aa, Mus Musculus
  ( 115 )...( 131 ): ETBR_MOUSE
GIIGNSTLLRIIYKNK

SEQ ID NO: 5905 - protein, 16 aa, Mus Musculus
  ( 315 )...( 331 ): ETBR_MOUSE
LKQRREVAKTVFCLVL

SEQ ID NO: 5906 - protein, 16 aa, Mus Musculus
  ( 316 )...( 332 ): ETBR_MOUSE
KQRREVAKTVFCLVLV

SEQ ID NO: 5907 - protein, 16 aa, Mus Musculus
  ( 46 )...( 62 ): FSHR_MOUSE
RNAIELRFVLTKLRVI

SEQ ID NO: 5908 - protein, 16 aa, Mus Musculus
  ( 48 )...( 64 ): FSHR_MOUSE
AIELRFVLTKLRVIPK

SEQ ID NO: 5909 - protein, 16 aa, Mus Musculus
  ( 49 )...( 65 ): FSHR_MOUSE
IELRFVLTKLRVIPKG

SEQ ID NO: 5910 - protein, 16 aa, Mus Musculus
  ( 50 )...( 66 ): FSHR_MOUSE
ELRFVLTKLRVIPKGS

SEQ ID NO: 5911 - protein, 16 aa, Mus Musculus
  ( 131 )...( 147 ): FSHR_MOUSE
GIKHLPAFHKIQSLQK

SEQ ID NO: 5912 - protein, 16 aa, Mus Musculus
  ( 132 )...( 148 ): FSHR_MOUSE
IKHLPAFHKIQSLQKV

SEQ ID NO: 5913 - protein, 16 aa, Mus Musculus
  ( 133 )...( 149 ): FSHR_MOUSE
KHLPAFHKIQSLQKVL

SEQ ID NO: 5914 - protein, 16 aa, Mus Musculus
  ( 241 )...( 257 ): FSHR_MOUSE
LKKLRARSTYRLKKLP

SEQ ID NO: 5915 - protein, 16 aa, Mus Musculus
  ( 249 )...( 265 ): FSHR_MOUSE
TYRLKKLPSLDKFVML

SEQ ID NO: 5916 - protein, 16 aa, Mus Musculus
  ( 250 )...( 266 ): FSHR_MOUSE
YRLKKLPSLDKFVMLI

SEQ ID NO: 5917 - protein, 16 aa, Mus Musculus
  ( 592 )...( 608 ): FSHR_MOUSE
ISASLKVPLITVSKAK

SEQ ID NO: 5918 - protein, 16 aa, Mus Musculus
  ( 593 )...( 609 ): FSHR_MOUSE
SASLKVPLITVSKAKI

SEQ ID NO: 5919 - protein, 16 aa, Mus Musculus
  ( 594 )...( 610 ): FSHR_MOUSE
ASLKVPLITVSKAKIL

SEQ ID NO: 5920 - protein, 16 aa, Mus Musculus
  ( 595 )...( 611 ): FSHR_MOUSE
SLKVPLITVSKAKILL

SEQ ID NO: 5921 - protein, 16 aa, Mus Musculus
  ( 596 )...( 612 ): FSHR_MOUSE
LKVPLITVSKAKILLV

SEQ ID NO: 5922 - protein, 16 aa, Mus Musculus
  ( 597 )...( 613 ): FSHR_MOUSE
KVPLITVSKAKILLVL

SEQ ID NO: 5923 - protein, 16 aa, Mus Musculus
  ( 218 )...( 234 ): GALR_MOUSE
CYAKVLNHLHKKLKNM

SEQ ID NO: 5924 - protein, 16 aa, Mus Musculus
  ( 219 )...( 235 ): GALR_MOUSE
YAKVLNHLHKKLKNMS

SEQ ID NO: 5925 - protein, 16 aa, Mus Musculus
  ( 239 )...( 255 ): GALR_MOUSE
ASKKKTAQTVLVVVVV

SEQ ID NO: 5926 - protein, 16 aa, Mus Musculus
  ( 240 )...( 256 ): GALR_MOUSE
SKKKTAQTVLVVVVVF

SEQ ID NO: 5927 - protein, 16 aa, Mus Musculus
  ( 241 )...( 257 ): GALR_MOUSE
KKKTAQTVLVVVVVFG

SEQ ID NO: 5928 - protein, 16 aa, Mus Musculus
  ( 226 )...( 242 ): GALS_MOUSE
SQRAKRKVTRMIVIVA

SEQ ID NO: 5929 - protein, 16 aa, Mus Musculus
  ( 227 )...( 243 ): GALS_MOUSE
QRAKRKVTRMIVIVAV

SEQ ID NO: 5930 - protein, 16 aa, Mus Musculus
  ( 228 )...( 244 ): GALS_MOUSE
RAKRKVTRMIVIVAVL

SEQ ID NO: 5931 - protein, 16 aa, Mus Musculus
  ( 229 )...( 245 ): GALS_MOUSE
AKRKVTRMIVIVAVLF

SEQ ID NO: 5932 - protein, 16 aa, Mus Musculus
  ( 230 )...( 246 ): GALS_MOUSE
KRKVTRMIVIVAVLFC

SEQ ID NO: 5933 - protein, 16 aa, Mus Musculus
  ( 231 )...( 247 ): GALS_MOUSE
RKVTRMIVIVAVLFCL

SEQ ID NO: 5934 - protein, 16 aa, Mus Musculus
  ( 71 )...( 87 ): GASR_MOUSE
GNVLIIVVLGLSRRLR

SEQ ID NO: 5935 - protein, 16 aa, Mus Musculus
  ( 72 )...( 88 ): GASR_MOUSE
NVLIIVVLGLSRRLRT

SEQ ID NO: 5936 - protein, 16 aa, Mus Musculus
  ( 73 )...( 89 ): GASR_MOUSE
VLIIVVLGLSRRLRTV

SEQ ID NO: 5937 - protein, 16 aa, Mus Musculus
  ( 74 )...( 90 ): GASR_MOUSE
LIIVVLGLSRRLRTVT

SEQ ID NO: 5938 - protein, 16 aa, Mus Musculus
  ( 75 )...( 91 ): GASR_MOUSE
IIVVLGLSRRLRTVTN

SEQ ID NO: 5939 - protein, 16 aa, Mus Musculus
  ( 326 )...( 342 ): GASR_MOUSE
PNQAKLLAKKRVVRML

SEQ ID NO: 5940 - protein, 16 aa, Mus Musculus
  ( 327 )...( 343 ): GASR_MOUSE
NQAKLLAKKRVVRMLL

SEQ ID NO: 5941 - protein, 16 aa, Mus Musculus
  ( 328 )...( 344 ): GASR_MOUSE
QAKLLAKKRVVRMLLV

SEQ ID NO: 5942 - protein, 16 aa, Mus Musculus
  ( 329 )...( 345 ): GASR_MOUSE
AKLLAKKRVVRMLLVI

SEQ ID NO: 5943 - protein, 16 aa, Mus Musculus
  ( 330 )...( 346 ): GASR_MOUSE
KLLAKKRVVRMLLVIV

SEQ ID NO: 5944 - protein, 16 aa, Mus Musculus
  ( 331 )...( 347 ): GASR_MOUSE
LLAKKRVVRMLLVIVL

SEQ ID NO: 5945 - protein, 16 aa, Mus Musculus
  ( 332 )...( 348 ): GASR_MOUSE
LAKKRVVRMLLVIVLL

SEQ ID NO: 5946 - protein, 16 aa, Mus Musculus
  ( 333 )...( 349 ): GASR_MOUSE
AKKRVVRMLLVIVLLF

SEQ ID NO: 5947 - protein, 16 aa, Mus Musculus
  ( 334 )...( 350 ): GASR_MOUSE
KKRVVRMLLVIVLLFF

SEQ ID NO: 5948 - protein, 16 aa, Mus Musculus
  ( 335 )...( 351 ): GASR_MOUSE
KRVVRMLLVIVLLFFV

SEQ ID NO: 5949 - protein, 16 aa, Mus Musculus
  ( 322 )...( 338 ): GLP1_MOUSE
LIFIRVICIVVSKLKA

SEQ ID NO: 5950 - protein, 16 aa, Mus Musculus
  ( 323 )...( 339 ): GLP1_MOUSE
IFIRVICIVVSKLKAN

SEQ ID NO: 5951 - protein, 16 aa, Mus Musculus
  ( 324 )...( 340 ): GLP1_MOUSE
FIRVICIVVSKLKANL

SEQ ID NO: 5952 - protein, 16 aa, Mus Musculus
  ( 325 )...( 341 ): GLP1_MOUSE
IRVICIVVSKLKANLM

SEQ ID NO: 5953 - protein, 16 aa, Mus Musculus
  ( 331 )...( 347 ): GLP1_MOUSE
VVSKLKANLMCKTDIK

SEQ ID NO: 5954 - protein, 16 aa, Mus Musculus
  ( 342 )...( 358 ): GLP1_MOUSE
KTDIKCRLAKSTLTLI

SEQ ID NO: 5955 - protein, 16 aa, Mus Musculus
  ( 345 )...( 361 ): GLP1_MOUSE
IKCRLAKSTLTLIPLL

SEQ ID NO: 5956 - protein, 16 aa, Mus Musculus
  ( 159 )...( 175 ): GLR_MOUSE
LALVILLGLRKLHCTR

SEQ ID NO: 5957 - protein, 16 aa, Mus Musculus
  ( 23 )...( 39 ): GRHR_MOUSE
LIQGKLPTLTVSGKIR

SEQ ID NO: 5958 - protein, 16 aa, Mus Musculus
  ( 24 )...( 40 ): GRHR_MOUSE
IQGKLPTLTVSGKIRV

SEQ ID NO: 5959 - protein, 16 aa, Mus Musculus
  ( 25 )...( 41 ): GRHR_MOUSE
QGKLPTLTVSGKIRVT

SEQ ID NO: 5960 - protein, 16 aa, Mus Musculus
  ( 26 )...( 42 ): GRHR_MOUSE
GKLPTLTVSGKIRVTV

SEQ ID NO: 5961 - protein, 16 aa, Mus Musculus
  ( 27 )...( 43 ): GRHR_MOUSE
KLPTLTVSGKIRVTVT

SEQ ID NO: 5962 - protein, 16 aa, Mus Musculus
  ( 51 )...( 67 ): GRHR_MOUSE
AFNASFLLKLQKWTQK

SEQ ID NO: 5963 - protein, 16 aa, Mus Musculus
  ( 52 )...( 68 ): GRHR_MOUSE
FNASFLLKLQKWTQKR

SEQ ID NO: 5964 - protein, 16 aa, Mus Musculus
  ( 53 )...( 69 ): GRHR_MOUSE
NASFLLKLQKWTQKRK

SEQ ID NO: 5965 - protein, 16 aa, Mus Musculus
  ( 54 )...( 70 ): GRHR_MOUSE
ASFLLKLQKWTQKRKK

SEQ ID NO: 5966 - protein, 16 aa, Mus Musculus
  ( 55 )...( 71 ): GRHR_MOUSE
SFLLKLQKWTQKRKKG

SEQ ID NO: 5967 - protein, 16 aa, Mus Musculus
  ( 56 )...( 72 ): GRHR_MOUSE
FLLKLQKWTQKRKKGK

SEQ ID NO: 5968 - protein, 16 aa, Mus Musculus
  ( 68 )...( 84 ): GRHR_MOUSE
KKGKKLSRMKVLLKHL

SEQ ID NO: 5969 - protein, 16 aa, Mus Musculus
  ( 69 )...( 85 ): GRHR_MOUSE
KGKKLSRMKVLLKHLT

SEQ ID NO: 5970 - protein, 16 aa, Mus Musculus
  ( 70 )...( 86 ): GRHR_MOUSE
GKKLSRMKVLLKHLTL

SEQ ID NO: 5971 - protein, 16 aa, Mus Musculus
  ( 71 )...( 87 ): GRHR_MOUSE
KKLSRMKVLLKHLTLA

SEQ ID NO: 5972 - protein, 16 aa, Mus Musculus
  ( 72 )...( 88 ): GRHR_MOUSE
KLSRMKVLLKHLTLAN

SEQ ID NO: 5973 - protein, 16 aa, Mus Musculus
  ( 73 )...( 89 ): GRHR_MOUSE
LSRMKVLLKHLTLANL

SEQ ID NO: 5974 - protein, 16 aa, Mus Musculus
  ( 74 )...( 90 ): GRHR_MOUSE
SRMKVLLKHLTLANLL

SEQ ID NO: 5975 - protein, 16 aa, Mus Musculus
  ( 255 )...( 271 ): GRPR_MOUSE
KQIESRKRLAKTVLVF

SEQ ID NO: 5976 - protein, 16 aa, Mus Musculus
  ( 256 )...( 272 ): GRPR_MOUSE
QIESRKRLAKTVLVFV

SEQ ID NO: 5977 - protein, 16 aa, Mus Musculus
  ( 257 )...( 273 ): GRPR_MOUSE
IESRKRLAKTVLVFVG

SEQ ID NO: 5978 - protein, 16 aa, Mus Musculus
  ( 258 )...( 274 ): GRPR_MOUSE
ESRKRLAKTVLVFVGL

SEQ ID NO: 5979 - protein, 16 aa, Mus Musculus
  ( 259 )...( 275 ): GRPR_MOUSE
SRKRLAKTVLVFVGLF

SEQ ID NO: 5980 - protein, 16 aa, Mus Musculus
  ( 260 )...( 276 ): GRPR_MOUSE
RKRLAKTVLVFVGLFA

SEQ ID NO: 5981 - protein, 16 aa, Mus Musculus
  ( 261 )...( 277 ): GRPR_MOUSE
KRLAKTVLVFVGLFAF

SEQ ID NO: 5982 - protein, 16 aa, Mus Musculus
  ( 323 )...( 339 ): GRPR_MOUSE
LYLLSKSFRKQFNTQL

SEQ ID NO: 5983 - protein, 16 aa, Mus Musculus
  ( 324 )...( 340 ): GRPR_MOUSE
YLLSKSFRKQFNTQLL

SEQ ID NO: 5984 - protein, 16 aa, Mus Musculus
  ( 113 )...( 129 ): LGR8_MOUSE
KAVPKVSSNVTLLSLK

SEQ ID NO: 5985 - protein, 16 aa, Mus Musculus
  ( 114 )...( 130 ): LGR8_MOUSE
AVPKVSSNVTLLSLKK

SEQ ID NO: 5986 - protein, 16 aa, Mus Musculus
  ( 115 )...( 131 ): LGR8_MOUSE
VPKVSSNVTLLSLKKN

SEQ ID NO: 5987 - protein, 16 aa, Mus Musculus
  ( 117 )...( 133 ): LGR8_MOUSE
KVSSNVTLLSLKKNKI

SEQ ID NO: 5988 - protein, 16 aa, Mus Musculus
  ( 118 )...( 134 ): LGR8_MOUSE
VSSNVTLLSLKKNKIH

SEQ ID NO: 5989 - protein, 16 aa, Mus Musculus
  ( 120 )...( 136 ): LGR8_MOUSE
SNVTLLSLKKNKIHRL

SEQ ID NO: 5990 - protein, 16 aa, Mus Musculus
  ( 121 )...( 137 ): LGR8_MOUSE
NVTLLSLKKNKIHRLP

SEQ ID NO: 5991 - protein, 16 aa, Mus Musculus
  ( 122 )...( 138 ): LGR8_MOUSE
VTLLSLKKNKIHRLPV

SEQ ID NO: 5992 - protein, 16 aa, Mus Musculus
  ( 123 )...( 139 ): LGR8_MOUSE
TLLSLKKNKIHRLPVK

SEQ ID NO: 5993 - protein, 16 aa, Mus Musculus
  ( 124 )...( 140 ): LGR8_MOUSE
LLSLKKNKIHRLPVKV

SEQ ID NO: 5994 - protein, 16 aa, Mus Musculus
  ( 125 )...( 141 ): LGR8_MOUSE
LSLKKNKIHRLPVKVF

SEQ ID NO: 5995 - protein, 16 aa, Mus Musculus
  ( 126 )...( 142 ): LGR8_MOUSE
SLKKNKIHRLPVKVFS

SEQ ID NO: 5996 - protein, 16 aa, Mus Musculus
  ( 127 )...( 143 ): LGR8_MOUSE
LKKNKIHRLPVKVFSR

SEQ ID NO: 5997 - protein, 16 aa, Mus Musculus
  ( 128 )...( 144 ): LGR8_MOUSE
KKNKIHRLPVKVFSRY

SEQ ID NO: 5998 - protein, 16 aa, Mus Musculus
  ( 137 )...( 153 ): LGR8_MOUSE
VKVFSRYTELRKIYLQ

SEQ ID NO: 5999 - protein, 16 aa, Mus Musculus
  ( 138 )...( 154 ): LGR8_MOUSE
KVFSRYTELRKIYLQH

SEQ ID NO: 6000 - protein, 16 aa, Mus Musculus
  ( 676 )...( 692 ): LGR8_MOUSE
LTTSFFKDKLKQLLHK

SEQ ID NO: 6001 - protein, 16 aa, Mus Musculus
  ( 677 )...( 693 ): LGR8_MOUSE
TTSFFKDKLKQLLHKH

SEQ ID NO: 6002 - protein, 16 aa, Mus Musculus
  ( 684 )...( 700 ): LGR8_MOUSE
KLKQLLHKHRRKPIFK

SEQ ID NO: 6003 - protein, 16 aa, Mus Musculus
  ( 685 )...( 701 ): LGR8_MOUSE
LKQLLHKHRRKPIFKV

SEQ ID NO: 6004 - protein, 16 aa, Mus Musculus
  ( 694 )...( 710 ): LGR8_MOUSE
RKPIFKVKKKSLSASI

SEQ ID NO: 6005 - protein, 16 aa, Mus Musculus
  ( 695 )...( 711 ): LGR8_MOUSE
KPIFKVKKKSLSASIV

SEQ ID NO: 6006 - protein, 16 aa, Mus Musculus
  ( 696 )...( 712 ): LGR8_MOUSE
PIFKVKKKSLSASIVW

SEQ ID NO: 6007 - protein, 16 aa, Mus Musculus
  ( 697 )...( 713 ): LGR8_MOUSE
IFKVKKKSLSASIVWT

SEQ ID NO: 6008 - protein, 16 aa, Mus Musculus
  ( 698 )...( 714 ): LGR8_MOUSE
FKVKKKSLSASIVWTD

SEQ ID NO: 6009 - protein, 16 aa, Mus Musculus
  ( 384 )...( 400 ): LSHR_MOUSE
VLFVLLTSRYKLTVPR

SEQ ID NO: 6010 - protein, 16 aa, Mus Musculus
  ( 562 )...( 578 ): LSHR_MOUSE
LTAPNKDTKIAKKMAI

SEQ ID NO: 6011 - protein, 16 aa, Mus Musculus
  ( 563 )...( 579 ): LSHR_MOUSE
TAPNKDTKIAKKMAIL

SEQ ID NO: 6012 - protein, 16 aa, Mus Musculus
  ( 564 )...( 580 ): LSHR_MOUSE
APNKDTKIAKKMAILI

SEQ ID NO: 6013 - protein, 16 aa, Mus Musculus
  ( 565 )...( 581 ): LSHR_MOUSE
PNKDTKIAKKMAILIF

SEQ ID NO: 6014 - protein, 16 aa, Mus Musculus
  ( 566 )...( 582 ): LSHR_MOUSE
NKDTKIAKKMAILIFT

SEQ ID NO: 6015 - protein, 16 aa, Mus Musculus
  ( 150 )...( 166 ): MC3R_MOUSE
LRYHSIMTVRKALTLI

SEQ ID NO: 6016 - protein, 16 aa, Mus Musculus
  ( 109 )...( 125 ): MC4R_MOUSE
RLHIKRIAVLPGTGTI

SEQ ID NO: 6017 - protein, 16 aa, Mus Musculus
  ( 110 )...( 126 ): MC4R_MOUSE
LHIKRIAVLPGTGTIR

SEQ ID NO: 6018 - protein, 16 aa, Mus Musculus
  ( 111 )...( 127 ): MC4R_MOUSE
HIKRIAVLPGTGTIRQ

SEQ ID NO: 6019 - protein, 16 aa, Mus Musculus
  ( 112 )...( 128 ): MC4R_MOUSE
IKRIAVLPGTGTIRQG

SEQ ID NO: 6020 - protein, 16 aa, Mus Musculus
  ( 228 )...( 244 ): MC5R_MOUSE
VRQRTSMKGAITLTML

SEQ ID NO: 6021 - protein, 16 aa, Mus Musculus
  ( 229 )...( 245 ): MC5R_MOUSE
RQRTSMKGAITLTMLL

SEQ ID NO: 6022 - protein, 16 aa, Mus Musculus
  ( 49 )...( 65 ): NK1R_MOUSE
GNVVVIWIILAHKRMR

SEQ ID NO: 6023 - protein, 16 aa, Mus Musculus
  ( 50 )...( 66 ): NK1R_MOUSE
NVVVIWIILAHKRMRT

SEQ ID NO: 6024 - protein, 16 aa, Mus Musculus
  ( 51 )...( 67 ): NK1R_MOUSE
VVVIWIILAHKRMRTV

SEQ ID NO: 6025 - protein, 16 aa, Mus Musculus
  ( 52 )...( 68 ): NK1R_MOUSE
VVIWIILAHKRMRTVT

SEQ ID NO: 6026 - protein, 16 aa, Mus Musculus
  ( 53 )...( 69 ): NK1R_MOUSE
VIWIILAHKRMRTVTN

SEQ ID NO: 6027 - protein, 16 aa, Mus Musculus
  ( 236 )...( 252 ): NK1R_MOUSE
YHEQVSAKRKVVKMMI

SEQ ID NO: 6028 - protein, 16 aa, Mus Musculus
  ( 237 )...( 253 ): NK1R_MOUSE
HEQVSAKRKVVKMMIV

SEQ ID NO: 6029 - protein, 16 aa, Mus Musculus
  ( 238 )...( 254 ): NK1R_MOUSE
EQVSAKRKVVKMMIVV

SEQ ID NO: 6030 - protein, 16 aa, Mus Musculus
  ( 239 )...( 255 ): NK1R_MOUSE
QVSAKRKVVKMMIVVV

SEQ ID NO: 6031 - protein, 16 aa, Mus Musculus
  ( 237 )...( 253 ): NK2R_MOUSE
ANLRHLQAKKKFVKAM

SEQ ID NO: 6032 - protein, 16 aa, Mus Musculus
  ( 238 )...( 254 ): NK2R_MOUSE
NLRHLQAKKKFVKAMV

SEQ ID NO: 6033 - protein, 16 aa, Mus Musculus
  ( 239 )...( 255 ): NK2R_MOUSE
LRHLQAKKKFVKAMVL

SEQ ID NO: 6034 - protein, 16 aa, Mus Musculus
  ( 240 )...( 256 ): NK2R_MOUSE
RHLQAKKKFVKAMVLV

SEQ ID NO: 6035 - protein, 16 aa, Mus Musculus
  ( 241 )...( 257 ): NK2R_MOUSE
HLQAKKKFVKAMVLVV

SEQ ID NO: 6036 - protein, 16 aa, Mus Musculus
  ( 242 )...( 258 ): NK2R_MOUSE
LQAKKKFVKAMVLVVV

SEQ ID NO: 6037 - protein, 16 aa, Mus Musculus
  ( 243 )...( 259 ): NK2R_MOUSE
QAKKKFVKAMVLVVVT

SEQ ID NO: 6038 - protein, 16 aa, Mus Musculus
  ( 244 )...( 260 ): NK2R_MOUSE
AKKKFVKAMVLVVVTF

SEQ ID NO: 6039 - protein, 16 aa, Mus Musculus
  ( 245 )...( 261 ): NK2R_MOUSE
KKKFVKAMVLVVVTFA

SEQ ID NO: 6040 - protein, 16 aa, Mus Musculus
  ( 246 )...( 262 ): NK2R_MOUSE
KKFVKAMVLVVVTFAI

SEQ ID NO: 6041 - protein, 16 aa, Mus Musculus
  ( 89 )...( 105 ): NK3R_MOUSE
GNLIVIWIILAHKRMR

SEQ ID NO: 6042 - protein, 16 aa, Mus Musculus
  ( 90 )...( 106 ): NK3R_MOUSE
NLIVIWIILAHKRMRT

SEQ ID NO: 6043 - protein, 16 aa, Mus Musculus
  ( 91 )...( 107 ): NK3R_MOUSE
LIVIWIILAHKRMRTV

SEQ ID NO: 6044 - protein, 16 aa, Mus Musculus
  ( 92 )...( 108 ): NK3R_MOUSE
IVIWIILAHKRMRTVT

SEQ ID NO: 6045 - protein, 16 aa, Mus Musculus
  ( 93 )...( 109 ): NK3R_MOUSE
VIWIILAHKRMRTVTN

SEQ ID NO: 6046 - protein, 16 aa, Mus Musculus
  ( 178 )...( 194 ): NK3R_MOUSE
LKPRLSATATKIVIGS

SEQ ID NO: 6047 - protein, 16 aa, Mus Musculus
  ( 179 )...( 195 ): NK3R_MOUSE
KPRLSATATKIVIGSI

SEQ ID NO: 6048 - protein, 16 aa, Mus Musculus
  ( 274 )...( 290 ): NK3R_MOUSE
YHEQLKAKRKVVKMMI

SEQ ID NO: 6049 - protein, 16 aa, Mus Musculus
  ( 275 )...( 291 ): NK3R_MOUSE
HEQLKAKRKVVKMMII

SEQ ID NO: 6050 - protein, 16 aa, Mus Musculus
  ( 276 )...( 292 ): NK3R_MOUSE
EQLKAKRKVVKMMIIV

SEQ ID NO: 6051 - protein, 16 aa, Mus Musculus
  ( 277 )...( 293 ): NK3R_MOUSE
QLKAKRKVVKMMIIVV

SEQ ID NO: 6052 - protein, 16 aa, Mus Musculus
  ( 278 )...( 294 ): NK3R_MOUSE
LKAKRKVVKMMIIVVV

SEQ ID NO: 6053 - protein, 16 aa, Mus Musculus
  ( 279 )...( 295 ): NK3R_MOUSE
KAKRKVVKMMIIVVVT

SEQ ID NO: 6054 - protein, 16 aa, Mus Musculus
  ( 280 )...( 296 ): NK3R_MOUSE
AKRKVVKMMIIVVVTF

SEQ ID NO: 6055 - protein, 16 aa, Mus Musculus
  ( 281 )...( 297 ): NK3R_MOUSE
KRKVVKMMIIVVVTFA

SEQ ID NO: 6056 - protein, 16 aa, Mus Musculus
  ( 282 )...( 298 ): NK3R_MOUSE
RKVVKMMIIVVVTFAI

SEQ ID NO: 6057 - protein, 16 aa, Mus Musculus
  ( 82 )...( 98 ): NTR1_MOUSE
SVTAFTLARKKSLQSL

SEQ ID NO: 6058 - protein, 16 aa, Mus Musculus
  ( 83 )...( 99 ): NTR1_MOUSE
VTAFTLARKKSLQSLQ

SEQ ID NO: 6059 - protein, 16 aa, Mus Musculus
  ( 86 )...( 102 ): NTR1_MOUSE
FTLARKKSLQSLQSTV

SEQ ID NO: 6060 - protein, 16 aa, Mus Musculus
  ( 299 )...( 315 ): NTR1_MOUSE
RVQALRHGVLVLRAVV

SEQ ID NO: 6061 - protein, 16 aa, Mus Musculus
  ( 78 )...( 94 ): NY5R_MOUSE
MGNLLILMAVMKKRNQ

SEQ ID NO: 6062 - protein, 16 aa, Mus Musculus
  ( 79 )...( 95 ): NY5R_MOUSE
GNLLILMAVMKKRNQK

SEQ ID NO: 6063 - protein, 16 aa, Mus Musculus
  ( 80 )...( 96 ): NY5R_MOUSE
NLLILMAVMKKRNQKT

SEQ ID NO: 6064 - protein, 16 aa, Mus Musculus
  ( 81 )...( 97 ): NY5R_MOUSE
LLILMAVMKKRNQKTT

SEQ ID NO: 6065 - protein, 16 aa, Mus Musculus
  ( 82 )...( 98 ): NY5R_MOUSE
LILMAVMKKRNQKTTV

SEQ ID NO: 6066 - protein, 16 aa, Mus Musculus
  ( 83 )...( 99 ): NY5R_MOUSE
ILMAVMKKRNQKTTVN

SEQ ID NO: 6067 - protein, 16 aa, Mus Musculus
  ( 84 )...( 100 ): NY5R_MOUSE
LMAVMKKRNQKTTVNF

SEQ ID NO: 6068 - protein, 16 aa, Mus Musculus
  ( 85 )...( 101 ): NY5R_MOUSE
MAVMKKRNQKTTVNFL

SEQ ID NO: 6069 - protein, 16 aa, Mus Musculus
  ( 86 )...( 102 ): NY5R_MOUSE
AVMKKRNQKTTVNFLI

SEQ ID NO: 6070 - protein, 16 aa, Mus Musculus
  ( 87 )...( 103 ): NY5R_MOUSE
VMKKRNQKTTVNFLIG

SEQ ID NO: 6071 - protein, 16 aa, Mus Musculus
  ( 379 )...( 395 ): NY5R_MOUSE
IKKRSRSVFYRLTILI

SEQ ID NO: 6072 - protein, 16 aa, Mus Musculus
  ( 380 )...( 396 ): NY5R_MOUSE
KKRSRSVFYRLTILIL

SEQ ID NO: 6073 - protein, 16 aa, Mus Musculus
  ( 50 )...( 66 ): NY6R_MOUSE
IFGNLSLIIIIFKKQR

SEQ ID NO: 6074 - protein, 16 aa, Mus Musculus
  ( 69 )...( 85 ): OPRX_MOUSE
VMYVILRHTKMKTATN

SEQ ID NO: 6075 - protein, 16 aa, Mus Musculus
  ( 70 )...( 86 ): OPRX_MOUSE
MYVILRHTKMKTATNI

SEQ ID NO: 6076 - protein, 16 aa, Mus Musculus
  ( 71 )...( 87 ): OPRX_MOUSE
YVILRHTKMKTATNIY

SEQ ID NO: 6077 - protein, 16 aa, Mus Musculus
  ( 72 )...( 88 ): OPRX_MOUSE
VILRHTKMKTATNIYI

SEQ ID NO: 6078 - protein, 16 aa, Mus Musculus
  ( 73 )...( 89 ): OPRX_MOUSE
ILRHTKMKTATNIYIF

SEQ ID NO: 6079 - protein, 16 aa, Mus Musculus
  ( 251 )...( 267 ): OPRX_MOUSE
KDRNLRRITRLVLVVV

SEQ ID NO: 6080 - protein, 16 aa, Mus Musculus
  ( 253 )...( 269 ): OPRX_MOUSE
RNLRRITRLVLVVVAV

SEQ ID NO: 6081 - protein, 16 aa, Mus Musculus
  ( 254 )...( 270 ): OPRX_MOUSE
NLRRITRLVLVVVAVF

SEQ ID NO: 6082 - protein, 16 aa, Mus Musculus
  ( 255 )...( 271 ): OPRX_MOUSE
LRRITRLVLVVVAVFV

SEQ ID NO: 6083 - protein, 16 aa, Mus Musculus
  ( 256 )...( 272 ): OPRX_MOUSE
RRITRLVLVVVAVFVG

SEQ ID NO: 6084 - protein, 16 aa, Mus Musculus
  ( 220 )...( 236 ): OXYR_MOUSE
YGLISFKIWQNLRLKT

SEQ ID NO: 6085 - protein, 16 aa, Mus Musculus
  ( 221 )...( 237 ): OXYR_MOUSE
GLISFKIWQNLRLKTA

SEQ ID NO: 6086 - protein, 16 aa, Mus Musculus
  ( 222 )...( 238 ): OXYR_MOUSE
LISFKIWQNLRLKTAA

SEQ ID NO: 6087 - protein, 16 aa, Mus Musculus
  ( 254 )...( 270 ): OXYR_MOUSE
AALARVSSVKLISKAK

SEQ ID NO: 6088 - protein, 16 aa, Mus Musculus
  ( 255 )...( 271 ): OXYR_MOUSE
ALARVSSVKLISKAKI

SEQ ID NO: 6089 - protein, 16 aa, Mus Musculus
  ( 256 )...( 272 ): OXYR_MOUSE
LARVSSVKLISKAKIR

SEQ ID NO: 6090 - protein, 16 aa, Mus Musculus
  ( 258 )...( 274 ): OXYR_MOUSE
RVSSVKLISKAKIRTV

SEQ ID NO: 6091 - protein, 16 aa, Mus Musculus
  ( 259 )...( 275 ): OXYR_MOUSE
VSSVKLISKAKIRTVK

SEQ ID NO: 6092 - protein, 16 aa, Mus Musculus
  ( 260 )...( 276 ): OXYR_MOUSE
SSVKLISKAKIRTVKM

SEQ ID NO: 6093 - protein, 16 aa, Mus Musculus
  ( 261 )...( 277 ): OXYR_MOUSE
SVKLISKAKIRTVKMT

SEQ ID NO: 6094 - protein, 16 aa, Mus Musculus
  ( 262 )...( 278 ): OXYR_MOUSE
VKLISKAKIRTVKMTF

SEQ ID NO: 6095 - protein, 16 aa, Mus Musculus
  ( 263 )...( 279 ): OXYR_MOUSE
KLISKAKIRTVKMTFI

SEQ ID NO: 6096 - protein, 16 aa, Mus Musculus
  ( 264 )...( 280 ): OXYR_MOUSE
LISKAKIRTVKMTFII

SEQ ID NO: 6097 - protein, 16 aa, Mus Musculus
  ( 265 )...( 281 ): OXYR_MOUSE
ISKAKIRTVKMTFIIV

SEQ ID NO: 6098 - protein, 16 aa, Mus Musculus
  ( 266 )...( 282 ): OXYR_MOUSE
SKAKIRTVKMTFIIVL

SEQ ID NO: 6099 - protein, 16 aa, Mus Musculus
  ( 267 )...( 283 ): OXYR_MOUSE
KAKIRTVKMTFIIVLA

SEQ ID NO: 6100 - protein, 16 aa, Mus Musculus
  ( 268 )...( 284 ): OXYR_MOUSE
AKIRTVKMTFIIVLAF

SEQ ID NO: 6101 - protein, 16 aa, Mus Musculus
  ( 269 )...( 285 ): OXYR_MOUSE
KIRTVKMTFIIVLAFI

SEQ ID NO: 6102 - protein, 16 aa, Mus Musculus
  ( 126 )...( 142 ): PAFR_MOUSE
AQATTRKRGISLSLII

SEQ ID NO: 6103 - protein, 16 aa, Mus Musculus
  ( 127 )...( 143 ): PAFR_MOUSE
QATTRKRGISLSLIIW

SEQ ID NO: 6104 - protein, 16 aa, Mus Musculus
  ( 128 )...( 144 ): PAFR_MOUSE
ATTRKRGISLSLIIWV

SEQ ID NO: 6105 - protein, 16 aa, Mus Musculus
  ( 129 )...( 145 ): PAFR_MOUSE
TTRKRGISLSLIIWVS

SEQ ID NO: 6106 - protein, 16 aa, Mus Musculus
  ( 130 )...( 146 ): PAFR_MOUSE
TRKRGISLSLIIWVSI

SEQ ID NO: 6107 - protein, 16 aa, Mus Musculus
  ( 131 )...( 147 ): PAFR_MOUSE
RKRGISLSLIIWVSIV

SEQ ID NO: 6108 - protein, 16 aa, Mus Musculus
  ( 208 )...( 224 ): PAFR_MOUSE
VIIHTLLTQPMRQQRK

SEQ ID NO: 6109 - protein, 16 aa, Mus Musculus
  ( 209 )...( 225 ): PAFR_MOUSE
IIHTLLTQPMRQQRKA

SEQ ID NO: 6110 - protein, 16 aa, Mus Musculus
  ( 124 )...( 140 ): PAR1_MOUSE
LNVLAIAVFVLRMKVK

SEQ ID NO: 6111 - protein, 16 aa, Mus Musculus
  ( 125 )...( 141 ): PAR1_MOUSE
NVLAIAVFVLRMKVKK

SEQ ID NO: 6112 - protein, 16 aa, Mus Musculus
  ( 126 )...( 142 ): PAR1_MOUSE
VLAIAVFVLRMKVKKP

SEQ ID NO: 6113 - protein, 16 aa, Mus Musculus
  ( 127 )...( 143 ): PAR1_MOUSE
LAIAVFVLRMKVKKPA

SEQ ID NO: 6114 - protein, 16 aa, Mus Musculus
  ( 128 )...( 144 ): PAR1_MOUSE
AIAVFVLRMKVKKPAV

SEQ ID NO: 6115 - protein, 16 aa, Mus Musculus
  ( 129 )...( 145 ): PAR1_MOUSE
IAVFVLRMKVKKPAVV

SEQ ID NO: 6116 - protein, 16 aa, Mus Musculus
  ( 130 )...( 146 ): PAR1_MOUSE
AVFVLRMKVKKPAVVY

SEQ ID NO: 6117 - protein, 16 aa, Mus Musculus
  ( 131 )...( 147 ): PAR1_MOUSE
VFVLRMKVKKPAVVYM

SEQ ID NO: 6118 - protein, 16 aa, Mus Musculus
  ( 132 )...( 148 ): PAR1_MOUSE
FVLRMKVKKPAVVYML

SEQ ID NO: 6119 - protein, 16 aa, Mus Musculus
  ( 133 )...( 149 ): PAR1_MOUSE
VLRMKVKKPAVVYMLH

SEQ ID NO: 6120 - protein, 16 aa, Mus Musculus
  ( 134 )...( 150 ): PAR1_MOUSE
LRMKVKKPAVVYMLHL

SEQ ID NO: 6121 - protein, 16 aa, Mus Musculus
  ( 135 )...( 151 ): PAR1_MOUSE
RMKVKKPAVVYMLHLA

SEQ ID NO: 6122 - protein, 16 aa, Mus Musculus
  ( 136 )...( 152 ): PAR1_MOUSE
MKVKKPAVVYMLHLAM

SEQ ID NO: 6123 - protein, 16 aa, Mus Musculus
  ( 137 )...( 153 ): PAR1_MOUSE
KVKKPAVVYMLHLAMA

SEQ ID NO: 6124 - protein, 16 aa, Mus Musculus
  ( 99 )...( 115 ): PAR2_MOUSE
LWIFLFRTKKKHPAVI

SEQ ID NO: 6125 - protein, 16 aa, Mus Musculus
  ( 100 )...( 116 ): PAR2_MOUSE
WIFLFRTKKKHPAVIY

SEQ ID NO: 6126 - protein, 16 aa, Mus Musculus
  ( 101 )...( 117 ): PAR2_MOUSE
IFLFRTKKKHPAVIYM

SEQ ID NO: 6127 - protein, 16 aa, Mus Musculus
  ( 106 )...( 122 ): PAR2_MOUSE
TKKKHPAVIYMANLAL

SEQ ID NO: 6128 - protein, 16 aa, Mus Musculus
  ( 187 )...( 203 ): PAR2_MOUSE
RKKANIAVGVSLAIWL

SEQ ID NO: 6129 - protein, 16 aa, Mus Musculus
  ( 280 )...( 296 ): PAR2_MOUSE
SEKKRQRAIRLIITVL

SEQ ID NO: 6130 - protein, 16 aa, Mus Musculus
  ( 281 )...( 297 ): PAR2_MOUSE
EKKRQRAIRLIITVLA

SEQ ID NO: 6131 - protein, 16 aa, Mus Musculus
  ( 282 )...( 298 ): PAR2_MOUSE
KKRQRAIRLIITVLAM

SEQ ID NO: 6132 - protein, 16 aa, Mus Musculus
  ( 283 )...( 299 ): PAR2_MOUSE
KRQRAIRLIITVLAMY

SEQ ID NO: 6133 - protein, 16 aa, Mus Musculus
  ( 108 )...( 124 ): PAR3_MOUSE
VPSNIVTLWKLSLRTK

SEQ ID NO: 6134 - protein, 16 aa, Mus Musculus
  ( 110 )...( 126 ): PAR3_MOUSE
SNIVTLWKLSLRTKSI

SEQ ID NO: 6135 - protein, 16 aa, Mus Musculus
  ( 111 )...( 127 ): PAR3_MOUSE
NIVTLWKLSLRTKSIS

SEQ ID NO: 6136 - protein, 16 aa, Mus Musculus
  ( 112 )...( 128 ): PAR3_MOUSE
IVTLWKLSLRTKSISL

SEQ ID NO: 6137 - protein, 16 aa, Mus Musculus
  ( 113 )...( 129 ): PAR3_MOUSE
VTLWKLSLRTKSISLV

SEQ ID NO: 6138 - protein, 16 aa, Mus Musculus
  ( 114 )...( 130 ): PAR3_MOUSE
TLWKLSLRTKSISLVI

SEQ ID NO: 6139 - protein, 16 aa, Mus Musculus
  ( 115 )...( 131 ): PAR3_MOUSE
LWKLSLRTKSISLVIF

SEQ ID NO: 6140 - protein, 16 aa, Mus Musculus
  ( 116 )...( 132 ): PAR3_MOUSE
WKLSLRTKSISLVIFH

SEQ ID NO: 6141 - protein, 16 aa, Mus Musculus
  ( 117 )...( 133 ): PAR3_MOUSE
KLSLRTKSISLVIFHT

SEQ ID NO: 6142 - protein, 16 aa, Mus Musculus
  ( 281 )...( 297 ): PAR3_MOUSE
YTTLIHKLKSKDRIWL

SEQ ID NO: 6143 - protein, 16 aa, Mus Musculus
  ( 282 )...( 298 ): PAR3_MOUSE
TTLIHKLKSKDRIWLG

SEQ ID NO: 6144 - protein, 16 aa, Mus Musculus
  ( 283 )...( 299 ): PAR3_MOUSE
TLIHKLKSKDRIWLGY

SEQ ID NO: 6145 - protein, 16 aa, Mus Musculus
  ( 284 )...( 300 ): PAR3_MOUSE
LIHKLKSKDRIWLGYI

SEQ ID NO: 6146 - protein, 16 aa, Mus Musculus
  ( 285 )...( 301 ): PAR3_MOUSE
IHKLKSKDRIWLGYIK

SEQ ID NO: 6147 - protein, 16 aa, Mus Musculus
  ( 286 )...( 302 ): PAR3_MOUSE
HKLKSKDRIWLGYIKA

SEQ ID NO: 6148 - protein, 16 aa, Mus Musculus
  ( 287 )...( 303 ): PAR3_MOUSE
KLKSKDRIWLGYIKAV

SEQ ID NO: 6149 - protein, 16 aa, Mus Musculus
  ( 288 )...( 304 ): PAR3_MOUSE
LKSKDRIWLGYIKAVL

SEQ ID NO: 6150 - protein, 16 aa, Mus Musculus
  ( 289 )...( 305 ): PAR3_MOUSE
KSKDRIWLGYIKAVLL

SEQ ID NO: 6151 - protein, 16 aa, Mus Musculus
  ( 317 )...( 333 ): PE23_MOUSE
LDPWVYLLLRKILLRK

SEQ ID NO: 6152 - protein, 16 aa, Mus Musculus
  ( 320 )...( 336 ): PE23_MOUSE
WVYLLLRKILLRKFCQ

SEQ ID NO: 6153 - protein, 16 aa, Mus Musculus
  ( 321 )...( 337 ): PE23_MOUSE
VYLLLRKILLRKFCQI

SEQ ID NO: 6154 - protein, 16 aa, Mus Musculus
  ( 322 )...( 338 ): PE23_MOUSE
YLLLRKILLRKFCQIR

SEQ ID NO: 6155 - protein, 16 aa, Mus Musculus
  ( 46 )...( 62 ): PF2R_MOUSE
LAIAILMKAYQRFRQK

SEQ ID NO: 6156 - protein, 16 aa, Mus Musculus
  ( 48 )...( 64 ): PF2R_MOUSE
IAILMKAYQRFRQKSK

SEQ ID NO: 6157 - protein, 16 aa, Mus Musculus
  ( 140 )...( 156 ): PF2R_MOUSE
PIFHSTKITSKHVKMI

SEQ ID NO: 6158 - protein, 16 aa, Mus Musculus
  ( 142 )...( 158 ): PF2R_MOUSE
FHSTKITSKHVKMILS

SEQ ID NO: 6159 - protein, 16 aa, Mus Musculus
  ( 144 )...( 160 ): PF2R_MOUSE
STKITSKHVKMILSGV

SEQ ID NO: 6160 - protein, 16 aa, Mus Musculus
  ( 221 )...( 237 ): PF2R_MOUSE
AVTGVTLLRVKFRSQQ

SEQ ID NO: 6161 - protein, 16 aa, Mus Musculus
  ( 222 )...( 238 ): PF2R_MOUSE
VTGVTLLRVKFRSQQH

SEQ ID NO: 6162 - protein, 16 aa, Mus Musculus
  ( 302 )...( 318 ): PF2R_MOUSE
WVYILLRKAVLRNLYK

SEQ ID NO: 6163 - protein, 16 aa, Mus Musculus
  ( 303 )...( 319 ): PF2R_MOUSE
VYILLRKAVLRNLYKL

SEQ ID NO: 6164 - protein, 16 aa, Mus Musculus
  ( 304 )...( 320 ): PF2R_MOUSE
YILLRKAVLRNLYKLA

SEQ ID NO: 6165 - protein, 16 aa, Mus Musculus
  ( 305 )...( 321 ): PF2R_MOUSE
ILLRKAVLRNLYKLAS

SEQ ID NO: 6166 - protein, 16 aa, Mus Musculus
  ( 375 )...( 391 ): PTRR_MOUSE
FILFINIIRVLATKLR

SEQ ID NO: 6167 - protein, 16 aa, Mus Musculus
  ( 398 )...( 414 ): PTRR_MOUSE
DTRQQYRKLLRSTLVL

SEQ ID NO: 6168 - protein, 16 aa, Mus Musculus
  ( 399 )...( 415 ): PTRR_MOUSE
TRQQYRKLLRSTLVLV

SEQ ID NO: 6169 - protein, 16 aa, Mus Musculus
  ( 400 )...( 416 ): PTRR_MOUSE
RQQYRKLLRSTLVLVP

SEQ ID NO: 6170 - protein, 16 aa, Mus Musculus
  ( 401 )...( 417 ): PTRR_MOUSE
QQYRKLLRSTLVLVPL

SEQ ID NO: 6171 - protein, 16 aa, Mus Musculus
  ( 402 )...( 418 ): PTRR_MOUSE
QYRKLLRSTLVLVPLF

SEQ ID NO: 6172 - protein, 16 aa, Mus Musculus
  ( 404 )...( 420 ): PTRR_MOUSE
RKLLRSTLVLVPLFGV

SEQ ID NO: 6173 - protein, 16 aa, Mus Musculus
  ( 76 )...( 92 ): SSR1_MOUSE
NSMVIYVILRYAKMKT

SEQ ID NO: 6174 - protein, 16 aa, Mus Musculus
  ( 77 )...( 93 ): SSR1_MOUSE
SMVIYVILRYAKMKTA

SEQ ID NO: 6175 - protein, 16 aa, Mus Musculus
  ( 79 )...( 95 ): SSR1_MOUSE
VIYVILRYAKMKTATN

SEQ ID NO: 6176 - protein, 16 aa, Mus Musculus
  ( 80 )...( 96 ): SSR1_MOUSE
IYVILRYAKMKTATNI

SEQ ID NO: 6177 - protein, 16 aa, Mus Musculus
  ( 81 )...( 97 ): SSR1_MOUSE
YVILRYAKMKTATNIY

SEQ ID NO: 6178 - protein, 16 aa, Mus Musculus
  ( 82 )...( 98 ): SSR1_MOUSE
VILRYAKMKTATNIYI

SEQ ID NO: 6179 - protein, 16 aa, Mus Musculus
  ( 83 )...( 99 ): SSR1_MOUSE
ILRYAKMKTATNIYIL

SEQ ID NO: 6180 - protein, 16 aa, Mus Musculus
  ( 84 )...( 100 ): SSR1_MOUSE
LRYAKMKTATNIYILN

SEQ ID NO: 6181 - protein, 16 aa, Mus Musculus
  ( 85 )...( 101 ): SSR1_MOUSE
RYAKMKTATNIYILNL

SEQ ID NO: 6182 - protein, 16 aa, Mus Musculus
  ( 241 )...( 257 ): SSR1_MOUSE
LCYVLIIAKMRMVALK

SEQ ID NO: 6183 - protein, 16 aa, Mus Musculus
  ( 243 )...( 259 ): SSR1_MOUSE
YVLIIAKMRMVALKAG

SEQ ID NO: 6184 - protein, 16 aa, Mus Musculus
  ( 244 )...( 260 ): SSR1_MOUSE
VLIIAKMRMVALKAGW

SEQ ID NO: 6185 - protein, 16 aa, Mus Musculus
  ( 245 )...( 261 ): SSR1_MOUSE
LIIAKMRMVALKAGWQ

SEQ ID NO: 6186 - protein, 16 aa, Mus Musculus
  ( 246 )...( 262 ): SSR1_MOUSE
IIAKMRMVALKAGWQQ

SEQ ID NO: 6187 - protein, 16 aa, Mus Musculus
  ( 261 )...( 277 ): SSR1_MOUSE
QRKRSERKITLMVMMV

SEQ ID NO: 6188 - protein, 16 aa, Mus Musculus
  ( 262 )...( 278 ): SSR1_MOUSE
RKRSERKITLMVMMVV

SEQ ID NO: 6189 - protein, 16 aa, Mus Musculus
  ( 60 )...( 76 ): SSR2_MOUSE
GNTLVIYVILRYAKMK

SEQ ID NO: 6190 - protein, 16 aa, Mus Musculus
  ( 61 )...( 77 ): SSR2_MOUSE
NTLVIYVILRYAKMKT

SEQ ID NO: 6191 - protein, 16 aa, Mus Musculus
  ( 62 )...( 78 ): SSR2_MOUSE
TLVIYVILRYAKMKTI

SEQ ID NO: 6192 - protein, 16 aa, Mus Musculus
  ( 63 )...( 79 ): SSR2_MOUSE
LVIYVILRYAKMKTIT

SEQ ID NO: 6193 - protein, 16 aa, Mus Musculus
  ( 64 )...( 80 ): SSR2_MOUSE
VIYVILRYAKMKTITN

SEQ ID NO: 6194 - protein, 16 aa, Mus Musculus
  ( 65 )...( 81 ): SSR2_MOUSE
IYVILRYAKMKTITNI

SEQ ID NO: 6195 - protein, 16 aa, Mus Musculus
  ( 67 )...( 83 ): SSR2_MOUSE
VILRYAKMKTITNIYI

SEQ ID NO: 6196 - protein, 16 aa, Mus Musculus
  ( 68 )...( 84 ): SSR2_MOUSE
ILRYAKMKTITNIYIL

SEQ ID NO: 6197 - protein, 16 aa, Mus Musculus
  ( 69 )...( 85 ): SSR2_MOUSE
LRYAKMKTITNIYILN

SEQ ID NO: 6198 - protein, 16 aa, Mus Musculus
  ( 70 )...( 86 ): SSR2_MOUSE
RYAKMKTITNIYILNL

SEQ ID NO: 6199 - protein, 16 aa, Mus Musculus
  ( 228 )...( 244 ): SSR2_MOUSE
YLFIIIKVKSSGIRVG

SEQ ID NO: 6200 - protein, 16 aa, Mus Musculus
  ( 229 )...( 245 ): SSR2_MOUSE
LFIIIKVKSSGIRVGS

SEQ ID NO: 6201 - protein, 16 aa, Mus Musculus
  ( 231 )...( 247 ): SSR2_MOUSE
IIIKVKSSGIRVGSSK

SEQ ID NO: 6202 - protein, 16 aa, Mus Musculus
  ( 249 )...( 265 ): SSR2_MOUSE
KSEKKVTRMVSIVVAV

SEQ ID NO: 6203 - protein, 16 aa, Mus Musculus
  ( 252 )...( 268 ): SSR2_MOUSE
KKVTRMVSIVVAVFIF

SEQ ID NO: 6204 - protein, 16 aa, Mus Musculus
  ( 320 )...( 336 ): SSR2_MOUSE
KKSFQNVLCLVKVSGT

SEQ ID NO: 6205 - protein, 16 aa, Mus Musculus
  ( 227 )...( 243 ): SSR3_MOUSE
YLLIVVKVRSTTRRVR

SEQ ID NO: 6206 - protein, 16 aa, Mus Musculus
  ( 228 )...( 244 ): SSR3_MOUSE
LLIVVKVRSTTRRVRA

SEQ ID NO: 6207 - protein, 16 aa, Mus Musculus
  ( 60 )...( 76 ): SSR4_MOUSE
GNALVIFVILRYAKMK

SEQ ID NO: 6208 - protein, 16 aa, Mus Musculus
  ( 61 )...( 77 ): SSR4_MOUSE
NALVIFVILRYAKMKT

SEQ ID NO: 6209 - protein, 16 aa, Mus Musculus
  ( 62 )...( 78 ): SSR4_MOUSE
ALVIFVILRYAKMKTA

SEQ ID NO: 6210 - protein, 16 aa, Mus Musculus
  ( 63 )...( 79 ): SSR4_MOUSE
LVIFVILRYAKMKTAT

SEQ ID NO: 6211 - protein, 16 aa, Mus Musculus
  ( 64 )...( 80 ): SSR4_MOUSE
VIFVILRYAKMKTATN

SEQ ID NO: 6212 - protein, 16 aa, Mus Musculus
  ( 65 )...( 81 ): SSR4_MOUSE
IFVILRYAKMKTATNI

SEQ ID NO: 6213 - protein, 16 aa, Mus Musculus
  ( 66 )...( 82 ): SSR4_MOUSE
FVILRYAKMKTATNIY

SEQ ID NO: 6214 - protein, 16 aa, Mus Musculus
  ( 67 )...( 83 ): SSR4_MOUSE
VILRYAKMKTATNIYL

SEQ ID NO: 6215 - protein, 16 aa, Mus Musculus
  ( 68 )...( 84 ): SSR4_MOUSE
ILRYAKMKTATNIYLL

SEQ ID NO: 6216 - protein, 16 aa, Mus Musculus
  ( 246 )...( 262 ): SSR4_MOUSE
RRRSEKKITRLVLMVV

SEQ ID NO: 6217 - protein, 16 aa, Mus Musculus
  ( 247 )...( 263 ): SSR4_MOUSE
RRSEKKITRLVLMVVT

SEQ ID NO: 6218 - protein, 16 aa, Mus Musculus
  ( 248 )...( 264 ): SSR4_MOUSE
RSEKKITRLVLMVVTV

SEQ ID NO: 6219 - protein, 16 aa, Mus Musculus
  ( 251 )...( 267 ): SSR4_MOUSE
KKITRLVLMVVTVFVL

SEQ ID NO: 6220 - protein, 16 aa, Mus Musculus
  ( 54 )...( 70 ): SSR5_MOUSE
GNTLVIYVVLRYAKMK

SEQ ID NO: 6221 - protein, 16 aa, Mus Musculus
  ( 55 )...( 71 ): SSR5_MOUSE
NTLVIYVVLRYAKMKT

SEQ ID NO: 6222 - protein, 16 aa, Mus Musculus
  ( 58 )...( 74 ): SSR5_MOUSE
VIYVVLRYAKMKTVTN

SEQ ID NO: 6223 - protein, 16 aa, Mus Musculus
  ( 59 )...( 75 ): SSR5_MOUSE
IYVVLRYAKMKTVTNV

SEQ ID NO: 6224 - protein, 16 aa, Mus Musculus
  ( 61 )...( 77 ): SSR5_MOUSE
VVLRYAKMKTVTNVYI

SEQ ID NO: 6225 - protein, 16 aa, Mus Musculus
  ( 62 )...( 78 ): SSR5_MOUSE
VLRYAKMKTVTNVYIL

SEQ ID NO: 6226 - protein, 16 aa, Mus Musculus
  ( 63 )...( 79 ): SSR5_MOUSE
LRYAKMKTVTNVYILN

SEQ ID NO: 6227 - protein, 16 aa, Mus Musculus
  ( 64 )...( 80 ): SSR5_MOUSE
RYAKMKTVTNVYILNL

SEQ ID NO: 6228 - protein, 16 aa, Mus Musculus
  ( 217 )...( 233 ): SSR5_MOUSE
LCYLLIVVKVKAAGMR

SEQ ID NO: 6229 - protein, 16 aa, Mus Musculus
  ( 218 )...( 234 ): SSR5_MOUSE
CYLLIVVKVKAAGMRV

SEQ ID NO: 6230 - protein, 16 aa, Mus Musculus
  ( 219 )...( 235 ): SSR5_MOUSE
YLLIVVKVKAAGMRVG

SEQ ID NO: 6231 - protein, 16 aa, Mus Musculus
  ( 220 )...( 236 ): SSR5_MOUSE
LLIVVKVKAAGMRVGS

SEQ ID NO: 6232 - protein, 16 aa, Mus Musculus
  ( 221 )...( 237 ): SSR5_MOUSE
LIVVKVKAAGMRVGSS

SEQ ID NO: 6233 - protein, 16 aa, Mus Musculus
  ( 239 )...( 255 ): SSR5_MOUSE
RRSERKVTRMVVVVVL

SEQ ID NO: 6234 - protein, 8 aa, Homo sapiens
  ( 227 )...( 234 ): >5H1A_HUMAN
RKTVKKVE

SEQ ID NO: 6235 - protein, 8 aa, Homo sapiens
  ( 331 )...( 338 ): >5H1A_HUMAN
AKRKMALA

SEQ ID NO: 6236 - protein, 8 aa, Homo sapiens
  ( 338 )...( 345 ): >5H1A_HUMAN
ARERKTVK

SEQ ID NO: 6237 - protein, 8 aa, Homo sapiens
  ( 341 )...( 348 ): >5H1A_HUMAN
RKTVKTLG

SEQ ID NO: 6238 - protein, 8 aa, Homo sapiens
  ( 410 )...( 417 ): >5H1A_HUMAN
AFKKIIKC

SEQ ID NO: 6239 - protein, 8 aa, Homo sapiens
  ( 72 )...( 79 ): >5H1B_HUMAN
ATVYRTRK

SEQ ID NO: 6240 - protein, 8 aa, Homo sapiens
  ( 161 )...( 168 ): >5H1B_HUMAN
RTPKRAAV

SEQ ID NO: 6241 - protein, 8 aa, Homo sapiens
  ( 235 )...( 242 ): >5H1B_HUMAN
ARSRILKQ

SEQ ID NO: 6242 - protein, 8 aa, Homo sapiens
  ( 243 )...( 250 ): >5H1B_HUMAN
TPNRTGKR

SEQ ID NO: 6243 - protein, 8 aa, Homo sapiens
  ( 245 )...( 252 ): >5H1B_HUMAN
NRTGKRLT

SEQ ID NO: 6244 - protein, 8 aa, Homo sapiens
  ( 247 )...( 254 ): >5H1B_HUMAN
TGKRLTRA

SEQ ID NO: 6245 - protein, 8 aa, Homo sapiens
  ( 248 )...( 255 ): >5H1B_HUMAN
GKRLTRAQ

SEQ ID NO: 6246 - protein, 8 aa, Homo sapiens
  ( 249 )...( 256 ): >5H1B_HUMAN
KRLTRAQL

SEQ ID NO: 6247 - protein, 8 aa, Homo sapiens
  ( 310 )...( 317 ): >5H1B_HUMAN
RKATKTLG

SEQ ID NO: 6248 - protein, 8 aa, Homo sapiens
  ( 382 )...( 389 ): >5H1B_HUMAN
KLIRFKCT

SEQ ID NO: 6249 - protein, 8 aa, Homo sapiens
  ( 146 )...( 153 ): >5H1D_HUMAN
YSKRRTAG

SEQ ID NO: 6250 - protein, 8 aa, Homo sapiens
  ( 148 )...( 155 ): >5H1D_HUMAN
KRRTAGHA

SEQ ID NO: 6251 - protein, 8 aa, Homo sapiens
  ( 297 )...( 304 ): >5H1D_HUMAN
RKATKILG

SEQ ID NO: 6252 - protein, 8 aa, Homo sapiens
  ( 369 )...( 376 ): >5H1D_HUMAN
KIVPFRKA

SEQ ID NO: 6253 - protein, 8 aa, Homo sapiens
  ( 134 )...( 141 ): >5H1E_HUMAN
RTAKRAAL

SEQ ID NO: 6254 - protein, 8 aa, Homo sapiens
  ( 353 )...( 360 ): >5H1E_HUMAN
LAFKKLIR

SEQ ID NO: 6255 - protein, 8 aa, Homo sapiens
  ( 354 )...( 361 ): >5H1E_HUMAN
AFKKLIRC

SEQ ID NO: 6256 - protein, 8 aa, Homo sapiens
  ( 134 )...( 141 ): >5H1F_HUMAN
KRTPKHAG

SEQ ID NO: 6257 - protein, 8 aa, Homo sapiens
  ( 203 )...( 210 ): >5H1F_HUMAN
KIYRAAKT

SEQ ID NO: 6258 - protein, 8 aa, Homo sapiens
  ( 214 )...( 221 ): >5H1F_HUMAN
KRQASRIA

SEQ ID NO: 6259 - protein, 8 aa, Homo sapiens
  ( 215 )...( 222 ): >5H1F_HUMAN
RQASRIAK

SEQ ID NO: 6260 - protein, 8 aa, Homo sapiens
  ( 279 )...( 286 ): >5H1F_HUMAN
RRQKISGT

SEQ ID NO: 6261 - protein, 8 aa, Homo sapiens
  ( 280 )...( 287 ): >5H1F_HUMAN
RQKISGTR

SEQ ID NO: 6262 - protein, 8 aa, Homo sapiens
  ( 355 )...( 362 ): >5H1F_HUMAN
KKAFQKLV

SEQ ID NO: 6263 - protein, 8 aa, Homo sapiens
  ( 188 )...( 195 ): >5H2A_HUMAN
SRTKAFLK

SEQ ID NO: 6264 - protein, 8 aa, Homo sapiens
  ( 189 )...( 196 ): >5H2A_HUMAN
RTKAFLKI

SEQ ID NO: 6265 - protein, 8 aa, Homo sapiens
  ( 426 )...( 433 ): >5H2A_HUMAN
MGQKKNSK

SEQ ID NO: 6266 - protein, 8 aa, Homo sapiens
  ( 245 )...( 252 ): >5H2B_HUMAN
QKKAYLVK

SEQ ID NO: 6267 - protein, 8 aa, Homo sapiens
  ( 303 )...( 310 ): >5H2B_HUMAN
RRTSTIGK

SEQ ID NO: 6268 - protein, 8 aa, Homo sapiens
  ( 304 )...( 311 ): >5H2B_HUMAN
RTSTIGKK

SEQ ID NO: 6269 - protein, 8 aa, Homo sapiens
  ( 399 )...( 406 ): >5H2B_HUMAN
YRATKSVK

SEQ ID NO: 6270 - protein, 8 aa, Homo sapiens
  ( 400 )...( 407 ): >5H2B_HUMAN
RATKSVKT

SEQ ID NO: 6271 - protein, 8 aa, Homo sapiens
  ( 402 )...( 409 ): >5H2B_HUMAN
TKSVKTLR

SEQ ID NO: 6272 - protein, 8 aa, Homo sapiens
  ( 403 )...( 410 ): >5H2B_HUMAN
KSVKTLRK

SEQ ID NO: 6273 - protein, 8 aa, Homo sapiens
  ( 429 )...( 436 ): >5H2B_HUMAN
KKHGIRNG

SEQ ID NO: 6274 - protein, 8 aa, Homo sapiens
  ( 167 )...( 174 ): >5H2C_HUMAN
SRTKAIMK

SEQ ID NO: 6275 - protein, 8 aa, Homo sapiens
  ( 168 )...( 175 ): >5H2C_HUMAN
RTKAIMKI

SEQ ID NO: 6276 - protein, 8 aa, Homo sapiens
  ( 307 )...( 314 ): >5H2C_HUMAN
RKASKVLG

SEQ ID NO: 6277 - protein, 8 aa, Homo sapiens
  ( 150 )...( 157 ): >5H5A_HUMAN
TLRTRKCV

SEQ ID NO: 6278 - protein, 8 aa, Homo sapiens
  ( 151 )...( 158 ): >5H5A_HUMAN
LRTRKCVS

SEQ ID NO: 6279 - protein, 8 aa, Homo sapiens
  ( 152 )...( 159 ): >5H5A_HUMAN
RTRKCVSN

SEQ ID NO: 6280 - protein, 8 aa, Homo sapiens
  ( 225 )...( 232 ): >5H5A_HUMAN
KAAKFRVG

SEQ ID NO: 6281 - protein, 8 aa, Homo sapiens
  ( 227 )...( 234 ): >5H5A_HUMAN
AKFRVGSR

SEQ ID NO: 6282 - protein, 8 aa, Homo sapiens
  ( 229 )...( 236 ): >5H5A_HUMAN
FRVGSRKT

SEQ ID NO: 6283 - protein, 8 aa, Homo sapiens
  ( 230 )...( 237 ): >5H5A_HUMAN
RVGSRKTN

SEQ ID NO: 6284 - protein, 8 aa, Homo sapiens
  ( 259 )...( 266 ): >5H6_HUMAN
HSRKALKA

SEQ ID NO: 6285 - protein, 8 aa, Homo sapiens
  ( 260 )...( 267 ): >5H6_HUMAN
SRKALKAS

SEQ ID NO: 6286 - protein, 8 aa, Homo sapiens
  ( 261 )...( 268 ): >5H6_HUMAN
RKALKASL

SEQ ID NO: 6287 - protein, 8 aa, Homo sapiens
  ( 106 )...( 113 ): >5H7_HUMAN
VCFVKKLR

SEQ ID NO: 6288 - protein, 8 aa, Homo sapiens
  ( 262 )...( 269 ): >5H7_HUMAN
IYKAARKS

SEQ ID NO: 6289 - protein, 8 aa, Homo sapiens
  ( 263 )...( 270 ): >5H7_HUMAN
YKAARKSA

SEQ ID NO: 6290 - protein, 8 aa, Homo sapiens
  ( 266 )...( 273 ): >5H7_HUMAN
ARKSAAKH

SEQ ID NO: 6291 - protein, 8 aa, Homo sapiens
  ( 216 )...( 223 ): >A1AA_HUMAN
RGLKSGLK

SEQ ID NO: 6292 - protein, 8 aa, Homo sapiens
  ( 266 )...( 273 ): >A1AA_HUMAN
REKKAAKT

SEQ ID NO: 6293 - protein, 8 aa, Homo sapiens
  ( 346 )...( 353 ): >A1AA_HUMAN
LCRKQSSK

SEQ ID NO: 6294 - protein, 8 aa, Homo sapiens
  ( 420 )...( 427 ): >A1AA_HUMAN
TTARVRSK

SEQ ID NO: 6295 - protein, 8 aa, Homo sapiens
  ( 421 )...( 428 ): >A1AA_HUMAN
TARVRSKS

SEQ ID NO: 6296 - protein, 8 aa, Homo sapiens
  ( 154 )...( 161 ): >A1AB_HUMAN
PTLVTRRK

SEQ ID NO: 6297 - protein, 8 aa, Homo sapiens
  ( 155 )...( 162 ): >A1AB_HUMAN
TLVTRRKA

SEQ ID NO: 6298 - protein, 8 aa, Homo sapiens
  ( 156 )...( 163 ): >A1AB_HUMAN
LVTRRKAI

SEQ ID NO: 6299 - protein, 8 aa, Homo sapiens
  ( 157 )...( 164 ): >A1AB_HUMAN
VTRRKAIL

SEQ ID NO: 6300 - protein, 8 aa, Homo sapiens
  ( 158 )...( 165 ): >A1AB_HUMAN
TRRKAILA

SEQ ID NO: 6301 - protein, 8 aa, Homo sapiens
  ( 228 )...( 235 ): >A1AB_HUMAN
IVAKRTTK

SEQ ID NO: 6302 - protein, 8 aa, Homo sapiens
  ( 229 )...( 236 ): >A1AB_HUMAN
VAKRTTKN

SEQ ID NO: 6303 - protein, 8 aa, Homo sapiens
  ( 230 )...( 237 ): >A1AB_HUMAN
AKRTTKNL

SEQ ID NO: 6304 - protein, 8 aa, Homo sapiens
  ( 288 )...( 295 ): >A1AB_HUMAN
REKKAAKT

SEQ ID NO: 6305 - protein, 8 aa, Homo sapiens
  ( 292 )...( 299 ): >A1AD_HUMAN
VKRERGKA

SEQ ID NO: 6306 - protein, 8 aa, Homo sapiens
  ( 342 )...( 349 ): >A1AD_HUMAN
REKKAAKT

SEQ ID NO: 6307 - protein, 8 aa, Homo sapiens
  ( 482 )...( 489 ): >A1AD_HUMAN
APVASRRK

SEQ ID NO: 6308 - protein, 8 aa, Homo sapiens
  ( 146 )...( 153 ): >A2AA_HUMAN
TPRRIKAI

SEQ ID NO: 6309 - protein, 8 aa, Homo sapiens
  ( 318 )...( 325 ): >A2AA_HUMAN
KGKARASQ

SEQ ID NO: 6310 - protein, 8 aa, Homo sapiens
  ( 320 )...( 327 ): >A2AA_HUMAN
KARASQVK

SEQ ID NO: 6311 - protein, 8 aa, Homo sapiens
  ( 435 )...( 442 ): >A2AA_HUMAN
RAFKKILC

SEQ ID NO: 6312 - protein, 8 aa, Homo sapiens
  ( 436 )...( 443 ): >A2AA_HUMAN
AFKKILCR

SEQ ID NO: 6313 - protein, 8 aa, Homo sapiens
  ( 437 )...( 444 ): >A2AA_HUMAN
FKKILCRG

SEQ ID NO: 6314 - protein, 8 aa, Homo sapiens
  ( 125 )...( 132 ): >A2AB_HUMAN
TPRRIKCI

SEQ ID NO: 6315 - protein, 8 aa, Homo sapiens
  ( 164 )...( 171 ): >A2AC_HUMAN
TPRRVKAT

SEQ ID NO: 6316 - protein, 8 aa, Homo sapiens
  ( 165 )...( 172 ): >A2AC_HUMAN
PRRVKATI

SEQ ID NO: 6317 - protein, 8 aa, Homo sapiens
  ( 166 )...( 173 ): >A2AC_HUMAN
RRVKATIV

SEQ ID NO: 6318 - protein, 8 aa, Homo sapiens
  ( 234 )...( 241 ): >A2AC_HUMAN
YRVAKLRT

SEQ ID NO: 6319 - protein, 8 aa, Homo sapiens
  ( 236 )...( 243 ): >A2AC_HUMAN
VAKLRTRT

SEQ ID NO: 6320 - protein, 8 aa, Homo sapiens
  ( 237 )...( 244 ): >A2AC_HUMAN
AKLRTRTL

SEQ ID NO: 6321 - protein, 8 aa, Homo sapiens
  ( 238 )...( 245 ): >A2AC_HUMAN
KLRTRTLS

SEQ ID NO: 6322 - protein, 8 aa, Homo sapiens
  ( 365 )...( 372 ): >A2AC_HUMAN
SSVCRRKV

SEQ ID NO: 6323 - protein, 8 aa, Homo sapiens
  ( 366 )...( 373 ): >A2AC_HUMAN
SVCRRKVA

SEQ ID NO: 6324 - protein, 8 aa, Homo sapiens
  ( 116 )...( 123 ): >AA1R_HUMAN
KMVVTPRR

SEQ ID NO: 6325 - protein, 8 aa, Homo sapiens
  ( 209 )...( 216 ): >AA1R_HUMAN
KQLNKKVS

SEQ ID NO: 6326 - protein, 8 aa, Homo sapiens
  ( 220 )...( 227 ): >AA2A_HUMAN
RARSTLQK

SEQ ID NO: 6327 - protein, 8 aa, Homo sapiens
  ( 262 )...( 269 ): >AA2B_HUMAN
AQGKNKPK

SEQ ID NO: 6328 - protein, 8 aa, Homo sapiens
  ( 112 )...( 119 ): >AA3R_HUMAN
VKLTVRYK

SEQ ID NO: 6329 - protein, 8 aa, Homo sapiens
  ( 324 )...( 331 ): >ACM1_HUMAN
NTVKRPTK

SEQ ID NO: 6330 - protein, 8 aa, Homo sapiens
  ( 325 )...( 332 ): >ACM1_HUMAN
TVKRPTKK

SEQ ID NO: 6331 - protein, 8 aa, Homo sapiens
  ( 336 )...( 343 ): >ACM1_HUMAN
RAGKGQKP

SEQ ID NO: 6332 - protein, 8 aa, Homo sapiens
  ( 337 )...( 344 ): >ACM1_HUMAN
AGKGQKPR

SEQ ID NO: 6333 - protein, 8 aa, Homo sapiens
  ( 349 )...( 356 ): >ACM1_HUMAN
LAKRKTFS

SEQ ID NO: 6334 - protein, 8 aa, Homo sapiens
  ( 350 )...( 357 ): >ACM1_HUMAN
AKRKTFSL

SEQ ID NO: 6335 - protein, 8 aa, Homo sapiens
  ( 351 )...( 358 ): >ACM1_HUMAN
KRKTFSLV

SEQ ID NO: 6336 - protein, 8 aa, Homo sapiens
  ( 352 )...( 359 ): >ACM1_HUMAN
RKTFSLVK

SEQ ID NO: 6337 - protein, 8 aa, Homo sapiens
  ( 358 )...( 365 ): >ACM1_HUMAN
VKEKKAAR

SEQ ID NO: 6338 - protein, 8 aa, Homo sapiens
  ( 359 )...( 366 ): >ACM1_HUMAN
KEKKAART

SEQ ID NO: 6339 - protein, 8 aa, Homo sapiens
  ( 361 )...( 368 ): >ACM1_HUMAN
KKAARTLS

SEQ ID NO: 6340 - protein, 8 aa, Homo sapiens
  ( 444 )...( 451 ): >ACM1_HUMAN
KIPKRPGS

SEQ ID NO: 6341 - protein, 8 aa, Homo sapiens
  ( 131 )...( 138 ): >ACM2_HUMAN
YPVKRTTK

SEQ ID NO: 6342 - protein, 8 aa, Homo sapiens
  ( 132 )...( 139 ): >ACM2_HUMAN
PVKRTTKM

SEQ ID NO: 6343 - protein, 8 aa, Homo sapiens
  ( 133 )...( 140 ): >ACM2_HUMAN
VKRTTKMA

SEQ ID NO: 6344 - protein, 8 aa, Homo sapiens
  ( 134 )...( 141 ): >ACM2_HUMAN
KRTTKMAG

SEQ ID NO: 6345 - protein, 8 aa, Homo sapiens
  ( 209 )...( 216 ): >ACM2_HUMAN
ISRASKSR

SEQ ID NO: 6346 - protein, 8 aa, Homo sapiens
  ( 210 )...( 217 ): >ACM2_HUMAN
SRASKSRI

SEQ ID NO: 6347 - protein, 8 aa, Homo sapiens
  ( 212 )...( 219 ): >ACM2_HUMAN
ASKSRIKK

SEQ ID NO: 6348 - protein, 8 aa, Homo sapiens
  ( 326 )...( 333 ): >ACM2_HUMAN
RIGTKTPK

SEQ ID NO: 6349 - protein, 8 aa, Homo sapiens
  ( 357 )...( 364 ): >ACM2_HUMAN
KQNIVARK

SEQ ID NO: 6350 - protein, 8 aa, Homo sapiens
  ( 360 )...( 367 ): >ACM2_HUMAN
IVARKIVK

SEQ ID NO: 6351 - protein, 8 aa, Homo sapiens
  ( 361 )...( 368 ): >ACM2_HUMAN
VARKIVKM

SEQ ID NO: 6352 - protein, 8 aa, Homo sapiens
  ( 362 )...( 369 ): >ACM2_HUMAN
ARKIVKMT

SEQ ID NO: 6353 - protein, 8 aa, Homo sapiens
  ( 364 )...( 371 ): >ACM2_HUMAN
KIVKMTKQ

SEQ ID NO: 6354 - protein, 8 aa, Homo sapiens
  ( 367 )...( 374 ): >ACM2_HUMAN
KMTKQPAK

SEQ ID NO: 6355 - protein, 8 aa, Homo sapiens
  ( 368 )...( 375 ): >ACM2_HUMAN
MTKQPAKK

SEQ ID NO: 6356 - protein, 8 aa, Homo sapiens
  ( 369 )...( 376 ): >ACM2_HUMAN
TKQPAKKK

SEQ ID NO: 6357 - protein, 8 aa, Homo sapiens
  ( 383 )...( 390 ): >ACM2_HUMAN
KKVTRTIL

SEQ ID NO: 6358 - protein, 8 aa, Homo sapiens
  ( 94 )...( 101 ): >ACM3_HUMAN
KVNKQLKT

SEQ ID NO: 6359 - protein, 8 aa, Homo sapiens
  ( 175 )...( 182 ): >ACM3_HUMAN
TYRAKRTT

SEQ ID NO: 6360 - protein, 8 aa, Homo sapiens
  ( 180 )...( 187 ): >ACM3_HUMAN
RTTKRAGV

SEQ ID NO: 6361 - protein, 8 aa, Homo sapiens
  ( 463 )...( 470 ): >ACM3_HUMAN
LAKRFALK

SEQ ID NO: 6362 - protein, 8 aa, Homo sapiens
  ( 464 )...( 471 ): >ACM3_HUMAN
AKRFALKT

SEQ ID NO: 6363 - protein, 8 aa, Homo sapiens
  ( 470 )...( 477 ): >ACM3_HUMAN
KTRSQITK

SEQ ID NO: 6364 - protein, 8 aa, Homo sapiens
  ( 471 )...( 478 ): >ACM3_HUMAN
TRSQITKR

SEQ ID NO: 6365 - protein, 8 aa, Homo sapiens
  ( 141 )...( 148 ): >ACM4_HUMAN
PARRTTKM

SEQ ID NO: 6366 - protein, 8 aa, Homo sapiens
  ( 142 )...( 149 ): >ACM4_HUMAN
ARRTTKMA

SEQ ID NO: 6367 - protein, 8 aa, Homo sapiens
  ( 143 )...( 150 ): >ACM4_HUMAN
RRTTKMAG

SEQ ID NO: 6368 - protein, 8 aa, Homo sapiens
  ( 233 )...( 240 ): >ACM4_HUMAN
GPKEKKAK

SEQ ID NO: 6369 - protein, 8 aa, Homo sapiens
  ( 237 )...( 244 ): >ACM4_HUMAN
KKAKTLAF

SEQ ID NO: 6370 - protein, 8 aa, Homo sapiens
  ( 249 )...( 256 ): >ACM4_HUMAN
LMKQSVKK

SEQ ID NO: 6371 - protein, 8 aa, Homo sapiens
  ( 250 )...( 257 ): >ACM4_HUMAN
MKQSVKKP

SEQ ID NO: 6372 - protein, 8 aa, Homo sapiens
  ( 251 )...( 258 ): >ACM4_HUMAN
KQSVKKPP

SEQ ID NO: 6373 - protein, 8 aa, Homo sapiens
  ( 142 )...( 149 ): >ACM5_HUMAN
RTPKRAGI

SEQ ID NO: 6374 - protein, 8 aa, Homo sapiens
  ( 236 )...( 243 ): >ACM5_HUMAN
VTKAEKRK

SEQ ID NO: 6375 - protein, 8 aa, Homo sapiens
  ( 370 )...( 377 ): >ACM5_HUMAN
RPKSQKCV

SEQ ID NO: 6376 - protein, 8 aa, Homo sapiens
  ( 380 )...( 387 ): >ACM5_HUMAN
KFRLVVKA

SEQ ID NO: 6377 - protein, 8 aa, Homo sapiens
  ( 205 )...( 212 ): >ACTR_HUMAN
RKISTLPR

SEQ ID NO: 6378 - protein, 8 aa, Homo sapiens
  ( 71 )...( 78 ): >AG22_HUMAN
CQKGPKKV

SEQ ID NO: 6379 - protein, 8 aa, Homo sapiens
  ( 72 )...( 79 ): >AG22_HUMAN
QKGPKKVS

SEQ ID NO: 6380 - protein, 8 aa, Homo sapiens
  ( 233 )...( 240 ): >AG22_HUMAN
GIRKHLLK

SEQ ID NO: 6381 - protein, 8 aa, Homo sapiens
  ( 234 )...( 241 ): >AG22_HUMAN
IRKHLLKT

SEQ ID NO: 6382 - protein, 8 aa, Homo sapiens
  ( 139 )...( 146 ): >AG2R_HUMAN
RRTMLVAK

SEQ ID NO: 6383 - protein, 8 aa, Homo sapiens
  ( 218 )...( 225 ): >AG2R_HUMAN
IWKALKKA

SEQ ID NO: 6384 - protein, 8 aa, Homo sapiens
  ( 303 )...( 310 ): >AG2R_HUMAN
GFLGKKFK

SEQ ID NO: 6385 - protein, 8 aa, Homo sapiens
  ( 139 )...( 146 ): >AG2S_HUMAN
RRTMLVAK

SEQ ID NO: 6386 - protein, 8 aa, Homo sapiens
  ( 218 )...( 225 ): >AG2S_HUMAN
IWKALKKA

SEQ ID NO: 6387 - protein, 8 aa, Homo sapiens
  ( 303 )...( 310 ): >AG2S_HUMAN
GFLGKKFK

SEQ ID NO: 6388 - protein, 8 aa, Homo sapiens
  ( 24 )...( 31 ): >ARK2_HUMAN
PAARASKR

SEQ ID NO: 6389 - protein, 8 aa, Homo sapiens
  ( 25 )...( 32 ): >ARK2_HUMAN
AARASKRI

SEQ ID NO: 6390 - protein, 8 aa, Homo sapiens
  ( 26 )...( 33 ): >ARK2_HUMAN
ARASKRIV

SEQ ID NO: 6391 - protein, 8 aa, Homo sapiens
  ( 27 )...( 34 ): >ARK2_HUMAN
RASKRIVL

SEQ ID NO: 6392 - protein, 8 aa, Homo sapiens
  ( 541 )...( 548 ): >ARK2_HUMAN
RAKNKQLG

SEQ ID NO: 6393 - protein, 8 aa, Homo sapiens
  ( 617 )...( 624 ): >ARK2_HUMAN
KKCILFRI

SEQ ID NO: 6394 - protein, 8 aa, Homo sapiens
  ( 618 )...( 625 ): >ARK2_HUMAN
KCILFRIK

SEQ ID NO: 6395 - protein, 8 aa, Homo sapiens
  ( 621 )...( 628 ): >ARK2_HUMAN
LFRIKGGK

SEQ ID NO: 6396 - protein, 8 aa, Homo sapiens
  ( 622 )...( 629 ): >ARK2_HUMAN
FRIKGGKQ

SEQ ID NO: 6397 - protein, 8 aa, Homo sapiens
  ( 623 )...( 630 ): >ARK2_HUMAN
RIKGGKQF

SEQ ID NO: 6398 - protein, 8 aa, Homo sapiens
  ( 251 )...( 258 ): >B1AR_HUMAN
AQKQVKKI

SEQ ID NO: 6399 - protein, 8 aa, Homo sapiens
  ( 144 )...( 151 ): >B2AR_HUMAN
LLTKNKAR

SEQ ID NO: 6400 - protein, 8 aa, Homo sapiens
  ( 145 )...( 152 ): >B2AR_HUMAN
LTKNKARV

SEQ ID NO: 6401 - protein, 8 aa, Homo sapiens
  ( 146 )...( 153 ): >B2AR_HUMAN
TKNKARVI

SEQ ID NO: 6402 - protein, 8 aa, Homo sapiens
  ( 147 )...( 154 ): >B2AR_HUMAN
KNKARVII

SEQ ID NO: 6403 - protein, 8 aa, Homo sapiens
  ( 226 )...( 233 ): >B2AR_HUMAN
AKRQLQKI

SEQ ID NO: 6404 - protein, 8 aa, Homo sapiens
  ( 253 )...( 260 ): >B2AR_HUMAN
RTGHGLRR

SEQ ID NO: 6405 - protein, 8 aa, Homo sapiens
  ( 341 )...( 348 ): >B2AR_HUMAN
CLRRSSLK

SEQ ID NO: 6406 - protein, 8 aa, Homo sapiens
  ( 342 )...( 349 ): >B2AR_HUMAN
LRRSSLKA

SEQ ID NO: 6407 - protein, 8 aa, Homo sapiens
  ( 148 )...( 155 ): >B3AR_HUMAN
LVTKRCAR

SEQ ID NO: 6408 - protein, 8 aa, Homo sapiens
  ( 149 )...( 156 ): >B3AR_HUMAN
VTKRCART

SEQ ID NO: 6409 - protein, 8 aa, Homo sapiens
  ( 150 )...( 157 ): >B3AR_HUMAN
TKRCARTA

SEQ ID NO: 6410 - protein, 8 aa, Homo sapiens
  ( 151 )...( 158 ): >B3AR_HUMAN
KRCARTAV

SEQ ID NO: 6411 - protein, 8 aa, Homo sapiens
  ( 1126 )...( 1133 ): >BAI1_HUMAN
KKLKERAG

SEQ ID NO: 6412 - protein, 8 aa, Homo sapiens
  ( 1353 )...( 1360 ): >BAI1_HUMAN
ATLRPKPK

SEQ ID NO: 6413 - protein, 8 aa, Homo sapiens
  ( 371 )...( 378 ): >BAI2_HUMAN
GSRSRMRT

SEQ ID NO: 6414 - protein, 8 aa, Homo sapiens
  ( 429 )...( 436 ): >BAI2_HUMAN
QRSRKCSV

SEQ ID NO: 6415 - protein, 8 aa, Homo sapiens
  ( 430 )...( 437 ): >BAI2_HUMAN
RSRKCSVA

SEQ ID NO: 6416 - protein, 8 aa, Homo sapiens
  ( 1368 )...( 1375 ): >BAI2_HUMAN
GTPRRAAK

SEQ ID NO: 6417 - protein, 8 aa, Homo sapiens
  ( 1369 )...( 1376 ): >BAI2_HUMAN
TPRRAAKT

SEQ ID NO: 6418 - protein, 8 aa, Homo sapiens
  ( 1370 )...( 1377 ): >BAI2_HUMAN
PRRAAKTV

SEQ ID NO: 6419 - protein, 8 aa, Homo sapiens
  ( 1371 )...( 1378 ): >BAI2_HUMAN
RRAAKTVA

SEQ ID NO: 6420 - protein, 8 aa, Homo sapiens
  ( 721 )...( 728 ): >BAI3_HUMAN
PMKGRKGM

SEQ ID NO: 6421 - protein, 8 aa, Homo sapiens
  ( 722 )...( 729 ): >BAI3_HUMAN
MKGRKGMV

SEQ ID NO: 6422 - protein, 8 aa, Homo sapiens
  ( 970 )...( 977 ): >BAI3_HUMAN
VTGKIRTR

SEQ ID NO: 6423 - protein, 8 aa, Homo sapiens
  ( 971 )...( 978 ): >BAI3_HUMAN
TGKIRTRL

SEQ ID NO: 6424 - protein, 8 aa, Homo sapiens
  ( 972 )...( 979 ): >BAI3_HUMAN
GKIRTRLI

SEQ ID NO: 6425 - protein, 8 aa, Homo sapiens
  ( 1056 )...( 1063 ): >BAI3_HUMAN
KKLKHRAG

SEQ ID NO: 6426 - protein, 8 aa, Homo sapiens
  ( 1057 )...( 1064 ): >BAI3_HUMAN
KLKHRAGQ

SEQ ID NO: 6427 - protein, 8 aa, Homo sapiens
  ( 315 )...( 322 ): >BRB1_HUMAN
VGRLFRTK

SEQ ID NO: 6428 - protein, 8 aa, Homo sapiens
  ( 316 )...( 323 ): >BRB1_HUMAN
GRLFRTKV

SEQ ID NO: 6429 - protein, 8 aa, Homo sapiens
  ( 145 )...( 152 ): >BRS3_HUMAN
RYKAVVKP

SEQ ID NO: 6430 - protein, 8 aa, Homo sapiens
  ( 267 )...( 274 ): >BRS3_HUMAN
KRIARTVL

SEQ ID NO: 6431 - protein, 8 aa, Homo sapiens
  ( 224 )...( 231 ): >C3X1_HUMAN
HKKAKAIK

SEQ ID NO: 6432 - protein, 8 aa, Homo sapiens
  ( 225 )...( 232 ): >C3X1_HUMAN
KKAKAIKL

SEQ ID NO: 6433 - protein, 8 aa, Homo sapiens
  ( 226 )...( 233 ): >C3X1_HUMAN
KAKAIKLI

SEQ ID NO: 6434 - protein, 8 aa, Homo sapiens
  ( 233 )...( 240 ): >C5AR_HUMAN
RATRSTKT

SEQ ID NO: 6435 - protein, 8 aa, Homo sapiens
  ( 236 )...( 243 ): >C5AR_HUMAN
RSTKTLKV

SEQ ID NO: 6436 - protein, 8 aa, Homo sapiens
  ( 308 )...( 315 ): >C5AR_HUMAN
QGRLRKSL

SEQ ID NO: 6437 - protein, 8 aa, Homo sapiens
  ( 309 )...( 316 ): >C5AR_HUMAN
GRLRKSLP

SEQ ID NO: 6438 - protein, 8 aa, Homo sapiens
  ( 40 )...( 47 ): >CALR_HUMAN
LYVVGRKK

SEQ ID NO: 6439 - protein, 8 aa, Homo sapiens
  ( 41 )...( 48 ): >CALR_HUMAN
YVVGRKKM

SEQ ID NO: 6440 - protein, 8 aa, Homo sapiens
  ( 42 )...( 49 ): >CALR_HUMAN
VVGRKKMM

SEQ ID NO: 6441 - protein, 8 aa, Homo sapiens
  ( 337 )...( 344 ): >CALR_HUMAN
RVLVTKMR

SEQ ID NO: 6442 - protein, 8 aa, Homo sapiens
  ( 284 )...( 291 ): >CASR_HUMAN
VRRNITGK

SEQ ID NO: 6443 - protein, 8 aa, Homo sapiens
  ( 285 )...( 292 ): >CASR_HUMAN
RRNITGKI

SEQ ID NO: 6444 - protein, 8 aa, Homo sapiens
  ( 896 )...( 903 ): >CASR_HUMAN
RKRSSSLG

SEQ ID NO: 6445 - protein, 8 aa, Homo sapiens
  ( 960 )...( 967 ): >CASR_HUMAN
PRCKQKVI

SEQ ID NO: 6446 - protein, 8 aa, Homo sapiens
  ( 223 )...( 230 ): >CB1R_HUMAN
AYKRIVTR

SEQ ID NO: 6447 - protein, 8 aa, Homo sapiens
  ( 226 )...( 233 ): >CB1R_HUMAN
RIVTRPKA

SEQ ID NO: 6448 - protein, 8 aa, Homo sapiens
  ( 369 )...( 376 ): >CB1R_HUMAN
GKMNKLIK

SEQ ID NO: 6449 - protein, 8 aa, Homo sapiens
  ( 370 )...( 377 ): >CB1R_HUMAN
KMNKLIKT

SEQ ID NO: 6450 - protein, 8 aa, Homo sapiens
  ( 142 )...( 149 ): >CB2R_HUMAN
KALLTRGR

SEQ ID NO: 6451 - protein, 8 aa, Homo sapiens
  ( 317 )...( 324 ): >CB2R_HUMAN
WKKCVRGL

SEQ ID NO: 6452 - protein, 8 aa, Homo sapiens
  ( 64 )...( 71 ): >CCKR_HUMAN
TVLIRNKR

SEQ ID NO: 6453 - protein, 8 aa, Homo sapiens
  ( 303 )...( 310 ): >CCKR_HUMAN
ANLMAKKR

SEQ ID NO: 6454 - protein, 8 aa, Homo sapiens
  ( 304 )...( 311 ): >CCKR_HUMAN
NLMAKKRV

SEQ ID NO: 6455 - protein, 8 aa, Homo sapiens
  ( 305 )...( 312 ): >CCKR_HUMAN
LMAKKRVI

SEQ ID NO: 6456 - protein, 8 aa, Homo sapiens
  ( 231 )...( 238 ): >CCR4_HUMAN
GHQKRKAL

SEQ ID NO: 6457 - protein, 8 aa, Homo sapiens
  ( 234 )...( 241 ): >CCR4_HUMAN
KRKALKTT

SEQ ID NO: 6458 - protein, 8 aa, Homo sapiens
  ( 235 )...( 242 ): >CCR4_HUMAN
RKALKTTV

SEQ ID NO: 6459 - protein, 8 aa, Homo sapiens
  ( 326 )...( 333 ): >CCR4_HUMAN
LKILSKGK

SEQ ID NO: 6460 - protein, 8 aa, Homo sapiens
  ( 328 )...( 335 ): >CCR4_HUMAN
ILSKGKRG

SEQ ID NO: 6461 - protein, 8 aa, Homo sapiens
  ( 142 )...( 149 ): >CCR6_HUMAN
AKRMTWGK

SEQ ID NO: 6462 - protein, 8 aa, Homo sapiens
  ( 143 )...( 150 ): >CCR6_HUMAN
KRMTWGKV

SEQ ID NO: 6463 - protein, 8 aa, Homo sapiens
  ( 675 )...( 682 ): >CD97_HUMAN
SKGYGRPR

SEQ ID NO: 6464 - protein, 8 aa, Homo sapiens
  ( 732 )...( 739 ): >CD97_HUMAN
LKKARALT

SEQ ID NO: 6465 - protein, 8 aa, Homo sapiens
  ( 733 )...( 740 ): >CD97_HUMAN
KKARALTI

SEQ ID NO: 6466 - protein, 8 aa, Homo sapiens
  ( 787 )...( 794 ): >CD97_HUMAN
CLLNKKVR

SEQ ID NO: 6467 - protein, 8 aa, Homo sapiens
  ( 232 )...( 239 ): >CKR1_HUMAN
EKKSKAVR

SEQ ID NO: 6468 - protein, 8 aa, Homo sapiens
  ( 234 )...( 241 ): >CKR1_HUMAN
KSKAVRLI

SEQ ID NO: 6469 - protein, 8 aa, Homo sapiens
  ( 67 )...( 74 ): >CKR2_HUMAN
LINCKKLK

SEQ ID NO: 6470 - protein, 8 aa, Homo sapiens
  ( 226 )...( 233 ): >CKR2_HUMAN
LKTLLRCR

SEQ ID NO: 6471 - protein, 8 aa, Homo sapiens
  ( 337 )...( 344 ): >CKR2_HUMAN
VRPGKNVK

SEQ ID NO: 6472 - protein, 8 aa, Homo sapiens
  ( 338 )...( 345 ): >CKR2_HUMAN
RPGKNVKV

SEQ ID NO: 6473 - protein, 8 aa, Homo sapiens
  ( 226 )...( 233 ): >CKR3_HUMAN
LLRCPSKK

SEQ ID NO: 6474 - protein, 8 aa, Homo sapiens
  ( 234 )...( 241 ): >CKR3_HUMAN
KYKAIRLI

SEQ ID NO: 6475 - protein, 8 aa, Homo sapiens
  ( 236 )...( 243 ): >CKR4_HUMAN
KKNKAVKM

SEQ ID NO: 6476 - protein, 8 aa, Homo sapiens
  ( 237 )...( 244 ): >CKR4_HUMAN
KNKAVKMI

SEQ ID NO: 6477 - protein, 8 aa, Homo sapiens
  ( 55 )...( 62 ): >CKR5_HUMAN
LINCKRLK

SEQ ID NO: 6478 - protein, 8 aa, Homo sapiens
  ( 58 )...( 65 ): >CKR5_HUMAN
CKRLKSMT

SEQ ID NO: 6479 - protein, 8 aa, Homo sapiens
  ( 218 )...( 225 ): >CKR5_HUMAN
LKTLLRCR

SEQ ID NO: 6480 - protein, 8 aa, Homo sapiens
  ( 159 )...( 166 ): >CKR6_HUMAN
RTLPRSKI

SEQ ID NO: 6481 - protein, 8 aa, Homo sapiens
  ( 249 )...( 256 ): >CKR6_HUMAN
RHKAIRVI

SEQ ID NO: 6482 - protein, 8 aa, Homo sapiens
  ( 258 )...( 265 ): >CKR7_HUMAN
RNKAIKVI

SEQ ID NO: 6483 - protein, 8 aa, Homo sapiens
  ( 60 )...( 67 ): >CKR8_HUMAN
LVVCKKLR

SEQ ID NO: 6484 - protein, 8 aa, Homo sapiens
  ( 61 )...( 68 ): >CKR8_HUMAN
VVCKKLRS

SEQ ID NO: 6485 - protein, 8 aa, Homo sapiens
  ( 62 )...( 69 ): >CKR8_HUMAN
VCKKLRSI

SEQ ID NO: 6486 - protein, 8 aa, Homo sapiens
  ( 63 )...( 70 ): >CKR8_HUMAN
CKKLRSIT

SEQ ID NO: 6487 - protein, 8 aa, Homo sapiens
  ( 141 )...( 148 ): >CKR8_HUMAN
ALKVRTIR

SEQ ID NO: 6488 - protein, 8 aa, Homo sapiens
  ( 142 )...( 149 ): >CKR8_HUMAN
LKVRTIRM

SEQ ID NO: 6489 - protein, 8 aa, Homo sapiens
  ( 143 )...( 150 ): >CKR8_HUMAN
KVRTIRMG

SEQ ID NO: 6490 - protein, 8 aa, Homo sapiens
  ( 232 )...( 239 ): >CKR8_HUMAN
NKTKAIRL

SEQ ID NO: 6491 - protein, 8 aa, Homo sapiens
  ( 233 )...( 240 ): >CKR8_HUMAN
KTKAIRLV

SEQ ID NO: 6492 - protein, 8 aa, Homo sapiens
  ( 233 )...( 240 ): >CKRB_HUMAN
IKISRPLK

SEQ ID NO: 6493 - protein, 8 aa, Homo sapiens
  ( 234 )...( 241 ): >CKRB_HUMAN
KISRPLKV

SEQ ID NO: 6494 - protein, 8 aa, Homo sapiens
  ( 313 )...( 320 ): >CKRB_HUMAN
YVMKVAKK

SEQ ID NO: 6495 - protein, 8 aa, Homo sapiens
  ( 314 )...( 321 ): >CKRB_HUMAN
VMKVAKKY

SEQ ID NO: 6496 - protein, 8 aa, Homo sapiens
  ( 315 )...( 322 ): >CKRB_HUMAN
MKVAKKYG

SEQ ID NO: 6497 - protein, 8 aa, Homo sapiens
  ( 316 )...( 323 ): >CKRB_HUMAN
KVAKKYGS

SEQ ID NO: 6498 - protein, 8 aa, Homo sapiens
  ( 134 )...( 141 ): >CLT1_HUMAN
LVTQKKAR

SEQ ID NO: 6499 - protein, 8 aa, Homo sapiens
  ( 135 )...( 142 ): >CLT1_HUMAN
VTQKKARF

SEQ ID NO: 6500 - protein, 8 aa, Homo sapiens
  ( 136 )...( 143 ): >CLT1_HUMAN
TQKKARFV

SEQ ID NO: 6501 - protein, 8 aa, Homo sapiens
  ( 138 )...( 145 ): >CLT1_HUMAN
KKARFVCV

SEQ ID NO: 6502 - protein, 8 aa, Homo sapiens
  ( 216 )...( 223 ): >CLT1_HUMAN
LLKKSMKK

SEQ ID NO: 6503 - protein, 8 aa, Homo sapiens
  ( 317 )...( 324 ): >CLT1_HUMAN
VTYVPRKK

SEQ ID NO: 6504 - protein, 8 aa, Homo sapiens
  ( 318 )...( 325 ): >CLT1_HUMAN
TYVPRKKA

SEQ ID NO: 6505 - protein, 8 aa, Homo sapiens
  ( 320 )...( 327 ): >CLT1_HUMAN
VPRKKASL

SEQ ID NO: 6506 - protein, 8 aa, Homo sapiens
  ( 237 )...( 244 ): >CLT2_HUMAN
GLRVSHRK

SEQ ID NO: 6507 - protein, 8 aa, Homo sapiens
  ( 316 )...( 323 ): >CLT2_HUMAN
LKSALRKG

SEQ ID NO: 6508 - protein, 8 aa, Homo sapiens
  ( 317 )...( 324 ): >CLT2_HUMAN
KSALRKGH

SEQ ID NO: 6509 - protein, 8 aa, Homo sapiens
  ( 326 )...( 333 ): >CLT2_HUMAN
QKAKTKCV

SEQ ID NO: 6510 - protein, 8 aa, Homo sapiens
  ( 327 )...( 334 ): >CLT2_HUMAN
KAKTKCVF

SEQ ID NO: 6511 - protein, 8 aa, Homo sapiens
  ( 64 )...( 71 ): >CML1_HUMAN
IATFKMKK

SEQ ID NO: 6512 - protein, 8 aa, Homo sapiens
  ( 68 )...( 75 ): >CML1_HUMAN
KMKKTVNM

SEQ ID NO: 6513 - protein, 8 aa, Homo sapiens
  ( 252 )...( 259 ): >CML1_HUMAN
LAKTKKPF

SEQ ID NO: 6514 - protein, 8 aa, Homo sapiens
  ( 255 )...( 262 ): >CML1_HUMAN
TKKPFKII

SEQ ID NO: 6515 - protein, 8 aa, Homo sapiens
  ( 321 )...( 328 ): >CRF1_HUMAN
RILMTKLR

SEQ ID NO: 6516 - protein, 8 aa, Homo sapiens
  ( 337 )...( 344 ): >CRF1_HUMAN
QYRKAVKA

SEQ ID NO: 6517 - protein, 8 aa, Homo sapiens
  ( 338 )...( 345 ): >CRF1_HUMAN
YRKAVKAT

SEQ ID NO: 6518 - protein, 8 aa, Homo sapiens
  ( 339 )...( 346 ): >CRF1_HUMAN
RKAVKATL

SEQ ID NO: 6519 - protein, 8 aa, Homo sapiens
  ( 288 )...( 295 ): >CRF2_HUMAN
RILMTKLR

SEQ ID NO: 6520 - protein, 8 aa, Homo sapiens
  ( 304 )...( 311 ): >CRF2_HUMAN
QYRKAVKA

SEQ ID NO: 6521 - protein, 8 aa, Homo sapiens
  ( 305 )...( 312 ): >CRF2_HUMAN
YRKAVKAT

SEQ ID NO: 6522 - protein, 8 aa, Homo sapiens
  ( 306 )...( 313 ): >CRF2_HUMAN
RKAVKATL

SEQ ID NO: 6523 - protein, 8 aa, Homo sapiens
  ( 147 )...( 154 ): >D2DR_HUMAN
SSKRRVTV

SEQ ID NO: 6524 - protein, 8 aa, Homo sapiens
  ( 148 )...( 155 ): >D2DR_HUMAN
SKRRVTVM

SEQ ID NO: 6525 - protein, 8 aa, Homo sapiens
  ( 149 )...( 156 ): >D2DR_HUMAN
KRRVTVMI

SEQ ID NO: 6526 - protein, 8 aa, Homo sapiens
  ( 349 )...( 356 ): >D2DR_HUMAN
GKTRTSLK

SEQ ID NO: 6527 - protein, 8 aa, Homo sapiens
  ( 434 )...( 441 ): >D2DR_HUMAN
RKAFLKIL

SEQ ID NO: 6528 - protein, 8 aa, Homo sapiens
  ( 298 )...( 305 ): >D3DR_HUMAN
VRKLSNGR

SEQ ID NO: 6529 - protein, 8 aa, Homo sapiens
  ( 299 )...( 306 ): >D3DR_HUMAN
RKLSNGRL

SEQ ID NO: 6530 - protein, 8 aa, Homo sapiens
  ( 391 )...( 398 ): >D3DR_HUMAN
RKAFLKIL

SEQ ID NO: 6531 - protein, 8 aa, Homo sapiens
  ( 224 )...( 231 ): >D4DR_HUMAN
VARRAKLH

SEQ ID NO: 6532 - protein, 8 aa, Homo sapiens
  ( 225 )...( 232 ): >D4DR_HUMAN
ARRAKLHG

SEQ ID NO: 6533 - protein, 8 aa, Homo sapiens
  ( 227 )...( 234 ): >D4DR_HUMAN
RAKLHGRA

SEQ ID NO: 6534 - protein, 8 aa, Homo sapiens
  ( 384 )...( 391 ): >D4DR_HUMAN
KITGRERK

SEQ ID NO: 6535 - protein, 8 aa, Homo sapiens
  ( 133 )...( 140 ): >DADR_HUMAN
RKMTPKAA

SEQ ID NO: 6536 - protein, 8 aa, Homo sapiens
  ( 265 )...( 272 ): >DADR_HUMAN
KRETKVLK

SEQ ID NO: 6537 - protein, 8 aa, Homo sapiens
  ( 283 )...( 290 ): >DBDR_HUMAN
SLRASIKK

SEQ ID NO: 6538 - protein, 8 aa, Homo sapiens
  ( 228 )...( 235 ): >DUFF_HUMAN
FGAKGLKK

SEQ ID NO: 6539 - protein, 8 aa, Homo sapiens
  ( 55 )...( 62 ): >EBI2_HUMAN
VIVQNRKK

SEQ ID NO: 6540 - protein, 8 aa, Homo sapiens
  ( 60 )...( 67 ): >EBI2_HUMAN
RKKINSTT

SEQ ID NO: 6541 - protein, 8 aa, Homo sapiens
  ( 221 )...( 228 ): >EBI2_HUMAN
CKLFRTAK

SEQ ID NO: 6542 - protein, 8 aa, Homo sapiens
  ( 226 )...( 233 ): >EDG1_HUMAN
SLVRTRSR

SEQ ID NO: 6543 - protein, 8 aa, Homo sapiens
  ( 238 )...( 245 ): >EDG1_HUMAN
RKNISKAS

SEQ ID NO: 6544 - protein, 8 aa, Homo sapiens
  ( 239 )...( 246 ): >EDG1_HUMAN
KNISKASR

SEQ ID NO: 6545 - protein, 8 aa, Homo sapiens
  ( 336 )...( 343 ): >EDG1_HUMAN
AGKFKRPI

SEQ ID NO: 6546 - protein, 8 aa, Homo sapiens
  ( 337 )...( 344 ): >EDG1_HUMAN
GKFKRPII

SEQ ID NO: 6547 - protein, 8 aa, Homo sapiens
  ( 26 )...( 33 ): >EDG3_HUMAN
GKLAGRLK

SEQ ID NO: 6548 - protein, 8 aa, Homo sapiens
  ( 221 )...( 228 ): >EDG3_HUMAN
LVKSSSRK

SEQ ID NO: 6549 - protein, 8 aa, Homo sapiens
  ( 222 )...( 229 ): >EDG3_HUMAN
VKSSSRKV

SEQ ID NO: 6550 - protein, 8 aa, Homo sapiens
  ( 223 )...( 230 ): >EDG3_HUMAN
KSSSRKVA

SEQ ID NO: 6551 - protein, 8 aa, Homo sapiens
  ( 25 )...( 32 ): >EMR1_HUMAN
TRKPNTKG

SEQ ID NO: 6552 - protein, 8 aa, Homo sapiens
  ( 856 )...( 863 ): >EMR1_HUMAN
KRWITGKT

SEQ ID NO: 6553 - protein, 8 aa, Homo sapiens
  ( 857 )...( 864 ): >EMR1_HUMAN
RWITGKTK

SEQ ID NO: 6554 - protein, 8 aa, Homo sapiens
  ( 324 )...( 331 ): >ET1R_HUMAN
LSRILKKT

SEQ ID NO: 6555 - protein, 8 aa, Homo sapiens
  ( 325 )...( 332 ): >ET1R_HUMAN
SRILKKTV

SEQ ID NO: 6556 - protein, 8 aa, Homo sapiens
  ( 300 )...( 307 ): >ETBR_HUMAN
MLRKKSGM

SEQ ID NO: 6557 - protein, 8 aa, Homo sapiens
  ( 301 )...( 308 ): >ETBR_HUMAN
LRKKSGMQ

SEQ ID NO: 6558 - protein, 8 aa, Homo sapiens
  ( 302 )...( 309 ): >ETBR_HUMAN
RKKSGMQI

SEQ ID NO: 6559 - protein, 8 aa, Homo sapiens
  ( 231 )...( 238 ): >FML1_HUMAN
KGMIKSSR

SEQ ID NO: 6560 - protein, 8 aa, Homo sapiens
  ( 137 )...( 144 ): >FML2_HUMAN
RTMSLAKR

SEQ ID NO: 6561 - protein, 8 aa, Homo sapiens
  ( 137 )...( 144 ): >FMLR_HUMAN
RTVSLAKK

SEQ ID NO: 6562 - protein, 8 aa, Homo sapiens
  ( 57 )...( 64 ): >FSHR_HUMAN
KLRVIQKG

SEQ ID NO: 6563 - protein, 8 aa, Homo sapiens
  ( 568 )...( 575 ): >FSHR_HUMAN
TRIAKRMA

SEQ ID NO: 6564 - protein, 8 aa, Homo sapiens
  ( 423 )...( 430 ): >FZ10_HUMAN
IRRVMKTG

SEQ ID NO: 6565 - protein, 8 aa, Homo sapiens
  ( 424 )...( 431 ): >FZ10_HUMAN
RRVMKTGG

SEQ ID NO: 6566 - protein, 8 aa, Homo sapiens
  ( 533 )...( 540 ): >FZ10_HUMAN
QVCSRRLK

SEQ ID NO: 6567 - protein, 8 aa, Homo sapiens
  ( 543 )...( 550 ): >FZ10_HUMAN
SRRKPASV

SEQ ID NO: 6568 - protein, 8 aa, Homo sapiens
  ( 544 )...( 551 ): >FZ10_HUMAN
RRKPASVI

SEQ ID NO: 6569 - protein, 8 aa, Homo sapiens
  ( 513 )...( 520 ): >FZD3_HUMAN
GRRKKEIV

SEQ ID NO: 6570 - protein, 8 aa, Homo sapiens
  ( 542 )...( 549 ): >FZD3_HUMAN
TPIIRKSR

SEQ ID NO: 6571 - protein, 8 aa, Homo sapiens
  ( 543 )...( 550 ): >FZD3_HUMAN
PIIRKSRG

SEQ ID NO: 6572 - protein, 8 aa, Homo sapiens
  ( 544 )...( 551 ): >FZD3_HUMAN
IIRKSRGT

SEQ ID NO: 6573 - protein, 8 aa, Homo sapiens
  ( 545 )...( 552 ): >FZD3_HUMAN
IRKSRGTS

SEQ ID NO: 6574 - protein, 8 aa, Homo sapiens
  ( 120 )...( 127 ): >FZD4_HUMAN
MCLSVKRR

SEQ ID NO: 6575 - protein, 8 aa, Homo sapiens
  ( 512 )...( 519 ): >FZD4_HUMAN
VNSGKVKR

SEQ ID NO: 6576 - protein, 8 aa, Homo sapiens
  ( 514 )...( 521 ): >FZD4_HUMAN
SGKVKREK

SEQ ID NO: 6577 - protein, 8 aa, Homo sapiens
  ( 521 )...( 528 ): >FZD4_HUMAN
KRGNGWVK

SEQ ID NO: 6578 - protein, 8 aa, Homo sapiens
  ( 428 )...( 435 ): >FZD5_HUMAN
RIRSVIKQ

SEQ ID NO: 6579 - protein, 8 aa, Homo sapiens
  ( 411 )...( 418 ): >FZD6_HUMAN
KKFMIRIG

SEQ ID NO: 6580 - protein, 8 aa, Homo sapiens
  ( 464 )...( 471 ): >FZD6_HUMAN
QAKAKARP

SEQ ID NO: 6581 - protein, 8 aa, Homo sapiens
  ( 509 )...( 516 ): >FZD8_HUMAN
RIRSVIKQ

SEQ ID NO: 6582 - protein, 8 aa, Homo sapiens
  ( 427 )...( 434 ): >FZD9_HUMAN
IRKIMKTG

SEQ ID NO: 6583 - protein, 8 aa, Homo sapiens
  ( 428 )...( 435 ): >FZD9_HUMAN
RKIMKTGG

SEQ ID NO: 6584 - protein, 8 aa, Homo sapiens
  ( 58 )...( 65 ): >GALR_HUMAN
LARSKPGK

SEQ ID NO: 6585 - protein, 8 aa, Homo sapiens
  ( 62 )...( 69 ): >GALR_HUMAN
KPGKPRST

SEQ ID NO: 6586 - protein, 8 aa, Homo sapiens
  ( 232 )...( 239 ): >GALS_HUMAN
RKVTRMIL

SEQ ID NO: 6587 - protein, 8 aa, Homo sapiens
  ( 300 )...( 307 ): >GALS_HUMAN
RKGFRTIC

SEQ ID NO: 6588 - protein, 8 aa, Homo sapiens
  ( 82 )...( 89 ): >GASR_HUMAN
SRRLRTVT

SEQ ID NO: 6589 - protein, 8 aa, Homo sapiens
  ( 322 )...( 329 ): >GASR_HUMAN
QAKLLAKK

SEQ ID NO: 6590 - protein, 8 aa, Homo sapiens
  ( 325 )...( 332 ): >GASR_HUMAN
LLAKKRVV

SEQ ID NO: 6591 - protein, 8 aa, Homo sapiens
  ( 73 )...( 80 ): >GBR1_HUMAN
VVGPKVRK

SEQ ID NO: 6592 - protein, 8 aa, Homo sapiens
  ( 74 )...( 81 ): >GBR1_HUMAN
VGPKVRKC

SEQ ID NO: 6593 - protein, 8 aa, Homo sapiens
  ( 75 )...( 82 ): >GBR1_HUMAN
GPKVRKCL

SEQ ID NO: 6594 - protein, 8 aa, Homo sapiens
  ( 76 )...( 83 ): >GBR1_HUMAN
PKVRKCLA

SEQ ID NO: 6595 - protein, 8 aa, Homo sapiens
  ( 77 )...( 84 ): >GBR1_HUMAN
KVRKCLAN

SEQ ID NO: 6596 - protein, 8 aa, Homo sapiens
  ( 349 )...( 356 ): >GBR1_HUMAN
VPVKNLKR

SEQ ID NO: 6597 - protein, 8 aa, Homo sapiens
  ( 239 )...( 246 ): >GBR2_HUMAN
SVKKLKGN

SEQ ID NO: 6598 - protein, 8 aa, Homo sapiens
  ( 585 )...( 592 ): >GBR2_HUMAN
VKMKKKII

SEQ ID NO: 6599 - protein, 8 aa, Homo sapiens
  ( 150 )...( 157 ): >GHSR_HUMAN
RAKVVVTK

SEQ ID NO: 6600 - protein, 8 aa, Homo sapiens
  ( 155 )...( 162 ): >GHSR_HUMAN
VTKGRVKL

SEQ ID NO: 6601 - protein, 8 aa, Homo sapiens
  ( 156 )...( 163 ): >GHSR_HUMAN
TKGRVKLV

SEQ ID NO: 6602 - protein, 8 aa, Homo sapiens
  ( 157 )...( 164 ): >GHSR_HUMAN
KGRVKLVI

SEQ ID NO: 6603 - protein, 8 aa, Homo sapiens
  ( 327 )...( 334 ): >GHSR_HUMAN
SKKYRVAV

SEQ ID NO: 6604 - protein, 8 aa, Homo sapiens
  ( 345 )...( 352 ): >GHSR_HUMAN
QRKLSTLK

SEQ ID NO: 6605 - protein, 8 aa, Homo sapiens
  ( 321 )...( 328 ): >GIPR_HUMAN
LLSKLRTR

SEQ ID NO: 6606 - protein, 8 aa, Homo sapiens
  ( 345 )...( 352 ): >GLP1_HUMAN
IKCRLAKS

SEQ ID NO: 6607 - protein, 8 aa, Homo sapiens
  ( 346 )...( 353 ): >GLP1_HUMAN
KCRLAKST

SEQ ID NO: 6608 - protein, 8 aa, Homo sapiens
  ( 376 )...( 383 ): >GLP1_HUMAN
RGTLRFIK

SEQ ID NO: 6609 - protein, 8 aa, Homo sapiens
  ( 363 )...( 370 ): >GLP2_HUMAN
KLLISKLK

SEQ ID NO: 6610 - protein, 8 aa, Homo sapiens
  ( 380 )...( 387 ): >GLP2_HUMAN
KYRLAKST

SEQ ID NO: 6611 - protein, 8 aa, Homo sapiens
  ( 474 )...( 481 ): >GLP2_HUMAN
LGKCPKKL

SEQ ID NO: 6612 - protein, 8 aa, Homo sapiens
  ( 344 )...( 351 ): >GLR_HUMAN
KFRLAKST

SEQ ID NO: 6613 - protein, 8 aa, Homo sapiens
  ( 463 )...( 470 ): >GP37_HUMAN
LVTARKIR

SEQ ID NO: 6614 - protein, 8 aa, Homo sapiens
  ( 468 )...( 475 ): >GP37_HUMAN
KIRKAEKA

SEQ ID NO: 6615 - protein, 8 aa, Homo sapiens
  ( 212 )...( 219 ): >GP40_HUMAN
SGLTHRRK

SEQ ID NO: 6616 - protein, 8 aa, Homo sapiens
  ( 213 )...( 220 ): >GP40_HUMAN
GLTHRRKL

SEQ ID NO: 6617 - protein, 8 aa, Homo sapiens
  ( 124 )...( 131 ): >GP41_HUMAN
KTRPRLGQ

SEQ ID NO: 6618 - protein, 8 aa, Homo sapiens
  ( 124 )...( 131 ): >GP42_HUMAN
KTRPRLGQ

SEQ ID NO: 6619 - protein, 8 aa, Homo sapiens
  ( 297 )...( 304 ): >GP43_HUMAN
SLLGRRGK

SEQ ID NO: 6620 - protein, 8 aa, Homo sapiens
  ( 210 )...( 217 ): >GP68_HUMAN
RAVRRSHG

SEQ ID NO: 6621 - protein, 8 aa, Homo sapiens
  ( 178 )...( 185 ): >GP72_HUMAN
KPRISITK

SEQ ID NO: 6622 - protein, 8 aa, Homo sapiens
  ( 258 )...( 265 ): >GP72_HUMAN
AYARVAKK

SEQ ID NO: 6623 - protein, 8 aa, Homo sapiens
  ( 259 )...( 266 ): >GP72_HUMAN
YARVAKKL

SEQ ID NO: 6624 - protein, 8 aa, Homo sapiens
  ( 260 )...( 267 ): >GP72_HUMAN
ARVAKKLW

SEQ ID NO: 6625 - protein, 8 aa, Homo sapiens
  ( 287 )...( 294 ): >GP72_HUMAN
KKKTIKML

SEQ ID NO: 6626 - protein, 8 aa, Homo sapiens
  ( 288 )...( 295 ): >GP72_HUMAN
KKTIKMLM

SEQ ID NO: 6627 - protein, 8 aa, Homo sapiens
  ( 63 )...( 70 ): >GPR1_HUMAN
TGLKWKKT

SEQ ID NO: 6628 - protein, 8 aa, Homo sapiens
  ( 64 )...( 71 ): >GPR1_HUMAN
GLKWKKTV

SEQ ID NO: 6629 - protein, 8 aa, Homo sapiens
  ( 65 )...( 72 ): >GPR1_HUMAN
LKWKKTVT

SEQ ID NO: 6630 - protein, 8 aa, Homo sapiens
  ( 228 )...( 235 ): >GPR1_HUMAN
CLIFKVKK

SEQ ID NO: 6631 - protein, 8 aa, Homo sapiens
  ( 234 )...( 241 ): >GPR1_HUMAN
KKRTVLIS

SEQ ID NO: 6632 - protein, 8 aa, Homo sapiens
  ( 128 )...( 135 ): >GPR4_HUMAN
LRRVKTAV

SEQ ID NO: 6633 - protein, 8 aa, Homo sapiens
  ( 129 )...( 136 ): >GPR4_HUMAN
RRVKTAVA

SEQ ID NO: 6634 - protein, 8 aa, Homo sapiens
  ( 220 )...( 227 ): >GPR4_HUMAN
AKIKRLAL

SEQ ID NO: 6635 - protein, 8 aa, Homo sapiens
  ( 221 )...( 228 ): >GPR4_HUMAN
KIKRLALS

SEQ ID NO: 6636 - protein, 8 aa, Homo sapiens
  ( 330 )...( 337 ): >GPR4_HUMAN
KRNSTAKA

SEQ ID NO: 6637 - protein, 8 aa, Homo sapiens
  ( 64 )...( 71 ): >GPR7_HUMAN
RAPRMKTV

SEQ ID NO: 6638 - protein, 8 aa, Homo sapiens
  ( 240 )...( 247 ): >GPR7_HUMAN
KALERAKK

SEQ ID NO: 6639 - protein, 8 aa, Homo sapiens
  ( 243 )...( 250 ): >GPR7_HUMAN
ERAKKRVT

SEQ ID NO: 6640 - protein, 8 aa, Homo sapiens
  ( 245 )...( 252 ): >GPR7_HUMAN
AKKRVTFL

SEQ ID NO: 6641 - protein, 8 aa, Homo sapiens
  ( 246 )...( 253 ): >GPR7_HUMAN
KKRVTFLV

SEQ ID NO: 6642 - protein, 8 aa, Homo sapiens
  ( 70 )...( 77 ): >GPR8_HUMAN
ILRAPKMK

SEQ ID NO: 6643 - protein, 8 aa, Homo sapiens
  ( 71 )...( 78 ): >GPR8_HUMAN
LRAPKMKT

SEQ ID NO: 6644 - protein, 8 aa, Homo sapiens
  ( 72 )...( 79 ): >GPR8_HUMAN
RAPKMKTV

SEQ ID NO: 6645 - protein, 8 aa, Homo sapiens
  ( 158 )...( 165 ): >GPR8_HUMAN
RTYRGAKV

SEQ ID NO: 6646 - protein, 8 aa, Homo sapiens
  ( 242 )...( 249 ): >GPR8_HUMAN
VRLRSGAK

SEQ ID NO: 6647 - protein, 8 aa, Homo sapiens
  ( 243 )...( 250 ): >GPR8_HUMAN
RLRSGAKA

SEQ ID NO: 6648 - protein, 8 aa, Homo sapiens
  ( 254 )...( 261 ): >GPR8_HUMAN
ARRKVTVL

SEQ ID NO: 6649 - protein, 8 aa, Homo sapiens
  ( 246 )...( 253 ): >GPRA_HUMAN
VRVSVKLR

SEQ ID NO: 6650 - protein, 8 aa, Homo sapiens
  ( 247 )...( 254 ): >GPRA_HUMAN
RVSVKLRN

SEQ ID NO: 6651 - protein, 8 aa, Homo sapiens
  ( 248 )...( 255 ): >GPRA_HUMAN
VSVKLRNR

SEQ ID NO: 6652 - protein, 8 aa, Homo sapiens
  ( 249 )...( 256 ): >GPRA_HUMAN
SVKLRNRV

SEQ ID NO: 6653 - protein, 8 aa, Homo sapiens
  ( 61 )...( 68 ): >GPRF_HUMAN
KPGSRRLI

SEQ ID NO: 6654 - protein, 8 aa, Homo sapiens
  ( 186 )...( 193 ): >GPRF_HUMAN
KKATPIKL

SEQ ID NO: 6655 - protein, 8 aa, Homo sapiens
  ( 235 )...( 242 ): >GPRF_HUMAN
KLKKSIKI

SEQ ID NO: 6656 - protein, 8 aa, Homo sapiens
  ( 236 )...( 243 ): >GPRF_HUMAN
LKKSIKII

SEQ ID NO: 6657 - protein, 8 aa, Homo sapiens
  ( 237 )...( 244 ): >GPRF_HUMAN
KKSIKIIF

SEQ ID NO: 6658 - protein, 7 aa, Homo sapiens
  ( 354 )...( 361 ): >GPRF_HUMAN
RKRSVSL

SEQ ID NO: 6659 - protein, 8 aa, Homo sapiens
  ( 136 )...( 143 ): >GPRH_HUMAN
PVKSLKLR

SEQ ID NO: 6660 - protein, 8 aa, Homo sapiens
  ( 225 )...( 232 ): >GPRH_HUMAN
VEKRLKTK

SEQ ID NO: 6661 - protein, 8 aa, Homo sapiens
  ( 226 )...( 233 ): >GPRH_HUMAN
EKRLKTKA

SEQ ID NO: 6662 - protein, 8 aa, Homo sapiens
  ( 229 )...( 236 ): >GPRH_HUMAN
LKTKAVRM

SEQ ID NO: 6663 - protein, 8 aa, Homo sapiens
  ( 230 )...( 237 ): >GPRH_HUMAN
KTKAVRMI

SEQ ID NO: 6664 - protein, 8 aa, Homo sapiens
  ( 311 )...( 318 ): >GPRH_HUMAN
LLCGKRLK

SEQ ID NO: 6665 - protein, 8 aa, Homo sapiens
  ( 312 )...( 319 ): >GPRH_HUMAN
LCGKRLKG

SEQ ID NO: 6666 - protein, 8 aa, Homo sapiens
  ( 314 )...( 321 ): >GPRH_HUMAN
GKRLKGPP

SEQ ID NO: 6667 - protein, 8 aa, Homo sapiens
  ( 47 )...( 54 ): >GPRI_HUMAN
FSCTTKKR

SEQ ID NO: 6668 - protein, 8 aa, Homo sapiens
  ( 52 )...( 59 ): >GPRI_HUMAN
KKRTTVTI

SEQ ID NO: 6669 - protein, 8 aa, Homo sapiens
  ( 217 )...( 224 ): >GPRI_HUMAN
GRTSKLKP

SEQ ID NO: 6670 - protein, 8 aa, Homo sapiens
  ( 220 )...( 227 ): >GPRI_HUMAN
SKLKPKVK

SEQ ID NO: 6671 - protein, 8 aa, Homo sapiens
  ( 225 )...( 232 ): >GPRI_HUMAN
KVKEKSIR

SEQ ID NO: 6672 - protein, 8 aa, Homo sapiens
  ( 174 )...( 181 ): >GPRJ_HUMAN
KVSREKAK

SEQ ID NO: 6673 - protein, 8 aa, Homo sapiens
  ( 175 )...( 182 ): >GPRJ_HUMAN
VSREKAKK

SEQ ID NO: 6674 - protein, 8 aa, Homo sapiens
  ( 179 )...( 186 ): >GPRJ_HUMAN
KAKKMIAA

SEQ ID NO: 6675 - protein, 8 aa, Homo sapiens
  ( 266 )...( 273 ): >GPRJ_HUMAN
IVPRTKVK

SEQ ID NO: 6676 - protein, 8 aa, Homo sapiens
  ( 267 )...( 274 ): >GPRJ_HUMAN
VPRTKVKT

SEQ ID NO: 6677 - protein, 8 aa, Homo sapiens
  ( 268 )...( 275 ): >GPRJ_HUMAN
PRTKVKTI

SEQ ID NO: 6678 - protein, 8 aa, Homo sapiens
  ( 271 )...( 278 ): >GPRJ_HUMAN
KVKTIKMF

SEQ ID NO: 6679 - protein, 8 aa, Homo sapiens
  ( 362 )...( 369 ): >GPRJ_HUMAN
TSSRMAKK

SEQ ID NO: 6680 - protein, 8 aa, Homo sapiens
  ( 80 )...( 87 ): >GPRK_HUMAN
CRTRAKTP

SEQ ID NO: 6681 - protein, 8 aa, Homo sapiens
  ( 81 )...( 88 ): >GPRK_HUMAN
RTRAKTPS

SEQ ID NO: 6682 - protein, 8 aa, Homo sapiens
  ( 312 )...( 319 ): >GPRL_HUMAN
QRGLKRLS

SEQ ID NO: 6683 - protein, 8 aa, Homo sapiens
  ( 313 )...( 320 ): >GPRL_HUMAN
RGLKRLSG

SEQ ID NO: 6684 - protein, 8 aa, Homo sapiens
  ( 245 )...( 252 ): >GPRM_HUMAN
RFSTGQKK

SEQ ID NO: 6685 - protein, 8 aa, Homo sapiens
  ( 254 )...( 261 ): >GPRM_HUMAN
ARKKKTIS

SEQ ID NO: 6686 - protein, 8 aa, Homo sapiens
  ( 255 )...( 262 ): >GPRM_HUMAN
RKKKTISL

SEQ ID NO: 6687 - protein, 8 aa, Homo sapiens
  ( 375 )...( 382 ): >GPRM_HUMAN
QKVLKSKM

SEQ ID NO: 6688 - protein, 8 aa, Homo sapiens
  ( 376 )...( 383 ): >GPRM_HUMAN
KVLKSKMK

SEQ ID NO: 6689 - protein, 8 aa, Homo sapiens
  ( 377 )...( 384 ): >GPRM_HUMAN
VLKSKMKK

SEQ ID NO: 6690 - protein, 8 aa, Homo sapiens
  ( 382 )...( 389 ): >GPRM_HUMAN
MKKRVVSI

SEQ ID NO: 6691 - protein, 8 aa, Homo sapiens
  ( 383 )...( 390 ): >GPRM_HUMAN
KKRVVSIV

SEQ ID NO: 6692 - protein, 8 aa, Homo sapiens
  ( 56 )...( 63 ): >GPRO_HUMAN
RMSVLRAK

SEQ ID NO: 6693 - protein, 8 aa, Homo sapiens
  ( 112 )...( 119 ): >GPRO_HUMAN
FAVVKKSK

SEQ ID NO: 6694 - protein, 8 aa, Homo sapiens
  ( 113 )...( 120 ): >GPRO_HUMAN
AVVKKSKL

SEQ ID NO: 6695 - protein, 8 aa, Homo sapiens
  ( 300 )...( 307 ): >GPRO_HUMAN
TKRVTRTA

SEQ ID NO: 6696 - protein, 8 aa, Homo sapiens
  ( 301 )...( 308 ): >GPRO_HUMAN
KRVTRTAI

SEQ ID NO: 6697 - protein, 8 aa, Homo sapiens
  ( 368 )...( 375 ): >GPRO_HUMAN
RKRLVLSV

SEQ ID NO: 6698 - protein, 8 aa, Homo sapiens
  ( 369 )...( 376 ): >GPRO_HUMAN
KRLVLSVK

SEQ ID NO: 6699 - protein, 8 aa, Homo sapiens
  ( 162 )...( 169 ): >GPRY_HUMAN
QRKAITTK

SEQ ID NO: 6700 - protein, 8 aa, Homo sapiens
  ( 163 )...( 170 ): >GPRY_HUMAN
RKAITTKQ

SEQ ID NO: 6701 - protein, 8 aa, Homo sapiens
  ( 240 )...( 247 ): >GPRY_HUMAN
KIGKNLLR

SEQ ID NO: 6702 - protein, 8 aa, Homo sapiens
  ( 211 )...( 218 ): >GPRZ_HUMAN
ATRKAARM

SEQ ID NO: 6703 - protein, 8 aa, Homo sapiens
  ( 212 )...( 219 ): >GPRZ_HUMAN
TRKAARMV

SEQ ID NO: 6704 - protein, 8 aa, Homo sapiens
  ( 292 )...( 299 ): >GPRZ_HUMAN
APRAKAHK

SEQ ID NO: 6705 - protein, 8 aa, Homo sapiens
  ( 66 )...( 73 ): >GRHR_HUMAN
KKEKGKKL

SEQ ID NO: 6706 - protein, 8 aa, Homo sapiens
  ( 68 )...( 75 ): >GRHR_HUMAN
EKGKKLSR

SEQ ID NO: 6707 - protein, 8 aa, Homo sapiens
  ( 72 )...( 79 ): >GRHR_HUMAN
KLSRMKLL

SEQ ID NO: 6708 - protein, 8 aa, Homo sapiens
  ( 74 )...( 81 ): >GRHR_HUMAN
SRMKLLLK

SEQ ID NO: 6709 - protein, 8 aa, Homo sapiens
  ( 258 )...( 265 ): >GRHR_HUMAN
IPRARLKT

SEQ ID NO: 6710 - protein, 8 aa, Homo sapiens
  ( 259 )...( 266 ): >GRHR_HUMAN
PRARLKTL

SEQ ID NO: 6711 - protein, 8 aa, Homo sapiens
  ( 261 )...( 268 ): >GRHR_HUMAN
ARLKTLKM

SEQ ID NO: 6712 - protein, 8 aa, Homo sapiens
  ( 262 )...( 269 ): >GRHR_HUMAN
RLKTLKMT

SEQ ID NO: 6713 - protein, 8 aa, Homo sapiens
  ( 260 )...( 267 ): >GRPR_HUMAN
KRLAKTVL

SEQ ID NO: 6714 - protein, 8 aa, Homo sapiens
  ( 260 )...( 267 ): >H963_HUMAN
RISLFKAK

SEQ ID NO: 6715 - protein, 8 aa, Homo sapiens
  ( 289 )...( 296 ): >H963_HUMAN
SKAFRSKV

SEQ ID NO: 6716 - protein, 8 aa, Homo sapiens
  ( 290 )...( 297 ): >H963_HUMAN
KAFRSKVT

SEQ ID NO: 6717 - protein, 8 aa, Homo sapiens
  ( 139 )...( 146 ): >HH1R_HUMAN
RTKTRASA

SEQ ID NO: 6718 - protein, 8 aa, Homo sapiens
  ( 211 )...( 218 ): >HH1R_HUMAN
AKIYKAVR

SEQ ID NO: 6719 - protein, 8 aa, Homo sapiens
  ( 261 )...( 268 ): >HH1R_HUMAN
KRKPKDAG

SEQ ID NO: 6720 - protein, 8 aa, Homo sapiens
  ( 371 )...( 378 ): >HH1R_HUMAN
PGKGKLRS

SEQ ID NO: 6721 - protein, 8 aa, Homo sapiens
  ( 411 )...( 418 ): >HH1R_HUMAN
RKAAKQLG

SEQ ID NO: 6722 - protein, 8 aa, Homo sapiens
  ( 317 )...( 324 ): >HH3R_HUMAN
PRSLKRGS

SEQ ID NO: 6723 - protein, 8 aa, Homo sapiens
  ( 319 )...( 326 ): >HH3R_HUMAN
SLKRGSKP

SEQ ID NO: 6724 - protein, 8 aa, Homo sapiens
  ( 320 )...( 327 ): >HH3R_HUMAN
LKRGSKPS

SEQ ID NO: 6725 - protein, 8 aa, Homo sapiens
  ( 354 )...( 361 ): >HH3R_HUMAN
RKVAKSLA

SEQ ID NO: 6726 - protein, 8 aa, Homo sapiens
  ( 298 )...( 305 ): >HH4R_HUMAN
ARRLAKSL

SEQ ID NO: 6727 - protein, 8 aa, Homo sapiens
  ( 299 )...( 306 ): >HH4R_HUMAN
RRLAKSLA

SEQ ID NO: 6728 - protein, 8 aa, Homo sapiens
  ( 370 )...( 377 ): >HH4R_HUMAN
LKIFCIKK

SEQ ID NO: 6729 - protein, 8 aa, Homo sapiens
  ( 371 )...( 378 ): >HH4R_HUMAN
KIFCIKKQ

SEQ ID NO: 6730 - protein, 8 aa, Homo sapiens
  ( 163 )...( 170 ): >HM74_HUMAN
LKKKLLIQ

SEQ ID NO: 6731 - protein, 8 aa, Homo sapiens
  ( 223 )...( 230 ): >HM74_HUMAN
HAKIKRAI

SEQ ID NO: 6732 - protein, 8 aa, Homo sapiens
  ( 224 )...( 231 ): >HM74_HUMAN
AKIKRAIT

SEQ ID NO: 6733 - protein, 8 aa, Homo sapiens
  ( 225 )...( 232 ): >HM74_HUMAN
KIKRAITF

SEQ ID NO: 6734 - protein, 8 aa, Homo sapiens
  ( 208 )...( 215 ): >KI01_HUMAN
AITKKIFK

SEQ ID NO: 6735 - protein, 8 aa, Homo sapiens
  ( 222 )...( 229 ): >KI01_HUMAN
RNSTSVKK

SEQ ID NO: 6736 - protein, 8 aa, Homo sapiens
  ( 226 )...( 233 ): >KI01_HUMAN
SVKKKSSR

SEQ ID NO: 6737 - protein, 8 aa, Homo sapiens
  ( 322 )...( 329 ): >KI01_HUMAN
ISRIKRGN

SEQ ID NO: 6738 - protein, 8 aa, Homo sapiens
  ( 323 )...( 330 ): >KI01_HUMAN
SRIKRGNT

SEQ ID NO: 6739 - protein, 8 aa, Homo sapiens
  ( 324 )...( 331 ): >KI01_HUMAN
RIKRGNTT

SEQ ID NO: 6740 - protein, 8 aa, Homo sapiens
  ( 255 )...( 262 ): >LSHR_HUMAN
SLKKLPSR

SEQ ID NO: 6741 - protein, 8 aa, Homo sapiens
  ( 307 )...( 314 ): >LSHR_HUMAN
TVRKVSNK

SEQ ID NO: 6742 - protein, 8 aa, Homo sapiens
  ( 308 )...( 315 ): >LSHR_HUMAN
VRKVSNKT

SEQ ID NO: 6743 - protein, 8 aa, Homo sapiens
  ( 309 )...( 316 ): >LSHR_HUMAN
RKVSNKTL

SEQ ID NO: 6744 - protein, 8 aa, Homo sapiens
  ( 565 )...( 572 ): >LSHR_HUMAN
TKIAKKMA

SEQ ID NO: 6745 - protein, 8 aa, Homo sapiens
  ( 566 )...( 573 ): >LSHR_HUMAN
KIAKKMAI

SEQ ID NO: 6746 - protein, 8 aa, Homo sapiens
  ( 210 )...( 217 ): >MAS_HUMAN
LVVKIRKN

SEQ ID NO: 6747 - protein, 8 aa, Homo sapiens
  ( 211 )...( 218 ): >MAS_HUMAN
VVKIRKNT

SEQ ID NO: 6748 - protein, 8 aa, Homo sapiens
  ( 283 )...( 290 ): >MAS_HUMAN
VGSSKKKR

SEQ ID NO: 6749 - protein, 8 aa, Homo sapiens
  ( 251 )...( 258 ): >MC3R_HUMAN
ARLHVKRI

SEQ ID NO: 6750 - protein, 8 aa, Homo sapiens
  ( 252 )...( 259 ): >MC3R_HUMAN
RLHVKRIA

SEQ ID NO: 6751 - protein, 8 aa, Homo sapiens
  ( 211 )...( 218 ): >MC5R_HUMAN
LARTHVKR

SEQ ID NO: 6752 - protein, 8 aa, Homo sapiens
  ( 212 )...( 219 ): >MC5R_HUMAN
ARTHVKRI

SEQ ID NO: 6753 - protein, 8 aa, Homo sapiens
  ( 213 )...( 220 ): >MC5R_HUMAN
RTHVKRIA

SEQ ID NO: 6754 - protein, 8 aa, Homo sapiens
  ( 20 )...( 27 ): >MGR1_HUMAN
PRSPGRKV

SEQ ID NO: 6755 - protein, 8 aa, Homo sapiens
  ( 21 )...( 28 ): >MGR1_HUMAN
RSPGRKVL

SEQ ID NO: 6756 - protein, 8 aa, Homo sapiens
  ( 147 )...( 154 ): >MGR1_HUMAN
LPPGRTKK

SEQ ID NO: 6757 - protein, 8 aa, Homo sapiens
  ( 149 )...( 156 ): >MGR1_HUMAN
PGRTKKPI

SEQ ID NO: 6758 - protein, 8 aa, Homo sapiens
  ( 150 )...( 157 ): >MGR1_HUMAN
GRTKKPIA

SEQ ID NO: 6759 - protein, 8 aa, Homo sapiens
  ( 151 )...( 158 ): >MGR1_HUMAN
RTKKPIAG

SEQ ID NO: 6760 - protein, 8 aa, Homo sapiens
  ( 530 )...( 537 ): >MGR1_HUMAN
KGQIKVIR

SEQ ID NO: 6761 - protein, 8 aa, Homo sapiens
  ( 531 )...( 538 ): >MGR1_HUMAN
GQIKVIRK

SEQ ID NO: 6762 - protein, 8 aa, Homo sapiens
  ( 532 )...( 539 ): >MGR1_HUMAN
QIKVIRKG

SEQ ID NO: 6763 - protein, 8 aa, Homo sapiens
  ( 677 )...( 684 ): >MGR1_HUMAN
TKTNRIAR

SEQ ID NO: 6764 - protein, 8 aa, Homo sapiens
  ( 678 )...( 685 ): >MGR1_HUMAN
KTNRIARI

SEQ ID NO: 6765 - protein, 8 aa, Homo sapiens
  ( 684 )...( 691 ): >MGR1_HUMAN
RILAGSKK

SEQ ID NO: 6766 - protein, 8 aa, Homo sapiens
  ( 685 )...( 692 ): >MGR1_HUMAN
ILAGSKKK

SEQ ID NO: 6767 - protein, 8 aa, Homo sapiens
  ( 686 )...( 693 ): >MGR1_HUMAN
LAGSKKKI

SEQ ID NO: 6768 - protein, 8 aa, Homo sapiens
  ( 689 )...( 696 ): >MGR1_HUMAN
SKKKICTR

SEQ ID NO: 6769 - protein, 8 aa, Homo sapiens
  ( 240 )...( 247 ): >MGR2_HUMAN
KVGRAMSR

SEQ ID NO: 6770 - protein, 8 aa, Homo sapiens
  ( 652 )...( 659 ): >MGR2_HUMAN
TKTNRIAR

SEQ ID NO: 6771 - protein, 8 aa, Homo sapiens
  ( 653 )...( 660 ): >MGR2_HUMAN
KTNRIARI

SEQ ID NO: 6772 - protein, 8 aa, Homo sapiens
  ( 244 )...( 251 ): >MGR3_HUMAN
KVGRSNIR

SEQ ID NO: 6773 - protein, 8 aa, Homo sapiens
  ( 245 )...( 252 ): >MGR3_HUMAN
VGRSNIRK

SEQ ID NO: 6774 - protein, 8 aa, Homo sapiens
  ( 246 )...( 253 ): >MGR3_HUMAN
GRSNIRKS

SEQ ID NO: 6775 - protein, 8 aa, Homo sapiens
  ( 336 )...( 343 ): >MGR4_HUMAN
PKRMSVRG

SEQ ID NO: 6776 - protein, 8 aa, Homo sapiens
  ( 337 )...( 344 ): >MGR4_HUMAN
KRMSVRGF

SEQ ID NO: 6777 - protein, 8 aa, Homo sapiens
  ( 375 )...( 382 ): >MGR4_HUMAN
SRHALKKG

SEQ ID NO: 6778 - protein, 8 aa, Homo sapiens
  ( 376 )...( 383 ): >MGR4_HUMAN
RHALKKGS

SEQ ID NO: 6779 - protein, 8 aa, Homo sapiens
  ( 380 )...( 387 ): >MGR4_HUMAN
KKGSHVKK

SEQ ID NO: 6780 - protein, 8 aa, Homo sapiens
  ( 527 )...( 534 ): >MGR4_HUMAN
GERKKTVK

SEQ ID NO: 6781 - protein, 8 aa, Homo sapiens
  ( 528 )...( 535 ): >MGR4_HUMAN
ERKKTVKG

SEQ ID NO: 6782 - protein, 8 aa, Homo sapiens
  ( 530 )...( 537 ): >MGR4_HUMAN
KKTVKGMP

SEQ ID NO: 6783 - protein, 8 aa, Homo sapiens
  ( 685 )...( 692 ): >MGR4_HUMAN
KRSVSAPR

SEQ ID NO: 6784 - protein, 8 aa, Homo sapiens
  ( 857 )...( 864 ): >MGR4_HUMAN
KRSLKAVV

SEQ ID NO: 6785 - protein, 8 aa, Homo sapiens
  ( 138 )...( 145 ): >MGR5_HUMAN
RSKKPIVG

SEQ ID NO: 6786 - protein, 8 aa, Homo sapiens
  ( 517 )...( 524 ): >MGR5_HUMAN
KGQIKVIR

SEQ ID NO: 6787 - protein, 8 aa, Homo sapiens
  ( 518 )...( 525 ): >MGR5_HUMAN
GQIKVIRK

SEQ ID NO: 6788 - protein, 8 aa, Homo sapiens
  ( 519 )...( 526 ): >MGR5_HUMAN
QIKVIRKG

SEQ ID NO: 6789 - protein, 8 aa, Homo sapiens
  ( 664 )...( 671 ): >MGR5_HUMAN
TKTNRIAR

SEQ ID NO: 6790 - protein, 8 aa, Homo sapiens
  ( 665 )...( 672 ): >MGR5_HUMAN
KTNRIARI

SEQ ID NO: 6791 - protein, 8 aa, Homo sapiens
  ( 671 )...( 678 ): >MGR5_HUMAN
RILAGSKK

SEQ ID NO: 6792 - protein, 8 aa, Homo sapiens
  ( 672 )...( 679 ): >MGR5_HUMAN
ILAGSKKK

SEQ ID NO: 6793 - protein, 8 aa, Homo sapiens
  ( 673 )...( 680 ): >MGR5_HUMAN
LAGSKKKI

SEQ ID NO: 6794 - protein, 8 aa, Homo sapiens
  ( 676 )...( 683 ): >MGR5_HUMAN
SKKKICTK

SEQ ID NO: 6795 - protein, 8 aa, Homo sapiens
  ( 678 )...( 685 ): >MGR5_HUMAN
KKICTKKP

SEQ ID NO: 6796 - protein, 8 aa, Homo sapiens
  ( 866 )...( 873 ): >MGR5_HUMAN
WKRRGSSG

SEQ ID NO: 6797 - protein, 8 aa, Homo sapiens
  ( 261 )...( 268 ): >MGR6_HUMAN
SKVIRRLM

SEQ ID NO: 6798 - protein, 8 aa, Homo sapiens
  ( 525 )...( 532 ): >MGR6_HUMAN
GERKKMVK

SEQ ID NO: 6799 - protein, 8 aa, Homo sapiens
  ( 526 )...( 533 ): >MGR6_HUMAN
ERKKMVKG

SEQ ID NO: 6800 - protein, 8 aa, Homo sapiens
  ( 528 )...( 535 ): >MGR6_HUMAN
KKMVKGVP

SEQ ID NO: 6801 - protein, 8 aa, Homo sapiens
  ( 855 )...( 862 ): >MGR6_HUMAN
KRSLKATS

SEQ ID NO: 6802 - protein, 8 aa, Homo sapiens
  ( 444 )...( 451 ): >MGR7_HUMAN
GGKKLLKY

SEQ ID NO: 6803 - protein, 8 aa, Homo sapiens
  ( 445 )...( 452 ): >MGR7_HUMAN
GKKLLKYI

SEQ ID NO: 6804 - protein, 8 aa, Homo sapiens
  ( 529 )...( 536 ): >MGR7_HUMAN
PGQRKKTQ

SEQ ID NO: 6805 - protein, 8 aa, Homo sapiens
  ( 688 )...( 695 ): >MGR7_HUMAN
KKSVTAPR

SEQ ID NO: 6806 - protein, 8 aa, Homo sapiens
  ( 860 )...( 867 ): >MGR7_HUMAN
KRSFKAVV

SEQ ID NO: 6807 - protein, 8 aa, Homo sapiens
  ( 901 )...( 908 ): >MGR7_HUMAN
PAAKKKYV

SEQ ID NO: 6808 - protein, 8 aa, Homo sapiens
  ( 902 )...( 909 ): >MGR7_HUMAN
AAKKKYVS

SEQ ID NO: 6809 - protein, 8 aa, Homo sapiens
  ( 370 )...( 377 ): >MGR8_HUMAN
KLGSHGKR

SEQ ID NO: 6810 - protein, 8 aa, Homo sapiens
  ( 520 )...( 527 ): >MGR8_HUMAN
CKPGERKK

SEQ ID NO: 6811 - protein, 8 aa, Homo sapiens
  ( 521 )...( 528 ): >MGR8_HUMAN
KPGERKKT

SEQ ID NO: 6812 - protein, 8 aa, Homo sapiens
  ( 523 )...( 530 ): >MGR8_HUMAN
GERKKTVK

SEQ ID NO: 6813 - protein, 8 aa, Homo sapiens
  ( 524 )...( 531 ): >MGR8_HUMAN
ERKKTVKG

SEQ ID NO: 6814 - protein, 8 aa, Homo sapiens
  ( 526 )...( 533 ): >MGR8_HUMAN
KKTVKGVP

SEQ ID NO: 6815 - protein, 8 aa, Homo sapiens
  ( 735 )...( 742 ): >MGR8_HUMAN
KARGVLKC

SEQ ID NO: 6816 - protein, 8 aa, Homo sapiens
  ( 853 )...( 860 ): >MGR8_HUMAN
KRSFKAVV

SEQ ID NO: 6817 - protein, 8 aa, Homo sapiens
  ( 55 )...( 62 ): >ML1A_HUMAN
NKKLRNAG

SEQ ID NO: 6818 - protein, 8 aa, Homo sapiens
  ( 56 )...( 63 ): >ML1A_HUMAN
KKLRNAGN

SEQ ID NO: 6819 - protein, 8 aa, Homo sapiens
  ( 51 )...( 58 ): >ML1X_HUMAN
LAVTKNKK

SEQ ID NO: 6820 - protein, 8 aa, Homo sapiens
  ( 52 )...( 59 ): >ML1X_HUMAN
AVTKNKKL

SEQ ID NO: 6821 - protein, 8 aa, Homo sapiens
  ( 316 )...( 323 ): >MRG_HUMAN
FVGSLRKK

SEQ ID NO: 6822 - protein, 8 aa, Homo sapiens
  ( 343 )...( 350 ): >MRG_HUMAN
VGRNKKAA

SEQ ID NO: 6823 - protein, 8 aa, Homo sapiens
  ( 345 )...( 352 ): >MRG_HUMAN
RNKKAAGI

SEQ ID NO: 6824 - protein, 8 aa, Homo sapiens
  ( 220 )...( 227 ): >MSHR_HUMAN
GIARLHKR

SEQ ID NO: 6825 - protein, 8 aa, Homo sapiens
  ( 358 )...( 365 ): >MTLR_HUMAN
ISKKYRAA

SEQ ID NO: 6826 - protein, 8 aa, Homo sapiens
  ( 359 )...( 366 ): >MTLR_HUMAN
SKKYRAAA

SEQ ID NO: 6827 - protein, 8 aa, Homo sapiens
  ( 368 )...( 375 ): >MTLR_HUMAN
KLLLARKS

SEQ ID NO: 6828 - protein, 8 aa, Homo sapiens
  ( 369 )...( 376 ): >MTLR_HUMAN
LLLARKSR

SEQ ID NO: 6829 - protein, 8 aa, Homo sapiens
  ( 152 )...( 159 ): >NFF1_HUMAN
KLTLRKAL

SEQ ID NO: 6830 - protein, 8 aa, Homo sapiens
  ( 210 )...( 217 ): >NFF1_HUMAN
KGMRRVYT

SEQ ID NO: 6831 - protein, 8 aa, Homo sapiens
  ( 253 )...( 260 ): >NFF2_HUMAN
FKPKLTIK

SEQ ID NO: 6832 - protein, 8 aa, Homo sapiens
  ( 371 )...( 378 ): >NFF2_HUMAN
KQKIIKML

SEQ ID NO: 6833 - protein, 8 aa, Homo sapiens
  ( 453 )...( 460 ): >NFF2_HUMAN
QLCQKRAK

SEQ ID NO: 6834 - protein, 8 aa, Homo sapiens
  ( 454 )...( 461 ): >NFF2_HUMAN
LCQKRAKP

SEQ ID NO: 6835 - protein, 8 aa, Homo sapiens
  ( 239 )...( 246 ): >NK1R_HUMAN
QVSAKRKV

SEQ ID NO: 6836 - protein, 8 aa, Homo sapiens
  ( 240 )...( 247 ): >NK1R_HUMAN
VSAKRKVV

SEQ ID NO: 6837 - protein, 8 aa, Homo sapiens
  ( 244 )...( 251 ): >NK1R_HUMAN
RKVVKMMI

SEQ ID NO: 6838 - protein, 8 aa, Homo sapiens
  ( 242 )...( 249 ): >NK2R_HUMAN
LQAKKKFV

SEQ ID NO: 6839 - protein, 8 aa, Homo sapiens
  ( 244 )...( 251 ): >NK2R_HUMAN
AKKKFVKT

SEQ ID NO: 6840 - protein, 8 aa, Homo sapiens
  ( 246 )...( 253 ): >NK2R_HUMAN
KKFVKTMV

SEQ ID NO: 6841 - protein, 8 aa, Homo sapiens
  ( 223 )...( 230 ): >NK3R_HUMAN
KTKVMPGR

SEQ ID NO: 6842 - protein, 8 aa, Homo sapiens
  ( 295 )...( 302 ): >NK3R_HUMAN
RKVVKMMI

SEQ ID NO: 6843 - protein, 8 aa, Homo sapiens
  ( 198 )...( 205 ): >NK4R_HUMAN
KIKVMPGR

SEQ ID NO: 6844 - protein, 8 aa, Homo sapiens
  ( 270 )...( 277 ): >NK4R_HUMAN
RKVVKMMI

SEQ ID NO: 6845 - protein, 8 aa, Homo sapiens
  ( 262 )...( 269 ): >NMBR_HUMAN
KRLAKIVL

SEQ ID NO: 6846 - protein, 8 aa, Homo sapiens
  ( 85 )...( 92 ): >NTR1_HUMAN
AFTLARKK

SEQ ID NO: 6847 - protein, 8 aa, Homo sapiens
  ( 86 )...( 93 ): >NTR1_HUMAN
FTLARKKS

SEQ ID NO: 6848 - protein, 8 aa, Homo sapiens
  ( 87 )...( 94 ): >NTR1_HUMAN
TLARKKSL

SEQ ID NO: 6849 - protein, 8 aa, Homo sapiens
  ( 88 )...( 95 ): >NTR1_HUMAN
LARKKSLQ

SEQ ID NO: 6850 - protein, 8 aa, Homo sapiens
  ( 89 )...( 96 ): >NTR1_HUMAN
ARKKSLQS

SEQ ID NO: 6851 - protein, 8 aa, Homo sapiens
  ( 175 )...( 182 ): >NTR1_HUMAN
KAKTLMSR

SEQ ID NO: 6852 - protein, 8 aa, Homo sapiens
  ( 184 )...( 191 ): >NTR1_HUMAN
RTKKFISA

SEQ ID NO: 6853 - protein, 8 aa, Homo sapiens
  ( 158 )...( 165 ): >NY2R_HUMAN
SKISKRIS

SEQ ID NO: 6854 - protein, 8 aa, Homo sapiens
  ( 263 )...( 270 ): >NY2R_HUMAN
RQKTTKML

SEQ ID NO: 6855 - protein, 8 aa, Homo sapiens
  ( 355 )...( 362 ): >NY2R_HUMAN
VTFKAKKN

SEQ ID NO: 6856 - protein, 8 aa, Homo sapiens
  ( 73 )...( 80 ): >NY5R_HUMAN
LMALMKKR

SEQ ID NO: 6857 - protein, 8 aa, Homo sapiens
  ( 79 )...( 86 ): >NY5R_HUMAN
KRNQKTTV

SEQ ID NO: 6858 - protein, 8 aa, Homo sapiens
  ( 273 )...( 280 ): >NY5R_HUMAN
KKSGPQVK

SEQ ID NO: 6859 - protein, 8 aa, Homo sapiens
  ( 360 )...( 367 ): >NY5R_HUMAN
LRVKRSVT

SEQ ID NO: 6860 - protein, 8 aa, Homo sapiens
  ( 362 )...( 369 ): >NY5R_HUMAN
VKRSVTRI

SEQ ID NO: 6861 - protein, 8 aa, Homo sapiens
  ( 295 )...( 302 ): >O1A1_HUMAN
MKAALRKL

SEQ ID NO: 6862 - protein, 8 aa, Homo sapiens
  ( 296 )...( 303 ): >O1A1_HUMAN
KAALRKLF

SEQ ID NO: 6863 - protein, 8 aa, Homo sapiens
  ( 3 )...( 10 ): >O1C1_HUMAN
KRNLTVVR

SEQ ID NO: 6864 - protein, 8 aa, Homo sapiens
  ( 297 )...( 304 ): >O1C1_HUMAN
MKRGLQKM

SEQ ID NO: 6865 - protein, 8 aa, Homo sapiens
  ( 298 )...( 305 ): >O1C1_HUMAN
KRGLQKML

SEQ ID NO: 6866 - protein, 8 aa, Homo sapiens
  ( 227 )...( 234 ): >O1D2_HUMAN
RIPSVSKK

SEQ ID NO: 6867 - protein, 8 aa, Homo sapiens
  ( 227 )...( 234 ): >O1F1_HUMAN
KVPSTKGR

SEQ ID NO: 6868 - protein, 8 aa, Homo sapiens
  ( 230 )...( 237 ): >O1F1_HUMAN
STKGRWKA

SEQ ID NO: 6869 - protein, 8 aa, Homo sapiens
  ( 295 )...( 302 ): >O1F1_HUMAN
RYLKGALK

SEQ ID NO: 6870 - protein, 8 aa, Homo sapiens
  ( 296 )...( 303 ): >O1F1_HUMAN
YLKGALKK

SEQ ID NO: 6871 - protein, 8 aa, Homo sapiens
  ( 300 )...( 307 ): >O1F1_HUMAN
ALKKVVGR

SEQ ID NO: 6872 - protein, 8 aa, Homo sapiens
  ( 229 )...( 236 ): >O1G1_HUMAN
PSAQGKRK

SEQ ID NO: 6873 - protein, 8 aa, Homo sapiens
  ( 230 )...( 237 ): >O1G1_HUMAN
SAQGKRKA

SEQ ID NO: 6874 - protein, 8 aa, Homo sapiens
  ( 231 )...( 238 ): >O1G1_HUMAN
AQGKRKAF

SEQ ID NO: 6875 - protein, 8 aa, Homo sapiens
  ( 232 )...( 239 ): >O1G1_HUMAN
QGKRKAFS

SEQ ID NO: 6876 - protein, 8 aa, Homo sapiens
  ( 233 )...( 240 ): >O1G1_HUMAN
GKRKAFST

SEQ ID NO: 6877 - protein, 8 aa, Homo sapiens
  ( 297 )...( 304 ): >O1G1_HUMAN
IKSSLRKL

SEQ ID NO: 6878 - protein, 8 aa, Homo sapiens
  ( 298 )...( 305 ): >O1G1_HUMAN
KSSLRKLI

SEQ ID NO: 6879 - protein, 8 aa, Homo sapiens
  ( 227 )...( 234 ): >O1I1_HUMAN
KIPSTRGK

SEQ ID NO: 6880 - protein, 8 aa, Homo sapiens
  ( 230 )...( 237 ): >O1I1_HUMAN
STRGKWKA

SEQ ID NO: 6881 - protein, 8 aa, Homo sapiens
  ( 227 )...( 234 ): >O1Q1_HUMAN
RIPSAKGR

SEQ ID NO: 6882 - protein, 8 aa, Homo sapiens
  ( 230 )...( 237 ): >O1Q1_HUMAN
SAKGRWKT

SEQ ID NO: 6883 - protein, 8 aa, Homo sapiens
  ( 296 )...( 303 ): >O2A4_HUMAN
VKNTLKRV

SEQ ID NO: 6884 - protein, 8 aa, Homo sapiens
  ( 297 )...( 304 ): >O2A4_HUMAN
KNTLKRVL

SEQ ID NO: 6885 - protein, 8 aa, Homo sapiens
  ( 300 )...( 307 ): >O2B2_HUMAN
AFKRLVAK

SEQ ID NO: 6886 - protein, 8 aa, Homo sapiens
  ( 301 )...( 308 ): >O2B2_HUMAN
FKRLVAKS

SEQ ID NO: 6887 - protein, 8 aa, Homo sapiens
  ( 302 )...( 309 ): >O2B2_HUMAN
KRLVAKSL

SEQ ID NO: 6888 - protein, 8 aa, Homo sapiens
  ( 89 )...( 96 ): >O2B6_HUMAN
RKVISYRG

SEQ ID NO: 6889 - protein, 8 aa, Homo sapiens
  ( 306 )...( 313 ): >O2B6_HUMAN
ARVFLIKK

SEQ ID NO: 6890 - protein, 8 aa, Homo sapiens
  ( 83 )...( 90 ): >O2D2_HUMAN
VHLLSRKK

SEQ ID NO: 6891 - protein, 8 aa, Homo sapiens
  ( 84 )...( 91 ): >O2D2_HUMAN
HLLSRKKV

SEQ ID NO: 6892 - protein, 8 aa, Homo sapiens
  ( 85 )...( 92 ): >O2D2_HUMAN
LLSRKKVI

SEQ ID NO: 6893 - protein, 8 aa, Homo sapiens
  ( 86 )...( 93 ): >O2D2_HUMAN
LSRKKVIA

SEQ ID NO: 6894 - protein, 8 aa, Homo sapiens
  ( 87 )...( 94 ): >O2D2_HUMAN
SRKKVIAF

SEQ ID NO: 6895 - protein, 8 aa, Homo sapiens
  ( 88 )...( 95 ): >O2D2_HUMAN
RKKVIAFT

SEQ ID NO: 6896 - protein, 8 aa, Homo sapiens
  ( 295 )...( 302 ): >O2D2_HUMAN
VKAALRKV

SEQ ID NO: 6897 - protein, 8 aa, Homo sapiens
  ( 296 )...( 303 ): >O2D2_HUMAN
KAALRKVA

SEQ ID NO: 6898 - protein, 8 aa, Homo sapiens
  ( 298 )...( 305 ): >O2D2_HUMAN
ALRKVATR

SEQ ID NO: 6899 - protein, 8 aa, Homo sapiens
  ( 299 )...( 306 ): >O2D2_HUMAN
LRKVATRN

SEQ ID NO: 6900 - protein, 8 aa, Homo sapiens
  ( 233 )...( 240 ): >O2F1_HUMAN
GRKKAFHT

SEQ ID NO: 6901 - protein, 8 aa, Homo sapiens
  ( 233 )...( 240 ): >O2F2_HUMAN
GRKKAFHT

SEQ ID NO: 6902 - protein, 8 aa, Homo sapiens
  ( 233 )...( 240 ): >O2G1_HUMAN
GRKKALVT

SEQ ID NO: 6903 - protein, 8 aa, Homo sapiens
  ( 234 )...( 241 ): >O2G1_HUMAN
RKKALVTC

SEQ ID NO: 6904 - protein, 8 aa, Homo sapiens
  ( 225 )...( 232 ): >O2H2_HUMAN
RINSAKGR

SEQ ID NO: 6905 - protein, 8 aa, Homo sapiens
  ( 226 )...( 233 ): >O2H2_HUMAN
INSAKGRR

SEQ ID NO: 6906 - protein, 8 aa, Homo sapiens
  ( 231 )...( 238 ): >O2H2_HUMAN
GRRKAFGT

SEQ ID NO: 6907 - protein, 8 aa, Homo sapiens
  ( 232 )...( 239 ): >O2H2_HUMAN
RRKAFGTC

SEQ ID NO: 6908 - protein, 8 aa, Homo sapiens
  ( 225 )...( 232 ): >O2H3_HUMAN
RINSAKGR

SEQ ID NO: 6909 - protein, 8 aa, Homo sapiens
  ( 226 )...( 233 ): >O2H3_HUMAN
INSAKGRR

SEQ ID NO: 6910 - protein, 8 aa, Homo sapiens
  ( 231 )...( 238 ): >O2H3_HUMAN
GRRKAFGT

SEQ ID NO: 6911 - protein, 8 aa, Homo sapiens
  ( 232 )...( 239 ): >O2H3_HUMAN
RRKAFGTC

SEQ ID NO: 6912 - protein, 8 aa, Homo sapiens
  ( 293 )...( 300 ): >O2J2_HUMAN
LRNKHVKG

SEQ ID NO: 6913 - protein, 8 aa, Homo sapiens
  ( 294 )...( 301 ): >O2J2_HUMAN
RNKHVKGA

SEQ ID NO: 6914 - protein, 8 aa, Homo sapiens
  ( 297 )...( 304 ): >O2J2_HUMAN
HVKGAAKR

SEQ ID NO: 6915 - protein, 8 aa, Homo sapiens
  ( 298 )...( 305 ): >O2J2_HUMAN
VKGAAKRL

SEQ ID NO: 6916 - protein, 8 aa, Homo sapiens
  ( 299 )...( 306 ): >O2J2_HUMAN
KGAAKRLL

SEQ ID NO: 6917 - protein, 8 aa, Homo sapiens
  ( 294 )...( 301 ): >O2J3_HUMAN
TLRNKVVR

SEQ ID NO: 6918 - protein, 8 aa, Homo sapiens
  ( 234 )...( 241 ): >O2S2_HUMAN
GRKKVFST

SEQ ID NO: 6919 - protein, 8 aa, Homo sapiens
  ( 235 )...( 242 ): >O2S2_HUMAN
RKKVFSTC

SEQ ID NO: 6920 - protein, 8 aa, Homo sapiens
  ( 232 )...( 239 ): >O2T1_HUMAN
GRKKAFAT

SEQ ID NO: 6921 - protein, 8 aa, Homo sapiens
  ( 222 )...( 229 ): >O2W1_HUMAN
AKAVLRTK

SEQ ID NO: 6922 - protein, 8 aa, Homo sapiens
  ( 223 )...( 230 ): >O2W1_HUMAN
KAVLRTKS

SEQ ID NO: 6923 - protein, 8 aa, Homo sapiens
  ( 224 )...( 231 ): >O2W1_HUMAN
AVLRTKSK

SEQ ID NO: 6924 - protein, 8 aa, Homo sapiens
  ( 225 )...( 232 ): >O2W1_HUMAN
VLRTKSKA

SEQ ID NO: 6925 - protein, 8 aa, Homo sapiens
  ( 226 )...( 233 ): >O2W1_HUMAN
LRTKSKAS

SEQ ID NO: 6926 - protein, 8 aa, Homo sapiens
  ( 230 )...( 237 ): >O2W1_HUMAN
SKASQRKA

SEQ ID NO: 6927 - protein, 8 aa, Homo sapiens
  ( 231 )...( 238 ): >O2W1_HUMAN
KASQRKAM

SEQ ID NO: 6928 - protein, 8 aa, Homo sapiens
  ( 311 )...( 318 ): >O2W1_HUMAN
STKIKRNC

SEQ ID NO: 6929 - protein, 8 aa, Homo sapiens
  ( 85 )...( 92 ): >O3A1_HUMAN
LSRLLSRK

SEQ ID NO: 6930 - protein, 8 aa, Homo sapiens
  ( 88 )...( 95 ): >O3A1_HUMAN
LLSRKRAV

SEQ ID NO: 6931 - protein, 8 aa, Homo sapiens
  ( 89 )...( 96 ): >O3A1_HUMAN
LSRKRAVP

SEQ ID NO: 6932 - protein, 8 aa, Homo sapiens
  ( 236 )...( 243 ): >O3A1_HUMAN
GRKKAFST

SEQ ID NO: 6933 - protein, 8 aa, Homo sapiens
  ( 236 )...( 243 ): >O3A2_HUMAN
GRKKAFST

SEQ ID NO: 6934 - protein, 8 aa, Homo sapiens
  ( 236 )...( 243 ): >O3A3_HUMAN
GRKKAFST

SEQ ID NO: 6935 - protein, 8 aa, Homo sapiens
  ( 232 )...( 239 ): >O4D1_HUMAN
ARRKAAST

SEQ ID NO: 6936 - protein, 8 aa, Homo sapiens
  ( 233 )...( 240 ): >O4D1_HUMAN
RRKAASTC

SEQ ID NO: 6937 - protein, 8 aa, Homo sapiens
  ( 232 )...( 239 ): >O4D2_HUMAN
ARRKAAST

SEQ ID NO: 6938 - protein, 8 aa, Homo sapiens
  ( 233 )...( 240 ): >O4D2_HUMAN
RRKAASTC

SEQ ID NO: 6939 - protein, 8 aa, Homo sapiens
  ( 88 )...( 95 ): >O4F3_HUMAN
KRKVISFG

SEQ ID NO: 6940 - protein, 8 aa, Homo sapiens
  ( 294 )...( 301 ): >O4F3_HUMAN
MKAAIKRV

SEQ ID NO: 6941 - protein, 8 aa, Homo sapiens
  ( 295 )...( 302 ): >O4F3_HUMAN
KAAIKRVC

SEQ ID NO: 6942 - protein, 8 aa, Homo sapiens
  ( 296 )...( 303 ): >O4F3_HUMAN
AAIKRVCK

SEQ ID NO: 6943 - protein, 8 aa, Homo sapiens
  ( 297 )...( 304 ): >O4F3_HUMAN
AIKRVCKQ

SEQ ID NO: 6944 - protein, 8 aa, Homo sapiens
  ( 298 )...( 305 ): >O4F3_HUMAN
IKRVCKQL

SEQ ID NO: 6945 - protein, 8 aa, Homo sapiens
  ( 299 )...( 306 ): >O4F3_HUMAN
KRVCKQLV

SEQ ID NO: 6946 - protein, 8 aa, Homo sapiens
  ( 164 )...( 171 ): >O5D4_HUMAN
TGGRKKAF

SEQ ID NO: 6947 - protein, 8 aa, Homo sapiens
  ( 165 )...( 172 ): >O5D4_HUMAN
GGRKKAFS

SEQ ID NO: 6948 - protein, 8 aa, Homo sapiens
  ( 166 )...( 173 ): >O5D4_HUMAN
GRKKAFST

SEQ ID NO: 6949 - protein, 8 aa, Homo sapiens
  ( 293 )...( 300 ): >O5F1_HUMAN
RSKEVKKA

SEQ ID NO: 6950 - protein, 8 aa, Homo sapiens
  ( 302 )...( 309 ): >O5F1_HUMAN
ANVISRKR

SEQ ID NO: 6951 - protein, 8 aa, Homo sapiens
  ( 303 )...( 310 ): >O5F1_HUMAN
NVISRKRT

SEQ ID NO: 6952 - protein, 8 aa, Homo sapiens
  ( 304 )...( 311 ): >O5F1_HUMAN
VISRKRTS

SEQ ID NO: 6953 - protein, 8 aa, Homo sapiens
  ( 305 )...( 312 ): >O5F1_HUMAN
ISRKRTSS

SEQ ID NO: 6954 - protein, 8 aa, Homo sapiens
  ( 229 )...( 236 ): >O5I1_HUMAN
KIRSFSGR

SEQ ID NO: 6955 - protein, 8 aa, Homo sapiens
  ( 230 )...( 237 ): >O5I1_HUMAN
IRSFSGRK

SEQ ID NO: 6956 - protein, 8 aa, Homo sapiens
  ( 232 )...( 239 ): >O5I1_HUMAN
SFSGRKKT

SEQ ID NO: 6957 - protein, 8 aa, Homo sapiens
  ( 234 )...( 241 ): >O5I1_HUMAN
SGRKKTFS

SEQ ID NO: 6958 - protein, 8 aa, Homo sapiens
  ( 235 )...( 242 ): >O5I1_HUMAN
GRKKTFST

SEQ ID NO: 6959 - protein, 8 aa, Homo sapiens
  ( 236 )...( 243 ): >O5I1_HUMAN
RKKTFSTC

SEQ ID NO: 6960 - protein, 8 aa, Homo sapiens
  ( 294 )...( 301 ): >O5U1_HUMAN
SMKAALRK

SEQ ID NO: 6961 - protein, 8 aa, Homo sapiens
  ( 295 )...( 302 ): >O5U1_HUMAN
MKAALRKM

SEQ ID NO: 6962 - protein, 8 aa, Homo sapiens
  ( 296 )...( 303 ): >O5U1_HUMAN
KAALRKML

SEQ ID NO: 6963 - protein, 8 aa, Homo sapiens
  ( 298 )...( 305 ): >O5U1_HUMAN
ALRKMLSK

SEQ ID NO: 6964 - protein, 8 aa, Homo sapiens
  ( 310 )...( 317 ): >O5U1_HUMAN
QRKMCLKA

SEQ ID NO: 6965 - protein, 8 aa, Homo sapiens
  ( 311 )...( 318 ): >O5U1_HUMAN
RKMCLKAM

SEQ ID NO: 6966 - protein, 8 aa, Homo sapiens
  ( 233 )...( 240 ): >O5V1_HUMAN
GRRKAFST

SEQ ID NO: 6967 - protein, 8 aa, Homo sapiens
  ( 320 )...( 327 ): >O6A1_HUMAN
PKKGSRNV

SEQ ID NO: 6968 - protein, 7 aa, Homo sapiens
  ( 321 )...( 328 ): >O6A1_HUMAN
KKGSRNV

SEQ ID NO: 6969 - protein, 8 aa, Homo sapiens
  ( 293 )...( 300 ): >O7AA_HUMAN
RNKHIKGA

SEQ ID NO: 6970 - protein, 8 aa, Homo sapiens
  ( 297 )...( 304 ): >O7AH_HUMAN
IKRALKMS

SEQ ID NO: 6971 - protein, 8 aa, Homo sapiens
  ( 301 )...( 308 ): >O7AH_HUMAN
LKMSFRGK

SEQ ID NO: 6972 - protein, 8 aa, Homo sapiens
  ( 227 )...( 234 ): >O7C1_HUMAN
RISSAGRK

SEQ ID NO: 6973 - protein, 8 aa, Homo sapiens
  ( 231 )...( 238 ): >O7C1_HUMAN
AGRKHKAF

SEQ ID NO: 6974 - protein, 8 aa, Homo sapiens
  ( 297 )...( 304 ): >O8B8_HUMAN
VKVALKKI

SEQ ID NO: 6975 - protein, 8 aa, Homo sapiens
  ( 298 )...( 305 ): >O8B8_HUMAN
KVALKKIL

SEQ ID NO: 6976 - protein, 8 aa, Homo sapiens
  ( 300 )...( 307 ): >O8B8_HUMAN
ALKKILNK

SEQ ID NO: 6977 - protein, 8 aa, Homo sapiens
  ( 297 )...( 304 ): >O8D2_HUMAN
VKNALKKM

SEQ ID NO: 6978 - protein, 8 aa, Homo sapiens
  ( 298 )...( 305 ): >O8D2_HUMAN
KNALKKMT

SEQ ID NO: 6979 - protein, 8 aa, Homo sapiens
  ( 299 )...( 306 ): >O8D2_HUMAN
NALKKMTR

SEQ ID NO: 6980 - protein, 8 aa, Homo sapiens
  ( 300 )...( 307 ): >O8D2_HUMAN
ALKKMTRG

SEQ ID NO: 6981 - protein, 8 aa, Homo sapiens
  ( 303 )...( 310 ): >O8D2_HUMAN
KMTRGRQS

SEQ ID NO: 6982 - protein, 8 aa, Homo sapiens
  ( 297 )...( 304 ): >OAA3_HUMAN
MKRTLIKL

SEQ ID NO: 6983 - protein, 8 aa, Homo sapiens
  ( 298 )...( 305 ): >OAA4_HUMAN
VKAALKRL

SEQ ID NO: 6984 - protein, 8 aa, Homo sapiens
  ( 299 )...( 306 ): >OAA4_HUMAN
KAALKRLI

SEQ ID NO: 6985 - protein, 8 aa, Homo sapiens
  ( 139 )...( 146 ): >OAA5_HUMAN
QRTRAKLA

SEQ ID NO: 6986 - protein, 8 aa, Homo sapiens
  ( 140 )...( 147 ): >OAA5_HUMAN
RTRAKLAA

SEQ ID NO: 6987 - protein, 8 aa, Homo sapiens
  ( 228 )...( 235 ): >OAC1_HUMAN
PSVAGRRK

SEQ ID NO: 6988 - protein, 8 aa, Homo sapiens
  ( 229 )...( 236 ): >OAC1_HUMAN
SVAGRRKA

SEQ ID NO: 6989 - protein, 8 aa, Homo sapiens
  ( 231 )...( 238 ): >OAC1_HUMAN
AGRRKAFS

SEQ ID NO: 6990 - protein, 8 aa, Homo sapiens
  ( 232 )...( 239 ): >OAC1_HUMAN
GRRKAFST

SEQ ID NO: 6991 - protein, 8 aa, Homo sapiens
  ( 296 )...( 303 ): >OAC1_HUMAN
VKAALKRT

SEQ ID NO: 6992 - protein, 8 aa, Homo sapiens
  ( 297 )...( 304 ): >OAC1_HUMAN
KAALKRTI

SEQ ID NO: 6993 - protein, 8 aa, Homo sapiens
  ( 299 )...( 306 ): >OAC1_HUMAN
ALKRTIQK

SEQ ID NO: 6994 - protein, 8 aa, Homo sapiens
  ( 300 )...( 307 ): >OAC1_HUMAN
LKRTIQKT

SEQ ID NO: 6995 - protein, 8 aa, Homo sapiens
  ( 301 )...( 308 ): >OAC1_HUMAN
KRTIQKTV

SEQ ID NO: 6996 - protein, 8 aa, Homo sapiens
  ( 298 )...( 305 ): >OAH1_HUMAN
LKVAMKKT

SEQ ID NO: 6997 - protein, 8 aa, Homo sapiens
  ( 299 )...( 306 ): >OAH1_HUMAN
KVAMKKTF

SEQ ID NO: 6998 - protein, 8 aa, Homo sapiens
  ( 298 )...( 305 ): >OAH2_HUMAN
LKVAMKRT

SEQ ID NO: 6999 - protein, 8 aa, Homo sapiens
  ( 299 )...( 306 ): >OAH2_HUMAN
KVAMKRTF

SEQ ID NO: 7000 - protein, 8 aa, Homo sapiens
  ( 243 )...( 250 ): >OAJ1_HUMAN
GRKKAFAT

SEQ ID NO: 7001 - protein, 8 aa, Homo sapiens
  ( 302 )...( 309 ): >OBA1_HUMAN
LRKILCIK

SEQ ID NO: 7002 - protein, 8 aa, Homo sapiens
  ( 303 )...( 310 ): >OBA1_HUMAN
RKILCIKQ

SEQ ID NO: 7003 - protein, 8 aa, Homo sapiens
  ( 299 )...( 306 ): >OCD3_HUMAN
ALKKIFGR

SEQ ID NO: 7004 - protein, 8 aa, Homo sapiens
  ( 15 )...( 22 ): >OL1F_HUMAN
LSRLLSRK

SEQ ID NO: 7005 - protein, 8 aa, Homo sapiens
  ( 18 )...( 25 ): >OL1F_HUMAN
LLSRKRAV

SEQ ID NO: 7006 - protein, 8 aa, Homo sapiens
  ( 19 )...( 26 ): >OL1F_HUMAN
LSRKRAVP

SEQ ID NO: 7007 - protein, 8 aa, Homo sapiens
  ( 166 )...( 173 ): >OL1F_HUMAN
GRKKAFST

SEQ ID NO: 7008 - protein, 8 aa, Homo sapiens
  ( 166 )...( 173 ): >OL1I_HUMAN
GRKKAFST

SEQ ID NO: 7009 - protein, 8 aa, Homo sapiens
  ( 166 )...( 173 ): >OL1L_HUMAN
GRKKAFST

SEQ ID NO: 7010 - protein, 8 aa, Homo sapiens
  ( 357 )...( 364 ): >OPN3_HUMAN
GDRPKKKV

SEQ ID NO: 7011 - protein, 8 aa, Homo sapiens
  ( 179 )...( 186 ): >OPN4_HUMAN
FGVASKRR

SEQ ID NO: 7012 - protein, 8 aa, Homo sapiens
  ( 180 )...( 187 ): >OPN4_HUMAN
GVASKRRA

SEQ ID NO: 7013 - protein, 8 aa, Homo sapiens
  ( 181 )...( 188 ): >OPN4_HUMAN
VASKRRAA

SEQ ID NO: 7014 - protein, 8 aa, Homo sapiens
  ( 182 )...( 189 ): >OPN4_HUMAN
ASKRRAAF

SEQ ID NO: 7015 - protein, 8 aa, Homo sapiens
  ( 183 )...( 190 ): >OPN4_HUMAN
SKRRAAFV

SEQ ID NO: 7016 - protein, 8 aa, Homo sapiens
  ( 75 )...( 82 ): >OPRD_HUMAN
VRYTKMKT

SEQ ID NO: 7017 - protein, 8 aa, Homo sapiens
  ( 76 )...( 83 ): >OPRD_HUMAN
RYTKMKTA

SEQ ID NO: 7018 - protein, 8 aa, Homo sapiens
  ( 159 )...( 166 ): >OPRD_HUMAN
FRTPAKAK

SEQ ID NO: 7019 - protein, 8 aa, Homo sapiens
  ( 160 )...( 167 ): >OPRD_HUMAN
RTPAKAKL

SEQ ID NO: 7020 - protein, 8 aa, Homo sapiens
  ( 86 )...( 93 ): >OPRK_HUMAN
RYTKMKTA

SEQ ID NO: 7021 - protein, 8 aa, Homo sapiens
  ( 170 )...( 177 ): >OPRK_HUMAN
RTPLKAKI

SEQ ID NO: 7022 - protein, 8 aa, Homo sapiens
  ( 250 )...( 257 ): >OPRK_HUMAN
ILRLKSVR

SEQ ID NO: 7023 - protein, 8 aa, Homo sapiens
  ( 251 )...( 258 ): >OPRK_HUMAN
LRLKSVRL

SEQ ID NO: 7024 - protein, 8 aa, Homo sapiens
  ( 252 )...( 259 ): >OPRK_HUMAN
RLKSVRLL

SEQ ID NO: 7025 - protein, 8 aa, Homo sapiens
  ( 96 )...( 103 ): >OPRM_HUMAN
VRYTKMKT

SEQ ID NO: 7026 - protein, 8 aa, Homo sapiens
  ( 97 )...( 104 ): >OPRM_HUMAN
RYTKMKTA

SEQ ID NO: 7027 - protein, 8 aa, Homo sapiens
  ( 258 )...( 265 ): >OPRM_HUMAN
ILRLKSVR

SEQ ID NO: 7028 - protein, 8 aa, Homo sapiens
  ( 259 )...( 266 ): >OPRM_HUMAN
LRLKSVRM

SEQ ID NO: 7029 - protein, 8 aa, Homo sapiens
  ( 260 )...( 267 ): >OPRM_HUMAN
RLKSVRML

SEQ ID NO: 7030 - protein, 8 aa, Homo sapiens
  ( 57 )...( 64 ): >OPSB_HUMAN
VATLRYKK

SEQ ID NO: 7031 - protein, 8 aa, Homo sapiens
  ( 58 )...( 65 ): >OPSB_HUMAN
ATLRYKKL

SEQ ID NO: 7032 - protein, 8 aa, Homo sapiens
  ( 76 )...( 83 ): >OPSG_HUMAN
AATMKFKK

SEQ ID NO: 7033 - protein, 8 aa, Homo sapiens
  ( 77 )...( 84 ): >OPSG_HUMAN
ATMKFKKL

SEQ ID NO: 7034 - protein, 8 aa, Homo sapiens
  ( 247 )...( 254 ): >OPSG_HUMAN
RAVAKQQK

SEQ ID NO: 7035 - protein, 8 aa, Homo sapiens
  ( 76 )...( 83 ): >OPSR_HUMAN
AATMKFKK

SEQ ID NO: 7036 - protein, 8 aa, Homo sapiens
  ( 77 )...( 84 ): >OPSR_HUMAN
ATMKFKKL

SEQ ID NO: 7037 - protein, 8 aa, Homo sapiens
  ( 247 )...( 254 ): >OPSR_HUMAN
RAVAKQQK

SEQ ID NO: 7038 - protein, 8 aa, Homo sapiens
  ( 154 )...( 161 ): >OX1R_HUMAN
FKSTARRA

SEQ ID NO: 7039 - protein, 8 aa, Homo sapiens
  ( 294 )...( 301 ): >OX1R_HUMAN
RKTAKMLM

SEQ ID NO: 7040 - protein, 8 aa, Homo sapiens
  ( 162 )...( 169 ): >OX2R_HUMAN
FKSTAKRA

SEQ ID NO: 7041 - protein, 8 aa, Homo sapiens
  ( 167 )...( 174 ): >OX2R_HUMAN
KRARNSIV

SEQ ID NO: 7042 - protein, 8 aa, Homo sapiens
  ( 300 )...( 307 ): >OX2R_HUMAN
RKTARMLM

SEQ ID NO: 7043 - protein, 8 aa, Homo sapiens
  ( 393 )...( 400 ): >OX2R_HUMAN
RLTRGRTS

SEQ ID NO: 7044 - protein, 8 aa, Homo sapiens
  ( 292 )...( 299 ): >OXE2_HUMAN
GAKTKQIR

SEQ ID NO: 7045 - protein, 8 aa, Homo sapiens
  ( 293 )...( 300 ): >OXE2_HUMAN
AKTKQIRT

SEQ ID NO: 7046 - protein, 8 aa, Homo sapiens
  ( 296 )...( 303 ): >OXI1_HUMAN
VKTKEIRK

SEQ ID NO: 7047 - protein, 8 aa, Homo sapiens
  ( 297 )...( 304 ): >OXI1_HUMAN
KTKEIRKG

SEQ ID NO: 7048 - protein, 8 aa, Homo sapiens
  ( 301 )...( 308 ): >OXI1_HUMAN
IRKGILKF

SEQ ID NO: 7049 - protein, 8 aa, Homo sapiens
  ( 63 )...( 70 ): >OXYR_HUMAN
ALRTTRQK

SEQ ID NO: 7050 - protein, 8 aa, Homo sapiens
  ( 263 )...( 270 ): >OXYR_HUMAN
VKLISKAK

SEQ ID NO: 7051 - protein, 8 aa, Homo sapiens
  ( 264 )...( 271 ): >OXYR_HUMAN
KLISKAKI

SEQ ID NO: 7052 - protein, 8 aa, Homo sapiens
  ( 265 )...( 272 ): >OXYR_HUMAN
LISKAKIR

SEQ ID NO: 7053 - protein, 8 aa, Homo sapiens
  ( 266 )...( 273 ): >OXYR_HUMAN
ISKAKIRT

SEQ ID NO: 7054 - protein, 8 aa, Homo sapiens
  ( 267 )...( 274 ): >OXYR_HUMAN
SKAKIRTV

SEQ ID NO: 7055 - protein, 8 aa, Homo sapiens
  ( 269 )...( 276 ): >OXYR_HUMAN
AKIRTVKM

SEQ ID NO: 7056 - protein, 8 aa, Homo sapiens
  ( 270 )...( 277 ): >OXYR_HUMAN
KIRTVKMT

SEQ ID NO: 7057 - protein, 8 aa, Homo sapiens
  ( 349 )...( 356 ): >OXYR_HUMAN
ASYLKGRR

SEQ ID NO: 7058 - protein, 8 aa, Homo sapiens
  ( 303 )...( 310 ): >OYD1_HUMAN
IRSRLLKL

SEQ ID NO: 7059 - protein, 8 aa, Homo sapiens
  ( 304 )...( 311 ): >OYD1_HUMAN
RSRLLKLL

SEQ ID NO: 7060 - protein, 8 aa, Homo sapiens
  ( 241 )...( 248 ): >P2UR_HUMAN
RKSVRTIA

SEQ ID NO: 7061 - protein, 8 aa, Homo sapiens
  ( 122 )...( 129 ): >P2Y5_HUMAN
FKSKTLRT

SEQ ID NO: 7062 - protein, 8 aa, Homo sapiens
  ( 123 )...( 130 ): >P2Y5_HUMAN
KSKTLRTK

SEQ ID NO: 7063 - protein, 8 aa, Homo sapiens
  ( 126 )...( 133 ): >P2Y5_HUMAN
TLRTKRNA

SEQ ID NO: 7064 - protein, 8 aa, Homo sapiens
  ( 129 )...( 136 ): >P2Y5_HUMAN
TKRNAKIV

SEQ ID NO: 7065 - protein, 8 aa, Homo sapiens
  ( 130 )...( 137 ): >P2Y5_HUMAN
KRNAKIVC

SEQ ID NO: 7066 - protein, 8 aa, Homo sapiens
  ( 218 )...( 225 ): >P2Y5_HUMAN
SRSKINKT

SEQ ID NO: 7067 - protein, 8 aa, Homo sapiens
  ( 221 )...( 228 ): >P2Y5_HUMAN
KINKTKVL

SEQ ID NO: 7068 - protein, 8 aa, Homo sapiens
  ( 222 )...( 229 ): >P2Y5_HUMAN
INKTKVLK

SEQ ID NO: 7069 - protein, 8 aa, Homo sapiens
  ( 223 )...( 230 ): >P2Y5_HUMAN
NKTKVLKM

SEQ ID NO: 7070 - protein, 8 aa, Homo sapiens
  ( 224 )...( 231 ): >P2Y5_HUMAN
KTKVLKMI

SEQ ID NO: 7071 - protein, 8 aa, Homo sapiens
  ( 53 )...( 60 ): >P2Y6_HUMAN
TSRRALTR

SEQ ID NO: 7072 - protein, 8 aa, Homo sapiens
  ( 54 )...( 61 ): >P2Y6_HUMAN
SRRALTRT

SEQ ID NO: 7073 - protein, 8 aa, Homo sapiens
  ( 124 )...( 131 ): >P2Y7_HUMAN
VSQKLRTK

SEQ ID NO: 7074 - protein, 8 aa, Homo sapiens
  ( 125 )...( 132 ): >P2Y7_HUMAN
SQKLRTKA

SEQ ID NO: 7075 - protein, 8 aa, Homo sapiens
  ( 126 )...( 133 ): >P2Y7_HUMAN
QKLRTKAM

SEQ ID NO: 7076 - protein, 8 aa, Homo sapiens
  ( 127 )...( 134 ): >P2Y7_HUMAN
KLRTKAMA

SEQ ID NO: 7077 - protein, 8 aa, Homo sapiens
  ( 128 )...( 135 ): >P2Y7_HUMAN
LRTKAMAR

SEQ ID NO: 7078 - protein, 8 aa, Homo sapiens
  ( 130 )...( 137 ): >P2Y7_HUMAN
TKAMARRV

SEQ ID NO: 7079 - protein, 8 aa, Homo sapiens
  ( 260 )...( 267 ): >P2Y7_HUMAN
GKRLSLAR

SEQ ID NO: 7080 - protein, 8 aa, Homo sapiens
  ( 227 )...( 234 ): >P2Y9_HUMAN
VLRTLRKP

SEQ ID NO: 7081 - protein, 8 aa, Homo sapiens
  ( 228 )...( 235 ): >P2Y9_HUMAN
LRTLRKPA

SEQ ID NO: 7082 - protein, 8 aa, Homo sapiens
  ( 229 )...( 236 ): >P2Y9_HUMAN
RTLRKPAT

SEQ ID NO: 7083 - protein, 8 aa, Homo sapiens
  ( 239 )...( 246 ): >P2Y9_HUMAN
QIGTNKKK

SEQ ID NO: 7084 - protein, 8 aa, Homo sapiens
  ( 240 )...( 247 ): >P2Y9_HUMAN
IGTNKKKV

SEQ ID NO: 7085 - protein, 8 aa, Homo sapiens
  ( 241 )...( 248 ): >P2Y9_HUMAN
GTNKKKVL

SEQ ID NO: 7086 - protein, 8 aa, Homo sapiens
  ( 242 )...( 249 ): >P2Y9_HUMAN
TNKKKVLK

SEQ ID NO: 7087 - protein, 8 aa, Homo sapiens
  ( 244 )...( 251 ): >P2Y9_HUMAN
KKKVLKMI

SEQ ID NO: 7088 - protein, 8 aa, Homo sapiens
  ( 245 )...( 252 ): >P2Y9_HUMAN
KKVLKMIT

SEQ ID NO: 7089 - protein, 8 aa, Homo sapiens
  ( 157 )...( 164 ): >P2YR_HUMAN
LKSLGRLK

SEQ ID NO: 7090 - protein, 8 aa, Homo sapiens
  ( 163 )...( 170 ): >P2YR_HUMAN
LKKKNAIC

SEQ ID NO: 7091 - protein, 8 aa, Homo sapiens
  ( 164 )...( 171 ): >P2YR_HUMAN
KKKNAICI

SEQ ID NO: 7092 - protein, 8 aa, Homo sapiens
  ( 191 )...( 198 ): >P2YR_HUMAN
GTGVRKNK

SEQ ID NO: 7093 - protein, 8 aa, Homo sapiens
  ( 192 )...( 199 ): >P2YR_HUMAN
TGVRKNKT

SEQ ID NO: 7094 - protein, 8 aa, Homo sapiens
  ( 193 )...( 200 ): >P2YR_HUMAN
GVRKNKTI

SEQ ID NO: 7095 - protein, 8 aa, Homo sapiens
  ( 194 )...( 201 ): >P2YR_HUMAN
VRKNKTIT

SEQ ID NO: 7096 - protein, 8 aa, Homo sapiens
  ( 195 )...( 202 ): >P2YR_HUMAN
RKNKTITC

SEQ ID NO: 7097 - protein, 8 aa, Homo sapiens
  ( 335 )...( 342 ): >P2YR_HUMAN
LSRATRKA

SEQ ID NO: 7098 - protein, 8 aa, Homo sapiens
  ( 336 )...( 343 ): >P2YR_HUMAN
SRATRKAS

SEQ ID NO: 7099 - protein, 8 aa, Homo sapiens
  ( 128 )...( 135 ): >PAFR_HUMAN
ANTRKRGI

SEQ ID NO: 7100 - protein, 8 aa, Homo sapiens
  ( 129 )...( 136 ): >PAFR_HUMAN
NTRKRGIS

SEQ ID NO: 7101 - protein, 8 aa, Homo sapiens
  ( 130 )...( 137 ): >PAFR_HUMAN
TRKRGISL

SEQ ID NO: 7102 - protein, 8 aa, Homo sapiens
  ( 131 )...( 138 ): >PAFR_HUMAN
RKRGISLS

SEQ ID NO: 7103 - protein, 8 aa, Homo sapiens
  ( 315 )...( 322 ): >PAFR_HUMAN
RKCSRATT

SEQ ID NO: 7104 - protein, 8 aa, Homo sapiens
  ( 128 )...( 135 ): >PAR1_HUMAN
ILKMKVKK

SEQ ID NO: 7105 - protein, 8 aa, Homo sapiens
  ( 129 )...( 136 ): >PAR1_HUMAN
LKMKVKKP

SEQ ID NO: 7106 - protein, 8 aa, Homo sapiens
  ( 130 )...( 137 ): >PAR1_HUMAN
KMKVKKPA

SEQ ID NO: 7107 - protein, 8 aa, Homo sapiens
  ( 131 )...( 138 ): >PAR1_HUMAN
MKVKKPAV

SEQ ID NO: 7108 - protein, 8 aa, Homo sapiens
  ( 132 )...( 139 ): >PAR1_HUMAN
KVKKPAVV

SEQ ID NO: 7109 - protein, 8 aa, Homo sapiens
  ( 301 )...( 308 ): >PAR1_HUMAN
AVANRSKK

SEQ ID NO: 7110 - protein, 8 aa, Homo sapiens
  ( 302 )...( 309 ): >PAR1_HUMAN
VANRSKKS

SEQ ID NO: 7111 - protein, 8 aa, Homo sapiens
  ( 31 )...( 38 ): >PAR2_HUMAN
RSSKGRSL

SEQ ID NO: 7112 - protein, 8 aa, Homo sapiens
  ( 34 )...( 41 ): >PAR2_HUMAN
KGRSLIGK

SEQ ID NO: 7113 - protein, 8 aa, Homo sapiens
  ( 181 )...( 188 ): >PAR2_HUMAN
MGHSRKKA

SEQ ID NO: 7114 - protein, 8 aa, Homo sapiens
  ( 184 )...( 191 ): >PAR2_HUMAN
SRKKANIA

SEQ ID NO: 7115 - protein, 8 aa, Homo sapiens
  ( 185 )...( 192 ): >PAR2_HUMAN
RKKANIAI

SEQ ID NO: 7116 - protein, 8 aa, Homo sapiens
  ( 283 )...( 290 ): >PAR2_HUMAN
KRAIKLIV

SEQ ID NO: 7117 - protein, 8 aa, Homo sapiens
  ( 361 )...( 368 ): >PAR2_HUMAN
CRSVRTVK

SEQ ID NO: 7118 - protein, 8 aa, Homo sapiens
  ( 362 )...( 369 ): >PAR2_HUMAN
RSVRTVKQ

SEQ ID NO: 7119 - protein, 8 aa, Homo sapiens
  ( 169 )...( 176 ): >PE23_HUMAN
MKTRATRA

SEQ ID NO: 7120 - protein, 8 aa, Homo sapiens
  ( 170 )...( 177 ): >PE23_HUMAN
KTRATRAV

SEQ ID NO: 7121 - protein, 8 aa, Homo sapiens
  ( 254 )...( 261 ): >PE23_HUMAN
KALVSRCR

SEQ ID NO: 7122 - protein, 8 aa, Homo sapiens
  ( 256 )...( 263 ): >PE23_HUMAN
LVSRCRAK

SEQ ID NO: 7123 - protein, 8 aa, Homo sapiens
  ( 257 )...( 264 ): >PE23_HUMAN
VSRCRAKA

SEQ ID NO: 7124 - protein, 8 aa, Homo sapiens
  ( 258 )...( 265 ): >PE23_HUMAN
SRCRAKAT

SEQ ID NO: 7125 - protein, 8 aa, Homo sapiens
  ( 259 )...( 266 ): >PE23_HUMAN
RCRAKATA

SEQ ID NO: 7126 - protein, 8 aa, Homo sapiens
  ( 40 )...( 47 ): >PE24_HUMAN
VVLCKSRK

SEQ ID NO: 7127 - protein, 8 aa, Homo sapiens
  ( 332 )...( 339 ): >PE24_HUMAN
LRKTVLSK

SEQ ID NO: 7128 - protein, 8 aa, Homo sapiens
  ( 333 )...( 340 ): >PE24_HUMAN
RKTVLSKA

SEQ ID NO: 7129 - protein, 8 aa, Homo sapiens
  ( 226 )...( 233 ): >PF2R_HUMAN
TLLRVKFK

SEQ ID NO: 7130 - protein, 8 aa, Homo sapiens
  ( 227 )...( 234 ): >PF2R_HUMAN
LLRVKFKS

SEQ ID NO: 7131 - protein, 8 aa, Homo sapiens
  ( 306 )...( 313 ): >PF2R_HUMAN
LLRKAVLK

SEQ ID NO: 7132 - protein, 8 aa, Homo sapiens
  ( 307 )...( 314 ): >PF2R_HUMAN
LRKAVLKN

SEQ ID NO: 7133 - protein, 8 aa, Homo sapiens
  ( 308 )...( 315 ): >PF2R_HUMAN
RKAVLKNL

SEQ ID NO: 7134 - protein, 8 aa, Homo sapiens
  ( 358 )...( 365 ): >PTR2_HUMAN
YRKLAKST

SEQ ID NO: 7135 - protein, 8 aa, Homo sapiens
  ( 359 )...( 366 ): >PTR2_HUMAN
RKLAKSTL

SEQ ID NO: 7136 - protein, 8 aa, Homo sapiens
  ( 477 )...( 484 ): >PTR2_HUMAN
KAAKIASR

SEQ ID NO: 7137 - protein, 8 aa, Homo sapiens
  ( 73 )...( 80 ): >PTRR_HUMAN
STSGKPRK

SEQ ID NO: 7138 - protein, 8 aa, Homo sapiens
  ( 76 )...( 83 ): >PTRR_HUMAN
GKPRKDKA

SEQ ID NO: 7139 - protein, 8 aa, Homo sapiens
  ( 383 )...( 390 ): >PTRR_HUMAN
RVLATKLR

SEQ ID NO: 7140 - protein, 8 aa, Homo sapiens
  ( 404 )...( 411 ): >PTRR_HUMAN
RKLLKSTL

SEQ ID NO: 7141 - protein, 8 aa, Homo sapiens
  ( 153 )...( 160 ): >RDC1_HUMAN
PSSRKKMV

SEQ ID NO: 7142 - protein, 8 aa, Homo sapiens
  ( 319 )...( 326 ): >SCRC_HUMAN
ILMRKLRT

SEQ ID NO: 7143 - protein, 8 aa, Homo sapiens
  ( 338 )...( 345 ): >SCRC_HUMAN
KRLARSTL

SEQ ID NO: 7144 - protein, 8 aa, Homo sapiens
  ( 563 )...( 570 ): >SMO_HUMAN
IKKSKMIA

SEQ ID NO: 7145 - protein, 8 aa, Homo sapiens
  ( 564 )...( 571 ): >SMO_HUMAN
KKSKMIAK

SEQ ID NO: 7146 - protein, 8 aa, Homo sapiens
  ( 565 )...( 572 ): >SMO_HUMAN
KSKMIAKA

SEQ ID NO: 7147 - protein, 8 aa, Homo sapiens
  ( 569 )...( 576 ): >SMO_HUMAN
IAKAFSKR

SEQ ID NO: 7148 - protein, 8 aa, Homo sapiens
  ( 622 )...( 629 ): >SMO_HUMAN
VTKMVARR

SEQ ID NO: 7149 - protein, 8 aa, Homo sapiens
  ( 623 )...( 630 ): >SMO_HUMAN
TKMVARRG

SEQ ID NO: 7150 - protein, 8 aa, Homo sapiens
  ( 347 )...( 354 ): >SRB3_HUMAN
LKKCLRTH

SEQ ID NO: 7151 - protein, 8 aa, Homo sapiens
  ( 348 )...( 355 ): >SRB3_HUMAN
KKCLRTHA

SEQ ID NO: 7152 - protein, 8 aa, Homo sapiens
  ( 85 )...( 92 ): >SSR1_HUMAN
RYAKMKTA

SEQ ID NO: 7153 - protein, 8 aa, Homo sapiens
  ( 169 )...( 176 ): >SSR1_HUMAN
RRPTVAKV

SEQ ID NO: 7154 - protein, 8 aa, Homo sapiens
  ( 249 )...( 256 ): >SSR1_HUMAN
KMRMVALK

SEQ ID NO: 7155 - protein, 8 aa, Homo sapiens
  ( 155 )...( 162 ): >SSR2_HUMAN
RPRTAKMI

SEQ ID NO: 7156 - protein, 8 aa, Homo sapiens
  ( 234 )...( 241 ): >SSR2_HUMAN
KVKSSGIR

SEQ ID NO: 7157 - protein, 8 aa, Homo sapiens
  ( 240 )...( 247 ): >SSR2_HUMAN
IRVGSSKR

SEQ ID NO: 7158 - protein, 8 aa, Homo sapiens
  ( 242 )...( 249 ): >SSR2_HUMAN
VGSSKRKK

SEQ ID NO: 7159 - protein, 8 aa, Homo sapiens
  ( 249 )...( 256 ): >SSR2_HUMAN
KSEKKVTR

SEQ ID NO: 7160 - protein, 8 aa, Homo sapiens
  ( 252 )...( 259 ): >SSR2_HUMAN
KKVTRMVS

SEQ ID NO: 7161 - protein, 8 aa, Homo sapiens
  ( 231 )...( 238 ): >SSR3_HUMAN
VKVRSAGR

SEQ ID NO: 7162 - protein, 8 aa, Homo sapiens
  ( 74 )...( 81 ): >SSR4_HUMAN
RYAKMKTA

SEQ ID NO: 7163 - protein, 8 aa, Homo sapiens
  ( 158 )...( 165 ): >SSR4_HUMAN
RRPSVAKL

SEQ ID NO: 7164 - protein, 8 aa, Homo sapiens
  ( 376 )...( 383 ): >SSR4_HUMAN
GRKRIPLT

SEQ ID NO: 7165 - protein, 8 aa, Homo sapiens
  ( 378 )...( 385 ): >SSR4_HUMAN
KRIPLTRT

SEQ ID NO: 7166 - protein, 8 aa, Homo sapiens
  ( 65 )...( 72 ): >SSR5_HUMAN
VLRFAKMK

SEQ ID NO: 7167 - protein, 8 aa, Homo sapiens
  ( 67 )...( 74 ): >SSR5_HUMAN
RFAKMKTV

SEQ ID NO: 7168 - protein, 8 aa, Homo sapiens
  ( 244 )...( 251 ): >SSR5_HUMAN
RKVTRMVL

SEQ ID NO: 7169 - protein, 8 aa, Homo sapiens
  ( 316 )...( 323 ): >SSR5_HUMAN
QKVLCLRK

SEQ ID NO: 7170 - protein, 8 aa, Homo sapiens
  ( 317 )...( 324 ): >SSR5_HUMAN
KVLCLRKG

SEQ ID NO: 7171 - protein, 8 aa, Homo sapiens
  ( 138 )...( 145 ): >TRFR_HUMAN
TFSRAKKI

SEQ ID NO: 7172 - protein, 8 aa, Homo sapiens
  ( 139 )...( 146 ): >TRFR_HUMAN
FSRAKKII

SEQ ID NO: 7173 - protein, 8 aa, Homo sapiens
  ( 140 )...( 147 ): >TRFR_HUMAN
SRAKKIII

SEQ ID NO: 7174 - protein, 8 aa, Homo sapiens
  ( 141 )...( 148 ): >TRFR_HUMAN
RAKKIIIF

SEQ ID NO: 7175 - protein, 8 aa, Homo sapiens
  ( 259 )...( 266 ): >TRFR_HUMAN
SSRKQVTK

SEQ ID NO: 7176 - protein, 8 aa, Homo sapiens
  ( 260 )...( 267 ): >TRFR_HUMAN
SRKQVTKM

SEQ ID NO: 7177 - protein, 8 aa, Homo sapiens
  ( 261 )...( 268 ): >TRFR_HUMAN
RKQVTKML

SEQ ID NO: 7178 - protein, 8 aa, Homo sapiens
  ( 308 )...( 315 ): >TRP1_HUMAN
SRLKLAIK

SEQ ID NO: 7179 - protein, 8 aa, Homo sapiens
  ( 706 )...( 713 ): >TRP1_HUMAN
TSKGKVKR

SEQ ID NO: 7180 - protein, 8 aa, Homo sapiens
  ( 709 )...( 716 ): >TRP1_HUMAN
GKVKRQNS

SEQ ID NO: 7181 - protein, 8 aa, Homo sapiens
  ( 303 )...( 310 ): >TRP3_HUMAN
KASLSRVK

SEQ ID NO: 7182 - protein, 8 aa, Homo sapiens
  ( 307 )...( 314 ): >TRP3_HUMAN
SRVKLAIK

SEQ ID NO: 7183 - protein, 8 aa, Homo sapiens
  ( 308 )...( 315 ): >TRP3_HUMAN
RVKLAIKY

SEQ ID NO: 7184 - protein, 8 aa, Homo sapiens
  ( 373 )...( 380 ): >TRP3_HUMAN
SRLGKILR

SEQ ID NO: 7185 - protein, 8 aa, Homo sapiens
  ( 374 )...( 381 ): >TRP3_HUMAN
RLGKILRS

SEQ ID NO: 7186 - protein, 8 aa, Homo sapiens
  ( 777 )...( 784 ): >TRP3_HUMAN
QIMKRLIK

SEQ ID NO: 7187 - protein, 8 aa, Homo sapiens
  ( 783 )...( 790 ): >TRP3_HUMAN
IKRYVLKA

SEQ ID NO: 7188 - protein, 8 aa, Homo sapiens
  ( 287 )...( 294 ): >TRP4_HUMAN
ARLKLAIK

SEQ ID NO: 7189 - protein, 8 aa, Homo sapiens
  ( 164 )...( 171 ): >TRP5_HUMAN
KRVTIPRP

SEQ ID NO: 7190 - protein, 8 aa, Homo sapiens
  ( 288 )...( 295 ): >TRP5_HUMAN
AKLKVAIK

SEQ ID NO: 7191 - protein, 8 aa, Homo sapiens
  ( 289 )...( 296 ): >TRP5_HUMAN
KLKVAIKY

SEQ ID NO: 7192 - protein, 8 aa, Homo sapiens
  ( 790 )...( 797 ): >TRP5_HUMAN
ARAKSKSV

SEQ ID NO: 7193 - protein, 8 aa, Homo sapiens
  ( 791 )...( 798 ): >TRP5_HUMAN
RAKSKSVS

SEQ ID NO: 7194 - protein, 8 aa, Homo sapiens
  ( 800 )...( 807 ): >TRP5_HUMAN
NLGCKKKT

SEQ ID NO: 7195 - protein, 8 aa, Homo sapiens
  ( 237 )...( 244 ): >TRP6_HUMAN
TLLRKGAR

SEQ ID NO: 7196 - protein, 8 aa, Homo sapiens
  ( 319 )...( 326 ): >TRP6_HUMAN
KKLSMQCK

SEQ ID NO: 7197 - protein, 8 aa, Homo sapiens
  ( 364 )...( 371 ): >TRP6_HUMAN
SRLKLAIK

SEQ ID NO: 7198 - protein, 8 aa, Homo sapiens
  ( 430 )...( 437 ): >TRP6_HUMAN
SKMGKIMR

SEQ ID NO: 7199 - protein, 8 aa, Homo sapiens
  ( 431 )...( 438 ): >TRP6_HUMAN
KMGKIMRG

SEQ ID NO: 7200 - protein, 8 aa, Homo sapiens
  ( 856 )...( 863 ): >TRP6_HUMAN
QKIMKRLI

SEQ ID NO: 7201 - protein, 8 aa, Homo sapiens
  ( 309 )...( 316 ): >TRP7_HUMAN
SRIKLAIK

SEQ ID NO: 7202 - protein, 8 aa, Homo sapiens
  ( 310 )...( 317 ): >TRP7_HUMAN
RIKLAIKY

SEQ ID NO: 7203 - protein, 8 aa, Homo sapiens
  ( 375 )...( 382 ): >TRP7_HUMAN
SKLGRTLR

SEQ ID NO: 7204 - protein, 8 aa, Homo sapiens
  ( 376 )...( 383 ): >TRP7_HUMAN
KLGRTLRS

SEQ ID NO: 7205 - protein, 8 aa, Homo sapiens
  ( 724 )...( 731 ): >TRP7_HUMAN
RIKMCLIK

SEQ ID NO: 7206 - protein, 8 aa, Homo sapiens
  ( 729 )...( 736 ): >TRP7_HUMAN
LIKLCKSK

SEQ ID NO: 7207 - protein, 8 aa, Homo sapiens
  ( 730 )...( 737 ): >TRP7_HUMAN
IKLCKSKA

SEQ ID NO: 7208 - protein, 8 aa, Homo sapiens
  ( 731 )...( 738 ): >TRP7_HUMAN
KLCKSKAK

SEQ ID NO: 7209 - protein, 8 aa, Homo sapiens
  ( 754 )...( 761 ): >TRP7_HUMAN
KKTRYQAG

SEQ ID NO: 7210 - protein, 8 aa, Homo sapiens
  ( 781 )...( 788 ): >TRP7_HUMAN
QKIMKRLI

SEQ ID NO: 7211 - protein, 8 aa, Homo sapiens
  ( 788 )...( 795 ): >TRP7_HUMAN
IKRYVLKA

SEQ ID NO: 7212 - protein, 8 aa, Homo sapiens
  ( 853 )...( 860 ): >TRP7_HUMAN
HLRVNKGK

SEQ ID NO: 7213 - protein, 8 aa, Homo sapiens
  ( 288 )...( 295 ): >TSHR_HUMAN
NQKKIRGI

SEQ ID NO: 7214 - protein, 8 aa, Homo sapiens
  ( 289 )...( 296 ): >TSHR_HUMAN
QKKIRGIL

SEQ ID NO: 7215 - protein, 8 aa, Homo sapiens
  ( 618 )...( 625 ): >TSHR_HUMAN
KDTKIAKR

SEQ ID NO: 7216 - protein, 8 aa, Homo sapiens
  ( 620 )...( 627 ): >TSHR_HUMAN
TKIAKRMA

SEQ ID NO: 7217 - protein, 8 aa, Homo sapiens
  ( 621 )...( 628 ): >TSHR_HUMAN
KIAKRMAV

SEQ ID NO: 7218 - protein, 8 aa, Homo sapiens
  ( 695 )...( 702 ): >TSHR_HUMAN
KFGICKRQ

SEQ ID NO: 7219 - protein, 8 aa, Homo sapiens
  ( 215 )...( 222 ): >UL33_HCMVA
KQRSRTLT

SEQ ID NO: 7220 - protein, 8 aa, Homo sapiens
  ( 165 )...( 172 ): >UL33_HSV6U
VKTNGMKK

SEQ ID NO: 7221 - protein, 8 aa, Homo sapiens
  ( 168 )...( 175 ): >UL33_HSV6U
NGMKKTGK

SEQ ID NO: 7222 - protein, 8 aa, Homo sapiens
  ( 170 )...( 177 ): >UL33_HSV6U
MKKTGKCV

SEQ ID NO: 7223 - protein, 8 aa, Homo sapiens
  ( 317 )...( 324 ): >UL33_HSV6U
LCSTQKRK

SEQ ID NO: 7224 - protein, 8 aa, Homo sapiens
  ( 38 )...( 45 ): >UL33_HSV7J
PTVRKAQR

SEQ ID NO: 7225 - protein, 8 aa, Homo sapiens
  ( 39 )...( 46 ): >UL33_HSV7J
TVRKAQRL

SEQ ID NO: 7226 - protein, 8 aa, Homo sapiens
  ( 185 )...( 192 ): >UL33_HSV7J
KKKGNYGK

SEQ ID NO: 7227 - protein, 8 aa, Homo sapiens
  ( 163 )...( 170 ): >UR2R_HUMAN
KGYRKLLA

SEQ ID NO: 7228 - protein, 8 aa, Homo sapiens
  ( 190 )...( 197 ): >UR2R_HUMAN
LVRRGPKS

SEQ ID NO: 7229 - protein, 8 aa, Homo sapiens
  ( 191 )...( 198 ): >UR2R_HUMAN
VRRGPKSL

SEQ ID NO: 7230 - protein, 8 aa, Homo sapiens
  ( 220 )...( 227 ): >US28_HCMVA
SRHKGRIV

SEQ ID NO: 7231 - protein, 8 aa, Homo sapiens
  ( 222 )...( 229 ): >US28_HCMVA
HKGRIVRV

SEQ ID NO: 7232 - protein, 8 aa, Homo sapiens
  ( 267 )...( 274 ): >US28_HCMVA
RSLKRALI

SEQ ID NO: 7233 - protein, 8 aa, Homo sapiens
  ( 247 )...( 254 ): >V1AR_HUMAN
VRGKTASR

SEQ ID NO: 7234 - protein, 8 aa, Homo sapiens
  ( 279 )...( 286 ): >V1AR_HUMAN
VKSISRAK

SEQ ID NO: 7235 - protein, 8 aa, Homo sapiens
  ( 280 )...( 287 ): >V1AR_HUMAN
KSISRAKI

SEQ ID NO: 7236 - protein, 8 aa, Homo sapiens
  ( 281 )...( 288 ): >V1AR_HUMAN
SISRAKIR

SEQ ID NO: 7237 - protein, 8 aa, Homo sapiens
  ( 282 )...( 289 ): >V1AR_HUMAN
ISRAKIRT

SEQ ID NO: 7238 - protein, 8 aa, Homo sapiens
  ( 283 )...( 290 ): >V1AR_HUMAN
SRAKIRTV

SEQ ID NO: 7239 - protein, 8 aa, Homo sapiens
  ( 285 )...( 292 ): >V1AR_HUMAN
AKIRTVKM

SEQ ID NO: 7240 - protein, 8 aa, Homo sapiens
  ( 286 )...( 293 ): >V1AR_HUMAN
KIRTVKMT

SEQ ID NO: 7241 - protein, 8 aa, Homo sapiens
  ( 60 )...( 67 ): >V1BR_HUMAN
GQLGRKRS

SEQ ID NO: 7242 - protein, 8 aa, Homo sapiens
  ( 226 )...( 233 ): >V1BR_HUMAN
ICKNLKVK

SEQ ID NO: 7243 - protein, 8 aa, Homo sapiens
  ( 227 )...( 234 ): >V1BR_HUMAN
CKNLKVKT

SEQ ID NO: 7244 - protein, 8 aa, Homo sapiens
  ( 228 )...( 235 ): >V1BR_HUMAN
KNLKVKTQ

SEQ ID NO: 7245 - protein, 8 aa, Homo sapiens
  ( 271 )...( 278 ): >V1BR_HUMAN
TISRAKIR

SEQ ID NO: 7246 - protein, 8 aa, Homo sapiens
  ( 272 )...( 279 ): >V1BR_HUMAN
ISRAKIRT

SEQ ID NO: 7247 - protein, 8 aa, Homo sapiens
  ( 273 )...( 280 ): >V1BR_HUMAN
SRAKIRTV

SEQ ID NO: 7248 - protein, 8 aa, Homo sapiens
  ( 275 )...( 282 ): >V1BR_HUMAN
AKIRTVKM

SEQ ID NO: 7249 - protein, 8 aa, Homo sapiens
  ( 276 )...( 283 ): >V1BR_HUMAN
KIRTVKMT

SEQ ID NO: 7250 - protein, 8 aa, Homo sapiens
  ( 236 )...( 243 ): >VG74_KSHV
CVVRRTKL

SEQ ID NO: 7251 - protein, 8 aa, Homo sapiens
  ( 238 )...( 245 ): >VG74_KSHV
VRRTKLQA

SEQ ID NO: 7252 - protein, 8 aa, Homo sapiens
  ( 323 )...( 330 ): >VIPS_HUMAN
YKRLAKST

SEQ ID NO: 7253 - protein, 8 aa, Homo sapiens
  ( 324 )...( 331 ): >VIPS_HUMAN
KRLAKSTL

SEQ ID NO: 7254 - protein, 8 aa, Homo sapiens
  ( 216 )...( 223 ): >Q13675
RGLKSGLK

SEQ ID NO: 7255 - protein, 8 aa, Homo sapiens
  ( 266 )...( 273 ): >Q13675
REKKAAKT

SEQ ID NO: 7256 - protein, 8 aa, Homo sapiens
  ( 420 )...( 427 ): >Q13675
TTARTKSR

SEQ ID NO: 7257 - protein, 8 aa, Homo sapiens
  ( 422 )...( 429 ): >Q13675
ARTKSRSV

SEQ ID NO: 7258 - protein, 8 aa, Homo sapiens
  ( 423 )...( 430 ): >Q13675
RTKSRSVT

SEQ ID NO: 7259 - protein, 8 aa, Homo sapiens
  ( 424 )...( 431 ): >Q13675
TKSRSVTR

SEQ ID NO: 7260 - protein, 8 aa, Homo sapiens
  ( 425 )...( 432 ): >Q13675
KSRSVTRL

SEQ ID NO: 7261 - protein, 8 aa, Homo sapiens
  ( 231 )...( 238 ): >O95800
KNAQVRKC

SEQ ID NO: 7262 - protein, 8 aa, Homo sapiens
  ( 379 )...( 386 ): >O95800
NSAGLRRK

SEQ ID NO: 7263 - protein, 8 aa, Homo sapiens
  ( 380 )...( 387 ): >O95800
SAGLRRKV

SEQ ID NO: 7264 - protein, 8 aa, Homo sapiens
  ( 400 )...( 407 ): >O95800
CCKQKTRL

SEQ ID NO: 7265 - protein, 8 aa, Homo sapiens
  ( 404 )...( 411 ): >O95800
KTRLRAMG

SEQ ID NO: 7266 - protein, 8 aa, Homo sapiens
  ( 405 )...( 412 ): >O95800
TRLRAMGK

SEQ ID NO: 7267 - protein, 8 aa, Homo sapiens
  ( 165 )...( 172 ): >Q9UD67
RGLKSGLK

SEQ ID NO: 7268 - protein, 8 aa, Homo sapiens
  ( 215 )...( 222 ): >Q9UD67
REKKAAKT

SEQ ID NO: 7269 - protein, 8 aa, Homo sapiens
  ( 216 )...( 223 ): >Q9UD63
RGLKSGLK

SEQ ID NO: 7270 - protein, 8 aa, Homo sapiens
  ( 266 )...( 273 ): >Q9UD63
REKKAAKT

SEQ ID NO: 7271 - protein, 8 aa, Homo sapiens
  ( 420 )...( 427 ): >Q9UD63
TTARVRSK

SEQ ID NO: 7272 - protein, 8 aa, Homo sapiens
  ( 421 )...( 428 ): >Q9UD63
TARVRSKS

SEQ ID NO: 7273 - protein, 8 aa, Homo sapiens
  ( 220 )...( 227 ): >Q9UBF7
GIARLHKR

SEQ ID NO: 7274 - protein, 8 aa, Homo sapiens
  ( 216 )...( 223 ): >O60451
RGLKSGLK

SEQ ID NO: 7275 - protein, 8 aa, Homo sapiens
  ( 266 )...( 273 ): >O60451
REKKAAKT

SEQ ID NO: 7276 - protein, 8 aa, Homo sapiens
  ( 346 )...( 353 ): >O60451
LCRKQSSK

SEQ ID NO: 7277 - protein, 8 aa, Homo sapiens
  ( 147 )...( 154 ): >Q9NZR3
SSKRRVTV

SEQ ID NO: 7278 - protein, 8 aa, Homo sapiens
  ( 148 )...( 155 ): >Q9NZR3
SKRRVTVM

SEQ ID NO: 7279 - protein, 8 aa, Homo sapiens
  ( 149 )...( 156 ): >Q9NZR3
KRRVTVMI

SEQ ID NO: 7280 - protein, 8 aa, Homo sapiens
  ( 351 )...( 358 ): >Q9NZR3
GKTRTSLK

SEQ ID NO: 7281 - protein, 8 aa, Homo sapiens
  ( 436 )...( 443 ): >Q9NZR3
RKAFLKIL

SEQ ID NO: 7282 - protein, 8 aa, Homo sapiens
  ( 134 )...( 141 ): >Q9P2Q4
KRTPKHAG

SEQ ID NO: 7283 - protein, 8 aa, Homo sapiens
  ( 203 )...( 210 ): >Q9P2Q4
KIYRAAKT

SEQ ID NO: 7284 - protein, 8 aa, Homo sapiens
  ( 214 )...( 221 ): >Q9P2Q4
KRQASRIA

SEQ ID NO: 7285 - protein, 8 aa, Homo sapiens
  ( 215 )...( 222 ): >Q9P2Q4
RQASRIAK

SEQ ID NO: 7286 - protein, 8 aa, Homo sapiens
  ( 279 )...( 286 ): >Q9P2Q4
RRQKISGT

SEQ ID NO: 7287 - protein, 8 aa, Homo sapiens
  ( 280 )...( 287 ): >Q9P2Q4
RQKISGTR

SEQ ID NO: 7288 - protein, 8 aa, Homo sapiens
  ( 355 )...( 362 ): >Q9P2Q4
KKAFQKLV

SEQ ID NO: 7289 - protein, 8 aa, Homo sapiens
  ( 105 )...( 112 ): >Q9P1X9
YPVKRTTK

SEQ ID NO: 7290 - protein, 8 aa, Homo sapiens
  ( 106 )...( 113 ): >Q9P1X9
PVKRTTKM

SEQ ID NO: 7291 - protein, 8 aa, Homo sapiens
  ( 107 )...( 114 ): >Q9P1X9
VKRTTKMA

SEQ ID NO: 7292 - protein, 8 aa, Homo sapiens
  ( 108 )...( 115 ): >Q9P1X9
KRTTKMAG

SEQ ID NO: 7293 - protein, 8 aa, Homo sapiens
  ( 183 )...( 190 ): >Q9P1X9
ISRASKSR

SEQ ID NO: 7294 - protein, 8 aa, Homo sapiens
  ( 184 )...( 191 ): >Q9P1X9
SRASKSRI

SEQ ID NO: 7295 - protein, 8 aa, Homo sapiens
  ( 186 )...( 193 ): >Q9P1X9
ASKSRIKK

SEQ ID NO: 7296 - protein, 8 aa, Homo sapiens
  ( 300 )...( 307 ): >Q9P1X9
RIGTKTPK

SEQ ID NO: 7297 - protein, 8 aa, Homo sapiens
  ( 331 )...( 338 ): >Q9P1X9
KQNIVARK

SEQ ID NO: 7298 - protein, 8 aa, Homo sapiens
  ( 334 )...( 341 ): >Q9P1X9
IVARKIVK

SEQ ID NO: 7299 - protein, 8 aa, Homo sapiens
  ( 335 )...( 342 ): >Q9P1X9
VARKIVKM

SEQ ID NO: 7300 - protein, 8 aa, Homo sapiens
  ( 336 )...( 343 ): >Q9P1X9
ARKIVKMT

SEQ ID NO: 7301 - protein, 8 aa, Homo sapiens
  ( 338 )...( 345 ): >Q9P1X9
KIVKMTKQ

SEQ ID NO: 7302 - protein, 8 aa, Homo sapiens
  ( 341 )...( 348 ): >Q9P1X9
KMTKQPAK

SEQ ID NO: 7303 - protein, 8 aa, Homo sapiens
  ( 342 )...( 349 ): >Q9P1X9
MTKQPAKK

SEQ ID NO: 7304 - protein, 8 aa, Homo sapiens
  ( 343 )...( 350 ): >Q9P1X9
TKQPAKKK

SEQ ID NO: 7305 - protein, 8 aa, Homo sapiens
  ( 357 )...( 364 ): >Q9P1X9
KKVTRTIL

SEQ ID NO: 7306 - protein, 8 aa, Homo sapiens
  ( 147 )...( 154 ): >Q9UPA9
SSKRRVTV

SEQ ID NO: 7307 - protein, 8 aa, Homo sapiens
  ( 148 )...( 155 ): >Q9UPA9
SKRRVTVM

SEQ ID NO: 7308 - protein, 8 aa, Homo sapiens
  ( 149 )...( 156 ): >Q9UPA9
KRRVTVMI

SEQ ID NO: 7309 - protein, 7 aa, Homo sapiens
  ( 349 )...( 356 ): >Q9UPA9
GKRTSLK

SEQ ID NO: 7310 - protein, 7 aa, Homo sapiens
  ( 350 )...( 357 ): >Q9UPA9
KRTSLKT

SEQ ID NO: 7311 - protein, 8 aa, Homo sapiens
  ( 434 )...( 441 ): >Q9UPA9
RKAFLKIL

SEQ ID NO: 7312 - protein, 8 aa, Homo sapiens
  ( 330 )...( 337 ): >Q9UL61
FVRRVKGT

SEQ ID NO: 7313 - protein, 8 aa, Homo sapiens
  ( 331 )...( 338 ): >Q9UL61
VRRVKGTF

SEQ ID NO: 7314 - protein, 8 aa, Homo sapiens
  ( 332 )...( 339 ): >Q9UL61
RRVKGTFG

SEQ ID NO: 7315 - protein, 8 aa, Homo sapiens
  ( 1166 )...( 1173 ): >Q9UL61
RLAVAHKK

SEQ ID NO: 7316 - protein, 8 aa, Homo sapiens
  ( 217 )...( 224 ): >O75963
VKARKVHC

SEQ ID NO: 7317 - protein, 8 aa, Homo sapiens
  ( 218 )...( 225 ): >O75963
KARKVHCG

SEQ ID NO: 7318 - protein, 8 aa, Homo sapiens
  ( 140 )...( 147 ): >Q9NZH0
RRLVRHGT

SEQ ID NO: 7319 - protein, 8 aa, Homo sapiens
  ( 213 )...( 220 ): >Q9NZH0
TLCGKFKR

SEQ ID NO: 7320 - protein, 8 aa, Homo sapiens
  ( 53 )...( 60 ): >Q9NRB8
AAVIKNRK

SEQ ID NO: 7321 - protein, 8 aa, Homo sapiens
  ( 138 )...( 145 ): >Q9NRB8
SNLTKKRV

SEQ ID NO: 7322 - protein, 8 aa, Homo sapiens
  ( 139 )...( 146 ): >Q9NRB8
NLTKKRVT

SEQ ID NO: 7323 - protein, 8 aa, Homo sapiens
  ( 140 )...( 147 ): >Q9NRB8
LTKKRVTL

SEQ ID NO: 7324 - protein, 8 aa, Homo sapiens
  ( 141 )...( 148 ): >Q9NRB8
TKKRVTLL

SEQ ID NO: 7325 - protein, 8 aa, Homo sapiens
  ( 213 )...( 220 ): >Q9NRB8
VKRKTNVL

SEQ ID NO: 7326 - protein, 8 aa, Homo sapiens
  ( 214 )...( 221 ): >Q9NRB8
KRKTNVLS

SEQ ID NO: 7327 - protein, 8 aa, Homo sapiens
  ( 226 )...( 233 ): >Q9NRB8
GSISRRRT

SEQ ID NO: 7328 - protein, 8 aa, Homo sapiens
  ( 94 )...( 101 ): >Q9HB60
KVNKQLKT

SEQ ID NO: 7329 - protein, 8 aa, Homo sapiens
  ( 175 )...( 182 ): >Q9HB60
TYRAKRTT

SEQ ID NO: 7330 - protein, 8 aa, Homo sapiens
  ( 180 )...( 187 ): >Q9HB60
RTTKRAGV

SEQ ID NO: 7331 - protein, 8 aa, Homo sapiens
  ( 146 )...( 153 ): >Q9BZK1
TPRRIKAI

SEQ ID NO: 7332 - protein, 8 aa, Homo sapiens
  ( 318 )...( 325 ): >Q9BZK1
KGKARASQ

SEQ ID NO: 7333 - protein, 8 aa, Homo sapiens
  ( 320 )...( 327 ): >Q9BZK1
KARASQVK

SEQ ID NO: 7334 - protein, 8 aa, Homo sapiens
  ( 435 )...( 442 ): >Q9BZK1
RAFKKILC

SEQ ID NO: 7335 - protein, 8 aa, Homo sapiens
  ( 436 )...( 443 ): >Q9BZK1
AFKKILCR

SEQ ID NO: 7336 - protein, 8 aa, Homo sapiens
  ( 437 )...( 444 ): >Q9BZK1
FKKILCRG

SEQ ID NO: 7337 - protein, 8 aa, Homo sapiens
  ( 125 )...( 132 ): >Q9BZK0
TPRRIKCI

SEQ ID NO: 7338 - protein, 8 aa, Homo sapiens
  ( 231 )...( 238 ): >Q9BXA0
GHQKRKAL

SEQ ID NO: 7339 - protein, 8 aa, Homo sapiens
  ( 234 )...( 241 ): >Q9BXA0
KRKALKTT

SEQ ID NO: 7340 - protein, 8 aa, Homo sapiens
  ( 235 )...( 242 ): >Q9BXA0
RKALKTTI

SEQ ID NO: 7341 - protein, 8 aa, Homo sapiens
  ( 326 )...( 333 ): >Q9BXA0
LKILSKGK

SEQ ID NO: 7342 - protein, 8 aa, Homo sapiens
  ( 328 )...( 335 ): >Q9BXA0
ILSKGKRG

SEQ ID NO: 7343 - protein, 8 aa, Homo sapiens
  ( 47 )...( 54 ): >Q9NTT0
AALTRYKK

SEQ ID NO: 7344 - protein, 8 aa, Homo sapiens
  ( 48 )...( 55 ): >Q9NTT0
ALTRYKKL

SEQ ID NO: 7345 - protein, 8 aa, Homo sapiens
  ( 240 )...( 247 ): >Q9NTT0
CRRKTVLV

SEQ ID NO: 7346 - protein, 8 aa, Homo sapiens
  ( 19 )...( 26 ): >Q9H573
RTGFCKKQ

SEQ ID NO: 7347 - protein, 8 aa, Homo sapiens
  ( 158 )...( 165 ): >Q9H573
VRYTKMKT

SEQ ID NO: 7348 - protein, 8 aa, Homo sapiens
  ( 159 )...( 166 ): >Q9H573
RYTKMKTA

SEQ ID NO: 7349 - protein, 8 aa, Homo sapiens
  ( 320 )...( 327 ): >Q9H573
ILRLKSVR

SEQ ID NO: 7350 - protein, 8 aa, Homo sapiens
  ( 321 )...( 328 ): >Q9H573
LRLKSVRM

SEQ ID NO: 7351 - protein, 8 aa, Homo sapiens
  ( 322 )...( 329 ): >Q9H573
RLKSVRML

SEQ ID NO: 7352 - protein, 8 aa, Homo sapiens
  ( 292 )...( 299 ): >Q9H1N4
VKRERGKA

SEQ ID NO: 7353 - protein, 8 aa, Homo sapiens
  ( 342 )...( 349 ): >Q9H1N4
REKKAAKT

SEQ ID NO: 7354 - protein, 8 aa, Homo sapiens
  ( 93 )...( 100 ): >Q9BYZ0
LLTKNKAR

SEQ ID NO: 7355 - protein, 8 aa, Homo sapiens
  ( 94 )...( 101 ): >Q9BYZ0
LTKNKARV

SEQ ID NO: 7356 - protein, 8 aa, Homo sapiens
  ( 95 )...( 102 ): >Q9BYZ0
TKNKARVI

SEQ ID NO: 7357 - protein, 8 aa, Homo sapiens
  ( 96 )...( 103 ): >Q9BYZ0
KNKARVII

SEQ ID NO: 7358 - protein, 8 aa, Homo sapiens
  ( 175 )...( 182 ): >Q9BYZ0
AKRQLQKI

SEQ ID NO: 7359 - protein, 8 aa, Homo sapiens
  ( 202 )...( 209 ): >Q9BYZ0
RTGHGLRR

SEQ ID NO: 7360 - protein, 8 aa, Homo sapiens
  ( 216 )...( 223 ): >Q13729
RGLKSGLK

SEQ ID NO: 7361 - protein, 8 aa, Homo sapiens
  ( 266 )...( 273 ): >Q13729
REKKAAKT

SEQ ID NO: 7362 - protein, 8 aa, Homo sapiens
  ( 188 )...( 195 ): >Q9NSD7
LKSHRTRG

SEQ ID NO: 7363 - protein, 8 aa, Homo sapiens
  ( 316 )...( 323 ): >Q9NSD7
ASARRLSK

SEQ ID NO: 7364 - protein, 8 aa, Homo sapiens
  ( 317 )...( 324 ): >Q9NSD7
SARRLSKV

SEQ ID NO: 7365 - protein, 8 aa, Homo sapiens
  ( 318 )...( 325 ): >Q9NSD7
ARRLSKVT

SEQ ID NO: 7366 - protein, 8 aa, Homo sapiens
  ( 320 )...( 327 ): >Q9NSD7
RLSKVTKS

SEQ ID NO: 7367 - protein, 8 aa, Homo sapiens
  ( 397 )...( 404 ): >Q9NSD7
RKALKSLL

SEQ ID NO: 7368 - protein, 8 aa, Homo sapiens
  ( 297 )...( 304 ): >Q13167
VRKLSNGR

SEQ ID NO: 7369 - protein, 8 aa, Homo sapiens
  ( 298 )...( 305 ): >Q13167
RKLSNGRL

SEQ ID NO: 7370 - protein, 8 aa, Homo sapiens
  ( 390 )...( 397 ): >Q13167
RKAFLKIL

SEQ ID NO: 7371 - protein, 8 aa, Homo sapiens
  ( 164 )...( 171 ): >Q9UE21
PVKSLKLR

SEQ ID NO: 7372 - protein, 8 aa, Homo sapiens
  ( 253 )...( 260 ): >Q9UE21
VEKRLKTK

SEQ ID NO: 7373 - protein, 8 aa, Homo sapiens
  ( 254 )...( 261 ): >Q9UE21
EKRLKTKA

SEQ ID NO: 7374 - protein, 8 aa, Homo sapiens
  ( 257 )...( 264 ): >Q9UE21
LKTKAVRM

SEQ ID NO: 7375 - protein, 8 aa, Homo sapiens
  ( 258 )...( 265 ): >Q9UE21
KTKAVRMI

SEQ ID NO: 7376 - protein, 8 aa, Homo sapiens
  ( 339 )...( 346 ): >Q9UE21
LLCGKRLK

SEQ ID NO: 7377 - protein, 8 aa, Homo sapiens
  ( 340 )...( 347 ): >Q9UE21
LCGKRLKG

SEQ ID NO: 7378 - protein, 8 aa, Homo sapiens
  ( 342 )...( 349 ): >Q9UE21
GKRLKGPP

SEQ ID NO: 7379 - protein, 8 aa, Homo sapiens
  ( 95 )...( 102 ): >Q9UDZ6
PVKSLKLR

SEQ ID NO: 7380 - protein, 8 aa, Homo sapiens
  ( 184 )...( 191 ): >Q9UDZ6
VEKRLKTK

SEQ ID NO: 7381 - protein, 8 aa, Homo sapiens
  ( 185 )...( 192 ): >Q9UDZ6
EKRLKTKA

SEQ ID NO: 7382 - protein, 8 aa, Homo sapiens
  ( 188 )...( 195 ): >Q9UDZ6
LKTKAVRM

SEQ ID NO: 7383 - protein, 8 aa, Homo sapiens
  ( 189 )...( 196 ): >Q9UDZ6
KTKAVRMI

SEQ ID NO: 7384 - protein, 8 aa, Homo sapiens
  ( 270 )...( 277 ): >Q9UDZ6
LLCGKRLK

SEQ ID NO: 7385 - protein, 8 aa, Homo sapiens
  ( 271 )...( 278 ): >Q9UDZ6
LCGKRLKG

SEQ ID NO: 7386 - protein, 8 aa, Homo sapiens
  ( 273 )...( 280 ): >Q9UDZ6
GKRLKGPP

SEQ ID NO: 7387 - protein, 8 aa, Homo sapiens
  ( 807 )...( 814 ): >O00406
VQLCRIKK

SEQ ID NO: 7388 - protein, 8 aa, Homo sapiens
  ( 812 )...( 819 ): >O00406
IKKKKQLG

SEQ ID NO: 7389 - protein, 8 aa, Homo sapiens
  ( 813 )...( 820 ): >O00406
KKKKQLGA

SEQ ID NO: 7390 - protein, 8 aa, Homo sapiens
  ( 814 )...( 821 ): >O00406
KKKQLGAQ

SEQ ID NO: 7391 - protein, 8 aa, Homo sapiens
  ( 815 )...( 822 ): >O00406
KKQLGAQR

SEQ ID NO: 7392 - protein, 8 aa, Homo sapiens
  ( 816 )...( 823 ): >O00406
KQLGAQRK

SEQ ID NO: 7393 - protein, 8 aa, Homo sapiens
  ( 997 )...( 1004 ): >O00406
MALRRTSK

SEQ ID NO: 7394 - protein, 8 aa, Homo sapiens
  ( 1001 )...( 1008 ): >O00406
RTSKRGSL

SEQ ID NO: 7395 - protein, 8 aa, Homo sapiens
  ( 133 )...( 140 ): >Q9BPV8
LKKPVFAK

SEQ ID NO: 7396 - protein, 8 aa, Homo sapiens
  ( 134 )...( 141 ): >Q9BPV8
KKPVFAKT

SEQ ID NO: 7397 - protein, 8 aa, Homo sapiens
  ( 170 )...( 177 ): >Q9BPV8
VKKCASLK

SEQ ID NO: 7398 - protein, 8 aa, Homo sapiens
  ( 154 )...( 161 ): >Q96RV1
FKPKLTIK

SEQ ID NO: 7399 - protein, 8 aa, Homo sapiens
  ( 272 )...( 279 ): >Q96RV1
KQKIIKML

SEQ ID NO: 7400 - protein, 8 aa, Homo sapiens
  ( 354 )...( 361 ): >Q96RV1
QLCQKRAK

SEQ ID NO: 7401 - protein, 8 aa, Homo sapiens
  ( 355 )...( 362 ): >Q96RV1
LCQKRAKP

SEQ ID NO: 7402 - protein, 8 aa, Homo sapiens
  ( 58 )...( 65 ): >Q9BWH1
RPRTAKMI

SEQ ID NO: 7403 - protein, 8 aa, Homo sapiens
  ( 137 )...( 144 ): >Q9BWH1
KVKSSGIR

SEQ ID NO: 7404 - protein, 8 aa, Homo sapiens
  ( 143 )...( 150 ): >Q9BWH1
IRVGSSKR

SEQ ID NO: 7405 - protein, 8 aa, Homo sapiens
  ( 145 )...( 152 ): >Q9BWH1
VGSSKRKK

SEQ ID NO: 7406 - protein, 8 aa, Homo sapiens
  ( 152 )...( 159 ): >Q9BWH1
KSEKKVTR

SEQ ID NO: 7407 - protein, 8 aa, Homo sapiens
  ( 155 )...( 162 ): >Q9BWH1
KKVTRMVS

SEQ ID NO: 7408 - protein, 8 aa, Homo sapiens
  ( 246 )...( 253 ): >O95977
ARRLLKTV

SEQ ID NO: 7409 - protein, 8 aa, Homo sapiens
  ( 81 )...( 88 ): >Q9NZG5
TKKRSLLG

SEQ ID NO: 7410 - protein, 8 aa, Homo sapiens
  ( 82 )...( 89 ): >Q9NZG5
KKRSLLGT

SEQ ID NO: 7411 - protein, 8 aa, Homo sapiens
  ( 125 )...( 132 ): >Q9H244
KTTRPFKT

SEQ ID NO: 7412 - protein, 8 aa, Homo sapiens
  ( 172 )...( 179 ): >Q9H244
VKKCSFLK

SEQ ID NO: 7413 - protein, 8 aa, Homo sapiens
  ( 229 )...( 236 ): >Q9H244
VPRKKVNV

SEQ ID NO: 7414 - protein, 8 aa, Homo sapiens
  ( 232 )...( 239 ): >Q9H244
KKVNVKVF

SEQ ID NO: 7415 - protein, 8 aa, Homo sapiens
  ( 220 )...( 227 ): >Q9IP67
SRHKGRIV

SEQ ID NO: 7416 - protein, 8 aa, Homo sapiens
  ( 222 )...( 229 ): >Q9IP67
HKGRIVRV

SEQ ID NO: 7417 - protein, 8 aa, Homo sapiens
  ( 267 )...( 274 ): >Q9IP67
RSLKRALI

SEQ ID NO: 7418 - protein, 8 aa, Homo sapiens
  ( 220 )...( 227 ): >Q9IP66
SRHKGRIV

SEQ ID NO: 7419 - protein, 8 aa, Homo sapiens
  ( 222 )...( 229 ): >Q9IP66
HKGRIVRV

SEQ ID NO: 7420 - protein, 8 aa, Homo sapiens
  ( 267 )...( 274 ): >Q9IP66
RSLKRALI

SEQ ID NO: 7421 - protein, 12 aa, Homo sapiens
  ( 145 )...( 156 ): >5H1A_HUMAN
VNKRTPRRAAAL

SEQ ID NO: 7422 - protein, 12 aa, Homo sapiens
  ( 146 )...( 157 ): >5H1A_HUMAN
NKRTPRRAAALI

SEQ ID NO: 7423 - protein, 12 aa, Homo sapiens
  ( 147 )...( 158 ): >5H1A_HUMAN
KRTPRRAAALIS

SEQ ID NO: 7424 - protein, 12 aa, Homo sapiens
  ( 148 )...( 159 ): >5H1A_HUMAN
RTPRRAAALISL

SEQ ID NO: 7425 - protein, 12 aa, Homo sapiens
  ( 212 )...( 223 ): >5H1A_HUMAN
LVLYGRIFRAAR

SEQ ID NO: 7426 - protein, 12 aa, Homo sapiens
  ( 213 )...( 224 ): >5H1A_HUMAN
VLYGRIFRAARF

SEQ ID NO: 7427 - protein, 12 aa, Homo sapiens
  ( 226 )...( 237 ): >5H1A_HUMAN
IRKTVKKVEKTG

SEQ ID NO: 7428 - protein, 12 aa, Homo sapiens
  ( 227 )...( 238 ): >5H1A_HUMAN
RKTVKKVEKTGA

SEQ ID NO: 7429 - protein, 12 aa, Homo sapiens
  ( 327 )...( 338 ): >5H1A_HUMAN
RNAEAKRKMALA

SEQ ID NO: 7430 - protein, 12 aa, Homo sapiens
  ( 328 )...( 339 ): >5H1A_HUMAN
NAEAKRKMALAR

SEQ ID NO: 7431 - protein, 12 aa, Homo sapiens
  ( 333 )...( 344 ): >5H1A_HUMAN
RKMALARERKTV

SEQ ID NO: 7432 - protein, 12 aa, Homo sapiens
  ( 334 )...( 345 ): >5H1A_HUMAN
KMALARERKTVK

SEQ ID NO: 7433 - protein, 12 aa, Homo sapiens
  ( 335 )...( 346 ): >5H1A_HUMAN
MALARERKTVKT

SEQ ID NO: 7434 - protein, 12 aa, Homo sapiens
  ( 336 )...( 347 ): >5H1A_HUMAN
ALARERKTVKTL

SEQ ID NO: 7435 - protein, 12 aa, Homo sapiens
  ( 337 )...( 348 ): >5H1A_HUMAN
LARERKTVKTLG

SEQ ID NO: 7436 - protein, 12 aa, Homo sapiens
  ( 338 )...( 349 ): >5H1A_HUMAN
ARERKTVKTLGI

SEQ ID NO: 7437 - protein, 12 aa, Homo sapiens
  ( 339 )...( 350 ): >5H1A_HUMAN
RERKTVKTLGII

SEQ ID NO: 7438 - protein, 12 aa, Homo sapiens
  ( 68 )...( 79 ): >5H1B_HUMAN
AFVIATVYRTRK

SEQ ID NO: 7439 - protein, 12 aa, Homo sapiens
  ( 69 )...( 80 ): >5H1B_HUMAN
FVIATVYRTRKL

SEQ ID NO: 7440 - protein, 12 aa, Homo sapiens
  ( 70 )...( 81 ): >5H1B_HUMAN
VIATVYRTRKLH

SEQ ID NO: 7441 - protein, 12 aa, Homo sapiens
  ( 71 )...( 82 ): >5H1B_HUMAN
IATVYRTRKLHT

SEQ ID NO: 7442 - protein, 12 aa, Homo sapiens
  ( 72 )...( 83 ): >5H1B_HUMAN
ATVYRTRKLHTP

SEQ ID NO: 7443 - protein, 12 aa, Homo sapiens
  ( 73 )...( 84 ): >5H1B_HUMAN
TVYRTRKLHTPA

SEQ ID NO: 7444 - protein, 12 aa, Homo sapiens
  ( 154 )...( 165 ): >5H1B_HUMAN
AVEYSAKRTPKR

SEQ ID NO: 7445 - protein, 12 aa, Homo sapiens
  ( 155 )...( 166 ): >5H1B_HUMAN
VEYSAKRTPKRA

SEQ ID NO: 7446 - protein, 12 aa, Homo sapiens
  ( 156 )...( 167 ): >5H1B_HUMAN
EYSAKRTPKRAA

SEQ ID NO: 7447 - protein, 12 aa, Homo sapiens
  ( 157 )...( 168 ): >5H1B_HUMAN
YSAKRTPKRAAV

SEQ ID NO: 7448 - protein, 12 aa, Homo sapiens
  ( 158 )...( 169 ): >5H1B_HUMAN
SAKRTPKRAAVM

SEQ ID NO: 7449 - protein, 12 aa, Homo sapiens
  ( 159 )...( 170 ): >5H1B_HUMAN
AKRTPKRAAVMI

SEQ ID NO: 7450 - protein, 12 aa, Homo sapiens
  ( 160 )...( 171 ): >5H1B_HUMAN
KRTPKRAAVMIA

SEQ ID NO: 7451 - protein, 12 aa, Homo sapiens
  ( 161 )...( 172 ): >5H1B_HUMAN
RTPKRAAVMIAL

SEQ ID NO: 7452 - protein, 12 aa, Homo sapiens
  ( 237 )...( 248 ): >5H1B_HUMAN
SRILKQTPNRTG

SEQ ID NO: 7453 - protein, 12 aa, Homo sapiens
  ( 238 )...( 249 ): >5H1B_HUMAN
RILKQTPNRTGK

SEQ ID NO: 7454 - protein, 12 aa, Homo sapiens
  ( 239 )...( 250 ): >5H1B_HUMAN
ILKQTPNRTGKR

SEQ ID NO: 7455 - protein, 12 aa, Homo sapiens
  ( 240 )...( 251 ): >5H1B_HUMAN
LKQTPNRTGKRL

SEQ ID NO: 7456 - protein, 12 aa, Homo sapiens
  ( 241 )...( 252 ): >5H1B_HUMAN
KQTPNRTGKRLT

SEQ ID NO: 7457 - protein, 12 aa, Homo sapiens
  ( 242 )...( 253 ): >5H1B_HUMAN
QTPNRTGKRLTR

SEQ ID NO: 7458 - protein, 12 aa, Homo sapiens
  ( 243 )...( 254 ): >5H1B_HUMAN
TPNRTGKRLTRA

SEQ ID NO: 7459 - protein, 12 aa, Homo sapiens
  ( 244 )...( 255 ): >5H1B_HUMAN
PNRTGKRLTRAQ

SEQ ID NO: 7460 - protein, 12 aa, Homo sapiens
  ( 245 )...( 256 ): >5H1B_HUMAN
NRTGKRLTRAQL

SEQ ID NO: 7461 - protein, 12 aa, Homo sapiens
  ( 246 )...( 257 ): >5H1B_HUMAN
RTGKRLTRAQLI

SEQ ID NO: 7462 - protein, 12 aa, Homo sapiens
  ( 247 )...( 258 ): >5H1B_HUMAN
TGKRLTRAQLIT

SEQ ID NO: 7463 - protein, 12 aa, Homo sapiens
  ( 297 )...( 308 ): >5H1B_HUMAN
ALLEKKKLMAAR

SEQ ID NO: 7464 - protein, 12 aa, Homo sapiens
  ( 302 )...( 313 ): >5H1B_HUMAN
KKLMAARERKAT

SEQ ID NO: 7465 - protein, 12 aa, Homo sapiens
  ( 303 )...( 314 ): >5H1B_HUMAN
KLMAARERKATK

SEQ ID NO: 7466 - protein, 12 aa, Homo sapiens
  ( 304 )...( 315 ): >5H1B_HUMAN
LMAARERKATKT

SEQ ID NO: 7467 - protein, 12 aa, Homo sapiens
  ( 305 )...( 316 ): >5H1B_HUMAN
MAARERKATKTL

SEQ ID NO: 7468 - protein, 12 aa, Homo sapiens
  ( 306 )...( 317 ): >5H1B_HUMAN
AARERKATKTLG

SEQ ID NO: 7469 - protein, 12 aa, Homo sapiens
  ( 307 )...( 318 ): >5H1B_HUMAN
ARERKATKTLGI

SEQ ID NO: 7470 - protein, 12 aa, Homo sapiens
  ( 308 )...( 319 ): >5H1B_HUMAN
RERKATKTLGII

SEQ ID NO: 7471 - protein, 9 aa, Homo sapiens
  ( 382 )...( 393 ): >5H1B_HUMAN
KLIRFKCTS

SEQ ID NO: 7472 - protein, 12 aa, Homo sapiens
  ( 146 )...( 157 ): >5H1D_HUMAN
YSKRRTAGHAAT

SEQ ID NO: 7473 - protein, 12 aa, Homo sapiens
  ( 147 )...( 158 ): >5H1D_HUMAN
SKRRTAGHAATM

SEQ ID NO: 7474 - protein, 12 aa, Homo sapiens
  ( 148 )...( 159 ): >5H1D_HUMAN
KRRTAGHAATMI

SEQ ID NO: 7475 - protein, 12 aa, Homo sapiens
  ( 214 )...( 225 ): >5H1D_HUMAN
IILYGRIYRAAR

SEQ ID NO: 7476 - protein, 12 aa, Homo sapiens
  ( 284 )...( 295 ): >5H1D_HUMAN
SALERKRISAAR

SEQ ID NO: 7477 - protein, 12 aa, Homo sapiens
  ( 289 )...( 300 ): >5H1D_HUMAN
KRISAARERKAT

SEQ ID NO: 7478 - protein, 12 aa, Homo sapiens
  ( 290 )...( 301 ): >5H1D_HUMAN
RISAARERKATK

SEQ ID NO: 7479 - protein, 12 aa, Homo sapiens
  ( 291 )...( 302 ): >5H1D_HUMAN
ISAARERKATKI

SEQ ID NO: 7480 - protein, 12 aa, Homo sapiens
  ( 292 )...( 303 ): >5H1D_HUMAN
SAARERKATKIL

SEQ ID NO: 7481 - protein, 12 aa, Homo sapiens
  ( 293 )...( 304 ): >5H1D_HUMAN
AARERKATKILG

SEQ ID NO: 7482 - protein, 12 aa, Homo sapiens
  ( 294 )...( 305 ): >5H1D_HUMAN
ARERKATKILGI

SEQ ID NO: 7483 - protein, 12 aa, Homo sapiens
  ( 295 )...( 306 ): >5H1D_HUMAN
RERKATKILGII

SEQ ID NO: 7484 - protein, 12 aa, Homo sapiens
  ( 366 )...( 377 ): >5H1D_HUMAN
AFQKIVPFRKAS

SEQ ID NO: 7485 - protein, 10 aa, Homo sapiens
  ( 368 )...( 379 ): >5H1D_HUMAN
QKIVPFRKAS

SEQ ID NO: 7486 - protein, 12 aa, Homo sapiens
  ( 133 )...( 144 ): >5H1E_HUMAN
KRTAKRAALMIL

SEQ ID NO: 7487 - protein, 12 aa, Homo sapiens
  ( 134 )...( 145 ): >5H1E_HUMAN
RTAKRAALMILT

SEQ ID NO: 7488 - protein, 12 aa, Homo sapiens
  ( 209 )...( 220 ): >5H1E_HUMAN
AKSLYQKRGSSR

SEQ ID NO: 7489 - protein, 12 aa, Homo sapiens
  ( 280 )...( 291 ): >5H1E_HUMAN
QISSTRERKAAR

SEQ ID NO: 7490 - protein, 12 aa, Homo sapiens
  ( 281 )...( 292 ): >5H1E_HUMAN
ISSTRERKAARI

SEQ ID NO: 7491 - protein, 12 aa, Homo sapiens
  ( 282 )...( 293 ): >5H1E_HUMAN
SSTRERKAARIL

SEQ ID NO: 7492 - protein, 12 aa, Homo sapiens
  ( 283 )...( 294 ): >5H1E_HUMAN
STRERKAARILG

SEQ ID NO: 7493 - protein, 12 aa, Homo sapiens
  ( 284 )...( 295 ): >5H1E_HUMAN
TRERKAARILGL

SEQ ID NO: 7494 - protein, 12 aa, Homo sapiens
  ( 285 )...( 296 ): >5H1E_HUMAN
RERKAARILGLI

SEQ ID NO: 7495 - protein, 12 aa, Homo sapiens
  ( 131 )...( 142 ): >5H1F_HUMAN
YARKRTPKHAGI

SEQ ID NO: 7496 - protein, 12 aa, Homo sapiens
  ( 132 )...( 143 ): >5H1F_HUMAN
ARKRTPKHAGIM

SEQ ID NO: 7497 - protein, 12 aa, Homo sapiens
  ( 133 )...( 144 ): >5H1F_HUMAN
RKRTPKHAGIMI

SEQ ID NO: 7498 - protein, 12 aa, Homo sapiens
  ( 210 )...( 221 ): >5H1F_HUMAN
TLYHKRQASRIA

SEQ ID NO: 7499 - protein, 12 aa, Homo sapiens
  ( 280 )...( 291 ): >5H1F_HUMAN
RQKISGTRERKA

SEQ ID NO: 7500 - protein, 12 aa, Homo sapiens
  ( 281 )...( 292 ): >5H1F_HUMAN
QKISGTRERKAA

SEQ ID NO: 7501 - protein, 12 aa, Homo sapiens
  ( 282 )...( 293 ): >5H1F_HUMAN
KISGTRERKAAT

SEQ ID NO: 7502 - protein, 11 aa, Homo sapiens
  ( 356 )...( 367 ): >5H1F_HUMAN
KAFQKLVRCRC

SEQ ID NO: 7503 - protein, 12 aa, Homo sapiens
  ( 186 )...( 197 ): >5H2A_HUMAN
FNSRTKAFLKII

SEQ ID NO: 7504 - protein, 12 aa, Homo sapiens
  ( 187 )...( 198 ): >5H2A_HUMAN
NSRTKAFLKIIA

SEQ ID NO: 7505 - protein, 12 aa, Homo sapiens
  ( 188 )...( 199 ): >5H2A_HUMAN
SRTKAFLKIIAV

SEQ ID NO: 7506 - protein, 12 aa, Homo sapiens
  ( 423 )...( 434 ): >5H2A_HUMAN
QLQMGQKKNSKQ

SEQ ID NO: 7507 - protein, 12 aa, Homo sapiens
  ( 153 )...( 164 ): >5H2B_HUMAN
RYIAIKKPIQAN

SEQ ID NO: 7508 - protein, 12 aa, Homo sapiens
  ( 243 )...( 254 ): >5H2B_HUMAN
ALQKKAYLVKNK

SEQ ID NO: 7509 - protein, 12 aa, Homo sapiens
  ( 300 )...( 311 ): >5H2B_HUMAN
TLMRRTSTIGKK

SEQ ID NO: 7510 - protein, 12 aa, Homo sapiens
  ( 301 )...( 312 ): >5H2B_HUMAN
LMRRTSTIGKKS

SEQ ID NO: 7511 - protein, 12 aa, Homo sapiens
  ( 302 )...( 313 ): >5H2B_HUMAN
MRRTSTIGKKSV

SEQ ID NO: 7512 - protein, 12 aa, Homo sapiens
  ( 303 )...( 314 ): >5H2B_HUMAN
RRTSTIGKKSVQ

SEQ ID NO: 7513 - protein, 12 aa, Homo sapiens
  ( 392 )...( 403 ): >5H2B_HUMAN
GRYITCNYRATK

SEQ ID NO: 7514 - protein, 12 aa, Homo sapiens
  ( 395 )...( 406 ): >5H2B_HUMAN
ITCNYRATKSVK

SEQ ID NO: 7515 - protein, 12 aa, Homo sapiens
  ( 397 )...( 408 ): >5H2B_HUMAN
CNYRATKSVKTL

SEQ ID NO: 7516 - protein, 12 aa, Homo sapiens
  ( 398 )...( 409 ): >5H2B_HUMAN
NYRATKSVKTLR

SEQ ID NO: 7517 - protein, 12 aa, Homo sapiens
  ( 399 )...( 410 ): >5H2B_HUMAN
YRATKSVKTLRK

SEQ ID NO: 7518 - protein, 12 aa, Homo sapiens
  ( 401 )...( 412 ): >5H2B_HUMAN
ATKSVKTLRKRS

SEQ ID NO: 7519 - protein, 12 aa, Homo sapiens
  ( 402 )...( 413 ): >5H2B_HUMAN
TKSVKTLRKRSS

SEQ ID NO: 7520 - protein, 12 aa, Homo sapiens
  ( 403 )...( 414 ): >5H2B_HUMAN
KSVKTLRKRSSK

SEQ ID NO: 7521 - protein, 12 aa, Homo sapiens
  ( 404 )...( 415 ): >5H2B_HUMAN
SVKTLRKRSSKI

SEQ ID NO: 7522 - protein, 12 aa, Homo sapiens
  ( 165 )...( 176 ): >5H2C_HUMAN
FNSRTKAIMKIA

SEQ ID NO: 7523 - protein, 12 aa, Homo sapiens
  ( 166 )...( 177 ): >5H2C_HUMAN
NSRTKAIMKIAI

SEQ ID NO: 7524 - protein, 12 aa, Homo sapiens
  ( 167 )...( 178 ): >5H2C_HUMAN
SRTKAIMKIAIV

SEQ ID NO: 7525 - protein, 12 aa, Homo sapiens
  ( 168 )...( 179 ): >5H2C_HUMAN
RTKAIMKIAIVW

SEQ ID NO: 7526 - protein, 12 aa, Homo sapiens
  ( 292 )...( 303 ): >5H2C_HUMAN
KERRPRGTMQAI

SEQ ID NO: 7527 - protein, 12 aa, Homo sapiens
  ( 307 )...( 318 ): >5H2C_HUMAN
RKASKVLGIVFF

SEQ ID NO: 7528 - protein, 12 aa, Homo sapiens
  ( 388 )...( 399 ): >5H2C_HUMAN
KVEKKPPVRQIP

SEQ ID NO: 7529 - protein, 12 aa, Homo sapiens
  ( 391 )...( 402 ): >5H2C_HUMAN
KKPPVRQIPRVA

SEQ ID NO: 7530 - protein, 12 aa, Homo sapiens
  ( 392 )...( 403 ): >5H2C_HUMAN
KPPVRQIPRVAA

SEQ ID NO: 7531 - protein, 12 aa, Homo sapiens
  ( 50 )...( 61 ): >5H4_HUMAN
LRKIKTNYFIVS

SEQ ID NO: 7532 - protein, 12 aa, Homo sapiens
  ( 51 )...( 62 ): >5H4_HUMAN
RKIKTNYFIVSL

SEQ ID NO: 7533 - protein, 12 aa, Homo sapiens
  ( 128 )...( 139 ): >5H4_HUMAN
VYRNKMTPLRIA

SEQ ID NO: 7534 - protein, 12 aa, Homo sapiens
  ( 130 )...( 141 ): >5H4_HUMAN
RNKMTPLRIALM

SEQ ID NO: 7535 - protein, 12 aa, Homo sapiens
  ( 250 )...( 261 ): >5H4_HUMAN
RMRTETKAAKTL

SEQ ID NO: 7536 - protein, 12 aa, Homo sapiens
  ( 317 )...( 328 ): >5H4_HUMAN
KSFRRAFLIILC

SEQ ID NO: 7537 - protein, 12 aa, Homo sapiens
  ( 333 )...( 344 ): >5H4_HUMAN
RYRRPSILGQTV

SEQ ID NO: 7538 - protein, 12 aa, Homo sapiens
  ( 62 )...( 73 ): >5H5A_HUMAN
LATILRVRTFHR

SEQ ID NO: 7539 - protein, 12 aa, Homo sapiens
  ( 63 )...( 74 ): >5H5A_HUMAN
ATILRVRTFHRV

SEQ ID NO: 7540 - protein, 12 aa, Homo sapiens
  ( 64 )...( 75 ): >5H5A_HUMAN
TILRVRTFHRVP

SEQ ID NO: 7541 - protein, 12 aa, Homo sapiens
  ( 149 )...( 160 ): >5H5A_HUMAN
YTLRTRKCVSNV

SEQ ID NO: 7542 - protein, 12 aa, Homo sapiens
  ( 150 )...( 161 ): >5H5A_HUMAN
TLRTRKCVSNVM

SEQ ID NO: 7543 - protein, 12 aa, Homo sapiens
  ( 151 )...( 162 ): >5H5A_HUMAN
LRTRKCVSNVMI

SEQ ID NO: 7544 - protein, 12 aa, Homo sapiens
  ( 152 )...( 163 ): >5H5A_HUMAN
RTRKCVSNVMIA

SEQ ID NO: 7545 - protein, 12 aa, Homo sapiens
  ( 222 )...( 233 ): >5H5A_HUMAN
KIYKAAKFRVGS

SEQ ID NO: 7546 - protein, 12 aa, Homo sapiens
  ( 223 )...( 234 ): >5H5A_HUMAN
IYKAAKFRVGSR

SEQ ID NO: 7547 - protein, 12 aa, Homo sapiens
  ( 224 )...( 235 ): >5H5A_HUMAN
YKAAKFRVGSRK

SEQ ID NO: 7548 - protein, 12 aa, Homo sapiens
  ( 225 )...( 236 ): >5H5A_HUMAN
KAAKFRVGSRKT

SEQ ID NO: 7549 - protein, 12 aa, Homo sapiens
  ( 226 )...( 237 ): >5H5A_HUMAN
AAKFRVGSRKTN

SEQ ID NO: 7550 - protein, 12 aa, Homo sapiens
  ( 227 )...( 238 ): >5H5A_HUMAN
AKFRVGSRKTNS

SEQ ID NO: 7551 - protein, 12 aa, Homo sapiens
  ( 228 )...( 239 ): >5H5A_HUMAN
KFRVGSRKTNSV

SEQ ID NO: 7552 - protein, 12 aa, Homo sapiens
  ( 229 )...( 240 ): >5H5A_HUMAN
FRVGSRKTNSVS

SEQ ID NO: 7553 - protein, 12 aa, Homo sapiens
  ( 230 )...( 241 ): >5H5A_HUMAN
RVGSRKTNSVSP

SEQ ID NO: 7554 - protein, 12 aa, Homo sapiens
  ( 128 )...( 139 ): >5H6_HUMAN
ILSPLRYKLRMT

SEQ ID NO: 7555 - protein, 12 aa, Homo sapiens
  ( 134 )...( 145 ): >5H6_HUMAN
YKLRMTPLRALA

SEQ ID NO: 7556 - protein, 12 aa, Homo sapiens
  ( 135 )...( 146 ): >5H6_HUMAN
KLRMTPLRALAL

SEQ ID NO: 7557 - protein, 12 aa, Homo sapiens
  ( 206 )...( 217 ): >5H6_HUMAN
FTYCRILLAARK

SEQ ID NO: 7558 - protein, 12 aa, Homo sapiens
  ( 207 )...( 218 ): >5H6_HUMAN
TYCRILLAARKQ

SEQ ID NO: 7559 - protein, 12 aa, Homo sapiens
  ( 208 )...( 219 ): >5H6_HUMAN
YCRILLAARKQA

SEQ ID NO: 7560 - protein, 12 aa, Homo sapiens
  ( 209 )...( 220 ): >5H6_HUMAN
CRILLAARKQAV

SEQ ID NO: 7561 - protein, 12 aa, Homo sapiens
  ( 210 )...( 221 ): >5H6_HUMAN
RILLAARKQAVQ

SEQ ID NO: 7562 - protein, 12 aa, Homo sapiens
  ( 254 )...( 265 ): >5H6_HUMAN
RLATKHSRKALK

SEQ ID NO: 7563 - protein, 12 aa, Homo sapiens
  ( 255 )...( 266 ): >5H6_HUMAN
LATKHSRKALKA

SEQ ID NO: 7564 - protein, 12 aa, Homo sapiens
  ( 256 )...( 267 ): >5H6_HUMAN
ATKHSRKALKAS

SEQ ID NO: 7565 - protein, 12 aa, Homo sapiens
  ( 257 )...( 268 ): >5H6_HUMAN
TKHSRKALKASL

SEQ ID NO: 7566 - protein, 12 aa, Homo sapiens
  ( 258 )...( 269 ): >5H6_HUMAN
KHSRKALKASLT

SEQ ID NO: 7567 - protein, 12 aa, Homo sapiens
  ( 102 )...( 113 ): >5H7_HUMAN
VVISVCFVKKLR

SEQ ID NO: 7568 - protein, 12 aa, Homo sapiens
  ( 103 )...( 114 ): >5H7_HUMAN
VISVCFVKKLRQ

SEQ ID NO: 7569 - protein, 12 aa, Homo sapiens
  ( 104 )...( 115 ): >5H7_HUMAN
ISVCFVKKLRQP

SEQ ID NO: 7570 - protein, 12 aa, Homo sapiens
  ( 260 )...( 271 ): >5H7_HUMAN
YQIYKAARKSAA

SEQ ID NO: 7571 - protein, 12 aa, Homo sapiens
  ( 261 )...( 272 ): >5H7_HUMAN
QIYKAARKSAAK

SEQ ID NO: 7572 - protein, 12 aa, Homo sapiens
  ( 262 )...( 273 ): >5H7_HUMAN
IYKAARKSAAKH

SEQ ID NO: 7573 - protein, 12 aa, Homo sapiens
  ( 264 )...( 275 ): >5H7_HUMAN
KAARKSAAKHKF

SEQ ID NO: 7574 - protein, 12 aa, Homo sapiens
  ( 403 )...( 414 ): >5H7_HUMAN
YRNINRKLSAAG

SEQ ID NO: 7575 - protein, 12 aa, Homo sapiens
  ( 404 )...( 415 ): >5H7_HUMAN
RNINRKLSAAGM

SEQ ID NO: 7576 - protein, 12 aa, Homo sapiens
  ( 430 )...( 441 ): >5H7_HUMAN
FVLRACTRRVLL

SEQ ID NO: 7577 - protein, 12 aa, Homo sapiens
  ( 433 )...( 444 ): >5H7_HUMAN
RACTRRVLLRPE

SEQ ID NO: 7578 - protein, 12 aa, Homo sapiens
  ( 434 )...( 445 ): >5H7_HUMAN
ACTRRVLLRPEK

SEQ ID NO: 7579 - protein, 12 aa, Homo sapiens
  ( 132 )...( 143 ): >A1AA_HUMAN
LRYPTIVTQRRG

SEQ ID NO: 7580 - protein, 12 aa, Homo sapiens
  ( 133 )...( 144 ): >A1AA_HUMAN
RYPTIVTQRRGL

SEQ ID NO: 7581 - protein, 12 aa, Homo sapiens
  ( 202 )...( 213 ): >A1AA_HUMAN
VMYCRVYVVAKR

SEQ ID NO: 7582 - protein, 12 aa, Homo sapiens
  ( 205 )...( 216 ): >A1AA_HUMAN
CRVYVVAKRESR

SEQ ID NO: 7583 - protein, 12 aa, Homo sapiens
  ( 206 )...( 217 ): >A1AA_HUMAN
RVYVVAKRESRG

SEQ ID NO: 7584 - protein, 12 aa, Homo sapiens
  ( 208 )...( 219 ): >A1AA_HUMAN
YVVAKRESRGLK

SEQ ID NO: 7585 - protein, 12 aa, Homo sapiens
  ( 209 )...( 220 ): >A1AA_HUMAN
VVAKRESRGLKS

SEQ ID NO: 7586 - protein, 12 aa, Homo sapiens
  ( 210 )...( 221 ): >A1AA_HUMAN
VAKRESRGLKSG

SEQ ID NO: 7587 - protein, 12 aa, Homo sapiens
  ( 211 )...( 222 ): >A1AA_HUMAN
AKRESRGLKSGL

SEQ ID NO: 7588 - protein, 12 aa, Homo sapiens
  ( 212 )...( 223 ): >A1AA_HUMAN
KRESRGLKSGLK

SEQ ID NO: 7589 - protein, 12 aa, Homo sapiens
  ( 213 )...( 224 ): >A1AA_HUMAN
RESRGLKSGLKT

SEQ ID NO: 7590 - protein, 12 aa, Homo sapiens
  ( 232 )...( 243 ): >A1AA_HUMAN
VTLRIHRKNAPA

SEQ ID NO: 7591 - protein, 12 aa, Homo sapiens
  ( 233 )...( 244 ): >A1AA_HUMAN
TLRIHRKNAPAG

SEQ ID NO: 7592 - protein, 12 aa, Homo sapiens
  ( 234 )...( 245 ): >A1AA_HUMAN
LRIHRKNAPAGG

SEQ ID NO: 7593 - protein, 12 aa, Homo sapiens
  ( 252 )...( 263 ): >A1AA_HUMAN
KTKTHFSVRLLK

SEQ ID NO: 7594 - protein, 12 aa, Homo sapiens
  ( 261 )...( 272 ): >A1AA_HUMAN
LLKFSREKKAAK

SEQ ID NO: 7595 - protein, 12 aa, Homo sapiens
  ( 262 )...( 273 ): >A1AA_HUMAN
LKFSREKKAAKT

SEQ ID NO: 7596 - protein, 12 aa, Homo sapiens
  ( 263 )...( 274 ): >A1AA_HUMAN
KFSREKKAAKTL

SEQ ID NO: 7597 - protein, 12 aa, Homo sapiens
  ( 264 )...( 275 ): >A1AA_HUMAN
FSREKKAAKTLG

SEQ ID NO: 7598 - protein, 12 aa, Homo sapiens
  ( 265 )...( 276 ): >A1AA_HUMAN
SREKKAAKTLGI

SEQ ID NO: 7599 - protein, 12 aa, Homo sapiens
  ( 266 )...( 277 ): >A1AA_HUMAN
REKKAAKTLGIV

SEQ ID NO: 7600 - protein, 12 aa, Homo sapiens
  ( 334 )...( 345 ): >A1AA_HUMAN
KKAFQNVLRIQC

SEQ ID NO: 7601 - protein, 12 aa, Homo sapiens
  ( 338 )...( 349 ): >A1AA_HUMAN
QNVLRIQCLCRK

SEQ ID NO: 7602 - protein, 12 aa, Homo sapiens
  ( 339 )...( 350 ): >A1AA_HUMAN
NVLRIQCLCRKQ

SEQ ID NO: 7603 - protein, 12 aa, Homo sapiens
  ( 340 )...( 351 ): >A1AA_HUMAN
VLRIQCLCRKQS

SEQ ID NO: 7604 - protein, 12 aa, Homo sapiens
  ( 341 )...( 352 ): >A1AA_HUMAN
LRIQCLCRKQSS

SEQ ID NO: 7605 - protein, 12 aa, Homo sapiens
  ( 342 )...( 353 ): >A1AA_HUMAN
RIQCLCRKQSSK

SEQ ID NO: 7606 - protein, 12 aa, Homo sapiens
  ( 403 )...( 414 ): >A1AA_HUMAN
MPRGSARITVSK

SEQ ID NO: 7607 - protein, 12 aa, Homo sapiens
  ( 416 )...( 427 ): >A1AA_HUMAN
QSSCTTARVRSK

SEQ ID NO: 7608 - protein, 12 aa, Homo sapiens
  ( 419 )...( 430 ): >A1AA_HUMAN
CTTARVRSKSFL

SEQ ID NO: 7609 - protein, 12 aa, Homo sapiens
  ( 420 )...( 431 ): >A1AA_HUMAN
TTARVRSKSFLQ

SEQ ID NO: 7610 - protein, 12 aa, Homo sapiens
  ( 421 )...( 432 ): >A1AA_HUMAN
TARVRSKSFLQV

SEQ ID NO: 7611 - protein, 12 aa, Homo sapiens
  ( 422 )...( 433 ): >A1AA_HUMAN
ARVRSKSFLQVC

SEQ ID NO: 7612 - protein, 12 aa, Homo sapiens
  ( 150 )...( 161 ): >A1AB_HUMAN
SLQYPTLVTRRK

SEQ ID NO: 7613 - protein, 12 aa, Homo sapiens
  ( 151 )...( 162 ): >A1AB_HUMAN
LQYPTLVTRRKA

SEQ ID NO: 7614 - protein, 12 aa, Homo sapiens
  ( 152 )...( 163 ): >A1AB_HUMAN
QYPTLVTRRKAI

SEQ ID NO: 7615 - protein, 12 aa, Homo sapiens
  ( 153 )...( 164 ): >A1AB_HUMAN
YPTLVTRRKAIL

SEQ ID NO: 7616 - protein, 12 aa, Homo sapiens
  ( 154 )...( 165 ): >A1AB_HUMAN
PTLVTRRKAILA

SEQ ID NO: 7617 - protein, 12 aa, Homo sapiens
  ( 155 )...( 166 ): >A1AB_HUMAN
TLVTRRKAILAL

SEQ ID NO: 7618 - protein, 12 aa, Homo sapiens
  ( 156 )...( 167 ): >A1AB_HUMAN
LVTRRKAILALL

SEQ ID NO: 7619 - protein, 12 aa, Homo sapiens
  ( 157 )...( 168 ): >A1AB_HUMAN
VTRRKAILALLS

SEQ ID NO: 7620 - protein, 12 aa, Homo sapiens
  ( 158 )...( 169 ): >A1AB_HUMAN
TRRKAILALLSV

SEQ ID NO: 7621 - protein, 12 aa, Homo sapiens
  ( 159 )...( 170 ): >A1AB_HUMAN
RRKAILALLSVW

SEQ ID NO: 7622 - protein, 12 aa, Homo sapiens
  ( 221 )...( 232 ): >A1AB_HUMAN
VMYCRVYIVAKR

SEQ ID NO: 7623 - protein, 12 aa, Homo sapiens
  ( 222 )...( 233 ): >A1AB_HUMAN
MYCRVYIVAKRT

SEQ ID NO: 7624 - protein, 12 aa, Homo sapiens
  ( 223 )...( 234 ): >A1AB_HUMAN
YCRVYIVAKRTT

SEQ ID NO: 7625 - protein, 12 aa, Homo sapiens
  ( 224 )...( 235 ): >A1AB_HUMAN
CRVYIVAKRTTK

SEQ ID NO: 7626 - protein, 12 aa, Homo sapiens
  ( 225 )...( 236 ): >A1AB_HUMAN
RVYIVAKRTTKN

SEQ ID NO: 7627 - protein, 12 aa, Homo sapiens
  ( 226 )...( 237 ): >A1AB_HUMAN
VYIVAKRTTKNL

SEQ ID NO: 7628 - protein, 12 aa, Homo sapiens
  ( 276 )...( 287 ): >A1AB_HUMAN
RSSIAVKLFKFS

SEQ ID NO: 7629 - protein, 12 aa, Homo sapiens
  ( 277 )...( 288 ): >A1AB_HUMAN
SSIAVKLFKFSR

SEQ ID NO: 7630 - protein, 12 aa, Homo sapiens
  ( 285 )...( 296 ): >A1AB_HUMAN
KFSREKKAAKTL

SEQ ID NO: 7631 - protein, 12 aa, Homo sapiens
  ( 286 )...( 297 ): >A1AB_HUMAN
FSREKKAAKTLG

SEQ ID NO: 7632 - protein, 12 aa, Homo sapiens
  ( 287 )...( 298 ): >A1AB_HUMAN
SREKKAAKTLGI

SEQ ID NO: 7633 - protein, 12 aa, Homo sapiens
  ( 288 )...( 299 ): >A1AB_HUMAN
REKKAAKTLGIV

SEQ ID NO: 7634 - protein, 12 aa, Homo sapiens
  ( 353 )...( 364 ): >A1AB_HUMAN
KEFKRAFVRILG

SEQ ID NO: 7635 - protein, 12 aa, Homo sapiens
  ( 355 )...( 366 ): >A1AB_HUMAN
FKRAFVRILGCQ

SEQ ID NO: 7636 - protein, 12 aa, Homo sapiens
  ( 357 )...( 368 ): >A1AB_HUMAN
RAFVRILGCQCR

SEQ ID NO: 7637 - protein, 12 aa, Homo sapiens
  ( 359 )...( 370 ): >A1AB_HUMAN
FVRILGCQCRGR

SEQ ID NO: 7638 - protein, 12 aa, Homo sapiens
  ( 275 )...( 286 ): >A1AD_HUMAN
CRVYVVARSTTR

SEQ ID NO: 7639 - protein, 12 aa, Homo sapiens
  ( 276 )...( 287 ): >A1AD_HUMAN
RVYVVARSTTRS

SEQ ID NO: 7640 - protein, 12 aa, Homo sapiens
  ( 328 )...( 339 ): >A1AD_HUMAN
TFRSSLSVRLLK

SEQ ID NO: 7641 - protein, 12 aa, Homo sapiens
  ( 330 )...( 341 ): >A1AD_HUMAN
RSSLSVRLLKFS

SEQ ID NO: 7642 - protein, 12 aa, Homo sapiens
  ( 331 )...( 342 ): >A1AD_HUMAN
SSLSVRLLKFSR

SEQ ID NO: 7643 - protein, 12 aa, Homo sapiens
  ( 337 )...( 348 ): >A1AD_HUMAN
LLKFSREKKAAK

SEQ ID NO: 7644 - protein, 12 aa, Homo sapiens
  ( 338 )...( 349 ): >A1AD_HUMAN
LKFSREKKAAKT

SEQ ID NO: 7645 - protein, 12 aa, Homo sapiens
  ( 339 )...( 350 ): >A1AD_HUMAN
KFSREKKAAKTL

SEQ ID NO: 7646 - protein, 12 aa, Homo sapiens
  ( 340 )...( 351 ): >A1AD_HUMAN
FSREKKAAKTLA

SEQ ID NO: 7647 - protein, 12 aa, Homo sapiens
  ( 341 )...( 352 ): >A1AD_HUMAN
SREKKAAKTLAI

SEQ ID NO: 7648 - protein, 12 aa, Homo sapiens
  ( 342 )...( 353 ): >A1AD_HUMAN
REKKAAKTLAIV

SEQ ID NO: 7649 - protein, 12 aa, Homo sapiens
  ( 498 )...( 509 ): >A1AD_HUMAN
RLLGPFRRPTTQ

SEQ ID NO: 7650 - protein, 12 aa, Homo sapiens
  ( 500 )...( 511 ): >A1AD_HUMAN
LGPFRRPTTQLR

SEQ ID NO: 7651 - protein, 12 aa, Homo sapiens
  ( 501 )...( 512 ): >A1AD_HUMAN
GPFRRPTTQLRA

SEQ ID NO: 7652 - protein, 12 aa, Homo sapiens
  ( 504 )...( 515 ): >A1AD_HUMAN
RRPTTQLRAKVS

SEQ ID NO: 7653 - protein, 12 aa, Homo sapiens
  ( 505 )...( 516 ): >A1AD_HUMAN
RPTTQLRAKVSS

SEQ ID NO: 7654 - protein, 12 aa, Homo sapiens
  ( 511 )...( 522 ): >A1AD_HUMAN
RAKVSSLSHKIR

SEQ ID NO: 7655 - protein, 12 aa, Homo sapiens
  ( 517 )...( 528 ): >A1AD_HUMAN
LSHKIRAGGAQR

SEQ ID NO: 7656 - protein, 12 aa, Homo sapiens
  ( 518 )...( 529 ): >A1AD_HUMAN
SHKIRAGGAQRA

SEQ ID NO: 7657 - protein, 12 aa, Homo sapiens
  ( 145 )...( 156 ): >A2AA_HUMAN
RTPRRIKAIIIT

SEQ ID NO: 7658 - protein, 12 aa, Homo sapiens
  ( 146 )...( 157 ): >A2AA_HUMAN
TPRRIKAIIITV

SEQ ID NO: 7659 - protein, 12 aa, Homo sapiens
  ( 221 )...( 232 ): >A2AA_HUMAN
QIAKRRTRVPPS

SEQ ID NO: 7660 - protein, 12 aa, Homo sapiens
  ( 310 )...( 321 ): >A2AA_HUMAN
RPERGPRGKGKA

SEQ ID NO: 7661 - protein, 12 aa, Homo sapiens
  ( 311 )...( 322 ): >A2AA_HUMAN
PERGPRGKGKAR

SEQ ID NO: 7662 - protein, 12 aa, Homo sapiens
  ( 315 )...( 326 ): >A2AA_HUMAN
PRGKGKARASQV

SEQ ID NO: 7663 - protein, 12 aa, Homo sapiens
  ( 316 )...( 327 ): >A2AA_HUMAN
RGKGKARASQVK

SEQ ID NO: 7664 - protein, 12 aa, Homo sapiens
  ( 352 )...( 363 ): >A2AA_HUMAN
ERVGAAKASRWR

SEQ ID NO: 7665 - protein, 12 aa, Homo sapiens
  ( 353 )...( 364 ): >A2AA_HUMAN
RVGAAKASRWRG

SEQ ID NO: 7666 - protein, 12 aa, Homo sapiens
  ( 354 )...( 365 ): >A2AA_HUMAN
VGAAKASRWRGR

SEQ ID NO: 7667 - protein, 12 aa, Homo sapiens
  ( 355 )...( 366 ): >A2AA_HUMAN
GAAKASRWRGRQ

SEQ ID NO: 7668 - protein, 12 aa, Homo sapiens
  ( 436 )...( 447 ): >A2AA_HUMAN
AFKKILCRGDRK

SEQ ID NO: 7669 - protein, 12 aa, Homo sapiens
  ( 439 )...( 450 ): >A2AA_HUMAN
KILCRGDRKRIV

SEQ ID NO: 7670 - protein, 11 aa, Homo sapiens
  ( 440 )...( 451 ): >A2AA_HUMAN
ILCRGDRKRIV

SEQ ID NO: 7671 - protein, 10 aa, Homo sapiens
  ( 441 )...( 452 ): >A2AA_HUMAN
LCRGDRKRIV

SEQ ID NO: 7672 - protein, 9 aa, Homo sapiens
  ( 442 )...( 453 ): >A2AA_HUMAN
CRGDRKRIV

SEQ ID NO: 7673 - protein, 12 aa, Homo sapiens
  ( 124 )...( 135 ): >A2AB_HUMAN
RTPRRIKCIILT

SEQ ID NO: 7674 - protein, 12 aa, Homo sapiens
  ( 125 )...( 136 ): >A2AB_HUMAN
TPRRIKCIILTV

SEQ ID NO: 7675 - protein, 12 aa, Homo sapiens
  ( 191 )...( 202 ): >A2AB_HUMAN
VYLRIYLIAKRS

SEQ ID NO: 7676 - protein, 12 aa, Homo sapiens
  ( 349 )...( 360 ): >A2AB_HUMAN
VGAIGGQWWRRR

SEQ ID NO: 7677 - protein, 12 aa, Homo sapiens
  ( 350 )...( 361 ): >A2AB_HUMAN
GAIGGQWWRRRA

SEQ ID NO: 7678 - protein, 12 aa, Homo sapiens
  ( 163 )...( 174 ): >A2AC_HUMAN
RTPRRVKATIVA

SEQ ID NO: 7679 - protein, 12 aa, Homo sapiens
  ( 164 )...( 175 ): >A2AC_HUMAN
TPRRVKATIVAV

SEQ ID NO: 7680 - protein, 12 aa, Homo sapiens
  ( 165 )...( 176 ): >A2AC_HUMAN
PRRVKATIVAVW

SEQ ID NO: 7681 - protein, 12 aa, Homo sapiens
  ( 166 )...( 177 ): >A2AC_HUMAN
RRVKATIVAVWL

SEQ ID NO: 7682 - protein, 12 aa, Homo sapiens
  ( 227 )...( 238 ): >A2AC_HUMAN
GLVYARIYRVAK

SEQ ID NO: 7683 - protein, 12 aa, Homo sapiens
  ( 228 )...( 239 ): >A2AC_HUMAN
LVYARIYRVAKL

SEQ ID NO: 7684 - protein, 12 aa, Homo sapiens
  ( 233 )...( 244 ): >A2AC_HUMAN
IYRVAKLRTRTL

SEQ ID NO: 7685 - protein, 12 aa, Homo sapiens
  ( 234 )...( 245 ): >A2AC_HUMAN
YRVAKLRTRTLS

SEQ ID NO: 7686 - protein, 12 aa, Homo sapiens
  ( 235 )...( 246 ): >A2AC_HUMAN
RVAKLRTRTLSE

SEQ ID NO: 7687 - protein, 12 aa, Homo sapiens
  ( 236 )...( 247 ): >A2AC_HUMAN
VAKLRTRTLSEK

SEQ ID NO: 7688 - protein, 12 aa, Homo sapiens
  ( 237 )...( 248 ): >A2AC_HUMAN
AKLRTRTLSEKR

SEQ ID NO: 7689 - protein, 12 aa, Homo sapiens
  ( 238 )...( 249 ): >A2AC_HUMAN
KLRTRTLSEKRA

SEQ ID NO: 7690 - protein, 12 aa, Homo sapiens
  ( 239 )...( 250 ): >A2AC_HUMAN
LRTRTLSEKRAP

SEQ ID NO: 7691 - protein, 12 aa, Homo sapiens
  ( 240 )...( 251 ): >A2AC_HUMAN
RTRTLSEKRAPV

SEQ ID NO: 7692 - protein, 12 aa, Homo sapiens
  ( 363 )...( 374 ): >A2AC_HUMAN
ARSSVCRRKVAQ

SEQ ID NO: 7693 - protein, 12 aa, Homo sapiens
  ( 364 )...( 375 ): >A2AC_HUMAN
RSSVCRRKVAQA

SEQ ID NO: 7694 - protein, 12 aa, Homo sapiens
  ( 365 )...( 376 ): >A2AC_HUMAN
SSVCRRKVAQAR

SEQ ID NO: 7695 - protein, 12 aa, Homo sapiens
  ( 366 )...( 377 ): >A2AC_HUMAN
SVCRRKVAQARE

SEQ ID NO: 7696 - protein, 12 aa, Homo sapiens
  ( 367 )...( 378 ): >A2AC_HUMAN
VCRRKVAQAREK

SEQ ID NO: 7697 - protein, 12 aa, Homo sapiens
  ( 107 )...( 118 ): >AA1R_HUMAN
LRVKIPLRYKMV

SEQ ID NO: 7698 - protein, 12 aa, Homo sapiens
  ( 108 )...( 119 ): >AA1R_HUMAN
RVKIPLRYKMVV

SEQ ID NO: 7699 - protein, 12 aa, Homo sapiens
  ( 111 )...( 122 ): >AA1R_HUMAN
IPLRYKMVVTPR

SEQ ID NO: 7700 - protein, 12 aa, Homo sapiens
  ( 113 )...( 124 ): >AA1R_HUMAN
LRYKMVVTPRRA

SEQ ID NO: 7701 - protein, 12 aa, Homo sapiens
  ( 114 )...( 125 ): >AA1R_HUMAN
RYKMVVTPRRAA

SEQ ID NO: 7702 - protein, 12 aa, Homo sapiens
  ( 115 )...( 126 ): >AA1R_HUMAN
YKMVVTPRRAAV

SEQ ID NO: 7703 - protein, 12 aa, Homo sapiens
  ( 116 )...( 127 ): >AA1R_HUMAN
KMVVTPRRAAVA

SEQ ID NO: 7704 - protein, 12 aa, Homo sapiens
  ( 206 )...( 217 ): >AA1R_HUMAN
LIRKQLNKKVSA

SEQ ID NO: 7705 - protein, 12 aa, Homo sapiens
  ( 207 )...( 218 ): >AA1R_HUMAN
IRKQLNKKVSAS

SEQ ID NO: 7706 - protein, 12 aa, Homo sapiens
  ( 208 )...( 219 ): >AA1R_HUMAN
RKQLNKKVSASS

SEQ ID NO: 7707 - protein, 12 aa, Homo sapiens
  ( 223 )...( 234 ): >AA1R_HUMAN
QKYYGKELKIAK

SEQ ID NO: 7708 - protein, 12 aa, Homo sapiens
  ( 111 )...( 122 ): >AA2A_HUMAN
RYNGLVTGTRAK

SEQ ID NO: 7709 - protein, 12 aa, Homo sapiens
  ( 195 )...( 206 ): >AA2A_HUMAN
GVYLRIFLAARR

SEQ ID NO: 7710 - protein, 12 aa, Homo sapiens
  ( 200 )...( 211 ): >AA2A_HUMAN
IFLAARRQLKQM

SEQ ID NO: 7711 - protein, 12 aa, Homo sapiens
  ( 297 )...( 308 ): >AA2A_HUMAN
QTFRKIIRSHVL

SEQ ID NO: 7712 - protein, 12 aa, Homo sapiens
  ( 110 )...( 121 ): >AA2B_HUMAN
PLRYKSLVTGTR

SEQ ID NO: 7713 - protein, 12 aa, Homo sapiens
  ( 111 )...( 122 ): >AA2B_HUMAN
LRYKSLVTGTRA

SEQ ID NO: 7714 - protein, 12 aa, Homo sapiens
  ( 112 )...( 123 ): >AA2B_HUMAN
RYKSLVTGTRAR

SEQ ID NO: 7715 - protein, 12 aa, Homo sapiens
  ( 113 )...( 124 ): >AA2B_HUMAN
YKSLVTGTRARG

SEQ ID NO: 7716 - protein, 12 aa, Homo sapiens
  ( 204 )...( 215 ): >AA2B_HUMAN
KIFLVACRQLQR

SEQ ID NO: 7717 - protein, 12 aa, Homo sapiens
  ( 112 )...( 123 ): >AA3R_HUMAN
VKLTVRYKRVTT

SEQ ID NO: 7718 - protein, 12 aa, Homo sapiens
  ( 113 )...( 124 ): >AA3R_HUMAN
KLTVRYKRVTTH

SEQ ID NO: 7719 - protein, 12 aa, Homo sapiens
  ( 125 )...( 136 ): >ACM1_HUMAN
FSVTRPLSYRAK

SEQ ID NO: 7720 - protein, 12 aa, Homo sapiens
  ( 127 )...( 138 ): >ACM1_HUMAN
VTRPLSYRAKRT

SEQ ID NO: 7721 - protein, 12 aa, Homo sapiens
  ( 135 )...( 146 ): >ACM1_HUMAN
AKRTPRRAALMI

SEQ ID NO: 7722 - protein, 12 aa, Homo sapiens
  ( 136 )...( 147 ): >ACM1_HUMAN
KRTPRRAALMIG

SEQ ID NO: 7723 - protein, 12 aa, Homo sapiens
  ( 137 )...( 148 ): >ACM1_HUMAN
RTPRRAALMIGL

SEQ ID NO: 7724 - protein, 12 aa, Homo sapiens
  ( 320 )...( 331 ): >ACM1_HUMAN
RSSPNTVKRPTK

SEQ ID NO: 7725 - protein, 12 aa, Homo sapiens
  ( 321 )...( 332 ): >ACM1_HUMAN
SSPNTVKRPTKK

SEQ ID NO: 7726 - protein, 12 aa, Homo sapiens
  ( 322 )...( 333 ): >ACM1_HUMAN
SPNTVKRPTKKG

SEQ ID NO: 7727 - protein, 12 aa, Homo sapiens
  ( 323 )...( 334 ): >ACM1_HUMAN
PNTVKRPTKKGR

SEQ ID NO: 7728 - protein, 12 aa, Homo sapiens
  ( 324 )...( 335 ): >ACM1_HUMAN
NTVKRPTKKGRD

SEQ ID NO: 7729 - protein, 12 aa, Homo sapiens
  ( 337 )...( 348 ): >ACM1_HUMAN
AGKGQKPRGKEQ

SEQ ID NO: 7730 - protein, 12 aa, Homo sapiens
  ( 338 )...( 349 ): >ACM1_HUMAN
GKGQKPRGKEQL

SEQ ID NO: 7731 - protein, 12 aa, Homo sapiens
  ( 339 )...( 350 ): >ACM1_HUMAN
KGQKPRGKEQLA

SEQ ID NO: 7732 - protein, 12 aa, Homo sapiens
  ( 340 )...( 351 ): >ACM1_HUMAN
GQKPRGKEQLAK

SEQ ID NO: 7733 - protein, 12 aa, Homo sapiens
  ( 343 )...( 354 ): >ACM1_HUMAN
PRGKEQLAKRKT

SEQ ID NO: 7734 - protein, 12 aa, Homo sapiens
  ( 345 )...( 356 ): >ACM1_HUMAN
GKEQLAKRKTFS

SEQ ID NO: 7735 - protein, 12 aa, Homo sapiens
  ( 346 )...( 357 ): >ACM1_HUMAN
KEQLAKRKTFSL

SEQ ID NO: 7736 - protein, 12 aa, Homo sapiens
  ( 348 )...( 359 ): >ACM1_HUMAN
QLAKRKTFSLVK

SEQ ID NO: 7737 - protein, 12 aa, Homo sapiens
  ( 349 )...( 360 ): >ACM1_HUMAN
LAKRKTFSLVKE

SEQ ID NO: 7738 - protein, 12 aa, Homo sapiens
  ( 350 )...( 361 ): >ACM1_HUMAN
AKRKTFSLVKEK

SEQ ID NO: 7739 - protein, 12 aa, Homo sapiens
  ( 352 )...( 363 ): >ACM1_HUMAN
RKTFSLVKEKKA

SEQ ID NO: 7740 - protein, 12 aa, Homo sapiens
  ( 354 )...( 365 ): >ACM1_HUMAN
TFSLVKEKKAAR

SEQ ID NO: 7741 - protein, 12 aa, Homo sapiens
  ( 355 )...( 366 ): >ACM1_HUMAN
FSLVKEKKAART

SEQ ID NO: 7742 - protein, 12 aa, Homo sapiens
  ( 356 )...( 367 ): >ACM1_HUMAN
SLVKEKKAARTL

SEQ ID NO: 7743 - protein, 12 aa, Homo sapiens
  ( 357 )...( 368 ): >ACM1_HUMAN
LVKEKKAARTLS

SEQ ID NO: 7744 - protein, 12 aa, Homo sapiens
  ( 358 )...( 369 ): >ACM1_HUMAN
VKEKKAARTLSA

SEQ ID NO: 7745 - protein, 12 aa, Homo sapiens
  ( 359 )...( 370 ): >ACM1_HUMAN
KEKKAARTLSAI

SEQ ID NO: 7746 - protein, 12 aa, Homo sapiens
  ( 361 )...( 372 ): >ACM1_HUMAN
KKAARTLSAILL

SEQ ID NO: 7747 - protein, 12 aa, Homo sapiens
  ( 444 )...( 455 ): >ACM1_HUMAN
KIPKRPGSVHRT

SEQ ID NO: 7748 - protein, 12 aa, Homo sapiens
  ( 447 )...( 458 ): >ACM1_HUMAN
KRPGSVHRTPSR

SEQ ID NO: 7749 - protein, 12 aa, Homo sapiens
  ( 448 )...( 459 ): >ACM1_HUMAN
RPGSVHRTPSRQ

SEQ ID NO: 7750 - protein, 12 aa, Homo sapiens
  ( 124 )...( 135 ): >ACM2_HUMAN
CVTKPLTYPVKR

SEQ ID NO: 7751 - protein, 12 aa, Homo sapiens
  ( 125 )...( 136 ): >ACM2_HUMAN
VTKPLTYPVKRT

SEQ ID NO: 7752 - protein, 12 aa, Homo sapiens
  ( 127 )...( 138 ): >ACM2_HUMAN
KPLTYPVKRTTK

SEQ ID NO: 7753 - protein, 12 aa, Homo sapiens
  ( 128 )...( 139 ): >ACM2_HUMAN
PLTYPVKRTTKM

SEQ ID NO: 7754 - protein, 12 aa, Homo sapiens
  ( 129 )...( 140 ): >ACM2_HUMAN
LTYPVKRTTKMA

SEQ ID NO: 7755 - protein, 12 aa, Homo sapiens
  ( 130 )...( 141 ): >ACM2_HUMAN
TYPVKRTTKMAG

SEQ ID NO: 7756 - protein, 12 aa, Homo sapiens
  ( 131 )...( 142 ): >ACM2_HUMAN
YPVKRTTKMAGM

SEQ ID NO: 7757 - protein, 12 aa, Homo sapiens
  ( 132 )...( 143 ): >ACM2_HUMAN
PVKRTTKMAGMM

SEQ ID NO: 7758 - protein, 12 aa, Homo sapiens
  ( 133 )...( 144 ): >ACM2_HUMAN
VKRTTKMAGMMI

SEQ ID NO: 7759 - protein, 12 aa, Homo sapiens
  ( 134 )...( 145 ): >ACM2_HUMAN
KRTTKMAGMMIA

SEQ ID NO: 7760 - protein, 12 aa, Homo sapiens
  ( 209 )...( 220 ): >ACM2_HUMAN
ISRASKSRIKKD

SEQ ID NO: 7761 - protein, 12 aa, Homo sapiens
  ( 215 )...( 226 ): >ACM2_HUMAN
SRIKKDKKEPVA

SEQ ID NO: 7762 - protein, 12 aa, Homo sapiens
  ( 319 )...( 330 ): >ACM2_HUMAN
NSKQTCIRIGTK

SEQ ID NO: 7763 - protein, 12 aa, Homo sapiens
  ( 321 )...( 332 ): >ACM2_HUMAN
KQTCIRIGTKTP

SEQ ID NO: 7764 - protein, 12 aa, Homo sapiens
  ( 322 )...( 333 ): >ACM2_HUMAN
QTCIRIGTKTPK

SEQ ID NO: 7765 - protein, 12 aa, Homo sapiens
  ( 356 )...( 367 ): >ACM2_HUMAN
EKQNIVARKIVK

SEQ ID NO: 7766 - protein, 12 aa, Homo sapiens
  ( 357 )...( 368 ): >ACM2_HUMAN
KQNIVARKIVKM

SEQ ID NO: 7767 - protein, 12 aa, Homo sapiens
  ( 358 )...( 369 ): >ACM2_HUMAN
QNIVARKIVKMT

SEQ ID NO: 7768 - protein, 12 aa, Homo sapiens
  ( 359 )...( 370 ): >ACM2_HUMAN
NIVARKIVKMTK

SEQ ID NO: 7769 - protein, 12 aa, Homo sapiens
  ( 360 )...( 371 ): >ACM2_HUMAN
IVARKIVKMTKQ

SEQ ID NO: 7770 - protein, 12 aa, Homo sapiens
  ( 361 )...( 372 ): >ACM2_HUMAN
VARKIVKMTKQP

SEQ ID NO: 7771 - protein, 12 aa, Homo sapiens
  ( 362 )...( 373 ): >ACM2_HUMAN
ARKIVKMTKQPA

SEQ ID NO: 7772 - protein, 12 aa, Homo sapiens
  ( 363 )...( 374 ): >ACM2_HUMAN
RKIVKMTKQPAK

SEQ ID NO: 7773 - protein, 12 aa, Homo sapiens
  ( 364 )...( 375 ): >ACM2_HUMAN
KIVKMTKQPAKK

SEQ ID NO: 7774 - protein, 12 aa, Homo sapiens
  ( 365 )...( 376 ): >ACM2_HUMAN
IVKMTKQPAKKK

SEQ ID NO: 7775 - protein, 12 aa, Homo sapiens
  ( 366 )...( 377 ): >ACM2_HUMAN
VKMTKQPAKKKP

SEQ ID NO: 7776 - protein, 12 aa, Homo sapiens
  ( 377 )...( 388 ): >ACM2_HUMAN
PPPSREKKVTRT

SEQ ID NO: 7777 - protein, 12 aa, Homo sapiens
  ( 378 )...( 389 ): >ACM2_HUMAN
PPSREKKVTRTI

SEQ ID NO: 7778 - protein, 12 aa, Homo sapiens
  ( 379 )...( 390 ): >ACM2_HUMAN
PSREKKVTRTIL

SEQ ID NO: 7779 - protein, 12 aa, Homo sapiens
  ( 380 )...( 391 ): >ACM2_HUMAN
SREKKVTRTILA

SEQ ID NO: 7780 - protein, 12 aa, Homo sapiens
  ( 381 )...( 392 ): >ACM2_HUMAN
REKKVTRTILAI

SEQ ID NO: 7781 - protein, 12 aa, Homo sapiens
  ( 89 )...( 100 ): >ACM3_HUMAN
VIVSFKVNKQLK

SEQ ID NO: 7782 - protein, 12 aa, Homo sapiens
  ( 168 )...( 179 ): >ACM3_HUMAN
FSITRPLTYRAK

SEQ ID NO: 7783 - protein, 12 aa, Homo sapiens
  ( 170 )...( 181 ): >ACM3_HUMAN
ITRPLTYRAKRT

SEQ ID NO: 7784 - protein, 12 aa, Homo sapiens
  ( 171 )...( 182 ): >ACM3_HUMAN
TRPLTYRAKRTT

SEQ ID NO: 7785 - protein, 12 aa, Homo sapiens
  ( 174 )...( 185 ): >ACM3_HUMAN
LTYRAKRTTKRA

SEQ ID NO: 7786 - protein, 12 aa, Homo sapiens
  ( 175 )...( 186 ): >ACM3_HUMAN
TYRAKRTTKRAG

SEQ ID NO: 7787 - protein, 12 aa, Homo sapiens
  ( 178 )...( 189 ): >ACM3_HUMAN
AKRTTKRAGVMI

SEQ ID NO: 7788 - protein, 12 aa, Homo sapiens
  ( 179 )...( 190 ): >ACM3_HUMAN
KRTTKRAGVMIG

SEQ ID NO: 7789 - protein, 12 aa, Homo sapiens
  ( 403 )...( 414 ): >ACM3_HUMAN
RKADKLQAQKSV

SEQ ID NO: 7790 - protein, 12 aa, Homo sapiens
  ( 459 )...( 470 ): >ACM3_HUMAN
KEATLAKRFALK

SEQ ID NO: 7791 - protein, 12 aa, Homo sapiens
  ( 461 )...( 472 ): >ACM3_HUMAN
ATLAKRFALKTR

SEQ ID NO: 7792 - protein, 12 aa, Homo sapiens
  ( 462 )...( 473 ): >ACM3_HUMAN
TLAKRFALKTRS

SEQ ID NO: 7793 - protein, 12 aa, Homo sapiens
  ( 463 )...( 474 ): >ACM3_HUMAN
LAKRFALKTRSQ

SEQ ID NO: 7794 - protein, 12 aa, Homo sapiens
  ( 464 )...( 475 ): >ACM3_HUMAN
AKRFALKTRSQI

SEQ ID NO: 7795 - protein, 12 aa, Homo sapiens
  ( 465 )...( 476 ): >ACM3_HUMAN
KRFALKTRSQIT

SEQ ID NO: 7796 - protein, 12 aa, Homo sapiens
  ( 466 )...( 477 ): >ACM3_HUMAN
RFALKTRSQITK

SEQ ID NO: 7797 - protein, 12 aa, Homo sapiens
  ( 467 )...( 478 ): >ACM3_HUMAN
FALKTRSQITKR

SEQ ID NO: 7798 - protein, 12 aa, Homo sapiens
  ( 468 )...( 479 ): >ACM3_HUMAN
ALKTRSQITKRK

SEQ ID NO: 7799 - protein, 12 aa, Homo sapiens
  ( 473 )...( 484 ): >ACM3_HUMAN
SQITKRKRMSLV

SEQ ID NO: 7800 - protein, 12 aa, Homo sapiens
  ( 474 )...( 485 ): >ACM3_HUMAN
QITKRKRMSLVK

SEQ ID NO: 7801 - protein, 12 aa, Homo sapiens
  ( 475 )...( 486 ): >ACM3_HUMAN
ITKRKRMSLVKE

SEQ ID NO: 7802 - protein, 12 aa, Homo sapiens
  ( 479 )...( 490 ): >ACM3_HUMAN
KRMSLVKEKKAA

SEQ ID NO: 7803 - protein, 12 aa, Homo sapiens
  ( 480 )...( 491 ): >ACM3_HUMAN
RMSLVKEKKAAQ

SEQ ID NO: 7804 - protein, 12 aa, Homo sapiens
  ( 557 )...( 568 ): >ACM3_HUMAN
MLLLCQCDKKKR

SEQ ID NO: 7805 - protein, 12 aa, Homo sapiens
  ( 134 )...( 145 ): >ACM4_HUMAN
VTKPLTYPARRT

SEQ ID NO: 7806 - protein, 12 aa, Homo sapiens
  ( 135 )...( 146 ): >ACM4_HUMAN
TKPLTYPARRTT

SEQ ID NO: 7807 - protein, 12 aa, Homo sapiens
  ( 136 )...( 147 ): >ACM4_HUMAN
KPLTYPARRTTK

SEQ ID NO: 7808 - protein, 12 aa, Homo sapiens
  ( 137 )...( 148 ): >ACM4_HUMAN
PLTYPARRTTKM

SEQ ID NO: 7809 - protein, 12 aa, Homo sapiens
  ( 138 )...( 149 ): >ACM4_HUMAN
LTYPARRTTKMA

SEQ ID NO: 7810 - protein, 12 aa, Homo sapiens
  ( 139 )...( 150 ): >ACM4_HUMAN
TYPARRTTKMAG

SEQ ID NO: 7811 - protein, 12 aa, Homo sapiens
  ( 140 )...( 151 ): >ACM4_HUMAN
YPARRTTKMAGL

SEQ ID NO: 7812 - protein, 12 aa, Homo sapiens
  ( 141 )...( 152 ): >ACM4_HUMAN
PARRTTKMAGLM

SEQ ID NO: 7813 - protein, 12 aa, Homo sapiens
  ( 142 )...( 153 ): >ACM4_HUMAN
ARRTTKMAGLMI

SEQ ID NO: 7814 - protein, 12 aa, Homo sapiens
  ( 143 )...( 154 ): >ACM4_HUMAN
RRTTKMAGLMIA

SEQ ID NO: 7815 - protein, 12 aa, Homo sapiens
  ( 230 )...( 241 ): >ACM4_HUMAN
RPEGPKEKKAKT

SEQ ID NO: 7816 - protein, 12 aa, Homo sapiens
  ( 235 )...( 246 ): >ACM4_HUMAN
KEKKAKTLAFLK

SEQ ID NO: 7817 - protein, 12 aa, Homo sapiens
  ( 237 )...( 248 ): >ACM4_HUMAN
KKAKTLAFLKSP

SEQ ID NO: 7818 - protein, 12 aa, Homo sapiens
  ( 245 )...( 256 ): >ACM4_HUMAN
LKSPLMKQSVKK

SEQ ID NO: 7819 - protein, 12 aa, Homo sapiens
  ( 246 )...( 257 ): >ACM4_HUMAN
KSPLMKQSVKKP

SEQ ID NO: 7820 - protein, 12 aa, Homo sapiens
  ( 336 )...( 347 ): >ACM4_HUMAN
ASRWSKIQIVTK

SEQ ID NO: 7821 - protein, 12 aa, Homo sapiens
  ( 337 )...( 348 ): >ACM4_HUMAN
SRWSKIQIVTKQ

SEQ ID NO: 7822 - protein, 12 aa, Homo sapiens
  ( 338 )...( 349 ): >ACM4_HUMAN
RWSKIQIVTKQT

SEQ ID NO: 7823 - protein, 12 aa, Homo sapiens
  ( 371 )...( 382 ): >ACM4_HUMAN
ANVARKFASIAR

SEQ ID NO: 7824 - protein, 12 aa, Homo sapiens
  ( 372 )...( 383 ): >ACM4_HUMAN
NVARKFASIARN

SEQ ID NO: 7825 - protein, 12 aa, Homo sapiens
  ( 373 )...( 384 ): >ACM4_HUMAN
VARKFASIARNQ

SEQ ID NO: 7826 - protein, 12 aa, Homo sapiens
  ( 374 )...( 385 ): >ACM4_HUMAN
ARKFASIARNQV

SEQ ID NO: 7827 - protein, 12 aa, Homo sapiens
  ( 390 )...( 401 ): >ACM4_HUMAN
QMAARERKVTRT

SEQ ID NO: 7828 - protein, 12 aa, Homo sapiens
  ( 391 )...( 402 ): >ACM4_HUMAN
MAARERKVTRTI

SEQ ID NO: 7829 - protein, 12 aa, Homo sapiens
  ( 392 )...( 403 ): >ACM4_HUMAN
AARERKVTRTIF

SEQ ID NO: 7830 - protein, 12 aa, Homo sapiens
  ( 393 )...( 404 ): >ACM4_HUMAN
ARERKVTRTIFA

SEQ ID NO: 7831 - protein, 12 aa, Homo sapiens
  ( 394 )...( 405 ): >ACM4_HUMAN
RERKVTRTIFAI

SEQ ID NO: 7832 - protein, 12 aa, Homo sapiens
  ( 396 )...( 407 ): >ACM4_HUMAN
RKVTRTIFAILL

SEQ ID NO: 7833 - protein, 12 aa, Homo sapiens
  ( 130 )...( 141 ): >ACM5_HUMAN
FSITRPLTYRAK

SEQ ID NO: 7834 - protein, 12 aa, Homo sapiens
  ( 132 )...( 143 ): >ACM5_HUMAN
ITRPLTYRAKRT

SEQ ID NO: 7835 - protein, 12 aa, Homo sapiens
  ( 140 )...( 151 ): >ACM5_HUMAN
AKRTPKRAGIMI

SEQ ID NO: 7836 - protein, 12 aa, Homo sapiens
  ( 141 )...( 152 ): >ACM5_HUMAN
KRTPKRAGIMIG

SEQ ID NO: 7837 - protein, 12 aa, Homo sapiens
  ( 142 )...( 153 ): >ACM5_HUMAN
RTPKRAGIMIGL

SEQ ID NO: 7838 - protein, 12 aa, Homo sapiens
  ( 373 )...( 384 ): >ACM5_HUMAN
SQKCVAYKFRLV

SEQ ID NO: 7839 - protein, 12 aa, Homo sapiens
  ( 374 )...( 385 ): >ACM5_HUMAN
QKCVAYKFRLVV

SEQ ID NO: 7840 - protein, 12 aa, Homo sapiens
  ( 375 )...( 386 ): >ACM5_HUMAN
KCVAYKFRLVVK

SEQ ID NO: 7841 - protein, 12 aa, Homo sapiens
  ( 376 )...( 387 ): >ACM5_HUMAN
CVAYKFRLVVKA

SEQ ID NO: 7842 - protein, 12 aa, Homo sapiens
  ( 423 )...( 434 ): >ACM5_HUMAN
SHQMTKRKRVVL

SEQ ID NO: 7843 - protein, 12 aa, Homo sapiens
  ( 424 )...( 435 ): >ACM5_HUMAN
HQMTKRKRVVLV

SEQ ID NO: 7844 - protein, 12 aa, Homo sapiens
  ( 425 )...( 436 ): >ACM5_HUMAN
QMTKRKRVVLVK

SEQ ID NO: 7845 - protein, 12 aa, Homo sapiens
  ( 426 )...( 437 ): >ACM5_HUMAN
MTKRKRVVLVKE

SEQ ID NO: 7846 - protein, 12 aa, Homo sapiens
  ( 430 )...( 441 ): >ACM5_HUMAN
KRVVLVKERKAA

SEQ ID NO: 7847 - protein, 12 aa, Homo sapiens
  ( 431 )...( 442 ): >ACM5_HUMAN
RVVLVKERKAAQ

SEQ ID NO: 7848 - protein, 12 aa, Homo sapiens
  ( 84 )...( 95 ): >ACTR_HUMAN
IILRNMGYLKPR

SEQ ID NO: 7849 - protein, 12 aa, Homo sapiens
  ( 85 )...( 96 ): >ACTR_HUMAN
ILRNMGYLKPRG

SEQ ID NO: 7850 - protein, 12 aa, Homo sapiens
  ( 86 )...( 97 ): >ACTR_HUMAN
LRNMGYLKPRGS

SEQ ID NO: 7851 - protein, 12 aa, Homo sapiens
  ( 137 )...( 148 ): >ACTR_HUMAN
RYHSIVTMRRTV

SEQ ID NO: 7852 - protein, 12 aa, Homo sapiens
  ( 196 )...( 207 ): >ACTR_HUMAN
MFLLARSHTRKI

SEQ ID NO: 7853 - protein, 12 aa, Homo sapiens
  ( 197 )...( 208 ): >ACTR_HUMAN
FLLARSHTRKIS

SEQ ID NO: 7854 - protein, 12 aa, Homo sapiens
  ( 203 )...( 214 ): >ACTR_HUMAN
HTRKISTLPRAN

SEQ ID NO: 7855 - protein, 12 aa, Homo sapiens
  ( 204 )...( 215 ): >ACTR_HUMAN
TRKISTLPRANM

SEQ ID NO: 7856 - protein, 12 aa, Homo sapiens
  ( 205 )...( 216 ): >ACTR_HUMAN
RKISTLPRANMK

SEQ ID NO: 7857 - protein, 12 aa, Homo sapiens
  ( 206 )...( 217 ): >ACTR_HUMAN
KISTLPRANMKG

SEQ ID NO: 7858 - protein, 12 aa, Homo sapiens
  ( 165 )...( 176 ): >ADMR_HUMAN
YQHRVRRAMCAG

SEQ ID NO: 7859 - protein, 12 aa, Homo sapiens
  ( 166 )...( 177 ): >ADMR_HUMAN
QHRVRRAMCAGI

SEQ ID NO: 7860 - protein, 12 aa, Homo sapiens
  ( 167 )...( 178 ): >ADMR_HUMAN
HRVRRAMCAGIW

SEQ ID NO: 7861 - protein, 12 aa, Homo sapiens
  ( 168 )...( 179 ): >ADMR_HUMAN
RVRRAMCAGIWV

SEQ ID NO: 7862 - protein, 12 aa, Homo sapiens
  ( 241 )...( 252 ): >ADMR_HUMAN
TACRLRQPGQPK

SEQ ID NO: 7863 - protein, 12 aa, Homo sapiens
  ( 249 )...( 260 ): >ADMR_HUMAN
GQPKSRRHCLLL

SEQ ID NO: 7864 - protein, 12 aa, Homo sapiens
  ( 229 )...( 240 ): >AG22_HUMAN
TCYFGIRKHLLK

SEQ ID NO: 7865 - protein, 12 aa, Homo sapiens
  ( 230 )...( 241 ): >AG22_HUMAN
CYFGIRKHLLKT

SEQ ID NO: 7866 - protein, 12 aa, Homo sapiens
  ( 238 )...( 249 ): >AG22_HUMAN
LLKTNSYGKNRI

SEQ ID NO: 7867 - protein, 12 aa, Homo sapiens
  ( 239 )...( 250 ): >AG22_HUMAN
LKTNSYGKNRIT

SEQ ID NO: 7868 - protein, 12 aa, Homo sapiens
  ( 245 )...( 256 ): >AG22_HUMAN
GKNRITRDQVLK

SEQ ID NO: 7869 - protein, 12 aa, Homo sapiens
  ( 321 )...( 332 ): >AG22_HUMAN
VGNRFQQKLRSV

SEQ ID NO: 7870 - protein, 12 aa, Homo sapiens
  ( 326 )...( 337 ): >AG22_HUMAN
QQKLRSVFRVPI

SEQ ID NO: 7871 - protein, 12 aa, Homo sapiens
  ( 327 )...( 338 ): >AG22_HUMAN
QKLRSVFRVPIT

SEQ ID NO: 7872 - protein, 12 aa, Homo sapiens
  ( 340 )...( 351 ): >AG22_HUMAN
LQGKRESMSCRK

SEQ ID NO: 7873 - protein, 12 aa, Homo sapiens
  ( 128 )...( 139 ): >AG2R_HUMAN
LAIVHPMKSRLR

SEQ ID NO: 7874 - protein, 12 aa, Homo sapiens
  ( 133 )...( 144 ): >AG2R_HUMAN
PMKSRLRRTMLV

SEQ ID NO: 7875 - protein, 12 aa, Homo sapiens
  ( 134 )...( 145 ): >AG2R_HUMAN
MKSRLRRTMLVA

SEQ ID NO: 7876 - protein, 12 aa, Homo sapiens
  ( 136 )...( 147 ): >AG2R_HUMAN
SRLRRTMLVAKV

SEQ ID NO: 7877 - protein, 12 aa, Homo sapiens
  ( 137 )...( 148 ): >AG2R_HUMAN
RLRRTMLVAKVT

SEQ ID NO: 7878 - protein, 12 aa, Homo sapiens
  ( 138 )...( 149 ): >AG2R_HUMAN
LRRTMLVAKVTC

SEQ ID NO: 7879 - protein, 12 aa, Homo sapiens
  ( 139 )...( 150 ): >AG2R_HUMAN
RRTMLVAKVTCI

SEQ ID NO: 7880 - protein, 12 aa, Homo sapiens
  ( 214 )...( 225 ): >AG2R_HUMAN
SYTLIWKALKKA

SEQ ID NO: 7881 - protein, 12 aa, Homo sapiens
  ( 315 )...( 326 ): >AG2R_HUMAN
QLLKYIPPKAKS

SEQ ID NO: 7882 - protein, 12 aa, Homo sapiens
  ( 128 )...( 139 ): >AG2S_HUMAN
LAIVHPMKSRLR

SEQ ID NO: 7883 - protein, 12 aa, Homo sapiens
  ( 133 )...( 144 ): >AG2S_HUMAN
PMKSRLRRTMLV

SEQ ID NO: 7884 - protein, 12 aa, Homo sapiens
  ( 134 )...( 145 ): >AG2S_HUMAN
MKSRLRRTMLVA

SEQ ID NO: 7885 - protein, 12 aa, Homo sapiens
  ( 136 )...( 147 ): >AG2S_HUMAN
SRLRRTMLVAKV

SEQ ID NO: 7886 - protein, 12 aa, Homo sapiens
  ( 137 )...( 148 ): >AG2S_HUMAN
RLRRTMLVAKVT

SEQ ID NO: 7887 - protein, 12 aa, Homo sapiens
  ( 138 )...( 149 ): >AG2S_HUMAN
LRRTMLVAKVTC

SEQ ID NO: 7888 - protein, 12 aa, Homo sapiens
  ( 139 )...( 150 ): >AG2S_HUMAN
RRTMLVAKVTCI

SEQ ID NO: 7889 - protein, 12 aa, Homo sapiens
  ( 214 )...( 225 ): >AG2S_HUMAN
SYTLIWKALKKA

SEQ ID NO: 7890 - protein, 12 aa, Homo sapiens
  ( 302 )...( 313 ): >AG2S_HUMAN
YGFLGKKFKKDI

SEQ ID NO: 7891 - protein, 12 aa, Homo sapiens
  ( 303 )...( 314 ): >AG2S_HUMAN
GFLGKKFKKDIL

SEQ ID NO: 7892 - protein, 12 aa, Homo sapiens
  ( 305 )...( 316 ): >AG2S_HUMAN
LGKKFKKDILQL

SEQ ID NO: 7893 - protein, 12 aa, Homo sapiens
  ( 306 )...( 317 ): >AG2S_HUMAN
GKKFKKDILQLL

SEQ ID NO: 7894 - protein, 12 aa, Homo sapiens
  ( 315 )...( 326 ): >AG2S_HUMAN
QLLKYIPPKAKS

SEQ ID NO: 7895 - protein, 12 aa, Homo sapiens
  ( 130 )...( 141 ): >APJ_HUMAN
AIVRPVANARLR

SEQ ID NO: 7896 - protein, 12 aa, Homo sapiens
  ( 131 )...( 142 ): >APJ_HUMAN
IVRPVANARLRL

SEQ ID NO: 7897 - protein, 12 aa, Homo sapiens
  ( 134 )...( 145 ): >APJ_HUMAN
PVANARLRLRVS

SEQ ID NO: 7898 - protein, 12 aa, Homo sapiens
  ( 135 )...( 146 ): >APJ_HUMAN
VANARLRLRVSG

SEQ ID NO: 7899 - protein, 12 aa, Homo sapiens
  ( 136 )...( 147 ): >APJ_HUMAN
ANARLRLRVSGA

SEQ ID NO: 7900 - protein, 12 aa, Homo sapiens
  ( 137 )...( 148 ): >APJ_HUMAN
NARLRLRVSGAV

SEQ ID NO: 7901 - protein, 12 aa, Homo sapiens
  ( 138 )...( 149 ): >APJ_HUMAN
ARLRLRVSGAVA

SEQ ID NO: 7902 - protein, 12 aa, Homo sapiens
  ( 139 )...( 150 ): >APJ_HUMAN
RLRLRVSGAVAT

SEQ ID NO: 7903 - protein, 12 aa, Homo sapiens
  ( 242 )...( 253 ): >APJ_HUMAN
KRRRLLSIIVVL

SEQ ID NO: 7904 - protein, 12 aa, Homo sapiens
  ( 21 )...( 32 ): >ARK2_HUMAN
KATPAARASKRI

SEQ ID NO: 7905 - protein, 12 aa, Homo sapiens
  ( 23 )...( 34 ): >ARK2_HUMAN
TPAARASKRIVL

SEQ ID NO: 7906 - protein, 12 aa, Homo sapiens
  ( 24 )...( 35 ): >ARK2_HUMAN
PAARASKRIVLP

SEQ ID NO: 7907 - protein, 12 aa, Homo sapiens
  ( 209 )...( 220 ): >ARK2_HUMAN
RKADTGKMYAMK

SEQ ID NO: 7908 - protein, 12 aa, Homo sapiens
  ( 218 )...( 229 ): >ARK2_HUMAN
AMKCLDKKRIKM

SEQ ID NO: 7909 - protein, 12 aa, Homo sapiens
  ( 221 )...( 232 ): >ARK2_HUMAN
CLDKKRIKMKQG

SEQ ID NO: 7910 - protein, 12 aa, Homo sapiens
  ( 223 )...( 234 ): >ARK2_HUMAN
DKKRIKMKQGET

SEQ ID NO: 7911 - protein, 12 aa, Homo sapiens
  ( 224 )...( 235 ): >ARK2_HUMAN
KKRIKMKQGETL

SEQ ID NO: 7912 - protein, 12 aa, Homo sapiens
  ( 225 )...( 236 ): >ARK2_HUMAN
KRIKMKQGETLA

SEQ ID NO: 7913 - protein, 12 aa, Homo sapiens
  ( 612 )...( 623 ): >ARK2_HUMAN
TQIKDKKCILFR

SEQ ID NO: 7914 - protein, 12 aa, Homo sapiens
  ( 615 )...( 626 ): >ARK2_HUMAN
KDKKCILFRIKG

SEQ ID NO: 7915 - protein, 12 aa, Homo sapiens
  ( 616 )...( 627 ): >ARK2_HUMAN
DKKCILFRIKGG

SEQ ID NO: 7916 - protein, 12 aa, Homo sapiens
  ( 617 )...( 628 ): >ARK2_HUMAN
KKCILFRIKGGK

SEQ ID NO: 7917 - protein, 12 aa, Homo sapiens
  ( 618 )...( 629 ): >ARK2_HUMAN
KCILFRIKGGKQ

SEQ ID NO: 7918 - protein, 12 aa, Homo sapiens
  ( 619 )...( 630 ): >ARK2_HUMAN
CILFRIKGGKQF

SEQ ID NO: 7919 - protein, 12 aa, Homo sapiens
  ( 620 )...( 631 ): >ARK2_HUMAN
ILFRIKGGKQFV

SEQ ID NO: 7920 - protein, 12 aa, Homo sapiens
  ( 621 )...( 632 ): >ARK2_HUMAN
LFRIKGGKQFVL

SEQ ID NO: 7921 - protein, 12 aa, Homo sapiens
  ( 622 )...( 633 ): >ARK2_HUMAN
FRIKGGKQFVLQ

SEQ ID NO: 7922 - protein, 12 aa, Homo sapiens
  ( 623 )...( 634 ): >ARK2_HUMAN
RIKGGKQFVLQC

SEQ ID NO: 7923 - protein, 12 aa, Homo sapiens
  ( 166 )...( 177 ): >B1AR_HUMAN
YQSLLTRARARG

SEQ ID NO: 7924 - protein, 12 aa, Homo sapiens
  ( 167 )...( 178 ): >B1AR_HUMAN
QSLLTRARARGL

SEQ ID NO: 7925 - protein, 12 aa, Homo sapiens
  ( 168 )...( 179 ): >B1AR_HUMAN
SLLTRARARGLV

SEQ ID NO: 7926 - protein, 12 aa, Homo sapiens
  ( 169 )...( 180 ): >B1AR_HUMAN
LLTRARARGLVC

SEQ ID NO: 7927 - protein, 12 aa, Homo sapiens
  ( 170 )...( 181 ): >B1AR_HUMAN
LTRARARGLVCT

SEQ ID NO: 7928 - protein, 12 aa, Homo sapiens
  ( 172 )...( 183 ): >B1AR_HUMAN
RARARGLVCTVW

SEQ ID NO: 7929 - protein, 12 aa, Homo sapiens
  ( 247 )...( 258 ): >B1AR_HUMAN
VFREAQKQVKKI

SEQ ID NO: 7930 - protein, 12 aa, Homo sapiens
  ( 299 )...( 310 ): >B1AR_HUMAN
APLANGRAGKRR

SEQ ID NO: 7931 - protein, 12 aa, Homo sapiens
  ( 300 )...( 311 ): >B1AR_HUMAN
PLANGRAGKRRP

SEQ ID NO: 7932 - protein, 12 aa, Homo sapiens
  ( 301 )...( 312 ): >B1AR_HUMAN
LANGRAGKRRPS

SEQ ID NO: 7933 - protein, 12 aa, Homo sapiens
  ( 306 )...( 317 ): >B1AR_HUMAN
AGKRRPSRLVAL

SEQ ID NO: 7934 - protein, 12 aa, Homo sapiens
  ( 313 )...( 324 ): >B1AR_HUMAN
RLVALREQKALK

SEQ ID NO: 7935 - protein, 12 aa, Homo sapiens
  ( 141 )...( 152 ): >B2AR_HUMAN
YQSLLTKNKARV

SEQ ID NO: 7936 - protein, 12 aa, Homo sapiens
  ( 142 )...( 153 ): >B2AR_HUMAN
QSLLTKNKARVI

SEQ ID NO: 7937 - protein, 12 aa, Homo sapiens
  ( 143 )...( 154 ): >B2AR_HUMAN
SLLTKNKARVII

SEQ ID NO: 7938 - protein, 12 aa, Homo sapiens
  ( 144 )...( 155 ): >B2AR_HUMAN
LLTKNKARVIIL

SEQ ID NO: 7939 - protein, 12 aa, Homo sapiens
  ( 145 )...( 156 ): >B2AR_HUMAN
LTKNKARVIILM

SEQ ID NO: 7940 - protein, 12 aa, Homo sapiens
  ( 146 )...( 157 ): >B2AR_HUMAN
TKNKARVIILMV

SEQ ID NO: 7941 - protein, 12 aa, Homo sapiens
  ( 252 )...( 263 ): >B2AR_HUMAN
GRTGHGLRRSSK

SEQ ID NO: 7942 - protein, 12 aa, Homo sapiens
  ( 253 )...( 264 ): >B2AR_HUMAN
RTGHGLRRSSKF

SEQ ID NO: 7943 - protein, 12 aa, Homo sapiens
  ( 257 )...( 268 ): >B2AR_HUMAN
GLRRSSKFCLKE

SEQ ID NO: 7944 - protein, 12 aa, Homo sapiens
  ( 339 )...( 350 ): >B2AR_HUMAN
LLCLRRSSLKAY

SEQ ID NO: 7945 - protein, 12 aa, Homo sapiens
  ( 342 )...( 353 ): >B2AR_HUMAN
LRRSSLKAYGNG

SEQ ID NO: 7946 - protein, 12 aa, Homo sapiens
  ( 141 )...( 152 ): >B3AR_HUMAN
NPLRYGALVTKR

SEQ ID NO: 7947 - protein, 12 aa, Homo sapiens
  ( 142 )...( 153 ): >B3AR_HUMAN
PLRYGALVTKRC

SEQ ID NO: 7948 - protein, 12 aa, Homo sapiens
  ( 143 )...( 154 ): >B3AR_HUMAN
LRYGALVTKRCA

SEQ ID NO: 7949 - protein, 12 aa, Homo sapiens
  ( 144 )...( 155 ): >B3AR_HUMAN
RYGALVTKRCAR

SEQ ID NO: 7950 - protein, 12 aa, Homo sapiens
  ( 145 )...( 156 ): >B3AR_HUMAN
YGALVTKRCART

SEQ ID NO: 7951 - protein, 12 aa, Homo sapiens
  ( 151 )...( 162 ): >B3AR_HUMAN
KRCARTAVVLVW

SEQ ID NO: 7952 - protein, 12 aa, Homo sapiens
  ( 225 )...( 236 ): >B3AR_HUMAN
ARVFVVATRQLR

SEQ ID NO: 7953 - protein, 12 aa, Homo sapiens
  ( 226 )...( 237 ): >B3AR_HUMAN
RVFVVATRQLRL

SEQ ID NO: 7954 - protein, 12 aa, Homo sapiens
  ( 228 )...( 239 ): >B3AR_HUMAN
FVVATRQLRLLR

SEQ ID NO: 7955 - protein, 12 aa, Homo sapiens
  ( 229 )...( 240 ): >B3AR_HUMAN
VVATRQLRLLRG

SEQ ID NO: 7956 - protein, 12 aa, Homo sapiens
  ( 233 )...( 244 ): >B3AR_HUMAN
RQLRLLRGELGR

SEQ ID NO: 7957 - protein, 12 aa, Homo sapiens
  ( 19 )...( 30 ): >BAI1_HUMAN
LLLLLLGRRARA

SEQ ID NO: 7958 - protein, 12 aa, Homo sapiens
  ( 20 )...( 31 ): >BAI1_HUMAN
LLLLLGRRARAA

SEQ ID NO: 7959 - protein, 12 aa, Homo sapiens
  ( 21 )...( 32 ): >BAI1_HUMAN
LLLLGRRARAAA

SEQ ID NO: 7960 - protein, 12 aa, Homo sapiens
  ( 79 )...( 90 ): >BAI1_HUMAN
RYTLYMKVAKAP

SEQ ID NO: 7961 - protein, 12 aa, Homo sapiens
  ( 317 )...( 328 ): >BAI1_HUMAN
AGRTSSRSQSLR

SEQ ID NO: 7962 - protein, 12 aa, Homo sapiens
  ( 318 )...( 329 ): >BAI1_HUMAN
GRTSSRSQSLRS

SEQ ID NO: 7963 - protein, 12 aa, Homo sapiens
  ( 319 )...( 330 ): >BAI1_HUMAN
RTSSRSQSLRST

SEQ ID NO: 7964 - protein, 12 aa, Homo sapiens
  ( 423 )...( 434 ): >BAI1_HUMAN
STCGRGFRDRTR

SEQ ID NO: 7965 - protein, 12 aa, Homo sapiens
  ( 424 )...( 435 ): >BAI1_HUMAN
TCGRGFRDRTRT

SEQ ID NO: 7966 - protein, 12 aa, Homo sapiens
  ( 603 )...( 614 ): >BAI1_HUMAN
RCPRNATGLILR

SEQ ID NO: 7967 - protein, 12 aa, Homo sapiens
  ( 604 )...( 615 ): >BAI1_HUMAN
CPRNATGLILRR

SEQ ID NO: 7968 - protein, 12 aa, Homo sapiens
  ( 605 )...( 616 ): >BAI1_HUMAN
PRNATGLILRRC

SEQ ID NO: 7969 - protein, 12 aa, Homo sapiens
  ( 851 )...( 862 ): >BAI1_HUMAN
KVISVTVKPPPR

SEQ ID NO: 7970 - protein, 12 aa, Homo sapiens
  ( 854 )...( 865 ): >BAI1_HUMAN
SVTVKPPPRSLR

SEQ ID NO: 7971 - protein, 12 aa, Homo sapiens
  ( 855 )...( 866 ): >BAI1_HUMAN
VTVKPPPRSLRT

SEQ ID NO: 7972 - protein, 12 aa, Homo sapiens
  ( 857 )...( 868 ): >BAI1_HUMAN
VKPPPRSLRTPL

SEQ ID NO: 7973 - protein, 12 aa, Homo sapiens
  ( 1039 )...( 1050 ): >BAI1_HUMAN
AVTGHLRNRLIR

SEQ ID NO: 7974 - protein, 12 aa, Homo sapiens
  ( 1040 )...( 1051 ): >BAI1_HUMAN
VTGHLRNRLIRK

SEQ ID NO: 7975 - protein, 12 aa, Homo sapiens
  ( 1048 )...( 1059 ): >BAI1_HUMAN
LIRKRFLCLGWG

SEQ ID NO: 7976 - protein, 12 aa, Homo sapiens
  ( 1049 )...( 1060 ): >BAI1_HUMAN
IRKRFLCLGWGL

SEQ ID NO: 7977 - protein, 12 aa, Homo sapiens
  ( 1126 )...( 1137 ): >BAI1_HUMAN
KKLKERAGASLW

SEQ ID NO: 7978 - protein, 12 aa, Homo sapiens
  ( 1245 )...( 1256 ): >BAI1_HUMAN
RTATITGTLKRP

SEQ ID NO: 7979 - protein, 12 aa, Homo sapiens
  ( 1349 )...( 1360 ): >BAI1_HUMAN
PTATATLRPKPK

SEQ ID NO: 7980 - protein, 12 aa, Homo sapiens
  ( 1465 )...( 1476 ): >BAI1_HUMAN
LSVSSLERRKSR

SEQ ID NO: 7981 - protein, 12 aa, Homo sapiens
  ( 1534 )...( 1545 ): >BAI1_HUMAN
LRKAHGTPTWVK

SEQ ID NO: 7982 - protein, 12 aa, Homo sapiens
  ( 1535 )...( 1546 ): >BAI1_HUMAN
RKAHGTPTWVKK

SEQ ID NO: 7983 - protein, 12 aa, Homo sapiens
  ( 369 )...( 380 ): >BAI2_HUMAN
GRGSRSRMRTCV

SEQ ID NO: 7984 - protein, 12 aa, Homo sapiens
  ( 370 )...( 381 ): >BAI2_HUMAN
RGSRSRMRTCVP

SEQ ID NO: 7985 - protein, 12 aa, Homo sapiens
  ( 425 )...( 436 ): >BAI2_HUMAN
NGTQQRSRKCSV

SEQ ID NO: 7986 - protein, 12 aa, Homo sapiens
  ( 426 )...( 437 ): >BAI2_HUMAN
GTQQRSRKCSVA

SEQ ID NO: 7987 - protein, 12 aa, Homo sapiens
  ( 427 )...( 438 ): >BAI2_HUMAN
TQQRSRKCSVAG

SEQ ID NO: 7988 - protein, 12 aa, Homo sapiens
  ( 484 )...( 495 ): >BAI2_HUMAN
QRRFRMCQATGT

SEQ ID NO: 7989 - protein, 12 aa, Homo sapiens
  ( 485 )...( 496 ): >BAI2_HUMAN
RRFRMCQATGTQ

SEQ ID NO: 7990 - protein, 12 aa, Homo sapiens
  ( 726 )...( 737 ): >BAI2_HUMAN
ITFPMRGRRGMK

SEQ ID NO: 7991 - protein, 12 aa, Homo sapiens
  ( 1009 )...( 1020 ): >BAI2_HUMAN
SYLAVIGRMRTR

SEQ ID NO: 7992 - protein, 12 aa, Homo sapiens
  ( 1010 )...( 1021 ): >BAI2_HUMAN
YLAVIGRMRTRL

SEQ ID NO: 7993 - protein, 12 aa, Homo sapiens
  ( 1011 )...( 1022 ): >BAI2_HUMAN
LAVIGRMRTRLV

SEQ ID NO: 7994 - protein, 12 aa, Homo sapiens
  ( 1019 )...( 1030 ): >BAI2_HUMAN
TRLVRKRFLCLG

SEQ ID NO: 7995 - protein, 12 aa, Homo sapiens
  ( 1021 )...( 1032 ): >BAI2_HUMAN
LVRKRFLCLGWG

SEQ ID NO: 7996 - protein, 12 aa, Homo sapiens
  ( 1022 )...( 1033 ): >BAI2_HUMAN
VRKRFLCLGWGL

SEQ ID NO: 7997 - protein, 12 aa, Homo sapiens
  ( 1095 )...( 1106 ): >BAI2_HUMAN
GISDKSKKQRAG

SEQ ID NO: 7998 - protein, 12 aa, Homo sapiens
  ( 1363 )...( 1374 ): >BAI2_HUMAN
RARPEGTPRRAA

SEQ ID NO: 7999 - protein, 12 aa, Homo sapiens
  ( 1364 )...( 1375 ): >BAI2_HUMAN
ARPEGTPRRAAK

SEQ ID NO: 8000 - protein, 12 aa, Homo sapiens
  ( 1365 )...( 1376 ): >BAI2_HUMAN
RPEGTPRRAAKT

SEQ ID NO: 8001 - protein, 12 aa, Homo sapiens
  ( 1368 )...( 1379 ): >BAI2_HUMAN
GTPRRAAKTVAH

SEQ ID NO: 8002 - protein, 12 aa, Homo sapiens
  ( 1369 )...( 1380 ): >BAI2_HUMAN
TPRRAAKTVAHT

SEQ ID NO: 8003 - protein, 12 aa, Homo sapiens
  ( 1429 )...( 1440 ): >BAI2_HUMAN
RSRTMPRTVPGS

SEQ ID NO: 8004 - protein, 12 aa, Homo sapiens
  ( 1441 )...( 1452 ): >BAI2_HUMAN
TMKMGSLERKKL

SEQ ID NO: 8005 - protein, 12 aa, Homo sapiens
  ( 1442 )...( 1453 ): >BAI2_HUMAN
MKMGSLERKKLR

SEQ ID NO: 8006 - protein, 12 aa, Homo sapiens
  ( 1491 )...( 1502 ): >BAI2_HUMAN
AKREKRWSVSSG

SEQ ID NO: 8007 - protein, 12 aa, Homo sapiens
  ( 1492 )...( 1503 ): >BAI2_HUMAN
KREKRWSVSSGG

SEQ ID NO: 8008 - protein, 12 aa, Homo sapiens
  ( 358 )...( 369 ): >BAI3_HUMAN
SFTCGRGQRTRT

SEQ ID NO: 8009 - protein, 12 aa, Homo sapiens
  ( 359 )...( 370 ): >BAI3_HUMAN
FTCGRGQRTRTR

SEQ ID NO: 8010 - protein, 12 aa, Homo sapiens
  ( 363 )...( 374 ): >BAI3_HUMAN
RGQRTRTRSCTP

SEQ ID NO: 8011 - protein, 12 aa, Homo sapiens
  ( 365 )...( 376 ): >BAI3_HUMAN
QRTRTRSCTPPQ

SEQ ID NO: 8012 - protein, 12 aa, Homo sapiens
  ( 477 )...( 488 ): >BAI3_HUMAN
RRIRTCQGAVIT

SEQ ID NO: 8013 - protein, 12 aa, Homo sapiens
  ( 722 )...( 733 ): >BAI3_HUMAN
MKGRKGMVDWAR

SEQ ID NO: 8014 - protein, 12 aa, Homo sapiens
  ( 723 )...( 734 ): >BAI3_HUMAN
KGRKGMVDWARN

SEQ ID NO: 8015 - protein, 12 aa, Homo sapiens
  ( 966 )...( 977 ): >BAI3_HUMAN
SYMAVTGKIRTR

SEQ ID NO: 8016 - protein, 12 aa, Homo sapiens
  ( 967 )...( 978 ): >BAI3_HUMAN
YMAVTGKIRTRL

SEQ ID NO: 8017 - protein, 12 aa, Homo sapiens
  ( 968 )...( 979 ): >BAI3_HUMAN
MAVTGKIRTRLI

SEQ ID NO: 8018 - protein, 12 aa, Homo sapiens
  ( 969 )...( 980 ): >BAI3_HUMAN
AVTGKIRTRLIR

SEQ ID NO: 8019 - protein, 12 aa, Homo sapiens
  ( 976 )...( 987 ): >BAI3_HUMAN
TRLIRKRFLCLG

SEQ ID NO: 8020 - protein, 12 aa, Homo sapiens
  ( 978 )...( 989 ): >BAI3_HUMAN
LIRKRFLCLGWG

SEQ ID NO: 8021 - protein, 12 aa, Homo sapiens
  ( 979 )...( 990 ): >BAI3_HUMAN
IRKRFLCLGWGL

SEQ ID NO: 8022 - protein, 12 aa, Homo sapiens
  ( 1052 )...( 1063 ): >BAI3_HUMAN
GILDKKLKHRAG

SEQ ID NO: 8023 - protein, 12 aa, Homo sapiens
  ( 1053 )...( 1064 ): >BAI3_HUMAN
ILDKKLKHRAGQ

SEQ ID NO: 8024 - protein, 12 aa, Homo sapiens
  ( 1054 )...( 1065 ): >BAI3_HUMAN
LDKKLKHRAGQM

SEQ ID NO: 8025 - protein, 12 aa, Homo sapiens
  ( 151 )...( 162 ): >BRB1_HUMAN
RRQARVTCVLIW

SEQ ID NO: 8026 - protein, 12 aa, Homo sapiens
  ( 235 )...( 246 ): >BRB1_HUMAN
VSRTRVRGPKDS

SEQ ID NO: 8027 - protein, 12 aa, Homo sapiens
  ( 236 )...( 247 ): >BRB1_HUMAN
SRTRVRGPKDSK

SEQ ID NO: 8028 - protein, 12 aa, Homo sapiens
  ( 237 )...( 248 ): >BRB1_HUMAN
RTRVRGPKDSKT

SEQ ID NO: 8029 - protein, 12 aa, Homo sapiens
  ( 238 )...( 249 ): >BRB1_HUMAN
TRVRGPKDSKTT

SEQ ID NO: 8030 - protein, 12 aa, Homo sapiens
  ( 239 )...( 250 ): >BRB1_HUMAN
RVRGPKDSKTTA

SEQ ID NO: 8031 - protein, 12 aa, Homo sapiens
  ( 312 )...( 323 ): >BRB1_HUMAN
YVFVGRLFRTKV

SEQ ID NO: 8032 - protein, 12 aa, Homo sapiens
  ( 158 )...( 169 ): >BRB2_HUMAN
ALVKTMSMGRMR

SEQ ID NO: 8033 - protein, 12 aa, Homo sapiens
  ( 159 )...( 170 ): >BRB2_HUMAN
LVKTMSMGRMRG

SEQ ID NO: 8034 - protein, 12 aa, Homo sapiens
  ( 160 )...( 171 ): >BRB2_HUMAN
VKTMSMGRMRGV

SEQ ID NO: 8035 - protein, 12 aa, Homo sapiens
  ( 161 )...( 172 ): >BRB2_HUMAN
KTMSMGRMRGVR

SEQ ID NO: 8036 - protein, 12 aa, Homo sapiens
  ( 162 )...( 173 ): >BRB2_HUMAN
TMSMGRMRGVRW

SEQ ID NO: 8037 - protein, 12 aa, Homo sapiens
  ( 163 )...( 174 ): >BRB2_HUMAN
MSMGRMRGVRWA

SEQ ID NO: 8038 - protein, 12 aa, Homo sapiens
  ( 164 )...( 175 ): >BRB2_HUMAN
SMGRMRGVRWAK

SEQ ID NO: 8039 - protein, 12 aa, Homo sapiens
  ( 168 )...( 179 ): >BRB2_HUMAN
MRGVRWAKLYSL

SEQ ID NO: 8040 - protein, 12 aa, Homo sapiens
  ( 169 )...( 180 ): >BRB2_HUMAN
RGVRWAKLYSLV

SEQ ID NO: 8041 - protein, 12 aa, Homo sapiens
  ( 329 )...( 340 ): >BRB2_HUMAN
PLVYVIVGKRFR

SEQ ID NO: 8042 - protein, 12 aa, Homo sapiens
  ( 330 )...( 341 ): >BRB2_HUMAN
LVYVIVGKRFRK

SEQ ID NO: 8043 - protein, 12 aa, Homo sapiens
  ( 332 )...( 343 ): >BRB2_HUMAN
YVIVGKRFRKKS

SEQ ID NO: 8044 - protein, 12 aa, Homo sapiens
  ( 65 )...( 76 ): >BRS3_HUMAN
NAILIKVFFKTK

SEQ ID NO: 8045 - protein, 12 aa, Homo sapiens
  ( 116 )...( 127 ): >BRS3_HUMAN
GRIGCKVLSFIR

SEQ ID NO: 8046 - protein, 12 aa, Homo sapiens
  ( 117 )...( 128 ): >BRS3_HUMAN
RIGCKVLSFIRL

SEQ ID NO: 8047 - protein, 12 aa, Homo sapiens
  ( 262 )...( 273 ): >BRS3_HUMAN
QIESRKRIARTV

SEQ ID NO: 8048 - protein, 12 aa, Homo sapiens
  ( 263 )...( 274 ): >BRS3_HUMAN
IESRKRIARTVL

SEQ ID NO: 8049 - protein, 12 aa, Homo sapiens
  ( 264 )...( 275 ): >BRS3_HUMAN
ESRKRIARTVLV

SEQ ID NO: 8050 - protein, 12 aa, Homo sapiens
  ( 265 )...( 276 ): >BRS3_HUMAN
SRKRIARTVLVL

SEQ ID NO: 8051 - protein, 12 aa, Homo sapiens
  ( 266 )...( 277 ): >BRS3_HUMAN
RKRIARTVLVLV

SEQ ID NO: 8052 - protein, 12 aa, Homo sapiens
  ( 267 )...( 278 ): >BRS3_HUMAN
KRIARTVLVLVA

SEQ ID NO: 8053 - protein, 12 aa, Homo sapiens
  ( 364 )...( 375 ): >C3AR_HUMAN
QRGRFAKSQSKT

SEQ ID NO: 8054 - protein, 12 aa, Homo sapiens
  ( 368 )...( 379 ): >C3AR_HUMAN
FAKSQSKTFRVA

SEQ ID NO: 8055 - protein, 12 aa, Homo sapiens
  ( 369 )...( 380 ): >C3AR_HUMAN
AKSQSKTFRVAV

SEQ ID NO: 8056 - protein, 12 aa, Homo sapiens
  ( 370 )...( 381 ): >C3AR_HUMAN
KSQSKTFRVAVV

SEQ ID NO: 8057 - protein, 12 aa, Homo sapiens
  ( 435 )...( 446 ): >C3AR_HUMAN
YALLGKDFRKKA

SEQ ID NO: 8058 - protein, 12 aa, Homo sapiens
  ( 436 )...( 447 ): >C3AR_HUMAN
ALLGKDFRKKAR

SEQ ID NO: 8059 - protein, 12 aa, Homo sapiens
  ( 442 )...( 453 ): >C3AR_HUMAN
FRKKARQSIQGI

SEQ ID NO: 8060 - protein, 12 aa, Homo sapiens
  ( 443 )...( 454 ): >C3AR_HUMAN
RKKARQSIQGIL

SEQ ID NO: 8061 - protein, 12 aa, Homo sapiens
  ( 220 )...( 231 ): >C3X1_HUMAN
SCKNHKKAKAIK

SEQ ID NO: 8062 - protein, 12 aa, Homo sapiens
  ( 221 )...( 232 ): >C3X1_HUMAN
CKNHKKAKAIKL

SEQ ID NO: 8063 - protein, 12 aa, Homo sapiens
  ( 222 )...( 233 ): >C3X1_HUMAN
KNHKKAKAIKLI

SEQ ID NO: 8064 - protein, 12 aa, Homo sapiens
  ( 223 )...( 234 ): >C3X1_HUMAN
NHKKAKAIKLIL

SEQ ID NO: 8065 - protein, 12 aa, Homo sapiens
  ( 224 )...( 235 ): >C3X1_HUMAN
HKKAKAIKLILL

SEQ ID NO: 8066 - protein, 12 aa, Homo sapiens
  ( 197 )...( 208 ): >C5AR_HUMAN
RRERAVAIVRLV

SEQ ID NO: 8067 - protein, 12 aa, Homo sapiens
  ( 229 )...( 240 ): >C5AR_HUMAN
TWSRRATRSTKT

SEQ ID NO: 8068 - protein, 12 aa, Homo sapiens
  ( 231 )...( 242 ): >C5AR_HUMAN
SRRATRSTKTLK

SEQ ID NO: 8069 - protein, 12 aa, Homo sapiens
  ( 232 )...( 243 ): >C5AR_HUMAN
RRATRSTKTLKV

SEQ ID NO: 8070 - protein, 12 aa, Homo sapiens
  ( 233 )...( 244 ): >C5AR_HUMAN
RATRSTKTLKVV

SEQ ID NO: 8071 - protein, 12 aa, Homo sapiens
  ( 302 )...( 313 ): >C5AR_HUMAN
VAGQGFQGRLRK

SEQ ID NO: 8072 - protein, 12 aa, Homo sapiens
  ( 303 )...( 314 ): >C5AR_HUMAN
AGQGFQGRLRKS

SEQ ID NO: 8073 - protein, 12 aa, Homo sapiens
  ( 304 )...( 315 ): >C5AR_HUMAN
GQGFQGRLRKSL

SEQ ID NO: 8074 - protein, 12 aa, Homo sapiens
  ( 305 )...( 316 ): >C5AR_HUMAN
QGFQGRLRKSLP

SEQ ID NO: 8075 - protein, 12 aa, Homo sapiens
  ( 306 )...( 317 ): >C5AR_HUMAN
GFQGRLRKSLPS

SEQ ID NO: 8076 - protein, 12 aa, Homo sapiens
  ( 307 )...( 318 ): >C5AR_HUMAN
FQGRLRKSLPSL

SEQ ID NO: 8077 - protein, 12 aa, Homo sapiens
  ( 308 )...( 319 ): >C5AR_HUMAN
QGRLRKSLPSLL

SEQ ID NO: 8078 - protein, 12 aa, Homo sapiens
  ( 309 )...( 320 ): >C5AR_HUMAN
GRLRKSLPSLLR

SEQ ID NO: 8079 - protein, 12 aa, Homo sapiens
  ( 311 )...( 322 ): >C5AR_HUMAN
LRKSLPSLLRNV

SEQ ID NO: 8080 - protein, 12 aa, Homo sapiens
  ( 312 )...( 323 ): >C5AR_HUMAN
RKSLPSLLRNVL

SEQ ID NO: 8081 - protein, 12 aa, Homo sapiens
  ( 55 )...( 66 ): >C5L2_HUMAN
MVAWVAGKVARR

SEQ ID NO: 8082 - protein, 12 aa, Homo sapiens
  ( 61 )...( 72 ): >C5L2_HUMAN
GKVARRRVGATW

SEQ ID NO: 8083 - protein, 12 aa, Homo sapiens
  ( 62 )...( 73 ): >C5L2_HUMAN
KVARRRVGATWL

SEQ ID NO: 8084 - protein, 12 aa, Homo sapiens
  ( 63 )...( 74 ): >C5L2_HUMAN
VARRRVGATWLL

SEQ ID NO: 8085 - protein, 12 aa, Homo sapiens
  ( 64 )...( 75 ): >C5L2_HUMAN
ARRRVGATWLLH

SEQ ID NO: 8086 - protein, 12 aa, Homo sapiens
  ( 65 )...( 76 ): >C5L2_HUMAN
RRRVGATWLLHL

SEQ ID NO: 8087 - protein, 12 aa, Homo sapiens
  ( 227 )...( 238 ): >C5L2_HUMAN
AARRCRPLGTAI

SEQ ID NO: 8088 - protein, 12 aa, Homo sapiens
  ( 228 )...( 239 ): >C5L2_HUMAN
ARRCRPLGTAIV

SEQ ID NO: 8089 - protein, 12 aa, Homo sapiens
  ( 229 )...( 240 ): >C5L2_HUMAN
RRCRPLGTAIVV

SEQ ID NO: 8090 - protein, 12 aa, Homo sapiens
  ( 294 )...( 305 ): >C5L2_HUMAN
FGRAQLRRSLPA

SEQ ID NO: 8091 - protein, 12 aa, Homo sapiens
  ( 295 )...( 306 ): >C5L2_HUMAN
GRAQLRRSLPAA

SEQ ID NO: 8092 - protein, 12 aa, Homo sapiens
  ( 36 )...( 47 ): >CALR_HUMAN
PKPFLYVVGRKK

SEQ ID NO: 8093 - protein, 12 aa, Homo sapiens
  ( 37 )...( 48 ): >CALR_HUMAN
KPFLYVVGRKKM

SEQ ID NO: 8094 - protein, 12 aa, Homo sapiens
  ( 43 )...( 54 ): >CALR_HUMAN
VGRKKMMDAQYK

SEQ ID NO: 8095 - protein, 12 aa, Homo sapiens
  ( 185 )...( 196 ): >CALR_HUMAN
KYRKALSLGCQR

SEQ ID NO: 8096 - protein, 12 aa, Homo sapiens
  ( 186 )...( 197 ): >CALR_HUMAN
YRKALSLGCQRV

SEQ ID NO: 8097 - protein, 12 aa, Homo sapiens
  ( 187 )...( 198 ): >CALR_HUMAN
RKALSLGCQRVT

SEQ ID NO: 8098 - protein, 12 aa, Homo sapiens
  ( 333 )...( 344 ): >CALR_HUMAN
LNIVRVLVTKMR

SEQ ID NO: 8099 - protein, 12 aa, Homo sapiens
  ( 434 )...( 445 ): >CALR_HUMAN
GRRPSNRSARAA

SEQ ID NO: 8100 - protein, 12 aa, Homo sapiens
  ( 280 )...( 291 ): >CASR_HUMAN
IKEIVRRNITGK

SEQ ID NO: 8101 - protein, 12 aa, Homo sapiens
  ( 281 )...( 292 ): >CASR_HUMAN
KEIVRRNITGKI

SEQ ID NO: 8102 - protein, 12 aa, Homo sapiens
  ( 283 )...( 294 ): >CASR_HUMAN
IVRRNITGKIWL

SEQ ID NO: 8103 - protein, 12 aa, Homo sapiens
  ( 284 )...( 295 ): >CASR_HUMAN
VRRNITGKIWLA

SEQ ID NO: 8104 - protein, 12 aa, Homo sapiens
  ( 285 )...( 296 ): >CASR_HUMAN
RRNITGKIWLAS

SEQ ID NO: 8105 - protein, 12 aa, Homo sapiens
  ( 633 )...( 644 ): >CASR_HUMAN
VFIKFRNTPIVK

SEQ ID NO: 8106 - protein, 12 aa, Homo sapiens
  ( 634 )...( 645 ): >CASR_HUMAN
FIKFRNTPIVKA

SEQ ID NO: 8107 - protein, 12 aa, Homo sapiens
  ( 635 )...( 646 ): >CASR_HUMAN
IKFRNTPIVKAT

SEQ ID NO: 8108 - protein, 12 aa, Homo sapiens
  ( 636 )...( 647 ): >CASR_HUMAN
KFRNTPIVKATN

SEQ ID NO: 8109 - protein, 12 aa, Homo sapiens
  ( 879 )...( 890 ): >CASR_HUMAN
HAFKVAARATLR

SEQ ID NO: 8110 - protein, 12 aa, Homo sapiens
  ( 880 )...( 891 ): >CASR_HUMAN
AFKVAARATLRR

SEQ ID NO: 8111 - protein, 12 aa, Homo sapiens
  ( 881 )...( 892 ): >CASR_HUMAN
FKVAARATLRRS

SEQ ID NO: 8112 - protein, 12 aa, Homo sapiens
  ( 882 )...( 893 ): >CASR_HUMAN
KVAARATLRRSN

SEQ ID NO: 8113 - protein, 12 aa, Homo sapiens
  ( 883 )...( 894 ): >CASR_HUMAN
VAARATLRRSNV

SEQ ID NO: 8114 - protein, 12 aa, Homo sapiens
  ( 884 )...( 895 ): >CASR_HUMAN
AARATLRRSNVS

SEQ ID NO: 8115 - protein, 12 aa, Homo sapiens
  ( 885 )...( 896 ): >CASR_HUMAN
ARATLRRSNVSR

SEQ ID NO: 8116 - protein, 12 aa, Homo sapiens
  ( 956 )...( 967 ): >CASR_HUMAN
SQQQPRCKQKVI

SEQ ID NO: 8117 - protein, 12 aa, Homo sapiens
  ( 958 )...( 969 ): >CASR_HUMAN
QQPRCKQKVIFG

SEQ ID NO: 8118 - protein, 12 aa, Homo sapiens
  ( 961 )...( 972 ): >CASR_HUMAN
RCKQKVIFGSGT

SEQ ID NO: 8119 - protein, 12 aa, Homo sapiens
  ( 139 )...( 150 ): >CB1R_HUMAN
CVILHSRSLRCR

SEQ ID NO: 8120 - protein, 12 aa, Homo sapiens
  ( 140 )...( 151 ): >CB1R_HUMAN
VILHSRSLRCRP

SEQ ID NO: 8121 - protein, 12 aa, Homo sapiens
  ( 217 )...( 228 ): >CB1R_HUMAN
SIHRPLAYKRIV

SEQ ID NO: 8122 - protein, 12 aa, Homo sapiens
  ( 218 )...( 229 ): >CB1R_HUMAN
IHRPLAYKRIVT

SEQ ID NO: 8123 - protein, 12 aa, Homo sapiens
  ( 221 )...( 232 ): >CB1R_HUMAN
PLAYKRIVTRPK

SEQ ID NO: 8124 - protein, 12 aa, Homo sapiens
  ( 222 )...( 233 ): >CB1R_HUMAN
LAYKRIVTRPKA

SEQ ID NO: 8125 - protein, 12 aa, Homo sapiens
  ( 223 )...( 234 ): >CB1R_HUMAN
AYKRIVTRPKAV

SEQ ID NO: 8126 - protein, 12 aa, Homo sapiens
  ( 224 )...( 235 ): >CB1R_HUMAN
YKRIVTRPKAVV

SEQ ID NO: 8127 - protein, 12 aa, Homo sapiens
  ( 225 )...( 236 ): >CB1R_HUMAN
KRIVTRPKAVVA

SEQ ID NO: 8128 - protein, 12 aa, Homo sapiens
  ( 226 )...( 237 ): >CB1R_HUMAN
RIVTRPKAVVAF

SEQ ID NO: 8129 - protein, 12 aa, Homo sapiens
  ( 300 )...( 311 ): >CB1R_HUMAN
KAHSHAVRMIQR

SEQ ID NO: 8130 - protein, 12 aa, Homo sapiens
  ( 304 )...( 315 ): >CB1R_HUMAN
HAVRMIQRGTQK

SEQ ID NO: 8131 - protein, 12 aa, Homo sapiens
  ( 305 )...( 316 ): >CB1R_HUMAN
AVRMIQRGTQKS

SEQ ID NO: 8132 - protein, 12 aa, Homo sapiens
  ( 306 )...( 317 ): >CB1R_HUMAN
VRMIQRGTQKSI

SEQ ID NO: 8133 - protein, 12 aa, Homo sapiens
  ( 307 )...( 318 ): >CB1R_HUMAN
RMIQRGTQKSII

SEQ ID NO: 8134 - protein, 12 aa, Homo sapiens
  ( 367 )...( 378 ): >CB1R_HUMAN
VFGKMNKLIKTV

SEQ ID NO: 8135 - protein, 12 aa, Homo sapiens
  ( 368 )...( 379 ): >CB1R_HUMAN
FGKMNKLIKTVF

SEQ ID NO: 8136 - protein, 12 aa, Homo sapiens
  ( 369 )...( 380 ): >CB1R_HUMAN
GKMNKLIKTVFA

SEQ ID NO: 8137 - protein, 12 aa, Homo sapiens
  ( 370 )...( 381 ): >CB1R_HUMAN
KMNKLIKTVFAF

SEQ ID NO: 8138 - protein, 12 aa, Homo sapiens
  ( 138 )...( 149 ): >CB2R_HUMAN
PPSYKALLTRGR

SEQ ID NO: 8139 - protein, 12 aa, Homo sapiens
  ( 139 )...( 150 ): >CB2R_HUMAN
PSYKALLTRGRA

SEQ ID NO: 8140 - protein, 12 aa, Homo sapiens
  ( 140 )...( 151 ): >CB2R_HUMAN
SYKALLTRGRAL

SEQ ID NO: 8141 - protein, 12 aa, Homo sapiens
  ( 141 )...( 152 ): >CB2R_HUMAN
YKALLTRGRALV

SEQ ID NO: 8142 - protein, 12 aa, Homo sapiens
  ( 234 )...( 245 ): >CB2R_HUMAN
MARMRLDVRLAK

SEQ ID NO: 8143 - protein, 12 aa, Homo sapiens
  ( 235 )...( 246 ): >CB2R_HUMAN
ARMRLDVRLAKT

SEQ ID NO: 8144 - protein, 12 aa, Homo sapiens
  ( 236 )...( 247 ): >CB2R_HUMAN
RMRLDVRLAKTL

SEQ ID NO: 8145 - protein, 12 aa, Homo sapiens
  ( 314 )...( 325 ): >CB2R_HUMAN
LAHWKKCVRGLG

SEQ ID NO: 8146 - protein, 12 aa, Homo sapiens
  ( 318 )...( 329 ): >CB2R_HUMAN
KKCVRGLGSEAK

SEQ ID NO: 8147 - protein, 12 aa, Homo sapiens
  ( 60 )...( 71 ): >CCKR_HUMAN
TLVITVLIRNKR

SEQ ID NO: 8148 - protein, 12 aa, Homo sapiens
  ( 61 )...( 72 ): >CCKR_HUMAN
LVITVLIRNKRM

SEQ ID NO: 8149 - protein, 12 aa, Homo sapiens
  ( 62 )...( 73 ): >CCKR_HUMAN
VITVLIRNKRMR

SEQ ID NO: 8150 - protein, 12 aa, Homo sapiens
  ( 63 )...( 74 ): >CCKR_HUMAN
ITVLIRNKRMRT

SEQ ID NO: 8151 - protein, 12 aa, Homo sapiens
  ( 64 )...( 75 ): >CCKR_HUMAN
TVLIRNKRMRTV

SEQ ID NO: 8152 - protein, 12 aa, Homo sapiens
  ( 65 )...( 76 ): >CCKR_HUMAN
VLIRNKRMRTVT

SEQ ID NO: 8153 - protein, 12 aa, Homo sapiens
  ( 70 )...( 81 ): >CCKR_HUMAN
KRMRTVTNIFLL

SEQ ID NO: 8154 - protein, 12 aa, Homo sapiens
  ( 150 )...( 161 ): >CCKR_HUMAN
RVWQTKSHALKV

SEQ ID NO: 8155 - protein, 12 aa, Homo sapiens
  ( 247 )...( 258 ): >CCKR_HUMAN
KKSAKERKPSTT

SEQ ID NO: 8156 - protein, 12 aa, Homo sapiens
  ( 286 )...( 297 ): >CCKR_HUMAN
STGSSSRANRIR

SEQ ID NO: 8157 - protein, 12 aa, Homo sapiens
  ( 287 )...( 298 ): >CCKR_HUMAN
TGSSSRANRIRS

SEQ ID NO: 8158 - protein, 12 aa, Homo sapiens
  ( 301 )...( 312 ): >CCKR_HUMAN
SAANLMAKKRVI

SEQ ID NO: 8159 - protein, 12 aa, Homo sapiens
  ( 302 )...( 313 ): >CCKR_HUMAN
AANLMAKKRVIR

SEQ ID NO: 8160 - protein, 12 aa, Homo sapiens
  ( 303 )...( 314 ): >CCKR_HUMAN
ANLMAKKRVIRM

SEQ ID NO: 8161 - protein, 12 aa, Homo sapiens
  ( 304 )...( 315 ): >CCKR_HUMAN
NLMAKKRVIRML

SEQ ID NO: 8162 - protein, 12 aa, Homo sapiens
  ( 305 )...( 316 ): >CCKR_HUMAN
LMAKKRVIRMLI

SEQ ID NO: 8163 - protein, 12 aa, Homo sapiens
  ( 306 )...( 317 ): >CCKR_HUMAN
MAKKRVIRMLIV

SEQ ID NO: 8164 - protein, 12 aa, Homo sapiens
  ( 307 )...( 318 ): >CCKR_HUMAN
AKKRVIRMLIVI

SEQ ID NO: 8165 - protein, 12 aa, Homo sapiens
  ( 156 )...( 167 ): >CCR3_HUMAN
ATQLYRRGPPAR

SEQ ID NO: 8166 - protein, 12 aa, Homo sapiens
  ( 157 )...( 168 ): >CCR3_HUMAN
TQLYRRGPPARV

SEQ ID NO: 8167 - protein, 12 aa, Homo sapiens
  ( 158 )...( 169 ): >CCR3_HUMAN
QLYRRGPPARVT

SEQ ID NO: 8168 - protein, 12 aa, Homo sapiens
  ( 159 )...( 170 ): >CCR3_HUMAN
LYRRGPPARVTL

SEQ ID NO: 8169 - protein, 12 aa, Homo sapiens
  ( 160 )...( 171 ): >CCR3_HUMAN
YRRGPPARVTLT

SEQ ID NO: 8170 - protein, 12 aa, Homo sapiens
  ( 161 )...( 172 ): >CCR3_HUMAN
RRGPPARVTLTC

SEQ ID NO: 8171 - protein, 12 aa, Homo sapiens
  ( 239 )...( 250 ): >CCR3_HUMAN
LAVLLVSRGQRR

SEQ ID NO: 8172 - protein, 12 aa, Homo sapiens
  ( 240 )...( 251 ): >CCR3_HUMAN
AVLLVSRGQRRL

SEQ ID NO: 8173 - protein, 12 aa, Homo sapiens
  ( 335 )...( 346 ): >CCR3_HUMAN
RLGCPNQRGLQR

SEQ ID NO: 8174 - protein, 12 aa, Homo sapiens
  ( 59 )...( 70 ): >CCR4_HUMAN
VILVMGYQKKLR

SEQ ID NO: 8175 - protein, 12 aa, Homo sapiens
  ( 60 )...( 71 ): >CCR4_HUMAN
ILVMGYQKKLRS

SEQ ID NO: 8176 - protein, 12 aa, Homo sapiens
  ( 61 )...( 72 ): >CCR4_HUMAN
LVMGYQKKLRSM

SEQ ID NO: 8177 - protein, 12 aa, Homo sapiens
  ( 62 )...( 73 ): >CCR4_HUMAN
VMGYQKKLRSMT

SEQ ID NO: 8178 - protein, 12 aa, Homo sapiens
  ( 141 )...( 152 ): >CCR4_HUMAN
ATNSQRPRKLLA

SEQ ID NO: 8179 - protein, 12 aa, Homo sapiens
  ( 144 )...( 155 ): >CCR4_HUMAN
SQRPRKLLAEKV

SEQ ID NO: 8180 - protein, 12 aa, Homo sapiens
  ( 145 )...( 156 ): >CCR4_HUMAN
QRPRKLLAEKVV

SEQ ID NO: 8181 - protein, 12 aa, Homo sapiens
  ( 146 )...( 157 ): >CCR4_HUMAN
RPRKLLAEKVVY

SEQ ID NO: 8182 - protein, 12 aa, Homo sapiens
  ( 226 )...( 237 ): >CCR4_HUMAN
LSHSKGHQKRKA

SEQ ID NO: 8183 - protein, 12 aa, Homo sapiens
  ( 227 )...( 238 ): >CCR4_HUMAN
SHSKGHQKRKAL

SEQ ID NO: 8184 - protein, 12 aa, Homo sapiens
  ( 229 )...( 240 ): >CCR4_HUMAN
SKGHQKRKALKT

SEQ ID NO: 8185 - protein, 12 aa, Homo sapiens
  ( 230 )...( 241 ): >CCR4_HUMAN
KGHQKRKALKTT

SEQ ID NO: 8186 - protein, 12 aa, Homo sapiens
  ( 231 )...( 242 ): >CCR4_HUMAN
GHQKRKALKTTV

SEQ ID NO: 8187 - protein, 12 aa, Homo sapiens
  ( 232 )...( 243 ): >CCR4_HUMAN
HQKRKALKTTVI

SEQ ID NO: 8188 - protein, 12 aa, Homo sapiens
  ( 233 )...( 244 ): >CCR4_HUMAN
QKRKALKTTVIL

SEQ ID NO: 8189 - protein, 12 aa, Homo sapiens
  ( 234 )...( 245 ): >CCR4_HUMAN
KRKALKTTVILI

SEQ ID NO: 8190 - protein, 12 aa, Homo sapiens
  ( 322 )...( 333 ): >CCR4_HUMAN
RGSSLKILSKGK

SEQ ID NO: 8191 - protein, 12 aa, Homo sapiens
  ( 323 )...( 334 ): >CCR4_HUMAN
GSSLKILSKGKR

SEQ ID NO: 8192 - protein, 12 aa, Homo sapiens
  ( 324 )...( 335 ): >CCR4_HUMAN
SSLKILSKGKRG

SEQ ID NO: 8193 - protein, 12 aa, Homo sapiens
  ( 326 )...( 337 ): >CCR4_HUMAN
LKILSKGKRGGH

SEQ ID NO: 8194 - protein, 12 aa, Homo sapiens
  ( 327 )...( 338 ): >CCR4_HUMAN
KILSKGKRGGHS

SEQ ID NO: 8195 - protein, 12 aa, Homo sapiens
  ( 239 )...( 250 ): >CCR5_HUMAN
VGVVHRLRQAQR

SEQ ID NO: 8196 - protein, 12 aa, Homo sapiens
  ( 240 )...( 251 ): >CCR5_HUMAN
GVVHRLRQAQRR

SEQ ID NO: 8197 - protein, 12 aa, Homo sapiens
  ( 251 )...( 262 ): >CCR5_HUMAN
RPQRQKAVRVAI

SEQ ID NO: 8198 - protein, 12 aa, Homo sapiens
  ( 252 )...( 263 ): >CCR5_HUMAN
PQRQKAVRVAIL

SEQ ID NO: 8199 - protein, 12 aa, Homo sapiens
  ( 253 )...( 264 ): >CCR5_HUMAN
QRQKAVRVAILV

SEQ ID NO: 8200 - protein, 12 aa, Homo sapiens
  ( 254 )...( 265 ): >CCR5_HUMAN
RQKAVRVAILVT

SEQ ID NO: 8201 - protein, 12 aa, Homo sapiens
  ( 127 )...( 138 ): >CCR6_HUMAN
RFIVVVKATKAY

SEQ ID NO: 8202 - protein, 12 aa, Homo sapiens
  ( 132 )...( 143 ): >CCR6_HUMAN
VKATKAYNQQAK

SEQ ID NO: 8203 - protein, 12 aa, Homo sapiens
  ( 134 )...( 145 ): >CCR6_HUMAN
ATKAYNQQAKRM

SEQ ID NO: 8204 - protein, 12 aa, Homo sapiens
  ( 139 )...( 150 ): >CCR6_HUMAN
NQQAKRMTWGKV

SEQ ID NO: 8205 - protein, 12 aa, Homo sapiens
  ( 140 )...( 151 ): >CCR6_HUMAN
QQAKRMTWGKVT

SEQ ID NO: 8206 - protein, 12 aa, Homo sapiens
  ( 141 )...( 152 ): >CCR6_HUMAN
QAKRMTWGKVTS

SEQ ID NO: 8207 - protein, 12 aa, Homo sapiens
  ( 142 )...( 153 ): >CCR6_HUMAN
AKRMTWGKVTSL

SEQ ID NO: 8208 - protein, 12 aa, Homo sapiens
  ( 143 )...( 154 ): >CCR6_HUMAN
KRMTWGKVTSLL

SEQ ID NO: 8209 - protein, 12 aa, Homo sapiens
  ( 221 )...( 232 ): >CCR6_HUMAN
AGGFQKHRSLKI

SEQ ID NO: 8210 - protein, 12 aa, Homo sapiens
  ( 222 )...( 233 ): >CCR6_HUMAN
GGFQKHRSLKII

SEQ ID NO: 8211 - protein, 12 aa, Homo sapiens
  ( 225 )...( 236 ): >CCR6_HUMAN
QKHRSLKIIFLV

SEQ ID NO: 8212 - protein, 12 aa, Homo sapiens
  ( 337 )...( 348 ): >CD97_HUMAN
IMRILAKSLPKG

SEQ ID NO: 8213 - protein, 12 aa, Homo sapiens
  ( 338 )...( 349 ): >CD97_HUMAN
MRILAKSLPKGP

SEQ ID NO: 8214 - protein, 12 aa, Homo sapiens
  ( 432 )...( 443 ): >CD97_HUMAN
SSIRGVQLRRLS

SEQ ID NO: 8215 - protein, 12 aa, Homo sapiens
  ( 433 )...( 444 ): >CD97_HUMAN
SIRGVQLRRLSA

SEQ ID NO: 8216 - protein, 12 aa, Homo sapiens
  ( 434 )...( 445 ): >CD97_HUMAN
IRGVQLRRLSAV

SEQ ID NO: 8217 - protein, 12 aa, Homo sapiens
  ( 435 )...( 446 ): >CD97_HUMAN
RGVQLRRLSAVN

SEQ ID NO: 8218 - protein, 12 aa, Homo sapiens
  ( 727 )...( 738 ): >CD97_HUMAN
PDMKKLKKARAL

SEQ ID NO: 8219 - protein, 12 aa, Homo sapiens
  ( 728 )...( 739 ): >CD97_HUMAN
DMKKLKKARALT

SEQ ID NO: 8220 - protein, 12 aa, Homo sapiens
  ( 729 )...( 740 ): >CD97_HUMAN
MKKLKKARALTI

SEQ ID NO: 8221 - protein, 12 aa, Homo sapiens
  ( 730 )...( 741 ): >CD97_HUMAN
KKLKKARALTIT

SEQ ID NO: 8222 - protein, 12 aa, Homo sapiens
  ( 731 )...( 742 ): >CD97_HUMAN
KLKKARALTITA

SEQ ID NO: 8223 - protein, 12 aa, Homo sapiens
  ( 732 )...( 743 ): >CD97_HUMAN
LKKARALTITAI

SEQ ID NO: 8224 - protein, 12 aa, Homo sapiens
  ( 311 )...( 322 ): >CGRR_HUMAN
NIVRVLITKLKV

SEQ ID NO: 8225 - protein, 12 aa, Homo sapiens
  ( 154 )...( 165 ): >CKD6_HUMAN
RLRTRAKNLLLA

SEQ ID NO: 8226 - protein, 12 aa, Homo sapiens
  ( 155 )...( 166 ): >CKD6_HUMAN
LRTRAKNLLLAT

SEQ ID NO: 8227 - protein, 12 aa, Homo sapiens
  ( 156 )...( 167 ): >CKD6_HUMAN
RTRAKNLLLATI

SEQ ID NO: 8228 - protein, 12 aa, Homo sapiens
  ( 230 )...( 241 ): >CKD6_HUMAN
YSRIGCVLVRLR

SEQ ID NO: 8229 - protein, 12 aa, Homo sapiens
  ( 231 )...( 242 ): >CKD6_HUMAN
SRIGCVLVRLRP

SEQ ID NO: 8230 - protein, 12 aa, Homo sapiens
  ( 232 )...( 243 ): >CKD6_HUMAN
RIGCVLVRLRPA

SEQ ID NO: 8231 - protein, 12 aa, Homo sapiens
  ( 236 )...( 247 ): >CKD6_HUMAN
VLVRLRPAGQGR

SEQ ID NO: 8232 - protein, 12 aa, Homo sapiens
  ( 237 )...( 248 ): >CKD6_HUMAN
LVRLRPAGQGRA

SEQ ID NO: 8233 - protein, 12 aa, Homo sapiens
  ( 238 )...( 249 ): >CKD6_HUMAN
VRLRPAGQGRAL

SEQ ID NO: 8234 - protein, 12 aa, Homo sapiens
  ( 239 )...( 250 ): >CKD6_HUMAN
RLRPAGQGRALK

SEQ ID NO: 8235 - protein, 12 aa, Homo sapiens
  ( 240 )...( 251 ): >CKD6_HUMAN
LRPAGQGRALKI

SEQ ID NO: 8236 - protein, 12 aa, Homo sapiens
  ( 56 )...( 67 ): >CKR1_HUMAN
VLVLVQYKRLKN

SEQ ID NO: 8237 - protein, 12 aa, Homo sapiens
  ( 57 )...( 68 ): >CKR1_HUMAN
LVLVQYKRLKNM

SEQ ID NO: 8238 - protein, 12 aa, Homo sapiens
  ( 58 )...( 69 ): >CKR1_HUMAN
VLVQYKRLKNMT

SEQ ID NO: 8239 - protein, 12 aa, Homo sapiens
  ( 60 )...( 71 ): >CKR1_HUMAN
VQYKRLKNMTSI

SEQ ID NO: 8240 - protein, 12 aa, Homo sapiens
  ( 63 )...( 74 ): >CKR1_HUMAN
KRLKNMTSIYLL

SEQ ID NO: 8241 - protein, 12 aa, Homo sapiens
  ( 218 )...( 229 ): >CKR1_HUMAN
CYTGIIKILLRR

SEQ ID NO: 8242 - protein, 12 aa, Homo sapiens
  ( 219 )...( 230 ): >CKR1_HUMAN
YTGIIKILLRRP

SEQ ID NO: 8243 - protein, 12 aa, Homo sapiens
  ( 220 )...( 231 ): >CKR1_HUMAN
TGIIKILLRRPN

SEQ ID NO: 8244 - protein, 12 aa, Homo sapiens
  ( 230 )...( 241 ): >CKR1_HUMAN
PNEKKSKAVRLI

SEQ ID NO: 8245 - protein, 12 aa, Homo sapiens
  ( 231 )...( 242 ): >CKR1_HUMAN
NEKKSKAVRLIF

SEQ ID NO: 8246 - protein, 12 aa, Homo sapiens
  ( 232 )...( 243 ): >CKR1_HUMAN
EKKSKAVRLIFV

SEQ ID NO: 8247 - protein, 12 aa, Homo sapiens
  ( 233 )...( 244 ): >CKR1_HUMAN
KKSKAVRLIFVI

SEQ ID NO: 8248 - protein, 12 aa, Homo sapiens
  ( 315 )...( 326 ): >CKR1_HUMAN
LFHRRVAVHLVK

SEQ ID NO: 8249 - protein, 12 aa, Homo sapiens
  ( 318 )...( 329 ): >CKR1_HUMAN
RRVAVHLVKWLP

SEQ ID NO: 8250 - protein, 12 aa, Homo sapiens
  ( 64 )...( 75 ): >CKR2_HUMAN
VLILINCKKLKC

SEQ ID NO: 8251 - protein, 12 aa, Homo sapiens
  ( 66 )...( 77 ): >CKR2_HUMAN
ILINCKKLKCLT

SEQ ID NO: 8252 - protein, 12 aa, Homo sapiens
  ( 222 )...( 233 ): >CKR2_HUMAN
YSGILKTLLRCR

SEQ ID NO: 8253 - protein, 12 aa, Homo sapiens
  ( 223 )...( 234 ): >CKR2_HUMAN
SGILKTLLRCRN

SEQ ID NO: 8254 - protein, 12 aa, Homo sapiens
  ( 225 )...( 236 ): >CKR2_HUMAN
ILKTLLRCRNEK

SEQ ID NO: 8255 - protein, 12 aa, Homo sapiens
  ( 237 )...( 248 ): >CKR2_HUMAN
KRHRAVRVIFTI

SEQ ID NO: 8256 - protein, 12 aa, Homo sapiens
  ( 238 )...( 249 ): >CKR2_HUMAN
RHRAVRVIFTIM

SEQ ID NO: 8257 - protein, 12 aa, Homo sapiens
  ( 335 )...( 346 ): >CKR2_HUMAN
PGVRPGKNVKVT

SEQ ID NO: 8258 - protein, 12 aa, Homo sapiens
  ( 337 )...( 348 ): >CKR2_HUMAN
VRPGKNVKVTTQ

SEQ ID NO: 8259 - protein, 12 aa, Homo sapiens
  ( 338 )...( 349 ): >CKR2_HUMAN
RPGKNVKVTTQG

SEQ ID NO: 8260 - protein, 12 aa, Homo sapiens
  ( 354 )...( 365 ): >CKR2_HUMAN
RGKGKSIGRAPE

SEQ ID NO: 8261 - protein, 12 aa, Homo sapiens
  ( 221 )...( 232 ): >CKR3_HUMAN
GIIKTLLRCPSK

SEQ ID NO: 8262 - protein, 12 aa, Homo sapiens
  ( 222 )...( 233 ): >CKR3_HUMAN
IIKTLLRCPSKK

SEQ ID NO: 8263 - protein, 12 aa, Homo sapiens
  ( 223 )...( 234 ): >CKR3_HUMAN
IKTLLRCPSKKK

SEQ ID NO: 8264 - protein, 12 aa, Homo sapiens
  ( 235 )...( 246 ): >CKR4_HUMAN
EKKNKAVKMIFA

SEQ ID NO: 8265 - protein, 12 aa, Homo sapiens
  ( 236 )...( 247 ): >CKR4_HUMAN
KKNKAVKMIFAV

SEQ ID NO: 8266 - protein, 12 aa, Homo sapiens
  ( 237 )...( 248 ): >CKR4_HUMAN
KNKAVKMIFAVV

SEQ ID NO: 8267 - protein, 12 aa, Homo sapiens
  ( 313 )...( 324 ): >CKR4_HUMAN
KYILQLFKTCRG

SEQ ID NO: 8268 - protein, 12 aa, Homo sapiens
  ( 20 )...( 31 ): >CKR5_HUMAN
CQKINVKQIAAR

SEQ ID NO: 8269 - protein, 12 aa, Homo sapiens
  ( 21 )...( 32 ): >CKR5_HUMAN
QKINVKQIAARL

SEQ ID NO: 8270 - protein, 12 aa, Homo sapiens
  ( 22 )...( 33 ): >CKR5_HUMAN
KINVKQIAARLL

SEQ ID NO: 8271 - protein, 12 aa, Homo sapiens
  ( 52 )...( 63 ): >CKR5_HUMAN
ILILINCKRLKS

SEQ ID NO: 8272 - protein, 12 aa, Homo sapiens
  ( 53 )...( 64 ): >CKR5_HUMAN
LILINCKRLKSM

SEQ ID NO: 8273 - protein, 12 aa, Homo sapiens
  ( 54 )...( 65 ): >CKR5_HUMAN
ILINCKRLKSMT

SEQ ID NO: 8274 - protein, 12 aa, Homo sapiens
  ( 214 )...( 225 ): >CKR5_HUMAN
YSGILKTLLRCR

SEQ ID NO: 8275 - protein, 12 aa, Homo sapiens
  ( 215 )...( 226 ): >CKR5_HUMAN
SGILKTLLRCRN

SEQ ID NO: 8276 - protein, 12 aa, Homo sapiens
  ( 217 )...( 228 ): >CKR5_HUMAN
ILKTLLRCRNEK

SEQ ID NO: 8277 - protein, 12 aa, Homo sapiens
  ( 230 )...( 241 ): >CKR5_HUMAN
RHRAVRLIFTIM

SEQ ID NO: 8278 - protein, 12 aa, Homo sapiens
  ( 67 )...( 78 ): >CKR6_HUMAN
VVITFAFYKKAR

SEQ ID NO: 8279 - protein, 12 aa, Homo sapiens
  ( 68 )...( 79 ): >CKR6_HUMAN
VITFAFYKKARS

SEQ ID NO: 8280 - protein, 12 aa, Homo sapiens
  ( 146 )...( 157 ): >CKR6_HUMAN
AIVQATKSFRLR

SEQ ID NO: 8281 - protein, 12 aa, Homo sapiens
  ( 147 )...( 158 ): >CKR6_HUMAN
IVQATKSFRLRS

SEQ ID NO: 8282 - protein, 12 aa, Homo sapiens
  ( 150 )...( 161 ): >CKR6_HUMAN
ATKSFRLRSRTL

SEQ ID NO: 8283 - protein, 12 aa, Homo sapiens
  ( 156 )...( 167 ): >CKR6_HUMAN
LRSRTLPRSKII

SEQ ID NO: 8284 - protein, 12 aa, Homo sapiens
  ( 157 )...( 168 ): >CKR6_HUMAN
RSRTLPRSKIIC

SEQ ID NO: 8285 - protein, 12 aa, Homo sapiens
  ( 158 )...( 169 ): >CKR6_HUMAN
SRTLPRSKIICL

SEQ ID NO: 8286 - protein, 12 aa, Homo sapiens
  ( 159 )...( 170 ): >CKR6_HUMAN
RTLPRSKIICLV

SEQ ID NO: 8287 - protein, 12 aa, Homo sapiens
  ( 238 )...( 249 ): >CKR6_HUMAN
VKTLVQAQNSKR

SEQ ID NO: 8288 - protein, 12 aa, Homo sapiens
  ( 241 )...( 252 ): >CKR6_HUMAN
LVQAQNSKRHKA

SEQ ID NO: 8289 - protein, 12 aa, Homo sapiens
  ( 242 )...( 253 ): >CKR6_HUMAN
VQAQNSKRHKAI

SEQ ID NO: 8290 - protein, 12 aa, Homo sapiens
  ( 246 )...( 257 ): >CKR6_HUMAN
NSKRHKAIRVII

SEQ ID NO: 8291 - protein, 12 aa, Homo sapiens
  ( 247 )...( 258 ): >CKR6_HUMAN
SKRHKAIRVIIA

SEQ ID NO: 8292 - protein, 12 aa, Homo sapiens
  ( 248 )...( 259 ): >CKR6_HUMAN
KRHKAIRVIIAV

SEQ ID NO: 8293 - protein, 12 aa, Homo sapiens
  ( 249 )...( 260 ): >CKR6_HUMAN
RHKAIRVIIAVV

SEQ ID NO: 8294 - protein, 12 aa, Homo sapiens
  ( 159 )...( 170 ): >CKR7_HUMAN
VQAVSAHRHRAR

SEQ ID NO: 8295 - protein, 12 aa, Homo sapiens
  ( 160 )...( 171 ): >CKR7_HUMAN
QAVSAHRHRARV

SEQ ID NO: 8296 - protein, 12 aa, Homo sapiens
  ( 161 )...( 172 ): >CKR7_HUMAN
AVSAHRHRARVL

SEQ ID NO: 8297 - protein, 12 aa, Homo sapiens
  ( 162 )...( 173 ): >CKR7_HUMAN
VSAHRHRARVLL

SEQ ID NO: 8298 - protein, 12 aa, Homo sapiens
  ( 163 )...( 174 ): >CKR7_HUMAN
SAHRHRARVLLI

SEQ ID NO: 8299 - protein, 12 aa, Homo sapiens
  ( 164 )...( 175 ): >CKR7_HUMAN
AHRHRARVLLIS

SEQ ID NO: 8300 - protein, 12 aa, Homo sapiens
  ( 166 )...( 177 ): >CKR7_HUMAN
RHRARVLLISKL

SEQ ID NO: 8301 - protein, 12 aa, Homo sapiens
  ( 167 )...( 178 ): >CKR7_HUMAN
HRARVLLISKLS

SEQ ID NO: 8302 - protein, 12 aa, Homo sapiens
  ( 168 )...( 179 ): >CKR7_HUMAN
RARVLLISKLSC

SEQ ID NO: 8303 - protein, 12 aa, Homo sapiens
  ( 258 )...( 269 ): >CKR7_HUMAN
RNKAIKVIIAVV

SEQ ID NO: 8304 - protein, 12 aa, Homo sapiens
  ( 59 )...( 70 ): >CKR8_HUMAN
VLVVCKKLRSIT

SEQ ID NO: 8305 - protein, 12 aa, Homo sapiens
  ( 137 )...( 148 ): >CKR8_HUMAN
HAVYALKVRTIR

SEQ ID NO: 8306 - protein, 12 aa, Homo sapiens
  ( 138 )...( 149 ): >CKR8_HUMAN
AVYALKVRTIRM

SEQ ID NO: 8307 - protein, 12 aa, Homo sapiens
  ( 139 )...( 150 ): >CKR8_HUMAN
VYALKVRTIRMG

SEQ ID NO: 8308 - protein, 12 aa, Homo sapiens
  ( 140 )...( 151 ): >CKR8_HUMAN
YALKVRTIRMGT

SEQ ID NO: 8309 - protein, 12 aa, Homo sapiens
  ( 141 )...( 152 ): >CKR8_HUMAN
ALKVRTIRMGTT

SEQ ID NO: 8310 - protein, 12 aa, Homo sapiens
  ( 142 )...( 153 ): >CKR8_HUMAN
LKVRTIRMGTTL

SEQ ID NO: 8311 - protein, 12 aa, Homo sapiens
  ( 143 )...( 154 ): >CKR8_HUMAN
KVRTIRMGTTLC

SEQ ID NO: 8312 - protein, 12 aa, Homo sapiens
  ( 217 )...( 228 ): >CKR8_HUMAN
CYIKILHQLKRC

SEQ ID NO: 8313 - protein, 12 aa, Homo sapiens
  ( 229 )...( 240 ): >CKR8_HUMAN
QNHNKTKAIRLV

SEQ ID NO: 8314 - protein, 12 aa, Homo sapiens
  ( 230 )...( 241 ): >CKR8_HUMAN
NHNKTKAIRLVL

SEQ ID NO: 8315 - protein, 12 aa, Homo sapiens
  ( 231 )...( 242 ): >CKR8_HUMAN
HNKTKAIRLVLI

SEQ ID NO: 8316 - protein, 12 aa, Homo sapiens
  ( 232 )...( 243 ): >CKR8_HUMAN
NKTKAIRLVLIV

SEQ ID NO: 8317 - protein, 12 aa, Homo sapiens
  ( 148 )...( 159 ): >CKR9_HUMAN
KRLLYSKMVCFT

SEQ ID NO: 8318 - protein, 12 aa, Homo sapiens
  ( 229 )...( 240 ): >CKR9_HUMAN
LIQAKKSSKHKA

SEQ ID NO: 8319 - protein, 12 aa, Homo sapiens
  ( 230 )...( 241 ): >CKR9_HUMAN
IQAKKSSKHKAL

SEQ ID NO: 8320 - protein, 12 aa, Homo sapiens
  ( 231 )...( 242 ): >CKR9_HUMAN
QAKKSSKHKALK

SEQ ID NO: 8321 - protein, 12 aa, Homo sapiens
  ( 232 )...( 243 ): >CKR9_HUMAN
AKKSSKHKALKV

SEQ ID NO: 8322 - protein, 12 aa, Homo sapiens
  ( 233 )...( 244 ): >CKR9_HUMAN
KKSSKHKALKVT

SEQ ID NO: 8323 - protein, 12 aa, Homo sapiens
  ( 313 )...( 324 ): >CKR9_HUMAN
RRDLVKTLKNLG

SEQ ID NO: 8324 - protein, 12 aa, Homo sapiens
  ( 63 )...( 74 ): >CKRA_HUMAN
LATHLAARRAAR

SEQ ID NO: 8325 - protein, 12 aa, Homo sapiens
  ( 64 )...( 75 ): >CKRA_HUMAN
ATHLAARRAARS

SEQ ID NO: 8326 - protein, 12 aa, Homo sapiens
  ( 65 )...( 76 ): >CKRA_HUMAN
THLAARRAARSP

SEQ ID NO: 8327 - protein, 12 aa, Homo sapiens
  ( 66 )...( 77 ): >CKRA_HUMAN
HLAARRAARSPT

SEQ ID NO: 8328 - protein, 12 aa, Homo sapiens
  ( 70 )...( 81 ): >CKRA_HUMAN
RRAARSPTSAHL

SEQ ID NO: 8329 - protein, 12 aa, Homo sapiens
  ( 183 )...( 194 ): >CKRA_HUMAN
GQREGQRRCRLI

SEQ ID NO: 8330 - protein, 12 aa, Homo sapiens
  ( 232 )...( 243 ): >CKRA_HUMAN
RTLLAARGPERR

SEQ ID NO: 8331 - protein, 12 aa, Homo sapiens
  ( 233 )...( 244 ): >CKRA_HUMAN
TLLAARGPERRR

SEQ ID NO: 8332 - protein, 12 aa, Homo sapiens
  ( 234 )...( 245 ): >CKRA_HUMAN
LLAARGPERRRA

SEQ ID NO: 8333 - protein, 12 aa, Homo sapiens
  ( 235 )...( 246 ): >CKRA_HUMAN
LAARGPERRRAL

SEQ ID NO: 8334 - protein, 12 aa, Homo sapiens
  ( 239 )...( 250 ): >CKRA_HUMAN
GPERRRALRVVV

SEQ ID NO: 8335 - protein, 12 aa, Homo sapiens
  ( 240 )...( 251 ): >CKRA_HUMAN
PERRRALRVVVA

SEQ ID NO: 8336 - protein, 12 aa, Homo sapiens
  ( 241 )...( 252 ): >CKRA_HUMAN
ERRRALRVVVAL

SEQ ID NO: 8337 - protein, 12 aa, Homo sapiens
  ( 243 )...( 254 ): >CKRA_HUMAN
RRALRVVVALVA

SEQ ID NO: 8338 - protein, 12 aa, Homo sapiens
  ( 318 )...( 329 ): >CKRA_HUMAN
RQDLRRLLRGGS

SEQ ID NO: 8339 - protein, 12 aa, Homo sapiens
  ( 321 )...( 332 ): >CKRA_HUMAN
LRRLLRGGSSPS

SEQ ID NO: 8340 - protein, 12 aa, Homo sapiens
  ( 70 )...( 81 ): >CKRB_HUMAN
KKQRTKTDVYIL

SEQ ID NO: 8341 - protein, 12 aa, Homo sapiens
  ( 223 )...( 234 ): >CKRB_HUMAN
TARTLMKMPNIK

SEQ ID NO: 8342 - protein, 12 aa, Homo sapiens
  ( 224 )...( 235 ): >CKRB_HUMAN
ARTLMKMPNIKI

SEQ ID NO: 8343 - protein, 12 aa, Homo sapiens
  ( 225 )...( 236 ): >CKRB_HUMAN
RTLMKMPNIKIS

SEQ ID NO: 8344 - protein, 12 aa, Homo sapiens
  ( 226 )...( 237 ): >CKRB_HUMAN
TLMKMPNIKISR

SEQ ID NO: 8345 - protein, 12 aa, Homo sapiens
  ( 230 )...( 241 ): >CKRB_HUMAN
MPNIKISRPLKV

SEQ ID NO: 8346 - protein, 12 aa, Homo sapiens
  ( 231 )...( 242 ): >CKRB_HUMAN
PNIKISRPLKVL

SEQ ID NO: 8347 - protein, 12 aa, Homo sapiens
  ( 232 )...( 243 ): >CKRB_HUMAN
NIKISRPLKVLL

SEQ ID NO: 8348 - protein, 12 aa, Homo sapiens
  ( 234 )...( 245 ): >CKRB_HUMAN
KISRPLKVLLTV

SEQ ID NO: 8349 - protein, 12 aa, Homo sapiens
  ( 311 )...( 322 ): >CKRB_HUMAN
KNYVMKVAKKYG

SEQ ID NO: 8350 - protein, 12 aa, Homo sapiens
  ( 314 )...( 325 ): >CKRB_HUMAN
VMKVAKKYGSWR

SEQ ID NO: 8351 - protein, 12 aa, Homo sapiens
  ( 130 )...( 141 ): >CLT1_HUMAN
QNINLVTQKKAR

SEQ ID NO: 8352 - protein, 12 aa, Homo sapiens
  ( 131 )...( 142 ): >CLT1_HUMAN
NINLVTQKKARF

SEQ ID NO: 8353 - protein, 12 aa, Homo sapiens
  ( 132 )...( 143 ): >CLT1_HUMAN
INLVTQKKARFV

SEQ ID NO: 8354 - protein, 12 aa, Homo sapiens
  ( 133 )...( 144 ): >CLT1_HUMAN
NLVTQKKARFVC

SEQ ID NO: 8355 - protein, 12 aa, Homo sapiens
  ( 134 )...( 145 ): >CLT1_HUMAN
LVTQKKARFVCV

SEQ ID NO: 8356 - protein, 12 aa, Homo sapiens
  ( 135 )...( 146 ): >CLT1_HUMAN
VTQKKARFVCVG

SEQ ID NO: 8357 - protein, 12 aa, Homo sapiens
  ( 136 )...( 147 ): >CLT1_HUMAN
TQKKARFVCVGI

SEQ ID NO: 8358 - protein, 12 aa, Homo sapiens
  ( 137 )...( 148 ): >CLT1_HUMAN
QKKARFVCVGIW

SEQ ID NO: 8359 - protein, 12 aa, Homo sapiens
  ( 138 )...( 149 ): >CLT1_HUMAN
KKARFVCVGIWI

SEQ ID NO: 8360 - protein, 12 aa, Homo sapiens
  ( 212 )...( 223 ): >CLT1_HUMAN
IILTLLKKSMKK

SEQ ID NO: 8361 - protein, 12 aa, Homo sapiens
  ( 213 )...( 224 ): >CLT1_HUMAN
ILTLLKKSMKKN

SEQ ID NO: 8362 - protein, 12 aa, Homo sapiens
  ( 214 )...( 225 ): >CLT1_HUMAN
LTLLKKSMKKNL

SEQ ID NO: 8363 - protein, 12 aa, Homo sapiens
  ( 215 )...( 226 ): >CLT1_HUMAN
TLLKKSMKKNLS

SEQ ID NO: 8364 - protein, 12 aa, Homo sapiens
  ( 216 )...( 227 ): >CLT1_HUMAN
LLKKSMKKNLSS

SEQ ID NO: 8365 - protein, 12 aa, Homo sapiens
  ( 221 )...( 232 ): >CLT1_HUMAN
MKKNLSSHKKAI

SEQ ID NO: 8366 - protein, 12 aa, Homo sapiens
  ( 222 )...( 233 ): >CLT1_HUMAN
KKNLSSHKKAIG

SEQ ID NO: 8367 - protein, 12 aa, Homo sapiens
  ( 314 )...( 325 ): >CLT1_HUMAN
LSSVTYVPRKKA

SEQ ID NO: 8368 - protein, 12 aa, Homo sapiens
  ( 316 )...( 327 ): >CLT1_HUMAN
SVTYVPRKKASL

SEQ ID NO: 8369 - protein, 12 aa, Homo sapiens
  ( 317 )...( 328 ): >CLT1_HUMAN
VTYVPRKKASLP

SEQ ID NO: 8370 - protein, 12 aa, Homo sapiens
  ( 320 )...( 331 ): >CLT1_HUMAN
VPRKKASLPEKG

SEQ ID NO: 8371 - protein, 12 aa, Homo sapiens
  ( 236 )...( 247 ): >CLT2_HUMAN
SGLRVSHRKALT

SEQ ID NO: 8372 - protein, 12 aa, Homo sapiens
  ( 237 )...( 248 ): >CLT2_HUMAN
GLRVSHRKALTT

SEQ ID NO: 8373 - protein, 12 aa, Homo sapiens
  ( 238 )...( 249 ): >CLT2_HUMAN
LRVSHRKALTTI

SEQ ID NO: 8374 - protein, 12 aa, Homo sapiens
  ( 239 )...( 250 ): >CLT2_HUMAN
RVSHRKALTTII

SEQ ID NO: 8375 - protein, 12 aa, Homo sapiens
  ( 275 )...( 286 ): >CLT2_HUMAN
KVGLCKDRLHKA

SEQ ID NO: 8376 - protein, 12 aa, Homo sapiens
  ( 314 )...( 325 ): >CLT2_HUMAN
DRLKSALRKGHP

SEQ ID NO: 8377 - protein, 12 aa, Homo sapiens
  ( 315 )...( 326 ): >CLT2_HUMAN
RLKSALRKGHPQ

SEQ ID NO: 8378 - protein, 12 aa, Homo sapiens
  ( 316 )...( 327 ): >CLT2_HUMAN
LKSALRKGHPQK

SEQ ID NO: 8379 - protein, 12 aa, Homo sapiens
  ( 317 )...( 328 ): >CLT2_HUMAN
KSALRKGHPQKA

SEQ ID NO: 8380 - protein, 12 aa, Homo sapiens
  ( 318 )...( 329 ): >CLT2_HUMAN
SALRKGHPQKAK

SEQ ID NO: 8381 - protein, 12 aa, Homo sapiens
  ( 319 )...( 330 ): >CLT2_HUMAN
ALRKGHPQKAKT

SEQ ID NO: 8382 - protein, 12 aa, Homo sapiens
  ( 320 )...( 331 ): >CLT2_HUMAN
LRKGHPQKAKTK

SEQ ID NO: 8383 - protein, 12 aa, Homo sapiens
  ( 321 )...( 332 ): >CLT2_HUMAN
RKGHPQKAKTKC

SEQ ID NO: 8384 - protein, 12 aa, Homo sapiens
  ( 322 )...( 333 ): >CLT2_HUMAN
KGHPQKAKTKCV

SEQ ID NO: 8385 - protein, 12 aa, Homo sapiens
  ( 240 )...( 251 ): >CML1_HUMAN
YLTIVCKLQRNR

SEQ ID NO: 8386 - protein, 12 aa, Homo sapiens
  ( 241 )...( 252 ): >CML1_HUMAN
LTIVCKLQRNRL

SEQ ID NO: 8387 - protein, 12 aa, Homo sapiens
  ( 242 )...( 253 ): >CML1_HUMAN
TIVCKLQRNRLA

SEQ ID NO: 8388 - protein, 12 aa, Homo sapiens
  ( 243 )...( 254 ): >CML1_HUMAN
IVCKLQRNRLAK

SEQ ID NO: 8389 - protein, 12 aa, Homo sapiens
  ( 244 )...( 255 ): >CML1_HUMAN
VCKLQRNRLAKT

SEQ ID NO: 8390 - protein, 12 aa, Homo sapiens
  ( 251 )...( 262 ): >CML1_HUMAN
RLAKTKKPFKII

SEQ ID NO: 8391 - protein, 12 aa, Homo sapiens
  ( 252 )...( 263 ): >CML1_HUMAN
LAKTKKPFKIIV

SEQ ID NO: 8392 - protein, 12 aa, Homo sapiens
  ( 253 )...( 264 ): >CML1_HUMAN
AKTKKPFKIIVT

SEQ ID NO: 8393 - protein, 12 aa, Homo sapiens
  ( 254 )...( 265 ): >CML1_HUMAN
KTKKPFKIIVTI

SEQ ID NO: 8394 - protein, 12 aa, Homo sapiens
  ( 324 )...( 335 ): >CML1_HUMAN
KKFKVALFSRLV

SEQ ID NO: 8395 - protein, 12 aa, Homo sapiens
  ( 325 )...( 336 ): >CML1_HUMAN
KFKVALFSRLVN

SEQ ID NO: 8396 - protein, 12 aa, Homo sapiens
  ( 159 )...( 170 ): >CML2_HUMAN
LARAMRCSLFRT

SEQ ID NO: 8397 - protein, 12 aa, Homo sapiens
  ( 160 )...( 171 ): >CML2_HUMAN
ARAMRCSLFRTK

SEQ ID NO: 8398 - protein, 12 aa, Homo sapiens
  ( 235 )...( 246 ): >CML2_HUMAN
SLIVRVLVRAHR

SEQ ID NO: 8399 - protein, 12 aa, Homo sapiens
  ( 236 )...( 247 ): >CML2_HUMAN
LIVRVLVRAHRH

SEQ ID NO: 8400 - protein, 12 aa, Homo sapiens
  ( 238 )...( 249 ): >CML2_HUMAN
VRVLVRAHRHRG

SEQ ID NO: 8401 - protein, 12 aa, Homo sapiens
  ( 239 )...( 250 ): >CML2_HUMAN
RVLVRAHRHRGL

SEQ ID NO: 8402 - protein, 12 aa, Homo sapiens
  ( 240 )...( 251 ): >CML2_HUMAN
VLVRAHRHRGLR

SEQ ID NO: 8403 - protein, 12 aa, Homo sapiens
  ( 252 )...( 263 ): >CML2_HUMAN
PRRQKALRMILA

SEQ ID NO: 8404 - protein, 12 aa, Homo sapiens
  ( 253 )...( 264 ): >CML2_HUMAN
RRQKALRMILAV

SEQ ID NO: 8405 - protein, 12 aa, Homo sapiens
  ( 254 )...( 265 ): >CML2_HUMAN
RQKALRMILAVV

SEQ ID NO: 8406 - protein, 12 aa, Homo sapiens
  ( 166 )...( 177 ): >CRF1_HUMAN
SGAPFQVRRSIR

SEQ ID NO: 8407 - protein, 12 aa, Homo sapiens
  ( 168 )...( 179 ): >CRF1_HUMAN
APFQVRRSIRCL

SEQ ID NO: 8408 - protein, 12 aa, Homo sapiens
  ( 317 )...( 328 ): >CRF1_HUMAN
FNIVRILMTKLR

SEQ ID NO: 8409 - protein, 12 aa, Homo sapiens
  ( 318 )...( 329 ): >CRF1_HUMAN
NIVRILMTKLRA

SEQ ID NO: 8410 - protein, 12 aa, Homo sapiens
  ( 319 )...( 330 ): >CRF1_HUMAN
IVRILMTKLRAS

SEQ ID NO: 8411 - protein, 12 aa, Homo sapiens
  ( 320 )...( 331 ): >CRF1_HUMAN
VRILMTKLRAST

SEQ ID NO: 8412 - protein, 12 aa, Homo sapiens
  ( 321 )...( 332 ): >CRF1_HUMAN
RILMTKLRASTT

SEQ ID NO: 8413 - protein, 12 aa, Homo sapiens
  ( 335 )...( 346 ): >CRF1_HUMAN
TIQYRKAVKATL

SEQ ID NO: 8414 - protein, 12 aa, Homo sapiens
  ( 336 )...( 347 ): >CRF1_HUMAN
IQYRKAVKATLV

SEQ ID NO: 8415 - protein, 12 aa, Homo sapiens
  ( 337 )...( 348 ): >CRF1_HUMAN
QYRKAVKATLVL

SEQ ID NO: 8416 - protein, 12 aa, Homo sapiens
  ( 338 )...( 349 ): >CRF1_HUMAN
YRKAVKATLVLL

SEQ ID NO: 8417 - protein, 12 aa, Homo sapiens
  ( 339 )...( 350 ): >CRF1_HUMAN
RKAVKATLVLLP

SEQ ID NO: 8418 - protein, 12 aa, Homo sapiens
  ( 412 )...( 423 ): >CRF1_HUMAN
DKHSIRARVARA

SEQ ID NO: 8419 - protein, 12 aa, Homo sapiens
  ( 413 )...( 424 ): >CRF1_HUMAN
KHSIRARVARAM

SEQ ID NO: 8420 - protein, 12 aa, Homo sapiens
  ( 414 )...( 425 ): >CRF1_HUMAN
HSIRARVARAMS

SEQ ID NO: 8421 - protein, 12 aa, Homo sapiens
  ( 415 )...( 426 ): >CRF1_HUMAN
SIRARVARAMSI

SEQ ID NO: 8422 - protein, 12 aa, Homo sapiens
  ( 416 )...( 427 ): >CRF1_HUMAN
IRARVARAMSIP

SEQ ID NO: 8423 - protein, 12 aa, Homo sapiens
  ( 417 )...( 428 ): >CRF1_HUMAN
RARVARAMSIPT

SEQ ID NO: 8424 - protein, 12 aa, Homo sapiens
  ( 137 )...( 148 ): >CRF2_HUMAN
LFLALRSIRCLR

SEQ ID NO: 8425 - protein, 12 aa, Homo sapiens
  ( 139 )...( 150 ): >CRF2_HUMAN
LALRSIRCLRNV

SEQ ID NO: 8426 - protein, 12 aa, Homo sapiens
  ( 140 )...( 151 ): >CRF2_HUMAN
ALRSIRCLRNVI

SEQ ID NO: 8427 - protein, 12 aa, Homo sapiens
  ( 141 )...( 152 ): >CRF2_HUMAN
LRSIRCLRNVIH

SEQ ID NO: 8428 - protein, 12 aa, Homo sapiens
  ( 284 )...( 295 ): >CRF2_HUMAN
FNIVRILMTKLR

SEQ ID NO: 8429 - protein, 12 aa, Homo sapiens
  ( 285 )...( 296 ): >CRF2_HUMAN
NIVRILMTKLRA

SEQ ID NO: 8430 - protein, 12 aa, Homo sapiens
  ( 286 )...( 297 ): >CRF2_HUMAN
IVRILMTKLRAS

SEQ ID NO: 8431 - protein, 12 aa, Homo sapiens
  ( 287 )...( 298 ): >CRF2_HUMAN
VRILMTKLRAST

SEQ ID NO: 8432 - protein, 12 aa, Homo sapiens
  ( 288 )...( 299 ): >CRF2_HUMAN
RILMTKLRASTT

SEQ ID NO: 8433 - protein, 12 aa, Homo sapiens
  ( 302 )...( 313 ): >CRF2_HUMAN
TIQYRKAVKATL

SEQ ID NO: 8434 - protein, 12 aa, Homo sapiens
  ( 303 )...( 314 ): >CRF2_HUMAN
IQYRKAVKATLV

SEQ ID NO: 8435 - protein, 12 aa, Homo sapiens
  ( 304 )...( 315 ): >CRF2_HUMAN
QYRKAVKATLVL

SEQ ID NO: 8436 - protein, 12 aa, Homo sapiens
  ( 305 )...( 316 ): >CRF2_HUMAN
YRKAVKATLVLL

SEQ ID NO: 8437 - protein, 12 aa, Homo sapiens
  ( 306 )...( 317 ): >CRF2_HUMAN
RKAVKATLVLLP

SEQ ID NO: 8438 - protein, 12 aa, Homo sapiens
  ( 362 )...( 373 ): >CRF2_HUMAN
FNGEVRSAVRKR

SEQ ID NO: 8439 - protein, 12 aa, Homo sapiens
  ( 135 )...( 146 ): >CXC1_HUMAN
LSTLRVPTLRCR

SEQ ID NO: 8440 - protein, 12 aa, Homo sapiens
  ( 136 )...( 147 ): >CXC1_HUMAN
STLRVPTLRCRV

SEQ ID NO: 8441 - protein, 12 aa, Homo sapiens
  ( 137 )...( 148 ): >CXC1_HUMAN
TLRVPTLRCRVL

SEQ ID NO: 8442 - protein, 12 aa, Homo sapiens
  ( 138 )...( 149 ): >CXC1_HUMAN
LRVPTLRCRVLV

SEQ ID NO: 8443 - protein, 12 aa, Homo sapiens
  ( 139 )...( 150 ): >CXC1_HUMAN
RVPTLRCRVLVT

SEQ ID NO: 8444 - protein, 12 aa, Homo sapiens
  ( 220 )...( 231 ): >CXC1_HUMAN
RHRTVKLIFAIV

SEQ ID NO: 8445 - protein, 12 aa, Homo sapiens
  ( 288 )...( 299 ): >CXC1_HUMAN
VFVGVKFRTHLK

SEQ ID NO: 8446 - protein, 12 aa, Homo sapiens
  ( 144 )...( 155 ): >D2DR_HUMAN
TRYSSKRRVTVM

SEQ ID NO: 8447 - protein, 12 aa, Homo sapiens
  ( 145 )...( 156 ): >D2DR_HUMAN
RYSSKRRVTVMI

SEQ ID NO: 8448 - protein, 12 aa, Homo sapiens
  ( 146 )...( 157 ): >D2DR_HUMAN
YSSKRRVTVMIS

SEQ ID NO: 8449 - protein, 12 aa, Homo sapiens
  ( 147 )...( 158 ): >D2DR_HUMAN
SSKRRVTVMISI

SEQ ID NO: 8450 - protein, 12 aa, Homo sapiens
  ( 148 )...( 159 ): >D2DR_HUMAN
SKRRVTVMISIV

SEQ ID NO: 8451 - protein, 12 aa, Homo sapiens
  ( 149 )...( 160 ): >D2DR_HUMAN
KRRVTVMISIVW

SEQ ID NO: 8452 - protein, 12 aa, Homo sapiens
  ( 231 )...( 242 ): >D2DR_HUMAN
AFRAHLRAPLKG

SEQ ID NO: 8453 - protein, 12 aa, Homo sapiens
  ( 349 )...( 360 ): >D2DR_HUMAN
GKTRTSLKTMSR

SEQ ID NO: 8454 - protein, 12 aa, Homo sapiens
  ( 350 )...( 361 ): >D2DR_HUMAN
KTRTSLKTMSRR

SEQ ID NO: 8455 - protein, 12 aa, Homo sapiens
  ( 351 )...( 362 ): >D2DR_HUMAN
TRTSLKTMSRRK

SEQ ID NO: 8456 - protein, 12 aa, Homo sapiens
  ( 352 )...( 363 ): >D2DR_HUMAN
RTSLKTMSRRKL

SEQ ID NO: 8457 - protein, 12 aa, Homo sapiens
  ( 353 )...( 364 ): >D2DR_HUMAN
TSLKTMSRRKLS

SEQ ID NO: 8458 - protein, 12 aa, Homo sapiens
  ( 354 )...( 365 ): >D2DR_HUMAN
SLKTMSRRKLSQ

SEQ ID NO: 8459 - protein, 10 aa, Homo sapiens
  ( 434 )...( 445 ): >D2DR_HUMAN
RKAFLKILHC

SEQ ID NO: 8460 - protein, 12 aa, Homo sapiens
  ( 298 )...( 309 ): >D3DR_HUMAN
VRKLSNGRLSTS

SEQ ID NO: 8461 - protein, 12 aa, Homo sapiens
  ( 299 )...( 310 ): >D3DR_HUMAN
RKLSNGRLSTSL

SEQ ID NO: 8462 - protein, 12 aa, Homo sapiens
  ( 315 )...( 326 ): >D3DR_HUMAN
LQPRGVPLREKK

SEQ ID NO: 8463 - protein, 12 aa, Homo sapiens
  ( 316 )...( 327 ): >D3DR_HUMAN
QPRGVPLREKKA

SEQ ID NO: 8464 - protein, 12 aa, Homo sapiens
  ( 317 )...( 328 ): >D3DR_HUMAN
PRGVPLREKKAT

SEQ ID NO: 8465 - protein, 12 aa, Homo sapiens
  ( 318 )...( 329 ): >D3DR_HUMAN
RGVPLREKKATQ

SEQ ID NO: 8466 - protein, 10 aa, Homo sapiens
  ( 391 )...( 402 ): >D3DR_HUMAN
RKAFLKILSC

SEQ ID NO: 8467 - protein, 12 aa, Homo sapiens
  ( 139 )...( 150 ): >D4DR_HUMAN
VPLRYNRQGGSR

SEQ ID NO: 8468 - protein, 12 aa, Homo sapiens
  ( 144 )...( 155 ): >D4DR_HUMAN
NRQGGSRRQLLL

SEQ ID NO: 8469 - protein, 12 aa, Homo sapiens
  ( 145 )...( 156 ): >D4DR_HUMAN
RQGGSRRQLLLI

SEQ ID NO: 8470 - protein, 12 aa, Homo sapiens
  ( 223 )...( 234 ): >D4DR_HUMAN
EVARRAKLHGRA

SEQ ID NO: 8471 - protein, 12 aa, Homo sapiens
  ( 224 )...( 235 ): >D4DR_HUMAN
VARRAKLHGRAP

SEQ ID NO: 8472 - protein, 12 aa, Homo sapiens
  ( 228 )...( 239 ): >D4DR_HUMAN
AKLHGRAPRRPS

SEQ ID NO: 8473 - protein, 12 aa, Homo sapiens
  ( 229 )...( 240 ): >D4DR_HUMAN
KLHGRAPRRPSG

SEQ ID NO: 8474 - protein, 12 aa, Homo sapiens
  ( 382 )...( 393 ): >D4DR_HUMAN
RAKITGRERKAM

SEQ ID NO: 8475 - protein, 12 aa, Homo sapiens
  ( 383 )...( 394 ): >D4DR_HUMAN
AKITGRERKAMR

SEQ ID NO: 8476 - protein, 12 aa, Homo sapiens
  ( 384 )...( 395 ): >D4DR_HUMAN
KITGRERKAMRV

SEQ ID NO: 8477 - protein, 12 aa, Homo sapiens
  ( 385 )...( 396 ): >D4DR_HUMAN
ITGRERKAMRVL

SEQ ID NO: 8478 - protein, 12 aa, Homo sapiens
  ( 386 )...( 397 ): >D4DR_HUMAN
TGRERKAMRVLP

SEQ ID NO: 8479 - protein, 12 aa, Homo sapiens
  ( 387 )...( 398 ): >D4DR_HUMAN
GRERKAMRVLPV

SEQ ID NO: 8480 - protein, 12 aa, Homo sapiens
  ( 388 )...( 399 ): >D4DR_HUMAN
RERKAMRVLPVV

SEQ ID NO: 8481 - protein, 12 aa, Homo sapiens
  ( 390 )...( 401 ): >D4DR_HUMAN
RKAMRVLPVVVG

SEQ ID NO: 8482 - protein, 12 aa, Homo sapiens
  ( 44 )...( 55 ): >DADR_HUMAN
VCAAVIRFRHLR

SEQ ID NO: 8483 - protein, 12 aa, Homo sapiens
  ( 45 )...( 56 ): >DADR_HUMAN
CAAVIRFRHLRS

SEQ ID NO: 8484 - protein, 12 aa, Homo sapiens
  ( 133 )...( 144 ): >DADR_HUMAN
RKMTPKAAFILI

SEQ ID NO: 8485 - protein, 12 aa, Homo sapiens
  ( 219 )...( 230 ): >DADR_HUMAN
RIAQKQIRRIAA

SEQ ID NO: 8486 - protein, 12 aa, Homo sapiens
  ( 220 )...( 231 ): >DADR_HUMAN
IAQKQIRRIAAL

SEQ ID NO: 8487 - protein, 12 aa, Homo sapiens
  ( 223 )...( 234 ): >DADR_HUMAN
KQIRRIAALERA

SEQ ID NO: 8488 - protein, 12 aa, Homo sapiens
  ( 61 )...( 72 ): >DBDR_HUMAN
VCAAIVRSRHLR

SEQ ID NO: 8489 - protein, 12 aa, Homo sapiens
  ( 62 )...( 73 ): >DBDR_HUMAN
CAAIVRSRHLRA

SEQ ID NO: 8490 - protein, 12 aa, Homo sapiens
  ( 63 )...( 74 ): >DBDR_HUMAN
AAIVRSRHLRAN

SEQ ID NO: 8491 - protein, 12 aa, Homo sapiens
  ( 64 )...( 75 ): >DBDR_HUMAN
AIVRSRHLRANM

SEQ ID NO: 8492 - protein, 12 aa, Homo sapiens
  ( 65 )...( 76 ): >DBDR_HUMAN
IVRSRHLRANMT

SEQ ID NO: 8493 - protein, 12 aa, Homo sapiens
  ( 149 )...( 160 ): >DBDR_HUMAN
KRKMTQRMALVM

SEQ ID NO: 8494 - protein, 12 aa, Homo sapiens
  ( 150 )...( 161 ): >DBDR_HUMAN
RKMTQRMALVMV

SEQ ID NO: 8495 - protein, 12 aa, Homo sapiens
  ( 249 )...( 260 ): >DBDR_HUMAN
YRIAQVQIRRIS

SEQ ID NO: 8496 - protein, 12 aa, Homo sapiens
  ( 250 )...( 261 ): >DBDR_HUMAN
RIAQVQIRRISS

SEQ ID NO: 8497 - protein, 12 aa, Homo sapiens
  ( 284 )...( 295 ): >DBDR_HUMAN
LRASIKKETKVL

SEQ ID NO: 8498 - protein, 12 aa, Homo sapiens
  ( 285 )...( 296 ): >DBDR_HUMAN
RASIKKETKVLK

SEQ ID NO: 8499 - protein, 12 aa, Homo sapiens
  ( 51 )...( 62 ): >EBI2_HUMAN
LALVVIVQNRKK

SEQ ID NO: 8500 - protein, 12 aa, Homo sapiens
  ( 52 )...( 63 ): >EBI2_HUMAN
ALVVIVQNRKKI

SEQ ID NO: 8501 - protein, 12 aa, Homo sapiens
  ( 53 )...( 64 ): >EBI2_HUMAN
LVVIVQNRKKIN

SEQ ID NO: 8502 - protein, 12 aa, Homo sapiens
  ( 54 )...( 65 ): >EBI2_HUMAN
VVIVQNRKKINS

SEQ ID NO: 8503 - protein, 12 aa, Homo sapiens
  ( 55 )...( 66 ): >EBI2_HUMAN
VIVQNRKKINST

SEQ ID NO: 8504 - protein, 12 aa, Homo sapiens
  ( 56 )...( 67 ): >EBI2_HUMAN
IVQNRKKINSTT

SEQ ID NO: 8505 - protein, 12 aa, Homo sapiens
  ( 57 )...( 68 ): >EBI2_HUMAN
VQNRKKINSTTL

SEQ ID NO: 8506 - protein, 12 aa, Homo sapiens
  ( 132 )...( 143 ): >EBI2_HUMAN
AVVHPLRYNKIK

SEQ ID NO: 8507 - protein, 12 aa, Homo sapiens
  ( 140 )...( 151 ): >EBI2_HUMAN
NKIKRIEHAKGV

SEQ ID NO: 8508 - protein, 12 aa, Homo sapiens
  ( 141 )...( 152 ): >EBI2_HUMAN
KIKRIEHAKGVC

SEQ ID NO: 8509 - protein, 12 aa, Homo sapiens
  ( 222 )...( 233 ): >EBI2_HUMAN
KLFRTAKQNPLT

SEQ ID NO: 8510 - protein, 12 aa, Homo sapiens
  ( 262 )...( 273 ): >EBI2_HUMAN
VAIIQHMIKKLR

SEQ ID NO: 8511 - protein, 12 aa, Homo sapiens
  ( 263 )...( 274 ): >EBI2_HUMAN
AIIQHMIKKLRF

SEQ ID NO: 8512 - protein, 12 aa, Homo sapiens
  ( 318 )...( 329 ): >EBI2_HUMAN
KVMRMLKRQVSV

SEQ ID NO: 8513 - protein, 12 aa, Homo sapiens
  ( 319 )...( 330 ): >EBI2_HUMAN
VMRMLKRQVSVS

SEQ ID NO: 8514 - protein, 12 aa, Homo sapiens
  ( 320 )...( 331 ): >EBI2_HUMAN
MRMLKRQVSVSI

SEQ ID NO: 8515 - protein, 12 aa, Homo sapiens
  ( 321 )...( 332 ): >EBI2_HUMAN
RMLKRQVSVSIS

SEQ ID NO: 8516 - protein, 12 aa, Homo sapiens
  ( 330 )...( 341 ): >EBP2_HUMAN
LVTWRVRGPPGR

SEQ ID NO: 8517 - protein, 12 aa, Homo sapiens
  ( 331 )...( 342 ): >EBP2_HUMAN
VTWRVRGPPGRK

SEQ ID NO: 8518 - protein, 12 aa, Homo sapiens
  ( 332 )...( 343 ): >EBP2_HUMAN
TWRVRGPPGRKS

SEQ ID NO: 8519 - protein, 12 aa, Homo sapiens
  ( 336 )...( 347 ): >EDG1_HUMAN
AGKFKRPIIAGM

SEQ ID NO: 8520 - protein, 12 aa, Homo sapiens
  ( 113 )...( 124 ): >EDG2_HUMAN
TRRLTVSTWLLR

SEQ ID NO: 8521 - protein, 12 aa, Homo sapiens
  ( 155 )...( 166 ): >EDG2_HUMAN
LHTRMSNRRVVV

SEQ ID NO: 8522 - protein, 12 aa, Homo sapiens
  ( 156 )...( 167 ): >EDG2_HUMAN
HTRMSNRRVVVV

SEQ ID NO: 8523 - protein, 12 aa, Homo sapiens
  ( 157 )...( 168 ): >EDG2_HUMAN
TRMSNRRVVVVI

SEQ ID NO: 8524 - protein, 12 aa, Homo sapiens
  ( 158 )...( 169 ): >EDG2_HUMAN
RMSNRRVVVVIV

SEQ ID NO: 8525 - protein, 12 aa, Homo sapiens
  ( 22 )...( 33 ): >EDG3_HUMAN
YQYVGKLAGRLK

SEQ ID NO: 8526 - protein, 12 aa, Homo sapiens
  ( 91 )...( 102 ): >EDG3_HUMAN
AYKVNILMSGKK

SEQ ID NO: 8527 - protein, 12 aa, Homo sapiens
  ( 148 )...( 159 ): >EDG3_HUMAN
ANKRHRVFLLIG

SEQ ID NO: 8528 - protein, 12 aa, Homo sapiens
  ( 150 )...( 161 ): >EDG3_HUMAN
KRHRVFLLIGMC

SEQ ID NO: 8529 - protein, 12 aa, Homo sapiens
  ( 216 )...( 227 ): >EDG3_HUMAN
ARIYFLVKSSSR

SEQ ID NO: 8530 - protein, 12 aa, Homo sapiens
  ( 218 )...( 229 ): >EDG3_HUMAN
IYFLVKSSSRKV

SEQ ID NO: 8531 - protein, 12 aa, Homo sapiens
  ( 219 )...( 230 ): >EDG3_HUMAN
YFLVKSSSRKVA

SEQ ID NO: 8532 - protein, 12 aa, Homo sapiens
  ( 220 )...( 231 ): >EDG3_HUMAN
FLVKSSSRKVAN

SEQ ID NO: 8533 - protein, 12 aa, Homo sapiens
  ( 310 )...( 321 ): >EDG3_HUMAN
FRLVCNCLVRGR

SEQ ID NO: 8534 - protein, 12 aa, Homo sapiens
  ( 311 )...( 322 ): >EDG3_HUMAN
RLVCNCLVRGRG

SEQ ID NO: 8535 - protein, 12 aa, Homo sapiens
  ( 317 )...( 328 ): >EDG3_HUMAN
LVRGRGARASPI

SEQ ID NO: 8536 - protein, 12 aa, Homo sapiens
  ( 318 )...( 329 ): >EDG3_HUMAN
VRGRGARASPIQ

SEQ ID NO: 8537 - protein, 12 aa, Homo sapiens
  ( 319 )...( 330 ): >EDG3_HUMAN
RGRGARASPIQP

SEQ ID NO: 8538 - protein, 12 aa, Homo sapiens
  ( 507 )...( 518 ): >EMR1_HUMAN
IKLKMNSRVVGG

SEQ ID NO: 8539 - protein, 12 aa, Homo sapiens
  ( 508 )...( 519 ): >EMR1_HUMAN
KLKMNSRVVGGI

SEQ ID NO: 8540 - protein, 12 aa, Homo sapiens
  ( 856 )...( 867 ): >EMR1_HUMAN
KRWITGKTKPSS

SEQ ID NO: 8541 - protein, 12 aa, Homo sapiens
  ( 857 )...( 868 ): >EMR1_HUMAN
RWITGKTKPSSQ

SEQ ID NO: 8542 - protein, 12 aa, Homo sapiens
  ( 282 )...( 293 ): >ET1R_HUMAN
MLNRRNGSLRIA

SEQ ID NO: 8543 - protein, 12 aa, Homo sapiens
  ( 283 )...( 294 ): >ET1R_HUMAN
LNRRNGSLRIAL

SEQ ID NO: 8544 - protein, 12 aa, Homo sapiens
  ( 284 )...( 295 ): >ET1R_HUMAN
NRRNGSLRIALS

SEQ ID NO: 8545 - protein, 12 aa, Homo sapiens
  ( 297 )...( 308 ): >ET1R_HUMAN
HLKQRREVAKTV

SEQ ID NO: 8546 - protein, 12 aa, Homo sapiens
  ( 298 )...( 309 ): >ET1R_HUMAN
LKQRREVAKTVF

SEQ ID NO: 8547 - protein, 12 aa, Homo sapiens
  ( 299 )...( 310 ): >ET1R_HUMAN
KQRREVAKTVFC

SEQ ID NO: 8548 - protein, 12 aa, Homo sapiens
  ( 120 )...( 131 ): >ETBR_HUMAN
STLLRIIYKNKC

SEQ ID NO: 8549 - protein, 12 aa, Homo sapiens
  ( 121 )...( 132 ): >ETBR_HUMAN
TLLRIIYKNKCM

SEQ ID NO: 8550 - protein, 12 aa, Homo sapiens
  ( 200 )...( 211 ): >ETBR_HUMAN
YRAVASWSRIKG

SEQ ID NO: 8551 - protein, 12 aa, Homo sapiens
  ( 201 )...( 212 ): >ETBR_HUMAN
RAVASWSRIKGI

SEQ ID NO: 8552 - protein, 12 aa, Homo sapiens
  ( 205 )...( 216 ): >ETBR_HUMAN
SWSRIKGIGVPK

SEQ ID NO: 8553 - protein, 12 aa, Homo sapiens
  ( 206 )...( 217 ): >ETBR_HUMAN
WSRIKGIGVPKW

SEQ ID NO: 8554 - protein, 12 aa, Homo sapiens
  ( 207 )...( 218 ): >ETBR_HUMAN
SRIKGIGVPKWT

SEQ ID NO: 8555 - protein, 12 aa, Homo sapiens
  ( 208 )...( 219 ): >ETBR_HUMAN
RIKGIGVPKWTA

SEQ ID NO: 8556 - protein, 12 aa, Homo sapiens
  ( 300 )...( 311 ): >ETBR_HUMAN
MLRKKSGMQIAL

SEQ ID NO: 8557 - protein, 12 aa, Homo sapiens
  ( 301 )...( 312 ): >ETBR_HUMAN
LRKKSGMQIALN

SEQ ID NO: 8558 - protein, 12 aa, Homo sapiens
  ( 314 )...( 325 ): >ETBR_HUMAN
HLKQRREVAKTV

SEQ ID NO: 8559 - protein, 12 aa, Homo sapiens
  ( 315 )...( 326 ): >ETBR_HUMAN
LKQRREVAKTVF

SEQ ID NO: 8560 - protein, 12 aa, Homo sapiens
  ( 316 )...( 327 ): >ETBR_HUMAN
KQRREVAKTVFC

SEQ ID NO: 8561 - protein, 12 aa, Homo sapiens
  ( 383 )...( 394 ): >ETBR_HUMAN
PIALYLVSKRFK

SEQ ID NO: 8562 - protein, 12 aa, Homo sapiens
  ( 384 )...( 395 ): >ETBR_HUMAN
IALYLVSKRFKN

SEQ ID NO: 8563 - protein, 12 aa, Homo sapiens
  ( 190 )...( 201 ): >FML1_HUMAN
RLKVAITMLTAR

SEQ ID NO: 8564 - protein, 12 aa, Homo sapiens
  ( 224 )...( 235 ): >FML1_HUMAN
IAAKIHKKGMIK

SEQ ID NO: 8565 - protein, 12 aa, Homo sapiens
  ( 225 )...( 236 ): >FML1_HUMAN
AAKIHKKGMIKS

SEQ ID NO: 8566 - protein, 12 aa, Homo sapiens
  ( 226 )...( 237 ): >FML1_HUMAN
AKIHKKGMIKSS

SEQ ID NO: 8567 - protein, 12 aa, Homo sapiens
  ( 227 )...( 238 ): >FML1_HUMAN
KIHKKGMIKSSR

SEQ ID NO: 8568 - protein, 12 aa, Homo sapiens
  ( 228 )...( 239 ): >FML1_HUMAN
IHKKGMIKSSRP

SEQ ID NO: 8569 - protein, 12 aa, Homo sapiens
  ( 229 )...( 240 ): >FML1_HUMAN
HKKGMIKSSRPL

SEQ ID NO: 8570 - protein, 12 aa, Homo sapiens
  ( 230 )...( 241 ): >FML1_HUMAN
KKGMIKSSRPLR

SEQ ID NO: 8571 - protein, 12 aa, Homo sapiens
  ( 231 )...( 242 ): >FML1_HUMAN
KGMIKSSRPLRV

SEQ ID NO: 8572 - protein, 12 aa, Homo sapiens
  ( 232 )...( 243 ): >FML1_HUMAN
GMIKSSRPLRVL

SEQ ID NO: 8573 - protein, 12 aa, Homo sapiens
  ( 233 )...( 244 ): >FML1_HUMAN
MIKSSRPLRVLT

SEQ ID NO: 8574 - protein, 12 aa, Homo sapiens
  ( 234 )...( 245 ): >FML1_HUMAN
IKSSRPLRVLTA

SEQ ID NO: 8575 - protein, 12 aa, Homo sapiens
  ( 235 )...( 246 ): >FML1_HUMAN
KSSRPLRVLTAV

SEQ ID NO: 8576 - protein, 12 aa, Homo sapiens
  ( 135 )...( 146 ): >FML2_HUMAN
NHRTMSLAKRVM

SEQ ID NO: 8577 - protein, 12 aa, Homo sapiens
  ( 136 )...( 147 ): >FML2_HUMAN
HRTMSLAKRVMT

SEQ ID NO: 8578 - protein, 12 aa, Homo sapiens
  ( 137 )...( 148 ): >FML2_HUMAN
RTMSLAKRVMTG

SEQ ID NO: 8579 - protein, 12 aa, Homo sapiens
  ( 233 )...( 244 ): >FML2_HUMAN
MIKSSRPLRVFA

SEQ ID NO: 8580 - protein, 12 aa, Homo sapiens
  ( 234 )...( 245 ): >FML2_HUMAN
IKSSRPLRVFAA

SEQ ID NO: 8581 - protein, 12 aa, Homo sapiens
  ( 235 )...( 246 ): >FML2_HUMAN
KSSRPLRVFAAV

SEQ ID NO: 8582 - protein, 12 aa, Homo sapiens
  ( 227 )...( 238 ): >FMLR_HUMAN
KIHKQGLIKSSR

SEQ ID NO: 8583 - protein, 12 aa, Homo sapiens
  ( 230 )...( 241 ): >FMLR_HUMAN
KQGLIKSSRPLR

SEQ ID NO: 8584 - protein, 12 aa, Homo sapiens
  ( 231 )...( 242 ): >FMLR_HUMAN
QGLIKSSRPLRV

SEQ ID NO: 8585 - protein, 12 aa, Homo sapiens
  ( 232 )...( 243 ): >FMLR_HUMAN
GLIKSSRPLRVL

SEQ ID NO: 8586 - protein, 12 aa, Homo sapiens
  ( 233 )...( 244 ): >FMLR_HUMAN
LIKSSRPLRVLS

SEQ ID NO: 8587 - protein, 12 aa, Homo sapiens
  ( 234 )...( 245 ): >FMLR_HUMAN
IKSSRPLRVLSF

SEQ ID NO: 8588 - protein, 12 aa, Homo sapiens
  ( 235 )...( 246 ): >FMLR_HUMAN
KSSRPLRVLSFV

SEQ ID NO: 8589 - protein, 12 aa, Homo sapiens
  ( 52 )...( 63 ): >FSHR_HUMAN
RFVLTKLRVIQK

SEQ ID NO: 8590 - protein, 12 aa, Homo sapiens
  ( 53 )...( 64 ): >FSHR_HUMAN
FVLTKLRVIQKG

SEQ ID NO: 8591 - protein, 12 aa, Homo sapiens
  ( 55 )...( 66 ): >FSHR_HUMAN
LTKLRVIQKGAF

SEQ ID NO: 8592 - protein, 12 aa, Homo sapiens
  ( 56 )...( 67 ): >FSHR_HUMAN
TKLRVIQKGAFS

SEQ ID NO: 8593 - protein, 12 aa, Homo sapiens
  ( 57 )...( 68 ): >FSHR_HUMAN
KLRVIQKGAFSG

SEQ ID NO: 8594 - protein, 12 aa, Homo sapiens
  ( 237 )...( 248 ): >FSHR_HUMAN
GLENLKKLRARS

SEQ ID NO: 8595 - protein, 12 aa, Homo sapiens
  ( 238 )...( 249 ): >FSHR_HUMAN
LENLKKLRARST

SEQ ID NO: 8596 - protein, 12 aa, Homo sapiens
  ( 246 )...( 257 ): >FSHR_HUMAN
ARSTYNLKKLPT

SEQ ID NO: 8597 - protein, 12 aa, Homo sapiens
  ( 247 )...( 258 ): >FSHR_HUMAN
RSTYNLKKLPTL

SEQ ID NO: 8598 - protein, 12 aa, Homo sapiens
  ( 568 )...( 579 ): >FSHR_HUMAN
TRIAKRMAMLIF

SEQ ID NO: 8599 - protein, 12 aa, Homo sapiens
  ( 569 )...( 580 ): >FSHR_HUMAN
RIAKRMAMLIFT

SEQ ID NO: 8600 - protein, 12 aa, Homo sapiens
  ( 418 )...( 429 ): >FZ10_HUMAN
VALFHIRRVMKT

SEQ ID NO: 8601 - protein, 12 aa, Homo sapiens
  ( 419 )...( 430 ): >FZ10_HUMAN
ALFHIRRVMKTG

SEQ ID NO: 8602 - protein, 12 aa, Homo sapiens
  ( 420 )...( 431 ): >FZ10_HUMAN
LFHIRRVMKTGG

SEQ ID NO: 8603 - protein, 12 aa, Homo sapiens
  ( 541 )...( 552 ): >FZ10_HUMAN
KKSRRKPASVIT

SEQ ID NO: 8604 - protein, 12 aa, Homo sapiens
  ( 542 )...( 553 ): >FZ10_HUMAN
KSRRKPASVITS

SEQ ID NO: 8605 - protein, 12 aa, Homo sapiens
  ( 543 )...( 554 ): >FZ10_HUMAN
SRRKPASVITSG

SEQ ID NO: 8606 - protein, 12 aa, Homo sapiens
  ( 38 )...( 49 ): >FZD1_HUMAN
AGGRRRPPVDPR

SEQ ID NO: 8607 - protein, 12 aa, Homo sapiens
  ( 512 )...( 523 ): >FZD1_HUMAN
VSLFRIRTIMKH

SEQ ID NO: 8608 - protein, 12 aa, Homo sapiens
  ( 516 )...( 527 ): >FZD1_HUMAN
RIRTIMKHDGTK

SEQ ID NO: 8609 - protein, 12 aa, Homo sapiens
  ( 633 )...( 644 ): >FZD1_HUMAN
KFYTRLTNSKQG

SEQ ID NO: 8610 - protein, 12 aa, Homo sapiens
  ( 1 )...( 12 ): >FZD2_HUMAN
MRPRSALPRLLL

SEQ ID NO: 8611 - protein, 12 aa, Homo sapiens
  ( 2 )...( 13 ): >FZD2_HUMAN
RPRSALPRLLLP

SEQ ID NO: 8612 - protein, 12 aa, Homo sapiens
  ( 203 )...( 214 ): >FZD2_HUMAN
RVLKVPSYLSYK

SEQ ID NO: 8613 - protein, 12 aa, Homo sapiens
  ( 436 )...( 447 ): >FZD2_HUMAN
VSLFRIRTIMKH

SEQ ID NO: 8614 - protein, 12 aa, Homo sapiens
  ( 440 )...( 451 ): >FZD2_HUMAN
RIRTIMKHDGTK

SEQ ID NO: 8615 - protein, 12 aa, Homo sapiens
  ( 93 )...( 104 ): >FZD3_HUMAN
GRVTLPCRRLCQ

SEQ ID NO: 8616 - protein, 12 aa, Homo sapiens
  ( 95 )...( 106 ): >FZD3_HUMAN
VTLPCRRLCQRA

SEQ ID NO: 8617 - protein, 12 aa, Homo sapiens
  ( 540 )...( 551 ): >FZD3_HUMAN
PNTPIIRKSRGT

SEQ ID NO: 8618 - protein, 12 aa, Homo sapiens
  ( 541 )...( 552 ): >FZD3_HUMAN
NTPIIRKSRGTS

SEQ ID NO: 8619 - protein, 12 aa, Homo sapiens
  ( 542 )...( 553 ): >FZD3_HUMAN
TPIIRKSRGTST

SEQ ID NO: 8620 - protein, 12 aa, Homo sapiens
  ( 543 )...( 554 ): >FZD3_HUMAN
PIIRKSRGTSTQ

SEQ ID NO: 8621 - protein, 12 aa, Homo sapiens
  ( 544 )...( 555 ): >FZD3_HUMAN
IIRKSRGTSTQG

SEQ ID NO: 8622 - protein, 12 aa, Homo sapiens
  ( 545 )...( 556 ): >FZD3_HUMAN
IRKSRGTSTQGT

SEQ ID NO: 8623 - protein, 12 aa, Homo sapiens
  ( 122 )...( 133 ): >FZD4_HUMAN
LSVKRRCEPVLK

SEQ ID NO: 8624 - protein, 12 aa, Homo sapiens
  ( 192 )...( 203 ): >FZD4_HUMAN
IWVKRSLNCVLK

SEQ ID NO: 8625 - protein, 12 aa, Homo sapiens
  ( 411 )...( 422 ): >FZD4_HUMAN
VALFKIRSNLQK

SEQ ID NO: 8626 - protein, 12 aa, Homo sapiens
  ( 415 )...( 426 ): >FZD4_HUMAN
KIRSNLQKDGTK

SEQ ID NO: 8627 - protein, 12 aa, Homo sapiens
  ( 508 )...( 519 ): >FZD4_HUMAN
SNRLVNSGKVKR

SEQ ID NO: 8628 - protein, 12 aa, Homo sapiens
  ( 509 )...( 520 ): >FZD4_HUMAN
NRLVNSGKVKRE

SEQ ID NO: 8629 - protein, 12 aa, Homo sapiens
  ( 510 )...( 521 ): >FZD4_HUMAN
RLVNSGKVKREK

SEQ ID NO: 8630 - protein, 12 aa, Homo sapiens
  ( 511 )...( 522 ): >FZD4_HUMAN
LVNSGKVKREKR

SEQ ID NO: 8631 - protein, 12 aa, Homo sapiens
  ( 512 )...( 523 ): >FZD4_HUMAN
VNSGKVKREKRG

SEQ ID NO: 8632 - protein, 12 aa, Homo sapiens
  ( 515 )...( 526 ): >FZD4_HUMAN
GKVKREKRGNGW

SEQ ID NO: 8633 - protein, 12 aa, Homo sapiens
  ( 519 )...( 530 ): >FZD4_HUMAN
REKRGNGWVKPG

SEQ ID NO: 8634 - protein, 12 aa, Homo sapiens
  ( 520 )...( 531 ): >FZD4_HUMAN
EKRGNGWVKPGK

SEQ ID NO: 8635 - protein, 12 aa, Homo sapiens
  ( 521 )...( 532 ): >FZD4_HUMAN
KRGNGWVKPGKG

SEQ ID NO: 8636 - protein, 12 aa, Homo sapiens
  ( 423 )...( 434 ): >FZD5_HUMAN
FVSLFRIRSVIK

SEQ ID NO: 8637 - protein, 12 aa, Homo sapiens
  ( 424 )...( 435 ): >FZD5_HUMAN
VSLFRIRSVIKQ

SEQ ID NO: 8638 - protein, 12 aa, Homo sapiens
  ( 425 )...( 436 ): >FZD5_HUMAN
SLFRIRSVIKQG

SEQ ID NO: 8639 - protein, 12 aa, Homo sapiens
  ( 426 )...( 437 ): >FZD5_HUMAN
LFRIRSVIKQGG

SEQ ID NO: 8640 - protein, 12 aa, Homo sapiens
  ( 427 )...( 438 ): >FZD5_HUMAN
FRIRSVIKQGGT

SEQ ID NO: 8641 - protein, 12 aa, Homo sapiens
  ( 428 )...( 439 ): >FZD5_HUMAN
RIRSVIKQGGTK

SEQ ID NO: 8642 - protein, 12 aa, Homo sapiens
  ( 540 )...( 551 ): >FZD5_HUMAN
RPRRGHKSGGAM

SEQ ID NO: 8643 - protein, 12 aa, Homo sapiens
  ( 407 )...( 418 ): >FZD6_HUMAN
QEKLKKFMIRIG

SEQ ID NO: 8644 - protein, 12 aa, Homo sapiens
  ( 408 )...( 419 ): >FZD6_HUMAN
EKLKKFMIRIGV

SEQ ID NO: 8645 - protein, 12 aa, Homo sapiens
  ( 411 )...( 422 ): >FZD6_HUMAN
KKFMIRIGVFSG

SEQ ID NO: 8646 - protein, 12 aa, Homo sapiens
  ( 449 )...( 460 ): >FZD7_HUMAN
RIRTIMKHDGTK

SEQ ID NO: 8647 - protein, 12 aa, Homo sapiens
  ( 504 )...( 515 ): >FZD8_HUMAN
FVSLFRIRSVIK

SEQ ID NO: 8648 - protein, 12 aa, Homo sapiens
  ( 505 )...( 516 ): >FZD8_HUMAN
VSLFRIRSVIKQ

SEQ ID NO: 8649 - protein, 12 aa, Homo sapiens
  ( 506 )...( 517 ): >FZD8_HUMAN
SLFRIRSVIKQQ

SEQ ID NO: 8650 - protein, 12 aa, Homo sapiens
  ( 422 )...( 433 ): >FZD9_HUMAN
VALFHIRKIMKT

SEQ ID NO: 8651 - protein, 12 aa, Homo sapiens
  ( 423 )...( 434 ): >FZD9_HUMAN
ALFHIRKIMKTG

SEQ ID NO: 8652 - protein, 12 aa, Homo sapiens
  ( 424 )...( 435 ): >FZD9_HUMAN
LFHIRKIMKTGG

SEQ ID NO: 8653 - protein, 12 aa, Homo sapiens
  ( 427 )...( 438 ): >FZD9_HUMAN
IRKIMKTGGTNT

SEQ ID NO: 8654 - protein, 12 aa, Homo sapiens
  ( 538 )...( 549 ): >FZD9_HUMAN
QSLCYRKIAAGR

SEQ ID NO: 8655 - protein, 12 aa, Homo sapiens
  ( 540 )...( 551 ): >FZD9_HUMAN
LCYRKIAAGRAR

SEQ ID NO: 8656 - protein, 12 aa, Homo sapiens
  ( 541 )...( 552 ): >FZD9_HUMAN
CYRKIAAGRARA

SEQ ID NO: 8657 - protein, 12 aa, Homo sapiens
  ( 55 )...( 66 ): >GALR_HUMAN
ITVLARSKPGKP

SEQ ID NO: 8658 - protein, 12 aa, Homo sapiens
  ( 56 )...( 67 ): >GALR_HUMAN
TVLARSKPGKPR

SEQ ID NO: 8659 - protein, 12 aa, Homo sapiens
  ( 57 )...( 68 ): >GALR_HUMAN
VLARSKPGKPRS

SEQ ID NO: 8660 - protein, 12 aa, Homo sapiens
  ( 58 )...( 69 ): >GALR_HUMAN
LARSKPGKPRST

SEQ ID NO: 8661 - protein, 12 aa, Homo sapiens
  ( 59 )...( 70 ): >GALR_HUMAN
ARSKPGKPRSTT

SEQ ID NO: 8662 - protein, 12 aa, Homo sapiens
  ( 60 )...( 71 ): >GALR_HUMAN
RSKPGKPRSTTN

SEQ ID NO: 8663 - protein, 12 aa, Homo sapiens
  ( 133 )...( 144 ): >GALR_HUMAN
RYVAIVHSRRSS

SEQ ID NO: 8664 - protein, 12 aa, Homo sapiens
  ( 136 )...( 147 ): >GALR_HUMAN
AIVHSRRSSSLR

SEQ ID NO: 8665 - protein, 12 aa, Homo sapiens
  ( 137 )...( 148 ): >GALR_HUMAN
IVHSRRSSSLRV

SEQ ID NO: 8666 - protein, 12 aa, Homo sapiens
  ( 138 )...( 149 ): >GALR_HUMAN
VHSRRSSSLRVS

SEQ ID NO: 8667 - protein, 12 aa, Homo sapiens
  ( 142 )...( 153 ): >GALR_HUMAN
RSSSLRVSRNAL

SEQ ID NO: 8668 - protein, 12 aa, Homo sapiens
  ( 195 )...( 206 ): >GALR_HUMAN
RHKKAYVVCTFV

SEQ ID NO: 8669 - protein, 12 aa, Homo sapiens
  ( 236 )...( 247 ): >GALR_HUMAN
KKSEASKKKTAQ

SEQ ID NO: 8670 - protein, 12 aa, Homo sapiens
  ( 230 )...( 241 ): >GALS_HUMAN
AKRKVTRMILIV

SEQ ID NO: 8671 - protein, 12 aa, Homo sapiens
  ( 231 )...( 242 ): >GALS_HUMAN
KRKVTRMILIVA

SEQ ID NO: 8672 - protein, 12 aa, Homo sapiens
  ( 232 )...( 243 ): >GALS_HUMAN
RKVTRMILIVAA

SEQ ID NO: 8673 - protein, 12 aa, Homo sapiens
  ( 290 )...( 301 ): >GALS_HUMAN
IVYALVSKHFRK

SEQ ID NO: 8674 - protein, 12 aa, Homo sapiens
  ( 291 )...( 302 ): >GALS_HUMAN
VYALVSKHFRKG

SEQ ID NO: 8675 - protein, 12 aa, Homo sapiens
  ( 299 )...( 310 ): >GALS_HUMAN
FRKGFRTICAGL

SEQ ID NO: 8676 - protein, 12 aa, Homo sapiens
  ( 300 )...( 311 ): >GALS_HUMAN
RKGFRTICAGLL

SEQ ID NO: 8677 - protein, 12 aa, Homo sapiens
  ( 122 )...( 133 ): >GALT_HUMAN
LAVRHPLRSRAL

SEQ ID NO: 8678 - protein, 12 aa, Homo sapiens
  ( 132 )...( 143 ): >GALT_HUMAN
ALRTPRNARAAV

SEQ ID NO: 8679 - protein, 12 aa, Homo sapiens
  ( 133 )...( 144 ): >GALT_HUMAN
LRTPRNARAAVG

SEQ ID NO: 8680 - protein, 12 aa, Homo sapiens
  ( 134 )...( 145 ): >GALT_HUMAN
RTPRNARAAVGL

SEQ ID NO: 8681 - protein, 12 aa, Homo sapiens
  ( 221 )...( 232 ): >GALT_HUMAN
AAAEARRRATGR

SEQ ID NO: 8682 - protein, 12 aa, Homo sapiens
  ( 222 )...( 233 ): >GALT_HUMAN
AAEARRRATGRA

SEQ ID NO: 8683 - protein, 12 aa, Homo sapiens
  ( 223 )...( 234 ): >GALT_HUMAN
AEARRRATGRAG

SEQ ID NO: 8684 - protein, 12 aa, Homo sapiens
  ( 318 )...( 329 ): >GALT_HUMAN
RALRRVRPASSG

SEQ ID NO: 8685 - protein, 12 aa, Homo sapiens
  ( 75 )...( 86 ): >GASR_HUMAN
IIVVLGLSRRLR

SEQ ID NO: 8686 - protein, 12 aa, Homo sapiens
  ( 76 )...( 87 ): >GASR_HUMAN
IVVLGLSRRLRT

SEQ ID NO: 8687 - protein, 12 aa, Homo sapiens
  ( 77 )...( 88 ): >GASR_HUMAN
VVLGLSRRLRTV

SEQ ID NO: 8688 - protein, 12 aa, Homo sapiens
  ( 78 )...( 89 ): >GASR_HUMAN
VLGLSRRLRTVT

SEQ ID NO: 8689 - protein, 12 aa, Homo sapiens
  ( 79 )...( 90 ): >GASR_HUMAN
LGLSRRLRTVTN

SEQ ID NO: 8690 - protein, 12 aa, Homo sapiens
  ( 80 )...( 91 ): >GASR_HUMAN
GLSRRLRTVTNA

SEQ ID NO: 8691 - protein, 12 aa, Homo sapiens
  ( 81 )...( 92 ): >GASR_HUMAN
LSRRLRTVTNAF

SEQ ID NO: 8692 - protein, 12 aa, Homo sapiens
  ( 82 )...( 93 ): >GASR_HUMAN
SRRLRTVTNAFL

SEQ ID NO: 8693 - protein, 12 aa, Homo sapiens
  ( 83 )...( 94 ): >GASR_HUMAN
RRLRTVTNAFLL

SEQ ID NO: 8694 - protein, 12 aa, Homo sapiens
  ( 317 )...( 328 ): >GASR_HUMAN
GSRPTQAKLLAK

SEQ ID NO: 8695 - protein, 12 aa, Homo sapiens
  ( 318 )...( 329 ): >GASR_HUMAN
SRPTQAKLLAKK

SEQ ID NO: 8696 - protein, 12 aa, Homo sapiens
  ( 319 )...( 330 ): >GASR_HUMAN
RPTQAKLLAKKR

SEQ ID NO: 8697 - protein, 12 aa, Homo sapiens
  ( 320 )...( 331 ): >GASR_HUMAN
PTQAKLLAKKRV

SEQ ID NO: 8698 - protein, 12 aa, Homo sapiens
  ( 321 )...( 332 ): >GASR_HUMAN
TQAKLLAKKRVV

SEQ ID NO: 8699 - protein, 12 aa, Homo sapiens
  ( 326 )...( 337 ): >GASR_HUMAN
LAKKRVVRMLLV

SEQ ID NO: 8700 - protein, 12 aa, Homo sapiens
  ( 327 )...( 338 ): >GASR_HUMAN
AKKRVVRMLLVI

SEQ ID NO: 8701 - protein, 12 aa, Homo sapiens
  ( 42 )...( 53 ): >GBR1_HUMAN
RYRGLTRDQVKA

SEQ ID NO: 8702 - protein, 12 aa, Homo sapiens
  ( 71 )...( 82 ): >GBR1_HUMAN
REVVGPKVRKCL

SEQ ID NO: 8703 - protein, 12 aa, Homo sapiens
  ( 73 )...( 84 ): >GBR1_HUMAN
VVGPKVRKCLAN

SEQ ID NO: 8704 - protein, 12 aa, Homo sapiens
  ( 303 )...( 314 ): >GBR1_HUMAN
KWGWKKIATIQQ

SEQ ID NO: 8705 - protein, 12 aa, Homo sapiens
  ( 579 )...( 590 ): >GBR1_HUMAN
LVIKTFRFLSQK

SEQ ID NO: 8706 - protein, 12 aa, Homo sapiens
  ( 580 )...( 591 ): >GBR1_HUMAN
VIKTFRFLSQKL

SEQ ID NO: 8707 - protein, 12 aa, Homo sapiens
  ( 853 )...( 864 ): >GBR1_HUMAN
FVPKMRRLITRG

SEQ ID NO: 8708 - protein, 12 aa, Homo sapiens
  ( 854 )...( 865 ): >GBR1_HUMAN
VPKMRRLITRGE

SEQ ID NO: 8709 - protein, 12 aa, Homo sapiens
  ( 238 )...( 249 ): >GBR2_HUMAN
TSVKKLKGNDVR

SEQ ID NO: 8710 - protein, 12 aa, Homo sapiens
  ( 239 )...( 250 ): >GBR2_HUMAN
SVKKLKGNDVRI

SEQ ID NO: 8711 - protein, 12 aa, Homo sapiens
  ( 240 )...( 251 ): >GBR2_HUMAN
VKKLKGNDVRII

SEQ ID NO: 8712 - protein, 12 aa, Homo sapiens
  ( 241 )...( 252 ): >GBR2_HUMAN
KKLKGNDVRIIL

SEQ ID NO: 8713 - protein, 12 aa, Homo sapiens
  ( 578 )...( 589 ): >GBR2_HUMAN
VHAIFKNVKMKK

SEQ ID NO: 8714 - protein, 12 aa, Homo sapiens
  ( 580 )...( 591 ): >GBR2_HUMAN
AIFKNVKMKKKI

SEQ ID NO: 8715 - protein, 12 aa, Homo sapiens
  ( 581 )...( 592 ): >GBR2_HUMAN
IFKNVKMKKKII

SEQ ID NO: 8716 - protein, 12 aa, Homo sapiens
  ( 587 )...( 598 ): >GBR2_HUMAN
MKKKIIKDQKLL

SEQ ID NO: 8717 - protein, 12 aa, Homo sapiens
  ( 588 )...( 599 ): >GBR2_HUMAN
KKKIIKDQKLLV

SEQ ID NO: 8718 - protein, 12 aa, Homo sapiens
  ( 589 )...( 600 ): >GBR2_HUMAN
KKIIKDQKLLVI

SEQ ID NO: 8719 - protein, 12 aa, Homo sapiens
  ( 146 )...( 157 ): >GHSR_HUMAN
CFPLRAKVVVTK

SEQ ID NO: 8720 - protein, 12 aa, Homo sapiens
  ( 147 )...( 158 ): >GHSR_HUMAN
FPLRAKVVVTKG

SEQ ID NO: 8721 - protein, 12 aa, Homo sapiens
  ( 148 )...( 159 ): >GHSR_HUMAN
PLRAKVVVTKGR

SEQ ID NO: 8722 - protein, 12 aa, Homo sapiens
  ( 150 )...( 161 ): >GHSR_HUMAN
RAKVVVTKGRVK

SEQ ID NO: 8723 - protein, 12 aa, Homo sapiens
  ( 239 )...( 250 ): >GHSR_HUMAN
LWRRRRGDAVVG

SEQ ID NO: 8724 - protein, 12 aa, Homo sapiens
  ( 240 )...( 251 ): >GHSR_HUMAN
WRRRRGDAVVGA

SEQ ID NO: 8725 - protein, 12 aa, Homo sapiens
  ( 241 )...( 252 ): >GHSR_HUMAN
RRRRGDAVVGAS

SEQ ID NO: 8726 - protein, 12 aa, Homo sapiens
  ( 324 )...( 335 ): >GHSR_HUMAN
NIMSKKYRVAVF

SEQ ID NO: 8727 - protein, 12 aa, Homo sapiens
  ( 327 )...( 338 ): >GHSR_HUMAN
SKKYRVAVFRLL

SEQ ID NO: 8728 - protein, 12 aa, Homo sapiens
  ( 328 )...( 339 ): >GHSR_HUMAN
KKYRVAVFRLLG

SEQ ID NO: 8729 - protein, 12 aa, Homo sapiens
  ( 329 )...( 340 ): >GHSR_HUMAN
KYRVAVFRLLGF

SEQ ID NO: 8730 - protein, 12 aa, Homo sapiens
  ( 316 )...( 327 ): >GIPR_HUMAN
RILGILLSKLRT

SEQ ID NO: 8731 - protein, 12 aa, Homo sapiens
  ( 317 )...( 328 ): >GIPR_HUMAN
ILGILLSKLRTR

SEQ ID NO: 8732 - protein, 12 aa, Homo sapiens
  ( 318 )...( 329 ): >GIPR_HUMAN
LGILLSKLRTRQ

SEQ ID NO: 8733 - protein, 12 aa, Homo sapiens
  ( 319 )...( 330 ): >GIPR_HUMAN
GILLSKLRTRQM

SEQ ID NO: 8734 - protein, 12 aa, Homo sapiens
  ( 320 )...( 331 ): >GIPR_HUMAN
ILLSKLRTRQMR

SEQ ID NO: 8735 - protein, 12 aa, Homo sapiens
  ( 321 )...( 332 ): >GIPR_HUMAN
LLSKLRTRQMRC

SEQ ID NO: 8736 - protein, 12 aa, Homo sapiens
  ( 335 )...( 346 ): >GIPR_HUMAN
YRLRLARSTLTL

SEQ ID NO: 8737 - protein, 12 aa, Homo sapiens
  ( 336 )...( 347 ): >GIPR_HUMAN
RLRLARSTLTLV

SEQ ID NO: 8738 - protein, 12 aa, Homo sapiens
  ( 364 )...( 375 ): >GIPR_HUMAN
QARGALRFAKLG

SEQ ID NO: 8739 - protein, 12 aa, Homo sapiens
  ( 365 )...( 376 ): >GIPR_HUMAN
ARGALRFAKLGF

SEQ ID NO: 8740 - protein, 12 aa, Homo sapiens
  ( 345 )...( 356 ): >GLP1_HUMAN
IKCRLAKSTLTL

SEQ ID NO: 8741 - protein, 12 aa, Homo sapiens
  ( 346 )...( 357 ): >GLP1_HUMAN
KCRLAKSTLTLI

SEQ ID NO: 8742 - protein, 12 aa, Homo sapiens
  ( 374 )...( 385 ): >GLP1_HUMAN
HARGTLRFIKLF

SEQ ID NO: 8743 - protein, 12 aa, Homo sapiens
  ( 375 )...( 386 ): >GLP1_HUMAN
ARGTLRFIKLFT

SEQ ID NO: 8744 - protein, 12 aa, Homo sapiens
  ( 199 )...( 210 ): >GLP2_HUMAN
LLLFLRKLHCTR

SEQ ID NO: 8745 - protein, 12 aa, Homo sapiens
  ( 379 )...( 390 ): >GLP2_HUMAN
YKYRLAKSTLVL

SEQ ID NO: 8746 - protein, 12 aa, Homo sapiens
  ( 380 )...( 391 ): >GLP2_HUMAN
KYRLAKSTLVLI

SEQ ID NO: 8747 - protein, 12 aa, Homo sapiens
  ( 452 )...( 463 ): >GLP2_HUMAN
VRFLLARHSGCR

SEQ ID NO: 8748 - protein, 12 aa, Homo sapiens
  ( 489 )...( 500 ): >GLP2_HUMAN
KLRKLQPSLNSG

SEQ ID NO: 8749 - protein, 12 aa, Homo sapiens
  ( 490 )...( 501 ): >GLP2_HUMAN
LRKLQPSLNSGR

SEQ ID NO: 8750 - protein, 12 aa, Homo sapiens
  ( 491 )...( 502 ): >GLP2_HUMAN
RKLQPSLNSGRL

SEQ ID NO: 8751 - protein, 12 aa, Homo sapiens
  ( 196 )...( 207 ): >GLR_HUMAN
GLLRTRYSQKIG

SEQ ID NO: 8752 - protein, 12 aa, Homo sapiens
  ( 324 )...( 335 ): >GLR_HUMAN
RIVQLLVAKLRA

SEQ ID NO: 8753 - protein, 12 aa, Homo sapiens
  ( 325 )...( 336 ): >GLR_HUMAN
IVQLLVAKLRAR

SEQ ID NO: 8754 - protein, 12 aa, Homo sapiens
  ( 326 )...( 337 ): >GLR_HUMAN
VQLLVAKLRARQ

SEQ ID NO: 8755 - protein, 12 aa, Homo sapiens
  ( 327 )...( 338 ): >GLR_HUMAN
QLLVAKLRARQM

SEQ ID NO: 8756 - protein, 12 aa, Homo sapiens
  ( 328 )...( 339 ): >GLR_HUMAN
LLVAKLRARQMH

SEQ ID NO: 8757 - protein, 12 aa, Homo sapiens
  ( 330 )...( 341 ): >GLR_HUMAN
VAKLRARQMHHT

SEQ ID NO: 8758 - protein, 12 aa, Homo sapiens
  ( 343 )...( 354 ): >GLR_HUMAN
YKFRLAKSTLTL

SEQ ID NO: 8759 - protein, 12 aa, Homo sapiens
  ( 344 )...( 355 ): >GLR_HUMAN
KFRLAKSTLTLI

SEQ ID NO: 8760 - protein, 12 aa, Homo sapiens
  ( 2 )...( 13 ): >GP37_HUMAN
RAPGALLARMSR

SEQ ID NO: 8761 - protein, 12 aa, Homo sapiens
  ( 43 )...( 54 ): >GP37_HUMAN
SCAPTVIQRRGR

SEQ ID NO: 8762 - protein, 12 aa, Homo sapiens
  ( 62 )...( 73 ): >GP37_HUMAN
SARDVLRARAPR

SEQ ID NO: 8763 - protein, 12 aa, Homo sapiens
  ( 182 )...( 193 ): >GP37_HUMAN
WPRRAGKLQGSH

SEQ ID NO: 8764 - protein, 12 aa, Homo sapiens
  ( 183 )...( 194 ): >GP37_HUMAN
PRRAGKLQGSHH

SEQ ID NO: 8765 - protein, 12 aa, Homo sapiens
  ( 184 )...( 195 ): >GP37_HUMAN
RRAGKLQGSHHK

SEQ ID NO: 8766 - protein, 12 aa, Homo sapiens
  ( 459 )...( 470 ): >GP37_HUMAN
ITCSLVTARKIR

SEQ ID NO: 8767 - protein, 12 aa, Homo sapiens
  ( 460 )...( 471 ): >GP37_HUMAN
TCSLVTARKIRK

SEQ ID NO: 8768 - protein, 12 aa, Homo sapiens
  ( 461 )...( 472 ): >GP37_HUMAN
CSLVTARKIRKA

SEQ ID NO: 8769 - protein, 12 aa, Homo sapiens
  ( 462 )...( 473 ): >GP37_HUMAN
SLVTARKIRKAE

SEQ ID NO: 8770 - protein, 12 aa, Homo sapiens
  ( 463 )...( 474 ): >GP37_HUMAN
LVTARKIRKAEK

SEQ ID NO: 8771 - protein, 12 aa, Homo sapiens
  ( 464 )...( 475 ): >GP37_HUMAN
VTARKIRKAEKA

SEQ ID NO: 8772 - protein, 12 aa, Homo sapiens
  ( 465 )...( 476 ): >GP37_HUMAN
TARKIRKAEKAC

SEQ ID NO: 8773 - protein, 12 aa, Homo sapiens
  ( 466 )...( 477 ): >GP37_HUMAN
ARKIRKAEKACT

SEQ ID NO: 8774 - protein, 12 aa, Homo sapiens
  ( 468 )...( 479 ): >GP37_HUMAN
KIRKAEKACTRG

SEQ ID NO: 8775 - protein, 12 aa, Homo sapiens
  ( 469 )...( 480 ): >GP37_HUMAN
IRKAEKACTRGN

SEQ ID NO: 8776 - protein, 12 aa, Homo sapiens
  ( 473 )...( 484 ): >GP37_HUMAN
EKACTRGNKRQI

SEQ ID NO: 8777 - protein, 12 aa, Homo sapiens
  ( 474 )...( 485 ): >GP37_HUMAN
KACTRGNKRQIQ

SEQ ID NO: 8778 - protein, 12 aa, Homo sapiens
  ( 475 )...( 486 ): >GP37_HUMAN
ACTRGNKRQIQL

SEQ ID NO: 8779 - protein, 12 aa, Homo sapiens
  ( 50 )...( 61 ): >GP39_HUMAN
ATIRVTQVLQKK

SEQ ID NO: 8780 - protein, 12 aa, Homo sapiens
  ( 51 )...( 62 ): >GP39_HUMAN
TIRVTQVLQKKG

SEQ ID NO: 8781 - protein, 12 aa, Homo sapiens
  ( 52 )...( 63 ): >GP39_HUMAN
IRVTQVLQKKGY

SEQ ID NO: 8782 - protein, 12 aa, Homo sapiens
  ( 53 )...( 64 ): >GP39_HUMAN
RVTQVLQKKGYL

SEQ ID NO: 8783 - protein, 12 aa, Homo sapiens
  ( 55 )...( 66 ): >GP39_HUMAN
TQVLQKKGYLQK

SEQ ID NO: 8784 - protein, 12 aa, Homo sapiens
  ( 257 )...( 268 ): >GP39_HUMAN
LAGGTRPPQLRK

SEQ ID NO: 8785 - protein, 12 aa, Homo sapiens
  ( 258 )...( 269 ): >GP39_HUMAN
AGGTRPPQLRKS

SEQ ID NO: 8786 - protein, 12 aa, Homo sapiens
  ( 274 )...( 285 ): >GP39_HUMAN
SRTARRQTIIFL

SEQ ID NO: 8787 - protein, 12 aa, Homo sapiens
  ( 276 )...( 287 ): >GP39_HUMAN
TARRQTIIFLRL

SEQ ID NO: 8788 - protein, 12 aa, Homo sapiens
  ( 277 )...( 288 ): >GP39_HUMAN
ARRQTIIFLRLI

SEQ ID NO: 8789 - protein, 12 aa, Homo sapiens
  ( 298 )...( 309 ): >GP39_HUMAN
PNQIRRIMAAAK

SEQ ID NO: 8790 - protein, 12 aa, Homo sapiens
  ( 299 )...( 310 ): >GP39_HUMAN
NQIRRIMAAAKP

SEQ ID NO: 8791 - protein, 12 aa, Homo sapiens
  ( 300 )...( 311 ): >GP39_HUMAN
QIRRIMAAAKPK

SEQ ID NO: 8792 - protein, 12 aa, Homo sapiens
  ( 301 )...( 312 ): >GP39_HUMAN
IRRIMAAAKPKH

SEQ ID NO: 8793 - protein, 12 aa, Homo sapiens
  ( 351 )...( 362 ): >GP39_HUMAN
FRRVFVQVLCCR

SEQ ID NO: 8794 - protein, 12 aa, Homo sapiens
  ( 352 )...( 363 ): >GP39_HUMAN
RRVFVQVLCCRL

SEQ ID NO: 8795 - protein, 12 aa, Homo sapiens
  ( 392 )...( 403 ): >GP39_HUMAN
LLFASRRQSSAR

SEQ ID NO: 8796 - protein, 12 aa, Homo sapiens
  ( 26 )...( 37 ): >GP40_HUMAN
AIRGATAHARLR

SEQ ID NO: 8797 - protein, 12 aa, Homo sapiens
  ( 27 )...( 38 ): >GP40_HUMAN
IRGATAHARLRL

SEQ ID NO: 8798 - protein, 12 aa, Homo sapiens
  ( 28 )...( 39 ): >GP40_HUMAN
RGATAHARLRLT

SEQ ID NO: 8799 - protein, 12 aa, Homo sapiens
  ( 206 )...( 217 ): >GP40_HUMAN
LRALARSGLTHR

SEQ ID NO: 8800 - protein, 12 aa, Homo sapiens
  ( 207 )...( 218 ): >GP40_HUMAN
RALARSGLTHRR

SEQ ID NO: 8801 - protein, 12 aa, Homo sapiens
  ( 208 )...( 219 ): >GP40_HUMAN
ALARSGLTHRRK

SEQ ID NO: 8802 - protein, 12 aa, Homo sapiens
  ( 209 )...( 220 ): >GP40_HUMAN
LARSGLTHRRKL

SEQ ID NO: 8803 - protein, 12 aa, Homo sapiens
  ( 212 )...( 223 ): >GP40_HUMAN
SGLTHRRKLRAA

SEQ ID NO: 8804 - protein, 12 aa, Homo sapiens
  ( 216 )...( 227 ): >GP40_HUMAN
HRRKLRAAWVAG

SEQ ID NO: 8805 - protein, 12 aa, Homo sapiens
  ( 218 )...( 229 ): >GP40_HUMAN
RKLRAAWVAGGA

SEQ ID NO: 8806 - protein, 12 aa, Homo sapiens
  ( 35 )...( 46 ): >GP41_HUMAN
ALVVFVGKLQRR

SEQ ID NO: 8807 - protein, 12 aa, Homo sapiens
  ( 36 )...( 47 ): >GP41_HUMAN
LVVFVGKLQRRP

SEQ ID NO: 8808 - protein, 12 aa, Homo sapiens
  ( 37 )...( 48 ): >GP41_HUMAN
VVFVGKLQRRPV

SEQ ID NO: 8809 - protein, 12 aa, Homo sapiens
  ( 38 )...( 49 ): >GP41_HUMAN
VFVGKLQRRPVA

SEQ ID NO: 8810 - protein, 12 aa, Homo sapiens
  ( 39 )...( 50 ): >GP41_HUMAN
FVGKLQRRPVAV

SEQ ID NO: 8811 - protein, 12 aa, Homo sapiens
  ( 122 )...( 133 ): >GP41_HUMAN
WYKTRPRLGQAG

SEQ ID NO: 8812 - protein, 12 aa, Homo sapiens
  ( 123 )...( 134 ): >GP41_HUMAN
YKTRPRLGQAGL

SEQ ID NO: 8813 - protein, 12 aa, Homo sapiens
  ( 124 )...( 135 ): >GP41_HUMAN
KTRPRLGQAGLV

SEQ ID NO: 8814 - protein, 12 aa, Homo sapiens
  ( 208 )...( 219 ): >GP41_HUMAN
VWILGRGGSHRR

SEQ ID NO: 8815 - protein, 12 aa, Homo sapiens
  ( 209 )...( 220 ): >GP41_HUMAN
WILGRGGSHRRQ

SEQ ID NO: 8816 - protein, 12 aa, Homo sapiens
  ( 210 )...( 221 ): >GP41_HUMAN
ILGRGGSHRRQR

SEQ ID NO: 8817 - protein, 12 aa, Homo sapiens
  ( 215 )...( 226 ): >GP41_HUMAN
GSHRRQRRVAGL

SEQ ID NO: 8818 - protein, 12 aa, Homo sapiens
  ( 216 )...( 227 ): >GP41_HUMAN
SHRRQRRVAGLL

SEQ ID NO: 8819 - protein, 12 aa, Homo sapiens
  ( 217 )...( 228 ): >GP41_HUMAN
HRRQRRVAGLLA

SEQ ID NO: 8820 - protein, 12 aa, Homo sapiens
  ( 219 )...( 230 ): >GP41_HUMAN
RQRRVAGLLAAT

SEQ ID NO: 8821 - protein, 12 aa, Homo sapiens
  ( 35 )...( 46 ): >GP42_HUMAN
ALVVFVGKLRCR

SEQ ID NO: 8822 - protein, 12 aa, Homo sapiens
  ( 36 )...( 47 ): >GP42_HUMAN
LVVFVGKLRCRP

SEQ ID NO: 8823 - protein, 12 aa, Homo sapiens
  ( 37 )...( 48 ): >GP42_HUMAN
VVFVGKLRCRPV

SEQ ID NO: 8824 - protein, 12 aa, Homo sapiens
  ( 38 )...( 49 ): >GP42_HUMAN
VFVGKLRCRPVA

SEQ ID NO: 8825 - protein, 12 aa, Homo sapiens
  ( 39 )...( 50 ): >GP42_HUMAN
FVGKLRCRPVAV

SEQ ID NO: 8826 - protein, 12 aa, Homo sapiens
  ( 122 )...( 133 ): >GP42_HUMAN
WYKTRPRLGQAG

SEQ ID NO: 8827 - protein, 12 aa, Homo sapiens
  ( 123 )...( 134 ): >GP42_HUMAN
YKTRPRLGQAGL

SEQ ID NO: 8828 - protein, 12 aa, Homo sapiens
  ( 124 )...( 135 ): >GP42_HUMAN
KTRPRLGQAGLV

SEQ ID NO: 8829 - protein, 12 aa, Homo sapiens
  ( 208 )...( 219 ): >GP42_HUMAN
VWILGRGGSHRR

SEQ ID NO: 8830 - protein, 12 aa, Homo sapiens
  ( 209 )...( 220 ): >GP42_HUMAN
WILGRGGSHRRQ

SEQ ID NO: 8831 - protein, 12 aa, Homo sapiens
  ( 210 )...( 221 ): >GP42_HUMAN
ILGRGGSHRRQR

SEQ ID NO: 8832 - protein, 12 aa, Homo sapiens
  ( 215 )...( 226 ): >GP42_HUMAN
GSHRRQRRVAGL

SEQ ID NO: 8833 - protein, 12 aa, Homo sapiens
  ( 216 )...( 227 ): >GP42_HUMAN
SHRRQRRVAGLV

SEQ ID NO: 8834 - protein, 12 aa, Homo sapiens
  ( 217 )...( 228 ): >GP42_HUMAN
HRRQRRVAGLVA

SEQ ID NO: 8835 - protein, 12 aa, Homo sapiens
  ( 219 )...( 230 ): >GP42_HUMAN
RQRRVAGLVAAT

SEQ ID NO: 8836 - protein, 12 aa, Homo sapiens
  ( 26 )...( 37 ): >GP43_HUMAN
LLALRAFVGRIR

SEQ ID NO: 8837 - protein, 12 aa, Homo sapiens
  ( 27 )...( 38 ): >GP43_HUMAN
LALRAFVGRIRQ

SEQ ID NO: 8838 - protein, 12 aa, Homo sapiens
  ( 28 )...( 39 ): >GP43_HUMAN
ALRAFVGRIRQP

SEQ ID NO: 8839 - protein, 12 aa, Homo sapiens
  ( 29 )...( 40 ): >GP43_HUMAN
LRAFVGRIRQPQ

SEQ ID NO: 8840 - protein, 12 aa, Homo sapiens
  ( 117 )...( 128 ): >GP43_HUMAN
YKLSRRPLYGVI

SEQ ID NO: 8841 - protein, 12 aa, Homo sapiens
  ( 118 )...( 129 ): >GP43_HUMAN
KLSRRPLYGVIA

SEQ ID NO: 8842 - protein, 12 aa, Homo sapiens
  ( 207 )...( 218 ): >GP43_HUMAN
LSQPLVGAQRRR

SEQ ID NO: 8843 - protein, 12 aa, Homo sapiens
  ( 275 )...( 286 ): >GP43_HUMAN
FSSSVVRRAFGR

SEQ ID NO: 8844 - protein, 12 aa, Homo sapiens
  ( 276 )...( 287 ): >GP43_HUMAN
SSSVVRRAFGRG

SEQ ID NO: 8845 - protein, 12 aa, Homo sapiens
  ( 277 )...( 288 ): >GP43_HUMAN
SSVVRRAFGRGL

SEQ ID NO: 8846 - protein, 12 aa, Homo sapiens
  ( 278 )...( 289 ): >GP43_HUMAN
SVVRRAFGRGLQ

SEQ ID NO: 8847 - protein, 12 aa, Homo sapiens
  ( 279 )...( 290 ): >GP43_HUMAN
VVRRAFGRGLQV

SEQ ID NO: 8848 - protein, 12 aa, Homo sapiens
  ( 280 )...( 291 ): >GP43_HUMAN
VRRAFGRGLQVL

SEQ ID NO: 8849 - protein, 12 aa, Homo sapiens
  ( 282 )...( 293 ): >GP43_HUMAN
RAFGRGLQVLRN

SEQ ID NO: 8850 - protein, 12 aa, Homo sapiens
  ( 291 )...( 302 ): >GP43_HUMAN
LRNQGSSLLGRR

SEQ ID NO: 8851 - protein, 12 aa, Homo sapiens
  ( 292 )...( 303 ): >GP43_HUMAN
RNQGSSLLGRRG

SEQ ID NO: 8852 - protein, 12 aa, Homo sapiens
  ( 293 )...( 304 ): >GP43_HUMAN
NQGSSLLGRRGK

SEQ ID NO: 8853 - protein, 12 aa, Homo sapiens
  ( 227 )...( 238 ): >GP44_HUMAN
AAVSLRLQHRGR

SEQ ID NO: 8854 - protein, 12 aa, Homo sapiens
  ( 228 )...( 239 ): >GP44_HUMAN
AVSLRLQHRGRR

SEQ ID NO: 8855 - protein, 12 aa, Homo sapiens
  ( 240 )...( 251 ): >GP44_HUMAN
RPGRFVRLVAAV

SEQ ID NO: 8856 - protein, 12 aa, Homo sapiens
  ( 314 )...( 325 ): >GP44_HUMAN
KLRRSLRTVLES

SEQ ID NO: 8857 - protein, 12 aa, Homo sapiens
  ( 333 )...( 344 ): >GP44_HUMAN
LGGAGSSRRRRT

SEQ ID NO: 8858 - protein, 12 aa, Homo sapiens
  ( 319 )...( 330 ): >GP52_HUMAN
LSNGVFRLGLRR

SEQ ID NO: 8859 - protein, 12 aa, Homo sapiens
  ( 320 )...( 331 ): >GP52_HUMAN
SNGVFRLGLRRL

SEQ ID NO: 8860 - protein, 12 aa, Homo sapiens
  ( 321 )...( 332 ): >GP52_HUMAN
NGVFRLGLRRLF

SEQ ID NO: 8861 - protein, 12 aa, Homo sapiens
  ( 203 )...( 214 ): >GP68_HUMAN
ASYQGILRAVRR

SEQ ID NO: 8862 - protein, 12 aa, Homo sapiens
  ( 204 )...( 215 ): >GP68_HUMAN
SYQGILRAVRRS

SEQ ID NO: 8863 - protein, 12 aa, Homo sapiens
  ( 205 )...( 216 ): >GP68_HUMAN
YQGILRAVRRSH

SEQ ID NO: 8864 - protein, 12 aa, Homo sapiens
  ( 206 )...( 217 ): >GP68_HUMAN
QGILRAVRRSHG

SEQ ID NO: 8865 - protein, 12 aa, Homo sapiens
  ( 207 )...( 218 ): >GP68_HUMAN
GILRAVRRSHGT

SEQ ID NO: 8866 - protein, 12 aa, Homo sapiens
  ( 208 )...( 219 ): >GP68_HUMAN
ILRAVRRSHGTQ

SEQ ID NO: 8867 - protein, 12 aa, Homo sapiens
  ( 209 )...( 220 ): >GP68_HUMAN
LRAVRRSHGTQK

SEQ ID NO: 8868 - protein, 12 aa, Homo sapiens
  ( 210 )...( 221 ): >GP68_HUMAN
RAVRRSHGTQKS

SEQ ID NO: 8869 - protein, 12 aa, Homo sapiens
  ( 211 )...( 222 ): >GP68_HUMAN
AVRRSHGTQKSR

SEQ ID NO: 8870 - protein, 12 aa, Homo sapiens
  ( 306 )...( 317 ): >GP68_HUMAN
AFLTCSRTGRAR

SEQ ID NO: 8871 - protein, 12 aa, Homo sapiens
  ( 176 )...( 187 ): >GP72_HUMAN
PLKPRISITKGV

SEQ ID NO: 8872 - protein, 12 aa, Homo sapiens
  ( 177 )...( 188 ): >GP72_HUMAN
LKPRISITKGVI

SEQ ID NO: 8873 - protein, 12 aa, Homo sapiens
  ( 178 )...( 189 ): >GP72_HUMAN
KPRISITKGVIY

SEQ ID NO: 8874 - protein, 12 aa, Homo sapiens
  ( 254 )...( 265 ): >GP72_HUMAN
IISVAYARVAKK

SEQ ID NO: 8875 - protein, 12 aa, Homo sapiens
  ( 255 )...( 266 ): >GP72_HUMAN
ISVAYARVAKKL

SEQ ID NO: 8876 - protein, 12 aa, Homo sapiens
  ( 256 )...( 267 ): >GP72_HUMAN
SVAYARVAKKLW

SEQ ID NO: 8877 - protein, 12 aa, Homo sapiens
  ( 257 )...( 268 ): >GP72_HUMAN
VAYARVAKKLWL

SEQ ID NO: 8878 - protein, 12 aa, Homo sapiens
  ( 261 )...( 272 ): >GP72_HUMAN
RVAKKLWLCNMI

SEQ ID NO: 8879 - protein, 12 aa, Homo sapiens
  ( 286 )...( 297 ): >GP72_HUMAN
KKKKTIKMLMLV

SEQ ID NO: 8880 - protein, 12 aa, Homo sapiens
  ( 212 )...( 223 ): >GP85_HUMAN
RRKMKPVQFVAA

SEQ ID NO: 8881 - protein, 12 aa, Homo sapiens
  ( 213 )...( 224 ): >GP85_HUMAN
RKMKPVQFVAAV

SEQ ID NO: 8882 - protein, 12 aa, Homo sapiens
  ( 258 )...( 269 ): >GP85_HUMAN
GIRQNANTTGRR

SEQ ID NO: 8883 - protein, 12 aa, Homo sapiens
  ( 261 )...( 272 ): >GP85_HUMAN
QNANTTGRRRLL

SEQ ID NO: 8884 - protein, 12 aa, Homo sapiens
  ( 262 )...( 273 ): >GP85_HUMAN
NANTTGRRRLLV

SEQ ID NO: 8885 - protein, 12 aa, Homo sapiens
  ( 263 )...( 274 ): >GP85_HUMAN
ANTTGRRRLLVL

SEQ ID NO: 8886 - protein, 12 aa, Homo sapiens
  ( 350 )...( 361 ): >GP85_HUMAN
FSTTLLYCRKSR

SEQ ID NO: 8887 - protein, 12 aa, Homo sapiens
  ( 351 )...( 362 ): >GP85_HUMAN
STTLLYCRKSRL

SEQ ID NO: 8888 - protein, 12 aa, Homo sapiens
  ( 352 )...( 363 ): >GP85_HUMAN
TTLLYCRKSRLP

SEQ ID NO: 8889 - protein, 12 aa, Homo sapiens
  ( 64 )...( 75 ): >GPR1_HUMAN
GLKWKKTVTTLW

SEQ ID NO: 8890 - protein, 12 aa, Homo sapiens
  ( 147 )...( 158 ): >GPR1_HUMAN
RHRTLKNSLIVI

SEQ ID NO: 8891 - protein, 12 aa, Homo sapiens
  ( 225 )...( 236 ): >GPR1_HUMAN
CYLCLIFKVKKR

SEQ ID NO: 8892 - protein, 12 aa, Homo sapiens
  ( 226 )...( 237 ): >GPR1_HUMAN
YLCLIFKVKKRT

SEQ ID NO: 8893 - protein, 12 aa, Homo sapiens
  ( 227 )...( 238 ): >GPR1_HUMAN
LCLIFKVKKRTV

SEQ ID NO: 8894 - protein, 12 aa, Homo sapiens
  ( 228 )...( 239 ): >GPR1_HUMAN
CLIFKVKKRTVL

SEQ ID NO: 8895 - protein, 12 aa, Homo sapiens
  ( 230 )...( 241 ): >GPR1_HUMAN
IFKVKKRTVLIS

SEQ ID NO: 8896 - protein, 12 aa, Homo sapiens
  ( 231 )...( 242 ): >GPR1_HUMAN
FKVKKRTVLISS

SEQ ID NO: 8897 - protein, 12 aa, Homo sapiens
  ( 232 )...( 243 ): >GPR1_HUMAN
KVKKRTVLISSR

SEQ ID NO: 8898 - protein, 12 aa, Homo sapiens
  ( 233 )...( 244 ): >GPR1_HUMAN
VKKRTVLISSRH

SEQ ID NO: 8899 - protein, 12 aa, Homo sapiens
  ( 303 )...( 314 ): >GPR1_HUMAN
LYVLISKKFQAR

SEQ ID NO: 8900 - protein, 12 aa, Homo sapiens
  ( 118 )...( 129 ): >GPR4_HUMAN
AVAHPLRFARLR

SEQ ID NO: 8901 - protein, 12 aa, Homo sapiens
  ( 125 )...( 136 ): >GPR4_HUMAN
FARLRRVKTAVA

SEQ ID NO: 8902 - protein, 12 aa, Homo sapiens
  ( 126 )...( 137 ): >GPR4_HUMAN
ARLRRVKTAVAV

SEQ ID NO: 8903 - protein, 12 aa, Homo sapiens
  ( 127 )...( 138 ): >GPR4_HUMAN
RLRRVKTAVAVS

SEQ ID NO: 8904 - protein, 12 aa, Homo sapiens
  ( 128 )...( 139 ): >GPR4_HUMAN
LRRVKTAVAVSS

SEQ ID NO: 8905 - protein, 12 aa, Homo sapiens
  ( 198 )...( 209 ): >GPR4_HUMAN
LLSYRGILRAVR

SEQ ID NO: 8906 - protein, 12 aa, Homo sapiens
  ( 199 )...( 210 ): >GPR4_HUMAN
LSYRGILRAVRG

SEQ ID NO: 8907 - protein, 12 aa, Homo sapiens
  ( 200 )...( 211 ): >GPR4_HUMAN
SYRGILRAVRGS

SEQ ID NO: 8908 - protein, 12 aa, Homo sapiens
  ( 201 )...( 212 ): >GPR4_HUMAN
YRGILRAVRGSV

SEQ ID NO: 8909 - protein, 12 aa, Homo sapiens
  ( 216 )...( 227 ): >GPR4_HUMAN
RQEKAKIKRLAL

SEQ ID NO: 8910 - protein, 12 aa, Homo sapiens
  ( 217 )...( 228 ): >GPR4_HUMAN
QEKAKIKRLALS

SEQ ID NO: 8911 - protein, 12 aa, Homo sapiens
  ( 218 )...( 229 ): >GPR4_HUMAN
EKAKIKRLALSL

SEQ ID NO: 8912 - protein, 12 aa, Homo sapiens
  ( 219 )...( 230 ): >GPR4_HUMAN
KAKIKRLALSLI

SEQ ID NO: 8913 - protein, 12 aa, Homo sapiens
  ( 220 )...( 231 ): >GPR4_HUMAN
AKIKRLALSLIA

SEQ ID NO: 8914 - protein, 12 aa, Homo sapiens
  ( 59 )...( 70 ): >GPR7_HUMAN
LYVLLRAPRMKT

SEQ ID NO: 8915 - protein, 12 aa, Homo sapiens
  ( 60 )...( 71 ): >GPR7_HUMAN
YVLLRAPRMKTV

SEQ ID NO: 8916 - protein, 12 aa, Homo sapiens
  ( 61 )...( 72 ): >GPR7_HUMAN
VLLRAPRMKTVT

SEQ ID NO: 8917 - protein, 12 aa, Homo sapiens
  ( 62 )...( 73 ): >GPR7_HUMAN
LLRAPRMKTVTN

SEQ ID NO: 8918 - protein, 12 aa, Homo sapiens
  ( 63 )...( 74 ): >GPR7_HUMAN
LRAPRMKTVTNL

SEQ ID NO: 8919 - protein, 12 aa, Homo sapiens
  ( 64 )...( 75 ): >GPR7_HUMAN
RAPRMKTVTNLF

SEQ ID NO: 8920 - protein, 12 aa, Homo sapiens
  ( 144 )...( 155 ): >GPR7_HUMAN
SRRVAGRTYSAA

SEQ ID NO: 8921 - protein, 12 aa, Homo sapiens
  ( 145 )...( 156 ): >GPR7_HUMAN
RRVAGRTYSAAR

SEQ ID NO: 8922 - protein, 12 aa, Homo sapiens
  ( 146 )...( 157 ): >GPR7_HUMAN
RVAGRTYSAARA

SEQ ID NO: 8923 - protein, 12 aa, Homo sapiens
  ( 238 )...( 249 ): >GPR7_HUMAN
HAKALERAKKRV

SEQ ID NO: 8924 - protein, 12 aa, Homo sapiens
  ( 239 )...( 250 ): >GPR7_HUMAN
AKALERAKKRVT

SEQ ID NO: 8925 - protein, 12 aa, Homo sapiens
  ( 240 )...( 251 ): >GPR7_HUMAN
KALERAKKRVTF

SEQ ID NO: 8926 - protein, 12 aa, Homo sapiens
  ( 241 )...( 252 ): >GPR7_HUMAN
ALERAKKRVTFL

SEQ ID NO: 8927 - protein, 12 aa, Homo sapiens
  ( 242 )...( 253 ): >GPR7_HUMAN
LERAKKRVTFLV

SEQ ID NO: 8928 - protein, 12 aa, Homo sapiens
  ( 243 )...( 254 ): >GPR7_HUMAN
ERAKKRVTFLVV

SEQ ID NO: 8929 - protein, 12 aa, Homo sapiens
  ( 244 )...( 255 ): >GPR7_HUMAN
RAKKRVTFLVVA

SEQ ID NO: 8930 - protein, 12 aa, Homo sapiens
  ( 245 )...( 256 ): >GPR7_HUMAN
AKKRVTFLVVAI

SEQ ID NO: 8931 - protein, 12 aa, Homo sapiens
  ( 316 )...( 327 ): >GPR7_HUMAN
RNLRQLITCRAA

SEQ ID NO: 8932 - protein, 12 aa, Homo sapiens
  ( 68 )...( 79 ): >GPR8_HUMAN
LVILRAPKMKTV

SEQ ID NO: 8933 - protein, 12 aa, Homo sapiens
  ( 69 )...( 80 ): >GPR8_HUMAN
VILRAPKMKTVT

SEQ ID NO: 8934 - protein, 12 aa, Homo sapiens
  ( 70 )...( 81 ): >GPR8_HUMAN
ILRAPKMKTVTN

SEQ ID NO: 8935 - protein, 12 aa, Homo sapiens
  ( 71 )...( 82 ): >GPR8_HUMAN
LRAPKMKTVTNV

SEQ ID NO: 8936 - protein, 12 aa, Homo sapiens
  ( 72 )...( 83 ): >GPR8_HUMAN
RAPKMKTVTNVF

SEQ ID NO: 8937 - protein, 12 aa, Homo sapiens
  ( 142 )...( 153 ): >GPR8_HUMAN
RYLVVLATVRSR

SEQ ID NO: 8938 - protein, 12 aa, Homo sapiens
  ( 155 )...( 166 ): >GPR8_HUMAN
MPWRTYRGAKVA

SEQ ID NO: 8939 - protein, 12 aa, Homo sapiens
  ( 157 )...( 168 ): >GPR8_HUMAN
WRTYRGAKVASL

SEQ ID NO: 8940 - protein, 12 aa, Homo sapiens
  ( 158 )...( 169 ): >GPR8_HUMAN
RTYRGAKVASLC

SEQ ID NO: 8941 - protein, 12 aa, Homo sapiens
  ( 233 )...( 244 ): >GPR8_HUMAN
TDLLRRLRAVRL

SEQ ID NO: 8942 - protein, 12 aa, Homo sapiens
  ( 239 )...( 250 ): >GPR8_HUMAN
LRAVRLRSGAKA

SEQ ID NO: 8943 - protein, 12 aa, Homo sapiens
  ( 240 )...( 251 ): >GPR8_HUMAN
RAVRLRSGAKAL

SEQ ID NO: 8944 - protein, 12 aa, Homo sapiens
  ( 242 )...( 253 ): >GPR8_HUMAN
VRLRSGAKALGK

SEQ ID NO: 8945 - protein, 12 aa, Homo sapiens
  ( 248 )...( 259 ): >GPR8_HUMAN
AKALGKARRKVT

SEQ ID NO: 8946 - protein, 12 aa, Homo sapiens
  ( 249 )...( 260 ): >GPR8_HUMAN
KALGKARRKVTV

SEQ ID NO: 8947 - protein, 12 aa, Homo sapiens
  ( 250 )...( 261 ): >GPR8_HUMAN
ALGKARRKVTVL

SEQ ID NO: 8948 - protein, 12 aa, Homo sapiens
  ( 251 )...( 262 ): >GPR8_HUMAN
LGKARRKVTVLV

SEQ ID NO: 8949 - protein, 12 aa, Homo sapiens
  ( 252 )...( 263 ): >GPR8_HUMAN
GKARRKVTVLVL

SEQ ID NO: 8950 - protein, 12 aa, Homo sapiens
  ( 253 )...( 264 ): >GPR8_HUMAN
KARRKVTVLVLV

SEQ ID NO: 8951 - protein, 12 aa, Homo sapiens
  ( 79 )...( 90 ): >GPRA_HUMAN
CLLVLVIARVRR

SEQ ID NO: 8952 - protein, 12 aa, Homo sapiens
  ( 81 )...( 92 ): >GPRA_HUMAN
LVLVIARVRRLH

SEQ ID NO: 8953 - protein, 12 aa, Homo sapiens
  ( 82 )...( 93 ): >GPRA_HUMAN
VLVIARVRRLHN

SEQ ID NO: 8954 - protein, 12 aa, Homo sapiens
  ( 83 )...( 94 ): >GPRA_HUMAN
LVIARVRRLHNV

SEQ ID NO: 8955 - protein, 12 aa, Homo sapiens
  ( 84 )...( 95 ): >GPRA_HUMAN
VIARVRRLHNVT

SEQ ID NO: 8956 - protein, 12 aa, Homo sapiens
  ( 85 )...( 96 ): >GPRA_HUMAN
IARVRRLHNVTN

SEQ ID NO: 8957 - protein, 12 aa, Homo sapiens
  ( 161 )...( 172 ): >GPRA_HUMAN
VVLVHPLRRRIS

SEQ ID NO: 8958 - protein, 12 aa, Homo sapiens
  ( 162 )...( 173 ): >GPRA_HUMAN
VLVHPLRRRISL

SEQ ID NO: 8959 - protein, 12 aa, Homo sapiens
  ( 169 )...( 180 ): >GPRA_HUMAN
RRISLRLSAYAV

SEQ ID NO: 8960 - protein, 12 aa, Homo sapiens
  ( 242 )...( 253 ): >GPRA_HUMAN
LLSYVRVSVKLR

SEQ ID NO: 8961 - protein, 12 aa, Homo sapiens
  ( 243 )...( 254 ): >GPRA_HUMAN
LSYVRVSVKLRN

SEQ ID NO: 8962 - protein, 12 aa, Homo sapiens
  ( 245 )...( 256 ): >GPRA_HUMAN
YVRVSVKLRNRV

SEQ ID NO: 8963 - protein, 12 aa, Homo sapiens
  ( 246 )...( 257 ): >GPRA_HUMAN
VRVSVKLRNRVV

SEQ ID NO: 8964 - protein, 12 aa, Homo sapiens
  ( 247 )...( 258 ): >GPRA_HUMAN
RVSVKLRNRVVP

SEQ ID NO: 8965 - protein, 12 aa, Homo sapiens
  ( 248 )...( 259 ): >GPRA_HUMAN
VSVKLRNRVVPG

SEQ ID NO: 8966 - protein, 12 aa, Homo sapiens
  ( 249 )...( 260 ): >GPRA_HUMAN
SVKLRNRVVPGC

SEQ ID NO: 8967 - protein, 12 aa, Homo sapiens
  ( 250 )...( 261 ): >GPRA_HUMAN
VKLRNRVVPGCV

SEQ ID NO: 8968 - protein, 12 aa, Homo sapiens
  ( 251 )...( 262 ): >GPRA_HUMAN
KLRNRVVPGCVT

SEQ ID NO: 8969 - protein, 12 aa, Homo sapiens
  ( 273 )...( 284 ): >GPRA_HUMAN
RRRTFCLLVVVV

SEQ ID NO: 8970 - protein, 12 aa, Homo sapiens
  ( 347 )...( 358 ): >GPRA_HUMAN
RKLLVAWPRKIA

SEQ ID NO: 8971 - protein, 12 aa, Homo sapiens
  ( 56 )...( 67 ): >GPRF_HUMAN
GALHFKPGSRRL

SEQ ID NO: 8972 - protein, 12 aa, Homo sapiens
  ( 57 )...( 68 ): >GPRF_HUMAN
ALHFKPGSRRLI

SEQ ID NO: 8973 - protein, 12 aa, Homo sapiens
  ( 134 )...( 145 ): >GPRF_HUMAN
AIVWPVVSRKFR

SEQ ID NO: 8974 - protein, 12 aa, Homo sapiens
  ( 139 )...( 150 ): >GPRF_HUMAN
VVSRKFRRTDCA

SEQ ID NO: 8975 - protein, 12 aa, Homo sapiens
  ( 186 )...( 197 ): >GPRF_HUMAN
KKATPIKLIWSL

SEQ ID NO: 8976 - protein, 12 aa, Homo sapiens
  ( 229 )...( 240 ): >GPRF_HUMAN
SGKHNKKLKKSI

SEQ ID NO: 8977 - protein, 12 aa, Homo sapiens
  ( 234 )...( 245 ): >GPRF_HUMAN
KKLKKSIKIIFI

SEQ ID NO: 8978 - protein, 12 aa, Homo sapiens
  ( 132 )...( 143 ): >GPRH_HUMAN
AIVHPVKSLKLR

SEQ ID NO: 8979 - protein, 12 aa, Homo sapiens
  ( 133 )...( 144 ): >GPRH_HUMAN
IVHPVKSLKLRR

SEQ ID NO: 8980 - protein, 12 aa, Homo sapiens
  ( 137 )...( 148 ): >GPRH_HUMAN
VKSLKLRRPLYA

SEQ ID NO: 8981 - protein, 12 aa, Homo sapiens
  ( 213 )...( 224 ): >GPRH_HUMAN
LLIIRSLRQGLR

SEQ ID NO: 8982 - protein, 12 aa, Homo sapiens
  ( 214 )...( 225 ): >GPRH_HUMAN
LIIRSLRQGLRV

SEQ ID NO: 8983 - protein, 12 aa, Homo sapiens
  ( 216 )...( 227 ): >GPRH_HUMAN
IRSLRQGLRVEK

SEQ ID NO: 8984 - protein, 12 aa, Homo sapiens
  ( 218 )...( 229 ): >GPRH_HUMAN
SLRQGLRVEKRL

SEQ ID NO: 8985 - protein, 12 aa, Homo sapiens
  ( 219 )...( 230 ): >GPRH_HUMAN
LRQGLRVEKRLK

SEQ ID NO: 8986 - protein, 12 aa, Homo sapiens
  ( 220 )...( 231 ): >GPRH_HUMAN
RQGLRVEKRLKT

SEQ ID NO: 8987 - protein, 12 aa, Homo sapiens
  ( 221 )...( 232 ): >GPRH_HUMAN
QGLRVEKRLKTK

SEQ ID NO: 8988 - protein, 12 aa, Homo sapiens
  ( 222 )...( 233 ): >GPRH_HUMAN
GLRVEKRLKTKA

SEQ ID NO: 8989 - protein, 12 aa, Homo sapiens
  ( 223 )...( 234 ): >GPRH_HUMAN
LRVEKRLKTKAV

SEQ ID NO: 8990 - protein, 12 aa, Homo sapiens
  ( 225 )...( 236 ): >GPRH_HUMAN
VEKRLKTKAVRM

SEQ ID NO: 8991 - protein, 12 aa, Homo sapiens
  ( 226 )...( 237 ): >GPRH_HUMAN
EKRLKTKAVRMI

SEQ ID NO: 8992 - protein, 12 aa, Homo sapiens
  ( 227 )...( 238 ): >GPRH_HUMAN
KRLKTKAVRMIA

SEQ ID NO: 8993 - protein, 12 aa, Homo sapiens
  ( 228 )...( 239 ): >GPRH_HUMAN
RLKTKAVRMIAI

SEQ ID NO: 8994 - protein, 12 aa, Homo sapiens
  ( 229 )...( 240 ): >GPRH_HUMAN
LKTKAVRMIAIV

SEQ ID NO: 8995 - protein, 12 aa, Homo sapiens
  ( 230 )...( 241 ): >GPRH_HUMAN
KTKAVRMIAIVL

SEQ ID NO: 8996 - protein, 12 aa, Homo sapiens
  ( 43 )...( 54 ): >GPRI_HUMAN
ALWVFSCTTKKR

SEQ ID NO: 8997 - protein, 12 aa, Homo sapiens
  ( 44 )...( 55 ): >GPRI_HUMAN
LWVFSCTTKKRT

SEQ ID NO: 8998 - protein, 12 aa, Homo sapiens
  ( 52 )...( 63 ): >GPRI_HUMAN
KKRTTVTIYMMN

SEQ ID NO: 8999 - protein, 12 aa, Homo sapiens
  ( 214 )...( 225 ): >GPRI_HUMAN
LLHGRTSKLKPK

SEQ ID NO: 9000 - protein, 12 aa, Homo sapiens
  ( 215 )...( 226 ): >GPRI_HUMAN
LHGRTSKLKPKV

SEQ ID NO: 9001 - protein, 12 aa, Homo sapiens
  ( 216 )...( 227 ): >GPRI_HUMAN
HGRTSKLKPKVK

SEQ ID NO: 9002 - protein, 12 aa, Homo sapiens
  ( 217 )...( 228 ): >GPRI_HUMAN
GRTSKLKPKVKE

SEQ ID NO: 9003 - protein, 12 aa, Homo sapiens
  ( 219 )...( 230 ): >GPRI_HUMAN
TSKLKPKVKEKS

SEQ ID NO: 9004 - protein, 12 aa, Homo sapiens
  ( 220 )...( 231 ): >GPRI_HUMAN
SKLKPKVKEKSI

SEQ ID NO: 9005 - protein, 12 aa, Homo sapiens
  ( 222 )...( 233 ): >GPRI_HUMAN
LKPKVKEKSIRI

SEQ ID NO: 9006 - protein, 12 aa, Homo sapiens
  ( 223 )...( 234 ): >GPRI_HUMAN
KPKVKEKSIRII

SEQ ID NO: 9007 - protein, 12 aa, Homo sapiens
  ( 224 )...( 235 ): >GPRI_HUMAN
PKVKEKSIRIII

SEQ ID NO: 9008 - protein, 12 aa, Homo sapiens
  ( 225 )...( 236 ): >GPRI_HUMAN
KVKEKSIRIIIT

SEQ ID NO: 9009 - protein, 12 aa, Homo sapiens
  ( 309 )...( 320 ): >GPRI_HUMAN
SLRRKSFRSGSL

SEQ ID NO: 9010 - protein, 12 aa, Homo sapiens
  ( 312 )...( 323 ): >GPRI_HUMAN
RKSFRSGSLRSL

SEQ ID NO: 9011 - protein, 12 aa, Homo sapiens
  ( 84 )...( 95 ): >GPRJ_HUMAN
SLVCLVIHRSRR

SEQ ID NO: 9012 - protein, 12 aa, Homo sapiens
  ( 85 )...( 96 ): >GPRJ_HUMAN
LVCLVIHRSRRT

SEQ ID NO: 9013 - protein, 12 aa, Homo sapiens
  ( 86 )...( 97 ): >GPRJ_HUMAN
VCLVIHRSRRTQ

SEQ ID NO: 9014 - protein, 12 aa, Homo sapiens
  ( 87 )...( 98 ): >GPRJ_HUMAN
CLVIHRSRRTQS

SEQ ID NO: 9015 - protein, 12 aa, Homo sapiens
  ( 88 )...( 99 ): >GPRJ_HUMAN
LVIHRSRRTQST

SEQ ID NO: 9016 - protein, 12 aa, Homo sapiens
  ( 89 )...( 100 ): >GPRJ_HUMAN
VIHRSRRTQSTT

SEQ ID NO: 9017 - protein, 12 aa, Homo sapiens
  ( 170 )...( 181 ): >GPRJ_HUMAN
PLSFKVSREKAK

SEQ ID NO: 9018 - protein, 12 aa, Homo sapiens
  ( 171 )...( 182 ): >GPRJ_HUMAN
LSFKVSREKAKK

SEQ ID NO: 9019 - protein, 12 aa, Homo sapiens
  ( 174 )...( 185 ): >GPRJ_HUMAN
KVSREKAKKMIA

SEQ ID NO: 9020 - protein, 12 aa, Homo sapiens
  ( 175 )...( 186 ): >GPRJ_HUMAN
VSREKAKKMIAA

SEQ ID NO: 9021 - protein, 12 aa, Homo sapiens
  ( 176 )...( 187 ): >GPRJ_HUMAN
SREKAKKMIAAS

SEQ ID NO: 9022 - protein, 12 aa, Homo sapiens
  ( 177 )...( 188 ): >GPRJ_HUMAN
REKAKKMIAASW

SEQ ID NO: 9023 - protein, 12 aa, Homo sapiens
  ( 251 )...( 262 ): >GPRJ_HUMAN
WRIGTDGRTVRR

SEQ ID NO: 9024 - protein, 12 aa, Homo sapiens
  ( 252 )...( 263 ): >GPRJ_HUMAN
RIGTDGRTVRRT

SEQ ID NO: 9025 - protein, 12 aa, Homo sapiens
  ( 257 )...( 268 ): >GPRJ_HUMAN
GRTVRRTMNIVP

SEQ ID NO: 9026 - protein, 12 aa, Homo sapiens
  ( 259 )...( 270 ): >GPRJ_HUMAN
TVRRTMNIVPRT

SEQ ID NO: 9027 - protein, 12 aa, Homo sapiens
  ( 260 )...( 271 ): >GPRJ_HUMAN
VRRTMNIVPRTK

SEQ ID NO: 9028 - protein, 12 aa, Homo sapiens
  ( 261 )...( 272 ): >GPRJ_HUMAN
RRTMNIVPRTKV

SEQ ID NO: 9029 - protein, 12 aa, Homo sapiens
  ( 262 )...( 273 ): >GPRJ_HUMAN
RTMNIVPRTKVK

SEQ ID NO: 9030 - protein, 12 aa, Homo sapiens
  ( 263 )...( 274 ): >GPRJ_HUMAN
TMNIVPRTKVKT

SEQ ID NO: 9031 - protein, 12 aa, Homo sapiens
  ( 264 )...( 275 ): >GPRJ_HUMAN
MNIVPRTKVKTI

SEQ ID NO: 9032 - protein, 12 aa, Homo sapiens
  ( 265 )...( 276 ): >GPRJ_HUMAN
NIVPRTKVKTIK

SEQ ID NO: 9033 - protein, 12 aa, Homo sapiens
  ( 266 )...( 277 ): >GPRJ_HUMAN
IVPRTKVKTIKM

SEQ ID NO: 9034 - protein, 12 aa, Homo sapiens
  ( 267 )...( 278 ): >GPRJ_HUMAN
VPRTKVKTIKMF

SEQ ID NO: 9035 - protein, 12 aa, Homo sapiens
  ( 268 )...( 279 ): >GPRJ_HUMAN
PRTKVKTIKMFL

SEQ ID NO: 9036 - protein, 12 aa, Homo sapiens
  ( 269 )...( 280 ): >GPRJ_HUMAN
RTKVKTIKMFLI

SEQ ID NO: 9037 - protein, 12 aa, Homo sapiens
  ( 80 )...( 91 ): >GPRK_HUMAN
CRTRAKTPSVIY

SEQ ID NO: 9038 - protein, 12 aa, Homo sapiens
  ( 81 )...( 92 ): >GPRK_HUMAN
RTRAKTPSVIYT

SEQ ID NO: 9039 - protein, 12 aa, Homo sapiens
  ( 224 )...( 235 ): >GPRK_HUMAN
SRPGLLHQGRQR

SEQ ID NO: 9040 - protein, 12 aa, Homo sapiens
  ( 226 )...( 237 ): >GPRK_HUMAN
PGLLHQGRQRRV

SEQ ID NO: 9041 - protein, 12 aa, Homo sapiens
  ( 227 )...( 238 ): >GPRK_HUMAN
GLLHQGRQRRVR

SEQ ID NO: 9042 - protein, 12 aa, Homo sapiens
  ( 234 )...( 245 ): >GPRK_HUMAN
QRRVRAMQLLLT

SEQ ID NO: 9043 - protein, 12 aa, Homo sapiens
  ( 235 )...( 246 ): >GPRK_HUMAN
RRVRAMQLLLTV

SEQ ID NO: 9044 - protein, 12 aa, Homo sapiens
  ( 248 )...( 259 ): >GPRL_HUMAN
KRYAMVLFRITS

SEQ ID NO: 9045 - protein, 12 aa, Homo sapiens
  ( 306 )...( 317 ): >GPRL_HUMAN
LSNSVFQRGLKR

SEQ ID NO: 9046 - protein, 12 aa, Homo sapiens
  ( 307 )...( 318 ): >GPRL_HUMAN
SNSVFQRGLKRL

SEQ ID NO: 9047 - protein, 12 aa, Homo sapiens
  ( 308 )...( 319 ): >GPRL_HUMAN
NSVFQRGLKRLS

SEQ ID NO: 9048 - protein, 12 aa, Homo sapiens
  ( 309 )...( 320 ): >GPRL_HUMAN
SVFQRGLKRLSG

SEQ ID NO: 9049 - protein, 12 aa, Homo sapiens
  ( 310 )...( 321 ): >GPRL_HUMAN
VFQRGLKRLSGA

SEQ ID NO: 9050 - protein, 12 aa, Homo sapiens
  ( 311 )...( 322 ): >GPRL_HUMAN
FQRGLKRLSGAM

SEQ ID NO: 9051 - protein, 12 aa, Homo sapiens
  ( 312 )...( 323 ): >GPRL_HUMAN
QRGLKRLSGAMC

SEQ ID NO: 9052 - protein, 12 aa, Homo sapiens
  ( 313 )...( 324 ): >GPRL_HUMAN
RGLKRLSGAMCT

SEQ ID NO: 9053 - protein, 12 aa, Homo sapiens
  ( 145 )...( 156 ): >GPRM_HUMAN
VKPANRILTMGR

SEQ ID NO: 9054 - protein, 12 aa, Homo sapiens
  ( 146 )...( 157 ): >GPRM_HUMAN
KPANRILTMGRA

SEQ ID NO: 9055 - protein, 12 aa, Homo sapiens
  ( 240 )...( 251 ): >GPRM_HUMAN
IRIGTRFSTGQK

SEQ ID NO: 9056 - protein, 12 aa, Homo sapiens
  ( 241 )...( 252 ): >GPRM_HUMAN
RIGTRFSTGQKK

SEQ ID NO: 9057 - protein, 12 aa, Homo sapiens
  ( 242 )...( 253 ): >GPRM_HUMAN
IGTRFSTGQKKK

SEQ ID NO: 9058 - protein, 12 aa, Homo sapiens
  ( 243 )...( 254 ): >GPRM_HUMAN
GTRFSTGQKKKA

SEQ ID NO: 9059 - protein, 12 aa, Homo sapiens
  ( 244 )...( 255 ): >GPRM_HUMAN
TRFSTGQKKKAR

SEQ ID NO: 9060 - protein, 12 aa, Homo sapiens
  ( 246 )...( 257 ): >GPRM_HUMAN
FSTGQKKKARKK

SEQ ID NO: 9061 - protein, 12 aa, Homo sapiens
  ( 252 )...( 263 ): >GPRM_HUMAN
KKARKKKTISLT

SEQ ID NO: 9062 - protein, 12 aa, Homo sapiens
  ( 253 )...( 264 ): >GPRM_HUMAN
KARKKKTISLTT

SEQ ID NO: 9063 - protein, 12 aa, Homo sapiens
  ( 254 )...( 265 ): >GPRM_HUMAN
ARKKKTISLTTQ

SEQ ID NO: 9064 - protein, 12 aa, Homo sapiens
  ( 255 )...( 266 ): >GPRM_HUMAN
RKKKTISLTTQH

SEQ ID NO: 9065 - protein, 12 aa, Homo sapiens
  ( 285 )...( 296 ): >GPRM_HUMAN
RTSVSVIIALRR

SEQ ID NO: 9066 - protein, 12 aa, Homo sapiens
  ( 288 )...( 299 ): >GPRM_HUMAN
VSVIIALRRAVK

SEQ ID NO: 9067 - protein, 12 aa, Homo sapiens
  ( 289 )...( 300 ): >GPRM_HUMAN
SVIIALRRAVKR

SEQ ID NO: 9068 - protein, 12 aa, Homo sapiens
  ( 290 )...( 301 ): >GPRM_HUMAN
VIIALRRAVKRH

SEQ ID NO: 9069 - protein, 12 aa, Homo sapiens
  ( 308 )...( 319 ): >GPRM_HUMAN
QKRVFRMSLLII

SEQ ID NO: 9070 - protein, 12 aa, Homo sapiens
  ( 309 )...( 320 ): >GPRM_HUMAN
KRVFRMSLLIIS

SEQ ID NO: 9071 - protein, 12 aa, Homo sapiens
  ( 377 )...( 388 ): >GPRM_HUMAN
VLKSKMKKRVVS

SEQ ID NO: 9072 - protein, 12 aa, Homo sapiens
  ( 378 )...( 389 ): >GPRM_HUMAN
LKSKMKKRVVSI

SEQ ID NO: 9073 - protein, 12 aa, Homo sapiens
  ( 379 )...( 390 ): >GPRM_HUMAN
KSKMKKRVVSIV

SEQ ID NO: 9074 - protein, 12 aa, Homo sapiens
  ( 380 )...( 391 ): >GPRM_HUMAN
SKMKKRVVSIVE

SEQ ID NO: 9075 - protein, 12 aa, Homo sapiens
  ( 381 )...( 392 ): >GPRM_HUMAN
KMKKRVVSIVEA

SEQ ID NO: 9076 - protein, 12 aa, Homo sapiens
  ( 59 )...( 70 ): >GPRO_HUMAN
VLRAKPMSNSQR

SEQ ID NO: 9077 - protein, 12 aa, Homo sapiens
  ( 201 )...( 212 ): >GPRO_HUMAN
TKFRKPSVATLV

SEQ ID NO: 9078 - protein, 12 aa, Homo sapiens
  ( 202 )...( 213 ): >GPRO_HUMAN
KFRKPSVATLVI

SEQ ID NO: 9079 - protein, 12 aa, Homo sapiens
  ( 288 )...( 299 ): >GPRO_HUMAN
VAPASQRSIRLR

SEQ ID NO: 9080 - protein, 12 aa, Homo sapiens
  ( 289 )...( 300 ): >GPRO_HUMAN
APASQRSIRLRT

SEQ ID NO: 9081 - protein, 12 aa, Homo sapiens
  ( 290 )...( 301 ): >GPRO_HUMAN
PASQRSIRLRTK

SEQ ID NO: 9082 - protein, 12 aa, Homo sapiens
  ( 298 )...( 309 ): >GPRO_HUMAN
LRTKRVTRTAIA

SEQ ID NO: 9083 - protein, 12 aa, Homo sapiens
  ( 299 )...( 310 ): >GPRO_HUMAN
RTKRVTRTAIAI

SEQ ID NO: 9084 - protein, 12 aa, Homo sapiens
  ( 300 )...( 311 ): >GPRO_HUMAN
TKRVTRTAIAIC

SEQ ID NO: 9085 - protein, 12 aa, Homo sapiens
  ( 301 )...( 312 ): >GPRO_HUMAN
KRVTRTAIAICL

SEQ ID NO: 9086 - protein, 12 aa, Homo sapiens
  ( 365 )...( 376 ): >GPRO_HUMAN
ETFRKRLVLSVK

SEQ ID NO: 9087 - protein, 12 aa, Homo sapiens
  ( 366 )...( 377 ): >GPRO_HUMAN
TFRKRLVLSVKP

SEQ ID NO: 9088 - protein, 12 aa, Homo sapiens
  ( 367 )...( 378 ): >GPRO_HUMAN
FRKRLVLSVKPA

SEQ ID NO: 9089 - protein, 12 aa, Homo sapiens
  ( 368 )...( 379 ): >GPRO_HUMAN
RKRLVLSVKPAA

SEQ ID NO: 9090 - protein, 12 aa, Homo sapiens
  ( 369 )...( 380 ): >GPRO_HUMAN
KRLVLSVKPAAQ

SEQ ID NO: 9091 - protein, 12 aa, Homo sapiens
  ( 60 )...( 71 ): >GPRP_HUMAN
VVWLLAGRRGPR

SEQ ID NO: 9092 - protein, 12 aa, Homo sapiens
  ( 64 )...( 75 ): >GPRP_HUMAN
LAGRRGPRRLVD

SEQ ID NO: 9093 - protein, 12 aa, Homo sapiens
  ( 65 )...( 76 ): >GPRP_HUMAN
AGRRGPRRLVDT

SEQ ID NO: 9094 - protein, 12 aa, Homo sapiens
  ( 66 )...( 77 ): >GPRP_HUMAN
GRRGPRRLVDTF

SEQ ID NO: 9095 - protein, 12 aa, Homo sapiens
  ( 237 )...( 248 ): >GPRP_HUMAN
ARRNSLRIIFAI

SEQ ID NO: 9096 - protein, 12 aa, Homo sapiens
  ( 322 )...( 333 ): >GPRP_HUMAN
CGRTGRLARRIS

SEQ ID NO: 9097 - protein, 12 aa, Homo sapiens
  ( 323 )...( 334 ): >GPRP_HUMAN
GRTGRLARRISS

SEQ ID NO: 9098 - protein, 12 aa, Homo sapiens
  ( 324 )...( 335 ): >GPRP_HUMAN
RTGRLARRISSA

SEQ ID NO: 9099 - protein, 12 aa, Homo sapiens
  ( 325 )...( 336 ): >GPRP_HUMAN
TGRLARRISSAS

SEQ ID NO: 9100 - protein, 12 aa, Homo sapiens
  ( 326 )...( 337 ): >GPRP_HUMAN
GRLARRISSASS

SEQ ID NO: 9101 - protein, 12 aa, Homo sapiens
  ( 327 )...( 338 ): >GPRP_HUMAN
RLARRISSASSL

SEQ ID NO: 9102 - protein, 12 aa, Homo sapiens
  ( 329 )...( 340 ): >GPRP_HUMAN
ARRISSASSLSR

SEQ ID NO: 9103 - protein, 12 aa, Homo sapiens
  ( 212 )...( 223 ): >GPRS_HUMAN
RKMRPARLVPAV

SEQ ID NO: 9104 - protein, 12 aa, Homo sapiens
  ( 213 )...( 224 ): >GPRS_HUMAN
KMRPARLVPAVS

SEQ ID NO: 9105 - protein, 12 aa, Homo sapiens
  ( 280 )...( 291 ): >GPRS_HUMAN
KRLCKMFYAVTL

SEQ ID NO: 9106 - protein, 12 aa, Homo sapiens
  ( 114 )...( 125 ): >GPRV_HUMAN
LRVVHPRLKVNL

SEQ ID NO: 9107 - protein, 12 aa, Homo sapiens
  ( 115 )...( 126 ): >GPRV_HUMAN
RVVHPRLKVNLL

SEQ ID NO: 9108 - protein, 12 aa, Homo sapiens
  ( 196 )...( 207 ): >GPRV_HUMAN
CNAGIIRALQKR

SEQ ID NO: 9109 - protein, 12 aa, Homo sapiens
  ( 197 )...( 208 ): >GPRV_HUMAN
NAGIIRALQKRL

SEQ ID NO: 9110 - protein, 12 aa, Homo sapiens
  ( 198 )...( 209 ): >GPRV_HUMAN
AGIIRALQKRLR

SEQ ID NO: 9111 - protein, 12 aa, Homo sapiens
  ( 199 )...( 210 ): >GPRV_HUMAN
GIIRALQKRLRE

SEQ ID NO: 9112 - protein, 12 aa, Homo sapiens
  ( 213 )...( 224 ): >GPRV_HUMAN
KQPKLQRAQALV

SEQ ID NO: 9113 - protein, 12 aa, Homo sapiens
  ( 294 )...( 305 ): >GPRV_HUMAN
RRVFHTLRGKGQ

SEQ ID NO: 9114 - protein, 12 aa, Homo sapiens
  ( 295 )...( 306 ): >GPRV_HUMAN
RVFHTLRGKGQA

SEQ ID NO: 9115 - protein, 12 aa, Homo sapiens
  ( 17 )...( 28 ): >GPRW_HUMAN
GVLTRDRSCSRK

SEQ ID NO: 9116 - protein, 12 aa, Homo sapiens
  ( 18 )...( 29 ): >GPRW_HUMAN
VLTRDRSCSRKM

SEQ ID NO: 9117 - protein, 12 aa, Homo sapiens
  ( 172 )...( 183 ): >GPRW_HUMAN
LCSAHLKFRTTR

SEQ ID NO: 9118 - protein, 12 aa, Homo sapiens
  ( 173 )...( 184 ): >GPRW_HUMAN
CSAHLKFRTTRK

SEQ ID NO: 9119 - protein, 12 aa, Homo sapiens
  ( 234 )...( 245 ): >GPRW_HUMAN
TCAHLIRAKLLR

SEQ ID NO: 9120 - protein, 12 aa, Homo sapiens
  ( 249 )...( 260 ): >GPRW_HUMAN
VHANRPKRLLLV

SEQ ID NO: 9121 - protein, 12 aa, Homo sapiens
  ( 250 )...( 261 ): >GPRW_HUMAN
HANRPKRLLLVL

SEQ ID NO: 9122 - protein, 12 aa, Homo sapiens
  ( 251 )...( 262 ): >GPRW_HUMAN
ANRPKRLLLVLV

SEQ ID NO: 9123 - protein, 12 aa, Homo sapiens
  ( 252 )...( 263 ): >GPRW_HUMAN
NRPKRLLLVLVS

SEQ ID NO: 9124 - protein, 12 aa, Homo sapiens
  ( 253 )...( 264 ): >GPRW_HUMAN
RPKRLLLVLVSA

SEQ ID NO: 9125 - protein, 12 aa, Homo sapiens
  ( 75 )...( 86 ): >GPRY_HUMAN
ALYVFLGIHRKR

SEQ ID NO: 9126 - protein, 12 aa, Homo sapiens
  ( 78 )...( 89 ): >GPRY_HUMAN
VFLGIHRKRNSI

SEQ ID NO: 9127 - protein, 12 aa, Homo sapiens
  ( 80 )...( 91 ): >GPRY_HUMAN
LGIHRKRNSIQI

SEQ ID NO: 9128 - protein, 12 aa, Homo sapiens
  ( 156 )...( 167 ): >GPRY_HUMAN
INRSIQQRKAIT

SEQ ID NO: 9129 - protein, 12 aa, Homo sapiens
  ( 157 )...( 168 ): >GPRY_HUMAN
NRSIQQRKAITT

SEQ ID NO: 9130 - protein, 12 aa, Homo sapiens
  ( 158 )...( 169 ): >GPRY_HUMAN
RSIQQRKAITTK

SEQ ID NO: 9131 - protein, 12 aa, Homo sapiens
  ( 159 )...( 170 ): >GPRY_HUMAN
SIQQRKAITTKQ

SEQ ID NO: 9132 - protein, 12 aa, Homo sapiens
  ( 160 )...( 171 ): >GPRY_HUMAN
IQQRKAITTKQS

SEQ ID NO: 9133 - protein, 12 aa, Homo sapiens
  ( 161 )...( 172 ): >GPRY_HUMAN
QQRKAITTKQSI

SEQ ID NO: 9134 - protein, 12 aa, Homo sapiens
  ( 162 )...( 173 ): >GPRY_HUMAN
QRKAITTKQSIY

SEQ ID NO: 9135 - protein, 12 aa, Homo sapiens
  ( 163 )...( 174 ): >GPRY_HUMAN
RKAITTKQSIYV

SEQ ID NO: 9136 - protein, 12 aa, Homo sapiens
  ( 236 )...( 247 ): >GPRY_HUMAN
LSYIKIGKNLLR

SEQ ID NO: 9137 - protein, 12 aa, Homo sapiens
  ( 237 )...( 248 ): >GPRY_HUMAN
SYIKIGKNLLRI

SEQ ID NO: 9138 - protein, 12 aa, Homo sapiens
  ( 238 )...( 249 ): >GPRY_HUMAN
YIKIGKNLLRIS

SEQ ID NO: 9139 - protein, 12 aa, Homo sapiens
  ( 239 )...( 250 ): >GPRY_HUMAN
IKIGKNLLRISK

SEQ ID NO: 9140 - protein, 12 aa, Homo sapiens
  ( 240 )...( 251 ): >GPRY_HUMAN
KIGKNLLRISKR

SEQ ID NO: 9141 - protein, 12 aa, Homo sapiens
  ( 115 )...( 126 ): >GPRZ_HUMAN
YVAVRHPLRARG

SEQ ID NO: 9142 - protein, 12 aa, Homo sapiens
  ( 116 )...( 127 ): >GPRZ_HUMAN
VAVRHPLRARGL

SEQ ID NO: 9143 - protein, 12 aa, Homo sapiens
  ( 117 )...( 128 ): >GPRZ_HUMAN
AVRHPLRARGLR

SEQ ID NO: 9144 - protein, 12 aa, Homo sapiens
  ( 118 )...( 129 ): >GPRZ_HUMAN
VRHPLRARGLRS

SEQ ID NO: 9145 - protein, 12 aa, Homo sapiens
  ( 124 )...( 135 ): >GPRZ_HUMAN
ARGLRSPRQAAA

SEQ ID NO: 9146 - protein, 12 aa, Homo sapiens
  ( 125 )...( 136 ): >GPRZ_HUMAN
RGLRSPRQAAAV

SEQ ID NO: 9147 - protein, 12 aa, Homo sapiens
  ( 211 )...( 222 ): >GPRZ_HUMAN
ATRKAARMVWAN

SEQ ID NO: 9148 - protein, 12 aa, Homo sapiens
  ( 212 )...( 223 ): >GPRZ_HUMAN
TRKAARMVWANL

SEQ ID NO: 9149 - protein, 12 aa, Homo sapiens
  ( 213 )...( 224 ): >GPRZ_HUMAN
RKAARMVWANLL

SEQ ID NO: 9150 - protein, 12 aa, Homo sapiens
  ( 253 )...( 264 ): >GPRZ_HUMAN
TIRRALYITSKL

SEQ ID NO: 9151 - protein, 12 aa, Homo sapiens
  ( 254 )...( 265 ): >GPRZ_HUMAN
IRRALYITSKLS

SEQ ID NO: 9152 - protein, 12 aa, Homo sapiens
  ( 150 )...( 161 ): >GRFR_HUMAN
ILVALRRLHCPR

SEQ ID NO: 9153 - protein, 12 aa, Homo sapiens
  ( 404 )...( 415 ): >GRFR_HUMAN
TRAKWTTPSRSA

SEQ ID NO: 9154 - protein, 12 aa, Homo sapiens
  ( 64 )...( 75 ): >GRHR_HUMAN
TQKKEKGKKLSR

SEQ ID NO: 9155 - protein, 12 aa, Homo sapiens
  ( 67 )...( 78 ): >GRHR_HUMAN
KEKGKKLSRMKL

SEQ ID NO: 9156 - protein, 12 aa, Homo sapiens
  ( 68 )...( 79 ): >GRHR_HUMAN
EKGKKLSRMKLL

SEQ ID NO: 9157 - protein, 12 aa, Homo sapiens
  ( 69 )...( 80 ): >GRHR_HUMAN
KGKKLSRMKLLL

SEQ ID NO: 9158 - protein, 12 aa, Homo sapiens
  ( 70 )...( 81 ): >GRHR_HUMAN
GKKLSRMKLLLK

SEQ ID NO: 9159 - protein, 12 aa, Homo sapiens
  ( 72 )...( 83 ): >GRHR_HUMAN
KLSRMKLLLKHL

SEQ ID NO: 9160 - protein, 12 aa, Homo sapiens
  ( 75 )...( 86 ): >GRHR_HUMAN
RMKLLLKHLTLA

SEQ ID NO: 9161 - protein, 12 aa, Homo sapiens
  ( 139 )...( 150 ): >GRHR_HUMAN
RSLAITRPLALK

SEQ ID NO: 9162 - protein, 12 aa, Homo sapiens
  ( 143 )...( 154 ): >GRHR_HUMAN
ITRPLALKSNSK

SEQ ID NO: 9163 - protein, 12 aa, Homo sapiens
  ( 144 )...( 155 ): >GRHR_HUMAN
TRPLALKSNSKV

SEQ ID NO: 9164 - protein, 12 aa, Homo sapiens
  ( 145 )...( 156 ): >GRHR_HUMAN
RPLALKSNSKVG

SEQ ID NO: 9165 - protein, 12 aa, Homo sapiens
  ( 257 )...( 268 ): >GRHR_HUMAN
NIPRARLKTLKM

SEQ ID NO: 9166 - protein, 12 aa, Homo sapiens
  ( 258 )...( 269 ): >GRHR_HUMAN
IPRARLKTLKMT

SEQ ID NO: 9167 - protein, 12 aa, Homo sapiens
  ( 259 )...( 270 ): >GRHR_HUMAN
PRARLKTLKMTV

SEQ ID NO: 9168 - protein, 12 aa, Homo sapiens
  ( 260 )...( 271 ): >GRHR_HUMAN
RARLKTLKMTVA

SEQ ID NO: 9169 - protein, 12 aa, Homo sapiens
  ( 261 )...( 272 ): >GRHR_HUMAN
ARLKTLKMTVAF

SEQ ID NO: 9170 - protein, 12 aa, Homo sapiens
  ( 262 )...( 273 ): >GRHR_HUMAN
RLKTLKMTVAFA

SEQ ID NO: 9171 - protein, 12 aa, Homo sapiens
  ( 61 )...( 72 ): >GRPR_HUMAN
LIKIFCTVKSMR

SEQ ID NO: 9172 - protein, 12 aa, Homo sapiens
  ( 62 )...( 73 ): >GRPR_HUMAN
IKIFCTVKSMRN

SEQ ID NO: 9173 - protein, 12 aa, Homo sapiens
  ( 63 )...( 74 ): >GRPR_HUMAN
KIFCTVKSMRNV

SEQ ID NO: 9174 - protein, 12 aa, Homo sapiens
  ( 105 )...( 116 ): >GRPR_HUMAN
RWLFGRIGCKLI

SEQ ID NO: 9175 - protein, 12 aa, Homo sapiens
  ( 252 )...( 263 ): >GRPR_HUMAN
VKKQIESRKRLA

SEQ ID NO: 9176 - protein, 12 aa, Homo sapiens
  ( 254 )...( 265 ): >GRPR_HUMAN
KQIESRKRLAKT

SEQ ID NO: 9177 - protein, 12 aa, Homo sapiens
  ( 255 )...( 266 ): >GRPR_HUMAN
QIESRKRLAKTV

SEQ ID NO: 9178 - protein, 12 aa, Homo sapiens
  ( 256 )...( 267 ): >GRPR_HUMAN
IESRKRLAKTVL

SEQ ID NO: 9179 - protein, 12 aa, Homo sapiens
  ( 257 )...( 268 ): >GRPR_HUMAN
ESRKRLAKTVLV

SEQ ID NO: 9180 - protein, 12 aa, Homo sapiens
  ( 258 )...( 269 ): >GRPR_HUMAN
SRKRLAKTVLVF

SEQ ID NO: 9181 - protein, 12 aa, Homo sapiens
  ( 259 )...( 270 ): >GRPR_HUMAN
RKRLAKTVLVFV

SEQ ID NO: 9182 - protein, 12 aa, Homo sapiens
  ( 260 )...( 271 ): >GRPR_HUMAN
KRLAKTVLVFVG

SEQ ID NO: 9183 - protein, 12 aa, Homo sapiens
  ( 304 )...( 315 ): >H963_HUMAN
KETKAQKEKLRC

SEQ ID NO: 9184 - protein, 12 aa, Homo sapiens
  ( 136 )...( 147 ): >HH1R_HUMAN
LKYRTKTRASAT

SEQ ID NO: 9185 - protein, 12 aa, Homo sapiens
  ( 137 )...( 148 ): >HH1R_HUMAN
KYRTKTRASATI

SEQ ID NO: 9186 - protein, 12 aa, Homo sapiens
  ( 138 )...( 149 ): >HH1R_HUMAN
YRTKTRASATIL

SEQ ID NO: 9187 - protein, 12 aa, Homo sapiens
  ( 211 )...( 222 ): >HH1R_HUMAN
AKIYKAVRQHCQ

SEQ ID NO: 9188 - protein, 12 aa, Homo sapiens
  ( 407 )...( 418 ): >HH1R_HUMAN
MNRERKAAKQLG

SEQ ID NO: 9189 - protein, 12 aa, Homo sapiens
  ( 409 )...( 420 ): >HH1R_HUMAN
RERKAAKQLGFI

SEQ ID NO: 9190 - protein, 12 aa, Homo sapiens
  ( 411 )...( 422 ): >HH1R_HUMAN
RKAAKQLGFIMA

SEQ ID NO: 9191 - protein, 12 aa, Homo sapiens
  ( 39 )...( 50 ): >HH2R_HUMAN
VCLAVGLNRRLR

SEQ ID NO: 9192 - protein, 12 aa, Homo sapiens
  ( 40 )...( 51 ): >HH2R_HUMAN
CLAVGLNRRLRN

SEQ ID NO: 9193 - protein, 12 aa, Homo sapiens
  ( 41 )...( 52 ): >HH2R_HUMAN
LAVGLNRRLRNL

SEQ ID NO: 9194 - protein, 12 aa, Homo sapiens
  ( 42 )...( 53 ): >HH2R_HUMAN
AVGLNRRLRNLT

SEQ ID NO: 9195 - protein, 12 aa, Homo sapiens
  ( 43 )...( 54 ): >HH2R_HUMAN
VGLNRRLRNLTN

SEQ ID NO: 9196 - protein, 12 aa, Homo sapiens
  ( 205 )...( 216 ): >HH2R_HUMAN
IFKVARDQAKRI

SEQ ID NO: 9197 - protein, 12 aa, Homo sapiens
  ( 97 )...( 108 ): >HH3R_HUMAN
TGRWTFGRGLCK

SEQ ID NO: 9198 - protein, 12 aa, Homo sapiens
  ( 98 )...( 109 ): >HH3R_HUMAN
GRWTFGRGLCKL

SEQ ID NO: 9199 - protein, 12 aa, Homo sapiens
  ( 132 )...( 143 ): >HH3R_HUMAN
RFLSVTRAVSYR

SEQ ID NO: 9200 - protein, 12 aa, Homo sapiens
  ( 143 )...( 154 ): >HH3R_HUMAN
RAQQGDTRRAVR

SEQ ID NO: 9201 - protein, 12 aa, Homo sapiens
  ( 144 )...( 155 ): >HH3R_HUMAN
AQQGDTRRAVRK

SEQ ID NO: 9202 - protein, 12 aa, Homo sapiens
  ( 145 )...( 156 ): >HH3R_HUMAN
QQGDTRRAVRKM

SEQ ID NO: 9203 - protein, 12 aa, Homo sapiens
  ( 146 )...( 157 ): >HH3R_HUMAN
QGDTRRAVRKML

SEQ ID NO: 9204 - protein, 12 aa, Homo sapiens
  ( 147 )...( 158 ): >HH3R_HUMAN
GDTRRAVRKMLL

SEQ ID NO: 9205 - protein, 12 aa, Homo sapiens
  ( 148 )...( 159 ): >HH3R_HUMAN
DTRRAVRKMLLV

SEQ ID NO: 9206 - protein, 12 aa, Homo sapiens
  ( 225 )...( 236 ): >HH3R_HUMAN
IQRRTRLRLDGA

SEQ ID NO: 9207 - protein, 12 aa, Homo sapiens
  ( 310 )...( 321 ): >HH3R_HUMAN
SSRGTERPRSLK

SEQ ID NO: 9208 - protein, 12 aa, Homo sapiens
  ( 312 )...( 323 ): >HH3R_HUMAN
RGTERPRSLKRG

SEQ ID NO: 9209 - protein, 12 aa, Homo sapiens
  ( 313 )...( 324 ): >HH3R_HUMAN
GTERPRSLKRGS

SEQ ID NO: 9210 - protein, 12 aa, Homo sapiens
  ( 335 )...( 346 ): >HH3R_HUMAN
KRMKMVSQSFTQ

SEQ ID NO: 9211 - protein, 12 aa, Homo sapiens
  ( 350 )...( 361 ): >HH3R_HUMAN
LSRDRKVAKSLA

SEQ ID NO: 9212 - protein, 12 aa, Homo sapiens
  ( 351 )...( 362 ): >HH3R_HUMAN
SRDRKVAKSLAV

SEQ ID NO: 9213 - protein, 12 aa, Homo sapiens
  ( 352 )...( 363 ): >HH3R_HUMAN
RDRKVAKSLAVI

SEQ ID NO: 9214 - protein, 12 aa, Homo sapiens
  ( 421 )...( 432 ): >HH3R_HUMAN
RAFTKLLCPQKL

SEQ ID NO: 9215 - protein, 12 aa, Homo sapiens
  ( 422 )...( 433 ): >HH3R_HUMAN
AFTKLLCPQKLK

SEQ ID NO: 9216 - protein, 12 aa, Homo sapiens
  ( 423 )...( 434 ): >HH3R_HUMAN
FTKLLCPQKLKI

SEQ ID NO: 9217 - protein, 12 aa, Homo sapiens
  ( 424 )...( 435 ): >HH3R_HUMAN
TKLLCPQKLKIQ

SEQ ID NO: 9218 - protein, 12 aa, Homo sapiens
  ( 425 )...( 436 ): >HH3R_HUMAN
KLLCPQKLKIQP

SEQ ID NO: 9219 - protein, 12 aa, Homo sapiens
  ( 229 )...( 240 ): >HH4R_HUMAN
RGRLSSRRSLSA

SEQ ID NO: 9220 - protein, 12 aa, Homo sapiens
  ( 230 )...( 241 ): >HH4R_HUMAN
GRLSSRRSLSAS

SEQ ID NO: 9221 - protein, 12 aa, Homo sapiens
  ( 231 )...( 242 ): >HH4R_HUMAN
RLSSRRSLSAST

SEQ ID NO: 9222 - protein, 12 aa, Homo sapiens
  ( 292 )...( 303 ): >HH4R_HUMAN
HVELLRARRLAK

SEQ ID NO: 9223 - protein, 12 aa, Homo sapiens
  ( 293 )...( 304 ): >HH4R_HUMAN
VELLRARRLAKS

SEQ ID NO: 9224 - protein, 12 aa, Homo sapiens
  ( 294 )...( 305 ): >HH4R_HUMAN
ELLRARRLAKSL

SEQ ID NO: 9225 - protein, 12 aa, Homo sapiens
  ( 295 )...( 306 ): >HH4R_HUMAN
LLRARRLAKSLA

SEQ ID NO: 9226 - protein, 12 aa, Homo sapiens
  ( 296 )...( 307 ): >HH4R_HUMAN
LRARRLAKSLAI

SEQ ID NO: 9227 - protein, 12 aa, Homo sapiens
  ( 297 )...( 308 ): >HH4R_HUMAN
RARRLAKSLAIL

SEQ ID NO: 9228 - protein, 12 aa, Homo sapiens
  ( 298 )...( 309 ): >HH4R_HUMAN
ARRLAKSLAILL

SEQ ID NO: 9229 - protein, 12 aa, Homo sapiens
  ( 299 )...( 310 ): >HH4R_HUMAN
RRLAKSLAILLG

SEQ ID NO: 9230 - protein, 12 aa, Homo sapiens
  ( 366 )...( 377 ): >HH4R_HUMAN
QKAFLKIFCIKK

SEQ ID NO: 9231 - protein, 12 aa, Homo sapiens
  ( 367 )...( 378 ): >HH4R_HUMAN
KAFLKIFCIKKQ

SEQ ID NO: 9232 - protein, 12 aa, Homo sapiens
  ( 162 )...( 173 ): >HM74_HUMAN
LLKKKLLIQNGP

SEQ ID NO: 9233 - protein, 12 aa, Homo sapiens
  ( 163 )...( 174 ): >HM74_HUMAN
LKKKLLIQNGPA

SEQ ID NO: 9234 - protein, 12 aa, Homo sapiens
  ( 164 )...( 175 ): >HM74_HUMAN
KKKLLIQNGPAN

SEQ ID NO: 9235 - protein, 12 aa, Homo sapiens
  ( 220 )...( 231 ): >HM74_HUMAN
MDRHAKIKRAIT

SEQ ID NO: 9236 - protein, 12 aa, Homo sapiens
  ( 222 )...( 233 ): >HM74_HUMAN
RHAKIKRAITFI

SEQ ID NO: 9237 - protein, 12 aa, Homo sapiens
  ( 223 )...( 234 ): >HM74_HUMAN
HAKIKRAITFIM

SEQ ID NO: 9238 - protein, 12 aa, Homo sapiens
  ( 224 )...( 235 ): >HM74_HUMAN
AKIKRAITFIMV

SEQ ID NO: 9239 - protein, 12 aa, Homo sapiens
  ( 306 )...( 317 ): >HM74_HUMAN
STLINRCLQRKM

SEQ ID NO: 9240 - protein, 12 aa, Homo sapiens
  ( 307 )...( 318 ): >HM74_HUMAN
TLINRCLQRKMT

SEQ ID NO: 9241 - protein, 12 aa, Homo sapiens
  ( 308 )...( 319 ): >HM74_HUMAN
LINRCLQRKMTG

SEQ ID NO: 9242 - protein, 12 aa, Homo sapiens
  ( 139 )...( 150 ): >IL8A_HUMAN
IVHATRTLTQKR

SEQ ID NO: 9243 - protein, 12 aa, Homo sapiens
  ( 142 )...( 153 ): >IL8A_HUMAN
ATRTLTQKRHLV

SEQ ID NO: 9244 - protein, 12 aa, Homo sapiens
  ( 143 )...( 154 ): >IL8A_HUMAN
TRTLTQKRHLVK

SEQ ID NO: 9245 - protein, 12 aa, Homo sapiens
  ( 146 )...( 157 ): >IL8A_HUMAN
LTQKRHLVKFVC

SEQ ID NO: 9246 - protein, 12 aa, Homo sapiens
  ( 147 )...( 158 ): >IL8A_HUMAN
TQKRHLVKFVCL

SEQ ID NO: 9247 - protein, 12 aa, Homo sapiens
  ( 148 )...( 159 ): >IL8A_HUMAN
QKRHLVKFVCLG

SEQ ID NO: 9248 - protein, 12 aa, Homo sapiens
  ( 226 )...( 237 ): >IL8A_HUMAN
LRTLFKAHMGQK

SEQ ID NO: 9249 - protein, 12 aa, Homo sapiens
  ( 232 )...( 243 ): >IL8A_HUMAN
AHMGQKHRAMRV

SEQ ID NO: 9250 - protein, 12 aa, Homo sapiens
  ( 233 )...( 244 ): >IL8A_HUMAN
HMGQKHRAMRVI

SEQ ID NO: 9251 - protein, 12 aa, Homo sapiens
  ( 234 )...( 245 ): >IL8A_HUMAN
MGQKHRAMRVIF

SEQ ID NO: 9252 - protein, 12 aa, Homo sapiens
  ( 235 )...( 246 ): >IL8A_HUMAN
GQKHRAMRVIFA

SEQ ID NO: 9253 - protein, 12 aa, Homo sapiens
  ( 236 )...( 247 ): >IL8A_HUMAN
QKHRAMRVIFAV

SEQ ID NO: 9254 - protein, 12 aa, Homo sapiens
  ( 237 )...( 248 ): >IL8A_HUMAN
KHRAMRVIFAVV

SEQ ID NO: 9255 - protein, 12 aa, Homo sapiens
  ( 148 )...( 159 ): >IL8B_HUMAN
IVHATRTLTQKR

SEQ ID NO: 9256 - protein, 12 aa, Homo sapiens
  ( 149 )...( 160 ): >IL8B_HUMAN
VHATRTLTQKRY

SEQ ID NO: 9257 - protein, 12 aa, Homo sapiens
  ( 150 )...( 161 ): >IL8B_HUMAN
HATRTLTQKRYL

SEQ ID NO: 9258 - protein, 12 aa, Homo sapiens
  ( 151 )...( 162 ): >IL8B_HUMAN
ATRTLTQKRYLV

SEQ ID NO: 9259 - protein, 12 aa, Homo sapiens
  ( 152 )...( 163 ): >IL8B_HUMAN
TRTLTQKRYLVK

SEQ ID NO: 9260 - protein, 12 aa, Homo sapiens
  ( 155 )...( 166 ): >IL8B_HUMAN
LTQKRYLVKFIC

SEQ ID NO: 9261 - protein, 12 aa, Homo sapiens
  ( 156 )...( 167 ): >IL8B_HUMAN
TQKRYLVKFICL

SEQ ID NO: 9262 - protein, 12 aa, Homo sapiens
  ( 157 )...( 168 ): >IL8B_HUMAN
QKRYLVKFICLS

SEQ ID NO: 9263 - protein, 12 aa, Homo sapiens
  ( 235 )...( 246 ): >IL8B_HUMAN
LRTLFKAHMGQK

SEQ ID NO: 9264 - protein, 12 aa, Homo sapiens
  ( 241 )...( 252 ): >IL8B_HUMAN
AHMGQKHRAMRV

SEQ ID NO: 9265 - protein, 12 aa, Homo sapiens
  ( 242 )...( 253 ): >IL8B_HUMAN
HMGQKHRAMRVI

SEQ ID NO: 9266 - protein, 12 aa, Homo sapiens
  ( 243 )...( 254 ): >IL8B_HUMAN
MGQKHRAMRVIF

SEQ ID NO: 9267 - protein, 12 aa, Homo sapiens
  ( 244 )...( 255 ): >IL8B_HUMAN
GQKHRAMRVIFA

SEQ ID NO: 9268 - protein, 12 aa, Homo sapiens
  ( 245 )...( 256 ): >IL8B_HUMAN
QKHRAMRVIFAV

SEQ ID NO: 9269 - protein, 12 aa, Homo sapiens
  ( 246 )...( 257 ): >IL8B_HUMAN
KHRAMRVIFAVV

SEQ ID NO: 9270 - protein, 12 aa, Homo sapiens
  ( 316 )...( 327 ): >IL8B_HUMAN
FIGQKFRHGLLK

SEQ ID NO: 9271 - protein, 12 aa, Homo sapiens
  ( 317 )...( 328 ): >IL8B_HUMAN
IGQKFRHGLLKI

SEQ ID NO: 9272 - protein, 12 aa, Homo sapiens
  ( 318 )...( 329 ): >IL8B_HUMAN
GQKFRHGLLKIL

SEQ ID NO: 9273 - protein, 12 aa, Homo sapiens
  ( 319 )...( 330 ): >IL8B_HUMAN
QKFRHGLLKILA

SEQ ID NO: 9274 - protein, 12 aa, Homo sapiens
  ( 320 )...( 331 ): >IL8B_HUMAN
KFRHGLLKILAI

SEQ ID NO: 9275 - protein, 12 aa, Homo sapiens
  ( 208 )...( 219 ): >KI01_HUMAN
AITKKIFKSHLK

SEQ ID NO: 9276 - protein, 12 aa, Homo sapiens
  ( 218 )...( 229 ): >KI01_HUMAN
LKSSRNSTSVKK

SEQ ID NO: 9277 - protein, 12 aa, Homo sapiens
  ( 224 )...( 235 ): >KI01_HUMAN
STSVKKKSSRNI

SEQ ID NO: 9278 - protein, 12 aa, Homo sapiens
  ( 225 )...( 236 ): >KI01_HUMAN
TSVKKKSSRNIF

SEQ ID NO: 9279 - protein, 12 aa, Homo sapiens
  ( 227 )...( 238 ): >KI01_HUMAN
VKKKSSRNIFSI

SEQ ID NO: 9280 - protein, 12 aa, Homo sapiens
  ( 228 )...( 239 ): >KI01_HUMAN
KKKSSRNIFSIV

SEQ ID NO: 9281 - protein, 12 aa, Homo sapiens
  ( 1 )...( 12 ): >LSHR_HUMAN
MKQRFSALQLLK

SEQ ID NO: 9282 - protein, 12 aa, Homo sapiens
  ( 2 )...( 13 ): >LSHR_HUMAN
KQRFSALQLLKL

SEQ ID NO: 9283 - protein, 12 aa, Homo sapiens
  ( 126 )...( 137 ): >LSHR_HUMAN
KYLSICNTGIRK

SEQ ID NO: 9284 - protein, 12 aa, Homo sapiens
  ( 384 )...( 395 ): >LSHR_HUMAN
LLTSRYKLTVPR

SEQ ID NO: 9285 - protein, 12 aa, Homo sapiens
  ( 385 )...( 396 ): >LSHR_HUMAN
LTSRYKLTVPRF

SEQ ID NO: 9286 - protein, 12 aa, Homo sapiens
  ( 386 )...( 397 ): >LSHR_HUMAN
TSRYKLTVPRFL

SEQ ID NO: 9287 - protein, 12 aa, Homo sapiens
  ( 476 )...( 487 ): >LSHR_HUMAN
QKLRLRHAILIM

SEQ ID NO: 9288 - protein, 12 aa, Homo sapiens
  ( 205 )...( 216 ): >MAS_HUMAN
VSSTILVVKIRK

SEQ ID NO: 9289 - protein, 12 aa, Homo sapiens
  ( 206 )...( 217 ): >MAS_HUMAN
SSTILVVKIRKN

SEQ ID NO: 9290 - protein, 12 aa, Homo sapiens
  ( 207 )...( 218 ): >MAS_HUMAN
STILVVKIRKNT

SEQ ID NO: 9291 - protein, 12 aa, Homo sapiens
  ( 208 )...( 219 ): >MAS_HUMAN
TILVVKIRKNTW

SEQ ID NO: 9292 - protein, 12 aa, Homo sapiens
  ( 209 )...( 220 ): >MAS_HUMAN
ILVVKIRKNTWA

SEQ ID NO: 9293 - protein, 12 aa, Homo sapiens
  ( 210 )...( 221 ): >MAS_HUMAN
LVVKIRKNTWAS

SEQ ID NO: 9294 - protein, 12 aa, Homo sapiens
  ( 211 )...( 222 ): >MAS_HUMAN
VVKIRKNTWASH

SEQ ID NO: 9295 - protein, 12 aa, Homo sapiens
  ( 283 )...( 294 ): >MAS_HUMAN
VGSSKKKRFKES

SEQ ID NO: 9296 - protein, 12 aa, Homo sapiens
  ( 284 )...( 295 ): >MAS_HUMAN
GSSKKKRFKESL

SEQ ID NO: 9297 - protein, 12 aa, Homo sapiens
  ( 288 )...( 299 ): >MAS_HUMAN
KKRFKESLKVVL

SEQ ID NO: 9298 - protein, 12 aa, Homo sapiens
  ( 289 )...( 300 ): >MAS_HUMAN
KRFKESLKVVLT

SEQ ID NO: 9299 - protein, 12 aa, Homo sapiens
  ( 290 )...( 301 ): >MAS_HUMAN
RFKESLKVVLTR

SEQ ID NO: 9300 - protein, 12 aa, Homo sapiens
  ( 186 )...( 197 ): >MC3R_HUMAN
ALRYHSIMTVRK

SEQ ID NO: 9301 - protein, 12 aa, Homo sapiens
  ( 187 )...( 198 ): >MC3R_HUMAN
LRYHSIMTVRKA

SEQ ID NO: 9302 - protein, 12 aa, Homo sapiens
  ( 188 )...( 199 ): >MC3R_HUMAN
RYHSIMTVRKAL

SEQ ID NO: 9303 - protein, 12 aa, Homo sapiens
  ( 249 )...( 260 ): >MC3R_HUMAN
LFARLHVKRIAA

SEQ ID NO: 9304 - protein, 12 aa, Homo sapiens
  ( 250 )...( 261 ): >MC3R_HUMAN
FARLHVKRIAAL

SEQ ID NO: 9305 - protein, 12 aa, Homo sapiens
  ( 251 )...( 262 ): >MC3R_HUMAN
ARLHVKRIAALP

SEQ ID NO: 9306 - protein, 12 aa, Homo sapiens
  ( 252 )...( 263 ): >MC3R_HUMAN
RLHVKRIAALPP

SEQ ID NO: 9307 - protein, 12 aa, Homo sapiens
  ( 216 )...( 227 ): >MC4R_HUMAN
FLMARLHIKRIA

SEQ ID NO: 9308 - protein, 12 aa, Homo sapiens
  ( 217 )...( 228 ): >MC4R_HUMAN
LMARLHIKRIAV

SEQ ID NO: 9309 - protein, 12 aa, Homo sapiens
  ( 218 )...( 229 ): >MC4R_HUMAN
MARLHIKRIAVL

SEQ ID NO: 9310 - protein, 12 aa, Homo sapiens
  ( 219 )...( 230 ): >MC4R_HUMAN
ARLHIKRIAVLP

SEQ ID NO: 9311 - protein, 12 aa, Homo sapiens
  ( 220 )...( 231 ): >MC4R_HUMAN
RLHIKRIAVLPG

SEQ ID NO: 9312 - protein, 12 aa, Homo sapiens
  ( 208 )...( 219 ): >MC5R_HUMAN
MFLLARTHVKRI

SEQ ID NO: 9313 - protein, 12 aa, Homo sapiens
  ( 209 )...( 220 ): >MC5R_HUMAN
FLLARTHVKRIA

SEQ ID NO: 9314 - protein, 12 aa, Homo sapiens
  ( 210 )...( 221 ): >MC5R_HUMAN
LLARTHVKRIAA

SEQ ID NO: 9315 - protein, 12 aa, Homo sapiens
  ( 211 )...( 222 ): >MC5R_HUMAN
LARTHVKRIAAL

SEQ ID NO: 9316 - protein, 12 aa, Homo sapiens
  ( 212 )...( 223 ): >MC5R_HUMAN
ARTHVKRIAALP

SEQ ID NO: 9317 - protein, 12 aa, Homo sapiens
  ( 213 )...( 224 ): >MC5R_HUMAN
RTHVKRIAALPG

SEQ ID NO: 9318 - protein, 12 aa, Homo sapiens
  ( 302 )...( 313 ): >MC5R_HUMAN
MRKTFKEIICCR

SEQ ID NO: 9319 - protein, 12 aa, Homo sapiens
  ( 303 )...( 314 ): >MC5R_HUMAN
RKTFKEIICCRG

SEQ ID NO: 9320 - protein, 12 aa, Homo sapiens
  ( 16 )...( 27 ): >MGR1_HUMAN
VSLLPRSPGRKV

SEQ ID NO: 9321 - protein, 12 aa, Homo sapiens
  ( 17 )...( 28 ): >MGR1_HUMAN
SLLPRSPGRKVL

SEQ ID NO: 9322 - protein, 12 aa, Homo sapiens
  ( 18 )...( 29 ): >MGR1_HUMAN
LLPRSPGRKVLL

SEQ ID NO: 9323 - protein, 12 aa, Homo sapiens
  ( 19 )...( 30 ): >MGR1_HUMAN
LPRSPGRKVLLA

SEQ ID NO: 9324 - protein, 12 aa, Homo sapiens
  ( 20 )...( 31 ): >MGR1_HUMAN
PRSPGRKVLLAG

SEQ ID NO: 9325 - protein, 12 aa, Homo sapiens
  ( 25 )...( 36 ): >MGR1_HUMAN
RKVLLAGASSQR

SEQ ID NO: 9326 - protein, 12 aa, Homo sapiens
  ( 145 )...( 156 ): >MGR1_HUMAN
QSLPPGRTKKPI

SEQ ID NO: 9327 - protein, 12 aa, Homo sapiens
  ( 276 )...( 287 ): >MGR1_HUMAN
KLRERLPKARVV

SEQ ID NO: 9328 - protein, 12 aa, Homo sapiens
  ( 277 )...( 288 ): >MGR1_HUMAN
LRERLPKARVVV

SEQ ID NO: 9329 - protein, 12 aa, Homo sapiens
  ( 278 )...( 289 ): >MGR1_HUMAN
RERLPKARVVVC

SEQ ID NO: 9330 - protein, 12 aa, Homo sapiens
  ( 294 )...( 305 ): >MGR1_HUMAN
MTVRGLLSAMRR

SEQ ID NO: 9331 - protein, 12 aa, Homo sapiens
  ( 295 )...( 306 ): >MGR1_HUMAN
TVRGLLSAMRRL

SEQ ID NO: 9332 - protein, 12 aa, Homo sapiens
  ( 296 )...( 307 ): >MGR1_HUMAN
VRGLLSAMRRLG

SEQ ID NO: 9333 - protein, 12 aa, Homo sapiens
  ( 297 )...( 308 ): >MGR1_HUMAN
RGLLSAMRRLGV

SEQ ID NO: 9334 - protein, 12 aa, Homo sapiens
  ( 510 )...( 521 ): >MGR1_HUMAN
YKIQMNKSGVVR

SEQ ID NO: 9335 - protein, 12 aa, Homo sapiens
  ( 511 )...( 522 ): >MGR1_HUMAN
KIQMNKSGVVRS

SEQ ID NO: 9336 - protein, 12 aa, Homo sapiens
  ( 527 )...( 538 ): >MGR1_HUMAN
PCLKGQIKVIRK

SEQ ID NO: 9337 - protein, 12 aa, Homo sapiens
  ( 528 )...( 539 ): >MGR1_HUMAN
CLKGQIKVIRKG

SEQ ID NO: 9338 - protein, 12 aa, Homo sapiens
  ( 529 )...( 540 ): >MGR1_HUMAN
LKGQIKVIRKGE

SEQ ID NO: 9339 - protein, 12 aa, Homo sapiens
  ( 530 )...( 541 ): >MGR1_HUMAN
KGQIKVIRKGEV

SEQ ID NO: 9340 - protein, 12 aa, Homo sapiens
  ( 673 )...( 684 ): >MGR1_HUMAN
SALVTKTNRIAR

SEQ ID NO: 9341 - protein, 12 aa, Homo sapiens
  ( 674 )...( 685 ): >MGR1_HUMAN
ALVTKTNRIARI

SEQ ID NO: 9342 - protein, 12 aa, Homo sapiens
  ( 675 )...( 686 ): >MGR1_HUMAN
LVTKTNRIARIL

SEQ ID NO: 9343 - protein, 12 aa, Homo sapiens
  ( 676 )...( 687 ): >MGR1_HUMAN
VTKTNRIARILA

SEQ ID NO: 9344 - protein, 12 aa, Homo sapiens
  ( 677 )...( 688 ): >MGR1_HUMAN
TKTNRIARILAG

SEQ ID NO: 9345 - protein, 12 aa, Homo sapiens
  ( 678 )...( 689 ): >MGR1_HUMAN
KTNRIARILAGS

SEQ ID NO: 9346 - protein, 12 aa, Homo sapiens
  ( 679 )...( 690 ): >MGR1_HUMAN
TNRIARILAGSK

SEQ ID NO: 9347 - protein, 12 aa, Homo sapiens
  ( 680 )...( 691 ): >MGR1_HUMAN
NRIARILAGSKK

SEQ ID NO: 9348 - protein, 12 aa, Homo sapiens
  ( 681 )...( 692 ): >MGR1_HUMAN
RIARILAGSKKK

SEQ ID NO: 9349 - protein, 12 aa, Homo sapiens
  ( 682 )...( 693 ): >MGR1_HUMAN
IARILAGSKKKI

SEQ ID NO: 9350 - protein, 12 aa, Homo sapiens
  ( 683 )...( 694 ): >MGR1_HUMAN
ARILAGSKKKIC

SEQ ID NO: 9351 - protein, 12 aa, Homo sapiens
  ( 684 )...( 695 ): >MGR1_HUMAN
RILAGSKKKICT

SEQ ID NO: 9352 - protein, 12 aa, Homo sapiens
  ( 685 )...( 696 ): >MGR1_HUMAN
ILAGSKKKICTR

SEQ ID NO: 9353 - protein, 12 aa, Homo sapiens
  ( 686 )...( 697 ): >MGR1_HUMAN
LAGSKKKICTRK

SEQ ID NO: 9354 - protein, 12 aa, Homo sapiens
  ( 687 )...( 698 ): >MGR1_HUMAN
AGSKKKICTRKP

SEQ ID NO: 9355 - protein, 12 aa, Homo sapiens
  ( 873 )...( 884 ): >MGR1_HUMAN
LNIFRRKKAGAG

SEQ ID NO: 9356 - protein, 12 aa, Homo sapiens
  ( 874 )...( 885 ): >MGR1_HUMAN
NIFRRKKAGAGN

SEQ ID NO: 9357 - protein, 12 aa, Homo sapiens
  ( 875 )...( 886 ): >MGR1_HUMAN
IFRRKKAGAGNA

SEQ ID NO: 9358 - protein, 12 aa, Homo sapiens
  ( 253 )...( 264 ): >MGR2_HUMAN
VVRALLQKPSAR

SEQ ID NO: 9359 - protein, 12 aa, Homo sapiens
  ( 254 )...( 265 ): >MGR2_HUMAN
VRALLQKPSARV

SEQ ID NO: 9360 - protein, 12 aa, Homo sapiens
  ( 255 )...( 266 ): >MGR2_HUMAN
RALLQKPSARVA

SEQ ID NO: 9361 - protein, 12 aa, Homo sapiens
  ( 260 )...( 271 ): >MGR2_HUMAN
KPSARVAVLFTR

SEQ ID NO: 9362 - protein, 12 aa, Homo sapiens
  ( 456 )...( 467 ): >MGR2_HUMAN
FTYLRAGSGRYR

SEQ ID NO: 9363 - protein, 12 aa, Homo sapiens
  ( 457 )...( 468 ): >MGR2_HUMAN
TYLRAGSGRYRY

SEQ ID NO: 9364 - protein, 12 aa, Homo sapiens
  ( 460 )...( 471 ): >MGR2_HUMAN
RAGSGRYRYQKV

SEQ ID NO: 9365 - protein, 12 aa, Homo sapiens
  ( 461 )...( 472 ): >MGR2_HUMAN
AGSGRYRYQKVG

SEQ ID NO: 9366 - protein, 12 aa, Homo sapiens
  ( 462 )...( 473 ): >MGR2_HUMAN
GSGRYRYQKVGY

SEQ ID NO: 9367 - protein, 12 aa, Homo sapiens
  ( 625 )...( 636 ): >MGR2_HUMAN
AKPSTAVCTLRR

SEQ ID NO: 9368 - protein, 12 aa, Homo sapiens
  ( 626 )...( 637 ): >MGR2_HUMAN
KPSTAVCTLRRL

SEQ ID NO: 9369 - protein, 12 aa, Homo sapiens
  ( 648 )...( 659 ): >MGR2_HUMAN
SALLTKTNRIAR

SEQ ID NO: 9370 - protein, 12 aa, Homo sapiens
  ( 649 )...( 660 ): >MGR2_HUMAN
ALLTKTNRIARI

SEQ ID NO: 9371 - protein, 12 aa, Homo sapiens
  ( 650 )...( 661 ): >MGR2_HUMAN
LLTKTNRIARIF

SEQ ID NO: 9372 - protein, 12 aa, Homo sapiens
  ( 651 )...( 662 ): >MGR2_HUMAN
LTKTNRIARIFG

SEQ ID NO: 9373 - protein, 12 aa, Homo sapiens
  ( 652 )...( 663 ): >MGR2_HUMAN
TKTNRIARIFGG

SEQ ID NO: 9374 - protein, 12 aa, Homo sapiens
  ( 653 )...( 664 ): >MGR2_HUMAN
KTNRIARIFGGA

SEQ ID NO: 9375 - protein, 12 aa, Homo sapiens
  ( 654 )...( 665 ): >MGR2_HUMAN
TNRIARIFGGAR

SEQ ID NO: 9376 - protein, 12 aa, Homo sapiens
  ( 823 )...( 834 ): >MGR2_HUMAN
KNVVSHRAPTSR

SEQ ID NO: 9377 - protein, 12 aa, Homo sapiens
  ( 241 )...( 252 ): >MGR3_HUMAN
TAEKVGRSNIRK

SEQ ID NO: 9378 - protein, 12 aa, Homo sapiens
  ( 242 )...( 253 ): >MGR3_HUMAN
AEKVGRSNIRKS

SEQ ID NO: 9379 - protein, 12 aa, Homo sapiens
  ( 264 )...( 275 ): >MGR3_HUMAN
KPNARVVVLFMR

SEQ ID NO: 9380 - protein, 12 aa, Homo sapiens
  ( 404 )...( 415 ): >MGR3_HUMAN
KMQRTLCPNTTK

SEQ ID NO: 9381 - protein, 12 aa, Homo sapiens
  ( 419 )...( 430 ): >MGR3_HUMAN
AMKILDGKKLYK

SEQ ID NO: 9382 - protein, 12 aa, Homo sapiens
  ( 425 )...( 436 ): >MGR3_HUMAN
GKKLYKDYLLKI

SEQ ID NO: 9383 - protein, 12 aa, Homo sapiens
  ( 670 )...( 681 ): >MGR3_HUMAN
GVKNGAQRPKFI

SEQ ID NO: 9384 - protein, 12 aa, Homo sapiens
  ( 671 )...( 682 ): >MGR3_HUMAN
VKNGAQRPKFIS

SEQ ID NO: 9385 - protein, 12 aa, Homo sapiens
  ( 710 )...( 721 ): >MGR3_HUMAN
PGTRRYTLAEKR

SEQ ID NO: 9386 - protein, 12 aa, Homo sapiens
  ( 720 )...( 731 ): >MGR3_HUMAN
KRETVILKCNVK

SEQ ID NO: 9387 - protein, 12 aa, Homo sapiens
  ( 747 )...( 758 ): >MGR3_HUMAN
ILCTVYAFKTRK

SEQ ID NO: 9388 - protein, 12 aa, Homo sapiens
  ( 290 )...( 301 ): >MGR4_HUMAN
IRRVLEAARRAN

SEQ ID NO: 9389 - protein, 12 aa, Homo sapiens
  ( 331 )...( 342 ): >MGR4_HUMAN
AVTILPKRMSVR

SEQ ID NO: 9390 - protein, 12 aa, Homo sapiens
  ( 332 )...( 343 ): >MGR4_HUMAN
VTILPKRMSVRG

SEQ ID NO: 9391 - protein, 12 aa, Homo sapiens
  ( 333 )...( 344 ): >MGR4_HUMAN
TILPKRMSVRGF

SEQ ID NO: 9392 - protein, 12 aa, Homo sapiens
  ( 371 )...( 382 ): >MGR4_HUMAN
HCKLSRHALKKG

SEQ ID NO: 9393 - protein, 12 aa, Homo sapiens
  ( 372 )...( 383 ): >MGR4_HUMAN
CKLSRHALKKGS

SEQ ID NO: 9394 - protein, 12 aa, Homo sapiens
  ( 373 )...( 384 ): >MGR4_HUMAN
KLSRHALKKGSH

SEQ ID NO: 9395 - protein, 12 aa, Homo sapiens
  ( 375 )...( 386 ): >MGR4_HUMAN
SRHALKKGSHVK

SEQ ID NO: 9396 - protein, 12 aa, Homo sapiens
  ( 376 )...( 387 ): >MGR4_HUMAN
RHALKKGSHVKK

SEQ ID NO: 9397 - protein, 12 aa, Homo sapiens
  ( 378 )...( 389 ): >MGR4_HUMAN
ALKKGSHVKKCT

SEQ ID NO: 9398 - protein, 12 aa, Homo sapiens
  ( 379 )...( 390 ): >MGR4_HUMAN
LKKGSHVKKCTN

SEQ ID NO: 9399 - protein, 12 aa, Homo sapiens
  ( 380 )...( 391 ): >MGR4_HUMAN
KKGSHVKKCTNR

SEQ ID NO: 9400 - protein, 12 aa, Homo sapiens
  ( 384 )...( 395 ): >MGR4_HUMAN
HVKKCTNRERIG

SEQ ID NO: 9401 - protein, 12 aa, Homo sapiens
  ( 385 )...( 396 ): >MGR4_HUMAN
VKKCTNRERIGQ

SEQ ID NO: 9402 - protein, 12 aa, Homo sapiens
  ( 523 )...( 534 ): >MGR4_HUMAN
PCQPGERKKTVK

SEQ ID NO: 9403 - protein, 12 aa, Homo sapiens
  ( 524 )...( 535 ): >MGR4_HUMAN
CQPGERKKTVKG

SEQ ID NO: 9404 - protein, 12 aa, Homo sapiens
  ( 525 )...( 536 ): >MGR4_HUMAN
QPGERKKTVKGM

SEQ ID NO: 9405 - protein, 12 aa, Homo sapiens
  ( 526 )...( 537 ): >MGR4_HUMAN
PGERKKTVKGMP

SEQ ID NO: 9406 - protein, 12 aa, Homo sapiens
  ( 527 )...( 538 ): >MGR4_HUMAN
GERKKTVKGMPC

SEQ ID NO: 9407 - protein, 12 aa, Homo sapiens
  ( 569 )...( 580 ): >MGR4_HUMAN
NRTGCRPIPIIK

SEQ ID NO: 9408 - protein, 12 aa, Homo sapiens
  ( 570 )...( 581 ): >MGR4_HUMAN
RTGCRPIPIIKL

SEQ ID NO: 9409 - protein, 12 aa, Homo sapiens
  ( 668 )...( 679 ): >MGR4_HUMAN
AALLTKTNRIYR

SEQ ID NO: 9410 - protein, 12 aa, Homo sapiens
  ( 669 )...( 680 ): >MGR4_HUMAN
ALLTKTNRIYRI

SEQ ID NO: 9411 - protein, 12 aa, Homo sapiens
  ( 683 )...( 694 ): >MGR4_HUMAN
QGKRSVSAPRFI

SEQ ID NO: 9412 - protein, 12 aa, Homo sapiens
  ( 852 )...( 863 ): >MGR4_HUMAN
NVPKRKRSLKAV

SEQ ID NO: 9413 - protein, 12 aa, Homo sapiens
  ( 853 )...( 864 ): >MGR4_HUMAN
VPKRKRSLKAVV

SEQ ID NO: 9414 - protein, 12 aa, Homo sapiens
  ( 854 )...( 865 ): >MGR4_HUMAN
PKRKRSLKAVVT

SEQ ID NO: 9415 - protein, 12 aa, Homo sapiens
  ( 855 )...( 866 ): >MGR4_HUMAN
KRKRSLKAVVTA

SEQ ID NO: 9416 - protein, 12 aa, Homo sapiens
  ( 856 )...( 867 ): >MGR4_HUMAN
RKRSLKAVVTAA

SEQ ID NO: 9417 - protein, 12 aa, Homo sapiens
  ( 136 )...( 147 ): >MGR5_HUMAN
SFRSKKPIVGVI

SEQ ID NO: 9418 - protein, 12 aa, Homo sapiens
  ( 137 )...( 148 ): >MGR5_HUMAN
FRSKKPIVGVIG

SEQ ID NO: 9419 - protein, 12 aa, Homo sapiens
  ( 138 )...( 149 ): >MGR5_HUMAN
RSKKPIVGVIGP

SEQ ID NO: 9420 - protein, 12 aa, Homo sapiens
  ( 259 )...( 270 ): >MGR5_HUMAN
KLLKKLTSHLPK

SEQ ID NO: 9421 - protein, 12 aa, Homo sapiens
  ( 261 )...( 272 ): >MGR5_HUMAN
LKKLTSHLPKAR

SEQ ID NO: 9422 - protein, 12 aa, Homo sapiens
  ( 262 )...( 273 ): >MGR5_HUMAN
KKLTSHLPKARV

SEQ ID NO: 9423 - protein, 12 aa, Homo sapiens
  ( 281 )...( 292 ): >MGR5_HUMAN
MTVRGLLMAMRR

SEQ ID NO: 9424 - protein, 12 aa, Homo sapiens
  ( 282 )...( 293 ): >MGR5_HUMAN
TVRGLLMAMRRL

SEQ ID NO: 9425 - protein, 12 aa, Homo sapiens
  ( 283 )...( 294 ): >MGR5_HUMAN
VRGLLMAMRRLG

SEQ ID NO: 9426 - protein, 12 aa, Homo sapiens
  ( 284 )...( 295 ): >MGR5_HUMAN
RGLLMAMRRLGL

SEQ ID NO: 9427 - protein, 12 aa, Homo sapiens
  ( 499 )...( 510 ): >MGR5_HUMAN
VWSKKSNIIRSV

SEQ ID NO: 9428 - protein, 12 aa, Homo sapiens
  ( 514 )...( 525 ): >MGR5_HUMAN
PCEKGQIKVIRK

SEQ ID NO: 9429 - protein, 12 aa, Homo sapiens
  ( 515 )...( 526 ): >MGR5_HUMAN
CEKGQIKVIRKG

SEQ ID NO: 9430 - protein, 12 aa, Homo sapiens
  ( 517 )...( 528 ): >MGR5_HUMAN
KGQIKVIRKGEV

SEQ ID NO: 9431 - protein, 12 aa, Homo sapiens
  ( 660 )...( 671 ): >MGR5_HUMAN
SALVTKTNRIAR

SEQ ID NO: 9432 - protein, 12 aa, Homo sapiens
  ( 661 )...( 672 ): >MGR5_HUMAN
ALVTKTNRIARI

SEQ ID NO: 9433 - protein, 12 aa, Homo sapiens
  ( 662 )...( 673 ): >MGR5_HUMAN
LVTKTNRIARIL

SEQ ID NO: 9434 - protein, 12 aa, Homo sapiens
  ( 663 )...( 674 ): >MGR5_HUMAN
VTKTNRIARILA

SEQ ID NO: 9435 - protein, 12 aa, Homo sapiens
  ( 664 )...( 675 ): >MGR5_HUMAN
TKTNRIARILAG

SEQ ID NO: 9436 - protein, 12 aa, Homo sapiens
  ( 665 )...( 676 ): >MGR5_HUMAN
KTNRIARILAGS

SEQ ID NO: 9437 - protein, 12 aa, Homo sapiens
  ( 666 )...( 677 ): >MGR5_HUMAN
TNRIARILAGSK

SEQ ID NO: 9438 - protein, 12 aa, Homo sapiens
  ( 667 )...( 678 ): >MGR5_HUMAN
NRIARILAGSKK

SEQ ID NO: 9439 - protein, 12 aa, Homo sapiens
  ( 668 )...( 679 ): >MGR5_HUMAN
RIARILAGSKKK

SEQ ID NO: 9440 - protein, 12 aa, Homo sapiens
  ( 669 )...( 680 ): >MGR5_HUMAN
IARILAGSKKKI

SEQ ID NO: 9441 - protein, 12 aa, Homo sapiens
  ( 670 )...( 681 ): >MGR5_HUMAN
ARILAGSKKKIC

SEQ ID NO: 9442 - protein, 12 aa, Homo sapiens
  ( 671 )...( 682 ): >MGR5_HUMAN
RILAGSKKKICT

SEQ ID NO: 9443 - protein, 12 aa, Homo sapiens
  ( 672 )...( 683 ): >MGR5_HUMAN
ILAGSKKKICTK

SEQ ID NO: 9444 - protein, 12 aa, Homo sapiens
  ( 673 )...( 684 ): >MGR5_HUMAN
LAGSKKKICTKK

SEQ ID NO: 9445 - protein, 12 aa, Homo sapiens
  ( 674 )...( 685 ): >MGR5_HUMAN
AGSKKKICTKKP

SEQ ID NO: 9446 - protein, 12 aa, Homo sapiens
  ( 675 )...( 686 ): >MGR5_HUMAN
GSKKKICTKKPR

SEQ ID NO: 9447 - protein, 12 aa, Homo sapiens
  ( 859 )...( 870 ): >MGR5_HUMAN
SSSLVNLWKRRG

SEQ ID NO: 9448 - protein, 12 aa, Homo sapiens
  ( 860 )...( 871 ): >MGR5_HUMAN
SSLVNLWKRRGS

SEQ ID NO: 9449 - protein, 12 aa, Homo sapiens
  ( 861 )...( 872 ): >MGR5_HUMAN
SLVNLWKRRGSS

SEQ ID NO: 9450 - protein, 12 aa, Homo sapiens
  ( 862 )...( 873 ): >MGR5_HUMAN
LVNLWKRRGSSG

SEQ ID NO: 9451 - protein, 12 aa, Homo sapiens
  ( 866 )...( 877 ): >MGR5_HUMAN
WKRRGSSGETLR

SEQ ID NO: 9452 - protein, 12 aa, Homo sapiens
  ( 867 )...( 878 ): >MGR5_HUMAN
KRRGSSGETLRY

SEQ ID NO: 9453 - protein, 12 aa, Homo sapiens
  ( 868 )...( 879 ): >MGR5_HUMAN
RRGSSGETLRYK

SEQ ID NO: 9454 - protein, 12 aa, Homo sapiens
  ( 256 )...( 267 ): >MGR6_HUMAN
KPGEFSKVIRRL

SEQ ID NO: 9455 - protein, 12 aa, Homo sapiens
  ( 438 )...( 449 ): >MGR6_HUMAN
GRMLLQYIRAVR

SEQ ID NO: 9456 - protein, 12 aa, Homo sapiens
  ( 523 )...( 534 ): >MGR6_HUMAN
GPGERKKMVKGV

SEQ ID NO: 9457 - protein, 12 aa, Homo sapiens
  ( 524 )...( 535 ): >MGR6_HUMAN
PGERKKMVKGVP

SEQ ID NO: 9458 - protein, 12 aa, Homo sapiens
  ( 525 )...( 536 ): >MGR6_HUMAN
GERKKMVKGVPC

SEQ ID NO: 9459 - protein, 12 aa, Homo sapiens
  ( 666 )...( 677 ): >MGR6_HUMAN
SALLTKTNRIYR

SEQ ID NO: 9460 - protein, 12 aa, Homo sapiens
  ( 667 )...( 678 ): >MGR6_HUMAN
ALLTKTNRIYRI

SEQ ID NO: 9461 - protein, 12 aa, Homo sapiens
  ( 851 )...( 862 ): >MGR6_HUMAN
VQKRKRSLKATS

SEQ ID NO: 9462 - protein, 12 aa, Homo sapiens
  ( 852 )...( 863 ): >MGR6_HUMAN
QKRKRSLKATST

SEQ ID NO: 9463 - protein, 12 aa, Homo sapiens
  ( 853 )...( 864 ): >MGR6_HUMAN
KRKRSLKATSTV

SEQ ID NO: 9464 - protein, 12 aa, Homo sapiens
  ( 854 )...( 865 ): >MGR6_HUMAN
RKRSLKATSTVA

SEQ ID NO: 9465 - protein, 12 aa, Homo sapiens
  ( 442 )...( 453 ): >MGR7_HUMAN
QAGGKKLLKYIR

SEQ ID NO: 9466 - protein, 12 aa, Homo sapiens
  ( 443 )...( 454 ): >MGR7_HUMAN
AGGKKLLKYIRN

SEQ ID NO: 9467 - protein, 12 aa, Homo sapiens
  ( 444 )...( 455 ): >MGR7_HUMAN
GGKKLLKYIRNV

SEQ ID NO: 9468 - protein, 12 aa, Homo sapiens
  ( 445 )...( 456 ): >MGR7_HUMAN
GKKLLKYIRNVN

SEQ ID NO: 9469 - protein, 12 aa, Homo sapiens
  ( 524 )...( 535 ): >MGR7_HUMAN
TLPCKPGQRKKT

SEQ ID NO: 9470 - protein, 12 aa, Homo sapiens
  ( 525 )...( 536 ): >MGR7_HUMAN
LPCKPGQRKKTQ

SEQ ID NO: 9471 - protein, 12 aa, Homo sapiens
  ( 526 )...( 537 ): >MGR7_HUMAN
PCKPGQRKKTQK

SEQ ID NO: 9472 - protein, 12 aa, Homo sapiens
  ( 527 )...( 538 ): >MGR7_HUMAN
CKPGQRKKTQKG

SEQ ID NO: 9473 - protein, 12 aa, Homo sapiens
  ( 528 )...( 539 ): >MGR7_HUMAN
KPGQRKKTQKGT

SEQ ID NO: 9474 - protein, 12 aa, Homo sapiens
  ( 529 )...( 540 ): >MGR7_HUMAN
PGQRKKTQKGTP

SEQ ID NO: 9475 - protein, 12 aa, Homo sapiens
  ( 530 )...( 541 ): >MGR7_HUMAN
GQRKKTQKGTPC

SEQ ID NO: 9476 - protein, 12 aa, Homo sapiens
  ( 671 )...( 682 ): >MGR7_HUMAN
AALLTKTNRIYR

SEQ ID NO: 9477 - protein, 12 aa, Homo sapiens
  ( 672 )...( 683 ): >MGR7_HUMAN
ALLTKTNRIYRI

SEQ ID NO: 9478 - protein, 12 aa, Homo sapiens
  ( 686 )...( 697 ): >MGR7_HUMAN
QGKKSVTAPRLI

SEQ ID NO: 9479 - protein, 12 aa, Homo sapiens
  ( 687 )...( 698 ): >MGR7_HUMAN
GKKSVTAPRLIS

SEQ ID NO: 9480 - protein, 12 aa, Homo sapiens
  ( 688 )...( 699 ): >MGR7_HUMAN
KKSVTAPRLISP

SEQ ID NO: 9481 - protein, 12 aa, Homo sapiens
  ( 856 )...( 867 ): >MGR7_HUMAN
VQKRKRSFKAVV

SEQ ID NO: 9482 - protein, 12 aa, Homo sapiens
  ( 857 )...( 868 ): >MGR7_HUMAN
QKRKRSFKAVVT

SEQ ID NO: 9483 - protein, 12 aa, Homo sapiens
  ( 858 )...( 869 ): >MGR7_HUMAN
KRKRSFKAVVTA

SEQ ID NO: 9484 - protein, 12 aa, Homo sapiens
  ( 859 )...( 870 ): >MGR7_HUMAN
RKRSFKAVVTAA

SEQ ID NO: 9485 - protein, 12 aa, Homo sapiens
  ( 860 )...( 871 ): >MGR7_HUMAN
KRSFKAVVTAAT

SEQ ID NO: 9486 - protein, 12 aa, Homo sapiens
  ( 287 )...( 298 ): >MGR8_HUMAN
IRRILEAAKKLN

SEQ ID NO: 9487 - protein, 12 aa, Homo sapiens
  ( 374 )...( 385 ): >MGR8_HUMAN
HGKRNSHIKKCT

SEQ ID NO: 9488 - protein, 12 aa, Homo sapiens
  ( 375 )...( 386 ): >MGR8_HUMAN
GKRNSHIKKCTG

SEQ ID NO: 9489 - protein, 12 aa, Homo sapiens
  ( 376 )...( 387 ): >MGR8_HUMAN
KRNSHIKKCTGL

SEQ ID NO: 9490 - protein, 12 aa, Homo sapiens
  ( 381 )...( 392 ): >MGR8_HUMAN
IKKCTGLERIAR

SEQ ID NO: 9491 - protein, 12 aa, Homo sapiens
  ( 518 )...( 529 ): >MGR8_HUMAN
LPCKPGERKKTV

SEQ ID NO: 9492 - protein, 12 aa, Homo sapiens
  ( 519 )...( 530 ): >MGR8_HUMAN
PCKPGERKKTVK

SEQ ID NO: 9493 - protein, 12 aa, Homo sapiens
  ( 520 )...( 531 ): >MGR8_HUMAN
CKPGERKKTVKG

SEQ ID NO: 9494 - protein, 12 aa, Homo sapiens
  ( 521 )...( 532 ): >MGR8_HUMAN
KPGERKKTVKGV

SEQ ID NO: 9495 - protein, 12 aa, Homo sapiens
  ( 522 )...( 533 ): >MGR8_HUMAN
PGERKKTVKGVP

SEQ ID NO: 9496 - protein, 12 aa, Homo sapiens
  ( 523 )...( 534 ): >MGR8_HUMAN
GERKKTVKGVPC

SEQ ID NO: 9497 - protein, 12 aa, Homo sapiens
  ( 664 )...( 675 ): >MGR8_HUMAN
AALLTKTNRIHR

SEQ ID NO: 9498 - protein, 12 aa, Homo sapiens
  ( 665 )...( 676 ): >MGR8_HUMAN
ALLTKTNRIHRI

SEQ ID NO: 9499 - protein, 12 aa, Homo sapiens
  ( 849 )...( 860 ): >MGR8_HUMAN
VQKRKRSFKAVV

SEQ ID NO: 9500 - protein, 12 aa, Homo sapiens
  ( 850 )...( 861 ): >MGR8_HUMAN
QKRKRSFKAVVT

SEQ ID NO: 9501 - protein, 12 aa, Homo sapiens
  ( 851 )...( 862 ): >MGR8_HUMAN
KRKRSFKAVVTA

SEQ ID NO: 9502 - protein, 12 aa, Homo sapiens
  ( 852 )...( 863 ): >MGR8_HUMAN
RKRSFKAVVTAA

SEQ ID NO: 9503 - protein, 12 aa, Homo sapiens
  ( 853 )...( 864 ): >MGR8_HUMAN
KRSFKAVVTAAT

SEQ ID NO: 9504 - protein, 12 aa, Homo sapiens
  ( 46 )...( 57 ): >ML1A_HUMAN
LLVILSVYRNKK

SEQ ID NO: 9505 - protein, 12 aa, Homo sapiens
  ( 47 )...( 58 ): >ML1A_HUMAN
LVILSVYRNKKL

SEQ ID NO: 9506 - protein, 12 aa, Homo sapiens
  ( 55 )...( 66 ): >ML1A_HUMAN
NKKLRNAGNIFV

SEQ ID NO: 9507 - protein, 12 aa, Homo sapiens
  ( 56 )...( 67 ): >ML1A_HUMAN
KKLRNAGNIFVV

SEQ ID NO: 9508 - protein, 12 aa, Homo sapiens
  ( 212 )...( 223 ): >ML1A_HUMAN
ILVLQVRQRVKP

SEQ ID NO: 9509 - protein, 12 aa, Homo sapiens
  ( 306 )...( 317 ): >ML1A_HUMAN
YRRIIVSLCTAR

SEQ ID NO: 9510 - protein, 12 aa, Homo sapiens
  ( 307 )...( 318 ): >ML1A_HUMAN
RRIIVSLCTARV

SEQ ID NO: 9511 - protein, 12 aa, Homo sapiens
  ( 59 )...( 70 ): >ML1B_HUMAN
LLVILSVLRNRK

SEQ ID NO: 9512 - protein, 12 aa, Homo sapiens
  ( 60 )...( 71 ): >ML1B_HUMAN
LVILSVLRNRKL

SEQ ID NO: 9513 - protein, 12 aa, Homo sapiens
  ( 61 )...( 72 ): >ML1B_HUMAN
VILSVLRNRKLR

SEQ ID NO: 9514 - protein, 12 aa, Homo sapiens
  ( 64 )...( 75 ): >ML1B_HUMAN
SVLRNRKLRNAG

SEQ ID NO: 9515 - protein, 12 aa, Homo sapiens
  ( 69 )...( 80 ): >ML1B_HUMAN
RKLRNAGNLFLV

SEQ ID NO: 9516 - protein, 12 aa, Homo sapiens
  ( 223 )...( 234 ): >ML1B_HUMAN
IWVLVLQARRKA

SEQ ID NO: 9517 - protein, 12 aa, Homo sapiens
  ( 224 )...( 235 ): >ML1B_HUMAN
WVLVLQARRKAK

SEQ ID NO: 9518 - protein, 12 aa, Homo sapiens
  ( 225 )...( 236 ): >ML1B_HUMAN
VLVLQARRKAKP

SEQ ID NO: 9519 - protein, 12 aa, Homo sapiens
  ( 226 )...( 237 ): >ML1B_HUMAN
LVLQARRKAKPE

SEQ ID NO: 9520 - protein, 12 aa, Homo sapiens
  ( 227 )...( 238 ): >ML1B_HUMAN
VLQARRKAKPES

SEQ ID NO: 9521 - protein, 12 aa, Homo sapiens
  ( 48 )...( 59 ): >ML1X_HUMAN
MVILAVTKNKKL

SEQ ID NO: 9522 - protein, 12 aa, Homo sapiens
  ( 49 )...( 60 ): >ML1X_HUMAN
VILAVTKNKKLR

SEQ ID NO: 9523 - protein, 12 aa, Homo sapiens
  ( 50 )...( 61 ): >ML1X_HUMAN
ILAVTKNKKLRN

SEQ ID NO: 9524 - protein, 12 aa, Homo sapiens
  ( 51 )...( 62 ): >ML1X_HUMAN
LAVTKNKKLRNS

SEQ ID NO: 9525 - protein, 12 aa, Homo sapiens
  ( 52 )...( 63 ): >ML1X_HUMAN
AVTKNKKLRNSG

SEQ ID NO: 9526 - protein, 12 aa, Homo sapiens
  ( 53 )...( 64 ): >ML1X_HUMAN
VTKNKKLRNSGN

SEQ ID NO: 9527 - protein, 12 aa, Homo sapiens
  ( 54 )...( 65 ): >ML1X_HUMAN
TKNKKLRNSGNI

SEQ ID NO: 9528 - protein, 12 aa, Homo sapiens
  ( 57 )...( 68 ): >ML1X_HUMAN
KKLRNSGNIFVV

SEQ ID NO: 9529 - protein, 12 aa, Homo sapiens
  ( 208 )...( 219 ): >ML1X_HUMAN
YVRIWTKVLAAR

SEQ ID NO: 9530 - protein, 12 aa, Homo sapiens
  ( 332 )...( 343 ): >ML1X_HUMAN
ARTLARARAHAR

SEQ ID NO: 9531 - protein, 12 aa, Homo sapiens
  ( 215 )...( 226 ): >MRG_HUMAN
WKHVKACVIFLK

SEQ ID NO: 9532 - protein, 12 aa, Homo sapiens
  ( 316 )...( 327 ): >MRG_HUMAN
FVGSLRKKRLKE

SEQ ID NO: 9533 - protein, 12 aa, Homo sapiens
  ( 317 )...( 328 ): >MRG_HUMAN
VGSLRKKRLKES

SEQ ID NO: 9534 - protein, 12 aa, Homo sapiens
  ( 318 )...( 329 ): >MRG_HUMAN
GSLRKKRLKESL

SEQ ID NO: 9535 - protein, 12 aa, Homo sapiens
  ( 322 )...( 333 ): >MRG_HUMAN
KKRLKESLRVIL

SEQ ID NO: 9536 - protein, 12 aa, Homo sapiens
  ( 323 )...( 334 ): >MRG_HUMAN
KRLKESLRVILQ

SEQ ID NO: 9537 - protein, 12 aa, Homo sapiens
  ( 324 )...( 335 ): >MRG_HUMAN
RLKESLRVILQR

SEQ ID NO: 9538 - protein, 12 aa, Homo sapiens
  ( 340 )...( 351 ): >MRG_HUMAN
KPEVGRNKKAAG

SEQ ID NO: 9539 - protein, 12 aa, Homo sapiens
  ( 153 )...( 164 ): >MSHR_HUMAN
HSIVTLPRARRA

SEQ ID NO: 9540 - protein, 12 aa, Homo sapiens
  ( 154 )...( 165 ): >MSHR_HUMAN
SIVTLPRARRAV

SEQ ID NO: 9541 - protein, 12 aa, Homo sapiens
  ( 155 )...( 166 ): >MSHR_HUMAN
IVTLPRARRAVA

SEQ ID NO: 9542 - protein, 12 aa, Homo sapiens
  ( 156 )...( 167 ): >MSHR_HUMAN
VTLPRARRAVAA

SEQ ID NO: 9543 - protein, 12 aa, Homo sapiens
  ( 157 )...( 168 ): >MSHR_HUMAN
TLPRARRAVAAI

SEQ ID NO: 9544 - protein, 12 aa, Homo sapiens
  ( 158 )...( 169 ): >MSHR_HUMAN
LPRARRAVAAIW

SEQ ID NO: 9545 - protein, 12 aa, Homo sapiens
  ( 159 )...( 170 ): >MSHR_HUMAN
PRARRAVAAIWV

SEQ ID NO: 9546 - protein, 12 aa, Homo sapiens
  ( 160 )...( 171 ): >MSHR_HUMAN
RARRAVAAIWVA

SEQ ID NO: 9547 - protein, 12 aa, Homo sapiens
  ( 216 )...( 227 ): >MSHR_HUMAN
QHAQGIARLHKR

SEQ ID NO: 9548 - protein, 12 aa, Homo sapiens
  ( 217 )...( 228 ): >MSHR_HUMAN
HAQGIARLHKRQ

SEQ ID NO: 9549 - protein, 12 aa, Homo sapiens
  ( 218 )...( 229 ): >MSHR_HUMAN
AQGIARLHKRQR

SEQ ID NO: 9550 - protein, 12 aa, Homo sapiens
  ( 220 )...( 231 ): >MSHR_HUMAN
GIARLHKRQRPV

SEQ ID NO: 9551 - protein, 12 aa, Homo sapiens
  ( 226 )...( 237 ): >MSHR_HUMAN
KRQRPVHQGFGL

SEQ ID NO: 9552 - protein, 12 aa, Homo sapiens
  ( 227 )...( 238 ): >MSHR_HUMAN
RQRPVHQGFGLK

SEQ ID NO: 9553 - protein, 12 aa, Homo sapiens
  ( 137 )...( 148 ): >MTLR_HUMAN
YLAICRPLRARV

SEQ ID NO: 9554 - protein, 12 aa, Homo sapiens
  ( 138 )...( 149 ): >MTLR_HUMAN
LAICRPLRARVL

SEQ ID NO: 9555 - protein, 12 aa, Homo sapiens
  ( 139 )...( 150 ): >MTLR_HUMAN
AICRPLRARVLV

SEQ ID NO: 9556 - protein, 12 aa, Homo sapiens
  ( 140 )...( 151 ): >MTLR_HUMAN
ICRPLRARVLVT

SEQ ID NO: 9557 - protein, 12 aa, Homo sapiens
  ( 153 )...( 164 ): >MTLR_HUMAN
RRVRALIAVLWA

SEQ ID NO: 9558 - protein, 12 aa, Homo sapiens
  ( 288 )...( 299 ): >MTLR_HUMAN
GRERGHRQTVRV

SEQ ID NO: 9559 - protein, 12 aa, Homo sapiens
  ( 289 )...( 300 ): >MTLR_HUMAN
RERGHRQTVRVL

SEQ ID NO: 9560 - protein, 12 aa, Homo sapiens
  ( 291 )...( 302 ): >MTLR_HUMAN
RGHRQTVRVLLV

SEQ ID NO: 9561 - protein, 12 aa, Homo sapiens
  ( 355 )...( 366 ): >MTLR_HUMAN
YNLISKKYRAAA

SEQ ID NO: 9562 - protein, 12 aa, Homo sapiens
  ( 357 )...( 368 ): >MTLR_HUMAN
LISKKYRAAAFK

SEQ ID NO: 9563 - protein, 12 aa, Homo sapiens
  ( 358 )...( 369 ): >MTLR_HUMAN
ISKKYRAAAFKL

SEQ ID NO: 9564 - protein, 12 aa, Homo sapiens
  ( 359 )...( 370 ): >MTLR_HUMAN
SKKYRAAAFKLL

SEQ ID NO: 9565 - protein, 12 aa, Homo sapiens
  ( 360 )...( 371 ): >MTLR_HUMAN
KKYRAAAFKLLL

SEQ ID NO: 9566 - protein, 12 aa, Homo sapiens
  ( 361 )...( 372 ): >MTLR_HUMAN
KYRAAAFKLLLA

SEQ ID NO: 9567 - protein, 12 aa, Homo sapiens
  ( 362 )...( 373 ): >MTLR_HUMAN
YRAAAFKLLLAR

SEQ ID NO: 9568 - protein, 12 aa, Homo sapiens
  ( 363 )...( 374 ): >MTLR_HUMAN
RAAAFKLLLARK

SEQ ID NO: 9569 - protein, 12 aa, Homo sapiens
  ( 364 )...( 375 ): >MTLR_HUMAN
AAAFKLLLARKS

SEQ ID NO: 9570 - protein, 12 aa, Homo sapiens
  ( 365 )...( 376 ): >MTLR_HUMAN
AAFKLLLARKSR

SEQ ID NO: 9571 - protein, 12 aa, Homo sapiens
  ( 366 )...( 377 ): >MTLR_HUMAN
AFKLLLARKSRP

SEQ ID NO: 9572 - protein, 12 aa, Homo sapiens
  ( 369 )...( 380 ): >MTLR_HUMAN
LLLARKSRPRGF

SEQ ID NO: 9573 - protein, 12 aa, Homo sapiens
  ( 149 )...( 160 ): >NFF1_HUMAN
FREKLTLRKALV

SEQ ID NO: 9574 - protein, 12 aa, Homo sapiens
  ( 150 )...( 161 ): >NFF1_HUMAN
REKLTLRKALVT

SEQ ID NO: 9575 - protein, 12 aa, Homo sapiens
  ( 152 )...( 163 ): >NFF1_HUMAN
KLTLRKALVTIA

SEQ ID NO: 9576 - protein, 12 aa, Homo sapiens
  ( 210 )...( 221 ): >NFF1_HUMAN
KGMRRVYTTVLF

SEQ ID NO: 9577 - protein, 12 aa, Homo sapiens
  ( 231 )...( 242 ): >NFF1_HUMAN
LIVVMYARIARK

SEQ ID NO: 9578 - protein, 12 aa, Homo sapiens
  ( 232 )...( 243 ): >NFF1_HUMAN
IVVMYARIARKL

SEQ ID NO: 9579 - protein, 12 aa, Homo sapiens
  ( 233 )...( 244 ): >NFF1_HUMAN
VVMYARIARKLC

SEQ ID NO: 9580 - protein, 12 aa, Homo sapiens
  ( 234 )...( 245 ): >NFF1_HUMAN
VMYARIARKLCQ

SEQ ID NO: 9581 - protein, 12 aa, Homo sapiens
  ( 235 )...( 246 ): >NFF1_HUMAN
MYARIARKLCQA

SEQ ID NO: 9582 - protein, 12 aa, Homo sapiens
  ( 261 )...( 272 ): >NFF1_HUMAN
ASRRRARVVHML

SEQ ID NO: 9583 - protein, 12 aa, Homo sapiens
  ( 262 )...( 273 ): >NFF1_HUMAN
SRRRARVVHMLV

SEQ ID NO: 9584 - protein, 12 aa, Homo sapiens
  ( 263 )...( 274 ): >NFF1_HUMAN
RRRARVVHMLVM

SEQ ID NO: 9585 - protein, 12 aa, Homo sapiens
  ( 264 )...( 275 ): >NFF1_HUMAN
RRARVVHMLVMV

SEQ ID NO: 9586 - protein, 12 aa, Homo sapiens
  ( 363 )...( 374 ): >NFF1_HUMAN
RPGGLLHRRVFV

SEQ ID NO: 9587 - protein, 12 aa, Homo sapiens
  ( 366 )...( 377 ): >NFF1_HUMAN
GLLHRRVFVVVR

SEQ ID NO: 9588 - protein, 12 aa, Homo sapiens
  ( 367 )...( 378 ): >NFF1_HUMAN
LLHRRVFVVVRP

SEQ ID NO: 9589 - protein, 12 aa, Homo sapiens
  ( 368 )...( 379 ): >NFF1_HUMAN
LHRRVFVVVRPS

SEQ ID NO: 9590 - protein, 12 aa, Homo sapiens
  ( 396 )...( 407 ): >NFF1_HUMAN
PGRLPLRNGRVA

SEQ ID NO: 9591 - protein, 12 aa, Homo sapiens
  ( 397 )...( 408 ): >NFF1_HUMAN
GRLPLRNGRVAH

SEQ ID NO: 9592 - protein, 12 aa, Homo sapiens
  ( 402 )...( 413 ): >NFF1_HUMAN
RNGRVAHHGLPR

SEQ ID NO: 9593 - protein, 12 aa, Homo sapiens
  ( 28 )...( 39 ): >NFF2_HUMAN
GRERRALSVQQR

SEQ ID NO: 9594 - protein, 12 aa, Homo sapiens
  ( 29 )...( 40 ): >NFF2_HUMAN
RERRALSVQQRG

SEQ ID NO: 9595 - protein, 12 aa, Homo sapiens
  ( 31 )...( 42 ): >NFF2_HUMAN
RRALSVQQRGGP

SEQ ID NO: 9596 - protein, 12 aa, Homo sapiens
  ( 52 )...( 63 ): >NFF2_HUMAN
RQSAGDRRRLGL

SEQ ID NO: 9597 - protein, 12 aa, Homo sapiens
  ( 54 )...( 65 ): >NFF2_HUMAN
SAGDRRRLGLSR

SEQ ID NO: 9598 - protein, 12 aa, Homo sapiens
  ( 55 )...( 66 ): >NFF2_HUMAN
AGDRRRLGLSRQ

SEQ ID NO: 9599 - protein, 12 aa, Homo sapiens
  ( 56 )...( 67 ): >NFF2_HUMAN
GDRRRLGLSRQT

SEQ ID NO: 9600 - protein, 12 aa, Homo sapiens
  ( 57 )...( 68 ): >NFF2_HUMAN
DRRRLGLSRQTA

SEQ ID NO: 9601 - protein, 12 aa, Homo sapiens
  ( 59 )...( 70 ): >NFF2_HUMAN
RRLGLSRQTAKS

SEQ ID NO: 9602 - protein, 12 aa, Homo sapiens
  ( 60 )...( 71 ): >NFF2_HUMAN
RLGLSRQTAKSS

SEQ ID NO: 9603 - protein, 12 aa, Homo sapiens
  ( 348 )...( 359 ): >NFF2_HUMAN
LFRAAVPHTGRK

SEQ ID NO: 9604 - protein, 12 aa, Homo sapiens
  ( 350 )...( 361 ): >NFF2_HUMAN
RAAVPHTGRKNQ

SEQ ID NO: 9605 - protein, 12 aa, Homo sapiens
  ( 365 )...( 376 ): >NFF2_HUMAN
HVVSRKKQKIIK

SEQ ID NO: 9606 - protein, 12 aa, Homo sapiens
  ( 366 )...( 377 ): >NFF2_HUMAN
VVSRKKQKIIKM

SEQ ID NO: 9607 - protein, 12 aa, Homo sapiens
  ( 367 )...( 378 ): >NFF2_HUMAN
VSRKKQKIIKML

SEQ ID NO: 9608 - protein, 12 aa, Homo sapiens
  ( 368 )...( 379 ): >NFF2_HUMAN
SRKKQKIIKMLL

SEQ ID NO: 9609 - protein, 12 aa, Homo sapiens
  ( 369 )...( 380 ): >NFF2_HUMAN
RKKQKIIKMLLI

SEQ ID NO: 9610 - protein, 12 aa, Homo sapiens
  ( 449 )...( 460 ): >NFF2_HUMAN
AFQLQLCQKRAK

SEQ ID NO: 9611 - protein, 12 aa, Homo sapiens
  ( 451 )...( 462 ): >NFF2_HUMAN
QLQLCQKRAKPM

SEQ ID NO: 9612 - protein, 12 aa, Homo sapiens
  ( 457 )...( 468 ): >NFF2_HUMAN
KRAKPMEAYALK

SEQ ID NO: 9613 - protein, 12 aa, Homo sapiens
  ( 56 )...( 67 ): >NK1R_HUMAN
IILAHKRMRTVT

SEQ ID NO: 9614 - protein, 12 aa, Homo sapiens
  ( 57 )...( 68 ): >NK1R_HUMAN
ILAHKRMRTVTN

SEQ ID NO: 9615 - protein, 12 aa, Homo sapiens
  ( 238 )...( 249 ): >NK1R_HUMAN
EQVSAKRKVVKM

SEQ ID NO: 9616 - protein, 12 aa, Homo sapiens
  ( 239 )...( 250 ): >NK1R_HUMAN
QVSAKRKVVKMM

SEQ ID NO: 9617 - protein, 12 aa, Homo sapiens
  ( 240 )...( 251 ): >NK1R_HUMAN
VSAKRKVVKMMI

SEQ ID NO: 9618 - protein, 12 aa, Homo sapiens
  ( 241 )...( 252 ): >NK1R_HUMAN
SAKRKVVKMMIV

SEQ ID NO: 9619 - protein, 12 aa, Homo sapiens
  ( 242 )...( 253 ): >NK1R_HUMAN
AKRKVVKMMIVV

SEQ ID NO: 9620 - protein, 12 aa, Homo sapiens
  ( 243 )...( 254 ): >NK1R_HUMAN
KRKVVKMMIVVV

SEQ ID NO: 9621 - protein, 12 aa, Homo sapiens
  ( 57 )...( 68 ): >NK2R_HUMAN
IILAHRRMRTVT

SEQ ID NO: 9622 - protein, 12 aa, Homo sapiens
  ( 58 )...( 69 ): >NK2R_HUMAN
ILAHRRMRTVTN

SEQ ID NO: 9623 - protein, 12 aa, Homo sapiens
  ( 236 )...( 247 ): >NK2R_HUMAN
GANLRHLQAKKK

SEQ ID NO: 9624 - protein, 12 aa, Homo sapiens
  ( 241 )...( 252 ): >NK2R_HUMAN
HLQAKKKFVKTM

SEQ ID NO: 9625 - protein, 12 aa, Homo sapiens
  ( 242 )...( 253 ): >NK2R_HUMAN
LQAKKKFVKTMV

SEQ ID NO: 9626 - protein, 12 aa, Homo sapiens
  ( 243 )...( 254 ): >NK2R_HUMAN
QAKKKFVKTMVL

SEQ ID NO: 9627 - protein, 12 aa, Homo sapiens
  ( 244 )...( 255 ): >NK2R_HUMAN
AKKKFVKTMVLV

SEQ ID NO: 9628 - protein, 12 aa, Homo sapiens
  ( 245 )...( 256 ): >NK2R_HUMAN
KKKFVKTMVLVV

SEQ ID NO: 9629 - protein, 12 aa, Homo sapiens
  ( 109 )...( 120 ): >NK3R_HUMAN
IILAHKRMRTVT

SEQ ID NO: 9630 - protein, 12 aa, Homo sapiens
  ( 110 )...( 121 ): >NK3R_HUMAN
ILAHKRMRTVTN

SEQ ID NO: 9631 - protein, 12 aa, Homo sapiens
  ( 190 )...( 201 ): >NK3R_HUMAN
PLKPRLSATATK

SEQ ID NO: 9632 - protein, 12 aa, Homo sapiens
  ( 191 )...( 202 ): >NK3R_HUMAN
LKPRLSATATKI

SEQ ID NO: 9633 - protein, 12 aa, Homo sapiens
  ( 192 )...( 203 ): >NK3R_HUMAN
KPRLSATATKIV

SEQ ID NO: 9634 - protein, 12 aa, Homo sapiens
  ( 220 )...( 231 ): >NK3R_HUMAN
LYSKTKVMPGRT

SEQ ID NO: 9635 - protein, 12 aa, Homo sapiens
  ( 221 )...( 232 ): >NK3R_HUMAN
YSKTKVMPGRTL

SEQ ID NO: 9636 - protein, 12 aa, Homo sapiens
  ( 288 )...( 299 ): >NK3R_HUMAN
HEQLKAKRKVVK

SEQ ID NO: 9637 - protein, 12 aa, Homo sapiens
  ( 289 )...( 300 ): >NK3R_HUMAN
EQLKAKRKVVKM

SEQ ID NO: 9638 - protein, 12 aa, Homo sapiens
  ( 290 )...( 301 ): >NK3R_HUMAN
QLKAKRKVVKMM

SEQ ID NO: 9639 - protein, 12 aa, Homo sapiens
  ( 291 )...( 302 ): >NK3R_HUMAN
LKAKRKVVKMMI

SEQ ID NO: 9640 - protein, 12 aa, Homo sapiens
  ( 292 )...( 303 ): >NK3R_HUMAN
KAKRKVVKMMII

SEQ ID NO: 9641 - protein, 12 aa, Homo sapiens
  ( 293 )...( 304 ): >NK3R_HUMAN
AKRKVVKMMIIV

SEQ ID NO: 9642 - protein, 12 aa, Homo sapiens
  ( 420 )...( 431 ): >NK3R_HUMAN
TTRSSRKKRATP

SEQ ID NO: 9643 - protein, 12 aa, Homo sapiens
  ( 83 )...( 94 ): >NK4R_HUMAN
WIVLAHKRMRTV

SEQ ID NO: 9644 - protein, 12 aa, Homo sapiens
  ( 84 )...( 95 ): >NK4R_HUMAN
IVLAHKRMRTVT

SEQ ID NO: 9645 - protein, 12 aa, Homo sapiens
  ( 85 )...( 96 ): >NK4R_HUMAN
VLAHKRMRTVTN

SEQ ID NO: 9646 - protein, 12 aa, Homo sapiens
  ( 86 )...( 97 ): >NK4R_HUMAN
LAHKRMRTVTNS

SEQ ID NO: 9647 - protein, 12 aa, Homo sapiens
  ( 89 )...( 100 ): >NK4R_HUMAN
KRMRTVTNSFLV

SEQ ID NO: 9648 - protein, 12 aa, Homo sapiens
  ( 165 )...( 176 ): >NK4R_HUMAN
PLKPRLSATATR

SEQ ID NO: 9649 - protein, 12 aa, Homo sapiens
  ( 166 )...( 177 ): >NK4R_HUMAN
LKPRLSATATRI

SEQ ID NO: 9650 - protein, 12 aa, Homo sapiens
  ( 167 )...( 178 ): >NK4R_HUMAN
KPRLSATATRIV

SEQ ID NO: 9651 - protein, 12 aa, Homo sapiens
  ( 195 )...( 206 ): >NK4R_HUMAN
LYSKIKVMPGRT

SEQ ID NO: 9652 - protein, 12 aa, Homo sapiens
  ( 196 )...( 207 ): >NK4R_HUMAN
YSKIKVMPGRTL

SEQ ID NO: 9653 - protein, 12 aa, Homo sapiens
  ( 197 )...( 208 ): >NK4R_HUMAN
SKIKVMPGRTLC

SEQ ID NO: 9654 - protein, 12 aa, Homo sapiens
  ( 198 )...( 209 ): >NK4R_HUMAN
KIKVMPGRTLCY

SEQ ID NO: 9655 - protein, 12 aa, Homo sapiens
  ( 262 )...( 273 ): >NK4R_HUMAN
YQEQLKAKRKVV

SEQ ID NO: 9656 - protein, 12 aa, Homo sapiens
  ( 263 )...( 274 ): >NK4R_HUMAN
QEQLKAKRKVVK

SEQ ID NO: 9657 - protein, 12 aa, Homo sapiens
  ( 264 )...( 275 ): >NK4R_HUMAN
EQLKAKRKVVKM

SEQ ID NO: 9658 - protein, 12 aa, Homo sapiens
  ( 265 )...( 276 ): >NK4R_HUMAN
QLKAKRKVVKMM

SEQ ID NO: 9659 - protein, 12 aa, Homo sapiens
  ( 266 )...( 277 ): >NK4R_HUMAN
LKAKRKVVKMMI

SEQ ID NO: 9660 - protein, 12 aa, Homo sapiens
  ( 267 )...( 278 ): >NK4R_HUMAN
KAKRKVVKMMII

SEQ ID NO: 9661 - protein, 12 aa, Homo sapiens
  ( 268 )...( 279 ): >NK4R_HUMAN
AKRKVVKMMIIV

SEQ ID NO: 9662 - protein, 12 aa, Homo sapiens
  ( 257 )...( 268 ): >NMBR_HUMAN
QMETRKRLAKIV

SEQ ID NO: 9663 - protein, 12 aa, Homo sapiens
  ( 258 )...( 269 ): >NMBR_HUMAN
METRKRLAKIVL

SEQ ID NO: 9664 - protein, 12 aa, Homo sapiens
  ( 259 )...( 270 ): >NMBR_HUMAN
ETRKRLAKIVLV

SEQ ID NO: 9665 - protein, 12 aa, Homo sapiens
  ( 260 )...( 271 ): >NMBR_HUMAN
TRKRLAKIVLVF

SEQ ID NO: 9666 - protein, 12 aa, Homo sapiens
  ( 261 )...( 272 ): >NMBR_HUMAN
RKRLAKIVLVFV

SEQ ID NO: 9667 - protein, 12 aa, Homo sapiens
  ( 359 )...( 370 ): >NMBR_HUMAN
AVRMTSLKSNAK

SEQ ID NO: 9668 - protein, 12 aa, Homo sapiens
  ( 360 )...( 371 ): >NMBR_HUMAN
VRMTSLKSNAKN

SEQ ID NO: 9669 - protein, 12 aa, Homo sapiens
  ( 81 )...( 92 ): >NTR1_HUMAN
NTVTAFTLARKK

SEQ ID NO: 9670 - protein, 12 aa, Homo sapiens
  ( 83 )...( 94 ): >NTR1_HUMAN
VTAFTLARKKSL

SEQ ID NO: 9671 - protein, 12 aa, Homo sapiens
  ( 84 )...( 95 ): >NTR1_HUMAN
TAFTLARKKSLQ

SEQ ID NO: 9672 - protein, 12 aa, Homo sapiens
  ( 85 )...( 96 ): >NTR1_HUMAN
AFTLARKKSLQS

SEQ ID NO: 9673 - protein, 12 aa, Homo sapiens
  ( 86 )...( 97 ): >NTR1_HUMAN
FTLARKKSLQSL

SEQ ID NO: 9674 - protein, 12 aa, Homo sapiens
  ( 87 )...( 98 ): >NTR1_HUMAN
TLARKKSLQSLQ

SEQ ID NO: 9675 - protein, 12 aa, Homo sapiens
  ( 88 )...( 99 ): >NTR1_HUMAN
LARKKSLQSLQS

SEQ ID NO: 9676 - protein, 12 aa, Homo sapiens
  ( 174 )...( 185 ): >NTR1_HUMAN
FKAKTLMSRSRT

SEQ ID NO: 9677 - protein, 12 aa, Homo sapiens
  ( 175 )...( 186 ): >NTR1_HUMAN
KAKTLMSRSRTK

SEQ ID NO: 9678 - protein, 12 aa, Homo sapiens
  ( 176 )...( 187 ): >NTR1_HUMAN
AKTLMSRSRTKK

SEQ ID NO: 9679 - protein, 12 aa, Homo sapiens
  ( 178 )...( 189 ): >NTR1_HUMAN
TLMSRSRTKKFI

SEQ ID NO: 9680 - protein, 12 aa, Homo sapiens
  ( 180 )...( 191 ): >NTR1_HUMAN
MSRSRTKKFISA

SEQ ID NO: 9681 - protein, 12 aa, Homo sapiens
  ( 181 )...( 192 ): >NTR1_HUMAN
SRSRTKKFISAI

SEQ ID NO: 9682 - protein, 12 aa, Homo sapiens
  ( 183 )...( 194 ): >NTR1_HUMAN
SRTKKFISAIWL

SEQ ID NO: 9683 - protein, 12 aa, Homo sapiens
  ( 184 )...( 195 ): >NTR1_HUMAN
RTKKFISAIWLA

SEQ ID NO: 9684 - protein, 12 aa, Homo sapiens
  ( 292 )...( 303 ): >NTR1_HUMAN
PGRVQALRHGVR

SEQ ID NO: 9685 - protein, 12 aa, Homo sapiens
  ( 293 )...( 304 ): >NTR1_HUMAN
GRVQALRHGVRV

SEQ ID NO: 9686 - protein, 12 aa, Homo sapiens
  ( 294 )...( 305 ): >NTR1_HUMAN
RVQALRHGVRVL

SEQ ID NO: 9687 - protein, 12 aa, Homo sapiens
  ( 295 )...( 306 ): >NTR1_HUMAN
VQALRHGVRVLR

SEQ ID NO: 9688 - protein, 12 aa, Homo sapiens
  ( 296 )...( 307 ): >NTR1_HUMAN
QALRHGVRVLRA

SEQ ID NO: 9689 - protein, 12 aa, Homo sapiens
  ( 297 )...( 308 ): >NTR1_HUMAN
ALRHGVRVLRAV

SEQ ID NO: 9690 - protein, 12 aa, Homo sapiens
  ( 298 )...( 309 ): >NTR1_HUMAN
LRHGVRVLRAVV

SEQ ID NO: 9691 - protein, 12 aa, Homo sapiens
  ( 299 )...( 310 ): >NTR1_HUMAN
RHGVRVLRAVVI

SEQ ID NO: 9692 - protein, 12 aa, Homo sapiens
  ( 53 )...( 64 ): >NTR2_HUMAN
SVHVVLKARAGR

SEQ ID NO: 9693 - protein, 12 aa, Homo sapiens
  ( 54 )...( 65 ): >NTR2_HUMAN
VHVVLKARAGRA

SEQ ID NO: 9694 - protein, 12 aa, Homo sapiens
  ( 57 )...( 68 ): >NTR2_HUMAN
VLKARAGRAGRL

SEQ ID NO: 9695 - protein, 12 aa, Homo sapiens
  ( 60 )...( 71 ): >NTR2_HUMAN
ARAGRAGRLRHH

SEQ ID NO: 9696 - protein, 12 aa, Homo sapiens
  ( 61 )...( 72 ): >NTR2_HUMAN
RAGRAGRLRHHV

SEQ ID NO: 9697 - protein, 12 aa, Homo sapiens
  ( 62 )...( 73 ): >NTR2_HUMAN
AGRAGRLRHHVL

SEQ ID NO: 9698 - protein, 12 aa, Homo sapiens
  ( 63 )...( 74 ): >NTR2_HUMAN
GRAGRLRHHVLS

SEQ ID NO: 9699 - protein, 12 aa, Homo sapiens
  ( 64 )...( 75 ): >NTR2_HUMAN
RAGRLRHHVLSL

SEQ ID NO: 9700 - protein, 12 aa, Homo sapiens
  ( 139 )...( 150 ): >NTR2_HUMAN
QPLRARSLLTPR

SEQ ID NO: 9701 - protein, 12 aa, Homo sapiens
  ( 141 )...( 152 ): >NTR2_HUMAN
LRARSLLTPRRT

SEQ ID NO: 9702 - protein, 12 aa, Homo sapiens
  ( 145 )...( 156 ): >NTR2_HUMAN
SLLTPRRTRWLV

SEQ ID NO: 9703 - protein, 12 aa, Homo sapiens
  ( 146 )...( 157 ): >NTR2_HUMAN
LLTPRRTRWLVA

SEQ ID NO: 9704 - protein, 12 aa, Homo sapiens
  ( 147 )...( 158 ): >NTR2_HUMAN
LTPRRTRWLVAL

SEQ ID NO: 9705 - protein, 12 aa, Homo sapiens
  ( 148 )...( 159 ): >NTR2_HUMAN
TPRRTRWLVALS

SEQ ID NO: 9706 - protein, 12 aa, Homo sapiens
  ( 278 )...( 289 ): >NTR2_HUMAN
VSLVRHKDVRRI

SEQ ID NO: 9707 - protein, 12 aa, Homo sapiens
  ( 288 )...( 299 ): >NTR2_HUMAN
RIRSLQRSVQVL

SEQ ID NO: 9708 - protein, 12 aa, Homo sapiens
  ( 289 )...( 300 ): >NTR2_HUMAN
IRSLQRSVQVLR

SEQ ID NO: 9709 - protein, 12 aa, Homo sapiens
  ( 290 )...( 301 ): >NTR2_HUMAN
RSLQRSVQVLRA

SEQ ID NO: 9710 - protein, 12 aa, Homo sapiens
  ( 364 )...( 375 ): >NY1R_HUMAN
LKQASPVAFKKI

SEQ ID NO: 9711 - protein, 12 aa, Homo sapiens
  ( 71 )...( 82 ): >NY2R_HUMAN
VIHVVIKFKSMR

SEQ ID NO: 9712 - protein, 12 aa, Homo sapiens
  ( 74 )...( 85 ): >NY2R_HUMAN
VVIKFKSMRTVT

SEQ ID NO: 9713 - protein, 12 aa, Homo sapiens
  ( 75 )...( 86 ): >NY2R_HUMAN
VIKFKSMRTVTN

SEQ ID NO: 9714 - protein, 12 aa, Homo sapiens
  ( 76 )...( 87 ): >NY2R_HUMAN
IKFKSMRTVTNF

SEQ ID NO: 9715 - protein, 12 aa, Homo sapiens
  ( 158 )...( 169 ): >NY2R_HUMAN
SKISKRISFLII

SEQ ID NO: 9716 - protein, 12 aa, Homo sapiens
  ( 159 )...( 170 ): >NY2R_HUMAN
KISKRISFLIIG

SEQ ID NO: 9717 - protein, 12 aa, Homo sapiens
  ( 261 )...( 272 ): >NY2R_HUMAN
QRRQKTTKMLVC

SEQ ID NO: 9718 - protein, 12 aa, Homo sapiens
  ( 262 )...( 273 ): >NY2R_HUMAN
RRQKTTKMLVCV

SEQ ID NO: 9719 - protein, 12 aa, Homo sapiens
  ( 263 )...( 274 ): >NY2R_HUMAN
RQKTTKMLVCVV

SEQ ID NO: 9720 - protein, 12 aa, Homo sapiens
  ( 355 )...( 366 ): >NY2R_HUMAN
VTFKAKKNLEVR

SEQ ID NO: 9721 - protein, 12 aa, Homo sapiens
  ( 359 )...( 370 ): >NY2R_HUMAN
AKKNLEVRKNSG

SEQ ID NO: 9722 - protein, 12 aa, Homo sapiens
  ( 360 )...( 371 ): >NY2R_HUMAN
KKNLEVRKNSGP

SEQ ID NO: 9723 - protein, 12 aa, Homo sapiens
  ( 241 )...( 252 ): >NY4R_HUMAN
LQRQGRVFHKGT

SEQ ID NO: 9724 - protein, 12 aa, Homo sapiens
  ( 243 )...( 254 ): >NY4R_HUMAN
RQGRVFHKGTYS

SEQ ID NO: 9725 - protein, 12 aa, Homo sapiens
  ( 245 )...( 256 ): >NY4R_HUMAN
GRVFHKGTYSLR

SEQ ID NO: 9726 - protein, 12 aa, Homo sapiens
  ( 246 )...( 257 ): >NY4R_HUMAN
RVFHKGTYSLRA

SEQ ID NO: 9727 - protein, 12 aa, Homo sapiens
  ( 71 )...( 82 ): >NY5R_HUMAN
LILMALMKKRNQ

SEQ ID NO: 9728 - protein, 12 aa, Homo sapiens
  ( 73 )...( 84 ): >NY5R_HUMAN
LMALMKKRNQKT

SEQ ID NO: 9729 - protein, 12 aa, Homo sapiens
  ( 74 )...( 85 ): >NY5R_HUMAN
MALMKKRNQKTT

SEQ ID NO: 9730 - protein, 12 aa, Homo sapiens
  ( 75 )...( 86 ): >NY5R_HUMAN
ALMKKRNQKTTV

SEQ ID NO: 9731 - protein, 12 aa, Homo sapiens
  ( 79 )...( 90 ): >NY5R_HUMAN
KRNQKTTVNFLI

SEQ ID NO: 9732 - protein, 12 aa, Homo sapiens
  ( 297 )...( 308 ): >NY5R_HUMAN
RRYSKKTACVLP

SEQ ID NO: 9733 - protein, 12 aa, Homo sapiens
  ( 357 )...( 368 ): >NY5R_HUMAN
VHELRVKRSVTR

SEQ ID NO: 9734 - protein, 12 aa, Homo sapiens
  ( 358 )...( 369 ): >NY5R_HUMAN
HELRVKRSVTRI

SEQ ID NO: 9735 - protein, 12 aa, Homo sapiens
  ( 359 )...( 370 ): >NY5R_HUMAN
ELRVKRSVTRIK

SEQ ID NO: 9736 - protein, 12 aa, Homo sapiens
  ( 365 )...( 376 ): >NY5R_HUMAN
SVTRIKKRSRSV

SEQ ID NO: 9737 - protein, 12 aa, Homo sapiens
  ( 366 )...( 377 ): >NY5R_HUMAN
VTRIKKRSRSVF

SEQ ID NO: 9738 - protein, 12 aa, Homo sapiens
  ( 295 )...( 306 ): >O1A2_HUMAN
MKAALQKLFSKR

SEQ ID NO: 9739 - protein, 12 aa, Homo sapiens
  ( 296 )...( 307 ): >O1A2_HUMAN
KAALQKLFSKRI

SEQ ID NO: 9740 - protein, 12 aa, Homo sapiens
  ( 297 )...( 308 ): >O1A2_HUMAN
AALQKLFSKRIS

SEQ ID NO: 9741 - protein, 12 aa, Homo sapiens
  ( 298 )...( 309 ): >O1A2_HUMAN
ALQKLFSKRISS

SEQ ID NO: 9742 - protein, 11 aa, Homo sapiens
  ( 299 )...( 310 ): >O1A2_HUMAN
LQKLFSKRISS

SEQ ID NO: 9743 - protein, 12 aa, Homo sapiens
  ( 225 )...( 236 ): >O1C1_HUMAN
VLKITSTQGKQR

SEQ ID NO: 9744 - protein, 12 aa, Homo sapiens
  ( 226 )...( 237 ): >O1C1_HUMAN
LKITSTQGKQRA

SEQ ID NO: 9745 - protein, 12 aa, Homo sapiens
  ( 227 )...( 238 ): >O1C1_HUMAN
KITSTQGKQRAV

SEQ ID NO: 9746 - protein, 12 aa, Homo sapiens
  ( 295 )...( 306 ): >O1C1_HUMAN
RDMKRGLQKMLL

SEQ ID NO: 9747 - protein, 12 aa, Homo sapiens
  ( 296 )...( 307 ): >O1C1_HUMAN
DMKRGLQKMLLK

SEQ ID NO: 9748 - protein, 12 aa, Homo sapiens
  ( 297 )...( 308 ): >O1C1_HUMAN
MKRGLQKMLLKC

SEQ ID NO: 9749 - protein, 12 aa, Homo sapiens
  ( 298 )...( 309 ): >O1C1_HUMAN
KRGLQKMLLKCT

SEQ ID NO: 9750 - protein, 12 aa, Homo sapiens
  ( 299 )...( 310 ): >O1C1_HUMAN
RGLQKMLLKCTV

SEQ ID NO: 9751 - protein, 12 aa, Homo sapiens
  ( 162 )...( 173 ): >O1D2_HUMAN
LMTRVTFCGSRK

SEQ ID NO: 9752 - protein, 12 aa, Homo sapiens
  ( 163 )...( 174 ): >O1D2_HUMAN
MTRVTFCGSRKI

SEQ ID NO: 9753 - protein, 12 aa, Homo sapiens
  ( 164 )...( 175 ): >O1D2_HUMAN
TRVTFCGSRKIH

SEQ ID NO: 9754 - protein, 12 aa, Homo sapiens
  ( 165 )...( 176 ): >O1D2_HUMAN
RVTFCGSRKIHY

SEQ ID NO: 9755 - protein, 12 aa, Homo sapiens
  ( 222 )...( 233 ): >O1D2_HUMAN
IRAILRIPSVSK

SEQ ID NO: 9756 - protein, 12 aa, Homo sapiens
  ( 223 )...( 234 ): >O1D2_HUMAN
RAILRIPSVSKK

SEQ ID NO: 9757 - protein, 12 aa, Homo sapiens
  ( 224 )...( 235 ): >O1D2_HUMAN
AILRIPSVSKKY

SEQ ID NO: 9758 - protein, 12 aa, Homo sapiens
  ( 225 )...( 236 ): >O1D2_HUMAN
ILRIPSVSKKYK

SEQ ID NO: 9759 - protein, 12 aa, Homo sapiens
  ( 226 )...( 237 ): >O1D2_HUMAN
LRIPSVSKKYKA

SEQ ID NO: 9760 - protein, 12 aa, Homo sapiens
  ( 223 )...( 234 ): >O1D4_HUMAN
RTILQMPSASKK

SEQ ID NO: 9761 - protein, 12 aa, Homo sapiens
  ( 223 )...( 234 ): >O1D5_HUMAN
RTILQMPSASKK

SEQ ID NO: 9762 - protein, 12 aa, Homo sapiens
  ( 293 )...( 304 ): >O1E1_HUMAN
RNRDMKGALSRV

SEQ ID NO: 9763 - protein, 12 aa, Homo sapiens
  ( 297 )...( 308 ): >O1E1_HUMAN
MKGALSRVIHQK

SEQ ID NO: 9764 - protein, 12 aa, Homo sapiens
  ( 298 )...( 309 ): >O1E1_HUMAN
KGALSRVIHQKK

SEQ ID NO: 9765 - protein, 12 aa, Homo sapiens
  ( 306 )...( 317 ): >O1E2_HUMAN
MKGALERVICKR

SEQ ID NO: 9766 - protein, 12 aa, Homo sapiens
  ( 307 )...( 318 ): >O1E2_HUMAN
KGALERVICKRK

SEQ ID NO: 9767 - protein, 12 aa, Homo sapiens
  ( 308 )...( 319 ): >O1E2_HUMAN
GALERVICKRKN

SEQ ID NO: 9768 - protein, 12 aa, Homo sapiens
  ( 309 )...( 320 ): >O1E2_HUMAN
ALERVICKRKNP

SEQ ID NO: 9769 - protein, 11 aa, Homo sapiens
  ( 313 )...( 324 ): >O1E2_HUMAN
VICKRKNPFLL

SEQ ID NO: 9770 - protein, 12 aa, Homo sapiens
  ( 223 )...( 234 ): >O1F1_HUMAN
CTVLKVPSTKGR

SEQ ID NO: 9771 - protein, 12 aa, Homo sapiens
  ( 224 )...( 235 ): >O1F1_HUMAN
TVLKVPSTKGRW

SEQ ID NO: 9772 - protein, 12 aa, Homo sapiens
  ( 225 )...( 236 ): >O1F1_HUMAN
VLKVPSTKGRWK

SEQ ID NO: 9773 - protein, 12 aa, Homo sapiens
  ( 226 )...( 237 ): >O1F1_HUMAN
LKVPSTKGRWKA

SEQ ID NO: 9774 - protein, 12 aa, Homo sapiens
  ( 227 )...( 238 ): >O1F1_HUMAN
KVPSTKGRWKAF

SEQ ID NO: 9775 - protein, 12 aa, Homo sapiens
  ( 291 )...( 302 ): >O1F1_HUMAN
SLRNRYLKGALK

SEQ ID NO: 9776 - protein, 12 aa, Homo sapiens
  ( 294 )...( 305 ): >O1F1_HUMAN
NRYLKGALKKVV

SEQ ID NO: 9777 - protein, 12 aa, Homo sapiens
  ( 295 )...( 306 ): >O1F1_HUMAN
RYLKGALKKVVG

SEQ ID NO: 9778 - protein, 12 aa, Homo sapiens
  ( 296 )...( 307 ): >O1F1_HUMAN
YLKGALKKVVGR

SEQ ID NO: 9779 - protein, 12 aa, Homo sapiens
  ( 300 )...( 311 ): >O1F1_HUMAN
ALKKVVGRVVFS

SEQ ID NO: 9780 - protein, 11 aa, Homo sapiens
  ( 302 )...( 313 ): >O1F1_HUMAN
KKVVGRVVFSV

SEQ ID NO: 9781 - protein, 12 aa, Homo sapiens
  ( 224 )...( 235 ): >O1G1_HUMAN
TILKIPSAQGKR

SEQ ID NO: 9782 - protein, 12 aa, Homo sapiens
  ( 225 )...( 236 ): >O1G1_HUMAN
ILKIPSAQGKRK

SEQ ID NO: 9783 - protein, 12 aa, Homo sapiens
  ( 226 )...( 237 ): >O1G1_HUMAN
LKIPSAQGKRKA

SEQ ID NO: 9784 - protein, 12 aa, Homo sapiens
  ( 227 )...( 238 ): >O1G1_HUMAN
KIPSAQGKRKAF

SEQ ID NO: 9785 - protein, 12 aa, Homo sapiens
  ( 297 )...( 308 ): >O1G1_HUMAN
IKSSLRKLIWVR

SEQ ID NO: 9786 - protein, 12 aa, Homo sapiens
  ( 299 )...( 310 ): >O1G1_HUMAN
SSLRKLIWVRKI

SEQ ID NO: 9787 - protein, 12 aa, Homo sapiens
  ( 223 )...( 234 ): >O1I1_HUMAN
WTVFKIPSTRGK

SEQ ID NO: 9788 - protein, 12 aa, Homo sapiens
  ( 224 )...( 235 ): >O1I1_HUMAN
TVFKIPSTRGKW

SEQ ID NO: 9789 - protein, 12 aa, Homo sapiens
  ( 225 )...( 236 ): >O1I1_HUMAN
VFKIPSTRGKWK

SEQ ID NO: 9790 - protein, 12 aa, Homo sapiens
  ( 226 )...( 237 ): >O1I1_HUMAN
FKIPSTRGKWKA

SEQ ID NO: 9791 - protein, 12 aa, Homo sapiens
  ( 227 )...( 238 ): >O1I1_HUMAN
KIPSTRGKWKAF

SEQ ID NO: 9792 - protein, 12 aa, Homo sapiens
  ( 292 )...( 303 ): >O1I1_HUMAN
IRNKDMKAALGK

SEQ ID NO: 9793 - protein, 12 aa, Homo sapiens
  ( 293 )...( 304 ): >O1I1_HUMAN
RNKDMKAALGKL

SEQ ID NO: 9794 - protein, 12 aa, Homo sapiens
  ( 223 )...( 234 ): >O1Q1_HUMAN
LVVLRIPSAKGR

SEQ ID NO: 9795 - protein, 12 aa, Homo sapiens
  ( 224 )...( 235 ): >O1Q1_HUMAN
VVLRIPSAKGRW

SEQ ID NO: 9796 - protein, 12 aa, Homo sapiens
  ( 225 )...( 236 ): >O1Q1_HUMAN
VLRIPSAKGRWK

SEQ ID NO: 9797 - protein, 12 aa, Homo sapiens
  ( 226 )...( 237 ): >O1Q1_HUMAN
LRIPSAKGRWKT

SEQ ID NO: 9798 - protein, 12 aa, Homo sapiens
  ( 261 )...( 272 ): >O1Q1_HUMAN
RPLSSYSVTKGR

SEQ ID NO: 9799 - protein, 12 aa, Homo sapiens
  ( 297 )...( 308 ): >O2A4_HUMAN
KNTLKRVLGVER

SEQ ID NO: 9800 - protein, 12 aa, Homo sapiens
  ( 297 )...( 308 ): >O2B2_HUMAN
VKEAFKRLVAKS

SEQ ID NO: 9801 - protein, 12 aa, Homo sapiens
  ( 298 )...( 309 ): >O2B2_HUMAN
KEAFKRLVAKSL

SEQ ID NO: 9802 - protein, 12 aa, Homo sapiens
  ( 300 )...( 311 ): >O2B2_HUMAN
AFKRLVAKSLLN

SEQ ID NO: 9803 - protein, 12 aa, Homo sapiens
  ( 301 )...( 312 ): >O2B2_HUMAN
FKRLVAKSLLNQ

SEQ ID NO: 9804 - protein, 12 aa, Homo sapiens
  ( 225 )...( 236 ): >O2B3_HUMAN
VLKIRSAEGRQK

SEQ ID NO: 9805 - protein, 12 aa, Homo sapiens
  ( 226 )...( 237 ): >O2B3_HUMAN
LKIRSAEGRQKA

SEQ ID NO: 9806 - protein, 12 aa, Homo sapiens
  ( 227 )...( 238 ): >O2B3_HUMAN
KIRSAEGRQKAF

SEQ ID NO: 9807 - protein, 12 aa, Homo sapiens
  ( 84 )...( 95 ): >O2B6_HUMAN
NLCSIRKVISYR

SEQ ID NO: 9808 - protein, 12 aa, Homo sapiens
  ( 85 )...( 96 ): >O2B6_HUMAN
LCSIRKVISYRG

SEQ ID NO: 9809 - protein, 12 aa, Homo sapiens
  ( 87 )...( 98 ): >O2B6_HUMAN
SIRKVISYRGCV

SEQ ID NO: 9810 - protein, 12 aa, Homo sapiens
  ( 88 )...( 99 ): >O2B6_HUMAN
IRKVISYRGCVA

SEQ ID NO: 9811 - protein, 12 aa, Homo sapiens
  ( 89 )...( 100 ): >O2B6_HUMAN
RKVISYRGCVAQ

SEQ ID NO: 9812 - protein, 12 aa, Homo sapiens
  ( 297 )...( 308 ): >O2B6_HUMAN
VKEGFKRLVARV

SEQ ID NO: 9813 - protein, 12 aa, Homo sapiens
  ( 298 )...( 309 ): >O2B6_HUMAN
KEGFKRLVARVF

SEQ ID NO: 9814 - protein, 11 aa, Homo sapiens
  ( 303 )...( 314 ): >O2B6_HUMAN
RLVARVFLIKK

SEQ ID NO: 9815 - protein, 9 aa, Homo sapiens
  ( 305 )...( 316 ): >O2B6_HUMAN
VARVFLIKK

SEQ ID NO: 9816 - protein, 12 aa, Homo sapiens
  ( 122 )...( 133 ): >O2C1_HUMAN
RYVAVCRPLRYT

SEQ ID NO: 9817 - protein, 12 aa, Homo sapiens
  ( 225 )...( 236 ): >O2C1_HUMAN
VLKIHSAEGRRK

SEQ ID NO: 9818 - protein, 12 aa, Homo sapiens
  ( 226 )...( 237 ): >O2C1_HUMAN
LKIHSAEGRRKA

SEQ ID NO: 9819 - protein, 12 aa, Homo sapiens
  ( 227 )...( 238 ): >O2C1_HUMAN
KIHSAEGRRKAF

SEQ ID NO: 9820 - protein, 12 aa, Homo sapiens
  ( 292 )...( 303 ): >O2C1_HUMAN
LRNMEVKGALRR

SEQ ID NO: 9821 - protein, 12 aa, Homo sapiens
  ( 293 )...( 304 ): >O2C1_HUMAN
RNMEVKGALRRL

SEQ ID NO: 9822 - protein, 12 aa, Homo sapiens
  ( 296 )...( 307 ): >O2C1_HUMAN
EVKGALRRLLGK

SEQ ID NO: 9823 - protein, 12 aa, Homo sapiens
  ( 299 )...( 310 ): >O2C1_HUMAN
GALRRLLGKGRE

SEQ ID NO: 9824 - protein, 12 aa, Homo sapiens
  ( 300 )...( 311 ): >O2C1_HUMAN
ALRRLLGKGREV

SEQ ID NO: 9825 - protein, 12 aa, Homo sapiens
  ( 301 )...( 312 ): >O2C1_HUMAN
LRRLLGKGREVG

SEQ ID NO: 9826 - protein, 11 aa, Homo sapiens
  ( 302 )...( 313 ): >O2C1_HUMAN
RRLLGKGREVG

SEQ ID NO: 9827 - protein, 12 aa, Homo sapiens
  ( 79 )...( 90 ): >O2D2_HUMAN
PQALVHLLSRKK

SEQ ID NO: 9828 - protein, 12 aa, Homo sapiens
  ( 80 )...( 91 ): >O2D2_HUMAN
QALVHLLSRKKV

SEQ ID NO: 9829 - protein, 12 aa, Homo sapiens
  ( 81 )...( 92 ): >O2D2_HUMAN
ALVHLLSRKKVI

SEQ ID NO: 9830 - protein, 12 aa, Homo sapiens
  ( 82 )...( 93 ): >O2D2_HUMAN
LVHLLSRKKVIA

SEQ ID NO: 9831 - protein, 12 aa, Homo sapiens
  ( 83 )...( 94 ): >O2D2_HUMAN
VHLLSRKKVIAF

SEQ ID NO: 9832 - protein, 12 aa, Homo sapiens
  ( 85 )...( 96 ): >O2D2_HUMAN
LLSRKKVIAFTL

SEQ ID NO: 9833 - protein, 12 aa, Homo sapiens
  ( 86 )...( 97 ): >O2D2_HUMAN
LSRKKVIAFTLC

SEQ ID NO: 9834 - protein, 12 aa, Homo sapiens
  ( 87 )...( 98 ): >O2D2_HUMAN
SRKKVIAFTLCA

SEQ ID NO: 9835 - protein, 12 aa, Homo sapiens
  ( 88 )...( 99 ): >O2D2_HUMAN
RKKVIAFTLCAA

SEQ ID NO: 9836 - protein, 12 aa, Homo sapiens
  ( 89 )...( 100 ): >O2D2_HUMAN
KKVIAFTLCAAR

SEQ ID NO: 9837 - protein, 12 aa, Homo sapiens
  ( 218 )...( 229 ): >O2D2_HUMAN
YGRIIVTVVKMK

SEQ ID NO: 9838 - protein, 12 aa, Homo sapiens
  ( 220 )...( 231 ): >O2D2_HUMAN
RIIVTVVKMKST

SEQ ID NO: 9839 - protein, 12 aa, Homo sapiens
  ( 289 )...( 300 ): >O2D2_HUMAN
SLRNKDVKAALR

SEQ ID NO: 9840 - protein, 12 aa, Homo sapiens
  ( 291 )...( 302 ): >O2D2_HUMAN
RNKDVKAALRKV

SEQ ID NO: 9841 - protein, 12 aa, Homo sapiens
  ( 292 )...( 303 ): >O2D2_HUMAN
NKDVKAALRKVA

SEQ ID NO: 9842 - protein, 12 aa, Homo sapiens
  ( 293 )...( 304 ): >O2D2_HUMAN
KDVKAALRKVAT

SEQ ID NO: 9843 - protein, 12 aa, Homo sapiens
  ( 294 )...( 305 ): >O2D2_HUMAN
DVKAALRKVATR

SEQ ID NO: 9844 - protein, 12 aa, Homo sapiens
  ( 295 )...( 306 ): >O2D2_HUMAN
VKAALRKVATRN

SEQ ID NO: 9845 - protein, 12 aa, Homo sapiens
  ( 296 )...( 307 ): >O2D2_HUMAN
KAALRKVATRNF

SEQ ID NO: 9846 - protein, 12 aa, Homo sapiens
  ( 297 )...( 308 ): >O2D2_HUMAN
AALRKVATRNFP

SEQ ID NO: 9847 - protein, 11 aa, Homo sapiens
  ( 298 )...( 309 ): >O2D2_HUMAN
ALRKVATRNFP

SEQ ID NO: 9848 - protein, 12 aa, Homo sapiens
  ( 224 )...( 235 ): >O2F1_HUMAN
TILKIQSREGRK

SEQ ID NO: 9849 - protein, 12 aa, Homo sapiens
  ( 225 )...( 236 ): >O2F1_HUMAN
ILKIQSREGRKK

SEQ ID NO: 9850 - protein, 12 aa, Homo sapiens
  ( 226 )...( 237 ): >O2F1_HUMAN
LKIQSREGRKKA

SEQ ID NO: 9851 - protein, 12 aa, Homo sapiens
  ( 231 )...( 242 ): >O2F1_HUMAN
REGRKKAFHTCA

SEQ ID NO: 9852 - protein, 12 aa, Homo sapiens
  ( 220 )...( 231 ): >O2F2_HUMAN
RIISTILKIQSR

SEQ ID NO: 9853 - protein, 12 aa, Homo sapiens
  ( 224 )...( 235 ): >O2F2_HUMAN
TILKIQSREGRK

SEQ ID NO: 9854 - protein, 12 aa, Homo sapiens
  ( 225 )...( 236 ): >O2F2_HUMAN
ILKIQSREGRKK

SEQ ID NO: 9855 - protein, 12 aa, Homo sapiens
  ( 226 )...( 237 ): >O2F2_HUMAN
LKIQSREGRKKA

SEQ ID NO: 9856 - protein, 12 aa, Homo sapiens
  ( 231 )...( 242 ): >O2F2_HUMAN
REGRKKAFHTCA

SEQ ID NO: 9857 - protein, 12 aa, Homo sapiens
  ( 294 )...( 305 ): >O2G1_HUMAN
NKEVMRALRRVL

SEQ ID NO: 9858 - protein, 12 aa, Homo sapiens
  ( 295 )...( 306 ): >O2G1_HUMAN
KEVMRALRRVLG

SEQ ID NO: 9859 - protein, 12 aa, Homo sapiens
  ( 296 )...( 307 ): >O2G1_HUMAN
EVMRALRRVLGK

SEQ ID NO: 9860 - protein, 12 aa, Homo sapiens
  ( 297 )...( 308 ): >O2G1_HUMAN
VMRALRRVLGKY

SEQ ID NO: 9861 - protein, 12 aa, Homo sapiens
  ( 298 )...( 309 ): >O2G1_HUMAN
MRALRRVLGKYM

SEQ ID NO: 9862 - protein, 12 aa, Homo sapiens
  ( 299 )...( 310 ): >O2G1_HUMAN
RALRRVLGKYML

SEQ ID NO: 9863 - protein, 12 aa, Homo sapiens
  ( 300 )...( 311 ): >O2G1_HUMAN
ALRRVLGKYMLP

SEQ ID NO: 9864 - protein, 12 aa, Homo sapiens
  ( 301 )...( 312 ): >O2G1_HUMAN
LRRVLGKYMLPA

SEQ ID NO: 9865 - protein, 12 aa, Homo sapiens
  ( 302 )...( 313 ): >O2G1_HUMAN
RRVLGKYMLPAH

SEQ ID NO: 9866 - protein, 12 aa, Homo sapiens
  ( 223 )...( 234 ): >O2H1_HUMAN
VLRINSATAWRK

SEQ ID NO: 9867 - protein, 12 aa, Homo sapiens
  ( 224 )...( 235 ): >O2H1_HUMAN
LRINSATAWRKA

SEQ ID NO: 9868 - protein, 12 aa, Homo sapiens
  ( 293 )...( 304 ): >O2H1_HUMAN
KEIKRALRRLLG

SEQ ID NO: 9869 - protein, 12 aa, Homo sapiens
  ( 294 )...( 305 ): >O2H1_HUMAN
EIKRALRRLLGK

SEQ ID NO: 9870 - protein, 12 aa, Homo sapiens
  ( 295 )...( 306 ): >O2H1_HUMAN
IKRALRRLLGKE

SEQ ID NO: 9871 - protein, 12 aa, Homo sapiens
  ( 221 )...( 232 ): >O2H2_HUMAN
WAVLRINSAKGR

SEQ ID NO: 9872 - protein, 12 aa, Homo sapiens
  ( 222 )...( 233 ): >O2H2_HUMAN
AVLRINSAKGRR

SEQ ID NO: 9873 - protein, 12 aa, Homo sapiens
  ( 226 )...( 237 ): >O2H2_HUMAN
INSAKGRRKAFG

SEQ ID NO: 9874 - protein, 12 aa, Homo sapiens
  ( 227 )...( 238 ): >O2H2_HUMAN
NSAKGRRKAFGT

SEQ ID NO: 9875 - protein, 12 aa, Homo sapiens
  ( 293 )...( 304 ): >O2H2_HUMAN
KEVTRAFRRLLG

SEQ ID NO: 9876 - protein, 12 aa, Homo sapiens
  ( 294 )...( 305 ): >O2H2_HUMAN
EVTRAFRRLLGK

SEQ ID NO: 9877 - protein, 12 aa, Homo sapiens
  ( 295 )...( 306 ): >O2H2_HUMAN
VTRAFRRLLGKE

SEQ ID NO: 9878 - protein, 12 aa, Homo sapiens
  ( 296 )...( 307 ): >O2H2_HUMAN
TRAFRRLLGKEM

SEQ ID NO: 9879 - protein, 12 aa, Homo sapiens
  ( 297 )...( 308 ): >O2H2_HUMAN
RAFRRLLGKEMG

SEQ ID NO: 9880 - protein, 12 aa, Homo sapiens
  ( 221 )...( 232 ): >O2H3_HUMAN
WAVLRINSAKGR

SEQ ID NO: 9881 - protein, 12 aa, Homo sapiens
  ( 222 )...( 233 ): >O2H3_HUMAN
AVLRINSAKGRR

SEQ ID NO: 9882 - protein, 12 aa, Homo sapiens
  ( 226 )...( 237 ): >O2H3_HUMAN
INSAKGRRKAFG

SEQ ID NO: 9883 - protein, 12 aa, Homo sapiens
  ( 227 )...( 238 ): >O2H3_HUMAN
NSAKGRRKAFGT

SEQ ID NO: 9884 - protein, 12 aa, Homo sapiens
  ( 293 )...( 304 ): >O2H3_HUMAN
KEVTRAFRRLLG

SEQ ID NO: 9885 - protein, 12 aa, Homo sapiens
  ( 294 )...( 305 ): >O2H3_HUMAN
EVTRAFRRLLGK

SEQ ID NO: 9886 - protein, 12 aa, Homo sapiens
  ( 295 )...( 306 ): >O2H3_HUMAN
VTRAFRRLLGKE

SEQ ID NO: 9887 - protein, 12 aa, Homo sapiens
  ( 289 )...( 300 ): >O2J2_HUMAN
LIYTLRNKHVKG

SEQ ID NO: 9888 - protein, 12 aa, Homo sapiens
  ( 290 )...( 301 ): >O2J2_HUMAN
IYTLRNKHVKGA

SEQ ID NO: 9889 - protein, 12 aa, Homo sapiens
  ( 291 )...( 302 ): >O2J2_HUMAN
YTLRNKHVKGAA

SEQ ID NO: 9890 - protein, 12 aa, Homo sapiens
  ( 292 )...( 303 ): >O2J2_HUMAN
TLRNKHVKGAAK

SEQ ID NO: 9891 - protein, 12 aa, Homo sapiens
  ( 293 )...( 304 ): >O2J2_HUMAN
LRNKHVKGAAKR

SEQ ID NO: 9892 - protein, 12 aa, Homo sapiens
  ( 294 )...( 305 ): >O2J2_HUMAN
RNKHVKGAAKRL

SEQ ID NO: 9893 - protein, 12 aa, Homo sapiens
  ( 295 )...( 306 ): >O2J2_HUMAN
NKHVKGAAKRLL

SEQ ID NO: 9894 - protein, 12 aa, Homo sapiens
  ( 296 )...( 307 ): >O2J2_HUMAN
KHVKGAAKRLLG

SEQ ID NO: 9895 - protein, 12 aa, Homo sapiens
  ( 297 )...( 308 ): >O2J2_HUMAN
HVKGAAKRLLGW

SEQ ID NO: 9896 - protein, 12 aa, Homo sapiens
  ( 290 )...( 301 ): >O2J3_HUMAN
PLIYTLRNKVVR

SEQ ID NO: 9897 - protein, 12 aa, Homo sapiens
  ( 291 )...( 302 ): >O2J3_HUMAN
LIYTLRNKVVRG

SEQ ID NO: 9898 - protein, 12 aa, Homo sapiens
  ( 292 )...( 303 ): >O2J3_HUMAN
IYTLRNKVVRGA

SEQ ID NO: 9899 - protein, 12 aa, Homo sapiens
  ( 293 )...( 304 ): >O2J3_HUMAN
YTLRNKVVRGAV

SEQ ID NO: 9900 - protein, 12 aa, Homo sapiens
  ( 294 )...( 305 ): >O2J3_HUMAN
TLRNKVVRGAVK

SEQ ID NO: 9901 - protein, 12 aa, Homo sapiens
  ( 297 )...( 308 ): >O2J3_HUMAN
NKVVRGAVKRLM

SEQ ID NO: 9902 - protein, 12 aa, Homo sapiens
  ( 298 )...( 309 ): >O2J3_HUMAN
KVVRGAVKRLMG

SEQ ID NO: 9903 - protein, 12 aa, Homo sapiens
  ( 299 )...( 310 ): >O2J3_HUMAN
VVRGAVKRLMGW

SEQ ID NO: 9904 - protein, 12 aa, Homo sapiens
  ( 226 )...( 237 ): >O2S2_HUMAN
ILRIPSAEGRKK

SEQ ID NO: 9905 - protein, 12 aa, Homo sapiens
  ( 227 )...( 238 ): >O2S2_HUMAN
LRIPSAEGRKKV

SEQ ID NO: 9906 - protein, 12 aa, Homo sapiens
  ( 228 )...( 239 ): >O2S2_HUMAN
RIPSAEGRKKVF

SEQ ID NO: 9907 - protein, 12 aa, Homo sapiens
  ( 298 )...( 309 ): >O2S2_HUMAN
SLRNKDVKAAVR

SEQ ID NO: 9908 - protein, 12 aa, Homo sapiens
  ( 301 )...( 312 ): >O2S2_HUMAN
NKDVKAAVRRLL

SEQ ID NO: 9909 - protein, 12 aa, Homo sapiens
  ( 302 )...( 313 ): >O2S2_HUMAN
KDVKAAVRRLLR

SEQ ID NO: 9910 - protein, 12 aa, Homo sapiens
  ( 303 )...( 314 ): >O2S2_HUMAN
DVKAAVRRLLRP

SEQ ID NO: 9911 - protein, 12 aa, Homo sapiens
  ( 306 )...( 317 ): >O2S2_HUMAN
AAVRRLLRPKGF

SEQ ID NO: 9912 - protein, 12 aa, Homo sapiens
  ( 307 )...( 318 ): >O2S2_HUMAN
AVRRLLRPKGFT

SEQ ID NO: 9913 - protein, 12 aa, Homo sapiens
  ( 308 )...( 319 ): >O2S2_HUMAN
VRRLLRPKGFTQ

SEQ ID NO: 9914 - protein, 10 aa, Homo sapiens
  ( 310 )...( 321 ): >O2S2_HUMAN
RLLRPKGFTQ

SEQ ID NO: 9915 - protein, 12 aa, Homo sapiens
  ( 129 )...( 140 ): >O2T1_HUMAN
LRYPVLMSRRVC

SEQ ID NO: 9916 - protein, 12 aa, Homo sapiens
  ( 291 )...( 302 ): >O2T1_HUMAN
LRNKDVTGALKR

SEQ ID NO: 9917 - protein, 12 aa, Homo sapiens
  ( 292 )...( 303 ): >O2T1_HUMAN
RNKDVTGALKRA

SEQ ID NO: 9918 - protein, 12 aa, Homo sapiens
  ( 296 )...( 307 ): >O2T1_HUMAN
VTGALKRALGRF

SEQ ID NO: 9919 - protein, 12 aa, Homo sapiens
  ( 297 )...( 308 ): >O2T1_HUMAN
TGALKRALGRFK

SEQ ID NO: 9920 - protein, 12 aa, Homo sapiens
  ( 298 )...( 309 ): >O2T1_HUMAN
GALKRALGRFKG

SEQ ID NO: 9921 - protein, 12 aa, Homo sapiens
  ( 299 )...( 310 ): >O2T1_HUMAN
ALKRALGRFKGP

SEQ ID NO: 9922 - protein, 12 aa, Homo sapiens
  ( 300 )...( 311 ): >O2T1_HUMAN
LKRALGRFKGPQ

SEQ ID NO: 9923 - protein, 11 aa, Homo sapiens
  ( 301 )...( 312 ): >O2T1_HUMAN
KRALGRFKGPQ

SEQ ID NO: 9924 - protein, 10 aa, Homo sapiens
  ( 302 )...( 313 ): >O2T1_HUMAN
RALGRFKGPQ

SEQ ID NO: 9925 - protein, 12 aa, Homo sapiens
  ( 218 )...( 229 ): >O2W1_HUMAN
YGYIAKAVLRTK

SEQ ID NO: 9926 - protein, 12 aa, Homo sapiens
  ( 219 )...( 230 ): >O2W1_HUMAN
GYIAKAVLRTKS

SEQ ID NO: 9927 - protein, 12 aa, Homo sapiens
  ( 220 )...( 231 ): >O2W1_HUMAN
YIAKAVLRTKSK

SEQ ID NO: 9928 - protein, 12 aa, Homo sapiens
  ( 221 )...( 232 ): >O2W1_HUMAN
IAKAVLRTKSKA

SEQ ID NO: 9929 - protein, 12 aa, Homo sapiens
  ( 222 )...( 233 ): >O2W1_HUMAN
AKAVLRTKSKAS

SEQ ID NO: 9930 - protein, 12 aa, Homo sapiens
  ( 223 )...( 234 ): >O2W1_HUMAN
KAVLRTKSKASQ

SEQ ID NO: 9931 - protein, 12 aa, Homo sapiens
  ( 224 )...( 235 ): >O2W1_HUMAN
AVLRTKSKASQR

SEQ ID NO: 9932 - protein, 12 aa, Homo sapiens
  ( 225 )...( 236 ): >O2W1_HUMAN
VLRTKSKASQRK

SEQ ID NO: 9933 - protein, 12 aa, Homo sapiens
  ( 226 )...( 237 ): >O2W1_HUMAN
LRTKSKASQRKA

SEQ ID NO: 9934 - protein, 12 aa, Homo sapiens
  ( 227 )...( 238 ): >O2W1_HUMAN
RTKSKASQRKAM

SEQ ID NO: 9935 - protein, 12 aa, Homo sapiens
  ( 228 )...( 239 ): >O2W1_HUMAN
TKSKASQRKAMN

SEQ ID NO: 9936 - protein, 12 aa, Homo sapiens
  ( 229 )...( 240 ): >O2W1_HUMAN
KSKASQRKAMNT

SEQ ID NO: 9937 - protein, 11 aa, Homo sapiens
  ( 310 )...( 321 ): >O2W1_HUMAN
KSTKIKRNCKS

SEQ ID NO: 9938 - protein, 10 aa, Homo sapiens
  ( 311 )...( 322 ): >O2W1_HUMAN
STKIKRNCKS

SEQ ID NO: 9939 - protein, 12 aa, Homo sapiens
  ( 81 )...( 92 ): >O3A1_HUMAN
VPSMLSRLLSRK

SEQ ID NO: 9940 - protein, 12 aa, Homo sapiens
  ( 83 )...( 94 ): >O3A1_HUMAN
SMLSRLLSRKRA

SEQ ID NO: 9941 - protein, 12 aa, Homo sapiens
  ( 84 )...( 95 ): >O3A1_HUMAN
MLSRLLSRKRAV

SEQ ID NO: 9942 - protein, 12 aa, Homo sapiens
  ( 85 )...( 96 ): >O3A1_HUMAN
LSRLLSRKRAVP

SEQ ID NO: 9943 - protein, 12 aa, Homo sapiens
  ( 86 )...( 97 ): >O3A1_HUMAN
SRLLSRKRAVPC

SEQ ID NO: 9944 - protein, 12 aa, Homo sapiens
  ( 87 )...( 98 ): >O3A1_HUMAN
RLLSRKRAVPCG

SEQ ID NO: 9945 - protein, 12 aa, Homo sapiens
  ( 227 )...( 238 ): >O3A1_HUMAN
AVLRIRSVEGRK

SEQ ID NO: 9946 - protein, 12 aa, Homo sapiens
  ( 228 )...( 239 ): >O3A1_HUMAN
VLRIRSVEGRKK

SEQ ID NO: 9947 - protein, 12 aa, Homo sapiens
  ( 229 )...( 240 ): >O3A1_HUMAN
LRIRSVEGRKKA

SEQ ID NO: 9948 - protein, 12 aa, Homo sapiens
  ( 230 )...( 241 ): >O3A1_HUMAN
RIRSVEGRKKAF

SEQ ID NO: 9949 - protein, 12 aa, Homo sapiens
  ( 231 )...( 242 ): >O3A1_HUMAN
IRSVEGRKKAFS

SEQ ID NO: 9950 - protein, 12 aa, Homo sapiens
  ( 232 )...( 243 ): >O3A1_HUMAN
RSVEGRKKAFST

SEQ ID NO: 9951 - protein, 12 aa, Homo sapiens
  ( 301 )...( 312 ): >O3A1_HUMAN
QSAIWRMLTGRR

SEQ ID NO: 9952 - protein, 12 aa, Homo sapiens
  ( 302 )...( 313 ): >O3A1_HUMAN
SAIWRMLTGRRS

SEQ ID NO: 9953 - protein, 12 aa, Homo sapiens
  ( 303 )...( 314 ): >O3A1_HUMAN
AIWRMLTGRRSL

SEQ ID NO: 9954 - protein, 12 aa, Homo sapiens
  ( 304 )...( 315 ): >O3A1_HUMAN
IWRMLTGRRSLA

SEQ ID NO: 9955 - protein, 11 aa, Homo sapiens
  ( 305 )...( 316 ): >O3A1_HUMAN
WRMLTGRRSLA

SEQ ID NO: 9956 - protein, 10 aa, Homo sapiens
  ( 306 )...( 317 ): >O3A1_HUMAN
RMLTGRRSLA

SEQ ID NO: 9957 - protein, 12 aa, Homo sapiens
  ( 227 )...( 238 ): >O3A2_HUMAN
AVLRIRSVEGRK

SEQ ID NO: 9958 - protein, 12 aa, Homo sapiens
  ( 228 )...( 239 ): >O3A2_HUMAN
VLRIRSVEGRKK

SEQ ID NO: 9959 - protein, 12 aa, Homo sapiens
  ( 229 )...( 240 ): >O3A2_HUMAN
LRIRSVEGRKKA

SEQ ID NO: 9960 - protein, 12 aa, Homo sapiens
  ( 230 )...( 241 ): >O3A2_HUMAN
RIRSVEGRKKAF

SEQ ID NO: 9961 - protein, 12 aa, Homo sapiens
  ( 231 )...( 242 ): >O3A2_HUMAN
IRSVEGRKKAFS

SEQ ID NO: 9962 - protein, 12 aa, Homo sapiens
  ( 232 )...( 243 ): >O3A2_HUMAN
RSVEGRKKAFST

SEQ ID NO: 9963 - protein, 12 aa, Homo sapiens
  ( 228 )...( 239 ): >O3A3_HUMAN
VLQIRSAEGRKK

SEQ ID NO: 9964 - protein, 12 aa, Homo sapiens
  ( 229 )...( 240 ): >O3A3_HUMAN
LQIRSAEGRKKA

SEQ ID NO: 9965 - protein, 12 aa, Homo sapiens
  ( 230 )...( 241 ): >O3A3_HUMAN
QIRSAEGRKKAF

SEQ ID NO: 9966 - protein, 12 aa, Homo sapiens
  ( 231 )...( 242 ): >O3A3_HUMAN
IRSAEGRKKAFS

SEQ ID NO: 9967 - protein, 12 aa, Homo sapiens
  ( 232 )...( 243 ): >O3A3_HUMAN
RSAEGRKKAFST

SEQ ID NO: 9968 - protein, 12 aa, Homo sapiens
  ( 227 )...( 238 ): >O3A4_HUMAN
AVLRIRSAEGKK

SEQ ID NO: 9969 - protein, 12 aa, Homo sapiens
  ( 228 )...( 239 ): >O3A4_HUMAN
VLRIRSAEGKKK

SEQ ID NO: 9970 - protein, 12 aa, Homo sapiens
  ( 229 )...( 240 ): >O3A4_HUMAN
LRIRSAEGKKKA

SEQ ID NO: 9971 - protein, 12 aa, Homo sapiens
  ( 230 )...( 241 ): >O3A4_HUMAN
RIRSAEGKKKAF

SEQ ID NO: 9972 - protein, 12 aa, Homo sapiens
  ( 231 )...( 242 ): >O3A4_HUMAN
IRSAEGKKKAFS

SEQ ID NO: 9973 - protein, 12 aa, Homo sapiens
  ( 222 )...( 233 ): >O4D1_HUMAN
LVMLRSHSGKAR

SEQ ID NO: 9974 - protein, 12 aa, Homo sapiens
  ( 223 )...( 234 ): >O4D1_HUMAN
VMLRSHSGKARR

SEQ ID NO: 9975 - protein, 12 aa, Homo sapiens
  ( 225 )...( 236 ): >O4D1_HUMAN
LRSHSGKARRKA

SEQ ID NO: 9976 - protein, 12 aa, Homo sapiens
  ( 228 )...( 239 ): >O4D1_HUMAN
HSGKARRKAAST

SEQ ID NO: 9977 - protein, 12 aa, Homo sapiens
  ( 231 )...( 242 ): >O4D1_HUMAN
KARRKAASTCTT

SEQ ID NO: 9978 - protein, 12 aa, Homo sapiens
  ( 292 )...( 303 ): >O4D1_HUMAN
QDMKAAMRRLGK

SEQ ID NO: 9979 - protein, 12 aa, Homo sapiens
  ( 294 )...( 305 ): >O4D1_HUMAN
MKAAMRRLGKCL

SEQ ID NO: 9980 - protein, 12 aa, Homo sapiens
  ( 295 )...( 306 ): >O4D1_HUMAN
KAAMRRLGKCLV

SEQ ID NO: 9981 - protein, 12 aa, Homo sapiens
  ( 296 )...( 307 ): >O4D1_HUMAN
AAMRRLGKCLVI

SEQ ID NO: 9982 - protein, 12 aa, Homo sapiens
  ( 297 )...( 308 ): >O4D1_HUMAN
AMRRLGKCLVIC

SEQ ID NO: 9983 - protein, 12 aa, Homo sapiens
  ( 298 )...( 309 ): >O4D1_HUMAN
MRRLGKCLVICR

SEQ ID NO: 9984 - protein, 12 aa, Homo sapiens
  ( 299 )...( 310 ): >O4D1_HUMAN
RRLGKCLVICRE

SEQ ID NO: 9985 - protein, 12 aa, Homo sapiens
  ( 122 )...( 133 ): >O4D2_HUMAN
RLIAISRPLRYV

SEQ ID NO: 9986 - protein, 12 aa, Homo sapiens
  ( 225 )...( 236 ): >O4D2_HUMAN
LRSHPGEARRKA

SEQ ID NO: 9987 - protein, 12 aa, Homo sapiens
  ( 226 )...( 237 ): >O4D2_HUMAN
RSHPGEARRKAA

SEQ ID NO: 9988 - protein, 12 aa, Homo sapiens
  ( 294 )...( 305 ): >O4D2_HUMAN
MQAAVRRLGRHR

SEQ ID NO: 9989 - protein, 12 aa, Homo sapiens
  ( 295 )...( 306 ): >O4D2_HUMAN
QAAVRRLGRHRL

SEQ ID NO: 9990 - protein, 12 aa, Homo sapiens
  ( 296 )...( 307 ): >O4D2_HUMAN
AAVRRLGRHRLV

SEQ ID NO: 9991 - protein, 11 aa, Homo sapiens
  ( 297 )...( 308 ): >O4D2_HUMAN
AVRRLGRHRLV

SEQ ID NO: 9992 - protein, 12 aa, Homo sapiens
  ( 85 )...( 96 ): >O4F3_HUMAN
LFRKRKVISFGG

SEQ ID NO: 9993 - protein, 12 aa, Homo sapiens
  ( 86 )...( 97 ): >O4F3_HUMAN
FRKRKVISFGGC

SEQ ID NO: 9994 - protein, 12 aa, Homo sapiens
  ( 87 )...( 98 ): >O4F3_HUMAN
RKRKVISFGGCI

SEQ ID NO: 9995 - protein, 12 aa, Homo sapiens
  ( 291 )...( 302 ): >O4F3_HUMAN
NKEMKAAIKRVC

SEQ ID NO: 9996 - protein, 12 aa, Homo sapiens
  ( 292 )...( 303 ): >O4F3_HUMAN
KEMKAAIKRVCK

SEQ ID NO: 9997 - protein, 12 aa, Homo sapiens
  ( 293 )...( 304 ): >O4F3_HUMAN
EMKAAIKRVCKQ

SEQ ID NO: 9998 - protein, 12 aa, Homo sapiens
  ( 294 )...( 305 ): >O4F3_HUMAN
MKAAIKRVCKQL

SEQ ID NO: 9999 - protein, 12 aa, Homo sapiens
  ( 295 )...( 306 ): >O4F3_HUMAN
KAAIKRVCKQLV

SEQ ID NO: 10000 - protein, 12 aa, Homo sapiens
  ( 296 )...( 307 ): >O4F3_HUMAN
AAIKRVCKQLVI

SEQ ID NO: 10001 - protein, 12 aa, Homo sapiens
  ( 297 )...( 308 ): >O4F3_HUMAN
AIKRVCKQLVIY

SEQ ID NO: 10002 - protein, 12 aa, Homo sapiens
  ( 298 )...( 309 ): >O4F3_HUMAN
IKRVCKQLVIYK

SEQ ID NO: 10003 - protein, 12 aa, Homo sapiens
  ( 300 )...( 311 ): >O4F3_HUMAN
RVCKQLVIYKRI

SEQ ID NO: 10004 - protein, 12 aa, Homo sapiens
  ( 301 )...( 312 ): >O4F3_HUMAN
VCKQLVIYKRIS

SEQ ID NO: 10005 - protein, 11 aa, Homo sapiens
  ( 302 )...( 313 ): >O4F3_HUMAN
CKQLVIYKRIS

SEQ ID NO: 10006 - protein, 10 aa, Homo sapiens
  ( 303 )...( 314 ): >O4F3_HUMAN
KQLVIYKRIS

SEQ ID NO: 10007 - protein, 12 aa, Homo sapiens
  ( 157 )...( 168 ): >O5D4_HUMAN
TVMKMPSTGGRK

SEQ ID NO: 10008 - protein, 12 aa, Homo sapiens
  ( 158 )...( 169 ): >O5D4_HUMAN
VMKMPSTGGRKK

SEQ ID NO: 10009 - protein, 12 aa, Homo sapiens
  ( 159 )...( 170 ): >O5D4_HUMAN
MKMPSTGGRKKA

SEQ ID NO: 10010 - protein, 12 aa, Homo sapiens
  ( 288 )...( 299 ): >O5F1_HUMAN
LIYSLRSKEVKK

SEQ ID NO: 10011 - protein, 12 aa, Homo sapiens
  ( 289 )...( 300 ): >O5F1_HUMAN
IYSLRSKEVKKA

SEQ ID NO: 10012 - protein, 12 aa, Homo sapiens
  ( 290 )...( 301 ): >O5F1_HUMAN
YSLRSKEVKKAL

SEQ ID NO: 10013 - protein, 12 aa, Homo sapiens
  ( 291 )...( 302 ): >O5F1_HUMAN
SLRSKEVKKALA

SEQ ID NO: 10014 - protein, 12 aa, Homo sapiens
  ( 292 )...( 303 ): >O5F1_HUMAN
LRSKEVKKALAN

SEQ ID NO: 10015 - protein, 12 aa, Homo sapiens
  ( 293 )...( 304 ): >O5F1_HUMAN
RSKEVKKALANV

SEQ ID NO: 10016 - protein, 12 aa, Homo sapiens
  ( 297 )...( 308 ): >O5F1_HUMAN
VKKALANVISRK

SEQ ID NO: 10017 - protein, 12 aa, Homo sapiens
  ( 298 )...( 309 ): >O5F1_HUMAN
KKALANVISRKR

SEQ ID NO: 10018 - protein, 12 aa, Homo sapiens
  ( 299 )...( 310 ): >O5F1_HUMAN
KALANVISRKRT

SEQ ID NO: 10019 - protein, 12 aa, Homo sapiens
  ( 300 )...( 311 ): >O5F1_HUMAN
ALANVISRKRTS

SEQ ID NO: 10020 - protein, 12 aa, Homo sapiens
  ( 301 )...( 312 ): >O5F1_HUMAN
LANVISRKRTSS

SEQ ID NO: 10021 - protein, 12 aa, Homo sapiens
  ( 302 )...( 313 ): >O5F1_HUMAN
ANVISRKRTSSF

SEQ ID NO: 10022 - protein, 12 aa, Homo sapiens
  ( 303 )...( 314 ): >O5F1_HUMAN
NVISRKRTSSFL

SEQ ID NO: 10023 - protein, 11 aa, Homo sapiens
  ( 304 )...( 315 ): >O5F1_HUMAN
VISRKRTSSFL

SEQ ID NO: 10024 - protein, 10 aa, Homo sapiens
  ( 305 )...( 316 ): >O5F1_HUMAN
ISRKRTSSFL

SEQ ID NO: 10025 - protein, 12 aa, Homo sapiens
  ( 225 )...( 236 ): >O5I1_HUMAN
LSVLKIRSFSGR

SEQ ID NO: 10026 - protein, 12 aa, Homo sapiens
  ( 226 )...( 237 ): >O5I1_HUMAN
SVLKIRSFSGRK

SEQ ID NO: 10027 - protein, 12 aa, Homo sapiens
  ( 227 )...( 238 ): >O5I1_HUMAN
VLKIRSFSGRKK

SEQ ID NO: 10028 - protein, 12 aa, Homo sapiens
  ( 228 )...( 239 ): >O5I1_HUMAN
LKIRSFSGRKKT

SEQ ID NO: 10029 - protein, 12 aa, Homo sapiens
  ( 230 )...( 241 ): >O5I1_HUMAN
IRSFSGRKKTFS

SEQ ID NO: 10030 - protein, 12 aa, Homo sapiens
  ( 231 )...( 242 ): >O5I1_HUMAN
RSFSGRKKTFST

SEQ ID NO: 10031 - protein, 12 aa, Homo sapiens
  ( 294 )...( 305 ): >O5U1_HUMAN
SMKAALRKMLSK

SEQ ID NO: 10032 - protein, 12 aa, Homo sapiens
  ( 295 )...( 306 ): >O5U1_HUMAN
MKAALRKMLSKE

SEQ ID NO: 10033 - protein, 12 aa, Homo sapiens
  ( 225 )...( 236 ): >O5V1_HUMAN
ILRIQSSEGRRK

SEQ ID NO: 10034 - protein, 12 aa, Homo sapiens
  ( 226 )...( 237 ): >O5V1_HUMAN
LRIQSSEGRRKA

SEQ ID NO: 10035 - protein, 12 aa, Homo sapiens
  ( 259 )...( 270 ): >O5V1_HUMAN
YVRPISTYSLKK

SEQ ID NO: 10036 - protein, 12 aa, Homo sapiens
  ( 291 )...( 302 ): >O7A5_HUMAN
SLRNKDIKRALG

SEQ ID NO: 10037 - protein, 12 aa, Homo sapiens
  ( 292 )...( 303 ): >O7A5_HUMAN
LRNKDIKRALGI

SEQ ID NO: 10038 - protein, 12 aa, Homo sapiens
  ( 306 )...( 317 ): >O7A5_HUMAN
LWGTMKGQFFKK

SEQ ID NO: 10039 - protein, 12 aa, Homo sapiens
  ( 225 )...( 236 ): >O7AA_HUMAN
IRAISSAQGKYK

SEQ ID NO: 10040 - protein, 12 aa, Homo sapiens
  ( 226 )...( 237 ): >O7AA_HUMAN
RAISSAQGKYKA

SEQ ID NO: 10041 - protein, 12 aa, Homo sapiens
  ( 289 )...( 300 ): >O7AA_HUMAN
IYSLRNKHIKGA

SEQ ID NO: 10042 - protein, 12 aa, Homo sapiens
  ( 290 )...( 301 ): >O7AA_HUMAN
YSLRNKHIKGAM

SEQ ID NO: 10043 - protein, 12 aa, Homo sapiens
  ( 291 )...( 302 ): >O7AA_HUMAN
SLRNKHIKGAMK

SEQ ID NO: 10044 - protein, 12 aa, Homo sapiens
  ( 292 )...( 303 ): >O7AA_HUMAN
LRNKHIKGAMKT

SEQ ID NO: 10045 - protein, 12 aa, Homo sapiens
  ( 296 )...( 307 ): >O7AA_HUMAN
HIKGAMKTFFRG

SEQ ID NO: 10046 - protein, 12 aa, Homo sapiens
  ( 297 )...( 308 ): >O7AA_HUMAN
IKGAMKTFFRGK

SEQ ID NO: 10047 - protein, 12 aa, Homo sapiens
  ( 298 )...( 309 ): >O7AA_HUMAN
KGAMKTFFRGKQ

SEQ ID NO: 10048 - protein, 11 aa, Homo sapiens
  ( 299 )...( 310 ): >O7AA_HUMAN
GAMKTFFRGKQ

SEQ ID NO: 10049 - protein, 10 aa, Homo sapiens
  ( 300 )...( 311 ): >O7AA_HUMAN
AMKTFFRGKQ

SEQ ID NO: 10050 - protein, 12 aa, Homo sapiens
  ( 225 )...( 236 ): >O7AH_HUMAN
IRAISSAQGKYK

SEQ ID NO: 10051 - protein, 12 aa, Homo sapiens
  ( 226 )...( 237 ): >O7AH_HUMAN
RAISSAQGKYKA

SEQ ID NO: 10052 - protein, 12 aa, Homo sapiens
  ( 296 )...( 307 ): >O7AH_HUMAN
DIKRALKMSFRG

SEQ ID NO: 10053 - protein, 12 aa, Homo sapiens
  ( 297 )...( 308 ): >O7AH_HUMAN
IKRALKMSFRGK

SEQ ID NO: 10054 - protein, 10 aa, Homo sapiens
  ( 300 )...( 311 ): >O7AH_HUMAN
ALKMSFRGKQ

SEQ ID NO: 10055 - protein, 12 aa, Homo sapiens
  ( 223 )...( 234 ): >O7C1_HUMAN
FSILRISSAGRK

SEQ ID NO: 10056 - protein, 12 aa, Homo sapiens
  ( 224 )...( 235 ): >O7C1_HUMAN
SILRISSAGRKH

SEQ ID NO: 10057 - protein, 12 aa, Homo sapiens
  ( 225 )...( 236 ): >O7C1_HUMAN
ILRISSAGRKHK

SEQ ID NO: 10058 - protein, 12 aa, Homo sapiens
  ( 226 )...( 237 ): >O7C1_HUMAN
LRISSAGRKHKA

SEQ ID NO: 10059 - protein, 12 aa, Homo sapiens
  ( 227 )...( 238 ): >O7C1_HUMAN
RISSAGRKHKAF

SEQ ID NO: 10060 - protein, 12 aa, Homo sapiens
  ( 292 )...( 303 ): >O7C1_HUMAN
LRNTDMKRALGR

SEQ ID NO: 10061 - protein, 12 aa, Homo sapiens
  ( 293 )...( 304 ): >O7C1_HUMAN
RNTDMKRALGRL

SEQ ID NO: 10062 - protein, 12 aa, Homo sapiens
  ( 296 )...( 307 ): >O7C1_HUMAN
DMKRALGRLLSR

SEQ ID NO: 10063 - protein, 12 aa, Homo sapiens
  ( 297 )...( 308 ): >O7C1_HUMAN
MKRALGRLLSRA

SEQ ID NO: 10064 - protein, 12 aa, Homo sapiens
  ( 298 )...( 309 ): >O7C1_HUMAN
KRALGRLLSRAT

SEQ ID NO: 10065 - protein, 12 aa, Homo sapiens
  ( 299 )...( 310 ): >O7C1_HUMAN
RALGRLLSRATF

SEQ ID NO: 10066 - protein, 12 aa, Homo sapiens
  ( 225 )...( 236 ): >O7C2_HUMAN
VLRVSSARGQHK

SEQ ID NO: 10067 - protein, 12 aa, Homo sapiens
  ( 226 )...( 237 ): >O7C2_HUMAN
LRVSSARGQHKA

SEQ ID NO: 10068 - protein, 12 aa, Homo sapiens
  ( 227 )...( 238 ): >O7C2_HUMAN
RVSSARGQHKAF

SEQ ID NO: 10069 - protein, 12 aa, Homo sapiens
  ( 292 )...( 303 ): >O7C2_HUMAN
LRNKDMKGSLGR

SEQ ID NO: 10070 - protein, 12 aa, Homo sapiens
  ( 293 )...( 304 ): >O7C2_HUMAN
RNKDMKGSLGRL

SEQ ID NO: 10071 - protein, 12 aa, Homo sapiens
  ( 297 )...( 308 ): >O7C2_HUMAN
MKGSLGRLLLRA

SEQ ID NO: 10072 - protein, 12 aa, Homo sapiens
  ( 298 )...( 309 ): >O7C2_HUMAN
KGSLGRLLLRAT

SEQ ID NO: 10073 - protein, 12 aa, Homo sapiens
  ( 301 )...( 312 ): >O7C2_HUMAN
LGRLLLRATSLK

SEQ ID NO: 10074 - protein, 12 aa, Homo sapiens
  ( 291 )...( 302 ): >O8B8_HUMAN
SLRNKDVKVALK

SEQ ID NO: 10075 - protein, 12 aa, Homo sapiens
  ( 292 )...( 303 ): >O8B8_HUMAN
LRNKDVKVALKK

SEQ ID NO: 10076 - protein, 12 aa, Homo sapiens
  ( 293 )...( 304 ): >O8B8_HUMAN
RNKDVKVALKKI

SEQ ID NO: 10077 - protein, 12 aa, Homo sapiens
  ( 294 )...( 305 ): >O8B8_HUMAN
NKDVKVALKKIL

SEQ ID NO: 10078 - protein, 12 aa, Homo sapiens
  ( 295 )...( 306 ): >O8B8_HUMAN
KDVKVALKKILN

SEQ ID NO: 10079 - protein, 12 aa, Homo sapiens
  ( 296 )...( 307 ): >O8B8_HUMAN
DVKVALKKILNK

SEQ ID NO: 10080 - protein, 12 aa, Homo sapiens
  ( 297 )...( 308 ): >O8B8_HUMAN
VKVALKKILNKN

SEQ ID NO: 10081 - protein, 12 aa, Homo sapiens
  ( 298 )...( 309 ): >O8B8_HUMAN
KVALKKILNKNA

SEQ ID NO: 10082 - protein, 12 aa, Homo sapiens
  ( 299 )...( 310 ): >O8B8_HUMAN
VALKKILNKNAF

SEQ ID NO: 10083 - protein, 12 aa, Homo sapiens
  ( 300 )...( 311 ): >O8B8_HUMAN
ALKKILNKNAFS

SEQ ID NO: 10084 - protein, 12 aa, Homo sapiens
  ( 295 )...( 306 ): >O8D2_HUMAN
KDVKNALKKMTR

SEQ ID NO: 10085 - protein, 12 aa, Homo sapiens
  ( 296 )...( 307 ): >O8D2_HUMAN
DVKNALKKMTRG

SEQ ID NO: 10086 - protein, 12 aa, Homo sapiens
  ( 297 )...( 308 ): >O8D2_HUMAN
VKNALKKMTRGR

SEQ ID NO: 10087 - protein, 12 aa, Homo sapiens
  ( 298 )...( 309 ): >O8D2_HUMAN
KNALKKMTRGRQ

SEQ ID NO: 10088 - protein, 12 aa, Homo sapiens
  ( 299 )...( 310 ): >O8D2_HUMAN
NALKKMTRGRQS

SEQ ID NO: 10089 - protein, 12 aa, Homo sapiens
  ( 300 )...( 311 ): >O8D2_HUMAN
ALKKMTRGRQSS

SEQ ID NO: 10090 - protein, 11 aa, Homo sapiens
  ( 301 )...( 312 ): >O8D2_HUMAN
LKKMTRGRQSS

SEQ ID NO: 10091 - protein, 10 aa, Homo sapiens
  ( 302 )...( 313 ): >O8D2_HUMAN
KKMTRGRQSS

SEQ ID NO: 10092 - protein, 12 aa, Homo sapiens
  ( 225 )...( 236 ): >OAA3_HUMAN
ILKMPSTTGRQK

SEQ ID NO: 10093 - protein, 12 aa, Homo sapiens
  ( 226 )...( 237 ): >OAA3_HUMAN
LKMPSTTGRQKA

SEQ ID NO: 10094 - protein, 12 aa, Homo sapiens
  ( 227 )...( 238 ): >OAA3_HUMAN
KMPSTTGRQKAF

SEQ ID NO: 10095 - protein, 12 aa, Homo sapiens
  ( 292 )...( 303 ): >OAA4_HUMAN
SSRNKEVKAALK

SEQ ID NO: 10096 - protein, 12 aa, Homo sapiens
  ( 293 )...( 304 ): >OAA4_HUMAN
SRNKEVKAALKR

SEQ ID NO: 10097 - protein, 12 aa, Homo sapiens
  ( 294 )...( 305 ): >OAA4_HUMAN
RNKEVKAALKRL

SEQ ID NO: 10098 - protein, 12 aa, Homo sapiens
  ( 295 )...( 306 ): >OAA4_HUMAN
NKEVKAALKRLI

SEQ ID NO: 10099 - protein, 12 aa, Homo sapiens
  ( 296 )...( 307 ): >OAA4_HUMAN
KEVKAALKRLIH

SEQ ID NO: 10100 - protein, 12 aa, Homo sapiens
  ( 297 )...( 308 ): >OAA4_HUMAN
EVKAALKRLIHR

SEQ ID NO: 10101 - protein, 12 aa, Homo sapiens
  ( 298 )...( 309 ): >OAA4_HUMAN
VKAALKRLIHRT

SEQ ID NO: 10102 - protein, 12 aa, Homo sapiens
  ( 299 )...( 310 ): >OAA4_HUMAN
KAALKRLIHRTL

SEQ ID NO: 10103 - protein, 12 aa, Homo sapiens
  ( 300 )...( 311 ): >OAA4_HUMAN
AALKRLIHRTLG

SEQ ID NO: 10104 - protein, 12 aa, Homo sapiens
  ( 301 )...( 312 ): >OAA4_HUMAN
ALKRLIHRTLGS

SEQ ID NO: 10105 - protein, 12 aa, Homo sapiens
  ( 302 )...( 313 ): >OAA4_HUMAN
LKRLIHRTLGSQ

SEQ ID NO: 10106 - protein, 12 aa, Homo sapiens
  ( 303 )...( 314 ): >OAA4_HUMAN
KRLIHRTLGSQK

SEQ ID NO: 10107 - protein, 12 aa, Homo sapiens
  ( 304 )...( 315 ): >OAA4_HUMAN
RLIHRTLGSQKL

SEQ ID NO: 10108 - protein, 12 aa, Homo sapiens
  ( 134 )...( 145 ): >OAA5_HUMAN
PVIMNQRTRAKL

SEQ ID NO: 10109 - protein, 12 aa, Homo sapiens
  ( 135 )...( 146 ): >OAA5_HUMAN
VIMNQRTRAKLA

SEQ ID NO: 10110 - protein, 12 aa, Homo sapiens
  ( 136 )...( 147 ): >OAA5_HUMAN
IMNQRTRAKLAA

SEQ ID NO: 10111 - protein, 12 aa, Homo sapiens
  ( 137 )...( 148 ): >OAA5_HUMAN
MNQRTRAKLAAA

SEQ ID NO: 10112 - protein, 12 aa, Homo sapiens
  ( 138 )...( 149 ): >OAA5_HUMAN
NQRTRAKLAAAS

SEQ ID NO: 10113 - protein, 12 aa, Homo sapiens
  ( 139 )...( 150 ): >OAA5_HUMAN
QRTRAKLAAASW

SEQ ID NO: 10114 - protein, 12 aa, Homo sapiens
  ( 140 )...( 151 ): >OAA5_HUMAN
RTRAKLAAASWF

SEQ ID NO: 10115 - protein, 12 aa, Homo sapiens
  ( 226 )...( 237 ): >OAA5_HUMAN
ILKIPSAKGKHK

SEQ ID NO: 10116 - protein, 12 aa, Homo sapiens
  ( 227 )...( 238 ): >OAA5_HUMAN
LKIPSAKGKHKA

SEQ ID NO: 10117 - protein, 12 aa, Homo sapiens
  ( 302 )...( 313 ): >OAA5_HUMAN
LSRTFHKVLALR

SEQ ID NO: 10118 - protein, 12 aa, Homo sapiens
  ( 304 )...( 315 ): >OAA5_HUMAN
RTFHKVLALRNC

SEQ ID NO: 10119 - protein, 12 aa, Homo sapiens
  ( 83 )...( 94 ): >OAC1_HUMAN
HLLTGRRHISRS

SEQ ID NO: 10120 - protein, 12 aa, Homo sapiens
  ( 84 )...( 95 ): >OAC1_HUMAN
LLTGRRHISRSG

SEQ ID NO: 10121 - protein, 12 aa, Homo sapiens
  ( 85 )...( 96 ): >OAC1_HUMAN
LTGRRHISRSGC

SEQ ID NO: 10122 - protein, 12 aa, Homo sapiens
  ( 88 )...( 99 ): >OAC1_HUMAN
RRHISRSGCALQ

SEQ ID NO: 10123 - protein, 12 aa, Homo sapiens
  ( 223 )...( 234 ): >OAC1_HUMAN
TIFRIPSVAGRR

SEQ ID NO: 10124 - protein, 12 aa, Homo sapiens
  ( 224 )...( 235 ): >OAC1_HUMAN
IFRIPSVAGRRK

SEQ ID NO: 10125 - protein, 12 aa, Homo sapiens
  ( 225 )...( 236 ): >OAC1_HUMAN
FRIPSVAGRRKA

SEQ ID NO: 10126 - protein, 12 aa, Homo sapiens
  ( 226 )...( 237 ): >OAC1_HUMAN
RIPSVAGRRKAF

SEQ ID NO: 10127 - protein, 12 aa, Homo sapiens
  ( 291 )...( 302 ): >OAC1_HUMAN
LRNTEVKAALKR

SEQ ID NO: 10128 - protein, 12 aa, Homo sapiens
  ( 292 )...( 303 ): >OAC1_HUMAN
RNTEVKAALKRT

SEQ ID NO: 10129 - protein, 12 aa, Homo sapiens
  ( 295 )...( 306 ): >OAC1_HUMAN
EVKAALKRTIQK

SEQ ID NO: 10130 - protein, 12 aa, Homo sapiens
  ( 296 )...( 307 ): >OAC1_HUMAN
VKAALKRTIQKT

SEQ ID NO: 10131 - protein, 12 aa, Homo sapiens
  ( 297 )...( 308 ): >OAC1_HUMAN
KAALKRTIQKTV

SEQ ID NO: 10132 - protein, 12 aa, Homo sapiens
  ( 298 )...( 309 ): >OAC1_HUMAN
AALKRTIQKTVP

SEQ ID NO: 10133 - protein, 12 aa, Homo sapiens
  ( 299 )...( 310 ): >OAC1_HUMAN
ALKRTIQKTVPM

SEQ ID NO: 10134 - protein, 12 aa, Homo sapiens
  ( 292 )...( 303 ): >OAH1_HUMAN
SLRNKELKVAMK

SEQ ID NO: 10135 - protein, 12 aa, Homo sapiens
  ( 294 )...( 305 ): >OAH1_HUMAN
RNKELKVAMKKT

SEQ ID NO: 10136 - protein, 12 aa, Homo sapiens
  ( 298 )...( 309 ): >OAH1_HUMAN
LKVAMKKTFFSK

SEQ ID NO: 10137 - protein, 12 aa, Homo sapiens
  ( 299 )...( 310 ): >OAH1_HUMAN
KVAMKKTFFSKL

SEQ ID NO: 10138 - protein, 12 aa, Homo sapiens
  ( 292 )...( 303 ): >OAH2_HUMAN
SLRNKELKVAMK

SEQ ID NO: 10139 - protein, 12 aa, Homo sapiens
  ( 296 )...( 307 ): >OAH2_HUMAN
KELKVAMKRTFL

SEQ ID NO: 10140 - protein, 12 aa, Homo sapiens
  ( 298 )...( 309 ): >OAH2_HUMAN
LKVAMKRTFLST

SEQ ID NO: 10141 - protein, 12 aa, Homo sapiens
  ( 299 )...( 310 ): >OAH2_HUMAN
KVAMKRTFLSTL

SEQ ID NO: 10142 - protein, 12 aa, Homo sapiens
  ( 144 )...( 155 ): >OAJ1_HUMAN
MVIMNKRLRIQL

SEQ ID NO: 10143 - protein, 12 aa, Homo sapiens
  ( 145 )...( 156 ): >OAJ1_HUMAN
VIMNKRLRIQLV

SEQ ID NO: 10144 - protein, 12 aa, Homo sapiens
  ( 146 )...( 157 ): >OAJ1_HUMAN
IMNKRLRIQLVL

SEQ ID NO: 10145 - protein, 12 aa, Homo sapiens
  ( 147 )...( 158 ): >OAJ1_HUMAN
MNKRLRIQLVLG

SEQ ID NO: 10146 - protein, 12 aa, Homo sapiens
  ( 148 )...( 159 ): >OAJ1_HUMAN
NKRLRIQLVLGA

SEQ ID NO: 10147 - protein, 12 aa, Homo sapiens
  ( 149 )...( 160 ): >OAJ1_HUMAN
KRLRIQLVLGAC

SEQ ID NO: 10148 - protein, 12 aa, Homo sapiens
  ( 235 )...( 246 ): >OAJ1_HUMAN
ILKIASVEGRKK

SEQ ID NO: 10149 - protein, 12 aa, Homo sapiens
  ( 236 )...( 247 ): >OAJ1_HUMAN
LKIASVEGRKKA

SEQ ID NO: 10150 - protein, 12 aa, Homo sapiens
  ( 237 )...( 248 ): >OAJ1_HUMAN
KIASVEGRKKAF

SEQ ID NO: 10151 - protein, 12 aa, Homo sapiens
  ( 225 )...( 236 ): >OBA1_HUMAN
AVLRVPAGASRR

SEQ ID NO: 10152 - protein, 12 aa, Homo sapiens
  ( 298 )...( 309 ): >OBA1_HUMAN
VHQALRKILCIK

SEQ ID NO: 10153 - protein, 12 aa, Homo sapiens
  ( 299 )...( 310 ): >OBA1_HUMAN
HQALRKILCIKQ

SEQ ID NO: 10154 - protein, 12 aa, Homo sapiens
  ( 300 )...( 311 ): >OBA1_HUMAN
QALRKILCIKQT

SEQ ID NO: 10155 - protein, 12 aa, Homo sapiens
  ( 291 )...( 302 ): >OCD2_HUMAN
LRNKEVKGALGR

SEQ ID NO: 10156 - protein, 12 aa, Homo sapiens
  ( 292 )...( 303 ): >OCD2_HUMAN
RNKEVKGALGRV

SEQ ID NO: 10157 - protein, 12 aa, Homo sapiens
  ( 294 )...( 305 ): >OCD2_HUMAN
KEVKGALGRVIR

SEQ ID NO: 10158 - protein, 12 aa, Homo sapiens
  ( 295 )...( 306 ): >OCD2_HUMAN
EVKGALGRVIRR

SEQ ID NO: 10159 - protein, 12 aa, Homo sapiens
  ( 296 )...( 307 ): >OCD2_HUMAN
VKGALGRVIRRL

SEQ ID NO: 10160 - protein, 11 aa, Homo sapiens
  ( 297 )...( 308 ): >OCD2_HUMAN
KGALGRVIRRL

SEQ ID NO: 10161 - protein, 12 aa, Homo sapiens
  ( 77 )...( 88 ): >OCD3_HUMAN
PKLLVNLVCSRR

SEQ ID NO: 10162 - protein, 12 aa, Homo sapiens
  ( 78 )...( 89 ): >OCD3_HUMAN
KLLVNLVCSRRA

SEQ ID NO: 10163 - protein, 12 aa, Homo sapiens
  ( 228 )...( 239 ): >OCD3_HUMAN
RSCRILHKALST

SEQ ID NO: 10164 - protein, 12 aa, Homo sapiens
  ( 291 )...( 302 ): >OCD3_HUMAN
LRNKEVMMALKK

SEQ ID NO: 10165 - protein, 12 aa, Homo sapiens
  ( 292 )...( 303 ): >OCD3_HUMAN
RNKEVMMALKKI

SEQ ID NO: 10166 - protein, 12 aa, Homo sapiens
  ( 296 )...( 307 ): >OCD3_HUMAN
VMMALKKIFGRK

SEQ ID NO: 10167 - protein, 12 aa, Homo sapiens
  ( 297 )...( 308 ): >OCD3_HUMAN
MMALKKIFGRKL

SEQ ID NO: 10168 - protein, 12 aa, Homo sapiens
  ( 298 )...( 309 ): >OCD3_HUMAN
MALKKIFGRKLF

SEQ ID NO: 10169 - protein, 12 aa, Homo sapiens
  ( 299 )...( 310 ): >OCD3_HUMAN
ALKKIFGRKLFK

SEQ ID NO: 10170 - protein, 12 aa, Homo sapiens
  ( 11 )...( 22 ): >OL1F_HUMAN
VPSMLSRLLSRK

SEQ ID NO: 10171 - protein, 12 aa, Homo sapiens
  ( 13 )...( 24 ): >OL1F_HUMAN
SMLSRLLSRKRA

SEQ ID NO: 10172 - protein, 12 aa, Homo sapiens
  ( 14 )...( 25 ): >OL1F_HUMAN
MLSRLLSRKRAV

SEQ ID NO: 10173 - protein, 12 aa, Homo sapiens
  ( 15 )...( 26 ): >OL1F_HUMAN
LSRLLSRKRAVP

SEQ ID NO: 10174 - protein, 12 aa, Homo sapiens
  ( 16 )...( 27 ): >OL1F_HUMAN
SRLLSRKRAVPC

SEQ ID NO: 10175 - protein, 12 aa, Homo sapiens
  ( 17 )...( 28 ): >OL1F_HUMAN
RLLSRKRAVPCG

SEQ ID NO: 10176 - protein, 12 aa, Homo sapiens
  ( 157 )...( 168 ): >OL1F_HUMAN
AVLRIRSVEGRK

SEQ ID NO: 10177 - protein, 12 aa, Homo sapiens
  ( 158 )...( 169 ): >OL1F_HUMAN
VLRIRSVEGRKK

SEQ ID NO: 10178 - protein, 12 aa, Homo sapiens
  ( 159 )...( 170 ): >OL1F_HUMAN
LRIRSVEGRKKA

SEQ ID NO: 10179 - protein, 12 aa, Homo sapiens
  ( 160 )...( 171 ): >OL1F_HUMAN
RIRSVEGRKKAF

SEQ ID NO: 10180 - protein, 12 aa, Homo sapiens
  ( 161 )...( 172 ): >OL1F_HUMAN
IRSVEGRKKAFS

SEQ ID NO: 10181 - protein, 12 aa, Homo sapiens
  ( 162 )...( 173 ): >OL1F_HUMAN
RSVEGRKKAFST

SEQ ID NO: 10182 - protein, 12 aa, Homo sapiens
  ( 66 )...( 77 ): >OL1I_HUMAN
RTRMSQTVQRML

SEQ ID NO: 10183 - protein, 12 aa, Homo sapiens
  ( 157 )...( 168 ): >OL1I_HUMAN
AVLRIRSVEGRK

SEQ ID NO: 10184 - protein, 12 aa, Homo sapiens
  ( 158 )...( 169 ): >OL1I_HUMAN
VLRIRSVEGRKK

SEQ ID NO: 10185 - protein, 12 aa, Homo sapiens
  ( 159 )...( 170 ): >OL1I_HUMAN
LRIRSVEGRKKA

SEQ ID NO: 10186 - protein, 12 aa, Homo sapiens
  ( 160 )...( 171 ): >OL1I_HUMAN
RIRSVEGRKKAF

SEQ ID NO: 10187 - protein, 12 aa, Homo sapiens
  ( 161 )...( 172 ): >OL1I_HUMAN
IRSVEGRKKAFS

SEQ ID NO: 10188 - protein, 12 aa, Homo sapiens
  ( 162 )...( 173 ): >OL1I_HUMAN
RSVEGRKKAFST

SEQ ID NO: 10189 - protein, 12 aa, Homo sapiens
  ( 157 )...( 168 ): >OL1L_HUMAN
AVLRIRSVEGRK

SEQ ID NO: 10190 - protein, 12 aa, Homo sapiens
  ( 158 )...( 169 ): >OL1L_HUMAN
VLRIRSVEGRKK

SEQ ID NO: 10191 - protein, 12 aa, Homo sapiens
  ( 159 )...( 170 ): >OL1L_HUMAN
LRIRSVEGRKKA

SEQ ID NO: 10192 - protein, 12 aa, Homo sapiens
  ( 160 )...( 171 ): >OL1L_HUMAN
RIRSVEGRKKAF

SEQ ID NO: 10193 - protein, 12 aa, Homo sapiens
  ( 161 )...( 172 ): >OL1L_HUMAN
IRSVEGRKKAFS

SEQ ID NO: 10194 - protein, 12 aa, Homo sapiens
  ( 162 )...( 173 ): >OL1L_HUMAN
RSVEGRKKAFST

SEQ ID NO: 10195 - protein, 12 aa, Homo sapiens
  ( 139 )...( 150 ): >OPN3_HUMAN
RYIRVVHARVIN

SEQ ID NO: 10196 - protein, 12 aa, Homo sapiens
  ( 241 )...( 252 ): >OPN3_HUMAN
IQVIKILKYEKK

SEQ ID NO: 10197 - protein, 12 aa, Homo sapiens
  ( 242 )...( 253 ): >OPN3_HUMAN
QVIKILKYEKKL

SEQ ID NO: 10198 - protein, 12 aa, Homo sapiens
  ( 243 )...( 254 ): >OPN3_HUMAN
VIKILKYEKKLA

SEQ ID NO: 10199 - protein, 12 aa, Homo sapiens
  ( 244 )...( 255 ): >OPN3_HUMAN
IKILKYEKKLAK

SEQ ID NO: 10200 - protein, 12 aa, Homo sapiens
  ( 246 )...( 257 ): >OPN3_HUMAN
ILKYEKKLAKMC

SEQ ID NO: 10201 - protein, 12 aa, Homo sapiens
  ( 315 )...( 326 ): >OPN3_HUMAN
KFRRSLLQLLCL

SEQ ID NO: 10202 - protein, 12 aa, Homo sapiens
  ( 317 )...( 328 ): >OPN3_HUMAN
RRSLLQLLCLRL

SEQ ID NO: 10203 - protein, 12 aa, Homo sapiens
  ( 322 )...( 333 ): >OPN3_HUMAN
QLLCLRLLRCQR

SEQ ID NO: 10204 - protein, 12 aa, Homo sapiens
  ( 323 )...( 334 ): >OPN3_HUMAN
LLCLRLLRCQRP

SEQ ID NO: 10205 - protein, 12 aa, Homo sapiens
  ( 324 )...( 335 ): >OPN3_HUMAN
LCLRLLRCQRPA

SEQ ID NO: 10206 - protein, 12 aa, Homo sapiens
  ( 325 )...( 336 ): >OPN3_HUMAN
CLRLLRCQRPAK

SEQ ID NO: 10207 - protein, 12 aa, Homo sapiens
  ( 354 )...( 365 ): >OPN3_HUMAN
QKDGDRPKKKVT

SEQ ID NO: 10208 - protein, 12 aa, Homo sapiens
  ( 174 )...( 185 ): >OPN4_HUMAN
RPLATFGVASKR

SEQ ID NO: 10209 - protein, 12 aa, Homo sapiens
  ( 175 )...( 186 ): >OPN4_HUMAN
PLATFGVASKRR

SEQ ID NO: 10210 - protein, 12 aa, Homo sapiens
  ( 176 )...( 187 ): >OPN4_HUMAN
LATFGVASKRRA

SEQ ID NO: 10211 - protein, 12 aa, Homo sapiens
  ( 178 )...( 189 ): >OPN4_HUMAN
TFGVASKRRAAF

SEQ ID NO: 10212 - protein, 12 aa, Homo sapiens
  ( 179 )...( 190 ): >OPN4_HUMAN
FGVASKRRAAFV

SEQ ID NO: 10213 - protein, 12 aa, Homo sapiens
  ( 180 )...( 191 ): >OPN4_HUMAN
GVASKRRAAFVL

SEQ ID NO: 10214 - protein, 12 aa, Homo sapiens
  ( 181 )...( 192 ): >OPN4_HUMAN
VASKRRAAFVLL

SEQ ID NO: 10215 - protein, 12 aa, Homo sapiens
  ( 182 )...( 193 ): >OPN4_HUMAN
ASKRRAAFVLLG

SEQ ID NO: 10216 - protein, 12 aa, Homo sapiens
  ( 183 )...( 194 ): >OPN4_HUMAN
SKRRAAFVLLGV

SEQ ID NO: 10217 - protein, 12 aa, Homo sapiens
  ( 184 )...( 195 ): >OPN4_HUMAN
KRRAAFVLLGVW

SEQ ID NO: 10218 - protein, 12 aa, Homo sapiens
  ( 369 )...( 380 ): >OPN4_HUMAN
GVLLGVSRRHSR

SEQ ID NO: 10219 - protein, 12 aa, Homo sapiens
  ( 370 )...( 381 ): >OPN4_HUMAN
VLLGVSRRHSRP

SEQ ID NO: 10220 - protein, 12 aa, Homo sapiens
  ( 70 )...( 81 ): >OPRD_HUMAN
VMFGIVRYTKMK

SEQ ID NO: 10221 - protein, 12 aa, Homo sapiens
  ( 71 )...( 82 ): >OPRD_HUMAN
MFGIVRYTKMKT

SEQ ID NO: 10222 - protein, 12 aa, Homo sapiens
  ( 72 )...( 83 ): >OPRD_HUMAN
FGIVRYTKMKTA

SEQ ID NO: 10223 - protein, 12 aa, Homo sapiens
  ( 73 )...( 84 ): >OPRD_HUMAN
GIVRYTKMKTAT

SEQ ID NO: 10224 - protein, 12 aa, Homo sapiens
  ( 74 )...( 85 ): >OPRD_HUMAN
IVRYTKMKTATN

SEQ ID NO: 10225 - protein, 12 aa, Homo sapiens
  ( 75 )...( 86 ): >OPRD_HUMAN
VRYTKMKTATNI

SEQ ID NO: 10226 - protein, 12 aa, Homo sapiens
  ( 76 )...( 87 ): >OPRD_HUMAN
RYTKMKTATNIY

SEQ ID NO: 10227 - protein, 12 aa, Homo sapiens
  ( 155 )...( 166 ): >OPRD_HUMAN
KALDFRTPAKAK

SEQ ID NO: 10228 - protein, 12 aa, Homo sapiens
  ( 159 )...( 170 ): >OPRD_HUMAN
FRTPAKAKLINI

SEQ ID NO: 10229 - protein, 12 aa, Homo sapiens
  ( 160 )...( 171 ): >OPRD_HUMAN
RTPAKAKLINIC

SEQ ID NO: 10230 - protein, 12 aa, Homo sapiens
  ( 233 )...( 244 ): >OPRD_HUMAN
YGLMLLRLRSVR

SEQ ID NO: 10231 - protein, 12 aa, Homo sapiens
  ( 234 )...( 245 ): >OPRD_HUMAN
GLMLLRLRSVRL

SEQ ID NO: 10232 - protein, 12 aa, Homo sapiens
  ( 236 )...( 247 ): >OPRD_HUMAN
MLLRLRSVRLLS

SEQ ID NO: 10233 - protein, 12 aa, Homo sapiens
  ( 237 )...( 248 ): >OPRD_HUMAN
LLRLRSVRLLSG

SEQ ID NO: 10234 - protein, 12 aa, Homo sapiens
  ( 238 )...( 249 ): >OPRD_HUMAN
LRLRSVRLLSGS

SEQ ID NO: 10235 - protein, 12 aa, Homo sapiens
  ( 239 )...( 250 ): >OPRD_HUMAN
RLRSVRLLSGSK

SEQ ID NO: 10236 - protein, 12 aa, Homo sapiens
  ( 241 )...( 252 ): >OPRD_HUMAN
RSVRLLSGSKEK

SEQ ID NO: 10237 - protein, 12 aa, Homo sapiens
  ( 254 )...( 265 ): >OPRD_HUMAN
RSLRRITRMVLV

SEQ ID NO: 10238 - protein, 12 aa, Homo sapiens
  ( 255 )...( 266 ): >OPRD_HUMAN
SLRRITRMVLVV

SEQ ID NO: 10239 - protein, 12 aa, Homo sapiens
  ( 257 )...( 268 ): >OPRD_HUMAN
RRITRMVLVVVG

SEQ ID NO: 10240 - protein, 12 aa, Homo sapiens
  ( 82 )...( 93 ): >OPRK_HUMAN
FVIIRYTKMKTA

SEQ ID NO: 10241 - protein, 12 aa, Homo sapiens
  ( 83 )...( 94 ): >OPRK_HUMAN
VIIRYTKMKTAT

SEQ ID NO: 10242 - protein, 12 aa, Homo sapiens
  ( 84 )...( 95 ): >OPRK_HUMAN
IIRYTKMKTATN

SEQ ID NO: 10243 - protein, 12 aa, Homo sapiens
  ( 85 )...( 96 ): >OPRK_HUMAN
IRYTKMKTATNI

SEQ ID NO: 10244 - protein, 12 aa, Homo sapiens
  ( 86 )...( 97 ): >OPRK_HUMAN
RYTKMKTATNIY

SEQ ID NO: 10245 - protein, 12 aa, Homo sapiens
  ( 165 )...( 176 ): >OPRK_HUMAN
KALDFRTPLKAK

SEQ ID NO: 10246 - protein, 12 aa, Homo sapiens
  ( 169 )...( 180 ): >OPRK_HUMAN
FRTPLKAKIINI

SEQ ID NO: 10247 - protein, 12 aa, Homo sapiens
  ( 170 )...( 181 ): >OPRK_HUMAN
RTPLKAKIINIC

SEQ ID NO: 10248 - protein, 12 aa, Homo sapiens
  ( 246 )...( 257 ): >OPRK_HUMAN
YTLMILRLKSVR

SEQ ID NO: 10249 - protein, 12 aa, Homo sapiens
  ( 249 )...( 260 ): >OPRK_HUMAN
MILRLKSVRLLS

SEQ ID NO: 10250 - protein, 12 aa, Homo sapiens
  ( 250 )...( 261 ): >OPRK_HUMAN
ILRLKSVRLLSG

SEQ ID NO: 10251 - protein, 12 aa, Homo sapiens
  ( 251 )...( 262 ): >OPRK_HUMAN
LRLKSVRLLSGS

SEQ ID NO: 10252 - protein, 12 aa, Homo sapiens
  ( 252 )...( 263 ): >OPRK_HUMAN
RLKSVRLLSGSR

SEQ ID NO: 10253 - protein, 12 aa, Homo sapiens
  ( 254 )...( 265 ): >OPRK_HUMAN
KSVRLLSGSREK

SEQ ID NO: 10254 - protein, 12 aa, Homo sapiens
  ( 268 )...( 279 ): >OPRK_HUMAN
NLRRITRLVLVV

SEQ ID NO: 10255 - protein, 12 aa, Homo sapiens
  ( 270 )...( 281 ): >OPRK_HUMAN
RRITRLVLVVVA

SEQ ID NO: 10256 - protein, 12 aa, Homo sapiens
  ( 354 )...( 365 ): >OPRK_HUMAN
RQSTSRVRNTVQ

SEQ ID NO: 10257 - protein, 12 aa, Homo sapiens
  ( 92 )...( 103 ): >OPRM_HUMAN
MYVIVRYTKMKT

SEQ ID NO: 10258 - protein, 12 aa, Homo sapiens
  ( 93 )...( 104 ): >OPRM_HUMAN
YVIVRYTKMKTA

SEQ ID NO: 10259 - protein, 12 aa, Homo sapiens
  ( 94 )...( 105 ): >OPRM_HUMAN
VIVRYTKMKTAT

SEQ ID NO: 10260 - protein, 12 aa, Homo sapiens
  ( 95 )...( 106 ): >OPRM_HUMAN
IVRYTKMKTATN

SEQ ID NO: 10261 - protein, 12 aa, Homo sapiens
  ( 96 )...( 107 ): >OPRM_HUMAN
VRYTKMKTATNI

SEQ ID NO: 10262 - protein, 12 aa, Homo sapiens
  ( 97 )...( 108 ): >OPRM_HUMAN
RYTKMKTATNIY

SEQ ID NO: 10263 - protein, 12 aa, Homo sapiens
  ( 181 )...( 192 ): >OPRM_HUMAN
RTPRNAKIINVC

SEQ ID NO: 10264 - protein, 12 aa, Homo sapiens
  ( 254 )...( 265 ): >OPRM_HUMAN
YGLMILRLKSVR

SEQ ID NO: 10265 - protein, 12 aa, Homo sapiens
  ( 255 )...( 266 ): >OPRM_HUMAN
GLMILRLKSVRM

SEQ ID NO: 10266 - protein, 12 aa, Homo sapiens
  ( 257 )...( 268 ): >OPRM_HUMAN
MILRLKSVRMLS

SEQ ID NO: 10267 - protein, 12 aa, Homo sapiens
  ( 258 )...( 269 ): >OPRM_HUMAN
ILRLKSVRMLSG

SEQ ID NO: 10268 - protein, 12 aa, Homo sapiens
  ( 259 )...( 270 ): >OPRM_HUMAN
LRLKSVRMLSGS

SEQ ID NO: 10269 - protein, 12 aa, Homo sapiens
  ( 260 )...( 271 ): >OPRM_HUMAN
RLKSVRMLSGSK

SEQ ID NO: 10270 - protein, 12 aa, Homo sapiens
  ( 276 )...( 287 ): >OPRM_HUMAN
NLRRITRMVLVV

SEQ ID NO: 10271 - protein, 12 aa, Homo sapiens
  ( 278 )...( 289 ): >OPRM_HUMAN
RRITRMVLVVVA

SEQ ID NO: 10272 - protein, 12 aa, Homo sapiens
  ( 72 )...( 83 ): >OPRX_HUMAN
VMYVILRHTKMK

SEQ ID NO: 10273 - protein, 12 aa, Homo sapiens
  ( 232 )...( 243 ): >OPRX_HUMAN
SVCYSLMIRRLR

SEQ ID NO: 10274 - protein, 12 aa, Homo sapiens
  ( 233 )...( 244 ): >OPRX_HUMAN
VCYSLMIRRLRG

SEQ ID NO: 10275 - protein, 12 aa, Homo sapiens
  ( 234 )...( 245 ): >OPRX_HUMAN
CYSLMIRRLRGV

SEQ ID NO: 10276 - protein, 12 aa, Homo sapiens
  ( 240 )...( 251 ): >OPRX_HUMAN
RRLRGVRLLSGS

SEQ ID NO: 10277 - protein, 12 aa, Homo sapiens
  ( 241 )...( 252 ): >OPRX_HUMAN
RLRGVRLLSGSR

SEQ ID NO: 10278 - protein, 12 aa, Homo sapiens
  ( 243 )...( 254 ): >OPRX_HUMAN
RGVRLLSGSREK

SEQ ID NO: 10279 - protein, 12 aa, Homo sapiens
  ( 257 )...( 268 ): >OPRX_HUMAN
NLRRITRLVLVV

SEQ ID NO: 10280 - protein, 12 aa, Homo sapiens
  ( 259 )...( 270 ): >OPRX_HUMAN
RRITRLVLVVVA

SEQ ID NO: 10281 - protein, 12 aa, Homo sapiens
  ( 53 )...( 64 ): >OPSB_HUMAN
AMVLVATLRYKK

SEQ ID NO: 10282 - protein, 12 aa, Homo sapiens
  ( 55 )...( 66 ): >OPSB_HUMAN
VLVATLRYKKLR

SEQ ID NO: 10283 - protein, 12 aa, Homo sapiens
  ( 56 )...( 67 ): >OPSB_HUMAN
LVATLRYKKLRQ

SEQ ID NO: 10284 - protein, 12 aa, Homo sapiens
  ( 72 )...( 83 ): >OPSG_HUMAN
GLVLAATMKFKK

SEQ ID NO: 10285 - protein, 12 aa, Homo sapiens
  ( 74 )...( 85 ): >OPSG_HUMAN
VLAATMKFKKLR

SEQ ID NO: 10286 - protein, 12 aa, Homo sapiens
  ( 75 )...( 86 ): >OPSG_HUMAN
LAATMKFKKLRH

SEQ ID NO: 10287 - protein, 12 aa, Homo sapiens
  ( 243 )...( 254 ): >OPSG_HUMAN
WLAIRAVAKQQK

SEQ ID NO: 10288 - protein, 12 aa, Homo sapiens
  ( 330 )...( 341 ): >OPSG_HUMAN
RNCILQLFGKKV

SEQ ID NO: 10289 - protein, 12 aa, Homo sapiens
  ( 72 )...( 83 ): >OPSR_HUMAN
GLVLAATMKFKK

SEQ ID NO: 10290 - protein, 12 aa, Homo sapiens
  ( 74 )...( 85 ): >OPSR_HUMAN
VLAATMKFKKLR

SEQ ID NO: 10291 - protein, 12 aa, Homo sapiens
  ( 75 )...( 86 ): >OPSR_HUMAN
LAATMKFKKLRH

SEQ ID NO: 10292 - protein, 12 aa, Homo sapiens
  ( 243 )...( 254 ): >OPSR_HUMAN
WLAIRAVAKQQK

SEQ ID NO: 10293 - protein, 12 aa, Homo sapiens
  ( 330 )...( 341 ): >OPSR_HUMAN
RNCILQLFGKKV

SEQ ID NO: 10294 - protein, 12 aa, Homo sapiens
  ( 295 )...( 306 ): >OPSX_HUMAN
VVANKKFRRAML

SEQ ID NO: 10295 - protein, 12 aa, Homo sapiens
  ( 296 )...( 307 ): >OPSX_HUMAN
VANKKFRRAMLA

SEQ ID NO: 10296 - protein, 12 aa, Homo sapiens
  ( 302 )...( 313 ): >OPSX_HUMAN
RRAMLAMFKCQT

SEQ ID NO: 10297 - protein, 12 aa, Homo sapiens
  ( 150 )...( 161 ): >OX1R_HUMAN
HPLLFKSTARRA

SEQ ID NO: 10298 - protein, 12 aa, Homo sapiens
  ( 152 )...( 163 ): >OX1R_HUMAN
LLFKSTARRARG

SEQ ID NO: 10299 - protein, 12 aa, Homo sapiens
  ( 153 )...( 164 ): >OX1R_HUMAN
LFKSTARRARGS

SEQ ID NO: 10300 - protein, 12 aa, Homo sapiens
  ( 154 )...( 165 ): >OX1R_HUMAN
FKSTARRARGSI

SEQ ID NO: 10301 - protein, 12 aa, Homo sapiens
  ( 155 )...( 166 ): >OX1R_HUMAN
KSTARRARGSIL

SEQ ID NO: 10302 - protein, 12 aa, Homo sapiens
  ( 158 )...( 169 ): >OX1R_HUMAN
ARRARGSILGIW

SEQ ID NO: 10303 - protein, 12 aa, Homo sapiens
  ( 159 )...( 170 ): >OX1R_HUMAN
RRARGSILGIWA

SEQ ID NO: 10304 - protein, 12 aa, Homo sapiens
  ( 238 )...( 249 ): >OX1R_HUMAN
IFRKLWGRQIPG

SEQ ID NO: 10305 - protein, 12 aa, Homo sapiens
  ( 239 )...( 250 ): >OX1R_HUMAN
FRKLWGRQIPGT

SEQ ID NO: 10306 - protein, 12 aa, Homo sapiens
  ( 240 )...( 251 ): >OX1R_HUMAN
RKLWGRQIPGTT

SEQ ID NO: 10307 - protein, 12 aa, Homo sapiens
  ( 249 )...( 260 ): >OX1R_HUMAN
GTTSALVRNWKR

SEQ ID NO: 10308 - protein, 12 aa, Homo sapiens
  ( 292 )...( 303 ): >OX1R_HUMAN
ARRKTAKMLMVV

SEQ ID NO: 10309 - protein, 12 aa, Homo sapiens
  ( 293 )...( 304 ): >OX1R_HUMAN
RRKTAKMLMVVL

SEQ ID NO: 10310 - protein, 12 aa, Homo sapiens
  ( 317 )...( 328 ): >OX1R_HUMAN
LNVLKRVFGMFR

SEQ ID NO: 10311 - protein, 12 aa, Homo sapiens
  ( 319 )...( 330 ): >OX1R_HUMAN
VLKRVFGMFRQA

SEQ ID NO: 10312 - protein, 12 aa, Homo sapiens
  ( 320 )...( 331 ): >OX1R_HUMAN
LKRVFGMFRQAS

SEQ ID NO: 10313 - protein, 12 aa, Homo sapiens
  ( 159 )...( 170 ): >OX2R_HUMAN
PLMFKSTAKRAR

SEQ ID NO: 10314 - protein, 12 aa, Homo sapiens
  ( 162 )...( 173 ): >OX2R_HUMAN
FKSTAKRARNSI

SEQ ID NO: 10315 - protein, 12 aa, Homo sapiens
  ( 163 )...( 174 ): >OX2R_HUMAN
KSTAKRARNSIV

SEQ ID NO: 10316 - protein, 12 aa, Homo sapiens
  ( 164 )...( 175 ): >OX2R_HUMAN
STAKRARNSIVI

SEQ ID NO: 10317 - protein, 12 aa, Homo sapiens
  ( 165 )...( 176 ): >OX2R_HUMAN
TAKRARNSIVII

SEQ ID NO: 10318 - protein, 12 aa, Homo sapiens
  ( 166 )...( 177 ): >OX2R_HUMAN
AKRARNSIVIIW

SEQ ID NO: 10319 - protein, 12 aa, Homo sapiens
  ( 167 )...( 178 ): >OX2R_HUMAN
KRARNSIVIIWI

SEQ ID NO: 10320 - protein, 12 aa, Homo sapiens
  ( 248 )...( 259 ): >OX2R_HUMAN
RKLWCRQIPGTS

SEQ ID NO: 10321 - protein, 12 aa, Homo sapiens
  ( 256 )...( 267 ): >OX2R_HUMAN
PGTSSVVQRKWK

SEQ ID NO: 10322 - protein, 12 aa, Homo sapiens
  ( 257 )...( 268 ): >OX2R_HUMAN
GTSSVVQRKWKP

SEQ ID NO: 10323 - protein, 12 aa, Homo sapiens
  ( 258 )...( 269 ): >OX2R_HUMAN
TSSVVQRKWKPL

SEQ ID NO: 10324 - protein, 12 aa, Homo sapiens
  ( 289 )...( 300 ): >OX2R_HUMAN
VAAEIKQIRARR

SEQ ID NO: 10325 - protein, 12 aa, Homo sapiens
  ( 290 )...( 301 ): >OX2R_HUMAN
AAEIKQIRARRK

SEQ ID NO: 10326 - protein, 12 aa, Homo sapiens
  ( 291 )...( 302 ): >OX2R_HUMAN
AEIKQIRARRKT

SEQ ID NO: 10327 - protein, 12 aa, Homo sapiens
  ( 292 )...( 303 ): >OX2R_HUMAN
EIKQIRARRKTA

SEQ ID NO: 10328 - protein, 12 aa, Homo sapiens
  ( 298 )...( 309 ): >OX2R_HUMAN
ARRKTARMLMVV

SEQ ID NO: 10329 - protein, 12 aa, Homo sapiens
  ( 299 )...( 310 ): >OX2R_HUMAN
RRKTARMLMVVL

SEQ ID NO: 10330 - protein, 12 aa, Homo sapiens
  ( 393 )...( 404 ): >OX2R_HUMAN
RLTRGRTSTESR

SEQ ID NO: 10331 - protein, 12 aa, Homo sapiens
  ( 394 )...( 405 ): >OX2R_HUMAN
LTRGRTSTESRK

SEQ ID NO: 10332 - protein, 12 aa, Homo sapiens
  ( 396 )...( 407 ): >OX2R_HUMAN
RGRTSTESRKSL

SEQ ID NO: 10333 - protein, 12 aa, Homo sapiens
  ( 292 )...( 303 ): >OXB2_HUMAN
IKTKQIQYGIIR

SEQ ID NO: 10334 - protein, 12 aa, Homo sapiens
  ( 293 )...( 304 ): >OXB2_HUMAN
KTKQIQYGIIRL

SEQ ID NO: 10335 - protein, 12 aa, Homo sapiens
  ( 298 )...( 309 ): >OXB2_HUMAN
QYGIIRLLSKHR

SEQ ID NO: 10336 - protein, 12 aa, Homo sapiens
  ( 300 )...( 311 ): >OXB2_HUMAN
GIIRLLSKHRFS

SEQ ID NO: 10337 - protein, 12 aa, Homo sapiens
  ( 287 )...( 298 ): >OXB4_HUMAN
IIYSIKTKQIQR

SEQ ID NO: 10338 - protein, 12 aa, Homo sapiens
  ( 288 )...( 299 ): >OXB4_HUMAN
IYSIKTKQIQRS

SEQ ID NO: 10339 - protein, 12 aa, Homo sapiens
  ( 289 )...( 300 ): >OXB4_HUMAN
YSIKTKQIQRSI

SEQ ID NO: 10340 - protein, 12 aa, Homo sapiens
  ( 290 )...( 301 ): >OXB4_HUMAN
SIKTKQIQRSII

SEQ ID NO: 10341 - protein, 12 aa, Homo sapiens
  ( 291 )...( 302 ): >OXB4_HUMAN
IKTKQIQRSIIR

SEQ ID NO: 10342 - protein, 12 aa, Homo sapiens
  ( 292 )...( 303 ): >OXB4_HUMAN
KTKQIQRSIIRL

SEQ ID NO: 10343 - protein, 12 aa, Homo sapiens
  ( 293 )...( 304 ): >OXB4_HUMAN
TKQIQRSIIRLF

SEQ ID NO: 10344 - protein, 12 aa, Homo sapiens
  ( 298 )...( 309 ): >OXB4_HUMAN
RSIIRLFSGQSR

SEQ ID NO: 10345 - protein, 12 aa, Homo sapiens
  ( 288 )...( 299 ): >OXE2_HUMAN
PIIYGAKTKQIR

SEQ ID NO: 10346 - protein, 12 aa, Homo sapiens
  ( 289 )...( 300 ): >OXE2_HUMAN
IIYGAKTKQIRT

SEQ ID NO: 10347 - protein, 12 aa, Homo sapiens
  ( 290 )...( 301 ): >OXE2_HUMAN
IYGAKTKQIRTR

SEQ ID NO: 10348 - protein, 12 aa, Homo sapiens
  ( 291 )...( 302 ): >OXE2_HUMAN
YGAKTKQIRTRV

SEQ ID NO: 10349 - protein, 12 aa, Homo sapiens
  ( 292 )...( 303 ): >OXE2_HUMAN
GAKTKQIRTRVL

SEQ ID NO: 10350 - protein, 12 aa, Homo sapiens
  ( 293 )...( 304 ): >OXE2_HUMAN
AKTKQIRTRVLA

SEQ ID NO: 10351 - protein, 12 aa, Homo sapiens
  ( 294 )...( 305 ): >OXE2_HUMAN
KTKQIRTRVLAM

SEQ ID NO: 10352 - protein, 12 aa, Homo sapiens
  ( 295 )...( 306 ): >OXE2_HUMAN
TKQIRTRVLAMF

SEQ ID NO: 10353 - protein, 12 aa, Homo sapiens
  ( 296 )...( 307 ): >OXE2_HUMAN
KQIRTRVLAMFK

SEQ ID NO: 10354 - protein, 12 aa, Homo sapiens
  ( 297 )...( 308 ): >OXE2_HUMAN
QIRTRVLAMFKI

SEQ ID NO: 10355 - protein, 12 aa, Homo sapiens
  ( 298 )...( 309 ): >OXE2_HUMAN
IRTRVLAMFKIS

SEQ ID NO: 10356 - protein, 12 aa, Homo sapiens
  ( 299 )...( 310 ): >OXE2_HUMAN
RTRVLAMFKISC

SEQ ID NO: 10357 - protein, 12 aa, Homo sapiens
  ( 292 )...( 303 ): >OXI1_HUMAN
IIYSVKTKEIRK

SEQ ID NO: 10358 - protein, 12 aa, Homo sapiens
  ( 293 )...( 304 ): >OXI1_HUMAN
IYSVKTKEIRKG

SEQ ID NO: 10359 - protein, 12 aa, Homo sapiens
  ( 294 )...( 305 ): >OXI1_HUMAN
YSVKTKEIRKGI

SEQ ID NO: 10360 - protein, 12 aa, Homo sapiens
  ( 295 )...( 306 ): >OXI1_HUMAN
SVKTKEIRKGIL

SEQ ID NO: 10361 - protein, 12 aa, Homo sapiens
  ( 296 )...( 307 ): >OXI1_HUMAN
VKTKEIRKGILK

SEQ ID NO: 10362 - protein, 12 aa, Homo sapiens
  ( 297 )...( 308 ): >OXI1_HUMAN
KTKEIRKGILKF

SEQ ID NO: 10363 - protein, 12 aa, Homo sapiens
  ( 298 )...( 309 ): >OXI1_HUMAN
TKEIRKGILKFF

SEQ ID NO: 10364 - protein, 12 aa, Homo sapiens
  ( 162 )...( 173 ): >OXI2_HUMAN
LIKRLPICRSNV

SEQ ID NO: 10365 - protein, 12 aa, Homo sapiens
  ( 163 )...( 174 ): >OXI2_HUMAN
IKRLPICRSNVL

SEQ ID NO: 10366 - protein, 12 aa, Homo sapiens
  ( 164 )...( 175 ): >OXI2_HUMAN
KRLPICRSNVLS

SEQ ID NO: 10367 - protein, 12 aa, Homo sapiens
  ( 290 )...( 301 ): >OXI2_HUMAN
LIYSAKTKEIRR

SEQ ID NO: 10368 - protein, 12 aa, Homo sapiens
  ( 291 )...( 302 ): >OXI2_HUMAN
IYSAKTKEIRRA

SEQ ID NO: 10369 - protein, 12 aa, Homo sapiens
  ( 292 )...( 303 ): >OXI2_HUMAN
YSAKTKEIRRAI

SEQ ID NO: 10370 - protein, 12 aa, Homo sapiens
  ( 293 )...( 304 ): >OXI2_HUMAN
SAKTKEIRRAIF

SEQ ID NO: 10371 - protein, 12 aa, Homo sapiens
  ( 59 )...( 70 ): >OXYR_HUMAN
CVLLALRTTRQK

SEQ ID NO: 10372 - protein, 12 aa, Homo sapiens
  ( 60 )...( 71 ): >OXYR_HUMAN
VLLALRTTRQKH

SEQ ID NO: 10373 - protein, 12 aa, Homo sapiens
  ( 61 )...( 72 ): >OXYR_HUMAN
LLALRTTRQKHS

SEQ ID NO: 10374 - protein, 12 aa, Homo sapiens
  ( 139 )...( 150 ): >OXYR_HUMAN
LAICQPLRSLRR

SEQ ID NO: 10375 - protein, 12 aa, Homo sapiens
  ( 147 )...( 158 ): >OXYR_HUMAN
SLRRRTDRLAVL

SEQ ID NO: 10376 - protein, 12 aa, Homo sapiens
  ( 148 )...( 159 ): >OXYR_HUMAN
LRRRTDRLAVLA

SEQ ID NO: 10377 - protein, 12 aa, Homo sapiens
  ( 149 )...( 160 ): >OXYR_HUMAN
RRRTDRLAVLAT

SEQ ID NO: 10378 - protein, 12 aa, Homo sapiens
  ( 226 )...( 237 ): >OXYR_HUMAN
KIWQNLRLKTAA

SEQ ID NO: 10379 - protein, 12 aa, Homo sapiens
  ( 254 )...( 265 ): >OXYR_HUMAN
RVALARVSSVKL

SEQ ID NO: 10380 - protein, 12 aa, Homo sapiens
  ( 257 )...( 268 ): >OXYR_HUMAN
LARVSSVKLISK

SEQ ID NO: 10381 - protein, 12 aa, Homo sapiens
  ( 258 )...( 269 ): >OXYR_HUMAN
ARVSSVKLISKA

SEQ ID NO: 10382 - protein, 12 aa, Homo sapiens
  ( 259 )...( 270 ): >OXYR_HUMAN
RVSSVKLISKAK

SEQ ID NO: 10383 - protein, 12 aa, Homo sapiens
  ( 261 )...( 272 ): >OXYR_HUMAN
SSVKLISKAKIR

SEQ ID NO: 10384 - protein, 12 aa, Homo sapiens
  ( 262 )...( 273 ): >OXYR_HUMAN
SVKLISKAKIRT

SEQ ID NO: 10385 - protein, 12 aa, Homo sapiens
  ( 263 )...( 274 ): >OXYR_HUMAN
VKLISKAKIRTV

SEQ ID NO: 10386 - protein, 12 aa, Homo sapiens
  ( 264 )...( 275 ): >OXYR_HUMAN
KLISKAKIRTVK

SEQ ID NO: 10387 - protein, 12 aa, Homo sapiens
  ( 265 )...( 276 ): >OXYR_HUMAN
LISKAKIRTVKM

SEQ ID NO: 10388 - protein, 12 aa, Homo sapiens
  ( 266 )...( 277 ): >OXYR_HUMAN
ISKAKIRTVKMT

SEQ ID NO: 10389 - protein, 12 aa, Homo sapiens
  ( 267 )...( 278 ): >OXYR_HUMAN
SKAKIRTVKMTF

SEQ ID NO: 10390 - protein, 12 aa, Homo sapiens
  ( 268 )...( 279 ): >OXYR_HUMAN
KAKIRTVKMTFI

SEQ ID NO: 10391 - protein, 12 aa, Homo sapiens
  ( 269 )...( 280 ): >OXYR_HUMAN
AKIRTVKMTFII

SEQ ID NO: 10392 - protein, 12 aa, Homo sapiens
  ( 353 )...( 364 ): >OXYR_HUMAN
KGRRLGETSASK

SEQ ID NO: 10393 - protein, 12 aa, Homo sapiens
  ( 354 )...( 365 ): >OXYR_HUMAN
GRRLGETSASKK

SEQ ID NO: 10394 - protein, 12 aa, Homo sapiens
  ( 355 )...( 366 ): >OXYR_HUMAN
RRLGETSASKKS

SEQ ID NO: 10395 - protein, 12 aa, Homo sapiens
  ( 165 )...( 176 ): >OYD1_HUMAN
LLRRLPYCGHRV

SEQ ID NO: 10396 - protein, 12 aa, Homo sapiens
  ( 295 )...( 306 ): >OYD1_HUMAN
LYGARTKEIRSR

SEQ ID NO: 10397 - protein, 12 aa, Homo sapiens
  ( 296 )...( 307 ): >OYD1_HUMAN
YGARTKEIRSRL

SEQ ID NO: 10398 - protein, 12 aa, Homo sapiens
  ( 297 )...( 308 ): >OYD1_HUMAN
GARTKEIRSRLL

SEQ ID NO: 10399 - protein, 12 aa, Homo sapiens
  ( 298 )...( 309 ): >OYD1_HUMAN
ARTKEIRSRLLK

SEQ ID NO: 10400 - protein, 12 aa, Homo sapiens
  ( 300 )...( 311 ): >OYD1_HUMAN
TKEIRSRLLKLL

SEQ ID NO: 10401 - protein, 12 aa, Homo sapiens
  ( 303 )...( 314 ): >OYD1_HUMAN
IRSRLLKLLHLG

SEQ ID NO: 10402 - protein, 12 aa, Homo sapiens
  ( 304 )...( 315 ): >OYD1_HUMAN
RSRLLKLLHLGK

SEQ ID NO: 10403 - protein, 12 aa, Homo sapiens
  ( 129 )...( 140 ): >P2UR_HUMAN
VHRCLGVLRPLR

SEQ ID NO: 10404 - protein, 12 aa, Homo sapiens
  ( 130 )...( 141 ): >P2UR_HUMAN
HRCLGVLRPLRS

SEQ ID NO: 10405 - protein, 12 aa, Homo sapiens
  ( 131 )...( 142 ): >P2UR_HUMAN
RCLGVLRPLRSL

SEQ ID NO: 10406 - protein, 12 aa, Homo sapiens
  ( 132 )...( 143 ): >P2UR_HUMAN
CLGVLRPLRSLR

SEQ ID NO: 10407 - protein, 12 aa, Homo sapiens
  ( 133 )...( 144 ): >P2UR_HUMAN
LGVLRPLRSLRW

SEQ ID NO: 10408 - protein, 12 aa, Homo sapiens
  ( 134 )...( 145 ): >P2UR_HUMAN
GVLRPLRSLRWG

SEQ ID NO: 10409 - protein, 12 aa, Homo sapiens
  ( 147 )...( 158 ): >P2UR_HUMAN
ARYARRVAGAVW

SEQ ID NO: 10410 - protein, 12 aa, Homo sapiens
  ( 148 )...( 159 ): >P2UR_HUMAN
RYARRVAGAVWV

SEQ ID NO: 10411 - protein, 12 aa, Homo sapiens
  ( 216 )...( 227 ): >P2UR_HUMAN
VCYVLMARRLLK

SEQ ID NO: 10412 - protein, 12 aa, Homo sapiens
  ( 217 )...( 228 ): >P2UR_HUMAN
CYVLMARRLLKP

SEQ ID NO: 10413 - protein, 12 aa, Homo sapiens
  ( 218 )...( 229 ): >P2UR_HUMAN
YVLMARRLLKPA

SEQ ID NO: 10414 - protein, 12 aa, Homo sapiens
  ( 219 )...( 230 ): >P2UR_HUMAN
VLMARRLLKPAY

SEQ ID NO: 10415 - protein, 12 aa, Homo sapiens
  ( 220 )...( 231 ): >P2UR_HUMAN
LMARRLLKPAYG

SEQ ID NO: 10416 - protein, 12 aa, Homo sapiens
  ( 221 )...( 232 ): >P2UR_HUMAN
MARRLLKPAYGT

SEQ ID NO: 10417 - protein, 12 aa, Homo sapiens
  ( 222 )...( 233 ): >P2UR_HUMAN
ARRLLKPAYGTS

SEQ ID NO: 10418 - protein, 12 aa, Homo sapiens
  ( 223 )...( 234 ): >P2UR_HUMAN
RRLLKPAYGTSG

SEQ ID NO: 10419 - protein, 12 aa, Homo sapiens
  ( 230 )...( 241 ): >P2UR_HUMAN
YGTSGGLPRAKR

SEQ ID NO: 10420 - protein, 12 aa, Homo sapiens
  ( 232 )...( 243 ): >P2UR_HUMAN
TSGGLPRAKRKS

SEQ ID NO: 10421 - protein, 12 aa, Homo sapiens
  ( 233 )...( 244 ): >P2UR_HUMAN
SGGLPRAKRKSV

SEQ ID NO: 10422 - protein, 12 aa, Homo sapiens
  ( 239 )...( 250 ): >P2UR_HUMAN
AKRKSVRTIAVV

SEQ ID NO: 10423 - protein, 12 aa, Homo sapiens
  ( 240 )...( 251 ): >P2UR_HUMAN
KRKSVRTIAVVL

SEQ ID NO: 10424 - protein, 12 aa, Homo sapiens
  ( 241 )...( 252 ): >P2UR_HUMAN
RKSVRTIAVVLA

SEQ ID NO: 10425 - protein, 12 aa, Homo sapiens
  ( 307 )...( 318 ): >P2UR_HUMAN
FLAGQRLVRFAR

SEQ ID NO: 10426 - protein, 12 aa, Homo sapiens
  ( 310 )...( 321 ): >P2UR_HUMAN
GQRLVRFARDAK

SEQ ID NO: 10427 - protein, 12 aa, Homo sapiens
  ( 327 )...( 338 ): >P2UR_HUMAN
SPATPARRRLGL

SEQ ID NO: 10428 - protein, 12 aa, Homo sapiens
  ( 143 )...( 154 ): >P2Y4_HUMAN
ALRWGRPRLAGL

SEQ ID NO: 10429 - protein, 12 aa, Homo sapiens
  ( 144 )...( 155 ): >P2Y4_HUMAN
LRWGRPRLAGLL

SEQ ID NO: 10430 - protein, 12 aa, Homo sapiens
  ( 145 )...( 156 ): >P2Y4_HUMAN
RWGRPRLAGLLC

SEQ ID NO: 10431 - protein, 12 aa, Homo sapiens
  ( 234 )...( 245 ): >P2Y4_HUMAN
SAQSSSRLRSLR

SEQ ID NO: 10432 - protein, 12 aa, Homo sapiens
  ( 235 )...( 246 ): >P2Y4_HUMAN
AQSSSRLRSLRT

SEQ ID NO: 10433 - protein, 12 aa, Homo sapiens
  ( 236 )...( 247 ): >P2Y4_HUMAN
QSSSRLRSLRTI

SEQ ID NO: 10434 - protein, 12 aa, Homo sapiens
  ( 237 )...( 248 ): >P2Y4_HUMAN
SSSRLRSLRTIA

SEQ ID NO: 10435 - protein, 12 aa, Homo sapiens
  ( 238 )...( 249 ): >P2Y4_HUMAN
SSRLRSLRTIAV

SEQ ID NO: 10436 - protein, 12 aa, Homo sapiens
  ( 239 )...( 250 ): >P2Y4_HUMAN
SRLRSLRTIAVV

SEQ ID NO: 10437 - protein, 12 aa, Homo sapiens
  ( 240 )...( 251 ): >P2Y4_HUMAN
RLRSLRTIAVVL

SEQ ID NO: 10438 - protein, 12 aa, Homo sapiens
  ( 312 )...( 323 ): >P2Y4_HUMAN
KYRRQLRQLCGG

SEQ ID NO: 10439 - protein, 12 aa, Homo sapiens
  ( 313 )...( 324 ): >P2Y4_HUMAN
YRRQLRQLCGGG

SEQ ID NO: 10440 - protein, 12 aa, Homo sapiens
  ( 314 )...( 325 ): >P2Y4_HUMAN
RRQLRQLCGGGK

SEQ ID NO: 10441 - protein, 12 aa, Homo sapiens
  ( 315 )...( 326 ): >P2Y4_HUMAN
RQLRQLCGGGKP

SEQ ID NO: 10442 - protein, 12 aa, Homo sapiens
  ( 117 )...( 128 ): >P2Y5_HUMAN
AIVYPFKSKTLR

SEQ ID NO: 10443 - protein, 12 aa, Homo sapiens
  ( 118 )...( 129 ): >P2Y5_HUMAN
IVYPFKSKTLRT

SEQ ID NO: 10444 - protein, 12 aa, Homo sapiens
  ( 124 )...( 135 ): >P2Y5_HUMAN
SKTLRTKRNAKI

SEQ ID NO: 10445 - protein, 12 aa, Homo sapiens
  ( 125 )...( 136 ): >P2Y5_HUMAN
KTLRTKRNAKIV

SEQ ID NO: 10446 - protein, 12 aa, Homo sapiens
  ( 126 )...( 137 ): >P2Y5_HUMAN
TLRTKRNAKIVC

SEQ ID NO: 10447 - protein, 12 aa, Homo sapiens
  ( 127 )...( 138 ): >P2Y5_HUMAN
LRTKRNAKIVCT

SEQ ID NO: 10448 - protein, 12 aa, Homo sapiens
  ( 128 )...( 139 ): >P2Y5_HUMAN
RTKRNAKIVCTG

SEQ ID NO: 10449 - protein, 12 aa, Homo sapiens
  ( 130 )...( 141 ): >P2Y5_HUMAN
KRNAKIVCTGVW

SEQ ID NO: 10450 - protein, 12 aa, Homo sapiens
  ( 213 )...( 224 ): >P2Y5_HUMAN
KPVTLSRSKINK

SEQ ID NO: 10451 - protein, 12 aa, Homo sapiens
  ( 215 )...( 226 ): >P2Y5_HUMAN
VTLSRSKINKTK

SEQ ID NO: 10452 - protein, 12 aa, Homo sapiens
  ( 216 )...( 227 ): >P2Y5_HUMAN
TLSRSKINKTKV

SEQ ID NO: 10453 - protein, 12 aa, Homo sapiens
  ( 217 )...( 228 ): >P2Y5_HUMAN
LSRSKINKTKVL

SEQ ID NO: 10454 - protein, 12 aa, Homo sapiens
  ( 218 )...( 229 ): >P2Y5_HUMAN
SRSKINKTKVLK

SEQ ID NO: 10455 - protein, 12 aa, Homo sapiens
  ( 219 )...( 230 ): >P2Y5_HUMAN
RSKINKTKVLKM

SEQ ID NO: 10456 - protein, 12 aa, Homo sapiens
  ( 220 )...( 231 ): >P2Y5_HUMAN
SKINKTKVLKMI

SEQ ID NO: 10457 - protein, 12 aa, Homo sapiens
  ( 221 )...( 232 ): >P2Y5_HUMAN
KINKTKVLKMIF

SEQ ID NO: 10458 - protein, 12 aa, Homo sapiens
  ( 49 )...( 60 ): >P2Y6_HUMAN
TQICTSRRALTR

SEQ ID NO: 10459 - protein, 12 aa, Homo sapiens
  ( 50 )...( 61 ): >P2Y6_HUMAN
QICTSRRALTRT

SEQ ID NO: 10460 - protein, 12 aa, Homo sapiens
  ( 51 )...( 62 ): >P2Y6_HUMAN
ICTSRRALTRTA

SEQ ID NO: 10461 - protein, 12 aa, Homo sapiens
  ( 52 )...( 63 ): >P2Y6_HUMAN
CTSRRALTRTAV

SEQ ID NO: 10462 - protein, 12 aa, Homo sapiens
  ( 53 )...( 64 ): >P2Y6_HUMAN
TSRRALTRTAVY

SEQ ID NO: 10463 - protein, 12 aa, Homo sapiens
  ( 54 )...( 65 ): >P2Y6_HUMAN
SRRALTRTAVYT

SEQ ID NO: 10464 - protein, 12 aa, Homo sapiens
  ( 55 )...( 66 ): >P2Y6_HUMAN
RRALTRTAVYTL

SEQ ID NO: 10465 - protein, 12 aa, Homo sapiens
  ( 133 )...( 144 ): >P2Y6_HUMAN
APWHKRGGRRAA

SEQ ID NO: 10466 - protein, 12 aa, Homo sapiens
  ( 136 )...( 147 ): >P2Y6_HUMAN
HKRGGRRAAWLV

SEQ ID NO: 10467 - protein, 12 aa, Homo sapiens
  ( 138 )...( 149 ): >P2Y6_HUMAN
RGGRRAAWLVCV

SEQ ID NO: 10468 - protein, 12 aa, Homo sapiens
  ( 228 )...( 239 ): >P2Y6_HUMAN
PVAQERRGKAAR

SEQ ID NO: 10469 - protein, 12 aa, Homo sapiens
  ( 229 )...( 240 ): >P2Y6_HUMAN
VAQERRGKAARM

SEQ ID NO: 10470 - protein, 12 aa, Homo sapiens
  ( 230 )...( 241 ): >P2Y6_HUMAN
AQERRGKAARMA

SEQ ID NO: 10471 - protein, 12 aa, Homo sapiens
  ( 231 )...( 242 ): >P2Y6_HUMAN
QERRGKAARMAV

SEQ ID NO: 10472 - protein, 12 aa, Homo sapiens
  ( 232 )...( 243 ): >P2Y6_HUMAN
ERRGKAARMAVV

SEQ ID NO: 10473 - protein, 12 aa, Homo sapiens
  ( 233 )...( 244 ): >P2Y6_HUMAN
RRGKAARMAVVV

SEQ ID NO: 10474 - protein, 12 aa, Homo sapiens
  ( 316 )...( 327 ): >P2Y6_HUMAN
LQKLTAKWQRQG

SEQ ID NO: 10475 - protein, 12 aa, Homo sapiens
  ( 42 )...( 53 ): >P2Y7_HUMAN
SILKRMQKRSVT

SEQ ID NO: 10476 - protein, 12 aa, Homo sapiens
  ( 43 )...( 54 ): >P2Y7_HUMAN
ILKRMQKRSVTA

SEQ ID NO: 10477 - protein, 12 aa, Homo sapiens
  ( 44 )...( 55 ): >P2Y7_HUMAN
LKRMQKRSVTAL

SEQ ID NO: 10478 - protein, 12 aa, Homo sapiens
  ( 45 )...( 56 ): >P2Y7_HUMAN
KRMQKRSVTALM

SEQ ID NO: 10479 - protein, 12 aa, Homo sapiens
  ( 46 )...( 57 ): >P2Y7_HUMAN
RMQKRSVTALMV

SEQ ID NO: 10480 - protein, 12 aa, Homo sapiens
  ( 118 )...( 129 ): >P2Y7_HUMAN
AVARPFVSQKLR

SEQ ID NO: 10481 - protein, 12 aa, Homo sapiens
  ( 119 )...( 130 ): >P2Y7_HUMAN
VARPFVSQKLRT

SEQ ID NO: 10482 - protein, 12 aa, Homo sapiens
  ( 120 )...( 131 ): >P2Y7_HUMAN
ARPFVSQKLRTK

SEQ ID NO: 10483 - protein, 12 aa, Homo sapiens
  ( 121 )...( 132 ): >P2Y7_HUMAN
RPFVSQKLRTKA

SEQ ID NO: 10484 - protein, 12 aa, Homo sapiens
  ( 122 )...( 133 ): >P2Y7_HUMAN
PFVSQKLRTKAM

SEQ ID NO: 10485 - protein, 12 aa, Homo sapiens
  ( 123 )...( 134 ): >P2Y7_HUMAN
FVSQKLRTKAMA

SEQ ID NO: 10486 - protein, 12 aa, Homo sapiens
  ( 124 )...( 135 ): >P2Y7_HUMAN
VSQKLRTKAMAR

SEQ ID NO: 10487 - protein, 12 aa, Homo sapiens
  ( 128 )...( 139 ): >P2Y7_HUMAN
LRTKAMARRVLA

SEQ ID NO: 10488 - protein, 12 aa, Homo sapiens
  ( 129 )...( 140 ): >P2Y7_HUMAN
RTKAMARRVLAG

SEQ ID NO: 10489 - protein, 12 aa, Homo sapiens
  ( 130 )...( 141 ): >P2Y7_HUMAN
TKAMARRVLAGI

SEQ ID NO: 10490 - protein, 12 aa, Homo sapiens
  ( 131 )...( 142 ): >P2Y7_HUMAN
KAMARRVLAGIW

SEQ ID NO: 10491 - protein, 12 aa, Homo sapiens
  ( 215 )...( 226 ): >P2Y7_HUMAN
RSRRTGRLVVLI

SEQ ID NO: 10492 - protein, 12 aa, Homo sapiens
  ( 216 )...( 227 ): >P2Y7_HUMAN
SRRTGRLVVLII

SEQ ID NO: 10493 - protein, 12 aa, Homo sapiens
  ( 217 )...( 228 ): >P2Y7_HUMAN
RRTGRLVVLIIL

SEQ ID NO: 10494 - protein, 12 aa, Homo sapiens
  ( 257 )...( 268 ): >P2Y7_HUMAN
GLVGKRLSLARN

SEQ ID NO: 10495 - protein, 12 aa, Homo sapiens
  ( 258 )...( 269 ): >P2Y7_HUMAN
LVGKRLSLARNV

SEQ ID NO: 10496 - protein, 12 aa, Homo sapiens
  ( 259 )...( 270 ): >P2Y7_HUMAN
VGKRLSLARNVL

SEQ ID NO: 10497 - protein, 12 aa, Homo sapiens
  ( 260 )...( 271 ): >P2Y7_HUMAN
GKRLSLARNVLI

SEQ ID NO: 10498 - protein, 12 aa, Homo sapiens
  ( 261 )...( 272 ): >P2Y7_HUMAN
KRLSLARNVLIA

SEQ ID NO: 10499 - protein, 12 aa, Homo sapiens
  ( 146 )...( 157 ): >P2Y9_HUMAN
SRTIRTRRNSAI

SEQ ID NO: 10500 - protein, 12 aa, Homo sapiens
  ( 147 )...( 158 ): >P2Y9_HUMAN
RTIRTRRNSAIV

SEQ ID NO: 10501 - protein, 12 aa, Homo sapiens
  ( 148 )...( 159 ): >P2Y9_HUMAN
TIRTRRNSAIVC

SEQ ID NO: 10502 - protein, 12 aa, Homo sapiens
  ( 149 )...( 160 ): >P2Y9_HUMAN
IRTRRNSAIVCA

SEQ ID NO: 10503 - protein, 12 aa, Homo sapiens
  ( 150 )...( 161 ): >P2Y9_HUMAN
RTRRNSAIVCAG

SEQ ID NO: 10504 - protein, 12 aa, Homo sapiens
  ( 222 )...( 233 ): >P2Y9_HUMAN
SCSSVVLRTLRK

SEQ ID NO: 10505 - protein, 12 aa, Homo sapiens
  ( 223 )...( 234 ): >P2Y9_HUMAN
CSSVVLRTLRKP

SEQ ID NO: 10506 - protein, 12 aa, Homo sapiens
  ( 224 )...( 235 ): >P2Y9_HUMAN
SSVVLRTLRKPA

SEQ ID NO: 10507 - protein, 12 aa, Homo sapiens
  ( 225 )...( 236 ): >P2Y9_HUMAN
SVVLRTLRKPAT

SEQ ID NO: 10508 - protein, 12 aa, Homo sapiens
  ( 226 )...( 237 ): >P2Y9_HUMAN
VVLRTLRKPATL

SEQ ID NO: 10509 - protein, 12 aa, Homo sapiens
  ( 227 )...( 238 ): >P2Y9_HUMAN
VLRTLRKPATLS

SEQ ID NO: 10510 - protein, 12 aa, Homo sapiens
  ( 228 )...( 239 ): >P2Y9_HUMAN
LRTLRKPATLSQ

SEQ ID NO: 10511 - protein, 12 aa, Homo sapiens
  ( 229 )...( 240 ): >P2Y9_HUMAN
RTLRKPATLSQI

SEQ ID NO: 10512 - protein, 12 aa, Homo sapiens
  ( 238 )...( 249 ): >P2Y9_HUMAN
SQIGTNKKKVLK

SEQ ID NO: 10513 - protein, 12 aa, Homo sapiens
  ( 239 )...( 250 ): >P2Y9_HUMAN
QIGTNKKKVLKM

SEQ ID NO: 10514 - protein, 12 aa, Homo sapiens
  ( 240 )...( 251 ): >P2Y9_HUMAN
IGTNKKKVLKMI

SEQ ID NO: 10515 - protein, 12 aa, Homo sapiens
  ( 241 )...( 252 ): >P2Y9_HUMAN
GTNKKKVLKMIT

SEQ ID NO: 10516 - protein, 12 aa, Homo sapiens
  ( 242 )...( 253 ): >P2Y9_HUMAN
TNKKKVLKMITV

SEQ ID NO: 10517 - protein, 12 aa, Homo sapiens
  ( 243 )...( 254 ): >P2Y9_HUMAN
NKKKVLKMITVH

SEQ ID NO: 10518 - protein, 12 aa, Homo sapiens
  ( 244 )...( 255 ): >P2Y9_HUMAN
KKKVLKMITVHM

SEQ ID NO: 10519 - protein, 12 aa, Homo sapiens
  ( 153 )...( 164 ): >P2YR_HUMAN
VVYPLKSLGRLK

SEQ ID NO: 10520 - protein, 12 aa, Homo sapiens
  ( 154 )...( 165 ): >P2YR_HUMAN
VYPLKSLGRLKK

SEQ ID NO: 10521 - protein, 12 aa, Homo sapiens
  ( 155 )...( 166 ): >P2YR_HUMAN
YPLKSLGRLKKK

SEQ ID NO: 10522 - protein, 12 aa, Homo sapiens
  ( 156 )...( 167 ): >P2YR_HUMAN
PLKSLGRLKKKN

SEQ ID NO: 10523 - protein, 12 aa, Homo sapiens
  ( 157 )...( 168 ): >P2YR_HUMAN
LKSLGRLKKKNA

SEQ ID NO: 10524 - protein, 12 aa, Homo sapiens
  ( 158 )...( 169 ): >P2YR_HUMAN
KSLGRLKKKNAI

SEQ ID NO: 10525 - protein, 12 aa, Homo sapiens
  ( 159 )...( 170 ): >P2YR_HUMAN
SLGRLKKKNAIC

SEQ ID NO: 10526 - protein, 12 aa, Homo sapiens
  ( 160 )...( 171 ): >P2YR_HUMAN
LGRLKKKNAICI

SEQ ID NO: 10527 - protein, 12 aa, Homo sapiens
  ( 161 )...( 172 ): >P2YR_HUMAN
GRLKKKNAICIS

SEQ ID NO: 10528 - protein, 12 aa, Homo sapiens
  ( 162 )...( 173 ): >P2YR_HUMAN
RLKKKNAICISV

SEQ ID NO: 10529 - protein, 12 aa, Homo sapiens
  ( 163 )...( 174 ): >P2YR_HUMAN
LKKKNAICISVL

SEQ ID NO: 10530 - protein, 12 aa, Homo sapiens
  ( 164 )...( 175 ): >P2YR_HUMAN
KKKNAICISVLV

SEQ ID NO: 10531 - protein, 12 aa, Homo sapiens
  ( 187 )...( 198 ): >P2YR_HUMAN
LFYSGTGVRKNK

SEQ ID NO: 10532 - protein, 12 aa, Homo sapiens
  ( 188 )...( 199 ): >P2YR_HUMAN
FYSGTGVRKNKT

SEQ ID NO: 10533 - protein, 12 aa, Homo sapiens
  ( 189 )...( 200 ): >P2YR_HUMAN
YSGTGVRKNKTI

SEQ ID NO: 10534 - protein, 12 aa, Homo sapiens
  ( 192 )...( 203 ): >P2YR_HUMAN
TGVRKNKTITCY

SEQ ID NO: 10535 - protein, 12 aa, Homo sapiens
  ( 252 )...( 263 ): >P2YR_HUMAN
SPLRRKSIYLVI

SEQ ID NO: 10536 - protein, 12 aa, Homo sapiens
  ( 277 )...( 288 ): >P2YR_HUMAN
HVMKTMNLRARL

SEQ ID NO: 10537 - protein, 12 aa, Homo sapiens
  ( 327 )...( 338 ): >P2YR_HUMAN
AGDTFRRRLSRA

SEQ ID NO: 10538 - protein, 12 aa, Homo sapiens
  ( 328 )...( 339 ): >P2YR_HUMAN
GDTFRRRLSRAT

SEQ ID NO: 10539 - protein, 12 aa, Homo sapiens
  ( 169 )...( 180 ): >PACR_HUMAN
TTAMVILCRFRK

SEQ ID NO: 10540 - protein, 12 aa, Homo sapiens
  ( 170 )...( 181 ): >PACR_HUMAN
TAMVILCRFRKL

SEQ ID NO: 10541 - protein, 12 aa, Homo sapiens
  ( 171 )...( 182 ): >PACR_HUMAN
AMVILCRFRKLH

SEQ ID NO: 10542 - protein, 12 aa, Homo sapiens
  ( 173 )...( 184 ): >PACR_HUMAN
VILCRFRKLHCT

SEQ ID NO: 10543 - protein, 12 aa, Homo sapiens
  ( 114 )...( 125 ): >PAFR_HUMAN
NRFQAVTRPIKT

SEQ ID NO: 10544 - protein, 12 aa, Homo sapiens
  ( 115 )...( 126 ): >PAFR_HUMAN
RFQAVTRPIKTA

SEQ ID NO: 10545 - protein, 12 aa, Homo sapiens
  ( 120 )...( 131 ): >PAFR_HUMAN
TRPIKTAQANTR

SEQ ID NO: 10546 - protein, 12 aa, Homo sapiens
  ( 121 )...( 132 ): >PAFR_HUMAN
RPIKTAQANTRK

SEQ ID NO: 10547 - protein, 12 aa, Homo sapiens
  ( 122 )...( 133 ): >PAFR_HUMAN
PIKTAQANTRKR

SEQ ID NO: 10548 - protein, 12 aa, Homo sapiens
  ( 123 )...( 134 ): >PAFR_HUMAN
IKTAQANTRKRG

SEQ ID NO: 10549 - protein, 12 aa, Homo sapiens
  ( 124 )...( 135 ): >PAFR_HUMAN
KTAQANTRKRGI

SEQ ID NO: 10550 - protein, 12 aa, Homo sapiens
  ( 125 )...( 136 ): >PAFR_HUMAN
TAQANTRKRGIS

SEQ ID NO: 10551 - protein, 12 aa, Homo sapiens
  ( 126 )...( 137 ): >PAFR_HUMAN
AQANTRKRGISL

SEQ ID NO: 10552 - protein, 12 aa, Homo sapiens
  ( 127 )...( 138 ): >PAFR_HUMAN
QANTRKRGISLS

SEQ ID NO: 10553 - protein, 12 aa, Homo sapiens
  ( 128 )...( 139 ): >PAFR_HUMAN
ANTRKRGISLSL

SEQ ID NO: 10554 - protein, 12 aa, Homo sapiens
  ( 129 )...( 140 ): >PAFR_HUMAN
NTRKRGISLSLV

SEQ ID NO: 10555 - protein, 12 aa, Homo sapiens
  ( 130 )...( 141 ): >PAFR_HUMAN
TRKRGISLSLVI

SEQ ID NO: 10556 - protein, 12 aa, Homo sapiens
  ( 131 )...( 142 ): >PAFR_HUMAN
RKRGISLSLVIW

SEQ ID NO: 10557 - protein, 12 aa, Homo sapiens
  ( 226 )...( 237 ): >PAFR_HUMAN
VKRRALWMVCTV

SEQ ID NO: 10558 - protein, 12 aa, Homo sapiens
  ( 227 )...( 238 ): >PAFR_HUMAN
KRRALWMVCTVL

SEQ ID NO: 10559 - protein, 12 aa, Homo sapiens
  ( 311 )...( 322 ): >PAFR_HUMAN
MRSSRKCSRATT

SEQ ID NO: 10560 - protein, 12 aa, Homo sapiens
  ( 17 )...( 28 ): >PAR1_HUMAN
GPLLSARTRARR

SEQ ID NO: 10561 - protein, 12 aa, Homo sapiens
  ( 126 )...( 137 ): >PAR1_HUMAN
VFILKMKVKKPA

SEQ ID NO: 10562 - protein, 12 aa, Homo sapiens
  ( 127 )...( 138 ): >PAR1_HUMAN
FILKMKVKKPAV

SEQ ID NO: 10563 - protein, 12 aa, Homo sapiens
  ( 128 )...( 139 ): >PAR1_HUMAN
ILKMKVKKPAVV

SEQ ID NO: 10564 - protein, 12 aa, Homo sapiens
  ( 129 )...( 140 ): >PAR1_HUMAN
LKMKVKKPAVVY

SEQ ID NO: 10565 - protein, 12 aa, Homo sapiens
  ( 130 )...( 141 ): >PAR1_HUMAN
KMKVKKPAVVYM

SEQ ID NO: 10566 - protein, 12 aa, Homo sapiens
  ( 299 )...( 310 ): >PAR1_HUMAN
SSAVANRSKKSR

SEQ ID NO: 10567 - protein, 12 aa, Homo sapiens
  ( 300 )...( 311 ): >PAR1_HUMAN
SAVANRSKKSRA

SEQ ID NO: 10568 - protein, 12 aa, Homo sapiens
  ( 301 )...( 312 ): >PAR1_HUMAN
AVANRSKKSRAL

SEQ ID NO: 10569 - protein, 12 aa, Homo sapiens
  ( 302 )...( 313 ): >PAR1_HUMAN
VANRSKKSRALF

SEQ ID NO: 10570 - protein, 12 aa, Homo sapiens
  ( 305 )...( 316 ): >PAR1_HUMAN
RSKKSRALFLSA

SEQ ID NO: 10571 - protein, 12 aa, Homo sapiens
  ( 307 )...( 318 ): >PAR1_HUMAN
KKSRALFLSAAV

SEQ ID NO: 10572 - protein, 12 aa, Homo sapiens
  ( 25 )...( 36 ): >PAR2_HUMAN
TIQGTNRSSKGR

SEQ ID NO: 10573 - protein, 12 aa, Homo sapiens
  ( 26 )...( 37 ): >PAR2_HUMAN
IQGTNRSSKGRS

SEQ ID NO: 10574 - protein, 12 aa, Homo sapiens
  ( 27 )...( 38 ): >PAR2_HUMAN
QGTNRSSKGRSL

SEQ ID NO: 10575 - protein, 12 aa, Homo sapiens
  ( 28 )...( 39 ): >PAR2_HUMAN
GTNRSSKGRSLI

SEQ ID NO: 10576 - protein, 12 aa, Homo sapiens
  ( 29 )...( 40 ): >PAR2_HUMAN
TNRSSKGRSLIG

SEQ ID NO: 10577 - protein, 12 aa, Homo sapiens
  ( 30 )...( 41 ): >PAR2_HUMAN
NRSSKGRSLIGK

SEQ ID NO: 10578 - protein, 12 aa, Homo sapiens
  ( 31 )...( 42 ): >PAR2_HUMAN
RSSKGRSLIGKV

SEQ ID NO: 10579 - protein, 12 aa, Homo sapiens
  ( 101 )...( 112 ): >PAR2_HUMAN
LFRTKKKHPAVI

SEQ ID NO: 10580 - protein, 12 aa, Homo sapiens
  ( 176 )...( 187 ): >PAR2_HUMAN
VIVNPMGHSRKK

SEQ ID NO: 10581 - protein, 12 aa, Homo sapiens
  ( 181 )...( 192 ): >PAR2_HUMAN
MGHSRKKANIAI

SEQ ID NO: 10582 - protein, 12 aa, Homo sapiens
  ( 182 )...( 193 ): >PAR2_HUMAN
GHSRKKANIAIG

SEQ ID NO: 10583 - protein, 12 aa, Homo sapiens
  ( 183 )...( 194 ): >PAR2_HUMAN
HSRKKANIAIGI

SEQ ID NO: 10584 - protein, 12 aa, Homo sapiens
  ( 184 )...( 195 ): >PAR2_HUMAN
SRKKANIAIGIS

SEQ ID NO: 10585 - protein, 12 aa, Homo sapiens
  ( 185 )...( 196 ): >PAR2_HUMAN
RKKANIAIGISL

SEQ ID NO: 10586 - protein, 12 aa, Homo sapiens
  ( 279 )...( 290 ): >PAR2_HUMAN
EKKRKRAIKLIV

SEQ ID NO: 10587 - protein, 12 aa, Homo sapiens
  ( 281 )...( 292 ): >PAR2_HUMAN
KRKRAIKLIVTV

SEQ ID NO: 10588 - protein, 12 aa, Homo sapiens
  ( 282 )...( 293 ): >PAR2_HUMAN
RKRAIKLIVTVL

SEQ ID NO: 10589 - protein, 12 aa, Homo sapiens
  ( 354 )...( 365 ): >PAR2_HUMAN
HAKNALLCRSVR

SEQ ID NO: 10590 - protein, 12 aa, Homo sapiens
  ( 355 )...( 366 ): >PAR2_HUMAN
AKNALLCRSVRT

SEQ ID NO: 10591 - protein, 12 aa, Homo sapiens
  ( 356 )...( 367 ): >PAR2_HUMAN
KNALLCRSVRTV

SEQ ID NO: 10592 - protein, 12 aa, Homo sapiens
  ( 357 )...( 368 ): >PAR2_HUMAN
NALLCRSVRTVK

SEQ ID NO: 10593 - protein, 12 aa, Homo sapiens
  ( 358 )...( 369 ): >PAR2_HUMAN
ALLCRSVRTVKQ

SEQ ID NO: 10594 - protein, 12 aa, Homo sapiens
  ( 359 )...( 370 ): >PAR2_HUMAN
LLCRSVRTVKQM

SEQ ID NO: 10595 - protein, 12 aa, Homo sapiens
  ( 360 )...( 371 ): >PAR2_HUMAN
LCRSVRTVKQMQ

SEQ ID NO: 10596 - protein, 12 aa, Homo sapiens
  ( 361 )...( 372 ): >PAR2_HUMAN
CRSVRTVKQMQV

SEQ ID NO: 10597 - protein, 12 aa, Homo sapiens
  ( 362 )...( 373 ): >PAR2_HUMAN
RSVRTVKQMQVS

SEQ ID NO: 10598 - protein, 12 aa, Homo sapiens
  ( 371 )...( 382 ): >PAR2_HUMAN
QVSLTSKKHSRK

SEQ ID NO: 10599 - protein, 12 aa, Homo sapiens
  ( 30 )...( 41 ): >PAR3_HUMAN
LAKPTLPIKTFR

SEQ ID NO: 10600 - protein, 12 aa, Homo sapiens
  ( 31 )...( 42 ): >PAR3_HUMAN
AKPTLPIKTFRG

SEQ ID NO: 10601 - protein, 12 aa, Homo sapiens
  ( 32 )...( 43 ): >PAR3_HUMAN
KPTLPIKTFRGA

SEQ ID NO: 10602 - protein, 12 aa, Homo sapiens
  ( 177 )...( 188 ): >PAR4_HUMAN
ALVHPLRARALR

SEQ ID NO: 10603 - protein, 12 aa, Homo sapiens
  ( 178 )...( 189 ): >PAR4_HUMAN
LVHPLRARALRG

SEQ ID NO: 10604 - protein, 12 aa, Homo sapiens
  ( 179 )...( 190 ): >PAR4_HUMAN
VHPLRARALRGR

SEQ ID NO: 10605 - protein, 12 aa, Homo sapiens
  ( 186 )...( 197 ): >PAR4_HUMAN
ALRGRRLALGLC

SEQ ID NO: 10606 - protein, 12 aa, Homo sapiens
  ( 187 )...( 198 ): >PAR4_HUMAN
LRGRRLALGLCM

SEQ ID NO: 10607 - protein, 12 aa, Homo sapiens
  ( 188 )...( 199 ): >PAR4_HUMAN
RGRRLALGLCMA

SEQ ID NO: 10608 - protein, 12 aa, Homo sapiens
  ( 211 )...( 222 ): >PAR4_HUMAN
LTLQRQTFRLAR

SEQ ID NO: 10609 - protein, 12 aa, Homo sapiens
  ( 272 )...( 283 ): >PAR4_HUMAN
AASGRRYGHALR

SEQ ID NO: 10610 - protein, 12 aa, Homo sapiens
  ( 273 )...( 284 ): >PAR4_HUMAN
ASGRRYGHALRL

SEQ ID NO: 10611 - protein, 12 aa, Homo sapiens
  ( 274 )...( 285 ): >PAR4_HUMAN
SGRRYGHALRLT

SEQ ID NO: 10612 - protein, 12 aa, Homo sapiens
  ( 275 )...( 286 ): >PAR4_HUMAN
GRRYGHALRLTA

SEQ ID NO: 10613 - protein, 12 aa, Homo sapiens
  ( 276 )...( 287 ): >PAR4_HUMAN
RRYGHALRLTAV

SEQ ID NO: 10614 - protein, 12 aa, Homo sapiens
  ( 350 )...( 361 ): >PAR4_HUMAN
KVRAGLFQRSPG

SEQ ID NO: 10615 - protein, 12 aa, Homo sapiens
  ( 140 )...( 151 ): >PD2R_HUMAN
YRRHITLRLGAL

SEQ ID NO: 10616 - protein, 12 aa, Homo sapiens
  ( 141 )...( 152 ): >PD2R_HUMAN
RRHITLRLGALV

SEQ ID NO: 10617 - protein, 12 aa, Homo sapiens
  ( 55 )...( 66 ): >PE21_HUMAN
ALLAQAAGRLRR

SEQ ID NO: 10618 - protein, 12 aa, Homo sapiens
  ( 66 )...( 77 ): >PE21_HUMAN
RRRSATTFLLFV

SEQ ID NO: 10619 - protein, 12 aa, Homo sapiens
  ( 144 )...( 155 ): >PE21_HUMAN
LHAARVSVARAR

SEQ ID NO: 10620 - protein, 12 aa, Homo sapiens
  ( 145 )...( 156 ): >PE21_HUMAN
HAARVSVARARL

SEQ ID NO: 10621 - protein, 12 aa, Homo sapiens
  ( 147 )...( 158 ): >PE21_HUMAN
ARVSVARARLAL

SEQ ID NO: 10622 - protein, 12 aa, Homo sapiens
  ( 148 )...( 159 ): >PE21_HUMAN
RVSVARARLALA

SEQ ID NO: 10623 - protein, 12 aa, Homo sapiens
  ( 224 )...( 235 ): >PE21_HUMAN
LSGLALHRARWR

SEQ ID NO: 10624 - protein, 12 aa, Homo sapiens
  ( 353 )...( 364 ): >PE21_HUMAN
LLRQAVLRQLLR

SEQ ID NO: 10625 - protein, 12 aa, Homo sapiens
  ( 354 )...( 365 ): >PE21_HUMAN
LRQAVLRQLLRL

SEQ ID NO: 10626 - protein, 12 aa, Homo sapiens
  ( 355 )...( 366 ): >PE21_HUMAN
RQAVLRQLLRLL

SEQ ID NO: 10627 - protein, 12 aa, Homo sapiens
  ( 359 )...( 370 ): >PE21_HUMAN
LRQLLRLLPPRA

SEQ ID NO: 10628 - protein, 12 aa, Homo sapiens
  ( 360 )...( 371 ): >PE21_HUMAN
RQLLRLLPPRAG

SEQ ID NO: 10629 - protein, 12 aa, Homo sapiens
  ( 362 )...( 373 ): >PE21_HUMAN
LLRLLPPRAGAK

SEQ ID NO: 10630 - protein, 12 aa, Homo sapiens
  ( 363 )...( 374 ): >PE21_HUMAN
LRLLPPRAGAKG

SEQ ID NO: 10631 - protein, 12 aa, Homo sapiens
  ( 41 )...( 52 ): >PE22_HUMAN
IALALLARRWRG

SEQ ID NO: 10632 - protein, 12 aa, Homo sapiens
  ( 243 )...( 254 ): >PE22_HUMAN
GGPGARRRGERV

SEQ ID NO: 10633 - protein, 12 aa, Homo sapiens
  ( 244 )...( 255 ): >PE22_HUMAN
GPGARRRGERVS

SEQ ID NO: 10634 - protein, 12 aa, Homo sapiens
  ( 245 )...( 256 ): >PE22_HUMAN
PGARRRGERVSM

SEQ ID NO: 10635 - protein, 12 aa, Homo sapiens
  ( 246 )...( 257 ): >PE22_HUMAN
GARRRGERVSMA

SEQ ID NO: 10636 - protein, 12 aa, Homo sapiens
  ( 317 )...( 328 ): >PE22_HUMAN
ILRPPVLRLMRS

SEQ ID NO: 10637 - protein, 12 aa, Homo sapiens
  ( 318 )...( 329 ): >PE22_HUMAN
LRPPVLRLMRSV

SEQ ID NO: 10638 - protein, 12 aa, Homo sapiens
  ( 319 )...( 330 ): >PE22_HUMAN
RPPVLRLMRSVL

SEQ ID NO: 10639 - protein, 12 aa, Homo sapiens
  ( 322 )...( 333 ): >PE22_HUMAN
VLRLMRSVLCCR

SEQ ID NO: 10640 - protein, 12 aa, Homo sapiens
  ( 323 )...( 334 ): >PE22_HUMAN
LRLMRSVLCCRI

SEQ ID NO: 10641 - protein, 12 aa, Homo sapiens
  ( 327 )...( 338 ): >PE22_HUMAN
RSVLCCRISLRT

SEQ ID NO: 10642 - protein, 12 aa, Homo sapiens
  ( 68 )...( 79 ): >PE23_HUMAN
LAMLLVSRSYRR

SEQ ID NO: 10643 - protein, 12 aa, Homo sapiens
  ( 81 )...( 92 ): >PE23_HUMAN
ESKRKKSFLLCI

SEQ ID NO: 10644 - protein, 12 aa, Homo sapiens
  ( 82 )...( 93 ): >PE23_HUMAN
SKRKKSFLLCIG

SEQ ID NO: 10645 - protein, 12 aa, Homo sapiens
  ( 83 )...( 94 ): >PE23_HUMAN
KRKKSFLLCIGW

SEQ ID NO: 10646 - protein, 12 aa, Homo sapiens
  ( 84 )...( 95 ): >PE23_HUMAN
RKKSFLLCIGWL

SEQ ID NO: 10647 - protein, 12 aa, Homo sapiens
  ( 165 )...( 176 ): >PE23_HUMAN
YASHMKTRATRA

SEQ ID NO: 10648 - protein, 12 aa, Homo sapiens
  ( 166 )...( 177 ): >PE23_HUMAN
ASHMKTRATRAV

SEQ ID NO: 10649 - protein, 12 aa, Homo sapiens
  ( 167 )...( 178 ): >PE23_HUMAN
SHMKTRATRAVL

SEQ ID NO: 10650 - protein, 12 aa, Homo sapiens
  ( 168 )...( 179 ): >PE23_HUMAN
HMKTRATRAVLL

SEQ ID NO: 10651 - protein, 12 aa, Homo sapiens
  ( 169 )...( 180 ): >PE23_HUMAN
MKTRATRAVLLG

SEQ ID NO: 10652 - protein, 12 aa, Homo sapiens
  ( 250 )...( 261 ): >PE23_HUMAN
LATIKALVSRCR

SEQ ID NO: 10653 - protein, 12 aa, Homo sapiens
  ( 251 )...( 262 ): >PE23_HUMAN
ATIKALVSRCRA

SEQ ID NO: 10654 - protein, 12 aa, Homo sapiens
  ( 252 )...( 263 ): >PE23_HUMAN
TIKALVSRCRAK

SEQ ID NO: 10655 - protein, 12 aa, Homo sapiens
  ( 253 )...( 264 ): >PE23_HUMAN
IKALVSRCRAKA

SEQ ID NO: 10656 - protein, 12 aa, Homo sapiens
  ( 254 )...( 265 ): >PE23_HUMAN
KALVSRCRAKAT

SEQ ID NO: 10657 - protein, 12 aa, Homo sapiens
  ( 36 )...( 47 ): >PE24_HUMAN
LVAIVVLCKSRK

SEQ ID NO: 10658 - protein, 12 aa, Homo sapiens
  ( 39 )...( 50 ): >PE24_HUMAN
IVVLCKSRKEQK

SEQ ID NO: 10659 - protein, 12 aa, Homo sapiens
  ( 257 )...( 268 ): >PE24_HUMAN
RRSFRRIAGAEI

SEQ ID NO: 10660 - protein, 12 aa, Homo sapiens
  ( 329 )...( 340 ): >PE24_HUMAN
YILLRKTVLSKA

SEQ ID NO: 10661 - protein, 12 aa, Homo sapiens
  ( 330 )...( 341 ): >PE24_HUMAN
ILLRKTVLSKAI

SEQ ID NO: 10662 - protein, 12 aa, Homo sapiens
  ( 332 )...( 343 ): >PE24_HUMAN
LRKTVLSKAIEK

SEQ ID NO: 10663 - protein, 12 aa, Homo sapiens
  ( 333 )...( 344 ): >PE24_HUMAN
RKTVLSKAIEKI

SEQ ID NO: 10664 - protein, 12 aa, Homo sapiens
  ( 339 )...( 350 ): >PE24_HUMAN
KAIEKIKCLFCR

SEQ ID NO: 10665 - protein, 12 aa, Homo sapiens
  ( 347 )...( 358 ): >PE24_HUMAN
LFCRIGGSRRER

SEQ ID NO: 10666 - protein, 12 aa, Homo sapiens
  ( 348 )...( 359 ): >PE24_HUMAN
FCRIGGSRRERS

SEQ ID NO: 10667 - protein, 12 aa, Homo sapiens
  ( 59 )...( 70 ): >PF2R_HUMAN
RQKSKASFLLLA

SEQ ID NO: 10668 - protein, 12 aa, Homo sapiens
  ( 222 )...( 233 ): >PF2R_HUMAN
ITGITLLRVKFK

SEQ ID NO: 10669 - protein, 12 aa, Homo sapiens
  ( 223 )...( 234 ): >PF2R_HUMAN
TGITLLRVKFKS

SEQ ID NO: 10670 - protein, 12 aa, Homo sapiens
  ( 224 )...( 235 ): >PF2R_HUMAN
GITLLRVKFKSQ

SEQ ID NO: 10671 - protein, 12 aa, Homo sapiens
  ( 225 )...( 236 ): >PF2R_HUMAN
ITLLRVKFKSQQ

SEQ ID NO: 10672 - protein, 12 aa, Homo sapiens
  ( 303 )...( 314 ): >PF2R_HUMAN
VYILLRKAVLKN

SEQ ID NO: 10673 - protein, 12 aa, Homo sapiens
  ( 306 )...( 317 ): >PF2R_HUMAN
LLRKAVLKNLYK

SEQ ID NO: 10674 - protein, 12 aa, Homo sapiens
  ( 307 )...( 318 ): >PF2R_HUMAN
LRKAVLKNLYKL

SEQ ID NO: 10675 - protein, 12 aa, Homo sapiens
  ( 308 )...( 319 ): >PF2R_HUMAN
RKAVLKNLYKLA

SEQ ID NO: 10676 - protein, 12 aa, Homo sapiens
  ( 309 )...( 320 ): >PF2R_HUMAN
KAVLKNLYKLAS

SEQ ID NO: 10677 - protein, 12 aa, Homo sapiens
  ( 34 )...( 45 ): >PI2R_HUMAN
ALGILSARRPAR

SEQ ID NO: 10678 - protein, 12 aa, Homo sapiens
  ( 35 )...( 46 ): >PI2R_HUMAN
LGILSARRPARP

SEQ ID NO: 10679 - protein, 12 aa, Homo sapiens
  ( 215 )...( 226 ): >PI2R_HUMAN
RQQKRHQGSLGP

SEQ ID NO: 10680 - protein, 12 aa, Homo sapiens
  ( 216 )...( 227 ): >PI2R_HUMAN
QQKRHQGSLGPR

SEQ ID NO: 10681 - protein, 12 aa, Homo sapiens
  ( 217 )...( 228 ): >PI2R_HUMAN
QKRHQGSLGPRP

SEQ ID NO: 10682 - protein, 12 aa, Homo sapiens
  ( 219 )...( 230 ): >PI2R_HUMAN
RHQGSLGPRPRT

SEQ ID NO: 10683 - protein, 12 aa, Homo sapiens
  ( 297 )...( 308 ): >PI2R_HUMAN
KAVFQRLKLWVC

SEQ ID NO: 10684 - protein, 12 aa, Homo sapiens
  ( 356 )...( 367 ): >PTR2_HUMAN
KQYRKLAKSTLV

SEQ ID NO: 10685 - protein, 12 aa, Homo sapiens
  ( 357 )...( 368 ): >PTR2_HUMAN
QYRKLAKSTLVL

SEQ ID NO: 10686 - protein, 12 aa, Homo sapiens
  ( 358 )...( 369 ): >PTR2_HUMAN
YRKLAKSTLVLV

SEQ ID NO: 10687 - protein, 12 aa, Homo sapiens
  ( 359 )...( 370 ): >PTR2_HUMAN
RKLAKSTLVLVL

SEQ ID NO: 10688 - protein, 12 aa, Homo sapiens
  ( 470 )...( 481 ): >PTR2_HUMAN
RMVLISGKAAKI

SEQ ID NO: 10689 - protein, 12 aa, Homo sapiens
  ( 50 )...( 61 ): >PTRR_HUMAN
KRLKEVLQRPAS

SEQ ID NO: 10690 - protein, 12 aa, Homo sapiens
  ( 76 )...( 87 ): >PTRR_HUMAN
GKPRKDKASGKL

SEQ ID NO: 10691 - protein, 12 aa, Homo sapiens
  ( 95 )...( 106 ): >PTRR_HUMAN
KEAPTGSRYRGR

SEQ ID NO: 10692 - protein, 12 aa, Homo sapiens
  ( 379 )...( 390 ): >PTRR_HUMAN
INIVRVLATKLR

SEQ ID NO: 10693 - protein, 12 aa, Homo sapiens
  ( 401 )...( 412 ): >PTRR_HUMAN
QQYRKLLKSTLV

SEQ ID NO: 10694 - protein, 12 aa, Homo sapiens
  ( 402 )...( 413 ): >PTRR_HUMAN
QYRKLLKSTLVL

SEQ ID NO: 10695 - protein, 12 aa, Homo sapiens
  ( 404 )...( 415 ): >PTRR_HUMAN
RKLLKSTLVLMP

SEQ ID NO: 10696 - protein, 12 aa, Homo sapiens
  ( 478 )...( 489 ): >PTRR_HUMAN
TLALDFKRKARS

SEQ ID NO: 10697 - protein, 12 aa, Homo sapiens
  ( 479 )...( 490 ): >PTRR_HUMAN
LALDFKRKARSG

SEQ ID NO: 10698 - protein, 12 aa, Homo sapiens
  ( 480 )...( 491 ): >PTRR_HUMAN
ALDFKRKARSGS

SEQ ID NO: 10699 - protein, 12 aa, Homo sapiens
  ( 150 )...( 161 ): >RDC1_HUMAN
TNTPSSRKKMVR

SEQ ID NO: 10700 - protein, 12 aa, Homo sapiens
  ( 152 )...( 163 ): >RDC1_HUMAN
TPSSRKKMVRRV

SEQ ID NO: 10701 - protein, 12 aa, Homo sapiens
  ( 157 )...( 168 ): >RDC1_HUMAN
KKMVRRVVCILV

SEQ ID NO: 10702 - protein, 12 aa, Homo sapiens
  ( 91 )...( 102 ): >SCRC_HUMAN
RFLRMLTSRNGS

SEQ ID NO: 10703 - protein, 12 aa, Homo sapiens
  ( 94 )...( 105 ): >SCRC_HUMAN
RMLTSRNGSLFR

SEQ ID NO: 10704 - protein, 12 aa, Homo sapiens
  ( 163 )...( 174 ): >SCRC_HUMAN
ILCAFRRLHCTR

SEQ ID NO: 10705 - protein, 12 aa, Homo sapiens
  ( 320 )...( 331 ): >SCRC_HUMAN
LMRKLRTQETRG

SEQ ID NO: 10706 - protein, 12 aa, Homo sapiens
  ( 334 )...( 345 ): >SCRC_HUMAN
VSHYKRLARSTL

SEQ ID NO: 10707 - protein, 12 aa, Homo sapiens
  ( 335 )...( 346 ): >SCRC_HUMAN
SHYKRLARSTLL

SEQ ID NO: 10708 - protein, 12 aa, Homo sapiens
  ( 336 )...( 347 ): >SCRC_HUMAN
HYKRLARSTLLL

SEQ ID NO: 10709 - protein, 12 aa, Homo sapiens
  ( 337 )...( 348 ): >SCRC_HUMAN
YKRLARSTLLLI

SEQ ID NO: 10710 - protein, 12 aa, Homo sapiens
  ( 338 )...( 349 ): >SCRC_HUMAN
KRLARSTLLLIP

SEQ ID NO: 10711 - protein, 12 aa, Homo sapiens
  ( 559 )...( 570 ): >SMO_HUMAN
EPKRIKKSKMIA

SEQ ID NO: 10712 - protein, 12 aa, Homo sapiens
  ( 562 )...( 573 ): >SMO_HUMAN
RIKKSKMIAKAF

SEQ ID NO: 10713 - protein, 12 aa, Homo sapiens
  ( 563 )...( 574 ): >SMO_HUMAN
IKKSKMIAKAFS

SEQ ID NO: 10714 - protein, 12 aa, Homo sapiens
  ( 564 )...( 575 ): >SMO_HUMAN
KKSKMIAKAFSK

SEQ ID NO: 10715 - protein, 12 aa, Homo sapiens
  ( 565 )...( 576 ): >SMO_HUMAN
KSKMIAKAFSKR

SEQ ID NO: 10716 - protein, 12 aa, Homo sapiens
  ( 618 )...( 629 ): >SMO_HUMAN
WAQHVTKMVARR

SEQ ID NO: 10717 - protein, 12 aa, Homo sapiens
  ( 619 )...( 630 ): >SMO_HUMAN
AQHVTKMVARRG

SEQ ID NO: 10718 - protein, 12 aa, Homo sapiens
  ( 620 )...( 631 ): >SMO_HUMAN
QHVTKMVARRGA

SEQ ID NO: 10719 - protein, 12 aa, Homo sapiens
  ( 621 )...( 632 ): >SMO_HUMAN
HVTKMVARRGAI

SEQ ID NO: 10720 - protein, 12 aa, Homo sapiens
  ( 623 )...( 634 ): >SMO_HUMAN
TKMVARRGAILP

SEQ ID NO: 10721 - protein, 12 aa, Homo sapiens
  ( 624 )...( 635 ): >SMO_HUMAN
KMVARRGAILPQ

SEQ ID NO: 10722 - protein, 12 aa, Homo sapiens
  ( 661 )...( 672 ): >SMO_HUMAN
ISPELQKRLGRK

SEQ ID NO: 10723 - protein, 12 aa, Homo sapiens
  ( 703 )...( 714 ): >SMO_HUMAN
RLPQLPRQKCLV

SEQ ID NO: 10724 - protein, 12 aa, Homo sapiens
  ( 761 )...( 772 ): >SMO_HUMAN
GRRQGLGPIHSR

SEQ ID NO: 10725 - protein, 12 aa, Homo sapiens
  ( 762 )...( 773 ): >SMO_HUMAN
RRQGLGPIHSRT

SEQ ID NO: 10726 - protein, 12 aa, Homo sapiens
  ( 214 )...( 225 ): >SRB3_HUMAN
HRKMKPVQMVPA

SEQ ID NO: 10727 - protein, 12 aa, Homo sapiens
  ( 215 )...( 226 ): >SRB3_HUMAN
RKMKPVQMVPAI

SEQ ID NO: 10728 - protein, 12 aa, Homo sapiens
  ( 260 )...( 271 ): >SRB3_HUMAN
GIRQNGHAASRR

SEQ ID NO: 10729 - protein, 12 aa, Homo sapiens
  ( 261 )...( 272 ): >SRB3_HUMAN
IRQNGHAASRRL

SEQ ID NO: 10730 - protein, 12 aa, Homo sapiens
  ( 262 )...( 273 ): >SRB3_HUMAN
RQNGHAASRRLL

SEQ ID NO: 10731 - protein, 12 aa, Homo sapiens
  ( 342 )...( 353 ): >SRB3_HUMAN
LLNKDLKKCLRT

SEQ ID NO: 10732 - protein, 12 aa, Homo sapiens
  ( 81 )...( 92 ): >SSR1_HUMAN
YVILRYAKMKTA

SEQ ID NO: 10733 - protein, 12 aa, Homo sapiens
  ( 82 )...( 93 ): >SSR1_HUMAN
VILRYAKMKTAT

SEQ ID NO: 10734 - protein, 12 aa, Homo sapiens
  ( 83 )...( 94 ): >SSR1_HUMAN
ILRYAKMKTATN

SEQ ID NO: 10735 - protein, 12 aa, Homo sapiens
  ( 84 )...( 95 ): >SSR1_HUMAN
LRYAKMKTATNI

SEQ ID NO: 10736 - protein, 12 aa, Homo sapiens
  ( 85 )...( 96 ): >SSR1_HUMAN
RYAKMKTATNIY

SEQ ID NO: 10737 - protein, 12 aa, Homo sapiens
  ( 158 )...( 169 ): >SSR1_HUMAN
AVVHPIKAARYR

SEQ ID NO: 10738 - protein, 12 aa, Homo sapiens
  ( 163 )...( 174 ): >SSR1_HUMAN
IKAARYRRPTVA

SEQ ID NO: 10739 - protein, 12 aa, Homo sapiens
  ( 165 )...( 176 ): >SSR1_HUMAN
AARYRRPTVAKV

SEQ ID NO: 10740 - protein, 12 aa, Homo sapiens
  ( 166 )...( 177 ): >SSR1_HUMAN
ARYRRPTVAKVV

SEQ ID NO: 10741 - protein, 12 aa, Homo sapiens
  ( 168 )...( 179 ): >SSR1_HUMAN
YRRPTVAKVVNL

SEQ ID NO: 10742 - protein, 12 aa, Homo sapiens
  ( 169 )...( 180 ): >SSR1_HUMAN
RRPTVAKVVNLG

SEQ ID NO: 10743 - protein, 12 aa, Homo sapiens
  ( 246 )...( 257 ): >SSR1_HUMAN
IIAKMRMVALKA

SEQ ID NO: 10744 - protein, 12 aa, Homo sapiens
  ( 247 )...( 258 ): >SSR1_HUMAN
IAKMRMVALKAG

SEQ ID NO: 10745 - protein, 12 aa, Homo sapiens
  ( 248 )...( 259 ): >SSR1_HUMAN
AKMRMVALKAGW

SEQ ID NO: 10746 - protein, 12 aa, Homo sapiens
  ( 249 )...( 260 ): >SSR1_HUMAN
KMRMVALKAGWQ

SEQ ID NO: 10747 - protein, 12 aa, Homo sapiens
  ( 251 )...( 262 ): >SSR1_HUMAN
RMVALKAGWQQR

SEQ ID NO: 10748 - protein, 12 aa, Homo sapiens
  ( 252 )...( 263 ): >SSR1_HUMAN
MVALKAGWQQRK

SEQ ID NO: 10749 - protein, 12 aa, Homo sapiens
  ( 253 )...( 264 ): >SSR1_HUMAN
VALKAGWQQRKR

SEQ ID NO: 10750 - protein, 12 aa, Homo sapiens
  ( 263 )...( 274 ): >SSR1_HUMAN
KRSERKITLMVM

SEQ ID NO: 10751 - protein, 12 aa, Homo sapiens
  ( 67 )...( 78 ): >SSR2_HUMAN
VILRYAKMKTIT

SEQ ID NO: 10752 - protein, 12 aa, Homo sapiens
  ( 68 )...( 79 ): >SSR2_HUMAN
ILRYAKMKTITN

SEQ ID NO: 10753 - protein, 12 aa, Homo sapiens
  ( 69 )...( 80 ): >SSR2_HUMAN
LRYAKMKTITNI

SEQ ID NO: 10754 - protein, 12 aa, Homo sapiens
  ( 143 )...( 154 ): >SSR2_HUMAN
AVVHPIKSAKWR

SEQ ID NO: 10755 - protein, 12 aa, Homo sapiens
  ( 154 )...( 165 ): >SSR2_HUMAN
RRPRTAKMITMA

SEQ ID NO: 10756 - protein, 12 aa, Homo sapiens
  ( 155 )...( 166 ): >SSR2_HUMAN
RPRTAKMITMAV

SEQ ID NO: 10757 - protein, 12 aa, Homo sapiens
  ( 230 )...( 241 ): >SSR2_HUMAN
FIIIKVKSSGIR

SEQ ID NO: 10758 - protein, 12 aa, Homo sapiens
  ( 236 )...( 247 ): >SSR2_HUMAN
KSSGIRVGSSKR

SEQ ID NO: 10759 - protein, 12 aa, Homo sapiens
  ( 237 )...( 248 ): >SSR2_HUMAN
SSGIRVGSSKRK

SEQ ID NO: 10760 - protein, 12 aa, Homo sapiens
  ( 238 )...( 249 ): >SSR2_HUMAN
SGIRVGSSKRKK

SEQ ID NO: 10761 - protein, 12 aa, Homo sapiens
  ( 239 )...( 250 ): >SSR2_HUMAN
GIRVGSSKRKKS

SEQ ID NO: 10762 - protein, 12 aa, Homo sapiens
  ( 240 )...( 251 ): >SSR2_HUMAN
IRVGSSKRKKSE

SEQ ID NO: 10763 - protein, 12 aa, Homo sapiens
  ( 248 )...( 259 ): >SSR2_HUMAN
KKSEKKVTRMVS

SEQ ID NO: 10764 - protein, 12 aa, Homo sapiens
  ( 320 )...( 331 ): >SSR2_HUMAN
KKSFQNVLCLVK

SEQ ID NO: 10765 - protein, 12 aa, Homo sapiens
  ( 148 )...( 159 ): >SSR3_HUMAN
PTRSARWRTAPV

SEQ ID NO: 10766 - protein, 12 aa, Homo sapiens
  ( 149 )...( 160 ): >SSR3_HUMAN
TRSARWRTAPVA

SEQ ID NO: 10767 - protein, 12 aa, Homo sapiens
  ( 151 )...( 162 ): >SSR3_HUMAN
SARWRTAPVART

SEQ ID NO: 10768 - protein, 12 aa, Homo sapiens
  ( 152 )...( 163 ): >SSR3_HUMAN
ARWRTAPVARTV

SEQ ID NO: 10769 - protein, 12 aa, Homo sapiens
  ( 153 )...( 164 ): >SSR3_HUMAN
RWRTAPVARTVS

SEQ ID NO: 10770 - protein, 12 aa, Homo sapiens
  ( 228 )...( 239 ): >SSR3_HUMAN
LIVVKVRSAGRR

SEQ ID NO: 10771 - protein, 12 aa, Homo sapiens
  ( 229 )...( 240 ): >SSR3_HUMAN
IVVKVRSAGRRV

SEQ ID NO: 10772 - protein, 12 aa, Homo sapiens
  ( 230 )...( 241 ): >SSR3_HUMAN
VVKVRSAGRRVW

SEQ ID NO: 10773 - protein, 12 aa, Homo sapiens
  ( 231 )...( 242 ): >SSR3_HUMAN
VKVRSAGRRVWA

SEQ ID NO: 10774 - protein, 12 aa, Homo sapiens
  ( 232 )...( 243 ): >SSR3_HUMAN
KVRSAGRRVWAP

SEQ ID NO: 10775 - protein, 12 aa, Homo sapiens
  ( 233 )...( 244 ): >SSR3_HUMAN
VRSAGRRVWAPS

SEQ ID NO: 10776 - protein, 12 aa, Homo sapiens
  ( 250 )...( 261 ): >SSR3_HUMAN
RSERRVTRMVVA

SEQ ID NO: 10777 - protein, 12 aa, Homo sapiens
  ( 253 )...( 264 ): >SSR3_HUMAN
RRVTRMVVAVVA

SEQ ID NO: 10778 - protein, 12 aa, Homo sapiens
  ( 70 )...( 81 ): >SSR4_HUMAN
FVILRYAKMKTA

SEQ ID NO: 10779 - protein, 12 aa, Homo sapiens
  ( 71 )...( 82 ): >SSR4_HUMAN
VILRYAKMKTAT

SEQ ID NO: 10780 - protein, 12 aa, Homo sapiens
  ( 72 )...( 83 ): >SSR4_HUMAN
ILRYAKMKTATN

SEQ ID NO: 10781 - protein, 12 aa, Homo sapiens
  ( 73 )...( 84 ): >SSR4_HUMAN
LRYAKMKTATNI

SEQ ID NO: 10782 - protein, 12 aa, Homo sapiens
  ( 74 )...( 85 ): >SSR4_HUMAN
RYAKMKTATNIY

SEQ ID NO: 10783 - protein, 12 aa, Homo sapiens
  ( 148 )...( 159 ): >SSR4_HUMAN
VVHPLRAATYRR

SEQ ID NO: 10784 - protein, 12 aa, Homo sapiens
  ( 151 )...( 162 ): >SSR4_HUMAN
PLRAATYRRPSV

SEQ ID NO: 10785 - protein, 12 aa, Homo sapiens
  ( 152 )...( 163 ): >SSR4_HUMAN
LRAATYRRPSVA

SEQ ID NO: 10786 - protein, 12 aa, Homo sapiens
  ( 153 )...( 164 ): >SSR4_HUMAN
RAATYRRPSVAK

SEQ ID NO: 10787 - protein, 12 aa, Homo sapiens
  ( 154 )...( 165 ): >SSR4_HUMAN
AATYRRPSVAKL

SEQ ID NO: 10788 - protein, 12 aa, Homo sapiens
  ( 155 )...( 166 ): >SSR4_HUMAN
ATYRRPSVAKLI

SEQ ID NO: 10789 - protein, 12 aa, Homo sapiens
  ( 156 )...( 167 ): >SSR4_HUMAN
TYRRPSVAKLIN

SEQ ID NO: 10790 - protein, 12 aa, Homo sapiens
  ( 157 )...( 168 ): >SSR4_HUMAN
YRRPSVAKLINL

SEQ ID NO: 10791 - protein, 12 aa, Homo sapiens
  ( 158 )...( 169 ): >SSR4_HUMAN
RRPSVAKLINLG

SEQ ID NO: 10792 - protein, 12 aa, Homo sapiens
  ( 233 )...( 244 ): >SSR4_HUMAN
LIVGKMRAVALR

SEQ ID NO: 10793 - protein, 12 aa, Homo sapiens
  ( 236 )...( 247 ): >SSR4_HUMAN
GKMRAVALRAGW

SEQ ID NO: 10794 - protein, 12 aa, Homo sapiens
  ( 237 )...( 248 ): >SSR4_HUMAN
KMRAVALRAGWQ

SEQ ID NO: 10795 - protein, 12 aa, Homo sapiens
  ( 239 )...( 250 ): >SSR4_HUMAN
RAVALRAGWQQR

SEQ ID NO: 10796 - protein, 12 aa, Homo sapiens
  ( 240 )...( 251 ): >SSR4_HUMAN
AVALRAGWQQRR

SEQ ID NO: 10797 - protein, 12 aa, Homo sapiens
  ( 251 )...( 262 ): >SSR4_HUMAN
RRSEKKITRLVL

SEQ ID NO: 10798 - protein, 12 aa, Homo sapiens
  ( 252 )...( 263 ): >SSR4_HUMAN
RSEKKITRLVLM

SEQ ID NO: 10799 - protein, 12 aa, Homo sapiens
  ( 374 )...( 385 ): >SSR4_HUMAN
EPGRKRIPLTRT

SEQ ID NO: 10800 - protein, 12 aa, Homo sapiens
  ( 375 )...( 386 ): >SSR4_HUMAN
PGRKRIPLTRTT

SEQ ID NO: 10801 - protein, 12 aa, Homo sapiens
  ( 376 )...( 387 ): >SSR4_HUMAN
GRKRIPLTRTTT

SEQ ID NO: 10802 - protein, 12 aa, Homo sapiens
  ( 377 )...( 388 ): >SSR4_HUMAN
RKRIPLTRTTTF

SEQ ID NO: 10803 - protein, 11 aa, Homo sapiens
  ( 378 )...( 389 ): >SSR4_HUMAN
KRIPLTRTTTF

SEQ ID NO: 10804 - protein, 12 aa, Homo sapiens
  ( 63 )...( 74 ): >SSR5_HUMAN
YVVLRFAKMKTV

SEQ ID NO: 10805 - protein, 12 aa, Homo sapiens
  ( 64 )...( 75 ): >SSR5_HUMAN
VVLRFAKMKTVT

SEQ ID NO: 10806 - protein, 12 aa, Homo sapiens
  ( 65 )...( 76 ): >SSR5_HUMAN
VLRFAKMKTVTN

SEQ ID NO: 10807 - protein, 12 aa, Homo sapiens
  ( 66 )...( 77 ): >SSR5_HUMAN
LRFAKMKTVTNI

SEQ ID NO: 10808 - protein, 12 aa, Homo sapiens
  ( 67 )...( 78 ): >SSR5_HUMAN
RFAKMKTVTNIY

SEQ ID NO: 10809 - protein, 12 aa, Homo sapiens
  ( 151 )...( 162 ): >SSR5_HUMAN
RRPRVAKLASAA

SEQ ID NO: 10810 - protein, 12 aa, Homo sapiens
  ( 232 )...( 243 ): >SSR5_HUMAN
GVRVGCVRRRSE

SEQ ID NO: 10811 - protein, 12 aa, Homo sapiens
  ( 235 )...( 246 ): >SSR5_HUMAN
VGCVRRRSERKV

SEQ ID NO: 10812 - protein, 12 aa, Homo sapiens
  ( 236 )...( 247 ): >SSR5_HUMAN
GCVRRRSERKVT

SEQ ID NO: 10813 - protein, 12 aa, Homo sapiens
  ( 241 )...( 252 ): >SSR5_HUMAN
RSERKVTRMVLV

SEQ ID NO: 10814 - protein, 12 aa, Homo sapiens
  ( 313 )...( 324 ): >SSR5_HUMAN
QSFQKVLCLRKG

SEQ ID NO: 10815 - protein, 12 aa, Homo sapiens
  ( 314 )...( 325 ): >SSR5_HUMAN
SFQKVLCLRKGS

SEQ ID NO: 10816 - protein, 12 aa, Homo sapiens
  ( 315 )...( 326 ): >SSR5_HUMAN
FQKVLCLRKGSG

SEQ ID NO: 10817 - protein, 12 aa, Homo sapiens
  ( 140 )...( 151 ): >TA2R_HUMAN
RPAVASQRRAWA

SEQ ID NO: 10818 - protein, 12 aa, Homo sapiens
  ( 314 )...( 325 ): >TA2R_HUMAN
AVLRRLQPRLST

SEQ ID NO: 10819 - protein, 12 aa, Homo sapiens
  ( 322 )...( 333 ): >TA2R_HUMAN
RLSTRPRRVSLC

SEQ ID NO: 10820 - protein, 12 aa, Homo sapiens
  ( 323 )...( 334 ): >TA2R_HUMAN
LSTRPRRVSLCG

SEQ ID NO: 10821 - protein, 12 aa, Homo sapiens
  ( 341 )...( 352 ): >TA2R_HUMAN
ARSRLTATSASR

SEQ ID NO: 10822 - protein, 12 aa, Homo sapiens
  ( 342 )...( 353 ): >TA2R_HUMAN
RSRLTATSASRV

SEQ ID NO: 10823 - protein, 12 aa, Homo sapiens
  ( 46 )...( 57 ): >TRFR_HUMAN
VVLVVMRTKHMR

SEQ ID NO: 10824 - protein, 12 aa, Homo sapiens
  ( 47 )...( 58 ): >TRFR_HUMAN
VLVVMRTKHMRT

SEQ ID NO: 10825 - protein, 12 aa, Homo sapiens
  ( 48 )...( 59 ): >TRFR_HUMAN
LVVMRTKHMRTP

SEQ ID NO: 10826 - protein, 12 aa, Homo sapiens
  ( 49 )...( 60 ): >TRFR_HUMAN
VVMRTKHMRTPT

SEQ ID NO: 10827 - protein, 12 aa, Homo sapiens
  ( 134 )...( 145 ): >TRFR_HUMAN
QFLCTFSRAKKI

SEQ ID NO: 10828 - protein, 12 aa, Homo sapiens
  ( 135 )...( 146 ): >TRFR_HUMAN
FLCTFSRAKKII

SEQ ID NO: 10829 - protein, 12 aa, Homo sapiens
  ( 136 )...( 147 ): >TRFR_HUMAN
LCTFSRAKKIII

SEQ ID NO: 10830 - protein, 12 aa, Homo sapiens
  ( 137 )...( 148 ): >TRFR_HUMAN
CTFSRAKKIIIF

SEQ ID NO: 10831 - protein, 12 aa, Homo sapiens
  ( 138 )...( 149 ): >TRFR_HUMAN
TFSRAKKIIIFV

SEQ ID NO: 10832 - protein, 12 aa, Homo sapiens
  ( 140 )...( 151 ): >TRFR_HUMAN
SRAKKIIIFVWA

SEQ ID NO: 10833 - protein, 12 aa, Homo sapiens
  ( 258 )...( 269 ): >TRFR_HUMAN
VSSRKQVTKMLA

SEQ ID NO: 10834 - protein, 12 aa, Homo sapiens
  ( 259 )...( 270 ): >TRFR_HUMAN
SSRKQVTKMLAV

SEQ ID NO: 10835 - protein, 12 aa, Homo sapiens
  ( 260 )...( 271 ): >TRFR_HUMAN
SRKQVTKMLAVV

SEQ ID NO: 10836 - protein, 12 aa, Homo sapiens
  ( 261 )...( 272 ): >TRFR_HUMAN
RKQVTKMLAVVV

SEQ ID NO: 10837 - protein, 12 aa, Homo sapiens
  ( 134 )...( 145 ): >TRP1_HUMAN
PKRSSRPTIVKL

SEQ ID NO: 10838 - protein, 12 aa, Homo sapiens
  ( 135 )...( 146 ): >TRP1_HUMAN
KRSSRPTIVKLM

SEQ ID NO: 10839 - protein, 12 aa, Homo sapiens
  ( 304 )...( 315 ): >TRP1_HUMAN
RMNLSRLKLAIK

SEQ ID NO: 10840 - protein, 12 aa, Homo sapiens
  ( 305 )...( 316 ): >TRP1_HUMAN
MNLSRLKLAIKY

SEQ ID NO: 10841 - protein, 12 aa, Homo sapiens
  ( 307 )...( 318 ): >TRP1_HUMAN
LSRLKLAIKYNQ

SEQ ID NO: 10842 - protein, 12 aa, Homo sapiens
  ( 340 )...( 351 ): >TRP1_HUMAN
SGYRRKPTCKKI

SEQ ID NO: 10843 - protein, 12 aa, Homo sapiens
  ( 343 )...( 354 ): >TRP1_HUMAN
RRKPTCKKIMTV

SEQ ID NO: 10844 - protein, 12 aa, Homo sapiens
  ( 344 )...( 355 ): >TRP1_HUMAN
RKPTCKKIMTVL

SEQ ID NO: 10845 - protein, 12 aa, Homo sapiens
  ( 702 )...( 713 ): >TRP1_HUMAN
ICSHTSKGKVKR

SEQ ID NO: 10846 - protein, 12 aa, Homo sapiens
  ( 703 )...( 714 ): >TRP1_HUMAN
CSHTSKGKVKRQ

SEQ ID NO: 10847 - protein, 12 aa, Homo sapiens
  ( 704 )...( 715 ): >TRP1_HUMAN
SHTSKGKVKRQN

SEQ ID NO: 10848 - protein, 12 aa, Homo sapiens
  ( 705 )...( 716 ): >TRP1_HUMAN
HTSKGKVKRQNS

SEQ ID NO: 10849 - protein, 12 aa, Homo sapiens
  ( 706 )...( 717 ): >TRP1_HUMAN
TSKGKVKRQNSL

SEQ ID NO: 10850 - protein, 12 aa, Homo sapiens
  ( 707 )...( 718 ): >TRP1_HUMAN
SKGKVKRQNSLK

SEQ ID NO: 10851 - protein, 12 aa, Homo sapiens
  ( 708 )...( 719 ): >TRP1_HUMAN
KGKVKRQNSLKE

SEQ ID NO: 10852 - protein, 12 aa, Homo sapiens
  ( 3 )...( 14 ): >TRP3_HUMAN
GSPSLRRMTVMR

SEQ ID NO: 10853 - protein, 12 aa, Homo sapiens
  ( 6 )...( 17 ): >TRP3_HUMAN
SLRRMTVMREKG

SEQ ID NO: 10854 - protein, 12 aa, Homo sapiens
  ( 10 )...( 21 ): >TRP3_HUMAN
MTVMREKGRRQA

SEQ ID NO: 10855 - protein, 12 aa, Homo sapiens
  ( 11 )...( 22 ): >TRP3_HUMAN
TVMREKGRRQAV

SEQ ID NO: 10856 - protein, 12 aa, Homo sapiens
  ( 15 )...( 26 ): >TRP3_HUMAN
EKGRRQAVRGPA

SEQ ID NO: 10857 - protein, 12 aa, Homo sapiens
  ( 16 )...( 27 ): >TRP3_HUMAN
KGRRQAVRGPAF

SEQ ID NO: 10858 - protein, 12 aa, Homo sapiens
  ( 17 )...( 28 ): >TRP3_HUMAN
GRRQAVRGPAFM

SEQ ID NO: 10859 - protein, 12 aa, Homo sapiens
  ( 211 )...( 222 ): >TRP3_HUMAN
SRSRINAYKGLA

SEQ ID NO: 10860 - protein, 12 aa, Homo sapiens
  ( 212 )...( 223 ): >TRP3_HUMAN
RSRINAYKGLAS

SEQ ID NO: 10861 - protein, 12 aa, Homo sapiens
  ( 299 )...( 310 ): >TRP3_HUMAN
VHRHKASLSRVK

SEQ ID NO: 10862 - protein, 12 aa, Homo sapiens
  ( 301 )...( 312 ): >TRP3_HUMAN
RHKASLSRVKLA

SEQ ID NO: 10863 - protein, 12 aa, Homo sapiens
  ( 303 )...( 314 ): >TRP3_HUMAN
KASLSRVKLAIK

SEQ ID NO: 10864 - protein, 12 aa, Homo sapiens
  ( 304 )...( 315 ): >TRP3_HUMAN
ASLSRVKLAIKY

SEQ ID NO: 10865 - protein, 12 aa, Homo sapiens
  ( 307 )...( 318 ): >TRP3_HUMAN
SRVKLAIKYEVK

SEQ ID NO: 10866 - protein, 12 aa, Homo sapiens
  ( 308 )...( 319 ): >TRP3_HUMAN
RVKLAIKYEVKK

SEQ ID NO: 10867 - protein, 12 aa, Homo sapiens
  ( 309 )...( 320 ): >TRP3_HUMAN
VKLAIKYEVKKF

SEQ ID NO: 10868 - protein, 12 aa, Homo sapiens
  ( 310 )...( 321 ): >TRP3_HUMAN
KLAIKYEVKKFV

SEQ ID NO: 10869 - protein, 12 aa, Homo sapiens
  ( 369 )...( 380 ): >TRP3_HUMAN
IAPCSRLGKILR

SEQ ID NO: 10870 - protein, 12 aa, Homo sapiens
  ( 373 )...( 384 ): >TRP3_HUMAN
SRLGKILRSPFM

SEQ ID NO: 10871 - protein, 12 aa, Homo sapiens
  ( 374 )...( 385 ): >TRP3_HUMAN
RLGKILRSPFMK

SEQ ID NO: 10872 - protein, 12 aa, Homo sapiens
  ( 375 )...( 386 ): >TRP3_HUMAN
LGKILRSPFMKF

SEQ ID NO: 10873 - protein, 12 aa, Homo sapiens
  ( 376 )...( 387 ): >TRP3_HUMAN
GKILRSPFMKFV

SEQ ID NO: 10874 - protein, 12 aa, Homo sapiens
  ( 377 )...( 388 ): >TRP3_HUMAN
KILRSPFMKFVA

SEQ ID NO: 10875 - protein, 12 aa, Homo sapiens
  ( 424 )...( 435 ): >TRP3_HUMAN
KQIFRVKTTQFT

SEQ ID NO: 10876 - protein, 12 aa, Homo sapiens
  ( 781 )...( 792 ): >TRP3_HUMAN
RLIKRYVLKAQV

SEQ ID NO: 10877 - protein, 12 aa, Homo sapiens
  ( 783 )...( 794 ): >TRP3_HUMAN
IKRYVLKAQVDK

SEQ ID NO: 10878 - protein, 12 aa, Homo sapiens
  ( 159 )...( 170 ): >TRP4_HUMAN
KLLVQKGVSVPR

SEQ ID NO: 10879 - protein, 12 aa, Homo sapiens
  ( 193 )...( 204 ): >TRP4_HUMAN
SRSRLNIYKALA

SEQ ID NO: 10880 - protein, 12 aa, Homo sapiens
  ( 194 )...( 205 ): >TRP4_HUMAN
RSRLNIYKALAS

SEQ ID NO: 10881 - protein, 12 aa, Homo sapiens
  ( 285 )...( 296 ): >TRP4_HUMAN
DLARLKLAIKYR

SEQ ID NO: 10882 - protein, 12 aa, Homo sapiens
  ( 286 )...( 297 ): >TRP4_HUMAN
LARLKLAIKYRQ

SEQ ID NO: 10883 - protein, 12 aa, Homo sapiens
  ( 545 )...( 556 ): >TRP4_HUMAN
KGLTCKGIRCEK

SEQ ID NO: 10884 - protein, 12 aa, Homo sapiens
  ( 681 )...( 692 ): >TRP4_HUMAN
KMRRKPESFGTI

SEQ ID NO: 10885 - protein, 12 aa, Homo sapiens
  ( 683 )...( 694 ): >TRP4_HUMAN
RRKPESFGTIGR

SEQ ID NO: 10886 - protein, 12 aa, Homo sapiens
  ( 684 )...( 695 ): >TRP4_HUMAN
RKPESFGTIGRR

SEQ ID NO: 10887 - protein, 12 aa, Homo sapiens
  ( 691 )...( 702 ): >TRP4_HUMAN
TIGRRAADNLRR

SEQ ID NO: 10888 - protein, 12 aa, Homo sapiens
  ( 709 )...( 720 ): >TRP4_HUMAN
VMRNLVKRYVAA

SEQ ID NO: 10889 - protein, 12 aa, Homo sapiens
  ( 710 )...( 721 ): >TRP4_HUMAN
MRNLVKRYVAAM

SEQ ID NO: 10890 - protein, 12 aa, Homo sapiens
  ( 711 )...( 722 ): >TRP4_HUMAN
RNLVKRYVAAMI

SEQ ID NO: 10891 - protein, 12 aa, Homo sapiens
  ( 712 )...( 723 ): >TRP4_HUMAN
NLVKRYVAAMIR

SEQ ID NO: 10892 - protein, 12 aa, Homo sapiens
  ( 715 )...( 726 ): >TRP4_HUMAN
KRYVAAMIRDAK

SEQ ID NO: 10893 - protein, 12 aa, Homo sapiens
  ( 920 )...( 931 ): >TRP4_HUMAN
GLQVGKRVCPFK

SEQ ID NO: 10894 - protein, 12 aa, Homo sapiens
  ( 925 )...( 936 ): >TRP4_HUMAN
KRVCPFKSEKVV

SEQ ID NO: 10895 - protein, 12 aa, Homo sapiens
  ( 158 )...( 169 ): >TRP5_HUMAN
IKLLVQKRVTIP

SEQ ID NO: 10896 - protein, 12 aa, Homo sapiens
  ( 159 )...( 170 ): >TRP5_HUMAN
KLLVQKRVTIPR

SEQ ID NO: 10897 - protein, 12 aa, Homo sapiens
  ( 160 )...( 171 ): >TRP5_HUMAN
LLVQKRVTIPRP

SEQ ID NO: 10898 - protein, 12 aa, Homo sapiens
  ( 161 )...( 172 ): >TRP5_HUMAN
LVQKRVTIPRPH

SEQ ID NO: 10899 - protein, 12 aa, Homo sapiens
  ( 193 )...( 204 ): >TRP5_HUMAN
SRSRLNIYKALA

SEQ ID NO: 10900 - protein, 12 aa, Homo sapiens
  ( 194 )...( 205 ): >TRP5_HUMAN
RSRLNIYKALAS

SEQ ID NO: 10901 - protein, 12 aa, Homo sapiens
  ( 288 )...( 299 ): >TRP5_HUMAN
AKLKVAIKYHQK

SEQ ID NO: 10902 - protein, 12 aa, Homo sapiens
  ( 324 )...( 335 ): >TRP5_HUMAN
RKHWVVKLLTCM

SEQ ID NO: 10903 - protein, 12 aa, Homo sapiens
  ( 453 )...( 464 ): >TRP5_HUMAN
KIVAYVKYNGSR

SEQ ID NO: 10904 - protein, 12 aa, Homo sapiens
  ( 455 )...( 466 ): >TRP5_HUMAN
VAYVKYNGSRPR

SEQ ID NO: 10905 - protein, 12 aa, Homo sapiens
  ( 716 )...( 727 ): >TRP5_HUMAN
VIRNLVKRYVAA

SEQ ID NO: 10906 - protein, 12 aa, Homo sapiens
  ( 717 )...( 728 ): >TRP5_HUMAN
IRNLVKRYVAAM

SEQ ID NO: 10907 - protein, 12 aa, Homo sapiens
  ( 718 )...( 729 ): >TRP5_HUMAN
RNLVKRYVAAMI

SEQ ID NO: 10908 - protein, 12 aa, Homo sapiens
  ( 719 )...( 730 ): >TRP5_HUMAN
NLVKRYVAAMIR

SEQ ID NO: 10909 - protein, 12 aa, Homo sapiens
  ( 720 )...( 731 ): >TRP5_HUMAN
LVKRYVAAMIRN

SEQ ID NO: 10910 - protein, 12 aa, Homo sapiens
  ( 721 )...( 732 ): >TRP5_HUMAN
VKRYVAAMIRNS

SEQ ID NO: 10911 - protein, 12 aa, Homo sapiens
  ( 723 )...( 734 ): >TRP5_HUMAN
RYVAAMIRNSKT

SEQ ID NO: 10912 - protein, 12 aa, Homo sapiens
  ( 804 )...( 815 ): >TRP5_HUMAN
KKKTCHGPPLIR

SEQ ID NO: 10913 - protein, 12 aa, Homo sapiens
  ( 834 )...( 845 ): >TRP5_HUMAN
KRSFMGPSLKKL

SEQ ID NO: 10914 - protein, 12 aa, Homo sapiens
  ( 842 )...( 853 ): >TRP5_HUMAN
LKKLGLLFSKFN

SEQ ID NO: 10915 - protein, 12 aa, Homo sapiens
  ( 843 )...( 854 ): >TRP5_HUMAN
KKLGLLFSKFNG

SEQ ID NO: 10916 - protein, 12 aa, Homo sapiens
  ( 65 )...( 76 ): >TRP6_HUMAN
AHRRQTVLREKG

SEQ ID NO: 10917 - protein, 12 aa, Homo sapiens
  ( 69 )...( 80 ): >TRP6_HUMAN
QTVLREKGRRLA

SEQ ID NO: 10918 - protein, 12 aa, Homo sapiens
  ( 70 )...( 81 ): >TRP6_HUMAN
TVLREKGRRLAN

SEQ ID NO: 10919 - protein, 12 aa, Homo sapiens
  ( 74 )...( 85 ): >TRP6_HUMAN
EKGRRLANRGPA

SEQ ID NO: 10920 - protein, 12 aa, Homo sapiens
  ( 75 )...( 86 ): >TRP6_HUMAN
KGRRLANRGPAY

SEQ ID NO: 10921 - protein, 12 aa, Homo sapiens
  ( 234 )...( 245 ): >TRP6_HUMAN
IVHTLLRKGARI

SEQ ID NO: 10922 - protein, 12 aa, Homo sapiens
  ( 236 )...( 247 ): >TRP6_HUMAN
HTLLRKGARIER

SEQ ID NO: 10923 - protein, 12 aa, Homo sapiens
  ( 237 )...( 248 ): >TRP6_HUMAN
TLLRKGARIERP

SEQ ID NO: 10924 - protein, 12 aa, Homo sapiens
  ( 270 )...( 281 ): >TRP6_HUMAN
SRSRINAYKGLA

SEQ ID NO: 10925 - protein, 12 aa, Homo sapiens
  ( 271 )...( 282 ): >TRP6_HUMAN
RSRINAYKGLAS

SEQ ID NO: 10926 - protein, 12 aa, Homo sapiens
  ( 358 )...( 369 ): >TRP6_HUMAN
HGRPNLSRLKLA

SEQ ID NO: 10927 - protein, 12 aa, Homo sapiens
  ( 359 )...( 370 ): >TRP6_HUMAN
GRPNLSRLKLAI

SEQ ID NO: 10928 - protein, 12 aa, Homo sapiens
  ( 360 )...( 371 ): >TRP6_HUMAN
RPNLSRLKLAIK

SEQ ID NO: 10929 - protein, 12 aa, Homo sapiens
  ( 361 )...( 372 ): >TRP6_HUMAN
PNLSRLKLAIKY

SEQ ID NO: 10930 - protein, 12 aa, Homo sapiens
  ( 364 )...( 375 ): >TRP6_HUMAN
SRLKLAIKYEVK

SEQ ID NO: 10931 - protein, 12 aa, Homo sapiens
  ( 365 )...( 376 ): >TRP6_HUMAN
RLKLAIKYEVKK

SEQ ID NO: 10932 - protein, 12 aa, Homo sapiens
  ( 366 )...( 377 ): >TRP6_HUMAN
LKLAIKYEVKKF

SEQ ID NO: 10933 - protein, 12 aa, Homo sapiens
  ( 367 )...( 378 ): >TRP6_HUMAN
KLAIKYEVKKFV

SEQ ID NO: 10934 - protein, 12 aa, Homo sapiens
  ( 431 )...( 442 ): >TRP6_HUMAN
KMGKIMRGPFMK

SEQ ID NO: 10935 - protein, 12 aa, Homo sapiens
  ( 827 )...( 838 ): >TRP6_HUMAN
KQVGHNKQPSIR

SEQ ID NO: 10936 - protein, 12 aa, Homo sapiens
  ( 861 )...( 872 ): >TRP6_HUMAN
RLIKRYVLQAQI

SEQ ID NO: 10937 - protein, 12 aa, Homo sapiens
  ( 14 )...( 25 ): >TRP7_HUMAN
HTTLREKGRRQA

SEQ ID NO: 10938 - protein, 12 aa, Homo sapiens
  ( 15 )...( 26 ): >TRP7_HUMAN
TTLREKGRRQAI

SEQ ID NO: 10939 - protein, 12 aa, Homo sapiens
  ( 19 )...( 30 ): >TRP7_HUMAN
EKGRRQAIRGPA

SEQ ID NO: 10940 - protein, 12 aa, Homo sapiens
  ( 20 )...( 31 ): >TRP7_HUMAN
KGRRQAIRGPAY

SEQ ID NO: 10941 - protein, 12 aa, Homo sapiens
  ( 21 )...( 32 ): >TRP7_HUMAN
GRRQAIRGPAYM

SEQ ID NO: 10942 - protein, 12 aa, Homo sapiens
  ( 304 )...( 315 ): >TRP7_HUMAN
HRPSLSRIKLAI

SEQ ID NO: 10943 - protein, 12 aa, Homo sapiens
  ( 305 )...( 316 ): >TRP7_HUMAN
RPSLSRIKLAIK

SEQ ID NO: 10944 - protein, 12 aa, Homo sapiens
  ( 306 )...( 317 ): >TRP7_HUMAN
PSLSRIKLAIKY

SEQ ID NO: 10945 - protein, 12 aa, Homo sapiens
  ( 309 )...( 320 ): >TRP7_HUMAN
SRIKLAIKYEVK

SEQ ID NO: 10946 - protein, 12 aa, Homo sapiens
  ( 310 )...( 321 ): >TRP7_HUMAN
RIKLAIKYEVKK

SEQ ID NO: 10947 - protein, 12 aa, Homo sapiens
  ( 311 )...( 322 ): >TRP7_HUMAN
IKLAIKYEVKKF

SEQ ID NO: 10948 - protein, 12 aa, Homo sapiens
  ( 312 )...( 323 ): >TRP7_HUMAN
KLAIKYEVKKFV

SEQ ID NO: 10949 - protein, 12 aa, Homo sapiens
  ( 371 )...( 382 ): >TRP7_HUMAN
IAPCSKLGRTLR

SEQ ID NO: 10950 - protein, 12 aa, Homo sapiens
  ( 375 )...( 386 ): >TRP7_HUMAN
SKLGRTLRSPFM

SEQ ID NO: 10951 - protein, 12 aa, Homo sapiens
  ( 376 )...( 387 ): >TRP7_HUMAN
KLGRTLRSPFMK

SEQ ID NO: 10952 - protein, 12 aa, Homo sapiens
  ( 377 )...( 388 ): >TRP7_HUMAN
LGRTLRSPFMKF

SEQ ID NO: 10953 - protein, 12 aa, Homo sapiens
  ( 378 )...( 389 ): >TRP7_HUMAN
GRTLRSPFMKFV

SEQ ID NO: 10954 - protein, 12 aa, Homo sapiens
  ( 426 )...( 437 ): >TRP7_HUMAN
KQIFRVKTTQFS

SEQ ID NO: 10955 - protein, 12 aa, Homo sapiens
  ( 723 )...( 734 ): >TRP7_HUMAN
MRIKMCLIKLCK

SEQ ID NO: 10956 - protein, 12 aa, Homo sapiens
  ( 724 )...( 735 ): >TRP7_HUMAN
RIKMCLIKLCKS

SEQ ID NO: 10957 - protein, 12 aa, Homo sapiens
  ( 725 )...( 736 ): >TRP7_HUMAN
IKMCLIKLCKSK

SEQ ID NO: 10958 - protein, 12 aa, Homo sapiens
  ( 746 )...( 757 ): >TRP7_HUMAN
MGMLNSKFKKTR

SEQ ID NO: 10959 - protein, 12 aa, Homo sapiens
  ( 773 )...( 784 ): >TRP7_HUMAN
TLSKPTRYQKIM

SEQ ID NO: 10960 - protein, 12 aa, Homo sapiens
  ( 786 )...( 797 ): >TRP7_HUMAN
RLIKRYVLKAQV

SEQ ID NO: 10961 - protein, 12 aa, Homo sapiens
  ( 252 )...( 263 ): >TSHR_HUMAN
LIARNTWTLKKL

SEQ ID NO: 10962 - protein, 12 aa, Homo sapiens
  ( 253 )...( 264 ): >TSHR_HUMAN
IARNTWTLKKLP

SEQ ID NO: 10963 - protein, 12 aa, Homo sapiens
  ( 254 )...( 265 ): >TSHR_HUMAN
ARNTWTLKKLPL

SEQ ID NO: 10964 - protein, 12 aa, Homo sapiens
  ( 284 )...( 295 ): >TSHR_HUMAN
CAFKNQKKIRGI

SEQ ID NO: 10965 - protein, 12 aa, Homo sapiens
  ( 285 )...( 296 ): >TSHR_HUMAN
AFKNQKKIRGIL

SEQ ID NO: 10966 - protein, 12 aa, Homo sapiens
  ( 287 )...( 298 ): >TSHR_HUMAN
KNQKKIRGILES

SEQ ID NO: 10967 - protein, 12 aa, Homo sapiens
  ( 304 )...( 315 ): >TSHR_HUMAN
SSMQSLRQRKSV

SEQ ID NO: 10968 - protein, 12 aa, Homo sapiens
  ( 306 )...( 317 ): >TSHR_HUMAN
MQSLRQRKSVNA

SEQ ID NO: 10969 - protein, 12 aa, Homo sapiens
  ( 307 )...( 318 ): >TSHR_HUMAN
QSLRQRKSVNAL

SEQ ID NO: 10970 - protein, 12 aa, Homo sapiens
  ( 308 )...( 319 ): >TSHR_HUMAN
SLRQRKSVNALN

SEQ ID NO: 10971 - protein, 12 aa, Homo sapiens
  ( 309 )...( 320 ): >TSHR_HUMAN
LRQRKSVNALNS

SEQ ID NO: 10972 - protein, 12 aa, Homo sapiens
  ( 531 )...( 542 ): >TSHR_HUMAN
RKIRLRHACAIM

SEQ ID NO: 10973 - protein, 12 aa, Homo sapiens
  ( 532 )...( 543 ): >TSHR_HUMAN
KIRLRHACAIMV

SEQ ID NO: 10974 - protein, 12 aa, Homo sapiens
  ( 618 )...( 629 ): >TSHR_HUMAN
KDTKIAKRMAVL

SEQ ID NO: 10975 - protein, 12 aa, Homo sapiens
  ( 620 )...( 631 ): >TSHR_HUMAN
TKIAKRMAVLIF

SEQ ID NO: 10976 - protein, 12 aa, Homo sapiens
  ( 621 )...( 632 ): >TSHR_HUMAN
KIAKRMAVLIFT

SEQ ID NO: 10977 - protein, 12 aa, Homo sapiens
  ( 690 )...( 701 ): >TSHR_HUMAN
FILLSKFGICKR

SEQ ID NO: 10978 - protein, 12 aa, Homo sapiens
  ( 691 )...( 702 ): >TSHR_HUMAN
ILLSKFGICKRQ

SEQ ID NO: 10979 - protein, 12 aa, Homo sapiens
  ( 692 )...( 703 ): >TSHR_HUMAN
LLSKFGICKRQA

SEQ ID NO: 10980 - protein, 12 aa, Homo sapiens
  ( 693 )...( 704 ): >TSHR_HUMAN
LSKFGICKRQAQ

SEQ ID NO: 10981 - protein, 12 aa, Homo sapiens
  ( 696 )...( 707 ): >TSHR_HUMAN
FGICKRQAQAYR

SEQ ID NO: 10982 - protein, 12 aa, Homo sapiens
  ( 697 )...( 708 ): >TSHR_HUMAN
GICKRQAQAYRG

SEQ ID NO: 10983 - protein, 12 aa, Homo sapiens
  ( 698 )...( 709 ): >TSHR_HUMAN
ICKRQAQAYRGQ

SEQ ID NO: 10984 - protein, 12 aa, Homo sapiens
  ( 703 )...( 714 ): >TSHR_HUMAN
AQAYRGQRVPPK

SEQ ID NO: 10985 - protein, 12 aa, Homo sapiens
  ( 207 )...( 218 ): >UL33_HCMVA
STVQRTSQKQRS

SEQ ID NO: 10986 - protein, 12 aa, Homo sapiens
  ( 211 )...( 222 ): >UL33_HCMVA
RTSQKQRSRTLT

SEQ ID NO: 10987 - protein, 12 aa, Homo sapiens
  ( 212 )...( 223 ): >UL33_HCMVA
TSQKQRSRTLTF

SEQ ID NO: 10988 - protein, 12 aa, Homo sapiens
  ( 213 )...( 224 ): >UL33_HCMVA
SQKQRSRTLTFV

SEQ ID NO: 10989 - protein, 12 aa, Homo sapiens
  ( 214 )...( 225 ): >UL33_HCMVA
QKQRSRTLTFVS

SEQ ID NO: 10990 - protein, 12 aa, Homo sapiens
  ( 215 )...( 226 ): >UL33_HCMVA
KQRSRTLTFVSV

SEQ ID NO: 10991 - protein, 12 aa, Homo sapiens
  ( 259 )...( 270 ): >UL33_HCMVA
LTLRRTIGTLAR

SEQ ID NO: 10992 - protein, 12 aa, Homo sapiens
  ( 260 )...( 271 ): >UL33_HCMVA
TLRRTIGTLARV

SEQ ID NO: 10993 - protein, 12 aa, Homo sapiens
  ( 261 )...( 272 ): >UL33_HCMVA
LRRTIGTLARVV

SEQ ID NO: 10994 - protein, 12 aa, Homo sapiens
  ( 262 )...( 273 ): >UL33_HCMVA
RRTIGTLARVVP

SEQ ID NO: 10995 - protein, 12 aa, Homo sapiens
  ( 121 )...( 132 ): >UL33_HSV6U
IIATIRYKTLHR

SEQ ID NO: 10996 - protein, 12 aa, Homo sapiens
  ( 164 )...( 175 ): >UL33_HSV6U
FVKTNGMKKTGK

SEQ ID NO: 10997 - protein, 12 aa, Homo sapiens
  ( 165 )...( 176 ): >UL33_HSV6U
VKTNGMKKTGKC

SEQ ID NO: 10998 - protein, 12 aa, Homo sapiens
  ( 166 )...( 177 ): >UL33_HSV6U
KTNGMKKTGKCV

SEQ ID NO: 10999 - protein, 12 aa, Homo sapiens
  ( 313 )...( 324 ): >UL33_HSV6U
FPKTLCSTQKRK

SEQ ID NO: 11000 - protein, 12 aa, Homo sapiens
  ( 34 )...( 45 ): >UL33_HSV7J
TCITPTVRKAQR

SEQ ID NO: 11001 - protein, 12 aa, Homo sapiens
  ( 35 )...( 46 ): >UL33_HSV7J
CITPTVRKAQRL

SEQ ID NO: 11002 - protein, 12 aa, Homo sapiens
  ( 137 )...( 148 ): >UL33_HSV7J
VISTIRYRTLQR

SEQ ID NO: 11003 - protein, 12 aa, Homo sapiens
  ( 181 )...( 192 ): >UL33_HSV7J
VQVEKKKGNYGK

SEQ ID NO: 11004 - protein, 12 aa, Homo sapiens
  ( 182 )...( 193 ): >UL33_HSV7J
QVEKKKGNYGKC

SEQ ID NO: 11005 - protein, 12 aa, Homo sapiens
  ( 232 )...( 243 ): >UL33_HSV7J
FGKTLRALTQSK

SEQ ID NO: 11006 - protein, 12 aa, Homo sapiens
  ( 158 )...( 169 ): >UR2R_HUMAN
TVQRPKGYRKLL

SEQ ID NO: 11007 - protein, 12 aa, Homo sapiens
  ( 159 )...( 170 ): >UR2R_HUMAN
VQRPKGYRKLLA

SEQ ID NO: 11008 - protein, 12 aa, Homo sapiens
  ( 160 )...( 171 ): >UR2R_HUMAN
QRPKGYRKLLAL

SEQ ID NO: 11009 - protein, 12 aa, Homo sapiens
  ( 161 )...( 172 ): >UR2R_HUMAN
RPKGYRKLLALG

SEQ ID NO: 11010 - protein, 12 aa, Homo sapiens
  ( 162 )...( 173 ): >UR2R_HUMAN
PKGYRKLLALGT

SEQ ID NO: 11011 - protein, 12 aa, Homo sapiens
  ( 163 )...( 174 ): >UR2R_HUMAN
KGYRKLLALGTW

SEQ ID NO: 11012 - protein, 12 aa, Homo sapiens
  ( 183 )...( 194 ): >UR2R_HUMAN
PVMLAMRLVRRG

SEQ ID NO: 11013 - protein, 12 aa, Homo sapiens
  ( 184 )...( 195 ): >UR2R_HUMAN
VMLAMRLVRRGP

SEQ ID NO: 11014 - protein, 12 aa, Homo sapiens
  ( 185 )...( 196 ): >UR2R_HUMAN
MLAMRLVRRGPK

SEQ ID NO: 11015 - protein, 12 aa, Homo sapiens
  ( 186 )...( 197 ): >UR2R_HUMAN
LAMRLVRRGPKS

SEQ ID NO: 11016 - protein, 12 aa, Homo sapiens
  ( 187 )...( 198 ): >UR2R_HUMAN
AMRLVRRGPKSL

SEQ ID NO: 11017 - protein, 12 aa, Homo sapiens
  ( 188 )...( 199 ): >UR2R_HUMAN
MRLVRRGPKSLC

SEQ ID NO: 11018 - protein, 12 aa, Homo sapiens
  ( 189 )...( 200 ): >UR2R_HUMAN
RLVRRGPKSLCL

SEQ ID NO: 11019 - protein, 12 aa, Homo sapiens
  ( 228 )...( 239 ): >UR2R_HUMAN
GLLYARLARAYR

SEQ ID NO: 11020 - protein, 12 aa, Homo sapiens
  ( 251 )...( 262 ): >UR2R_HUMAN
RPGARALRLVLG

SEQ ID NO: 11021 - protein, 12 aa, Homo sapiens
  ( 323 )...( 334 ): >UR2R_HUMAN
RDHLRGRVRGPG

SEQ ID NO: 11022 - protein, 12 aa, Homo sapiens
  ( 325 )...( 336 ): >UR2R_HUMAN
HLRGRVRGPGSG

SEQ ID NO: 11023 - protein, 12 aa, Homo sapiens
  ( 339 )...( 350 ): >UR2R_HUMAN
RGPVPSLQPRAR

SEQ ID NO: 11024 - protein, 12 aa, Homo sapiens
  ( 141 )...( 152 ): >US27_HCMVA
VRNNKRATCWVV

SEQ ID NO: 11025 - protein, 12 aa, Homo sapiens
  ( 142 )...( 153 ): >US27_HCMVA
RNNKRATCWVVI

SEQ ID NO: 11026 - protein, 12 aa, Homo sapiens
  ( 214 )...( 225 ): >US27_HCMVA
RMVRFIINYVGK

SEQ ID NO: 11027 - protein, 12 aa, Homo sapiens
  ( 57 )...( 68 ): >US28_HCMVA
TITWRRRIQCSG

SEQ ID NO: 11028 - protein, 12 aa, Homo sapiens
  ( 210 )...( 221 ): >US28_HCMVA
RISRIVAVSQSR

SEQ ID NO: 11029 - protein, 12 aa, Homo sapiens
  ( 212 )...( 223 ): >US28_HCMVA
SRIVAVSQSRHK

SEQ ID NO: 11030 - protein, 12 aa, Homo sapiens
  ( 213 )...( 224 ): >US28_HCMVA
RIVAVSQSRHKG

SEQ ID NO: 11031 - protein, 12 aa, Homo sapiens
  ( 214 )...( 225 ): >US28_HCMVA
IVAVSQSRHKGR

SEQ ID NO: 11032 - protein, 12 aa, Homo sapiens
  ( 215 )...( 226 ): >US28_HCMVA
VAVSQSRHKGRI

SEQ ID NO: 11033 - protein, 12 aa, Homo sapiens
  ( 216 )...( 227 ): >US28_HCMVA
AVSQSRHKGRIV

SEQ ID NO: 11034 - protein, 12 aa, Homo sapiens
  ( 217 )...( 228 ): >US28_HCMVA
VSQSRHKGRIVR

SEQ ID NO: 11035 - protein, 12 aa, Homo sapiens
  ( 218 )...( 229 ): >US28_HCMVA
SQSRHKGRIVRV

SEQ ID NO: 11036 - protein, 12 aa, Homo sapiens
  ( 219 )...( 230 ): >US28_HCMVA
QSRHKGRIVRVL

SEQ ID NO: 11037 - protein, 12 aa, Homo sapiens
  ( 220 )...( 231 ): >US28_HCMVA
SRHKGRIVRVLI

SEQ ID NO: 11038 - protein, 12 aa, Homo sapiens
  ( 221 )...( 232 ): >US28_HCMVA
RHKGRIVRVLIA

SEQ ID NO: 11039 - protein, 12 aa, Homo sapiens
  ( 222 )...( 233 ): >US28_HCMVA
HKGRIVRVLIAV

SEQ ID NO: 11040 - protein, 12 aa, Homo sapiens
  ( 71 )...( 82 ): >V1AR_HUMAN
SVLLALHRTPRK

SEQ ID NO: 11041 - protein, 12 aa, Homo sapiens
  ( 72 )...( 83 ): >V1AR_HUMAN
VLLALHRTPRKT

SEQ ID NO: 11042 - protein, 12 aa, Homo sapiens
  ( 73 )...( 84 ): >V1AR_HUMAN
LLALHRTPRKTS

SEQ ID NO: 11043 - protein, 12 aa, Homo sapiens
  ( 156 )...( 167 ): >V1AR_HUMAN
PLKTLQQPARRS

SEQ ID NO: 11044 - protein, 12 aa, Homo sapiens
  ( 161 )...( 172 ): >V1AR_HUMAN
QQPARRSRLMIA

SEQ ID NO: 11045 - protein, 12 aa, Homo sapiens
  ( 162 )...( 173 ): >V1AR_HUMAN
QPARRSRLMIAA

SEQ ID NO: 11046 - protein, 12 aa, Homo sapiens
  ( 163 )...( 174 ): >V1AR_HUMAN
PARRSRLMIAAA

SEQ ID NO: 11047 - protein, 12 aa, Homo sapiens
  ( 164 )...( 175 ): >V1AR_HUMAN
ARRSRLMIAAAW

SEQ ID NO: 11048 - protein, 12 aa, Homo sapiens
  ( 165 )...( 176 ): >V1AR_HUMAN
RRSRLMIAAAWV

SEQ ID NO: 11049 - protein, 12 aa, Homo sapiens
  ( 246 )...( 257 ): >V1AR_HUMAN
NVRGKTASRQSK

SEQ ID NO: 11050 - protein, 12 aa, Homo sapiens
  ( 247 )...( 258 ): >V1AR_HUMAN
VRGKTASRQSKG

SEQ ID NO: 11051 - protein, 12 aa, Homo sapiens
  ( 277 )...( 288 ): >V1AR_HUMAN
SSVKSISRAKIR

SEQ ID NO: 11052 - protein, 12 aa, Homo sapiens
  ( 278 )...( 289 ): >V1AR_HUMAN
SVKSISRAKIRT

SEQ ID NO: 11053 - protein, 12 aa, Homo sapiens
  ( 279 )...( 290 ): >V1AR_HUMAN
VKSISRAKIRTV

SEQ ID NO: 11054 - protein, 12 aa, Homo sapiens
  ( 280 )...( 291 ): >V1AR_HUMAN
KSISRAKIRTVK

SEQ ID NO: 11055 - protein, 12 aa, Homo sapiens
  ( 281 )...( 292 ): >V1AR_HUMAN
SISRAKIRTVKM

SEQ ID NO: 11056 - protein, 12 aa, Homo sapiens
  ( 282 )...( 293 ): >V1AR_HUMAN
ISRAKIRTVKMT

SEQ ID NO: 11057 - protein, 12 aa, Homo sapiens
  ( 283 )...( 294 ): >V1AR_HUMAN
SRAKIRTVKMTF

SEQ ID NO: 11058 - protein, 12 aa, Homo sapiens
  ( 284 )...( 295 ): >V1AR_HUMAN
RAKIRTVKMTFV

SEQ ID NO: 11059 - protein, 12 aa, Homo sapiens
  ( 285 )...( 296 ): >V1AR_HUMAN
AKIRTVKMTFVI

SEQ ID NO: 11060 - protein, 12 aa, Homo sapiens
  ( 55 )...( 66 ): >V1BR_HUMAN
VLLTLGQLGRKR

SEQ ID NO: 11061 - protein, 12 aa, Homo sapiens
  ( 56 )...( 67 ): >V1BR_HUMAN
LLTLGQLGRKRS

SEQ ID NO: 11062 - protein, 12 aa, Homo sapiens
  ( 57 )...( 68 ): >V1BR_HUMAN
LTLGQLGRKRSR

SEQ ID NO: 11063 - protein, 12 aa, Homo sapiens
  ( 58 )...( 69 ): >V1BR_HUMAN
TLGQLGRKRSRM

SEQ ID NO: 11064 - protein, 12 aa, Homo sapiens
  ( 59 )...( 70 ): >V1BR_HUMAN
LGQLGRKRSRMH

SEQ ID NO: 11065 - protein, 12 aa, Homo sapiens
  ( 60 )...( 71 ): >V1BR_HUMAN
GQLGRKRSRMHL

SEQ ID NO: 11066 - protein, 12 aa, Homo sapiens
  ( 226 )...( 237 ): >V1BR_HUMAN
ICKNLKVKTQAW

SEQ ID NO: 11067 - protein, 12 aa, Homo sapiens
  ( 229 )...( 240 ): >V1BR_HUMAN
NLKVKTQAWRVG

SEQ ID NO: 11068 - protein, 12 aa, Homo sapiens
  ( 230 )...( 241 ): >V1BR_HUMAN
LKVKTQAWRVGG

SEQ ID NO: 11069 - protein, 12 aa, Homo sapiens
  ( 265 )...( 276 ): >V1BR_HUMAN
RVSSINTISRAK

SEQ ID NO: 11070 - protein, 12 aa, Homo sapiens
  ( 267 )...( 278 ): >V1BR_HUMAN
SSINTISRAKIR

SEQ ID NO: 11071 - protein, 12 aa, Homo sapiens
  ( 268 )...( 279 ): >V1BR_HUMAN
SINTISRAKIRT

SEQ ID NO: 11072 - protein, 12 aa, Homo sapiens
  ( 269 )...( 280 ): >V1BR_HUMAN
INTISRAKIRTV

SEQ ID NO: 11073 - protein, 12 aa, Homo sapiens
  ( 270 )...( 281 ): >V1BR_HUMAN
NTISRAKIRTVK

SEQ ID NO: 11074 - protein, 12 aa, Homo sapiens
  ( 271 )...( 282 ): >V1BR_HUMAN
TISRAKIRTVKM

SEQ ID NO: 11075 - protein, 12 aa, Homo sapiens
  ( 272 )...( 283 ): >V1BR_HUMAN
ISRAKIRTVKMT

SEQ ID NO: 11076 - protein, 12 aa, Homo sapiens
  ( 273 )...( 284 ): >V1BR_HUMAN
SRAKIRTVKMTF

SEQ ID NO: 11077 - protein, 12 aa, Homo sapiens
  ( 274 )...( 285 ): >V1BR_HUMAN
RAKIRTVKMTFV

SEQ ID NO: 11078 - protein, 12 aa, Homo sapiens
  ( 275 )...( 286 ): >V1BR_HUMAN
AKIRTVKMTFVI

SEQ ID NO: 11079 - protein, 12 aa, Homo sapiens
  ( 364 )...( 375 ): >V1BR_HUMAN
RRRLSDGSLSSR

SEQ ID NO: 11080 - protein, 12 aa, Homo sapiens
  ( 59 )...( 70 ): >V2R_HUMAN
LAALARRGRRGH

SEQ ID NO: 11081 - protein, 12 aa, Homo sapiens
  ( 231 )...( 242 ): >VG74_KSHV
YALTWCVVRRTK

SEQ ID NO: 11082 - protein, 12 aa, Homo sapiens
  ( 232 )...( 243 ): >VG74_KSHV
ALTWCVVRRTKL

SEQ ID NO: 11083 - protein, 12 aa, Homo sapiens
  ( 233 )...( 244 ): >VG74_KSHV
LTWCVVRRTKLQ

SEQ ID NO: 11084 - protein, 12 aa, Homo sapiens
  ( 234 )...( 245 ): >VG74_KSHV
TWCVVRRTKLQA

SEQ ID NO: 11085 - protein, 12 aa, Homo sapiens
  ( 243 )...( 254 ): >VG74_KSHV
LQARRKVRGVIV

SEQ ID NO: 11086 - protein, 12 aa, Homo sapiens
  ( 244 )...( 255 ): >VG74_KSHV
QARRKVRGVIVA

SEQ ID NO: 11087 - protein, 12 aa, Homo sapiens
  ( 245 )...( 256 ): >VG74_KSHV
ARRKVRGVIVAV

SEQ ID NO: 11088 - protein, 12 aa, Homo sapiens
  ( 246 )...( 257 ): >VG74_KSHV
RRKVRGVIVAVV

SEQ ID NO: 11089 - protein, 12 aa, Homo sapiens
  ( 163 )...( 174 ): >VIPR_HUMAN
ILSLFRKLHCTR

SEQ ID NO: 11090 - protein, 12 aa, Homo sapiens
  ( 435 )...( 446 ): >VIPR_HUMAN
SMLTRVSPGARR

SEQ ID NO: 11091 - protein, 12 aa, Homo sapiens
  ( 436 )...( 447 ): >VIPR_HUMAN
MLTRVSPGARRS

SEQ ID NO: 11092 - protein, 12 aa, Homo sapiens
  ( 437 )...( 448 ): >VIPR_HUMAN
LTRVSPGARRSS

SEQ ID NO: 11093 - protein, 12 aa, Homo sapiens
  ( 147 )...( 158 ): >VIPS_HUMAN
ILCLFRKLHCTR

SEQ ID NO: 11094 - protein, 12 aa, Homo sapiens
  ( 320 )...( 331 ): >VIPS_HUMAN
QSQYKRLAKSTL

SEQ ID NO: 11095 - protein, 12 aa, Homo sapiens
  ( 321 )...( 332 ): >VIPS_HUMAN
SQYKRLAKSTLL

SEQ ID NO: 11096 - protein, 12 aa, Homo sapiens
  ( 322 )...( 333 ): >VIPS_HUMAN
QYKRLAKSTLLL

SEQ ID NO: 11097 - protein, 12 aa, Homo sapiens
  ( 323 )...( 334 ): >VIPS_HUMAN
YKRLAKSTLLLI

SEQ ID NO: 11098 - protein, 12 aa, Homo sapiens
  ( 324 )...( 335 ): >VIPS_HUMAN
KRLAKSTLLLIP

SEQ ID NO: 11099 - protein, 12 aa, Homo sapiens
  ( 34 )...( 45 ): >VU51_HSV6U
LTVRFNSFKVGR

SEQ ID NO: 11100 - protein, 12 aa, Homo sapiens
  ( 34 )...( 45 ): >VU51_HSV6Z
LTVRFNGFKVGR

SEQ ID NO: 11101 - protein, 12 aa, Homo sapiens
  ( 279 )...( 290 ): >VU51_HSV7J
MPSLRKLQQPTK

SEQ ID NO: 11102 - protein, 12 aa, Homo sapiens
  ( 280 )...( 291 ): >VU51_HSV7J
PSLRKLQQPTKS

SEQ ID NO: 11103 - protein, 12 aa, Homo sapiens
  ( 282 )...( 293 ): >VU51_HSV7J
LRKLQQPTKSTQ

SEQ ID NO: 11104 - protein, 12 aa, Homo sapiens
  ( 132 )...( 143 ): >Q13675
LRYPTIVTQRRG

SEQ ID NO: 11105 - protein, 12 aa, Homo sapiens
  ( 133 )...( 144 ): >Q13675
RYPTIVTQRRGL

SEQ ID NO: 11106 - protein, 12 aa, Homo sapiens
  ( 202 )...( 213 ): >Q13675
VMYCRVYVVAKR

SEQ ID NO: 11107 - protein, 12 aa, Homo sapiens
  ( 205 )...( 216 ): >Q13675
CRVYVVAKRESR

SEQ ID NO: 11108 - protein, 12 aa, Homo sapiens
  ( 206 )...( 217 ): >Q13675
RVYVVAKRESRG

SEQ ID NO: 11109 - protein, 12 aa, Homo sapiens
  ( 208 )...( 219 ): >Q13675
YVVAKRESRGLK

SEQ ID NO: 11110 - protein, 12 aa, Homo sapiens
  ( 209 )...( 220 ): >Q13675
VVAKRESRGLKS

SEQ ID NO: 11111 - protein, 12 aa, Homo sapiens
  ( 210 )...( 221 ): >Q13675
VAKRESRGLKSG

SEQ ID NO: 11112 - protein, 12 aa, Homo sapiens
  ( 211 )...( 222 ): >Q13675
AKRESRGLKSGL

SEQ ID NO: 11113 - protein, 12 aa, Homo sapiens
  ( 212 )...( 223 ): >Q13675
KRESRGLKSGLK

SEQ ID NO: 11114 - protein, 12 aa, Homo sapiens
  ( 213 )...( 224 ): >Q13675
RESRGLKSGLKT

SEQ ID NO: 11115 - protein, 12 aa, Homo sapiens
  ( 232 )...( 243 ): >Q13675
VTLRIHRKNAPA

SEQ ID NO: 11116 - protein, 12 aa, Homo sapiens
  ( 233 )...( 244 ): >Q13675
TLRIHRKNAPAG

SEQ ID NO: 11117 - protein, 12 aa, Homo sapiens
  ( 234 )...( 245 ): >Q13675
LRIHRKNAPAGG

SEQ ID NO: 11118 - protein, 12 aa, Homo sapiens
  ( 252 )...( 263 ): >Q13675
KTKTHFSVRLLK

SEQ ID NO: 11119 - protein, 12 aa, Homo sapiens
  ( 261 )...( 272 ): >Q13675
LLKFSREKKAAK

SEQ ID NO: 11120 - protein, 12 aa, Homo sapiens
  ( 262 )...( 273 ): >Q13675
LKFSREKKAAKT

SEQ ID NO: 11121 - protein, 12 aa, Homo sapiens
  ( 263 )...( 274 ): >Q13675
KFSREKKAAKTL

SEQ ID NO: 11122 - protein, 12 aa, Homo sapiens
  ( 264 )...( 275 ): >Q13675
FSREKKAAKTLG

SEQ ID NO: 11123 - protein, 12 aa, Homo sapiens
  ( 265 )...( 276 ): >Q13675
SREKKAAKTLGI

SEQ ID NO: 11124 - protein, 12 aa, Homo sapiens
  ( 266 )...( 277 ): >Q13675
REKKAAKTLGIV

SEQ ID NO: 11125 - protein, 12 aa, Homo sapiens
  ( 334 )...( 345 ): >Q13675
KKAFQNVLRIQC

SEQ ID NO: 11126 - protein, 12 aa, Homo sapiens
  ( 340 )...( 351 ): >Q13675
VLRIQCLRRKQS

SEQ ID NO: 11127 - protein, 12 aa, Homo sapiens
  ( 346 )...( 357 ): >Q13675
LRRKQSSKHALG

SEQ ID NO: 11128 - protein, 12 aa, Homo sapiens
  ( 403 )...( 414 ): >Q13675
MPRGSARITVSK

SEQ ID NO: 11129 - protein, 12 aa, Homo sapiens
  ( 420 )...( 431 ): >Q13675
TTARTKSRSVTR

SEQ ID NO: 11130 - protein, 12 aa, Homo sapiens
  ( 421 )...( 432 ): >Q13675
TARTKSRSVTRL

SEQ ID NO: 11131 - protein, 12 aa, Homo sapiens
  ( 422 )...( 433 ): >Q13675
ARTKSRSVTRLE

SEQ ID NO: 11132 - protein, 12 aa, Homo sapiens
  ( 423 )...( 434 ): >Q13675
RTKSRSVTRLEC

SEQ ID NO: 11133 - protein, 12 aa, Homo sapiens
  ( 134 )...( 145 ): >O95800
KTVAVIALHRLR

SEQ ID NO: 11134 - protein, 12 aa, Homo sapiens
  ( 139 )...( 150 ): >O95800
IALHRLRMVLGK

SEQ ID NO: 11135 - protein, 12 aa, Homo sapiens
  ( 140 )...( 151 ): >O95800
ALHRLRMVLGKQ

SEQ ID NO: 11136 - protein, 12 aa, Homo sapiens
  ( 141 )...( 152 ): >O95800
LHRLRMVLGKQP

SEQ ID NO: 11137 - protein, 12 aa, Homo sapiens
  ( 144 )...( 155 ): >O95800
LRMVLGKQPNRT

SEQ ID NO: 11138 - protein, 12 aa, Homo sapiens
  ( 145 )...( 156 ): >O95800
RMVLGKQPNRTA

SEQ ID NO: 11139 - protein, 12 aa, Homo sapiens
  ( 225 )...( 236 ): >O95800
IAQTLRKNAQVR

SEQ ID NO: 11140 - protein, 12 aa, Homo sapiens
  ( 226 )...( 237 ): >O95800
AQTLRKNAQVRK

SEQ ID NO: 11141 - protein, 12 aa, Homo sapiens
  ( 227 )...( 238 ): >O95800
QTLRKNAQVRKC

SEQ ID NO: 11142 - protein, 12 aa, Homo sapiens
  ( 228 )...( 239 ): >O95800
TLRKNAQVRKCP

SEQ ID NO: 11143 - protein, 12 aa, Homo sapiens
  ( 376 )...( 387 ): >O95800
YSRNSAGLRRKV

SEQ ID NO: 11144 - protein, 12 aa, Homo sapiens
  ( 377 )...( 388 ): >O95800
SRNSAGLRRKVL

SEQ ID NO: 11145 - protein, 12 aa, Homo sapiens
  ( 380 )...( 391 ): >O95800
SAGLRRKVLWCL

SEQ ID NO: 11146 - protein, 12 aa, Homo sapiens
  ( 381 )...( 392 ): >O95800
AGLRRKVLWCLQ

SEQ ID NO: 11147 - protein, 12 aa, Homo sapiens
  ( 400 )...( 411 ): >O95800
CCKQKTRLRAMG

SEQ ID NO: 11148 - protein, 12 aa, Homo sapiens
  ( 401 )...( 412 ): >O95800
CKQKTRLRAMGK

SEQ ID NO: 11149 - protein, 12 aa, Homo sapiens
  ( 402 )...( 413 ): >O95800
KQKTRLRAMGKG

SEQ ID NO: 11150 - protein, 12 aa, Homo sapiens
  ( 403 )...( 414 ): >O95800
QKTRLRAMGKGN

SEQ ID NO: 11151 - protein, 12 aa, Homo sapiens
  ( 404 )...( 415 ): >O95800
KTRLRAMGKGNL

SEQ ID NO: 11152 - protein, 12 aa, Homo sapiens
  ( 81 )...( 92 ): >Q9UD67
LRYPTIVTQRRG

SEQ ID NO: 11153 - protein, 12 aa, Homo sapiens
  ( 82 )...( 93 ): >Q9UD67
RYPTIVTQRRGL

SEQ ID NO: 11154 - protein, 12 aa, Homo sapiens
  ( 151 )...( 162 ): >Q9UD67
VMYCRVYVVAKR

SEQ ID NO: 11155 - protein, 12 aa, Homo sapiens
  ( 154 )...( 165 ): >Q9UD67
CRVYVVAKRESR

SEQ ID NO: 11156 - protein, 12 aa, Homo sapiens
  ( 155 )...( 166 ): >Q9UD67
RVYVVAKRESRG

SEQ ID NO: 11157 - protein, 12 aa, Homo sapiens
  ( 157 )...( 168 ): >Q9UD67
YVVAKRESRGLK

SEQ ID NO: 11158 - protein, 12 aa, Homo sapiens
  ( 158 )...( 169 ): >Q9UD67
VVAKRESRGLKS

SEQ ID NO: 11159 - protein, 12 aa, Homo sapiens
  ( 159 )...( 170 ): >Q9UD67
VAKRESRGLKSG

SEQ ID NO: 11160 - protein, 12 aa, Homo sapiens
  ( 160 )...( 171 ): >Q9UD67
AKRESRGLKSGL

SEQ ID NO: 11161 - protein, 12 aa, Homo sapiens
  ( 161 )...( 172 ): >Q9UD67
KRESRGLKSGLK

SEQ ID NO: 11162 - protein, 12 aa, Homo sapiens
  ( 162 )...( 173 ): >Q9UD67
RESRGLKSGLKT

SEQ ID NO: 11163 - protein, 12 aa, Homo sapiens
  ( 181 )...( 192 ): >Q9UD67
VTLRIHRKNAPA

SEQ ID NO: 11164 - protein, 12 aa, Homo sapiens
  ( 182 )...( 193 ): >Q9UD67
TLRIHRKNAPAG

SEQ ID NO: 11165 - protein, 12 aa, Homo sapiens
  ( 183 )...( 194 ): >Q9UD67
LRIHRKNAPAGG

SEQ ID NO: 11166 - protein, 12 aa, Homo sapiens
  ( 201 )...( 212 ): >Q9UD67
KTKTHFSVRLLK

SEQ ID NO: 11167 - protein, 12 aa, Homo sapiens
  ( 210 )...( 221 ): >Q9UD67
LLKFSREKKAAK

SEQ ID NO: 11168 - protein, 12 aa, Homo sapiens
  ( 211 )...( 222 ): >Q9UD67
LKFSREKKAAKT

SEQ ID NO: 11169 - protein, 12 aa, Homo sapiens
  ( 212 )...( 223 ): >Q9UD67
KFSREKKAAKTL

SEQ ID NO: 11170 - protein, 12 aa, Homo sapiens
  ( 213 )...( 224 ): >Q9UD67
FSREKKAAKTLG

SEQ ID NO: 11171 - protein, 12 aa, Homo sapiens
  ( 214 )...( 225 ): >Q9UD67
SREKKAAKTLGI

SEQ ID NO: 11172 - protein, 12 aa, Homo sapiens
  ( 215 )...( 226 ): >Q9UD67
REKKAAKTLGIV

SEQ ID NO: 11173 - protein, 12 aa, Homo sapiens
  ( 283 )...( 294 ): >Q9UD67
KKAFQNVLRIQC

SEQ ID NO: 11174 - protein, 12 aa, Homo sapiens
  ( 289 )...( 300 ): >Q9UD67
VLRIQCLRRKQS

SEQ ID NO: 11175 - protein, 12 aa, Homo sapiens
  ( 295 )...( 306 ): >Q9UD67
LRRKQSSKHALG

SEQ ID NO: 11176 - protein, 12 aa, Homo sapiens
  ( 132 )...( 143 ): >Q9UD63
LRYPTIVTQRRG

SEQ ID NO: 11177 - protein, 12 aa, Homo sapiens
  ( 133 )...( 144 ): >Q9UD63
RYPTIVTQRRGL

SEQ ID NO: 11178 - protein, 12 aa, Homo sapiens
  ( 202 )...( 213 ): >Q9UD63
VMYCRVYVVAKR

SEQ ID NO: 11179 - protein, 12 aa, Homo sapiens
  ( 205 )...( 216 ): >Q9UD63
CRVYVVAKRESR

SEQ ID NO: 11180 - protein, 12 aa, Homo sapiens
  ( 206 )...( 217 ): >Q9UD63
RVYVVAKRESRG

SEQ ID NO: 11181 - protein, 12 aa, Homo sapiens
  ( 208 )...( 219 ): >Q9UD63
YVVAKRESRGLK

SEQ ID NO: 11182 - protein, 12 aa, Homo sapiens
  ( 209 )...( 220 ): >Q9UD63
VVAKRESRGLKS

SEQ ID NO: 11183 - protein, 12 aa, Homo sapiens
  ( 210 )...( 221 ): >Q9UD63
VAKRESRGLKSG

SEQ ID NO: 11184 - protein, 12 aa, Homo sapiens
  ( 211 )...( 222 ): >Q9UD63
AKRESRGLKSGL

SEQ ID NO: 11185 - protein, 12 aa, Homo sapiens
  ( 212 )...( 223 ): >Q9UD63
KRESRGLKSGLK

SEQ ID NO: 11186 - protein, 12 aa, Homo sapiens
  ( 213 )...( 224 ): >Q9UD63
RESRGLKSGLKT

SEQ ID NO: 11187 - protein, 12 aa, Homo sapiens
  ( 232 )...( 243 ): >Q9UD63
VTLRIHRKNAPA

SEQ ID NO: 11188 - protein, 12 aa, Homo sapiens
  ( 233 )...( 244 ): >Q9UD63
TLRIHRKNAPAG

SEQ ID NO: 11189 - protein, 12 aa, Homo sapiens
  ( 234 )...( 245 ): >Q9UD63
LRIHRKNAPAGG

SEQ ID NO: 11190 - protein, 12 aa, Homo sapiens
  ( 252 )...( 263 ): >Q9UD63
KTKTHFSVRLLK

SEQ ID NO: 11191 - protein, 12 aa, Homo sapiens
  ( 261 )...( 272 ): >Q9UD63
LLKFSREKKAAK

SEQ ID NO: 11192 - protein, 12 aa, Homo sapiens
  ( 262 )...( 273 ): >Q9UD63
LKFSREKKAAKT

SEQ ID NO: 11193 - protein, 12 aa, Homo sapiens
  ( 263 )...( 274 ): >Q9UD63
KFSREKKAAKTL

SEQ ID NO: 11194 - protein, 12 aa, Homo sapiens
  ( 264 )...( 275 ): >Q9UD63
FSREKKAAKTLG

SEQ ID NO: 11195 - protein, 12 aa, Homo sapiens
  ( 265 )...( 276 ): >Q9UD63
SREKKAAKTLGI

SEQ ID NO: 11196 - protein, 12 aa, Homo sapiens
  ( 266 )...( 277 ): >Q9UD63
REKKAAKTLGIV

SEQ ID NO: 11197 - protein, 12 aa, Homo sapiens
  ( 340 )...( 351 ): >Q9UD63
VLRIQCLRRKQS

SEQ ID NO: 11198 - protein, 12 aa, Homo sapiens
  ( 346 )...( 357 ): >Q9UD63
LRRKQSSKHALG

SEQ ID NO: 11199 - protein, 12 aa, Homo sapiens
  ( 403 )...( 414 ): >Q9UD63
MPRGSARITVSK

SEQ ID NO: 11200 - protein, 12 aa, Homo sapiens
  ( 416 )...( 427 ): >Q9UD63
QSSCTTARVRSK

SEQ ID NO: 11201 - protein, 12 aa, Homo sapiens
  ( 419 )...( 430 ): >Q9UD63
CTTARVRSKSFL

SEQ ID NO: 11202 - protein, 12 aa, Homo sapiens
  ( 420 )...( 431 ): >Q9UD63
TTARVRSKSFLQ

SEQ ID NO: 11203 - protein, 12 aa, Homo sapiens
  ( 421 )...( 432 ): >Q9UD63
TARVRSKSFLQV

SEQ ID NO: 11204 - protein, 12 aa, Homo sapiens
  ( 422 )...( 433 ): >Q9UD63
ARVRSKSFLQVC

SEQ ID NO: 11205 - protein, 12 aa, Homo sapiens
  ( 153 )...( 164 ): >Q9UBF7
HSIVTLPRARRA

SEQ ID NO: 11206 - protein, 12 aa, Homo sapiens
  ( 154 )...( 165 ): >Q9UBF7
SIVTLPRARRAV

SEQ ID NO: 11207 - protein, 12 aa, Homo sapiens
  ( 155 )...( 166 ): >Q9UBF7
IVTLPRARRAVA

SEQ ID NO: 11208 - protein, 12 aa, Homo sapiens
  ( 156 )...( 167 ): >Q9UBF7
VTLPRARRAVAA

SEQ ID NO: 11209 - protein, 12 aa, Homo sapiens
  ( 157 )...( 168 ): >Q9UBF7
TLPRARRAVAAI

SEQ ID NO: 11210 - protein, 12 aa, Homo sapiens
  ( 158 )...( 169 ): >Q9UBF7
LPRARRAVAAIW

SEQ ID NO: 11211 - protein, 12 aa, Homo sapiens
  ( 159 )...( 170 ): >Q9UBF7
PRARRAVAAIWV

SEQ ID NO: 11212 - protein, 12 aa, Homo sapiens
  ( 160 )...( 171 ): >Q9UBF7
RARRAVAAIWVA

SEQ ID NO: 11213 - protein, 12 aa, Homo sapiens
  ( 216 )...( 227 ): >Q9UBF7
QHAQGIARLHKR

SEQ ID NO: 11214 - protein, 12 aa, Homo sapiens
  ( 217 )...( 228 ): >Q9UBF7
HAQGIARLHKRQ

SEQ ID NO: 11215 - protein, 12 aa, Homo sapiens
  ( 218 )...( 229 ): >Q9UBF7
AQGIARLHKRQR

SEQ ID NO: 11216 - protein, 12 aa, Homo sapiens
  ( 220 )...( 231 ): >Q9UBF7
GIARLHKRQRPV

SEQ ID NO: 11217 - protein, 12 aa, Homo sapiens
  ( 226 )...( 237 ): >Q9UBF7
KRQRPVHQGFGL

SEQ ID NO: 11218 - protein, 12 aa, Homo sapiens
  ( 227 )...( 238 ): >Q9UBF7
RQRPVHQGFGLK

SEQ ID NO: 11219 - protein, 12 aa, Homo sapiens
  ( 132 )...( 143 ): >O60451
LRYPTIVTQRRG

SEQ ID NO: 11220 - protein, 12 aa, Homo sapiens
  ( 133 )...( 144 ): >O60451
RYPTIVTQRRGL

SEQ ID NO: 11221 - protein, 12 aa, Homo sapiens
  ( 202 )...( 213 ): >O60451
VMYCRVYVVAKR

SEQ ID NO: 11222 - protein, 12 aa, Homo sapiens
  ( 205 )...( 216 ): >O60451
CRVYVVAKRESR

SEQ ID NO: 11223 - protein, 12 aa, Homo sapiens
  ( 206 )...( 217 ): >O60451
RVYVVAKRESRG

SEQ ID NO: 11224 - protein, 12 aa, Homo sapiens
  ( 208 )...( 219 ): >O60451
YVVAKRESRGLK

SEQ ID NO: 11225 - protein, 12 aa, Homo sapiens
  ( 209 )...( 220 ): >O60451
VVAKRESRGLKS

SEQ ID NO: 11226 - protein, 12 aa, Homo sapiens
  ( 210 )...( 221 ): >O60451
VAKRESRGLKSG

SEQ ID NO: 11227 - protein, 12 aa, Homo sapiens
  ( 211 )...( 222 ): >O60451
AKRESRGLKSGL

SEQ ID NO: 11228 - protein, 12 aa, Homo sapiens
  ( 212 )...( 223 ): >O60451
KRESRGLKSGLK

SEQ ID NO: 11229 - protein, 12 aa, Homo sapiens
  ( 213 )...( 224 ): >O60451
RESRGLKSGLKT

SEQ ID NO: 11230 - protein, 12 aa, Homo sapiens
  ( 232 )...( 243 ): >O60451
VTLRIHRKNAPA

SEQ ID NO: 11231 - protein, 12 aa, Homo sapiens
  ( 233 )...( 244 ): >O60451
TLRIHRKNAPAG

SEQ ID NO: 11232 - protein, 12 aa, Homo sapiens
  ( 234 )...( 245 ): >O60451
LRIHRKNAPAGG

SEQ ID NO: 11233 - protein, 12 aa, Homo sapiens
  ( 252 )...( 263 ): >O60451
KTKTHFSVRLLK

SEQ ID NO: 11234 - protein, 12 aa, Homo sapiens
  ( 261 )...( 272 ): >O60451
LLKFSREKKAAK

SEQ ID NO: 11235 - protein, 12 aa, Homo sapiens
  ( 262 )...( 273 ): >O60451
LKFSREKKAAKT

SEQ ID NO: 11236 - protein, 12 aa, Homo sapiens
  ( 263 )...( 274 ): >O60451
KFSREKKAAKTL

SEQ ID NO: 11237 - protein, 12 aa, Homo sapiens
  ( 264 )...( 275 ): >O60451
FSREKKAAKTLG

SEQ ID NO: 11238 - protein, 12 aa, Homo sapiens
  ( 265 )...( 276 ): >O60451
SREKKAAKTLGI

SEQ ID NO: 11239 - protein, 12 aa, Homo sapiens
  ( 266 )...( 277 ): >O60451
REKKAAKTLGIV

SEQ ID NO: 11240 - protein, 12 aa, Homo sapiens
  ( 334 )...( 345 ): >O60451
KKAFQNVLRIQC

SEQ ID NO: 11241 - protein, 12 aa, Homo sapiens
  ( 338 )...( 349 ): >O60451
QNVLRIQCLCRK

SEQ ID NO: 11242 - protein, 12 aa, Homo sapiens
  ( 339 )...( 350 ): >O60451
NVLRIQCLCRKQ

SEQ ID NO: 11243 - protein, 12 aa, Homo sapiens
  ( 340 )...( 351 ): >O60451
VLRIQCLCRKQS

SEQ ID NO: 11244 - protein, 12 aa, Homo sapiens
  ( 341 )...( 352 ): >O60451
LRIQCLCRKQSS

SEQ ID NO: 11245 - protein, 12 aa, Homo sapiens
  ( 342 )...( 353 ): >O60451
RIQCLCRKQSSK

SEQ ID NO: 11246 - protein, 12 aa, Homo sapiens
  ( 403 )...( 414 ): >O60451
MPRGSARITVSK

SEQ ID NO: 11247 - protein, 12 aa, Homo sapiens
  ( 144 )...( 155 ): >Q9NZR3
TRYSSKRRVTVM

SEQ ID NO: 11248 - protein, 12 aa, Homo sapiens
  ( 145 )...( 156 ): >Q9NZR3
RYSSKRRVTVMI

SEQ ID NO: 11249 - protein, 12 aa, Homo sapiens
  ( 146 )...( 157 ): >Q9NZR3
YSSKRRVTVMIS

SEQ ID NO: 11250 - protein, 12 aa, Homo sapiens
  ( 147 )...( 158 ): >Q9NZR3
SSKRRVTVMISI

SEQ ID NO: 11251 - protein, 12 aa, Homo sapiens
  ( 148 )...( 159 ): >Q9NZR3
SKRRVTVMISIV

SEQ ID NO: 11252 - protein, 12 aa, Homo sapiens
  ( 149 )...( 160 ): >Q9NZR3
KRRVTVMISIVW

SEQ ID NO: 11253 - protein, 12 aa, Homo sapiens
  ( 231 )...( 242 ): >Q9NZR3
AFRAHLRAPLKG

SEQ ID NO: 11254 - protein, 12 aa, Homo sapiens
  ( 260 )...( 271 ): >Q9NZR3
NGSFPVNRRRVV

SEQ ID NO: 11255 - protein, 12 aa, Homo sapiens
  ( 261 )...( 272 ): >Q9NZR3
GSFPVNRRRVVQ

SEQ ID NO: 11256 - protein, 12 aa, Homo sapiens
  ( 265 )...( 276 ): >Q9NZR3
VNRRRVVQEAAR

SEQ ID NO: 11257 - protein, 12 aa, Homo sapiens
  ( 268 )...( 279 ): >Q9NZR3
RRVVQEAARRAQ

SEQ ID NO: 11258 - protein, 12 aa, Homo sapiens
  ( 351 )...( 362 ): >Q9NZR3
GKTRTSLKTMSR

SEQ ID NO: 11259 - protein, 12 aa, Homo sapiens
  ( 352 )...( 363 ): >Q9NZR3
KTRTSLKTMSRR

SEQ ID NO: 11260 - protein, 12 aa, Homo sapiens
  ( 353 )...( 364 ): >Q9NZR3
TRTSLKTMSRRK

SEQ ID NO: 11261 - protein, 12 aa, Homo sapiens
  ( 354 )...( 365 ): >Q9NZR3
RTSLKTMSRRKL

SEQ ID NO: 11262 - protein, 12 aa, Homo sapiens
  ( 355 )...( 366 ): >Q9NZR3
TSLKTMSRRKLS

SEQ ID NO: 11263 - protein, 12 aa, Homo sapiens
  ( 356 )...( 367 ): >Q9NZR3
SLKTMSRRKLSQ

SEQ ID NO: 11264 - protein, 10 aa, Homo sapiens
  ( 436 )...( 447 ): >Q9NZR3
RKAFLKILHC

SEQ ID NO: 11265 - protein, 12 aa, Homo sapiens
  ( 131 )...( 142 ): >Q9P2Q4
YARKRTPKHAGI

SEQ ID NO: 11266 - protein, 12 aa, Homo sapiens
  ( 132 )...( 143 ): >Q9P2Q4
ARKRTPKHAGIM

SEQ ID NO: 11267 - protein, 12 aa, Homo sapiens
  ( 133 )...( 144 ): >Q9P2Q4
RKRTPKHAGIMI

SEQ ID NO: 11268 - protein, 12 aa, Homo sapiens
  ( 210 )...( 221 ): >Q9P2Q4
TLYHKRQASRIA

SEQ ID NO: 11269 - protein, 12 aa, Homo sapiens
  ( 280 )...( 291 ): >Q9P2Q4
RQKISGTRERKA

SEQ ID NO: 11270 - protein, 12 aa, Homo sapiens
  ( 281 )...( 292 ): >Q9P2Q4
QKISGTRERKAA

SEQ ID NO: 11271 - protein, 12 aa, Homo sapiens
  ( 282 )...( 293 ): >Q9P2Q4
KISGTRERKAAT

SEQ ID NO: 11272 - protein, 12 aa, Homo sapiens
  ( 98 )...( 109 ): >Q9P1X9
CVTKPLTYPVKR

SEQ ID NO: 11273 - protein, 12 aa, Homo sapiens
  ( 99 )...( 110 ): >Q9P1X9
VTKPLTYPVKRT

SEQ ID NO: 11274 - protein, 12 aa, Homo sapiens
  ( 101 )...( 112 ): >Q9P1X9
KPLTYPVKRTTK

SEQ ID NO: 11275 - protein, 12 aa, Homo sapiens
  ( 102 )...( 113 ): >Q9P1X9
PLTYPVKRTTKM

SEQ ID NO: 11276 - protein, 12 aa, Homo sapiens
  ( 103 )...( 114 ): >Q9P1X9
LTYPVKRTTKMA

SEQ ID NO: 11277 - protein, 12 aa, Homo sapiens
  ( 104 )...( 115 ): >Q9P1X9
TYPVKRTTKMAG

SEQ ID NO: 11278 - protein, 12 aa, Homo sapiens
  ( 105 )...( 116 ): >Q9P1X9
YPVKRTTKMAGM

SEQ ID NO: 11279 - protein, 12 aa, Homo sapiens
  ( 106 )...( 117 ): >Q9P1X9
PVKRTTKMAGMM

SEQ ID NO: 11280 - protein, 12 aa, Homo sapiens
  ( 107 )...( 118 ): >Q9P1X9
VKRTTKMAGMMI

SEQ ID NO: 11281 - protein, 12 aa, Homo sapiens
  ( 108 )...( 119 ): >Q9P1X9
KRTTKMAGMMIA

SEQ ID NO: 11282 - protein, 12 aa, Homo sapiens
  ( 183 )...( 194 ): >Q9P1X9
ISRASKSRIKKD

SEQ ID NO: 11283 - protein, 12 aa, Homo sapiens
  ( 189 )...( 200 ): >Q9P1X9
SRIKKDKKEPVA

SEQ ID NO: 11284 - protein, 12 aa, Homo sapiens
  ( 293 )...( 304 ): >Q9P1X9
NSKQTCIRIGTK

SEQ ID NO: 11285 - protein, 12 aa, Homo sapiens
  ( 295 )...( 306 ): >Q9P1X9
KQTCIRIGTKTP

SEQ ID NO: 11286 - protein, 12 aa, Homo sapiens
  ( 296 )...( 307 ): >Q9P1X9
QTCIRIGTKTPK

SEQ ID NO: 11287 - protein, 12 aa, Homo sapiens
  ( 330 )...( 341 ): >Q9P1X9
EKQNIVARKIVK

SEQ ID NO: 11288 - protein, 12 aa, Homo sapiens
  ( 331 )...( 342 ): >Q9P1X9
KQNIVARKIVKM

SEQ ID NO: 11289 - protein, 12 aa, Homo sapiens
  ( 332 )...( 343 ): >Q9P1X9
QNIVARKIVKMT

SEQ ID NO: 11290 - protein, 12 aa, Homo sapiens
  ( 333 )...( 344 ): >Q9P1X9
NIVARKIVKMTK

SEQ ID NO: 11291 - protein, 12 aa, Homo sapiens
  ( 334 )...( 345 ): >Q9P1X9
IVARKIVKMTKQ

SEQ ID NO: 11292 - protein, 12 aa, Homo sapiens
  ( 335 )...( 346 ): >Q9P1X9
VARKIVKMTKQP

SEQ ID NO: 11293 - protein, 12 aa, Homo sapiens
  ( 336 )...( 347 ): >Q9P1X9
ARKIVKMTKQPA

SEQ ID NO: 11294 - protein, 12 aa, Homo sapiens
  ( 337 )...( 348 ): >Q9P1X9
RKIVKMTKQPAK

SEQ ID NO: 11295 - protein, 12 aa, Homo sapiens
  ( 338 )...( 349 ): >Q9P1X9
KIVKMTKQPAKK

SEQ ID NO: 11296 - protein, 12 aa, Homo sapiens
  ( 339 )...( 350 ): >Q9P1X9
IVKMTKQPAKKK

SEQ ID NO: 11297 - protein, 12 aa, Homo sapiens
  ( 340 )...( 351 ): >Q9P1X9
VKMTKQPAKKKP

SEQ ID NO: 11298 - protein, 12 aa, Homo sapiens
  ( 351 )...( 362 ): >Q9P1X9
PPPSREKKVTRT

SEQ ID NO: 11299 - protein, 12 aa, Homo sapiens
  ( 352 )...( 363 ): >Q9P1X9
PPSREKKVTRTI

SEQ ID NO: 11300 - protein, 12 aa, Homo sapiens
  ( 353 )...( 364 ): >Q9P1X9
PSREKKVTRTIL

SEQ ID NO: 11301 - protein, 12 aa, Homo sapiens
  ( 354 )...( 365 ): >Q9P1X9
SREKKVTRTILA

SEQ ID NO: 11302 - protein, 12 aa, Homo sapiens
  ( 355 )...( 366 ): >Q9P1X9
REKKVTRTILAI

SEQ ID NO: 11303 - protein, 12 aa, Homo sapiens
  ( 144 )...( 155 ): >Q9UPA9
TRYSSKRRVTVM

SEQ ID NO: 11304 - protein, 12 aa, Homo sapiens
  ( 145 )...( 156 ): >Q9UPA9
RYSSKRRVTVMI

SEQ ID NO: 11305 - protein, 12 aa, Homo sapiens
  ( 146 )...( 157 ): >Q9UPA9
YSSKRRVTVMIS

SEQ ID NO: 11306 - protein, 12 aa, Homo sapiens
  ( 147 )...( 158 ): >Q9UPA9
SSKRRVTVMISI

SEQ ID NO: 11307 - protein, 12 aa, Homo sapiens
  ( 148 )...( 159 ): >Q9UPA9
SKRRVTVMISIV

SEQ ID NO: 11308 - protein, 12 aa, Homo sapiens
  ( 149 )...( 160 ): >Q9UPA9
KRRVTVMISIVW

SEQ ID NO: 11309 - protein, 12 aa, Homo sapiens
  ( 231 )...( 242 ): >Q9UPA9
AFRAHLRAPLKG

SEQ ID NO: 11310 - protein, 11 aa, Homo sapiens
  ( 345 )...( 356 ): >Q9UPA9
TMPNGKRTSLK

SEQ ID NO: 11311 - protein, 11 aa, Homo sapiens
  ( 346 )...( 357 ): >Q9UPA9
MPNGKRTSLKT

SEQ ID NO: 11312 - protein, 11 aa, Homo sapiens
  ( 347 )...( 358 ): >Q9UPA9
PNGKRTSLKTM

SEQ ID NO: 11313 - protein, 11 aa, Homo sapiens
  ( 349 )...( 360 ): >Q9UPA9
GKRTSLKTMSR

SEQ ID NO: 11314 - protein, 12 aa, Homo sapiens
  ( 352 )...( 363 ): >Q9UPA9
RTSLKTMSRRKL

SEQ ID NO: 11315 - protein, 12 aa, Homo sapiens
  ( 353 )...( 364 ): >Q9UPA9
TSLKTMSRRKLS

SEQ ID NO: 11316 - protein, 12 aa, Homo sapiens
  ( 354 )...( 365 ): >Q9UPA9
SLKTMSRRKLSQ

SEQ ID NO: 11317 - protein, 10 aa, Homo sapiens
  ( 434 )...( 445 ): >Q9UPA9
RKAFLKILHC

SEQ ID NO: 11318 - protein, 12 aa, Homo sapiens
  ( 159 )...( 170 ): >Q9UL61
GRHLVSRIIIAK

SEQ ID NO: 11319 - protein, 12 aa, Homo sapiens
  ( 160 )...( 171 ): >Q9UL61
RHLVSRIIIAKS

SEQ ID NO: 11320 - protein, 12 aa, Homo sapiens
  ( 326 )...( 337 ): >Q9UL61
LITFFVRRVKGT

SEQ ID NO: 11321 - protein, 12 aa, Homo sapiens
  ( 327 )...( 338 ): >Q9UL61
ITFFVRRVKGTF

SEQ ID NO: 11322 - protein, 12 aa, Homo sapiens
  ( 328 )...( 339 ): >Q9UL61
TFFVRRVKGTFG

SEQ ID NO: 11323 - protein, 12 aa, Homo sapiens
  ( 1045 )...( 1056 ): >Q9UL61
AVMRRLHLIVTR

SEQ ID NO: 11324 - protein, 12 aa, Homo sapiens
  ( 1046 )...( 1057 ): >Q9UL61
VMRRLHLIVTRQ

SEQ ID NO: 11325 - protein, 12 aa, Homo sapiens
  ( 1065 )...( 1076 ): >Q9UL61
VKVFWRVTLNKT

SEQ ID NO: 11326 - protein, 12 aa, Homo sapiens
  ( 1066 )...( 1077 ): >Q9UL61
KVFWRVTLNKTV

SEQ ID NO: 11327 - protein, 12 aa, Homo sapiens
  ( 1166 )...( 1177 ): >Q9UL61
RLAVAHKKATLI

SEQ ID NO: 11328 - protein, 12 aa, Homo sapiens
  ( 1172 )...( 1183 ): >Q9UL61
KKATLISLQVAR

SEQ ID NO: 11329 - protein, 12 aa, Homo sapiens
  ( 1358 )...( 1369 ): >Q9UL61
SLINPKRKDTRG

SEQ ID NO: 11330 - protein, 12 aa, Homo sapiens
  ( 207 )...( 218 ): >O75963
CYGFIFRVARVK

SEQ ID NO: 11331 - protein, 12 aa, Homo sapiens
  ( 208 )...( 219 ): >O75963
YGFIFRVARVKA

SEQ ID NO: 11332 - protein, 12 aa, Homo sapiens
  ( 209 )...( 220 ): >O75963
GFIFRVARVKAR

SEQ ID NO: 11333 - protein, 12 aa, Homo sapiens
  ( 214 )...( 225 ): >O75963
VARVKARKVHCG

SEQ ID NO: 11334 - protein, 12 aa, Homo sapiens
  ( 215 )...( 226 ): >O75963
ARVKARKVHCGT

SEQ ID NO: 11335 - protein, 12 aa, Homo sapiens
  ( 216 )...( 227 ): >O75963
RVKARKVHCGTV

SEQ ID NO: 11336 - protein, 12 aa, Homo sapiens
  ( 322 )...( 333 ): >O75963
LIYGLWNKTVRK

SEQ ID NO: 11337 - protein, 12 aa, Homo sapiens
  ( 132 )...( 143 ): >Q9NZH0
LLSQAWRVRRLV

SEQ ID NO: 11338 - protein, 12 aa, Homo sapiens
  ( 137 )...( 148 ): >Q9NZH0
WRVRRLVRHGTG

SEQ ID NO: 11339 - protein, 12 aa, Homo sapiens
  ( 138 )...( 149 ): >Q9NZH0
RVRRLVRHGTGP

SEQ ID NO: 11340 - protein, 12 aa, Homo sapiens
  ( 139 )...( 150 ): >Q9NZH0
VRRLVRHGTGPA

SEQ ID NO: 11341 - protein, 12 aa, Homo sapiens
  ( 140 )...( 151 ): >Q9NZH0
RRLVRHGTGPAG

SEQ ID NO: 11342 - protein, 12 aa, Homo sapiens
  ( 209 )...( 220 ): >Q9NZH0
LALFTLCGKFKR

SEQ ID NO: 11343 - protein, 12 aa, Homo sapiens
  ( 219 )...( 230 ): >Q9NZH0
KRWKLNGAFLLI

SEQ ID NO: 11344 - protein, 12 aa, Homo sapiens
  ( 347 )...( 358 ): >Q9NZH0
LGKRPSGSLGKR

SEQ ID NO: 11345 - protein, 12 aa, Homo sapiens
  ( 49 )...( 60 ): >Q9NRB8
SLVIAAVIKNRK

SEQ ID NO: 11346 - protein, 12 aa, Homo sapiens
  ( 50 )...( 61 ): >Q9NRB8
LVIAAVIKNRKF

SEQ ID NO: 11347 - protein, 12 aa, Homo sapiens
  ( 51 )...( 62 ): >Q9NRB8
VIAAVIKNRKFH

SEQ ID NO: 11348 - protein, 12 aa, Homo sapiens
  ( 135 )...( 146 ): >Q9NRB8
RVHSNLTKKRVT

SEQ ID NO: 11349 - protein, 12 aa, Homo sapiens
  ( 138 )...( 149 ): >Q9NRB8
SNLTKKRVTLLI

SEQ ID NO: 11350 - protein, 12 aa, Homo sapiens
  ( 139 )...( 150 ): >Q9NRB8
NLTKKRVTLLIL

SEQ ID NO: 11351 - protein, 12 aa, Homo sapiens
  ( 209 )...( 220 ): >Q9NRB8
IYVYVKRKTNVL

SEQ ID NO: 11352 - protein, 12 aa, Homo sapiens
  ( 210 )...( 221 ): >Q9NRB8
YVYVKRKTNVLS

SEQ ID NO: 11353 - protein, 12 aa, Homo sapiens
  ( 211 )...( 222 ): >Q9NRB8
VYVKRKTNVLSP

SEQ ID NO: 11354 - protein, 12 aa, Homo sapiens
  ( 222 )...( 233 ): >Q9NRB8
PHTSGSISRRRT

SEQ ID NO: 11355 - protein, 12 aa, Homo sapiens
  ( 223 )...( 234 ): >Q9NRB8
HTSGSISRRRTP

SEQ ID NO: 11356 - protein, 12 aa, Homo sapiens
  ( 224 )...( 235 ): >Q9NRB8
TSGSISRRRTPM

SEQ ID NO: 11357 - protein, 12 aa, Homo sapiens
  ( 225 )...( 236 ): >Q9NRB8
SGSISRRRTPMK

SEQ ID NO: 11358 - protein, 12 aa, Homo sapiens
  ( 226 )...( 237 ): >Q9NRB8
GSISRRRTPMKL

SEQ ID NO: 11359 - protein, 12 aa, Homo sapiens
  ( 231 )...( 242 ): >Q9NRB8
RRTPMKLMKTVM

SEQ ID NO: 11360 - protein, 12 aa, Homo sapiens
  ( 232 )...( 243 ): >Q9NRB8
RTPMKLMKTVMT

SEQ ID NO: 11361 - protein, 12 aa, Homo sapiens
  ( 319 )...( 330 ): >Q9NRB8
RRPSRLPSTILS

SEQ ID NO: 11362 - protein, 12 aa, Homo sapiens
  ( 320 )...( 331 ): >Q9NRB8
RPSRLPSTILSR

SEQ ID NO: 11363 - protein, 12 aa, Homo sapiens
  ( 89 )...( 100 ): >Q9HB60
VIVSFKVNKQLK

SEQ ID NO: 11364 - protein, 12 aa, Homo sapiens
  ( 168 )...( 179 ): >Q9HB60
FSITRPLTYRAK

SEQ ID NO: 11365 - protein, 12 aa, Homo sapiens
  ( 170 )...( 181 ): >Q9HB60
ITRPLTYRAKRT

SEQ ID NO: 11366 - protein, 12 aa, Homo sapiens
  ( 171 )...( 182 ): >Q9HB60
TRPLTYRAKRTT

SEQ ID NO: 11367 - protein, 12 aa, Homo sapiens
  ( 174 )...( 185 ): >Q9HB60
LTYRAKRTTKRA

SEQ ID NO: 11368 - protein, 12 aa, Homo sapiens
  ( 175 )...( 186 ): >Q9HB60
TYRAKRTTKRAG

SEQ ID NO: 11369 - protein, 12 aa, Homo sapiens
  ( 178 )...( 189 ): >Q9HB60
AKRTTKRAGVMI

SEQ ID NO: 11370 - protein, 12 aa, Homo sapiens
  ( 179 )...( 190 ): >Q9HB60
KRTTKRAGVMIG

SEQ ID NO: 11371 - protein, 12 aa, Homo sapiens
  ( 145 )...( 156 ): >Q9BZK1
RTPRRIKAIIIT

SEQ ID NO: 11372 - protein, 12 aa, Homo sapiens
  ( 146 )...( 157 ): >Q9BZK1
TPRRIKAIIITV

SEQ ID NO: 11373 - protein, 12 aa, Homo sapiens
  ( 221 )...( 232 ): >Q9BZK1
QIAKRRTRVPPS

SEQ ID NO: 11374 - protein, 12 aa, Homo sapiens
  ( 248 )...( 259 ): >Q9BZK1
RRPKGLGPERSA

SEQ ID NO: 11375 - protein, 12 aa, Homo sapiens
  ( 310 )...( 321 ): >Q9BZK1
RPERGPRGKGKA

SEQ ID NO: 11376 - protein, 12 aa, Homo sapiens
  ( 311 )...( 322 ): >Q9BZK1
PERGPRGKGKAR

SEQ ID NO: 11377 - protein, 12 aa, Homo sapiens
  ( 315 )...( 326 ): >Q9BZK1
PRGKGKARASQV

SEQ ID NO: 11378 - protein, 12 aa, Homo sapiens
  ( 316 )...( 327 ): >Q9BZK1
RGKGKARASQVK

SEQ ID NO: 11379 - protein, 12 aa, Homo sapiens
  ( 352 )...( 363 ): >Q9BZK1
ERVGAAKASRWR

SEQ ID NO: 11380 - protein, 12 aa, Homo sapiens
  ( 353 )...( 364 ): >Q9BZK1
RVGAAKASRWRG

SEQ ID NO: 11381 - protein, 12 aa, Homo sapiens
  ( 354 )...( 365 ): >Q9BZK1
VGAAKASRWRGR

SEQ ID NO: 11382 - protein, 12 aa, Homo sapiens
  ( 355 )...( 366 ): >Q9BZK1
GAAKASRWRGRQ

SEQ ID NO: 11383 - protein, 12 aa, Homo sapiens
  ( 436 )...( 447 ): >Q9BZK1
AFKKILCRGDRK

SEQ ID NO: 11384 - protein, 12 aa, Homo sapiens
  ( 439 )...( 450 ): >Q9BZK1
KILCRGDRKRIV

SEQ ID NO: 11385 - protein, 11 aa, Homo sapiens
  ( 440 )...( 451 ): >Q9BZK1
ILCRGDRKRIV

SEQ ID NO: 11386 - protein, 10 aa, Homo sapiens
  ( 441 )...( 452 ): >Q9BZK1
LCRGDRKRIV

SEQ ID NO: 11387 - protein, 9 aa, Homo sapiens
  ( 442 )...( 453 ): >Q9BZK1
CRGDRKRIV

SEQ ID NO: 11388 - protein, 12 aa, Homo sapiens
  ( 124 )...( 135 ): >Q9BZK0
RTPRRIKCIILT

SEQ ID NO: 11389 - protein, 12 aa, Homo sapiens
  ( 125 )...( 136 ): >Q9BZK0
TPRRIKCIILTV

SEQ ID NO: 11390 - protein, 12 aa, Homo sapiens
  ( 191 )...( 202 ): >Q9BZK0
VYLRIYLIAKRS

SEQ ID NO: 11391 - protein, 12 aa, Homo sapiens
  ( 346 )...( 357 ): >Q9BZK0
VGAIGGQWWRRR

SEQ ID NO: 11392 - protein, 12 aa, Homo sapiens
  ( 347 )...( 358 ): >Q9BZK0
GAIGGQWWRRRA

SEQ ID NO: 11393 - protein, 12 aa, Homo sapiens
  ( 209 )...( 220 ): >Q9BXA5
FLKQRNRQVATA

SEQ ID NO: 11394 - protein, 12 aa, Homo sapiens
  ( 210 )...( 221 ): >Q9BXA5
LKQRNRQVATAL

SEQ ID NO: 11395 - protein, 12 aa, Homo sapiens
  ( 211 )...( 222 ): >Q9BXA5
KQRNRQVATALP

SEQ ID NO: 11396 - protein, 12 aa, Homo sapiens
  ( 245 )...( 256 ): >Q9BXA5
HVMRNVRIASRL

SEQ ID NO: 11397 - protein, 12 aa, Homo sapiens
  ( 246 )...( 257 ): >Q9BXA5
VMRNVRIASRLG

SEQ ID NO: 11398 - protein, 12 aa, Homo sapiens
  ( 247 )...( 258 ): >Q9BXA5
MRNVRIASRLGS

SEQ ID NO: 11399 - protein, 12 aa, Homo sapiens
  ( 248 )...( 259 ): >Q9BXA5
RNVRIASRLGSW

SEQ ID NO: 11400 - protein, 12 aa, Homo sapiens
  ( 249 )...( 260 ): >Q9BXA5
NVRIASRLGSWK

SEQ ID NO: 11401 - protein, 12 aa, Homo sapiens
  ( 250 )...( 261 ): >Q9BXA5
VRIASRLGSWKQ

SEQ ID NO: 11402 - protein, 12 aa, Homo sapiens
  ( 59 )...( 70 ): >Q9BXA0
VILVMGYQKKLR

SEQ ID NO: 11403 - protein, 12 aa, Homo sapiens
  ( 60 )...( 71 ): >Q9BXA0
ILVMGYQKKLRS

SEQ ID NO: 11404 - protein, 12 aa, Homo sapiens
  ( 61 )...( 72 ): >Q9BXA0
LVMGYQKKLRSM

SEQ ID NO: 11405 - protein, 12 aa, Homo sapiens
  ( 62 )...( 73 ): >Q9BXA0
VMGYQKKLRSMT

SEQ ID NO: 11406 - protein, 12 aa, Homo sapiens
  ( 141 )...( 152 ): >Q9BXA0
ATNSQRPRKLLA

SEQ ID NO: 11407 - protein, 12 aa, Homo sapiens
  ( 144 )...( 155 ): >Q9BXA0
SQRPRKLLAEKV

SEQ ID NO: 11408 - protein, 12 aa, Homo sapiens
  ( 145 )...( 156 ): >Q9BXA0
QRPRKLLAEKVV

SEQ ID NO: 11409 - protein, 12 aa, Homo sapiens
  ( 146 )...( 157 ): >Q9BXA0
RPRKLLAEKVVY

SEQ ID NO: 11410 - protein, 12 aa, Homo sapiens
  ( 226 )...( 237 ): >Q9BXA0
LSHSKGHQKRKA

SEQ ID NO: 11411 - protein, 12 aa, Homo sapiens
  ( 227 )...( 238 ): >Q9BXA0
SHSKGHQKRKAL

SEQ ID NO: 11412 - protein, 12 aa, Homo sapiens
  ( 229 )...( 240 ): >Q9BXA0
SKGHQKRKALKT

SEQ ID NO: 11413 - protein, 12 aa, Homo sapiens
  ( 230 )...( 241 ): >Q9BXA0
KGHQKRKALKTT

SEQ ID NO: 11414 - protein, 12 aa, Homo sapiens
  ( 231 )...( 242 ): >Q9BXA0
GHQKRKALKTTI

SEQ ID NO: 11415 - protein, 12 aa, Homo sapiens
  ( 232 )...( 243 ): >Q9BXA0
HQKRKALKTTII

SEQ ID NO: 11416 - protein, 12 aa, Homo sapiens
  ( 233 )...( 244 ): >Q9BXA0
QKRKALKTTIIP

SEQ ID NO: 11417 - protein, 12 aa, Homo sapiens
  ( 234 )...( 245 ): >Q9BXA0
KRKALKTTIIPI

SEQ ID NO: 11418 - protein, 12 aa, Homo sapiens
  ( 235 )...( 246 ): >Q9BXA0
RKALKTTIIPIL

SEQ ID NO: 11419 - protein, 12 aa, Homo sapiens
  ( 322 )...( 333 ): >Q9BXA0
RGSSLKILSKGK

SEQ ID NO: 11420 - protein, 12 aa, Homo sapiens
  ( 323 )...( 334 ): >Q9BXA0
GSSLKILSKGKR

SEQ ID NO: 11421 - protein, 12 aa, Homo sapiens
  ( 324 )...( 335 ): >Q9BXA0
SSLKILSKGKRG

SEQ ID NO: 11422 - protein, 12 aa, Homo sapiens
  ( 326 )...( 337 ): >Q9BXA0
LKILSKGKRGGH

SEQ ID NO: 11423 - protein, 12 aa, Homo sapiens
  ( 327 )...( 338 ): >Q9BXA0
KILSKGKRGGHS

SEQ ID NO: 11424 - protein, 12 aa, Homo sapiens
  ( 14 )...( 25 ): >Q9NTT0
MTKTRTFFAAKI

SEQ ID NO: 11425 - protein, 12 aa, Homo sapiens
  ( 15 )...( 26 ): >Q9NTT0
TKTRTFFAAKIV

SEQ ID NO: 11426 - protein, 12 aa, Homo sapiens
  ( 16 )...( 27 ): >Q9NTT0
KTRTFFAAKIVI

SEQ ID NO: 11427 - protein, 12 aa, Homo sapiens
  ( 43 )...( 54 ): >Q9NTT0
FVFIAALTRYKK

SEQ ID NO: 11428 - protein, 12 aa, Homo sapiens
  ( 44 )...( 55 ): >Q9NTT0
VFIAALTRYKKL

SEQ ID NO: 11429 - protein, 12 aa, Homo sapiens
  ( 46 )...( 57 ): >Q9NTT0
IAALTRYKKLRN

SEQ ID NO: 11430 - protein, 12 aa, Homo sapiens
  ( 53 )...( 64 ): >Q9NTT0
KKLRNLTNLLIA

SEQ ID NO: 11431 - protein, 12 aa, Homo sapiens
  ( 238 )...( 249 ): >Q9NTT0
LRCRRKTVLVLM

SEQ ID NO: 11432 - protein, 12 aa, Homo sapiens
  ( 239 )...( 250 ): >Q9NTT0
RCRRKTVLVLMC

SEQ ID NO: 11433 - protein, 12 aa, Homo sapiens
  ( 240 )...( 251 ): >Q9NTT0
CRRKTVLVLMCI

SEQ ID NO: 11434 - protein, 12 aa, Homo sapiens
  ( 16 )...( 27 ): >Q9H573
VSARTGFCKKQQ

SEQ ID NO: 11435 - protein, 12 aa, Homo sapiens
  ( 154 )...( 165 ): >Q9H573
MYVIVRYTKMKT

SEQ ID NO: 11436 - protein, 12 aa, Homo sapiens
  ( 155 )...( 166 ): >Q9H573
YVIVRYTKMKTA

SEQ ID NO: 11437 - protein, 12 aa, Homo sapiens
  ( 156 )...( 167 ): >Q9H573
VIVRYTKMKTAT

SEQ ID NO: 11438 - protein, 12 aa, Homo sapiens
  ( 157 )...( 168 ): >Q9H573
IVRYTKMKTATN

SEQ ID NO: 11439 - protein, 12 aa, Homo sapiens
  ( 158 )...( 169 ): >Q9H573
VRYTKMKTATNI

SEQ ID NO: 11440 - protein, 12 aa, Homo sapiens
  ( 159 )...( 170 ): >Q9H573
RYTKMKTATNIY

SEQ ID NO: 11441 - protein, 12 aa, Homo sapiens
  ( 243 )...( 254 ): >Q9H573
RTPRNAKIINVC

SEQ ID NO: 11442 - protein, 12 aa, Homo sapiens
  ( 316 )...( 327 ): >Q9H573
YGLMILRLKSVR

SEQ ID NO: 11443 - protein, 12 aa, Homo sapiens
  ( 317 )...( 328 ): >Q9H573
GLMILRLKSVRM

SEQ ID NO: 11444 - protein, 12 aa, Homo sapiens
  ( 319 )...( 330 ): >Q9H573
MILRLKSVRMLS

SEQ ID NO: 11445 - protein, 12 aa, Homo sapiens
  ( 320 )...( 331 ): >Q9H573
ILRLKSVRMLSG

SEQ ID NO: 11446 - protein, 12 aa, Homo sapiens
  ( 321 )...( 332 ): >Q9H573
LRLKSVRMLSGS

SEQ ID NO: 11447 - protein, 12 aa, Homo sapiens
  ( 322 )...( 333 ): >Q9H573
RLKSVRMLSGSK

SEQ ID NO: 11448 - protein, 12 aa, Homo sapiens
  ( 338 )...( 349 ): >Q9H573
NLRRITRMVLVV

SEQ ID NO: 11449 - protein, 12 aa, Homo sapiens
  ( 340 )...( 351 ): >Q9H573
RRITRMVLVVVA

SEQ ID NO: 11450 - protein, 12 aa, Homo sapiens
  ( 275 )...( 286 ): >Q9H1N4
CRVYVVARSTTR

SEQ ID NO: 11451 - protein, 12 aa, Homo sapiens
  ( 276 )...( 287 ): >Q9H1N4
RVYVVARSTTRS

SEQ ID NO: 11452 - protein, 12 aa, Homo sapiens
  ( 328 )...( 339 ): >Q9H1N4
TFRSSLSVRLLK

SEQ ID NO: 11453 - protein, 12 aa, Homo sapiens
  ( 330 )...( 341 ): >Q9H1N4
RSSLSVRLLKFS

SEQ ID NO: 11454 - protein, 12 aa, Homo sapiens
  ( 331 )...( 342 ): >Q9H1N4
SSLSVRLLKFSR

SEQ ID NO: 11455 - protein, 12 aa, Homo sapiens
  ( 337 )...( 348 ): >Q9H1N4
LLKFSREKKAAK

SEQ ID NO: 11456 - protein, 12 aa, Homo sapiens
  ( 338 )...( 349 ): >Q9H1N4
LKFSREKKAAKT

SEQ ID NO: 11457 - protein, 12 aa, Homo sapiens
  ( 339 )...( 350 ): >Q9H1N4
KFSREKKAAKTL

SEQ ID NO: 11458 - protein, 12 aa, Homo sapiens
  ( 340 )...( 351 ): >Q9H1N4
FSREKKAAKTLA

SEQ ID NO: 11459 - protein, 12 aa, Homo sapiens
  ( 341 )...( 352 ): >Q9H1N4
SREKKAAKTLAI

SEQ ID NO: 11460 - protein, 12 aa, Homo sapiens
  ( 342 )...( 353 ): >Q9H1N4
REKKAAKTLAIV

SEQ ID NO: 11461 - protein, 12 aa, Homo sapiens
  ( 90 )...( 101 ): >Q9BYZ0
YQSLLTKNKARV

SEQ ID NO: 11462 - protein, 12 aa, Homo sapiens
  ( 91 )...( 102 ): >Q9BYZ0
QSLLTKNKARVI

SEQ ID NO: 11463 - protein, 12 aa, Homo sapiens
  ( 92 )...( 103 ): >Q9BYZ0
SLLTKNKARVII

SEQ ID NO: 11464 - protein, 12 aa, Homo sapiens
  ( 93 )...( 104 ): >Q9BYZ0
LLTKNKARVIIL

SEQ ID NO: 11465 - protein, 12 aa, Homo sapiens
  ( 94 )...( 105 ): >Q9BYZ0
LTKNKARVIILM

SEQ ID NO: 11466 - protein, 12 aa, Homo sapiens
  ( 95 )...( 106 ): >Q9BYZ0
TKNKARVIILMV

SEQ ID NO: 11467 - protein, 12 aa, Homo sapiens
  ( 201 )...( 212 ): >Q9BYZ0
GRTGHGLRRSSK

SEQ ID NO: 11468 - protein, 12 aa, Homo sapiens
  ( 202 )...( 213 ): >Q9BYZ0
RTGHGLRRSSKF

SEQ ID NO: 11469 - protein, 12 aa, Homo sapiens
  ( 206 )...( 217 ): >Q9BYZ0
GLRRSSKFCLKE

SEQ ID NO: 11470 - protein, 12 aa, Homo sapiens
  ( 132 )...( 143 ): >Q13729
LRYPTIVTQRRG

SEQ ID NO: 11471 - protein, 12 aa, Homo sapiens
  ( 133 )...( 144 ): >Q13729
RYPTIVTQRRGL

SEQ ID NO: 11472 - protein, 12 aa, Homo sapiens
  ( 202 )...( 213 ): >Q13729
VMYCRVYVVAKR

SEQ ID NO: 11473 - protein, 12 aa, Homo sapiens
  ( 205 )...( 216 ): >Q13729
CRVYVVAKRESR

SEQ ID NO: 11474 - protein, 12 aa, Homo sapiens
  ( 206 )...( 217 ): >Q13729
RVYVVAKRESRG

SEQ ID NO: 11475 - protein, 12 aa, Homo sapiens
  ( 208 )...( 219 ): >Q13729
YVVAKRESRGLK

SEQ ID NO: 11476 - protein, 12 aa, Homo sapiens
  ( 209 )...( 220 ): >Q13729
VVAKRESRGLKS

SEQ ID NO: 11477 - protein, 12 aa, Homo sapiens
  ( 210 )...( 221 ): >Q13729
VAKRESRGLKSG

SEQ ID NO: 11478 - protein, 12 aa, Homo sapiens
  ( 211 )...( 222 ): >Q13729
AKRESRGLKSGL

SEQ ID NO: 11479 - protein, 12 aa, Homo sapiens
  ( 212 )...( 223 ): >Q13729
KRESRGLKSGLK

SEQ ID NO: 11480 - protein, 12 aa, Homo sapiens
  ( 213 )...( 224 ): >Q13729
RESRGLKSGLKT

SEQ ID NO: 11481 - protein, 12 aa, Homo sapiens
  ( 232 )...( 243 ): >Q13729
VTLRIHRKNAPA

SEQ ID NO: 11482 - protein, 12 aa, Homo sapiens
  ( 233 )...( 244 ): >Q13729
TLRIHRKNAPAG

SEQ ID NO: 11483 - protein, 12 aa, Homo sapiens
  ( 234 )...( 245 ): >Q13729
LRIHRKNAPAGG

SEQ ID NO: 11484 - protein, 12 aa, Homo sapiens
  ( 252 )...( 263 ): >Q13729
KTKTHFSVRLLK

SEQ ID NO: 11485 - protein, 12 aa, Homo sapiens
  ( 261 )...( 272 ): >Q13729
LLKFSREKKAAK

SEQ ID NO: 11486 - protein, 12 aa, Homo sapiens
  ( 262 )...( 273 ): >Q13729
LKFSREKKAAKT

SEQ ID NO: 11487 - protein, 12 aa, Homo sapiens
  ( 263 )...( 274 ): >Q13729
KFSREKKAAKTL

SEQ ID NO: 11488 - protein, 12 aa, Homo sapiens
  ( 264 )...( 275 ): >Q13729
FSREKKAAKTLG

SEQ ID NO: 11489 - protein, 12 aa, Homo sapiens
  ( 265 )...( 276 ): >Q13729
SREKKAAKTLGI

SEQ ID NO: 11490 - protein, 12 aa, Homo sapiens
  ( 266 )...( 277 ): >Q13729
REKKAAKTLGIV

SEQ ID NO: 11491 - protein, 12 aa, Homo sapiens
  ( 334 )...( 345 ): >Q13729
KKAFQNVLRIQC

SEQ ID NO: 11492 - protein, 12 aa, Homo sapiens
  ( 340 )...( 351 ): >Q13729
VLRIQCLRRKQS

SEQ ID NO: 11493 - protein, 12 aa, Homo sapiens
  ( 346 )...( 357 ): >Q13729
LRRKQSSKHALG

SEQ ID NO: 11494 - protein, 12 aa, Homo sapiens
  ( 403 )...( 414 ): >Q13729
MPRGSARITVSK

SEQ ID NO: 11495 - protein, 12 aa, Homo sapiens
  ( 184 )...( 195 ): >Q9NSD7
VASALKSHRTRG

SEQ ID NO: 11496 - protein, 12 aa, Homo sapiens
  ( 187 )...( 198 ): >Q9NSD7
ALKSHRTRGHGR

SEQ ID NO: 11497 - protein, 12 aa, Homo sapiens
  ( 188 )...( 199 ): >Q9NSD7
LKSHRTRGHGRG

SEQ ID NO: 11498 - protein, 12 aa, Homo sapiens
  ( 292 )...( 303 ): >Q9NSD7
RFIADRRAAGTK

SEQ ID NO: 11499 - protein, 12 aa, Homo sapiens
  ( 312 )...( 323 ): >Q9NSD7
RPTGASARRLSK

SEQ ID NO: 11500 - protein, 12 aa, Homo sapiens
  ( 315 )...( 326 ): >Q9NSD7
GASARRLSKVTK

SEQ ID NO: 11501 - protein, 12 aa, Homo sapiens
  ( 316 )...( 327 ): >Q9NSD7
ASARRLSKVTKS

SEQ ID NO: 11502 - protein, 12 aa, Homo sapiens
  ( 317 )...( 328 ): >Q9NSD7
SARRLSKVTKSV

SEQ ID NO: 11503 - protein, 12 aa, Homo sapiens
  ( 318 )...( 329 ): >Q9NSD7
ARRLSKVTKSVT

SEQ ID NO: 11504 - protein, 12 aa, Homo sapiens
  ( 319 )...( 330 ): >Q9NSD7
RRLSKVTKSVTI

SEQ ID NO: 11505 - protein, 12 aa, Homo sapiens
  ( 397 )...( 408 ): >Q9NSD7
RKALKSLLWRIA

SEQ ID NO: 11506 - protein, 12 aa, Homo sapiens
  ( 398 )...( 409 ): >Q9NSD7
KALKSLLWRIAS

SEQ ID NO: 11507 - protein, 12 aa, Homo sapiens
  ( 130 )...( 141 ): >Q93003
RYNGLVTGTRAK

SEQ ID NO: 11508 - protein, 12 aa, Homo sapiens
  ( 297 )...( 308 ): >Q13167
VRKLSNGRLSTS

SEQ ID NO: 11509 - protein, 12 aa, Homo sapiens
  ( 298 )...( 309 ): >Q13167
RKLSNGRLSTSL

SEQ ID NO: 11510 - protein, 12 aa, Homo sapiens
  ( 314 )...( 325 ): >Q13167
LQPRGVPLREKK

SEQ ID NO: 11511 - protein, 12 aa, Homo sapiens
  ( 315 )...( 326 ): >Q13167
QPRGVPLREKKA

SEQ ID NO: 11512 - protein, 12 aa, Homo sapiens
  ( 316 )...( 327 ): >Q13167
PRGVPLREKKAT

SEQ ID NO: 11513 - protein, 12 aa, Homo sapiens
  ( 317 )...( 328 ): >Q13167
RGVPLREKKATQ

SEQ ID NO: 11514 - protein, 10 aa, Homo sapiens
  ( 390 )...( 401 ): >Q13167
RKAFLKILSC

SEQ ID NO: 11515 - protein, 12 aa, Homo sapiens
  ( 18 )...( 29 ): >Q99412
RYLGITRPHKML

SEQ ID NO: 11516 - protein, 12 aa, Homo sapiens
  ( 8 )...( 19 ): >Q9UE21
AGSRKPPREMLK

SEQ ID NO: 11517 - protein, 12 aa, Homo sapiens
  ( 9 )...( 20 ): >Q9UE21
GSRKPPREMLKL

SEQ ID NO: 11518 - protein, 12 aa, Homo sapiens
  ( 11 )...( 22 ): >Q9UE21
RKPPREMLKLSG

SEQ ID NO: 11519 - protein, 12 aa, Homo sapiens
  ( 160 )...( 171 ): >Q9UE21
AIVHPVKSLKLR

SEQ ID NO: 11520 - protein, 12 aa, Homo sapiens
  ( 161 )...( 172 ): >Q9UE21
IVHPVKSLKLRR

SEQ ID NO: 11521 - protein, 12 aa, Homo sapiens
  ( 165 )...( 176 ): >Q9UE21
VKSLKLRRPLYA

SEQ ID NO: 11522 - protein, 12 aa, Homo sapiens
  ( 241 )...( 252 ): >Q9UE21
LLIIRSLRQGLR

SEQ ID NO: 11523 - protein, 12 aa, Homo sapiens
  ( 242 )...( 253 ): >Q9UE21
LIIRSLRQGLRV

SEQ ID NO: 11524 - protein, 12 aa, Homo sapiens
  ( 244 )...( 255 ): >Q9UE21
IRSLRQGLRVEK

SEQ ID NO: 11525 - protein, 12 aa, Homo sapiens
  ( 246 )...( 257 ): >Q9UE21
SLRQGLRVEKRL

SEQ ID NO: 11526 - protein, 12 aa, Homo sapiens
  ( 247 )...( 258 ): >Q9UE21
LRQGLRVEKRLK

SEQ ID NO: 11527 - protein, 12 aa, Homo sapiens
  ( 248 )...( 259 ): >Q9UE21
RQGLRVEKRLKT

SEQ ID NO: 11528 - protein, 12 aa, Homo sapiens
  ( 249 )...( 260 ): >Q9UE21
QGLRVEKRLKTK

SEQ ID NO: 11529 - protein, 12 aa, Homo sapiens
  ( 250 )...( 261 ): >Q9UE21
GLRVEKRLKTKA

SEQ ID NO: 11530 - protein, 12 aa, Homo sapiens
  ( 251 )...( 262 ): >Q9UE21
LRVEKRLKTKAV

SEQ ID NO: 11531 - protein, 12 aa, Homo sapiens
  ( 253 )...( 264 ): >Q9UE21
VEKRLKTKAVRM

SEQ ID NO: 11532 - protein, 12 aa, Homo sapiens
  ( 254 )...( 265 ): >Q9UE21
EKRLKTKAVRMI

SEQ ID NO: 11533 - protein, 12 aa, Homo sapiens
  ( 255 )...( 266 ): >Q9UE21
KRLKTKAVRMIA

SEQ ID NO: 11534 - protein, 12 aa, Homo sapiens
  ( 256 )...( 267 ): >Q9UE21
RLKTKAVRMIAI

SEQ ID NO: 11535 - protein, 12 aa, Homo sapiens
  ( 257 )...( 268 ): >Q9UE21
LKTKAVRMIAIV

SEQ ID NO: 11536 - protein, 12 aa, Homo sapiens
  ( 258 )...( 269 ): >Q9UE21
KTKAVRMIAIVL

SEQ ID NO: 11537 - protein, 12 aa, Homo sapiens
  ( 91 )...( 102 ): >Q9UDZ6
AIVHPVKSLKLR

SEQ ID NO: 11538 - protein, 12 aa, Homo sapiens
  ( 92 )...( 103 ): >Q9UDZ6
IVHPVKSLKLRR

SEQ ID NO: 11539 - protein, 12 aa, Homo sapiens
  ( 96 )...( 107 ): >Q9UDZ6
VKSLKLRRPLYA

SEQ ID NO: 11540 - protein, 12 aa, Homo sapiens
  ( 172 )...( 183 ): >Q9UDZ6
LLIIRSLRQGLR

SEQ ID NO: 11541 - protein, 12 aa, Homo sapiens
  ( 173 )...( 184 ): >Q9UDZ6
LIIRSLRQGLRV

SEQ ID NO: 11542 - protein, 12 aa, Homo sapiens
  ( 175 )...( 186 ): >Q9UDZ6
IRSLRQGLRVEK

SEQ ID NO: 11543 - protein, 12 aa, Homo sapiens
  ( 177 )...( 188 ): >Q9UDZ6
SLRQGLRVEKRL

SEQ ID NO: 11544 - protein, 12 aa, Homo sapiens
  ( 178 )...( 189 ): >Q9UDZ6
LRQGLRVEKRLK

SEQ ID NO: 11545 - protein, 12 aa, Homo sapiens
  ( 179 )...( 190 ): >Q9UDZ6
RQGLRVEKRLKT

SEQ ID NO: 11546 - protein, 12 aa, Homo sapiens
  ( 180 )...( 191 ): >Q9UDZ6
QGLRVEKRLKTK

SEQ ID NO: 11547 - protein, 12 aa, Homo sapiens
  ( 181 )...( 192 ): >Q9UDZ6
GLRVEKRLKTKA

SEQ ID NO: 11548 - protein, 12 aa, Homo sapiens
  ( 182 )...( 193 ): >Q9UDZ6
LRVEKRLKTKAV

SEQ ID NO: 11549 - protein, 12 aa, Homo sapiens
  ( 184 )...( 195 ): >Q9UDZ6
VEKRLKTKAVRM

SEQ ID NO: 11550 - protein, 12 aa, Homo sapiens
  ( 185 )...( 196 ): >Q9UDZ6
EKRLKTKAVRMI

SEQ ID NO: 11551 - protein, 12 aa, Homo sapiens
  ( 186 )...( 197 ): >Q9UDZ6
KRLKTKAVRMIA

SEQ ID NO: 11552 - protein, 12 aa, Homo sapiens
  ( 187 )...( 198 ): >Q9UDZ6
RLKTKAVRMIAI

SEQ ID NO: 11553 - protein, 12 aa, Homo sapiens
  ( 188 )...( 199 ): >Q9UDZ6
LKTKAVRMIAIV

SEQ ID NO: 11554 - protein, 12 aa, Homo sapiens
  ( 189 )...( 200 ): >Q9UDZ6
KTKAVRMIAIVL

SEQ ID NO: 11555 - protein, 12 aa, Homo sapiens
  ( 543 )...( 554 ): >O00406
RNLTRNVTVTLK

SEQ ID NO: 11556 - protein, 12 aa, Homo sapiens
  ( 719 )...( 730 ): >O00406
ALVKVFNTYIRK

SEQ ID NO: 11557 - protein, 12 aa, Homo sapiens
  ( 804 )...( 815 ): >O00406
VVLVQLCRIKKK

SEQ ID NO: 11558 - protein, 12 aa, Homo sapiens
  ( 805 )...( 816 ): >O00406
VLVQLCRIKKKK

SEQ ID NO: 11559 - protein, 12 aa, Homo sapiens
  ( 806 )...( 817 ): >O00406
LVQLCRIKKKKQ

SEQ ID NO: 11560 - protein, 12 aa, Homo sapiens
  ( 807 )...( 818 ): >O00406
VQLCRIKKKKQL

SEQ ID NO: 11561 - protein, 12 aa, Homo sapiens
  ( 808 )...( 819 ): >O00406
QLCRIKKKKQLG

SEQ ID NO: 11562 - protein, 12 aa, Homo sapiens
  ( 809 )...( 820 ): >O00406
LCRIKKKKQLGA

SEQ ID NO: 11563 - protein, 12 aa, Homo sapiens
  ( 810 )...( 821 ): >O00406
CRIKKKKQLGAQ

SEQ ID NO: 11564 - protein, 12 aa, Homo sapiens
  ( 814 )...( 825 ): >O00406
KKKQLGAQRKTS

SEQ ID NO: 11565 - protein, 12 aa, Homo sapiens
  ( 815 )...( 826 ): >O00406
KKQLGAQRKTSI

SEQ ID NO: 11566 - protein, 12 aa, Homo sapiens
  ( 816 )...( 827 ): >O00406
KQLGAQRKTSIQ

SEQ ID NO: 11567 - protein, 12 aa, Homo sapiens
  ( 888 )...( 899 ): >O00406
RRYLCCGKLRLA

SEQ ID NO: 11568 - protein, 12 aa, Homo sapiens
  ( 990 )...( 1001 ): >O00406
SCNGKGRMALRR

SEQ ID NO: 11569 - protein, 12 aa, Homo sapiens
  ( 991 )...( 1002 ): >O00406
CNGKGRMALRRT

SEQ ID NO: 11570 - protein, 12 aa, Homo sapiens
  ( 992 )...( 1003 ): >O00406
NGKGRMALRRTS

SEQ ID NO: 11571 - protein, 12 aa, Homo sapiens
  ( 997 )...( 1008 ): >O00406
MALRRTSKRGSL

SEQ ID NO: 11572 - protein, 12 aa, Homo sapiens
  ( 998 )...( 1009 ): >O00406
ALRRTSKRGSLH

SEQ ID NO: 11573 - protein, 12 aa, Homo sapiens
  ( 130 )...( 141 ): >Q9BPV8
NIFLKKPVFAKT

SEQ ID NO: 11574 - protein, 12 aa, Homo sapiens
  ( 227 )...( 238 ): >Q9BPV8
KNNKKLEGKVFV

SEQ ID NO: 11575 - protein, 12 aa, Homo sapiens
  ( 306 )...( 317 ): >Q9BPV8
KLPCMQGRKTTA

SEQ ID NO: 11576 - protein, 12 aa, Homo sapiens
  ( 227 )...( 238 ): >Q9BY21
IAISRYIHKSSR

SEQ ID NO: 11577 - protein, 12 aa, Homo sapiens
  ( 248 )...( 259 ): >Q9BY21
RKHNQSIRVVVA

SEQ ID NO: 11578 - protein, 12 aa, Homo sapiens
  ( 327 )...( 338 ): >Q9BY21
KKSNIRTRSESI

SEQ ID NO: 11579 - protein, 12 aa, Homo sapiens
  ( 249 )...( 260 ): >Q96RV1
LFRAAVPHTGRK

SEQ ID NO: 11580 - protein, 12 aa, Homo sapiens
  ( 251 )...( 262 ): >Q96RV1
RAAVPHTGRKNQ

SEQ ID NO: 11581 - protein, 12 aa, Homo sapiens
  ( 266 )...( 277 ): >Q96RV1
HVVSRKKQKIIK

SEQ ID NO: 11582 - protein, 12 aa, Homo sapiens
  ( 267 )...( 278 ): >Q96RV1
VVSRKKQKIIKM

SEQ ID NO: 11583 - protein, 12 aa, Homo sapiens
  ( 268 )...( 279 ): >Q96RV1
VSRKKQKIIKML

SEQ ID NO: 11584 - protein, 12 aa, Homo sapiens
  ( 269 )...( 280 ): >Q96RV1
SRKKQKIIKMLL

SEQ ID NO: 11585 - protein, 12 aa, Homo sapiens
  ( 270 )...( 281 ): >Q96RV1
RKKQKIIKMLLI

SEQ ID NO: 11586 - protein, 12 aa, Homo sapiens
  ( 350 )...( 361 ): >Q96RV1
AFQLQLCQKRAK

SEQ ID NO: 11587 - protein, 12 aa, Homo sapiens
  ( 352 )...( 363 ): >Q96RV1
QLQLCQKRAKPM

SEQ ID NO: 11588 - protein, 12 aa, Homo sapiens
  ( 358 )...( 369 ): >Q96RV1
KRAKPMEAYTLK

SEQ ID NO: 11589 - protein, 12 aa, Homo sapiens
  ( 46 )...( 57 ): >Q9BWH1
AVVHPIKSAKWR

SEQ ID NO: 11590 - protein, 12 aa, Homo sapiens
  ( 57 )...( 68 ): >Q9BWH1
RRPRTAKMITMA

SEQ ID NO: 11591 - protein, 12 aa, Homo sapiens
  ( 58 )...( 69 ): >Q9BWH1
RPRTAKMITMAV

SEQ ID NO: 11592 - protein, 12 aa, Homo sapiens
  ( 133 )...( 144 ): >Q9BWH1
FIIIKVKSSGIR

SEQ ID NO: 11593 - protein, 12 aa, Homo sapiens
  ( 139 )...( 150 ): >Q9BWH1
KSSGIRVGSSKR

SEQ ID NO: 11594 - protein, 12 aa, Homo sapiens
  ( 140 )...( 151 ): >Q9BWH1
SSGIRVGSSKRK

SEQ ID NO: 11595 - protein, 12 aa, Homo sapiens
  ( 141 )...( 152 ): >Q9BWH1
SGIRVGSSKRKK

SEQ ID NO: 11596 - protein, 12 aa, Homo sapiens
  ( 142 )...( 153 ): >Q9BWH1
GIRVGSSKRKKS

SEQ ID NO: 11597 - protein, 12 aa, Homo sapiens
  ( 143 )...( 154 ): >Q9BWH1
IRVGSSKRKKSE

SEQ ID NO: 11598 - protein, 12 aa, Homo sapiens
  ( 151 )...( 162 ): >Q9BWH1
KKSEKKVTRMVS

SEQ ID NO: 11599 - protein, 12 aa, Homo sapiens
  ( 223 )...( 234 ): >Q9BWH1
KKSFQNVLCLVK

SEQ ID NO: 11600 - protein, 12 aa, Homo sapiens
  ( 138 )...( 149 ): >Q9BXC2
IAISRYIHKSSR

SEQ ID NO: 11601 - protein, 12 aa, Homo sapiens
  ( 159 )...( 170 ): >Q9BXC2
RKHNQSIRVVVA

SEQ ID NO: 11602 - protein, 12 aa, Homo sapiens
  ( 238 )...( 249 ): >Q9BXC2
KKSNIRTRSESI

SEQ ID NO: 11603 - protein, 12 aa, Homo sapiens
  ( 68 )...( 79 ): >O95977
LAAITSHMRSRR

SEQ ID NO: 11604 - protein, 12 aa, Homo sapiens
  ( 228 )...( 239 ): >O95977
RLVQASGQKAPR

SEQ ID NO: 11605 - protein, 12 aa, Homo sapiens
  ( 233 )...( 244 ): >O95977
SGQKAPRPAARR

SEQ ID NO: 11606 - protein, 12 aa, Homo sapiens
  ( 245 )...( 256 ): >O95977
KARRLLKTVLMI

SEQ ID NO: 11607 - protein, 12 aa, Homo sapiens
  ( 81 )...( 92 ): >Q9NZG5
TKKRSLLGTQVF

SEQ ID NO: 11608 - protein, 12 aa, Homo sapiens
  ( 82 )...( 93 ): >Q9NZG5
KKRSLLGTQVFF

SEQ ID NO: 11609 - protein, 12 aa, Homo sapiens
  ( 144 )...( 155 ): >Q9NZG5
LARKNHGPRGWV

SEQ ID NO: 11610 - protein, 12 aa, Homo sapiens
  ( 145 )...( 156 ): >Q9NZG5
ARKNHGPRGWVI

SEQ ID NO: 11611 - protein, 12 aa, Homo sapiens
  ( 216 )...( 227 ): >Q9H244
LYRSYVRTRGVG

SEQ ID NO: 11612 - protein, 12 aa, Homo sapiens
  ( 217 )...( 228 ): >Q9H244
YRSYVRTRGVGK

SEQ ID NO: 11613 - protein, 12 aa, Homo sapiens
  ( 218 )...( 229 ): >Q9H244
RSYVRTRGVGKV

SEQ ID NO: 11614 - protein, 12 aa, Homo sapiens
  ( 219 )...( 230 ): >Q9H244
SYVRTRGVGKVP

SEQ ID NO: 11615 - protein, 12 aa, Homo sapiens
  ( 220 )...( 231 ): >Q9H244
YVRTRGVGKVPR

SEQ ID NO: 11616 - protein, 12 aa, Homo sapiens
  ( 223 )...( 234 ): >Q9H244
TRGVGKVPRKKV

SEQ ID NO: 11617 - protein, 12 aa, Homo sapiens
  ( 225 )...( 236 ): >Q9H244
GVGKVPRKKVNV

SEQ ID NO: 11618 - protein, 12 aa, Homo sapiens
  ( 226 )...( 237 ): >Q9H244
VGKVPRKKVNVK

SEQ ID NO: 11619 - protein, 12 aa, Homo sapiens
  ( 227 )...( 238 ): >Q9H244
GKVPRKKVNVKV

SEQ ID NO: 11620 - protein, 12 aa, Homo sapiens
  ( 228 )...( 239 ): >Q9H244
KVPRKKVNVKVF

SEQ ID NO: 11621 - protein, 12 aa, Homo sapiens
  ( 229 )...( 240 ): >Q9H244
VPRKKVNVKVFI

SEQ ID NO: 11622 - protein, 12 aa, Homo sapiens
  ( 230 )...( 241 ): >Q9H244
PRKKVNVKVFII

SEQ ID NO: 11623 - protein, 12 aa, Homo sapiens
  ( 231 )...( 242 ): >Q9H244
RKKVNVKVFIII

SEQ ID NO: 11624 - protein, 12 aa, Homo sapiens
  ( 57 )...( 68 ): >Q9IP67
TITWRRRIQCSG

SEQ ID NO: 11625 - protein, 12 aa, Homo sapiens
  ( 210 )...( 221 ): >Q9IP67
RISRIVAVSQSR

SEQ ID NO: 11626 - protein, 12 aa, Homo sapiens
  ( 212 )...( 223 ): >Q9IP67
SRIVAVSQSRHK

SEQ ID NO: 11627 - protein, 12 aa, Homo sapiens
  ( 213 )...( 224 ): >Q9IP67
RIVAVSQSRHKG

SEQ ID NO: 11628 - protein, 12 aa, Homo sapiens
  ( 214 )...( 225 ): >Q9IP67
IVAVSQSRHKGR

SEQ ID NO: 11629 - protein, 12 aa, Homo sapiens
  ( 215 )...( 226 ): >Q9IP67
VAVSQSRHKGRI

SEQ ID NO: 11630 - protein, 12 aa, Homo sapiens
  ( 216 )...( 227 ): >Q9IP67
AVSQSRHKGRIV

SEQ ID NO: 11631 - protein, 12 aa, Homo sapiens
  ( 217 )...( 228 ): >Q9IP67
VSQSRHKGRIVR

SEQ ID NO: 11632 - protein, 12 aa, Homo sapiens
  ( 218 )...( 229 ): >Q9IP67
SQSRHKGRIVRV

SEQ ID NO: 11633 - protein, 12 aa, Homo sapiens
  ( 219 )...( 230 ): >Q9IP67
QSRHKGRIVRVL

SEQ ID NO: 11634 - protein, 12 aa, Homo sapiens
  ( 220 )...( 231 ): >Q9IP67
SRHKGRIVRVLI

SEQ ID NO: 11635 - protein, 12 aa, Homo sapiens
  ( 221 )...( 232 ): >Q9IP67
RHKGRIVRVLIA

SEQ ID NO: 11636 - protein, 12 aa, Homo sapiens
  ( 222 )...( 233 ): >Q9IP67
HKGRIVRVLIAV

SEQ ID NO: 11637 - protein, 12 aa, Homo sapiens
  ( 57 )...( 68 ): >Q9IP66
TITWRRRIQCSG

SEQ ID NO: 11638 - protein, 12 aa, Homo sapiens
  ( 210 )...( 221 ): >Q9IP66
RISRIVAVSQSR

SEQ ID NO: 11639 - protein, 12 aa, Homo sapiens
  ( 212 )...( 223 ): >Q9IP66
SRIVAVSQSRHK

SEQ ID NO: 11640 - protein, 12 aa, Homo sapiens
  ( 213 )...( 224 ): >Q9IP66
RIVAVSQSRHKG

SEQ ID NO: 11641 - protein, 12 aa, Homo sapiens
  ( 214 )...( 225 ): >Q9IP66
IVAVSQSRHKGR

SEQ ID NO: 11642 - protein, 12 aa, Homo sapiens
  ( 215 )...( 226 ): >Q9IP66
VAVSQSRHKGRI

SEQ ID NO: 11643 - protein, 12 aa, Homo sapiens
  ( 216 )...( 227 ): >Q9IP66
AVSQSRHKGRIV

SEQ ID NO: 11644 - protein, 12 aa, Homo sapiens
  ( 217 )...( 228 ): >Q9IP66
VSQSRHKGRIVR

SEQ ID NO: 11645 - protein, 12 aa, Homo sapiens
  ( 218 )...( 229 ): >Q9IP66
SQSRHKGRIVRV

SEQ ID NO: 11646 - protein, 12 aa, Homo sapiens
  ( 219 )...( 230 ): >Q9IP66
QSRHKGRIVRVL

SEQ ID NO: 11647 - protein, 12 aa, Homo sapiens
  ( 220 )...( 231 ): >Q9IP66
SRHKGRIVRVLI

SEQ ID NO: 11648 - protein, 12 aa, Homo sapiens
  ( 221 )...( 232 ): >Q9IP66
RHKGRIVRVLIA

SEQ ID NO: 11649 - protein, 12 aa, Homo sapiens
  ( 222 )...( 233 ): >Q9IP66
HKGRIVRVLIAV

SEQ ID NO: 11650 - protein, 16 aa, Homo sapiens
  ( 141 )...( 156 ): >5H1A_HUMAN
PIDYVNKRTPRRAAAL

SEQ ID NO: 11651 - protein, 16 aa, Homo sapiens
  ( 142 )...( 157 ): >5H1A_HUMAN
IDYVNKRTPRRAAALI

SEQ ID NO: 11652 - protein, 16 aa, Homo sapiens
  ( 143 )...( 158 ): >5H1A_HUMAN
DYVNKRTPRRAAALIS

SEQ ID NO: 11653 - protein, 16 aa, Homo sapiens
  ( 144 )...( 159 ): >5H1A_HUMAN
YVNKRTPRRAAALISL

SEQ ID NO: 11654 - protein, 16 aa, Homo sapiens
  ( 145 )...( 160 ): >5H1A_HUMAN
VNKRTPRRAAALISLT

SEQ ID NO: 11655 - protein, 16 aa, Homo sapiens
  ( 146 )...( 161 ): >5H1A_HUMAN
NKRTPRRAAALISLTW

SEQ ID NO: 11656 - protein, 16 aa, Homo sapiens
  ( 147 )...( 162 ): >5H1A_HUMAN
KRTPRRAAALISLTWL

SEQ ID NO: 11657 - protein, 16 aa, Homo sapiens
  ( 148 )...( 163 ): >5H1A_HUMAN
RTPRRAAALISLTWLI

SEQ ID NO: 11658 - protein, 16 aa, Homo sapiens
  ( 210 )...( 225 ): >5H1A_HUMAN
LMLVLYGRIFRAARFR

SEQ ID NO: 11659 - protein, 16 aa, Homo sapiens
  ( 211 )...( 226 ): >5H1A_HUMAN
MLVLYGRIFRAARFRI

SEQ ID NO: 11660 - protein, 16 aa, Homo sapiens
  ( 221 )...( 236 ): >5H1A_HUMAN
AARFRIRKTVKKVEKT

SEQ ID NO: 11661 - protein, 16 aa, Homo sapiens
  ( 222 )...( 237 ): >5H1A_HUMAN
ARFRIRKTVKKVEKTG

SEQ ID NO: 11662 - protein, 16 aa, Homo sapiens
  ( 223 )...( 238 ): >5H1A_HUMAN
RFRIRKTVKKVEKTGA

SEQ ID NO: 11663 - protein, 16 aa, Homo sapiens
  ( 224 )...( 239 ): >5H1A_HUMAN
FRIRKTVKKVEKTGAD

SEQ ID NO: 11664 - protein, 16 aa, Homo sapiens
  ( 225 )...( 240 ): >5H1A_HUMAN
RIRKTVKKVEKTGADT

SEQ ID NO: 11665 - protein, 16 aa, Homo sapiens
  ( 226 )...( 241 ): >5H1A_HUMAN
IRKTVKKVEKTGADTR

SEQ ID NO: 11666 - protein, 16 aa, Homo sapiens
  ( 227 )...( 242 ): >5H1A_HUMAN
RKTVKKVEKTGADTRH

SEQ ID NO: 11667 - protein, 16 aa, Homo sapiens
  ( 328 )...( 343 ): >5H1A_HUMAN
NAEAKRKMALARERKT

SEQ ID NO: 11668 - protein, 16 aa, Homo sapiens
  ( 329 )...( 344 ): >5H1A_HUMAN
AEAKRKMALARERKTV

SEQ ID NO: 11669 - protein, 16 aa, Homo sapiens
  ( 330 )...( 345 ): >5H1A_HUMAN
EAKRKMALARERKTVK

SEQ ID NO: 11670 - protein, 16 aa, Homo sapiens
  ( 331 )...( 346 ): >5H1A_HUMAN
AKRKMALARERKTVKT

SEQ ID NO: 11671 - protein, 16 aa, Homo sapiens
  ( 332 )...( 347 ): >5H1A_HUMAN
KRKMALARERKTVKTL

SEQ ID NO: 11672 - protein, 16 aa, Homo sapiens
  ( 333 )...( 348 ): >5H1A_HUMAN
RKMALARERKTVKTLG

SEQ ID NO: 11673 - protein, 16 aa, Homo sapiens
  ( 334 )...( 349 ): >5H1A_HUMAN
KMALARERKTVKTLGI

SEQ ID NO: 11674 - protein, 16 aa, Homo sapiens
  ( 335 )...( 350 ): >5H1A_HUMAN
MALARERKTVKTLGII

SEQ ID NO: 11675 - protein, 16 aa, Homo sapiens
  ( 336 )...( 351 ): >5H1A_HUMAN
ALARERKTVKTLGIIM

SEQ ID NO: 11676 - protein, 16 aa, Homo sapiens
  ( 337 )...( 352 ): >5H1A_HUMAN
LARERKTVKTLGIIMG

SEQ ID NO: 11677 - protein, 16 aa, Homo sapiens
  ( 338 )...( 353 ): >5H1A_HUMAN
ARERKTVKTLGIIMGT

SEQ ID NO: 11678 - protein, 16 aa, Homo sapiens
  ( 339 )...( 354 ): >5H1A_HUMAN
RERKTVKTLGIIMGTF

SEQ ID NO: 11679 - protein, 16 aa, Homo sapiens
  ( 64 )...( 79 ): >5H1B_HUMAN
TLSNAFVIATVYRTRK

SEQ ID NO: 11680 - protein, 16 aa, Homo sapiens
  ( 65 )...( 80 ): >5H1B_HUMAN
LSNAFVIATVYRTRKL

SEQ ID NO: 11681 - protein, 16 aa, Homo sapiens
  ( 66 )...( 81 ): >5H1B_HUMAN
SNAFVIATVYRTRKLH

SEQ ID NO: 11682 - protein, 16 aa, Homo sapiens
  ( 67 )...( 82 ): >5H1B_HUMAN
NAFVIATVYRTRKLHT

SEQ ID NO: 11683 - protein, 16 aa, Homo sapiens
  ( 68 )...( 83 ): >5H1B_HUMAN
AFVIATVYRTRKLHTP

SEQ ID NO: 11684 - protein, 16 aa, Homo sapiens
  ( 69 )...( 84 ): >5H1B_HUMAN
FVIATVYRTRKLHTPA

SEQ ID NO: 11685 - protein, 16 aa, Homo sapiens
  ( 70 )...( 85 ): >5H1B_HUMAN
VIATVYRTRKLHTPAN

SEQ ID NO: 11686 - protein, 16 aa, Homo sapiens
  ( 71 )...( 86 ): >5H1B_HUMAN
IATVYRTRKLHTPANY

SEQ ID NO: 11687 - protein, 16 aa, Homo sapiens
  ( 72 )...( 87 ): >5H1B_HUMAN
ATVYRTRKLHTPANYL

SEQ ID NO: 11688 - protein, 16 aa, Homo sapiens
  ( 73 )...( 88 ): >5H1B_HUMAN
TVYRTRKLHTPANYLI

SEQ ID NO: 11689 - protein, 16 aa, Homo sapiens
  ( 74 )...( 89 ): >5H1B_HUMAN
VYRTRKLHTPANYLIA

SEQ ID NO: 11690 - protein, 16 aa, Homo sapiens
  ( 76 )...( 91 ): >5H1B_HUMAN
RTRKLHTPANYLIASL

SEQ ID NO: 11691 - protein, 16 aa, Homo sapiens
  ( 154 )...( 169 ): >5H1B_HUMAN
AVEYSAKRTPKRAAVM

SEQ ID NO: 11692 - protein, 16 aa, Homo sapiens
  ( 155 )...( 170 ): >5H1B_HUMAN
VEYSAKRTPKRAAVMI

SEQ ID NO: 11693 - protein, 16 aa, Homo sapiens
  ( 156 )...( 171 ): >5H1B_HUMAN
EYSAKRTPKRAAVMIA

SEQ ID NO: 11694 - protein, 16 aa, Homo sapiens
  ( 157 )...( 172 ): >5H1B_HUMAN
YSAKRTPKRAAVMIAL

SEQ ID NO: 11695 - protein, 16 aa, Homo sapiens
  ( 158 )...( 173 ): >5H1B_HUMAN
SAKRTPKRAAVMIALV

SEQ ID NO: 11696 - protein, 16 aa, Homo sapiens
  ( 159 )...( 174 ): >5H1B_HUMAN
AKRTPKRAAVMIALVW

SEQ ID NO: 11697 - protein, 16 aa, Homo sapiens
  ( 160 )...( 175 ): >5H1B_HUMAN
KRTPKRAAVMIALVWV

SEQ ID NO: 11698 - protein, 16 aa, Homo sapiens
  ( 226 )...( 241 ): >5H1B_HUMAN
ALYGRIYVEARSRILK

SEQ ID NO: 11699 - protein, 16 aa, Homo sapiens
  ( 227 )...( 242 ): >5H1B_HUMAN
LYGRIYVEARSRILKQ

SEQ ID NO: 11700 - protein, 16 aa, Homo sapiens
  ( 228 )...( 243 ): >5H1B_HUMAN
YGRIYVEARSRILKQT

SEQ ID NO: 11701 - protein, 16 aa, Homo sapiens
  ( 229 )...( 244 ): >5H1B_HUMAN
GRIYVEARSRILKQTP

SEQ ID NO: 11702 - protein, 16 aa, Homo sapiens
  ( 233 )...( 248 ): >5H1B_HUMAN
VEARSRILKQTPNRTG

SEQ ID NO: 11703 - protein, 16 aa, Homo sapiens
  ( 234 )...( 249 ): >5H1B_HUMAN
EARSRILKQTPNRTGK

SEQ ID NO: 11704 - protein, 16 aa, Homo sapiens
  ( 235 )...( 250 ): >5H1B_HUMAN
ARSRILKQTPNRTGKR

SEQ ID NO: 11705 - protein, 16 aa, Homo sapiens
  ( 237 )...( 252 ): >5H1B_HUMAN
SRILKQTPNRTGKRLT

SEQ ID NO: 11706 - protein, 16 aa, Homo sapiens
  ( 238 )...( 253 ): >5H1B_HUMAN
RILKQTPNRTGKRLTR

SEQ ID NO: 11707 - protein, 16 aa, Homo sapiens
  ( 239 )...( 254 ): >5H1B_HUMAN
ILKQTPNRTGKRLTRA

SEQ ID NO: 11708 - protein, 16 aa, Homo sapiens
  ( 240 )...( 255 ): >5H1B_HUMAN
LKQTPNRTGKRLTRAQ

SEQ ID NO: 11709 - protein, 16 aa, Homo sapiens
  ( 241 )...( 256 ): >5H1B_HUMAN
KQTPNRTGKRLTRAQL

SEQ ID NO: 11710 - protein, 16 aa, Homo sapiens
  ( 242 )...( 257 ): >5H1B_HUMAN
QTPNRTGKRLTRAQLI

SEQ ID NO: 11711 - protein, 16 aa, Homo sapiens
  ( 243 )...( 258 ): >5H1B_HUMAN
TPNRTGKRLTRAQLIT

SEQ ID NO: 11712 - protein, 16 aa, Homo sapiens
  ( 244 )...( 259 ): >5H1B_HUMAN
PNRTGKRLTRAQLITD

SEQ ID NO: 11713 - protein, 16 aa, Homo sapiens
  ( 245 )...( 260 ): >5H1B_HUMAN
NRTGKRLTRAQLITDS

SEQ ID NO: 11714 - protein, 16 aa, Homo sapiens
  ( 246 )...( 261 ): >5H1B_HUMAN
RTGKRLTRAQLITDSP

SEQ ID NO: 11715 - protein, 16 aa, Homo sapiens
  ( 288 )...( 303 ): >5H1B_HUMAN
NQVKVRVSDALLEKKK

SEQ ID NO: 11716 - protein, 16 aa, Homo sapiens
  ( 289 )...( 304 ): >5H1B_HUMAN
QVKVRVSDALLEKKKL

SEQ ID NO: 11717 - protein, 16 aa, Homo sapiens
  ( 290 )...( 305 ): >5H1B_HUMAN
VKVRVSDALLEKKKLM

SEQ ID NO: 11718 - protein, 16 aa, Homo sapiens
  ( 291 )...( 306 ): >5H1B_HUMAN
KVRVSDALLEKKKLMA

SEQ ID NO: 11719 - protein, 16 aa, Homo sapiens
  ( 293 )...( 308 ): >5H1B_HUMAN
RVSDALLEKKKLMAAR

SEQ ID NO: 11720 - protein, 16 aa, Homo sapiens
  ( 296 )...( 311 ): >5H1B_HUMAN
DALLEKKKLMAARERK

SEQ ID NO: 11721 - protein, 16 aa, Homo sapiens
  ( 297 )...( 312 ): >5H1B_HUMAN
ALLEKKKLMAARERKA

SEQ ID NO: 11722 - protein, 16 aa, Homo sapiens
  ( 298 )...( 313 ): >5H1B_HUMAN
LLEKKKLMAARERKAT

SEQ ID NO: 11723 - protein, 16 aa, Homo sapiens
  ( 299 )...( 314 ): >5H1B_HUMAN
LEKKKLMAARERKATK

SEQ ID NO: 11724 - protein, 16 aa, Homo sapiens
  ( 300 )...( 315 ): >5H1B_HUMAN
EKKKLMAARERKATKT

SEQ ID NO: 11725 - protein, 16 aa, Homo sapiens
  ( 301 )...( 316 ): >5H1B_HUMAN
KKKLMAARERKATKTL

SEQ ID NO: 11726 - protein, 16 aa, Homo sapiens
  ( 302 )...( 317 ): >5H1B_HUMAN
KKLMAARERKATKTLG

SEQ ID NO: 11727 - protein, 16 aa, Homo sapiens
  ( 303 )...( 318 ): >5H1B_HUMAN
KLMAARERKATKTLGI

SEQ ID NO: 11728 - protein, 16 aa, Homo sapiens
  ( 304 )...( 319 ): >5H1B_HUMAN
LMAARERKATKTLGII

SEQ ID NO: 11729 - protein, 16 aa, Homo sapiens
  ( 305 )...( 320 ): >5H1B_HUMAN
MAARERKATKTLGIIL

SEQ ID NO: 11730 - protein, 16 aa, Homo sapiens
  ( 308 )...( 323 ): >5H1B_HUMAN
RERKATKTLGIILGAF

SEQ ID NO: 11731 - protein, 16 aa, Homo sapiens
  ( 146 )...( 161 ): >5H1D_HUMAN
YSKRRTAGHAATMIAI

SEQ ID NO: 11732 - protein, 16 aa, Homo sapiens
  ( 147 )...( 162 ): >5H1D_HUMAN
SKRRTAGHAATMIAIV

SEQ ID NO: 11733 - protein, 16 aa, Homo sapiens
  ( 148 )...( 163 ): >5H1D_HUMAN
KRRTAGHAATMIAIVW

SEQ ID NO: 11734 - protein, 16 aa, Homo sapiens
  ( 210 )...( 225 ): >5H1D_HUMAN
SVLLIILYGRIYRAAR

SEQ ID NO: 11735 - protein, 16 aa, Homo sapiens
  ( 211 )...( 226 ): >5H1D_HUMAN
VLLIILYGRIYRAARN

SEQ ID NO: 11736 - protein, 16 aa, Homo sapiens
  ( 212 )...( 227 ): >5H1D_HUMAN
LLIILYGRIYRAARNR

SEQ ID NO: 11737 - protein, 16 aa, Homo sapiens
  ( 213 )...( 228 ): >5H1D_HUMAN
LIILYGRIYRAARNRI

SEQ ID NO: 11738 - protein, 16 aa, Homo sapiens
  ( 214 )...( 229 ): >5H1D_HUMAN
IILYGRIYRAARNRIL

SEQ ID NO: 11739 - protein, 16 aa, Homo sapiens
  ( 275 )...( 290 ): >5H1D_HUMAN
NHVKIKLADSALERKR

SEQ ID NO: 11740 - protein, 16 aa, Homo sapiens
  ( 276 )...( 291 ): >5H1D_HUMAN
HVKIKLADSALERKRI

SEQ ID NO: 11741 - protein, 16 aa, Homo sapiens
  ( 277 )...( 292 ): >5H1D_HUMAN
VKIKLADSALERKRIS

SEQ ID NO: 11742 - protein, 16 aa, Homo sapiens
  ( 278 )...( 293 ): >5H1D_HUMAN
KIKLADSALERKRISA

SEQ ID NO: 11743 - protein, 16 aa, Homo sapiens
  ( 280 )...( 295 ): >5H1D_HUMAN
KLADSALERKRISAAR

SEQ ID NO: 11744 - protein, 16 aa, Homo sapiens
  ( 284 )...( 299 ): >5H1D_HUMAN
SALERKRISAARERKA

SEQ ID NO: 11745 - protein, 16 aa, Homo sapiens
  ( 285 )...( 300 ): >5H1D_HUMAN
ALERKRISAARERKAT

SEQ ID NO: 11746 - protein, 16 aa, Homo sapiens
  ( 286 )...( 301 ): >5H1D_HUMAN
LERKRISAARERKATK

SEQ ID NO: 11747 - protein, 16 aa, Homo sapiens
  ( 287 )...( 302 ): >5H1D_HUMAN
ERKRISAARERKATKI

SEQ ID NO: 11748 - protein, 16 aa, Homo sapiens
  ( 288 )...( 303 ): >5H1D_HUMAN
RKRISAARERKATKIL

SEQ ID NO: 11749 - protein, 16 aa, Homo sapiens
  ( 289 )...( 304 ): >5H1D_HUMAN
KRISAARERKATKILG

SEQ ID NO: 11750 - protein, 16 aa, Homo sapiens
  ( 290 )...( 305 ): >5H1D_HUMAN
RISAARERKATKILGI

SEQ ID NO: 11751 - protein, 16 aa, Homo sapiens
  ( 291 )...( 306 ): >5H1D_HUMAN
ISAARERKATKILGII

SEQ ID NO: 11752 - protein, 16 aa, Homo sapiens
  ( 292 )...( 307 ): >5H1D_HUMAN
SAARERKATKILGIIL

SEQ ID NO: 11753 - protein, 16 aa, Homo sapiens
  ( 295 )...( 310 ): >5H1D_HUMAN
RERKATKILGIILGAF

SEQ ID NO: 11754 - protein, 16 aa, Homo sapiens
  ( 122 )...( 137 ): >5H1E_HUMAN
WAITNAIEYARKRTAK

SEQ ID NO: 11755 - protein, 16 aa, Homo sapiens
  ( 123 )...( 138 ): >5H1E_HUMAN
AITNAIEYARKRTAKR

SEQ ID NO: 11756 - protein, 16 aa, Homo sapiens
  ( 124 )...( 139 ): >5H1E_HUMAN
ITNAIEYARKRTAKRA

SEQ ID NO: 11757 - protein, 16 aa, Homo sapiens
  ( 125 )...( 140 ): >5H1E_HUMAN
TNAIEYARKRTAKRAA

SEQ ID NO: 11758 - protein, 16 aa, Homo sapiens
  ( 126 )...( 141 ): >5H1E_HUMAN
NAIEYARKRTAKRAAL

SEQ ID NO: 11759 - protein, 16 aa, Homo sapiens
  ( 127 )...( 142 ): >5H1E_HUMAN
AIEYARKRTAKRAALM

SEQ ID NO: 11760 - protein, 16 aa, Homo sapiens
  ( 128 )...( 143 ): >5H1E_HUMAN
IEYARKRTAKRAALMI

SEQ ID NO: 11761 - protein, 16 aa, Homo sapiens
  ( 129 )...( 144 ): >5H1E_HUMAN
EYARKRTAKRAALMIL

SEQ ID NO: 11762 - protein, 16 aa, Homo sapiens
  ( 130 )...( 145 ): >5H1E_HUMAN
YARKRTAKRAALMILT

SEQ ID NO: 11763 - protein, 16 aa, Homo sapiens
  ( 131 )...( 146 ): >5H1E_HUMAN
ARKRTAKRAALMILTV

SEQ ID NO: 11764 - protein, 16 aa, Homo sapiens
  ( 132 )...( 147 ): >5H1E_HUMAN
RKRTAKRAALMILTVW

SEQ ID NO: 11765 - protein, 16 aa, Homo sapiens
  ( 133 )...( 148 ): >5H1E_HUMAN
KRTAKRAALMILTVWT

SEQ ID NO: 11766 - protein, 16 aa, Homo sapiens
  ( 134 )...( 149 ): >5H1E_HUMAN
RTAKRAALMILTVWTI

SEQ ID NO: 11767 - protein, 16 aa, Homo sapiens
  ( 204 )...( 219 ): >5H1E_HUMAN
RIYHAAKSLYQKRGSS

SEQ ID NO: 11768 - protein, 16 aa, Homo sapiens
  ( 205 )...( 220 ): >5H1E_HUMAN
IYHAAKSLYQKRGSSR

SEQ ID NO: 11769 - protein, 16 aa, Homo sapiens
  ( 207 )...( 222 ): >5H1E_HUMAN
HAAKSLYQKRGSSRHL

SEQ ID NO: 11770 - protein, 16 aa, Homo sapiens
  ( 208 )...( 223 ): >5H1E_HUMAN
AAKSLYQKRGSSRHLS

SEQ ID NO: 11771 - protein, 16 aa, Homo sapiens
  ( 276 )...( 291 ): >5H1E_HUMAN
GERQQISSTRERKAAR

SEQ ID NO: 11772 - protein, 16 aa, Homo sapiens
  ( 277 )...( 292 ): >5H1E_HUMAN
ERQQISSTRERKAARI

SEQ ID NO: 11773 - protein, 16 aa, Homo sapiens
  ( 278 )...( 293 ): >5H1E_HUMAN
RQQISSTRERKAARIL

SEQ ID NO: 11774 - protein, 16 aa, Homo sapiens
  ( 279 )...( 294 ): >5H1E_HUMAN
QQISSTRERKAARILG

SEQ ID NO: 11775 - protein, 16 aa, Homo sapiens
  ( 280 )...( 295 ): >5H1E_HUMAN
QISSTRERKAARILGL

SEQ ID NO: 11776 - protein, 16 aa, Homo sapiens
  ( 281 )...( 296 ): >5H1E_HUMAN
ISSTRERKAARILGLI

SEQ ID NO: 11777 - protein, 16 aa, Homo sapiens
  ( 282 )...( 297 ): >5H1E_HUMAN
SSTRERKAARILGLIL

SEQ ID NO: 11778 - protein, 16 aa, Homo sapiens
  ( 283 )...( 298 ): >5H1E_HUMAN
STRERKAARILGLILG

SEQ ID NO: 11779 - protein, 16 aa, Homo sapiens
  ( 284 )...( 299 ): >5H1E_HUMAN
TRERKAARILGLILGA

SEQ ID NO: 11780 - protein, 16 aa, Homo sapiens
  ( 285 )...( 300 ): >5H1E_HUMAN
RERKAARILGLILGAF

SEQ ID NO: 11781 - protein, 16 aa, Homo sapiens
  ( 123 )...( 138 ): >5H1F_HUMAN
RAITDAVEYARKRTPK

SEQ ID NO: 11782 - protein, 16 aa, Homo sapiens
  ( 128 )...( 143 ): >5H1F_HUMAN
AVEYARKRTPKHAGIM

SEQ ID NO: 11783 - protein, 16 aa, Homo sapiens
  ( 129 )...( 144 ): >5H1F_HUMAN
VEYARKRTPKHAGIMI

SEQ ID NO: 11784 - protein, 16 aa, Homo sapiens
  ( 130 )...( 145 ): >5H1F_HUMAN
EYARKRTPKHAGIMIT

SEQ ID NO: 11785 - protein, 16 aa, Homo sapiens
  ( 131 )...( 146 ): >5H1F_HUMAN
YARKRTPKHAGIMITI

SEQ ID NO: 11786 - protein, 16 aa, Homo sapiens
  ( 132 )...( 147 ): >5H1F_HUMAN
ARKRTPKHAGIMITIV

SEQ ID NO: 11787 - protein, 16 aa, Homo sapiens
  ( 133 )...( 148 ): >5H1F_HUMAN
RKRTPKHAGIMITIVW

SEQ ID NO: 11788 - protein, 16 aa, Homo sapiens
  ( 134 )...( 149 ): >5H1F_HUMAN
KRTPKHAGIMITIVWI

SEQ ID NO: 11789 - protein, 16 aa, Homo sapiens
  ( 206 )...( 221 ): >5H1F_HUMAN
RAAKTLYHKRQASRIA

SEQ ID NO: 11790 - protein, 16 aa, Homo sapiens
  ( 207 )...( 222 ): >5H1F_HUMAN
AAKTLYHKRQASRIAK

SEQ ID NO: 11791 - protein, 16 aa, Homo sapiens
  ( 208 )...( 223 ): >5H1F_HUMAN
AKTLYHKRQASRIAKE

SEQ ID NO: 11792 - protein, 16 aa, Homo sapiens
  ( 279 )...( 294 ): >5H1F_HUMAN
RRQKISGTRERKAATT

SEQ ID NO: 11793 - protein, 16 aa, Homo sapiens
  ( 280 )...( 295 ): >5H1F_HUMAN
RQKISGTRERKAATTL

SEQ ID NO: 11794 - protein, 16 aa, Homo sapiens
  ( 281 )...( 296 ): >5H1F_HUMAN
QKISGTRERKAATTLG

SEQ ID NO: 11795 - protein, 16 aa, Homo sapiens
  ( 184 )...( 199 ): >5H2A_HUMAN
SRFNSRTKAFLKIIAV

SEQ ID NO: 11796 - protein, 16 aa, Homo sapiens
  ( 186 )...( 201 ): >5H2A_HUMAN
FNSRTKAFLKIIAVWT

SEQ ID NO: 11797 - protein, 16 aa, Homo sapiens
  ( 187 )...( 202 ): >5H2A_HUMAN
NSRTKAFLKIIAVWTI

SEQ ID NO: 11798 - protein, 16 aa, Homo sapiens
  ( 188 )...( 203 ): >5H2A_HUMAN
SRTKAFLKIIAVWTIS

SEQ ID NO: 11799 - protein, 16 aa, Homo sapiens
  ( 189 )...( 204 ): >5H2A_HUMAN
RTKAFLKIIAVWTISV

SEQ ID NO: 11800 - protein, 16 aa, Homo sapiens
  ( 296 )...( 311 ): >5H2A_HUMAN
QRSIHREPGSYTGRRT

SEQ ID NO: 11801 - protein, 16 aa, Homo sapiens
  ( 297 )...( 312 ): >5H2A_HUMAN
RSIHREPGSYTGRRTM

SEQ ID NO: 11802 - protein, 16 aa, Homo sapiens
  ( 308 )...( 323 ): >5H2A_HUMAN
GRRTMQSISNEQKACK

SEQ ID NO: 11803 - protein, 16 aa, Homo sapiens
  ( 309 )...( 324 ): >5H2A_HUMAN
RRTMQSISNEQKACKV

SEQ ID NO: 11804 - protein, 16 aa, Homo sapiens
  ( 418 )...( 433 ): >5H2A_HUMAN
AYKSSQLQMGQKKNSK

SEQ ID NO: 11805 - protein, 16 aa, Homo sapiens
  ( 155 )...( 170 ): >5H2B_HUMAN
IAIKKPIQANQYNSRA

SEQ ID NO: 11806 - protein, 16 aa, Homo sapiens
  ( 239 )...( 254 ): >5H2B_HUMAN
LTIHALQKKAYLVKNK

SEQ ID NO: 11807 - protein, 16 aa, Homo sapiens
  ( 240 )...( 255 ): >5H2B_HUMAN
TIHALQKKAYLVKNKP

SEQ ID NO: 11808 - protein, 16 aa, Homo sapiens
  ( 241 )...( 256 ): >5H2B_HUMAN
IHALQKKAYLVKNKPP

SEQ ID NO: 11809 - protein, 16 aa, Homo sapiens
  ( 249 )...( 264 ): >5H2B_HUMAN
YLVKNKPPQRLTWLTV

SEQ ID NO: 11810 - protein, 16 aa, Homo sapiens
  ( 250 )...( 265 ): >5H2B_HUMAN
LVKNKPPQRLTWLTVS

SEQ ID NO: 11811 - protein, 16 aa, Homo sapiens
  ( 251 )...( 266 ): >5H2B_HUMAN
VKNKPPQRLTWLTVST

SEQ ID NO: 11812 - protein, 16 aa, Homo sapiens
  ( 252 )...( 267 ): >5H2B_HUMAN
KNKPPQRLTWLTVSTV

SEQ ID NO: 11813 - protein, 16 aa, Homo sapiens
  ( 300 )...( 315 ): >5H2B_HUMAN
TLMRRTSTIGKKSVQT

SEQ ID NO: 11814 - protein, 16 aa, Homo sapiens
  ( 301 )...( 316 ): >5H2B_HUMAN
LMRRTSTIGKKSVQTI

SEQ ID NO: 11815 - protein, 16 aa, Homo sapiens
  ( 302 )...( 317 ): >5H2B_HUMAN
MRRTSTIGKKSVQTIS

SEQ ID NO: 11816 - protein, 16 aa, Homo sapiens
  ( 303 )...( 318 ): >5H2B_HUMAN
RRTSTIGKKSVQTISN

SEQ ID NO: 11817 - protein, 16 aa, Homo sapiens
  ( 392 )...( 407 ): >5H2B_HUMAN
GRYITCNYRATKSVKT

SEQ ID NO: 11818 - protein, 16 aa, Homo sapiens
  ( 393 )...( 408 ): >5H2B_HUMAN
RYITCNYRATKSVKTL

SEQ ID NO: 11819 - protein, 16 aa, Homo sapiens
  ( 394 )...( 409 ): >5H2B_HUMAN
YITCNYRATKSVKTLR

SEQ ID NO: 11820 - protein, 16 aa, Homo sapiens
  ( 395 )...( 410 ): >5H2B_HUMAN
ITCNYRATKSVKTLRK

SEQ ID NO: 11821 - protein, 16 aa, Homo sapiens
  ( 396 )...( 411 ): >5H2B_HUMAN
TCNYRATKSVKTLRKR

SEQ ID NO: 11822 - protein, 16 aa, Homo sapiens
  ( 397 )...( 412 ): >5H2B_HUMAN
CNYRATKSVKTLRKRS

SEQ ID NO: 11823 - protein, 16 aa, Homo sapiens
  ( 399 )...( 414 ): >5H2B_HUMAN
YRATKSVKTLRKRSSK

SEQ ID NO: 11824 - protein, 16 aa, Homo sapiens
  ( 400 )...( 415 ): >5H2B_HUMAN
RATKSVKTLRKRSSKI

SEQ ID NO: 11825 - protein, 16 aa, Homo sapiens
  ( 401 )...( 416 ): >5H2B_HUMAN
ATKSVKTLRKRSSKIY

SEQ ID NO: 11826 - protein, 16 aa, Homo sapiens
  ( 402 )...( 417 ): >5H2B_HUMAN
TKSVKTLRKRSSKIYF

SEQ ID NO: 11827 - protein, 16 aa, Homo sapiens
  ( 162 )...( 177 ): >5H2C_HUMAN
HSRFNSRTKAIMKIAI

SEQ ID NO: 11828 - protein, 16 aa, Homo sapiens
  ( 163 )...( 178 ): >5H2C_HUMAN
SRFNSRTKAIMKIAIV

SEQ ID NO: 11829 - protein, 16 aa, Homo sapiens
  ( 164 )...( 179 ): >5H2C_HUMAN
RFNSRTKAIMKIAIVW

SEQ ID NO: 11830 - protein, 16 aa, Homo sapiens
  ( 165 )...( 180 ): >5H2C_HUMAN
FNSRTKAIMKIAIVWA

SEQ ID NO: 11831 - protein, 16 aa, Homo sapiens
  ( 166 )...( 181 ): >5H2C_HUMAN
NSRTKAIMKIAIVWAI

SEQ ID NO: 11832 - protein, 16 aa, Homo sapiens
  ( 167 )...( 182 ): >5H2C_HUMAN
SRTKAIMKIAIVWAIS

SEQ ID NO: 11833 - protein, 16 aa, Homo sapiens
  ( 295 )...( 310 ): >5H2C_HUMAN
RPRGTMQAINNERKAS

SEQ ID NO: 11834 - protein, 16 aa, Homo sapiens
  ( 296 )...( 311 ): >5H2C_HUMAN
PRGTMQAINNERKASK

SEQ ID NO: 11835 - protein, 16 aa, Homo sapiens
  ( 297 )...( 312 ): >5H2C_HUMAN
RGTMQAINNERKASKV

SEQ ID NO: 11836 - protein, 16 aa, Homo sapiens
  ( 387 )...( 402 ): >5H2C_HUMAN
YKVEKKPPVRQIPRVA

SEQ ID NO: 11837 - protein, 16 aa, Homo sapiens
  ( 388 )...( 403 ): >5H2C_HUMAN
KVEKKPPVRQIPRVAA

SEQ ID NO: 11838 - protein, 16 aa, Homo sapiens
  ( 389 )...( 404 ): >5H2C_HUMAN
VEKKPPVRQIPRVAAT

SEQ ID NO: 11839 - protein, 16 aa, Homo sapiens
  ( 390 )...( 405 ): >5H2C_HUMAN
EKKPPVRQIPRVAATA

SEQ ID NO: 11840 - protein, 16 aa, Homo sapiens
  ( 391 )...( 406 ): >5H2C_HUMAN
KKPPVRQIPRVAATAL

SEQ ID NO: 11841 - protein, 16 aa, Homo sapiens
  ( 392 )...( 407 ): >5H2C_HUMAN
KPPVRQIPRVAATALS

SEQ ID NO: 11842 - protein, 16 aa, Homo sapiens
  ( 394 )...( 409 ): >5H2C_HUMAN
PVRQIPRVAATALSGR

SEQ ID NO: 11843 - protein, 16 aa, Homo sapiens
  ( 39 )...( 54 ): >5H4_HUMAN
LVMVAVCWDRQLRKIK

SEQ ID NO: 11844 - protein, 16 aa, Homo sapiens
  ( 40 )...( 55 ): >5H4_HUMAN
VMVAVCWDRQLRKIKT

SEQ ID NO: 11845 - protein, 16 aa, Homo sapiens
  ( 41 )...( 56 ): >5H4_HUMAN
MVAVCWDRQLRKIKTN

SEQ ID NO: 11846 - protein, 16 aa, Homo sapiens
  ( 48 )...( 63 ): >5H4_HUMAN
RQLRKIKTNYFIVSLA

SEQ ID NO: 11847 - protein, 16 aa, Homo sapiens
  ( 49 )...( 64 ): >5H4_HUMAN
QLRKIKTNYFIVSLAF

SEQ ID NO: 11848 - protein, 16 aa, Homo sapiens
  ( 50 )...( 65 ): >5H4_HUMAN
LRKIKTNYFIVSLAFA

SEQ ID NO: 11849 - protein, 16 aa, Homo sapiens
  ( 125 )...( 140 ): >5H4_HUMAN
QPLVYRNKMTPLRIAL

SEQ ID NO: 11850 - protein, 16 aa, Homo sapiens
  ( 128 )...( 143 ): >5H4_HUMAN
VYRNKMTPLRIALMLG

SEQ ID NO: 11851 - protein, 16 aa, Homo sapiens
  ( 129 )...( 144 ): >5H4_HUMAN
YRNKMTPLRIALMLGG

SEQ ID NO: 11852 - protein, 16 aa, Homo sapiens
  ( 250 )...( 265 ): >5H4_HUMAN
RMRTETKAAKTLCIIM

SEQ ID NO: 11853 - protein, 16 aa, Homo sapiens
  ( 58 )...( 73 ): >5H5A_HUMAN
NLLVLATILRVRTFHR

SEQ ID NO: 11854 - protein, 16 aa, Homo sapiens
  ( 60 )...( 75 ): >5H5A_HUMAN
LVLATILRVRTFHRVP

SEQ ID NO: 11855 - protein, 16 aa, Homo sapiens
  ( 61 )...( 76 ): >5H5A_HUMAN
VLATILRVRTFHRVPH

SEQ ID NO: 11856 - protein, 16 aa, Homo sapiens
  ( 62 )...( 77 ): >5H5A_HUMAN
LATILRVRTFHRVPHN

SEQ ID NO: 11857 - protein, 16 aa, Homo sapiens
  ( 63 )...( 78 ): >5H5A_HUMAN
ATILRVRTFHRVPHNL

SEQ ID NO: 11858 - protein, 16 aa, Homo sapiens
  ( 64 )...( 79 ): >5H5A_HUMAN
TILRVRTFHRVPHNLV

SEQ ID NO: 11859 - protein, 16 aa, Homo sapiens
  ( 65 )...( 80 ): >5H5A_HUMAN
ILRVRTFHRVPHNLVA

SEQ ID NO: 11860 - protein, 16 aa, Homo sapiens
  ( 66 )...( 81 ): >5H5A_HUMAN
LRVRTFHRVPHNLVAS

SEQ ID NO: 11861 - protein, 16 aa, Homo sapiens
  ( 97 )...( 112 ): >5H5A_HUMAN
SLVHELSGRRWQLGRR

SEQ ID NO: 11862 - protein, 16 aa, Homo sapiens
  ( 98 )...( 113 ): >5H5A_HUMAN
LVHELSGRRWQLGRRL

SEQ ID NO: 11863 - protein, 16 aa, Homo sapiens
  ( 99 )...( 114 ): >5H5A_HUMAN
VHELSGRRWQLGRRLC

SEQ ID NO: 11864 - protein, 16 aa, Homo sapiens
  ( 101 )...( 116 ): >5H5A_HUMAN
ELSGRRWQLGRRLCQL

SEQ ID NO: 11865 - protein, 16 aa, Homo sapiens
  ( 142 )...( 157 ): >5H5A_HUMAN
SITRHMEYTLRTRKCV

SEQ ID NO: 11866 - protein, 16 aa, Homo sapiens
  ( 143 )...( 158 ): >5H5A_HUMAN
ITRHMEYTLRTRKCVS

SEQ ID NO: 11867 - protein, 16 aa, Homo sapiens
  ( 149 )...( 164 ): >5H5A_HUMAN
YTLRTRKCVSNVMIAL

SEQ ID NO: 11868 - protein, 16 aa, Homo sapiens
  ( 150 )...( 165 ): >5H5A_HUMAN
TLRTRKCVSNVMIALT

SEQ ID NO: 11869 - protein, 16 aa, Homo sapiens
  ( 151 )...( 166 ): >5H5A_HUMAN
LRTRKCVSNVMIALTW

SEQ ID NO: 11870 - protein, 16 aa, Homo sapiens
  ( 152 )...( 167 ): >5H5A_HUMAN
RTRKCVSNVMIALTWA

SEQ ID NO: 11871 - protein, 16 aa, Homo sapiens
  ( 222 )...( 237 ): >5H5A_HUMAN
KIYKAAKFRVGSRKTN

SEQ ID NO: 11872 - protein, 16 aa, Homo sapiens
  ( 223 )...( 238 ): >5H5A_HUMAN
IYKAAKFRVGSRKTNS

SEQ ID NO: 11873 - protein, 16 aa, Homo sapiens
  ( 224 )...( 239 ): >5H5A_HUMAN
YKAAKFRVGSRKTNSV

SEQ ID NO: 11874 - protein, 16 aa, Homo sapiens
  ( 225 )...( 240 ): >5H5A_HUMAN
KAAKFRVGSRKTNSVS

SEQ ID NO: 11875 - protein, 16 aa, Homo sapiens
  ( 227 )...( 242 ): >5H5A_HUMAN
AKFRVGSRKTNSVSPI

SEQ ID NO: 11876 - protein, 16 aa, Homo sapiens
  ( 228 )...( 243 ): >5H5A_HUMAN
KFRVGSRKTNSVSPIS

SEQ ID NO: 11877 - protein, 16 aa, Homo sapiens
  ( 128 )...( 143 ): >5H6_HUMAN
ILSPLRYKLRMTPLRA

SEQ ID NO: 11878 - protein, 16 aa, Homo sapiens
  ( 129 )...( 144 ): >5H6_HUMAN
LSPLRYKLRMTPLRAL

SEQ ID NO: 11879 - protein, 16 aa, Homo sapiens
  ( 130 )...( 145 ): >5H6_HUMAN
SPLRYKLRMTPLRALA

SEQ ID NO: 11880 - protein, 16 aa, Homo sapiens
  ( 131 )...( 146 ): >5H6_HUMAN
PLRYKLRMTPLRALAL

SEQ ID NO: 11881 - protein, 16 aa, Homo sapiens
  ( 132 )...( 147 ): >5H6_HUMAN
LRYKLRMTPLRALALV

SEQ ID NO: 11882 - protein, 16 aa, Homo sapiens
  ( 133 )...( 148 ): >5H6_HUMAN
RYKLRMTPLRALALVL

SEQ ID NO: 11883 - protein, 16 aa, Homo sapiens
  ( 135 )...( 150 ): >5H6_HUMAN
KLRMTPLRALALVLGA

SEQ ID NO: 11884 - protein, 16 aa, Homo sapiens
  ( 206 )...( 221 ): >5H6_HUMAN
FTYCRILLAARKQAVQ

SEQ ID NO: 11885 - protein, 16 aa, Homo sapiens
  ( 207 )...( 222 ): >5H6_HUMAN
TYCRILLAARKQAVQV

SEQ ID NO: 11886 - protein, 16 aa, Homo sapiens
  ( 208 )...( 223 ): >5H6_HUMAN
YCRILLAARKQAVQVA

SEQ ID NO: 11887 - protein, 16 aa, Homo sapiens
  ( 209 )...( 224 ): >5H6_HUMAN
CRILLAARKQAVQVAS

SEQ ID NO: 11888 - protein, 16 aa, Homo sapiens
  ( 210 )...( 225 ): >5H6_HUMAN
RILLAARKQAVQVASL

SEQ ID NO: 11889 - protein, 16 aa, Homo sapiens
  ( 249 )...( 264 ): >5H6_HUMAN
SADSRRLATKHSRKAL

SEQ ID NO: 11890 - protein, 16 aa, Homo sapiens
  ( 250 )...( 265 ): >5H6_HUMAN
ADSRRLATKHSRKALK

SEQ ID NO: 11891 - protein, 16 aa, Homo sapiens
  ( 251 )...( 266 ): >5H6_HUMAN
DSRRLATKHSRKALKA

SEQ ID NO: 11892 - protein, 16 aa, Homo sapiens
  ( 252 )...( 267 ): >5H6_HUMAN
SRRLATKHSRKALKAS

SEQ ID NO: 11893 - protein, 16 aa, Homo sapiens
  ( 253 )...( 268 ): >5H6_HUMAN
RRLATKHSRKALKASL

SEQ ID NO: 11894 - protein, 16 aa, Homo sapiens
  ( 254 )...( 269 ): >5H6_HUMAN
RLATKHSRKALKASLT

SEQ ID NO: 11895 - protein, 16 aa, Homo sapiens
  ( 255 )...( 270 ): >5H6_HUMAN
LATKHSRKALKASLTL

SEQ ID NO: 11896 - protein, 16 aa, Homo sapiens
  ( 256 )...( 271 ): >5H6_HUMAN
ATKHSRKALKASLTLG

SEQ ID NO: 11897 - protein, 16 aa, Homo sapiens
  ( 257 )...( 272 ): >5H6_HUMAN
TKHSRKALKASLTLGI

SEQ ID NO: 11898 - protein, 16 aa, Homo sapiens
  ( 258 )...( 273 ): >5H6_HUMAN
KHSRKALKASLTLGIL

SEQ ID NO: 11899 - protein, 16 aa, Homo sapiens
  ( 99 )...( 114 ): >5H7_HUMAN
NCLVVISVCFVKKLRQ

SEQ ID NO: 11900 - protein, 16 aa, Homo sapiens
  ( 100 )...( 115 ): >5H7_HUMAN
CLVVISVCFVKKLRQP

SEQ ID NO: 11901 - protein, 16 aa, Homo sapiens
  ( 101 )...( 116 ): >5H7_HUMAN
LVVISVCFVKKLRQPS

SEQ ID NO: 11902 - protein, 16 aa, Homo sapiens
  ( 102 )...( 117 ): >5H7_HUMAN
VVISVCFVKKLRQPSN

SEQ ID NO: 11903 - protein, 16 aa, Homo sapiens
  ( 106 )...( 121 ): >5H7_HUMAN
VCFVKKLRQPSNYLIV

SEQ ID NO: 11904 - protein, 16 aa, Homo sapiens
  ( 108 )...( 123 ): >5H7_HUMAN
FVKKLRQPSNYLIVSL

SEQ ID NO: 11905 - protein, 16 aa, Homo sapiens
  ( 109 )...( 124 ): >5H7_HUMAN
VKKLRQPSNYLIVSLA

SEQ ID NO: 11906 - protein, 16 aa, Homo sapiens
  ( 110 )...( 125 ): >5H7_HUMAN
KKLRQPSNYLIVSLAL

SEQ ID NO: 11907 - protein, 16 aa, Homo sapiens
  ( 180 )...( 195 ): >5H7_HUMAN
RYLGITRPLTYPVRQN

SEQ ID NO: 11908 - protein, 16 aa, Homo sapiens
  ( 182 )...( 197 ): >5H7_HUMAN
LGITRPLTYPVRQNGK

SEQ ID NO: 11909 - protein, 16 aa, Homo sapiens
  ( 313 )...( 328 ): >5H7_HUMAN
RKNISIFKREQKAATT

SEQ ID NO: 11910 - protein, 16 aa, Homo sapiens
  ( 398 )...( 413 ): >5H7_HUMAN
LLQCQYRNINRKLSAA

SEQ ID NO: 11911 - protein, 16 aa, Homo sapiens
  ( 427 )...( 442 ): >5H7_HUMAN
RPEFVLRACTRRVLLR

SEQ ID NO: 11912 - protein, 16 aa, Homo sapiens
  ( 428 )...( 443 ): >5H7_HUMAN
PEFVLRACTRRVLLRP

SEQ ID NO: 11913 - protein, 16 aa, Homo sapiens
  ( 430 )...( 445 ): >5H7_HUMAN
FVLRACTRRVLLRPEK

SEQ ID NO: 11914 - protein, 16 aa, Homo sapiens
  ( 431 )...( 446 ): >5H7_HUMAN
VLRACTRRVLLRPEKR

SEQ ID NO: 11915 - protein, 16 aa, Homo sapiens
  ( 434 )...( 449 ): >5H7_HUMAN
ACTRRVLLRPEKRPPV

SEQ ID NO: 11916 - protein, 16 aa, Homo sapiens
  ( 435 )...( 450 ): >5H7_HUMAN
CTRRVLLRPEKRPPVS

SEQ ID NO: 11917 - protein, 16 aa, Homo sapiens
  ( 436 )...( 451 ): >5H7_HUMAN
TRRVLLRPEKRPPVSV

SEQ ID NO: 11918 - protein, 16 aa, Homo sapiens
  ( 438 )...( 453 ): >5H7_HUMAN
RVLLRPEKRPPVSVWV

SEQ ID NO: 11919 - protein, 16 aa, Homo sapiens
  ( 127 )...( 142 ): >A1AA_HUMAN
GVSYPLRYPTIVTQRR

SEQ ID NO: 11920 - protein, 16 aa, Homo sapiens
  ( 128 )...( 143 ): >A1AA_HUMAN
VSYPLRYPTIVTQRRG

SEQ ID NO: 11921 - protein, 16 aa, Homo sapiens
  ( 129 )...( 144 ): >A1AA_HUMAN
SYPLRYPTIVTQRRGL

SEQ ID NO: 11922 - protein, 16 aa, Homo sapiens
  ( 130 )...( 145 ): >A1AA_HUMAN
YPLRYPTIVTQRRGLM

SEQ ID NO: 11923 - protein, 16 aa, Homo sapiens
  ( 131 )...( 146 ): >A1AA_HUMAN
PLRYPTIVTQRRGLMA

SEQ ID NO: 11924 - protein, 16 aa, Homo sapiens
  ( 132 )...( 147 ): >A1AA_HUMAN
LRYPTIVTQRRGLMAL

SEQ ID NO: 11925 - protein, 16 aa, Homo sapiens
  ( 133 )...( 148 ): >A1AA_HUMAN
RYPTIVTQRRGLMALL

SEQ ID NO: 11926 - protein, 16 aa, Homo sapiens
  ( 201 )...( 216 ): >A1AA_HUMAN
LVMYCRVYVVAKRESR

SEQ ID NO: 11927 - protein, 16 aa, Homo sapiens
  ( 202 )...( 217 ): >A1AA_HUMAN
VMYCRVYVVAKRESRG

SEQ ID NO: 11928 - protein, 16 aa, Homo sapiens
  ( 203 )...( 218 ): >A1AA_HUMAN
MYCRVYVVAKRESRGL

SEQ ID NO: 11929 - protein, 16 aa, Homo sapiens
  ( 204 )...( 219 ): >A1AA_HUMAN
YCRVYVVAKRESRGLK

SEQ ID NO: 11930 - protein, 16 aa, Homo sapiens
  ( 205 )...( 220 ): >A1AA_HUMAN
CRVYVVAKRESRGLKS

SEQ ID NO: 11931 - protein, 16 aa, Homo sapiens
  ( 206 )...( 221 ): >A1AA_HUMAN
RVYVVAKRESRGLKSG

SEQ ID NO: 11932 - protein, 16 aa, Homo sapiens
  ( 207 )...( 222 ): >A1AA_HUMAN
VYVVAKRESRGLKSGL

SEQ ID NO: 11933 - protein, 16 aa, Homo sapiens
  ( 208 )...( 223 ): >A1AA_HUMAN
YVVAKRESRGLKSGLK

SEQ ID NO: 11934 - protein, 16 aa, Homo sapiens
  ( 209 )...( 224 ): >A1AA_HUMAN
VVAKRESRGLKSGLKT

SEQ ID NO: 11935 - protein, 16 aa, Homo sapiens
  ( 210 )...( 225 ): >A1AA_HUMAN
VAKRESRGLKSGLKTD

SEQ ID NO: 11936 - protein, 16 aa, Homo sapiens
  ( 211 )...( 226 ): >A1AA_HUMAN
AKRESRGLKSGLKTDK

SEQ ID NO: 11937 - protein, 16 aa, Homo sapiens
  ( 212 )...( 227 ): >A1AA_HUMAN
KRESRGLKSGLKTDKS

SEQ ID NO: 11938 - protein, 16 aa, Homo sapiens
  ( 231 )...( 246 ): >A1AA_HUMAN
QVTLRIHRKNAPAGGS

SEQ ID NO: 11939 - protein, 16 aa, Homo sapiens
  ( 248 )...( 263 ): >A1AA_HUMAN
MASAKTKTHFSVRLLK

SEQ ID NO: 11940 - protein, 16 aa, Homo sapiens
  ( 249 )...( 264 ): >A1AA_HUMAN
ASAKTKTHFSVRLLKF

SEQ ID NO: 11941 - protein, 16 aa, Homo sapiens
  ( 251 )...( 266 ): >A1AA_HUMAN
AKTKTHFSVRLLKFSR

SEQ ID NO: 11942 - protein, 16 aa, Homo sapiens
  ( 258 )...( 273 ): >A1AA_HUMAN
SVRLLKFSREKKAAKT

SEQ ID NO: 11943 - protein, 16 aa, Homo sapiens
  ( 259 )...( 274 ): >A1AA_HUMAN
VRLLKFSREKKAAKTL

SEQ ID NO: 11944 - protein, 16 aa, Homo sapiens
  ( 260 )...( 275 ): >A1AA_HUMAN
RLLKFSREKKAAKTLG

SEQ ID NO: 11945 - protein, 16 aa, Homo sapiens
  ( 261 )...( 276 ): >A1AA_HUMAN
LLKFSREKKAAKTLGI

SEQ ID NO: 11946 - protein, 16 aa, Homo sapiens
  ( 262 )...( 277 ): >A1AA_HUMAN
LKFSREKKAAKTLGIV

SEQ ID NO: 11947 - protein, 16 aa, Homo sapiens
  ( 263 )...( 278 ): >A1AA_HUMAN
KFSREKKAAKTLGIVV

SEQ ID NO: 11948 - protein, 16 aa, Homo sapiens
  ( 264 )...( 279 ): >A1AA_HUMAN
FSREKKAAKTLGIVVG

SEQ ID NO: 11949 - protein, 16 aa, Homo sapiens
  ( 266 )...( 281 ): >A1AA_HUMAN
REKKAAKTLGIVVGCF

SEQ ID NO: 11950 - protein, 16 aa, Homo sapiens
  ( 334 )...( 349 ): >A1AA_HUMAN
KKAFQNVLRIQCLCRK

SEQ ID NO: 11951 - protein, 16 aa, Homo sapiens
  ( 335 )...( 350 ): >A1AA_HUMAN
KAFQNVLRIQCLCRKQ

SEQ ID NO: 11952 - protein, 16 aa, Homo sapiens
  ( 338 )...( 353 ): >A1AA_HUMAN
QNVLRIQCLCRKQSSK

SEQ ID NO: 11953 - protein, 16 aa, Homo sapiens
  ( 339 )...( 354 ): >A1AA_HUMAN
NVLRIQCLCRKQSSKH

SEQ ID NO: 11954 - protein, 16 aa, Homo sapiens
  ( 340 )...( 355 ): >A1AA_HUMAN
VLRIQCLCRKQSSKHA

SEQ ID NO: 11955 - protein, 16 aa, Homo sapiens
  ( 341 )...( 356 ): >A1AA_HUMAN
LRIQCLCRKQSSKHAL

SEQ ID NO: 11956 - protein, 16 aa, Homo sapiens
  ( 375 )...( 390 ): >A1AA_HUMAN
VRIPVGSRETFYRISK

SEQ ID NO: 11957 - protein, 16 aa, Homo sapiens
  ( 376 )...( 391 ): >A1AA_HUMAN
RIPVGSRETFYRISKT

SEQ ID NO: 11958 - protein, 16 aa, Homo sapiens
  ( 145 )...( 160 ): >A1AB_HUMAN
IGVRYSLQYPTLVTRR

SEQ ID NO: 11959 - protein, 16 aa, Homo sapiens
  ( 146 )...( 161 ): >A1AB_HUMAN
GVRYSLQYPTLVTRRK

SEQ ID NO: 11960 - protein, 16 aa, Homo sapiens
  ( 147 )...( 162 ): >A1AB_HUMAN
VRYSLQYPTLVTRRKA

SEQ ID NO: 11961 - protein, 16 aa, Homo sapiens
  ( 148 )...( 163 ): >A1AB_HUMAN
RYSLQYPTLVTRRKAI

SEQ ID NO: 11962 - protein, 16 aa, Homo sapiens
  ( 149 )...( 164 ): >A1AB_HUMAN
YSLQYPTLVTRRKAIL

SEQ ID NO: 11963 - protein, 16 aa, Homo sapiens
  ( 150 )...( 165 ): >A1AB_HUMAN
SLQYPTLVTRRKAILA

SEQ ID NO: 11964 - protein, 16 aa, Homo sapiens
  ( 151 )...( 166 ): >A1AB_HUMAN
LQYPTLVTRRKAILAL

SEQ ID NO: 11965 - protein, 16 aa, Homo sapiens
  ( 152 )...( 167 ): >A1AB_HUMAN
QYPTLVTRRKAILALL

SEQ ID NO: 11966 - protein, 16 aa, Homo sapiens
  ( 153 )...( 168 ): >A1AB_HUMAN
YPTLVTRRKAILALLS

SEQ ID NO: 11967 - protein, 16 aa, Homo sapiens
  ( 154 )...( 169 ): >A1AB_HUMAN
PTLVTRRKAILALLSV

SEQ ID NO: 11968 - protein, 16 aa, Homo sapiens
  ( 155 )...( 170 ): >A1AB_HUMAN
TLVTRRKAILALLSVW

SEQ ID NO: 11969 - protein, 16 aa, Homo sapiens
  ( 158 )...( 173 ): >A1AB_HUMAN
TRRKAILALLSVWVLS

SEQ ID NO: 11970 - protein, 16 aa, Homo sapiens
  ( 159 )...( 174 ): >A1AB_HUMAN
RRKAILALLSVWVLST

SEQ ID NO: 11971 - protein, 16 aa, Homo sapiens
  ( 219 )...( 234 ): >A1AB_HUMAN
ILVMYCRVYIVAKRTT

SEQ ID NO: 11972 - protein, 16 aa, Homo sapiens
  ( 220 )...( 235 ): >A1AB_HUMAN
LVMYCRVYIVAKRTTK

SEQ ID NO: 11973 - protein, 16 aa, Homo sapiens
  ( 221 )...( 236 ): >A1AB_HUMAN
VMYCRVYIVAKRTTKN

SEQ ID NO: 11974 - protein, 16 aa, Homo sapiens
  ( 222 )...( 237 ): >A1AB_HUMAN
MYCRVYIVAKRTTKNL

SEQ ID NO: 11975 - protein, 16 aa, Homo sapiens
  ( 223 )...( 238 ): >A1AB_HUMAN
YCRVYIVAKRTTKNLE

SEQ ID NO: 11976 - protein, 16 aa, Homo sapiens
  ( 224 )...( 239 ): >A1AB_HUMAN
CRVYIVAKRTTKNLEA

SEQ ID NO: 11977 - protein, 16 aa, Homo sapiens
  ( 225 )...( 240 ): >A1AB_HUMAN
RVYIVAKRTTKNLEAG

SEQ ID NO: 11978 - protein, 16 aa, Homo sapiens
  ( 228 )...( 243 ): >A1AB_HUMAN
IVAKRTTKNLEAGVMK

SEQ ID NO: 11979 - protein, 16 aa, Homo sapiens
  ( 268 )...( 283 ): >A1AB_HUMAN
TKAKGHNPRSSIAVKL

SEQ ID NO: 11980 - protein, 16 aa, Homo sapiens
  ( 277 )...( 292 ): >A1AB_HUMAN
SSIAVKLFKFSREKKA

SEQ ID NO: 11981 - protein, 16 aa, Homo sapiens
  ( 278 )...( 293 ): >A1AB_HUMAN
SIAVKLFKFSREKKAA

SEQ ID NO: 11982 - protein, 16 aa, Homo sapiens
  ( 279 )...( 294 ): >A1AB_HUMAN
IAVKLFKFSREKKAAK

SEQ ID NO: 11983 - protein, 16 aa, Homo sapiens
  ( 280 )...( 295 ): >A1AB_HUMAN
AVKLFKFSREKKAAKT

SEQ ID NO: 11984 - protein, 16 aa, Homo sapiens
  ( 281 )...( 296 ): >A1AB_HUMAN
VKLFKFSREKKAAKTL

SEQ ID NO: 11985 - protein, 16 aa, Homo sapiens
  ( 282 )...( 297 ): >A1AB_HUMAN
KLFKFSREKKAAKTLG

SEQ ID NO: 11986 - protein, 16 aa, Homo sapiens
  ( 283 )...( 298 ): >A1AB_HUMAN
LFKFSREKKAAKTLGI

SEQ ID NO: 11987 - protein, 16 aa, Homo sapiens
  ( 284 )...( 299 ): >A1AB_HUMAN
FKFSREKKAAKTLGIV

SEQ ID NO: 11988 - protein, 16 aa, Homo sapiens
  ( 285 )...( 300 ): >A1AB_HUMAN
KFSREKKAAKTLGIVV

SEQ ID NO: 11989 - protein, 16 aa, Homo sapiens
  ( 286 )...( 301 ): >A1AB_HUMAN
FSREKKAAKTLGIVVG

SEQ ID NO: 11990 - protein, 16 aa, Homo sapiens
  ( 288 )...( 303 ): >A1AB_HUMAN
REKKAAKTLGIVVGMF

SEQ ID NO: 11991 - protein, 16 aa, Homo sapiens
  ( 351 )...( 366 ): >A1AB_HUMAN
SSKEFKRAFVRILGCQ

SEQ ID NO: 11992 - protein, 16 aa, Homo sapiens
  ( 353 )...( 368 ): >A1AB_HUMAN
KEFKRAFVRILGCQCR

SEQ ID NO: 11993 - protein, 16 aa, Homo sapiens
  ( 355 )...( 370 ): >A1AB_HUMAN
FKRAFVRILGCQCRGR

SEQ ID NO: 11994 - protein, 16 aa, Homo sapiens
  ( 378 )...( 393 ): >A1AB_HUMAN
RRLGGCAYTYRPWTRG

SEQ ID NO: 11995 - protein, 16 aa, Homo sapiens
  ( 194 )...( 209 ): >A1AD_HUMAN
RYVGVRHSLKYPAIMT

SEQ ID NO: 11996 - protein, 16 aa, Homo sapiens
  ( 197 )...( 212 ): >A1AD_HUMAN
GVRHSLKYPAIMTERK

SEQ ID NO: 11997 - protein, 16 aa, Homo sapiens
  ( 198 )...( 213 ): >A1AD_HUMAN
VRHSLKYPAIMTERKA

SEQ ID NO: 11998 - protein, 16 aa, Homo sapiens
  ( 199 )...( 214 ): >A1AD_HUMAN
RHSLKYPAIMTERKAA

SEQ ID NO: 11999 - protein, 16 aa, Homo sapiens
  ( 271 )...( 286 ): >A1AD_HUMAN
VVMYCRVYVVARSTTR

SEQ ID NO: 12000 - protein, 16 aa, Homo sapiens
  ( 272 )...( 287 ): >A1AD_HUMAN
VMYCRVYVVARSTTRS

SEQ ID NO: 12001 - protein, 16 aa, Homo sapiens
  ( 273 )...( 288 ): >A1AD_HUMAN
MYCRVYVVARSTTRSL

SEQ ID NO: 12002 - protein, 16 aa, Homo sapiens
  ( 279 )...( 294 ): >A1AD_HUMAN
VVARSTTRSLEAGVKR

SEQ ID NO: 12003 - protein, 16 aa, Homo sapiens
  ( 281 )...( 296 ): >A1AD_HUMAN
ARSTTRSLEAGVKRER

SEQ ID NO: 12004 - protein, 16 aa, Homo sapiens
  ( 282 )...( 297 ): >A1AD_HUMAN
RSTTRSLEAGVKRERG

SEQ ID NO: 12005 - protein, 16 aa, Homo sapiens
  ( 283 )...( 298 ): >A1AD_HUMAN
STTRSLEAGVKRERGK

SEQ ID NO: 12006 - protein, 16 aa, Homo sapiens
  ( 284 )...( 299 ): >A1AD_HUMAN
TTRSLEAGVKRERGKA

SEQ ID NO: 12007 - protein, 16 aa, Homo sapiens
  ( 285 )...( 300 ): >A1AD_HUMAN
TRSLEAGVKRERGKAS

SEQ ID NO: 12008 - protein, 16 aa, Homo sapiens
  ( 290 )...( 305 ): >A1AD_HUMAN
AGVKRERGKASEVVLR

SEQ ID NO: 12009 - protein, 16 aa, Homo sapiens
  ( 291 )...( 306 ): >A1AD_HUMAN
GVKRERGKASEVVLRI

SEQ ID NO: 12010 - protein, 16 aa, Homo sapiens
  ( 292 )...( 307 ): >A1AD_HUMAN
VKRERGKASEVVLRIH

SEQ ID NO: 12011 - protein, 16 aa, Homo sapiens
  ( 293 )...( 308 ): >A1AD_HUMAN
KRERGKASEVVLRIHC

SEQ ID NO: 12012 - protein, 16 aa, Homo sapiens
  ( 294 )...( 309 ): >A1AD_HUMAN
RERGKASEVVLRIHCR

SEQ ID NO: 12013 - protein, 16 aa, Homo sapiens
  ( 296 )...( 311 ): >A1AD_HUMAN
RGKASEVVLRIHCRGA

SEQ ID NO: 12014 - protein, 16 aa, Homo sapiens
  ( 321 )...( 336 ): >A1AD_HUMAN
MRSAKGHTFRSSLSVR

SEQ ID NO: 12015 - protein, 16 aa, Homo sapiens
  ( 322 )...( 337 ): >A1AD_HUMAN
RSAKGHTFRSSLSVRL

SEQ ID NO: 12016 - protein, 16 aa, Homo sapiens
  ( 324 )...( 339 ): >A1AD_HUMAN
AKGHTFRSSLSVRLLK

SEQ ID NO: 12017 - protein, 16 aa, Homo sapiens
  ( 325 )...( 340 ): >A1AD_HUMAN
KGHTFRSSLSVRLLKF

SEQ ID NO: 12018 - protein, 16 aa, Homo sapiens
  ( 328 )...( 343 ): >A1AD_HUMAN
TFRSSLSVRLLKFSRE

SEQ ID NO: 12019 - protein, 16 aa, Homo sapiens
  ( 331 )...( 346 ): >A1AD_HUMAN
SSLSVRLLKFSREKKA

SEQ ID NO: 12020 - protein, 16 aa, Homo sapiens
  ( 332 )...( 347 ): >A1AD_HUMAN
SLSVRLLKFSREKKAA

SEQ ID NO: 12021 - protein, 16 aa, Homo sapiens
  ( 333 )...( 348 ): >A1AD_HUMAN
LSVRLLKFSREKKAAK

SEQ ID NO: 12022 - protein, 16 aa, Homo sapiens
  ( 334 )...( 349 ): >A1AD_HUMAN
SVRLLKFSREKKAAKT

SEQ ID NO: 12023 - protein, 16 aa, Homo sapiens
  ( 335 )...( 350 ): >A1AD_HUMAN
VRLLKFSREKKAAKTL

SEQ ID NO: 12024 - protein, 16 aa, Homo sapiens
  ( 336 )...( 351 ): >A1AD_HUMAN
RLLKFSREKKAAKTLA

SEQ ID NO: 12025 - protein, 16 aa, Homo sapiens
  ( 337 )...( 352 ): >A1AD_HUMAN
LLKFSREKKAAKTLAI

SEQ ID NO: 12026 - protein, 16 aa, Homo sapiens
  ( 338 )...( 353 ): >A1AD_HUMAN
LKFSREKKAAKTLAIV

SEQ ID NO: 12027 - protein, 16 aa, Homo sapiens
  ( 339 )...( 354 ): >A1AD_HUMAN
KFSREKKAAKTLAIVV

SEQ ID NO: 12028 - protein, 16 aa, Homo sapiens
  ( 340 )...( 355 ): >A1AD_HUMAN
FSREKKAAKTLAIVVG

SEQ ID NO: 12029 - protein, 16 aa, Homo sapiens
  ( 342 )...( 357 ): >A1AD_HUMAN
REKKAAKTLAIVVGVF

SEQ ID NO: 12030 - protein, 16 aa, Homo sapiens
  ( 432 )...( 447 ): >A1AD_HUMAN
RVYGHHWRASTSGLRQ

SEQ ID NO: 12031 - protein, 16 aa, Homo sapiens
  ( 498 )...( 513 ): >A1AD_HUMAN
RLLGPFRRPTTQLRAK

SEQ ID NO: 12032 - protein, 16 aa, Homo sapiens
  ( 499 )...( 514 ): >A1AD_HUMAN
LLGPFRRPTTQLRAKV

SEQ ID NO: 12033 - protein, 16 aa, Homo sapiens
  ( 500 )...( 515 ): >A1AD_HUMAN
LGPFRRPTTQLRAKVS

SEQ ID NO: 12034 - protein, 16 aa, Homo sapiens
  ( 501 )...( 516 ): >A1AD_HUMAN
GPFRRPTTQLRAKVSS

SEQ ID NO: 12035 - protein, 16 aa, Homo sapiens
  ( 502 )...( 517 ): >A1AD_HUMAN
PFRRPTTQLRAKVSSL

SEQ ID NO: 12036 - protein, 16 aa, Homo sapiens
  ( 503 )...( 518 ): >A1AD_HUMAN
FRRPTTQLRAKVSSLS

SEQ ID NO: 12037 - protein, 16 aa, Homo sapiens
  ( 504 )...( 519 ): >A1AD_HUMAN
RRPTTQLRAKVSSLSH

SEQ ID NO: 12038 - protein, 16 aa, Homo sapiens
  ( 505 )...( 520 ): >A1AD_HUMAN
RPTTQLRAKVSSLSHK

SEQ ID NO: 12039 - protein, 16 aa, Homo sapiens
  ( 507 )...( 522 ): >A1AD_HUMAN
TTQLRAKVSSLSHKIR

SEQ ID NO: 12040 - protein, 16 aa, Homo sapiens
  ( 508 )...( 523 ): >A1AD_HUMAN
TQLRAKVSSLSHKIRA

SEQ ID NO: 12041 - protein, 16 aa, Homo sapiens
  ( 509 )...( 524 ): >A1AD_HUMAN
QLRAKVSSLSHKIRAG

SEQ ID NO: 12042 - protein, 16 aa, Homo sapiens
  ( 510 )...( 525 ): >A1AD_HUMAN
LRAKVSSLSHKIRAGG

SEQ ID NO: 12043 - protein, 16 aa, Homo sapiens
  ( 513 )...( 528 ): >A1AD_HUMAN
KVSSLSHKIRAGGAQR

SEQ ID NO: 12044 - protein, 16 aa, Homo sapiens
  ( 141 )...( 156 ): >A2AA_HUMAN
YNLKRTPRRIKAIIIT

SEQ ID NO: 12045 - protein, 16 aa, Homo sapiens
  ( 142 )...( 157 ): >A2AA_HUMAN
NLKRTPRRIKAIIITV

SEQ ID NO: 12046 - protein, 16 aa, Homo sapiens
  ( 143 )...( 158 ): >A2AA_HUMAN
LKRTPRRIKAIIITVW

SEQ ID NO: 12047 - protein, 16 aa, Homo sapiens
  ( 144 )...( 159 ): >A2AA_HUMAN
KRTPRRIKAIIITVWV

SEQ ID NO: 12048 - protein, 16 aa, Homo sapiens
  ( 145 )...( 160 ): >A2AA_HUMAN
RTPRRIKAIIITVWVI

SEQ ID NO: 12049 - protein, 16 aa, Homo sapiens
  ( 225 )...( 240 ): >A2AA_HUMAN
RRTRVPPSRRGPDAVA

SEQ ID NO: 12050 - protein, 16 aa, Homo sapiens
  ( 304 )...( 319 ): >A2AA_HUMAN
RPPGPRRPERGPRGKG

SEQ ID NO: 12051 - protein, 16 aa, Homo sapiens
  ( 306 )...( 321 ): >A2AA_HUMAN
PGPRRPERGPRGKGKA

SEQ ID NO: 12052 - protein, 16 aa, Homo sapiens
  ( 310 )...( 325 ): >A2AA_HUMAN
RPERGPRGKGKARASQ

SEQ ID NO: 12053 - protein, 16 aa, Homo sapiens
  ( 311 )...( 326 ): >A2AA_HUMAN
PERGPRGKGKARASQV

SEQ ID NO: 12054 - protein, 16 aa, Homo sapiens
  ( 312 )...( 327 ): >A2AA_HUMAN
ERGPRGKGKARASQVK

SEQ ID NO: 12055 - protein, 16 aa, Homo sapiens
  ( 313 )...( 328 ): >A2AA_HUMAN
RGPRGKGKARASQVKP

SEQ ID NO: 12056 - protein, 16 aa, Homo sapiens
  ( 320 )...( 335 ): >A2AA_HUMAN
KARASQVKPGDSLPRR

SEQ ID NO: 12057 - protein, 16 aa, Homo sapiens
  ( 350 )...( 365 ): >A2AA_HUMAN
GEERVGAAKASRWRGR

SEQ ID NO: 12058 - protein, 16 aa, Homo sapiens
  ( 351 )...( 366 ): >A2AA_HUMAN
EERVGAAKASRWRGRQ

SEQ ID NO: 12059 - protein, 16 aa, Homo sapiens
  ( 352 )...( 367 ): >A2AA_HUMAN
ERVGAAKASRWRGRQN

SEQ ID NO: 12060 - protein, 16 aa, Homo sapiens
  ( 354 )...( 369 ): >A2AA_HUMAN
VGAAKASRWRGRQNRE

SEQ ID NO: 12061 - protein, 16 aa, Homo sapiens
  ( 364 )...( 379 ): >A2AA_HUMAN
GRQNREKRFTFVLAVV

SEQ ID NO: 12062 - protein, 16 aa, Homo sapiens
  ( 365 )...( 380 ): >A2AA_HUMAN
RQNREKRFTFVLAVVI

SEQ ID NO: 12063 - protein, 15 aa, Homo sapiens
  ( 436 )...( 451 ): >A2AA_HUMAN
AFKKILCRGDRKRIV

SEQ ID NO: 12064 - protein, 14 aa, Homo sapiens
  ( 437 )...( 452 ): >A2AA_HUMAN
FKKILCRGDRKRIV

SEQ ID NO: 12065 - protein, 13 aa, Homo sapiens
  ( 438 )...( 453 ): >A2AA_HUMAN
KKILCRGDRKRIV

SEQ ID NO: 12066 - protein, 12 aa, Homo sapiens
  ( 439 )...( 454 ): >A2AA_HUMAN
KILCRGDRKRIV

SEQ ID NO: 12067 - protein, 16 aa, Homo sapiens
  ( 121 )...( 136 ): >A2AB_HUMAN
NSKRTPRRIKCIILTV

SEQ ID NO: 12068 - protein, 16 aa, Homo sapiens
  ( 122 )...( 137 ): >A2AB_HUMAN
SKRTPRRIKCIILTVW

SEQ ID NO: 12069 - protein, 16 aa, Homo sapiens
  ( 123 )...( 138 ): >A2AB_HUMAN
KRTPRRIKCIILTVWL

SEQ ID NO: 12070 - protein, 16 aa, Homo sapiens
  ( 189 )...( 204 ): >A2AB_HUMAN
ILVYLRIYLIAKRSNR

SEQ ID NO: 12071 - protein, 16 aa, Homo sapiens
  ( 344 )...( 359 ): >A2AB_HUMAN
LLGRGVGAIGGQWWRR

SEQ ID NO: 12072 - protein, 16 aa, Homo sapiens
  ( 345 )...( 360 ): >A2AB_HUMAN
LGRGVGAIGGQWWRRR

SEQ ID NO: 12073 - protein, 16 aa, Homo sapiens
  ( 346 )...( 361 ): >A2AB_HUMAN
GRGVGAIGGQWWRRRA

SEQ ID NO: 12074 - protein, 16 aa, Homo sapiens
  ( 347 )...( 362 ): >A2AB_HUMAN
RGVGAIGGQWWRRRAH

SEQ ID NO: 12075 - protein, 16 aa, Homo sapiens
  ( 348 )...( 363 ): >A2AB_HUMAN
GVGAIGGQWWRRRAHV

SEQ ID NO: 12076 - protein, 16 aa, Homo sapiens
  ( 349 )...( 364 ): >A2AB_HUMAN
VGAIGGQWWRRRAHVT

SEQ ID NO: 12077 - protein, 16 aa, Homo sapiens
  ( 350 )...( 365 ): >A2AB_HUMAN
GAIGGQWWRRRAHVTR

SEQ ID NO: 12078 - protein, 16 aa, Homo sapiens
  ( 360 )...( 375 ): >A2AB_HUMAN
RAHVTREKRFTFVLAV

SEQ ID NO: 12079 - protein, 16 aa, Homo sapiens
  ( 152 )...( 167 ): >A2AC_HUMAN
SVTQAVEYNLKRTPRR

SEQ ID NO: 12080 - protein, 16 aa, Homo sapiens
  ( 153 )...( 168 ): >A2AC_HUMAN
VTQAVEYNLKRTPRRV

SEQ ID NO: 12081 - protein, 16 aa, Homo sapiens
  ( 156 )...( 171 ): >A2AC_HUMAN
AVEYNLKRTPRRVKAT

SEQ ID NO: 12082 - protein, 16 aa, Homo sapiens
  ( 157 )...( 172 ): >A2AC_HUMAN
VEYNLKRTPRRVKATI

SEQ ID NO: 12083 - protein, 16 aa, Homo sapiens
  ( 158 )...( 173 ): >A2AC_HUMAN
EYNLKRTPRRVKATIV

SEQ ID NO: 12084 - protein, 16 aa, Homo sapiens
  ( 159 )...( 174 ): >A2AC_HUMAN
YNLKRTPRRVKATIVA

SEQ ID NO: 12085 - protein, 16 aa, Homo sapiens
  ( 160 )...( 175 ): >A2AC_HUMAN
NLKRTPRRVKATIVAV

SEQ ID NO: 12086 - protein, 16 aa, Homo sapiens
  ( 161 )...( 176 ): >A2AC_HUMAN
LKRTPRRVKATIVAVW

SEQ ID NO: 12087 - protein, 16 aa, Homo sapiens
  ( 162 )...( 177 ): >A2AC_HUMAN
KRTPRRVKATIVAVWL

SEQ ID NO: 12088 - protein, 16 aa, Homo sapiens
  ( 163 )...( 178 ): >A2AC_HUMAN
RTPRRVKATIVAVWLI

SEQ ID NO: 12089 - protein, 16 aa, Homo sapiens
  ( 164 )...( 179 ): >A2AC_HUMAN
TPRRVKATIVAVWLIS

SEQ ID NO: 12090 - protein, 16 aa, Homo sapiens
  ( 165 )...( 180 ): >A2AC_HUMAN
PRRVKATIVAVWLISA

SEQ ID NO: 12091 - protein, 16 aa, Homo sapiens
  ( 166 )...( 181 ): >A2AC_HUMAN
RRVKATIVAVWLISAV

SEQ ID NO: 12092 - protein, 16 aa, Homo sapiens
  ( 223 )...( 238 ): >A2AC_HUMAN
CLIMGLVYARIYRVAK

SEQ ID NO: 12093 - protein, 16 aa, Homo sapiens
  ( 225 )...( 240 ): >A2AC_HUMAN
IMGLVYARIYRVAKLR

SEQ ID NO: 12094 - protein, 16 aa, Homo sapiens
  ( 226 )...( 241 ): >A2AC_HUMAN
MGLVYARIYRVAKLRT

SEQ ID NO: 12095 - protein, 16 aa, Homo sapiens
  ( 227 )...( 242 ): >A2AC_HUMAN
GLVYARIYRVAKLRTR

SEQ ID NO: 12096 - protein, 16 aa, Homo sapiens
  ( 228 )...( 243 ): >A2AC_HUMAN
LVYARIYRVAKLRTRT

SEQ ID NO: 12097 - protein, 16 aa, Homo sapiens
  ( 229 )...( 244 ): >A2AC_HUMAN
VYARIYRVAKLRTRTL

SEQ ID NO: 12098 - protein, 16 aa, Homo sapiens
  ( 230 )...( 245 ): >A2AC_HUMAN
YARIYRVAKLRTRTLS

SEQ ID NO: 12099 - protein, 16 aa, Homo sapiens
  ( 231 )...( 246 ): >A2AC_HUMAN
ARIYRVAKLRTRTLSE

SEQ ID NO: 12100 - protein, 16 aa, Homo sapiens
  ( 232 )...( 247 ): >A2AC_HUMAN
RIYRVAKLRTRTLSEK

SEQ ID NO: 12101 - protein, 16 aa, Homo sapiens
  ( 233 )...( 248 ): >A2AC_HUMAN
IYRVAKLRTRTLSEKR

SEQ ID NO: 12102 - protein, 16 aa, Homo sapiens
  ( 234 )...( 249 ): >A2AC_HUMAN
YRVAKLRTRTLSEKRA

SEQ ID NO: 12103 - protein, 16 aa, Homo sapiens
  ( 235 )...( 250 ): >A2AC_HUMAN
RVAKLRTRTLSEKRAP

SEQ ID NO: 12104 - protein, 16 aa, Homo sapiens
  ( 236 )...( 251 ): >A2AC_HUMAN
VAKLRTRTLSEKRAPV

SEQ ID NO: 12105 - protein, 16 aa, Homo sapiens
  ( 237 )...( 252 ): >A2AC_HUMAN
AKLRTRTLSEKRAPVG

SEQ ID NO: 12106 - protein, 16 aa, Homo sapiens
  ( 238 )...( 253 ): >A2AC_HUMAN
KLRTRTLSEKRAPVGP

SEQ ID NO: 12107 - protein, 16 aa, Homo sapiens
  ( 362 )...( 377 ): >A2AC_HUMAN
RARSSVCRRKVAQARE

SEQ ID NO: 12108 - protein, 16 aa, Homo sapiens
  ( 363 )...( 378 ): >A2AC_HUMAN
ARSSVCRRKVAQAREK

SEQ ID NO: 12109 - protein, 16 aa, Homo sapiens
  ( 366 )...( 381 ): >A2AC_HUMAN
SVCRRKVAQAREKRFT

SEQ ID NO: 12110 - protein, 16 aa, Homo sapiens
  ( 370 )...( 385 ): >A2AC_HUMAN
RKVAQAREKRFTFVLA

SEQ ID NO: 12111 - protein, 16 aa, Homo sapiens
  ( 371 )...( 386 ): >A2AC_HUMAN
KVAQAREKRFTFVLAV

SEQ ID NO: 12112 - protein, 16 aa, Homo sapiens
  ( 99 )...( 114 ): >AA1R_HUMAN
LAIAVDRYLRVKIPLR

SEQ ID NO: 12113 - protein, 16 aa, Homo sapiens
  ( 100 )...( 115 ): >AA1R_HUMAN
AIAVDRYLRVKIPLRY

SEQ ID NO: 12114 - protein, 16 aa, Homo sapiens
  ( 107 )...( 122 ): >AA1R_HUMAN
LRVKIPLRYKMVVTPR

SEQ ID NO: 12115 - protein, 16 aa, Homo sapiens
  ( 109 )...( 124 ): >AA1R_HUMAN
VKIPLRYKMVVTPRRA

SEQ ID NO: 12116 - protein, 16 aa, Homo sapiens
  ( 110 )...( 125 ): >AA1R_HUMAN
KIPLRYKMVVTPRRAA

SEQ ID NO: 12117 - protein, 16 aa, Homo sapiens
  ( 111 )...( 126 ): >AA1R_HUMAN
IPLRYKMVVTPRRAAV

SEQ ID NO: 12118 - protein, 16 aa, Homo sapiens
  ( 112 )...( 127 ): >AA1R_HUMAN
PLRYKMVVTPRRAAVA

SEQ ID NO: 12119 - protein, 16 aa, Homo sapiens
  ( 113 )...( 128 ): >AA1R_HUMAN
LRYKMVVTPRRAAVAI

SEQ ID NO: 12120 - protein, 16 aa, Homo sapiens
  ( 114 )...( 129 ): >AA1R_HUMAN
RYKMVVTPRRAAVAIA

SEQ ID NO: 12121 - protein, 16 aa, Homo sapiens
  ( 115 )...( 130 ): >AA1R_HUMAN
YKMVVTPRRAAVAIAG

SEQ ID NO: 12122 - protein, 16 aa, Homo sapiens
  ( 201 )...( 216 ): >AA1R_HUMAN
LEVFYLIRKQLNKKVS

SEQ ID NO: 12123 - protein, 16 aa, Homo sapiens
  ( 202 )...( 217 ): >AA1R_HUMAN
EVFYLIRKQLNKKVSA

SEQ ID NO: 12124 - protein, 16 aa, Homo sapiens
  ( 203 )...( 218 ): >AA1R_HUMAN
VFYLIRKQLNKKVSAS

SEQ ID NO: 12125 - protein, 16 aa, Homo sapiens
  ( 204 )...( 219 ): >AA1R_HUMAN
FYLIRKQLNKKVSASS

SEQ ID NO: 12126 - protein, 16 aa, Homo sapiens
  ( 205 )...( 220 ): >AA1R_HUMAN
YLIRKQLNKKVSASSG

SEQ ID NO: 12127 - protein, 16 aa, Homo sapiens
  ( 102 )...( 117 ): >AA2A_HUMAN
RYIAIRIPLRYNGLVT

SEQ ID NO: 12128 - protein, 16 aa, Homo sapiens
  ( 105 )...( 120 ): >AA2A_HUMAN
AIRIPLRYNGLVTGTR

SEQ ID NO: 12129 - protein, 16 aa, Homo sapiens
  ( 106 )...( 121 ): >AA2A_HUMAN
IRIPLRYNGLVTGTRA

SEQ ID NO: 12130 - protein, 16 aa, Homo sapiens
  ( 107 )...( 122 ): >AA2A_HUMAN
RIPLRYNGLVTGTRAK

SEQ ID NO: 12131 - protein, 16 aa, Homo sapiens
  ( 108 )...( 123 ): >AA2A_HUMAN
IPLRYNGLVTGTRAKG

SEQ ID NO: 12132 - protein, 16 aa, Homo sapiens
  ( 109 )...( 124 ): >AA2A_HUMAN
PLRYNGLVTGTRAKGI

SEQ ID NO: 12133 - protein, 16 aa, Homo sapiens
  ( 194 )...( 209 ): >AA2A_HUMAN
LGVYLRIFLAARRQLK

SEQ ID NO: 12134 - protein, 16 aa, Homo sapiens
  ( 195 )...( 210 ): >AA2A_HUMAN
GVYLRIFLAARRQLKQ

SEQ ID NO: 12135 - protein, 16 aa, Homo sapiens
  ( 103 )...( 118 ): >AA2B_HUMAN
RYLAICVPLRYKSLVT

SEQ ID NO: 12136 - protein, 16 aa, Homo sapiens
  ( 106 )...( 121 ): >AA2B_HUMAN
AICVPLRYKSLVTGTR

SEQ ID NO: 12137 - protein, 16 aa, Homo sapiens
  ( 107 )...( 122 ): >AA2B_HUMAN
ICVPLRYKSLVTGTRA

SEQ ID NO: 12138 - protein, 16 aa, Homo sapiens
  ( 108 )...( 123 ): >AA2B_HUMAN
CVPLRYKSLVTGTRAR

SEQ ID NO: 12139 - protein, 16 aa, Homo sapiens
  ( 109 )...( 124 ): >AA2B_HUMAN
VPLRYKSLVTGTRARG

SEQ ID NO: 12140 - protein, 16 aa, Homo sapiens
  ( 110 )...( 125 ): >AA2B_HUMAN
PLRYKSLVTGTRARGV

SEQ ID NO: 12141 - protein, 16 aa, Homo sapiens
  ( 111 )...( 126 ): >AA2B_HUMAN
LRYKSLVTGTRARGVI

SEQ ID NO: 12142 - protein, 16 aa, Homo sapiens
  ( 112 )...( 127 ): >AA2B_HUMAN
RYKSLVTGTRARGVIA

SEQ ID NO: 12143 - protein, 16 aa, Homo sapiens
  ( 201 )...( 216 ): >AA2B_HUMAN
IYIKIFLVACRQLQRT

SEQ ID NO: 12144 - protein, 16 aa, Homo sapiens
  ( 102 )...( 117 ): >AA3R_HUMAN
LAIAVDRYLRVKLTVR

SEQ ID NO: 12145 - protein, 16 aa, Homo sapiens
  ( 103 )...( 118 ): >AA3R_HUMAN
AIAVDRYLRVKLTVRY

SEQ ID NO: 12146 - protein, 16 aa, Homo sapiens
  ( 104 )...( 119 ): >AA3R_HUMAN
IAVDRYLRVKLTVRYK

SEQ ID NO: 12147 - protein, 16 aa, Homo sapiens
  ( 118 )...( 133 ): >AA3R_HUMAN
YKRVTTHRRIWLALGL

SEQ ID NO: 12148 - protein, 16 aa, Homo sapiens
  ( 119 )...( 134 ): >AA3R_HUMAN
KRVTTHRRIWLALGLC

SEQ ID NO: 12149 - protein, 16 aa, Homo sapiens
  ( 120 )...( 135 ): >AA3R_HUMAN
RVTTHRRIWLALGLCW

SEQ ID NO: 12150 - protein, 16 aa, Homo sapiens
  ( 285 )...( 300 ): >AA3R_HUMAN
KIKKFKETYLLILKAC

SEQ ID NO: 12151 - protein, 16 aa, Homo sapiens
  ( 131 )...( 146 ): >ACM1_HUMAN
LSYRAKRTPRRAALMI

SEQ ID NO: 12152 - protein, 16 aa, Homo sapiens
  ( 132 )...( 147 ): >ACM1_HUMAN
SYRAKRTPRRAALMIG

SEQ ID NO: 12153 - protein, 16 aa, Homo sapiens
  ( 133 )...( 148 ): >ACM1_HUMAN
YRAKRTPRRAALMIGL

SEQ ID NO: 12154 - protein, 16 aa, Homo sapiens
  ( 134 )...( 149 ): >ACM1_HUMAN
RAKRTPRRAALMIGLA

SEQ ID NO: 12155 - protein, 16 aa, Homo sapiens
  ( 135 )...( 150 ): >ACM1_HUMAN
AKRTPRRAALMIGLAW

SEQ ID NO: 12156 - protein, 16 aa, Homo sapiens
  ( 136 )...( 151 ): >ACM1_HUMAN
KRTPRRAALMIGLAWL

SEQ ID NO: 12157 - protein, 16 aa, Homo sapiens
  ( 137 )...( 152 ): >ACM1_HUMAN
RTPRRAALMIGLAWLV

SEQ ID NO: 12158 - protein, 16 aa, Homo sapiens
  ( 319 )...( 334 ): >ACM1_HUMAN
PRSSPNTVKRPTKKGR

SEQ ID NO: 12159 - protein, 16 aa, Homo sapiens
  ( 322 )...( 337 ): >ACM1_HUMAN
SPNTVKRPTKKGRDRA

SEQ ID NO: 12160 - protein, 16 aa, Homo sapiens
  ( 323 )...( 338 ): >ACM1_HUMAN
PNTVKRPTKKGRDRAG

SEQ ID NO: 12161 - protein, 16 aa, Homo sapiens
  ( 324 )...( 339 ): >ACM1_HUMAN
NTVKRPTKKGRDRAGK

SEQ ID NO: 12162 - protein, 16 aa, Homo sapiens
  ( 325 )...( 340 ): >ACM1_HUMAN
TVKRPTKKGRDRAGKG

SEQ ID NO: 12163 - protein, 16 aa, Homo sapiens
  ( 326 )...( 341 ): >ACM1_HUMAN
VKRPTKKGRDRAGKGQ

SEQ ID NO: 12164 - protein, 16 aa, Homo sapiens
  ( 328 )...( 343 ): >ACM1_HUMAN
RPTKKGRDRAGKGQKP

SEQ ID NO: 12165 - protein, 16 aa, Homo sapiens
  ( 329 )...( 344 ): >ACM1_HUMAN
PTKKGRDRAGKGQKPR

SEQ ID NO: 12166 - protein, 16 aa, Homo sapiens
  ( 334 )...( 349 ): >ACM1_HUMAN
RDRAGKGQKPRGKEQL

SEQ ID NO: 12167 - protein, 16 aa, Homo sapiens
  ( 335 )...( 350 ): >ACM1_HUMAN
DRAGKGQKPRGKEQLA

SEQ ID NO: 12168 - protein, 16 aa, Homo sapiens
  ( 336 )...( 351 ): >ACM1_HUMAN
RAGKGQKPRGKEQLAK

SEQ ID NO: 12169 - protein, 16 aa, Homo sapiens
  ( 337 )...( 352 ): >ACM1_HUMAN
AGKGQKPRGKEQLAKR

SEQ ID NO: 12170 - protein, 16 aa, Homo sapiens
  ( 338 )...( 353 ): >ACM1_HUMAN
GKGQKPRGKEQLAKRK

SEQ ID NO: 12171 - protein, 16 aa, Homo sapiens
  ( 339 )...( 354 ): >ACM1_HUMAN
KGQKPRGKEQLAKRKT

SEQ ID NO: 12172 - protein, 16 aa, Homo sapiens
  ( 340 )...( 355 ): >ACM1_HUMAN
GQKPRGKEQLAKRKTF

SEQ ID NO: 12173 - protein, 16 aa, Homo sapiens
  ( 342 )...( 357 ): >ACM1_HUMAN
KPRGKEQLAKRKTFSL

SEQ ID NO: 12174 - protein, 16 aa, Homo sapiens
  ( 343 )...( 358 ): >ACM1_HUMAN
PRGKEQLAKRKTFSLV

SEQ ID NO: 12175 - protein, 16 aa, Homo sapiens
  ( 344 )...( 359 ): >ACM1_HUMAN
RGKEQLAKRKTFSLVK

SEQ ID NO: 12176 - protein, 16 aa, Homo sapiens
  ( 346 )...( 361 ): >ACM1_HUMAN
KEQLAKRKTFSLVKEK

SEQ ID NO: 12177 - protein, 16 aa, Homo sapiens
  ( 347 )...( 362 ): >ACM1_HUMAN
EQLAKRKTFSLVKEKK

SEQ ID NO: 12178 - protein, 16 aa, Homo sapiens
  ( 348 )...( 363 ): >ACM1_HUMAN
QLAKRKTFSLVKEKKA

SEQ ID NO: 12179 - protein, 16 aa, Homo sapiens
  ( 349 )...( 364 ): >ACM1_HUMAN
LAKRKTFSLVKEKKAA

SEQ ID NO: 12180 - protein, 16 aa, Homo sapiens
  ( 350 )...( 365 ): >ACM1_HUMAN
AKRKTFSLVKEKKAAR

SEQ ID NO: 12181 - protein, 16 aa, Homo sapiens
  ( 351 )...( 366 ): >ACM1_HUMAN
KRKTFSLVKEKKAART

SEQ ID NO: 12182 - protein, 16 aa, Homo sapiens
  ( 352 )...( 367 ): >ACM1_HUMAN
RKTFSLVKEKKAARTL

SEQ ID NO: 12183 - protein, 16 aa, Homo sapiens
  ( 353 )...( 368 ): >ACM1_HUMAN
KTFSLVKEKKAARTLS

SEQ ID NO: 12184 - protein, 16 aa, Homo sapiens
  ( 357 )...( 372 ): >ACM1_HUMAN
LVKEKKAARTLSAILL

SEQ ID NO: 12185 - protein, 16 aa, Homo sapiens
  ( 358 )...( 373 ): >ACM1_HUMAN
VKEKKAARTLSAILLA

SEQ ID NO: 12186 - protein, 16 aa, Homo sapiens
  ( 359 )...( 374 ): >ACM1_HUMAN
KEKKAARTLSAILLAF

SEQ ID NO: 12187 - protein, 16 aa, Homo sapiens
  ( 361 )...( 376 ): >ACM1_HUMAN
KKAARTLSAILLAFIL

SEQ ID NO: 12188 - protein, 16 aa, Homo sapiens
  ( 444 )...( 459 ): >ACM1_HUMAN
KIPKRPGSVHRTPSRQ

SEQ ID NO: 12189 - protein, 16 aa, Homo sapiens
  ( 121 )...( 136 ): >ACM2_HUMAN
RYFCVTKPLTYPVKRT

SEQ ID NO: 12190 - protein, 16 aa, Homo sapiens
  ( 123 )...( 138 ): >ACM2_HUMAN
FCVTKPLTYPVKRTTK

SEQ ID NO: 12191 - protein, 16 aa, Homo sapiens
  ( 124 )...( 139 ): >ACM2_HUMAN
CVTKPLTYPVKRTTKM

SEQ ID NO: 12192 - protein, 16 aa, Homo sapiens
  ( 125 )...( 140 ): >ACM2_HUMAN
VTKPLTYPVKRTTKMA

SEQ ID NO: 12193 - protein, 16 aa, Homo sapiens
  ( 126 )...( 141 ): >ACM2_HUMAN
TKPLTYPVKRTTKMAG

SEQ ID NO: 12194 - protein, 16 aa, Homo sapiens
  ( 127 )...( 142 ): >ACM2_HUMAN
KPLTYPVKRTTKMAGM

SEQ ID NO: 12195 - protein, 16 aa, Homo sapiens
  ( 129 )...( 144 ): >ACM2_HUMAN
LTYPVKRTTKMAGMMI

SEQ ID NO: 12196 - protein, 16 aa, Homo sapiens
  ( 130 )...( 145 ): >ACM2_HUMAN
TYPVKRTTKMAGMMIA

SEQ ID NO: 12197 - protein, 16 aa, Homo sapiens
  ( 133 )...( 148 ): >ACM2_HUMAN
VKRTTKMAGMMIAAAW

SEQ ID NO: 12198 - protein, 16 aa, Homo sapiens
  ( 134 )...( 149 ): >ACM2_HUMAN
KRTTKMAGMMIAAAWV

SEQ ID NO: 12199 - protein, 16 aa, Homo sapiens
  ( 201 )...( 216 ): >ACM2_HUMAN
IMTVLYWHISRASKSR

SEQ ID NO: 12200 - protein, 16 aa, Homo sapiens
  ( 202 )...( 217 ): >ACM2_HUMAN
MTVLYWHISRASKSRI

SEQ ID NO: 12201 - protein, 16 aa, Homo sapiens
  ( 211 )...( 226 ): >ACM2_HUMAN
RASKSRIKKDKKEPVA

SEQ ID NO: 12202 - protein, 16 aa, Homo sapiens
  ( 212 )...( 227 ): >ACM2_HUMAN
ASKSRIKKDKKEPVAN

SEQ ID NO: 12203 - protein, 16 aa, Homo sapiens
  ( 319 )...( 334 ): >ACM2_HUMAN
NSKQTCIRIGTKTPKS

SEQ ID NO: 12204 - protein, 16 aa, Homo sapiens
  ( 355 )...( 370 ): >ACM2_HUMAN
DEKQNIVARKIVKMTK

SEQ ID NO: 12205 - protein, 16 aa, Homo sapiens
  ( 356 )...( 371 ): >ACM2_HUMAN
EKQNIVARKIVKMTKQ

SEQ ID NO: 12206 - protein, 16 aa, Homo sapiens
  ( 357 )...( 372 ): >ACM2_HUMAN
KQNIVARKIVKMTKQP

SEQ ID NO: 12207 - protein, 16 aa, Homo sapiens
  ( 358 )...( 373 ): >ACM2_HUMAN
QNIVARKIVKMTKQPA

SEQ ID NO: 12208 - protein, 16 aa, Homo sapiens
  ( 359 )...( 374 ): >ACM2_HUMAN
NIVARKIVKMTKQPAK

SEQ ID NO: 12209 - protein, 16 aa, Homo sapiens
  ( 360 )...( 375 ): >ACM2_HUMAN
IVARKIVKMTKQPAKK

SEQ ID NO: 12210 - protein, 16 aa, Homo sapiens
  ( 361 )...( 376 ): >ACM2_HUMAN
VARKIVKMTKQPAKKK

SEQ ID NO: 12211 - protein, 16 aa, Homo sapiens
  ( 362 )...( 377 ): >ACM2_HUMAN
ARKIVKMTKQPAKKKP

SEQ ID NO: 12212 - protein, 16 aa, Homo sapiens
  ( 364 )...( 379 ): >ACM2_HUMAN
KIVKMTKQPAKKKPPP

SEQ ID NO: 12213 - protein, 16 aa, Homo sapiens
  ( 375 )...( 390 ): >ACM2_HUMAN
KKPPPSREKKVTRTIL

SEQ ID NO: 12214 - protein, 16 aa, Homo sapiens
  ( 376 )...( 391 ): >ACM2_HUMAN
KPPPSREKKVTRTILA

SEQ ID NO: 12215 - protein, 16 aa, Homo sapiens
  ( 377 )...( 392 ): >ACM2_HUMAN
PPPSREKKVTRTILAI

SEQ ID NO: 12216 - protein, 16 aa, Homo sapiens
  ( 378 )...( 393 ): >ACM2_HUMAN
PPSREKKVTRTILAIL

SEQ ID NO: 12217 - protein, 16 aa, Homo sapiens
  ( 379 )...( 394 ): >ACM2_HUMAN
PSREKKVTRTILAILL

SEQ ID NO: 12218 - protein, 16 aa, Homo sapiens
  ( 380 )...( 395 ): >ACM2_HUMAN
SREKKVTRTILAILLA

SEQ ID NO: 12219 - protein, 16 aa, Homo sapiens
  ( 381 )...( 396 ): >ACM2_HUMAN
REKKVTRTILAILLAF

SEQ ID NO: 12220 - protein, 16 aa, Homo sapiens
  ( 85 )...( 100 ): >ACM3_HUMAN
GNILVIVSFKVNKQLK

SEQ ID NO: 12221 - protein, 16 aa, Homo sapiens
  ( 168 )...( 183 ): >ACM3_HUMAN
FSITRPLTYRAKRTTK

SEQ ID NO: 12222 - protein, 16 aa, Homo sapiens
  ( 169 )...( 184 ): >ACM3_HUMAN
SITRPLTYRAKRTTKR

SEQ ID NO: 12223 - protein, 16 aa, Homo sapiens
  ( 170 )...( 185 ): >ACM3_HUMAN
ITRPLTYRAKRTTKRA

SEQ ID NO: 12224 - protein, 16 aa, Homo sapiens
  ( 171 )...( 186 ): >ACM3_HUMAN
TRPLTYRAKRTTKRAG

SEQ ID NO: 12225 - protein, 16 aa, Homo sapiens
  ( 172 )...( 187 ): >ACM3_HUMAN
RPLTYRAKRTTKRAGV

SEQ ID NO: 12226 - protein, 16 aa, Homo sapiens
  ( 173 )...( 188 ): >ACM3_HUMAN
PLTYRAKRTTKRAGVM

SEQ ID NO: 12227 - protein, 16 aa, Homo sapiens
  ( 174 )...( 189 ): >ACM3_HUMAN
LTYRAKRTTKRAGVMI

SEQ ID NO: 12228 - protein, 16 aa, Homo sapiens
  ( 175 )...( 190 ): >ACM3_HUMAN
TYRAKRTTKRAGVMIG

SEQ ID NO: 12229 - protein, 16 aa, Homo sapiens
  ( 176 )...( 191 ): >ACM3_HUMAN
YRAKRTTKRAGVMIGL

SEQ ID NO: 12230 - protein, 16 aa, Homo sapiens
  ( 177 )...( 192 ): >ACM3_HUMAN
RAKRTTKRAGVMIGLA

SEQ ID NO: 12231 - protein, 16 aa, Homo sapiens
  ( 178 )...( 193 ): >ACM3_HUMAN
AKRTTKRAGVMIGLAW

SEQ ID NO: 12232 - protein, 16 aa, Homo sapiens
  ( 179 )...( 194 ): >ACM3_HUMAN
KRTTKRAGVMIGLAWV

SEQ ID NO: 12233 - protein, 16 aa, Homo sapiens
  ( 180 )...( 195 ): >ACM3_HUMAN
RTTKRAGVMIGLAWVI

SEQ ID NO: 12234 - protein, 16 aa, Homo sapiens
  ( 455 )...( 470 ): >ACM3_HUMAN
PLSFKEATLAKRFALK

SEQ ID NO: 12235 - protein, 16 aa, Homo sapiens
  ( 457 )...( 472 ): >ACM3_HUMAN
SFKEATLAKRFALKTR

SEQ ID NO: 12236 - protein, 16 aa, Homo sapiens
  ( 458 )...( 473 ): >ACM3_HUMAN
FKEATLAKRFALKTRS

SEQ ID NO: 12237 - protein, 16 aa, Homo sapiens
  ( 459 )...( 474 ): >ACM3_HUMAN
KEATLAKRFALKTRSQ

SEQ ID NO: 12238 - protein, 16 aa, Homo sapiens
  ( 460 )...( 475 ): >ACM3_HUMAN
EATLAKRFALKTRSQI

SEQ ID NO: 12239 - protein, 16 aa, Homo sapiens
  ( 461 )...( 476 ): >ACM3_HUMAN
ATLAKRFALKTRSQIT

SEQ ID NO: 12240 - protein, 16 aa, Homo sapiens
  ( 462 )...( 477 ): >ACM3_HUMAN
TLAKRFALKTRSQITK

SEQ ID NO: 12241 - protein, 16 aa, Homo sapiens
  ( 463 )...( 478 ): >ACM3_HUMAN
LAKRFALKTRSQITKR

SEQ ID NO: 12242 - protein, 16 aa, Homo sapiens
  ( 468 )...( 483 ): >ACM3_HUMAN
ALKTRSQITKRKRMSL

SEQ ID NO: 12243 - protein, 16 aa, Homo sapiens
  ( 469 )...( 484 ): >ACM3_HUMAN
LKTRSQITKRKRMSLV

SEQ ID NO: 12244 - protein, 16 aa, Homo sapiens
  ( 470 )...( 485 ): >ACM3_HUMAN
KTRSQITKRKRMSLVK

SEQ ID NO: 12245 - protein, 16 aa, Homo sapiens
  ( 471 )...( 486 ): >ACM3_HUMAN
TRSQITKRKRMSLVKE

SEQ ID NO: 12246 - protein, 16 aa, Homo sapiens
  ( 473 )...( 488 ): >ACM3_HUMAN
SQITKRKRMSLVKEKK

SEQ ID NO: 12247 - protein, 16 aa, Homo sapiens
  ( 474 )...( 489 ): >ACM3_HUMAN
QITKRKRMSLVKEKKA

SEQ ID NO: 12248 - protein, 16 aa, Homo sapiens
  ( 475 )...( 490 ): >ACM3_HUMAN
ITKRKRMSLVKEKKAA

SEQ ID NO: 12249 - protein, 16 aa, Homo sapiens
  ( 476 )...( 491 ): >ACM3_HUMAN
TKRKRMSLVKEKKAAQ

SEQ ID NO: 12250 - protein, 16 aa, Homo sapiens
  ( 477 )...( 492 ): >ACM3_HUMAN
KRKRMSLVKEKKAAQT

SEQ ID NO: 12251 - protein, 16 aa, Homo sapiens
  ( 478 )...( 493 ): >ACM3_HUMAN
RKRMSLVKEKKAAQTL

SEQ ID NO: 12252 - protein, 16 aa, Homo sapiens
  ( 479 )...( 494 ): >ACM3_HUMAN
KRMSLVKEKKAAQTLS

SEQ ID NO: 12253 - protein, 16 aa, Homo sapiens
  ( 545 )...( 560 ): >ACM3_HUMAN
ALCNKTFRTTFKMLLL

SEQ ID NO: 12254 - protein, 16 aa, Homo sapiens
  ( 552 )...( 567 ): >ACM3_HUMAN
RTTFKMLLLCQCDKKK

SEQ ID NO: 12255 - protein, 16 aa, Homo sapiens
  ( 553 )...( 568 ): >ACM3_HUMAN
TTFKMLLLCQCDKKKR

SEQ ID NO: 12256 - protein, 16 aa, Homo sapiens
  ( 132 )...( 147 ): >ACM4_HUMAN
FCVTKPLTYPARRTTK

SEQ ID NO: 12257 - protein, 16 aa, Homo sapiens
  ( 133 )...( 148 ): >ACM4_HUMAN
CVTKPLTYPARRTTKM

SEQ ID NO: 12258 - protein, 16 aa, Homo sapiens
  ( 134 )...( 149 ): >ACM4_HUMAN
VTKPLTYPARRTTKMA

SEQ ID NO: 12259 - protein, 16 aa, Homo sapiens
  ( 135 )...( 150 ): >ACM4_HUMAN
TKPLTYPARRTTKMAG

SEQ ID NO: 12260 - protein, 16 aa, Homo sapiens
  ( 136 )...( 151 ): >ACM4_HUMAN
KPLTYPARRTTKMAGL

SEQ ID NO: 12261 - protein, 16 aa, Homo sapiens
  ( 137 )...( 152 ): >ACM4_HUMAN
PLTYPARRTTKMAGLM

SEQ ID NO: 12262 - protein, 16 aa, Homo sapiens
  ( 138 )...( 153 ): >ACM4_HUMAN
LTYPARRTTKMAGLMI

SEQ ID NO: 12263 - protein, 16 aa, Homo sapiens
  ( 139 )...( 154 ): >ACM4_HUMAN
TYPARRTTKMAGLMIA

SEQ ID NO: 12264 - protein, 16 aa, Homo sapiens
  ( 140 )...( 155 ): >ACM4_HUMAN
YPARRTTKMAGLMIAA

SEQ ID NO: 12265 - protein, 16 aa, Homo sapiens
  ( 142 )...( 157 ): >ACM4_HUMAN
ARRTTKMAGLMIAAAW

SEQ ID NO: 12266 - protein, 16 aa, Homo sapiens
  ( 143 )...( 158 ): >ACM4_HUMAN
RRTTKMAGLMIAAAWV

SEQ ID NO: 12267 - protein, 16 aa, Homo sapiens
  ( 228 )...( 243 ): >ACM4_HUMAN
KHRPEGPKEKKAKTLA

SEQ ID NO: 12268 - protein, 16 aa, Homo sapiens
  ( 230 )...( 245 ): >ACM4_HUMAN
RPEGPKEKKAKTLAFL

SEQ ID NO: 12269 - protein, 16 aa, Homo sapiens
  ( 233 )...( 248 ): >ACM4_HUMAN
GPKEKKAKTLAFLKSP

SEQ ID NO: 12270 - protein, 16 aa, Homo sapiens
  ( 234 )...( 249 ): >ACM4_HUMAN
PKEKKAKTLAFLKSPL

SEQ ID NO: 12271 - protein, 16 aa, Homo sapiens
  ( 235 )...( 250 ): >ACM4_HUMAN
KEKKAKTLAFLKSPLM

SEQ ID NO: 12272 - protein, 16 aa, Homo sapiens
  ( 236 )...( 251 ): >ACM4_HUMAN
EKKAKTLAFLKSPLMK

SEQ ID NO: 12273 - protein, 16 aa, Homo sapiens
  ( 237 )...( 252 ): >ACM4_HUMAN
KKAKTLAFLKSPLMKQ

SEQ ID NO: 12274 - protein, 16 aa, Homo sapiens
  ( 238 )...( 253 ): >ACM4_HUMAN
KAKTLAFLKSPLMKQS

SEQ ID NO: 12275 - protein, 16 aa, Homo sapiens
  ( 240 )...( 255 ): >ACM4_HUMAN
KTLAFLKSPLMKQSVK

SEQ ID NO: 12276 - protein, 16 aa, Homo sapiens
  ( 241 )...( 256 ): >ACM4_HUMAN
TLAFLKSPLMKQSVKK

SEQ ID NO: 12277 - protein, 16 aa, Homo sapiens
  ( 242 )...( 257 ): >ACM4_HUMAN
LAFLKSPLMKQSVKKP

SEQ ID NO: 12278 - protein, 16 aa, Homo sapiens
  ( 331 )...( 346 ): >ACM4_HUMAN
RALNPASRWSKIQIVT

SEQ ID NO: 12279 - protein, 16 aa, Homo sapiens
  ( 332 )...( 347 ): >ACM4_HUMAN
ALNPASRWSKIQIVTK

SEQ ID NO: 12280 - protein, 16 aa, Homo sapiens
  ( 333 )...( 348 ): >ACM4_HUMAN
LNPASRWSKIQIVTKQ

SEQ ID NO: 12281 - protein, 16 aa, Homo sapiens
  ( 334 )...( 349 ): >ACM4_HUMAN
NPASRWSKIQIVTKQT

SEQ ID NO: 12282 - protein, 16 aa, Homo sapiens
  ( 335 )...( 350 ): >ACM4_HUMAN
PASRWSKIQIVTKQTG

SEQ ID NO: 12283 - protein, 16 aa, Homo sapiens
  ( 336 )...( 351 ): >ACM4_HUMAN
ASRWSKIQIVTKQTGN

SEQ ID NO: 12284 - protein, 16 aa, Homo sapiens
  ( 371 )...( 386 ): >ACM4_HUMAN
ANVARKFASIARNQVR

SEQ ID NO: 12285 - protein, 16 aa, Homo sapiens
  ( 372 )...( 387 ): >ACM4_HUMAN
NVARKFASIARNQVRK

SEQ ID NO: 12286 - protein, 16 aa, Homo sapiens
  ( 373 )...( 388 ): >ACM4_HUMAN
VARKFASIARNQVRKK

SEQ ID NO: 12287 - protein, 16 aa, Homo sapiens
  ( 378 )...( 393 ): >ACM4_HUMAN
ASIARNQVRKKRQMAA

SEQ ID NO: 12288 - protein, 16 aa, Homo sapiens
  ( 387 )...( 402 ): >ACM4_HUMAN
KKRQMAARERKVTRTI

SEQ ID NO: 12289 - protein, 16 aa, Homo sapiens
  ( 389 )...( 404 ): >ACM4_HUMAN
RQMAARERKVTRTIFA

SEQ ID NO: 12290 - protein, 16 aa, Homo sapiens
  ( 390 )...( 405 ): >ACM4_HUMAN
QMAARERKVTRTIFAI

SEQ ID NO: 12291 - protein, 16 aa, Homo sapiens
  ( 391 )...( 406 ): >ACM4_HUMAN
MAARERKVTRTIFAIL

SEQ ID NO: 12292 - protein, 16 aa, Homo sapiens
  ( 392 )...( 407 ): >ACM4_HUMAN
AARERKVTRTIFAILL

SEQ ID NO: 12293 - protein, 16 aa, Homo sapiens
  ( 393 )...( 408 ): >ACM4_HUMAN
ARERKVTRTIFAILLA

SEQ ID NO: 12294 - protein, 16 aa, Homo sapiens
  ( 394 )...( 409 ): >ACM4_HUMAN
RERKVTRTIFAILLAF

SEQ ID NO: 12295 - protein, 16 aa, Homo sapiens
  ( 462 )...( 477 ): >ACM4_HUMAN
KTFRHLLLCQYRNIGT

SEQ ID NO: 12296 - protein, 15 aa, Homo sapiens
  ( 465 )...( 480 ): >ACM4_HUMAN
RHLLLCQYRNIGTAR

SEQ ID NO: 12297 - protein, 16 aa, Homo sapiens
  ( 133 )...( 148 ): >ACM5_HUMAN
TRPLTYRAKRTPKRAG

SEQ ID NO: 12298 - protein, 16 aa, Homo sapiens
  ( 134 )...( 149 ): >ACM5_HUMAN
RPLTYRAKRTPKRAGI

SEQ ID NO: 12299 - protein, 16 aa, Homo sapiens
  ( 135 )...( 150 ): >ACM5_HUMAN
PLTYRAKRTPKRAGIM

SEQ ID NO: 12300 - protein, 16 aa, Homo sapiens
  ( 136 )...( 151 ): >ACM5_HUMAN
LTYRAKRTPKRAGIMI

SEQ ID NO: 12301 - protein, 16 aa, Homo sapiens
  ( 137 )...( 152 ): >ACM5_HUMAN
TYRAKRTPKRAGIMIG

SEQ ID NO: 12302 - protein, 16 aa, Homo sapiens
  ( 138 )...( 153 ): >ACM5_HUMAN
YRAKRTPKRAGIMIGL

SEQ ID NO: 12303 - protein, 16 aa, Homo sapiens
  ( 139 )...( 154 ): >ACM5_HUMAN
RAKRTPKRAGIMIGLA

SEQ ID NO: 12304 - protein, 16 aa, Homo sapiens
  ( 140 )...( 155 ): >ACM5_HUMAN
AKRTPKRAGIMIGLAW

SEQ ID NO: 12305 - protein, 16 aa, Homo sapiens
  ( 141 )...( 156 ): >ACM5_HUMAN
KRTPKRAGIMIGLAWL

SEQ ID NO: 12306 - protein, 16 aa, Homo sapiens
  ( 142 )...( 157 ): >ACM5_HUMAN
RTPKRAGIMIGLAWLI

SEQ ID NO: 12307 - protein, 16 aa, Homo sapiens
  ( 235 )...( 250 ): >ACM5_HUMAN
SVTKAEKRKPAHRALF

SEQ ID NO: 12308 - protein, 16 aa, Homo sapiens
  ( 370 )...( 385 ): >ACM5_HUMAN
RPKSQKCVAYKFRLVV

SEQ ID NO: 12309 - protein, 16 aa, Homo sapiens
  ( 371 )...( 386 ): >ACM5_HUMAN
PKSQKCVAYKFRLVVK

SEQ ID NO: 12310 - protein, 16 aa, Homo sapiens
  ( 372 )...( 387 ): >ACM5_HUMAN
KSQKCVAYKFRLVVKA

SEQ ID NO: 12311 - protein, 16 aa, Homo sapiens
  ( 373 )...( 388 ): >ACM5_HUMAN
SQKCVAYKFRLVVKAD

SEQ ID NO: 12312 - protein, 16 aa, Homo sapiens
  ( 374 )...( 389 ): >ACM5_HUMAN
QKCVAYKFRLVVKADG

SEQ ID NO: 12313 - protein, 16 aa, Homo sapiens
  ( 420 )...( 435 ): >ACM5_HUMAN
PNPSHQMTKRKRVVLV

SEQ ID NO: 12314 - protein, 16 aa, Homo sapiens
  ( 421 )...( 436 ): >ACM5_HUMAN
NPSHQMTKRKRVVLVK

SEQ ID NO: 12315 - protein, 16 aa, Homo sapiens
  ( 422 )...( 437 ): >ACM5_HUMAN
PSHQMTKRKRVVLVKE

SEQ ID NO: 12316 - protein, 16 aa, Homo sapiens
  ( 425 )...( 440 ): >ACM5_HUMAN
QMTKRKRVVLVKERKA

SEQ ID NO: 12317 - protein, 16 aa, Homo sapiens
  ( 426 )...( 441 ): >ACM5_HUMAN
MTKRKRVVLVKERKAA

SEQ ID NO: 12318 - protein, 16 aa, Homo sapiens
  ( 427 )...( 442 ): >ACM5_HUMAN
TKRKRVVLVKERKAAQ

SEQ ID NO: 12319 - protein, 16 aa, Homo sapiens
  ( 428 )...( 443 ): >ACM5_HUMAN
KRKRVVLVKERKAAQT

SEQ ID NO: 12320 - protein, 16 aa, Homo sapiens
  ( 429 )...( 444 ): >ACM5_HUMAN
RKRVVLVKERKAAQTL

SEQ ID NO: 12321 - protein, 16 aa, Homo sapiens
  ( 430 )...( 445 ): >ACM5_HUMAN
KRVVLVKERKAAQTLS

SEQ ID NO: 12322 - protein, 16 aa, Homo sapiens
  ( 431 )...( 446 ): >ACM5_HUMAN
RVVLVKERKAAQTLSA

SEQ ID NO: 12323 - protein, 16 aa, Homo sapiens
  ( 496 )...( 511 ): >ACM5_HUMAN
ALCNRTFRKTFKMLLL

SEQ ID NO: 12324 - protein, 16 aa, Homo sapiens
  ( 497 )...( 512 ): >ACM5_HUMAN
LCNRTFRKTFKMLLLC

SEQ ID NO: 12325 - protein, 16 aa, Homo sapiens
  ( 81 )...( 96 ): >ACTR_HUMAN
NILIILRNMGYLKPRG

SEQ ID NO: 12326 - protein, 16 aa, Homo sapiens
  ( 82 )...( 97 ): >ACTR_HUMAN
ILIILRNMGYLKPRGS

SEQ ID NO: 12327 - protein, 16 aa, Homo sapiens
  ( 83 )...( 98 ): >ACTR_HUMAN
LIILRNMGYLKPRGSF

SEQ ID NO: 12328 - protein, 16 aa, Homo sapiens
  ( 133 )...( 148 ): >ACTR_HUMAN
FHALRYHSIVTMRRTV

SEQ ID NO: 12329 - protein, 16 aa, Homo sapiens
  ( 134 )...( 149 ): >ACTR_HUMAN
HALRYHSIVTMRRTVV

SEQ ID NO: 12330 - protein, 16 aa, Homo sapiens
  ( 135 )...( 150 ): >ACTR_HUMAN
ALRYHSIVTMRRTVVV

SEQ ID NO: 12331 - protein, 16 aa, Homo sapiens
  ( 136 )...( 151 ): >ACTR_HUMAN
LRYHSIVTMRRTVVVL

SEQ ID NO: 12332 - protein, 16 aa, Homo sapiens
  ( 137 )...( 152 ): >ACTR_HUMAN
RYHSIVTMRRTVVVLT

SEQ ID NO: 12333 - protein, 16 aa, Homo sapiens
  ( 197 )...( 212 ): >ACTR_HUMAN
FLLARSHTRKISTLPR

SEQ ID NO: 12334 - protein, 16 aa, Homo sapiens
  ( 198 )...( 213 ): >ACTR_HUMAN
LLARSHTRKISTLPRA

SEQ ID NO: 12335 - protein, 16 aa, Homo sapiens
  ( 199 )...( 214 ): >ACTR_HUMAN
LARSHTRKISTLPRAN

SEQ ID NO: 12336 - protein, 16 aa, Homo sapiens
  ( 200 )...( 215 ): >ACTR_HUMAN
ARSHTRKISTLPRANM

SEQ ID NO: 12337 - protein, 16 aa, Homo sapiens
  ( 202 )...( 217 ): >ACTR_HUMAN
SHTRKISTLPRANMKG

SEQ ID NO: 12338 - protein, 16 aa, Homo sapiens
  ( 203 )...( 218 ): >ACTR_HUMAN
HTRKISTLPRANMKGA

SEQ ID NO: 12339 - protein, 16 aa, Homo sapiens
  ( 204 )...( 219 ): >ACTR_HUMAN
TRKISTLPRANMKGAI

SEQ ID NO: 12340 - protein, 16 aa, Homo sapiens
  ( 205 )...( 220 ): >ACTR_HUMAN
RKISTLPRANMKGAIT

SEQ ID NO: 12341 - protein, 16 aa, Homo sapiens
  ( 206 )...( 221 ): >ACTR_HUMAN
KISTLPRANMKGAITL

SEQ ID NO: 12342 - protein, 16 aa, Homo sapiens
  ( 165 )...( 180 ): >ADMR_HUMAN
YQHRVRRAMCAGIWVL

SEQ ID NO: 12343 - protein, 16 aa, Homo sapiens
  ( 166 )...( 181 ): >ADMR_HUMAN
QHRVRRAMCAGIWVLS

SEQ ID NO: 12344 - protein, 16 aa, Homo sapiens
  ( 168 )...( 183 ): >ADMR_HUMAN
RVRRAMCAGIWVLSAI

SEQ ID NO: 12345 - protein, 16 aa, Homo sapiens
  ( 239 )...( 254 ): >ADMR_HUMAN
VLTACRLRQPGQPKSR

SEQ ID NO: 12346 - protein, 16 aa, Homo sapiens
  ( 240 )...( 255 ): >ADMR_HUMAN
LTACRLRQPGQPKSRR

SEQ ID NO: 12347 - protein, 16 aa, Homo sapiens
  ( 245 )...( 260 ): >ADMR_HUMAN
LRQPGQPKSRRHCLLL

SEQ ID NO: 12348 - protein, 16 aa, Homo sapiens
  ( 225 )...( 240 ): >AG22_HUMAN
IFIATCYFGIRKHLLK

SEQ ID NO: 12349 - protein, 16 aa, Homo sapiens
  ( 231 )...( 246 ): >AG22_HUMAN
YFGIRKHLLKTNSYGK

SEQ ID NO: 12350 - protein, 16 aa, Homo sapiens
  ( 232 )...( 247 ): >AG22_HUMAN
FGIRKHLLKTNSYGKN

SEQ ID NO: 12351 - protein, 16 aa, Homo sapiens
  ( 233 )...( 248 ): >AG22_HUMAN
GIRKHLLKTNSYGKNR

SEQ ID NO: 12352 - protein, 16 aa, Homo sapiens
  ( 239 )...( 254 ): >AG22_HUMAN
LKTNSYGKNRITRDQV

SEQ ID NO: 12353 - protein, 16 aa, Homo sapiens
  ( 240 )...( 255 ): >AG22_HUMAN
KTNSYGKNRITRDQVL

SEQ ID NO: 12354 - protein, 16 aa, Homo sapiens
  ( 241 )...( 256 ): >AG22_HUMAN
TNSYGKNRITRDQVLK

SEQ ID NO: 12355 - protein, 16 aa, Homo sapiens
  ( 243 )...( 258 ): >AG22_HUMAN
SYGKNRITRDQVLKMA

SEQ ID NO: 12356 - protein, 16 aa, Homo sapiens
  ( 244 )...( 259 ): >AG22_HUMAN
YGKNRITRDQVLKMAA

SEQ ID NO: 12357 - protein, 16 aa, Homo sapiens
  ( 245 )...( 260 ): >AG22_HUMAN
GKNRITRDQVLKMAAA

SEQ ID NO: 12358 - protein, 16 aa, Homo sapiens
  ( 246 )...( 261 ): >AG22_HUMAN
KNRITRDQVLKMAAAV

SEQ ID NO: 12359 - protein, 16 aa, Homo sapiens
  ( 327 )...( 342 ): >AG22_HUMAN
QKLRSVFRVPITWLQG

SEQ ID NO: 12360 - protein, 16 aa, Homo sapiens
  ( 328 )...( 343 ): >AG22_HUMAN
KLRSVFRVPITWLQGK

SEQ ID NO: 12361 - protein, 16 aa, Homo sapiens
  ( 329 )...( 344 ): >AG22_HUMAN
LRSVFRVPITWLQGKR

SEQ ID NO: 12362 - protein, 16 aa, Homo sapiens
  ( 330 )...( 345 ): >AG22_HUMAN
RSVFRVPITWLQGKRE

SEQ ID NO: 12363 - protein, 16 aa, Homo sapiens
  ( 337 )...( 352 ): >AG22_HUMAN
ITWLQGKRESMSCRKS

SEQ ID NO: 12364 - protein, 16 aa, Homo sapiens
  ( 128 )...( 143 ): >AG2R_HUMAN
LAIVHPMKSRLRRTML

SEQ ID NO: 12365 - protein, 16 aa, Homo sapiens
  ( 129 )...( 144 ): >AG2R_HUMAN
AIVHPMKSRLRRTMLV

SEQ ID NO: 12366 - protein, 16 aa, Homo sapiens
  ( 130 )...( 145 ): >AG2R_HUMAN
IVHPMKSRLRRTMLVA

SEQ ID NO: 12367 - protein, 16 aa, Homo sapiens
  ( 131 )...( 146 ): >AG2R_HUMAN
VHPMKSRLRRTMLVAK

SEQ ID NO: 12368 - protein, 16 aa, Homo sapiens
  ( 132 )...( 147 ): >AG2R_HUMAN
HPMKSRLRRTMLVAKV

SEQ ID NO: 12369 - protein, 16 aa, Homo sapiens
  ( 133 )...( 148 ): >AG2R_HUMAN
PMKSRLRRTMLVAKVT

SEQ ID NO: 12370 - protein, 16 aa, Homo sapiens
  ( 134 )...( 149 ): >AG2R_HUMAN
MKSRLRRTMLVAKVTC

SEQ ID NO: 12371 - protein, 16 aa, Homo sapiens
  ( 135 )...( 150 ): >AG2R_HUMAN
KSRLRRTMLVAKVTCI

SEQ ID NO: 12372 - protein, 16 aa, Homo sapiens
  ( 136 )...( 151 ): >AG2R_HUMAN
SRLRRTMLVAKVTCII

SEQ ID NO: 12373 - protein, 16 aa, Homo sapiens
  ( 137 )...( 152 ): >AG2R_HUMAN
RLRRTMLVAKVTCIII

SEQ ID NO: 12374 - protein, 16 aa, Homo sapiens
  ( 216 )...( 231 ): >AG2R_HUMAN
TLIWKALKKAYEIQKN

SEQ ID NO: 12375 - protein, 16 aa, Homo sapiens
  ( 128 )...( 143 ): >AG2S_HUMAN
LAIVHPMKSRLRRTML

SEQ ID NO: 12376 - protein, 16 aa, Homo sapiens
  ( 129 )...( 144 ): >AG2S_HUMAN
AIVHPMKSRLRRTMLV

SEQ ID NO: 12377 - protein, 16 aa, Homo sapiens
  ( 130 )...( 145 ): >AG2S_HUMAN
IVHPMKSRLRRTMLVA

SEQ ID NO: 12378 - protein, 16 aa, Homo sapiens
  ( 131 )...( 146 ): >AG2S_HUMAN
VHPMKSRLRRTMLVAK

SEQ ID NO: 12379 - protein, 16 aa, Homo sapiens
  ( 132 )...( 147 ): >AG2S_HUMAN
HPMKSRLRRTMLVAKV

SEQ ID NO: 12380 - protein, 16 aa, Homo sapiens
  ( 133 )...( 148 ): >AG2S_HUMAN
PMKSRLRRTMLVAKVT

SEQ ID NO: 12381 - protein, 16 aa, Homo sapiens
  ( 134 )...( 149 ): >AG2S_HUMAN
MKSRLRRTMLVAKVTC

SEQ ID NO: 12382 - protein, 16 aa, Homo sapiens
  ( 135 )...( 150 ): >AG2S_HUMAN
KSRLRRTMLVAKVTCI

SEQ ID NO: 12383 - protein, 16 aa, Homo sapiens
  ( 136 )...( 151 ): >AG2S_HUMAN
SRLRRTMLVAKVTCII

SEQ ID NO: 12384 - protein, 16 aa, Homo sapiens
  ( 137 )...( 152 ): >AG2S_HUMAN
RLRRTMLVAKVTCIII

SEQ ID NO: 12385 - protein, 16 aa, Homo sapiens
  ( 216 )...( 231 ): >AG2S_HUMAN
TLIWKALKKAYEIQKN

SEQ ID NO: 12386 - protein, 16 aa, Homo sapiens
  ( 300 )...( 315 ): >AG2S_HUMAN
LFYGFLGKKFKKDILQ

SEQ ID NO: 12387 - protein, 16 aa, Homo sapiens
  ( 301 )...( 316 ): >AG2S_HUMAN
FYGFLGKKFKKDILQL

SEQ ID NO: 12388 - protein, 16 aa, Homo sapiens
  ( 302 )...( 317 ): >AG2S_HUMAN
YGFLGKKFKKDILQLL

SEQ ID NO: 12389 - protein, 16 aa, Homo sapiens
  ( 303 )...( 318 ): >AG2S_HUMAN
GFLGKKFKKDILQLLK

SEQ ID NO: 12390 - protein, 16 aa, Homo sapiens
  ( 305 )...( 320 ): >AG2S_HUMAN
LGKKFKKDILQLLKYI

SEQ ID NO: 12391 - protein, 16 aa, Homo sapiens
  ( 306 )...( 321 ): >AG2S_HUMAN
GKKFKKDILQLLKYIP

SEQ ID NO: 12392 - protein, 16 aa, Homo sapiens
  ( 310 )...( 325 ): >AG2S_HUMAN
KKDILQLLKYIPPKAK

SEQ ID NO: 12393 - protein, 16 aa, Homo sapiens
  ( 46 )...( 61 ): >APJ_HUMAN
NGLVLWTVFRSSREKR

SEQ ID NO: 12394 - protein, 16 aa, Homo sapiens
  ( 126 )...( 141 ): >APJ_HUMAN
DRYLAIVRPVANARLR

SEQ ID NO: 12395 - protein, 16 aa, Homo sapiens
  ( 127 )...( 142 ): >APJ_HUMAN
RYLAIVRPVANARLRL

SEQ ID NO: 12396 - protein, 16 aa, Homo sapiens
  ( 128 )...( 143 ): >APJ_HUMAN
YLAIVRPVANARLRLR

SEQ ID NO: 12397 - protein, 16 aa, Homo sapiens
  ( 129 )...( 144 ): >APJ_HUMAN
LAIVRPVANARLRLRV

SEQ ID NO: 12398 - protein, 16 aa, Homo sapiens
  ( 130 )...( 145 ): >APJ_HUMAN
AIVRPVANARLRLRVS

SEQ ID NO: 12399 - protein, 16 aa, Homo sapiens
  ( 131 )...( 146 ): >APJ_HUMAN
IVRPVANARLRLRVSG

SEQ ID NO: 12400 - protein, 16 aa, Homo sapiens
  ( 132 )...( 147 ): >APJ_HUMAN
VRPVANARLRLRVSGA

SEQ ID NO: 12401 - protein, 16 aa, Homo sapiens
  ( 133 )...( 148 ): >APJ_HUMAN
RPVANARLRLRVSGAV

SEQ ID NO: 12402 - protein, 16 aa, Homo sapiens
  ( 139 )...( 154 ): >APJ_HUMAN
RLRLRVSGAVATAVLW

SEQ ID NO: 12403 - protein, 16 aa, Homo sapiens
  ( 227 )...( 242 ): >APJ_HUMAN
TIAGHFRKERIEGLRK

SEQ ID NO: 12404 - protein, 16 aa, Homo sapiens
  ( 235 )...( 250 ): >APJ_HUMAN
ERIEGLRKRRRLLSII

SEQ ID NO: 12405 - protein, 16 aa, Homo sapiens
  ( 236 )...( 251 ): >APJ_HUMAN
RIEGLRKRRRLLSIIV

SEQ ID NO: 12406 - protein, 16 aa, Homo sapiens
  ( 237 )...( 252 ): >APJ_HUMAN
IEGLRKRRRLLSIIVV

SEQ ID NO: 12407 - protein, 16 aa, Homo sapiens
  ( 238 )...( 253 ): >APJ_HUMAN
EGLRKRRRLLSIIVVL

SEQ ID NO: 12408 - protein, 16 aa, Homo sapiens
  ( 239 )...( 254 ): >APJ_HUMAN
GLRKRRRLLSIIVVLV

SEQ ID NO: 12409 - protein, 16 aa, Homo sapiens
  ( 240 )...( 255 ): >APJ_HUMAN
LRKRRRLLSIIVVLVV

SEQ ID NO: 12410 - protein, 16 aa, Homo sapiens
  ( 241 )...( 256 ): >APJ_HUMAN
RKRRRLLSIIVVLVVT

SEQ ID NO: 12411 - protein, 16 aa, Homo sapiens
  ( 17 )...( 32 ): >ARK2_HUMAN
MEKSKATPAARASKRI

SEQ ID NO: 12412 - protein, 16 aa, Homo sapiens
  ( 18 )...( 33 ): >ARK2_HUMAN
EKSKATPAARASKRIV

SEQ ID NO: 12413 - protein, 16 aa, Homo sapiens
  ( 19 )...( 34 ): >ARK2_HUMAN
KSKATPAARASKRIVL

SEQ ID NO: 12414 - protein, 16 aa, Homo sapiens
  ( 20 )...( 35 ): >ARK2_HUMAN
SKATPAARASKRIVLP

SEQ ID NO: 12415 - protein, 16 aa, Homo sapiens
  ( 21 )...( 36 ): >ARK2_HUMAN
KATPAARASKRIVLPE

SEQ ID NO: 12416 - protein, 16 aa, Homo sapiens
  ( 25 )...( 40 ): >ARK2_HUMAN
AARASKRIVLPEPSIR

SEQ ID NO: 12417 - protein, 16 aa, Homo sapiens
  ( 26 )...( 41 ): >ARK2_HUMAN
ARASKRIVLPEPSIRS

SEQ ID NO: 12418 - protein, 16 aa, Homo sapiens
  ( 27 )...( 42 ): >ARK2_HUMAN
RASKRIVLPEPSIRSV

SEQ ID NO: 12419 - protein, 16 aa, Homo sapiens
  ( 30 )...( 45 ): >ARK2_HUMAN
KRIVLPEPSIRSVMQK

SEQ ID NO: 12420 - protein, 16 aa, Homo sapiens
  ( 195 )...( 210 ): >ARK2_HUMAN
RIIGRGGFGEVYGCRK

SEQ ID NO: 12421 - protein, 16 aa, Homo sapiens
  ( 213 )...( 228 ): >ARK2_HUMAN
TGKMYAMKCLDKKRIK

SEQ ID NO: 12422 - protein, 16 aa, Homo sapiens
  ( 214 )...( 229 ): >ARK2_HUMAN
GKMYAMKCLDKKRIKM

SEQ ID NO: 12423 - protein, 16 aa, Homo sapiens
  ( 217 )...( 232 ): >ARK2_HUMAN
YAMKCLDKKRIKMKQG

SEQ ID NO: 12424 - protein, 16 aa, Homo sapiens
  ( 218 )...( 233 ): >ARK2_HUMAN
AMKCLDKKRIKMKQGE

SEQ ID NO: 12425 - protein, 16 aa, Homo sapiens
  ( 219 )...( 234 ): >ARK2_HUMAN
MKCLDKKRIKMKQGET

SEQ ID NO: 12426 - protein, 16 aa, Homo sapiens
  ( 220 )...( 235 ): >ARK2_HUMAN
KCLDKKRIKMKQGETL

SEQ ID NO: 12427 - protein, 16 aa, Homo sapiens
  ( 221 )...( 236 ): >ARK2_HUMAN
CLDKKRIKMKQGETLA

SEQ ID NO: 12428 - protein, 16 aa, Homo sapiens
  ( 222 )...( 237 ): >ARK2_HUMAN
LDKKRIKMKQGETLAL

SEQ ID NO: 12429 - protein, 16 aa, Homo sapiens
  ( 223 )...( 238 ): >ARK2_HUMAN
DKKRIKMKQGETLALN

SEQ ID NO: 12430 - protein, 16 aa, Homo sapiens
  ( 224 )...( 239 ): >ARK2_HUMAN
KKRIKMKQGETLALNE

SEQ ID NO: 12431 - protein, 16 aa, Homo sapiens
  ( 225 )...( 240 ): >ARK2_HUMAN
KRIKMKQGETLALNER

SEQ ID NO: 12432 - protein, 16 aa, Homo sapiens
  ( 533 )...( 548 ): >ARK2_HUMAN
TDKIEARKRAKNKQLG

SEQ ID NO: 12433 - protein, 16 aa, Homo sapiens
  ( 611 )...( 626 ): >ARK2_HUMAN
ETQIKDKKCILFRIKG

SEQ ID NO: 12434 - protein, 16 aa, Homo sapiens
  ( 612 )...( 627 ): >ARK2_HUMAN
TQIKDKKCILFRIKGG

SEQ ID NO: 12435 - protein, 16 aa, Homo sapiens
  ( 613 )...( 628 ): >ARK2_HUMAN
QIKDKKCILFRIKGGK

SEQ ID NO: 12436 - protein, 16 aa, Homo sapiens
  ( 614 )...( 629 ): >ARK2_HUMAN
IKDKKCILFRIKGGKQ

SEQ ID NO: 12437 - protein, 16 aa, Homo sapiens
  ( 615 )...( 630 ): >ARK2_HUMAN
KDKKCILFRIKGGKQF

SEQ ID NO: 12438 - protein, 16 aa, Homo sapiens
  ( 616 )...( 631 ): >ARK2_HUMAN
DKKCILFRIKGGKQFV

SEQ ID NO: 12439 - protein, 16 aa, Homo sapiens
  ( 617 )...( 632 ): >ARK2_HUMAN
KKCILFRIKGGKQFVL

SEQ ID NO: 12440 - protein, 16 aa, Homo sapiens
  ( 618 )...( 633 ): >ARK2_HUMAN
KCILFRIKGGKQFVLQ

SEQ ID NO: 12441 - protein, 16 aa, Homo sapiens
  ( 619 )...( 634 ): >ARK2_HUMAN
CILFRIKGGKQFVLQC

SEQ ID NO: 12442 - protein, 16 aa, Homo sapiens
  ( 657 )...( 672 ): >ARK2_HUMAN
LLRRAPKFLNKPRSGT

SEQ ID NO: 12443 - protein, 16 aa, Homo sapiens
  ( 658 )...( 673 ): >ARK2_HUMAN
LRRAPKFLNKPRSGTV

SEQ ID NO: 12444 - protein, 16 aa, Homo sapiens
  ( 660 )...( 675 ): >ARK2_HUMAN
RAPKFLNKPRSGTVEL

SEQ ID NO: 12445 - protein, 16 aa, Homo sapiens
  ( 159 )...( 174 ): >B1AR_HUMAN
AITSPFRYQSLLTRAR

SEQ ID NO: 12446 - protein, 16 aa, Homo sapiens
  ( 160 )...( 175 ): >B1AR_HUMAN
ITSPFRYQSLLTRARA

SEQ ID NO: 12447 - protein, 16 aa, Homo sapiens
  ( 162 )...( 177 ): >B1AR_HUMAN
SPFRYQSLLTRARARG

SEQ ID NO: 12448 - protein, 16 aa, Homo sapiens
  ( 163 )...( 178 ): >B1AR_HUMAN
PFRYQSLLTRARARGL

SEQ ID NO: 12449 - protein, 16 aa, Homo sapiens
  ( 164 )...( 179 ): >B1AR_HUMAN
FRYQSLLTRARARGLV

SEQ ID NO: 12450 - protein, 16 aa, Homo sapiens
  ( 165 )...( 180 ): >B1AR_HUMAN
RYQSLLTRARARGLVC

SEQ ID NO: 12451 - protein, 16 aa, Homo sapiens
  ( 166 )...( 181 ): >B1AR_HUMAN
YQSLLTRARARGLVCT

SEQ ID NO: 12452 - protein, 16 aa, Homo sapiens
  ( 167 )...( 182 ): >B1AR_HUMAN
QSLLTRARARGLVCTV

SEQ ID NO: 12453 - protein, 16 aa, Homo sapiens
  ( 168 )...( 183 ): >B1AR_HUMAN
SLLTRARARGLVCTVW

SEQ ID NO: 12454 - protein, 16 aa, Homo sapiens
  ( 169 )...( 184 ): >B1AR_HUMAN
LLTRARARGLVCTVWA

SEQ ID NO: 12455 - protein, 16 aa, Homo sapiens
  ( 170 )...( 185 ): >B1AR_HUMAN
LTRARARGLVCTVWAI

SEQ ID NO: 12456 - protein, 16 aa, Homo sapiens
  ( 171 )...( 186 ): >B1AR_HUMAN
TRARARGLVCTVWAIS

SEQ ID NO: 12457 - protein, 16 aa, Homo sapiens
  ( 172 )...( 187 ): >B1AR_HUMAN
RARARGLVCTVWAISA

SEQ ID NO: 12458 - protein, 16 aa, Homo sapiens
  ( 246 )...( 261 ): >B1AR_HUMAN
RVFREAQKQVKKIDSC

SEQ ID NO: 12459 - protein, 16 aa, Homo sapiens
  ( 252 )...( 267 ): >B1AR_HUMAN
QKQVKKIDSCERRFLG

SEQ ID NO: 12460 - protein, 16 aa, Homo sapiens
  ( 253 )...( 268 ): >B1AR_HUMAN
KQVKKIDSCERRFLGG

SEQ ID NO: 12461 - protein, 16 aa, Homo sapiens
  ( 298 )...( 313 ): >B1AR_HUMAN
TAPLANGRAGKRRPSR

SEQ ID NO: 12462 - protein, 16 aa, Homo sapiens
  ( 299 )...( 314 ): >B1AR_HUMAN
APLANGRAGKRRPSRL

SEQ ID NO: 12463 - protein, 16 aa, Homo sapiens
  ( 300 )...( 315 ): >B1AR_HUMAN
PLANGRAGKRRPSRLV

SEQ ID NO: 12464 - protein, 16 aa, Homo sapiens
  ( 301 )...( 316 ): >B1AR_HUMAN
LANGRAGKRRPSRLVA

SEQ ID NO: 12465 - protein, 16 aa, Homo sapiens
  ( 302 )...( 317 ): >B1AR_HUMAN
ANGRAGKRRPSRLVAL

SEQ ID NO: 12466 - protein, 16 aa, Homo sapiens
  ( 304 )...( 319 ): >B1AR_HUMAN
GRAGKRRPSRLVALRE

SEQ ID NO: 12467 - protein, 16 aa, Homo sapiens
  ( 305 )...( 320 ): >B1AR_HUMAN
RAGKRRPSRLVALREQ

SEQ ID NO: 12468 - protein, 16 aa, Homo sapiens
  ( 306 )...( 321 ): >B1AR_HUMAN
AGKRRPSRLVALREQK

SEQ ID NO: 12469 - protein, 16 aa, Homo sapiens
  ( 307 )...( 322 ): >B1AR_HUMAN
GKRRPSRLVALREQKA

SEQ ID NO: 12470 - protein, 16 aa, Homo sapiens
  ( 310 )...( 325 ): >B1AR_HUMAN
RPSRLVALREQKALKT

SEQ ID NO: 12471 - protein, 16 aa, Homo sapiens
  ( 311 )...( 326 ): >B1AR_HUMAN
PSRLVALREQKALKTL

SEQ ID NO: 12472 - protein, 16 aa, Homo sapiens
  ( 312 )...( 327 ): >B1AR_HUMAN
SRLVALREQKALKTLG

SEQ ID NO: 12473 - protein, 16 aa, Homo sapiens
  ( 313 )...( 328 ): >B1AR_HUMAN
RLVALREQKALKTLGI

SEQ ID NO: 12474 - protein, 16 aa, Homo sapiens
  ( 384 )...( 399 ): >B1AR_HUMAN
RKAFQGLLCCARRAAR

SEQ ID NO: 12475 - protein, 16 aa, Homo sapiens
  ( 385 )...( 400 ): >B1AR_HUMAN
KAFQGLLCCARRAARR

SEQ ID NO: 12476 - protein, 16 aa, Homo sapiens
  ( 387 )...( 402 ): >B1AR_HUMAN
FQGLLCCARRAARRRH

SEQ ID NO: 12477 - protein, 16 aa, Homo sapiens
  ( 388 )...( 403 ): >B1AR_HUMAN
QGLLCCARRAARRRHA

SEQ ID NO: 12478 - protein, 16 aa, Homo sapiens
  ( 389 )...( 404 ): >B1AR_HUMAN
GLLCCARRAARRRHAT

SEQ ID NO: 12479 - protein, 16 aa, Homo sapiens
  ( 390 )...( 405 ): >B1AR_HUMAN
LLCCARRAARRRHATH

SEQ ID NO: 12480 - protein, 16 aa, Homo sapiens
  ( 391 )...( 406 ): >B1AR_HUMAN
LCCARRAARRRHATHG

SEQ ID NO: 12481 - protein, 16 aa, Homo sapiens
  ( 138 )...( 153 ): >B2AR_HUMAN
PFKYQSLLTKNKARVI

SEQ ID NO: 12482 - protein, 16 aa, Homo sapiens
  ( 139 )...( 154 ): >B2AR_HUMAN
FKYQSLLTKNKARVII

SEQ ID NO: 12483 - protein, 16 aa, Homo sapiens
  ( 140 )...( 155 ): >B2AR_HUMAN
KYQSLLTKNKARVIIL

SEQ ID NO: 12484 - protein, 16 aa, Homo sapiens
  ( 141 )...( 156 ): >B2AR_HUMAN
YQSLLTKNKARVIILM

SEQ ID NO: 12485 - protein, 16 aa, Homo sapiens
  ( 142 )...( 157 ): >B2AR_HUMAN
QSLLTKNKARVIILMV

SEQ ID NO: 12486 - protein, 16 aa, Homo sapiens
  ( 146 )...( 161 ): >B2AR_HUMAN
TKNKARVIILMVWIVS

SEQ ID NO: 12487 - protein, 16 aa, Homo sapiens
  ( 147 )...( 162 ): >B2AR_HUMAN
KNKARVIILMVWIVSG

SEQ ID NO: 12488 - protein, 16 aa, Homo sapiens
  ( 252 )...( 267 ): >B2AR_HUMAN
GRTGHGLRRSSKFCLK

SEQ ID NO: 12489 - protein, 16 aa, Homo sapiens
  ( 253 )...( 268 ): >B2AR_HUMAN
RTGHGLRRSSKFCLKE

SEQ ID NO: 12490 - protein, 16 aa, Homo sapiens
  ( 255 )...( 270 ): >B2AR_HUMAN
GHGLRRSSKFCLKEHK

SEQ ID NO: 12491 - protein, 16 aa, Homo sapiens
  ( 257 )...( 272 ): >B2AR_HUMAN
GLRRSSKFCLKEHKAL

SEQ ID NO: 12492 - protein, 16 aa, Homo sapiens
  ( 260 )...( 275 ): >B2AR_HUMAN
RSSKFCLKEHKALKTL

SEQ ID NO: 12493 - protein, 16 aa, Homo sapiens
  ( 333 )...( 348 ): >B2AR_HUMAN
RIAFQELLCLRRSSLK

SEQ ID NO: 12494 - protein, 16 aa, Homo sapiens
  ( 137 )...( 152 ): >B3AR_HUMAN
LAVTNPLRYGALVTKR

SEQ ID NO: 12495 - protein, 16 aa, Homo sapiens
  ( 138 )...( 153 ): >B3AR_HUMAN
AVTNPLRYGALVTKRC

SEQ ID NO: 12496 - protein, 16 aa, Homo sapiens
  ( 139 )...( 154 ): >B3AR_HUMAN
VTNPLRYGALVTKRCA

SEQ ID NO: 12497 - protein, 16 aa, Homo sapiens
  ( 140 )...( 155 ): >B3AR_HUMAN
TNPLRYGALVTKRCAR

SEQ ID NO: 12498 - protein, 16 aa, Homo sapiens
  ( 141 )...( 156 ): >B3AR_HUMAN
NPLRYGALVTKRCART

SEQ ID NO: 12499 - protein, 16 aa, Homo sapiens
  ( 142 )...( 157 ): >B3AR_HUMAN
PLRYGALVTKRCARTA

SEQ ID NO: 12500 - protein, 16 aa, Homo sapiens
  ( 143 )...( 158 ): >B3AR_HUMAN
LRYGALVTKRCARTAV

SEQ ID NO: 12501 - protein, 16 aa, Homo sapiens
  ( 144 )...( 159 ): >B3AR_HUMAN
RYGALVTKRCARTAVV

SEQ ID NO: 12502 - protein, 16 aa, Homo sapiens
  ( 147 )...( 162 ): >B3AR_HUMAN
ALVTKRCARTAVVLVW

SEQ ID NO: 12503 - protein, 16 aa, Homo sapiens
  ( 148 )...( 163 ): >B3AR_HUMAN
LVTKRCARTAVVLVWV

SEQ ID NO: 12504 - protein, 16 aa, Homo sapiens
  ( 150 )...( 165 ): >B3AR_HUMAN
TKRCARTAVVLVWVVS

SEQ ID NO: 12505 - protein, 16 aa, Homo sapiens
  ( 151 )...( 166 ): >B3AR_HUMAN
KRCARTAVVLVWVVSA

SEQ ID NO: 12506 - protein, 16 aa, Homo sapiens
  ( 221 )...( 236 ): >B3AR_HUMAN
LFVYARVFVVATRQLR

SEQ ID NO: 12507 - protein, 16 aa, Homo sapiens
  ( 222 )...( 237 ): >B3AR_HUMAN
FVYARVFVVATRQLRL

SEQ ID NO: 12508 - protein, 16 aa, Homo sapiens
  ( 223 )...( 238 ): >B3AR_HUMAN
VYARVFVVATRQLRLL

SEQ ID NO: 12509 - protein, 16 aa, Homo sapiens
  ( 224 )...( 239 ): >B3AR_HUMAN
YARVFVVATRQLRLLR

SEQ ID NO: 12510 - protein, 16 aa, Homo sapiens
  ( 225 )...( 240 ): >B3AR_HUMAN
ARVFVVATRQLRLLRG

SEQ ID NO: 12511 - protein, 16 aa, Homo sapiens
  ( 226 )...( 241 ): >B3AR_HUMAN
RVFVVATRQLRLLRGE

SEQ ID NO: 12512 - protein, 16 aa, Homo sapiens
  ( 229 )...( 244 ): >B3AR_HUMAN
VVATRQLRLLRGELGR

SEQ ID NO: 12513 - protein, 16 aa, Homo sapiens
  ( 230 )...( 245 ): >B3AR_HUMAN
VATRQLRLLRGELGRF

SEQ ID NO: 12514 - protein, 16 aa, Homo sapiens
  ( 231 )...( 246 ): >B3AR_HUMAN
ATRQLRLLRGELGRFP

SEQ ID NO: 12515 - protein, 16 aa, Homo sapiens
  ( 232 )...( 247 ): >B3AR_HUMAN
TRQLRLLRGELGRFPP

SEQ ID NO: 12516 - protein, 16 aa, Homo sapiens
  ( 271 )...( 286 ): >B3AR_HUMAN
GVPACGRRPARLLPLR

SEQ ID NO: 12517 - protein, 16 aa, Homo sapiens
  ( 272 )...( 287 ): >B3AR_HUMAN
VPACGRRPARLLPLRE

SEQ ID NO: 12518 - protein, 16 aa, Homo sapiens
  ( 278 )...( 293 ): >B3AR_HUMAN
RPARLLPLREHRALCT

SEQ ID NO: 12519 - protein, 16 aa, Homo sapiens
  ( 76 )...( 91 ): >BAI1_HUMAN
DPRRYTLYMKVAKAPV

SEQ ID NO: 12520 - protein, 16 aa, Homo sapiens
  ( 77 )...( 92 ): >BAI1_HUMAN
PRRYTLYMKVAKAPVP

SEQ ID NO: 12521 - protein, 16 aa, Homo sapiens
  ( 599 )...( 614 ): >BAI1_HUMAN
VAAVRCPRNATGLILR

SEQ ID NO: 12522 - protein, 16 aa, Homo sapiens
  ( 600 )...( 615 ): >BAI1_HUMAN
AAVRCPRNATGLILRR

SEQ ID NO: 12523 - protein, 16 aa, Homo sapiens
  ( 601 )...( 616 ): >BAI1_HUMAN
AVRCPRNATGLILRRC

SEQ ID NO: 12524 - protein, 16 aa, Homo sapiens
  ( 602 )...( 617 ): >BAI1_HUMAN
VRCPRNATGLILRRCE

SEQ ID NO: 12525 - protein, 16 aa, Homo sapiens
  ( 603 )...( 618 ): >BAI1_HUMAN
RCPRNATGLILRRCEL

SEQ ID NO: 12526 - protein, 16 aa, Homo sapiens
  ( 847 )...( 862 ): >BAI1_HUMAN
VLNSKVISVTVKPPPR

SEQ ID NO: 12527 - protein, 16 aa, Homo sapiens
  ( 850 )...( 865 ): >BAI1_HUMAN
SKVISVTVKPPPRSLR

SEQ ID NO: 12528 - protein, 16 aa, Homo sapiens
  ( 851 )...( 866 ): >BAI1_HUMAN
KVISVTVKPPPRSLRT

SEQ ID NO: 12529 - protein, 16 aa, Homo sapiens
  ( 852 )...( 867 ): >BAI1_HUMAN
VISVTVKPPPRSLRTP

SEQ ID NO: 12530 - protein, 16 aa, Homo sapiens
  ( 853 )...( 868 ): >BAI1_HUMAN
ISVTVKPPPRSLRTPL

SEQ ID NO: 12531 - protein, 16 aa, Homo sapiens
  ( 905 )...( 920 ): >BAI1_HUMAN
SWRGCRTVPLDALRTR

SEQ ID NO: 12532 - protein, 16 aa, Homo sapiens
  ( 907 )...( 922 ): >BAI1_HUMAN
RGCRTVPLDALRTRCL

SEQ ID NO: 12533 - protein, 16 aa, Homo sapiens
  ( 1035 )...( 1050 ): >BAI1_HUMAN
QSYMAVTGHLRNRLIR

SEQ ID NO: 12534 - protein, 16 aa, Homo sapiens
  ( 1036 )...( 1051 ): >BAI1_HUMAN
SYMAVTGHLRNRLIRK

SEQ ID NO: 12535 - protein, 16 aa, Homo sapiens
  ( 1039 )...( 1054 ): >BAI1_HUMAN
AVTGHLRNRLIRKRFL

SEQ ID NO: 12536 - protein, 16 aa, Homo sapiens
  ( 1042 )...( 1057 ): >BAI1_HUMAN
GHLRNRLIRKRFLCLG

SEQ ID NO: 12537 - protein, 16 aa, Homo sapiens
  ( 1046 )...( 1061 ): >BAI1_HUMAN
NRLIRKRFLCLGWGLP

SEQ ID NO: 12538 - protein, 16 aa, Homo sapiens
  ( 1047 )...( 1062 ): >BAI1_HUMAN
RLIRKRFLCLGWGLPA

SEQ ID NO: 12539 - protein, 16 aa, Homo sapiens
  ( 1244 )...( 1259 ): >BAI1_HUMAN
CRTATITGTLKRPSLP

SEQ ID NO: 12540 - protein, 16 aa, Homo sapiens
  ( 1345 )...( 1360 ): >BAI1_HUMAN
YVILPTATATLRPKPK

SEQ ID NO: 12541 - protein, 16 aa, Homo sapiens
  ( 1461 )...( 1476 ): >BAI1_HUMAN
NVATLSVSSLERRKSR

SEQ ID NO: 12542 - protein, 16 aa, Homo sapiens
  ( 1462 )...( 1477 ): >BAI1_HUMAN
VATLSVSSLERRKSRY

SEQ ID NO: 12543 - protein, 16 aa, Homo sapiens
  ( 1463 )...( 1478 ): >BAI1_HUMAN
ATLSVSSLERRKSRYA

SEQ ID NO: 12544 - protein, 16 aa, Homo sapiens
  ( 481 )...( 496 ): >BAI2_HUMAN
TGWQRRFRMCQATGTQ

SEQ ID NO: 12545 - protein, 16 aa, Homo sapiens
  ( 482 )...( 497 ): >BAI2_HUMAN
GWQRRFRMCQATGTQG

SEQ ID NO: 12546 - protein, 16 aa, Homo sapiens
  ( 820 )...( 835 ): >BAI2_HUMAN
RPPLAVTSRVMTVTVR

SEQ ID NO: 12547 - protein, 16 aa, Homo sapiens
  ( 1006 )...( 1021 ): >BAI2_HUMAN
AWQSYLAVIGRMRTRL

SEQ ID NO: 12548 - protein, 16 aa, Homo sapiens
  ( 1007 )...( 1022 ): >BAI2_HUMAN
WQSYLAVIGRMRTRLV

SEQ ID NO: 12549 - protein, 16 aa, Homo sapiens
  ( 1008 )...( 1023 ): >BAI2_HUMAN
QSYLAVIGRMRTRLVR

SEQ ID NO: 12550 - protein, 16 aa, Homo sapiens
  ( 1009 )...( 1024 ): >BAI2_HUMAN
SYLAVIGRMRTRLVRK

SEQ ID NO: 12551 - protein, 16 aa, Homo sapiens
  ( 1017 )...( 1032 ): >BAI2_HUMAN
MRTRLVRKRFLCLGWG

SEQ ID NO: 12552 - protein, 16 aa, Homo sapiens
  ( 1018 )...( 1033 ): >BAI2_HUMAN
RTRLVRKRFLCLGWGL

SEQ ID NO: 12553 - protein, 16 aa, Homo sapiens
  ( 1019 )...( 1034 ): >BAI2_HUMAN
TRLVRKRFLCLGWGLP

SEQ ID NO: 12554 - protein, 16 aa, Homo sapiens
  ( 1020 )...( 1035 ): >BAI2_HUMAN
RLVRKRFLCLGWGLPA

SEQ ID NO: 12555 - protein, 16 aa, Homo sapiens
  ( 1089 )...( 1104 ): >BAI2_HUMAN
KLMARDGISDKSKKQR

SEQ ID NO: 12556 - protein, 16 aa, Homo sapiens
  ( 1090 )...( 1105 ): >BAI2_HUMAN
LMARDGISDKSKKQRA

SEQ ID NO: 12557 - protein, 16 aa, Homo sapiens
  ( 1091 )...( 1106 ): >BAI2_HUMAN
MARDGISDKSKKQRAG

SEQ ID NO: 12558 - protein, 16 aa, Homo sapiens
  ( 1361 )...( 1376 ): >BAI2_HUMAN
APRARPEGTPRRAAKT

SEQ ID NO: 12559 - protein, 16 aa, Homo sapiens
  ( 1362 )...( 1377 ): >BAI2_HUMAN
PRARPEGTPRRAAKTV

SEQ ID NO: 12560 - protein, 16 aa, Homo sapiens
  ( 1363 )...( 1378 ): >BAI2_HUMAN
RARPEGTPRRAAKTVA

SEQ ID NO: 12561 - protein, 16 aa, Homo sapiens
  ( 1364 )...( 1379 ): >BAI2_HUMAN
ARPEGTPRRAAKTVAH

SEQ ID NO: 12562 - protein, 16 aa, Homo sapiens
  ( 1365 )...( 1380 ): >BAI2_HUMAN
RPEGTPRRAAKTVAHT

SEQ ID NO: 12563 - protein, 16 aa, Homo sapiens
  ( 1428 )...( 1443 ): >BAI2_HUMAN
ERSRTMPRTVPGSTMK

SEQ ID NO: 12564 - protein, 16 aa, Homo sapiens
  ( 1429 )...( 1444 ): >BAI2_HUMAN
RSRTMPRTVPGSTMKM

SEQ ID NO: 12565 - protein, 16 aa, Homo sapiens
  ( 1435 )...( 1450 ): >BAI2_HUMAN
RTVPGSTMKMGSLERK

SEQ ID NO: 12566 - protein, 16 aa, Homo sapiens
  ( 1438 )...( 1453 ): >BAI2_HUMAN
PGSTMKMGSLERKKLR

SEQ ID NO: 12567 - protein, 16 aa, Homo sapiens
  ( 1439 )...( 1454 ): >BAI2_HUMAN
GSTMKMGSLERKKLRY

SEQ ID NO: 12568 - protein, 16 aa, Homo sapiens
  ( 1440 )...( 1455 ): >BAI2_HUMAN
STMKMGSLERKKLRYS

SEQ ID NO: 12569 - protein, 16 aa, Homo sapiens
  ( 1441 )...( 1456 ): >BAI2_HUMAN
TMKMGSLERKKLRYSD

SEQ ID NO: 12570 - protein, 16 aa, Homo sapiens
  ( 1488 )...( 1503 ): >BAI2_HUMAN
QSTAKREKRWSVSSGG

SEQ ID NO: 12571 - protein, 16 aa, Homo sapiens
  ( 1492 )...( 1507 ): >BAI2_HUMAN
KREKRWSVSSGGAAER

SEQ ID NO: 12572 - protein, 16 aa, Homo sapiens
  ( 1535 )...( 1550 ): >BAI2_HUMAN
KSMTLGSLPPKPRERL

SEQ ID NO: 12573 - protein, 16 aa, Homo sapiens
  ( 1539 )...( 1554 ): >BAI2_HUMAN
LGSLPPKPRERLTLHR

SEQ ID NO: 12574 - protein, 16 aa, Homo sapiens
  ( 1540 )...( 1555 ): >BAI2_HUMAN
GSLPPKPRERLTLHRA

SEQ ID NO: 12575 - protein, 16 aa, Homo sapiens
  ( 1541 )...( 1556 ): >BAI2_HUMAN
SLPPKPRERLTLHRAA

SEQ ID NO: 12576 - protein, 16 aa, Homo sapiens
  ( 1542 )...( 1557 ): >BAI2_HUMAN
LPPKPRERLTLHRAAA

SEQ ID NO: 12577 - protein, 16 aa, Homo sapiens
  ( 128 )...( 143 ): >BAI3_HUMAN
IQIRRVFPTNFPGLQK

SEQ ID NO: 12578 - protein, 16 aa, Homo sapiens
  ( 130 )...( 145 ): >BAI3_HUMAN
IRRVFPTNFPGLQKKG

SEQ ID NO: 12579 - protein, 16 aa, Homo sapiens
  ( 131 )...( 146 ): >BAI3_HUMAN
RRVFPTNFPGLQKKGE

SEQ ID NO: 12580 - protein, 16 aa, Homo sapiens
  ( 236 )...( 251 ): >BAI3_HUMAN
TTQVCNLTREAKRPPK

SEQ ID NO: 12581 - protein, 16 aa, Homo sapiens
  ( 362 )...( 377 ): >BAI3_HUMAN
GRGQRTRTRSCTPPQY

SEQ ID NO: 12582 - protein, 16 aa, Homo sapiens
  ( 363 )...( 378 ): >BAI3_HUMAN
RGQRTRTRSCTPPQYG

SEQ ID NO: 12583 - protein, 16 aa, Homo sapiens
  ( 365 )...( 380 ): >BAI3_HUMAN
QRTRTRSCTPPQYGGR

SEQ ID NO: 12584 - protein, 16 aa, Homo sapiens
  ( 477 )...( 492 ): >BAI3_HUMAN
RRIRTCQGAVITGQQC

SEQ ID NO: 12585 - protein, 16 aa, Homo sapiens
  ( 778 )...( 793 ): >BAI3_HUMAN
RNYTVINSKIIVVTIR

SEQ ID NO: 12586 - protein, 16 aa, Homo sapiens
  ( 963 )...( 978 ): >BAI3_HUMAN
AWQSYMAVTGKIRTRL

SEQ ID NO: 12587 - protein, 16 aa, Homo sapiens
  ( 964 )...( 979 ): >BAI3_HUMAN
WQSYMAVTGKIRTRLI

SEQ ID NO: 12588 - protein, 16 aa, Homo sapiens
  ( 965 )...( 980 ): >BAI3_HUMAN
QSYMAVTGKIRTRLIR

SEQ ID NO: 12589 - protein, 16 aa, Homo sapiens
  ( 966 )...( 981 ): >BAI3_HUMAN
SYMAVTGKIRTRLIRK

SEQ ID NO: 12590 - protein, 16 aa, Homo sapiens
  ( 967 )...( 982 ): >BAI3_HUMAN
YMAVTGKIRTRLIRKR

SEQ ID NO: 12591 - protein, 16 aa, Homo sapiens
  ( 968 )...( 983 ): >BAI3_HUMAN
MAVTGKIRTRLIRKRF

SEQ ID NO: 12592 - protein, 16 aa, Homo sapiens
  ( 969 )...( 984 ): >BAI3_HUMAN
AVTGKIRTRLIRKRFL

SEQ ID NO: 12593 - protein, 16 aa, Homo sapiens
  ( 970 )...( 985 ): >BAI3_HUMAN
VTGKIRTRLIRKRFLC

SEQ ID NO: 12594 - protein, 16 aa, Homo sapiens
  ( 971 )...( 986 ): >BAI3_HUMAN
TGKIRTRLIRKRFLCL

SEQ ID NO: 12595 - protein, 16 aa, Homo sapiens
  ( 974 )...( 989 ): >BAI3_HUMAN
IRTRLIRKRFLCLGWG

SEQ ID NO: 12596 - protein, 16 aa, Homo sapiens
  ( 975 )...( 990 ): >BAI3_HUMAN
RTRLIRKRFLCLGWGL

SEQ ID NO: 12597 - protein, 16 aa, Homo sapiens
  ( 976 )...( 991 ): >BAI3_HUMAN
TRLIRKRFLCLGWGLP

SEQ ID NO: 12598 - protein, 16 aa, Homo sapiens
  ( 977 )...( 992 ): >BAI3_HUMAN
RLIRKRFLCLGWGLPA

SEQ ID NO: 12599 - protein, 16 aa, Homo sapiens
  ( 1044 )...( 1059 ): >BAI3_HUMAN
FNKLVSRDGILDKKLK

SEQ ID NO: 12600 - protein, 16 aa, Homo sapiens
  ( 1046 )...( 1061 ): >BAI3_HUMAN
KLVSRDGILDKKLKHR

SEQ ID NO: 12601 - protein, 16 aa, Homo sapiens
  ( 1047 )...( 1062 ): >BAI3_HUMAN
LVSRDGILDKKLKHRA

SEQ ID NO: 12602 - protein, 16 aa, Homo sapiens
  ( 1048 )...( 1063 ): >BAI3_HUMAN
VSRDGILDKKLKHRAG

SEQ ID NO: 12603 - protein, 16 aa, Homo sapiens
  ( 1049 )...( 1064 ): >BAI3_HUMAN
SRDGILDKKLKHRAGQ

SEQ ID NO: 12604 - protein, 16 aa, Homo sapiens
  ( 1050 )...( 1065 ): >BAI3_HUMAN
RDGILDKKLKHRAGQM

SEQ ID NO: 12605 - protein, 16 aa, Homo sapiens
  ( 1404 )...( 1419 ): >BAI3_HUMAN
GSTISMSSLERRKSRY

SEQ ID NO: 12606 - protein, 16 aa, Homo sapiens
  ( 138 )...( 153 ): >BRB1_HUMAN
VLVHPMASGRQQRRRQ

SEQ ID NO: 12607 - protein, 16 aa, Homo sapiens
  ( 139 )...( 154 ): >BRB1_HUMAN
LVHPMASGRQQRRRQA

SEQ ID NO: 12608 - protein, 16 aa, Homo sapiens
  ( 142 )...( 157 ): >BRB1_HUMAN
PMASGRQQRRRQARVT

SEQ ID NO: 12609 - protein, 16 aa, Homo sapiens
  ( 143 )...( 158 ): >BRB1_HUMAN
MASGRQQRRRQARVTC

SEQ ID NO: 12610 - protein, 16 aa, Homo sapiens
  ( 144 )...( 159 ): >BRB1_HUMAN
ASGRQQRRRQARVTCV

SEQ ID NO: 12611 - protein, 16 aa, Homo sapiens
  ( 145 )...( 160 ): >BRB1_HUMAN
SGRQQRRRQARVTCVL

SEQ ID NO: 12612 - protein, 16 aa, Homo sapiens
  ( 146 )...( 161 ): >BRB1_HUMAN
GRQQRRRQARVTCVLI

SEQ ID NO: 12613 - protein, 16 aa, Homo sapiens
  ( 148 )...( 163 ): >BRB1_HUMAN
QQRRRQARVTCVLIWV

SEQ ID NO: 12614 - protein, 16 aa, Homo sapiens
  ( 149 )...( 164 ): >BRB1_HUMAN
QRRRQARVTCVLIWVV

SEQ ID NO: 12615 - protein, 16 aa, Homo sapiens
  ( 150 )...( 165 ): >BRB1_HUMAN
RRRQARVTCVLIWVVG

SEQ ID NO: 12616 - protein, 16 aa, Homo sapiens
  ( 151 )...( 166 ): >BRB1_HUMAN
RRQARVTCVLIWVVGG

SEQ ID NO: 12617 - protein, 16 aa, Homo sapiens
  ( 226 )...( 241 ): >BRB1_HUMAN
LASLRTREEVSRTRVR

SEQ ID NO: 12618 - protein, 16 aa, Homo sapiens
  ( 227 )...( 242 ): >BRB1_HUMAN
ASLRTREEVSRTRVRG

SEQ ID NO: 12619 - protein, 16 aa, Homo sapiens
  ( 228 )...( 243 ): >BRB1_HUMAN
SLRTREEVSRTRVRGP

SEQ ID NO: 12620 - protein, 16 aa, Homo sapiens
  ( 229 )...( 244 ): >BRB1_HUMAN
LRTREEVSRTRVRGPK

SEQ ID NO: 12621 - protein, 16 aa, Homo sapiens
  ( 232 )...( 247 ): >BRB1_HUMAN
REEVSRTRVRGPKDSK

SEQ ID NO: 12622 - protein, 16 aa, Homo sapiens
  ( 234 )...( 249 ): >BRB1_HUMAN
EVSRTRVRGPKDSKTT

SEQ ID NO: 12623 - protein, 16 aa, Homo sapiens
  ( 235 )...( 250 ): >BRB1_HUMAN
VSRTRVRGPKDSKTTA

SEQ ID NO: 12624 - protein, 16 aa, Homo sapiens
  ( 236 )...( 251 ): >BRB1_HUMAN
SRTRVRGPKDSKTTAL

SEQ ID NO: 12625 - protein, 16 aa, Homo sapiens
  ( 237 )...( 252 ): >BRB1_HUMAN
RTRVRGPKDSKTTALI

SEQ ID NO: 12626 - protein, 16 aa, Homo sapiens
  ( 238 )...( 253 ): >BRB1_HUMAN
TRVRGPKDSKTTALIL

SEQ ID NO: 12627 - protein, 16 aa, Homo sapiens
  ( 239 )...( 254 ): >BRB1_HUMAN
RVRGPKDSKTTALILT

SEQ ID NO: 12628 - protein, 16 aa, Homo sapiens
  ( 308 )...( 323 ): >BRB1_HUMAN
NPVIYVFVGRLFRTKV

SEQ ID NO: 12629 - protein, 16 aa, Homo sapiens
  ( 154 )...( 169 ): >BRB2_HUMAN
DRYLALVKTMSMGRMR

SEQ ID NO: 12630 - protein, 16 aa, Homo sapiens
  ( 155 )...( 170 ): >BRB2_HUMAN
RYLALVKTMSMGRMRG

SEQ ID NO: 12631 - protein, 16 aa, Homo sapiens
  ( 156 )...( 171 ): >BRB2_HUMAN
YLALVKTMSMGRMRGV

SEQ ID NO: 12632 - protein, 16 aa, Homo sapiens
  ( 157 )...( 172 ): >BRB2_HUMAN
LALVKTMSMGRMRGVR

SEQ ID NO: 12633 - protein, 16 aa, Homo sapiens
  ( 158 )...( 173 ): >BRB2_HUMAN
ALVKTMSMGRMRGVRW

SEQ ID NO: 12634 - protein, 16 aa, Homo sapiens
  ( 159 )...( 174 ): >BRB2_HUMAN
LVKTMSMGRMRGVRWA

SEQ ID NO: 12635 - protein, 16 aa, Homo sapiens
  ( 160 )...( 175 ): >BRB2_HUMAN
VKTMSMGRMRGVRWAK

SEQ ID NO: 12636 - protein, 16 aa, Homo sapiens
  ( 161 )...( 176 ): >BRB2_HUMAN
KTMSMGRMRGVRWAKL

SEQ ID NO: 12637 - protein, 16 aa, Homo sapiens
  ( 162 )...( 177 ): >BRB2_HUMAN
TMSMGRMRGVRWAKLY

SEQ ID NO: 12638 - protein, 16 aa, Homo sapiens
  ( 163 )...( 178 ): >BRB2_HUMAN
MSMGRMRGVRWAKLYS

SEQ ID NO: 12639 - protein, 16 aa, Homo sapiens
  ( 164 )...( 179 ): >BRB2_HUMAN
SMGRMRGVRWAKLYSL

SEQ ID NO: 12640 - protein, 16 aa, Homo sapiens
  ( 165 )...( 180 ): >BRB2_HUMAN
MGRMRGVRWAKLYSLV

SEQ ID NO: 12641 - protein, 16 aa, Homo sapiens
  ( 166 )...( 181 ): >BRB2_HUMAN
GRMRGVRWAKLYSLVI

SEQ ID NO: 12642 - protein, 16 aa, Homo sapiens
  ( 168 )...( 183 ): >BRB2_HUMAN
MRGVRWAKLYSLVIWG

SEQ ID NO: 12643 - protein, 16 aa, Homo sapiens
  ( 169 )...( 184 ): >BRB2_HUMAN
RGVRWAKLYSLVIWGC

SEQ ID NO: 12644 - protein, 16 aa, Homo sapiens
  ( 325 )...( 340 ): >BRB2_HUMAN
SCLNPLVYVIVGKRFR

SEQ ID NO: 12645 - protein, 16 aa, Homo sapiens
  ( 326 )...( 341 ): >BRB2_HUMAN
CLNPLVYVIVGKRFRK

SEQ ID NO: 12646 - protein, 16 aa, Homo sapiens
  ( 327 )...( 342 ): >BRB2_HUMAN
LNPLVYVIVGKRFRKK

SEQ ID NO: 12647 - protein, 16 aa, Homo sapiens
  ( 328 )...( 343 ): >BRB2_HUMAN
NPLVYVIVGKRFRKKS

SEQ ID NO: 12648 - protein, 16 aa, Homo sapiens
  ( 335 )...( 350 ): >BRB2_HUMAN
VGKRFRKKSWEVYQGV

SEQ ID NO: 12649 - protein, 16 aa, Homo sapiens
  ( 339 )...( 354 ): >BRB2_HUMAN
FRKKSWEVYQGVCQKG

SEQ ID NO: 12650 - protein, 16 aa, Homo sapiens
  ( 340 )...( 355 ): >BRB2_HUMAN
RKKSWEVYQGVCQKGG

SEQ ID NO: 12651 - protein, 16 aa, Homo sapiens
  ( 61 )...( 76 ): >BRS3_HUMAN
GILGNAILIKVFFKTK

SEQ ID NO: 12652 - protein, 16 aa, Homo sapiens
  ( 114 )...( 129 ): >BRS3_HUMAN
LFGRIGCKVLSFIRLT

SEQ ID NO: 12653 - protein, 16 aa, Homo sapiens
  ( 115 )...( 130 ): >BRS3_HUMAN
FGRIGCKVLSFIRLTS

SEQ ID NO: 12654 - protein, 16 aa, Homo sapiens
  ( 145 )...( 160 ): >BRS3_HUMAN
RYKAVVKPLERQPSNA

SEQ ID NO: 12655 - protein, 16 aa, Homo sapiens
  ( 259 )...( 274 ): >BRS3_HUMAN
ARKQIESRKRIARTVL

SEQ ID NO: 12656 - protein, 16 aa, Homo sapiens
  ( 260 )...( 275 ): >BRS3_HUMAN
RKQIESRKRIARTVLV

SEQ ID NO: 12657 - protein, 16 aa, Homo sapiens
  ( 261 )...( 276 ): >BRS3_HUMAN
KQIESRKRIARTVLVL

SEQ ID NO: 12658 - protein, 16 aa, Homo sapiens
  ( 262 )...( 277 ): >BRS3_HUMAN
QIESRKRIARTVLVLV

SEQ ID NO: 12659 - protein, 16 aa, Homo sapiens
  ( 263 )...( 278 ): >BRS3_HUMAN
IESRKRIARTVLVLVA

SEQ ID NO: 12660 - protein, 16 aa, Homo sapiens
  ( 264 )...( 279 ): >BRS3_HUMAN
ESRKRIARTVLVLVAL

SEQ ID NO: 12661 - protein, 16 aa, Homo sapiens
  ( 265 )...( 280 ): >BRS3_HUMAN
SRKRIARTVLVLVALF

SEQ ID NO: 12662 - protein, 16 aa, Homo sapiens
  ( 266 )...( 281 ): >BRS3_HUMAN
RKRIARTVLVLVALFA

SEQ ID NO: 12663 - protein, 16 aa, Homo sapiens
  ( 364 )...( 379 ): >C3AR_HUMAN
QRGRFAKSQSKTFRVA

SEQ ID NO: 12664 - protein, 16 aa, Homo sapiens
  ( 365 )...( 380 ): >C3AR_HUMAN
RGRFAKSQSKTFRVAV

SEQ ID NO: 12665 - protein, 16 aa, Homo sapiens
  ( 366 )...( 381 ): >C3AR_HUMAN
GRFAKSQSKTFRVAVV

SEQ ID NO: 12666 - protein, 16 aa, Homo sapiens
  ( 367 )...( 382 ): >C3AR_HUMAN
RFAKSQSKTFRVAVVV

SEQ ID NO: 12667 - protein, 16 aa, Homo sapiens
  ( 368 )...( 383 ): >C3AR_HUMAN
FAKSQSKTFRVAVVVV

SEQ ID NO: 12668 - protein, 16 aa, Homo sapiens
  ( 434 )...( 449 ): >C3AR_HUMAN
LYALLGKDFRKKARQS

SEQ ID NO: 12669 - protein, 16 aa, Homo sapiens
  ( 435 )...( 450 ): >C3AR_HUMAN
YALLGKDFRKKARQSI

SEQ ID NO: 12670 - protein, 16 aa, Homo sapiens
  ( 436 )...( 451 ): >C3AR_HUMAN
ALLGKDFRKKARQSIQ

SEQ ID NO: 12671 - protein, 16 aa, Homo sapiens
  ( 437 )...( 452 ): >C3AR_HUMAN
LLGKDFRKKARQSIQG

SEQ ID NO: 12672 - protein, 16 aa, Homo sapiens
  ( 438 )...( 453 ): >C3AR_HUMAN
LGKDFRKKARQSIQGI

SEQ ID NO: 12673 - protein, 16 aa, Homo sapiens
  ( 439 )...( 454 ): >C3AR_HUMAN
GKDFRKKARQSIQGIL

SEQ ID NO: 12674 - protein, 16 aa, Homo sapiens
  ( 440 )...( 455 ): >C3AR_HUMAN
KDFRKKARQSIQGILE

SEQ ID NO: 12675 - protein, 16 aa, Homo sapiens
  ( 442 )...( 457 ): >C3AR_HUMAN
FRKKARQSIQGILEAA

SEQ ID NO: 12676 - protein, 16 aa, Homo sapiens
  ( 443 )...( 458 ): >C3AR_HUMAN
RKKARQSIQGILEAAF

SEQ ID NO: 12677 - protein, 16 aa, Homo sapiens
  ( 214 )...( 229 ): >C3X1_HUMAN
IIQTLFSCKNHKKAKA

SEQ ID NO: 12678 - protein, 16 aa, Homo sapiens
  ( 215 )...( 230 ): >C3X1_HUMAN
IQTLFSCKNHKKAKAI

SEQ ID NO: 12679 - protein, 16 aa, Homo sapiens
  ( 216 )...( 231 ): >C3X1_HUMAN
QTLFSCKNHKKAKAIK

SEQ ID NO: 12680 - protein, 16 aa, Homo sapiens
  ( 217 )...( 232 ): >C3X1_HUMAN
TLFSCKNHKKAKAIKL

SEQ ID NO: 12681 - protein, 16 aa, Homo sapiens
  ( 218 )...( 233 ): >C3X1_HUMAN
LFSCKNHKKAKAIKLI

SEQ ID NO: 12682 - protein, 16 aa, Homo sapiens
  ( 219 )...( 234 ): >C3X1_HUMAN
FSCKNHKKAKAIKLIL

SEQ ID NO: 12683 - protein, 16 aa, Homo sapiens
  ( 220 )...( 235 ): >C3X1_HUMAN
SCKNHKKAKAIKLILL

SEQ ID NO: 12684 - protein, 16 aa, Homo sapiens
  ( 221 )...( 236 ): >C3X1_HUMAN
CKNHKKAKAIKLILLV

SEQ ID NO: 12685 - protein, 16 aa, Homo sapiens
  ( 222 )...( 237 ): >C3X1_HUMAN
KNHKKAKAIKLILLVV

SEQ ID NO: 12686 - protein, 16 aa, Homo sapiens
  ( 223 )...( 238 ): >C3X1_HUMAN
NHKKAKAIKLILLVVI

SEQ ID NO: 12687 - protein, 16 aa, Homo sapiens
  ( 193 )...( 208 ): >C5AR_HUMAN
SHDKRRERAVAIVRLV

SEQ ID NO: 12688 - protein, 16 aa, Homo sapiens
  ( 194 )...( 209 ): >C5AR_HUMAN
HDKRRERAVAIVRLVL

SEQ ID NO: 12689 - protein, 16 aa, Homo sapiens
  ( 195 )...( 210 ): >C5AR_HUMAN
DKRRERAVAIVRLVLG

SEQ ID NO: 12690 - protein, 16 aa, Homo sapiens
  ( 196 )...( 211 ): >C5AR_HUMAN
KRRERAVAIVRLVLGF

SEQ ID NO: 12691 - protein, 16 aa, Homo sapiens
  ( 197 )...( 212 ): >C5AR_HUMAN
RRERAVAIVRLVLGFL

SEQ ID NO: 12692 - protein, 16 aa, Homo sapiens
  ( 219 )...( 234 ): >C5AR_HUMAN
TICYTFILLRTWSRRA

SEQ ID NO: 12693 - protein, 16 aa, Homo sapiens
  ( 220 )...( 235 ): >C5AR_HUMAN
ICYTFILLRTWSRRAT

SEQ ID NO: 12694 - protein, 16 aa, Homo sapiens
  ( 223 )...( 238 ): >C5AR_HUMAN
TFILLRTWSRRATRST

SEQ ID NO: 12695 - protein, 16 aa, Homo sapiens
  ( 225 )...( 240 ): >C5AR_HUMAN
ILLRTWSRRATRSTKT

SEQ ID NO: 12696 - protein, 16 aa, Homo sapiens
  ( 226 )...( 241 ): >C5AR_HUMAN
LLRTWSRRATRSTKTL

SEQ ID NO: 12697 - protein, 16 aa, Homo sapiens
  ( 227 )...( 242 ): >C5AR_HUMAN
LRTWSRRATRSTKTLK

SEQ ID NO: 12698 - protein, 16 aa, Homo sapiens
  ( 228 )...( 243 ): >C5AR_HUMAN
RTWSRRATRSTKTLKV

SEQ ID NO: 12699 - protein, 16 aa, Homo sapiens
  ( 229 )...( 244 ): >C5AR_HUMAN
TWSRRATRSTKTLKVV

SEQ ID NO: 12700 - protein, 16 aa, Homo sapiens
  ( 230 )...( 245 ): >C5AR_HUMAN
WSRRATRSTKTLKVVV

SEQ ID NO: 12701 - protein, 16 aa, Homo sapiens
  ( 231 )...( 246 ): >C5AR_HUMAN
SRRATRSTKTLKVVVA

SEQ ID NO: 12702 - protein, 16 aa, Homo sapiens
  ( 232 )...( 247 ): >C5AR_HUMAN
RRATRSTKTLKVVVAV

SEQ ID NO: 12703 - protein, 16 aa, Homo sapiens
  ( 298 )...( 313 ): >C5AR_HUMAN
IIYVVAGQGFQGRLRK

SEQ ID NO: 12704 - protein, 16 aa, Homo sapiens
  ( 299 )...( 314 ): >C5AR_HUMAN
IYVVAGQGFQGRLRKS

SEQ ID NO: 12705 - protein, 16 aa, Homo sapiens
  ( 300 )...( 315 ): >C5AR_HUMAN
YVVAGQGFQGRLRKSL

SEQ ID NO: 12706 - protein, 16 aa, Homo sapiens
  ( 301 )...( 316 ): >C5AR_HUMAN
VVAGQGFQGRLRKSLP

SEQ ID NO: 12707 - protein, 16 aa, Homo sapiens
  ( 302 )...( 317 ): >C5AR_HUMAN
VAGQGFQGRLRKSLPS

SEQ ID NO: 12708 - protein, 16 aa, Homo sapiens
  ( 303 )...( 318 ): >C5AR_HUMAN
AGQGFQGRLRKSLPSL

SEQ ID NO: 12709 - protein, 16 aa, Homo sapiens
  ( 304 )...( 319 ): >C5AR_HUMAN
GQGFQGRLRKSLPSLL

SEQ ID NO: 12710 - protein, 16 aa, Homo sapiens
  ( 305 )...( 320 ): >C5AR_HUMAN
QGFQGRLRKSLPSLLR

SEQ ID NO: 12711 - protein, 16 aa, Homo sapiens
  ( 306 )...( 321 ): >C5AR_HUMAN
GFQGRLRKSLPSLLRN

SEQ ID NO: 12712 - protein, 16 aa, Homo sapiens
  ( 307 )...( 322 ): >C5AR_HUMAN
FQGRLRKSLPSLLRNV

SEQ ID NO: 12713 - protein, 16 aa, Homo sapiens
  ( 308 )...( 323 ): >C5AR_HUMAN
QGRLRKSLPSLLRNVL

SEQ ID NO: 12714 - protein, 16 aa, Homo sapiens
  ( 309 )...( 324 ): >C5AR_HUMAN
GRLRKSLPSLLRNVLT

SEQ ID NO: 12715 - protein, 16 aa, Homo sapiens
  ( 310 )...( 325 ): >C5AR_HUMAN
RLRKSLPSLLRNVLTE

SEQ ID NO: 12716 - protein, 16 aa, Homo sapiens
  ( 52 )...( 67 ): >C5L2_HUMAN
GNAMVAWVAGKVARRR

SEQ ID NO: 12717 - protein, 16 aa, Homo sapiens
  ( 53 )...( 68 ): >C5L2_HUMAN
NAMVAWVAGKVARRRV

SEQ ID NO: 12718 - protein, 16 aa, Homo sapiens
  ( 54 )...( 69 ): >C5L2_HUMAN
AMVAWVAGKVARRRVG

SEQ ID NO: 12719 - protein, 16 aa, Homo sapiens
  ( 55 )...( 70 ): >C5L2_HUMAN
MVAWVAGKVARRRVGA

SEQ ID NO: 12720 - protein, 16 aa, Homo sapiens
  ( 57 )...( 72 ): >C5L2_HUMAN
AWVAGKVARRRVGATW

SEQ ID NO: 12721 - protein, 16 aa, Homo sapiens
  ( 58 )...( 73 ): >C5L2_HUMAN
WVAGKVARRRVGATWL

SEQ ID NO: 12722 - protein, 16 aa, Homo sapiens
  ( 59 )...( 74 ): >C5L2_HUMAN
VAGKVARRRVGATWLL

SEQ ID NO: 12723 - protein, 16 aa, Homo sapiens
  ( 60 )...( 75 ): >C5L2_HUMAN
AGKVARRRVGATWLLH

SEQ ID NO: 12724 - protein, 16 aa, Homo sapiens
  ( 61 )...( 76 ): >C5L2_HUMAN
GKVARRRVGATWLLHL

SEQ ID NO: 12725 - protein, 16 aa, Homo sapiens
  ( 62 )...( 77 ): >C5L2_HUMAN
KVARRRVGATWLLHLA

SEQ ID NO: 12726 - protein, 16 aa, Homo sapiens
  ( 63 )...( 78 ): >C5L2_HUMAN
VARRRVGATWLLHLAV

SEQ ID NO: 12727 - protein, 16 aa, Homo sapiens
  ( 64 )...( 79 ): >C5L2_HUMAN
ARRRVGATWLLHLAVA

SEQ ID NO: 12728 - protein, 16 aa, Homo sapiens
  ( 226 )...( 241 ): >C5L2_HUMAN
WAARRCRPLGTAIVVG

SEQ ID NO: 12729 - protein, 16 aa, Homo sapiens
  ( 229 )...( 244 ): >C5L2_HUMAN
RRCRPLGTAIVVGFFV

SEQ ID NO: 12730 - protein, 16 aa, Homo sapiens
  ( 290 )...( 305 ): >C5L2_HUMAN
LFLYFGRAQLRRSLPA

SEQ ID NO: 12731 - protein, 16 aa, Homo sapiens
  ( 32 )...( 47 ): >CALR_HUMAN
PTIEPKPFLYVVGRKK

SEQ ID NO: 12732 - protein, 16 aa, Homo sapiens
  ( 33 )...( 48 ): >CALR_HUMAN
TIEPKPFLYVVGRKKM

SEQ ID NO: 12733 - protein, 16 aa, Homo sapiens
  ( 34 )...( 49 ): >CALR_HUMAN
IEPKPFLYVVGRKKMM

SEQ ID NO: 12734 - protein, 16 aa, Homo sapiens
  ( 37 )...( 52 ): >CALR_HUMAN
KPFLYVVGRKKMMDAQ

SEQ ID NO: 12735 - protein, 16 aa, Homo sapiens
  ( 182 )...( 197 ): >CALR_HUMAN
LNWKYRKALSLGCQRV

SEQ ID NO: 12736 - protein, 16 aa, Homo sapiens
  ( 183 )...( 198 ): >CALR_HUMAN
NWKYRKALSLGCQRVT

SEQ ID NO: 12737 - protein, 16 aa, Homo sapiens
  ( 184 )...( 199 ): >CALR_HUMAN
WKYRKALSLGCQRVTL

SEQ ID NO: 12738 - protein, 16 aa, Homo sapiens
  ( 185 )...( 200 ): >CALR_HUMAN
KYRKALSLGCQRVTLH

SEQ ID NO: 12739 - protein, 16 aa, Homo sapiens
  ( 186 )...( 201 ): >CALR_HUMAN
YRKALSLGCQRVTLHK

SEQ ID NO: 12740 - protein, 16 aa, Homo sapiens
  ( 187 )...( 202 ): >CALR_HUMAN
RKALSLGCQRVTLHKN

SEQ ID NO: 12741 - protein, 16 aa, Homo sapiens
  ( 278 )...( 293 ): >CASR_HUMAN
PLIKEIVRRNITGKIW

SEQ ID NO: 12742 - protein, 16 aa, Homo sapiens
  ( 279 )...( 294 ): >CASR_HUMAN
LIKEIVRRNITGKIWL

SEQ ID NO: 12743 - protein, 16 aa, Homo sapiens
  ( 280 )...( 295 ): >CASR_HUMAN
IKEIVRRNITGKIWLA

SEQ ID NO: 12744 - protein, 16 aa, Homo sapiens
  ( 281 )...( 296 ): >CASR_HUMAN
KEIVRRNITGKIWLAS

SEQ ID NO: 12745 - protein, 16 aa, Homo sapiens
  ( 321 )...( 336 ): >CASR_HUMAN
ALKAGQIPGFREFLKK

SEQ ID NO: 12746 - protein, 16 aa, Homo sapiens
  ( 322 )...( 337 ): >CASR_HUMAN
LKAGQIPGFREFLKKV

SEQ ID NO: 12747 - protein, 16 aa, Homo sapiens
  ( 323 )...( 338 ): >CASR_HUMAN
KAGQIPGFREFLKKVH

SEQ ID NO: 12748 - protein, 16 aa, Homo sapiens
  ( 334 )...( 349 ): >CASR_HUMAN
LKKVHPRKSVHNGFAK

SEQ ID NO: 12749 - protein, 16 aa, Homo sapiens
  ( 630 )...( 645 ): >CASR_HUMAN
VLGVFIKFRNTPIVKA

SEQ ID NO: 12750 - protein, 16 aa, Homo sapiens
  ( 631 )...( 646 ): >CASR_HUMAN
LGVFIKFRNTPIVKAT

SEQ ID NO: 12751 - protein, 16 aa, Homo sapiens
  ( 632 )...( 647 ): >CASR_HUMAN
GVFIKFRNTPIVKATN

SEQ ID NO: 12752 - protein, 16 aa, Homo sapiens
  ( 633 )...( 648 ): >CASR_HUMAN
VFIKFRNTPIVKATNR

SEQ ID NO: 12753 - protein, 16 aa, Homo sapiens
  ( 635 )...( 650 ): >CASR_HUMAN
IKFRNTPIVKATNREL

SEQ ID NO: 12754 - protein, 16 aa, Homo sapiens
  ( 636 )...( 651 ): >CASR_HUMAN
KFRNTPIVKATNRELS

SEQ ID NO: 12755 - protein, 16 aa, Homo sapiens
  ( 876 )...( 891 ): >CASR_HUMAN
TAAHAFKVAARATLRR

SEQ ID NO: 12756 - protein, 16 aa, Homo sapiens
  ( 877 )...( 892 ): >CASR_HUMAN
AAHAFKVAARATLRRS

SEQ ID NO: 12757 - protein, 16 aa, Homo sapiens
  ( 878 )...( 893 ): >CASR_HUMAN
AHAFKVAARATLRRSN

SEQ ID NO: 12758 - protein, 16 aa, Homo sapiens
  ( 879 )...( 894 ): >CASR_HUMAN
HAFKVAARATLRRSNV

SEQ ID NO: 12759 - protein, 16 aa, Homo sapiens
  ( 880 )...( 895 ): >CASR_HUMAN
AFKVAARATLRRSNVS

SEQ ID NO: 12760 - protein, 16 aa, Homo sapiens
  ( 881 )...( 896 ): >CASR_HUMAN
FKVAARATLRRSNVSR

SEQ ID NO: 12761 - protein, 16 aa, Homo sapiens
  ( 882 )...( 897 ): >CASR_HUMAN
KVAARATLRRSNVSRK

SEQ ID NO: 12762 - protein, 16 aa, Homo sapiens
  ( 884 )...( 899 ): >CASR_HUMAN
AARATLRRSNVSRKRS

SEQ ID NO: 12763 - protein, 16 aa, Homo sapiens
  ( 885 )...( 900 ): >CASR_HUMAN
ARATLRRSNVSRKRSS

SEQ ID NO: 12764 - protein, 16 aa, Homo sapiens
  ( 887 )...( 902 ): >CASR_HUMAN
ATLRRSNVSRKRSSSL

SEQ ID NO: 12765 - protein, 16 aa, Homo sapiens
  ( 888 )...( 903 ): >CASR_HUMAN
TLRRSNVSRKRSSSLG

SEQ ID NO: 12766 - protein, 16 aa, Homo sapiens
  ( 889 )...( 904 ): >CASR_HUMAN
LRRSNVSRKRSSSLGG

SEQ ID NO: 12767 - protein, 16 aa, Homo sapiens
  ( 955 )...( 970 ): >CASR_HUMAN
RSQQQPRCKQKVIFGS

SEQ ID NO: 12768 - protein, 16 aa, Homo sapiens
  ( 957 )...( 972 ): >CASR_HUMAN
QQQPRCKQKVIFGSGT

SEQ ID NO: 12769 - protein, 16 aa, Homo sapiens
  ( 958 )...( 973 ): >CASR_HUMAN
QQPRCKQKVIFGSGTV

SEQ ID NO: 12770 - protein, 16 aa, Homo sapiens
  ( 959 )...( 974 ): >CASR_HUMAN
QPRCKQKVIFGSGTVT

SEQ ID NO: 12771 - protein, 16 aa, Homo sapiens
  ( 135 )...( 150 ): >CB1R_HUMAN
LLVLCVILHSRSLRCR

SEQ ID NO: 12772 - protein, 16 aa, Homo sapiens
  ( 136 )...( 151 ): >CB1R_HUMAN
LVLCVILHSRSLRCRP

SEQ ID NO: 12773 - protein, 16 aa, Homo sapiens
  ( 181 )...( 196 ): >CB1R_HUMAN
HRKDSRNVFLFKLGGV

SEQ ID NO: 12774 - protein, 16 aa, Homo sapiens
  ( 182 )...( 197 ): >CB1R_HUMAN
RKDSRNVFLFKLGGVT

SEQ ID NO: 12775 - protein, 16 aa, Homo sapiens
  ( 216 )...( 231 ): >CB1R_HUMAN
ISIHRPLAYKRIVTRP

SEQ ID NO: 12776 - protein, 16 aa, Homo sapiens
  ( 218 )...( 233 ): >CB1R_HUMAN
IHRPLAYKRIVTRPKA

SEQ ID NO: 12777 - protein, 16 aa, Homo sapiens
  ( 219 )...( 234 ): >CB1R_HUMAN
HRPLAYKRIVTRPKAV

SEQ ID NO: 12778 - protein, 16 aa, Homo sapiens
  ( 220 )...( 235 ): >CB1R_HUMAN
RPLAYKRIVTRPKAVV

SEQ ID NO: 12779 - protein, 16 aa, Homo sapiens
  ( 221 )...( 236 ): >CB1R_HUMAN
PLAYKRIVTRPKAVVA

SEQ ID NO: 12780 - protein, 16 aa, Homo sapiens
  ( 222 )...( 237 ): >CB1R_HUMAN
LAYKRIVTRPKAVVAF

SEQ ID NO: 12781 - protein, 16 aa, Homo sapiens
  ( 223 )...( 238 ): >CB1R_HUMAN
AYKRIVTRPKAVVAFC

SEQ ID NO: 12782 - protein, 16 aa, Homo sapiens
  ( 224 )...( 239 ): >CB1R_HUMAN
YKRIVTRPKAVVAFCL

SEQ ID NO: 12783 - protein, 16 aa, Homo sapiens
  ( 225 )...( 240 ): >CB1R_HUMAN
KRIVTRPKAVVAFCLM

SEQ ID NO: 12784 - protein, 16 aa, Homo sapiens
  ( 297 )...( 312 ): >CB1R_HUMAN
ILWKAHSHAVRMIQRG

SEQ ID NO: 12785 - protein, 16 aa, Homo sapiens
  ( 298 )...( 313 ): >CB1R_HUMAN
LWKAHSHAVRMIQRGT

SEQ ID NO: 12786 - protein, 16 aa, Homo sapiens
  ( 299 )...( 314 ): >CB1R_HUMAN
WKAHSHAVRMIQRGTQ

SEQ ID NO: 12787 - protein, 16 aa, Homo sapiens
  ( 300 )...( 315 ): >CB1R_HUMAN
KAHSHAVRMIQRGTQK

SEQ ID NO: 12788 - protein, 16 aa, Homo sapiens
  ( 303 )...( 318 ): >CB1R_HUMAN
SHAVRMIQRGTQKSII

SEQ ID NO: 12789 - protein, 16 aa, Homo sapiens
  ( 304 )...( 319 ): >CB1R_HUMAN
HAVRMIQRGTQKSIII

SEQ ID NO: 12790 - protein, 16 aa, Homo sapiens
  ( 305 )...( 320 ): >CB1R_HUMAN
AVRMIQRGTQKSIIIH

SEQ ID NO: 12791 - protein, 16 aa, Homo sapiens
  ( 306 )...( 321 ): >CB1R_HUMAN
VRMIQRGTQKSIIIHT

SEQ ID NO: 12792 - protein, 16 aa, Homo sapiens
  ( 52 )...( 67 ): >CB2R_HUMAN
VAVLYLILSSHQLRRK

SEQ ID NO: 12793 - protein, 16 aa, Homo sapiens
  ( 53 )...( 68 ): >CB2R_HUMAN
AVLYLILSSHQLRRKP

SEQ ID NO: 12794 - protein, 16 aa, Homo sapiens
  ( 54 )...( 69 ): >CB2R_HUMAN
VLYLILSSHQLRRKPS

SEQ ID NO: 12795 - protein, 16 aa, Homo sapiens
  ( 62 )...( 77 ): >CB2R_HUMAN
HQLRRKPSYLFIGSLA

SEQ ID NO: 12796 - protein, 16 aa, Homo sapiens
  ( 63 )...( 78 ): >CB2R_HUMAN
QLRRKPSYLFIGSLAG

SEQ ID NO: 12797 - protein, 16 aa, Homo sapiens
  ( 135 )...( 150 ): >CB2R_HUMAN
LRYPPSYKALLTRGRA

SEQ ID NO: 12798 - protein, 16 aa, Homo sapiens
  ( 136 )...( 151 ): >CB2R_HUMAN
RYPPSYKALLTRGRAL

SEQ ID NO: 12799 - protein, 16 aa, Homo sapiens
  ( 137 )...( 152 ): >CB2R_HUMAN
YPPSYKALLTRGRALV

SEQ ID NO: 12800 - protein, 16 aa, Homo sapiens
  ( 138 )...( 153 ): >CB2R_HUMAN
PPSYKALLTRGRALVT

SEQ ID NO: 12801 - protein, 16 aa, Homo sapiens
  ( 139 )...( 154 ): >CB2R_HUMAN
PSYKALLTRGRALVTL

SEQ ID NO: 12802 - protein, 16 aa, Homo sapiens
  ( 229 )...( 244 ): >CB2R_HUMAN
RQVPGMARMRLDVRLA

SEQ ID NO: 12803 - protein, 16 aa, Homo sapiens
  ( 230 )...( 245 ): >CB2R_HUMAN
QVPGMARMRLDVRLAK

SEQ ID NO: 12804 - protein, 16 aa, Homo sapiens
  ( 231 )...( 246 ): >CB2R_HUMAN
VPGMARMRLDVRLAKT

SEQ ID NO: 12805 - protein, 16 aa, Homo sapiens
  ( 232 )...( 247 ): >CB2R_HUMAN
PGMARMRLDVRLAKTL

SEQ ID NO: 12806 - protein, 16 aa, Homo sapiens
  ( 233 )...( 248 ): >CB2R_HUMAN
GMARMRLDVRLAKTLG

SEQ ID NO: 12807 - protein, 16 aa, Homo sapiens
  ( 234 )...( 249 ): >CB2R_HUMAN
MARMRLDVRLAKTLGL

SEQ ID NO: 12808 - protein, 16 aa, Homo sapiens
  ( 235 )...( 250 ): >CB2R_HUMAN
ARMRLDVRLAKTLGLV

SEQ ID NO: 12809 - protein, 16 aa, Homo sapiens
  ( 236 )...( 251 ): >CB2R_HUMAN
RMRLDVRLAKTLGLVL

SEQ ID NO: 12810 - protein, 16 aa, Homo sapiens
  ( 56 )...( 71 ): >CCKR_HUMAN
VLGNTLVITVLIRNKR

SEQ ID NO: 12811 - protein, 16 aa, Homo sapiens
  ( 57 )...( 72 ): >CCKR_HUMAN
LGNTLVITVLIRNKRM

SEQ ID NO: 12812 - protein, 16 aa, Homo sapiens
  ( 58 )...( 73 ): >CCKR_HUMAN
GNTLVITVLIRNKRMR

SEQ ID NO: 12813 - protein, 16 aa, Homo sapiens
  ( 59 )...( 74 ): >CCKR_HUMAN
NTLVITVLIRNKRMRT

SEQ ID NO: 12814 - protein, 16 aa, Homo sapiens
  ( 60 )...( 75 ): >CCKR_HUMAN
TLVITVLIRNKRMRTV

SEQ ID NO: 12815 - protein, 16 aa, Homo sapiens
  ( 61 )...( 76 ): >CCKR_HUMAN
LVITVLIRNKRMRTVT

SEQ ID NO: 12816 - protein, 16 aa, Homo sapiens
  ( 62 )...( 77 ): >CCKR_HUMAN
VITVLIRNKRMRTVTN

SEQ ID NO: 12817 - protein, 16 aa, Homo sapiens
  ( 63 )...( 78 ): >CCKR_HUMAN
ITVLIRNKRMRTVTNI

SEQ ID NO: 12818 - protein, 16 aa, Homo sapiens
  ( 64 )...( 79 ): >CCKR_HUMAN
TVLIRNKRMRTVTNIF

SEQ ID NO: 12819 - protein, 16 aa, Homo sapiens
  ( 65 )...( 80 ): >CCKR_HUMAN
VLIRNKRMRTVTNIFL

SEQ ID NO: 12820 - protein, 16 aa, Homo sapiens
  ( 66 )...( 81 ): >CCKR_HUMAN
LIRNKRMRTVTNIFLL

SEQ ID NO: 12821 - protein, 16 aa, Homo sapiens
  ( 67 )...( 82 ): >CCKR_HUMAN
IRNKRMRTVTNIFLLS

SEQ ID NO: 12822 - protein, 16 aa, Homo sapiens
  ( 68 )...( 83 ): >CCKR_HUMAN
RNKRMRTVTNIFLLSL

SEQ ID NO: 12823 - protein, 16 aa, Homo sapiens
  ( 69 )...( 84 ): >CCKR_HUMAN
NKRMRTVTNIFLLSLA

SEQ ID NO: 12824 - protein, 16 aa, Homo sapiens
  ( 70 )...( 85 ): >CCKR_HUMAN
KRMRTVTNIFLLSLAV

SEQ ID NO: 12825 - protein, 16 aa, Homo sapiens
  ( 139 )...( 154 ): >CCKR_HUMAN
RYGAICKPLQSRVWQT

SEQ ID NO: 12826 - protein, 16 aa, Homo sapiens
  ( 239 )...( 254 ): >CCKR_HUMAN
GIKFEASQKKSAKERK

SEQ ID NO: 12827 - protein, 16 aa, Homo sapiens
  ( 247 )...( 262 ): >CCKR_HUMAN
KKSAKERKPSTTSSGK

SEQ ID NO: 12828 - protein, 16 aa, Homo sapiens
  ( 273 )...( 288 ): >CCKR_HUMAN
KTRPPRKLELRQLSTG

SEQ ID NO: 12829 - protein, 16 aa, Homo sapiens
  ( 274 )...( 289 ): >CCKR_HUMAN
TRPPRKLELRQLSTGS

SEQ ID NO: 12830 - protein, 16 aa, Homo sapiens
  ( 275 )...( 290 ): >CCKR_HUMAN
RPPRKLELRQLSTGSS

SEQ ID NO: 12831 - protein, 16 aa, Homo sapiens
  ( 277 )...( 292 ): >CCKR_HUMAN
PRKLELRQLSTGSSSR

SEQ ID NO: 12832 - protein, 16 aa, Homo sapiens
  ( 278 )...( 293 ): >CCKR_HUMAN
RKLELRQLSTGSSSRA

SEQ ID NO: 12833 - protein, 16 aa, Homo sapiens
  ( 282 )...( 297 ): >CCKR_HUMAN
LRQLSTGSSSRANRIR

SEQ ID NO: 12834 - protein, 16 aa, Homo sapiens
  ( 283 )...( 298 ): >CCKR_HUMAN
RQLSTGSSSRANRIRS

SEQ ID NO: 12835 - protein, 16 aa, Homo sapiens
  ( 295 )...( 310 ): >CCKR_HUMAN
RIRSNSSAANLMAKKR

SEQ ID NO: 12836 - protein, 16 aa, Homo sapiens
  ( 296 )...( 311 ): >CCKR_HUMAN
IRSNSSAANLMAKKRV

SEQ ID NO: 12837 - protein, 16 aa, Homo sapiens
  ( 297 )...( 312 ): >CCKR_HUMAN
RSNSSAANLMAKKRVI

SEQ ID NO: 12838 - protein, 16 aa, Homo sapiens
  ( 298 )...( 313 ): >CCKR_HUMAN
SNSSAANLMAKKRVIR

SEQ ID NO: 12839 - protein, 16 aa, Homo sapiens
  ( 299 )...( 314 ): >CCKR_HUMAN
NSSAANLMAKKRVIRM

SEQ ID NO: 12840 - protein, 16 aa, Homo sapiens
  ( 300 )...( 315 ): >CCKR_HUMAN
SSAANLMAKKRVIRML

SEQ ID NO: 12841 - protein, 16 aa, Homo sapiens
  ( 301 )...( 316 ): >CCKR_HUMAN
SAANLMAKKRVIRMLI

SEQ ID NO: 12842 - protein, 16 aa, Homo sapiens
  ( 302 )...( 317 ): >CCKR_HUMAN
AANLMAKKRVIRMLIV

SEQ ID NO: 12843 - protein, 16 aa, Homo sapiens
  ( 303 )...( 318 ): >CCKR_HUMAN
ANLMAKKRVIRMLIVI

SEQ ID NO: 12844 - protein, 16 aa, Homo sapiens
  ( 152 )...( 167 ): >CCR3_HUMAN
NIVHATQLYRRGPPAR

SEQ ID NO: 12845 - protein, 16 aa, Homo sapiens
  ( 153 )...( 168 ): >CCR3_HUMAN
IVHATQLYRRGPPARV

SEQ ID NO: 12846 - protein, 16 aa, Homo sapiens
  ( 154 )...( 169 ): >CCR3_HUMAN
VHATQLYRRGPPARVT

SEQ ID NO: 12847 - protein, 16 aa, Homo sapiens
  ( 155 )...( 170 ): >CCR3_HUMAN
HATQLYRRGPPARVTL

SEQ ID NO: 12848 - protein, 16 aa, Homo sapiens
  ( 156 )...( 171 ): >CCR3_HUMAN
ATQLYRRGPPARVTLT

SEQ ID NO: 12849 - protein, 16 aa, Homo sapiens
  ( 157 )...( 172 ): >CCR3_HUMAN
TQLYRRGPPARVTLTC

SEQ ID NO: 12850 - protein, 16 aa, Homo sapiens
  ( 158 )...( 173 ): >CCR3_HUMAN
QLYRRGPPARVTLTCL

SEQ ID NO: 12851 - protein, 16 aa, Homo sapiens
  ( 159 )...( 174 ): >CCR3_HUMAN
LYRRGPPARVTLTCLA

SEQ ID NO: 12852 - protein, 16 aa, Homo sapiens
  ( 160 )...( 175 ): >CCR3_HUMAN
YRRGPPARVTLTCLAV

SEQ ID NO: 12853 - protein, 16 aa, Homo sapiens
  ( 161 )...( 176 ): >CCR3_HUMAN
RRGPPARVTLTCLAVW

SEQ ID NO: 12854 - protein, 16 aa, Homo sapiens
  ( 235 )...( 250 ): >CCR3_HUMAN
YAHILAVLLVSRGQRR

SEQ ID NO: 12855 - protein, 16 aa, Homo sapiens
  ( 236 )...( 251 ): >CCR3_HUMAN
AHILAVLLVSRGQRRL

SEQ ID NO: 12856 - protein, 16 aa, Homo sapiens
  ( 237 )...( 252 ): >CCR3_HUMAN
HILAVLLVSRGQRRLR

SEQ ID NO: 12857 - protein, 16 aa, Homo sapiens
  ( 238 )...( 253 ): >CCR3_HUMAN
ILAVLLVSRGQRRLRA

SEQ ID NO: 12858 - protein, 16 aa, Homo sapiens
  ( 239 )...( 254 ): >CCR3_HUMAN
LAVLLVSRGQRRLRAM

SEQ ID NO: 12859 - protein, 16 aa, Homo sapiens
  ( 240 )...( 255 ): >CCR3_HUMAN
AVLLVSRGQRRLRAMR

SEQ ID NO: 12860 - protein, 16 aa, Homo sapiens
  ( 241 )...( 256 ): >CCR3_HUMAN
VLLVSRGQRRLRAMRL

SEQ ID NO: 12861 - protein, 16 aa, Homo sapiens
  ( 242 )...( 257 ): >CCR3_HUMAN
LLVSRGQRRLRAMRLV

SEQ ID NO: 12862 - protein, 16 aa, Homo sapiens
  ( 243 )...( 258 ): >CCR3_HUMAN
LVSRGQRRLRAMRLVV

SEQ ID NO: 12863 - protein, 16 aa, Homo sapiens
  ( 244 )...( 259 ): >CCR3_HUMAN
VSRGQRRLRAMRLVVV

SEQ ID NO: 12864 - protein, 16 aa, Homo sapiens
  ( 245 )...( 260 ): >CCR3_HUMAN
SRGQRRLRAMRLVVVV

SEQ ID NO: 12865 - protein, 16 aa, Homo sapiens
  ( 247 )...( 262 ): >CCR3_HUMAN
GQRRLRAMRLVVVVVV

SEQ ID NO: 12866 - protein, 16 aa, Homo sapiens
  ( 248 )...( 263 ): >CCR3_HUMAN
QRRLRAMRLVVVVVVA

SEQ ID NO: 12867 - protein, 16 aa, Homo sapiens
  ( 249 )...( 264 ): >CCR3_HUMAN
RRLRAMRLVVVVVVAF

SEQ ID NO: 12868 - protein, 16 aa, Homo sapiens
  ( 322 )...( 337 ): >CCR3_HUMAN
GVKFRERMWMLLLRLG

SEQ ID NO: 12869 - protein, 16 aa, Homo sapiens
  ( 328 )...( 343 ): >CCR3_HUMAN
RMWMLLLRLGCPNQRG

SEQ ID NO: 12870 - protein, 16 aa, Homo sapiens
  ( 331 )...( 346 ): >CCR3_HUMAN
MLLLRLGCPNQRGLQR

SEQ ID NO: 12871 - protein, 16 aa, Homo sapiens
  ( 332 )...( 347 ): >CCR3_HUMAN
LLLRLGCPNQRGLQRQ

SEQ ID NO: 12872 - protein, 16 aa, Homo sapiens
  ( 333 )...( 348 ): >CCR3_HUMAN
LLRLGCPNQRGLQRQP

SEQ ID NO: 12873 - protein, 16 aa, Homo sapiens
  ( 334 )...( 349 ): >CCR3_HUMAN
LRLGCPNQRGLQRQPS

SEQ ID NO: 12874 - protein, 16 aa, Homo sapiens
  ( 55 )...( 70 ): >CCR4_HUMAN
GNGLVILVMGYQKKLR

SEQ ID NO: 12875 - protein, 16 aa, Homo sapiens
  ( 56 )...( 71 ): >CCR4_HUMAN
NGLVILVMGYQKKLRS

SEQ ID NO: 12876 - protein, 16 aa, Homo sapiens
  ( 57 )...( 72 ): >CCR4_HUMAN
GLVILVMGYQKKLRSM

SEQ ID NO: 12877 - protein, 16 aa, Homo sapiens
  ( 58 )...( 73 ): >CCR4_HUMAN
LVILVMGYQKKLRSMT

SEQ ID NO: 12878 - protein, 16 aa, Homo sapiens
  ( 60 )...( 75 ): >CCR4_HUMAN
ILVMGYQKKLRSMTDK

SEQ ID NO: 12879 - protein, 16 aa, Homo sapiens
  ( 61 )...( 76 ): >CCR4_HUMAN
LVMGYQKKLRSMTDKY

SEQ ID NO: 12880 - protein, 16 aa, Homo sapiens
  ( 135 )...( 150 ): >CCR4_HUMAN
YLAIVHATNSQRPRKL

SEQ ID NO: 12881 - protein, 16 aa, Homo sapiens
  ( 136 )...( 151 ): >CCR4_HUMAN
LAIVHATNSQRPRKLL

SEQ ID NO: 12882 - protein, 16 aa, Homo sapiens
  ( 137 )...( 152 ): >CCR4_HUMAN
AIVHATNSQRPRKLLA

SEQ ID NO: 12883 - protein, 16 aa, Homo sapiens
  ( 139 )...( 154 ): >CCR4_HUMAN
VHATNSQRPRKLLAEK

SEQ ID NO: 12884 - protein, 16 aa, Homo sapiens
  ( 140 )...( 155 ): >CCR4_HUMAN
HATNSQRPRKLLAEKV

SEQ ID NO: 12885 - protein, 16 aa, Homo sapiens
  ( 141 )...( 156 ): >CCR4_HUMAN
ATNSQRPRKLLAEKVV

SEQ ID NO: 12886 - protein, 16 aa, Homo sapiens
  ( 142 )...( 157 ): >CCR4_HUMAN
TNSQRPRKLLAEKVVY

SEQ ID NO: 12887 - protein, 16 aa, Homo sapiens
  ( 143 )...( 158 ): >CCR4_HUMAN
NSQRPRKLLAEKVVYV

SEQ ID NO: 12888 - protein, 16 aa, Homo sapiens
  ( 144 )...( 159 ): >CCR4_HUMAN
SQRPRKLLAEKVVYVG

SEQ ID NO: 12889 - protein, 16 aa, Homo sapiens
  ( 145 )...( 160 ): >CCR4_HUMAN
QRPRKLLAEKVVYVGV

SEQ ID NO: 12890 - protein, 16 aa, Homo sapiens
  ( 146 )...( 161 ): >CCR4_HUMAN
RPRKLLAEKVVYVGVW

SEQ ID NO: 12891 - protein, 16 aa, Homo sapiens
  ( 221 )...( 236 ): >CCR4_HUMAN
IIISKLSHSKGHQKRK

SEQ ID NO: 12892 - protein, 16 aa, Homo sapiens
  ( 222 )...( 237 ): >CCR4_HUMAN
IISKLSHSKGHQKRKA

SEQ ID NO: 12893 - protein, 16 aa, Homo sapiens
  ( 223 )...( 238 ): >CCR4_HUMAN
ISKLSHSKGHQKRKAL

SEQ ID NO: 12894 - protein, 16 aa, Homo sapiens
  ( 224 )...( 239 ): >CCR4_HUMAN
SKLSHSKGHQKRKALK

SEQ ID NO: 12895 - protein, 16 aa, Homo sapiens
  ( 225 )...( 240 ): >CCR4_HUMAN
KLSHSKGHQKRKALKT

SEQ ID NO: 12896 - protein, 16 aa, Homo sapiens
  ( 226 )...( 241 ): >CCR4_HUMAN
LSHSKGHQKRKALKTT

SEQ ID NO: 12897 - protein, 16 aa, Homo sapiens
  ( 227 )...( 242 ): >CCR4_HUMAN
SHSKGHQKRKALKTTV

SEQ ID NO: 12898 - protein, 16 aa, Homo sapiens
  ( 228 )...( 243 ): >CCR4_HUMAN
HSKGHQKRKALKTTVI

SEQ ID NO: 12899 - protein, 16 aa, Homo sapiens
  ( 229 )...( 244 ): >CCR4_HUMAN
SKGHQKRKALKTTVIL

SEQ ID NO: 12900 - protein, 16 aa, Homo sapiens
  ( 230 )...( 245 ): >CCR4_HUMAN
KGHQKRKALKTTVILI

SEQ ID NO: 12901 - protein, 16 aa, Homo sapiens
  ( 231 )...( 246 ): >CCR4_HUMAN
GHQKRKALKTTVILIL

SEQ ID NO: 12902 - protein, 16 aa, Homo sapiens
  ( 232 )...( 247 ): >CCR4_HUMAN
HQKRKALKTTVILILA

SEQ ID NO: 12903 - protein, 16 aa, Homo sapiens
  ( 233 )...( 248 ): >CCR4_HUMAN
QKRKALKTTVILILAF

SEQ ID NO: 12904 - protein, 16 aa, Homo sapiens
  ( 319 )...( 334 ): >CCR4_HUMAN
SVSRGSSLKILSKGKR

SEQ ID NO: 12905 - protein, 16 aa, Homo sapiens
  ( 320 )...( 335 ): >CCR4_HUMAN
VSRGSSLKILSKGKRG

SEQ ID NO: 12906 - protein, 16 aa, Homo sapiens
  ( 322 )...( 337 ): >CCR4_HUMAN
RGSSLKILSKGKRGGH

SEQ ID NO: 12907 - protein, 16 aa, Homo sapiens
  ( 149 )...( 164 ): >CCR5_HUMAN
LAIVHAVHAYRHRRLL

SEQ ID NO: 12908 - protein, 16 aa, Homo sapiens
  ( 150 )...( 165 ): >CCR5_HUMAN
AIVHAVHAYRHRRLLS

SEQ ID NO: 12909 - protein, 16 aa, Homo sapiens
  ( 151 )...( 166 ): >CCR5_HUMAN
IVHAVHAYRHRRLLSI

SEQ ID NO: 12910 - protein, 16 aa, Homo sapiens
  ( 157 )...( 172 ): >CCR5_HUMAN
AYRHRRLLSIHITCGT

SEQ ID NO: 12911 - protein, 16 aa, Homo sapiens
  ( 158 )...( 173 ): >CCR5_HUMAN
YRHRRLLSIHITCGTI

SEQ ID NO: 12912 - protein, 16 aa, Homo sapiens
  ( 159 )...( 174 ): >CCR5_HUMAN
RHRRLLSIHITCGTIW

SEQ ID NO: 12913 - protein, 16 aa, Homo sapiens
  ( 235 )...( 250 ): >CCR5_HUMAN
GWCYVGVVHRLRQAQR

SEQ ID NO: 12914 - protein, 16 aa, Homo sapiens
  ( 237 )...( 252 ): >CCR5_HUMAN
CYVGVVHRLRQAQRRP

SEQ ID NO: 12915 - protein, 16 aa, Homo sapiens
  ( 247 )...( 262 ): >CCR5_HUMAN
QAQRRPQRQKAVRVAI

SEQ ID NO: 12916 - protein, 16 aa, Homo sapiens
  ( 248 )...( 263 ): >CCR5_HUMAN
AQRRPQRQKAVRVAIL

SEQ ID NO: 12917 - protein, 16 aa, Homo sapiens
  ( 249 )...( 264 ): >CCR5_HUMAN
QRRPQRQKAVRVAILV

SEQ ID NO: 12918 - protein, 16 aa, Homo sapiens
  ( 250 )...( 265 ): >CCR5_HUMAN
RRPQRQKAVRVAILVT

SEQ ID NO: 12919 - protein, 16 aa, Homo sapiens
  ( 251 )...( 266 ): >CCR5_HUMAN
RPQRQKAVRVAILVTS

SEQ ID NO: 12920 - protein, 16 aa, Homo sapiens
  ( 252 )...( 267 ): >CCR5_HUMAN
PQRQKAVRVAILVTSI

SEQ ID NO: 12921 - protein, 16 aa, Homo sapiens
  ( 253 )...( 268 ): >CCR5_HUMAN
QRQKAVRVAILVTSIF

SEQ ID NO: 12922 - protein, 16 aa, Homo sapiens
  ( 254 )...( 269 ): >CCR5_HUMAN
RQKAVRVAILVTSIFF

SEQ ID NO: 12923 - protein, 16 aa, Homo sapiens
  ( 324 )...( 339 ): >CCR5_HUMAN
FAGVKFRSDLSRLLTK

SEQ ID NO: 12924 - protein, 16 aa, Homo sapiens
  ( 325 )...( 340 ): >CCR5_HUMAN
AGVKFRSDLSRLLTKL

SEQ ID NO: 12925 - protein, 16 aa, Homo sapiens
  ( 326 )...( 341 ): >CCR5_HUMAN
GVKFRSDLSRLLTKLG

SEQ ID NO: 12926 - protein, 16 aa, Homo sapiens
  ( 327 )...( 342 ): >CCR5_HUMAN
VKFRSDLSRLLTKLGC

SEQ ID NO: 12927 - protein, 16 aa, Homo sapiens
  ( 328 )...( 343 ): >CCR5_HUMAN
KFRSDLSRLLTKLGCT

SEQ ID NO: 12928 - protein, 16 aa, Homo sapiens
  ( 127 )...( 142 ): >CCR6_HUMAN
RFIVVVKATKAYNQQA

SEQ ID NO: 12929 - protein, 16 aa, Homo sapiens
  ( 128 )...( 143 ): >CCR6_HUMAN
FIVVVKATKAYNQQAK

SEQ ID NO: 12930 - protein, 16 aa, Homo sapiens
  ( 129 )...( 144 ): >CCR6_HUMAN
IVVVKATKAYNQQAKR

SEQ ID NO: 12931 - protein, 16 aa, Homo sapiens
  ( 130 )...( 145 ): >CCR6_HUMAN
VVVKATKAYNQQAKRM

SEQ ID NO: 12932 - protein, 16 aa, Homo sapiens
  ( 131 )...( 146 ): >CCR6_HUMAN
VVKATKAYNQQAKRMT

SEQ ID NO: 12933 - protein, 16 aa, Homo sapiens
  ( 132 )...( 147 ): >CCR6_HUMAN
VKATKAYNQQAKRMTW

SEQ ID NO: 12934 - protein, 16 aa, Homo sapiens
  ( 133 )...( 148 ): >CCR6_HUMAN
KATKAYNQQAKRMTWG

SEQ ID NO: 12935 - protein, 16 aa, Homo sapiens
  ( 134 )...( 149 ): >CCR6_HUMAN
ATKAYNQQAKRMTWGK

SEQ ID NO: 12936 - protein, 16 aa, Homo sapiens
  ( 135 )...( 150 ): >CCR6_HUMAN
TKAYNQQAKRMTWGKV

SEQ ID NO: 12937 - protein, 16 aa, Homo sapiens
  ( 136 )...( 151 ): >CCR6_HUMAN
KAYNQQAKRMTWGKVT

SEQ ID NO: 12938 - protein, 16 aa, Homo sapiens
  ( 137 )...( 152 ): >CCR6_HUMAN
AYNQQAKRMTWGKVTS

SEQ ID NO: 12939 - protein, 16 aa, Homo sapiens
  ( 138 )...( 153 ): >CCR6_HUMAN
YNQQAKRMTWGKVTSL

SEQ ID NO: 12940 - protein, 16 aa, Homo sapiens
  ( 139 )...( 154 ): >CCR6_HUMAN
NQQAKRMTWGKVTSLL

SEQ ID NO: 12941 - protein, 16 aa, Homo sapiens
  ( 140 )...( 155 ): >CCR6_HUMAN
QQAKRMTWGKVTSLLI

SEQ ID NO: 12942 - protein, 16 aa, Homo sapiens
  ( 141 )...( 156 ): >CCR6_HUMAN
QAKRMTWGKVTSLLIW

SEQ ID NO: 12943 - protein, 16 aa, Homo sapiens
  ( 142 )...( 157 ): >CCR6_HUMAN
AKRMTWGKVTSLLIWV

SEQ ID NO: 12944 - protein, 16 aa, Homo sapiens
  ( 216 )...( 231 ): >CCR6_HUMAN
KTLLHAGGFQKHRSLK

SEQ ID NO: 12945 - protein, 16 aa, Homo sapiens
  ( 221 )...( 236 ): >CCR6_HUMAN
AGGFQKHRSLKIIFLV

SEQ ID NO: 12946 - protein, 16 aa, Homo sapiens
  ( 222 )...( 237 ): >CCR6_HUMAN
GGFQKHRSLKIIFLVM

SEQ ID NO: 12947 - protein, 16 aa, Homo sapiens
  ( 223 )...( 238 ): >CCR6_HUMAN
GFQKHRSLKIIFLVMA

SEQ ID NO: 12948 - protein, 16 aa, Homo sapiens
  ( 432 )...( 447 ): >CD97_HUMAN
SSIRGVQLRRLSAVNS

SEQ ID NO: 12949 - protein, 16 aa, Homo sapiens
  ( 433 )...( 448 ): >CD97_HUMAN
SIRGVQLRRLSAVNSI

SEQ ID NO: 12950 - protein, 16 aa, Homo sapiens
  ( 434 )...( 449 ): >CD97_HUMAN
IRGVQLRRLSAVNSIF

SEQ ID NO: 12951 - protein, 16 aa, Homo sapiens
  ( 435 )...( 450 ): >CD97_HUMAN
RGVQLRRLSAVNSIFL

SEQ ID NO: 12952 - protein, 16 aa, Homo sapiens
  ( 723 )...( 738 ): >CD97_HUMAN
SEINPDMKKLKKARAL

SEQ ID NO: 12953 - protein, 16 aa, Homo sapiens
  ( 724 )...( 739 ): >CD97_HUMAN
EINPDMKKLKKARALT

SEQ ID NO: 12954 - protein, 16 aa, Homo sapiens
  ( 725 )...( 740 ): >CD97_HUMAN
INPDMKKLKKARALTI

SEQ ID NO: 12955 - protein, 16 aa, Homo sapiens
  ( 726 )...( 741 ): >CD97_HUMAN
NPDMKKLKKARALTIT

SEQ ID NO: 12956 - protein, 16 aa, Homo sapiens
  ( 727 )...( 742 ): >CD97_HUMAN
PDMKKLKKARALTITA

SEQ ID NO: 12957 - protein, 16 aa, Homo sapiens
  ( 728 )...( 743 ): >CD97_HUMAN
DMKKLKKARALTITAI

SEQ ID NO: 12958 - protein, 16 aa, Homo sapiens
  ( 729 )...( 744 ): >CD97_HUMAN
MKKLKKARALTITAIA

SEQ ID NO: 12959 - protein, 16 aa, Homo sapiens
  ( 730 )...( 745 ): >CD97_HUMAN
KKLKKARALTITAIAQ

SEQ ID NO: 12960 - protein, 16 aa, Homo sapiens
  ( 731 )...( 746 ): >CD97_HUMAN
KLKKARALTITAIAQL

SEQ ID NO: 12961 - protein, 16 aa, Homo sapiens
  ( 732 )...( 747 ): >CD97_HUMAN
LKKARALTITAIAQLF

SEQ ID NO: 12962 - protein, 16 aa, Homo sapiens
  ( 733 )...( 748 ): >CD97_HUMAN
KKARALTITAIAQLFL

SEQ ID NO: 12963 - protein, 16 aa, Homo sapiens
  ( 779 )...( 794 ): >CD97_HUMAN
GAFLYLLHCLLNKKVR

SEQ ID NO: 12964 - protein, 16 aa, Homo sapiens
  ( 791 )...( 806 ): >CD97_HUMAN
KKVREEYRKWACLVAG

SEQ ID NO: 12965 - protein, 16 aa, Homo sapiens
  ( 152 )...( 167 ): >CKD6_HUMAN
YHRLRTRAKNLLLATI

SEQ ID NO: 12966 - protein, 16 aa, Homo sapiens
  ( 153 )...( 168 ): >CKD6_HUMAN
HRLRTRAKNLLLATIV

SEQ ID NO: 12967 - protein, 16 aa, Homo sapiens
  ( 154 )...( 169 ): >CKD6_HUMAN
RLRTRAKNLLLATIVW

SEQ ID NO: 12968 - protein, 16 aa, Homo sapiens
  ( 155 )...( 170 ): >CKD6_HUMAN
LRTRAKNLLLATIVWA

SEQ ID NO: 12969 - protein, 16 aa, Homo sapiens
  ( 156 )...( 171 ): >CKD6_HUMAN
RTRAKNLLLATIVWAV

SEQ ID NO: 12970 - protein, 16 aa, Homo sapiens
  ( 230 )...( 245 ): >CKD6_HUMAN
YSRIGCVLVRLRPAGQ

SEQ ID NO: 12971 - protein, 16 aa, Homo sapiens
  ( 232 )...( 247 ): >CKD6_HUMAN
RIGCVLVRLRPAGQGR

SEQ ID NO: 12972 - protein, 16 aa, Homo sapiens
  ( 235 )...( 250 ): >CKD6_HUMAN
CVLVRLRPAGQGRALK

SEQ ID NO: 12973 - protein, 16 aa, Homo sapiens
  ( 236 )...( 251 ): >CKD6_HUMAN
VLVRLRPAGQGRALKI

SEQ ID NO: 12974 - protein, 16 aa, Homo sapiens
  ( 237 )...( 252 ): >CKD6_HUMAN
LVRLRPAGQGRALKIA

SEQ ID NO: 12975 - protein, 16 aa, Homo sapiens
  ( 238 )...( 253 ): >CKD6_HUMAN
VRLRPAGQGRALKIAA

SEQ ID NO: 12976 - protein, 16 aa, Homo sapiens
  ( 317 )...( 332 ): >CKD6_HUMAN
HRFRQYLKAFLAAVLG

SEQ ID NO: 12977 - protein, 16 aa, Homo sapiens
  ( 318 )...( 333 ): >CKD6_HUMAN
RFRQYLKAFLAAVLGW

SEQ ID NO: 12978 - protein, 16 aa, Homo sapiens
  ( 55 )...( 70 ): >CKR1_HUMAN
VVLVLVQYKRLKNMTS

SEQ ID NO: 12979 - protein, 16 aa, Homo sapiens
  ( 56 )...( 71 ): >CKR1_HUMAN
VLVLVQYKRLKNMTSI

SEQ ID NO: 12980 - protein, 16 aa, Homo sapiens
  ( 57 )...( 72 ): >CKR1_HUMAN
LVLVQYKRLKNMTSIY

SEQ ID NO: 12981 - protein, 16 aa, Homo sapiens
  ( 58 )...( 73 ): >CKR1_HUMAN
VLVQYKRLKNMTSIYL

SEQ ID NO: 12982 - protein, 16 aa, Homo sapiens
  ( 59 )...( 74 ): >CKR1_HUMAN
LVQYKRLKNMTSIYLL

SEQ ID NO: 12983 - protein, 16 aa, Homo sapiens
  ( 62 )...( 77 ): >CKR1_HUMAN
YKRLKNMTSIYLLNLA

SEQ ID NO: 12984 - protein, 16 aa, Homo sapiens
  ( 63 )...( 78 ): >CKR1_HUMAN
KRLKNMTSIYLLNLAI

SEQ ID NO: 12985 - protein, 16 aa, Homo sapiens
  ( 131 )...( 146 ): >CKR1_HUMAN
RYLAIVHAVFALRART

SEQ ID NO: 12986 - protein, 16 aa, Homo sapiens
  ( 216 )...( 231 ): >CKR1_HUMAN
IICYTGIIKILLRRPN

SEQ ID NO: 12987 - protein, 16 aa, Homo sapiens
  ( 218 )...( 233 ): >CKR1_HUMAN
CYTGIIKILLRRPNEK

SEQ ID NO: 12988 - protein, 16 aa, Homo sapiens
  ( 219 )...( 234 ): >CKR1_HUMAN
YTGIIKILLRRPNEKK

SEQ ID NO: 12989 - protein, 16 aa, Homo sapiens
  ( 220 )...( 235 ): >CKR1_HUMAN
TGIIKILLRRPNEKKS

SEQ ID NO: 12990 - protein, 16 aa, Homo sapiens
  ( 221 )...( 236 ): >CKR1_HUMAN
GIIKILLRRPNEKKSK

SEQ ID NO: 12991 - protein, 16 aa, Homo sapiens
  ( 222 )...( 237 ): >CKR1_HUMAN
IIKILLRRPNEKKSKA

SEQ ID NO: 12992 - protein, 16 aa, Homo sapiens
  ( 223 )...( 238 ): >CKR1_HUMAN
IKILLRRPNEKKSKAV

SEQ ID NO: 12993 - protein, 16 aa, Homo sapiens
  ( 229 )...( 244 ): >CKR1_HUMAN
RPNEKKSKAVRLIFVI

SEQ ID NO: 12994 - protein, 16 aa, Homo sapiens
  ( 230 )...( 245 ): >CKR1_HUMAN
PNEKKSKAVRLIFVIM

SEQ ID NO: 12995 - protein, 16 aa, Homo sapiens
  ( 231 )...( 246 ): >CKR1_HUMAN
NEKKSKAVRLIFVIMI

SEQ ID NO: 12996 - protein, 16 aa, Homo sapiens
  ( 232 )...( 247 ): >CKR1_HUMAN
EKKSKAVRLIFVIMII

SEQ ID NO: 12997 - protein, 16 aa, Homo sapiens
  ( 59 )...( 74 ): >CKR2_HUMAN
GNMLVVLILINCKKLK

SEQ ID NO: 12998 - protein, 16 aa, Homo sapiens
  ( 138 )...( 153 ): >CKR2_HUMAN
RYLAIVHAVFALKART

SEQ ID NO: 12999 - protein, 16 aa, Homo sapiens
  ( 218 )...( 233 ): >CKR2_HUMAN
MVICYSGILKTLLRCR

SEQ ID NO: 13000 - protein, 16 aa, Homo sapiens
  ( 219 )...( 234 ): >CKR2_HUMAN
VICYSGILKTLLRCRN

SEQ ID NO: 13001 - protein, 16 aa, Homo sapiens
  ( 221 )...( 236 ): >CKR2_HUMAN
CYSGILKTLLRCRNEK

SEQ ID NO: 13002 - protein, 16 aa, Homo sapiens
  ( 222 )...( 237 ): >CKR2_HUMAN
YSGILKTLLRCRNEKK

SEQ ID NO: 13003 - protein, 16 aa, Homo sapiens
  ( 223 )...( 238 ): >CKR2_HUMAN
SGILKTLLRCRNEKKR

SEQ ID NO: 13004 - protein, 16 aa, Homo sapiens
  ( 235 )...( 250 ): >CKR2_HUMAN
EKKRHRAVRVIFTIMI

SEQ ID NO: 13005 - protein, 16 aa, Homo sapiens
  ( 236 )...( 251 ): >CKR2_HUMAN
KKRHRAVRVIFTIMIV

SEQ ID NO: 13006 - protein, 16 aa, Homo sapiens
  ( 237 )...( 252 ): >CKR2_HUMAN
KRHRAVRVIFTIMIVY

SEQ ID NO: 13007 - protein, 16 aa, Homo sapiens
  ( 341 )...( 356 ): >CKR2_HUMAN
KNVKVTTQGLLDGRGK

SEQ ID NO: 13008 - protein, 16 aa, Homo sapiens
  ( 51 )...( 66 ): >CKR3_HUMAN
GNVVVVMILIKYRRLR

SEQ ID NO: 13009 - protein, 16 aa, Homo sapiens
  ( 55 )...( 70 ): >CKR3_HUMAN
VVMILIKYRRLRIMTN

SEQ ID NO: 13010 - protein, 16 aa, Homo sapiens
  ( 63 )...( 78 ): >CKR3_HUMAN
RRLRIMTNIYLLNLAI

SEQ ID NO: 13011 - protein, 16 aa, Homo sapiens
  ( 131 )...( 146 ): >CKR3_HUMAN
RYLAIVHAVFALRART

SEQ ID NO: 13012 - protein, 16 aa, Homo sapiens
  ( 219 )...( 234 ): >CKR3_HUMAN
YTGIIKTLLRCPSKKK

SEQ ID NO: 13013 - protein, 16 aa, Homo sapiens
  ( 220 )...( 235 ): >CKR3_HUMAN
TGIIKTLLRCPSKKKY

SEQ ID NO: 13014 - protein, 16 aa, Homo sapiens
  ( 221 )...( 236 ): >CKR3_HUMAN
GIIKTLLRCPSKKKYK

SEQ ID NO: 13015 - protein, 16 aa, Homo sapiens
  ( 222 )...( 237 ): >CKR3_HUMAN
IIKTLLRCPSKKKYKA

SEQ ID NO: 13016 - protein, 16 aa, Homo sapiens
  ( 223 )...( 238 ): >CKR3_HUMAN
IKTLLRCPSKKKYKAI

SEQ ID NO: 13017 - protein, 16 aa, Homo sapiens
  ( 225 )...( 240 ): >CKR3_HUMAN
TLLRCPSKKKYKAIRL

SEQ ID NO: 13018 - protein, 16 aa, Homo sapiens
  ( 226 )...( 241 ): >CKR3_HUMAN
LLRCPSKKKYKAIRLI

SEQ ID NO: 13019 - protein, 16 aa, Homo sapiens
  ( 229 )...( 244 ): >CKR3_HUMAN
CPSKKKYKAIRLIFVI

SEQ ID NO: 13020 - protein, 16 aa, Homo sapiens
  ( 230 )...( 245 ): >CKR3_HUMAN
PSKKKYKAIRLIFVIM

SEQ ID NO: 13021 - protein, 16 aa, Homo sapiens
  ( 231 )...( 246 ): >CKR3_HUMAN
SKKKYKAIRLIFVIMA

SEQ ID NO: 13022 - protein, 16 aa, Homo sapiens
  ( 56 )...( 71 ): >CKR4_HUMAN
GNSVVVLVLFKYKRLR

SEQ ID NO: 13023 - protein, 16 aa, Homo sapiens
  ( 57 )...( 72 ): >CKR4_HUMAN
NSVVVLVLFKYKRLRS

SEQ ID NO: 13024 - protein, 16 aa, Homo sapiens
  ( 58 )...( 73 ): >CKR4_HUMAN
SVVVLVLFKYKRLRSM

SEQ ID NO: 13025 - protein, 16 aa, Homo sapiens
  ( 60 )...( 75 ): >CKR4_HUMAN
VVLVLFKYKRLRSMTD

SEQ ID NO: 13026 - protein, 16 aa, Homo sapiens
  ( 61 )...( 76 ): >CKR4_HUMAN
VLVLFKYKRLRSMTDV

SEQ ID NO: 13027 - protein, 16 aa, Homo sapiens
  ( 135 )...( 150 ): >CKR4_HUMAN
RYLAIVHAVFSLRART

SEQ ID NO: 13028 - protein, 16 aa, Homo sapiens
  ( 232 )...( 247 ): >CKR4_HUMAN
CKNEKKNKAVKMIFAV

SEQ ID NO: 13029 - protein, 16 aa, Homo sapiens
  ( 233 )...( 248 ): >CKR4_HUMAN
KNEKKNKAVKMIFAVV

SEQ ID NO: 13030 - protein, 16 aa, Homo sapiens
  ( 234 )...( 249 ): >CKR4_HUMAN
NEKKNKAVKMIFAVVV

SEQ ID NO: 13031 - protein, 16 aa, Homo sapiens
  ( 235 )...( 250 ): >CKR4_HUMAN
EKKNKAVKMIFAVVVL

SEQ ID NO: 13032 - protein, 16 aa, Homo sapiens
  ( 236 )...( 251 ): >CKR4_HUMAN
KKNKAVKMIFAVVVLF

SEQ ID NO: 13033 - protein, 16 aa, Homo sapiens
  ( 307 )...( 322 ): >CKR4_HUMAN
LGEKFRKYILQLFKTC

SEQ ID NO: 13034 - protein, 16 aa, Homo sapiens
  ( 312 )...( 327 ): >CKR4_HUMAN
RKYILQLFKTCRGLFV

SEQ ID NO: 13035 - protein, 16 aa, Homo sapiens
  ( 19 )...( 34 ): >CKR5_HUMAN
PCQKINVKQIAARLLP

SEQ ID NO: 13036 - protein, 16 aa, Homo sapiens
  ( 20 )...( 35 ): >CKR5_HUMAN
CQKINVKQIAARLLPP

SEQ ID NO: 13037 - protein, 16 aa, Homo sapiens
  ( 21 )...( 36 ): >CKR5_HUMAN
QKINVKQIAARLLPPL

SEQ ID NO: 13038 - protein, 16 aa, Homo sapiens
  ( 22 )...( 37 ): >CKR5_HUMAN
KINVKQIAARLLPPLY

SEQ ID NO: 13039 - protein, 16 aa, Homo sapiens
  ( 47 )...( 62 ): >CKR5_HUMAN
GNMLVILILINCKRLK

SEQ ID NO: 13040 - protein, 16 aa, Homo sapiens
  ( 48 )...( 63 ): >CKR5_HUMAN
NMLVILILINCKRLKS

SEQ ID NO: 13041 - protein, 16 aa, Homo sapiens
  ( 126 )...( 141 ): >CKR5_HUMAN
RYLAVVHAVFALKART

SEQ ID NO: 13042 - protein, 16 aa, Homo sapiens
  ( 210 )...( 225 ): >CKR5_HUMAN
MVICYSGILKTLLRCR

SEQ ID NO: 13043 - protein, 16 aa, Homo sapiens
  ( 211 )...( 226 ): >CKR5_HUMAN
VICYSGILKTLLRCRN

SEQ ID NO: 13044 - protein, 16 aa, Homo sapiens
  ( 213 )...( 228 ): >CKR5_HUMAN
CYSGILKTLLRCRNEK

SEQ ID NO: 13045 - protein, 16 aa, Homo sapiens
  ( 214 )...( 229 ): >CKR5_HUMAN
YSGILKTLLRCRNEKK

SEQ ID NO: 13046 - protein, 16 aa, Homo sapiens
  ( 215 )...( 230 ): >CKR5_HUMAN
SGILKTLLRCRNEKKR

SEQ ID NO: 13047 - protein, 16 aa, Homo sapiens
  ( 227 )...( 242 ): >CKR5_HUMAN
EKKRHRAVRLIFTIMI

SEQ ID NO: 13048 - protein, 16 aa, Homo sapiens
  ( 228 )...( 243 ): >CKR5_HUMAN
KKRHRAVRLIFTIMIV

SEQ ID NO: 13049 - protein, 16 aa, Homo sapiens
  ( 63 )...( 78 ): >CKR6_HUMAN
GNILVVITFAFYKKAR

SEQ ID NO: 13050 - protein, 16 aa, Homo sapiens
  ( 64 )...( 79 ): >CKR6_HUMAN
NILVVITFAFYKKARS

SEQ ID NO: 13051 - protein, 16 aa, Homo sapiens
  ( 66 )...( 81 ): >CKR6_HUMAN
LVVITFAFYKKARSMT

SEQ ID NO: 13052 - protein, 16 aa, Homo sapiens
  ( 142 )...( 157 ): >CKR6_HUMAN
DRYIAIVQATKSFRLR

SEQ ID NO: 13053 - protein, 16 aa, Homo sapiens
  ( 143 )...( 158 ): >CKR6_HUMAN
RYIAIVQATKSFRLRS

SEQ ID NO: 13054 - protein, 16 aa, Homo sapiens
  ( 144 )...( 159 ): >CKR6_HUMAN
YIAIVQATKSFRLRSR

SEQ ID NO: 13055 - protein, 16 aa, Homo sapiens
  ( 145 )...( 160 ): >CKR6_HUMAN
IAIVQATKSFRLRSRT

SEQ ID NO: 13056 - protein, 16 aa, Homo sapiens
  ( 146 )...( 161 ): >CKR6_HUMAN
AIVQATKSFRLRSRTL

SEQ ID NO: 13057 - protein, 16 aa, Homo sapiens
  ( 147 )...( 162 ): >CKR6_HUMAN
IVQATKSFRLRSRTLP

SEQ ID NO: 13058 - protein, 16 aa, Homo sapiens
  ( 148 )...( 163 ): >CKR6_HUMAN
VQATKSFRLRSRTLPR

SEQ ID NO: 13059 - protein, 16 aa, Homo sapiens
  ( 153 )...( 168 ): >CKR6_HUMAN
SFRLRSRTLPRSKIIC

SEQ ID NO: 13060 - protein, 16 aa, Homo sapiens
  ( 154 )...( 169 ): >CKR6_HUMAN
FRLRSRTLPRSKIICL

SEQ ID NO: 13061 - protein, 16 aa, Homo sapiens
  ( 155 )...( 170 ): >CKR6_HUMAN
RLRSRTLPRSKIICLV

SEQ ID NO: 13062 - protein, 16 aa, Homo sapiens
  ( 156 )...( 171 ): >CKR6_HUMAN
LRSRTLPRSKIICLVV

SEQ ID NO: 13063 - protein, 16 aa, Homo sapiens
  ( 157 )...( 172 ): >CKR6_HUMAN
RSRTLPRSKIICLVVW

SEQ ID NO: 13064 - protein, 16 aa, Homo sapiens
  ( 158 )...( 173 ): >CKR6_HUMAN
SRTLPRSKIICLVVWG

SEQ ID NO: 13065 - protein, 16 aa, Homo sapiens
  ( 159 )...( 174 ): >CKR6_HUMAN
RTLPRSKIICLVVWGL

SEQ ID NO: 13066 - protein, 16 aa, Homo sapiens
  ( 234 )...( 249 ): >CKR6_HUMAN
YTFIVKTLVQAQNSKR

SEQ ID NO: 13067 - protein, 16 aa, Homo sapiens
  ( 236 )...( 251 ): >CKR6_HUMAN
FIVKTLVQAQNSKRHK

SEQ ID NO: 13068 - protein, 16 aa, Homo sapiens
  ( 237 )...( 252 ): >CKR6_HUMAN
IVKTLVQAQNSKRHKA

SEQ ID NO: 13069 - protein, 16 aa, Homo sapiens
  ( 238 )...( 253 ): >CKR6_HUMAN
VKTLVQAQNSKRHKAI

SEQ ID NO: 13070 - protein, 16 aa, Homo sapiens
  ( 239 )...( 254 ): >CKR6_HUMAN
KTLVQAQNSKRHKAIR

SEQ ID NO: 13071 - protein, 16 aa, Homo sapiens
  ( 240 )...( 255 ): >CKR6_HUMAN
TLVQAQNSKRHKAIRV

SEQ ID NO: 13072 - protein, 16 aa, Homo sapiens
  ( 241 )...( 256 ): >CKR6_HUMAN
LVQAQNSKRHKAIRVI

SEQ ID NO: 13073 - protein, 16 aa, Homo sapiens
  ( 242 )...( 257 ): >CKR6_HUMAN
VQAQNSKRHKAIRVII

SEQ ID NO: 13074 - protein, 16 aa, Homo sapiens
  ( 243 )...( 258 ): >CKR6_HUMAN
QAQNSKRHKAIRVIIA

SEQ ID NO: 13075 - protein, 16 aa, Homo sapiens
  ( 244 )...( 259 ): >CKR6_HUMAN
AQNSKRHKAIRVIIAV

SEQ ID NO: 13076 - protein, 16 aa, Homo sapiens
  ( 245 )...( 260 ): >CKR6_HUMAN
QNSKRHKAIRVIIAVV

SEQ ID NO: 13077 - protein, 16 aa, Homo sapiens
  ( 246 )...( 261 ): >CKR6_HUMAN
NSKRHKAIRVIIAVVL

SEQ ID NO: 13078 - protein, 16 aa, Homo sapiens
  ( 247 )...( 262 ): >CKR6_HUMAN
SKRHKAIRVIIAVVLV

SEQ ID NO: 13079 - protein, 16 aa, Homo sapiens
  ( 248 )...( 263 ): >CKR6_HUMAN
KRHKAIRVIIAVVLVF

SEQ ID NO: 13080 - protein, 16 aa, Homo sapiens
  ( 75 )...( 90 ): >CKR7_HUMAN
GNGLVVLTYIYFKRLK

SEQ ID NO: 13081 - protein, 16 aa, Homo sapiens
  ( 76 )...( 91 ): >CKR7_HUMAN
NGLVVLTYIYFKRLKT

SEQ ID NO: 13082 - protein, 16 aa, Homo sapiens
  ( 154 )...( 169 ): >CKR7_HUMAN
RYVAIVQAVSAHRHRA

SEQ ID NO: 13083 - protein, 16 aa, Homo sapiens
  ( 155 )...( 170 ): >CKR7_HUMAN
YVAIVQAVSAHRHRAR

SEQ ID NO: 13084 - protein, 16 aa, Homo sapiens
  ( 156 )...( 171 ): >CKR7_HUMAN
VAIVQAVSAHRHRARV

SEQ ID NO: 13085 - protein, 16 aa, Homo sapiens
  ( 157 )...( 172 ): >CKR7_HUMAN
AIVQAVSAHRHRARVL

SEQ ID NO: 13086 - protein, 16 aa, Homo sapiens
  ( 158 )...( 173 ): >CKR7_HUMAN
IVQAVSAHRHRARVLL

SEQ ID NO: 13087 - protein, 16 aa, Homo sapiens
  ( 159 )...( 174 ): >CKR7_HUMAN
VQAVSAHRHRARVLLI

SEQ ID NO: 13088 - protein, 16 aa, Homo sapiens
  ( 160 )...( 175 ): >CKR7_HUMAN
QAVSAHRHRARVLLIS

SEQ ID NO: 13089 - protein, 16 aa, Homo sapiens
  ( 161 )...( 176 ): >CKR7_HUMAN
AVSAHRHRARVLLISK

SEQ ID NO: 13090 - protein, 16 aa, Homo sapiens
  ( 162 )...( 177 ): >CKR7_HUMAN
VSAHRHRARVLLISKL

SEQ ID NO: 13091 - protein, 16 aa, Homo sapiens
  ( 163 )...( 178 ): >CKR7_HUMAN
SAHRHRARVLLISKLS

SEQ ID NO: 13092 - protein, 16 aa, Homo sapiens
  ( 164 )...( 179 ): >CKR7_HUMAN
AHRHRARVLLISKLSC

SEQ ID NO: 13093 - protein, 16 aa, Homo sapiens
  ( 165 )...( 180 ): >CKR7_HUMAN
HRHRARVLLISKLSCV

SEQ ID NO: 13094 - protein, 16 aa, Homo sapiens
  ( 166 )...( 181 ): >CKR7_HUMAN
RHRARVLLISKLSCVG

SEQ ID NO: 13095 - protein, 16 aa, Homo sapiens
  ( 167 )...( 182 ): >CKR7_HUMAN
HRARVLLISKLSCVGI

SEQ ID NO: 13096 - protein, 16 aa, Homo sapiens
  ( 168 )...( 183 ): >CKR7_HUMAN
RARVLLISKLSCVGIW

SEQ ID NO: 13097 - protein, 16 aa, Homo sapiens
  ( 249 )...( 264 ): >CKR7_HUMAN
TLLQARNFERNKAIKV

SEQ ID NO: 13098 - protein, 16 aa, Homo sapiens
  ( 250 )...( 265 ): >CKR7_HUMAN
LLQARNFERNKAIKVI

SEQ ID NO: 13099 - protein, 16 aa, Homo sapiens
  ( 251 )...( 266 ): >CKR7_HUMAN
LQARNFERNKAIKVII

SEQ ID NO: 13100 - protein, 16 aa, Homo sapiens
  ( 252 )...( 267 ): >CKR7_HUMAN
QARNFERNKAIKVIIA

SEQ ID NO: 13101 - protein, 16 aa, Homo sapiens
  ( 253 )...( 268 ): >CKR7_HUMAN
ARNFERNKAIKVIIAV

SEQ ID NO: 13102 - protein, 16 aa, Homo sapiens
  ( 254 )...( 269 ): >CKR7_HUMAN
RNFERNKAIKVIIAVV

SEQ ID NO: 13103 - protein, 16 aa, Homo sapiens
  ( 53 )...( 68 ): >CKR8_HUMAN
NSLVILVLVVCKKLRS

SEQ ID NO: 13104 - protein, 16 aa, Homo sapiens
  ( 131 )...( 146 ): >CKR8_HUMAN
RYLAVVHAVYALKVRT

SEQ ID NO: 13105 - protein, 16 aa, Homo sapiens
  ( 133 )...( 148 ): >CKR8_HUMAN
LAVVHAVYALKVRTIR

SEQ ID NO: 13106 - protein, 16 aa, Homo sapiens
  ( 134 )...( 149 ): >CKR8_HUMAN
AVVHAVYALKVRTIRM

SEQ ID NO: 13107 - protein, 16 aa, Homo sapiens
  ( 135 )...( 150 ): >CKR8_HUMAN
VVHAVYALKVRTIRMG

SEQ ID NO: 13108 - protein, 16 aa, Homo sapiens
  ( 136 )...( 151 ): >CKR8_HUMAN
VHAVYALKVRTIRMGT

SEQ ID NO: 13109 - protein, 16 aa, Homo sapiens
  ( 137 )...( 152 ): >CKR8_HUMAN
HAVYALKVRTIRMGTT

SEQ ID NO: 13110 - protein, 16 aa, Homo sapiens
  ( 138 )...( 153 ): >CKR8_HUMAN
AVYALKVRTIRMGTTL

SEQ ID NO: 13111 - protein, 16 aa, Homo sapiens
  ( 139 )...( 154 ): >CKR8_HUMAN
VYALKVRTIRMGTTLC

SEQ ID NO: 13112 - protein, 16 aa, Homo sapiens
  ( 140 )...( 155 ): >CKR8_HUMAN
YALKVRTIRMGTTLCL

SEQ ID NO: 13113 - protein, 16 aa, Homo sapiens
  ( 143 )...( 158 ): >CKR8_HUMAN
KVRTIRMGTTLCLAVW

SEQ ID NO: 13114 - protein, 16 aa, Homo sapiens
  ( 191 )...( 206 ): >CKR8_HUMAN
TLKWKIFTNFKMNILG

SEQ ID NO: 13115 - protein, 16 aa, Homo sapiens
  ( 227 )...( 242 ): >CKR8_HUMAN
RCQNHNKTKAIRLVLI

SEQ ID NO: 13116 - protein, 16 aa, Homo sapiens
  ( 228 )...( 243 ): >CKR8_HUMAN
CQNHNKTKAIRLVLIV

SEQ ID NO: 13117 - protein, 16 aa, Homo sapiens
  ( 229 )...( 244 ): >CKR8_HUMAN
QNHNKTKAIRLVLIVV

SEQ ID NO: 13118 - protein, 16 aa, Homo sapiens
  ( 230 )...( 245 ): >CKR8_HUMAN
NHNKTKAIRLVLIVVI

SEQ ID NO: 13119 - protein, 16 aa, Homo sapiens
  ( 231 )...( 246 ): >CKR8_HUMAN
HNKTKAIRLVLIVVIA

SEQ ID NO: 13120 - protein, 16 aa, Homo sapiens
  ( 134 )...( 149 ): >CKR9_HUMAN
IAIAQAMRAHTWREKR

SEQ ID NO: 13121 - protein, 16 aa, Homo sapiens
  ( 227 )...( 242 ): >CKR9_HUMAN
HTLIQAKKSSKHKALK

SEQ ID NO: 13122 - protein, 16 aa, Homo sapiens
  ( 228 )...( 243 ): >CKR9_HUMAN
TLIQAKKSSKHKALKV

SEQ ID NO: 13123 - protein, 16 aa, Homo sapiens
  ( 229 )...( 244 ): >CKR9_HUMAN
LIQAKKSSKHKALKVT

SEQ ID NO: 13124 - protein, 16 aa, Homo sapiens
  ( 230 )...( 245 ): >CKR9_HUMAN
IQAKKSSKHKALKVTI

SEQ ID NO: 13125 - protein, 16 aa, Homo sapiens
  ( 231 )...( 246 ): >CKR9_HUMAN
QAKKSSKHKALKVTIT

SEQ ID NO: 13126 - protein, 16 aa, Homo sapiens
  ( 232 )...( 247 ): >CKR9_HUMAN
AKKSSKHKALKVTITV

SEQ ID NO: 13127 - protein, 16 aa, Homo sapiens
  ( 233 )...( 248 ): >CKR9_HUMAN
KKSSKHKALKVTITVL

SEQ ID NO: 13128 - protein, 16 aa, Homo sapiens
  ( 306 )...( 321 ): >CKR9_HUMAN
VFVGERFRRDLVKTLK

SEQ ID NO: 13129 - protein, 16 aa, Homo sapiens
  ( 308 )...( 323 ): >CKR9_HUMAN
VGERFRRDLVKTLKNL

SEQ ID NO: 13130 - protein, 16 aa, Homo sapiens
  ( 309 )...( 324 ): >CKR9_HUMAN
GERFRRDLVKTLKNLG

SEQ ID NO: 13131 - protein, 16 aa, Homo sapiens
  ( 310 )...( 325 ): >CKR9_HUMAN
ERFRRDLVKTLKNLGC

SEQ ID NO: 13132 - protein, 16 aa, Homo sapiens
  ( 311 )...( 326 ): >CKR9_HUMAN
RFRRDLVKTLKNLGCI

SEQ ID NO: 13133 - protein, 16 aa, Homo sapiens
  ( 312 )...( 327 ): >CKR9_HUMAN
FRRDLVKTLKNLGCIS

SEQ ID NO: 13134 - protein, 16 aa, Homo sapiens
  ( 313 )...( 328 ): >CKR9_HUMAN
RRDLVKTLKNLGCISQ

SEQ ID NO: 13135 - protein, 16 aa, Homo sapiens
  ( 59 )...( 74 ): >CKRA_HUMAN
NGLVLATHLAARRAAR

SEQ ID NO: 13136 - protein, 16 aa, Homo sapiens
  ( 60 )...( 75 ): >CKRA_HUMAN
GLVLATHLAARRAARS

SEQ ID NO: 13137 - protein, 16 aa, Homo sapiens
  ( 61 )...( 76 ): >CKRA_HUMAN
LVLATHLAARRAARSP

SEQ ID NO: 13138 - protein, 16 aa, Homo sapiens
  ( 62 )...( 77 ): >CKRA_HUMAN
VLATHLAARRAARSPT

SEQ ID NO: 13139 - protein, 16 aa, Homo sapiens
  ( 69 )...( 84 ): >CKRA_HUMAN
ARRAARSPTSAHLLQL

SEQ ID NO: 13140 - protein, 16 aa, Homo sapiens
  ( 70 )...( 85 ): >CKRA_HUMAN
RRAARSPTSAHLLQLA

SEQ ID NO: 13141 - protein, 16 aa, Homo sapiens
  ( 189 )...( 204 ): >CKRA_HUMAN
RRCRLIFPEGLTQTVK

SEQ ID NO: 13142 - protein, 16 aa, Homo sapiens
  ( 228 )...( 243 ): >CKRA_HUMAN
ALLGRTLLAARGPERR

SEQ ID NO: 13143 - protein, 16 aa, Homo sapiens
  ( 229 )...( 244 ): >CKRA_HUMAN
LLGRTLLAARGPERRR

SEQ ID NO: 13144 - protein, 16 aa, Homo sapiens
  ( 230 )...( 245 ): >CKRA_HUMAN
LGRTLLAARGPERRRA

SEQ ID NO: 13145 - protein, 16 aa, Homo sapiens
  ( 231 )...( 246 ): >CKRA_HUMAN
GRTLLAARGPERRRAL

SEQ ID NO: 13146 - protein, 16 aa, Homo sapiens
  ( 233 )...( 248 ): >CKRA_HUMAN
TLLAARGPERRRALRV

SEQ ID NO: 13147 - protein, 16 aa, Homo sapiens
  ( 234 )...( 249 ): >CKRA_HUMAN
LLAARGPERRRALRVV

SEQ ID NO: 13148 - protein, 16 aa, Homo sapiens
  ( 235 )...( 250 ): >CKRA_HUMAN
LAARGPERRRALRVVV

SEQ ID NO: 13149 - protein, 16 aa, Homo sapiens
  ( 236 )...( 251 ): >CKRA_HUMAN
AARGPERRRALRVVVA

SEQ ID NO: 13150 - protein, 16 aa, Homo sapiens
  ( 237 )...( 252 ): >CKRA_HUMAN
ARGPERRRALRVVVAL

SEQ ID NO: 13151 - protein, 16 aa, Homo sapiens
  ( 238 )...( 253 ): >CKRA_HUMAN
RGPERRRALRVVVALV

SEQ ID NO: 13152 - protein, 16 aa, Homo sapiens
  ( 239 )...( 254 ): >CKRA_HUMAN
GPERRRALRVVVALVA

SEQ ID NO: 13153 - protein, 16 aa, Homo sapiens
  ( 240 )...( 255 ): >CKRA_HUMAN
PERRRALRVVVALVAA

SEQ ID NO: 13154 - protein, 16 aa, Homo sapiens
  ( 241 )...( 256 ): >CKRA_HUMAN
ERRRALRVVVALVAAF

SEQ ID NO: 13155 - protein, 16 aa, Homo sapiens
  ( 242 )...( 257 ): >CKRA_HUMAN
RRRALRVVVALVAAFV

SEQ ID NO: 13156 - protein, 16 aa, Homo sapiens
  ( 278 )...( 293 ): >CKRA_HUMAN
RERSCPASKRKDVALL

SEQ ID NO: 13157 - protein, 16 aa, Homo sapiens
  ( 313 )...( 328 ): >CKRA_HUMAN
LGLRFRQDLRRLLRGG

SEQ ID NO: 13158 - protein, 16 aa, Homo sapiens
  ( 314 )...( 329 ): >CKRA_HUMAN
GLRFRQDLRRLLRGGS

SEQ ID NO: 13159 - protein, 16 aa, Homo sapiens
  ( 317 )...( 332 ): >CKRA_HUMAN
FRQDLRRLLRGGSSPS

SEQ ID NO: 13160 - protein, 16 aa, Homo sapiens
  ( 318 )...( 333 ): >CKRA_HUMAN
RQDLRRLLRGGSSPSG

SEQ ID NO: 13161 - protein, 16 aa, Homo sapiens
  ( 58 )...( 73 ): >CKRB_HUMAN
GNSMVVAIYAYYKKQR

SEQ ID NO: 13162 - protein, 16 aa, Homo sapiens
  ( 59 )...( 74 ): >CKRB_HUMAN
NSMVVAIYAYYKKQRT

SEQ ID NO: 13163 - protein, 16 aa, Homo sapiens
  ( 60 )...( 75 ): >CKRB_HUMAN
SMVVAIYAYYKKQRTK

SEQ ID NO: 13164 - protein, 16 aa, Homo sapiens
  ( 61 )...( 76 ): >CKRB_HUMAN
MVVAIYAYYKKQRTKT

SEQ ID NO: 13165 - protein, 16 aa, Homo sapiens
  ( 62 )...( 77 ): >CKRB_HUMAN
VVAIYAYYKKQRTKTD

SEQ ID NO: 13166 - protein, 16 aa, Homo sapiens
  ( 63 )...( 78 ): >CKRB_HUMAN
VAIYAYYKKQRTKTDV

SEQ ID NO: 13167 - protein, 16 aa, Homo sapiens
  ( 69 )...( 84 ): >CKRB_HUMAN
YKKQRTKTDVYILNLA

SEQ ID NO: 13168 - protein, 16 aa, Homo sapiens
  ( 70 )...( 85 ): >CKRB_HUMAN
KKQRTKTDVYILNLAV

SEQ ID NO: 13169 - protein, 16 aa, Homo sapiens
  ( 220 )...( 235 ): >CKRB_HUMAN
YFITARTLMKMPNIKI

SEQ ID NO: 13170 - protein, 16 aa, Homo sapiens
  ( 221 )...( 236 ): >CKRB_HUMAN
FITARTLMKMPNIKIS

SEQ ID NO: 13171 - protein, 16 aa, Homo sapiens
  ( 222 )...( 237 ): >CKRB_HUMAN
ITARTLMKMPNIKISR

SEQ ID NO: 13172 - protein, 16 aa, Homo sapiens
  ( 223 )...( 238 ): >CKRB_HUMAN
TARTLMKMPNIKISRP

SEQ ID NO: 13173 - protein, 16 aa, Homo sapiens
  ( 224 )...( 239 ): >CKRB_HUMAN
ARTLMKMPNIKISRPL

SEQ ID NO: 13174 - protein, 16 aa, Homo sapiens
  ( 226 )...( 241 ): >CKRB_HUMAN
TLMKMPNIKISRPLKV

SEQ ID NO: 13175 - protein, 16 aa, Homo sapiens
  ( 227 )...( 242 ): >CKRB_HUMAN
LMKMPNIKISRPLKVL

SEQ ID NO: 13176 - protein, 16 aa, Homo sapiens
  ( 228 )...( 243 ): >CKRB_HUMAN
MKMPNIKISRPLKVLL

SEQ ID NO: 13177 - protein, 16 aa, Homo sapiens
  ( 229 )...( 244 ): >CKRB_HUMAN
KMPNIKISRPLKVLLT

SEQ ID NO: 13178 - protein, 16 aa, Homo sapiens
  ( 126 )...( 141 ): >CLT1_HUMAN
VFPVQNINLVTQKKAR

SEQ ID NO: 13179 - protein, 16 aa, Homo sapiens
  ( 127 )...( 142 ): >CLT1_HUMAN
FPVQNINLVTQKKARF

SEQ ID NO: 13180 - protein, 16 aa, Homo sapiens
  ( 128 )...( 143 ): >CLT1_HUMAN
PVQNINLVTQKKARFV

SEQ ID NO: 13181 - protein, 16 aa, Homo sapiens
  ( 129 )...( 144 ): >CLT1_HUMAN
VQNINLVTQKKARFVC

SEQ ID NO: 13182 - protein, 16 aa, Homo sapiens
  ( 130 )...( 145 ): >CLT1_HUMAN
QNINLVTQKKARFVCV

SEQ ID NO: 13183 - protein, 16 aa, Homo sapiens
  ( 131 )...( 146 ): >CLT1_HUMAN
NINLVTQKKARFVCVG

SEQ ID NO: 13184 - protein, 16 aa, Homo sapiens
  ( 132 )...( 147 ): >CLT1_HUMAN
INLVTQKKARFVCVGI

SEQ ID NO: 13185 - protein, 16 aa, Homo sapiens
  ( 133 )...( 148 ): >CLT1_HUMAN
NLVTQKKARFVCVGIW

SEQ ID NO: 13186 - protein, 16 aa, Homo sapiens
  ( 134 )...( 149 ): >CLT1_HUMAN
LVTQKKARFVCVGIWI

SEQ ID NO: 13187 - protein, 16 aa, Homo sapiens
  ( 135 )...( 150 ): >CLT1_HUMAN
VTQKKARFVCVGIWIF

SEQ ID NO: 13188 - protein, 16 aa, Homo sapiens
  ( 136 )...( 151 ): >CLT1_HUMAN
TQKKARFVCVGIWIFV

SEQ ID NO: 13189 - protein, 16 aa, Homo sapiens
  ( 208 )...( 223 ): >CLT1_HUMAN
CYTMIILTLLKKSMKK

SEQ ID NO: 13190 - protein, 16 aa, Homo sapiens
  ( 209 )...( 224 ): >CLT1_HUMAN
YTMIILTLLKKSMKKN

SEQ ID NO: 13191 - protein, 16 aa, Homo sapiens
  ( 210 )...( 225 ): >CLT1_HUMAN
TMIILTLLKKSMKKNL

SEQ ID NO: 13192 - protein, 16 aa, Homo sapiens
  ( 211 )...( 226 ): >CLT1_HUMAN
MIILTLLKKSMKKNLS

SEQ ID NO: 13193 - protein, 16 aa, Homo sapiens
  ( 212 )...( 227 ): >CLT1_HUMAN
IILTLLKKSMKKNLSS

SEQ ID NO: 13194 - protein, 16 aa, Homo sapiens
  ( 214 )...( 229 ): >CLT1_HUMAN
LTLLKKSMKKNLSSHK

SEQ ID NO: 13195 - protein, 16 aa, Homo sapiens
  ( 215 )...( 230 ): >CLT1_HUMAN
TLLKKSMKKNLSSHKK

SEQ ID NO: 13196 - protein, 16 aa, Homo sapiens
  ( 216 )...( 231 ): >CLT1_HUMAN
LLKKSMKKNLSSHKKA

SEQ ID NO: 13197 - protein, 16 aa, Homo sapiens
  ( 217 )...( 232 ): >CLT1_HUMAN
LKKSMKKNLSSHKKAI

SEQ ID NO: 13198 - protein, 16 aa, Homo sapiens
  ( 218 )...( 233 ): >CLT1_HUMAN
KKSMKKNLSSHKKAIG

SEQ ID NO: 13199 - protein, 16 aa, Homo sapiens
  ( 219 )...( 234 ): >CLT1_HUMAN
KSMKKNLSSHKKAIGM

SEQ ID NO: 13200 - protein, 16 aa, Homo sapiens
  ( 221 )...( 236 ): >CLT1_HUMAN
MKKNLSSHKKAIGMIM

SEQ ID NO: 13201 - protein, 16 aa, Homo sapiens
  ( 222 )...( 237 ): >CLT1_HUMAN
KKNLSSHKKAIGMIMV

SEQ ID NO: 13202 - protein, 16 aa, Homo sapiens
  ( 303 )...( 318 ): >CLT1_HUMAN
RKRLSTFRKHSLSSVT

SEQ ID NO: 13203 - protein, 16 aa, Homo sapiens
  ( 304 )...( 319 ): >CLT1_HUMAN
KRLSTFRKHSLSSVTY

SEQ ID NO: 13204 - protein, 16 aa, Homo sapiens
  ( 308 )...( 323 ): >CLT1_HUMAN
TFRKHSLSSVTYVPRK

SEQ ID NO: 13205 - protein, 16 aa, Homo sapiens
  ( 310 )...( 325 ): >CLT1_HUMAN
RKHSLSSVTYVPRKKA

SEQ ID NO: 13206 - protein, 16 aa, Homo sapiens
  ( 267 )...( 282 ): >CLT2_HUMAN
RTVHLTTWKVGLCKDR

SEQ ID NO: 13207 - protein, 16 aa, Homo sapiens
  ( 273 )...( 288 ): >CLT2_HUMAN
TWKVGLCKDRLHKALV

SEQ ID NO: 13208 - protein, 16 aa, Homo sapiens
  ( 274 )...( 289 ): >CLT2_HUMAN
WKVGLCKDRLHKALVI

SEQ ID NO: 13209 - protein, 16 aa, Homo sapiens
  ( 308 )...( 323 ): >CLT2_HUMAN
AGENFKDRLKSALRKG

SEQ ID NO: 13210 - protein, 16 aa, Homo sapiens
  ( 313 )...( 328 ): >CLT2_HUMAN
KDRLKSALRKGHPQKA

SEQ ID NO: 13211 - protein, 16 aa, Homo sapiens
  ( 314 )...( 329 ): >CLT2_HUMAN
DRLKSALRKGHPQKAK

SEQ ID NO: 13212 - protein, 16 aa, Homo sapiens
  ( 315 )...( 330 ): >CLT2_HUMAN
RLKSALRKGHPQKAKT

SEQ ID NO: 13213 - protein, 16 aa, Homo sapiens
  ( 316 )...( 331 ): >CLT2_HUMAN
LKSALRKGHPQKAKTK

SEQ ID NO: 13214 - protein, 16 aa, Homo sapiens
  ( 317 )...( 332 ): >CLT2_HUMAN
KSALRKGHPQKAKTKC

SEQ ID NO: 13215 - protein, 16 aa, Homo sapiens
  ( 318 )...( 333 ): >CLT2_HUMAN
SALRKGHPQKAKTKCV

SEQ ID NO: 13216 - protein, 16 aa, Homo sapiens
  ( 319 )...( 334 ): >CLT2_HUMAN
ALRKGHPQKAKTKCVF

SEQ ID NO: 13217 - protein, 16 aa, Homo sapiens
  ( 320 )...( 335 ): >CLT2_HUMAN
LRKGHPQKAKTKCVFP

SEQ ID NO: 13218 - protein, 16 aa, Homo sapiens
  ( 321 )...( 336 ): >CLT2_HUMAN
RKGHPQKAKTKCVFPV

SEQ ID NO: 13219 - protein, 16 aa, Homo sapiens
  ( 326 )...( 341 ): >CLT2_HUMAN
QKAKTKCVFPVSVWLR

SEQ ID NO: 13220 - protein, 16 aa, Homo sapiens
  ( 327 )...( 342 ): >CLT2_HUMAN
KAKTKCVFPVSVWLRK

SEQ ID NO: 13221 - protein, 16 aa, Homo sapiens
  ( 328 )...( 343 ): >CLT2_HUMAN
AKTKCVFPVSVWLRKE

SEQ ID NO: 13222 - protein, 16 aa, Homo sapiens
  ( 329 )...( 344 ): >CLT2_HUMAN
KTKCVFPVSVWLRKET

SEQ ID NO: 13223 - protein, 16 aa, Homo sapiens
  ( 330 )...( 345 ): >CLT2_HUMAN
TKCVFPVSVWLRKETR

SEQ ID NO: 13224 - protein, 16 aa, Homo sapiens
  ( 331 )...( 346 ): >CLT2_HUMAN
KCVFPVSVWLRKETRV

SEQ ID NO: 13225 - protein, 16 aa, Homo sapiens
  ( 56 )...( 71 ): >CML1_HUMAN
LGNGLVIIIATFKMKK

SEQ ID NO: 13226 - protein, 16 aa, Homo sapiens
  ( 68 )...( 83 ): >CML1_HUMAN
KMKKTVNMVWFLNLAV

SEQ ID NO: 13227 - protein, 16 aa, Homo sapiens
  ( 236 )...( 251 ): >CML1_HUMAN
ITACYLTIVCKLQRNR

SEQ ID NO: 13228 - protein, 16 aa, Homo sapiens
  ( 237 )...( 252 ): >CML1_HUMAN
TACYLTIVCKLQRNRL

SEQ ID NO: 13229 - protein, 16 aa, Homo sapiens
  ( 238 )...( 253 ): >CML1_HUMAN
ACYLTIVCKLQRNRLA

SEQ ID NO: 13230 - protein, 16 aa, Homo sapiens
  ( 239 )...( 254 ): >CML1_HUMAN
CYLTIVCKLQRNRLAK

SEQ ID NO: 13231 - protein, 16 aa, Homo sapiens
  ( 240 )...( 255 ): >CML1_HUMAN
YLTIVCKLQRNRLAKT

SEQ ID NO: 13232 - protein, 16 aa, Homo sapiens
  ( 241 )...( 256 ): >CML1_HUMAN
LTIVCKLQRNRLAKTK

SEQ ID NO: 13233 - protein, 16 aa, Homo sapiens
  ( 242 )...( 257 ): >CML1_HUMAN
TIVCKLQRNRLAKTKK

SEQ ID NO: 13234 - protein, 16 aa, Homo sapiens
  ( 243 )...( 258 ): >CML1_HUMAN
IVCKLQRNRLAKTKKP

SEQ ID NO: 13235 - protein, 16 aa, Homo sapiens
  ( 249 )...( 264 ): >CML1_HUMAN
RNRLAKTKKPFKIIVT

SEQ ID NO: 13236 - protein, 16 aa, Homo sapiens
  ( 250 )...( 265 ): >CML1_HUMAN
NRLAKTKKPFKIIVTI

SEQ ID NO: 13237 - protein, 16 aa, Homo sapiens
  ( 251 )...( 266 ): >CML1_HUMAN
RLAKTKKPFKIIVTII

SEQ ID NO: 13238 - protein, 16 aa, Homo sapiens
  ( 253 )...( 268 ): >CML1_HUMAN
AKTKKPFKIIVTIIIT

SEQ ID NO: 13239 - protein, 16 aa, Homo sapiens
  ( 319 )...( 334 ): >CML1_HUMAN
MGQDFKKFKVALFSRL

SEQ ID NO: 13240 - protein, 16 aa, Homo sapiens
  ( 320 )...( 335 ): >CML1_HUMAN
GQDFKKFKVALFSRLV

SEQ ID NO: 13241 - protein, 16 aa, Homo sapiens
  ( 323 )...( 338 ): >CML1_HUMAN
FKKFKVALFSRLVNAL

SEQ ID NO: 13242 - protein, 16 aa, Homo sapiens
  ( 324 )...( 339 ): >CML1_HUMAN
KKFKVALFSRLVNALS

SEQ ID NO: 13243 - protein, 16 aa, Homo sapiens
  ( 155 )...( 170 ): >CML2_HUMAN
RYIALARAMRCSLFRT

SEQ ID NO: 13244 - protein, 16 aa, Homo sapiens
  ( 156 )...( 171 ): >CML2_HUMAN
YIALARAMRCSLFRTK

SEQ ID NO: 13245 - protein, 16 aa, Homo sapiens
  ( 157 )...( 172 ): >CML2_HUMAN
IALARAMRCSLFRTKH

SEQ ID NO: 13246 - protein, 16 aa, Homo sapiens
  ( 231 )...( 246 ): >CML2_HUMAN
GLCYSLIVRVLVRAHR

SEQ ID NO: 13247 - protein, 16 aa, Homo sapiens
  ( 232 )...( 247 ): >CML2_HUMAN
LCYSLIVRVLVRAHRH

SEQ ID NO: 13248 - protein, 16 aa, Homo sapiens
  ( 233 )...( 248 ): >CML2_HUMAN
CYSLIVRVLVRAHRHR

SEQ ID NO: 13249 - protein, 16 aa, Homo sapiens
  ( 234 )...( 249 ): >CML2_HUMAN
YSLIVRVLVRAHRHRG

SEQ ID NO: 13250 - protein, 16 aa, Homo sapiens
  ( 235 )...( 250 ): >CML2_HUMAN
SLIVRVLVRAHRHRGL

SEQ ID NO: 13251 - protein, 16 aa, Homo sapiens
  ( 236 )...( 251 ): >CML2_HUMAN
LIVRVLVRAHRHRGLR

SEQ ID NO: 13252 - protein, 16 aa, Homo sapiens
  ( 237 )...( 252 ): >CML2_HUMAN
IVRVLVRAHRHRGLRP

SEQ ID NO: 13253 - protein, 16 aa, Homo sapiens
  ( 249 )...( 264 ): >CML2_HUMAN
GLRPRRQKALRMILAV

SEQ ID NO: 13254 - protein, 16 aa, Homo sapiens
  ( 250 )...( 265 ): >CML2_HUMAN
LRPRRQKALRMILAVV

SEQ ID NO: 13255 - protein, 16 aa, Homo sapiens
  ( 251 )...( 266 ): >CML2_HUMAN
RPRRQKALRMILAVVL

SEQ ID NO: 13256 - protein, 16 aa, Homo sapiens
  ( 252 )...( 267 ): >CML2_HUMAN
PRRQKALRMILAVVLV

SEQ ID NO: 13257 - protein, 16 aa, Homo sapiens
  ( 253 )...( 268 ): >CML2_HUMAN
RRQKALRMILAVVLVF

SEQ ID NO: 13258 - protein, 16 aa, Homo sapiens
  ( 166 )...( 181 ): >CRF1_HUMAN
SGAPFQVRRSIRCLRN

SEQ ID NO: 13259 - protein, 16 aa, Homo sapiens
  ( 167 )...( 182 ): >CRF1_HUMAN
GAPFQVRRSIRCLRNI

SEQ ID NO: 13260 - protein, 16 aa, Homo sapiens
  ( 316 )...( 331 ): >CRF1_HUMAN
LFNIVRILMTKLRAST

SEQ ID NO: 13261 - protein, 16 aa, Homo sapiens
  ( 317 )...( 332 ): >CRF1_HUMAN
FNIVRILMTKLRASTT

SEQ ID NO: 13262 - protein, 16 aa, Homo sapiens
  ( 318 )...( 333 ): >CRF1_HUMAN
NIVRILMTKLRASTTS

SEQ ID NO: 13263 - protein, 16 aa, Homo sapiens
  ( 335 )...( 350 ): >CRF1_HUMAN
TIQYRKAVKATLVLLP

SEQ ID NO: 13264 - protein, 16 aa, Homo sapiens
  ( 411 )...( 426 ): >CRF1_HUMAN
QDKHSIRARVARAMSI

SEQ ID NO: 13265 - protein, 16 aa, Homo sapiens
  ( 412 )...( 427 ): >CRF1_HUMAN
DKHSIRARVARAMSIP

SEQ ID NO: 13266 - protein, 16 aa, Homo sapiens
  ( 413 )...( 428 ): >CRF1_HUMAN
KHSIRARVARAMSIPT

SEQ ID NO: 13267 - protein, 16 aa, Homo sapiens
  ( 416 )...( 431 ): >CRF1_HUMAN
IRARVARAMSIPTSPT

SEQ ID NO: 13268 - protein, 16 aa, Homo sapiens
  ( 417 )...( 432 ): >CRF1_HUMAN
RARVARAMSIPTSPTR

SEQ ID NO: 13269 - protein, 16 aa, Homo sapiens
  ( 418 )...( 433 ): >CRF1_HUMAN
ARVARAMSIPTSPTRV

SEQ ID NO: 13270 - protein, 16 aa, Homo sapiens
  ( 134 )...( 149 ): >CRF2_HUMAN
AFLLFLALRSIRCLRN

SEQ ID NO: 13271 - protein, 16 aa, Homo sapiens
  ( 137 )...( 152 ): >CRF2_HUMAN
LFLALRSIRCLRNVIH

SEQ ID NO: 13272 - protein, 16 aa, Homo sapiens
  ( 283 )...( 298 ): >CRF2_HUMAN
LFNIVRILMTKLRAST

SEQ ID NO: 13273 - protein, 16 aa, Homo sapiens
  ( 284 )...( 299 ): >CRF2_HUMAN
FNIVRILMTKLRASTT

SEQ ID NO: 13274 - protein, 16 aa, Homo sapiens
  ( 285 )...( 300 ): >CRF2_HUMAN
NIVRILMTKLRASTTS

SEQ ID NO: 13275 - protein, 16 aa, Homo sapiens
  ( 302 )...( 317 ): >CRF2_HUMAN
TIQYRKAVKATLVLLP

SEQ ID NO: 13276 - protein, 16 aa, Homo sapiens
  ( 131 )...( 146 ): >CXC1_HUMAN
VVSPLSTLRVPTLRCR

SEQ ID NO: 13277 - protein, 16 aa, Homo sapiens
  ( 132 )...( 147 ): >CXC1_HUMAN
VSPLSTLRVPTLRCRV

SEQ ID NO: 13278 - protein, 16 aa, Homo sapiens
  ( 133 )...( 148 ): >CXC1_HUMAN
SPLSTLRVPTLRCRVL

SEQ ID NO: 13279 - protein, 16 aa, Homo sapiens
  ( 134 )...( 149 ): >CXC1_HUMAN
PLSTLRVPTLRCRVLV

SEQ ID NO: 13280 - protein, 16 aa, Homo sapiens
  ( 135 )...( 150 ): >CXC1_HUMAN
LSTLRVPTLRCRVLVT

SEQ ID NO: 13281 - protein, 16 aa, Homo sapiens
  ( 136 )...( 151 ): >CXC1_HUMAN
STLRVPTLRCRVLVTM

SEQ ID NO: 13282 - protein, 16 aa, Homo sapiens
  ( 137 )...( 152 ): >CXC1_HUMAN
TLRVPTLRCRVLVTMA

SEQ ID NO: 13283 - protein, 16 aa, Homo sapiens
  ( 138 )...( 153 ): >CXC1_HUMAN
LRVPTLRCRVLVTMAV

SEQ ID NO: 13284 - protein, 16 aa, Homo sapiens
  ( 139 )...( 154 ): >CXC1_HUMAN
RVPTLRCRVLVTMAVW

SEQ ID NO: 13285 - protein, 16 aa, Homo sapiens
  ( 217 )...( 232 ): >CXC1_HUMAN
SKRRHRTVKLIFAIVV

SEQ ID NO: 13286 - protein, 16 aa, Homo sapiens
  ( 218 )...( 233 ): >CXC1_HUMAN
KRRHRTVKLIFAIVVA

SEQ ID NO: 13287 - protein, 16 aa, Homo sapiens
  ( 219 )...( 234 ): >CXC1_HUMAN
RRHRTVKLIFAIVVAY

SEQ ID NO: 13288 - protein, 16 aa, Homo sapiens
  ( 288 )...( 303 ): >CXC1_HUMAN
VFVGVKFRTHLKHVLR

SEQ ID NO: 13289 - protein, 16 aa, Homo sapiens
  ( 289 )...( 304 ): >CXC1_HUMAN
FVGVKFRTHLKHVLRQ

SEQ ID NO: 13290 - protein, 16 aa, Homo sapiens
  ( 290 )...( 305 ): >CXC1_HUMAN
VGVKFRTHLKHVLRQF

SEQ ID NO: 13291 - protein, 16 aa, Homo sapiens
  ( 141 )...( 156 ): >D2DR_HUMAN
LYNTRYSSKRRVTVMI

SEQ ID NO: 13292 - protein, 16 aa, Homo sapiens
  ( 143 )...( 158 ): >D2DR_HUMAN
NTRYSSKRRVTVMISI

SEQ ID NO: 13293 - protein, 16 aa, Homo sapiens
  ( 144 )...( 159 ): >D2DR_HUMAN
TRYSSKRRVTVMISIV

SEQ ID NO: 13294 - protein, 16 aa, Homo sapiens
  ( 145 )...( 160 ): >D2DR_HUMAN
RYSSKRRVTVMISIVW

SEQ ID NO: 13295 - protein, 16 aa, Homo sapiens
  ( 146 )...( 161 ): >D2DR_HUMAN
YSSKRRVTVMISIVWV

SEQ ID NO: 13296 - protein, 16 aa, Homo sapiens
  ( 147 )...( 162 ): >D2DR_HUMAN
SSKRRVTVMISIVWVL

SEQ ID NO: 13297 - protein, 16 aa, Homo sapiens
  ( 148 )...( 163 ): >D2DR_HUMAN
SKRRVTVMISIVWVLS

SEQ ID NO: 13298 - protein, 16 aa, Homo sapiens
  ( 227 )...( 242 ): >D2DR_HUMAN
RSSRAFRAHLRAPLKG

SEQ ID NO: 13299 - protein, 16 aa, Homo sapiens
  ( 254 )...( 269 ): >D2DR_HUMAN
TVIMKSNGSFPVNRRR

SEQ ID NO: 13300 - protein, 16 aa, Homo sapiens
  ( 255 )...( 270 ): >D2DR_HUMAN
VIMKSNGSFPVNRRRV

SEQ ID NO: 13301 - protein, 16 aa, Homo sapiens
  ( 261 )...( 276 ): >D2DR_HUMAN
GSFPVNRRRVEAARRA

SEQ ID NO: 13302 - protein, 16 aa, Homo sapiens
  ( 345 )...( 360 ): >D2DR_HUMAN
TMPNGKTRTSLKTMSR

SEQ ID NO: 13303 - protein, 16 aa, Homo sapiens
  ( 346 )...( 361 ): >D2DR_HUMAN
MPNGKTRTSLKTMSRR

SEQ ID NO: 13304 - protein, 16 aa, Homo sapiens
  ( 347 )...( 362 ): >D2DR_HUMAN
PNGKTRTSLKTMSRRK

SEQ ID NO: 13305 - protein, 16 aa, Homo sapiens
  ( 348 )...( 363 ): >D2DR_HUMAN
NGKTRTSLKTMSRRKL

SEQ ID NO: 13306 - protein, 16 aa, Homo sapiens
  ( 349 )...( 364 ): >D2DR_HUMAN
GKTRTSLKTMSRRKLS

SEQ ID NO: 13307 - protein, 16 aa, Homo sapiens
  ( 350 )...( 365 ): >D2DR_HUMAN
KTRTSLKTMSRRKLSQ

SEQ ID NO: 13308 - protein, 16 aa, Homo sapiens
  ( 351 )...( 366 ): >D2DR_HUMAN
TRTSLKTMSRRKLSQQ

SEQ ID NO: 13309 - protein, 16 aa, Homo sapiens
  ( 353 )...( 368 ): >D2DR_HUMAN
TSLKTMSRRKLSQQKE

SEQ ID NO: 13310 - protein, 16 aa, Homo sapiens
  ( 357 )...( 372 ): >D2DR_HUMAN
TMSRRKLSQQKEKKAT

SEQ ID NO: 13311 - protein, 16 aa, Homo sapiens
  ( 361 )...( 376 ): >D2DR_HUMAN
RKLSQQKEKKATQMLA

SEQ ID NO: 13312 - protein, 16 aa, Homo sapiens
  ( 204 )...( 219 ): >D3DR_HUMAN
TVLVYARIYVVLKQRR

SEQ ID NO: 13313 - protein, 16 aa, Homo sapiens
  ( 222 )...( 237 ): >D3DR_HUMAN
RILTRQNSQCNSVRPG

SEQ ID NO: 13314 - protein, 16 aa, Homo sapiens
  ( 290 )...( 305 ): >D3DR_HUMAN
IAPKLSLEVRKLSNGR

SEQ ID NO: 13315 - protein, 16 aa, Homo sapiens
  ( 291 )...( 306 ): >D3DR_HUMAN
APKLSLEVRKLSNGRL

SEQ ID NO: 13316 - protein, 16 aa, Homo sapiens
  ( 292 )...( 307 ): >D3DR_HUMAN
PKLSLEVRKLSNGRLS

SEQ ID NO: 13317 - protein, 16 aa, Homo sapiens
  ( 293 )...( 308 ): >D3DR_HUMAN
KLSLEVRKLSNGRLST

SEQ ID NO: 13318 - protein, 16 aa, Homo sapiens
  ( 296 )...( 311 ): >D3DR_HUMAN
LEVRKLSNGRLSTSLK

SEQ ID NO: 13319 - protein, 16 aa, Homo sapiens
  ( 297 )...( 312 ): >D3DR_HUMAN
EVRKLSNGRLSTSLKL

SEQ ID NO: 13320 - protein, 16 aa, Homo sapiens
  ( 298 )...( 313 ): >D3DR_HUMAN
VRKLSNGRLSTSLKLG

SEQ ID NO: 13321 - protein, 16 aa, Homo sapiens
  ( 299 )...( 314 ): >D3DR_HUMAN
RKLSNGRLSTSLKLGP

SEQ ID NO: 13322 - protein, 16 aa, Homo sapiens
  ( 303 )...( 318 ): >D3DR_HUMAN
NGRLSTSLKLGPLQPR

SEQ ID NO: 13323 - protein, 16 aa, Homo sapiens
  ( 304 )...( 319 ): >D3DR_HUMAN
GRLSTSLKLGPLQPRG

SEQ ID NO: 13324 - protein, 16 aa, Homo sapiens
  ( 305 )...( 320 ): >D3DR_HUMAN
RLSTSLKLGPLQPRGV

SEQ ID NO: 13325 - protein, 16 aa, Homo sapiens
  ( 308 )...( 323 ): >D3DR_HUMAN
TSLKLGPLQPRGVPLR

SEQ ID NO: 13326 - protein, 16 aa, Homo sapiens
  ( 310 )...( 325 ): >D3DR_HUMAN
LKLGPLQPRGVPLREK

SEQ ID NO: 13327 - protein, 16 aa, Homo sapiens
  ( 311 )...( 326 ): >D3DR_HUMAN
KLGPLQPRGVPLREKK

SEQ ID NO: 13328 - protein, 16 aa, Homo sapiens
  ( 312 )...( 327 ): >D3DR_HUMAN
LGPLQPRGVPLREKKA

SEQ ID NO: 13329 - protein, 16 aa, Homo sapiens
  ( 313 )...( 328 ): >D3DR_HUMAN
GPLQPRGVPLREKKAT

SEQ ID NO: 13330 - protein, 16 aa, Homo sapiens
  ( 314 )...( 329 ): >D3DR_HUMAN
PLQPRGVPLREKKATQ

SEQ ID NO: 13331 - protein, 16 aa, Homo sapiens
  ( 315 )...( 330 ): >D3DR_HUMAN
LQPRGVPLREKKATQM

SEQ ID NO: 13332 - protein, 16 aa, Homo sapiens
  ( 316 )...( 331 ): >D3DR_HUMAN
QPRGVPLREKKATQMV

SEQ ID NO: 13333 - protein, 16 aa, Homo sapiens
  ( 317 )...( 332 ): >D3DR_HUMAN
PRGVPLREKKATQMVA

SEQ ID NO: 13334 - protein, 16 aa, Homo sapiens
  ( 318 )...( 333 ): >D3DR_HUMAN
RGVPLREKKATQMVAI

SEQ ID NO: 13335 - protein, 16 aa, Homo sapiens
  ( 133 )...( 148 ): >D4DR_HUMAN
RFVAVAVPLRYNRQGG

SEQ ID NO: 13336 - protein, 16 aa, Homo sapiens
  ( 135 )...( 150 ): >D4DR_HUMAN
VAVAVPLRYNRQGGSR

SEQ ID NO: 13337 - protein, 16 aa, Homo sapiens
  ( 136 )...( 151 ): >D4DR_HUMAN
AVAVPLRYNRQGGSRR

SEQ ID NO: 13338 - protein, 16 aa, Homo sapiens
  ( 137 )...( 152 ): >D4DR_HUMAN
VAVPLRYNRQGGSRRQ

SEQ ID NO: 13339 - protein, 16 aa, Homo sapiens
  ( 138 )...( 153 ): >D4DR_HUMAN
AVPLRYNRQGGSRRQL

SEQ ID NO: 13340 - protein, 16 aa, Homo sapiens
  ( 139 )...( 154 ): >D4DR_HUMAN
VPLRYNRQGGSRRQLL

SEQ ID NO: 13341 - protein, 16 aa, Homo sapiens
  ( 141 )...( 156 ): >D4DR_HUMAN
LRYNRQGGSRRQLLLI

SEQ ID NO: 13342 - protein, 16 aa, Homo sapiens
  ( 142 )...( 157 ): >D4DR_HUMAN
RYNRQGGSRRQLLLIG

SEQ ID NO: 13343 - protein, 16 aa, Homo sapiens
  ( 143 )...( 158 ): >D4DR_HUMAN
YNRQGGSRRQLLLIGA

SEQ ID NO: 13344 - protein, 16 aa, Homo sapiens
  ( 144 )...( 159 ): >D4DR_HUMAN
NRQGGSRRQLLLIGAT

SEQ ID NO: 13345 - protein, 16 aa, Homo sapiens
  ( 145 )...( 160 ): >D4DR_HUMAN
RQGGSRRQLLLIGATW

SEQ ID NO: 13346 - protein, 16 aa, Homo sapiens
  ( 217 )...( 232 ): >D4DR_HUMAN
RGLQRWEVARRAKLHG

SEQ ID NO: 13347 - protein, 16 aa, Homo sapiens
  ( 218 )...( 233 ): >D4DR_HUMAN
GLQRWEVARRAKLHGR

SEQ ID NO: 13348 - protein, 16 aa, Homo sapiens
  ( 364 )...( 379 ): >D4DR_HUMAN
VRAAALPPQTPPQTRR

SEQ ID NO: 13349 - protein, 16 aa, Homo sapiens
  ( 365 )...( 380 ): >D4DR_HUMAN
RAAALPPQTPPQTRRR

SEQ ID NO: 13350 - protein, 16 aa, Homo sapiens
  ( 366 )...( 381 ): >D4DR_HUMAN
AAALPPQTPPQTRRRR

SEQ ID NO: 13351 - protein, 16 aa, Homo sapiens
  ( 382 )...( 397 ): >D4DR_HUMAN
RAKITGRERKAMRVLP

SEQ ID NO: 13352 - protein, 16 aa, Homo sapiens
  ( 383 )...( 398 ): >D4DR_HUMAN
AKITGRERKAMRVLPV

SEQ ID NO: 13353 - protein, 16 aa, Homo sapiens
  ( 384 )...( 399 ): >D4DR_HUMAN
KITGRERKAMRVLPVV

SEQ ID NO: 13354 - protein, 16 aa, Homo sapiens
  ( 385 )...( 400 ): >D4DR_HUMAN
ITGRERKAMRVLPVVV

SEQ ID NO: 13355 - protein, 16 aa, Homo sapiens
  ( 386 )...( 401 ): >D4DR_HUMAN
TGRERKAMRVLPVVVG

SEQ ID NO: 13356 - protein, 16 aa, Homo sapiens
  ( 387 )...( 402 ): >D4DR_HUMAN
GRERKAMRVLPVVVGA

SEQ ID NO: 13357 - protein, 16 aa, Homo sapiens
  ( 388 )...( 403 ): >D4DR_HUMAN
RERKAMRVLPVVVGAF

SEQ ID NO: 13358 - protein, 16 aa, Homo sapiens
  ( 40 )...( 55 ): >DADR_HUMAN
GNTLVCAAVIRFRHLR

SEQ ID NO: 13359 - protein, 16 aa, Homo sapiens
  ( 41 )...( 56 ): >DADR_HUMAN
NTLVCAAVIRFRHLRS

SEQ ID NO: 13360 - protein, 16 aa, Homo sapiens
  ( 42 )...( 57 ): >DADR_HUMAN
TLVCAAVIRFRHLRSK

SEQ ID NO: 13361 - protein, 16 aa, Homo sapiens
  ( 43 )...( 58 ): >DADR_HUMAN
LVCAAVIRFRHLRSKV

SEQ ID NO: 13362 - protein, 16 aa, Homo sapiens
  ( 44 )...( 59 ): >DADR_HUMAN
VCAAVIRFRHLRSKVT

SEQ ID NO: 13363 - protein, 16 aa, Homo sapiens
  ( 45 )...( 60 ): >DADR_HUMAN
CAAVIRFRHLRSKVTN

SEQ ID NO: 13364 - protein, 16 aa, Homo sapiens
  ( 46 )...( 61 ): >DADR_HUMAN
AAVIRFRHLRSKVTNF

SEQ ID NO: 13365 - protein, 16 aa, Homo sapiens
  ( 52 )...( 67 ): >DADR_HUMAN
RHLRSKVTNFFVISLA

SEQ ID NO: 13366 - protein, 16 aa, Homo sapiens
  ( 130 )...( 145 ): >DADR_HUMAN
RYERKMTPKAAFILIS

SEQ ID NO: 13367 - protein, 16 aa, Homo sapiens
  ( 133 )...( 148 ): >DADR_HUMAN
RKMTPKAAFILISVAW

SEQ ID NO: 13368 - protein, 16 aa, Homo sapiens
  ( 208 )...( 223 ): >DADR_HUMAN
AIMIVTYTRIYRIAQK

SEQ ID NO: 13369 - protein, 16 aa, Homo sapiens
  ( 209 )...( 224 ): >DADR_HUMAN
IMIVTYTRIYRIAQKQ

SEQ ID NO: 13370 - protein, 16 aa, Homo sapiens
  ( 210 )...( 225 ): >DADR_HUMAN
MIVTYTRIYRIAQKQI

SEQ ID NO: 13371 - protein, 16 aa, Homo sapiens
  ( 215 )...( 230 ): >DADR_HUMAN
TRIYRIAQKQIRRIAA

SEQ ID NO: 13372 - protein, 16 aa, Homo sapiens
  ( 216 )...( 231 ): >DADR_HUMAN
RIYRIAQKQIRRIAAL

SEQ ID NO: 13373 - protein, 16 aa, Homo sapiens
  ( 217 )...( 232 ): >DADR_HUMAN
IYRIAQKQIRRIAALE

SEQ ID NO: 13374 - protein, 16 aa, Homo sapiens
  ( 219 )...( 234 ): >DADR_HUMAN
RIAQKQIRRIAALERA

SEQ ID NO: 13375 - protein, 16 aa, Homo sapiens
  ( 220 )...( 235 ): >DADR_HUMAN
IAQKQIRRIAALERAA

SEQ ID NO: 13376 - protein, 16 aa, Homo sapiens
  ( 221 )...( 236 ): >DADR_HUMAN
AQKQIRRIAALERAAV

SEQ ID NO: 13377 - protein, 16 aa, Homo sapiens
  ( 222 )...( 237 ): >DADR_HUMAN
QKQIRRIAALERAAVH

SEQ ID NO: 13378 - protein, 16 aa, Homo sapiens
  ( 223 )...( 238 ): >DADR_HUMAN
KQIRRIAALERAAVHA

SEQ ID NO: 13379 - protein, 16 aa, Homo sapiens
  ( 224 )...( 239 ): >DADR_HUMAN
QIRRIAALERAAVHAK

SEQ ID NO: 13380 - protein, 16 aa, Homo sapiens
  ( 225 )...( 240 ): >DADR_HUMAN
IRRIAALERAAVHAKN

SEQ ID NO: 13381 - protein, 16 aa, Homo sapiens
  ( 226 )...( 241 ): >DADR_HUMAN
RRIAALERAAVHAKNC

SEQ ID NO: 13382 - protein, 16 aa, Homo sapiens
  ( 258 )...( 273 ): >DADR_HUMAN
SSFKMSFKRETKVLKT

SEQ ID NO: 13383 - protein, 16 aa, Homo sapiens
  ( 259 )...( 274 ): >DADR_HUMAN
SFKMSFKRETKVLKTL

SEQ ID NO: 13384 - protein, 16 aa, Homo sapiens
  ( 260 )...( 275 ): >DADR_HUMAN
FKMSFKRETKVLKTLS

SEQ ID NO: 13385 - protein, 16 aa, Homo sapiens
  ( 261 )...( 276 ): >DADR_HUMAN
KMSFKRETKVLKTLSV

SEQ ID NO: 13386 - protein, 16 aa, Homo sapiens
  ( 57 )...( 72 ): >DBDR_HUMAN
GNVLVCAAIVRSRHLR

SEQ ID NO: 13387 - protein, 16 aa, Homo sapiens
  ( 58 )...( 73 ): >DBDR_HUMAN
NVLVCAAIVRSRHLRA

SEQ ID NO: 13388 - protein, 16 aa, Homo sapiens
  ( 59 )...( 74 ): >DBDR_HUMAN
VLVCAAIVRSRHLRAN

SEQ ID NO: 13389 - protein, 16 aa, Homo sapiens
  ( 60 )...( 75 ): >DBDR_HUMAN
LVCAAIVRSRHLRANM

SEQ ID NO: 13390 - protein, 16 aa, Homo sapiens
  ( 61 )...( 76 ): >DBDR_HUMAN
VCAAIVRSRHLRANMT

SEQ ID NO: 13391 - protein, 16 aa, Homo sapiens
  ( 63 )...( 78 ): >DBDR_HUMAN
AAIVRSRHLRANMTNV

SEQ ID NO: 13392 - protein, 16 aa, Homo sapiens
  ( 64 )...( 79 ): >DBDR_HUMAN
AIVRSRHLRANMTNVF

SEQ ID NO: 13393 - protein, 16 aa, Homo sapiens
  ( 65 )...( 80 ): >DBDR_HUMAN
IVRSRHLRANMTNVFI

SEQ ID NO: 13394 - protein, 16 aa, Homo sapiens
  ( 66 )...( 81 ): >DBDR_HUMAN
VRSRHLRANMTNVFIV

SEQ ID NO: 13395 - protein, 16 aa, Homo sapiens
  ( 67 )...( 82 ): >DBDR_HUMAN
RSRHLRANMTNVFIVS

SEQ ID NO: 13396 - protein, 16 aa, Homo sapiens
  ( 147 )...( 162 ): >DBDR_HUMAN
RYKRKMTQRMALVMVG

SEQ ID NO: 13397 - protein, 16 aa, Homo sapiens
  ( 148 )...( 163 ): >DBDR_HUMAN
YKRKMTQRMALVMVGL

SEQ ID NO: 13398 - protein, 16 aa, Homo sapiens
  ( 149 )...( 164 ): >DBDR_HUMAN
KRKMTQRMALVMVGLA

SEQ ID NO: 13399 - protein, 16 aa, Homo sapiens
  ( 150 )...( 165 ): >DBDR_HUMAN
RKMTQRMALVMVGLAW

SEQ ID NO: 13400 - protein, 16 aa, Homo sapiens
  ( 242 )...( 257 ): >DBDR_HUMAN
IVTYTRIYRIAQVQIR

SEQ ID NO: 13401 - protein, 16 aa, Homo sapiens
  ( 246 )...( 261 ): >DBDR_HUMAN
TRIYRIAQVQIRRISS

SEQ ID NO: 13402 - protein, 16 aa, Homo sapiens
  ( 247 )...( 262 ): >DBDR_HUMAN
RIYRIAQVQIRRISSL

SEQ ID NO: 13403 - protein, 16 aa, Homo sapiens
  ( 250 )...( 265 ): >DBDR_HUMAN
RIAQVQIRRISSLERA

SEQ ID NO: 13404 - protein, 16 aa, Homo sapiens
  ( 282 )...( 297 ): >DBDR_HUMAN
TSLRASIKKETKVLKT

SEQ ID NO: 13405 - protein, 16 aa, Homo sapiens
  ( 283 )...( 298 ): >DBDR_HUMAN
SLRASIKKETKVLKTL

SEQ ID NO: 13406 - protein, 16 aa, Homo sapiens
  ( 284 )...( 299 ): >DBDR_HUMAN
LRASIKKETKVLKTLS

SEQ ID NO: 13407 - protein, 16 aa, Homo sapiens
  ( 285 )...( 300 ): >DBDR_HUMAN
RASIKKETKVLKTLSV

SEQ ID NO: 13408 - protein, 16 aa, Homo sapiens
  ( 47 )...( 62 ): >EBI2_HUMAN
VGNLLALVVIVQNRKK

SEQ ID NO: 13409 - protein, 16 aa, Homo sapiens
  ( 48 )...( 63 ): >EBI2_HUMAN
GNLLALVVIVQNRKKI

SEQ ID NO: 13410 - protein, 16 aa, Homo sapiens
  ( 49 )...( 64 ): >EBI2_HUMAN
NLLALVVIVQNRKKIN

SEQ ID NO: 13411 - protein, 16 aa, Homo sapiens
  ( 50 )...( 65 ): >EBI2_HUMAN
LLALVVIVQNRKKINS

SEQ ID NO: 13412 - protein, 16 aa, Homo sapiens
  ( 51 )...( 66 ): >EBI2_HUMAN
LALVVIVQNRKKINST

SEQ ID NO: 13413 - protein, 16 aa, Homo sapiens
  ( 52 )...( 67 ): >EBI2_HUMAN
ALVVIVQNRKKINSTT

SEQ ID NO: 13414 - protein, 16 aa, Homo sapiens
  ( 53 )...( 68 ): >EBI2_HUMAN
LVVIVQNRKKINSTTL

SEQ ID NO: 13415 - protein, 16 aa, Homo sapiens
  ( 54 )...( 69 ): >EBI2_HUMAN
VVIVQNRKKINSTTLY

SEQ ID NO: 13416 - protein, 16 aa, Homo sapiens
  ( 131 )...( 146 ): >EBI2_HUMAN
IAVVHPLRYNKIKRIE

SEQ ID NO: 13417 - protein, 16 aa, Homo sapiens
  ( 137 )...( 152 ): >EBI2_HUMAN
LRYNKIKRIEHAKGVC

SEQ ID NO: 13418 - protein, 16 aa, Homo sapiens
  ( 138 )...( 153 ): >EBI2_HUMAN
RYNKIKRIEHAKGVCI

SEQ ID NO: 13419 - protein, 16 aa, Homo sapiens
  ( 139 )...( 154 ): >EBI2_HUMAN
YNKIKRIEHAKGVCIF

SEQ ID NO: 13420 - protein, 16 aa, Homo sapiens
  ( 140 )...( 155 ): >EBI2_HUMAN
NKIKRIEHAKGVCIFV

SEQ ID NO: 13421 - protein, 16 aa, Homo sapiens
  ( 141 )...( 156 ): >EBI2_HUMAN
KIKRIEHAKGVCIFVW

SEQ ID NO: 13422 - protein, 16 aa, Homo sapiens
  ( 262 )...( 277 ): >EBI2_HUMAN
VAIIQHMIKKLRFSNF

SEQ ID NO: 13423 - protein, 16 aa, Homo sapiens
  ( 314 )...( 329 ): >EBI2_HUMAN
GYKRKVMRMLKRQVSV

SEQ ID NO: 13424 - protein, 16 aa, Homo sapiens
  ( 316 )...( 331 ): >EBI2_HUMAN
KRKVMRMLKRQVSVSI

SEQ ID NO: 13425 - protein, 16 aa, Homo sapiens
  ( 317 )...( 332 ): >EBI2_HUMAN
RKVMRMLKRQVSVSIS

SEQ ID NO: 13426 - protein, 16 aa, Homo sapiens
  ( 318 )...( 333 ): >EBI2_HUMAN
KVMRMLKRQVSVSISS

SEQ ID NO: 13427 - protein, 16 aa, Homo sapiens
  ( 319 )...( 334 ): >EBI2_HUMAN
VMRMLKRQVSVSISSA

SEQ ID NO: 13428 - protein, 16 aa, Homo sapiens
  ( 320 )...( 335 ): >EBI2_HUMAN
MRMLKRQVSVSISSAV

SEQ ID NO: 13429 - protein, 16 aa, Homo sapiens
  ( 321 )...( 336 ): >EBI2_HUMAN
RMLKRQVSVSISSAVK

SEQ ID NO: 13430 - protein, 16 aa, Homo sapiens
  ( 19 )...( 34 ): >EBP2_HUMAN
LSRVSGGAPLHLGRHR

SEQ ID NO: 13431 - protein, 16 aa, Homo sapiens
  ( 236 )...( 251 ): >EBP2_HUMAN
LPKVRPIERCQSILAK

SEQ ID NO: 13432 - protein, 16 aa, Homo sapiens
  ( 237 )...( 252 ): >EBP2_HUMAN
PKVRPIERCQSILAKL

SEQ ID NO: 13433 - protein, 16 aa, Homo sapiens
  ( 238 )...( 253 ): >EBP2_HUMAN
KVRPIERCQSILAKLA

SEQ ID NO: 13434 - protein, 16 aa, Homo sapiens
  ( 326 )...( 341 ): >EBP2_HUMAN
VTCQLVTWRVRGPPGR

SEQ ID NO: 13435 - protein, 16 aa, Homo sapiens
  ( 327 )...( 342 ): >EBP2_HUMAN
TCQLVTWRVRGPPGRK

SEQ ID NO: 13436 - protein, 16 aa, Homo sapiens
  ( 328 )...( 343 ): >EBP2_HUMAN
CQLVTWRVRGPPGRKS

SEQ ID NO: 13437 - protein, 16 aa, Homo sapiens
  ( 329 )...( 344 ): >EBP2_HUMAN
QLVTWRVRGPPGRKSE

SEQ ID NO: 13438 - protein, 16 aa, Homo sapiens
  ( 330 )...( 345 ): >EBP2_HUMAN
LVTWRVRGPPGRKSEC

SEQ ID NO: 13439 - protein, 16 aa, Homo sapiens
  ( 331 )...( 346 ): >EBP2_HUMAN
VTWRVRGPPGRKSECR

SEQ ID NO: 13440 - protein, 16 aa, Homo sapiens
  ( 332 )...( 347 ): >EBP2_HUMAN
TWRVRGPPGRKSECRA

SEQ ID NO: 13441 - protein, 16 aa, Homo sapiens
  ( 334 )...( 349 ): >EBP2_HUMAN
RVRGPPGRKSECRASK

SEQ ID NO: 13442 - protein, 16 aa, Homo sapiens
  ( 216 )...( 231 ): >EDG1_HUMAN
SIVILYCRIYSLVRTR

SEQ ID NO: 13443 - protein, 16 aa, Homo sapiens
  ( 217 )...( 232 ): >EDG1_HUMAN
IVILYCRIYSLVRTRS

SEQ ID NO: 13444 - protein, 16 aa, Homo sapiens
  ( 218 )...( 233 ): >EDG1_HUMAN
VILYCRIYSLVRTRSR

SEQ ID NO: 13445 - protein, 16 aa, Homo sapiens
  ( 238 )...( 253 ): >EDG1_HUMAN
RKNISKASRSSENVAL

SEQ ID NO: 13446 - protein, 16 aa, Homo sapiens
  ( 311 )...( 326 ): >EDG1_HUMAN
TLTNKEMRRAFIRIMS

SEQ ID NO: 13447 - protein, 16 aa, Homo sapiens
  ( 312 )...( 327 ): >EDG1_HUMAN
LTNKEMRRAFIRIMSC

SEQ ID NO: 13448 - protein, 16 aa, Homo sapiens
  ( 338 )...( 353 ): >EDG1_HUMAN
KFKRPIIAGMEFSRSK

SEQ ID NO: 13449 - protein, 16 aa, Homo sapiens
  ( 109 )...( 124 ): >EDG2_HUMAN
TGPNTRRLTVSTWLLR

SEQ ID NO: 13450 - protein, 16 aa, Homo sapiens
  ( 110 )...( 125 ): >EDG2_HUMAN
GPNTRRLTVSTWLLRQ

SEQ ID NO: 13451 - protein, 16 aa, Homo sapiens
  ( 111 )...( 126 ): >EDG2_HUMAN
PNTRRLTVSTWLLRQG

SEQ ID NO: 13452 - protein, 16 aa, Homo sapiens
  ( 112 )...( 127 ): >EDG2_HUMAN
NTRRLTVSTWLLRQGL

SEQ ID NO: 13453 - protein, 16 aa, Homo sapiens
  ( 113 )...( 128 ): >EDG2_HUMAN
TRRLTVSTWLLRQGLI

SEQ ID NO: 13454 - protein, 16 aa, Homo sapiens
  ( 152 )...( 167 ): >EDG2_HUMAN
RMQLHTRMSNRRVVVV

SEQ ID NO: 13455 - protein, 16 aa, Homo sapiens
  ( 153 )...( 168 ): >EDG2_HUMAN
MQLHTRMSNRRVVVVI

SEQ ID NO: 13456 - protein, 16 aa, Homo sapiens
  ( 154 )...( 169 ): >EDG2_HUMAN
QLHTRMSNRRVVVVIV

SEQ ID NO: 13457 - protein, 16 aa, Homo sapiens
  ( 155 )...( 170 ): >EDG2_HUMAN
LHTRMSNRRVVVVIVV

SEQ ID NO: 13458 - protein, 16 aa, Homo sapiens
  ( 156 )...( 171 ): >EDG2_HUMAN
HTRMSNRRVVVVIVVI

SEQ ID NO: 13459 - protein, 16 aa, Homo sapiens
  ( 157 )...( 172 ): >EDG2_HUMAN
TRMSNRRVVVVIVVIW

SEQ ID NO: 13460 - protein, 16 aa, Homo sapiens
  ( 158 )...( 173 ): >EDG2_HUMAN
RMSNRRVVVVIVVIWT

SEQ ID NO: 13461 - protein, 16 aa, Homo sapiens
  ( 230 )...( 245 ): >EDG2_HUMAN
GYVRQRTMRMSRHSSG

SEQ ID NO: 13462 - protein, 16 aa, Homo sapiens
  ( 244 )...( 259 ): >EDG2_HUMAN
SGPRRNRDTMMSLLKT

SEQ ID NO: 13463 - protein, 16 aa, Homo sapiens
  ( 245 )...( 260 ): >EDG2_HUMAN
GPRRNRDTMMSLLKTV

SEQ ID NO: 13464 - protein, 16 aa, Homo sapiens
  ( 246 )...( 261 ): >EDG2_HUMAN
PRRNRDTMMSLLKTVV

SEQ ID NO: 13465 - protein, 16 aa, Homo sapiens
  ( 247 )...( 262 ): >EDG2_HUMAN
RRNRDTMMSLLKTVVI

SEQ ID NO: 13466 - protein, 16 aa, Homo sapiens
  ( 18 )...( 33 ): >EDG3_HUMAN
LREHYQYVGKLAGRLK

SEQ ID NO: 13467 - protein, 16 aa, Homo sapiens
  ( 87 )...( 102 ): >EDG3_HUMAN
LAGIAYKVNILMSGKK

SEQ ID NO: 13468 - protein, 16 aa, Homo sapiens
  ( 148 )...( 163 ): >EDG3_HUMAN
ANKRHRVFLLIGMCWL

SEQ ID NO: 13469 - protein, 16 aa, Homo sapiens
  ( 149 )...( 164 ): >EDG3_HUMAN
NKRHRVFLLIGMCWLI

SEQ ID NO: 13470 - protein, 16 aa, Homo sapiens
  ( 212 )...( 227 ): >EDG3_HUMAN
VILYARIYFLVKSSSR

SEQ ID NO: 13471 - protein, 16 aa, Homo sapiens
  ( 213 )...( 228 ): >EDG3_HUMAN
ILYARIYFLVKSSSRK

SEQ ID NO: 13472 - protein, 16 aa, Homo sapiens
  ( 214 )...( 229 ): >EDG3_HUMAN
LYARIYFLVKSSSRKV

SEQ ID NO: 13473 - protein, 16 aa, Homo sapiens
  ( 215 )...( 230 ): >EDG3_HUMAN
YARIYFLVKSSSRKVA

SEQ ID NO: 13474 - protein, 16 aa, Homo sapiens
  ( 216 )...( 231 ): >EDG3_HUMAN
ARIYFLVKSSSRKVAN

SEQ ID NO: 13475 - protein, 16 aa, Homo sapiens
  ( 299 )...( 314 ): >EDG3_HUMAN
TLASKEMRRAFFRLVC

SEQ ID NO: 13476 - protein, 16 aa, Homo sapiens
  ( 317 )...( 332 ): >EDG3_HUMAN
LVRGRGARASPIQPAL

SEQ ID NO: 13477 - protein, 16 aa, Homo sapiens
  ( 510 )...( 525 ): >EMR1_HUMAN
KMNSRVVGGIMTGEKK

SEQ ID NO: 13478 - protein, 16 aa, Homo sapiens
  ( 849 )...( 864 ): >EMR1_HUMAN
GQVREEYKRWITGKTK

SEQ ID NO: 13479 - protein, 16 aa, Homo sapiens
  ( 855 )...( 870 ): >EMR1_HUMAN
YKRWITGKTKPSSQSQ

SEQ ID NO: 13480 - protein, 16 aa, Homo sapiens
  ( 856 )...( 871 ): >EMR1_HUMAN
KRWITGKTKPSSQSQT

SEQ ID NO: 13481 - protein, 16 aa, Homo sapiens
  ( 97 )...( 112 ): >ET1R_HUMAN
GNATLLRIIYQNKCMR

SEQ ID NO: 13482 - protein, 16 aa, Homo sapiens
  ( 99 )...( 114 ): >ET1R_HUMAN
ATLLRIIYQNKCMRNG

SEQ ID NO: 13483 - protein, 16 aa, Homo sapiens
  ( 100 )...( 115 ): >ET1R_HUMAN
TLLRIIYQNKCMRNGP

SEQ ID NO: 13484 - protein, 16 aa, Homo sapiens
  ( 183 )...( 198 ): >ET1R_HUMAN
RYRAVASWSRVQGIGI

SEQ ID NO: 13485 - protein, 16 aa, Homo sapiens
  ( 284 )...( 299 ): >ET1R_HUMAN
NRRNGSLRIALSEHLK

SEQ ID NO: 13486 - protein, 16 aa, Homo sapiens
  ( 285 )...( 300 ): >ET1R_HUMAN
RRNGSLRIALSEHLKQ

SEQ ID NO: 13487 - protein, 16 aa, Homo sapiens
  ( 286 )...( 301 ): >ET1R_HUMAN
RNGSLRIALSEHLKQR

SEQ ID NO: 13488 - protein, 16 aa, Homo sapiens
  ( 287 )...( 302 ): >ET1R_HUMAN
NGSLRIALSEHLKQRR

SEQ ID NO: 13489 - protein, 16 aa, Homo sapiens
  ( 291 )...( 306 ): >ET1R_HUMAN
RIALSEHLKQRREVAK

SEQ ID NO: 13490 - protein, 16 aa, Homo sapiens
  ( 297 )...( 312 ): >ET1R_HUMAN
HLKQRREVAKTVFCLV

SEQ ID NO: 13491 - protein, 16 aa, Homo sapiens
  ( 298 )...( 313 ): >ET1R_HUMAN
LKQRREVAKTVFCLVV

SEQ ID NO: 13492 - protein, 16 aa, Homo sapiens
  ( 299 )...( 314 ): >ET1R_HUMAN
KQRREVAKTVFCLVVI

SEQ ID NO: 13493 - protein, 16 aa, Homo sapiens
  ( 115 )...( 130 ): >ETBR_HUMAN
GIIGNSTLLRIIYKNK

SEQ ID NO: 13494 - protein, 16 aa, Homo sapiens
  ( 116 )...( 131 ): >ETBR_HUMAN
IIGNSTLLRIIYKNKC

SEQ ID NO: 13495 - protein, 16 aa, Homo sapiens
  ( 117 )...( 132 ): >ETBR_HUMAN
IGNSTLLRIIYKNKCM

SEQ ID NO: 13496 - protein, 16 aa, Homo sapiens
  ( 118 )...( 133 ): >ETBR_HUMAN
GNSTLLRIIYKNKCMR

SEQ ID NO: 13497 - protein, 16 aa, Homo sapiens
  ( 120 )...( 135 ): >ETBR_HUMAN
STLLRIIYKNKCMRNG

SEQ ID NO: 13498 - protein, 16 aa, Homo sapiens
  ( 121 )...( 136 ): >ETBR_HUMAN
TLLRIIYKNKCMRNGP

SEQ ID NO: 13499 - protein, 16 aa, Homo sapiens
  ( 196 )...( 211 ): >ETBR_HUMAN
SIDRYRAVASWSRIKG

SEQ ID NO: 13500 - protein, 16 aa, Homo sapiens
  ( 197 )...( 212 ): >ETBR_HUMAN
IDRYRAVASWSRIKGI

SEQ ID NO: 13501 - protein, 16 aa, Homo sapiens
  ( 198 )...( 213 ): >ETBR_HUMAN
DRYRAVASWSRIKGIG

SEQ ID NO: 13502 - protein, 16 aa, Homo sapiens
  ( 199 )...( 214 ): >ETBR_HUMAN
RYRAVASWSRIKGIGV

SEQ ID NO: 13503 - protein, 16 aa, Homo sapiens
  ( 200 )...( 215 ): >ETBR_HUMAN
YRAVASWSRIKGIGVP

SEQ ID NO: 13504 - protein, 16 aa, Homo sapiens
  ( 201 )...( 216 ): >ETBR_HUMAN
RAVASWSRIKGIGVPK

SEQ ID NO: 13505 - protein, 16 aa, Homo sapiens
  ( 203 )...( 218 ): >ETBR_HUMAN
VASWSRIKGIGVPKWT

SEQ ID NO: 13506 - protein, 16 aa, Homo sapiens
  ( 205 )...( 220 ): >ETBR_HUMAN
SWSRIKGIGVPKWTAV

SEQ ID NO: 13507 - protein, 16 aa, Homo sapiens
  ( 247 )...( 262 ): >ETBR_HUMAN
YKGSYLRICLLHPVQK

SEQ ID NO: 13508 - protein, 16 aa, Homo sapiens
  ( 314 )...( 329 ): >ETBR_HUMAN
HLKQRREVAKTVFCLV

SEQ ID NO: 13509 - protein, 16 aa, Homo sapiens
  ( 315 )...( 330 ): >ETBR_HUMAN
LKQRREVAKTVFCLVL

SEQ ID NO: 13510 - protein, 16 aa, Homo sapiens
  ( 316 )...( 331 ): >ETBR_HUMAN
KQRREVAKTVFCLVLV

SEQ ID NO: 13511 - protein, 16 aa, Homo sapiens
  ( 190 )...( 205 ): >FML1_HUMAN
RLKVAITMLTARGIIR

SEQ ID NO: 13512 - protein, 16 aa, Homo sapiens
  ( 191 )...( 206 ): >FML1_HUMAN
LKVAITMLTARGIIRF

SEQ ID NO: 13513 - protein, 16 aa, Homo sapiens
  ( 192 )...( 207 ): >FML1_HUMAN
KVAITMLTARGIIRFV

SEQ ID NO: 13514 - protein, 16 aa, Homo sapiens
  ( 220 )...( 235 ): >FML1_HUMAN
CYGLIAAKIHKKGMIK

SEQ ID NO: 13515 - protein, 16 aa, Homo sapiens
  ( 221 )...( 236 ): >FML1_HUMAN
YGLIAAKIHKKGMIKS

SEQ ID NO: 13516 - protein, 16 aa, Homo sapiens
  ( 222 )...( 237 ): >FML1_HUMAN
GLIAAKIHKKGMIKSS

SEQ ID NO: 13517 - protein, 16 aa, Homo sapiens
  ( 223 )...( 238 ): >FML1_HUMAN
LIAAKIHKKGMIKSSR

SEQ ID NO: 13518 - protein, 16 aa, Homo sapiens
  ( 224 )...( 239 ): >FML1_HUMAN
IAAKIHKKGMIKSSRP

SEQ ID NO: 13519 - protein, 16 aa, Homo sapiens
  ( 225 )...( 240 ): >FML1_HUMAN
AAKIHKKGMIKSSRPL

SEQ ID NO: 13520 - protein, 16 aa, Homo sapiens
  ( 226 )...( 241 ): >FML1_HUMAN
AKIHKKGMIKSSRPLR

SEQ ID NO: 13521 - protein, 16 aa, Homo sapiens
  ( 227 )...( 242 ): >FML1_HUMAN
KIHKKGMIKSSRPLRV

SEQ ID NO: 13522 - protein, 16 aa, Homo sapiens
  ( 228 )...( 243 ): >FML1_HUMAN
IHKKGMIKSSRPLRVL

SEQ ID NO: 13523 - protein, 16 aa, Homo sapiens
  ( 229 )...( 244 ): >FML1_HUMAN
HKKGMIKSSRPLRVLT

SEQ ID NO: 13524 - protein, 16 aa, Homo sapiens
  ( 230 )...( 245 ): >FML1_HUMAN
KKGMIKSSRPLRVLTA

SEQ ID NO: 13525 - protein, 16 aa, Homo sapiens
  ( 231 )...( 246 ): >FML1_HUMAN
KGMIKSSRPLRVLTAV

SEQ ID NO: 13526 - protein, 16 aa, Homo sapiens
  ( 232 )...( 247 ): >FML1_HUMAN
GMIKSSRPLRVLTAVV

SEQ ID NO: 13527 - protein, 16 aa, Homo sapiens
  ( 233 )...( 248 ): >FML1_HUMAN
MIKSSRPLRVLTAVVA

SEQ ID NO: 13528 - protein, 16 aa, Homo sapiens
  ( 234 )...( 249 ): >FML1_HUMAN
IKSSRPLRVLTAVVAS

SEQ ID NO: 13529 - protein, 16 aa, Homo sapiens
  ( 235 )...( 250 ): >FML1_HUMAN
KSSRPLRVLTAVVASF

SEQ ID NO: 13530 - protein, 16 aa, Homo sapiens
  ( 131 )...( 146 ): >FML2_HUMAN
AWAQNHRTMSLAKRVM

SEQ ID NO: 13531 - protein, 16 aa, Homo sapiens
  ( 132 )...( 147 ): >FML2_HUMAN
WAQNHRTMSLAKRVMT

SEQ ID NO: 13532 - protein, 16 aa, Homo sapiens
  ( 133 )...( 148 ): >FML2_HUMAN
AQNHRTMSLAKRVMTG

SEQ ID NO: 13533 - protein, 16 aa, Homo sapiens
  ( 134 )...( 149 ): >FML2_HUMAN
QNHRTMSLAKRVMTGL

SEQ ID NO: 13534 - protein, 16 aa, Homo sapiens
  ( 135 )...( 150 ): >FML2_HUMAN
NHRTMSLAKRVMTGLW

SEQ ID NO: 13535 - protein, 16 aa, Homo sapiens
  ( 136 )...( 151 ): >FML2_HUMAN
HRTMSLAKRVMTGLWI

SEQ ID NO: 13536 - protein, 16 aa, Homo sapiens
  ( 137 )...( 152 ): >FML2_HUMAN
RTMSLAKRVMTGLWIF

SEQ ID NO: 13537 - protein, 16 aa, Homo sapiens
  ( 223 )...( 238 ): >FML2_HUMAN
IIAAKIHRNHMIKSSR

SEQ ID NO: 13538 - protein, 16 aa, Homo sapiens
  ( 232 )...( 247 ): >FML2_HUMAN
HMIKSSRPLRVFAAVV

SEQ ID NO: 13539 - protein, 16 aa, Homo sapiens
  ( 233 )...( 248 ): >FML2_HUMAN
MIKSSRPLRVFAAVVA

SEQ ID NO: 13540 - protein, 16 aa, Homo sapiens
  ( 234 )...( 249 ): >FML2_HUMAN
IKSSRPLRVFAAVVAS

SEQ ID NO: 13541 - protein, 16 aa, Homo sapiens
  ( 135 )...( 150 ): >FMLR_HUMAN
NHRTVSLAKKVIIGPW

SEQ ID NO: 13542 - protein, 16 aa, Homo sapiens
  ( 136 )...( 151 ): >FMLR_HUMAN
HRTVSLAKKVIIGPWV

SEQ ID NO: 13543 - protein, 16 aa, Homo sapiens
  ( 137 )...( 152 ): >FMLR_HUMAN
RTVSLAKKVIIGPWVM

SEQ ID NO: 13544 - protein, 16 aa, Homo sapiens
  ( 190 )...( 205 ): >FMLR_HUMAN
RINVAVAMLTVRGIIR

SEQ ID NO: 13545 - protein, 16 aa, Homo sapiens
  ( 223 )...( 238 ): >FMLR_HUMAN
LIATKIHKQGLIKSSR

SEQ ID NO: 13546 - protein, 16 aa, Homo sapiens
  ( 224 )...( 239 ): >FMLR_HUMAN
IATKIHKQGLIKSSRP

SEQ ID NO: 13547 - protein, 16 aa, Homo sapiens
  ( 225 )...( 240 ): >FMLR_HUMAN
ATKIHKQGLIKSSRPL

SEQ ID NO: 13548 - protein, 16 aa, Homo sapiens
  ( 226 )...( 241 ): >FMLR_HUMAN
TKIHKQGLIKSSRPLR

SEQ ID NO: 13549 - protein, 16 aa, Homo sapiens
  ( 227 )...( 242 ): >FMLR_HUMAN
KIHKQGLIKSSRPLRV

SEQ ID NO: 13550 - protein, 16 aa, Homo sapiens
  ( 228 )...( 243 ): >FMLR_HUMAN
IHKQGLIKSSRPLRVL

SEQ ID NO: 13551 - protein, 16 aa, Homo sapiens
  ( 229 )...( 244 ): >FMLR_HUMAN
HKQGLIKSSRPLRVLS

SEQ ID NO: 13552 - protein, 16 aa, Homo sapiens
  ( 230 )...( 245 ): >FMLR_HUMAN
KQGLIKSSRPLRVLSF

SEQ ID NO: 13553 - protein, 16 aa, Homo sapiens
  ( 231 )...( 246 ): >FMLR_HUMAN
QGLIKSSRPLRVLSFV

SEQ ID NO: 13554 - protein, 16 aa, Homo sapiens
  ( 232 )...( 247 ): >FMLR_HUMAN
GLIKSSRPLRVLSFVA

SEQ ID NO: 13555 - protein, 16 aa, Homo sapiens
  ( 233 )...( 248 ): >FMLR_HUMAN
LIKSSRPLRVLSFVAA

SEQ ID NO: 13556 - protein, 16 aa, Homo sapiens
  ( 234 )...( 249 ): >FMLR_HUMAN
IKSSRPLRVLSFVAAA

SEQ ID NO: 13557 - protein, 16 aa, Homo sapiens
  ( 44 )...( 59 ): >FSHR_HUMAN
LPRNAIELRFVLTKLR

SEQ ID NO: 13558 - protein, 16 aa, Homo sapiens
  ( 45 )...( 60 ): >FSHR_HUMAN
PRNAIELRFVLTKLRV

SEQ ID NO: 13559 - protein, 16 aa, Homo sapiens
  ( 46 )...( 61 ): >FSHR_HUMAN
RNAIELRFVLTKLRVI

SEQ ID NO: 13560 - protein, 16 aa, Homo sapiens
  ( 48 )...( 63 ): >FSHR_HUMAN
AIELRFVLTKLRVIQK

SEQ ID NO: 13561 - protein, 16 aa, Homo sapiens
  ( 49 )...( 64 ): >FSHR_HUMAN
IELRFVLTKLRVIQKG

SEQ ID NO: 13562 - protein, 16 aa, Homo sapiens
  ( 50 )...( 65 ): >FSHR_HUMAN
ELRFVLTKLRVIQKGA

SEQ ID NO: 13563 - protein, 16 aa, Homo sapiens
  ( 51 )...( 66 ): >FSHR_HUMAN
LRFVLTKLRVIQKGAF

SEQ ID NO: 13564 - protein, 16 aa, Homo sapiens
  ( 52 )...( 67 ): >FSHR_HUMAN
RFVLTKLRVIQKGAFS

SEQ ID NO: 13565 - protein, 16 aa, Homo sapiens
  ( 53 )...( 68 ): >FSHR_HUMAN
FVLTKLRVIQKGAFSG

SEQ ID NO: 13566 - protein, 16 aa, Homo sapiens
  ( 54 )...( 69 ): >FSHR_HUMAN
VLTKLRVIQKGAFSGF

SEQ ID NO: 13567 - protein, 16 aa, Homo sapiens
  ( 55 )...( 70 ): >FSHR_HUMAN
LTKLRVIQKGAFSGFG

SEQ ID NO: 13568 - protein, 16 aa, Homo sapiens
  ( 232 )...( 247 ): >FSHR_HUMAN
SLPSYGLENLKKLRAR

SEQ ID NO: 13569 - protein, 16 aa, Homo sapiens
  ( 233 )...( 248 ): >FSHR_HUMAN
LPSYGLENLKKLRARS

SEQ ID NO: 13570 - protein, 16 aa, Homo sapiens
  ( 234 )...( 249 ): >FSHR_HUMAN
PSYGLENLKKLRARST

SEQ ID NO: 13571 - protein, 16 aa, Homo sapiens
  ( 235 )...( 250 ): >FSHR_HUMAN
SYGLENLKKLRARSTY

SEQ ID NO: 13572 - protein, 16 aa, Homo sapiens
  ( 237 )...( 252 ): >FSHR_HUMAN
GLENLKKLRARSTYNL

SEQ ID NO: 13573 - protein, 16 aa, Homo sapiens
  ( 243 )...( 258 ): >FSHR_HUMAN
KLRARSTYNLKKLPTL

SEQ ID NO: 13574 - protein, 16 aa, Homo sapiens
  ( 244 )...( 259 ): >FSHR_HUMAN
LRARSTYNLKKLPTLE

SEQ ID NO: 13575 - protein, 16 aa, Homo sapiens
  ( 413 )...( 428 ): >FZ10_HUMAN
ILSGFVALFHIRRVMK

SEQ ID NO: 13576 - protein, 16 aa, Homo sapiens
  ( 414 )...( 429 ): >FZ10_HUMAN
LSGFVALFHIRRVMKT

SEQ ID NO: 13577 - protein, 16 aa, Homo sapiens
  ( 415 )...( 430 ): >FZ10_HUMAN
SGFVALFHIRRVMKTG

SEQ ID NO: 13578 - protein, 16 aa, Homo sapiens
  ( 416 )...( 431 ): >FZ10_HUMAN
GFVALFHIRRVMKTGG

SEQ ID NO: 13579 - protein, 16 aa, Homo sapiens
  ( 473 )...( 488 ): >FZ10_HUMAN
KILAAQHKCKMNNQTK

SEQ ID NO: 13580 - protein, 16 aa, Homo sapiens
  ( 524 )...( 539 ): >FZ10_HUMAN
TSKTLQSWQQVCSRRL

SEQ ID NO: 13581 - protein, 16 aa, Homo sapiens
  ( 525 )...( 540 ): >FZ10_HUMAN
SKTLQSWQQVCSRRLK

SEQ ID NO: 13582 - protein, 16 aa, Homo sapiens
  ( 538 )...( 553 ): >FZ10_HUMAN
RLKKKSRRKPASVITS

SEQ ID NO: 13583 - protein, 16 aa, Homo sapiens
  ( 539 )...( 554 ): >FZ10_HUMAN
LKKKSRRKPASVITSG

SEQ ID NO: 13584 - protein, 16 aa, Homo sapiens
  ( 540 )...( 555 ): >FZ10_HUMAN
KKKSRRKPASVITSGG

SEQ ID NO: 13585 - protein, 16 aa, Homo sapiens
  ( 541 )...( 556 ): >FZ10_HUMAN
KKSRRKPASVITSGGI

SEQ ID NO: 13586 - protein, 16 aa, Homo sapiens
  ( 542 )...( 557 ): >FZ10_HUMAN
KSRRKPASVITSGGIY

SEQ ID NO: 13587 - protein, 16 aa, Homo sapiens
  ( 543 )...( 558 ): >FZ10_HUMAN
SRRKPASVITSGGIYK

SEQ ID NO: 13588 - protein, 16 aa, Homo sapiens
  ( 544 )...( 559 ): >FZ10_HUMAN
RRKPASVITSGGIYKK

SEQ ID NO: 13589 - protein, 16 aa, Homo sapiens
  ( 545 )...( 560 ): >FZ10_HUMAN
RKPASVITSGGIYKKA

SEQ ID NO: 13590 - protein, 16 aa, Homo sapiens
  ( 36 )...( 51 ): >FZD1_HUMAN
GDAGGRRRPPVDPRRL

SEQ ID NO: 13591 - protein, 16 aa, Homo sapiens
  ( 37 )...( 52 ): >FZD1_HUMAN
DAGGRRRPPVDPRRLA

SEQ ID NO: 13592 - protein, 16 aa, Homo sapiens
  ( 508 )...( 523 ): >FZD1_HUMAN
LAGFVSLFRIRTIMKH

SEQ ID NO: 13593 - protein, 16 aa, Homo sapiens
  ( 432 )...( 447 ): >FZD2_HUMAN
LAGFVSLFRIRTIMKH

SEQ ID NO: 13594 - protein, 16 aa, Homo sapiens
  ( 90 )...( 105 ): >FZD3_HUMAN
MEYGRVTLPCRRLCQR

SEQ ID NO: 13595 - protein, 16 aa, Homo sapiens
  ( 91 )...( 106 ): >FZD3_HUMAN
EYGRVTLPCRRLCQRA

SEQ ID NO: 13596 - protein, 16 aa, Homo sapiens
  ( 92 )...( 107 ): >FZD3_HUMAN
YGRVTLPCRRLCQRAY

SEQ ID NO: 13597 - protein, 16 aa, Homo sapiens
  ( 93 )...( 108 ): >FZD3_HUMAN
GRVTLPCRRLCQRAYS

SEQ ID NO: 13598 - protein, 16 aa, Homo sapiens
  ( 94 )...( 109 ): >FZD3_HUMAN
RVTLPCRRLCQRAYSE

SEQ ID NO: 13599 - protein, 16 aa, Homo sapiens
  ( 513 )...( 528 ): >FZD3_HUMAN
GRRKKEIVNESRQVLQ

SEQ ID NO: 13600 - protein, 16 aa, Homo sapiens
  ( 535 )...( 550 ): >FZD3_HUMAN
SLLRDPNTPIIRKSRG

SEQ ID NO: 13601 - protein, 16 aa, Homo sapiens
  ( 536 )...( 551 ): >FZD3_HUMAN
LLRDPNTPIIRKSRGT

SEQ ID NO: 13602 - protein, 16 aa, Homo sapiens
  ( 537 )...( 552 ): >FZD3_HUMAN
LRDPNTPIIRKSRGTS

SEQ ID NO: 13603 - protein, 16 aa, Homo sapiens
  ( 538 )...( 553 ): >FZD3_HUMAN
RDPNTPIIRKSRGTST

SEQ ID NO: 13604 - protein, 16 aa, Homo sapiens
  ( 540 )...( 555 ): >FZD3_HUMAN
PNTPIIRKSRGTSTQG

SEQ ID NO: 13605 - protein, 16 aa, Homo sapiens
  ( 407 )...( 422 ): >FZD4_HUMAN
AAGLVALFKIRSNLQK

SEQ ID NO: 13606 - protein, 16 aa, Homo sapiens
  ( 411 )...( 426 ): >FZD4_HUMAN
VALFKIRSNLQKDGTK

SEQ ID NO: 13607 - protein, 16 aa, Homo sapiens
  ( 503 )...( 518 ): >FZD4_HUMAN
TWQKCSNRLVNSGKVK

SEQ ID NO: 13608 - protein, 16 aa, Homo sapiens
  ( 505 )...( 520 ): >FZD4_HUMAN
QKCSNRLVNSGKVKRE

SEQ ID NO: 13609 - protein, 16 aa, Homo sapiens
  ( 506 )...( 521 ): >FZD4_HUMAN
KCSNRLVNSGKVKREK

SEQ ID NO: 13610 - protein, 16 aa, Homo sapiens
  ( 507 )...( 522 ): >FZD4_HUMAN
CSNRLVNSGKVKREKR

SEQ ID NO: 13611 - protein, 16 aa, Homo sapiens
  ( 508 )...( 523 ): >FZD4_HUMAN
SNRLVNSGKVKREKRG

SEQ ID NO: 13612 - protein, 16 aa, Homo sapiens
  ( 509 )...( 524 ): >FZD4_HUMAN
NRLVNSGKVKREKRGN

SEQ ID NO: 13613 - protein, 16 aa, Homo sapiens
  ( 510 )...( 525 ): >FZD4_HUMAN
RLVNSGKVKREKRGNG

SEQ ID NO: 13614 - protein, 16 aa, Homo sapiens
  ( 511 )...( 526 ): >FZD4_HUMAN
LVNSGKVKREKRGNGW

SEQ ID NO: 13615 - protein, 16 aa, Homo sapiens
  ( 512 )...( 527 ): >FZD4_HUMAN
VNSGKVKREKRGNGWV

SEQ ID NO: 13616 - protein, 16 aa, Homo sapiens
  ( 513 )...( 528 ): >FZD4_HUMAN
NSGKVKREKRGNGWVK

SEQ ID NO: 13617 - protein, 16 aa, Homo sapiens
  ( 514 )...( 529 ): >FZD4_HUMAN
SGKVKREKRGNGWVKP

SEQ ID NO: 13618 - protein, 16 aa, Homo sapiens
  ( 515 )...( 530 ): >FZD4_HUMAN
GKVKREKRGNGWVKPG

SEQ ID NO: 13619 - protein, 16 aa, Homo sapiens
  ( 516 )...( 531 ): >FZD4_HUMAN
KVKREKRGNGWVKPGK

SEQ ID NO: 13620 - protein, 16 aa, Homo sapiens
  ( 517 )...( 532 ): >FZD4_HUMAN
VKREKRGNGWVKPGKG

SEQ ID NO: 13621 - protein, 16 aa, Homo sapiens
  ( 518 )...( 533 ): >FZD4_HUMAN
KREKRGNGWVKPGKGS

SEQ ID NO: 13622 - protein, 16 aa, Homo sapiens
  ( 519 )...( 534 ): >FZD4_HUMAN
REKRGNGWVKPGKGSE

SEQ ID NO: 13623 - protein, 16 aa, Homo sapiens
  ( 521 )...( 536 ): >FZD4_HUMAN
KRGNGWVKPGKGSETV

SEQ ID NO: 13624 - protein, 16 aa, Homo sapiens
  ( 420 )...( 435 ): >FZD5_HUMAN
LAGFVSLFRIRSVIKQ

SEQ ID NO: 13625 - protein, 16 aa, Homo sapiens
  ( 421 )...( 436 ): >FZD5_HUMAN
AGFVSLFRIRSVIKQG

SEQ ID NO: 13626 - protein, 16 aa, Homo sapiens
  ( 422 )...( 437 ): >FZD5_HUMAN
GFVSLFRIRSVIKQGG

SEQ ID NO: 13627 - protein, 16 aa, Homo sapiens
  ( 423 )...( 438 ): >FZD5_HUMAN
FVSLFRIRSVIKQGGT

SEQ ID NO: 13628 - protein, 16 aa, Homo sapiens
  ( 424 )...( 439 ): >FZD5_HUMAN
VSLFRIRSVIKQGGTK

SEQ ID NO: 13629 - protein, 16 aa, Homo sapiens
  ( 425 )...( 440 ): >FZD5_HUMAN
SLFRIRSVIKQGGTKT

SEQ ID NO: 13630 - protein, 16 aa, Homo sapiens
  ( 426 )...( 441 ): >FZD5_HUMAN
LFRIRSVIKQGGTKTD

SEQ ID NO: 13631 - protein, 16 aa, Homo sapiens
  ( 427 )...( 442 ): >FZD5_HUMAN
FRIRSVIKQGGTKTDK

SEQ ID NO: 13632 - protein, 16 aa, Homo sapiens
  ( 428 )...( 443 ): >FZD5_HUMAN
RIRSVIKQGGTKTDKL

SEQ ID NO: 13633 - protein, 16 aa, Homo sapiens
  ( 403 )...( 418 ): >FZD6_HUMAN
DGRNQEKLKKFMIRIG

SEQ ID NO: 13634 - protein, 16 aa, Homo sapiens
  ( 404 )...( 419 ): >FZD6_HUMAN
GRNQEKLKKFMIRIGV

SEQ ID NO: 13635 - protein, 16 aa, Homo sapiens
  ( 406 )...( 421 ): >FZD6_HUMAN
NQEKLKKFMIRIGVFS

SEQ ID NO: 13636 - protein, 16 aa, Homo sapiens
  ( 407 )...( 422 ): >FZD6_HUMAN
QEKLKKFMIRIGVFSG

SEQ ID NO: 13637 - protein, 16 aa, Homo sapiens
  ( 408 )...( 423 ): >FZD6_HUMAN
EKLKKFMIRIGVFSGL

SEQ ID NO: 13638 - protein, 16 aa, Homo sapiens
  ( 409 )...( 424 ): >FZD6_HUMAN
KLKKFMIRIGVFSGLY

SEQ ID NO: 13639 - protein, 16 aa, Homo sapiens
  ( 464 )...( 479 ): >FZD6_HUMAN
QAKAKARPELALFMIK

SEQ ID NO: 13640 - protein, 16 aa, Homo sapiens
  ( 465 )...( 480 ): >FZD6_HUMAN
AKAKARPELALFMIKY

SEQ ID NO: 13641 - protein, 16 aa, Homo sapiens
  ( 466 )...( 481 ): >FZD6_HUMAN
KAKARPELALFMIKYL

SEQ ID NO: 13642 - protein, 16 aa, Homo sapiens
  ( 441 )...( 456 ): >FZD7_HUMAN
LAGFVSFFRIRTIMKH

SEQ ID NO: 13643 - protein, 16 aa, Homo sapiens
  ( 501 )...( 516 ): >FZD8_HUMAN
LAGFVSLFRIRSVIKQ

SEQ ID NO: 13644 - protein, 16 aa, Homo sapiens
  ( 502 )...( 517 ): >FZD8_HUMAN
AGFVSLFRIRSVIKQQ

SEQ ID NO: 13645 - protein, 16 aa, Homo sapiens
  ( 507 )...( 522 ): >FZD8_HUMAN
LFRIRSVIKQQDGPTK

SEQ ID NO: 13646 - protein, 16 aa, Homo sapiens
  ( 508 )...( 523 ): >FZD8_HUMAN
FRIRSVIKQQDGPTKT

SEQ ID NO: 13647 - protein, 16 aa, Homo sapiens
  ( 420 )...( 435 ): >FZD9_HUMAN
GFVALFHIRKIMKTGG

SEQ ID NO: 13648 - protein, 16 aa, Homo sapiens
  ( 536 )...( 551 ): >FZD9_HUMAN
TWQSLCYRKIAAGRAR

SEQ ID NO: 13649 - protein, 16 aa, Homo sapiens
  ( 537 )...( 552 ): >FZD9_HUMAN
WQSLCYRKIAAGRARA

SEQ ID NO: 13650 - protein, 16 aa, Homo sapiens
  ( 538 )...( 553 ): >FZD9_HUMAN
QSLCYRKIAAGRARAK

SEQ ID NO: 13651 - protein, 16 aa, Homo sapiens
  ( 539 )...( 554 ): >FZD9_HUMAN
SLCYRKIAAGRARAKA

SEQ ID NO: 13652 - protein, 16 aa, Homo sapiens
  ( 51 )...( 66 ): >GALR_HUMAN
NSLVITVLARSKPGKP

SEQ ID NO: 13653 - protein, 16 aa, Homo sapiens
  ( 52 )...( 67 ): >GALR_HUMAN
SLVITVLARSKPGKPR

SEQ ID NO: 13654 - protein, 16 aa, Homo sapiens
  ( 53 )...( 68 ): >GALR_HUMAN
LVITVLARSKPGKPRS

SEQ ID NO: 13655 - protein, 16 aa, Homo sapiens
  ( 54 )...( 69 ): >GALR_HUMAN
VITVLARSKPGKPRST

SEQ ID NO: 13656 - protein, 16 aa, Homo sapiens
  ( 55 )...( 70 ): >GALR_HUMAN
ITVLARSKPGKPRSTT

SEQ ID NO: 13657 - protein, 16 aa, Homo sapiens
  ( 56 )...( 71 ): >GALR_HUMAN
TVLARSKPGKPRSTTN

SEQ ID NO: 13658 - protein, 16 aa, Homo sapiens
  ( 57 )...( 72 ): >GALR_HUMAN
VLARSKPGKPRSTTNL

SEQ ID NO: 13659 - protein, 16 aa, Homo sapiens
  ( 60 )...( 75 ): >GALR_HUMAN
RSKPGKPRSTTNLFIL

SEQ ID NO: 13660 - protein, 16 aa, Homo sapiens
  ( 133 )...( 148 ): >GALR_HUMAN
RYVAIVHSRRSSSLRV

SEQ ID NO: 13661 - protein, 16 aa, Homo sapiens
  ( 134 )...( 149 ): >GALR_HUMAN
YVAIVHSRRSSSLRVS

SEQ ID NO: 13662 - protein, 16 aa, Homo sapiens
  ( 135 )...( 150 ): >GALR_HUMAN
VAIVHSRRSSSLRVSR

SEQ ID NO: 13663 - protein, 16 aa, Homo sapiens
  ( 136 )...( 151 ): >GALR_HUMAN
AIVHSRRSSSLRVSRN

SEQ ID NO: 13664 - protein, 16 aa, Homo sapiens
  ( 137 )...( 152 ): >GALR_HUMAN
IVHSRRSSSLRVSRNA

SEQ ID NO: 13665 - protein, 16 aa, Homo sapiens
  ( 138 )...( 153 ): >GALR_HUMAN
VHSRRSSSLRVSRNAL

SEQ ID NO: 13666 - protein, 16 aa, Homo sapiens
  ( 139 )...( 154 ): >GALR_HUMAN
HSRRSSSLRVSRNALL

SEQ ID NO: 13667 - protein, 16 aa, Homo sapiens
  ( 140 )...( 155 ): >GALR_HUMAN
SRRSSSLRVSRNALLG

SEQ ID NO: 13668 - protein, 16 aa, Homo sapiens
  ( 141 )...( 156 ): >GALR_HUMAN
RRSSSLRVSRNALLGV

SEQ ID NO: 13669 - protein, 16 aa, Homo sapiens
  ( 142 )...( 157 ): >GALR_HUMAN
RSSSLRVSRNALLGVG

SEQ ID NO: 13670 - protein, 16 aa, Homo sapiens
  ( 230 )...( 245 ): >GALR_HUMAN
KLKNMSKKSEASKKKT

SEQ ID NO: 13671 - protein, 16 aa, Homo sapiens
  ( 231 )...( 246 ): >GALR_HUMAN
LKNMSKKSEASKKKTA

SEQ ID NO: 13672 - protein, 16 aa, Homo sapiens
  ( 232 )...( 247 ): >GALR_HUMAN
KNMSKKSEASKKKTAQ

SEQ ID NO: 13673 - protein, 16 aa, Homo sapiens
  ( 202 )...( 217 ): >GALS_HUMAN
VLGLTYARTLRYLWRA

SEQ ID NO: 13674 - protein, 16 aa, Homo sapiens
  ( 203 )...( 218 ): >GALS_HUMAN
LGLTYARTLRYLWRAV

SEQ ID NO: 13675 - protein, 16 aa, Homo sapiens
  ( 221 )...( 236 ): >GALS_HUMAN
VAAGSGARRAKRKVTR

SEQ ID NO: 13676 - protein, 16 aa, Homo sapiens
  ( 222 )...( 237 ): >GALS_HUMAN
AAGSGARRAKRKVTRM

SEQ ID NO: 13677 - protein, 16 aa, Homo sapiens
  ( 223 )...( 238 ): >GALS_HUMAN
AGSGARRAKRKVTRMI

SEQ ID NO: 13678 - protein, 16 aa, Homo sapiens
  ( 224 )...( 239 ): >GALS_HUMAN
GSGARRAKRKVTRMIL

SEQ ID NO: 13679 - protein, 16 aa, Homo sapiens
  ( 225 )...( 240 ): >GALS_HUMAN
SGARRAKRKVTRMILI

SEQ ID NO: 13680 - protein, 16 aa, Homo sapiens
  ( 229 )...( 244 ): >GALS_HUMAN
RAKRKVTRMILIVAAL

SEQ ID NO: 13681 - protein, 16 aa, Homo sapiens
  ( 230 )...( 245 ): >GALS_HUMAN
AKRKVTRMILIVAALF

SEQ ID NO: 13682 - protein, 16 aa, Homo sapiens
  ( 231 )...( 246 ): >GALS_HUMAN
KRKVTRMILIVAALFC

SEQ ID NO: 13683 - protein, 16 aa, Homo sapiens
  ( 287 )...( 302 ): >GALS_HUMAN
VNPIVYALVSKHFRKG

SEQ ID NO: 13684 - protein, 16 aa, Homo sapiens
  ( 289 )...( 304 ): >GALS_HUMAN
PIVYALVSKHFRKGFR

SEQ ID NO: 13685 - protein, 16 aa, Homo sapiens
  ( 290 )...( 305 ): >GALS_HUMAN
IVYALVSKHFRKGFRT

SEQ ID NO: 13686 - protein, 16 aa, Homo sapiens
  ( 291 )...( 306 ): >GALS_HUMAN
VYALVSKHFRKGFRTI

SEQ ID NO: 13687 - protein, 16 aa, Homo sapiens
  ( 292 )...( 307 ): >GALS_HUMAN
YALVSKHFRKGFRTIC

SEQ ID NO: 13688 - protein, 16 aa, Homo sapiens
  ( 293 )...( 308 ): >GALS_HUMAN
ALVSKHFRKGFRTICA

SEQ ID NO: 13689 - protein, 16 aa, Homo sapiens
  ( 294 )...( 309 ): >GALS_HUMAN
LVSKHFRKGFRTICAG

SEQ ID NO: 13690 - protein, 16 aa, Homo sapiens
  ( 295 )...( 310 ): >GALS_HUMAN
VSKHFRKGFRTICAGL

SEQ ID NO: 13691 - protein, 16 aa, Homo sapiens
  ( 296 )...( 311 ): >GALS_HUMAN
SKHFRKGFRTICAGLL

SEQ ID NO: 13692 - protein, 16 aa, Homo sapiens
  ( 297 )...( 312 ): >GALS_HUMAN
KHFRKGFRTICAGLLG

SEQ ID NO: 13693 - protein, 16 aa, Homo sapiens
  ( 298 )...( 313 ): >GALS_HUMAN
HFRKGFRTICAGLLGR

SEQ ID NO: 13694 - protein, 16 aa, Homo sapiens
  ( 299 )...( 314 ): >GALS_HUMAN
FRKGFRTICAGLLGRA

SEQ ID NO: 13695 - protein, 16 aa, Homo sapiens
  ( 300 )...( 315 ): >GALS_HUMAN
RKGFRTICAGLLGRAP

SEQ ID NO: 13696 - protein, 16 aa, Homo sapiens
  ( 127 )...( 142 ): >GALT_HUMAN
PLRSRALRTPRNARAA

SEQ ID NO: 13697 - protein, 16 aa, Homo sapiens
  ( 128 )...( 143 ): >GALT_HUMAN
LRSRALRTPRNARAAV

SEQ ID NO: 13698 - protein, 16 aa, Homo sapiens
  ( 129 )...( 144 ): >GALT_HUMAN
RSRALRTPRNARAAVG

SEQ ID NO: 13699 - protein, 16 aa, Homo sapiens
  ( 130 )...( 145 ): >GALT_HUMAN
SRALRTPRNARAAVGL

SEQ ID NO: 13700 - protein, 16 aa, Homo sapiens
  ( 131 )...( 146 ): >GALT_HUMAN
RALRTPRNARAAVGLV

SEQ ID NO: 13701 - protein, 16 aa, Homo sapiens
  ( 132 )...( 147 ): >GALT_HUMAN
ALRTPRNARAAVGLVW

SEQ ID NO: 13702 - protein, 16 aa, Homo sapiens
  ( 133 )...( 148 ): >GALT_HUMAN
LRTPRNARAAVGLVWL

SEQ ID NO: 13703 - protein, 16 aa, Homo sapiens
  ( 134 )...( 149 ): >GALT_HUMAN
RTPRNARAAVGLVWLL

SEQ ID NO: 13704 - protein, 16 aa, Homo sapiens
  ( 222 )...( 237 ): >GALT_HUMAN
AAEARRRATGRAGRAM

SEQ ID NO: 13705 - protein, 16 aa, Homo sapiens
  ( 223 )...( 238 ): >GALT_HUMAN
AEARRRATGRAGRAML

SEQ ID NO: 13706 - protein, 16 aa, Homo sapiens
  ( 224 )...( 239 ): >GALT_HUMAN
EARRRATGRAGRAMLA

SEQ ID NO: 13707 - protein, 16 aa, Homo sapiens
  ( 225 )...( 240 ): >GALT_HUMAN
ARRRATGRAGRAMLAV

SEQ ID NO: 13708 - protein, 16 aa, Homo sapiens
  ( 226 )...( 241 ): >GALT_HUMAN
RRRATGRAGRAMLAVA

SEQ ID NO: 13709 - protein, 16 aa, Homo sapiens
  ( 316 )...( 331 ): >GALT_HUMAN
ARRALRRVRPASSGPP

SEQ ID NO: 13710 - protein, 16 aa, Homo sapiens
  ( 317 )...( 332 ): >GALT_HUMAN
RRALRRVRPASSGPPG

SEQ ID NO: 13711 - protein, 16 aa, Homo sapiens
  ( 71 )...( 86 ): >GASR_HUMAN
GNMLIIVVLGLSRRLR

SEQ ID NO: 13712 - protein, 16 aa, Homo sapiens
  ( 72 )...( 87 ): >GASR_HUMAN
NMLIIVVLGLSRRLRT

SEQ ID NO: 13713 - protein, 16 aa, Homo sapiens
  ( 75 )...( 90 ): >GASR_HUMAN
IIVVLGLSRRLRTVTN

SEQ ID NO: 13714 - protein, 16 aa, Homo sapiens
  ( 76 )...( 91 ): >GASR_HUMAN
IVVLGLSRRLRTVTNA

SEQ ID NO: 13715 - protein, 16 aa, Homo sapiens
  ( 77 )...( 92 ): >GASR_HUMAN
VVLGLSRRLRTVTNAF

SEQ ID NO: 13716 - protein, 16 aa, Homo sapiens
  ( 78 )...( 93 ): >GASR_HUMAN
VLGLSRRLRTVTNAFL

SEQ ID NO: 13717 - protein, 16 aa, Homo sapiens
  ( 79 )...( 94 ): >GASR_HUMAN
LGLSRRLRTVTNAFLL

SEQ ID NO: 13718 - protein, 16 aa, Homo sapiens
  ( 80 )...( 95 ): >GASR_HUMAN
GLSRRLRTVTNAFLLS

SEQ ID NO: 13719 - protein, 16 aa, Homo sapiens
  ( 81 )...( 96 ): >GASR_HUMAN
LSRRLRTVTNAFLLSL

SEQ ID NO: 13720 - protein, 16 aa, Homo sapiens
  ( 82 )...( 97 ): >GASR_HUMAN
SRRLRTVTNAFLLSLA

SEQ ID NO: 13721 - protein, 16 aa, Homo sapiens
  ( 83 )...( 98 ): >GASR_HUMAN
RRLRTVTNAFLLSLAV

SEQ ID NO: 13722 - protein, 16 aa, Homo sapiens
  ( 152 )...( 167 ): >GASR_HUMAN
RYSAICRPLQARVWQT

SEQ ID NO: 13723 - protein, 16 aa, Homo sapiens
  ( 153 )...( 168 ): >GASR_HUMAN
YSAICRPLQARVWQTR

SEQ ID NO: 13724 - protein, 16 aa, Homo sapiens
  ( 154 )...( 169 ): >GASR_HUMAN
SAICRPLQARVWQTRS

SEQ ID NO: 13725 - protein, 16 aa, Homo sapiens
  ( 155 )...( 170 ): >GASR_HUMAN
AICRPLQARVWQTRSH

SEQ ID NO: 13726 - protein, 16 aa, Homo sapiens
  ( 156 )...( 171 ): >GASR_HUMAN
ICRPLQARVWQTRSHA

SEQ ID NO: 13727 - protein, 16 aa, Homo sapiens
  ( 159 )...( 174 ): >GASR_HUMAN
PLQARVWQTRSHAARV

SEQ ID NO: 13728 - protein, 16 aa, Homo sapiens
  ( 160 )...( 175 ): >GASR_HUMAN
LQARVWQTRSHAARVI

SEQ ID NO: 13729 - protein, 16 aa, Homo sapiens
  ( 161 )...( 176 ): >GASR_HUMAN
QARVWQTRSHAARVIV

SEQ ID NO: 13730 - protein, 16 aa, Homo sapiens
  ( 162 )...( 177 ): >GASR_HUMAN
ARVWQTRSHAARVIVA

SEQ ID NO: 13731 - protein, 16 aa, Homo sapiens
  ( 163 )...( 178 ): >GASR_HUMAN
RVWQTRSHAARVIVAT

SEQ ID NO: 13732 - protein, 16 aa, Homo sapiens
  ( 202 )...( 217 ): >GASR_HUMAN
VLQCVHRWPSARVRQT

SEQ ID NO: 13733 - protein, 16 aa, Homo sapiens
  ( 315 )...( 330 ): >GASR_HUMAN
GSGSRPTQAKLLAKKR

SEQ ID NO: 13734 - protein, 16 aa, Homo sapiens
  ( 316 )...( 331 ): >GASR_HUMAN
SGSRPTQAKLLAKKRV

SEQ ID NO: 13735 - protein, 16 aa, Homo sapiens
  ( 317 )...( 332 ): >GASR_HUMAN
GSRPTQAKLLAKKRVV

SEQ ID NO: 13736 - protein, 16 aa, Homo sapiens
  ( 318 )...( 333 ): >GASR_HUMAN
SRPTQAKLLAKKRVVR

SEQ ID NO: 13737 - protein, 16 aa, Homo sapiens
  ( 319 )...( 334 ): >GASR_HUMAN
RPTQAKLLAKKRVVRM

SEQ ID NO: 13738 - protein, 16 aa, Homo sapiens
  ( 320 )...( 335 ): >GASR_HUMAN
PTQAKLLAKKRVVRML

SEQ ID NO: 13739 - protein, 16 aa, Homo sapiens
  ( 321 )...( 336 ): >GASR_HUMAN
TQAKLLAKKRVVRMLL

SEQ ID NO: 13740 - protein, 16 aa, Homo sapiens
  ( 322 )...( 337 ): >GASR_HUMAN
QAKLLAKKRVVRMLLV

SEQ ID NO: 13741 - protein, 16 aa, Homo sapiens
  ( 323 )...( 338 ): >GASR_HUMAN
AKLLAKKRVVRMLLVI

SEQ ID NO: 13742 - protein, 16 aa, Homo sapiens
  ( 39 )...( 54 ): >GBR1_HUMAN
GGIRYRGLTRDQVKAI

SEQ ID NO: 13743 - protein, 16 aa, Homo sapiens
  ( 40 )...( 55 ): >GBR1_HUMAN
GIRYRGLTRDQVKAIN

SEQ ID NO: 13744 - protein, 16 aa, Homo sapiens
  ( 41 )...( 56 ): >GBR1_HUMAN
IRYRGLTRDQVKAINF

SEQ ID NO: 13745 - protein, 16 aa, Homo sapiens
  ( 65 )...( 80 ): >GBR1_HUMAN
YVCRGEREVVGPKVRK

SEQ ID NO: 13746 - protein, 16 aa, Homo sapiens
  ( 66 )...( 81 ): >GBR1_HUMAN
VCRGEREVVGPKVRKC

SEQ ID NO: 13747 - protein, 16 aa, Homo sapiens
  ( 67 )...( 82 ): >GBR1_HUMAN
CRGEREVVGPKVRKCL

SEQ ID NO: 13748 - protein, 16 aa, Homo sapiens
  ( 68 )...( 83 ): >GBR1_HUMAN
RGEREVVGPKVRKCLA

SEQ ID NO: 13749 - protein, 16 aa, Homo sapiens
  ( 71 )...( 86 ): >GBR1_HUMAN
REVVGPKVRKCLANGS

SEQ ID NO: 13750 - protein, 16 aa, Homo sapiens
  ( 298 )...( 313 ): >GBR1_HUMAN
VKLFEKWGWKKIATIQ

SEQ ID NO: 13751 - protein, 16 aa, Homo sapiens
  ( 347 )...( 362 ): >GBR1_HUMAN
PAVPVKNLKRQDARII

SEQ ID NO: 13752 - protein, 16 aa, Homo sapiens
  ( 348 )...( 363 ): >GBR1_HUMAN
AVPVKNLKRQDARIIV

SEQ ID NO: 13753 - protein, 16 aa, Homo sapiens
  ( 349 )...( 364 ): >GBR1_HUMAN
VPVKNLKRQDARIIVG

SEQ ID NO: 13754 - protein, 16 aa, Homo sapiens
  ( 350 )...( 365 ): >GBR1_HUMAN
PVKNLKRQDARIIVGL

SEQ ID NO: 13755 - protein, 16 aa, Homo sapiens
  ( 351 )...( 366 ): >GBR1_HUMAN
VKNLKRQDARIIVGLF

SEQ ID NO: 13756 - protein, 16 aa, Homo sapiens
  ( 352 )...( 367 ): >GBR1_HUMAN
KNLKRQDARIIVGLFY

SEQ ID NO: 13757 - protein, 16 aa, Homo sapiens
  ( 371 )...( 386 ): >GBR1_HUMAN
ARKVFCEVYKERLFGK

SEQ ID NO: 13758 - protein, 16 aa, Homo sapiens
  ( 441 )...( 456 ): >GBR1_HUMAN
MTSQEFVEKLTKRLKR

SEQ ID NO: 13759 - protein, 16 aa, Homo sapiens
  ( 577 )...( 592 ): >GBR1_HUMAN
QTLVIKTFRFLSQKLF

SEQ ID NO: 13760 - protein, 16 aa, Homo sapiens
  ( 764 )...( 779 ): >GBR1_HUMAN
RKMNTWLGIFYGYKGL

SEQ ID NO: 13761 - protein, 16 aa, Homo sapiens
  ( 844 )...( 859 ): >GBR1_HUMAN
SSYITLVVLFVPKMRR

SEQ ID NO: 13762 - protein, 16 aa, Homo sapiens
  ( 850 )...( 865 ): >GBR1_HUMAN
VVLFVPKMRRLITRGE

SEQ ID NO: 13763 - protein, 16 aa, Homo sapiens
  ( 851 )...( 866 ): >GBR1_HUMAN
VLFVPKMRRLITRGEW

SEQ ID NO: 13764 - protein, 16 aa, Homo sapiens
  ( 184 )...( 199 ): >GBR2_HUMAN
PAILKLLKHYQWKRVG

SEQ ID NO: 13765 - protein, 16 aa, Homo sapiens
  ( 185 )...( 200 ): >GBR2_HUMAN
AILKLLKHYQWKRVGT

SEQ ID NO: 13766 - protein, 16 aa, Homo sapiens
  ( 187 )...( 202 ): >GBR2_HUMAN
LKLLKHYQWKRVGTLT

SEQ ID NO: 13767 - protein, 16 aa, Homo sapiens
  ( 236 )...( 251 ): >GBR2_HUMAN
PCTSVKKLKGNDVRII

SEQ ID NO: 13768 - protein, 16 aa, Homo sapiens
  ( 237 )...( 252 ): >GBR2_HUMAN
CTSVKKLKGNDVRIIL

SEQ ID NO: 13769 - protein, 16 aa, Homo sapiens
  ( 238 )...( 253 ): >GBR2_HUMAN
TSVKKLKGNDVRIILG

SEQ ID NO: 13770 - protein, 16 aa, Homo sapiens
  ( 239 )...( 254 ): >GBR2_HUMAN
SVKKLKGNDVRIILGQ

SEQ ID NO: 13771 - protein, 16 aa, Homo sapiens
  ( 240 )...( 255 ): >GBR2_HUMAN
VKKLKGNDVRIILGQF

SEQ ID NO: 13772 - protein, 16 aa, Homo sapiens
  ( 577 )...( 592 ): >GBR2_HUMAN
RVHAIFKNVKMKKKII

SEQ ID NO: 13773 - protein, 16 aa, Homo sapiens
  ( 578 )...( 593 ): >GBR2_HUMAN
VHAIFKNVKMKKKIIK

SEQ ID NO: 13774 - protein, 16 aa, Homo sapiens
  ( 580 )...( 595 ): >GBR2_HUMAN
AIFKNVKMKKKIIKDQ

SEQ ID NO: 13775 - protein, 16 aa, Homo sapiens
  ( 584 )...( 599 ): >GBR2_HUMAN
NVKMKKKIIKDQKLLV

SEQ ID NO: 13776 - protein, 16 aa, Homo sapiens
  ( 585 )...( 600 ): >GBR2_HUMAN
VKMKKKIIKDQKLLVI

SEQ ID NO: 13777 - protein, 16 aa, Homo sapiens
  ( 586 )...( 601 ): >GBR2_HUMAN
KMKKKIIKDQKLLVIV

SEQ ID NO: 13778 - protein, 16 aa, Homo sapiens
  ( 587 )...( 602 ): >GBR2_HUMAN
MKKKIIKDQKLLVIVG

SEQ ID NO: 13779 - protein, 16 aa, Homo sapiens
  ( 588 )...( 603 ): >GBR2_HUMAN
KKKIIKDQKLLVIVGG

SEQ ID NO: 13780 - protein, 16 aa, Homo sapiens
  ( 589 )...( 604 ): >GBR2_HUMAN
KKIIKDQKLLVIVGGM

SEQ ID NO: 13781 - protein, 16 aa, Homo sapiens
  ( 141 )...( 156 ): >GHSR_HUMAN
RYFAICFPLRAKVVVT

SEQ ID NO: 13782 - protein, 16 aa, Homo sapiens
  ( 144 )...( 159 ): >GHSR_HUMAN
AICFPLRAKVVVTKGR

SEQ ID NO: 13783 - protein, 16 aa, Homo sapiens
  ( 145 )...( 160 ): >GHSR_HUMAN
ICFPLRAKVVVTKGRV

SEQ ID NO: 13784 - protein, 16 aa, Homo sapiens
  ( 146 )...( 161 ): >GHSR_HUMAN
CFPLRAKVVVTKGRVK

SEQ ID NO: 13785 - protein, 16 aa, Homo sapiens
  ( 147 )...( 162 ): >GHSR_HUMAN
FPLRAKVVVTKGRVKL

SEQ ID NO: 13786 - protein, 16 aa, Homo sapiens
  ( 148 )...( 163 ): >GHSR_HUMAN
PLRAKVVVTKGRVKLV

SEQ ID NO: 13787 - protein, 16 aa, Homo sapiens
  ( 150 )...( 165 ): >GHSR_HUMAN
RAKVVVTKGRVKLVIF

SEQ ID NO: 13788 - protein, 16 aa, Homo sapiens
  ( 227 )...( 242 ): >GHSR_HUMAN
CLTVLYSLIGRKLWRR

SEQ ID NO: 13789 - protein, 16 aa, Homo sapiens
  ( 233 )...( 248 ): >GHSR_HUMAN
SLIGRKLWRRRRGDAV

SEQ ID NO: 13790 - protein, 16 aa, Homo sapiens
  ( 237 )...( 252 ): >GHSR_HUMAN
RKLWRRRRGDAVVGAS

SEQ ID NO: 13791 - protein, 16 aa, Homo sapiens
  ( 238 )...( 253 ): >GHSR_HUMAN
KLWRRRRGDAVVGASL

SEQ ID NO: 13792 - protein, 16 aa, Homo sapiens
  ( 239 )...( 254 ): >GHSR_HUMAN
LWRRRRGDAVVGASLR

SEQ ID NO: 13793 - protein, 16 aa, Homo sapiens
  ( 240 )...( 255 ): >GHSR_HUMAN
WRRRRGDAVVGASLRD

SEQ ID NO: 13794 - protein, 16 aa, Homo sapiens
  ( 241 )...( 256 ): >GHSR_HUMAN
RRRRGDAVVGASLRDQ

SEQ ID NO: 13795 - protein, 16 aa, Homo sapiens
  ( 317 )...( 332 ): >GHSR_HUMAN
AINPILYNIMSKKYRV

SEQ ID NO: 13796 - protein, 16 aa, Homo sapiens
  ( 318 )...( 333 ): >GHSR_HUMAN
INPILYNIMSKKYRVA

SEQ ID NO: 13797 - protein, 16 aa, Homo sapiens
  ( 319 )...( 334 ): >GHSR_HUMAN
NPILYNIMSKKYRVAV

SEQ ID NO: 13798 - protein, 16 aa, Homo sapiens
  ( 320 )...( 335 ): >GHSR_HUMAN
PILYNIMSKKYRVAVF

SEQ ID NO: 13799 - protein, 16 aa, Homo sapiens
  ( 324 )...( 339 ): >GHSR_HUMAN
NIMSKKYRVAVFRLLG

SEQ ID NO: 13800 - protein, 16 aa, Homo sapiens
  ( 325 )...( 340 ): >GHSR_HUMAN
IMSKKYRVAVFRLLGF

SEQ ID NO: 13801 - protein, 16 aa, Homo sapiens
  ( 326 )...( 341 ): >GHSR_HUMAN
MSKKYRVAVFRLLGFE

SEQ ID NO: 13802 - protein, 16 aa, Homo sapiens
  ( 327 )...( 342 ): >GHSR_HUMAN
SKKYRVAVFRLLGFEP

SEQ ID NO: 13803 - protein, 16 aa, Homo sapiens
  ( 154 )...( 169 ): >GIPR_HUMAN
LALLILSLFRRLHCTR

SEQ ID NO: 13804 - protein, 16 aa, Homo sapiens
  ( 155 )...( 170 ): >GIPR_HUMAN
ALLILSLFRRLHCTRN

SEQ ID NO: 13805 - protein, 16 aa, Homo sapiens
  ( 181 )...( 196 ): >GIPR_HUMAN
MLRAAAILSRDRLLPR

SEQ ID NO: 13806 - protein, 16 aa, Homo sapiens
  ( 182 )...( 197 ): >GIPR_HUMAN
LRAAAILSRDRLLPRP

SEQ ID NO: 13807 - protein, 16 aa, Homo sapiens
  ( 183 )...( 198 ): >GIPR_HUMAN
RAAAILSRDRLLPRPG

SEQ ID NO: 13808 - protein, 16 aa, Homo sapiens
  ( 314 )...( 329 ): >GIPR_HUMAN
FIRILGILLSKLRTRQ

SEQ ID NO: 13809 - protein, 16 aa, Homo sapiens
  ( 315 )...( 330 ): >GIPR_HUMAN
IRILGILLSKLRTRQM

SEQ ID NO: 13810 - protein, 16 aa, Homo sapiens
  ( 316 )...( 331 ): >GIPR_HUMAN
RILGILLSKLRTRQMR

SEQ ID NO: 13811 - protein, 16 aa, Homo sapiens
  ( 317 )...( 332 ): >GIPR_HUMAN
ILGILLSKLRTRQMRC

SEQ ID NO: 13812 - protein, 16 aa, Homo sapiens
  ( 318 )...( 333 ): >GIPR_HUMAN
LGILLSKLRTRQMRCR

SEQ ID NO: 13813 - protein, 16 aa, Homo sapiens
  ( 319 )...( 334 ): >GIPR_HUMAN
GILLSKLRTRQMRCRD

SEQ ID NO: 13814 - protein, 16 aa, Homo sapiens
  ( 332 )...( 347 ): >GIPR_HUMAN
CRDYRLRLARSTLTLV

SEQ ID NO: 13815 - protein, 16 aa, Homo sapiens
  ( 333 )...( 348 ): >GIPR_HUMAN
RDYRLRLARSTLTLVP

SEQ ID NO: 13816 - protein, 16 aa, Homo sapiens
  ( 336 )...( 351 ): >GIPR_HUMAN
RLRLARSTLTLVPLLG

SEQ ID NO: 13817 - protein, 16 aa, Homo sapiens
  ( 323 )...( 338 ): >GLP1_HUMAN
IFVRVICIVVSKLKAN

SEQ ID NO: 13818 - protein, 16 aa, Homo sapiens
  ( 324 )...( 339 ): >GLP1_HUMAN
FVRVICIVVSKLKANL

SEQ ID NO: 13819 - protein, 16 aa, Homo sapiens
  ( 325 )...( 340 ): >GLP1_HUMAN
VRVICIVVSKLKANLM

SEQ ID NO: 13820 - protein, 16 aa, Homo sapiens
  ( 326 )...( 341 ): >GLP1_HUMAN
RVICIVVSKLKANLMC

SEQ ID NO: 13821 - protein, 16 aa, Homo sapiens
  ( 334 )...( 349 ): >GLP1_HUMAN
KLKANLMCKTDIKCRL

SEQ ID NO: 13822 - protein, 16 aa, Homo sapiens
  ( 346 )...( 361 ): >GLP1_HUMAN
KCRLAKSTLTLIPLLG

SEQ ID NO: 13823 - protein, 16 aa, Homo sapiens
  ( 196 )...( 211 ): >GLP2_HUMAN
ALTLLLFLRKLHCTRN

SEQ ID NO: 13824 - protein, 16 aa, Homo sapiens
  ( 198 )...( 213 ): >GLP2_HUMAN
TLLLFLRKLHCTRNYI

SEQ ID NO: 13825 - protein, 16 aa, Homo sapiens
  ( 332 )...( 347 ): >GLP2_HUMAN
TTNGNKKIWWIIRGPM

SEQ ID NO: 13826 - protein, 16 aa, Homo sapiens
  ( 358 )...( 373 ): >GLP2_HUMAN
FLKILKLLISKLKAHQ

SEQ ID NO: 13827 - protein, 16 aa, Homo sapiens
  ( 359 )...( 374 ): >GLP2_HUMAN
LKILKLLISKLKAHQM

SEQ ID NO: 13828 - protein, 16 aa, Homo sapiens
  ( 360 )...( 375 ): >GLP2_HUMAN
KILKLLISKLKAHQMC

SEQ ID NO: 13829 - protein, 16 aa, Homo sapiens
  ( 362 )...( 377 ): >GLP2_HUMAN
LKLLISKLKAHQMCFR

SEQ ID NO: 13830 - protein, 16 aa, Homo sapiens
  ( 377 )...( 392 ): >GLP2_HUMAN
RDYKYRLAKSTLVLIP

SEQ ID NO: 13831 - protein, 16 aa, Homo sapiens
  ( 466 )...( 481 ): >GLP2_HUMAN
VLGKDFRFLGKCPKKL

SEQ ID NO: 13832 - protein, 16 aa, Homo sapiens
  ( 486 )...( 501 ): >GLP2_HUMAN
GAEKLRKLQPSLNSGR

SEQ ID NO: 13833 - protein, 16 aa, Homo sapiens
  ( 487 )...( 502 ): >GLP2_HUMAN
AEKLRKLQPSLNSGRL

SEQ ID NO: 13834 - protein, 16 aa, Homo sapiens
  ( 488 )...( 503 ): >GLP2_HUMAN
EKLRKLQPSLNSGRLL

SEQ ID NO: 13835 - protein, 16 aa, Homo sapiens
  ( 489 )...( 504 ): >GLP2_HUMAN
KLRKLQPSLNSGRLLH

SEQ ID NO: 13836 - protein, 16 aa, Homo sapiens
  ( 490 )...( 505 ): >GLP2_HUMAN
LRKLQPSLNSGRLLHL

SEQ ID NO: 13837 - protein, 16 aa, Homo sapiens
  ( 491 )...( 506 ): >GLP2_HUMAN
RKLQPSLNSGRLLHLA

SEQ ID NO: 13838 - protein, 16 aa, Homo sapiens
  ( 322 )...( 337 ): >GLR_HUMAN
FVRIVQLLVAKLRARQ

SEQ ID NO: 13839 - protein, 16 aa, Homo sapiens
  ( 323 )...( 338 ): >GLR_HUMAN
VRIVQLLVAKLRARQM

SEQ ID NO: 13840 - protein, 16 aa, Homo sapiens
  ( 324 )...( 339 ): >GLR_HUMAN
RIVQLLVAKLRARQMH

SEQ ID NO: 13841 - protein, 16 aa, Homo sapiens
  ( 325 )...( 340 ): >GLR_HUMAN
IVQLLVAKLRARQMHH

SEQ ID NO: 13842 - protein, 16 aa, Homo sapiens
  ( 326 )...( 341 ): >GLR_HUMAN
VQLLVAKLRARQMHHT

SEQ ID NO: 13843 - protein, 16 aa, Homo sapiens
  ( 344 )...( 359 ): >GLR_HUMAN
KFRLAKSTLTLIPLLG

SEQ ID NO: 13844 - protein, 16 aa, Homo sapiens
  ( 1 )...( 16 ): >GP37_HUMAN
MRAPGALLARMSRLLL

SEQ ID NO: 13845 - protein, 16 aa, Homo sapiens
  ( 2 )...( 17 ): >GP37_HUMAN
RAPGALLARMSRLLLL

SEQ ID NO: 13846 - protein, 16 aa, Homo sapiens
  ( 184 )...( 199 ): >GP37_HUMAN
RRAGKLQGSHHKPLSK

SEQ ID NO: 13847 - protein, 16 aa, Homo sapiens
  ( 231 )...( 246 ): >GP37_HUMAN
EPGGPRRGNSTNRRVR

SEQ ID NO: 13848 - protein, 16 aa, Homo sapiens
  ( 232 )...( 247 ): >GP37_HUMAN
PGGPRRGNSTNRRVRL

SEQ ID NO: 13849 - protein, 16 aa, Homo sapiens
  ( 455 )...( 470 ): >GP37_HUMAN
TLFTITCSLVTARKIR

SEQ ID NO: 13850 - protein, 16 aa, Homo sapiens
  ( 456 )...( 471 ): >GP37_HUMAN
LFTITCSLVTARKIRK

SEQ ID NO: 13851 - protein, 16 aa, Homo sapiens
  ( 457 )...( 472 ): >GP37_HUMAN
FTITCSLVTARKIRKA

SEQ ID NO: 13852 - protein, 16 aa, Homo sapiens
  ( 458 )...( 473 ): >GP37_HUMAN
TITCSLVTARKIRKAE

SEQ ID NO: 13853 - protein, 16 aa, Homo sapiens
  ( 459 )...( 474 ): >GP37_HUMAN
ITCSLVTARKIRKAEK

SEQ ID NO: 13854 - protein, 16 aa, Homo sapiens
  ( 460 )...( 475 ): >GP37_HUMAN
TCSLVTARKIRKAEKA

SEQ ID NO: 13855 - protein, 16 aa, Homo sapiens
  ( 461 )...( 476 ): >GP37_HUMAN
CSLVTARKIRKAEKAC

SEQ ID NO: 13856 - protein, 16 aa, Homo sapiens
  ( 462 )...( 477 ): >GP37_HUMAN
SLVTARKIRKAEKACT

SEQ ID NO: 13857 - protein, 16 aa, Homo sapiens
  ( 463 )...( 478 ): >GP37_HUMAN
LVTARKIRKAEKACTR

SEQ ID NO: 13858 - protein, 16 aa, Homo sapiens
  ( 464 )...( 479 ): >GP37_HUMAN
VTARKIRKAEKACTRG

SEQ ID NO: 13859 - protein, 16 aa, Homo sapiens
  ( 465 )...( 480 ): >GP37_HUMAN
TARKIRKAEKACTRGN

SEQ ID NO: 13860 - protein, 16 aa, Homo sapiens
  ( 466 )...( 481 ): >GP37_HUMAN
ARKIRKAEKACTRGNK

SEQ ID NO: 13861 - protein, 16 aa, Homo sapiens
  ( 468 )...( 483 ): >GP37_HUMAN
KIRKAEKACTRGNKRQ

SEQ ID NO: 13862 - protein, 16 aa, Homo sapiens
  ( 469 )...( 484 ): >GP37_HUMAN
IRKAEKACTRGNKRQI

SEQ ID NO: 13863 - protein, 16 aa, Homo sapiens
  ( 470 )...( 485 ): >GP37_HUMAN
RKAEKACTRGNKRQIQ

SEQ ID NO: 13864 - protein, 16 aa, Homo sapiens
  ( 471 )...( 486 ): >GP37_HUMAN
KAEKACTRGNKRQIQL

SEQ ID NO: 13865 - protein, 16 aa, Homo sapiens
  ( 474 )...( 489 ): >GP37_HUMAN
KACTRGNKRQIQLESQ

SEQ ID NO: 13866 - protein, 16 aa, Homo sapiens
  ( 46 )...( 61 ): >GP39_HUMAN
LGNSATIRVTQVLQKK

SEQ ID NO: 13867 - protein, 16 aa, Homo sapiens
  ( 47 )...( 62 ): >GP39_HUMAN
GNSATIRVTQVLQKKG

SEQ ID NO: 13868 - protein, 16 aa, Homo sapiens
  ( 48 )...( 63 ): >GP39_HUMAN
NSATIRVTQVLQKKGY

SEQ ID NO: 13869 - protein, 16 aa, Homo sapiens
  ( 49 )...( 64 ): >GP39_HUMAN
SATIRVTQVLQKKGYL

SEQ ID NO: 13870 - protein, 16 aa, Homo sapiens
  ( 50 )...( 65 ): >GP39_HUMAN
ATIRVTQVLQKKGYLQ

SEQ ID NO: 13871 - protein, 16 aa, Homo sapiens
  ( 51 )...( 66 ): >GP39_HUMAN
TIRVTQVLQKKGYLQK

SEQ ID NO: 13872 - protein, 16 aa, Homo sapiens
  ( 52 )...( 67 ): >GP39_HUMAN
IRVTQVLQKKGYLQKE

SEQ ID NO: 13873 - protein, 16 aa, Homo sapiens
  ( 53 )...( 68 ): >GP39_HUMAN
RVTQVLQKKGYLQKEV

SEQ ID NO: 13874 - protein, 16 aa, Homo sapiens
  ( 142 )...( 157 ): >GP39_HUMAN
RYKAVSGPCQVKLLIG

SEQ ID NO: 13875 - protein, 16 aa, Homo sapiens
  ( 253 )...( 268 ): >GP39_HUMAN
QKGSLAGGTRPPQLRK

SEQ ID NO: 13876 - protein, 16 aa, Homo sapiens
  ( 273 )...( 288 ): >GP39_HUMAN
ESRTARRQTIIFLRLI

SEQ ID NO: 13877 - protein, 16 aa, Homo sapiens
  ( 274 )...( 289 ): >GP39_HUMAN
SRTARRQTIIFLRLIV

SEQ ID NO: 13878 - protein, 16 aa, Homo sapiens
  ( 275 )...( 290 ): >GP39_HUMAN
RTARRQTIIFLRLIVV

SEQ ID NO: 13879 - protein, 16 aa, Homo sapiens
  ( 276 )...( 291 ): >GP39_HUMAN
TARRQTIIFLRLIVVT

SEQ ID NO: 13880 - protein, 16 aa, Homo sapiens
  ( 347 )...( 362 ): >GP39_HUMAN
SSQQFRRVFVQVLCCR

SEQ ID NO: 13881 - protein, 16 aa, Homo sapiens
  ( 348 )...( 363 ): >GP39_HUMAN
SQQFRRVFVQVLCCRL

SEQ ID NO: 13882 - protein, 16 aa, Homo sapiens
  ( 349 )...( 364 ): >GP39_HUMAN
QQFRRVFVQVLCCRLS

SEQ ID NO: 13883 - protein, 16 aa, Homo sapiens
  ( 350 )...( 365 ): >GP39_HUMAN
QFRRVFVQVLCCRLSL

SEQ ID NO: 13884 - protein, 16 aa, Homo sapiens
  ( 351 )...( 366 ): >GP39_HUMAN
FRRVFVQVLCCRLSLQ

SEQ ID NO: 13885 - protein, 16 aa, Homo sapiens
  ( 352 )...( 367 ): >GP39_HUMAN
RRVFVQVLCCRLSLQH

SEQ ID NO: 13886 - protein, 16 aa, Homo sapiens
  ( 387 )...( 402 ): >GP39_HUMAN
FVQRPLLFASRRQSSA

SEQ ID NO: 13887 - protein, 16 aa, Homo sapiens
  ( 22 )...( 37 ): >GP40_HUMAN
LNVLAIRGATAHARLR

SEQ ID NO: 13888 - protein, 16 aa, Homo sapiens
  ( 23 )...( 38 ): >GP40_HUMAN
NVLAIRGATAHARLRL

SEQ ID NO: 13889 - protein, 16 aa, Homo sapiens
  ( 24 )...( 39 ): >GP40_HUMAN
VLAIRGATAHARLRLT

SEQ ID NO: 13890 - protein, 16 aa, Homo sapiens
  ( 25 )...( 40 ): >GP40_HUMAN
LAIRGATAHARLRLTP

SEQ ID NO: 13891 - protein, 16 aa, Homo sapiens
  ( 26 )...( 41 ): >GP40_HUMAN
AIRGATAHARLRLTPS

SEQ ID NO: 13892 - protein, 16 aa, Homo sapiens
  ( 27 )...( 42 ): >GP40_HUMAN
IRGATAHARLRLTPSL

SEQ ID NO: 13893 - protein, 16 aa, Homo sapiens
  ( 28 )...( 43 ): >GP40_HUMAN
RGATAHARLRLTPSLV

SEQ ID NO: 13894 - protein, 16 aa, Homo sapiens
  ( 202 )...( 217 ): >GP40_HUMAN
YVGCLRALARSGLTHR

SEQ ID NO: 13895 - protein, 16 aa, Homo sapiens
  ( 203 )...( 218 ): >GP40_HUMAN
VGCLRALARSGLTHRR

SEQ ID NO: 13896 - protein, 16 aa, Homo sapiens
  ( 204 )...( 219 ): >GP40_HUMAN
GCLRALARSGLTHRRK

SEQ ID NO: 13897 - protein, 16 aa, Homo sapiens
  ( 205 )...( 220 ): >GP40_HUMAN
CLRALARSGLTHRRKL

SEQ ID NO: 13898 - protein, 16 aa, Homo sapiens
  ( 206 )...( 221 ): >GP40_HUMAN
LRALARSGLTHRRKLR

SEQ ID NO: 13899 - protein, 16 aa, Homo sapiens
  ( 207 )...( 222 ): >GP40_HUMAN
RALARSGLTHRRKLRA

SEQ ID NO: 13900 - protein, 16 aa, Homo sapiens
  ( 208 )...( 223 ): >GP40_HUMAN
ALARSGLTHRRKLRAA

SEQ ID NO: 13901 - protein, 16 aa, Homo sapiens
  ( 209 )...( 224 ): >GP40_HUMAN
LARSGLTHRRKLRAAW

SEQ ID NO: 13902 - protein, 16 aa, Homo sapiens
  ( 210 )...( 225 ): >GP40_HUMAN
ARSGLTHRRKLRAAWV

SEQ ID NO: 13903 - protein, 16 aa, Homo sapiens
  ( 211 )...( 226 ): >GP40_HUMAN
RSGLTHRRKLRAAWVA

SEQ ID NO: 13904 - protein, 16 aa, Homo sapiens
  ( 212 )...( 227 ): >GP40_HUMAN
SGLTHRRKLRAAWVAG

SEQ ID NO: 13905 - protein, 16 aa, Homo sapiens
  ( 213 )...( 228 ): >GP40_HUMAN
GLTHRRKLRAAWVAGG

SEQ ID NO: 13906 - protein, 16 aa, Homo sapiens
  ( 214 )...( 229 ): >GP40_HUMAN
LTHRRKLRAAWVAGGA

SEQ ID NO: 13907 - protein, 16 aa, Homo sapiens
  ( 215 )...( 230 ): >GP40_HUMAN
THRRKLRAAWVAGGAL

SEQ ID NO: 13908 - protein, 16 aa, Homo sapiens
  ( 216 )...( 231 ): >GP40_HUMAN
HRRKLRAAWVAGGALL

SEQ ID NO: 13909 - protein, 16 aa, Homo sapiens
  ( 217 )...( 232 ): >GP40_HUMAN
RRKLRAAWVAGGALLT

SEQ ID NO: 13910 - protein, 16 aa, Homo sapiens
  ( 218 )...( 233 ): >GP40_HUMAN
RKLRAAWVAGGALLTL

SEQ ID NO: 13911 - protein, 16 aa, Homo sapiens
  ( 31 )...( 46 ): >GP41_HUMAN
LNLLALVVFVGKLQRR

SEQ ID NO: 13912 - protein, 16 aa, Homo sapiens
  ( 32 )...( 47 ): >GP41_HUMAN
NLLALVVFVGKLQRRP

SEQ ID NO: 13913 - protein, 16 aa, Homo sapiens
  ( 34 )...( 49 ): >GP41_HUMAN
LALVVFVGKLQRRPVA

SEQ ID NO: 13914 - protein, 16 aa, Homo sapiens
  ( 35 )...( 50 ): >GP41_HUMAN
ALVVFVGKLQRRPVAV

SEQ ID NO: 13915 - protein, 16 aa, Homo sapiens
  ( 115 )...( 130 ): >GP41_HUMAN
LSVAHPLWYKTRPRLG

SEQ ID NO: 13916 - protein, 16 aa, Homo sapiens
  ( 117 )...( 132 ): >GP41_HUMAN
VAHPLWYKTRPRLGQA

SEQ ID NO: 13917 - protein, 16 aa, Homo sapiens
  ( 119 )...( 134 ): >GP41_HUMAN
HPLWYKTRPRLGQAGL

SEQ ID NO: 13918 - protein, 16 aa, Homo sapiens
  ( 120 )...( 135 ): >GP41_HUMAN
PLWYKTRPRLGQAGLV

SEQ ID NO: 13919 - protein, 16 aa, Homo sapiens
  ( 121 )...( 136 ): >GP41_HUMAN
LWYKTRPRLGQAGLVS

SEQ ID NO: 13920 - protein, 16 aa, Homo sapiens
  ( 122 )...( 137 ): >GP41_HUMAN
WYKTRPRLGQAGLVSV

SEQ ID NO: 13921 - protein, 16 aa, Homo sapiens
  ( 123 )...( 138 ): >GP41_HUMAN
YKTRPRLGQAGLVSVA

SEQ ID NO: 13922 - protein, 16 aa, Homo sapiens
  ( 204 )...( 219 ): >GP41_HUMAN
YSRLVWILGRGGSHRR

SEQ ID NO: 13923 - protein, 16 aa, Homo sapiens
  ( 205 )...( 220 ): >GP41_HUMAN
SRLVWILGRGGSHRRQ

SEQ ID NO: 13924 - protein, 16 aa, Homo sapiens
  ( 206 )...( 221 ): >GP41_HUMAN
RLVWILGRGGSHRRQR

SEQ ID NO: 13925 - protein, 16 aa, Homo sapiens
  ( 207 )...( 222 ): >GP41_HUMAN
LVWILGRGGSHRRQRR

SEQ ID NO: 13926 - protein, 16 aa, Homo sapiens
  ( 208 )...( 223 ): >GP41_HUMAN
VWILGRGGSHRRQRRV

SEQ ID NO: 13927 - protein, 16 aa, Homo sapiens
  ( 209 )...( 224 ): >GP41_HUMAN
WILGRGGSHRRQRRVA

SEQ ID NO: 13928 - protein, 16 aa, Homo sapiens
  ( 210 )...( 225 ): >GP41_HUMAN
ILGRGGSHRRQRRVAG

SEQ ID NO: 13929 - protein, 16 aa, Homo sapiens
  ( 211 )...( 226 ): >GP41_HUMAN
LGRGGSHRRQRRVAGL

SEQ ID NO: 13930 - protein, 16 aa, Homo sapiens
  ( 212 )...( 227 ): >GP41_HUMAN
GRGGSHRRQRRVAGLL

SEQ ID NO: 13931 - protein, 16 aa, Homo sapiens
  ( 213 )...( 228 ): >GP41_HUMAN
RGGSHRRQRRVAGLLA

SEQ ID NO: 13932 - protein, 16 aa, Homo sapiens
  ( 214 )...( 229 ): >GP41_HUMAN
GGSHRRQRRVAGLLAA

SEQ ID NO: 13933 - protein, 16 aa, Homo sapiens
  ( 215 )...( 230 ): >GP41_HUMAN
GSHRRQRRVAGLLAAT

SEQ ID NO: 13934 - protein, 16 aa, Homo sapiens
  ( 216 )...( 231 ): >GP41_HUMAN
SHRRQRRVAGLLAATL

SEQ ID NO: 13935 - protein, 16 aa, Homo sapiens
  ( 217 )...( 232 ): >GP41_HUMAN
HRRQRRVAGLLAATLL

SEQ ID NO: 13936 - protein, 16 aa, Homo sapiens
  ( 218 )...( 233 ): >GP41_HUMAN
RRQRRVAGLLAATLLN

SEQ ID NO: 13937 - protein, 16 aa, Homo sapiens
  ( 219 )...( 234 ): >GP41_HUMAN
RQRRVAGLLAATLLNF

SEQ ID NO: 13938 - protein, 16 aa, Homo sapiens
  ( 32 )...( 47 ): >GP42_HUMAN
NLLALVVFVGKLRCRP

SEQ ID NO: 13939 - protein, 16 aa, Homo sapiens
  ( 34 )...( 49 ): >GP42_HUMAN
LALVVFVGKLRCRPVA

SEQ ID NO: 13940 - protein, 16 aa, Homo sapiens
  ( 115 )...( 130 ): >GP42_HUMAN
LSVAHPLWYKTRPRLG

SEQ ID NO: 13941 - protein, 16 aa, Homo sapiens
  ( 117 )...( 132 ): >GP42_HUMAN
VAHPLWYKTRPRLGQA

SEQ ID NO: 13942 - protein, 16 aa, Homo sapiens
  ( 119 )...( 134 ): >GP42_HUMAN
HPLWYKTRPRLGQAGL

SEQ ID NO: 13943 - protein, 16 aa, Homo sapiens
  ( 120 )...( 135 ): >GP42_HUMAN
PLWYKTRPRLGQAGLV

SEQ ID NO: 13944 - protein, 16 aa, Homo sapiens
  ( 121 )...( 136 ): >GP42_HUMAN
LWYKTRPRLGQAGLVS

SEQ ID NO: 13945 - protein, 16 aa, Homo sapiens
  ( 122 )...( 137 ): >GP42_HUMAN
WYKTRPRLGQAGLVSV

SEQ ID NO: 13946 - protein, 16 aa, Homo sapiens
  ( 123 )...( 138 ): >GP42_HUMAN
YKTRPRLGQAGLVSVA

SEQ ID NO: 13947 - protein, 16 aa, Homo sapiens
  ( 204 )...( 219 ): >GP42_HUMAN
YSRLVWILGRGGSHRR

SEQ ID NO: 13948 - protein, 16 aa, Homo sapiens
  ( 205 )...( 220 ): >GP42_HUMAN
SRLVWILGRGGSHRRQ

SEQ ID NO: 13949 - protein, 16 aa, Homo sapiens
  ( 206 )...( 221 ): >GP42_HUMAN
RLVWILGRGGSHRRQR

SEQ ID NO: 13950 - protein, 16 aa, Homo sapiens
  ( 207 )...( 222 ): >GP42_HUMAN
LVWILGRGGSHRRQRR

SEQ ID NO: 13951 - protein, 16 aa, Homo sapiens
  ( 208 )...( 223 ): >GP42_HUMAN
VWILGRGGSHRRQRRV

SEQ ID NO: 13952 - protein, 16 aa, Homo sapiens
  ( 209 )...( 224 ): >GP42_HUMAN
WILGRGGSHRRQRRVA

SEQ ID NO: 13953 - protein, 16 aa, Homo sapiens
  ( 210 )...( 225 ): >GP42_HUMAN
ILGRGGSHRRQRRVAG

SEQ ID NO: 13954 - protein, 16 aa, Homo sapiens
  ( 211 )...( 226 ): >GP42_HUMAN
LGRGGSHRRQRRVAGL

SEQ ID NO: 13955 - protein, 16 aa, Homo sapiens
  ( 212 )...( 227 ): >GP42_HUMAN
GRGGSHRRQRRVAGLV

SEQ ID NO: 13956 - protein, 16 aa, Homo sapiens
  ( 213 )...( 228 ): >GP42_HUMAN
RGGSHRRQRRVAGLVA

SEQ ID NO: 13957 - protein, 16 aa, Homo sapiens
  ( 214 )...( 229 ): >GP42_HUMAN
GGSHRRQRRVAGLVAA

SEQ ID NO: 13958 - protein, 16 aa, Homo sapiens
  ( 215 )...( 230 ): >GP42_HUMAN
GSHRRQRRVAGLVAAT

SEQ ID NO: 13959 - protein, 16 aa, Homo sapiens
  ( 216 )...( 231 ): >GP42_HUMAN
SHRRQRRVAGLVAATL

SEQ ID NO: 13960 - protein, 16 aa, Homo sapiens
  ( 217 )...( 232 ): >GP42_HUMAN
HRRQRRVAGLVAATLL

SEQ ID NO: 13961 - protein, 16 aa, Homo sapiens
  ( 218 )...( 233 ): >GP42_HUMAN
RRQRRVAGLVAATLLN

SEQ ID NO: 13962 - protein, 16 aa, Homo sapiens
  ( 219 )...( 234 ): >GP42_HUMAN
RQRRVAGLVAATLLNF

SEQ ID NO: 13963 - protein, 16 aa, Homo sapiens
  ( 22 )...( 37 ): >GP43_HUMAN
LPANLLALRAFVGRIR

SEQ ID NO: 13964 - protein, 16 aa, Homo sapiens
  ( 23 )...( 38 ): >GP43_HUMAN
PANLLALRAFVGRIRQ

SEQ ID NO: 13965 - protein, 16 aa, Homo sapiens
  ( 24 )...( 39 ): >GP43_HUMAN
ANLLALRAFVGRIRQP

SEQ ID NO: 13966 - protein, 16 aa, Homo sapiens
  ( 25 )...( 40 ): >GP43_HUMAN
NLLALRAFVGRIRQPQ

SEQ ID NO: 13967 - protein, 16 aa, Homo sapiens
  ( 26 )...( 41 ): >GP43_HUMAN
LLALRAFVGRIRQPQP

SEQ ID NO: 13968 - protein, 16 aa, Homo sapiens
  ( 27 )...( 42 ): >GP43_HUMAN
LALRAFVGRIRQPQPA

SEQ ID NO: 13969 - protein, 16 aa, Homo sapiens
  ( 28 )...( 43 ): >GP43_HUMAN
ALRAFVGRIRQPQPAP

SEQ ID NO: 13970 - protein, 16 aa, Homo sapiens
  ( 29 )...( 44 ): >GP43_HUMAN
LRAFVGRIRQPQPAPV

SEQ ID NO: 13971 - protein, 16 aa, Homo sapiens
  ( 30 )...( 45 ): >GP43_HUMAN
RAFVGRIRQPQPAPVH

SEQ ID NO: 13972 - protein, 16 aa, Homo sapiens
  ( 108 )...( 123 ): >GP43_HUMAN
YLGVAFPVQYKLSRRP

SEQ ID NO: 13973 - protein, 16 aa, Homo sapiens
  ( 109 )...( 124 ): >GP43_HUMAN
LGVAFPVQYKLSRRPL

SEQ ID NO: 13974 - protein, 16 aa, Homo sapiens
  ( 110 )...( 125 ): >GP43_HUMAN
GVAFPVQYKLSRRPLY

SEQ ID NO: 13975 - protein, 16 aa, Homo sapiens
  ( 111 )...( 126 ): >GP43_HUMAN
VAFPVQYKLSRRPLYG

SEQ ID NO: 13976 - protein, 16 aa, Homo sapiens
  ( 112 )...( 127 ): >GP43_HUMAN
AFPVQYKLSRRPLYGV

SEQ ID NO: 13977 - protein, 16 aa, Homo sapiens
  ( 113 )...( 128 ): >GP43_HUMAN
FPVQYKLSRRPLYGVI

SEQ ID NO: 13978 - protein, 16 aa, Homo sapiens
  ( 114 )...( 129 ): >GP43_HUMAN
PVQYKLSRRPLYGVIA

SEQ ID NO: 13979 - protein, 16 aa, Homo sapiens
  ( 115 )...( 130 ): >GP43_HUMAN
VQYKLSRRPLYGVIAA

SEQ ID NO: 13980 - protein, 16 aa, Homo sapiens
  ( 116 )...( 131 ): >GP43_HUMAN
QYKLSRRPLYGVIAAL

SEQ ID NO: 13981 - protein, 16 aa, Homo sapiens
  ( 117 )...( 132 ): >GP43_HUMAN
YKLSRRPLYGVIAALV

SEQ ID NO: 13982 - protein, 16 aa, Homo sapiens
  ( 118 )...( 133 ): >GP43_HUMAN
KLSRRPLYGVIAALVA

SEQ ID NO: 13983 - protein, 16 aa, Homo sapiens
  ( 203 )...( 218 ): >GP43_HUMAN
VWIMLSQPLVGAQRRR

SEQ ID NO: 13984 - protein, 16 aa, Homo sapiens
  ( 205 )...( 220 ): >GP43_HUMAN
IMLSQPLVGAQRRRRA

SEQ ID NO: 13985 - protein, 16 aa, Homo sapiens
  ( 206 )...( 221 ): >GP43_HUMAN
MLSQPLVGAQRRRRAV

SEQ ID NO: 13986 - protein, 16 aa, Homo sapiens
  ( 207 )...( 222 ): >GP43_HUMAN
LSQPLVGAQRRRRAVG

SEQ ID NO: 13987 - protein, 16 aa, Homo sapiens
  ( 208 )...( 223 ): >GP43_HUMAN
SQPLVGAQRRRRAVGL

SEQ ID NO: 13988 - protein, 16 aa, Homo sapiens
  ( 209 )...( 224 ): >GP43_HUMAN
QPLVGAQRRRRAVGLA

SEQ ID NO: 13989 - protein, 16 aa, Homo sapiens
  ( 210 )...( 225 ): >GP43_HUMAN
PLVGAQRRRRAVGLAV

SEQ ID NO: 13990 - protein, 16 aa, Homo sapiens
  ( 213 )...( 228 ): >GP43_HUMAN
GAQRRRRAVGLAVVTL

SEQ ID NO: 13991 - protein, 16 aa, Homo sapiens
  ( 214 )...( 229 ): >GP43_HUMAN
AQRRRRAVGLAVVTLL

SEQ ID NO: 13992 - protein, 16 aa, Homo sapiens
  ( 215 )...( 230 ): >GP43_HUMAN
QRRRRAVGLAVVTLLN

SEQ ID NO: 13993 - protein, 16 aa, Homo sapiens
  ( 216 )...( 231 ): >GP43_HUMAN
RRRRAVGLAVVTLLNF

SEQ ID NO: 13994 - protein, 16 aa, Homo sapiens
  ( 217 )...( 232 ): >GP43_HUMAN
RRRAVGLAVVTLLNFL

SEQ ID NO: 13995 - protein, 16 aa, Homo sapiens
  ( 274 )...( 289 ): >GP43_HUMAN
YFSSSVVRRAFGRGLQ

SEQ ID NO: 13996 - protein, 16 aa, Homo sapiens
  ( 275 )...( 290 ): >GP43_HUMAN
FSSSVVRRAFGRGLQV

SEQ ID NO: 13997 - protein, 16 aa, Homo sapiens
  ( 276 )...( 291 ): >GP43_HUMAN
SSSVVRRAFGRGLQVL

SEQ ID NO: 13998 - protein, 16 aa, Homo sapiens
  ( 277 )...( 292 ): >GP43_HUMAN
SSVVRRAFGRGLQVLR

SEQ ID NO: 13999 - protein, 16 aa, Homo sapiens
  ( 278 )...( 293 ): >GP43_HUMAN
SVVRRAFGRGLQVLRN

SEQ ID NO: 14000 - protein, 16 aa, Homo sapiens
  ( 279 )...( 294 ): >GP43_HUMAN
VVRRAFGRGLQVLRNQ

SEQ ID NO: 14001 - protein, 16 aa, Homo sapiens
  ( 280 )...( 295 ): >GP43_HUMAN
VRRAFGRGLQVLRNQG

SEQ ID NO: 14002 - protein, 16 aa, Homo sapiens
  ( 281 )...( 296 ): >GP43_HUMAN
RRAFGRGLQVLRNQGS

SEQ ID NO: 14003 - protein, 16 aa, Homo sapiens
  ( 282 )...( 297 ): >GP43_HUMAN
RAFGRGLQVLRNQGSS

SEQ ID NO: 14004 - protein, 16 aa, Homo sapiens
  ( 286 )...( 301 ): >GP43_HUMAN
RGLQVLRNQGSSLLGR

SEQ ID NO: 14005 - protein, 16 aa, Homo sapiens
  ( 287 )...( 302 ): >GP43_HUMAN
GLQVLRNQGSSLLGRR

SEQ ID NO: 14006 - protein, 16 aa, Homo sapiens
  ( 288 )...( 303 ): >GP43_HUMAN
LQVLRNQGSSLLGRRG

SEQ ID NO: 14007 - protein, 16 aa, Homo sapiens
  ( 289 )...( 304 ): >GP43_HUMAN
QVLRNQGSSLLGRRGK

SEQ ID NO: 14008 - protein, 16 aa, Homo sapiens
  ( 290 )...( 305 ): >GP43_HUMAN
VLRNQGSSLLGRRGKD

SEQ ID NO: 14009 - protein, 16 aa, Homo sapiens
  ( 291 )...( 306 ): >GP43_HUMAN
LRNQGSSLLGRRGKDT

SEQ ID NO: 14010 - protein, 16 aa, Homo sapiens
  ( 292 )...( 307 ): >GP43_HUMAN
RNQGSSLLGRRGKDTA

SEQ ID NO: 14011 - protein, 16 aa, Homo sapiens
  ( 223 )...( 238 ): >GP44_HUMAN
ASSHAAVSLRLQHRGR

SEQ ID NO: 14012 - protein, 16 aa, Homo sapiens
  ( 224 )...( 239 ): >GP44_HUMAN
SSHAAVSLRLQHRGRR

SEQ ID NO: 14013 - protein, 16 aa, Homo sapiens
  ( 227 )...( 242 ): >GP44_HUMAN
AAVSLRLQHRGRRRPG

SEQ ID NO: 14014 - protein, 16 aa, Homo sapiens
  ( 239 )...( 254 ): >GP44_HUMAN
RRPGRFVRLVAAVVAA

SEQ ID NO: 14015 - protein, 16 aa, Homo sapiens
  ( 240 )...( 255 ): >GP44_HUMAN
RPGRFVRLVAAVVAAF

SEQ ID NO: 14016 - protein, 16 aa, Homo sapiens
  ( 271 )...( 286 ): >GP44_HUMAN
RAHANPGLRPLVWRGL

SEQ ID NO: 14017 - protein, 16 aa, Homo sapiens
  ( 302 )...( 317 ): >GP44_HUMAN
VLYVLTCPDMLRKLRR

SEQ ID NO: 14018 - protein, 16 aa, Homo sapiens
  ( 303 )...( 318 ): >GP44_HUMAN
LYVLTCPDMLRKLRRS

SEQ ID NO: 14019 - protein, 16 aa, Homo sapiens
  ( 304 )...( 319 ): >GP44_HUMAN
YVLTCPDMLRKLRRSL

SEQ ID NO: 14020 - protein, 16 aa, Homo sapiens
  ( 305 )...( 320 ): >GP44_HUMAN
VLTCPDMLRKLRRSLR

SEQ ID NO: 14021 - protein, 16 aa, Homo sapiens
  ( 306 )...( 321 ): >GP44_HUMAN
LTCPDMLRKLRRSLRT

SEQ ID NO: 14022 - protein, 16 aa, Homo sapiens
  ( 307 )...( 322 ): >GP44_HUMAN
TCPDMLRKLRRSLRTV

SEQ ID NO: 14023 - protein, 16 aa, Homo sapiens
  ( 308 )...( 323 ): >GP44_HUMAN
CPDMLRKLRRSLRTVL

SEQ ID NO: 14024 - protein, 16 aa, Homo sapiens
  ( 310 )...( 325 ): >GP44_HUMAN
DMLRKLRRSLRTVLES

SEQ ID NO: 14025 - protein, 16 aa, Homo sapiens
  ( 311 )...( 326 ): >GP44_HUMAN
MLRKLRRSLRTVLESV

SEQ ID NO: 14026 - protein, 16 aa, Homo sapiens
  ( 312 )...( 327 ): >GP44_HUMAN
LRKLRRSLRTVLESVL

SEQ ID NO: 14027 - protein, 16 aa, Homo sapiens
  ( 313 )...( 328 ): >GP44_HUMAN
RKLRRSLRTVLESVLV

SEQ ID NO: 14028 - protein, 16 aa, Homo sapiens
  ( 332 )...( 347 ): >GP44_HUMAN
ELGGAGSSRRRRTSST

SEQ ID NO: 14029 - protein, 16 aa, Homo sapiens
  ( 339 )...( 354 ): >GP44_HUMAN
SRRRRTSSTARSASPL

SEQ ID NO: 14030 - protein, 16 aa, Homo sapiens
  ( 340 )...( 355 ): >GP44_HUMAN
RRRRTSSTARSASPLA

SEQ ID NO: 14031 - protein, 16 aa, Homo sapiens
  ( 341 )...( 356 ): >GP44_HUMAN
RRRTSSTARSASPLAL

SEQ ID NO: 14032 - protein, 16 aa, Homo sapiens
  ( 144 )...( 159 ): >GP52_HUMAN
TKPLSYNQLVTPCRLR

SEQ ID NO: 14033 - protein, 16 aa, Homo sapiens
  ( 145 )...( 160 ): >GP52_HUMAN
KPLSYNQLVTPCRLRI

SEQ ID NO: 14034 - protein, 16 aa, Homo sapiens
  ( 315 )...( 330 ): >GP52_HUMAN
VIYSLSNGVFRLGLRR

SEQ ID NO: 14035 - protein, 16 aa, Homo sapiens
  ( 316 )...( 331 ): >GP52_HUMAN
IYSLSNGVFRLGLRRL

SEQ ID NO: 14036 - protein, 16 aa, Homo sapiens
  ( 317 )...( 332 ): >GP52_HUMAN
YSLSNGVFRLGLRRLF

SEQ ID NO: 14037 - protein, 16 aa, Homo sapiens
  ( 126 )...( 141 ): >GP68_HUMAN
PFRFHQFRTLKAAVGV

SEQ ID NO: 14038 - protein, 16 aa, Homo sapiens
  ( 127 )...( 142 ): >GP68_HUMAN
FRFHQFRTLKAAVGVS

SEQ ID NO: 14039 - protein, 16 aa, Homo sapiens
  ( 128 )...( 143 ): >GP68_HUMAN
RFHQFRTLKAAVGVSV

SEQ ID NO: 14040 - protein, 16 aa, Homo sapiens
  ( 199 )...( 214 ): >GP68_HUMAN
CLLLASYQGILRAVRR

SEQ ID NO: 14041 - protein, 16 aa, Homo sapiens
  ( 200 )...( 215 ): >GP68_HUMAN
LLLASYQGILRAVRRS

SEQ ID NO: 14042 - protein, 16 aa, Homo sapiens
  ( 201 )...( 216 ): >GP68_HUMAN
LLASYQGILRAVRRSH

SEQ ID NO: 14043 - protein, 16 aa, Homo sapiens
  ( 202 )...( 217 ): >GP68_HUMAN
LASYQGILRAVRRSHG

SEQ ID NO: 14044 - protein, 16 aa, Homo sapiens
  ( 203 )...( 218 ): >GP68_HUMAN
ASYQGILRAVRRSHGT

SEQ ID NO: 14045 - protein, 16 aa, Homo sapiens
  ( 204 )...( 219 ): >GP68_HUMAN
SYQGILRAVRRSHGTQ

SEQ ID NO: 14046 - protein, 16 aa, Homo sapiens
  ( 205 )...( 220 ): >GP68_HUMAN
YQGILRAVRRSHGTQK

SEQ ID NO: 14047 - protein, 16 aa, Homo sapiens
  ( 206 )...( 221 ): >GP68_HUMAN
QGILRAVRRSHGTQKS

SEQ ID NO: 14048 - protein, 16 aa, Homo sapiens
  ( 207 )...( 222 ): >GP68_HUMAN
GILRAVRRSHGTQKSR

SEQ ID NO: 14049 - protein, 16 aa, Homo sapiens
  ( 208 )...( 223 ): >GP68_HUMAN
ILRAVRRSHGTQKSRK

SEQ ID NO: 14050 - protein, 16 aa, Homo sapiens
  ( 211 )...( 226 ): >GP68_HUMAN
AVRRSHGTQKSRKDQI

SEQ ID NO: 14051 - protein, 16 aa, Homo sapiens
  ( 216 )...( 231 ): >GP68_HUMAN
HGTQKSRKDQIQRLVL

SEQ ID NO: 14052 - protein, 16 aa, Homo sapiens
  ( 217 )...( 232 ): >GP68_HUMAN
GTQKSRKDQIQRLVLS

SEQ ID NO: 14053 - protein, 16 aa, Homo sapiens
  ( 218 )...( 233 ): >GP68_HUMAN
TQKSRKDQIQRLVLST

SEQ ID NO: 14054 - protein, 16 aa, Homo sapiens
  ( 219 )...( 234 ): >GP68_HUMAN
QKSRKDQIQRLVLSTV

SEQ ID NO: 14055 - protein, 16 aa, Homo sapiens
  ( 220 )...( 235 ): >GP68_HUMAN
KSRKDQIQRLVLSTVV

SEQ ID NO: 14056 - protein, 16 aa, Homo sapiens
  ( 56 )...( 71 ): >GP72_HUMAN
VGRRRYGAESQNPTVK

SEQ ID NO: 14057 - protein, 16 aa, Homo sapiens
  ( 57 )...( 72 ): >GP72_HUMAN
GRRRYGAESQNPTVKA

SEQ ID NO: 14058 - protein, 16 aa, Homo sapiens
  ( 58 )...( 73 ): >GP72_HUMAN
RRRYGAESQNPTVKAL

SEQ ID NO: 14059 - protein, 16 aa, Homo sapiens
  ( 176 )...( 191 ): >GP72_HUMAN
PLKPRISITKGVIYIA

SEQ ID NO: 14060 - protein, 16 aa, Homo sapiens
  ( 177 )...( 192 ): >GP72_HUMAN
LKPRISITKGVIYIAV

SEQ ID NO: 14061 - protein, 16 aa, Homo sapiens
  ( 178 )...( 193 ): >GP72_HUMAN
KPRISITKGVIYIAVI

SEQ ID NO: 14062 - protein, 16 aa, Homo sapiens
  ( 254 )...( 269 ): >GP72_HUMAN
IISVAYARVAKKLWLC

SEQ ID NO: 14063 - protein, 16 aa, Homo sapiens
  ( 273 )...( 288 ): >GP72_HUMAN
GDVTTEQYFALRRKKK

SEQ ID NO: 14064 - protein, 16 aa, Homo sapiens
  ( 282 )...( 297 ): >GP72_HUMAN
ALRRKKKKTIKMLMLV

SEQ ID NO: 14065 - protein, 16 aa, Homo sapiens
  ( 283 )...( 298 ): >GP72_HUMAN
LRRKKKKTIKMLMLVV

SEQ ID NO: 14066 - protein, 16 aa, Homo sapiens
  ( 284 )...( 299 ): >GP72_HUMAN
RRKKKKTIKMLMLVVV

SEQ ID NO: 14067 - protein, 16 aa, Homo sapiens
  ( 285 )...( 300 ): >GP72_HUMAN
RKKKKTIKMLMLVVVL

SEQ ID NO: 14068 - protein, 16 aa, Homo sapiens
  ( 353 )...( 368 ): >GP72_HUMAN
RIELKALLSMCQRPPK

SEQ ID NO: 14069 - protein, 16 aa, Homo sapiens
  ( 209 )...( 224 ): >GP85_HUMAN
VHDRRKMKPVQFVAAV

SEQ ID NO: 14070 - protein, 16 aa, Homo sapiens
  ( 210 )...( 225 ): >GP85_HUMAN
HDRRKMKPVQFVAAVS

SEQ ID NO: 14071 - protein, 16 aa, Homo sapiens
  ( 211 )...( 226 ): >GP85_HUMAN
DRRKMKPVQFVAAVSQ

SEQ ID NO: 14072 - protein, 16 aa, Homo sapiens
  ( 212 )...( 227 ): >GP85_HUMAN
RRKMKPVQFVAAVSQN

SEQ ID NO: 14073 - protein, 16 aa, Homo sapiens
  ( 254 )...( 269 ): >GP85_HUMAN
PTLLGIRQNANTTGRR

SEQ ID NO: 14074 - protein, 16 aa, Homo sapiens
  ( 255 )...( 270 ): >GP85_HUMAN
TLLGIRQNANTTGRRR

SEQ ID NO: 14075 - protein, 16 aa, Homo sapiens
  ( 256 )...( 271 ): >GP85_HUMAN
LLGIRQNANTTGRRRL

SEQ ID NO: 14076 - protein, 16 aa, Homo sapiens
  ( 257 )...( 272 ): >GP85_HUMAN
LGIRQNANTTGRRRLL

SEQ ID NO: 14077 - protein, 16 aa, Homo sapiens
  ( 258 )...( 273 ): >GP85_HUMAN
GIRQNANTTGRRRLLV

SEQ ID NO: 14078 - protein, 16 aa, Homo sapiens
  ( 259 )...( 274 ): >GP85_HUMAN
IRQNANTTGRRRLLVL

SEQ ID NO: 14079 - protein, 16 aa, Homo sapiens
  ( 260 )...( 275 ): >GP85_HUMAN
RQNANTTGRRRLLVLD

SEQ ID NO: 14080 - protein, 16 aa, Homo sapiens
  ( 351 )...( 366 ): >GP85_HUMAN
STTLLYCRKSRLPREP

SEQ ID NO: 14081 - protein, 16 aa, Homo sapiens
  ( 55 )...( 70 ): >GPR1_HUMAN
GNAIVIWFTGLKWKKT

SEQ ID NO: 14082 - protein, 16 aa, Homo sapiens
  ( 56 )...( 71 ): >GPR1_HUMAN
NAIVIWFTGLKWKKTV

SEQ ID NO: 14083 - protein, 16 aa, Homo sapiens
  ( 221 )...( 236 ): >GPR1_HUMAN
TMSICYLCLIFKVKKR

SEQ ID NO: 14084 - protein, 16 aa, Homo sapiens
  ( 222 )...( 237 ): >GPR1_HUMAN
MSICYLCLIFKVKKRT

SEQ ID NO: 14085 - protein, 16 aa, Homo sapiens
  ( 223 )...( 238 ): >GPR1_HUMAN
SICYLCLIFKVKKRTV

SEQ ID NO: 14086 - protein, 16 aa, Homo sapiens
  ( 227 )...( 242 ): >GPR1_HUMAN
LCLIFKVKKRTVLISS

SEQ ID NO: 14087 - protein, 16 aa, Homo sapiens
  ( 228 )...( 243 ): >GPR1_HUMAN
CLIFKVKKRTVLISSR

SEQ ID NO: 14088 - protein, 16 aa, Homo sapiens
  ( 229 )...( 244 ): >GPR1_HUMAN
LIFKVKKRTVLISSRH

SEQ ID NO: 14089 - protein, 16 aa, Homo sapiens
  ( 230 )...( 245 ): >GPR1_HUMAN
IFKVKKRTVLISSRHF

SEQ ID NO: 14090 - protein, 16 aa, Homo sapiens
  ( 233 )...( 248 ): >GPR1_HUMAN
VKKRTVLISSRHFWTI

SEQ ID NO: 14091 - protein, 16 aa, Homo sapiens
  ( 234 )...( 249 ): >GPR1_HUMAN
KKRTVLISSRHFWTIL

SEQ ID NO: 14092 - protein, 16 aa, Homo sapiens
  ( 235 )...( 250 ): >GPR1_HUMAN
KRTVLISSRHFWTILV

SEQ ID NO: 14093 - protein, 16 aa, Homo sapiens
  ( 299 )...( 314 ): >GPR1_HUMAN
LNPILYVLISKKFQAR

SEQ ID NO: 14094 - protein, 16 aa, Homo sapiens
  ( 304 )...( 319 ): >GPR1_HUMAN
YVLISKKFQARFRSSV

SEQ ID NO: 14095 - protein, 16 aa, Homo sapiens
  ( 305 )...( 320 ): >GPR1_HUMAN
VLISKKFQARFRSSVA

SEQ ID NO: 14096 - protein, 16 aa, Homo sapiens
  ( 306 )...( 321 ): >GPR1_HUMAN
LISKKFQARFRSSVAE

SEQ ID NO: 14097 - protein, 16 aa, Homo sapiens
  ( 307 )...( 322 ): >GPR1_HUMAN
ISKKFQARFRSSVAEI

SEQ ID NO: 14098 - protein, 16 aa, Homo sapiens
  ( 308 )...( 323 ): >GPR1_HUMAN
SKKFQARFRSSVAEIL

SEQ ID NO: 14099 - protein, 16 aa, Homo sapiens
  ( 309 )...( 324 ): >GPR1_HUMAN
KKFQARFRSSVAEILK

SEQ ID NO: 14100 - protein, 16 aa, Homo sapiens
  ( 216 )...( 231 ): >GPR3_HUMAN
ICRIVCRHAQQIALQR

SEQ ID NO: 14101 - protein, 16 aa, Homo sapiens
  ( 217 )...( 232 ): >GPR3_HUMAN
CRIVCRHAQQIALQRH

SEQ ID NO: 14102 - protein, 16 aa, Homo sapiens
  ( 218 )...( 233 ): >GPR3_HUMAN
RIVCRHAQQIALQRHL

SEQ ID NO: 14103 - protein, 16 aa, Homo sapiens
  ( 117 )...( 132 ): >GPR4_HUMAN
LAVAHPLRFARLRRVK

SEQ ID NO: 14104 - protein, 16 aa, Homo sapiens
  ( 118 )...( 133 ): >GPR4_HUMAN
AVAHPLRFARLRRVKT

SEQ ID NO: 14105 - protein, 16 aa, Homo sapiens
  ( 119 )...( 134 ): >GPR4_HUMAN
VAHPLRFARLRRVKTA

SEQ ID NO: 14106 - protein, 16 aa, Homo sapiens
  ( 120 )...( 135 ): >GPR4_HUMAN
AHPLRFARLRRVKTAV

SEQ ID NO: 14107 - protein, 16 aa, Homo sapiens
  ( 121 )...( 136 ): >GPR4_HUMAN
HPLRFARLRRVKTAVA

SEQ ID NO: 14108 - protein, 16 aa, Homo sapiens
  ( 122 )...( 137 ): >GPR4_HUMAN
PLRFARLRRVKTAVAV

SEQ ID NO: 14109 - protein, 16 aa, Homo sapiens
  ( 123 )...( 138 ): >GPR4_HUMAN
LRFARLRRVKTAVAVS

SEQ ID NO: 14110 - protein, 16 aa, Homo sapiens
  ( 124 )...( 139 ): >GPR4_HUMAN
RFARLRRVKTAVAVSS

SEQ ID NO: 14111 - protein, 16 aa, Homo sapiens
  ( 125 )...( 140 ): >GPR4_HUMAN
FARLRRVKTAVAVSSV

SEQ ID NO: 14112 - protein, 16 aa, Homo sapiens
  ( 126 )...( 141 ): >GPR4_HUMAN
ARLRRVKTAVAVSSVV

SEQ ID NO: 14113 - protein, 16 aa, Homo sapiens
  ( 127 )...( 142 ): >GPR4_HUMAN
RLRRVKTAVAVSSVVW

SEQ ID NO: 14114 - protein, 16 aa, Homo sapiens
  ( 128 )...( 143 ): >GPR4_HUMAN
LRRVKTAVAVSSVVWA

SEQ ID NO: 14115 - protein, 16 aa, Homo sapiens
  ( 129 )...( 144 ): >GPR4_HUMAN
RRVKTAVAVSSVVWAT

SEQ ID NO: 14116 - protein, 16 aa, Homo sapiens
  ( 195 )...( 210 ): >GPR4_HUMAN
ALMLLSYRGILRAVRG

SEQ ID NO: 14117 - protein, 16 aa, Homo sapiens
  ( 196 )...( 211 ): >GPR4_HUMAN
LMLLSYRGILRAVRGS

SEQ ID NO: 14118 - protein, 16 aa, Homo sapiens
  ( 197 )...( 212 ): >GPR4_HUMAN
MLLSYRGILRAVRGSV

SEQ ID NO: 14119 - protein, 16 aa, Homo sapiens
  ( 198 )...( 213 ): >GPR4_HUMAN
LLSYRGILRAVRGSVS

SEQ ID NO: 14120 - protein, 16 aa, Homo sapiens
  ( 199 )...( 214 ): >GPR4_HUMAN
LSYRGILRAVRGSVST

SEQ ID NO: 14121 - protein, 16 aa, Homo sapiens
  ( 201 )...( 216 ): >GPR4_HUMAN
YRGILRAVRGSVSTER

SEQ ID NO: 14122 - protein, 16 aa, Homo sapiens
  ( 202 )...( 217 ): >GPR4_HUMAN
RGILRAVRGSVSTERQ

SEQ ID NO: 14123 - protein, 16 aa, Homo sapiens
  ( 206 )...( 221 ): >GPR4_HUMAN
RAVRGSVSTERQEKAK

SEQ ID NO: 14124 - protein, 16 aa, Homo sapiens
  ( 208 )...( 223 ): >GPR4_HUMAN
VRGSVSTERQEKAKIK

SEQ ID NO: 14125 - protein, 16 aa, Homo sapiens
  ( 209 )...( 224 ): >GPR4_HUMAN
RGSVSTERQEKAKIKR

SEQ ID NO: 14126 - protein, 16 aa, Homo sapiens
  ( 210 )...( 225 ): >GPR4_HUMAN
GSVSTERQEKAKIKRL

SEQ ID NO: 14127 - protein, 16 aa, Homo sapiens
  ( 211 )...( 226 ): >GPR4_HUMAN
SVSTERQEKAKIKRLA

SEQ ID NO: 14128 - protein, 16 aa, Homo sapiens
  ( 212 )...( 227 ): >GPR4_HUMAN
VSTERQEKAKIKRLAL

SEQ ID NO: 14129 - protein, 16 aa, Homo sapiens
  ( 213 )...( 228 ): >GPR4_HUMAN
STERQEKAKIKRLALS

SEQ ID NO: 14130 - protein, 16 aa, Homo sapiens
  ( 214 )...( 229 ): >GPR4_HUMAN
TERQEKAKIKRLALSL

SEQ ID NO: 14131 - protein, 16 aa, Homo sapiens
  ( 215 )...( 230 ): >GPR4_HUMAN
ERQEKAKIKRLALSLI

SEQ ID NO: 14132 - protein, 16 aa, Homo sapiens
  ( 216 )...( 231 ): >GPR4_HUMAN
RQEKAKIKRLALSLIA

SEQ ID NO: 14133 - protein, 16 aa, Homo sapiens
  ( 217 )...( 232 ): >GPR4_HUMAN
QEKAKIKRLALSLIAI

SEQ ID NO: 14134 - protein, 16 aa, Homo sapiens
  ( 218 )...( 233 ): >GPR4_HUMAN
EKAKIKRLALSLIAIV

SEQ ID NO: 14135 - protein, 16 aa, Homo sapiens
  ( 54 )...( 69 ): >GPR7_HUMAN
GNSAVLYVLLRAPRMK

SEQ ID NO: 14136 - protein, 16 aa, Homo sapiens
  ( 55 )...( 70 ): >GPR7_HUMAN
NSAVLYVLLRAPRMKT

SEQ ID NO: 14137 - protein, 16 aa, Homo sapiens
  ( 56 )...( 71 ): >GPR7_HUMAN
SAVLYVLLRAPRMKTV

SEQ ID NO: 14138 - protein, 16 aa, Homo sapiens
  ( 57 )...( 72 ): >GPR7_HUMAN
AVLYVLLRAPRMKTVT

SEQ ID NO: 14139 - protein, 16 aa, Homo sapiens
  ( 58 )...( 73 ): >GPR7_HUMAN
VLYVLLRAPRMKTVTN

SEQ ID NO: 14140 - protein, 16 aa, Homo sapiens
  ( 59 )...( 74 ): >GPR7_HUMAN
LYVLLRAPRMKTVTNL

SEQ ID NO: 14141 - protein, 16 aa, Homo sapiens
  ( 60 )...( 75 ): >GPR7_HUMAN
YVLLRAPRMKTVTNLF

SEQ ID NO: 14142 - protein, 16 aa, Homo sapiens
  ( 61 )...( 76 ): >GPR7_HUMAN
VLLRAPRMKTVTNLFI

SEQ ID NO: 14143 - protein, 16 aa, Homo sapiens
  ( 63 )...( 78 ): >GPR7_HUMAN
LRAPRMKTVTNLFILN

SEQ ID NO: 14144 - protein, 16 aa, Homo sapiens
  ( 64 )...( 79 ): >GPR7_HUMAN
RAPRMKTVTNLFILNL

SEQ ID NO: 14145 - protein, 16 aa, Homo sapiens
  ( 141 )...( 156 ): >GPR7_HUMAN
TAESRRVAGRTYSAAR

SEQ ID NO: 14146 - protein, 16 aa, Homo sapiens
  ( 142 )...( 157 ): >GPR7_HUMAN
AESRRVAGRTYSAARA

SEQ ID NO: 14147 - protein, 16 aa, Homo sapiens
  ( 143 )...( 158 ): >GPR7_HUMAN
ESRRVAGRTYSAARAV

SEQ ID NO: 14148 - protein, 16 aa, Homo sapiens
  ( 144 )...( 159 ): >GPR7_HUMAN
SRRVAGRTYSAARAVS

SEQ ID NO: 14149 - protein, 16 aa, Homo sapiens
  ( 145 )...( 160 ): >GPR7_HUMAN
RRVAGRTYSAARAVSL

SEQ ID NO: 14150 - protein, 16 aa, Homo sapiens
  ( 232 )...( 247 ): >GPR7_HUMAN
AMRLDSHAKALERAKK

SEQ ID NO: 14151 - protein, 16 aa, Homo sapiens
  ( 237 )...( 252 ): >GPR7_HUMAN
SHAKALERAKKRVTFL

SEQ ID NO: 14152 - protein, 16 aa, Homo sapiens
  ( 238 )...( 253 ): >GPR7_HUMAN
HAKALERAKKRVTFLV

SEQ ID NO: 14153 - protein, 16 aa, Homo sapiens
  ( 239 )...( 254 ): >GPR7_HUMAN
AKALERAKKRVTFLVV

SEQ ID NO: 14154 - protein, 16 aa, Homo sapiens
  ( 240 )...( 255 ): >GPR7_HUMAN
KALERAKKRVTFLVVA

SEQ ID NO: 14155 - protein, 16 aa, Homo sapiens
  ( 241 )...( 256 ): >GPR7_HUMAN
ALERAKKRVTFLVVAI

SEQ ID NO: 14156 - protein, 16 aa, Homo sapiens
  ( 242 )...( 257 ): >GPR7_HUMAN
LERAKKRVTFLVVAIL

SEQ ID NO: 14157 - protein, 16 aa, Homo sapiens
  ( 243 )...( 258 ): >GPR7_HUMAN
ERAKKRVTFLVVAILA

SEQ ID NO: 14158 - protein, 16 aa, Homo sapiens
  ( 244 )...( 259 ): >GPR7_HUMAN
RAKKRVTFLVVAILAV

SEQ ID NO: 14159 - protein, 16 aa, Homo sapiens
  ( 312 )...( 327 ): >GPR7_HUMAN
ASFRRNLRQLITCRAA

SEQ ID NO: 14160 - protein, 16 aa, Homo sapiens
  ( 313 )...( 328 ): >GPR7_HUMAN
SFRRNLRQLITCRAAA

SEQ ID NO: 14161 - protein, 15 aa, Homo sapiens
  ( 314 )...( 329 ): >GPR7_HUMAN
FRRNLRQLITCRAAA

SEQ ID NO: 14162 - protein, 14 aa, Homo sapiens
  ( 315 )...( 330 ): >GPR7_HUMAN
RRNLRQLITCRAAA

SEQ ID NO: 14163 - protein, 16 aa, Homo sapiens
  ( 62 )...( 77 ): >GPR8_HUMAN
GNTAVILVILRAPKMK

SEQ ID NO: 14164 - protein, 16 aa, Homo sapiens
  ( 63 )...( 78 ): >GPR8_HUMAN
NTAVILVILRAPKMKT

SEQ ID NO: 14165 - protein, 16 aa, Homo sapiens
  ( 66 )...( 81 ): >GPR8_HUMAN
VILVILRAPKMKTVTN

SEQ ID NO: 14166 - protein, 16 aa, Homo sapiens
  ( 67 )...( 82 ): >GPR8_HUMAN
ILVILRAPKMKTVTNV

SEQ ID NO: 14167 - protein, 16 aa, Homo sapiens
  ( 68 )...( 83 ): >GPR8_HUMAN
LVILRAPKMKTVTNVF

SEQ ID NO: 14168 - protein, 16 aa, Homo sapiens
  ( 69 )...( 84 ): >GPR8_HUMAN
VILRAPKMKTVTNVFI

SEQ ID NO: 14169 - protein, 16 aa, Homo sapiens
  ( 70 )...( 85 ): >GPR8_HUMAN
ILRAPKMKTVTNVFIL

SEQ ID NO: 14170 - protein, 16 aa, Homo sapiens
  ( 71 )...( 86 ): >GPR8_HUMAN
LRAPKMKTVTNVFILN

SEQ ID NO: 14171 - protein, 16 aa, Homo sapiens
  ( 72 )...( 87 ): >GPR8_HUMAN
RAPKMKTVTNVFILNL

SEQ ID NO: 14172 - protein, 16 aa, Homo sapiens
  ( 142 )...( 157 ): >GPR8_HUMAN
RYLVVLATVRSRHMPW

SEQ ID NO: 14173 - protein, 16 aa, Homo sapiens
  ( 143 )...( 158 ): >GPR8_HUMAN
YLVVLATVRSRHMPWR

SEQ ID NO: 14174 - protein, 16 aa, Homo sapiens
  ( 144 )...( 159 ): >GPR8_HUMAN
LVVLATVRSRHMPWRT

SEQ ID NO: 14175 - protein, 16 aa, Homo sapiens
  ( 145 )...( 160 ): >GPR8_HUMAN
VVLATVRSRHMPWRTY

SEQ ID NO: 14176 - protein, 16 aa, Homo sapiens
  ( 158 )...( 173 ): >GPR8_HUMAN
RTYRGAKVASLCVWLG

SEQ ID NO: 14177 - protein, 16 aa, Homo sapiens
  ( 206 )...( 221 ): >GPR8_HUMAN
RVWFKASRVYTLVLGF

SEQ ID NO: 14178 - protein, 16 aa, Homo sapiens
  ( 228 )...( 243 ): >GPR8_HUMAN
ICVLYTDLLRRLRAVR

SEQ ID NO: 14179 - protein, 16 aa, Homo sapiens
  ( 229 )...( 244 ): >GPR8_HUMAN
CVLYTDLLRRLRAVRL

SEQ ID NO: 14180 - protein, 16 aa, Homo sapiens
  ( 232 )...( 247 ): >GPR8_HUMAN
YTDLLRRLRAVRLRSG

SEQ ID NO: 14181 - protein, 16 aa, Homo sapiens
  ( 233 )...( 248 ): >GPR8_HUMAN
TDLLRRLRAVRLRSGA

SEQ ID NO: 14182 - protein, 16 aa, Homo sapiens
  ( 234 )...( 249 ): >GPR8_HUMAN
DLLRRLRAVRLRSGAK

SEQ ID NO: 14183 - protein, 16 aa, Homo sapiens
  ( 239 )...( 254 ): >GPR8_HUMAN
LRAVRLRSGAKALGKA

SEQ ID NO: 14184 - protein, 16 aa, Homo sapiens
  ( 244 )...( 259 ): >GPR8_HUMAN
LRSGAKALGKARRKVT

SEQ ID NO: 14185 - protein, 16 aa, Homo sapiens
  ( 245 )...( 260 ): >GPR8_HUMAN
RSGAKALGKARRKVTV

SEQ ID NO: 14186 - protein, 16 aa, Homo sapiens
  ( 248 )...( 263 ): >GPR8_HUMAN
AKALGKARRKVTVLVL

SEQ ID NO: 14187 - protein, 16 aa, Homo sapiens
  ( 75 )...( 90 ): >GPRA_HUMAN
LVGNCLLVLVIARVRR

SEQ ID NO: 14188 - protein, 16 aa, Homo sapiens
  ( 76 )...( 91 ): >GPRA_HUMAN
VGNCLLVLVIARVRRL

SEQ ID NO: 14189 - protein, 16 aa, Homo sapiens
  ( 77 )...( 92 ): >GPRA_HUMAN
GNCLLVLVIARVRRLH

SEQ ID NO: 14190 - protein, 16 aa, Homo sapiens
  ( 78 )...( 93 ): >GPRA_HUMAN
NCLLVLVIARVRRLHN

SEQ ID NO: 14191 - protein, 16 aa, Homo sapiens
  ( 79 )...( 94 ): >GPRA_HUMAN
CLLVLVIARVRRLHNV

SEQ ID NO: 14192 - protein, 16 aa, Homo sapiens
  ( 80 )...( 95 ): >GPRA_HUMAN
LLVLVIARVRRLHNVT

SEQ ID NO: 14193 - protein, 16 aa, Homo sapiens
  ( 81 )...( 96 ): >GPRA_HUMAN
LVLVIARVRRLHNVTN

SEQ ID NO: 14194 - protein, 16 aa, Homo sapiens
  ( 82 )...( 97 ): >GPRA_HUMAN
VLVIARVRRLHNVTNF

SEQ ID NO: 14195 - protein, 16 aa, Homo sapiens
  ( 83 )...( 98 ): >GPRA_HUMAN
LVIARVRRLHNVTNFL

SEQ ID NO: 14196 - protein, 16 aa, Homo sapiens
  ( 84 )...( 99 ): >GPRA_HUMAN
VIARVRRLHNVTNFLI

SEQ ID NO: 14197 - protein, 16 aa, Homo sapiens
  ( 85 )...( 100 ): >GPRA_HUMAN
IARVRRLHNVTNFLIG

SEQ ID NO: 14198 - protein, 16 aa, Homo sapiens
  ( 86 )...( 101 ): >GPRA_HUMAN
ARVRRLHNVTNFLIGN

SEQ ID NO: 14199 - protein, 16 aa, Homo sapiens
  ( 87 )...( 102 ): >GPRA_HUMAN
RVRRLHNVTNFLIGNL

SEQ ID NO: 14200 - protein, 16 aa, Homo sapiens
  ( 155 )...( 170 ): >GPRA_HUMAN
IAVDRYVVLVHPLRRR

SEQ ID NO: 14201 - protein, 16 aa, Homo sapiens
  ( 156 )...( 171 ): >GPRA_HUMAN
AVDRYVVLVHPLRRRI

SEQ ID NO: 14202 - protein, 16 aa, Homo sapiens
  ( 157 )...( 172 ): >GPRA_HUMAN
VDRYVVLVHPLRRRIS

SEQ ID NO: 14203 - protein, 16 aa, Homo sapiens
  ( 160 )...( 175 ): >GPRA_HUMAN
YVVLVHPLRRRISLRL

SEQ ID NO: 14204 - protein, 16 aa, Homo sapiens
  ( 161 )...( 176 ): >GPRA_HUMAN
VVLVHPLRRRISLRLS

SEQ ID NO: 14205 - protein, 16 aa, Homo sapiens
  ( 162 )...( 177 ): >GPRA_HUMAN
VLVHPLRRRISLRLSA

SEQ ID NO: 14206 - protein, 16 aa, Homo sapiens
  ( 164 )...( 179 ): >GPRA_HUMAN
VHPLRRRISLRLSAYA

SEQ ID NO: 14207 - protein, 16 aa, Homo sapiens
  ( 165 )...( 180 ): >GPRA_HUMAN
HPLRRRISLRLSAYAV

SEQ ID NO: 14208 - protein, 16 aa, Homo sapiens
  ( 166 )...( 181 ): >GPRA_HUMAN
PLRRRISLRLSAYAVL

SEQ ID NO: 14209 - protein, 16 aa, Homo sapiens
  ( 167 )...( 182 ): >GPRA_HUMAN
LRRRISLRLSAYAVLA

SEQ ID NO: 14210 - protein, 16 aa, Homo sapiens
  ( 168 )...( 183 ): >GPRA_HUMAN
RRRISLRLSAYAVLAI

SEQ ID NO: 14211 - protein, 16 aa, Homo sapiens
  ( 169 )...( 184 ): >GPRA_HUMAN
RRISLRLSAYAVLAIW

SEQ ID NO: 14212 - protein, 16 aa, Homo sapiens
  ( 239 )...( 254 ): >GPRA_HUMAN
LVILLSYVRVSVKLRN

SEQ ID NO: 14213 - protein, 16 aa, Homo sapiens
  ( 240 )...( 255 ): >GPRA_HUMAN
VILLSYVRVSVKLRNR

SEQ ID NO: 14214 - protein, 16 aa, Homo sapiens
  ( 241 )...( 256 ): >GPRA_HUMAN
ILLSYVRVSVKLRNRV

SEQ ID NO: 14215 - protein, 16 aa, Homo sapiens
  ( 242 )...( 257 ): >GPRA_HUMAN
LLSYVRVSVKLRNRVV

SEQ ID NO: 14216 - protein, 16 aa, Homo sapiens
  ( 243 )...( 258 ): >GPRA_HUMAN
LSYVRVSVKLRNRVVP

SEQ ID NO: 14217 - protein, 16 aa, Homo sapiens
  ( 244 )...( 259 ): >GPRA_HUMAN
SYVRVSVKLRNRVVPG

SEQ ID NO: 14218 - protein, 16 aa, Homo sapiens
  ( 245 )...( 260 ): >GPRA_HUMAN
YVRVSVKLRNRVVPGC

SEQ ID NO: 14219 - protein, 16 aa, Homo sapiens
  ( 246 )...( 261 ): >GPRA_HUMAN
VRVSVKLRNRVVPGCV

SEQ ID NO: 14220 - protein, 16 aa, Homo sapiens
  ( 247 )...( 262 ): >GPRA_HUMAN
RVSVKLRNRVVPGCVT

SEQ ID NO: 14221 - protein, 16 aa, Homo sapiens
  ( 248 )...( 263 ): >GPRA_HUMAN
VSVKLRNRVVPGCVTQ

SEQ ID NO: 14222 - protein, 16 aa, Homo sapiens
  ( 249 )...( 264 ): >GPRA_HUMAN
SVKLRNRVVPGCVTQS

SEQ ID NO: 14223 - protein, 16 aa, Homo sapiens
  ( 250 )...( 265 ): >GPRA_HUMAN
VKLRNRVVPGCVTQSQ

SEQ ID NO: 14224 - protein, 16 aa, Homo sapiens
  ( 251 )...( 266 ): >GPRA_HUMAN
KLRNRVVPGCVTQSQA

SEQ ID NO: 14225 - protein, 16 aa, Homo sapiens
  ( 269 )...( 284 ): >GPRA_HUMAN
DRARRRRTFCLLVVVV

SEQ ID NO: 14226 - protein, 16 aa, Homo sapiens
  ( 270 )...( 285 ): >GPRA_HUMAN
RARRRRTFCLLVVVVV

SEQ ID NO: 14227 - protein, 16 aa, Homo sapiens
  ( 271 )...( 286 ): >GPRA_HUMAN
ARRRRTFCLLVVVVVV

SEQ ID NO: 14228 - protein, 16 aa, Homo sapiens
  ( 272 )...( 287 ): >GPRA_HUMAN
RRRRTFCLLVVVVVVF

SEQ ID NO: 14229 - protein, 16 aa, Homo sapiens
  ( 346 )...( 361 ): >GPRA_HUMAN
LRKLLVAWPRKIAPHG

SEQ ID NO: 14230 - protein, 16 aa, Homo sapiens
  ( 347 )...( 362 ): >GPRA_HUMAN
RKLLVAWPRKIAPHGQ

SEQ ID NO: 14231 - protein, 16 aa, Homo sapiens
  ( 348 )...( 363 ): >GPRA_HUMAN
KLLVAWPRKIAPHGQN

SEQ ID NO: 14232 - protein, 16 aa, Homo sapiens
  ( 52 )...( 67 ): >GPRF_HUMAN
LVLMGALHFKPGSRRL

SEQ ID NO: 14233 - protein, 16 aa, Homo sapiens
  ( 53 )...( 68 ): >GPRF_HUMAN
VLMGALHFKPGSRRLI

SEQ ID NO: 14234 - protein, 16 aa, Homo sapiens
  ( 133 )...( 148 ): >GPRF_HUMAN
LAIVWPVVSRKFRRTD

SEQ ID NO: 14235 - protein, 16 aa, Homo sapiens
  ( 134 )...( 149 ): >GPRF_HUMAN
AIVWPVVSRKFRRTDC

SEQ ID NO: 14236 - protein, 16 aa, Homo sapiens
  ( 135 )...( 150 ): >GPRF_HUMAN
IVWPVVSRKFRRTDCA

SEQ ID NO: 14237 - protein, 16 aa, Homo sapiens
  ( 138 )...( 153 ): >GPRF_HUMAN
PVVSRKFRRTDCAYVV

SEQ ID NO: 14238 - protein, 16 aa, Homo sapiens
  ( 227 )...( 242 ): >GPRF_HUMAN
QQSGKHNKKLKKSIKI

SEQ ID NO: 14239 - protein, 16 aa, Homo sapiens
  ( 228 )...( 243 ): >GPRF_HUMAN
QSGKHNKKLKKSIKII

SEQ ID NO: 14240 - protein, 16 aa, Homo sapiens
  ( 229 )...( 244 ): >GPRF_HUMAN
SGKHNKKLKKSIKIIF

SEQ ID NO: 14241 - protein, 16 aa, Homo sapiens
  ( 230 )...( 245 ): >GPRF_HUMAN
GKHNKKLKKSIKIIFI

SEQ ID NO: 14242 - protein, 16 aa, Homo sapiens
  ( 231 )...( 246 ): >GPRF_HUMAN
KHNKKLKKSIKIIFIV

SEQ ID NO: 14243 - protein, 16 aa, Homo sapiens
  ( 232 )...( 247 ): >GPRF_HUMAN
HNKKLKKSIKIIFIVV

SEQ ID NO: 14244 - protein, 16 aa, Homo sapiens
  ( 233 )...( 248 ): >GPRF_HUMAN
NKKLKKSIKIIFIVVA

SEQ ID NO: 14245 - protein, 16 aa, Homo sapiens
  ( 234 )...( 249 ): >GPRF_HUMAN
KKLKKSIKIIFIVVAA

SEQ ID NO: 14246 - protein, 16 aa, Homo sapiens
  ( 128 )...( 143 ): >GPRH_HUMAN
DRFLAIVHPVKSLKLR

SEQ ID NO: 14247 - protein, 16 aa, Homo sapiens
  ( 129 )...( 144 ): >GPRH_HUMAN
RFLAIVHPVKSLKLRR

SEQ ID NO: 14248 - protein, 16 aa, Homo sapiens
  ( 130 )...( 145 ): >GPRH_HUMAN
FLAIVHPVKSLKLRRP

SEQ ID NO: 14249 - protein, 16 aa, Homo sapiens
  ( 131 )...( 146 ): >GPRH_HUMAN
LAIVHPVKSLKLRRPL

SEQ ID NO: 14250 - protein, 16 aa, Homo sapiens
  ( 132 )...( 147 ): >GPRH_HUMAN
AIVHPVKSLKLRRPLY

SEQ ID NO: 14251 - protein, 16 aa, Homo sapiens
  ( 133 )...( 148 ): >GPRH_HUMAN
IVHPVKSLKLRRPLYA

SEQ ID NO: 14252 - protein, 16 aa, Homo sapiens
  ( 136 )...( 151 ): >GPRH_HUMAN
PVKSLKLRRPLYAHLA

SEQ ID NO: 14253 - protein, 16 aa, Homo sapiens
  ( 137 )...( 152 ): >GPRH_HUMAN
VKSLKLRRPLYAHLAC

SEQ ID NO: 14254 - protein, 16 aa, Homo sapiens
  ( 209 )...( 224 ): >GPRH_HUMAN
VTCYLLIIRSLRQGLR

SEQ ID NO: 14255 - protein, 16 aa, Homo sapiens
  ( 210 )...( 225 ): >GPRH_HUMAN
TCYLLIIRSLRQGLRV

SEQ ID NO: 14256 - protein, 16 aa, Homo sapiens
  ( 212 )...( 227 ): >GPRH_HUMAN
YLLIIRSLRQGLRVEK

SEQ ID NO: 14257 - protein, 16 aa, Homo sapiens
  ( 213 )...( 228 ): >GPRH_HUMAN
LLIIRSLRQGLRVEKR

SEQ ID NO: 14258 - protein, 16 aa, Homo sapiens
  ( 214 )...( 229 ): >GPRH_HUMAN
LIIRSLRQGLRVEKRL

SEQ ID NO: 14259 - protein, 16 aa, Homo sapiens
  ( 215 )...( 230 ): >GPRH_HUMAN
IIRSLRQGLRVEKRLK

SEQ ID NO: 14260 - protein, 16 aa, Homo sapiens
  ( 216 )...( 231 ): >GPRH_HUMAN
IRSLRQGLRVEKRLKT

SEQ ID NO: 14261 - protein, 16 aa, Homo sapiens
  ( 217 )...( 232 ): >GPRH_HUMAN
RSLRQGLRVEKRLKTK

SEQ ID NO: 14262 - protein, 16 aa, Homo sapiens
  ( 218 )...( 233 ): >GPRH_HUMAN
SLRQGLRVEKRLKTKA

SEQ ID NO: 14263 - protein, 16 aa, Homo sapiens
  ( 219 )...( 234 ): >GPRH_HUMAN
LRQGLRVEKRLKTKAV

SEQ ID NO: 14264 - protein, 16 aa, Homo sapiens
  ( 220 )...( 235 ): >GPRH_HUMAN
RQGLRVEKRLKTKAVR

SEQ ID NO: 14265 - protein, 16 aa, Homo sapiens
  ( 221 )...( 236 ): >GPRH_HUMAN
QGLRVEKRLKTKAVRM

SEQ ID NO: 14266 - protein, 16 aa, Homo sapiens
  ( 222 )...( 237 ): >GPRH_HUMAN
GLRVEKRLKTKAVRMI

SEQ ID NO: 14267 - protein, 16 aa, Homo sapiens
  ( 223 )...( 238 ): >GPRH_HUMAN
LRVEKRLKTKAVRMIA

SEQ ID NO: 14268 - protein, 16 aa, Homo sapiens
  ( 224 )...( 239 ): >GPRH_HUMAN
RVEKRLKTKAVRMIAI

SEQ ID NO: 14269 - protein, 16 aa, Homo sapiens
  ( 225 )...( 240 ): >GPRH_HUMAN
VEKRLKTKAVRMIAIV

SEQ ID NO: 14270 - protein, 16 aa, Homo sapiens
  ( 226 )...( 241 ): >GPRH_HUMAN
EKRLKTKAVRMIAIVL

SEQ ID NO: 14271 - protein, 16 aa, Homo sapiens
  ( 227 )...( 242 ): >GPRH_HUMAN
KRLKTKAVRMIAIVLA

SEQ ID NO: 14272 - protein, 16 aa, Homo sapiens
  ( 228 )...( 243 ): >GPRH_HUMAN
RLKTKAVRMIAIVLAI

SEQ ID NO: 14273 - protein, 16 aa, Homo sapiens
  ( 303 )...( 318 ): >GPRH_HUMAN
KFRHALCNLLCGKRLK

SEQ ID NO: 14274 - protein, 16 aa, Homo sapiens
  ( 39 )...( 54 ): >GPRI_HUMAN
VNITALWVFSCTTKKR

SEQ ID NO: 14275 - protein, 16 aa, Homo sapiens
  ( 52 )...( 67 ): >GPRI_HUMAN
KKRTTVTIYMMNVALV

SEQ ID NO: 14276 - protein, 16 aa, Homo sapiens
  ( 210 )...( 225 ): >GPRI_HUMAN
IIHNLLHGRTSKLKPK

SEQ ID NO: 14277 - protein, 16 aa, Homo sapiens
  ( 211 )...( 226 ): >GPRI_HUMAN
IHNLLHGRTSKLKPKV

SEQ ID NO: 14278 - protein, 16 aa, Homo sapiens
  ( 212 )...( 227 ): >GPRI_HUMAN
HNLLHGRTSKLKPKVK

SEQ ID NO: 14279 - protein, 16 aa, Homo sapiens
  ( 213 )...( 228 ): >GPRI_HUMAN
NLLHGRTSKLKPKVKE

SEQ ID NO: 14280 - protein, 16 aa, Homo sapiens
  ( 214 )...( 229 ): >GPRI_HUMAN
LLHGRTSKLKPKVKEK

SEQ ID NO: 14281 - protein, 16 aa, Homo sapiens
  ( 215 )...( 230 ): >GPRI_HUMAN
LHGRTSKLKPKVKEKS

SEQ ID NO: 14282 - protein, 16 aa, Homo sapiens
  ( 216 )...( 231 ): >GPRI_HUMAN
HGRTSKLKPKVKEKSI

SEQ ID NO: 14283 - protein, 16 aa, Homo sapiens
  ( 217 )...( 232 ): >GPRI_HUMAN
GRTSKLKPKVKEKSIR

SEQ ID NO: 14284 - protein, 16 aa, Homo sapiens
  ( 218 )...( 233 ): >GPRI_HUMAN
RTSKLKPKVKEKSIRI

SEQ ID NO: 14285 - protein, 16 aa, Homo sapiens
  ( 219 )...( 234 ): >GPRI_HUMAN
TSKLKPKVKEKSIRII

SEQ ID NO: 14286 - protein, 16 aa, Homo sapiens
  ( 220 )...( 235 ): >GPRI_HUMAN
SKLKPKVKEKSIRIII

SEQ ID NO: 14287 - protein, 16 aa, Homo sapiens
  ( 221 )...( 236 ): >GPRI_HUMAN
KLKPKVKEKSIRIIIT

SEQ ID NO: 14288 - protein, 16 aa, Homo sapiens
  ( 222 )...( 237 ): >GPRI_HUMAN
LKPKVKEKSIRIIITL

SEQ ID NO: 14289 - protein, 16 aa, Homo sapiens
  ( 223 )...( 238 ): >GPRI_HUMAN
KPKVKEKSIRIIITLL

SEQ ID NO: 14290 - protein, 16 aa, Homo sapiens
  ( 224 )...( 239 ): >GPRI_HUMAN
PKVKEKSIRIIITLLV

SEQ ID NO: 14291 - protein, 16 aa, Homo sapiens
  ( 225 )...( 240 ): >GPRI_HUMAN
KVKEKSIRIIITLLVQ

SEQ ID NO: 14292 - protein, 16 aa, Homo sapiens
  ( 289 )...( 304 ): >GPRI_HUMAN
VSKQFQARVISVMLYR

SEQ ID NO: 14293 - protein, 16 aa, Homo sapiens
  ( 290 )...( 305 ): >GPRI_HUMAN
SKQFQARVISVMLYRN

SEQ ID NO: 14294 - protein, 16 aa, Homo sapiens
  ( 295 )...( 310 ): >GPRI_HUMAN
ARVISVMLYRNYLRSL

SEQ ID NO: 14295 - protein, 16 aa, Homo sapiens
  ( 309 )...( 324 ): >GPRI_HUMAN
SLRRKSFRSGSLRSLS

SEQ ID NO: 14296 - protein, 16 aa, Homo sapiens
  ( 80 )...( 95 ): >GPRJ_HUMAN
IFGNSLVCLVIHRSRR

SEQ ID NO: 14297 - protein, 16 aa, Homo sapiens
  ( 81 )...( 96 ): >GPRJ_HUMAN
FGNSLVCLVIHRSRRT

SEQ ID NO: 14298 - protein, 16 aa, Homo sapiens
  ( 82 )...( 97 ): >GPRJ_HUMAN
GNSLVCLVIHRSRRTQ

SEQ ID NO: 14299 - protein, 16 aa, Homo sapiens
  ( 83 )...( 98 ): >GPRJ_HUMAN
NSLVCLVIHRSRRTQS

SEQ ID NO: 14300 - protein, 16 aa, Homo sapiens
  ( 84 )...( 99 ): >GPRJ_HUMAN
SLVCLVIHRSRRTQST

SEQ ID NO: 14301 - protein, 16 aa, Homo sapiens
  ( 85 )...( 100 ): >GPRJ_HUMAN
LVCLVIHRSRRTQSTT

SEQ ID NO: 14302 - protein, 16 aa, Homo sapiens
  ( 86 )...( 101 ): >GPRJ_HUMAN
VCLVIHRSRRTQSTTN

SEQ ID NO: 14303 - protein, 16 aa, Homo sapiens
  ( 87 )...( 102 ): >GPRJ_HUMAN
CLVIHRSRRTQSTTNY

SEQ ID NO: 14304 - protein, 16 aa, Homo sapiens
  ( 92 )...( 107 ): >GPRJ_HUMAN
RSRRTQSTTNYFVVSM

SEQ ID NO: 14305 - protein, 16 aa, Homo sapiens
  ( 128 )...( 143 ): >GPRJ_HUMAN
TGRWTLGSATCKVVRY

SEQ ID NO: 14306 - protein, 16 aa, Homo sapiens
  ( 130 )...( 145 ): >GPRJ_HUMAN
RWTLGSATCKVVRYFQ

SEQ ID NO: 14307 - protein, 16 aa, Homo sapiens
  ( 167 )...( 182 ): >GPRJ_HUMAN
IVYPLSFKVSREKAKK

SEQ ID NO: 14308 - protein, 16 aa, Homo sapiens
  ( 168 )...( 183 ): >GPRJ_HUMAN
VYPLSFKVSREKAKKM

SEQ ID NO: 14309 - protein, 16 aa, Homo sapiens
  ( 170 )...( 185 ): >GPRJ_HUMAN
PLSFKVSREKAKKMIA

SEQ ID NO: 14310 - protein, 16 aa, Homo sapiens
  ( 171 )...( 186 ): >GPRJ_HUMAN
LSFKVSREKAKKMIAA

SEQ ID NO: 14311 - protein, 16 aa, Homo sapiens
  ( 172 )...( 187 ): >GPRJ_HUMAN
SFKVSREKAKKMIAAS

SEQ ID NO: 14312 - protein, 16 aa, Homo sapiens
  ( 173 )...( 188 ): >GPRJ_HUMAN
FKVSREKAKKMIAASW

SEQ ID NO: 14313 - protein, 16 aa, Homo sapiens
  ( 174 )...( 189 ): >GPRJ_HUMAN
KVSREKAKKMIAASWI

SEQ ID NO: 14314 - protein, 16 aa, Homo sapiens
  ( 175 )...( 190 ): >GPRJ_HUMAN
VSREKAKKMIAASWIF

SEQ ID NO: 14315 - protein, 16 aa, Homo sapiens
  ( 244 )...( 259 ): >GPRJ_HUMAN
QKVIKYIWRIGTDGRT

SEQ ID NO: 14316 - protein, 16 aa, Homo sapiens
  ( 245 )...( 260 ): >GPRJ_HUMAN
KVIKYIWRIGTDGRTV

SEQ ID NO: 14317 - protein, 16 aa, Homo sapiens
  ( 246 )...( 261 ): >GPRJ_HUMAN
VIKYIWRIGTDGRTVR

SEQ ID NO: 14318 - protein, 16 aa, Homo sapiens
  ( 247 )...( 262 ): >GPRJ_HUMAN
IKYIWRIGTDGRTVRR

SEQ ID NO: 14319 - protein, 16 aa, Homo sapiens
  ( 248 )...( 263 ): >GPRJ_HUMAN
KYIWRIGTDGRTVRRT

SEQ ID NO: 14320 - protein, 16 aa, Homo sapiens
  ( 249 )...( 264 ): >GPRJ_HUMAN
YIWRIGTDGRTVRRTM

SEQ ID NO: 14321 - protein, 16 aa, Homo sapiens
  ( 250 )...( 265 ): >GPRJ_HUMAN
IWRIGTDGRTVRRTMN

SEQ ID NO: 14322 - protein, 16 aa, Homo sapiens
  ( 251 )...( 266 ): >GPRJ_HUMAN
WRIGTDGRTVRRTMNI

SEQ ID NO: 14323 - protein, 16 aa, Homo sapiens
  ( 252 )...( 267 ): >GPRJ_HUMAN
RIGTDGRTVRRTMNIV

SEQ ID NO: 14324 - protein, 16 aa, Homo sapiens
  ( 254 )...( 269 ): >GPRJ_HUMAN
GTDGRTVRRTMNIVPR

SEQ ID NO: 14325 - protein, 16 aa, Homo sapiens
  ( 255 )...( 270 ): >GPRJ_HUMAN
TDGRTVRRTMNIVPRT

SEQ ID NO: 14326 - protein, 16 aa, Homo sapiens
  ( 256 )...( 271 ): >GPRJ_HUMAN
DGRTVRRTMNIVPRTK

SEQ ID NO: 14327 - protein, 16 aa, Homo sapiens
  ( 257 )...( 272 ): >GPRJ_HUMAN
GRTVRRTMNIVPRTKV

SEQ ID NO: 14328 - protein, 16 aa, Homo sapiens
  ( 258 )...( 273 ): >GPRJ_HUMAN
RTVRRTMNIVPRTKVK

SEQ ID NO: 14329 - protein, 16 aa, Homo sapiens
  ( 259 )...( 274 ): >GPRJ_HUMAN
TVRRTMNIVPRTKVKT

SEQ ID NO: 14330 - protein, 16 aa, Homo sapiens
  ( 260 )...( 275 ): >GPRJ_HUMAN
VRRTMNIVPRTKVKTI

SEQ ID NO: 14331 - protein, 16 aa, Homo sapiens
  ( 261 )...( 276 ): >GPRJ_HUMAN
RRTMNIVPRTKVKTIK

SEQ ID NO: 14332 - protein, 16 aa, Homo sapiens
  ( 262 )...( 277 ): >GPRJ_HUMAN
RTMNIVPRTKVKTIKM

SEQ ID NO: 14333 - protein, 16 aa, Homo sapiens
  ( 263 )...( 278 ): >GPRJ_HUMAN
TMNIVPRTKVKTIKMF

SEQ ID NO: 14334 - protein, 16 aa, Homo sapiens
  ( 264 )...( 279 ): >GPRJ_HUMAN
MNIVPRTKVKTIKMFL

SEQ ID NO: 14335 - protein, 16 aa, Homo sapiens
  ( 265 )...( 280 ): >GPRJ_HUMAN
NIVPRTKVKTIKMFLI

SEQ ID NO: 14336 - protein, 16 aa, Homo sapiens
  ( 267 )...( 282 ): >GPRJ_HUMAN
VPRTKVKTIKMFLILN

SEQ ID NO: 14337 - protein, 16 aa, Homo sapiens
  ( 268 )...( 283 ): >GPRJ_HUMAN
PRTKVKTIKMFLILNL

SEQ ID NO: 14338 - protein, 16 aa, Homo sapiens
  ( 354 )...( 369 ): >GPRJ_HUMAN
RSNAYTITTSSRMAKK

SEQ ID NO: 14339 - protein, 16 aa, Homo sapiens
  ( 80 )...( 95 ): >GPRK_HUMAN
CRTRAKTPSVIYTINL

SEQ ID NO: 14340 - protein, 16 aa, Homo sapiens
  ( 81 )...( 96 ): >GPRK_HUMAN
RTRAKTPSVIYTINLV

SEQ ID NO: 14341 - protein, 16 aa, Homo sapiens
  ( 218 )...( 233 ): >GPRK_HUMAN
RIMCALSRPGLLHQGR

SEQ ID NO: 14342 - protein, 16 aa, Homo sapiens
  ( 220 )...( 235 ): >GPRK_HUMAN
MCALSRPGLLHQGRQR

SEQ ID NO: 14343 - protein, 16 aa, Homo sapiens
  ( 221 )...( 236 ): >GPRK_HUMAN
CALSRPGLLHQGRQRR

SEQ ID NO: 14344 - protein, 16 aa, Homo sapiens
  ( 222 )...( 237 ): >GPRK_HUMAN
ALSRPGLLHQGRQRRV

SEQ ID NO: 14345 - protein, 16 aa, Homo sapiens
  ( 223 )...( 238 ): >GPRK_HUMAN
LSRPGLLHQGRQRRVR

SEQ ID NO: 14346 - protein, 16 aa, Homo sapiens
  ( 224 )...( 239 ): >GPRK_HUMAN
SRPGLLHQGRQRRVRA

SEQ ID NO: 14347 - protein, 16 aa, Homo sapiens
  ( 225 )...( 240 ): >GPRK_HUMAN
RPGLLHQGRQRRVRAM

SEQ ID NO: 14348 - protein, 16 aa, Homo sapiens
  ( 226 )...( 241 ): >GPRK_HUMAN
PGLLHQGRQRRVRAMQ

SEQ ID NO: 14349 - protein, 16 aa, Homo sapiens
  ( 227 )...( 242 ): >GPRK_HUMAN
GLLHQGRQRRVRAMQL

SEQ ID NO: 14350 - protein, 16 aa, Homo sapiens
  ( 228 )...( 243 ): >GPRK_HUMAN
LLHQGRQRRVRAMQLL

SEQ ID NO: 14351 - protein, 16 aa, Homo sapiens
  ( 229 )...( 244 ): >GPRK_HUMAN
LHQGRQRRVRAMQLLL

SEQ ID NO: 14352 - protein, 16 aa, Homo sapiens
  ( 230 )...( 245 ): >GPRK_HUMAN
HQGRQRRVRAMQLLLT

SEQ ID NO: 14353 - protein, 16 aa, Homo sapiens
  ( 231 )...( 246 ): >GPRK_HUMAN
QGRQRRVRAMQLLLTV

SEQ ID NO: 14354 - protein, 16 aa, Homo sapiens
  ( 232 )...( 247 ): >GPRK_HUMAN
GRQRRVRAMQLLLTVL

SEQ ID NO: 14355 - protein, 16 aa, Homo sapiens
  ( 233 )...( 248 ): >GPRK_HUMAN
RQRRVRAMQLLLTVLI

SEQ ID NO: 14356 - protein, 16 aa, Homo sapiens
  ( 132 )...( 147 ): >GPRL_HUMAN
TKPLTYNTLVTPWRLR

SEQ ID NO: 14357 - protein, 16 aa, Homo sapiens
  ( 302 )...( 317 ): >GPRL_HUMAN
VIYSLSNSVFQRGLKR

SEQ ID NO: 14358 - protein, 16 aa, Homo sapiens
  ( 303 )...( 318 ): >GPRL_HUMAN
IYSLSNSVFQRGLKRL

SEQ ID NO: 14359 - protein, 16 aa, Homo sapiens
  ( 304 )...( 319 ): >GPRL_HUMAN
YSLSNSVFQRGLKRLS

SEQ ID NO: 14360 - protein, 16 aa, Homo sapiens
  ( 305 )...( 320 ): >GPRL_HUMAN
SLSNSVFQRGLKRLSG

SEQ ID NO: 14361 - protein, 16 aa, Homo sapiens
  ( 306 )...( 321 ): >GPRL_HUMAN
LSNSVFQRGLKRLSGA

SEQ ID NO: 14362 - protein, 16 aa, Homo sapiens
  ( 143 )...( 158 ): >GPRM_HUMAN
ISVKPANRILTMGRAV

SEQ ID NO: 14363 - protein, 16 aa, Homo sapiens
  ( 144 )...( 159 ): >GPRM_HUMAN
SVKPANRILTMGRAVM

SEQ ID NO: 14364 - protein, 16 aa, Homo sapiens
  ( 145 )...( 160 ): >GPRM_HUMAN
VKPANRILTMGRAVML

SEQ ID NO: 14365 - protein, 16 aa, Homo sapiens
  ( 146 )...( 161 ): >GPRM_HUMAN
KPANRILTMGRAVMLM

SEQ ID NO: 14366 - protein, 16 aa, Homo sapiens
  ( 230 )...( 245 ): >GPRM_HUMAN
TYTKILQALNIRIGTR

SEQ ID NO: 14367 - protein, 16 aa, Homo sapiens
  ( 231 )...( 246 ): >GPRM_HUMAN
YTKILQALNIRIGTRF

SEQ ID NO: 14368 - protein, 16 aa, Homo sapiens
  ( 232 )...( 247 ): >GPRM_HUMAN
TKILQALNIRIGTRFS

SEQ ID NO: 14369 - protein, 16 aa, Homo sapiens
  ( 233 )...( 248 ): >GPRM_HUMAN
KILQALNIRIGTRFST

SEQ ID NO: 14370 - protein, 16 aa, Homo sapiens
  ( 236 )...( 251 ): >GPRM_HUMAN
QALNIRIGTRFSTGQK

SEQ ID NO: 14371 - protein, 16 aa, Homo sapiens
  ( 237 )...( 252 ): >GPRM_HUMAN
ALNIRIGTRFSTGQKK

SEQ ID NO: 14372 - protein, 16 aa, Homo sapiens
  ( 238 )...( 253 ): >GPRM_HUMAN
LNIRIGTRFSTGQKKK

SEQ ID NO: 14373 - protein, 16 aa, Homo sapiens
  ( 239 )...( 254 ): >GPRM_HUMAN
NIRIGTRFSTGQKKKA

SEQ ID NO: 14374 - protein, 16 aa, Homo sapiens
  ( 240 )...( 255 ): >GPRM_HUMAN
IRIGTRFSTGQKKKAR

SEQ ID NO: 14375 - protein, 16 aa, Homo sapiens
  ( 241 )...( 256 ): >GPRM_HUMAN
RIGTRFSTGQKKKARK

SEQ ID NO: 14376 - protein, 16 aa, Homo sapiens
  ( 242 )...( 257 ): >GPRM_HUMAN
IGTRFSTGQKKKARKK

SEQ ID NO: 14377 - protein, 16 aa, Homo sapiens
  ( 244 )...( 259 ): >GPRM_HUMAN
TRFSTGQKKKARKKKT

SEQ ID NO: 14378 - protein, 16 aa, Homo sapiens
  ( 246 )...( 261 ): >GPRM_HUMAN
FSTGQKKKARKKKTIS

SEQ ID NO: 14379 - protein, 16 aa, Homo sapiens
  ( 247 )...( 262 ): >GPRM_HUMAN
STGQKKKARKKKTISL

SEQ ID NO: 14380 - protein, 16 aa, Homo sapiens
  ( 248 )...( 263 ): >GPRM_HUMAN
TGQKKKARKKKTISLT

SEQ ID NO: 14381 - protein, 16 aa, Homo sapiens
  ( 249 )...( 264 ): >GPRM_HUMAN
GQKKKARKKKTISLTT

SEQ ID NO: 14382 - protein, 16 aa, Homo sapiens
  ( 250 )...( 265 ): >GPRM_HUMAN
QKKKARKKKTISLTTQ

SEQ ID NO: 14383 - protein, 16 aa, Homo sapiens
  ( 251 )...( 266 ): >GPRM_HUMAN
KKKARKKKTISLTTQH

SEQ ID NO: 14384 - protein, 16 aa, Homo sapiens
  ( 252 )...( 267 ): >GPRM_HUMAN
KKARKKKTISLTTQHE

SEQ ID NO: 14385 - protein, 16 aa, Homo sapiens
  ( 281 )...( 296 ): >GPRM_HUMAN
VFGVRTSVSVIIALRR

SEQ ID NO: 14386 - protein, 16 aa, Homo sapiens
  ( 282 )...( 297 ): >GPRM_HUMAN
FGVRTSVSVIIALRRA

SEQ ID NO: 14387 - protein, 16 aa, Homo sapiens
  ( 284 )...( 299 ): >GPRM_HUMAN
VRTSVSVIIALRRAVK

SEQ ID NO: 14388 - protein, 16 aa, Homo sapiens
  ( 285 )...( 300 ): >GPRM_HUMAN
RTSVSVIIALRRAVKR

SEQ ID NO: 14389 - protein, 16 aa, Homo sapiens
  ( 286 )...( 301 ): >GPRM_HUMAN
TSVSVIIALRRAVKRH

SEQ ID NO: 14390 - protein, 16 aa, Homo sapiens
  ( 287 )...( 302 ): >GPRM_HUMAN
SVSVIIALRRAVKRHR

SEQ ID NO: 14391 - protein, 16 aa, Homo sapiens
  ( 288 )...( 303 ): >GPRM_HUMAN
VSVIIALRRAVKRHRE

SEQ ID NO: 14392 - protein, 16 aa, Homo sapiens
  ( 289 )...( 304 ): >GPRM_HUMAN
SVIIALRRAVKRHRER

SEQ ID NO: 14393 - protein, 16 aa, Homo sapiens
  ( 306 )...( 321 ): >GPRM_HUMAN
ERQKRVFRMSLLIIST

SEQ ID NO: 14394 - protein, 16 aa, Homo sapiens
  ( 307 )...( 322 ): >GPRM_HUMAN
RQKRVFRMSLLIISTF

SEQ ID NO: 14395 - protein, 16 aa, Homo sapiens
  ( 373 )...( 388 ): >GPRM_HUMAN
KFQKVLKSKMKKRVVS

SEQ ID NO: 14396 - protein, 16 aa, Homo sapiens
  ( 374 )...( 389 ): >GPRM_HUMAN
FQKVLKSKMKKRVVSI

SEQ ID NO: 14397 - protein, 16 aa, Homo sapiens
  ( 375 )...( 390 ): >GPRM_HUMAN
QKVLKSKMKKRVVSIV

SEQ ID NO: 14398 - protein, 16 aa, Homo sapiens
  ( 376 )...( 391 ): >GPRM_HUMAN
KVLKSKMKKRVVSIVE

SEQ ID NO: 14399 - protein, 16 aa, Homo sapiens
  ( 377 )...( 392 ): >GPRM_HUMAN
VLKSKMKKRVVSIVEA

SEQ ID NO: 14400 - protein, 16 aa, Homo sapiens
  ( 56 )...( 71 ): >GPRO_HUMAN
RMSVLRAKPMSNSQRL

SEQ ID NO: 14401 - protein, 16 aa, Homo sapiens
  ( 57 )...( 72 ): >GPRO_HUMAN
MSVLRAKPMSNSQRLL

SEQ ID NO: 14402 - protein, 16 aa, Homo sapiens
  ( 58 )...( 73 ): >GPRO_HUMAN
SVLRAKPMSNSQRLLL

SEQ ID NO: 14403 - protein, 16 aa, Homo sapiens
  ( 59 )...( 74 ): >GPRO_HUMAN
VLRAKPMSNSQRLLLL

SEQ ID NO: 14404 - protein, 16 aa, Homo sapiens
  ( 60 )...( 75 ): >GPRO_HUMAN
LRAKPMSNSQRLLLLS

SEQ ID NO: 14405 - protein, 16 aa, Homo sapiens
  ( 190 )...( 205 ): >GPRO_HUMAN
RYLATVHPISSTKFRK

SEQ ID NO: 14406 - protein, 16 aa, Homo sapiens
  ( 201 )...( 216 ): >GPRO_HUMAN
TKFRKPSVATLVICLL

SEQ ID NO: 14407 - protein, 16 aa, Homo sapiens
  ( 279 )...( 294 ): >GPRO_HUMAN
RILQRMTSSVAPASQR

SEQ ID NO: 14408 - protein, 16 aa, Homo sapiens
  ( 282 )...( 297 ): >GPRO_HUMAN
QRMTSSVAPASQRSIR

SEQ ID NO: 14409 - protein, 16 aa, Homo sapiens
  ( 283 )...( 298 ): >GPRO_HUMAN
RMTSSVAPASQRSIRL

SEQ ID NO: 14410 - protein, 16 aa, Homo sapiens
  ( 284 )...( 299 ): >GPRO_HUMAN
MTSSVAPASQRSIRLR

SEQ ID NO: 14411 - protein, 16 aa, Homo sapiens
  ( 285 )...( 300 ): >GPRO_HUMAN
TSSVAPASQRSIRLRT

SEQ ID NO: 14412 - protein, 16 aa, Homo sapiens
  ( 286 )...( 301 ): >GPRO_HUMAN
SSVAPASQRSIRLRTK

SEQ ID NO: 14413 - protein, 16 aa, Homo sapiens
  ( 287 )...( 302 ): >GPRO_HUMAN
SVAPASQRSIRLRTKR

SEQ ID NO: 14414 - protein, 16 aa, Homo sapiens
  ( 288 )...( 303 ): >GPRO_HUMAN
VAPASQRSIRLRTKRV

SEQ ID NO: 14415 - protein, 16 aa, Homo sapiens
  ( 289 )...( 304 ): >GPRO_HUMAN
APASQRSIRLRTKRVT

SEQ ID NO: 14416 - protein, 16 aa, Homo sapiens
  ( 290 )...( 305 ): >GPRO_HUMAN
PASQRSIRLRTKRVTR

SEQ ID NO: 14417 - protein, 16 aa, Homo sapiens
  ( 291 )...( 306 ): >GPRO_HUMAN
ASQRSIRLRTKRVTRT

SEQ ID NO: 14418 - protein, 16 aa, Homo sapiens
  ( 292 )...( 307 ): >GPRO_HUMAN
SQRSIRLRTKRVTRTA

SEQ ID NO: 14419 - protein, 16 aa, Homo sapiens
  ( 293 )...( 308 ): >GPRO_HUMAN
QRSIRLRTKRVTRTAI

SEQ ID NO: 14420 - protein, 16 aa, Homo sapiens
  ( 294 )...( 309 ): >GPRO_HUMAN
RSIRLRTKRVTRTAIA

SEQ ID NO: 14421 - protein, 16 aa, Homo sapiens
  ( 295 )...( 310 ): >GPRO_HUMAN
SIRLRTKRVTRTAIAI

SEQ ID NO: 14422 - protein, 16 aa, Homo sapiens
  ( 296 )...( 311 ): >GPRO_HUMAN
IRLRTKRVTRTAIAIC

SEQ ID NO: 14423 - protein, 16 aa, Homo sapiens
  ( 297 )...( 312 ): >GPRO_HUMAN
RLRTKRVTRTAIAICL

SEQ ID NO: 14424 - protein, 16 aa, Homo sapiens
  ( 298 )...( 313 ): >GPRO_HUMAN
LRTKRVTRTAIAICLV

SEQ ID NO: 14425 - protein, 16 aa, Homo sapiens
  ( 299 )...( 314 ): >GPRO_HUMAN
RTKRVTRTAIAICLVF

SEQ ID NO: 14426 - protein, 16 aa, Homo sapiens
  ( 300 )...( 315 ): >GPRO_HUMAN
TKRVTRTAIAICLVFF

SEQ ID NO: 14427 - protein, 16 aa, Homo sapiens
  ( 301 )...( 316 ): >GPRO_HUMAN
KRVTRTAIAICLVFFV

SEQ ID NO: 14428 - protein, 16 aa, Homo sapiens
  ( 361 )...( 376 ): >GPRO_HUMAN
IVLCETFRKRLVLSVK

SEQ ID NO: 14429 - protein, 16 aa, Homo sapiens
  ( 362 )...( 377 ): >GPRO_HUMAN
VLCETFRKRLVLSVKP

SEQ ID NO: 14430 - protein, 16 aa, Homo sapiens
  ( 363 )...( 378 ): >GPRO_HUMAN
LCETFRKRLVLSVKPA

SEQ ID NO: 14431 - protein, 16 aa, Homo sapiens
  ( 364 )...( 379 ): >GPRO_HUMAN
CETFRKRLVLSVKPAA

SEQ ID NO: 14432 - protein, 16 aa, Homo sapiens
  ( 365 )...( 380 ): >GPRO_HUMAN
ETFRKRLVLSVKPAAQ

SEQ ID NO: 14433 - protein, 16 aa, Homo sapiens
  ( 366 )...( 381 ): >GPRO_HUMAN
TFRKRLVLSVKPAAQG

SEQ ID NO: 14434 - protein, 16 aa, Homo sapiens
  ( 367 )...( 382 ): >GPRO_HUMAN
FRKRLVLSVKPAAQGQ

SEQ ID NO: 14435 - protein, 16 aa, Homo sapiens
  ( 368 )...( 383 ): >GPRO_HUMAN
RKRLVLSVKPAAQGQL

SEQ ID NO: 14436 - protein, 16 aa, Homo sapiens
  ( 369 )...( 384 ): >GPRO_HUMAN
KRLVLSVKPAAQGQLR

SEQ ID NO: 14437 - protein, 16 aa, Homo sapiens
  ( 370 )...( 385 ): >GPRO_HUMAN
RLVLSVKPAAQGQLRA

SEQ ID NO: 14438 - protein, 16 aa, Homo sapiens
  ( 56 )...( 71 ): >GPRP_HUMAN
GNAFVVWLLAGRRGPR

SEQ ID NO: 14439 - protein, 16 aa, Homo sapiens
  ( 57 )...( 72 ): >GPRP_HUMAN
NAFVVWLLAGRRGPRR

SEQ ID NO: 14440 - protein, 16 aa, Homo sapiens
  ( 58 )...( 73 ): >GPRP_HUMAN
AFVVWLLAGRRGPRRL

SEQ ID NO: 14441 - protein, 16 aa, Homo sapiens
  ( 59 )...( 74 ): >GPRP_HUMAN
FVVWLLAGRRGPRRLV

SEQ ID NO: 14442 - protein, 16 aa, Homo sapiens
  ( 60 )...( 75 ): >GPRP_HUMAN
VVWLLAGRRGPRRLVD

SEQ ID NO: 14443 - protein, 16 aa, Homo sapiens
  ( 61 )...( 76 ): >GPRP_HUMAN
VWLLAGRRGPRRLVDT

SEQ ID NO: 14444 - protein, 16 aa, Homo sapiens
  ( 62 )...( 77 ): >GPRP_HUMAN
WLLAGRRGPRRLVDTF

SEQ ID NO: 14445 - protein, 16 aa, Homo sapiens
  ( 63 )...( 78 ): >GPRP_HUMAN
LLAGRRGPRRLVDTFV

SEQ ID NO: 14446 - protein, 16 aa, Homo sapiens
  ( 64 )...( 79 ): >GPRP_HUMAN
LAGRRGPRRLVDTFVL

SEQ ID NO: 14447 - protein, 16 aa, Homo sapiens
  ( 65 )...( 80 ): >GPRP_HUMAN
AGRRGPRRLVDTFVLH

SEQ ID NO: 14448 - protein, 16 aa, Homo sapiens
  ( 66 )...( 81 ): >GPRP_HUMAN
GRRGPRRLVDTFVLHL

SEQ ID NO: 14449 - protein, 16 aa, Homo sapiens
  ( 67 )...( 82 ): >GPRP_HUMAN
RRGPRRLVDTFVLHLA

SEQ ID NO: 14450 - protein, 16 aa, Homo sapiens
  ( 136 )...( 151 ): >GPRP_HUMAN
RYLAVVKLLEARPLRT

SEQ ID NO: 14451 - protein, 16 aa, Homo sapiens
  ( 138 )...( 153 ): >GPRP_HUMAN
LAVVKLLEARPLRTPR

SEQ ID NO: 14452 - protein, 16 aa, Homo sapiens
  ( 139 )...( 154 ): >GPRP_HUMAN
AVVKLLEARPLRTPRC

SEQ ID NO: 14453 - protein, 16 aa, Homo sapiens
  ( 140 )...( 155 ): >GPRP_HUMAN
VVKLLEARPLRTPRCA

SEQ ID NO: 14454 - protein, 16 aa, Homo sapiens
  ( 141 )...( 156 ): >GPRP_HUMAN
VKLLEARPLRTPRCAV

SEQ ID NO: 14455 - protein, 16 aa, Homo sapiens
  ( 142 )...( 157 ): >GPRP_HUMAN
KLLEARPLRTPRCAVA

SEQ ID NO: 14456 - protein, 16 aa, Homo sapiens
  ( 212 )...( 227 ): >GPRP_HUMAN
LPLVVTLFCYCRISRR

SEQ ID NO: 14457 - protein, 16 aa, Homo sapiens
  ( 213 )...( 228 ): >GPRP_HUMAN
PLVVTLFCYCRISRRL

SEQ ID NO: 14458 - protein, 16 aa, Homo sapiens
  ( 214 )...( 229 ): >GPRP_HUMAN
LVVTLFCYCRISRRLR

SEQ ID NO: 14459 - protein, 16 aa, Homo sapiens
  ( 232 )...( 247 ): >GPRP_HUMAN
PHVGRARRNSLRIIFA

SEQ ID NO: 14460 - protein, 16 aa, Homo sapiens
  ( 233 )...( 248 ): >GPRP_HUMAN
HVGRARRNSLRIIFAI

SEQ ID NO: 14461 - protein, 16 aa, Homo sapiens
  ( 234 )...( 249 ): >GPRP_HUMAN
VGRARRNSLRIIFAIE

SEQ ID NO: 14462 - protein, 16 aa, Homo sapiens
  ( 235 )...( 250 ): >GPRP_HUMAN
GRARRNSLRIIFAIES

SEQ ID NO: 14463 - protein, 16 aa, Homo sapiens
  ( 236 )...( 251 ): >GPRP_HUMAN
RARRNSLRIIFAIEST

SEQ ID NO: 14464 - protein, 16 aa, Homo sapiens
  ( 316 )...( 331 ): >GPRP_HUMAN
RALDGACGRTGRLARR

SEQ ID NO: 14465 - protein, 16 aa, Homo sapiens
  ( 317 )...( 332 ): >GPRP_HUMAN
ALDGACGRTGRLARRI

SEQ ID NO: 14466 - protein, 16 aa, Homo sapiens
  ( 318 )...( 333 ): >GPRP_HUMAN
LDGACGRTGRLARRIS

SEQ ID NO: 14467 - protein, 16 aa, Homo sapiens
  ( 323 )...( 338 ): >GPRP_HUMAN
GRTGRLARRISSASSL

SEQ ID NO: 14468 - protein, 16 aa, Homo sapiens
  ( 324 )...( 339 ): >GPRP_HUMAN
RTGRLARRISSASSLS

SEQ ID NO: 14469 - protein, 16 aa, Homo sapiens
  ( 325 )...( 340 ): >GPRP_HUMAN
TGRLARRISSASSLSR

SEQ ID NO: 14470 - protein, 16 aa, Homo sapiens
  ( 326 )...( 341 ): >GPRP_HUMAN
GRLARRISSASSLSRD

SEQ ID NO: 14471 - protein, 16 aa, Homo sapiens
  ( 66 )...( 81 ): >GPRS_HUMAN
LRALACLPAVMLAARR

SEQ ID NO: 14472 - protein, 16 aa, Homo sapiens
  ( 258 )...( 273 ): >GPRS_HUMAN
IRPAGPGRGARRLLVL

SEQ ID NO: 14473 - protein, 16 aa, Homo sapiens
  ( 259 )...( 274 ): >GPRS_HUMAN
RPAGPGRGARRLLVLE

SEQ ID NO: 14474 - protein, 16 aa, Homo sapiens
  ( 276 )...( 291 ): >GPRS_HUMAN
FKTEKRLCKMFYAVTL

SEQ ID NO: 14475 - protein, 16 aa, Homo sapiens
  ( 277 )...( 292 ): >GPRS_HUMAN
KTEKRLCKMFYAVTLL

SEQ ID NO: 14476 - protein, 16 aa, Homo sapiens
  ( 107 )...( 122 ): >GPRV_HUMAN
AVALDRYLRVVHPRLK

SEQ ID NO: 14477 - protein, 16 aa, Homo sapiens
  ( 108 )...( 123 ): >GPRV_HUMAN
VALDRYLRVVHPRLKV

SEQ ID NO: 14478 - protein, 16 aa, Homo sapiens
  ( 113 )...( 128 ): >GPRV_HUMAN
YLRVVHPRLKVNLLSP

SEQ ID NO: 14479 - protein, 16 aa, Homo sapiens
  ( 114 )...( 129 ): >GPRV_HUMAN
LRVVHPRLKVNLLSPQ

SEQ ID NO: 14480 - protein, 16 aa, Homo sapiens
  ( 115 )...( 130 ): >GPRV_HUMAN
RVVHPRLKVNLLSPQA

SEQ ID NO: 14481 - protein, 16 aa, Homo sapiens
  ( 192 )...( 207 ): >GPRV_HUMAN
LIVFCNAGIIRALQKR

SEQ ID NO: 14482 - protein, 16 aa, Homo sapiens
  ( 193 )...( 208 ): >GPRV_HUMAN
IVFCNAGIIRALQKRL

SEQ ID NO: 14483 - protein, 16 aa, Homo sapiens
  ( 194 )...( 209 ): >GPRV_HUMAN
VFCNAGIIRALQKRLR

SEQ ID NO: 14484 - protein, 16 aa, Homo sapiens
  ( 195 )...( 210 ): >GPRV_HUMAN
FCNAGIIRALQKRLRE

SEQ ID NO: 14485 - protein, 16 aa, Homo sapiens
  ( 196 )...( 211 ): >GPRV_HUMAN
CNAGIIRALQKRLREP

SEQ ID NO: 14486 - protein, 16 aa, Homo sapiens
  ( 198 )...( 213 ): >GPRV_HUMAN
AGIIRALQKRLREPEK

SEQ ID NO: 14487 - protein, 16 aa, Homo sapiens
  ( 199 )...( 214 ): >GPRV_HUMAN
GIIRALQKRLREPEKQ

SEQ ID NO: 14488 - protein, 16 aa, Homo sapiens
  ( 213 )...( 228 ): >GPRV_HUMAN
KQPKLQRAQALVTLVV

SEQ ID NO: 14489 - protein, 16 aa, Homo sapiens
  ( 291 )...( 306 ): >GPRV_HUMAN
SSYRRVFHTLRGKGQA

SEQ ID NO: 14490 - protein, 16 aa, Homo sapiens
  ( 292 )...( 307 ): >GPRV_HUMAN
SYRRVFHTLRGKGQAA

SEQ ID NO: 14491 - protein, 16 aa, Homo sapiens
  ( 293 )...( 308 ): >GPRV_HUMAN
YRRVFHTLRGKGQAAE

SEQ ID NO: 14492 - protein, 16 aa, Homo sapiens
  ( 294 )...( 309 ): >GPRV_HUMAN
RRVFHTLRGKGQAAEP

SEQ ID NO: 14493 - protein, 16 aa, Homo sapiens
  ( 13 )...( 28 ): >GPRW_HUMAN
DRQPGVLTRDRSCSRK

SEQ ID NO: 14494 - protein, 16 aa, Homo sapiens
  ( 14 )...( 29 ): >GPRW_HUMAN
RQPGVLTRDRSCSRKM

SEQ ID NO: 14495 - protein, 16 aa, Homo sapiens
  ( 230 )...( 245 ): >GPRW_HUMAN
AIIGTCAHLIRAKLLR

SEQ ID NO: 14496 - protein, 16 aa, Homo sapiens
  ( 238 )...( 253 ): >GPRW_HUMAN
LIRAKLLREGWVHANR

SEQ ID NO: 14497 - protein, 16 aa, Homo sapiens
  ( 247 )...( 262 ): >GPRW_HUMAN
GWVHANRPKRLLLVLV

SEQ ID NO: 14498 - protein, 16 aa, Homo sapiens
  ( 248 )...( 263 ): >GPRW_HUMAN
WVHANRPKRLLLVLVS

SEQ ID NO: 14499 - protein, 16 aa, Homo sapiens
  ( 249 )...( 264 ): >GPRW_HUMAN
VHANRPKRLLLVLVSA

SEQ ID NO: 14500 - protein, 16 aa, Homo sapiens
  ( 250 )...( 265 ): >GPRW_HUMAN
HANRPKRLLLVLVSAF

SEQ ID NO: 14501 - protein, 16 aa, Homo sapiens
  ( 251 )...( 266 ): >GPRW_HUMAN
ANRPKRLLLVLVSAFF

SEQ ID NO: 14502 - protein, 16 aa, Homo sapiens
  ( 71 )...( 86 ): >GPRY_HUMAN
GNIIALYVFLGIHRKR

SEQ ID NO: 14503 - protein, 16 aa, Homo sapiens
  ( 72 )...( 87 ): >GPRY_HUMAN
NIIALYVFLGIHRKRN

SEQ ID NO: 14504 - protein, 16 aa, Homo sapiens
  ( 73 )...( 88 ): >GPRY_HUMAN
IIALYVFLGIHRKRNS

SEQ ID NO: 14505 - protein, 16 aa, Homo sapiens
  ( 74 )...( 89 ): >GPRY_HUMAN
IALYVFLGIHRKRNSI

SEQ ID NO: 14506 - protein, 16 aa, Homo sapiens
  ( 75 )...( 90 ): >GPRY_HUMAN
ALYVFLGIHRKRNSIQ

SEQ ID NO: 14507 - protein, 16 aa, Homo sapiens
  ( 76 )...( 91 ): >GPRY_HUMAN
LYVFLGIHRKRNSIQI

SEQ ID NO: 14508 - protein, 16 aa, Homo sapiens
  ( 78 )...( 93 ): >GPRY_HUMAN
VFLGIHRKRNSIQIYL

SEQ ID NO: 14509 - protein, 16 aa, Homo sapiens
  ( 80 )...( 95 ): >GPRY_HUMAN
LGIHRKRNSIQIYLLN

SEQ ID NO: 14510 - protein, 16 aa, Homo sapiens
  ( 81 )...( 96 ): >GPRY_HUMAN
GIHRKRNSIQIYLLNV

SEQ ID NO: 14511 - protein, 16 aa, Homo sapiens
  ( 84 )...( 99 ): >GPRY_HUMAN
RKRNSIQIYLLNVAIA

SEQ ID NO: 14512 - protein, 16 aa, Homo sapiens
  ( 153 )...( 168 ): >GPRY_HUMAN
YIKINRSIQQRKAITT

SEQ ID NO: 14513 - protein, 16 aa, Homo sapiens
  ( 154 )...( 169 ): >GPRY_HUMAN
IKINRSIQQRKAITTK

SEQ ID NO: 14514 - protein, 16 aa, Homo sapiens
  ( 155 )...( 170 ): >GPRY_HUMAN
KINRSIQQRKAITTKQ

SEQ ID NO: 14515 - protein, 16 aa, Homo sapiens
  ( 156 )...( 171 ): >GPRY_HUMAN
INRSIQQRKAITTKQS

SEQ ID NO: 14516 - protein, 16 aa, Homo sapiens
  ( 157 )...( 172 ): >GPRY_HUMAN
NRSIQQRKAITTKQSI

SEQ ID NO: 14517 - protein, 16 aa, Homo sapiens
  ( 158 )...( 173 ): >GPRY_HUMAN
RSIQQRKAITTKQSIY

SEQ ID NO: 14518 - protein, 16 aa, Homo sapiens
  ( 160 )...( 175 ): >GPRY_HUMAN
IQQRKAITTKQSIYVC

SEQ ID NO: 14519 - protein, 16 aa, Homo sapiens
  ( 161 )...( 176 ): >GPRY_HUMAN
QQRKAITTKQSIYVCC

SEQ ID NO: 14520 - protein, 16 aa, Homo sapiens
  ( 162 )...( 177 ): >GPRY_HUMAN
QRKAITTKQSIYVCCI

SEQ ID NO: 14521 - protein, 16 aa, Homo sapiens
  ( 163 )...( 178 ): >GPRY_HUMAN
RKAITTKQSIYVCCIV

SEQ ID NO: 14522 - protein, 16 aa, Homo sapiens
  ( 234 )...( 249 ): >GPRY_HUMAN
IILSYIKIGKNLLRIS

SEQ ID NO: 14523 - protein, 16 aa, Homo sapiens
  ( 235 )...( 250 ): >GPRY_HUMAN
ILSYIKIGKNLLRISK

SEQ ID NO: 14524 - protein, 16 aa, Homo sapiens
  ( 236 )...( 251 ): >GPRY_HUMAN
LSYIKIGKNLLRISKR

SEQ ID NO: 14525 - protein, 16 aa, Homo sapiens
  ( 329 )...( 344 ): >GPRY_HUMAN
LMSSNIRKIMCQLLFR

SEQ ID NO: 14526 - protein, 16 aa, Homo sapiens
  ( 110 )...( 125 ): >GPRZ_HUMAN
IAVDRYVAVRHPLRAR

SEQ ID NO: 14527 - protein, 16 aa, Homo sapiens
  ( 111 )...( 126 ): >GPRZ_HUMAN
AVDRYVAVRHPLRARG

SEQ ID NO: 14528 - protein, 16 aa, Homo sapiens
  ( 112 )...( 127 ): >GPRZ_HUMAN
VDRYVAVRHPLRARGL

SEQ ID NO: 14529 - protein, 16 aa, Homo sapiens
  ( 114 )...( 129 ): >GPRZ_HUMAN
RYVAVRHPLRARGLRS

SEQ ID NO: 14530 - protein, 16 aa, Homo sapiens
  ( 115 )...( 130 ): >GPRZ_HUMAN
YVAVRHPLRARGLRSP

SEQ ID NO: 14531 - protein, 16 aa, Homo sapiens
  ( 116 )...( 131 ): >GPRZ_HUMAN
VAVRHPLRARGLRSPR

SEQ ID NO: 14532 - protein, 16 aa, Homo sapiens
  ( 120 )...( 135 ): >GPRZ_HUMAN
HPLRARGLRSPRQAAA

SEQ ID NO: 14533 - protein, 16 aa, Homo sapiens
  ( 121 )...( 136 ): >GPRZ_HUMAN
PLRARGLRSPRQAAAV

SEQ ID NO: 14534 - protein, 16 aa, Homo sapiens
  ( 122 )...( 137 ): >GPRZ_HUMAN
LRARGLRSPRQAAAVC

SEQ ID NO: 14535 - protein, 16 aa, Homo sapiens
  ( 211 )...( 226 ): >GPRZ_HUMAN
ATRKAARMVWANLLVF

SEQ ID NO: 14536 - protein, 16 aa, Homo sapiens
  ( 212 )...( 227 ): >GPRZ_HUMAN
TRKAARMVWANLLVFV

SEQ ID NO: 14537 - protein, 16 aa, Homo sapiens
  ( 213 )...( 228 ): >GPRZ_HUMAN
RKAARMVWANLLVFVV

SEQ ID NO: 14538 - protein, 16 aa, Homo sapiens
  ( 146 )...( 161 ): >GRFR_HUMAN
VAITILVALRRLHCPR

SEQ ID NO: 14539 - protein, 16 aa, Homo sapiens
  ( 147 )...( 162 ): >GRFR_HUMAN
AITILVALRRLHCPRN

SEQ ID NO: 14540 - protein, 16 aa, Homo sapiens
  ( 148 )...( 163 ): >GRFR_HUMAN
ITILVALRRLHCPRNY

SEQ ID NO: 14541 - protein, 16 aa, Homo sapiens
  ( 149 )...( 164 ): >GRFR_HUMAN
TILVALRRLHCPRNYV

SEQ ID NO: 14542 - protein, 16 aa, Homo sapiens
  ( 403 )...( 418 ): >GRFR_HUMAN
RTRAKWTTPSRSAAKV

SEQ ID NO: 14543 - protein, 16 aa, Homo sapiens
  ( 404 )...( 419 ): >GRFR_HUMAN
TRAKWTTPSRSAAKVL

SEQ ID NO: 14544 - protein, 16 aa, Homo sapiens
  ( 405 )...( 420 ): >GRFR_HUMAN
RAKWTTPSRSAAKVLT

SEQ ID NO: 14545 - protein, 16 aa, Homo sapiens
  ( 64 )...( 79 ): >GRHR_HUMAN
TQKKEKGKKLSRMKLL

SEQ ID NO: 14546 - protein, 16 aa, Homo sapiens
  ( 65 )...( 80 ): >GRHR_HUMAN
QKKEKGKKLSRMKLLL

SEQ ID NO: 14547 - protein, 16 aa, Homo sapiens
  ( 66 )...( 81 ): >GRHR_HUMAN
KKEKGKKLSRMKLLLK

SEQ ID NO: 14548 - protein, 16 aa, Homo sapiens
  ( 67 )...( 82 ): >GRHR_HUMAN
KEKGKKLSRMKLLLKH

SEQ ID NO: 14549 - protein, 16 aa, Homo sapiens
  ( 68 )...( 83 ): >GRHR_HUMAN
EKGKKLSRMKLLLKHL

SEQ ID NO: 14550 - protein, 16 aa, Homo sapiens
  ( 69 )...( 84 ): >GRHR_HUMAN
KGKKLSRMKLLLKHLT

SEQ ID NO: 14551 - protein, 16 aa, Homo sapiens
  ( 70 )...( 85 ): >GRHR_HUMAN
GKKLSRMKLLLKHLTL

SEQ ID NO: 14552 - protein, 16 aa, Homo sapiens
  ( 71 )...( 86 ): >GRHR_HUMAN
KKLSRMKLLLKHLTLA

SEQ ID NO: 14553 - protein, 16 aa, Homo sapiens
  ( 72 )...( 87 ): >GRHR_HUMAN
KLSRMKLLLKHLTLAN

SEQ ID NO: 14554 - protein, 16 aa, Homo sapiens
  ( 139 )...( 154 ): >GRHR_HUMAN
RSLAITRPLALKSNSK

SEQ ID NO: 14555 - protein, 16 aa, Homo sapiens
  ( 141 )...( 156 ): >GRHR_HUMAN
LAITRPLALKSNSKVG

SEQ ID NO: 14556 - protein, 16 aa, Homo sapiens
  ( 142 )...( 157 ): >GRHR_HUMAN
AITRPLALKSNSKVGQ

SEQ ID NO: 14557 - protein, 16 aa, Homo sapiens
  ( 254 )...( 269 ): >GRHR_HUMAN
SKNNIPRARLKTLKMT

SEQ ID NO: 14558 - protein, 16 aa, Homo sapiens
  ( 255 )...( 270 ): >GRHR_HUMAN
KNNIPRARLKTLKMTV

SEQ ID NO: 14559 - protein, 16 aa, Homo sapiens
  ( 256 )...( 271 ): >GRHR_HUMAN
NNIPRARLKTLKMTVA

SEQ ID NO: 14560 - protein, 16 aa, Homo sapiens
  ( 257 )...( 272 ): >GRHR_HUMAN
NIPRARLKTLKMTVAF

SEQ ID NO: 14561 - protein, 16 aa, Homo sapiens
  ( 258 )...( 273 ): >GRHR_HUMAN
IPRARLKTLKMTVAFA

SEQ ID NO: 14562 - protein, 16 aa, Homo sapiens
  ( 259 )...( 274 ): >GRHR_HUMAN
PRARLKTLKMTVAFAT

SEQ ID NO: 14563 - protein, 16 aa, Homo sapiens
  ( 260 )...( 275 ): >GRHR_HUMAN
RARLKTLKMTVAFATS

SEQ ID NO: 14564 - protein, 16 aa, Homo sapiens
  ( 57 )...( 72 ): >GRPR_HUMAN
GNITLIKIFCTVKSMR

SEQ ID NO: 14565 - protein, 16 aa, Homo sapiens
  ( 58 )...( 73 ): >GRPR_HUMAN
NITLIKIFCTVKSMRN

SEQ ID NO: 14566 - protein, 16 aa, Homo sapiens
  ( 59 )...( 74 ): >GRPR_HUMAN
ITLIKIFCTVKSMRNV

SEQ ID NO: 14567 - protein, 16 aa, Homo sapiens
  ( 60 )...( 75 ): >GRPR_HUMAN
TLIKIFCTVKSMRNVP

SEQ ID NO: 14568 - protein, 16 aa, Homo sapiens
  ( 100 )...( 115 ): >GRPR_HUMAN
RYLADRWLFGRIGCKL

SEQ ID NO: 14569 - protein, 16 aa, Homo sapiens
  ( 246 )...( 261 ): >GRPR_HUMAN
VEGNIHVKKQIESRKR

SEQ ID NO: 14570 - protein, 16 aa, Homo sapiens
  ( 247 )...( 262 ): >GRPR_HUMAN
EGNIHVKKQIESRKRL

SEQ ID NO: 14571 - protein, 16 aa, Homo sapiens
  ( 248 )...( 263 ): >GRPR_HUMAN
GNIHVKKQIESRKRLA

SEQ ID NO: 14572 - protein, 16 aa, Homo sapiens
  ( 250 )...( 265 ): >GRPR_HUMAN
IHVKKQIESRKRLAKT

SEQ ID NO: 14573 - protein, 16 aa, Homo sapiens
  ( 251 )...( 266 ): >GRPR_HUMAN
HVKKQIESRKRLAKTV

SEQ ID NO: 14574 - protein, 16 aa, Homo sapiens
  ( 252 )...( 267 ): >GRPR_HUMAN
VKKQIESRKRLAKTVL

SEQ ID NO: 14575 - protein, 16 aa, Homo sapiens
  ( 253 )...( 268 ): >GRPR_HUMAN
KKQIESRKRLAKTVLV

SEQ ID NO: 14576 - protein, 16 aa, Homo sapiens
  ( 254 )...( 269 ): >GRPR_HUMAN
KQIESRKRLAKTVLVF

SEQ ID NO: 14577 - protein, 16 aa, Homo sapiens
  ( 255 )...( 270 ): >GRPR_HUMAN
QIESRKRLAKTVLVFV

SEQ ID NO: 14578 - protein, 16 aa, Homo sapiens
  ( 256 )...( 271 ): >GRPR_HUMAN
IESRKRLAKTVLVFVG

SEQ ID NO: 14579 - protein, 16 aa, Homo sapiens
  ( 257 )...( 272 ): >GRPR_HUMAN
ESRKRLAKTVLVFVGL

SEQ ID NO: 14580 - protein, 16 aa, Homo sapiens
  ( 258 )...( 273 ): >GRPR_HUMAN
SRKRLAKTVLVFVGLF

SEQ ID NO: 14581 - protein, 16 aa, Homo sapiens
  ( 259 )...( 274 ): >GRPR_HUMAN
RKRLAKTVLVFVGLFA

SEQ ID NO: 14582 - protein, 16 aa, Homo sapiens
  ( 324 )...( 339 ): >GRPR_HUMAN
LLSKSFRKQFNTQLLC

SEQ ID NO: 14583 - protein, 16 aa, Homo sapiens
  ( 195 )...( 210 ): >H963_HUMAN
ILISNCLVIRQLYRNK

SEQ ID NO: 14584 - protein, 16 aa, Homo sapiens
  ( 132 )...( 147 ): >HH1R_HUMAN
PLRYLKYRTKTRASAT

SEQ ID NO: 14585 - protein, 16 aa, Homo sapiens
  ( 133 )...( 148 ): >HH1R_HUMAN
LRYLKYRTKTRASATI

SEQ ID NO: 14586 - protein, 16 aa, Homo sapiens
  ( 134 )...( 149 ): >HH1R_HUMAN
RYLKYRTKTRASATIL

SEQ ID NO: 14587 - protein, 16 aa, Homo sapiens
  ( 135 )...( 150 ): >HH1R_HUMAN
YLKYRTKTRASATILG

SEQ ID NO: 14588 - protein, 16 aa, Homo sapiens
  ( 136 )...( 151 ): >HH1R_HUMAN
LKYRTKTRASATILGA

SEQ ID NO: 14589 - protein, 16 aa, Homo sapiens
  ( 137 )...( 152 ): >HH1R_HUMAN
KYRTKTRASATILGAW

SEQ ID NO: 14590 - protein, 16 aa, Homo sapiens
  ( 138 )...( 153 ): >HH1R_HUMAN
YRTKTRASATILGAWF

SEQ ID NO: 14591 - protein, 16 aa, Homo sapiens
  ( 139 )...( 154 ): >HH1R_HUMAN
RTKTRASATILGAWFL

SEQ ID NO: 14592 - protein, 16 aa, Homo sapiens
  ( 400 )...( 415 ): >HH1R_HUMAN
QYVSGLHMNRERKAAK

SEQ ID NO: 14593 - protein, 16 aa, Homo sapiens
  ( 401 )...( 416 ): >HH1R_HUMAN
YVSGLHMNRERKAAKQ

SEQ ID NO: 14594 - protein, 16 aa, Homo sapiens
  ( 402 )...( 417 ): >HH1R_HUMAN
VSGLHMNRERKAAKQL

SEQ ID NO: 14595 - protein, 16 aa, Homo sapiens
  ( 403 )...( 418 ): >HH1R_HUMAN
SGLHMNRERKAAKQLG

SEQ ID NO: 14596 - protein, 16 aa, Homo sapiens
  ( 404 )...( 419 ): >HH1R_HUMAN
GLHMNRERKAAKQLGF

SEQ ID NO: 14597 - protein, 16 aa, Homo sapiens
  ( 405 )...( 420 ): >HH1R_HUMAN
LHMNRERKAAKQLGFI

SEQ ID NO: 14598 - protein, 16 aa, Homo sapiens
  ( 407 )...( 422 ): >HH1R_HUMAN
MNRERKAAKQLGFIMA

SEQ ID NO: 14599 - protein, 16 aa, Homo sapiens
  ( 408 )...( 423 ): >HH1R_HUMAN
NRERKAAKQLGFIMAA

SEQ ID NO: 14600 - protein, 16 aa, Homo sapiens
  ( 409 )...( 424 ): >HH1R_HUMAN
RERKAAKQLGFIMAAF

SEQ ID NO: 14601 - protein, 16 aa, Homo sapiens
  ( 411 )...( 426 ): >HH1R_HUMAN
RKAAKQLGFIMAAFIL

SEQ ID NO: 14602 - protein, 16 aa, Homo sapiens
  ( 35 )...( 50 ): >HH2R_HUMAN
GNVVVCLAVGLNRRLR

SEQ ID NO: 14603 - protein, 16 aa, Homo sapiens
  ( 36 )...( 51 ): >HH2R_HUMAN
NVVVCLAVGLNRRLRN

SEQ ID NO: 14604 - protein, 16 aa, Homo sapiens
  ( 37 )...( 52 ): >HH2R_HUMAN
VVVCLAVGLNRRLRNL

SEQ ID NO: 14605 - protein, 16 aa, Homo sapiens
  ( 38 )...( 53 ): >HH2R_HUMAN
VVCLAVGLNRRLRNLT

SEQ ID NO: 14606 - protein, 16 aa, Homo sapiens
  ( 39 )...( 54 ): >HH2R_HUMAN
VCLAVGLNRRLRNLTN

SEQ ID NO: 14607 - protein, 16 aa, Homo sapiens
  ( 41 )...( 56 ): >HH2R_HUMAN
LAVGLNRRLRNLTNCF

SEQ ID NO: 14608 - protein, 16 aa, Homo sapiens
  ( 42 )...( 57 ): >HH2R_HUMAN
AVGLNRRLRNLTNCFI

SEQ ID NO: 14609 - protein, 16 aa, Homo sapiens
  ( 43 )...( 58 ): >HH2R_HUMAN
VGLNRRLRNLTNCFIV

SEQ ID NO: 14610 - protein, 16 aa, Homo sapiens
  ( 44 )...( 59 ): >HH2R_HUMAN
GLNRRLRNLTNCFIVS

SEQ ID NO: 14611 - protein, 16 aa, Homo sapiens
  ( 45 )...( 60 ): >HH2R_HUMAN
LNRRLRNLTNCFIVSL

SEQ ID NO: 14612 - protein, 16 aa, Homo sapiens
  ( 46 )...( 61 ): >HH2R_HUMAN
NRRLRNLTNCFIVSLA

SEQ ID NO: 14613 - protein, 16 aa, Homo sapiens
  ( 47 )...( 62 ): >HH2R_HUMAN
RRLRNLTNCFIVSLAI

SEQ ID NO: 14614 - protein, 16 aa, Homo sapiens
  ( 213 )...( 228 ): >HH2R_HUMAN
AKRINHISSWKAATIR

SEQ ID NO: 14615 - protein, 16 aa, Homo sapiens
  ( 315 )...( 330 ): >HH2R_HUMAN
TSLRSNASQLSRTQSR

SEQ ID NO: 14616 - protein, 16 aa, Homo sapiens
  ( 94 )...( 109 ): >HH3R_HUMAN
YVLTGRWTFGRGLCKL

SEQ ID NO: 14617 - protein, 16 aa, Homo sapiens
  ( 95 )...( 110 ): >HH3R_HUMAN
VLTGRWTFGRGLCKLW

SEQ ID NO: 14618 - protein, 16 aa, Homo sapiens
  ( 96 )...( 111 ): >HH3R_HUMAN
LTGRWTFGRGLCKLWL

SEQ ID NO: 14619 - protein, 16 aa, Homo sapiens
  ( 97 )...( 112 ): >HH3R_HUMAN
TGRWTFGRGLCKLWLV

SEQ ID NO: 14620 - protein, 16 aa, Homo sapiens
  ( 98 )...( 113 ): >HH3R_HUMAN
GRWTFGRGLCKLWLVV

SEQ ID NO: 14621 - protein, 16 aa, Homo sapiens
  ( 132 )...( 147 ): >HH3R_HUMAN
RFLSVTRAVSYRAQQG

SEQ ID NO: 14622 - protein, 16 aa, Homo sapiens
  ( 136 )...( 151 ): >HH3R_HUMAN
VTRAVSYRAQQGDTRR

SEQ ID NO: 14623 - protein, 16 aa, Homo sapiens
  ( 137 )...( 152 ): >HH3R_HUMAN
TRAVSYRAQQGDTRRA

SEQ ID NO: 14624 - protein, 16 aa, Homo sapiens
  ( 138 )...( 153 ): >HH3R_HUMAN
RAVSYRAQQGDTRRAV

SEQ ID NO: 14625 - protein, 16 aa, Homo sapiens
  ( 139 )...( 154 ): >HH3R_HUMAN
AVSYRAQQGDTRRAVR

SEQ ID NO: 14626 - protein, 16 aa, Homo sapiens
  ( 140 )...( 155 ): >HH3R_HUMAN
VSYRAQQGDTRRAVRK

SEQ ID NO: 14627 - protein, 16 aa, Homo sapiens
  ( 143 )...( 158 ): >HH3R_HUMAN
RAQQGDTRRAVRKMLL

SEQ ID NO: 14628 - protein, 16 aa, Homo sapiens
  ( 144 )...( 159 ): >HH3R_HUMAN
AQQGDTRRAVRKMLLV

SEQ ID NO: 14629 - protein, 16 aa, Homo sapiens
  ( 145 )...( 160 ): >HH3R_HUMAN
QQGDTRRAVRKMLLVW

SEQ ID NO: 14630 - protein, 16 aa, Homo sapiens
  ( 146 )...( 161 ): >HH3R_HUMAN
QGDTRRAVRKMLLVWV

SEQ ID NO: 14631 - protein, 16 aa, Homo sapiens
  ( 147 )...( 162 ): >HH3R_HUMAN
GDTRRAVRKMLLVWVL

SEQ ID NO: 14632 - protein, 16 aa, Homo sapiens
  ( 148 )...( 163 ): >HH3R_HUMAN
DTRRAVRKMLLVWVLA

SEQ ID NO: 14633 - protein, 16 aa, Homo sapiens
  ( 221 )...( 236 ): >HH3R_HUMAN
IYLNIQRRTRLRLDGA

SEQ ID NO: 14634 - protein, 16 aa, Homo sapiens
  ( 225 )...( 240 ): >HH3R_HUMAN
IQRRTRLRLDGAREAA

SEQ ID NO: 14635 - protein, 16 aa, Homo sapiens
  ( 226 )...( 241 ): >HH3R_HUMAN
QRRTRLRLDGAREAAG

SEQ ID NO: 14636 - protein, 16 aa, Homo sapiens
  ( 227 )...( 242 ): >HH3R_HUMAN
RRTRLRLDGAREAAGP

SEQ ID NO: 14637 - protein, 16 aa, Homo sapiens
  ( 307 )...( 322 ): >HH3R_HUMAN
SGSSSRGTERPRSLKR

SEQ ID NO: 14638 - protein, 16 aa, Homo sapiens
  ( 308 )...( 323 ): >HH3R_HUMAN
GSSSRGTERPRSLKRG

SEQ ID NO: 14639 - protein, 16 aa, Homo sapiens
  ( 309 )...( 324 ): >HH3R_HUMAN
SSSRGTERPRSLKRGS

SEQ ID NO: 14640 - protein, 16 aa, Homo sapiens
  ( 310 )...( 325 ): >HH3R_HUMAN
SSRGTERPRSLKRGSK

SEQ ID NO: 14641 - protein, 16 aa, Homo sapiens
  ( 311 )...( 326 ): >HH3R_HUMAN
SRGTERPRSLKRGSKP

SEQ ID NO: 14642 - protein, 16 aa, Homo sapiens
  ( 312 )...( 327 ): >HH3R_HUMAN
RGTERPRSLKRGSKPS

SEQ ID NO: 14643 - protein, 16 aa, Homo sapiens
  ( 313 )...( 328 ): >HH3R_HUMAN
GTERPRSLKRGSKPSA

SEQ ID NO: 14644 - protein, 16 aa, Homo sapiens
  ( 314 )...( 329 ): >HH3R_HUMAN
TERPRSLKRGSKPSAS

SEQ ID NO: 14645 - protein, 16 aa, Homo sapiens
  ( 347 )...( 362 ): >HH3R_HUMAN
RFRLSRDRKVAKSLAV

SEQ ID NO: 14646 - protein, 16 aa, Homo sapiens
  ( 348 )...( 363 ): >HH3R_HUMAN
FRLSRDRKVAKSLAVI

SEQ ID NO: 14647 - protein, 16 aa, Homo sapiens
  ( 349 )...( 364 ): >HH3R_HUMAN
RLSRDRKVAKSLAVIV

SEQ ID NO: 14648 - protein, 16 aa, Homo sapiens
  ( 350 )...( 365 ): >HH3R_HUMAN
LSRDRKVAKSLAVIVS

SEQ ID NO: 14649 - protein, 16 aa, Homo sapiens
  ( 351 )...( 366 ): >HH3R_HUMAN
SRDRKVAKSLAVIVSI

SEQ ID NO: 14650 - protein, 16 aa, Homo sapiens
  ( 352 )...( 367 ): >HH3R_HUMAN
RDRKVAKSLAVIVSIF

SEQ ID NO: 14651 - protein, 16 aa, Homo sapiens
  ( 420 )...( 435 ): >HH3R_HUMAN
RRAFTKLLCPQKLKIQ

SEQ ID NO: 14652 - protein, 16 aa, Homo sapiens
  ( 421 )...( 436 ): >HH3R_HUMAN
RAFTKLLCPQKLKIQP

SEQ ID NO: 14653 - protein, 16 aa, Homo sapiens
  ( 227 )...( 242 ): >HH4R_HUMAN
SFRGRLSSRRSLSAST

SEQ ID NO: 14654 - protein, 16 aa, Homo sapiens
  ( 228 )...( 243 ): >HH4R_HUMAN
FRGRLSSRRSLSASTE

SEQ ID NO: 14655 - protein, 16 aa, Homo sapiens
  ( 229 )...( 244 ): >HH4R_HUMAN
RGRLSSRRSLSASTEV

SEQ ID NO: 14656 - protein, 16 aa, Homo sapiens
  ( 290 )...( 305 ): >HH4R_HUMAN
REHVELLRARRLAKSL

SEQ ID NO: 14657 - protein, 16 aa, Homo sapiens
  ( 292 )...( 307 ): >HH4R_HUMAN
HVELLRARRLAKSLAI

SEQ ID NO: 14658 - protein, 16 aa, Homo sapiens
  ( 293 )...( 308 ): >HH4R_HUMAN
VELLRARRLAKSLAIL

SEQ ID NO: 14659 - protein, 16 aa, Homo sapiens
  ( 294 )...( 309 ): >HH4R_HUMAN
ELLRARRLAKSLAILL

SEQ ID NO: 14660 - protein, 16 aa, Homo sapiens
  ( 295 )...( 310 ): >HH4R_HUMAN
LLRARRLAKSLAILLG

SEQ ID NO: 14661 - protein, 16 aa, Homo sapiens
  ( 296 )...( 311 ): >HH4R_HUMAN
LRARRLAKSLAILLGV

SEQ ID NO: 14662 - protein, 16 aa, Homo sapiens
  ( 297 )...( 312 ): >HH4R_HUMAN
RARRLAKSLAILLGVF

SEQ ID NO: 14663 - protein, 16 aa, Homo sapiens
  ( 298 )...( 313 ): >HH4R_HUMAN
ARRLAKSLAILLGVFA

SEQ ID NO: 14664 - protein, 16 aa, Homo sapiens
  ( 299 )...( 314 ): >HH4R_HUMAN
RRLAKSLAILLGVFAV

SEQ ID NO: 14665 - protein, 16 aa, Homo sapiens
  ( 366 )...( 381 ): >HH4R_HUMAN
QKAFLKIFCIKKQPLP

SEQ ID NO: 14666 - protein, 16 aa, Homo sapiens
  ( 162 )...( 177 ): >HM74_HUMAN
LLKKKLLIQNGPANVC

SEQ ID NO: 14667 - protein, 16 aa, Homo sapiens
  ( 163 )...( 178 ): >HM74_HUMAN
LKKKLLIQNGPANVCI

SEQ ID NO: 14668 - protein, 16 aa, Homo sapiens
  ( 203 )...( 218 ): >HM74_HUMAN
IILFCSARIIWSLRQR

SEQ ID NO: 14669 - protein, 16 aa, Homo sapiens
  ( 219 )...( 234 ): >HM74_HUMAN
QMDRHAKIKRAITFIM

SEQ ID NO: 14670 - protein, 16 aa, Homo sapiens
  ( 220 )...( 235 ): >HM74_HUMAN
MDRHAKIKRAITFIMV

SEQ ID NO: 14671 - protein, 16 aa, Homo sapiens
  ( 221 )...( 236 ): >HM74_HUMAN
DRHAKIKRAITFIMVV

SEQ ID NO: 14672 - protein, 16 aa, Homo sapiens
  ( 222 )...( 237 ): >HM74_HUMAN
RHAKIKRAITFIMVVA

SEQ ID NO: 14673 - protein, 16 aa, Homo sapiens
  ( 223 )...( 238 ): >HM74_HUMAN
HAKIKRAITFIMVVAI

SEQ ID NO: 14674 - protein, 16 aa, Homo sapiens
  ( 304 )...( 319 ): >HM74_HUMAN
FFSTLINRCLQRKMTG

SEQ ID NO: 14675 - protein, 16 aa, Homo sapiens
  ( 135 )...( 150 ): >IL8A_HUMAN
RYLAIVHATRTLTQKR

SEQ ID NO: 14676 - protein, 16 aa, Homo sapiens
  ( 139 )...( 154 ): >IL8A_HUMAN
IVHATRTLTQKRHLVK

SEQ ID NO: 14677 - protein, 16 aa, Homo sapiens
  ( 140 )...( 155 ): >IL8A_HUMAN
VHATRTLTQKRHLVKF

SEQ ID NO: 14678 - protein, 16 aa, Homo sapiens
  ( 141 )...( 156 ): >IL8A_HUMAN
HATRTLTQKRHLVKFV

SEQ ID NO: 14679 - protein, 16 aa, Homo sapiens
  ( 142 )...( 157 ): >IL8A_HUMAN
ATRTLTQKRHLVKFVC

SEQ ID NO: 14680 - protein, 16 aa, Homo sapiens
  ( 143 )...( 158 ): >IL8A_HUMAN
TRTLTQKRHLVKFVCL

SEQ ID NO: 14681 - protein, 16 aa, Homo sapiens
  ( 144 )...( 159 ): >IL8A_HUMAN
RTLTQKRHLVKFVCLG

SEQ ID NO: 14682 - protein, 16 aa, Homo sapiens
  ( 146 )...( 161 ): >IL8A_HUMAN
LTQKRHLVKFVCLGCW

SEQ ID NO: 14683 - protein, 16 aa, Homo sapiens
  ( 195 )...( 210 ): >IL8A_HUMAN
TAKWRMVLRILPHTFG

SEQ ID NO: 14684 - protein, 16 aa, Homo sapiens
  ( 225 )...( 240 ): >IL8A_HUMAN
TLRTLFKAHMGQKHRA

SEQ ID NO: 14685 - protein, 16 aa, Homo sapiens
  ( 226 )...( 241 ): >IL8A_HUMAN
LRTLFKAHMGQKHRAM

SEQ ID NO: 14686 - protein, 16 aa, Homo sapiens
  ( 228 )...( 243 ): >IL8A_HUMAN
TLFKAHMGQKHRAMRV

SEQ ID NO: 14687 - protein, 16 aa, Homo sapiens
  ( 229 )...( 244 ): >IL8A_HUMAN
LFKAHMGQKHRAMRVI

SEQ ID NO: 14688 - protein, 16 aa, Homo sapiens
  ( 231 )...( 246 ): >IL8A_HUMAN
KAHMGQKHRAMRVIFA

SEQ ID NO: 14689 - protein, 16 aa, Homo sapiens
  ( 232 )...( 247 ): >IL8A_HUMAN
AHMGQKHRAMRVIFAV

SEQ ID NO: 14690 - protein, 16 aa, Homo sapiens
  ( 233 )...( 248 ): >IL8A_HUMAN
HMGQKHRAMRVIFAVV

SEQ ID NO: 14691 - protein, 16 aa, Homo sapiens
  ( 234 )...( 249 ): >IL8A_HUMAN
MGQKHRAMRVIFAVVL

SEQ ID NO: 14692 - protein, 16 aa, Homo sapiens
  ( 235 )...( 250 ): >IL8A_HUMAN
GQKHRAMRVIFAVVLI

SEQ ID NO: 14693 - protein, 16 aa, Homo sapiens
  ( 236 )...( 251 ): >IL8A_HUMAN
QKHRAMRVIFAVVLIF

SEQ ID NO: 14694 - protein, 16 aa, Homo sapiens
  ( 144 )...( 159 ): >IL8B_HUMAN
RYLAIVHATRTLTQKR

SEQ ID NO: 14695 - protein, 16 aa, Homo sapiens
  ( 145 )...( 160 ): >IL8B_HUMAN
YLAIVHATRTLTQKRY

SEQ ID NO: 14696 - protein, 16 aa, Homo sapiens
  ( 146 )...( 161 ): >IL8B_HUMAN
LAIVHATRTLTQKRYL

SEQ ID NO: 14697 - protein, 16 aa, Homo sapiens
  ( 147 )...( 162 ): >IL8B_HUMAN
AIVHATRTLTQKRYLV

SEQ ID NO: 14698 - protein, 16 aa, Homo sapiens
  ( 148 )...( 163 ): >IL8B_HUMAN
IVHATRTLTQKRYLVK

SEQ ID NO: 14699 - protein, 16 aa, Homo sapiens
  ( 149 )...( 164 ): >IL8B_HUMAN
VHATRTLTQKRYLVKF

SEQ ID NO: 14700 - protein, 16 aa, Homo sapiens
  ( 150 )...( 165 ): >IL8B_HUMAN
HATRTLTQKRYLVKFI

SEQ ID NO: 14701 - protein, 16 aa, Homo sapiens
  ( 151 )...( 166 ): >IL8B_HUMAN
ATRTLTQKRYLVKFIC

SEQ ID NO: 14702 - protein, 16 aa, Homo sapiens
  ( 152 )...( 167 ): >IL8B_HUMAN
TRTLTQKRYLVKFICL

SEQ ID NO: 14703 - protein, 16 aa, Homo sapiens
  ( 153 )...( 168 ): >IL8B_HUMAN
RTLTQKRYLVKFICLS

SEQ ID NO: 14704 - protein, 16 aa, Homo sapiens
  ( 154 )...( 169 ): >IL8B_HUMAN
TLTQKRYLVKFICLSI

SEQ ID NO: 14705 - protein, 16 aa, Homo sapiens
  ( 156 )...( 171 ): >IL8B_HUMAN
TQKRYLVKFICLSIWG

SEQ ID NO: 14706 - protein, 16 aa, Homo sapiens
  ( 234 )...( 249 ): >IL8B_HUMAN
TLRTLFKAHMGQKHRA

SEQ ID NO: 14707 - protein, 16 aa, Homo sapiens
  ( 235 )...( 250 ): >IL8B_HUMAN
LRTLFKAHMGQKHRAM

SEQ ID NO: 14708 - protein, 16 aa, Homo sapiens
  ( 237 )...( 252 ): >IL8B_HUMAN
TLFKAHMGQKHRAMRV

SEQ ID NO: 14709 - protein, 16 aa, Homo sapiens
  ( 238 )...( 253 ): >IL8B_HUMAN
LFKAHMGQKHRAMRVI

SEQ ID NO: 14710 - protein, 16 aa, Homo sapiens
  ( 240 )...( 255 ): >IL8B_HUMAN
KAHMGQKHRAMRVIFA

SEQ ID NO: 14711 - protein, 16 aa, Homo sapiens
  ( 241 )...( 256 ): >IL8B_HUMAN
AHMGQKHRAMRVIFAV

SEQ ID NO: 14712 - protein, 16 aa, Homo sapiens
  ( 242 )...( 257 ): >IL8B_HUMAN
HMGQKHRAMRVIFAVV

SEQ ID NO: 14713 - protein, 16 aa, Homo sapiens
  ( 243 )...( 258 ): >IL8B_HUMAN
MGQKHRAMRVIFAVVL

SEQ ID NO: 14714 - protein, 16 aa, Homo sapiens
  ( 244 )...( 259 ): >IL8B_HUMAN
GQKHRAMRVIFAVVLI

SEQ ID NO: 14715 - protein, 16 aa, Homo sapiens
  ( 245 )...( 260 ): >IL8B_HUMAN
QKHRAMRVIFAVVLIF

SEQ ID NO: 14716 - protein, 16 aa, Homo sapiens
  ( 312 )...( 327 ): >IL8B_HUMAN
LIYAFIGQKFRHGLLK

SEQ ID NO: 14717 - protein, 16 aa, Homo sapiens
  ( 313 )...( 328 ): >IL8B_HUMAN
IYAFIGQKFRHGLLKI

SEQ ID NO: 14718 - protein, 16 aa, Homo sapiens
  ( 314 )...( 329 ): >IL8B_HUMAN
YAFIGQKFRHGLLKIL

SEQ ID NO: 14719 - protein, 16 aa, Homo sapiens
  ( 315 )...( 330 ): >IL8B_HUMAN
AFIGQKFRHGLLKILA

SEQ ID NO: 14720 - protein, 16 aa, Homo sapiens
  ( 316 )...( 331 ): >IL8B_HUMAN
FIGQKFRHGLLKILAI

SEQ ID NO: 14721 - protein, 16 aa, Homo sapiens
  ( 179 )...( 194 ): >KI01_HUMAN
LGRKWHKASNYIFVAI

SEQ ID NO: 14722 - protein, 16 aa, Homo sapiens
  ( 207 )...( 222 ): >KI01_HUMAN
TAITKKIFKSHLKSSR

SEQ ID NO: 14723 - protein, 16 aa, Homo sapiens
  ( 208 )...( 223 ): >KI01_HUMAN
AITKKIFKSHLKSSRN

SEQ ID NO: 14724 - protein, 16 aa, Homo sapiens
  ( 210 )...( 225 ): >KI01_HUMAN
TKKIFKSHLKSSRNST

SEQ ID NO: 14725 - protein, 16 aa, Homo sapiens
  ( 215 )...( 230 ): >KI01_HUMAN
KSHLKSSRNSTSVKKK

SEQ ID NO: 14726 - protein, 16 aa, Homo sapiens
  ( 216 )...( 231 ): >KI01_HUMAN
SHLKSSRNSTSVKKKS

SEQ ID NO: 14727 - protein, 16 aa, Homo sapiens
  ( 217 )...( 232 ): >KI01_HUMAN
HLKSSRNSTSVKKKSS

SEQ ID NO: 14728 - protein, 16 aa, Homo sapiens
  ( 218 )...( 233 ): >KI01_HUMAN
LKSSRNSTSVKKKSSR

SEQ ID NO: 14729 - protein, 16 aa, Homo sapiens
  ( 220 )...( 235 ): >KI01_HUMAN
SSRNSTSVKKKSSRNI

SEQ ID NO: 14730 - protein, 16 aa, Homo sapiens
  ( 224 )...( 239 ): >KI01_HUMAN
STSVKKKSSRNIFSIV

SEQ ID NO: 14731 - protein, 16 aa, Homo sapiens
  ( 225 )...( 240 ): >KI01_HUMAN
TSVKKKSSRNIFSIVF

SEQ ID NO: 14732 - protein, 16 aa, Homo sapiens
  ( 226 )...( 241 ): >KI01_HUMAN
SVKKKSSRNIFSIVFV

SEQ ID NO: 14733 - protein, 16 aa, Homo sapiens
  ( 227 )...( 242 ): >KI01_HUMAN
VKKKSSRNIFSIVFVF

SEQ ID NO: 14734 - protein, 16 aa, Homo sapiens
  ( 301 )...( 316 ): >KI01_HUMAN
PFREILCKKLHIPLKA

SEQ ID NO: 14735 - protein, 16 aa, Homo sapiens
  ( 302 )...( 317 ): >KI01_HUMAN
FREILCKKLHIPLKAQ

SEQ ID NO: 14736 - protein, 16 aa, Homo sapiens
  ( 303 )...( 318 ): >KI01_HUMAN
REILCKKLHIPLKAQN

SEQ ID NO: 14737 - protein, 16 aa, Homo sapiens
  ( 247 )...( 262 ): >LSHR_HUMAN
RLIATSSYSLKKLPSR

SEQ ID NO: 14738 - protein, 16 aa, Homo sapiens
  ( 384 )...( 399 ): >LSHR_HUMAN
LLTSRYKLTVPRFLMC

SEQ ID NO: 14739 - protein, 16 aa, Homo sapiens
  ( 476 )...( 491 ): >LSHR_HUMAN
QKLRLRHAILIMLGGW

SEQ ID NO: 14740 - protein, 16 aa, Homo sapiens
  ( 637 )...( 652 ): >LSHR_HUMAN
LLSKFGCCKRRAELYR

SEQ ID NO: 14741 - protein, 16 aa, Homo sapiens
  ( 202 )...( 217 ): >MAS_HUMAN
LMLVSSTILVVKIRKN

SEQ ID NO: 14742 - protein, 16 aa, Homo sapiens
  ( 204 )...( 219 ): >MAS_HUMAN
LVSSTILVVKIRKNTW

SEQ ID NO: 14743 - protein, 16 aa, Homo sapiens
  ( 205 )...( 220 ): >MAS_HUMAN
VSSTILVVKIRKNTWA

SEQ ID NO: 14744 - protein, 16 aa, Homo sapiens
  ( 210 )...( 225 ): >MAS_HUMAN
LVVKIRKNTWASHSSK

SEQ ID NO: 14745 - protein, 16 aa, Homo sapiens
  ( 211 )...( 226 ): >MAS_HUMAN
VVKIRKNTWASHSSKL

SEQ ID NO: 14746 - protein, 16 aa, Homo sapiens
  ( 282 )...( 297 ): >MAS_HUMAN
FVGSSKKKRFKESLKV

SEQ ID NO: 14747 - protein, 16 aa, Homo sapiens
  ( 283 )...( 298 ): >MAS_HUMAN
VGSSKKKRFKESLKVV

SEQ ID NO: 14748 - protein, 16 aa, Homo sapiens
  ( 284 )...( 299 ): >MAS_HUMAN
GSSKKKRFKESLKVVL

SEQ ID NO: 14749 - protein, 16 aa, Homo sapiens
  ( 285 )...( 300 ): >MAS_HUMAN
SSKKKRFKESLKVVLT

SEQ ID NO: 14750 - protein, 16 aa, Homo sapiens
  ( 286 )...( 301 ): >MAS_HUMAN
SKKKRFKESLKVVLTR

SEQ ID NO: 14751 - protein, 16 aa, Homo sapiens
  ( 287 )...( 302 ): >MAS_HUMAN
KKKRFKESLKVVLTRA

SEQ ID NO: 14752 - protein, 16 aa, Homo sapiens
  ( 288 )...( 303 ): >MAS_HUMAN
KKRFKESLKVVLTRAF

SEQ ID NO: 14753 - protein, 16 aa, Homo sapiens
  ( 289 )...( 304 ): >MAS_HUMAN
KRFKESLKVVLTRAFK

SEQ ID NO: 14754 - protein, 16 aa, Homo sapiens
  ( 290 )...( 305 ): >MAS_HUMAN
RFKESLKVVLTRAFKD

SEQ ID NO: 14755 - protein, 16 aa, Homo sapiens
  ( 182 )...( 197 ): >MC3R_HUMAN
TIFYALRYHSIMTVRK

SEQ ID NO: 14756 - protein, 16 aa, Homo sapiens
  ( 183 )...( 198 ): >MC3R_HUMAN
IFYALRYHSIMTVRKA

SEQ ID NO: 14757 - protein, 16 aa, Homo sapiens
  ( 184 )...( 199 ): >MC3R_HUMAN
FYALRYHSIMTVRKAL

SEQ ID NO: 14758 - protein, 16 aa, Homo sapiens
  ( 185 )...( 200 ): >MC3R_HUMAN
YALRYHSIMTVRKALT

SEQ ID NO: 14759 - protein, 16 aa, Homo sapiens
  ( 186 )...( 201 ): >MC3R_HUMAN
ALRYHSIMTVRKALTL

SEQ ID NO: 14760 - protein, 16 aa, Homo sapiens
  ( 187 )...( 202 ): >MC3R_HUMAN
LRYHSIMTVRKALTLI

SEQ ID NO: 14761 - protein, 16 aa, Homo sapiens
  ( 188 )...( 203 ): >MC3R_HUMAN
RYHSIMTVRKALTLIV

SEQ ID NO: 14762 - protein, 16 aa, Homo sapiens
  ( 245 )...( 260 ): >MC3R_HUMAN
VHMFLFARLHVKRIAA

SEQ ID NO: 14763 - protein, 16 aa, Homo sapiens
  ( 246 )...( 261 ): >MC3R_HUMAN
HMFLFARLHVKRIAAL

SEQ ID NO: 14764 - protein, 16 aa, Homo sapiens
  ( 249 )...( 264 ): >MC3R_HUMAN
LFARLHVKRIAALPPA

SEQ ID NO: 14765 - protein, 16 aa, Homo sapiens
  ( 213 )...( 228 ): >MC4R_HUMAN
VHMFLMARLHIKRIAV

SEQ ID NO: 14766 - protein, 16 aa, Homo sapiens
  ( 217 )...( 232 ): >MC4R_HUMAN
LMARLHIKRIAVLPGT

SEQ ID NO: 14767 - protein, 16 aa, Homo sapiens
  ( 218 )...( 233 ): >MC4R_HUMAN
MARLHIKRIAVLPGTG

SEQ ID NO: 14768 - protein, 16 aa, Homo sapiens
  ( 220 )...( 235 ): >MC4R_HUMAN
RLHIKRIAVLPGTGAI

SEQ ID NO: 14769 - protein, 16 aa, Homo sapiens
  ( 221 )...( 236 ): >MC4R_HUMAN
LHIKRIAVLPGTGAIR

SEQ ID NO: 14770 - protein, 16 aa, Homo sapiens
  ( 222 )...( 237 ): >MC4R_HUMAN
HIKRIAVLPGTGAIRQ

SEQ ID NO: 14771 - protein, 16 aa, Homo sapiens
  ( 146 )...( 161 ): >MC5R_HUMAN
YALRYHHIMTARRSGA

SEQ ID NO: 14772 - protein, 16 aa, Homo sapiens
  ( 147 )...( 162 ): >MC5R_HUMAN
ALRYHHIMTARRSGAI

SEQ ID NO: 14773 - protein, 16 aa, Homo sapiens
  ( 148 )...( 163 ): >MC5R_HUMAN
LRYHHIMTARRSGAII

SEQ ID NO: 14774 - protein, 16 aa, Homo sapiens
  ( 149 )...( 164 ): >MC5R_HUMAN
RYHHIMTARRSGAIIA

SEQ ID NO: 14775 - protein, 16 aa, Homo sapiens
  ( 205 )...( 220 ): >MC5R_HUMAN
YIHMFLLARTHVKRIA

SEQ ID NO: 14776 - protein, 16 aa, Homo sapiens
  ( 206 )...( 221 ): >MC5R_HUMAN
IHMFLLARTHVKRIAA

SEQ ID NO: 14777 - protein, 16 aa, Homo sapiens
  ( 207 )...( 222 ): >MC5R_HUMAN
HMFLLARTHVKRIAAL

SEQ ID NO: 14778 - protein, 16 aa, Homo sapiens
  ( 208 )...( 223 ): >MC5R_HUMAN
MFLLARTHVKRIAALP

SEQ ID NO: 14779 - protein, 16 aa, Homo sapiens
  ( 209 )...( 224 ): >MC5R_HUMAN
FLLARTHVKRIAALPG

SEQ ID NO: 14780 - protein, 16 aa, Homo sapiens
  ( 210 )...( 225 ): >MC5R_HUMAN
LLARTHVKRIAALPGA

SEQ ID NO: 14781 - protein, 16 aa, Homo sapiens
  ( 211 )...( 226 ): >MC5R_HUMAN
LARTHVKRIAALPGAS

SEQ ID NO: 14782 - protein, 16 aa, Homo sapiens
  ( 216 )...( 231 ): >MC5R_HUMAN
VKRIAALPGASSARQR

SEQ ID NO: 14783 - protein, 16 aa, Homo sapiens
  ( 217 )...( 232 ): >MC5R_HUMAN
KRIAALPGASSARQRT

SEQ ID NO: 14784 - protein, 16 aa, Homo sapiens
  ( 302 )...( 317 ): >MC5R_HUMAN
MRKTFKEIICCRGFRI

SEQ ID NO: 14785 - protein, 16 aa, Homo sapiens
  ( 303 )...( 318 ): >MC5R_HUMAN
RKTFKEIICCRGFRIA

SEQ ID NO: 14786 - protein, 16 aa, Homo sapiens
  ( 16 )...( 31 ): >MGR1_HUMAN
VSLLPRSPGRKVLLAG

SEQ ID NO: 14787 - protein, 16 aa, Homo sapiens
  ( 21 )...( 36 ): >MGR1_HUMAN
RSPGRKVLLAGASSQR

SEQ ID NO: 14788 - protein, 16 aa, Homo sapiens
  ( 25 )...( 40 ): >MGR1_HUMAN
RKVLLAGASSQRSVAR

SEQ ID NO: 14789 - protein, 16 aa, Homo sapiens
  ( 145 )...( 160 ): >MGR1_HUMAN
QSLPPGRTKKPIAGVI

SEQ ID NO: 14790 - protein, 16 aa, Homo sapiens
  ( 273 )...( 288 ): >MGR1_HUMAN
LLRKLRERLPKARVVV

SEQ ID NO: 14791 - protein, 16 aa, Homo sapiens
  ( 274 )...( 289 ): >MGR1_HUMAN
LRKLRERLPKARVVVC

SEQ ID NO: 14792 - protein, 16 aa, Homo sapiens
  ( 275 )...( 290 ): >MGR1_HUMAN
RKLRERLPKARVVVCF

SEQ ID NO: 14793 - protein, 16 aa, Homo sapiens
  ( 276 )...( 291 ): >MGR1_HUMAN
KLRERLPKARVVVCFC

SEQ ID NO: 14794 - protein, 16 aa, Homo sapiens
  ( 523 )...( 538 ): >MGR1_HUMAN
VCSEPCLKGQIKVIRK

SEQ ID NO: 14795 - protein, 16 aa, Homo sapiens
  ( 527 )...( 542 ): >MGR1_HUMAN
PCLKGQIKVIRKGEVS

SEQ ID NO: 14796 - protein, 16 aa, Homo sapiens
  ( 528 )...( 543 ): >MGR1_HUMAN
CLKGQIKVIRKGEVSC

SEQ ID NO: 14797 - protein, 16 aa, Homo sapiens
  ( 529 )...( 544 ): >MGR1_HUMAN
LKGQIKVIRKGEVSCC

SEQ ID NO: 14798 - protein, 16 aa, Homo sapiens
  ( 530 )...( 545 ): >MGR1_HUMAN
KGQIKVIRKGEVSCCW

SEQ ID NO: 14799 - protein, 16 aa, Homo sapiens
  ( 670 )...( 685 ): >MGR1_HUMAN
MCYSALVTKTNRIARI

SEQ ID NO: 14800 - protein, 16 aa, Homo sapiens
  ( 671 )...( 686 ): >MGR1_HUMAN
CYSALVTKTNRIARIL

SEQ ID NO: 14801 - protein, 16 aa, Homo sapiens
  ( 672 )...( 687 ): >MGR1_HUMAN
YSALVTKTNRIARILA

SEQ ID NO: 14802 - protein, 16 aa, Homo sapiens
  ( 675 )...( 690 ): >MGR1_HUMAN
LVTKTNRIARILAGSK

SEQ ID NO: 14803 - protein, 16 aa, Homo sapiens
  ( 676 )...( 691 ): >MGR1_HUMAN
VTKTNRIARILAGSKK

SEQ ID NO: 14804 - protein, 16 aa, Homo sapiens
  ( 677 )...( 692 ): >MGR1_HUMAN
TKTNRIARILAGSKKK

SEQ ID NO: 14805 - protein, 16 aa, Homo sapiens
  ( 678 )...( 693 ): >MGR1_HUMAN
KTNRIARILAGSKKKI

SEQ ID NO: 14806 - protein, 16 aa, Homo sapiens
  ( 679 )...( 694 ): >MGR1_HUMAN
TNRIARILAGSKKKIC

SEQ ID NO: 14807 - protein, 16 aa, Homo sapiens
  ( 680 )...( 695 ): >MGR1_HUMAN
NRIARILAGSKKKICT

SEQ ID NO: 14808 - protein, 16 aa, Homo sapiens
  ( 681 )...( 696 ): >MGR1_HUMAN
RIARILAGSKKKICTR

SEQ ID NO: 14809 - protein, 16 aa, Homo sapiens
  ( 682 )...( 697 ): >MGR1_HUMAN
IARILAGSKKKICTRK

SEQ ID NO: 14810 - protein, 16 aa, Homo sapiens
  ( 683 )...( 698 ): >MGR1_HUMAN
ARILAGSKKKICTRKP

SEQ ID NO: 14811 - protein, 16 aa, Homo sapiens
  ( 685 )...( 700 ): >MGR1_HUMAN
ILAGSKKKICTRKPRF

SEQ ID NO: 14812 - protein, 16 aa, Homo sapiens
  ( 686 )...( 701 ): >MGR1_HUMAN
LAGSKKKICTRKPRFM

SEQ ID NO: 14813 - protein, 16 aa, Homo sapiens
  ( 687 )...( 702 ): >MGR1_HUMAN
AGSKKKICTRKPRFMS

SEQ ID NO: 14814 - protein, 16 aa, Homo sapiens
  ( 688 )...( 703 ): >MGR1_HUMAN
GSKKKICTRKPRFMSA

SEQ ID NO: 14815 - protein, 16 aa, Homo sapiens
  ( 695 )...( 710 ): >MGR1_HUMAN
TRKPRFMSAWAQVIIA

SEQ ID NO: 14816 - protein, 16 aa, Homo sapiens
  ( 832 )...( 847 ): >MGR1_HUMAN
TPKMYIIIAKPERNVR

SEQ ID NO: 14817 - protein, 16 aa, Homo sapiens
  ( 834 )...( 849 ): >MGR1_HUMAN
KMYIIIAKPERNVRSA

SEQ ID NO: 14818 - protein, 16 aa, Homo sapiens
  ( 869 )...( 884 ): >MGR1_HUMAN
SNTFLNIFRRKKAGAG

SEQ ID NO: 14819 - protein, 16 aa, Homo sapiens
  ( 870 )...( 885 ): >MGR1_HUMAN
NTFLNIFRRKKAGAGN

SEQ ID NO: 14820 - protein, 16 aa, Homo sapiens
  ( 871 )...( 886 ): >MGR1_HUMAN
TFLNIFRRKKAGAGNA

SEQ ID NO: 14821 - protein, 16 aa, Homo sapiens
  ( 228 )...( 243 ): >MGR2_HUMAN
ARARNICVATSEKVGR

SEQ ID NO: 14822 - protein, 16 aa, Homo sapiens
  ( 229 )...( 244 ): >MGR2_HUMAN
RARNICVATSEKVGRA

SEQ ID NO: 14823 - protein, 16 aa, Homo sapiens
  ( 240 )...( 255 ): >MGR2_HUMAN
KVGRAMSRAAFEGVVR

SEQ ID NO: 14824 - protein, 16 aa, Homo sapiens
  ( 253 )...( 268 ): >MGR2_HUMAN
VVRALLQKPSARVAVL

SEQ ID NO: 14825 - protein, 16 aa, Homo sapiens
  ( 254 )...( 269 ): >MGR2_HUMAN
VRALLQKPSARVAVLF

SEQ ID NO: 14826 - protein, 16 aa, Homo sapiens
  ( 255 )...( 270 ): >MGR2_HUMAN
RALLQKPSARVAVLFT

SEQ ID NO: 14827 - protein, 16 aa, Homo sapiens
  ( 256 )...( 271 ): >MGR2_HUMAN
ALLQKPSARVAVLFTR

SEQ ID NO: 14828 - protein, 16 aa, Homo sapiens
  ( 257 )...( 272 ): >MGR2_HUMAN
LLQKPSARVAVLFTRS

SEQ ID NO: 14829 - protein, 16 aa, Homo sapiens
  ( 403 )...( 418 ): >MGR2_HUMAN
TTRLCDAMRPVNGRRL

SEQ ID NO: 14830 - protein, 16 aa, Homo sapiens
  ( 404 )...( 419 ): >MGR2_HUMAN
TRLCDAMRPVNGRRLY

SEQ ID NO: 14831 - protein, 16 aa, Homo sapiens
  ( 450 )...( 465 ): >MGR2_HUMAN
IGRYNIFTYLRAGSGR

SEQ ID NO: 14832 - protein, 16 aa, Homo sapiens
  ( 457 )...( 472 ): >MGR2_HUMAN
TYLRAGSGRYRYQKVG

SEQ ID NO: 14833 - protein, 16 aa, Homo sapiens
  ( 458 )...( 473 ): >MGR2_HUMAN
YLRAGSGRYRYQKVGY

SEQ ID NO: 14834 - protein, 16 aa, Homo sapiens
  ( 460 )...( 475 ): >MGR2_HUMAN
RAGSGRYRYQKVGYWA

SEQ ID NO: 14835 - protein, 16 aa, Homo sapiens
  ( 588 )...( 603 ): >MGR2_HUMAN
VFVRHNATPVVKASGR

SEQ ID NO: 14836 - protein, 16 aa, Homo sapiens
  ( 622 )...( 637 ): >MGR2_HUMAN
IFIAKPSTAVCTLRRL

SEQ ID NO: 14837 - protein, 16 aa, Homo sapiens
  ( 644 )...( 659 ): >MGR2_HUMAN
SVCYSALLTKTNRIAR

SEQ ID NO: 14838 - protein, 16 aa, Homo sapiens
  ( 645 )...( 660 ): >MGR2_HUMAN
VCYSALLTKTNRIARI

SEQ ID NO: 14839 - protein, 16 aa, Homo sapiens
  ( 646 )...( 661 ): >MGR2_HUMAN
CYSALLTKTNRIARIF

SEQ ID NO: 14840 - protein, 16 aa, Homo sapiens
  ( 647 )...( 662 ): >MGR2_HUMAN
YSALLTKTNRIARIFG

SEQ ID NO: 14841 - protein, 16 aa, Homo sapiens
  ( 648 )...( 663 ): >MGR2_HUMAN
SALLTKTNRIARIFGG

SEQ ID NO: 14842 - protein, 16 aa, Homo sapiens
  ( 649 )...( 664 ): >MGR2_HUMAN
ALLTKTNRIARIFGGA

SEQ ID NO: 14843 - protein, 16 aa, Homo sapiens
  ( 650 )...( 665 ): >MGR2_HUMAN
LLTKTNRIARIFGGAR

SEQ ID NO: 14844 - protein, 16 aa, Homo sapiens
  ( 651 )...( 666 ): >MGR2_HUMAN
LTKTNRIARIFGGARE

SEQ ID NO: 14845 - protein, 16 aa, Homo sapiens
  ( 652 )...( 667 ): >MGR2_HUMAN
TKTNRIARIFGGAREG

SEQ ID NO: 14846 - protein, 16 aa, Homo sapiens
  ( 653 )...( 668 ): >MGR2_HUMAN
KTNRIARIFGGAREGA

SEQ ID NO: 14847 - protein, 16 aa, Homo sapiens
  ( 655 )...( 670 ): >MGR2_HUMAN
NRIARIFGGAREGAQR

SEQ ID NO: 14848 - protein, 16 aa, Homo sapiens
  ( 656 )...( 671 ): >MGR2_HUMAN
RIARIFGGAREGAQRP

SEQ ID NO: 14849 - protein, 16 aa, Homo sapiens
  ( 657 )...( 672 ): >MGR2_HUMAN
IARIFGGAREGAQRPR

SEQ ID NO: 14850 - protein, 16 aa, Homo sapiens
  ( 658 )...( 673 ): >MGR2_HUMAN
ARIFGGAREGAQRPRF

SEQ ID NO: 14851 - protein, 16 aa, Homo sapiens
  ( 659 )...( 674 ): >MGR2_HUMAN
RIFGGAREGAQRPRFI

SEQ ID NO: 14852 - protein, 16 aa, Homo sapiens
  ( 232 )...( 247 ): >MGR3_HUMAN
ARLRNICIATAEKVGR

SEQ ID NO: 14853 - protein, 16 aa, Homo sapiens
  ( 233 )...( 248 ): >MGR3_HUMAN
RLRNICIATAEKVGRS

SEQ ID NO: 14854 - protein, 16 aa, Homo sapiens
  ( 237 )...( 252 ): >MGR3_HUMAN
ICIATAEKVGRSNIRK

SEQ ID NO: 14855 - protein, 16 aa, Homo sapiens
  ( 238 )...( 253 ): >MGR3_HUMAN
CIATAEKVGRSNIRKS

SEQ ID NO: 14856 - protein, 16 aa, Homo sapiens
  ( 239 )...( 254 ): >MGR3_HUMAN
IATAEKVGRSNIRKSY

SEQ ID NO: 14857 - protein, 16 aa, Homo sapiens
  ( 244 )...( 259 ): >MGR3_HUMAN
KVGRSNIRKSYDSVIR

SEQ ID NO: 14858 - protein, 16 aa, Homo sapiens
  ( 261 )...( 276 ): >MGR3_HUMAN
LLQKPNARVVVLFMRS

SEQ ID NO: 14859 - protein, 16 aa, Homo sapiens
  ( 631 )...( 646 ): >MGR3_HUMAN
IAKPSPVICALRRLGL

SEQ ID NO: 14860 - protein, 16 aa, Homo sapiens
  ( 664 )...( 679 ): >MGR3_HUMAN
IARIFDGVKNGAQRPK

SEQ ID NO: 14861 - protein, 16 aa, Homo sapiens
  ( 666 )...( 681 ): >MGR3_HUMAN
RIFDGVKNGAQRPKFI

SEQ ID NO: 14862 - protein, 16 aa, Homo sapiens
  ( 712 )...( 727 ): >MGR3_HUMAN
TRRYTLAEKRETVILK

SEQ ID NO: 14863 - protein, 16 aa, Homo sapiens
  ( 713 )...( 728 ): >MGR3_HUMAN
RRYTLAEKRETVILKC

SEQ ID NO: 14864 - protein, 16 aa, Homo sapiens
  ( 744 )...( 759 ): >MGR3_HUMAN
ILVILCTVYAFKTRKC

SEQ ID NO: 14865 - protein, 16 aa, Homo sapiens
  ( 267 )...( 282 ): >MGR4_HUMAN
KIIRRLLETSNARAVI

SEQ ID NO: 14866 - protein, 16 aa, Homo sapiens
  ( 290 )...( 305 ): >MGR4_HUMAN
IRRVLEAARRANQTGH

SEQ ID NO: 14867 - protein, 16 aa, Homo sapiens
  ( 291 )...( 306 ): >MGR4_HUMAN
RRVLEAARRANQTGHF

SEQ ID NO: 14868 - protein, 16 aa, Homo sapiens
  ( 331 )...( 346 ): >MGR4_HUMAN
AVTILPKRMSVRGFDR

SEQ ID NO: 14869 - protein, 16 aa, Homo sapiens
  ( 332 )...( 347 ): >MGR4_HUMAN
VTILPKRMSVRGFDRY

SEQ ID NO: 14870 - protein, 16 aa, Homo sapiens
  ( 371 )...( 386 ): >MGR4_HUMAN
HCKLSRHALKKGSHVK

SEQ ID NO: 14871 - protein, 16 aa, Homo sapiens
  ( 372 )...( 387 ): >MGR4_HUMAN
CKLSRHALKKGSHVKK

SEQ ID NO: 14872 - protein, 16 aa, Homo sapiens
  ( 373 )...( 388 ): >MGR4_HUMAN
KLSRHALKKGSHVKKC

SEQ ID NO: 14873 - protein, 16 aa, Homo sapiens
  ( 374 )...( 389 ): >MGR4_HUMAN
LSRHALKKGSHVKKCT

SEQ ID NO: 14874 - protein, 16 aa, Homo sapiens
  ( 375 )...( 390 ): >MGR4_HUMAN
SRHALKKGSHVKKCTN

SEQ ID NO: 14875 - protein, 16 aa, Homo sapiens
  ( 376 )...( 391 ): >MGR4_HUMAN
RHALKKGSHVKKCTNR

SEQ ID NO: 14876 - protein, 16 aa, Homo sapiens
  ( 378 )...( 393 ): >MGR4_HUMAN
ALKKGSHVKKCTNRER

SEQ ID NO: 14877 - protein, 16 aa, Homo sapiens
  ( 379 )...( 394 ): >MGR4_HUMAN
LKKGSHVKKCTNRERI

SEQ ID NO: 14878 - protein, 16 aa, Homo sapiens
  ( 380 )...( 395 ): >MGR4_HUMAN
KKGSHVKKCTNRERIG

SEQ ID NO: 14879 - protein, 16 aa, Homo sapiens
  ( 381 )...( 396 ): >MGR4_HUMAN
KGSHVKKCTNRERIGQ

SEQ ID NO: 14880 - protein, 16 aa, Homo sapiens
  ( 565 )...( 580 ): >MGR4_HUMAN
RPTENRTGCRPIPIIK

SEQ ID NO: 14881 - protein, 16 aa, Homo sapiens
  ( 664 )...( 679 ): >MGR4_HUMAN
SISYAALLTKTNRIYR

SEQ ID NO: 14882 - protein, 16 aa, Homo sapiens
  ( 665 )...( 680 ): >MGR4_HUMAN
ISYAALLTKTNRIYRI

SEQ ID NO: 14883 - protein, 16 aa, Homo sapiens
  ( 666 )...( 681 ): >MGR4_HUMAN
SYAALLTKTNRIYRIF

SEQ ID NO: 14884 - protein, 16 aa, Homo sapiens
  ( 670 )...( 685 ): >MGR4_HUMAN
LLTKTNRIYRIFEQGK

SEQ ID NO: 14885 - protein, 16 aa, Homo sapiens
  ( 676 )...( 691 ): >MGR4_HUMAN
RIYRIFEQGKRSVSAP

SEQ ID NO: 14886 - protein, 16 aa, Homo sapiens
  ( 677 )...( 692 ): >MGR4_HUMAN
IYRIFEQGKRSVSAPR

SEQ ID NO: 14887 - protein, 16 aa, Homo sapiens
  ( 679 )...( 694 ): >MGR4_HUMAN
RIFEQGKRSVSAPRFI

SEQ ID NO: 14888 - protein, 16 aa, Homo sapiens
  ( 849 )...( 864 ): >MGR4_HUMAN
PEQNVPKRKRSLKAVV

SEQ ID NO: 14889 - protein, 16 aa, Homo sapiens
  ( 850 )...( 865 ): >MGR4_HUMAN
EQNVPKRKRSLKAVVT

SEQ ID NO: 14890 - protein, 16 aa, Homo sapiens
  ( 851 )...( 866 ): >MGR4_HUMAN
QNVPKRKRSLKAVVTA

SEQ ID NO: 14891 - protein, 16 aa, Homo sapiens
  ( 852 )...( 867 ): >MGR4_HUMAN
NVPKRKRSLKAVVTAA

SEQ ID NO: 14892 - protein, 16 aa, Homo sapiens
  ( 853 )...( 868 ): >MGR4_HUMAN
VPKRKRSLKAVVTAAT

SEQ ID NO: 14893 - protein, 16 aa, Homo sapiens
  ( 854 )...( 869 ): >MGR4_HUMAN
PKRKRSLKAVVTAATM

SEQ ID NO: 14894 - protein, 16 aa, Homo sapiens
  ( 855 )...( 870 ): >MGR4_HUMAN
KRKRSLKAVVTAATMS

SEQ ID NO: 14895 - protein, 16 aa, Homo sapiens
  ( 856 )...( 871 ): >MGR4_HUMAN
RKRSLKAVVTAATMSN

SEQ ID NO: 14896 - protein, 16 aa, Homo sapiens
  ( 857 )...( 872 ): >MGR4_HUMAN
KRSLKAVVTAATMSNK

SEQ ID NO: 14897 - protein, 16 aa, Homo sapiens
  ( 258 )...( 273 ): >MGR5_HUMAN
DKLLKKLTSHLPKARV

SEQ ID NO: 14898 - protein, 16 aa, Homo sapiens
  ( 259 )...( 274 ): >MGR5_HUMAN
KLLKKLTSHLPKARVV

SEQ ID NO: 14899 - protein, 16 aa, Homo sapiens
  ( 260 )...( 275 ): >MGR5_HUMAN
LLKKLTSHLPKARVVA

SEQ ID NO: 14900 - protein, 16 aa, Homo sapiens
  ( 261 )...( 276 ): >MGR5_HUMAN
LKKLTSHLPKARVVAC

SEQ ID NO: 14901 - protein, 16 aa, Homo sapiens
  ( 262 )...( 277 ): >MGR5_HUMAN
KKLTSHLPKARVVACF

SEQ ID NO: 14902 - protein, 16 aa, Homo sapiens
  ( 281 )...( 296 ): >MGR5_HUMAN
MTVRGLLMAMRRLGLA

SEQ ID NO: 14903 - protein, 16 aa, Homo sapiens
  ( 517 )...( 532 ): >MGR5_HUMAN
KGQIKVIRKGEVSCCW

SEQ ID NO: 14904 - protein, 16 aa, Homo sapiens
  ( 635 )...( 650 ): >MGR5_HUMAN
LIAKPKQIYCYLQRIG

SEQ ID NO: 14905 - protein, 16 aa, Homo sapiens
  ( 636 )...( 651 ): >MGR5_HUMAN
IAKPKQIYCYLQRIGI

SEQ ID NO: 14906 - protein, 16 aa, Homo sapiens
  ( 637 )...( 652 ): >MGR5_HUMAN
AKPKQIYCYLQRIGIG

SEQ ID NO: 14907 - protein, 16 aa, Homo sapiens
  ( 638 )...( 653 ): >MGR5_HUMAN
KPKQIYCYLQRIGIGL

SEQ ID NO: 14908 - protein, 16 aa, Homo sapiens
  ( 656 )...( 671 ): >MGR5_HUMAN
AMSYSALVTKTNRIAR

SEQ ID NO: 14909 - protein, 16 aa, Homo sapiens
  ( 657 )...( 672 ): >MGR5_HUMAN
MSYSALVTKTNRIARI

SEQ ID NO: 14910 - protein, 16 aa, Homo sapiens
  ( 658 )...( 673 ): >MGR5_HUMAN
SYSALVTKTNRIARIL

SEQ ID NO: 14911 - protein, 16 aa, Homo sapiens
  ( 659 )...( 674 ): >MGR5_HUMAN
YSALVTKTNRIARILA

SEQ ID NO: 14912 - protein, 16 aa, Homo sapiens
  ( 662 )...( 677 ): >MGR5_HUMAN
LVTKTNRIARILAGSK

SEQ ID NO: 14913 - protein, 16 aa, Homo sapiens
  ( 663 )...( 678 ): >MGR5_HUMAN
VTKTNRIARILAGSKK

SEQ ID NO: 14914 - protein, 16 aa, Homo sapiens
  ( 664 )...( 679 ): >MGR5_HUMAN
TKTNRIARILAGSKKK

SEQ ID NO: 14915 - protein, 16 aa, Homo sapiens
  ( 665 )...( 680 ): >MGR5_HUMAN
KTNRIARILAGSKKKI

SEQ ID NO: 14916 - protein, 16 aa, Homo sapiens
  ( 666 )...( 681 ): >MGR5_HUMAN
TNRIARILAGSKKKIC

SEQ ID NO: 14917 - protein, 16 aa, Homo sapiens
  ( 667 )...( 682 ): >MGR5_HUMAN
NRIARILAGSKKKICT

SEQ ID NO: 14918 - protein, 16 aa, Homo sapiens
  ( 668 )...( 683 ): >MGR5_HUMAN
RIARILAGSKKKICTK

SEQ ID NO: 14919 - protein, 16 aa, Homo sapiens
  ( 669 )...( 684 ): >MGR5_HUMAN
IARILAGSKKKICTKK

SEQ ID NO: 14920 - protein, 16 aa, Homo sapiens
  ( 670 )...( 685 ): >MGR5_HUMAN
ARILAGSKKKICTKKP

SEQ ID NO: 14921 - protein, 16 aa, Homo sapiens
  ( 671 )...( 686 ): >MGR5_HUMAN
RILAGSKKKICTKKPR

SEQ ID NO: 14922 - protein, 16 aa, Homo sapiens
  ( 672 )...( 687 ): >MGR5_HUMAN
ILAGSKKKICTKKPRF

SEQ ID NO: 14923 - protein, 16 aa, Homo sapiens
  ( 673 )...( 688 ): >MGR5_HUMAN
LAGSKKKICTKKPRFM

SEQ ID NO: 14924 - protein, 16 aa, Homo sapiens
  ( 819 )...( 834 ): >MGR5_HUMAN
VPKVYIILAKPERNVR

SEQ ID NO: 14925 - protein, 16 aa, Homo sapiens
  ( 820 )...( 835 ): >MGR5_HUMAN
PKVYIILAKPERNVRS

SEQ ID NO: 14926 - protein, 16 aa, Homo sapiens
  ( 821 )...( 836 ): >MGR5_HUMAN
KVYIILAKPERNVRSA

SEQ ID NO: 14927 - protein, 16 aa, Homo sapiens
  ( 831 )...( 846 ): >MGR5_HUMAN
RNVRSAFTTSTVVRMH

SEQ ID NO: 14928 - protein, 16 aa, Homo sapiens
  ( 854 )...( 869 ): >MGR5_HUMAN
SAASRSSSLVNLWKRR

SEQ ID NO: 14929 - protein, 16 aa, Homo sapiens
  ( 855 )...( 870 ): >MGR5_HUMAN
AASRSSSLVNLWKRRG

SEQ ID NO: 14930 - protein, 16 aa, Homo sapiens
  ( 856 )...( 871 ): >MGR5_HUMAN
ASRSSSLVNLWKRRGS

SEQ ID NO: 14931 - protein, 16 aa, Homo sapiens
  ( 858 )...( 873 ): >MGR5_HUMAN
RSSSLVNLWKRRGSSG

SEQ ID NO: 14932 - protein, 16 aa, Homo sapiens
  ( 862 )...( 877 ): >MGR5_HUMAN
LVNLWKRRGSSGETLR

SEQ ID NO: 14933 - protein, 16 aa, Homo sapiens
  ( 863 )...( 878 ): >MGR5_HUMAN
VNLWKRRGSSGETLRY

SEQ ID NO: 14934 - protein, 16 aa, Homo sapiens
  ( 869 )...( 884 ): >MGR5_HUMAN
RGSSGETLRYKDRRLA

SEQ ID NO: 14935 - protein, 16 aa, Homo sapiens
  ( 1 )...( 16 ): >MGR6_HUMAN
MARPRRAREPLLVALL

SEQ ID NO: 14936 - protein, 16 aa, Homo sapiens
  ( 2 )...( 17 ): >MGR6_HUMAN
ARPRRAREPLLVALLP

SEQ ID NO: 14937 - protein, 16 aa, Homo sapiens
  ( 3 )...( 18 ): >MGR6_HUMAN
RPRRAREPLLVALLPL

SEQ ID NO: 14938 - protein, 16 aa, Homo sapiens
  ( 54 )...( 69 ): >MGR6_HUMAN
GRACGPLKKEQGVHRL

SEQ ID NO: 14939 - protein, 16 aa, Homo sapiens
  ( 250 )...( 265 ): >MGR6_HUMAN
KIPREPKPGEFSKVIR

SEQ ID NO: 14940 - protein, 16 aa, Homo sapiens
  ( 260 )...( 275 ): >MGR6_HUMAN
FSKVIRRLMETPNARG

SEQ ID NO: 14941 - protein, 16 aa, Homo sapiens
  ( 261 )...( 276 ): >MGR6_HUMAN
SKVIRRLMETPNARGI

SEQ ID NO: 14942 - protein, 16 aa, Homo sapiens
  ( 262 )...( 277 ): >MGR6_HUMAN
KVIRRLMETPNARGII

SEQ ID NO: 14943 - protein, 16 aa, Homo sapiens
  ( 438 )...( 453 ): >MGR6_HUMAN
GRMLLQYIRAVRFNGS

SEQ ID NO: 14944 - protein, 16 aa, Homo sapiens
  ( 439 )...( 454 ): >MGR6_HUMAN
RMLLQYIRAVRFNGSA

SEQ ID NO: 14945 - protein, 16 aa, Homo sapiens
  ( 606 )...( 621 ): >MGR6_HUMAN
TFVRYNNTPIVRASGR

SEQ ID NO: 14946 - protein, 16 aa, Homo sapiens
  ( 662 )...( 677 ): >MGR6_HUMAN
TLSYSALLTKTNRIYR

SEQ ID NO: 14947 - protein, 16 aa, Homo sapiens
  ( 663 )...( 678 ): >MGR6_HUMAN
LSYSALLTKTNRIYRI

SEQ ID NO: 14948 - protein, 16 aa, Homo sapiens
  ( 664 )...( 679 ): >MGR6_HUMAN
SYSALLTKTNRIYRIF

SEQ ID NO: 14949 - protein, 16 aa, Homo sapiens
  ( 668 )...( 683 ): >MGR6_HUMAN
LLTKTNRIYRIFEQGK

SEQ ID NO: 14950 - protein, 16 aa, Homo sapiens
  ( 672 )...( 687 ): >MGR6_HUMAN
TNRIYRIFEQGKRSVT

SEQ ID NO: 14951 - protein, 16 aa, Homo sapiens
  ( 848 )...( 863 ): >MGR6_HUMAN
EQNVQKRKRSLKATST

SEQ ID NO: 14952 - protein, 16 aa, Homo sapiens
  ( 849 )...( 864 ): >MGR6_HUMAN
QNVQKRKRSLKATSTV

SEQ ID NO: 14953 - protein, 16 aa, Homo sapiens
  ( 850 )...( 865 ): >MGR6_HUMAN
NVQKRKRSLKATSTVA

SEQ ID NO: 14954 - protein, 16 aa, Homo sapiens
  ( 851 )...( 866 ): >MGR6_HUMAN
VQKRKRSLKATSTVAA

SEQ ID NO: 14955 - protein, 16 aa, Homo sapiens
  ( 852 )...( 867 ): >MGR6_HUMAN
QKRKRSLKATSTVAAP

SEQ ID NO: 14956 - protein, 16 aa, Homo sapiens
  ( 853 )...( 868 ): >MGR6_HUMAN
KRKRSLKATSTVAAPP

SEQ ID NO: 14957 - protein, 16 aa, Homo sapiens
  ( 854 )...( 869 ): >MGR6_HUMAN
RKRSLKATSTVAAPPK

SEQ ID NO: 14958 - protein, 16 aa, Homo sapiens
  ( 5 )...( 20 ): >MGR7_HUMAN
RKLLRVLTLMKFPCCV

SEQ ID NO: 14959 - protein, 16 aa, Homo sapiens
  ( 440 )...( 455 ): >MGR7_HUMAN
MEQAGGKKLLKYIRNV

SEQ ID NO: 14960 - protein, 16 aa, Homo sapiens
  ( 441 )...( 456 ): >MGR7_HUMAN
EQAGGKKLLKYIRNVN

SEQ ID NO: 14961 - protein, 16 aa, Homo sapiens
  ( 442 )...( 457 ): >MGR7_HUMAN
QAGGKKLLKYIRNVNF

SEQ ID NO: 14962 - protein, 16 aa, Homo sapiens
  ( 443 )...( 458 ): >MGR7_HUMAN
AGGKKLLKYIRNVNFN

SEQ ID NO: 14963 - protein, 16 aa, Homo sapiens
  ( 444 )...( 459 ): >MGR7_HUMAN
GGKKLLKYIRNVNFNG

SEQ ID NO: 14964 - protein, 16 aa, Homo sapiens
  ( 445 )...( 460 ): >MGR7_HUMAN
GKKLLKYIRNVNFNGS

SEQ ID NO: 14965 - protein, 16 aa, Homo sapiens
  ( 446 )...( 461 ): >MGR7_HUMAN
KKLLKYIRNVNFNGSA

SEQ ID NO: 14966 - protein, 16 aa, Homo sapiens
  ( 522 )...( 537 ): >MGR7_HUMAN
VCTLPCKPGQRKKTQK

SEQ ID NO: 14967 - protein, 16 aa, Homo sapiens
  ( 524 )...( 539 ): >MGR7_HUMAN
TLPCKPGQRKKTQKGT

SEQ ID NO: 14968 - protein, 16 aa, Homo sapiens
  ( 525 )...( 540 ): >MGR7_HUMAN
LPCKPGQRKKTQKGTP

SEQ ID NO: 14969 - protein, 16 aa, Homo sapiens
  ( 667 )...( 682 ): >MGR7_HUMAN
CISYAALLTKTNRIYR

SEQ ID NO: 14970 - protein, 16 aa, Homo sapiens
  ( 668 )...( 683 ): >MGR7_HUMAN
ISYAALLTKTNRIYRI

SEQ ID NO: 14971 - protein, 16 aa, Homo sapiens
  ( 669 )...( 684 ): >MGR7_HUMAN
SYAALLTKTNRIYRIF

SEQ ID NO: 14972 - protein, 16 aa, Homo sapiens
  ( 673 )...( 688 ): >MGR7_HUMAN
LLTKTNRIYRIFEQGK

SEQ ID NO: 14973 - protein, 16 aa, Homo sapiens
  ( 677 )...( 692 ): >MGR7_HUMAN
TNRIYRIFEQGKKSVT

SEQ ID NO: 14974 - protein, 16 aa, Homo sapiens
  ( 678 )...( 693 ): >MGR7_HUMAN
NRIYRIFEQGKKSVTA

SEQ ID NO: 14975 - protein, 16 aa, Homo sapiens
  ( 679 )...( 694 ): >MGR7_HUMAN
RIYRIFEQGKKSVTAP

SEQ ID NO: 14976 - protein, 16 aa, Homo sapiens
  ( 680 )...( 695 ): >MGR7_HUMAN
IYRIFEQGKKSVTAPR

SEQ ID NO: 14977 - protein, 16 aa, Homo sapiens
  ( 681 )...( 696 ): >MGR7_HUMAN
YRIFEQGKKSVTAPRL

SEQ ID NO: 14978 - protein, 16 aa, Homo sapiens
  ( 682 )...( 697 ): >MGR7_HUMAN
RIFEQGKKSVTAPRLI

SEQ ID NO: 14979 - protein, 16 aa, Homo sapiens
  ( 852 )...( 867 ): >MGR7_HUMAN
PELNVQKRKRSFKAVV

SEQ ID NO: 14980 - protein, 16 aa, Homo sapiens
  ( 853 )...( 868 ): >MGR7_HUMAN
ELNVQKRKRSFKAVVT

SEQ ID NO: 14981 - protein, 16 aa, Homo sapiens
  ( 854 )...( 869 ): >MGR7_HUMAN
LNVQKRKRSFKAVVTA

SEQ ID NO: 14982 - protein, 16 aa, Homo sapiens
  ( 855 )...( 870 ): >MGR7_HUMAN
NVQKRKRSFKAVVTAA

SEQ ID NO: 14983 - protein, 16 aa, Homo sapiens
  ( 856 )...( 871 ): >MGR7_HUMAN
VQKRKRSFKAVVTAAT

SEQ ID NO: 14984 - protein, 16 aa, Homo sapiens
  ( 857 )...( 872 ): >MGR7_HUMAN
QKRKRSFKAVVTAATM

SEQ ID NO: 14985 - protein, 16 aa, Homo sapiens
  ( 858 )...( 873 ): >MGR7_HUMAN
KRKRSFKAVVTAATMS

SEQ ID NO: 14986 - protein, 16 aa, Homo sapiens
  ( 859 )...( 874 ): >MGR7_HUMAN
RKRSFKAVVTAATMSS

SEQ ID NO: 14987 - protein, 16 aa, Homo sapiens
  ( 860 )...( 875 ): >MGR7_HUMAN
KRSFKAVVTAATMSSR

SEQ ID NO: 14988 - protein, 16 aa, Homo sapiens
  ( 861 )...( 876 ): >MGR7_HUMAN
RSFKAVVTAATMSSRL

SEQ ID NO: 14989 - protein, 13 aa, Homo sapiens
  ( 903 )...( 918 ): >MGR7_HUMAN
AKKKYVSYNNLVI

SEQ ID NO: 14990 - protein, 16 aa, Homo sapiens
  ( 60 )...( 75 ): >MGR8_HUMAN
RGVPCGELKKEKGIHR

SEQ ID NO: 14991 - protein, 16 aa, Homo sapiens
  ( 264 )...( 279 ): >MGR8_HUMAN
KIIKRLLETPNARAVI

SEQ ID NO: 14992 - protein, 16 aa, Homo sapiens
  ( 287 )...( 302 ): >MGR8_HUMAN
IRRILEAAKKLNQSGH

SEQ ID NO: 14993 - protein, 16 aa, Homo sapiens
  ( 288 )...( 303 ): >MGR8_HUMAN
RRILEAAKKLNQSGHF

SEQ ID NO: 14994 - protein, 16 aa, Homo sapiens
  ( 370 )...( 385 ): >MGR8_HUMAN
KLGSHGKRNSHIKKCT

SEQ ID NO: 14995 - protein, 16 aa, Homo sapiens
  ( 374 )...( 389 ): >MGR8_HUMAN
HGKRNSHIKKCTGLER

SEQ ID NO: 14996 - protein, 16 aa, Homo sapiens
  ( 375 )...( 390 ): >MGR8_HUMAN
GKRNSHIKKCTGLERI

SEQ ID NO: 14997 - protein, 16 aa, Homo sapiens
  ( 376 )...( 391 ): >MGR8_HUMAN
KRNSHIKKCTGLERIA

SEQ ID NO: 14998 - protein, 16 aa, Homo sapiens
  ( 377 )...( 392 ): >MGR8_HUMAN
RNSHIKKCTGLERIAR

SEQ ID NO: 14999 - protein, 16 aa, Homo sapiens
  ( 517 )...( 532 ): >MGR8_HUMAN
SLPCKPGERKKTVKGV

SEQ ID NO: 15000 - protein, 16 aa, Homo sapiens
  ( 518 )...( 533 ): >MGR8_HUMAN
LPCKPGERKKTVKGVP

SEQ ID NO: 15001 - protein, 16 aa, Homo sapiens
  ( 661 )...( 676 ): >MGR8_HUMAN
FSYAALLTKTNRIHRI

SEQ ID NO: 15002 - protein, 16 aa, Homo sapiens
  ( 662 )...( 677 ): >MGR8_HUMAN
SYAALLTKTNRIHRIF

SEQ ID NO: 15003 - protein, 16 aa, Homo sapiens
  ( 666 )...( 681 ): >MGR8_HUMAN
LLTKTNRIHRIFEQGK

SEQ ID NO: 15004 - protein, 16 aa, Homo sapiens
  ( 671 )...( 686 ): >MGR8_HUMAN
NRIHRIFEQGKKSVTA

SEQ ID NO: 15005 - protein, 16 aa, Homo sapiens
  ( 672 )...( 687 ): >MGR8_HUMAN
RIHRIFEQGKKSVTAP

SEQ ID NO: 15006 - protein, 16 aa, Homo sapiens
  ( 675 )...( 690 ): >MGR8_HUMAN
RIFEQGKKSVTAPKFI

SEQ ID NO: 15007 - protein, 16 aa, Homo sapiens
  ( 846 )...( 861 ): >MGR8_HUMAN
EQNVQKRKRSFKAVVT

SEQ ID NO: 15008 - protein, 16 aa, Homo sapiens
  ( 847 )...( 862 ): >MGR8_HUMAN
QNVQKRKRSFKAVVTA

SEQ ID NO: 15009 - protein, 16 aa, Homo sapiens
  ( 848 )...( 863 ): >MGR8_HUMAN
NVQKRKRSFKAVVTAA

SEQ ID NO: 15010 - protein, 16 aa, Homo sapiens
  ( 849 )...( 864 ): >MGR8_HUMAN
VQKRKRSFKAVVTAAT

SEQ ID NO: 15011 - protein, 16 aa, Homo sapiens
  ( 850 )...( 865 ): >MGR8_HUMAN
QKRKRSFKAVVTAATM

SEQ ID NO: 15012 - protein, 16 aa, Homo sapiens
  ( 851 )...( 866 ): >MGR8_HUMAN
KRKRSFKAVVTAATMQ

SEQ ID NO: 15013 - protein, 16 aa, Homo sapiens
  ( 852 )...( 867 ): >MGR8_HUMAN
RKRSFKAVVTAATMQS

SEQ ID NO: 15014 - protein, 16 aa, Homo sapiens
  ( 853 )...( 868 ): >MGR8_HUMAN
KRSFKAVVTAATMQSK

SEQ ID NO: 15015 - protein, 16 aa, Homo sapiens
  ( 42 )...( 57 ): >ML1A_HUMAN
ILGNLLVILSVYRNKK

SEQ ID NO: 15016 - protein, 16 aa, Homo sapiens
  ( 43 )...( 58 ): >ML1A_HUMAN
LGNLLVILSVYRNKKL

SEQ ID NO: 15017 - protein, 16 aa, Homo sapiens
  ( 44 )...( 59 ): >ML1A_HUMAN
GNLLVILSVYRNKKLR

SEQ ID NO: 15018 - protein, 16 aa, Homo sapiens
  ( 46 )...( 61 ): >ML1A_HUMAN
LLVILSVYRNKKLRNA

SEQ ID NO: 15019 - protein, 16 aa, Homo sapiens
  ( 47 )...( 62 ): >ML1A_HUMAN
LVILSVYRNKKLRNAG

SEQ ID NO: 15020 - protein, 16 aa, Homo sapiens
  ( 48 )...( 63 ): >ML1A_HUMAN
VILSVYRNKKLRNAGN

SEQ ID NO: 15021 - protein, 16 aa, Homo sapiens
  ( 49 )...( 64 ): >ML1A_HUMAN
ILSVYRNKKLRNAGNI

SEQ ID NO: 15022 - protein, 16 aa, Homo sapiens
  ( 52 )...( 67 ): >ML1A_HUMAN
VYRNKKLRNAGNIFVV

SEQ ID NO: 15023 - protein, 16 aa, Homo sapiens
  ( 54 )...( 69 ): >ML1A_HUMAN
RNKKLRNAGNIFVVSL

SEQ ID NO: 15024 - protein, 16 aa, Homo sapiens
  ( 55 )...( 70 ): >ML1A_HUMAN
NKKLRNAGNIFVVSLA

SEQ ID NO: 15025 - protein, 16 aa, Homo sapiens
  ( 56 )...( 71 ): >ML1A_HUMAN
KKLRNAGNIFVVSLAV

SEQ ID NO: 15026 - protein, 16 aa, Homo sapiens
  ( 212 )...( 227 ): >ML1A_HUMAN
ILVLQVRQRVKPDRKP

SEQ ID NO: 15027 - protein, 16 aa, Homo sapiens
  ( 303 )...( 318 ): >ML1A_HUMAN
RKEYRRIIVSLCTARV

SEQ ID NO: 15028 - protein, 16 aa, Homo sapiens
  ( 304 )...( 319 ): >ML1A_HUMAN
KEYRRIIVSLCTARVF

SEQ ID NO: 15029 - protein, 16 aa, Homo sapiens
  ( 306 )...( 321 ): >ML1A_HUMAN
YRRIIVSLCTARVFFV

SEQ ID NO: 15030 - protein, 16 aa, Homo sapiens
  ( 55 )...( 70 ): >ML1B_HUMAN
VVGNLLVILSVLRNRK

SEQ ID NO: 15031 - protein, 16 aa, Homo sapiens
  ( 56 )...( 71 ): >ML1B_HUMAN
VGNLLVILSVLRNRKL

SEQ ID NO: 15032 - protein, 16 aa, Homo sapiens
  ( 57 )...( 72 ): >ML1B_HUMAN
GNLLVILSVLRNRKLR

SEQ ID NO: 15033 - protein, 16 aa, Homo sapiens
  ( 58 )...( 73 ): >ML1B_HUMAN
NLLVILSVLRNRKLRN

SEQ ID NO: 15034 - protein, 16 aa, Homo sapiens
  ( 59 )...( 74 ): >ML1B_HUMAN
LLVILSVLRNRKLRNA

SEQ ID NO: 15035 - protein, 16 aa, Homo sapiens
  ( 60 )...( 75 ): >ML1B_HUMAN
LVILSVLRNRKLRNAG

SEQ ID NO: 15036 - protein, 16 aa, Homo sapiens
  ( 61 )...( 76 ): >ML1B_HUMAN
VILSVLRNRKLRNAGN

SEQ ID NO: 15037 - protein, 16 aa, Homo sapiens
  ( 62 )...( 77 ): >ML1B_HUMAN
ILSVLRNRKLRNAGNL

SEQ ID NO: 15038 - protein, 16 aa, Homo sapiens
  ( 63 )...( 78 ): >ML1B_HUMAN
LSVLRNRKLRNAGNLF

SEQ ID NO: 15039 - protein, 16 aa, Homo sapiens
  ( 64 )...( 79 ): >ML1B_HUMAN
SVLRNRKLRNAGNLFL

SEQ ID NO: 15040 - protein, 16 aa, Homo sapiens
  ( 65 )...( 80 ): >ML1B_HUMAN
VLRNRKLRNAGNLFLV

SEQ ID NO: 15041 - protein, 16 aa, Homo sapiens
  ( 66 )...( 81 ): >ML1B_HUMAN
LRNRKLRNAGNLFLVS

SEQ ID NO: 15042 - protein, 16 aa, Homo sapiens
  ( 67 )...( 82 ): >ML1B_HUMAN
RNRKLRNAGNLFLVSL

SEQ ID NO: 15043 - protein, 16 aa, Homo sapiens
  ( 68 )...( 83 ): >ML1B_HUMAN
NRKLRNAGNLFLVSLA

SEQ ID NO: 15044 - protein, 16 aa, Homo sapiens
  ( 69 )...( 84 ): >ML1B_HUMAN
RKLRNAGNLFLVSLAL

SEQ ID NO: 15045 - protein, 16 aa, Homo sapiens
  ( 219 )...( 234 ): >ML1B_HUMAN
CYLRIWVLVLQARRKA

SEQ ID NO: 15046 - protein, 16 aa, Homo sapiens
  ( 221 )...( 236 ): >ML1B_HUMAN
LRIWVLVLQARRKAKP

SEQ ID NO: 15047 - protein, 16 aa, Homo sapiens
  ( 223 )...( 238 ): >ML1B_HUMAN
IWVLVLQARRKAKPES

SEQ ID NO: 15048 - protein, 16 aa, Homo sapiens
  ( 225 )...( 240 ): >ML1B_HUMAN
VLVLQARRKAKPESRL

SEQ ID NO: 15049 - protein, 16 aa, Homo sapiens
  ( 226 )...( 241 ): >ML1B_HUMAN
LVLQARRKAKPESRLC

SEQ ID NO: 15050 - protein, 16 aa, Homo sapiens
  ( 227 )...( 242 ): >ML1B_HUMAN
VLQARRKAKPESRLCL

SEQ ID NO: 15051 - protein, 16 aa, Homo sapiens
  ( 228 )...( 243 ): >ML1B_HUMAN
LQARRKAKPESRLCLK

SEQ ID NO: 15052 - protein, 16 aa, Homo sapiens
  ( 230 )...( 245 ): >ML1B_HUMAN
ARRKAKPESRLCLKPS

SEQ ID NO: 15053 - protein, 16 aa, Homo sapiens
  ( 45 )...( 60 ): >ML1X_HUMAN
GNSMVILAVTKNKKLR

SEQ ID NO: 15054 - protein, 16 aa, Homo sapiens
  ( 46 )...( 61 ): >ML1X_HUMAN
NSMVILAVTKNKKLRN

SEQ ID NO: 15055 - protein, 16 aa, Homo sapiens
  ( 47 )...( 62 ): >ML1X_HUMAN
SMVILAVTKNKKLRNS

SEQ ID NO: 15056 - protein, 16 aa, Homo sapiens
  ( 48 )...( 63 ): >ML1X_HUMAN
MVILAVTKNKKLRNSG

SEQ ID NO: 15057 - protein, 16 aa, Homo sapiens
  ( 49 )...( 64 ): >ML1X_HUMAN
VILAVTKNKKLRNSGN

SEQ ID NO: 15058 - protein, 16 aa, Homo sapiens
  ( 50 )...( 65 ): >ML1X_HUMAN
ILAVTKNKKLRNSGNI

SEQ ID NO: 15059 - protein, 16 aa, Homo sapiens
  ( 51 )...( 66 ): >ML1X_HUMAN
LAVTKNKKLRNSGNIF

SEQ ID NO: 15060 - protein, 16 aa, Homo sapiens
  ( 52 )...( 67 ): >ML1X_HUMAN
AVTKNKKLRNSGNIFV

SEQ ID NO: 15061 - protein, 16 aa, Homo sapiens
  ( 53 )...( 68 ): >ML1X_HUMAN
VTKNKKLRNSGNIFVV

SEQ ID NO: 15062 - protein, 16 aa, Homo sapiens
  ( 54 )...( 69 ): >ML1X_HUMAN
TKNKKLRNSGNIFVVS

SEQ ID NO: 15063 - protein, 16 aa, Homo sapiens
  ( 55 )...( 70 ): >ML1X_HUMAN
KNKKLRNSGNIFVVSL

SEQ ID NO: 15064 - protein, 16 aa, Homo sapiens
  ( 57 )...( 72 ): >ML1X_HUMAN
KKLRNSGNIFVVSLSV

SEQ ID NO: 15065 - protein, 16 aa, Homo sapiens
  ( 204 )...( 219 ): >ML1X_HUMAN
VGFCYVRIWTKVLAAR

SEQ ID NO: 15066 - protein, 16 aa, Homo sapiens
  ( 332 )...( 347 ): >ML1X_HUMAN
ARTLARARAHARDQAR

SEQ ID NO: 15067 - protein, 16 aa, Homo sapiens
  ( 246 )...( 261 ): >MRG_HUMAN
LLIRFLCCSQQQKATR

SEQ ID NO: 15068 - protein, 16 aa, Homo sapiens
  ( 247 )...( 262 ): >MRG_HUMAN
LIRFLCCSQQQKATRV

SEQ ID NO: 15069 - protein, 16 aa, Homo sapiens
  ( 248 )...( 263 ): >MRG_HUMAN
IRFLCCSQQQKATRVY

SEQ ID NO: 15070 - protein, 16 aa, Homo sapiens
  ( 316 )...( 331 ): >MRG_HUMAN
FVGSLRKKRLKESLRV

SEQ ID NO: 15071 - protein, 16 aa, Homo sapiens
  ( 317 )...( 332 ): >MRG_HUMAN
VGSLRKKRLKESLRVI

SEQ ID NO: 15072 - protein, 16 aa, Homo sapiens
  ( 318 )...( 333 ): >MRG_HUMAN
GSLRKKRLKESLRVIL

SEQ ID NO: 15073 - protein, 16 aa, Homo sapiens
  ( 319 )...( 334 ): >MRG_HUMAN
SLRKKRLKESLRVILQ

SEQ ID NO: 15074 - protein, 16 aa, Homo sapiens
  ( 322 )...( 337 ): >MRG_HUMAN
KKRLKESLRVILQRAL

SEQ ID NO: 15075 - protein, 16 aa, Homo sapiens
  ( 323 )...( 338 ): >MRG_HUMAN
KRLKESLRVILQRALA

SEQ ID NO: 15076 - protein, 16 aa, Homo sapiens
  ( 333 )...( 348 ): >MRG_HUMAN
LQRALADKPEVGRNKK

SEQ ID NO: 15077 - protein, 16 aa, Homo sapiens
  ( 334 )...( 349 ): >MRG_HUMAN
QRALADKPEVGRNKKA

SEQ ID NO: 15078 - protein, 16 aa, Homo sapiens
  ( 335 )...( 350 ): >MRG_HUMAN
RALADKPEVGRNKKAA

SEQ ID NO: 15079 - protein, 16 aa, Homo sapiens
  ( 149 )...( 164 ): >MSHR_HUMAN
ALRYHSIVTLPRARRA

SEQ ID NO: 15080 - protein, 16 aa, Homo sapiens
  ( 150 )...( 165 ): >MSHR_HUMAN
LRYHSIVTLPRARRAV

SEQ ID NO: 15081 - protein, 16 aa, Homo sapiens
  ( 151 )...( 166 ): >MSHR_HUMAN
RYHSIVTLPRARRAVA

SEQ ID NO: 15082 - protein, 16 aa, Homo sapiens
  ( 152 )...( 167 ): >MSHR_HUMAN
YHSIVTLPRARRAVAA

SEQ ID NO: 15083 - protein, 16 aa, Homo sapiens
  ( 153 )...( 168 ): >MSHR_HUMAN
HSIVTLPRARRAVAAI

SEQ ID NO: 15084 - protein, 16 aa, Homo sapiens
  ( 154 )...( 169 ): >MSHR_HUMAN
SIVTLPRARRAVAAIW

SEQ ID NO: 15085 - protein, 16 aa, Homo sapiens
  ( 155 )...( 170 ): >MSHR_HUMAN
IVTLPRARRAVAAIWV

SEQ ID NO: 15086 - protein, 16 aa, Homo sapiens
  ( 156 )...( 171 ): >MSHR_HUMAN
VTLPRARRAVAAIWVA

SEQ ID NO: 15087 - protein, 16 aa, Homo sapiens
  ( 157 )...( 172 ): >MSHR_HUMAN
TLPRARRAVAAIWVAS

SEQ ID NO: 15088 - protein, 16 aa, Homo sapiens
  ( 158 )...( 173 ): >MSHR_HUMAN
LPRARRAVAAIWVASV

SEQ ID NO: 15089 - protein, 16 aa, Homo sapiens
  ( 159 )...( 174 ): >MSHR_HUMAN
PRARRAVAAIWVASVV

SEQ ID NO: 15090 - protein, 16 aa, Homo sapiens
  ( 160 )...( 175 ): >MSHR_HUMAN
RARRAVAAIWVASVVF

SEQ ID NO: 15091 - protein, 16 aa, Homo sapiens
  ( 211 )...( 226 ): >MSHR_HUMAN
LARACQHAQGIARLHK

SEQ ID NO: 15092 - protein, 16 aa, Homo sapiens
  ( 212 )...( 227 ): >MSHR_HUMAN
ARACQHAQGIARLHKR

SEQ ID NO: 15093 - protein, 16 aa, Homo sapiens
  ( 213 )...( 228 ): >MSHR_HUMAN
RACQHAQGIARLHKRQ

SEQ ID NO: 15094 - protein, 16 aa, Homo sapiens
  ( 214 )...( 229 ): >MSHR_HUMAN
ACQHAQGIARLHKRQR

SEQ ID NO: 15095 - protein, 16 aa, Homo sapiens
  ( 216 )...( 231 ): >MSHR_HUMAN
QHAQGIARLHKRQRPV

SEQ ID NO: 15096 - protein, 16 aa, Homo sapiens
  ( 218 )...( 233 ): >MSHR_HUMAN
AQGIARLHKRQRPVHQ

SEQ ID NO: 15097 - protein, 16 aa, Homo sapiens
  ( 219 )...( 234 ): >MSHR_HUMAN
QGIARLHKRQRPVHQG

SEQ ID NO: 15098 - protein, 16 aa, Homo sapiens
  ( 220 )...( 235 ): >MSHR_HUMAN
GIARLHKRQRPVHQGF

SEQ ID NO: 15099 - protein, 16 aa, Homo sapiens
  ( 221 )...( 236 ): >MSHR_HUMAN
IARLHKRQRPVHQGFG

SEQ ID NO: 15100 - protein, 16 aa, Homo sapiens
  ( 222 )...( 237 ): >MSHR_HUMAN
ARLHKRQRPVHQGFGL

SEQ ID NO: 15101 - protein, 16 aa, Homo sapiens
  ( 224 )...( 239 ): >MSHR_HUMAN
LHKRQRPVHQGFGLKG

SEQ ID NO: 15102 - protein, 16 aa, Homo sapiens
  ( 225 )...( 240 ): >MSHR_HUMAN
HKRQRPVHQGFGLKGA

SEQ ID NO: 15103 - protein, 16 aa, Homo sapiens
  ( 226 )...( 241 ): >MSHR_HUMAN
KRQRPVHQGFGLKGAV

SEQ ID NO: 15104 - protein, 16 aa, Homo sapiens
  ( 227 )...( 242 ): >MSHR_HUMAN
RQRPVHQGFGLKGAVT

SEQ ID NO: 15105 - protein, 16 aa, Homo sapiens
  ( 132 )...( 147 ): >MTLR_HUMAN
LSVERYLAICRPLRAR

SEQ ID NO: 15106 - protein, 16 aa, Homo sapiens
  ( 133 )...( 148 ): >MTLR_HUMAN
SVERYLAICRPLRARV

SEQ ID NO: 15107 - protein, 16 aa, Homo sapiens
  ( 134 )...( 149 ): >MTLR_HUMAN
VERYLAICRPLRARVL

SEQ ID NO: 15108 - protein, 16 aa, Homo sapiens
  ( 135 )...( 150 ): >MTLR_HUMAN
ERYLAICRPLRARVLV

SEQ ID NO: 15109 - protein, 16 aa, Homo sapiens
  ( 136 )...( 151 ): >MTLR_HUMAN
RYLAICRPLRARVLVT

SEQ ID NO: 15110 - protein, 16 aa, Homo sapiens
  ( 137 )...( 152 ): >MTLR_HUMAN
YLAICRPLRARVLVTR

SEQ ID NO: 15111 - protein, 16 aa, Homo sapiens
  ( 138 )...( 153 ): >MTLR_HUMAN
LAICRPLRARVLVTRR

SEQ ID NO: 15112 - protein, 16 aa, Homo sapiens
  ( 146 )...( 161 ): >MTLR_HUMAN
ARVLVTRRRVRALIAV

SEQ ID NO: 15113 - protein, 16 aa, Homo sapiens
  ( 147 )...( 162 ): >MTLR_HUMAN
RVLVTRRRVRALIAVL

SEQ ID NO: 15114 - protein, 16 aa, Homo sapiens
  ( 148 )...( 163 ): >MTLR_HUMAN
VLVTRRRVRALIAVLW

SEQ ID NO: 15115 - protein, 16 aa, Homo sapiens
  ( 149 )...( 164 ): >MTLR_HUMAN
LVTRRRVRALIAVLWA

SEQ ID NO: 15116 - protein, 16 aa, Homo sapiens
  ( 150 )...( 165 ): >MTLR_HUMAN
VTRRRVRALIAVLWAV

SEQ ID NO: 15117 - protein, 16 aa, Homo sapiens
  ( 151 )...( 166 ): >MTLR_HUMAN
TRRRVRALIAVLWAVA

SEQ ID NO: 15118 - protein, 16 aa, Homo sapiens
  ( 152 )...( 167 ): >MTLR_HUMAN
RRRVRALIAVLWAVAL

SEQ ID NO: 15119 - protein, 16 aa, Homo sapiens
  ( 268 )...( 283 ): >MTLR_HUMAN
GLIGRELWSSRRPLRG

SEQ ID NO: 15120 - protein, 16 aa, Homo sapiens
  ( 269 )...( 284 ): >MTLR_HUMAN
LIGRELWSSRRPLRGP

SEQ ID NO: 15121 - protein, 16 aa, Homo sapiens
  ( 270 )...( 285 ): >MTLR_HUMAN
IGRELWSSRRPLRGPA

SEQ ID NO: 15122 - protein, 16 aa, Homo sapiens
  ( 276 )...( 291 ): >MTLR_HUMAN
SSRRPLRGPAASGRER

SEQ ID NO: 15123 - protein, 16 aa, Homo sapiens
  ( 277 )...( 292 ): >MTLR_HUMAN
SRRPLRGPAASGRERG

SEQ ID NO: 15124 - protein, 16 aa, Homo sapiens
  ( 278 )...( 293 ): >MTLR_HUMAN
RRPLRGPAASGRERGH

SEQ ID NO: 15125 - protein, 16 aa, Homo sapiens
  ( 279 )...( 294 ): >MTLR_HUMAN
RPLRGPAASGRERGHR

SEQ ID NO: 15126 - protein, 16 aa, Homo sapiens
  ( 280 )...( 295 ): >MTLR_HUMAN
PLRGPAASGRERGHRQ

SEQ ID NO: 15127 - protein, 16 aa, Homo sapiens
  ( 281 )...( 296 ): >MTLR_HUMAN
LRGPAASGRERGHRQT

SEQ ID NO: 15128 - protein, 16 aa, Homo sapiens
  ( 282 )...( 297 ): >MTLR_HUMAN
RGPAASGRERGHRQTV

SEQ ID NO: 15129 - protein, 16 aa, Homo sapiens
  ( 283 )...( 298 ): >MTLR_HUMAN
GPAASGRERGHRQTVR

SEQ ID NO: 15130 - protein, 16 aa, Homo sapiens
  ( 284 )...( 299 ): >MTLR_HUMAN
PAASGRERGHRQTVRV

SEQ ID NO: 15131 - protein, 16 aa, Homo sapiens
  ( 285 )...( 300 ): >MTLR_HUMAN
AASGRERGHRQTVRVL

SEQ ID NO: 15132 - protein, 16 aa, Homo sapiens
  ( 286 )...( 301 ): >MTLR_HUMAN
ASGRERGHRQTVRVLL

SEQ ID NO: 15133 - protein, 16 aa, Homo sapiens
  ( 287 )...( 302 ): >MTLR_HUMAN
SGRERGHRQTVRVLLV

SEQ ID NO: 15134 - protein, 16 aa, Homo sapiens
  ( 288 )...( 303 ): >MTLR_HUMAN
GRERGHRQTVRVLLVV

SEQ ID NO: 15135 - protein, 16 aa, Homo sapiens
  ( 289 )...( 304 ): >MTLR_HUMAN
RERGHRQTVRVLLVVV

SEQ ID NO: 15136 - protein, 16 aa, Homo sapiens
  ( 291 )...( 306 ): >MTLR_HUMAN
RGHRQTVRVLLVVVLA

SEQ ID NO: 15137 - protein, 16 aa, Homo sapiens
  ( 350 )...( 365 ): >MTLR_HUMAN
INPILYNLISKKYRAA

SEQ ID NO: 15138 - protein, 16 aa, Homo sapiens
  ( 353 )...( 368 ): >MTLR_HUMAN
ILYNLISKKYRAAAFK

SEQ ID NO: 15139 - protein, 16 aa, Homo sapiens
  ( 354 )...( 369 ): >MTLR_HUMAN
LYNLISKKYRAAAFKL

SEQ ID NO: 15140 - protein, 16 aa, Homo sapiens
  ( 355 )...( 370 ): >MTLR_HUMAN
YNLISKKYRAAAFKLL

SEQ ID NO: 15141 - protein, 16 aa, Homo sapiens
  ( 356 )...( 371 ): >MTLR_HUMAN
NLISKKYRAAAFKLLL

SEQ ID NO: 15142 - protein, 16 aa, Homo sapiens
  ( 357 )...( 372 ): >MTLR_HUMAN
LISKKYRAAAFKLLLA

SEQ ID NO: 15143 - protein, 16 aa, Homo sapiens
  ( 358 )...( 373 ): >MTLR_HUMAN
ISKKYRAAAFKLLLAR

SEQ ID NO: 15144 - protein, 16 aa, Homo sapiens
  ( 359 )...( 374 ): >MTLR_HUMAN
SKKYRAAAFKLLLARK

SEQ ID NO: 15145 - protein, 16 aa, Homo sapiens
  ( 360 )...( 375 ): >MTLR_HUMAN
KKYRAAAFKLLLARKS

SEQ ID NO: 15146 - protein, 16 aa, Homo sapiens
  ( 362 )...( 377 ): >MTLR_HUMAN
YRAAAFKLLLARKSRP

SEQ ID NO: 15147 - protein, 16 aa, Homo sapiens
  ( 364 )...( 379 ): >MTLR_HUMAN
AAAFKLLLARKSRPRG

SEQ ID NO: 15148 - protein, 16 aa, Homo sapiens
  ( 365 )...( 380 ): >MTLR_HUMAN
AAFKLLLARKSRPRGF

SEQ ID NO: 15149 - protein, 16 aa, Homo sapiens
  ( 144 )...( 159 ): >NFF1_HUMAN
CIVHPFREKLTLRKAL

SEQ ID NO: 15150 - protein, 16 aa, Homo sapiens
  ( 145 )...( 160 ): >NFF1_HUMAN
IVHPFREKLTLRKALV

SEQ ID NO: 15151 - protein, 16 aa, Homo sapiens
  ( 146 )...( 161 ): >NFF1_HUMAN
VHPFREKLTLRKALVT

SEQ ID NO: 15152 - protein, 16 aa, Homo sapiens
  ( 147 )...( 162 ): >NFF1_HUMAN
HPFREKLTLRKALVTI

SEQ ID NO: 15153 - protein, 16 aa, Homo sapiens
  ( 148 )...( 163 ): >NFF1_HUMAN
PFREKLTLRKALVTIA

SEQ ID NO: 15154 - protein, 16 aa, Homo sapiens
  ( 149 )...( 164 ): >NFF1_HUMAN
FREKLTLRKALVTIAV

SEQ ID NO: 15155 - protein, 16 aa, Homo sapiens
  ( 150 )...( 165 ): >NFF1_HUMAN
REKLTLRKALVTIAVI

SEQ ID NO: 15156 - protein, 16 aa, Homo sapiens
  ( 210 )...( 225 ): >NFF1_HUMAN
KGMRRVYTTVLFSHIY

SEQ ID NO: 15157 - protein, 16 aa, Homo sapiens
  ( 230 )...( 245 ): >NFF1_HUMAN
ALIVVMYARIARKLCQ

SEQ ID NO: 15158 - protein, 16 aa, Homo sapiens
  ( 231 )...( 246 ): >NFF1_HUMAN
LIVVMYARIARKLCQA

SEQ ID NO: 15159 - protein, 16 aa, Homo sapiens
  ( 232 )...( 247 ): >NFF1_HUMAN
IVVMYARIARKLCQAP

SEQ ID NO: 15160 - protein, 16 aa, Homo sapiens
  ( 256 )...( 271 ): >NFF1_HUMAN
AADPRASRRRARVVHM

SEQ ID NO: 15161 - protein, 16 aa, Homo sapiens
  ( 259 )...( 274 ): >NFF1_HUMAN
PRASRRRARVVHMLVM

SEQ ID NO: 15162 - protein, 16 aa, Homo sapiens
  ( 260 )...( 275 ): >NFF1_HUMAN
RASRRRARVVHMLVMV

SEQ ID NO: 15163 - protein, 16 aa, Homo sapiens
  ( 261 )...( 276 ): >NFF1_HUMAN
ASRRRARVVHMLVMVA

SEQ ID NO: 15164 - protein, 16 aa, Homo sapiens
  ( 262 )...( 277 ): >NFF1_HUMAN
SRRRARVVHMLVMVAL

SEQ ID NO: 15165 - protein, 16 aa, Homo sapiens
  ( 263 )...( 278 ): >NFF1_HUMAN
RRRARVVHMLVMVALF

SEQ ID NO: 15166 - protein, 16 aa, Homo sapiens
  ( 362 )...( 377 ): >NFF1_HUMAN
ERPGGLLHRRVFVVVR

SEQ ID NO: 15167 - protein, 16 aa, Homo sapiens
  ( 363 )...( 378 ): >NFF1_HUMAN
RPGGLLHRRVFVVVRP

SEQ ID NO: 15168 - protein, 16 aa, Homo sapiens
  ( 364 )...( 379 ): >NFF1_HUMAN
PGGLLHRRVFVVVRPS

SEQ ID NO: 15169 - protein, 16 aa, Homo sapiens
  ( 391 )...( 406 ): >NFF1_HUMAN
SGAPRPGRLPLRNGRV

SEQ ID NO: 15170 - protein, 16 aa, Homo sapiens
  ( 392 )...( 407 ): >NFF1_HUMAN
GAPRPGRLPLRNGRVA

SEQ ID NO: 15171 - protein, 16 aa, Homo sapiens
  ( 393 )...( 408 ): >NFF1_HUMAN
APRPGRLPLRNGRVAH

SEQ ID NO: 15172 - protein, 16 aa, Homo sapiens
  ( 395 )...( 410 ): >NFF1_HUMAN
RPGRLPLRNGRVAHHG

SEQ ID NO: 15173 - protein, 16 aa, Homo sapiens
  ( 396 )...( 411 ): >NFF1_HUMAN
PGRLPLRNGRVAHHGL

SEQ ID NO: 15174 - protein, 16 aa, Homo sapiens
  ( 397 )...( 412 ): >NFF1_HUMAN
GRLPLRNGRVAHHGLP

SEQ ID NO: 15175 - protein, 16 aa, Homo sapiens
  ( 398 )...( 413 ): >NFF1_HUMAN
RLPLRNGRVAHHGLPR

SEQ ID NO: 15176 - protein, 16 aa, Homo sapiens
  ( 25 )...( 40 ): >NFF2_HUMAN
KEAGRERRALSVQQRG

SEQ ID NO: 15177 - protein, 16 aa, Homo sapiens
  ( 27 )...( 42 ): >NFF2_HUMAN
AGRERRALSVQQRGGP

SEQ ID NO: 15178 - protein, 16 aa, Homo sapiens
  ( 28 )...( 43 ): >NFF2_HUMAN
GRERRALSVQQRGGPA

SEQ ID NO: 15179 - protein, 16 aa, Homo sapiens
  ( 29 )...( 44 ): >NFF2_HUMAN
RERRALSVQQRGGPAW

SEQ ID NO: 15180 - protein, 16 aa, Homo sapiens
  ( 31 )...( 46 ): >NFF2_HUMAN
RRALSVQQRGGPAWSG

SEQ ID NO: 15181 - protein, 16 aa, Homo sapiens
  ( 51 )...( 66 ): >NFF2_HUMAN
SRQSAGDRRRLGLSRQ

SEQ ID NO: 15182 - protein, 16 aa, Homo sapiens
  ( 52 )...( 67 ): >NFF2_HUMAN
RQSAGDRRRLGLSRQT

SEQ ID NO: 15183 - protein, 16 aa, Homo sapiens
  ( 53 )...( 68 ): >NFF2_HUMAN
QSAGDRRRLGLSRQTA

SEQ ID NO: 15184 - protein, 16 aa, Homo sapiens
  ( 54 )...( 69 ): >NFF2_HUMAN
SAGDRRRLGLSRQTAK

SEQ ID NO: 15185 - protein, 16 aa, Homo sapiens
  ( 55 )...( 70 ): >NFF2_HUMAN
AGDRRRLGLSRQTAKS

SEQ ID NO: 15186 - protein, 16 aa, Homo sapiens
  ( 56 )...( 71 ): >NFF2_HUMAN
GDRRRLGLSRQTAKSS

SEQ ID NO: 15187 - protein, 16 aa, Homo sapiens
  ( 58 )...( 73 ): >NFF2_HUMAN
RRRLGLSRQTAKSSWS

SEQ ID NO: 15188 - protein, 16 aa, Homo sapiens
  ( 59 )...( 74 ): >NFF2_HUMAN
RRLGLSRQTAKSSWSR

SEQ ID NO: 15189 - protein, 16 aa, Homo sapiens
  ( 60 )...( 75 ): >NFF2_HUMAN
RLGLSRQTAKSSWSRS

SEQ ID NO: 15190 - protein, 16 aa, Homo sapiens
  ( 61 )...( 76 ): >NFF2_HUMAN
LGLSRQTAKSSWSRSR

SEQ ID NO: 15191 - protein, 16 aa, Homo sapiens
  ( 343 )...( 358 ): >NFF2_HUMAN
RIGISLFRAAVPHTGR

SEQ ID NO: 15192 - protein, 16 aa, Homo sapiens
  ( 344 )...( 359 ): >NFF2_HUMAN
IGISLFRAAVPHTGRK

SEQ ID NO: 15193 - protein, 16 aa, Homo sapiens
  ( 346 )...( 361 ): >NFF2_HUMAN
ISLFRAAVPHTGRKNQ

SEQ ID NO: 15194 - protein, 16 aa, Homo sapiens
  ( 364 )...( 379 ): >NFF2_HUMAN
WHVVSRKKQKIIKMLL

SEQ ID NO: 15195 - protein, 16 aa, Homo sapiens
  ( 365 )...( 380 ): >NFF2_HUMAN
HVVSRKKQKIIKMLLI

SEQ ID NO: 15196 - protein, 16 aa, Homo sapiens
  ( 366 )...( 381 ): >NFF2_HUMAN
VVSRKKQKIIKMLLIV

SEQ ID NO: 15197 - protein, 16 aa, Homo sapiens
  ( 367 )...( 382 ): >NFF2_HUMAN
VSRKKQKIIKMLLIVA

SEQ ID NO: 15198 - protein, 16 aa, Homo sapiens
  ( 368 )...( 383 ): >NFF2_HUMAN
SRKKQKIIKMLLIVAL

SEQ ID NO: 15199 - protein, 16 aa, Homo sapiens
  ( 456 )...( 471 ): >NFF2_HUMAN
QKRAKPMEAYALKAKS

SEQ ID NO: 15200 - protein, 16 aa, Homo sapiens
  ( 49 )...( 64 ): >NK1R_HUMAN
GNVVVMWIILAHKRMR

SEQ ID NO: 15201 - protein, 16 aa, Homo sapiens
  ( 50 )...( 65 ): >NK1R_HUMAN
NVVVMWIILAHKRMRT

SEQ ID NO: 15202 - protein, 16 aa, Homo sapiens
  ( 52 )...( 67 ): >NK1R_HUMAN
VVMWIILAHKRMRTVT

SEQ ID NO: 15203 - protein, 16 aa, Homo sapiens
  ( 53 )...( 68 ): >NK1R_HUMAN
VMWIILAHKRMRTVTN

SEQ ID NO: 15204 - protein, 16 aa, Homo sapiens
  ( 56 )...( 71 ): >NK1R_HUMAN
IILAHKRMRTVTNYFL

SEQ ID NO: 15205 - protein, 16 aa, Homo sapiens
  ( 57 )...( 72 ): >NK1R_HUMAN
ILAHKRMRTVTNYFLV

SEQ ID NO: 15206 - protein, 16 aa, Homo sapiens
  ( 238 )...( 253 ): >NK1R_HUMAN
EQVSAKRKVVKMMIVV

SEQ ID NO: 15207 - protein, 16 aa, Homo sapiens
  ( 239 )...( 254 ): >NK1R_HUMAN
QVSAKRKVVKMMIVVV

SEQ ID NO: 15208 - protein, 16 aa, Homo sapiens
  ( 241 )...( 256 ): >NK1R_HUMAN
SAKRKVVKMMIVVVCT

SEQ ID NO: 15209 - protein, 16 aa, Homo sapiens
  ( 242 )...( 257 ): >NK1R_HUMAN
AKRKVVKMMIVVVCTF

SEQ ID NO: 15210 - protein, 16 aa, Homo sapiens
  ( 243 )...( 258 ): >NK1R_HUMAN
KRKVVKMMIVVVCTFA

SEQ ID NO: 15211 - protein, 16 aa, Homo sapiens
  ( 338 )...( 353 ): >NK1R_HUMAN
STRYLQTQGSVYKVSR

SEQ ID NO: 15212 - protein, 16 aa, Homo sapiens
  ( 339 )...( 354 ): >NK1R_HUMAN
TRYLQTQGSVYKVSRL

SEQ ID NO: 15213 - protein, 16 aa, Homo sapiens
  ( 50 )...( 65 ): >NK2R_HUMAN
GNAIVIWIILAHRRMR

SEQ ID NO: 15214 - protein, 16 aa, Homo sapiens
  ( 51 )...( 66 ): >NK2R_HUMAN
NAIVIWIILAHRRMRT

SEQ ID NO: 15215 - protein, 16 aa, Homo sapiens
  ( 54 )...( 69 ): >NK2R_HUMAN
VIWIILAHRRMRTVTN

SEQ ID NO: 15216 - protein, 16 aa, Homo sapiens
  ( 57 )...( 72 ): >NK2R_HUMAN
IILAHRRMRTVTNYFI

SEQ ID NO: 15217 - protein, 16 aa, Homo sapiens
  ( 58 )...( 73 ): >NK2R_HUMAN
ILAHRRMRTVTNYFIV

SEQ ID NO: 15218 - protein, 16 aa, Homo sapiens
  ( 62 )...( 77 ): >NK2R_HUMAN
RRMRTVTNYFIVNLAL

SEQ ID NO: 15219 - protein, 16 aa, Homo sapiens
  ( 234 )...( 249 ): >NK2R_HUMAN
AHGANLRHLQAKKKFV

SEQ ID NO: 15220 - protein, 16 aa, Homo sapiens
  ( 236 )...( 251 ): >NK2R_HUMAN
GANLRHLQAKKKFVKT

SEQ ID NO: 15221 - protein, 16 aa, Homo sapiens
  ( 237 )...( 252 ): >NK2R_HUMAN
ANLRHLQAKKKFVKTM

SEQ ID NO: 15222 - protein, 16 aa, Homo sapiens
  ( 238 )...( 253 ): >NK2R_HUMAN
NLRHLQAKKKFVKTMV

SEQ ID NO: 15223 - protein, 16 aa, Homo sapiens
  ( 239 )...( 254 ): >NK2R_HUMAN
LRHLQAKKKFVKTMVL

SEQ ID NO: 15224 - protein, 16 aa, Homo sapiens
  ( 240 )...( 255 ): >NK2R_HUMAN
RHLQAKKKFVKTMVLV

SEQ ID NO: 15225 - protein, 16 aa, Homo sapiens
  ( 241 )...( 256 ): >NK2R_HUMAN
HLQAKKKFVKTMVLVV

SEQ ID NO: 15226 - protein, 16 aa, Homo sapiens
  ( 243 )...( 258 ): >NK2R_HUMAN
QAKKKFVKTMVLVVLT

SEQ ID NO: 15227 - protein, 16 aa, Homo sapiens
  ( 102 )...( 117 ): >NK3R_HUMAN
GNLIVIWIILAHKRMR

SEQ ID NO: 15228 - protein, 16 aa, Homo sapiens
  ( 106 )...( 121 ): >NK3R_HUMAN
VIWIILAHKRMRTVTN

SEQ ID NO: 15229 - protein, 16 aa, Homo sapiens
  ( 109 )...( 124 ): >NK3R_HUMAN
IILAHKRMRTVTNYFL

SEQ ID NO: 15230 - protein, 16 aa, Homo sapiens
  ( 110 )...( 125 ): >NK3R_HUMAN
ILAHKRMRTVTNYFLV

SEQ ID NO: 15231 - protein, 16 aa, Homo sapiens
  ( 288 )...( 303 ): >NK3R_HUMAN
HEQLKAKRKVVKMMII

SEQ ID NO: 15232 - protein, 16 aa, Homo sapiens
  ( 289 )...( 304 ): >NK3R_HUMAN
EQLKAKRKVVKMMIIV

SEQ ID NO: 15233 - protein, 16 aa, Homo sapiens
  ( 290 )...( 305 ): >NK3R_HUMAN
QLKAKRKVVKMMIIVV

SEQ ID NO: 15234 - protein, 16 aa, Homo sapiens
  ( 292 )...( 307 ): >NK3R_HUMAN
KAKRKVVKMMIIVVMT

SEQ ID NO: 15235 - protein, 16 aa, Homo sapiens
  ( 77 )...( 92 ): >NK4R_HUMAN
GNLVVIWIVLAHKRMR

SEQ ID NO: 15236 - protein, 16 aa, Homo sapiens
  ( 78 )...( 93 ): >NK4R_HUMAN
NLVVIWIVLAHKRMRT

SEQ ID NO: 15237 - protein, 16 aa, Homo sapiens
  ( 80 )...( 95 ): >NK4R_HUMAN
VVIWIVLAHKRMRTVT

SEQ ID NO: 15238 - protein, 16 aa, Homo sapiens
  ( 81 )...( 96 ): >NK4R_HUMAN
VIWIVLAHKRMRTVTN

SEQ ID NO: 15239 - protein, 16 aa, Homo sapiens
  ( 82 )...( 97 ): >NK4R_HUMAN
IWIVLAHKRMRTVTNS

SEQ ID NO: 15240 - protein, 16 aa, Homo sapiens
  ( 83 )...( 98 ): >NK4R_HUMAN
WIVLAHKRMRTVTNSF

SEQ ID NO: 15241 - protein, 16 aa, Homo sapiens
  ( 84 )...( 99 ): >NK4R_HUMAN
IVLAHKRMRTVTNSFL

SEQ ID NO: 15242 - protein, 16 aa, Homo sapiens
  ( 85 )...( 100 ): >NK4R_HUMAN
VLAHKRMRTVTNSFLV

SEQ ID NO: 15243 - protein, 16 aa, Homo sapiens
  ( 86 )...( 101 ): >NK4R_HUMAN
LAHKRMRTVTNSFLVN

SEQ ID NO: 15244 - protein, 16 aa, Homo sapiens
  ( 87 )...( 102 ): >NK4R_HUMAN
AHKRMRTVTNSFLVNL

SEQ ID NO: 15245 - protein, 16 aa, Homo sapiens
  ( 88 )...( 103 ): >NK4R_HUMAN
HKRMRTVTNSFLVNLA

SEQ ID NO: 15246 - protein, 16 aa, Homo sapiens
  ( 89 )...( 104 ): >NK4R_HUMAN
KRMRTVTNSFLVNLAF

SEQ ID NO: 15247 - protein, 16 aa, Homo sapiens
  ( 165 )...( 180 ): >NK4R_HUMAN
PLKPRLSATATRIVIG

SEQ ID NO: 15248 - protein, 16 aa, Homo sapiens
  ( 195 )...( 210 ): >NK4R_HUMAN
LYSKIKVMPGRTLCYV

SEQ ID NO: 15249 - protein, 16 aa, Homo sapiens
  ( 196 )...( 211 ): >NK4R_HUMAN
YSKIKVMPGRTLCYVQ

SEQ ID NO: 15250 - protein, 16 aa, Homo sapiens
  ( 258 )...( 273 ): >NK4R_HUMAN
TCDKYQEQLKAKRKVV

SEQ ID NO: 15251 - protein, 16 aa, Homo sapiens
  ( 262 )...( 277 ): >NK4R_HUMAN
YQEQLKAKRKVVKMMI

SEQ ID NO: 15252 - protein, 16 aa, Homo sapiens
  ( 263 )...( 278 ): >NK4R_HUMAN
QEQLKAKRKVVKMMII

SEQ ID NO: 15253 - protein, 16 aa, Homo sapiens
  ( 264 )...( 279 ): >NK4R_HUMAN
EQLKAKRKVVKMMIIV

SEQ ID NO: 15254 - protein, 16 aa, Homo sapiens
  ( 265 )...( 280 ): >NK4R_HUMAN
QLKAKRKVVKMMIIVV

SEQ ID NO: 15255 - protein, 16 aa, Homo sapiens
  ( 267 )...( 282 ): >NK4R_HUMAN
KAKRKVVKMMIIVVVT

SEQ ID NO: 15256 - protein, 16 aa, Homo sapiens
  ( 365 )...( 380 ): >NK4R_HUMAN
TRLHPMRQSSLYTVTR

SEQ ID NO: 15257 - protein, 16 aa, Homo sapiens
  ( 401 )...( 416 ): >NK4R_HUMAN
QKRGTTRDVGSNVCSR

SEQ ID NO: 15258 - protein, 16 aa, Homo sapiens
  ( 402 )...( 417 ): >NK4R_HUMAN
KRGTTRDVGSNVCSRR

SEQ ID NO: 15259 - protein, 16 aa, Homo sapiens
  ( 253 )...( 268 ): >NMBR_HUMAN
HTKKQMETRKRLAKIV

SEQ ID NO: 15260 - protein, 16 aa, Homo sapiens
  ( 254 )...( 269 ): >NMBR_HUMAN
TKKQMETRKRLAKIVL

SEQ ID NO: 15261 - protein, 16 aa, Homo sapiens
  ( 255 )...( 270 ): >NMBR_HUMAN
KKQMETRKRLAKIVLV

SEQ ID NO: 15262 - protein, 16 aa, Homo sapiens
  ( 256 )...( 271 ): >NMBR_HUMAN
KQMETRKRLAKIVLVF

SEQ ID NO: 15263 - protein, 16 aa, Homo sapiens
  ( 257 )...( 272 ): >NMBR_HUMAN
QMETRKRLAKIVLVFV

SEQ ID NO: 15264 - protein, 16 aa, Homo sapiens
  ( 258 )...( 273 ): >NMBR_HUMAN
METRKRLAKIVLVFVG

SEQ ID NO: 15265 - protein, 16 aa, Homo sapiens
  ( 259 )...( 274 ): >NMBR_HUMAN
ETRKRLAKIVLVFVGC

SEQ ID NO: 15266 - protein, 16 aa, Homo sapiens
  ( 260 )...( 275 ): >NMBR_HUMAN
TRKRLAKIVLVFVGCF

SEQ ID NO: 15267 - protein, 16 aa, Homo sapiens
  ( 175 )...( 190 ): >NTR1_HUMAN
KAKTLMSRSRTKKFIS

SEQ ID NO: 15268 - protein, 16 aa, Homo sapiens
  ( 176 )...( 191 ): >NTR1_HUMAN
AKTLMSRSRTKKFISA

SEQ ID NO: 15269 - protein, 16 aa, Homo sapiens
  ( 177 )...( 192 ): >NTR1_HUMAN
KTLMSRSRTKKFISAI

SEQ ID NO: 15270 - protein, 16 aa, Homo sapiens
  ( 178 )...( 193 ): >NTR1_HUMAN
TLMSRSRTKKFISAIW

SEQ ID NO: 15271 - protein, 16 aa, Homo sapiens
  ( 179 )...( 194 ): >NTR1_HUMAN
LMSRSRTKKFISAIWL

SEQ ID NO: 15272 - protein, 16 aa, Homo sapiens
  ( 180 )...( 195 ): >NTR1_HUMAN
MSRSRTKKFISAIWLA

SEQ ID NO: 15273 - protein, 16 aa, Homo sapiens
  ( 181 )...( 196 ): >NTR1_HUMAN
SRSRTKKFISAIWLAS

SEQ ID NO: 15274 - protein, 16 aa, Homo sapiens
  ( 182 )...( 197 ): >NTR1_HUMAN
RSRTKKFISAIWLASA

SEQ ID NO: 15275 - protein, 16 aa, Homo sapiens
  ( 183 )...( 198 ): >NTR1_HUMAN
SRTKKFISAIWLASAL

SEQ ID NO: 15276 - protein, 16 aa, Homo sapiens
  ( 184 )...( 199 ): >NTR1_HUMAN
RTKKFISAIWLASALL

SEQ ID NO: 15277 - protein, 16 aa, Homo sapiens
  ( 291 )...( 306 ): >NTR1_HUMAN
EPGRVQALRHGVRVLR

SEQ ID NO: 15278 - protein, 16 aa, Homo sapiens
  ( 292 )...( 307 ): >NTR1_HUMAN
PGRVQALRHGVRVLRA

SEQ ID NO: 15279 - protein, 16 aa, Homo sapiens
  ( 293 )...( 308 ): >NTR1_HUMAN
GRVQALRHGVRVLRAV

SEQ ID NO: 15280 - protein, 16 aa, Homo sapiens
  ( 294 )...( 309 ): >NTR1_HUMAN
RVQALRHGVRVLRAVV

SEQ ID NO: 15281 - protein, 16 aa, Homo sapiens
  ( 295 )...( 310 ): >NTR1_HUMAN
VQALRHGVRVLRAVVI

SEQ ID NO: 15282 - protein, 16 aa, Homo sapiens
  ( 296 )...( 311 ): >NTR1_HUMAN
QALRHGVRVLRAVVIA

SEQ ID NO: 15283 - protein, 16 aa, Homo sapiens
  ( 297 )...( 312 ): >NTR1_HUMAN
ALRHGVRVLRAVVIAF

SEQ ID NO: 15284 - protein, 16 aa, Homo sapiens
  ( 298 )...( 313 ): >NTR1_HUMAN
LRHGVRVLRAVVIAFV

SEQ ID NO: 15285 - protein, 16 aa, Homo sapiens
  ( 299 )...( 314 ): >NTR1_HUMAN
RHGVRVLRAVVIAFVV

SEQ ID NO: 15286 - protein, 16 aa, Homo sapiens
  ( 375 )...( 390 ): >NTR1_HUMAN
FLATLACLCPVWRRRR

SEQ ID NO: 15287 - protein, 16 aa, Homo sapiens
  ( 376 )...( 391 ): >NTR1_HUMAN
LATLACLCPVWRRRRK

SEQ ID NO: 15288 - protein, 16 aa, Homo sapiens
  ( 50 )...( 65 ): >NTR2_HUMAN
NALSVHVVLKARAGRA

SEQ ID NO: 15289 - protein, 16 aa, Homo sapiens
  ( 52 )...( 67 ): >NTR2_HUMAN
LSVHVVLKARAGRAGR

SEQ ID NO: 15290 - protein, 16 aa, Homo sapiens
  ( 53 )...( 68 ): >NTR2_HUMAN
SVHVVLKARAGRAGRL

SEQ ID NO: 15291 - protein, 16 aa, Homo sapiens
  ( 54 )...( 69 ): >NTR2_HUMAN
VHVVLKARAGRAGRLR

SEQ ID NO: 15292 - protein, 16 aa, Homo sapiens
  ( 55 )...( 70 ): >NTR2_HUMAN
HVVLKARAGRAGRLRH

SEQ ID NO: 15293 - protein, 16 aa, Homo sapiens
  ( 56 )...( 71 ): >NTR2_HUMAN
VVLKARAGRAGRLRHH

SEQ ID NO: 15294 - protein, 16 aa, Homo sapiens
  ( 57 )...( 72 ): >NTR2_HUMAN
VLKARAGRAGRLRHHV

SEQ ID NO: 15295 - protein, 16 aa, Homo sapiens
  ( 58 )...( 73 ): >NTR2_HUMAN
LKARAGRAGRLRHHVL

SEQ ID NO: 15296 - protein, 16 aa, Homo sapiens
  ( 59 )...( 74 ): >NTR2_HUMAN
KARAGRAGRLRHHVLS

SEQ ID NO: 15297 - protein, 16 aa, Homo sapiens
  ( 60 )...( 75 ): >NTR2_HUMAN
ARAGRAGRLRHHVLSL

SEQ ID NO: 15298 - protein, 16 aa, Homo sapiens
  ( 61 )...( 76 ): >NTR2_HUMAN
RAGRAGRLRHHVLSLA

SEQ ID NO: 15299 - protein, 16 aa, Homo sapiens
  ( 62 )...( 77 ): >NTR2_HUMAN
AGRAGRLRHHVLSLAL

SEQ ID NO: 15300 - protein, 16 aa, Homo sapiens
  ( 63 )...( 78 ): >NTR2_HUMAN
GRAGRLRHHVLSLALA

SEQ ID NO: 15301 - protein, 16 aa, Homo sapiens
  ( 64 )...( 79 ): >NTR2_HUMAN
RAGRLRHHVLSLALAG

SEQ ID NO: 15302 - protein, 16 aa, Homo sapiens
  ( 133 )...( 148 ): >NTR2_HUMAN
RCLAVCQPLRARSLLT

SEQ ID NO: 15303 - protein, 16 aa, Homo sapiens
  ( 135 )...( 150 ): >NTR2_HUMAN
LAVCQPLRARSLLTPR

SEQ ID NO: 15304 - protein, 16 aa, Homo sapiens
  ( 136 )...( 151 ): >NTR2_HUMAN
AVCQPLRARSLLTPRR

SEQ ID NO: 15305 - protein, 16 aa, Homo sapiens
  ( 137 )...( 152 ): >NTR2_HUMAN
VCQPLRARSLLTPRRT

SEQ ID NO: 15306 - protein, 16 aa, Homo sapiens
  ( 143 )...( 158 ): >NTR2_HUMAN
ARSLLTPRRTRWLVAL

SEQ ID NO: 15307 - protein, 16 aa, Homo sapiens
  ( 144 )...( 159 ): >NTR2_HUMAN
RSLLTPRRTRWLVALS

SEQ ID NO: 15308 - protein, 16 aa, Homo sapiens
  ( 145 )...( 160 ): >NTR2_HUMAN
SLLTPRRTRWLVALSW

SEQ ID NO: 15309 - protein, 16 aa, Homo sapiens
  ( 146 )...( 161 ): >NTR2_HUMAN
LLTPRRTRWLVALSWA

SEQ ID NO: 15310 - protein, 16 aa, Homo sapiens
  ( 147 )...( 162 ): >NTR2_HUMAN
LTPRRTRWLVALSWAA

SEQ ID NO: 15311 - protein, 16 aa, Homo sapiens
  ( 148 )...( 163 ): >NTR2_HUMAN
TPRRTRWLVALSWAAS

SEQ ID NO: 15312 - protein, 16 aa, Homo sapiens
  ( 149 )...( 164 ): >NTR2_HUMAN
PRRTRWLVALSWAASL

SEQ ID NO: 15313 - protein, 16 aa, Homo sapiens
  ( 150 )...( 165 ): >NTR2_HUMAN
RRTRWLVALSWAASLG

SEQ ID NO: 15314 - protein, 16 aa, Homo sapiens
  ( 267 )...( 282 ): >NTR2_HUMAN
VWKKTFIQGGQVSLVR

SEQ ID NO: 15315 - protein, 16 aa, Homo sapiens
  ( 268 )...( 283 ): >NTR2_HUMAN
WKKTFIQGGQVSLVRH

SEQ ID NO: 15316 - protein, 16 aa, Homo sapiens
  ( 269 )...( 284 ): >NTR2_HUMAN
KKTFIQGGQVSLVRHK

SEQ ID NO: 15317 - protein, 16 aa, Homo sapiens
  ( 273 )...( 288 ): >NTR2_HUMAN
IQGGQVSLVRHKDVRR

SEQ ID NO: 15318 - protein, 16 aa, Homo sapiens
  ( 274 )...( 289 ): >NTR2_HUMAN
QGGQVSLVRHKDVRRI

SEQ ID NO: 15319 - protein, 16 aa, Homo sapiens
  ( 275 )...( 290 ): >NTR2_HUMAN
GGQVSLVRHKDVRRIR

SEQ ID NO: 15320 - protein, 16 aa, Homo sapiens
  ( 276 )...( 291 ): >NTR2_HUMAN
GQVSLVRHKDVRRIRS

SEQ ID NO: 15321 - protein, 16 aa, Homo sapiens
  ( 277 )...( 292 ): >NTR2_HUMAN
QVSLVRHKDVRRIRSL

SEQ ID NO: 15322 - protein, 16 aa, Homo sapiens
  ( 278 )...( 293 ): >NTR2_HUMAN
VSLVRHKDVRRIRSLQ

SEQ ID NO: 15323 - protein, 16 aa, Homo sapiens
  ( 284 )...( 299 ): >NTR2_HUMAN
KDVRRIRSLQRSVQVL

SEQ ID NO: 15324 - protein, 16 aa, Homo sapiens
  ( 286 )...( 301 ): >NTR2_HUMAN
VRRIRSLQRSVQVLRA

SEQ ID NO: 15325 - protein, 16 aa, Homo sapiens
  ( 287 )...( 302 ): >NTR2_HUMAN
RRIRSLQRSVQVLRAI

SEQ ID NO: 15326 - protein, 16 aa, Homo sapiens
  ( 288 )...( 303 ): >NTR2_HUMAN
RIRSLQRSVQVLRAIV

SEQ ID NO: 15327 - protein, 16 aa, Homo sapiens
  ( 289 )...( 304 ): >NTR2_HUMAN
IRSLQRSVQVLRAIVV

SEQ ID NO: 15328 - protein, 16 aa, Homo sapiens
  ( 290 )...( 305 ): >NTR2_HUMAN
RSLQRSVQVLRAIVVM

SEQ ID NO: 15329 - protein, 16 aa, Homo sapiens
  ( 252 )...( 267 ): >NY1R_HUMAN
KYRSSETKRINIMLLS

SEQ ID NO: 15330 - protein, 16 aa, Homo sapiens
  ( 359 )...( 374 ): >NY1R_HUMAN
VSKTSLKQASPVAFKK

SEQ ID NO: 15331 - protein, 16 aa, Homo sapiens
  ( 360 )...( 375 ): >NY1R_HUMAN
SKTSLKQASPVAFKKI

SEQ ID NO: 15332 - protein, 16 aa, Homo sapiens
  ( 361 )...( 376 ): >NY1R_HUMAN
KTSLKQASPVAFKKIN

SEQ ID NO: 15333 - protein, 16 aa, Homo sapiens
  ( 74 )...( 89 ): >NY2R_HUMAN
VVIKFKSMRTVTNFFI

SEQ ID NO: 15334 - protein, 16 aa, Homo sapiens
  ( 75 )...( 90 ): >NY2R_HUMAN
VIKFKSMRTVTNFFIA

SEQ ID NO: 15335 - protein, 16 aa, Homo sapiens
  ( 158 )...( 173 ): >NY2R_HUMAN
SKISKRISFLIIGLAW

SEQ ID NO: 15336 - protein, 16 aa, Homo sapiens
  ( 159 )...( 174 ): >NY2R_HUMAN
KISKRISFLIIGLAWG

SEQ ID NO: 15337 - protein, 16 aa, Homo sapiens
  ( 232 )...( 247 ): >NY2R_HUMAN
LGIISFSYTRIWSKLK

SEQ ID NO: 15338 - protein, 16 aa, Homo sapiens
  ( 233 )...( 248 ): >NY2R_HUMAN
GIISFSYTRIWSKLKN

SEQ ID NO: 15339 - protein, 16 aa, Homo sapiens
  ( 259 )...( 274 ): >NY2R_HUMAN
YHQRRQKTTKMLVCVV

SEQ ID NO: 15340 - protein, 16 aa, Homo sapiens
  ( 260 )...( 275 ): >NY2R_HUMAN
HQRRQKTTKMLVCVVV

SEQ ID NO: 15341 - protein, 16 aa, Homo sapiens
  ( 261 )...( 276 ): >NY2R_HUMAN
QRRQKTTKMLVCVVVV

SEQ ID NO: 15342 - protein, 16 aa, Homo sapiens
  ( 262 )...( 277 ): >NY2R_HUMAN
RRQKTTKMLVCVVVVF

SEQ ID NO: 15343 - protein, 16 aa, Homo sapiens
  ( 263 )...( 278 ): >NY2R_HUMAN
RQKTTKMLVCVVVVFA

SEQ ID NO: 15344 - protein, 16 aa, Homo sapiens
  ( 353 )...( 368 ): >NY2R_HUMAN
VSVTFKAKKNLEVRKN

SEQ ID NO: 15345 - protein, 16 aa, Homo sapiens
  ( 354 )...( 369 ): >NY2R_HUMAN
SVTFKAKKNLEVRKNS

SEQ ID NO: 15346 - protein, 16 aa, Homo sapiens
  ( 355 )...( 370 ): >NY2R_HUMAN
VTFKAKKNLEVRKNSG

SEQ ID NO: 15347 - protein, 16 aa, Homo sapiens
  ( 356 )...( 371 ): >NY2R_HUMAN
TFKAKKNLEVRKNSGP

SEQ ID NO: 15348 - protein, 16 aa, Homo sapiens
  ( 227 )...( 242 ): >NY4R_HUMAN
LGFILVCYARIYRRLQ

SEQ ID NO: 15349 - protein, 16 aa, Homo sapiens
  ( 230 )...( 245 ): >NY4R_HUMAN
ILVCYARIYRRLQRQG

SEQ ID NO: 15350 - protein, 16 aa, Homo sapiens
  ( 240 )...( 255 ): >NY4R_HUMAN
RLQRQGRVFHKGTYSL

SEQ ID NO: 15351 - protein, 16 aa, Homo sapiens
  ( 241 )...( 256 ): >NY4R_HUMAN
LQRQGRVFHKGTYSLR

SEQ ID NO: 15352 - protein, 16 aa, Homo sapiens
  ( 242 )...( 257 ): >NY4R_HUMAN
QRQGRVFHKGTYSLRA

SEQ ID NO: 15353 - protein, 16 aa, Homo sapiens
  ( 243 )...( 258 ): >NY4R_HUMAN
RQGRVFHKGTYSLRAG

SEQ ID NO: 15354 - protein, 16 aa, Homo sapiens
  ( 246 )...( 261 ): >NY4R_HUMAN
RVFHKGTYSLRAGHMK

SEQ ID NO: 15355 - protein, 16 aa, Homo sapiens
  ( 66 )...( 81 ): >NY5R_HUMAN
FMGNLLILMALMKKRN

SEQ ID NO: 15356 - protein, 16 aa, Homo sapiens
  ( 67 )...( 82 ): >NY5R_HUMAN
MGNLLILMALMKKRNQ

SEQ ID NO: 15357 - protein, 16 aa, Homo sapiens
  ( 68 )...( 83 ): >NY5R_HUMAN
GNLLILMALMKKRNQK

SEQ ID NO: 15358 - protein, 16 aa, Homo sapiens
  ( 69 )...( 84 ): >NY5R_HUMAN
NLLILMALMKKRNQKT

SEQ ID NO: 15359 - protein, 16 aa, Homo sapiens
  ( 70 )...( 85 ): >NY5R_HUMAN
LLILMALMKKRNQKTT

SEQ ID NO: 15360 - protein, 16 aa, Homo sapiens
  ( 71 )...( 86 ): >NY5R_HUMAN
LILMALMKKRNQKTTV

SEQ ID NO: 15361 - protein, 16 aa, Homo sapiens
  ( 72 )...( 87 ): >NY5R_HUMAN
ILMALMKKRNQKTTVN

SEQ ID NO: 15362 - protein, 16 aa, Homo sapiens
  ( 73 )...( 88 ): >NY5R_HUMAN
LMALMKKRNQKTTVNF

SEQ ID NO: 15363 - protein, 16 aa, Homo sapiens
  ( 74 )...( 89 ): >NY5R_HUMAN
MALMKKRNQKTTVNFL

SEQ ID NO: 15364 - protein, 16 aa, Homo sapiens
  ( 75 )...( 90 ): >NY5R_HUMAN
ALMKKRNQKTTVNFLI

SEQ ID NO: 15365 - protein, 16 aa, Homo sapiens
  ( 76 )...( 91 ): >NY5R_HUMAN
LMKKRNQKTTVNFLIG

SEQ ID NO: 15366 - protein, 16 aa, Homo sapiens
  ( 77 )...( 92 ): >NY5R_HUMAN
MKKRNQKTTVNFLIGN

SEQ ID NO: 15367 - protein, 16 aa, Homo sapiens
  ( 78 )...( 93 ): >NY5R_HUMAN
KKRNQKTTVNFLIGNL

SEQ ID NO: 15368 - protein, 16 aa, Homo sapiens
  ( 79 )...( 94 ): >NY5R_HUMAN
KRNQKTTVNFLIGNLA

SEQ ID NO: 15369 - protein, 16 aa, Homo sapiens
  ( 296 )...( 311 ): >NY5R_HUMAN
RRRYSKKTACVLPAPE

SEQ ID NO: 15370 - protein, 16 aa, Homo sapiens
  ( 297 )...( 312 ): >NY5R_HUMAN
RRYSKKTACVLPAPER

SEQ ID NO: 15371 - protein, 16 aa, Homo sapiens
  ( 355 )...( 370 ): >NY5R_HUMAN
SDVHELRVKRSVTRIK

SEQ ID NO: 15372 - protein, 16 aa, Homo sapiens
  ( 356 )...( 371 ): >NY5R_HUMAN
DVHELRVKRSVTRIKK

SEQ ID NO: 15373 - protein, 16 aa, Homo sapiens
  ( 369 )...( 384 ): >NY5R_HUMAN
IKKRSRSVFYRLTILI

SEQ ID NO: 15374 - protein, 16 aa, Homo sapiens
  ( 370 )...( 385 ): >NY5R_HUMAN
KKRSRSVFYRLTILIL

SEQ ID NO: 15375 - protein, 16 aa, Homo sapiens
  ( 371 )...( 386 ): >NY5R_HUMAN
KRSRSVFYRLTILILV

SEQ ID NO: 15376 - protein, 15 aa, Homo sapiens
  ( 295 )...( 310 ): >O1A1_HUMAN
MKAALRKLFNKRISS

SEQ ID NO: 15377 - protein, 13 aa, Homo sapiens
  ( 297 )...( 312 ): >O1A1_HUMAN
AALRKLFNKRISS

SEQ ID NO: 15378 - protein, 15 aa, Homo sapiens
  ( 295 )...( 310 ): >O1A2_HUMAN
MKAALQKLFSKRISS

SEQ ID NO: 15379 - protein, 14 aa, Homo sapiens
  ( 296 )...( 311 ): >O1A2_HUMAN
KAALQKLFSKRISS

SEQ ID NO: 15380 - protein, 16 aa, Homo sapiens
  ( 294 )...( 309 ): >O1C1_HUMAN
NRDMKRGLQKMLLKCT

SEQ ID NO: 15381 - protein, 16 aa, Homo sapiens
  ( 295 )...( 310 ): >O1C1_HUMAN
RDMKRGLQKMLLKCTV

SEQ ID NO: 15382 - protein, 16 aa, Homo sapiens
  ( 296 )...( 311 ): >O1C1_HUMAN
DMKRGLQKMLLKCTVF

SEQ ID NO: 15383 - protein, 16 aa, Homo sapiens
  ( 297 )...( 312 ): >O1C1_HUMAN
MKRGLQKMLLKCTVFQ

SEQ ID NO: 15384 - protein, 16 aa, Homo sapiens
  ( 298 )...( 313 ): >O1C1_HUMAN
KRGLQKMLLKCTVFQQ

SEQ ID NO: 15385 - protein, 15 aa, Homo sapiens
  ( 299 )...( 314 ): >O1C1_HUMAN
RGLQKMLLKCTVFQQ

SEQ ID NO: 15386 - protein, 16 aa, Homo sapiens
  ( 161 )...( 176 ): >O1D2_HUMAN
LLMTRVTFCGSRKIHY

SEQ ID NO: 15387 - protein, 16 aa, Homo sapiens
  ( 162 )...( 177 ): >O1D2_HUMAN
LMTRVTFCGSRKIHYI

SEQ ID NO: 15388 - protein, 16 aa, Homo sapiens
  ( 219 )...( 234 ): >O1D2_HUMAN
VLIIRAILRIPSVSKK

SEQ ID NO: 15389 - protein, 16 aa, Homo sapiens
  ( 220 )...( 235 ): >O1D2_HUMAN
LIIRAILRIPSVSKKY

SEQ ID NO: 15390 - protein, 16 aa, Homo sapiens
  ( 221 )...( 236 ): >O1D2_HUMAN
IIRAILRIPSVSKKYK

SEQ ID NO: 15391 - protein, 16 aa, Homo sapiens
  ( 222 )...( 237 ): >O1D2_HUMAN
IRAILRIPSVSKKYKA

SEQ ID NO: 15392 - protein, 16 aa, Homo sapiens
  ( 223 )...( 238 ): >O1D2_HUMAN
RAILRIPSVSKKYKAF

SEQ ID NO: 15393 - protein, 16 aa, Homo sapiens
  ( 224 )...( 239 ): >O1D2_HUMAN
AILRIPSVSKKYKAFS

SEQ ID NO: 15394 - protein, 16 aa, Homo sapiens
  ( 225 )...( 240 ): >O1D2_HUMAN
ILRIPSVSKKYKAFST

SEQ ID NO: 15395 - protein, 16 aa, Homo sapiens
  ( 296 )...( 311 ): >O1D2_HUMAN
MHGALGRLLDKHFKRL

SEQ ID NO: 15396 - protein, 15 aa, Homo sapiens
  ( 298 )...( 313 ): >O1D2_HUMAN
GALGRLLDKHFKRLT

SEQ ID NO: 15397 - protein, 14 aa, Homo sapiens
  ( 299 )...( 314 ): >O1D2_HUMAN
ALGRLLDKHFKRLT

SEQ ID NO: 15398 - protein, 16 aa, Homo sapiens
  ( 218 )...( 233 ): >O1D4_HUMAN
YVRIVRTILQMPSASK

SEQ ID NO: 15399 - protein, 16 aa, Homo sapiens
  ( 219 )...( 234 ): >O1D4_HUMAN
VRIVRTILQMPSASKK

SEQ ID NO: 15400 - protein, 16 aa, Homo sapiens
  ( 220 )...( 235 ): >O1D4_HUMAN
RIVRTILQMPSASKKY

SEQ ID NO: 15401 - protein, 16 aa, Homo sapiens
  ( 221 )...( 236 ): >O1D4_HUMAN
IVRTILQMPSASKKYK

SEQ ID NO: 15402 - protein, 16 aa, Homo sapiens
  ( 222 )...( 237 ): >O1D4_HUMAN
VRTILQMPSASKKYKT

SEQ ID NO: 15403 - protein, 16 aa, Homo sapiens
  ( 223 )...( 238 ): >O1D4_HUMAN
RTILQMPSASKKYKTF

SEQ ID NO: 15404 - protein, 16 aa, Homo sapiens
  ( 218 )...( 233 ): >O1D5_HUMAN
YVRIVRTILQMPSASK

SEQ ID NO: 15405 - protein, 16 aa, Homo sapiens
  ( 219 )...( 234 ): >O1D5_HUMAN
VRIVRTILQMPSASKK

SEQ ID NO: 15406 - protein, 16 aa, Homo sapiens
  ( 220 )...( 235 ): >O1D5_HUMAN
RIVRTILQMPSASKKY

SEQ ID NO: 15407 - protein, 16 aa, Homo sapiens
  ( 221 )...( 236 ): >O1D5_HUMAN
IVRTILQMPSASKKYK

SEQ ID NO: 15408 - protein, 16 aa, Homo sapiens
  ( 222 )...( 237 ): >O1D5_HUMAN
VRTILQMPSASKKYKT

SEQ ID NO: 15409 - protein, 16 aa, Homo sapiens
  ( 223 )...( 238 ): >O1D5_HUMAN
RTILQMPSASKKYKTF

SEQ ID NO: 15410 - protein, 16 aa, Homo sapiens
  ( 288 )...( 303 ): >O1D5_HUMAN
IYRLRNKDMHGAPGRV

SEQ ID NO: 15411 - protein, 16 aa, Homo sapiens
  ( 289 )...( 304 ): >O1D5_HUMAN
YRLRNKDMHGAPGRVL

SEQ ID NO: 15412 - protein, 16 aa, Homo sapiens
  ( 289 )...( 304 ): >O1E1_HUMAN
IYSLRNRDMKGALSRV

SEQ ID NO: 15413 - protein, 16 aa, Homo sapiens
  ( 290 )...( 305 ): >O1E1_HUMAN
YSLRNRDMKGALSRVI

SEQ ID NO: 15414 - protein, 16 aa, Homo sapiens
  ( 291 )...( 306 ): >O1E1_HUMAN
SLRNRDMKGALSRVIH

SEQ ID NO: 15415 - protein, 16 aa, Homo sapiens
  ( 292 )...( 307 ): >O1E1_HUMAN
LRNRDMKGALSRVIHQ

SEQ ID NO: 15416 - protein, 16 aa, Homo sapiens
  ( 294 )...( 309 ): >O1E1_HUMAN
NRDMKGALSRVIHQKK

SEQ ID NO: 15417 - protein, 16 aa, Homo sapiens
  ( 295 )...( 310 ): >O1E1_HUMAN
RDMKGALSRVIHQKKT

SEQ ID NO: 15418 - protein, 16 aa, Homo sapiens
  ( 297 )...( 312 ): >O1E1_HUMAN
MKGALSRVIHQKKTFF

SEQ ID NO: 15419 - protein, 16 aa, Homo sapiens
  ( 298 )...( 313 ): >O1E1_HUMAN
KGALSRVIHQKKTFFS

SEQ ID NO: 15420 - protein, 16 aa, Homo sapiens
  ( 301 )...( 316 ): >O1E2_HUMAN
LRNRDMKGALERVICK

SEQ ID NO: 15421 - protein, 16 aa, Homo sapiens
  ( 303 )...( 318 ): >O1E2_HUMAN
NRDMKGALERVICKRK

SEQ ID NO: 15422 - protein, 16 aa, Homo sapiens
  ( 304 )...( 319 ): >O1E2_HUMAN
RDMKGALERVICKRKN

SEQ ID NO: 15423 - protein, 16 aa, Homo sapiens
  ( 305 )...( 320 ): >O1E2_HUMAN
DMKGALERVICKRKNP

SEQ ID NO: 15424 - protein, 16 aa, Homo sapiens
  ( 306 )...( 321 ): >O1E2_HUMAN
MKGALERVICKRKNPF

SEQ ID NO: 15425 - protein, 16 aa, Homo sapiens
  ( 307 )...( 322 ): >O1E2_HUMAN
KGALERVICKRKNPFL

SEQ ID NO: 15426 - protein, 16 aa, Homo sapiens
  ( 308 )...( 323 ): >O1E2_HUMAN
GALERVICKRKNPFLL

SEQ ID NO: 15427 - protein, 15 aa, Homo sapiens
  ( 309 )...( 324 ): >O1E2_HUMAN
ALERVICKRKNPFLL

SEQ ID NO: 15428 - protein, 16 aa, Homo sapiens
  ( 221 )...( 236 ): >O1F1_HUMAN
ITCTVLKVPSTKGRWK

SEQ ID NO: 15429 - protein, 16 aa, Homo sapiens
  ( 222 )...( 237 ): >O1F1_HUMAN
TCTVLKVPSTKGRWKA

SEQ ID NO: 15430 - protein, 16 aa, Homo sapiens
  ( 224 )...( 239 ): >O1F1_HUMAN
TVLKVPSTKGRWKAFS

SEQ ID NO: 15431 - protein, 16 aa, Homo sapiens
  ( 225 )...( 240 ): >O1F1_HUMAN
VLKVPSTKGRWKAFST

SEQ ID NO: 15432 - protein, 16 aa, Homo sapiens
  ( 289 )...( 304 ): >O1F1_HUMAN
IYSLRNRYLKGALKKV

SEQ ID NO: 15433 - protein, 16 aa, Homo sapiens
  ( 290 )...( 305 ): >O1F1_HUMAN
YSLRNRYLKGALKKVV

SEQ ID NO: 15434 - protein, 16 aa, Homo sapiens
  ( 291 )...( 306 ): >O1F1_HUMAN
SLRNRYLKGALKKVVG

SEQ ID NO: 15435 - protein, 16 aa, Homo sapiens
  ( 292 )...( 307 ): >O1F1_HUMAN
LRNRYLKGALKKVVGR

SEQ ID NO: 15436 - protein, 16 aa, Homo sapiens
  ( 293 )...( 308 ): >O1F1_HUMAN
RNRYLKGALKKVVGRV

SEQ ID NO: 15437 - protein, 16 aa, Homo sapiens
  ( 294 )...( 309 ): >O1F1_HUMAN
NRYLKGALKKVVGRVV

SEQ ID NO: 15438 - protein, 16 aa, Homo sapiens
  ( 295 )...( 310 ): >O1F1_HUMAN
RYLKGALKKVVGRVVF

SEQ ID NO: 15439 - protein, 16 aa, Homo sapiens
  ( 296 )...( 311 ): >O1F1_HUMAN
YLKGALKKVVGRVVFS

SEQ ID NO: 15440 - protein, 16 aa, Homo sapiens
  ( 220 )...( 235 ): >O1G1_HUMAN
NVFSTILKIPSAQGKR

SEQ ID NO: 15441 - protein, 16 aa, Homo sapiens
  ( 221 )...( 236 ): >O1G1_HUMAN
VFSTILKIPSAQGKRK

SEQ ID NO: 15442 - protein, 16 aa, Homo sapiens
  ( 222 )...( 237 ): >O1G1_HUMAN
FSTILKIPSAQGKRKA

SEQ ID NO: 15443 - protein, 16 aa, Homo sapiens
  ( 223 )...( 238 ): >O1G1_HUMAN
STILKIPSAQGKRKAF

SEQ ID NO: 15444 - protein, 16 aa, Homo sapiens
  ( 224 )...( 239 ): >O1G1_HUMAN
TILKIPSAQGKRKAFS

SEQ ID NO: 15445 - protein, 16 aa, Homo sapiens
  ( 225 )...( 240 ): >O1G1_HUMAN
ILKIPSAQGKRKAFST

SEQ ID NO: 15446 - protein, 16 aa, Homo sapiens
  ( 295 )...( 310 ): >O1G1_HUMAN
QEIKSSLRKLIWVRKI

SEQ ID NO: 15447 - protein, 16 aa, Homo sapiens
  ( 297 )...( 312 ): >O1G1_HUMAN
IKSSLRKLIWVRKIHS

SEQ ID NO: 15448 - protein, 16 aa, Homo sapiens
  ( 219 )...( 234 ): >O1I1_HUMAN
IRIFWTVFKIPSTRGK

SEQ ID NO: 15449 - protein, 16 aa, Homo sapiens
  ( 289 )...( 304 ): >O1I1_HUMAN
IYSIRNKDMKAALGKL

SEQ ID NO: 15450 - protein, 16 aa, Homo sapiens
  ( 290 )...( 305 ): >O1I1_HUMAN
YSIRNKDMKAALGKLI

SEQ ID NO: 15451 - protein, 16 aa, Homo sapiens
  ( 291 )...( 306 ): >O1I1_HUMAN
SIRNKDMKAALGKLIG

SEQ ID NO: 15452 - protein, 16 aa, Homo sapiens
  ( 292 )...( 307 ): >O1I1_HUMAN
IRNKDMKAALGKLIGK

SEQ ID NO: 15453 - protein, 16 aa, Homo sapiens
  ( 293 )...( 308 ): >O1I1_HUMAN
RNKDMKAALGKLIGKV

SEQ ID NO: 15454 - protein, 16 aa, Homo sapiens
  ( 220 )...( 235 ): >O1Q1_HUMAN
CIILVVLRIPSAKGRW

SEQ ID NO: 15455 - protein, 16 aa, Homo sapiens
  ( 221 )...( 236 ): >O1Q1_HUMAN
IILVVLRIPSAKGRWK

SEQ ID NO: 15456 - protein, 16 aa, Homo sapiens
  ( 222 )...( 237 ): >O1Q1_HUMAN
ILVVLRIPSAKGRWKT

SEQ ID NO: 15457 - protein, 16 aa, Homo sapiens
  ( 223 )...( 238 ): >O1Q1_HUMAN
LVVLRIPSAKGRWKTF

SEQ ID NO: 15458 - protein, 16 aa, Homo sapiens
  ( 224 )...( 239 ): >O1Q1_HUMAN
VVLRIPSAKGRWKTFS

SEQ ID NO: 15459 - protein, 16 aa, Homo sapiens
  ( 225 )...( 240 ): >O1Q1_HUMAN
VLRIPSAKGRWKTFST

SEQ ID NO: 15460 - protein, 16 aa, Homo sapiens
  ( 258 )...( 273 ): >O1Q1_HUMAN
VYFRPLSSYSVTKGRI

SEQ ID NO: 15461 - protein, 16 aa, Homo sapiens
  ( 259 )...( 274 ): >O1Q1_HUMAN
YFRPLSSYSVTKGRII

SEQ ID NO: 15462 - protein, 16 aa, Homo sapiens
  ( 260 )...( 275 ): >O1Q1_HUMAN
FRPLSSYSVTKGRIIT

SEQ ID NO: 15463 - protein, 16 aa, Homo sapiens
  ( 261 )...( 276 ): >O1Q1_HUMAN
RPLSSYSVTKGRIITV

SEQ ID NO: 15464 - protein, 16 aa, Homo sapiens
  ( 223 )...( 238 ): >O2A4_HUMAN
AILQIQSREVQRKAFR

SEQ ID NO: 15465 - protein, 16 aa, Homo sapiens
  ( 224 )...( 239 ): >O2A4_HUMAN
ILQIQSREVQRKAFRT

SEQ ID NO: 15466 - protein, 16 aa, Homo sapiens
  ( 225 )...( 240 ): >O2A4_HUMAN
LQIQSREVQRKAFRTC

SEQ ID NO: 15467 - protein, 16 aa, Homo sapiens
  ( 259 )...( 274 ): >O2A4_HUMAN
VGPRYGNPKEQKKYLL

SEQ ID NO: 15468 - protein, 16 aa, Homo sapiens
  ( 287 )...( 302 ): >O2A4_HUMAN
LICSLRNSEVKNTLKR

SEQ ID NO: 15469 - protein, 16 aa, Homo sapiens
  ( 288 )...( 303 ): >O2A4_HUMAN
ICSLRNSEVKNTLKRV

SEQ ID NO: 15470 - protein, 16 aa, Homo sapiens
  ( 289 )...( 304 ): >O2A4_HUMAN
CSLRNSEVKNTLKRVL

SEQ ID NO: 15471 - protein, 16 aa, Homo sapiens
  ( 290 )...( 305 ): >O2A4_HUMAN
SLRNSEVKNTLKRVLG

SEQ ID NO: 15472 - protein, 16 aa, Homo sapiens
  ( 291 )...( 306 ): >O2A4_HUMAN
LRNSEVKNTLKRVLGV

SEQ ID NO: 15473 - protein, 15 aa, Homo sapiens
  ( 296 )...( 311 ): >O2A4_HUMAN
VKNTLKRVLGVERAL

SEQ ID NO: 15474 - protein, 14 aa, Homo sapiens
  ( 297 )...( 312 ): >O2A4_HUMAN
KNTLKRVLGVERAL

SEQ ID NO: 15475 - protein, 16 aa, Homo sapiens
  ( 291 )...( 306 ): >O2B2_HUMAN
TLRNKEVKEAFKRLVA

SEQ ID NO: 15476 - protein, 16 aa, Homo sapiens
  ( 294 )...( 309 ): >O2B2_HUMAN
NKEVKEAFKRLVAKSL

SEQ ID NO: 15477 - protein, 16 aa, Homo sapiens
  ( 295 )...( 310 ): >O2B2_HUMAN
KEVKEAFKRLVAKSLL

SEQ ID NO: 15478 - protein, 16 aa, Homo sapiens
  ( 297 )...( 312 ): >O2B2_HUMAN
VKEAFKRLVAKSLLNQ

SEQ ID NO: 15479 - protein, 16 aa, Homo sapiens
  ( 300 )...( 315 ): >O2B2_HUMAN
AFKRLVAKSLLNQEIR

SEQ ID NO: 15480 - protein, 16 aa, Homo sapiens
  ( 302 )...( 317 ): >O2B2_HUMAN
KRLVAKSLLNQEIRNM

SEQ ID NO: 15481 - protein, 16 aa, Homo sapiens
  ( 221 )...( 236 ): >O2B3_HUMAN
IAQAVLKIRSAEGRQK

SEQ ID NO: 15482 - protein, 16 aa, Homo sapiens
  ( 222 )...( 237 ): >O2B3_HUMAN
AQAVLKIRSAEGRQKA

SEQ ID NO: 15483 - protein, 16 aa, Homo sapiens
  ( 223 )...( 238 ): >O2B3_HUMAN
QAVLKIRSAEGRQKAF

SEQ ID NO: 15484 - protein, 16 aa, Homo sapiens
  ( 224 )...( 239 ): >O2B3_HUMAN
AVLKIRSAEGRQKAFG

SEQ ID NO: 15485 - protein, 16 aa, Homo sapiens
  ( 225 )...( 240 ): >O2B3_HUMAN
VLKIRSAEGRQKAFGT

SEQ ID NO: 15486 - protein, 16 aa, Homo sapiens
  ( 226 )...( 241 ): >O2B3_HUMAN
LKIRSAEGRQKAFGTC

SEQ ID NO: 15487 - protein, 16 aa, Homo sapiens
  ( 80 )...( 95 ): >O2B6_HUMAN
QMLVNLCSIRKVISYR

SEQ ID NO: 15488 - protein, 16 aa, Homo sapiens
  ( 81 )...( 96 ): >O2B6_HUMAN
MLVNLCSIRKVISYRG

SEQ ID NO: 15489 - protein, 16 aa, Homo sapiens
  ( 87 )...( 102 ): >O2B6_HUMAN
SIRKVISYRGCVAQLF

SEQ ID NO: 15490 - protein, 16 aa, Homo sapiens
  ( 88 )...( 103 ): >O2B6_HUMAN
IRKVISYRGCVAQLFI

SEQ ID NO: 15491 - protein, 16 aa, Homo sapiens
  ( 89 )...( 104 ): >O2B6_HUMAN
RKVISYRGCVAQLFIF

SEQ ID NO: 15492 - protein, 16 aa, Homo sapiens
  ( 221 )...( 236 ): >O2B6_HUMAN
IVRAVLRIQSAEGRQK

SEQ ID NO: 15493 - protein, 16 aa, Homo sapiens
  ( 222 )...( 237 ): >O2B6_HUMAN
VRAVLRIQSAEGRQKA

SEQ ID NO: 15494 - protein, 16 aa, Homo sapiens
  ( 223 )...( 238 ): >O2B6_HUMAN
RAVLRIQSAEGRQKAF

SEQ ID NO: 15495 - protein, 16 aa, Homo sapiens
  ( 291 )...( 306 ): >O2B6_HUMAN
TLRNKEVKEGFKRLVA

SEQ ID NO: 15496 - protein, 16 aa, Homo sapiens
  ( 292 )...( 307 ): >O2B6_HUMAN
LRNKEVKEGFKRLVAR

SEQ ID NO: 15497 - protein, 16 aa, Homo sapiens
  ( 293 )...( 308 ): >O2B6_HUMAN
RNKEVKEGFKRLVARV

SEQ ID NO: 15498 - protein, 16 aa, Homo sapiens
  ( 294 )...( 309 ): >O2B6_HUMAN
NKEVKEGFKRLVARVF

SEQ ID NO: 15499 - protein, 16 aa, Homo sapiens
  ( 295 )...( 310 ): >O2B6_HUMAN
KEVKEGFKRLVARVFL

SEQ ID NO: 15500 - protein, 16 aa, Homo sapiens
  ( 297 )...( 312 ): >O2B6_HUMAN
VKEGFKRLVARVFLIK

SEQ ID NO: 15501 - protein, 16 aa, Homo sapiens
  ( 298 )...( 313 ): >O2B6_HUMAN
KEGFKRLVARVFLIKK

SEQ ID NO: 15502 - protein, 15 aa, Homo sapiens
  ( 299 )...( 314 ): >O2B6_HUMAN
EGFKRLVARVFLIKK

SEQ ID NO: 15503 - protein, 14 aa, Homo sapiens
  ( 300 )...( 315 ): >O2B6_HUMAN
GFKRLVARVFLIKK

SEQ ID NO: 15504 - protein, 13 aa, Homo sapiens
  ( 301 )...( 316 ): >O2B6_HUMAN
FKRLVARVFLIKK

SEQ ID NO: 15505 - protein, 12 aa, Homo sapiens
  ( 302 )...( 317 ): >O2B6_HUMAN
KRLVARVFLIKK

SEQ ID NO: 15506 - protein, 16 aa, Homo sapiens
  ( 221 )...( 236 ): >O2C1_HUMAN
IAQAVLKIHSAEGRRK

SEQ ID NO: 15507 - protein, 16 aa, Homo sapiens
  ( 222 )...( 237 ): >O2C1_HUMAN
AQAVLKIHSAEGRRKA

SEQ ID NO: 15508 - protein, 16 aa, Homo sapiens
  ( 223 )...( 238 ): >O2C1_HUMAN
QAVLKIHSAEGRRKAF

SEQ ID NO: 15509 - protein, 16 aa, Homo sapiens
  ( 224 )...( 239 ): >O2C1_HUMAN
AVLKIHSAEGRRKAFN

SEQ ID NO: 15510 - protein, 16 aa, Homo sapiens
  ( 225 )...( 240 ): >O2C1_HUMAN
VLKIHSAEGRRKAFNT

SEQ ID NO: 15511 - protein, 16 aa, Homo sapiens
  ( 233 )...( 248 ): >O2C1_HUMAN
GRRKAFNTCLSHLLVV

SEQ ID NO: 15512 - protein, 16 aa, Homo sapiens
  ( 234 )...( 249 ): >O2C1_HUMAN
RRKAFNTCLSHLLVVF

SEQ ID NO: 15513 - protein, 16 aa, Homo sapiens
  ( 288 )...( 303 ): >O2C1_HUMAN
LIYTLRNMEVKGALRR

SEQ ID NO: 15514 - protein, 16 aa, Homo sapiens
  ( 289 )...( 304 ): >O2C1_HUMAN
IYTLRNMEVKGALRRL

SEQ ID NO: 15515 - protein, 16 aa, Homo sapiens
  ( 290 )...( 305 ): >O2C1_HUMAN
YTLRNMEVKGALRRLL

SEQ ID NO: 15516 - protein, 16 aa, Homo sapiens
  ( 291 )...( 306 ): >O2C1_HUMAN
TLRNMEVKGALRRLLG

SEQ ID NO: 15517 - protein, 16 aa, Homo sapiens
  ( 292 )...( 307 ): >O2C1_HUMAN
LRNMEVKGALRRLLGK

SEQ ID NO: 15518 - protein, 16 aa, Homo sapiens
  ( 293 )...( 308 ): >O2C1_HUMAN
RNMEVKGALRRLLGKG

SEQ ID NO: 15519 - protein, 16 aa, Homo sapiens
  ( 294 )...( 309 ): >O2C1_HUMAN
NMEVKGALRRLLGKGR

SEQ ID NO: 15520 - protein, 16 aa, Homo sapiens
  ( 295 )...( 310 ): >O2C1_HUMAN
MEVKGALRRLLGKGRE

SEQ ID NO: 15521 - protein, 16 aa, Homo sapiens
  ( 296 )...( 311 ): >O2C1_HUMAN
EVKGALRRLLGKGREV

SEQ ID NO: 15522 - protein, 15 aa, Homo sapiens
  ( 298 )...( 313 ): >O2C1_HUMAN
KGALRRLLGKGREVG

SEQ ID NO: 15523 - protein, 16 aa, Homo sapiens
  ( 76 )...( 91 ): >O2D2_HUMAN
NIVPQALVHLLSRKKV

SEQ ID NO: 15524 - protein, 16 aa, Homo sapiens
  ( 77 )...( 92 ): >O2D2_HUMAN
IVPQALVHLLSRKKVI

SEQ ID NO: 15525 - protein, 16 aa, Homo sapiens
  ( 78 )...( 93 ): >O2D2_HUMAN
VPQALVHLLSRKKVIA

SEQ ID NO: 15526 - protein, 16 aa, Homo sapiens
  ( 79 )...( 94 ): >O2D2_HUMAN
PQALVHLLSRKKVIAF

SEQ ID NO: 15527 - protein, 16 aa, Homo sapiens
  ( 85 )...( 100 ): >O2D2_HUMAN
LLSRKKVIAFTLCAAR

SEQ ID NO: 15528 - protein, 16 aa, Homo sapiens
  ( 86 )...( 101 ): >O2D2_HUMAN
LSRKKVIAFTLCAARL

SEQ ID NO: 15529 - protein, 16 aa, Homo sapiens
  ( 87 )...( 102 ): >O2D2_HUMAN
SRKKVIAFTLCAARLL

SEQ ID NO: 15530 - protein, 16 aa, Homo sapiens
  ( 88 )...( 103 ): >O2D2_HUMAN
RKKVIAFTLCAARLLF

SEQ ID NO: 15531 - protein, 16 aa, Homo sapiens
  ( 215 )...( 230 ): >O2D2_HUMAN
LVSYGRIIVTVVKMKS

SEQ ID NO: 15532 - protein, 16 aa, Homo sapiens
  ( 285 )...( 300 ): >O2D2_HUMAN
PLIYSLRNKDVKAALR

SEQ ID NO: 15533 - protein, 16 aa, Homo sapiens
  ( 286 )...( 301 ): >O2D2_HUMAN
LIYSLRNKDVKAALRK

SEQ ID NO: 15534 - protein, 16 aa, Homo sapiens
  ( 287 )...( 302 ): >O2D2_HUMAN
IYSLRNKDVKAALRKV

SEQ ID NO: 15535 - protein, 16 aa, Homo sapiens
  ( 288 )...( 303 ): >O2D2_HUMAN
YSLRNKDVKAALRKVA

SEQ ID NO: 15536 - protein, 16 aa, Homo sapiens
  ( 289 )...( 304 ): >O2D2_HUMAN
SLRNKDVKAALRKVAT

SEQ ID NO: 15537 - protein, 16 aa, Homo sapiens
  ( 290 )...( 305 ): >O2D2_HUMAN
LRNKDVKAALRKVATR

SEQ ID NO: 15538 - protein, 16 aa, Homo sapiens
  ( 291 )...( 306 ): >O2D2_HUMAN
RNKDVKAALRKVATRN

SEQ ID NO: 15539 - protein, 16 aa, Homo sapiens
  ( 292 )...( 307 ): >O2D2_HUMAN
NKDVKAALRKVATRNF

SEQ ID NO: 15540 - protein, 16 aa, Homo sapiens
  ( 293 )...( 308 ): >O2D2_HUMAN
KDVKAALRKVATRNFP

SEQ ID NO: 15541 - protein, 15 aa, Homo sapiens
  ( 294 )...( 309 ): >O2D2_HUMAN
DVKAALRKVATRNFP

SEQ ID NO: 15542 - protein, 14 aa, Homo sapiens
  ( 295 )...( 310 ): >O2D2_HUMAN
VKAALRKVATRNFP

SEQ ID NO: 15543 - protein, 16 aa, Homo sapiens
  ( 220 )...( 235 ): >O2F1_HUMAN
QIISTILKIQSREGRK

SEQ ID NO: 15544 - protein, 16 aa, Homo sapiens
  ( 221 )...( 236 ): >O2F1_HUMAN
IISTILKIQSREGRKK

SEQ ID NO: 15545 - protein, 16 aa, Homo sapiens
  ( 222 )...( 237 ): >O2F1_HUMAN
ISTILKIQSREGRKKA

SEQ ID NO: 15546 - protein, 16 aa, Homo sapiens
  ( 223 )...( 238 ): >O2F1_HUMAN
STILKIQSREGRKKAF

SEQ ID NO: 15547 - protein, 16 aa, Homo sapiens
  ( 224 )...( 239 ): >O2F1_HUMAN
TILKIQSREGRKKAFH

SEQ ID NO: 15548 - protein, 16 aa, Homo sapiens
  ( 225 )...( 240 ): >O2F1_HUMAN
ILKIQSREGRKKAFHT

SEQ ID NO: 15549 - protein, 16 aa, Homo sapiens
  ( 226 )...( 241 ): >O2F1_HUMAN
LKIQSREGRKKAFHTC

SEQ ID NO: 15550 - protein, 16 aa, Homo sapiens
  ( 227 )...( 242 ): >O2F1_HUMAN
KIQSREGRKKAFHTCA

SEQ ID NO: 15551 - protein, 16 aa, Homo sapiens
  ( 289 )...( 304 ): >O2F1_HUMAN
IYSLRNKEVKGAWQKL

SEQ ID NO: 15552 - protein, 16 aa, Homo sapiens
  ( 290 )...( 305 ): >O2F1_HUMAN
YSLRNKEVKGAWQKLL

SEQ ID NO: 15553 - protein, 16 aa, Homo sapiens
  ( 295 )...( 310 ): >O2F1_HUMAN
KEVKGAWQKLLWKFSG

SEQ ID NO: 15554 - protein, 16 aa, Homo sapiens
  ( 297 )...( 312 ): >O2F1_HUMAN
VKGAWQKLLWKFSGLT

SEQ ID NO: 15555 - protein, 16 aa, Homo sapiens
  ( 300 )...( 315 ): >O2F1_HUMAN
AWQKLLWKFSGLTSKL

SEQ ID NO: 15556 - protein, 16 aa, Homo sapiens
  ( 301 )...( 316 ): >O2F1_HUMAN
WQKLLWKFSGLTSKLA

SEQ ID NO: 15557 - protein, 16 aa, Homo sapiens
  ( 216 )...( 231 ): >O2F2_HUMAN
LSYIRIISTILKIQSR

SEQ ID NO: 15558 - protein, 16 aa, Homo sapiens
  ( 219 )...( 234 ): >O2F2_HUMAN
IRIISTILKIQSREGR

SEQ ID NO: 15559 - protein, 16 aa, Homo sapiens
  ( 220 )...( 235 ): >O2F2_HUMAN
RIISTILKIQSREGRK

SEQ ID NO: 15560 - protein, 16 aa, Homo sapiens
  ( 221 )...( 236 ): >O2F2_HUMAN
IISTILKIQSREGRKK

SEQ ID NO: 15561 - protein, 16 aa, Homo sapiens
  ( 222 )...( 237 ): >O2F2_HUMAN
ISTILKIQSREGRKKA

SEQ ID NO: 15562 - protein, 16 aa, Homo sapiens
  ( 223 )...( 238 ): >O2F2_HUMAN
STILKIQSREGRKKAF

SEQ ID NO: 15563 - protein, 16 aa, Homo sapiens
  ( 224 )...( 239 ): >O2F2_HUMAN
TILKIQSREGRKKAFH

SEQ ID NO: 15564 - protein, 16 aa, Homo sapiens
  ( 225 )...( 240 ): >O2F2_HUMAN
ILKIQSREGRKKAFHT

SEQ ID NO: 15565 - protein, 16 aa, Homo sapiens
  ( 226 )...( 241 ): >O2F2_HUMAN
LKIQSREGRKKAFHTC

SEQ ID NO: 15566 - protein, 16 aa, Homo sapiens
  ( 227 )...( 242 ): >O2F2_HUMAN
KIQSREGRKKAFHTCA

SEQ ID NO: 15567 - protein, 16 aa, Homo sapiens
  ( 288 )...( 303 ): >O2F2_HUMAN
VIYSLRNKEVKGAWHK

SEQ ID NO: 15568 - protein, 16 aa, Homo sapiens
  ( 291 )...( 306 ): >O2G1_HUMAN
SLRNKEVMRALRRVLG

SEQ ID NO: 15569 - protein, 16 aa, Homo sapiens
  ( 292 )...( 307 ): >O2G1_HUMAN
LRNKEVMRALRRVLGK

SEQ ID NO: 15570 - protein, 16 aa, Homo sapiens
  ( 294 )...( 309 ): >O2G1_HUMAN
NKEVMRALRRVLGKYM

SEQ ID NO: 15571 - protein, 16 aa, Homo sapiens
  ( 295 )...( 310 ): >O2G1_HUMAN
KEVMRALRRVLGKYML

SEQ ID NO: 15572 - protein, 16 aa, Homo sapiens
  ( 296 )...( 311 ): >O2G1_HUMAN
EVMRALRRVLGKYMLP

SEQ ID NO: 15573 - protein, 16 aa, Homo sapiens
  ( 297 )...( 312 ): >O2G1_HUMAN
VMRALRRVLGKYMLPA

SEQ ID NO: 15574 - protein, 16 aa, Homo sapiens
  ( 298 )...( 313 ): >O2G1_HUMAN
MRALRRVLGKYMLPAH

SEQ ID NO: 15575 - protein, 16 aa, Homo sapiens
  ( 299 )...( 314 ): >O2G1_HUMAN
RALRRVLGKYMLPAHS

SEQ ID NO: 15576 - protein, 16 aa, Homo sapiens
  ( 300 )...( 315 ): >O2G1_HUMAN
ALRRVLGKYMLPAHST

SEQ ID NO: 15577 - protein, 16 aa, Homo sapiens
  ( 301 )...( 316 ): >O2G1_HUMAN
LRRVLGKYMLPAHSTL

SEQ ID NO: 15578 - protein, 15 aa, Homo sapiens
  ( 302 )...( 317 ): >O2G1_HUMAN
RRVLGKYMLPAHSTL

SEQ ID NO: 15579 - protein, 16 aa, Homo sapiens
  ( 219 )...( 234 ): >O2H1_HUMAN
TAQAVLRINSATAWRK

SEQ ID NO: 15580 - protein, 16 aa, Homo sapiens
  ( 220 )...( 235 ): >O2H1_HUMAN
AQAVLRINSATAWRKA

SEQ ID NO: 15581 - protein, 16 aa, Homo sapiens
  ( 221 )...( 236 ): >O2H1_HUMAN
QAVLRINSATAWRKAF

SEQ ID NO: 15582 - protein, 16 aa, Homo sapiens
  ( 223 )...( 238 ): >O2H1_HUMAN
VLRINSATAWRKAFGT

SEQ ID NO: 15583 - protein, 16 aa, Homo sapiens
  ( 289 )...( 304 ): >O2H1_HUMAN
TLRNKEIKRALRRLLG

SEQ ID NO: 15584 - protein, 16 aa, Homo sapiens
  ( 217 )...( 232 ): >O2H2_HUMAN
GAITWAVLRINSAKGR

SEQ ID NO: 15585 - protein, 16 aa, Homo sapiens
  ( 218 )...( 233 ): >O2H2_HUMAN
AITWAVLRINSAKGRR

SEQ ID NO: 15586 - protein, 16 aa, Homo sapiens
  ( 219 )...( 234 ): >O2H2_HUMAN
ITWAVLRINSAKGRRK

SEQ ID NO: 15587 - protein, 16 aa, Homo sapiens
  ( 220 )...( 235 ): >O2H2_HUMAN
TWAVLRINSAKGRRKA

SEQ ID NO: 15588 - protein, 16 aa, Homo sapiens
  ( 221 )...( 236 ): >O2H2_HUMAN
WAVLRINSAKGRRKAF

SEQ ID NO: 15589 - protein, 16 aa, Homo sapiens
  ( 222 )...( 237 ): >O2H2_HUMAN
AVLRINSAKGRRKAFG

SEQ ID NO: 15590 - protein, 16 aa, Homo sapiens
  ( 223 )...( 238 ): >O2H2_HUMAN
VLRINSAKGRRKAFGT

SEQ ID NO: 15591 - protein, 16 aa, Homo sapiens
  ( 224 )...( 239 ): >O2H2_HUMAN
LRINSAKGRRKAFGTC

SEQ ID NO: 15592 - protein, 16 aa, Homo sapiens
  ( 289 )...( 304 ): >O2H2_HUMAN
TLRNKEVTRAFRRLLG

SEQ ID NO: 15593 - protein, 16 aa, Homo sapiens
  ( 292 )...( 307 ): >O2H2_HUMAN
NKEVTRAFRRLLGKEM

SEQ ID NO: 15594 - protein, 16 aa, Homo sapiens
  ( 293 )...( 308 ): >O2H2_HUMAN
KEVTRAFRRLLGKEMG

SEQ ID NO: 15595 - protein, 16 aa, Homo sapiens
  ( 295 )...( 310 ): >O2H2_HUMAN
VTRAFRRLLGKEMGLT

SEQ ID NO: 15596 - protein, 16 aa, Homo sapiens
  ( 296 )...( 311 ): >O2H2_HUMAN
TRAFRRLLGKEMGLTQ

SEQ ID NO: 15597 - protein, 16 aa, Homo sapiens
  ( 297 )...( 312 ): >O2H2_HUMAN
RAFRRLLGKEMGLTQS

SEQ ID NO: 15598 - protein, 16 aa, Homo sapiens
  ( 217 )...( 232 ): >O2H3_HUMAN
GAITWAVLRINSAKGR

SEQ ID NO: 15599 - protein, 16 aa, Homo sapiens
  ( 218 )...( 233 ): >O2H3_HUMAN
AITWAVLRINSAKGRR

SEQ ID NO: 15600 - protein, 16 aa, Homo sapiens
  ( 219 )...( 234 ): >O2H3_HUMAN
ITWAVLRINSAKGRRK

SEQ ID NO: 15601 - protein, 16 aa, Homo sapiens
  ( 220 )...( 235 ): >O2H3_HUMAN
TWAVLRINSAKGRRKA

SEQ ID NO: 15602 - protein, 16 aa, Homo sapiens
  ( 221 )...( 236 ): >O2H3_HUMAN
WAVLRINSAKGRRKAF

SEQ ID NO: 15603 - protein, 16 aa, Homo sapiens
  ( 222 )...( 237 ): >O2H3_HUMAN
AVLRINSAKGRRKAFG

SEQ ID NO: 15604 - protein, 16 aa, Homo sapiens
  ( 223 )...( 238 ): >O2H3_HUMAN
VLRINSAKGRRKAFGT

SEQ ID NO: 15605 - protein, 16 aa, Homo sapiens
  ( 224 )...( 239 ): >O2H3_HUMAN
LRINSAKGRRKAFGTC

SEQ ID NO: 15606 - protein, 16 aa, Homo sapiens
  ( 289 )...( 304 ): >O2H3_HUMAN
TLRNKEVTRAFRRLLG

SEQ ID NO: 15607 - protein, 16 aa, Homo sapiens
  ( 286 )...( 301 ): >O2J2_HUMAN
LNPLIYTLRNKHVKGA

SEQ ID NO: 15608 - protein, 16 aa, Homo sapiens
  ( 287 )...( 302 ): >O2J2_HUMAN
NPLIYTLRNKHVKGAA

SEQ ID NO: 15609 - protein, 16 aa, Homo sapiens
  ( 288 )...( 303 ): >O2J2_HUMAN
PLIYTLRNKHVKGAAK

SEQ ID NO: 15610 - protein, 16 aa, Homo sapiens
  ( 289 )...( 304 ): >O2J2_HUMAN
LIYTLRNKHVKGAAKR

SEQ ID NO: 15611 - protein, 16 aa, Homo sapiens
  ( 290 )...( 305 ): >O2J2_HUMAN
IYTLRNKHVKGAAKRL

SEQ ID NO: 15612 - protein, 16 aa, Homo sapiens
  ( 291 )...( 306 ): >O2J2_HUMAN
YTLRNKHVKGAAKRLL

SEQ ID NO: 15613 - protein, 16 aa, Homo sapiens
  ( 292 )...( 307 ): >O2J2_HUMAN
TLRNKHVKGAAKRLLG

SEQ ID NO: 15614 - protein, 16 aa, Homo sapiens
  ( 293 )...( 308 ): >O2J2_HUMAN
LRNKHVKGAAKRLLGW

SEQ ID NO: 15615 - protein, 16 aa, Homo sapiens
  ( 294 )...( 309 ): >O2J2_HUMAN
RNKHVKGAAKRLLGWE

SEQ ID NO: 15616 - protein, 16 aa, Homo sapiens
  ( 295 )...( 310 ): >O2J2_HUMAN
NKHVKGAAKRLLGWEW

SEQ ID NO: 15617 - protein, 16 aa, Homo sapiens
  ( 296 )...( 311 ): >O2J2_HUMAN
KHVKGAAKRLLGWEWG

SEQ ID NO: 15618 - protein, 16 aa, Homo sapiens
  ( 297 )...( 312 ): >O2J2_HUMAN
HVKGAAKRLLGWEWGK

SEQ ID NO: 15619 - protein, 15 aa, Homo sapiens
  ( 298 )...( 313 ): >O2J2_HUMAN
VKGAAKRLLGWEWGK

SEQ ID NO: 15620 - protein, 14 aa, Homo sapiens
  ( 299 )...( 314 ): >O2J2_HUMAN
KGAAKRLLGWEWGK

SEQ ID NO: 15621 - protein, 16 aa, Homo sapiens
  ( 224 )...( 239 ): >O2J3_HUMAN
IVRAVLRMQSTTGLQK

SEQ ID NO: 15622 - protein, 16 aa, Homo sapiens
  ( 225 )...( 240 ): >O2J3_HUMAN
VRAVLRMQSTTGLQKV

SEQ ID NO: 15623 - protein, 16 aa, Homo sapiens
  ( 226 )...( 241 ): >O2J3_HUMAN
RAVLRMQSTTGLQKVF

SEQ ID NO: 15624 - protein, 16 aa, Homo sapiens
  ( 286 )...( 301 ): >O2J3_HUMAN
PSLNPLIYTLRNKVVR

SEQ ID NO: 15625 - protein, 16 aa, Homo sapiens
  ( 287 )...( 302 ): >O2J3_HUMAN
SLNPLIYTLRNKVVRG

SEQ ID NO: 15626 - protein, 16 aa, Homo sapiens
  ( 288 )...( 303 ): >O2J3_HUMAN
LNPLIYTLRNKVVRGA

SEQ ID NO: 15627 - protein, 16 aa, Homo sapiens
  ( 289 )...( 304 ): >O2J3_HUMAN
NPLIYTLRNKVVRGAV

SEQ ID NO: 15628 - protein, 16 aa, Homo sapiens
  ( 290 )...( 305 ): >O2J3_HUMAN
PLIYTLRNKVVRGAVK

SEQ ID NO: 15629 - protein, 16 aa, Homo sapiens
  ( 291 )...( 306 ): >O2J3_HUMAN
LIYTLRNKVVRGAVKR

SEQ ID NO: 15630 - protein, 16 aa, Homo sapiens
  ( 292 )...( 307 ): >O2J3_HUMAN
IYTLRNKVVRGAVKRL

SEQ ID NO: 15631 - protein, 16 aa, Homo sapiens
  ( 293 )...( 308 ): >O2J3_HUMAN
YTLRNKVVRGAVKRLM

SEQ ID NO: 15632 - protein, 16 aa, Homo sapiens
  ( 294 )...( 309 ): >O2J3_HUMAN
TLRNKVVRGAVKRLMG

SEQ ID NO: 15633 - protein, 16 aa, Homo sapiens
  ( 295 )...( 310 ): >O2J3_HUMAN
LRNKVVRGAVKRLMGW

SEQ ID NO: 15634 - protein, 16 aa, Homo sapiens
  ( 296 )...( 311 ): >O2J3_HUMAN
RNKVVRGAVKRLMGWE

SEQ ID NO: 15635 - protein, 15 aa, Homo sapiens
  ( 297 )...( 312 ): >O2J3_HUMAN
NKVVRGAVKRLMGWE

SEQ ID NO: 15636 - protein, 14 aa, Homo sapiens
  ( 298 )...( 313 ): >O2J3_HUMAN
KVVRGAVKRLMGWE

SEQ ID NO: 15637 - protein, 16 aa, Homo sapiens
  ( 222 )...( 237 ): >O2S2_HUMAN
IITTILRIPSAEGRKK

SEQ ID NO: 15638 - protein, 16 aa, Homo sapiens
  ( 223 )...( 238 ): >O2S2_HUMAN
ITTILRIPSAEGRKKV

SEQ ID NO: 15639 - protein, 16 aa, Homo sapiens
  ( 224 )...( 239 ): >O2S2_HUMAN
TTILRIPSAEGRKKVF

SEQ ID NO: 15640 - protein, 16 aa, Homo sapiens
  ( 225 )...( 240 ): >O2S2_HUMAN
TILRIPSAEGRKKVFS

SEQ ID NO: 15641 - protein, 16 aa, Homo sapiens
  ( 226 )...( 241 ): >O2S2_HUMAN
ILRIPSAEGRKKVFST

SEQ ID NO: 15642 - protein, 16 aa, Homo sapiens
  ( 294 )...( 309 ): >O2S2_HUMAN
PIIYSLRNKDVKAAVR

SEQ ID NO: 15643 - protein, 16 aa, Homo sapiens
  ( 295 )...( 310 ): >O2S2_HUMAN
IIYSLRNKDVKAAVRR

SEQ ID NO: 15644 - protein, 16 aa, Homo sapiens
  ( 296 )...( 311 ): >O2S2_HUMAN
IYSLRNKDVKAAVRRL

SEQ ID NO: 15645 - protein, 16 aa, Homo sapiens
  ( 297 )...( 312 ): >O2S2_HUMAN
YSLRNKDVKAAVRRLL

SEQ ID NO: 15646 - protein, 16 aa, Homo sapiens
  ( 298 )...( 313 ): >O2S2_HUMAN
SLRNKDVKAAVRRLLR

SEQ ID NO: 15647 - protein, 16 aa, Homo sapiens
  ( 301 )...( 316 ): >O2S2_HUMAN
NKDVKAAVRRLLRPKG

SEQ ID NO: 15648 - protein, 16 aa, Homo sapiens
  ( 302 )...( 317 ): >O2S2_HUMAN
KDVKAAVRRLLRPKGF

SEQ ID NO: 15649 - protein, 16 aa, Homo sapiens
  ( 303 )...( 318 ): >O2S2_HUMAN
DVKAAVRRLLRPKGFT

SEQ ID NO: 15650 - protein, 16 aa, Homo sapiens
  ( 304 )...( 319 ): >O2S2_HUMAN
VKAAVRRLLRPKGFTQ

SEQ ID NO: 15651 - protein, 15 aa, Homo sapiens
  ( 305 )...( 320 ): >O2S2_HUMAN
KAAVRRLLRPKGFTQ

SEQ ID NO: 15652 - protein, 14 aa, Homo sapiens
  ( 306 )...( 321 ): >O2S2_HUMAN
AAVRRLLRPKGFTQ

SEQ ID NO: 15653 - protein, 13 aa, Homo sapiens
  ( 307 )...( 322 ): >O2S2_HUMAN
AVRRLLRPKGFTQ

SEQ ID NO: 15654 - protein, 12 aa, Homo sapiens
  ( 308 )...( 323 ): >O2S2_HUMAN
VRRLLRPKGFTQ

SEQ ID NO: 15655 - protein, 16 aa, Homo sapiens
  ( 287 )...( 302 ): >O2T1_HUMAN
LIYSLRNKDVTGALKR

SEQ ID NO: 15656 - protein, 16 aa, Homo sapiens
  ( 288 )...( 303 ): >O2T1_HUMAN
IYSLRNKDVTGALKRA

SEQ ID NO: 15657 - protein, 16 aa, Homo sapiens
  ( 289 )...( 304 ): >O2T1_HUMAN
YSLRNKDVTGALKRAL

SEQ ID NO: 15658 - protein, 16 aa, Homo sapiens
  ( 290 )...( 305 ): >O2T1_HUMAN
SLRNKDVTGALKRALG

SEQ ID NO: 15659 - protein, 16 aa, Homo sapiens
  ( 291 )...( 306 ): >O2T1_HUMAN
LRNKDVTGALKRALGR

SEQ ID NO: 15660 - protein, 16 aa, Homo sapiens
  ( 292 )...( 307 ): >O2T1_HUMAN
RNKDVTGALKRALGRF

SEQ ID NO: 15661 - protein, 16 aa, Homo sapiens
  ( 293 )...( 308 ): >O2T1_HUMAN
NKDVTGALKRALGRFK

SEQ ID NO: 15662 - protein, 16 aa, Homo sapiens
  ( 294 )...( 309 ): >O2T1_HUMAN
KDVTGALKRALGRFKG

SEQ ID NO: 15663 - protein, 16 aa, Homo sapiens
  ( 295 )...( 310 ): >O2T1_HUMAN
DVTGALKRALGRFKGP

SEQ ID NO: 15664 - protein, 16 aa, Homo sapiens
  ( 296 )...( 311 ): >O2T1_HUMAN
VTGALKRALGRFKGPQ

SEQ ID NO: 15665 - protein, 15 aa, Homo sapiens
  ( 297 )...( 312 ): >O2T1_HUMAN
TGALKRALGRFKGPQ

SEQ ID NO: 15666 - protein, 16 aa, Homo sapiens
  ( 214 )...( 229 ): >O2W1_HUMAN
ILISYGYIAKAVLRTK

SEQ ID NO: 15667 - protein, 16 aa, Homo sapiens
  ( 215 )...( 230 ): >O2W1_HUMAN
LISYGYIAKAVLRTKS

SEQ ID NO: 15668 - protein, 16 aa, Homo sapiens
  ( 216 )...( 231 ): >O2W1_HUMAN
ISYGYIAKAVLRTKSK

SEQ ID NO: 15669 - protein, 16 aa, Homo sapiens
  ( 217 )...( 232 ): >O2W1_HUMAN
SYGYIAKAVLRTKSKA

SEQ ID NO: 15670 - protein, 16 aa, Homo sapiens
  ( 218 )...( 233 ): >O2W1_HUMAN
YGYIAKAVLRTKSKAS

SEQ ID NO: 15671 - protein, 16 aa, Homo sapiens
  ( 219 )...( 234 ): >O2W1_HUMAN
GYIAKAVLRTKSKASQ

SEQ ID NO: 15672 - protein, 16 aa, Homo sapiens
  ( 220 )...( 235 ): >O2W1_HUMAN
YIAKAVLRTKSKASQR

SEQ ID NO: 15673 - protein, 16 aa, Homo sapiens
  ( 221 )...( 236 ): >O2W1_HUMAN
IAKAVLRTKSKASQRK

SEQ ID NO: 15674 - protein, 16 aa, Homo sapiens
  ( 222 )...( 237 ): >O2W1_HUMAN
AKAVLRTKSKASQRKA

SEQ ID NO: 15675 - protein, 16 aa, Homo sapiens
  ( 223 )...( 238 ): >O2W1_HUMAN
KAVLRTKSKASQRKAM

SEQ ID NO: 15676 - protein, 16 aa, Homo sapiens
  ( 224 )...( 239 ): >O2W1_HUMAN
AVLRTKSKASQRKAMN

SEQ ID NO: 15677 - protein, 16 aa, Homo sapiens
  ( 225 )...( 240 ): >O2W1_HUMAN
VLRTKSKASQRKAMNT

SEQ ID NO: 15678 - protein, 16 aa, Homo sapiens
  ( 226 )...( 241 ): >O2W1_HUMAN
LRTKSKASQRKAMNTC

SEQ ID NO: 15679 - protein, 16 aa, Homo sapiens
  ( 227 )...( 242 ): >O2W1_HUMAN
RTKSKASQRKAMNTCG

SEQ ID NO: 15680 - protein, 16 aa, Homo sapiens
  ( 77 )...( 92 ): >O3A1_HUMAN
ISVTVPSMLSRLLSRK

SEQ ID NO: 15681 - protein, 16 aa, Homo sapiens
  ( 78 )...( 93 ): >O3A1_HUMAN
SVTVPSMLSRLLSRKR

SEQ ID NO: 15682 - protein, 16 aa, Homo sapiens
  ( 79 )...( 94 ): >O3A1_HUMAN
VTVPSMLSRLLSRKRA

SEQ ID NO: 15683 - protein, 16 aa, Homo sapiens
  ( 80 )...( 95 ): >O3A1_HUMAN
TVPSMLSRLLSRKRAV

SEQ ID NO: 15684 - protein, 16 aa, Homo sapiens
  ( 81 )...( 96 ): >O3A1_HUMAN
VPSMLSRLLSRKRAVP

SEQ ID NO: 15685 - protein, 16 aa, Homo sapiens
  ( 84 )...( 99 ): >O3A1_HUMAN
MLSRLLSRKRAVPCGA

SEQ ID NO: 15686 - protein, 16 aa, Homo sapiens
  ( 130 )...( 145 ): >O3A1_HUMAN
CRPLTYSTRMSQTVQR

SEQ ID NO: 15687 - protein, 16 aa, Homo sapiens
  ( 131 )...( 146 ): >O3A1_HUMAN
RPLTYSTRMSQTVQRM

SEQ ID NO: 15688 - protein, 16 aa, Homo sapiens
  ( 223 )...( 238 ): >O3A1_HUMAN
HVAAAVLRIRSVEGRK

SEQ ID NO: 15689 - protein, 16 aa, Homo sapiens
  ( 224 )...( 239 ): >O3A1_HUMAN
VAAAVLRIRSVEGRKK

SEQ ID NO: 15690 - protein, 16 aa, Homo sapiens
  ( 225 )...( 240 ): >O3A1_HUMAN
AAAVLRIRSVEGRKKA

SEQ ID NO: 15691 - protein, 16 aa, Homo sapiens
  ( 226 )...( 241 ): >O3A1_HUMAN
AAVLRIRSVEGRKKAF

SEQ ID NO: 15692 - protein, 16 aa, Homo sapiens
  ( 227 )...( 242 ): >O3A1_HUMAN
AVLRIRSVEGRKKAFS

SEQ ID NO: 15693 - protein, 16 aa, Homo sapiens
  ( 228 )...( 243 ): >O3A1_HUMAN
VLRIRSVEGRKKAFST

SEQ ID NO: 15694 - protein, 16 aa, Homo sapiens
  ( 229 )...( 244 ): >O3A1_HUMAN
LRIRSVEGRKKAFSTC

SEQ ID NO: 15695 - protein, 16 aa, Homo sapiens
  ( 230 )...( 245 ): >O3A1_HUMAN
RIRSVEGRKKAFSTCG

SEQ ID NO: 15696 - protein, 16 aa, Homo sapiens
  ( 300 )...( 315 ): >O3A1_HUMAN
VQSAIWRMLTGRRSLA

SEQ ID NO: 15697 - protein, 15 aa, Homo sapiens
  ( 301 )...( 316 ): >O3A1_HUMAN
QSAIWRMLTGRRSLA

SEQ ID NO: 15698 - protein, 14 aa, Homo sapiens
  ( 302 )...( 317 ): >O3A1_HUMAN
SAIWRMLTGRRSLA

SEQ ID NO: 15699 - protein, 13 aa, Homo sapiens
  ( 303 )...( 318 ): >O3A1_HUMAN
AIWRMLTGRRSLA

SEQ ID NO: 15700 - protein, 12 aa, Homo sapiens
  ( 304 )...( 319 ): >O3A1_HUMAN
IWRMLTGRRSLA

SEQ ID NO: 15701 - protein, 16 aa, Homo sapiens
  ( 223 )...( 238 ): >O3A2_HUMAN
HVAAAVLRIRSVEGRK

SEQ ID NO: 15702 - protein, 16 aa, Homo sapiens
  ( 224 )...( 239 ): >O3A2_HUMAN
VAAAVLRIRSVEGRKK

SEQ ID NO: 15703 - protein, 16 aa, Homo sapiens
  ( 225 )...( 240 ): >O3A2_HUMAN
AAAVLRIRSVEGRKKA

SEQ ID NO: 15704 - protein, 16 aa, Homo sapiens
  ( 226 )...( 241 ): >O3A2_HUMAN
AAVLRIRSVEGRKKAF

SEQ ID NO: 15705 - protein, 16 aa, Homo sapiens
  ( 227 )...( 242 ): >O3A2_HUMAN
AVLRIRSVEGRKKAFS

SEQ ID NO: 15706 - protein, 16 aa, Homo sapiens
  ( 228 )...( 243 ): >O3A2_HUMAN
VLRIRSVEGRKKAFST

SEQ ID NO: 15707 - protein, 16 aa, Homo sapiens
  ( 229 )...( 244 ): >O3A2_HUMAN
LRIRSVEGRKKAFSTC

SEQ ID NO: 15708 - protein, 16 aa, Homo sapiens
  ( 230 )...( 245 ): >O3A2_HUMAN
RIRSVEGRKKAFSTCG

SEQ ID NO: 15709 - protein, 16 aa, Homo sapiens
  ( 224 )...( 239 ): >O3A3_HUMAN
VVAAVLQIRSAEGRKK

SEQ ID NO: 15710 - protein, 16 aa, Homo sapiens
  ( 225 )...( 240 ): >O3A3_HUMAN
VAAVLQIRSAEGRKKA

SEQ ID NO: 15711 - protein, 16 aa, Homo sapiens
  ( 226 )...( 241 ): >O3A3_HUMAN
AAVLQIRSAEGRKKAF

SEQ ID NO: 15712 - protein, 16 aa, Homo sapiens
  ( 227 )...( 242 ): >O3A3_HUMAN
AVLQIRSAEGRKKAFS

SEQ ID NO: 15713 - protein, 16 aa, Homo sapiens
  ( 228 )...( 243 ): >O3A3_HUMAN
VLQIRSAEGRKKAFST

SEQ ID NO: 15714 - protein, 16 aa, Homo sapiens
  ( 229 )...( 244 ): >O3A3_HUMAN
LQIRSAEGRKKAFSTC

SEQ ID NO: 15715 - protein, 16 aa, Homo sapiens
  ( 223 )...( 238 ): >O3A4_HUMAN
HVAAAVLRIRSAEGKK

SEQ ID NO: 15716 - protein, 16 aa, Homo sapiens
  ( 224 )...( 239 ): >O3A4_HUMAN
VAAAVLRIRSAEGKKK

SEQ ID NO: 15717 - protein, 16 aa, Homo sapiens
  ( 225 )...( 240 ): >O3A4_HUMAN
AAAVLRIRSAEGKKKA

SEQ ID NO: 15718 - protein, 16 aa, Homo sapiens
  ( 226 )...( 241 ): >O3A4_HUMAN
AAVLRIRSAEGKKKAF

SEQ ID NO: 15719 - protein, 16 aa, Homo sapiens
  ( 227 )...( 242 ): >O3A4_HUMAN
AVLRIRSAEGKKKAFS

SEQ ID NO: 15720 - protein, 16 aa, Homo sapiens
  ( 228 )...( 243 ): >O3A4_HUMAN
VLRIRSAEGKKKAFST

SEQ ID NO: 15721 - protein, 16 aa, Homo sapiens
  ( 229 )...( 244 ): >O3A4_HUMAN
LRIRSAEGKKKAFSTC

SEQ ID NO: 15722 - protein, 16 aa, Homo sapiens
  ( 218 )...( 233 ): >O4D1_HUMAN
YTVILVMLRSHSGKAR

SEQ ID NO: 15723 - protein, 16 aa, Homo sapiens
  ( 219 )...( 234 ): >O4D1_HUMAN
TVILVMLRSHSGKARR

SEQ ID NO: 15724 - protein, 16 aa, Homo sapiens
  ( 220 )...( 235 ): >O4D1_HUMAN
VILVMLRSHSGKARRK

SEQ ID NO: 15725 - protein, 16 aa, Homo sapiens
  ( 221 )...( 236 ): >O4D1_HUMAN
ILVMLRSHSGKARRKA

SEQ ID NO: 15726 - protein, 16 aa, Homo sapiens
  ( 222 )...( 237 ): >O4D1_HUMAN
LVMLRSHSGKARRKAA

SEQ ID NO: 15727 - protein, 16 aa, Homo sapiens
  ( 223 )...( 238 ): >O4D1_HUMAN
VMLRSHSGKARRKAAS

SEQ ID NO: 15728 - protein, 16 aa, Homo sapiens
  ( 224 )...( 239 ): >O4D1_HUMAN
MLRSHSGKARRKAAST

SEQ ID NO: 15729 - protein, 16 aa, Homo sapiens
  ( 230 )...( 245 ): >O4D1_HUMAN
GKARRKAASTCTTHII

SEQ ID NO: 15730 - protein, 16 aa, Homo sapiens
  ( 231 )...( 246 ): >O4D1_HUMAN
KARRKAASTCTTHIIV

SEQ ID NO: 15731 - protein, 16 aa, Homo sapiens
  ( 287 )...( 302 ): >O4D1_HUMAN
YTLRNQDMKAAMRRLG

SEQ ID NO: 15732 - protein, 16 aa, Homo sapiens
  ( 288 )...( 303 ): >O4D1_HUMAN
TLRNQDMKAAMRRLGK

SEQ ID NO: 15733 - protein, 16 aa, Homo sapiens
  ( 289 )...( 304 ): >O4D1_HUMAN
LRNQDMKAAMRRLGKC

SEQ ID NO: 15734 - protein, 16 aa, Homo sapiens
  ( 290 )...( 305 ): >O4D1_HUMAN
RNQDMKAAMRRLGKCL

SEQ ID NO: 15735 - protein, 16 aa, Homo sapiens
  ( 292 )...( 307 ): >O4D1_HUMAN
QDMKAAMRRLGKCLVI

SEQ ID NO: 15736 - protein, 16 aa, Homo sapiens
  ( 294 )...( 309 ): >O4D1_HUMAN
MKAAMRRLGKCLVICR

SEQ ID NO: 15737 - protein, 16 aa, Homo sapiens
  ( 295 )...( 310 ): >O4D1_HUMAN
KAAMRRLGKCLVICRE

SEQ ID NO: 15738 - protein, 15 aa, Homo sapiens
  ( 296 )...( 311 ): >O4D1_HUMAN
AAMRRLGKCLVICRE

SEQ ID NO: 15739 - protein, 14 aa, Homo sapiens
  ( 297 )...( 312 ): >O4D1_HUMAN
AMRRLGKCLVICRE

SEQ ID NO: 15740 - protein, 13 aa, Homo sapiens
  ( 298 )...( 313 ): >O4D1_HUMAN
MRRLGKCLVICRE

SEQ ID NO: 15741 - protein, 16 aa, Homo sapiens
  ( 122 )...( 137 ): >O4D2_HUMAN
RLIAISRPLRYVTVMN

SEQ ID NO: 15742 - protein, 16 aa, Homo sapiens
  ( 220 )...( 235 ): >O4D2_HUMAN
FILVMLRSHPGEARRK

SEQ ID NO: 15743 - protein, 16 aa, Homo sapiens
  ( 221 )...( 236 ): >O4D2_HUMAN
ILVMLRSHPGEARRKA

SEQ ID NO: 15744 - protein, 16 aa, Homo sapiens
  ( 222 )...( 237 ): >O4D2_HUMAN
LVMLRSHPGEARRKAA

SEQ ID NO: 15745 - protein, 16 aa, Homo sapiens
  ( 223 )...( 238 ): >O4D2_HUMAN
VMLRSHPGEARRKAAS

SEQ ID NO: 15746 - protein, 16 aa, Homo sapiens
  ( 288 )...( 303 ): >O4D2_HUMAN
TLRNQDMQAAVRRLGR

SEQ ID NO: 15747 - protein, 16 aa, Homo sapiens
  ( 292 )...( 307 ): >O4D2_HUMAN
QDMQAAVRRLGRHRLV

SEQ ID NO: 15748 - protein, 15 aa, Homo sapiens
  ( 293 )...( 308 ): >O4D2_HUMAN
DMQAAVRRLGRHRLV

SEQ ID NO: 15749 - protein, 14 aa, Homo sapiens
  ( 294 )...( 309 ): >O4D2_HUMAN
MQAAVRRLGRHRLV

SEQ ID NO: 15750 - protein, 13 aa, Homo sapiens
  ( 295 )...( 310 ): >O4D2_HUMAN
QAAVRRLGRHRLV

SEQ ID NO: 15751 - protein, 16 aa, Homo sapiens
  ( 81 )...( 96 ): >O4F3_HUMAN
MIYDLFRKRKVISFGG

SEQ ID NO: 15752 - protein, 16 aa, Homo sapiens
  ( 85 )...( 100 ): >O4F3_HUMAN
LFRKRKVISFGGCIAQ

SEQ ID NO: 15753 - protein, 16 aa, Homo sapiens
  ( 86 )...( 101 ): >O4F3_HUMAN
FRKRKVISFGGCIAQI

SEQ ID NO: 15754 - protein, 16 aa, Homo sapiens
  ( 87 )...( 102 ): >O4F3_HUMAN
RKRKVISFGGCIAQIF

SEQ ID NO: 15755 - protein, 16 aa, Homo sapiens
  ( 284 )...( 299 ): >O4F3_HUMAN
PVVYTFRNKEMKAAIK

SEQ ID NO: 15756 - protein, 16 aa, Homo sapiens
  ( 285 )...( 300 ): >O4F3_HUMAN
VVYTFRNKEMKAAIKR

SEQ ID NO: 15757 - protein, 16 aa, Homo sapiens
  ( 286 )...( 301 ): >O4F3_HUMAN
VYTFRNKEMKAAIKRV

SEQ ID NO: 15758 - protein, 16 aa, Homo sapiens
  ( 288 )...( 303 ): >O4F3_HUMAN
TFRNKEMKAAIKRVCK

SEQ ID NO: 15759 - protein, 16 aa, Homo sapiens
  ( 290 )...( 305 ): >O4F3_HUMAN
RNKEMKAAIKRVCKQL

SEQ ID NO: 15760 - protein, 16 aa, Homo sapiens
  ( 291 )...( 306 ): >O4F3_HUMAN
NKEMKAAIKRVCKQLV

SEQ ID NO: 15761 - protein, 16 aa, Homo sapiens
  ( 292 )...( 307 ): >O4F3_HUMAN
KEMKAAIKRVCKQLVI

SEQ ID NO: 15762 - protein, 16 aa, Homo sapiens
  ( 293 )...( 308 ): >O4F3_HUMAN
EMKAAIKRVCKQLVIY

SEQ ID NO: 15763 - protein, 16 aa, Homo sapiens
  ( 294 )...( 309 ): >O4F3_HUMAN
MKAAIKRVCKQLVIYK

SEQ ID NO: 15764 - protein, 16 aa, Homo sapiens
  ( 295 )...( 310 ): >O4F3_HUMAN
KAAIKRVCKQLVIYKR

SEQ ID NO: 15765 - protein, 16 aa, Homo sapiens
  ( 296 )...( 311 ): >O4F3_HUMAN
AAIKRVCKQLVIYKRI

SEQ ID NO: 15766 - protein, 16 aa, Homo sapiens
  ( 297 )...( 312 ): >O4F3_HUMAN
AIKRVCKQLVIYKRIS

SEQ ID NO: 15767 - protein, 15 aa, Homo sapiens
  ( 298 )...( 313 ): >O4F3_HUMAN
IKRVCKQLVIYKRIS

SEQ ID NO: 15768 - protein, 14 aa, Homo sapiens
  ( 299 )...( 314 ): >O4F3_HUMAN
KRVCKQLVIYKRIS

SEQ ID NO: 15769 - protein, 13 aa, Homo sapiens
  ( 300 )...( 315 ): >O4F3_HUMAN
RVCKQLVIYKRIS

SEQ ID NO: 15770 - protein, 12 aa, Homo sapiens
  ( 301 )...( 316 ): >O4F3_HUMAN
VCKQLVIYKRIS

SEQ ID NO: 15771 - protein, 16 aa, Homo sapiens
  ( 153 )...( 168 ): >O5D4_HUMAN
FIFITVMKMPSTGGRK

SEQ ID NO: 15772 - protein, 16 aa, Homo sapiens
  ( 154 )...( 169 ): >O5D4_HUMAN
IFITVMKMPSTGGRKK

SEQ ID NO: 15773 - protein, 16 aa, Homo sapiens
  ( 155 )...( 170 ): >O5D4_HUMAN
FITVMKMPSTGGRKKA

SEQ ID NO: 15774 - protein, 16 aa, Homo sapiens
  ( 156 )...( 171 ): >O5D4_HUMAN
ITVMKMPSTGGRKKAF

SEQ ID NO: 15775 - protein, 16 aa, Homo sapiens
  ( 284 )...( 299 ): >O5F1_HUMAN
MLNPLIYSLRSKEVKK

SEQ ID NO: 15776 - protein, 16 aa, Homo sapiens
  ( 285 )...( 300 ): >O5F1_HUMAN
LNPLIYSLRSKEVKKA

SEQ ID NO: 15777 - protein, 16 aa, Homo sapiens
  ( 286 )...( 301 ): >O5F1_HUMAN
NPLIYSLRSKEVKKAL

SEQ ID NO: 15778 - protein, 16 aa, Homo sapiens
  ( 287 )...( 302 ): >O5F1_HUMAN
PLIYSLRSKEVKKALA

SEQ ID NO: 15779 - protein, 16 aa, Homo sapiens
  ( 288 )...( 303 ): >O5F1_HUMAN
LIYSLRSKEVKKALAN

SEQ ID NO: 15780 - protein, 16 aa, Homo sapiens
  ( 289 )...( 304 ): >O5F1_HUMAN
IYSLRSKEVKKALANV

SEQ ID NO: 15781 - protein, 16 aa, Homo sapiens
  ( 290 )...( 305 ): >O5F1_HUMAN
YSLRSKEVKKALANVI

SEQ ID NO: 15782 - protein, 16 aa, Homo sapiens
  ( 292 )...( 307 ): >O5F1_HUMAN
LRSKEVKKALANVISR

SEQ ID NO: 15783 - protein, 16 aa, Homo sapiens
  ( 293 )...( 308 ): >O5F1_HUMAN
RSKEVKKALANVISRK

SEQ ID NO: 15784 - protein, 16 aa, Homo sapiens
  ( 294 )...( 309 ): >O5F1_HUMAN
SKEVKKALANVISRKR

SEQ ID NO: 15785 - protein, 16 aa, Homo sapiens
  ( 295 )...( 310 ): >O5F1_HUMAN
KEVKKALANVISRKRT

SEQ ID NO: 15786 - protein, 16 aa, Homo sapiens
  ( 296 )...( 311 ): >O5F1_HUMAN
EVKKALANVISRKRTS

SEQ ID NO: 15787 - protein, 16 aa, Homo sapiens
  ( 297 )...( 312 ): >O5F1_HUMAN
VKKALANVISRKRTSS

SEQ ID NO: 15788 - protein, 16 aa, Homo sapiens
  ( 298 )...( 313 ): >O5F1_HUMAN
KKALANVISRKRTSSF

SEQ ID NO: 15789 - protein, 16 aa, Homo sapiens
  ( 299 )...( 314 ): >O5F1_HUMAN
KALANVISRKRTSSFL

SEQ ID NO: 15790 - protein, 15 aa, Homo sapiens
  ( 300 )...( 315 ): >O5F1_HUMAN
ALANVISRKRTSSFL

SEQ ID NO: 15791 - protein, 14 aa, Homo sapiens
  ( 301 )...( 316 ): >O5F1_HUMAN
LANVISRKRTSSFL

SEQ ID NO: 15792 - protein, 16 aa, Homo sapiens
  ( 221 )...( 236 ): >O5I1_HUMAN
FFILLSVLKIRSFSGR

SEQ ID NO: 15793 - protein, 16 aa, Homo sapiens
  ( 222 )...( 237 ): >O5I1_HUMAN
FILLSVLKIRSFSGRK

SEQ ID NO: 15794 - protein, 16 aa, Homo sapiens
  ( 223 )...( 238 ): >O5I1_HUMAN
ILLSVLKIRSFSGRKK

SEQ ID NO: 15795 - protein, 16 aa, Homo sapiens
  ( 224 )...( 239 ): >O5I1_HUMAN
LLSVLKIRSFSGRKKT

SEQ ID NO: 15796 - protein, 16 aa, Homo sapiens
  ( 225 )...( 240 ): >O5I1_HUMAN
LSVLKIRSFSGRKKTF

SEQ ID NO: 15797 - protein, 16 aa, Homo sapiens
  ( 226 )...( 241 ): >O5I1_HUMAN
SVLKIRSFSGRKKTFS

SEQ ID NO: 15798 - protein, 16 aa, Homo sapiens
  ( 227 )...( 242 ): >O5I1_HUMAN
VLKIRSFSGRKKTFST

SEQ ID NO: 15799 - protein, 16 aa, Homo sapiens
  ( 228 )...( 243 ): >O5I1_HUMAN
LKIRSFSGRKKTFSTC

SEQ ID NO: 15800 - protein, 16 aa, Homo sapiens
  ( 286 )...( 301 ): >O5U1_HUMAN
VIYSLRNDSMKAALRK

SEQ ID NO: 15801 - protein, 16 aa, Homo sapiens
  ( 290 )...( 305 ): >O5U1_HUMAN
LRNDSMKAALRKMLSK

SEQ ID NO: 15802 - protein, 16 aa, Homo sapiens
  ( 296 )...( 311 ): >O5U1_HUMAN
KAALRKMLSKEELPQR

SEQ ID NO: 15803 - protein, 16 aa, Homo sapiens
  ( 297 )...( 312 ): >O5U1_HUMAN
AALRKMLSKEELPQRK

SEQ ID NO: 15804 - protein, 15 aa, Homo sapiens
  ( 307 )...( 322 ): >O5U1_HUMAN
ELPQRKMCLKAMFKL

SEQ ID NO: 15805 - protein, 16 aa, Homo sapiens
  ( 221 )...( 236 ): >O5V1_HUMAN
IISTILRIQSSEGRRK

SEQ ID NO: 15806 - protein, 16 aa, Homo sapiens
  ( 222 )...( 237 ): >O5V1_HUMAN
ISTILRIQSSEGRRKA

SEQ ID NO: 15807 - protein, 16 aa, Homo sapiens
  ( 223 )...( 238 ): >O5V1_HUMAN
STILRIQSSEGRRKAF

SEQ ID NO: 15808 - protein, 16 aa, Homo sapiens
  ( 224 )...( 239 ): >O5V1_HUMAN
TILRIQSSEGRRKAFS

SEQ ID NO: 15809 - protein, 16 aa, Homo sapiens
  ( 225 )...( 240 ): >O5V1_HUMAN
ILRIQSSEGRRKAFST

SEQ ID NO: 15810 - protein, 16 aa, Homo sapiens
  ( 226 )...( 241 ): >O5V1_HUMAN
LRIQSSEGRRKAFSTC

SEQ ID NO: 15811 - protein, 16 aa, Homo sapiens
  ( 258 )...( 273 ): >O5V1_HUMAN
TYVRPISTYSLKKDRL

SEQ ID NO: 15812 - protein, 16 aa, Homo sapiens
  ( 259 )...( 274 ): >O5V1_HUMAN
YVRPISTYSLKKDRLV

SEQ ID NO: 15813 - protein, 16 aa, Homo sapiens
  ( 260 )...( 275 ): >O5V1_HUMAN
VRPISTYSLKKDRLVS

SEQ ID NO: 15814 - protein, 16 aa, Homo sapiens
  ( 261 )...( 276 ): >O5V1_HUMAN
RPISTYSLKKDRLVSV

SEQ ID NO: 15815 - protein, 16 aa, Homo sapiens
  ( 293 )...( 308 ): >O5V1_HUMAN
RNKDIKEAVKTIGSKW

SEQ ID NO: 15816 - protein, 16 aa, Homo sapiens
  ( 287 )...( 302 ): >O6B1_HUMAN
IYCLRNREVKEALKKL

SEQ ID NO: 15817 - protein, 16 aa, Homo sapiens
  ( 288 )...( 303 ): >O6B1_HUMAN
YCLRNREVKEALKKLA

SEQ ID NO: 15818 - protein, 16 aa, Homo sapiens
  ( 289 )...( 304 ): >O6B1_HUMAN
CLRNREVKEALKKLAY

SEQ ID NO: 15819 - protein, 16 aa, Homo sapiens
  ( 290 )...( 305 ): >O6B1_HUMAN
LRNREVKEALKKLAYC

SEQ ID NO: 15820 - protein, 16 aa, Homo sapiens
  ( 288 )...( 303 ): >O7A5_HUMAN
FIYSLRNKDIKRALGI

SEQ ID NO: 15821 - protein, 16 aa, Homo sapiens
  ( 289 )...( 304 ): >O7A5_HUMAN
IYSLRNKDIKRALGIH

SEQ ID NO: 15822 - protein, 16 aa, Homo sapiens
  ( 290 )...( 305 ): >O7A5_HUMAN
YSLRNKDIKRALGIHL

SEQ ID NO: 15823 - protein, 16 aa, Homo sapiens
  ( 291 )...( 306 ): >O7A5_HUMAN
SLRNKDIKRALGIHLL

SEQ ID NO: 15824 - protein, 16 aa, Homo sapiens
  ( 293 )...( 308 ): >O7A5_HUMAN
RNKDIKRALGIHLLWG

SEQ ID NO: 15825 - protein, 16 aa, Homo sapiens
  ( 297 )...( 312 ): >O7A5_HUMAN
IKRALGIHLLWGTMKG

SEQ ID NO: 15826 - protein, 16 aa, Homo sapiens
  ( 298 )...( 313 ): >O7A5_HUMAN
KRALGIHLLWGTMKGQ

SEQ ID NO: 15827 - protein, 16 aa, Homo sapiens
  ( 288 )...( 303 ): >O7AA_HUMAN
FIYSLRNKHIKGAMKT

SEQ ID NO: 15828 - protein, 16 aa, Homo sapiens
  ( 289 )...( 304 ): >O7AA_HUMAN
IYSLRNKHIKGAMKTF

SEQ ID NO: 15829 - protein, 16 aa, Homo sapiens
  ( 292 )...( 307 ): >O7AA_HUMAN
LRNKHIKGAMKTFFRG

SEQ ID NO: 15830 - protein, 16 aa, Homo sapiens
  ( 294 )...( 309 ): >O7AA_HUMAN
NKHIKGAMKTFFRGKQ

SEQ ID NO: 15831 - protein, 15 aa, Homo sapiens
  ( 295 )...( 310 ): >O7AA_HUMAN
KHIKGAMKTFFRGKQ

SEQ ID NO: 15832 - protein, 14 aa, Homo sapiens
  ( 296 )...( 311 ): >O7AA_HUMAN
HIKGAMKTFFRGKQ

SEQ ID NO: 15833 - protein, 13 aa, Homo sapiens
  ( 297 )...( 312 ): >O7AA_HUMAN
IKGAMKTFFRGKQ

SEQ ID NO: 15834 - protein, 13 aa, Homo sapiens
  ( 297 )...( 312 ): >O7AH_HUMAN
IKRALKMSFRGKQ

SEQ ID NO: 15835 - protein, 16 aa, Homo sapiens
  ( 218 )...( 233 ): >O7C1_HUMAN
YYKIVFSILRISSAGR

SEQ ID NO: 15836 - protein, 16 aa, Homo sapiens
  ( 219 )...( 234 ): >O7C1_HUMAN
YKIVFSILRISSAGRK

SEQ ID NO: 15837 - protein, 16 aa, Homo sapiens
  ( 220 )...( 235 ): >O7C1_HUMAN
KIVFSILRISSAGRKH

SEQ ID NO: 15838 - protein, 16 aa, Homo sapiens
  ( 221 )...( 236 ): >O7C1_HUMAN
IVFSILRISSAGRKHK

SEQ ID NO: 15839 - protein, 16 aa, Homo sapiens
  ( 222 )...( 237 ): >O7C1_HUMAN
VFSILRISSAGRKHKA

SEQ ID NO: 15840 - protein, 16 aa, Homo sapiens
  ( 223 )...( 238 ): >O7C1_HUMAN
FSILRISSAGRKHKAF

SEQ ID NO: 15841 - protein, 16 aa, Homo sapiens
  ( 224 )...( 239 ): >O7C1_HUMAN
SILRISSAGRKHKAFS

SEQ ID NO: 15842 - protein, 16 aa, Homo sapiens
  ( 225 )...( 240 ): >O7C1_HUMAN
ILRISSAGRKHKAFST

SEQ ID NO: 15843 - protein, 16 aa, Homo sapiens
  ( 289 )...( 304 ): >O7C1_HUMAN
IYSLRNTDMKRALGRL

SEQ ID NO: 15844 - protein, 16 aa, Homo sapiens
  ( 290 )...( 305 ): >O7C1_HUMAN
YSLRNTDMKRALGRLL

SEQ ID NO: 15845 - protein, 16 aa, Homo sapiens
  ( 291 )...( 306 ): >O7C1_HUMAN
SLRNTDMKRALGRLLS

SEQ ID NO: 15846 - protein, 16 aa, Homo sapiens
  ( 292 )...( 307 ): >O7C1_HUMAN
LRNTDMKRALGRLLSR

SEQ ID NO: 15847 - protein, 16 aa, Homo sapiens
  ( 293 )...( 308 ): >O7C1_HUMAN
RNTDMKRALGRLLSRA

SEQ ID NO: 15848 - protein, 16 aa, Homo sapiens
  ( 294 )...( 309 ): >O7C1_HUMAN
NTDMKRALGRLLSRAT

SEQ ID NO: 15849 - protein, 16 aa, Homo sapiens
  ( 295 )...( 310 ): >O7C1_HUMAN
TDMKRALGRLLSRATF

SEQ ID NO: 15850 - protein, 16 aa, Homo sapiens
  ( 296 )...( 311 ): >O7C1_HUMAN
DMKRALGRLLSRATFF

SEQ ID NO: 15851 - protein, 16 aa, Homo sapiens
  ( 297 )...( 312 ): >O7C1_HUMAN
MKRALGRLLSRATFFN

SEQ ID NO: 15852 - protein, 16 aa, Homo sapiens
  ( 298 )...( 313 ): >O7C1_HUMAN
KRALGRLLSRATFFNG

SEQ ID NO: 15853 - protein, 16 aa, Homo sapiens
  ( 289 )...( 304 ): >O7C2_HUMAN
IYSLRNKDMKGSLGRL

SEQ ID NO: 15854 - protein, 16 aa, Homo sapiens
  ( 290 )...( 305 ): >O7C2_HUMAN
YSLRNKDMKGSLGRLL

SEQ ID NO: 15855 - protein, 16 aa, Homo sapiens
  ( 291 )...( 306 ): >O7C2_HUMAN
SLRNKDMKGSLGRLLL

SEQ ID NO: 15856 - protein, 16 aa, Homo sapiens
  ( 292 )...( 307 ): >O7C2_HUMAN
LRNKDMKGSLGRLLLR

SEQ ID NO: 15857 - protein, 16 aa, Homo sapiens
  ( 293 )...( 308 ): >O7C2_HUMAN
RNKDMKGSLGRLLLRA

SEQ ID NO: 15858 - protein, 16 aa, Homo sapiens
  ( 294 )...( 309 ): >O7C2_HUMAN
NKDMKGSLGRLLLRAT

SEQ ID NO: 15859 - protein, 16 aa, Homo sapiens
  ( 295 )...( 310 ): >O7C2_HUMAN
KDMKGSLGRLLLRATS

SEQ ID NO: 15860 - protein, 16 aa, Homo sapiens
  ( 297 )...( 312 ): >O7C2_HUMAN
MKGSLGRLLLRATSLK

SEQ ID NO: 15861 - protein, 16 aa, Homo sapiens
  ( 298 )...( 313 ): >O7C2_HUMAN
KGSLGRLLLRATSLKE

SEQ ID NO: 15862 - protein, 16 aa, Homo sapiens
  ( 303 )...( 318 ): >O7C2_HUMAN
RLLLRATSLKEGTIAK

SEQ ID NO: 15863 - protein, 16 aa, Homo sapiens
  ( 287 )...( 302 ): >O8B8_HUMAN
PLIYSLRNKDVKVALK

SEQ ID NO: 15864 - protein, 16 aa, Homo sapiens
  ( 288 )...( 303 ): >O8B8_HUMAN
LIYSLRNKDVKVALKK

SEQ ID NO: 15865 - protein, 16 aa, Homo sapiens
  ( 289 )...( 304 ): >O8B8_HUMAN
IYSLRNKDVKVALKKI

SEQ ID NO: 15866 - protein, 16 aa, Homo sapiens
  ( 290 )...( 305 ): >O8B8_HUMAN
YSLRNKDVKVALKKIL

SEQ ID NO: 15867 - protein, 16 aa, Homo sapiens
  ( 291 )...( 306 ): >O8B8_HUMAN
SLRNKDVKVALKKILN

SEQ ID NO: 15868 - protein, 16 aa, Homo sapiens
  ( 292 )...( 307 ): >O8B8_HUMAN
LRNKDVKVALKKILNK

SEQ ID NO: 15869 - protein, 16 aa, Homo sapiens
  ( 294 )...( 309 ): >O8B8_HUMAN
NKDVKVALKKILNKNA

SEQ ID NO: 15870 - protein, 16 aa, Homo sapiens
  ( 295 )...( 310 ): >O8B8_HUMAN
KDVKVALKKILNKNAF

SEQ ID NO: 15871 - protein, 15 aa, Homo sapiens
  ( 297 )...( 312 ): >O8B8_HUMAN
VKVALKKILNKNAFS

SEQ ID NO: 15872 - protein, 14 aa, Homo sapiens
  ( 298 )...( 313 ): >O8B8_HUMAN
KVALKKILNKNAFS

SEQ ID NO: 15873 - protein, 16 aa, Homo sapiens
  ( 292 )...( 307 ): >O8D2_HUMAN
LRNKDVKNALKKMTRG

SEQ ID NO: 15874 - protein, 16 aa, Homo sapiens
  ( 295 )...( 310 ): >O8D2_HUMAN
KDVKNALKKMTRGRQS

SEQ ID NO: 15875 - protein, 16 aa, Homo sapiens
  ( 296 )...( 311 ): >O8D2_HUMAN
DVKNALKKMTRGRQSS

SEQ ID NO: 15876 - protein, 15 aa, Homo sapiens
  ( 297 )...( 312 ): >O8D2_HUMAN
VKNALKKMTRGRQSS

SEQ ID NO: 15877 - protein, 14 aa, Homo sapiens
  ( 298 )...( 313 ): >O8D2_HUMAN
KNALKKMTRGRQSS

SEQ ID NO: 15878 - protein, 16 aa, Homo sapiens
  ( 219 )...( 234 ): >OAA3_HUMAN
IRVLFAILKMPSTTGR

SEQ ID NO: 15879 - protein, 16 aa, Homo sapiens
  ( 220 )...( 235 ): >OAA3_HUMAN
RVLFAILKMPSTTGRQ

SEQ ID NO: 15880 - protein, 16 aa, Homo sapiens
  ( 221 )...( 236 ): >OAA3_HUMAN
VLFAILKMPSTTGRQK

SEQ ID NO: 15881 - protein, 16 aa, Homo sapiens
  ( 222 )...( 237 ): >OAA3_HUMAN
LFAILKMPSTTGRQKA

SEQ ID NO: 15882 - protein, 16 aa, Homo sapiens
  ( 288 )...( 303 ): >OAA3_HUMAN
LIYSLRNSEMKRTLIK

SEQ ID NO: 15883 - protein, 16 aa, Homo sapiens
  ( 289 )...( 304 ): >OAA3_HUMAN
IYSLRNSEMKRTLIKL

SEQ ID NO: 15884 - protein, 16 aa, Homo sapiens
  ( 288 )...( 303 ): >OAA4_HUMAN
PIIYSSRNKEVKAALK

SEQ ID NO: 15885 - protein, 16 aa, Homo sapiens
  ( 289 )...( 304 ): >OAA4_HUMAN
IIYSSRNKEVKAALKR

SEQ ID NO: 15886 - protein, 16 aa, Homo sapiens
  ( 290 )...( 305 ): >OAA4_HUMAN
IYSSRNKEVKAALKRL

SEQ ID NO: 15887 - protein, 16 aa, Homo sapiens
  ( 291 )...( 306 ): >OAA4_HUMAN
YSSRNKEVKAALKRLI

SEQ ID NO: 15888 - protein, 16 aa, Homo sapiens
  ( 292 )...( 307 ): >OAA4_HUMAN
SSRNKEVKAALKRLIH

SEQ ID NO: 15889 - protein, 16 aa, Homo sapiens
  ( 295 )...( 310 ): >OAA4_HUMAN
NKEVKAALKRLIHRTL

SEQ ID NO: 15890 - protein, 16 aa, Homo sapiens
  ( 296 )...( 311 ): >OAA4_HUMAN
KEVKAALKRLIHRTLG

SEQ ID NO: 15891 - protein, 16 aa, Homo sapiens
  ( 297 )...( 312 ): >OAA4_HUMAN
EVKAALKRLIHRTLGS

SEQ ID NO: 15892 - protein, 16 aa, Homo sapiens
  ( 298 )...( 313 ): >OAA4_HUMAN
VKAALKRLIHRTLGSQ

SEQ ID NO: 15893 - protein, 16 aa, Homo sapiens
  ( 299 )...( 314 ): >OAA4_HUMAN
KAALKRLIHRTLGSQK

SEQ ID NO: 15894 - protein, 16 aa, Homo sapiens
  ( 300 )...( 315 ): >OAA4_HUMAN
AALKRLIHRTLGSQKL

SEQ ID NO: 15895 - protein, 15 aa, Homo sapiens
  ( 301 )...( 316 ): >OAA4_HUMAN
ALKRLIHRTLGSQKL

SEQ ID NO: 15896 - protein, 14 aa, Homo sapiens
  ( 302 )...( 317 ): >OAA4_HUMAN
LKRLIHRTLGSQKL

SEQ ID NO: 15897 - protein, 13 aa, Homo sapiens
  ( 303 )...( 318 ): >OAA4_HUMAN
KRLIHRTLGSQKL

SEQ ID NO: 15898 - protein, 16 aa, Homo sapiens
  ( 131 )...( 146 ): >OAA5_HUMAN
LHYPVIMNQRTRAKLA

SEQ ID NO: 15899 - protein, 16 aa, Homo sapiens
  ( 132 )...( 147 ): >OAA5_HUMAN
HYPVIMNQRTRAKLAA

SEQ ID NO: 15900 - protein, 16 aa, Homo sapiens
  ( 133 )...( 148 ): >OAA5_HUMAN
YPVIMNQRTRAKLAAA

SEQ ID NO: 15901 - protein, 16 aa, Homo sapiens
  ( 134 )...( 149 ): >OAA5_HUMAN
PVIMNQRTRAKLAAAS

SEQ ID NO: 15902 - protein, 16 aa, Homo sapiens
  ( 135 )...( 150 ): >OAA5_HUMAN
VIMNQRTRAKLAAASW

SEQ ID NO: 15903 - protein, 16 aa, Homo sapiens
  ( 218 )...( 233 ): >OAA5_HUMAN
SYTRIAAAILKIPSAK

SEQ ID NO: 15904 - protein, 16 aa, Homo sapiens
  ( 219 )...( 234 ): >OAA5_HUMAN
YTRIAAAILKIPSAKG

SEQ ID NO: 15905 - protein, 16 aa, Homo sapiens
  ( 221 )...( 236 ): >OAA5_HUMAN
RIAAAILKIPSAKGKH

SEQ ID NO: 15906 - protein, 16 aa, Homo sapiens
  ( 298 )...( 313 ): >OAA5_HUMAN
VKNALSRTFHKVLALR

SEQ ID NO: 15907 - protein, 16 aa, Homo sapiens
  ( 299 )...( 314 ): >OAA5_HUMAN
KNALSRTFHKVLALRN

SEQ ID NO: 15908 - protein, 16 aa, Homo sapiens
  ( 301 )...( 316 ): >OAA5_HUMAN
ALSRTFHKVLALRNCI

SEQ ID NO: 15909 - protein, 16 aa, Homo sapiens
  ( 83 )...( 98 ): >OAC1_HUMAN
HLLTGRRHISRSGCAL

SEQ ID NO: 15910 - protein, 16 aa, Homo sapiens
  ( 84 )...( 99 ): >OAC1_HUMAN
LLTGRRHISRSGCALQ

SEQ ID NO: 15911 - protein, 16 aa, Homo sapiens
  ( 85 )...( 100 ): >OAC1_HUMAN
LTGRRHISRSGCALQM

SEQ ID NO: 15912 - protein, 16 aa, Homo sapiens
  ( 218 )...( 233 ): >OAC1_HUMAN
GRILVTIFRIPSVAGR

SEQ ID NO: 15913 - protein, 16 aa, Homo sapiens
  ( 219 )...( 234 ): >OAC1_HUMAN
RILVTIFRIPSVAGRR

SEQ ID NO: 15914 - protein, 16 aa, Homo sapiens
  ( 220 )...( 235 ): >OAC1_HUMAN
ILVTIFRIPSVAGRRK

SEQ ID NO: 15915 - protein, 16 aa, Homo sapiens
  ( 221 )...( 236 ): >OAC1_HUMAN
LVTIFRIPSVAGRRKA

SEQ ID NO: 15916 - protein, 16 aa, Homo sapiens
  ( 222 )...( 237 ): >OAC1_HUMAN
VTIFRIPSVAGRRKAF

SEQ ID NO: 15917 - protein, 16 aa, Homo sapiens
  ( 223 )...( 238 ): >OAC1_HUMAN
TIFRIPSVAGRRKAFS

SEQ ID NO: 15918 - protein, 16 aa, Homo sapiens
  ( 224 )...( 239 ): >OAC1_HUMAN
IFRIPSVAGRRKAFST

SEQ ID NO: 15919 - protein, 16 aa, Homo sapiens
  ( 287 )...( 302 ): >OAC1_HUMAN
IIYSLRNTEVKAALKR

SEQ ID NO: 15920 - protein, 16 aa, Homo sapiens
  ( 288 )...( 303 ): >OAC1_HUMAN
IYSLRNTEVKAALKRT

SEQ ID NO: 15921 - protein, 16 aa, Homo sapiens
  ( 289 )...( 304 ): >OAC1_HUMAN
YSLRNTEVKAALKRTI

SEQ ID NO: 15922 - protein, 16 aa, Homo sapiens
  ( 290 )...( 305 ): >OAC1_HUMAN
SLRNTEVKAALKRTIQ

SEQ ID NO: 15923 - protein, 16 aa, Homo sapiens
  ( 291 )...( 306 ): >OAC1_HUMAN
LRNTEVKAALKRTIQK

SEQ ID NO: 15924 - protein, 16 aa, Homo sapiens
  ( 292 )...( 307 ): >OAC1_HUMAN
RNTEVKAALKRTIQKT

SEQ ID NO: 15925 - protein, 16 aa, Homo sapiens
  ( 295 )...( 310 ): >OAC1_HUMAN
EVKAALKRTIQKTVPM

SEQ ID NO: 15926 - protein, 16 aa, Homo sapiens
  ( 296 )...( 311 ): >OAC1_HUMAN
VKAALKRTIQKTVPME

SEQ ID NO: 15927 - protein, 16 aa, Homo sapiens
  ( 297 )...( 312 ): >OAC1_HUMAN
KAALKRTIQKTVPMEI

SEQ ID NO: 15928 - protein, 16 aa, Homo sapiens
  ( 288 )...( 303 ): >OAH1_HUMAN
PIIFSLRNKELKVAMK

SEQ ID NO: 15929 - protein, 16 aa, Homo sapiens
  ( 289 )...( 304 ): >OAH1_HUMAN
IIFSLRNKELKVAMKK

SEQ ID NO: 15930 - protein, 16 aa, Homo sapiens
  ( 290 )...( 305 ): >OAH1_HUMAN
IFSLRNKELKVAMKKT

SEQ ID NO: 15931 - protein, 16 aa, Homo sapiens
  ( 295 )...( 310 ): >OAH1_HUMAN
NKELKVAMKKTFFSKL

SEQ ID NO: 15932 - protein, 16 aa, Homo sapiens
  ( 288 )...( 303 ): >OAH2_HUMAN
PIIFSLRNKELKVAMK

SEQ ID NO: 15933 - protein, 16 aa, Homo sapiens
  ( 289 )...( 304 ): >OAH2_HUMAN
IIFSLRNKELKVAMKR

SEQ ID NO: 15934 - protein, 16 aa, Homo sapiens
  ( 290 )...( 305 ): >OAH2_HUMAN
IFSLRNKELKVAMKRT

SEQ ID NO: 15935 - protein, 16 aa, Homo sapiens
  ( 292 )...( 307 ): >OAH2_HUMAN
SLRNKELKVAMKRTFL

SEQ ID NO: 15936 - protein, 16 aa, Homo sapiens
  ( 293 )...( 308 ): >OAH2_HUMAN
LRNKELKVAMKRTFLS

SEQ ID NO: 15937 - protein, 16 aa, Homo sapiens
  ( 294 )...( 309 ): >OAH2_HUMAN
RNKELKVAMKRTFLST

SEQ ID NO: 15938 - protein, 16 aa, Homo sapiens
  ( 144 )...( 159 ): >OAJ1_HUMAN
MVIMNKRLRIQLVLGA

SEQ ID NO: 15939 - protein, 16 aa, Homo sapiens
  ( 145 )...( 160 ): >OAJ1_HUMAN
VIMNKRLRIQLVLGAC

SEQ ID NO: 15940 - protein, 16 aa, Homo sapiens
  ( 146 )...( 161 ): >OAJ1_HUMAN
IMNKRLRIQLVLGACS

SEQ ID NO: 15941 - protein, 16 aa, Homo sapiens
  ( 147 )...( 162 ): >OAJ1_HUMAN
MNKRLRIQLVLGACSI

SEQ ID NO: 15942 - protein, 16 aa, Homo sapiens
  ( 148 )...( 163 ): >OAJ1_HUMAN
NKRLRIQLVLGACSIG

SEQ ID NO: 15943 - protein, 16 aa, Homo sapiens
  ( 168 )...( 183 ): >OAJ1_HUMAN
ITQVTSVFRLPFCARK

SEQ ID NO: 15944 - protein, 16 aa, Homo sapiens
  ( 169 )...( 184 ): >OAJ1_HUMAN
TQVTSVFRLPFCARKV

SEQ ID NO: 15945 - protein, 16 aa, Homo sapiens
  ( 234 )...( 249 ): >OAJ1_HUMAN
TILKIASVEGRKKAFA

SEQ ID NO: 15946 - protein, 16 aa, Homo sapiens
  ( 235 )...( 250 ): >OAJ1_HUMAN
ILKIASVEGRKKAFAT

SEQ ID NO: 15947 - protein, 16 aa, Homo sapiens
  ( 236 )...( 251 ): >OAJ1_HUMAN
LKIASVEGRKKAFATC

SEQ ID NO: 15948 - protein, 16 aa, Homo sapiens
  ( 303 )...( 318 ): >OAJ1_HUMAN
RNKEVKDALCRAVGGK

SEQ ID NO: 15949 - protein, 16 aa, Homo sapiens
  ( 221 )...( 236 ): >OBA1_HUMAN
RIVVAVLRVPAGASRR

SEQ ID NO: 15950 - protein, 16 aa, Homo sapiens
  ( 222 )...( 237 ): >OBA1_HUMAN
IVVAVLRVPAGASRRR

SEQ ID NO: 15951 - protein, 16 aa, Homo sapiens
  ( 223 )...( 238 ): >OBA1_HUMAN
VVAVLRVPAGASRRRA

SEQ ID NO: 15952 - protein, 16 aa, Homo sapiens
  ( 224 )...( 239 ): >OBA1_HUMAN
VAVLRVPAGASRRRAF

SEQ ID NO: 15953 - protein, 16 aa, Homo sapiens
  ( 225 )...( 240 ): >OBA1_HUMAN
AVLRVPAGASRRRAFS

SEQ ID NO: 15954 - protein, 16 aa, Homo sapiens
  ( 226 )...( 241 ): >OBA1_HUMAN
VLRVPAGASRRRAFST

SEQ ID NO: 15955 - protein, 16 aa, Homo sapiens
  ( 292 )...( 307 ): >OBA1_HUMAN
TMRNKEVHQALRKILC

SEQ ID NO: 15956 - protein, 16 aa, Homo sapiens
  ( 293 )...( 308 ): >OBA1_HUMAN
MRNKEVHQALRKILCI

SEQ ID NO: 15957 - protein, 16 aa, Homo sapiens
  ( 294 )...( 309 ): >OBA1_HUMAN
RNKEVHQALRKILCIK

SEQ ID NO: 15958 - protein, 16 aa, Homo sapiens
  ( 295 )...( 310 ): >OBA1_HUMAN
NKEVHQALRKILCIKQ

SEQ ID NO: 15959 - protein, 16 aa, Homo sapiens
  ( 287 )...( 302 ): >OCD2_HUMAN
LIYTLRNKEVKGALGR

SEQ ID NO: 15960 - protein, 16 aa, Homo sapiens
  ( 288 )...( 303 ): >OCD2_HUMAN
IYTLRNKEVKGALGRV

SEQ ID NO: 15961 - protein, 16 aa, Homo sapiens
  ( 289 )...( 304 ): >OCD2_HUMAN
YTLRNKEVKGALGRVI

SEQ ID NO: 15962 - protein, 16 aa, Homo sapiens
  ( 290 )...( 305 ): >OCD2_HUMAN
TLRNKEVKGALGRVIR

SEQ ID NO: 15963 - protein, 16 aa, Homo sapiens
  ( 291 )...( 306 ): >OCD2_HUMAN
LRNKEVKGALGRVIRR

SEQ ID NO: 15964 - protein, 16 aa, Homo sapiens
  ( 292 )...( 307 ): >OCD2_HUMAN
RNKEVKGALGRVIRRL

SEQ ID NO: 15965 - protein, 15 aa, Homo sapiens
  ( 293 )...( 308 ): >OCD2_HUMAN
NKEVKGALGRVIRRL

SEQ ID NO: 15966 - protein, 14 aa, Homo sapiens
  ( 294 )...( 309 ): >OCD2_HUMAN
KEVKGALGRVIRRL

SEQ ID NO: 15967 - protein, 16 aa, Homo sapiens
  ( 73 )...( 88 ): >OCD3_HUMAN
SVTLPKLLVNLVCSRR

SEQ ID NO: 15968 - protein, 16 aa, Homo sapiens
  ( 74 )...( 89 ): >OCD3_HUMAN
VTLPKLLVNLVCSRRA

SEQ ID NO: 15969 - protein, 16 aa, Homo sapiens
  ( 75 )...( 90 ): >OCD3_HUMAN
TLPKLLVNLVCSRRAI

SEQ ID NO: 15970 - protein, 16 aa, Homo sapiens
  ( 76 )...( 91 ): >OCD3_HUMAN
LPKLLVNLVCSRRAIS

SEQ ID NO: 15971 - protein, 16 aa, Homo sapiens
  ( 78 )...( 93 ): >OCD3_HUMAN
KLLVNLVCSRRAISFL

SEQ ID NO: 15972 - protein, 16 aa, Homo sapiens
  ( 218 )...( 233 ): >OCD3_HUMAN
YVIGFLLFKNRSCRIL

SEQ ID NO: 15973 - protein, 16 aa, Homo sapiens
  ( 219 )...( 234 ): >OCD3_HUMAN
VIGFLLFKNRSCRILH

SEQ ID NO: 15974 - protein, 16 aa, Homo sapiens
  ( 221 )...( 236 ): >OCD3_HUMAN
GFLLFKNRSCRILHKA

SEQ ID NO: 15975 - protein, 16 aa, Homo sapiens
  ( 223 )...( 238 ): >OCD3_HUMAN
LLFKNRSCRILHKALS

SEQ ID NO: 15976 - protein, 16 aa, Homo sapiens
  ( 224 )...( 239 ): >OCD3_HUMAN
LFKNRSCRILHKALST

SEQ ID NO: 15977 - protein, 16 aa, Homo sapiens
  ( 287 )...( 302 ): >OCD3_HUMAN
LIYTLRNKEVMMALKK

SEQ ID NO: 15978 - protein, 16 aa, Homo sapiens
  ( 288 )...( 303 ): >OCD3_HUMAN
IYTLRNKEVMMALKKI

SEQ ID NO: 15979 - protein, 16 aa, Homo sapiens
  ( 289 )...( 304 ): >OCD3_HUMAN
YTLRNKEVMMALKKIF

SEQ ID NO: 15980 - protein, 16 aa, Homo sapiens
  ( 290 )...( 305 ): >OCD3_HUMAN
TLRNKEVMMALKKIFG

SEQ ID NO: 15981 - protein, 16 aa, Homo sapiens
  ( 291 )...( 306 ): >OCD3_HUMAN
LRNKEVMMALKKIFGR

SEQ ID NO: 15982 - protein, 16 aa, Homo sapiens
  ( 292 )...( 307 ): >OCD3_HUMAN
RNKEVMMALKKIFGRK

SEQ ID NO: 15983 - protein, 16 aa, Homo sapiens
  ( 293 )...( 308 ): >OCD3_HUMAN
NKEVMMALKKIFGRKL

SEQ ID NO: 15984 - protein, 16 aa, Homo sapiens
  ( 294 )...( 309 ): >OCD3_HUMAN
KEVMMALKKIFGRKLF

SEQ ID NO: 15985 - protein, 16 aa, Homo sapiens
  ( 295 )...( 310 ): >OCD3_HUMAN
EVMMALKKIFGRKLFK

SEQ ID NO: 15986 - protein, 16 aa, Homo sapiens
  ( 296 )...( 311 ): >OCD3_HUMAN
VMMALKKIFGRKLFKD

SEQ ID NO: 15987 - protein, 16 aa, Homo sapiens
  ( 7 )...( 22 ): >OL1F_HUMAN
ISVTVPSMLSRLLSRK

SEQ ID NO: 15988 - protein, 16 aa, Homo sapiens
  ( 8 )...( 23 ): >OL1F_HUMAN
SVTVPSMLSRLLSRKR

SEQ ID NO: 15989 - protein, 16 aa, Homo sapiens
  ( 9 )...( 24 ): >OL1F_HUMAN
VTVPSMLSRLLSRKRA

SEQ ID NO: 15990 - protein, 16 aa, Homo sapiens
  ( 10 )...( 25 ): >OL1F_HUMAN
TVPSMLSRLLSRKRAV

SEQ ID NO: 15991 - protein, 16 aa, Homo sapiens
  ( 11 )...( 26 ): >OL1F_HUMAN
VPSMLSRLLSRKRAVP

SEQ ID NO: 15992 - protein, 16 aa, Homo sapiens
  ( 14 )...( 29 ): >OL1F_HUMAN
MLSRLLSRKRAVPCGA

SEQ ID NO: 15993 - protein, 16 aa, Homo sapiens
  ( 60 )...( 75 ): >OL1F_HUMAN
CRSLTYSTRMSQTVQR

SEQ ID NO: 15994 - protein, 16 aa, Homo sapiens
  ( 61 )...( 76 ): >OL1F_HUMAN
RSLTYSTRMSQTVQRM

SEQ ID NO: 15995 - protein, 16 aa, Homo sapiens
  ( 153 )...( 168 ): >OL1F_HUMAN
HVAAAVLRIRSVEGRK

SEQ ID NO: 15996 - protein, 16 aa, Homo sapiens
  ( 154 )...( 169 ): >OL1F_HUMAN
VAAAVLRIRSVEGRKK

SEQ ID NO: 15997 - protein, 16 aa, Homo sapiens
  ( 155 )...( 170 ): >OL1F_HUMAN
AAAVLRIRSVEGRKKA

SEQ ID NO: 15998 - protein, 16 aa, Homo sapiens
  ( 156 )...( 171 ): >OL1F_HUMAN
AAVLRIRSVEGRKKAF

SEQ ID NO: 15999 - protein, 16 aa, Homo sapiens
  ( 157 )...( 172 ): >OL1F_HUMAN
AVLRIRSVEGRKKAFS

SEQ ID NO: 16000 - protein, 16 aa, Homo sapiens
  ( 158 )...( 173 ): >OL1F_HUMAN
VLRIRSVEGRKKAFST

SEQ ID NO: 16001 - protein, 16 aa, Homo sapiens
  ( 159 )...( 174 ): >OL1F_HUMAN
LRIRSVEGRKKAFSTC

SEQ ID NO: 16002 - protein, 16 aa, Homo sapiens
  ( 160 )...( 175 ): >OL1F_HUMAN
RIRSVEGRKKAFSTCG

SEQ ID NO: 16003 - protein, 16 aa, Homo sapiens
  ( 55 )...( 70 ): >OL1I_HUMAN
RLLGICQALTYRTRMS

SEQ ID NO: 16004 - protein, 16 aa, Homo sapiens
  ( 60 )...( 75 ): >OL1I_HUMAN
CQALTYRTRMSQTVQR

SEQ ID NO: 16005 - protein, 16 aa, Homo sapiens
  ( 61 )...( 76 ): >OL1I_HUMAN
QALTYRTRMSQTVQRM

SEQ ID NO: 16006 - protein, 16 aa, Homo sapiens
  ( 62 )...( 77 ): >OL1I_HUMAN
ALTYRTRMSQTVQRML

SEQ ID NO: 16007 - protein, 16 aa, Homo sapiens
  ( 63 )...( 78 ): >OL1I_HUMAN
LTYRTRMSQTVQRMLV

SEQ ID NO: 16008 - protein, 16 aa, Homo sapiens
  ( 64 )...( 79 ): >OL1I_HUMAN
TYRTRMSQTVQRMLVA

SEQ ID NO: 16009 - protein, 16 aa, Homo sapiens
  ( 65 )...( 80 ): >OL1I_HUMAN
YRTRMSQTVQRMLVAA

SEQ ID NO: 16010 - protein, 16 aa, Homo sapiens
  ( 66 )...( 81 ): >OL1I_HUMAN
RTRMSQTVQRMLVAAS

SEQ ID NO: 16011 - protein, 16 aa, Homo sapiens
  ( 153 )...( 168 ): >OL1I_HUMAN
HVAAAVLRIRSVEGRK

SEQ ID NO: 16012 - protein, 16 aa, Homo sapiens
  ( 154 )...( 169 ): >OL1I_HUMAN
VAAAVLRIRSVEGRKK

SEQ ID NO: 16013 - protein, 16 aa, Homo sapiens
  ( 155 )...( 170 ): >OL1I_HUMAN
AAAVLRIRSVEGRKKA

SEQ ID NO: 16014 - protein, 16 aa, Homo sapiens
  ( 156 )...( 171 ): >OL1I_HUMAN
AAVLRIRSVEGRKKAF

SEQ ID NO: 16015 - protein, 16 aa, Homo sapiens
  ( 157 )...( 172 ): >OL1I_HUMAN
AVLRIRSVEGRKKAFS

SEQ ID NO: 16016 - protein, 16 aa, Homo sapiens
  ( 158 )...( 173 ): >OL1I_HUMAN
VLRIRSVEGRKKAFST

SEQ ID NO: 16017 - protein, 16 aa, Homo sapiens
  ( 159 )...( 174 ): >OL1I_HUMAN
LRIRSVEGRKKAFSTC

SEQ ID NO: 16018 - protein, 16 aa, Homo sapiens
  ( 160 )...( 175 ): >OL1I_HUMAN
RIRSVEGRKKAFSTCG

SEQ ID NO: 16019 - protein, 16 aa, Homo sapiens
  ( 153 )...( 168 ): >OL1L_HUMAN
HVAAAVLRIRSVEGRK

SEQ ID NO: 16020 - protein, 16 aa, Homo sapiens
  ( 154 )...( 169 ): >OL1L_HUMAN
VAAAVLRIRSVEGRKK

SEQ ID NO: 16021 - protein, 16 aa, Homo sapiens
  ( 155 )...( 170 ): >OL1L_HUMAN
AAAVLRIRSVEGRKKA

SEQ ID NO: 16022 - protein, 16 aa, Homo sapiens
  ( 156 )...( 171 ): >OL1L_HUMAN
AAVLRIRSVEGRKKAF

SEQ ID NO: 16023 - protein, 16 aa, Homo sapiens
  ( 157 )...( 172 ): >OL1L_HUMAN
AVLRIRSVEGRKKAFS

SEQ ID NO: 16024 - protein, 16 aa, Homo sapiens
  ( 158 )...( 173 ): >OL1L_HUMAN
VLRIRSVEGRKKAFST

SEQ ID NO: 16025 - protein, 16 aa, Homo sapiens
  ( 159 )...( 174 ): >OL1L_HUMAN
LRIRSVEGRKKAFSTC

SEQ ID NO: 16026 - protein, 16 aa, Homo sapiens
  ( 160 )...( 175 ): >OL1L_HUMAN
RIRSVEGRKKAFSTCG

SEQ ID NO: 16027 - protein, 16 aa, Homo sapiens
  ( 68 )...( 83 ): >OPN3_HUMAN
KFQRLRTPTHLLLVNI

SEQ ID NO: 16028 - protein, 16 aa, Homo sapiens
  ( 240 )...( 255 ): >OPN3_HUMAN
TIQVIKILKYEKKLAK

SEQ ID NO: 16029 - protein, 16 aa, Homo sapiens
  ( 241 )...( 256 ): >OPN3_HUMAN
IQVIKILKYEKKLAKM

SEQ ID NO: 16030 - protein, 16 aa, Homo sapiens
  ( 242 )...( 257 ): >OPN3_HUMAN
QVIKILKYEKKLAKMC

SEQ ID NO: 16031 - protein, 16 aa, Homo sapiens
  ( 243 )...( 258 ): >OPN3_HUMAN
VIKILKYEKKLAKMCF

SEQ ID NO: 16032 - protein, 16 aa, Homo sapiens
  ( 244 )...( 259 ): >OPN3_HUMAN
IKILKYEKKLAKMCFL

SEQ ID NO: 16033 - protein, 16 aa, Homo sapiens
  ( 245 )...( 260 ): >OPN3_HUMAN
KILKYEKKLAKMCFLM

SEQ ID NO: 16034 - protein, 16 aa, Homo sapiens
  ( 316 )...( 331 ): >OPN3_HUMAN
FRRSLLQLLCLRLLRC

SEQ ID NO: 16035 - protein, 16 aa, Homo sapiens
  ( 317 )...( 332 ): >OPN3_HUMAN
RRSLLQLLCLRLLRCQ

SEQ ID NO: 16036 - protein, 16 aa, Homo sapiens
  ( 318 )...( 333 ): >OPN3_HUMAN
RSLLQLLCLRLLRCQR

SEQ ID NO: 16037 - protein, 16 aa, Homo sapiens
  ( 319 )...( 334 ): >OPN3_HUMAN
SLLQLLCLRLLRCQRP

SEQ ID NO: 16038 - protein, 16 aa, Homo sapiens
  ( 320 )...( 335 ): >OPN3_HUMAN
LLQLLCLRLLRCQRPA

SEQ ID NO: 16039 - protein, 16 aa, Homo sapiens
  ( 321 )...( 336 ): >OPN3_HUMAN
LQLLCLRLLRCQRPAK

SEQ ID NO: 16040 - protein, 16 aa, Homo sapiens
  ( 322 )...( 337 ): >OPN3_HUMAN
QLLCLRLLRCQRPAKD

SEQ ID NO: 16041 - protein, 16 aa, Homo sapiens
  ( 323 )...( 338 ): >OPN3_HUMAN
LLCLRLLRCQRPAKDL

SEQ ID NO: 16042 - protein, 16 aa, Homo sapiens
  ( 326 )...( 341 ): >OPN3_HUMAN
LRLLRCQRPAKDLPAA

SEQ ID NO: 16043 - protein, 16 aa, Homo sapiens
  ( 347 )...( 362 ): >OPN3_HUMAN
IRPIVMSQKDGDRPKK

SEQ ID NO: 16044 - protein, 16 aa, Homo sapiens
  ( 349 )...( 364 ): >OPN3_HUMAN
PIVMSQKDGDRPKKKV

SEQ ID NO: 16045 - protein, 16 aa, Homo sapiens
  ( 359 )...( 374 ): >OPN3_HUMAN
RPKKKVTFNSSSIIFI

SEQ ID NO: 16046 - protein, 16 aa, Homo sapiens
  ( 87 )...( 102 ): >OPN4_HUMAN
GNLTVIYTFCRSRSLR

SEQ ID NO: 16047 - protein, 16 aa, Homo sapiens
  ( 88 )...( 103 ): >OPN4_HUMAN
NLTVIYTFCRSRSLRT

SEQ ID NO: 16048 - protein, 16 aa, Homo sapiens
  ( 89 )...( 104 ): >OPN4_HUMAN
LTVIYTFCRSRSLRTP

SEQ ID NO: 16049 - protein, 16 aa, Homo sapiens
  ( 170 )...( 185 ): >OPN4_HUMAN
LVITRPLATFGVASKR

SEQ ID NO: 16050 - protein, 16 aa, Homo sapiens
  ( 171 )...( 186 ): >OPN4_HUMAN
VITRPLATFGVASKRR

SEQ ID NO: 16051 - protein, 16 aa, Homo sapiens
  ( 172 )...( 187 ): >OPN4_HUMAN
ITRPLATFGVASKRRA

SEQ ID NO: 16052 - protein, 16 aa, Homo sapiens
  ( 173 )...( 188 ): >OPN4_HUMAN
TRPLATFGVASKRRAA

SEQ ID NO: 16053 - protein, 16 aa, Homo sapiens
  ( 174 )...( 189 ): >OPN4_HUMAN
RPLATFGVASKRRAAF

SEQ ID NO: 16054 - protein, 16 aa, Homo sapiens
  ( 176 )...( 191 ): >OPN4_HUMAN
LATFGVASKRRAAFVL

SEQ ID NO: 16055 - protein, 16 aa, Homo sapiens
  ( 177 )...( 192 ): >OPN4_HUMAN
ATFGVASKRRAAFVLL

SEQ ID NO: 16056 - protein, 16 aa, Homo sapiens
  ( 178 )...( 193 ): >OPN4_HUMAN
TFGVASKRRAAFVLLG

SEQ ID NO: 16057 - protein, 16 aa, Homo sapiens
  ( 179 )...( 194 ): >OPN4_HUMAN
FGVASKRRAAFVLLGV

SEQ ID NO: 16058 - protein, 16 aa, Homo sapiens
  ( 180 )...( 195 ): >OPN4_HUMAN
GVASKRRAAFVLLGVW

SEQ ID NO: 16059 - protein, 16 aa, Homo sapiens
  ( 181 )...( 196 ): >OPN4_HUMAN
VASKRRAAFVLLGVWL

SEQ ID NO: 16060 - protein, 16 aa, Homo sapiens
  ( 182 )...( 197 ): >OPN4_HUMAN
ASKRRAAFVLLGVWLY

SEQ ID NO: 16061 - protein, 16 aa, Homo sapiens
  ( 183 )...( 198 ): >OPN4_HUMAN
SKRRAAFVLLGVWLYA

SEQ ID NO: 16062 - protein, 16 aa, Homo sapiens
  ( 284 )...( 299 ): >OPN4_HUMAN
QRQRLQSECKMAKIML

SEQ ID NO: 16063 - protein, 16 aa, Homo sapiens
  ( 285 )...( 300 ): >OPN4_HUMAN
RQRLQSECKMAKIMLL

SEQ ID NO: 16064 - protein, 16 aa, Homo sapiens
  ( 365 )...( 380 ): >OPN4_HUMAN
LPCLGVLLGVSRRHSR

SEQ ID NO: 16065 - protein, 16 aa, Homo sapiens
  ( 368 )...( 383 ): >OPN4_HUMAN
LGVLLGVSRRHSRPYP

SEQ ID NO: 16066 - protein, 16 aa, Homo sapiens
  ( 66 )...( 81 ): >OPRD_HUMAN
GNVLVMFGIVRYTKMK

SEQ ID NO: 16067 - protein, 16 aa, Homo sapiens
  ( 67 )...( 82 ): >OPRD_HUMAN
NVLVMFGIVRYTKMKT

SEQ ID NO: 16068 - protein, 16 aa, Homo sapiens
  ( 68 )...( 83 ): >OPRD_HUMAN
VLVMFGIVRYTKMKTA

SEQ ID NO: 16069 - protein, 16 aa, Homo sapiens
  ( 69 )...( 84 ): >OPRD_HUMAN
LVMFGIVRYTKMKTAT

SEQ ID NO: 16070 - protein, 16 aa, Homo sapiens
  ( 70 )...( 85 ): >OPRD_HUMAN
VMFGIVRYTKMKTATN

SEQ ID NO: 16071 - protein, 16 aa, Homo sapiens
  ( 71 )...( 86 ): >OPRD_HUMAN
MFGIVRYTKMKTATNI

SEQ ID NO: 16072 - protein, 16 aa, Homo sapiens
  ( 72 )...( 87 ): >OPRD_HUMAN
FGIVRYTKMKTATNIY

SEQ ID NO: 16073 - protein, 16 aa, Homo sapiens
  ( 73 )...( 88 ): >OPRD_HUMAN
GIVRYTKMKTATNIYI

SEQ ID NO: 16074 - protein, 16 aa, Homo sapiens
  ( 74 )...( 89 ): >OPRD_HUMAN
IVRYTKMKTATNIYIF

SEQ ID NO: 16075 - protein, 16 aa, Homo sapiens
  ( 75 )...( 90 ): >OPRD_HUMAN
VRYTKMKTATNIYIFN

SEQ ID NO: 16076 - protein, 16 aa, Homo sapiens
  ( 153 )...( 168 ): >OPRD_HUMAN
PVKALDFRTPAKAKLI

SEQ ID NO: 16077 - protein, 16 aa, Homo sapiens
  ( 154 )...( 169 ): >OPRD_HUMAN
VKALDFRTPAKAKLIN

SEQ ID NO: 16078 - protein, 16 aa, Homo sapiens
  ( 155 )...( 170 ): >OPRD_HUMAN
KALDFRTPAKAKLINI

SEQ ID NO: 16079 - protein, 16 aa, Homo sapiens
  ( 160 )...( 175 ): >OPRD_HUMAN
RTPAKAKLINICIWVL

SEQ ID NO: 16080 - protein, 16 aa, Homo sapiens
  ( 229 )...( 244 ): >OPRD_HUMAN
ITVCYGLMLLRLRSVR

SEQ ID NO: 16081 - protein, 16 aa, Homo sapiens
  ( 230 )...( 245 ): >OPRD_HUMAN
TVCYGLMLLRLRSVRL

SEQ ID NO: 16082 - protein, 16 aa, Homo sapiens
  ( 232 )...( 247 ): >OPRD_HUMAN
CYGLMLLRLRSVRLLS

SEQ ID NO: 16083 - protein, 16 aa, Homo sapiens
  ( 233 )...( 248 ): >OPRD_HUMAN
YGLMLLRLRSVRLLSG

SEQ ID NO: 16084 - protein, 16 aa, Homo sapiens
  ( 234 )...( 249 ): >OPRD_HUMAN
GLMLLRLRSVRLLSGS

SEQ ID NO: 16085 - protein, 16 aa, Homo sapiens
  ( 235 )...( 250 ): >OPRD_HUMAN
LMLLRLRSVRLLSGSK

SEQ ID NO: 16086 - protein, 16 aa, Homo sapiens
  ( 236 )...( 251 ): >OPRD_HUMAN
MLLRLRSVRLLSGSKE

SEQ ID NO: 16087 - protein, 16 aa, Homo sapiens
  ( 237 )...( 252 ): >OPRD_HUMAN
LLRLRSVRLLSGSKEK

SEQ ID NO: 16088 - protein, 16 aa, Homo sapiens
  ( 238 )...( 253 ): >OPRD_HUMAN
LRLRSVRLLSGSKEKD

SEQ ID NO: 16089 - protein, 16 aa, Homo sapiens
  ( 239 )...( 254 ): >OPRD_HUMAN
RLRSVRLLSGSKEKDR

SEQ ID NO: 16090 - protein, 16 aa, Homo sapiens
  ( 240 )...( 255 ): >OPRD_HUMAN
LRSVRLLSGSKEKDRS

SEQ ID NO: 16091 - protein, 16 aa, Homo sapiens
  ( 241 )...( 256 ): >OPRD_HUMAN
RSVRLLSGSKEKDRSL

SEQ ID NO: 16092 - protein, 16 aa, Homo sapiens
  ( 242 )...( 257 ): >OPRD_HUMAN
SVRLLSGSKEKDRSLR

SEQ ID NO: 16093 - protein, 16 aa, Homo sapiens
  ( 243 )...( 258 ): >OPRD_HUMAN
VRLLSGSKEKDRSLRR

SEQ ID NO: 16094 - protein, 16 aa, Homo sapiens
  ( 245 )...( 260 ): >OPRD_HUMAN
LLSGSKEKDRSLRRIT

SEQ ID NO: 16095 - protein, 16 aa, Homo sapiens
  ( 246 )...( 261 ): >OPRD_HUMAN
LSGSKEKDRSLRRITR

SEQ ID NO: 16096 - protein, 16 aa, Homo sapiens
  ( 248 )...( 263 ): >OPRD_HUMAN
GSKEKDRSLRRITRMV

SEQ ID NO: 16097 - protein, 16 aa, Homo sapiens
  ( 250 )...( 265 ): >OPRD_HUMAN
KEKDRSLRRITRMVLV

SEQ ID NO: 16098 - protein, 16 aa, Homo sapiens
  ( 251 )...( 266 ): >OPRD_HUMAN
EKDRSLRRITRMVLVV

SEQ ID NO: 16099 - protein, 16 aa, Homo sapiens
  ( 252 )...( 267 ): >OPRD_HUMAN
KDRSLRRITRMVLVVV

SEQ ID NO: 16100 - protein, 16 aa, Homo sapiens
  ( 253 )...( 268 ): >OPRD_HUMAN
DRSLRRITRMVLVVVG

SEQ ID NO: 16101 - protein, 16 aa, Homo sapiens
  ( 254 )...( 269 ): >OPRD_HUMAN
RSLRRITRMVLVVVGA

SEQ ID NO: 16102 - protein, 16 aa, Homo sapiens
  ( 255 )...( 270 ): >OPRD_HUMAN
SLRRITRMVLVVVGAF

SEQ ID NO: 16103 - protein, 16 aa, Homo sapiens
  ( 76 )...( 91 ): >OPRK_HUMAN
GNSLVMFVIIRYTKMK

SEQ ID NO: 16104 - protein, 16 aa, Homo sapiens
  ( 77 )...( 92 ): >OPRK_HUMAN
NSLVMFVIIRYTKMKT

SEQ ID NO: 16105 - protein, 16 aa, Homo sapiens
  ( 80 )...( 95 ): >OPRK_HUMAN
VMFVIIRYTKMKTATN

SEQ ID NO: 16106 - protein, 16 aa, Homo sapiens
  ( 81 )...( 96 ): >OPRK_HUMAN
MFVIIRYTKMKTATNI

SEQ ID NO: 16107 - protein, 16 aa, Homo sapiens
  ( 82 )...( 97 ): >OPRK_HUMAN
FVIIRYTKMKTATNIY

SEQ ID NO: 16108 - protein, 16 aa, Homo sapiens
  ( 83 )...( 98 ): >OPRK_HUMAN
VIIRYTKMKTATNIYI

SEQ ID NO: 16109 - protein, 16 aa, Homo sapiens
  ( 84 )...( 99 ): >OPRK_HUMAN
IIRYTKMKTATNIYIF

SEQ ID NO: 16110 - protein, 16 aa, Homo sapiens
  ( 163 )...( 178 ): >OPRK_HUMAN
PVKALDFRTPLKAKII

SEQ ID NO: 16111 - protein, 16 aa, Homo sapiens
  ( 164 )...( 179 ): >OPRK_HUMAN
VKALDFRTPLKAKIIN

SEQ ID NO: 16112 - protein, 16 aa, Homo sapiens
  ( 165 )...( 180 ): >OPRK_HUMAN
KALDFRTPLKAKIINI

SEQ ID NO: 16113 - protein, 16 aa, Homo sapiens
  ( 246 )...( 261 ): >OPRK_HUMAN
YTLMILRLKSVRLLSG

SEQ ID NO: 16114 - protein, 16 aa, Homo sapiens
  ( 247 )...( 262 ): >OPRK_HUMAN
TLMILRLKSVRLLSGS

SEQ ID NO: 16115 - protein, 16 aa, Homo sapiens
  ( 248 )...( 263 ): >OPRK_HUMAN
LMILRLKSVRLLSGSR

SEQ ID NO: 16116 - protein, 16 aa, Homo sapiens
  ( 249 )...( 264 ): >OPRK_HUMAN
MILRLKSVRLLSGSRE

SEQ ID NO: 16117 - protein, 16 aa, Homo sapiens
  ( 250 )...( 265 ): >OPRK_HUMAN
ILRLKSVRLLSGSREK

SEQ ID NO: 16118 - protein, 16 aa, Homo sapiens
  ( 251 )...( 266 ): >OPRK_HUMAN
LRLKSVRLLSGSREKD

SEQ ID NO: 16119 - protein, 16 aa, Homo sapiens
  ( 252 )...( 267 ): >OPRK_HUMAN
RLKSVRLLSGSREKDR

SEQ ID NO: 16120 - protein, 16 aa, Homo sapiens
  ( 253 )...( 268 ): >OPRK_HUMAN
LKSVRLLSGSREKDRN

SEQ ID NO: 16121 - protein, 16 aa, Homo sapiens
  ( 254 )...( 269 ): >OPRK_HUMAN
KSVRLLSGSREKDRNL

SEQ ID NO: 16122 - protein, 16 aa, Homo sapiens
  ( 255 )...( 270 ): >OPRK_HUMAN
SVRLLSGSREKDRNLR

SEQ ID NO: 16123 - protein, 16 aa, Homo sapiens
  ( 258 )...( 273 ): >OPRK_HUMAN
LLSGSREKDRNLRRIT

SEQ ID NO: 16124 - protein, 16 aa, Homo sapiens
  ( 264 )...( 279 ): >OPRK_HUMAN
EKDRNLRRITRLVLVV

SEQ ID NO: 16125 - protein, 16 aa, Homo sapiens
  ( 265 )...( 280 ): >OPRK_HUMAN
KDRNLRRITRLVLVVV

SEQ ID NO: 16126 - protein, 16 aa, Homo sapiens
  ( 266 )...( 281 ): >OPRK_HUMAN
DRNLRRITRLVLVVVA

SEQ ID NO: 16127 - protein, 16 aa, Homo sapiens
  ( 267 )...( 282 ): >OPRK_HUMAN
RNLRRITRLVLVVVAV

SEQ ID NO: 16128 - protein, 16 aa, Homo sapiens
  ( 87 )...( 102 ): >OPRM_HUMAN
GNFLVMYVIVRYTKMK

SEQ ID NO: 16129 - protein, 16 aa, Homo sapiens
  ( 90 )...( 105 ): >OPRM_HUMAN
LVMYVIVRYTKMKTAT

SEQ ID NO: 16130 - protein, 16 aa, Homo sapiens
  ( 91 )...( 106 ): >OPRM_HUMAN
VMYVIVRYTKMKTATN

SEQ ID NO: 16131 - protein, 16 aa, Homo sapiens
  ( 92 )...( 107 ): >OPRM_HUMAN
MYVIVRYTKMKTATNI

SEQ ID NO: 16132 - protein, 16 aa, Homo sapiens
  ( 93 )...( 108 ): >OPRM_HUMAN
YVIVRYTKMKTATNIY

SEQ ID NO: 16133 - protein, 16 aa, Homo sapiens
  ( 94 )...( 109 ): >OPRM_HUMAN
VIVRYTKMKTATNIYI

SEQ ID NO: 16134 - protein, 16 aa, Homo sapiens
  ( 95 )...( 110 ): >OPRM_HUMAN
IVRYTKMKTATNIYIF

SEQ ID NO: 16135 - protein, 16 aa, Homo sapiens
  ( 96 )...( 111 ): >OPRM_HUMAN
VRYTKMKTATNIYIFN

SEQ ID NO: 16136 - protein, 16 aa, Homo sapiens
  ( 174 )...( 189 ): >OPRM_HUMAN
PVKALDFRTPRNAKII

SEQ ID NO: 16137 - protein, 16 aa, Homo sapiens
  ( 175 )...( 190 ): >OPRM_HUMAN
VKALDFRTPRNAKIIN

SEQ ID NO: 16138 - protein, 16 aa, Homo sapiens
  ( 176 )...( 191 ): >OPRM_HUMAN
KALDFRTPRNAKIINV

SEQ ID NO: 16139 - protein, 16 aa, Homo sapiens
  ( 181 )...( 196 ): >OPRM_HUMAN
RTPRNAKIINVCNWIL

SEQ ID NO: 16140 - protein, 16 aa, Homo sapiens
  ( 250 )...( 265 ): >OPRM_HUMAN
ITVCYGLMILRLKSVR

SEQ ID NO: 16141 - protein, 16 aa, Homo sapiens
  ( 251 )...( 266 ): >OPRM_HUMAN
TVCYGLMILRLKSVRM

SEQ ID NO: 16142 - protein, 16 aa, Homo sapiens
  ( 253 )...( 268 ): >OPRM_HUMAN
CYGLMILRLKSVRMLS

SEQ ID NO: 16143 - protein, 16 aa, Homo sapiens
  ( 254 )...( 269 ): >OPRM_HUMAN
YGLMILRLKSVRMLSG

SEQ ID NO: 16144 - protein, 16 aa, Homo sapiens
  ( 255 )...( 270 ): >OPRM_HUMAN
GLMILRLKSVRMLSGS

SEQ ID NO: 16145 - protein, 16 aa, Homo sapiens
  ( 256 )...( 271 ): >OPRM_HUMAN
LMILRLKSVRMLSGSK

SEQ ID NO: 16146 - protein, 16 aa, Homo sapiens
  ( 257 )...( 272 ): >OPRM_HUMAN
MILRLKSVRMLSGSKE

SEQ ID NO: 16147 - protein, 16 aa, Homo sapiens
  ( 258 )...( 273 ): >OPRM_HUMAN
ILRLKSVRMLSGSKEK

SEQ ID NO: 16148 - protein, 16 aa, Homo sapiens
  ( 259 )...( 274 ): >OPRM_HUMAN
LRLKSVRMLSGSKEKD

SEQ ID NO: 16149 - protein, 16 aa, Homo sapiens
  ( 260 )...( 275 ): >OPRM_HUMAN
RLKSVRMLSGSKEKDR

SEQ ID NO: 16150 - protein, 16 aa, Homo sapiens
  ( 261 )...( 276 ): >OPRM_HUMAN
LKSVRMLSGSKEKDRN

SEQ ID NO: 16151 - protein, 16 aa, Homo sapiens
  ( 262 )...( 277 ): >OPRM_HUMAN
KSVRMLSGSKEKDRNL

SEQ ID NO: 16152 - protein, 16 aa, Homo sapiens
  ( 263 )...( 278 ): >OPRM_HUMAN
SVRMLSGSKEKDRNLR

SEQ ID NO: 16153 - protein, 16 aa, Homo sapiens
  ( 266 )...( 281 ): >OPRM_HUMAN
MLSGSKEKDRNLRRIT

SEQ ID NO: 16154 - protein, 16 aa, Homo sapiens
  ( 272 )...( 287 ): >OPRM_HUMAN
EKDRNLRRITRMVLVV

SEQ ID NO: 16155 - protein, 16 aa, Homo sapiens
  ( 273 )...( 288 ): >OPRM_HUMAN
KDRNLRRITRMVLVVV

SEQ ID NO: 16156 - protein, 16 aa, Homo sapiens
  ( 274 )...( 289 ): >OPRM_HUMAN
DRNLRRITRMVLVVVA

SEQ ID NO: 16157 - protein, 16 aa, Homo sapiens
  ( 275 )...( 290 ): >OPRM_HUMAN
RNLRRITRMVLVVVAV

SEQ ID NO: 16158 - protein, 16 aa, Homo sapiens
  ( 68 )...( 83 ): >OPRX_HUMAN
GNCLVMYVILRHTKMK

SEQ ID NO: 16159 - protein, 16 aa, Homo sapiens
  ( 229 )...( 244 ): >OPRX_HUMAN
LVISVCYSLMIRRLRG

SEQ ID NO: 16160 - protein, 16 aa, Homo sapiens
  ( 230 )...( 245 ): >OPRX_HUMAN
VISVCYSLMIRRLRGV

SEQ ID NO: 16161 - protein, 16 aa, Homo sapiens
  ( 231 )...( 246 ): >OPRX_HUMAN
ISVCYSLMIRRLRGVR

SEQ ID NO: 16162 - protein, 16 aa, Homo sapiens
  ( 232 )...( 247 ): >OPRX_HUMAN
SVCYSLMIRRLRGVRL

SEQ ID NO: 16163 - protein, 16 aa, Homo sapiens
  ( 233 )...( 248 ): >OPRX_HUMAN
VCYSLMIRRLRGVRLL

SEQ ID NO: 16164 - protein, 16 aa, Homo sapiens
  ( 234 )...( 249 ): >OPRX_HUMAN
CYSLMIRRLRGVRLLS

SEQ ID NO: 16165 - protein, 16 aa, Homo sapiens
  ( 235 )...( 250 ): >OPRX_HUMAN
YSLMIRRLRGVRLLSG

SEQ ID NO: 16166 - protein, 16 aa, Homo sapiens
  ( 236 )...( 251 ): >OPRX_HUMAN
SLMIRRLRGVRLLSGS

SEQ ID NO: 16167 - protein, 16 aa, Homo sapiens
  ( 237 )...( 252 ): >OPRX_HUMAN
LMIRRLRGVRLLSGSR

SEQ ID NO: 16168 - protein, 16 aa, Homo sapiens
  ( 238 )...( 253 ): >OPRX_HUMAN
MIRRLRGVRLLSGSRE

SEQ ID NO: 16169 - protein, 16 aa, Homo sapiens
  ( 239 )...( 254 ): >OPRX_HUMAN
IRRLRGVRLLSGSREK

SEQ ID NO: 16170 - protein, 16 aa, Homo sapiens
  ( 240 )...( 255 ): >OPRX_HUMAN
RRLRGVRLLSGSREKD

SEQ ID NO: 16171 - protein, 16 aa, Homo sapiens
  ( 241 )...( 256 ): >OPRX_HUMAN
RLRGVRLLSGSREKDR

SEQ ID NO: 16172 - protein, 16 aa, Homo sapiens
  ( 242 )...( 257 ): >OPRX_HUMAN
LRGVRLLSGSREKDRN

SEQ ID NO: 16173 - protein, 16 aa, Homo sapiens
  ( 243 )...( 258 ): >OPRX_HUMAN
RGVRLLSGSREKDRNL

SEQ ID NO: 16174 - protein, 16 aa, Homo sapiens
  ( 244 )...( 259 ): >OPRX_HUMAN
GVRLLSGSREKDRNLR

SEQ ID NO: 16175 - protein, 16 aa, Homo sapiens
  ( 247 )...( 262 ): >OPRX_HUMAN
LLSGSREKDRNLRRIT

SEQ ID NO: 16176 - protein, 16 aa, Homo sapiens
  ( 253 )...( 268 ): >OPRX_HUMAN
EKDRNLRRITRLVLVV

SEQ ID NO: 16177 - protein, 16 aa, Homo sapiens
  ( 254 )...( 269 ): >OPRX_HUMAN
KDRNLRRITRLVLVVV

SEQ ID NO: 16178 - protein, 16 aa, Homo sapiens
  ( 255 )...( 270 ): >OPRX_HUMAN
DRNLRRITRLVLVVVA

SEQ ID NO: 16179 - protein, 16 aa, Homo sapiens
  ( 256 )...( 271 ): >OPRX_HUMAN
RNLRRITRLVLVVVAV

SEQ ID NO: 16180 - protein, 16 aa, Homo sapiens
  ( 339 )...( 354 ): >OPRX_HUMAN
LRRDVQVSDRVRSIAK

SEQ ID NO: 16181 - protein, 16 aa, Homo sapiens
  ( 348 )...( 363 ): >OPRX_HUMAN
RVRSIAKDVALACKTS

SEQ ID NO: 16182 - protein, 16 aa, Homo sapiens
  ( 49 )...( 64 ): >OPSB_HUMAN
FPLNAMVLVATLRYKK

SEQ ID NO: 16183 - protein, 16 aa, Homo sapiens
  ( 50 )...( 65 ): >OPSB_HUMAN
PLNAMVLVATLRYKKL

SEQ ID NO: 16184 - protein, 16 aa, Homo sapiens
  ( 51 )...( 66 ): >OPSB_HUMAN
LNAMVLVATLRYKKLR

SEQ ID NO: 16185 - protein, 16 aa, Homo sapiens
  ( 52 )...( 67 ): >OPSB_HUMAN
NAMVLVATLRYKKLRQ

SEQ ID NO: 16186 - protein, 16 aa, Homo sapiens
  ( 53 )...( 68 ): >OPSB_HUMAN
AMVLVATLRYKKLRQP

SEQ ID NO: 16187 - protein, 16 aa, Homo sapiens
  ( 54 )...( 69 ): >OPSB_HUMAN
MVLVATLRYKKLRQPL

SEQ ID NO: 16188 - protein, 16 aa, Homo sapiens
  ( 55 )...( 70 ): >OPSB_HUMAN
VLVATLRYKKLRQPLN

SEQ ID NO: 16189 - protein, 16 aa, Homo sapiens
  ( 65 )...( 80 ): >OPSD_HUMAN
HKKLRTPLNYILLNLA

SEQ ID NO: 16190 - protein, 16 aa, Homo sapiens
  ( 66 )...( 81 ): >OPSD_HUMAN
KKLRTPLNYILLNLAV

SEQ ID NO: 16191 - protein, 16 aa, Homo sapiens
  ( 70 )...( 85 ): >OPSG_HUMAN
TNGLVLAATMKFKKLR

SEQ ID NO: 16192 - protein, 16 aa, Homo sapiens
  ( 71 )...( 86 ): >OPSG_HUMAN
NGLVLAATMKFKKLRH

SEQ ID NO: 16193 - protein, 16 aa, Homo sapiens
  ( 72 )...( 87 ): >OPSG_HUMAN
GLVLAATMKFKKLRHP

SEQ ID NO: 16194 - protein, 16 aa, Homo sapiens
  ( 73 )...( 88 ): >OPSG_HUMAN
LVLAATMKFKKLRHPL

SEQ ID NO: 16195 - protein, 16 aa, Homo sapiens
  ( 74 )...( 89 ): >OPSG_HUMAN
VLAATMKFKKLRHPLN

SEQ ID NO: 16196 - protein, 16 aa, Homo sapiens
  ( 82 )...( 97 ): >OPSG_HUMAN
KKLRHPLNWILVNLAV

SEQ ID NO: 16197 - protein, 16 aa, Homo sapiens
  ( 239 )...( 254 ): >OPSG_HUMAN
YLQVWLAIRAVAKQQK

SEQ ID NO: 16198 - protein, 16 aa, Homo sapiens
  ( 70 )...( 85 ): >OPSR_HUMAN
TNGLVLAATMKFKKLR

SEQ ID NO: 16199 - protein, 16 aa, Homo sapiens
  ( 71 )...( 86 ): >OPSR_HUMAN
NGLVLAATMKFKKLRH

SEQ ID NO: 16200 - protein, 16 aa, Homo sapiens
  ( 72 )...( 87 ): >OPSR_HUMAN
GLVLAATMKFKKLRHP

SEQ ID NO: 16201 - protein, 16 aa, Homo sapiens
  ( 73 )...( 88 ): >OPSR_HUMAN
LVLAATMKFKKLRHPL

SEQ ID NO: 16202 - protein, 16 aa, Homo sapiens
  ( 74 )...( 89 ): >OPSR_HUMAN
VLAATMKFKKLRHPLN

SEQ ID NO: 16203 - protein, 16 aa, Homo sapiens
  ( 82 )...( 97 ): >OPSR_HUMAN
KKLRHPLNWILVNLAV

SEQ ID NO: 16204 - protein, 16 aa, Homo sapiens
  ( 239 )...( 254 ): >OPSR_HUMAN
YLQVWLAIRAVAKQQK

SEQ ID NO: 16205 - protein, 16 aa, Homo sapiens
  ( 292 )...( 307 ): >OPSX_HUMAN
CIYVVANKKFRRAMLA

SEQ ID NO: 16206 - protein, 16 aa, Homo sapiens
  ( 293 )...( 308 ): >OPSX_HUMAN
IYVVANKKFRRAMLAM

SEQ ID NO: 16207 - protein, 16 aa, Homo sapiens
  ( 295 )...( 310 ): >OPSX_HUMAN
VVANKKFRRAMLAMFK

SEQ ID NO: 16208 - protein, 16 aa, Homo sapiens
  ( 147 )...( 162 ): >OX1R_HUMAN
AICHPLLFKSTARRAR

SEQ ID NO: 16209 - protein, 16 aa, Homo sapiens
  ( 148 )...( 163 ): >OX1R_HUMAN
ICHPLLFKSTARRARG

SEQ ID NO: 16210 - protein, 16 aa, Homo sapiens
  ( 150 )...( 165 ): >OX1R_HUMAN
HPLLFKSTARRARGSI

SEQ ID NO: 16211 - protein, 16 aa, Homo sapiens
  ( 151 )...( 166 ): >OX1R_HUMAN
PLLFKSTARRARGSIL

SEQ ID NO: 16212 - protein, 16 aa, Homo sapiens
  ( 152 )...( 167 ): >OX1R_HUMAN
LLFKSTARRARGSILG

SEQ ID NO: 16213 - protein, 16 aa, Homo sapiens
  ( 153 )...( 168 ): >OX1R_HUMAN
LFKSTARRARGSILGI

SEQ ID NO: 16214 - protein, 16 aa, Homo sapiens
  ( 154 )...( 169 ): >OX1R_HUMAN
FKSTARRARGSILGIW

SEQ ID NO: 16215 - protein, 16 aa, Homo sapiens
  ( 155 )...( 170 ): >OX1R_HUMAN
KSTARRARGSILGIWA

SEQ ID NO: 16216 - protein, 16 aa, Homo sapiens
  ( 156 )...( 171 ): >OX1R_HUMAN
STARRARGSILGIWAV

SEQ ID NO: 16217 - protein, 16 aa, Homo sapiens
  ( 157 )...( 172 ): >OX1R_HUMAN
TARRARGSILGIWAVS

SEQ ID NO: 16218 - protein, 16 aa, Homo sapiens
  ( 158 )...( 173 ): >OX1R_HUMAN
ARRARGSILGIWAVSL

SEQ ID NO: 16219 - protein, 16 aa, Homo sapiens
  ( 159 )...( 174 ): >OX1R_HUMAN
RRARGSILGIWAVSLA

SEQ ID NO: 16220 - protein, 16 aa, Homo sapiens
  ( 236 )...( 251 ): >OX1R_HUMAN
FQIFRKLWGRQIPGTT

SEQ ID NO: 16221 - protein, 16 aa, Homo sapiens
  ( 237 )...( 252 ): >OX1R_HUMAN
QIFRKLWGRQIPGTTS

SEQ ID NO: 16222 - protein, 16 aa, Homo sapiens
  ( 238 )...( 253 ): >OX1R_HUMAN
IFRKLWGRQIPGTTSA

SEQ ID NO: 16223 - protein, 16 aa, Homo sapiens
  ( 239 )...( 254 ): >OX1R_HUMAN
FRKLWGRQIPGTTSAL

SEQ ID NO: 16224 - protein, 16 aa, Homo sapiens
  ( 240 )...( 255 ): >OX1R_HUMAN
RKLWGRQIPGTTSALV

SEQ ID NO: 16225 - protein, 16 aa, Homo sapiens
  ( 241 )...( 256 ): >OX1R_HUMAN
KLWGRQIPGTTSALVR

SEQ ID NO: 16226 - protein, 16 aa, Homo sapiens
  ( 244 )...( 259 ): >OX1R_HUMAN
GRQIPGTTSALVRNWK

SEQ ID NO: 16227 - protein, 16 aa, Homo sapiens
  ( 245 )...( 260 ): >OX1R_HUMAN
RQIPGTTSALVRNWKR

SEQ ID NO: 16228 - protein, 16 aa, Homo sapiens
  ( 246 )...( 261 ): >OX1R_HUMAN
QIPGTTSALVRNWKRP

SEQ ID NO: 16229 - protein, 16 aa, Homo sapiens
  ( 276 )...( 291 ): >OX1R_HUMAN
PQPRGRAFLAEVKQMR

SEQ ID NO: 16230 - protein, 16 aa, Homo sapiens
  ( 277 )...( 292 ): >OX1R_HUMAN
QPRGRAFLAEVKQMRA

SEQ ID NO: 16231 - protein, 16 aa, Homo sapiens
  ( 278 )...( 293 ): >OX1R_HUMAN
PRGRAFLAEVKQMRAR

SEQ ID NO: 16232 - protein, 16 aa, Homo sapiens
  ( 280 )...( 295 ): >OX1R_HUMAN
GRAFLAEVKQMRARRK

SEQ ID NO: 16233 - protein, 16 aa, Homo sapiens
  ( 282 )...( 297 ): >OX1R_HUMAN
AFLAEVKQMRARRKTA

SEQ ID NO: 16234 - protein, 16 aa, Homo sapiens
  ( 283 )...( 298 ): >OX1R_HUMAN
FLAEVKQMRARRKTAK

SEQ ID NO: 16235 - protein, 16 aa, Homo sapiens
  ( 284 )...( 299 ): >OX1R_HUMAN
LAEVKQMRARRKTAKM

SEQ ID NO: 16236 - protein, 16 aa, Homo sapiens
  ( 285 )...( 300 ): >OX1R_HUMAN
AEVKQMRARRKTAKML

SEQ ID NO: 16237 - protein, 16 aa, Homo sapiens
  ( 286 )...( 301 ): >OX1R_HUMAN
EVKQMRARRKTAKMLM

SEQ ID NO: 16238 - protein, 16 aa, Homo sapiens
  ( 287 )...( 302 ): >OX1R_HUMAN
VKQMRARRKTAKMLMV

SEQ ID NO: 16239 - protein, 16 aa, Homo sapiens
  ( 288 )...( 303 ): >OX1R_HUMAN
KQMRARRKTAKMLMVV

SEQ ID NO: 16240 - protein, 16 aa, Homo sapiens
  ( 289 )...( 304 ): >OX1R_HUMAN
QMRARRKTAKMLMVVL

SEQ ID NO: 16241 - protein, 16 aa, Homo sapiens
  ( 290 )...( 305 ): >OX1R_HUMAN
MRARRKTAKMLMVVLL

SEQ ID NO: 16242 - protein, 16 aa, Homo sapiens
  ( 291 )...( 306 ): >OX1R_HUMAN
RARRKTAKMLMVVLLV

SEQ ID NO: 16243 - protein, 16 aa, Homo sapiens
  ( 313 )...( 328 ): >OX1R_HUMAN
PISVLNVLKRVFGMFR

SEQ ID NO: 16244 - protein, 16 aa, Homo sapiens
  ( 314 )...( 329 ): >OX1R_HUMAN
ISVLNVLKRVFGMFRQ

SEQ ID NO: 16245 - protein, 16 aa, Homo sapiens
  ( 315 )...( 330 ): >OX1R_HUMAN
SVLNVLKRVFGMFRQA

SEQ ID NO: 16246 - protein, 16 aa, Homo sapiens
  ( 316 )...( 331 ): >OX1R_HUMAN
VLNVLKRVFGMFRQAS

SEQ ID NO: 16247 - protein, 16 aa, Homo sapiens
  ( 159 )...( 174 ): >OX2R_HUMAN
PLMFKSTAKRARNSIV

SEQ ID NO: 16248 - protein, 16 aa, Homo sapiens
  ( 160 )...( 175 ): >OX2R_HUMAN
LMFKSTAKRARNSIVI

SEQ ID NO: 16249 - protein, 16 aa, Homo sapiens
  ( 161 )...( 176 ): >OX2R_HUMAN
MFKSTAKRARNSIVII

SEQ ID NO: 16250 - protein, 16 aa, Homo sapiens
  ( 162 )...( 177 ): >OX2R_HUMAN
FKSTAKRARNSIVIIW

SEQ ID NO: 16251 - protein, 16 aa, Homo sapiens
  ( 163 )...( 178 ): >OX2R_HUMAN
KSTAKRARNSIVIIWI

SEQ ID NO: 16252 - protein, 16 aa, Homo sapiens
  ( 164 )...( 179 ): >OX2R_HUMAN
STAKRARNSIVIIWIV

SEQ ID NO: 16253 - protein, 16 aa, Homo sapiens
  ( 165 )...( 180 ): >OX2R_HUMAN
TAKRARNSIVIIWIVS

SEQ ID NO: 16254 - protein, 16 aa, Homo sapiens
  ( 166 )...( 181 ): >OX2R_HUMAN
AKRARNSIVIIWIVSC

SEQ ID NO: 16255 - protein, 16 aa, Homo sapiens
  ( 167 )...( 182 ): >OX2R_HUMAN
KRARNSIVIIWIVSCI

SEQ ID NO: 16256 - protein, 16 aa, Homo sapiens
  ( 244 )...( 259 ): >OX2R_HUMAN
LQIFRKLWCRQIPGTS

SEQ ID NO: 16257 - protein, 16 aa, Homo sapiens
  ( 248 )...( 263 ): >OX2R_HUMAN
RKLWCRQIPGTSSVVQ

SEQ ID NO: 16258 - protein, 16 aa, Homo sapiens
  ( 249 )...( 264 ): >OX2R_HUMAN
KLWCRQIPGTSSVVQR

SEQ ID NO: 16259 - protein, 16 aa, Homo sapiens
  ( 250 )...( 265 ): >OX2R_HUMAN
LWCRQIPGTSSVVQRK

SEQ ID NO: 16260 - protein, 16 aa, Homo sapiens
  ( 251 )...( 266 ): >OX2R_HUMAN
WCRQIPGTSSVVQRKW

SEQ ID NO: 16261 - protein, 16 aa, Homo sapiens
  ( 252 )...( 267 ): >OX2R_HUMAN
CRQIPGTSSVVQRKWK

SEQ ID NO: 16262 - protein, 16 aa, Homo sapiens
  ( 253 )...( 268 ): >OX2R_HUMAN
RQIPGTSSVVQRKWKP

SEQ ID NO: 16263 - protein, 16 aa, Homo sapiens
  ( 254 )...( 269 ): >OX2R_HUMAN
QIPGTSSVVQRKWKPL

SEQ ID NO: 16264 - protein, 16 aa, Homo sapiens
  ( 255 )...( 270 ): >OX2R_HUMAN
IPGTSSVVQRKWKPLQ

SEQ ID NO: 16265 - protein, 16 aa, Homo sapiens
  ( 257 )...( 272 ): >OX2R_HUMAN
GTSSVVQRKWKPLQPV

SEQ ID NO: 16266 - protein, 16 aa, Homo sapiens
  ( 258 )...( 273 ): >OX2R_HUMAN
TSSVVQRKWKPLQPVS

SEQ ID NO: 16267 - protein, 16 aa, Homo sapiens
  ( 259 )...( 274 ): >OX2R_HUMAN
SSVVQRKWKPLQPVSQ

SEQ ID NO: 16268 - protein, 16 aa, Homo sapiens
  ( 260 )...( 275 ): >OX2R_HUMAN
SVVQRKWKPLQPVSQP

SEQ ID NO: 16269 - protein, 16 aa, Homo sapiens
  ( 282 )...( 297 ): >OX2R_HUMAN
TKSRMSAVAAEIKQIR

SEQ ID NO: 16270 - protein, 16 aa, Homo sapiens
  ( 283 )...( 298 ): >OX2R_HUMAN
KSRMSAVAAEIKQIRA

SEQ ID NO: 16271 - protein, 16 aa, Homo sapiens
  ( 284 )...( 299 ): >OX2R_HUMAN
SRMSAVAAEIKQIRAR

SEQ ID NO: 16272 - protein, 16 aa, Homo sapiens
  ( 285 )...( 300 ): >OX2R_HUMAN
RMSAVAAEIKQIRARR

SEQ ID NO: 16273 - protein, 16 aa, Homo sapiens
  ( 286 )...( 301 ): >OX2R_HUMAN
MSAVAAEIKQIRARRK

SEQ ID NO: 16274 - protein, 16 aa, Homo sapiens
  ( 287 )...( 302 ): >OX2R_HUMAN
SAVAAEIKQIRARRKT

SEQ ID NO: 16275 - protein, 16 aa, Homo sapiens
  ( 288 )...( 303 ): >OX2R_HUMAN
AVAAEIKQIRARRKTA

SEQ ID NO: 16276 - protein, 16 aa, Homo sapiens
  ( 289 )...( 304 ): >OX2R_HUMAN
VAAEIKQIRARRKTAR

SEQ ID NO: 16277 - protein, 16 aa, Homo sapiens
  ( 290 )...( 305 ): >OX2R_HUMAN
AAEIKQIRARRKTARM

SEQ ID NO: 16278 - protein, 16 aa, Homo sapiens
  ( 291 )...( 306 ): >OX2R_HUMAN
AEIKQIRARRKTARML

SEQ ID NO: 16279 - protein, 16 aa, Homo sapiens
  ( 295 )...( 310 ): >OX2R_HUMAN
QIRARRKTARMLMVVL

SEQ ID NO: 16280 - protein, 16 aa, Homo sapiens
  ( 296 )...( 311 ): >OX2R_HUMAN
IRARRKTARMLMVVLL

SEQ ID NO: 16281 - protein, 16 aa, Homo sapiens
  ( 297 )...( 312 ): >OX2R_HUMAN
RARRKTARMLMVVLLV

SEQ ID NO: 16282 - protein, 16 aa, Homo sapiens
  ( 298 )...( 313 ): >OX2R_HUMAN
ARRKTARMLMVVLLVF

SEQ ID NO: 16283 - protein, 16 aa, Homo sapiens
  ( 299 )...( 314 ): >OX2R_HUMAN
RRKTARMLMVVLLVFA

SEQ ID NO: 16284 - protein, 16 aa, Homo sapiens
  ( 392 )...( 407 ): >OX2R_HUMAN
DRLTRGRTSTESRKSL

SEQ ID NO: 16285 - protein, 16 aa, Homo sapiens
  ( 393 )...( 408 ): >OX2R_HUMAN
RLTRGRTSTESRKSLT

SEQ ID NO: 16286 - protein, 16 aa, Homo sapiens
  ( 288 )...( 303 ): >OXB2_HUMAN
VIYSIKTKQIQYGIIR

SEQ ID NO: 16287 - protein, 16 aa, Homo sapiens
  ( 289 )...( 304 ): >OXB2_HUMAN
IYSIKTKQIQYGIIRL

SEQ ID NO: 16288 - protein, 16 aa, Homo sapiens
  ( 290 )...( 305 ): >OXB2_HUMAN
YSIKTKQIQYGIIRLL

SEQ ID NO: 16289 - protein, 16 aa, Homo sapiens
  ( 291 )...( 306 ): >OXB2_HUMAN
SIKTKQIQYGIIRLLS

SEQ ID NO: 16290 - protein, 16 aa, Homo sapiens
  ( 292 )...( 307 ): >OXB2_HUMAN
IKTKQIQYGIIRLLSK

SEQ ID NO: 16291 - protein, 16 aa, Homo sapiens
  ( 293 )...( 308 ): >OXB2_HUMAN
KTKQIQYGIIRLLSKH

SEQ ID NO: 16292 - protein, 16 aa, Homo sapiens
  ( 294 )...( 309 ): >OXB2_HUMAN
TKQIQYGIIRLLSKHR

SEQ ID NO: 16293 - protein, 16 aa, Homo sapiens
  ( 296 )...( 311 ): >OXB2_HUMAN
QIQYGIIRLLSKHRFS

SEQ ID NO: 16294 - protein, 16 aa, Homo sapiens
  ( 122 )...( 137 ): >OXB4_HUMAN
AIRTPLRYNCILTNSR

SEQ ID NO: 16295 - protein, 16 aa, Homo sapiens
  ( 123 )...( 138 ): >OXB4_HUMAN
IRTPLRYNCILTNSRV

SEQ ID NO: 16296 - protein, 16 aa, Homo sapiens
  ( 124 )...( 139 ): >OXB4_HUMAN
RTPLRYNCILTNSRVM

SEQ ID NO: 16297 - protein, 16 aa, Homo sapiens
  ( 283 )...( 298 ): >OXB4_HUMAN
FVNPIIYSIKTKQIQR

SEQ ID NO: 16298 - protein, 16 aa, Homo sapiens
  ( 284 )...( 299 ): >OXB4_HUMAN
VNPIIYSIKTKQIQRS

SEQ ID NO: 16299 - protein, 16 aa, Homo sapiens
  ( 285 )...( 300 ): >OXB4_HUMAN
NPIIYSIKTKQIQRSI

SEQ ID NO: 16300 - protein, 16 aa, Homo sapiens
  ( 286 )...( 301 ): >OXB4_HUMAN
PIIYSIKTKQIQRSII

SEQ ID NO: 16301 - protein, 16 aa, Homo sapiens
  ( 287 )...( 302 ): >OXB4_HUMAN
IIYSIKTKQIQRSIIR

SEQ ID NO: 16302 - protein, 16 aa, Homo sapiens
  ( 288 )...( 303 ): >OXB4_HUMAN
IYSIKTKQIQRSIIRL

SEQ ID NO: 16303 - protein, 16 aa, Homo sapiens
  ( 289 )...( 304 ): >OXB4_HUMAN
YSIKTKQIQRSIIRLF

SEQ ID NO: 16304 - protein, 16 aa, Homo sapiens
  ( 290 )...( 305 ): >OXB4_HUMAN
SIKTKQIQRSIIRLFS

SEQ ID NO: 16305 - protein, 16 aa, Homo sapiens
  ( 291 )...( 306 ): >OXB4_HUMAN
IKTKQIQRSIIRLFSG

SEQ ID NO: 16306 - protein, 16 aa, Homo sapiens
  ( 292 )...( 307 ): >OXB4_HUMAN
KTKQIQRSIIRLFSGQ

SEQ ID NO: 16307 - protein, 16 aa, Homo sapiens
  ( 293 )...( 308 ): >OXB4_HUMAN
TKQIQRSIIRLFSGQS

SEQ ID NO: 16308 - protein, 16 aa, Homo sapiens
  ( 294 )...( 309 ): >OXB4_HUMAN
KQIQRSIIRLFSGQSR

SEQ ID NO: 16309 - protein, 16 aa, Homo sapiens
  ( 295 )...( 310 ): >OXB4_HUMAN
QIQRSIIRLFSGQSRA

SEQ ID NO: 16310 - protein, 15 aa, Homo sapiens
  ( 296 )...( 311 ): >OXB4_HUMAN
IQRSIIRLFSGQSRA

SEQ ID NO: 16311 - protein, 14 aa, Homo sapiens
  ( 297 )...( 312 ): >OXB4_HUMAN
QRSIIRLFSGQSRA

SEQ ID NO: 16312 - protein, 13 aa, Homo sapiens
  ( 298 )...( 313 ): >OXB4_HUMAN
RSIIRLFSGQSRA

SEQ ID NO: 16313 - protein, 16 aa, Homo sapiens
  ( 220 )...( 235 ): >OXE2_HUMAN
IIRTVLQLPSKSERAK

SEQ ID NO: 16314 - protein, 16 aa, Homo sapiens
  ( 221 )...( 236 ): >OXE2_HUMAN
IRTVLQLPSKSERAKA

SEQ ID NO: 16315 - protein, 16 aa, Homo sapiens
  ( 222 )...( 237 ): >OXE2_HUMAN
RTVLQLPSKSERAKAF

SEQ ID NO: 16316 - protein, 16 aa, Homo sapiens
  ( 284 )...( 299 ): >OXE2_HUMAN
PVINPIIYGAKTKQIR

SEQ ID NO: 16317 - protein, 16 aa, Homo sapiens
  ( 285 )...( 300 ): >OXE2_HUMAN
VINPIIYGAKTKQIRT

SEQ ID NO: 16318 - protein, 16 aa, Homo sapiens
  ( 286 )...( 301 ): >OXE2_HUMAN
INPIIYGAKTKQIRTR

SEQ ID NO: 16319 - protein, 16 aa, Homo sapiens
  ( 287 )...( 302 ): >OXE2_HUMAN
NPIIYGAKTKQIRTRV

SEQ ID NO: 16320 - protein, 16 aa, Homo sapiens
  ( 288 )...( 303 ): >OXE2_HUMAN
PIIYGAKTKQIRTRVL

SEQ ID NO: 16321 - protein, 16 aa, Homo sapiens
  ( 289 )...( 304 ): >OXE2_HUMAN
IIYGAKTKQIRTRVLA

SEQ ID NO: 16322 - protein, 16 aa, Homo sapiens
  ( 290 )...( 305 ): >OXE2_HUMAN
IYGAKTKQIRTRVLAM

SEQ ID NO: 16323 - protein, 16 aa, Homo sapiens
  ( 291 )...( 306 ): >OXE2_HUMAN
YGAKTKQIRTRVLAMF

SEQ ID NO: 16324 - protein, 16 aa, Homo sapiens
  ( 292 )...( 307 ): >OXE2_HUMAN
GAKTKQIRTRVLAMFK

SEQ ID NO: 16325 - protein, 16 aa, Homo sapiens
  ( 293 )...( 308 ): >OXE2_HUMAN
AKTKQIRTRVLAMFKI

SEQ ID NO: 16326 - protein, 16 aa, Homo sapiens
  ( 294 )...( 309 ): >OXE2_HUMAN
KTKQIRTRVLAMFKIS

SEQ ID NO: 16327 - protein, 16 aa, Homo sapiens
  ( 295 )...( 310 ): >OXE2_HUMAN
TKQIRTRVLAMFKISC

SEQ ID NO: 16328 - protein, 16 aa, Homo sapiens
  ( 296 )...( 311 ): >OXE2_HUMAN
KQIRTRVLAMFKISCD

SEQ ID NO: 16329 - protein, 16 aa, Homo sapiens
  ( 297 )...( 312 ): >OXE2_HUMAN
QIRTRVLAMFKISCDK

SEQ ID NO: 16330 - protein, 16 aa, Homo sapiens
  ( 288 )...( 303 ): >OXI1_HUMAN
MLNPIIYSVKTKEIRK

SEQ ID NO: 16331 - protein, 16 aa, Homo sapiens
  ( 289 )...( 304 ): >OXI1_HUMAN
LNPIIYSVKTKEIRKG

SEQ ID NO: 16332 - protein, 16 aa, Homo sapiens
  ( 290 )...( 305 ): >OXI1_HUMAN
NPIIYSVKTKEIRKGI

SEQ ID NO: 16333 - protein, 16 aa, Homo sapiens
  ( 291 )...( 306 ): >OXI1_HUMAN
PIIYSVKTKEIRKGIL

SEQ ID NO: 16334 - protein, 16 aa, Homo sapiens
  ( 292 )...( 307 ): >OXI1_HUMAN
IIYSVKTKEIRKGILK

SEQ ID NO: 16335 - protein, 16 aa, Homo sapiens
  ( 293 )...( 308 ): >OXI1_HUMAN
IYSVKTKEIRKGILKF

SEQ ID NO: 16336 - protein, 16 aa, Homo sapiens
  ( 294 )...( 309 ): >OXI1_HUMAN
YSVKTKEIRKGILKFF

SEQ ID NO: 16337 - protein, 16 aa, Homo sapiens
  ( 295 )...( 310 ): >OXI1_HUMAN
SVKTKEIRKGILKFFH

SEQ ID NO: 16338 - protein, 16 aa, Homo sapiens
  ( 296 )...( 311 ): >OXI1_HUMAN
VKTKEIRKGILKFFHK

SEQ ID NO: 16339 - protein, 14 aa, Homo sapiens
  ( 301 )...( 316 ): >OXI1_HUMAN
IRKGILKFFHKSQA

SEQ ID NO: 16340 - protein, 16 aa, Homo sapiens
  ( 286 )...( 301 ): >OXI2_HUMAN
VLNPLIYSAKTKEIRR

SEQ ID NO: 16341 - protein, 16 aa, Homo sapiens
  ( 287 )...( 302 ): >OXI2_HUMAN
LNPLIYSAKTKEIRRA

SEQ ID NO: 16342 - protein, 16 aa, Homo sapiens
  ( 288 )...( 303 ): >OXI2_HUMAN
NPLIYSAKTKEIRRAI

SEQ ID NO: 16343 - protein, 16 aa, Homo sapiens
  ( 289 )...( 304 ): >OXI2_HUMAN
PLIYSAKTKEIRRAIF

SEQ ID NO: 16344 - protein, 16 aa, Homo sapiens
  ( 290 )...( 305 ): >OXI2_HUMAN
LIYSAKTKEIRRAIFR

SEQ ID NO: 16345 - protein, 16 aa, Homo sapiens
  ( 26 )...( 41 ): >OXYR_HUMAN
NRTAGPPRRNEALARV

SEQ ID NO: 16346 - protein, 16 aa, Homo sapiens
  ( 55 )...( 70 ): >OXYR_HUMAN
SGNACVLLALRTTRQK

SEQ ID NO: 16347 - protein, 16 aa, Homo sapiens
  ( 56 )...( 71 ): >OXYR_HUMAN
GNACVLLALRTTRQKH

SEQ ID NO: 16348 - protein, 16 aa, Homo sapiens
  ( 57 )...( 72 ): >OXYR_HUMAN
NACVLLALRTTRQKHS

SEQ ID NO: 16349 - protein, 16 aa, Homo sapiens
  ( 58 )...( 73 ): >OXYR_HUMAN
ACVLLALRTTRQKHSR

SEQ ID NO: 16350 - protein, 16 aa, Homo sapiens
  ( 59 )...( 74 ): >OXYR_HUMAN
CVLLALRTTRQKHSRL

SEQ ID NO: 16351 - protein, 16 aa, Homo sapiens
  ( 60 )...( 75 ): >OXYR_HUMAN
VLLALRTTRQKHSRLF

SEQ ID NO: 16352 - protein, 16 aa, Homo sapiens
  ( 135 )...( 150 ): >OXYR_HUMAN
LDRCLAICQPLRSLRR

SEQ ID NO: 16353 - protein, 16 aa, Homo sapiens
  ( 137 )...( 152 ): >OXYR_HUMAN
RCLAICQPLRSLRRRT

SEQ ID NO: 16354 - protein, 16 aa, Homo sapiens
  ( 138 )...( 153 ): >OXYR_HUMAN
CLAICQPLRSLRRRTD

SEQ ID NO: 16355 - protein, 16 aa, Homo sapiens
  ( 144 )...( 159 ): >OXYR_HUMAN
PLRSLRRRTDRLAVLA

SEQ ID NO: 16356 - protein, 16 aa, Homo sapiens
  ( 145 )...( 160 ): >OXYR_HUMAN
LRSLRRRTDRLAVLAT

SEQ ID NO: 16357 - protein, 16 aa, Homo sapiens
  ( 147 )...( 162 ): >OXYR_HUMAN
SLRRRTDRLAVLATWL

SEQ ID NO: 16358 - protein, 16 aa, Homo sapiens
  ( 148 )...( 163 ): >OXYR_HUMAN
LRRRTDRLAVLATWLG

SEQ ID NO: 16359 - protein, 16 aa, Homo sapiens
  ( 149 )...( 164 ): >OXYR_HUMAN
RRRTDRLAVLATWLGC

SEQ ID NO: 16360 - protein, 16 aa, Homo sapiens
  ( 221 )...( 236 ): >OXYR_HUMAN
GLISFKIWQNLRLKTA

SEQ ID NO: 16361 - protein, 16 aa, Homo sapiens
  ( 222 )...( 237 ): >OXYR_HUMAN
LISFKIWQNLRLKTAA

SEQ ID NO: 16362 - protein, 16 aa, Homo sapiens
  ( 223 )...( 238 ): >OXYR_HUMAN
ISFKIWQNLRLKTAAA

SEQ ID NO: 16363 - protein, 16 aa, Homo sapiens
  ( 224 )...( 239 ): >OXYR_HUMAN
SFKIWQNLRLKTAAAA

SEQ ID NO: 16364 - protein, 16 aa, Homo sapiens
  ( 225 )...( 240 ): >OXYR_HUMAN
FKIWQNLRLKTAAAAA

SEQ ID NO: 16365 - protein, 16 aa, Homo sapiens
  ( 226 )...( 241 ): >OXYR_HUMAN
KIWQNLRLKTAAAAAA

SEQ ID NO: 16366 - protein, 16 aa, Homo sapiens
  ( 253 )...( 268 ): >OXYR_HUMAN
GRVALARVSSVKLISK

SEQ ID NO: 16367 - protein, 16 aa, Homo sapiens
  ( 254 )...( 269 ): >OXYR_HUMAN
RVALARVSSVKLISKA

SEQ ID NO: 16368 - protein, 16 aa, Homo sapiens
  ( 255 )...( 270 ): >OXYR_HUMAN
VALARVSSVKLISKAK

SEQ ID NO: 16369 - protein, 16 aa, Homo sapiens
  ( 256 )...( 271 ): >OXYR_HUMAN
ALARVSSVKLISKAKI

SEQ ID NO: 16370 - protein, 16 aa, Homo sapiens
  ( 257 )...( 272 ): >OXYR_HUMAN
LARVSSVKLISKAKIR

SEQ ID NO: 16371 - protein, 16 aa, Homo sapiens
  ( 258 )...( 273 ): >OXYR_HUMAN
ARVSSVKLISKAKIRT

SEQ ID NO: 16372 - protein, 16 aa, Homo sapiens
  ( 259 )...( 274 ): >OXYR_HUMAN
RVSSVKLISKAKIRTV

SEQ ID NO: 16373 - protein, 16 aa, Homo sapiens
  ( 260 )...( 275 ): >OXYR_HUMAN
VSSVKLISKAKIRTVK

SEQ ID NO: 16374 - protein, 16 aa, Homo sapiens
  ( 261 )...( 276 ): >OXYR_HUMAN
SSVKLISKAKIRTVKM

SEQ ID NO: 16375 - protein, 16 aa, Homo sapiens
  ( 262 )...( 277 ): >OXYR_HUMAN
SVKLISKAKIRTVKMT

SEQ ID NO: 16376 - protein, 16 aa, Homo sapiens
  ( 263 )...( 278 ): >OXYR_HUMAN
VKLISKAKIRTVKMTF

SEQ ID NO: 16377 - protein, 16 aa, Homo sapiens
  ( 264 )...( 279 ): >OXYR_HUMAN
KLISKAKIRTVKMTFI

SEQ ID NO: 16378 - protein, 16 aa, Homo sapiens
  ( 265 )...( 280 ): >OXYR_HUMAN
LISKAKIRTVKMTFII

SEQ ID NO: 16379 - protein, 16 aa, Homo sapiens
  ( 266 )...( 281 ): >OXYR_HUMAN
ISKAKIRTVKMTFIIV

SEQ ID NO: 16380 - protein, 16 aa, Homo sapiens
  ( 267 )...( 282 ): >OXYR_HUMAN
SKAKIRTVKMTFIIVL

SEQ ID NO: 16381 - protein, 16 aa, Homo sapiens
  ( 268 )...( 283 ): >OXYR_HUMAN
KAKIRTVKMTFIIVLA

SEQ ID NO: 16382 - protein, 16 aa, Homo sapiens
  ( 349 )...( 364 ): >OXYR_HUMAN
ASYLKGRRLGETSASK

SEQ ID NO: 16383 - protein, 16 aa, Homo sapiens
  ( 350 )...( 365 ): >OXYR_HUMAN
SYLKGRRLGETSASKK

SEQ ID NO: 16384 - protein, 16 aa, Homo sapiens
  ( 351 )...( 366 ): >OXYR_HUMAN
YLKGRRLGETSASKKS

SEQ ID NO: 16385 - protein, 16 aa, Homo sapiens
  ( 352 )...( 367 ): >OXYR_HUMAN
LKGRRLGETSASKKSN

SEQ ID NO: 16386 - protein, 16 aa, Homo sapiens
  ( 353 )...( 368 ): >OXYR_HUMAN
KGRRLGETSASKKSNS

SEQ ID NO: 16387 - protein, 16 aa, Homo sapiens
  ( 153 )...( 168 ): >OYA1_HUMAN
RAAILVAPCLVLIKCR

SEQ ID NO: 16388 - protein, 16 aa, Homo sapiens
  ( 163 )...( 178 ): >OYD1_HUMAN
IFLLRRLPYCGHRVMT

SEQ ID NO: 16389 - protein, 16 aa, Homo sapiens
  ( 165 )...( 180 ): >OYD1_HUMAN
LLRRLPYCGHRVMTHT

SEQ ID NO: 16390 - protein, 16 aa, Homo sapiens
  ( 291 )...( 306 ): >OYD1_HUMAN
LNPILYGARTKEIRSR

SEQ ID NO: 16391 - protein, 16 aa, Homo sapiens
  ( 292 )...( 307 ): >OYD1_HUMAN
NPILYGARTKEIRSRL

SEQ ID NO: 16392 - protein, 16 aa, Homo sapiens
  ( 293 )...( 308 ): >OYD1_HUMAN
PILYGARTKEIRSRLL

SEQ ID NO: 16393 - protein, 16 aa, Homo sapiens
  ( 294 )...( 309 ): >OYD1_HUMAN
ILYGARTKEIRSRLLK

SEQ ID NO: 16394 - protein, 16 aa, Homo sapiens
  ( 295 )...( 310 ): >OYD1_HUMAN
LYGARTKEIRSRLLKL

SEQ ID NO: 16395 - protein, 16 aa, Homo sapiens
  ( 296 )...( 311 ): >OYD1_HUMAN
YGARTKEIRSRLLKLL

SEQ ID NO: 16396 - protein, 16 aa, Homo sapiens
  ( 297 )...( 312 ): >OYD1_HUMAN
GARTKEIRSRLLKLLH

SEQ ID NO: 16397 - protein, 16 aa, Homo sapiens
  ( 298 )...( 313 ): >OYD1_HUMAN
ARTKEIRSRLLKLLHL

SEQ ID NO: 16398 - protein, 16 aa, Homo sapiens
  ( 299 )...( 314 ): >OYD1_HUMAN
RTKEIRSRLLKLLHLG

SEQ ID NO: 16399 - protein, 16 aa, Homo sapiens
  ( 300 )...( 315 ): >OYD1_HUMAN
TKEIRSRLLKLLHLGK

SEQ ID NO: 16400 - protein, 16 aa, Homo sapiens
  ( 301 )...( 316 ): >OYD1_HUMAN
KEIRSRLLKLLHLGKT

SEQ ID NO: 16401 - protein, 16 aa, Homo sapiens
  ( 303 )...( 318 ): >OYD1_HUMAN
IRSRLLKLLHLGKTSI

SEQ ID NO: 16402 - protein, 15 aa, Homo sapiens
  ( 304 )...( 319 ): >OYD1_HUMAN
RSRLLKLLHLGKTSI

SEQ ID NO: 16403 - protein, 16 aa, Homo sapiens
  ( 125 )...( 140 ): >P2UR_HUMAN
TCISVHRCLGVLRPLR

SEQ ID NO: 16404 - protein, 16 aa, Homo sapiens
  ( 127 )...( 142 ): >P2UR_HUMAN
ISVHRCLGVLRPLRSL

SEQ ID NO: 16405 - protein, 16 aa, Homo sapiens
  ( 128 )...( 143 ): >P2UR_HUMAN
SVHRCLGVLRPLRSLR

SEQ ID NO: 16406 - protein, 16 aa, Homo sapiens
  ( 129 )...( 144 ): >P2UR_HUMAN
VHRCLGVLRPLRSLRW

SEQ ID NO: 16407 - protein, 16 aa, Homo sapiens
  ( 130 )...( 145 ): >P2UR_HUMAN
HRCLGVLRPLRSLRWG

SEQ ID NO: 16408 - protein, 16 aa, Homo sapiens
  ( 132 )...( 147 ): >P2UR_HUMAN
CLGVLRPLRSLRWGRA

SEQ ID NO: 16409 - protein, 16 aa, Homo sapiens
  ( 144 )...( 159 ): >P2UR_HUMAN
WGRARYARRVAGAVWV

SEQ ID NO: 16410 - protein, 16 aa, Homo sapiens
  ( 145 )...( 160 ): >P2UR_HUMAN
GRARYARRVAGAVWVL

SEQ ID NO: 16411 - protein, 16 aa, Homo sapiens
  ( 146 )...( 161 ): >P2UR_HUMAN
RARYARRVAGAVWVLV

SEQ ID NO: 16412 - protein, 16 aa, Homo sapiens
  ( 147 )...( 162 ): >P2UR_HUMAN
ARYARRVAGAVWVLVL

SEQ ID NO: 16413 - protein, 16 aa, Homo sapiens
  ( 148 )...( 163 ): >P2UR_HUMAN
RYARRVAGAVWVLVLA

SEQ ID NO: 16414 - protein, 16 aa, Homo sapiens
  ( 218 )...( 233 ): >P2UR_HUMAN
YVLMARRLLKPAYGTS

SEQ ID NO: 16415 - protein, 16 aa, Homo sapiens
  ( 219 )...( 234 ): >P2UR_HUMAN
VLMARRLLKPAYGTSG

SEQ ID NO: 16416 - protein, 16 aa, Homo sapiens
  ( 220 )...( 235 ): >P2UR_HUMAN
LMARRLLKPAYGTSGG

SEQ ID NO: 16417 - protein, 16 aa, Homo sapiens
  ( 221 )...( 236 ): >P2UR_HUMAN
MARRLLKPAYGTSGGL

SEQ ID NO: 16418 - protein, 16 aa, Homo sapiens
  ( 223 )...( 238 ): >P2UR_HUMAN
RRLLKPAYGTSGGLPR

SEQ ID NO: 16419 - protein, 16 aa, Homo sapiens
  ( 227 )...( 242 ): >P2UR_HUMAN
KPAYGTSGGLPRAKRK

SEQ ID NO: 16420 - protein, 16 aa, Homo sapiens
  ( 230 )...( 245 ): >P2UR_HUMAN
YGTSGGLPRAKRKSVR

SEQ ID NO: 16421 - protein, 16 aa, Homo sapiens
  ( 231 )...( 246 ): >P2UR_HUMAN
GTSGGLPRAKRKSVRT

SEQ ID NO: 16422 - protein, 16 aa, Homo sapiens
  ( 232 )...( 247 ): >P2UR_HUMAN
TSGGLPRAKRKSVRTI

SEQ ID NO: 16423 - protein, 16 aa, Homo sapiens
  ( 233 )...( 248 ): >P2UR_HUMAN
SGGLPRAKRKSVRTIA

SEQ ID NO: 16424 - protein, 16 aa, Homo sapiens
  ( 234 )...( 249 ): >P2UR_HUMAN
GGLPRAKRKSVRTIAV

SEQ ID NO: 16425 - protein, 16 aa, Homo sapiens
  ( 235 )...( 250 ): >P2UR_HUMAN
GLPRAKRKSVRTIAVV

SEQ ID NO: 16426 - protein, 16 aa, Homo sapiens
  ( 236 )...( 251 ): >P2UR_HUMAN
LPRAKRKSVRTIAVVL

SEQ ID NO: 16427 - protein, 16 aa, Homo sapiens
  ( 237 )...( 252 ): >P2UR_HUMAN
PRAKRKSVRTIAVVLA

SEQ ID NO: 16428 - protein, 16 aa, Homo sapiens
  ( 238 )...( 253 ): >P2UR_HUMAN
RAKRKSVRTIAVVLAV

SEQ ID NO: 16429 - protein, 16 aa, Homo sapiens
  ( 239 )...( 254 ): >P2UR_HUMAN
AKRKSVRTIAVVLAVF

SEQ ID NO: 16430 - protein, 16 aa, Homo sapiens
  ( 240 )...( 255 ): >P2UR_HUMAN
KRKSVRTIAVVLAVFA

SEQ ID NO: 16431 - protein, 16 aa, Homo sapiens
  ( 241 )...( 256 ): >P2UR_HUMAN
RKSVRTIAVVLAVFAL

SEQ ID NO: 16432 - protein, 16 aa, Homo sapiens
  ( 303 )...( 318 ): >P2UR_HUMAN
PVLYFLAGQRLVRFAR

SEQ ID NO: 16433 - protein, 16 aa, Homo sapiens
  ( 306 )...( 321 ): >P2UR_HUMAN
YFLAGQRLVRFARDAK

SEQ ID NO: 16434 - protein, 16 aa, Homo sapiens
  ( 307 )...( 322 ): >P2UR_HUMAN
FLAGQRLVRFARDAKP

SEQ ID NO: 16435 - protein, 16 aa, Homo sapiens
  ( 308 )...( 323 ): >P2UR_HUMAN
LAGQRLVRFARDAKPP

SEQ ID NO: 16436 - protein, 16 aa, Homo sapiens
  ( 309 )...( 324 ): >P2UR_HUMAN
AGQRLVRFARDAKPPT

SEQ ID NO: 16437 - protein, 16 aa, Homo sapiens
  ( 310 )...( 325 ): >P2UR_HUMAN
GQRLVRFARDAKPPTG

SEQ ID NO: 16438 - protein, 16 aa, Homo sapiens
  ( 324 )...( 339 ): >P2UR_HUMAN
TGPSPATPARRRLGLR

SEQ ID NO: 16439 - protein, 16 aa, Homo sapiens
  ( 325 )...( 340 ): >P2UR_HUMAN
GPSPATPARRRLGLRR

SEQ ID NO: 16440 - protein, 16 aa, Homo sapiens
  ( 326 )...( 341 ): >P2UR_HUMAN
PSPATPARRRLGLRRS

SEQ ID NO: 16441 - protein, 16 aa, Homo sapiens
  ( 327 )...( 342 ): >P2UR_HUMAN
SPATPARRRLGLRRSD

SEQ ID NO: 16442 - protein, 16 aa, Homo sapiens
  ( 329 )...( 344 ): >P2UR_HUMAN
ATPARRRLGLRRSDRT

SEQ ID NO: 16443 - protein, 16 aa, Homo sapiens
  ( 335 )...( 350 ): >P2UR_HUMAN
RLGLRRSDRTDMQRIG

SEQ ID NO: 16444 - protein, 16 aa, Homo sapiens
  ( 130 )...( 145 ): >P2Y4_HUMAN
SVHRYLGICHPLRALR

SEQ ID NO: 16445 - protein, 16 aa, Homo sapiens
  ( 135 )...( 150 ): >P2Y4_HUMAN
LGICHPLRALRWGRPR

SEQ ID NO: 16446 - protein, 16 aa, Homo sapiens
  ( 136 )...( 151 ): >P2Y4_HUMAN
GICHPLRALRWGRPRL

SEQ ID NO: 16447 - protein, 16 aa, Homo sapiens
  ( 139 )...( 154 ): >P2Y4_HUMAN
HPLRALRWGRPRLAGL

SEQ ID NO: 16448 - protein, 16 aa, Homo sapiens
  ( 140 )...( 155 ): >P2Y4_HUMAN
PLRALRWGRPRLAGLL

SEQ ID NO: 16449 - protein, 16 aa, Homo sapiens
  ( 141 )...( 156 ): >P2Y4_HUMAN
LRALRWGRPRLAGLLC

SEQ ID NO: 16450 - protein, 16 aa, Homo sapiens
  ( 142 )...( 157 ): >P2Y4_HUMAN
RALRWGRPRLAGLLCL

SEQ ID NO: 16451 - protein, 16 aa, Homo sapiens
  ( 143 )...( 158 ): >P2Y4_HUMAN
ALRWGRPRLAGLLCLA

SEQ ID NO: 16452 - protein, 16 aa, Homo sapiens
  ( 144 )...( 159 ): >P2Y4_HUMAN
LRWGRPRLAGLLCLAV

SEQ ID NO: 16453 - protein, 16 aa, Homo sapiens
  ( 145 )...( 160 ): >P2Y4_HUMAN
RWGRPRLAGLLCLAVW

SEQ ID NO: 16454 - protein, 16 aa, Homo sapiens
  ( 231 )...( 246 ): >P2Y4_HUMAN
LPGSAQSSSRLRSLRT

SEQ ID NO: 16455 - protein, 16 aa, Homo sapiens
  ( 232 )...( 247 ): >P2Y4_HUMAN
PGSAQSSSRLRSLRTI

SEQ ID NO: 16456 - protein, 16 aa, Homo sapiens
  ( 233 )...( 248 ): >P2Y4_HUMAN
GSAQSSSRLRSLRTIA

SEQ ID NO: 16457 - protein, 16 aa, Homo sapiens
  ( 234 )...( 249 ): >P2Y4_HUMAN
SAQSSSRLRSLRTIAV

SEQ ID NO: 16458 - protein, 16 aa, Homo sapiens
  ( 235 )...( 250 ): >P2Y4_HUMAN
AQSSSRLRSLRTIAVV

SEQ ID NO: 16459 - protein, 16 aa, Homo sapiens
  ( 236 )...( 251 ): >P2Y4_HUMAN
QSSSRLRSLRTIAVVL

SEQ ID NO: 16460 - protein, 16 aa, Homo sapiens
  ( 237 )...( 252 ): >P2Y4_HUMAN
SSSRLRSLRTIAVVLT

SEQ ID NO: 16461 - protein, 16 aa, Homo sapiens
  ( 238 )...( 253 ): >P2Y4_HUMAN
SSRLRSLRTIAVVLTV

SEQ ID NO: 16462 - protein, 16 aa, Homo sapiens
  ( 239 )...( 254 ): >P2Y4_HUMAN
SRLRSLRTIAVVLTVF

SEQ ID NO: 16463 - protein, 16 aa, Homo sapiens
  ( 240 )...( 255 ): >P2Y4_HUMAN
RLRSLRTIAVVLTVFA

SEQ ID NO: 16464 - protein, 16 aa, Homo sapiens
  ( 278 )...( 293 ): >P2Y4_HUMAN
CRVLNIVNVVYKVTRP

SEQ ID NO: 16465 - protein, 16 aa, Homo sapiens
  ( 279 )...( 294 ): >P2Y4_HUMAN
RVLNIVNVVYKVTRPL

SEQ ID NO: 16466 - protein, 16 aa, Homo sapiens
  ( 307 )...( 322 ): >P2Y4_HUMAN
LLTGDKYRRQLRQLCG

SEQ ID NO: 16467 - protein, 16 aa, Homo sapiens
  ( 308 )...( 323 ): >P2Y4_HUMAN
LTGDKYRRQLRQLCGG

SEQ ID NO: 16468 - protein, 16 aa, Homo sapiens
  ( 309 )...( 324 ): >P2Y4_HUMAN
TGDKYRRQLRQLCGGG

SEQ ID NO: 16469 - protein, 16 aa, Homo sapiens
  ( 310 )...( 325 ): >P2Y4_HUMAN
GDKYRRQLRQLCGGGK

SEQ ID NO: 16470 - protein, 16 aa, Homo sapiens
  ( 311 )...( 326 ): >P2Y4_HUMAN
DKYRRQLRQLCGGGKP

SEQ ID NO: 16471 - protein, 16 aa, Homo sapiens
  ( 312 )...( 327 ): >P2Y4_HUMAN
KYRRQLRQLCGGGKPQ

SEQ ID NO: 16472 - protein, 16 aa, Homo sapiens
  ( 313 )...( 328 ): >P2Y4_HUMAN
YRRQLRQLCGGGKPQP

SEQ ID NO: 16473 - protein, 16 aa, Homo sapiens
  ( 314 )...( 329 ): >P2Y4_HUMAN
RRQLRQLCGGGKPQPR

SEQ ID NO: 16474 - protein, 16 aa, Homo sapiens
  ( 315 )...( 330 ): >P2Y4_HUMAN
RQLRQLCGGGKPQPRT

SEQ ID NO: 16475 - protein, 16 aa, Homo sapiens
  ( 316 )...( 331 ): >P2Y4_HUMAN
QLRQLCGGGKPQPRTA

SEQ ID NO: 16476 - protein, 16 aa, Homo sapiens
  ( 114 )...( 129 ): >P2Y5_HUMAN
RFLAIVYPFKSKTLRT

SEQ ID NO: 16477 - protein, 16 aa, Homo sapiens
  ( 115 )...( 130 ): >P2Y5_HUMAN
FLAIVYPFKSKTLRTK

SEQ ID NO: 16478 - protein, 16 aa, Homo sapiens
  ( 116 )...( 131 ): >P2Y5_HUMAN
LAIVYPFKSKTLRTKR

SEQ ID NO: 16479 - protein, 16 aa, Homo sapiens
  ( 121 )...( 136 ): >P2Y5_HUMAN
PFKSKTLRTKRNAKIV

SEQ ID NO: 16480 - protein, 16 aa, Homo sapiens
  ( 122 )...( 137 ): >P2Y5_HUMAN
FKSKTLRTKRNAKIVC

SEQ ID NO: 16481 - protein, 16 aa, Homo sapiens
  ( 123 )...( 138 ): >P2Y5_HUMAN
KSKTLRTKRNAKIVCT

SEQ ID NO: 16482 - protein, 16 aa, Homo sapiens
  ( 124 )...( 139 ): >P2Y5_HUMAN
SKTLRTKRNAKIVCTG

SEQ ID NO: 16483 - protein, 16 aa, Homo sapiens
  ( 125 )...( 140 ): >P2Y5_HUMAN
KTLRTKRNAKIVCTGV

SEQ ID NO: 16484 - protein, 16 aa, Homo sapiens
  ( 126 )...( 141 ): >P2Y5_HUMAN
TLRTKRNAKIVCTGVW

SEQ ID NO: 16485 - protein, 16 aa, Homo sapiens
  ( 127 )...( 142 ): >P2Y5_HUMAN
LRTKRNAKIVCTGVWL

SEQ ID NO: 16486 - protein, 16 aa, Homo sapiens
  ( 128 )...( 143 ): >P2Y5_HUMAN
RTKRNAKIVCTGVWLT

SEQ ID NO: 16487 - protein, 16 aa, Homo sapiens
  ( 129 )...( 144 ): >P2Y5_HUMAN
TKRNAKIVCTGVWLTV

SEQ ID NO: 16488 - protein, 16 aa, Homo sapiens
  ( 130 )...( 145 ): >P2Y5_HUMAN
KRNAKIVCTGVWLTVI

SEQ ID NO: 16489 - protein, 16 aa, Homo sapiens
  ( 206 )...( 221 ): >P2Y5_HUMAN
MVLKTLTKPVTLSRSK

SEQ ID NO: 16490 - protein, 16 aa, Homo sapiens
  ( 207 )...( 222 ): >P2Y5_HUMAN
VLKTLTKPVTLSRSKI

SEQ ID NO: 16491 - protein, 16 aa, Homo sapiens
  ( 208 )...( 223 ): >P2Y5_HUMAN
LKTLTKPVTLSRSKIN

SEQ ID NO: 16492 - protein, 16 aa, Homo sapiens
  ( 209 )...( 224 ): >P2Y5_HUMAN
KTLTKPVTLSRSKINK

SEQ ID NO: 16493 - protein, 16 aa, Homo sapiens
  ( 210 )...( 225 ): >P2Y5_HUMAN
TLTKPVTLSRSKINKT

SEQ ID NO: 16494 - protein, 16 aa, Homo sapiens
  ( 211 )...( 226 ): >P2Y5_HUMAN
LTKPVTLSRSKINKTK

SEQ ID NO: 16495 - protein, 16 aa, Homo sapiens
  ( 212 )...( 227 ): >P2Y5_HUMAN
TKPVTLSRSKINKTKV

SEQ ID NO: 16496 - protein, 16 aa, Homo sapiens
  ( 213 )...( 228 ): >P2Y5_HUMAN
KPVTLSRSKINKTKVL

SEQ ID NO: 16497 - protein, 16 aa, Homo sapiens
  ( 214 )...( 229 ): >P2Y5_HUMAN
PVTLSRSKINKTKVLK

SEQ ID NO: 16498 - protein, 16 aa, Homo sapiens
  ( 215 )...( 230 ): >P2Y5_HUMAN
VTLSRSKINKTKVLKM

SEQ ID NO: 16499 - protein, 16 aa, Homo sapiens
  ( 216 )...( 231 ): >P2Y5_HUMAN
TLSRSKINKTKVLKMI

SEQ ID NO: 16500 - protein, 16 aa, Homo sapiens
  ( 217 )...( 232 ): >P2Y5_HUMAN
LSRSKINKTKVLKMIF

SEQ ID NO: 16501 - protein, 16 aa, Homo sapiens
  ( 218 )...( 233 ): >P2Y5_HUMAN
SRSKINKTKVLKMIFV

SEQ ID NO: 16502 - protein, 16 aa, Homo sapiens
  ( 219 )...( 234 ): >P2Y5_HUMAN
RSKINKTKVLKMIFVH

SEQ ID NO: 16503 - protein, 16 aa, Homo sapiens
  ( 220 )...( 235 ): >P2Y5_HUMAN
SKINKTKVLKMIFVHL

SEQ ID NO: 16504 - protein, 16 aa, Homo sapiens
  ( 221 )...( 236 ): >P2Y5_HUMAN
KINKTKVLKMIFVHLI

SEQ ID NO: 16505 - protein, 16 aa, Homo sapiens
  ( 45 )...( 60 ): >P2Y6_HUMAN
ICVITQICTSRRALTR

SEQ ID NO: 16506 - protein, 16 aa, Homo sapiens
  ( 46 )...( 61 ): >P2Y6_HUMAN
CVITQICTSRRALTRT

SEQ ID NO: 16507 - protein, 16 aa, Homo sapiens
  ( 47 )...( 62 ): >P2Y6_HUMAN
VITQICTSRRALTRTA

SEQ ID NO: 16508 - protein, 16 aa, Homo sapiens
  ( 48 )...( 63 ): >P2Y6_HUMAN
ITQICTSRRALTRTAV

SEQ ID NO: 16509 - protein, 16 aa, Homo sapiens
  ( 49 )...( 64 ): >P2Y6_HUMAN
TQICTSRRALTRTAVY

SEQ ID NO: 16510 - protein, 16 aa, Homo sapiens
  ( 50 )...( 65 ): >P2Y6_HUMAN
QICTSRRALTRTAVYT

SEQ ID NO: 16511 - protein, 16 aa, Homo sapiens
  ( 51 )...( 66 ): >P2Y6_HUMAN
ICTSRRALTRTAVYTL

SEQ ID NO: 16512 - protein, 16 aa, Homo sapiens
  ( 52 )...( 67 ): >P2Y6_HUMAN
CTSRRALTRTAVYTLN

SEQ ID NO: 16513 - protein, 16 aa, Homo sapiens
  ( 53 )...( 68 ): >P2Y6_HUMAN
TSRRALTRTAVYTLNL

SEQ ID NO: 16514 - protein, 16 aa, Homo sapiens
  ( 54 )...( 69 ): >P2Y6_HUMAN
SRRALTRTAVYTLNLA

SEQ ID NO: 16515 - protein, 16 aa, Homo sapiens
  ( 55 )...( 70 ): >P2Y6_HUMAN
RRALTRTAVYTLNLAL

SEQ ID NO: 16516 - protein, 16 aa, Homo sapiens
  ( 132 )...( 147 ): >P2Y6_HUMAN
LAPWHKRGGRRAAWLV

SEQ ID NO: 16517 - protein, 16 aa, Homo sapiens
  ( 135 )...( 150 ): >P2Y6_HUMAN
WHKRGGRRAAWLVCVA

SEQ ID NO: 16518 - protein, 16 aa, Homo sapiens
  ( 136 )...( 151 ): >P2Y6_HUMAN
HKRGGRRAAWLVCVAV

SEQ ID NO: 16519 - protein, 16 aa, Homo sapiens
  ( 137 )...( 152 ): >P2Y6_HUMAN
KRGGRRAAWLVCVAVW

SEQ ID NO: 16520 - protein, 16 aa, Homo sapiens
  ( 138 )...( 153 ): >P2Y6_HUMAN
RGGRRAAWLVCVAVWL

SEQ ID NO: 16521 - protein, 16 aa, Homo sapiens
  ( 228 )...( 243 ): >P2Y6_HUMAN
PVAQERRGKAARMAVV

SEQ ID NO: 16522 - protein, 16 aa, Homo sapiens
  ( 229 )...( 244 ): >P2Y6_HUMAN
VAQERRGKAARMAVVV

SEQ ID NO: 16523 - protein, 16 aa, Homo sapiens
  ( 230 )...( 245 ): >P2Y6_HUMAN
AQERRGKAARMAVVVA

SEQ ID NO: 16524 - protein, 16 aa, Homo sapiens
  ( 231 )...( 246 ): >P2Y6_HUMAN
QERRGKAARMAVVVAA

SEQ ID NO: 16525 - protein, 16 aa, Homo sapiens
  ( 233 )...( 248 ): >P2Y6_HUMAN
RRGKAARMAVVVAAAF

SEQ ID NO: 16526 - protein, 14 aa, Homo sapiens
  ( 315 )...( 330 ): >P2Y6_HUMAN
LLQKLTAKWQRQGR

SEQ ID NO: 16527 - protein, 16 aa, Homo sapiens
  ( 37 )...( 52 ): >P2Y7_HUMAN
SFVVWSILKRMQKRSV

SEQ ID NO: 16528 - protein, 16 aa, Homo sapiens
  ( 38 )...( 53 ): >P2Y7_HUMAN
FVVWSILKRMQKRSVT

SEQ ID NO: 16529 - protein, 16 aa, Homo sapiens
  ( 39 )...( 54 ): >P2Y7_HUMAN
VVWSILKRMQKRSVTA

SEQ ID NO: 16530 - protein, 16 aa, Homo sapiens
  ( 40 )...( 55 ): >P2Y7_HUMAN
VWSILKRMQKRSVTAL

SEQ ID NO: 16531 - protein, 16 aa, Homo sapiens
  ( 41 )...( 56 ): >P2Y7_HUMAN
WSILKRMQKRSVTALM

SEQ ID NO: 16532 - protein, 16 aa, Homo sapiens
  ( 42 )...( 57 ): >P2Y7_HUMAN
SILKRMQKRSVTALMV

SEQ ID NO: 16533 - protein, 16 aa, Homo sapiens
  ( 43 )...( 58 ): >P2Y7_HUMAN
ILKRMQKRSVTALMVL

SEQ ID NO: 16534 - protein, 16 aa, Homo sapiens
  ( 44 )...( 59 ): >P2Y7_HUMAN
LKRMQKRSVTALMVLN

SEQ ID NO: 16535 - protein, 16 aa, Homo sapiens
  ( 45 )...( 60 ): >P2Y7_HUMAN
KRMQKRSVTALMVLNL

SEQ ID NO: 16536 - protein, 16 aa, Homo sapiens
  ( 46 )...( 61 ): >P2Y7_HUMAN
RMQKRSVTALMVLNLA

SEQ ID NO: 16537 - protein, 16 aa, Homo sapiens
  ( 114 )...( 129 ): >P2Y7_HUMAN
DRSLAVARPFVSQKLR

SEQ ID NO: 16538 - protein, 16 aa, Homo sapiens
  ( 115 )...( 130 ): >P2Y7_HUMAN
RSLAVARPFVSQKLRT

SEQ ID NO: 16539 - protein, 16 aa, Homo sapiens
  ( 116 )...( 131 ): >P2Y7_HUMAN
SLAVARPFVSQKLRTK

SEQ ID NO: 16540 - protein, 16 aa, Homo sapiens
  ( 117 )...( 132 ): >P2Y7_HUMAN
LAVARPFVSQKLRTKA

SEQ ID NO: 16541 - protein, 16 aa, Homo sapiens
  ( 118 )...( 133 ): >P2Y7_HUMAN
AVARPFVSQKLRTKAM

SEQ ID NO: 16542 - protein, 16 aa, Homo sapiens
  ( 119 )...( 134 ): >P2Y7_HUMAN
VARPFVSQKLRTKAMA

SEQ ID NO: 16543 - protein, 16 aa, Homo sapiens
  ( 120 )...( 135 ): >P2Y7_HUMAN
ARPFVSQKLRTKAMAR

SEQ ID NO: 16544 - protein, 16 aa, Homo sapiens
  ( 122 )...( 137 ): >P2Y7_HUMAN
PFVSQKLRTKAMARRV

SEQ ID NO: 16545 - protein, 16 aa, Homo sapiens
  ( 123 )...( 138 ): >P2Y7_HUMAN
FVSQKLRTKAMARRVL

SEQ ID NO: 16546 - protein, 16 aa, Homo sapiens
  ( 124 )...( 139 ): >P2Y7_HUMAN
VSQKLRTKAMARRVLA

SEQ ID NO: 16547 - protein, 16 aa, Homo sapiens
  ( 125 )...( 140 ): >P2Y7_HUMAN
SQKLRTKAMARRVLAG

SEQ ID NO: 16548 - protein, 16 aa, Homo sapiens
  ( 126 )...( 141 ): >P2Y7_HUMAN
QKLRTKAMARRVLAGI

SEQ ID NO: 16549 - protein, 16 aa, Homo sapiens
  ( 127 )...( 142 ): >P2Y7_HUMAN
KLRTKAMARRVLAGIW

SEQ ID NO: 16550 - protein, 16 aa, Homo sapiens
  ( 128 )...( 143 ): >P2Y7_HUMAN
LRTKAMARRVLAGIWV

SEQ ID NO: 16551 - protein, 16 aa, Homo sapiens
  ( 129 )...( 144 ): >P2Y7_HUMAN
RTKAMARRVLAGIWVL

SEQ ID NO: 16552 - protein, 16 aa, Homo sapiens
  ( 130 )...( 145 ): >P2Y7_HUMAN
TKAMARRVLAGIWVLS

SEQ ID NO: 16553 - protein, 16 aa, Homo sapiens
  ( 131 )...( 146 ): >P2Y7_HUMAN
KAMARRVLAGIWVLSF

SEQ ID NO: 16554 - protein, 16 aa, Homo sapiens
  ( 197 )...( 212 ): >P2Y7_HUMAN
VVASYSDIGRRLQARR

SEQ ID NO: 16555 - protein, 16 aa, Homo sapiens
  ( 198 )...( 213 ): >P2Y7_HUMAN
VASYSDIGRRLQARRF

SEQ ID NO: 16556 - protein, 16 aa, Homo sapiens
  ( 213 )...( 228 ): >P2Y7_HUMAN
FRRSRRTGRLVVLIIL

SEQ ID NO: 16557 - protein, 16 aa, Homo sapiens
  ( 214 )...( 229 ): >P2Y7_HUMAN
RRSRRTGRLVVLIILT

SEQ ID NO: 16558 - protein, 16 aa, Homo sapiens
  ( 215 )...( 230 ): >P2Y7_HUMAN
RSRRTGRLVVLIILTF

SEQ ID NO: 16559 - protein, 16 aa, Homo sapiens
  ( 216 )...( 231 ): >P2Y7_HUMAN
SRRTGRLVVLIILTFA

SEQ ID NO: 16560 - protein, 16 aa, Homo sapiens
  ( 217 )...( 232 ): >P2Y7_HUMAN
RRTGRLVVLIILTFAA

SEQ ID NO: 16561 - protein, 16 aa, Homo sapiens
  ( 256 )...( 271 ): >P2Y7_HUMAN
LGLVGKRLSLARNVLI

SEQ ID NO: 16562 - protein, 16 aa, Homo sapiens
  ( 258 )...( 273 ): >P2Y7_HUMAN
LVGKRLSLARNVLIAL

SEQ ID NO: 16563 - protein, 16 aa, Homo sapiens
  ( 259 )...( 274 ): >P2Y7_HUMAN
VGKRLSLARNVLIALA

SEQ ID NO: 16564 - protein, 16 aa, Homo sapiens
  ( 260 )...( 275 ): >P2Y7_HUMAN
GKRLSLARNVLIALAF

SEQ ID NO: 16565 - protein, 16 aa, Homo sapiens
  ( 261 )...( 276 ): >P2Y7_HUMAN
KRLSLARNVLIALAFL

SEQ ID NO: 16566 - protein, 16 aa, Homo sapiens
  ( 144 )...( 159 ): >P2Y9_HUMAN
FRSRTIRTRRNSAIVC

SEQ ID NO: 16567 - protein, 16 aa, Homo sapiens
  ( 145 )...( 160 ): >P2Y9_HUMAN
RSRTIRTRRNSAIVCA

SEQ ID NO: 16568 - protein, 16 aa, Homo sapiens
  ( 146 )...( 161 ): >P2Y9_HUMAN
SRTIRTRRNSAIVCAG

SEQ ID NO: 16569 - protein, 16 aa, Homo sapiens
  ( 147 )...( 162 ): >P2Y9_HUMAN
RTIRTRRNSAIVCAGV

SEQ ID NO: 16570 - protein, 16 aa, Homo sapiens
  ( 148 )...( 163 ): >P2Y9_HUMAN
TIRTRRNSAIVCAGVW

SEQ ID NO: 16571 - protein, 16 aa, Homo sapiens
  ( 149 )...( 164 ): >P2Y9_HUMAN
IRTRRNSAIVCAGVWI

SEQ ID NO: 16572 - protein, 16 aa, Homo sapiens
  ( 150 )...( 165 ): >P2Y9_HUMAN
RTRRNSAIVCAGVWIL

SEQ ID NO: 16573 - protein, 16 aa, Homo sapiens
  ( 191 )...( 206 ): >P2Y9_HUMAN
GFSKRVWKTYLSKITI

SEQ ID NO: 16574 - protein, 16 aa, Homo sapiens
  ( 193 )...( 208 ): >P2Y9_HUMAN
SKRVWKTYLSKITIFI

SEQ ID NO: 16575 - protein, 16 aa, Homo sapiens
  ( 218 )...( 233 ): >P2Y9_HUMAN
ILNVSCSSVVLRTLRK

SEQ ID NO: 16576 - protein, 16 aa, Homo sapiens
  ( 219 )...( 234 ): >P2Y9_HUMAN
LNVSCSSVVLRTLRKP

SEQ ID NO: 16577 - protein, 16 aa, Homo sapiens
  ( 221 )...( 236 ): >P2Y9_HUMAN
VSCSSVVLRTLRKPAT

SEQ ID NO: 16578 - protein, 16 aa, Homo sapiens
  ( 222 )...( 237 ): >P2Y9_HUMAN
SCSSVVLRTLRKPATL

SEQ ID NO: 16579 - protein, 16 aa, Homo sapiens
  ( 223 )...( 238 ): >P2Y9_HUMAN
CSSVVLRTLRKPATLS

SEQ ID NO: 16580 - protein, 16 aa, Homo sapiens
  ( 224 )...( 239 ): >P2Y9_HUMAN
SSVVLRTLRKPATLSQ

SEQ ID NO: 16581 - protein, 16 aa, Homo sapiens
  ( 225 )...( 240 ): >P2Y9_HUMAN
SVVLRTLRKPATLSQI

SEQ ID NO: 16582 - protein, 16 aa, Homo sapiens
  ( 226 )...( 241 ): >P2Y9_HUMAN
VVLRTLRKPATLSQIG

SEQ ID NO: 16583 - protein, 16 aa, Homo sapiens
  ( 227 )...( 242 ): >P2Y9_HUMAN
VLRTLRKPATLSQIGT

SEQ ID NO: 16584 - protein, 16 aa, Homo sapiens
  ( 228 )...( 243 ): >P2Y9_HUMAN
LRTLRKPATLSQIGTN

SEQ ID NO: 16585 - protein, 16 aa, Homo sapiens
  ( 229 )...( 244 ): >P2Y9_HUMAN
RTLRKPATLSQIGTNK

SEQ ID NO: 16586 - protein, 16 aa, Homo sapiens
  ( 230 )...( 245 ): >P2Y9_HUMAN
TLRKPATLSQIGTNKK

SEQ ID NO: 16587 - protein, 16 aa, Homo sapiens
  ( 231 )...( 246 ): >P2Y9_HUMAN
LRKPATLSQIGTNKKK

SEQ ID NO: 16588 - protein, 16 aa, Homo sapiens
  ( 232 )...( 247 ): >P2Y9_HUMAN
RKPATLSQIGTNKKKV

SEQ ID NO: 16589 - protein, 16 aa, Homo sapiens
  ( 233 )...( 248 ): >P2Y9_HUMAN
KPATLSQIGTNKKKVL

SEQ ID NO: 16590 - protein, 16 aa, Homo sapiens
  ( 234 )...( 249 ): >P2Y9_HUMAN
PATLSQIGTNKKKVLK

SEQ ID NO: 16591 - protein, 16 aa, Homo sapiens
  ( 235 )...( 250 ): >P2Y9_HUMAN
ATLSQIGTNKKKVLKM

SEQ ID NO: 16592 - protein, 16 aa, Homo sapiens
  ( 236 )...( 251 ): >P2Y9_HUMAN
TLSQIGTNKKKVLKMI

SEQ ID NO: 16593 - protein, 16 aa, Homo sapiens
  ( 237 )...( 252 ): >P2Y9_HUMAN
LSQIGTNKKKVLKMIT

SEQ ID NO: 16594 - protein, 16 aa, Homo sapiens
  ( 238 )...( 253 ): >P2Y9_HUMAN
SQIGTNKKKVLKMITV

SEQ ID NO: 16595 - protein, 16 aa, Homo sapiens
  ( 239 )...( 254 ): >P2Y9_HUMAN
QIGTNKKKVLKMITVH

SEQ ID NO: 16596 - protein, 16 aa, Homo sapiens
  ( 240 )...( 255 ): >P2Y9_HUMAN
IGTNKKKVLKMITVHM

SEQ ID NO: 16597 - protein, 16 aa, Homo sapiens
  ( 241 )...( 256 ): >P2Y9_HUMAN
GTNKKKVLKMITVHMA

SEQ ID NO: 16598 - protein, 16 aa, Homo sapiens
  ( 242 )...( 257 ): >P2Y9_HUMAN
TNKKKVLKMITVHMAV

SEQ ID NO: 16599 - protein, 16 aa, Homo sapiens
  ( 243 )...( 258 ): >P2Y9_HUMAN
NKKKVLKMITVHMAVF

SEQ ID NO: 16600 - protein, 16 aa, Homo sapiens
  ( 244 )...( 259 ): >P2Y9_HUMAN
KKKVLKMITVHMAVFV

SEQ ID NO: 16601 - protein, 16 aa, Homo sapiens
  ( 147 )...( 162 ): >P2YR_HUMAN
AHRYSGVVYPLKSLGR

SEQ ID NO: 16602 - protein, 16 aa, Homo sapiens
  ( 148 )...( 163 ): >P2YR_HUMAN
HRYSGVVYPLKSLGRL

SEQ ID NO: 16603 - protein, 16 aa, Homo sapiens
  ( 149 )...( 164 ): >P2YR_HUMAN
RYSGVVYPLKSLGRLK

SEQ ID NO: 16604 - protein, 16 aa, Homo sapiens
  ( 150 )...( 165 ): >P2YR_HUMAN
YSGVVYPLKSLGRLKK

SEQ ID NO: 16605 - protein, 16 aa, Homo sapiens
  ( 151 )...( 166 ): >P2YR_HUMAN
SGVVYPLKSLGRLKKK

SEQ ID NO: 16606 - protein, 16 aa, Homo sapiens
  ( 152 )...( 167 ): >P2YR_HUMAN
GVVYPLKSLGRLKKKN

SEQ ID NO: 16607 - protein, 16 aa, Homo sapiens
  ( 153 )...( 168 ): >P2YR_HUMAN
VVYPLKSLGRLKKKNA

SEQ ID NO: 16608 - protein, 16 aa, Homo sapiens
  ( 154 )...( 169 ): >P2YR_HUMAN
VYPLKSLGRLKKKNAI

SEQ ID NO: 16609 - protein, 16 aa, Homo sapiens
  ( 155 )...( 170 ): >P2YR_HUMAN
YPLKSLGRLKKKNAIC

SEQ ID NO: 16610 - protein, 16 aa, Homo sapiens
  ( 156 )...( 171 ): >P2YR_HUMAN
PLKSLGRLKKKNAICI

SEQ ID NO: 16611 - protein, 16 aa, Homo sapiens
  ( 157 )...( 172 ): >P2YR_HUMAN
LKSLGRLKKKNAICIS

SEQ ID NO: 16612 - protein, 16 aa, Homo sapiens
  ( 158 )...( 173 ): >P2YR_HUMAN
KSLGRLKKKNAICISV

SEQ ID NO: 16613 - protein, 16 aa, Homo sapiens
  ( 159 )...( 174 ): >P2YR_HUMAN
SLGRLKKKNAICISVL

SEQ ID NO: 16614 - protein, 16 aa, Homo sapiens
  ( 160 )...( 175 ): >P2YR_HUMAN
LGRLKKKNAICISVLV

SEQ ID NO: 16615 - protein, 16 aa, Homo sapiens
  ( 161 )...( 176 ): >P2YR_HUMAN
GRLKKKNAICISVLVW

SEQ ID NO: 16616 - protein, 16 aa, Homo sapiens
  ( 162 )...( 177 ): >P2YR_HUMAN
RLKKKNAICISVLVWL

SEQ ID NO: 16617 - protein, 16 aa, Homo sapiens
  ( 185 )...( 200 ): >P2YR_HUMAN
PILFYSGTGVRKNKTI

SEQ ID NO: 16618 - protein, 16 aa, Homo sapiens
  ( 251 )...( 266 ): >P2YR_HUMAN
NSPLRRKSIYLVIIVL

SEQ ID NO: 16619 - protein, 16 aa, Homo sapiens
  ( 326 )...( 341 ): >P2YR_HUMAN
LAGDTFRRRLSRATRK

SEQ ID NO: 16620 - protein, 16 aa, Homo sapiens
  ( 327 )...( 342 ): >P2YR_HUMAN
AGDTFRRRLSRATRKA

SEQ ID NO: 16621 - protein, 16 aa, Homo sapiens
  ( 328 )...( 343 ): >P2YR_HUMAN
GDTFRRRLSRATRKAS

SEQ ID NO: 16622 - protein, 16 aa, Homo sapiens
  ( 335 )...( 350 ): >P2YR_HUMAN
LSRATRKASRRSEANL

SEQ ID NO: 16623 - protein, 16 aa, Homo sapiens
  ( 336 )...( 351 ): >P2YR_HUMAN
SRATRKASRRSEANLQ

SEQ ID NO: 16624 - protein, 16 aa, Homo sapiens
  ( 337 )...( 352 ): >P2YR_HUMAN
RATRKASRRSEANLQS

SEQ ID NO: 16625 - protein, 16 aa, Homo sapiens
  ( 338 )...( 353 ): >P2YR_HUMAN
ATRKASRRSEANLQSK

SEQ ID NO: 16626 - protein, 16 aa, Homo sapiens
  ( 339 )...( 354 ): >P2YR_HUMAN
TRKASRRSEANLQSKS

SEQ ID NO: 16627 - protein, 16 aa, Homo sapiens
  ( 165 )...( 180 ): >PACR_HUMAN
LVTLTTAMVILCRFRK

SEQ ID NO: 16628 - protein, 16 aa, Homo sapiens
  ( 166 )...( 181 ): >PACR_HUMAN
VTLTTAMVILCRFRKL

SEQ ID NO: 16629 - protein, 16 aa, Homo sapiens
  ( 167 )...( 182 ): >PACR_HUMAN
TLTTAMVILCRFRKLH

SEQ ID NO: 16630 - protein, 16 aa, Homo sapiens
  ( 168 )...( 183 ): >PACR_HUMAN
LTTAMVILCRFRKLHC

SEQ ID NO: 16631 - protein, 16 aa, Homo sapiens
  ( 169 )...( 184 ): >PACR_HUMAN
TTAMVILCRFRKLHCT

SEQ ID NO: 16632 - protein, 16 aa, Homo sapiens
  ( 170 )...( 185 ): >PACR_HUMAN
TAMVILCRFRKLHCTR

SEQ ID NO: 16633 - protein, 16 aa, Homo sapiens
  ( 171 )...( 186 ): >PACR_HUMAN
AMVILCRFRKLHCTRN

SEQ ID NO: 16634 - protein, 16 aa, Homo sapiens
  ( 109 )...( 124 ): >PAFR_HUMAN
GVITYNRFQAVTRPIK

SEQ ID NO: 16635 - protein, 16 aa, Homo sapiens
  ( 110 )...( 125 ): >PAFR_HUMAN
VITYNRFQAVTRPIKT

SEQ ID NO: 16636 - protein, 16 aa, Homo sapiens
  ( 111 )...( 126 ): >PAFR_HUMAN
ITYNRFQAVTRPIKTA

SEQ ID NO: 16637 - protein, 16 aa, Homo sapiens
  ( 112 )...( 127 ): >PAFR_HUMAN
TYNRFQAVTRPIKTAQ

SEQ ID NO: 16638 - protein, 16 aa, Homo sapiens
  ( 113 )...( 128 ): >PAFR_HUMAN
YNRFQAVTRPIKTAQA

SEQ ID NO: 16639 - protein, 16 aa, Homo sapiens
  ( 114 )...( 129 ): >PAFR_HUMAN
NRFQAVTRPIKTAQAN

SEQ ID NO: 16640 - protein, 16 aa, Homo sapiens
  ( 115 )...( 130 ): >PAFR_HUMAN
RFQAVTRPIKTAQANT

SEQ ID NO: 16641 - protein, 16 aa, Homo sapiens
  ( 116 )...( 131 ): >PAFR_HUMAN
FQAVTRPIKTAQANTR

SEQ ID NO: 16642 - protein, 16 aa, Homo sapiens
  ( 117 )...( 132 ): >PAFR_HUMAN
QAVTRPIKTAQANTRK

SEQ ID NO: 16643 - protein, 16 aa, Homo sapiens
  ( 118 )...( 133 ): >PAFR_HUMAN
AVTRPIKTAQANTRKR

SEQ ID NO: 16644 - protein, 16 aa, Homo sapiens
  ( 119 )...( 134 ): >PAFR_HUMAN
VTRPIKTAQANTRKRG

SEQ ID NO: 16645 - protein, 16 aa, Homo sapiens
  ( 120 )...( 135 ): >PAFR_HUMAN
TRPIKTAQANTRKRGI

SEQ ID NO: 16646 - protein, 16 aa, Homo sapiens
  ( 121 )...( 136 ): >PAFR_HUMAN
RPIKTAQANTRKRGIS

SEQ ID NO: 16647 - protein, 16 aa, Homo sapiens
  ( 122 )...( 137 ): >PAFR_HUMAN
PIKTAQANTRKRGISL

SEQ ID NO: 16648 - protein, 16 aa, Homo sapiens
  ( 123 )...( 138 ): >PAFR_HUMAN
IKTAQANTRKRGISLS

SEQ ID NO: 16649 - protein, 16 aa, Homo sapiens
  ( 124 )...( 139 ): >PAFR_HUMAN
KTAQANTRKRGISLSL

SEQ ID NO: 16650 - protein, 16 aa, Homo sapiens
  ( 125 )...( 140 ): >PAFR_HUMAN
TAQANTRKRGISLSLV

SEQ ID NO: 16651 - protein, 16 aa, Homo sapiens
  ( 126 )...( 141 ): >PAFR_HUMAN
AQANTRKRGISLSLVI

SEQ ID NO: 16652 - protein, 16 aa, Homo sapiens
  ( 127 )...( 142 ): >PAFR_HUMAN
QANTRKRGISLSLVIW

SEQ ID NO: 16653 - protein, 16 aa, Homo sapiens
  ( 128 )...( 143 ): >PAFR_HUMAN
ANTRKRGISLSLVIWV

SEQ ID NO: 16654 - protein, 16 aa, Homo sapiens
  ( 129 )...( 144 ): >PAFR_HUMAN
NTRKRGISLSLVIWVA

SEQ ID NO: 16655 - protein, 16 aa, Homo sapiens
  ( 130 )...( 145 ): >PAFR_HUMAN
TRKRGISLSLVIWVAI

SEQ ID NO: 16656 - protein, 16 aa, Homo sapiens
  ( 131 )...( 146 ): >PAFR_HUMAN
RKRGISLSLVIWVAIV

SEQ ID NO: 16657 - protein, 16 aa, Homo sapiens
  ( 221 )...( 236 ): >PAFR_HUMAN
QRNAEVKRRALWMVCT

SEQ ID NO: 16658 - protein, 16 aa, Homo sapiens
  ( 222 )...( 237 ): >PAFR_HUMAN
RNAEVKRRALWMVCTV

SEQ ID NO: 16659 - protein, 16 aa, Homo sapiens
  ( 287 )...( 302 ): >PAFR_HUMAN
VLDPVIYCFLTKKFRK

SEQ ID NO: 16660 - protein, 16 aa, Homo sapiens
  ( 13 )...( 28 ): >PAR1_HUMAN
FSLCGPLLSARTRARR

SEQ ID NO: 16661 - protein, 16 aa, Homo sapiens
  ( 15 )...( 30 ): >PAR1_HUMAN
LCGPLLSARTRARRPE

SEQ ID NO: 16662 - protein, 16 aa, Homo sapiens
  ( 17 )...( 32 ): >PAR1_HUMAN
GPLLSARTRARRPESK

SEQ ID NO: 16663 - protein, 16 aa, Homo sapiens
  ( 18 )...( 33 ): >PAR1_HUMAN
PLLSARTRARRPESKA

SEQ ID NO: 16664 - protein, 16 aa, Homo sapiens
  ( 19 )...( 34 ): >PAR1_HUMAN
LLSARTRARRPESKAT

SEQ ID NO: 16665 - protein, 16 aa, Homo sapiens
  ( 20 )...( 35 ): >PAR1_HUMAN
LSARTRARRPESKATN

SEQ ID NO: 16666 - protein, 16 aa, Homo sapiens
  ( 21 )...( 36 ): >PAR1_HUMAN
SARTRARRPESKATNA

SEQ ID NO: 16667 - protein, 16 aa, Homo sapiens
  ( 22 )...( 37 ): >PAR1_HUMAN
ARTRARRPESKATNAT

SEQ ID NO: 16668 - protein, 16 aa, Homo sapiens
  ( 23 )...( 38 ): >PAR1_HUMAN
RTRARRPESKATNATL

SEQ ID NO: 16669 - protein, 16 aa, Homo sapiens
  ( 69 )...( 84 ): >PAR1_HUMAN
YRLVSINKSSPLQKQL

SEQ ID NO: 16670 - protein, 16 aa, Homo sapiens
  ( 70 )...( 85 ): >PAR1_HUMAN
RLVSINKSSPLQKQLP

SEQ ID NO: 16671 - protein, 16 aa, Homo sapiens
  ( 130 )...( 145 ): >PAR1_HUMAN
KMKVKKPAVVYMLHLA

SEQ ID NO: 16672 - protein, 16 aa, Homo sapiens
  ( 24 )...( 39 ): >PAR2_HUMAN
GTIQGTNRSSKGRSLI

SEQ ID NO: 16673 - protein, 16 aa, Homo sapiens
  ( 25 )...( 40 ): >PAR2_HUMAN
TIQGTNRSSKGRSLIG

SEQ ID NO: 16674 - protein, 16 aa, Homo sapiens
  ( 26 )...( 41 ): >PAR2_HUMAN
IQGTNRSSKGRSLIGK

SEQ ID NO: 16675 - protein, 16 aa, Homo sapiens
  ( 27 )...( 42 ): >PAR2_HUMAN
QGTNRSSKGRSLIGKV

SEQ ID NO: 16676 - protein, 16 aa, Homo sapiens
  ( 28 )...( 43 ): >PAR2_HUMAN
GTNRSSKGRSLIGKVD

SEQ ID NO: 16677 - protein, 16 aa, Homo sapiens
  ( 29 )...( 44 ): >PAR2_HUMAN
TNRSSKGRSLIGKVDG

SEQ ID NO: 16678 - protein, 16 aa, Homo sapiens
  ( 30 )...( 45 ): >PAR2_HUMAN
NRSSKGRSLIGKVDGT

SEQ ID NO: 16679 - protein, 16 aa, Homo sapiens
  ( 92 )...( 107 ): >PAR2_HUMAN
SNGMALWVFLFRTKKK

SEQ ID NO: 16680 - protein, 16 aa, Homo sapiens
  ( 103 )...( 118 ): >PAR2_HUMAN
RTKKKHPAVIYMANLA

SEQ ID NO: 16681 - protein, 16 aa, Homo sapiens
  ( 184 )...( 199 ): >PAR2_HUMAN
SRKKANIAIGISLAIW

SEQ ID NO: 16682 - protein, 16 aa, Homo sapiens
  ( 185 )...( 200 ): >PAR2_HUMAN
RKKANIAIGISLAIWL

SEQ ID NO: 16683 - protein, 16 aa, Homo sapiens
  ( 276 )...( 291 ): >PAR2_HUMAN
ENSEKKRKRAIKLIVT

SEQ ID NO: 16684 - protein, 16 aa, Homo sapiens
  ( 277 )...( 292 ): >PAR2_HUMAN
NSEKKRKRAIKLIVTV

SEQ ID NO: 16685 - protein, 16 aa, Homo sapiens
  ( 278 )...( 293 ): >PAR2_HUMAN
SEKKRKRAIKLIVTVL

SEQ ID NO: 16686 - protein, 16 aa, Homo sapiens
  ( 279 )...( 294 ): >PAR2_HUMAN
EKKRKRAIKLIVTVLA

SEQ ID NO: 16687 - protein, 16 aa, Homo sapiens
  ( 280 )...( 295 ): >PAR2_HUMAN
KKRKRAIKLIVTVLAM

SEQ ID NO: 16688 - protein, 16 aa, Homo sapiens
  ( 281 )...( 296 ): >PAR2_HUMAN
KRKRAIKLIVTVLAMY

SEQ ID NO: 16689 - protein, 16 aa, Homo sapiens
  ( 352 )...( 367 ): >PAR2_HUMAN
RDHAKNALLCRSVRTV

SEQ ID NO: 16690 - protein, 16 aa, Homo sapiens
  ( 353 )...( 368 ): >PAR2_HUMAN
DHAKNALLCRSVRTVK

SEQ ID NO: 16691 - protein, 16 aa, Homo sapiens
  ( 354 )...( 369 ): >PAR2_HUMAN
HAKNALLCRSVRTVKQ

SEQ ID NO: 16692 - protein, 16 aa, Homo sapiens
  ( 355 )...( 370 ): >PAR2_HUMAN
AKNALLCRSVRTVKQM

SEQ ID NO: 16693 - protein, 16 aa, Homo sapiens
  ( 356 )...( 371 ): >PAR2_HUMAN
KNALLCRSVRTVKQMQ

SEQ ID NO: 16694 - protein, 16 aa, Homo sapiens
  ( 357 )...( 372 ): >PAR2_HUMAN
NALLCRSVRTVKQMQV

SEQ ID NO: 16695 - protein, 16 aa, Homo sapiens
  ( 358 )...( 373 ): >PAR2_HUMAN
ALLCRSVRTVKQMQVS

SEQ ID NO: 16696 - protein, 16 aa, Homo sapiens
  ( 359 )...( 374 ): >PAR2_HUMAN
LLCRSVRTVKQMQVSL

SEQ ID NO: 16697 - protein, 16 aa, Homo sapiens
  ( 360 )...( 375 ): >PAR2_HUMAN
LCRSVRTVKQMQVSLT

SEQ ID NO: 16698 - protein, 16 aa, Homo sapiens
  ( 361 )...( 376 ): >PAR2_HUMAN
CRSVRTVKQMQVSLTS

SEQ ID NO: 16699 - protein, 16 aa, Homo sapiens
  ( 362 )...( 377 ): >PAR2_HUMAN
RSVRTVKQMQVSLTSK

SEQ ID NO: 16700 - protein, 16 aa, Homo sapiens
  ( 363 )...( 378 ): >PAR2_HUMAN
SVRTVKQMQVSLTSKK

SEQ ID NO: 16701 - protein, 16 aa, Homo sapiens
  ( 364 )...( 379 ): >PAR2_HUMAN
VRTVKQMQVSLTSKKH

SEQ ID NO: 16702 - protein, 16 aa, Homo sapiens
  ( 367 )...( 382 ): >PAR2_HUMAN
VKQMQVSLTSKKHSRK

SEQ ID NO: 16703 - protein, 16 aa, Homo sapiens
  ( 368 )...( 383 ): >PAR2_HUMAN
KQMQVSLTSKKHSRKS

SEQ ID NO: 16704 - protein, 16 aa, Homo sapiens
  ( 191 )...( 206 ): >PAR3_HUMAN
RYLAIVHPFTYRGLPK

SEQ ID NO: 16705 - protein, 16 aa, Homo sapiens
  ( 126 )...( 141 ): >PAR4_HUMAN
ALALPPRIAYHLRGQR

SEQ ID NO: 16706 - protein, 16 aa, Homo sapiens
  ( 174 )...( 189 ): >PAR4_HUMAN
RYLALVHPLRARALRG

SEQ ID NO: 16707 - protein, 16 aa, Homo sapiens
  ( 175 )...( 190 ): >PAR4_HUMAN
YLALVHPLRARALRGR

SEQ ID NO: 16708 - protein, 16 aa, Homo sapiens
  ( 176 )...( 191 ): >PAR4_HUMAN
LALVHPLRARALRGRR

SEQ ID NO: 16709 - protein, 16 aa, Homo sapiens
  ( 177 )...( 192 ): >PAR4_HUMAN
ALVHPLRARALRGRRL

SEQ ID NO: 16710 - protein, 16 aa, Homo sapiens
  ( 178 )...( 193 ): >PAR4_HUMAN
LVHPLRARALRGRRLA

SEQ ID NO: 16711 - protein, 16 aa, Homo sapiens
  ( 179 )...( 194 ): >PAR4_HUMAN
VHPLRARALRGRRLAL

SEQ ID NO: 16712 - protein, 16 aa, Homo sapiens
  ( 180 )...( 195 ): >PAR4_HUMAN
HPLRARALRGRRLALG

SEQ ID NO: 16713 - protein, 16 aa, Homo sapiens
  ( 184 )...( 199 ): >PAR4_HUMAN
ARALRGRRLALGLCMA

SEQ ID NO: 16714 - protein, 16 aa, Homo sapiens
  ( 185 )...( 200 ): >PAR4_HUMAN
RALRGRRLALGLCMAA

SEQ ID NO: 16715 - protein, 16 aa, Homo sapiens
  ( 187 )...( 202 ): >PAR4_HUMAN
LRGRRLALGLCMAAWL

SEQ ID NO: 16716 - protein, 16 aa, Homo sapiens
  ( 207 )...( 222 ): >PAR4_HUMAN
LALPLTLQRQTFRLAR

SEQ ID NO: 16717 - protein, 16 aa, Homo sapiens
  ( 208 )...( 223 ): >PAR4_HUMAN
ALPLTLQRQTFRLARS

SEQ ID NO: 16718 - protein, 16 aa, Homo sapiens
  ( 211 )...( 226 ): >PAR4_HUMAN
LTLQRQTFRLARSDRV

SEQ ID NO: 16719 - protein, 16 aa, Homo sapiens
  ( 212 )...( 227 ): >PAR4_HUMAN
TLQRQTFRLARSDRVL

SEQ ID NO: 16720 - protein, 16 aa, Homo sapiens
  ( 268 )...( 283 ): >PAR4_HUMAN
LHTLAASGRRYGHALR

SEQ ID NO: 16721 - protein, 16 aa, Homo sapiens
  ( 269 )...( 284 ): >PAR4_HUMAN
HTLAASGRRYGHALRL

SEQ ID NO: 16722 - protein, 16 aa, Homo sapiens
  ( 270 )...( 285 ): >PAR4_HUMAN
TLAASGRRYGHALRLT

SEQ ID NO: 16723 - protein, 16 aa, Homo sapiens
  ( 271 )...( 286 ): >PAR4_HUMAN
LAASGRRYGHALRLTA

SEQ ID NO: 16724 - protein, 16 aa, Homo sapiens
  ( 272 )...( 287 ): >PAR4_HUMAN
AASGRRYGHALRLTAV

SEQ ID NO: 16725 - protein, 16 aa, Homo sapiens
  ( 273 )...( 288 ): >PAR4_HUMAN
ASGRRYGHALRLTAVV

SEQ ID NO: 16726 - protein, 16 aa, Homo sapiens
  ( 274 )...( 289 ): >PAR4_HUMAN
SGRRYGHALRLTAVVL

SEQ ID NO: 16727 - protein, 16 aa, Homo sapiens
  ( 275 )...( 290 ): >PAR4_HUMAN
GRRYGHALRLTAVVLA

SEQ ID NO: 16728 - protein, 16 aa, Homo sapiens
  ( 276 )...( 291 ): >PAR4_HUMAN
RRYGHALRLTAVVLAS

SEQ ID NO: 16729 - protein, 16 aa, Homo sapiens
  ( 40 )...( 55 ): >PD2R_HUMAN
LLARSGLGWCSRRPLR

SEQ ID NO: 16730 - protein, 16 aa, Homo sapiens
  ( 137 )...( 152 ): >PD2R_HUMAN
PFFYRRHITLRLGALV

SEQ ID NO: 16731 - protein, 16 aa, Homo sapiens
  ( 138 )...( 153 ): >PD2R_HUMAN
FFYRRHITLRLGALVA

SEQ ID NO: 16732 - protein, 16 aa, Homo sapiens
  ( 139 )...( 154 ): >PD2R_HUMAN
FYRRHITLRLGALVAP

SEQ ID NO: 16733 - protein, 16 aa, Homo sapiens
  ( 140 )...( 155 ): >PD2R_HUMAN
YRRHITLRLGALVAPV

SEQ ID NO: 16734 - protein, 16 aa, Homo sapiens
  ( 141 )...( 156 ): >PD2R_HUMAN
RRHITLRLGALVAPVV

SEQ ID NO: 16735 - protein, 16 aa, Homo sapiens
  ( 51 )...( 66 ): >PE21_HUMAN
LLALALLAQAAGRLRR

SEQ ID NO: 16736 - protein, 16 aa, Homo sapiens
  ( 52 )...( 67 ): >PE21_HUMAN
LALALLAQAAGRLRRR

SEQ ID NO: 16737 - protein, 16 aa, Homo sapiens
  ( 54 )...( 69 ): >PE21_HUMAN
LALLAQAAGRLRRRRS

SEQ ID NO: 16738 - protein, 16 aa, Homo sapiens
  ( 55 )...( 70 ): >PE21_HUMAN
ALLAQAAGRLRRRRSA

SEQ ID NO: 16739 - protein, 16 aa, Homo sapiens
  ( 56 )...( 71 ): >PE21_HUMAN
LLAQAAGRLRRRRSAT

SEQ ID NO: 16740 - protein, 16 aa, Homo sapiens
  ( 57 )...( 72 ): >PE21_HUMAN
LAQAAGRLRRRRSATT

SEQ ID NO: 16741 - protein, 16 aa, Homo sapiens
  ( 58 )...( 73 ): >PE21_HUMAN
AQAAGRLRRRRSATTF

SEQ ID NO: 16742 - protein, 16 aa, Homo sapiens
  ( 59 )...( 74 ): >PE21_HUMAN
QAAGRLRRRRSATTFL

SEQ ID NO: 16743 - protein, 16 aa, Homo sapiens
  ( 60 )...( 75 ): >PE21_HUMAN
AAGRLRRRRSATTFLL

SEQ ID NO: 16744 - protein, 16 aa, Homo sapiens
  ( 61 )...( 76 ): >PE21_HUMAN
AGRLRRRRSATTFLLF

SEQ ID NO: 16745 - protein, 16 aa, Homo sapiens
  ( 62 )...( 77 ): >PE21_HUMAN
GRLRRRRSATTFLLFV

SEQ ID NO: 16746 - protein, 16 aa, Homo sapiens
  ( 63 )...( 78 ): >PE21_HUMAN
RLRRRRSATTFLLFVA

SEQ ID NO: 16747 - protein, 16 aa, Homo sapiens
  ( 64 )...( 79 ): >PE21_HUMAN
LRRRRSATTFLLFVAS

SEQ ID NO: 16748 - protein, 16 aa, Homo sapiens
  ( 65 )...( 80 ): >PE21_HUMAN
RRRRSATTFLLFVASL

SEQ ID NO: 16749 - protein, 16 aa, Homo sapiens
  ( 66 )...( 81 ): >PE21_HUMAN
RRRSATTFLLFVASLL

SEQ ID NO: 16750 - protein, 16 aa, Homo sapiens
  ( 135 )...( 150 ): >PE21_HUMAN
RCVGVTRPLLHAARVS

SEQ ID NO: 16751 - protein, 16 aa, Homo sapiens
  ( 138 )...( 153 ): >PE21_HUMAN
GVTRPLLHAARVSVAR

SEQ ID NO: 16752 - protein, 16 aa, Homo sapiens
  ( 139 )...( 154 ): >PE21_HUMAN
VTRPLLHAARVSVARA

SEQ ID NO: 16753 - protein, 16 aa, Homo sapiens
  ( 140 )...( 155 ): >PE21_HUMAN
TRPLLHAARVSVARAR

SEQ ID NO: 16754 - protein, 16 aa, Homo sapiens
  ( 141 )...( 156 ): >PE21_HUMAN
RPLLHAARVSVARARL

SEQ ID NO: 16755 - protein, 16 aa, Homo sapiens
  ( 142 )...( 157 ): >PE21_HUMAN
PLLHAARVSVARARLA

SEQ ID NO: 16756 - protein, 16 aa, Homo sapiens
  ( 143 )...( 158 ): >PE21_HUMAN
LLHAARVSVARARLAL

SEQ ID NO: 16757 - protein, 16 aa, Homo sapiens
  ( 144 )...( 159 ): >PE21_HUMAN
LHAARVSVARARLALA

SEQ ID NO: 16758 - protein, 16 aa, Homo sapiens
  ( 220 )...( 235 ): >PE21_HUMAN
VCNTLSGLALHRARWR

SEQ ID NO: 16759 - protein, 16 aa, Homo sapiens
  ( 221 )...( 236 ): >PE21_HUMAN
CNTLSGLALHRARWRR

SEQ ID NO: 16760 - protein, 16 aa, Homo sapiens
  ( 354 )...( 369 ): >PE21_HUMAN
LRQAVLRQLLRLLPPR

SEQ ID NO: 16761 - protein, 16 aa, Homo sapiens
  ( 355 )...( 370 ): >PE21_HUMAN
RQAVLRQLLRLLPPRA

SEQ ID NO: 16762 - protein, 16 aa, Homo sapiens
  ( 356 )...( 371 ): >PE21_HUMAN
QAVLRQLLRLLPPRAG

SEQ ID NO: 16763 - protein, 16 aa, Homo sapiens
  ( 357 )...( 372 ): >PE21_HUMAN
AVLRQLLRLLPPRAGA

SEQ ID NO: 16764 - protein, 16 aa, Homo sapiens
  ( 358 )...( 373 ): >PE21_HUMAN
VLRQLLRLLPPRAGAK

SEQ ID NO: 16765 - protein, 16 aa, Homo sapiens
  ( 359 )...( 374 ): >PE21_HUMAN
LRQLLRLLPPRAGAKG

SEQ ID NO: 16766 - protein, 16 aa, Homo sapiens
  ( 360 )...( 375 ): >PE21_HUMAN
RQLLRLLPPRAGAKGG

SEQ ID NO: 16767 - protein, 16 aa, Homo sapiens
  ( 36 )...( 51 ): >PE22_HUMAN
VLGNLIALALLARRWR

SEQ ID NO: 16768 - protein, 16 aa, Homo sapiens
  ( 37 )...( 52 ): >PE22_HUMAN
LGNLIALALLARRWRG

SEQ ID NO: 16769 - protein, 16 aa, Homo sapiens
  ( 45 )...( 60 ): >PE22_HUMAN
LLARRWRGDVGCSAGR

SEQ ID NO: 16770 - protein, 16 aa, Homo sapiens
  ( 46 )...( 61 ): >PE22_HUMAN
LARRWRGDVGCSAGRR

SEQ ID NO: 16771 - protein, 16 aa, Homo sapiens
  ( 241 )...( 256 ): >PE22_HUMAN
GRGGPGARRRGERVSM

SEQ ID NO: 16772 - protein, 16 aa, Homo sapiens
  ( 242 )...( 257 ): >PE22_HUMAN
RGGPGARRRGERVSMA

SEQ ID NO: 16773 - protein, 16 aa, Homo sapiens
  ( 318 )...( 333 ): >PE22_HUMAN
LRPPVLRLMRSVLCCR

SEQ ID NO: 16774 - protein, 16 aa, Homo sapiens
  ( 319 )...( 334 ): >PE22_HUMAN
RPPVLRLMRSVLCCRI

SEQ ID NO: 16775 - protein, 16 aa, Homo sapiens
  ( 321 )...( 336 ): >PE22_HUMAN
PVLRLMRSVLCCRISL

SEQ ID NO: 16776 - protein, 16 aa, Homo sapiens
  ( 322 )...( 337 ): >PE22_HUMAN
VLRLMRSVLCCRISLR

SEQ ID NO: 16777 - protein, 16 aa, Homo sapiens
  ( 323 )...( 338 ): >PE22_HUMAN
LRLMRSVLCCRISLRT

SEQ ID NO: 16778 - protein, 16 aa, Homo sapiens
  ( 324 )...( 339 ): >PE22_HUMAN
RLMRSVLCCRISLRTQ

SEQ ID NO: 16779 - protein, 16 aa, Homo sapiens
  ( 64 )...( 79 ): >PE23_HUMAN
VGNALAMLLVSRSYRR

SEQ ID NO: 16780 - protein, 16 aa, Homo sapiens
  ( 65 )...( 80 ): >PE23_HUMAN
GNALAMLLVSRSYRRR

SEQ ID NO: 16781 - protein, 16 aa, Homo sapiens
  ( 67 )...( 82 ): >PE23_HUMAN
ALAMLLVSRSYRRRES

SEQ ID NO: 16782 - protein, 16 aa, Homo sapiens
  ( 82 )...( 97 ): >PE23_HUMAN
SKRKKSFLLCIGWLAL

SEQ ID NO: 16783 - protein, 16 aa, Homo sapiens
  ( 83 )...( 98 ): >PE23_HUMAN
KRKKSFLLCIGWLALT

SEQ ID NO: 16784 - protein, 16 aa, Homo sapiens
  ( 164 )...( 179 ): >PE23_HUMAN
WYASHMKTRATRAVLL

SEQ ID NO: 16785 - protein, 16 aa, Homo sapiens
  ( 165 )...( 180 ): >PE23_HUMAN
YASHMKTRATRAVLLG

SEQ ID NO: 16786 - protein, 16 aa, Homo sapiens
  ( 166 )...( 181 ): >PE23_HUMAN
ASHMKTRATRAVLLGV

SEQ ID NO: 16787 - protein, 16 aa, Homo sapiens
  ( 167 )...( 182 ): >PE23_HUMAN
SHMKTRATRAVLLGVW

SEQ ID NO: 16788 - protein, 16 aa, Homo sapiens
  ( 168 )...( 183 ): >PE23_HUMAN
HMKTRATRAVLLGVWL

SEQ ID NO: 16789 - protein, 16 aa, Homo sapiens
  ( 169 )...( 184 ): >PE23_HUMAN
MKTRATRAVLLGVWLA

SEQ ID NO: 16790 - protein, 16 aa, Homo sapiens
  ( 170 )...( 185 ): >PE23_HUMAN
KTRATRAVLLGVWLAV

SEQ ID NO: 16791 - protein, 16 aa, Homo sapiens
  ( 249 )...( 264 ): >PE23_HUMAN
NLATIKALVSRCRAKA

SEQ ID NO: 16792 - protein, 16 aa, Homo sapiens
  ( 250 )...( 265 ): >PE23_HUMAN
LATIKALVSRCRAKAT

SEQ ID NO: 16793 - protein, 16 aa, Homo sapiens
  ( 253 )...( 268 ): >PE23_HUMAN
IKALVSRCRAKATASQ

SEQ ID NO: 16794 - protein, 16 aa, Homo sapiens
  ( 35 )...( 50 ): >PE24_HUMAN
NLVAIVVLCKSRKEQK

SEQ ID NO: 16795 - protein, 16 aa, Homo sapiens
  ( 204 )...( 219 ): >PE24_HUMAN
VLVCGALLRMHRQFMR

SEQ ID NO: 16796 - protein, 16 aa, Homo sapiens
  ( 205 )...( 220 ): >PE24_HUMAN
LVCGALLRMHRQFMRR

SEQ ID NO: 16797 - protein, 16 aa, Homo sapiens
  ( 206 )...( 221 ): >PE24_HUMAN
VCGALLRMHRQFMRRT

SEQ ID NO: 16798 - protein, 16 aa, Homo sapiens
  ( 256 )...( 271 ): >PE24_HUMAN
RRRSFRRIAGAEIQMV

SEQ ID NO: 16799 - protein, 16 aa, Homo sapiens
  ( 257 )...( 272 ): >PE24_HUMAN
RRSFRRIAGAEIQMVI

SEQ ID NO: 16800 - protein, 16 aa, Homo sapiens
  ( 328 )...( 343 ): >PE24_HUMAN
IYILLRKTVLSKAIEK

SEQ ID NO: 16801 - protein, 16 aa, Homo sapiens
  ( 329 )...( 344 ): >PE24_HUMAN
YILLRKTVLSKAIEKI

SEQ ID NO: 16802 - protein, 16 aa, Homo sapiens
  ( 330 )...( 345 ): >PE24_HUMAN
ILLRKTVLSKAIEKIK

SEQ ID NO: 16803 - protein, 16 aa, Homo sapiens
  ( 331 )...( 346 ): >PE24_HUMAN
LLRKTVLSKAIEKIKC

SEQ ID NO: 16804 - protein, 16 aa, Homo sapiens
  ( 332 )...( 347 ): >PE24_HUMAN
LRKTVLSKAIEKIKCL

SEQ ID NO: 16805 - protein, 16 aa, Homo sapiens
  ( 333 )...( 348 ): >PE24_HUMAN
RKTVLSKAIEKIKCLF

SEQ ID NO: 16806 - protein, 16 aa, Homo sapiens
  ( 335 )...( 350 ): >PE24_HUMAN
TVLSKAIEKIKCLFCR

SEQ ID NO: 16807 - protein, 16 aa, Homo sapiens
  ( 336 )...( 351 ): >PE24_HUMAN
VLSKAIEKIKCLFCRI

SEQ ID NO: 16808 - protein, 16 aa, Homo sapiens
  ( 341 )...( 356 ): >PE24_HUMAN
IEKIKCLFCRIGGSRR

SEQ ID NO: 16809 - protein, 16 aa, Homo sapiens
  ( 342 )...( 357 ): >PE24_HUMAN
EKIKCLFCRIGGSRRE

SEQ ID NO: 16810 - protein, 16 aa, Homo sapiens
  ( 343 )...( 358 ): >PE24_HUMAN
KIKCLFCRIGGSRRER

SEQ ID NO: 16811 - protein, 16 aa, Homo sapiens
  ( 344 )...( 359 ): >PE24_HUMAN
IKCLFCRIGGSRRERS

SEQ ID NO: 16812 - protein, 16 aa, Homo sapiens
  ( 347 )...( 362 ): >PE24_HUMAN
LFCRIGGSRRERSGQH

SEQ ID NO: 16813 - protein, 16 aa, Homo sapiens
  ( 44 )...( 59 ): >PF2R_HUMAN
NSLAIAILMKAYQRFR

SEQ ID NO: 16814 - protein, 16 aa, Homo sapiens
  ( 45 )...( 60 ): >PF2R_HUMAN
SLAIAILMKAYQRFRQ

SEQ ID NO: 16815 - protein, 16 aa, Homo sapiens
  ( 46 )...( 61 ): >PF2R_HUMAN
LAIAILMKAYQRFRQK

SEQ ID NO: 16816 - protein, 16 aa, Homo sapiens
  ( 47 )...( 62 ): >PF2R_HUMAN
AIAILMKAYQRFRQKS

SEQ ID NO: 16817 - protein, 16 aa, Homo sapiens
  ( 56 )...( 71 ): >PF2R_HUMAN
QRFRQKSKASFLLLAS

SEQ ID NO: 16818 - protein, 16 aa, Homo sapiens
  ( 57 )...( 72 ): >PF2R_HUMAN
RFRQKSKASFLLLASG

SEQ ID NO: 16819 - protein, 16 aa, Homo sapiens
  ( 59 )...( 74 ): >PF2R_HUMAN
RQKSKASFLLLASGLV

SEQ ID NO: 16820 - protein, 16 aa, Homo sapiens
  ( 218 )...( 233 ): >PF2R_HUMAN
LCNAITGITLLRVKFK

SEQ ID NO: 16821 - protein, 16 aa, Homo sapiens
  ( 219 )...( 234 ): >PF2R_HUMAN
CNAITGITLLRVKFKS

SEQ ID NO: 16822 - protein, 16 aa, Homo sapiens
  ( 220 )...( 235 ): >PF2R_HUMAN
NAITGITLLRVKFKSQ

SEQ ID NO: 16823 - protein, 16 aa, Homo sapiens
  ( 221 )...( 236 ): >PF2R_HUMAN
AITGITLLRVKFKSQQ

SEQ ID NO: 16824 - protein, 16 aa, Homo sapiens
  ( 223 )...( 238 ): >PF2R_HUMAN
TGITLLRVKFKSQQHR

SEQ ID NO: 16825 - protein, 16 aa, Homo sapiens
  ( 224 )...( 239 ): >PF2R_HUMAN
GITLLRVKFKSQQHRQ

SEQ ID NO: 16826 - protein, 16 aa, Homo sapiens
  ( 225 )...( 240 ): >PF2R_HUMAN
ITLLRVKFKSQQHRQG

SEQ ID NO: 16827 - protein, 16 aa, Homo sapiens
  ( 305 )...( 320 ): >PF2R_HUMAN
ILLRKAVLKNLYKLAS

SEQ ID NO: 16828 - protein, 16 aa, Homo sapiens
  ( 306 )...( 321 ): >PF2R_HUMAN
LLRKAVLKNLYKLASQ

SEQ ID NO: 16829 - protein, 16 aa, Homo sapiens
  ( 307 )...( 322 ): >PF2R_HUMAN
LRKAVLKNLYKLASQC

SEQ ID NO: 16830 - protein, 16 aa, Homo sapiens
  ( 41 )...( 56 ): >PI2R_HUMAN
RRPARPSAFAVLVTGL

SEQ ID NO: 16831 - protein, 16 aa, Homo sapiens
  ( 203 )...( 218 ): >PI2R_HUMAN
NGSVTLSLCRMYRQQK

SEQ ID NO: 16832 - protein, 16 aa, Homo sapiens
  ( 204 )...( 219 ): >PI2R_HUMAN
GSVTLSLCRMYRQQKR

SEQ ID NO: 16833 - protein, 16 aa, Homo sapiens
  ( 216 )...( 231 ): >PI2R_HUMAN
QQKRHQGSLGPRPRTG

SEQ ID NO: 16834 - protein, 16 aa, Homo sapiens
  ( 217 )...( 232 ): >PI2R_HUMAN
QKRHQGSLGPRPRTGE

SEQ ID NO: 16835 - protein, 16 aa, Homo sapiens
  ( 161 )...( 176 ): >PTR2_HUMAN
VAILIIGYFRRLHCTR

SEQ ID NO: 16836 - protein, 16 aa, Homo sapiens
  ( 162 )...( 177 ): >PTR2_HUMAN
AILIIGYFRRLHCTRN

SEQ ID NO: 16837 - protein, 16 aa, Homo sapiens
  ( 347 )...( 362 ): >PTR2_HUMAN
TNAVGHDTRKQYRKLA

SEQ ID NO: 16838 - protein, 16 aa, Homo sapiens
  ( 349 )...( 364 ): >PTR2_HUMAN
AVGHDTRKQYRKLAKS

SEQ ID NO: 16839 - protein, 16 aa, Homo sapiens
  ( 350 )...( 365 ): >PTR2_HUMAN
VGHDTRKQYRKLAKST

SEQ ID NO: 16840 - protein, 16 aa, Homo sapiens
  ( 351 )...( 366 ): >PTR2_HUMAN
GHDTRKQYRKLAKSTL

SEQ ID NO: 16841 - protein, 16 aa, Homo sapiens
  ( 353 )...( 368 ): >PTR2_HUMAN
DTRKQYRKLAKSTLVL

SEQ ID NO: 16842 - protein, 16 aa, Homo sapiens
  ( 354 )...( 369 ): >PTR2_HUMAN
TRKQYRKLAKSTLVLV

SEQ ID NO: 16843 - protein, 16 aa, Homo sapiens
  ( 355 )...( 370 ): >PTR2_HUMAN
RKQYRKLAKSTLVLVL

SEQ ID NO: 16844 - protein, 16 aa, Homo sapiens
  ( 356 )...( 371 ): >PTR2_HUMAN
KQYRKLAKSTLVLVLV

SEQ ID NO: 16845 - protein, 16 aa, Homo sapiens
  ( 469 )...( 484 ): >PTR2_HUMAN
TRMVLISGKAAKIASR

SEQ ID NO: 16846 - protein, 16 aa, Homo sapiens
  ( 470 )...( 485 ): >PTR2_HUMAN
RMVLISGKAAKIASRQ

SEQ ID NO: 16847 - protein, 16 aa, Homo sapiens
  ( 38 )...( 53 ): >PTRR_HUMAN
IFLLHRAQAQCEKRLK

SEQ ID NO: 16848 - protein, 16 aa, Homo sapiens
  ( 43 )...( 58 ): >PTRR_HUMAN
RAQAQCEKRLKEVLQR

SEQ ID NO: 16849 - protein, 16 aa, Homo sapiens
  ( 204 )...( 219 ): >PTRR_HUMAN
VAVLILAYFRRLHCTR

SEQ ID NO: 16850 - protein, 16 aa, Homo sapiens
  ( 205 )...( 220 ): >PTRR_HUMAN
AVLILAYFRRLHCTRN

SEQ ID NO: 16851 - protein, 16 aa, Homo sapiens
  ( 381 )...( 396 ): >PTRR_HUMAN
IVRVLATKLRETNAGR

SEQ ID NO: 16852 - protein, 16 aa, Homo sapiens
  ( 382 )...( 397 ): >PTRR_HUMAN
VRVLATKLRETNAGRC

SEQ ID NO: 16853 - protein, 16 aa, Homo sapiens
  ( 392 )...( 407 ): >PTRR_HUMAN
TNAGRCDTRQQYRKLL

SEQ ID NO: 16854 - protein, 16 aa, Homo sapiens
  ( 394 )...( 409 ): >PTRR_HUMAN
AGRCDTRQQYRKLLKS

SEQ ID NO: 16855 - protein, 16 aa, Homo sapiens
  ( 395 )...( 410 ): >PTRR_HUMAN
GRCDTRQQYRKLLKST

SEQ ID NO: 16856 - protein, 16 aa, Homo sapiens
  ( 397 )...( 412 ): >PTRR_HUMAN
CDTRQQYRKLLKSTLV

SEQ ID NO: 16857 - protein, 16 aa, Homo sapiens
  ( 398 )...( 413 ): >PTRR_HUMAN
DTRQQYRKLLKSTLVL

SEQ ID NO: 16858 - protein, 16 aa, Homo sapiens
  ( 399 )...( 414 ): >PTRR_HUMAN
TRQQYRKLLKSTLVLM

SEQ ID NO: 16859 - protein, 16 aa, Homo sapiens
  ( 400 )...( 415 ): >PTRR_HUMAN
RQQYRKLLKSTLVLMP

SEQ ID NO: 16860 - protein, 16 aa, Homo sapiens
  ( 401 )...( 416 ): >PTRR_HUMAN
QQYRKLLKSTLVLMPL

SEQ ID NO: 16861 - protein, 16 aa, Homo sapiens
  ( 146 )...( 161 ): >RDC1_HUMAN
ITYFTNTPSSRKKMVR

SEQ ID NO: 16862 - protein, 16 aa, Homo sapiens
  ( 149 )...( 164 ): >RDC1_HUMAN
FTNTPSSRKKMVRRVV

SEQ ID NO: 16863 - protein, 16 aa, Homo sapiens
  ( 150 )...( 165 ): >RDC1_HUMAN
TNTPSSRKKMVRRVVC

SEQ ID NO: 16864 - protein, 16 aa, Homo sapiens
  ( 151 )...( 166 ): >RDC1_HUMAN
NTPSSRKKMVRRVVCI

SEQ ID NO: 16865 - protein, 16 aa, Homo sapiens
  ( 152 )...( 167 ): >RDC1_HUMAN
TPSSRKKMVRRVVCIL

SEQ ID NO: 16866 - protein, 16 aa, Homo sapiens
  ( 153 )...( 168 ): >RDC1_HUMAN
PSSRKKMVRRVVCILV

SEQ ID NO: 16867 - protein, 16 aa, Homo sapiens
  ( 154 )...( 169 ): >RDC1_HUMAN
SSRKKMVRRVVCILVW

SEQ ID NO: 16868 - protein, 16 aa, Homo sapiens
  ( 155 )...( 170 ): >RDC1_HUMAN
SRKKMVRRVVCILVWL

SEQ ID NO: 16869 - protein, 16 aa, Homo sapiens
  ( 327 )...( 342 ): >RDC1_HUMAN
MKAFIFKYSAKTGLTK

SEQ ID NO: 16870 - protein, 16 aa, Homo sapiens
  ( 328 )...( 343 ): >RDC1_HUMAN
KAFIFKYSAKTGLTKL

SEQ ID NO: 16871 - protein, 16 aa, Homo sapiens
  ( 134 )...( 149 ): >SCRC_HUMAN
KRHSYLLKLKVMYTVG

SEQ ID NO: 16872 - protein, 16 aa, Homo sapiens
  ( 159 )...( 174 ): >SCRC_HUMAN
VALGILCAFRRLHCTR

SEQ ID NO: 16873 - protein, 16 aa, Homo sapiens
  ( 314 )...( 329 ): >SCRC_HUMAN
INILRILMRKLRTQET

SEQ ID NO: 16874 - protein, 16 aa, Homo sapiens
  ( 316 )...( 331 ): >SCRC_HUMAN
ILRILMRKLRTQETRG

SEQ ID NO: 16875 - protein, 16 aa, Homo sapiens
  ( 317 )...( 332 ): >SCRC_HUMAN
LRILMRKLRTQETRGN

SEQ ID NO: 16876 - protein, 16 aa, Homo sapiens
  ( 329 )...( 344 ): >SCRC_HUMAN
TRGNEVSHYKRLARST

SEQ ID NO: 16877 - protein, 16 aa, Homo sapiens
  ( 330 )...( 345 ): >SCRC_HUMAN
RGNEVSHYKRLARSTL

SEQ ID NO: 16878 - protein, 16 aa, Homo sapiens
  ( 334 )...( 349 ): >SCRC_HUMAN
VSHYKRLARSTLLLIP

SEQ ID NO: 16879 - protein, 16 aa, Homo sapiens
  ( 335 )...( 350 ): >SCRC_HUMAN
SHYKRLARSTLLLIPL

SEQ ID NO: 16880 - protein, 16 aa, Homo sapiens
  ( 395 )...( 410 ): >SMO_HUMAN
KNYRYRAGFVLAPIGL

SEQ ID NO: 16881 - protein, 16 aa, Homo sapiens
  ( 539 )...( 554 ): >SMO_HUMAN
KATLLIWRRTWCRLTG

SEQ ID NO: 16882 - protein, 16 aa, Homo sapiens
  ( 540 )...( 555 ): >SMO_HUMAN
ATLLIWRRTWCRLTGQ

SEQ ID NO: 16883 - protein, 16 aa, Homo sapiens
  ( 541 )...( 556 ): >SMO_HUMAN
TLLIWRRTWCRLTGQS

SEQ ID NO: 16884 - protein, 16 aa, Homo sapiens
  ( 559 )...( 574 ): >SMO_HUMAN
EPKRIKKSKMIAKAFS

SEQ ID NO: 16885 - protein, 16 aa, Homo sapiens
  ( 560 )...( 575 ): >SMO_HUMAN
PKRIKKSKMIAKAFSK

SEQ ID NO: 16886 - protein, 16 aa, Homo sapiens
  ( 565 )...( 580 ): >SMO_HUMAN
KSKMIAKAFSKRHELL

SEQ ID NO: 16887 - protein, 16 aa, Homo sapiens
  ( 614 )...( 629 ): >SMO_HUMAN
VSSAWAQHVTKMVARR

SEQ ID NO: 16888 - protein, 16 aa, Homo sapiens
  ( 615 )...( 630 ): >SMO_HUMAN
SSAWAQHVTKMVARRG

SEQ ID NO: 16889 - protein, 16 aa, Homo sapiens
  ( 616 )...( 631 ): >SMO_HUMAN
SAWAQHVTKMVARRGA

SEQ ID NO: 16890 - protein, 16 aa, Homo sapiens
  ( 617 )...( 632 ): >SMO_HUMAN
AWAQHVTKMVARRGAI

SEQ ID NO: 16891 - protein, 16 aa, Homo sapiens
  ( 618 )...( 633 ): >SMO_HUMAN
WAQHVTKMVARRGAIL

SEQ ID NO: 16892 - protein, 16 aa, Homo sapiens
  ( 619 )...( 634 ): >SMO_HUMAN
AQHVTKMVARRGAILP

SEQ ID NO: 16893 - protein, 16 aa, Homo sapiens
  ( 620 )...( 635 ): >SMO_HUMAN
QHVTKMVARRGAILPQ

SEQ ID NO: 16894 - protein, 16 aa, Homo sapiens
  ( 659 )...( 674 ): >SMO_HUMAN
AEISPELQKRLGRKKK

SEQ ID NO: 16895 - protein, 16 aa, Homo sapiens
  ( 699 )...( 714 ): >SMO_HUMAN
STIPRLPQLPRQKCLV

SEQ ID NO: 16896 - protein, 16 aa, Homo sapiens
  ( 700 )...( 715 ): >SMO_HUMAN
TIPRLPQLPRQKCLVA

SEQ ID NO: 16897 - protein, 16 aa, Homo sapiens
  ( 701 )...( 716 ): >SMO_HUMAN
IPRLPQLPRQKCLVAA

SEQ ID NO: 16898 - protein, 16 aa, Homo sapiens
  ( 703 )...( 718 ): >SMO_HUMAN
RLPQLPRQKCLVAAGA

SEQ ID NO: 16899 - protein, 16 aa, Homo sapiens
  ( 758 )...( 773 ): >SMO_HUMAN
WAHGRRQGLGPIHSRT

SEQ ID NO: 16900 - protein, 16 aa, Homo sapiens
  ( 759 )...( 774 ): >SMO_HUMAN
AHGRRQGLGPIHSRTN

SEQ ID NO: 16901 - protein, 16 aa, Homo sapiens
  ( 760 )...( 775 ): >SMO_HUMAN
HGRRQGLGPIHSRTNL

SEQ ID NO: 16902 - protein, 16 aa, Homo sapiens
  ( 761 )...( 776 ): >SMO_HUMAN
GRRQGLGPIHSRTNLM

SEQ ID NO: 16903 - protein, 16 aa, Homo sapiens
  ( 213 )...( 228 ): >SRB3_HUMAN
RHRKMKPVQMVPAISQ

SEQ ID NO: 16904 - protein, 16 aa, Homo sapiens
  ( 256 )...( 271 ): >SRB3_HUMAN
PTLLGIRQNGHAASRR

SEQ ID NO: 16905 - protein, 16 aa, Homo sapiens
  ( 257 )...( 272 ): >SRB3_HUMAN
TLLGIRQNGHAASRRL

SEQ ID NO: 16906 - protein, 16 aa, Homo sapiens
  ( 258 )...( 273 ): >SRB3_HUMAN
LLGIRQNGHAASRRLL

SEQ ID NO: 16907 - protein, 16 aa, Homo sapiens
  ( 259 )...( 274 ): >SRB3_HUMAN
LGIRQNGHAASRRLLG

SEQ ID NO: 16908 - protein, 16 aa, Homo sapiens
  ( 260 )...( 275 ): >SRB3_HUMAN
GIRQNGHAASRRLLGM

SEQ ID NO: 16909 - protein, 16 aa, Homo sapiens
  ( 338 )...( 353 ): >SRB3_HUMAN
IVCFLLNKDLKKCLRT

SEQ ID NO: 16910 - protein, 16 aa, Homo sapiens
  ( 75 )...( 90 ): >SSR1_HUMAN
GNSMVIYVILRYAKMK

SEQ ID NO: 16911 - protein, 16 aa, Homo sapiens
  ( 76 )...( 91 ): >SSR1_HUMAN
NSMVIYVILRYAKMKT

SEQ ID NO: 16912 - protein, 16 aa, Homo sapiens
  ( 77 )...( 92 ): >SSR1_HUMAN
SMVIYVILRYAKMKTA

SEQ ID NO: 16913 - protein, 16 aa, Homo sapiens
  ( 79 )...( 94 ): >SSR1_HUMAN
VIYVILRYAKMKTATN

SEQ ID NO: 16914 - protein, 16 aa, Homo sapiens
  ( 80 )...( 95 ): >SSR1_HUMAN
IYVILRYAKMKTATNI

SEQ ID NO: 16915 - protein, 16 aa, Homo sapiens
  ( 81 )...( 96 ): >SSR1_HUMAN
YVILRYAKMKTATNIY

SEQ ID NO: 16916 - protein, 16 aa, Homo sapiens
  ( 82 )...( 97 ): >SSR1_HUMAN
VILRYAKMKTATNIYI

SEQ ID NO: 16917 - protein, 16 aa, Homo sapiens
  ( 83 )...( 98 ): >SSR1_HUMAN
ILRYAKMKTATNIYIL

SEQ ID NO: 16918 - protein, 16 aa, Homo sapiens
  ( 84 )...( 99 ): >SSR1_HUMAN
LRYAKMKTATNIYILN

SEQ ID NO: 16919 - protein, 16 aa, Homo sapiens
  ( 85 )...( 100 ): >SSR1_HUMAN
RYAKMKTATNIYILNL

SEQ ID NO: 16920 - protein, 16 aa, Homo sapiens
  ( 154 )...( 169 ): >SSR1_HUMAN
DRYVAVVHPIKAARYR

SEQ ID NO: 16921 - protein, 16 aa, Homo sapiens
  ( 156 )...( 171 ): >SSR1_HUMAN
YVAVVHPIKAARYRRP

SEQ ID NO: 16922 - protein, 16 aa, Homo sapiens
  ( 157 )...( 172 ): >SSR1_HUMAN
VAVVHPIKAARYRRPT

SEQ ID NO: 16923 - protein, 16 aa, Homo sapiens
  ( 158 )...( 173 ): >SSR1_HUMAN
AVVHPIKAARYRRPTV

SEQ ID NO: 16924 - protein, 16 aa, Homo sapiens
  ( 159 )...( 174 ): >SSR1_HUMAN
VVHPIKAARYRRPTVA

SEQ ID NO: 16925 - protein, 16 aa, Homo sapiens
  ( 160 )...( 175 ): >SSR1_HUMAN
VHPIKAARYRRPTVAK

SEQ ID NO: 16926 - protein, 16 aa, Homo sapiens
  ( 161 )...( 176 ): >SSR1_HUMAN
HPIKAARYRRPTVAKV

SEQ ID NO: 16927 - protein, 16 aa, Homo sapiens
  ( 162 )...( 177 ): >SSR1_HUMAN
PIKAARYRRPTVAKVV

SEQ ID NO: 16928 - protein, 16 aa, Homo sapiens
  ( 163 )...( 178 ): >SSR1_HUMAN
IKAARYRRPTVAKVVN

SEQ ID NO: 16929 - protein, 16 aa, Homo sapiens
  ( 164 )...( 179 ): >SSR1_HUMAN
KAARYRRPTVAKVVNL

SEQ ID NO: 16930 - protein, 16 aa, Homo sapiens
  ( 165 )...( 180 ): >SSR1_HUMAN
AARYRRPTVAKVVNLG

SEQ ID NO: 16931 - protein, 16 aa, Homo sapiens
  ( 166 )...( 181 ): >SSR1_HUMAN
ARYRRPTVAKVVNLGV

SEQ ID NO: 16932 - protein, 16 aa, Homo sapiens
  ( 167 )...( 182 ): >SSR1_HUMAN
RYRRPTVAKVVNLGVW

SEQ ID NO: 16933 - protein, 16 aa, Homo sapiens
  ( 168 )...( 183 ): >SSR1_HUMAN
YRRPTVAKVVNLGVWV

SEQ ID NO: 16934 - protein, 16 aa, Homo sapiens
  ( 169 )...( 184 ): >SSR1_HUMAN
RRPTVAKVVNLGVWVL

SEQ ID NO: 16935 - protein, 16 aa, Homo sapiens
  ( 245 )...( 260 ): >SSR1_HUMAN
LIIAKMRMVALKAGWQ

SEQ ID NO: 16936 - protein, 16 aa, Homo sapiens
  ( 246 )...( 261 ): >SSR1_HUMAN
IIAKMRMVALKAGWQQ

SEQ ID NO: 16937 - protein, 16 aa, Homo sapiens
  ( 247 )...( 262 ): >SSR1_HUMAN
IAKMRMVALKAGWQQR

SEQ ID NO: 16938 - protein, 16 aa, Homo sapiens
  ( 248 )...( 263 ): >SSR1_HUMAN
AKMRMVALKAGWQQRK

SEQ ID NO: 16939 - protein, 16 aa, Homo sapiens
  ( 261 )...( 276 ): >SSR1_HUMAN
QRKRSERKITLMVMMV

SEQ ID NO: 16940 - protein, 16 aa, Homo sapiens
  ( 262 )...( 277 ): >SSR1_HUMAN
RKRSERKITLMVMMVV

SEQ ID NO: 16941 - protein, 16 aa, Homo sapiens
  ( 263 )...( 278 ): >SSR1_HUMAN
KRSERKITLMVMMVVM

SEQ ID NO: 16942 - protein, 16 aa, Homo sapiens
  ( 60 )...( 75 ): >SSR2_HUMAN
GNTLVIYVILRYAKMK

SEQ ID NO: 16943 - protein, 16 aa, Homo sapiens
  ( 61 )...( 76 ): >SSR2_HUMAN
NTLVIYVILRYAKMKT

SEQ ID NO: 16944 - protein, 16 aa, Homo sapiens
  ( 64 )...( 79 ): >SSR2_HUMAN
VIYVILRYAKMKTITN

SEQ ID NO: 16945 - protein, 16 aa, Homo sapiens
  ( 66 )...( 81 ): >SSR2_HUMAN
YVILRYAKMKTITNIY

SEQ ID NO: 16946 - protein, 16 aa, Homo sapiens
  ( 69 )...( 84 ): >SSR2_HUMAN
LRYAKMKTITNIYILN

SEQ ID NO: 16947 - protein, 16 aa, Homo sapiens
  ( 70 )...( 85 ): >SSR2_HUMAN
RYAKMKTITNIYILNL

SEQ ID NO: 16948 - protein, 16 aa, Homo sapiens
  ( 150 )...( 165 ): >SSR2_HUMAN
SAKWRRPRTAKMITMA

SEQ ID NO: 16949 - protein, 16 aa, Homo sapiens
  ( 151 )...( 166 ): >SSR2_HUMAN
AKWRRPRTAKMITMAV

SEQ ID NO: 16950 - protein, 16 aa, Homo sapiens
  ( 153 )...( 168 ): >SSR2_HUMAN
WRRPRTAKMITMAVWG

SEQ ID NO: 16951 - protein, 16 aa, Homo sapiens
  ( 154 )...( 169 ): >SSR2_HUMAN
RRPRTAKMITMAVWGV

SEQ ID NO: 16952 - protein, 16 aa, Homo sapiens
  ( 155 )...( 170 ): >SSR2_HUMAN
RPRTAKMITMAVWGVS

SEQ ID NO: 16953 - protein, 16 aa, Homo sapiens
  ( 227 )...( 242 ): >SSR2_HUMAN
CYLFIIIKVKSSGIRV

SEQ ID NO: 16954 - protein, 16 aa, Homo sapiens
  ( 228 )...( 243 ): >SSR2_HUMAN
YLFIIIKVKSSGIRVG

SEQ ID NO: 16955 - protein, 16 aa, Homo sapiens
  ( 232 )...( 247 ): >SSR2_HUMAN
IIKVKSSGIRVGSSKR

SEQ ID NO: 16956 - protein, 16 aa, Homo sapiens
  ( 233 )...( 248 ): >SSR2_HUMAN
IKVKSSGIRVGSSKRK

SEQ ID NO: 16957 - protein, 16 aa, Homo sapiens
  ( 234 )...( 249 ): >SSR2_HUMAN
KVKSSGIRVGSSKRKK

SEQ ID NO: 16958 - protein, 16 aa, Homo sapiens
  ( 235 )...( 250 ): >SSR2_HUMAN
VKSSGIRVGSSKRKKS

SEQ ID NO: 16959 - protein, 16 aa, Homo sapiens
  ( 236 )...( 251 ): >SSR2_HUMAN
KSSGIRVGSSKRKKSE

SEQ ID NO: 16960 - protein, 16 aa, Homo sapiens
  ( 237 )...( 252 ): >SSR2_HUMAN
SSGIRVGSSKRKKSEK

SEQ ID NO: 16961 - protein, 16 aa, Homo sapiens
  ( 238 )...( 253 ): >SSR2_HUMAN
SGIRVGSSKRKKSEKK

SEQ ID NO: 16962 - protein, 16 aa, Homo sapiens
  ( 239 )...( 254 ): >SSR2_HUMAN
GIRVGSSKRKKSEKKV

SEQ ID NO: 16963 - protein, 16 aa, Homo sapiens
  ( 240 )...( 255 ): >SSR2_HUMAN
IRVGSSKRKKSEKKVT

SEQ ID NO: 16964 - protein, 16 aa, Homo sapiens
  ( 241 )...( 256 ): >SSR2_HUMAN
RVGSSKRKKSEKKVTR

SEQ ID NO: 16965 - protein, 16 aa, Homo sapiens
  ( 242 )...( 257 ): >SSR2_HUMAN
VGSSKRKKSEKKVTRM

SEQ ID NO: 16966 - protein, 16 aa, Homo sapiens
  ( 243 )...( 258 ): >SSR2_HUMAN
GSSKRKKSEKKVTRMV

SEQ ID NO: 16967 - protein, 16 aa, Homo sapiens
  ( 244 )...( 259 ): >SSR2_HUMAN
SSKRKKSEKKVTRMVS

SEQ ID NO: 16968 - protein, 16 aa, Homo sapiens
  ( 245 )...( 260 ): >SSR2_HUMAN
SKRKKSEKKVTRMVSI

SEQ ID NO: 16969 - protein, 16 aa, Homo sapiens
  ( 246 )...( 261 ): >SSR2_HUMAN
KRKKSEKKVTRMVSIV

SEQ ID NO: 16970 - protein, 16 aa, Homo sapiens
  ( 247 )...( 262 ): >SSR2_HUMAN
RKKSEKKVTRMVSIVV

SEQ ID NO: 16971 - protein, 16 aa, Homo sapiens
  ( 248 )...( 263 ): >SSR2_HUMAN
KKSEKKVTRMVSIVVA

SEQ ID NO: 16972 - protein, 16 aa, Homo sapiens
  ( 142 )...( 157 ): >SSR3_HUMAN
YLAVVHPTRSARWRTA

SEQ ID NO: 16973 - protein, 16 aa, Homo sapiens
  ( 143 )...( 158 ): >SSR3_HUMAN
LAVVHPTRSARWRTAP

SEQ ID NO: 16974 - protein, 16 aa, Homo sapiens
  ( 144 )...( 159 ): >SSR3_HUMAN
AVVHPTRSARWRTAPV

SEQ ID NO: 16975 - protein, 16 aa, Homo sapiens
  ( 145 )...( 160 ): >SSR3_HUMAN
VVHPTRSARWRTAPVA

SEQ ID NO: 16976 - protein, 16 aa, Homo sapiens
  ( 146 )...( 161 ): >SSR3_HUMAN
VHPTRSARWRTAPVAR

SEQ ID NO: 16977 - protein, 16 aa, Homo sapiens
  ( 147 )...( 162 ): >SSR3_HUMAN
HPTRSARWRTAPVART

SEQ ID NO: 16978 - protein, 16 aa, Homo sapiens
  ( 148 )...( 163 ): >SSR3_HUMAN
PTRSARWRTAPVARTV

SEQ ID NO: 16979 - protein, 16 aa, Homo sapiens
  ( 149 )...( 164 ): >SSR3_HUMAN
TRSARWRTAPVARTVS

SEQ ID NO: 16980 - protein, 16 aa, Homo sapiens
  ( 150 )...( 165 ): >SSR3_HUMAN
RSARWRTAPVARTVSA

SEQ ID NO: 16981 - protein, 16 aa, Homo sapiens
  ( 152 )...( 167 ): >SSR3_HUMAN
ARWRTAPVARTVSAAV

SEQ ID NO: 16982 - protein, 16 aa, Homo sapiens
  ( 153 )...( 168 ): >SSR3_HUMAN
RWRTAPVARTVSAAVW

SEQ ID NO: 16983 - protein, 16 aa, Homo sapiens
  ( 223 )...( 238 ): >SSR3_HUMAN
CLCYLLIVVKVRSAGR

SEQ ID NO: 16984 - protein, 16 aa, Homo sapiens
  ( 224 )...( 239 ): >SSR3_HUMAN
LCYLLIVVKVRSAGRR

SEQ ID NO: 16985 - protein, 16 aa, Homo sapiens
  ( 225 )...( 240 ): >SSR3_HUMAN
CYLLIVVKVRSAGRRV

SEQ ID NO: 16986 - protein, 16 aa, Homo sapiens
  ( 226 )...( 241 ): >SSR3_HUMAN
YLLIVVKVRSAGRRVW

SEQ ID NO: 16987 - protein, 16 aa, Homo sapiens
  ( 227 )...( 242 ): >SSR3_HUMAN
LLIVVKVRSAGRRVWA

SEQ ID NO: 16988 - protein, 16 aa, Homo sapiens
  ( 228 )...( 243 ): >SSR3_HUMAN
LIVVKVRSAGRRVWAP

SEQ ID NO: 16989 - protein, 16 aa, Homo sapiens
  ( 229 )...( 244 ): >SSR3_HUMAN
IVVKVRSAGRRVWAPS

SEQ ID NO: 16990 - protein, 16 aa, Homo sapiens
  ( 230 )...( 245 ): >SSR3_HUMAN
VVKVRSAGRRVWAPSC

SEQ ID NO: 16991 - protein, 16 aa, Homo sapiens
  ( 231 )...( 246 ): >SSR3_HUMAN
VKVRSAGRRVWAPSCQ

SEQ ID NO: 16992 - protein, 16 aa, Homo sapiens
  ( 232 )...( 247 ): >SSR3_HUMAN
KVRSAGRRVWAPSCQR

SEQ ID NO: 16993 - protein, 16 aa, Homo sapiens
  ( 233 )...( 248 ): >SSR3_HUMAN
VRSAGRRVWAPSCQRR

SEQ ID NO: 16994 - protein, 16 aa, Homo sapiens
  ( 248 )...( 263 ): >SSR3_HUMAN
RRRSERRVTRMVVAVV

SEQ ID NO: 16995 - protein, 16 aa, Homo sapiens
  ( 249 )...( 264 ): >SSR3_HUMAN
RRSERRVTRMVVAVVA

SEQ ID NO: 16996 - protein, 16 aa, Homo sapiens
  ( 250 )...( 265 ): >SSR3_HUMAN
RSERRVTRMVVAVVAL

SEQ ID NO: 16997 - protein, 16 aa, Homo sapiens
  ( 327 )...( 342 ): >SSR3_HUMAN
VLLRPSRRVRSQEPTV

SEQ ID NO: 16998 - protein, 16 aa, Homo sapiens
  ( 328 )...( 343 ): >SSR3_HUMAN
LLRPSRRVRSQEPTVG

SEQ ID NO: 16999 - protein, 16 aa, Homo sapiens
  ( 329 )...( 344 ): >SSR3_HUMAN
LRPSRRVRSQEPTVGP

SEQ ID NO: 17000 - protein, 16 aa, Homo sapiens
  ( 330 )...( 345 ): >SSR3_HUMAN
RPSRRVRSQEPTVGPP

SEQ ID NO: 17001 - protein, 16 aa, Homo sapiens
  ( 68 )...( 83 ): >SSR4_HUMAN
VIFVILRYAKMKTATN

SEQ ID NO: 17002 - protein, 16 aa, Homo sapiens
  ( 69 )...( 84 ): >SSR4_HUMAN
IFVILRYAKMKTATNI

SEQ ID NO: 17003 - protein, 16 aa, Homo sapiens
  ( 70 )...( 85 ): >SSR4_HUMAN
FVILRYAKMKTATNIY

SEQ ID NO: 17004 - protein, 16 aa, Homo sapiens
  ( 71 )...( 86 ): >SSR4_HUMAN
VILRYAKMKTATNIYL

SEQ ID NO: 17005 - protein, 16 aa, Homo sapiens
  ( 72 )...( 87 ): >SSR4_HUMAN
ILRYAKMKTATNIYLL

SEQ ID NO: 17006 - protein, 16 aa, Homo sapiens
  ( 73 )...( 88 ): >SSR4_HUMAN
LRYAKMKTATNIYLLN

SEQ ID NO: 17007 - protein, 16 aa, Homo sapiens
  ( 74 )...( 89 ): >SSR4_HUMAN
RYAKMKTATNIYLLNL

SEQ ID NO: 17008 - protein, 16 aa, Homo sapiens
  ( 144 )...( 159 ): >SSR4_HUMAN
RYVAVVHPLRAATYRR

SEQ ID NO: 17009 - protein, 16 aa, Homo sapiens
  ( 145 )...( 160 ): >SSR4_HUMAN
YVAVVHPLRAATYRRP

SEQ ID NO: 17010 - protein, 16 aa, Homo sapiens
  ( 146 )...( 161 ): >SSR4_HUMAN
VAVVHPLRAATYRRPS

SEQ ID NO: 17011 - protein, 16 aa, Homo sapiens
  ( 147 )...( 162 ): >SSR4_HUMAN
AVVHPLRAATYRRPSV

SEQ ID NO: 17012 - protein, 16 aa, Homo sapiens
  ( 148 )...( 163 ): >SSR4_HUMAN
VVHPLRAATYRRPSVA

SEQ ID NO: 17013 - protein, 16 aa, Homo sapiens
  ( 149 )...( 164 ): >SSR4_HUMAN
VHPLRAATYRRPSVAK

SEQ ID NO: 17014 - protein, 16 aa, Homo sapiens
  ( 150 )...( 165 ): >SSR4_HUMAN
HPLRAATYRRPSVAKL

SEQ ID NO: 17015 - protein, 16 aa, Homo sapiens
  ( 151 )...( 166 ): >SSR4_HUMAN
PLRAATYRRPSVAKLI

SEQ ID NO: 17016 - protein, 16 aa, Homo sapiens
  ( 152 )...( 167 ): >SSR4_HUMAN
LRAATYRRPSVAKLIN

SEQ ID NO: 17017 - protein, 16 aa, Homo sapiens
  ( 153 )...( 168 ): >SSR4_HUMAN
RAATYRRPSVAKLINL

SEQ ID NO: 17018 - protein, 16 aa, Homo sapiens
  ( 154 )...( 169 ): >SSR4_HUMAN
AATYRRPSVAKLINLG

SEQ ID NO: 17019 - protein, 16 aa, Homo sapiens
  ( 155 )...( 170 ): >SSR4_HUMAN
ATYRRPSVAKLINLGV

SEQ ID NO: 17020 - protein, 16 aa, Homo sapiens
  ( 156 )...( 171 ): >SSR4_HUMAN
TYRRPSVAKLINLGVW

SEQ ID NO: 17021 - protein, 16 aa, Homo sapiens
  ( 157 )...( 172 ): >SSR4_HUMAN
YRRPSVAKLINLGVWL

SEQ ID NO: 17022 - protein, 16 aa, Homo sapiens
  ( 158 )...( 173 ): >SSR4_HUMAN
RRPSVAKLINLGVWLA

SEQ ID NO: 17023 - protein, 16 aa, Homo sapiens
  ( 230 )...( 245 ): >SSR4_HUMAN
CYLLIVGKMRAVALRA

SEQ ID NO: 17024 - protein, 16 aa, Homo sapiens
  ( 232 )...( 247 ): >SSR4_HUMAN
LLIVGKMRAVALRAGW

SEQ ID NO: 17025 - protein, 16 aa, Homo sapiens
  ( 233 )...( 248 ): >SSR4_HUMAN
LIVGKMRAVALRAGWQ

SEQ ID NO: 17026 - protein, 16 aa, Homo sapiens
  ( 234 )...( 249 ): >SSR4_HUMAN
IVGKMRAVALRAGWQQ

SEQ ID NO: 17027 - protein, 16 aa, Homo sapiens
  ( 235 )...( 250 ): >SSR4_HUMAN
VGKMRAVALRAGWQQR

SEQ ID NO: 17028 - protein, 16 aa, Homo sapiens
  ( 236 )...( 251 ): >SSR4_HUMAN
GKMRAVALRAGWQQRR

SEQ ID NO: 17029 - protein, 16 aa, Homo sapiens
  ( 249 )...( 264 ): >SSR4_HUMAN
QRRRSEKKITRLVLMV

SEQ ID NO: 17030 - protein, 16 aa, Homo sapiens
  ( 250 )...( 265 ): >SSR4_HUMAN
RRRSEKKITRLVLMVV

SEQ ID NO: 17031 - protein, 16 aa, Homo sapiens
  ( 251 )...( 266 ): >SSR4_HUMAN
RRSEKKITRLVLMVVV

SEQ ID NO: 17032 - protein, 16 aa, Homo sapiens
  ( 252 )...( 267 ): >SSR4_HUMAN
RSEKKITRLVLMVVVV

SEQ ID NO: 17033 - protein, 16 aa, Homo sapiens
  ( 319 )...( 334 ): >SSR4_HUMAN
RRSFQRVLCLRCCLLE

SEQ ID NO: 17034 - protein, 16 aa, Homo sapiens
  ( 370 )...( 385 ): >SSR4_HUMAN
ALQPEPGRKRIPLTRT

SEQ ID NO: 17035 - protein, 16 aa, Homo sapiens
  ( 371 )...( 386 ): >SSR4_HUMAN
LQPEPGRKRIPLTRTT

SEQ ID NO: 17036 - protein, 16 aa, Homo sapiens
  ( 372 )...( 387 ): >SSR4_HUMAN
QPEPGRKRIPLTRTTT

SEQ ID NO: 17037 - protein, 16 aa, Homo sapiens
  ( 373 )...( 388 ): >SSR4_HUMAN
PEPGRKRIPLTRTTTF

SEQ ID NO: 17038 - protein, 15 aa, Homo sapiens
  ( 374 )...( 389 ): >SSR4_HUMAN
EPGRKRIPLTRTTTF

SEQ ID NO: 17039 - protein, 14 aa, Homo sapiens
  ( 375 )...( 390 ): >SSR4_HUMAN
PGRKRIPLTRTTTF

SEQ ID NO: 17040 - protein, 13 aa, Homo sapiens
  ( 376 )...( 391 ): >SSR4_HUMAN
GRKRIPLTRTTTF

SEQ ID NO: 17041 - protein, 12 aa, Homo sapiens
  ( 377 )...( 392 ): >SSR4_HUMAN
RKRIPLTRTTTF

SEQ ID NO: 17042 - protein, 16 aa, Homo sapiens
  ( 57 )...( 72 ): >SSR5_HUMAN
GNTLVIYVVLRFAKMK

SEQ ID NO: 17043 - protein, 16 aa, Homo sapiens
  ( 58 )...( 73 ): >SSR5_HUMAN
NTLVIYVVLRFAKMKT

SEQ ID NO: 17044 - protein, 16 aa, Homo sapiens
  ( 61 )...( 76 ): >SSR5_HUMAN
VIYVVLRFAKMKTVTN

SEQ ID NO: 17045 - protein, 16 aa, Homo sapiens
  ( 62 )...( 77 ): >SSR5_HUMAN
IYVVLRFAKMKTVTNI

SEQ ID NO: 17046 - protein, 16 aa, Homo sapiens
  ( 63 )...( 78 ): >SSR5_HUMAN
YVVLRFAKMKTVTNIY

SEQ ID NO: 17047 - protein, 16 aa, Homo sapiens
  ( 64 )...( 79 ): >SSR5_HUMAN
VVLRFAKMKTVTNIYI

SEQ ID NO: 17048 - protein, 16 aa, Homo sapiens
  ( 66 )...( 81 ): >SSR5_HUMAN
LRFAKMKTVTNIYILN

SEQ ID NO: 17049 - protein, 16 aa, Homo sapiens
  ( 67 )...( 82 ): >SSR5_HUMAN
RFAKMKTVTNIYILNL

SEQ ID NO: 17050 - protein, 16 aa, Homo sapiens
  ( 145 )...( 160 ): >SSR5_HUMAN
LSSARWRRPRVAKLAS

SEQ ID NO: 17051 - protein, 16 aa, Homo sapiens
  ( 146 )...( 161 ): >SSR5_HUMAN
SSARWRRPRVAKLASA

SEQ ID NO: 17052 - protein, 16 aa, Homo sapiens
  ( 147 )...( 162 ): >SSR5_HUMAN
SARWRRPRVAKLASAA

SEQ ID NO: 17053 - protein, 16 aa, Homo sapiens
  ( 148 )...( 163 ): >SSR5_HUMAN
ARWRRPRVAKLASAAA

SEQ ID NO: 17054 - protein, 16 aa, Homo sapiens
  ( 150 )...( 165 ): >SSR5_HUMAN
WRRPRVAKLASAAAWV

SEQ ID NO: 17055 - protein, 16 aa, Homo sapiens
  ( 151 )...( 166 ): >SSR5_HUMAN
RRPRVAKLASAAAWVL

SEQ ID NO: 17056 - protein, 16 aa, Homo sapiens
  ( 228 )...( 243 ): >SSR5_HUMAN
VRAAGVRVGCVRRRSE

SEQ ID NO: 17057 - protein, 16 aa, Homo sapiens
  ( 230 )...( 245 ): >SSR5_HUMAN
AAGVRVGCVRRRSERK

SEQ ID NO: 17058 - protein, 16 aa, Homo sapiens
  ( 231 )...( 246 ): >SSR5_HUMAN
AGVRVGCVRRRSERKV

SEQ ID NO: 17059 - protein, 16 aa, Homo sapiens
  ( 232 )...( 247 ): >SSR5_HUMAN
GVRVGCVRRRSERKVT

SEQ ID NO: 17060 - protein, 16 aa, Homo sapiens
  ( 235 )...( 250 ): >SSR5_HUMAN
VGCVRRRSERKVTRMV

SEQ ID NO: 17061 - protein, 16 aa, Homo sapiens
  ( 236 )...( 251 ): >SSR5_HUMAN
GCVRRRSERKVTRMVL

SEQ ID NO: 17062 - protein, 16 aa, Homo sapiens
  ( 237 )...( 252 ): >SSR5_HUMAN
CVRRRSERKVTRMVLV

SEQ ID NO: 17063 - protein, 16 aa, Homo sapiens
  ( 238 )...( 253 ): >SSR5_HUMAN
VRRRSERKVTRMVLVV

SEQ ID NO: 17064 - protein, 16 aa, Homo sapiens
  ( 239 )...( 254 ): >SSR5_HUMAN
RRRSERKVTRMVLVVV

SEQ ID NO: 17065 - protein, 16 aa, Homo sapiens
  ( 240 )...( 255 ): >SSR5_HUMAN
RRSERKVTRMVLVVVL

SEQ ID NO: 17066 - protein, 16 aa, Homo sapiens
  ( 241 )...( 256 ): >SSR5_HUMAN
RSERKVTRMVLVVVLV

SEQ ID NO: 17067 - protein, 16 aa, Homo sapiens
  ( 311 )...( 326 ): >SSR5_HUMAN
FRQSFQKVLCLRKGSG

SEQ ID NO: 17068 - protein, 16 aa, Homo sapiens
  ( 312 )...( 327 ): >SSR5_HUMAN
RQSFQKVLCLRKGSGA

SEQ ID NO: 17069 - protein, 16 aa, Homo sapiens
  ( 313 )...( 328 ): >SSR5_HUMAN
QSFQKVLCLRKGSGAK

SEQ ID NO: 17070 - protein, 16 aa, Homo sapiens
  ( 132 )...( 147 ): >TA2R_HUMAN
LGITRPFSRPAVASQR

SEQ ID NO: 17071 - protein, 16 aa, Homo sapiens
  ( 133 )...( 148 ): >TA2R_HUMAN
GITRPFSRPAVASQRR

SEQ ID NO: 17072 - protein, 16 aa, Homo sapiens
  ( 134 )...( 149 ): >TA2R_HUMAN
ITRPFSRPAVASQRRA

SEQ ID NO: 17073 - protein, 16 aa, Homo sapiens
  ( 140 )...( 155 ): >TA2R_HUMAN
RPAVASQRRAWATVGL

SEQ ID NO: 17074 - protein, 16 aa, Homo sapiens
  ( 319 )...( 334 ): >TA2R_HUMAN
LQPRLSTRPRRVSLCG

SEQ ID NO: 17075 - protein, 16 aa, Homo sapiens
  ( 320 )...( 335 ): >TA2R_HUMAN
QPRLSTRPRRVSLCGP

SEQ ID NO: 17076 - protein, 16 aa, Homo sapiens
  ( 337 )...( 352 ): >TA2R_HUMAN
WSTVARSRLTATSASR

SEQ ID NO: 17077 - protein, 16 aa, Homo sapiens
  ( 339 )...( 354 ): >TA2R_HUMAN
TVARSRLTATSASRVQ

SEQ ID NO: 17078 - protein, 16 aa, Homo sapiens
  ( 340 )...( 355 ): >TA2R_HUMAN
VARSRLTATSASRVQA

SEQ ID NO: 17079 - protein, 16 aa, Homo sapiens
  ( 341 )...( 356 ): >TA2R_HUMAN
ARSRLTATSASRVQAI

SEQ ID NO: 17080 - protein, 16 aa, Homo sapiens
  ( 342 )...( 357 ): >TA2R_HUMAN
RSRLTATSASRVQAIL

SEQ ID NO: 17081 - protein, 16 aa, Homo sapiens
  ( 42 )...( 57 ): >TRFR_HUMAN
GNIMVVLVVMRTKHMR

SEQ ID NO: 17082 - protein, 16 aa, Homo sapiens
  ( 43 )...( 58 ): >TRFR_HUMAN
NIMVVLVVMRTKHMRT

SEQ ID NO: 17083 - protein, 16 aa, Homo sapiens
  ( 44 )...( 59 ): >TRFR_HUMAN
IMVVLVVMRTKHMRTP

SEQ ID NO: 17084 - protein, 16 aa, Homo sapiens
  ( 45 )...( 60 ): >TRFR_HUMAN
MVVLVVMRTKHMRTPT

SEQ ID NO: 17085 - protein, 16 aa, Homo sapiens
  ( 46 )...( 61 ): >TRFR_HUMAN
VVLVVMRTKHMRTPTN

SEQ ID NO: 17086 - protein, 16 aa, Homo sapiens
  ( 47 )...( 62 ): >TRFR_HUMAN
VLVVMRTKHMRTPTNC

SEQ ID NO: 17087 - protein, 16 aa, Homo sapiens
  ( 48 )...( 63 ): >TRFR_HUMAN
LVVMRTKHMRTPTNCY

SEQ ID NO: 17088 - protein, 16 aa, Homo sapiens
  ( 49 )...( 64 ): >TRFR_HUMAN
VVMRTKHMRTPTNCYL

SEQ ID NO: 17089 - protein, 16 aa, Homo sapiens
  ( 50 )...( 65 ): >TRFR_HUMAN
VMRTKHMRTPTNCYLV

SEQ ID NO: 17090 - protein, 16 aa, Homo sapiens
  ( 131 )...( 146 ): >TRFR_HUMAN
IKAQFLCTFSRAKKII

SEQ ID NO: 17091 - protein, 16 aa, Homo sapiens
  ( 132 )...( 147 ): >TRFR_HUMAN
KAQFLCTFSRAKKIII

SEQ ID NO: 17092 - protein, 16 aa, Homo sapiens
  ( 134 )...( 149 ): >TRFR_HUMAN
QFLCTFSRAKKIIIFV

SEQ ID NO: 17093 - protein, 16 aa, Homo sapiens
  ( 139 )...( 154 ): >TRFR_HUMAN
FSRAKKIIIFVWAFTS

SEQ ID NO: 17094 - protein, 16 aa, Homo sapiens
  ( 140 )...( 155 ): >TRFR_HUMAN
SRAKKIIIFVWAFTSL

SEQ ID NO: 17095 - protein, 16 aa, Homo sapiens
  ( 252 )...( 267 ): >TRFR_HUMAN
RCFNSTVSSRKQVTKM

SEQ ID NO: 17096 - protein, 16 aa, Homo sapiens
  ( 259 )...( 274 ): >TRFR_HUMAN
SSRKQVTKMLAVVVIL

SEQ ID NO: 17097 - protein, 16 aa, Homo sapiens
  ( 260 )...( 275 ): >TRFR_HUMAN
SRKQVTKMLAVVVILF

SEQ ID NO: 17098 - protein, 16 aa, Homo sapiens
  ( 124 )...( 139 ): >TRP1_HUMAN
GAVDILLNHRPKRSSR

SEQ ID NO: 17099 - protein, 16 aa, Homo sapiens
  ( 128 )...( 143 ): >TRP1_HUMAN
ILLNHRPKRSSRPTIV

SEQ ID NO: 17100 - protein, 16 aa, Homo sapiens
  ( 134 )...( 149 ): >TRP1_HUMAN
PKRSSRPTIVKLMERI

SEQ ID NO: 17101 - protein, 16 aa, Homo sapiens
  ( 135 )...( 150 ): >TRP1_HUMAN
KRSSRPTIVKLMERIQ

SEQ ID NO: 17102 - protein, 16 aa, Homo sapiens
  ( 136 )...( 151 ): >TRP1_HUMAN
RSSRPTIVKLMERIQN

SEQ ID NO: 17103 - protein, 16 aa, Homo sapiens
  ( 297 )...( 312 ): >TRP1_HUMAN
KRGLLEERMNLSRLKL

SEQ ID NO: 17104 - protein, 16 aa, Homo sapiens
  ( 336 )...( 351 ): >TRP1_HUMAN
FGQMSGYRRKPTCKKI

SEQ ID NO: 17105 - protein, 16 aa, Homo sapiens
  ( 337 )...( 352 ): >TRP1_HUMAN
GQMSGYRRKPTCKKIM

SEQ ID NO: 17106 - protein, 16 aa, Homo sapiens
  ( 338 )...( 353 ): >TRP1_HUMAN
QMSGYRRKPTCKKIMT

SEQ ID NO: 17107 - protein, 16 aa, Homo sapiens
  ( 339 )...( 354 ): >TRP1_HUMAN
MSGYRRKPTCKKIMTV

SEQ ID NO: 17108 - protein, 16 aa, Homo sapiens
  ( 340 )...( 355 ): >TRP1_HUMAN
SGYRRKPTCKKIMTVL

SEQ ID NO: 17109 - protein, 16 aa, Homo sapiens
  ( 341 )...( 356 ): >TRP1_HUMAN
GYRRKPTCKKIMTVLT

SEQ ID NO: 17110 - protein, 16 aa, Homo sapiens
  ( 342 )...( 357 ): >TRP1_HUMAN
YRRKPTCKKIMTVLTV

SEQ ID NO: 17111 - protein, 16 aa, Homo sapiens
  ( 343 )...( 358 ): >TRP1_HUMAN
RRKPTCKKIMTVLTVG

SEQ ID NO: 17112 - protein, 16 aa, Homo sapiens
  ( 344 )...( 359 ): >TRP1_HUMAN
RKPTCKKIMTVLTVGI

SEQ ID NO: 17113 - protein, 16 aa, Homo sapiens
  ( 698 )...( 713 ): >TRP1_HUMAN
LSKWICSHTSKGKVKR

SEQ ID NO: 17114 - protein, 16 aa, Homo sapiens
  ( 699 )...( 714 ): >TRP1_HUMAN
SKWICSHTSKGKVKRQ

SEQ ID NO: 17115 - protein, 16 aa, Homo sapiens
  ( 700 )...( 715 ): >TRP1_HUMAN
KWICSHTSKGKVKRQN

SEQ ID NO: 17116 - protein, 16 aa, Homo sapiens
  ( 702 )...( 717 ): >TRP1_HUMAN
ICSHTSKGKVKRQNSL

SEQ ID NO: 17117 - protein, 16 aa, Homo sapiens
  ( 703 )...( 718 ): >TRP1_HUMAN
CSHTSKGKVKRQNSLK

SEQ ID NO: 17118 - protein, 16 aa, Homo sapiens
  ( 737 )...( 752 ): >TRP1_HUMAN
CLVHRYLTSMRQKMQS

SEQ ID NO: 17119 - protein, 16 aa, Homo sapiens
  ( 3 )...( 18 ): >TRP3_HUMAN
GSPSLRRMTVMREKGR

SEQ ID NO: 17120 - protein, 16 aa, Homo sapiens
  ( 7 )...( 22 ): >TRP3_HUMAN
LRRMTVMREKGRRQAV

SEQ ID NO: 17121 - protein, 16 aa, Homo sapiens
  ( 9 )...( 24 ): >TRP3_HUMAN
RMTVMREKGRRQAVRG

SEQ ID NO: 17122 - protein, 16 aa, Homo sapiens
  ( 10 )...( 25 ): >TRP3_HUMAN
MTVMREKGRRQAVRGP

SEQ ID NO: 17123 - protein, 16 aa, Homo sapiens
  ( 11 )...( 26 ): >TRP3_HUMAN
TVMREKGRRQAVRGPA

SEQ ID NO: 17124 - protein, 16 aa, Homo sapiens
  ( 12 )...( 27 ): >TRP3_HUMAN
VMREKGRRQAVRGPAF

SEQ ID NO: 17125 - protein, 16 aa, Homo sapiens
  ( 13 )...( 28 ): >TRP3_HUMAN
MREKGRRQAVRGPAFM

SEQ ID NO: 17126 - protein, 16 aa, Homo sapiens
  ( 299 )...( 314 ): >TRP3_HUMAN
VHRHKASLSRVKLAIK

SEQ ID NO: 17127 - protein, 16 aa, Homo sapiens
  ( 301 )...( 316 ): >TRP3_HUMAN
RHKASLSRVKLAIKYE

SEQ ID NO: 17128 - protein, 16 aa, Homo sapiens
  ( 303 )...( 318 ): >TRP3_HUMAN
KASLSRVKLAIKYEVK

SEQ ID NO: 17129 - protein, 16 aa, Homo sapiens
  ( 304 )...( 319 ): >TRP3_HUMAN
ASLSRVKLAIKYEVKK

SEQ ID NO: 17130 - protein, 16 aa, Homo sapiens
  ( 305 )...( 320 ): >TRP3_HUMAN
SLSRVKLAIKYEVKKF

SEQ ID NO: 17131 - protein, 16 aa, Homo sapiens
  ( 306 )...( 321 ): >TRP3_HUMAN
LSRVKLAIKYEVKKFV

SEQ ID NO: 17132 - protein, 16 aa, Homo sapiens
  ( 307 )...( 322 ): >TRP3_HUMAN
SRVKLAIKYEVKKFVA

SEQ ID NO: 17133 - protein, 16 aa, Homo sapiens
  ( 308 )...( 323 ): >TRP3_HUMAN
RVKLAIKYEVKKFVAH

SEQ ID NO: 17134 - protein, 16 aa, Homo sapiens
  ( 373 )...( 388 ): >TRP3_HUMAN
SRLGKILRSPFMKFVA

SEQ ID NO: 17135 - protein, 16 aa, Homo sapiens
  ( 374 )...( 389 ): >TRP3_HUMAN
RLGKILRSPFMKFVAH

SEQ ID NO: 17136 - protein, 16 aa, Homo sapiens
  ( 731 )...( 746 ): >TRP3_HUMAN
RRRLQKDIEMGMGNSK

SEQ ID NO: 17137 - protein, 16 aa, Homo sapiens
  ( 777 )...( 792 ): >TRP3_HUMAN
QIMKRLIKRYVLKAQV

SEQ ID NO: 17138 - protein, 16 aa, Homo sapiens
  ( 778 )...( 793 ): >TRP3_HUMAN
IMKRLIKRYVLKAQVD

SEQ ID NO: 17139 - protein, 16 aa, Homo sapiens
  ( 157 )...( 172 ): >TRP4_HUMAN
IIKLLVQKGVSVPRPH

SEQ ID NO: 17140 - protein, 16 aa, Homo sapiens
  ( 194 )...( 209 ): >TRP4_HUMAN
RSRLNIYKALASPSLI

SEQ ID NO: 17141 - protein, 16 aa, Homo sapiens
  ( 281 )...( 296 ): >TRP4_HUMAN
QSGNDLARLKLAIKYR

SEQ ID NO: 17142 - protein, 16 aa, Homo sapiens
  ( 282 )...( 297 ): >TRP4_HUMAN
SGNDLARLKLAIKYRQ

SEQ ID NO: 17143 - protein, 16 aa, Homo sapiens
  ( 283 )...( 298 ): >TRP4_HUMAN
GNDLARLKLAIKYRQK

SEQ ID NO: 17144 - protein, 16 aa, Homo sapiens
  ( 286 )...( 301 ): >TRP4_HUMAN
LARLKLAIKYRQKEFV

SEQ ID NO: 17145 - protein, 16 aa, Homo sapiens
  ( 287 )...( 302 ): >TRP4_HUMAN
ARLKLAIKYRQKEFVA

SEQ ID NO: 17146 - protein, 16 aa, Homo sapiens
  ( 289 )...( 304 ): >TRP4_HUMAN
LKLAIKYRQKEFVAQP

SEQ ID NO: 17147 - protein, 16 aa, Homo sapiens
  ( 322 )...( 337 ): >TRP4_HUMAN
RRRHWAVKMVTCFIIG

SEQ ID NO: 17148 - protein, 16 aa, Homo sapiens
  ( 323 )...( 338 ): >TRP4_HUMAN
RRHWAVKMVTCFIIGL

SEQ ID NO: 17149 - protein, 16 aa, Homo sapiens
  ( 677 )...( 692 ): >TRP4_HUMAN
LCKKKMRRKPESFGTI

SEQ ID NO: 17150 - protein, 16 aa, Homo sapiens
  ( 678 )...( 693 ): >TRP4_HUMAN
CKKKMRRKPESFGTIG

SEQ ID NO: 17151 - protein, 16 aa, Homo sapiens
  ( 681 )...( 696 ): >TRP4_HUMAN
KMRRKPESFGTIGRRA

SEQ ID NO: 17152 - protein, 16 aa, Homo sapiens
  ( 682 )...( 697 ): >TRP4_HUMAN
MRRKPESFGTIGRRAA

SEQ ID NO: 17153 - protein, 16 aa, Homo sapiens
  ( 683 )...( 698 ): >TRP4_HUMAN
RRKPESFGTIGRRAAD

SEQ ID NO: 17154 - protein, 16 aa, Homo sapiens
  ( 688 )...( 703 ): >TRP4_HUMAN
SFGTIGRRAADNLRRH

SEQ ID NO: 17155 - protein, 16 aa, Homo sapiens
  ( 690 )...( 705 ): >TRP4_HUMAN
GTIGRRAADNLRRHHQ

SEQ ID NO: 17156 - protein, 16 aa, Homo sapiens
  ( 708 )...( 723 ): >TRP4_HUMAN
EVMRNLVKRYVAAMIR

SEQ ID NO: 17157 - protein, 16 aa, Homo sapiens
  ( 709 )...( 724 ): >TRP4_HUMAN
VMRNLVKRYVAAMIRD

SEQ ID NO: 17158 - protein, 16 aa, Homo sapiens
  ( 710 )...( 725 ): >TRP4_HUMAN
MRNLVKRYVAAMIRDA

SEQ ID NO: 17159 - protein, 16 aa, Homo sapiens
  ( 711 )...( 726 ): >TRP4_HUMAN
RNLVKRYVAAMIRDAK

SEQ ID NO: 17160 - protein, 16 aa, Homo sapiens
  ( 712 )...( 727 ): >TRP4_HUMAN
NLVKRYVAAMIRDAKT

SEQ ID NO: 17161 - protein, 16 aa, Homo sapiens
  ( 832 )...( 847 ): >TRP4_HUMAN
KQRKVNFVTDIKNFGL

SEQ ID NO: 17162 - protein, 16 aa, Homo sapiens
  ( 919 )...( 934 ): >TRP4_HUMAN
LGLQVGKRVCPFKSEK

SEQ ID NO: 17163 - protein, 16 aa, Homo sapiens
  ( 920 )...( 935 ): >TRP4_HUMAN
GLQVGKRVCPFKSEKV

SEQ ID NO: 17164 - protein, 16 aa, Homo sapiens
  ( 921 )...( 936 ): >TRP4_HUMAN
LQVGKRVCPFKSEKVV

SEQ ID NO: 17165 - protein, 16 aa, Homo sapiens
  ( 922 )...( 937 ): >TRP4_HUMAN
QVGKRVCPFKSEKVVV

SEQ ID NO: 17166 - protein, 16 aa, Homo sapiens
  ( 155 )...( 170 ): >TRP5_HUMAN
YEIIKLLVQKRVTIPR

SEQ ID NO: 17167 - protein, 16 aa, Homo sapiens
  ( 156 )...( 171 ): >TRP5_HUMAN
EIIKLLVQKRVTIPRP

SEQ ID NO: 17168 - protein, 16 aa, Homo sapiens
  ( 157 )...( 172 ): >TRP5_HUMAN
IIKLLVQKRVTIPRPH

SEQ ID NO: 17169 - protein, 16 aa, Homo sapiens
  ( 158 )...( 173 ): >TRP5_HUMAN
IKLLVQKRVTIPRPHQ

SEQ ID NO: 17170 - protein, 16 aa, Homo sapiens
  ( 159 )...( 174 ): >TRP5_HUMAN
KLLVQKRVTIPRPHQI

SEQ ID NO: 17171 - protein, 16 aa, Homo sapiens
  ( 160 )...( 175 ): >TRP5_HUMAN
LLVQKRVTIPRPHQIR

SEQ ID NO: 17172 - protein, 16 aa, Homo sapiens
  ( 161 )...( 176 ): >TRP5_HUMAN
LVQKRVTIPRPHQIRC

SEQ ID NO: 17173 - protein, 16 aa, Homo sapiens
  ( 164 )...( 179 ): >TRP5_HUMAN
KRVTIPRPHQIRCNCV

SEQ ID NO: 17174 - protein, 16 aa, Homo sapiens
  ( 194 )...( 209 ): >TRP5_HUMAN
RSRLNIYKALASPSLI

SEQ ID NO: 17175 - protein, 16 aa, Homo sapiens
  ( 321 )...( 336 ): >TRP5_HUMAN
GWRRKHWVVKLLTCMT

SEQ ID NO: 17176 - protein, 16 aa, Homo sapiens
  ( 323 )...( 338 ): >TRP5_HUMAN
RRKHWVVKLLTCMTIG

SEQ ID NO: 17177 - protein, 16 aa, Homo sapiens
  ( 324 )...( 339 ): >TRP5_HUMAN
RKHWVVKLLTCMTIGF

SEQ ID NO: 17178 - protein, 16 aa, Homo sapiens
  ( 353 )...( 368 ): >TRP5_HUMAN
RSNLGLFIKKPFIKFI

SEQ ID NO: 17179 - protein, 16 aa, Homo sapiens
  ( 449 )...( 464 ): >TRP5_HUMAN
TISLKIVAYVKYNGSR

SEQ ID NO: 17180 - protein, 16 aa, Homo sapiens
  ( 450 )...( 465 ): >TRP5_HUMAN
ISLKIVAYVKYNGSRP

SEQ ID NO: 17181 - protein, 16 aa, Homo sapiens
  ( 451 )...( 466 ): >TRP5_HUMAN
SLKIVAYVKYNGSRPR

SEQ ID NO: 17182 - protein, 16 aa, Homo sapiens
  ( 452 )...( 467 ): >TRP5_HUMAN
LKIVAYVKYNGSRPRE

SEQ ID NO: 17183 - protein, 16 aa, Homo sapiens
  ( 715 )...( 730 ): >TRP5_HUMAN
EVIRNLVKRYVAAMIR

SEQ ID NO: 17184 - protein, 16 aa, Homo sapiens
  ( 716 )...( 731 ): >TRP5_HUMAN
VIRNLVKRYVAAMIRN

SEQ ID NO: 17185 - protein, 16 aa, Homo sapiens
  ( 717 )...( 732 ): >TRP5_HUMAN
IRNLVKRYVAAMIRNS

SEQ ID NO: 17186 - protein, 16 aa, Homo sapiens
  ( 719 )...( 734 ): >TRP5_HUMAN
NLVKRYVAAMIRNSKT

SEQ ID NO: 17187 - protein, 16 aa, Homo sapiens
  ( 720 )...( 735 ): >TRP5_HUMAN
LVKRYVAAMIRNSKTH

SEQ ID NO: 17188 - protein, 16 aa, Homo sapiens
  ( 721 )...( 736 ): >TRP5_HUMAN
VKRYVAAMIRNSKTHE

SEQ ID NO: 17189 - protein, 16 aa, Homo sapiens
  ( 722 )...( 737 ): >TRP5_HUMAN
KRYVAAMIRNSKTHEG

SEQ ID NO: 17190 - protein, 16 aa, Homo sapiens
  ( 804 )...( 819 ): >TRP5_HUMAN
KKKTCHGPPLIRTMPR

SEQ ID NO: 17191 - protein, 16 aa, Homo sapiens
  ( 813 )...( 828 ): >TRP5_HUMAN
LIRTMPRSSGAQGKSK

SEQ ID NO: 17192 - protein, 16 aa, Homo sapiens
  ( 833 )...( 848 ): >TRP5_HUMAN
SKRSFMGPSLKKLGLL

SEQ ID NO: 17193 - protein, 16 aa, Homo sapiens
  ( 834 )...( 849 ): >TRP5_HUMAN
KRSFMGPSLKKLGLLF

SEQ ID NO: 17194 - protein, 16 aa, Homo sapiens
  ( 65 )...( 80 ): >TRP6_HUMAN
AHRRQTVLREKGRRLA

SEQ ID NO: 17195 - protein, 16 aa, Homo sapiens
  ( 68 )...( 83 ): >TRP6_HUMAN
RQTVLREKGRRLANRG

SEQ ID NO: 17196 - protein, 16 aa, Homo sapiens
  ( 69 )...( 84 ): >TRP6_HUMAN
QTVLREKGRRLANRGP

SEQ ID NO: 17197 - protein, 16 aa, Homo sapiens
  ( 70 )...( 85 ): >TRP6_HUMAN
TVLREKGRRLANRGPA

SEQ ID NO: 17198 - protein, 16 aa, Homo sapiens
  ( 71 )...( 86 ): >TRP6_HUMAN
VLREKGRRLANRGPAY

SEQ ID NO: 17199 - protein, 16 aa, Homo sapiens
  ( 72 )...( 87 ): >TRP6_HUMAN
LREKGRRLANRGPAYM

SEQ ID NO: 17200 - protein, 16 aa, Homo sapiens
  ( 234 )...( 249 ): >TRP6_HUMAN
IVHTLLRKGARIERPH

SEQ ID NO: 17201 - protein, 16 aa, Homo sapiens
  ( 356 )...( 371 ): >TRP6_HUMAN
GDHGRPNLSRLKLAIK

SEQ ID NO: 17202 - protein, 16 aa, Homo sapiens
  ( 359 )...( 374 ): >TRP6_HUMAN
GRPNLSRLKLAIKYEV

SEQ ID NO: 17203 - protein, 16 aa, Homo sapiens
  ( 361 )...( 376 ): >TRP6_HUMAN
PNLSRLKLAIKYEVKK

SEQ ID NO: 17204 - protein, 16 aa, Homo sapiens
  ( 363 )...( 378 ): >TRP6_HUMAN
LSRLKLAIKYEVKKFV

SEQ ID NO: 17205 - protein, 16 aa, Homo sapiens
  ( 364 )...( 379 ): >TRP6_HUMAN
SRLKLAIKYEVKKFVA

SEQ ID NO: 17206 - protein, 16 aa, Homo sapiens
  ( 365 )...( 380 ): >TRP6_HUMAN
RLKLAIKYEVKKFVAH

SEQ ID NO: 17207 - protein, 16 aa, Homo sapiens
  ( 779 )...( 794 ): >TRP6_HUMAN
KLKKWISELFQGHKKG

SEQ ID NO: 17208 - protein, 16 aa, Homo sapiens
  ( 857 )...( 872 ): >TRP6_HUMAN
KIMKRLIKRYVLQAQI

SEQ ID NO: 17209 - protein, 16 aa, Homo sapiens
  ( 858 )...( 873 ): >TRP6_HUMAN
IMKRLIKRYVLQAQID

SEQ ID NO: 17210 - protein, 16 aa, Homo sapiens
  ( 13 )...( 28 ): >TRP7_HUMAN
RHTTLREKGRRQAIRG

SEQ ID NO: 17211 - protein, 16 aa, Homo sapiens
  ( 14 )...( 29 ): >TRP7_HUMAN
HTTLREKGRRQAIRGP

SEQ ID NO: 17212 - protein, 16 aa, Homo sapiens
  ( 15 )...( 30 ): >TRP7_HUMAN
TTLREKGRRQAIRGPA

SEQ ID NO: 17213 - protein, 16 aa, Homo sapiens
  ( 16 )...( 31 ): >TRP7_HUMAN
TLREKGRRQAIRGPAY

SEQ ID NO: 17214 - protein, 16 aa, Homo sapiens
  ( 17 )...( 32 ): >TRP7_HUMAN
LREKGRRQAIRGPAYM

SEQ ID NO: 17215 - protein, 16 aa, Homo sapiens
  ( 304 )...( 319 ): >TRP7_HUMAN
HRPSLSRIKLAIKYEV

SEQ ID NO: 17216 - protein, 16 aa, Homo sapiens
  ( 305 )...( 320 ): >TRP7_HUMAN
RPSLSRIKLAIKYEVK

SEQ ID NO: 17217 - protein, 16 aa, Homo sapiens
  ( 306 )...( 321 ): >TRP7_HUMAN
PSLSRIKLAIKYEVKK

SEQ ID NO: 17218 - protein, 16 aa, Homo sapiens
  ( 307 )...( 322 ): >TRP7_HUMAN
SLSRIKLAIKYEVKKF

SEQ ID NO: 17219 - protein, 16 aa, Homo sapiens
  ( 308 )...( 323 ): >TRP7_HUMAN
LSRIKLAIKYEVKKFV

SEQ ID NO: 17220 - protein, 16 aa, Homo sapiens
  ( 309 )...( 324 ): >TRP7_HUMAN
SRIKLAIKYEVKKFVA

SEQ ID NO: 17221 - protein, 16 aa, Homo sapiens
  ( 310 )...( 325 ): >TRP7_HUMAN
RIKLAIKYEVKKFVAH

SEQ ID NO: 17222 - protein, 16 aa, Homo sapiens
  ( 375 )...( 390 ): >TRP7_HUMAN
SKLGRTLRSPFMKFVA

SEQ ID NO: 17223 - protein, 16 aa, Homo sapiens
  ( 376 )...( 391 ): >TRP7_HUMAN
KLGRTLRSPFMKFVAH

SEQ ID NO: 17224 - protein, 16 aa, Homo sapiens
  ( 721 )...( 736 ): >TRP7_HUMAN
LIMRIKMCLIKLCKSK

SEQ ID NO: 17225 - protein, 16 aa, Homo sapiens
  ( 722 )...( 737 ): >TRP7_HUMAN
IMRIKMCLIKLCKSKA

SEQ ID NO: 17226 - protein, 16 aa, Homo sapiens
  ( 723 )...( 738 ): >TRP7_HUMAN
MRIKMCLIKLCKSKAK

SEQ ID NO: 17227 - protein, 16 aa, Homo sapiens
  ( 724 )...( 739 ): >TRP7_HUMAN
RIKMCLIKLCKSKAKS

SEQ ID NO: 17228 - protein, 16 aa, Homo sapiens
  ( 746 )...( 761 ): >TRP7_HUMAN
MGMLNSKFKKTRYQAG

SEQ ID NO: 17229 - protein, 16 aa, Homo sapiens
  ( 747 )...( 762 ): >TRP7_HUMAN
GMLNSKFKKTRYQAGM

SEQ ID NO: 17230 - protein, 16 aa, Homo sapiens
  ( 754 )...( 769 ): >TRP7_HUMAN
KKTRYQAGMRNSENLT

SEQ ID NO: 17231 - protein, 16 aa, Homo sapiens
  ( 773 )...( 788 ): >TRP7_HUMAN
TLSKPTRYQKIMKRLI

SEQ ID NO: 17232 - protein, 16 aa, Homo sapiens
  ( 782 )...( 797 ): >TRP7_HUMAN
KIMKRLIKRYVLKAQV

SEQ ID NO: 17233 - protein, 16 aa, Homo sapiens
  ( 783 )...( 798 ): >TRP7_HUMAN
IMKRLIKRYVLKAQVD

SEQ ID NO: 17234 - protein, 16 aa, Homo sapiens
  ( 249 )...( 264 ): >TSHR_HUMAN
LKELIARNTWTLKKLP

SEQ ID NO: 17235 - protein, 16 aa, Homo sapiens
  ( 250 )...( 265 ): >TSHR_HUMAN
KELIARNTWTLKKLPL

SEQ ID NO: 17236 - protein, 16 aa, Homo sapiens
  ( 252 )...( 267 ): >TSHR_HUMAN
LIARNTWTLKKLPLSL

SEQ ID NO: 17237 - protein, 16 aa, Homo sapiens
  ( 253 )...( 268 ): >TSHR_HUMAN
IARNTWTLKKLPLSLS

SEQ ID NO: 17238 - protein, 16 aa, Homo sapiens
  ( 254 )...( 269 ): >TSHR_HUMAN
ARNTWTLKKLPLSLSF

SEQ ID NO: 17239 - protein, 16 aa, Homo sapiens
  ( 255 )...( 270 ): >TSHR_HUMAN
RNTWTLKKLPLSLSFL

SEQ ID NO: 17240 - protein, 16 aa, Homo sapiens
  ( 284 )...( 299 ): >TSHR_HUMAN
CAFKNQKKIRGILESL

SEQ ID NO: 17241 - protein, 16 aa, Homo sapiens
  ( 285 )...( 300 ): >TSHR_HUMAN
AFKNQKKIRGILESLM

SEQ ID NO: 17242 - protein, 16 aa, Homo sapiens
  ( 286 )...( 301 ): >TSHR_HUMAN
FKNQKKIRGILESLMC

SEQ ID NO: 17243 - protein, 16 aa, Homo sapiens
  ( 287 )...( 302 ): >TSHR_HUMAN
KNQKKIRGILESLMCN

SEQ ID NO: 17244 - protein, 16 aa, Homo sapiens
  ( 304 )...( 319 ): >TSHR_HUMAN
SSMQSLRQRKSVNALN

SEQ ID NO: 17245 - protein, 16 aa, Homo sapiens
  ( 305 )...( 320 ): >TSHR_HUMAN
SMQSLRQRKSVNALNS

SEQ ID NO: 17246 - protein, 16 aa, Homo sapiens
  ( 307 )...( 322 ): >TSHR_HUMAN
QSLRQRKSVNALNSPL

SEQ ID NO: 17247 - protein, 16 aa, Homo sapiens
  ( 526 )...( 541 ): >TSHR_HUMAN
AMRLDRKIRLRHACAI

SEQ ID NO: 17248 - protein, 16 aa, Homo sapiens
  ( 528 )...( 543 ): >TSHR_HUMAN
RLDRKIRLRHACAIMV

SEQ ID NO: 17249 - protein, 16 aa, Homo sapiens
  ( 529 )...( 544 ): >TSHR_HUMAN
LDRKIRLRHACAIMVG

SEQ ID NO: 17250 - protein, 16 aa, Homo sapiens
  ( 530 )...( 545 ): >TSHR_HUMAN
DRKIRLRHACAIMVGG

SEQ ID NO: 17251 - protein, 16 aa, Homo sapiens
  ( 531 )...( 546 ): >TSHR_HUMAN
RKIRLRHACAIMVGGW

SEQ ID NO: 17252 - protein, 16 aa, Homo sapiens
  ( 532 )...( 547 ): >TSHR_HUMAN
KIRLRHACAIMVGGWV

SEQ ID NO: 17253 - protein, 16 aa, Homo sapiens
  ( 686 )...( 701 ): >TSHR_HUMAN
QRDVFILLSKFGICKR

SEQ ID NO: 17254 - protein, 16 aa, Homo sapiens
  ( 687 )...( 702 ): >TSHR_HUMAN
RDVFILLSKFGICKRQ

SEQ ID NO: 17255 - protein, 16 aa, Homo sapiens
  ( 689 )...( 704 ): >TSHR_HUMAN
VFILLSKFGICKRQAQ

SEQ ID NO: 17256 - protein, 16 aa, Homo sapiens
  ( 690 )...( 705 ): >TSHR_HUMAN
FILLSKFGICKRQAQA

SEQ ID NO: 17257 - protein, 16 aa, Homo sapiens
  ( 691 )...( 706 ): >TSHR_HUMAN
ILLSKFGICKRQAQAY

SEQ ID NO: 17258 - protein, 16 aa, Homo sapiens
  ( 692 )...( 707 ): >TSHR_HUMAN
LLSKFGICKRQAQAYR

SEQ ID NO: 17259 - protein, 16 aa, Homo sapiens
  ( 693 )...( 708 ): >TSHR_HUMAN
LSKFGICKRQAQAYRG

SEQ ID NO: 17260 - protein, 16 aa, Homo sapiens
  ( 694 )...( 709 ): >TSHR_HUMAN
SKFGICKRQAQAYRGQ

SEQ ID NO: 17261 - protein, 16 aa, Homo sapiens
  ( 695 )...( 710 ): >TSHR_HUMAN
KFGICKRQAQAYRGQR

SEQ ID NO: 17262 - protein, 16 aa, Homo sapiens
  ( 696 )...( 711 ): >TSHR_HUMAN
FGICKRQAQAYRGQRV

SEQ ID NO: 17263 - protein, 16 aa, Homo sapiens
  ( 697 )...( 712 ): >TSHR_HUMAN
GICKRQAQAYRGQRVP

SEQ ID NO: 17264 - protein, 16 aa, Homo sapiens
  ( 698 )...( 713 ): >TSHR_HUMAN
ICKRQAQAYRGQRVPP

SEQ ID NO: 17265 - protein, 16 aa, Homo sapiens
  ( 99 )...( 114 ): >UL33_HCMVA
TVALIAADRYRVLHKR

SEQ ID NO: 17266 - protein, 16 aa, Homo sapiens
  ( 100 )...( 115 ): >UL33_HCMVA
VALIAADRYRVLHKRT

SEQ ID NO: 17267 - protein, 16 aa, Homo sapiens
  ( 206 )...( 221 ): >UL33_HCMVA
YSTVQRTSQKQRSRTL

SEQ ID NO: 17268 - protein, 16 aa, Homo sapiens
  ( 207 )...( 222 ): >UL33_HCMVA
STVQRTSQKQRSRTLT

SEQ ID NO: 17269 - protein, 16 aa, Homo sapiens
  ( 208 )...( 223 ): >UL33_HCMVA
TVQRTSQKQRSRTLTF

SEQ ID NO: 17270 - protein, 16 aa, Homo sapiens
  ( 209 )...( 224 ): >UL33_HCMVA
VQRTSQKQRSRTLTFV

SEQ ID NO: 17271 - protein, 16 aa, Homo sapiens
  ( 210 )...( 225 ): >UL33_HCMVA
QRTSQKQRSRTLTFVS

SEQ ID NO: 17272 - protein, 16 aa, Homo sapiens
  ( 211 )...( 226 ): >UL33_HCMVA
RTSQKQRSRTLTFVSV

SEQ ID NO: 17273 - protein, 16 aa, Homo sapiens
  ( 213 )...( 228 ): >UL33_HCMVA
SQKQRSRTLTFVSVLL

SEQ ID NO: 17274 - protein, 16 aa, Homo sapiens
  ( 214 )...( 229 ): >UL33_HCMVA
QKQRSRTLTFVSVLLI

SEQ ID NO: 17275 - protein, 16 aa, Homo sapiens
  ( 215 )...( 230 ): >UL33_HCMVA
KQRSRTLTFVSVLLIS

SEQ ID NO: 17276 - protein, 16 aa, Homo sapiens
  ( 258 )...( 273 ): >UL33_HCMVA
HLTLRRTIGTLARVVP

SEQ ID NO: 17277 - protein, 16 aa, Homo sapiens
  ( 259 )...( 274 ): >UL33_HCMVA
LTLRRTIGTLARVVPH

SEQ ID NO: 17278 - protein, 16 aa, Homo sapiens
  ( 260 )...( 275 ): >UL33_HCMVA
TLRRTIGTLARVVPHL

SEQ ID NO: 17279 - protein, 16 aa, Homo sapiens
  ( 261 )...( 276 ): >UL33_HCMVA
LRRTIGTLARVVPHLH

SEQ ID NO: 17280 - protein, 16 aa, Homo sapiens
  ( 262 )...( 277 ): >UL33_HCMVA
RRTIGTLARVVPHLHC

SEQ ID NO: 17281 - protein, 16 aa, Homo sapiens
  ( 117 )...( 132 ): >UL33_HSV6U
SMLAIIATIRYKTLHR

SEQ ID NO: 17282 - protein, 16 aa, Homo sapiens
  ( 118 )...( 133 ): >UL33_HSV6U
MLAIIATIRYKTLHRR

SEQ ID NO: 17283 - protein, 16 aa, Homo sapiens
  ( 119 )...( 134 ): >UL33_HSV6U
LAIIATIRYKTLHRRK

SEQ ID NO: 17284 - protein, 16 aa, Homo sapiens
  ( 120 )...( 135 ): >UL33_HSV6U
AIIATIRYKTLHRRKK

SEQ ID NO: 17285 - protein, 16 aa, Homo sapiens
  ( 121 )...( 136 ): >UL33_HSV6U
IIATIRYKTLHRRKKT

SEQ ID NO: 17286 - protein, 16 aa, Homo sapiens
  ( 128 )...( 143 ): >UL33_HSV6U
KTLHRRKKTESKTSST

SEQ ID NO: 17287 - protein, 16 aa, Homo sapiens
  ( 130 )...( 145 ): >UL33_HSV6U
LHRRKKTESKTSSTGR

SEQ ID NO: 17288 - protein, 16 aa, Homo sapiens
  ( 133 )...( 148 ): >UL33_HSV6U
RKKTESKTSSTGRNIG

SEQ ID NO: 17289 - protein, 16 aa, Homo sapiens
  ( 160 )...( 175 ): >UL33_HSV6U
PTALFVKTNGMKKTGK

SEQ ID NO: 17290 - protein, 16 aa, Homo sapiens
  ( 162 )...( 177 ): >UL33_HSV6U
ALFVKTNGMKKTGKCV

SEQ ID NO: 17291 - protein, 16 aa, Homo sapiens
  ( 163 )...( 178 ): >UL33_HSV6U
LFVKTNGMKKTGKCVV

SEQ ID NO: 17292 - protein, 16 aa, Homo sapiens
  ( 164 )...( 179 ): >UL33_HSV6U
FVKTNGMKKTGKCVVY

SEQ ID NO: 17293 - protein, 16 aa, Homo sapiens
  ( 165 )...( 180 ): >UL33_HSV6U
VKTNGMKKTGKCVVYI

SEQ ID NO: 17294 - protein, 16 aa, Homo sapiens
  ( 166 )...( 181 ): >UL33_HSV6U
KTNGMKKTGKCVVYIS

SEQ ID NO: 17295 - protein, 16 aa, Homo sapiens
  ( 169 )...( 184 ): >UL33_HSV6U
GMKKTGKCVVYISSKK

SEQ ID NO: 17296 - protein, 16 aa, Homo sapiens
  ( 170 )...( 185 ): >UL33_HSV6U
MKKTGKCVVYISSKKA

SEQ ID NO: 17297 - protein, 16 aa, Homo sapiens
  ( 171 )...( 186 ): >UL33_HSV6U
KKTGKCVVYISSKKAY

SEQ ID NO: 17298 - protein, 16 aa, Homo sapiens
  ( 30 )...( 45 ): >UL33_HSV7J
KYNYTCITPTVRKAQR

SEQ ID NO: 17299 - protein, 16 aa, Homo sapiens
  ( 31 )...( 46 ): >UL33_HSV7J
YNYTCITPTVRKAQRL

SEQ ID NO: 17300 - protein, 16 aa, Homo sapiens
  ( 133 )...( 148 ): >UL33_HSV7J
CMLAVISTIRYRTLQR

SEQ ID NO: 17301 - protein, 16 aa, Homo sapiens
  ( 134 )...( 149 ): >UL33_HSV7J
MLAVISTIRYRTLQRR

SEQ ID NO: 17302 - protein, 16 aa, Homo sapiens
  ( 135 )...( 150 ): >UL33_HSV7J
LAVISTIRYRTLQRRT

SEQ ID NO: 17303 - protein, 16 aa, Homo sapiens
  ( 136 )...( 151 ): >UL33_HSV7J
AVISTIRYRTLQRRTL

SEQ ID NO: 17304 - protein, 16 aa, Homo sapiens
  ( 137 )...( 152 ): >UL33_HSV7J
VISTIRYRTLQRRTLN

SEQ ID NO: 17305 - protein, 16 aa, Homo sapiens
  ( 177 )...( 192 ): >UL33_HSV7J
AVLYVQVEKKKGNYGK

SEQ ID NO: 17306 - protein, 16 aa, Homo sapiens
  ( 178 )...( 193 ): >UL33_HSV7J
VLYVQVEKKKGNYGKC

SEQ ID NO: 17307 - protein, 16 aa, Homo sapiens
  ( 180 )...( 195 ): >UL33_HSV7J
YVQVEKKKGNYGKCNI

SEQ ID NO: 17308 - protein, 16 aa, Homo sapiens
  ( 228 )...( 243 ): >UL33_HSV7J
FYVIFGKTLRALTQSK

SEQ ID NO: 17309 - protein, 16 aa, Homo sapiens
  ( 231 )...( 246 ): >UL33_HSV7J
IFGKTLRALTQSKHNK

SEQ ID NO: 17310 - protein, 16 aa, Homo sapiens
  ( 232 )...( 247 ): >UL33_HSV7J
FGKTLRALTQSKHNKT

SEQ ID NO: 17311 - protein, 16 aa, Homo sapiens
  ( 233 )...( 248 ): >UL33_HSV7J
GKTLRALTQSKHNKTL

SEQ ID NO: 17312 - protein, 16 aa, Homo sapiens
  ( 330 )...( 345 ): >UL33_HSV7J
LCNSSLKRKRNPLTIK

SEQ ID NO: 17313 - protein, 16 aa, Homo sapiens
  ( 148 )...( 163 ): >UR2R_HUMAN
RYAAVLRPLDTVQRPK

SEQ ID NO: 17314 - protein, 16 aa, Homo sapiens
  ( 151 )...( 166 ): >UR2R_HUMAN
AVLRPLDTVQRPKGYR

SEQ ID NO: 17315 - protein, 16 aa, Homo sapiens
  ( 152 )...( 167 ): >UR2R_HUMAN
VLRPLDTVQRPKGYRK

SEQ ID NO: 17316 - protein, 16 aa, Homo sapiens
  ( 155 )...( 170 ): >UR2R_HUMAN
PLDTVQRPKGYRKLLA

SEQ ID NO: 17317 - protein, 16 aa, Homo sapiens
  ( 156 )...( 171 ): >UR2R_HUMAN
LDTVQRPKGYRKLLAL

SEQ ID NO: 17318 - protein, 16 aa, Homo sapiens
  ( 157 )...( 172 ): >UR2R_HUMAN
DTVQRPKGYRKLLALG

SEQ ID NO: 17319 - protein, 16 aa, Homo sapiens
  ( 158 )...( 173 ): >UR2R_HUMAN
TVQRPKGYRKLLALGT

SEQ ID NO: 17320 - protein, 16 aa, Homo sapiens
  ( 159 )...( 174 ): >UR2R_HUMAN
VQRPKGYRKLLALGTW

SEQ ID NO: 17321 - protein, 16 aa, Homo sapiens
  ( 160 )...( 175 ): >UR2R_HUMAN
QRPKGYRKLLALGTWL

SEQ ID NO: 17322 - protein, 16 aa, Homo sapiens
  ( 161 )...( 176 ): >UR2R_HUMAN
RPKGYRKLLALGTWLL

SEQ ID NO: 17323 - protein, 16 aa, Homo sapiens
  ( 162 )...( 177 ): >UR2R_HUMAN
PKGYRKLLALGTWLLA

SEQ ID NO: 17324 - protein, 16 aa, Homo sapiens
  ( 181 )...( 196 ): >UR2R_HUMAN
TLPVMLAMRLVRRGPK

SEQ ID NO: 17325 - protein, 16 aa, Homo sapiens
  ( 182 )...( 197 ): >UR2R_HUMAN
LPVMLAMRLVRRGPKS

SEQ ID NO: 17326 - protein, 16 aa, Homo sapiens
  ( 183 )...( 198 ): >UR2R_HUMAN
PVMLAMRLVRRGPKSL

SEQ ID NO: 17327 - protein, 16 aa, Homo sapiens
  ( 184 )...( 199 ): >UR2R_HUMAN
VMLAMRLVRRGPKSLC

SEQ ID NO: 17328 - protein, 16 aa, Homo sapiens
  ( 185 )...( 200 ): >UR2R_HUMAN
MLAMRLVRRGPKSLCL

SEQ ID NO: 17329 - protein, 16 aa, Homo sapiens
  ( 186 )...( 201 ): >UR2R_HUMAN
LAMRLVRRGPKSLCLP

SEQ ID NO: 17330 - protein, 16 aa, Homo sapiens
  ( 224 )...( 239 ): >UR2R_HUMAN
GLLIGLLYARLARAYR

SEQ ID NO: 17331 - protein, 16 aa, Homo sapiens
  ( 225 )...( 240 ): >UR2R_HUMAN
LLIGLLYARLARAYRR

SEQ ID NO: 17332 - protein, 16 aa, Homo sapiens
  ( 226 )...( 241 ): >UR2R_HUMAN
LIGLLYARLARAYRRS

SEQ ID NO: 17333 - protein, 16 aa, Homo sapiens
  ( 227 )...( 242 ): >UR2R_HUMAN
IGLLYARLARAYRRSQ

SEQ ID NO: 17334 - protein, 16 aa, Homo sapiens
  ( 249 )...( 264 ): >UR2R_HUMAN
ARRPGARALRLVLGIV

SEQ ID NO: 17335 - protein, 16 aa, Homo sapiens
  ( 250 )...( 265 ): >UR2R_HUMAN
RRPGARALRLVLGIVL

SEQ ID NO: 17336 - protein, 16 aa, Homo sapiens
  ( 321 )...( 336 ): >UR2R_HUMAN
NYRDHLRGRVRGPGSG

SEQ ID NO: 17337 - protein, 16 aa, Homo sapiens
  ( 322 )...( 337 ): >UR2R_HUMAN
YRDHLRGRVRGPGSGG

SEQ ID NO: 17338 - protein, 16 aa, Homo sapiens
  ( 338 )...( 353 ): >UR2R_HUMAN
GRGPVPSLQPRARFQR

SEQ ID NO: 17339 - protein, 16 aa, Homo sapiens
  ( 344 )...( 359 ): >UR2R_HUMAN
SLQPRARFQRCSGRSL

SEQ ID NO: 17340 - protein, 16 aa, Homo sapiens
  ( 345 )...( 360 ): >UR2R_HUMAN
LQPRARFQRCSGRSLS

SEQ ID NO: 17341 - protein, 16 aa, Homo sapiens
  ( 47 )...( 62 ): >US27_HCMVA
LNVLVITTILYYRRKK

SEQ ID NO: 17342 - protein, 16 aa, Homo sapiens
  ( 49 )...( 64 ): >US27_HCMVA
VLVITTILYYRRKKKS

SEQ ID NO: 17343 - protein, 16 aa, Homo sapiens
  ( 50 )...( 65 ): >US27_HCMVA
LVITTILYYRRKKKSP

SEQ ID NO: 17344 - protein, 16 aa, Homo sapiens
  ( 51 )...( 66 ): >US27_HCMVA
VITTILYYRRKKKSPS

SEQ ID NO: 17345 - protein, 16 aa, Homo sapiens
  ( 131 )...( 146 ): >US27_HCMVA
VIVWGVELNRVRNNKR

SEQ ID NO: 17346 - protein, 16 aa, Homo sapiens
  ( 133 )...( 148 ): >US27_HCMVA
VWGVELNRVRNNKRAT

SEQ ID NO: 17347 - protein, 16 aa, Homo sapiens
  ( 48 )...( 63 ): >US28_HCMVA
SIGNFLVIFTITWRRR

SEQ ID NO: 17348 - protein, 16 aa, Homo sapiens
  ( 53 )...( 68 ): >US28_HCMVA
LVIFTITWRRRIQCSG

SEQ ID NO: 17349 - protein, 16 aa, Homo sapiens
  ( 206 )...( 221 ): >US28_HCMVA
YCYYRISRIVAVSQSR

SEQ ID NO: 17350 - protein, 16 aa, Homo sapiens
  ( 207 )...( 222 ): >US28_HCMVA
CYYRISRIVAVSQSRH

SEQ ID NO: 17351 - protein, 16 aa, Homo sapiens
  ( 209 )...( 224 ): >US28_HCMVA
YRISRIVAVSQSRHKG

SEQ ID NO: 17352 - protein, 16 aa, Homo sapiens
  ( 210 )...( 225 ): >US28_HCMVA
RISRIVAVSQSRHKGR

SEQ ID NO: 17353 - protein, 16 aa, Homo sapiens
  ( 211 )...( 226 ): >US28_HCMVA
ISRIVAVSQSRHKGRI

SEQ ID NO: 17354 - protein, 16 aa, Homo sapiens
  ( 212 )...( 227 ): >US28_HCMVA
SRIVAVSQSRHKGRIV

SEQ ID NO: 17355 - protein, 16 aa, Homo sapiens
  ( 213 )...( 228 ): >US28_HCMVA
RIVAVSQSRHKGRIVR

SEQ ID NO: 17356 - protein, 16 aa, Homo sapiens
  ( 214 )...( 229 ): >US28_HCMVA
IVAVSQSRHKGRIVRV

SEQ ID NO: 17357 - protein, 16 aa, Homo sapiens
  ( 215 )...( 230 ): >US28_HCMVA
VAVSQSRHKGRIVRVL

SEQ ID NO: 17358 - protein, 16 aa, Homo sapiens
  ( 216 )...( 231 ): >US28_HCMVA
AVSQSRHKGRIVRVLI

SEQ ID NO: 17359 - protein, 16 aa, Homo sapiens
  ( 217 )...( 232 ): >US28_HCMVA
VSQSRHKGRIVRVLIA

SEQ ID NO: 17360 - protein, 16 aa, Homo sapiens
  ( 218 )...( 233 ): >US28_HCMVA
SQSRHKGRIVRVLIAV

SEQ ID NO: 17361 - protein, 16 aa, Homo sapiens
  ( 219 )...( 234 ): >US28_HCMVA
QSRHKGRIVRVLIAVV

SEQ ID NO: 17362 - protein, 16 aa, Homo sapiens
  ( 220 )...( 235 ): >US28_HCMVA
SRHKGRIVRVLIAVVL

SEQ ID NO: 17363 - protein, 16 aa, Homo sapiens
  ( 221 )...( 236 ): >US28_HCMVA
RHKGRIVRVLIAVVLV

SEQ ID NO: 17364 - protein, 16 aa, Homo sapiens
  ( 67 )...( 82 ): >V1AR_HUMAN
LGNSSVLLALHRTPRK

SEQ ID NO: 17365 - protein, 16 aa, Homo sapiens
  ( 70 )...( 85 ): >V1AR_HUMAN
SSVLLALHRTPRKTSR

SEQ ID NO: 17366 - protein, 16 aa, Homo sapiens
  ( 71 )...( 86 ): >V1AR_HUMAN
SVLLALHRTPRKTSRM

SEQ ID NO: 17367 - protein, 16 aa, Homo sapiens
  ( 72 )...( 87 ): >V1AR_HUMAN
VLLALHRTPRKTSRMH

SEQ ID NO: 17368 - protein, 16 aa, Homo sapiens
  ( 73 )...( 88 ): >V1AR_HUMAN
LLALHRTPRKTSRMHL

SEQ ID NO: 17369 - protein, 16 aa, Homo sapiens
  ( 151 )...( 166 ): >V1AR_HUMAN
IAVCHPLKTLQQPARR

SEQ ID NO: 17370 - protein, 16 aa, Homo sapiens
  ( 153 )...( 168 ): >V1AR_HUMAN
VCHPLKTLQQPARRSR

SEQ ID NO: 17371 - protein, 16 aa, Homo sapiens
  ( 156 )...( 171 ): >V1AR_HUMAN
PLKTLQQPARRSRLMI

SEQ ID NO: 17372 - protein, 16 aa, Homo sapiens
  ( 157 )...( 172 ): >V1AR_HUMAN
LKTLQQPARRSRLMIA

SEQ ID NO: 17373 - protein, 16 aa, Homo sapiens
  ( 158 )...( 173 ): >V1AR_HUMAN
KTLQQPARRSRLMIAA

SEQ ID NO: 17374 - protein, 16 aa, Homo sapiens
  ( 159 )...( 174 ): >V1AR_HUMAN
TLQQPARRSRLMIAAA

SEQ ID NO: 17375 - protein, 16 aa, Homo sapiens
  ( 160 )...( 175 ): >V1AR_HUMAN
LQQPARRSRLMIAAAW

SEQ ID NO: 17376 - protein, 16 aa, Homo sapiens
  ( 161 )...( 176 ): >V1AR_HUMAN
QQPARRSRLMIAAAWV

SEQ ID NO: 17377 - protein, 16 aa, Homo sapiens
  ( 162 )...( 177 ): >V1AR_HUMAN
QPARRSRLMIAAAWVL

SEQ ID NO: 17378 - protein, 16 aa, Homo sapiens
  ( 163 )...( 178 ): >V1AR_HUMAN
PARRSRLMIAAAWVLS

SEQ ID NO: 17379 - protein, 16 aa, Homo sapiens
  ( 164 )...( 179 ): >V1AR_HUMAN
ARRSRLMIAAAWVLSF

SEQ ID NO: 17380 - protein, 16 aa, Homo sapiens
  ( 165 )...( 180 ): >V1AR_HUMAN
RRSRLMIAAAWVLSFV

SEQ ID NO: 17381 - protein, 16 aa, Homo sapiens
  ( 243 )...( 258 ): >V1AR_HUMAN
IWCNVRGKTASRQSKG

SEQ ID NO: 17382 - protein, 16 aa, Homo sapiens
  ( 246 )...( 261 ): >V1AR_HUMAN
NVRGKTASRQSKGAEQ

SEQ ID NO: 17383 - protein, 16 aa, Homo sapiens
  ( 247 )...( 262 ): >V1AR_HUMAN
VRGKTASRQSKGAEQA

SEQ ID NO: 17384 - protein, 16 aa, Homo sapiens
  ( 274 )...( 289 ): >V1AR_HUMAN
PCVSSVKSISRAKIRT

SEQ ID NO: 17385 - protein, 16 aa, Homo sapiens
  ( 275 )...( 290 ): >V1AR_HUMAN
CVSSVKSISRAKIRTV

SEQ ID NO: 17386 - protein, 16 aa, Homo sapiens
  ( 276 )...( 291 ): >V1AR_HUMAN
VSSVKSISRAKIRTVK

SEQ ID NO: 17387 - protein, 16 aa, Homo sapiens
  ( 277 )...( 292 ): >V1AR_HUMAN
SSVKSISRAKIRTVKM

SEQ ID NO: 17388 - protein, 16 aa, Homo sapiens
  ( 278 )...( 293 ): >V1AR_HUMAN
SVKSISRAKIRTVKMT

SEQ ID NO: 17389 - protein, 16 aa, Homo sapiens
  ( 279 )...( 294 ): >V1AR_HUMAN
VKSISRAKIRTVKMTF

SEQ ID NO: 17390 - protein, 16 aa, Homo sapiens
  ( 280 )...( 295 ): >V1AR_HUMAN
KSISRAKIRTVKMTFV

SEQ ID NO: 17391 - protein, 16 aa, Homo sapiens
  ( 281 )...( 296 ): >V1AR_HUMAN
SISRAKIRTVKMTFVI

SEQ ID NO: 17392 - protein, 16 aa, Homo sapiens
  ( 282 )...( 297 ): >V1AR_HUMAN
ISRAKIRTVKMTFVIV

SEQ ID NO: 17393 - protein, 16 aa, Homo sapiens
  ( 283 )...( 298 ): >V1AR_HUMAN
SRAKIRTVKMTFVIVT

SEQ ID NO: 17394 - protein, 16 aa, Homo sapiens
  ( 284 )...( 299 ): >V1AR_HUMAN
RAKIRTVKMTFVIVTA

SEQ ID NO: 17395 - protein, 16 aa, Homo sapiens
  ( 285 )...( 300 ): >V1AR_HUMAN
AKIRTVKMTFVIVTAY

SEQ ID NO: 17396 - protein, 16 aa, Homo sapiens
  ( 52 )...( 67 ): >V1BR_HUMAN
NLAVLLTLGQLGRKRS

SEQ ID NO: 17397 - protein, 16 aa, Homo sapiens
  ( 53 )...( 68 ): >V1BR_HUMAN
LAVLLTLGQLGRKRSR

SEQ ID NO: 17398 - protein, 16 aa, Homo sapiens
  ( 54 )...( 69 ): >V1BR_HUMAN
AVLLTLGQLGRKRSRM

SEQ ID NO: 17399 - protein, 16 aa, Homo sapiens
  ( 55 )...( 70 ): >V1BR_HUMAN
VLLTLGQLGRKRSRMH

SEQ ID NO: 17400 - protein, 16 aa, Homo sapiens
  ( 56 )...( 71 ): >V1BR_HUMAN
LLTLGQLGRKRSRMHL

SEQ ID NO: 17401 - protein, 16 aa, Homo sapiens
  ( 57 )...( 72 ): >V1BR_HUMAN
LTLGQLGRKRSRMHLF

SEQ ID NO: 17402 - protein, 16 aa, Homo sapiens
  ( 58 )...( 73 ): >V1BR_HUMAN
TLGQLGRKRSRMHLFV

SEQ ID NO: 17403 - protein, 16 aa, Homo sapiens
  ( 59 )...( 74 ): >V1BR_HUMAN
LGQLGRKRSRMHLFVL

SEQ ID NO: 17404 - protein, 16 aa, Homo sapiens
  ( 60 )...( 75 ): >V1BR_HUMAN
GQLGRKRSRMHLFVLH

SEQ ID NO: 17405 - protein, 16 aa, Homo sapiens
  ( 62 )...( 77 ): >V1BR_HUMAN
LGRKRSRMHLFVLHLA

SEQ ID NO: 17406 - protein, 16 aa, Homo sapiens
  ( 63 )...( 78 ): >V1BR_HUMAN
GRKRSRMHLFVLHLAL

SEQ ID NO: 17407 - protein, 16 aa, Homo sapiens
  ( 224 )...( 239 ): >V1BR_HUMAN
HEICKNLKVKTQAWRV

SEQ ID NO: 17408 - protein, 16 aa, Homo sapiens
  ( 225 )...( 240 ): >V1BR_HUMAN
EICKNLKVKTQAWRVG

SEQ ID NO: 17409 - protein, 16 aa, Homo sapiens
  ( 226 )...( 241 ): >V1BR_HUMAN
ICKNLKVKTQAWRVGG

SEQ ID NO: 17410 - protein, 16 aa, Homo sapiens
  ( 227 )...( 242 ): >V1BR_HUMAN
CKNLKVKTQAWRVGGG

SEQ ID NO: 17411 - protein, 16 aa, Homo sapiens
  ( 228 )...( 243 ): >V1BR_HUMAN
KNLKVKTQAWRVGGGG

SEQ ID NO: 17412 - protein, 16 aa, Homo sapiens
  ( 229 )...( 244 ): >V1BR_HUMAN
NLKVKTQAWRVGGGGW

SEQ ID NO: 17413 - protein, 16 aa, Homo sapiens
  ( 230 )...( 245 ): >V1BR_HUMAN
LKVKTQAWRVGGGGWR

SEQ ID NO: 17414 - protein, 16 aa, Homo sapiens
  ( 231 )...( 246 ): >V1BR_HUMAN
KVKTQAWRVGGGGWRT

SEQ ID NO: 17415 - protein, 16 aa, Homo sapiens
  ( 232 )...( 247 ): >V1BR_HUMAN
VKTQAWRVGGGGWRTW

SEQ ID NO: 17416 - protein, 16 aa, Homo sapiens
  ( 259 )...( 274 ): >V1BR_HUMAN
TRGLPSRVSSINTISR

SEQ ID NO: 17417 - protein, 16 aa, Homo sapiens
  ( 260 )...( 275 ): >V1BR_HUMAN
RGLPSRVSSINTISRA

SEQ ID NO: 17418 - protein, 16 aa, Homo sapiens
  ( 262 )...( 277 ): >V1BR_HUMAN
LPSRVSSINTISRAKI

SEQ ID NO: 17419 - protein, 16 aa, Homo sapiens
  ( 263 )...( 278 ): >V1BR_HUMAN
PSRVSSINTISRAKIR

SEQ ID NO: 17420 - protein, 16 aa, Homo sapiens
  ( 264 )...( 279 ): >V1BR_HUMAN
SRVSSINTISRAKIRT

SEQ ID NO: 17421 - protein, 16 aa, Homo sapiens
  ( 265 )...( 280 ): >V1BR_HUMAN
RVSSINTISRAKIRTV

SEQ ID NO: 17422 - protein, 16 aa, Homo sapiens
  ( 266 )...( 281 ): >V1BR_HUMAN
VSSINTISRAKIRTVK

SEQ ID NO: 17423 - protein, 16 aa, Homo sapiens
  ( 267 )...( 282 ): >V1BR_HUMAN
SSINTISRAKIRTVKM

SEQ ID NO: 17424 - protein, 16 aa, Homo sapiens
  ( 268 )...( 283 ): >V1BR_HUMAN
SINTISRAKIRTVKMT

SEQ ID NO: 17425 - protein, 16 aa, Homo sapiens
  ( 269 )...( 284 ): >V1BR_HUMAN
INTISRAKIRTVKMTF

SEQ ID NO: 17426 - protein, 16 aa, Homo sapiens
  ( 270 )...( 285 ): >V1BR_HUMAN
NTISRAKIRTVKMTFV

SEQ ID NO: 17427 - protein, 16 aa, Homo sapiens
  ( 271 )...( 286 ): >V1BR_HUMAN
TISRAKIRTVKMTFVI

SEQ ID NO: 17428 - protein, 16 aa, Homo sapiens
  ( 272 )...( 287 ): >V1BR_HUMAN
ISRAKIRTVKMTFVIV

SEQ ID NO: 17429 - protein, 16 aa, Homo sapiens
  ( 273 )...( 288 ): >V1BR_HUMAN
SRAKIRTVKMTFVIVL

SEQ ID NO: 17430 - protein, 16 aa, Homo sapiens
  ( 274 )...( 289 ): >V1BR_HUMAN
RAKIRTVKMTFVIVLA

SEQ ID NO: 17431 - protein, 16 aa, Homo sapiens
  ( 357 )...( 372 ): >V1BR_HUMAN
GGPQPRMRRRLSDGSL

SEQ ID NO: 17432 - protein, 16 aa, Homo sapiens
  ( 363 )...( 378 ): >V1BR_HUMAN
MRRRLSDGSLSSRHTT

SEQ ID NO: 17433 - protein, 16 aa, Homo sapiens
  ( 364 )...( 379 ): >V1BR_HUMAN
RRRLSDGSLSSRHTTL

SEQ ID NO: 17434 - protein, 16 aa, Homo sapiens
  ( 53 )...( 68 ): >V2R_HUMAN
LSNGLVLAALARRGRR

SEQ ID NO: 17435 - protein, 16 aa, Homo sapiens
  ( 54 )...( 69 ): >V2R_HUMAN
SNGLVLAALARRGRRG

SEQ ID NO: 17436 - protein, 16 aa, Homo sapiens
  ( 55 )...( 70 ): >V2R_HUMAN
NGLVLAALARRGRRGH

SEQ ID NO: 17437 - protein, 16 aa, Homo sapiens
  ( 56 )...( 71 ): >V2R_HUMAN
GLVLAALARRGRRGHW

SEQ ID NO: 17438 - protein, 16 aa, Homo sapiens
  ( 57 )...( 72 ): >V2R_HUMAN
LVLAALARRGRRGHWA

SEQ ID NO: 17439 - protein, 16 aa, Homo sapiens
  ( 58 )...( 73 ): >V2R_HUMAN
VLAALARRGRRGHWAP

SEQ ID NO: 17440 - protein, 16 aa, Homo sapiens
  ( 59 )...( 74 ): >V2R_HUMAN
LAALARRGRRGHWAPI

SEQ ID NO: 17441 - protein, 16 aa, Homo sapiens
  ( 60 )...( 75 ): >V2R_HUMAN
AALARRGRRGHWAPIH

SEQ ID NO: 17442 - protein, 16 aa, Homo sapiens
  ( 61 )...( 76 ): >V2R_HUMAN
ALARRGRRGHWAPIHV

SEQ ID NO: 17443 - protein, 16 aa, Homo sapiens
  ( 64 )...( 79 ): >V2R_HUMAN
RRGRRGHWAPIHVFIG

SEQ ID NO: 17444 - protein, 16 aa, Homo sapiens
  ( 65 )...( 80 ): >V2R_HUMAN
RGRRGHWAPIHVFIGH

SEQ ID NO: 17445 - protein, 16 aa, Homo sapiens
  ( 236 )...( 251 ): >V2R_HUMAN
LVPGPSERPGGRRRGR

SEQ ID NO: 17446 - protein, 16 aa, Homo sapiens
  ( 238 )...( 253 ): >V2R_HUMAN
PGPSERPGGRRRGRRT

SEQ ID NO: 17447 - protein, 16 aa, Homo sapiens
  ( 247 )...( 262 ): >V2R_HUMAN
RRRGRRTGSPGEGAHV

SEQ ID NO: 17448 - protein, 16 aa, Homo sapiens
  ( 248 )...( 263 ): >V2R_HUMAN
RRGRRTGSPGEGAHVS

SEQ ID NO: 17449 - protein, 16 aa, Homo sapiens
  ( 67 )...( 82 ): >VG74_KSHV
LVTYIFCKHRSRAGAI

SEQ ID NO: 17450 - protein, 16 aa, Homo sapiens
  ( 141 )...( 156 ): >VG74_KSHV
LVRYLLVAYSTRSWPK

SEQ ID NO: 17451 - protein, 16 aa, Homo sapiens
  ( 145 )...( 160 ): >VG74_KSHV
LLVAYSTRSWPKKQSL

SEQ ID NO: 17452 - protein, 16 aa, Homo sapiens
  ( 150 )...( 165 ): >VG74_KSHV
STRSWPKKQSLGWVLT

SEQ ID NO: 17453 - protein, 16 aa, Homo sapiens
  ( 151 )...( 166 ): >VG74_KSHV
TRSWPKKQSLGWVLTS

SEQ ID NO: 17454 - protein, 16 aa, Homo sapiens
  ( 229 )...( 244 ): >VG74_KSHV
LFYALTWCVVRRTKLQ

SEQ ID NO: 17455 - protein, 16 aa, Homo sapiens
  ( 230 )...( 245 ): >VG74_KSHV
FYALTWCVVRRTKLQA

SEQ ID NO: 17456 - protein, 16 aa, Homo sapiens
  ( 231 )...( 246 ): >VG74_KSHV
YALTWCVVRRTKLQAR

SEQ ID NO: 17457 - protein, 16 aa, Homo sapiens
  ( 232 )...( 247 ): >VG74_KSHV
ALTWCVVRRTKLQARR

SEQ ID NO: 17458 - protein, 16 aa, Homo sapiens
  ( 241 )...( 256 ): >VG74_KSHV
TKLQARRKVRGVIVAV

SEQ ID NO: 17459 - protein, 16 aa, Homo sapiens
  ( 242 )...( 257 ): >VG74_KSHV
KLQARRKVRGVIVAVV

SEQ ID NO: 17460 - protein, 16 aa, Homo sapiens
  ( 243 )...( 258 ): >VG74_KSHV
LQARRKVRGVIVAVVL

SEQ ID NO: 17461 - protein, 16 aa, Homo sapiens
  ( 244 )...( 259 ): >VG74_KSHV
QARRKVRGVIVAVVLL

SEQ ID NO: 17462 - protein, 16 aa, Homo sapiens
  ( 245 )...( 260 ): >VG74_KSHV
ARRKVRGVIVAVVLLF

SEQ ID NO: 17463 - protein, 16 aa, Homo sapiens
  ( 88 )...( 103 ): >VIPR_HUMAN
LIFKLFSSIQGRNVSR

SEQ ID NO: 17464 - protein, 16 aa, Homo sapiens
  ( 89 )...( 104 ): >VIPR_HUMAN
IFKLFSSIQGRNVSRS

SEQ ID NO: 17465 - protein, 16 aa, Homo sapiens
  ( 159 )...( 174 ): >VIPR_HUMAN
VATAILSLFRKLHCTR

SEQ ID NO: 17466 - protein, 16 aa, Homo sapiens
  ( 160 )...( 175 ): >VIPR_HUMAN
ATAILSLFRKLHCTRN

SEQ ID NO: 17467 - protein, 16 aa, Homo sapiens
  ( 161 )...( 176 ): >VIPR_HUMAN
TAILSLFRKLHCTRNY

SEQ ID NO: 17468 - protein, 16 aa, Homo sapiens
  ( 162 )...( 177 ): >VIPR_HUMAN
AILSLFRKLHCTRNYI

SEQ ID NO: 17469 - protein, 16 aa, Homo sapiens
  ( 314 )...( 329 ): >VIPR_HUMAN
CIIRILLQKLRPPDIR

SEQ ID NO: 17470 - protein, 16 aa, Homo sapiens
  ( 431 )...( 446 ): >VIPR_HUMAN
STQVSMLTRVSPGARR

SEQ ID NO: 17471 - protein, 16 aa, Homo sapiens
  ( 432 )...( 447 ): >VIPR_HUMAN
TQVSMLTRVSPGARRS

SEQ ID NO: 17472 - protein, 16 aa, Homo sapiens
  ( 433 )...( 448 ): >VIPR_HUMAN
QVSMLTRVSPGARRSS

SEQ ID NO: 17473 - protein, 16 aa, Homo sapiens
  ( 143 )...( 158 ): >VIPS_HUMAN
TGSIILCLFRKLHCTR

SEQ ID NO: 17474 - protein, 16 aa, Homo sapiens
  ( 146 )...( 161 ): >VIPS_HUMAN
IILCLFRKLHCTRNYI

SEQ ID NO: 17475 - protein, 16 aa, Homo sapiens
  ( 320 )...( 335 ): >VIPS_HUMAN
QSQYKRLAKSTLLLIP

SEQ ID NO: 17476 - protein, 16 aa, Homo sapiens
  ( 321 )...( 336 ): >VIPS_HUMAN
SQYKRLAKSTLLLIPL

SEQ ID NO: 17477 - protein, 16 aa, Homo sapiens
  ( 30 )...( 45 ): >VU51_HSV6U
TMVLLTVRFNSFKVGR

SEQ ID NO: 17478 - protein, 16 aa, Homo sapiens
  ( 30 )...( 45 ): >VU51_HSV6Z
TVVFLTVRFNGFKVGR

SEQ ID NO: 17479 - protein, 13 aa, Homo sapiens
  ( 282 )...( 297 ): >VU51_HSV7J
LRKLQQPTKSTQF

SEQ ID NO: 17480 - protein, 16 aa, Homo sapiens
  ( 127 )...( 142 ): >Q13675
GVSYPLRYPTIVTQRR

SEQ ID NO: 17481 - protein, 16 aa, Homo sapiens
  ( 128 )...( 143 ): >Q13675
VSYPLRYPTIVTQRRG

SEQ ID NO: 17482 - protein, 16 aa, Homo sapiens
  ( 129 )...( 144 ): >Q13675
SYPLRYPTIVTQRRGL

SEQ ID NO: 17483 - protein, 16 aa, Homo sapiens
  ( 130 )...( 145 ): >Q13675
YPLRYPTIVTQRRGLM

SEQ ID NO: 17484 - protein, 16 aa, Homo sapiens
  ( 131 )...( 146 ): >Q13675
PLRYPTIVTQRRGLMA

SEQ ID NO: 17485 - protein, 16 aa, Homo sapiens
  ( 132 )...( 147 ): >Q13675
LRYPTIVTQRRGLMAL

SEQ ID NO: 17486 - protein, 16 aa, Homo sapiens
  ( 133 )...( 148 ): >Q13675
RYPTIVTQRRGLMALL

SEQ ID NO: 17487 - protein, 16 aa, Homo sapiens
  ( 201 )...( 216 ): >Q13675
LVMYCRVYVVAKRESR

SEQ ID NO: 17488 - protein, 16 aa, Homo sapiens
  ( 202 )...( 217 ): >Q13675
VMYCRVYVVAKRESRG

SEQ ID NO: 17489 - protein, 16 aa, Homo sapiens
  ( 203 )...( 218 ): >Q13675
MYCRVYVVAKRESRGL

SEQ ID NO: 17490 - protein, 16 aa, Homo sapiens
  ( 204 )...( 219 ): >Q13675
YCRVYVVAKRESRGLK

SEQ ID NO: 17491 - protein, 16 aa, Homo sapiens
  ( 205 )...( 220 ): >Q13675
CRVYVVAKRESRGLKS

SEQ ID NO: 17492 - protein, 16 aa, Homo sapiens
  ( 206 )...( 221 ): >Q13675
RVYVVAKRESRGLKSG

SEQ ID NO: 17493 - protein, 16 aa, Homo sapiens
  ( 207 )...( 222 ): >Q13675
VYVVAKRESRGLKSGL

SEQ ID NO: 17494 - protein, 16 aa, Homo sapiens
  ( 208 )...( 223 ): >Q13675
YVVAKRESRGLKSGLK

SEQ ID NO: 17495 - protein, 16 aa, Homo sapiens
  ( 209 )...( 224 ): >Q13675
VVAKRESRGLKSGLKT

SEQ ID NO: 17496 - protein, 16 aa, Homo sapiens
  ( 210 )...( 225 ): >Q13675
VAKRESRGLKSGLKTD

SEQ ID NO: 17497 - protein, 16 aa, Homo sapiens
  ( 211 )...( 226 ): >Q13675
AKRESRGLKSGLKTDK

SEQ ID NO: 17498 - protein, 16 aa, Homo sapiens
  ( 212 )...( 227 ): >Q13675
KRESRGLKSGLKTDKS

SEQ ID NO: 17499 - protein, 16 aa, Homo sapiens
  ( 231 )...( 246 ): >Q13675
QVTLRIHRKNAPAGGS

SEQ ID NO: 17500 - protein, 16 aa, Homo sapiens
  ( 248 )...( 263 ): >Q13675
MASAKTKTHFSVRLLK

SEQ ID NO: 17501 - protein, 16 aa, Homo sapiens
  ( 249 )...( 264 ): >Q13675
ASAKTKTHFSVRLLKF

SEQ ID NO: 17502 - protein, 16 aa, Homo sapiens
  ( 251 )...( 266 ): >Q13675
AKTKTHFSVRLLKFSR

SEQ ID NO: 17503 - protein, 16 aa, Homo sapiens
  ( 258 )...( 273 ): >Q13675
SVRLLKFSREKKAAKT

SEQ ID NO: 17504 - protein, 16 aa, Homo sapiens
  ( 259 )...( 274 ): >Q13675
VRLLKFSREKKAAKTL

SEQ ID NO: 17505 - protein, 16 aa, Homo sapiens
  ( 260 )...( 275 ): >Q13675
RLLKFSREKKAAKTLG

SEQ ID NO: 17506 - protein, 16 aa, Homo sapiens
  ( 261 )...( 276 ): >Q13675
LLKFSREKKAAKTLGI

SEQ ID NO: 17507 - protein, 16 aa, Homo sapiens
  ( 262 )...( 277 ): >Q13675
LKFSREKKAAKTLGIV

SEQ ID NO: 17508 - protein, 16 aa, Homo sapiens
  ( 263 )...( 278 ): >Q13675
KFSREKKAAKTLGIVV

SEQ ID NO: 17509 - protein, 16 aa, Homo sapiens
  ( 264 )...( 279 ): >Q13675
FSREKKAAKTLGIVVG

SEQ ID NO: 17510 - protein, 16 aa, Homo sapiens
  ( 266 )...( 281 ): >Q13675
REKKAAKTLGIVVGCF

SEQ ID NO: 17511 - protein, 16 aa, Homo sapiens
  ( 340 )...( 355 ): >Q13675
VLRIQCLRRKQSSKHA

SEQ ID NO: 17512 - protein, 16 aa, Homo sapiens
  ( 342 )...( 357 ): >Q13675
RIQCLRRKQSSKHALG

SEQ ID NO: 17513 - protein, 16 aa, Homo sapiens
  ( 343 )...( 358 ): >Q13675
IQCLRRKQSSKHALGY

SEQ ID NO: 17514 - protein, 16 aa, Homo sapiens
  ( 344 )...( 359 ): >Q13675
QCLRRKQSSKHALGYT

SEQ ID NO: 17515 - protein, 16 aa, Homo sapiens
  ( 345 )...( 360 ): >Q13675
CLRRKQSSKHALGYTL

SEQ ID NO: 17516 - protein, 16 aa, Homo sapiens
  ( 346 )...( 361 ): >Q13675
LRRKQSSKHALGYTLH

SEQ ID NO: 17517 - protein, 16 aa, Homo sapiens
  ( 375 )...( 390 ): >Q13675
VRIPVGSRETFYRISK

SEQ ID NO: 17518 - protein, 16 aa, Homo sapiens
  ( 376 )...( 391 ): >Q13675
RIPVGSRETFYRISKT

SEQ ID NO: 17519 - protein, 16 aa, Homo sapiens
  ( 416 )...( 431 ): >Q13675
QSSCTTARTKSRSVTR

SEQ ID NO: 17520 - protein, 16 aa, Homo sapiens
  ( 417 )...( 432 ): >Q13675
SSCTTARTKSRSVTRL

SEQ ID NO: 17521 - protein, 16 aa, Homo sapiens
  ( 419 )...( 434 ): >Q13675
CTTARTKSRSVTRLEC

SEQ ID NO: 17522 - protein, 16 aa, Homo sapiens
  ( 421 )...( 436 ): >Q13675
TARTKSRSVTRLECSG

SEQ ID NO: 17523 - protein, 16 aa, Homo sapiens
  ( 422 )...( 437 ): >Q13675
ARTKSRSVTRLECSGM

SEQ ID NO: 17524 - protein, 16 aa, Homo sapiens
  ( 423 )...( 438 ): >Q13675
RTKSRSVTRLECSGMI

SEQ ID NO: 17525 - protein, 16 aa, Homo sapiens
  ( 130 )...( 145 ): >O95800
IMSLKTVAVIALHRLR

SEQ ID NO: 17526 - protein, 16 aa, Homo sapiens
  ( 131 )...( 146 ): >O95800
MSLKTVAVIALHRLRM

SEQ ID NO: 17527 - protein, 16 aa, Homo sapiens
  ( 132 )...( 147 ): >O95800
SLKTVAVIALHRLRMV

SEQ ID NO: 17528 - protein, 16 aa, Homo sapiens
  ( 134 )...( 149 ): >O95800
KTVAVIALHRLRMVLG

SEQ ID NO: 17529 - protein, 16 aa, Homo sapiens
  ( 135 )...( 150 ): >O95800
TVAVIALHRLRMVLGK

SEQ ID NO: 17530 - protein, 16 aa, Homo sapiens
  ( 136 )...( 151 ): >O95800
VAVIALHRLRMVLGKQ

SEQ ID NO: 17531 - protein, 16 aa, Homo sapiens
  ( 137 )...( 152 ): >O95800
AVIALHRLRMVLGKQP

SEQ ID NO: 17532 - protein, 16 aa, Homo sapiens
  ( 138 )...( 153 ): >O95800
VIALHRLRMVLGKQPN

SEQ ID NO: 17533 - protein, 16 aa, Homo sapiens
  ( 139 )...( 154 ): >O95800
IALHRLRMVLGKQPNR

SEQ ID NO: 17534 - protein, 16 aa, Homo sapiens
  ( 140 )...( 155 ): >O95800
ALHRLRMVLGKQPNRT

SEQ ID NO: 17535 - protein, 16 aa, Homo sapiens
  ( 141 )...( 156 ): >O95800
LHRLRMVLGKQPNRTA

SEQ ID NO: 17536 - protein, 16 aa, Homo sapiens
  ( 142 )...( 157 ): >O95800
HRLRMVLGKQPNRTAS

SEQ ID NO: 17537 - protein, 16 aa, Homo sapiens
  ( 143 )...( 158 ): >O95800
RLRMVLGKQPNRTASF

SEQ ID NO: 17538 - protein, 16 aa, Homo sapiens
  ( 221 )...( 236 ): >O95800
SYIMIAQTLRKNAQVR

SEQ ID NO: 17539 - protein, 16 aa, Homo sapiens
  ( 222 )...( 237 ): >O95800
YIMIAQTLRKNAQVRK

SEQ ID NO: 17540 - protein, 16 aa, Homo sapiens
  ( 223 )...( 238 ): >O95800
IMIAQTLRKNAQVRKC

SEQ ID NO: 17541 - protein, 16 aa, Homo sapiens
  ( 224 )...( 239 ): >O95800
MIAQTLRKNAQVRKCP

SEQ ID NO: 17542 - protein, 16 aa, Homo sapiens
  ( 225 )...( 240 ): >O95800
IAQTLRKNAQVRKCPP

SEQ ID NO: 17543 - protein, 16 aa, Homo sapiens
  ( 226 )...( 241 ): >O95800
AQTLRKNAQVRKCPPV

SEQ ID NO: 17544 - protein, 16 aa, Homo sapiens
  ( 227 )...( 242 ): >O95800
QTLRKNAQVRKCPPVI

SEQ ID NO: 17545 - protein, 16 aa, Homo sapiens
  ( 228 )...( 243 ): >O95800
TLRKNAQVRKCPPVIT

SEQ ID NO: 17546 - protein, 16 aa, Homo sapiens
  ( 229 )...( 244 ): >O95800
LRKNAQVRKCPPVITV

SEQ ID NO: 17547 - protein, 16 aa, Homo sapiens
  ( 230 )...( 245 ): >O95800
RKNAQVRKCPPVITVD

SEQ ID NO: 17548 - protein, 16 aa, Homo sapiens
  ( 373 )...( 388 ): >O95800
PFIYSRNSAGLRRKVL

SEQ ID NO: 17549 - protein, 16 aa, Homo sapiens
  ( 375 )...( 390 ): >O95800
IYSRNSAGLRRKVLWC

SEQ ID NO: 17550 - protein, 16 aa, Homo sapiens
  ( 376 )...( 391 ): >O95800
YSRNSAGLRRKVLWCL

SEQ ID NO: 17551 - protein, 16 aa, Homo sapiens
  ( 377 )...( 392 ): >O95800
SRNSAGLRRKVLWCLQ

SEQ ID NO: 17552 - protein, 16 aa, Homo sapiens
  ( 379 )...( 394 ): >O95800
NSAGLRRKVLWCLQYI

SEQ ID NO: 17553 - protein, 16 aa, Homo sapiens
  ( 380 )...( 395 ): >O95800
SAGLRRKVLWCLQYIG

SEQ ID NO: 17554 - protein, 16 aa, Homo sapiens
  ( 381 )...( 396 ): >O95800
AGLRRKVLWCLQYIGL

SEQ ID NO: 17555 - protein, 16 aa, Homo sapiens
  ( 382 )...( 397 ): >O95800
GLRRKVLWCLQYIGLG

SEQ ID NO: 17556 - protein, 16 aa, Homo sapiens
  ( 400 )...( 415 ): >O95800
CCKQKTRLRAMGKGNL

SEQ ID NO: 17557 - protein, 16 aa, Homo sapiens
  ( 401 )...( 416 ): >O95800
CKQKTRLRAMGKGNLE

SEQ ID NO: 17558 - protein, 16 aa, Homo sapiens
  ( 402 )...( 417 ): >O95800
KQKTRLRAMGKGNLEV

SEQ ID NO: 17559 - protein, 16 aa, Homo sapiens
  ( 403 )...( 418 ): >O95800
QKTRLRAMGKGNLEVN

SEQ ID NO: 17560 - protein, 16 aa, Homo sapiens
  ( 404 )...( 419 ): >O95800
KTRLRAMGKGNLEVNR

SEQ ID NO: 17561 - protein, 16 aa, Homo sapiens
  ( 405 )...( 420 ): >O95800
TRLRAMGKGNLEVNRN

SEQ ID NO: 17562 - protein, 16 aa, Homo sapiens
  ( 406 )...( 421 ): >O95800
RLRAMGKGNLEVNRNK

SEQ ID NO: 17563 - protein, 16 aa, Homo sapiens
  ( 407 )...( 422 ): >O95800
LRAMGKGNLEVNRNKS

SEQ ID NO: 17564 - protein, 16 aa, Homo sapiens
  ( 76 )...( 91 ): >Q9UD67
GVSYPLRYPTIVTQRR

SEQ ID NO: 17565 - protein, 16 aa, Homo sapiens
  ( 77 )...( 92 ): >Q9UD67
VSYPLRYPTIVTQRRG

SEQ ID NO: 17566 - protein, 16 aa, Homo sapiens
  ( 78 )...( 93 ): >Q9UD67
SYPLRYPTIVTQRRGL

SEQ ID NO: 17567 - protein, 16 aa, Homo sapiens
  ( 79 )...( 94 ): >Q9UD67
YPLRYPTIVTQRRGLM

SEQ ID NO: 17568 - protein, 16 aa, Homo sapiens
  ( 80 )...( 95 ): >Q9UD67
PLRYPTIVTQRRGLMA

SEQ ID NO: 17569 - protein, 16 aa, Homo sapiens
  ( 81 )...( 96 ): >Q9UD67
LRYPTIVTQRRGLMAL

SEQ ID NO: 17570 - protein, 16 aa, Homo sapiens
  ( 82 )...( 97 ): >Q9UD67
RYPTIVTQRRGLMALL

SEQ ID NO: 17571 - protein, 16 aa, Homo sapiens
  ( 150 )...( 165 ): >Q9UD67
LVMYCRVYVVAKRESR

SEQ ID NO: 17572 - protein, 16 aa, Homo sapiens
  ( 151 )...( 166 ): >Q9UD67
VMYCRVYVVAKRESRG

SEQ ID NO: 17573 - protein, 16 aa, Homo sapiens
  ( 152 )...( 167 ): >Q9UD67
MYCRVYVVAKRESRGL

SEQ ID NO: 17574 - protein, 16 aa, Homo sapiens
  ( 153 )...( 168 ): >Q9UD67
YCRVYVVAKRESRGLK

SEQ ID NO: 17575 - protein, 16 aa, Homo sapiens
  ( 154 )...( 169 ): >Q9UD67
CRVYVVAKRESRGLKS

SEQ ID NO: 17576 - protein, 16 aa, Homo sapiens
  ( 155 )...( 170 ): >Q9UD67
RVYVVAKRESRGLKSG

SEQ ID NO: 17577 - protein, 16 aa, Homo sapiens
  ( 156 )...( 171 ): >Q9UD67
VYVVAKRESRGLKSGL

SEQ ID NO: 17578 - protein, 16 aa, Homo sapiens
  ( 157 )...( 172 ): >Q9UD67
YVVAKRESRGLKSGLK

SEQ ID NO: 17579 - protein, 16 aa, Homo sapiens
  ( 158 )...( 173 ): >Q9UD67
VVAKRESRGLKSGLKT

SEQ ID NO: 17580 - protein, 16 aa, Homo sapiens
  ( 159 )...( 174 ): >Q9UD67
VAKRESRGLKSGLKTD

SEQ ID NO: 17581 - protein, 16 aa, Homo sapiens
  ( 160 )...( 175 ): >Q9UD67
AKRESRGLKSGLKTDK

SEQ ID NO: 17582 - protein, 16 aa, Homo sapiens
  ( 161 )...( 176 ): >Q9UD67
KRESRGLKSGLKTDKS

SEQ ID NO: 17583 - protein, 16 aa, Homo sapiens
  ( 180 )...( 195 ): >Q9UD67
QVTLRIHRKNAPAGGS

SEQ ID NO: 17584 - protein, 16 aa, Homo sapiens
  ( 197 )...( 212 ): >Q9UD67
MASAKTKTHFSVRLLK

SEQ ID NO: 17585 - protein, 16 aa, Homo sapiens
  ( 198 )...( 213 ): >Q9UD67
ASAKTKTHFSVRLLKF

SEQ ID NO: 17586 - protein, 16 aa, Homo sapiens
  ( 200 )...( 215 ): >Q9UD67
AKTKTHFSVRLLKFSR

SEQ ID NO: 17587 - protein, 16 aa, Homo sapiens
  ( 207 )...( 222 ): >Q9UD67
SVRLLKFSREKKAAKT

SEQ ID NO: 17588 - protein, 16 aa, Homo sapiens
  ( 208 )...( 223 ): >Q9UD67
VRLLKFSREKKAAKTL

SEQ ID NO: 17589 - protein, 16 aa, Homo sapiens
  ( 209 )...( 224 ): >Q9UD67
RLLKFSREKKAAKTLG

SEQ ID NO: 17590 - protein, 16 aa, Homo sapiens
  ( 210 )...( 225 ): >Q9UD67
LLKFSREKKAAKTLGI

SEQ ID NO: 17591 - protein, 16 aa, Homo sapiens
  ( 211 )...( 226 ): >Q9UD67
LKFSREKKAAKTLGIV

SEQ ID NO: 17592 - protein, 16 aa, Homo sapiens
  ( 212 )...( 227 ): >Q9UD67
KFSREKKAAKTLGIVV

SEQ ID NO: 17593 - protein, 16 aa, Homo sapiens
  ( 213 )...( 228 ): >Q9UD67
FSREKKAAKTLGIVVG

SEQ ID NO: 17594 - protein, 16 aa, Homo sapiens
  ( 215 )...( 230 ): >Q9UD67
REKKAAKTLGIVVGCF

SEQ ID NO: 17595 - protein, 16 aa, Homo sapiens
  ( 289 )...( 304 ): >Q9UD67
VLRIQCLRRKQSSKHA

SEQ ID NO: 17596 - protein, 16 aa, Homo sapiens
  ( 291 )...( 306 ): >Q9UD67
RIQCLRRKQSSKHALG

SEQ ID NO: 17597 - protein, 16 aa, Homo sapiens
  ( 292 )...( 307 ): >Q9UD67
IQCLRRKQSSKHALGY

SEQ ID NO: 17598 - protein, 16 aa, Homo sapiens
  ( 293 )...( 308 ): >Q9UD67
QCLRRKQSSKHALGYT

SEQ ID NO: 17599 - protein, 16 aa, Homo sapiens
  ( 294 )...( 309 ): >Q9UD67
CLRRKQSSKHALGYTL

SEQ ID NO: 17600 - protein, 16 aa, Homo sapiens
  ( 295 )...( 310 ): >Q9UD67
LRRKQSSKHALGYTLH

SEQ ID NO: 17601 - protein, 16 aa, Homo sapiens
  ( 324 )...( 339 ): >Q9UD67
VRIPVGSRETFYRISK

SEQ ID NO: 17602 - protein, 16 aa, Homo sapiens
  ( 325 )...( 340 ): >Q9UD67
RIPVGSRETFYRISKT

SEQ ID NO: 17603 - protein, 16 aa, Homo sapiens
  ( 127 )...( 142 ): >Q9UD63
GVSYPLRYPTIVTQRR

SEQ ID NO: 17604 - protein, 16 aa, Homo sapiens
  ( 128 )...( 143 ): >Q9UD63
VSYPLRYPTIVTQRRG

SEQ ID NO: 17605 - protein, 16 aa, Homo sapiens
  ( 129 )...( 144 ): >Q9UD63
SYPLRYPTIVTQRRGL

SEQ ID NO: 17606 - protein, 16 aa, Homo sapiens
  ( 130 )...( 145 ): >Q9UD63
YPLRYPTIVTQRRGLM

SEQ ID NO: 17607 - protein, 16 aa, Homo sapiens
  ( 131 )...( 146 ): >Q9UD63
PLRYPTIVTQRRGLMA

SEQ ID NO: 17608 - protein, 16 aa, Homo sapiens
  ( 132 )...( 147 ): >Q9UD63
LRYPTIVTQRRGLMAL

SEQ ID NO: 17609 - protein, 16 aa, Homo sapiens
  ( 133 )...( 148 ): >Q9UD63
RYPTIVTQRRGLMALL

SEQ ID NO: 17610 - protein, 16 aa, Homo sapiens
  ( 201 )...( 216 ): >Q9UD63
LVMYCRVYVVAKRESR

SEQ ID NO: 17611 - protein, 16 aa, Homo sapiens
  ( 202 )...( 217 ): >Q9UD63
VMYCRVYVVAKRESRG

SEQ ID NO: 17612 - protein, 16 aa, Homo sapiens
  ( 203 )...( 218 ): >Q9UD63
MYCRVYVVAKRESRGL

SEQ ID NO: 17613 - protein, 16 aa, Homo sapiens
  ( 204 )...( 219 ): >Q9UD63
YCRVYVVAKRESRGLK

SEQ ID NO: 17614 - protein, 16 aa, Homo sapiens
  ( 205 )...( 220 ): >Q9UD63
CRVYVVAKRESRGLKS

SEQ ID NO: 17615 - protein, 16 aa, Homo sapiens
  ( 206 )...( 221 ): >Q9UD63
RVYVVAKRESRGLKSG

SEQ ID NO: 17616 - protein, 16 aa, Homo sapiens
  ( 207 )...( 222 ): >Q9UD63
VYVVAKRESRGLKSGL

SEQ ID NO: 17617 - protein, 16 aa, Homo sapiens
  ( 208 )...( 223 ): >Q9UD63
YVVAKRESRGLKSGLK

SEQ ID NO: 17618 - protein, 16 aa, Homo sapiens
  ( 209 )...( 224 ): >Q9UD63
VVAKRESRGLKSGLKT

SEQ ID NO: 17619 - protein, 16 aa, Homo sapiens
  ( 210 )...( 225 ): >Q9UD63
VAKRESRGLKSGLKTD

SEQ ID NO: 17620 - protein, 16 aa, Homo sapiens
  ( 211 )...( 226 ): >Q9UD63
AKRESRGLKSGLKTDK

SEQ ID NO: 17621 - protein, 16 aa, Homo sapiens
  ( 212 )...( 227 ): >Q9UD63
KRESRGLKSGLKTDKS

SEQ ID NO: 17622 - protein, 16 aa, Homo sapiens
  ( 231 )...( 246 ): >Q9UD63
QVTLRIHRKNAPAGGS

SEQ ID NO: 17623 - protein, 16 aa, Homo sapiens
  ( 248 )...( 263 ): >Q9UD63
MASAKTKTHFSVRLLK

SEQ ID NO: 17624 - protein, 16 aa, Homo sapiens
  ( 249 )...( 264 ): >Q9UD63
ASAKTKTHFSVRLLKF

SEQ ID NO: 17625 - protein, 16 aa, Homo sapiens
  ( 251 )...( 266 ): >Q9UD63
AKTKTHFSVRLLKFSR

SEQ ID NO: 17626 - protein, 16 aa, Homo sapiens
  ( 258 )...( 273 ): >Q9UD63
SVRLLKFSREKKAAKT

SEQ ID NO: 17627 - protein, 16 aa, Homo sapiens
  ( 259 )...( 274 ): >Q9UD63
VRLLKFSREKKAAKTL

SEQ ID NO: 17628 - protein, 16 aa, Homo sapiens
  ( 260 )...( 275 ): >Q9UD63
RLLKFSREKKAAKTLG

SEQ ID NO: 17629 - protein, 16 aa, Homo sapiens
  ( 261 )...( 276 ): >Q9UD63
LLKFSREKKAAKTLGI

SEQ ID NO: 17630 - protein, 16 aa, Homo sapiens
  ( 262 )...( 277 ): >Q9UD63
LKFSREKKAAKTLGIV

SEQ ID NO: 17631 - protein, 16 aa, Homo sapiens
  ( 263 )...( 278 ): >Q9UD63
KFSREKKAAKTLGIVV

SEQ ID NO: 17632 - protein, 16 aa, Homo sapiens
  ( 264 )...( 279 ): >Q9UD63
FSREKKAAKTLGIVVG

SEQ ID NO: 17633 - protein, 16 aa, Homo sapiens
  ( 266 )...( 281 ): >Q9UD63
REKKAAKTLGIVVGCF

SEQ ID NO: 17634 - protein, 16 aa, Homo sapiens
  ( 336 )...( 351 ): >Q9UD63
AFCNVLRIQCLRRKQS

SEQ ID NO: 17635 - protein, 16 aa, Homo sapiens
  ( 338 )...( 353 ): >Q9UD63
CNVLRIQCLRRKQSSK

SEQ ID NO: 17636 - protein, 16 aa, Homo sapiens
  ( 340 )...( 355 ): >Q9UD63
VLRIQCLRRKQSSKHA

SEQ ID NO: 17637 - protein, 16 aa, Homo sapiens
  ( 342 )...( 357 ): >Q9UD63
RIQCLRRKQSSKHALG

SEQ ID NO: 17638 - protein, 16 aa, Homo sapiens
  ( 343 )...( 358 ): >Q9UD63
IQCLRRKQSSKHALGY

SEQ ID NO: 17639 - protein, 16 aa, Homo sapiens
  ( 344 )...( 359 ): >Q9UD63
QCLRRKQSSKHALGYT

SEQ ID NO: 17640 - protein, 16 aa, Homo sapiens
  ( 345 )...( 360 ): >Q9UD63
CLRRKQSSKHALGYTL

SEQ ID NO: 17641 - protein, 16 aa, Homo sapiens
  ( 346 )...( 361 ): >Q9UD63
LRRKQSSKHALGYTLH

SEQ ID NO: 17642 - protein, 16 aa, Homo sapiens
  ( 375 )...( 390 ): >Q9UD63
VRIPVGSRETFYRISK

SEQ ID NO: 17643 - protein, 16 aa, Homo sapiens
  ( 376 )...( 391 ): >Q9UD63
RIPVGSRETFYRISKT

SEQ ID NO: 17644 - protein, 16 aa, Homo sapiens
  ( 149 )...( 164 ): >Q9UBF7
ALRYHSIVTLPRARRA

SEQ ID NO: 17645 - protein, 16 aa, Homo sapiens
  ( 150 )...( 165 ): >Q9UBF7
LRYHSIVTLPRARRAV

SEQ ID NO: 17646 - protein, 16 aa, Homo sapiens
  ( 151 )...( 166 ): >Q9UBF7
RYHSIVTLPRARRAVA

SEQ ID NO: 17647 - protein, 16 aa, Homo sapiens
  ( 152 )...( 167 ): >Q9UBF7
YHSIVTLPRARRAVAA

SEQ ID NO: 17648 - protein, 16 aa, Homo sapiens
  ( 153 )...( 168 ): >Q9UBF7
HSIVTLPRARRAVAAI

SEQ ID NO: 17649 - protein, 16 aa, Homo sapiens
  ( 154 )...( 169 ): >Q9UBF7
SIVTLPRARRAVAAIW

SEQ ID NO: 17650 - protein, 16 aa, Homo sapiens
  ( 155 )...( 170 ): >Q9UBF7
IVTLPRARRAVAAIWV

SEQ ID NO: 17651 - protein, 16 aa, Homo sapiens
  ( 156 )...( 171 ): >Q9UBF7
VTLPRARRAVAAIWVA

SEQ ID NO: 17652 - protein, 16 aa, Homo sapiens
  ( 157 )...( 172 ): >Q9UBF7
TLPRARRAVAAIWVAS

SEQ ID NO: 17653 - protein, 16 aa, Homo sapiens
  ( 158 )...( 173 ): >Q9UBF7
LPRARRAVAAIWVASV

SEQ ID NO: 17654 - protein, 16 aa, Homo sapiens
  ( 159 )...( 174 ): >Q9UBF7
PRARRAVAAIWVASVV

SEQ ID NO: 17655 - protein, 16 aa, Homo sapiens
  ( 160 )...( 175 ): >Q9UBF7
RARRAVAAIWVASVVF

SEQ ID NO: 17656 - protein, 16 aa, Homo sapiens
  ( 211 )...( 226 ): >Q9UBF7
LARACQHAQGIARLHK

SEQ ID NO: 17657 - protein, 16 aa, Homo sapiens
  ( 212 )...( 227 ): >Q9UBF7
ARACQHAQGIARLHKR

SEQ ID NO: 17658 - protein, 16 aa, Homo sapiens
  ( 213 )...( 228 ): >Q9UBF7
RACQHAQGIARLHKRQ

SEQ ID NO: 17659 - protein, 16 aa, Homo sapiens
  ( 214 )...( 229 ): >Q9UBF7
ACQHAQGIARLHKRQR

SEQ ID NO: 17660 - protein, 16 aa, Homo sapiens
  ( 216 )...( 231 ): >Q9UBF7
QHAQGIARLHKRQRPV

SEQ ID NO: 17661 - protein, 16 aa, Homo sapiens
  ( 218 )...( 233 ): >Q9UBF7
AQGIARLHKRQRPVHQ

SEQ ID NO: 17662 - protein, 16 aa, Homo sapiens
  ( 219 )...( 234 ): >Q9UBF7
QGIARLHKRQRPVHQG

SEQ ID NO: 17663 - protein, 16 aa, Homo sapiens
  ( 220 )...( 235 ): >Q9UBF7
GIARLHKRQRPVHQGF

SEQ ID NO: 17664 - protein, 16 aa, Homo sapiens
  ( 221 )...( 236 ): >Q9UBF7
IARLHKRQRPVHQGFG

SEQ ID NO: 17665 - protein, 16 aa, Homo sapiens
  ( 222 )...( 237 ): >Q9UBF7
ARLHKRQRPVHQGFGL

SEQ ID NO: 17666 - protein, 16 aa, Homo sapiens
  ( 224 )...( 239 ): >Q9UBF7
LHKRQRPVHQGFGLKG

SEQ ID NO: 17667 - protein, 16 aa, Homo sapiens
  ( 225 )...( 240 ): >Q9UBF7
HKRQRPVHQGFGLKGA

SEQ ID NO: 17668 - protein, 16 aa, Homo sapiens
  ( 226 )...( 241 ): >Q9UBF7
KRQRPVHQGFGLKGAV

SEQ ID NO: 17669 - protein, 16 aa, Homo sapiens
  ( 227 )...( 242 ): >Q9UBF7
RQRPVHQGFGLKGAVT

SEQ ID NO: 17670 - protein, 16 aa, Homo sapiens
  ( 127 )...( 142 ): >O60451
GVSYPLRYPTIVTQRR

SEQ ID NO: 17671 - protein, 16 aa, Homo sapiens
  ( 128 )...( 143 ): >O60451
VSYPLRYPTIVTQRRG

SEQ ID NO: 17672 - protein, 16 aa, Homo sapiens
  ( 129 )...( 144 ): >O60451
SYPLRYPTIVTQRRGL

SEQ ID NO: 17673 - protein, 16 aa, Homo sapiens
  ( 130 )...( 145 ): >O60451
YPLRYPTIVTQRRGLM

SEQ ID NO: 17674 - protein, 16 aa, Homo sapiens
  ( 131 )...( 146 ): >O60451
PLRYPTIVTQRRGLMA

SEQ ID NO: 17675 - protein, 16 aa, Homo sapiens
  ( 132 )...( 147 ): >O60451
LRYPTIVTQRRGLMAL

SEQ ID NO: 17676 - protein, 16 aa, Homo sapiens
  ( 133 )...( 148 ): >O60451
RYPTIVTQRRGLMALL

SEQ ID NO: 17677 - protein, 16 aa, Homo sapiens
  ( 201 )...( 216 ): >O60451
LVMYCRVYVVAKRESR

SEQ ID NO: 17678 - protein, 16 aa, Homo sapiens
  ( 202 )...( 217 ): >O60451
VMYCRVYVVAKRESRG

SEQ ID NO: 17679 - protein, 16 aa, Homo sapiens
  ( 203 )...( 218 ): >O60451
MYCRVYVVAKRESRGL

SEQ ID NO: 17680 - protein, 16 aa, Homo sapiens
  ( 204 )...( 219 ): >O60451
YCRVYVVAKRESRGLK

SEQ ID NO: 17681 - protein, 16 aa, Homo sapiens
  ( 205 )...( 220 ): >O60451
CRVYVVAKRESRGLKS

SEQ ID NO: 17682 - protein, 16 aa, Homo sapiens
  ( 206 )...( 221 ): >O60451
RVYVVAKRESRGLKSG

SEQ ID NO: 17683 - protein, 16 aa, Homo sapiens
  ( 207 )...( 222 ): >O60451
VYVVAKRESRGLKSGL

SEQ ID NO: 17684 - protein, 16 aa, Homo sapiens
  ( 208 )...( 223 ): >O60451
YVVAKRESRGLKSGLK

SEQ ID NO: 17685 - protein, 16 aa, Homo sapiens
  ( 209 )...( 224 ): >O60451
VVAKRESRGLKSGLKT

SEQ ID NO: 17686 - protein, 16 aa, Homo sapiens
  ( 210 )...( 225 ): >O60451
VAKRESRGLKSGLKTD

SEQ ID NO: 17687 - protein, 16 aa, Homo sapiens
  ( 211 )...( 226 ): >O60451
AKRESRGLKSGLKTDK

SEQ ID NO: 17688 - protein, 16 aa, Homo sapiens
  ( 212 )...( 227 ): >O60451
KRESRGLKSGLKTDKS

SEQ ID NO: 17689 - protein, 16 aa, Homo sapiens
  ( 231 )...( 246 ): >O60451
QVTLRIHRKNAPAGGS

SEQ ID NO: 17690 - protein, 16 aa, Homo sapiens
  ( 248 )...( 263 ): >O60451
MASAKTKTHFSVRLLK

SEQ ID NO: 17691 - protein, 16 aa, Homo sapiens
  ( 249 )...( 264 ): >O60451
ASAKTKTHFSVRLLKF

SEQ ID NO: 17692 - protein, 16 aa, Homo sapiens
  ( 251 )...( 266 ): >O60451
AKTKTHFSVRLLKFSR

SEQ ID NO: 17693 - protein, 16 aa, Homo sapiens
  ( 258 )...( 273 ): >O60451
SVRLLKFSREKKAAKT

SEQ ID NO: 17694 - protein, 16 aa, Homo sapiens
  ( 259 )...( 274 ): >O60451
VRLLKFSREKKAAKTL

SEQ ID NO: 17695 - protein, 16 aa, Homo sapiens
  ( 260 )...( 275 ): >O60451
RLLKFSREKKAAKTLG

SEQ ID NO: 17696 - protein, 16 aa, Homo sapiens
  ( 261 )...( 276 ): >O60451
LLKFSREKKAAKTLGI

SEQ ID NO: 17697 - protein, 16 aa, Homo sapiens
  ( 262 )...( 277 ): >O60451
LKFSREKKAAKTLGIV

SEQ ID NO: 17698 - protein, 16 aa, Homo sapiens
  ( 263 )...( 278 ): >O60451
KFSREKKAAKTLGIVV

SEQ ID NO: 17699 - protein, 16 aa, Homo sapiens
  ( 264 )...( 279 ): >O60451
FSREKKAAKTLGIVVG

SEQ ID NO: 17700 - protein, 16 aa, Homo sapiens
  ( 266 )...( 281 ): >O60451
REKKAAKTLGIVVGCF

SEQ ID NO: 17701 - protein, 16 aa, Homo sapiens
  ( 334 )...( 349 ): >O60451
KKAFQNVLRIQCLCRK

SEQ ID NO: 17702 - protein, 16 aa, Homo sapiens
  ( 335 )...( 350 ): >O60451
KAFQNVLRIQCLCRKQ

SEQ ID NO: 17703 - protein, 16 aa, Homo sapiens
  ( 338 )...( 353 ): >O60451
QNVLRIQCLCRKQSSK

SEQ ID NO: 17704 - protein, 16 aa, Homo sapiens
  ( 339 )...( 354 ): >O60451
NVLRIQCLCRKQSSKH

SEQ ID NO: 17705 - protein, 16 aa, Homo sapiens
  ( 340 )...( 355 ): >O60451
VLRIQCLCRKQSSKHA

SEQ ID NO: 17706 - protein, 16 aa, Homo sapiens
  ( 341 )...( 356 ): >O60451
LRIQCLCRKQSSKHAL

SEQ ID NO: 17707 - protein, 16 aa, Homo sapiens
  ( 375 )...( 390 ): >O60451
VRIPVGSRETFYRISK

SEQ ID NO: 17708 - protein, 16 aa, Homo sapiens
  ( 376 )...( 391 ): >O60451
RIPVGSRETFYRISKT

SEQ ID NO: 17709 - protein, 16 aa, Homo sapiens
  ( 409 )...( 424 ): >O60451
RITVSKDQSSCTTARR

SEQ ID NO: 17710 - protein, 16 aa, Homo sapiens
  ( 141 )...( 156 ): >Q9NZR3
LYNTRYSSKRRVTVMI

SEQ ID NO: 17711 - protein, 16 aa, Homo sapiens
  ( 143 )...( 158 ): >Q9NZR3
NTRYSSKRRVTVMISI

SEQ ID NO: 17712 - protein, 16 aa, Homo sapiens
  ( 144 )...( 159 ): >Q9NZR3
TRYSSKRRVTVMISIV

SEQ ID NO: 17713 - protein, 16 aa, Homo sapiens
  ( 145 )...( 160 ): >Q9NZR3
RYSSKRRVTVMISIVW

SEQ ID NO: 17714 - protein, 16 aa, Homo sapiens
  ( 146 )...( 161 ): >Q9NZR3
YSSKRRVTVMISIVWV

SEQ ID NO: 17715 - protein, 16 aa, Homo sapiens
  ( 147 )...( 162 ): >Q9NZR3
SSKRRVTVMISIVWVL

SEQ ID NO: 17716 - protein, 16 aa, Homo sapiens
  ( 148 )...( 163 ): >Q9NZR3
SKRRVTVMISIVWVLS

SEQ ID NO: 17717 - protein, 16 aa, Homo sapiens
  ( 227 )...( 242 ): >Q9NZR3
RSSRAFRAHLRAPLKG

SEQ ID NO: 17718 - protein, 16 aa, Homo sapiens
  ( 254 )...( 269 ): >Q9NZR3
TVIMKSNGSFPVNRRR

SEQ ID NO: 17719 - protein, 16 aa, Homo sapiens
  ( 255 )...( 270 ): >Q9NZR3
VIMKSNGSFPVNRRRV

SEQ ID NO: 17720 - protein, 16 aa, Homo sapiens
  ( 256 )...( 271 ): >Q9NZR3
IMKSNGSFPVNRRRVV

SEQ ID NO: 17721 - protein, 16 aa, Homo sapiens
  ( 257 )...( 272 ): >Q9NZR3
MKSNGSFPVNRRRVVQ

SEQ ID NO: 17722 - protein, 16 aa, Homo sapiens
  ( 261 )...( 276 ): >Q9NZR3
GSFPVNRRRVVQEAAR

SEQ ID NO: 17723 - protein, 16 aa, Homo sapiens
  ( 347 )...( 362 ): >Q9NZR3
TMPNGKTRTSLKTMSR

SEQ ID NO: 17724 - protein, 16 aa, Homo sapiens
  ( 348 )...( 363 ): >Q9NZR3
MPNGKTRTSLKTMSRR

SEQ ID NO: 17725 - protein, 16 aa, Homo sapiens
  ( 349 )...( 364 ): >Q9NZR3
PNGKTRTSLKTMSRRK

SEQ ID NO: 17726 - protein, 16 aa, Homo sapiens
  ( 350 )...( 365 ): >Q9NZR3
NGKTRTSLKTMSRRKL

SEQ ID NO: 17727 - protein, 16 aa, Homo sapiens
  ( 351 )...( 366 ): >Q9NZR3
GKTRTSLKTMSRRKLS

SEQ ID NO: 17728 - protein, 16 aa, Homo sapiens
  ( 352 )...( 367 ): >Q9NZR3
KTRTSLKTMSRRKLSQ

SEQ ID NO: 17729 - protein, 16 aa, Homo sapiens
  ( 353 )...( 368 ): >Q9NZR3
TRTSLKTMSRRKLSQQ

SEQ ID NO: 17730 - protein, 16 aa, Homo sapiens
  ( 355 )...( 370 ): >Q9NZR3
TSLKTMSRRKLSQQKE

SEQ ID NO: 17731 - protein, 16 aa, Homo sapiens
  ( 359 )...( 374 ): >Q9NZR3
TMSRRKLSQQKEKKAT

SEQ ID NO: 17732 - protein, 16 aa, Homo sapiens
  ( 363 )...( 378 ): >Q9NZR3
RKLSQQKEKKATQMLA

SEQ ID NO: 17733 - protein, 16 aa, Homo sapiens
  ( 123 )...( 138 ): >Q9P2Q4
RAITDAVEYARKRTPK

SEQ ID NO: 17734 - protein, 16 aa, Homo sapiens
  ( 128 )...( 143 ): >Q9P2Q4
AVEYARKRTPKHAGIM

SEQ ID NO: 17735 - protein, 16 aa, Homo sapiens
  ( 129 )...( 144 ): >Q9P2Q4
VEYARKRTPKHAGIMI

SEQ ID NO: 17736 - protein, 16 aa, Homo sapiens
  ( 130 )...( 145 ): >Q9P2Q4
EYARKRTPKHAGIMIT

SEQ ID NO: 17737 - protein, 16 aa, Homo sapiens
  ( 131 )...( 146 ): >Q9P2Q4
YARKRTPKHAGIMITI

SEQ ID NO: 17738 - protein, 16 aa, Homo sapiens
  ( 132 )...( 147 ): >Q9P2Q4
ARKRTPKHAGIMITIV

SEQ ID NO: 17739 - protein, 16 aa, Homo sapiens
  ( 133 )...( 148 ): >Q9P2Q4
RKRTPKHAGIMITIVW

SEQ ID NO: 17740 - protein, 16 aa, Homo sapiens
  ( 134 )...( 149 ): >Q9P2Q4
KRTPKHAGIMITIVWI

SEQ ID NO: 17741 - protein, 16 aa, Homo sapiens
  ( 206 )...( 221 ): >Q9P2Q4
RAAKTLYHKRQASRIA

SEQ ID NO: 17742 - protein, 16 aa, Homo sapiens
  ( 207 )...( 222 ): >Q9P2Q4
AAKTLYHKRQASRIAK

SEQ ID NO: 17743 - protein, 16 aa, Homo sapiens
  ( 208 )...( 223 ): >Q9P2Q4
AKTLYHKRQASRIAKE

SEQ ID NO: 17744 - protein, 16 aa, Homo sapiens
  ( 279 )...( 294 ): >Q9P2Q4
RRQKISGTRERKAATT

SEQ ID NO: 17745 - protein, 16 aa, Homo sapiens
  ( 280 )...( 295 ): >Q9P2Q4
RQKISGTRERKAATTL

SEQ ID NO: 17746 - protein, 16 aa, Homo sapiens
  ( 281 )...( 296 ): >Q9P2Q4
QKISGTRERKAATTLG

SEQ ID NO: 17747 - protein, 16 aa, Homo sapiens
  ( 95 )...( 110 ): >Q9P1X9
RYFCVTKPLTYPVKRT

SEQ ID NO: 17748 - protein, 16 aa, Homo sapiens
  ( 97 )...( 112 ): >Q9P1X9
FCVTKPLTYPVKRTTK

SEQ ID NO: 17749 - protein, 16 aa, Homo sapiens
  ( 98 )...( 113 ): >Q9P1X9
CVTKPLTYPVKRTTKM

SEQ ID NO: 17750 - protein, 16 aa, Homo sapiens
  ( 99 )...( 114 ): >Q9P1X9
VTKPLTYPVKRTTKMA

SEQ ID NO: 17751 - protein, 16 aa, Homo sapiens
  ( 100 )...( 115 ): >Q9P1X9
TKPLTYPVKRTTKMAG

SEQ ID NO: 17752 - protein, 16 aa, Homo sapiens
  ( 101 )...( 116 ): >Q9P1X9
KPLTYPVKRTTKMAGM

SEQ ID NO: 17753 - protein, 16 aa, Homo sapiens
  ( 103 )...( 118 ): >Q9P1X9
LTYPVKRTTKMAGMMI

SEQ ID NO: 17754 - protein, 16 aa, Homo sapiens
  ( 104 )...( 119 ): >Q9P1X9
TYPVKRTTKMAGMMIA

SEQ ID NO: 17755 - protein, 16 aa, Homo sapiens
  ( 107 )...( 122 ): >Q9P1X9
VKRTTKMAGMMIAAAW

SEQ ID NO: 17756 - protein, 16 aa, Homo sapiens
  ( 108 )...( 123 ): >Q9P1X9
KRTTKMAGMMIAAAWV

SEQ ID NO: 17757 - protein, 16 aa, Homo sapiens
  ( 175 )...( 190 ): >Q9P1X9
IMTVLYWHISRASKSR

SEQ ID NO: 17758 - protein, 16 aa, Homo sapiens
  ( 176 )...( 191 ): >Q9P1X9
MTVLYWHISRASKSRI

SEQ ID NO: 17759 - protein, 16 aa, Homo sapiens
  ( 185 )...( 200 ): >Q9P1X9
RASKSRIKKDKKEPVA

SEQ ID NO: 17760 - protein, 16 aa, Homo sapiens
  ( 186 )...( 201 ): >Q9P1X9
ASKSRIKKDKKEPVAN

SEQ ID NO: 17761 - protein, 16 aa, Homo sapiens
  ( 293 )...( 308 ): >Q9P1X9
NSKQTCIRIGTKTPKS

SEQ ID NO: 17762 - protein, 16 aa, Homo sapiens
  ( 329 )...( 344 ): >Q9P1X9
DEKQNIVARKIVKMTK

SEQ ID NO: 17763 - protein, 16 aa, Homo sapiens
  ( 330 )...( 345 ): >Q9P1X9
EKQNIVARKIVKMTKQ

SEQ ID NO: 17764 - protein, 16 aa, Homo sapiens
  ( 331 )...( 346 ): >Q9P1X9
KQNIVARKIVKMTKQP

SEQ ID NO: 17765 - protein, 16 aa, Homo sapiens
  ( 332 )...( 347 ): >Q9P1X9
QNIVARKIVKMTKQPA

SEQ ID NO: 17766 - protein, 16 aa, Homo sapiens
  ( 333 )...( 348 ): >Q9P1X9
NIVARKIVKMTKQPAK

SEQ ID NO: 17767 - protein, 16 aa, Homo sapiens
  ( 334 )...( 349 ): >Q9P1X9
IVARKIVKMTKQPAKK

SEQ ID NO: 17768 - protein, 16 aa, Homo sapiens
  ( 335 )...( 350 ): >Q9P1X9
VARKIVKMTKQPAKKK

SEQ ID NO: 17769 - protein, 16 aa, Homo sapiens
  ( 336 )...( 351 ): >Q9P1X9
ARKIVKMTKQPAKKKP

SEQ ID NO: 17770 - protein, 16 aa, Homo sapiens
  ( 338 )...( 353 ): >Q9P1X9
KIVKMTKQPAKKKPPP

SEQ ID NO: 17771 - protein, 16 aa, Homo sapiens
  ( 349 )...( 364 ): >Q9P1X9
KKPPPSREKKVTRTIL

SEQ ID NO: 17772 - protein, 16 aa, Homo sapiens
  ( 350 )...( 365 ): >Q9P1X9
KPPPSREKKVTRTILA

SEQ ID NO: 17773 - protein, 16 aa, Homo sapiens
  ( 351 )...( 366 ): >Q9P1X9
PPPSREKKVTRTILAI

SEQ ID NO: 17774 - protein, 16 aa, Homo sapiens
  ( 352 )...( 367 ): >Q9P1X9
PPSREKKVTRTILAIL

SEQ ID NO: 17775 - protein, 16 aa, Homo sapiens
  ( 353 )...( 368 ): >Q9P1X9
PSREKKVTRTILAILL

SEQ ID NO: 17776 - protein, 16 aa, Homo sapiens
  ( 354 )...( 369 ): >Q9P1X9
SREKKVTRTILAILLA

SEQ ID NO: 17777 - protein, 16 aa, Homo sapiens
  ( 355 )...( 370 ): >Q9P1X9
REKKVTRTILAILLAF

SEQ ID NO: 17778 - protein, 16 aa, Homo sapiens
  ( 141 )...( 156 ): >Q9UPA9
LYNTRYSSKRRVTVMI

SEQ ID NO: 17779 - protein, 16 aa, Homo sapiens
  ( 143 )...( 158 ): >Q9UPA9
NTRYSSKRRVTVMISI

SEQ ID NO: 17780 - protein, 16 aa, Homo sapiens
  ( 144 )...( 159 ): >Q9UPA9
TRYSSKRRVTVMISIV

SEQ ID NO: 17781 - protein, 16 aa, Homo sapiens
  ( 145 )...( 160 ): >Q9UPA9
RYSSKRRVTVMISIVW

SEQ ID NO: 17782 - protein, 16 aa, Homo sapiens
  ( 146 )...( 161 ): >Q9UPA9
YSSKRRVTVMISIVWV

SEQ ID NO: 17783 - protein, 16 aa, Homo sapiens
  ( 147 )...( 162 ): >Q9UPA9
SSKRRVTVMISIVWVL

SEQ ID NO: 17784 - protein, 16 aa, Homo sapiens
  ( 148 )...( 163 ): >Q9UPA9
SKRRVTVMISIVWVLS

SEQ ID NO: 17785 - protein, 16 aa, Homo sapiens
  ( 227 )...( 242 ): >Q9UPA9
RSSRAFRAHLRAPLKG

SEQ ID NO: 17786 - protein, 16 aa, Homo sapiens
  ( 254 )...( 269 ): >Q9UPA9
TVIMKSNGSFPVNRRR

SEQ ID NO: 17787 - protein, 16 aa, Homo sapiens
  ( 255 )...( 270 ): >Q9UPA9
VIMKSNGSFPVNRRRV

SEQ ID NO: 17788 - protein, 16 aa, Homo sapiens
  ( 261 )...( 276 ): >Q9UPA9
GSFPVNRRRVEAARRA

SEQ ID NO: 17789 - protein, 15 aa, Homo sapiens
  ( 345 )...( 360 ): >Q9UPA9
TMPNGKRTSLKTMSR

SEQ ID NO: 17790 - protein, 15 aa, Homo sapiens
  ( 346 )...( 361 ): >Q9UPA9
MPNGKRTSLKTMSRR

SEQ ID NO: 17791 - protein, 15 aa, Homo sapiens
  ( 347 )...( 362 ): >Q9UPA9
PNGKRTSLKTMSRRK

SEQ ID NO: 17792 - protein, 15 aa, Homo sapiens
  ( 348 )...( 363 ): >Q9UPA9
NGKRTSLKTMSRRKL

SEQ ID NO: 17793 - protein, 15 aa, Homo sapiens
  ( 349 )...( 364 ): >Q9UPA9
GKRTSLKTMSRRKLS

SEQ ID NO: 17794 - protein, 15 aa, Homo sapiens
  ( 351 )...( 366 ): >Q9UPA9
RTSLKTMSRRKLSQQ

SEQ ID NO: 17795 - protein, 16 aa, Homo sapiens
  ( 353 )...( 368 ): >Q9UPA9
TSLKTMSRRKLSQQKE

SEQ ID NO: 17796 - protein, 16 aa, Homo sapiens
  ( 357 )...( 372 ): >Q9UPA9
TMSRRKLSQQKEKKAT

SEQ ID NO: 17797 - protein, 16 aa, Homo sapiens
  ( 361 )...( 376 ): >Q9UPA9
RKLSQQKEKKATQMLA

SEQ ID NO: 17798 - protein, 16 aa, Homo sapiens
  ( 156 )...( 171 ): >Q9UL61
AVLGRHLVSRIIIAKS

SEQ ID NO: 17799 - protein, 16 aa, Homo sapiens
  ( 323 )...( 338 ): >Q9UL61
GPLLITFFVRRVKGTF

SEQ ID NO: 17800 - protein, 16 aa, Homo sapiens
  ( 324 )...( 339 ): >Q9UL61
PLLITFFVRRVKGTFG

SEQ ID NO: 17801 - protein, 16 aa, Homo sapiens
  ( 1041 )...( 1056 ): >Q9UL61
LREGAVMRRLHLIVTR

SEQ ID NO: 17802 - protein, 16 aa, Homo sapiens
  ( 1042 )...( 1057 ): >Q9UL61
REGAVMRRLHLIVTRQ

SEQ ID NO: 17803 - protein, 16 aa, Homo sapiens
  ( 1044 )...( 1059 ): >Q9UL61
GAVMRRLHLIVTRQPN

SEQ ID NO: 17804 - protein, 16 aa, Homo sapiens
  ( 1066 )...( 1081 ): >Q9UL61
KVFWRVTLNKTVVVLQ

SEQ ID NO: 17805 - protein, 16 aa, Homo sapiens
  ( 1067 )...( 1082 ): >Q9UL61
VFWRVTLNKTVVVLQK

SEQ ID NO: 17806 - protein, 16 aa, Homo sapiens
  ( 1253 )...( 1268 ): >Q9UL61
PKRFQIVLFDPKGGAR

SEQ ID NO: 17807 - protein, 16 aa, Homo sapiens
  ( 1254 )...( 1269 ): >Q9UL61
KRFQIVLFDPKGGARI

SEQ ID NO: 17808 - protein, 16 aa, Homo sapiens
  ( 204 )...( 219 ): >O75963
MLVCYGFIFRVARVKA

SEQ ID NO: 17809 - protein, 16 aa, Homo sapiens
  ( 205 )...( 220 ): >O75963
LVCYGFIFRVARVKAR

SEQ ID NO: 17810 - protein, 16 aa, Homo sapiens
  ( 206 )...( 221 ): >O75963
VCYGFIFRVARVKARK

SEQ ID NO: 17811 - protein, 16 aa, Homo sapiens
  ( 207 )...( 222 ): >O75963
CYGFIFRVARVKARKV

SEQ ID NO: 17812 - protein, 16 aa, Homo sapiens
  ( 208 )...( 223 ): >O75963
YGFIFRVARVKARKVH

SEQ ID NO: 17813 - protein, 16 aa, Homo sapiens
  ( 209 )...( 224 ): >O75963
GFIFRVARVKARKVHC

SEQ ID NO: 17814 - protein, 16 aa, Homo sapiens
  ( 210 )...( 225 ): >O75963
FIFRVARVKARKVHCG

SEQ ID NO: 17815 - protein, 16 aa, Homo sapiens
  ( 211 )...( 226 ): >O75963
IFRVARVKARKVHCGT

SEQ ID NO: 17816 - protein, 16 aa, Homo sapiens
  ( 212 )...( 227 ): >O75963
FRVARVKARKVHCGTV

SEQ ID NO: 17817 - protein, 16 aa, Homo sapiens
  ( 213 )...( 228 ): >O75963
RVARVKARKVHCGTVV

SEQ ID NO: 17818 - protein, 16 aa, Homo sapiens
  ( 216 )...( 231 ): >O75963
RVKARKVHCGTVVIVE

SEQ ID NO: 17819 - protein, 16 aa, Homo sapiens
  ( 318 )...( 333 ): >O75963
VCHPLIYGLWNKTVRK

SEQ ID NO: 17820 - protein, 16 aa, Homo sapiens
  ( 67 )...( 82 ): >Q9NZH0
LILLVRLPFIKEKEKK

SEQ ID NO: 17821 - protein, 16 aa, Homo sapiens
  ( 68 )...( 83 ): >Q9NZH0
ILLVRLPFIKEKEKKS

SEQ ID NO: 17822 - protein, 16 aa, Homo sapiens
  ( 69 )...( 84 ): >Q9NZH0
LLVRLPFIKEKEKKSP

SEQ ID NO: 17823 - protein, 16 aa, Homo sapiens
  ( 70 )...( 85 ): >Q9NZH0
LVRLPFIKEKEKKSPV

SEQ ID NO: 17824 - protein, 16 aa, Homo sapiens
  ( 71 )...( 86 ): >Q9NZH0
VRLPFIKEKEKKSPVG

SEQ ID NO: 17825 - protein, 16 aa, Homo sapiens
  ( 72 )...( 87 ): >Q9NZH0
RLPFIKEKEKKSPVGL

SEQ ID NO: 17826 - protein, 16 aa, Homo sapiens
  ( 131 )...( 146 ): >Q9NZH0
CLLSQAWRVRRLVRHG

SEQ ID NO: 17827 - protein, 16 aa, Homo sapiens
  ( 132 )...( 147 ): >Q9NZH0
LLSQAWRVRRLVRHGT

SEQ ID NO: 17828 - protein, 16 aa, Homo sapiens
  ( 133 )...( 148 ): >Q9NZH0
LSQAWRVRRLVRHGTG

SEQ ID NO: 17829 - protein, 16 aa, Homo sapiens
  ( 134 )...( 149 ): >Q9NZH0
SQAWRVRRLVRHGTGP

SEQ ID NO: 17830 - protein, 16 aa, Homo sapiens
  ( 135 )...( 150 ): >Q9NZH0
QAWRVRRLVRHGTGPA

SEQ ID NO: 17831 - protein, 16 aa, Homo sapiens
  ( 136 )...( 151 ): >Q9NZH0
AWRVRRLVRHGTGPAG

SEQ ID NO: 17832 - protein, 16 aa, Homo sapiens
  ( 137 )...( 152 ): >Q9NZH0
WRVRRLVRHGTGPAGW

SEQ ID NO: 17833 - protein, 16 aa, Homo sapiens
  ( 138 )...( 153 ): >Q9NZH0
RVRRLVRHGTGPAGWQ

SEQ ID NO: 17834 - protein, 16 aa, Homo sapiens
  ( 139 )...( 154 ): >Q9NZH0
VRRLVRHGTGPAGWQL

SEQ ID NO: 17835 - protein, 16 aa, Homo sapiens
  ( 140 )...( 155 ): >Q9NZH0
RRLVRHGTGPAGWQLV

SEQ ID NO: 17836 - protein, 16 aa, Homo sapiens
  ( 205 )...( 220 ): >Q9NZH0
VTLGLALFTLCGKFKR

SEQ ID NO: 17837 - protein, 16 aa, Homo sapiens
  ( 206 )...( 221 ): >Q9NZH0
TLGLALFTLCGKFKRW

SEQ ID NO: 17838 - protein, 16 aa, Homo sapiens
  ( 207 )...( 222 ): >Q9NZH0
LGLALFTLCGKFKRWK

SEQ ID NO: 17839 - protein, 16 aa, Homo sapiens
  ( 208 )...( 223 ): >Q9NZH0
GLALFTLCGKFKRWKL

SEQ ID NO: 17840 - protein, 16 aa, Homo sapiens
  ( 209 )...( 224 ): >Q9NZH0
LALFTLCGKFKRWKLN

SEQ ID NO: 17841 - protein, 16 aa, Homo sapiens
  ( 216 )...( 231 ): >Q9NZH0
GKFKRWKLNGAFLLIT

SEQ ID NO: 17842 - protein, 16 aa, Homo sapiens
  ( 217 )...( 232 ): >Q9NZH0
KFKRWKLNGAFLLITA

SEQ ID NO: 17843 - protein, 16 aa, Homo sapiens
  ( 48 )...( 63 ): >Q9NRB8
NSLVIAAVIKNRKFHF

SEQ ID NO: 17844 - protein, 16 aa, Homo sapiens
  ( 49 )...( 64 ): >Q9NRB8
SLVIAAVIKNRKFHFP

SEQ ID NO: 17845 - protein, 16 aa, Homo sapiens
  ( 90 )...( 105 ): >Q9NRB8
TGPVSKTLTVNRWFLR

SEQ ID NO: 17846 - protein, 16 aa, Homo sapiens
  ( 91 )...( 106 ): >Q9NRB8
GPVSKTLTVNRWFLRQ

SEQ ID NO: 17847 - protein, 16 aa, Homo sapiens
  ( 92 )...( 107 ): >Q9NRB8
PVSKTLTVNRWFLRQG

SEQ ID NO: 17848 - protein, 16 aa, Homo sapiens
  ( 93 )...( 108 ): >Q9NRB8
VSKTLTVNRWFLRQGL

SEQ ID NO: 17849 - protein, 16 aa, Homo sapiens
  ( 94 )...( 109 ): >Q9NRB8
SKTLTVNRWFLRQGLL

SEQ ID NO: 17850 - protein, 16 aa, Homo sapiens
  ( 130 )...( 145 ): >Q9NRB8
SIMRMRVHSNLTKKRV

SEQ ID NO: 17851 - protein, 16 aa, Homo sapiens
  ( 131 )...( 146 ): >Q9NRB8
IMRMRVHSNLTKKRVT

SEQ ID NO: 17852 - protein, 16 aa, Homo sapiens
  ( 132 )...( 147 ): >Q9NRB8
MRMRVHSNLTKKRVTL

SEQ ID NO: 17853 - protein, 16 aa, Homo sapiens
  ( 133 )...( 148 ): >Q9NRB8
RMRVHSNLTKKRVTLL

SEQ ID NO: 17854 - protein, 16 aa, Homo sapiens
  ( 134 )...( 149 ): >Q9NRB8
MRVHSNLTKKRVTLLI

SEQ ID NO: 17855 - protein, 16 aa, Homo sapiens
  ( 135 )...( 150 ): >Q9NRB8
RVHSNLTKKRVTLLIL

SEQ ID NO: 17856 - protein, 16 aa, Homo sapiens
  ( 207 )...( 222 ): >Q9NRB8
LRIYVYVKRKTNVLSP

SEQ ID NO: 17857 - protein, 16 aa, Homo sapiens
  ( 222 )...( 237 ): >Q9NRB8
PHTSGSISRRRTPMKL

SEQ ID NO: 17858 - protein, 16 aa, Homo sapiens
  ( 223 )...( 238 ): >Q9NRB8
HTSGSISRRRTPMKLM

SEQ ID NO: 17859 - protein, 16 aa, Homo sapiens
  ( 224 )...( 239 ): >Q9NRB8
TSGSISRRRTPMKLMK

SEQ ID NO: 17860 - protein, 16 aa, Homo sapiens
  ( 225 )...( 240 ): >Q9NRB8
SGSISRRRTPMKLMKT

SEQ ID NO: 17861 - protein, 16 aa, Homo sapiens
  ( 226 )...( 241 ): >Q9NRB8
GSISRRRTPMKLMKTV

SEQ ID NO: 17862 - protein, 16 aa, Homo sapiens
  ( 227 )...( 242 ): >Q9NRB8
SISRRRTPMKLMKTVM

SEQ ID NO: 17863 - protein, 16 aa, Homo sapiens
  ( 228 )...( 243 ): >Q9NRB8
ISRRRTPMKLMKTVMT

SEQ ID NO: 17864 - protein, 16 aa, Homo sapiens
  ( 229 )...( 244 ): >Q9NRB8
SRRRTPMKLMKTVMTV

SEQ ID NO: 17865 - protein, 16 aa, Homo sapiens
  ( 230 )...( 245 ): >Q9NRB8
RRRTPMKLMKTVMTVL

SEQ ID NO: 17866 - protein, 16 aa, Homo sapiens
  ( 231 )...( 246 ): >Q9NRB8
RRTPMKLMKTVMTVLG

SEQ ID NO: 17867 - protein, 16 aa, Homo sapiens
  ( 232 )...( 247 ): >Q9NRB8
RTPMKLMKTVMTVLGA

SEQ ID NO: 17868 - protein, 16 aa, Homo sapiens
  ( 317 )...( 332 ): >Q9NRB8
LDRRPSRLPSTILSRS

SEQ ID NO: 17869 - protein, 16 aa, Homo sapiens
  ( 319 )...( 334 ): >Q9NRB8
RRPSRLPSTILSRSDT

SEQ ID NO: 17870 - protein, 16 aa, Homo sapiens
  ( 85 )...( 100 ): >Q9HB60
GNILVIVSFKVNKQLK

SEQ ID NO: 17871 - protein, 16 aa, Homo sapiens
  ( 168 )...( 183 ): >Q9HB60
FSITRPLTYRAKRTTK

SEQ ID NO: 17872 - protein, 16 aa, Homo sapiens
  ( 169 )...( 184 ): >Q9HB60
SITRPLTYRAKRTTKR

SEQ ID NO: 17873 - protein, 16 aa, Homo sapiens
  ( 170 )...( 185 ): >Q9HB60
ITRPLTYRAKRTTKRA

SEQ ID NO: 17874 - protein, 16 aa, Homo sapiens
  ( 171 )...( 186 ): >Q9HB60
TRPLTYRAKRTTKRAG

SEQ ID NO: 17875 - protein, 16 aa, Homo sapiens
  ( 172 )...( 187 ): >Q9HB60
RPLTYRAKRTTKRAGV

SEQ ID NO: 17876 - protein, 16 aa, Homo sapiens
  ( 173 )...( 188 ): >Q9HB60
PLTYRAKRTTKRAGVM

SEQ ID NO: 17877 - protein, 16 aa, Homo sapiens
  ( 174 )...( 189 ): >Q9HB60
LTYRAKRTTKRAGVMI

SEQ ID NO: 17878 - protein, 16 aa, Homo sapiens
  ( 175 )...( 190 ): >Q9HB60
TYRAKRTTKRAGVMIG

SEQ ID NO: 17879 - protein, 16 aa, Homo sapiens
  ( 176 )...( 191 ): >Q9HB60
YRAKRTTKRAGVMIGL

SEQ ID NO: 17880 - protein, 16 aa, Homo sapiens
  ( 177 )...( 192 ): >Q9HB60
RAKRTTKRAGVMIGLA

SEQ ID NO: 17881 - protein, 16 aa, Homo sapiens
  ( 178 )...( 193 ): >Q9HB60
AKRTTKRAGVMIGLAW

SEQ ID NO: 17882 - protein, 16 aa, Homo sapiens
  ( 179 )...( 194 ): >Q9HB60
KRTTKRAGVMIGLAWV

SEQ ID NO: 17883 - protein, 16 aa, Homo sapiens
  ( 180 )...( 195 ): >Q9HB60
RTTKRAGVMIGLAWVI

SEQ ID NO: 17884 - protein, 16 aa, Homo sapiens
  ( 141 )...( 156 ): >Q9BZK1
YNLKRTPRRIKAIIIT

SEQ ID NO: 17885 - protein, 16 aa, Homo sapiens
  ( 142 )...( 157 ): >Q9BZK1
NLKRTPRRIKAIIITV

SEQ ID NO: 17886 - protein, 16 aa, Homo sapiens
  ( 143 )...( 158 ): >Q9BZK1
LKRTPRRIKAIIITVW

SEQ ID NO: 17887 - protein, 16 aa, Homo sapiens
  ( 144 )...( 159 ): >Q9BZK1
KRTPRRIKAIIITVWV

SEQ ID NO: 17888 - protein, 16 aa, Homo sapiens
  ( 145 )...( 160 ): >Q9BZK1
RTPRRIKAIIITVWVI

SEQ ID NO: 17889 - protein, 16 aa, Homo sapiens
  ( 225 )...( 240 ): >Q9BZK1
RRTRVPPSRRGPDAVA

SEQ ID NO: 17890 - protein, 16 aa, Homo sapiens
  ( 304 )...( 319 ): >Q9BZK1
RPPGPRRPERGPRGKG

SEQ ID NO: 17891 - protein, 16 aa, Homo sapiens
  ( 306 )...( 321 ): >Q9BZK1
PGPRRPERGPRGKGKA

SEQ ID NO: 17892 - protein, 16 aa, Homo sapiens
  ( 310 )...( 325 ): >Q9BZK1
RPERGPRGKGKARASQ

SEQ ID NO: 17893 - protein, 16 aa, Homo sapiens
  ( 311 )...( 326 ): >Q9BZK1
PERGPRGKGKARASQV

SEQ ID NO: 17894 - protein, 16 aa, Homo sapiens
  ( 312 )...( 327 ): >Q9BZK1
ERGPRGKGKARASQVK

SEQ ID NO: 17895 - protein, 16 aa, Homo sapiens
  ( 313 )...( 328 ): >Q9BZK1
RGPRGKGKARASQVKP

SEQ ID NO: 17896 - protein, 16 aa, Homo sapiens
  ( 320 )...( 335 ): >Q9BZK1
KARASQVKPGDSLPRR

SEQ ID NO: 17897 - protein, 16 aa, Homo sapiens
  ( 350 )...( 365 ): >Q9BZK1
GEERVGAAKASRWRGR

SEQ ID NO: 17898 - protein, 16 aa, Homo sapiens
  ( 351 )...( 366 ): >Q9BZK1
EERVGAAKASRWRGRQ

SEQ ID NO: 17899 - protein, 16 aa, Homo sapiens
  ( 352 )...( 367 ): >Q9BZK1
ERVGAAKASRWRGRQN

SEQ ID NO: 17900 - protein, 16 aa, Homo sapiens
  ( 354 )...( 369 ): >Q9BZK1
VGAAKASRWRGRQNRE

SEQ ID NO: 17901 - protein, 16 aa, Homo sapiens
  ( 364 )...( 379 ): >Q9BZK1
GRQNREKRFTFVLAVV

SEQ ID NO: 17902 - protein, 16 aa, Homo sapiens
  ( 365 )...( 380 ): >Q9BZK1
RQNREKRFTFVLAVVI

SEQ ID NO: 17903 - protein, 15 aa, Homo sapiens
  ( 436 )...( 451 ): >Q9BZK1
AFKKILCRGDRKRIV

SEQ ID NO: 17904 - protein, 14 aa, Homo sapiens
  ( 437 )...( 452 ): >Q9BZK1
FKKILCRGDRKRIV

SEQ ID NO: 17905 - protein, 13 aa, Homo sapiens
  ( 438 )...( 453 ): >Q9BZK1
KKILCRGDRKRIV

SEQ ID NO: 17906 - protein, 12 aa, Homo sapiens
  ( 439 )...( 454 ): >Q9BZK1
KILCRGDRKRIV

SEQ ID NO: 17907 - protein, 16 aa, Homo sapiens
  ( 121 )...( 136 ): >Q9BZK0
NSKRTPRRIKCIILTV

SEQ ID NO: 17908 - protein, 16 aa, Homo sapiens
  ( 122 )...( 137 ): >Q9BZK0
SKRTPRRIKCIILTVW

SEQ ID NO: 17909 - protein, 16 aa, Homo sapiens
  ( 123 )...( 138 ): >Q9BZK0
KRTPRRIKCIILTVWL

SEQ ID NO: 17910 - protein, 16 aa, Homo sapiens
  ( 189 )...( 204 ): >Q9BZK0
ILVYLRIYLIAKRSNR

SEQ ID NO: 17911 - protein, 16 aa, Homo sapiens
  ( 341 )...( 356 ): >Q9BZK0
LLGRGVGAIGGQWWRR

SEQ ID NO: 17912 - protein, 16 aa, Homo sapiens
  ( 342 )...( 357 ): >Q9BZK0
LGRGVGAIGGQWWRRR

SEQ ID NO: 17913 - protein, 16 aa, Homo sapiens
  ( 343 )...( 358 ): >Q9BZK0
GRGVGAIGGQWWRRRA

SEQ ID NO: 17914 - protein, 16 aa, Homo sapiens
  ( 344 )...( 359 ): >Q9BZK0
RGVGAIGGQWWRRRAQ

SEQ ID NO: 17915 - protein, 16 aa, Homo sapiens
  ( 345 )...( 360 ): >Q9BZK0
GVGAIGGQWWRRRAQL

SEQ ID NO: 17916 - protein, 16 aa, Homo sapiens
  ( 346 )...( 361 ): >Q9BZK0
VGAIGGQWWRRRAQLT

SEQ ID NO: 17917 - protein, 16 aa, Homo sapiens
  ( 347 )...( 362 ): >Q9BZK0
GAIGGQWWRRRAQLTR

SEQ ID NO: 17918 - protein, 16 aa, Homo sapiens
  ( 357 )...( 372 ): >Q9BZK0
RAQLTREKRFTFVLAV

SEQ ID NO: 17919 - protein, 16 aa, Homo sapiens
  ( 204 )...( 219 ): >Q9BXA5
YKIALFLKQRNRQVAT

SEQ ID NO: 17920 - protein, 16 aa, Homo sapiens
  ( 205 )...( 220 ): >Q9BXA5
KIALFLKQRNRQVATA

SEQ ID NO: 17921 - protein, 16 aa, Homo sapiens
  ( 206 )...( 221 ): >Q9BXA5
IALFLKQRNRQVATAL

SEQ ID NO: 17922 - protein, 16 aa, Homo sapiens
  ( 207 )...( 222 ): >Q9BXA5
ALFLKQRNRQVATALP

SEQ ID NO: 17923 - protein, 16 aa, Homo sapiens
  ( 208 )...( 223 ): >Q9BXA5
LFLKQRNRQVATALPL

SEQ ID NO: 17924 - protein, 16 aa, Homo sapiens
  ( 210 )...( 225 ): >Q9BXA5
LKQRNRQVATALPLEK

SEQ ID NO: 17925 - protein, 16 aa, Homo sapiens
  ( 211 )...( 226 ): >Q9BXA5
KQRNRQVATALPLEKP

SEQ ID NO: 17926 - protein, 16 aa, Homo sapiens
  ( 242 )...( 257 ): >Q9BXA5
TPYHVMRNVRIASRLG

SEQ ID NO: 17927 - protein, 16 aa, Homo sapiens
  ( 243 )...( 258 ): >Q9BXA5
PYHVMRNVRIASRLGS

SEQ ID NO: 17928 - protein, 16 aa, Homo sapiens
  ( 245 )...( 260 ): >Q9BXA5
HVMRNVRIASRLGSWK

SEQ ID NO: 17929 - protein, 16 aa, Homo sapiens
  ( 246 )...( 261 ): >Q9BXA5
VMRNVRIASRLGSWKQ

SEQ ID NO: 17930 - protein, 16 aa, Homo sapiens
  ( 250 )...( 265 ): >Q9BXA5
VRIASRLGSWKQYQCT

SEQ ID NO: 17931 - protein, 16 aa, Homo sapiens
  ( 251 )...( 266 ): >Q9BXA5
RIASRLGSWKQYQCTQ

SEQ ID NO: 17932 - protein, 16 aa, Homo sapiens
  ( 55 )...( 70 ): >Q9BXA0
GNGLVILVMGYQKKLR

SEQ ID NO: 17933 - protein, 16 aa, Homo sapiens
  ( 56 )...( 71 ): >Q9BXA0
NGLVILVMGYQKKLRS

SEQ ID NO: 17934 - protein, 16 aa, Homo sapiens
  ( 57 )...( 72 ): >Q9BXA0
GLVILVMGYQKKLRSM

SEQ ID NO: 17935 - protein, 16 aa, Homo sapiens
  ( 58 )...( 73 ): >Q9BXA0
LVILVMGYQKKLRSMT

SEQ ID NO: 17936 - protein, 16 aa, Homo sapiens
  ( 60 )...( 75 ): >Q9BXA0
ILVMGYQKKLRSMTDK

SEQ ID NO: 17937 - protein, 16 aa, Homo sapiens
  ( 61 )...( 76 ): >Q9BXA0
LVMGYQKKLRSMTDKY

SEQ ID NO: 17938 - protein, 16 aa, Homo sapiens
  ( 135 )...( 150 ): >Q9BXA0
YLAIVHATNSQRPRKL

SEQ ID NO: 17939 - protein, 16 aa, Homo sapiens
  ( 136 )...( 151 ): >Q9BXA0
LAIVHATNSQRPRKLL

SEQ ID NO: 17940 - protein, 16 aa, Homo sapiens
  ( 137 )...( 152 ): >Q9BXA0
AIVHATNSQRPRKLLA

SEQ ID NO: 17941 - protein, 16 aa, Homo sapiens
  ( 139 )...( 154 ): >Q9BXA0
VHATNSQRPRKLLAEK

SEQ ID NO: 17942 - protein, 16 aa, Homo sapiens
  ( 140 )...( 155 ): >Q9BXA0
HATNSQRPRKLLAEKV

SEQ ID NO: 17943 - protein, 16 aa, Homo sapiens
  ( 141 )...( 156 ): >Q9BXA0
ATNSQRPRKLLAEKVV

SEQ ID NO: 17944 - protein, 16 aa, Homo sapiens
  ( 142 )...( 157 ): >Q9BXA0
TNSQRPRKLLAEKVVY

SEQ ID NO: 17945 - protein, 16 aa, Homo sapiens
  ( 143 )...( 158 ): >Q9BXA0
NSQRPRKLLAEKVVYV

SEQ ID NO: 17946 - protein, 16 aa, Homo sapiens
  ( 144 )...( 159 ): >Q9BXA0
SQRPRKLLAEKVVYVG

SEQ ID NO: 17947 - protein, 16 aa, Homo sapiens
  ( 145 )...( 160 ): >Q9BXA0
QRPRKLLAEKVVYVGV

SEQ ID NO: 17948 - protein, 16 aa, Homo sapiens
  ( 146 )...( 161 ): >Q9BXA0
RPRKLLAEKVVYVGVW

SEQ ID NO: 17949 - protein, 16 aa, Homo sapiens
  ( 221 )...( 236 ): >Q9BXA0
IIISKLSHSKGHQKRK

SEQ ID NO: 17950 - protein, 16 aa, Homo sapiens
  ( 222 )...( 237 ): >Q9BXA0
IISKLSHSKGHQKRKA

SEQ ID NO: 17951 - protein, 16 aa, Homo sapiens
  ( 223 )...( 238 ): >Q9BXA0
ISKLSHSKGHQKRKAL

SEQ ID NO: 17952 - protein, 16 aa, Homo sapiens
  ( 224 )...( 239 ): >Q9BXA0
SKLSHSKGHQKRKALK

SEQ ID NO: 17953 - protein, 16 aa, Homo sapiens
  ( 225 )...( 240 ): >Q9BXA0
KLSHSKGHQKRKALKT

SEQ ID NO: 17954 - protein, 16 aa, Homo sapiens
  ( 226 )...( 241 ): >Q9BXA0
LSHSKGHQKRKALKTT

SEQ ID NO: 17955 - protein, 16 aa, Homo sapiens
  ( 227 )...( 242 ): >Q9BXA0
SHSKGHQKRKALKTTI

SEQ ID NO: 17956 - protein, 16 aa, Homo sapiens
  ( 228 )...( 243 ): >Q9BXA0
HSKGHQKRKALKTTII

SEQ ID NO: 17957 - protein, 16 aa, Homo sapiens
  ( 229 )...( 244 ): >Q9BXA0
SKGHQKRKALKTTIIP

SEQ ID NO: 17958 - protein, 16 aa, Homo sapiens
  ( 230 )...( 245 ): >Q9BXA0
KGHQKRKALKTTIIPI

SEQ ID NO: 17959 - protein, 16 aa, Homo sapiens
  ( 231 )...( 246 ): >Q9BXA0
GHQKRKALKTTIIPIL

SEQ ID NO: 17960 - protein, 16 aa, Homo sapiens
  ( 232 )...( 247 ): >Q9BXA0
HQKRKALKTTIIPILA

SEQ ID NO: 17961 - protein, 16 aa, Homo sapiens
  ( 233 )...( 248 ): >Q9BXA0
QKRKALKTTIIPILAF

SEQ ID NO: 17962 - protein, 16 aa, Homo sapiens
  ( 319 )...( 334 ): >Q9BXA0
SVSRGSSLKILSKGKR

SEQ ID NO: 17963 - protein, 16 aa, Homo sapiens
  ( 320 )...( 335 ): >Q9BXA0
VSRGSSLKILSKGKRG

SEQ ID NO: 17964 - protein, 16 aa, Homo sapiens
  ( 322 )...( 337 ): >Q9BXA0
RGSSLKILSKGKRGGH

SEQ ID NO: 17965 - protein, 16 aa, Homo sapiens
  ( 14 )...( 29 ): >Q9NTT0
MTKTRTFFAAKIVIGI

SEQ ID NO: 17966 - protein, 16 aa, Homo sapiens
  ( 15 )...( 30 ): >Q9NTT0
TKTRTFFAAKIVIGIA

SEQ ID NO: 17967 - protein, 16 aa, Homo sapiens
  ( 16 )...( 31 ): >Q9NTT0
KTRTFFAAKIVIGIAL

SEQ ID NO: 17968 - protein, 16 aa, Homo sapiens
  ( 39 )...( 54 ): >Q9NTT0
GIGNFVFIAALTRYKK

SEQ ID NO: 17969 - protein, 16 aa, Homo sapiens
  ( 40 )...( 55 ): >Q9NTT0
IGNFVFIAALTRYKKL

SEQ ID NO: 17970 - protein, 16 aa, Homo sapiens
  ( 41 )...( 56 ): >Q9NTT0
GNFVFIAALTRYKKLR

SEQ ID NO: 17971 - protein, 16 aa, Homo sapiens
  ( 43 )...( 58 ): >Q9NTT0
FVFIAALTRYKKLRNL

SEQ ID NO: 17972 - protein, 16 aa, Homo sapiens
  ( 44 )...( 59 ): >Q9NTT0
VFIAALTRYKKLRNLT

SEQ ID NO: 17973 - protein, 16 aa, Homo sapiens
  ( 45 )...( 60 ): >Q9NTT0
FIAALTRYKKLRNLTN

SEQ ID NO: 17974 - protein, 16 aa, Homo sapiens
  ( 46 )...( 61 ): >Q9NTT0
IAALTRYKKLRNLTNL

SEQ ID NO: 17975 - protein, 16 aa, Homo sapiens
  ( 47 )...( 62 ): >Q9NTT0
AALTRYKKLRNLTNLL

SEQ ID NO: 17976 - protein, 16 aa, Homo sapiens
  ( 48 )...( 63 ): >Q9NTT0
ALTRYKKLRNLTNLLI

SEQ ID NO: 17977 - protein, 16 aa, Homo sapiens
  ( 49 )...( 64 ): >Q9NTT0
LTRYKKLRNLTNLLIA

SEQ ID NO: 17978 - protein, 16 aa, Homo sapiens
  ( 52 )...( 67 ): >Q9NTT0
YKKLRNLTNLLIANLA

SEQ ID NO: 17979 - protein, 16 aa, Homo sapiens
  ( 53 )...( 68 ): >Q9NTT0
KKLRNLTNLLIANLAI

SEQ ID NO: 17980 - protein, 16 aa, Homo sapiens
  ( 223 )...( 238 ): >Q9NTT0
FKAVPGFQTEQIRKRL

SEQ ID NO: 17981 - protein, 16 aa, Homo sapiens
  ( 224 )...( 239 ): >Q9NTT0
KAVPGFQTEQIRKRLR

SEQ ID NO: 17982 - protein, 16 aa, Homo sapiens
  ( 225 )...( 240 ): >Q9NTT0
AVPGFQTEQIRKRLRC

SEQ ID NO: 17983 - protein, 16 aa, Homo sapiens
  ( 237 )...( 252 ): >Q9NTT0
RLRCRRKTVLVLMCIL

SEQ ID NO: 17984 - protein, 16 aa, Homo sapiens
  ( 238 )...( 253 ): >Q9NTT0
LRCRRKTVLVLMCILT

SEQ ID NO: 17985 - protein, 16 aa, Homo sapiens
  ( 239 )...( 254 ): >Q9NTT0
RCRRKTVLVLMCILTA

SEQ ID NO: 17986 - protein, 16 aa, Homo sapiens
  ( 240 )...( 255 ): >Q9NTT0
CRRKTVLVLMCILTAY

SEQ ID NO: 17987 - protein, 16 aa, Homo sapiens
  ( 305 )...( 320 ): >Q9NTT0
VTVKNNTMKYFKKMML

SEQ ID NO: 17988 - protein, 16 aa, Homo sapiens
  ( 9 )...( 24 ): >Q9H573
LRLTLLSVSARTGFCK

SEQ ID NO: 17989 - protein, 16 aa, Homo sapiens
  ( 10 )...( 25 ): >Q9H573
RLTLLSVSARTGFCKK

SEQ ID NO: 17990 - protein, 16 aa, Homo sapiens
  ( 29 )...( 44 ): >Q9H573
LWQRRKEAAEALGTRK

SEQ ID NO: 17991 - protein, 16 aa, Homo sapiens
  ( 30 )...( 45 ): >Q9H573
WQRRKEAAEALGTRKV

SEQ ID NO: 17992 - protein, 16 aa, Homo sapiens
  ( 31 )...( 46 ): >Q9H573
QRRKEAAEALGTRKVS

SEQ ID NO: 17993 - protein, 16 aa, Homo sapiens
  ( 32 )...( 47 ): >Q9H573
RRKEAAEALGTRKVSV

SEQ ID NO: 17994 - protein, 16 aa, Homo sapiens
  ( 149 )...( 164 ): >Q9H573
GNFLVMYVIVRYTKMK

SEQ ID NO: 17995 - protein, 16 aa, Homo sapiens
  ( 152 )...( 167 ): >Q9H573
LVMYVIVRYTKMKTAT

SEQ ID NO: 17996 - protein, 16 aa, Homo sapiens
  ( 153 )...( 168 ): >Q9H573
VMYVIVRYTKMKTATN

SEQ ID NO: 17997 - protein, 16 aa, Homo sapiens
  ( 154 )...( 169 ): >Q9H573
MYVIVRYTKMKTATNI

SEQ ID NO: 17998 - protein, 16 aa, Homo sapiens
  ( 155 )...( 170 ): >Q9H573
YVIVRYTKMKTATNIY

SEQ ID NO: 17999 - protein, 16 aa, Homo sapiens
  ( 156 )...( 171 ): >Q9H573
VIVRYTKMKTATNIYI

SEQ ID NO: 18000 - protein, 16 aa, Homo sapiens
  ( 157 )...( 172 ): >Q9H573
IVRYTKMKTATNIYIF

SEQ ID NO: 18001 - protein, 16 aa, Homo sapiens
  ( 158 )...( 173 ): >Q9H573
VRYTKMKTATNIYIFN

SEQ ID NO: 18002 - protein, 16 aa, Homo sapiens
  ( 236 )...( 251 ): >Q9H573
PVKALDFRTPRNAKII

SEQ ID NO: 18003 - protein, 16 aa, Homo sapiens
  ( 237 )...( 252 ): >Q9H573
VKALDFRTPRNAKIIN

SEQ ID NO: 18004 - protein, 16 aa, Homo sapiens
  ( 238 )...( 253 ): >Q9H573
KALDFRTPRNAKIINV

SEQ ID NO: 18005 - protein, 16 aa, Homo sapiens
  ( 243 )...( 258 ): >Q9H573
RTPRNAKIINVCNWIL

SEQ ID NO: 18006 - protein, 16 aa, Homo sapiens
  ( 312 )...( 327 ): >Q9H573
ITVCYGLMILRLKSVR

SEQ ID NO: 18007 - protein, 16 aa, Homo sapiens
  ( 313 )...( 328 ): >Q9H573
TVCYGLMILRLKSVRM

SEQ ID NO: 18008 - protein, 16 aa, Homo sapiens
  ( 315 )...( 330 ): >Q9H573
CYGLMILRLKSVRMLS

SEQ ID NO: 18009 - protein, 16 aa, Homo sapiens
  ( 316 )...( 331 ): >Q9H573
YGLMILRLKSVRMLSG

SEQ ID NO: 18010 - protein, 16 aa, Homo sapiens
  ( 317 )...( 332 ): >Q9H573
GLMILRLKSVRMLSGS

SEQ ID NO: 18011 - protein, 16 aa, Homo sapiens
  ( 318 )...( 333 ): >Q9H573
LMILRLKSVRMLSGSK

SEQ ID NO: 18012 - protein, 16 aa, Homo sapiens
  ( 319 )...( 334 ): >Q9H573
MILRLKSVRMLSGSKE

SEQ ID NO: 18013 - protein, 16 aa, Homo sapiens
  ( 320 )...( 335 ): >Q9H573
ILRLKSVRMLSGSKEK

SEQ ID NO: 18014 - protein, 16 aa, Homo sapiens
  ( 321 )...( 336 ): >Q9H573
LRLKSVRMLSGSKEKD

SEQ ID NO: 18015 - protein, 16 aa, Homo sapiens
  ( 322 )...( 337 ): >Q9H573
RLKSVRMLSGSKEKDR

SEQ ID NO: 18016 - protein, 16 aa, Homo sapiens
  ( 323 )...( 338 ): >Q9H573
LKSVRMLSGSKEKDRN

SEQ ID NO: 18017 - protein, 16 aa, Homo sapiens
  ( 324 )...( 339 ): >Q9H573
KSVRMLSGSKEKDRNL

SEQ ID NO: 18018 - protein, 16 aa, Homo sapiens
  ( 325 )...( 340 ): >Q9H573
SVRMLSGSKEKDRNLR

SEQ ID NO: 18019 - protein, 16 aa, Homo sapiens
  ( 328 )...( 343 ): >Q9H573
MLSGSKEKDRNLRRIT

SEQ ID NO: 18020 - protein, 16 aa, Homo sapiens
  ( 334 )...( 349 ): >Q9H573
EKDRNLRRITRMVLVV

SEQ ID NO: 18021 - protein, 16 aa, Homo sapiens
  ( 335 )...( 350 ): >Q9H573
KDRNLRRITRMVLVVV

SEQ ID NO: 18022 - protein, 16 aa, Homo sapiens
  ( 336 )...( 351 ): >Q9H573
DRNLRRITRMVLVVVA

SEQ ID NO: 18023 - protein, 16 aa, Homo sapiens
  ( 337 )...( 352 ): >Q9H573
RNLRRITRMVLVVVAV

SEQ ID NO: 18024 - protein, 16 aa, Homo sapiens
  ( 194 )...( 209 ): >Q9H1N4
RYVGVRHSLKYPAIMT

SEQ ID NO: 18025 - protein, 16 aa, Homo sapiens
  ( 197 )...( 212 ): >Q9H1N4
GVRHSLKYPAIMTERK

SEQ ID NO: 18026 - protein, 16 aa, Homo sapiens
  ( 198 )...( 213 ): >Q9H1N4
VRHSLKYPAIMTERKA

SEQ ID NO: 18027 - protein, 16 aa, Homo sapiens
  ( 199 )...( 214 ): >Q9H1N4
RHSLKYPAIMTERKAA

SEQ ID NO: 18028 - protein, 16 aa, Homo sapiens
  ( 271 )...( 286 ): >Q9H1N4
VVMYCRVYVVARSTTR

SEQ ID NO: 18029 - protein, 16 aa, Homo sapiens
  ( 272 )...( 287 ): >Q9H1N4
VMYCRVYVVARSTTRS

SEQ ID NO: 18030 - protein, 16 aa, Homo sapiens
  ( 273 )...( 288 ): >Q9H1N4
MYCRVYVVARSTTRSL

SEQ ID NO: 18031 - protein, 16 aa, Homo sapiens
  ( 279 )...( 294 ): >Q9H1N4
VVARSTTRSLEAGVKR

SEQ ID NO: 18032 - protein, 16 aa, Homo sapiens
  ( 281 )...( 296 ): >Q9H1N4
ARSTTRSLEAGVKRER

SEQ ID NO: 18033 - protein, 16 aa, Homo sapiens
  ( 282 )...( 297 ): >Q9H1N4
RSTTRSLEAGVKRERG

SEQ ID NO: 18034 - protein, 16 aa, Homo sapiens
  ( 283 )...( 298 ): >Q9H1N4
STTRSLEAGVKRERGK

SEQ ID NO: 18035 - protein, 16 aa, Homo sapiens
  ( 284 )...( 299 ): >Q9H1N4
TTRSLEAGVKRERGKA

SEQ ID NO: 18036 - protein, 16 aa, Homo sapiens
  ( 285 )...( 300 ): >Q9H1N4
TRSLEAGVKRERGKAS

SEQ ID NO: 18037 - protein, 16 aa, Homo sapiens
  ( 290 )...( 305 ): >Q9H1N4
AGVKRERGKASEVVLR

SEQ ID NO: 18038 - protein, 16 aa, Homo sapiens
  ( 291 )...( 306 ): >Q9H1N4
GVKRERGKASEVVLRI

SEQ ID NO: 18039 - protein, 16 aa, Homo sapiens
  ( 292 )...( 307 ): >Q9H1N4
VKRERGKASEVVLRIH

SEQ ID NO: 18040 - protein, 16 aa, Homo sapiens
  ( 293 )...( 308 ): >Q9H1N4
KRERGKASEVVLRIHC

SEQ ID NO: 18041 - protein, 16 aa, Homo sapiens
  ( 294 )...( 309 ): >Q9H1N4
RERGKASEVVLRIHCR

SEQ ID NO: 18042 - protein, 16 aa, Homo sapiens
  ( 296 )...( 311 ): >Q9H1N4
RGKASEVVLRIHCRGA

SEQ ID NO: 18043 - protein, 16 aa, Homo sapiens
  ( 321 )...( 336 ): >Q9H1N4
MRSAKGHTFRSSLSVR

SEQ ID NO: 18044 - protein, 16 aa, Homo sapiens
  ( 322 )...( 337 ): >Q9H1N4
RSAKGHTFRSSLSVRL

SEQ ID NO: 18045 - protein, 16 aa, Homo sapiens
  ( 324 )...( 339 ): >Q9H1N4
AKGHTFRSSLSVRLLK

SEQ ID NO: 18046 - protein, 16 aa, Homo sapiens
  ( 325 )...( 340 ): >Q9H1N4
KGHTFRSSLSVRLLKF

SEQ ID NO: 18047 - protein, 16 aa, Homo sapiens
  ( 328 )...( 343 ): >Q9H1N4
TFRSSLSVRLLKFSRE

SEQ ID NO: 18048 - protein, 16 aa, Homo sapiens
  ( 331 )...( 346 ): >Q9H1N4
SSLSVRLLKFSREKKA

SEQ ID NO: 18049 - protein, 16 aa, Homo sapiens
  ( 332 )...( 347 ): >Q9H1N4
SLSVRLLKFSREKKAA

SEQ ID NO: 18050 - protein, 16 aa, Homo sapiens
  ( 333 )...( 348 ): >Q9H1N4
LSVRLLKFSREKKAAK

SEQ ID NO: 18051 - protein, 16 aa, Homo sapiens
  ( 334 )...( 349 ): >Q9H1N4
SVRLLKFSREKKAAKT

SEQ ID NO: 18052 - protein, 16 aa, Homo sapiens
  ( 335 )...( 350 ): >Q9H1N4
VRLLKFSREKKAAKTL

SEQ ID NO: 18053 - protein, 16 aa, Homo sapiens
  ( 336 )...( 351 ): >Q9H1N4
RLLKFSREKKAAKTLA

SEQ ID NO: 18054 - protein, 16 aa, Homo sapiens
  ( 337 )...( 352 ): >Q9H1N4
LLKFSREKKAAKTLAI

SEQ ID NO: 18055 - protein, 16 aa, Homo sapiens
  ( 338 )...( 353 ): >Q9H1N4
LKFSREKKAAKTLAIV

SEQ ID NO: 18056 - protein, 16 aa, Homo sapiens
  ( 339 )...( 354 ): >Q9H1N4
KFSREKKAAKTLAIVV

SEQ ID NO: 18057 - protein, 16 aa, Homo sapiens
  ( 340 )...( 355 ): >Q9H1N4
FSREKKAAKTLAIVVG

SEQ ID NO: 18058 - protein, 16 aa, Homo sapiens
  ( 342 )...( 357 ): >Q9H1N4
REKKAAKTLAIVVGVF

SEQ ID NO: 18059 - protein, 16 aa, Homo sapiens
  ( 87 )...( 102 ): >Q9BYZ0
PFKYQSLLTKNKARVI

SEQ ID NO: 18060 - protein, 16 aa, Homo sapiens
  ( 88 )...( 103 ): >Q9BYZ0
FKYQSLLTKNKARVII

SEQ ID NO: 18061 - protein, 16 aa, Homo sapiens
  ( 89 )...( 104 ): >Q9BYZ0
KYQSLLTKNKARVIIL

SEQ ID NO: 18062 - protein, 16 aa, Homo sapiens
  ( 90 )...( 105 ): >Q9BYZ0
YQSLLTKNKARVIILM

SEQ ID NO: 18063 - protein, 16 aa, Homo sapiens
  ( 91 )...( 106 ): >Q9BYZ0
QSLLTKNKARVIILMV

SEQ ID NO: 18064 - protein, 16 aa, Homo sapiens
  ( 95 )...( 110 ): >Q9BYZ0
TKNKARVIILMVWIVS

SEQ ID NO: 18065 - protein, 16 aa, Homo sapiens
  ( 96 )...( 111 ): >Q9BYZ0
KNKARVIILMVWIVSG

SEQ ID NO: 18066 - protein, 16 aa, Homo sapiens
  ( 201 )...( 216 ): >Q9BYZ0
GRTGHGLRRSSKFCLK

SEQ ID NO: 18067 - protein, 16 aa, Homo sapiens
  ( 202 )...( 217 ): >Q9BYZ0
RTGHGLRRSSKFCLKE

SEQ ID NO: 18068 - protein, 16 aa, Homo sapiens
  ( 204 )...( 219 ): >Q9BYZ0
GHGLRRSSKFCLKEHK

SEQ ID NO: 18069 - protein, 16 aa, Homo sapiens
  ( 206 )...( 221 ): >Q9BYZ0
GLRRSSKFCLKEHKAL

SEQ ID NO: 18070 - protein, 16 aa, Homo sapiens
  ( 209 )...( 224 ): >Q9BYZ0
RSSKFCLKEHKALKTL

SEQ ID NO: 18071 - protein, 16 aa, Homo sapiens
  ( 127 )...( 142 ): >Q13729
GVSYPLRYPTIVTQRR

SEQ ID NO: 18072 - protein, 16 aa, Homo sapiens
  ( 128 )...( 143 ): >Q13729
VSYPLRYPTIVTQRRG

SEQ ID NO: 18073 - protein, 16 aa, Homo sapiens
  ( 129 )...( 144 ): >Q13729
SYPLRYPTIVTQRRGL

SEQ ID NO: 18074 - protein, 16 aa, Homo sapiens
  ( 130 )...( 145 ): >Q13729
YPLRYPTIVTQRRGLM

SEQ ID NO: 18075 - protein, 16 aa, Homo sapiens
  ( 131 )...( 146 ): >Q13729
PLRYPTIVTQRRGLMA

SEQ ID NO: 18076 - protein, 16 aa, Homo sapiens
  ( 132 )...( 147 ): >Q13729
LRYPTIVTQRRGLMAL

SEQ ID NO: 18077 - protein, 16 aa, Homo sapiens
  ( 133 )...( 148 ): >Q13729
RYPTIVTQRRGLMALL

SEQ ID NO: 18078 - protein, 16 aa, Homo sapiens
  ( 201 )...( 216 ): >Q13729
LVMYCRVYVVAKRESR

SEQ ID NO: 18079 - protein, 16 aa, Homo sapiens
  ( 202 )...( 217 ): >Q13729
VMYCRVYVVAKRESRG

SEQ ID NO: 18080 - protein, 16 aa, Homo sapiens
  ( 203 )...( 218 ): >Q13729
MYCRVYVVAKRESRGL

SEQ ID NO: 18081 - protein, 16 aa, Homo sapiens
  ( 204 )...( 219 ): >Q13729
YCRVYVVAKRESRGLK

SEQ ID NO: 18082 - protein, 16 aa, Homo sapiens
  ( 205 )...( 220 ): >Q13729
CRVYVVAKRESRGLKS

SEQ ID NO: 18083 - protein, 16 aa, Homo sapiens
  ( 206 )...( 221 ): >Q13729
RVYVVAKRESRGLKSG

SEQ ID NO: 18084 - protein, 16 aa, Homo sapiens
  ( 207 )...( 222 ): >Q13729
VYVVAKRESRGLKSGL

SEQ ID NO: 18085 - protein, 16 aa, Homo sapiens
  ( 208 )...( 223 ): >Q13729
YVVAKRESRGLKSGLK

SEQ ID NO: 18086 - protein, 16 aa, Homo sapiens
  ( 209 )...( 224 ): >Q13729
VVAKRESRGLKSGLKT

SEQ ID NO: 18087 - protein, 16 aa, Homo sapiens
  ( 210 )...( 225 ): >Q13729
VAKRESRGLKSGLKTD

SEQ ID NO: 18088 - protein, 16 aa, Homo sapiens
  ( 211 )...( 226 ): >Q13729
AKRESRGLKSGLKTDK

SEQ ID NO: 18089 - protein, 16 aa, Homo sapiens
  ( 212 )...( 227 ): >Q13729
KRESRGLKSGLKTDKS

SEQ ID NO: 18090 - protein, 16 aa, Homo sapiens
  ( 231 )...( 246 ): >Q13729
QVTLRIHRKNAPAGGS

SEQ ID NO: 18091 - protein, 16 aa, Homo sapiens
  ( 248 )...( 263 ): >Q13729
MASAKTKTHFSVRLLK

SEQ ID NO: 18092 - protein, 16 aa, Homo sapiens
  ( 249 )...( 264 ): >Q13729
ASAKTKTHFSVRLLKF

SEQ ID NO: 18093 - protein, 16 aa, Homo sapiens
  ( 251 )...( 266 ): >Q13729
AKTKTHFSVRLLKFSR

SEQ ID NO: 18094 - protein, 16 aa, Homo sapiens
  ( 258 )...( 273 ): >Q13729
SVRLLKFSREKKAAKT

SEQ ID NO: 18095 - protein, 16 aa, Homo sapiens
  ( 259 )...( 274 ): >Q13729
VRLLKFSREKKAAKTL

SEQ ID NO: 18096 - protein, 16 aa, Homo sapiens
  ( 260 )...( 275 ): >Q13729
RLLKFSREKKAAKTLG

SEQ ID NO: 18097 - protein, 16 aa, Homo sapiens
  ( 261 )...( 276 ): >Q13729
LLKFSREKKAAKTLGI

SEQ ID NO: 18098 - protein, 16 aa, Homo sapiens
  ( 262 )...( 277 ): >Q13729
LKFSREKKAAKTLGIV

SEQ ID NO: 18099 - protein, 16 aa, Homo sapiens
  ( 263 )...( 278 ): >Q13729
KFSREKKAAKTLGIVV

SEQ ID NO: 18100 - protein, 16 aa, Homo sapiens
  ( 264 )...( 279 ): >Q13729
FSREKKAAKTLGIVVG

SEQ ID NO: 18101 - protein, 16 aa, Homo sapiens
  ( 266 )...( 281 ): >Q13729
REKKAAKTLGIVVGCF

SEQ ID NO: 18102 - protein, 16 aa, Homo sapiens
  ( 340 )...( 355 ): >Q13729
VLRIQCLRRKQSSKHA

SEQ ID NO: 18103 - protein, 16 aa, Homo sapiens
  ( 342 )...( 357 ): >Q13729
RIQCLRRKQSSKHALG

SEQ ID NO: 18104 - protein, 16 aa, Homo sapiens
  ( 343 )...( 358 ): >Q13729
IQCLRRKQSSKHALGY

SEQ ID NO: 18105 - protein, 16 aa, Homo sapiens
  ( 344 )...( 359 ): >Q13729
QCLRRKQSSKHALGYT

SEQ ID NO: 18106 - protein, 16 aa, Homo sapiens
  ( 345 )...( 360 ): >Q13729
CLRRKQSSKHALGYTL

SEQ ID NO: 18107 - protein, 16 aa, Homo sapiens
  ( 346 )...( 361 ): >Q13729
LRRKQSSKHALGYTLH

SEQ ID NO: 18108 - protein, 16 aa, Homo sapiens
  ( 375 )...( 390 ): >Q13729
VRIPVGSRETFYRISK

SEQ ID NO: 18109 - protein, 16 aa, Homo sapiens
  ( 376 )...( 391 ): >Q13729
RIPVGSRETFYRISKT

SEQ ID NO: 18110 - protein, 16 aa, Homo sapiens
  ( 99 )...( 114 ): >Q9NSD7
NLLVLYLMKSMQGWRK

SEQ ID NO: 18111 - protein, 16 aa, Homo sapiens
  ( 100 )...( 115 ): >Q9NSD7
LLVLYLMKSMQGWRKS

SEQ ID NO: 18112 - protein, 16 aa, Homo sapiens
  ( 101 )...( 116 ): >Q9NSD7
LVLYLMKSMQGWRKSS

SEQ ID NO: 18113 - protein, 16 aa, Homo sapiens
  ( 102 )...( 117 ): >Q9NSD7
VLYLMKSMQGWRKSSI

SEQ ID NO: 18114 - protein, 16 aa, Homo sapiens
  ( 107 )...( 122 ): >Q9NSD7
KSMQGWRKSSINLFVT

SEQ ID NO: 18115 - protein, 16 aa, Homo sapiens
  ( 179 )...( 194 ): >Q9NSD7
TRYHSVASALKSHRTR

SEQ ID NO: 18116 - protein, 16 aa, Homo sapiens
  ( 180 )...( 195 ): >Q9NSD7
RYHSVASALKSHRTRG

SEQ ID NO: 18117 - protein, 16 aa, Homo sapiens
  ( 183 )...( 198 ): >Q9NSD7
SVASALKSHRTRGHGR

SEQ ID NO: 18118 - protein, 16 aa, Homo sapiens
  ( 184 )...( 199 ): >Q9NSD7
VASALKSHRTRGHGRG

SEQ ID NO: 18119 - protein, 16 aa, Homo sapiens
  ( 288 )...( 303 ): >Q9NSD7
LLLVRFIADRRAAGTK

SEQ ID NO: 18120 - protein, 16 aa, Homo sapiens
  ( 289 )...( 304 ): >Q9NSD7
LLVRFIADRRAAGTKG

SEQ ID NO: 18121 - protein, 16 aa, Homo sapiens
  ( 290 )...( 305 ): >Q9NSD7
LVRFIADRRAAGTKGG

SEQ ID NO: 18122 - protein, 16 aa, Homo sapiens
  ( 311 )...( 326 ): >Q9NSD7
GRPTGASARRLSKVTK

SEQ ID NO: 18123 - protein, 16 aa, Homo sapiens
  ( 312 )...( 327 ): >Q9NSD7
RPTGASARRLSKVTKS

SEQ ID NO: 18124 - protein, 16 aa, Homo sapiens
  ( 316 )...( 331 ): >Q9NSD7
ASARRLSKVTKSVTIV

SEQ ID NO: 18125 - protein, 16 aa, Homo sapiens
  ( 317 )...( 332 ): >Q9NSD7
SARRLSKVTKSVTIVV

SEQ ID NO: 18126 - protein, 16 aa, Homo sapiens
  ( 318 )...( 333 ): >Q9NSD7
ARRLSKVTKSVTIVVL

SEQ ID NO: 18127 - protein, 16 aa, Homo sapiens
  ( 319 )...( 334 ): >Q9NSD7
RRLSKVTKSVTIVVLS

SEQ ID NO: 18128 - protein, 16 aa, Homo sapiens
  ( 387 )...( 402 ): >Q9NSD7
VLYCLVRREFRKALKS

SEQ ID NO: 18129 - protein, 16 aa, Homo sapiens
  ( 396 )...( 411 ): >Q9NSD7
FRKALKSLLWRIASPS

SEQ ID NO: 18130 - protein, 16 aa, Homo sapiens
  ( 397 )...( 412 ): >Q9NSD7
RKALKSLLWRIASPSI

SEQ ID NO: 18131 - protein, 16 aa, Homo sapiens
  ( 398 )...( 413 ): >Q9NSD7
KALKSLLWRIASPSIT

SEQ ID NO: 18132 - protein, 16 aa, Homo sapiens
  ( 401 )...( 416 ): >Q9NSD7
KSLLWRIASPSITSMR

SEQ ID NO: 18133 - protein, 16 aa, Homo sapiens
  ( 121 )...( 136 ): >Q93003
RYIAIRIPLRYNGLVT

SEQ ID NO: 18134 - protein, 16 aa, Homo sapiens
  ( 124 )...( 139 ): >Q93003
AIRIPLRYNGLVTGTR

SEQ ID NO: 18135 - protein, 16 aa, Homo sapiens
  ( 125 )...( 140 ): >Q93003
IRIPLRYNGLVTGTRA

SEQ ID NO: 18136 - protein, 16 aa, Homo sapiens
  ( 126 )...( 141 ): >Q93003
RIPLRYNGLVTGTRAK

SEQ ID NO: 18137 - protein, 15 aa, Homo sapiens
  ( 127 )...( 142 ): >Q93003
IPLRYNGLVTGTRAK

SEQ ID NO: 18138 - protein, 14 aa, Homo sapiens
  ( 128 )...( 143 ): >Q93003
PLRYNGLVTGTRAK

SEQ ID NO: 18139 - protein, 16 aa, Homo sapiens
  ( 203 )...( 218 ): >Q13167
TVLVYARIYVVLKQRR

SEQ ID NO: 18140 - protein, 16 aa, Homo sapiens
  ( 221 )...( 236 ): >Q13167
RILTRQNSQCNSVRPG

SEQ ID NO: 18141 - protein, 16 aa, Homo sapiens
  ( 289 )...( 304 ): >Q13167
IAPKLSLEVRKLSNGR

SEQ ID NO: 18142 - protein, 16 aa, Homo sapiens
  ( 290 )...( 305 ): >Q13167
APKLSLEVRKLSNGRL

SEQ ID NO: 18143 - protein, 16 aa, Homo sapiens
  ( 291 )...( 306 ): >Q13167
PKLSLEVRKLSNGRLS

SEQ ID NO: 18144 - protein, 16 aa, Homo sapiens
  ( 292 )...( 307 ): >Q13167
KLSLEVRKLSNGRLST

SEQ ID NO: 18145 - protein, 16 aa, Homo sapiens
  ( 295 )...( 310 ): >Q13167
LEVRKLSNGRLSTSLK

SEQ ID NO: 18146 - protein, 16 aa, Homo sapiens
  ( 296 )...( 311 ): >Q13167
EVRKLSNGRLSTSLKL

SEQ ID NO: 18147 - protein, 16 aa, Homo sapiens
  ( 297 )...( 312 ): >Q13167
VRKLSNGRLSTSLKLG

SEQ ID NO: 18148 - protein, 16 aa, Homo sapiens
  ( 298 )...( 313 ): >Q13167
RKLSNGRLSTSLKLGP

SEQ ID NO: 18149 - protein, 16 aa, Homo sapiens
  ( 302 )...( 317 ): >Q13167
NGRLSTSLKLGPLQPR

SEQ ID NO: 18150 - protein, 16 aa, Homo sapiens
  ( 303 )...( 318 ): >Q13167
GRLSTSLKLGPLQPRG

SEQ ID NO: 18151 - protein, 16 aa, Homo sapiens
  ( 304 )...( 319 ): >Q13167
RLSTSLKLGPLQPRGV

SEQ ID NO: 18152 - protein, 16 aa, Homo sapiens
  ( 307 )...( 322 ): >Q13167
TSLKLGPLQPRGVPLR

SEQ ID NO: 18153 - protein, 16 aa, Homo sapiens
  ( 309 )...( 324 ): >Q13167
LKLGPLQPRGVPLREK

SEQ ID NO: 18154 - protein, 16 aa, Homo sapiens
  ( 310 )...( 325 ): >Q13167
KLGPLQPRGVPLREKK

SEQ ID NO: 18155 - protein, 16 aa, Homo sapiens
  ( 311 )...( 326 ): >Q13167
LGPLQPRGVPLREKKA

SEQ ID NO: 18156 - protein, 16 aa, Homo sapiens
  ( 312 )...( 327 ): >Q13167
GPLQPRGVPLREKKAT

SEQ ID NO: 18157 - protein, 16 aa, Homo sapiens
  ( 313 )...( 328 ): >Q13167
PLQPRGVPLREKKATQ

SEQ ID NO: 18158 - protein, 16 aa, Homo sapiens
  ( 314 )...( 329 ): >Q13167
LQPRGVPLREKKATQM

SEQ ID NO: 18159 - protein, 16 aa, Homo sapiens
  ( 315 )...( 330 ): >Q13167
QPRGVPLREKKATQMV

SEQ ID NO: 18160 - protein, 16 aa, Homo sapiens
  ( 316 )...( 331 ): >Q13167
PRGVPLREKKATQMVA

SEQ ID NO: 18161 - protein, 16 aa, Homo sapiens
  ( 317 )...( 332 ): >Q13167
RGVPLREKKATQMVAI

SEQ ID NO: 18162 - protein, 16 aa, Homo sapiens
  ( 156 )...( 171 ): >Q9UE21
DRFLAIVHPVKSLKLR

SEQ ID NO: 18163 - protein, 16 aa, Homo sapiens
  ( 157 )...( 172 ): >Q9UE21
RFLAIVHPVKSLKLRR

SEQ ID NO: 18164 - protein, 16 aa, Homo sapiens
  ( 158 )...( 173 ): >Q9UE21
FLAIVHPVKSLKLRRP

SEQ ID NO: 18165 - protein, 16 aa, Homo sapiens
  ( 159 )...( 174 ): >Q9UE21
LAIVHPVKSLKLRRPL

SEQ ID NO: 18166 - protein, 16 aa, Homo sapiens
  ( 160 )...( 175 ): >Q9UE21
AIVHPVKSLKLRRPLY

SEQ ID NO: 18167 - protein, 16 aa, Homo sapiens
  ( 161 )...( 176 ): >Q9UE21
IVHPVKSLKLRRPLYA

SEQ ID NO: 18168 - protein, 16 aa, Homo sapiens
  ( 164 )...( 179 ): >Q9UE21
PVKSLKLRRPLYAHLA

SEQ ID NO: 18169 - protein, 16 aa, Homo sapiens
  ( 165 )...( 180 ): >Q9UE21
VKSLKLRRPLYAHLAC

SEQ ID NO: 18170 - protein, 16 aa, Homo sapiens
  ( 237 )...( 252 ): >Q9UE21
VTCYLLIIRSLRQGLR

SEQ ID NO: 18171 - protein, 16 aa, Homo sapiens
  ( 238 )...( 253 ): >Q9UE21
TCYLLIIRSLRQGLRV

SEQ ID NO: 18172 - protein, 16 aa, Homo sapiens
  ( 240 )...( 255 ): >Q9UE21
YLLIIRSLRQGLRVEK

SEQ ID NO: 18173 - protein, 16 aa, Homo sapiens
  ( 241 )...( 256 ): >Q9UE21
LLIIRSLRQGLRVEKR

SEQ ID NO: 18174 - protein, 16 aa, Homo sapiens
  ( 242 )...( 257 ): >Q9UE21
LIIRSLRQGLRVEKRL

SEQ ID NO: 18175 - protein, 16 aa, Homo sapiens
  ( 243 )...( 258 ): >Q9UE21
IIRSLRQGLRVEKRLK

SEQ ID NO: 18176 - protein, 16 aa, Homo sapiens
  ( 244 )...( 259 ): >Q9UE21
IRSLRQGLRVEKRLKT

SEQ ID NO: 18177 - protein, 16 aa, Homo sapiens
  ( 245 )...( 260 ): >Q9UE21
RSLRQGLRVEKRLKTK

SEQ ID NO: 18178 - protein, 16 aa, Homo sapiens
  ( 246 )...( 261 ): >Q9UE21
SLRQGLRVEKRLKTKA

SEQ ID NO: 18179 - protein, 16 aa, Homo sapiens
  ( 247 )...( 262 ): >Q9UE21
LRQGLRVEKRLKTKAV

SEQ ID NO: 18180 - protein, 16 aa, Homo sapiens
  ( 248 )...( 263 ): >Q9UE21
RQGLRVEKRLKTKAVR

SEQ ID NO: 18181 - protein, 16 aa, Homo sapiens
  ( 249 )...( 264 ): >Q9UE21
QGLRVEKRLKTKAVRM

SEQ ID NO: 18182 - protein, 16 aa, Homo sapiens
  ( 250 )...( 265 ): >Q9UE21
GLRVEKRLKTKAVRMI

SEQ ID NO: 18183 - protein, 16 aa, Homo sapiens
  ( 251 )...( 266 ): >Q9UE21
LRVEKRLKTKAVRMIA

SEQ ID NO: 18184 - protein, 16 aa, Homo sapiens
  ( 252 )...( 267 ): >Q9UE21
RVEKRLKTKAVRMIAI

SEQ ID NO: 18185 - protein, 16 aa, Homo sapiens
  ( 253 )...( 268 ): >Q9UE21
VEKRLKTKAVRMIAIV

SEQ ID NO: 18186 - protein, 16 aa, Homo sapiens
  ( 254 )...( 269 ): >Q9UE21
EKRLKTKAVRMIAIVL

SEQ ID NO: 18187 - protein, 16 aa, Homo sapiens
  ( 255 )...( 270 ): >Q9UE21
KRLKTKAVRMIAIVLA

SEQ ID NO: 18188 - protein, 16 aa, Homo sapiens
  ( 256 )...( 271 ): >Q9UE21
RLKTKAVRMIAIVLAI

SEQ ID NO: 18189 - protein, 16 aa, Homo sapiens
  ( 331 )...( 346 ): >Q9UE21
KFRHALCNLLCGKRLK

SEQ ID NO: 18190 - protein, 16 aa, Homo sapiens
  ( 87 )...( 102 ): >Q9UDZ6
DRFLAIVHPVKSLKLR

SEQ ID NO: 18191 - protein, 16 aa, Homo sapiens
  ( 88 )...( 103 ): >Q9UDZ6
RFLAIVHPVKSLKLRR

SEQ ID NO: 18192 - protein, 16 aa, Homo sapiens
  ( 89 )...( 104 ): >Q9UDZ6
FLAIVHPVKSLKLRRP

SEQ ID NO: 18193 - protein, 16 aa, Homo sapiens
  ( 90 )...( 105 ): >Q9UDZ6
LAIVHPVKSLKLRRPL

SEQ ID NO: 18194 - protein, 16 aa, Homo sapiens
  ( 91 )...( 106 ): >Q9UDZ6
AIVHPVKSLKLRRPLY

SEQ ID NO: 18195 - protein, 16 aa, Homo sapiens
  ( 92 )...( 107 ): >Q9UDZ6
IVHPVKSLKLRRPLYA

SEQ ID NO: 18196 - protein, 16 aa, Homo sapiens
  ( 95 )...( 110 ): >Q9UDZ6
PVKSLKLRRPLYAHLA

SEQ ID NO: 18197 - protein, 16 aa, Homo sapiens
  ( 96 )...( 111 ): >Q9UDZ6
VKSLKLRRPLYAHLAC

SEQ ID NO: 18198 - protein, 16 aa, Homo sapiens
  ( 168 )...( 183 ): >Q9UDZ6
VTCYLLIIRSLRQGLR

SEQ ID NO: 18199 - protein, 16 aa, Homo sapiens
  ( 169 )...( 184 ): >Q9UDZ6
TCYLLIIRSLRQGLRV

SEQ ID NO: 18200 - protein, 16 aa, Homo sapiens
  ( 171 )...( 186 ): >Q9UDZ6
YLLIIRSLRQGLRVEK

SEQ ID NO: 18201 - protein, 16 aa, Homo sapiens
  ( 172 )...( 187 ): >Q9UDZ6
LLIIRSLRQGLRVEKR

SEQ ID NO: 18202 - protein, 16 aa, Homo sapiens
  ( 173 )...( 188 ): >Q9UDZ6
LIIRSLRQGLRVEKRL

SEQ ID NO: 18203 - protein, 16 aa, Homo sapiens
  ( 174 )...( 189 ): >Q9UDZ6
IIRSLRQGLRVEKRLK

SEQ ID NO: 18204 - protein, 16 aa, Homo sapiens
  ( 175 )...( 190 ): >Q9UDZ6
IRSLRQGLRVEKRLKT

SEQ ID NO: 18205 - protein, 16 aa, Homo sapiens
  ( 176 )...( 191 ): >Q9UDZ6
RSLRQGLRVEKRLKTK

SEQ ID NO: 18206 - protein, 16 aa, Homo sapiens
  ( 177 )...( 192 ): >Q9UDZ6
SLRQGLRVEKRLKTKA

SEQ ID NO: 18207 - protein, 16 aa, Homo sapiens
  ( 178 )...( 193 ): >Q9UDZ6
LRQGLRVEKRLKTKAV

SEQ ID NO: 18208 - protein, 16 aa, Homo sapiens
  ( 179 )...( 194 ): >Q9UDZ6
RQGLRVEKRLKTKAVR

SEQ ID NO: 18209 - protein, 16 aa, Homo sapiens
  ( 180 )...( 195 ): >Q9UDZ6
QGLRVEKRLKTKAVRM

SEQ ID NO: 18210 - protein, 16 aa, Homo sapiens
  ( 181 )...( 196 ): >Q9UDZ6
GLRVEKRLKTKAVRMI

SEQ ID NO: 18211 - protein, 16 aa, Homo sapiens
  ( 182 )...( 197 ): >Q9UDZ6
LRVEKRLKTKAVRMIA

SEQ ID NO: 18212 - protein, 16 aa, Homo sapiens
  ( 183 )...( 198 ): >Q9UDZ6
RVEKRLKTKAVRMIAI

SEQ ID NO: 18213 - protein, 16 aa, Homo sapiens
  ( 184 )...( 199 ): >Q9UDZ6
VEKRLKTKAVRMIAIV

SEQ ID NO: 18214 - protein, 16 aa, Homo sapiens
  ( 185 )...( 200 ): >Q9UDZ6
EKRLKTKAVRMIAIVL

SEQ ID NO: 18215 - protein, 16 aa, Homo sapiens
  ( 186 )...( 201 ): >Q9UDZ6
KRLKTKAVRMIAIVLA

SEQ ID NO: 18216 - protein, 16 aa, Homo sapiens
  ( 187 )...( 202 ): >Q9UDZ6
RLKTKAVRMIAIVLAI

SEQ ID NO: 18217 - protein, 16 aa, Homo sapiens
  ( 262 )...( 277 ): >Q9UDZ6
KFRHALCNLLCGKRLK

SEQ ID NO: 18218 - protein, 16 aa, Homo sapiens
  ( 86 )...( 101 ): >O00406
KTKITIVKTFNASGVK

SEQ ID NO: 18219 - protein, 16 aa, Homo sapiens
  ( 89 )...( 104 ): >O00406
ITIVKTFNASGVKPQR

SEQ ID NO: 18220 - protein, 16 aa, Homo sapiens
  ( 90 )...( 105 ): >O00406
TIVKTFNASGVKPQRN

SEQ ID NO: 18221 - protein, 16 aa, Homo sapiens
  ( 91 )...( 106 ): >O00406
IVKTFNASGVKPQRNI

SEQ ID NO: 18222 - protein, 16 aa, Homo sapiens
  ( 539 )...( 554 ): >O00406
NLTVRNLTRNVTVTLK

SEQ ID NO: 18223 - protein, 16 aa, Homo sapiens
  ( 542 )...( 557 ): >O00406
VRNLTRNVTVTLKHIN

SEQ ID NO: 18224 - protein, 16 aa, Homo sapiens
  ( 543 )...( 558 ): >O00406
RNLTRNVTVTLKHINP

SEQ ID NO: 18225 - protein, 16 aa, Homo sapiens
  ( 652 )...( 667 ): >O00406
KIRRDYPSKILIQLCA

SEQ ID NO: 18226 - protein, 16 aa, Homo sapiens
  ( 719 )...( 734 ): >O00406
ALVKVFNTYIRKYILK

SEQ ID NO: 18227 - protein, 16 aa, Homo sapiens
  ( 724 )...( 739 ): >O00406
FNTYIRKYILKFCIVG

SEQ ID NO: 18228 - protein, 16 aa, Homo sapiens
  ( 800 )...( 815 ): >O00406
SMFIVVLVQLCRIKKK

SEQ ID NO: 18229 - protein, 16 aa, Homo sapiens
  ( 801 )...( 816 ): >O00406
MFIVVLVQLCRIKKKK

SEQ ID NO: 18230 - protein, 16 aa, Homo sapiens
  ( 802 )...( 817 ): >O00406
FIVVLVQLCRIKKKKQ

SEQ ID NO: 18231 - protein, 16 aa, Homo sapiens
  ( 803 )...( 818 ): >O00406
IVVLVQLCRIKKKKQL

SEQ ID NO: 18232 - protein, 16 aa, Homo sapiens
  ( 804 )...( 819 ): >O00406
VVLVQLCRIKKKKQLG

SEQ ID NO: 18233 - protein, 16 aa, Homo sapiens
  ( 805 )...( 820 ): >O00406
VLVQLCRIKKKKQLGA

SEQ ID NO: 18234 - protein, 16 aa, Homo sapiens
  ( 806 )...( 821 ): >O00406
LVQLCRIKKKKQLGAQ

SEQ ID NO: 18235 - protein, 16 aa, Homo sapiens
  ( 807 )...( 822 ): >O00406
VQLCRIKKKKQLGAQR

SEQ ID NO: 18236 - protein, 16 aa, Homo sapiens
  ( 809 )...( 824 ): >O00406
LCRIKKKKQLGAQRKT

SEQ ID NO: 18237 - protein, 16 aa, Homo sapiens
  ( 810 )...( 825 ): >O00406
CRIKKKKQLGAQRKTS

SEQ ID NO: 18238 - protein, 16 aa, Homo sapiens
  ( 811 )...( 826 ): >O00406
RIKKKKQLGAQRKTSI

SEQ ID NO: 18239 - protein, 16 aa, Homo sapiens
  ( 812 )...( 827 ): >O00406
IKKKKQLGAQRKTSIQ

SEQ ID NO: 18240 - protein, 16 aa, Homo sapiens
  ( 813 )...( 828 ): >O00406
KKKKQLGAQRKTSIQD

SEQ ID NO: 18241 - protein, 16 aa, Homo sapiens
  ( 814 )...( 829 ): >O00406
KKKQLGAQRKTSIQDL

SEQ ID NO: 18242 - protein, 16 aa, Homo sapiens
  ( 815 )...( 830 ): >O00406
KKQLGAQRKTSIQDLR

SEQ ID NO: 18243 - protein, 16 aa, Homo sapiens
  ( 816 )...( 831 ): >O00406
KQLGAQRKTSIQDLRS

SEQ ID NO: 18244 - protein, 16 aa, Homo sapiens
  ( 990 )...( 1005 ): >O00406
SCNGKGRMALRRTSKR

SEQ ID NO: 18245 - protein, 16 aa, Homo sapiens
  ( 991 )...( 1006 ): >O00406
CNGKGRMALRRTSKRG

SEQ ID NO: 18246 - protein, 16 aa, Homo sapiens
  ( 992 )...( 1007 ): >O00406
NGKGRMALRRTSKRGS

SEQ ID NO: 18247 - protein, 16 aa, Homo sapiens
  ( 993 )...( 1008 ): >O00406
GKGRMALRRTSKRGSL

SEQ ID NO: 18248 - protein, 16 aa, Homo sapiens
  ( 994 )...( 1009 ): >O00406
KGRMALRRTSKRGSLH

SEQ ID NO: 18249 - protein, 16 aa, Homo sapiens
  ( 995 )...( 1010 ): >O00406
GRMALRRTSKRGSLHF

SEQ ID NO: 18250 - protein, 16 aa, Homo sapiens
  ( 996 )...( 1011 ): >O00406
RMALRRTSKRGSLHFI

SEQ ID NO: 18251 - protein, 16 aa, Homo sapiens
  ( 997 )...( 1012 ): >O00406
MALRRTSKRGSLHFIE

SEQ ID NO: 18252 - protein, 16 aa, Homo sapiens
  ( 998 )...( 1013 ): >O00406
ALRRTSKRGSLHFIEQ

SEQ ID NO: 18253 - protein, 16 aa, Homo sapiens
  ( 114 )...( 129 ): >Q9BPV8
GLIAFDRFLKIIRPLR

SEQ ID NO: 18254 - protein, 16 aa, Homo sapiens
  ( 127 )...( 142 ): >Q9BPV8
PLRNIFLKKPVFAKTV

SEQ ID NO: 18255 - protein, 16 aa, Homo sapiens
  ( 128 )...( 143 ): >Q9BPV8
LRNIFLKKPVFAKTVS

SEQ ID NO: 18256 - protein, 16 aa, Homo sapiens
  ( 129 )...( 144 ): >Q9BPV8
RNIFLKKPVFAKTVSI

SEQ ID NO: 18257 - protein, 16 aa, Homo sapiens
  ( 205 )...( 220 ): >Q9BPV8
VFYVVIAKKVYDSYRK

SEQ ID NO: 18258 - protein, 16 aa, Homo sapiens
  ( 208 )...( 223 ): >Q9BPV8
VVIAKKVYDSYRKSKS

SEQ ID NO: 18259 - protein, 16 aa, Homo sapiens
  ( 225 )...( 240 ): >Q9BPV8
DRKNNKKLEGKVFVVV

SEQ ID NO: 18260 - protein, 16 aa, Homo sapiens
  ( 226 )...( 241 ): >Q9BPV8
RKNNKKLEGKVFVVVA

SEQ ID NO: 18261 - protein, 16 aa, Homo sapiens
  ( 227 )...( 242 ): >Q9BPV8
KNNKKLEGKVFVVVAV

SEQ ID NO: 18262 - protein, 16 aa, Homo sapiens
  ( 301 )...( 316 ): >Q9BPV8
KKFTEKLPCMQGRKTT

SEQ ID NO: 18263 - protein, 16 aa, Homo sapiens
  ( 70 )...( 85 ): >Q9BY21
IRNKTSFIFYLKNIVV

SEQ ID NO: 18264 - protein, 16 aa, Homo sapiens
  ( 71 )...( 86 ): >Q9BY21
RNKTSFIFYLKNIVVA

SEQ ID NO: 18265 - protein, 16 aa, Homo sapiens
  ( 244 )...( 259 ): >Q9BY21
SSRKRKHNQSIRVVVA

SEQ ID NO: 18266 - protein, 16 aa, Homo sapiens
  ( 245 )...( 260 ): >Q9BY21
SRKRKHNQSIRVVVAV

SEQ ID NO: 18267 - protein, 16 aa, Homo sapiens
  ( 246 )...( 261 ): >Q9BY21
RKRKHNQSIRVVVAVF

SEQ ID NO: 18268 - protein, 16 aa, Homo sapiens
  ( 247 )...( 262 ): >Q9BY21
KRKHNQSIRVVVAVFF

SEQ ID NO: 18269 - protein, 16 aa, Homo sapiens
  ( 248 )...( 263 ): >Q9BY21
RKHNQSIRVVVAVFFT

SEQ ID NO: 18270 - protein, 16 aa, Homo sapiens
  ( 328 )...( 343 ): >Q9BY21
KSNIRTRSESIRSLQS

SEQ ID NO: 18271 - protein, 16 aa, Homo sapiens
  ( 330 )...( 345 ): >Q9BY21
NIRTRSESIRSLQSVR

SEQ ID NO: 18272 - protein, 16 aa, Homo sapiens
  ( 331 )...( 346 ): >Q9BY21
IRTRSESIRSLQSVRR

SEQ ID NO: 18273 - protein, 16 aa, Homo sapiens
  ( 337 )...( 352 ): >Q9BY21
SIRSLQSVRRSEVRIY

SEQ ID NO: 18274 - protein, 16 aa, Homo sapiens
  ( 244 )...( 259 ): >Q96RV1
RIGISLFRAAVPHTGR

SEQ ID NO: 18275 - protein, 16 aa, Homo sapiens
  ( 245 )...( 260 ): >Q96RV1
IGISLFRAAVPHTGRK

SEQ ID NO: 18276 - protein, 16 aa, Homo sapiens
  ( 247 )...( 262 ): >Q96RV1
ISLFRAAVPHTGRKNQ

SEQ ID NO: 18277 - protein, 16 aa, Homo sapiens
  ( 265 )...( 280 ): >Q96RV1
WHVVSRKKQKIIKMLL

SEQ ID NO: 18278 - protein, 16 aa, Homo sapiens
  ( 266 )...( 281 ): >Q96RV1
HVVSRKKQKIIKMLLI

SEQ ID NO: 18279 - protein, 16 aa, Homo sapiens
  ( 267 )...( 282 ): >Q96RV1
VVSRKKQKIIKMLLIV

SEQ ID NO: 18280 - protein, 16 aa, Homo sapiens
  ( 268 )...( 283 ): >Q96RV1
VSRKKQKIIKMLLIVA

SEQ ID NO: 18281 - protein, 16 aa, Homo sapiens
  ( 269 )...( 284 ): >Q96RV1
SRKKQKIIKMLLIVAL

SEQ ID NO: 18282 - protein, 16 aa, Homo sapiens
  ( 354 )...( 369 ): >Q96RV1
QLCQKRAKPMEAYTLK

SEQ ID NO: 18283 - protein, 16 aa, Homo sapiens
  ( 356 )...( 371 ): >Q96RV1
CQKRAKPMEAYTLKAK

SEQ ID NO: 18284 - protein, 16 aa, Homo sapiens
  ( 357 )...( 372 ): >Q96RV1
QKRAKPMEAYTLKAKS

SEQ ID NO: 18285 - protein, 16 aa, Homo sapiens
  ( 358 )...( 373 ): >Q96RV1
KRAKPMEAYTLKAKSH

SEQ ID NO: 18286 - protein, 16 aa, Homo sapiens
  ( 69 )...( 84 ): >Q96G91
RAVLRSPGMTVAEKLR

SEQ ID NO: 18287 - protein, 16 aa, Homo sapiens
  ( 53 )...( 68 ): >Q9BWH1
SAKWRRPRTAKMITMA

SEQ ID NO: 18288 - protein, 16 aa, Homo sapiens
  ( 54 )...( 69 ): >Q9BWH1
AKWRRPRTAKMITMAV

SEQ ID NO: 18289 - protein, 16 aa, Homo sapiens
  ( 56 )...( 71 ): >Q9BWH1
WRRPRTAKMITMAVWG

SEQ ID NO: 18290 - protein, 16 aa, Homo sapiens
  ( 57 )...( 72 ): >Q9BWH1
RRPRTAKMITMAVWGV

SEQ ID NO: 18291 - protein, 16 aa, Homo sapiens
  ( 58 )...( 73 ): >Q9BWH1
RPRTAKMITMAVWGVS

SEQ ID NO: 18292 - protein, 16 aa, Homo sapiens
  ( 130 )...( 145 ): >Q9BWH1
CYLFIIIKVKSSGIRV

SEQ ID NO: 18293 - protein, 16 aa, Homo sapiens
  ( 131 )...( 146 ): >Q9BWH1
YLFIIIKVKSSGIRVG

SEQ ID NO: 18294 - protein, 16 aa, Homo sapiens
  ( 135 )...( 150 ): >Q9BWH1
IIKVKSSGIRVGSSKR

SEQ ID NO: 18295 - protein, 16 aa, Homo sapiens
  ( 136 )...( 151 ): >Q9BWH1
IKVKSSGIRVGSSKRK

SEQ ID NO: 18296 - protein, 16 aa, Homo sapiens
  ( 137 )...( 152 ): >Q9BWH1
KVKSSGIRVGSSKRKK

SEQ ID NO: 18297 - protein, 16 aa, Homo sapiens
  ( 138 )...( 153 ): >Q9BWH1
VKSSGIRVGSSKRKKS

SEQ ID NO: 18298 - protein, 16 aa, Homo sapiens
  ( 139 )...( 154 ): >Q9BWH1
KSSGIRVGSSKRKKSE

SEQ ID NO: 18299 - protein, 16 aa, Homo sapiens
  ( 140 )...( 155 ): >Q9BWH1
SSGIRVGSSKRKKSEK

SEQ ID NO: 18300 - protein, 16 aa, Homo sapiens
  ( 141 )...( 156 ): >Q9BWH1
SGIRVGSSKRKKSEKK

SEQ ID NO: 18301 - protein, 16 aa, Homo sapiens
  ( 142 )...( 157 ): >Q9BWH1
GIRVGSSKRKKSEKKV

SEQ ID NO: 18302 - protein, 16 aa, Homo sapiens
  ( 143 )...( 158 ): >Q9BWH1
IRVGSSKRKKSEKKVT

SEQ ID NO: 18303 - protein, 16 aa, Homo sapiens
  ( 144 )...( 159 ): >Q9BWH1
RVGSSKRKKSEKKVTR

SEQ ID NO: 18304 - protein, 16 aa, Homo sapiens
  ( 145 )...( 160 ): >Q9BWH1
VGSSKRKKSEKKVTRM

SEQ ID NO: 18305 - protein, 16 aa, Homo sapiens
  ( 146 )...( 161 ): >Q9BWH1
GSSKRKKSEKKVTRMV

SEQ ID NO: 18306 - protein, 16 aa, Homo sapiens
  ( 147 )...( 162 ): >Q9BWH1
SSKRKKSEKKVTRMVS

SEQ ID NO: 18307 - protein, 16 aa, Homo sapiens
  ( 148 )...( 163 ): >Q9BWH1
SKRKKSEKKVTRMVSI

SEQ ID NO: 18308 - protein, 16 aa, Homo sapiens
  ( 149 )...( 164 ): >Q9BWH1
KRKKSEKKVTRMVSIV

SEQ ID NO: 18309 - protein, 16 aa, Homo sapiens
  ( 150 )...( 165 ): >Q9BWH1
RKKSEKKVTRMVSIVV

SEQ ID NO: 18310 - protein, 16 aa, Homo sapiens
  ( 151 )...( 166 ): >Q9BWH1
KKSEKKVTRMVSIVVA

SEQ ID NO: 18311 - protein, 16 aa, Homo sapiens
  ( 155 )...( 170 ): >Q9BXC2
SSRKRKHNQSIRVVVA

SEQ ID NO: 18312 - protein, 16 aa, Homo sapiens
  ( 156 )...( 171 ): >Q9BXC2
SRKRKHNQSIRVVVAV

SEQ ID NO: 18313 - protein, 16 aa, Homo sapiens
  ( 157 )...( 172 ): >Q9BXC2
RKRKHNQSIRVVVAVF

SEQ ID NO: 18314 - protein, 16 aa, Homo sapiens
  ( 158 )...( 173 ): >Q9BXC2
KRKHNQSIRVVVAVFF

SEQ ID NO: 18315 - protein, 16 aa, Homo sapiens
  ( 159 )...( 174 ): >Q9BXC2
RKHNQSIRVVVAVFFT

SEQ ID NO: 18316 - protein, 16 aa, Homo sapiens
  ( 239 )...( 254 ): >Q9BXC2
KSNIRTRSESIRSLQS

SEQ ID NO: 18317 - protein, 16 aa, Homo sapiens
  ( 241 )...( 256 ): >Q9BXC2
NIRTRSESIRSLQSVR

SEQ ID NO: 18318 - protein, 16 aa, Homo sapiens
  ( 242 )...( 257 ): >Q9BXC2
IRTRSESIRSLQSVRR

SEQ ID NO: 18319 - protein, 16 aa, Homo sapiens
  ( 248 )...( 263 ): >Q9BXC2
SIRSLQSVRRSEVRIY

SEQ ID NO: 18320 - protein, 16 aa, Homo sapiens
  ( 23 )...( 38 ): >O95977
RLIVLHYNHSGRLAGR

SEQ ID NO: 18321 - protein, 16 aa, Homo sapiens
  ( 64 )...( 79 ): >O95977
NLLVLAAITSHMRSRR

SEQ ID NO: 18322 - protein, 16 aa, Homo sapiens
  ( 65 )...( 80 ): >O95977
LLVLAAITSHMRSRRW

SEQ ID NO: 18323 - protein, 16 aa, Homo sapiens
  ( 66 )...( 81 ): >O95977
LVLAAITSHMRSRRWV

SEQ ID NO: 18324 - protein, 16 aa, Homo sapiens
  ( 67 )...( 82 ): >O95977
VLAAITSHMRSRRWVY

SEQ ID NO: 18325 - protein, 16 aa, Homo sapiens
  ( 224 )...( 239 ): >O95977
GAIFRLVQASGQKAPR

SEQ ID NO: 18326 - protein, 16 aa, Homo sapiens
  ( 225 )...( 240 ): >O95977
AIFRLVQASGQKAPRP

SEQ ID NO: 18327 - protein, 16 aa, Homo sapiens
  ( 226 )...( 241 ): >O95977
IFRLVQASGQKAPRPA

SEQ ID NO: 18328 - protein, 16 aa, Homo sapiens
  ( 228 )...( 243 ): >O95977
RLVQASGQKAPRPAAR

SEQ ID NO: 18329 - protein, 16 aa, Homo sapiens
  ( 229 )...( 244 ): >O95977
LVQASGQKAPRPAARR

SEQ ID NO: 18330 - protein, 16 aa, Homo sapiens
  ( 230 )...( 245 ): >O95977
VQASGQKAPRPAARRK

SEQ ID NO: 18331 - protein, 16 aa, Homo sapiens
  ( 231 )...( 246 ): >O95977
QASGQKAPRPAARRKA

SEQ ID NO: 18332 - protein, 16 aa, Homo sapiens
  ( 244 )...( 259 ): >O95977
RKARRLLKTVLMILLA

SEQ ID NO: 18333 - protein, 16 aa, Homo sapiens
  ( 81 )...( 96 ): >Q9NZG5
TKKRSLLGTQVFFLLG

SEQ ID NO: 18334 - protein, 16 aa, Homo sapiens
  ( 82 )...( 97 ): >Q9NZG5
KKRSLLGTQVFFLLGT

SEQ ID NO: 18335 - protein, 16 aa, Homo sapiens
  ( 144 )...( 159 ): >Q9NZG5
LARKNHGPRGWVIFTV

SEQ ID NO: 18336 - protein, 16 aa, Homo sapiens
  ( 146 )...( 161 ): >Q9NZG5
RKNHGPRGWVIFTVAL

SEQ ID NO: 18337 - protein, 16 aa, Homo sapiens
  ( 235 )...( 250 ): >Q9NZG5
YKRWRKHGVFVLLTTA

SEQ ID NO: 18338 - protein, 16 aa, Homo sapiens
  ( 236 )...( 251 ): >Q9NZG5
KRWRKHGVFVLLTTAT

SEQ ID NO: 18339 - protein, 16 aa, Homo sapiens
  ( 237 )...( 252 ): >Q9NZG5
RWRKHGVFVLLTTATS

SEQ ID NO: 18340 - protein, 16 aa, Homo sapiens
  ( 41 )...( 56 ): >Q9H244
ITNGLAMRIFFQIRSK

SEQ ID NO: 18341 - protein, 16 aa, Homo sapiens
  ( 42 )...( 57 ): >Q9H244
TNGLAMRIFFQIRSKS

SEQ ID NO: 18342 - protein, 16 aa, Homo sapiens
  ( 52 )...( 67 ): >Q9H244
QIRSKSNFIIFLKNTV

SEQ ID NO: 18343 - protein, 16 aa, Homo sapiens
  ( 53 )...( 68 ): >Q9H244
IRSKSNFIIFLKNTVI

SEQ ID NO: 18344 - protein, 16 aa, Homo sapiens
  ( 116 )...( 131 ): >Q9H244
GLITIDRYQKTTRPFK

SEQ ID NO: 18345 - protein, 16 aa, Homo sapiens
  ( 117 )...( 132 ): >Q9H244
LITIDRYQKTTRPFKT

SEQ ID NO: 18346 - protein, 16 aa, Homo sapiens
  ( 125 )...( 140 ): >Q9H244
KTTRPFKTSNPKNLLG

SEQ ID NO: 18347 - protein, 16 aa, Homo sapiens
  ( 210 )...( 225 ): >Q9H244
TLITKELYRSYVRTRG

SEQ ID NO: 18348 - protein, 16 aa, Homo sapiens
  ( 211 )...( 226 ): >Q9H244
LITKELYRSYVRTRGV

SEQ ID NO: 18349 - protein, 16 aa, Homo sapiens
  ( 212 )...( 227 ): >Q9H244
ITKELYRSYVRTRGVG

SEQ ID NO: 18350 - protein, 16 aa, Homo sapiens
  ( 213 )...( 228 ): >Q9H244
TKELYRSYVRTRGVGK

SEQ ID NO: 18351 - protein, 16 aa, Homo sapiens
  ( 214 )...( 229 ): >Q9H244
KELYRSYVRTRGVGKV

SEQ ID NO: 18352 - protein, 16 aa, Homo sapiens
  ( 215 )...( 230 ): >Q9H244
ELYRSYVRTRGVGKVP

SEQ ID NO: 18353 - protein, 16 aa, Homo sapiens
  ( 216 )...( 231 ): >Q9H244
LYRSYVRTRGVGKVPR

SEQ ID NO: 18354 - protein, 16 aa, Homo sapiens
  ( 217 )...( 232 ): >Q9H244
YRSYVRTRGVGKVPRK

SEQ ID NO: 18355 - protein, 16 aa, Homo sapiens
  ( 219 )...( 234 ): >Q9H244
SYVRTRGVGKVPRKKV

SEQ ID NO: 18356 - protein, 16 aa, Homo sapiens
  ( 220 )...( 235 ): >Q9H244
YVRTRGVGKVPRKKVN

SEQ ID NO: 18357 - protein, 16 aa, Homo sapiens
  ( 221 )...( 236 ): >Q9H244
VRTRGVGKVPRKKVNV

SEQ ID NO: 18358 - protein, 16 aa, Homo sapiens
  ( 223 )...( 238 ): >Q9H244
TRGVGKVPRKKVNVKV

SEQ ID NO: 18359 - protein, 16 aa, Homo sapiens
  ( 224 )...( 239 ): >Q9H244
RGVGKVPRKKVNVKVF

SEQ ID NO: 18360 - protein, 16 aa, Homo sapiens
  ( 225 )...( 240 ): >Q9H244
GVGKVPRKKVNVKVFI

SEQ ID NO: 18361 - protein, 16 aa, Homo sapiens
  ( 226 )...( 241 ): >Q9H244
VGKVPRKKVNVKVFII

SEQ ID NO: 18362 - protein, 16 aa, Homo sapiens
  ( 227 )...( 242 ): >Q9H244
GKVPRKKVNVKVFIII

SEQ ID NO: 18363 - protein, 16 aa, Homo sapiens
  ( 228 )...( 243 ): >Q9H244
KVPRKKVNVKVFIIIA

SEQ ID NO: 18364 - protein, 16 aa, Homo sapiens
  ( 229 )...( 244 ): >Q9H244
VPRKKVNVKVFIIIAV

SEQ ID NO: 18365 - protein, 16 aa, Homo sapiens
  ( 48 )...( 63 ): >Q9IP67
SIGNFLVIFTITWRRR

SEQ ID NO: 18366 - protein, 16 aa, Homo sapiens
  ( 53 )...( 68 ): >Q9IP67
LVIFTITWRRRIQCSG

SEQ ID NO: 18367 - protein, 16 aa, Homo sapiens
  ( 206 )...( 221 ): >Q9IP67
YCYYRISRIVAVSQSR

SEQ ID NO: 18368 - protein, 16 aa, Homo sapiens
  ( 207 )...( 222 ): >Q9IP67
CYYRISRIVAVSQSRH

SEQ ID NO: 18369 - protein, 16 aa, Homo sapiens
  ( 209 )...( 224 ): >Q9IP67
YRISRIVAVSQSRHKG

SEQ ID NO: 18370 - protein, 16 aa, Homo sapiens
  ( 210 )...( 225 ): >Q9IP67
RISRIVAVSQSRHKGR

SEQ ID NO: 18371 - protein, 16 aa, Homo sapiens
  ( 211 )...( 226 ): >Q9IP67
ISRIVAVSQSRHKGRI

SEQ ID NO: 18372 - protein, 16 aa, Homo sapiens
  ( 212 )...( 227 ): >Q9IP67
SRIVAVSQSRHKGRIV

SEQ ID NO: 18373 - protein, 16 aa, Homo sapiens
  ( 213 )...( 228 ): >Q9IP67
RIVAVSQSRHKGRIVR

SEQ ID NO: 18374 - protein, 16 aa, Homo sapiens
  ( 214 )...( 229 ): >Q9IP67
IVAVSQSRHKGRIVRV

SEQ ID NO: 18375 - protein, 16 aa, Homo sapiens
  ( 215 )...( 230 ): >Q9IP67
VAVSQSRHKGRIVRVL

SEQ ID NO: 18376 - protein, 16 aa, Homo sapiens
  ( 216 )...( 231 ): >Q9IP67
AVSQSRHKGRIVRVLI

SEQ ID NO: 18377 - protein, 16 aa, Homo sapiens
  ( 217 )...( 232 ): >Q9IP67
VSQSRHKGRIVRVLIA

SEQ ID NO: 18378 - protein, 16 aa, Homo sapiens
  ( 218 )...( 233 ): >Q9IP67
SQSRHKGRIVRVLIAV

SEQ ID NO: 18379 - protein, 16 aa, Homo sapiens
  ( 219 )...( 234 ): >Q9IP67
QSRHKGRIVRVLIAVV

SEQ ID NO: 18380 - protein, 16 aa, Homo sapiens
  ( 220 )...( 235 ): >Q9IP67
SRHKGRIVRVLIAVVL

SEQ ID NO: 18381 - protein, 16 aa, Homo sapiens
  ( 221 )...( 236 ): >Q9IP67
RHKGRIVRVLIAVVLV

SEQ ID NO: 18382 - protein, 16 aa, Homo sapiens
  ( 48 )...( 63 ): >Q9IP66
SIGNFLVIFTITWRRR

SEQ ID NO: 18383 - protein, 16 aa, Homo sapiens
  ( 53 )...( 68 ): >Q9IP66
LVIFTITWRRRIQCSG

SEQ ID NO: 18384 - protein, 16 aa, Homo sapiens
  ( 206 )...( 221 ): >Q9IP66
YCYYRISRIVAVSQSR

SEQ ID NO: 18385 - protein, 16 aa, Homo sapiens
  ( 207 )...( 222 ): >Q9IP66
CYYRISRIVAVSQSRH

SEQ ID NO: 18386 - protein, 16 aa, Homo sapiens
  ( 209 )...( 224 ): >Q9IP66
YRISRIVAVSQSRHKG

SEQ ID NO: 18387 - protein, 16 aa, Homo sapiens
  ( 210 )...( 225 ): >Q9IP66
RISRIVAVSQSRHKGR

SEQ ID NO: 18388 - protein, 16 aa, Homo sapiens
  ( 211 )...( 226 ): >Q9IP66
ISRIVAVSQSRHKGRI

SEQ ID NO: 18389 - protein, 16 aa, Homo sapiens
  ( 212 )...( 227 ): >Q9IP66
SRIVAVSQSRHKGRIV

SEQ ID NO: 18390 - protein, 16 aa, Homo sapiens
  ( 213 )...( 228 ): >Q9IP66
RIVAVSQSRHKGRIVR

SEQ ID NO: 18391 - protein, 16 aa, Homo sapiens
  ( 214 )...( 229 ): >Q9IP66
IVAVSQSRHKGRIVRV

SEQ ID NO: 18392 - protein, 16 aa, Homo sapiens
  ( 215 )...( 230 ): >Q9IP66
VAVSQSRHKGRIVRVL

SEQ ID NO: 18393 - protein, 16 aa, Homo sapiens
  ( 216 )...( 231 ): >Q9IP66
AVSQSRHKGRIVRVLI

SEQ ID NO: 18394 - protein, 16 aa, Homo sapiens
  ( 217 )...( 232 ): >Q9IP66
VSQSRHKGRIVRVLIA

SEQ ID NO: 18395 - protein, 16 aa, Homo sapiens
  ( 218 )...( 233 ): >Q9IP66
SQSRHKGRIVRVLIAV

SEQ ID NO: 18396 - protein, 16 aa, Homo sapiens
  ( 219 )...( 234 ): >Q9IP66
QSRHKGRIVRVLIAVV

SEQ ID NO: 18397 - protein, 16 aa, Homo sapiens
  ( 220 )...( 235 ): >Q9IP66
SRHKGRIVRVLIAVVL

SEQ ID NO: 18398 - protein, 16 aa, Homo sapiens
  ( 221 )...( 236 ): >Q9IP66
RHKGRIVRVLIAVVLV

SEQ ID NO: 18399 - protein, 8 aa, Homo sapiens
  ( 9 )...( 16 ): >ADNP_HUMAN
LGSLRKAR

SEQ ID NO: 18400 - protein, 8 aa, Homo sapiens
  ( 658 )...( 665 ): >ADNP_HUMAN
KKLTYKCI

SEQ ID NO: 18401 - protein, 8 aa, Homo sapiens
  ( 766 )...( 773 ): >ADNP_HUMAN
ARKSFLTK

SEQ ID NO: 18402 - protein, 8 aa, Homo sapiens
  ( 1009 )...( 1016 ): >ADNP_HUMAN
SKPAAKKK

SEQ ID NO: 18403 - protein, 8 aa, Homo sapiens
  ( 1010 )...( 1017 ): >ADNP_HUMAN
KPAAKKKA

SEQ ID NO: 18404 - protein, 8 aa, Homo sapiens
  ( 1013 )...( 1020 ): >ADNP_HUMAN
AKKKATMQ

SEQ ID NO: 18405 - protein, 8 aa, Homo sapiens
  ( 1014 )...( 1021 ): >ADNP_HUMAN
KKKATMQG

SEQ ID NO: 18406 - protein, 8 aa, Homo sapiens
  ( 16 )...( 23 ): >AHR_HUMAN
RKPVQKTV

SEQ ID NO: 18407 - protein, 8 aa, Homo sapiens
  ( 17 )...( 24 ): >AHR_HUMAN
KPVQKTVK

SEQ ID NO: 18408 - protein, 8 aa, Homo sapiens
  ( 260 )...( 267 ): >AIOL_HUMAN
ASNVAKRK

SEQ ID NO: 18409 - protein, 8 aa, Homo sapiens
  ( 261 )...( 268 ): >AIOL_HUMAN
SNVAKRKS

SEQ ID NO: 18410 - protein, 8 aa, Homo sapiens
  ( 262 )...( 269 ): >AIOL_HUMAN
NVAKRKSS

SEQ ID NO: 18411 - protein, 8 aa, Homo sapiens
  ( 263 )...( 270 ): >AIOL_HUMAN
VAKRKSSM

SEQ ID NO: 18412 - protein, 8 aa, Homo sapiens
  ( 60 )...( 67 ): >ALX4_HUMAN
AKSRARYG

SEQ ID NO: 18413 - protein, 8 aa, Homo sapiens
  ( 61 )...( 68 ): >ALX4_HUMAN
KSRARYGA

SEQ ID NO: 18414 - protein, 8 aa, Homo sapiens
  ( 394 )...( 401 ): >ALX4_HUMAN
AALRMKAK

SEQ ID NO: 18415 - protein, 8 aa, Homo sapiens
  ( 263 )...( 270 ): >AP1_HUMAN
RIAASKCR

SEQ ID NO: 18416 - protein, 8 aa, Homo sapiens
  ( 283 )...( 290 ): >AP1_HUMAN
KVKTLKAQ

SEQ ID NO: 18417 - protein, 8 aa, Homo sapiens
  ( 251 )...( 258 ): >AP2A_HUMAN
GVLRRAKS

SEQ ID NO: 18418 - protein, 8 aa, Homo sapiens
  ( 259 )...( 266 ): >AP2A_HUMAN
KNGGRSLR

SEQ ID NO: 18419 - protein, 8 aa, Homo sapiens
  ( 280 )...( 287 ): >AP2A_HUMAN
RRKAANVT

SEQ ID NO: 18420 - protein, 8 aa, Homo sapiens
  ( 80 )...( 87 ): >ASH1_HUMAN
KSAPKQVK

SEQ ID NO: 18421 - protein, 8 aa, Homo sapiens
  ( 81 )...( 88 ): >ASH1_HUMAN
SAPKQVKR

SEQ ID NO: 18422 - protein, 8 aa, Homo sapiens
  ( 150 )...( 157 ): >ASH1_HUMAN
ANKKMSKV

SEQ ID NO: 18423 - protein, 8 aa, Homo sapiens
  ( 90 )...( 97 ): >ASH3_HUMAN
GPAFTRKR

SEQ ID NO: 18424 - protein, 8 aa, Homo sapiens
  ( 163 )...( 170 ): >AT6A_HUMAN
NGLTPKKK

SEQ ID NO: 18425 - protein, 8 aa, Homo sapiens
  ( 164 )...( 171 ): >AT6A_HUMAN
GLTPKKKI

SEQ ID NO: 18426 - protein, 8 aa, Homo sapiens
  ( 165 )...( 172 ): >AT6A_HUMAN
LTPKKKIQ

SEQ ID NO: 18427 - protein, 8 aa, Homo sapiens
  ( 166 )...( 173 ): >AT6A_HUMAN
TPKKKIQV

SEQ ID NO: 18428 - protein, 8 aa, Homo sapiens
  ( 168 )...( 175 ): >AT6A_HUMAN
KKKIQVNS

SEQ ID NO: 18429 - protein, 8 aa, Homo sapiens
  ( 169 )...( 176 ): >AT6A_HUMAN
KKIQVNSK

SEQ ID NO: 18430 - protein, 8 aa, Homo sapiens
  ( 368 )...( 375 ): >AT6A_HUMAN
RLKVPSPK

SEQ ID NO: 18431 - protein, 8 aa, Homo sapiens
  ( 369 )...( 376 ): >AT6A_HUMAN
LKVPSPKR

SEQ ID NO: 18432 - protein, 8 aa, Homo sapiens
  ( 373 )...( 380 ): >AT6A_HUMAN
SPKRRVVC

SEQ ID NO: 18433 - protein, 8 aa, Homo sapiens
  ( 585 )...( 592 ): >AT6A_HUMAN
KTTRPKMS

SEQ ID NO: 18434 - protein, 8 aa, Homo sapiens
  ( 234 )...( 241 ): >AT6B_HUMAN
GKALPTRK

SEQ ID NO: 18435 - protein, 8 aa, Homo sapiens
  ( 235 )...( 242 ): >AT6B_HUMAN
KALPTRKP

SEQ ID NO: 18436 - protein, 8 aa, Homo sapiens
  ( 389 )...( 396 ): >AT6B_HUMAN
KLGSGNRK

SEQ ID NO: 18437 - protein, 8 aa, Homo sapiens
  ( 95 )...( 102 ): >ATF3_HUMAN
RNKIAAAK

SEQ ID NO: 18438 - protein, 8 aa, Homo sapiens
  ( 97 )...( 104 ): >ATF3_HUMAN
KIAAAKCR

SEQ ID NO: 18439 - protein, 8 aa, Homo sapiens
  ( 267 )...( 274 ): >ATF4_HUMAN
KMVAAKVK

SEQ ID NO: 18440 - protein, 8 aa, Homo sapiens
  ( 289 )...( 296 ): >ATF4_HUMAN
KTAATRYR

SEQ ID NO: 18441 - protein, 8 aa, Homo sapiens
  ( 340 )...( 347 ): >ATF4_HUMAN
EVRKARGK

SEQ ID NO: 18442 - protein, 8 aa, Homo sapiens
  ( 208 )...( 215 ): >BA1A_HUMAN
KATQISRR

SEQ ID NO: 18443 - protein, 8 aa, Homo sapiens
  ( 209 )...( 216 ): >BA1A_HUMAN
ATQISRRK

SEQ ID NO: 18444 - protein, 8 aa, Homo sapiens
  ( 325 )...( 332 ): >BA1A_HUMAN
AKLKREKA

SEQ ID NO: 18445 - protein, 8 aa, Homo sapiens
  ( 1152 )...( 1159 ): >BA1A_HUMAN
KICRKKGD

SEQ ID NO: 18446 - protein, 8 aa, Homo sapiens
  ( 1177 )...( 1184 ): >BA1A_HUMAN
CVRPKLKT

SEQ ID NO: 18447 - protein, 8 aa, Homo sapiens
  ( 1178 )...( 1185 ): >BA1A_HUMAN
VRPKLKTV

SEQ ID NO: 18448 - protein, 8 aa, Homo sapiens
  ( 1179 )...( 1186 ): >BA1A_HUMAN
RPKLKTVP

SEQ ID NO: 18449 - protein, 8 aa, Homo sapiens
  ( 1258 )...( 1265 ): >BA1A_HUMAN
VSLPKRGR

SEQ ID NO: 18450 - protein, 8 aa, Homo sapiens
  ( 1268 )...( 1275 ): >BA1A_HUMAN
VRLPVKTR

SEQ ID NO: 18451 - protein, 8 aa, Homo sapiens
  ( 1269 )...( 1276 ): >BA1A_HUMAN
RLPVKTRG

SEQ ID NO: 18452 - protein, 8 aa, Homo sapiens
  ( 1270 )...( 1277 ): >BA1A_HUMAN
LPVKTRGK

SEQ ID NO: 18453 - protein, 8 aa, Homo sapiens
  ( 1271 )...( 1278 ): >BA1A_HUMAN
PVKTRGKL

SEQ ID NO: 18454 - protein, 8 aa, Homo sapiens
  ( 1272 )...( 1279 ): >BA1A_HUMAN
VKTRGKLS

SEQ ID NO: 18455 - protein, 8 aa, Homo sapiens
  ( 1273 )...( 1280 ): >BA1A_HUMAN
KTRGKLSS

SEQ ID NO: 18456 - protein, 8 aa, Homo sapiens
  ( 1309 )...( 1316 ): >BA1A_HUMAN
SKTGRSLR

SEQ ID NO: 18457 - protein, 8 aa, Homo sapiens
  ( 1311 )...( 1318 ): >BA1A_HUMAN
TGRSLRKI

SEQ ID NO: 18458 - protein, 8 aa, Homo sapiens
  ( 1312 )...( 1319 ): >BA1A_HUMAN
GRSLRKIN

SEQ ID NO: 18459 - protein, 8 aa, Homo sapiens
  ( 1327 )...( 1334 ): >BA1A_HUMAN
KSLRIASR

SEQ ID NO: 18460 - protein, 8 aa, Homo sapiens
  ( 1330 )...( 1337 ): >BA1A_HUMAN
RIASRSTR

SEQ ID NO: 18461 - protein, 8 aa, Homo sapiens
  ( 1549 )...( 1556 ): >BA1A_HUMAN
PAAKKSRI

SEQ ID NO: 18462 - protein, 8 aa, Homo sapiens
  ( 535 )...( 542 ): >BA2A_HUMAN
REVRIKKG

SEQ ID NO: 18463 - protein, 8 aa, Homo sapiens
  ( 537 )...( 544 ): >BA2A_HUMAN
VRIKKGSH

SEQ ID NO: 18464 - protein, 8 aa, Homo sapiens
  ( 620 )...( 627 ): >BA2A_HUMAN
AITGKRGR

SEQ ID NO: 18465 - protein, 8 aa, Homo sapiens
  ( 621 )...( 628 ): >BA2A_HUMAN
ITGKRGRP

SEQ ID NO: 18466 - protein, 8 aa, Homo sapiens
  ( 647 )...( 654 ): >BA2A_HUMAN
GRPPKVKI

SEQ ID NO: 18467 - protein, 8 aa, Homo sapiens
  ( 648 )...( 655 ): >BA2A_HUMAN
RPPKVKIT

SEQ ID NO: 18468 - protein, 8 aa, Homo sapiens
  ( 680 )...( 687 ): >BA2A_HUMAN
KAKIAKSK

SEQ ID NO: 18469 - protein, 8 aa, Homo sapiens
  ( 681 )...( 688 ): >BA2A_HUMAN
AKIAKSKK

SEQ ID NO: 18470 - protein, 8 aa, Homo sapiens
  ( 683 )...( 690 ): >BA2A_HUMAN
IAKSKKKM

SEQ ID NO: 18471 - protein, 8 aa, Homo sapiens
  ( 772 )...( 779 ): >BA2A_HUMAN
KTLATQRR

SEQ ID NO: 18472 - protein, 8 aa, Homo sapiens
  ( 987 )...( 994 ): >BA2A_HUMAN
RRLKTVLA

SEQ ID NO: 18473 - protein, 8 aa, Homo sapiens
  ( 988 )...( 995 ): >BA2A_HUMAN
RLKTVLAK

SEQ ID NO: 18474 - protein, 8 aa, Homo sapiens
  ( 989 )...( 996 ): >BA2A_HUMAN
LKTVLAKR

SEQ ID NO: 18475 - protein, 8 aa, Homo sapiens
  ( 990 )...( 997 ): >BA2A_HUMAN
KTVLAKRT

SEQ ID NO: 18476 - protein, 8 aa, Homo sapiens
  ( 992 )...( 999 ): >BA2A_HUMAN
VLAKRTGR

SEQ ID NO: 18477 - protein, 8 aa, Homo sapiens
  ( 993 )...( 1000 ): >BA2A_HUMAN
LAKRTGRS

SEQ ID NO: 18478 - protein, 8 aa, Homo sapiens
  ( 1165 )...( 1172 ): >BA2A_HUMAN
PRKTKPGS

SEQ ID NO: 18479 - protein, 8 aa, Homo sapiens
  ( 1166 )...( 1173 ): >BA2A_HUMAN
RKTKPGSM

SEQ ID NO: 18480 - protein, 8 aa, Homo sapiens
  ( 1710 )...( 1717 ): >BA2A_HUMAN
GFPKRGQK

SEQ ID NO: 18481 - protein, 8 aa, Homo sapiens
  ( 1715 )...( 1722 ): >BA2A_HUMAN
GQKRKSGY

SEQ ID NO: 18482 - protein, 8 aa, Homo sapiens
  ( 1717 )...( 1724 ): >BA2A_HUMAN
KRKSGYSL

SEQ ID NO: 18483 - protein, 8 aa, Homo sapiens
  ( 1754 )...( 1761 ): >BA2A_HUMAN
GLSPSKRR

SEQ ID NO: 18484 - protein, 8 aa, Homo sapiens
  ( 1801 )...( 1808 ): >BA2A_HUMAN
SGYRRIIK

SEQ ID NO: 18485 - protein, 8 aa, Homo sapiens
  ( 1854 )...( 1861 ): >BA2A_HUMAN
KAGHIMRR

SEQ ID NO: 18486 - protein, 8 aa, Homo sapiens
  ( 150 )...( 157 ): >BACH_HUMAN
GAKKLTNK

SEQ ID NO: 18487 - protein, 8 aa, Homo sapiens
  ( 151 )...( 158 ): >BACH_HUMAN
AKKLTNKA

SEQ ID NO: 18488 - protein, 8 aa, Homo sapiens
  ( 283 )...( 290 ): >BACH_HUMAN
KIRKGCVI

SEQ ID NO: 18489 - protein, 8 aa, Homo sapiens
  ( 367 )...( 374 ): >BACH_HUMAN
QMKAKRQG

SEQ ID NO: 18490 - protein, 8 aa, Homo sapiens
  ( 369 )...( 376 ): >BACH_HUMAN
KAKRQGHA

SEQ ID NO: 18491 - protein, 8 aa, Homo sapiens
  ( 347 )...( 354 ): >BASO_HUMAN
RNSLGTKK

SEQ ID NO: 18492 - protein, 8 aa, Homo sapiens
  ( 349 )...( 356 ): >BASO_HUMAN
SLGTKKGR

SEQ ID NO: 18493 - protein, 8 aa, Homo sapiens
  ( 351 )...( 358 ): >BASO_HUMAN
GTKKGRVF

SEQ ID NO: 18494 - protein, 8 aa, Homo sapiens
  ( 352 )...( 359 ): >BASO_HUMAN
TKKGRVFC

SEQ ID NO: 18495 - protein, 8 aa, Homo sapiens
  ( 353 )...( 360 ): >BASO_HUMAN
KKGRVFCT

SEQ ID NO: 18496 - protein, 8 aa, Homo sapiens
  ( 36 )...( 43 ): >BHB2_HUMAN
VYKSRRGI

SEQ ID NO: 18497 - protein, 8 aa, Homo sapiens
  ( 180 )...( 187 ): >BRX1_HUMAN
SPTKPKGR

SEQ ID NO: 18498 - protein, 8 aa, Homo sapiens
  ( 186 )...( 193 ): >BRX1_HUMAN
GRPKKNSI

SEQ ID NO: 18499 - protein, 8 aa, Homo sapiens
  ( 163 )...( 170 ): >BRX2_HUMAN
WKKMVLKG

SEQ ID NO: 18500 - protein, 8 aa, Homo sapiens
  ( 174 )...( 181 ): >BRX2_HUMAN
APTKPKGR

SEQ ID NO: 18501 - protein, 8 aa, Homo sapiens
  ( 180 )...( 187 ): >BRX2_HUMAN
GRPKKNSI

SEQ ID NO: 18502 - protein, 8 aa, Homo sapiens
  ( 8 )...( 15 ): >BT31_HUMAN
QKLTKRQA

SEQ ID NO: 18503 - protein, 8 aa, Homo sapiens
  ( 23 )...( 30 ): >BT31_HUMAN
GTAHRKKV

SEQ ID NO: 18504 - protein, 8 aa, Homo sapiens
  ( 24 )...( 31 ): >BT31_HUMAN
TAHRKKVV

SEQ ID NO: 18505 - protein, 8 aa, Homo sapiens
  ( 10 )...( 17 ): >BT32_HUMAN
KLAKLQAK

SEQ ID NO: 18506 - protein, 8 aa, Homo sapiens
  ( 22 )...( 29 ): >BT32_HUMAN
GTAHRKKV

SEQ ID NO: 18507 - protein, 8 aa, Homo sapiens
  ( 23 )...( 30 ): >BT32_HUMAN
TAHRKKVV

SEQ ID NO: 18508 - protein, 8 aa, Homo sapiens
  ( 27 )...( 34 ): >BT32_HUMAN
KKVVHRTA

SEQ ID NO: 18509 - protein, 8 aa, Homo sapiens
  ( 55 )...( 62 ): >BT33_HUMAN
TAHRKKKV

SEQ ID NO: 18510 - protein, 8 aa, Homo sapiens
  ( 194 )...( 201 ): >BT33_HUMAN
LSRLLKKI

SEQ ID NO: 18511 - protein, 8 aa, Homo sapiens
  ( 235 )...( 242 ): >BTE1_HUMAN
RSKKALAN

SEQ ID NO: 18512 - protein, 8 aa, Homo sapiens
  ( 73 )...( 80 ): >BTF3_HUMAN
KKKVVHRT

SEQ ID NO: 18513 - protein, 8 aa, Homo sapiens
  ( 74 )...( 81 ): >BTF3_HUMAN
KKVVHRTA

SEQ ID NO: 18514 - protein, 8 aa, Homo sapiens
  ( 306 )...( 313 ): >CBFB_HUMAN
HAMARKRG

SEQ ID NO: 18515 - protein, 8 aa, Homo sapiens
  ( 43 )...( 50 ): >CBFC_HUMAN
LPLARIKK

SEQ ID NO: 18516 - protein, 8 aa, Homo sapiens
  ( 44 )...( 51 ): >CBFC_HUMAN
PLARIKKI

SEQ ID NO: 18517 - protein, 8 aa, Homo sapiens
  ( 45 )...( 52 ): >CBFC_HUMAN
LARIKKIM

SEQ ID NO: 18518 - protein, 8 aa, Homo sapiens
  ( 281 )...( 288 ): >CBFC_HUMAN
ASQGKPRR

SEQ ID NO: 18519 - protein, 8 aa, Homo sapiens
  ( 37 )...( 44 ): >CDK7_HUMAN
IVAIKKIK

SEQ ID NO: 18520 - protein, 8 aa, Homo sapiens
  ( 38 )...( 45 ): >CDK7_HUMAN
VAIKKIKL

SEQ ID NO: 18521 - protein, 8 aa, Homo sapiens
  ( 39 )...( 46 ): >CDK7_HUMAN
AIKKIKLG

SEQ ID NO: 18522 - protein, 8 aa, Homo sapiens
  ( 42 )...( 49 ): >CDK7_HUMAN
KIKLGHRS

SEQ ID NO: 18523 - protein, 8 aa, Homo sapiens
  ( 323 )...( 330 ): >CDK7_HUMAN
PALAIKRK

SEQ ID NO: 18524 - protein, 8 aa, Homo sapiens
  ( 293 )...( 300 ): >CEBA_HUMAN
NIAVRKSR

SEQ ID NO: 18525 - protein, 8 aa, Homo sapiens
  ( 67 )...( 74 ): >CEBE_HUMAN
RRLKGPGT

SEQ ID NO: 18526 - protein, 8 aa, Homo sapiens
  ( 195 )...( 202 ): >CEBE_HUMAN
KGKKAVNK

SEQ ID NO: 18527 - protein, 8 aa, Homo sapiens
  ( 215 )...( 222 ): >CEBE_HUMAN
NIAVRKSR

SEQ ID NO: 18528 - protein, 8 aa, Homo sapiens
  ( 73 )...( 80 ): >CEBG_HUMAN
NMAVKKSR

SEQ ID NO: 18529 - protein, 8 aa, Homo sapiens
  ( 74 )...( 81 ): >CEBG_HUMAN
MAVKKSRL

SEQ ID NO: 18530 - protein, 8 aa, Homo sapiens
  ( 76 )...( 83 ): >CEBG_HUMAN
VKKSRLKS

SEQ ID NO: 18531 - protein, 8 aa, Homo sapiens
  ( 81 )...( 88 ): >CEBG_HUMAN
LKSKQKAQ

SEQ ID NO: 18532 - protein, 8 aa, Homo sapiens
  ( 106 )...( 113 ): >CEBG_HUMAN
AKIKLLTK

SEQ ID NO: 18533 - protein, 8 aa, Homo sapiens
  ( 320 )...( 327 ): >CGA1_HUMAN
TKRQLLKM

SEQ ID NO: 18534 - protein, 8 aa, Homo sapiens
  ( 24 )...( 31 ): >CNO7_HUMAN
MKKIRQVI

SEQ ID NO: 18535 - protein, 8 aa, Homo sapiens
  ( 1 )...( 8 ): >CUT2_HUMAN
VQPLRKAK

SEQ ID NO: 18536 - protein, 8 aa, Homo sapiens
  ( 3 )...( 10 ): >CUT2_HUMAN
PLRKAKLL

SEQ ID NO: 18537 - protein, 8 aa, Homo sapiens
  ( 4 )...( 11 ): >CUT2_HUMAN
LRKAKLLC

SEQ ID NO: 18538 - protein, 8 aa, Homo sapiens
  ( 5 )...( 12 ): >CUT2_HUMAN
RKAKLLCV

SEQ ID NO: 18539 - protein, 8 aa, Homo sapiens
  ( 6 )...( 13 ): >CUT2_HUMAN
KAKLLCVR

SEQ ID NO: 18540 - protein, 8 aa, Homo sapiens
  ( 617 )...( 624 ): >CUT2_HUMAN
WRKLTVKG

SEQ ID NO: 18541 - protein, 8 aa, Homo sapiens
  ( 788 )...( 795 ): >CUT2_HUMAN
QSIIRKVK

SEQ ID NO: 18542 - protein, 8 aa, Homo sapiens
  ( 789 )...( 796 ): >CUT2_HUMAN
SIIRKVKS

SEQ ID NO: 18543 - protein, 8 aa, Homo sapiens
  ( 961 )...( 968 ): >CUT2_HUMAN
SKLTQKGR

SEQ ID NO: 18544 - protein, 8 aa, Homo sapiens
  ( 1069 )...( 1076 ): >CUT2_HUMAN
YSITKRVK

SEQ ID NO: 18545 - protein, 8 aa, Homo sapiens
  ( 1112 )...( 1119 ): >CUT2_HUMAN
HKLSLKGR

SEQ ID NO: 18546 - protein, 8 aa, Homo sapiens
  ( 1141 )...( 1148 ): >CUT2_HUMAN
MKKLEKKA

SEQ ID NO: 18547 - protein, 8 aa, Homo sapiens
  ( 1185 )...( 1192 ): >CUT2_HUMAN
LQIKKPRV

SEQ ID NO: 18548 - protein, 8 aa, Homo sapiens
  ( 1186 )...( 1193 ): >CUT2_HUMAN
QIKKPRVV

SEQ ID NO: 18549 - protein, 8 aa, Homo sapiens
  ( 1187 )...( 1194 ): >CUT2_HUMAN
IKKPRVVL

SEQ ID NO: 18550 - protein, 8 aa, Homo sapiens
  ( 1188 )...( 1195 ): >CUT2_HUMAN
KKPRVVLA

SEQ ID NO: 18551 - protein, 8 aa, Homo sapiens
  ( 1312 )...( 1319 ): >CUT2_HUMAN
KAQVRIKQ

SEQ ID NO: 18552 - protein, 8 aa, Homo sapiens
  ( 287 )...( 294 ): >CYCH_HUMAN
LNVITKKR

SEQ ID NO: 18553 - protein, 8 aa, Homo sapiens
  ( 253 )...( 260 ): >DEAF_HUMAN
KRSIRYAG

SEQ ID NO: 18554 - protein, 8 aa, Homo sapiens
  ( 113 )...( 120 ): >E2F1_HUMAN
RHPGKGVK

SEQ ID NO: 18555 - protein, 8 aa, Homo sapiens
  ( 178 )...( 185 ): >E2F1_HUMAN
QLIAKKSK

SEQ ID NO: 18556 - protein, 8 aa, Homo sapiens
  ( 179 )...( 186 ): >E2F1_HUMAN
LIAKKSKN

SEQ ID NO: 18557 - protein, 8 aa, Homo sapiens
  ( 104 )...( 111 ): >E2F2_HUMAN
TPKGKCIR

SEQ ID NO: 18558 - protein, 8 aa, Homo sapiens
  ( 105 )...( 112 ): >E2F2_HUMAN
PKGKCIRV

SEQ ID NO: 18559 - protein, 8 aa, Homo sapiens
  ( 178 )...( 185 ): >E2F2_HUMAN
GIQLIRKK

SEQ ID NO: 18560 - protein, 8 aa, Homo sapiens
  ( 179 )...( 186 ): >E2F2_HUMAN
IQLIRKKA

SEQ ID NO: 18561 - protein, 8 aa, Homo sapiens
  ( 156 )...( 163 ): >E2F3_HUMAN
KGRAALRS

SEQ ID NO: 18562 - protein, 8 aa, Homo sapiens
  ( 304 )...( 311 ): >E2F3_HUMAN
IRKISGLK

SEQ ID NO: 18563 - protein, 8 aa, Homo sapiens
  ( 49 )...( 56 ): >E2F4_HUMAN
TLAVRQKR

SEQ ID NO: 18564 - protein, 8 aa, Homo sapiens
  ( 82 )...( 89 ): >E2F5_HUMAN
TLAVRQKR

SEQ ID NO: 18565 - protein, 8 aa, Homo sapiens
  ( 51 )...( 58 ): >E2F6_HUMAN
VSMRKALK

SEQ ID NO: 18566 - protein, 8 aa, Homo sapiens
  ( 52 )...( 59 ): >E2F6_HUMAN
SMRKALKV

SEQ ID NO: 18567 - protein, 8 aa, Homo sapiens
  ( 93 )...( 100 ): >E2F6_HUMAN
ATKLGVRK

SEQ ID NO: 18568 - protein, 8 aa, Homo sapiens
  ( 192 )...( 199 ): >ELF1_HUMAN
PNISVKKK

SEQ ID NO: 18569 - protein, 8 aa, Homo sapiens
  ( 194 )...( 201 ): >ELF1_HUMAN
ISVKKKNK

SEQ ID NO: 18570 - protein, 8 aa, Homo sapiens
  ( 238 )...( 245 ): >ETS1_HUMAN
MGRTSRGK

SEQ ID NO: 18571 - protein, 8 aa, Homo sapiens
  ( 239 )...( 246 ): >ETS1_HUMAN
GRTSRGKL

SEQ ID NO: 18572 - protein, 8 aa, Homo sapiens
  ( 240 )...( 247 ): >ETS1_HUMAN
RTSRGKLG

SEQ ID NO: 18573 - protein, 8 aa, Homo sapiens
  ( 402 )...( 409 ): >ETS1_HUMAN
IHKTAGKR

SEQ ID NO: 18574 - protein, 8 aa, Homo sapiens
  ( 404 )...( 411 ): >ETS1_HUMAN
KTAGKRYV

SEQ ID NO: 18575 - protein, 8 aa, Homo sapiens
  ( 385 )...( 392 ): >EWS_HUMAN
GVVKMNKR

SEQ ID NO: 18576 - protein, 8 aa, Homo sapiens
  ( 386 )...( 393 ): >EWS_HUMAN
VVKMNKRT

SEQ ID NO: 18577 - protein, 8 aa, Homo sapiens
  ( 387 )...( 394 ): >EWS_HUMAN
VKMNKRTG

SEQ ID NO: 18578 - protein, 8 aa, Homo sapiens
  ( 388 )...( 395 ): >EWS_HUMAN
KMNKRTGQ

SEQ ID NO: 18579 - protein, 8 aa, Homo sapiens
  ( 439 )...( 446 ): >EWS_HUMAN
KLKVSLAR

SEQ ID NO: 18580 - protein, 8 aa, Homo sapiens
  ( 440 )...( 447 ): >EWS_HUMAN
LKVSLARK

SEQ ID NO: 18581 - protein, 8 aa, Homo sapiens
  ( 442 )...( 449 ): >EWS_HUMAN
VSLARKKP

SEQ ID NO: 18582 - protein, 8 aa, Homo sapiens
  ( 121 )...( 128 ): >FOS_HUMAN
QSIGRRGK

SEQ ID NO: 18583 - protein, 8 aa, Homo sapiens
  ( 122 )...( 129 ): >FOS_HUMAN
SIGRRGKV

SEQ ID NO: 18584 - protein, 8 aa, Homo sapiens
  ( 146 )...( 153 ): >FOS_HUMAN
RNKMAAAK

SEQ ID NO: 18585 - protein, 8 aa, Homo sapiens
  ( 143 )...( 150 ): >FXD2_HUMAN
SPKKRLTL

SEQ ID NO: 18586 - protein, 8 aa, Homo sapiens
  ( 144 )...( 151 ): >FXD2_HUMAN
PKKRLTLS

SEQ ID NO: 18587 - protein, 8 aa, Homo sapiens
  ( 134 )...( 141 ): >FXD3_HUMAN
KPKNSLVK

SEQ ID NO: 18588 - protein, 8 aa, Homo sapiens
  ( 288 )...( 295 ): >FXE2_HUMAN
RRKASSVG

SEQ ID NO: 18589 - protein, 8 aa, Homo sapiens
  ( 89 )...( 96 ): >FXF2_HUMAN
KKASSGLR

SEQ ID NO: 18590 - protein, 8 aa, Homo sapiens
  ( 90 )...( 97 ): >FXF2_HUMAN
KASSGLRR

SEQ ID NO: 18591 - protein, 8 aa, Homo sapiens
  ( 160 )...( 167 ): >FXF2_HUMAN
KLPKGLGR

SEQ ID NO: 18592 - protein, 8 aa, Homo sapiens
  ( 198 )...( 205 ): >FXF2_HUMAN
RKCQALKP

SEQ ID NO: 18593 - protein, 8 aa, Homo sapiens
  ( 264 )...( 271 ): >FXO1_HUMAN
AKSRSRAA

SEQ ID NO: 18594 - protein, 8 aa, Homo sapiens
  ( 271 )...( 278 ): >FXO1_HUMAN
AKKKASLQ

SEQ ID NO: 18595 - protein, 8 aa, Homo sapiens
  ( 260 )...( 267 ): >FXO3_HUMAN
YTKSRGRA

SEQ ID NO: 18596 - protein, 8 aa, Homo sapiens
  ( 261 )...( 268 ): >FXO3_HUMAN
TKSRGRAA

SEQ ID NO: 18597 - protein, 8 aa, Homo sapiens
  ( 268 )...( 275 ): >FXO3_HUMAN
AKKKAALQ

SEQ ID NO: 18598 - protein, 8 aa, Homo sapiens
  ( 269 )...( 276 ): >FXO3_HUMAN
KKKAALQT

SEQ ID NO: 18599 - protein, 8 aa, Homo sapiens
  ( 291 )...( 298 ): >GABA_HUMAN
AKAAKVQR

SEQ ID NO: 18600 - protein, 8 aa, Homo sapiens
  ( 292 )...( 299 ): >GABA_HUMAN
KAAKVQRA

SEQ ID NO: 18601 - protein, 8 aa, Homo sapiens
  ( 387 )...( 394 ): >GABA_HUMAN
ICKVQGKR

SEQ ID NO: 18602 - protein, 8 aa, Homo sapiens
  ( 388 )...( 395 ): >GABA_HUMAN
CKVQGKRF

SEQ ID NO: 18603 - protein, 8 aa, Homo sapiens
  ( 389 )...( 396 ): >GABA_HUMAN
KVQGKRFV

SEQ ID NO: 18604 - protein, 8 aa, Homo sapiens
  ( 423 )...( 430 ): >GABA_HUMAN
QKKLAKMQ

SEQ ID NO: 18605 - protein, 8 aa, Homo sapiens
  ( 424 )...( 431 ): >GABA_HUMAN
KKLAKMQL

SEQ ID NO: 18606 - protein, 8 aa, Homo sapiens
  ( 303 )...( 310 ): >GBX2_HUMAN
KRVKAGNA

SEQ ID NO: 18607 - protein, 8 aa, Homo sapiens
  ( 86 )...( 93 ): >GCFC_HUMAN
GNGLKPRK

SEQ ID NO: 18608 - protein, 8 aa, Homo sapiens
  ( 127 )...( 134 ): >GCFC_HUMAN
YSKKIVKL

SEQ ID NO: 18609 - protein, 8 aa, Homo sapiens
  ( 128 )...( 135 ): >GCFC_HUMAN
SKKIVKLL

SEQ ID NO: 18610 - protein, 8 aa, Homo sapiens
  ( 270 )...( 277 ): >GCFC_HUMAN
KRRIVFSV

SEQ ID NO: 18611 - protein, 8 aa, Homo sapiens
  ( 271 )...( 278 ): >GCFC_HUMAN
RRIVFSVK

SEQ ID NO: 18612 - protein, 8 aa, Homo sapiens
  ( 477 )...( 484 ): >GCFC_HUMAN
KQRASRLV

SEQ ID NO: 18613 - protein, 8 aa, Homo sapiens
  ( 5 )...( 12 ): >GFI1_HUMAN
FLVKSKKA

SEQ ID NO: 18614 - protein, 8 aa, Homo sapiens
  ( 401 )...( 408 ): >GFI1_HUMAN
CGKGFQRK

SEQ ID NO: 18615 - protein, 8 aa, Homo sapiens
  ( 402 )...( 409 ): >GFI1_HUMAN
GKGFQRKV

SEQ ID NO: 18616 - protein, 8 aa, Homo sapiens
  ( 201 )...( 208 ): >GSH2_HUMAN
NGKRMRTA

SEQ ID NO: 18617 - protein, 8 aa, Homo sapiens
  ( 202 )...( 209 ): >GSH2_HUMAN
GKRMRTAF

SEQ ID NO: 18618 - protein, 8 aa, Homo sapiens
  ( 146 )...( 153 ): >GSHI_HUMAN
SSKRMRTA

SEQ ID NO: 18619 - protein, 8 aa, Homo sapiens
  ( 94 )...( 101 ): >GT4R_HUMAN
RATPGKAR

SEQ ID NO: 18620 - protein, 8 aa, Homo sapiens
  ( 191 )...( 198 ): >GT4R_HUMAN
KRKSPAQV

SEQ ID NO: 18621 - protein, 8 aa, Homo sapiens
  ( 345 )...( 352 ): >GT4R_HUMAN
RIGVTLRK

SEQ ID NO: 18622 - protein, 8 aa, Homo sapiens
  ( 347 )...( 354 ): >GT4R_HUMAN
GVTLRKPR

SEQ ID NO: 18623 - protein, 8 aa, Homo sapiens
  ( 348 )...( 355 ): >GT4R_HUMAN
VTLRKPRG

SEQ ID NO: 18624 - protein, 8 aa, Homo sapiens
  ( 352 )...( 359 ): >GT4R_HUMAN
KPRGDAKK

SEQ ID NO: 18625 - protein, 8 aa, Homo sapiens
  ( 356 )...( 363 ): >GT4R_HUMAN
DAKKCRKV

SEQ ID NO: 18626 - protein, 8 aa, Homo sapiens
  ( 359 )...( 366 ): >GT4R_HUMAN
KCRKVYGM

SEQ ID NO: 18627 - protein, 8 aa, Homo sapiens
  ( 409 )...( 416 ): >HAIR_HUMAN
RALKRAGS

SEQ ID NO: 18628 - protein, 8 aa, Homo sapiens
  ( 130 )...( 137 ): >HAN1_HUMAN
LSKIKTLR

SEQ ID NO: 18629 - protein, 8 aa, Homo sapiens
  ( 131 )...( 138 ): >HAN1_HUMAN
SKIKTLRL

SEQ ID NO: 18630 - protein, 8 aa, Homo sapiens
  ( 132 )...( 139 ): >HAN1_HUMAN
KIKTLRLA

SEQ ID NO: 18631 - protein, 8 aa, Homo sapiens
  ( 194 )...( 201 ): >HAN1_HUMAN
VEKRIKGR

SEQ ID NO: 18632 - protein, 8 aa, Homo sapiens
  ( 195 )...( 202 ): >HAN1_HUMAN
EKRIKGRT

SEQ ID NO: 18633 - protein, 8 aa, Homo sapiens
  ( 97 )...( 104 ): >HAN2_HUMAN
PVKRRGTA

SEQ ID NO: 18634 - protein, 8 aa, Homo sapiens
  ( 98 )...( 105 ): >HAN2_HUMAN
VKRRGTAN

SEQ ID NO: 18635 - protein, 8 aa, Homo sapiens
  ( 135 )...( 142 ): >HAN2_HUMAN
LSKIKTLR

SEQ ID NO: 18636 - protein, 8 aa, Homo sapiens
  ( 136 )...( 143 ): >HAN2_HUMAN
SKIKTLRL

SEQ ID NO: 18637 - protein, 8 aa, Homo sapiens
  ( 137 )...( 144 ): >HAN2_HUMAN
KIKTLRLA

SEQ ID NO: 18638 - protein, 8 aa, Homo sapiens
  ( 199 )...( 206 ): >HAN2_HUMAN
KTKGRTGW

SEQ ID NO: 18639 - protein, 8 aa, Homo sapiens
  ( 71 )...( 78 ): >HEN1_HUMAN
RATAKYRT

SEQ ID NO: 18640 - protein, 8 aa, Homo sapiens
  ( 13 )...( 20 ): >HES2_HUMAN
LRKSLKPL

SEQ ID NO: 18641 - protein, 8 aa, Homo sapiens
  ( 14 )...( 21 ): >HES2_HUMAN
RKSLKPLL

SEQ ID NO: 18642 - protein, 8 aa, Homo sapiens
  ( 45 )...( 52 ): >HEY1_HUMAN
SQILARKR

SEQ ID NO: 18643 - protein, 8 aa, Homo sapiens
  ( 141 )...( 148 ): >HIC1_HUMAN
LVALCKKR

SEQ ID NO: 18644 - protein, 8 aa, Homo sapiens
  ( 142 )...( 149 ): >HIC1_HUMAN
VALCKKRL

SEQ ID NO: 18645 - protein, 8 aa, Homo sapiens
  ( 540 )...( 547 ): >HIC1_HUMAN
CGKKFTQR

SEQ ID NO: 18646 - protein, 8 aa, Homo sapiens
  ( 541 )...( 548 ): >HIC1_HUMAN
GKKFTQRG

SEQ ID NO: 18647 - protein, 8 aa, Homo sapiens
  ( 542 )...( 549 ): >HIC1_HUMAN
KKFTQRGT

SEQ ID NO: 18648 - protein, 8 aa, Homo sapiens
  ( 139 )...( 146 ): >HIC2_HUMAN
LKRAGKPF

SEQ ID NO: 18649 - protein, 8 aa, Homo sapiens
  ( 150 )...( 157 ): >HIFA_HUMAN
HRNGLVKK

SEQ ID NO: 18650 - protein, 8 aa, Homo sapiens
  ( 151 )...( 158 ): >HIFA_HUMAN
RNGLVKKG

SEQ ID NO: 18651 - protein, 8 aa, Homo sapiens
  ( 152 )...( 159 ): >HIFA_HUMAN
NGLVKKGK

SEQ ID NO: 18652 - protein, 8 aa, Homo sapiens
  ( 178 )...( 185 ): >HIFA_HUMAN
RGRTMNIK

SEQ ID NO: 18653 - protein, 8 aa, Homo sapiens
  ( 750 )...( 757 ): >HIFA_HUMAN
LSWKRVKG

SEQ ID NO: 18654 - protein, 8 aa, Homo sapiens
  ( 25 )...( 32 ): >HIK2_HUMAN
FCSVKKLK

SEQ ID NO: 18655 - protein, 8 aa, Homo sapiens
  ( 26 )...( 33 ): >HIK2_HUMAN
CSVKKLKI

SEQ ID NO: 18656 - protein, 8 aa, Homo sapiens
  ( 213 )...( 220 ): >HIK2_HUMAN
VVKCWKRG

SEQ ID NO: 18657 - protein, 8 aa, Homo sapiens
  ( 214 )...( 221 ): >HIK2_HUMAN
VKCWKRGT

SEQ ID NO: 18658 - protein, 8 aa, Homo sapiens
  ( 906 )...( 913 ): >HIK2_HUMAN
STVSKQRK

SEQ ID NO: 18659 - protein, 8 aa, Homo sapiens
  ( 60 )...( 67 ): >HMGC_HUMAN
PSKAAQKK

SEQ ID NO: 18660 - protein, 8 aa, Homo sapiens
  ( 167 )...( 174 ): >HN4A_HUMAN
IRAKKIAS

SEQ ID NO: 18661 - protein, 8 aa, Homo sapiens
  ( 168 )...( 175 ): >HN4A_HUMAN
RAKKIASI

SEQ ID NO: 18662 - protein, 8 aa, Homo sapiens
  ( 299 )...( 306 ): >HN4A_HUMAN
IKRLRSQV

SEQ ID NO: 18663 - protein, 8 aa, Homo sapiens
  ( 88 )...( 95 ): >HN4G_HUMAN
RISTRRST

SEQ ID NO: 18664 - protein, 8 aa, Homo sapiens
  ( 120 )...( 127 ): >HNFB_HUMAN
RAAKMIKG

SEQ ID NO: 18665 - protein, 8 aa, Homo sapiens
  ( 160 )...( 167 ): >HNFB_HUMAN
MKTQKRAA

SEQ ID NO: 18666 - protein, 8 aa, Homo sapiens
  ( 161 )...( 168 ): >HNFB_HUMAN
KTQKRAAL

SEQ ID NO: 18667 - protein, 8 aa, Homo sapiens
  ( 167 )...( 174 ): >HRX_HUMAN
SVKTSPRK

SEQ ID NO: 18668 - protein, 8 aa, Homo sapiens
  ( 168 )...( 175 ): >HRX_HUMAN
VKTSPRKP

SEQ ID NO: 18669 - protein, 8 aa, Homo sapiens
  ( 170 )...( 177 ): >HRX_HUMAN
TSPRKPRG

SEQ ID NO: 18670 - protein, 8 aa, Homo sapiens
  ( 216 )...( 223 ): >HRX_HUMAN
KSIEKKRG

SEQ ID NO: 18671 - protein, 8 aa, Homo sapiens
  ( 252 )...( 259 ): >HRX_HUMAN
SLKKIKRT

SEQ ID NO: 18672 - protein, 8 aa, Homo sapiens
  ( 255 )...( 262 ): >HRX_HUMAN
KIKRTPSA

SEQ ID NO: 18673 - protein, 8 aa, Homo sapiens
  ( 265 )...( 272 ): >HRX_HUMAN
QQATKIKK

SEQ ID NO: 18674 - protein, 8 aa, Homo sapiens
  ( 266 )...( 273 ): >HRX_HUMAN
QATKIKKL

SEQ ID NO: 18675 - protein, 8 aa, Homo sapiens
  ( 272 )...( 279 ): >HRX_HUMAN
KLRAGKLS

SEQ ID NO: 18676 - protein, 8 aa, Homo sapiens
  ( 282 )...( 289 ): >HRX_HUMAN
KSKFKTGK

SEQ ID NO: 18677 - protein, 8 aa, Homo sapiens
  ( 284 )...( 291 ): >HRX_HUMAN
KFKTGKLQ

SEQ ID NO: 18678 - protein, 8 aa, Homo sapiens
  ( 288 )...( 295 ): >HRX_HUMAN
GKLQIGRK

SEQ ID NO: 18679 - protein, 8 aa, Homo sapiens
  ( 289 )...( 296 ): >HRX_HUMAN
KLQIGRKG

SEQ ID NO: 18680 - protein, 8 aa, Homo sapiens
  ( 375 )...( 382 ): >HRX_HUMAN
LLQRAKKG

SEQ ID NO: 18681 - protein, 8 aa, Homo sapiens
  ( 376 )...( 383 ): >HRX_HUMAN
LQRAKKGA

SEQ ID NO: 18682 - protein, 8 aa, Homo sapiens
  ( 377 )...( 384 ): >HRX_HUMAN
QRAKKGAQ

SEQ ID NO: 18683 - protein, 8 aa, Homo sapiens
  ( 379 )...( 386 ): >HRX_HUMAN
AKKGAQKK

SEQ ID NO: 18684 - protein, 8 aa, Homo sapiens
  ( 380 )...( 387 ): >HRX_HUMAN
KKGAQKKI

SEQ ID NO: 18685 - protein, 8 aa, Homo sapiens
  ( 393 )...( 400 ): >HRX_HUMAN
QLQGRKVK

SEQ ID NO: 18686 - protein, 8 aa, Homo sapiens
  ( 394 )...( 401 ): >HRX_HUMAN
LQGRKVKT

SEQ ID NO: 18687 - protein, 8 aa, Homo sapiens
  ( 395 )...( 402 ): >HRX_HUMAN
QGRKVKTQ

SEQ ID NO: 18688 - protein, 8 aa, Homo sapiens
  ( 396 )...( 403 ): >HRX_HUMAN
GRKVKTQV

SEQ ID NO: 18689 - protein, 8 aa, Homo sapiens
  ( 398 )...( 405 ): >HRX_HUMAN
KVKTQVKN

SEQ ID NO: 18690 - protein, 8 aa, Homo sapiens
  ( 400 )...( 407 ): >HRX_HUMAN
KTQVKNIR

SEQ ID NO: 18691 - protein, 8 aa, Homo sapiens
  ( 419 )...( 426 ): >HRX_HUMAN
SRIIKTPR

SEQ ID NO: 18692 - protein, 8 aa, Homo sapiens
  ( 538 )...( 545 ): >HRX_HUMAN
FGSRTTKK

SEQ ID NO: 18693 - protein, 8 aa, Homo sapiens
  ( 539 )...( 546 ): >HRX_HUMAN
GSRTTKKL

SEQ ID NO: 18694 - protein, 8 aa, Homo sapiens
  ( 602 )...( 609 ): >HRX_HUMAN
APMQGKRK

SEQ ID NO: 18695 - protein, 8 aa, Homo sapiens
  ( 603 )...( 610 ): >HRX_HUMAN
PMQGKRKS

SEQ ID NO: 18696 - protein, 8 aa, Homo sapiens
  ( 604 )...( 611 ): >HRX_HUMAN
MQGKRKSI

SEQ ID NO: 18697 - protein, 8 aa, Homo sapiens
  ( 605 )...( 612 ): >HRX_HUMAN
QGKRKSIL

SEQ ID NO: 18698 - protein, 8 aa, Homo sapiens
  ( 754 )...( 761 ): >HRX_HUMAN
SMRTRSGR

SEQ ID NO: 18699 - protein, 8 aa, Homo sapiens
  ( 756 )...( 763 ): >HRX_HUMAN
RTRSGRLS

SEQ ID NO: 18700 - protein, 8 aa, Homo sapiens
  ( 892 )...( 899 ): >HRX_HUMAN
KRKKGSEI

SEQ ID NO: 18701 - protein, 8 aa, Homo sapiens
  ( 956 )...( 963 ): >HRX_HUMAN
VKTKILIK

SEQ ID NO: 18702 - protein, 8 aa, Homo sapiens
  ( 958 )...( 965 ): >HRX_HUMAN
TKILIKKG

SEQ ID NO: 18703 - protein, 8 aa, Homo sapiens
  ( 960 )...( 967 ): >HRX_HUMAN
ILIKKGRG

SEQ ID NO: 18704 - protein, 8 aa, Homo sapiens
  ( 961 )...( 968 ): >HRX_HUMAN
LIKKGRGN

SEQ ID NO: 18705 - protein, 8 aa, Homo sapiens
  ( 962 )...( 969 ): >HRX_HUMAN
IKKGRGNL

SEQ ID NO: 18706 - protein, 8 aa, Homo sapiens
  ( 1021 )...( 1028 ): >HRX_HUMAN
KRVASLLK

SEQ ID NO: 18707 - protein, 8 aa, Homo sapiens
  ( 1022 )...( 1029 ): >HRX_HUMAN
RVASLLKK

SEQ ID NO: 18708 - protein, 8 aa, Homo sapiens
  ( 1024 )...( 1031 ): >HRX_HUMAN
ASLLKKAK

SEQ ID NO: 18709 - protein, 8 aa, Homo sapiens
  ( 1025 )...( 1032 ): >HRX_HUMAN
SLLKKAKA

SEQ ID NO: 18710 - protein, 8 aa, Homo sapiens
  ( 1026 )...( 1033 ): >HRX_HUMAN
LLKKAKAQ

SEQ ID NO: 18711 - protein, 8 aa, Homo sapiens
  ( 1027 )...( 1034 ): >HRX_HUMAN
LKKAKAQL

SEQ ID NO: 18712 - protein, 8 aa, Homo sapiens
  ( 1028 )...( 1035 ): >HRX_HUMAN
KKAKAQLC

SEQ ID NO: 18713 - protein, 8 aa, Homo sapiens
  ( 1029 )...( 1036 ): >HRX_HUMAN
KAKAQLCK

SEQ ID NO: 18714 - protein, 8 aa, Homo sapiens
  ( 1062 )...( 1069 ): >HRX_HUMAN
SVRGPRIK

SEQ ID NO: 18715 - protein, 8 aa, Homo sapiens
  ( 1063 )...( 1070 ): >HRX_HUMAN
VRGPRIKH

SEQ ID NO: 18716 - protein, 8 aa, Homo sapiens
  ( 1064 )...( 1071 ): >HRX_HUMAN
RGPRIKHV

SEQ ID NO: 18717 - protein, 8 aa, Homo sapiens
  ( 1068 )...( 1075 ): >HRX_HUMAN
IKHVCRRA

SEQ ID NO: 18718 - protein, 8 aa, Homo sapiens
  ( 1069 )...( 1076 ): >HRX_HUMAN
KHVCRRAA

SEQ ID NO: 18719 - protein, 8 aa, Homo sapiens
  ( 1130 )...( 1137 ): >HRX_HUMAN
KPIKPVTR

SEQ ID NO: 18720 - protein, 8 aa, Homo sapiens
  ( 1132 )...( 1139 ): >HRX_HUMAN
IKPVTRNK

SEQ ID NO: 18721 - protein, 8 aa, Homo sapiens
  ( 1133 )...( 1140 ): >HRX_HUMAN
KPVTRNKA

SEQ ID NO: 18722 - protein, 8 aa, Homo sapiens
  ( 1178 )...( 1185 ): >HRX_HUMAN
KFGGRNIK

SEQ ID NO: 18723 - protein, 8 aa, Homo sapiens
  ( 1179 )...( 1186 ): >HRX_HUMAN
FGGRNIKK

SEQ ID NO: 18724 - protein, 8 aa, Homo sapiens
  ( 1180 )...( 1187 ): >HRX_HUMAN
GGRNIKKQ

SEQ ID NO: 18725 - protein, 8 aa, Homo sapiens
  ( 1181 )...( 1188 ): >HRX_HUMAN
GRNIKKQC

SEQ ID NO: 18726 - protein, 8 aa, Homo sapiens
  ( 1207 )...( 1214 ): >HRX_HUMAN
QKQAKAVK

SEQ ID NO: 18727 - protein, 8 aa, Homo sapiens
  ( 1208 )...( 1215 ): >HRX_HUMAN
KQAKAVKK

SEQ ID NO: 18728 - protein, 8 aa, Homo sapiens
  ( 1209 )...( 1216 ): >HRX_HUMAN
QAKAVKKK

SEQ ID NO: 18729 - protein, 8 aa, Homo sapiens
  ( 1210 )...( 1217 ): >HRX_HUMAN
AKAVKKKE

SEQ ID NO: 18730 - protein, 8 aa, Homo sapiens
  ( 1211 )...( 1218 ): >HRX_HUMAN
KAVKKKEK

SEQ ID NO: 18731 - protein, 8 aa, Homo sapiens
  ( 1212 )...( 1219 ): >HRX_HUMAN
AVKKKEKK

SEQ ID NO: 18732 - protein, 8 aa, Homo sapiens
  ( 1291 )...( 1298 ): >HRX_HUMAN
SRKSSKQV

SEQ ID NO: 18733 - protein, 8 aa, Homo sapiens
  ( 1292 )...( 1299 ): >HRX_HUMAN
RKSSKQVS

SEQ ID NO: 18734 - protein, 8 aa, Homo sapiens
  ( 1341 )...( 1348 ): >HRX_HUMAN
QSKQKKVA

SEQ ID NO: 18735 - protein, 8 aa, Homo sapiens
  ( 1342 )...( 1349 ): >HRX_HUMAN
SKQKKVAP

SEQ ID NO: 18736 - protein, 8 aa, Homo sapiens
  ( 1345 )...( 1352 ): >HRX_HUMAN
KKVAPRPS

SEQ ID NO: 18737 - protein, 8 aa, Homo sapiens
  ( 1353 )...( 1360 ): >HRX_HUMAN
IPVKQKPK

SEQ ID NO: 18738 - protein, 8 aa, Homo sapiens
  ( 1515 )...( 1522 ): >HRX_HUMAN
PTKPTKKK

SEQ ID NO: 18739 - protein, 8 aa, Homo sapiens
  ( 1521 )...( 1528 ): >HRX_HUMAN
KKKVWICT

SEQ ID NO: 18740 - protein, 8 aa, Homo sapiens
  ( 1522 )...( 1529 ): >HRX_HUMAN
KKVWICTK

SEQ ID NO: 18741 - protein, 8 aa, Homo sapiens
  ( 1748 )...( 1755 ): >HRX_HUMAN
KKANSMVK

SEQ ID NO: 18742 - protein, 8 aa, Homo sapiens
  ( 1821 )...( 1828 ): >HRX_HUMAN
KKIIPAPK

SEQ ID NO: 18743 - protein, 8 aa, Homo sapiens
  ( 2003 )...( 2010 ): >HRX_HUMAN
GISLRRKF

SEQ ID NO: 18744 - protein, 8 aa, Homo sapiens
  ( 2061 )...( 2068 ): >HRX_HUMAN
ARKRCVYT

SEQ ID NO: 18745 - protein, 8 aa, Homo sapiens
  ( 2139 )...( 2146 ): >HRX_HUMAN
ISKVPRIR

SEQ ID NO: 18746 - protein, 8 aa, Homo sapiens
  ( 2140 )...( 2147 ): >HRX_HUMAN
SKVPRIRT

SEQ ID NO: 18747 - protein, 8 aa, Homo sapiens
  ( 2141 )...( 2148 ): >HRX_HUMAN
KVPRIRTP

SEQ ID NO: 18748 - protein, 8 aa, Homo sapiens
  ( 2513 )...( 2520 ): >HRX_HUMAN
QAPRKRTV

SEQ ID NO: 18749 - protein, 8 aa, Homo sapiens
  ( 2517 )...( 2524 ): >HRX_HUMAN
KRTVKVTL

SEQ ID NO: 18750 - protein, 8 aa, Homo sapiens
  ( 3214 )...( 3221 ): >HRX_HUMAN
PSSGLKKR

SEQ ID NO: 18751 - protein, 8 aa, Homo sapiens
  ( 3215 )...( 3222 ): >HRX_HUMAN
SSGLKKRP

SEQ ID NO: 18752 - protein, 8 aa, Homo sapiens
  ( 3216 )...( 3223 ): >HRX_HUMAN
SGLKKRPI

SEQ ID NO: 18753 - protein, 8 aa, Homo sapiens
  ( 3217 )...( 3224 ): >HRX_HUMAN
GLKKRPIS

SEQ ID NO: 18754 - protein, 8 aa, Homo sapiens
  ( 3285 )...( 3292 ): >HRX_HUMAN
IIKRSKSS

SEQ ID NO: 18755 - protein, 8 aa, Homo sapiens
  ( 3286 )...( 3293 ): >HRX_HUMAN
IKRSKSSI

SEQ ID NO: 18756 - protein, 8 aa, Homo sapiens
  ( 3287 )...( 3294 ): >HRX_HUMAN
KRSKSSIM

SEQ ID NO: 18757 - protein, 8 aa, Homo sapiens
  ( 3534 )...( 3541 ): >HRX_HUMAN
TKPKPKTK

SEQ ID NO: 18758 - protein, 8 aa, Homo sapiens
  ( 3662 )...( 3669 ): >HRX_HUMAN
EKKPKKGL

SEQ ID NO: 18759 - protein, 8 aa, Homo sapiens
  ( 3663 )...( 3670 ): >HRX_HUMAN
KKPKKGLV

SEQ ID NO: 18760 - protein, 8 aa, Homo sapiens
  ( 3664 )...( 3671 ): >HRX_HUMAN
KPKKGLVF

SEQ ID NO: 18761 - protein, 8 aa, Homo sapiens
  ( 3801 )...( 3808 ): >HRX_HUMAN
VQLKSARR

SEQ ID NO: 18762 - protein, 8 aa, Homo sapiens
  ( 3802 )...( 3809 ): >HRX_HUMAN
QLKSARRA

SEQ ID NO: 18763 - protein, 8 aa, Homo sapiens
  ( 3803 )...( 3810 ): >HRX_HUMAN
LKSARRAT

SEQ ID NO: 18764 - protein, 8 aa, Homo sapiens
  ( 3804 )...( 3811 ): >HRX_HUMAN
KSARRATS

SEQ ID NO: 18765 - protein, 8 aa, Homo sapiens
  ( 177 )...( 184 ): >HTF4_HUMAN
PLQAKKVR

SEQ ID NO: 18766 - protein, 8 aa, Homo sapiens
  ( 182 )...( 189 ): >HTF4_HUMAN
KVRKVPPG

SEQ ID NO: 18767 - protein, 8 aa, Homo sapiens
  ( 549 )...( 556 ): >HTF4_HUMAN
IKVSSRGR

SEQ ID NO: 18768 - protein, 8 aa, Homo sapiens
  ( 550 )...( 557 ): >HTF4_HUMAN
KVSSRGRT

SEQ ID NO: 18769 - protein, 8 aa, Homo sapiens
  ( 98 )...( 105 ): >HXA2_HUMAN
MKEKKAAK

SEQ ID NO: 18770 - protein, 8 aa, Homo sapiens
  ( 101 )...( 108 ): >HXA2_HUMAN
KKAAKKTA

SEQ ID NO: 18771 - protein, 8 aa, Homo sapiens
  ( 189 )...( 196 ): >HXA3_HUMAN
ASSKRART

SEQ ID NO: 18772 - protein, 8 aa, Homo sapiens
  ( 190 )...( 197 ): >HXA3_HUMAN
SSKRARTA

SEQ ID NO: 18773 - protein, 8 aa, Homo sapiens
  ( 192 )...( 199 ): >HXA3_HUMAN
KRARTAYT

SEQ ID NO: 18774 - protein, 8 aa, Homo sapiens
  ( 195 )...( 202 ): >HXA5_HUMAN
GKRARTAY

SEQ ID NO: 18775 - protein, 8 aa, Homo sapiens
  ( 196 )...( 203 ): >HXA5_HUMAN
KRARTAYT

SEQ ID NO: 18776 - protein, 8 aa, Homo sapiens
  ( 314 )...( 321 ): >HXAA_HUMAN
LTAKSGRK

SEQ ID NO: 18777 - protein, 8 aa, Homo sapiens
  ( 325 )...( 332 ): >HXAD_HUMAN
KRVPYTKV

SEQ ID NO: 18778 - protein, 8 aa, Homo sapiens
  ( 352 )...( 359 ): >HXAD_HUMAN
RRRISATT

SEQ ID NO: 18779 - protein, 8 aa, Homo sapiens
  ( 378 )...( 385 ): >HXAD_HUMAN
KKVINKLK

SEQ ID NO: 18780 - protein, 8 aa, Homo sapiens
  ( 379 )...( 386 ): >HXAD_HUMAN
KVINKLKT

SEQ ID NO: 18781 - protein, 8 aa, Homo sapiens
  ( 101 )...( 108 ): >HXB2_HUMAN
KKSAKKPS

SEQ ID NO: 18782 - protein, 8 aa, Homo sapiens
  ( 136 )...( 143 ): >HXB3_HUMAN
SRQTSKLK

SEQ ID NO: 18783 - protein, 8 aa, Homo sapiens
  ( 185 )...( 192 ): >HXB3_HUMAN
SAASKRAR

SEQ ID NO: 18784 - protein, 8 aa, Homo sapiens
  ( 186 )...( 193 ): >HXB3_HUMAN
AASKRART

SEQ ID NO: 18785 - protein, 8 aa, Homo sapiens
  ( 187 )...( 194 ): >HXB3_HUMAN
ASKRARTA

SEQ ID NO: 18786 - protein, 8 aa, Homo sapiens
  ( 189 )...( 196 ): >HXB3_HUMAN
KRARTAYT

SEQ ID NO: 18787 - protein, 8 aa, Homo sapiens
  ( 194 )...( 201 ): >HXB5_HUMAN
GKRARTAY

SEQ ID NO: 18788 - protein, 8 aa, Homo sapiens
  ( 195 )...( 202 ): >HXB5_HUMAN
KRARTAYT

SEQ ID NO: 18789 - protein, 8 aa, Homo sapiens
  ( 91 )...( 98 ): >HXBD_HUMAN
RVSRSSLK

SEQ ID NO: 18790 - protein, 8 aa, Homo sapiens
  ( 246 )...( 253 ): >HXBD_HUMAN
RRKISAAT

SEQ ID NO: 18791 - protein, 8 aa, Homo sapiens
  ( 270 )...( 277 ): >HXBD_HUMAN
KEKKVLAK

SEQ ID NO: 18792 - protein, 8 aa, Homo sapiens
  ( 272 )...( 279 ): >HXBD_HUMAN
KKVLAKVK

SEQ ID NO: 18793 - protein, 8 aa, Homo sapiens
  ( 273 )...( 280 ): >HXBD_HUMAN
KVLAKVKN

SEQ ID NO: 18794 - protein, 8 aa, Homo sapiens
  ( 155 )...( 162 ): >HXC5_HUMAN
GKRSRTSY

SEQ ID NO: 18795 - protein, 8 aa, Homo sapiens
  ( 263 )...( 270 ): >HXCA_HUMAN
LTAKSGRK

SEQ ID NO: 18796 - protein, 8 aa, Homo sapiens
  ( 263 )...( 270 ): >HXCD_HUMAN
KRVPYTKV

SEQ ID NO: 18797 - protein, 8 aa, Homo sapiens
  ( 290 )...( 297 ): >HXCD_HUMAN
RRRISATT

SEQ ID NO: 18798 - protein, 8 aa, Homo sapiens
  ( 316 )...( 323 ): >HXCD_HUMAN
KKVVSKSK

SEQ ID NO: 18799 - protein, 8 aa, Homo sapiens
  ( 208 )...( 215 ): >HXD1_HUMAN
MKVKRNAS

SEQ ID NO: 18800 - protein, 8 aa, Homo sapiens
  ( 213 )...( 220 ): >HXD1_HUMAN
NASKKGKL

SEQ ID NO: 18801 - protein, 8 aa, Homo sapiens
  ( 175 )...( 182 ): >HXD3_HUMAN
GPASKRVR

SEQ ID NO: 18802 - protein, 8 aa, Homo sapiens
  ( 176 )...( 183 ): >HXD3_HUMAN
PASKRVRT

SEQ ID NO: 18803 - protein, 8 aa, Homo sapiens
  ( 177 )...( 184 ): >HXD3_HUMAN
ASKRVRTA

SEQ ID NO: 18804 - protein, 8 aa, Homo sapiens
  ( 179 )...( 186 ): >HXD3_HUMAN
KRVRTAYT

SEQ ID NO: 18805 - protein, 8 aa, Homo sapiens
  ( 214 )...( 221 ): >HXD4_HUMAN
KLPNTKGR

SEQ ID NO: 18806 - protein, 8 aa, Homo sapiens
  ( 119 )...( 126 ): >HXDA_HUMAN
KRNKLISA

SEQ ID NO: 18807 - protein, 8 aa, Homo sapiens
  ( 261 )...( 268 ): >HXDA_HUMAN
LTAKSGRK

SEQ ID NO: 18808 - protein, 8 aa, Homo sapiens
  ( 320 )...( 327 ): >HXDD_HUMAN
RVKDKKIV

SEQ ID NO: 18809 - protein, 8 aa, Homo sapiens
  ( 324 )...( 331 ): >HXDD_HUMAN
KKIVSKLK

SEQ ID NO: 18810 - protein, 8 aa, Homo sapiens
  ( 5 )...( 12 ): >ID2_HUMAN
SPVRSVRK

SEQ ID NO: 18811 - protein, 8 aa, Homo sapiens
  ( 6 )...( 13 ): >ID4_HUMAN
PVRPSGRK

SEQ ID NO: 18812 - protein, 8 aa, Homo sapiens
  ( 7 )...( 14 ): >ID4_HUMAN
VRPSGRKA

SEQ ID NO: 18813 - protein, 8 aa, Homo sapiens
  ( 84 )...( 91 ): >ID4_HUMAN
PNKKVSKV

SEQ ID NO: 18814 - protein, 8 aa, Homo sapiens
  ( 172 )...( 179 ): >ITF2_HUMAN
KVRKVPPG

SEQ ID NO: 18815 - protein, 8 aa, Homo sapiens
  ( 277 )...( 284 ): >JUNB_HUMAN
RNRLAATK

SEQ ID NO: 18816 - protein, 8 aa, Homo sapiens
  ( 279 )...( 286 ): >JUNB_HUMAN
RLAATKCR

SEQ ID NO: 18817 - protein, 8 aa, Homo sapiens
  ( 280 )...( 287 ): >JUNB_HUMAN
LAATKCRK

SEQ ID NO: 18818 - protein, 8 aa, Homo sapiens
  ( 425 )...( 432 ): >KLF5_HUMAN
RKHTGAKP

SEQ ID NO: 18819 - protein, 8 aa, Homo sapiens
  ( 206 )...( 213 ): >KLF6_HUMAN
GCRKVYTK

SEQ ID NO: 18820 - protein, 8 aa, Homo sapiens
  ( 207 )...( 214 ): >KLF6_HUMAN
CRKVYTKS

SEQ ID NO: 18821 - protein, 8 aa, Homo sapiens
  ( 208 )...( 215 ): >KLF6_HUMAN
RKVYTKSS

SEQ ID NO: 18822 - protein, 8 aa, Homo sapiens
  ( 251 )...( 258 ): >KLF6_HUMAN
FRKHTGAK

SEQ ID NO: 18823 - protein, 8 aa, Homo sapiens
  ( 252 )...( 259 ): >KLF6_HUMAN
RKHTGAKP

SEQ ID NO: 18824 - protein, 8 aa, Homo sapiens
  ( 163 )...( 170 ): >KLF7_HUMAN
TLKLVAKK

SEQ ID NO: 18825 - protein, 8 aa, Homo sapiens
  ( 164 )...( 171 ): >KLF7_HUMAN
LKLVAKKA

SEQ ID NO: 18826 - protein, 8 aa, Homo sapiens
  ( 225 )...( 232 ): >KLF7_HUMAN
GCRKVYTK

SEQ ID NO: 18827 - protein, 8 aa, Homo sapiens
  ( 226 )...( 233 ): >KLF7_HUMAN
CRKVYTKS

SEQ ID NO: 18828 - protein, 8 aa, Homo sapiens
  ( 227 )...( 234 ): >KLF7_HUMAN
RKVYTKSS

SEQ ID NO: 18829 - protein, 8 aa, Homo sapiens
  ( 271 )...( 278 ): >KLF7_HUMAN
RKHTGAKP

SEQ ID NO: 18830 - protein, 8 aa, Homo sapiens
  ( 70 )...( 77 ): >KR18_HUMAN
KSCVKIAR

SEQ ID NO: 18831 - protein, 8 aa, Homo sapiens
  ( 71 )...( 78 ): >KR18_HUMAN
SCVKIARK

SEQ ID NO: 18832 - protein, 8 aa, Homo sapiens
  ( 72 )...( 79 ): >KR18_HUMAN
CVKIARKP

SEQ ID NO: 18833 - protein, 8 aa, Homo sapiens
  ( 243 )...( 250 ): >KR18_HUMAN
LLTQRRKA

SEQ ID NO: 18834 - protein, 8 aa, Homo sapiens
  ( 767 )...( 774 ): >KR18_HUMAN
GKAFRVRS

SEQ ID NO: 18835 - protein, 8 aa, Homo sapiens
  ( 135 )...( 142 ): >LYL1_HUMAN
KVARRVFT

SEQ ID NO: 18836 - protein, 8 aa, Homo sapiens
  ( 43 )...( 50 ): >MAD4_HUMAN
KAAGLVRK

SEQ ID NO: 18837 - protein, 8 aa, Homo sapiens
  ( 92 )...( 99 ): >MAD4_HUMAN
LSLLKRAK

SEQ ID NO: 18838 - protein, 8 aa, Homo sapiens
  ( 93 )...( 100 ): >MAD4_HUMAN
SLLKRAKV

SEQ ID NO: 18839 - protein, 8 aa, Homo sapiens
  ( 94 )...( 101 ): >MAD4_HUMAN
LLKRAKVH

SEQ ID NO: 18840 - protein, 8 aa, Homo sapiens
  ( 95 )...( 102 ): >MAD4_HUMAN
LKRAKVHI

SEQ ID NO: 18841 - protein, 8 aa, Homo sapiens
  ( 203 )...( 210 ): >MAD_HUMAN
STSIKRIK

SEQ ID NO: 18842 - protein, 8 aa, Homo sapiens
  ( 204 )...( 211 ): >MAD_HUMAN
TSIKRIKL

SEQ ID NO: 18843 - protein, 8 aa, Homo sapiens
  ( 205 )...( 212 ): >MAD_HUMAN
SIKRIKLQ

SEQ ID NO: 18844 - protein, 8 aa, Homo sapiens
  ( 5 )...( 12 ): >MAFG_HUMAN
NKGNKALK

SEQ ID NO: 18845 - protein, 8 aa, Homo sapiens
  ( 6 )...( 13 ): >MAFG_HUMAN
KGNKALKV

SEQ ID NO: 18846 - protein, 8 aa, Homo sapiens
  ( 7 )...( 14 ): >MAFG_HUMAN
GNKALKVK

SEQ ID NO: 18847 - protein, 8 aa, Homo sapiens
  ( 9 )...( 16 ): >MAFG_HUMAN
KALKVKRE

SEQ ID NO: 18848 - protein, 8 aa, Homo sapiens
  ( 65 )...( 72 ): >MAFG_HUMAN
AASCRVKR

SEQ ID NO: 18849 - protein, 8 aa, Homo sapiens
  ( 66 )...( 73 ): >MAFG_HUMAN
ASCRVKRV

SEQ ID NO: 18850 - protein, 8 aa, Homo sapiens
  ( 67 )...( 74 ): >MAFG_HUMAN
SCRVKRVT

SEQ ID NO: 18851 - protein, 8 aa, Homo sapiens
  ( 68 )...( 75 ): >MAFG_HUMAN
CRVKRVTQ

SEQ ID NO: 18852 - protein, 8 aa, Homo sapiens
  ( 6 )...( 13 ): >MAFK_HUMAN
KPNKALKV

SEQ ID NO: 18853 - protein, 8 aa, Homo sapiens
  ( 7 )...( 14 ): >MAFK_HUMAN
PNKALKVK

SEQ ID NO: 18854 - protein, 8 aa, Homo sapiens
  ( 8 )...( 15 ): >MAFK_HUMAN
NKALKVKK

SEQ ID NO: 18855 - protein, 8 aa, Homo sapiens
  ( 9 )...( 16 ): >MAFK_HUMAN
KALKVKKE

SEQ ID NO: 18856 - protein, 8 aa, Homo sapiens
  ( 65 )...( 72 ): >MAFK_HUMAN
AASCRIKR

SEQ ID NO: 18857 - protein, 8 aa, Homo sapiens
  ( 66 )...( 73 ): >MAFK_HUMAN
ASCRIKRV

SEQ ID NO: 18858 - protein, 8 aa, Homo sapiens
  ( 67 )...( 74 ): >MAFK_HUMAN
SCRIKRVT

SEQ ID NO: 18859 - protein, 8 aa, Homo sapiens
  ( 68 )...( 75 ): >MAFK_HUMAN
CRIKRVTQ

SEQ ID NO: 18860 - protein, 8 aa, Homo sapiens
  ( 132 )...( 139 ): >MAT1_HUMAN
VIQKNKLK

SEQ ID NO: 18861 - protein, 8 aa, Homo sapiens
  ( 214 )...( 221 ): >MAT1_HUMAN
KPKPVKPV

SEQ ID NO: 18862 - protein, 8 aa, Homo sapiens
  ( 182 )...( 189 ): >MAZ_HUMAN
KKTKSKGP

SEQ ID NO: 18863 - protein, 8 aa, Homo sapiens
  ( 269 )...( 276 ): >MAZ_HUMAN
TASGKRIR

SEQ ID NO: 18864 - protein, 8 aa, Homo sapiens
  ( 1 )...( 8 ): >MEFA_HUMAN
MGRKKIQI

SEQ ID NO: 18865 - protein, 8 aa, Homo sapiens
  ( 2 )...( 9 ): >MEFA_HUMAN
GRKKIQIT

SEQ ID NO: 18866 - protein, 8 aa, Homo sapiens
  ( 18 )...( 25 ): >MEFA_HUMAN
QVTFTKRK

SEQ ID NO: 18867 - protein, 8 aa, Homo sapiens
  ( 20 )...( 27 ): >MEFA_HUMAN
TFTKRKFG

SEQ ID NO: 18868 - protein, 8 aa, Homo sapiens
  ( 22 )...( 29 ): >MEFA_HUMAN
TKRKFGLM

SEQ ID NO: 18869 - protein, 8 aa, Homo sapiens
  ( 25 )...( 32 ): >MEFA_HUMAN
KFGLMKKA

SEQ ID NO: 18870 - protein, 8 aa, Homo sapiens
  ( 1 )...( 8 ): >MEFB_HUMAN
MGRKKIQI

SEQ ID NO: 18871 - protein, 8 aa, Homo sapiens
  ( 2 )...( 9 ): >MEFB_HUMAN
GRKKIQIS

SEQ ID NO: 18872 - protein, 8 aa, Homo sapiens
  ( 4 )...( 11 ): >MEFB_HUMAN
KKIQISRI

SEQ ID NO: 18873 - protein, 8 aa, Homo sapiens
  ( 18 )...( 25 ): >MEFB_HUMAN
QVTFTKRK

SEQ ID NO: 18874 - protein, 8 aa, Homo sapiens
  ( 20 )...( 27 ): >MEFB_HUMAN
TFTKRKFG

SEQ ID NO: 18875 - protein, 8 aa, Homo sapiens
  ( 22 )...( 29 ): >MEFB_HUMAN
TKRKFGLM

SEQ ID NO: 18876 - protein, 8 aa, Homo sapiens
  ( 25 )...( 32 ): >MEFB_HUMAN
KFGLMKKA

SEQ ID NO: 18877 - protein, 8 aa, Homo sapiens
  ( 87 )...( 94 ): >MEFB_HUMAN
TLKRRGIG

SEQ ID NO: 18878 - protein, 8 aa, Homo sapiens
  ( 1 )...( 8 ): >MEFC_HUMAN
MGRKKIQI

SEQ ID NO: 18879 - protein, 8 aa, Homo sapiens
  ( 2 )...( 9 ): >MEFC_HUMAN
GRKKIQIT

SEQ ID NO: 18880 - protein, 8 aa, Homo sapiens
  ( 18 )...( 25 ): >MEFC_HUMAN
QVTFTKRK

SEQ ID NO: 18881 - protein, 8 aa, Homo sapiens
  ( 20 )...( 27 ): >MEFC_HUMAN
TFTKRKFG

SEQ ID NO: 18882 - protein, 8 aa, Homo sapiens
  ( 22 )...( 29 ): >MEFC_HUMAN
TKRKFGLM

SEQ ID NO: 18883 - protein, 8 aa, Homo sapiens
  ( 25 )...( 32 ): >MEFC_HUMAN
KFGLMKKA

SEQ ID NO: 18884 - protein, 8 aa, Homo sapiens
  ( 87 )...( 94 ): >MEFC_HUMAN
TLRKKGLN

SEQ ID NO: 18885 - protein, 8 aa, Homo sapiens
  ( 88 )...( 95 ): >MEFC_HUMAN
LRKKGLNG

SEQ ID NO: 18886 - protein, 8 aa, Homo sapiens
  ( 89 )...( 96 ): >MEFC_HUMAN
RKKGLNGC

SEQ ID NO: 18887 - protein, 8 aa, Homo sapiens
  ( 461 )...( 468 ): >MEFC_HUMAN
SVKRMRLS

SEQ ID NO: 18888 - protein, 8 aa, Homo sapiens
  ( 1 )...( 8 ): >MEFD_HUMAN
MGRKKIQI

SEQ ID NO: 18889 - protein, 8 aa, Homo sapiens
  ( 2 )...( 9 ): >MEFD_HUMAN
GRKKIQIQ

SEQ ID NO: 18890 - protein, 8 aa, Homo sapiens
  ( 18 )...( 25 ): >MEFD_HUMAN
QVTFTKRK

SEQ ID NO: 18891 - protein, 8 aa, Homo sapiens
  ( 20 )...( 27 ): >MEFD_HUMAN
TFTKRKFG

SEQ ID NO: 18892 - protein, 8 aa, Homo sapiens
  ( 22 )...( 29 ): >MEFD_HUMAN
TKRKFGLM

SEQ ID NO: 18893 - protein, 8 aa, Homo sapiens
  ( 25 )...( 32 ): >MEFD_HUMAN
KFGLMKKA

SEQ ID NO: 18894 - protein, 8 aa, Homo sapiens
  ( 88 )...( 95 ): >MEFD_HUMAN
LRKKGFNG

SEQ ID NO: 18895 - protein, 8 aa, Homo sapiens
  ( 507 )...( 514 ): >MEFD_HUMAN
GSAVKRMR

SEQ ID NO: 18896 - protein, 8 aa, Homo sapiens
  ( 508 )...( 515 ): >MEFD_HUMAN
SAVKRMRL

SEQ ID NO: 18897 - protein, 8 aa, Homo sapiens
  ( 50 )...( 57 ): >MK08_HUMAN
RNVAIKKL

SEQ ID NO: 18898 - protein, 8 aa, Homo sapiens
  ( 52 )...( 59 ): >MK08_HUMAN
VAIKKLSR

SEQ ID NO: 18899 - protein, 8 aa, Homo sapiens
  ( 53 )...( 60 ): >MK08_HUMAN
AIKKLSRP

SEQ ID NO: 18900 - protein, 8 aa, Homo sapiens
  ( 250 )...( 257 ): >MK08_HUMAN
KKLQPTVR

SEQ ID NO: 18901 - protein, 8 aa, Homo sapiens
  ( 288 )...( 295 ): >MK08_HUMAN
KLKASQAR

SEQ ID NO: 18902 - protein, 8 aa, Homo sapiens
  ( 366 )...( 373 ): >MK08_HUMAN
RTKNGVIR

SEQ ID NO: 18903 - protein, 8 aa, Homo sapiens
  ( 52 )...( 59 ): >MK09_HUMAN
VAVKKLSR

SEQ ID NO: 18904 - protein, 8 aa, Homo sapiens
  ( 53 )...( 60 ): >MK09_HUMAN
AVKKLSRP

SEQ ID NO: 18905 - protein, 8 aa, Homo sapiens
  ( 250 )...( 257 ): >MK09_HUMAN
KKLQPTVR

SEQ ID NO: 18906 - protein, 8 aa, Homo sapiens
  ( 288 )...( 295 ): >MK09_HUMAN
KIKTSQAR

SEQ ID NO: 18907 - protein, 8 aa, Homo sapiens
  ( 366 )...( 373 ): >MK09_HUMAN
RSKNGVVK

SEQ ID NO: 18908 - protein, 8 aa, Homo sapiens
  ( 88 )...( 95 ): >MK10_HUMAN
RNVAIKKL

SEQ ID NO: 18909 - protein, 8 aa, Homo sapiens
  ( 90 )...( 97 ): >MK10_HUMAN
VAIKKLSR

SEQ ID NO: 18910 - protein, 8 aa, Homo sapiens
  ( 91 )...( 98 ): >MK10_HUMAN
AIKKLSRP

SEQ ID NO: 18911 - protein, 8 aa, Homo sapiens
  ( 288 )...( 295 ): >MK10_HUMAN
KKLQPTVR

SEQ ID NO: 18912 - protein, 8 aa, Homo sapiens
  ( 326 )...( 333 ): >MK10_HUMAN
KLKASQAR

SEQ ID NO: 18913 - protein, 8 aa, Homo sapiens
  ( 404 )...( 411 ): >MK10_HUMAN
KTKNGVVK

SEQ ID NO: 18914 - protein, 8 aa, Homo sapiens
  ( 46 )...( 53 ): >MK11_HUMAN
LRQKVAVK

SEQ ID NO: 18915 - protein, 8 aa, Homo sapiens
  ( 48 )...( 55 ): >MK11_HUMAN
QKVAVKKL

SEQ ID NO: 18916 - protein, 8 aa, Homo sapiens
  ( 49 )...( 56 ): >MK11_HUMAN
KVAVKKLS

SEQ ID NO: 18917 - protein, 8 aa, Homo sapiens
  ( 50 )...( 57 ): >MK11_HUMAN
VAVKKLSR

SEQ ID NO: 18918 - protein, 8 aa, Homo sapiens
  ( 51 )...( 58 ): >MK11_HUMAN
AVKKLSRP

SEQ ID NO: 18919 - protein, 8 aa, Homo sapiens
  ( 47 )...( 54 ): >MK14_HUMAN
GLRVAVKK

SEQ ID NO: 18920 - protein, 8 aa, Homo sapiens
  ( 48 )...( 55 ): >MK14_HUMAN
LRVAVKKL

SEQ ID NO: 18921 - protein, 8 aa, Homo sapiens
  ( 49 )...( 56 ): >MK14_HUMAN
RVAVKKLS

SEQ ID NO: 18922 - protein, 8 aa, Homo sapiens
  ( 50 )...( 57 ): >MK14_HUMAN
VAVKKLSR

SEQ ID NO: 18923 - protein, 8 aa, Homo sapiens
  ( 51 )...( 58 ): >MK14_HUMAN
AVKKLSRP

SEQ ID NO: 18924 - protein, 8 aa, Homo sapiens
  ( 88 )...( 95 ): >MLX_HUMAN
RKGSVVSR

SEQ ID NO: 18925 - protein, 8 aa, Homo sapiens
  ( 41 )...( 48 ): >MNT_HUMAN
KKANSLAR

SEQ ID NO: 18926 - protein, 8 aa, Homo sapiens
  ( 212 )...( 219 ): >MNT_HUMAN
QKKRPGGI

SEQ ID NO: 18927 - protein, 8 aa, Homo sapiens
  ( 2 )...( 9 ): >MOR4_HUMAN
RWAAPGKK

SEQ ID NO: 18928 - protein, 8 aa, Homo sapiens
  ( 24 )...( 31 ): >MOR4_HUMAN
KNKQKTPG

SEQ ID NO: 18929 - protein, 8 aa, Homo sapiens
  ( 120 )...( 127 ): >MTG8_HUMAN
ARQLSKLK

SEQ ID NO: 18930 - protein, 8 aa, Homo sapiens
  ( 125 )...( 132 ): >MTG8_HUMAN
KLKRFLTT

SEQ ID NO: 18931 - protein, 8 aa, Homo sapiens
  ( 370 )...( 377 ): >MTG8_HUMAN
KTRRSLTV

SEQ ID NO: 18932 - protein, 8 aa, Homo sapiens
  ( 118 )...( 125 ): >MUSC_HUMAN
ARMRVLSK

SEQ ID NO: 18933 - protein, 8 aa, Homo sapiens
  ( 119 )...( 126 ): >MUSC_HUMAN
RMRVLSKA

SEQ ID NO: 18934 - protein, 8 aa, Homo sapiens
  ( 125 )...( 132 ): >MUSC_HUMAN
KAFSRLKT

SEQ ID NO: 18935 - protein, 8 aa, Homo sapiens
  ( 111 )...( 118 ): >MXI1_HUMAN
KAKAHIKK

SEQ ID NO: 18936 - protein, 8 aa, Homo sapiens
  ( 177 )...( 184 ): >MYCL_HUMAN
KRQSLGIR

SEQ ID NO: 18937 - protein, 8 aa, Homo sapiens
  ( 178 )...( 185 ): >MYCL_HUMAN
RQSLGIRK

SEQ ID NO: 18938 - protein, 8 aa, Homo sapiens
  ( 166 )...( 173 ): >MYCM_HUMAN
VTVKKRQS

SEQ ID NO: 18939 - protein, 8 aa, Homo sapiens
  ( 167 )...( 174 ): >MYCM_HUMAN
TVKKRQSL

SEQ ID NO: 18940 - protein, 8 aa, Homo sapiens
  ( 168 )...( 175 ): >MYCM_HUMAN
VKKRQSLS

SEQ ID NO: 18941 - protein, 8 aa, Homo sapiens
  ( 169 )...( 176 ): >MYCM_HUMAN
KKRQSLST

SEQ ID NO: 18942 - protein, 8 aa, Homo sapiens
  ( 344 )...( 351 ): >MYCN_HUMAN
APPQKKIK

SEQ ID NO: 18943 - protein, 8 aa, Homo sapiens
  ( 366 )...( 373 ): >MYCN_HUMAN
KAKSLSPR

SEQ ID NO: 18944 - protein, 8 aa, Homo sapiens
  ( 418 )...( 425 ): >MYCN_HUMAN
AKVVILKK

SEQ ID NO: 18945 - protein, 8 aa, Homo sapiens
  ( 419 )...( 426 ): >MYCN_HUMAN
KVVILKKA

SEQ ID NO: 18946 - protein, 8 aa, Homo sapiens
  ( 270 )...( 277 ): >MYC_HUMAN
RQAPGKRS

SEQ ID NO: 18947 - protein, 8 aa, Homo sapiens
  ( 319 )...( 326 ): >MYC_HUMAN
YPAAKRVK

SEQ ID NO: 18948 - protein, 8 aa, Homo sapiens
  ( 320 )...( 327 ): >MYC_HUMAN
PAAKRVKL

SEQ ID NO: 18949 - protein, 8 aa, Homo sapiens
  ( 391 )...( 398 ): >MYC_HUMAN
PKVVILKK

SEQ ID NO: 18950 - protein, 8 aa, Homo sapiens
  ( 392 )...( 399 ): >MYC_HUMAN
KVVILKKA

SEQ ID NO: 18951 - protein, 8 aa, Homo sapiens
  ( 73 )...( 80 ): >MYF5_HUMAN
KACKRKST

SEQ ID NO: 18952 - protein, 8 aa, Homo sapiens
  ( 74 )...( 81 ): >MYF5_HUMAN
ACKRKSTT

SEQ ID NO: 18953 - protein, 8 aa, Homo sapiens
  ( 75 )...( 82 ): >MYF5_HUMAN
CKRKSTTM

SEQ ID NO: 18954 - protein, 8 aa, Homo sapiens
  ( 83 )...( 90 ): >MYF6_HUMAN
KTCKRKSA

SEQ ID NO: 18955 - protein, 8 aa, Homo sapiens
  ( 115 )...( 122 ): >MYF6_HUMAN
ALKRRTVA

SEQ ID NO: 18956 - protein, 8 aa, Homo sapiens
  ( 116 )...( 123 ): >MYF6_HUMAN
LKRRTVAN

SEQ ID NO: 18957 - protein, 8 aa, Homo sapiens
  ( 99 )...( 106 ): >MYOD_HUMAN
KACKRKTT

SEQ ID NO: 18958 - protein, 8 aa, Homo sapiens
  ( 100 )...( 107 ): >MYOD_HUMAN
ACKRKTTN

SEQ ID NO: 18959 - protein, 8 aa, Homo sapiens
  ( 101 )...( 108 ): >MYOD_HUMAN
CKRKTTNA

SEQ ID NO: 18960 - protein, 8 aa, Homo sapiens
  ( 72 )...( 79 ): >MYOG_HUMAN
VCKRKSVS

SEQ ID NO: 18961 - protein, 8 aa, Homo sapiens
  ( 73 )...( 80 ): >MYOG_HUMAN
CKRKSVSV

SEQ ID NO: 18962 - protein, 8 aa, Homo sapiens
  ( 221 )...( 228 ): >NAB1_HUMAN
LLKTNKKL

SEQ ID NO: 18963 - protein, 8 aa, Homo sapiens
  ( 222 )...( 229 ): >NAB1_HUMAN
LKTNKKLA

SEQ ID NO: 18964 - protein, 8 aa, Homo sapiens
  ( 223 )...( 230 ): >NAB1_HUMAN
KTNKKLAK

SEQ ID NO: 18965 - protein, 8 aa, Homo sapiens
  ( 224 )...( 231 ): >NAB1_HUMAN
TNKKLAKM

SEQ ID NO: 18966 - protein, 8 aa, Homo sapiens
  ( 225 )...( 232 ): >NAB1_HUMAN
NKKLAKMI

SEQ ID NO: 18967 - protein, 8 aa, Homo sapiens
  ( 226 )...( 233 ): >NAB1_HUMAN
KKLAKMIG

SEQ ID NO: 18968 - protein, 8 aa, Homo sapiens
  ( 314 )...( 321 ): >NAB1_HUMAN
YRTTKSKC

SEQ ID NO: 18969 - protein, 8 aa, Homo sapiens
  ( 315 )...( 322 ): >NAB1_HUMAN
RTTKSKCG

SEQ ID NO: 18970 - protein, 8 aa, Homo sapiens
  ( 327 )...( 334 ): >NAB1_HUMAN
LSPKRIKV

SEQ ID NO: 18971 - protein, 8 aa, Homo sapiens
  ( 26 )...( 33 ): >NAB2_HUMAN
RLKPSARA

SEQ ID NO: 18972 - protein, 8 aa, Homo sapiens
  ( 266 )...( 273 ): >NAB2_HUMAN
SLLKLNKK

SEQ ID NO: 18973 - protein, 8 aa, Homo sapiens
  ( 267 )...( 274 ): >NAB2_HUMAN
LLKLNKKL

SEQ ID NO: 18974 - protein, 8 aa, Homo sapiens
  ( 268 )...( 275 ): >NAB2_HUMAN
LKLNKKLA

SEQ ID NO: 18975 - protein, 8 aa, Homo sapiens
  ( 270 )...( 277 ): >NAB2_HUMAN
LNKKLARS

SEQ ID NO: 18976 - protein, 8 aa, Homo sapiens
  ( 271 )...( 278 ): >NAB2_HUMAN
NKKLARSV

SEQ ID NO: 18977 - protein, 8 aa, Homo sapiens
  ( 272 )...( 279 ): >NAB2_HUMAN
KKLARSVG

SEQ ID NO: 18978 - protein, 8 aa, Homo sapiens
  ( 372 )...( 379 ): >NAB2_HUMAN
GPPLKKLK

SEQ ID NO: 18979 - protein, 8 aa, Homo sapiens
  ( 511 )...( 518 ): >NAB2_HUMAN
GRRSSVKV

SEQ ID NO: 18980 - protein, 8 aa, Homo sapiens
  ( 85 )...( 92 ): >NDF1_HUMAN
GPKKKKMT

SEQ ID NO: 18981 - protein, 8 aa, Homo sapiens
  ( 176 )...( 183 ): >NDF2_HUMAN
ILRSGKRP

SEQ ID NO: 18982 - protein, 8 aa, Homo sapiens
  ( 71 )...( 78 ): >NDF4_HUMAN
GPKKKKMT

SEQ ID NO: 18983 - protein, 8 aa, Homo sapiens
  ( 39 )...( 46 ): >NDF6_HUMAN
KQIVLRGK

SEQ ID NO: 18984 - protein, 8 aa, Homo sapiens
  ( 42 )...( 49 ): >NDF6_HUMAN
VLRGKSIK

SEQ ID NO: 18985 - protein, 8 aa, Homo sapiens
  ( 45 )...( 52 ): >NDF6_HUMAN
GKSIKRAP

SEQ ID NO: 18986 - protein, 8 aa, Homo sapiens
  ( 46 )...( 53 ): >NDF6_HUMAN
KSIKRAPG

SEQ ID NO: 18987 - protein, 8 aa, Homo sapiens
  ( 78 )...( 85 ): >NDF6_HUMAN
GLRKKKTT

SEQ ID NO: 18988 - protein, 8 aa, Homo sapiens
  ( 661 )...( 668 ): >NFL1_HUMAN
RGKNKMAA

SEQ ID NO: 18989 - protein, 8 aa, Homo sapiens
  ( 206 )...( 213 ): >NFT5_HUMAN
PKQRPGVK

SEQ ID NO: 18990 - protein, 8 aa, Homo sapiens
  ( 407 )...( 414 ): >NFT5_HUMAN
KSTRARLV

SEQ ID NO: 18991 - protein, 8 aa, Homo sapiens
  ( 468 )...( 475 ): >NFT5_HUMAN
KNFLKGTK

SEQ ID NO: 18992 - protein, 8 aa, Homo sapiens
  ( 72 )...( 79 ): >NGN2_HUMAN
RAVSRGAK

SEQ ID NO: 18993 - protein, 8 aa, Homo sapiens
  ( 83 )...( 90 ): >NGN2_HUMAN
TVQRIKKT

SEQ ID NO: 18994 - protein, 8 aa, Homo sapiens
  ( 119 )...( 126 ): >NK23_HUMAN
QKSCQLKK

SEQ ID NO: 18995 - protein, 8 aa, Homo sapiens
  ( 179 )...( 186 ): >NK31_HUMAN
TKRKQLSS

SEQ ID NO: 18996 - protein, 8 aa, Homo sapiens
  ( 34 )...( 41 ): >NMI_HUMAN
TKKNIQLK

SEQ ID NO: 18997 - protein, 8 aa, Homo sapiens
  ( 213 )...( 220 ): >NMI_HUMAN
ADKILKKK

SEQ ID NO: 18998 - protein, 8 aa, Homo sapiens
  ( 250 )...( 257 ): >NPA1_HUMAN
RMKSTLTK

SEQ ID NO: 18999 - protein, 8 aa, Homo sapiens
  ( 251 )...( 258 ): >NPA1_HUMAN
MKSTLTKR

SEQ ID NO: 19000 - protein, 8 aa, Homo sapiens
  ( 252 )...( 259 ): >NPA1_HUMAN
KSTLTKRG

SEQ ID NO: 19001 - protein, 8 aa, Homo sapiens
  ( 256 )...( 263 ): >NPA1_HUMAN
TKRGLHVK

SEQ ID NO: 19002 - protein, 8 aa, Homo sapiens
  ( 257 )...( 264 ): >NPA1_HUMAN
KRGLHVKA

SEQ ID NO: 19003 - protein, 8 aa, Homo sapiens
  ( 457 )...( 464 ): >NPA1_HUMAN
QTQGKRIK

SEQ ID NO: 19004 - protein, 8 aa, Homo sapiens
  ( 458 )...( 465 ): >NPA1_HUMAN
TQGKRIKV

SEQ ID NO: 19005 - protein, 8 aa, Homo sapiens
  ( 581 )...( 588 ): >NPA1_HUMAN
AGTRLPRK

SEQ ID NO: 19006 - protein, 8 aa, Homo sapiens
  ( 582 )...( 589 ): >NPA1_HUMAN
GTRLPRKG

SEQ ID NO: 19007 - protein, 8 aa, Homo sapiens
  ( 697 )...( 704 ): >NPA2_HUMAN
SRTGRQVK

SEQ ID NO: 19008 - protein, 8 aa, Homo sapiens
  ( 698 )...( 705 ): >NPA2_HUMAN
RTGRQVKY

SEQ ID NO: 19009 - protein, 8 aa, Homo sapiens
  ( 103 )...( 110 ): >NR23_HUMAN
CRLKKCLQ

SEQ ID NO: 19010 - protein, 8 aa, Homo sapiens
  ( 104 )...( 111 ): >NR23_HUMAN
RLKKCLQA

SEQ ID NO: 19011 - protein, 8 aa, Homo sapiens
  ( 107 )...( 114 ): >NR52_HUMAN
KGFFKRTV

SEQ ID NO: 19012 - protein, 8 aa, Homo sapiens
  ( 177 )...( 184 ): >NR52_HUMAN
ALKQQKKA

SEQ ID NO: 19013 - protein, 8 aa, Homo sapiens
  ( 178 )...( 185 ): >NR52_HUMAN
LKQQKKAL

SEQ ID NO: 19014 - protein, 8 aa, Homo sapiens
  ( 179 )...( 186 ): >NR52_HUMAN
KQQKKALI

SEQ ID NO: 19015 - protein, 8 aa, Homo sapiens
  ( 180 )...( 187 ): >NR52_HUMAN
QQKKALIR

SEQ ID NO: 19016 - protein, 8 aa, Homo sapiens
  ( 181 )...( 188 ): >NR52_HUMAN
QKKALIRA

SEQ ID NO: 19017 - protein, 8 aa, Homo sapiens
  ( 182 )...( 189 ): >NR52_HUMAN
KKALIRAN

SEQ ID NO: 19018 - protein, 8 aa, Homo sapiens
  ( 111 )...( 118 ): >NRF1_HUMAN
LLRKLRAT

SEQ ID NO: 19019 - protein, 8 aa, Homo sapiens
  ( 112 )...( 119 ): >NRF1_HUMAN
LRKLRATL

SEQ ID NO: 19020 - protein, 8 aa, Homo sapiens
  ( 214 )...( 221 ): >NRF1_HUMAN
KYSTGRGK

SEQ ID NO: 19021 - protein, 8 aa, Homo sapiens
  ( 219 )...( 226 ): >NRF1_HUMAN
RGKPGWGK

SEQ ID NO: 19022 - protein, 8 aa, Homo sapiens
  ( 143 )...( 150 ): >OLG1_HUMAN
APGRKLSK

SEQ ID NO: 19023 - protein, 8 aa, Homo sapiens
  ( 144 )...( 151 ): >OLG1_HUMAN
PGRKLSKI

SEQ ID NO: 19024 - protein, 8 aa, Homo sapiens
  ( 145 )...( 152 ): >OLG1_HUMAN
GRKLSKIA

SEQ ID NO: 19025 - protein, 8 aa, Homo sapiens
  ( 146 )...( 153 ): >OLG1_HUMAN
RKLSKIAT

SEQ ID NO: 19026 - protein, 8 aa, Homo sapiens
  ( 141 )...( 148 ): >OLG2_HUMAN
PSVRKLSK

SEQ ID NO: 19027 - protein, 8 aa, Homo sapiens
  ( 142 )...( 149 ): >OLG2_HUMAN
SVRKLSKI

SEQ ID NO: 19028 - protein, 8 aa, Homo sapiens
  ( 143 )...( 150 ): >OLG2_HUMAN
VRKLSKIA

SEQ ID NO: 19029 - protein, 8 aa, Homo sapiens
  ( 144 )...( 151 ): >OLG2_HUMAN
RKLSKIAT

SEQ ID NO: 19030 - protein, 8 aa, Homo sapiens
  ( 406 )...( 413 ): >ONC2_HUMAN
SQKKSRLV

SEQ ID NO: 19031 - protein, 8 aa, Homo sapiens
  ( 408 )...( 415 ): >ONC2_HUMAN
KKSRLVFT

SEQ ID NO: 19032 - protein, 8 aa, Homo sapiens
  ( 67 )...( 74 ): >OVO1_HUMAN
GFLRTKMK

SEQ ID NO: 19033 - protein, 8 aa, Homo sapiens
  ( 68 )...( 75 ): >OVO1_HUMAN
FLRTKMKV

SEQ ID NO: 19034 - protein, 8 aa, Homo sapiens
  ( 69 )...( 76 ): >OVO1_HUMAN
LRTKMKVT

SEQ ID NO: 19035 - protein, 8 aa, Homo sapiens
  ( 70 )...( 77 ): >OVO1_HUMAN
RTKMKVTL

SEQ ID NO: 19036 - protein, 8 aa, Homo sapiens
  ( 208 )...( 215 ): >OVO1_HUMAN
PLLRKTSK

SEQ ID NO: 19037 - protein, 8 aa, Homo sapiens
  ( 209 )...( 216 ): >OVO1_HUMAN
LLRKTSKK

SEQ ID NO: 19038 - protein, 8 aa, Homo sapiens
  ( 210 )...( 217 ): >OVO1_HUMAN
LRKTSKKV

SEQ ID NO: 19039 - protein, 8 aa, Homo sapiens
  ( 211 )...( 218 ): >OVO1_HUMAN
RKTSKKVA

SEQ ID NO: 19040 - protein, 8 aa, Homo sapiens
  ( 179 )...( 186 ): >PAS1_HUMAN
RGRTVNLK

SEQ ID NO: 19041 - protein, 8 aa, Homo sapiens
  ( 678 )...( 685 ): >PAS1_HUMAN
TFKTRSAK

SEQ ID NO: 19042 - protein, 8 aa, Homo sapiens
  ( 679 )...( 686 ): >PAS1_HUMAN
FKTRSAKG

SEQ ID NO: 19043 - protein, 8 aa, Homo sapiens
  ( 680 )...( 687 ): >PAS1_HUMAN
KTRSAKGF

SEQ ID NO: 19044 - protein, 8 aa, Homo sapiens
  ( 702 )...( 709 ): >PAS1_HUMAN
LSNKLKLK

SEQ ID NO: 19045 - protein, 8 aa, Homo sapiens
  ( 87 )...( 94 ): >PAX2_HUMAN
KPKVATPK

SEQ ID NO: 19046 - protein, 8 aa, Homo sapiens
  ( 136 )...( 143 ): >PAX2_HUMAN
NRIIRTKV

SEQ ID NO: 19047 - protein, 8 aa, Homo sapiens
  ( 154 )...( 161 ): >PAX3_HUMAN
ISRILRSK

SEQ ID NO: 19048 - protein, 8 aa, Homo sapiens
  ( 156 )...( 163 ): >PAX3_HUMAN
RILRSKFG

SEQ ID NO: 19049 - protein, 8 aa, Homo sapiens
  ( 157 )...( 164 ): >PAX3_HUMAN
ILRSKFGK

SEQ ID NO: 19050 - protein, 8 aa, Homo sapiens
  ( 158 )...( 165 ): >PAX3_HUMAN
LRSKFGKG

SEQ ID NO: 19051 - protein, 8 aa, Homo sapiens
  ( 156 )...( 163 ): >PAX7_HUMAN
ISRVLRIK

SEQ ID NO: 19052 - protein, 8 aa, Homo sapiens
  ( 159 )...( 166 ): >PAX7_HUMAN
VLRIKFGK

SEQ ID NO: 19053 - protein, 8 aa, Homo sapiens
  ( 80 )...( 87 ): >PAX8_HUMAN
KPKVATPK

SEQ ID NO: 19054 - protein, 8 aa, Homo sapiens
  ( 129 )...( 136 ): >PAX8_HUMAN
NRIIRTKV

SEQ ID NO: 19055 - protein, 8 aa, Homo sapiens
  ( 129 )...( 136 ): >PER1_HUMAN
SARARTQK

SEQ ID NO: 19056 - protein, 8 aa, Homo sapiens
  ( 455 )...( 462 ): >PER1_HUMAN
VLGRHKVR

SEQ ID NO: 19057 - protein, 8 aa, Homo sapiens
  ( 456 )...( 463 ): >PER1_HUMAN
LGRHKVRT

SEQ ID NO: 19058 - protein, 8 aa, Homo sapiens
  ( 457 )...( 464 ): >PER1_HUMAN
GRHKVRTA

SEQ ID NO: 19059 - protein, 8 aa, Homo sapiens
  ( 643 )...( 650 ): >PER1_HUMAN
LPSTTKRK

SEQ ID NO: 19060 - protein, 8 aa, Homo sapiens
  ( 645 )...( 652 ): >PER1_HUMAN
STTKRKCA

SEQ ID NO: 19061 - protein, 8 aa, Homo sapiens
  ( 646 )...( 653 ): >PER1_HUMAN
TTKRKCAS

SEQ ID NO: 19062 - protein, 8 aa, Homo sapiens
  ( 139 )...( 146 ): >PER2_HUMAN
KYALRSVK

SEQ ID NO: 19063 - protein, 8 aa, Homo sapiens
  ( 142 )...( 149 ): >PER2_HUMAN
LRSVKQVK

SEQ ID NO: 19064 - protein, 8 aa, Homo sapiens
  ( 143 )...( 150 ): >PER2_HUMAN
RSVKQVKA

SEQ ID NO: 19065 - protein, 8 aa, Homo sapiens
  ( 271 )...( 278 ): >PER2_HUMAN
FCRVSVRK

SEQ ID NO: 19066 - protein, 8 aa, Homo sapiens
  ( 272 )...( 279 ): >PER2_HUMAN
CRVSVRKS

SEQ ID NO: 19067 - protein, 8 aa, Homo sapiens
  ( 428 )...( 435 ): >PER2_HUMAN
IIGRHKVR

SEQ ID NO: 19068 - protein, 8 aa, Homo sapiens
  ( 429 )...( 436 ): >PER2_HUMAN
IGRHKVRV

SEQ ID NO: 19069 - protein, 8 aa, Homo sapiens
  ( 430 )...( 437 ): >PER2_HUMAN
GRHKVRVG

SEQ ID NO: 19070 - protein, 8 aa, Homo sapiens
  ( 431 )...( 438 ): >PER2_HUMAN
RHKVRVGP

SEQ ID NO: 19071 - protein, 8 aa, Homo sapiens
  ( 600 )...( 607 ): >PER2_HUMAN
AATLKRKC

SEQ ID NO: 19072 - protein, 8 aa, Homo sapiens
  ( 621 )...( 628 ): >PER2_HUMAN
KRKATVSP

SEQ ID NO: 19073 - protein, 8 aa, Homo sapiens
  ( 720 )...( 727 ): >PER2_HUMAN
FKKLGLTK

SEQ ID NO: 19074 - protein, 8 aa, Homo sapiens
  ( 786 )...( 793 ): >PER2_HUMAN
SPWKKTGK

SEQ ID NO: 19075 - protein, 8 aa, Homo sapiens
  ( 1168 )...( 1175 ): >PER2_HUMAN
KLKLLQKL

SEQ ID NO: 19076 - protein, 8 aa, Homo sapiens
  ( 152 )...( 159 ): >PER3_HUMAN
ALILNRKK

SEQ ID NO: 19077 - protein, 8 aa, Homo sapiens
  ( 371 )...( 378 ): >PER3_HUMAN
IIGRHKVR

SEQ ID NO: 19078 - protein, 8 aa, Homo sapiens
  ( 372 )...( 379 ): >PER3_HUMAN
IGRHKVRT

SEQ ID NO: 19079 - protein, 8 aa, Homo sapiens
  ( 373 )...( 380 ): >PER3_HUMAN
GRHKVRTS

SEQ ID NO: 19080 - protein, 8 aa, Homo sapiens
  ( 386 )...( 393 ): >PER3_HUMAN
VFATKIKK

SEQ ID NO: 19081 - protein, 8 aa, Homo sapiens
  ( 387 )...( 394 ): >PER3_HUMAN
FATKIKKM

SEQ ID NO: 19082 - protein, 8 aa, Homo sapiens
  ( 388 )...( 395 ): >PER3_HUMAN
ATKIKKMN

SEQ ID NO: 19083 - protein, 8 aa, Homo sapiens
  ( 560 )...( 567 ): >PER3_HUMAN
IPALKRKC

SEQ ID NO: 19084 - protein, 8 aa, Homo sapiens
  ( 561 )...( 568 ): >PER3_HUMAN
PALKRKCI

SEQ ID NO: 19085 - protein, 8 aa, Homo sapiens
  ( 562 )...( 569 ): >PER3_HUMAN
ALKRKCIS

SEQ ID NO: 19086 - protein, 8 aa, Homo sapiens
  ( 32 )...( 39 ): >PHT1_HUMAN
QIKGLKNK

SEQ ID NO: 19087 - protein, 8 aa, Homo sapiens
  ( 33 )...( 40 ): >PHT1_HUMAN
IKGLKNKP

SEQ ID NO: 19088 - protein, 8 aa, Homo sapiens
  ( 73 )...( 80 ): >PHT1_HUMAN
LTRKGLVR

SEQ ID NO: 19089 - protein, 8 aa, Homo sapiens
  ( 74 )...( 81 ): >PHT1_HUMAN
TRKGLVRV

SEQ ID NO: 19090 - protein, 8 aa, Homo sapiens
  ( 164 )...( 171 ): >PHT1_HUMAN
KLRKTVNG

SEQ ID NO: 19091 - protein, 8 aa, Homo sapiens
  ( 209 )...( 216 ): >PHT1_HUMAN
IKRVKLIS

SEQ ID NO: 19092 - protein, 8 aa, Homo sapiens
  ( 210 )...( 217 ): >PHT1_HUMAN
KRVKLISN

SEQ ID NO: 19093 - protein, 8 aa, Homo sapiens
  ( 211 )...( 218 ): >PHT1_HUMAN
RVKLISNK

SEQ ID NO: 19094 - protein, 8 aa, Homo sapiens
  ( 305 )...( 312 ): >PHT1_HUMAN
VKNRKSIL

SEQ ID NO: 19095 - protein, 8 aa, Homo sapiens
  ( 319 )...( 326 ): >PHT1_HUMAN
QVKKTTTR

SEQ ID NO: 19096 - protein, 8 aa, Homo sapiens
  ( 568 )...( 575 ): >PHT1_HUMAN
ITSARKAR

SEQ ID NO: 19097 - protein, 8 aa, Homo sapiens
  ( 142 )...( 149 ): >PIT1_HUMAN
RRIKLGYT

SEQ ID NO: 19098 - protein, 8 aa, Homo sapiens
  ( 185 )...( 192 ): >PIT1_HUMAN
KLKAILSK

SEQ ID NO: 19099 - protein, 8 aa, Homo sapiens
  ( 216 )...( 223 ): >PIT1_HUMAN
KRRTTISI

SEQ ID NO: 19100 - protein, 8 aa, Homo sapiens
  ( 270 )...( 277 ): >PIT1_HUMAN
KRVKTSLN

SEQ ID NO: 19101 - protein, 8 aa, Homo sapiens
  ( 282 )...( 289 ): >PIX2_HUMAN
ASLRLKAK

SEQ ID NO: 19102 - protein, 8 aa, Homo sapiens
  ( 283 )...( 290 ): >PIX2_HUMAN
SLRLKAKQ

SEQ ID NO: 19103 - protein, 8 aa, Homo sapiens
  ( 471 )...( 478 ): >PML_HUMAN
TTTAQKRK

SEQ ID NO: 19104 - protein, 8 aa, Homo sapiens
  ( 472 )...( 479 ): >PML_HUMAN
TTAQKRKC

SEQ ID NO: 19105 - protein, 8 aa, Homo sapiens
  ( 473 )...( 480 ): >PML_HUMAN
TAQKRKCS

SEQ ID NO: 19106 - protein, 8 aa, Homo sapiens
  ( 483 )...( 490 ): >PML_HUMAN
QCPRKVIK

SEQ ID NO: 19107 - protein, 8 aa, Homo sapiens
  ( 484 )...( 491 ): >PML_HUMAN
CPRKVIKM

SEQ ID NO: 19108 - protein, 8 aa, Homo sapiens
  ( 816 )...( 823 ): >PML_HUMAN
RQGGLKKY

SEQ ID NO: 19109 - protein, 8 aa, Homo sapiens
  ( 818 )...( 825 ): >PML_HUMAN
GGLKKYSR

SEQ ID NO: 19110 - protein, 8 aa, Homo sapiens
  ( 298 )...( 305 ): >PO21_HUMAN
RRIKLGFT

SEQ ID NO: 19111 - protein, 8 aa, Homo sapiens
  ( 212 )...( 219 ): >PO22_HUMAN
RRIKLGFT

SEQ ID NO: 19112 - protein, 8 aa, Homo sapiens
  ( 201 )...( 208 ): >PO23_HUMAN
RRIKLGFT

SEQ ID NO: 19113 - protein, 8 aa, Homo sapiens
  ( 262 )...( 269 ): >PO31_HUMAN
RRIKLGFT

SEQ ID NO: 19114 - protein, 8 aa, Homo sapiens
  ( 329 )...( 336 ): >PO31_HUMAN
KIAAQGRK

SEQ ID NO: 19115 - protein, 8 aa, Homo sapiens
  ( 280 )...( 287 ): >PO32_HUMAN
RRIKLGFT

SEQ ID NO: 19116 - protein, 8 aa, Homo sapiens
  ( 347 )...( 354 ): >PO32_HUMAN
KIAAQGRK

SEQ ID NO: 19117 - protein, 8 aa, Homo sapiens
  ( 332 )...( 339 ): >PO33_HUMAN
RRIKLGFT

SEQ ID NO: 19118 - protein, 8 aa, Homo sapiens
  ( 399 )...( 406 ): >PO33_HUMAN
KIAAQGRK

SEQ ID NO: 19119 - protein, 8 aa, Homo sapiens
  ( 204 )...( 211 ): >PO34_HUMAN
RRIKLGFT

SEQ ID NO: 19120 - protein, 8 aa, Homo sapiens
  ( 271 )...( 278 ): >PO34_HUMAN
KIAAQGRK

SEQ ID NO: 19121 - protein, 8 aa, Homo sapiens
  ( 282 )...( 289 ): >PO41_HUMAN
RRIKLGVT

SEQ ID NO: 19122 - protein, 8 aa, Homo sapiens
  ( 361 )...( 368 ): >PO41_HUMAN
RKRTSIAA

SEQ ID NO: 19123 - protein, 8 aa, Homo sapiens
  ( 398 )...( 405 ): >PO41_HUMAN
LKKNVVRV

SEQ ID NO: 19124 - protein, 8 aa, Homo sapiens
  ( 269 )...( 276 ): >PO42_HUMAN
RRIKLGVT

SEQ ID NO: 19125 - protein, 8 aa, Homo sapiens
  ( 348 )...( 355 ): >PO42_HUMAN
RKRTSIAA

SEQ ID NO: 19126 - protein, 8 aa, Homo sapiens
  ( 385 )...( 392 ): >PO42_HUMAN
LKKNVVRV

SEQ ID NO: 19127 - protein, 8 aa, Homo sapiens
  ( 402 )...( 409 ): >PO42_HUMAN
KRMKYSAG

SEQ ID NO: 19128 - protein, 8 aa, Homo sapiens
  ( 197 )...( 204 ): >PO43_HUMAN
RRIKLGVT

SEQ ID NO: 19129 - protein, 8 aa, Homo sapiens
  ( 276 )...( 283 ): >PO43_HUMAN
RKRTSIAA

SEQ ID NO: 19130 - protein, 8 aa, Homo sapiens
  ( 313 )...( 320 ): >PO43_HUMAN
LKKNVVRV

SEQ ID NO: 19131 - protein, 8 aa, Homo sapiens
  ( 154 )...( 161 ): >PO51_HUMAN
KQKRITLG

SEQ ID NO: 19132 - protein, 8 aa, Homo sapiens
  ( 225 )...( 232 ): >PO51_HUMAN
TLVQARKR

SEQ ID NO: 19133 - protein, 8 aa, Homo sapiens
  ( 154 )...( 161 ): >PO5L_HUMAN
KQKRITLG

SEQ ID NO: 19134 - protein, 8 aa, Homo sapiens
  ( 154 )...( 161 ): >PO5M_HUMAN
KQKRITLG

SEQ ID NO: 19135 - protein, 8 aa, Homo sapiens
  ( 147 )...( 154 ): >PO5N_HUMAN
KQKRITLG

SEQ ID NO: 19136 - protein, 8 aa, Homo sapiens
  ( 218 )...( 225 ): >PO5N_HUMAN
TLLQARKR

SEQ ID NO: 19137 - protein, 8 aa, Homo sapiens
  ( 155 )...( 162 ): >PO61_HUMAN
KIRRLSLG

SEQ ID NO: 19138 - protein, 8 aa, Homo sapiens
  ( 195 )...( 202 ): >PO61_HUMAN
PKSAQKLK

SEQ ID NO: 19139 - protein, 8 aa, Homo sapiens
  ( 196 )...( 203 ): >PO61_HUMAN
KSAQKLKP

SEQ ID NO: 19140 - protein, 8 aa, Homo sapiens
  ( 747 )...( 754 ): >PRD4_HUMAN
RHLKTCKG

SEQ ID NO: 19141 - protein, 8 aa, Homo sapiens
  ( 205 )...( 212 ): >PRD5_HUMAN
GKKFPVKQ

SEQ ID NO: 19142 - protein, 8 aa, Homo sapiens
  ( 270 )...( 277 ): >PRD5_HUMAN
GKRLKSKD

SEQ ID NO: 19143 - protein, 8 aa, Homo sapiens
  ( 292 )...( 299 ): >PRD5_HUMAN
KKKLICSV

SEQ ID NO: 19144 - protein, 8 aa, Homo sapiens
  ( 552 )...( 559 ): >PRD5_HUMAN
KAFSQKRG

SEQ ID NO: 19145 - protein, 8 aa, Homo sapiens
  ( 583 )...( 590 ): >PRD5_HUMAN
SLKKMLIR

SEQ ID NO: 19146 - protein, 8 aa, Homo sapiens
  ( 103 )...( 110 ): >PRD6_HUMAN
GRTLSRTR

SEQ ID NO: 19147 - protein, 8 aa, Homo sapiens
  ( 104 )...( 111 ): >PRD6_HUMAN
RTLSRTRT

SEQ ID NO: 19148 - protein, 8 aa, Homo sapiens
  ( 312 )...( 319 ): >PRD7_HUMAN
ISRIAKVK

SEQ ID NO: 19149 - protein, 8 aa, Homo sapiens
  ( 313 )...( 320 ): >PRD7_HUMAN
SRIAKVKY

SEQ ID NO: 19150 - protein, 8 aa, Homo sapiens
  ( 314 )...( 321 ): >PRD7_HUMAN
RIAKVKYG

SEQ ID NO: 19151 - protein, 8 aa, Homo sapiens
  ( 381 )...( 388 ): >PRD7_HUMAN
RGFSRKSV

SEQ ID NO: 19152 - protein, 8 aa, Homo sapiens
  ( 280 )...( 287 ): >PRD9_HUMAN
GSCRVGKR

SEQ ID NO: 19153 - protein, 8 aa, Homo sapiens
  ( 281 )...( 288 ): >PRD9_HUMAN
SCRVGKRI

SEQ ID NO: 19154 - protein, 8 aa, Homo sapiens
  ( 313 )...( 320 ): >PRD9_HUMAN
ISRIAKVK

SEQ ID NO: 19155 - protein, 8 aa, Homo sapiens
  ( 314 )...( 321 ): >PRD9_HUMAN
SRIAKVKY

SEQ ID NO: 19156 - protein, 8 aa, Homo sapiens
  ( 315 )...( 322 ): >PRD9_HUMAN
RIAKVKYG

SEQ ID NO: 19157 - protein, 8 aa, Homo sapiens
  ( 133 )...( 140 ): >PRDA_HUMAN
GGVFSKRR

SEQ ID NO: 19158 - protein, 8 aa, Homo sapiens
  ( 134 )...( 141 ): >PRDA_HUMAN
GVFSKRRI

SEQ ID NO: 19159 - protein, 8 aa, Homo sapiens
  ( 543 )...( 550 ): >PRDA_HUMAN
IQVKKHVR

SEQ ID NO: 19160 - protein, 8 aa, Homo sapiens
  ( 590 )...( 597 ): >PRDA_HUMAN
TCGKQFKR

SEQ ID NO: 19161 - protein, 8 aa, Homo sapiens
  ( 694 )...( 701 ): >PRDA_HUMAN
VYKSASKR

SEQ ID NO: 19162 - protein, 8 aa, Homo sapiens
  ( 698 )...( 705 ): >PRDA_HUMAN
ASKRKAHI

SEQ ID NO: 19163 - protein, 8 aa, Homo sapiens
  ( 699 )...( 706 ): >PRDA_HUMAN
SKRKAHIL

SEQ ID NO: 19164 - protein, 8 aa, Homo sapiens
  ( 717 )...( 724 ): >PRDA_HUMAN
SIRKLRPA

SEQ ID NO: 19165 - protein, 8 aa, Homo sapiens
  ( 43 )...( 50 ): >PRDD_HUMAN
PGPKKKVL

SEQ ID NO: 19166 - protein, 8 aa, Homo sapiens
  ( 44 )...( 51 ): >PRDD_HUMAN
GPKKKVLT

SEQ ID NO: 19167 - protein, 8 aa, Homo sapiens
  ( 45 )...( 52 ): >PRDD_HUMAN
PKKKVLTI

SEQ ID NO: 19168 - protein, 8 aa, Homo sapiens
  ( 46 )...( 53 ): >PRDD_HUMAN
KKKVLTIQ

SEQ ID NO: 19169 - protein, 8 aa, Homo sapiens
  ( 253 )...( 260 ): >PRDD_HUMAN
GKWGQPKK

SEQ ID NO: 19170 - protein, 8 aa, Homo sapiens
  ( 254 )...( 261 ): >PRDD_HUMAN
KWGQPKKG

SEQ ID NO: 19171 - protein, 8 aa, Homo sapiens
  ( 255 )...( 262 ): >PRDD_HUMAN
WGQPKKGK

SEQ ID NO: 19172 - protein, 8 aa, Homo sapiens
  ( 593 )...( 600 ): >PRDD_HUMAN
SRKYGLKI

SEQ ID NO: 19173 - protein, 8 aa, Homo sapiens
  ( 608 )...( 615 ): >PRDD_HUMAN
YKPLKCKV

SEQ ID NO: 19174 - protein, 8 aa, Homo sapiens
  ( 611 )...( 618 ): >PRDD_HUMAN
LKCKVCLR

SEQ ID NO: 19175 - protein, 8 aa, Homo sapiens
  ( 721 )...( 728 ): >PRDF_HUMAN
HGIRRKLI

SEQ ID NO: 19176 - protein, 8 aa, Homo sapiens
  ( 725 )...( 732 ): >PRDF_HUMAN
RKLIKQLG

SEQ ID NO: 19177 - protein, 8 aa, Homo sapiens
  ( 1159 )...( 1166 ): >PRDF_HUMAN
CKRHTGIK

SEQ ID NO: 19178 - protein, 8 aa, Homo sapiens
  ( 96 )...( 103 ): >PRDG_HUMAN
LGVWAKRK

SEQ ID NO: 19179 - protein, 8 aa, Homo sapiens
  ( 97 )...( 104 ): >PRDG_HUMAN
GVWAKRKM

SEQ ID NO: 19180 - protein, 8 aa, Homo sapiens
  ( 419 )...( 426 ): >PRDG_HUMAN
CRTQIKCK

SEQ ID NO: 19181 - protein, 8 aa, Homo sapiens
  ( 943 )...( 950 ): >PRDG_HUMAN
ILRKGKER

SEQ ID NO: 19182 - protein, 8 aa, Homo sapiens
  ( 12 )...( 19 ): >PRDH_HUMAN
KKALQLAR

SEQ ID NO: 19183 - protein, 8 aa, Homo sapiens
  ( 589 )...( 596 ): >PRDH_HUMAN
TLATKLRR

SEQ ID NO: 19184 - protein, 8 aa, Homo sapiens
  ( 187 )...( 194 ): >RBPL_HUMAN
RLIKVISK

SEQ ID NO: 19185 - protein, 8 aa, Homo sapiens
  ( 289 )...( 296 ): >RBPL_HUMAN
MIIRKVAK

SEQ ID NO: 19186 - protein, 8 aa, Homo sapiens
  ( 290 )...( 297 ): >RBPL_HUMAN
IIRKVAKQ

SEQ ID NO: 19187 - protein, 8 aa, Homo sapiens
  ( 291 )...( 298 ): >RBPL_HUMAN
IRKVAKQC

SEQ ID NO: 19188 - protein, 8 aa, Homo sapiens
  ( 292 )...( 299 ): >RBPL_HUMAN
RKVAKQCA

SEQ ID NO: 19189 - protein, 8 aa, Homo sapiens
  ( 3 )...( 10 ): >RB_HUMAN
PKTPRKTA

SEQ ID NO: 19190 - protein, 8 aa, Homo sapiens
  ( 4 )...( 11 ): >RB_HUMAN
KTPRKTAA

SEQ ID NO: 19191 - protein, 8 aa, Homo sapiens
  ( 89 )...( 96 ): >RB_HUMAN
GGYIQKKK

SEQ ID NO: 19192 - protein, 8 aa, Homo sapiens
  ( 147 )...( 154 ): >RB_HUMAN
AMSRLLKK

SEQ ID NO: 19193 - protein, 8 aa, Homo sapiens
  ( 259 )...( 266 ): >RB_HUMAN
RSARIAKQ

SEQ ID NO: 19194 - protein, 8 aa, Homo sapiens
  ( 615 )...( 622 ): >RB_HUMAN
KKGSTTRV

SEQ ID NO: 19195 - protein, 8 aa, Homo sapiens
  ( 738 )...( 745 ): >RB_HUMAN
TFKRVLIK

SEQ ID NO: 19196 - protein, 8 aa, Homo sapiens
  ( 167 )...( 174 ): >REQN_HUMAN
NRAKGKAY

SEQ ID NO: 19197 - protein, 8 aa, Homo sapiens
  ( 168 )...( 175 ): >REQN_HUMAN
RAKGKAYG

SEQ ID NO: 19198 - protein, 8 aa, Homo sapiens
  ( 210 )...( 217 ): >REQN_HUMAN
AQRKHTAK

SEQ ID NO: 19199 - protein, 8 aa, Homo sapiens
  ( 59 )...( 66 ): >REQU_HUMAN
KRHRGPGL

SEQ ID NO: 19200 - protein, 8 aa, Homo sapiens
  ( 148 )...( 155 ): >REQU_HUMAN
VTNSRARK

SEQ ID NO: 19201 - protein, 8 aa, Homo sapiens
  ( 190 )...( 197 ): >REQU_HUMAN
VGSARKKL

SEQ ID NO: 19202 - protein, 8 aa, Homo sapiens
  ( 281 )...( 288 ): >REQU_HUMAN
KINKKTGQ

SEQ ID NO: 19203 - protein, 8 aa, Homo sapiens
  ( 660 )...( 667 ): >RFX1_HUMAN
KRLPKAIL

SEQ ID NO: 19204 - protein, 8 aa, Homo sapiens
  ( 615 )...( 622 ): >RLF_HUMAN
SKKKLLLK

SEQ ID NO: 19205 - protein, 8 aa, Homo sapiens
  ( 616 )...( 623 ): >RLF_HUMAN
KKKLLLKG

SEQ ID NO: 19206 - protein, 8 aa, Homo sapiens
  ( 617 )...( 624 ): >RLF_HUMAN
KKLLLKGS

SEQ ID NO: 19207 - protein, 8 aa, Homo sapiens
  ( 966 )...( 973 ): >RLF_HUMAN
KNARGMQK

SEQ ID NO: 19208 - protein, 8 aa, Homo sapiens
  ( 1289 )...( 1296 ): >RLF_HUMAN
GSRRTVAK

SEQ ID NO: 19209 - protein, 8 aa, Homo sapiens
  ( 1290 )...( 1297 ): >RLF_HUMAN
SRRTVAKG

SEQ ID NO: 19210 - protein, 8 aa, Homo sapiens
  ( 1291 )...( 1298 ): >RLF_HUMAN
RRTVAKGN

SEQ ID NO: 19211 - protein, 8 aa, Homo sapiens
  ( 1352 )...( 1359 ): >RLF_HUMAN
KRELVKCK

SEQ ID NO: 19212 - protein, 8 aa, Homo sapiens
  ( 1353 )...( 1360 ): >RLF_HUMAN
RELVKCKK

SEQ ID NO: 19213 - protein, 8 aa, Homo sapiens
  ( 1355 )...( 1362 ): >RLF_HUMAN
LVKCKKIF

SEQ ID NO: 19214 - protein, 8 aa, Homo sapiens
  ( 1356 )...( 1363 ): >RLF_HUMAN
VKCKKIFA

SEQ ID NO: 19215 - protein, 8 aa, Homo sapiens
  ( 1514 )...( 1521 ): >RLF_HUMAN
KSKKCGLI

SEQ ID NO: 19216 - protein, 8 aa, Homo sapiens
  ( 1515 )...( 1522 ): >RLF_HUMAN
SKKCGLIK

SEQ ID NO: 19217 - protein, 8 aa, Homo sapiens
  ( 1524 )...( 1531 ): >RLF_HUMAN
KKAPISFK

SEQ ID NO: 19218 - protein, 8 aa, Homo sapiens
  ( 1592 )...( 1599 ): >RLF_HUMAN
VKYGTKIK

SEQ ID NO: 19219 - protein, 8 aa, Homo sapiens
  ( 339 )...( 346 ): >RN12_HUMAN
IASRTRSR

SEQ ID NO: 19220 - protein, 8 aa, Homo sapiens
  ( 580 )...( 587 ): >RN12_HUMAN
GNKLRKLP

SEQ ID NO: 19221 - protein, 8 aa, Homo sapiens
  ( 582 )...( 589 ): >RN12_HUMAN
KLRKLPCS

SEQ ID NO: 19222 - protein, 8 aa, Homo sapiens
  ( 55 )...( 62 ): >RN19_HUMAN
SVKKAPKK

SEQ ID NO: 19223 - protein, 8 aa, Homo sapiens
  ( 62 )...( 69 ): >RN19_HUMAN
KRRISIGS

SEQ ID NO: 19224 - protein, 8 aa, Homo sapiens
  ( 67 )...( 74 ): >RN19_HUMAN
IGSLFRRK

SEQ ID NO: 19225 - protein, 8 aa, Homo sapiens
  ( 671 )...( 678 ): >RN19_HUMAN
KKSKSGKL

SEQ ID NO: 19226 - protein, 8 aa, Homo sapiens
  ( 672 )...( 679 ): >RN19_HUMAN
KSKSGKLR

SEQ ID NO: 19227 - protein, 8 aa, Homo sapiens
  ( 673 )...( 680 ): >RN19_HUMAN
SKSGKLRK

SEQ ID NO: 19228 - protein, 8 aa, Homo sapiens
  ( 680 )...( 687 ): >RN19_HUMAN
KKGNMKIN

SEQ ID NO: 19229 - protein, 8 aa, Homo sapiens
  ( 34 )...( 41 ): >RPCZ_HUMAN
ITRKVTNR

SEQ ID NO: 19230 - protein, 8 aa, Homo sapiens
  ( 485 )...( 492 ): >RPF1_HUMAN
KIRRLSLG

SEQ ID NO: 19231 - protein, 8 aa, Homo sapiens
  ( 561 )...( 568 ): >RPF1_HUMAN
PKSAQKIK

SEQ ID NO: 19232 - protein, 8 aa, Homo sapiens
  ( 562 )...( 569 ): >RPF1_HUMAN
KSAQKIKP

SEQ ID NO: 19233 - protein, 8 aa, Homo sapiens
  ( 654 )...( 661 ): >RPF1_HUMAN
ALKNTIKR

SEQ ID NO: 19234 - protein, 8 aa, Homo sapiens
  ( 655 )...( 662 ): >RPF1_HUMAN
LKNTIKRL

SEQ ID NO: 19235 - protein, 8 aa, Homo sapiens
  ( 214 )...( 221 ): >RRE1_HUMAN
GPARTSKK

SEQ ID NO: 19236 - protein, 8 aa, Homo sapiens
  ( 474 )...( 481 ): >RRE1_HUMAN
GTLSRHRK

SEQ ID NO: 19237 - protein, 8 aa, Homo sapiens
  ( 575 )...( 582 ): >RRE1_HUMAN
ADKRKKVC

SEQ ID NO: 19238 - protein, 8 aa, Homo sapiens
  ( 680 )...( 687 ): >RRE1_HUMAN
MAVTRSRK

SEQ ID NO: 19239 - protein, 8 aa, Homo sapiens
  ( 190 )...( 197 ): >RUN2_HUMAN
RSGRGKSF

SEQ ID NO: 19240 - protein, 8 aa, Homo sapiens
  ( 392 )...( 399 ): >SAL3_HUMAN
ALMKHRKG

SEQ ID NO: 19241 - protein, 8 aa, Homo sapiens
  ( 397 )...( 404 ): >SAL3_HUMAN
RKGKPPNV

SEQ ID NO: 19242 - protein, 8 aa, Homo sapiens
  ( 357 )...( 364 ): >SAL4_HUMAN
KKGKGKPP

SEQ ID NO: 19243 - protein, 8 aa, Homo sapiens
  ( 4 )...( 11 ): >SIM1_HUMAN
KSKNAART

SEQ ID NO: 19244 - protein, 8 aa, Homo sapiens
  ( 163 )...( 170 ): >SIM1_HUMAN
RMKCVLAK

SEQ ID NO: 19245 - protein, 8 aa, Homo sapiens
  ( 164 )...( 171 ): >SIM1_HUMAN
MKCVLAKR

SEQ ID NO: 19246 - protein, 8 aa, Homo sapiens
  ( 165 )...( 172 ): >SIM1_HUMAN
KCVLAKRN

SEQ ID NO: 19247 - protein, 8 aa, Homo sapiens
  ( 369 )...( 376 ): >SIM1_HUMAN
KGAKSRLS

SEQ ID NO: 19248 - protein, 8 aa, Homo sapiens
  ( 5 )...( 12 ): >SIM2_HUMAN
SKNAAKTR

SEQ ID NO: 19249 - protein, 8 aa, Homo sapiens
  ( 163 )...( 170 ): >SIM2_HUMAN
RMKCVLAK

SEQ ID NO: 19250 - protein, 8 aa, Homo sapiens
  ( 164 )...( 171 ): >SIM2_HUMAN
MKCVLAKR

SEQ ID NO: 19251 - protein, 8 aa, Homo sapiens
  ( 165 )...( 172 ): >SIM2_HUMAN
KCVLAKRN

SEQ ID NO: 19252 - protein, 8 aa, Homo sapiens
  ( 296 )...( 303 ): >SIM2_HUMAN
RLLSKRGG

SEQ ID NO: 19253 - protein, 8 aa, Homo sapiens
  ( 368 )...( 375 ): >SIM2_HUMAN
KLVKPKNT

SEQ ID NO: 19254 - protein, 8 aa, Homo sapiens
  ( 369 )...( 376 ): >SIM2_HUMAN
LVKPKNTK

SEQ ID NO: 19255 - protein, 8 aa, Homo sapiens
  ( 370 )...( 377 ): >SIM2_HUMAN
VKPKNTKM

SEQ ID NO: 19256 - protein, 8 aa, Homo sapiens
  ( 375 )...( 382 ): >SIM2_HUMAN
TKMKTKLR

SEQ ID NO: 19257 - protein, 8 aa, Homo sapiens
  ( 376 )...( 383 ): >SIM2_HUMAN
KMKTKLRT

SEQ ID NO: 19258 - protein, 8 aa, Homo sapiens
  ( 137 )...( 144 ): >SOX9_HUMAN
KTLGKLWR

SEQ ID NO: 19259 - protein, 8 aa, Homo sapiens
  ( 179 )...( 186 ): >SOX9_HUMAN
RKSVKNGQ

SEQ ID NO: 19260 - protein, 8 aa, Homo sapiens
  ( 101 )...( 108 ): >SP11_HUMAN
RSFKRVGA

SEQ ID NO: 19261 - protein, 8 aa, Homo sapiens
  ( 294 )...( 301 ): >SP11_HUMAN
KKSLPRGT

SEQ ID NO: 19262 - protein, 8 aa, Homo sapiens
  ( 304 )...( 311 ): >SP11_HUMAN
SRHGIQKK

SEQ ID NO: 19263 - protein, 8 aa, Homo sapiens
  ( 305 )...( 312 ): >SP11_HUMAN
RHGIQKKL

SEQ ID NO: 19264 - protein, 8 aa, Homo sapiens
  ( 333 )...( 340 ): >SP11_HUMAN
TRAQKART

SEQ ID NO: 19265 - protein, 8 aa, Homo sapiens
  ( 361 )...( 368 ): >SP11_HUMAN
GKRSQKTP

SEQ ID NO: 19266 - protein, 8 aa, Homo sapiens
  ( 410 )...( 417 ): >SP11_HUMAN
MRVQKART

SEQ ID NO: 19267 - protein, 8 aa, Homo sapiens
  ( 412 )...( 419 ): >SP11_HUMAN
VQKARTKC

SEQ ID NO: 19268 - protein, 8 aa, Homo sapiens
  ( 413 )...( 420 ): >SP11_HUMAN
QKARTKCA

SEQ ID NO: 19269 - protein, 8 aa, Homo sapiens
  ( 471 )...( 478 ): >SP11_HUMAN
AKGILYKK

SEQ ID NO: 19270 - protein, 8 aa, Homo sapiens
  ( 472 )...( 479 ): >SP11_HUMAN
KGILYKKK

SEQ ID NO: 19271 - protein, 8 aa, Homo sapiens
  ( 473 )...( 480 ): >SP11_HUMAN
GILYKKKM

SEQ ID NO: 19272 - protein, 8 aa, Homo sapiens
  ( 134 )...( 141 ): >SPM1_HUMAN
RQKRLSLG

SEQ ID NO: 19273 - protein, 8 aa, Homo sapiens
  ( 261 )...( 268 ): >SPM1_HUMAN
RSKMGSRP

SEQ ID NO: 19274 - protein, 8 aa, Homo sapiens
  ( 358 )...( 365 ): >SRE1_HUMAN
NKSAVLRK

SEQ ID NO: 19275 - protein, 8 aa, Homo sapiens
  ( 359 )...( 366 ): >SRE1_HUMAN
KSAVLRKA

SEQ ID NO: 19276 - protein, 8 aa, Homo sapiens
  ( 725 )...( 732 ): >SRE1_HUMAN
RVKTSLPR

SEQ ID NO: 19277 - protein, 8 aa, Homo sapiens
  ( 365 )...( 372 ): >SRE2_HUMAN
HKSGVLRK

SEQ ID NO: 19278 - protein, 8 aa, Homo sapiens
  ( 366 )...( 373 ): >SRE2_HUMAN
KSGVLRKA

SEQ ID NO: 19279 - protein, 8 aa, Homo sapiens
  ( 399 )...( 406 ): >SRE2_HUMAN
QKNKLLKG

SEQ ID NO: 19280 - protein, 8 aa, Homo sapiens
  ( 400 )...( 407 ): >SRE2_HUMAN
KNKLLKGI

SEQ ID NO: 19281 - protein, 8 aa, Homo sapiens
  ( 815 )...( 822 ): >SRE2_HUMAN
LVKPQAKK

SEQ ID NO: 19282 - protein, 8 aa, Homo sapiens
  ( 816 )...( 823 ): >SRE2_HUMAN
VKPQAKKK

SEQ ID NO: 19283 - protein, 8 aa, Homo sapiens
  ( 817 )...( 824 ): >SRE2_HUMAN
KPQAKKKA

SEQ ID NO: 19284 - protein, 8 aa, Homo sapiens
  ( 580 )...( 587 ): >SREC_HUMAN
SSLARAKR

SEQ ID NO: 19285 - protein, 8 aa, Homo sapiens
  ( 581 )...( 588 ): >SREC_HUMAN
SLARAKRP

SEQ ID NO: 19286 - protein, 8 aa, Homo sapiens
  ( 582 )...( 589 ): >SREC_HUMAN
LARAKRPS

SEQ ID NO: 19287 - protein, 8 aa, Homo sapiens
  ( 583 )...( 590 ): >SREC_HUMAN
ARAKRPSV

SEQ ID NO: 19288 - protein, 8 aa, Homo sapiens
  ( 584 )...( 591 ): >SREC_HUMAN
RAKRPSVS

SEQ ID NO: 19289 - protein, 8 aa, Homo sapiens
  ( 616 )...( 623 ): >SREC_HUMAN
PKRLSRGA

SEQ ID NO: 19290 - protein, 8 aa, Homo sapiens
  ( 617 )...( 624 ): >SREC_HUMAN
KRLSRGAQ

SEQ ID NO: 19291 - protein, 8 aa, Homo sapiens
  ( 722 )...( 729 ): >SREC_HUMAN
AKVKRAIP

SEQ ID NO: 19292 - protein, 8 aa, Homo sapiens
  ( 724 )...( 731 ): >SREC_HUMAN
VKRAIPKP

SEQ ID NO: 19293 - protein, 8 aa, Homo sapiens
  ( 734 )...( 741 ): >SREC_HUMAN
QALNRKKG

SEQ ID NO: 19294 - protein, 8 aa, Homo sapiens
  ( 735 )...( 742 ): >SREC_HUMAN
ALNRKKGS

SEQ ID NO: 19295 - protein, 8 aa, Homo sapiens
  ( 736 )...( 743 ): >SREC_HUMAN
LNRKKGSP

SEQ ID NO: 19296 - protein, 8 aa, Homo sapiens
  ( 738 )...( 745 ): >SREC_HUMAN
RKKGSPGL

SEQ ID NO: 19297 - protein, 8 aa, Homo sapiens
  ( 96 )...( 103 ): >SRF_HUMAN
RGLKRSLS

SEQ ID NO: 19298 - protein, 8 aa, Homo sapiens
  ( 160 )...( 167 ): >SRF_HUMAN
TFSKRKTG

SEQ ID NO: 19299 - protein, 8 aa, Homo sapiens
  ( 161 )...( 168 ): >SRF_HUMAN
FSKRKTGI

SEQ ID NO: 19300 - protein, 8 aa, Homo sapiens
  ( 162 )...( 169 ): >SRF_HUMAN
SKRKTGIM

SEQ ID NO: 19301 - protein, 8 aa, Homo sapiens
  ( 165 )...( 172 ): >SRF_HUMAN
KTGIMKKA

SEQ ID NO: 19302 - protein, 8 aa, Homo sapiens
  ( 235 )...( 242 ): >ST5A_HUMAN
KTLQLLRK

SEQ ID NO: 19303 - protein, 8 aa, Homo sapiens
  ( 235 )...( 242 ): >ST5B_HUMAN
KTLQLLRK

SEQ ID NO: 19304 - protein, 8 aa, Homo sapiens
  ( 372 )...( 379 ): >STA1_HUMAN
NTVKGFRK

SEQ ID NO: 19305 - protein, 8 aa, Homo sapiens
  ( 373 )...( 380 ): >STA1_HUMAN
TVKGFRKF

SEQ ID NO: 19306 - protein, 8 aa, Homo sapiens
  ( 176 )...( 183 ): >STA2_HUMAN
RYKIQAKG

SEQ ID NO: 19307 - protein, 8 aa, Homo sapiens
  ( 177 )...( 184 ): >STA2_HUMAN
YKIQAKGK

SEQ ID NO: 19308 - protein, 8 aa, Homo sapiens
  ( 178 )...( 185 ): >STA2_HUMAN
KIQAKGKT

SEQ ID NO: 19309 - protein, 8 aa, Homo sapiens
  ( 338 )...( 345 ): >STA2_HUMAN
SKFTVRTR

SEQ ID NO: 19310 - protein, 8 aa, Homo sapiens
  ( 588 )...( 595 ): >STA2_HUMAN
RLLKKTMS

SEQ ID NO: 19311 - protein, 8 aa, Homo sapiens
  ( 376 )...( 383 ): >STA3_HUMAN
AALRGSRK

SEQ ID NO: 19312 - protein, 8 aa, Homo sapiens
  ( 377 )...( 384 ): >STA3_HUMAN
ALRGSRKF

SEQ ID NO: 19313 - protein, 8 aa, Homo sapiens
  ( 86 )...( 93 ): >STA4_HUMAN
IRKVLQGK

SEQ ID NO: 19314 - protein, 8 aa, Homo sapiens
  ( 87 )...( 94 ): >STA4_HUMAN
RKVLQGKF

SEQ ID NO: 19315 - protein, 8 aa, Homo sapiens
  ( 128 )...( 135 ): >STA6_HUMAN
LKFKTGLR

SEQ ID NO: 19316 - protein, 8 aa, Homo sapiens
  ( 130 )...( 137 ): >STA6_HUMAN
FKTGLRRL

SEQ ID NO: 19317 - protein, 8 aa, Homo sapiens
  ( 131 )...( 138 ): >STA6_HUMAN
KTGLRRLQ

SEQ ID NO: 19318 - protein, 8 aa, Homo sapiens
  ( 193 )...( 200 ): >STA6_HUMAN
AKALVLKR

SEQ ID NO: 19319 - protein, 8 aa, Homo sapiens
  ( 194 )...( 201 ): >STA6_HUMAN
KALVLKRI

SEQ ID NO: 19320 - protein, 8 aa, Homo sapiens
  ( 361 )...( 368 ): >STA6_HUMAN
KNLLLKKI

SEQ ID NO: 19321 - protein, 8 aa, Homo sapiens
  ( 362 )...( 369 ): >STA6_HUMAN
NLLLKKIK

SEQ ID NO: 19322 - protein, 8 aa, Homo sapiens
  ( 368 )...( 375 ): >STA6_HUMAN
IKRCERKG

SEQ ID NO: 19323 - protein, 8 aa, Homo sapiens
  ( 524 )...( 531 ): >STA6_HUMAN
LTKRCLRS

SEQ ID NO: 19324 - protein, 8 aa, Homo sapiens
  ( 188 )...( 195 ): >SUT3_HUMAN
YKSKIVKG

SEQ ID NO: 19325 - protein, 8 aa, Homo sapiens
  ( 189 )...( 196 ): >SUT3_HUMAN
KSKIVKGI

SEQ ID NO: 19326 - protein, 8 aa, Homo sapiens
  ( 136 )...( 143 ): >SX10_HUMAN
KTLGKLWR

SEQ ID NO: 19327 - protein, 8 aa, Homo sapiens
  ( 447 )...( 454 ): >T2D4_HUMAN
TTKRVRLG

SEQ ID NO: 19328 - protein, 8 aa, Homo sapiens
  ( 448 )...( 455 ): >T2D4_HUMAN
TKRVRLGP

SEQ ID NO: 19329 - protein, 8 aa, Homo sapiens
  ( 498 )...( 505 ): >T2D4_HUMAN
SVTPKKLR

SEQ ID NO: 19330 - protein, 8 aa, Homo sapiens
  ( 499 )...( 506 ): >T2D4_HUMAN
VTPKKLRS

SEQ ID NO: 19331 - protein, 8 aa, Homo sapiens
  ( 500 )...( 507 ): >T2D4_HUMAN
TPKKLRSV

SEQ ID NO: 19332 - protein, 8 aa, Homo sapiens
  ( 503 )...( 510 ): >T2D4_HUMAN
KLRSVKQA

SEQ ID NO: 19333 - protein, 8 aa, Homo sapiens
  ( 129 )...( 136 ): >T2D7_HUMAN
LKSLQKKA

SEQ ID NO: 19334 - protein, 8 aa, Homo sapiens
  ( 55 )...( 62 ): >T2DA_HUMAN
NQVLTKKK

SEQ ID NO: 19335 - protein, 8 aa, Homo sapiens
  ( 56 )...( 63 ): >T2DA_HUMAN
QVLTKKKL

SEQ ID NO: 19336 - protein, 8 aa, Homo sapiens
  ( 57 )...( 64 ): >T2DA_HUMAN
VLTKKKLQ

SEQ ID NO: 19337 - protein, 8 aa, Homo sapiens
  ( 151 )...( 158 ): >T2DA_HUMAN
RMALIRKT

SEQ ID NO: 19338 - protein, 8 aa, Homo sapiens
  ( 153 )...( 160 ): >T2DA_HUMAN
ALIRKTTK

SEQ ID NO: 19339 - protein, 7 aa, Homo sapiens
  ( 155 )...( 162 ): >T2DA_HUMAN
IRKTTKK

SEQ ID NO: 19340 - protein, 8 aa, Homo sapiens
  ( 12 )...( 19 ): >T2EB_HUMAN
FKKRALST

SEQ ID NO: 19341 - protein, 8 aa, Homo sapiens
  ( 13 )...( 20 ): >T2EB_HUMAN
KKRALSTP

SEQ ID NO: 19342 - protein, 8 aa, Homo sapiens
  ( 37 )...( 44 ): >T2EB_HUMAN
KKKKTKVE

SEQ ID NO: 19343 - protein, 8 aa, Homo sapiens
  ( 148 )...( 155 ): >T2EB_HUMAN
KKALLRLL

SEQ ID NO: 19344 - protein, 8 aa, Homo sapiens
  ( 251 )...( 258 ): >T2EB_HUMAN
KKVAPIQR

SEQ ID NO: 19345 - protein, 8 aa, Homo sapiens
  ( 17 )...( 24 ): >T2FA_HUMAN
RVPKNTTK

SEQ ID NO: 19346 - protein, 8 aa, Homo sapiens
  ( 81 )...( 88 ): >T2FA_HUMAN
RKKYGIVL

SEQ ID NO: 19347 - protein, 8 aa, Homo sapiens
  ( 82 )...( 89 ): >T2FA_HUMAN
KKYGIVLK

SEQ ID NO: 19348 - protein, 8 aa, Homo sapiens
  ( 102 )...( 109 ): >T2FA_HUMAN
VNGKSGRK

SEQ ID NO: 19349 - protein, 8 aa, Homo sapiens
  ( 103 )...( 110 ): >T2FA_HUMAN
NGKSGRKF

SEQ ID NO: 19350 - protein, 8 aa, Homo sapiens
  ( 106 )...( 113 ): >T2FA_HUMAN
SGRKFKGI

SEQ ID NO: 19351 - protein, 8 aa, Homo sapiens
  ( 109 )...( 116 ): >T2FA_HUMAN
KFKGIKKG

SEQ ID NO: 19352 - protein, 8 aa, Homo sapiens
  ( 231 )...( 238 ): >T2FA_HUMAN
VPKAKKKA

SEQ ID NO: 19353 - protein, 8 aa, Homo sapiens
  ( 232 )...( 239 ): >T2FA_HUMAN
PKAKKKAP

SEQ ID NO: 19354 - protein, 8 aa, Homo sapiens
  ( 233 )...( 240 ): >T2FA_HUMAN
KAKKKAPL

SEQ ID NO: 19355 - protein, 8 aa, Homo sapiens
  ( 235 )...( 242 ): >T2FA_HUMAN
KKKAPLAK

SEQ ID NO: 19356 - protein, 8 aa, Homo sapiens
  ( 364 )...( 371 ): >T2FA_HUMAN
AKKKTPPK

SEQ ID NO: 19357 - protein, 8 aa, Homo sapiens
  ( 464 )...( 471 ): >T2FA_HUMAN
TRKPMTTK

SEQ ID NO: 19358 - protein, 8 aa, Homo sapiens
  ( 20 )...( 27 ): >TAL2_HUMAN
SAFAKLRK

SEQ ID NO: 19359 - protein, 8 aa, Homo sapiens
  ( 21 )...( 28 ): >TAL2_HUMAN
AFAKLRKL

SEQ ID NO: 19360 - protein, 8 aa, Homo sapiens
  ( 22 )...( 29 ): >TAL2_HUMAN
FAKLRKLI

SEQ ID NO: 19361 - protein, 8 aa, Homo sapiens
  ( 23 )...( 30 ): >TAL2_HUMAN
AKLRKLIP

SEQ ID NO: 19362 - protein, 8 aa, Homo sapiens
  ( 24 )...( 31 ): >TAL2_HUMAN
KLRKLIPT

SEQ ID NO: 19363 - protein, 8 aa, Homo sapiens
  ( 183 )...( 190 ): >TAL_HUMAN
HTKVVRRI

SEQ ID NO: 19364 - protein, 8 aa, Homo sapiens
  ( 251 )...( 258 ): >TAL_HUMAN
TQRAKTGK

SEQ ID NO: 19365 - protein, 8 aa, Homo sapiens
  ( 124 )...( 131 ): >TBX3_HUMAN
VITKSGRR

SEQ ID NO: 19366 - protein, 8 aa, Homo sapiens
  ( 125 )...( 132 ): >TBX3_HUMAN
ITKSGRRM

SEQ ID NO: 19367 - protein, 8 aa, Homo sapiens
  ( 145 )...( 152 ): >TBX3_HUMAN
KKAKYILL

SEQ ID NO: 19368 - protein, 8 aa, Homo sapiens
  ( 5 )...( 12 ): >TCE1_HUMAN
VVRFAKKM

SEQ ID NO: 19369 - protein, 8 aa, Homo sapiens
  ( 14 )...( 21 ): >TCE1_HUMAN
KMVQKKNA

SEQ ID NO: 19370 - protein, 8 aa, Homo sapiens
  ( 7 )...( 14 ): >TCE3_HUMAN
LLRIAKKL

SEQ ID NO: 19371 - protein, 8 aa, Homo sapiens
  ( 16 )...( 23 ): >TCE3_HUMAN
KMVARKNT

SEQ ID NO: 19372 - protein, 8 aa, Homo sapiens
  ( 96 )...( 103 ): >TCE3_HUMAN
AKKKEKGL

SEQ ID NO: 19373 - protein, 8 aa, Homo sapiens
  ( 113 )...( 120 ): >TCE3_HUMAN
GLSPPRKK

SEQ ID NO: 19374 - protein, 8 aa, Homo sapiens
  ( 263 )...( 270 ): >TCF7_HUMAN
AKKPTIKK

SEQ ID NO: 19375 - protein, 8 aa, Homo sapiens
  ( 265 )...( 272 ): >TCF7_HUMAN
KPTIKKPL

SEQ ID NO: 19376 - protein, 8 aa, Homo sapiens
  ( 300 )...( 307 ): >TCF8_HUMAN
GRPRTGLK

SEQ ID NO: 19377 - protein, 8 aa, Homo sapiens
  ( 301 )...( 308 ): >TCF8_HUMAN
RPRTGLKT

SEQ ID NO: 19378 - protein, 8 aa, Homo sapiens
  ( 287 )...( 294 ): >TCL5_HUMAN
LCKQALKR

SEQ ID NO: 19379 - protein, 8 aa, Homo sapiens
  ( 418 )...( 425 ): >TCL5_HUMAN
FCGKTGRR

SEQ ID NO: 19380 - protein, 8 aa, Homo sapiens
  ( 419 )...( 426 ): >TCL5_HUMAN
CGKTGRRL

SEQ ID NO: 19381 - protein, 8 aa, Homo sapiens
  ( 422 )...( 429 ): >TCL5_HUMAN
TGRRLKLT

SEQ ID NO: 19382 - protein, 8 aa, Homo sapiens
  ( 111 )...( 118 ): >TDP1_HUMAN
KNGKGLRH

SEQ ID NO: 19383 - protein, 8 aa, Homo sapiens
  ( 126 )...( 133 ): >TDP1_HUMAN
KVQRKGTT

SEQ ID NO: 19384 - protein, 8 aa, Homo sapiens
  ( 127 )...( 134 ): >TDP2_HUMAN
KNGKGLRH

SEQ ID NO: 19385 - protein, 8 aa, Homo sapiens
  ( 142 )...( 149 ): >TDP2_HUMAN
KVQRKGTT

SEQ ID NO: 19386 - protein, 8 aa, Homo sapiens
  ( 231 )...( 238 ): >TDP2_HUMAN
IKQKRAQL

SEQ ID NO: 19387 - protein, 8 aa, Homo sapiens
  ( 64 )...( 71 ): >TEA2_HUMAN
GRRKIILS

SEQ ID NO: 19388 - protein, 8 aa, Homo sapiens
  ( 85 )...( 92 ): >TEA2_HUMAN
RYIKLRTG

SEQ ID NO: 19389 - protein, 8 aa, Homo sapiens
  ( 86 )...( 93 ): >TEA2_HUMAN
YIKLRTGK

SEQ ID NO: 19390 - protein, 8 aa, Homo sapiens
  ( 87 )...( 94 ): >TEA2_HUMAN
IKLRTGKT

SEQ ID NO: 19391 - protein, 8 aa, Homo sapiens
  ( 89 )...( 96 ): >TEA2_HUMAN
LRTGKTRT

SEQ ID NO: 19392 - protein, 8 aa, Homo sapiens
  ( 94 )...( 101 ): >TEA2_HUMAN
TRTRKQVS

SEQ ID NO: 19393 - protein, 8 aa, Homo sapiens
  ( 95 )...( 102 ): >TEA2_HUMAN
RTRKQVSS

SEQ ID NO: 19394 - protein, 8 aa, Homo sapiens
  ( 105 )...( 112 ): >TEA2_HUMAN
QVLARRKS

SEQ ID NO: 19395 - protein, 8 aa, Homo sapiens
  ( 174 )...( 181 ): >TEF_HUMAN
QPMIKKAK

SEQ ID NO: 19396 - protein, 8 aa, Homo sapiens
  ( 175 )...( 182 ): >TEF_HUMAN
PMIKKAKK

SEQ ID NO: 19397 - protein, 8 aa, Homo sapiens
  ( 176 )...( 183 ): >TEF_HUMAN
MIKKAKKV

SEQ ID NO: 19398 - protein, 8 aa, Homo sapiens
  ( 177 )...( 184 ): >TEF_HUMAN
IKKAKKVF

SEQ ID NO: 19399 - protein, 8 aa, Homo sapiens
  ( 178 )...( 185 ): >TEF_HUMAN
KKAKKVFV

SEQ ID NO: 19400 - protein, 8 aa, Homo sapiens
  ( 179 )...( 186 ): >TEF_HUMAN
KAKKVFVP

SEQ ID NO: 19401 - protein, 8 aa, Homo sapiens
  ( 199 )...( 206 ): >TEF_HUMAN
KKNNVAAK

SEQ ID NO: 19402 - protein, 8 aa, Homo sapiens
  ( 202 )...( 209 ): >TEF_HUMAN
NVAAKRSR

SEQ ID NO: 19403 - protein, 8 aa, Homo sapiens
  ( 241 )...( 248 ): >TEF_HUMAN
RKEVGKCK

SEQ ID NO: 19404 - protein, 8 aa, Homo sapiens
  ( 113 )...( 120 ): >TEL2_HUMAN
IKTQRRAL

SEQ ID NO: 19405 - protein, 8 aa, Homo sapiens
  ( 114 )...( 121 ): >TEL2_HUMAN
KTQRRALV

SEQ ID NO: 19406 - protein, 8 aa, Homo sapiens
  ( 303 )...( 310 ): >TEL2_HUMAN
RFLKTPGK

SEQ ID NO: 19407 - protein, 8 aa, Homo sapiens
  ( 465 )...( 472 ): >TF1B_HUMAN
VSGVKRSR

SEQ ID NO: 19408 - protein, 8 aa, Homo sapiens
  ( 482 )...( 489 ): >TF1B_HUMAN
MRKVPRVS

SEQ ID NO: 19409 - protein, 8 aa, Homo sapiens
  ( 483 )...( 490 ): >TF1B_HUMAN
RKVPRVSL

SEQ ID NO: 19410 - protein, 8 aa, Homo sapiens
  ( 60 )...( 67 ): >TF21_HUMAN
RKAPTKKS

SEQ ID NO: 19411 - protein, 8 aa, Homo sapiens
  ( 90 )...( 97 ): >TF21_HUMAN
ARMRVLSK

SEQ ID NO: 19412 - protein, 8 aa, Homo sapiens
  ( 91 )...( 98 ): >TF21_HUMAN
RMRVLSKA

SEQ ID NO: 19413 - protein, 8 aa, Homo sapiens
  ( 97 )...( 104 ): >TF21_HUMAN
KAFSRLKT

SEQ ID NO: 19414 - protein, 8 aa, Homo sapiens
  ( 232 )...( 239 ): >TF3A_HUMAN
ASPSKLKR

SEQ ID NO: 19415 - protein, 8 aa, Homo sapiens
  ( 366 )...( 373 ): >TF3A_HUMAN
MKLKVKKS

SEQ ID NO: 19416 - protein, 8 aa, Homo sapiens
  ( 387 )...( 394 ): >TF3A_HUMAN
IPPKRKQG

SEQ ID NO: 19417 - protein, 8 aa, Homo sapiens
  ( 389 )...( 396 ): >TF3A_HUMAN
PKRKQGQG

SEQ ID NO: 19418 - protein, 8 aa, Homo sapiens
  ( 390 )...( 397 ): >TF3A_HUMAN
KRKQGQGL

SEQ ID NO: 19419 - protein, 8 aa, Homo sapiens
  ( 150 )...( 157 ): >TFAM_HUMAN
TLLGKPKR

SEQ ID NO: 19420 - protein, 8 aa, Homo sapiens
  ( 151 )...( 158 ): >TFAM_HUMAN
LLGKPKRP

SEQ ID NO: 19421 - protein, 8 aa, Homo sapiens
  ( 172 )...( 179 ): >TFE2_HUMAN
KVRKVPPG

SEQ ID NO: 19422 - protein, 8 aa, Homo sapiens
  ( 521 )...( 528 ): >TFE2_HUMAN
LKAPRART

SEQ ID NO: 19423 - protein, 8 aa, Homo sapiens
  ( 522 )...( 529 ): >TFE2_HUMAN
KAPRARTS

SEQ ID NO: 19424 - protein, 8 aa, Homo sapiens
  ( 346 )...( 353 ): >TFH1_HUMAN
QPAVKRAK

SEQ ID NO: 19425 - protein, 8 aa, Homo sapiens
  ( 347 )...( 354 ): >TFH1_HUMAN
PAVKRAKL

SEQ ID NO: 19426 - protein, 8 aa, Homo sapiens
  ( 348 )...( 355 ): >TFH1_HUMAN
AVKRAKLQ

SEQ ID NO: 19427 - protein, 8 aa, Homo sapiens
  ( 489 )...( 496 ): >TFH1_HUMAN
KVVKMKSN

SEQ ID NO: 19428 - protein, 8 aa, Homo sapiens
  ( 106 )...( 113 ): >TFH2_HUMAN
IIVTKSKR

SEQ ID NO: 19429 - protein, 8 aa, Homo sapiens
  ( 107 )...( 114 ): >TFH2_HUMAN
IVTKSKRA

SEQ ID NO: 19430 - protein, 8 aa, Homo sapiens
  ( 186 )...( 193 ): >TFH2_HUMAN
IKTLKAAK

SEQ ID NO: 19431 - protein, 8 aa, Homo sapiens
  ( 187 )...( 194 ): >TFH2_HUMAN
KTLKAAKI

SEQ ID NO: 19432 - protein, 8 aa, Homo sapiens
  ( 188 )...( 195 ): >TFH2_HUMAN
TLKAAKIR

SEQ ID NO: 19433 - protein, 8 aa, Homo sapiens
  ( 189 )...( 196 ): >TFH2_HUMAN
LKAAKIRV

SEQ ID NO: 19434 - protein, 8 aa, Homo sapiens
  ( 190 )...( 197 ): >TFH2_HUMAN
KAAKIRVS

SEQ ID NO: 19435 - protein, 8 aa, Homo sapiens
  ( 158 )...( 165 ): >TFH3_HUMAN
KSRILVIK

SEQ ID NO: 19436 - protein, 8 aa, Homo sapiens
  ( 294 )...( 301 ): >TFH3_HUMAN
PPVLKAKK

SEQ ID NO: 19437 - protein, 8 aa, Homo sapiens
  ( 182 )...( 189 ): >TRLT_HUMAN
VCNLLKRK

SEQ ID NO: 19438 - protein, 8 aa, Homo sapiens
  ( 183 )...( 190 ): >TRLT_HUMAN
CNLLKRKG

SEQ ID NO: 19439 - protein, 8 aa, Homo sapiens
  ( 400 )...( 407 ): >TRLT_HUMAN
GSRTKWLK

SEQ ID NO: 19440 - protein, 8 aa, Homo sapiens
  ( 305 )...( 312 ): >TRX2_HUMAN
IKFVSRAK

SEQ ID NO: 19441 - protein, 8 aa, Homo sapiens
  ( 307 )...( 314 ): >TRX2_HUMAN
FVSRAKKV

SEQ ID NO: 19442 - protein, 8 aa, Homo sapiens
  ( 311 )...( 318 ): >TRX2_HUMAN
AKKVKMGQ

SEQ ID NO: 19443 - protein, 8 aa, Homo sapiens
  ( 312 )...( 319 ): >TRX2_HUMAN
KKVKMGQL

SEQ ID NO: 19444 - protein, 8 aa, Homo sapiens
  ( 468 )...( 475 ): >TRX2_HUMAN
KRGRPPLT

SEQ ID NO: 19445 - protein, 8 aa, Homo sapiens
  ( 534 )...( 541 ): >TRX2_HUMAN
ARSSRVIK

SEQ ID NO: 19446 - protein, 8 aa, Homo sapiens
  ( 535 )...( 542 ): >TRX2_HUMAN
RSSRVIKT

SEQ ID NO: 19447 - protein, 8 aa, Homo sapiens
  ( 537 )...( 544 ): >TRX2_HUMAN
SRVIKTPR

SEQ ID NO: 19448 - protein, 8 aa, Homo sapiens
  ( 794 )...( 801 ): >TRX2_HUMAN
SLLKRAKV

SEQ ID NO: 19449 - protein, 8 aa, Homo sapiens
  ( 795 )...( 802 ): >TRX2_HUMAN
LLKRAKVQ

SEQ ID NO: 19450 - protein, 8 aa, Homo sapiens
  ( 796 )...( 803 ): >TRX2_HUMAN
LKRAKVQL

SEQ ID NO: 19451 - protein, 8 aa, Homo sapiens
  ( 957 )...( 964 ): >TRX2_HUMAN
HGKKMRMA

SEQ ID NO: 19452 - protein, 8 aa, Homo sapiens
  ( 1014 )...( 1021 ): >TRX2_HUMAN
ERLAKKGR

SEQ ID NO: 19453 - protein, 8 aa, Homo sapiens
  ( 1016 )...( 1023 ): >TRX2_HUMAN
LAKKGRTI

SEQ ID NO: 19454 - protein, 8 aa, Homo sapiens
  ( 1017 )...( 1024 ): >TRX2_HUMAN
AKKGRTIV

SEQ ID NO: 19455 - protein, 8 aa, Homo sapiens
  ( 1019 )...( 1026 ): >TRX2_HUMAN
KGRTIVKT

SEQ ID NO: 19456 - protein, 8 aa, Homo sapiens
  ( 1075 )...( 1082 ): >TRX2_HUMAN
SARRCVKQ

SEQ ID NO: 19457 - protein, 8 aa, Homo sapiens
  ( 1253 )...( 1260 ): >TRX2_HUMAN
HVCGRKGR

SEQ ID NO: 19458 - protein, 8 aa, Homo sapiens
  ( 1258 )...( 1265 ): >TRX2_HUMAN
KGRGSKHL

SEQ ID NO: 19459 - protein, 8 aa, Homo sapiens
  ( 1716 )...( 1723 ): >TRX2_HUMAN
KRKFLTGL

SEQ ID NO: 19460 - protein, 8 aa, Homo sapiens
  ( 2275 )...( 2282 ): >TRX2_HUMAN
AIRVKRVS

SEQ ID NO: 19461 - protein, 8 aa, Homo sapiens
  ( 2276 )...( 2283 ): >TRX2_HUMAN
IRVKRVST

SEQ ID NO: 19462 - protein, 8 aa, Homo sapiens
  ( 2277 )...( 2284 ): >TRX2_HUMAN
RVKRVSTF

SEQ ID NO: 19463 - protein, 8 aa, Homo sapiens
  ( 2320 )...( 2327 ): >TRX2_HUMAN
GFSRVRMK

SEQ ID NO: 19464 - protein, 8 aa, Homo sapiens
  ( 2323 )...( 2330 ): >TRX2_HUMAN
RVRMKTPT

SEQ ID NO: 19465 - protein, 8 aa, Homo sapiens
  ( 2325 )...( 2332 ): >TRX2_HUMAN
RMKTPTVR

SEQ ID NO: 19466 - protein, 8 aa, Homo sapiens
  ( 2549 )...( 2556 ): >TRX2_HUMAN
LRSTRRAT

SEQ ID NO: 19467 - protein, 8 aa, Homo sapiens
  ( 69 )...( 76 ): >TWST_HUMAN
PAQGKRGK

SEQ ID NO: 19468 - protein, 8 aa, Homo sapiens
  ( 158 )...( 165 ): >TX21_HUMAN
IITKQGRR

SEQ ID NO: 19469 - protein, 8 aa, Homo sapiens
  ( 159 )...( 166 ): >TX21_HUMAN
ITKQGRRM

SEQ ID NO: 19470 - protein, 8 aa, Homo sapiens
  ( 178 )...( 185 ): >TYY1_HUMAN
KKSGKKSY

SEQ ID NO: 19471 - protein, 8 aa, Homo sapiens
  ( 107 )...( 114 ): >WS14_HUMAN
KNFKGLKL

SEQ ID NO: 19472 - protein, 8 aa, Homo sapiens
  ( 110 )...( 117 ): >WS14_HUMAN
KGLKLLCR

SEQ ID NO: 19473 - protein, 8 aa, Homo sapiens
  ( 374 )...( 381 ): >WT1_HUMAN
QRRHTGVK

SEQ ID NO: 19474 - protein, 8 aa, Homo sapiens
  ( 375 )...( 382 ): >WT1_HUMAN
RRHTGVKP

SEQ ID NO: 19475 - protein, 8 aa, Homo sapiens
  ( 384 )...( 391 ): >WT1_HUMAN
QCKTCQRK

SEQ ID NO: 19476 - protein, 8 aa, Homo sapiens
  ( 76 )...( 83 ): >XBP1_HUMAN
KLKNRVAA

SEQ ID NO: 19477 - protein, 8 aa, Homo sapiens
  ( 140 )...( 147 ): >XPB_HUMAN
LRKLSKTG

SEQ ID NO: 19478 - protein, 8 aa, Homo sapiens
  ( 141 )...( 148 ): >XPB_HUMAN
RKLSKTGV

SEQ ID NO: 19479 - protein, 8 aa, Homo sapiens
  ( 322 )...( 329 ): >XPB_HUMAN
KSLRKMFG

SEQ ID NO: 19480 - protein, 8 aa, Homo sapiens
  ( 353 )...( 360 ): >XPB_HUMAN
AACTVRKR

SEQ ID NO: 19481 - protein, 8 aa, Homo sapiens
  ( 355 )...( 362 ): >XPB_HUMAN
CTVRKRCL

SEQ ID NO: 19482 - protein, 8 aa, Homo sapiens
  ( 356 )...( 363 ): >XPB_HUMAN
TVRKRCLV

SEQ ID NO: 19483 - protein, 8 aa, Homo sapiens
  ( 522 )...( 529 ): >XPB_HUMAN
YVAIKTKK

SEQ ID NO: 19484 - protein, 8 aa, Homo sapiens
  ( 643 )...( 650 ): >XPB_HUMAN
VLRAKKGM

SEQ ID NO: 19485 - protein, 8 aa, Homo sapiens
  ( 644 )...( 651 ): >XPB_HUMAN
LRAKKGMV

SEQ ID NO: 19486 - protein, 8 aa, Homo sapiens
  ( 645 )...( 652 ): >XPB_HUMAN
RAKKGMVA

SEQ ID NO: 19487 - protein, 8 aa, Homo sapiens
  ( 629 )...( 636 ): >XPD_HUMAN
QSRILKAR

SEQ ID NO: 19488 - protein, 8 aa, Homo sapiens
  ( 630 )...( 637 ): >XPD_HUMAN
SRILKARL

SEQ ID NO: 19489 - protein, 8 aa, Homo sapiens
  ( 665 )...( 672 ): >XPD_HUMAN
GRAIRGKT

SEQ ID NO: 19490 - protein, 8 aa, Homo sapiens
  ( 294 )...( 301 ): >Y211_HUMAN
KRVASVTK

SEQ ID NO: 19491 - protein, 8 aa, Homo sapiens
  ( 338 )...( 345 ): >Y211_HUMAN
ATRKSIKP

SEQ ID NO: 19492 - protein, 8 aa, Homo sapiens
  ( 339 )...( 346 ): >Y211_HUMAN
TRKSIKPS

SEQ ID NO: 19493 - protein, 8 aa, Homo sapiens
  ( 371 )...( 378 ): >Y211_HUMAN
AIPKVRIK

SEQ ID NO: 19494 - protein, 8 aa, Homo sapiens
  ( 372 )...( 379 ): >Y211_HUMAN
IPKVRIKT

SEQ ID NO: 19495 - protein, 8 aa, Homo sapiens
  ( 373 )...( 380 ): >Y211_HUMAN
PKVRIKTI

SEQ ID NO: 19496 - protein, 8 aa, Homo sapiens
  ( 376 )...( 383 ): >Y211_HUMAN
RIKTIKTS

SEQ ID NO: 19497 - protein, 8 aa, Homo sapiens
  ( 521 )...( 528 ): >Y211_HUMAN
AKSSVQRR

SEQ ID NO: 19498 - protein, 8 aa, Homo sapiens
  ( 1005 )...( 1012 ): >Y211_HUMAN
SHGRTLKR

SEQ ID NO: 19499 - protein, 8 aa, Homo sapiens
  ( 150 )...( 157 ): >Y222_HUMAN
RVLLRSSK

SEQ ID NO: 19500 - protein, 8 aa, Homo sapiens
  ( 151 )...( 158 ): >Y222_HUMAN
VLLRSSKK

SEQ ID NO: 19501 - protein, 8 aa, Homo sapiens
  ( 152 )...( 159 ): >Y222_HUMAN
LLRSSKKG

SEQ ID NO: 19502 - protein, 8 aa, Homo sapiens
  ( 153 )...( 160 ): >Y222_HUMAN
LRSSKKGA

SEQ ID NO: 19503 - protein, 8 aa, Homo sapiens
  ( 300 )...( 307 ): >Y222_HUMAN
PKTGSKNR

SEQ ID NO: 19504 - protein, 8 aa, Homo sapiens
  ( 301 )...( 308 ): >Y222_HUMAN
KTGSKNRP

SEQ ID NO: 19505 - protein, 8 aa, Homo sapiens
  ( 302 )...( 309 ): >Y222_HUMAN
TGSKNRPK

SEQ ID NO: 19506 - protein, 8 aa, Homo sapiens
  ( 512 )...( 519 ): >Y296_HUMAN
RVHCKAAR

SEQ ID NO: 19507 - protein, 8 aa, Homo sapiens
  ( 513 )...( 520 ): >Y296_HUMAN
VHCKAARR

SEQ ID NO: 19508 - protein, 8 aa, Homo sapiens
  ( 1739 )...( 1746 ): >Y296_HUMAN
KAFRTAAR

SEQ ID NO: 19509 - protein, 8 aa, Homo sapiens
  ( 1808 )...( 1815 ): >Y296_HUMAN
RGKSSPKV

SEQ ID NO: 19510 - protein, 8 aa, Homo sapiens
  ( 211 )...( 218 ): >Y798_HUMAN
GKAFVKKS

SEQ ID NO: 19511 - protein, 8 aa, Homo sapiens
  ( 212 )...( 219 ): >Y798_HUMAN
KAFVKKSQ

SEQ ID NO: 19512 - protein, 8 aa, Homo sapiens
  ( 239 )...( 246 ): >Y798_HUMAN
AKVFSRKS

SEQ ID NO: 19513 - protein, 8 aa, Homo sapiens
  ( 295 )...( 302 ): >Y798_HUMAN
GKGFPGKR

SEQ ID NO: 19514 - protein, 8 aa, Homo sapiens
  ( 380 )...( 387 ): >Y798_HUMAN
KGFTMKSR

SEQ ID NO: 19515 - protein, 8 aa, Homo sapiens
  ( 547 )...( 554 ): >Y798_HUMAN
GKGFTMKR

SEQ ID NO: 19516 - protein, 8 aa, Homo sapiens
  ( 604 )...( 611 ): >Y798_HUMAN
KGFTMKSR

SEQ ID NO: 19517 - protein, 8 aa, Homo sapiens
  ( 10 )...( 17 ): >YB96_HUMAN
RRLPGSSK

SEQ ID NO: 19518 - protein, 8 aa, Homo sapiens
  ( 73 )...( 80 ): >YB96_HUMAN
KKGRPKAE

SEQ ID NO: 19519 - protein, 8 aa, Homo sapiens
  ( 332 )...( 339 ): >YB96_HUMAN
KAPRATGR

SEQ ID NO: 19520 - protein, 8 aa, Homo sapiens
  ( 469 )...( 476 ): >YB96_HUMAN
ARKKVPAA

SEQ ID NO: 19521 - protein, 8 aa, Homo sapiens
  ( 470 )...( 477 ): >YB96_HUMAN
RKKVPAAP

SEQ ID NO: 19522 - protein, 8 aa, Homo sapiens
  ( 520 )...( 527 ): >YB96_HUMAN
RKTLVGLK

SEQ ID NO: 19523 - protein, 8 aa, Homo sapiens
  ( 547 )...( 554 ): >YB96_HUMAN
KQFKSKAG

SEQ ID NO: 19524 - protein, 8 aa, Homo sapiens
  ( 584 )...( 591 ): >YB96_HUMAN
LRKVLKQM

SEQ ID NO: 19525 - protein, 8 aa, Homo sapiens
  ( 585 )...( 592 ): >YB96_HUMAN
RKVLKQMG

SEQ ID NO: 19526 - protein, 8 aa, Homo sapiens
  ( 586 )...( 593 ): >YB96_HUMAN
KVLKQMGR

SEQ ID NO: 19527 - protein, 8 aa, Homo sapiens
  ( 636 )...( 643 ): >YB96_HUMAN
GKTYRSKA

SEQ ID NO: 19528 - protein, 8 aa, Homo sapiens
  ( 637 )...( 644 ): >YB96_HUMAN
KTYRSKAG

SEQ ID NO: 19529 - protein, 8 aa, Homo sapiens
  ( 837 )...( 844 ): >YB96_HUMAN
NLAGGKKR

SEQ ID NO: 19530 - protein, 8 aa, Homo sapiens
  ( 877 )...( 884 ): >YB96_HUMAN
RGSTGRKV

SEQ ID NO: 19531 - protein, 8 aa, Homo sapiens
  ( 882 )...( 889 ): >YB96_HUMAN
RKVGVSKA

SEQ ID NO: 19532 - protein, 8 aa, Homo sapiens
  ( 488 )...( 495 ): >YB98_HUMAN
SLKVHKRI

SEQ ID NO: 19533 - protein, 8 aa, Homo sapiens
  ( 7 )...( 14 ): >YD49_HUMAN
TKNATRTK

SEQ ID NO: 19534 - protein, 8 aa, Homo sapiens
  ( 8 )...( 15 ): >YD49_HUMAN
KNATRTKA

SEQ ID NO: 19535 - protein, 8 aa, Homo sapiens
  ( 63 )...( 70 ): >YD49_HUMAN
RIIPLKKT

SEQ ID NO: 19536 - protein, 8 aa, Homo sapiens
  ( 68 )...( 75 ): >YD49_HUMAN
KKTPTSQR

SEQ ID NO: 19537 - protein, 8 aa, Homo sapiens
  ( 125 )...( 132 ): >YD49_HUMAN
MKGSKAIR

SEQ ID NO: 19538 - protein, 8 aa, Homo sapiens
  ( 126 )...( 133 ): >YD49_HUMAN
KGSKAIRQ

SEQ ID NO: 19539 - protein, 8 aa, Homo sapiens
  ( 139 )...( 146 ): >YD49_HUMAN
LGKKSNNK

SEQ ID NO: 19540 - protein, 8 aa, Homo sapiens
  ( 520 )...( 527 ): >YD49_HUMAN
GKSFRTKS

SEQ ID NO: 19541 - protein, 8 aa, Homo sapiens
  ( 632 )...( 639 ): >YD49_HUMAN
GKAFRRGS

SEQ ID NO: 19542 - protein, 8 aa, Homo sapiens
  ( 231 )...( 238 ): >YE73_HUMAN
KRIHTGKK

SEQ ID NO: 19543 - protein, 8 aa, Homo sapiens
  ( 232 )...( 239 ): >YE73_HUMAN
RIHTGKKP

SEQ ID NO: 19544 - protein, 8 aa, Homo sapiens
  ( 560 )...( 567 ): >YE73_HUMAN
IAKISKYK

SEQ ID NO: 19545 - protein, 8 aa, Homo sapiens
  ( 373 )...( 380 ): >YF59_HUMAN
CGKTFRLR

SEQ ID NO: 19546 - protein, 8 aa, Homo sapiens
  ( 58 )...( 65 ): >YJ56_HUMAN
KKSISIQR

SEQ ID NO: 19547 - protein, 8 aa, Homo sapiens
  ( 144 )...( 151 ): >YJ56_HUMAN
ALFVKRCK

SEQ ID NO: 19548 - protein, 8 aa, Homo sapiens
  ( 249 )...( 256 ): >YJ56_HUMAN
QRVHTGKR

SEQ ID NO: 19549 - protein, 8 aa, Homo sapiens
  ( 250 )...( 257 ): >YJ56_HUMAN
RVHTGKRP

SEQ ID NO: 19550 - protein, 8 aa, Homo sapiens
  ( 277 )...( 284 ): >YJ56_HUMAN
QRVHTGKR

SEQ ID NO: 19551 - protein, 8 aa, Homo sapiens
  ( 278 )...( 285 ): >YJ56_HUMAN
RVHTGKRP

SEQ ID NO: 19552 - protein, 8 aa, Homo sapiens
  ( 596 )...( 603 ): >YJ56_HUMAN
CGKTFTRR

SEQ ID NO: 19553 - protein, 8 aa, Homo sapiens
  ( 597 )...( 604 ): >YJ56_HUMAN
GKTFTRRS

SEQ ID NO: 19554 - protein, 8 aa, Homo sapiens
  ( 20 )...( 27 ): >Z11A_HUMAN
KINYLGKK

SEQ ID NO: 19555 - protein, 8 aa, Homo sapiens
  ( 84 )...( 91 ): >Z11B_HUMAN
KINYLGKK

SEQ ID NO: 19556 - protein, 8 aa, Homo sapiens
  ( 423 )...( 430 ): >Z145_HUMAN
RKLHSGMK

SEQ ID NO: 19557 - protein, 8 aa, Homo sapiens
  ( 147 )...( 154 ): >Z148_HUMAN
KQRSPAKI

SEQ ID NO: 19558 - protein, 8 aa, Homo sapiens
  ( 283 )...( 290 ): >Z148_HUMAN
KKLNRCAI

SEQ ID NO: 19559 - protein, 8 aa, Homo sapiens
  ( 284 )...( 291 ): >Z148_HUMAN
KLNRCAIK

SEQ ID NO: 19560 - protein, 8 aa, Homo sapiens
  ( 387 )...( 394 ): >Z148_HUMAN
PPKLVLKK

SEQ ID NO: 19561 - protein, 8 aa, Homo sapiens
  ( 389 )...( 396 ): >Z148_HUMAN
KLVLKKIN

SEQ ID NO: 19562 - protein, 8 aa, Homo sapiens
  ( 391 )...( 398 ): >Z148_HUMAN
VLKKINSK

SEQ ID NO: 19563 - protein, 8 aa, Homo sapiens
  ( 64 )...( 71 ): >Z161_HUMAN
GIKKEKPK

SEQ ID NO: 19564 - protein, 8 aa, Homo sapiens
  ( 99 )...( 106 ): >Z161_HUMAN
IKLVSRPK

SEQ ID NO: 19565 - protein, 8 aa, Homo sapiens
  ( 101 )...( 108 ): >Z161_HUMAN
LVSRPKKT

SEQ ID NO: 19566 - protein, 8 aa, Homo sapiens
  ( 102 )...( 109 ): >Z161_HUMAN
VSRPKKTP

SEQ ID NO: 19567 - protein, 8 aa, Homo sapiens
  ( 103 )...( 110 ): >Z161_HUMAN
SRPKKTPT

SEQ ID NO: 19568 - protein, 8 aa, Homo sapiens
  ( 104 )...( 111 ): >Z161_HUMAN
RPKKTPTT

SEQ ID NO: 19569 - protein, 8 aa, Homo sapiens
  ( 163 )...( 170 ): >Z161_HUMAN
VKKPSKPV

SEQ ID NO: 19570 - protein, 8 aa, Homo sapiens
  ( 367 )...( 374 ): >Z161_HUMAN
EAVKARKK

SEQ ID NO: 19571 - protein, 8 aa, Homo sapiens
  ( 368 )...( 375 ): >Z161_HUMAN
AVKARKKE

SEQ ID NO: 19572 - protein, 8 aa, Homo sapiens
  ( 369 )...( 376 ): >Z161_HUMAN
VKARKKEA

SEQ ID NO: 19573 - protein, 8 aa, Homo sapiens
  ( 370 )...( 377 ): >Z161_HUMAN
KARKKEAA

SEQ ID NO: 19574 - protein, 8 aa, Homo sapiens
  ( 153 )...( 160 ): >Z189_HUMAN
CGKGFVRK

SEQ ID NO: 19575 - protein, 8 aa, Homo sapiens
  ( 154 )...( 161 ): >Z189_HUMAN
GKGFVRKA

SEQ ID NO: 19576 - protein, 8 aa, Homo sapiens
  ( 155 )...( 162 ): >Z189_HUMAN
KGFVRKAH

SEQ ID NO: 19577 - protein, 8 aa, Homo sapiens
  ( 334 )...( 341 ): >Z198_HUMAN
CKKPLQKG

SEQ ID NO: 19578 - protein, 8 aa, Homo sapiens
  ( 335 )...( 342 ): >Z198_HUMAN
KKPLQKGQ

SEQ ID NO: 19579 - protein, 8 aa, Homo sapiens
  ( 417 )...( 424 ): >Z198_HUMAN
KGALNKSR

SEQ ID NO: 19580 - protein, 8 aa, Homo sapiens
  ( 846 )...( 853 ): >Z198_HUMAN
KNKAVLCK

SEQ ID NO: 19581 - protein, 8 aa, Homo sapiens
  ( 1047 )...( 1054 ): >Z198_HUMAN
KRKAVSGY

SEQ ID NO: 19582 - protein, 8 aa, Homo sapiens
  ( 1275 )...( 1282 ): >Z198_HUMAN
KITTGKRK

SEQ ID NO: 19583 - protein, 8 aa, Homo sapiens
  ( 332 )...( 339 ): >Z211_HUMAN
RVHTGKRP

SEQ ID NO: 19584 - protein, 8 aa, Homo sapiens
  ( 165 )...( 172 ): >Z212_HUMAN
GQGLKLKK

SEQ ID NO: 19585 - protein, 8 aa, Homo sapiens
  ( 221 )...( 228 ): >Z212_HUMAN
LKPQTKKA

SEQ ID NO: 19586 - protein, 8 aa, Homo sapiens
  ( 222 )...( 229 ): >Z212_HUMAN
KPQTKKAK

SEQ ID NO: 19587 - protein, 8 aa, Homo sapiens
  ( 223 )...( 230 ): >Z212_HUMAN
PQTKKAKL

SEQ ID NO: 19588 - protein, 8 aa, Homo sapiens
  ( 283 )...( 290 ): >Z212_HUMAN
RKSRSSLI

SEQ ID NO: 19589 - protein, 8 aa, Homo sapiens
  ( 168 )...( 175 ): >Z214_HUMAN
RLGISRKN

SEQ ID NO: 19590 - protein, 8 aa, Homo sapiens
  ( 150 )...( 157 ): >Z215_HUMAN
KMKAGSRT

SEQ ID NO: 19591 - protein, 8 aa, Homo sapiens
  ( 181 )...( 188 ): >Z217_HUMAN
KSGARSKL

SEQ ID NO: 19592 - protein, 8 aa, Homo sapiens
  ( 279 )...( 286 ): >Z217_HUMAN
TGKKPVRC

SEQ ID NO: 19593 - protein, 8 aa, Homo sapiens
  ( 280 )...( 287 ): >Z217_HUMAN
GKKPVRCI

SEQ ID NO: 19594 - protein, 8 aa, Homo sapiens
  ( 625 )...( 632 ): >Z217_HUMAN
LLKKRSAV

SEQ ID NO: 19595 - protein, 8 aa, Homo sapiens
  ( 916 )...( 923 ): >Z217_HUMAN
LPKRLKSS

SEQ ID NO: 19596 - protein, 8 aa, Homo sapiens
  ( 917 )...( 924 ): >Z217_HUMAN
PKRLKSSV

SEQ ID NO: 19597 - protein, 8 aa, Homo sapiens
  ( 918 )...( 925 ): >Z217_HUMAN
KRLKSSVV

SEQ ID NO: 19598 - protein, 8 aa, Homo sapiens
  ( 169 )...( 176 ): >Z219_HUMAN
KGKFRTSA

SEQ ID NO: 19599 - protein, 8 aa, Homo sapiens
  ( 89 )...( 96 ): >Z221_HUMAN
KMKTTSQR

SEQ ID NO: 19600 - protein, 8 aa, Homo sapiens
  ( 254 )...( 261 ): >Z221_HUMAN
FKRGQCGK

SEQ ID NO: 19601 - protein, 8 aa, Homo sapiens
  ( 315 )...( 322 ): >Z221_HUMAN
CGKSFRVR

SEQ ID NO: 19602 - protein, 8 aa, Homo sapiens
  ( 316 )...( 323 ): >Z221_HUMAN
GKSFRVRS

SEQ ID NO: 19603 - protein, 8 aa, Homo sapiens
  ( 211 )...( 218 ): >Z222_HUMAN
RCRSALKV

SEQ ID NO: 19604 - protein, 8 aa, Homo sapiens
  ( 403 )...( 410 ): >Z222_HUMAN
GKRLVCRS

SEQ ID NO: 19605 - protein, 8 aa, Homo sapiens
  ( 433 )...( 440 ): >Z223_HUMAN
CGKKLVYR

SEQ ID NO: 19606 - protein, 8 aa, Homo sapiens
  ( 434 )...( 441 ): >Z223_HUMAN
GKKLVYRS

SEQ ID NO: 19607 - protein, 8 aa, Homo sapiens
  ( 238 )...( 245 ): >Z224_HUMAN
GKGFSRRS

SEQ ID NO: 19608 - protein, 8 aa, Homo sapiens
  ( 239 )...( 246 ): >Z224_HUMAN
KGFSRRSA

SEQ ID NO: 19609 - protein, 8 aa, Homo sapiens
  ( 238 )...( 245 ): >Z225_HUMAN
GKGFSRRS

SEQ ID NO: 19610 - protein, 8 aa, Homo sapiens
  ( 239 )...( 246 ): >Z225_HUMAN
KGFSRRSG

SEQ ID NO: 19611 - protein, 8 aa, Homo sapiens
  ( 251 )...( 258 ): >Z225_HUMAN
RKLHTGVK

SEQ ID NO: 19612 - protein, 8 aa, Homo sapiens
  ( 531 )...( 538 ): >Z225_HUMAN
RRVHTGVK

SEQ ID NO: 19613 - protein, 8 aa, Homo sapiens
  ( 341 )...( 348 ): >Z226_HUMAN
GKGFSRRS

SEQ ID NO: 19614 - protein, 8 aa, Homo sapiens
  ( 342 )...( 349 ): >Z226_HUMAN
KGFSRRSA

SEQ ID NO: 19615 - protein, 8 aa, Homo sapiens
  ( 593 )...( 600 ): >Z226_HUMAN
GKGFSRRA

SEQ ID NO: 19616 - protein, 8 aa, Homo sapiens
  ( 783 )...( 790 ): >Z226_HUMAN
YKSNRGGK

SEQ ID NO: 19617 - protein, 8 aa, Homo sapiens
  ( 768 )...( 775 ): >Z228_HUMAN
RRVHTGGK

SEQ ID NO: 19618 - protein, 8 aa, Homo sapiens
  ( 355 )...( 362 ): >Z229_HUMAN
GKGFRYKS

SEQ ID NO: 19619 - protein, 8 aa, Homo sapiens
  ( 425 )...( 432 ): >Z230_HUMAN
CGKRLVHR

SEQ ID NO: 19620 - protein, 8 aa, Homo sapiens
  ( 426 )...( 433 ): >Z230_HUMAN
GKRLVHRS

SEQ ID NO: 19621 - protein, 8 aa, Homo sapiens
  ( 68 )...( 75 ): >Z234_HUMAN
MKTATQRK

SEQ ID NO: 19622 - protein, 8 aa, Homo sapiens
  ( 69 )...( 76 ): >Z234_HUMAN
KTATQRKG

SEQ ID NO: 19623 - protein, 8 aa, Homo sapiens
  ( 70 )...( 77 ): >Z234_HUMAN
TATQRKGK

SEQ ID NO: 19624 - protein, 8 aa, Homo sapiens
  ( 71 )...( 78 ): >Z234_HUMAN
ATQRKGKS

SEQ ID NO: 19625 - protein, 8 aa, Homo sapiens
  ( 72 )...( 79 ): >Z234_HUMAN
TQRKGKSA

SEQ ID NO: 19626 - protein, 8 aa, Homo sapiens
  ( 238 )...( 245 ): >Z234_HUMAN
GKGFSRRS

SEQ ID NO: 19627 - protein, 8 aa, Homo sapiens
  ( 239 )...( 246 ): >Z234_HUMAN
KGFSRRST

SEQ ID NO: 19628 - protein, 8 aa, Homo sapiens
  ( 406 )...( 413 ): >Z234_HUMAN
GKSFRMKI

SEQ ID NO: 19629 - protein, 8 aa, Homo sapiens
  ( 100 )...( 107 ): >Z236_HUMAN
KKFSRVAS

SEQ ID NO: 19630 - protein, 8 aa, Homo sapiens
  ( 177 )...( 184 ): >Z236_HUMAN
KIRVSSTR

SEQ ID NO: 19631 - protein, 8 aa, Homo sapiens
  ( 602 )...( 609 ): >Z236_HUMAN
KPAKVRVG

SEQ ID NO: 19632 - protein, 8 aa, Homo sapiens
  ( 603 )...( 610 ): >Z236_HUMAN
PAKVRVGK

SEQ ID NO: 19633 - protein, 8 aa, Homo sapiens
  ( 605 )...( 612 ): >Z236_HUMAN
KVRVGKTN

SEQ ID NO: 19634 - protein, 8 aa, Homo sapiens
  ( 110 )...( 117 ): >Z253_HUMAN
LQLKKGCK

SEQ ID NO: 19635 - protein, 8 aa, Homo sapiens
  ( 111 )...( 118 ): >Z253_HUMAN
QLKKGCKS

SEQ ID NO: 19636 - protein, 8 aa, Homo sapiens
  ( 112 )...( 119 ): >Z253_HUMAN
LKKGCKSV

SEQ ID NO: 19637 - protein, 8 aa, Homo sapiens
  ( 176 )...( 183 ): >Z253_HUMAN
ICGKAFKR

SEQ ID NO: 19638 - protein, 8 aa, Homo sapiens
  ( 179 )...( 186 ): >Z253_HUMAN
KAFKRSST

SEQ ID NO: 19639 - protein, 8 aa, Homo sapiens
  ( 120 )...( 127 ): >Z254_HUMAN
LQLRKGCK

SEQ ID NO: 19640 - protein, 8 aa, Homo sapiens
  ( 121 )...( 128 ): >Z254_HUMAN
QLRKGCKS

SEQ ID NO: 19641 - protein, 8 aa, Homo sapiens
  ( 122 )...( 129 ): >Z254_HUMAN
LRKGCKSV

SEQ ID NO: 19642 - protein, 8 aa, Homo sapiens
  ( 154 )...( 161 ): >Z255_HUMAN
GKGFSRRS

SEQ ID NO: 19643 - protein, 8 aa, Homo sapiens
  ( 155 )...( 162 ): >Z255_HUMAN
KGFSRRSA

SEQ ID NO: 19644 - protein, 8 aa, Homo sapiens
  ( 34 )...( 41 ): >Z256_HUMAN
QAAHTRKK

SEQ ID NO: 19645 - protein, 8 aa, Homo sapiens
  ( 133 )...( 140 ): >Z256_HUMAN
RRIHTGVR

SEQ ID NO: 19646 - protein, 8 aa, Homo sapiens
  ( 111 )...( 118 ): >Z257_HUMAN
LQLRKGCK

SEQ ID NO: 19647 - protein, 8 aa, Homo sapiens
  ( 112 )...( 119 ): >Z257_HUMAN
QLRKGCKS

SEQ ID NO: 19648 - protein, 8 aa, Homo sapiens
  ( 113 )...( 120 ): >Z257_HUMAN
LRKGCKSV

SEQ ID NO: 19649 - protein, 8 aa, Homo sapiens
  ( 348 )...( 355 ): >Z264_HUMAN
CGKVFKHR

SEQ ID NO: 19650 - protein, 8 aa, Homo sapiens
  ( 496 )...( 503 ): >Z264_HUMAN
SGLTRHKR

SEQ ID NO: 19651 - protein, 8 aa, Homo sapiens
  ( 497 )...( 504 ): >Z264_HUMAN
GLTRHKRI

SEQ ID NO: 19652 - protein, 8 aa, Homo sapiens
  ( 97 )...( 104 ): >Z267_HUMAN
KVISRRHG

SEQ ID NO: 19653 - protein, 8 aa, Homo sapiens
  ( 47 )...( 54 ): >Z268_HUMAN
GTPRQKQK

SEQ ID NO: 19654 - protein, 8 aa, Homo sapiens
  ( 843 )...( 850 ): >Z268_HUMAN
KSFSGKLR

SEQ ID NO: 19655 - protein, 8 aa, Homo sapiens
  ( 20 )...( 27 ): >Z271_HUMAN
NKTKIGKP

SEQ ID NO: 19656 - protein, 8 aa, Homo sapiens
  ( 21 )...( 28 ): >Z271_HUMAN
KTKIGKPA

SEQ ID NO: 19657 - protein, 8 aa, Homo sapiens
  ( 50 )...( 57 ): >Z271_HUMAN
FSRILKAK

SEQ ID NO: 19658 - protein, 8 aa, Homo sapiens
  ( 51 )...( 58 ): >Z271_HUMAN
SRILKAKN

SEQ ID NO: 19659 - protein, 8 aa, Homo sapiens
  ( 52 )...( 59 ): >Z271_HUMAN
RILKAKNS

SEQ ID NO: 19660 - protein, 8 aa, Homo sapiens
  ( 10 )...( 17 ): >Z272_HUMAN
GKAFSIRK

SEQ ID NO: 19661 - protein, 8 aa, Homo sapiens
  ( 87 )...( 94 ): >Z273_HUMAN
GKAFKRST

SEQ ID NO: 19662 - protein, 8 aa, Homo sapiens
  ( 88 )...( 95 ): >Z273_HUMAN
KAFKRSTT

SEQ ID NO: 19663 - protein, 8 aa, Homo sapiens
  ( 90 )...( 97 ): >Z273_HUMAN
FKRSTTLK

SEQ ID NO: 19664 - protein, 8 aa, Homo sapiens
  ( 327 )...( 334 ): >Z275_HUMAN
CGKLFRRS

SEQ ID NO: 19665 - protein, 8 aa, Homo sapiens
  ( 397 )...( 404 ): >Z275_HUMAN
RRIHSGLK

SEQ ID NO: 19666 - protein, 8 aa, Homo sapiens
  ( 412 )...( 419 ): >Z275_HUMAN
GKAFRRSS

SEQ ID NO: 19667 - protein, 8 aa, Homo sapiens
  ( 413 )...( 420 ): >Z275_HUMAN
KAFRRSSG

SEQ ID NO: 19668 - protein, 8 aa, Homo sapiens
  ( 457 )...( 464 ): >Z286_HUMAN
QRIHIGKK

SEQ ID NO: 19669 - protein, 8 aa, Homo sapiens
  ( 458 )...( 465 ): >Z286_HUMAN
RIHIGKKP

SEQ ID NO: 19670 - protein, 8 aa, Homo sapiens
  ( 272 )...( 279 ): >Z287_HUMAN
RGKGGFWK

SEQ ID NO: 19671 - protein, 8 aa, Homo sapiens
  ( 877 )...( 884 ): >Z292_HUMAN
RKKVAPPL

SEQ ID NO: 19672 - protein, 8 aa, Homo sapiens
  ( 1228 )...( 1235 ): >Z292_HUMAN
LKIKRPYG

SEQ ID NO: 19673 - protein, 8 aa, Homo sapiens
  ( 1246 )...( 1253 ): >Z292_HUMAN
SRSTQVKK

SEQ ID NO: 19674 - protein, 8 aa, Homo sapiens
  ( 1247 )...( 1254 ): >Z292_HUMAN
RSTQVKKQ

SEQ ID NO: 19675 - protein, 8 aa, Homo sapiens
  ( 1321 )...( 1328 ): >Z292_HUMAN
TQTKGRKI

SEQ ID NO: 19676 - protein, 8 aa, Homo sapiens
  ( 1573 )...( 1580 ): >Z292_HUMAN
GIKMPKTK

SEQ ID NO: 19677 - protein, 8 aa, Homo sapiens
  ( 1604 )...( 1611 ): >Z292_HUMAN
SLKRGKHV

SEQ ID NO: 19678 - protein, 8 aa, Homo sapiens
  ( 1772 )...( 1779 ): >Z292_HUMAN
KASNLKRV

SEQ ID NO: 19679 - protein, 8 aa, Homo sapiens
  ( 1848 )...( 1855 ): >Z292_HUMAN
SAVKQKKN

SEQ ID NO: 19680 - protein, 8 aa, Homo sapiens
  ( 1849 )...( 1856 ): >Z292_HUMAN
AVKQKKNT

SEQ ID NO: 19681 - protein, 8 aa, Homo sapiens
  ( 128 )...( 135 ): >Z295_HUMAN
TCPNRKKV

SEQ ID NO: 19682 - protein, 8 aa, Homo sapiens
  ( 335 )...( 342 ): >Z295_HUMAN
LVKSLLRR

SEQ ID NO: 19683 - protein, 8 aa, Homo sapiens
  ( 336 )...( 343 ): >Z295_HUMAN
VKSLLRRS

SEQ ID NO: 19684 - protein, 8 aa, Homo sapiens
  ( 337 )...( 344 ): >Z295_HUMAN
KSLLRRSL

SEQ ID NO: 19685 - protein, 8 aa, Homo sapiens
  ( 633 )...( 640 ): >Z295_HUMAN
KALIIKLR

SEQ ID NO: 19686 - protein, 8 aa, Homo sapiens
  ( 661 )...( 668 ): >Z295_HUMAN
NLRSRAKG

SEQ ID NO: 19687 - protein, 8 aa, Homo sapiens
  ( 662 )...( 669 ): >Z295_HUMAN
LRSRAKGA

SEQ ID NO: 19688 - protein, 8 aa, Homo sapiens
  ( 663 )...( 670 ): >Z295_HUMAN
RSRAKGAY

SEQ ID NO: 19689 - protein, 8 aa, Homo sapiens
  ( 700 )...( 707 ): >Z295_HUMAN
VNKVAKPK

SEQ ID NO: 19690 - protein, 8 aa, Homo sapiens
  ( 872 )...( 879 ): >Z295_HUMAN
KQLKIQVK

SEQ ID NO: 19691 - protein, 8 aa, Homo sapiens
  ( 110 )...( 117 ): >Z300_HUMAN
KILKGVTR

SEQ ID NO: 19692 - protein, 8 aa, Homo sapiens
  ( 276 )...( 283 ): >Z300_HUMAN
KAFAKKSQ

SEQ ID NO: 19693 - protein, 8 aa, Homo sapiens
  ( 288 )...( 295 ): >Z300_HUMAN
QRIHTGKK

SEQ ID NO: 19694 - protein, 8 aa, Homo sapiens
  ( 289 )...( 296 ): >Z300_HUMAN
RIHTGKKP

SEQ ID NO: 19695 - protein, 8 aa, Homo sapiens
  ( 471 )...( 478 ): >Z300_HUMAN
GKTFSRKS

SEQ ID NO: 19696 - protein, 8 aa, Homo sapiens
  ( 151 )...( 158 ): >Z302_HUMAN
RLGIKMGK

SEQ ID NO: 19697 - protein, 8 aa, Homo sapiens
  ( 230 )...( 237 ): >Z302_HUMAN
ILKKNLSK

SEQ ID NO: 19698 - protein, 8 aa, Homo sapiens
  ( 245 )...( 252 ): >Z302_HUMAN
RINGGKKL

SEQ ID NO: 19699 - protein, 8 aa, Homo sapiens
  ( 578 )...( 585 ): >Z304_HUMAN
KKVHTGAR

SEQ ID NO: 19700 - protein, 8 aa, Homo sapiens
  ( 328 )...( 335 ): >Z306_HUMAN
GLSKHRRI

SEQ ID NO: 19701 - protein, 8 aa, Homo sapiens
  ( 432 )...( 439 ): >Z306_HUMAN
GKAFRRSS

SEQ ID NO: 19702 - protein, 8 aa, Homo sapiens
  ( 309 )...( 316 ): >Z307_HUMAN
RKQKNAIG

SEQ ID NO: 19703 - protein, 8 aa, Homo sapiens
  ( 312 )...( 319 ): >Z307_HUMAN
KNAIGSRR

SEQ ID NO: 19704 - protein, 8 aa, Homo sapiens
  ( 333 )...( 340 ): >Z307_HUMAN
SGLTKHRR

SEQ ID NO: 19705 - protein, 8 aa, Homo sapiens
  ( 334 )...( 341 ): >Z307_HUMAN
GLTKHRRI

SEQ ID NO: 19706 - protein, 8 aa, Homo sapiens
  ( 534 )...( 541 ): >Z307_HUMAN
QRSHVGKK

SEQ ID NO: 19707 - protein, 8 aa, Homo sapiens
  ( 185 )...( 192 ): >Z317_HUMAN
MGRHAGKR

SEQ ID NO: 19708 - protein, 8 aa, Homo sapiens
  ( 186 )...( 193 ): >Z317_HUMAN
GRHAGKRP

SEQ ID NO: 19709 - protein, 8 aa, Homo sapiens
  ( 409 )...( 416 ): >Z317_HUMAN
IRIHIVKK

SEQ ID NO: 19710 - protein, 8 aa, Homo sapiens
  ( 494 )...( 501 ): >Z317_HUMAN
SVHLVKKR

SEQ ID NO: 19711 - protein, 8 aa, Homo sapiens
  ( 495 )...( 502 ): >Z317_HUMAN
VHLVKKRV

SEQ ID NO: 19712 - protein, 8 aa, Homo sapiens
  ( 435 )...( 442 ): >Z319_HUMAN
KAYKRASA

SEQ ID NO: 19713 - protein, 8 aa, Homo sapiens
  ( 438 )...( 445 ): >Z319_HUMAN
KRASALQK

SEQ ID NO: 19714 - protein, 8 aa, Homo sapiens
  ( 273 )...( 280 ): >Z323_HUMAN
GKAFSRRS

SEQ ID NO: 19715 - protein, 8 aa, Homo sapiens
  ( 389 )...( 396 ): >Z323_HUMAN
SKRTLLKK

SEQ ID NO: 19716 - protein, 8 aa, Homo sapiens
  ( 360 )...( 367 ): >Z324_HUMAN
RKIHAGGR

SEQ ID NO: 19717 - protein, 8 aa, Homo sapiens
  ( 508 )...( 515 ): >Z324_HUMAN
TVRRSRAS

SEQ ID NO: 19718 - protein, 8 aa, Homo sapiens
  ( 279 )...( 286 ): >Z325_HUMAN
CKKSKFII

SEQ ID NO: 19719 - protein, 8 aa, Homo sapiens
  ( 149 )...( 156 ): >Z334_HUMAN
VIVAKKSK

SEQ ID NO: 19720 - protein, 8 aa, Homo sapiens
  ( 215 )...( 222 ): >Z334_HUMAN
GKTFFKRA

SEQ ID NO: 19721 - protein, 8 aa, Homo sapiens
  ( 272 )...( 279 ): >Z334_HUMAN
KTFRVKTS

SEQ ID NO: 19722 - protein, 8 aa, Homo sapiens
  ( 275 )...( 282 ): >Z334_HUMAN
RVKTSLTR

SEQ ID NO: 19723 - protein, 8 aa, Homo sapiens
  ( 452 )...( 459 ): >Z334_HUMAN
QITHRGKK

SEQ ID NO: 19724 - protein, 8 aa, Homo sapiens
  ( 550 )...( 557 ): >Z334_HUMAN
GRTYCRKS

SEQ ID NO: 19725 - protein, 8 aa, Homo sapiens
  ( 633 )...( 640 ): >Z334_HUMAN
CGKTYRRL

SEQ ID NO: 19726 - protein, 8 aa, Homo sapiens
  ( 207 )...( 214 ): >Z336_HUMAN
KKKEVVKP

SEQ ID NO: 19727 - protein, 8 aa, Homo sapiens
  ( 217 )...( 224 ): >Z336_HUMAN
PKIRRASG

SEQ ID NO: 19728 - protein, 8 aa, Homo sapiens
  ( 223 )...( 230 ): >Z336_HUMAN
SGRLAGRK

SEQ ID NO: 19729 - protein, 8 aa, Homo sapiens
  ( 691 )...( 698 ): >Z337_HUMAN
KRGYTSKS

SEQ ID NO: 19730 - protein, 8 aa, Homo sapiens
  ( 314 )...( 321 ): >Z338_HUMAN
KRPSSLAK

SEQ ID NO: 19731 - protein, 8 aa, Homo sapiens
  ( 2 )...( 9 ): >Z339_HUMAN
PKVFLVKR

SEQ ID NO: 19732 - protein, 8 aa, Homo sapiens
  ( 6 )...( 13 ): >Z339_HUMAN
LVKRRSLG

SEQ ID NO: 19733 - protein, 8 aa, Homo sapiens
  ( 7 )...( 14 ): >Z339_HUMAN
VKRRSLGV

SEQ ID NO: 19734 - protein, 8 aa, Homo sapiens
  ( 8 )...( 15 ): >Z339_HUMAN
KRRSLGVS

SEQ ID NO: 19735 - protein, 8 aa, Homo sapiens
  ( 96 )...( 103 ): >Z339_HUMAN
TKQRPVAR

SEQ ID NO: 19736 - protein, 8 aa, Homo sapiens
  ( 99 )...( 106 ): >Z339_HUMAN
RPVARSKI

SEQ ID NO: 19737 - protein, 8 aa, Homo sapiens
  ( 100 )...( 107 ): >Z339_HUMAN
PVARSKIK

SEQ ID NO: 19738 - protein, 8 aa, Homo sapiens
  ( 101 )...( 108 ): >Z339_HUMAN
VARSKIKF

SEQ ID NO: 19739 - protein, 8 aa, Homo sapiens
  ( 102 )...( 109 ): >Z339_HUMAN
ARSKIKFT

SEQ ID NO: 19740 - protein, 8 aa, Homo sapiens
  ( 103 )...( 110 ): >Z339_HUMAN
RSKIKFTT

SEQ ID NO: 19741 - protein, 8 aa, Homo sapiens
  ( 243 )...( 250 ): >Z339_HUMAN
LKKTSKKL

SEQ ID NO: 19742 - protein, 8 aa, Homo sapiens
  ( 244 )...( 251 ): >Z339_HUMAN
KKTSKKLA

SEQ ID NO: 19743 - protein, 8 aa, Homo sapiens
  ( 172 )...( 179 ): >Z341_HUMAN
GKQGFKPK

SEQ ID NO: 19744 - protein, 8 aa, Homo sapiens
  ( 173 )...( 180 ): >Z341_HUMAN
KQGFKPKG

SEQ ID NO: 19745 - protein, 8 aa, Homo sapiens
  ( 201 )...( 208 ): >Z341_HUMAN
PATLKTRR

SEQ ID NO: 19746 - protein, 8 aa, Homo sapiens
  ( 202 )...( 209 ): >Z341_HUMAN
ATLKTRRA

SEQ ID NO: 19747 - protein, 8 aa, Homo sapiens
  ( 220 )...( 227 ): >Z341_HUMAN
GKPKAQKL

SEQ ID NO: 19748 - protein, 8 aa, Homo sapiens
  ( 223 )...( 230 ): >Z341_HUMAN
KAQKLKCS

SEQ ID NO: 19749 - protein, 8 aa, Homo sapiens
  ( 279 )...( 286 ): >Z341_HUMAN
AQKSNVKK

SEQ ID NO: 19750 - protein, 8 aa, Homo sapiens
  ( 1 )...( 8 ): >Z342_HUMAN
MSRRKAGS

SEQ ID NO: 19751 - protein, 8 aa, Homo sapiens
  ( 3 )...( 10 ): >Z342_HUMAN
RRKAGSAP

SEQ ID NO: 19752 - protein, 8 aa, Homo sapiens
  ( 4 )...( 11 ): >Z342_HUMAN
RKAGSAPR

SEQ ID NO: 19753 - protein, 8 aa, Homo sapiens
  ( 5 )...( 12 ): >Z342_HUMAN
KAGSAPRR

SEQ ID NO: 19754 - protein, 8 aa, Homo sapiens
  ( 367 )...( 374 ): >Z342_HUMAN
QKASPKKM

SEQ ID NO: 19755 - protein, 8 aa, Homo sapiens
  ( 294 )...( 301 ): >Z347_HUMAN
CGKAFRTR

SEQ ID NO: 19756 - protein, 8 aa, Homo sapiens
  ( 295 )...( 302 ): >Z347_HUMAN
GKAFRTRS

SEQ ID NO: 19757 - protein, 8 aa, Homo sapiens
  ( 379 )...( 386 ): >Z347_HUMAN
GKAFRARS

SEQ ID NO: 19758 - protein, 8 aa, Homo sapiens
  ( 672 )...( 679 ): >Z347_HUMAN
RRVHTGGK

SEQ ID NO: 19759 - protein, 8 aa, Homo sapiens
  ( 34 )...( 41 ): >Z366_HUMAN
SRGKAPQR

SEQ ID NO: 19760 - protein, 8 aa, Homo sapiens
  ( 548 )...( 555 ): >Z366_HUMAN
LTRHMKVK

SEQ ID NO: 19761 - protein, 8 aa, Homo sapiens
  ( 328 )...( 335 ): >Z382_HUMAN
GKAFRQKT

SEQ ID NO: 19762 - protein, 8 aa, Homo sapiens
  ( 329 )...( 336 ): >Z382_HUMAN
KAFRQKTA

SEQ ID NO: 19763 - protein, 8 aa, Homo sapiens
  ( 356 )...( 363 ): >Z382_HUMAN
GKSFRQKA

SEQ ID NO: 19764 - protein, 8 aa, Homo sapiens
  ( 360 )...( 367 ): >Z382_HUMAN
RQKATLTR

SEQ ID NO: 19765 - protein, 8 aa, Homo sapiens
  ( 468 )...( 475 ): >Z382_HUMAN
GKSFRQKA

SEQ ID NO: 19766 - protein, 8 aa, Homo sapiens
  ( 196 )...( 203 ): >Z396_HUMAN
VKSASRQK

SEQ ID NO: 19767 - protein, 8 aa, Homo sapiens
  ( 270 )...( 277 ): >Z396_HUMAN
QRIHSGKK

SEQ ID NO: 19768 - protein, 8 aa, Homo sapiens
  ( 271 )...( 278 ): >Z396_HUMAN
RIHSGKKP

SEQ ID NO: 19769 - protein, 8 aa, Homo sapiens
  ( 321 )...( 328 ): >Z396_HUMAN
TRLKCPRS

SEQ ID NO: 19770 - protein, 8 aa, Homo sapiens
  ( 249 )...( 256 ): >Z397_HUMAN
TNKSLGKR

SEQ ID NO: 19771 - protein, 8 aa, Homo sapiens
  ( 487 )...( 494 ): >Z397_HUMAN
GKTFKRSS

SEQ ID NO: 19772 - protein, 8 aa, Homo sapiens
  ( 488 )...( 495 ): >Z397_HUMAN
KTFKRSSA

SEQ ID NO: 19773 - protein, 8 aa, Homo sapiens
  ( 447 )...( 454 ): >Z409_HUMAN
RNSCKTLK

SEQ ID NO: 19774 - protein, 8 aa, Homo sapiens
  ( 172 )...( 179 ): >ZF36_HUMAN
HKQRGKAI

SEQ ID NO: 19775 - protein, 8 aa, Homo sapiens
  ( 173 )...( 180 ): >ZF36_HUMAN
KQRGKAIS

SEQ ID NO: 19776 - protein, 8 aa, Homo sapiens
  ( 33 )...( 40 ): >ZF64_HUMAN
LDRKGAKK

SEQ ID NO: 19777 - protein, 8 aa, Homo sapiens
  ( 295 )...( 302 ): >ZF64_HUMAN
GKTFSVKR

SEQ ID NO: 19778 - protein, 8 aa, Homo sapiens
  ( 296 )...( 303 ): >ZF64_HUMAN
KTFSVKRT

SEQ ID NO: 19779 - protein, 8 aa, Homo sapiens
  ( 348 )...( 355 ): >ZIM2_HUMAN
RIHTGKKP

SEQ ID NO: 19780 - protein, 8 aa, Homo sapiens
  ( 355 )...( 362 ): >ZIM3_HUMAN
KIHTGKRA

SEQ ID NO: 19781 - protein, 8 aa, Homo sapiens
  ( 424 )...( 431 ): >ZIM3_HUMAN
CGKTFIRK

SEQ ID NO: 19782 - protein, 8 aa, Homo sapiens
  ( 425 )...( 432 ): >ZIM3_HUMAN
GKTFIRKL

SEQ ID NO: 19783 - protein, 8 aa, Homo sapiens
  ( 358 )...( 365 ): >ZN06_HUMAN
TNKVLKQK

SEQ ID NO: 19784 - protein, 8 aa, Homo sapiens
  ( 359 )...( 366 ): >ZN06_HUMAN
NKVLKQKA

SEQ ID NO: 19785 - protein, 8 aa, Homo sapiens
  ( 360 )...( 367 ): >ZN06_HUMAN
KVLKQKAK

SEQ ID NO: 19786 - protein, 8 aa, Homo sapiens
  ( 361 )...( 368 ): >ZN06_HUMAN
VLKQKAKK

SEQ ID NO: 19787 - protein, 8 aa, Homo sapiens
  ( 399 )...( 406 ): >ZN06_HUMAN
TKKFKSRG

SEQ ID NO: 19788 - protein, 8 aa, Homo sapiens
  ( 652 )...( 659 ): >ZN06_HUMAN
KGRKIHQC

SEQ ID NO: 19789 - protein, 8 aa, Homo sapiens
  ( 619 )...( 626 ): >ZN07_HUMAN
STFVSRKK

SEQ ID NO: 19790 - protein, 8 aa, Homo sapiens
  ( 620 )...( 627 ): >ZN07_HUMAN
TFVSRKKV

SEQ ID NO: 19791 - protein, 8 aa, Homo sapiens
  ( 622 )...( 629 ): >ZN07_HUMAN
VSRKKVNT

SEQ ID NO: 19792 - protein, 8 aa, Homo sapiens
  ( 623 )...( 630 ): >ZN07_HUMAN
SRKKVNTI

SEQ ID NO: 19793 - protein, 8 aa, Homo sapiens
  ( 625 )...( 632 ): >ZN07_HUMAN
KKVNTIKK

SEQ ID NO: 19794 - protein, 8 aa, Homo sapiens
  ( 626 )...( 633 ): >ZN07_HUMAN
KVNTIKKL

SEQ ID NO: 19795 - protein, 8 aa, Homo sapiens
  ( 323 )...( 330 ): >ZN08_HUMAN
SLGRHKRT

SEQ ID NO: 19796 - protein, 8 aa, Homo sapiens
  ( 360 )...( 367 ): >ZN10_HUMAN
CGKAFIRK

SEQ ID NO: 19797 - protein, 8 aa, Homo sapiens
  ( 361 )...( 368 ): >ZN10_HUMAN
GKAFIRKN

SEQ ID NO: 19798 - protein, 8 aa, Homo sapiens
  ( 315 )...( 322 ): >ZN16_HUMAN
GKAFRRSS

SEQ ID NO: 19799 - protein, 8 aa, Homo sapiens
  ( 343 )...( 350 ): >ZN16_HUMAN
GKAFRRSS

SEQ ID NO: 19800 - protein, 8 aa, Homo sapiens
  ( 655 )...( 662 ): >ZN16_HUMAN
SQRSKLIK

SEQ ID NO: 19801 - protein, 8 aa, Homo sapiens
  ( 5 )...( 12 ): >ZN18_HUMAN
ICKKAFLR

SEQ ID NO: 19802 - protein, 8 aa, Homo sapiens
  ( 226 )...( 233 ): >ZNFE_HUMAN
VVRKPSVR

SEQ ID NO: 19803 - protein, 8 aa, Homo sapiens
  ( 227 )...( 234 ): >ZNFE_HUMAN
VRKPSVRV

SEQ ID NO: 19804 - protein, 8 aa, Homo sapiens
  ( 228 )...( 235 ): >ZNFE_HUMAN
RKPSVRVL

SEQ ID NO: 19805 - protein, 8 aa, Homo sapiens
  ( 297 )...( 304 ): >ZNFE_HUMAN
QRIHTGKK

SEQ ID NO: 19806 - protein, 8 aa, Homo sapiens
  ( 298 )...( 305 ): >ZNFE_HUMAN
RIHTGKKP

SEQ ID NO: 19807 - protein, 8 aa, Homo sapiens
  ( 185 )...( 192 ): >Q9NY94
HTKVVRRI

SEQ ID NO: 19808 - protein, 8 aa, Homo sapiens
  ( 253 )...( 260 ): >Q9NY94
TQRAKTGK

SEQ ID NO: 19809 - protein, 8 aa, Homo sapiens
  ( 147 )...( 154 ): >Q9HAP2
KNFKGLKL

SEQ ID NO: 19810 - protein, 8 aa, Homo sapiens
  ( 907 )...( 914 ): >Q9HAP2
KAVTRIGK

SEQ ID NO: 19811 - protein, 8 aa, Homo sapiens
  ( 908 )...( 915 ): >Q9HAP2
AVTRIGKR

SEQ ID NO: 19812 - protein, 8 aa, Homo sapiens
  ( 909 )...( 916 ): >Q9HAP2
VTRIGKRL

SEQ ID NO: 19813 - protein, 8 aa, Homo sapiens
  ( 910 )...( 917 ): >Q9HAP2
TRIGKRLG

SEQ ID NO: 19814 - protein, 8 aa, Homo sapiens
  ( 234 )...( 241 ): >Q9NYQ5
RIKSCKIS

SEQ ID NO: 19815 - protein, 8 aa, Homo sapiens
  ( 84 )...( 91 ): >Q96QX4
IKLIRFGK

SEQ ID NO: 19816 - protein, 8 aa, Homo sapiens
  ( 198 )...( 205 ): >Q96QX4
KNKKISLL

SEQ ID NO: 19817 - protein, 8 aa, Homo sapiens
  ( 228 )...( 235 ): >Q96QX4
LPYVKGRK

SEQ ID NO: 19818 - protein, 8 aa, Homo sapiens
  ( 85 )...( 92 ): >Q9UEC8
GPKKKKMT

SEQ ID NO: 19819 - protein, 8 aa, Homo sapiens
  ( 84 )...( 91 ): >Q9NX45
IKLIRFGK

SEQ ID NO: 19820 - protein, 8 aa, Homo sapiens
  ( 198 )...( 205 ): >Q9NX45
KNKKISLL

SEQ ID NO: 19821 - protein, 8 aa, Homo sapiens
  ( 228 )...( 235 ): >Q9NX45
LPYVKGRK

SEQ ID NO: 19822 - protein, 8 aa, Homo sapiens
  ( 271 )...( 278 ): >Q8WYA3
RIKSCKIS

SEQ ID NO: 19823 - protein, 8 aa, Homo sapiens
  ( 149 )...( 156 ): >Q8TAP5
QTLSRRKV

SEQ ID NO: 19824 - protein, 8 aa, Homo sapiens
  ( 175 )...( 182 ): >Q8TAP5
RGRTLNLK

SEQ ID NO: 19825 - protein, 8 aa, Homo sapiens
  ( 3 )...( 10 ): >Q14211
LRKMQTVK

SEQ ID NO: 19826 - protein, 8 aa, Homo sapiens
  ( 327 )...( 334 ): >Q14211
LRIKAKAM

SEQ ID NO: 19827 - protein, 8 aa, Homo sapiens
  ( 328 )...( 335 ): >Q14211
RIKAKAMQ

SEQ ID NO: 19828 - protein, 8 aa, Homo sapiens
  ( 330 )...( 337 ): >Q14211
KAKAMQIK

SEQ ID NO: 19829 - protein, 8 aa, Homo sapiens
  ( 149 )...( 156 ): >Q96K34
QTLSRRKV

SEQ ID NO: 19830 - protein, 8 aa, Homo sapiens
  ( 175 )...( 182 ): >Q96K34
RGRTLNLK

SEQ ID NO: 19831 - protein, 8 aa, Homo sapiens
  ( 565 )...( 572 ): >Q96K34
MAGARKRT

SEQ ID NO: 19832 - protein, 8 aa, Homo sapiens
  ( 566 )...( 573 ): >Q96K34
AGARKRTL

SEQ ID NO: 19833 - protein, 8 aa, Homo sapiens
  ( 567 )...( 574 ): >Q96K34
GARKRTLA

SEQ ID NO: 19834 - protein, 8 aa, Homo sapiens
  ( 568 )...( 575 ): >Q96K34
ARKRTLAQ

SEQ ID NO: 19835 - protein, 8 aa, Homo sapiens
  ( 569 )...( 576 ): >Q96K34
RKRTLAQS

SEQ ID NO: 19836 - protein, 8 aa, Homo sapiens
  ( 588 )...( 595 ): >Q96K34
GVRPPKRS

SEQ ID NO: 19837 - protein, 8 aa, Homo sapiens
  ( 237 )...( 244 ): >Q8WYA1
RIKSCKIS

SEQ ID NO: 19838 - protein, 8 aa, Homo sapiens
  ( 150 )...( 157 ): >Q9UPB1
HRNGLVKK

SEQ ID NO: 19839 - protein, 8 aa, Homo sapiens
  ( 151 )...( 158 ): >Q9UPB1
RNGLVKKG

SEQ ID NO: 19840 - protein, 8 aa, Homo sapiens
  ( 152 )...( 159 ): >Q9UPB1
NGLVKKGK

SEQ ID NO: 19841 - protein, 8 aa, Homo sapiens
  ( 178 )...( 185 ): >Q9UPB1
RGRTMNIK

SEQ ID NO: 19842 - protein, 8 aa, Homo sapiens
  ( 750 )...( 757 ): >Q9UPB1
LSWKRVKG

SEQ ID NO: 19843 - protein, 8 aa, Homo sapiens
  ( 221 )...( 228 ): >Q9NYQ4
RIKSCKIS

SEQ ID NO: 19844 - protein, 8 aa, Homo sapiens
  ( 19 )...( 26 ): >Q9ULI6
CTYAGRKR

SEQ ID NO: 19845 - protein, 8 aa, Homo sapiens
  ( 277 )...( 284 ): >Q9ULI6
LFGQKKKA

SEQ ID NO: 19846 - protein, 8 aa, Homo sapiens
  ( 278 )...( 285 ): >Q9ULI6
FGQKKKAP

SEQ ID NO: 19847 - protein, 8 aa, Homo sapiens
  ( 279 )...( 286 ): >Q9ULI6
GQKKKAPS

SEQ ID NO: 19848 - protein, 8 aa, Homo sapiens
  ( 280 )...( 287 ): >Q9ULI6
QKKKAPSG

SEQ ID NO: 19849 - protein, 8 aa, Homo sapiens
  ( 312 )...( 319 ): >Q9ULI6
KMRSALLR

SEQ ID NO: 19850 - protein, 8 aa, Homo sapiens
  ( 314 )...( 321 ): >Q9ULI6
RSALLRAK

SEQ ID NO: 19851 - protein, 8 aa, Homo sapiens
  ( 65 )...( 72 ): >O43792
DKCKILKK

SEQ ID NO: 19852 - protein, 8 aa, Homo sapiens
  ( 66 )...( 73 ): >O43792
KCKILKKT

SEQ ID NO: 19853 - protein, 8 aa, Homo sapiens
  ( 67 )...( 74 ): >O43792
CKILKKTV

SEQ ID NO: 19854 - protein, 8 aa, Homo sapiens
  ( 771 )...( 778 ): >O43792
VKVKVEKK

SEQ ID NO: 19855 - protein, 8 aa, Homo sapiens
  ( 494 )...( 501 ): >Q8NHD2
SSLARAKR

SEQ ID NO: 19856 - protein, 8 aa, Homo sapiens
  ( 495 )...( 502 ): >Q8NHD2
SLARAKRP

SEQ ID NO: 19857 - protein, 8 aa, Homo sapiens
  ( 496 )...( 503 ): >Q8NHD2
LARAKRPS

SEQ ID NO: 19858 - protein, 8 aa, Homo sapiens
  ( 497 )...( 504 ): >Q8NHD2
ARAKRPSV

SEQ ID NO: 19859 - protein, 8 aa, Homo sapiens
  ( 498 )...( 505 ): >Q8NHD2
RAKRPSVS

SEQ ID NO: 19860 - protein, 8 aa, Homo sapiens
  ( 530 )...( 537 ): >Q8NHD2
PKRLSRGA

SEQ ID NO: 19861 - protein, 8 aa, Homo sapiens
  ( 531 )...( 538 ): >Q8NHD2
KRLSRGAQ

SEQ ID NO: 19862 - protein, 8 aa, Homo sapiens
  ( 636 )...( 643 ): >Q8NHD2
AKVKRAIP

SEQ ID NO: 19863 - protein, 8 aa, Homo sapiens
  ( 638 )...( 645 ): >Q8NHD2
VKRAIPKP

SEQ ID NO: 19864 - protein, 8 aa, Homo sapiens
  ( 648 )...( 655 ): >Q8NHD2
QALNRKKG

SEQ ID NO: 19865 - protein, 8 aa, Homo sapiens
  ( 649 )...( 656 ): >Q8NHD2
ALNRKKGS

SEQ ID NO: 19866 - protein, 8 aa, Homo sapiens
  ( 650 )...( 657 ): >Q8NHD2
LNRKKGSP

SEQ ID NO: 19867 - protein, 8 aa, Homo sapiens
  ( 652 )...( 659 ): >Q8NHD2
RKKGSPGL

SEQ ID NO: 19868 - protein, 8 aa, Homo sapiens
  ( 45 )...( 52 ): >Q8NAM2
SQILARKR

SEQ ID NO: 19869 - protein, 8 aa, Homo sapiens
  ( 514 )...( 521 ): >O94945
KAVTRIGK

SEQ ID NO: 19870 - protein, 8 aa, Homo sapiens
  ( 515 )...( 522 ): >O94945
AVTRIGKR

SEQ ID NO: 19871 - protein, 8 aa, Homo sapiens
  ( 516 )...( 523 ): >O94945
VTRIGKRL

SEQ ID NO: 19872 - protein, 8 aa, Homo sapiens
  ( 517 )...( 524 ): >O94945
TRIGKRLG

SEQ ID NO: 19873 - protein, 8 aa, Homo sapiens
  ( 167 )...( 174 ): >O43372
VTVKKRQS

SEQ ID NO: 19874 - protein, 8 aa, Homo sapiens
  ( 168 )...( 175 ): >O43372
TVKKRQSL

SEQ ID NO: 19875 - protein, 8 aa, Homo sapiens
  ( 169 )...( 176 ): >O43372
VKKRQSLS

SEQ ID NO: 19876 - protein, 8 aa, Homo sapiens
  ( 170 )...( 177 ): >O43372
KKRQSLST

SEQ ID NO: 19877 - protein, 8 aa, Homo sapiens
  ( 147 )...( 154 ): >Q9Y2N7
QTLSRRKV

SEQ ID NO: 19878 - protein, 8 aa, Homo sapiens
  ( 173 )...( 180 ): >Q9Y2N7
RGRTLNLK

SEQ ID NO: 19879 - protein, 8 aa, Homo sapiens
  ( 563 )...( 570 ): >Q9Y2N7
MAGARKRT

SEQ ID NO: 19880 - protein, 8 aa, Homo sapiens
  ( 564 )...( 571 ): >Q9Y2N7
AGARKRTL

SEQ ID NO: 19881 - protein, 8 aa, Homo sapiens
  ( 565 )...( 572 ): >Q9Y2N7
GARKRTLA

SEQ ID NO: 19882 - protein, 8 aa, Homo sapiens
  ( 566 )...( 573 ): >Q9Y2N7
ARKRTLAQ

SEQ ID NO: 19883 - protein, 8 aa, Homo sapiens
  ( 567 )...( 574 ): >Q9Y2N7
RKRTLAQS

SEQ ID NO: 19884 - protein, 8 aa, Homo sapiens
  ( 586 )...( 593 ): >Q9Y2N7
GVRPPKRS

SEQ ID NO: 19885 - protein, 8 aa, Homo sapiens
  ( 65 )...( 72 ): >O43793
DKCKILKK

SEQ ID NO: 19886 - protein, 8 aa, Homo sapiens
  ( 66 )...( 73 ): >O43793
KCKILKKT

SEQ ID NO: 19887 - protein, 8 aa, Homo sapiens
  ( 67 )...( 74 ): >O43793
CKILKKTV

SEQ ID NO: 19888 - protein, 8 aa, Homo sapiens
  ( 771 )...( 778 ): >O43793
VKVKVEKK

SEQ ID NO: 19889 - protein, 8 aa, Homo sapiens
  ( 35 )...( 42 ): >Q9HCC6
RKSSKPVM

SEQ ID NO: 19890 - protein, 8 aa, Homo sapiens
  ( 200 )...( 207 ): >Q9NS70
RIKSCKIS

SEQ ID NO: 19891 - protein, 8 aa, Homo sapiens
  ( 94 )...( 101 ): >Q8N416
RAVSRGAK

SEQ ID NO: 19892 - protein, 8 aa, Homo sapiens
  ( 105 )...( 112 ): >Q8N416
TVQRIKKT

SEQ ID NO: 19893 - protein, 8 aa, Homo sapiens
  ( 69 )...( 76 ): >Q8NI33
ASKSLRQK

SEQ ID NO: 19894 - protein, 8 aa, Homo sapiens
  ( 71 )...( 78 ): >Q8NI33
KSLRQKPG

SEQ ID NO: 19895 - protein, 8 aa, Homo sapiens
  ( 234 )...( 241 ): >Q8NI33
KGAERKIR

SEQ ID NO: 19896 - protein, 8 aa, Homo sapiens
  ( 249 )...( 256 ): >Q8NI33
KRKVSDVK

SEQ ID NO: 19897 - protein, 8 aa, Homo sapiens
  ( 381 )...( 388 ): >Q8NI33
KIGKIFKK

SEQ ID NO: 19898 - protein, 8 aa, Homo sapiens
  ( 382 )...( 389 ): >Q8NI33
IGKIFKKC

SEQ ID NO: 19899 - protein, 8 aa, Homo sapiens
  ( 383 )...( 390 ): >Q8NI33
GKIFKKCK

SEQ ID NO: 19900 - protein, 8 aa, Homo sapiens
  ( 385 )...( 392 ): >Q8NI33
IFKKCKKG

SEQ ID NO: 19901 - protein, 8 aa, Homo sapiens
  ( 386 )...( 393 ): >Q8NI33
FKKCKKGI

SEQ ID NO: 19902 - protein, 8 aa, Homo sapiens
  ( 387 )...( 394 ): >Q8NI33
KKCKKGIL

SEQ ID NO: 19903 - protein, 8 aa, Homo sapiens
  ( 388 )...( 395 ): >Q8NI33
KCKKGILV

SEQ ID NO: 19904 - protein, 8 aa, Homo sapiens
  ( 154 )...( 161 ): >Q9Y4E9
KPLILSRK

SEQ ID NO: 19905 - protein, 8 aa, Homo sapiens
  ( 155 )...( 162 ): >Q9Y4E9
PLILSRKK

SEQ ID NO: 19906 - protein, 8 aa, Homo sapiens
  ( 283 )...( 290 ): >Q9Y4E9
KGRISSRG

SEQ ID NO: 19907 - protein, 8 aa, Homo sapiens
  ( 81 )...( 88 ): >Q9UMQ5
APPQKKIK

SEQ ID NO: 19908 - protein, 8 aa, Homo sapiens
  ( 103 )...( 110 ): >Q9UMQ5
KAKSLSPR

SEQ ID NO: 19909 - protein, 8 aa, Homo sapiens
  ( 155 )...( 162 ): >Q9UMQ5
AKVVILKK

SEQ ID NO: 19910 - protein, 8 aa, Homo sapiens
  ( 156 )...( 163 ): >Q9UMQ5
KVVILKKA

SEQ ID NO: 19911 - protein, 8 aa, Homo sapiens
  ( 183 )...( 190 ): >Q16509
HTKVVRRI

SEQ ID NO: 19912 - protein, 8 aa, Homo sapiens
  ( 251 )...( 258 ): >Q16509
TQRAKTGK

SEQ ID NO: 19913 - protein, 8 aa, Homo sapiens
  ( 45 )...( 52 ): >Q96PR6
SQILARKR

SEQ ID NO: 19914 - protein, 8 aa, Homo sapiens
  ( 412 )...( 419 ): >Q8NEV2
LVKAKIYK

SEQ ID NO: 19915 - protein, 8 aa, Homo sapiens
  ( 529 )...( 536 ): >Q8NEV2
CMRKITLR

SEQ ID NO: 19916 - protein, 8 aa, Homo sapiens
  ( 530 )...( 537 ): >Q8NEV2
MRKITLRS

SEQ ID NO: 19917 - protein, 8 aa, Homo sapiens
  ( 601 )...( 608 ): >Q8NEV2
RAQKKAQI

SEQ ID NO: 19918 - protein, 8 aa, Homo sapiens
  ( 248 )...( 255 ): >Q8WYA2
RIKSCKIS

SEQ ID NO: 19919 - protein, 8 aa, Homo sapiens
  ( 116 )...( 123 ): >Q8N8Q0
PSVRKLSK

SEQ ID NO: 19920 - protein, 8 aa, Homo sapiens
  ( 117 )...( 124 ): >Q8N8Q0
SVRKLSKI

SEQ ID NO: 19921 - protein, 8 aa, Homo sapiens
  ( 118 )...( 125 ): >Q8N8Q0
VRKLSKIA

SEQ ID NO: 19922 - protein, 8 aa, Homo sapiens
  ( 119 )...( 126 ): >Q8N8Q0
RKLSKIAT

SEQ ID NO: 19923 - protein, 8 aa, Homo sapiens
  ( 135 )...( 142 ): >Q8WX40
AVSCKGRR

SEQ ID NO: 19924 - protein, 8 aa, Homo sapiens
  ( 236 )...( 243 ): >Q9BY81
RMKSTLTK

SEQ ID NO: 19925 - protein, 8 aa, Homo sapiens
  ( 237 )...( 244 ): >Q9BY81
MKSTLTKR

SEQ ID NO: 19926 - protein, 8 aa, Homo sapiens
  ( 238 )...( 245 ): >Q9BY81
KSTLTKRG

SEQ ID NO: 19927 - protein, 8 aa, Homo sapiens
  ( 242 )...( 249 ): >Q9BY81
TKRGVHIK

SEQ ID NO: 19928 - protein, 8 aa, Homo sapiens
  ( 243 )...( 250 ): >Q9BY81
KRGVHIKS

SEQ ID NO: 19929 - protein, 8 aa, Homo sapiens
  ( 275 )...( 282 ): >Q8NFJ8
PSVRKLSK

SEQ ID NO: 19930 - protein, 8 aa, Homo sapiens
  ( 276 )...( 283 ): >Q8NFJ8
SVRKLSKI

SEQ ID NO: 19931 - protein, 8 aa, Homo sapiens
  ( 277 )...( 284 ): >Q8NFJ8
VRKLSKIA

SEQ ID NO: 19932 - protein, 8 aa, Homo sapiens
  ( 278 )...( 285 ): >Q8NFJ8
RKLSKIAT

SEQ ID NO: 19933 - protein, 8 aa, Homo sapiens
  ( 176 )...( 183 ): >Q9UQC6
ILRSGKRP

SEQ ID NO: 19934 - protein, 8 aa, Homo sapiens
  ( 92 )...( 99 ): >Q9BRJ9
KLRMRTLA

SEQ ID NO: 19935 - protein, 8 aa, Homo sapiens
  ( 34 )...( 41 ): >Q96FL2
RKGSVVSR

SEQ ID NO: 19936 - protein, 8 aa, Homo sapiens
  ( 51 )...( 58 ): >Q14959
APPQKKIK

SEQ ID NO: 19937 - protein, 8 aa, Homo sapiens
  ( 73 )...( 80 ): >Q14959
KAKSLSPR

SEQ ID NO: 19938 - protein, 8 aa, Homo sapiens
  ( 124 )...( 131 ): >Q14959
AKVVILKK

SEQ ID NO: 19939 - protein, 8 aa, Homo sapiens
  ( 125 )...( 132 ): >Q14959
KVVILKKA

SEQ ID NO: 19940 - protein, 8 aa, Homo sapiens
  ( 72 )...( 79 ): >Q9HCA4
VCKRKSVS

SEQ ID NO: 19941 - protein, 8 aa, Homo sapiens
  ( 73 )...( 80 ): >Q9HCA4
CKRKSVSV

SEQ ID NO: 19942 - protein, 8 aa, Homo sapiens
  ( 200 )...( 207 ): >Q96J63
RIKSCKIS

SEQ ID NO: 19943 - protein, 8 aa, Homo sapiens
  ( 251 )...( 258 ): >Q9H2M4
RIKSCKIS

SEQ ID NO: 19944 - protein, 8 aa, Homo sapiens
  ( 65 )...( 72 ): >Q96E53
KAKAHIKK

SEQ ID NO: 19945 - protein, 8 aa, Homo sapiens
  ( 3 )...( 10 ): >Q15355
FAMTLKKK

SEQ ID NO: 19946 - protein, 8 aa, Homo sapiens
  ( 4 )...( 11 ): >Q15355
AMTLKKKL

SEQ ID NO: 19947 - protein, 8 aa, Homo sapiens
  ( 32 )...( 39 ): >Q15355
AVKTPPRR

SEQ ID NO: 19948 - protein, 8 aa, Homo sapiens
  ( 115 )...( 122 ): >Q15355
QKKMLGQK

SEQ ID NO: 19949 - protein, 8 aa, Homo sapiens
  ( 116 )...( 123 ): >Q15355
KKMLGQKA

SEQ ID NO: 19950 - protein, 8 aa, Homo sapiens
  ( 720 )...( 727 ): >Q15355
SAKSLRGR

SEQ ID NO: 19951 - protein, 8 aa, Homo sapiens
  ( 76 )...( 83 ): >Q9H7H9
SGSFRRAK

SEQ ID NO: 19952 - protein, 8 aa, Homo sapiens
  ( 77 )...( 84 ): >Q9H7H9
GSFRRAKL

SEQ ID NO: 19953 - protein, 8 aa, Homo sapiens
  ( 107 )...( 114 ): >Q9H7H9
LSLLKRAK

SEQ ID NO: 19954 - protein, 8 aa, Homo sapiens
  ( 108 )...( 115 ): >Q9H7H9
SLLKRAKV

SEQ ID NO: 19955 - protein, 8 aa, Homo sapiens
  ( 109 )...( 116 ): >Q9H7H9
LLKRAKVH

SEQ ID NO: 19956 - protein, 8 aa, Homo sapiens
  ( 110 )...( 117 ): >Q9H7H9
LKRAKVHI

SEQ ID NO: 19957 - protein, 8 aa, Homo sapiens
  ( 150 )...( 157 ): >Q96PT9
HRNGLVKK

SEQ ID NO: 19958 - protein, 8 aa, Homo sapiens
  ( 151 )...( 158 ): >Q96PT9
RNGLVKKG

SEQ ID NO: 19959 - protein, 8 aa, Homo sapiens
  ( 152 )...( 159 ): >Q96PT9
NGLVKKGK

SEQ ID NO: 19960 - protein, 8 aa, Homo sapiens
  ( 178 )...( 185 ): >Q96PT9
RGRTMNIK

SEQ ID NO: 19961 - protein, 8 aa, Homo sapiens
  ( 133 )...( 140 ): >Q8NDY6
PSVRKLSK

SEQ ID NO: 19962 - protein, 8 aa, Homo sapiens
  ( 134 )...( 141 ): >Q8NDY6
SVRKLSKI

SEQ ID NO: 19963 - protein, 8 aa, Homo sapiens
  ( 135 )...( 142 ): >Q8NDY6
VRKLSKIA

SEQ ID NO: 19964 - protein, 8 aa, Homo sapiens
  ( 136 )...( 143 ): >Q8NDY6
RKLSKIAT

SEQ ID NO: 19965 - protein, 8 aa, Homo sapiens
  ( 346 )...( 353 ): >Q9H8R3
RKHLKGPL

SEQ ID NO: 19966 - protein, 8 aa, Homo sapiens
  ( 349 )...( 356 ): >Q9H8R3
LKGPLTRK

SEQ ID NO: 19967 - protein, 8 aa, Homo sapiens
  ( 350 )...( 357 ): >Q9H8R3
KGPLTRKC

SEQ ID NO: 19968 - protein, 8 aa, Homo sapiens
  ( 426 )...( 433 ): >Q9H8R3
VPRRAAKS

SEQ ID NO: 19969 - protein, 8 aa, Homo sapiens
  ( 45 )...( 52 ): >Q9NQ87
KKRRGIIE

SEQ ID NO: 19970 - protein, 8 aa, Homo sapiens
  ( 46 )...( 53 ): >Q9NQ87
KRRGIIEK

SEQ ID NO: 19971 - protein, 8 aa, Homo sapiens
  ( 99 )...( 106 ): >O75321
KACKRKTT

SEQ ID NO: 19972 - protein, 8 aa, Homo sapiens
  ( 100 )...( 107 ): >O75321
ACKRKTTN

SEQ ID NO: 19973 - protein, 8 aa, Homo sapiens
  ( 101 )...( 108 ): >O75321
CKRKTTNA

SEQ ID NO: 19974 - protein, 8 aa, Homo sapiens
  ( 101 )...( 108 ): >Q8TBI7
PKKGGPKK

SEQ ID NO: 19975 - protein, 8 aa, Homo sapiens
  ( 176 )...( 183 ): >Q8TBI7
ILRSGKRP

SEQ ID NO: 19976 - protein, 8 aa, Homo sapiens
  ( 543 )...( 550 ): >Q8WWU4
RGTNLGKK

SEQ ID NO: 19977 - protein, 8 aa, Homo sapiens
  ( 544 )...( 551 ): >Q8WWU4
GTNLGKKK

SEQ ID NO: 19978 - protein, 8 aa, Homo sapiens
  ( 545 )...( 552 ): >Q8WWU4
TNLGKKKQ

SEQ ID NO: 19979 - protein, 8 aa, Homo sapiens
  ( 149 )...( 156 ): >Q8WXA1
QTLSRRKV

SEQ ID NO: 19980 - protein, 8 aa, Homo sapiens
  ( 175 )...( 182 ): >Q8WXA1
RGRTLNLK

SEQ ID NO: 19981 - protein, 8 aa, Homo sapiens
  ( 565 )...( 572 ): >Q8WXA1
MAGARKRT

SEQ ID NO: 19982 - protein, 8 aa, Homo sapiens
  ( 566 )...( 573 ): >Q8WXA1
AGARKRTL

SEQ ID NO: 19983 - protein, 8 aa, Homo sapiens
  ( 567 )...( 574 ): >Q8WXA1
GARKRTLA

SEQ ID NO: 19984 - protein, 8 aa, Homo sapiens
  ( 568 )...( 575 ): >Q8WXA1
ARKRTLAQ

SEQ ID NO: 19985 - protein, 8 aa, Homo sapiens
  ( 569 )...( 576 ): >Q8WXA1
RKRTLAQS

SEQ ID NO: 19986 - protein, 8 aa, Homo sapiens
  ( 588 )...( 595 ): >Q8WXA1
GVRPPKRS

SEQ ID NO: 19987 - protein, 8 aa, Homo sapiens
  ( 7 )...( 14 ): >Q9HAZ3
CTYAGRKR

SEQ ID NO: 19988 - protein, 8 aa, Homo sapiens
  ( 265 )...( 272 ): >Q9HAZ3
LFGQKKKA

SEQ ID NO: 19989 - protein, 8 aa, Homo sapiens
  ( 266 )...( 273 ): >Q9HAZ3
FGQKKKAP

SEQ ID NO: 19990 - protein, 8 aa, Homo sapiens
  ( 267 )...( 274 ): >Q9HAZ3
GQKKKAPS

SEQ ID NO: 19991 - protein, 8 aa, Homo sapiens
  ( 268 )...( 275 ): >Q9HAZ3
QKKKAPSG

SEQ ID NO: 19992 - protein, 8 aa, Homo sapiens
  ( 300 )...( 307 ): >Q9HAZ3
KMRSALLR

SEQ ID NO: 19993 - protein, 8 aa, Homo sapiens
  ( 302 )...( 309 ): >Q9HAZ3
RSALLRAK

SEQ ID NO: 19994 - protein, 8 aa, Homo sapiens
  ( 285 )...( 292 ): >Q8WYA4
RIKSCKIS

SEQ ID NO: 19995 - protein, 8 aa, Homo sapiens
  ( 62 )...( 69 ): >Q9UIG2
SSTPGRRK

SEQ ID NO: 19996 - protein, 8 aa, Homo sapiens
  ( 63 )...( 70 ): >Q9UIG2
STPGRRKP

SEQ ID NO: 19997 - protein, 8 aa, Homo sapiens
  ( 556 )...( 563 ): >Q9UIG2
ISRLSTKK

SEQ ID NO: 19998 - protein, 8 aa, Homo sapiens
  ( 914 )...( 921 ): >Q9UIG2
KKTKSSKL

SEQ ID NO: 19999 - protein, 8 aa, Homo sapiens
  ( 1089 )...( 1096 ): >Q9UIG2
TLICKNKK

SEQ ID NO: 20000 - protein, 8 aa, Homo sapiens
  ( 1219 )...( 1226 ): >Q9UIG2
GKKPSQQK

SEQ ID NO: 20001 - protein, 8 aa, Homo sapiens
  ( 1274 )...( 1281 ): >Q9UIG2
KPKIYLKG

SEQ ID NO: 20002 - protein, 8 aa, Homo sapiens
  ( 1440 )...( 1447 ): >Q9UIG2
SKRKTVIT

SEQ ID NO: 20003 - protein, 8 aa, Homo sapiens
  ( 1548 )...( 1555 ): >Q9UIG2
KVKLMKFS

SEQ ID NO: 20004 - protein, 8 aa, Homo sapiens
  ( 1557 )...( 1564 ): >Q9UIG2
PKKTRSGT

SEQ ID NO: 20005 - protein, 8 aa, Homo sapiens
  ( 1558 )...( 1565 ): >Q9UIG2
KKTRSGTA

SEQ ID NO: 20006 - protein, 8 aa, Homo sapiens
  ( 1570 )...( 1577 ): >Q9UIG2
RKFVTKST

SEQ ID NO: 20007 - protein, 8 aa, Homo sapiens
  ( 1717 )...( 1724 ): >Q9UIG2
TPQRKGLR

SEQ ID NO: 20008 - protein, 8 aa, Homo sapiens
  ( 1719 )...( 1726 ): >Q9UIG2
QRKGLRSS

SEQ ID NO: 20009 - protein, 8 aa, Homo sapiens
  ( 1720 )...( 1727 ): >Q9UIG2
RKGLRSSA

SEQ ID NO: 20010 - protein, 8 aa, Homo sapiens
  ( 2487 )...( 2494 ): >Q9UIG2
ILKKRALL

SEQ ID NO: 20011 - protein, 8 aa, Homo sapiens
  ( 2566 )...( 2573 ): >Q9UIG2
PVASQKRK

SEQ ID NO: 20012 - protein, 8 aa, Homo sapiens
  ( 2584 )...( 2591 ): >Q9UIG2
SKKKKMIS

SEQ ID NO: 20013 - protein, 8 aa, Homo sapiens
  ( 2585 )...( 2592 ): >Q9UIG2
KKKKMIST

SEQ ID NO: 20014 - protein, 8 aa, Homo sapiens
  ( 2670 )...( 2677 ): >Q9UIG2
GLKRVLRS

SEQ ID NO: 20015 - protein, 8 aa, Homo sapiens
  ( 2671 )...( 2678 ): >Q9UIG2
LKRVLRSL

SEQ ID NO: 20016 - protein, 8 aa, Homo sapiens
  ( 2760 )...( 2767 ): >Q9UIG2
VQKLKGFK

SEQ ID NO: 20017 - protein, 8 aa, Homo sapiens
  ( 2761 )...( 2768 ): >Q9UIG2
QKLKGFKA

SEQ ID NO: 20018 - protein, 8 aa, Homo sapiens
  ( 2762 )...( 2769 ): >Q9UIG2
KLKGFKAS

SEQ ID NO: 20019 - protein, 8 aa, Homo sapiens
  ( 2763 )...( 2770 ): >Q9UIG2
LKGFKASR

SEQ ID NO: 20020 - protein, 8 aa, Homo sapiens
  ( 326 )...( 333 ): >Q8WWU3
RGTNLGKK

SEQ ID NO: 20021 - protein, 8 aa, Homo sapiens
  ( 327 )...( 334 ): >Q8WWU3
GTNLGKKK

SEQ ID NO: 20022 - protein, 8 aa, Homo sapiens
  ( 328 )...( 335 ): >Q8WWU3
TNLGKKKQ

SEQ ID NO: 20023 - protein, 8 aa, Homo sapiens
  ( 309 )...( 316 ): >Q8WWU2
RGTNLGKK

SEQ ID NO: 20024 - protein, 8 aa, Homo sapiens
  ( 310 )...( 317 ): >Q8WWU2
GTNLGKKK

SEQ ID NO: 20025 - protein, 8 aa, Homo sapiens
  ( 311 )...( 318 ): >Q8WWU2
TNLGKKKQ

SEQ ID NO: 20026 - protein, 8 aa, Homo sapiens
  ( 96 )...( 103 ): >Q9H323
SVKGAQRR

SEQ ID NO: 20027 - protein, 8 aa, Homo sapiens
  ( 234 )...( 241 ): >Q9H323
RMKSTLTK

SEQ ID NO: 20028 - protein, 8 aa, Homo sapiens
  ( 235 )...( 242 ): >Q9H323
MKSTLTKR

SEQ ID NO: 20029 - protein, 8 aa, Homo sapiens
  ( 236 )...( 243 ): >Q9H323
KSTLTKRG

SEQ ID NO: 20030 - protein, 8 aa, Homo sapiens
  ( 240 )...( 247 ): >Q9H323
TKRGVHIK

SEQ ID NO: 20031 - protein, 8 aa, Homo sapiens
  ( 241 )...( 248 ): >Q9H323
KRGVHIKS

SEQ ID NO: 20032 - protein, 8 aa, Homo sapiens
  ( 121 )...( 128 ): >Q8N2W9
RLPAKTLK

SEQ ID NO: 20033 - protein, 8 aa, Homo sapiens
  ( 287 )...( 294 ): >Q8N2W9
RLKTIGVK

SEQ ID NO: 20034 - protein, 8 aa, Homo sapiens
  ( 250 )...( 257 ): >Q9BY83
RMKSTLTK

SEQ ID NO: 20035 - protein, 8 aa, Homo sapiens
  ( 251 )...( 258 ): >Q9BY83
MKSTLTKR

SEQ ID NO: 20036 - protein, 8 aa, Homo sapiens
  ( 252 )...( 259 ): >Q9BY83
KSTLTKRG

SEQ ID NO: 20037 - protein, 8 aa, Homo sapiens
  ( 256 )...( 263 ): >Q9BY83
TKRGLHVK

SEQ ID NO: 20038 - protein, 8 aa, Homo sapiens
  ( 257 )...( 264 ): >Q9BY83
KRGLHVKA

SEQ ID NO: 20039 - protein, 8 aa, Homo sapiens
  ( 457 )...( 464 ): >Q9BY83
QTQGKRIK

SEQ ID NO: 20040 - protein, 8 aa, Homo sapiens
  ( 458 )...( 465 ): >Q9BY83
TQGKRIKV

SEQ ID NO: 20041 - protein, 8 aa, Homo sapiens
  ( 581 )...( 588 ): >Q9BY83
AGTRLPRK

SEQ ID NO: 20042 - protein, 8 aa, Homo sapiens
  ( 582 )...( 589 ): >Q9BY83
GTRLPRKG

SEQ ID NO: 20043 - protein, 8 aa, Homo sapiens
  ( 44 )...( 51 ): >Q9UBP5
SQIMARKK

SEQ ID NO: 20044 - protein, 8 aa, Homo sapiens
  ( 50 )...( 57 ): >Q9UBP5
KKRRGIIE

SEQ ID NO: 20045 - protein, 8 aa, Homo sapiens
  ( 51 )...( 58 ): >Q9UBP5
KRRGIIEK

SEQ ID NO: 20046 - protein, 8 aa, Homo sapiens
  ( 65 )...( 72 ): >O00150
DKCKILKK

SEQ ID NO: 20047 - protein, 8 aa, Homo sapiens
  ( 66 )...( 73 ): >O00150
KCKILKKT

SEQ ID NO: 20048 - protein, 8 aa, Homo sapiens
  ( 67 )...( 74 ): >O00150
CKILKKTV

SEQ ID NO: 20049 - protein, 8 aa, Homo sapiens
  ( 771 )...( 778 ): >O00150
VKVKVEKK

SEQ ID NO: 20050 - protein, 8 aa, Homo sapiens
  ( 69 )...( 76 ): >Q9NP62
SRILKKSC

SEQ ID NO: 20051 - protein, 8 aa, Homo sapiens
  ( 70 )...( 77 ): >Q9NP62
RILKKSCL

SEQ ID NO: 20052 - protein, 8 aa, Homo sapiens
  ( 167 )...( 174 ): >Q9NP62
RAMKKVNT

SEQ ID NO: 20053 - protein, 8 aa, Homo sapiens
  ( 266 )...( 273 ): >Q9NP62
RKLSSSRT

SEQ ID NO: 20054 - protein, 8 aa, Homo sapiens
  ( 1 )...( 8 ): >Q9UKY1
MASRRKST

SEQ ID NO: 20055 - protein, 8 aa, Homo sapiens
  ( 3 )...( 10 ): >Q9UKY1
SRRKSTTP

SEQ ID NO: 20056 - protein, 8 aa, Homo sapiens
  ( 4 )...( 11 ): >Q9UKY1
RRKSTTPC

SEQ ID NO: 20057 - protein, 8 aa, Homo sapiens
  ( 131 )...( 138 ): >Q9UKY1
FKLTMVKR

SEQ ID NO: 20058 - protein, 8 aa, Homo sapiens
  ( 132 )...( 139 ): >Q9UKY1
KLTMVKRN

SEQ ID NO: 20059 - protein, 8 aa, Homo sapiens
  ( 464 )...( 471 ): >Q9UKY1
SFGIRAKK

SEQ ID NO: 20060 - protein, 8 aa, Homo sapiens
  ( 465 )...( 472 ): >Q9UKY1
FGIRAKKT

SEQ ID NO: 20061 - protein, 8 aa, Homo sapiens
  ( 467 )...( 474 ): >Q9UKY1
IRAKKTKE

SEQ ID NO: 20062 - protein, 8 aa, Homo sapiens
  ( 600 )...( 607 ): >Q9UKY1
RLRAQTKL

SEQ ID NO: 20063 - protein, 8 aa, Homo sapiens
  ( 602 )...( 609 ): >Q9UKY1
RAQTKLTR

SEQ ID NO: 20064 - protein, 8 aa, Homo sapiens
  ( 603 )...( 610 ): >Q9UKY1
AQTKLTRR

SEQ ID NO: 20065 - protein, 8 aa, Homo sapiens
  ( 736 )...( 743 ): >Q9UKY1
GLSSLRKR

SEQ ID NO: 20066 - protein, 8 aa, Homo sapiens
  ( 737 )...( 744 ): >Q9UKY1
LSSLRKRG

SEQ ID NO: 20067 - protein, 8 aa, Homo sapiens
  ( 864 )...( 871 ): >Q9UKY1
VKRKLSKS

SEQ ID NO: 20068 - protein, 8 aa, Homo sapiens
  ( 608 )...( 615 ): >Q8IZE0
RRSQKITG

SEQ ID NO: 20069 - protein, 8 aa, Homo sapiens
  ( 90 )...( 97 ): >AAD09186
SPTTRIKK

SEQ ID NO: 20070 - protein, 12 aa, Homo sapiens
  ( 5 )...( 16 ): >ADNP_HUMAN
PVNNLGSLRKAR

SEQ ID NO: 20071 - protein, 12 aa, Homo sapiens
  ( 6 )...( 17 ): >ADNP_HUMAN
VNNLGSLRKARK

SEQ ID NO: 20072 - protein, 12 aa, Homo sapiens
  ( 7 )...( 18 ): >ADNP_HUMAN
NNLGSLRKARKT

SEQ ID NO: 20073 - protein, 12 aa, Homo sapiens
  ( 8 )...( 19 ): >ADNP_HUMAN
NLGSLRKARKTV

SEQ ID NO: 20074 - protein, 12 aa, Homo sapiens
  ( 9 )...( 20 ): >ADNP_HUMAN
LGSLRKARKTVK

SEQ ID NO: 20075 - protein, 12 aa, Homo sapiens
  ( 14 )...( 25 ): >ADNP_HUMAN
KARKTVKKILSD

SEQ ID NO: 20076 - protein, 12 aa, Homo sapiens
  ( 15 )...( 26 ): >ADNP_HUMAN
ARKTVKKILSDI

SEQ ID NO: 20077 - protein, 12 aa, Homo sapiens
  ( 16 )...( 27 ): >ADNP_HUMAN
RKTVKKILSDIG

SEQ ID NO: 20078 - protein, 12 aa, Homo sapiens
  ( 855 )...( 866 ): >ADNP_HUMAN
RVNASKTADKKL

SEQ ID NO: 20079 - protein, 12 aa, Homo sapiens
  ( 1007 )...( 1018 ): >ADNP_HUMAN
RSSKPAAKKKAT

SEQ ID NO: 20080 - protein, 12 aa, Homo sapiens
  ( 1009 )...( 1020 ): >ADNP_HUMAN
SKPAAKKKATMQ

SEQ ID NO: 20081 - protein, 12 aa, Homo sapiens
  ( 1012 )...( 1023 ): >ADNP_HUMAN
AAKKKATMQGDR

SEQ ID NO: 20082 - protein, 12 aa, Homo sapiens
  ( 15 )...( 26 ): >AHR_HUMAN
RRKPVQKTVKPI

SEQ ID NO: 20083 - protein, 12 aa, Homo sapiens
  ( 16 )...( 27 ): >AHR_HUMAN
RKPVQKTVKPIP

SEQ ID NO: 20084 - protein, 12 aa, Homo sapiens
  ( 17 )...( 28 ): >AHR_HUMAN
KPVQKTVKPIPA

SEQ ID NO: 20085 - protein, 12 aa, Homo sapiens
  ( 69 )...( 80 ): >AHR_HUMAN
VLRLSVSYLRAK

SEQ ID NO: 20086 - protein, 12 aa, Homo sapiens
  ( 70 )...( 81 ): >AHR_HUMAN
LRLSVSYLRAKS

SEQ ID NO: 20087 - protein, 12 aa, Homo sapiens
  ( 71 )...( 82 ): >AHR_HUMAN
RLSVSYLRAKSF

SEQ ID NO: 20088 - protein, 12 aa, Homo sapiens
  ( 240 )...( 251 ): >AHR_HUMAN
QGKLKYLHGQKK

SEQ ID NO: 20089 - protein, 12 aa, Homo sapiens
  ( 241 )...( 252 ): >AHR_HUMAN
GKLKYLHGQKKK

SEQ ID NO: 20090 - protein, 12 aa, Homo sapiens
  ( 242 )...( 253 ): >AHR_HUMAN
KLKYLHGQKKKG

SEQ ID NO: 20091 - protein, 12 aa, Homo sapiens
  ( 243 )...( 254 ): >AHR_HUMAN
LKYLHGQKKKGK

SEQ ID NO: 20092 - protein, 12 aa, Homo sapiens
  ( 391 )...( 402 ): >AHR_HUMAN
GTEHLRKRNTKL

SEQ ID NO: 20093 - protein, 12 aa, Homo sapiens
  ( 427 )...( 438 ): >AHR_HUMAN
LPLRTKNGTSGK

SEQ ID NO: 20094 - protein, 12 aa, Homo sapiens
  ( 155 )...( 166 ): >AIOL_HUMAN
FTQKGNLLRHIK

SEQ ID NO: 20095 - protein, 12 aa, Homo sapiens
  ( 156 )...( 167 ): >AIOL_HUMAN
TQKGNLLRHIKL

SEQ ID NO: 20096 - protein, 12 aa, Homo sapiens
  ( 256 )...( 267 ): >AIOL_HUMAN
LDRLASNVAKRK

SEQ ID NO: 20097 - protein, 12 aa, Homo sapiens
  ( 257 )...( 268 ): >AIOL_HUMAN
DRLASNVAKRKS

SEQ ID NO: 20098 - protein, 12 aa, Homo sapiens
  ( 258 )...( 269 ): >AIOL_HUMAN
RLASNVAKRKSS

SEQ ID NO: 20099 - protein, 12 aa, Homo sapiens
  ( 265 )...( 276 ): >AIOL_HUMAN
KRKSSMPQKFIG

SEQ ID NO: 20100 - protein, 12 aa, Homo sapiens
  ( 408 )...( 419 ): >AIOL_HUMAN
LSRARNGMPLLK

SEQ ID NO: 20101 - protein, 12 aa, Homo sapiens
  ( 60 )...( 71 ): >ALX4_HUMAN
AKSRARYGAGQQ

SEQ ID NO: 20102 - protein, 12 aa, Homo sapiens
  ( 388 )...( 399 ): >ALX4_HUMAN
RKTSSIAALRMK

SEQ ID NO: 20103 - protein, 12 aa, Homo sapiens
  ( 389 )...( 400 ): >ALX4_HUMAN
KTSSIAALRMKA

SEQ ID NO: 20104 - protein, 12 aa, Homo sapiens
  ( 390 )...( 401 ): >ALX4_HUMAN
TSSIAALRMKAK

SEQ ID NO: 20105 - protein, 12 aa, Homo sapiens
  ( 45 )...( 56 ): >AP1_HUMAN
PVGSLKPHLRAK

SEQ ID NO: 20106 - protein, 12 aa, Homo sapiens
  ( 46 )...( 57 ): >AP1_HUMAN
VGSLKPHLRAKN

SEQ ID NO: 20107 - protein, 12 aa, Homo sapiens
  ( 264 )...( 275 ): >AP1_HUMAN
IAASKCRKRKLE

SEQ ID NO: 20108 - protein, 12 aa, Homo sapiens
  ( 226 )...( 237 ): >AP2A_HUMAN
KYKVTVAEVQRR

SEQ ID NO: 20109 - protein, 12 aa, Homo sapiens
  ( 248 )...( 259 ): >AP2A_HUMAN
LLGGVLRRAKSK

SEQ ID NO: 20110 - protein, 12 aa, Homo sapiens
  ( 249 )...( 260 ): >AP2A_HUMAN
LGGVLRRAKSKN

SEQ ID NO: 20111 - protein, 12 aa, Homo sapiens
  ( 256 )...( 267 ): >AP2A_HUMAN
AKSKNGGRSLRE

SEQ ID NO: 20112 - protein, 12 aa, Homo sapiens
  ( 258 )...( 269 ): >AP2A_HUMAN
SKNGGRSLREKL

SEQ ID NO: 20113 - protein, 12 aa, Homo sapiens
  ( 271 )...( 282 ): >AP2A_HUMAN
KIGLNLPAGRRK

SEQ ID NO: 20114 - protein, 12 aa, Homo sapiens
  ( 272 )...( 283 ): >AP2A_HUMAN
IGLNLPAGRRKA

SEQ ID NO: 20115 - protein, 12 aa, Homo sapiens
  ( 276 )...( 287 ): >AP2A_HUMAN
LPAGRRKAANVT

SEQ ID NO: 20116 - protein, 12 aa, Homo sapiens
  ( 277 )...( 288 ): >AP2A_HUMAN
PAGRRKAANVTL

SEQ ID NO: 20117 - protein, 12 aa, Homo sapiens
  ( 278 )...( 289 ): >AP2A_HUMAN
AGRRKAANVTLL

SEQ ID NO: 20118 - protein, 12 aa, Homo sapiens
  ( 279 )...( 290 ): >AP2A_HUMAN
GRRKAANVTLLT

SEQ ID NO: 20119 - protein, 12 aa, Homo sapiens
  ( 280 )...( 291 ): >AP2A_HUMAN
RRKAANVTLLTS

SEQ ID NO: 20120 - protein, 12 aa, Homo sapiens
  ( 331 )...( 342 ): >AP2A_HUMAN
QVTRKNMLLATK

SEQ ID NO: 20121 - protein, 12 aa, Homo sapiens
  ( 332 )...( 343 ): >AP2A_HUMAN
VTRKNMLLATKQ

SEQ ID NO: 20122 - protein, 12 aa, Homo sapiens
  ( 333 )...( 344 ): >AP2A_HUMAN
TRKNMLLATKQI

SEQ ID NO: 20123 - protein, 12 aa, Homo sapiens
  ( 334 )...( 345 ): >AP2A_HUMAN
RKNMLLATKQIC

SEQ ID NO: 20124 - protein, 12 aa, Homo sapiens
  ( 335 )...( 346 ): >AP2A_HUMAN
KNMLLATKQICK

SEQ ID NO: 20125 - protein, 12 aa, Homo sapiens
  ( 28 )...( 39 ): >ARN2_HUMAN
MPARGGKRRSGM

SEQ ID NO: 20126 - protein, 12 aa, Homo sapiens
  ( 30 )...( 41 ): >ARN2_HUMAN
ARGGKRRSGMDF

SEQ ID NO: 20127 - protein, 12 aa, Homo sapiens
  ( 85 )...( 96 ): >ARN2_HUMAN
LARKPDKLTILR

SEQ ID NO: 20128 - protein, 12 aa, Homo sapiens
  ( 86 )...( 97 ): >ARN2_HUMAN
ARKPDKLTILRM

SEQ ID NO: 20129 - protein, 12 aa, Homo sapiens
  ( 87 )...( 98 ): >ARN2_HUMAN
RKPDKLTILRMA

SEQ ID NO: 20130 - protein, 12 aa, Homo sapiens
  ( 95 )...( 106 ): >ARN2_HUMAN
LRMAVSHMKSMR

SEQ ID NO: 20131 - protein, 12 aa, Homo sapiens
  ( 198 )...( 209 ): >ARN2_HUMAN
RILDLKTGTVKK

SEQ ID NO: 20132 - protein, 12 aa, Homo sapiens
  ( 246 )...( 257 ): >ARN2_HUMAN
TTMRKRFRNGLG

SEQ ID NO: 20133 - protein, 12 aa, Homo sapiens
  ( 248 )...( 259 ): >ARN2_HUMAN
MRKRFRNGLGPV

SEQ ID NO: 20134 - protein, 12 aa, Homo sapiens
  ( 250 )...( 261 ): >ARN2_HUMAN
KRFRNGLGPVKE

SEQ ID NO: 20135 - protein, 12 aa, Homo sapiens
  ( 380 )...( 391 ): >ARN2_HUMAN
KLKGQVLSVMYR

SEQ ID NO: 20136 - protein, 12 aa, Homo sapiens
  ( 382 )...( 393 ): >ARN2_HUMAN
KGQVLSVMYRFR

SEQ ID NO: 20137 - protein, 12 aa, Homo sapiens
  ( 33 )...( 44 ): >ARNT_HUMAN
GGAIVQRAIKRR

SEQ ID NO: 20138 - protein, 12 aa, Homo sapiens
  ( 34 )...( 45 ): >ARNT_HUMAN
GAIVQRAIKRRP

SEQ ID NO: 20139 - protein, 12 aa, Homo sapiens
  ( 35 )...( 46 ): >ARNT_HUMAN
AIVQRAIKRRPG

SEQ ID NO: 20140 - protein, 12 aa, Homo sapiens
  ( 36 )...( 47 ): >ARNT_HUMAN
IVQRAIKRRPGL

SEQ ID NO: 20141 - protein, 12 aa, Homo sapiens
  ( 37 )...( 48 ): >ARNT_HUMAN
VQRAIKRRPGLD

SEQ ID NO: 20142 - protein, 12 aa, Homo sapiens
  ( 122 )...( 133 ): >ARNT_HUMAN
LARKPDKLTILR

SEQ ID NO: 20143 - protein, 12 aa, Homo sapiens
  ( 123 )...( 134 ): >ARNT_HUMAN
ARKPDKLTILRM

SEQ ID NO: 20144 - protein, 12 aa, Homo sapiens
  ( 124 )...( 135 ): >ARNT_HUMAN
RKPDKLTILRMA

SEQ ID NO: 20145 - protein, 12 aa, Homo sapiens
  ( 132 )...( 143 ): >ARNT_HUMAN
LRMAVSHMKSLR

SEQ ID NO: 20146 - protein, 12 aa, Homo sapiens
  ( 133 )...( 144 ): >ARNT_HUMAN
RMAVSHMKSLRG

SEQ ID NO: 20147 - protein, 12 aa, Homo sapiens
  ( 235 )...( 246 ): >ARNT_HUMAN
RILDLKTGTVKK

SEQ ID NO: 20148 - protein, 12 aa, Homo sapiens
  ( 285 )...( 296 ): >ARNT_HUMAN
VRNRCRNGLGSV

SEQ ID NO: 20149 - protein, 12 aa, Homo sapiens
  ( 286 )...( 297 ): >ARNT_HUMAN
RNRCRNGLGSVK

SEQ ID NO: 20150 - protein, 12 aa, Homo sapiens
  ( 417 )...( 428 ): >ARNT_HUMAN
KLKGQVLSVMFR

SEQ ID NO: 20151 - protein, 12 aa, Homo sapiens
  ( 419 )...( 430 ): >ARNT_HUMAN
KGQVLSVMFRFR

SEQ ID NO: 20152 - protein, 12 aa, Homo sapiens
  ( 77 )...( 88 ): >ASH1_HUMAN
GGHKSAPKQVKR

SEQ ID NO: 20153 - protein, 12 aa, Homo sapiens
  ( 78 )...( 89 ): >ASH1_HUMAN
GHKSAPKQVKRQ

SEQ ID NO: 20154 - protein, 12 aa, Homo sapiens
  ( 81 )...( 92 ): >ASH1_HUMAN
SAPKQVKRQRSS

SEQ ID NO: 20155 - protein, 12 aa, Homo sapiens
  ( 82 )...( 93 ): >ASH1_HUMAN
APKQVKRQRSSS

SEQ ID NO: 20156 - protein, 12 aa, Homo sapiens
  ( 126 )...( 137 ): >ASH1_HUMAN
RERNRVKLVNLG

SEQ ID NO: 20157 - protein, 12 aa, Homo sapiens
  ( 128 )...( 139 ): >ASH1_HUMAN
RNRVKLVNLGFA

SEQ ID NO: 20158 - protein, 12 aa, Homo sapiens
  ( 150 )...( 161 ): >ASH1_HUMAN
ANKKMSKVETLR

SEQ ID NO: 20159 - protein, 12 aa, Homo sapiens
  ( 34 )...( 45 ): >ASH2_HUMAN
CSRRRRPATAET

SEQ ID NO: 20160 - protein, 12 aa, Homo sapiens
  ( 35 )...( 46 ): >ASH2_HUMAN
SRRRRPATAETG

SEQ ID NO: 20161 - protein, 12 aa, Homo sapiens
  ( 36 )...( 47 ): >ASH2_HUMAN
RRRRPATAETGG

SEQ ID NO: 20162 - protein, 12 aa, Homo sapiens
  ( 58 )...( 69 ): >ASH2_HUMAN
RERNRVKLVNLG

SEQ ID NO: 20163 - protein, 12 aa, Homo sapiens
  ( 60 )...( 71 ): >ASH2_HUMAN
RNRVKLVNLGFQ

SEQ ID NO: 20164 - protein, 12 aa, Homo sapiens
  ( 120 )...( 131 ): >ASH2_HUMAN
LRPQAVRPSAPR

SEQ ID NO: 20165 - protein, 12 aa, Homo sapiens
  ( 126 )...( 137 ): >ASH3_HUMAN
KRLSKVETLRAA

SEQ ID NO: 20166 - protein, 12 aa, Homo sapiens
  ( 158 )...( 169 ): >AT6A_HUMAN
RNKTENGLTPKK

SEQ ID NO: 20167 - protein, 12 aa, Homo sapiens
  ( 163 )...( 174 ): >AT6A_HUMAN
NGLTPKKKIQVN

SEQ ID NO: 20168 - protein, 12 aa, Homo sapiens
  ( 165 )...( 176 ): >AT6A_HUMAN
LTPKKKIQVNSK

SEQ ID NO: 20169 - protein, 12 aa, Homo sapiens
  ( 166 )...( 177 ): >AT6A_HUMAN
TPKKKIQVNSKP

SEQ ID NO: 20170 - protein, 12 aa, Homo sapiens
  ( 167 )...( 178 ): >AT6A_HUMAN
PKKKIQVNSKPS

SEQ ID NO: 20171 - protein, 12 aa, Homo sapiens
  ( 168 )...( 179 ): >AT6A_HUMAN
KKKIQVNSKPSI

SEQ ID NO: 20172 - protein, 12 aa, Homo sapiens
  ( 304 )...( 315 ): >AT6A_HUMAN
IAVLRRQQRMIK

SEQ ID NO: 20173 - protein, 12 aa, Homo sapiens
  ( 347 )...( 358 ): >AT6A_HUMAN
QLKKENGTLKRQ

SEQ ID NO: 20174 - protein, 12 aa, Homo sapiens
  ( 348 )...( 359 ): >AT6A_HUMAN
LKKENGTLKRQL

SEQ ID NO: 20175 - protein, 12 aa, Homo sapiens
  ( 369 )...( 380 ): >AT6A_HUMAN
LKVPSPKRRVVC

SEQ ID NO: 20176 - protein, 12 aa, Homo sapiens
  ( 370 )...( 381 ): >AT6A_HUMAN
KVPSPKRRVVCV

SEQ ID NO: 20177 - protein, 12 aa, Homo sapiens
  ( 371 )...( 382 ): >AT6A_HUMAN
VPSPKRRVVCVM

SEQ ID NO: 20178 - protein, 12 aa, Homo sapiens
  ( 372 )...( 383 ): >AT6A_HUMAN
PSPKRRVVCVMI

SEQ ID NO: 20179 - protein, 12 aa, Homo sapiens
  ( 373 )...( 384 ): >AT6A_HUMAN
SPKRRVVCVMIV

SEQ ID NO: 20180 - protein, 12 aa, Homo sapiens
  ( 374 )...( 385 ): >AT6A_HUMAN
PKRRVVCVMIVL

SEQ ID NO: 20181 - protein, 12 aa, Homo sapiens
  ( 375 )...( 386 ): >AT6A_HUMAN
KRRVVCVMIVLA

SEQ ID NO: 20182 - protein, 12 aa, Homo sapiens
  ( 584 )...( 595 ): >AT6A_HUMAN
NKTTRPKMSIVL

SEQ ID NO: 20183 - protein, 12 aa, Homo sapiens
  ( 585 )...( 596 ): >AT6A_HUMAN
KTTRPKMSIVLP

SEQ ID NO: 20184 - protein, 12 aa, Homo sapiens
  ( 234 )...( 245 ): >AT6B_HUMAN
GKALPTRKPPLQ

SEQ ID NO: 20185 - protein, 12 aa, Homo sapiens
  ( 239 )...( 250 ): >AT6B_HUMAN
TRKPPLQPKPVV

SEQ ID NO: 20186 - protein, 12 aa, Homo sapiens
  ( 240 )...( 251 ): >AT6B_HUMAN
RKPPLQPKPVVL

SEQ ID NO: 20187 - protein, 12 aa, Homo sapiens
  ( 388 )...( 399 ): >AT6B_HUMAN
LKLGSGNRKVVC

SEQ ID NO: 20188 - protein, 12 aa, Homo sapiens
  ( 541 )...( 552 ): >AT6B_HUMAN
QPRKKSPPVKAV

SEQ ID NO: 20189 - protein, 12 aa, Homo sapiens
  ( 543 )...( 554 ): >AT6B_HUMAN
RKKSPPVKAVPI

SEQ ID NO: 20190 - protein, 12 aa, Homo sapiens
  ( 50 )...( 61 ): >ATF1_HUMAN
SSQKAHGILARR

SEQ ID NO: 20191 - protein, 12 aa, Homo sapiens
  ( 51 )...( 62 ): >ATF1_HUMAN
SQKAHGILARRP

SEQ ID NO: 20192 - protein, 12 aa, Homo sapiens
  ( 52 )...( 63 ): >ATF1_HUMAN
QKAHGILARRPS

SEQ ID NO: 20193 - protein, 12 aa, Homo sapiens
  ( 53 )...( 64 ): >ATF1_HUMAN
KAHGILARRPSY

SEQ ID NO: 20194 - protein, 12 aa, Homo sapiens
  ( 54 )...( 65 ): >ATF1_HUMAN
AHGILARRPSYR

SEQ ID NO: 20195 - protein, 12 aa, Homo sapiens
  ( 56 )...( 67 ): >ATF1_HUMAN
GILARRPSYRKI

SEQ ID NO: 20196 - protein, 12 aa, Homo sapiens
  ( 96 )...( 107 ): >ATF3_HUMAN
NKIAAAKCRNKK

SEQ ID NO: 20197 - protein, 12 aa, Homo sapiens
  ( 98 )...( 109 ): >ATF3_HUMAN
IAAAKCRNKKKE

SEQ ID NO: 20198 - protein, 12 aa, Homo sapiens
  ( 150 )...( 161 ): >ATF3_HUMAN
RPTCIVRAQNGR

SEQ ID NO: 20199 - protein, 12 aa, Homo sapiens
  ( 267 )...( 278 ): >ATF4_HUMAN
KMVAAKVKGEKL

SEQ ID NO: 20200 - protein, 12 aa, Homo sapiens
  ( 272 )...( 283 ): >ATF4_HUMAN
KVKGEKLDKKLK

SEQ ID NO: 20201 - protein, 12 aa, Homo sapiens
  ( 273 )...( 284 ): >ATF4_HUMAN
VKGEKLDKKLKK

SEQ ID NO: 20202 - protein, 12 aa, Homo sapiens
  ( 274 )...( 285 ): >ATF4_HUMAN
KGEKLDKKLKKM

SEQ ID NO: 20203 - protein, 12 aa, Homo sapiens
  ( 283 )...( 294 ): >ATF4_HUMAN
KKMEQNKTAATR

SEQ ID NO: 20204 - protein, 12 aa, Homo sapiens
  ( 337 )...( 348 ): >ATF4_HUMAN
LIEEVRKARGKK

SEQ ID NO: 20205 - protein, 12 aa, Homo sapiens
  ( 338 )...( 349 ): >ATF4_HUMAN
IEEVRKARGKKR

SEQ ID NO: 20206 - protein, 12 aa, Homo sapiens
  ( 339 )...( 350 ): >ATF4_HUMAN
EEVRKARGKKRV

SEQ ID NO: 20207 - protein, 12 aa, Homo sapiens
  ( 121 )...( 132 ): >ATH1_HUMAN
PVKVREQLCKLK

SEQ ID NO: 20208 - protein, 12 aa, Homo sapiens
  ( 122 )...( 133 ): >ATH1_HUMAN
VKVREQLCKLKG

SEQ ID NO: 20209 - protein, 12 aa, Homo sapiens
  ( 123 )...( 134 ): >ATH1_HUMAN
KVREQLCKLKGG

SEQ ID NO: 20210 - protein, 12 aa, Homo sapiens
  ( 144 )...( 155 ): >ATH1_HUMAN
RQRAPSSKQVNG

SEQ ID NO: 20211 - protein, 12 aa, Homo sapiens
  ( 149 )...( 160 ): >ATH1_HUMAN
SSKQVNGVQKQR

SEQ ID NO: 20212 - protein, 12 aa, Homo sapiens
  ( 150 )...( 161 ): >ATH1_HUMAN
SKQVNGVQKQRR

SEQ ID NO: 20213 - protein, 12 aa, Homo sapiens
  ( 151 )...( 162 ): >ATH1_HUMAN
KQVNGVQKQRRL

SEQ ID NO: 20214 - protein, 12 aa, Homo sapiens
  ( 152 )...( 163 ): >ATH1_HUMAN
QVNGVQKQRRLA

SEQ ID NO: 20215 - protein, 12 aa, Homo sapiens
  ( 153 )...( 164 ): >ATH1_HUMAN
VNGVQKQRRLAA

SEQ ID NO: 20216 - protein, 12 aa, Homo sapiens
  ( 154 )...( 165 ): >ATH1_HUMAN
NGVQKQRRLAAN

SEQ ID NO: 20217 - protein, 12 aa, Homo sapiens
  ( 155 )...( 166 ): >ATH1_HUMAN
GVQKQRRLAANA

SEQ ID NO: 20218 - protein, 12 aa, Homo sapiens
  ( 124 )...( 135 ): >BA1A_HUMAN
VIRNNGARLQCR

SEQ ID NO: 20219 - protein, 12 aa, Homo sapiens
  ( 125 )...( 136 ): >BA1A_HUMAN
IRNNGARLQCRI

SEQ ID NO: 20220 - protein, 12 aa, Homo sapiens
  ( 126 )...( 137 ): >BA1A_HUMAN
RNNGARLQCRIL

SEQ ID NO: 20221 - protein, 12 aa, Homo sapiens
  ( 204 )...( 215 ): >BA1A_HUMAN
SAIVKATQISRR

SEQ ID NO: 20222 - protein, 12 aa, Homo sapiens
  ( 205 )...( 216 ): >BA1A_HUMAN
AIVKATQISRRK

SEQ ID NO: 20223 - protein, 12 aa, Homo sapiens
  ( 206 )...( 217 ): >BA1A_HUMAN
IVKATQISRRKH

SEQ ID NO: 20224 - protein, 12 aa, Homo sapiens
  ( 207 )...( 218 ): >BA1A_HUMAN
VKATQISRRKHL

SEQ ID NO: 20225 - protein, 12 aa, Homo sapiens
  ( 292 )...( 303 ): >BA1A_HUMAN
ANKQTLASYRSK

SEQ ID NO: 20226 - protein, 12 aa, Homo sapiens
  ( 293 )...( 304 ): >BA1A_HUMAN
NKQTLASYRSKA

SEQ ID NO: 20227 - protein, 12 aa, Homo sapiens
  ( 297 )...( 308 ): >BA1A_HUMAN
LASYRSKATKER

SEQ ID NO: 20228 - protein, 12 aa, Homo sapiens
  ( 318 )...( 329 ): >BA1A_HUMAN
KSLAFEKAKLKR

SEQ ID NO: 20229 - protein, 12 aa, Homo sapiens
  ( 324 )...( 335 ): >BA1A_HUMAN
KAKLKREKADAL

SEQ ID NO: 20230 - protein, 12 aa, Homo sapiens
  ( 589 )...( 600 ): >BA1A_HUMAN
LRLSNPSLVKKL

SEQ ID NO: 20231 - protein, 12 aa, Homo sapiens
  ( 590 )...( 601 ): >BA1A_HUMAN
RLSNPSLVKKLS

SEQ ID NO: 20232 - protein, 12 aa, Homo sapiens
  ( 1045 )...( 1056 ): >BA1A_HUMAN
KVIVKDRLLGIK

SEQ ID NO: 20233 - protein, 12 aa, Homo sapiens
  ( 1144 )...( 1155 ): >BA1A_HUMAN
KSILNARCKICR

SEQ ID NO: 20234 - protein, 12 aa, Homo sapiens
  ( 1145 )...( 1156 ): >BA1A_HUMAN
SILNARCKICRK

SEQ ID NO: 20235 - protein, 12 aa, Homo sapiens
  ( 1175 )...( 1186 ): >BA1A_HUMAN
TYCVRPKLKTVP

SEQ ID NO: 20236 - protein, 12 aa, Homo sapiens
  ( 1258 )...( 1269 ): >BA1A_HUMAN
VSLPKRGRPQVR

SEQ ID NO: 20237 - protein, 12 aa, Homo sapiens
  ( 1259 )...( 1270 ): >BA1A_HUMAN
SLPKRGRPQVRL

SEQ ID NO: 20238 - protein, 12 aa, Homo sapiens
  ( 1261 )...( 1272 ): >BA1A_HUMAN
PKRGRPQVRLPV

SEQ ID NO: 20239 - protein, 12 aa, Homo sapiens
  ( 1263 )...( 1274 ): >BA1A_HUMAN
RGRPQVRLPVKT

SEQ ID NO: 20240 - protein, 12 aa, Homo sapiens
  ( 1264 )...( 1275 ): >BA1A_HUMAN
GRPQVRLPVKTR

SEQ ID NO: 20241 - protein, 12 aa, Homo sapiens
  ( 1265 )...( 1276 ): >BA1A_HUMAN
RPQVRLPVKTRG

SEQ ID NO: 20242 - protein, 12 aa, Homo sapiens
  ( 1266 )...( 1277 ): >BA1A_HUMAN
PQVRLPVKTRGK

SEQ ID NO: 20243 - protein, 12 aa, Homo sapiens
  ( 1267 )...( 1278 ): >BA1A_HUMAN
QVRLPVKTRGKL

SEQ ID NO: 20244 - protein, 12 aa, Homo sapiens
  ( 1268 )...( 1279 ): >BA1A_HUMAN
VRLPVKTRGKLS

SEQ ID NO: 20245 - protein, 12 aa, Homo sapiens
  ( 1269 )...( 1280 ): >BA1A_HUMAN
RLPVKTRGKLSS

SEQ ID NO: 20246 - protein, 12 aa, Homo sapiens
  ( 1306 )...( 1317 ): >BA1A_HUMAN
TVSSKTGRSLRK

SEQ ID NO: 20247 - protein, 12 aa, Homo sapiens
  ( 1307 )...( 1318 ): >BA1A_HUMAN
VSSKTGRSLRKI

SEQ ID NO: 20248 - protein, 12 aa, Homo sapiens
  ( 1308 )...( 1319 ): >BA1A_HUMAN
SSKTGRSLRKIN

SEQ ID NO: 20249 - protein, 12 aa, Homo sapiens
  ( 1309 )...( 1320 ): >BA1A_HUMAN
SKTGRSLRKINS

SEQ ID NO: 20250 - protein, 12 aa, Homo sapiens
  ( 1310 )...( 1321 ): >BA1A_HUMAN
KTGRSLRKINSA

SEQ ID NO: 20251 - protein, 12 aa, Homo sapiens
  ( 1311 )...( 1322 ): >BA1A_HUMAN
TGRSLRKINSAP

SEQ ID NO: 20252 - protein, 12 aa, Homo sapiens
  ( 1326 )...( 1337 ): >BA1A_HUMAN
TKSLRIASRSTR

SEQ ID NO: 20253 - protein, 12 aa, Homo sapiens
  ( 1327 )...( 1338 ): >BA1A_HUMAN
KSLRIASRSTRH

SEQ ID NO: 20254 - protein, 12 aa, Homo sapiens
  ( 1328 )...( 1339 ): >BA1A_HUMAN
SLRIASRSTRHS

SEQ ID NO: 20255 - protein, 12 aa, Homo sapiens
  ( 1417 )...( 1428 ): >BA1A_HUMAN
SPVTLGRRSSGR

SEQ ID NO: 20256 - protein, 12 aa, Homo sapiens
  ( 1418 )...( 1429 ): >BA1A_HUMAN
PVTLGRRSSGRQ

SEQ ID NO: 20257 - protein, 12 aa, Homo sapiens
  ( 1419 )...( 1430 ): >BA1A_HUMAN
VTLGRRSSGRQG

SEQ ID NO: 20258 - protein, 12 aa, Homo sapiens
  ( 1471 )...( 1482 ): >BA1A_HUMAN
KKPIALNIIREK

SEQ ID NO: 20259 - protein, 12 aa, Homo sapiens
  ( 532 )...( 543 ): >BA2A_HUMAN
GWRREVRIKKGS

SEQ ID NO: 20260 - protein, 12 aa, Homo sapiens
  ( 537 )...( 548 ): >BA2A_HUMAN
VRIKKGSHRWQG

SEQ ID NO: 20261 - protein, 12 aa, Homo sapiens
  ( 557 )...( 568 ): >BA2A_HUMAN
GKRMKQFPEVIK

SEQ ID NO: 20262 - protein, 12 aa, Homo sapiens
  ( 614 )...( 625 ): >BA2A_HUMAN
IPSRIQAITGKR

SEQ ID NO: 20263 - protein, 12 aa, Homo sapiens
  ( 615 )...( 626 ): >BA2A_HUMAN
PSRIQAITGKRG

SEQ ID NO: 20264 - protein, 12 aa, Homo sapiens
  ( 616 )...( 627 ): >BA2A_HUMAN
SRIQAITGKRGR

SEQ ID NO: 20265 - protein, 12 aa, Homo sapiens
  ( 617 )...( 628 ): >BA2A_HUMAN
RIQAITGKRGRP

SEQ ID NO: 20266 - protein, 12 aa, Homo sapiens
  ( 618 )...( 629 ): >BA2A_HUMAN
IQAITGKRGRPR

SEQ ID NO: 20267 - protein, 12 aa, Homo sapiens
  ( 619 )...( 630 ): >BA2A_HUMAN
QAITGKRGRPRN

SEQ ID NO: 20268 - protein, 12 aa, Homo sapiens
  ( 620 )...( 631 ): >BA2A_HUMAN
AITGKRGRPRNT

SEQ ID NO: 20269 - protein, 12 aa, Homo sapiens
  ( 621 )...( 632 ): >BA2A_HUMAN
ITGKRGRPRNTE

SEQ ID NO: 20270 - protein, 12 aa, Homo sapiens
  ( 626 )...( 637 ): >BA2A_HUMAN
GRPRNTEKAKTK

SEQ ID NO: 20271 - protein, 12 aa, Homo sapiens
  ( 633 )...( 644 ): >BA2A_HUMAN
KAKTKEVPKVKR

SEQ ID NO: 20272 - protein, 12 aa, Homo sapiens
  ( 634 )...( 645 ): >BA2A_HUMAN
AKTKEVPKVKRG

SEQ ID NO: 20273 - protein, 12 aa, Homo sapiens
  ( 635 )...( 646 ): >BA2A_HUMAN
KTKEVPKVKRGR

SEQ ID NO: 20274 - protein, 12 aa, Homo sapiens
  ( 636 )...( 647 ): >BA2A_HUMAN
TKEVPKVKRGRG

SEQ ID NO: 20275 - protein, 12 aa, Homo sapiens
  ( 638 )...( 649 ): >BA2A_HUMAN
EVPKVKRGRGRP

SEQ ID NO: 20276 - protein, 12 aa, Homo sapiens
  ( 645 )...( 656 ): >BA2A_HUMAN
GRGRPPKVKITE

SEQ ID NO: 20277 - protein, 12 aa, Homo sapiens
  ( 646 )...( 657 ): >BA2A_HUMAN
RGRPPKVKITEL

SEQ ID NO: 20278 - protein, 12 aa, Homo sapiens
  ( 678 )...( 689 ): >BA2A_HUMAN
EDKAKIAKSKKK

SEQ ID NO: 20279 - protein, 12 aa, Homo sapiens
  ( 679 )...( 690 ): >BA2A_HUMAN
DKAKIAKSKKKM

SEQ ID NO: 20280 - protein, 12 aa, Homo sapiens
  ( 689 )...( 700 ): >BA2A_HUMAN
KMRQKVQRGECL

SEQ ID NO: 20281 - protein, 12 aa, Homo sapiens
  ( 700 )...( 711 ): >BA2A_HUMAN
LTTIQGQARNKR

SEQ ID NO: 20282 - protein, 12 aa, Homo sapiens
  ( 701 )...( 712 ): >BA2A_HUMAN
TTIQGQARNKRK

SEQ ID NO: 20283 - protein, 12 aa, Homo sapiens
  ( 702 )...( 713 ): >BA2A_HUMAN
TIQGQARNKRKQ

SEQ ID NO: 20284 - protein, 12 aa, Homo sapiens
  ( 731 )...( 742 ): >BA2A_HUMAN
KEKGKTKQEKLK

SEQ ID NO: 20285 - protein, 12 aa, Homo sapiens
  ( 733 )...( 744 ): >BA2A_HUMAN
KGKTKQEKLKEK

SEQ ID NO: 20286 - protein, 12 aa, Homo sapiens
  ( 768 )...( 779 ): >BA2A_HUMAN
CKADKTLATQRR

SEQ ID NO: 20287 - protein, 12 aa, Homo sapiens
  ( 769 )...( 780 ): >BA2A_HUMAN
KADKTLATQRRL

SEQ ID NO: 20288 - protein, 12 aa, Homo sapiens
  ( 981 )...( 992 ): >BA2A_HUMAN
IVEGRLRRLKTV

SEQ ID NO: 20289 - protein, 12 aa, Homo sapiens
  ( 982 )...( 993 ): >BA2A_HUMAN
VEGRLRRLKTVL

SEQ ID NO: 20290 - protein, 12 aa, Homo sapiens
  ( 983 )...( 994 ): >BA2A_HUMAN
EGRLRRLKTVLA

SEQ ID NO: 20291 - protein, 12 aa, Homo sapiens
  ( 989 )...( 1000 ): >BA2A_HUMAN
LKTVLAKRTGRS

SEQ ID NO: 20292 - protein, 12 aa, Homo sapiens
  ( 990 )...( 1001 ): >BA2A_HUMAN
KTVLAKRTGRSE

SEQ ID NO: 20293 - protein, 12 aa, Homo sapiens
  ( 1009 )...( 1020 ): >BA2A_HUMAN
ECLGRRRSSRIM

SEQ ID NO: 20294 - protein, 12 aa, Homo sapiens
  ( 1010 )...( 1021 ): >BA2A_HUMAN
CLGRRRSSRIME

SEQ ID NO: 20295 - protein, 12 aa, Homo sapiens
  ( 1035 )...( 1046 ): >BA2A_HUMAN
IAAVPGRRGRRD

SEQ ID NO: 20296 - protein, 12 aa, Homo sapiens
  ( 1036 )...( 1047 ): >BA2A_HUMAN
AAVPGRRGRRDG

SEQ ID NO: 20297 - protein, 12 aa, Homo sapiens
  ( 1163 )...( 1174 ): >BA2A_HUMAN
GRPRKTKPGSMQ

SEQ ID NO: 20298 - protein, 12 aa, Homo sapiens
  ( 1173 )...( 1184 ): >BA2A_HUMAN
MQPRHLKSPVRG

SEQ ID NO: 20299 - protein, 12 aa, Homo sapiens
  ( 1349 )...( 1360 ): >BA2A_HUMAN
STPLAGLAPKRR

SEQ ID NO: 20300 - protein, 12 aa, Homo sapiens
  ( 1350 )...( 1361 ): >BA2A_HUMAN
TPLAGLAPKRRA

SEQ ID NO: 20301 - protein, 12 aa, Homo sapiens
  ( 1369 )...( 1380 ): >BA2A_HUMAN
QSPTGLGQPKRR

SEQ ID NO: 20302 - protein, 12 aa, Homo sapiens
  ( 1370 )...( 1381 ): >BA2A_HUMAN
SPTGLGQPKRRG

SEQ ID NO: 20303 - protein, 12 aa, Homo sapiens
  ( 1371 )...( 1382 ): >BA2A_HUMAN
PTGLGQPKRRGR

SEQ ID NO: 20304 - protein, 12 aa, Homo sapiens
  ( 1372 )...( 1383 ): >BA2A_HUMAN
TGLGQPKRRGRP

SEQ ID NO: 20305 - protein, 12 aa, Homo sapiens
  ( 1373 )...( 1384 ): >BA2A_HUMAN
GLGQPKRRGRPP

SEQ ID NO: 20306 - protein, 12 aa, Homo sapiens
  ( 1374 )...( 1385 ): >BA2A_HUMAN
LGQPKRRGRPPS

SEQ ID NO: 20307 - protein, 12 aa, Homo sapiens
  ( 1423 )...( 1434 ): >BA2A_HUMAN
AMLKALHPRGIR

SEQ ID NO: 20308 - protein, 12 aa, Homo sapiens
  ( 1425 )...( 1436 ): >BA2A_HUMAN
LKALHPRGIREK

SEQ ID NO: 20309 - protein, 12 aa, Homo sapiens
  ( 1426 )...( 1437 ): >BA2A_HUMAN
KALHPRGIREKA

SEQ ID NO: 20310 - protein, 12 aa, Homo sapiens
  ( 1539 )...( 1550 ): >BA2A_HUMAN
RGRGREGLAPQR

SEQ ID NO: 20311 - protein, 12 aa, Homo sapiens
  ( 1540 )...( 1551 ): >BA2A_HUMAN
GRGREGLAPQRK

SEQ ID NO: 20312 - protein, 12 aa, Homo sapiens
  ( 1541 )...( 1552 ): >BA2A_HUMAN
RGREGLAPQRKT

SEQ ID NO: 20313 - protein, 12 aa, Homo sapiens
  ( 1647 )...( 1658 ): >BA2A_HUMAN
VNKVTCLVCRKG

SEQ ID NO: 20314 - protein, 12 aa, Homo sapiens
  ( 1706 )...( 1717 ): >BA2A_HUMAN
TQKPGFPKRGQK

SEQ ID NO: 20315 - protein, 12 aa, Homo sapiens
  ( 1710 )...( 1721 ): >BA2A_HUMAN
GFPKRGQKRKSG

SEQ ID NO: 20316 - protein, 12 aa, Homo sapiens
  ( 1713 )...( 1724 ): >BA2A_HUMAN
KRGQKRKSGYSL

SEQ ID NO: 20317 - protein, 12 aa, Homo sapiens
  ( 1714 )...( 1725 ): >BA2A_HUMAN
RGQKRKSGYSLN

SEQ ID NO: 20318 - protein, 12 aa, Homo sapiens
  ( 1734 )...( 1745 ): >BA2A_HUMAN
RRVLLRGRESPA

SEQ ID NO: 20319 - protein, 12 aa, Homo sapiens
  ( 1753 )...( 1764 ): >BA2A_HUMAN
EGLSPSKRRRLS

SEQ ID NO: 20320 - protein, 12 aa, Homo sapiens
  ( 1754 )...( 1765 ): >BA2A_HUMAN
GLSPSKRRRLSM

SEQ ID NO: 20321 - protein, 12 aa, Homo sapiens
  ( 1795 )...( 1806 ): >BA2A_HUMAN
VNPRLVSGYRRI

SEQ ID NO: 20322 - protein, 12 aa, Homo sapiens
  ( 1796 )...( 1807 ): >BA2A_HUMAN
NPRLVSGYRRII

SEQ ID NO: 20323 - protein, 12 aa, Homo sapiens
  ( 1797 )...( 1808 ): >BA2A_HUMAN
PRLVSGYRRIIK

SEQ ID NO: 20324 - protein, 12 aa, Homo sapiens
  ( 1798 )...( 1809 ): >BA2A_HUMAN
RLVSGYRRIIKN

SEQ ID NO: 20325 - protein, 12 aa, Homo sapiens
  ( 1799 )...( 1810 ): >BA2A_HUMAN
LVSGYRRIIKNP

SEQ ID NO: 20326 - protein, 12 aa, Homo sapiens
  ( 1800 )...( 1811 ): >BA2A_HUMAN
VSGYRRIIKNPM

SEQ ID NO: 20327 - protein, 12 aa, Homo sapiens
  ( 1852 )...( 1863 ): >BA2A_HUMAN
VGKAGHIMRRFF

SEQ ID NO: 20328 - protein, 12 aa, Homo sapiens
  ( 13 )...( 24 ): >BACH_HUMAN
FGRQASSRRLVA

SEQ ID NO: 20329 - protein, 12 aa, Homo sapiens
  ( 14 )...( 25 ): >BACH_HUMAN
GRQASSRRLVAG

SEQ ID NO: 20330 - protein, 12 aa, Homo sapiens
  ( 15 )...( 26 ): >BACH_HUMAN
RQASSRRLVAGQ

SEQ ID NO: 20331 - protein, 12 aa, Homo sapiens
  ( 150 )...( 161 ): >BACH_HUMAN
GAKKLTNKATLW

SEQ ID NO: 20332 - protein, 12 aa, Homo sapiens
  ( 151 )...( 162 ): >BACH_HUMAN
AKKLTNKATLWY

SEQ ID NO: 20333 - protein, 12 aa, Homo sapiens
  ( 152 )...( 163 ): >BACH_HUMAN
KKLTNKATLWYV

SEQ ID NO: 20334 - protein, 12 aa, Homo sapiens
  ( 360 )...( 371 ): >BACH_HUMAN
EGKGRYLQMKAK

SEQ ID NO: 20335 - protein, 12 aa, Homo sapiens
  ( 363 )...( 374 ): >BACH_HUMAN
GRYLQMKAKRQG

SEQ ID NO: 20336 - protein, 12 aa, Homo sapiens
  ( 365 )...( 376 ): >BACH_HUMAN
YLQMKAKRQGHA

SEQ ID NO: 20337 - protein, 12 aa, Homo sapiens
  ( 12 )...( 23 ): >BASO_HUMAN
GAARARETRRQP

SEQ ID NO: 20338 - protein, 12 aa, Homo sapiens
  ( 342 )...( 353 ): >BASO_HUMAN
KVKPERNSLGTK

SEQ ID NO: 20339 - protein, 12 aa, Homo sapiens
  ( 343 )...( 354 ): >BASO_HUMAN
VKPERNSLGTKK

SEQ ID NO: 20340 - protein, 12 aa, Homo sapiens
  ( 344 )...( 355 ): >BASO_HUMAN
KPERNSLGTKKG

SEQ ID NO: 20341 - protein, 12 aa, Homo sapiens
  ( 345 )...( 356 ): >BASO_HUMAN
PERNSLGTKKGR

SEQ ID NO: 20342 - protein, 12 aa, Homo sapiens
  ( 346 )...( 357 ): >BASO_HUMAN
ERNSLGTKKGRV

SEQ ID NO: 20343 - protein, 12 aa, Homo sapiens
  ( 347 )...( 358 ): >BASO_HUMAN
RNSLGTKKGRVF

SEQ ID NO: 20344 - protein, 12 aa, Homo sapiens
  ( 349 )...( 360 ): >BASO_HUMAN
SLGTKKGRVFCT

SEQ ID NO: 20345 - protein, 12 aa, Homo sapiens
  ( 531 )...( 542 ): >BASO_HUMAN
ALPKKKSRKSSM

SEQ ID NO: 20346 - protein, 12 aa, Homo sapiens
  ( 535 )...( 546 ): >BASO_HUMAN
KKSRKSSMPIKI

SEQ ID NO: 20347 - protein, 12 aa, Homo sapiens
  ( 726 )...( 737 ): >BASO_HUMAN
KKTFKNACSVKI

SEQ ID NO: 20348 - protein, 12 aa, Homo sapiens
  ( 934 )...( 945 ): >BASO_HUMAN
QKTYSNKGTFRA

SEQ ID NO: 20349 - protein, 12 aa, Homo sapiens
  ( 276 )...( 287 ): >BHB3_HUMAN
APKRMKLDSRGG

SEQ ID NO: 20350 - protein, 12 aa, Homo sapiens
  ( 277 )...( 288 ): >BHB3_HUMAN
PKRMKLDSRGGG

SEQ ID NO: 20351 - protein, 12 aa, Homo sapiens
  ( 278 )...( 289 ): >BHB3_HUMAN
KRMKLDSRGGGS

SEQ ID NO: 20352 - protein, 12 aa, Homo sapiens
  ( 62 )...( 73 ): >BMAL_HUMAN
MSRKLDKLTVLR

SEQ ID NO: 20353 - protein, 12 aa, Homo sapiens
  ( 63 )...( 74 ): >BMAL_HUMAN
SRKLDKLTVLRM

SEQ ID NO: 20354 - protein, 12 aa, Homo sapiens
  ( 64 )...( 75 ): >BMAL_HUMAN
RKLDKLTVLRMA

SEQ ID NO: 20355 - protein, 12 aa, Homo sapiens
  ( 72 )...( 83 ): >BMAL_HUMAN
LRMAVQHMKTLR

SEQ ID NO: 20356 - protein, 12 aa, Homo sapiens
  ( 73 )...( 84 ): >BMAL_HUMAN
RMAVQHMKTLRG

SEQ ID NO: 20357 - protein, 12 aa, Homo sapiens
  ( 228 )...( 239 ): >BMAL_HUMAN
KKKADRKSFCTI

SEQ ID NO: 20358 - protein, 12 aa, Homo sapiens
  ( 104 )...( 115 ): >BRX1_HUMAN
GEPGTKAKKGRR

SEQ ID NO: 20359 - protein, 12 aa, Homo sapiens
  ( 105 )...( 116 ): >BRX1_HUMAN
EPGTKAKKGRRS

SEQ ID NO: 20360 - protein, 12 aa, Homo sapiens
  ( 110 )...( 121 ): >BRX1_HUMAN
AKKGRRSRTVFT

SEQ ID NO: 20361 - protein, 12 aa, Homo sapiens
  ( 111 )...( 122 ): >BRX1_HUMAN
KKGRRSRTVFTE

SEQ ID NO: 20362 - protein, 12 aa, Homo sapiens
  ( 112 )...( 123 ): >BRX1_HUMAN
KGRRSRTVFTEL

SEQ ID NO: 20363 - protein, 12 aa, Homo sapiens
  ( 165 )...( 176 ): >BRX1_HUMAN
RMKWKKIVLQGG

SEQ ID NO: 20364 - protein, 12 aa, Homo sapiens
  ( 166 )...( 177 ): >BRX1_HUMAN
MKWKKIVLQGGG

SEQ ID NO: 20365 - protein, 12 aa, Homo sapiens
  ( 167 )...( 178 ): >BRX1_HUMAN
KWKKIVLQGGGL

SEQ ID NO: 20366 - protein, 12 aa, Homo sapiens
  ( 178 )...( 189 ): >BRX1_HUMAN
LESPTKPKGRPK

SEQ ID NO: 20367 - protein, 12 aa, Homo sapiens
  ( 179 )...( 190 ): >BRX1_HUMAN
ESPTKPKGRPKK

SEQ ID NO: 20368 - protein, 12 aa, Homo sapiens
  ( 182 )...( 193 ): >BRX1_HUMAN
TKPKGRPKKNSI

SEQ ID NO: 20369 - protein, 12 aa, Homo sapiens
  ( 120 )...( 131 ): >BRX2_HUMAN
LMGLEKKFQKQK

SEQ ID NO: 20370 - protein, 12 aa, Homo sapiens
  ( 160 )...( 171 ): >BRX2_HUMAN
RMKWKKMVLKGG

SEQ ID NO: 20371 - protein, 12 aa, Homo sapiens
  ( 161 )...( 172 ): >BRX2_HUMAN
MKWKKMVLKGGQ

SEQ ID NO: 20372 - protein, 12 aa, Homo sapiens
  ( 162 )...( 173 ): >BRX2_HUMAN
KWKKMVLKGGQE

SEQ ID NO: 20373 - protein, 12 aa, Homo sapiens
  ( 172 )...( 183 ): >BRX2_HUMAN
QEAPTKPKGRPK

SEQ ID NO: 20374 - protein, 12 aa, Homo sapiens
  ( 173 )...( 184 ): >BRX2_HUMAN
EAPTKPKGRPKK

SEQ ID NO: 20375 - protein, 12 aa, Homo sapiens
  ( 174 )...( 185 ): >BRX2_HUMAN
APTKPKGRPKKN

SEQ ID NO: 20376 - protein, 12 aa, Homo sapiens
  ( 176 )...( 187 ): >BRX2_HUMAN
TKPKGRPKKNSI

SEQ ID NO: 20377 - protein, 12 aa, Homo sapiens
  ( 2 )...( 13 ): >BT31_HUMAN
KETIMNQKLTKR

SEQ ID NO: 20378 - protein, 12 aa, Homo sapiens
  ( 4 )...( 15 ): >BT31_HUMAN
TIMNQKLTKRQA

SEQ ID NO: 20379 - protein, 12 aa, Homo sapiens
  ( 11 )...( 22 ): >BT31_HUMAN
TKRQAEVHTGRK

SEQ ID NO: 20380 - protein, 12 aa, Homo sapiens
  ( 12 )...( 23 ): >BT31_HUMAN
KRQAEVHTGRKG

SEQ ID NO: 20381 - protein, 12 aa, Homo sapiens
  ( 17 )...( 28 ): >BT31_HUMAN
VHTGRKGTAHRK

SEQ ID NO: 20382 - protein, 12 aa, Homo sapiens
  ( 19 )...( 30 ): >BT31_HUMAN
TGRKGTAHRKKV

SEQ ID NO: 20383 - protein, 12 aa, Homo sapiens
  ( 20 )...( 31 ): >BT31_HUMAN
GRKGTAHRKKVV

SEQ ID NO: 20384 - protein, 12 aa, Homo sapiens
  ( 21 )...( 32 ): >BT31_HUMAN
RKGTAHRKKVVH

SEQ ID NO: 20385 - protein, 12 aa, Homo sapiens
  ( 22 )...( 33 ): >BT31_HUMAN
KGTAHRKKVVHT

SEQ ID NO: 20386 - protein, 12 aa, Homo sapiens
  ( 38 )...( 49 ): >BT31_HUMAN
KKFQFSLKKLGV

SEQ ID NO: 20387 - protein, 12 aa, Homo sapiens
  ( 39 )...( 50 ): >BT31_HUMAN
KFQFSLKKLGVN

SEQ ID NO: 20388 - protein, 12 aa, Homo sapiens
  ( 10 )...( 21 ): >BT32_HUMAN
KLAKLQAKVPIG

SEQ ID NO: 20389 - protein, 12 aa, Homo sapiens
  ( 17 )...( 28 ): >BT32_HUMAN
KVPIGGTAHRKK

SEQ ID NO: 20390 - protein, 12 aa, Homo sapiens
  ( 18 )...( 29 ): >BT32_HUMAN
VPIGGTAHRKKV

SEQ ID NO: 20391 - protein, 12 aa, Homo sapiens
  ( 19 )...( 30 ): >BT32_HUMAN
PIGGTAHRKKVV

SEQ ID NO: 20392 - protein, 12 aa, Homo sapiens
  ( 21 )...( 32 ): >BT32_HUMAN
GGTAHRKKVVHR

SEQ ID NO: 20393 - protein, 12 aa, Homo sapiens
  ( 22 )...( 33 ): >BT32_HUMAN
GTAHRKKVVHRT

SEQ ID NO: 20394 - protein, 12 aa, Homo sapiens
  ( 23 )...( 34 ): >BT32_HUMAN
TAHRKKVVHRTA

SEQ ID NO: 20395 - protein, 12 aa, Homo sapiens
  ( 24 )...( 35 ): >BT32_HUMAN
AHRKKVVHRTAT

SEQ ID NO: 20396 - protein, 12 aa, Homo sapiens
  ( 25 )...( 36 ): >BT32_HUMAN
HRKKVVHRTATA

SEQ ID NO: 20397 - protein, 12 aa, Homo sapiens
  ( 26 )...( 37 ): >BT32_HUMAN
RKKVVHRTATAN

SEQ ID NO: 20398 - protein, 12 aa, Homo sapiens
  ( 30 )...( 41 ): >BT32_HUMAN
VHRTATANDKKR

SEQ ID NO: 20399 - protein, 12 aa, Homo sapiens
  ( 3 )...( 14 ): >BT33_HUMAN
LSRGSLLNTRPR

SEQ ID NO: 20400 - protein, 12 aa, Homo sapiens
  ( 4 )...( 15 ): >BT33_HUMAN
SRGSLLNTRPRI

SEQ ID NO: 20401 - protein, 12 aa, Homo sapiens
  ( 5 )...( 16 ): >BT33_HUMAN
RGSLLNTRPRIT

SEQ ID NO: 20402 - protein, 12 aa, Homo sapiens
  ( 38 )...( 49 ): >BT33_HUMAN
PGKLAKLQAQVR

SEQ ID NO: 20403 - protein, 12 aa, Homo sapiens
  ( 39 )...( 50 ): >BT33_HUMAN
GKLAKLQAQVRI

SEQ ID NO: 20404 - protein, 12 aa, Homo sapiens
  ( 40 )...( 51 ): >BT33_HUMAN
KLAKLQAQVRIG

SEQ ID NO: 20405 - protein, 12 aa, Homo sapiens
  ( 42 )...( 53 ): >BT33_HUMAN
AKLQAQVRIGGK

SEQ ID NO: 20406 - protein, 12 aa, Homo sapiens
  ( 47 )...( 58 ): >BT33_HUMAN
QVRIGGKGTAHR

SEQ ID NO: 20407 - protein, 12 aa, Homo sapiens
  ( 48 )...( 59 ): >BT33_HUMAN
VRIGGKGTAHRK

SEQ ID NO: 20408 - protein, 12 aa, Homo sapiens
  ( 49 )...( 60 ): >BT33_HUMAN
RIGGKGTAHRKK

SEQ ID NO: 20409 - protein, 12 aa, Homo sapiens
  ( 50 )...( 61 ): >BT33_HUMAN
IGGKGTAHRKKK

SEQ ID NO: 20410 - protein, 12 aa, Homo sapiens
  ( 51 )...( 62 ): >BT33_HUMAN
GGKGTAHRKKKV

SEQ ID NO: 20411 - protein, 12 aa, Homo sapiens
  ( 52 )...( 63 ): >BT33_HUMAN
GKGTAHRKKKVF

SEQ ID NO: 20412 - protein, 12 aa, Homo sapiens
  ( 58 )...( 69 ): >BT33_HUMAN
RKKKVFHRTATA

SEQ ID NO: 20413 - protein, 12 aa, Homo sapiens
  ( 72 )...( 83 ): >BT33_HUMAN
KKLQFSLKKLQV

SEQ ID NO: 20414 - protein, 12 aa, Homo sapiens
  ( 73 )...( 84 ): >BT33_HUMAN
KLQFSLKKLQVN

SEQ ID NO: 20415 - protein, 12 aa, Homo sapiens
  ( 181 )...( 192 ): >BT33_HUMAN
RILMRLPGMRQA

SEQ ID NO: 20416 - protein, 12 aa, Homo sapiens
  ( 190 )...( 201 ): >BT33_HUMAN
RQAELSRLLKKI

SEQ ID NO: 20417 - protein, 12 aa, Homo sapiens
  ( 191 )...( 202 ): >BT33_HUMAN
QAELSRLLKKIK

SEQ ID NO: 20418 - protein, 12 aa, Homo sapiens
  ( 192 )...( 203 ): >BT33_HUMAN
AELSRLLKKIKL

SEQ ID NO: 20419 - protein, 12 aa, Homo sapiens
  ( 229 )...( 240 ): >BTE1_HUMAN
HPSMIKRSKKAL

SEQ ID NO: 20420 - protein, 12 aa, Homo sapiens
  ( 230 )...( 241 ): >BTE1_HUMAN
PSMIKRSKKALA

SEQ ID NO: 20421 - protein, 12 aa, Homo sapiens
  ( 231 )...( 242 ): >BTE1_HUMAN
SMIKRSKKALAN

SEQ ID NO: 20422 - protein, 12 aa, Homo sapiens
  ( 232 )...( 243 ): >BTE1_HUMAN
MIKRSKKALANA

SEQ ID NO: 20423 - protein, 12 aa, Homo sapiens
  ( 233 )...( 244 ): >BTE1_HUMAN
IKRSKKALANAL

SEQ ID NO: 20424 - protein, 11 aa, Homo sapiens
  ( 234 )...( 245 ): >BTE1_HUMAN
KRSKKALANAL

SEQ ID NO: 20425 - protein, 12 aa, Homo sapiens
  ( 216 )...( 227 ): >BTE4_HUMAN
LLRRPGARSTSP

SEQ ID NO: 20426 - protein, 12 aa, Homo sapiens
  ( 54 )...( 65 ): >BTF3_HUMAN
KLAKLQAQVRIG

SEQ ID NO: 20427 - protein, 12 aa, Homo sapiens
  ( 56 )...( 67 ): >BTF3_HUMAN
AKLQAQVRIGGK

SEQ ID NO: 20428 - protein, 12 aa, Homo sapiens
  ( 61 )...( 72 ): >BTF3_HUMAN
QVRIGGKGTARR

SEQ ID NO: 20429 - protein, 12 aa, Homo sapiens
  ( 72 )...( 83 ): >BTF3_HUMAN
RKKKVVHRTATA

SEQ ID NO: 20430 - protein, 12 aa, Homo sapiens
  ( 86 )...( 97 ): >BTF3_HUMAN
KKLQFSLKKLGV

SEQ ID NO: 20431 - protein, 12 aa, Homo sapiens
  ( 87 )...( 98 ): >BTF3_HUMAN
KLQFSLKKLGVN

SEQ ID NO: 20432 - protein, 12 aa, Homo sapiens
  ( 66 )...( 77 ): >CBFA_HUMAN
RIMKNAIPQTGK

SEQ ID NO: 20433 - protein, 12 aa, Homo sapiens
  ( 69 )...( 80 ): >CBFA_HUMAN
KNAIPQTGKIAK

SEQ ID NO: 20434 - protein, 12 aa, Homo sapiens
  ( 304 )...( 315 ): >CBFB_HUMAN
HRHAMARKRGEG

SEQ ID NO: 20435 - protein, 12 aa, Homo sapiens
  ( 305 )...( 316 ): >CBFB_HUMAN
RHAMARKRGEGG

SEQ ID NO: 20436 - protein, 12 aa, Homo sapiens
  ( 306 )...( 317 ): >CBFB_HUMAN
HAMARKRGEGGR

SEQ ID NO: 20437 - protein, 12 aa, Homo sapiens
  ( 307 )...( 318 ): >CBFB_HUMAN
AMARKRGEGGRF

SEQ ID NO: 20438 - protein, 12 aa, Homo sapiens
  ( 308 )...( 319 ): >CBFB_HUMAN
MARKRGEGGRFF

SEQ ID NO: 20439 - protein, 12 aa, Homo sapiens
  ( 309 )...( 320 ): >CBFB_HUMAN
ARKRGEGGRFFS

SEQ ID NO: 20440 - protein, 12 aa, Homo sapiens
  ( 310 )...( 321 ): >CBFB_HUMAN
RKRGEGGRFFSP

SEQ ID NO: 20441 - protein, 12 aa, Homo sapiens
  ( 39 )...( 50 ): >CBFC_HUMAN
RVQELPLARIKK

SEQ ID NO: 20442 - protein, 12 aa, Homo sapiens
  ( 42 )...( 53 ): >CBFC_HUMAN
ELPLARIKKIMK

SEQ ID NO: 20443 - protein, 12 aa, Homo sapiens
  ( 44 )...( 55 ): >CBFC_HUMAN
PLARIKKIMKLD

SEQ ID NO: 20444 - protein, 12 aa, Homo sapiens
  ( 276 )...( 287 ): >CBFC_HUMAN
QGQRNASQGKPR

SEQ ID NO: 20445 - protein, 12 aa, Homo sapiens
  ( 281 )...( 292 ): >CBFC_HUMAN
ASQGKPRRCLKE

SEQ ID NO: 20446 - protein, 12 aa, Homo sapiens
  ( 282 )...( 293 ): >CBFC_HUMAN
SQGKPRRCLKET

SEQ ID NO: 20447 - protein, 12 aa, Homo sapiens
  ( 283 )...( 294 ): >CBFC_HUMAN
QGKPRRCLKETL

SEQ ID NO: 20448 - protein, 12 aa, Homo sapiens
  ( 284 )...( 295 ): >CBFC_HUMAN
GKPRRCLKETLQ

SEQ ID NO: 20449 - protein, 12 aa, Homo sapiens
  ( 285 )...( 296 ): >CBFC_HUMAN
KPRRCLKETLQI

SEQ ID NO: 20450 - protein, 12 aa, Homo sapiens
  ( 310 )...( 321 ): >CD19_HUMAN
ILHLQRALVLRR

SEQ ID NO: 20451 - protein, 12 aa, Homo sapiens
  ( 32 )...( 43 ): >CDK7_HUMAN
KNTNQIVAIKKI

SEQ ID NO: 20452 - protein, 12 aa, Homo sapiens
  ( 33 )...( 44 ): >CDK7_HUMAN
NTNQIVAIKKIK

SEQ ID NO: 20453 - protein, 12 aa, Homo sapiens
  ( 34 )...( 45 ): >CDK7_HUMAN
TNQIVAIKKIKL

SEQ ID NO: 20454 - protein, 12 aa, Homo sapiens
  ( 35 )...( 46 ): >CDK7_HUMAN
NQIVAIKKIKLG

SEQ ID NO: 20455 - protein, 12 aa, Homo sapiens
  ( 37 )...( 48 ): >CDK7_HUMAN
IVAIKKIKLGHR

SEQ ID NO: 20456 - protein, 12 aa, Homo sapiens
  ( 38 )...( 49 ): >CDK7_HUMAN
VAIKKIKLGHRS

SEQ ID NO: 20457 - protein, 12 aa, Homo sapiens
  ( 41 )...( 52 ): >CDK7_HUMAN
KKIKLGHRSEAK

SEQ ID NO: 20458 - protein, 12 aa, Homo sapiens
  ( 282 )...( 293 ): >CDK7_HUMAN
ARITATQALKMK

SEQ ID NO: 20459 - protein, 12 aa, Homo sapiens
  ( 283 )...( 294 ): >CDK7_HUMAN
RITATQALKMKY

SEQ ID NO: 20460 - protein, 12 aa, Homo sapiens
  ( 321 )...( 332 ): >CDK7_HUMAN
SNPALAIKRKRT

SEQ ID NO: 20461 - protein, 12 aa, Homo sapiens
  ( 322 )...( 333 ): >CDK7_HUMAN
NPALAIKRKRTE

SEQ ID NO: 20462 - protein, 12 aa, Homo sapiens
  ( 323 )...( 334 ): >CDK7_HUMAN
PALAIKRKRTEA

SEQ ID NO: 20463 - protein, 12 aa, Homo sapiens
  ( 324 )...( 335 ): >CDK7_HUMAN
ALAIKRKRTEAL

SEQ ID NO: 20464 - protein, 12 aa, Homo sapiens
  ( 294 )...( 305 ): >CEBA_HUMAN
IAVRKSRDKAKQ

SEQ ID NO: 20465 - protein, 12 aa, Homo sapiens
  ( 59 )...( 70 ): >CEBE_HUMAN
AVKPAPEARRLK

SEQ ID NO: 20466 - protein, 12 aa, Homo sapiens
  ( 60 )...( 71 ): >CEBE_HUMAN
VKPAPEARRLKG

SEQ ID NO: 20467 - protein, 12 aa, Homo sapiens
  ( 191 )...( 202 ): >CEBE_HUMAN
GPLHKGKKAVNK

SEQ ID NO: 20468 - protein, 12 aa, Homo sapiens
  ( 225 )...( 236 ): >CEBE_HUMAN
AKRRILETQQKV

SEQ ID NO: 20469 - protein, 12 aa, Homo sapiens
  ( 226 )...( 237 ): >CEBE_HUMAN
KRRILETQQKVL

SEQ ID NO: 20470 - protein, 12 aa, Homo sapiens
  ( 72 )...( 83 ): >CEBG_HUMAN
NNMAVKKSRLKS

SEQ ID NO: 20471 - protein, 12 aa, Homo sapiens
  ( 73 )...( 84 ): >CEBG_HUMAN
NMAVKKSRLKSK

SEQ ID NO: 20472 - protein, 12 aa, Homo sapiens
  ( 74 )...( 85 ): >CEBG_HUMAN
MAVKKSRLKSKQ

SEQ ID NO: 20473 - protein, 12 aa, Homo sapiens
  ( 75 )...( 86 ): >CEBG_HUMAN
AVKKSRLKSKQK

SEQ ID NO: 20474 - protein, 12 aa, Homo sapiens
  ( 76 )...( 87 ): >CEBG_HUMAN
VKKSRLKSKQKA

SEQ ID NO: 20475 - protein, 12 aa, Homo sapiens
  ( 80 )...( 91 ): >CEBG_HUMAN
RLKSKQKAQDTL

SEQ ID NO: 20476 - protein, 12 aa, Homo sapiens
  ( 92 )...( 103 ): >CGA1_HUMAN
QYRRTCGQGITR

SEQ ID NO: 20477 - protein, 12 aa, Homo sapiens
  ( 93 )...( 104 ): >CGA1_HUMAN
YRRTCGQGITRI

SEQ ID NO: 20478 - protein, 12 aa, Homo sapiens
  ( 94 )...( 105 ): >CGA1_HUMAN
RRTCGQGITRIR

SEQ ID NO: 20479 - protein, 12 aa, Homo sapiens
  ( 95 )...( 106 ): >CGA1_HUMAN
RTCGQGITRIRC

SEQ ID NO: 20480 - protein, 12 aa, Homo sapiens
  ( 349 )...( 360 ): >CGA1_HUMAN
LQYLRRQGVCVR

SEQ ID NO: 20481 - protein, 12 aa, Homo sapiens
  ( 350 )...( 361 ): >CGA1_HUMAN
QYLRRQGVCVRT

SEQ ID NO: 20482 - protein, 12 aa, Homo sapiens
  ( 65 )...( 76 ): >CLOC_HUMAN
ARKMDKSTVLQK

SEQ ID NO: 20483 - protein, 12 aa, Homo sapiens
  ( 195 )...( 206 ): >CNO7_HUMAN
VKYLMKSCKNLK

SEQ ID NO: 20484 - protein, 12 aa, Homo sapiens
  ( 195 )...( 206 ): >CNT8_HUMAN
VKYLMKSCKNLK

SEQ ID NO: 20485 - protein, 12 aa, Homo sapiens
  ( 1 )...( 12 ): >CUT2_HUMAN
VQPLRKAKLLCV

SEQ ID NO: 20486 - protein, 12 aa, Homo sapiens
  ( 2 )...( 13 ): >CUT2_HUMAN
QPLRKAKLLCVR

SEQ ID NO: 20487 - protein, 12 aa, Homo sapiens
  ( 3 )...( 14 ): >CUT2_HUMAN
PLRKAKLLCVRV

SEQ ID NO: 20488 - protein, 12 aa, Homo sapiens
  ( 4 )...( 15 ): >CUT2_HUMAN
LRKAKLLCVRVS

SEQ ID NO: 20489 - protein, 12 aa, Homo sapiens
  ( 5 )...( 16 ): >CUT2_HUMAN
RKAKLLCVRVSI

SEQ ID NO: 20490 - protein, 12 aa, Homo sapiens
  ( 6 )...( 17 ): >CUT2_HUMAN
KAKLLCVRVSIA

SEQ ID NO: 20491 - protein, 12 aa, Homo sapiens
  ( 8 )...( 19 ): >CUT2_HUMAN
KLLCVRVSIAPK

SEQ ID NO: 20492 - protein, 12 aa, Homo sapiens
  ( 616 )...( 627 ): >CUT2_HUMAN
PWRKLTVKGKEP

SEQ ID NO: 20493 - protein, 12 aa, Homo sapiens
  ( 618 )...( 629 ): >CUT2_HUMAN
RKLTVKGKEPFI

SEQ ID NO: 20494 - protein, 12 aa, Homo sapiens
  ( 622 )...( 633 ): >CUT2_HUMAN
VKGKEPFIKMKQ

SEQ ID NO: 20495 - protein, 12 aa, Homo sapiens
  ( 641 )...( 652 ): >CUT2_HUMAN
VLALRTIQVRQR

SEQ ID NO: 20496 - protein, 12 aa, Homo sapiens
  ( 642 )...( 653 ): >CUT2_HUMAN
LALRTIQVRQRG

SEQ ID NO: 20497 - protein, 12 aa, Homo sapiens
  ( 643 )...( 654 ): >CUT2_HUMAN
ALRTIQVRQRGS

SEQ ID NO: 20498 - protein, 12 aa, Homo sapiens
  ( 644 )...( 655 ): >CUT2_HUMAN
LRTIQVRQRGSI

SEQ ID NO: 20499 - protein, 12 aa, Homo sapiens
  ( 645 )...( 656 ): >CUT2_HUMAN
RTIQVRQRGSIT

SEQ ID NO: 20500 - protein, 12 aa, Homo sapiens
  ( 647 )...( 658 ): >CUT2_HUMAN
IQVRQRGSITPR

SEQ ID NO: 20501 - protein, 12 aa, Homo sapiens
  ( 648 )...( 659 ): >CUT2_HUMAN
QVRQRGSITPRI

SEQ ID NO: 20502 - protein, 12 aa, Homo sapiens
  ( 649 )...( 660 ): >CUT2_HUMAN
VRQRGSITPRIR

SEQ ID NO: 20503 - protein, 12 aa, Homo sapiens
  ( 650 )...( 661 ): >CUT2_HUMAN
RQRGSITPRIRT

SEQ ID NO: 20504 - protein, 12 aa, Homo sapiens
  ( 651 )...( 662 ): >CUT2_HUMAN
QRGSITPRIRTP

SEQ ID NO: 20505 - protein, 12 aa, Homo sapiens
  ( 784 )...( 795 ): >CUT2_HUMAN
AAFVQSIIRKVK

SEQ ID NO: 20506 - protein, 12 aa, Homo sapiens
  ( 785 )...( 796 ): >CUT2_HUMAN
AFVQSIIRKVKS

SEQ ID NO: 20507 - protein, 12 aa, Homo sapiens
  ( 920 )...( 931 ): >CUT2_HUMAN
LTRQVKEKLAKN

SEQ ID NO: 20508 - protein, 12 aa, Homo sapiens
  ( 921 )...( 932 ): >CUT2_HUMAN
TRQVKEKLAKNG

SEQ ID NO: 20509 - protein, 12 aa, Homo sapiens
  ( 922 )...( 933 ): >CUT2_HUMAN
RQVKEKLAKNGI

SEQ ID NO: 20510 - protein, 12 aa, Homo sapiens
  ( 925 )...( 936 ): >CUT2_HUMAN
KEKLAKNGICQR

SEQ ID NO: 20511 - protein, 12 aa, Homo sapiens
  ( 927 )...( 938 ): >CUT2_HUMAN
KLAKNGICQRIF

SEQ ID NO: 20512 - protein, 12 aa, Homo sapiens
  ( 1113 )...( 1124 ): >CUT2_HUMAN
KLSLKGREPFVR

SEQ ID NO: 20513 - protein, 12 aa, Homo sapiens
  ( 1147 )...( 1158 ): >CUT2_HUMAN
KAYLKRRYGLIS

SEQ ID NO: 20514 - protein, 12 aa, Homo sapiens
  ( 1148 )...( 1159 ): >CUT2_HUMAN
AYLKRRYGLIST

SEQ ID NO: 20515 - protein, 12 aa, Homo sapiens
  ( 1149 )...( 1160 ): >CUT2_HUMAN
YLKRRYGLISTG

SEQ ID NO: 20516 - protein, 12 aa, Homo sapiens
  ( 1150 )...( 1161 ): >CUT2_HUMAN
LKRRYGLISTGS

SEQ ID NO: 20517 - protein, 12 aa, Homo sapiens
  ( 1182 )...( 1193 ): >CUT2_HUMAN
LSLLQIKKPRVV

SEQ ID NO: 20518 - protein, 12 aa, Homo sapiens
  ( 1183 )...( 1194 ): >CUT2_HUMAN
SLLQIKKPRVVL

SEQ ID NO: 20519 - protein, 12 aa, Homo sapiens
  ( 1185 )...( 1196 ): >CUT2_HUMAN
LQIKKPRVVLAP

SEQ ID NO: 20520 - protein, 12 aa, Homo sapiens
  ( 29 )...( 40 ): >CYCH_HUMAN
KFRCKAVANGKV

SEQ ID NO: 20521 - protein, 12 aa, Homo sapiens
  ( 284 )...( 295 ): >CYCH_HUMAN
ELALNVITKKRK

SEQ ID NO: 20522 - protein, 12 aa, Homo sapiens
  ( 285 )...( 296 ): >CYCH_HUMAN
LALNVITKKRKG

SEQ ID NO: 20523 - protein, 12 aa, Homo sapiens
  ( 286 )...( 297 ): >CYCH_HUMAN
ALNVITKKRKGY

SEQ ID NO: 20524 - protein, 12 aa, Homo sapiens
  ( 287 )...( 298 ): >CYCH_HUMAN
LNVITKKRKGYE

SEQ ID NO: 20525 - protein, 12 aa, Homo sapiens
  ( 205 )...( 216 ): >DEAF_HUMAN
VRCRNISGTLYK

SEQ ID NO: 20526 - protein, 12 aa, Homo sapiens
  ( 208 )...( 219 ): >DEAF_HUMAN
RNISGTLYKNRL

SEQ ID NO: 20527 - protein, 12 aa, Homo sapiens
  ( 213 )...( 224 ): >DEAF_HUMAN
TLYKNRLGSGGR

SEQ ID NO: 20528 - protein, 12 aa, Homo sapiens
  ( 214 )...( 225 ): >DEAF_HUMAN
LYKNRLGSGGRG

SEQ ID NO: 20529 - protein, 12 aa, Homo sapiens
  ( 215 )...( 226 ): >DEAF_HUMAN
YKNRLGSGGRGR

SEQ ID NO: 20530 - protein, 12 aa, Homo sapiens
  ( 254 )...( 265 ): >DEAF_HUMAN
RSIRYAGRPLQC

SEQ ID NO: 20531 - protein, 12 aa, Homo sapiens
  ( 291 )...( 302 ): >DEAF_HUMAN
SGPVRLFVPYKR

SEQ ID NO: 20532 - protein, 12 aa, Homo sapiens
  ( 79 )...( 90 ): >E2F1_HUMAN
PRPALGRPPVKR

SEQ ID NO: 20533 - protein, 12 aa, Homo sapiens
  ( 81 )...( 92 ): >E2F1_HUMAN
PALGRPPVKRRL

SEQ ID NO: 20534 - protein, 12 aa, Homo sapiens
  ( 82 )...( 93 ): >E2F1_HUMAN
ALGRPPVKRRLD

SEQ ID NO: 20535 - protein, 12 aa, Homo sapiens
  ( 83 )...( 94 ): >E2F1_HUMAN
LGRPPVKRRLDL

SEQ ID NO: 20536 - protein, 12 aa, Homo sapiens
  ( 106 )...( 117 ): >E2F1_HUMAN
GPARGRGRHPGK

SEQ ID NO: 20537 - protein, 12 aa, Homo sapiens
  ( 107 )...( 118 ): >E2F1_HUMAN
PARGRGRHPGKG

SEQ ID NO: 20538 - protein, 12 aa, Homo sapiens
  ( 108 )...( 119 ): >E2F1_HUMAN
ARGRGRHPGKGV

SEQ ID NO: 20539 - protein, 12 aa, Homo sapiens
  ( 111 )...( 122 ): >E2F1_HUMAN
RGRHPGKGVKSP

SEQ ID NO: 20540 - protein, 12 aa, Homo sapiens
  ( 117 )...( 128 ): >E2F1_HUMAN
KGVKSPGEKSRY

SEQ ID NO: 20541 - protein, 12 aa, Homo sapiens
  ( 156 )...( 167 ): >E2F1_HUMAN
AAEVLKVQKRRI

SEQ ID NO: 20542 - protein, 12 aa, Homo sapiens
  ( 157 )...( 168 ): >E2F1_HUMAN
AEVLKVQKRRIY

SEQ ID NO: 20543 - protein, 12 aa, Homo sapiens
  ( 76 )...( 87 ): >E2F2_HUMAN
RCLPAGRLPAKR

SEQ ID NO: 20544 - protein, 12 aa, Homo sapiens
  ( 78 )...( 89 ): >E2F2_HUMAN
LPAGRLPAKRKL

SEQ ID NO: 20545 - protein, 12 aa, Homo sapiens
  ( 79 )...( 90 ): >E2F2_HUMAN
PAGRLPAKRKLD

SEQ ID NO: 20546 - protein, 12 aa, Homo sapiens
  ( 80 )...( 91 ): >E2F2_HUMAN
AGRLPAKRKLDL

SEQ ID NO: 20547 - protein, 12 aa, Homo sapiens
  ( 176 )...( 187 ): >E2F2_HUMAN
LEGIQLIRKKAK

SEQ ID NO: 20548 - protein, 12 aa, Homo sapiens
  ( 177 )...( 188 ): >E2F2_HUMAN
EGIQLIRKKAKN

SEQ ID NO: 20549 - protein, 12 aa, Homo sapiens
  ( 178 )...( 189 ): >E2F2_HUMAN
GIQLIRKKAKNN

SEQ ID NO: 20550 - protein, 12 aa, Homo sapiens
  ( 185 )...( 196 ): >E2F2_HUMAN
KAKNNIQWVGRG

SEQ ID NO: 20551 - protein, 12 aa, Homo sapiens
  ( 151 )...( 162 ): >E2F3_HUMAN
KTPKGKGRAALR

SEQ ID NO: 20552 - protein, 12 aa, Homo sapiens
  ( 154 )...( 165 ): >E2F3_HUMAN
KGKGRAALRSPD

SEQ ID NO: 20553 - protein, 12 aa, Homo sapiens
  ( 205 )...( 216 ): >E2F3_HUMAN
NKAAEVLKVQKR

SEQ ID NO: 20554 - protein, 12 aa, Homo sapiens
  ( 206 )...( 217 ): >E2F3_HUMAN
KAAEVLKVQKRR

SEQ ID NO: 20555 - protein, 12 aa, Homo sapiens
  ( 207 )...( 218 ): >E2F3_HUMAN
AAEVLKVQKRRI

SEQ ID NO: 20556 - protein, 12 aa, Homo sapiens
  ( 208 )...( 219 ): >E2F3_HUMAN
AEVLKVQKRRIY

SEQ ID NO: 20557 - protein, 12 aa, Homo sapiens
  ( 227 )...( 238 ): >E2F3_HUMAN
GIHLIKKKSKNN

SEQ ID NO: 20558 - protein, 12 aa, Homo sapiens
  ( 46 )...( 57 ): >E2F4_HUMAN
AADTLAVRQKRR

SEQ ID NO: 20559 - protein, 12 aa, Homo sapiens
  ( 47 )...( 58 ): >E2F4_HUMAN
ADTLAVRQKRRI

SEQ ID NO: 20560 - protein, 12 aa, Homo sapiens
  ( 73 )...( 84 ): >E2F4_HUMAN
KKSKNSIQWKGV

SEQ ID NO: 20561 - protein, 12 aa, Homo sapiens
  ( 74 )...( 85 ): >E2F4_HUMAN
KSKNSIQWKGVG

SEQ ID NO: 20562 - protein, 12 aa, Homo sapiens
  ( 79 )...( 90 ): >E2F5_HUMAN
AADTLAVRQKRR

SEQ ID NO: 20563 - protein, 12 aa, Homo sapiens
  ( 80 )...( 91 ): >E2F5_HUMAN
ADTLAVRQKRRI

SEQ ID NO: 20564 - protein, 12 aa, Homo sapiens
  ( 106 )...( 117 ): >E2F5_HUMAN
KKSKNSIQWKGV

SEQ ID NO: 20565 - protein, 12 aa, Homo sapiens
  ( 107 )...( 118 ): >E2F5_HUMAN
KSKNSIQWKGVG

SEQ ID NO: 20566 - protein, 12 aa, Homo sapiens
  ( 4 )...( 15 ): >E2F6_HUMAN
QRPARKLPSLLL

SEQ ID NO: 20567 - protein, 12 aa, Homo sapiens
  ( 47 )...( 58 ): >E2F6_HUMAN
NVQYVSMRKALK

SEQ ID NO: 20568 - protein, 12 aa, Homo sapiens
  ( 48 )...( 59 ): >E2F6_HUMAN
VQYVSMRKALKV

SEQ ID NO: 20569 - protein, 12 aa, Homo sapiens
  ( 49 )...( 60 ): >E2F6_HUMAN
QYVSMRKALKVK

SEQ ID NO: 20570 - protein, 12 aa, Homo sapiens
  ( 50 )...( 61 ): >E2F6_HUMAN
YVSMRKALKVKR

SEQ ID NO: 20571 - protein, 12 aa, Homo sapiens
  ( 51 )...( 62 ): >E2F6_HUMAN
VSMRKALKVKRP

SEQ ID NO: 20572 - protein, 12 aa, Homo sapiens
  ( 56 )...( 67 ): >E2F6_HUMAN
ALKVKRPRFDVS

SEQ ID NO: 20573 - protein, 12 aa, Homo sapiens
  ( 58 )...( 69 ): >E2F6_HUMAN
KVKRPRFDVSLV

SEQ ID NO: 20574 - protein, 12 aa, Homo sapiens
  ( 89 )...( 100 ): >E2F6_HUMAN
LNKVATKLGVRK

SEQ ID NO: 20575 - protein, 12 aa, Homo sapiens
  ( 90 )...( 101 ): >E2F6_HUMAN
NKVATKLGVRKR

SEQ ID NO: 20576 - protein, 12 aa, Homo sapiens
  ( 94 )...( 105 ): >E2F6_HUMAN
TKLGVRKRRVYD

SEQ ID NO: 20577 - protein, 12 aa, Homo sapiens
  ( 96 )...( 107 ): >E2F6_HUMAN
LGVRKRRVYDIT

SEQ ID NO: 20578 - protein, 12 aa, Homo sapiens
  ( 422 )...( 433 ): >EGR2_HUMAN
RQKERKSSAPSA

SEQ ID NO: 20579 - protein, 12 aa, Homo sapiens
  ( 352 )...( 363 ): >EGR3_HUMAN
AKIHLKQKEKKA

SEQ ID NO: 20580 - protein, 12 aa, Homo sapiens
  ( 190 )...( 201 ): >ELF1_HUMAN
TTPNISVKKKNK

SEQ ID NO: 20581 - protein, 12 aa, Homo sapiens
  ( 193 )...( 204 ): >ELF1_HUMAN
NISVKKKNKDGK

SEQ ID NO: 20582 - protein, 12 aa, Homo sapiens
  ( 194 )...( 205 ): >ELF1_HUMAN
ISVKKKNKDGKG

SEQ ID NO: 20583 - protein, 12 aa, Homo sapiens
  ( 197 )...( 208 ): >ELF1_HUMAN
KKKNKDGKGNTI

SEQ ID NO: 20584 - protein, 12 aa, Homo sapiens
  ( 243 )...( 254 ): >ELF1_HUMAN
SKAVSRLWGKHK

SEQ ID NO: 20585 - protein, 12 aa, Homo sapiens
  ( 399 )...( 410 ): >ETS1_HUMAN
KNIIHKTAGKRY

SEQ ID NO: 20586 - protein, 12 aa, Homo sapiens
  ( 400 )...( 411 ): >ETS1_HUMAN
NIIHKTAGKRYV

SEQ ID NO: 20587 - protein, 12 aa, Homo sapiens
  ( 401 )...( 412 ): >ETS1_HUMAN
IIHKTAGKRYVY

SEQ ID NO: 20588 - protein, 12 aa, Homo sapiens
  ( 404 )...( 415 ): >ETS1_HUMAN
KTAGKRYVYRFV

SEQ ID NO: 20589 - protein, 12 aa, Homo sapiens
  ( 405 )...( 416 ): >ETS1_HUMAN
TAGKRYVYRFVC

SEQ ID NO: 20590 - protein, 12 aa, Homo sapiens
  ( 381 )...( 392 ): >EWS_HUMAN
FKQCGVVKMNKR

SEQ ID NO: 20591 - protein, 12 aa, Homo sapiens
  ( 382 )...( 393 ): >EWS_HUMAN
KQCGVVKMNKRT

SEQ ID NO: 20592 - protein, 12 aa, Homo sapiens
  ( 383 )...( 394 ): >EWS_HUMAN
QCGVVKMNKRTG

SEQ ID NO: 20593 - protein, 12 aa, Homo sapiens
  ( 384 )...( 395 ): >EWS_HUMAN
CGVVKMNKRTGQ

SEQ ID NO: 20594 - protein, 12 aa, Homo sapiens
  ( 385 )...( 396 ): >EWS_HUMAN
GVVKMNKRTGQP

SEQ ID NO: 20595 - protein, 12 aa, Homo sapiens
  ( 386 )...( 397 ): >EWS_HUMAN
VVKMNKRTGQPM

SEQ ID NO: 20596 - protein, 12 aa, Homo sapiens
  ( 387 )...( 398 ): >EWS_HUMAN
VKMNKRTGQPMI

SEQ ID NO: 20597 - protein, 12 aa, Homo sapiens
  ( 435 )...( 446 ): >EWS_HUMAN
FQGSKLKVSLAR

SEQ ID NO: 20598 - protein, 12 aa, Homo sapiens
  ( 436 )...( 447 ): >EWS_HUMAN
QGSKLKVSLARK

SEQ ID NO: 20599 - protein, 12 aa, Homo sapiens
  ( 437 )...( 448 ): >EWS_HUMAN
GSKLKVSLARKK

SEQ ID NO: 20600 - protein, 12 aa, Homo sapiens
  ( 438 )...( 449 ): >EWS_HUMAN
SKLKVSLARKKP

SEQ ID NO: 20601 - protein, 12 aa, Homo sapiens
  ( 439 )...( 450 ): >EWS_HUMAN
KLKVSLARKKPP

SEQ ID NO: 20602 - protein, 12 aa, Homo sapiens
  ( 440 )...( 451 ): >EWS_HUMAN
LKVSLARKKPPM

SEQ ID NO: 20603 - protein, 12 aa, Homo sapiens
  ( 441 )...( 452 ): >EWS_HUMAN
KVSLARKKPPMN

SEQ ID NO: 20604 - protein, 12 aa, Homo sapiens
  ( 596 )...( 607 ): >EWS_HUMAN
RGGFRGGRGMDR

SEQ ID NO: 20605 - protein, 12 aa, Homo sapiens
  ( 115 )...( 126 ): >FOS_HUMAN
MTGGRAQSIGRR

SEQ ID NO: 20606 - protein, 12 aa, Homo sapiens
  ( 118 )...( 129 ): >FOS_HUMAN
GRAQSIGRRGKV

SEQ ID NO: 20607 - protein, 12 aa, Homo sapiens
  ( 119 )...( 130 ): >FOS_HUMAN
RAQSIGRRGKVE

SEQ ID NO: 20608 - protein, 12 aa, Homo sapiens
  ( 136 )...( 147 ): >FXD2_HUMAN
ITMAILQSPKKR

SEQ ID NO: 20609 - protein, 12 aa, Homo sapiens
  ( 137 )...( 148 ): >FXD2_HUMAN
TMAILQSPKKRL

SEQ ID NO: 20610 - protein, 12 aa, Homo sapiens
  ( 138 )...( 149 ): >FXD2_HUMAN
MAILQSPKKRLT

SEQ ID NO: 20611 - protein, 12 aa, Homo sapiens
  ( 139 )...( 150 ): >FXD2_HUMAN
AILQSPKKRLTL

SEQ ID NO: 20612 - protein, 12 aa, Homo sapiens
  ( 140 )...( 151 ): >FXD2_HUMAN
ILQSPKKRLTLS

SEQ ID NO: 20613 - protein, 12 aa, Homo sapiens
  ( 72 )...( 83 ): >FXE1_HUMAN
RRLTLGGIYKFI

SEQ ID NO: 20614 - protein, 12 aa, Homo sapiens
  ( 112 )...( 123 ): >FXE1_HUMAN
LKIPREAGRPGK

SEQ ID NO: 20615 - protein, 12 aa, Homo sapiens
  ( 113 )...( 124 ): >FXE1_HUMAN
KIPREAGRPGKG

SEQ ID NO: 20616 - protein, 12 aa, Homo sapiens
  ( 16 )...( 27 ): >FXE2_HUMAN
LCLRAPKPLLRA

SEQ ID NO: 20617 - protein, 12 aa, Homo sapiens
  ( 105 )...( 116 ): >FXE2_HUMAN
RASPRPRTLSLQ

SEQ ID NO: 20618 - protein, 12 aa, Homo sapiens
  ( 106 )...( 117 ): >FXE2_HUMAN
ASPRPRTLSLQR

SEQ ID NO: 20619 - protein, 12 aa, Homo sapiens
  ( 107 )...( 118 ): >FXE2_HUMAN
SPRPRTLSLQRA

SEQ ID NO: 20620 - protein, 12 aa, Homo sapiens
  ( 109 )...( 120 ): >FXE2_HUMAN
RPRTLSLQRAPA

SEQ ID NO: 20621 - protein, 12 aa, Homo sapiens
  ( 205 )...( 216 ): >FXE2_HUMAN
IRRHAMAIGSPR

SEQ ID NO: 20622 - protein, 12 aa, Homo sapiens
  ( 206 )...( 217 ): >FXE2_HUMAN
RRHAMAIGSPRL

SEQ ID NO: 20623 - protein, 12 aa, Homo sapiens
  ( 253 )...( 264 ): >FXE2_HUMAN
CFLKIPREAGRR

SEQ ID NO: 20624 - protein, 12 aa, Homo sapiens
  ( 281 )...( 292 ): >FXE2_HUMAN
ESGSFLRRRKAS

SEQ ID NO: 20625 - protein, 12 aa, Homo sapiens
  ( 282 )...( 293 ): >FXE2_HUMAN
SGSFLRRRKASS

SEQ ID NO: 20626 - protein, 12 aa, Homo sapiens
  ( 283 )...( 294 ): >FXE2_HUMAN
GSFLRRRKASSV

SEQ ID NO: 20627 - protein, 12 aa, Homo sapiens
  ( 284 )...( 295 ): >FXE2_HUMAN
SFLRRRKASSVG

SEQ ID NO: 20628 - protein, 12 aa, Homo sapiens
  ( 285 )...( 296 ): >FXE2_HUMAN
FLRRRKASSVGL

SEQ ID NO: 20629 - protein, 12 aa, Homo sapiens
  ( 286 )...( 297 ): >FXE2_HUMAN
LRRRKASSVGLS

SEQ ID NO: 20630 - protein, 12 aa, Homo sapiens
  ( 287 )...( 298 ): >FXE2_HUMAN
RRRKASSVGLST

SEQ ID NO: 20631 - protein, 12 aa, Homo sapiens
  ( 288 )...( 299 ): >FXE2_HUMAN
RRKASSVGLSTY

SEQ ID NO: 20632 - protein, 12 aa, Homo sapiens
  ( 331 )...( 342 ): >FXE2_HUMAN
RAPSIQAKRAAV

SEQ ID NO: 20633 - protein, 12 aa, Homo sapiens
  ( 88 )...( 99 ): >FXF2_HUMAN
AKKASSGLRRPE

SEQ ID NO: 20634 - protein, 12 aa, Homo sapiens
  ( 89 )...( 100 ): >FXF2_HUMAN
KKASSGLRRPEK

SEQ ID NO: 20635 - protein, 12 aa, Homo sapiens
  ( 90 )...( 101 ): >FXF2_HUMAN
KASSGLRRPEKP

SEQ ID NO: 20636 - protein, 12 aa, Homo sapiens
  ( 158 )...( 169 ): >FXF2_HUMAN
FIKLPKGLGRPG

SEQ ID NO: 20637 - protein, 12 aa, Homo sapiens
  ( 159 )...( 170 ): >FXF2_HUMAN
IKLPKGLGRPGK

SEQ ID NO: 20638 - protein, 12 aa, Homo sapiens
  ( 195 )...( 206 ): >FXF2_HUMAN
GFRRKCQALKPM

SEQ ID NO: 20639 - protein, 12 aa, Homo sapiens
  ( 261 )...( 272 ): >FXO1_HUMAN
SKFAKSRSRAAK

SEQ ID NO: 20640 - protein, 12 aa, Homo sapiens
  ( 266 )...( 277 ): >FXO1_HUMAN
SRSRAAKKKASL

SEQ ID NO: 20641 - protein, 12 aa, Homo sapiens
  ( 267 )...( 278 ): >FXO1_HUMAN
RSRAAKKKASLQ

SEQ ID NO: 20642 - protein, 12 aa, Homo sapiens
  ( 268 )...( 279 ): >FXO1_HUMAN
SRAAKKKASLQS

SEQ ID NO: 20643 - protein, 12 aa, Homo sapiens
  ( 243 )...( 254 ): >FXO3_HUMAN
SGKAPRRRAVSM

SEQ ID NO: 20644 - protein, 12 aa, Homo sapiens
  ( 244 )...( 255 ): >FXO3_HUMAN
GKAPRRRAVSMD

SEQ ID NO: 20645 - protein, 12 aa, Homo sapiens
  ( 257 )...( 268 ): >FXO3_HUMAN
SNKYTKSRGRAA

SEQ ID NO: 20646 - protein, 12 aa, Homo sapiens
  ( 258 )...( 269 ): >FXO3_HUMAN
NKYTKSRGRAAK

SEQ ID NO: 20647 - protein, 12 aa, Homo sapiens
  ( 263 )...( 274 ): >FXO3_HUMAN
SRGRAAKKKAAL

SEQ ID NO: 20648 - protein, 12 aa, Homo sapiens
  ( 266 )...( 277 ): >FXO3_HUMAN
RAAKKKAALQTA

SEQ ID NO: 20649 - protein, 12 aa, Homo sapiens
  ( 287 )...( 298 ): >GABA_HUMAN
INSSAKAAKVQR

SEQ ID NO: 20650 - protein, 12 aa, Homo sapiens
  ( 290 )...( 301 ): >GABA_HUMAN
SAKAAKVQRAPR

SEQ ID NO: 20651 - protein, 12 aa, Homo sapiens
  ( 291 )...( 302 ): >GABA_HUMAN
AKAAKVQRAPRI

SEQ ID NO: 20652 - protein, 12 aa, Homo sapiens
  ( 292 )...( 303 ): >GABA_HUMAN
KAAKVQRAPRIS

SEQ ID NO: 20653 - protein, 12 aa, Homo sapiens
  ( 293 )...( 304 ): >GABA_HUMAN
AAKVQRAPRISG

SEQ ID NO: 20654 - protein, 12 aa, Homo sapiens
  ( 386 )...( 397 ): >GABA_HUMAN
MICKVQGKRFVY

SEQ ID NO: 20655 - protein, 12 aa, Homo sapiens
  ( 387 )...( 398 ): >GABA_HUMAN
ICKVQGKRFVYK

SEQ ID NO: 20656 - protein, 12 aa, Homo sapiens
  ( 390 )...( 401 ): >GABA_HUMAN
VQGKRFVYKFVC

SEQ ID NO: 20657 - protein, 12 aa, Homo sapiens
  ( 58 )...( 69 ): >GABB_HUMAN
LRAGVSRDARTK

SEQ ID NO: 20658 - protein, 12 aa, Homo sapiens
  ( 59 )...( 70 ): >GABB_HUMAN
RAGVSRDARTKV

SEQ ID NO: 20659 - protein, 12 aa, Homo sapiens
  ( 58 )...( 69 ): >GABC_HUMAN
LRAGVSRDARTK

SEQ ID NO: 20660 - protein, 12 aa, Homo sapiens
  ( 59 )...( 70 ): >GABC_HUMAN
RAGVSRDARTKV

SEQ ID NO: 20661 - protein, 12 aa, Homo sapiens
  ( 300 )...( 311 ): >GBX2_HUMAN
AKWKRVKAGNAN

SEQ ID NO: 20662 - protein, 12 aa, Homo sapiens
  ( 301 )...( 312 ): >GBX2_HUMAN
KWKRVKAGNANS

SEQ ID NO: 20663 - protein, 12 aa, Homo sapiens
  ( 302 )...( 313 ): >GBX2_HUMAN
WKRVKAGNANSK

SEQ ID NO: 20664 - protein, 12 aa, Homo sapiens
  ( 303 )...( 314 ): >GBX2_HUMAN
KRVKAGNANSKT

SEQ ID NO: 20665 - protein, 12 aa, Homo sapiens
  ( 83 )...( 94 ): >GCFC_HUMAN
AEPGNGLKPRKR

SEQ ID NO: 20666 - protein, 12 aa, Homo sapiens
  ( 121 )...( 132 ): >GCFC_HUMAN
KVKKSSYSKKIV

SEQ ID NO: 20667 - protein, 12 aa, Homo sapiens
  ( 122 )...( 133 ): >GCFC_HUMAN
VKKSSYSKKIVK

SEQ ID NO: 20668 - protein, 12 aa, Homo sapiens
  ( 123 )...( 134 ): >GCFC_HUMAN
KKSSYSKKIVKL

SEQ ID NO: 20669 - protein, 12 aa, Homo sapiens
  ( 124 )...( 135 ): >GCFC_HUMAN
KSSYSKKIVKLL

SEQ ID NO: 20670 - protein, 12 aa, Homo sapiens
  ( 125 )...( 136 ): >GCFC_HUMAN
SSYSKKIVKLLK

SEQ ID NO: 20671 - protein, 12 aa, Homo sapiens
  ( 126 )...( 137 ): >GCFC_HUMAN
SYSKKIVKLLKK

SEQ ID NO: 20672 - protein, 12 aa, Homo sapiens
  ( 127 )...( 138 ): >GCFC_HUMAN
YSKKIVKLLKKE

SEQ ID NO: 20673 - protein, 12 aa, Homo sapiens
  ( 128 )...( 139 ): >GCFC_HUMAN
SKKIVKLLKKEY

SEQ ID NO: 20674 - protein, 12 aa, Homo sapiens
  ( 228 )...( 239 ): >GCFC_HUMAN
ARKKRQMARELG

SEQ ID NO: 20675 - protein, 12 aa, Homo sapiens
  ( 276 )...( 287 ): >GCFC_HUMAN
SVKEKSQRQKIA

SEQ ID NO: 20676 - protein, 12 aa, Homo sapiens
  ( 539 )...( 550 ): >GCFC_HUMAN
RRQAREQTGKMA

SEQ ID NO: 20677 - protein, 12 aa, Homo sapiens
  ( 733 )...( 744 ): >GCFC_HUMAN
LKALLLRMRRTL

SEQ ID NO: 20678 - protein, 12 aa, Homo sapiens
  ( 734 )...( 745 ): >GCFC_HUMAN
KALLLRMRRTLD

SEQ ID NO: 20679 - protein, 12 aa, Homo sapiens
  ( 882 )...( 893 ): >GCFC_HUMAN
IKQIVKLLASVR

SEQ ID NO: 20680 - protein, 12 aa, Homo sapiens
  ( 883 )...( 894 ): >GCFC_HUMAN
KQIVKLLASVRA

SEQ ID NO: 20681 - protein, 12 aa, Homo sapiens
  ( 1 )...( 12 ): >GFI1_HUMAN
MPRSFLVKSKKA

SEQ ID NO: 20682 - protein, 12 aa, Homo sapiens
  ( 3 )...( 14 ): >GFI1_HUMAN
RSFLVKSKKAHS

SEQ ID NO: 20683 - protein, 12 aa, Homo sapiens
  ( 225 )...( 236 ): >GFI1_HUMAN
RGHRLHANKGAG

SEQ ID NO: 20684 - protein, 12 aa, Homo sapiens
  ( 228 )...( 239 ): >GFI1_HUMAN
RLHANKGAGVKV

SEQ ID NO: 20685 - protein, 12 aa, Homo sapiens
  ( 272 )...( 283 ): >GFI1_HUMAN
VHVRRSHSGTRP

SEQ ID NO: 20686 - protein, 12 aa, Homo sapiens
  ( 274 )...( 285 ): >GFI1_HUMAN
VRRSHSGTRPFA

SEQ ID NO: 20687 - protein, 12 aa, Homo sapiens
  ( 401 )...( 412 ): >GFI1_HUMAN
CGKGFQRKVDLR

SEQ ID NO: 20688 - protein, 12 aa, Homo sapiens
  ( 196 )...( 207 ): >GSH2_HUMAN
ASQVPNGKRMRT

SEQ ID NO: 20689 - protein, 12 aa, Homo sapiens
  ( 197 )...( 208 ): >GSH2_HUMAN
SQVPNGKRMRTA

SEQ ID NO: 20690 - protein, 12 aa, Homo sapiens
  ( 198 )...( 209 ): >GSH2_HUMAN
QVPNGKRMRTAF

SEQ ID NO: 20691 - protein, 12 aa, Homo sapiens
  ( 199 )...( 210 ): >GSH2_HUMAN
VPNGKRMRTAFT

SEQ ID NO: 20692 - protein, 12 aa, Homo sapiens
  ( 201 )...( 212 ): >GSH2_HUMAN
NGKRMRTAFTST

SEQ ID NO: 20693 - protein, 12 aa, Homo sapiens
  ( 202 )...( 213 ): >GSH2_HUMAN
GKRMRTAFTSTQ

SEQ ID NO: 20694 - protein, 12 aa, Homo sapiens
  ( 203 )...( 214 ): >GSH2_HUMAN
KRMRTAFTSTQL

SEQ ID NO: 20695 - protein, 12 aa, Homo sapiens
  ( 254 )...( 265 ): >GSH2_HUMAN
RVKHKKEGKGTQ

SEQ ID NO: 20696 - protein, 12 aa, Homo sapiens
  ( 255 )...( 266 ): >GSH2_HUMAN
VKHKKEGKGTQR

SEQ ID NO: 20697 - protein, 12 aa, Homo sapiens
  ( 144 )...( 155 ): >GSHI_HUMAN
LPSSKRMRTAFT

SEQ ID NO: 20698 - protein, 12 aa, Homo sapiens
  ( 147 )...( 158 ): >GSHI_HUMAN
SKRMRTAFTSTQ

SEQ ID NO: 20699 - protein, 12 aa, Homo sapiens
  ( 148 )...( 159 ): >GSHI_HUMAN
KRMRTAFTSTQL

SEQ ID NO: 20700 - protein, 12 aa, Homo sapiens
  ( 90 )...( 101 ): >GT4R_HUMAN
VPAQRATPGKAR

SEQ ID NO: 20701 - protein, 12 aa, Homo sapiens
  ( 91 )...( 102 ): >GT4R_HUMAN
PAQRATPGKARL

SEQ ID NO: 20702 - protein, 12 aa, Homo sapiens
  ( 183 )...( 194 ): >GT4R_HUMAN
LFGEPTLRKRKS

SEQ ID NO: 20703 - protein, 12 aa, Homo sapiens
  ( 185 )...( 196 ): >GT4R_HUMAN
GEPTLRKRKSPA

SEQ ID NO: 20704 - protein, 12 aa, Homo sapiens
  ( 187 )...( 198 ): >GT4R_HUMAN
PTLRKRKSPAQV

SEQ ID NO: 20705 - protein, 12 aa, Homo sapiens
  ( 188 )...( 199 ): >GT4R_HUMAN
TLRKRKSPAQVM

SEQ ID NO: 20706 - protein, 12 aa, Homo sapiens
  ( 219 )...( 230 ): >GT4R_HUMAN
RHIRLVHLGRQA

SEQ ID NO: 20707 - protein, 12 aa, Homo sapiens
  ( 341 )...( 352 ): >GT4R_HUMAN
ALSSRIGVTLRK

SEQ ID NO: 20708 - protein, 12 aa, Homo sapiens
  ( 342 )...( 353 ): >GT4R_HUMAN
LSSRIGVTLRKP

SEQ ID NO: 20709 - protein, 12 aa, Homo sapiens
  ( 343 )...( 354 ): >GT4R_HUMAN
SSRIGVTLRKPR

SEQ ID NO: 20710 - protein, 12 aa, Homo sapiens
  ( 344 )...( 355 ): >GT4R_HUMAN
SRIGVTLRKPRG

SEQ ID NO: 20711 - protein, 12 aa, Homo sapiens
  ( 345 )...( 356 ): >GT4R_HUMAN
RIGVTLRKPRGD

SEQ ID NO: 20712 - protein, 12 aa, Homo sapiens
  ( 347 )...( 358 ): >GT4R_HUMAN
GVTLRKPRGDAK

SEQ ID NO: 20713 - protein, 12 aa, Homo sapiens
  ( 348 )...( 359 ): >GT4R_HUMAN
VTLRKPRGDAKK

SEQ ID NO: 20714 - protein, 12 aa, Homo sapiens
  ( 349 )...( 360 ): >GT4R_HUMAN
TLRKPRGDAKKC

SEQ ID NO: 20715 - protein, 12 aa, Homo sapiens
  ( 352 )...( 363 ): >GT4R_HUMAN
KPRGDAKKCRKV

SEQ ID NO: 20716 - protein, 12 aa, Homo sapiens
  ( 354 )...( 365 ): >GT4R_HUMAN
RGDAKKCRKVYG

SEQ ID NO: 20717 - protein, 12 aa, Homo sapiens
  ( 357 )...( 368 ): >GT4R_HUMAN
AKKCRKVYGMER

SEQ ID NO: 20718 - protein, 12 aa, Homo sapiens
  ( 404 )...( 415 ): >HAIR_HUMAN
PVARLRALKRAG

SEQ ID NO: 20719 - protein, 12 aa, Homo sapiens
  ( 405 )...( 416 ): >HAIR_HUMAN
VARLRALKRAGS

SEQ ID NO: 20720 - protein, 12 aa, Homo sapiens
  ( 406 )...( 417 ): >HAIR_HUMAN
ARLRALKRAGSP

SEQ ID NO: 20721 - protein, 12 aa, Homo sapiens
  ( 407 )...( 418 ): >HAIR_HUMAN
RLRALKRAGSPE

SEQ ID NO: 20722 - protein, 12 aa, Homo sapiens
  ( 561 )...( 572 ): >HAIR_HUMAN
GLGDRLCRLLRR

SEQ ID NO: 20723 - protein, 12 aa, Homo sapiens
  ( 626 )...( 637 ): >HAIR_HUMAN
GRVAGTGRAREK

SEQ ID NO: 20724 - protein, 12 aa, Homo sapiens
  ( 627 )...( 638 ): >HAIR_HUMAN
RVAGTGRAREKA

SEQ ID NO: 20725 - protein, 12 aa, Homo sapiens
  ( 825 )...( 836 ): >HAIR_HUMAN
RKGLGLPLSPVR

SEQ ID NO: 20726 - protein, 12 aa, Homo sapiens
  ( 84 )...( 95 ): >HAN1_HUMAN
RLEALGGRLGRR

SEQ ID NO: 20727 - protein, 12 aa, Homo sapiens
  ( 85 )...( 96 ): >HAN1_HUMAN
LEALGGRLGRRK

SEQ ID NO: 20728 - protein, 12 aa, Homo sapiens
  ( 86 )...( 97 ): >HAN1_HUMAN
EALGGRLGRRKG

SEQ ID NO: 20729 - protein, 12 aa, Homo sapiens
  ( 92 )...( 103 ): >HAN1_HUMAN
LGRRKGSGPKKE

SEQ ID NO: 20730 - protein, 12 aa, Homo sapiens
  ( 128 )...( 139 ): >HAN1_HUMAN
TKLSKIKTLRLA

SEQ ID NO: 20731 - protein, 12 aa, Homo sapiens
  ( 129 )...( 140 ): >HAN1_HUMAN
KLSKIKTLRLAT

SEQ ID NO: 20732 - protein, 12 aa, Homo sapiens
  ( 132 )...( 143 ): >HAN1_HUMAN
KIKTLRLATSYI

SEQ ID NO: 20733 - protein, 12 aa, Homo sapiens
  ( 190 )...( 201 ): >HAN1_HUMAN
ALGPVEKRIKGR

SEQ ID NO: 20734 - protein, 12 aa, Homo sapiens
  ( 191 )...( 202 ): >HAN1_HUMAN
LGPVEKRIKGRT

SEQ ID NO: 20735 - protein, 12 aa, Homo sapiens
  ( 192 )...( 203 ): >HAN1_HUMAN
GPVEKRIKGRTG

SEQ ID NO: 20736 - protein, 12 aa, Homo sapiens
  ( 193 )...( 204 ): >HAN1_HUMAN
PVEKRIKGRTGW

SEQ ID NO: 20737 - protein, 12 aa, Homo sapiens
  ( 194 )...( 205 ): >HAN1_HUMAN
VEKRIKGRTGWP

SEQ ID NO: 20738 - protein, 12 aa, Homo sapiens
  ( 195 )...( 206 ): >HAN1_HUMAN
EKRIKGRTGWPQ

SEQ ID NO: 20739 - protein, 12 aa, Homo sapiens
  ( 196 )...( 207 ): >HAN1_HUMAN
KRIKGRTGWPQQ

SEQ ID NO: 20740 - protein, 12 aa, Homo sapiens
  ( 197 )...( 208 ): >HAN1_HUMAN
RIKGRTGWPQQV

SEQ ID NO: 20741 - protein, 12 aa, Homo sapiens
  ( 90 )...( 101 ): >HAN2_HUMAN
PGLGGPRPVKRR

SEQ ID NO: 20742 - protein, 12 aa, Homo sapiens
  ( 91 )...( 102 ): >HAN2_HUMAN
GLGGPRPVKRRG

SEQ ID NO: 20743 - protein, 12 aa, Homo sapiens
  ( 92 )...( 103 ): >HAN2_HUMAN
LGGPRPVKRRGT

SEQ ID NO: 20744 - protein, 12 aa, Homo sapiens
  ( 93 )...( 104 ): >HAN2_HUMAN
GGPRPVKRRGTA

SEQ ID NO: 20745 - protein, 12 aa, Homo sapiens
  ( 94 )...( 105 ): >HAN2_HUMAN
GPRPVKRRGTAN

SEQ ID NO: 20746 - protein, 12 aa, Homo sapiens
  ( 133 )...( 144 ): >HAN2_HUMAN
TKLSKIKTLRLA

SEQ ID NO: 20747 - protein, 12 aa, Homo sapiens
  ( 134 )...( 145 ): >HAN2_HUMAN
KLSKIKTLRLAT

SEQ ID NO: 20748 - protein, 12 aa, Homo sapiens
  ( 137 )...( 148 ): >HAN2_HUMAN
KIKTLRLATSYI

SEQ ID NO: 20749 - protein, 12 aa, Homo sapiens
  ( 195 )...( 206 ): >HAN2_HUMAN
SNDKKTKGRTGW

SEQ ID NO: 20750 - protein, 12 aa, Homo sapiens
  ( 196 )...( 207 ): >HAN2_HUMAN
NDKKTKGRTGWP

SEQ ID NO: 20751 - protein, 12 aa, Homo sapiens
  ( 197 )...( 208 ): >HAN2_HUMAN
DKKTKGRTGWPQ

SEQ ID NO: 20752 - protein, 12 aa, Homo sapiens
  ( 198 )...( 209 ): >HAN2_HUMAN
KKTKGRTGWPQH

SEQ ID NO: 20753 - protein, 12 aa, Homo sapiens
  ( 199 )...( 210 ): >HAN2_HUMAN
KTKGRTGWPQHV

SEQ ID NO: 20754 - protein, 12 aa, Homo sapiens
  ( 233 )...( 244 ): >HB9_HUMAN
QAQSNLLGKCRR

SEQ ID NO: 20755 - protein, 12 aa, Homo sapiens
  ( 236 )...( 247 ): >HB9_HUMAN
SNLLGKCRRPRT

SEQ ID NO: 20756 - protein, 12 aa, Homo sapiens
  ( 237 )...( 248 ): >HB9_HUMAN
NLLGKCRRPRTA

SEQ ID NO: 20757 - protein, 12 aa, Homo sapiens
  ( 238 )...( 249 ): >HB9_HUMAN
LLGKCRRPRTAF

SEQ ID NO: 20758 - protein, 12 aa, Homo sapiens
  ( 239 )...( 250 ): >HB9_HUMAN
LGKCRRPRTAFT

SEQ ID NO: 20759 - protein, 12 aa, Homo sapiens
  ( 298 )...( 309 ): >HB9_HUMAN
KRSKKAKEQAAQ

SEQ ID NO: 20760 - protein, 12 aa, Homo sapiens
  ( 43 )...( 54 ): >HDA3_HUMAN
KKMIVFKPYQAS

SEQ ID NO: 20761 - protein, 12 aa, Homo sapiens
  ( 70 )...( 81 ): >HEN1_HUMAN
RRATAKYRTAHA

SEQ ID NO: 20762 - protein, 12 aa, Homo sapiens
  ( 71 )...( 82 ): >HEN1_HUMAN
RATAKYRTAHAT

SEQ ID NO: 20763 - protein, 12 aa, Homo sapiens
  ( 72 )...( 83 ): >HEN1_HUMAN
ATAKYRTAHATR

SEQ ID NO: 20764 - protein, 12 aa, Homo sapiens
  ( 77 )...( 88 ): >HEN1_HUMAN
RTAHATRERIRV

SEQ ID NO: 20765 - protein, 12 aa, Homo sapiens
  ( 109 )...( 120 ): >HEN1_HUMAN
KKLSKIEILRLA

SEQ ID NO: 20766 - protein, 12 aa, Homo sapiens
  ( 73 )...( 84 ): >HEN2_HUMAN
RATAKYRSAHAT

SEQ ID NO: 20767 - protein, 12 aa, Homo sapiens
  ( 74 )...( 85 ): >HEN2_HUMAN
ATAKYRSAHATR

SEQ ID NO: 20768 - protein, 12 aa, Homo sapiens
  ( 79 )...( 90 ): >HEN2_HUMAN
RSAHATRERIRV

SEQ ID NO: 20769 - protein, 12 aa, Homo sapiens
  ( 111 )...( 122 ): >HEN2_HUMAN
KKLSKIEILRLA

SEQ ID NO: 20770 - protein, 12 aa, Homo sapiens
  ( 26 )...( 37 ): >HES2_HUMAN
RARINQSLSQLK

SEQ ID NO: 20771 - protein, 12 aa, Homo sapiens
  ( 94 )...( 105 ): >HES2_HUMAN
VARLARVLPACR

SEQ ID NO: 20772 - protein, 12 aa, Homo sapiens
  ( 95 )...( 106 ): >HES2_HUMAN
ARLARVLPACRV

SEQ ID NO: 20773 - protein, 12 aa, Homo sapiens
  ( 96 )...( 107 ): >HES2_HUMAN
RLARVLPACRVL

SEQ ID NO: 20774 - protein, 12 aa, Homo sapiens
  ( 41 )...( 52 ): >HEY1_HUMAN
PTTSSQILARKR

SEQ ID NO: 20775 - protein, 12 aa, Homo sapiens
  ( 42 )...( 53 ): >HEY1_HUMAN
TTSSQILARKRR

SEQ ID NO: 20776 - protein, 12 aa, Homo sapiens
  ( 139 )...( 150 ): >HIC1_HUMAN
PDLVALCKKRLK

SEQ ID NO: 20777 - protein, 12 aa, Homo sapiens
  ( 140 )...( 151 ): >HIC1_HUMAN
DLVALCKKRLKR

SEQ ID NO: 20778 - protein, 12 aa, Homo sapiens
  ( 141 )...( 152 ): >HIC1_HUMAN
LVALCKKRLKRH

SEQ ID NO: 20779 - protein, 12 aa, Homo sapiens
  ( 142 )...( 153 ): >HIC1_HUMAN
VALCKKRLKRHG

SEQ ID NO: 20780 - protein, 12 aa, Homo sapiens
  ( 150 )...( 161 ): >HIC1_HUMAN
KRHGKYCHLRGG

SEQ ID NO: 20781 - protein, 12 aa, Homo sapiens
  ( 171 )...( 182 ): >HIC1_HUMAN
YGRPGRGLRAAT

SEQ ID NO: 20782 - protein, 12 aa, Homo sapiens
  ( 173 )...( 184 ): >HIC1_HUMAN
RPGRGLRAATPV

SEQ ID NO: 20783 - protein, 12 aa, Homo sapiens
  ( 538 )...( 549 ): >HIC1_HUMAN
TICGKKFTQRGT

SEQ ID NO: 20784 - protein, 12 aa, Homo sapiens
  ( 539 )...( 550 ): >HIC1_HUMAN
ICGKKFTQRGTM

SEQ ID NO: 20785 - protein, 12 aa, Homo sapiens
  ( 540 )...( 551 ): >HIC1_HUMAN
CGKKFTQRGTMT

SEQ ID NO: 20786 - protein, 12 aa, Homo sapiens
  ( 541 )...( 552 ): >HIC1_HUMAN
GKKFTQRGTMTR

SEQ ID NO: 20787 - protein, 12 aa, Homo sapiens
  ( 543 )...( 554 ): >HIC1_HUMAN
KFTQRGTMTRHM

SEQ ID NO: 20788 - protein, 12 aa, Homo sapiens
  ( 545 )...( 556 ): >HIC1_HUMAN
TQRGTMTRHMRS

SEQ ID NO: 20789 - protein, 12 aa, Homo sapiens
  ( 129 )...( 140 ): >HIC2_HUMAN
PELAALCRRKLK

SEQ ID NO: 20790 - protein, 12 aa, Homo sapiens
  ( 130 )...( 141 ): >HIC2_HUMAN
ELAALCRRKLKR

SEQ ID NO: 20791 - protein, 12 aa, Homo sapiens
  ( 137 )...( 148 ): >HIC2_HUMAN
RKLKRAGKPFGS

SEQ ID NO: 20792 - protein, 12 aa, Homo sapiens
  ( 138 )...( 149 ): >HIC2_HUMAN
KLKRAGKPFGSG

SEQ ID NO: 20793 - protein, 12 aa, Homo sapiens
  ( 139 )...( 150 ): >HIC2_HUMAN
LKRAGKPFGSGR

SEQ ID NO: 20794 - protein, 12 aa, Homo sapiens
  ( 154 )...( 165 ): >HIC2_HUMAN
TGMGRPPRSQRL

SEQ ID NO: 20795 - protein, 12 aa, Homo sapiens
  ( 156 )...( 167 ): >HIC2_HUMAN
MGRPPRSQRLST

SEQ ID NO: 20796 - protein, 12 aa, Homo sapiens
  ( 157 )...( 168 ): >HIC2_HUMAN
GRPPRSQRLSTA

SEQ ID NO: 20797 - protein, 12 aa, Homo sapiens
  ( 158 )...( 169 ): >HIC2_HUMAN
RPPRSQRLSTAS

SEQ ID NO: 20798 - protein, 12 aa, Homo sapiens
  ( 323 )...( 334 ): >HIC2_HUMAN
GGQPRKSLRHST

SEQ ID NO: 20799 - protein, 12 aa, Homo sapiens
  ( 539 )...( 550 ): >HIC2_HUMAN
GKMFTQRGTMTR

SEQ ID NO: 20800 - protein, 12 aa, Homo sapiens
  ( 540 )...( 551 ): >HIC2_HUMAN
KMFTQRGTMTRH

SEQ ID NO: 20801 - protein, 12 aa, Homo sapiens
  ( 543 )...( 554 ): >HIC2_HUMAN
TQRGTMTRHMRS

SEQ ID NO: 20802 - protein, 12 aa, Homo sapiens
  ( 59 )...( 70 ): >HIFA_HUMAN
VMRLTISYLRVR

SEQ ID NO: 20803 - protein, 12 aa, Homo sapiens
  ( 147 )...( 158 ): >HIFA_HUMAN
MLTHRNGLVKKG

SEQ ID NO: 20804 - protein, 12 aa, Homo sapiens
  ( 148 )...( 159 ): >HIFA_HUMAN
LTHRNGLVKKGK

SEQ ID NO: 20805 - protein, 12 aa, Homo sapiens
  ( 150 )...( 161 ): >HIFA_HUMAN
HRNGLVKKGKEQ

SEQ ID NO: 20806 - protein, 12 aa, Homo sapiens
  ( 151 )...( 162 ): >HIFA_HUMAN
RNGLVKKGKEQN

SEQ ID NO: 20807 - protein, 12 aa, Homo sapiens
  ( 154 )...( 165 ): >HIFA_HUMAN
LVKKGKEQNTQR

SEQ ID NO: 20808 - protein, 12 aa, Homo sapiens
  ( 155 )...( 166 ): >HIFA_HUMAN
VKKGKEQNTQRS

SEQ ID NO: 20809 - protein, 12 aa, Homo sapiens
  ( 165 )...( 176 ): >HIFA_HUMAN
RSFFLRMKCTLT

SEQ ID NO: 20810 - protein, 12 aa, Homo sapiens
  ( 167 )...( 178 ): >HIFA_HUMAN
FFLRMKCTLTSR

SEQ ID NO: 20811 - protein, 12 aa, Homo sapiens
  ( 168 )...( 179 ): >HIFA_HUMAN
FLRMKCTLTSRG

SEQ ID NO: 20812 - protein, 12 aa, Homo sapiens
  ( 169 )...( 180 ): >HIFA_HUMAN
LRMKCTLTSRGR

SEQ ID NO: 20813 - protein, 12 aa, Homo sapiens
  ( 170 )...( 181 ): >HIFA_HUMAN
RMKCTLTSRGRT

SEQ ID NO: 20814 - protein, 12 aa, Homo sapiens
  ( 171 )...( 182 ): >HIFA_HUMAN
MKCTLTSRGRTM

SEQ ID NO: 20815 - protein, 12 aa, Homo sapiens
  ( 172 )...( 183 ): >HIFA_HUMAN
KCTLTSRGRTMN

SEQ ID NO: 20816 - protein, 12 aa, Homo sapiens
  ( 174 )...( 185 ): >HIFA_HUMAN
TLTSRGRTMNIK

SEQ ID NO: 20817 - protein, 12 aa, Homo sapiens
  ( 175 )...( 186 ): >HIFA_HUMAN
LTSRGRTMNIKS

SEQ ID NO: 20818 - protein, 12 aa, Homo sapiens
  ( 176 )...( 187 ): >HIFA_HUMAN
TSRGRTMNIKSA

SEQ ID NO: 20819 - protein, 12 aa, Homo sapiens
  ( 177 )...( 188 ): >HIFA_HUMAN
SRGRTMNIKSAT

SEQ ID NO: 20820 - protein, 12 aa, Homo sapiens
  ( 178 )...( 189 ): >HIFA_HUMAN
RGRTMNIKSATW

SEQ ID NO: 20821 - protein, 12 aa, Homo sapiens
  ( 179 )...( 190 ): >HIFA_HUMAN
GRTMNIKSATWK

SEQ ID NO: 20822 - protein, 12 aa, Homo sapiens
  ( 180 )...( 191 ): >HIFA_HUMAN
RTMNIKSATWKV

SEQ ID NO: 20823 - protein, 12 aa, Homo sapiens
  ( 300 )...( 311 ): >HIFA_HUMAN
VTTGQYRMLAKR

SEQ ID NO: 20824 - protein, 12 aa, Homo sapiens
  ( 301 )...( 312 ): >HIFA_HUMAN
TTGQYRMLAKRG

SEQ ID NO: 20825 - protein, 12 aa, Homo sapiens
  ( 302 )...( 313 ): >HIFA_HUMAN
TGQYRMLAKRGG

SEQ ID NO: 20826 - protein, 12 aa, Homo sapiens
  ( 303 )...( 314 ): >HIFA_HUMAN
GQYRMLAKRGGY

SEQ ID NO: 20827 - protein, 12 aa, Homo sapiens
  ( 304 )...( 315 ): >HIFA_HUMAN
QYRMLAKRGGYV

SEQ ID NO: 20828 - protein, 12 aa, Homo sapiens
  ( 306 )...( 317 ): >HIFA_HUMAN
RMLAKRGGYVWV

SEQ ID NO: 20829 - protein, 12 aa, Homo sapiens
  ( 708 )...( 719 ): >HIFA_HUMAN
PKILALQNAQRK

SEQ ID NO: 20830 - protein, 12 aa, Homo sapiens
  ( 745 )...( 756 ): >HIFA_HUMAN
AATTSLSWKRVK

SEQ ID NO: 20831 - protein, 12 aa, Homo sapiens
  ( 746 )...( 757 ): >HIFA_HUMAN
ATTSLSWKRVKG

SEQ ID NO: 20832 - protein, 12 aa, Homo sapiens
  ( 747 )...( 758 ): >HIFA_HUMAN
TTSLSWKRVKGC

SEQ ID NO: 20833 - protein, 12 aa, Homo sapiens
  ( 748 )...( 759 ): >HIFA_HUMAN
TSLSWKRVKGCK

SEQ ID NO: 20834 - protein, 12 aa, Homo sapiens
  ( 752 )...( 763 ): >HIFA_HUMAN
WKRVKGCKSSEQ

SEQ ID NO: 20835 - protein, 12 aa, Homo sapiens
  ( 123 )...( 134 ): >HIK2_HUMAN
LDTYQKCGLKRK

SEQ ID NO: 20836 - protein, 12 aa, Homo sapiens
  ( 124 )...( 135 ): >HIK2_HUMAN
DTYQKCGLKRKS

SEQ ID NO: 20837 - protein, 12 aa, Homo sapiens
  ( 125 )...( 136 ): >HIK2_HUMAN
TYQKCGLKRKSE

SEQ ID NO: 20838 - protein, 12 aa, Homo sapiens
  ( 207 )...( 218 ): >HIK2_HUMAN
RGTFGQVVKCWK

SEQ ID NO: 20839 - protein, 12 aa, Homo sapiens
  ( 208 )...( 219 ): >HIK2_HUMAN
GTFGQVVKCWKR

SEQ ID NO: 20840 - protein, 12 aa, Homo sapiens
  ( 209 )...( 220 ): >HIK2_HUMAN
TFGQVVKCWKRG

SEQ ID NO: 20841 - protein, 12 aa, Homo sapiens
  ( 210 )...( 221 ): >HIK2_HUMAN
FGQVVKCWKRGT

SEQ ID NO: 20842 - protein, 12 aa, Homo sapiens
  ( 211 )...( 222 ): >HIK2_HUMAN
GQVVKCWKRGTN

SEQ ID NO: 20843 - protein, 12 aa, Homo sapiens
  ( 426 )...( 437 ): >HIK2_HUMAN
SAGTKTTRFFNR

SEQ ID NO: 20844 - protein, 12 aa, Homo sapiens
  ( 458 )...( 469 ): >HIK2_HUMAN
TGIKSKEARKYI

SEQ ID NO: 20845 - protein, 12 aa, Homo sapiens
  ( 459 )...( 470 ): >HIK2_HUMAN
GIKSKEARKYIF

SEQ ID NO: 20846 - protein, 12 aa, Homo sapiens
  ( 822 )...( 833 ): >HIK2_HUMAN
SQAISSPQRSKR

SEQ ID NO: 20847 - protein, 12 aa, Homo sapiens
  ( 823 )...( 834 ): >HIK2_HUMAN
QAISSPQRSKRV

SEQ ID NO: 20848 - protein, 12 aa, Homo sapiens
  ( 824 )...( 835 ): >HIK2_HUMAN
AISSPQRSKRVK

SEQ ID NO: 20849 - protein, 12 aa, Homo sapiens
  ( 907 )...( 918 ): >HIK2_HUMAN
TVSKQRKNVISC

SEQ ID NO: 20850 - protein, 12 aa, Homo sapiens
  ( 908 )...( 919 ): >HIK2_HUMAN
VSKQRKNVISCV

SEQ ID NO: 20851 - protein, 12 aa, Homo sapiens
  ( 909 )...( 920 ): >HIK2_HUMAN
SKQRKNVISCVT

SEQ ID NO: 20852 - protein, 12 aa, Homo sapiens
  ( 910 )...( 921 ): >HIK2_HUMAN
KQRKNVISCVTV

SEQ ID NO: 20853 - protein, 12 aa, Homo sapiens
  ( 279 )...( 290 ): >HLX1_HUMAN
SRAVFSNLQRKG

SEQ ID NO: 20854 - protein, 12 aa, Homo sapiens
  ( 280 )...( 291 ): >HLX1_HUMAN
RAVFSNLQRKGL

SEQ ID NO: 20855 - protein, 12 aa, Homo sapiens
  ( 20 )...( 31 ): >HMGC_HUMAN
AAPAPQKRGRGR

SEQ ID NO: 20856 - protein, 12 aa, Homo sapiens
  ( 21 )...( 32 ): >HMGC_HUMAN
APAPQKRGRGRP

SEQ ID NO: 20857 - protein, 12 aa, Homo sapiens
  ( 40 )...( 51 ): >HMGC_HUMAN
TGEPSPKRPRGR

SEQ ID NO: 20858 - protein, 12 aa, Homo sapiens
  ( 48 )...( 59 ): >HMGC_HUMAN
PRGRPKGSKNKS

SEQ ID NO: 20859 - protein, 12 aa, Homo sapiens
  ( 49 )...( 60 ): >HMGC_HUMAN
RGRPKGSKNKSP

SEQ ID NO: 20860 - protein, 12 aa, Homo sapiens
  ( 66 )...( 77 ): >HMGC_HUMAN
KKAEATGEKRPR

SEQ ID NO: 20861 - protein, 12 aa, Homo sapiens
  ( 70 )...( 81 ): >HMGC_HUMAN
ATGEKRPRGRPR

SEQ ID NO: 20862 - protein, 12 aa, Homo sapiens
  ( 108 )...( 119 ): >HN4A_HUMAN
LKKCFRAGMKKE

SEQ ID NO: 20863 - protein, 12 aa, Homo sapiens
  ( 109 )...( 120 ): >HN4A_HUMAN
KKCFRAGMKKEA

SEQ ID NO: 20864 - protein, 12 aa, Homo sapiens
  ( 220 )...( 231 ): >HN4A_HUMAN
LLGATKRSMVFK

SEQ ID NO: 20865 - protein, 12 aa, Homo sapiens
  ( 290 )...( 301 ): >HN4A_HUMAN
AKGLSDPGKIKR

SEQ ID NO: 20866 - protein, 12 aa, Homo sapiens
  ( 291 )...( 302 ): >HN4A_HUMAN
KGLSDPGKIKRL

SEQ ID NO: 20867 - protein, 12 aa, Homo sapiens
  ( 292 )...( 303 ): >HN4A_HUMAN
GLSDPGKIKRLR

SEQ ID NO: 20868 - protein, 12 aa, Homo sapiens
  ( 293 )...( 304 ): >HN4A_HUMAN
LSDPGKIKRLRS

SEQ ID NO: 20869 - protein, 12 aa, Homo sapiens
  ( 294 )...( 305 ): >HN4A_HUMAN
SDPGKIKRLRSQ

SEQ ID NO: 20870 - protein, 12 aa, Homo sapiens
  ( 295 )...( 306 ): >HN4A_HUMAN
DPGKIKRLRSQV

SEQ ID NO: 20871 - protein, 12 aa, Homo sapiens
  ( 296 )...( 307 ): >HN4A_HUMAN
PGKIKRLRSQVQ

SEQ ID NO: 20872 - protein, 12 aa, Homo sapiens
  ( 297 )...( 308 ): >HN4A_HUMAN
GKIKRLRSQVQV

SEQ ID NO: 20873 - protein, 12 aa, Homo sapiens
  ( 298 )...( 309 ): >HN4A_HUMAN
KIKRLRSQVQVS

SEQ ID NO: 20874 - protein, 12 aa, Homo sapiens
  ( 299 )...( 310 ): >HN4A_HUMAN
IKRLRSQVQVSL

SEQ ID NO: 20875 - protein, 12 aa, Homo sapiens
  ( 70 )...( 81 ): >HN4G_HUMAN
RKCFRAGMKKEA

SEQ ID NO: 20876 - protein, 12 aa, Homo sapiens
  ( 181 )...( 192 ): >HN4G_HUMAN
LLGATKRSMIYK

SEQ ID NO: 20877 - protein, 12 aa, Homo sapiens
  ( 257 )...( 268 ): >HN4G_HUMAN
VKIKNMRFQVQI

SEQ ID NO: 20878 - protein, 12 aa, Homo sapiens
  ( 258 )...( 269 ): >HN4G_HUMAN
KIKNMRFQVQIG

SEQ ID NO: 20879 - protein, 12 aa, Homo sapiens
  ( 120 )...( 131 ): >HNFB_HUMAN
RAAKMIKGYMQQ

SEQ ID NO: 20880 - protein, 12 aa, Homo sapiens
  ( 154 )...( 165 ): >HNFB_HUMAN
LNKGTPMKTQKR

SEQ ID NO: 20881 - protein, 12 aa, Homo sapiens
  ( 155 )...( 166 ): >HNFB_HUMAN
NKGTPMKTQKRA

SEQ ID NO: 20882 - protein, 12 aa, Homo sapiens
  ( 156 )...( 167 ): >HNFB_HUMAN
KGTPMKTQKRAA

SEQ ID NO: 20883 - protein, 12 aa, Homo sapiens
  ( 157 )...( 168 ): >HNFB_HUMAN
GTPMKTQKRAAL

SEQ ID NO: 20884 - protein, 12 aa, Homo sapiens
  ( 158 )...( 169 ): >HNFB_HUMAN
TPMKTQKRAALY

SEQ ID NO: 20885 - protein, 12 aa, Homo sapiens
  ( 159 )...( 170 ): >HNFB_HUMAN
PMKTQKRAALYT

SEQ ID NO: 20886 - protein, 11 aa, Homo sapiens
  ( 25 )...( 36 ): >HRX_HUMAN
RGLGGPRQRVP

SEQ ID NO: 20887 - protein, 12 aa, Homo sapiens
  ( 119 )...( 130 ): >HRX_HUMAN
SAAIGTNLRRFR

SEQ ID NO: 20888 - protein, 12 aa, Homo sapiens
  ( 120 )...( 131 ): >HRX_HUMAN
AAIGTNLRRFRA

SEQ ID NO: 20889 - protein, 12 aa, Homo sapiens
  ( 121 )...( 132 ): >HRX_HUMAN
AIGTNLRRFRAV

SEQ ID NO: 20890 - protein, 12 aa, Homo sapiens
  ( 122 )...( 133 ): >HRX_HUMAN
IGTNLRRFRAVF

SEQ ID NO: 20891 - protein, 12 aa, Homo sapiens
  ( 123 )...( 134 ): >HRX_HUMAN
GTNLRRFRAVFG

SEQ ID NO: 20892 - protein, 12 aa, Homo sapiens
  ( 157 )...( 168 ): >HRX_HUMAN
VRVRSPTRSPSV

SEQ ID NO: 20893 - protein, 12 aa, Homo sapiens
  ( 158 )...( 169 ): >HRX_HUMAN
RVRSPTRSPSVK

SEQ ID NO: 20894 - protein, 12 aa, Homo sapiens
  ( 159 )...( 170 ): >HRX_HUMAN
VRSPTRSPSVKT

SEQ ID NO: 20895 - protein, 12 aa, Homo sapiens
  ( 163 )...( 174 ): >HRX_HUMAN
TRSPSVKTSPRK

SEQ ID NO: 20896 - protein, 12 aa, Homo sapiens
  ( 167 )...( 178 ): >HRX_HUMAN
SVKTSPRKPRGR

SEQ ID NO: 20897 - protein, 12 aa, Homo sapiens
  ( 216 )...( 227 ): >HRX_HUMAN
KSIEKKRGRPPT

SEQ ID NO: 20898 - protein, 12 aa, Homo sapiens
  ( 220 )...( 231 ): >HRX_HUMAN
KKRGRPPTFPGV

SEQ ID NO: 20899 - protein, 12 aa, Homo sapiens
  ( 221 )...( 232 ): >HRX_HUMAN
KRGRPPTFPGVK

SEQ ID NO: 20900 - protein, 12 aa, Homo sapiens
  ( 224 )...( 235 ): >HRX_HUMAN
RPPTFPGVKIKI

SEQ ID NO: 20901 - protein, 12 aa, Homo sapiens
  ( 252 )...( 263 ): >HRX_HUMAN
SLKKIKRTPSAT

SEQ ID NO: 20902 - protein, 12 aa, Homo sapiens
  ( 253 )...( 264 ): >HRX_HUMAN
LKKIKRTPSATF

SEQ ID NO: 20903 - protein, 12 aa, Homo sapiens
  ( 254 )...( 265 ): >HRX_HUMAN
KKIKRTPSATFQ

SEQ ID NO: 20904 - protein, 12 aa, Homo sapiens
  ( 255 )...( 266 ): >HRX_HUMAN
KIKRTPSATFQQ

SEQ ID NO: 20905 - protein, 12 aa, Homo sapiens
  ( 263 )...( 274 ): >HRX_HUMAN
TFQQATKIKKLR

SEQ ID NO: 20906 - protein, 12 aa, Homo sapiens
  ( 264 )...( 275 ): >HRX_HUMAN
FQQATKIKKLRA

SEQ ID NO: 20907 - protein, 12 aa, Homo sapiens
  ( 265 )...( 276 ): >HRX_HUMAN
QQATKIKKLRAG

SEQ ID NO: 20908 - protein, 12 aa, Homo sapiens
  ( 266 )...( 277 ): >HRX_HUMAN
QATKIKKLRAGK

SEQ ID NO: 20909 - protein, 12 aa, Homo sapiens
  ( 267 )...( 278 ): >HRX_HUMAN
ATKIKKLRAGKL

SEQ ID NO: 20910 - protein, 12 aa, Homo sapiens
  ( 268 )...( 279 ): >HRX_HUMAN
TKIKKLRAGKLS

SEQ ID NO: 20911 - protein, 12 aa, Homo sapiens
  ( 269 )...( 280 ): >HRX_HUMAN
KIKKLRAGKLSP

SEQ ID NO: 20912 - protein, 12 aa, Homo sapiens
  ( 270 )...( 281 ): >HRX_HUMAN
IKKLRAGKLSPL

SEQ ID NO: 20913 - protein, 12 aa, Homo sapiens
  ( 271 )...( 282 ): >HRX_HUMAN
KKLRAGKLSPLK

SEQ ID NO: 20914 - protein, 12 aa, Homo sapiens
  ( 272 )...( 283 ): >HRX_HUMAN
KLRAGKLSPLKS

SEQ ID NO: 20915 - protein, 12 aa, Homo sapiens
  ( 273 )...( 284 ): >HRX_HUMAN
LRAGKLSPLKSK

SEQ ID NO: 20916 - protein, 12 aa, Homo sapiens
  ( 274 )...( 285 ): >HRX_HUMAN
RAGKLSPLKSKF

SEQ ID NO: 20917 - protein, 12 aa, Homo sapiens
  ( 275 )...( 286 ): >HRX_HUMAN
AGKLSPLKSKFK

SEQ ID NO: 20918 - protein, 12 aa, Homo sapiens
  ( 276 )...( 287 ): >HRX_HUMAN
GKLSPLKSKFKT

SEQ ID NO: 20919 - protein, 12 aa, Homo sapiens
  ( 277 )...( 288 ): >HRX_HUMAN
KLSPLKSKFKTG

SEQ ID NO: 20920 - protein, 12 aa, Homo sapiens
  ( 278 )...( 289 ): >HRX_HUMAN
LSPLKSKFKTGK

SEQ ID NO: 20921 - protein, 12 aa, Homo sapiens
  ( 279 )...( 290 ): >HRX_HUMAN
SPLKSKFKTGKL

SEQ ID NO: 20922 - protein, 12 aa, Homo sapiens
  ( 280 )...( 291 ): >HRX_HUMAN
PLKSKFKTGKLQ

SEQ ID NO: 20923 - protein, 12 aa, Homo sapiens
  ( 281 )...( 292 ): >HRX_HUMAN
LKSKFKTGKLQI

SEQ ID NO: 20924 - protein, 12 aa, Homo sapiens
  ( 282 )...( 293 ): >HRX_HUMAN
KSKFKTGKLQIG

SEQ ID NO: 20925 - protein, 12 aa, Homo sapiens
  ( 283 )...( 294 ): >HRX_HUMAN
SKFKTGKLQIGR

SEQ ID NO: 20926 - protein, 12 aa, Homo sapiens
  ( 284 )...( 295 ): >HRX_HUMAN
KFKTGKLQIGRK

SEQ ID NO: 20927 - protein, 12 aa, Homo sapiens
  ( 285 )...( 296 ): >HRX_HUMAN
FKTGKLQIGRKG

SEQ ID NO: 20928 - protein, 12 aa, Homo sapiens
  ( 289 )...( 300 ): >HRX_HUMAN
KLQIGRKGVQIV

SEQ ID NO: 20929 - protein, 12 aa, Homo sapiens
  ( 290 )...( 301 ): >HRX_HUMAN
LQIGRKGVQIVR

SEQ ID NO: 20930 - protein, 12 aa, Homo sapiens
  ( 291 )...( 302 ): >HRX_HUMAN
QIGRKGVQIVRR

SEQ ID NO: 20931 - protein, 12 aa, Homo sapiens
  ( 298 )...( 309 ): >HRX_HUMAN
QIVRRRGRPPST

SEQ ID NO: 20932 - protein, 12 aa, Homo sapiens
  ( 299 )...( 310 ): >HRX_HUMAN
IVRRRGRPPSTE

SEQ ID NO: 20933 - protein, 12 aa, Homo sapiens
  ( 303 )...( 314 ): >HRX_HUMAN
RGRPPSTERIKT

SEQ ID NO: 20934 - protein, 12 aa, Homo sapiens
  ( 326 )...( 337 ): >HRX_HUMAN
KPQKVRKDKEGT

SEQ ID NO: 20935 - protein, 12 aa, Homo sapiens
  ( 344 )...( 355 ): >HRX_HUMAN
DKTVVRQSPRRI

SEQ ID NO: 20936 - protein, 12 aa, Homo sapiens
  ( 346 )...( 357 ): >HRX_HUMAN
TVVRQSPRRIKP

SEQ ID NO: 20937 - protein, 12 aa, Homo sapiens
  ( 347 )...( 358 ): >HRX_HUMAN
VVRQSPRRIKPV

SEQ ID NO: 20938 - protein, 12 aa, Homo sapiens
  ( 353 )...( 364 ): >HRX_HUMAN
RRIKPVRIIPSS

SEQ ID NO: 20939 - protein, 12 aa, Homo sapiens
  ( 354 )...( 365 ): >HRX_HUMAN
RIKPVRIIPSSK

SEQ ID NO: 20940 - protein, 12 aa, Homo sapiens
  ( 355 )...( 366 ): >HRX_HUMAN
IKPVRIIPSSKR

SEQ ID NO: 20941 - protein, 12 aa, Homo sapiens
  ( 356 )...( 367 ): >HRX_HUMAN
KPVRIIPSSKRT

SEQ ID NO: 20942 - protein, 12 aa, Homo sapiens
  ( 369 )...( 380 ): >HRX_HUMAN
ATIAKQLLQRAK

SEQ ID NO: 20943 - protein, 12 aa, Homo sapiens
  ( 370 )...( 381 ): >HRX_HUMAN
TIAKQLLQRAKK

SEQ ID NO: 20944 - protein, 12 aa, Homo sapiens
  ( 371 )...( 382 ): >HRX_HUMAN
IAKQLLQRAKKG

SEQ ID NO: 20945 - protein, 12 aa, Homo sapiens
  ( 372 )...( 383 ): >HRX_HUMAN
AKQLLQRAKKGA

SEQ ID NO: 20946 - protein, 12 aa, Homo sapiens
  ( 373 )...( 384 ): >HRX_HUMAN
KQLLQRAKKGAQ

SEQ ID NO: 20947 - protein, 12 aa, Homo sapiens
  ( 374 )...( 385 ): >HRX_HUMAN
QLLQRAKKGAQK

SEQ ID NO: 20948 - protein, 12 aa, Homo sapiens
  ( 375 )...( 386 ): >HRX_HUMAN
LLQRAKKGAQKK

SEQ ID NO: 20949 - protein, 12 aa, Homo sapiens
  ( 376 )...( 387 ): >HRX_HUMAN
LQRAKKGAQKKI

SEQ ID NO: 20950 - protein, 12 aa, Homo sapiens
  ( 377 )...( 388 ): >HRX_HUMAN
QRAKKGAQKKIE

SEQ ID NO: 20951 - protein, 12 aa, Homo sapiens
  ( 378 )...( 389 ): >HRX_HUMAN
RAKKGAQKKIEK

SEQ ID NO: 20952 - protein, 12 aa, Homo sapiens
  ( 389 )...( 400 ): >HRX_HUMAN
KEAAQLQGRKVK

SEQ ID NO: 20953 - protein, 12 aa, Homo sapiens
  ( 391 )...( 402 ): >HRX_HUMAN
AAQLQGRKVKTQ

SEQ ID NO: 20954 - protein, 12 aa, Homo sapiens
  ( 392 )...( 403 ): >HRX_HUMAN
AQLQGRKVKTQV

SEQ ID NO: 20955 - protein, 12 aa, Homo sapiens
  ( 393 )...( 404 ): >HRX_HUMAN
QLQGRKVKTQVK

SEQ ID NO: 20956 - protein, 12 aa, Homo sapiens
  ( 394 )...( 405 ): >HRX_HUMAN
LQGRKVKTQVKN

SEQ ID NO: 20957 - protein, 12 aa, Homo sapiens
  ( 395 )...( 406 ): >HRX_HUMAN
QGRKVKTQVKNI

SEQ ID NO: 20958 - protein, 12 aa, Homo sapiens
  ( 396 )...( 407 ): >HRX_HUMAN
GRKVKTQVKNIR

SEQ ID NO: 20959 - protein, 12 aa, Homo sapiens
  ( 399 )...( 410 ): >HRX_HUMAN
VKTQVKNIRQFI

SEQ ID NO: 20960 - protein, 12 aa, Homo sapiens
  ( 415 )...( 426 ): >HRX_HUMAN
SAISSRIIKTPR

SEQ ID NO: 20961 - protein, 12 aa, Homo sapiens
  ( 416 )...( 427 ): >HRX_HUMAN
AISSRIIKTPRR

SEQ ID NO: 20962 - protein, 12 aa, Homo sapiens
  ( 535 )...( 546 ): >HRX_HUMAN
ERSFGSRTTKKL

SEQ ID NO: 20963 - protein, 12 aa, Homo sapiens
  ( 536 )...( 547 ): >HRX_HUMAN
RSFGSRTTKKLS

SEQ ID NO: 20964 - protein, 12 aa, Homo sapiens
  ( 600 )...( 611 ): >HRX_HUMAN
STAPMQGKRKSI

SEQ ID NO: 20965 - protein, 12 aa, Homo sapiens
  ( 601 )...( 612 ): >HRX_HUMAN
TAPMQGKRKSIL

SEQ ID NO: 20966 - protein, 12 aa, Homo sapiens
  ( 602 )...( 613 ): >HRX_HUMAN
APMQGKRKSILR

SEQ ID NO: 20967 - protein, 12 aa, Homo sapiens
  ( 603 )...( 614 ): >HRX_HUMAN
PMQGKRKSILRE

SEQ ID NO: 20968 - protein, 12 aa, Homo sapiens
  ( 604 )...( 615 ): >HRX_HUMAN
MQGKRKSILREP

SEQ ID NO: 20969 - protein, 12 aa, Homo sapiens
  ( 605 )...( 616 ): >HRX_HUMAN
QGKRKSILREPT

SEQ ID NO: 20970 - protein, 12 aa, Homo sapiens
  ( 606 )...( 617 ): >HRX_HUMAN
GKRKSILREPTF

SEQ ID NO: 20971 - protein, 12 aa, Homo sapiens
  ( 634 )...( 645 ): >HRX_HUMAN
SAKYAKEGLIRK

SEQ ID NO: 20972 - protein, 12 aa, Homo sapiens
  ( 635 )...( 646 ): >HRX_HUMAN
AKYAKEGLIRKP

SEQ ID NO: 20973 - protein, 12 aa, Homo sapiens
  ( 636 )...( 647 ): >HRX_HUMAN
KYAKEGLIRKPI

SEQ ID NO: 20974 - protein, 12 aa, Homo sapiens
  ( 751 )...( 762 ): >HRX_HUMAN
PSHSMRTRSGRL

SEQ ID NO: 20975 - protein, 12 aa, Homo sapiens
  ( 752 )...( 763 ): >HRX_HUMAN
SHSMRTRSGRLS

SEQ ID NO: 20976 - protein, 12 aa, Homo sapiens
  ( 753 )...( 764 ): >HRX_HUMAN
HSMRTRSGRLSS

SEQ ID NO: 20977 - protein, 12 aa, Homo sapiens
  ( 953 )...( 964 ): >HRX_HUMAN
TTAVKTKILIKK

SEQ ID NO: 20978 - protein, 12 aa, Homo sapiens
  ( 955 )...( 966 ): >HRX_HUMAN
AVKTKILIKKGR

SEQ ID NO: 20979 - protein, 12 aa, Homo sapiens
  ( 956 )...( 967 ): >HRX_HUMAN
VKTKILIKKGRG

SEQ ID NO: 20980 - protein, 12 aa, Homo sapiens
  ( 957 )...( 968 ): >HRX_HUMAN
KTKILIKKGRGN

SEQ ID NO: 20981 - protein, 12 aa, Homo sapiens
  ( 958 )...( 969 ): >HRX_HUMAN
TKILIKKGRGNL

SEQ ID NO: 20982 - protein, 12 aa, Homo sapiens
  ( 959 )...( 970 ): >HRX_HUMAN
KILIKKGRGNLE

SEQ ID NO: 20983 - protein, 12 aa, Homo sapiens
  ( 960 )...( 971 ): >HRX_HUMAN
ILIKKGRGNLEK

SEQ ID NO: 20984 - protein, 12 aa, Homo sapiens
  ( 961 )...( 972 ): >HRX_HUMAN
LIKKGRGNLEKT

SEQ ID NO: 20985 - protein, 12 aa, Homo sapiens
  ( 962 )...( 973 ): >HRX_HUMAN
IKKGRGNLEKTN

SEQ ID NO: 20986 - protein, 12 aa, Homo sapiens
  ( 963 )...( 974 ): >HRX_HUMAN
KKGRGNLEKTNL

SEQ ID NO: 20987 - protein, 12 aa, Homo sapiens
  ( 1018 )...( 1029 ): >HRX_HUMAN
MTDKRVASLLKK

SEQ ID NO: 20988 - protein, 12 aa, Homo sapiens
  ( 1019 )...( 1030 ): >HRX_HUMAN
TDKRVASLLKKA

SEQ ID NO: 20989 - protein, 12 aa, Homo sapiens
  ( 1020 )...( 1031 ): >HRX_HUMAN
DKRVASLLKKAK

SEQ ID NO: 20990 - protein, 12 aa, Homo sapiens
  ( 1021 )...( 1032 ): >HRX_HUMAN
KRVASLLKKAKA

SEQ ID NO: 20991 - protein, 12 aa, Homo sapiens
  ( 1022 )...( 1033 ): >HRX_HUMAN
RVASLLKKAKAQ

SEQ ID NO: 20992 - protein, 12 aa, Homo sapiens
  ( 1023 )...( 1034 ): >HRX_HUMAN
VASLLKKAKAQL

SEQ ID NO: 20993 - protein, 12 aa, Homo sapiens
  ( 1024 )...( 1035 ): >HRX_HUMAN
ASLLKKAKAQLC

SEQ ID NO: 20994 - protein, 12 aa, Homo sapiens
  ( 1025 )...( 1036 ): >HRX_HUMAN
SLLKKAKAQLCK

SEQ ID NO: 20995 - protein, 12 aa, Homo sapiens
  ( 1026 )...( 1037 ): >HRX_HUMAN
LLKKAKAQLCKI

SEQ ID NO: 20996 - protein, 12 aa, Homo sapiens
  ( 1027 )...( 1038 ): >HRX_HUMAN
LKKAKAQLCKIE

SEQ ID NO: 20997 - protein, 12 aa, Homo sapiens
  ( 1028 )...( 1039 ): >HRX_HUMAN
KKAKAQLCKIEK

SEQ ID NO: 20998 - protein, 12 aa, Homo sapiens
  ( 1061 )...( 1072 ): >HRX_HUMAN
TSVRGPRIKHVC

SEQ ID NO: 20999 - protein, 12 aa, Homo sapiens
  ( 1062 )...( 1073 ): >HRX_HUMAN
SVRGPRIKHVCR

SEQ ID NO: 21000 - protein, 12 aa, Homo sapiens
  ( 1065 )...( 1076 ): >HRX_HUMAN
GPRIKHVCRRAA

SEQ ID NO: 21001 - protein, 12 aa, Homo sapiens
  ( 1066 )...( 1077 ): >HRX_HUMAN
PRIKHVCRRAAV

SEQ ID NO: 21002 - protein, 12 aa, Homo sapiens
  ( 1067 )...( 1078 ): >HRX_HUMAN
RIKHVCRRAAVA

SEQ ID NO: 21003 - protein, 12 aa, Homo sapiens
  ( 1068 )...( 1079 ): >HRX_HUMAN
IKHVCRRAAVAL

SEQ ID NO: 21004 - protein, 12 aa, Homo sapiens
  ( 1069 )...( 1080 ): >HRX_HUMAN
KHVCRRAAVALG

SEQ ID NO: 21005 - protein, 12 aa, Homo sapiens
  ( 1070 )...( 1081 ): >HRX_HUMAN
HVCRRAAVALGR

SEQ ID NO: 21006 - protein, 12 aa, Homo sapiens
  ( 1071 )...( 1082 ): >HRX_HUMAN
VCRRAAVALGRK

SEQ ID NO: 21007 - protein, 12 aa, Homo sapiens
  ( 1074 )...( 1085 ): >HRX_HUMAN
RAAVALGRKRAV

SEQ ID NO: 21008 - protein, 12 aa, Homo sapiens
  ( 1075 )...( 1086 ): >HRX_HUMAN
AAVALGRKRAVF

SEQ ID NO: 21009 - protein, 12 aa, Homo sapiens
  ( 1076 )...( 1087 ): >HRX_HUMAN
AVALGRKRAVFP

SEQ ID NO: 21010 - protein, 12 aa, Homo sapiens
  ( 1128 )...( 1139 ): >HRX_HUMAN
PIKPIKPVTRNK

SEQ ID NO: 21011 - protein, 12 aa, Homo sapiens
  ( 1129 )...( 1140 ): >HRX_HUMAN
IKPIKPVTRNKA

SEQ ID NO: 21012 - protein, 12 aa, Homo sapiens
  ( 1130 )...( 1141 ): >HRX_HUMAN
KPIKPVTRNKAP

SEQ ID NO: 21013 - protein, 12 aa, Homo sapiens
  ( 1131 )...( 1142 ): >HRX_HUMAN
PIKPVTRNKAPQ

SEQ ID NO: 21014 - protein, 12 aa, Homo sapiens
  ( 1139 )...( 1150 ): >HRX_HUMAN
KAPQEPPVKKGR

SEQ ID NO: 21015 - protein, 12 aa, Homo sapiens
  ( 1140 )...( 1151 ): >HRX_HUMAN
APQEPPVKKGRR

SEQ ID NO: 21016 - protein, 12 aa, Homo sapiens
  ( 1174 )...( 1185 ): >HRX_HUMAN
LDKPKFGGRNIK

SEQ ID NO: 21017 - protein, 12 aa, Homo sapiens
  ( 1200 )...( 1211 ): >HRX_HUMAN
MPSKAYLQKQAK

SEQ ID NO: 21018 - protein, 12 aa, Homo sapiens
  ( 1201 )...( 1212 ): >HRX_HUMAN
PSKAYLQKQAKA

SEQ ID NO: 21019 - protein, 12 aa, Homo sapiens
  ( 1202 )...( 1213 ): >HRX_HUMAN
SKAYLQKQAKAV

SEQ ID NO: 21020 - protein, 12 aa, Homo sapiens
  ( 1203 )...( 1214 ): >HRX_HUMAN
KAYLQKQAKAVK

SEQ ID NO: 21021 - protein, 12 aa, Homo sapiens
  ( 1204 )...( 1215 ): >HRX_HUMAN
AYLQKQAKAVKK

SEQ ID NO: 21022 - protein, 12 aa, Homo sapiens
  ( 1205 )...( 1216 ): >HRX_HUMAN
YLQKQAKAVKKK

SEQ ID NO: 21023 - protein, 12 aa, Homo sapiens
  ( 1206 )...( 1217 ): >HRX_HUMAN
LQKQAKAVKKKE

SEQ ID NO: 21024 - protein, 12 aa, Homo sapiens
  ( 1207 )...( 1218 ): >HRX_HUMAN
QKQAKAVKKKEK

SEQ ID NO: 21025 - protein, 12 aa, Homo sapiens
  ( 1208 )...( 1219 ): >HRX_HUMAN
KQAKAVKKKEKK

SEQ ID NO: 21026 - protein, 12 aa, Homo sapiens
  ( 1209 )...( 1220 ): >HRX_HUMAN
QAKAVKKKEKKS

SEQ ID NO: 21027 - protein, 12 aa, Homo sapiens
  ( 1210 )...( 1221 ): >HRX_HUMAN
AKAVKKKEKKSK

SEQ ID NO: 21028 - protein, 12 aa, Homo sapiens
  ( 1211 )...( 1222 ): >HRX_HUMAN
KAVKKKEKKSKT

SEQ ID NO: 21029 - protein, 12 aa, Homo sapiens
  ( 1212 )...( 1223 ): >HRX_HUMAN
AVKKKEKKSKTS

SEQ ID NO: 21030 - protein, 12 aa, Homo sapiens
  ( 1292 )...( 1303 ): >HRX_HUMAN
RKSSKQVSQPAL

SEQ ID NO: 21031 - protein, 12 aa, Homo sapiens
  ( 1341 )...( 1352 ): >HRX_HUMAN
QSKQKKVAPRPS

SEQ ID NO: 21032 - protein, 12 aa, Homo sapiens
  ( 1342 )...( 1353 ): >HRX_HUMAN
SKQKKVAPRPSI

SEQ ID NO: 21033 - protein, 12 aa, Homo sapiens
  ( 1343 )...( 1354 ): >HRX_HUMAN
KQKKVAPRPSIP

SEQ ID NO: 21034 - protein, 12 aa, Homo sapiens
  ( 1344 )...( 1355 ): >HRX_HUMAN
QKKVAPRPSIPV

SEQ ID NO: 21035 - protein, 12 aa, Homo sapiens
  ( 1345 )...( 1356 ): >HRX_HUMAN
KKVAPRPSIPVK

SEQ ID NO: 21036 - protein, 12 aa, Homo sapiens
  ( 1346 )...( 1357 ): >HRX_HUMAN
KVAPRPSIPVKQ

SEQ ID NO: 21037 - protein, 12 aa, Homo sapiens
  ( 1347 )...( 1358 ): >HRX_HUMAN
VAPRPSIPVKQK

SEQ ID NO: 21038 - protein, 12 aa, Homo sapiens
  ( 1516 )...( 1527 ): >HRX_HUMAN
TKPTKKKKVWIC

SEQ ID NO: 21039 - protein, 12 aa, Homo sapiens
  ( 1517 )...( 1528 ): >HRX_HUMAN
KPTKKKKVWICT

SEQ ID NO: 21040 - protein, 12 aa, Homo sapiens
  ( 1518 )...( 1529 ): >HRX_HUMAN
PTKKKKVWICTK

SEQ ID NO: 21041 - protein, 12 aa, Homo sapiens
  ( 1519 )...( 1530 ): >HRX_HUMAN
TKKKKVWICTKC

SEQ ID NO: 21042 - protein, 12 aa, Homo sapiens
  ( 1520 )...( 1531 ): >HRX_HUMAN
KKKKVWICTKCV

SEQ ID NO: 21043 - protein, 12 aa, Homo sapiens
  ( 1521 )...( 1532 ): >HRX_HUMAN
KKKVWICTKCVR

SEQ ID NO: 21044 - protein, 12 aa, Homo sapiens
  ( 1819 )...( 1830 ): >HRX_HUMAN
LMKKIIPAPKPK

SEQ ID NO: 21045 - protein, 12 aa, Homo sapiens
  ( 1918 )...( 1929 ): >HRX_HUMAN
LKNVHMAVIRGK

SEQ ID NO: 21046 - protein, 12 aa, Homo sapiens
  ( 1919 )...( 1930 ): >HRX_HUMAN
KNVHMAVIRGKQ

SEQ ID NO: 21047 - protein, 12 aa, Homo sapiens
  ( 1921 )...( 1932 ): >HRX_HUMAN
VHMAVIRGKQLR

SEQ ID NO: 21048 - protein, 12 aa, Homo sapiens
  ( 1922 )...( 1933 ): >HRX_HUMAN
HMAVIRGKQLRC

SEQ ID NO: 21049 - protein, 12 aa, Homo sapiens
  ( 2003 )...( 2014 ): >HRX_HUMAN
GISLRRKFLNGL

SEQ ID NO: 21050 - protein, 12 aa, Homo sapiens
  ( 2061 )...( 2072 ): >HRX_HUMAN
ARKRCVYTCKIV

SEQ ID NO: 21051 - protein, 12 aa, Homo sapiens
  ( 2062 )...( 2073 ): >HRX_HUMAN
RKRCVYTCKIVE

SEQ ID NO: 21052 - protein, 12 aa, Homo sapiens
  ( 2136 )...( 2147 ): >HRX_HUMAN
YHVISKVPRIRT

SEQ ID NO: 21053 - protein, 12 aa, Homo sapiens
  ( 2137 )...( 2148 ): >HRX_HUMAN
HVISKVPRIRTP

SEQ ID NO: 21054 - protein, 12 aa, Homo sapiens
  ( 2138 )...( 2149 ): >HRX_HUMAN
VISKVPRIRTPS

SEQ ID NO: 21055 - protein, 12 aa, Homo sapiens
  ( 2139 )...( 2150 ): >HRX_HUMAN
ISKVPRIRTPSY

SEQ ID NO: 21056 - protein, 12 aa, Homo sapiens
  ( 2183 )...( 2194 ): >HRX_HUMAN
LSSGLRSIGSRR

SEQ ID NO: 21057 - protein, 12 aa, Homo sapiens
  ( 2184 )...( 2195 ): >HRX_HUMAN
SSGLRSIGSRRH

SEQ ID NO: 21058 - protein, 12 aa, Homo sapiens
  ( 2185 )...( 2196 ): >HRX_HUMAN
SGLRSIGSRRHS

SEQ ID NO: 21059 - protein, 12 aa, Homo sapiens
  ( 2186 )...( 2197 ): >HRX_HUMAN
GLRSIGSRRHST

SEQ ID NO: 21060 - protein, 12 aa, Homo sapiens
  ( 2187 )...( 2198 ): >HRX_HUMAN
LRSIGSRRHSTS

SEQ ID NO: 21061 - protein, 12 aa, Homo sapiens
  ( 2197 )...( 2208 ): >HRX_HUMAN
TSSLSPQRSKLR

SEQ ID NO: 21062 - protein, 12 aa, Homo sapiens
  ( 2198 )...( 2209 ): >HRX_HUMAN
SSLSPQRSKLRI

SEQ ID NO: 21063 - protein, 12 aa, Homo sapiens
  ( 2199 )...( 2210 ): >HRX_HUMAN
SLSPQRSKLRIM

SEQ ID NO: 21064 - protein, 12 aa, Homo sapiens
  ( 2200 )...( 2211 ): >HRX_HUMAN
LSPQRSKLRIMS

SEQ ID NO: 21065 - protein, 12 aa, Homo sapiens
  ( 2205 )...( 2216 ): >HRX_HUMAN
SKLRIMSPMRTG

SEQ ID NO: 21066 - protein, 12 aa, Homo sapiens
  ( 2206 )...( 2217 ): >HRX_HUMAN
KLRIMSPMRTGN

SEQ ID NO: 21067 - protein, 12 aa, Homo sapiens
  ( 2399 )...( 2410 ): >HRX_HUMAN
VKTLKLSGMSNR

SEQ ID NO: 21068 - protein, 12 aa, Homo sapiens
  ( 2426 )...( 2437 ): >HRX_HUMAN
RQKGKKSCKETF

SEQ ID NO: 21069 - protein, 12 aa, Homo sapiens
  ( 2427 )...( 2438 ): >HRX_HUMAN
QKGKKSCKETFK

SEQ ID NO: 21070 - protein, 12 aa, Homo sapiens
  ( 2507 )...( 2518 ): >HRX_HUMAN
GSAKELQAPRKR

SEQ ID NO: 21071 - protein, 12 aa, Homo sapiens
  ( 2508 )...( 2519 ): >HRX_HUMAN
SAKELQAPRKRT

SEQ ID NO: 21072 - protein, 12 aa, Homo sapiens
  ( 2509 )...( 2520 ): >HRX_HUMAN
AKELQAPRKRTV

SEQ ID NO: 21073 - protein, 12 aa, Homo sapiens
  ( 2511 )...( 2522 ): >HRX_HUMAN
ELQAPRKRTVKV

SEQ ID NO: 21074 - protein, 12 aa, Homo sapiens
  ( 2512 )...( 2523 ): >HRX_HUMAN
LQAPRKRTVKVT

SEQ ID NO: 21075 - protein, 12 aa, Homo sapiens
  ( 2513 )...( 2524 ): >HRX_HUMAN
QAPRKRTVKVTL

SEQ ID NO: 21076 - protein, 12 aa, Homo sapiens
  ( 2514 )...( 2525 ): >HRX_HUMAN
APRKRTVKVTLT

SEQ ID NO: 21077 - protein, 12 aa, Homo sapiens
  ( 2515 )...( 2526 ): >HRX_HUMAN
PRKRTVKVTLTP

SEQ ID NO: 21078 - protein, 12 aa, Homo sapiens
  ( 2516 )...( 2527 ): >HRX_HUMAN
RKRTVKVTLTPL

SEQ ID NO: 21079 - protein, 12 aa, Homo sapiens
  ( 2517 )...( 2528 ): >HRX_HUMAN
KRTVKVTLTPLK

SEQ ID NO: 21080 - protein, 12 aa, Homo sapiens
  ( 2518 )...( 2529 ): >HRX_HUMAN
RTVKVTLTPLKM

SEQ ID NO: 21081 - protein, 12 aa, Homo sapiens
  ( 2654 )...( 2665 ): >HRX_HUMAN
KKRGKRSAEGQV

SEQ ID NO: 21082 - protein, 12 aa, Homo sapiens
  ( 2732 )...( 2743 ): >HRX_HUMAN
ATTRKSSQIPKR

SEQ ID NO: 21083 - protein, 12 aa, Homo sapiens
  ( 2734 )...( 2745 ): >HRX_HUMAN
TRKSSQIPKRNG

SEQ ID NO: 21084 - protein, 12 aa, Homo sapiens
  ( 2736 )...( 2747 ): >HRX_HUMAN
KSSQIPKRNGKE

SEQ ID NO: 21085 - protein, 12 aa, Homo sapiens
  ( 3214 )...( 3225 ): >HRX_HUMAN
PSSGLKKRPISR

SEQ ID NO: 21086 - protein, 12 aa, Homo sapiens
  ( 3215 )...( 3226 ): >HRX_HUMAN
SSGLKKRPISRL

SEQ ID NO: 21087 - protein, 12 aa, Homo sapiens
  ( 3216 )...( 3227 ): >HRX_HUMAN
SGLKKRPISRLQ

SEQ ID NO: 21088 - protein, 12 aa, Homo sapiens
  ( 3217 )...( 3228 ): >HRX_HUMAN
GLKKRPISRLQT

SEQ ID NO: 21089 - protein, 12 aa, Homo sapiens
  ( 3226 )...( 3237 ): >HRX_HUMAN
LQTRKNKKLAPS

SEQ ID NO: 21090 - protein, 12 aa, Homo sapiens
  ( 3227 )...( 3238 ): >HRX_HUMAN
QTRKNKKLAPSS

SEQ ID NO: 21091 - protein, 12 aa, Homo sapiens
  ( 3228 )...( 3239 ): >HRX_HUMAN
TRKNKKLAPSST

SEQ ID NO: 21092 - protein, 12 aa, Homo sapiens
  ( 3277 )...( 3288 ): >HRX_HUMAN
SSHRTVPNIIKR

SEQ ID NO: 21093 - protein, 12 aa, Homo sapiens
  ( 3278 )...( 3289 ): >HRX_HUMAN
SHRTVPNIIKRS

SEQ ID NO: 21094 - protein, 12 aa, Homo sapiens
  ( 3280 )...( 3291 ): >HRX_HUMAN
RTVPNIIKRSKS

SEQ ID NO: 21095 - protein, 12 aa, Homo sapiens
  ( 3282 )...( 3293 ): >HRX_HUMAN
VPNIIKRSKSSI

SEQ ID NO: 21096 - protein, 12 aa, Homo sapiens
  ( 3283 )...( 3294 ): >HRX_HUMAN
PNIIKRSKSSIM

SEQ ID NO: 21097 - protein, 12 aa, Homo sapiens
  ( 3284 )...( 3295 ): >HRX_HUMAN
NIIKRSKSSIMY

SEQ ID NO: 21098 - protein, 12 aa, Homo sapiens
  ( 3531 )...( 3542 ): >HRX_HUMAN
PGPTKPKPKTKR

SEQ ID NO: 21099 - protein, 12 aa, Homo sapiens
  ( 3539 )...( 3550 ): >HRX_HUMAN
KTKRFQLPLDKG

SEQ ID NO: 21100 - protein, 12 aa, Homo sapiens
  ( 3550 )...( 3561 ): >HRX_HUMAN
GNGKKHKVSHLR

SEQ ID NO: 21101 - protein, 12 aa, Homo sapiens
  ( 3551 )...( 3562 ): >HRX_HUMAN
NGKKHKVSHLRT

SEQ ID NO: 21102 - protein, 12 aa, Homo sapiens
  ( 3696 )...( 3707 ): >HRX_HUMAN
KVQEARSNARLK

SEQ ID NO: 21103 - protein, 12 aa, Homo sapiens
  ( 3801 )...( 3812 ): >HRX_HUMAN
VQLKSARRATSM

SEQ ID NO: 21104 - protein, 12 aa, Homo sapiens
  ( 3824 )...( 3835 ): >HRX_HUMAN
KKTSKEAVGVYR

SEQ ID NO: 21105 - protein, 12 aa, Homo sapiens
  ( 3838 )...( 3849 ): >HRX_HUMAN
IHGRGLFCKRNI

SEQ ID NO: 21106 - protein, 12 aa, Homo sapiens
  ( 3922 )...( 3933 ): >HRX_HUMAN
GQKHIVIFAMRK

SEQ ID NO: 21107 - protein, 12 aa, Homo sapiens
  ( 3923 )...( 3934 ): >HRX_HUMAN
QKHIVIFAMRKI

SEQ ID NO: 21108 - protein, 12 aa, Homo sapiens
  ( 3926 )...( 3937 ): >HRX_HUMAN
IVIFAMRKIYRG

SEQ ID NO: 21109 - protein, 12 aa, Homo sapiens
  ( 174 )...( 185 ): >HTF4_HUMAN
ALDPLQAKKVRK

SEQ ID NO: 21110 - protein, 12 aa, Homo sapiens
  ( 175 )...( 186 ): >HTF4_HUMAN
LDPLQAKKVRKV

SEQ ID NO: 21111 - protein, 12 aa, Homo sapiens
  ( 176 )...( 187 ): >HTF4_HUMAN
DPLQAKKVRKVP

SEQ ID NO: 21112 - protein, 12 aa, Homo sapiens
  ( 177 )...( 188 ): >HTF4_HUMAN
PLQAKKVRKVPP

SEQ ID NO: 21113 - protein, 12 aa, Homo sapiens
  ( 178 )...( 189 ): >HTF4_HUMAN
LQAKKVRKVPPG

SEQ ID NO: 21114 - protein, 12 aa, Homo sapiens
  ( 179 )...( 190 ): >HTF4_HUMAN
QAKKVRKVPPGL

SEQ ID NO: 21115 - protein, 12 aa, Homo sapiens
  ( 180 )...( 191 ): >HTF4_HUMAN
AKKVRKVPPGLP

SEQ ID NO: 21116 - protein, 12 aa, Homo sapiens
  ( 181 )...( 192 ): >HTF4_HUMAN
KKVRKVPPGLPS

SEQ ID NO: 21117 - protein, 12 aa, Homo sapiens
  ( 545 )...( 556 ): >HTF4_HUMAN
SQKDIKVSSRGR

SEQ ID NO: 21118 - protein, 12 aa, Homo sapiens
  ( 546 )...( 557 ): >HTF4_HUMAN
QKDIKVSSRGRT

SEQ ID NO: 21119 - protein, 12 aa, Homo sapiens
  ( 547 )...( 558 ): >HTF4_HUMAN
KDIKVSSRGRTS

SEQ ID NO: 21120 - protein, 12 aa, Homo sapiens
  ( 208 )...( 219 ): >HXA1_HUMAN
MKVKRNPPKTGK

SEQ ID NO: 21121 - protein, 12 aa, Homo sapiens
  ( 209 )...( 220 ): >HXA1_HUMAN
KVKRNPPKTGKV

SEQ ID NO: 21122 - protein, 12 aa, Homo sapiens
  ( 210 )...( 221 ): >HXA1_HUMAN
VKRNPPKTGKVG

SEQ ID NO: 21123 - protein, 12 aa, Homo sapiens
  ( 211 )...( 222 ): >HXA1_HUMAN
KRNPPKTGKVGE

SEQ ID NO: 21124 - protein, 12 aa, Homo sapiens
  ( 252 )...( 263 ): >HXA1_HUMAN
KYLTRARRVEIA

SEQ ID NO: 21125 - protein, 12 aa, Homo sapiens
  ( 97 )...( 108 ): >HXA2_HUMAN
WMKEKKAAKKTA

SEQ ID NO: 21126 - protein, 12 aa, Homo sapiens
  ( 98 )...( 109 ): >HXA2_HUMAN
MKEKKAAKKTAL

SEQ ID NO: 21127 - protein, 12 aa, Homo sapiens
  ( 99 )...( 110 ): >HXA2_HUMAN
KEKKAAKKTALL

SEQ ID NO: 21128 - protein, 12 aa, Homo sapiens
  ( 139 )...( 150 ): >HXA2_HUMAN
SGGGSRRLRTAY

SEQ ID NO: 21129 - protein, 12 aa, Homo sapiens
  ( 140 )...( 151 ): >HXA2_HUMAN
GGGSRRLRTAYT

SEQ ID NO: 21130 - protein, 12 aa, Homo sapiens
  ( 141 )...( 152 ): >HXA2_HUMAN
GGSRRLRTAYTN

SEQ ID NO: 21131 - protein, 12 aa, Homo sapiens
  ( 142 )...( 153 ): >HXA2_HUMAN
GSRRLRTAYTNT

SEQ ID NO: 21132 - protein, 12 aa, Homo sapiens
  ( 187 )...( 198 ): >HXA3_HUMAN
GQASSKRARTAY

SEQ ID NO: 21133 - protein, 12 aa, Homo sapiens
  ( 188 )...( 199 ): >HXA3_HUMAN
QASSKRARTAYT

SEQ ID NO: 21134 - protein, 12 aa, Homo sapiens
  ( 191 )...( 202 ): >HXA3_HUMAN
SKRARTAYTSAQ

SEQ ID NO: 21135 - protein, 12 aa, Homo sapiens
  ( 192 )...( 203 ): >HXA3_HUMAN
KRARTAYTSAQL

SEQ ID NO: 21136 - protein, 12 aa, Homo sapiens
  ( 244 )...( 255 ): >HXA3_HUMAN
MKYKKDQKGKGM

SEQ ID NO: 21137 - protein, 12 aa, Homo sapiens
  ( 245 )...( 256 ): >HXA3_HUMAN
KYKKDQKGKGML

SEQ ID NO: 21138 - protein, 12 aa, Homo sapiens
  ( 213 )...( 224 ): >HXA4_HUMAN
GEPKRSRTAYTR

SEQ ID NO: 21139 - protein, 12 aa, Homo sapiens
  ( 217 )...( 228 ): >HXA4_HUMAN
RSRTAYTRQQVL

SEQ ID NO: 21140 - protein, 12 aa, Homo sapiens
  ( 193 )...( 204 ): >HXA5_HUMAN
PEGKRARTAYTR

SEQ ID NO: 21141 - protein, 12 aa, Homo sapiens
  ( 148 )...( 159 ): >HXA6_HUMAN
GAVYGSHGRRGR

SEQ ID NO: 21142 - protein, 12 aa, Homo sapiens
  ( 149 )...( 160 ): >HXA6_HUMAN
AVYGSHGRRGRQ

SEQ ID NO: 21143 - protein, 12 aa, Homo sapiens
  ( 150 )...( 161 ): >HXA6_HUMAN
VYGSHGRRGRQT

SEQ ID NO: 21144 - protein, 12 aa, Homo sapiens
  ( 151 )...( 162 ): >HXA6_HUMAN
YGSHGRRGRQTY

SEQ ID NO: 21145 - protein, 12 aa, Homo sapiens
  ( 152 )...( 163 ): >HXA6_HUMAN
GSHGRRGRQTYT

SEQ ID NO: 21146 - protein, 12 aa, Homo sapiens
  ( 311 )...( 322 ): >HXAA_HUMAN
ANWLTAKSGRKK

SEQ ID NO: 21147 - protein, 12 aa, Homo sapiens
  ( 313 )...( 324 ): >HXAA_HUMAN
WLTAKSGRKKRC

SEQ ID NO: 21148 - protein, 12 aa, Homo sapiens
  ( 314 )...( 325 ): >HXAA_HUMAN
LTAKSGRKKRCP

SEQ ID NO: 21149 - protein, 12 aa, Homo sapiens
  ( 315 )...( 326 ): >HXAA_HUMAN
TAKSGRKKRCPY

SEQ ID NO: 21150 - protein, 12 aa, Homo sapiens
  ( 316 )...( 327 ): >HXAA_HUMAN
AKSGRKKRCPYT

SEQ ID NO: 21151 - protein, 12 aa, Homo sapiens
  ( 270 )...( 281 ): >HXAB_HUMAN
KRLQLSRMLNLT

SEQ ID NO: 21152 - protein, 12 aa, Homo sapiens
  ( 322 )...( 333 ): >HXAD_HUMAN
GRKKRVPYTKVQ

SEQ ID NO: 21153 - protein, 12 aa, Homo sapiens
  ( 325 )...( 336 ): >HXAD_HUMAN
KRVPYTKVQLKE

SEQ ID NO: 21154 - protein, 12 aa, Homo sapiens
  ( 347 )...( 358 ): >HXAD_HUMAN
ITKDKRRRISAT

SEQ ID NO: 21155 - protein, 12 aa, Homo sapiens
  ( 348 )...( 359 ): >HXAD_HUMAN
TKDKRRRISATT

SEQ ID NO: 21156 - protein, 12 aa, Homo sapiens
  ( 351 )...( 362 ): >HXAD_HUMAN
KRRRISATTNLS

SEQ ID NO: 21157 - protein, 12 aa, Homo sapiens
  ( 375 )...( 386 ): >HXAD_HUMAN
VKEKKVINKLKT

SEQ ID NO: 21158 - protein, 12 aa, Homo sapiens
  ( 376 )...( 387 ): >HXAD_HUMAN
KEKKVINKLKTT

SEQ ID NO: 21159 - protein, 11 aa, Homo sapiens
  ( 378 )...( 389 ): >HXAD_HUMAN
KKVINKLKTTS

SEQ ID NO: 21160 - protein, 12 aa, Homo sapiens
  ( 184 )...( 195 ): >HXB1_HUMAN
KVKRNPPKTAKV

SEQ ID NO: 21161 - protein, 12 aa, Homo sapiens
  ( 185 )...( 196 ): >HXB1_HUMAN
VKRNPPKTAKVS

SEQ ID NO: 21162 - protein, 12 aa, Homo sapiens
  ( 186 )...( 197 ): >HXB1_HUMAN
KRNPPKTAKVSE

SEQ ID NO: 21163 - protein, 12 aa, Homo sapiens
  ( 226 )...( 237 ): >HXB1_HUMAN
KYLSRARRVEIA

SEQ ID NO: 21164 - protein, 12 aa, Homo sapiens
  ( 258 )...( 269 ): >HXB1_HUMAN
QKKREREGGRVP

SEQ ID NO: 21165 - protein, 12 aa, Homo sapiens
  ( 259 )...( 270 ): >HXB1_HUMAN
KKREREGGRVPP

SEQ ID NO: 21166 - protein, 12 aa, Homo sapiens
  ( 59 )...( 70 ): >HXB2_HUMAN
GASTLQRPRSQK

SEQ ID NO: 21167 - protein, 12 aa, Homo sapiens
  ( 99 )...( 110 ): >HXB2_HUMAN
KEKKSAKKPSQS

SEQ ID NO: 21168 - protein, 12 aa, Homo sapiens
  ( 140 )...( 151 ): >HXB2_HUMAN
GGGARRLRTAYT

SEQ ID NO: 21169 - protein, 12 aa, Homo sapiens
  ( 141 )...( 152 ): >HXB2_HUMAN
GGARRLRTAYTN

SEQ ID NO: 21170 - protein, 12 aa, Homo sapiens
  ( 142 )...( 153 ): >HXB2_HUMAN
GARRLRTAYTNT

SEQ ID NO: 21171 - protein, 12 aa, Homo sapiens
  ( 143 )...( 154 ): >HXB2_HUMAN
ARRLRTAYTNTQ

SEQ ID NO: 21172 - protein, 12 aa, Homo sapiens
  ( 188 )...( 199 ): >HXB3_HUMAN
SKRARTAYTSAQ

SEQ ID NO: 21173 - protein, 12 aa, Homo sapiens
  ( 189 )...( 200 ): >HXB3_HUMAN
KRARTAYTSAQL

SEQ ID NO: 21174 - protein, 12 aa, Homo sapiens
  ( 242 )...( 253 ): >HXB3_HUMAN
KYKKDQKAKGLA

SEQ ID NO: 21175 - protein, 12 aa, Homo sapiens
  ( 53 )...( 64 ): >HXB4_HUMAN
GFGRRAACTVQR

SEQ ID NO: 21176 - protein, 12 aa, Homo sapiens
  ( 54 )...( 65 ): >HXB4_HUMAN
FGRRAACTVQRY

SEQ ID NO: 21177 - protein, 12 aa, Homo sapiens
  ( 55 )...( 66 ): >HXB4_HUMAN
GRRAACTVQRYA

SEQ ID NO: 21178 - protein, 12 aa, Homo sapiens
  ( 56 )...( 67 ): >HXB4_HUMAN
RRAACTVQRYAA

SEQ ID NO: 21179 - protein, 12 aa, Homo sapiens
  ( 160 )...( 171 ): >HXB4_HUMAN
GEPKRSRTAYTR

SEQ ID NO: 21180 - protein, 12 aa, Homo sapiens
  ( 164 )...( 175 ): >HXB4_HUMAN
RSRTAYTRQQVL

SEQ ID NO: 21181 - protein, 12 aa, Homo sapiens
  ( 187 )...( 198 ): >HXB4_HUMAN
LTRRRRVEIAHA

SEQ ID NO: 21182 - protein, 12 aa, Homo sapiens
  ( 188 )...( 199 ): >HXB4_HUMAN
TRRRRVEIAHAL

SEQ ID NO: 21183 - protein, 12 aa, Homo sapiens
  ( 192 )...( 203 ): >HXB5_HUMAN
PDGKRARTAYTR

SEQ ID NO: 21184 - protein, 12 aa, Homo sapiens
  ( 141 )...( 152 ): >HXB6_HUMAN
SFGPSGRRGRQT

SEQ ID NO: 21185 - protein, 12 aa, Homo sapiens
  ( 142 )...( 153 ): >HXB6_HUMAN
FGPSGRRGRQTY

SEQ ID NO: 21186 - protein, 12 aa, Homo sapiens
  ( 143 )...( 154 ): >HXB6_HUMAN
GPSGRRGRQTYT

SEQ ID NO: 21187 - protein, 12 aa, Homo sapiens
  ( 144 )...( 155 ): >HXB6_HUMAN
PSGRRGRQTYTR

SEQ ID NO: 21188 - protein, 12 aa, Homo sapiens
  ( 134 )...( 145 ): >HXB7_HUMAN
GTDRKRGRQTYT

SEQ ID NO: 21189 - protein, 12 aa, Homo sapiens
  ( 143 )...( 154 ): >HXB8_HUMAN
AAGRRRGRQTYS

SEQ ID NO: 21190 - protein, 12 aa, Homo sapiens
  ( 171 )...( 182 ): >HXB8_HUMAN
LTRKRRIEVSHA

SEQ ID NO: 21191 - protein, 12 aa, Homo sapiens
  ( 172 )...( 183 ): >HXB8_HUMAN
TRKRRIEVSHAL

SEQ ID NO: 21192 - protein, 12 aa, Homo sapiens
  ( 173 )...( 184 ): >HXB8_HUMAN
RKRRIEVSHALG

SEQ ID NO: 21193 - protein, 12 aa, Homo sapiens
  ( 216 )...( 227 ): >HXBD_HUMAN
GRKKRIPYSKGQ

SEQ ID NO: 21194 - protein, 12 aa, Homo sapiens
  ( 241 )...( 252 ): >HXBD_HUMAN
ITKDKRRKISAA

SEQ ID NO: 21195 - protein, 12 aa, Homo sapiens
  ( 242 )...( 253 ): >HXBD_HUMAN
TKDKRRKISAAT

SEQ ID NO: 21196 - protein, 12 aa, Homo sapiens
  ( 243 )...( 254 ): >HXBD_HUMAN
KDKRRKISAATS

SEQ ID NO: 21197 - protein, 12 aa, Homo sapiens
  ( 244 )...( 255 ): >HXBD_HUMAN
DKRRKISAATSL

SEQ ID NO: 21198 - protein, 12 aa, Homo sapiens
  ( 245 )...( 256 ): >HXBD_HUMAN
KRRKISAATSLS

SEQ ID NO: 21199 - protein, 12 aa, Homo sapiens
  ( 267 )...( 278 ): >HXBD_HUMAN
RRVKEKKVLAKV

SEQ ID NO: 21200 - protein, 12 aa, Homo sapiens
  ( 268 )...( 279 ): >HXBD_HUMAN
RVKEKKVLAKVK

SEQ ID NO: 21201 - protein, 12 aa, Homo sapiens
  ( 269 )...( 280 ): >HXBD_HUMAN
VKEKKVLAKVKN

SEQ ID NO: 21202 - protein, 12 aa, Homo sapiens
  ( 270 )...( 281 ): >HXBD_HUMAN
KEKKVLAKVKNS

SEQ ID NO: 21203 - protein, 12 aa, Homo sapiens
  ( 272 )...( 283 ): >HXBD_HUMAN
KKVLAKVKNSAT

SEQ ID NO: 21204 - protein, 12 aa, Homo sapiens
  ( 154 )...( 165 ): >HXC4_HUMAN
GEPKRSRAAYTR

SEQ ID NO: 21205 - protein, 12 aa, Homo sapiens
  ( 158 )...( 169 ): >HXC4_HUMAN
RSRAAYTRQQVL

SEQ ID NO: 21206 - protein, 12 aa, Homo sapiens
  ( 134 )...( 145 ): >HXC6_HUMAN
GVGYGADRRRGR

SEQ ID NO: 21207 - protein, 12 aa, Homo sapiens
  ( 135 )...( 146 ): >HXC6_HUMAN
VGYGADRRRGRQ

SEQ ID NO: 21208 - protein, 12 aa, Homo sapiens
  ( 136 )...( 147 ): >HXC6_HUMAN
GYGADRRRGRQI

SEQ ID NO: 21209 - protein, 12 aa, Homo sapiens
  ( 144 )...( 155 ): >HXC8_HUMAN
PHAPGRRSGRQT

SEQ ID NO: 21210 - protein, 12 aa, Homo sapiens
  ( 145 )...( 156 ): >HXC8_HUMAN
HAPGRRSGRQTY

SEQ ID NO: 21211 - protein, 12 aa, Homo sapiens
  ( 146 )...( 157 ): >HXC8_HUMAN
APGRRSGRQTYS

SEQ ID NO: 21212 - protein, 12 aa, Homo sapiens
  ( 174 )...( 185 ): >HXC8_HUMAN
LTRKRRIEVSHA

SEQ ID NO: 21213 - protein, 12 aa, Homo sapiens
  ( 175 )...( 186 ): >HXC8_HUMAN
TRKRRIEVSHAL

SEQ ID NO: 21214 - protein, 12 aa, Homo sapiens
  ( 176 )...( 187 ): >HXC8_HUMAN
RKRRIEVSHALG

SEQ ID NO: 21215 - protein, 12 aa, Homo sapiens
  ( 259 )...( 270 ): >HXCA_HUMAN
TGNWLTAKSGRK

SEQ ID NO: 21216 - protein, 12 aa, Homo sapiens
  ( 260 )...( 271 ): >HXCA_HUMAN
GNWLTAKSGRKK

SEQ ID NO: 21217 - protein, 12 aa, Homo sapiens
  ( 262 )...( 273 ): >HXCA_HUMAN
WLTAKSGRKKRC

SEQ ID NO: 21218 - protein, 12 aa, Homo sapiens
  ( 263 )...( 274 ): >HXCA_HUMAN
LTAKSGRKKRCP

SEQ ID NO: 21219 - protein, 12 aa, Homo sapiens
  ( 264 )...( 275 ): >HXCA_HUMAN
TAKSGRKKRCPY

SEQ ID NO: 21220 - protein, 12 aa, Homo sapiens
  ( 265 )...( 276 ): >HXCA_HUMAN
AKSGRKKRCPYT

SEQ ID NO: 21221 - protein, 12 aa, Homo sapiens
  ( 261 )...( 272 ): >HXCB_HUMAN
KRLQLSRMLNLT

SEQ ID NO: 21222 - protein, 12 aa, Homo sapiens
  ( 269 )...( 280 ): >HXCC_HUMAN
KKRLLLREQALS

SEQ ID NO: 21223 - protein, 12 aa, Homo sapiens
  ( 260 )...( 271 ): >HXCD_HUMAN
GRKKRVPYTKVQ

SEQ ID NO: 21224 - protein, 12 aa, Homo sapiens
  ( 263 )...( 274 ): >HXCD_HUMAN
KRVPYTKVQLKE

SEQ ID NO: 21225 - protein, 12 aa, Homo sapiens
  ( 285 )...( 296 ): >HXCD_HUMAN
ITKEKRRRISAT

SEQ ID NO: 21226 - protein, 12 aa, Homo sapiens
  ( 286 )...( 297 ): >HXCD_HUMAN
TKEKRRRISATT

SEQ ID NO: 21227 - protein, 12 aa, Homo sapiens
  ( 288 )...( 299 ): >HXCD_HUMAN
EKRRRISATTNL

SEQ ID NO: 21228 - protein, 12 aa, Homo sapiens
  ( 289 )...( 300 ): >HXCD_HUMAN
KRRRISATTNLS

SEQ ID NO: 21229 - protein, 12 aa, Homo sapiens
  ( 311 )...( 322 ): >HXCD_HUMAN
RRVKEKKVVSKS

SEQ ID NO: 21230 - protein, 12 aa, Homo sapiens
  ( 312 )...( 323 ): >HXCD_HUMAN
RVKEKKVVSKSK

SEQ ID NO: 21231 - protein, 12 aa, Homo sapiens
  ( 313 )...( 324 ): >HXCD_HUMAN
VKEKKVVSKSKA

SEQ ID NO: 21232 - protein, 12 aa, Homo sapiens
  ( 314 )...( 325 ): >HXCD_HUMAN
KEKKVVSKSKAP

SEQ ID NO: 21233 - protein, 12 aa, Homo sapiens
  ( 316 )...( 327 ): >HXCD_HUMAN
KKVVSKSKAPHL

SEQ ID NO: 21234 - protein, 12 aa, Homo sapiens
  ( 210 )...( 221 ): >HXD1_HUMAN
VKRNASKKGKLA

SEQ ID NO: 21235 - protein, 12 aa, Homo sapiens
  ( 211 )...( 222 ): >HXD1_HUMAN
KRNASKKGKLAE

SEQ ID NO: 21236 - protein, 12 aa, Homo sapiens
  ( 212 )...( 223 ): >HXD1_HUMAN
RNASKKGKLAEY

SEQ ID NO: 21237 - protein, 12 aa, Homo sapiens
  ( 252 )...( 263 ): >HXD1_HUMAN
KYLTRARRIEIA

SEQ ID NO: 21238 - protein, 12 aa, Homo sapiens
  ( 283 )...( 294 ): >HXD1_HUMAN
KQKKREREGLLA

SEQ ID NO: 21239 - protein, 12 aa, Homo sapiens
  ( 175 )...( 186 ): >HXD3_HUMAN
GPASKRVRTAYT

SEQ ID NO: 21240 - protein, 12 aa, Homo sapiens
  ( 176 )...( 187 ): >HXD3_HUMAN
PASKRVRTAYTS

SEQ ID NO: 21241 - protein, 12 aa, Homo sapiens
  ( 177 )...( 188 ): >HXD3_HUMAN
ASKRVRTAYTSA

SEQ ID NO: 21242 - protein, 12 aa, Homo sapiens
  ( 178 )...( 189 ): >HXD3_HUMAN
SKRVRTAYTSAQ

SEQ ID NO: 21243 - protein, 12 aa, Homo sapiens
  ( 179 )...( 190 ): >HXD3_HUMAN
KRVRTAYTSAQL

SEQ ID NO: 21244 - protein, 12 aa, Homo sapiens
  ( 231 )...( 242 ): >HXD3_HUMAN
MKYKKDQKAKGI

SEQ ID NO: 21245 - protein, 12 aa, Homo sapiens
  ( 232 )...( 243 ): >HXD3_HUMAN
KYKKDQKAKGIL

SEQ ID NO: 21246 - protein, 12 aa, Homo sapiens
  ( 152 )...( 163 ): >HXD4_HUMAN
GEPKRSRTAYTR

SEQ ID NO: 21247 - protein, 12 aa, Homo sapiens
  ( 156 )...( 167 ): >HXD4_HUMAN
RSRTAYTRQQVL

SEQ ID NO: 21248 - protein, 12 aa, Homo sapiens
  ( 194 )...( 205 ): >HXD8_HUMAN
APGRRRGRQTYS

SEQ ID NO: 21249 - protein, 12 aa, Homo sapiens
  ( 222 )...( 233 ): >HXD8_HUMAN
LTRKRRIEVSHA

SEQ ID NO: 21250 - protein, 12 aa, Homo sapiens
  ( 223 )...( 234 ): >HXD8_HUMAN
TRKRRIEVSHAL

SEQ ID NO: 21251 - protein, 12 aa, Homo sapiens
  ( 224 )...( 235 ): >HXD8_HUMAN
RKRRIEVSHALA

SEQ ID NO: 21252 - protein, 12 aa, Homo sapiens
  ( 257 )...( 268 ): >HXDA_HUMAN
TSNWLTAKSGRK

SEQ ID NO: 21253 - protein, 12 aa, Homo sapiens
  ( 258 )...( 269 ): >HXDA_HUMAN
SNWLTAKSGRKK

SEQ ID NO: 21254 - protein, 12 aa, Homo sapiens
  ( 260 )...( 271 ): >HXDA_HUMAN
WLTAKSGRKKRC

SEQ ID NO: 21255 - protein, 12 aa, Homo sapiens
  ( 261 )...( 272 ): >HXDA_HUMAN
LTAKSGRKKRCP

SEQ ID NO: 21256 - protein, 12 aa, Homo sapiens
  ( 262 )...( 273 ): >HXDA_HUMAN
TAKSGRKKRCPY

SEQ ID NO: 21257 - protein, 12 aa, Homo sapiens
  ( 263 )...( 274 ): >HXDA_HUMAN
AKSGRKKRCPYT

SEQ ID NO: 21258 - protein, 12 aa, Homo sapiens
  ( 258 )...( 269 ): >HXDB_HUMAN
SSAVAPQRSRKK

SEQ ID NO: 21259 - protein, 12 aa, Homo sapiens
  ( 295 )...( 306 ): >HXDB_HUMAN
KRLQLSRMLNLT

SEQ ID NO: 21260 - protein, 12 aa, Homo sapiens
  ( 202 )...( 213 ): >HXDC_HUMAN
GGPGEARKKRKP

SEQ ID NO: 21261 - protein, 12 aa, Homo sapiens
  ( 260 )...( 271 ): >HXDC_HUMAN
MKKKRVVLREQA

SEQ ID NO: 21262 - protein, 12 aa, Homo sapiens
  ( 261 )...( 272 ): >HXDC_HUMAN
KKKRVVLREQAL

SEQ ID NO: 21263 - protein, 12 aa, Homo sapiens
  ( 262 )...( 273 ): >HXDC_HUMAN
KKRVVLREQALA

SEQ ID NO: 21264 - protein, 12 aa, Homo sapiens
  ( 297 )...( 308 ): >HXDD_HUMAN
KRRRISAATNLS

SEQ ID NO: 21265 - protein, 12 aa, Homo sapiens
  ( 320 )...( 331 ): >HXDD_HUMAN
RVKDKKIVSKLK

SEQ ID NO: 21266 - protein, 12 aa, Homo sapiens
  ( 80 )...( 91 ): >ID1_HUMAN
VPTLPQNRKVSK

SEQ ID NO: 21267 - protein, 12 aa, Homo sapiens
  ( 81 )...( 92 ): >ID1_HUMAN
PTLPQNRKVSKV

SEQ ID NO: 21268 - protein, 12 aa, Homo sapiens
  ( 1 )...( 12 ): >ID2_HUMAN
MKAFSPVRSVRK

SEQ ID NO: 21269 - protein, 12 aa, Homo sapiens
  ( 4 )...( 15 ): >ID2_HUMAN
FSPVRSVRKNSL

SEQ ID NO: 21270 - protein, 12 aa, Homo sapiens
  ( 19 )...( 30 ): >ID3_HUMAN
ERSLAIARGRGK

SEQ ID NO: 21271 - protein, 12 aa, Homo sapiens
  ( 2 )...( 13 ): >ID4_HUMAN
KAVSPVRPSGRK

SEQ ID NO: 21272 - protein, 12 aa, Homo sapiens
  ( 71 )...( 82 ): >ID4_HUMAN
CYSRLRRLVPTI

SEQ ID NO: 21273 - protein, 12 aa, Homo sapiens
  ( 73 )...( 84 ): >ID4_HUMAN
SRLRRLVPTIPP

SEQ ID NO: 21274 - protein, 12 aa, Homo sapiens
  ( 75 )...( 86 ): >ID4_HUMAN
LRRLVPTIPPNK

SEQ ID NO: 21275 - protein, 12 aa, Homo sapiens
  ( 77 )...( 88 ): >ID4_HUMAN
RLVPTIPPNKKV

SEQ ID NO: 21276 - protein, 12 aa, Homo sapiens
  ( 164 )...( 175 ): >ITF2_HUMAN
SAMEVQTKKVRK

SEQ ID NO: 21277 - protein, 12 aa, Homo sapiens
  ( 165 )...( 176 ): >ITF2_HUMAN
AMEVQTKKVRKV

SEQ ID NO: 21278 - protein, 12 aa, Homo sapiens
  ( 166 )...( 177 ): >ITF2_HUMAN
MEVQTKKVRKVP

SEQ ID NO: 21279 - protein, 12 aa, Homo sapiens
  ( 167 )...( 178 ): >ITF2_HUMAN
EVQTKKVRKVPP

SEQ ID NO: 21280 - protein, 12 aa, Homo sapiens
  ( 168 )...( 179 ): >ITF2_HUMAN
VQTKKVRKVPPG

SEQ ID NO: 21281 - protein, 12 aa, Homo sapiens
  ( 169 )...( 180 ): >ITF2_HUMAN
QTKKVRKVPPGL

SEQ ID NO: 21282 - protein, 12 aa, Homo sapiens
  ( 170 )...( 181 ): >ITF2_HUMAN
TKKVRKVPPGLP

SEQ ID NO: 21283 - protein, 12 aa, Homo sapiens
  ( 171 )...( 182 ): >ITF2_HUMAN
KKVRKVPPGLPS

SEQ ID NO: 21284 - protein, 12 aa, Homo sapiens
  ( 280 )...( 291 ): >JUNB_HUMAN
LAATKCRKRKLE

SEQ ID NO: 21285 - protein, 12 aa, Homo sapiens
  ( 144 )...( 155 ): >KLF5_HUMAN
THLRTGLYKSQR

SEQ ID NO: 21286 - protein, 12 aa, Homo sapiens
  ( 146 )...( 157 ): >KLF5_HUMAN
LRTGLYKSQRPC

SEQ ID NO: 21287 - protein, 12 aa, Homo sapiens
  ( 147 )...( 158 ): >KLF5_HUMAN
RTGLYKSQRPCV

SEQ ID NO: 21288 - protein, 12 aa, Homo sapiens
  ( 63 )...( 74 ): >KLF6_HUMAN
LWTKIILAREKK

SEQ ID NO: 21289 - protein, 12 aa, Homo sapiens
  ( 207 )...( 218 ): >KLF6_HUMAN
CRKVYTKSSHLK

SEQ ID NO: 21290 - protein, 12 aa, Homo sapiens
  ( 208 )...( 219 ): >KLF6_HUMAN
RKVYTKSSHLKA

SEQ ID NO: 21291 - protein, 12 aa, Homo sapiens
  ( 226 )...( 237 ): >KLF7_HUMAN
CRKVYTKSSHLK

SEQ ID NO: 21292 - protein, 12 aa, Homo sapiens
  ( 227 )...( 238 ): >KLF7_HUMAN
RKVYTKSSHLKA

SEQ ID NO: 21293 - protein, 12 aa, Homo sapiens
  ( 67 )...( 78 ): >KR18_HUMAN
WTVKSCVKIARK

SEQ ID NO: 21294 - protein, 12 aa, Homo sapiens
  ( 68 )...( 79 ): >KR18_HUMAN
TVKSCVKIARKP

SEQ ID NO: 21295 - protein, 12 aa, Homo sapiens
  ( 69 )...( 80 ): >KR18_HUMAN
VKSCVKIARKPR

SEQ ID NO: 21296 - protein, 12 aa, Homo sapiens
  ( 70 )...( 81 ): >KR18_HUMAN
KSCVKIARKPRT

SEQ ID NO: 21297 - protein, 12 aa, Homo sapiens
  ( 72 )...( 83 ): >KR18_HUMAN
CVKIARKPRTRE

SEQ ID NO: 21298 - protein, 12 aa, Homo sapiens
  ( 73 )...( 84 ): >KR18_HUMAN
VKIARKPRTREC

SEQ ID NO: 21299 - protein, 12 aa, Homo sapiens
  ( 74 )...( 85 ): >KR18_HUMAN
KIARKPRTRECV

SEQ ID NO: 21300 - protein, 12 aa, Homo sapiens
  ( 75 )...( 86 ): >KR18_HUMAN
IARKPRTRECVK

SEQ ID NO: 21301 - protein, 12 aa, Homo sapiens
  ( 76 )...( 87 ): >KR18_HUMAN
ARKPRTRECVKG

SEQ ID NO: 21302 - protein, 12 aa, Homo sapiens
  ( 77 )...( 88 ): >KR18_HUMAN
RKPRTRECVKGV

SEQ ID NO: 21303 - protein, 12 aa, Homo sapiens
  ( 78 )...( 89 ): >KR18_HUMAN
KPRTRECVKGVV

SEQ ID NO: 21304 - protein, 12 aa, Homo sapiens
  ( 153 )...( 164 ): >KR18_HUMAN
KGVLMAQKEGKR

SEQ ID NO: 21305 - protein, 12 aa, Homo sapiens
  ( 242 )...( 253 ): >KR18_HUMAN
SLLTQRRKANSC

SEQ ID NO: 21306 - protein, 12 aa, Homo sapiens
  ( 243 )...( 254 ): >KR18_HUMAN
LLTQRRKANSCG

SEQ ID NO: 21307 - protein, 12 aa, Homo sapiens
  ( 244 )...( 255 ): >KR18_HUMAN
LTQRRKANSCGK

SEQ ID NO: 21308 - protein, 12 aa, Homo sapiens
  ( 438 )...( 449 ): >KR18_HUMAN
SYLGRHRRVHTG

SEQ ID NO: 21309 - protein, 12 aa, Homo sapiens
  ( 440 )...( 451 ): >KR18_HUMAN
LGRHRRVHTGEK

SEQ ID NO: 21310 - protein, 12 aa, Homo sapiens
  ( 441 )...( 452 ): >KR18_HUMAN
GRHRRVHTGEKP

SEQ ID NO: 21311 - protein, 12 aa, Homo sapiens
  ( 767 )...( 778 ): >KR18_HUMAN
GKAFRVRSSLTT

SEQ ID NO: 21312 - protein, 12 aa, Homo sapiens
  ( 130 )...( 141 ): >LYL1_HUMAN
GHQPQKVARRVF

SEQ ID NO: 21313 - protein, 12 aa, Homo sapiens
  ( 133 )...( 144 ): >LYL1_HUMAN
PQKVARRVFTNS

SEQ ID NO: 21314 - protein, 12 aa, Homo sapiens
  ( 171 )...( 182 ): >LYL1_HUMAN
RKLSKNEVLRLA

SEQ ID NO: 21315 - protein, 12 aa, Homo sapiens
  ( 180 )...( 191 ): >LYL1_HUMAN
RLAMKYIGFLVR

SEQ ID NO: 21316 - protein, 12 aa, Homo sapiens
  ( 38 )...( 49 ): >MAD4_HUMAN
AREKTKAAGLVR

SEQ ID NO: 21317 - protein, 12 aa, Homo sapiens
  ( 39 )...( 50 ): >MAD4_HUMAN
REKTKAAGLVRK

SEQ ID NO: 21318 - protein, 12 aa, Homo sapiens
  ( 40 )...( 51 ): >MAD4_HUMAN
EKTKAAGLVRKA

SEQ ID NO: 21319 - protein, 12 aa, Homo sapiens
  ( 88 )...( 99 ): >MAD4_HUMAN
RHTTLSLLKRAK

SEQ ID NO: 21320 - protein, 12 aa, Homo sapiens
  ( 92 )...( 103 ): >MAD4_HUMAN
LSLLKRAKVHIK

SEQ ID NO: 21321 - protein, 12 aa, Homo sapiens
  ( 93 )...( 104 ): >MAD4_HUMAN
SLLKRAKVHIKK

SEQ ID NO: 21322 - protein, 12 aa, Homo sapiens
  ( 94 )...( 105 ): >MAD4_HUMAN
LLKRAKVHIKKL

SEQ ID NO: 21323 - protein, 12 aa, Homo sapiens
  ( 95 )...( 106 ): >MAD4_HUMAN
LKRAKVHIKKLE

SEQ ID NO: 21324 - protein, 12 aa, Homo sapiens
  ( 69 )...( 80 ): >MAD_HUMAN
RAHLRLCLEKLK

SEQ ID NO: 21325 - protein, 12 aa, Homo sapiens
  ( 96 )...( 107 ): >MAD_HUMAN
SLLTKAKLHIKK

SEQ ID NO: 21326 - protein, 12 aa, Homo sapiens
  ( 97 )...( 108 ): >MAD_HUMAN
LLTKAKLHIKKL

SEQ ID NO: 21327 - protein, 12 aa, Homo sapiens
  ( 127 )...( 138 ): >MAD_HUMAN
RHLKRQLEKLGI

SEQ ID NO: 21328 - protein, 12 aa, Homo sapiens
  ( 3 )...( 14 ): >MAFG_HUMAN
TPNKGNKALKVK

SEQ ID NO: 21329 - protein, 12 aa, Homo sapiens
  ( 4 )...( 15 ): >MAFG_HUMAN
PNKGNKALKVKR

SEQ ID NO: 21330 - protein, 12 aa, Homo sapiens
  ( 5 )...( 16 ): >MAFG_HUMAN
NKGNKALKVKRE

SEQ ID NO: 21331 - protein, 12 aa, Homo sapiens
  ( 6 )...( 17 ): >MAFG_HUMAN
KGNKALKVKREP

SEQ ID NO: 21332 - protein, 12 aa, Homo sapiens
  ( 7 )...( 18 ): >MAFG_HUMAN
GNKALKVKREPG

SEQ ID NO: 21333 - protein, 12 aa, Homo sapiens
  ( 56 )...( 67 ): >MAFG_HUMAN
RRTLKNRGYAAS

SEQ ID NO: 21334 - protein, 12 aa, Homo sapiens
  ( 61 )...( 72 ): >MAFG_HUMAN
NRGYAASCRVKR

SEQ ID NO: 21335 - protein, 12 aa, Homo sapiens
  ( 62 )...( 73 ): >MAFG_HUMAN
RGYAASCRVKRV

SEQ ID NO: 21336 - protein, 12 aa, Homo sapiens
  ( 63 )...( 74 ): >MAFG_HUMAN
GYAASCRVKRVT

SEQ ID NO: 21337 - protein, 12 aa, Homo sapiens
  ( 64 )...( 75 ): >MAFG_HUMAN
YAASCRVKRVTQ

SEQ ID NO: 21338 - protein, 12 aa, Homo sapiens
  ( 65 )...( 76 ): >MAFG_HUMAN
AASCRVKRVTQK

SEQ ID NO: 21339 - protein, 12 aa, Homo sapiens
  ( 66 )...( 77 ): >MAFG_HUMAN
ASCRVKRVTQKE

SEQ ID NO: 21340 - protein, 12 aa, Homo sapiens
  ( 119 )...( 130 ): >MAFG_HUMAN
RTVARSPVAPAR

SEQ ID NO: 21341 - protein, 12 aa, Homo sapiens
  ( 3 )...( 14 ): >MAFK_HUMAN
TNPKPNKALKVK

SEQ ID NO: 21342 - protein, 12 aa, Homo sapiens
  ( 6 )...( 17 ): >MAFK_HUMAN
KPNKALKVKKEA

SEQ ID NO: 21343 - protein, 12 aa, Homo sapiens
  ( 7 )...( 18 ): >MAFK_HUMAN
PNKALKVKKEAG

SEQ ID NO: 21344 - protein, 12 aa, Homo sapiens
  ( 56 )...( 67 ): >MAFK_HUMAN
RRTLKNRGYAAS

SEQ ID NO: 21345 - protein, 12 aa, Homo sapiens
  ( 61 )...( 72 ): >MAFK_HUMAN
NRGYAASCRIKR

SEQ ID NO: 21346 - protein, 12 aa, Homo sapiens
  ( 62 )...( 73 ): >MAFK_HUMAN
RGYAASCRIKRV

SEQ ID NO: 21347 - protein, 12 aa, Homo sapiens
  ( 63 )...( 74 ): >MAFK_HUMAN
GYAASCRIKRVT

SEQ ID NO: 21348 - protein, 12 aa, Homo sapiens
  ( 64 )...( 75 ): >MAFK_HUMAN
YAASCRIKRVTQ

SEQ ID NO: 21349 - protein, 12 aa, Homo sapiens
  ( 65 )...( 76 ): >MAFK_HUMAN
AASCRIKRVTQK

SEQ ID NO: 21350 - protein, 12 aa, Homo sapiens
  ( 66 )...( 77 ): >MAFK_HUMAN
ASCRIKRVTQKE

SEQ ID NO: 21351 - protein, 12 aa, Homo sapiens
  ( 12 )...( 23 ): >MAT1_HUMAN
TKYRNPSLKLMV

SEQ ID NO: 21352 - protein, 12 aa, Homo sapiens
  ( 50 )...( 61 ): >MAT1_HUMAN
GTPLRKSNFRVQ

SEQ ID NO: 21353 - protein, 12 aa, Homo sapiens
  ( 70 )...( 81 ): >MAT1_HUMAN
KEVEIRKKVLKI

SEQ ID NO: 21354 - protein, 12 aa, Homo sapiens
  ( 72 )...( 83 ): >MAT1_HUMAN
VEIRKKVLKIYN

SEQ ID NO: 21355 - protein, 12 aa, Homo sapiens
  ( 131 )...( 142 ): >MAT1_HUMAN
DVIQKNKLKLTR

SEQ ID NO: 21356 - protein, 12 aa, Homo sapiens
  ( 132 )...( 143 ): >MAT1_HUMAN
VIQKNKLKLTRE

SEQ ID NO: 21357 - protein, 12 aa, Homo sapiens
  ( 266 )...( 277 ): >MAZ_HUMAN
VTTTASGKRIRK

SEQ ID NO: 21358 - protein, 12 aa, Homo sapiens
  ( 267 )...( 278 ): >MAZ_HUMAN
TTTASGKRIRKN

SEQ ID NO: 21359 - protein, 12 aa, Homo sapiens
  ( 268 )...( 279 ): >MAZ_HUMAN
TTASGKRIRKNH

SEQ ID NO: 21360 - protein, 12 aa, Homo sapiens
  ( 269 )...( 280 ): >MAZ_HUMAN
TASGKRIRKNHA

SEQ ID NO: 21361 - protein, 12 aa, Homo sapiens
  ( 271 )...( 282 ): >MAZ_HUMAN
SGKRIRKNHACE

SEQ ID NO: 21362 - protein, 12 aa, Homo sapiens
  ( 376 )...( 387 ): >MAZ_HUMAN
ATKDRLRAHTVR

SEQ ID NO: 21363 - protein, 12 aa, Homo sapiens
  ( 1 )...( 12 ): >MEFA_HUMAN
MGRKKIQITRIM

SEQ ID NO: 21364 - protein, 12 aa, Homo sapiens
  ( 2 )...( 13 ): >MEFA_HUMAN
GRKKIQITRIMD

SEQ ID NO: 21365 - protein, 12 aa, Homo sapiens
  ( 17 )...( 28 ): >MEFA_HUMAN
RQVTFTKRKFGL

SEQ ID NO: 21366 - protein, 12 aa, Homo sapiens
  ( 18 )...( 29 ): >MEFA_HUMAN
QVTFTKRKFGLM

SEQ ID NO: 21367 - protein, 12 aa, Homo sapiens
  ( 19 )...( 30 ): >MEFA_HUMAN
VTFTKRKFGLMK

SEQ ID NO: 21368 - protein, 12 aa, Homo sapiens
  ( 21 )...( 32 ): >MEFA_HUMAN
FTKRKFGLMKKA

SEQ ID NO: 21369 - protein, 12 aa, Homo sapiens
  ( 1 )...( 12 ): >MEFB_HUMAN
MGRKKIQISRIL

SEQ ID NO: 21370 - protein, 12 aa, Homo sapiens
  ( 2 )...( 13 ): >MEFB_HUMAN
GRKKIQISRILD

SEQ ID NO: 21371 - protein, 12 aa, Homo sapiens
  ( 17 )...( 28 ): >MEFB_HUMAN
RQVTFTKRKFGL

SEQ ID NO: 21372 - protein, 12 aa, Homo sapiens
  ( 18 )...( 29 ): >MEFB_HUMAN
QVTFTKRKFGLM

SEQ ID NO: 21373 - protein, 12 aa, Homo sapiens
  ( 19 )...( 30 ): >MEFB_HUMAN
VTFTKRKFGLMK

SEQ ID NO: 21374 - protein, 12 aa, Homo sapiens
  ( 21 )...( 32 ): >MEFB_HUMAN
FTKRKFGLMKKA

SEQ ID NO: 21375 - protein, 12 aa, Homo sapiens
  ( 1 )...( 12 ): >MEFC_HUMAN
MGRKKIQITRIM

SEQ ID NO: 21376 - protein, 12 aa, Homo sapiens
  ( 2 )...( 13 ): >MEFC_HUMAN
GRKKIQITRIMD

SEQ ID NO: 21377 - protein, 12 aa, Homo sapiens
  ( 17 )...( 28 ): >MEFC_HUMAN
RQVTFTKRKFGL

SEQ ID NO: 21378 - protein, 12 aa, Homo sapiens
  ( 18 )...( 29 ): >MEFC_HUMAN
QVTFTKRKFGLM

SEQ ID NO: 21379 - protein, 12 aa, Homo sapiens
  ( 19 )...( 30 ): >MEFC_HUMAN
VTFTKRKFGLMK

SEQ ID NO: 21380 - protein, 12 aa, Homo sapiens
  ( 21 )...( 32 ): >MEFC_HUMAN
FTKRKFGLMKKA

SEQ ID NO: 21381 - protein, 12 aa, Homo sapiens
  ( 1 )...( 12 ): >MEFD_HUMAN
MGRKKIQIQRIT

SEQ ID NO: 21382 - protein, 12 aa, Homo sapiens
  ( 2 )...( 13 ): >MEFD_HUMAN
GRKKIQIQRITD

SEQ ID NO: 21383 - protein, 12 aa, Homo sapiens
  ( 17 )...( 28 ): >MEFD_HUMAN
RQVTFTKRKFGL

SEQ ID NO: 21384 - protein, 12 aa, Homo sapiens
  ( 18 )...( 29 ): >MEFD_HUMAN
QVTFTKRKFGLM

SEQ ID NO: 21385 - protein, 12 aa, Homo sapiens
  ( 19 )...( 30 ): >MEFD_HUMAN
VTFTKRKFGLMK

SEQ ID NO: 21386 - protein, 12 aa, Homo sapiens
  ( 21 )...( 32 ): >MEFD_HUMAN
FTKRKFGLMKKA

SEQ ID NO: 21387 - protein, 12 aa, Homo sapiens
  ( 54 )...( 65 ): >MITF_HUMAN
TSRILLRQQLMR

SEQ ID NO: 21388 - protein, 12 aa, Homo sapiens
  ( 346 )...( 357 ): >MITF_HUMAN
MRWNKGTILKAS

SEQ ID NO: 21389 - protein, 12 aa, Homo sapiens
  ( 347 )...( 358 ): >MITF_HUMAN
RWNKGTILKASV

SEQ ID NO: 21390 - protein, 12 aa, Homo sapiens
  ( 21 )...( 32 ): >MK08_HUMAN
TVLKRYQNLKPI

SEQ ID NO: 21391 - protein, 12 aa, Homo sapiens
  ( 22 )...( 33 ): >MK08_HUMAN
VLKRYQNLKPIG

SEQ ID NO: 21392 - protein, 12 aa, Homo sapiens
  ( 23 )...( 34 ): >MK08_HUMAN
LKRYQNLKPIGS

SEQ ID NO: 21393 - protein, 12 aa, Homo sapiens
  ( 24 )...( 35 ): >MK08_HUMAN
KRYQNLKPIGSG

SEQ ID NO: 21394 - protein, 12 aa, Homo sapiens
  ( 48 )...( 59 ): >MK08_HUMAN
LERNVAIKKLSR

SEQ ID NO: 21395 - protein, 12 aa, Homo sapiens
  ( 49 )...( 60 ): >MK08_HUMAN
ERNVAIKKLSRP

SEQ ID NO: 21396 - protein, 12 aa, Homo sapiens
  ( 51 )...( 62 ): >MK08_HUMAN
NVAIKKLSRPFQ

SEQ ID NO: 21397 - protein, 12 aa, Homo sapiens
  ( 52 )...( 63 ): >MK08_HUMAN
VAIKKLSRPFQN

SEQ ID NO: 21398 - protein, 12 aa, Homo sapiens
  ( 67 )...( 78 ): >MK08_HUMAN
AKRAYRELVLMK

SEQ ID NO: 21399 - protein, 12 aa, Homo sapiens
  ( 249 )...( 260 ): >MK08_HUMAN
MKKLQPTVRTYV

SEQ ID NO: 21400 - protein, 12 aa, Homo sapiens
  ( 366 )...( 377 ): >MK08_HUMAN
RTKNGVIRGQPS

SEQ ID NO: 21401 - protein, 12 aa, Homo sapiens
  ( 21 )...( 32 ): >MK09_HUMAN
TVLKRYQQLKPI

SEQ ID NO: 21402 - protein, 12 aa, Homo sapiens
  ( 22 )...( 33 ): >MK09_HUMAN
VLKRYQQLKPIG

SEQ ID NO: 21403 - protein, 12 aa, Homo sapiens
  ( 23 )...( 34 ): >MK09_HUMAN
LKRYQQLKPIGS

SEQ ID NO: 21404 - protein, 12 aa, Homo sapiens
  ( 24 )...( 35 ): >MK09_HUMAN
KRYQQLKPIGSG

SEQ ID NO: 21405 - protein, 12 aa, Homo sapiens
  ( 49 )...( 60 ): >MK09_HUMAN
GISVAVKKLSRP

SEQ ID NO: 21406 - protein, 12 aa, Homo sapiens
  ( 50 )...( 61 ): >MK09_HUMAN
ISVAVKKLSRPF

SEQ ID NO: 21407 - protein, 12 aa, Homo sapiens
  ( 51 )...( 62 ): >MK09_HUMAN
SVAVKKLSRPFQ

SEQ ID NO: 21408 - protein, 12 aa, Homo sapiens
  ( 52 )...( 63 ): >MK09_HUMAN
VAVKKLSRPFQN

SEQ ID NO: 21409 - protein, 12 aa, Homo sapiens
  ( 67 )...( 78 ): >MK09_HUMAN
AKRAYRELVLLK

SEQ ID NO: 21410 - protein, 12 aa, Homo sapiens
  ( 68 )...( 79 ): >MK09_HUMAN
KRAYRELVLLKC

SEQ ID NO: 21411 - protein, 12 aa, Homo sapiens
  ( 59 )...( 70 ): >MK10_HUMAN
TVLKRYQNLKPI

SEQ ID NO: 21412 - protein, 12 aa, Homo sapiens
  ( 60 )...( 71 ): >MK10_HUMAN
VLKRYQNLKPIG

SEQ ID NO: 21413 - protein, 12 aa, Homo sapiens
  ( 61 )...( 72 ): >MK10_HUMAN
LKRYQNLKPIGS

SEQ ID NO: 21414 - protein, 12 aa, Homo sapiens
  ( 62 )...( 73 ): >MK10_HUMAN
KRYQNLKPIGSG

SEQ ID NO: 21415 - protein, 12 aa, Homo sapiens
  ( 86 )...( 97 ): >MK10_HUMAN
LDRNVAIKKLSR

SEQ ID NO: 21416 - protein, 12 aa, Homo sapiens
  ( 89 )...( 100 ): >MK10_HUMAN
NVAIKKLSRPFQ

SEQ ID NO: 21417 - protein, 12 aa, Homo sapiens
  ( 90 )...( 101 ): >MK10_HUMAN
VAIKKLSRPFQN

SEQ ID NO: 21418 - protein, 12 aa, Homo sapiens
  ( 105 )...( 116 ): >MK10_HUMAN
AKRAYRELVLMK

SEQ ID NO: 21419 - protein, 12 aa, Homo sapiens
  ( 42 )...( 53 ): >MK11_HUMAN
YDARLRQKVAVK

SEQ ID NO: 21420 - protein, 12 aa, Homo sapiens
  ( 43 )...( 54 ): >MK11_HUMAN
DARLRQKVAVKK

SEQ ID NO: 21421 - protein, 12 aa, Homo sapiens
  ( 45 )...( 56 ): >MK11_HUMAN
RLRQKVAVKKLS

SEQ ID NO: 21422 - protein, 12 aa, Homo sapiens
  ( 46 )...( 57 ): >MK11_HUMAN
LRQKVAVKKLSR

SEQ ID NO: 21423 - protein, 12 aa, Homo sapiens
  ( 47 )...( 58 ): >MK11_HUMAN
RQKVAVKKLSRP

SEQ ID NO: 21424 - protein, 12 aa, Homo sapiens
  ( 48 )...( 59 ): >MK11_HUMAN
QKVAVKKLSRPF

SEQ ID NO: 21425 - protein, 12 aa, Homo sapiens
  ( 49 )...( 60 ): >MK11_HUMAN
KVAVKKLSRPFQ

SEQ ID NO: 21426 - protein, 12 aa, Homo sapiens
  ( 50 )...( 61 ): >MK11_HUMAN
VAVKKLSRPFQS

SEQ ID NO: 21427 - protein, 12 aa, Homo sapiens
  ( 51 )...( 62 ): >MK11_HUMAN
AVKKLSRPFQSL

SEQ ID NO: 21428 - protein, 12 aa, Homo sapiens
  ( 52 )...( 63 ): >MK11_HUMAN
VKKLSRPFQSLI

SEQ ID NO: 21429 - protein, 12 aa, Homo sapiens
  ( 43 )...( 54 ): >MK14_HUMAN
DTKTGLRVAVKK

SEQ ID NO: 21430 - protein, 12 aa, Homo sapiens
  ( 45 )...( 56 ): >MK14_HUMAN
KTGLRVAVKKLS

SEQ ID NO: 21431 - protein, 12 aa, Homo sapiens
  ( 46 )...( 57 ): >MK14_HUMAN
TGLRVAVKKLSR

SEQ ID NO: 21432 - protein, 12 aa, Homo sapiens
  ( 47 )...( 58 ): >MK14_HUMAN
GLRVAVKKLSRP

SEQ ID NO: 21433 - protein, 12 aa, Homo sapiens
  ( 48 )...( 59 ): >MK14_HUMAN
LRVAVKKLSRPF

SEQ ID NO: 21434 - protein, 12 aa, Homo sapiens
  ( 49 )...( 60 ): >MK14_HUMAN
RVAVKKLSRPFQ

SEQ ID NO: 21435 - protein, 12 aa, Homo sapiens
  ( 50 )...( 61 ): >MK14_HUMAN
VAVKKLSRPFQS

SEQ ID NO: 21436 - protein, 12 aa, Homo sapiens
  ( 51 )...( 62 ): >MK14_HUMAN
AVKKLSRPFQSI

SEQ ID NO: 21437 - protein, 12 aa, Homo sapiens
  ( 52 )...( 63 ): >MK14_HUMAN
VKKLSRPFQSII

SEQ ID NO: 21438 - protein, 12 aa, Homo sapiens
  ( 86 )...( 97 ): >MLX_HUMAN
STRKGSVVSRAN

SEQ ID NO: 21439 - protein, 12 aa, Homo sapiens
  ( 87 )...( 98 ): >MLX_HUMAN
TRKGSVVSRANS

SEQ ID NO: 21440 - protein, 12 aa, Homo sapiens
  ( 88 )...( 99 ): >MLX_HUMAN
RKGSVVSRANSI

SEQ ID NO: 21441 - protein, 12 aa, Homo sapiens
  ( 201 )...( 212 ): >MLX_HUMAN
LRKDVTALKIMK

SEQ ID NO: 21442 - protein, 12 aa, Homo sapiens
  ( 202 )...( 213 ): >MLX_HUMAN
RKDVTALKIMKV

SEQ ID NO: 21443 - protein, 12 aa, Homo sapiens
  ( 40 )...( 51 ): >MNT_HUMAN
QKKANSLARLAH

SEQ ID NO: 21444 - protein, 12 aa, Homo sapiens
  ( 207 )...( 218 ): >MNT_HUMAN
VKSSEQKKRPGG

SEQ ID NO: 21445 - protein, 12 aa, Homo sapiens
  ( 208 )...( 219 ): >MNT_HUMAN
KSSEQKKRPGGI

SEQ ID NO: 21446 - protein, 12 aa, Homo sapiens
  ( 211 )...( 222 ): >MNT_HUMAN
EQKKRPGGIGTR

SEQ ID NO: 21447 - protein, 12 aa, Homo sapiens
  ( 212 )...( 223 ): >MNT_HUMAN
QKKRPGGIGTRE

SEQ ID NO: 21448 - protein, 12 aa, Homo sapiens
  ( 213 )...( 224 ): >MNT_HUMAN
KKRPGGIGTREV

SEQ ID NO: 21449 - protein, 12 aa, Homo sapiens
  ( 261 )...( 272 ): >MNT_HUMAN
LRTALRYIQSLK

SEQ ID NO: 21450 - protein, 12 aa, Homo sapiens
  ( 263 )...( 274 ): >MNT_HUMAN
TALRYIQSLKRK

SEQ ID NO: 21451 - protein, 12 aa, Homo sapiens
  ( 284 )...( 295 ): >MNT_HUMAN
RLAREKIATQQR

SEQ ID NO: 21452 - protein, 12 aa, Homo sapiens
  ( 18 )...( 29 ): >MOR4_HUMAN
IEVKTKKNKQKT

SEQ ID NO: 21453 - protein, 12 aa, Homo sapiens
  ( 20 )...( 31 ): >MOR4_HUMAN
VKTKKNKQKTPG

SEQ ID NO: 21454 - protein, 12 aa, Homo sapiens
  ( 22 )...( 33 ): >MOR4_HUMAN
TKKNKQKTPGNG

SEQ ID NO: 21455 - protein, 12 aa, Homo sapiens
  ( 45 )...( 56 ): >MOR4_HUMAN
PRKKRAQVDPTV

SEQ ID NO: 21456 - protein, 12 aa, Homo sapiens
  ( 1 )...( 12 ): >MTG8_HUMAN
MISVKRNTWRAL

SEQ ID NO: 21457 - protein, 12 aa, Homo sapiens
  ( 2 )...( 13 ): >MTG8_HUMAN
ISVKRNTWRALS

SEQ ID NO: 21458 - protein, 12 aa, Homo sapiens
  ( 3 )...( 14 ): >MTG8_HUMAN
SVKRNTWRALSL

SEQ ID NO: 21459 - protein, 12 aa, Homo sapiens
  ( 4 )...( 15 ): >MTG8_HUMAN
VKRNTWRALSLV

SEQ ID NO: 21460 - protein, 12 aa, Homo sapiens
  ( 5 )...( 16 ): >MTG8_HUMAN
KRNTWRALSLVI

SEQ ID NO: 21461 - protein, 12 aa, Homo sapiens
  ( 117 )...( 128 ): >MTG8_HUMAN
ACGARQLSKLKR

SEQ ID NO: 21462 - protein, 12 aa, Homo sapiens
  ( 118 )...( 129 ): >MTG8_HUMAN
CGARQLSKLKRF

SEQ ID NO: 21463 - protein, 12 aa, Homo sapiens
  ( 119 )...( 130 ): >MTG8_HUMAN
GARQLSKLKRFL

SEQ ID NO: 21464 - protein, 12 aa, Homo sapiens
  ( 120 )...( 131 ): >MTG8_HUMAN
ARQLSKLKRFLT

SEQ ID NO: 21465 - protein, 12 aa, Homo sapiens
  ( 121 )...( 132 ): >MTG8_HUMAN
RQLSKLKRFLTT

SEQ ID NO: 21466 - protein, 12 aa, Homo sapiens
  ( 122 )...( 133 ): >MTG8_HUMAN
QLSKLKRFLTTL

SEQ ID NO: 21467 - protein, 12 aa, Homo sapiens
  ( 123 )...( 134 ): >MTG8_HUMAN
LSKLKRFLTTLQ

SEQ ID NO: 21468 - protein, 12 aa, Homo sapiens
  ( 124 )...( 135 ): >MTG8_HUMAN
SKLKRFLTTLQQ

SEQ ID NO: 21469 - protein, 12 aa, Homo sapiens
  ( 368 )...( 379 ): >MTG8_HUMAN
VEKTRRSLTVLR

SEQ ID NO: 21470 - protein, 12 aa, Homo sapiens
  ( 371 )...( 382 ): >MTG8_HUMAN
TRRSLTVLRRCQ

SEQ ID NO: 21471 - protein, 12 aa, Homo sapiens
  ( 25 )...( 36 ): >MUSC_HUMAN
ASKRPPLRGVER

SEQ ID NO: 21472 - protein, 12 aa, Homo sapiens
  ( 26 )...( 37 ): >MUSC_HUMAN
SKRPPLRGVERS

SEQ ID NO: 21473 - protein, 12 aa, Homo sapiens
  ( 66 )...( 77 ): >MUSC_HUMAN
SAEGCKRKRPRV

SEQ ID NO: 21474 - protein, 12 aa, Homo sapiens
  ( 67 )...( 78 ): >MUSC_HUMAN
AEGCKRKRPRVA

SEQ ID NO: 21475 - protein, 12 aa, Homo sapiens
  ( 68 )...( 79 ): >MUSC_HUMAN
EGCKRKRPRVAG

SEQ ID NO: 21476 - protein, 12 aa, Homo sapiens
  ( 111 )...( 122 ): >MUSC_HUMAN
AANARERARMRV

SEQ ID NO: 21477 - protein, 12 aa, Homo sapiens
  ( 117 )...( 128 ): >MUSC_HUMAN
RARMRVLSKAFS

SEQ ID NO: 21478 - protein, 12 aa, Homo sapiens
  ( 118 )...( 129 ): >MUSC_HUMAN
ARMRVLSKAFSR

SEQ ID NO: 21479 - protein, 12 aa, Homo sapiens
  ( 120 )...( 131 ): >MUSC_HUMAN
MRVLSKAFSRLK

SEQ ID NO: 21480 - protein, 12 aa, Homo sapiens
  ( 121 )...( 132 ): >MUSC_HUMAN
RVLSKAFSRLKT

SEQ ID NO: 21481 - protein, 12 aa, Homo sapiens
  ( 49 )...( 60 ): >MXI1_HUMAN
RRLSRAQKHSSG

SEQ ID NO: 21482 - protein, 12 aa, Homo sapiens
  ( 107 )...( 118 ): >MXI1_HUMAN
GLLNKAKAHIKK

SEQ ID NO: 21483 - protein, 12 aa, Homo sapiens
  ( 108 )...( 119 ): >MXI1_HUMAN
LLNKAKAHIKKL

SEQ ID NO: 21484 - protein, 12 aa, Homo sapiens
  ( 80 )...( 91 ): >MYCL_HUMAN
KGWGRNYASIIR

SEQ ID NO: 21485 - protein, 12 aa, Homo sapiens
  ( 174 )...( 185 ): >MYCL_HUMAN
TVEKRQSLGIRK

SEQ ID NO: 21486 - protein, 12 aa, Homo sapiens
  ( 175 )...( 186 ): >MYCL_HUMAN
VEKRQSLGIRKP

SEQ ID NO: 21487 - protein, 12 aa, Homo sapiens
  ( 176 )...( 187 ): >MYCL_HUMAN
EKRQSLGIRKPV

SEQ ID NO: 21488 - protein, 12 aa, Homo sapiens
  ( 177 )...( 188 ): >MYCL_HUMAN
KRQSLGIRKPVT

SEQ ID NO: 21489 - protein, 12 aa, Homo sapiens
  ( 178 )...( 189 ): >MYCL_HUMAN
RQSLGIRKPVTI

SEQ ID NO: 21490 - protein, 12 aa, Homo sapiens
  ( 181 )...( 192 ): >MYCL_HUMAN
LGIRKPVTITVR

SEQ ID NO: 21491 - protein, 12 aa, Homo sapiens
  ( 316 )...( 327 ): >MYCL_HUMAN
KAPKVVILSKAL

SEQ ID NO: 21492 - protein, 12 aa, Homo sapiens
  ( 166 )...( 177 ): >MYCM_HUMAN
VTVKKRQSLSTR

SEQ ID NO: 21493 - protein, 12 aa, Homo sapiens
  ( 167 )...( 178 ): >MYCM_HUMAN
TVKKRQSLSTRK

SEQ ID NO: 21494 - protein, 12 aa, Homo sapiens
  ( 170 )...( 181 ): >MYCM_HUMAN
KRQSLSTRKPVI

SEQ ID NO: 21495 - protein, 12 aa, Homo sapiens
  ( 171 )...( 182 ): >MYCM_HUMAN
RQSLSTRKPVII

SEQ ID NO: 21496 - protein, 12 aa, Homo sapiens
  ( 174 )...( 185 ): >MYCM_HUMAN
LSTRKPVIIAVR

SEQ ID NO: 21497 - protein, 12 aa, Homo sapiens
  ( 175 )...( 186 ): >MYCM_HUMAN
STRKPVIIAVRA

SEQ ID NO: 21498 - protein, 12 aa, Homo sapiens
  ( 307 )...( 318 ): >MYCM_HUMAN
CSRVSKVMILVK

SEQ ID NO: 21499 - protein, 12 aa, Homo sapiens
  ( 308 )...( 319 ): >MYCM_HUMAN
SRVSKVMILVKA

SEQ ID NO: 21500 - protein, 12 aa, Homo sapiens
  ( 309 )...( 320 ): >MYCM_HUMAN
RVSKVMILVKAT

SEQ ID NO: 21501 - protein, 12 aa, Homo sapiens
  ( 284 )...( 295 ): >MYCN_HUMAN
KRRSSSNTKAVT

SEQ ID NO: 21502 - protein, 12 aa, Homo sapiens
  ( 348 )...( 359 ): >MYCN_HUMAN
KKIKSEASPRPL

SEQ ID NO: 21503 - protein, 12 aa, Homo sapiens
  ( 349 )...( 360 ): >MYCN_HUMAN
KIKSEASPRPLK

SEQ ID NO: 21504 - protein, 12 aa, Homo sapiens
  ( 357 )...( 368 ): >MYCN_HUMAN
RPLKSVIPPKAK

SEQ ID NO: 21505 - protein, 12 aa, Homo sapiens
  ( 413 )...( 424 ): >MYCN_HUMAN
KNEKAAKVVILK

SEQ ID NO: 21506 - protein, 12 aa, Homo sapiens
  ( 414 )...( 425 ): >MYCN_HUMAN
NEKAAKVVILKK

SEQ ID NO: 21507 - protein, 12 aa, Homo sapiens
  ( 415 )...( 426 ): >MYCN_HUMAN
EKAAKVVILKKA

SEQ ID NO: 21508 - protein, 12 aa, Homo sapiens
  ( 447 )...( 458 ): >MYCN_HUMAN
LQARQQQLLKKI

SEQ ID NO: 21509 - protein, 12 aa, Homo sapiens
  ( 265 )...( 276 ): >MYC_HUMAN
VSVEKRQAPGKR

SEQ ID NO: 21510 - protein, 12 aa, Homo sapiens
  ( 266 )...( 277 ): >MYC_HUMAN
SVEKRQAPGKRS

SEQ ID NO: 21511 - protein, 12 aa, Homo sapiens
  ( 314 )...( 325 ): >MYC_HUMAN
STRKDYPAAKRV

SEQ ID NO: 21512 - protein, 12 aa, Homo sapiens
  ( 320 )...( 331 ): >MYC_HUMAN
PAAKRVKLDSVR

SEQ ID NO: 21513 - protein, 12 aa, Homo sapiens
  ( 321 )...( 332 ): >MYC_HUMAN
AAKRVKLDSVRV

SEQ ID NO: 21514 - protein, 12 aa, Homo sapiens
  ( 322 )...( 333 ): >MYC_HUMAN
AKRVKLDSVRVL

SEQ ID NO: 21515 - protein, 12 aa, Homo sapiens
  ( 323 )...( 334 ): >MYC_HUMAN
KRVKLDSVRVLR

SEQ ID NO: 21516 - protein, 12 aa, Homo sapiens
  ( 324 )...( 335 ): >MYC_HUMAN
RVKLDSVRVLRQ

SEQ ID NO: 21517 - protein, 12 aa, Homo sapiens
  ( 332 )...( 343 ): >MYC_HUMAN
VLRQISNNRKCT

SEQ ID NO: 21518 - protein, 12 aa, Homo sapiens
  ( 387 )...( 398 ): >MYC_HUMAN
NEKAPKVVILKK

SEQ ID NO: 21519 - protein, 12 aa, Homo sapiens
  ( 388 )...( 399 ): >MYC_HUMAN
EKAPKVVILKKA

SEQ ID NO: 21520 - protein, 12 aa, Homo sapiens
  ( 389 )...( 400 ): >MYC_HUMAN
KAPKVVILKKAT

SEQ ID NO: 21521 - protein, 12 aa, Homo sapiens
  ( 391 )...( 402 ): >MYC_HUMAN
PKVVILKKATAY

SEQ ID NO: 21522 - protein, 12 aa, Homo sapiens
  ( 392 )...( 403 ): >MYC_HUMAN
KVVILKKATAYI

SEQ ID NO: 21523 - protein, 12 aa, Homo sapiens
  ( 73 )...( 84 ): >MYF5_HUMAN
KACKRKSTTMDR

SEQ ID NO: 21524 - protein, 12 aa, Homo sapiens
  ( 77 )...( 88 ): >MYF5_HUMAN
RKSTTMDRRKAA

SEQ ID NO: 21525 - protein, 12 aa, Homo sapiens
  ( 78 )...( 89 ): >MYF5_HUMAN
KSTTMDRRKAAT

SEQ ID NO: 21526 - protein, 12 aa, Homo sapiens
  ( 80 )...( 91 ): >MYF5_HUMAN
TTMDRRKAATMR

SEQ ID NO: 21527 - protein, 12 aa, Homo sapiens
  ( 83 )...( 94 ): >MYF6_HUMAN
KTCKRKSAPTDR

SEQ ID NO: 21528 - protein, 12 aa, Homo sapiens
  ( 88 )...( 99 ): >MYF6_HUMAN
KSAPTDRRKAAT

SEQ ID NO: 21529 - protein, 12 aa, Homo sapiens
  ( 90 )...( 101 ): >MYF6_HUMAN
APTDRRKAATLR

SEQ ID NO: 21530 - protein, 12 aa, Homo sapiens
  ( 115 )...( 126 ): >MYF6_HUMAN
ALKRRTVANPNQ

SEQ ID NO: 21531 - protein, 12 aa, Homo sapiens
  ( 104 )...( 115 ): >MYOD_HUMAN
KTTNADRRKAAT

SEQ ID NO: 21532 - protein, 12 aa, Homo sapiens
  ( 106 )...( 117 ): >MYOD_HUMAN
TNADRRKAATMR

SEQ ID NO: 21533 - protein, 12 aa, Homo sapiens
  ( 71 )...( 82 ): >MYOG_HUMAN
KVCKRKSVSVDR

SEQ ID NO: 21534 - protein, 12 aa, Homo sapiens
  ( 72 )...( 83 ): >MYOG_HUMAN
VCKRKSVSVDRR

SEQ ID NO: 21535 - protein, 12 aa, Homo sapiens
  ( 75 )...( 86 ): >MYOG_HUMAN
RKSVSVDRRRAA

SEQ ID NO: 21536 - protein, 12 aa, Homo sapiens
  ( 76 )...( 87 ): >MYOG_HUMAN
KSVSVDRRRAAT

SEQ ID NO: 21537 - protein, 12 aa, Homo sapiens
  ( 78 )...( 89 ): >MYOG_HUMAN
VSVDRRRAATLR

SEQ ID NO: 21538 - protein, 12 aa, Homo sapiens
  ( 56 )...( 67 ): >NAB1_HUMAN
VGMASKPLHVRR

SEQ ID NO: 21539 - protein, 12 aa, Homo sapiens
  ( 57 )...( 68 ): >NAB1_HUMAN
GMASKPLHVRRL

SEQ ID NO: 21540 - protein, 12 aa, Homo sapiens
  ( 58 )...( 69 ): >NAB1_HUMAN
MASKPLHVRRLQ

SEQ ID NO: 21541 - protein, 12 aa, Homo sapiens
  ( 219 )...( 230 ): >NAB1_HUMAN
KELLKTNKKLAK

SEQ ID NO: 21542 - protein, 12 aa, Homo sapiens
  ( 221 )...( 232 ): >NAB1_HUMAN
LLKTNKKLAKMI

SEQ ID NO: 21543 - protein, 12 aa, Homo sapiens
  ( 222 )...( 233 ): >NAB1_HUMAN
LKTNKKLAKMIG

SEQ ID NO: 21544 - protein, 12 aa, Homo sapiens
  ( 223 )...( 234 ): >NAB1_HUMAN
KTNKKLAKMIGH

SEQ ID NO: 21545 - protein, 12 aa, Homo sapiens
  ( 311 )...( 322 ): >NAB1_HUMAN
KYTYRTTKSKCG

SEQ ID NO: 21546 - protein, 12 aa, Homo sapiens
  ( 313 )...( 324 ): >NAB1_HUMAN
TYRTTKSKCGER

SEQ ID NO: 21547 - protein, 12 aa, Homo sapiens
  ( 391 )...( 402 ): >NAB1_HUMAN
RRLSAGLYRQSS

SEQ ID NO: 21548 - protein, 12 aa, Homo sapiens
  ( 22 )...( 33 ): >NAB2_HUMAN
TLQPRLKPSARA

SEQ ID NO: 21549 - protein, 12 aa, Homo sapiens
  ( 23 )...( 34 ): >NAB2_HUMAN
LQPRLKPSARAM

SEQ ID NO: 21550 - protein, 12 aa, Homo sapiens
  ( 87 )...( 98 ): >NAB2_HUMAN
VGMATKPLHVRR

SEQ ID NO: 21551 - protein, 12 aa, Homo sapiens
  ( 88 )...( 99 ): >NAB2_HUMAN
GMATKPLHVRRL

SEQ ID NO: 21552 - protein, 12 aa, Homo sapiens
  ( 89 )...( 100 ): >NAB2_HUMAN
MATKPLHVRRLQ

SEQ ID NO: 21553 - protein, 12 aa, Homo sapiens
  ( 90 )...( 101 ): >NAB2_HUMAN
ATKPLHVRRLQK

SEQ ID NO: 21554 - protein, 12 aa, Homo sapiens
  ( 91 )...( 102 ): >NAB2_HUMAN
TKPLHVRRLQKA

SEQ ID NO: 21555 - protein, 12 aa, Homo sapiens
  ( 265 )...( 276 ): >NAB2_HUMAN
TSLLKLNKKLAR

SEQ ID NO: 21556 - protein, 12 aa, Homo sapiens
  ( 266 )...( 277 ): >NAB2_HUMAN
SLLKLNKKLARS

SEQ ID NO: 21557 - protein, 12 aa, Homo sapiens
  ( 267 )...( 278 ): >NAB2_HUMAN
LLKLNKKLARSV

SEQ ID NO: 21558 - protein, 12 aa, Homo sapiens
  ( 268 )...( 279 ): >NAB2_HUMAN
LKLNKKLARSVG

SEQ ID NO: 21559 - protein, 12 aa, Homo sapiens
  ( 269 )...( 280 ): >NAB2_HUMAN
KLNKKLARSVGH

SEQ ID NO: 21560 - protein, 12 aa, Homo sapiens
  ( 270 )...( 281 ): >NAB2_HUMAN
LNKKLARSVGHI

SEQ ID NO: 21561 - protein, 12 aa, Homo sapiens
  ( 271 )...( 282 ): >NAB2_HUMAN
NKKLARSVGHIF

SEQ ID NO: 21562 - protein, 12 aa, Homo sapiens
  ( 124 )...( 135 ): >NDF1_HUMAN
LRKVVPCYSKTQ

SEQ ID NO: 21563 - protein, 12 aa, Homo sapiens
  ( 125 )...( 136 ): >NDF1_HUMAN
RKVVPCYSKTQK

SEQ ID NO: 21564 - protein, 12 aa, Homo sapiens
  ( 136 )...( 147 ): >NDF1_HUMAN
KLSKIETLRLAK

SEQ ID NO: 21565 - protein, 12 aa, Homo sapiens
  ( 96 )...( 107 ): >NDF2_HUMAN
AEGERPKKRGPK

SEQ ID NO: 21566 - protein, 12 aa, Homo sapiens
  ( 110 )...( 121 ): >NDF2_HUMAN
KMTKARLERSKL

SEQ ID NO: 21567 - protein, 12 aa, Homo sapiens
  ( 144 )...( 155 ): >NDF2_HUMAN
LRKVVPCYSKTQ

SEQ ID NO: 21568 - protein, 12 aa, Homo sapiens
  ( 145 )...( 156 ): >NDF2_HUMAN
RKVVPCYSKTQK

SEQ ID NO: 21569 - protein, 12 aa, Homo sapiens
  ( 156 )...( 167 ): >NDF2_HUMAN
KLSKIETLRLAK

SEQ ID NO: 21570 - protein, 12 aa, Homo sapiens
  ( 122 )...( 133 ): >NDF4_HUMAN
KLSKIETLRLAR

SEQ ID NO: 21571 - protein, 12 aa, Homo sapiens
  ( 36 )...( 47 ): >NDF6_HUMAN
SFSKQIVLRGKS

SEQ ID NO: 21572 - protein, 12 aa, Homo sapiens
  ( 37 )...( 48 ): >NDF6_HUMAN
FSKQIVLRGKSI

SEQ ID NO: 21573 - protein, 12 aa, Homo sapiens
  ( 38 )...( 49 ): >NDF6_HUMAN
SKQIVLRGKSIK

SEQ ID NO: 21574 - protein, 12 aa, Homo sapiens
  ( 39 )...( 50 ): >NDF6_HUMAN
KQIVLRGKSIKR

SEQ ID NO: 21575 - protein, 12 aa, Homo sapiens
  ( 40 )...( 51 ): >NDF6_HUMAN
QIVLRGKSIKRA

SEQ ID NO: 21576 - protein, 12 aa, Homo sapiens
  ( 41 )...( 52 ): >NDF6_HUMAN
IVLRGKSIKRAP

SEQ ID NO: 21577 - protein, 12 aa, Homo sapiens
  ( 42 )...( 53 ): >NDF6_HUMAN
VLRGKSIKRAPG

SEQ ID NO: 21578 - protein, 12 aa, Homo sapiens
  ( 43 )...( 54 ): >NDF6_HUMAN
LRGKSIKRAPGE

SEQ ID NO: 21579 - protein, 12 aa, Homo sapiens
  ( 117 )...( 128 ): >NDF6_HUMAN
LRKVVPCYSKTQ

SEQ ID NO: 21580 - protein, 12 aa, Homo sapiens
  ( 118 )...( 129 ): >NDF6_HUMAN
RKVVPCYSKTQK

SEQ ID NO: 21581 - protein, 12 aa, Homo sapiens
  ( 129 )...( 140 ): >NDF6_HUMAN
KLSKIETLRLAK

SEQ ID NO: 21582 - protein, 12 aa, Homo sapiens
  ( 135 )...( 146 ): >NECD_HUMAN
WCRSILRRTSLI

SEQ ID NO: 21583 - protein, 12 aa, Homo sapiens
  ( 136 )...( 147 ): >NECD_HUMAN
CRSILRRTSLIL

SEQ ID NO: 21584 - protein, 12 aa, Homo sapiens
  ( 137 )...( 148 ): >NECD_HUMAN
RSILRRTSLILA

SEQ ID NO: 21585 - protein, 12 aa, Homo sapiens
  ( 138 )...( 149 ): >NECD_HUMAN
SILRRTSLILAR

SEQ ID NO: 21586 - protein, 12 aa, Homo sapiens
  ( 139 )...( 150 ): >NECD_HUMAN
ILRRTSLILARV

SEQ ID NO: 21587 - protein, 12 aa, Homo sapiens
  ( 140 )...( 151 ): >NECD_HUMAN
LRRTSLILARVF

SEQ ID NO: 21588 - protein, 12 aa, Homo sapiens
  ( 141 )...( 152 ): >NECD_HUMAN
RRTSLILARVFG

SEQ ID NO: 21589 - protein, 12 aa, Homo sapiens
  ( 195 )...( 206 ): >NECD_HUMAN
LSLIYVKGRGAR

SEQ ID NO: 21590 - protein, 12 aa, Homo sapiens
  ( 212 )...( 223 ): >NECD_HUMAN
NVLRILGLRPWK

SEQ ID NO: 21591 - protein, 12 aa, Homo sapiens
  ( 213 )...( 224 ): >NECD_HUMAN
VLRILGLRPWKK

SEQ ID NO: 21592 - protein, 12 aa, Homo sapiens
  ( 216 )...( 227 ): >NECD_HUMAN
ILGLRPWKKHST

SEQ ID NO: 21593 - protein, 12 aa, Homo sapiens
  ( 78 )...( 89 ): >NFL1_HUMAN
FTARRLLSQVRA

SEQ ID NO: 21594 - protein, 12 aa, Homo sapiens
  ( 79 )...( 90 ): >NFL1_HUMAN
TARRLLSQVRAL

SEQ ID NO: 21595 - protein, 12 aa, Homo sapiens
  ( 671 )...( 682 ): >NFL1_HUMAN
CRKRKLDTILNL

SEQ ID NO: 21596 - protein, 12 aa, Homo sapiens
  ( 706 )...( 717 ): >NFL1_HUMAN
SLRQMKQKVQSL

SEQ ID NO: 21597 - protein, 12 aa, Homo sapiens
  ( 396 )...( 407 ): >NFT5_HUMAN
EARIGIAGSKKK

SEQ ID NO: 21598 - protein, 12 aa, Homo sapiens
  ( 401 )...( 412 ): >NFT5_HUMAN
IAGSKKKSTRAR

SEQ ID NO: 21599 - protein, 12 aa, Homo sapiens
  ( 402 )...( 413 ): >NFT5_HUMAN
AGSKKKSTRARL

SEQ ID NO: 21600 - protein, 12 aa, Homo sapiens
  ( 403 )...( 414 ): >NFT5_HUMAN
GSKKKSTRARLV

SEQ ID NO: 21601 - protein, 12 aa, Homo sapiens
  ( 404 )...( 415 ): >NFT5_HUMAN
SKKKSTRARLVF

SEQ ID NO: 21602 - protein, 12 aa, Homo sapiens
  ( 407 )...( 418 ): >NFT5_HUMAN
KSTRARLVFRVN

SEQ ID NO: 21603 - protein, 12 aa, Homo sapiens
  ( 408 )...( 419 ): >NFT5_HUMAN
STRARLVFRVNI

SEQ ID NO: 21604 - protein, 12 aa, Homo sapiens
  ( 409 )...( 420 ): >NFT5_HUMAN
TRARLVFRVNIM

SEQ ID NO: 21605 - protein, 12 aa, Homo sapiens
  ( 464 )...( 475 ): >NFT5_HUMAN
FLIGKNFLKGTK

SEQ ID NO: 21606 - protein, 12 aa, Homo sapiens
  ( 465 )...( 476 ): >NFT5_HUMAN
LIGKNFLKGTKV

SEQ ID NO: 21607 - protein, 12 aa, Homo sapiens
  ( 466 )...( 477 ): >NFT5_HUMAN
IGKNFLKGTKVI

SEQ ID NO: 21608 - protein, 12 aa, Homo sapiens
  ( 467 )...( 478 ): >NFT5_HUMAN
GKNFLKGTKVIF

SEQ ID NO: 21609 - protein, 12 aa, Homo sapiens
  ( 468 )...( 479 ): >NFT5_HUMAN
KNFLKGTKVIFQ

SEQ ID NO: 21610 - protein, 12 aa, Homo sapiens
  ( 616 )...( 627 ): >NFT5_HUMAN
KRSSTIFKTTKS

SEQ ID NO: 21611 - protein, 12 aa, Homo sapiens
  ( 75 )...( 86 ): >NGN1_HUMAN
RGRTRVRSEALL

SEQ ID NO: 21612 - protein, 12 aa, Homo sapiens
  ( 56 )...( 67 ): >NGN2_HUMAN
RLLGLVHDCKRR

SEQ ID NO: 21613 - protein, 12 aa, Homo sapiens
  ( 67 )...( 78 ): >NGN2_HUMAN
RPSRARAVSRGA

SEQ ID NO: 21614 - protein, 12 aa, Homo sapiens
  ( 68 )...( 79 ): >NGN2_HUMAN
PSRARAVSRGAK

SEQ ID NO: 21615 - protein, 12 aa, Homo sapiens
  ( 69 )...( 80 ): >NGN2_HUMAN
SRARAVSRGAKT

SEQ ID NO: 21616 - protein, 12 aa, Homo sapiens
  ( 78 )...( 89 ): >NGN2_HUMAN
AKTAETVQRIKK

SEQ ID NO: 21617 - protein, 12 aa, Homo sapiens
  ( 80 )...( 91 ): >NGN2_HUMAN
TAETVQRIKKTR

SEQ ID NO: 21618 - protein, 12 aa, Homo sapiens
  ( 81 )...( 92 ): >NGN2_HUMAN
AETVQRIKKTRR

SEQ ID NO: 21619 - protein, 12 aa, Homo sapiens
  ( 51 )...( 62 ): >NGN3_HUMAN
EGGCRGAPRKLR

SEQ ID NO: 21620 - protein, 12 aa, Homo sapiens
  ( 64 )...( 75 ): >NGN3_HUMAN
RRGGRSRPKSEL

SEQ ID NO: 21621 - protein, 12 aa, Homo sapiens
  ( 65 )...( 76 ): >NGN3_HUMAN
RGGRSRPKSELA

SEQ ID NO: 21622 - protein, 12 aa, Homo sapiens
  ( 68 )...( 79 ): >NGN3_HUMAN
RSRPKSELALSK

SEQ ID NO: 21623 - protein, 12 aa, Homo sapiens
  ( 72 )...( 83 ): >NGN3_HUMAN
KSELALSKQRRS

SEQ ID NO: 21624 - protein, 12 aa, Homo sapiens
  ( 117 )...( 128 ): >NK23_HUMAN
RSQKSCQLKKSL

SEQ ID NO: 21625 - protein, 12 aa, Homo sapiens
  ( 149 )...( 160 ): >NK23_HUMAN
RKPRVLFSQAQV

SEQ ID NO: 21626 - protein, 12 aa, Homo sapiens
  ( 222 )...( 233 ): >NK23_HUMAN
PPRRVAVPVLVR

SEQ ID NO: 21627 - protein, 12 aa, Homo sapiens
  ( 245 )...( 256 ): >NK24_HUMAN
KRQAKDKAAQQL

SEQ ID NO: 21628 - protein, 12 aa, Homo sapiens
  ( 271 )...( 282 ): >NK24_HUMAN
SPRRAAVPVLVK

SEQ ID NO: 21629 - protein, 12 aa, Homo sapiens
  ( 125 )...( 136 ): >NK31_HUMAN
KRSRAAFSHTQV

SEQ ID NO: 21630 - protein, 12 aa, Homo sapiens
  ( 244 )...( 255 ): >NMI_HUMAN
KKYQIFSGTSKR

SEQ ID NO: 21631 - protein, 12 aa, Homo sapiens
  ( 87 )...( 98 ): >NPA1_HUMAN
IVRLSVTYLRLR

SEQ ID NO: 21632 - protein, 12 aa, Homo sapiens
  ( 90 )...( 101 ): >NPA1_HUMAN
LSVTYLRLRRFA

SEQ ID NO: 21633 - protein, 12 aa, Homo sapiens
  ( 91 )...( 102 ): >NPA1_HUMAN
SVTYLRLRRFAA

SEQ ID NO: 21634 - protein, 12 aa, Homo sapiens
  ( 92 )...( 103 ): >NPA1_HUMAN
VTYLRLRRFAAL

SEQ ID NO: 21635 - protein, 12 aa, Homo sapiens
  ( 93 )...( 104 ): >NPA1_HUMAN
TYLRLRRFAALG

SEQ ID NO: 21636 - protein, 12 aa, Homo sapiens
  ( 94 )...( 105 ): >NPA1_HUMAN
YLRLRRFAALGA

SEQ ID NO: 21637 - protein, 12 aa, Homo sapiens
  ( 95 )...( 106 ): >NPA1_HUMAN
LRLRRFAALGAP

SEQ ID NO: 21638 - protein, 12 aa, Homo sapiens
  ( 245 )...( 256 ): >NPA1_HUMAN
RSFFVRMKSTLT

SEQ ID NO: 21639 - protein, 12 aa, Homo sapiens
  ( 248 )...( 259 ): >NPA1_HUMAN
FVRMKSTLTKRG

SEQ ID NO: 21640 - protein, 12 aa, Homo sapiens
  ( 249 )...( 260 ): >NPA1_HUMAN
VRMKSTLTKRGL

SEQ ID NO: 21641 - protein, 12 aa, Homo sapiens
  ( 250 )...( 261 ): >NPA1_HUMAN
RMKSTLTKRGLH

SEQ ID NO: 21642 - protein, 12 aa, Homo sapiens
  ( 252 )...( 263 ): >NPA1_HUMAN
KSTLTKRGLHVK

SEQ ID NO: 21643 - protein, 12 aa, Homo sapiens
  ( 257 )...( 268 ): >NPA1_HUMAN
KRGLHVKASGYK

SEQ ID NO: 21644 - protein, 12 aa, Homo sapiens
  ( 258 )...( 269 ): >NPA1_HUMAN
RGLHVKASGYKV

SEQ ID NO: 21645 - protein, 12 aa, Homo sapiens
  ( 266 )...( 277 ): >NPA1_HUMAN
GYKVIHVTGRLR

SEQ ID NO: 21646 - protein, 12 aa, Homo sapiens
  ( 267 )...( 278 ): >NPA1_HUMAN
YKVIHVTGRLRA

SEQ ID NO: 21647 - protein, 12 aa, Homo sapiens
  ( 268 )...( 279 ): >NPA1_HUMAN
KVIHVTGRLRAH

SEQ ID NO: 21648 - protein, 12 aa, Homo sapiens
  ( 459 )...( 470 ): >NPA1_HUMAN
QGKRIKVEPGPR

SEQ ID NO: 21649 - protein, 12 aa, Homo sapiens
  ( 696 )...( 707 ): >NPA2_HUMAN
VSRTGRQVKYAQ

SEQ ID NO: 21650 - protein, 12 aa, Homo sapiens
  ( 697 )...( 708 ): >NPA2_HUMAN
SRTGRQVKYAQS

SEQ ID NO: 21651 - protein, 12 aa, Homo sapiens
  ( 698 )...( 709 ): >NPA2_HUMAN
RTGRQVKYAQSQ

SEQ ID NO: 21652 - protein, 12 aa, Homo sapiens
  ( 77 )...( 88 ): >NR23_HUMAN
RRLIYRCQVGAG

SEQ ID NO: 21653 - protein, 12 aa, Homo sapiens
  ( 104 )...( 115 ): >NR23_HUMAN
RLKKCLQAGMNQ

SEQ ID NO: 21654 - protein, 12 aa, Homo sapiens
  ( 28 )...( 39 ): >NR52_HUMAN
RHGSPIPARGRL

SEQ ID NO: 21655 - protein, 12 aa, Homo sapiens
  ( 33 )...( 44 ): >NR52_HUMAN
IPARGRLVMLPK

SEQ ID NO: 21656 - protein, 12 aa, Homo sapiens
  ( 34 )...( 45 ): >NR52_HUMAN
PARGRLVMLPKV

SEQ ID NO: 21657 - protein, 12 aa, Homo sapiens
  ( 142 )...( 153 ): >NR52_HUMAN
RFQKCLSVGMKL

SEQ ID NO: 21658 - protein, 12 aa, Homo sapiens
  ( 155 )...( 166 ): >NR52_HUMAN
AVRADRMRGGRN

SEQ ID NO: 21659 - protein, 12 aa, Homo sapiens
  ( 158 )...( 169 ): >NR52_HUMAN
ADRMRGGRNKFG

SEQ ID NO: 21660 - protein, 12 aa, Homo sapiens
  ( 160 )...( 171 ): >NR52_HUMAN
RMRGGRNKFGPM

SEQ ID NO: 21661 - protein, 12 aa, Homo sapiens
  ( 175 )...( 186 ): >NR52_HUMAN
DRALKQQKKALI

SEQ ID NO: 21662 - protein, 12 aa, Homo sapiens
  ( 177 )...( 188 ): >NR52_HUMAN
ALKQQKKALIRA

SEQ ID NO: 21663 - protein, 12 aa, Homo sapiens
  ( 178 )...( 189 ): >NR52_HUMAN
LKQQKKALIRAN

SEQ ID NO: 21664 - protein, 12 aa, Homo sapiens
  ( 179 )...( 190 ): >NR52_HUMAN
KQQKKALIRANG

SEQ ID NO: 21665 - protein, 12 aa, Homo sapiens
  ( 180 )...( 191 ): >NR52_HUMAN
QQKKALIRANGL

SEQ ID NO: 21666 - protein, 12 aa, Homo sapiens
  ( 181 )...( 192 ): >NR52_HUMAN
QKKALIRANGLK

SEQ ID NO: 21667 - protein, 12 aa, Homo sapiens
  ( 182 )...( 193 ): >NR52_HUMAN
KKALIRANGLKL

SEQ ID NO: 21668 - protein, 12 aa, Homo sapiens
  ( 82 )...( 93 ): >NRF1_HUMAN
AAAVATGKKRKR

SEQ ID NO: 21669 - protein, 12 aa, Homo sapiens
  ( 83 )...( 94 ): >NRF1_HUMAN
AAVATGKKRKRP

SEQ ID NO: 21670 - protein, 12 aa, Homo sapiens
  ( 84 )...( 95 ): >NRF1_HUMAN
AVATGKKRKRPH

SEQ ID NO: 21671 - protein, 12 aa, Homo sapiens
  ( 85 )...( 96 ): >NRF1_HUMAN
VATGKKRKRPHV

SEQ ID NO: 21672 - protein, 12 aa, Homo sapiens
  ( 107 )...( 118 ): >NRF1_HUMAN
QQTRLLRKLRAT

SEQ ID NO: 21673 - protein, 12 aa, Homo sapiens
  ( 108 )...( 119 ): >NRF1_HUMAN
QTRLLRKLRATL

SEQ ID NO: 21674 - protein, 12 aa, Homo sapiens
  ( 109 )...( 120 ): >NRF1_HUMAN
TRLLRKLRATLD

SEQ ID NO: 21675 - protein, 12 aa, Homo sapiens
  ( 253 )...( 264 ): >NRF1_HUMAN
KQRVSWTQALRT

SEQ ID NO: 21676 - protein, 12 aa, Homo sapiens
  ( 260 )...( 271 ): >NRF1_HUMAN
QALRTIVKNCYK

SEQ ID NO: 21677 - protein, 12 aa, Homo sapiens
  ( 261 )...( 272 ): >NRF1_HUMAN
ALRTIVKNCYKQ

SEQ ID NO: 21678 - protein, 12 aa, Homo sapiens
  ( 263 )...( 274 ): >NRF1_HUMAN
RTIVKNCYKQHG

SEQ ID NO: 21679 - protein, 12 aa, Homo sapiens
  ( 264 )...( 275 ): >NRF1_HUMAN
TIVKNCYKQHGR

SEQ ID NO: 21680 - protein, 12 aa, Homo sapiens
  ( 143 )...( 154 ): >OLG1_HUMAN
APGRKLSKIATL

SEQ ID NO: 21681 - protein, 12 aa, Homo sapiens
  ( 144 )...( 155 ): >OLG1_HUMAN
PGRKLSKIATLL

SEQ ID NO: 21682 - protein, 12 aa, Homo sapiens
  ( 145 )...( 156 ): >OLG1_HUMAN
GRKLSKIATLLL

SEQ ID NO: 21683 - protein, 12 aa, Homo sapiens
  ( 146 )...( 157 ): >OLG1_HUMAN
RKLSKIATLLLA

SEQ ID NO: 21684 - protein, 12 aa, Homo sapiens
  ( 147 )...( 158 ): >OLG1_HUMAN
KLSKIATLLLAR

SEQ ID NO: 21685 - protein, 12 aa, Homo sapiens
  ( 140 )...( 151 ): >OLG2_HUMAN
GPSVRKLSKIAT

SEQ ID NO: 21686 - protein, 12 aa, Homo sapiens
  ( 141 )...( 152 ): >OLG2_HUMAN
PSVRKLSKIATL

SEQ ID NO: 21687 - protein, 12 aa, Homo sapiens
  ( 142 )...( 153 ): >OLG2_HUMAN
SVRKLSKIATLL

SEQ ID NO: 21688 - protein, 12 aa, Homo sapiens
  ( 143 )...( 154 ): >OLG2_HUMAN
VRKLSKIATLLL

SEQ ID NO: 21689 - protein, 12 aa, Homo sapiens
  ( 144 )...( 155 ): >OLG2_HUMAN
RKLSKIATLLLA

SEQ ID NO: 21690 - protein, 12 aa, Homo sapiens
  ( 145 )...( 156 ): >OLG2_HUMAN
KLSKIATLLLAR

SEQ ID NO: 21691 - protein, 12 aa, Homo sapiens
  ( 50 )...( 61 ): >ONC2_HUMAN
HARRGPRGSLRG

SEQ ID NO: 21692 - protein, 12 aa, Homo sapiens
  ( 357 )...( 368 ): >ONC2_HUMAN
KPWSKLKSGRET

SEQ ID NO: 21693 - protein, 12 aa, Homo sapiens
  ( 382 )...( 393 ): >ONC2_HUMAN
QRMSALRLAACK

SEQ ID NO: 21694 - protein, 12 aa, Homo sapiens
  ( 383 )...( 394 ): >ONC2_HUMAN
RMSALRLAACKR

SEQ ID NO: 21695 - protein, 12 aa, Homo sapiens
  ( 384 )...( 395 ): >ONC2_HUMAN
MSALRLAACKRK

SEQ ID NO: 21696 - protein, 12 aa, Homo sapiens
  ( 385 )...( 396 ): >ONC2_HUMAN
SALRLAACKRKE

SEQ ID NO: 21697 - protein, 12 aa, Homo sapiens
  ( 386 )...( 397 ): >ONC2_HUMAN
ALRLAACKRKEQ

SEQ ID NO: 21698 - protein, 12 aa, Homo sapiens
  ( 67 )...( 78 ): >OVO1_HUMAN
GFLRTKMKVTLG

SEQ ID NO: 21699 - protein, 12 aa, Homo sapiens
  ( 129 )...( 140 ): >OVO1_HUMAN
LKRHVRTHTGVR

SEQ ID NO: 21700 - protein, 12 aa, Homo sapiens
  ( 130 )...( 141 ): >OVO1_HUMAN
KRHVRTHTGVRP

SEQ ID NO: 21701 - protein, 12 aa, Homo sapiens
  ( 133 )...( 144 ): >OVO1_HUMAN
VRTHTGVRPYKC

SEQ ID NO: 21702 - protein, 12 aa, Homo sapiens
  ( 207 )...( 218 ): >OVO1_HUMAN
SPLLRKTSKKVA

SEQ ID NO: 21703 - protein, 12 aa, Homo sapiens
  ( 208 )...( 219 ): >OVO1_HUMAN
PLLRKTSKKVAV

SEQ ID NO: 21704 - protein, 12 aa, Homo sapiens
  ( 209 )...( 220 ): >OVO1_HUMAN
LLRKTSKKVAVA

SEQ ID NO: 21705 - protein, 12 aa, Homo sapiens
  ( 210 )...( 221 ): >OVO1_HUMAN
LRKTSKKVAVAL

SEQ ID NO: 21706 - protein, 12 aa, Homo sapiens
  ( 211 )...( 222 ): >OVO1_HUMAN
RKTSKKVAVALQ

SEQ ID NO: 21707 - protein, 12 aa, Homo sapiens
  ( 57 )...( 68 ): >PAS1_HUMAN
MRLAISFLRTHK

SEQ ID NO: 21708 - protein, 12 aa, Homo sapiens
  ( 58 )...( 69 ): >PAS1_HUMAN
RLAISFLRTHKL

SEQ ID NO: 21709 - protein, 12 aa, Homo sapiens
  ( 170 )...( 181 ): >PAS1_HUMAN
MRMKCTVTNRGR

SEQ ID NO: 21710 - protein, 12 aa, Homo sapiens
  ( 171 )...( 182 ): >PAS1_HUMAN
RMKCTVTNRGRT

SEQ ID NO: 21711 - protein, 12 aa, Homo sapiens
  ( 172 )...( 183 ): >PAS1_HUMAN
MKCTVTNRGRTV

SEQ ID NO: 21712 - protein, 12 aa, Homo sapiens
  ( 173 )...( 184 ): >PAS1_HUMAN
KCTVTNRGRTVN

SEQ ID NO: 21713 - protein, 12 aa, Homo sapiens
  ( 175 )...( 186 ): >PAS1_HUMAN
TVTNRGRTVNLK

SEQ ID NO: 21714 - protein, 12 aa, Homo sapiens
  ( 176 )...( 187 ): >PAS1_HUMAN
VTNRGRTVNLKS

SEQ ID NO: 21715 - protein, 12 aa, Homo sapiens
  ( 177 )...( 188 ): >PAS1_HUMAN
TNRGRTVNLKSA

SEQ ID NO: 21716 - protein, 12 aa, Homo sapiens
  ( 178 )...( 189 ): >PAS1_HUMAN
NRGRTVNLKSAT

SEQ ID NO: 21717 - protein, 12 aa, Homo sapiens
  ( 179 )...( 190 ): >PAS1_HUMAN
RGRTVNLKSATW

SEQ ID NO: 21718 - protein, 12 aa, Homo sapiens
  ( 180 )...( 191 ): >PAS1_HUMAN
GRTVNLKSATWK

SEQ ID NO: 21719 - protein, 12 aa, Homo sapiens
  ( 181 )...( 192 ): >PAS1_HUMAN
RTVNLKSATWKV

SEQ ID NO: 21720 - protein, 12 aa, Homo sapiens
  ( 679 )...( 690 ): >PAS1_HUMAN
FKTRSAKGFGAR

SEQ ID NO: 21721 - protein, 12 aa, Homo sapiens
  ( 698 )...( 709 ): >PAS1_HUMAN
AMVALSNKLKLK

SEQ ID NO: 21722 - protein, 12 aa, Homo sapiens
  ( 699 )...( 710 ): >PAS1_HUMAN
MVALSNKLKLKR

SEQ ID NO: 21723 - protein, 12 aa, Homo sapiens
  ( 700 )...( 711 ): >PAS1_HUMAN
VALSNKLKLKRQ

SEQ ID NO: 21724 - protein, 12 aa, Homo sapiens
  ( 701 )...( 712 ): >PAS1_HUMAN
ALSNKLKLKRQL

SEQ ID NO: 21725 - protein, 12 aa, Homo sapiens
  ( 56 )...( 67 ): >PAX2_HUMAN
RQLRVSHGCVSK

SEQ ID NO: 21726 - protein, 12 aa, Homo sapiens
  ( 131 )...( 142 ): >PAX2_HUMAN
SVSSINRIIRTK

SEQ ID NO: 21727 - protein, 12 aa, Homo sapiens
  ( 132 )...( 143 ): >PAX2_HUMAN
VSSINRIIRTKV

SEQ ID NO: 21728 - protein, 12 aa, Homo sapiens
  ( 133 )...( 144 ): >PAX2_HUMAN
SSINRIIRTKVQ

SEQ ID NO: 21729 - protein, 12 aa, Homo sapiens
  ( 134 )...( 145 ): >PAX2_HUMAN
SINRIIRTKVQQ

SEQ ID NO: 21730 - protein, 12 aa, Homo sapiens
  ( 135 )...( 146 ): >PAX2_HUMAN
INRIIRTKVQQP

SEQ ID NO: 21731 - protein, 12 aa, Homo sapiens
  ( 191 )...( 202 ): >PAX2_HUMAN
LGIPRSNGEKRK

SEQ ID NO: 21732 - protein, 12 aa, Homo sapiens
  ( 66 )...( 77 ): >PAX3_HUMAN
GIRPCVISRQLR

SEQ ID NO: 21733 - protein, 12 aa, Homo sapiens
  ( 67 )...( 78 ): >PAX3_HUMAN
IRPCVISRQLRV

SEQ ID NO: 21734 - protein, 12 aa, Homo sapiens
  ( 68 )...( 79 ): >PAX3_HUMAN
RPCVISRQLRVS

SEQ ID NO: 21735 - protein, 12 aa, Homo sapiens
  ( 74 )...( 85 ): >PAX3_HUMAN
RQLRVSHGCVSK

SEQ ID NO: 21736 - protein, 12 aa, Homo sapiens
  ( 150 )...( 161 ): >PAX3_HUMAN
SVSSISRILRSK

SEQ ID NO: 21737 - protein, 12 aa, Homo sapiens
  ( 151 )...( 162 ): >PAX3_HUMAN
VSSISRILRSKF

SEQ ID NO: 21738 - protein, 12 aa, Homo sapiens
  ( 152 )...( 163 ): >PAX3_HUMAN
SSISRILRSKFG

SEQ ID NO: 21739 - protein, 12 aa, Homo sapiens
  ( 153 )...( 164 ): >PAX3_HUMAN
SISRILRSKFGK

SEQ ID NO: 21740 - protein, 12 aa, Homo sapiens
  ( 154 )...( 165 ): >PAX3_HUMAN
ISRILRSKFGKG

SEQ ID NO: 21741 - protein, 12 aa, Homo sapiens
  ( 155 )...( 166 ): >PAX3_HUMAN
SRILRSKFGKGE

SEQ ID NO: 21742 - protein, 12 aa, Homo sapiens
  ( 66 )...( 77 ): >PAX6_HUMAN
IRPRAIGGSKPR

SEQ ID NO: 21743 - protein, 12 aa, Homo sapiens
  ( 67 )...( 78 ): >PAX6_HUMAN
RPRAIGGSKPRV

SEQ ID NO: 21744 - protein, 12 aa, Homo sapiens
  ( 66 )...( 77 ): >PAX7_HUMAN
GIRPCVISRQLR

SEQ ID NO: 21745 - protein, 12 aa, Homo sapiens
  ( 67 )...( 78 ): >PAX7_HUMAN
IRPCVISRQLRV

SEQ ID NO: 21746 - protein, 12 aa, Homo sapiens
  ( 68 )...( 79 ): >PAX7_HUMAN
RPCVISRQLRVS

SEQ ID NO: 21747 - protein, 12 aa, Homo sapiens
  ( 74 )...( 85 ): >PAX7_HUMAN
RQLRVSHGCVSK

SEQ ID NO: 21748 - protein, 12 aa, Homo sapiens
  ( 152 )...( 163 ): >PAX7_HUMAN
LVSSISRVLRIK

SEQ ID NO: 21749 - protein, 12 aa, Homo sapiens
  ( 153 )...( 164 ): >PAX7_HUMAN
VSSISRVLRIKF

SEQ ID NO: 21750 - protein, 12 aa, Homo sapiens
  ( 154 )...( 165 ): >PAX7_HUMAN
SSISRVLRIKFG

SEQ ID NO: 21751 - protein, 12 aa, Homo sapiens
  ( 155 )...( 166 ): >PAX7_HUMAN
SISRVLRIKFGK

SEQ ID NO: 21752 - protein, 12 aa, Homo sapiens
  ( 156 )...( 167 ): >PAX7_HUMAN
ISRVLRIKFGKK

SEQ ID NO: 21753 - protein, 12 aa, Homo sapiens
  ( 157 )...( 168 ): >PAX7_HUMAN
SRVLRIKFGKKE

SEQ ID NO: 21754 - protein, 12 aa, Homo sapiens
  ( 49 )...( 60 ): >PAX8_HUMAN
RQLRVSHGCVSK

SEQ ID NO: 21755 - protein, 12 aa, Homo sapiens
  ( 124 )...( 135 ): >PAX8_HUMAN
SVSSINRIIRTK

SEQ ID NO: 21756 - protein, 12 aa, Homo sapiens
  ( 125 )...( 136 ): >PAX8_HUMAN
VSSINRIIRTKV

SEQ ID NO: 21757 - protein, 12 aa, Homo sapiens
  ( 126 )...( 137 ): >PAX8_HUMAN
SSINRIIRTKVQ

SEQ ID NO: 21758 - protein, 12 aa, Homo sapiens
  ( 127 )...( 138 ): >PAX8_HUMAN
SINRIIRTKVQQ

SEQ ID NO: 21759 - protein, 12 aa, Homo sapiens
  ( 128 )...( 139 ): >PAX8_HUMAN
INRIIRTKVQQP

SEQ ID NO: 21760 - protein, 12 aa, Homo sapiens
  ( 18 )...( 29 ): >PAX9_HUMAN
GRPLPNAIRLRI

SEQ ID NO: 21761 - protein, 12 aa, Homo sapiens
  ( 19 )...( 30 ): >PAX9_HUMAN
RPLPNAIRLRIV

SEQ ID NO: 21762 - protein, 12 aa, Homo sapiens
  ( 44 )...( 55 ): >PAX9_HUMAN
RQLRVSHGCVSK

SEQ ID NO: 21763 - protein, 12 aa, Homo sapiens
  ( 77 )...( 88 ): >PAX9_HUMAN
RVTTPTVVKHIR

SEQ ID NO: 21764 - protein, 12 aa, Homo sapiens
  ( 119 )...( 130 ): >PAX9_HUMAN
SVSSISRILRNK

SEQ ID NO: 21765 - protein, 12 aa, Homo sapiens
  ( 120 )...( 131 ): >PAX9_HUMAN
VSSISRILRNKI

SEQ ID NO: 21766 - protein, 12 aa, Homo sapiens
  ( 121 )...( 132 ): >PAX9_HUMAN
SSISRILRNKIG

SEQ ID NO: 21767 - protein, 12 aa, Homo sapiens
  ( 122 )...( 133 ): >PAX9_HUMAN
SISRILRNKIGN

SEQ ID NO: 21768 - protein, 12 aa, Homo sapiens
  ( 123 )...( 134 ): >PAX9_HUMAN
ISRILRNKIGNL

SEQ ID NO: 21769 - protein, 12 aa, Homo sapiens
  ( 124 )...( 135 ): >PAX9_HUMAN
SRILRNKIGNLA

SEQ ID NO: 21770 - protein, 12 aa, Homo sapiens
  ( 125 )...( 136 ): >PAX9_HUMAN
RILRNKIGNLAQ

SEQ ID NO: 21771 - protein, 12 aa, Homo sapiens
  ( 146 )...( 157 ): >PER1_HUMAN
KLRLPPERRGKG

SEQ ID NO: 21772 - protein, 12 aa, Homo sapiens
  ( 149 )...( 160 ): >PER1_HUMAN
LPPERRGKGRSG

SEQ ID NO: 21773 - protein, 12 aa, Homo sapiens
  ( 150 )...( 161 ): >PER1_HUMAN
PPERRGKGRSGT

SEQ ID NO: 21774 - protein, 12 aa, Homo sapiens
  ( 151 )...( 162 ): >PER1_HUMAN
PERRGKGRSGTL

SEQ ID NO: 21775 - protein, 12 aa, Homo sapiens
  ( 152 )...( 163 ): >PER1_HUMAN
ERRGKGRSGTLA

SEQ ID NO: 21776 - protein, 12 aa, Homo sapiens
  ( 153 )...( 164 ): >PER1_HUMAN
RRGKGRSGTLAT

SEQ ID NO: 21777 - protein, 12 aa, Homo sapiens
  ( 239 )...( 250 ): >PER1_HUMAN
AVLLRCKRDVFR

SEQ ID NO: 21778 - protein, 12 aa, Homo sapiens
  ( 240 )...( 251 ): >PER1_HUMAN
VLLRCKRDVFRG

SEQ ID NO: 21779 - protein, 12 aa, Homo sapiens
  ( 241 )...( 252 ): >PER1_HUMAN
LLRCKRDVFRGT

SEQ ID NO: 21780 - protein, 12 aa, Homo sapiens
  ( 316 )...( 327 ): >PER1_HUMAN
FRLTPYVTKIRV

SEQ ID NO: 21781 - protein, 12 aa, Homo sapiens
  ( 317 )...( 328 ): >PER1_HUMAN
RLTPYVTKIRVS

SEQ ID NO: 21782 - protein, 12 aa, Homo sapiens
  ( 447 )...( 458 ): >PER1_HUMAN
PWSRKVAFVLGR

SEQ ID NO: 21783 - protein, 12 aa, Homo sapiens
  ( 448 )...( 459 ): >PER1_HUMAN
WSRKVAFVLGRH

SEQ ID NO: 21784 - protein, 12 aa, Homo sapiens
  ( 449 )...( 460 ): >PER1_HUMAN
SRKVAFVLGRHK

SEQ ID NO: 21785 - protein, 12 aa, Homo sapiens
  ( 450 )...( 461 ): >PER1_HUMAN
RKVAFVLGRHKV

SEQ ID NO: 21786 - protein, 12 aa, Homo sapiens
  ( 451 )...( 462 ): >PER1_HUMAN
KVAFVLGRHKVR

SEQ ID NO: 21787 - protein, 12 aa, Homo sapiens
  ( 452 )...( 463 ): >PER1_HUMAN
VAFVLGRHKVRT

SEQ ID NO: 21788 - protein, 12 aa, Homo sapiens
  ( 453 )...( 464 ): >PER1_HUMAN
AFVLGRHKVRTA

SEQ ID NO: 21789 - protein, 12 aa, Homo sapiens
  ( 454 )...( 465 ): >PER1_HUMAN
FVLGRHKVRTAP

SEQ ID NO: 21790 - protein, 12 aa, Homo sapiens
  ( 455 )...( 466 ): >PER1_HUMAN
VLGRHKVRTAPL

SEQ ID NO: 21791 - protein, 12 aa, Homo sapiens
  ( 456 )...( 467 ): >PER1_HUMAN
LGRHKVRTAPLN

SEQ ID NO: 21792 - protein, 12 aa, Homo sapiens
  ( 569 )...( 580 ): >PER1_HUMAN
ARPQSRPRLPAT

SEQ ID NO: 21793 - protein, 12 aa, Homo sapiens
  ( 570 )...( 581 ): >PER1_HUMAN
RPQSRPRLPATG

SEQ ID NO: 21794 - protein, 12 aa, Homo sapiens
  ( 574 )...( 585 ): >PER1_HUMAN
RPRLPATGTFKA

SEQ ID NO: 21795 - protein, 12 aa, Homo sapiens
  ( 576 )...( 587 ): >PER1_HUMAN
RLPATGTFKAKA

SEQ ID NO: 21796 - protein, 12 aa, Homo sapiens
  ( 667 )...( 678 ): >PER1_HUMAN
RQRTGPVSVGTK

SEQ ID NO: 21797 - protein, 12 aa, Homo sapiens
  ( 795 )...( 806 ): >PER1_HUMAN
LSRFRDLGRLRG

SEQ ID NO: 21798 - protein, 12 aa, Homo sapiens
  ( 796 )...( 807 ): >PER1_HUMAN
SRFRDLGRLRGL

SEQ ID NO: 21799 - protein, 12 aa, Homo sapiens
  ( 1186 )...( 1197 ): >PER1_HUMAN
SWVRKGQLPRAL

SEQ ID NO: 21800 - protein, 12 aa, Homo sapiens
  ( 135 )...( 146 ): >PER2_HUMAN
LATLKYALRSVK

SEQ ID NO: 21801 - protein, 12 aa, Homo sapiens
  ( 136 )...( 147 ): >PER2_HUMAN
ATLKYALRSVKQ

SEQ ID NO: 21802 - protein, 12 aa, Homo sapiens
  ( 137 )...( 148 ): >PER2_HUMAN
TLKYALRSVKQV

SEQ ID NO: 21803 - protein, 12 aa, Homo sapiens
  ( 138 )...( 149 ): >PER2_HUMAN
LKYALRSVKQVK

SEQ ID NO: 21804 - protein, 12 aa, Homo sapiens
  ( 139 )...( 150 ): >PER2_HUMAN
KYALRSVKQVKA

SEQ ID NO: 21805 - protein, 12 aa, Homo sapiens
  ( 140 )...( 151 ): >PER2_HUMAN
YALRSVKQVKAN

SEQ ID NO: 21806 - protein, 12 aa, Homo sapiens
  ( 422 )...( 433 ): >PER2_HUMAN
SRKISFIIGRHK

SEQ ID NO: 21807 - protein, 12 aa, Homo sapiens
  ( 423 )...( 434 ): >PER2_HUMAN
RKISFIIGRHKV

SEQ ID NO: 21808 - protein, 12 aa, Homo sapiens
  ( 424 )...( 435 ): >PER2_HUMAN
KISFIIGRHKVR

SEQ ID NO: 21809 - protein, 12 aa, Homo sapiens
  ( 425 )...( 436 ): >PER2_HUMAN
ISFIIGRHKVRV

SEQ ID NO: 21810 - protein, 12 aa, Homo sapiens
  ( 426 )...( 437 ): >PER2_HUMAN
SFIIGRHKVRVG

SEQ ID NO: 21811 - protein, 12 aa, Homo sapiens
  ( 427 )...( 438 ): >PER2_HUMAN
FIIGRHKVRVGP

SEQ ID NO: 21812 - protein, 12 aa, Homo sapiens
  ( 428 )...( 439 ): >PER2_HUMAN
IIGRHKVRVGPL

SEQ ID NO: 21813 - protein, 12 aa, Homo sapiens
  ( 429 )...( 440 ): >PER2_HUMAN
IGRHKVRVGPLN

SEQ ID NO: 21814 - protein, 12 aa, Homo sapiens
  ( 512 )...( 523 ): >PER2_HUMAN
RRAEICKNGNKT

SEQ ID NO: 21815 - protein, 12 aa, Homo sapiens
  ( 513 )...( 524 ): >PER2_HUMAN
RAEICKNGNKTK

SEQ ID NO: 21816 - protein, 12 aa, Homo sapiens
  ( 613 )...( 624 ): >PER2_HUMAN
VPALRSSDKRKA

SEQ ID NO: 21817 - protein, 12 aa, Homo sapiens
  ( 614 )...( 625 ): >PER2_HUMAN
PALRSSDKRKAT

SEQ ID NO: 21818 - protein, 12 aa, Homo sapiens
  ( 615 )...( 626 ): >PER2_HUMAN
ALRSSDKRKATV

SEQ ID NO: 21819 - protein, 12 aa, Homo sapiens
  ( 616 )...( 627 ): >PER2_HUMAN
LRSSDKRKATVS

SEQ ID NO: 21820 - protein, 12 aa, Homo sapiens
  ( 617 )...( 628 ): >PER2_HUMAN
RSSDKRKATVSP

SEQ ID NO: 21821 - protein, 12 aa, Homo sapiens
  ( 265 )...( 276 ): >PER3_HUMAN
APRIPVNKRIFT

SEQ ID NO: 21822 - protein, 12 aa, Homo sapiens
  ( 266 )...( 277 ): >PER3_HUMAN
PRIPVNKRIFTT

SEQ ID NO: 21823 - protein, 12 aa, Homo sapiens
  ( 267 )...( 278 ): >PER3_HUMAN
RIPVNKRIFTTT

SEQ ID NO: 21824 - protein, 12 aa, Homo sapiens
  ( 365 )...( 376 ): >PER3_HUMAN
SRKISFIIGRHK

SEQ ID NO: 21825 - protein, 12 aa, Homo sapiens
  ( 366 )...( 377 ): >PER3_HUMAN
RKISFIIGRHKV

SEQ ID NO: 21826 - protein, 12 aa, Homo sapiens
  ( 367 )...( 378 ): >PER3_HUMAN
KISFIIGRHKVR

SEQ ID NO: 21827 - protein, 12 aa, Homo sapiens
  ( 368 )...( 379 ): >PER3_HUMAN
ISFIIGRHKVRT

SEQ ID NO: 21828 - protein, 12 aa, Homo sapiens
  ( 369 )...( 380 ): >PER3_HUMAN
SFIIGRHKVRTS

SEQ ID NO: 21829 - protein, 12 aa, Homo sapiens
  ( 370 )...( 381 ): >PER3_HUMAN
FIIGRHKVRTSP

SEQ ID NO: 21830 - protein, 12 aa, Homo sapiens
  ( 371 )...( 382 ): >PER3_HUMAN
IIGRHKVRTSPL

SEQ ID NO: 21831 - protein, 12 aa, Homo sapiens
  ( 372 )...( 383 ): >PER3_HUMAN
IGRHKVRTSPLN

SEQ ID NO: 21832 - protein, 12 aa, Homo sapiens
  ( 733 )...( 744 ): >PER3_HUMAN
TSKQTRSAGCRK

SEQ ID NO: 21833 - protein, 12 aa, Homo sapiens
  ( 30 )...( 41 ): >PHT1_HUMAN
QTQIKGLKNKPK

SEQ ID NO: 21834 - protein, 12 aa, Homo sapiens
  ( 31 )...( 42 ): >PHT1_HUMAN
TQIKGLKNKPKK

SEQ ID NO: 21835 - protein, 12 aa, Homo sapiens
  ( 32 )...( 43 ): >PHT1_HUMAN
QIKGLKNKPKKM

SEQ ID NO: 21836 - protein, 12 aa, Homo sapiens
  ( 33 )...( 44 ): >PHT1_HUMAN
IKGLKNKPKKMG

SEQ ID NO: 21837 - protein, 12 aa, Homo sapiens
  ( 34 )...( 45 ): >PHT1_HUMAN
KGLKNKPKKMGH

SEQ ID NO: 21838 - protein, 12 aa, Homo sapiens
  ( 35 )...( 46 ): >PHT1_HUMAN
GLKNKPKKMGHI

SEQ ID NO: 21839 - protein, 12 aa, Homo sapiens
  ( 55 )...( 66 ): >PHT1_HUMAN
LIRGSTFAKAKP

SEQ ID NO: 21840 - protein, 12 aa, Homo sapiens
  ( 69 )...( 80 ): >PHT1_HUMAN
PWTSLTRKGLVR

SEQ ID NO: 21841 - protein, 12 aa, Homo sapiens
  ( 70 )...( 81 ): >PHT1_HUMAN
WTSLTRKGLVRV

SEQ ID NO: 21842 - protein, 12 aa, Homo sapiens
  ( 72 )...( 83 ): >PHT1_HUMAN
SLTRKGLVRVVF

SEQ ID NO: 21843 - protein, 12 aa, Homo sapiens
  ( 73 )...( 84 ): >PHT1_HUMAN
LTRKGLVRVVFF

SEQ ID NO: 21844 - protein, 12 aa, Homo sapiens
  ( 74 )...( 85 ): >PHT1_HUMAN
TRKGLVRVVFFP

SEQ ID NO: 21845 - protein, 12 aa, Homo sapiens
  ( 162 )...( 173 ): >PHT1_HUMAN
RRKLRKTVNGDG

SEQ ID NO: 21846 - protein, 12 aa, Homo sapiens
  ( 163 )...( 174 ): >PHT1_HUMAN
RKLRKTVNGDGS

SEQ ID NO: 21847 - protein, 12 aa, Homo sapiens
  ( 164 )...( 175 ): >PHT1_HUMAN
KLRKTVNGDGSR

SEQ ID NO: 21848 - protein, 12 aa, Homo sapiens
  ( 202 )...( 213 ): >PHT1_HUMAN
ETIFGNRIKRVK

SEQ ID NO: 21849 - protein, 12 aa, Homo sapiens
  ( 203 )...( 214 ): >PHT1_HUMAN
TIFGNRIKRVKL

SEQ ID NO: 21850 - protein, 12 aa, Homo sapiens
  ( 204 )...( 215 ): >PHT1_HUMAN
IFGNRIKRVKLI

SEQ ID NO: 21851 - protein, 12 aa, Homo sapiens
  ( 205 )...( 216 ): >PHT1_HUMAN
FGNRIKRVKLIS

SEQ ID NO: 21852 - protein, 12 aa, Homo sapiens
  ( 206 )...( 217 ): >PHT1_HUMAN
GNRIKRVKLISN

SEQ ID NO: 21853 - protein, 12 aa, Homo sapiens
  ( 208 )...( 219 ): >PHT1_HUMAN
RIKRVKLISNKG

SEQ ID NO: 21854 - protein, 12 aa, Homo sapiens
  ( 209 )...( 220 ): >PHT1_HUMAN
IKRVKLISNKGT

SEQ ID NO: 21855 - protein, 12 aa, Homo sapiens
  ( 210 )...( 221 ): >PHT1_HUMAN
KRVKLISNKGTE

SEQ ID NO: 21856 - protein, 12 aa, Homo sapiens
  ( 260 )...( 271 ): >PHT1_HUMAN
RREAFRRLGNGV

SEQ ID NO: 21857 - protein, 12 aa, Homo sapiens
  ( 283 )...( 294 ): >PHT1_HUMAN
ARTQMILLRRSV

SEQ ID NO: 21858 - protein, 12 aa, Homo sapiens
  ( 303 )...( 314 ): >PHT1_HUMAN
CEVKNRKSILSR

SEQ ID NO: 21859 - protein, 12 aa, Homo sapiens
  ( 316 )...( 327 ): >PHT1_HUMAN
LNSQVKKTTTRW

SEQ ID NO: 21860 - protein, 12 aa, Homo sapiens
  ( 317 )...( 328 ): >PHT1_HUMAN
NSQVKKTTTRWC

SEQ ID NO: 21861 - protein, 12 aa, Homo sapiens
  ( 564 )...( 575 ): >PHT1_HUMAN
LFSHITSARKAR

SEQ ID NO: 21862 - protein, 12 aa, Homo sapiens
  ( 565 )...( 576 ): >PHT1_HUMAN
FSHITSARKARK

SEQ ID NO: 21863 - protein, 12 aa, Homo sapiens
  ( 568 )...( 579 ): >PHT1_HUMAN
ITSARKARKYEI

SEQ ID NO: 21864 - protein, 12 aa, Homo sapiens
  ( 600 )...( 611 ): >PHT1_HUMAN
LKRRGPQRSVDV

SEQ ID NO: 21865 - protein, 12 aa, Homo sapiens
  ( 601 )...( 612 ): >PHT1_HUMAN
KRRGPQRSVDVV

SEQ ID NO: 21866 - protein, 12 aa, Homo sapiens
  ( 136 )...( 147 ): >PIT1_HUMAN
ANEFKVRRIKLG

SEQ ID NO: 21867 - protein, 12 aa, Homo sapiens
  ( 140 )...( 151 ): >PIT1_HUMAN
KVRRIKLGYTQT

SEQ ID NO: 21868 - protein, 12 aa, Homo sapiens
  ( 141 )...( 152 ): >PIT1_HUMAN
VRRIKLGYTQTN

SEQ ID NO: 21869 - protein, 12 aa, Homo sapiens
  ( 142 )...( 153 ): >PIT1_HUMAN
RRIKLGYTQTNV

SEQ ID NO: 21870 - protein, 12 aa, Homo sapiens
  ( 181 )...( 192 ): >PIT1_HUMAN
KNACKLKAILSK

SEQ ID NO: 21871 - protein, 12 aa, Homo sapiens
  ( 183 )...( 194 ): >PIT1_HUMAN
ACKLKAILSKWL

SEQ ID NO: 21872 - protein, 12 aa, Homo sapiens
  ( 214 )...( 225 ): >PIT1_HUMAN
KRKRRTTISIAA

SEQ ID NO: 21873 - protein, 12 aa, Homo sapiens
  ( 215 )...( 226 ): >PIT1_HUMAN
RKRRTTISIAAK

SEQ ID NO: 21874 - protein, 12 aa, Homo sapiens
  ( 216 )...( 227 ): >PIT1_HUMAN
KRRTTISIAAKD

SEQ ID NO: 21875 - protein, 12 aa, Homo sapiens
  ( 270 )...( 281 ): >PIT1_HUMAN
KRVKTSLNQSLF

SEQ ID NO: 21876 - protein, 12 aa, Homo sapiens
  ( 278 )...( 289 ): >PIX2_HUMAN
NSSLASLRLKAK

SEQ ID NO: 21877 - protein, 12 aa, Homo sapiens
  ( 279 )...( 290 ): >PIX2_HUMAN
SSLASLRLKAKQ

SEQ ID NO: 21878 - protein, 12 aa, Homo sapiens
  ( 280 )...( 291 ): >PML_HUMAN
RERVRQVVAHVR

SEQ ID NO: 21879 - protein, 12 aa, Homo sapiens
  ( 282 )...( 293 ): >PML_HUMAN
RVRQVVAHVRAQ

SEQ ID NO: 21880 - protein, 12 aa, Homo sapiens
  ( 324 )...( 335 ): >PML_HUMAN
QRIRTGSALVQR

SEQ ID NO: 21881 - protein, 12 aa, Homo sapiens
  ( 325 )...( 336 ): >PML_HUMAN
RIRTGSALVQRM

SEQ ID NO: 21882 - protein, 12 aa, Homo sapiens
  ( 326 )...( 337 ): >PML_HUMAN
IRTGSALVQRMK

SEQ ID NO: 21883 - protein, 12 aa, Homo sapiens
  ( 327 )...( 338 ): >PML_HUMAN
RTGSALVQRMKC

SEQ ID NO: 21884 - protein, 12 aa, Homo sapiens
  ( 349 )...( 360 ): >PML_HUMAN
HGFLRQALCRLR

SEQ ID NO: 21885 - protein, 12 aa, Homo sapiens
  ( 350 )...( 361 ): >PML_HUMAN
GFLRQALCRLRQ

SEQ ID NO: 21886 - protein, 12 aa, Homo sapiens
  ( 477 )...( 488 ): >PML_HUMAN
RKCSQTQCPRKV

SEQ ID NO: 21887 - protein, 12 aa, Homo sapiens
  ( 480 )...( 491 ): >PML_HUMAN
SQTQCPRKVIKM

SEQ ID NO: 21888 - protein, 12 aa, Homo sapiens
  ( 725 )...( 736 ): >PML_HUMAN
KLKNLAQTYLAR

SEQ ID NO: 21889 - protein, 12 aa, Homo sapiens
  ( 817 )...( 828 ): >PML_HUMAN
QGGLKKYSRYLS

SEQ ID NO: 21890 - protein, 12 aa, Homo sapiens
  ( 818 )...( 829 ): >PML_HUMAN
GGLKKYSRYLSL

SEQ ID NO: 21891 - protein, 12 aa, Homo sapiens
  ( 819 )...( 830 ): >PML_HUMAN
GLKKYSRYLSLQ

SEQ ID NO: 21892 - protein, 12 aa, Homo sapiens
  ( 97 )...( 108 ): >PMXB_HUMAN
KQRRIRTTFTSA

SEQ ID NO: 21893 - protein, 12 aa, Homo sapiens
  ( 98 )...( 109 ): >PMXB_HUMAN
QRRIRTTFTSAQ

SEQ ID NO: 21894 - protein, 12 aa, Homo sapiens
  ( 99 )...( 110 ): >PMXB_HUMAN
RRIRTTFTSAQL

SEQ ID NO: 21895 - protein, 12 aa, Homo sapiens
  ( 100 )...( 111 ): >PMXB_HUMAN
RIRTTFTSAQLK

SEQ ID NO: 21896 - protein, 12 aa, Homo sapiens
  ( 151 )...( 162 ): >PMXB_HUMAN
AKFRKQERAAAA

SEQ ID NO: 21897 - protein, 12 aa, Homo sapiens
  ( 152 )...( 163 ): >PMXB_HUMAN
KFRKQERAAAAA

SEQ ID NO: 21898 - protein, 12 aa, Homo sapiens
  ( 299 )...( 310 ): >PMXB_HUMAN
QRPNGAKAALVK

SEQ ID NO: 21899 - protein, 12 aa, Homo sapiens
  ( 292 )...( 303 ): >PO21_HUMAN
AKTFKQRRIKLG

SEQ ID NO: 21900 - protein, 12 aa, Homo sapiens
  ( 294 )...( 305 ): >PO21_HUMAN
TFKQRRIKLGFT

SEQ ID NO: 21901 - protein, 12 aa, Homo sapiens
  ( 296 )...( 307 ): >PO21_HUMAN
KQRRIKLGFTQG

SEQ ID NO: 21902 - protein, 12 aa, Homo sapiens
  ( 337 )...( 348 ): >PO21_HUMAN
KNMCKLKPLLEK

SEQ ID NO: 21903 - protein, 12 aa, Homo sapiens
  ( 370 )...( 381 ): >PO21_HUMAN
SPGIEGLSRRRK

SEQ ID NO: 21904 - protein, 12 aa, Homo sapiens
  ( 371 )...( 382 ): >PO21_HUMAN
PGIEGLSRRRKK

SEQ ID NO: 21905 - protein, 12 aa, Homo sapiens
  ( 381 )...( 392 ): >PO21_HUMAN
KKRTSIETNIRV

SEQ ID NO: 21906 - protein, 12 aa, Homo sapiens
  ( 208 )...( 219 ): >PO22_HUMAN
TFKQRRIKLGFT

SEQ ID NO: 21907 - protein, 12 aa, Homo sapiens
  ( 210 )...( 221 ): >PO22_HUMAN
KQRRIKLGFTQG

SEQ ID NO: 21908 - protein, 12 aa, Homo sapiens
  ( 251 )...( 262 ): >PO22_HUMAN
KNMCKLKPLLEK

SEQ ID NO: 21909 - protein, 12 aa, Homo sapiens
  ( 287 )...( 298 ): >PO22_HUMAN
LGFDGLPGRRRK

SEQ ID NO: 21910 - protein, 12 aa, Homo sapiens
  ( 288 )...( 299 ): >PO22_HUMAN
GFDGLPGRRRKK

SEQ ID NO: 21911 - protein, 12 aa, Homo sapiens
  ( 195 )...( 206 ): >PO23_HUMAN
AKTFKQRRIKLG

SEQ ID NO: 21912 - protein, 12 aa, Homo sapiens
  ( 197 )...( 208 ): >PO23_HUMAN
TFKQRRIKLGFT

SEQ ID NO: 21913 - protein, 12 aa, Homo sapiens
  ( 199 )...( 210 ): >PO23_HUMAN
KQRRIKLGFTQG

SEQ ID NO: 21914 - protein, 12 aa, Homo sapiens
  ( 240 )...( 251 ): >PO23_HUMAN
KNMCKLKPLLEK

SEQ ID NO: 21915 - protein, 12 aa, Homo sapiens
  ( 272 )...( 283 ): >PO23_HUMAN
PSLSEVFGRKRK

SEQ ID NO: 21916 - protein, 12 aa, Homo sapiens
  ( 273 )...( 284 ): >PO23_HUMAN
SLSEVFGRKRKK

SEQ ID NO: 21917 - protein, 12 aa, Homo sapiens
  ( 279 )...( 290 ): >PO23_HUMAN
GRKRKKRTSIET

SEQ ID NO: 21918 - protein, 12 aa, Homo sapiens
  ( 283 )...( 294 ): >PO23_HUMAN
KKRTSIETNIRL

SEQ ID NO: 21919 - protein, 12 aa, Homo sapiens
  ( 260 )...( 271 ): >PO31_HUMAN
KQRRIKLGFTQA

SEQ ID NO: 21920 - protein, 12 aa, Homo sapiens
  ( 326 )...( 337 ): >PO31_HUMAN
NLDKIAAQGRKR

SEQ ID NO: 21921 - protein, 12 aa, Homo sapiens
  ( 327 )...( 338 ): >PO31_HUMAN
LDKIAAQGRKRK

SEQ ID NO: 21922 - protein, 12 aa, Homo sapiens
  ( 328 )...( 339 ): >PO31_HUMAN
DKIAAQGRKRKK

SEQ ID NO: 21923 - protein, 12 aa, Homo sapiens
  ( 334 )...( 345 ): >PO31_HUMAN
GRKRKKRTSIEV

SEQ ID NO: 21924 - protein, 12 aa, Homo sapiens
  ( 335 )...( 346 ): >PO31_HUMAN
RKRKKRTSIEVG

SEQ ID NO: 21925 - protein, 12 aa, Homo sapiens
  ( 336 )...( 347 ): >PO31_HUMAN
KRKKRTSIEVGV

SEQ ID NO: 21926 - protein, 12 aa, Homo sapiens
  ( 337 )...( 348 ): >PO31_HUMAN
RKKRTSIEVGVK

SEQ ID NO: 21927 - protein, 12 aa, Homo sapiens
  ( 338 )...( 349 ): >PO31_HUMAN
KKRTSIEVGVKG

SEQ ID NO: 21928 - protein, 12 aa, Homo sapiens
  ( 388 )...( 399 ): >PO31_HUMAN
RQKEKRMTPAAG

SEQ ID NO: 21929 - protein, 12 aa, Homo sapiens
  ( 278 )...( 289 ): >PO32_HUMAN
KQRRIKLGFTQA

SEQ ID NO: 21930 - protein, 12 aa, Homo sapiens
  ( 344 )...( 355 ): >PO32_HUMAN
SIDKIAAQGRKR

SEQ ID NO: 21931 - protein, 12 aa, Homo sapiens
  ( 345 )...( 356 ): >PO32_HUMAN
IDKIAAQGRKRK

SEQ ID NO: 21932 - protein, 12 aa, Homo sapiens
  ( 346 )...( 357 ): >PO32_HUMAN
DKIAAQGRKRKK

SEQ ID NO: 21933 - protein, 12 aa, Homo sapiens
  ( 352 )...( 363 ): >PO32_HUMAN
GRKRKKRTSIEV

SEQ ID NO: 21934 - protein, 12 aa, Homo sapiens
  ( 354 )...( 365 ): >PO32_HUMAN
KRKKRTSIEVSV

SEQ ID NO: 21935 - protein, 12 aa, Homo sapiens
  ( 355 )...( 366 ): >PO32_HUMAN
RKKRTSIEVSVK

SEQ ID NO: 21936 - protein, 12 aa, Homo sapiens
  ( 406 )...( 417 ): >PO32_HUMAN
RQKEKRMTPPGG

SEQ ID NO: 21937 - protein, 12 aa, Homo sapiens
  ( 330 )...( 341 ): >PO33_HUMAN
KQRRIKLGFTQA

SEQ ID NO: 21938 - protein, 12 aa, Homo sapiens
  ( 396 )...( 407 ): >PO33_HUMAN
SIDKIAAQGRKR

SEQ ID NO: 21939 - protein, 12 aa, Homo sapiens
  ( 397 )...( 408 ): >PO33_HUMAN
IDKIAAQGRKRK

SEQ ID NO: 21940 - protein, 12 aa, Homo sapiens
  ( 398 )...( 409 ): >PO33_HUMAN
DKIAAQGRKRKK

SEQ ID NO: 21941 - protein, 12 aa, Homo sapiens
  ( 404 )...( 415 ): >PO33_HUMAN
GRKRKKRTSIEV

SEQ ID NO: 21942 - protein, 12 aa, Homo sapiens
  ( 406 )...( 417 ): >PO33_HUMAN
KRKKRTSIEVSV

SEQ ID NO: 21943 - protein, 12 aa, Homo sapiens
  ( 407 )...( 418 ): >PO33_HUMAN
RKKRTSIEVSVK

SEQ ID NO: 21944 - protein, 12 aa, Homo sapiens
  ( 458 )...( 469 ): >PO33_HUMAN
RQKEKRMTPPGI

SEQ ID NO: 21945 - protein, 12 aa, Homo sapiens
  ( 202 )...( 213 ): >PO34_HUMAN
KQRRIKLGFTQA

SEQ ID NO: 21946 - protein, 12 aa, Homo sapiens
  ( 268 )...( 279 ): >PO34_HUMAN
SIDKIAAQGRKR

SEQ ID NO: 21947 - protein, 12 aa, Homo sapiens
  ( 269 )...( 280 ): >PO34_HUMAN
IDKIAAQGRKRK

SEQ ID NO: 21948 - protein, 12 aa, Homo sapiens
  ( 270 )...( 281 ): >PO34_HUMAN
DKIAAQGRKRKK

SEQ ID NO: 21949 - protein, 12 aa, Homo sapiens
  ( 276 )...( 287 ): >PO34_HUMAN
GRKRKKRTSIEV

SEQ ID NO: 21950 - protein, 12 aa, Homo sapiens
  ( 278 )...( 289 ): >PO34_HUMAN
KRKKRTSIEVSV

SEQ ID NO: 21951 - protein, 12 aa, Homo sapiens
  ( 279 )...( 290 ): >PO34_HUMAN
RKKRTSIEVSVK

SEQ ID NO: 21952 - protein, 12 aa, Homo sapiens
  ( 279 )...( 290 ): >PO41_HUMAN
FKQRRIKLGVTQ

SEQ ID NO: 21953 - protein, 12 aa, Homo sapiens
  ( 280 )...( 291 ): >PO41_HUMAN
KQRRIKLGVTQA

SEQ ID NO: 21954 - protein, 12 aa, Homo sapiens
  ( 353 )...( 364 ): >PO41_HUMAN
LFNGGEKKRKRT

SEQ ID NO: 21955 - protein, 12 aa, Homo sapiens
  ( 356 )...( 367 ): >PO41_HUMAN
GGEKKRKRTSIA

SEQ ID NO: 21956 - protein, 12 aa, Homo sapiens
  ( 357 )...( 368 ): >PO41_HUMAN
GEKKRKRTSIAA

SEQ ID NO: 21957 - protein, 12 aa, Homo sapiens
  ( 358 )...( 369 ): >PO41_HUMAN
EKKRKRTSIAAP

SEQ ID NO: 21958 - protein, 12 aa, Homo sapiens
  ( 359 )...( 370 ): >PO41_HUMAN
KKRKRTSIAAPE

SEQ ID NO: 21959 - protein, 12 aa, Homo sapiens
  ( 360 )...( 371 ): >PO41_HUMAN
KRKRTSIAAPEK

SEQ ID NO: 21960 - protein, 12 aa, Homo sapiens
  ( 362 )...( 373 ): >PO41_HUMAN
KRTSIAAPEKRS

SEQ ID NO: 21961 - protein, 12 aa, Homo sapiens
  ( 266 )...( 277 ): >PO42_HUMAN
FKQRRIKLGVTQ

SEQ ID NO: 21962 - protein, 12 aa, Homo sapiens
  ( 267 )...( 278 ): >PO42_HUMAN
KQRRIKLGVTQA

SEQ ID NO: 21963 - protein, 12 aa, Homo sapiens
  ( 342 )...( 353 ): >PO42_HUMAN
NGAEKKRKRTSI

SEQ ID NO: 21964 - protein, 12 aa, Homo sapiens
  ( 343 )...( 354 ): >PO42_HUMAN
GAEKKRKRTSIA

SEQ ID NO: 21965 - protein, 12 aa, Homo sapiens
  ( 344 )...( 355 ): >PO42_HUMAN
AEKKRKRTSIAA

SEQ ID NO: 21966 - protein, 12 aa, Homo sapiens
  ( 345 )...( 356 ): >PO42_HUMAN
EKKRKRTSIAAP

SEQ ID NO: 21967 - protein, 12 aa, Homo sapiens
  ( 346 )...( 357 ): >PO42_HUMAN
KKRKRTSIAAPE

SEQ ID NO: 21968 - protein, 12 aa, Homo sapiens
  ( 347 )...( 358 ): >PO42_HUMAN
KRKRTSIAAPEK

SEQ ID NO: 21969 - protein, 12 aa, Homo sapiens
  ( 349 )...( 360 ): >PO42_HUMAN
KRTSIAAPEKRS

SEQ ID NO: 21970 - protein, 12 aa, Homo sapiens
  ( 399 )...( 410 ): >PO42_HUMAN
QKQKRMKYSAGI

SEQ ID NO: 21971 - protein, 11 aa, Homo sapiens
  ( 400 )...( 411 ): >PO42_HUMAN
KQKRMKYSAGI

SEQ ID NO: 21972 - protein, 10 aa, Homo sapiens
  ( 401 )...( 412 ): >PO42_HUMAN
QKRMKYSAGI

SEQ ID NO: 21973 - protein, 12 aa, Homo sapiens
  ( 194 )...( 205 ): >PO43_HUMAN
FKQRRIKLGVTQ

SEQ ID NO: 21974 - protein, 12 aa, Homo sapiens
  ( 195 )...( 206 ): >PO43_HUMAN
KQRRIKLGVTQA

SEQ ID NO: 21975 - protein, 12 aa, Homo sapiens
  ( 271 )...( 282 ): >PO43_HUMAN
GSERKRKRTSIA

SEQ ID NO: 21976 - protein, 12 aa, Homo sapiens
  ( 272 )...( 283 ): >PO43_HUMAN
SERKRKRTSIAA

SEQ ID NO: 21977 - protein, 12 aa, Homo sapiens
  ( 275 )...( 286 ): >PO43_HUMAN
KRKRTSIAAPEK

SEQ ID NO: 21978 - protein, 12 aa, Homo sapiens
  ( 277 )...( 288 ): >PO43_HUMAN
KRTSIAAPEKRS

SEQ ID NO: 21979 - protein, 12 aa, Homo sapiens
  ( 148 )...( 159 ): >PO51_HUMAN
QFAKLLKQKRIT

SEQ ID NO: 21980 - protein, 12 aa, Homo sapiens
  ( 149 )...( 160 ): >PO51_HUMAN
FAKLLKQKRITL

SEQ ID NO: 21981 - protein, 12 aa, Homo sapiens
  ( 150 )...( 161 ): >PO51_HUMAN
AKLLKQKRITLG

SEQ ID NO: 21982 - protein, 12 aa, Homo sapiens
  ( 151 )...( 162 ): >PO51_HUMAN
KLLKQKRITLGY

SEQ ID NO: 21983 - protein, 12 aa, Homo sapiens
  ( 152 )...( 163 ): >PO51_HUMAN
LLKQKRITLGYT

SEQ ID NO: 21984 - protein, 12 aa, Homo sapiens
  ( 153 )...( 164 ): >PO51_HUMAN
LKQKRITLGYTQ

SEQ ID NO: 21985 - protein, 12 aa, Homo sapiens
  ( 154 )...( 165 ): >PO51_HUMAN
KQKRITLGYTQA

SEQ ID NO: 21986 - protein, 12 aa, Homo sapiens
  ( 221 )...( 232 ): >PO51_HUMAN
CKAETLVQARKR

SEQ ID NO: 21987 - protein, 12 aa, Homo sapiens
  ( 222 )...( 233 ): >PO51_HUMAN
KAETLVQARKRK

SEQ ID NO: 21988 - protein, 12 aa, Homo sapiens
  ( 223 )...( 234 ): >PO51_HUMAN
AETLVQARKRKR

SEQ ID NO: 21989 - protein, 12 aa, Homo sapiens
  ( 224 )...( 235 ): >PO51_HUMAN
ETLVQARKRKRT

SEQ ID NO: 21990 - protein, 12 aa, Homo sapiens
  ( 225 )...( 236 ): >PO51_HUMAN
TLVQARKRKRTS

SEQ ID NO: 21991 - protein, 12 aa, Homo sapiens
  ( 148 )...( 159 ): >PO5L_HUMAN
QFAKLLKQKRIT

SEQ ID NO: 21992 - protein, 12 aa, Homo sapiens
  ( 149 )...( 160 ): >PO5L_HUMAN
FAKLLKQKRITL

SEQ ID NO: 21993 - protein, 12 aa, Homo sapiens
  ( 150 )...( 161 ): >PO5L_HUMAN
AKLLKQKRITLG

SEQ ID NO: 21994 - protein, 12 aa, Homo sapiens
  ( 151 )...( 162 ): >PO5L_HUMAN
KLLKQKRITLGY

SEQ ID NO: 21995 - protein, 12 aa, Homo sapiens
  ( 152 )...( 163 ): >PO5L_HUMAN
LLKQKRITLGYT

SEQ ID NO: 21996 - protein, 12 aa, Homo sapiens
  ( 153 )...( 164 ): >PO5L_HUMAN
LKQKRITLGYTQ

SEQ ID NO: 21997 - protein, 12 aa, Homo sapiens
  ( 154 )...( 165 ): >PO5L_HUMAN
KQKRITLGYTQA

SEQ ID NO: 21998 - protein, 12 aa, Homo sapiens
  ( 175 )...( 186 ): >PO5L_HUMAN
FGKVFSQKTICR

SEQ ID NO: 21999 - protein, 12 aa, Homo sapiens
  ( 176 )...( 187 ): >PO5L_HUMAN
GKVFSQKTICRF

SEQ ID NO: 22000 - protein, 12 aa, Homo sapiens
  ( 190 )...( 201 ): >PO5L_HUMAN
LQLSFKNICKLR

SEQ ID NO: 22001 - protein, 12 aa, Homo sapiens
  ( 221 )...( 232 ): >PO5L_HUMAN
CKAETLMQARKR

SEQ ID NO: 22002 - protein, 12 aa, Homo sapiens
  ( 148 )...( 159 ): >PO5M_HUMAN
QFAKLLKQKRIT

SEQ ID NO: 22003 - protein, 12 aa, Homo sapiens
  ( 149 )...( 160 ): >PO5M_HUMAN
FAKLLKQKRITL

SEQ ID NO: 22004 - protein, 12 aa, Homo sapiens
  ( 150 )...( 161 ): >PO5M_HUMAN
AKLLKQKRITLG

SEQ ID NO: 22005 - protein, 12 aa, Homo sapiens
  ( 151 )...( 162 ): >PO5M_HUMAN
KLLKQKRITLGY

SEQ ID NO: 22006 - protein, 12 aa, Homo sapiens
  ( 152 )...( 163 ): >PO5M_HUMAN
LLKQKRITLGYT

SEQ ID NO: 22007 - protein, 12 aa, Homo sapiens
  ( 153 )...( 164 ): >PO5M_HUMAN
LKQKRITLGYTQ

SEQ ID NO: 22008 - protein, 12 aa, Homo sapiens
  ( 154 )...( 165 ): >PO5M_HUMAN
KQKRITLGYTQA

SEQ ID NO: 22009 - protein, 12 aa, Homo sapiens
  ( 221 )...( 232 ): >PO5M_HUMAN
CKAETLMQARKR

SEQ ID NO: 22010 - protein, 12 aa, Homo sapiens
  ( 141 )...( 152 ): >PO5N_HUMAN
QFAKLLKQKRIT

SEQ ID NO: 22011 - protein, 12 aa, Homo sapiens
  ( 142 )...( 153 ): >PO5N_HUMAN
FAKLLKQKRITL

SEQ ID NO: 22012 - protein, 12 aa, Homo sapiens
  ( 143 )...( 154 ): >PO5N_HUMAN
AKLLKQKRITLG

SEQ ID NO: 22013 - protein, 12 aa, Homo sapiens
  ( 144 )...( 155 ): >PO5N_HUMAN
KLLKQKRITLGY

SEQ ID NO: 22014 - protein, 12 aa, Homo sapiens
  ( 145 )...( 156 ): >PO5N_HUMAN
LLKQKRITLGYT

SEQ ID NO: 22015 - protein, 12 aa, Homo sapiens
  ( 146 )...( 157 ): >PO5N_HUMAN
LKQKRITLGYTQ

SEQ ID NO: 22016 - protein, 12 aa, Homo sapiens
  ( 147 )...( 158 ): >PO5N_HUMAN
KQKRITLGYTQA

SEQ ID NO: 22017 - protein, 12 aa, Homo sapiens
  ( 214 )...( 225 ): >PO5N_HUMAN
CKAETLLQARKR

SEQ ID NO: 22018 - protein, 12 aa, Homo sapiens
  ( 215 )...( 226 ): >PO5N_HUMAN
KAETLLQARKRK

SEQ ID NO: 22019 - protein, 12 aa, Homo sapiens
  ( 218 )...( 229 ): >PO5N_HUMAN
TLLQARKRKRTS

SEQ ID NO: 22020 - protein, 12 aa, Homo sapiens
  ( 151 )...( 162 ): >PO61_HUMAN
AKNFKIRRLSLG

SEQ ID NO: 22021 - protein, 12 aa, Homo sapiens
  ( 152 )...( 163 ): >PO61_HUMAN
KNFKIRRLSLGL

SEQ ID NO: 22022 - protein, 12 aa, Homo sapiens
  ( 153 )...( 164 ): >PO61_HUMAN
NFKIRRLSLGLT

SEQ ID NO: 22023 - protein, 12 aa, Homo sapiens
  ( 154 )...( 165 ): >PO61_HUMAN
FKIRRLSLGLTQ

SEQ ID NO: 22024 - protein, 12 aa, Homo sapiens
  ( 155 )...( 166 ): >PO61_HUMAN
KIRRLSLGLTQT

SEQ ID NO: 22025 - protein, 12 aa, Homo sapiens
  ( 226 )...( 237 ): >PO61_HUMAN
FVGGEPSKKRKR

SEQ ID NO: 22026 - protein, 12 aa, Homo sapiens
  ( 286 )...( 297 ): >PO61_HUMAN
RQTLKNTSKLNV

SEQ ID NO: 22027 - protein, 12 aa, Homo sapiens
  ( 404 )...( 415 ): >PRD4_HUMAN
SRARLSLPKQLV

SEQ ID NO: 22028 - protein, 12 aa, Homo sapiens
  ( 405 )...( 416 ): >PRD4_HUMAN
RARLSLPKQLVL

SEQ ID NO: 22029 - protein, 12 aa, Homo sapiens
  ( 406 )...( 417 ): >PRD4_HUMAN
ARLSLPKQLVLR

SEQ ID NO: 22030 - protein, 12 aa, Homo sapiens
  ( 407 )...( 418 ): >PRD4_HUMAN
RLSLPKQLVLRQ

SEQ ID NO: 22031 - protein, 12 aa, Homo sapiens
  ( 637 )...( 648 ): >PRD4_HUMAN
LKIHTGQKNYRC

SEQ ID NO: 22032 - protein, 12 aa, Homo sapiens
  ( 20 )...( 31 ): >PRD5_HUMAN
GMGLYTARRVRK

SEQ ID NO: 22033 - protein, 12 aa, Homo sapiens
  ( 21 )...( 32 ): >PRD5_HUMAN
MGLYTARRVRKG

SEQ ID NO: 22034 - protein, 12 aa, Homo sapiens
  ( 22 )...( 33 ): >PRD5_HUMAN
GLYTARRVRKGE

SEQ ID NO: 22035 - protein, 12 aa, Homo sapiens
  ( 23 )...( 34 ): >PRD5_HUMAN
LYTARRVRKGEK

SEQ ID NO: 22036 - protein, 12 aa, Homo sapiens
  ( 25 )...( 36 ): >PRD5_HUMAN
TARRVRKGEKFG

SEQ ID NO: 22037 - protein, 12 aa, Homo sapiens
  ( 26 )...( 37 ): >PRD5_HUMAN
ARRVRKGEKFGP

SEQ ID NO: 22038 - protein, 12 aa, Homo sapiens
  ( 28 )...( 39 ): >PRD5_HUMAN
RVRKGEKFGPFA

SEQ ID NO: 22039 - protein, 12 aa, Homo sapiens
  ( 151 )...( 162 ): >PRD5_HUMAN
RQSTAGRKDRLG

SEQ ID NO: 22040 - protein, 12 aa, Homo sapiens
  ( 205 )...( 216 ): >PRD5_HUMAN
GKKFPVKQALQR

SEQ ID NO: 22041 - protein, 12 aa, Homo sapiens
  ( 269 )...( 280 ): >PRD5_HUMAN
CGKRLKSKDALK

SEQ ID NO: 22042 - protein, 12 aa, Homo sapiens
  ( 270 )...( 281 ): >PRD5_HUMAN
GKRLKSKDALKR

SEQ ID NO: 22043 - protein, 12 aa, Homo sapiens
  ( 292 )...( 303 ): >PRD5_HUMAN
KKKLICSVCNKK

SEQ ID NO: 22044 - protein, 12 aa, Homo sapiens
  ( 580 )...( 591 ): >PRD5_HUMAN
LAFSLKKMLIRH

SEQ ID NO: 22045 - protein, 12 aa, Homo sapiens
  ( 583 )...( 594 ): >PRD5_HUMAN
SLKKMLIRHKMT

SEQ ID NO: 22046 - protein, 12 aa, Homo sapiens
  ( 58 )...( 69 ): >PRD6_HUMAN
GAQVRPHSRALR

SEQ ID NO: 22047 - protein, 12 aa, Homo sapiens
  ( 59 )...( 70 ): >PRD6_HUMAN
AQVRPHSRALRG

SEQ ID NO: 22048 - protein, 12 aa, Homo sapiens
  ( 60 )...( 71 ): >PRD6_HUMAN
QVRPHSRALRGP

SEQ ID NO: 22049 - protein, 12 aa, Homo sapiens
  ( 99 )...( 110 ): >PRD6_HUMAN
VAHAGRTLSRTR

SEQ ID NO: 22050 - protein, 12 aa, Homo sapiens
  ( 100 )...( 111 ): >PRD6_HUMAN
AHAGRTLSRTRT

SEQ ID NO: 22051 - protein, 12 aa, Homo sapiens
  ( 101 )...( 112 ): >PRD6_HUMAN
HAGRTLSRTRTL

SEQ ID NO: 22052 - protein, 12 aa, Homo sapiens
  ( 102 )...( 113 ): >PRD6_HUMAN
AGRTLSRTRTLT

SEQ ID NO: 22053 - protein, 12 aa, Homo sapiens
  ( 133 )...( 144 ): >PRD7_HUMAN
IFYRTCRVIRPG

SEQ ID NO: 22054 - protein, 12 aa, Homo sapiens
  ( 158 )...( 169 ): >PRD7_HUMAN
ELGIKWGSKWKK

SEQ ID NO: 22055 - protein, 12 aa, Homo sapiens
  ( 159 )...( 170 ): >PRD7_HUMAN
LGIKWGSKWKKE

SEQ ID NO: 22056 - protein, 12 aa, Homo sapiens
  ( 160 )...( 171 ): >PRD7_HUMAN
GIKWGSKWKKEL

SEQ ID NO: 22057 - protein, 12 aa, Homo sapiens
  ( 164 )...( 175 ): >PRD7_HUMAN
GSKWKKELMAGR

SEQ ID NO: 22058 - protein, 12 aa, Homo sapiens
  ( 381 )...( 392 ): >PRD7_HUMAN
RGFSRKSVLLIH

SEQ ID NO: 22059 - protein, 12 aa, Homo sapiens
  ( 384 )...( 395 ): >PRD7_HUMAN
SRKSVLLIHQRT

SEQ ID NO: 22060 - protein, 12 aa, Homo sapiens
  ( 394 )...( 405 ): >PRD7_HUMAN
RTHRGEAPVCRK

SEQ ID NO: 22061 - protein, 12 aa, Homo sapiens
  ( 87 )...( 98 ): >PRD9_HUMAN
WLVRRACHFTKG

SEQ ID NO: 22062 - protein, 12 aa, Homo sapiens
  ( 88 )...( 99 ): >PRD9_HUMAN
LVRRACHFTKGR

SEQ ID NO: 22063 - protein, 12 aa, Homo sapiens
  ( 139 )...( 150 ): >PRD9_HUMAN
IFYRTCRVIRPG

SEQ ID NO: 22064 - protein, 12 aa, Homo sapiens
  ( 164 )...( 175 ): >PRD9_HUMAN
ELGIKWGSKWKK

SEQ ID NO: 22065 - protein, 12 aa, Homo sapiens
  ( 165 )...( 176 ): >PRD9_HUMAN
LGIKWGSKWKKE

SEQ ID NO: 22066 - protein, 12 aa, Homo sapiens
  ( 276 )...( 287 ): >PRD9_HUMAN
KGQMGSCRVGKR

SEQ ID NO: 22067 - protein, 12 aa, Homo sapiens
  ( 277 )...( 288 ): >PRD9_HUMAN
GQMGSCRVGKRI

SEQ ID NO: 22068 - protein, 12 aa, Homo sapiens
  ( 278 )...( 289 ): >PRD9_HUMAN
QMGSCRVGKRIM

SEQ ID NO: 22069 - protein, 12 aa, Homo sapiens
  ( 521 )...( 532 ): >PRD9_HUMAN
GRGFSNKSHLLR

SEQ ID NO: 22070 - protein, 12 aa, Homo sapiens
  ( 605 )...( 616 ): >PRD9_HUMAN
GRGFSNKSHLLR

SEQ ID NO: 22071 - protein, 12 aa, Homo sapiens
  ( 108 )...( 119 ): >PRDA_HUMAN
PIPNRPVLTRAR

SEQ ID NO: 22072 - protein, 12 aa, Homo sapiens
  ( 109 )...( 120 ): >PRDA_HUMAN
IPNRPVLTRARA

SEQ ID NO: 22073 - protein, 12 aa, Homo sapiens
  ( 110 )...( 121 ): >PRDA_HUMAN
PNRPVLTRARAS

SEQ ID NO: 22074 - protein, 12 aa, Homo sapiens
  ( 111 )...( 122 ): >PRDA_HUMAN
NRPVLTRARASL

SEQ ID NO: 22075 - protein, 12 aa, Homo sapiens
  ( 112 )...( 123 ): >PRDA_HUMAN
RPVLTRARASLP

SEQ ID NO: 22076 - protein, 12 aa, Homo sapiens
  ( 130 )...( 141 ): >PRDA_HUMAN
RFLGGVFSKRRI

SEQ ID NO: 22077 - protein, 12 aa, Homo sapiens
  ( 131 )...( 142 ): >PRDA_HUMAN
FLGGVFSKRRIP

SEQ ID NO: 22078 - protein, 12 aa, Homo sapiens
  ( 132 )...( 143 ): >PRDA_HUMAN
LGGVFSKRRIPK

SEQ ID NO: 22079 - protein, 12 aa, Homo sapiens
  ( 294 )...( 305 ): >PRDA_HUMAN
KLDVFSRTRGRG

SEQ ID NO: 22080 - protein, 12 aa, Homo sapiens
  ( 295 )...( 306 ): >PRDA_HUMAN
LDVFSRTRGRGR

SEQ ID NO: 22081 - protein, 12 aa, Homo sapiens
  ( 296 )...( 307 ): >PRDA_HUMAN
DVFSRTRGRGRG

SEQ ID NO: 22082 - protein, 12 aa, Homo sapiens
  ( 615 )...( 626 ): >PRDA_HUMAN
AKKADRISRSKT

SEQ ID NO: 22083 - protein, 12 aa, Homo sapiens
  ( 621 )...( 632 ): >PRDA_HUMAN
ISRSKTFKPRIT

SEQ ID NO: 22084 - protein, 12 aa, Homo sapiens
  ( 622 )...( 633 ): >PRDA_HUMAN
SRSKTFKPRITS

SEQ ID NO: 22085 - protein, 12 aa, Homo sapiens
  ( 623 )...( 634 ): >PRDA_HUMAN
RSKTFKPRITST

SEQ ID NO: 22086 - protein, 12 aa, Homo sapiens
  ( 646 )...( 657 ): >PRDA_HUMAN
CMMGFRRRGMLV

SEQ ID NO: 22087 - protein, 12 aa, Homo sapiens
  ( 647 )...( 658 ): >PRDA_HUMAN
MMGFRRRGMLVN

SEQ ID NO: 22088 - protein, 12 aa, Homo sapiens
  ( 649 )...( 660 ): >PRDA_HUMAN
GFRRRGMLVNHL

SEQ ID NO: 22089 - protein, 12 aa, Homo sapiens
  ( 694 )...( 705 ): >PRDA_HUMAN
VYKSASKRKAHI

SEQ ID NO: 22090 - protein, 12 aa, Homo sapiens
  ( 695 )...( 706 ): >PRDA_HUMAN
YKSASKRKAHIL

SEQ ID NO: 22091 - protein, 12 aa, Homo sapiens
  ( 696 )...( 707 ): >PRDA_HUMAN
KSASKRKAHILK

SEQ ID NO: 22092 - protein, 12 aa, Homo sapiens
  ( 697 )...( 708 ): >PRDA_HUMAN
SASKRKAHILKN

SEQ ID NO: 22093 - protein, 12 aa, Homo sapiens
  ( 758 )...( 769 ): >PRDA_HUMAN
SSKTKMVQHIRK

SEQ ID NO: 22094 - protein, 12 aa, Homo sapiens
  ( 311 )...( 322 ): >PRDC_HUMAN
LAGLRAHQKSAR

SEQ ID NO: 22095 - protein, 12 aa, Homo sapiens
  ( 312 )...( 323 ): >PRDC_HUMAN
AGLRAHQKSARH

SEQ ID NO: 22096 - protein, 12 aa, Homo sapiens
  ( 40 )...( 51 ): >PRDD_HUMAN
RREPGPKKKVLT

SEQ ID NO: 22097 - protein, 12 aa, Homo sapiens
  ( 41 )...( 52 ): >PRDD_HUMAN
REPGPKKKVLTI

SEQ ID NO: 22098 - protein, 12 aa, Homo sapiens
  ( 251 )...( 262 ): >PRDD_HUMAN
TPGKWGQPKKGK

SEQ ID NO: 22099 - protein, 12 aa, Homo sapiens
  ( 253 )...( 264 ): >PRDD_HUMAN
GKWGQPKKGKEQ

SEQ ID NO: 22100 - protein, 12 aa, Homo sapiens
  ( 254 )...( 265 ): >PRDD_HUMAN
KWGQPKKGKEQL

SEQ ID NO: 22101 - protein, 12 aa, Homo sapiens
  ( 588 )...( 599 ): >PRDD_HUMAN
CGKLYSRKYGLK

SEQ ID NO: 22102 - protein, 12 aa, Homo sapiens
  ( 589 )...( 600 ): >PRDD_HUMAN
GKLYSRKYGLKI

SEQ ID NO: 22103 - protein, 12 aa, Homo sapiens
  ( 603 )...( 614 ): >PRDD_HUMAN
RTHTGYKPLKCK

SEQ ID NO: 22104 - protein, 12 aa, Homo sapiens
  ( 641 )...( 652 ): >PRDD_HUMAN
RCEFCGKVLVRR

SEQ ID NO: 22105 - protein, 12 aa, Homo sapiens
  ( 642 )...( 653 ): >PRDD_HUMAN
CEFCGKVLVRRR

SEQ ID NO: 22106 - protein, 12 aa, Homo sapiens
  ( 644 )...( 655 ): >PRDD_HUMAN
FCGKVLVRRRDL

SEQ ID NO: 22107 - protein, 12 aa, Homo sapiens
  ( 276 )...( 287 ): >PRDE_HUMAN
KGVRFGPFQGKV

SEQ ID NO: 22108 - protein, 12 aa, Homo sapiens
  ( 494 )...( 505 ): >PRDE_HUMAN
CTKRFTASSILR

SEQ ID NO: 22109 - protein, 12 aa, Homo sapiens
  ( 495 )...( 506 ): >PRDE_HUMAN
TKRFTASSILRT

SEQ ID NO: 22110 - protein, 12 aa, Homo sapiens
  ( 66 )...( 77 ): >PRDF_HUMAN
WISRSRSGIALR

SEQ ID NO: 22111 - protein, 12 aa, Homo sapiens
  ( 67 )...( 78 ): >PRDF_HUMAN
ISRSRSGIALRA

SEQ ID NO: 22112 - protein, 12 aa, Homo sapiens
  ( 69 )...( 80 ): >PRDF_HUMAN
RSRSGIALRAAR

SEQ ID NO: 22113 - protein, 12 aa, Homo sapiens
  ( 70 )...( 81 ): >PRDF_HUMAN
SRSGIALRAARP

SEQ ID NO: 22114 - protein, 12 aa, Homo sapiens
  ( 71 )...( 82 ): >PRDF_HUMAN
RSGIALRAARPP

SEQ ID NO: 22115 - protein, 12 aa, Homo sapiens
  ( 108 )...( 119 ): >PRDF_HUMAN
VVIPRPRVQPMR

SEQ ID NO: 22116 - protein, 12 aa, Homo sapiens
  ( 109 )...( 120 ): >PRDF_HUMAN
VIPRPRVQPMRV

SEQ ID NO: 22117 - protein, 12 aa, Homo sapiens
  ( 110 )...( 121 ): >PRDF_HUMAN
IPRPRVQPMRVA

SEQ ID NO: 22118 - protein, 12 aa, Homo sapiens
  ( 113 )...( 124 ): >PRDF_HUMAN
PRVQPMRVARGG

SEQ ID NO: 22119 - protein, 12 aa, Homo sapiens
  ( 114 )...( 125 ): >PRDF_HUMAN
RVQPMRVARGGP

SEQ ID NO: 22120 - protein, 12 aa, Homo sapiens
  ( 383 )...( 394 ): >PRDF_HUMAN
VRRLSGQQLPCR

SEQ ID NO: 22121 - protein, 12 aa, Homo sapiens
  ( 384 )...( 395 ): >PRDF_HUMAN
RRLSGQQLPCRS

SEQ ID NO: 22122 - protein, 12 aa, Homo sapiens
  ( 529 )...( 540 ): >PRDF_HUMAN
AKKMDKPMLKQA

SEQ ID NO: 22123 - protein, 12 aa, Homo sapiens
  ( 530 )...( 541 ): >PRDF_HUMAN
KKMDKPMLKQAG

SEQ ID NO: 22124 - protein, 12 aa, Homo sapiens
  ( 634 )...( 645 ): >PRDF_HUMAN
RGRKPKVSKAEQ

SEQ ID NO: 22125 - protein, 12 aa, Homo sapiens
  ( 635 )...( 646 ): >PRDF_HUMAN
GRKPKVSKAEQP

SEQ ID NO: 22126 - protein, 12 aa, Homo sapiens
  ( 636 )...( 647 ): >PRDF_HUMAN
RKPKVSKAEQPL

SEQ ID NO: 22127 - protein, 12 aa, Homo sapiens
  ( 709 )...( 720 ): >PRDF_HUMAN
ITLKRSLILSSR

SEQ ID NO: 22128 - protein, 12 aa, Homo sapiens
  ( 711 )...( 722 ): >PRDF_HUMAN
LKRSLILSSRHG

SEQ ID NO: 22129 - protein, 12 aa, Homo sapiens
  ( 712 )...( 723 ): >PRDF_HUMAN
KRSLILSSRHGI

SEQ ID NO: 22130 - protein, 12 aa, Homo sapiens
  ( 713 )...( 724 ): >PRDF_HUMAN
RSLILSSRHGIR

SEQ ID NO: 22131 - protein, 12 aa, Homo sapiens
  ( 714 )...( 725 ): >PRDF_HUMAN
SLILSSRHGIRR

SEQ ID NO: 22132 - protein, 12 aa, Homo sapiens
  ( 715 )...( 726 ): >PRDF_HUMAN
LILSSRHGIRRK

SEQ ID NO: 22133 - protein, 12 aa, Homo sapiens
  ( 716 )...( 727 ): >PRDF_HUMAN
ILSSRHGIRRKL

SEQ ID NO: 22134 - protein, 12 aa, Homo sapiens
  ( 717 )...( 728 ): >PRDF_HUMAN
LSSRHGIRRKLI

SEQ ID NO: 22135 - protein, 12 aa, Homo sapiens
  ( 721 )...( 732 ): >PRDF_HUMAN
HGIRRKLIKQLG

SEQ ID NO: 22136 - protein, 12 aa, Homo sapiens
  ( 722 )...( 733 ): >PRDF_HUMAN
GIRRKLIKQLGE

SEQ ID NO: 22137 - protein, 12 aa, Homo sapiens
  ( 723 )...( 734 ): >PRDF_HUMAN
IRRKLIKQLGEH

SEQ ID NO: 22138 - protein, 12 aa, Homo sapiens
  ( 726 )...( 737 ): >PRDF_HUMAN
KLIKQLGEHKRV

SEQ ID NO: 22139 - protein, 12 aa, Homo sapiens
  ( 994 )...( 1005 ): >PRDF_HUMAN
CKRCQLTFGRGK

SEQ ID NO: 22140 - protein, 12 aa, Homo sapiens
  ( 995 )...( 1006 ): >PRDF_HUMAN
KRCQLTFGRGKE

SEQ ID NO: 22141 - protein, 12 aa, Homo sapiens
  ( 1117 )...( 1128 ): >PRDF_HUMAN
CGKGMKTKHALR

SEQ ID NO: 22142 - protein, 12 aa, Homo sapiens
  ( 1118 )...( 1129 ): >PRDF_HUMAN
GKGMKTKHALRH

SEQ ID NO: 22143 - protein, 12 aa, Homo sapiens
  ( 1155 )...( 1166 ): >PRDF_HUMAN
MLKHCKRHTGIK

SEQ ID NO: 22144 - protein, 12 aa, Homo sapiens
  ( 1231 )...( 1242 ): >PRDF_HUMAN
GTKVSTRASMSR

SEQ ID NO: 22145 - protein, 12 aa, Homo sapiens
  ( 1234 )...( 1245 ): >PRDF_HUMAN
VSTRASMSRHMR

SEQ ID NO: 22146 - protein, 12 aa, Homo sapiens
  ( 1287 )...( 1298 ): >PRDF_HUMAN
LAEGKHGKAAKR

SEQ ID NO: 22147 - protein, 12 aa, Homo sapiens
  ( 3 )...( 14 ): >PRDG_HUMAN
SKARARKLAKSD

SEQ ID NO: 22148 - protein, 12 aa, Homo sapiens
  ( 4 )...( 15 ): >PRDG_HUMAN
KARARKLAKSDG

SEQ ID NO: 22149 - protein, 12 aa, Homo sapiens
  ( 92 )...( 103 ): >PRDG_HUMAN
PGAGLGVWAKRK

SEQ ID NO: 22150 - protein, 12 aa, Homo sapiens
  ( 93 )...( 104 ): >PRDG_HUMAN
GAGLGVWAKRKM

SEQ ID NO: 22151 - protein, 12 aa, Homo sapiens
  ( 245 )...( 256 ): >PRDG_HUMAN
LRRHKKYTCGSV

SEQ ID NO: 22152 - protein, 12 aa, Homo sapiens
  ( 246 )...( 257 ): >PRDG_HUMAN
RRHKKYTCGSVG

SEQ ID NO: 22153 - protein, 12 aa, Homo sapiens
  ( 354 )...( 365 ): >PRDG_HUMAN
RHIRSQHVGARA

SEQ ID NO: 22154 - protein, 12 aa, Homo sapiens
  ( 865 )...( 876 ): >PRDG_HUMAN
PIYSRVEKRKVT

SEQ ID NO: 22155 - protein, 12 aa, Homo sapiens
  ( 872 )...( 883 ): >PRDG_HUMAN
KRKVTDPVGALK

SEQ ID NO: 22156 - protein, 12 aa, Homo sapiens
  ( 942 )...( 953 ): >PRDG_HUMAN
PILRKGKERYTC

SEQ ID NO: 22157 - protein, 12 aa, Homo sapiens
  ( 957 )...( 968 ): >PRDG_HUMAN
GKIFPRSANLTR

SEQ ID NO: 22158 - protein, 12 aa, Homo sapiens
  ( 1220 )...( 1231 ): >PRDG_HUMAN
ALKHTLCRQAKN

SEQ ID NO: 22159 - protein, 12 aa, Homo sapiens
  ( 1222 )...( 1233 ): >PRDG_HUMAN
KHTLCRQAKNQA

SEQ ID NO: 22160 - protein, 12 aa, Homo sapiens
  ( 11 )...( 22 ): >PRDH_HUMAN
GKKALQLAREPR

SEQ ID NO: 22161 - protein, 12 aa, Homo sapiens
  ( 12 )...( 23 ): >PRDH_HUMAN
KKALQLAREPRL

SEQ ID NO: 22162 - protein, 12 aa, Homo sapiens
  ( 297 )...( 308 ): >PRDH_HUMAN
RGTQPHGYLAKK

SEQ ID NO: 22163 - protein, 12 aa, Homo sapiens
  ( 343 )...( 354 ): >PRDH_HUMAN
AGSSPKQGRRYR

SEQ ID NO: 22164 - protein, 12 aa, Homo sapiens
  ( 396 )...( 407 ): >PRDH_HUMAN
FKAHMLGHRGVR

SEQ ID NO: 22165 - protein, 12 aa, Homo sapiens
  ( 397 )...( 408 ): >PRDH_HUMAN
KAHMLGHRGVRP

SEQ ID NO: 22166 - protein, 12 aa, Homo sapiens
  ( 443 )...( 454 ): >PRDH_HUMAN
GKAFARRPSLRL

SEQ ID NO: 22167 - protein, 12 aa, Homo sapiens
  ( 453 )...( 464 ): >PRDH_HUMAN
RLHRKTHQVPAA

SEQ ID NO: 22168 - protein, 12 aa, Homo sapiens
  ( 508 )...( 519 ): >PRDH_HUMAN
RGNLRGHLRLHT

SEQ ID NO: 22169 - protein, 12 aa, Homo sapiens
  ( 584 )...( 595 ): >PRDH_HUMAN
CGRAYTLATKLR

SEQ ID NO: 22170 - protein, 12 aa, Homo sapiens
  ( 585 )...( 596 ): >PRDH_HUMAN
GRAYTLATKLRR

SEQ ID NO: 22171 - protein, 12 aa, Homo sapiens
  ( 587 )...( 598 ): >PRDH_HUMAN
AYTLATKLRRHL

SEQ ID NO: 22172 - protein, 12 aa, Homo sapiens
  ( 589 )...( 600 ): >PRDH_HUMAN
TLATKLRRHLKS

SEQ ID NO: 22173 - protein, 12 aa, Homo sapiens
  ( 35 )...( 46 ): >RBPL_HUMAN
RRSLPGTWTRSS

SEQ ID NO: 22174 - protein, 12 aa, Homo sapiens
  ( 49 )...( 60 ): >RBPL_HUMAN
HTTILRGGVRRC

SEQ ID NO: 22175 - protein, 12 aa, Homo sapiens
  ( 51 )...( 62 ): >RBPL_HUMAN
TILRGGVRRCLQ

SEQ ID NO: 22176 - protein, 12 aa, Homo sapiens
  ( 52 )...( 63 ): >RBPL_HUMAN
ILRGGVRRCLQQ

SEQ ID NO: 22177 - protein, 12 aa, Homo sapiens
  ( 53 )...( 64 ): >RBPL_HUMAN
LRGGVRRCLQQQ

SEQ ID NO: 22178 - protein, 12 aa, Homo sapiens
  ( 54 )...( 65 ): >RBPL_HUMAN
RGGVRRCLQQQC

SEQ ID NO: 22179 - protein, 12 aa, Homo sapiens
  ( 68 )...( 79 ): >RBPL_HUMAN
TVRILHAKVAQK

SEQ ID NO: 22180 - protein, 12 aa, Homo sapiens
  ( 69 )...( 80 ): >RBPL_HUMAN
VRILHAKVAQKS

SEQ ID NO: 22181 - protein, 12 aa, Homo sapiens
  ( 70 )...( 81 ): >RBPL_HUMAN
RILHAKVAQKSY

SEQ ID NO: 22182 - protein, 12 aa, Homo sapiens
  ( 75 )...( 86 ): >RBPL_HUMAN
KVAQKSYGNEKR

SEQ ID NO: 22183 - protein, 12 aa, Homo sapiens
  ( 166 )...( 177 ): >RBPL_HUMAN
HFRLVLRLVLRG

SEQ ID NO: 22184 - protein, 12 aa, Homo sapiens
  ( 167 )...( 178 ): >RBPL_HUMAN
FRLVLRLVLRGG

SEQ ID NO: 22185 - protein, 12 aa, Homo sapiens
  ( 186 )...( 197 ): >RBPL_HUMAN
SRLIKVISKPSQ

SEQ ID NO: 22186 - protein, 12 aa, Homo sapiens
  ( 187 )...( 198 ): >RBPL_HUMAN
RLIKVISKPSQK

SEQ ID NO: 22187 - protein, 12 aa, Homo sapiens
  ( 188 )...( 199 ): >RBPL_HUMAN
LIKVISKPSQKK

SEQ ID NO: 22188 - protein, 12 aa, Homo sapiens
  ( 189 )...( 200 ): >RBPL_HUMAN
IKVISKPSQKKQ

SEQ ID NO: 22189 - protein, 12 aa, Homo sapiens
  ( 190 )...( 201 ): >RBPL_HUMAN
KVISKPSQKKQS

SEQ ID NO: 22190 - protein, 12 aa, Homo sapiens
  ( 192 )...( 203 ): >RBPL_HUMAN
ISKPSQKKQSLK

SEQ ID NO: 22191 - protein, 12 aa, Homo sapiens
  ( 211 )...( 222 ): >RBPL_HUMAN
SGSKVSLFNRLR

SEQ ID NO: 22192 - protein, 12 aa, Homo sapiens
  ( 212 )...( 223 ): >RBPL_HUMAN
GSKVSLFNRLRS

SEQ ID NO: 22193 - protein, 12 aa, Homo sapiens
  ( 220 )...( 231 ): >RBPL_HUMAN
RLRSQTVSTRYL

SEQ ID NO: 22194 - protein, 12 aa, Homo sapiens
  ( 285 )...( 296 ): >RBPL_HUMAN
TLPPMIIRKVAK

SEQ ID NO: 22195 - protein, 12 aa, Homo sapiens
  ( 286 )...( 297 ): >RBPL_HUMAN
LPPMIIRKVAKQ

SEQ ID NO: 22196 - protein, 12 aa, Homo sapiens
  ( 288 )...( 299 ): >RBPL_HUMAN
PMIIRKVAKQCA

SEQ ID NO: 22197 - protein, 12 aa, Homo sapiens
  ( 289 )...( 300 ): >RBPL_HUMAN
MIIRKVAKQCAL

SEQ ID NO: 22198 - protein, 12 aa, Homo sapiens
  ( 290 )...( 301 ): >RBPL_HUMAN
IIRKVAKQCALL

SEQ ID NO: 22199 - protein, 12 aa, Homo sapiens
  ( 143 )...( 154 ): >RB_HUMAN
KVDNAMSRLLKK

SEQ ID NO: 22200 - protein, 12 aa, Homo sapiens
  ( 244 )...( 255 ): >RB_HUMAN
IPINGSPRTPRR

SEQ ID NO: 22201 - protein, 12 aa, Homo sapiens
  ( 246 )...( 257 ): >RB_HUMAN
INGSPRTPRRGQ

SEQ ID NO: 22202 - protein, 12 aa, Homo sapiens
  ( 255 )...( 266 ): >RB_HUMAN
RGQNRSARIAKQ

SEQ ID NO: 22203 - protein, 12 aa, Homo sapiens
  ( 256 )...( 267 ): >RB_HUMAN
GQNRSARIAKQL

SEQ ID NO: 22204 - protein, 12 aa, Homo sapiens
  ( 409 )...( 420 ): >RB_HUMAN
VNPKESILKRVK

SEQ ID NO: 22205 - protein, 12 aa, Homo sapiens
  ( 416 )...( 427 ): >RB_HUMAN
LKRVKDIGYIFK

SEQ ID NO: 22206 - protein, 12 aa, Homo sapiens
  ( 441 )...( 452 ): >RB_HUMAN
IGSQRYKLGVRL

SEQ ID NO: 22207 - protein, 12 aa, Homo sapiens
  ( 442 )...( 453 ): >RB_HUMAN
GSQRYKLGVRLY

SEQ ID NO: 22208 - protein, 12 aa, Homo sapiens
  ( 606 )...( 617 ): >RB_HUMAN
YLSPVRSPKKKG

SEQ ID NO: 22209 - protein, 12 aa, Homo sapiens
  ( 609 )...( 620 ): >RB_HUMAN
PVRSPKKKGSTT

SEQ ID NO: 22210 - protein, 12 aa, Homo sapiens
  ( 610 )...( 621 ): >RB_HUMAN
VRSPKKKGSTTR

SEQ ID NO: 22211 - protein, 12 aa, Homo sapiens
  ( 611 )...( 622 ): >RB_HUMAN
RSPKKKGSTTRV

SEQ ID NO: 22212 - protein, 12 aa, Homo sapiens
  ( 612 )...( 623 ): >RB_HUMAN
SPKKKGSTTRVN

SEQ ID NO: 22213 - protein, 12 aa, Homo sapiens
  ( 613 )...( 624 ): >RB_HUMAN
PKKKGSTTRVNS

SEQ ID NO: 22214 - protein, 12 aa, Homo sapiens
  ( 614 )...( 625 ): >RB_HUMAN
KKKGSTTRVNST

SEQ ID NO: 22215 - protein, 12 aa, Homo sapiens
  ( 711 )...( 722 ): >RB_HUMAN
ICKVKNIDLKFK

SEQ ID NO: 22216 - protein, 12 aa, Homo sapiens
  ( 712 )...( 723 ): >RB_HUMAN
CKVKNIDLKFKI

SEQ ID NO: 22217 - protein, 12 aa, Homo sapiens
  ( 713 )...( 724 ): >RB_HUMAN
KVKNIDLKFKII

SEQ ID NO: 22218 - protein, 12 aa, Homo sapiens
  ( 819 )...( 830 ): >RB_HUMAN
LPTPTKMTPRSR

SEQ ID NO: 22219 - protein, 12 aa, Homo sapiens
  ( 820 )...( 831 ): >RB_HUMAN
PTPTKMTPRSRI

SEQ ID NO: 22220 - protein, 12 aa, Homo sapiens
  ( 821 )...( 832 ): >RB_HUMAN
TPTKMTPRSRIL

SEQ ID NO: 22221 - protein, 12 aa, Homo sapiens
  ( 822 )...( 833 ): >RB_HUMAN
PTKMTPRSRILV

SEQ ID NO: 22222 - protein, 12 aa, Homo sapiens
  ( 823 )...( 834 ): >RB_HUMAN
TKMTPRSRILVS

SEQ ID NO: 22223 - protein, 12 aa, Homo sapiens
  ( 824 )...( 835 ): >RB_HUMAN
KMTPRSRILVSI

SEQ ID NO: 22224 - protein, 12 aa, Homo sapiens
  ( 904 )...( 915 ): >RB_HUMAN
MTSTRTRMQKQK

SEQ ID NO: 22225 - protein, 12 aa, Homo sapiens
  ( 905 )...( 916 ): >RB_HUMAN
TSTRTRMQKQKM

SEQ ID NO: 22226 - protein, 12 aa, Homo sapiens
  ( 166 )...( 177 ): >REQN_HUMAN
KNRAKGKAYGIG

SEQ ID NO: 22227 - protein, 12 aa, Homo sapiens
  ( 171 )...( 182 ): >REQN_HUMAN
GKAYGIGGLRKR

SEQ ID NO: 22228 - protein, 12 aa, Homo sapiens
  ( 172 )...( 183 ): >REQN_HUMAN
KAYGIGGLRKRQ

SEQ ID NO: 22229 - protein, 12 aa, Homo sapiens
  ( 59 )...( 70 ): >REQU_HUMAN
KRHRGPGLASGQ

SEQ ID NO: 22230 - protein, 12 aa, Homo sapiens
  ( 147 )...( 158 ): >REQU_HUMAN
PVTNSRARKRIL

SEQ ID NO: 22231 - protein, 12 aa, Homo sapiens
  ( 148 )...( 159 ): >REQU_HUMAN
VTNSRARKRILE

SEQ ID NO: 22232 - protein, 12 aa, Homo sapiens
  ( 213 )...( 224 ): >REQU_HUMAN
ICGKRYKNRPGL

SEQ ID NO: 22233 - protein, 12 aa, Homo sapiens
  ( 481 )...( 492 ): >RFX1_HUMAN
GKLIRSVFMGLR

SEQ ID NO: 22234 - protein, 12 aa, Homo sapiens
  ( 482 )...( 493 ): >RFX1_HUMAN
KLIRSVFMGLRT

SEQ ID NO: 22235 - protein, 12 aa, Homo sapiens
  ( 483 )...( 494 ): >RFX1_HUMAN
LIRSVFMGLRTR

SEQ ID NO: 22236 - protein, 12 aa, Homo sapiens
  ( 484 )...( 495 ): >RFX1_HUMAN
IRSVFMGLRTRR

SEQ ID NO: 22237 - protein, 12 aa, Homo sapiens
  ( 485 )...( 496 ): >RFX1_HUMAN
RSVFMGLRTRRL

SEQ ID NO: 22238 - protein, 12 aa, Homo sapiens
  ( 486 )...( 497 ): >RFX1_HUMAN
SVFMGLRTRRLG

SEQ ID NO: 22239 - protein, 12 aa, Homo sapiens
  ( 487 )...( 498 ): >RFX1_HUMAN
VFMGLRTRRLGT

SEQ ID NO: 22240 - protein, 12 aa, Homo sapiens
  ( 488 )...( 499 ): >RFX1_HUMAN
FMGLRTRRLGTR

SEQ ID NO: 22241 - protein, 12 aa, Homo sapiens
  ( 489 )...( 500 ): >RFX1_HUMAN
MGLRTRRLGTRG

SEQ ID NO: 22242 - protein, 12 aa, Homo sapiens
  ( 490 )...( 501 ): >RFX1_HUMAN
GLRTRRLGTRGN

SEQ ID NO: 22243 - protein, 12 aa, Homo sapiens
  ( 491 )...( 502 ): >RFX1_HUMAN
LRTRRLGTRGNS

SEQ ID NO: 22244 - protein, 12 aa, Homo sapiens
  ( 493 )...( 504 ): >RFX1_HUMAN
TRRLGTRGNSKY

SEQ ID NO: 22245 - protein, 12 aa, Homo sapiens
  ( 508 )...( 519 ): >RFX1_HUMAN
GLRIKASSPLLR

SEQ ID NO: 22246 - protein, 12 aa, Homo sapiens
  ( 509 )...( 520 ): >RFX1_HUMAN
LRIKASSPLLRL

SEQ ID NO: 22247 - protein, 12 aa, Homo sapiens
  ( 510 )...( 521 ): >RFX1_HUMAN
RIKASSPLLRLM

SEQ ID NO: 22248 - protein, 12 aa, Homo sapiens
  ( 537 )...( 548 ): >RFX1_HUMAN
KQRLKPIQKMEG

SEQ ID NO: 22249 - protein, 12 aa, Homo sapiens
  ( 217 )...( 228 ): >RLF_HUMAN
MRIKHLLKSNCI

SEQ ID NO: 22250 - protein, 12 aa, Homo sapiens
  ( 218 )...( 229 ): >RLF_HUMAN
RIKHLLKSNCIP

SEQ ID NO: 22251 - protein, 12 aa, Homo sapiens
  ( 339 )...( 350 ): >RLF_HUMAN
RCRQFGVIAKTQ

SEQ ID NO: 22252 - protein, 12 aa, Homo sapiens
  ( 583 )...( 594 ): >RLF_HUMAN
TCPVCIKKFKRK

SEQ ID NO: 22253 - protein, 12 aa, Homo sapiens
  ( 613 )...( 624 ): >RLF_HUMAN
DRSKKKLLLKGS

SEQ ID NO: 22254 - protein, 12 aa, Homo sapiens
  ( 614 )...( 625 ): >RLF_HUMAN
RSKKKLLLKGSQ

SEQ ID NO: 22255 - protein, 12 aa, Homo sapiens
  ( 615 )...( 626 ): >RLF_HUMAN
SKKKLLLKGSQK

SEQ ID NO: 22256 - protein, 12 aa, Homo sapiens
  ( 616 )...( 627 ): >RLF_HUMAN
KKKLLLKGSQKG

SEQ ID NO: 22257 - protein, 12 aa, Homo sapiens
  ( 617 )...( 628 ): >RLF_HUMAN
KKLLLKGSQKGI

SEQ ID NO: 22258 - protein, 12 aa, Homo sapiens
  ( 962 )...( 973 ): >RLF_HUMAN
GSTYKNARGMQK

SEQ ID NO: 22259 - protein, 12 aa, Homo sapiens
  ( 1063 )...( 1074 ): >RLF_HUMAN
LLLRLKHLSLKN

SEQ ID NO: 22260 - protein, 12 aa, Homo sapiens
  ( 1286 )...( 1297 ): >RLF_HUMAN
EGRGSRRTVAKG

SEQ ID NO: 22261 - protein, 12 aa, Homo sapiens
  ( 1287 )...( 1298 ): >RLF_HUMAN
GRGSRRTVAKGN

SEQ ID NO: 22262 - protein, 12 aa, Homo sapiens
  ( 1288 )...( 1299 ): >RLF_HUMAN
RGSRRTVAKGNL

SEQ ID NO: 22263 - protein, 12 aa, Homo sapiens
  ( 1291 )...( 1302 ): >RLF_HUMAN
RRTVAKGNLCYI

SEQ ID NO: 22264 - protein, 12 aa, Homo sapiens
  ( 1322 )...( 1333 ): >RLF_HUMAN
TNLKGLIRHYRT

SEQ ID NO: 22265 - protein, 12 aa, Homo sapiens
  ( 1323 )...( 1334 ): >RLF_HUMAN
NLKGLIRHYRTV

SEQ ID NO: 22266 - protein, 12 aa, Homo sapiens
  ( 1324 )...( 1335 ): >RLF_HUMAN
LKGLIRHYRTVH

SEQ ID NO: 22267 - protein, 12 aa, Homo sapiens
  ( 1347 )...( 1358 ): >RLF_HUMAN
DKARTKRELVKC

SEQ ID NO: 22268 - protein, 12 aa, Homo sapiens
  ( 1348 )...( 1359 ): >RLF_HUMAN
KARTKRELVKCK

SEQ ID NO: 22269 - protein, 12 aa, Homo sapiens
  ( 1349 )...( 1360 ): >RLF_HUMAN
ARTKRELVKCKK

SEQ ID NO: 22270 - protein, 12 aa, Homo sapiens
  ( 1350 )...( 1361 ): >RLF_HUMAN
RTKRELVKCKKI

SEQ ID NO: 22271 - protein, 12 aa, Homo sapiens
  ( 1351 )...( 1362 ): >RLF_HUMAN
TKRELVKCKKIF

SEQ ID NO: 22272 - protein, 12 aa, Homo sapiens
  ( 1352 )...( 1363 ): >RLF_HUMAN
KRELVKCKKIFA

SEQ ID NO: 22273 - protein, 12 aa, Homo sapiens
  ( 1353 )...( 1364 ): >RLF_HUMAN
RELVKCKKIFAC

SEQ ID NO: 22274 - protein, 12 aa, Homo sapiens
  ( 1513 )...( 1524 ): >RLF_HUMAN
AKSKKCGLIKEK

SEQ ID NO: 22275 - protein, 12 aa, Homo sapiens
  ( 1514 )...( 1525 ): >RLF_HUMAN
KSKKCGLIKEKK

SEQ ID NO: 22276 - protein, 12 aa, Homo sapiens
  ( 1515 )...( 1526 ): >RLF_HUMAN
SKKCGLIKEKKA

SEQ ID NO: 22277 - protein, 12 aa, Homo sapiens
  ( 1516 )...( 1527 ): >RLF_HUMAN
KKCGLIKEKKAP

SEQ ID NO: 22278 - protein, 12 aa, Homo sapiens
  ( 1517 )...( 1528 ): >RLF_HUMAN
KCGLIKEKKAPI

SEQ ID NO: 22279 - protein, 12 aa, Homo sapiens
  ( 1523 )...( 1534 ): >RLF_HUMAN
EKKAPISFKTRA

SEQ ID NO: 22280 - protein, 12 aa, Homo sapiens
  ( 1524 )...( 1535 ): >RLF_HUMAN
KKAPISFKTRAE

SEQ ID NO: 22281 - protein, 12 aa, Homo sapiens
  ( 202 )...( 213 ): >RN12_HUMAN
VPPTRGQRRARS

SEQ ID NO: 22282 - protein, 12 aa, Homo sapiens
  ( 338 )...( 349 ): >RN12_HUMAN
SIASRTRSRSQT

SEQ ID NO: 22283 - protein, 12 aa, Homo sapiens
  ( 339 )...( 350 ): >RN12_HUMAN
IASRTRSRSQTP

SEQ ID NO: 22284 - protein, 12 aa, Homo sapiens
  ( 340 )...( 351 ): >RN12_HUMAN
ASRTRSRSQTPN

SEQ ID NO: 22285 - protein, 12 aa, Homo sapiens
  ( 364 )...( 375 ): >RN12_HUMAN
RRTFSRSERAGV

SEQ ID NO: 22286 - protein, 12 aa, Homo sapiens
  ( 365 )...( 376 ): >RN12_HUMAN
RTFSRSERAGVR

SEQ ID NO: 22287 - protein, 12 aa, Homo sapiens
  ( 372 )...( 383 ): >RN12_HUMAN
RAGVRTYVSTIR

SEQ ID NO: 22288 - protein, 12 aa, Homo sapiens
  ( 376 )...( 387 ): >RN12_HUMAN
RTYVSTIRIPIR

SEQ ID NO: 22289 - protein, 12 aa, Homo sapiens
  ( 377 )...( 388 ): >RN12_HUMAN
TYVSTIRIPIRR

SEQ ID NO: 22290 - protein, 12 aa, Homo sapiens
  ( 378 )...( 389 ): >RN12_HUMAN
YVSTIRIPIRRI

SEQ ID NO: 22291 - protein, 12 aa, Homo sapiens
  ( 379 )...( 390 ): >RN12_HUMAN
VSTIRIPIRRIL

SEQ ID NO: 22292 - protein, 12 aa, Homo sapiens
  ( 380 )...( 391 ): >RN12_HUMAN
STIRIPIRRILN

SEQ ID NO: 22293 - protein, 12 aa, Homo sapiens
  ( 381 )...( 392 ): >RN12_HUMAN
TIRIPIRRILNT

SEQ ID NO: 22294 - protein, 12 aa, Homo sapiens
  ( 382 )...( 393 ): >RN12_HUMAN
IRIPIRRILNTG

SEQ ID NO: 22295 - protein, 12 aa, Homo sapiens
  ( 383 )...( 394 ): >RN12_HUMAN
RIPIRRILNTGL

SEQ ID NO: 22296 - protein, 12 aa, Homo sapiens
  ( 507 )...( 518 ): >RN12_HUMAN
GARREGRHRAPV

SEQ ID NO: 22297 - protein, 12 aa, Homo sapiens
  ( 508 )...( 519 ): >RN12_HUMAN
ARREGRHRAPVT

SEQ ID NO: 22298 - protein, 12 aa, Homo sapiens
  ( 609 )...( 620 ): >RN12_HUMAN
ICRRAVLASGNR

SEQ ID NO: 22299 - protein, 12 aa, Homo sapiens
  ( 51 )...( 62 ): >RN19_HUMAN
VSLPSVKKAPKK

SEQ ID NO: 22300 - protein, 12 aa, Homo sapiens
  ( 52 )...( 63 ): >RN19_HUMAN
SLPSVKKAPKKR

SEQ ID NO: 22301 - protein, 12 aa, Homo sapiens
  ( 58 )...( 69 ): >RN19_HUMAN
KAPKKRRISIGS

SEQ ID NO: 22302 - protein, 12 aa, Homo sapiens
  ( 59 )...( 70 ): >RN19_HUMAN
APKKRRISIGSL

SEQ ID NO: 22303 - protein, 12 aa, Homo sapiens
  ( 60 )...( 71 ): >RN19_HUMAN
PKKRRISIGSLF

SEQ ID NO: 22304 - protein, 12 aa, Homo sapiens
  ( 65 )...( 76 ): >RN19_HUMAN
ISIGSLFRRKKD

SEQ ID NO: 22305 - protein, 12 aa, Homo sapiens
  ( 77 )...( 88 ): >RN19_HUMAN
NKRKSRELNGGV

SEQ ID NO: 22306 - protein, 12 aa, Homo sapiens
  ( 271 )...( 282 ): >RN19_HUMAN
RAQSLRLRTIRS

SEQ ID NO: 22307 - protein, 12 aa, Homo sapiens
  ( 272 )...( 283 ): >RN19_HUMAN
AQSLRLRTIRSS

SEQ ID NO: 22308 - protein, 12 aa, Homo sapiens
  ( 273 )...( 284 ): >RN19_HUMAN
QSLRLRTIRSSS

SEQ ID NO: 22309 - protein, 12 aa, Homo sapiens
  ( 274 )...( 285 ): >RN19_HUMAN
SLRLRTIRSSSI

SEQ ID NO: 22310 - protein, 12 aa, Homo sapiens
  ( 275 )...( 286 ): >RN19_HUMAN
LRLRTIRSSSIS

SEQ ID NO: 22311 - protein, 12 aa, Homo sapiens
  ( 276 )...( 287 ): >RN19_HUMAN
RLRTIRSSSISY

SEQ ID NO: 22312 - protein, 12 aa, Homo sapiens
  ( 356 )...( 367 ): >RN19_HUMAN
SRKKKILWQLGT

SEQ ID NO: 22313 - protein, 12 aa, Homo sapiens
  ( 357 )...( 368 ): >RN19_HUMAN
RKKKILWQLGTL

SEQ ID NO: 22314 - protein, 12 aa, Homo sapiens
  ( 358 )...( 369 ): >RN19_HUMAN
KKKILWQLGTLV

SEQ ID NO: 22315 - protein, 12 aa, Homo sapiens
  ( 390 )...( 401 ): >RN19_HUMAN
IPVYVGRKIHNR

SEQ ID NO: 22316 - protein, 12 aa, Homo sapiens
  ( 407 )...( 418 ): >RN19_HUMAN
VSKHKRNLAIAG

SEQ ID NO: 22317 - protein, 12 aa, Homo sapiens
  ( 408 )...( 419 ): >RN19_HUMAN
SKHKRNLAIAGG

SEQ ID NO: 22318 - protein, 12 aa, Homo sapiens
  ( 409 )...( 420 ): >RN19_HUMAN
KHKRNLAIAGGV

SEQ ID NO: 22319 - protein, 12 aa, Homo sapiens
  ( 668 )...( 679 ): >RN19_HUMAN
TAGKKSKSGKLR

SEQ ID NO: 22320 - protein, 12 aa, Homo sapiens
  ( 669 )...( 680 ): >RN19_HUMAN
AGKKSKSGKLRK

SEQ ID NO: 22321 - protein, 12 aa, Homo sapiens
  ( 672 )...( 683 ): >RN19_HUMAN
KSKSGKLRKKGN

SEQ ID NO: 22322 - protein, 12 aa, Homo sapiens
  ( 673 )...( 684 ): >RN19_HUMAN
SKSGKLRKKGNM

SEQ ID NO: 22323 - protein, 12 aa, Homo sapiens
  ( 675 )...( 686 ): >RN19_HUMAN
SGKLRKKGNMKI

SEQ ID NO: 22324 - protein, 12 aa, Homo sapiens
  ( 676 )...( 687 ): >RN19_HUMAN
GKLRKKGNMKIN

SEQ ID NO: 22325 - protein, 12 aa, Homo sapiens
  ( 678 )...( 689 ): >RN19_HUMAN
LRKKGNMKINET

SEQ ID NO: 22326 - protein, 12 aa, Homo sapiens
  ( 481 )...( 492 ): >RPF1_HUMAN
AKAFKIRRLSLG

SEQ ID NO: 22327 - protein, 12 aa, Homo sapiens
  ( 482 )...( 493 ): >RPF1_HUMAN
KAFKIRRLSLGL

SEQ ID NO: 22328 - protein, 12 aa, Homo sapiens
  ( 483 )...( 494 ): >RPF1_HUMAN
AFKIRRLSLGLT

SEQ ID NO: 22329 - protein, 12 aa, Homo sapiens
  ( 484 )...( 495 ): >RPF1_HUMAN
FKIRRLSLGLTQ

SEQ ID NO: 22330 - protein, 12 aa, Homo sapiens
  ( 485 )...( 496 ): >RPF1_HUMAN
KIRRLSLGLTQT

SEQ ID NO: 22331 - protein, 12 aa, Homo sapiens
  ( 562 )...( 573 ): >RPF1_HUMAN
KSAQKIKPVLER

SEQ ID NO: 22332 - protein, 12 aa, Homo sapiens
  ( 649 )...( 660 ): >RPF1_HUMAN
CNKRQALKNTIK

SEQ ID NO: 22333 - protein, 12 aa, Homo sapiens
  ( 653 )...( 664 ): >RPF1_HUMAN
QALKNTIKRLKQ

SEQ ID NO: 22334 - protein, 12 aa, Homo sapiens
  ( 106 )...( 117 ): >RRE1_HUMAN
SGTALLRPLRPK

SEQ ID NO: 22335 - protein, 12 aa, Homo sapiens
  ( 107 )...( 118 ): >RRE1_HUMAN
GTALLRPLRPKP

SEQ ID NO: 22336 - protein, 12 aa, Homo sapiens
  ( 108 )...( 119 ): >RRE1_HUMAN
TALLRPLRPKPP

SEQ ID NO: 22337 - protein, 12 aa, Homo sapiens
  ( 211 )...( 222 ): >RRE1_HUMAN
TEQGPARTSKKR

SEQ ID NO: 22338 - protein, 12 aa, Homo sapiens
  ( 212 )...( 223 ): >RRE1_HUMAN
EQGPARTSKKRG

SEQ ID NO: 22339 - protein, 12 aa, Homo sapiens
  ( 226 )...( 237 ): >RRE1_HUMAN
RGMRSRPRANSG

SEQ ID NO: 22340 - protein, 12 aa, Homo sapiens
  ( 467 )...( 478 ): >RRE1_HUMAN
GKSFKFLGTLSR

SEQ ID NO: 22341 - protein, 12 aa, Homo sapiens
  ( 471 )...( 482 ): >RRE1_HUMAN
KFLGTLSRHRKA

SEQ ID NO: 22342 - protein, 12 aa, Homo sapiens
  ( 474 )...( 485 ): >RRE1_HUMAN
GTLSRHRKAHGR

SEQ ID NO: 22343 - protein, 12 aa, Homo sapiens
  ( 568 )...( 579 ): >RRE1_HUMAN
PKSVASKADKRK

SEQ ID NO: 22344 - protein, 12 aa, Homo sapiens
  ( 569 )...( 580 ): >RRE1_HUMAN
KSVASKADKRKK

SEQ ID NO: 22345 - protein, 12 aa, Homo sapiens
  ( 570 )...( 581 ): >RRE1_HUMAN
SVASKADKRKKV

SEQ ID NO: 22346 - protein, 12 aa, Homo sapiens
  ( 571 )...( 582 ): >RRE1_HUMAN
VASKADKRKKVC

SEQ ID NO: 22347 - protein, 12 aa, Homo sapiens
  ( 573 )...( 584 ): >RRE1_HUMAN
SKADKRKKVCSV

SEQ ID NO: 22348 - protein, 12 aa, Homo sapiens
  ( 676 )...( 687 ): >RRE1_HUMAN
ASNHMAVTRSRK

SEQ ID NO: 22349 - protein, 12 aa, Homo sapiens
  ( 684 )...( 695 ): >RRE1_HUMAN
RSRKEGLASATK

SEQ ID NO: 22350 - protein, 12 aa, Homo sapiens
  ( 733 )...( 744 ): >RRE1_HUMAN
RSKRPAHPILAT

SEQ ID NO: 22351 - protein, 12 aa, Homo sapiens
  ( 184 )...( 195 ): >RUN2_HUMAN
DLRFVGRSGRGK

SEQ ID NO: 22352 - protein, 12 aa, Homo sapiens
  ( 185 )...( 196 ): >RUN2_HUMAN
LRFVGRSGRGKS

SEQ ID NO: 22353 - protein, 12 aa, Homo sapiens
  ( 186 )...( 197 ): >RUN2_HUMAN
RFVGRSGRGKSF

SEQ ID NO: 22354 - protein, 12 aa, Homo sapiens
  ( 187 )...( 198 ): >RUN2_HUMAN
FVGRSGRGKSFT

SEQ ID NO: 22355 - protein, 12 aa, Homo sapiens
  ( 188 )...( 199 ): >RUN2_HUMAN
VGRSGRGKSFTL

SEQ ID NO: 22356 - protein, 12 aa, Homo sapiens
  ( 189 )...( 200 ): >RUN2_HUMAN
GRSGRGKSFTLT

SEQ ID NO: 22357 - protein, 12 aa, Homo sapiens
  ( 190 )...( 201 ): >RUN2_HUMAN
RSGRGKSFTLTI

SEQ ID NO: 22358 - protein, 12 aa, Homo sapiens
  ( 407 )...( 418 ): >SAL2_HUMAN
GNRFTTRGNLKV

SEQ ID NO: 22359 - protein, 12 aa, Homo sapiens
  ( 637 )...( 648 ): >SAL2_HUMAN
LRVLSCPRALRL

SEQ ID NO: 22360 - protein, 12 aa, Homo sapiens
  ( 638 )...( 649 ): >SAL2_HUMAN
RVLSCPRALRLH

SEQ ID NO: 22361 - protein, 12 aa, Homo sapiens
  ( 665 )...( 676 ): >SAL2_HUMAN
GRAFSTRGNLRA

SEQ ID NO: 22362 - protein, 12 aa, Homo sapiens
  ( 666 )...( 677 ): >SAL2_HUMAN
RAFSTRGNLRAH

SEQ ID NO: 22363 - protein, 12 aa, Homo sapiens
  ( 671 )...( 682 ): >SAL2_HUMAN
RGNLRAHFVGHK

SEQ ID NO: 22364 - protein, 12 aa, Homo sapiens
  ( 946 )...( 957 ): >SAL2_HUMAN
RQGFLERATLKK

SEQ ID NO: 22365 - protein, 12 aa, Homo sapiens
  ( 389 )...( 400 ): >SAL3_HUMAN
PLSALMKHRKGK

SEQ ID NO: 22366 - protein, 12 aa, Homo sapiens
  ( 390 )...( 401 ): >SAL3_HUMAN
LSALMKHRKGKP

SEQ ID NO: 22367 - protein, 12 aa, Homo sapiens
  ( 395 )...( 406 ): >SAL3_HUMAN
KHRKGKPPNVSV

SEQ ID NO: 22368 - protein, 12 aa, Homo sapiens
  ( 454 )...( 465 ): >SAL3_HUMAN
GNRFSTKGNLKV

SEQ ID NO: 22369 - protein, 12 aa, Homo sapiens
  ( 713 )...( 724 ): >SAL3_HUMAN
GRAFTTKGNLKT

SEQ ID NO: 22370 - protein, 12 aa, Homo sapiens
  ( 726 )...( 737 ): >SAL3_HUMAN
FGVHRAKPPLRV

SEQ ID NO: 22371 - protein, 12 aa, Homo sapiens
  ( 727 )...( 738 ): >SAL3_HUMAN
GVHRAKPPLRVQ

SEQ ID NO: 22372 - protein, 12 aa, Homo sapiens
  ( 1147 )...( 1158 ): >SAL3_HUMAN
GRAFTTKGNLKV

SEQ ID NO: 22373 - protein, 12 aa, Homo sapiens
  ( 1168 )...( 1179 ): >SAL3_HUMAN
APARRGRRLSVE

SEQ ID NO: 22374 - protein, 12 aa, Homo sapiens
  ( 185 )...( 196 ): >SAL4_HUMAN
ALRGTKVAVNQR

SEQ ID NO: 22375 - protein, 12 aa, Homo sapiens
  ( 186 )...( 197 ): >SAL4_HUMAN
LRGTKVAVNQRS

SEQ ID NO: 22376 - protein, 12 aa, Homo sapiens
  ( 187 )...( 198 ): >SAL4_HUMAN
RGTKVAVNQRSA

SEQ ID NO: 22377 - protein, 12 aa, Homo sapiens
  ( 600 )...( 611 ): >SAL4_HUMAN
GRAFSTKGNLKT

SEQ ID NO: 22378 - protein, 12 aa, Homo sapiens
  ( 857 )...( 868 ): >SAL4_HUMAN
PLLAAQPRRQAK

SEQ ID NO: 22379 - protein, 12 aa, Homo sapiens
  ( 858 )...( 869 ): >SAL4_HUMAN
LLAAQPRRQAKQ

SEQ ID NO: 22380 - protein, 12 aa, Homo sapiens
  ( 860 )...( 871 ): >SAL4_HUMAN
AAQPRRQAKQHG

SEQ ID NO: 22381 - protein, 12 aa, Homo sapiens
  ( 862 )...( 873 ): >SAL4_HUMAN
QPRRQAKQHGCT

SEQ ID NO: 22382 - protein, 12 aa, Homo sapiens
  ( 904 )...( 915 ): >SAL4_HUMAN
GRAFTTKGNLKV

SEQ ID NO: 22383 - protein, 12 aa, Homo sapiens
  ( 924 )...( 935 ): >SAL4_HUMAN
NNSARRGRKLAI

SEQ ID NO: 22384 - protein, 12 aa, Homo sapiens
  ( 925 )...( 936 ): >SAL4_HUMAN
NSARRGRKLAIE

SEQ ID NO: 22385 - protein, 12 aa, Homo sapiens
  ( 926 )...( 937 ): >SAL4_HUMAN
SARRGRKLAIEN

SEQ ID NO: 22386 - protein, 12 aa, Homo sapiens
  ( 927 )...( 938 ): >SAL4_HUMAN
ARRGRKLAIENT

SEQ ID NO: 22387 - protein, 12 aa, Homo sapiens
  ( 928 )...( 939 ): >SAL4_HUMAN
RRGRKLAIENTM

SEQ ID NO: 22388 - protein, 12 aa, Homo sapiens
  ( 42 )...( 53 ): >SIM1_HUMAN
IIRLTTSYLKMR

SEQ ID NO: 22389 - protein, 12 aa, Homo sapiens
  ( 43 )...( 54 ): >SIM1_HUMAN
IRLTTSYLKMRV

SEQ ID NO: 22390 - protein, 12 aa, Homo sapiens
  ( 44 )...( 55 ): >SIM1_HUMAN
RLTTSYLKMRVV

SEQ ID NO: 22391 - protein, 12 aa, Homo sapiens
  ( 162 )...( 173 ): >SIM1_HUMAN
LRMKCVLAKRNA

SEQ ID NO: 22392 - protein, 12 aa, Homo sapiens
  ( 163 )...( 174 ): >SIM1_HUMAN
RMKCVLAKRNAG

SEQ ID NO: 22393 - protein, 12 aa, Homo sapiens
  ( 165 )...( 176 ): >SIM1_HUMAN
KCVLAKRNAGLT

SEQ ID NO: 22394 - protein, 12 aa, Homo sapiens
  ( 181 )...( 192 ): >SIM1_HUMAN
KVIHCSGYLKIR

SEQ ID NO: 22395 - protein, 12 aa, Homo sapiens
  ( 285 )...( 296 ): >SIM1_HUMAN
LVKGQVTTKYYR

SEQ ID NO: 22396 - protein, 12 aa, Homo sapiens
  ( 286 )...( 297 ): >SIM1_HUMAN
VKGQVTTKYYRF

SEQ ID NO: 22397 - protein, 12 aa, Homo sapiens
  ( 292 )...( 303 ): >SIM1_HUMAN
TKYYRFLAKHGG

SEQ ID NO: 22398 - protein, 12 aa, Homo sapiens
  ( 363 )...( 374 ): >SIM1_HUMAN
TMTDNRKGAKSR

SEQ ID NO: 22399 - protein, 12 aa, Homo sapiens
  ( 364 )...( 375 ): >SIM1_HUMAN
MTDNRKGAKSRL

SEQ ID NO: 22400 - protein, 12 aa, Homo sapiens
  ( 365 )...( 376 ): >SIM1_HUMAN
TDNRKGAKSRLS

SEQ ID NO: 22401 - protein, 12 aa, Homo sapiens
  ( 367 )...( 378 ): >SIM1_HUMAN
NRKGAKSRLSSS

SEQ ID NO: 22402 - protein, 12 aa, Homo sapiens
  ( 368 )...( 379 ): >SIM1_HUMAN
RKGAKSRLSSSK

SEQ ID NO: 22403 - protein, 12 aa, Homo sapiens
  ( 373 )...( 384 ): >SIM1_HUMAN
SRLSSSKSKSRT

SEQ ID NO: 22404 - protein, 12 aa, Homo sapiens
  ( 374 )...( 385 ): >SIM1_HUMAN
RLSSSKSKSRTS

SEQ ID NO: 22405 - protein, 12 aa, Homo sapiens
  ( 1 )...( 12 ): >SIM2_HUMAN
MKEKSKNAAKTR

SEQ ID NO: 22406 - protein, 12 aa, Homo sapiens
  ( 42 )...( 53 ): >SIM2_HUMAN
IIRLTTSYLKMR

SEQ ID NO: 22407 - protein, 12 aa, Homo sapiens
  ( 43 )...( 54 ): >SIM2_HUMAN
IRLTTSYLKMRA

SEQ ID NO: 22408 - protein, 12 aa, Homo sapiens
  ( 44 )...( 55 ): >SIM2_HUMAN
RLTTSYLKMRAV

SEQ ID NO: 22409 - protein, 12 aa, Homo sapiens
  ( 162 )...( 173 ): >SIM2_HUMAN
LRMKCVLAKRNA

SEQ ID NO: 22410 - protein, 12 aa, Homo sapiens
  ( 163 )...( 174 ): >SIM2_HUMAN
RMKCVLAKRNAG

SEQ ID NO: 22411 - protein, 12 aa, Homo sapiens
  ( 165 )...( 176 ): >SIM2_HUMAN
KCVLAKRNAGLT

SEQ ID NO: 22412 - protein, 12 aa, Homo sapiens
  ( 181 )...( 192 ): >SIM2_HUMAN
KVIHCSGYLKIR

SEQ ID NO: 22413 - protein, 12 aa, Homo sapiens
  ( 285 )...( 296 ): >SIM2_HUMAN
LVKGQVTTKYYR

SEQ ID NO: 22414 - protein, 12 aa, Homo sapiens
  ( 286 )...( 297 ): >SIM2_HUMAN
VKGQVTTKYYRL

SEQ ID NO: 22415 - protein, 12 aa, Homo sapiens
  ( 287 )...( 298 ): >SIM2_HUMAN
KGQVTTKYYRLL

SEQ ID NO: 22416 - protein, 12 aa, Homo sapiens
  ( 289 )...( 300 ): >SIM2_HUMAN
QVTTKYYRLLSK

SEQ ID NO: 22417 - protein, 12 aa, Homo sapiens
  ( 291 )...( 302 ): >SIM2_HUMAN
TTKYYRLLSKRG

SEQ ID NO: 22418 - protein, 12 aa, Homo sapiens
  ( 292 )...( 303 ): >SIM2_HUMAN
TKYYRLLSKRGG

SEQ ID NO: 22419 - protein, 12 aa, Homo sapiens
  ( 296 )...( 307 ): >SIM2_HUMAN
RLLSKRGGWVWV

SEQ ID NO: 22420 - protein, 12 aa, Homo sapiens
  ( 364 )...( 375 ): >SIM2_HUMAN
QETRKLVKPKNT

SEQ ID NO: 22421 - protein, 12 aa, Homo sapiens
  ( 365 )...( 376 ): >SIM2_HUMAN
ETRKLVKPKNTK

SEQ ID NO: 22422 - protein, 12 aa, Homo sapiens
  ( 366 )...( 377 ): >SIM2_HUMAN
TRKLVKPKNTKM

SEQ ID NO: 22423 - protein, 12 aa, Homo sapiens
  ( 368 )...( 379 ): >SIM2_HUMAN
KLVKPKNTKMKT

SEQ ID NO: 22424 - protein, 12 aa, Homo sapiens
  ( 369 )...( 380 ): >SIM2_HUMAN
LVKPKNTKMKTK

SEQ ID NO: 22425 - protein, 12 aa, Homo sapiens
  ( 370 )...( 381 ): >SIM2_HUMAN
VKPKNTKMKTKL

SEQ ID NO: 22426 - protein, 12 aa, Homo sapiens
  ( 372 )...( 383 ): >SIM2_HUMAN
PKNTKMKTKLRT

SEQ ID NO: 22427 - protein, 12 aa, Homo sapiens
  ( 559 )...( 570 ): >SIM2_HUMAN
KAARQAARDGAR

SEQ ID NO: 22428 - protein, 12 aa, Homo sapiens
  ( 602 )...( 613 ): >SIM2_HUMAN
YHRVLARRGPLG

SEQ ID NO: 22429 - protein, 12 aa, Homo sapiens
  ( 603 )...( 614 ): >SIM2_HUMAN
HRVLARRGPLGG

SEQ ID NO: 22430 - protein, 12 aa, Homo sapiens
  ( 113 )...( 124 ): >SOX9_HUMAN
MVWAQAARRKLA

SEQ ID NO: 22431 - protein, 12 aa, Homo sapiens
  ( 135 )...( 146 ): >SOX9_HUMAN
LSKTLGKLWRLL

SEQ ID NO: 22432 - protein, 12 aa, Homo sapiens
  ( 136 )...( 147 ): >SOX9_HUMAN
SKTLGKLWRLLN

SEQ ID NO: 22433 - protein, 12 aa, Homo sapiens
  ( 178 )...( 189 ): >SOX9_HUMAN
RRKSVKNGQAEA

SEQ ID NO: 22434 - protein, 12 aa, Homo sapiens
  ( 96 )...( 107 ): >SP11_HUMAN
LVTIYRSFKRVG

SEQ ID NO: 22435 - protein, 12 aa, Homo sapiens
  ( 97 )...( 108 ): >SP11_HUMAN
VTIYRSFKRVGA

SEQ ID NO: 22436 - protein, 12 aa, Homo sapiens
  ( 98 )...( 109 ): >SP11_HUMAN
TIYRSFKRVGAS

SEQ ID NO: 22437 - protein, 12 aa, Homo sapiens
  ( 99 )...( 110 ): >SP11_HUMAN
IYRSFKRVGASY

SEQ ID NO: 22438 - protein, 12 aa, Homo sapiens
  ( 291 )...( 302 ): >SP11_HUMAN
RHKKKSLPRGTA

SEQ ID NO: 22439 - protein, 12 aa, Homo sapiens
  ( 292 )...( 303 ): >SP11_HUMAN
HKKKSLPRGTAS

SEQ ID NO: 22440 - protein, 12 aa, Homo sapiens
  ( 293 )...( 304 ): >SP11_HUMAN
KKKSLPRGTASS

SEQ ID NO: 22441 - protein, 12 aa, Homo sapiens
  ( 294 )...( 305 ): >SP11_HUMAN
KKSLPRGTASSR

SEQ ID NO: 22442 - protein, 12 aa, Homo sapiens
  ( 299 )...( 310 ): >SP11_HUMAN
RGTASSRHGIQK

SEQ ID NO: 22443 - protein, 12 aa, Homo sapiens
  ( 302 )...( 313 ): >SP11_HUMAN
ASSRHGIQKKLK

SEQ ID NO: 22444 - protein, 12 aa, Homo sapiens
  ( 304 )...( 315 ): >SP11_HUMAN
SRHGIQKKLKRV

SEQ ID NO: 22445 - protein, 12 aa, Homo sapiens
  ( 306 )...( 317 ): >SP11_HUMAN
HGIQKKLKRVDQ

SEQ ID NO: 22446 - protein, 12 aa, Homo sapiens
  ( 307 )...( 318 ): >SP11_HUMAN
GIQKKLKRVDQV

SEQ ID NO: 22447 - protein, 12 aa, Homo sapiens
  ( 308 )...( 319 ): >SP11_HUMAN
IQKKLKRVDQVP

SEQ ID NO: 22448 - protein, 12 aa, Homo sapiens
  ( 333 )...( 344 ): >SP11_HUMAN
TRAQKARTECAR

SEQ ID NO: 22449 - protein, 12 aa, Homo sapiens
  ( 334 )...( 345 ): >SP11_HUMAN
RAQKARTECARK

SEQ ID NO: 22450 - protein, 12 aa, Homo sapiens
  ( 335 )...( 346 ): >SP11_HUMAN
AQKARTECARKS

SEQ ID NO: 22451 - protein, 12 aa, Homo sapiens
  ( 361 )...( 372 ): >SP11_HUMAN
GKRSQKTPSTPR

SEQ ID NO: 22452 - protein, 12 aa, Homo sapiens
  ( 364 )...( 375 ): >SP11_HUMAN
SQKTPSTPRRVT

SEQ ID NO: 22453 - protein, 12 aa, Homo sapiens
  ( 365 )...( 376 ): >SP11_HUMAN
QKTPSTPRRVTQ

SEQ ID NO: 22454 - protein, 12 aa, Homo sapiens
  ( 366 )...( 377 ): >SP11_HUMAN
KTPSTPRRVTQG

SEQ ID NO: 22455 - protein, 12 aa, Homo sapiens
  ( 388 )...( 399 ): >SP11_HUMAN
KLQVVDKVTQRK

SEQ ID NO: 22456 - protein, 12 aa, Homo sapiens
  ( 407 )...( 418 ): >SP11_HUMAN
EVMMRVQKARTK

SEQ ID NO: 22457 - protein, 12 aa, Homo sapiens
  ( 408 )...( 419 ): >SP11_HUMAN
VMMRVQKARTKC

SEQ ID NO: 22458 - protein, 12 aa, Homo sapiens
  ( 409 )...( 420 ): >SP11_HUMAN
MMRVQKARTKCA

SEQ ID NO: 22459 - protein, 12 aa, Homo sapiens
  ( 412 )...( 423 ): >SP11_HUMAN
VQKARTKCARKS

SEQ ID NO: 22460 - protein, 12 aa, Homo sapiens
  ( 446 )...( 457 ): >SP11_HUMAN
IHRRGKPKSDTV

SEQ ID NO: 22461 - protein, 12 aa, Homo sapiens
  ( 468 )...( 479 ): >SP11_HUMAN
CGEAKGILYKKK

SEQ ID NO: 22462 - protein, 12 aa, Homo sapiens
  ( 469 )...( 480 ): >SP11_HUMAN
GEAKGILYKKKM

SEQ ID NO: 22463 - protein, 12 aa, Homo sapiens
  ( 470 )...( 481 ): >SP11_HUMAN
EAKGILYKKKMK

SEQ ID NO: 22464 - protein, 12 aa, Homo sapiens
  ( 471 )...( 482 ): >SP11_HUMAN
AKGILYKKKMKH

SEQ ID NO: 22465 - protein, 12 aa, Homo sapiens
  ( 472 )...( 483 ): >SP11_HUMAN
KGILYKKKMKHG

SEQ ID NO: 22466 - protein, 12 aa, Homo sapiens
  ( 473 )...( 484 ): >SP11_HUMAN
GILYKKKMKHGS

SEQ ID NO: 22467 - protein, 12 aa, Homo sapiens
  ( 474 )...( 485 ): >SP11_HUMAN
ILYKKKMKHGSS

SEQ ID NO: 22468 - protein, 12 aa, Homo sapiens
  ( 475 )...( 486 ): >SP11_HUMAN
LYKKKMKHGSSV

SEQ ID NO: 22469 - protein, 12 aa, Homo sapiens
  ( 476 )...( 487 ): >SP11_HUMAN
YKKKMKHGSSVK

SEQ ID NO: 22470 - protein, 12 aa, Homo sapiens
  ( 477 )...( 488 ): >SP11_HUMAN
KKKMKHGSSVKC

SEQ ID NO: 22471 - protein, 12 aa, Homo sapiens
  ( 479 )...( 490 ): >SP11_HUMAN
KMKHGSSVKCIR

SEQ ID NO: 22472 - protein, 12 aa, Homo sapiens
  ( 504 )...( 515 ): >SP11_HUMAN
VEGKGRNAKNWK

SEQ ID NO: 22473 - protein, 12 aa, Homo sapiens
  ( 129 )...( 140 ): >SPM1_HUMAN
LAKELRQKRLSL

SEQ ID NO: 22474 - protein, 12 aa, Homo sapiens
  ( 130 )...( 141 ): >SPM1_HUMAN
AKELRQKRLSLG

SEQ ID NO: 22475 - protein, 12 aa, Homo sapiens
  ( 133 )...( 144 ): >SPM1_HUMAN
LRQKRLSLGYSQ

SEQ ID NO: 22476 - protein, 12 aa, Homo sapiens
  ( 134 )...( 145 ): >SPM1_HUMAN
RQKRLSLGYSQA

SEQ ID NO: 22477 - protein, 12 aa, Homo sapiens
  ( 205 )...( 216 ): >SPM1_HUMAN
ILQQSGKWRRAS

SEQ ID NO: 22478 - protein, 12 aa, Homo sapiens
  ( 302 )...( 313 ): >SRE1_HUMAN
KLPINRLAAGSK

SEQ ID NO: 22479 - protein, 12 aa, Homo sapiens
  ( 354 )...( 365 ): >SRE1_HUMAN
EAKLNKSAVLRK

SEQ ID NO: 22480 - protein, 12 aa, Homo sapiens
  ( 355 )...( 366 ): >SRE1_HUMAN
AKLNKSAVLRKA

SEQ ID NO: 22481 - protein, 12 aa, Homo sapiens
  ( 356 )...( 367 ): >SRE1_HUMAN
KLNKSAVLRKAI

SEQ ID NO: 22482 - protein, 12 aa, Homo sapiens
  ( 387 )...( 398 ): >SRE1_HUMAN
LRTAVHKSKSLK

SEQ ID NO: 22483 - protein, 12 aa, Homo sapiens
  ( 638 )...( 649 ): >SRE1_HUMAN
RLWVGRWLAGRA

SEQ ID NO: 22484 - protein, 12 aa, Homo sapiens
  ( 721 )...( 732 ): >SRE1_HUMAN
AAALRVKTSLPR

SEQ ID NO: 22485 - protein, 12 aa, Homo sapiens
  ( 722 )...( 733 ): >SRE1_HUMAN
AALRVKTSLPRA

SEQ ID NO: 22486 - protein, 12 aa, Homo sapiens
  ( 723 )...( 734 ): >SRE1_HUMAN
ALRVKTSLPRAL

SEQ ID NO: 22487 - protein, 12 aa, Homo sapiens
  ( 724 )...( 735 ): >SRE1_HUMAN
LRVKTSLPRALH

SEQ ID NO: 22488 - protein, 12 aa, Homo sapiens
  ( 725 )...( 736 ): >SRE1_HUMAN
RVKTSLPRALHF

SEQ ID NO: 22489 - protein, 12 aa, Homo sapiens
  ( 1056 )...( 1067 ): >SRE1_HUMAN
LLDRSLRRRAGP

SEQ ID NO: 22490 - protein, 12 aa, Homo sapiens
  ( 1057 )...( 1068 ): >SRE1_HUMAN
LDRSLRRRAGPG

SEQ ID NO: 22491 - protein, 12 aa, Homo sapiens
  ( 1058 )...( 1069 ): >SRE1_HUMAN
DRSLRRRAGPGG

SEQ ID NO: 22492 - protein, 12 aa, Homo sapiens
  ( 362 )...( 373 ): >SRE2_HUMAN
AKMHKSGVLRKA

SEQ ID NO: 22493 - protein, 12 aa, Homo sapiens
  ( 363 )...( 374 ): >SRE2_HUMAN
KMHKSGVLRKAI

SEQ ID NO: 22494 - protein, 12 aa, Homo sapiens
  ( 392 )...( 403 ): >SRE2_HUMAN
MVLKLANQKNKL

SEQ ID NO: 22495 - protein, 12 aa, Homo sapiens
  ( 393 )...( 404 ): >SRE2_HUMAN
VLKLANQKNKLL

SEQ ID NO: 22496 - protein, 12 aa, Homo sapiens
  ( 394 )...( 405 ): >SRE2_HUMAN
LKLANQKNKLLK

SEQ ID NO: 22497 - protein, 12 aa, Homo sapiens
  ( 395 )...( 406 ): >SRE2_HUMAN
KLANQKNKLLKG

SEQ ID NO: 22498 - protein, 12 aa, Homo sapiens
  ( 396 )...( 407 ): >SRE2_HUMAN
LANQKNKLLKGI

SEQ ID NO: 22499 - protein, 12 aa, Homo sapiens
  ( 623 )...( 634 ): >SRE2_HUMAN
VIRYSLQKLRLV

SEQ ID NO: 22500 - protein, 12 aa, Homo sapiens
  ( 637 )...( 648 ): >SRE2_HUMAN
LLKKVFQCRRAT

SEQ ID NO: 22501 - protein, 12 aa, Homo sapiens
  ( 638 )...( 649 ): >SRE2_HUMAN
LKKVFQCRRATP

SEQ ID NO: 22502 - protein, 12 aa, Homo sapiens
  ( 639 )...( 650 ): >SRE2_HUMAN
KKVFQCRRATPA

SEQ ID NO: 22503 - protein, 12 aa, Homo sapiens
  ( 640 )...( 651 ): >SRE2_HUMAN
KVFQCRRATPAT

SEQ ID NO: 22504 - protein, 12 aa, Homo sapiens
  ( 814 )...( 825 ): >SRE2_HUMAN
SLVKPQAKKKAG

SEQ ID NO: 22505 - protein, 12 aa, Homo sapiens
  ( 815 )...( 826 ): >SRE2_HUMAN
LVKPQAKKKAGD

SEQ ID NO: 22506 - protein, 12 aa, Homo sapiens
  ( 816 )...( 827 ): >SRE2_HUMAN
VKPQAKKKAGDQ

SEQ ID NO: 22507 - protein, 12 aa, Homo sapiens
  ( 1015 )...( 1026 ): >SRE2_HUMAN
LGSLRRLAHSFR

SEQ ID NO: 22508 - protein, 12 aa, Homo sapiens
  ( 1058 )...( 1069 ): >SRE2_HUMAN
LRRRTTQSTKHG

SEQ ID NO: 22509 - protein, 12 aa, Homo sapiens
  ( 575 )...( 586 ): >SREC_HUMAN
AIPRTSSLARAK

SEQ ID NO: 22510 - protein, 12 aa, Homo sapiens
  ( 576 )...( 587 ): >SREC_HUMAN
IPRTSSLARAKR

SEQ ID NO: 22511 - protein, 12 aa, Homo sapiens
  ( 577 )...( 588 ): >SREC_HUMAN
PRTSSLARAKRP

SEQ ID NO: 22512 - protein, 12 aa, Homo sapiens
  ( 578 )...( 589 ): >SREC_HUMAN
RTSSLARAKRPS

SEQ ID NO: 22513 - protein, 12 aa, Homo sapiens
  ( 579 )...( 590 ): >SREC_HUMAN
TSSLARAKRPSV

SEQ ID NO: 22514 - protein, 12 aa, Homo sapiens
  ( 607 )...( 618 ): >SREC_HUMAN
GELSSPLRKPKR

SEQ ID NO: 22515 - protein, 12 aa, Homo sapiens
  ( 615 )...( 626 ): >SREC_HUMAN
KPKRLSRGAQSG

SEQ ID NO: 22516 - protein, 12 aa, Homo sapiens
  ( 657 )...( 668 ): >SREC_HUMAN
ATGHRRPPLGSR

SEQ ID NO: 22517 - protein, 12 aa, Homo sapiens
  ( 658 )...( 669 ): >SREC_HUMAN
TGHRRPPLGSRT

SEQ ID NO: 22518 - protein, 12 aa, Homo sapiens
  ( 659 )...( 670 ): >SREC_HUMAN
GHRRPPLGSRTV

SEQ ID NO: 22519 - protein, 12 aa, Homo sapiens
  ( 660 )...( 671 ): >SREC_HUMAN
HRRPPLGSRTVA

SEQ ID NO: 22520 - protein, 12 aa, Homo sapiens
  ( 715 )...( 726 ): >SREC_HUMAN
FQKGQAEAKVKR

SEQ ID NO: 22521 - protein, 12 aa, Homo sapiens
  ( 716 )...( 727 ): >SREC_HUMAN
QKGQAEAKVKRA

SEQ ID NO: 22522 - protein, 12 aa, Homo sapiens
  ( 717 )...( 728 ): >SREC_HUMAN
KGQAEAKVKRAI

SEQ ID NO: 22523 - protein, 12 aa, Homo sapiens
  ( 719 )...( 730 ): >SREC_HUMAN
QAEAKVKRAIPK

SEQ ID NO: 22524 - protein, 12 aa, Homo sapiens
  ( 720 )...( 731 ): >SREC_HUMAN
AEAKVKRAIPKP

SEQ ID NO: 22525 - protein, 12 aa, Homo sapiens
  ( 721 )...( 732 ): >SREC_HUMAN
EAKVKRAIPKPP

SEQ ID NO: 22526 - protein, 12 aa, Homo sapiens
  ( 724 )...( 735 ): >SREC_HUMAN
VKRAIPKPPRQA

SEQ ID NO: 22527 - protein, 12 aa, Homo sapiens
  ( 733 )...( 744 ): >SREC_HUMAN
RQALNRKKGSPG

SEQ ID NO: 22528 - protein, 12 aa, Homo sapiens
  ( 734 )...( 745 ): >SREC_HUMAN
QALNRKKGSPGL

SEQ ID NO: 22529 - protein, 12 aa, Homo sapiens
  ( 91 )...( 102 ): >SRF_HUMAN
LGAERRGLKRSL

SEQ ID NO: 22530 - protein, 12 aa, Homo sapiens
  ( 92 )...( 103 ): >SRF_HUMAN
GAERRGLKRSLS

SEQ ID NO: 22531 - protein, 12 aa, Homo sapiens
  ( 133 )...( 144 ): >SRF_HUMAN
GAKPGKKTRGRV

SEQ ID NO: 22532 - protein, 12 aa, Homo sapiens
  ( 138 )...( 149 ): >SRF_HUMAN
KKTRGRVKIKME

SEQ ID NO: 22533 - protein, 12 aa, Homo sapiens
  ( 139 )...( 150 ): >SRF_HUMAN
KTRGRVKIKMEF

SEQ ID NO: 22534 - protein, 12 aa, Homo sapiens
  ( 140 )...( 151 ): >SRF_HUMAN
TRGRVKIKMEFI

SEQ ID NO: 22535 - protein, 12 aa, Homo sapiens
  ( 157 )...( 168 ): >SRF_HUMAN
RYTTFSKRKTGI

SEQ ID NO: 22536 - protein, 12 aa, Homo sapiens
  ( 159 )...( 170 ): >SRF_HUMAN
TTFSKRKTGIMK

SEQ ID NO: 22537 - protein, 12 aa, Homo sapiens
  ( 160 )...( 171 ): >SRF_HUMAN
TFSKRKTGIMKK

SEQ ID NO: 22538 - protein, 12 aa, Homo sapiens
  ( 161 )...( 172 ): >SRF_HUMAN
FSKRKTGIMKKA

SEQ ID NO: 22539 - protein, 12 aa, Homo sapiens
  ( 162 )...( 173 ): >SRF_HUMAN
SKRKTGIMKKAY

SEQ ID NO: 22540 - protein, 12 aa, Homo sapiens
  ( 163 )...( 174 ): >SRF_HUMAN
KRKTGIMKKAYE

SEQ ID NO: 22541 - protein, 12 aa, Homo sapiens
  ( 164 )...( 175 ): >SRF_HUMAN
RKTGIMKKAYEL

SEQ ID NO: 22542 - protein, 12 aa, Homo sapiens
  ( 234 )...( 245 ): >ST5A_HUMAN
QKTLQLLRKQQT

SEQ ID NO: 22543 - protein, 12 aa, Homo sapiens
  ( 235 )...( 246 ): >ST5A_HUMAN
KTLQLLRKQQTI

SEQ ID NO: 22544 - protein, 12 aa, Homo sapiens
  ( 255 )...( 266 ): >ST5A_HUMAN
WKRRQQLAGNGG

SEQ ID NO: 22545 - protein, 12 aa, Homo sapiens
  ( 256 )...( 267 ): >ST5A_HUMAN
KRRQQLAGNGGP

SEQ ID NO: 22546 - protein, 12 aa, Homo sapiens
  ( 342 )...( 353 ): >ST5A_HUMAN
LKTQTKFAATVR

SEQ ID NO: 22547 - protein, 12 aa, Homo sapiens
  ( 343 )...( 354 ): >ST5A_HUMAN
KTQTKFAATVRL

SEQ ID NO: 22548 - protein, 12 aa, Homo sapiens
  ( 234 )...( 245 ): >ST5B_HUMAN
QKTLQLLRKQQT

SEQ ID NO: 22549 - protein, 12 aa, Homo sapiens
  ( 235 )...( 246 ): >ST5B_HUMAN
KTLQLLRKQQTI

SEQ ID NO: 22550 - protein, 12 aa, Homo sapiens
  ( 255 )...( 266 ): >ST5B_HUMAN
WKRRQQLAGNGG

SEQ ID NO: 22551 - protein, 12 aa, Homo sapiens
  ( 256 )...( 267 ): >ST5B_HUMAN
KRRQQLAGNGGP

SEQ ID NO: 22552 - protein, 12 aa, Homo sapiens
  ( 342 )...( 353 ): >ST5B_HUMAN
LKTQTKFAATVR

SEQ ID NO: 22553 - protein, 12 aa, Homo sapiens
  ( 343 )...( 354 ): >ST5B_HUMAN
KTQTKFAATVRL

SEQ ID NO: 22554 - protein, 12 aa, Homo sapiens
  ( 144 )...( 155 ): >STA1_HUMAN
SKVRNVKDKVMC

SEQ ID NO: 22555 - protein, 12 aa, Homo sapiens
  ( 145 )...( 156 ): >STA1_HUMAN
KVRNVKDKVMCI

SEQ ID NO: 22556 - protein, 12 aa, Homo sapiens
  ( 239 )...( 250 ): >STA1_HUMAN
WKRRQQSACIGG

SEQ ID NO: 22557 - protein, 12 aa, Homo sapiens
  ( 269 )...( 280 ): >STA1_HUMAN
SLQQVRQQLKKL

SEQ ID NO: 22558 - protein, 12 aa, Homo sapiens
  ( 335 )...( 346 ): >STA1_HUMAN
LKTGVQFTVKLR

SEQ ID NO: 22559 - protein, 12 aa, Homo sapiens
  ( 336 )...( 347 ): >STA1_HUMAN
KTGVQFTVKLRL

SEQ ID NO: 22560 - protein, 12 aa, Homo sapiens
  ( 372 )...( 383 ): >STA1_HUMAN
NTVKGFRKFNIL

SEQ ID NO: 22561 - protein, 12 aa, Homo sapiens
  ( 373 )...( 384 ): >STA1_HUMAN
TVKGFRKFNILG

SEQ ID NO: 22562 - protein, 12 aa, Homo sapiens
  ( 374 )...( 385 ): >STA1_HUMAN
VKGFRKFNILGT

SEQ ID NO: 22563 - protein, 12 aa, Homo sapiens
  ( 375 )...( 386 ): >STA1_HUMAN
KGFRKFNILGTH

SEQ ID NO: 22564 - protein, 12 aa, Homo sapiens
  ( 116 )...( 127 ): >STA2_HUMAN
KRILIQAQRAQL

SEQ ID NO: 22565 - protein, 12 aa, Homo sapiens
  ( 174 )...( 185 ): >STA2_HUMAN
CFRYKIQAKGKT

SEQ ID NO: 22566 - protein, 12 aa, Homo sapiens
  ( 176 )...( 187 ): >STA2_HUMAN
RYKIQAKGKTPS

SEQ ID NO: 22567 - protein, 12 aa, Homo sapiens
  ( 208 )...( 219 ): >STA2_HUMAN
KRRKEVLDASKA

SEQ ID NO: 22568 - protein, 12 aa, Homo sapiens
  ( 238 )...( 249 ): >STA2_HUMAN
WKAQQQKACIRA

SEQ ID NO: 22569 - protein, 12 aa, Homo sapiens
  ( 239 )...( 250 ): >STA2_HUMAN
KAQQQKACIRAP

SEQ ID NO: 22570 - protein, 12 aa, Homo sapiens
  ( 266 )...( 277 ): >STA2_HUMAN
AKLLFHLRQLLK

SEQ ID NO: 22571 - protein, 12 aa, Homo sapiens
  ( 330 )...( 341 ): >STA2_HUMAN
RPLILKTGSKFT

SEQ ID NO: 22572 - protein, 12 aa, Homo sapiens
  ( 332 )...( 343 ): >STA2_HUMAN
LILKTGSKFTVR

SEQ ID NO: 22573 - protein, 12 aa, Homo sapiens
  ( 334 )...( 345 ): >STA2_HUMAN
LKTGSKFTVRTR

SEQ ID NO: 22574 - protein, 12 aa, Homo sapiens
  ( 335 )...( 346 ): >STA2_HUMAN
KTGSKFTVRTRL

SEQ ID NO: 22575 - protein, 12 aa, Homo sapiens
  ( 336 )...( 347 ): >STA2_HUMAN
TGSKFTVRTRLL

SEQ ID NO: 22576 - protein, 12 aa, Homo sapiens
  ( 337 )...( 348 ): >STA2_HUMAN
GSKFTVRTRLLV

SEQ ID NO: 22577 - protein, 12 aa, Homo sapiens
  ( 338 )...( 349 ): >STA2_HUMAN
SKFTVRTRLLVR

SEQ ID NO: 22578 - protein, 12 aa, Homo sapiens
  ( 339 )...( 350 ): >STA2_HUMAN
KFTVRTRLLVRL

SEQ ID NO: 22579 - protein, 12 aa, Homo sapiens
  ( 340 )...( 351 ): >STA2_HUMAN
FTVRTRLLVRLQ

SEQ ID NO: 22580 - protein, 12 aa, Homo sapiens
  ( 585 )...( 596 ): >STA2_HUMAN
QERRLLKKTMSG

SEQ ID NO: 22581 - protein, 12 aa, Homo sapiens
  ( 586 )...( 597 ): >STA2_HUMAN
ERRLLKKTMSGT

SEQ ID NO: 22582 - protein, 12 aa, Homo sapiens
  ( 587 )...( 598 ): >STA2_HUMAN
RRLLKKTMSGTF

SEQ ID NO: 22583 - protein, 12 aa, Homo sapiens
  ( 588 )...( 599 ): >STA2_HUMAN
RLLKKTMSGTFL

SEQ ID NO: 22584 - protein, 12 aa, Homo sapiens
  ( 590 )...( 601 ): >STA2_HUMAN
LKKTMSGTFLLR

SEQ ID NO: 22585 - protein, 12 aa, Homo sapiens
  ( 591 )...( 602 ): >STA2_HUMAN
KKTMSGTFLLRF

SEQ ID NO: 22586 - protein, 12 aa, Homo sapiens
  ( 689 )...( 700 ): >STA2_HUMAN
KYLKHRLIVVSN

SEQ ID NO: 22587 - protein, 12 aa, Homo sapiens
  ( 691 )...( 702 ): >STA2_HUMAN
LKHRLIVVSNRQ

SEQ ID NO: 22588 - protein, 12 aa, Homo sapiens
  ( 692 )...( 703 ): >STA2_HUMAN
KHRLIVVSNRQV

SEQ ID NO: 22589 - protein, 12 aa, Homo sapiens
  ( 243 )...( 254 ): >STA3_HUMAN
WKRRQQIACIGG

SEQ ID NO: 22590 - protein, 12 aa, Homo sapiens
  ( 244 )...( 255 ): >STA3_HUMAN
KRRQQIACIGGP

SEQ ID NO: 22591 - protein, 12 aa, Homo sapiens
  ( 273 )...( 284 ): >STA3_HUMAN
SQLQTRQQIKKL

SEQ ID NO: 22592 - protein, 12 aa, Homo sapiens
  ( 339 )...( 350 ): >STA3_HUMAN
IKTGVQFTTKVR

SEQ ID NO: 22593 - protein, 12 aa, Homo sapiens
  ( 340 )...( 351 ): >STA3_HUMAN
KTGVQFTTKVRL

SEQ ID NO: 22594 - protein, 12 aa, Homo sapiens
  ( 343 )...( 354 ): >STA3_HUMAN
VQFTTKVRLLVK

SEQ ID NO: 22595 - protein, 12 aa, Homo sapiens
  ( 344 )...( 355 ): >STA3_HUMAN
QFTTKVRLLVKF

SEQ ID NO: 22596 - protein, 12 aa, Homo sapiens
  ( 375 )...( 386 ): >STA3_HUMAN
VAALRGSRKFNI

SEQ ID NO: 22597 - protein, 12 aa, Homo sapiens
  ( 376 )...( 387 ): >STA3_HUMAN
AALRGSRKFNIL

SEQ ID NO: 22598 - protein, 12 aa, Homo sapiens
  ( 377 )...( 388 ): >STA3_HUMAN
ALRGSRKFNILG

SEQ ID NO: 22599 - protein, 12 aa, Homo sapiens
  ( 378 )...( 389 ): >STA3_HUMAN
LRGSRKFNILGT

SEQ ID NO: 22600 - protein, 12 aa, Homo sapiens
  ( 379 )...( 390 ): >STA3_HUMAN
RGSRKFNILGTN

SEQ ID NO: 22601 - protein, 12 aa, Homo sapiens
  ( 381 )...( 392 ): >STA3_HUMAN
SRKFNILGTNTK

SEQ ID NO: 22602 - protein, 12 aa, Homo sapiens
  ( 382 )...( 393 ): >STA3_HUMAN
RKFNILGTNTKV

SEQ ID NO: 22603 - protein, 12 aa, Homo sapiens
  ( 81 )...( 92 ): >STA4_HUMAN
HNLKRIRKVLQG

SEQ ID NO: 22604 - protein, 12 aa, Homo sapiens
  ( 85 )...( 96 ): >STA4_HUMAN
RIRKVLQGKFHG

SEQ ID NO: 22605 - protein, 12 aa, Homo sapiens
  ( 86 )...( 97 ): >STA4_HUMAN
IRKVLQGKFHGN

SEQ ID NO: 22606 - protein, 12 aa, Homo sapiens
  ( 87 )...( 98 ): >STA4_HUMAN
RKVLQGKFHGNP

SEQ ID NO: 22607 - protein, 12 aa, Homo sapiens
  ( 208 )...( 219 ): >STA4_HUMAN
KRKEALSKMTQI

SEQ ID NO: 22608 - protein, 12 aa, Homo sapiens
  ( 238 )...( 249 ): >STA4_HUMAN
WKRRQQIACIGG

SEQ ID NO: 22609 - protein, 12 aa, Homo sapiens
  ( 239 )...( 250 ): >STA4_HUMAN
KRRQQIACIGGP

SEQ ID NO: 22610 - protein, 12 aa, Homo sapiens
  ( 334 )...( 345 ): >STA4_HUMAN
LKTLIQFTVKLR

SEQ ID NO: 22611 - protein, 12 aa, Homo sapiens
  ( 335 )...( 346 ): >STA4_HUMAN
KTLIQFTVKLRL

SEQ ID NO: 22612 - protein, 12 aa, Homo sapiens
  ( 372 )...( 383 ): >STA4_HUMAN
NRRFVLCGTNVK

SEQ ID NO: 22613 - protein, 12 aa, Homo sapiens
  ( 373 )...( 384 ): >STA4_HUMAN
RRFVLCGTNVKA

SEQ ID NO: 22614 - protein, 12 aa, Homo sapiens
  ( 127 )...( 138 ): >STA6_HUMAN
ELKFKTGLRRLQ

SEQ ID NO: 22615 - protein, 12 aa, Homo sapiens
  ( 131 )...( 142 ): >STA6_HUMAN
KTGLRRLQHRVG

SEQ ID NO: 22616 - protein, 12 aa, Homo sapiens
  ( 192 )...( 203 ): >STA6_HUMAN
AAKALVLKRIQI

SEQ ID NO: 22617 - protein, 12 aa, Homo sapiens
  ( 193 )...( 204 ): >STA6_HUMAN
AKALVLKRIQIW

SEQ ID NO: 22618 - protein, 12 aa, Homo sapiens
  ( 194 )...( 205 ): >STA6_HUMAN
KALVLKRIQIWK

SEQ ID NO: 22619 - protein, 12 aa, Homo sapiens
  ( 283 )...( 294 ): >STA6_HUMAN
LKTQTKFQAGVR

SEQ ID NO: 22620 - protein, 12 aa, Homo sapiens
  ( 284 )...( 295 ): >STA6_HUMAN
KTQTKFQAGVRF

SEQ ID NO: 22621 - protein, 12 aa, Homo sapiens
  ( 357 )...( 368 ): >STA6_HUMAN
SALFKNLLLKKI

SEQ ID NO: 22622 - protein, 12 aa, Homo sapiens
  ( 358 )...( 369 ): >STA6_HUMAN
ALFKNLLLKKIK

SEQ ID NO: 22623 - protein, 12 aa, Homo sapiens
  ( 364 )...( 375 ): >STA6_HUMAN
LLKKIKRCERKG

SEQ ID NO: 22624 - protein, 12 aa, Homo sapiens
  ( 365 )...( 376 ): >STA6_HUMAN
LKKIKRCERKGT

SEQ ID NO: 22625 - protein, 12 aa, Homo sapiens
  ( 366 )...( 377 ): >STA6_HUMAN
KKIKRCERKGTE

SEQ ID NO: 22626 - protein, 12 aa, Homo sapiens
  ( 367 )...( 378 ): >STA6_HUMAN
KIKRCERKGTES

SEQ ID NO: 22627 - protein, 12 aa, Homo sapiens
  ( 184 )...( 195 ): >SUT3_HUMAN
FIRDYKSKIVKG

SEQ ID NO: 22628 - protein, 12 aa, Homo sapiens
  ( 185 )...( 196 ): >SUT3_HUMAN
IRDYKSKIVKGI

SEQ ID NO: 22629 - protein, 12 aa, Homo sapiens
  ( 270 )...( 281 ): >SUT3_HUMAN
SRQLSFSKKASK

SEQ ID NO: 22630 - protein, 12 aa, Homo sapiens
  ( 371 )...( 382 ): >SUT3_HUMAN
AIRRYSHRIGPL

SEQ ID NO: 22631 - protein, 12 aa, Homo sapiens
  ( 112 )...( 123 ): >SX10_HUMAN
MVWAQAARRKLA

SEQ ID NO: 22632 - protein, 12 aa, Homo sapiens
  ( 134 )...( 145 ): >SX10_HUMAN
LSKTLGKLWRLL

SEQ ID NO: 22633 - protein, 12 aa, Homo sapiens
  ( 135 )...( 146 ): >SX10_HUMAN
SKTLGKLWRLLN

SEQ ID NO: 22634 - protein, 12 aa, Homo sapiens
  ( 99 )...( 110 ): >T2D4_HUMAN
AVLQFLRQSKLR

SEQ ID NO: 22635 - protein, 12 aa, Homo sapiens
  ( 367 )...( 378 ): >T2D4_HUMAN
ANKSKVFFGLLK

SEQ ID NO: 22636 - protein, 12 aa, Homo sapiens
  ( 400 )...( 411 ): >T2D4_HUMAN
PKKKKPKKDSIG

SEQ ID NO: 22637 - protein, 12 aa, Homo sapiens
  ( 401 )...( 412 ): >T2D4_HUMAN
KKKKPKKDSIGS

SEQ ID NO: 22638 - protein, 12 aa, Homo sapiens
  ( 402 )...( 413 ): >T2D4_HUMAN
KKKPKKDSIGSK

SEQ ID NO: 22639 - protein, 12 aa, Homo sapiens
  ( 406 )...( 417 ): >T2D4_HUMAN
KKDSIGSKSKKQ

SEQ ID NO: 22640 - protein, 12 aa, Homo sapiens
  ( 440 )...( 451 ): >T2D4_HUMAN
KIMNMKETTKRV

SEQ ID NO: 22641 - protein, 12 aa, Homo sapiens
  ( 441 )...( 452 ): >T2D4_HUMAN
IMNMKETTKRVR

SEQ ID NO: 22642 - protein, 12 aa, Homo sapiens
  ( 442 )...( 453 ): >T2D4_HUMAN
MNMKETTKRVRL

SEQ ID NO: 22643 - protein, 12 aa, Homo sapiens
  ( 443 )...( 454 ): >T2D4_HUMAN
NMKETTKRVRLG

SEQ ID NO: 22644 - protein, 12 aa, Homo sapiens
  ( 444 )...( 455 ): >T2D4_HUMAN
MKETTKRVRLGP

SEQ ID NO: 22645 - protein, 12 aa, Homo sapiens
  ( 492 )...( 503 ): >T2D4_HUMAN
STVRVWSVTPKK

SEQ ID NO: 22646 - protein, 12 aa, Homo sapiens
  ( 493 )...( 504 ): >T2D4_HUMAN
TVRVWSVTPKKL

SEQ ID NO: 22647 - protein, 12 aa, Homo sapiens
  ( 494 )...( 505 ): >T2D4_HUMAN
VRVWSVTPKKLR

SEQ ID NO: 22648 - protein, 12 aa, Homo sapiens
  ( 496 )...( 507 ): >T2D4_HUMAN
VWSVTPKKLRSV

SEQ ID NO: 22649 - protein, 12 aa, Homo sapiens
  ( 497 )...( 508 ): >T2D4_HUMAN
WSVTPKKLRSVK

SEQ ID NO: 22650 - protein, 12 aa, Homo sapiens
  ( 498 )...( 509 ): >T2D4_HUMAN
SVTPKKLRSVKQ

SEQ ID NO: 22651 - protein, 12 aa, Homo sapiens
  ( 499 )...( 510 ): >T2D4_HUMAN
VTPKKLRSVKQA

SEQ ID NO: 22652 - protein, 12 aa, Homo sapiens
  ( 500 )...( 511 ): >T2D4_HUMAN
TPKKLRSVKQAS

SEQ ID NO: 22653 - protein, 12 aa, Homo sapiens
  ( 501 )...( 512 ): >T2D4_HUMAN
PKKLRSVKQASD

SEQ ID NO: 22654 - protein, 12 aa, Homo sapiens
  ( 502 )...( 513 ): >T2D4_HUMAN
KKLRSVKQASDL

SEQ ID NO: 22655 - protein, 12 aa, Homo sapiens
  ( 127 )...( 138 ): >T2D7_HUMAN
YRLKSLQKKAST

SEQ ID NO: 22656 - protein, 12 aa, Homo sapiens
  ( 128 )...( 139 ): >T2D7_HUMAN
RLKSLQKKASTS

SEQ ID NO: 22657 - protein, 12 aa, Homo sapiens
  ( 132 )...( 143 ): >T2D7_HUMAN
LQKKASTSAGRI

SEQ ID NO: 22658 - protein, 12 aa, Homo sapiens
  ( 57 )...( 68 ): >T2DA_HUMAN
VLTKKKLQDLVR

SEQ ID NO: 22659 - protein, 12 aa, Homo sapiens
  ( 96 )...( 107 ): >T2DA_HUMAN
VTAACQLARHRK

SEQ ID NO: 22660 - protein, 12 aa, Homo sapiens
  ( 97 )...( 108 ): >T2DA_HUMAN
TAACQLARHRKS

SEQ ID NO: 22661 - protein, 12 aa, Homo sapiens
  ( 100 )...( 111 ): >T2DA_HUMAN
CQLARHRKSSTL

SEQ ID NO: 22662 - protein, 12 aa, Homo sapiens
  ( 147 )...( 158 ): >T2DA_HUMAN
AHKQRMALIRKT

SEQ ID NO: 22663 - protein, 12 aa, Homo sapiens
  ( 148 )...( 159 ): >T2DA_HUMAN
HKQRMALIRKTT

SEQ ID NO: 22664 - protein, 12 aa, Homo sapiens
  ( 149 )...( 160 ): >T2DA_HUMAN
KQRMALIRKTTK

SEQ ID NO: 22665 - protein, 12 aa, Homo sapiens
  ( 150 )...( 161 ): >T2DA_HUMAN
QRMALIRKTTKK

SEQ ID NO: 22666 - protein, 11 aa, Homo sapiens
  ( 151 )...( 162 ): >T2DA_HUMAN
RMALIRKTTKK

SEQ ID NO: 22667 - protein, 10 aa, Homo sapiens
  ( 152 )...( 163 ): >T2DA_HUMAN
MALIRKTTKK

SEQ ID NO: 22668 - protein, 12 aa, Homo sapiens
  ( 11 )...( 22 ): >T2EB_HUMAN
LFKKRALSTPVV

SEQ ID NO: 22669 - protein, 12 aa, Homo sapiens
  ( 13 )...( 24 ): >T2EB_HUMAN
KKRALSTPVVEK

SEQ ID NO: 22670 - protein, 12 aa, Homo sapiens
  ( 14 )...( 25 ): >T2EB_HUMAN
KRALSTPVVEKR

SEQ ID NO: 22671 - protein, 12 aa, Homo sapiens
  ( 32 )...( 43 ): >T2EB_HUMAN
SSSSSKKKKTKV

SEQ ID NO: 22672 - protein, 12 aa, Homo sapiens
  ( 77 )...( 88 ): >T2EB_HUMAN
VLAKIVNYMKTR

SEQ ID NO: 22673 - protein, 12 aa, Homo sapiens
  ( 78 )...( 89 ): >T2EB_HUMAN
LAKIVNYMKTRH

SEQ ID NO: 22674 - protein, 12 aa, Homo sapiens
  ( 144 )...( 155 ): >T2EB_HUMAN
NVRDKKALLRLL

SEQ ID NO: 22675 - protein, 12 aa, Homo sapiens
  ( 248 )...( 259 ): >T2EB_HUMAN
SGPKKVAPIQRR

SEQ ID NO: 22676 - protein, 12 aa, Homo sapiens
  ( 253 )...( 264 ): >T2EB_HUMAN
VAPIQRRKKPAS

SEQ ID NO: 22677 - protein, 12 aa, Homo sapiens
  ( 14 )...( 25 ): >T2FA_HUMAN
YVVRVPKNTTKK

SEQ ID NO: 22678 - protein, 12 aa, Homo sapiens
  ( 15 )...( 26 ): >T2FA_HUMAN
VVRVPKNTTKKY

SEQ ID NO: 22679 - protein, 12 aa, Homo sapiens
  ( 78 )...( 89 ): >T2FA_HUMAN
EARRKKYGIVLK

SEQ ID NO: 22680 - protein, 12 aa, Homo sapiens
  ( 79 )...( 90 ): >T2FA_HUMAN
ARRKKYGIVLKE

SEQ ID NO: 22681 - protein, 12 aa, Homo sapiens
  ( 97 )...( 108 ): >T2FA_HUMAN
PWLLRVNGKSGR

SEQ ID NO: 22682 - protein, 12 aa, Homo sapiens
  ( 98 )...( 109 ): >T2FA_HUMAN
WLLRVNGKSGRK

SEQ ID NO: 22683 - protein, 12 aa, Homo sapiens
  ( 99 )...( 110 ): >T2FA_HUMAN
LLRVNGKSGRKF

SEQ ID NO: 22684 - protein, 12 aa, Homo sapiens
  ( 100 )...( 111 ): >T2FA_HUMAN
LRVNGKSGRKFK

SEQ ID NO: 22685 - protein, 12 aa, Homo sapiens
  ( 101 )...( 112 ): >T2FA_HUMAN
RVNGKSGRKFKG

SEQ ID NO: 22686 - protein, 12 aa, Homo sapiens
  ( 102 )...( 113 ): >T2FA_HUMAN
VNGKSGRKFKGI

SEQ ID NO: 22687 - protein, 12 aa, Homo sapiens
  ( 103 )...( 114 ): >T2FA_HUMAN
NGKSGRKFKGIK

SEQ ID NO: 22688 - protein, 12 aa, Homo sapiens
  ( 106 )...( 117 ): >T2FA_HUMAN
SGRKFKGIKKGG

SEQ ID NO: 22689 - protein, 12 aa, Homo sapiens
  ( 107 )...( 118 ): >T2FA_HUMAN
GRKFKGIKKGGV

SEQ ID NO: 22690 - protein, 12 aa, Homo sapiens
  ( 108 )...( 119 ): >T2FA_HUMAN
RKFKGIKKGGVT

SEQ ID NO: 22691 - protein, 12 aa, Homo sapiens
  ( 226 )...( 237 ): >T2FA_HUMAN
EEGGRVPKAKKK

SEQ ID NO: 22692 - protein, 12 aa, Homo sapiens
  ( 227 )...( 238 ): >T2FA_HUMAN
EGGRVPKAKKKA

SEQ ID NO: 22693 - protein, 12 aa, Homo sapiens
  ( 229 )...( 240 ): >T2FA_HUMAN
GRVPKAKKKAPL

SEQ ID NO: 22694 - protein, 12 aa, Homo sapiens
  ( 230 )...( 241 ): >T2FA_HUMAN
RVPKAKKKAPLA

SEQ ID NO: 22695 - protein, 12 aa, Homo sapiens
  ( 231 )...( 242 ): >T2FA_HUMAN
VPKAKKKAPLAK

SEQ ID NO: 22696 - protein, 12 aa, Homo sapiens
  ( 402 )...( 413 ): >T2FA_HUMAN
RAAASKLEQGKR

SEQ ID NO: 22697 - protein, 12 aa, Homo sapiens
  ( 411 )...( 422 ): >T2FA_HUMAN
GKRVSEMPAAKR

SEQ ID NO: 22698 - protein, 12 aa, Homo sapiens
  ( 412 )...( 423 ): >T2FA_HUMAN
KRVSEMPAAKRL

SEQ ID NO: 22699 - protein, 12 aa, Homo sapiens
  ( 413 )...( 424 ): >T2FA_HUMAN
RVSEMPAAKRLR

SEQ ID NO: 22700 - protein, 12 aa, Homo sapiens
  ( 473 )...( 484 ): >T2FA_HUMAN
LLKKFQTKKTGL

SEQ ID NO: 22701 - protein, 12 aa, Homo sapiens
  ( 474 )...( 485 ): >T2FA_HUMAN
LKKFQTKKTGLS

SEQ ID NO: 22702 - protein, 12 aa, Homo sapiens
  ( 475 )...( 486 ): >T2FA_HUMAN
KKFQTKKTGLSS

SEQ ID NO: 22703 - protein, 12 aa, Homo sapiens
  ( 17 )...( 28 ): >TAL2_HUMAN
NVNSAFAKLRKL

SEQ ID NO: 22704 - protein, 12 aa, Homo sapiens
  ( 18 )...( 29 ): >TAL2_HUMAN
VNSAFAKLRKLI

SEQ ID NO: 22705 - protein, 12 aa, Homo sapiens
  ( 19 )...( 30 ): >TAL2_HUMAN
NSAFAKLRKLIP

SEQ ID NO: 22706 - protein, 12 aa, Homo sapiens
  ( 20 )...( 31 ): >TAL2_HUMAN
SAFAKLRKLIPT

SEQ ID NO: 22707 - protein, 12 aa, Homo sapiens
  ( 21 )...( 32 ): >TAL2_HUMAN
AFAKLRKLIPTH

SEQ ID NO: 22708 - protein, 12 aa, Homo sapiens
  ( 22 )...( 33 ): >TAL2_HUMAN
FAKLRKLIPTHP

SEQ ID NO: 22709 - protein, 12 aa, Homo sapiens
  ( 23 )...( 34 ): >TAL2_HUMAN
AKLRKLIPTHPP

SEQ ID NO: 22710 - protein, 12 aa, Homo sapiens
  ( 36 )...( 47 ): >TAL2_HUMAN
KKLSKNETLRLA

SEQ ID NO: 22711 - protein, 12 aa, Homo sapiens
  ( 181 )...( 192 ): >TAL_HUMAN
GPHTKVVRRIFT

SEQ ID NO: 22712 - protein, 12 aa, Homo sapiens
  ( 183 )...( 194 ): >TAL_HUMAN
HTKVVRRIFTNS

SEQ ID NO: 22713 - protein, 12 aa, Homo sapiens
  ( 184 )...( 195 ): >TAL_HUMAN
TKVVRRIFTNSR

SEQ ID NO: 22714 - protein, 12 aa, Homo sapiens
  ( 221 )...( 232 ): >TAL_HUMAN
KKLSKNEILRLA

SEQ ID NO: 22715 - protein, 12 aa, Homo sapiens
  ( 103 )...( 114 ): >TAP4_HUMAN
KTRLLQQNTQLK

SEQ ID NO: 22716 - protein, 12 aa, Homo sapiens
  ( 119 )...( 130 ): >TAP4_HUMAN
ELSGSSPKRRRA

SEQ ID NO: 22717 - protein, 12 aa, Homo sapiens
  ( 120 )...( 131 ): >TAP4_HUMAN
LSGSSPKRRRAE

SEQ ID NO: 22718 - protein, 12 aa, Homo sapiens
  ( 291 )...( 302 ): >TAP4_HUMAN
EQRRAVIVKPVR

SEQ ID NO: 22719 - protein, 12 aa, Homo sapiens
  ( 292 )...( 303 ): >TAP4_HUMAN
QRRAVIVKPVRS

SEQ ID NO: 22720 - protein, 12 aa, Homo sapiens
  ( 293 )...( 304 ): >TAP4_HUMAN
RRAVIVKPVRSC

SEQ ID NO: 22721 - protein, 12 aa, Homo sapiens
  ( 294 )...( 305 ): >TAP4_HUMAN
RAVIVKPVRSCP

SEQ ID NO: 22722 - protein, 12 aa, Homo sapiens
  ( 123 )...( 134 ): >TBX3_HUMAN
MVITKSGRRMFP

SEQ ID NO: 22723 - protein, 12 aa, Homo sapiens
  ( 124 )...( 135 ): >TBX3_HUMAN
VITKSGRRMFPP

SEQ ID NO: 22724 - protein, 12 aa, Homo sapiens
  ( 137 )...( 148 ): >TBX3_HUMAN
KVRCSGLDKKAK

SEQ ID NO: 22725 - protein, 12 aa, Homo sapiens
  ( 300 )...( 311 ): >TBX3_HUMAN
AKGFRDTGNGRR

SEQ ID NO: 22726 - protein, 12 aa, Homo sapiens
  ( 313 )...( 324 ): >TBX3_HUMAN
KRKQLTLQSMRV

SEQ ID NO: 22727 - protein, 12 aa, Homo sapiens
  ( 5 )...( 16 ): >TCE1_HUMAN
VVRFAKKMDKMV

SEQ ID NO: 22728 - protein, 12 aa, Homo sapiens
  ( 11 )...( 22 ): >TCE1_HUMAN
KMDKMVQKKNAA

SEQ ID NO: 22729 - protein, 12 aa, Homo sapiens
  ( 44 )...( 55 ): >TCE1_HUMAN
TRIGMSVNAIRK

SEQ ID NO: 22730 - protein, 12 aa, Homo sapiens
  ( 45 )...( 56 ): >TCE1_HUMAN
RIGMSVNAIRKQ

SEQ ID NO: 22731 - protein, 12 aa, Homo sapiens
  ( 64 )...( 75 ): >TCE1_HUMAN
SLAKSLIKSWKK

SEQ ID NO: 22732 - protein, 12 aa, Homo sapiens
  ( 65 )...( 76 ): >TCE1_HUMAN
LAKSLIKSWKKL

SEQ ID NO: 22733 - protein, 12 aa, Homo sapiens
  ( 66 )...( 77 ): >TCE1_HUMAN
AKSLIKSWKKLL

SEQ ID NO: 22734 - protein, 12 aa, Homo sapiens
  ( 191 )...( 202 ): >TCE1_HUMAN
VRSRISNLKDAK

SEQ ID NO: 22735 - protein, 12 aa, Homo sapiens
  ( 268 )...( 279 ): >TCE1_HUMAN
KKNCTYTQVQTR

SEQ ID NO: 22736 - protein, 12 aa, Homo sapiens
  ( 8 )...( 19 ): >TCE2_HUMAN
IARIARRLDKMV

SEQ ID NO: 22737 - protein, 12 aa, Homo sapiens
  ( 9 )...( 20 ): >TCE2_HUMAN
ARIARRLDKMVT

SEQ ID NO: 22738 - protein, 12 aa, Homo sapiens
  ( 10 )...( 21 ): >TCE2_HUMAN
RIARRLDKMVTK

SEQ ID NO: 22739 - protein, 12 aa, Homo sapiens
  ( 11 )...( 22 ): >TCE2_HUMAN
IARRLDKMVTKK

SEQ ID NO: 22740 - protein, 12 aa, Homo sapiens
  ( 12 )...( 23 ): >TCE2_HUMAN
ARRLDKMVTKKS

SEQ ID NO: 22741 - protein, 12 aa, Homo sapiens
  ( 13 )...( 24 ): >TCE2_HUMAN
RRLDKMVTKKSA

SEQ ID NO: 22742 - protein, 12 aa, Homo sapiens
  ( 47 )...( 58 ): >TCE2_HUMAN
TRVGMSVNALRK

SEQ ID NO: 22743 - protein, 12 aa, Homo sapiens
  ( 48 )...( 59 ): >TCE2_HUMAN
RVGMSVNALRKQ

SEQ ID NO: 22744 - protein, 12 aa, Homo sapiens
  ( 66 )...( 77 ): >TCE2_HUMAN
IALAKSLIKSWK

SEQ ID NO: 22745 - protein, 12 aa, Homo sapiens
  ( 67 )...( 78 ): >TCE2_HUMAN
ALAKSLIKSWKK

SEQ ID NO: 22746 - protein, 12 aa, Homo sapiens
  ( 68 )...( 79 ): >TCE2_HUMAN
LAKSLIKSWKKL

SEQ ID NO: 22747 - protein, 12 aa, Homo sapiens
  ( 69 )...( 80 ): >TCE2_HUMAN
AKSLIKSWKKLL

SEQ ID NO: 22748 - protein, 12 aa, Homo sapiens
  ( 85 )...( 96 ): >TCE2_HUMAN
AKARERGRGMPL

SEQ ID NO: 22749 - protein, 12 aa, Homo sapiens
  ( 86 )...( 97 ): >TCE2_HUMAN
KARERGRGMPLP

SEQ ID NO: 22750 - protein, 12 aa, Homo sapiens
  ( 189 )...( 200 ): >TCE2_HUMAN
VRSRISNLKDAK

SEQ ID NO: 22751 - protein, 12 aa, Homo sapiens
  ( 263 )...( 274 ): >TCE2_HUMAN
KCRKKNCTYTQV

SEQ ID NO: 22752 - protein, 12 aa, Homo sapiens
  ( 265 )...( 276 ): >TCE2_HUMAN
RKKNCTYTQVQT

SEQ ID NO: 22753 - protein, 12 aa, Homo sapiens
  ( 266 )...( 277 ): >TCE2_HUMAN
KKNCTYTQVQTR

SEQ ID NO: 22754 - protein, 12 aa, Homo sapiens
  ( 7 )...( 18 ): >TCE3_HUMAN
LLRIAKKLEKMV

SEQ ID NO: 22755 - protein, 12 aa, Homo sapiens
  ( 8 )...( 19 ): >TCE3_HUMAN
LRIAKKLEKMVA

SEQ ID NO: 22756 - protein, 12 aa, Homo sapiens
  ( 9 )...( 20 ): >TCE3_HUMAN
RIAKKLEKMVAR

SEQ ID NO: 22757 - protein, 12 aa, Homo sapiens
  ( 10 )...( 21 ): >TCE3_HUMAN
IAKKLEKMVARK

SEQ ID NO: 22758 - protein, 12 aa, Homo sapiens
  ( 11 )...( 22 ): >TCE3_HUMAN
AKKLEKMVARKN

SEQ ID NO: 22759 - protein, 12 aa, Homo sapiens
  ( 12 )...( 23 ): >TCE3_HUMAN
KKLEKMVARKNT

SEQ ID NO: 22760 - protein, 12 aa, Homo sapiens
  ( 47 )...( 58 ): >TCE3_HUMAN
RIGVAVNGVRKH

SEQ ID NO: 22761 - protein, 12 aa, Homo sapiens
  ( 65 )...( 76 ): >TCE3_HUMAN
VSLAKVLIKNWK

SEQ ID NO: 22762 - protein, 12 aa, Homo sapiens
  ( 249 )...( 260 ): >TCE3_HUMAN
RNPGLRRNVLSG

SEQ ID NO: 22763 - protein, 12 aa, Homo sapiens
  ( 261 )...( 272 ): >TCF7_HUMAN
KEAKKPTIKKPL

SEQ ID NO: 22764 - protein, 12 aa, Homo sapiens
  ( 263 )...( 274 ): >TCF7_HUMAN
AKKPTIKKPLNA

SEQ ID NO: 22765 - protein, 12 aa, Homo sapiens
  ( 228 )...( 239 ): >TCF8_HUMAN
QRHVTQSGCNRK

SEQ ID NO: 22766 - protein, 12 aa, Homo sapiens
  ( 290 )...( 301 ): >TCF8_HUMAN
KKCISLIPVNGR

SEQ ID NO: 22767 - protein, 12 aa, Homo sapiens
  ( 296 )...( 307 ): >TCF8_HUMAN
IPVNGRPRTGLK

SEQ ID NO: 22768 - protein, 12 aa, Homo sapiens
  ( 297 )...( 308 ): >TCF8_HUMAN
PVNGRPRTGLKT

SEQ ID NO: 22769 - protein, 12 aa, Homo sapiens
  ( 298 )...( 309 ): >TCF8_HUMAN
VNGRPRTGLKTS

SEQ ID NO: 22770 - protein, 12 aa, Homo sapiens
  ( 299 )...( 310 ): >TCF8_HUMAN
NGRPRTGLKTSQ

SEQ ID NO: 22771 - protein, 12 aa, Homo sapiens
  ( 300 )...( 311 ): >TCF8_HUMAN
GRPRTGLKTSQC

SEQ ID NO: 22772 - protein, 12 aa, Homo sapiens
  ( 320 )...( 331 ): >TCF8_HUMAN
PGSPTRPQIRQK

SEQ ID NO: 22773 - protein, 12 aa, Homo sapiens
  ( 321 )...( 332 ): >TCF8_HUMAN
GSPTRPQIRQKI

SEQ ID NO: 22774 - protein, 12 aa, Homo sapiens
  ( 127 )...( 138 ): >TCL5_HUMAN
PEARAKPAVRVR

SEQ ID NO: 22775 - protein, 12 aa, Homo sapiens
  ( 128 )...( 139 ): >TCL5_HUMAN
EARAKPAVRVRL

SEQ ID NO: 22776 - protein, 12 aa, Homo sapiens
  ( 129 )...( 140 ): >TCL5_HUMAN
ARAKPAVRVRLE

SEQ ID NO: 22777 - protein, 12 aa, Homo sapiens
  ( 186 )...( 197 ): >TCL5_HUMAN
QQNKCTALVKNK

SEQ ID NO: 22778 - protein, 12 aa, Homo sapiens
  ( 263 )...( 274 ): >TCL5_HUMAN
TKQTLGSRNKVL

SEQ ID NO: 22779 - protein, 12 aa, Homo sapiens
  ( 264 )...( 275 ): >TCL5_HUMAN
KQTLGSRNKVLP

SEQ ID NO: 22780 - protein, 12 aa, Homo sapiens
  ( 285 )...( 296 ): >TCL5_HUMAN
AALCKQALKRNR

SEQ ID NO: 22781 - protein, 12 aa, Homo sapiens
  ( 286 )...( 297 ): >TCL5_HUMAN
ALCKQALKRNRS

SEQ ID NO: 22782 - protein, 12 aa, Homo sapiens
  ( 416 )...( 427 ): >TCL5_HUMAN
SVFCGKTGRRLK

SEQ ID NO: 22783 - protein, 12 aa, Homo sapiens
  ( 417 )...( 428 ): >TCL5_HUMAN
VFCGKTGRRLKL

SEQ ID NO: 22784 - protein, 12 aa, Homo sapiens
  ( 418 )...( 429 ): >TCL5_HUMAN
FCGKTGRRLKLT

SEQ ID NO: 22785 - protein, 12 aa, Homo sapiens
  ( 421 )...( 432 ): >TCL5_HUMAN
KTGRRLKLTRPD

SEQ ID NO: 22786 - protein, 12 aa, Homo sapiens
  ( 422 )...( 433 ): >TCL5_HUMAN
TGRRLKLTRPDS

SEQ ID NO: 22787 - protein, 12 aa, Homo sapiens
  ( 423 )...( 434 ): >TCL5_HUMAN
GRRLKLTRPDSL

SEQ ID NO: 22788 - protein, 12 aa, Homo sapiens
  ( 424 )...( 435 ): >TCL5_HUMAN
RRLKLTRPDSLV

SEQ ID NO: 22789 - protein, 12 aa, Homo sapiens
  ( 108 )...( 119 ): >TDP1_HUMAN
KGEKNGKGLRHF

SEQ ID NO: 22790 - protein, 12 aa, Homo sapiens
  ( 111 )...( 122 ): >TDP1_HUMAN
KNGKGLRHFSMK

SEQ ID NO: 22791 - protein, 12 aa, Homo sapiens
  ( 112 )...( 123 ): >TDP1_HUMAN
NGKGLRHFSMKV

SEQ ID NO: 22792 - protein, 12 aa, Homo sapiens
  ( 119 )...( 130 ): >TDP1_HUMAN
FSMKVCEKVQRK

SEQ ID NO: 22793 - protein, 12 aa, Homo sapiens
  ( 120 )...( 131 ): >TDP1_HUMAN
SMKVCEKVQRKG

SEQ ID NO: 22794 - protein, 12 aa, Homo sapiens
  ( 121 )...( 132 ): >TDP1_HUMAN
MKVCEKVQRKGT

SEQ ID NO: 22795 - protein, 12 aa, Homo sapiens
  ( 122 )...( 133 ): >TDP1_HUMAN
KVCEKVQRKGTT

SEQ ID NO: 22796 - protein, 12 aa, Homo sapiens
  ( 319 )...( 330 ): >TDP1_HUMAN
LKMARSLVPKAL

SEQ ID NO: 22797 - protein, 12 aa, Homo sapiens
  ( 98 )...( 109 ): >TDP2_HUMAN
TGWVPGDRKRAR

SEQ ID NO: 22798 - protein, 12 aa, Homo sapiens
  ( 124 )...( 135 ): >TDP2_HUMAN
KGDKNGKGLRHF

SEQ ID NO: 22799 - protein, 12 aa, Homo sapiens
  ( 127 )...( 138 ): >TDP2_HUMAN
KNGKGLRHFSMK

SEQ ID NO: 22800 - protein, 12 aa, Homo sapiens
  ( 128 )...( 139 ): >TDP2_HUMAN
NGKGLRHFSMKV

SEQ ID NO: 22801 - protein, 12 aa, Homo sapiens
  ( 135 )...( 146 ): >TDP2_HUMAN
FSMKVCEKVQRK

SEQ ID NO: 22802 - protein, 12 aa, Homo sapiens
  ( 136 )...( 147 ): >TDP2_HUMAN
SMKVCEKVQRKG

SEQ ID NO: 22803 - protein, 12 aa, Homo sapiens
  ( 137 )...( 148 ): >TDP2_HUMAN
MKVCEKVQRKGT

SEQ ID NO: 22804 - protein, 12 aa, Homo sapiens
  ( 138 )...( 149 ): >TDP2_HUMAN
KVCEKVQRKGTT

SEQ ID NO: 22805 - protein, 12 aa, Homo sapiens
  ( 334 )...( 345 ): >TDP2_HUMAN
LKLAKSLVPKAL

SEQ ID NO: 22806 - protein, 12 aa, Homo sapiens
  ( 59 )...( 70 ): >TEA2_HUMAN
IYPPCGRRKIIL

SEQ ID NO: 22807 - protein, 12 aa, Homo sapiens
  ( 82 )...( 93 ): >TEA2_HUMAN
LIARYIKLRTGK

SEQ ID NO: 22808 - protein, 12 aa, Homo sapiens
  ( 83 )...( 94 ): >TEA2_HUMAN
IARYIKLRTGKT

SEQ ID NO: 22809 - protein, 12 aa, Homo sapiens
  ( 85 )...( 96 ): >TEA2_HUMAN
RYIKLRTGKTRT

SEQ ID NO: 22810 - protein, 12 aa, Homo sapiens
  ( 86 )...( 97 ): >TEA2_HUMAN
YIKLRTGKTRTR

SEQ ID NO: 22811 - protein, 12 aa, Homo sapiens
  ( 89 )...( 100 ): >TEA2_HUMAN
LRTGKTRTRKQV

SEQ ID NO: 22812 - protein, 12 aa, Homo sapiens
  ( 90 )...( 101 ): >TEA2_HUMAN
RTGKTRTRKQVS

SEQ ID NO: 22813 - protein, 12 aa, Homo sapiens
  ( 91 )...( 102 ): >TEA2_HUMAN
TGKTRTRKQVSS

SEQ ID NO: 22814 - protein, 12 aa, Homo sapiens
  ( 92 )...( 103 ): >TEA2_HUMAN
GKTRTRKQVSSH

SEQ ID NO: 22815 - protein, 12 aa, Homo sapiens
  ( 93 )...( 104 ): >TEA2_HUMAN
KTRTRKQVSSHI

SEQ ID NO: 22816 - protein, 12 aa, Homo sapiens
  ( 95 )...( 106 ): >TEA2_HUMAN
RTRKQVSSHIQV

SEQ ID NO: 22817 - protein, 12 aa, Homo sapiens
  ( 100 )...( 111 ): >TEA2_HUMAN
VSSHIQVLARRK

SEQ ID NO: 22818 - protein, 12 aa, Homo sapiens
  ( 101 )...( 112 ): >TEA2_HUMAN
SSHIQVLARRKS

SEQ ID NO: 22819 - protein, 12 aa, Homo sapiens
  ( 104 )...( 115 ): >TEA2_HUMAN
IQVLARRKSREI

SEQ ID NO: 22820 - protein, 12 aa, Homo sapiens
  ( 106 )...( 117 ): >TEA2_HUMAN
VLARRKSREIQS

SEQ ID NO: 22821 - protein, 12 aa, Homo sapiens
  ( 170 )...( 181 ): >TEF_HUMAN
DLKPQPMIKKAK

SEQ ID NO: 22822 - protein, 12 aa, Homo sapiens
  ( 171 )...( 182 ): >TEF_HUMAN
LKPQPMIKKAKK

SEQ ID NO: 22823 - protein, 12 aa, Homo sapiens
  ( 172 )...( 183 ): >TEF_HUMAN
KPQPMIKKAKKV

SEQ ID NO: 22824 - protein, 12 aa, Homo sapiens
  ( 173 )...( 184 ): >TEF_HUMAN
PQPMIKKAKKVF

SEQ ID NO: 22825 - protein, 12 aa, Homo sapiens
  ( 174 )...( 185 ): >TEF_HUMAN
QPMIKKAKKVFV

SEQ ID NO: 22826 - protein, 12 aa, Homo sapiens
  ( 175 )...( 186 ): >TEF_HUMAN
PMIKKAKKVFVP

SEQ ID NO: 22827 - protein, 12 aa, Homo sapiens
  ( 176 )...( 187 ): >TEF_HUMAN
MIKKAKKVFVPD

SEQ ID NO: 22828 - protein, 12 aa, Homo sapiens
  ( 203 )...( 214 ): >TEF_HUMAN
VAAKRSRDARRL

SEQ ID NO: 22829 - protein, 12 aa, Homo sapiens
  ( 240 )...( 251 ): >TEF_HUMAN
LRKEVGKCKTIV

SEQ ID NO: 22830 - protein, 12 aa, Homo sapiens
  ( 241 )...( 252 ): >TEF_HUMAN
RKEVGKCKTIVS

SEQ ID NO: 22831 - protein, 12 aa, Homo sapiens
  ( 39 )...( 50 ): >TEL2_HUMAN
GICKLPGRLRIQ

SEQ ID NO: 22832 - protein, 12 aa, Homo sapiens
  ( 40 )...( 51 ): >TEL2_HUMAN
ICKLPGRLRIQP

SEQ ID NO: 22833 - protein, 12 aa, Homo sapiens
  ( 41 )...( 52 ): >TEL2_HUMAN
CKLPGRLRIQPA

SEQ ID NO: 22834 - protein, 12 aa, Homo sapiens
  ( 42 )...( 53 ): >TEL2_HUMAN
KLPGRLRIQPAL

SEQ ID NO: 22835 - protein, 12 aa, Homo sapiens
  ( 109 )...( 120 ): >TEL2_HUMAN
LLQYIKTQRRAL

SEQ ID NO: 22836 - protein, 12 aa, Homo sapiens
  ( 110 )...( 121 ): >TEL2_HUMAN
LQYIKTQRRALV

SEQ ID NO: 22837 - protein, 12 aa, Homo sapiens
  ( 111 )...( 122 ): >TEL2_HUMAN
QYIKTQRRALVC

SEQ ID NO: 22838 - protein, 12 aa, Homo sapiens
  ( 112 )...( 123 ): >TEL2_HUMAN
YIKTQRRALVCG

SEQ ID NO: 22839 - protein, 12 aa, Homo sapiens
  ( 113 )...( 124 ): >TEL2_HUMAN
IKTQRRALVCGP

SEQ ID NO: 22840 - protein, 12 aa, Homo sapiens
  ( 114 )...( 125 ): >TEL2_HUMAN
KTQRRALVCGPF

SEQ ID NO: 22841 - protein, 12 aa, Homo sapiens
  ( 288 )...( 299 ): >TEL2_HUMAN
KLNIIKKEPGQK

SEQ ID NO: 22842 - protein, 12 aa, Homo sapiens
  ( 292 )...( 303 ): >TEL2_HUMAN
IKKEPGQKLLFR

SEQ ID NO: 22843 - protein, 12 aa, Homo sapiens
  ( 296 )...( 307 ): >TEL2_HUMAN
PGQKLLFRFLKT

SEQ ID NO: 22844 - protein, 12 aa, Homo sapiens
  ( 297 )...( 308 ): >TEL2_HUMAN
GQKLLFRFLKTP

SEQ ID NO: 22845 - protein, 12 aa, Homo sapiens
  ( 298 )...( 309 ): >TEL2_HUMAN
QKLLFRFLKTPG

SEQ ID NO: 22846 - protein, 12 aa, Homo sapiens
  ( 299 )...( 310 ): >TEL2_HUMAN
KLLFRFLKTPGK

SEQ ID NO: 22847 - protein, 12 aa, Homo sapiens
  ( 301 )...( 312 ): >TEL2_HUMAN
LFRFLKTPGKMV

SEQ ID NO: 22848 - protein, 12 aa, Homo sapiens
  ( 302 )...( 313 ): >TEL2_HUMAN
FRFLKTPGKMVQ

SEQ ID NO: 22849 - protein, 12 aa, Homo sapiens
  ( 69 )...( 80 ): >TF15_HUMAN
VVVRQRQAANAR

SEQ ID NO: 22850 - protein, 12 aa, Homo sapiens
  ( 106 )...( 117 ): >TF15_HUMAN
RKLSKIETLRLA

SEQ ID NO: 22851 - protein, 12 aa, Homo sapiens
  ( 168 )...( 179 ): >TF15_HUMAN
CLSNQRKGGGRR

SEQ ID NO: 22852 - protein, 12 aa, Homo sapiens
  ( 178 )...( 189 ): >TF15_HUMAN
RRDLGGSCLKVR

SEQ ID NO: 22853 - protein, 12 aa, Homo sapiens
  ( 184 )...( 195 ): >TF15_HUMAN
SCLKVRGVAPLR

SEQ ID NO: 22854 - protein, 12 aa, Homo sapiens
  ( 186 )...( 197 ): >TF15_HUMAN
LKVRGVAPLRGP

SEQ ID NO: 22855 - protein, 12 aa, Homo sapiens
  ( 187 )...( 198 ): >TF15_HUMAN
KVRGVAPLRGPR

SEQ ID NO: 22856 - protein, 12 aa, Homo sapiens
  ( 248 )...( 259 ): >TF1B_HUMAN
AVRNQRKLLASL

SEQ ID NO: 22857 - protein, 12 aa, Homo sapiens
  ( 249 )...( 260 ): >TF1B_HUMAN
VRNQRKLLASLV

SEQ ID NO: 22858 - protein, 12 aa, Homo sapiens
  ( 250 )...( 261 ): >TF1B_HUMAN
RNQRKLLASLVK

SEQ ID NO: 22859 - protein, 12 aa, Homo sapiens
  ( 251 )...( 262 ): >TF1B_HUMAN
NQRKLLASLVKR

SEQ ID NO: 22860 - protein, 12 aa, Homo sapiens
  ( 252 )...( 263 ): >TF1B_HUMAN
QRKLLASLVKRL

SEQ ID NO: 22861 - protein, 12 aa, Homo sapiens
  ( 253 )...( 264 ): >TF1B_HUMAN
RKLLASLVKRLG

SEQ ID NO: 22862 - protein, 12 aa, Homo sapiens
  ( 271 )...( 282 ): >TF1B_HUMAN
QKSTKEVRSSIR

SEQ ID NO: 22863 - protein, 12 aa, Homo sapiens
  ( 272 )...( 283 ): >TF1B_HUMAN
KSTKEVRSSIRQ

SEQ ID NO: 22864 - protein, 12 aa, Homo sapiens
  ( 301 )...( 312 ): >TF1B_HUMAN
QIMKELNKRGRV

SEQ ID NO: 22865 - protein, 12 aa, Homo sapiens
  ( 302 )...( 313 ): >TF1B_HUMAN
IMKELNKRGRVL

SEQ ID NO: 22866 - protein, 12 aa, Homo sapiens
  ( 303 )...( 314 ): >TF1B_HUMAN
MKELNKRGRVLV

SEQ ID NO: 22867 - protein, 12 aa, Homo sapiens
  ( 304 )...( 315 ): >TF1B_HUMAN
KELNKRGRVLVN

SEQ ID NO: 22868 - protein, 12 aa, Homo sapiens
  ( 308 )...( 319 ): >TF1B_HUMAN
KRGRVLVNDAQK

SEQ ID NO: 22869 - protein, 12 aa, Homo sapiens
  ( 478 )...( 489 ): >TF1B_HUMAN
VSGLMRKVPRVS

SEQ ID NO: 22870 - protein, 12 aa, Homo sapiens
  ( 479 )...( 490 ): >TF1B_HUMAN
SGLMRKVPRVSL

SEQ ID NO: 22871 - protein, 12 aa, Homo sapiens
  ( 481 )...( 492 ): >TF1B_HUMAN
LMRKVPRVSLER

SEQ ID NO: 22872 - protein, 12 aa, Homo sapiens
  ( 482 )...( 493 ): >TF1B_HUMAN
MRKVPRVSLERL

SEQ ID NO: 22873 - protein, 12 aa, Homo sapiens
  ( 692 )...( 703 ): >TF1B_HUMAN
VVAKLSPANQRK

SEQ ID NO: 22874 - protein, 12 aa, Homo sapiens
  ( 765 )...( 776 ): >TF1B_HUMAN
VGRMFKQFNKLT

SEQ ID NO: 22875 - protein, 12 aa, Homo sapiens
  ( 54 )...( 65 ): >TF21_HUMAN
GGLGKRRKAPTK

SEQ ID NO: 22876 - protein, 12 aa, Homo sapiens
  ( 60 )...( 71 ): >TF21_HUMAN
RKAPTKKSPLSG

SEQ ID NO: 22877 - protein, 12 aa, Homo sapiens
  ( 76 )...( 87 ): >TF21_HUMAN
GKQVQRNAANAR

SEQ ID NO: 22878 - protein, 12 aa, Homo sapiens
  ( 83 )...( 94 ): >TF21_HUMAN
AANARERARMRV

SEQ ID NO: 22879 - protein, 12 aa, Homo sapiens
  ( 89 )...( 100 ): >TF21_HUMAN
RARMRVLSKAFS

SEQ ID NO: 22880 - protein, 12 aa, Homo sapiens
  ( 90 )...( 101 ): >TF21_HUMAN
ARMRVLSKAFSR

SEQ ID NO: 22881 - protein, 12 aa, Homo sapiens
  ( 92 )...( 103 ): >TF21_HUMAN
MRVLSKAFSRLK

SEQ ID NO: 22882 - protein, 12 aa, Homo sapiens
  ( 93 )...( 104 ): >TF21_HUMAN
RVLSKAFSRLKT

SEQ ID NO: 22883 - protein, 12 aa, Homo sapiens
  ( 275 )...( 286 ): >TF3A_HUMAN
ILCEVCRKTFKR

SEQ ID NO: 22884 - protein, 12 aa, Homo sapiens
  ( 343 )...( 354 ): >TF3A_HUMAN
GKTFAMKQSLTR

SEQ ID NO: 22885 - protein, 12 aa, Homo sapiens
  ( 370 )...( 381 ): >TF3A_HUMAN
VKKSREKRSLAS

SEQ ID NO: 22886 - protein, 12 aa, Homo sapiens
  ( 383 )...( 394 ): >TF3A_HUMAN
LSGYIPPKRKQG

SEQ ID NO: 22887 - protein, 12 aa, Homo sapiens
  ( 384 )...( 395 ): >TF3A_HUMAN
SGYIPPKRKQGQ

SEQ ID NO: 22888 - protein, 12 aa, Homo sapiens
  ( 385 )...( 396 ): >TF3A_HUMAN
GYIPPKRKQGQG

SEQ ID NO: 22889 - protein, 12 aa, Homo sapiens
  ( 386 )...( 397 ): >TF3A_HUMAN
YIPPKRKQGQGL

SEQ ID NO: 22890 - protein, 12 aa, Homo sapiens
  ( 387 )...( 398 ): >TF3A_HUMAN
IPPKRKQGQGLS

SEQ ID NO: 22891 - protein, 12 aa, Homo sapiens
  ( 388 )...( 399 ): >TF3A_HUMAN
PPKRKQGQGLSL

SEQ ID NO: 22892 - protein, 12 aa, Homo sapiens
  ( 389 )...( 400 ): >TF3A_HUMAN
PKRKQGQGLSLC

SEQ ID NO: 22893 - protein, 12 aa, Homo sapiens
  ( 390 )...( 401 ): >TF3A_HUMAN
KRKQGQGLSLCQ

SEQ ID NO: 22894 - protein, 12 aa, Homo sapiens
  ( 76 )...( 87 ): >TFAM_HUMAN
KTTELIRRIAQR

SEQ ID NO: 22895 - protein, 12 aa, Homo sapiens
  ( 138 )...( 149 ): >TFAM_HUMAN
LKRKAMTKKKEL

SEQ ID NO: 22896 - protein, 12 aa, Homo sapiens
  ( 139 )...( 150 ): >TFAM_HUMAN
KRKAMTKKKELT

SEQ ID NO: 22897 - protein, 12 aa, Homo sapiens
  ( 140 )...( 151 ): >TFAM_HUMAN
RKAMTKKKELTL

SEQ ID NO: 22898 - protein, 12 aa, Homo sapiens
  ( 145 )...( 156 ): >TFAM_HUMAN
KKKELTLLGKPK

SEQ ID NO: 22899 - protein, 12 aa, Homo sapiens
  ( 146 )...( 157 ): >TFAM_HUMAN
KKELTLLGKPKR

SEQ ID NO: 22900 - protein, 12 aa, Homo sapiens
  ( 147 )...( 158 ): >TFAM_HUMAN
KELTLLGKPKRP

SEQ ID NO: 22901 - protein, 12 aa, Homo sapiens
  ( 148 )...( 159 ): >TFAM_HUMAN
ELTLLGKPKRPR

SEQ ID NO: 22902 - protein, 12 aa, Homo sapiens
  ( 149 )...( 160 ): >TFAM_HUMAN
LTLLGKPKRPRS

SEQ ID NO: 22903 - protein, 12 aa, Homo sapiens
  ( 150 )...( 161 ): >TFAM_HUMAN
TLLGKPKRPRSA

SEQ ID NO: 22904 - protein, 12 aa, Homo sapiens
  ( 151 )...( 162 ): >TFAM_HUMAN
LLGKPKRPRSAY

SEQ ID NO: 22905 - protein, 12 aa, Homo sapiens
  ( 225 )...( 236 ): >TFAM_HUMAN
VGRKDLLRRTIK

SEQ ID NO: 22906 - protein, 12 aa, Homo sapiens
  ( 164 )...( 175 ): >TFE2_HUMAN
GSLDTQPKKVRK

SEQ ID NO: 22907 - protein, 12 aa, Homo sapiens
  ( 165 )...( 176 ): >TFE2_HUMAN
SLDTQPKKVRKV

SEQ ID NO: 22908 - protein, 12 aa, Homo sapiens
  ( 166 )...( 177 ): >TFE2_HUMAN
LDTQPKKVRKVP

SEQ ID NO: 22909 - protein, 12 aa, Homo sapiens
  ( 167 )...( 178 ): >TFE2_HUMAN
DTQPKKVRKVPP

SEQ ID NO: 22910 - protein, 12 aa, Homo sapiens
  ( 168 )...( 179 ): >TFE2_HUMAN
TQPKKVRKVPPG

SEQ ID NO: 22911 - protein, 12 aa, Homo sapiens
  ( 169 )...( 180 ): >TFE2_HUMAN
QPKKVRKVPPGL

SEQ ID NO: 22912 - protein, 12 aa, Homo sapiens
  ( 170 )...( 181 ): >TFE2_HUMAN
PKKVRKVPPGLP

SEQ ID NO: 22913 - protein, 12 aa, Homo sapiens
  ( 171 )...( 182 ): >TFE2_HUMAN
KKVRKVPPGLPS

SEQ ID NO: 22914 - protein, 12 aa, Homo sapiens
  ( 518 )...( 529 ): >TFE2_HUMAN
KKELKAPRARTS

SEQ ID NO: 22915 - protein, 12 aa, Homo sapiens
  ( 519 )...( 530 ): >TFE2_HUMAN
KELKAPRARTSP

SEQ ID NO: 22916 - protein, 12 aa, Homo sapiens
  ( 111 )...( 122 ): >TFE3_HUMAN
SSRVLLRQQLMR

SEQ ID NO: 22917 - protein, 12 aa, Homo sapiens
  ( 112 )...( 123 ): >TFE3_HUMAN
SRVLLRQQLMRA

SEQ ID NO: 22918 - protein, 12 aa, Homo sapiens
  ( 113 )...( 124 ): >TFE3_HUMAN
RVLLRQQLMRAQ

SEQ ID NO: 22919 - protein, 12 aa, Homo sapiens
  ( 337 )...( 348 ): >TFE3_HUMAN
EAKALLKERQKK

SEQ ID NO: 22920 - protein, 12 aa, Homo sapiens
  ( 381 )...( 392 ): >TFE3_HUMAN
MRWNKGTILKAS

SEQ ID NO: 22921 - protein, 12 aa, Homo sapiens
  ( 382 )...( 393 ): >TFE3_HUMAN
RWNKGTILKASV

SEQ ID NO: 22922 - protein, 12 aa, Homo sapiens
  ( 390 )...( 401 ): >TFE3_HUMAN
KASVDYIRKLQK

SEQ ID NO: 22923 - protein, 12 aa, Homo sapiens
  ( 589 )...( 600 ): >TFE3_HUMAN
KGGPVRMRPRLF

SEQ ID NO: 22924 - protein, 12 aa, Homo sapiens
  ( 2 )...( 13 ): >TFEB_HUMAN
ASRIGLRMQLMR

SEQ ID NO: 22925 - protein, 12 aa, Homo sapiens
  ( 270 )...( 281 ): >TFEB_HUMAN
VRWNKGTILKAS

SEQ ID NO: 22926 - protein, 12 aa, Homo sapiens
  ( 271 )...( 282 ): >TFEB_HUMAN
RWNKGTILKASV

SEQ ID NO: 22927 - protein, 12 aa, Homo sapiens
  ( 7 )...( 18 ): >TFH1_HUMAN
EVLLIVKKVRQK

SEQ ID NO: 22928 - protein, 12 aa, Homo sapiens
  ( 10 )...( 21 ): >TFH1_HUMAN
LIVKKVRQKKQD

SEQ ID NO: 22929 - protein, 12 aa, Homo sapiens
  ( 11 )...( 22 ): >TFH1_HUMAN
IVKKVRQKKQDG

SEQ ID NO: 22930 - protein, 12 aa, Homo sapiens
  ( 12 )...( 23 ): >TFH1_HUMAN
VKKVRQKKQDGA

SEQ ID NO: 22931 - protein, 12 aa, Homo sapiens
  ( 13 )...( 24 ): >TFH1_HUMAN
KKVRQKKQDGAL

SEQ ID NO: 22932 - protein, 12 aa, Homo sapiens
  ( 14 )...( 25 ): >TFH1_HUMAN
KVRQKKQDGALY

SEQ ID NO: 22933 - protein, 12 aa, Homo sapiens
  ( 195 )...( 206 ): >TFH1_HUMAN
SIFRTYPAVKMK

SEQ ID NO: 22934 - protein, 12 aa, Homo sapiens
  ( 370 )...( 381 ): >TFH1_HUMAN
KTIALNLKKSDR

SEQ ID NO: 22935 - protein, 12 aa, Homo sapiens
  ( 76 )...( 87 ): >TFH2_HUMAN
LKPNRLTCTLKL

SEQ ID NO: 22936 - protein, 12 aa, Homo sapiens
  ( 77 )...( 88 ): >TFH2_HUMAN
KPNRLTCTLKLL

SEQ ID NO: 22937 - protein, 12 aa, Homo sapiens
  ( 102 )...( 113 ): >TFH2_HUMAN
SQIGIIVTKSKR

SEQ ID NO: 22938 - protein, 12 aa, Homo sapiens
  ( 103 )...( 114 ): >TFH2_HUMAN
QIGIIVTKSKRA

SEQ ID NO: 22939 - protein, 12 aa, Homo sapiens
  ( 105 )...( 116 ): >TFH2_HUMAN
GIIVTKSKRAEK

SEQ ID NO: 22940 - protein, 12 aa, Homo sapiens
  ( 106 )...( 117 ): >TFH2_HUMAN
IIVTKSKRAEKL

SEQ ID NO: 22941 - protein, 12 aa, Homo sapiens
  ( 122 )...( 133 ): >TFH2_HUMAN
GNPRKHITSLKK

SEQ ID NO: 22942 - protein, 12 aa, Homo sapiens
  ( 124 )...( 135 ): >TFH2_HUMAN
PRKHITSLKKAV

SEQ ID NO: 22943 - protein, 12 aa, Homo sapiens
  ( 184 )...( 195 ): >TFH2_HUMAN
DLIKTLKAAKIR

SEQ ID NO: 22944 - protein, 12 aa, Homo sapiens
  ( 185 )...( 196 ): >TFH2_HUMAN
LIKTLKAAKIRV

SEQ ID NO: 22945 - protein, 12 aa, Homo sapiens
  ( 186 )...( 197 ): >TFH2_HUMAN
IKTLKAAKIRVS

SEQ ID NO: 22946 - protein, 12 aa, Homo sapiens
  ( 187 )...( 198 ): >TFH2_HUMAN
KTLKAAKIRVSV

SEQ ID NO: 22947 - protein, 12 aa, Homo sapiens
  ( 68 )...( 79 ): >TFH3_HUMAN
RFLYPGKNGRLG

SEQ ID NO: 22948 - protein, 12 aa, Homo sapiens
  ( 289 )...( 300 ): >TFH3_HUMAN
FKISLPPVLKAK

SEQ ID NO: 22949 - protein, 12 aa, Homo sapiens
  ( 290 )...( 301 ): >TFH3_HUMAN
KISLPPVLKAKK

SEQ ID NO: 22950 - protein, 12 aa, Homo sapiens
  ( 291 )...( 302 ): >TFH3_HUMAN
ISLPPVLKAKKR

SEQ ID NO: 22951 - protein, 12 aa, Homo sapiens
  ( 292 )...( 303 ): >TFH3_HUMAN
SLPPVLKAKKRN

SEQ ID NO: 22952 - protein, 11 aa, Homo sapiens
  ( 293 )...( 304 ): >TFH3_HUMAN
LPPVLKAKKRN

SEQ ID NO: 22953 - protein, 12 aa, Homo sapiens
  ( 6 )...( 17 ): >TFH4_HUMAN
SRGLNRVHLQCR

SEQ ID NO: 22954 - protein, 12 aa, Homo sapiens
  ( 368 )...( 379 ): >TFH4_HUMAN
LRTRAHPVMLKQ

SEQ ID NO: 22955 - protein, 12 aa, Homo sapiens
  ( 369 )...( 380 ): >TFH4_HUMAN
RTRAHPVMLKQT

SEQ ID NO: 22956 - protein, 12 aa, Homo sapiens
  ( 207 )...( 218 ): >TLE1_HUMAN
SLRGTDKRRNGP

SEQ ID NO: 22957 - protein, 12 aa, Homo sapiens
  ( 497 )...( 508 ): >TLE1_HUMAN
RHVYTGGKGCVK

SEQ ID NO: 22958 - protein, 12 aa, Homo sapiens
  ( 499 )...( 510 ): >TLE3_HUMAN
RHVYTGGKGCVK

SEQ ID NO: 22959 - protein, 12 aa, Homo sapiens
  ( 274 )...( 285 ): >TLE4_HUMAN
KTRLLKKDAPIS

SEQ ID NO: 22960 - protein, 12 aa, Homo sapiens
  ( 493 )...( 504 ): >TLE4_HUMAN
RHVYTGGKGCVK

SEQ ID NO: 22961 - protein, 12 aa, Homo sapiens
  ( 124 )...( 135 ): >TRLT_HUMAN
WGRRARRGVEVA

SEQ ID NO: 22962 - protein, 12 aa, Homo sapiens
  ( 125 )...( 136 ): >TRLT_HUMAN
GRRARRGVEVAA

SEQ ID NO: 22963 - protein, 12 aa, Homo sapiens
  ( 126 )...( 137 ): >TRLT_HUMAN
RRARRGVEVAAG

SEQ ID NO: 22964 - protein, 12 aa, Homo sapiens
  ( 178 )...( 189 ): >TRLT_HUMAN
LGILVCNLLKRK

SEQ ID NO: 22965 - protein, 12 aa, Homo sapiens
  ( 179 )...( 190 ): >TRLT_HUMAN
GILVCNLLKRKG

SEQ ID NO: 22966 - protein, 12 aa, Homo sapiens
  ( 180 )...( 191 ): >TRLT_HUMAN
ILVCNLLKRKGY

SEQ ID NO: 22967 - protein, 12 aa, Homo sapiens
  ( 181 )...( 192 ): >TRLT_HUMAN
LVCNLLKRKGYH

SEQ ID NO: 22968 - protein, 12 aa, Homo sapiens
  ( 186 )...( 197 ): >TRLT_HUMAN
LKRKGYHCTAHK

SEQ ID NO: 22969 - protein, 12 aa, Homo sapiens
  ( 343 )...( 354 ): >TRLT_HUMAN
TILSVGRFRVAR

SEQ ID NO: 22970 - protein, 12 aa, Homo sapiens
  ( 344 )...( 355 ): >TRLT_HUMAN
ILSVGRFRVARI

SEQ ID NO: 22971 - protein, 12 aa, Homo sapiens
  ( 345 )...( 356 ): >TRLT_HUMAN
LSVGRFRVARIP

SEQ ID NO: 22972 - protein, 12 aa, Homo sapiens
  ( 396 )...( 407 ): >TRLT_HUMAN
LGSGGSRTKWLK

SEQ ID NO: 22973 - protein, 12 aa, Homo sapiens
  ( 38 )...( 49 ): >TRX2_HUMAN
NGAERVRVALRR

SEQ ID NO: 22974 - protein, 12 aa, Homo sapiens
  ( 39 )...( 50 ): >TRX2_HUMAN
GAERVRVALRRG

SEQ ID NO: 22975 - protein, 12 aa, Homo sapiens
  ( 40 )...( 51 ): >TRX2_HUMAN
AERVRVALRRGG

SEQ ID NO: 22976 - protein, 12 aa, Homo sapiens
  ( 41 )...( 52 ): >TRX2_HUMAN
ERVRVALRRGGG

SEQ ID NO: 22977 - protein, 12 aa, Homo sapiens
  ( 65 )...( 76 ): >TRX2_HUMAN
TALLRLLGLRRG

SEQ ID NO: 22978 - protein, 12 aa, Homo sapiens
  ( 66 )...( 77 ): >TRX2_HUMAN
ALLRLLGLRRGL

SEQ ID NO: 22979 - protein, 12 aa, Homo sapiens
  ( 83 )...( 94 ): >TRX2_HUMAN
LWAGPRVQRGRG

SEQ ID NO: 22980 - protein, 12 aa, Homo sapiens
  ( 134 )...( 145 ): >TRX2_HUMAN
PSSLRSALRSQR

SEQ ID NO: 22981 - protein, 12 aa, Homo sapiens
  ( 135 )...( 146 ): >TRX2_HUMAN
SSLRSALRSQRG

SEQ ID NO: 22982 - protein, 12 aa, Homo sapiens
  ( 136 )...( 147 ): >TRX2_HUMAN
SLRSALRSQRGR

SEQ ID NO: 22983 - protein, 12 aa, Homo sapiens
  ( 137 )...( 148 ): >TRX2_HUMAN
LRSALRSQRGRA

SEQ ID NO: 22984 - protein, 12 aa, Homo sapiens
  ( 138 )...( 149 ): >TRX2_HUMAN
RSALRSQRGRAP

SEQ ID NO: 22985 - protein, 12 aa, Homo sapiens
  ( 139 )...( 150 ): >TRX2_HUMAN
SALRSQRGRAPR

SEQ ID NO: 22986 - protein, 12 aa, Homo sapiens
  ( 148 )...( 159 ): >TRX2_HUMAN
APRGRGRKHKTT

SEQ ID NO: 22987 - protein, 12 aa, Homo sapiens
  ( 149 )...( 160 ): >TRX2_HUMAN
PRGRGRKHKTTP

SEQ ID NO: 22988 - protein, 12 aa, Homo sapiens
  ( 150 )...( 161 ): >TRX2_HUMAN
RGRGRKHKTTPL

SEQ ID NO: 22989 - protein, 12 aa, Homo sapiens
  ( 151 )...( 162 ): >TRX2_HUMAN
GRGRKHKTTPLP

SEQ ID NO: 22990 - protein, 12 aa, Homo sapiens
  ( 152 )...( 163 ): >TRX2_HUMAN
RGRKHKTTPLPP

SEQ ID NO: 22991 - protein, 12 aa, Homo sapiens
  ( 172 )...( 183 ): >TRX2_HUMAN
TPPKTPARKRGE

SEQ ID NO: 22992 - protein, 12 aa, Homo sapiens
  ( 196 )...( 207 ): >TRX2_HUMAN
LLRRAQAPQAPR

SEQ ID NO: 22993 - protein, 12 aa, Homo sapiens
  ( 197 )...( 208 ): >TRX2_HUMAN
LRRAQAPQAPRS

SEQ ID NO: 22994 - protein, 12 aa, Homo sapiens
  ( 225 )...( 236 ): >TRX2_HUMAN
GRPAGPCRRKQQ

SEQ ID NO: 22995 - protein, 12 aa, Homo sapiens
  ( 226 )...( 237 ): >TRX2_HUMAN
RPAGPCRRKQQA

SEQ ID NO: 22996 - protein, 12 aa, Homo sapiens
  ( 228 )...( 239 ): >TRX2_HUMAN
AGPCRRKQQAVV

SEQ ID NO: 22997 - protein, 12 aa, Homo sapiens
  ( 229 )...( 240 ): >TRX2_HUMAN
GPCRRKQQAVVV

SEQ ID NO: 22998 - protein, 12 aa, Homo sapiens
  ( 230 )...( 241 ): >TRX2_HUMAN
PCRRKQQAVVVA

SEQ ID NO: 22999 - protein, 12 aa, Homo sapiens
  ( 301 )...( 312 ): >TRX2_HUMAN
LPFVIKFVSRAK

SEQ ID NO: 23000 - protein, 12 aa, Homo sapiens
  ( 302 )...( 313 ): >TRX2_HUMAN
PFVIKFVSRAKK

SEQ ID NO: 23001 - protein, 12 aa, Homo sapiens
  ( 303 )...( 314 ): >TRX2_HUMAN
FVIKFVSRAKKV

SEQ ID NO: 23002 - protein, 12 aa, Homo sapiens
  ( 304 )...( 315 ): >TRX2_HUMAN
VIKFVSRAKKVK

SEQ ID NO: 23003 - protein, 12 aa, Homo sapiens
  ( 305 )...( 316 ): >TRX2_HUMAN
IKFVSRAKKVKM

SEQ ID NO: 23004 - protein, 12 aa, Homo sapiens
  ( 306 )...( 317 ): >TRX2_HUMAN
KFVSRAKKVKMG

SEQ ID NO: 23005 - protein, 12 aa, Homo sapiens
  ( 307 )...( 318 ): >TRX2_HUMAN
FVSRAKKVKMGQ

SEQ ID NO: 23006 - protein, 12 aa, Homo sapiens
  ( 308 )...( 319 ): >TRX2_HUMAN
VSRAKKVKMGQL

SEQ ID NO: 23007 - protein, 12 aa, Homo sapiens
  ( 309 )...( 320 ): >TRX2_HUMAN
SRAKKVKMGQLS

SEQ ID NO: 23008 - protein, 12 aa, Homo sapiens
  ( 310 )...( 321 ): >TRX2_HUMAN
RAKKVKMGQLSL

SEQ ID NO: 23009 - protein, 12 aa, Homo sapiens
  ( 312 )...( 323 ): >TRX2_HUMAN
KKVKMGQLSLGL

SEQ ID NO: 23010 - protein, 12 aa, Homo sapiens
  ( 460 )...( 471 ): >TRX2_HUMAN
VVPATCSRKRGR

SEQ ID NO: 23011 - protein, 12 aa, Homo sapiens
  ( 464 )...( 475 ): >TRX2_HUMAN
TCSRKRGRPPLT

SEQ ID NO: 23012 - protein, 12 aa, Homo sapiens
  ( 466 )...( 477 ): >TRX2_HUMAN
SRKRGRPPLTPS

SEQ ID NO: 23013 - protein, 12 aa, Homo sapiens
  ( 469 )...( 480 ): >TRX2_HUMAN
RGRPPLTPSQRA

SEQ ID NO: 23014 - protein, 12 aa, Homo sapiens
  ( 514 )...( 525 ): >TRX2_HUMAN
APKSTTFLKNIR

SEQ ID NO: 23015 - protein, 12 aa, Homo sapiens
  ( 530 )...( 541 ): >TRX2_HUMAN
PVVSARSSRVIK

SEQ ID NO: 23016 - protein, 12 aa, Homo sapiens
  ( 531 )...( 542 ): >TRX2_HUMAN
VVSARSSRVIKT

SEQ ID NO: 23017 - protein, 12 aa, Homo sapiens
  ( 532 )...( 543 ): >TRX2_HUMAN
VSARSSRVIKTP

SEQ ID NO: 23018 - protein, 12 aa, Homo sapiens
  ( 533 )...( 544 ): >TRX2_HUMAN
SARSSRVIKTPR

SEQ ID NO: 23019 - protein, 12 aa, Homo sapiens
  ( 637 )...( 648 ): >TRX2_HUMAN
PATSSRRPLLLR

SEQ ID NO: 23020 - protein, 12 aa, Homo sapiens
  ( 638 )...( 649 ): >TRX2_HUMAN
ATSSRRPLLLRA

SEQ ID NO: 23021 - protein, 12 aa, Homo sapiens
  ( 639 )...( 650 ): >TRX2_HUMAN
TSSRRPLLLRAP

SEQ ID NO: 23022 - protein, 12 aa, Homo sapiens
  ( 790 )...( 801 ): >TRX2_HUMAN
EKMFSLLKRAKV

SEQ ID NO: 23023 - protein, 12 aa, Homo sapiens
  ( 791 )...( 802 ): >TRX2_HUMAN
KMFSLLKRAKVQ

SEQ ID NO: 23024 - protein, 12 aa, Homo sapiens
  ( 792 )...( 803 ): >TRX2_HUMAN
MFSLLKRAKVQL

SEQ ID NO: 23025 - protein, 12 aa, Homo sapiens
  ( 793 )...( 804 ): >TRX2_HUMAN
FSLLKRAKVQLF

SEQ ID NO: 23026 - protein, 12 aa, Homo sapiens
  ( 794 )...( 805 ): >TRX2_HUMAN
SLLKRAKVQLFK

SEQ ID NO: 23027 - protein, 12 aa, Homo sapiens
  ( 795 )...( 806 ): >TRX2_HUMAN
LLKRAKVQLFKI

SEQ ID NO: 23028 - protein, 12 aa, Homo sapiens
  ( 796 )...( 807 ): >TRX2_HUMAN
LKRAKVQLFKID

SEQ ID NO: 23029 - protein, 12 aa, Homo sapiens
  ( 862 )...( 873 ): >TRX2_HUMAN
PVQGPRIKHVCR

SEQ ID NO: 23030 - protein, 12 aa, Homo sapiens
  ( 863 )...( 874 ): >TRX2_HUMAN
VQGPRIKHVCRH

SEQ ID NO: 23031 - protein, 12 aa, Homo sapiens
  ( 864 )...( 875 ): >TRX2_HUMAN
QGPRIKHVCRHA

SEQ ID NO: 23032 - protein, 12 aa, Homo sapiens
  ( 866 )...( 877 ): >TRX2_HUMAN
PRIKHVCRHAAV

SEQ ID NO: 23033 - protein, 12 aa, Homo sapiens
  ( 867 )...( 878 ): >TRX2_HUMAN
RIKHVCRHAAVA

SEQ ID NO: 23034 - protein, 12 aa, Homo sapiens
  ( 915 )...( 926 ): >TRX2_HUMAN
TESVPSRSRRGK

SEQ ID NO: 23035 - protein, 12 aa, Homo sapiens
  ( 916 )...( 927 ): >TRX2_HUMAN
ESVPSRSRRGKV

SEQ ID NO: 23036 - protein, 12 aa, Homo sapiens
  ( 917 )...( 928 ): >TRX2_HUMAN
SVPSRSRRGKVE

SEQ ID NO: 23037 - protein, 12 aa, Homo sapiens
  ( 918 )...( 929 ): >TRX2_HUMAN
VPSRSRRGKVEA

SEQ ID NO: 23038 - protein, 12 aa, Homo sapiens
  ( 919 )...( 930 ): >TRX2_HUMAN
PSRSRRGKVEAA

SEQ ID NO: 23039 - protein, 12 aa, Homo sapiens
  ( 920 )...( 931 ): >TRX2_HUMAN
SRSRRGKVEAAG

SEQ ID NO: 23040 - protein, 12 aa, Homo sapiens
  ( 921 )...( 932 ): >TRX2_HUMAN
RSRRGKVEAAGP

SEQ ID NO: 23041 - protein, 12 aa, Homo sapiens
  ( 1009 )...( 1020 ): >TRX2_HUMAN
EARKMERLAKKG

SEQ ID NO: 23042 - protein, 12 aa, Homo sapiens
  ( 1012 )...( 1023 ): >TRX2_HUMAN
KMERLAKKGRTI

SEQ ID NO: 23043 - protein, 12 aa, Homo sapiens
  ( 1013 )...( 1024 ): >TRX2_HUMAN
MERLAKKGRTIV

SEQ ID NO: 23044 - protein, 12 aa, Homo sapiens
  ( 1014 )...( 1025 ): >TRX2_HUMAN
ERLAKKGRTIVK

SEQ ID NO: 23045 - protein, 12 aa, Homo sapiens
  ( 1015 )...( 1026 ): >TRX2_HUMAN
RLAKKGRTIVKT

SEQ ID NO: 23046 - protein, 12 aa, Homo sapiens
  ( 1016 )...( 1027 ): >TRX2_HUMAN
LAKKGRTIVKTL

SEQ ID NO: 23047 - protein, 12 aa, Homo sapiens
  ( 1017 )...( 1028 ): >TRX2_HUMAN
AKKGRTIVKTLL

SEQ ID NO: 23048 - protein, 12 aa, Homo sapiens
  ( 1018 )...( 1029 ): >TRX2_HUMAN
KKGRTIVKTLLP

SEQ ID NO: 23049 - protein, 12 aa, Homo sapiens
  ( 1019 )...( 1030 ): >TRX2_HUMAN
KGRTIVKTLLPW

SEQ ID NO: 23050 - protein, 12 aa, Homo sapiens
  ( 1069 )...( 1080 ): >TRX2_HUMAN
SLLQRKSARRCV

SEQ ID NO: 23051 - protein, 12 aa, Homo sapiens
  ( 1122 )...( 1133 ): >TRX2_HUMAN
SRPRKPTLQPVL

SEQ ID NO: 23052 - protein, 12 aa, Homo sapiens
  ( 1125 )...( 1136 ): >TRX2_HUMAN
RKPTLQPVLQLK

SEQ ID NO: 23053 - protein, 12 aa, Homo sapiens
  ( 1128 )...( 1139 ): >TRX2_HUMAN
TLQPVLQLKARR

SEQ ID NO: 23054 - protein, 12 aa, Homo sapiens
  ( 1254 )...( 1265 ): >TRX2_HUMAN
VCGRKGRGSKHL

SEQ ID NO: 23055 - protein, 12 aa, Homo sapiens
  ( 1255 )...( 1266 ): >TRX2_HUMAN
CGRKGRGSKHLL

SEQ ID NO: 23056 - protein, 12 aa, Homo sapiens
  ( 1256 )...( 1267 ): >TRX2_HUMAN
GRKGRGSKHLLE

SEQ ID NO: 23057 - protein, 12 aa, Homo sapiens
  ( 1257 )...( 1268 ): >TRX2_HUMAN
RKGRGSKHLLEC

SEQ ID NO: 23058 - protein, 12 aa, Homo sapiens
  ( 1280 )...( 1291 ): >TRX2_HUMAN
LGPSYPTRATRK

SEQ ID NO: 23059 - protein, 12 aa, Homo sapiens
  ( 1281 )...( 1292 ): >TRX2_HUMAN
GPSYPTRATRKR

SEQ ID NO: 23060 - protein, 12 aa, Homo sapiens
  ( 1487 )...( 1498 ): >TRX2_HUMAN
RRAGGQMKGLLL

SEQ ID NO: 23061 - protein, 12 aa, Homo sapiens
  ( 1517 )...( 1528 ): >TRX2_HUMAN
RRSTRLPNGVLP

SEQ ID NO: 23062 - protein, 12 aa, Homo sapiens
  ( 1626 )...( 1637 ): >TRX2_HUMAN
LKNVHAAVARGR

SEQ ID NO: 23063 - protein, 12 aa, Homo sapiens
  ( 1627 )...( 1638 ): >TRX2_HUMAN
KNVHAAVARGRQ

SEQ ID NO: 23064 - protein, 12 aa, Homo sapiens
  ( 1629 )...( 1640 ): >TRX2_HUMAN
VHAAVARGRQMR

SEQ ID NO: 23065 - protein, 12 aa, Homo sapiens
  ( 1630 )...( 1641 ): >TRX2_HUMAN
HAAVARGRQMRC

SEQ ID NO: 23066 - protein, 12 aa, Homo sapiens
  ( 1635 )...( 1646 ): >TRX2_HUMAN
RGRQMRCELCLK

SEQ ID NO: 23067 - protein, 12 aa, Homo sapiens
  ( 1712 )...( 1723 ): >TRX2_HUMAN
GINFKRKFLTGL

SEQ ID NO: 23068 - protein, 12 aa, Homo sapiens
  ( 2269 )...( 2280 ): >TRX2_HUMAN
ASPPRQAIRVKR

SEQ ID NO: 23069 - protein, 12 aa, Homo sapiens
  ( 2270 )...( 2281 ): >TRX2_HUMAN
SPPRQAIRVKRV

SEQ ID NO: 23070 - protein, 12 aa, Homo sapiens
  ( 2271 )...( 2282 ): >TRX2_HUMAN
PPRQAIRVKRVS

SEQ ID NO: 23071 - protein, 12 aa, Homo sapiens
  ( 2272 )...( 2283 ): >TRX2_HUMAN
PRQAIRVKRVST

SEQ ID NO: 23072 - protein, 12 aa, Homo sapiens
  ( 2273 )...( 2284 ): >TRX2_HUMAN
RQAIRVKRVSTF

SEQ ID NO: 23073 - protein, 12 aa, Homo sapiens
  ( 2274 )...( 2285 ): >TRX2_HUMAN
QAIRVKRVSTFS

SEQ ID NO: 23074 - protein, 12 aa, Homo sapiens
  ( 2275 )...( 2286 ): >TRX2_HUMAN
AIRVKRVSTFSG

SEQ ID NO: 23075 - protein, 12 aa, Homo sapiens
  ( 2276 )...( 2287 ): >TRX2_HUMAN
IRVKRVSTFSGR

SEQ ID NO: 23076 - protein, 12 aa, Homo sapiens
  ( 2277 )...( 2288 ): >TRX2_HUMAN
RVKRVSTFSGRS

SEQ ID NO: 23077 - protein, 12 aa, Homo sapiens
  ( 2278 )...( 2289 ): >TRX2_HUMAN
VKRVSTFSGRSP

SEQ ID NO: 23078 - protein, 12 aa, Homo sapiens
  ( 2316 )...( 2327 ): >TRX2_HUMAN
LGSGGFSRVRMK

SEQ ID NO: 23079 - protein, 12 aa, Homo sapiens
  ( 2317 )...( 2328 ): >TRX2_HUMAN
GSGGFSRVRMKT

SEQ ID NO: 23080 - protein, 12 aa, Homo sapiens
  ( 2319 )...( 2330 ): >TRX2_HUMAN
GGFSRVRMKTPT

SEQ ID NO: 23081 - protein, 12 aa, Homo sapiens
  ( 2320 )...( 2331 ): >TRX2_HUMAN
GFSRVRMKTPTV

SEQ ID NO: 23082 - protein, 12 aa, Homo sapiens
  ( 2321 )...( 2332 ): >TRX2_HUMAN
FSRVRMKTPTVR

SEQ ID NO: 23083 - protein, 12 aa, Homo sapiens
  ( 2322 )...( 2333 ): >TRX2_HUMAN
SRVRMKTPTVRG

SEQ ID NO: 23084 - protein, 12 aa, Homo sapiens
  ( 2323 )...( 2334 ): >TRX2_HUMAN
RVRMKTPTVRGV

SEQ ID NO: 23085 - protein, 12 aa, Homo sapiens
  ( 2324 )...( 2335 ): >TRX2_HUMAN
VRMKTPTVRGVL

SEQ ID NO: 23086 - protein, 12 aa, Homo sapiens
  ( 2441 )...( 2452 ): >TRX2_HUMAN
KVQEARGHARLR

SEQ ID NO: 23087 - protein, 12 aa, Homo sapiens
  ( 2547 )...( 2558 ): >TRX2_HUMAN
VQLRSTRRATSL

SEQ ID NO: 23088 - protein, 12 aa, Homo sapiens
  ( 2570 )...( 2581 ): >TRX2_HUMAN
KKTSKEAVGVYR

SEQ ID NO: 23089 - protein, 12 aa, Homo sapiens
  ( 2584 )...( 2595 ): >TRX2_HUMAN
IHGRGLFCKRNI

SEQ ID NO: 23090 - protein, 12 aa, Homo sapiens
  ( 2668 )...( 2679 ): >TRX2_HUMAN
GQKHIVIFALRR

SEQ ID NO: 23091 - protein, 12 aa, Homo sapiens
  ( 2669 )...( 2680 ): >TRX2_HUMAN
QKHIVIFALRRI

SEQ ID NO: 23092 - protein, 12 aa, Homo sapiens
  ( 254 )...( 265 ): >TTF1_HUMAN
SPRRVAVPVLVK

SEQ ID NO: 23093 - protein, 12 aa, Homo sapiens
  ( 26 )...( 37 ): >TWST_HUMAN
RQQPPSGKRGGR

SEQ ID NO: 23094 - protein, 12 aa, Homo sapiens
  ( 27 )...( 38 ): >TWST_HUMAN
QQPPSGKRGGRK

SEQ ID NO: 23095 - protein, 12 aa, Homo sapiens
  ( 143 )...( 154 ): >TWST_HUMAN
LSKIQTLKLAAR

SEQ ID NO: 23096 - protein, 12 aa, Homo sapiens
  ( 144 )...( 155 ): >TWST_HUMAN
SKIQTLKLAARY

SEQ ID NO: 23097 - protein, 12 aa, Homo sapiens
  ( 145 )...( 156 ): >TWST_HUMAN
KIQTLKLAARYI

SEQ ID NO: 23098 - protein, 12 aa, Homo sapiens
  ( 157 )...( 168 ): >TX21_HUMAN
MIITKQGRRMFP

SEQ ID NO: 23099 - protein, 12 aa, Homo sapiens
  ( 239 )...( 250 ): >TX21_HUMAN
FGKLKLTNNKGA

SEQ ID NO: 23100 - protein, 12 aa, Homo sapiens
  ( 331 )...( 342 ): >TYY1_HUMAN
GKAFVESSKLKR

SEQ ID NO: 23101 - protein, 12 aa, Homo sapiens
  ( 285 )...( 296 ): >USF1_HUMAN
LKNKNLLLRAQL

SEQ ID NO: 23102 - protein, 12 aa, Homo sapiens
  ( 32 )...( 43 ): >WS14_HUMAN
PSLRRSAGGLLR

SEQ ID NO: 23103 - protein, 12 aa, Homo sapiens
  ( 33 )...( 44 ): >WS14_HUMAN
SLRRSAGGLLRS

SEQ ID NO: 23104 - protein, 12 aa, Homo sapiens
  ( 34 )...( 45 ): >WS14_HUMAN
LRRSAGGLLRSQ

SEQ ID NO: 23105 - protein, 12 aa, Homo sapiens
  ( 35 )...( 46 ): >WS14_HUMAN
RRSAGGLLRSQV

SEQ ID NO: 23106 - protein, 12 aa, Homo sapiens
  ( 109 )...( 120 ): >WS14_HUMAN
FKGLKLLCRDKI

SEQ ID NO: 23107 - protein, 12 aa, Homo sapiens
  ( 110 )...( 121 ): >WS14_HUMAN
KGLKLLCRDKIR

SEQ ID NO: 23108 - protein, 12 aa, Homo sapiens
  ( 111 )...( 122 ): >WS14_HUMAN
GLKLLCRDKIRL

SEQ ID NO: 23109 - protein, 12 aa, Homo sapiens
  ( 133 )...( 144 ): >WS14_HUMAN
QYVKRRKSPVCG

SEQ ID NO: 23110 - protein, 12 aa, Homo sapiens
  ( 135 )...( 146 ): >WS14_HUMAN
VKRRKSPVCGFV

SEQ ID NO: 23111 - protein, 12 aa, Homo sapiens
  ( 136 )...( 147 ): >WS14_HUMAN
KRRKSPVCGFVT

SEQ ID NO: 23112 - protein, 12 aa, Homo sapiens
  ( 301 )...( 312 ): >WT1_HUMAN
RRVPGVAPTLVR

SEQ ID NO: 23113 - protein, 12 aa, Homo sapiens
  ( 50 )...( 61 ): >XBP1_HUMAN
ASGGLPQARKRQ

SEQ ID NO: 23114 - protein, 12 aa, Homo sapiens
  ( 51 )...( 62 ): >XBP1_HUMAN
SGGLPQARKRQR

SEQ ID NO: 23115 - protein, 12 aa, Homo sapiens
  ( 52 )...( 63 ): >XBP1_HUMAN
GGLPQARKRQRL

SEQ ID NO: 23116 - protein, 12 aa, Homo sapiens
  ( 53 )...( 64 ): >XBP1_HUMAN
GLPQARKRQRLT

SEQ ID NO: 23117 - protein, 12 aa, Homo sapiens
  ( 75 )...( 86 ): >XBP1_HUMAN
RKLKNRVAAQTA

SEQ ID NO: 23118 - protein, 12 aa, Homo sapiens
  ( 76 )...( 87 ): >XBP1_HUMAN
KLKNRVAAQTAR

SEQ ID NO: 23119 - protein, 12 aa, Homo sapiens
  ( 78 )...( 89 ): >XBP1_HUMAN
KNRVAAQTARDR

SEQ ID NO: 23120 - protein, 12 aa, Homo sapiens
  ( 79 )...( 90 ): >XBP1_HUMAN
NRVAAQTARDRK

SEQ ID NO: 23121 - protein, 12 aa, Homo sapiens
  ( 80 )...( 91 ): >XBP1_HUMAN
RVAAQTARDRKK

SEQ ID NO: 23122 - protein, 12 aa, Homo sapiens
  ( 81 )...( 92 ): >XBP1_HUMAN
VAAQTARDRKKA

SEQ ID NO: 23123 - protein, 12 aa, Homo sapiens
  ( 82 )...( 93 ): >XBP1_HUMAN
AAQTARDRKKAR

SEQ ID NO: 23124 - protein, 12 aa, Homo sapiens
  ( 163 )...( 174 ): >XPB_HUMAN
YGKVKLVLKHNR

SEQ ID NO: 23125 - protein, 12 aa, Homo sapiens
  ( 164 )...( 175 ): >XPB_HUMAN
GKVKLVLKHNRY

SEQ ID NO: 23126 - protein, 12 aa, Homo sapiens
  ( 321 )...( 332 ): >XPB_HUMAN
EKSLRKMFGNGR

SEQ ID NO: 23127 - protein, 12 aa, Homo sapiens
  ( 322 )...( 333 ): >XPB_HUMAN
KSLRKMFGNGRA

SEQ ID NO: 23128 - protein, 12 aa, Homo sapiens
  ( 323 )...( 334 ): >XPB_HUMAN
SLRKMFGNGRAR

SEQ ID NO: 23129 - protein, 12 aa, Homo sapiens
  ( 324 )...( 335 ): >XPB_HUMAN
LRKMFGNGRARS

SEQ ID NO: 23130 - protein, 12 aa, Homo sapiens
  ( 325 )...( 336 ): >XPB_HUMAN
RKMFGNGRARSG

SEQ ID NO: 23131 - protein, 12 aa, Homo sapiens
  ( 351 )...( 362 ): >XPB_HUMAN
VTAACTVRKRCL

SEQ ID NO: 23132 - protein, 12 aa, Homo sapiens
  ( 352 )...( 363 ): >XPB_HUMAN
TAACTVRKRCLV

SEQ ID NO: 23133 - protein, 12 aa, Homo sapiens
  ( 353 )...( 364 ): >XPB_HUMAN
AACTVRKRCLVL

SEQ ID NO: 23134 - protein, 12 aa, Homo sapiens
  ( 355 )...( 366 ): >XPB_HUMAN
CTVRKRCLVLGN

SEQ ID NO: 23135 - protein, 12 aa, Homo sapiens
  ( 356 )...( 367 ): >XPB_HUMAN
TVRKRCLVLGNS

SEQ ID NO: 23136 - protein, 12 aa, Homo sapiens
  ( 357 )...( 368 ): >XPB_HUMAN
VRKRCLVLGNSA

SEQ ID NO: 23137 - protein, 12 aa, Homo sapiens
  ( 358 )...( 369 ): >XPB_HUMAN
RKRCLVLGNSAV

SEQ ID NO: 23138 - protein, 12 aa, Homo sapiens
  ( 443 )...( 454 ): >XPB_HUMAN
VHTIPAKMFRRV

SEQ ID NO: 23139 - protein, 12 aa, Homo sapiens
  ( 444 )...( 455 ): >XPB_HUMAN
HTIPAKMFRRVL

SEQ ID NO: 23140 - protein, 12 aa, Homo sapiens
  ( 445 )...( 456 ): >XPB_HUMAN
TIPAKMFRRVLT

SEQ ID NO: 23141 - protein, 12 aa, Homo sapiens
  ( 447 )...( 458 ): >XPB_HUMAN
PAKMFRRVLTIV

SEQ ID NO: 23142 - protein, 12 aa, Homo sapiens
  ( 448 )...( 459 ): >XPB_HUMAN
AKMFRRVLTIVQ

SEQ ID NO: 23143 - protein, 12 aa, Homo sapiens
  ( 449 )...( 460 ): >XPB_HUMAN
KMFRRVLTIVQA

SEQ ID NO: 23144 - protein, 12 aa, Homo sapiens
  ( 452 )...( 463 ): >XPB_HUMAN
RRVLTIVQAHCK

SEQ ID NO: 23145 - protein, 12 aa, Homo sapiens
  ( 520 )...( 531 ): >XPB_HUMAN
REYVAIKTKKRI

SEQ ID NO: 23146 - protein, 12 aa, Homo sapiens
  ( 521 )...( 532 ): >XPB_HUMAN
EYVAIKTKKRIL

SEQ ID NO: 23147 - protein, 12 aa, Homo sapiens
  ( 522 )...( 533 ): >XPB_HUMAN
YVAIKTKKRILL

SEQ ID NO: 23148 - protein, 12 aa, Homo sapiens
  ( 523 )...( 534 ): >XPB_HUMAN
VAIKTKKRILLY

SEQ ID NO: 23149 - protein, 12 aa, Homo sapiens
  ( 524 )...( 535 ): >XPB_HUMAN
AIKTKKRILLYT

SEQ ID NO: 23150 - protein, 12 aa, Homo sapiens
  ( 525 )...( 536 ): >XPB_HUMAN
IKTKKRILLYTM

SEQ ID NO: 23151 - protein, 12 aa, Homo sapiens
  ( 527 )...( 538 ): >XPB_HUMAN
TKKRILLYTMNP

SEQ ID NO: 23152 - protein, 12 aa, Homo sapiens
  ( 632 )...( 643 ): >XPB_HUMAN
SRRQEAQRLGRV

SEQ ID NO: 23153 - protein, 12 aa, Homo sapiens
  ( 633 )...( 644 ): >XPB_HUMAN
RRQEAQRLGRVL

SEQ ID NO: 23154 - protein, 12 aa, Homo sapiens
  ( 634 )...( 645 ): >XPB_HUMAN
RQEAQRLGRVLR

SEQ ID NO: 23155 - protein, 12 aa, Homo sapiens
  ( 636 )...( 647 ): >XPB_HUMAN
EAQRLGRVLRAK

SEQ ID NO: 23156 - protein, 12 aa, Homo sapiens
  ( 640 )...( 651 ): >XPB_HUMAN
LGRVLRAKKGMV

SEQ ID NO: 23157 - protein, 12 aa, Homo sapiens
  ( 641 )...( 652 ): >XPB_HUMAN
GRVLRAKKGMVA

SEQ ID NO: 23158 - protein, 12 aa, Homo sapiens
  ( 642 )...( 653 ): >XPB_HUMAN
RVLRAKKGMVAE

SEQ ID NO: 23159 - protein, 12 aa, Homo sapiens
  ( 736 )...( 747 ): >XPB_HUMAN
RSSQASRRFGTM

SEQ ID NO: 23160 - protein, 12 aa, Homo sapiens
  ( 359 )...( 370 ): >XPD_HUMAN
SGLAQRVCIQRK

SEQ ID NO: 23161 - protein, 12 aa, Homo sapiens
  ( 360 )...( 371 ): >XPD_HUMAN
GLAQRVCIQRKP

SEQ ID NO: 23162 - protein, 12 aa, Homo sapiens
  ( 361 )...( 372 ): >XPD_HUMAN
LAQRVCIQRKPL

SEQ ID NO: 23163 - protein, 12 aa, Homo sapiens
  ( 626 )...( 637 ): >XPD_HUMAN
VYTQSRILKARL

SEQ ID NO: 23164 - protein, 12 aa, Homo sapiens
  ( 658 )...( 669 ): >XPD_HUMAN
RHAAQCVGRAIR

SEQ ID NO: 23165 - protein, 12 aa, Homo sapiens
  ( 290 )...( 301 ): >Y211_HUMAN
ALQAKRVASVTK

SEQ ID NO: 23166 - protein, 12 aa, Homo sapiens
  ( 330 )...( 341 ): >Y211_HUMAN
KSPRSPLEATRK

SEQ ID NO: 23167 - protein, 12 aa, Homo sapiens
  ( 333 )...( 344 ): >Y211_HUMAN
RSPLEATRKSIK

SEQ ID NO: 23168 - protein, 12 aa, Homo sapiens
  ( 368 )...( 379 ): >Y211_HUMAN
SPPAIPKVRIKT

SEQ ID NO: 23169 - protein, 12 aa, Homo sapiens
  ( 369 )...( 380 ): >Y211_HUMAN
PPAIPKVRIKTI

SEQ ID NO: 23170 - protein, 12 aa, Homo sapiens
  ( 370 )...( 381 ): >Y211_HUMAN
PAIPKVRIKTIK

SEQ ID NO: 23171 - protein, 12 aa, Homo sapiens
  ( 371 )...( 382 ): >Y211_HUMAN
AIPKVRIKTIKT

SEQ ID NO: 23172 - protein, 12 aa, Homo sapiens
  ( 372 )...( 383 ): >Y211_HUMAN
IPKVRIKTIKTS

SEQ ID NO: 23173 - protein, 12 aa, Homo sapiens
  ( 373 )...( 384 ): >Y211_HUMAN
PKVRIKTIKTSS

SEQ ID NO: 23174 - protein, 12 aa, Homo sapiens
  ( 374 )...( 385 ): >Y211_HUMAN
KVRIKTIKTSSG

SEQ ID NO: 23175 - protein, 12 aa, Homo sapiens
  ( 517 )...( 528 ): >Y211_HUMAN
ASVTAKSSVQRR

SEQ ID NO: 23176 - protein, 12 aa, Homo sapiens
  ( 518 )...( 529 ): >Y211_HUMAN
SVTAKSSVQRRS

SEQ ID NO: 23177 - protein, 12 aa, Homo sapiens
  ( 519 )...( 530 ): >Y211_HUMAN
VTAKSSVQRRSQ

SEQ ID NO: 23178 - protein, 12 aa, Homo sapiens
  ( 520 )...( 531 ): >Y211_HUMAN
TAKSSVQRRSQP

SEQ ID NO: 23179 - protein, 12 aa, Homo sapiens
  ( 521 )...( 532 ): >Y211_HUMAN
AKSSVQRRSQPQ

SEQ ID NO: 23180 - protein, 12 aa, Homo sapiens
  ( 600 )...( 611 ): >Y211_HUMAN
KSLSQHYGRRSV

SEQ ID NO: 23181 - protein, 12 aa, Homo sapiens
  ( 703 )...( 714 ): >Y211_HUMAN
PVRLIRYSIKCL

SEQ ID NO: 23182 - protein, 12 aa, Homo sapiens
  ( 791 )...( 802 ): >Y211_HUMAN
LHYARKVGYRCI

SEQ ID NO: 23183 - protein, 12 aa, Homo sapiens
  ( 971 )...( 982 ): >Y211_HUMAN
RVEARPRLRNTG

SEQ ID NO: 23184 - protein, 12 aa, Homo sapiens
  ( 11 )...( 22 ): >Y222_HUMAN
LRRGPSPTRAGR

SEQ ID NO: 23185 - protein, 12 aa, Homo sapiens
  ( 12 )...( 23 ): >Y222_HUMAN
RRGPSPTRAGRG

SEQ ID NO: 23186 - protein, 12 aa, Homo sapiens
  ( 70 )...( 81 ): >Y222_HUMAN
RASQKGNLKIHI

SEQ ID NO: 23187 - protein, 12 aa, Homo sapiens
  ( 71 )...( 82 ): >Y222_HUMAN
ASQKGNLKIHIR

SEQ ID NO: 23188 - protein, 12 aa, Homo sapiens
  ( 147 )...( 158 ): >Y222_HUMAN
DSGRVLLRSSKK

SEQ ID NO: 23189 - protein, 12 aa, Homo sapiens
  ( 148 )...( 159 ): >Y222_HUMAN
SGRVLLRSSKKG

SEQ ID NO: 23190 - protein, 12 aa, Homo sapiens
  ( 149 )...( 160 ): >Y222_HUMAN
GRVLLRSSKKGA

SEQ ID NO: 23191 - protein, 12 aa, Homo sapiens
  ( 150 )...( 161 ): >Y222_HUMAN
RVLLRSSKKGAE

SEQ ID NO: 23192 - protein, 12 aa, Homo sapiens
  ( 355 )...( 366 ): >Y222_HUMAN
AIHRRVEASRTR

SEQ ID NO: 23193 - protein, 12 aa, Homo sapiens
  ( 356 )...( 367 ): >Y222_HUMAN
IHRRVEASRTRA

SEQ ID NO: 23194 - protein, 12 aa, Homo sapiens
  ( 358 )...( 369 ): >Y222_HUMAN
RRVEASRTRAPA

SEQ ID NO: 23195 - protein, 12 aa, Homo sapiens
  ( 498 )...( 509 ): >Y222_HUMAN
AARPNRRAAATT

SEQ ID NO: 23196 - protein, 12 aa, Homo sapiens
  ( 500 )...( 511 ): >Y222_HUMAN
RPNRRAAATTGQ

SEQ ID NO: 23197 - protein, 12 aa, Homo sapiens
  ( 801 )...( 812 ): >Y222_HUMAN
KSIRSNLVFLSR

SEQ ID NO: 23198 - protein, 12 aa, Homo sapiens
  ( 804 )...( 815 ): >Y222_HUMAN
RSNLVFLSRSGR

SEQ ID NO: 23199 - protein, 12 aa, Homo sapiens
  ( 1085 )...( 1096 ): >Y222_HUMAN
HRGTLRTQARPG

SEQ ID NO: 23200 - protein, 12 aa, Homo sapiens
  ( 420 )...( 431 ): >Y296_HUMAN
VRAHHRPRQGVG

SEQ ID NO: 23201 - protein, 12 aa, Homo sapiens
  ( 470 )...( 481 ): >Y296_HUMAN
CGRAYRHRGSLV

SEQ ID NO: 23202 - protein, 12 aa, Homo sapiens
  ( 471 )...( 482 ): >Y296_HUMAN
GRAYRHRGSLVN

SEQ ID NO: 23203 - protein, 12 aa, Homo sapiens
  ( 506 )...( 517 ): >Y296_HUMAN
ALRNHVRVHCKA

SEQ ID NO: 23204 - protein, 12 aa, Homo sapiens
  ( 507 )...( 518 ): >Y296_HUMAN
LRNHVRVHCKAA

SEQ ID NO: 23205 - protein, 12 aa, Homo sapiens
  ( 510 )...( 521 ): >Y296_HUMAN
HVRVHCKAARRS

SEQ ID NO: 23206 - protein, 12 aa, Homo sapiens
  ( 511 )...( 522 ): >Y296_HUMAN
VRVHCKAARRSA

SEQ ID NO: 23207 - protein, 12 aa, Homo sapiens
  ( 1062 )...( 1073 ): >Y296_HUMAN
RHGGSLVNHRKI

SEQ ID NO: 23208 - protein, 12 aa, Homo sapiens
  ( 1261 )...( 1272 ): >Y296_HUMAN
SECGKAFRLRKQ

SEQ ID NO: 23209 - protein, 12 aa, Homo sapiens
  ( 1262 )...( 1273 ): >Y296_HUMAN
ECGKAFRLRKQL

SEQ ID NO: 23210 - protein, 12 aa, Homo sapiens
  ( 1263 )...( 1274 ): >Y296_HUMAN
CGKAFRLRKQLA

SEQ ID NO: 23211 - protein, 12 aa, Homo sapiens
  ( 1264 )...( 1275 ): >Y296_HUMAN
GKAFRLRKQLAS

SEQ ID NO: 23212 - protein, 12 aa, Homo sapiens
  ( 1281 )...( 1292 ): >Y296_HUMAN
MERRGGGGTRKA

SEQ ID NO: 23213 - protein, 12 aa, Homo sapiens
  ( 1356 )...( 1367 ): >Y296_HUMAN
AGRSRRTAVRCA

SEQ ID NO: 23214 - protein, 12 aa, Homo sapiens
  ( 1357 )...( 1368 ): >Y296_HUMAN
GRSRRTAVRCAL

SEQ ID NO: 23215 - protein, 12 aa, Homo sapiens
  ( 1358 )...( 1369 ): >Y296_HUMAN
RSRRTAVRCALC

SEQ ID NO: 23216 - protein, 12 aa, Homo sapiens
  ( 1736 )...( 1747 ): >Y296_HUMAN
ICGKAFRTAARL

SEQ ID NO: 23217 - protein, 12 aa, Homo sapiens
  ( 1803 )...( 1814 ): >Y296_HUMAN
VGTQWRGKSSPK

SEQ ID NO: 23218 - protein, 12 aa, Homo sapiens
  ( 1804 )...( 1815 ): >Y296_HUMAN
GTQWRGKSSPKV

SEQ ID NO: 23219 - protein, 12 aa, Homo sapiens
  ( 1805 )...( 1816 ): >Y296_HUMAN
TQWRGKSSPKVG

SEQ ID NO: 23220 - protein, 12 aa, Homo sapiens
  ( 1813 )...( 1824 ): >Y296_HUMAN
PKVGGGARSERR

SEQ ID NO: 23221 - protein, 12 aa, Homo sapiens
  ( 236 )...( 247 ): >Y798_HUMAN
TLCAKVFSRKSR

SEQ ID NO: 23222 - protein, 12 aa, Homo sapiens
  ( 237 )...( 248 ): >Y798_HUMAN
LCAKVFSRKSRL

SEQ ID NO: 23223 - protein, 12 aa, Homo sapiens
  ( 266 )...( 277 ): >Y798_HUMAN
CGKVFTMKSRLI

SEQ ID NO: 23224 - protein, 12 aa, Homo sapiens
  ( 295 )...( 306 ): >Y798_HUMAN
GKGFPGKRNLIV

SEQ ID NO: 23225 - protein, 12 aa, Homo sapiens
  ( 296 )...( 307 ): >Y798_HUMAN
KGFPGKRNLIVH

SEQ ID NO: 23226 - protein, 12 aa, Homo sapiens
  ( 407 )...( 418 ): >Y798_HUMAN
GKGFPRKSNLIV

SEQ ID NO: 23227 - protein, 12 aa, Homo sapiens
  ( 408 )...( 419 ): >Y798_HUMAN
KGFPRKSNLIVH

SEQ ID NO: 23228 - protein, 12 aa, Homo sapiens
  ( 463 )...( 474 ): >Y798_HUMAN
GKGFPLKSRLIV

SEQ ID NO: 23229 - protein, 12 aa, Homo sapiens
  ( 464 )...( 475 ): >Y798_HUMAN
KGFPLKSRLIVH

SEQ ID NO: 23230 - protein, 12 aa, Homo sapiens
  ( 467 )...( 478 ): >Y798_HUMAN
PLKSRLIVHQRT

SEQ ID NO: 23231 - protein, 12 aa, Homo sapiens
  ( 547 )...( 558 ): >Y798_HUMAN
GKGFTMKRYLIV

SEQ ID NO: 23232 - protein, 12 aa, Homo sapiens
  ( 548 )...( 559 ): >Y798_HUMAN
KGFTMKRYLIVH

SEQ ID NO: 23233 - protein, 12 aa, Homo sapiens
  ( 603 )...( 614 ): >Y798_HUMAN
GKGFTMKSRLIV

SEQ ID NO: 23234 - protein, 12 aa, Homo sapiens
  ( 607 )...( 618 ): >Y798_HUMAN
TMKSRLIVHQRT

SEQ ID NO: 23235 - protein, 12 aa, Homo sapiens
  ( 635 )...( 646 ): >Y798_HUMAN
SSKRNLIVHQRT

SEQ ID NO: 23236 - protein, 12 aa, Homo sapiens
  ( 68 )...( 79 ): >YB96_HUMAN
KTEGKKKGRPKA

SEQ ID NO: 23237 - protein, 12 aa, Homo sapiens
  ( 69 )...( 80 ): >YB96_HUMAN
TEGKKKGRPKAE

SEQ ID NO: 23238 - protein, 12 aa, Homo sapiens
  ( 73 )...( 84 ): >YB96_HUMAN
KKGRPKAENQAL

SEQ ID NO: 23239 - protein, 12 aa, Homo sapiens
  ( 74 )...( 85 ): >YB96_HUMAN
KGRPKAENQALR

SEQ ID NO: 23240 - protein, 12 aa, Homo sapiens
  ( 328 )...( 339 ): >YB96_HUMAN
RSENKAPRATGR

SEQ ID NO: 23241 - protein, 12 aa, Homo sapiens
  ( 339 )...( 350 ): >YB96_HUMAN
RNSGKKRAADSL

SEQ ID NO: 23242 - protein, 12 aa, Homo sapiens
  ( 453 )...( 464 ): >YB96_HUMAN
ARVHRSKKQEGP

SEQ ID NO: 23243 - protein, 12 aa, Homo sapiens
  ( 454 )...( 465 ): >YB96_HUMAN
RVHRSKKQEGPG

SEQ ID NO: 23244 - protein, 12 aa, Homo sapiens
  ( 469 )...( 480 ): >YB96_HUMAN
ARKKVPAAPITV

SEQ ID NO: 23245 - protein, 12 aa, Homo sapiens
  ( 470 )...( 481 ): >YB96_HUMAN
RKKVPAAPITVS

SEQ ID NO: 23246 - protein, 12 aa, Homo sapiens
  ( 516 )...( 527 ): >YB96_HUMAN
NVVTRKTLVGLK

SEQ ID NO: 23247 - protein, 12 aa, Homo sapiens
  ( 518 )...( 529 ): >YB96_HUMAN
VTRKTLVGLKKH

SEQ ID NO: 23248 - protein, 12 aa, Homo sapiens
  ( 519 )...( 530 ): >YB96_HUMAN
TRKTLVGLKKHM

SEQ ID NO: 23249 - protein, 12 aa, Homo sapiens
  ( 544 )...( 555 ): >YB96_HUMAN
HCRKQFKSKAGL

SEQ ID NO: 23250 - protein, 12 aa, Homo sapiens
  ( 586 )...( 597 ): >YB96_HUMAN
KVLKQMGRLRCP

SEQ ID NO: 23251 - protein, 12 aa, Homo sapiens
  ( 587 )...( 598 ): >YB96_HUMAN
VLKQMGRLRCPQ

SEQ ID NO: 23252 - protein, 12 aa, Homo sapiens
  ( 673 )...( 684 ): >YB96_HUMAN
GVERTPSGRVRR

SEQ ID NO: 23253 - protein, 12 aa, Homo sapiens
  ( 674 )...( 685 ): >YB96_HUMAN
VERTPSGRVRRT

SEQ ID NO: 23254 - protein, 12 aa, Homo sapiens
  ( 675 )...( 686 ): >YB96_HUMAN
ERTPSGRVRRTS

SEQ ID NO: 23255 - protein, 12 aa, Homo sapiens
  ( 676 )...( 687 ): >YB96_HUMAN
RTPSGRVRRTSA

SEQ ID NO: 23256 - protein, 12 aa, Homo sapiens
  ( 677 )...( 688 ): >YB96_HUMAN
TPSGRVRRTSAQ

SEQ ID NO: 23257 - protein, 12 aa, Homo sapiens
  ( 678 )...( 689 ): >YB96_HUMAN
PSGRVRRTSAQV

SEQ ID NO: 23258 - protein, 12 aa, Homo sapiens
  ( 679 )...( 690 ): >YB96_HUMAN
SGRVRRTSAQVA

SEQ ID NO: 23259 - protein, 12 aa, Homo sapiens
  ( 680 )...( 691 ): >YB96_HUMAN
GRVRRTSAQVAV

SEQ ID NO: 23260 - protein, 12 aa, Homo sapiens
  ( 681 )...( 692 ): >YB96_HUMAN
RVRRTSAQVAVF

SEQ ID NO: 23261 - protein, 12 aa, Homo sapiens
  ( 828 )...( 839 ): >YB96_HUMAN
LVPKKEKKKNLA

SEQ ID NO: 23262 - protein, 12 aa, Homo sapiens
  ( 829 )...( 840 ): >YB96_HUMAN
VPKKEKKKNLAG

SEQ ID NO: 23263 - protein, 12 aa, Homo sapiens
  ( 830 )...( 841 ): >YB96_HUMAN
PKKEKKKNLAGG

SEQ ID NO: 23264 - protein, 12 aa, Homo sapiens
  ( 831 )...( 842 ): >YB96_HUMAN
KKEKKKNLAGGK

SEQ ID NO: 23265 - protein, 12 aa, Homo sapiens
  ( 832 )...( 843 ): >YB96_HUMAN
KEKKKNLAGGKK

SEQ ID NO: 23266 - protein, 12 aa, Homo sapiens
  ( 833 )...( 844 ): >YB96_HUMAN
EKKKNLAGGKKR

SEQ ID NO: 23267 - protein, 12 aa, Homo sapiens
  ( 881 )...( 892 ): >YB96_HUMAN
GRKVGVSKAPEK

SEQ ID NO: 23268 - protein, 11 aa, Homo sapiens
  ( 882 )...( 893 ): >YB96_HUMAN
RKVGVSKAPEK

SEQ ID NO: 23269 - protein, 12 aa, Homo sapiens
  ( 255 )...( 266 ): >YB98_HUMAN
CGKAFRYLTALR

SEQ ID NO: 23270 - protein, 12 aa, Homo sapiens
  ( 256 )...( 267 ): >YB98_HUMAN
GKAFRYLTALRR

SEQ ID NO: 23271 - protein, 12 aa, Homo sapiens
  ( 284 )...( 295 ): >YC24_HUMAN
RVHTGVKPYKCK

SEQ ID NO: 23272 - protein, 12 aa, Homo sapiens
  ( 326 )...( 337 ): >YC24_HUMAN
GRPFRVSSALIR

SEQ ID NO: 23273 - protein, 12 aa, Homo sapiens
  ( 330 )...( 341 ): >YC24_HUMAN
RVSSALIRHQRI

SEQ ID NO: 23274 - protein, 12 aa, Homo sapiens
  ( 3 )...( 14 ): >YD49_HUMAN
PKPATKNATRTK

SEQ ID NO: 23275 - protein, 12 aa, Homo sapiens
  ( 4 )...( 15 ): >YD49_HUMAN
KPATKNATRTKA

SEQ ID NO: 23276 - protein, 12 aa, Homo sapiens
  ( 5 )...( 16 ): >YD49_HUMAN
PATKNATRTKAI

SEQ ID NO: 23277 - protein, 12 aa, Homo sapiens
  ( 60 )...( 71 ): >YD49_HUMAN
LSQRIIPLKKTP

SEQ ID NO: 23278 - protein, 12 aa, Homo sapiens
  ( 61 )...( 72 ): >YD49_HUMAN
SQRIIPLKKTPT

SEQ ID NO: 23279 - protein, 12 aa, Homo sapiens
  ( 62 )...( 73 ): >YD49_HUMAN
QRIIPLKKTPTS

SEQ ID NO: 23280 - protein, 12 aa, Homo sapiens
  ( 63 )...( 74 ): >YD49_HUMAN
RIIPLKKTPTSQ

SEQ ID NO: 23281 - protein, 12 aa, Homo sapiens
  ( 64 )...( 75 ): >YD49_HUMAN
IIPLKKTPTSQR

SEQ ID NO: 23282 - protein, 12 aa, Homo sapiens
  ( 65 )...( 76 ): >YD49_HUMAN
IPLKKTPTSQRG

SEQ ID NO: 23283 - protein, 12 aa, Homo sapiens
  ( 66 )...( 77 ): >YD49_HUMAN
PLKKTPTSQRGF

SEQ ID NO: 23284 - protein, 12 aa, Homo sapiens
  ( 67 )...( 78 ): >YD49_HUMAN
LKKTPTSQRGFR

SEQ ID NO: 23285 - protein, 12 aa, Homo sapiens
  ( 121 )...( 132 ): >YD49_HUMAN
ICKEMKGSKAIR

SEQ ID NO: 23286 - protein, 12 aa, Homo sapiens
  ( 122 )...( 133 ): >YD49_HUMAN
CKEMKGSKAIRQ

SEQ ID NO: 23287 - protein, 12 aa, Homo sapiens
  ( 123 )...( 134 ): >YD49_HUMAN
KEMKGSKAIRQT

SEQ ID NO: 23288 - protein, 12 aa, Homo sapiens
  ( 520 )...( 531 ): >YD49_HUMAN
GKSFRTKSYLIV

SEQ ID NO: 23289 - protein, 12 aa, Homo sapiens
  ( 524 )...( 535 ): >YD49_HUMAN
RTKSYLIVHQRT

SEQ ID NO: 23290 - protein, 12 aa, Homo sapiens
  ( 632 )...( 643 ): >YD49_HUMAN
GKAFRRGSYLTV

SEQ ID NO: 23291 - protein, 12 aa, Homo sapiens
  ( 633 )...( 644 ): >YD49_HUMAN
KAFRRGSYLTVH

SEQ ID NO: 23292 - protein, 12 aa, Homo sapiens
  ( 100 )...( 111 ): >YE73_HUMAN
QGKKNYFQKVIL

SEQ ID NO: 23293 - protein, 12 aa, Homo sapiens
  ( 109 )...( 120 ): >YE73_HUMAN
VILRRYKKCGCE

SEQ ID NO: 23294 - protein, 12 aa, Homo sapiens
  ( 115 )...( 126 ): >YE73_HUMAN
KKCGCENLQLRK

SEQ ID NO: 23295 - protein, 12 aa, Homo sapiens
  ( 175 )...( 186 ): >YE73_HUMAN
TIRHTGKKSFKC

SEQ ID NO: 23296 - protein, 12 aa, Homo sapiens
  ( 176 )...( 187 ): >YE73_HUMAN
IRHTGKKSFKCK

SEQ ID NO: 23297 - protein, 12 aa, Homo sapiens
  ( 259 )...( 270 ): >YE73_HUMAN
KIIHTGKKPYKC

SEQ ID NO: 23298 - protein, 12 aa, Homo sapiens
  ( 560 )...( 571 ): >YE73_HUMAN
IAKISKYKRNCA

SEQ ID NO: 23299 - protein, 12 aa, Homo sapiens
  ( 177 )...( 188 ): >YF59_HUMAN
CRKTFIRRSTLS

SEQ ID NO: 23300 - protein, 12 aa, Homo sapiens
  ( 182 )...( 193 ): >YF59_HUMAN
IRRSTLSQHLRI

SEQ ID NO: 23301 - protein, 12 aa, Homo sapiens
  ( 262 )...( 273 ): >YF59_HUMAN
GKAFRVHQQLAR

SEQ ID NO: 23302 - protein, 12 aa, Homo sapiens
  ( 290 )...( 301 ): >YF59_HUMAN
GKTFRQCTHLTR

SEQ ID NO: 23303 - protein, 12 aa, Homo sapiens
  ( 370 )...( 381 ): >YF59_HUMAN
CKECGKTFRLRQ

SEQ ID NO: 23304 - protein, 12 aa, Homo sapiens
  ( 373 )...( 384 ): >YF59_HUMAN
CGKTFRLRQQLV

SEQ ID NO: 23305 - protein, 12 aa, Homo sapiens
  ( 374 )...( 385 ): >YF59_HUMAN
GKTFRLRQQLVR

SEQ ID NO: 23306 - protein, 12 aa, Homo sapiens
  ( 457 )...( 468 ): >YF59_HUMAN
CRKPFRLLSQLT

SEQ ID NO: 23307 - protein, 12 aa, Homo sapiens
  ( 55 )...( 66 ): >YJ56_HUMAN
APSKKSISIQRV

SEQ ID NO: 23308 - protein, 12 aa, Homo sapiens
  ( 58 )...( 69 ): >YJ56_HUMAN
KKSISIQRVSQV

SEQ ID NO: 23309 - protein, 12 aa, Homo sapiens
  ( 273 )...( 284 ): >YJ56_HUMAN
LVQHQRVHTGKR

SEQ ID NO: 23310 - protein, 12 aa, Homo sapiens
  ( 274 )...( 285 ): >YJ56_HUMAN
VQHQRVHTGKRP

SEQ ID NO: 23311 - protein, 12 aa, Homo sapiens
  ( 432 )...( 443 ): >YJ56_HUMAN
GKSFSRKGNLIQ

SEQ ID NO: 23312 - protein, 12 aa, Homo sapiens
  ( 459 )...( 470 ): >YJ56_HUMAN
CRKLFRGKSHLI

SEQ ID NO: 23313 - protein, 12 aa, Homo sapiens
  ( 523 )...( 534 ): >YJ56_HUMAN
CSLLRHRRVHTG

SEQ ID NO: 23314 - protein, 12 aa, Homo sapiens
  ( 594 )...( 605 ): >YJ56_HUMAN
RECGKTFTRRSA

SEQ ID NO: 23315 - protein, 12 aa, Homo sapiens
  ( 16 )...( 27 ): >Z11A_HUMAN
LVISKINYLGKK

SEQ ID NO: 23316 - protein, 12 aa, Homo sapiens
  ( 172 )...( 183 ): >Z11A_HUMAN
RRKLCLSHLQKG

SEQ ID NO: 23317 - protein, 12 aa, Homo sapiens
  ( 80 )...( 91 ): >Z11B_HUMAN
LVISKINYLGKK

SEQ ID NO: 23318 - protein, 12 aa, Homo sapiens
  ( 236 )...( 247 ): >Z11B_HUMAN
RRKLCLSQLQKG

SEQ ID NO: 23319 - protein, 12 aa, Homo sapiens
  ( 145 )...( 156 ): >Z148_HUMAN
KRKQRSPAKILT

SEQ ID NO: 23320 - protein, 12 aa, Homo sapiens
  ( 146 )...( 157 ): >Z148_HUMAN
RKQRSPAKILTI

SEQ ID NO: 23321 - protein, 12 aa, Homo sapiens
  ( 147 )...( 158 ): >Z148_HUMAN
KQRSPAKILTIN

SEQ ID NO: 23322 - protein, 12 aa, Homo sapiens
  ( 283 )...( 294 ): >Z148_HUMAN
KKLNRCAIKGGL

SEQ ID NO: 23323 - protein, 12 aa, Homo sapiens
  ( 284 )...( 295 ): >Z148_HUMAN
KLNRCAIKGGLL

SEQ ID NO: 23324 - protein, 12 aa, Homo sapiens
  ( 316 )...( 327 ): >Z148_HUMAN
KRQKTEKKSSGM

SEQ ID NO: 23325 - protein, 12 aa, Homo sapiens
  ( 387 )...( 398 ): >Z148_HUMAN
PPKLVLKKINSK

SEQ ID NO: 23326 - protein, 12 aa, Homo sapiens
  ( 388 )...( 399 ): >Z148_HUMAN
PKLVLKKINSKR

SEQ ID NO: 23327 - protein, 12 aa, Homo sapiens
  ( 389 )...( 400 ): >Z148_HUMAN
KLVLKKINSKRS

SEQ ID NO: 23328 - protein, 12 aa, Homo sapiens
  ( 390 )...( 401 ): >Z148_HUMAN
LVLKKINSKRSL

SEQ ID NO: 23329 - protein, 12 aa, Homo sapiens
  ( 391 )...( 402 ): >Z148_HUMAN
VLKKINSKRSLK

SEQ ID NO: 23330 - protein, 12 aa, Homo sapiens
  ( 96 )...( 107 ): >Z161_HUMAN
HTGIKLVSRPKK

SEQ ID NO: 23331 - protein, 12 aa, Homo sapiens
  ( 97 )...( 108 ): >Z161_HUMAN
TGIKLVSRPKKT

SEQ ID NO: 23332 - protein, 12 aa, Homo sapiens
  ( 98 )...( 109 ): >Z161_HUMAN
GIKLVSRPKKTP

SEQ ID NO: 23333 - protein, 12 aa, Homo sapiens
  ( 99 )...( 110 ): >Z161_HUMAN
IKLVSRPKKTPT

SEQ ID NO: 23334 - protein, 12 aa, Homo sapiens
  ( 100 )...( 111 ): >Z161_HUMAN
KLVSRPKKTPTT

SEQ ID NO: 23335 - protein, 12 aa, Homo sapiens
  ( 104 )...( 115 ): >Z161_HUMAN
RPKKTPTTVVPL

SEQ ID NO: 23336 - protein, 12 aa, Homo sapiens
  ( 160 )...( 171 ): >Z161_HUMAN
TQSVKKPSKPVK

SEQ ID NO: 23337 - protein, 12 aa, Homo sapiens
  ( 161 )...( 172 ): >Z161_HUMAN
QSVKKPSKPVKK

SEQ ID NO: 23338 - protein, 12 aa, Homo sapiens
  ( 162 )...( 173 ): >Z161_HUMAN
SVKKPSKPVKKN

SEQ ID NO: 23339 - protein, 12 aa, Homo sapiens
  ( 368 )...( 379 ): >Z161_HUMAN
AVKARKKEAANL

SEQ ID NO: 23340 - protein, 12 aa, Homo sapiens
  ( 369 )...( 380 ): >Z161_HUMAN
VKARKKEAANLC

SEQ ID NO: 23341 - protein, 12 aa, Homo sapiens
  ( 370 )...( 381 ): >Z161_HUMAN
KARKKEAANLCQ

SEQ ID NO: 23342 - protein, 12 aa, Homo sapiens
  ( 154 )...( 165 ): >Z189_HUMAN
GKGFVRKAHFIQ

SEQ ID NO: 23343 - protein, 12 aa, Homo sapiens
  ( 335 )...( 346 ): >Z198_HUMAN
KKPLQKGQTAYQ

SEQ ID NO: 23344 - protein, 12 aa, Homo sapiens
  ( 336 )...( 347 ): >Z198_HUMAN
KPLQKGQTAYQR

SEQ ID NO: 23345 - protein, 12 aa, Homo sapiens
  ( 337 )...( 348 ): >Z198_HUMAN
PLQKGQTAYQRK

SEQ ID NO: 23346 - protein, 12 aa, Homo sapiens
  ( 338 )...( 349 ): >Z198_HUMAN
LQKGQTAYQRKG

SEQ ID NO: 23347 - protein, 12 aa, Homo sapiens
  ( 339 )...( 350 ): >Z198_HUMAN
QKGQTAYQRKGS

SEQ ID NO: 23348 - protein, 12 aa, Homo sapiens
  ( 340 )...( 351 ): >Z198_HUMAN
KGQTAYQRKGSA

SEQ ID NO: 23349 - protein, 12 aa, Homo sapiens
  ( 416 )...( 427 ): >Z198_HUMAN
TKGALNKSRCTI

SEQ ID NO: 23350 - protein, 12 aa, Homo sapiens
  ( 716 )...( 727 ): >Z198_HUMAN
FARRLGLRCVTC

SEQ ID NO: 23351 - protein, 12 aa, Homo sapiens
  ( 717 )...( 728 ): >Z198_HUMAN
ARRLGLRCVTCN

SEQ ID NO: 23352 - protein, 12 aa, Homo sapiens
  ( 718 )...( 729 ): >Z198_HUMAN
RRLGLRCVTCNY

SEQ ID NO: 23353 - protein, 12 aa, Homo sapiens
  ( 1041 )...( 1052 ): >Z198_HUMAN
SKKKGAKRKAVS

SEQ ID NO: 23354 - protein, 12 aa, Homo sapiens
  ( 1043 )...( 1054 ): >Z198_HUMAN
KKGAKRKAVSGY

SEQ ID NO: 23355 - protein, 12 aa, Homo sapiens
  ( 1044 )...( 1055 ): >Z198_HUMAN
KGAKRKAVSGYQ

SEQ ID NO: 23356 - protein, 12 aa, Homo sapiens
  ( 1045 )...( 1056 ): >Z198_HUMAN
GAKRKAVSGYQS

SEQ ID NO: 23357 - protein, 12 aa, Homo sapiens
  ( 145 )...( 156 ): >Z212_HUMAN
RTVGCPKQKSHR

SEQ ID NO: 23358 - protein, 12 aa, Homo sapiens
  ( 147 )...( 158 ): >Z212_HUMAN
VGCPKQKSHRQV

SEQ ID NO: 23359 - protein, 12 aa, Homo sapiens
  ( 148 )...( 159 ): >Z212_HUMAN
GCPKQKSHRQVQ

SEQ ID NO: 23360 - protein, 12 aa, Homo sapiens
  ( 165 )...( 176 ): >Z212_HUMAN
GQGLKLKKDTSR

SEQ ID NO: 23361 - protein, 12 aa, Homo sapiens
  ( 166 )...( 177 ): >Z212_HUMAN
QGLKLKKDTSRP

SEQ ID NO: 23362 - protein, 12 aa, Homo sapiens
  ( 167 )...( 178 ): >Z212_HUMAN
GLKLKKDTSRPY

SEQ ID NO: 23363 - protein, 12 aa, Homo sapiens
  ( 221 )...( 232 ): >Z212_HUMAN
LKPQTKKAKLHQ

SEQ ID NO: 23364 - protein, 12 aa, Homo sapiens
  ( 222 )...( 233 ): >Z212_HUMAN
KPQTKKAKLHQC

SEQ ID NO: 23365 - protein, 12 aa, Homo sapiens
  ( 162 )...( 173 ): >Z214_HUMAN
FQGGRYRLGISR

SEQ ID NO: 23366 - protein, 12 aa, Homo sapiens
  ( 163 )...( 174 ): >Z214_HUMAN
QGGRYRLGISRK

SEQ ID NO: 23367 - protein, 12 aa, Homo sapiens
  ( 164 )...( 175 ): >Z214_HUMAN
GGRYRLGISRKN

SEQ ID NO: 23368 - protein, 12 aa, Homo sapiens
  ( 165 )...( 176 ): >Z214_HUMAN
GRYRLGISRKNL

SEQ ID NO: 23369 - protein, 12 aa, Homo sapiens
  ( 167 )...( 178 ): >Z214_HUMAN
YRLGISRKNLSM

SEQ ID NO: 23370 - protein, 12 aa, Homo sapiens
  ( 4 )...( 15 ): >Z215_HUMAN
LSKLMAISKPRN

SEQ ID NO: 23371 - protein, 12 aa, Homo sapiens
  ( 5 )...( 16 ): >Z215_HUMAN
SKLMAISKPRNL

SEQ ID NO: 23372 - protein, 12 aa, Homo sapiens
  ( 6 )...( 17 ): >Z215_HUMAN
KLMAISKPRNLS

SEQ ID NO: 23373 - protein, 12 aa, Homo sapiens
  ( 8 )...( 19 ): >Z215_HUMAN
MAISKPRNLSLR

SEQ ID NO: 23374 - protein, 12 aa, Homo sapiens
  ( 145 )...( 156 ): >Z215_HUMAN
GSIKEKMKAGSR

SEQ ID NO: 23375 - protein, 12 aa, Homo sapiens
  ( 147 )...( 158 ): >Z215_HUMAN
IKEKMKAGSRTG

SEQ ID NO: 23376 - protein, 12 aa, Homo sapiens
  ( 148 )...( 159 ): >Z215_HUMAN
KEKMKAGSRTGK

SEQ ID NO: 23377 - protein, 12 aa, Homo sapiens
  ( 149 )...( 160 ): >Z215_HUMAN
EKMKAGSRTGKP

SEQ ID NO: 23378 - protein, 12 aa, Homo sapiens
  ( 150 )...( 161 ): >Z215_HUMAN
KMKAGSRTGKPQ

SEQ ID NO: 23379 - protein, 12 aa, Homo sapiens
  ( 179 )...( 190 ): >Z217_HUMAN
NGKSGARSKLQQ

SEQ ID NO: 23380 - protein, 12 aa, Homo sapiens
  ( 181 )...( 192 ): >Z217_HUMAN
KSGARSKLQQGL

SEQ ID NO: 23381 - protein, 12 aa, Homo sapiens
  ( 234 )...( 245 ): >Z217_HUMAN
HRKVHTKKTAFG

SEQ ID NO: 23382 - protein, 12 aa, Homo sapiens
  ( 235 )...( 246 ): >Z217_HUMAN
RKVHTKKTAFGT

SEQ ID NO: 23383 - protein, 12 aa, Homo sapiens
  ( 279 )...( 290 ): >Z217_HUMAN
TGKKPVRCIPQL

SEQ ID NO: 23384 - protein, 12 aa, Homo sapiens
  ( 745 )...( 756 ): >Z217_HUMAN
NKSLLRSRRTGC

SEQ ID NO: 23385 - protein, 12 aa, Homo sapiens
  ( 746 )...( 757 ): >Z217_HUMAN
KSLLRSRRTGCP

SEQ ID NO: 23386 - protein, 12 aa, Homo sapiens
  ( 853 )...( 864 ): >Z217_HUMAN
KTKRPETKLKPL

SEQ ID NO: 23387 - protein, 12 aa, Homo sapiens
  ( 854 )...( 865 ): >Z217_HUMAN
TKRPETKLKPLP

SEQ ID NO: 23388 - protein, 12 aa, Homo sapiens
  ( 855 )...( 866 ): >Z217_HUMAN
KRPETKLKPLPV

SEQ ID NO: 23389 - protein, 12 aa, Homo sapiens
  ( 915 )...( 926 ): >Z217_HUMAN
PLPKRLKSSVVA

SEQ ID NO: 23390 - protein, 12 aa, Homo sapiens
  ( 916 )...( 927 ): >Z217_HUMAN
LPKRLKSSVVAL

SEQ ID NO: 23391 - protein, 12 aa, Homo sapiens
  ( 63 )...( 74 ): >Z219_HUMAN
GKRFRFNSILAL

SEQ ID NO: 23392 - protein, 12 aa, Homo sapiens
  ( 90 )...( 101 ): >Z219_HUMAN
CGHRAAQRALLR

SEQ ID NO: 23393 - protein, 12 aa, Homo sapiens
  ( 91 )...( 102 ): >Z219_HUMAN
GHRAAQRALLRS

SEQ ID NO: 23394 - protein, 12 aa, Homo sapiens
  ( 93 )...( 104 ): >Z219_HUMAN
RAAQRALLRSHL

SEQ ID NO: 23395 - protein, 12 aa, Homo sapiens
  ( 94 )...( 105 ): >Z219_HUMAN
AAQRALLRSHLR

SEQ ID NO: 23396 - protein, 12 aa, Homo sapiens
  ( 95 )...( 106 ): >Z219_HUMAN
AQRALLRSHLRT

SEQ ID NO: 23397 - protein, 12 aa, Homo sapiens
  ( 126 )...( 137 ): >Z219_HUMAN
RALLREARLGRA

SEQ ID NO: 23398 - protein, 12 aa, Homo sapiens
  ( 127 )...( 138 ): >Z219_HUMAN
ALLREARLGRAR

SEQ ID NO: 23399 - protein, 12 aa, Homo sapiens
  ( 128 )...( 139 ): >Z219_HUMAN
LLREARLGRARS

SEQ ID NO: 23400 - protein, 12 aa, Homo sapiens
  ( 129 )...( 140 ): >Z219_HUMAN
LREARLGRARSS

SEQ ID NO: 23401 - protein, 12 aa, Homo sapiens
  ( 130 )...( 141 ): >Z219_HUMAN
REARLGRARSSG

SEQ ID NO: 23402 - protein, 12 aa, Homo sapiens
  ( 133 )...( 144 ): >Z219_HUMAN
RLGRARSSGGMQ

SEQ ID NO: 23403 - protein, 12 aa, Homo sapiens
  ( 321 )...( 332 ): >Z219_HUMAN
MKVHASKLGPLR

SEQ ID NO: 23404 - protein, 12 aa, Homo sapiens
  ( 322 )...( 333 ): >Z219_HUMAN
KVHASKLGPLRA

SEQ ID NO: 23405 - protein, 12 aa, Homo sapiens
  ( 410 )...( 421 ): >Z219_HUMAN
LSSALPARARRH

SEQ ID NO: 23406 - protein, 12 aa, Homo sapiens
  ( 604 )...( 615 ): >Z219_HUMAN
GSRRKPASPGRT

SEQ ID NO: 23407 - protein, 12 aa, Homo sapiens
  ( 605 )...( 616 ): >Z219_HUMAN
SRRKPASPGRTL

SEQ ID NO: 23408 - protein, 12 aa, Homo sapiens
  ( 607 )...( 618 ): >Z219_HUMAN
RKPASPGRTLRN

SEQ ID NO: 23409 - protein, 12 aa, Homo sapiens
  ( 246 )...( 257 ): >Z221_HUMAN
RVHTGEKPFKRG

SEQ ID NO: 23410 - protein, 12 aa, Homo sapiens
  ( 313 )...( 324 ): >Z221_HUMAN
DICGKSFRVRSR

SEQ ID NO: 23411 - protein, 12 aa, Homo sapiens
  ( 314 )...( 325 ): >Z221_HUMAN
ICGKSFRVRSRL

SEQ ID NO: 23412 - protein, 12 aa, Homo sapiens
  ( 102 )...( 113 ): >Z222_HUMAN
QIKARLSTVHTR

SEQ ID NO: 23413 - protein, 12 aa, Homo sapiens
  ( 207 )...( 218 ): >Z222_HUMAN
GKGFRCRSALKV

SEQ ID NO: 23414 - protein, 12 aa, Homo sapiens
  ( 208 )...( 219 ): >Z222_HUMAN
KGFRCRSALKVH

SEQ ID NO: 23415 - protein, 12 aa, Homo sapiens
  ( 211 )...( 222 ): >Z222_HUMAN
RCRSALKVHCKL

SEQ ID NO: 23416 - protein, 12 aa, Homo sapiens
  ( 238 )...( 249 ): >Z223_HUMAN
GRGFRCRSALTV

SEQ ID NO: 23417 - protein, 12 aa, Homo sapiens
  ( 239 )...( 250 ): >Z223_HUMAN
RGFRCRSALTVH

SEQ ID NO: 23418 - protein, 12 aa, Homo sapiens
  ( 143 )...( 154 ): >Z224_HUMAN
TRQKSSQGNGYK

SEQ ID NO: 23419 - protein, 12 aa, Homo sapiens
  ( 238 )...( 249 ): >Z224_HUMAN
GKGFSRRSALNV

SEQ ID NO: 23420 - protein, 12 aa, Homo sapiens
  ( 239 )...( 250 ): >Z224_HUMAN
KGFSRRSALNVH

SEQ ID NO: 23421 - protein, 12 aa, Homo sapiens
  ( 429 )...( 440 ): >Z224_HUMAN
KCVECGKGYKRR

SEQ ID NO: 23422 - protein, 12 aa, Homo sapiens
  ( 552 )...( 563 ): >Z224_HUMAN
ASCLLKHQRLRS

SEQ ID NO: 23423 - protein, 12 aa, Homo sapiens
  ( 553 )...( 564 ): >Z224_HUMAN
SCLLKHQRLRSG

SEQ ID NO: 23424 - protein, 12 aa, Homo sapiens
  ( 238 )...( 249 ): >Z225_HUMAN
GKGFSRRSGLYV

SEQ ID NO: 23425 - protein, 12 aa, Homo sapiens
  ( 239 )...( 250 ): >Z225_HUMAN
KGFSRRSGLYVH

SEQ ID NO: 23426 - protein, 12 aa, Homo sapiens
  ( 240 )...( 251 ): >Z225_HUMAN
GFSRRSGLYVHR

SEQ ID NO: 23427 - protein, 12 aa, Homo sapiens
  ( 382 )...( 393 ): >Z225_HUMAN
RWASGLSRHVRV

SEQ ID NO: 23428 - protein, 12 aa, Homo sapiens
  ( 531 )...( 542 ): >Z225_HUMAN
RRVHTGVKPYKC

SEQ ID NO: 23429 - protein, 12 aa, Homo sapiens
  ( 578 )...( 589 ): >Z225_HUMAN
SRASSILNHKRL

SEQ ID NO: 23430 - protein, 12 aa, Homo sapiens
  ( 23 )...( 34 ): >Z226_HUMAN
GLLGPAQRKLYR

SEQ ID NO: 23431 - protein, 12 aa, Homo sapiens
  ( 190 )...( 201 ): >Z226_HUMAN
ISIKNKLCQCKK

SEQ ID NO: 23432 - protein, 12 aa, Homo sapiens
  ( 192 )...( 203 ): >Z226_HUMAN
IKNKLCQCKKGV

SEQ ID NO: 23433 - protein, 12 aa, Homo sapiens
  ( 341 )...( 352 ): >Z226_HUMAN
GKGFSRRSALNV

SEQ ID NO: 23434 - protein, 12 aa, Homo sapiens
  ( 342 )...( 353 ): >Z226_HUMAN
KGFSRRSALNVH

SEQ ID NO: 23435 - protein, 12 aa, Homo sapiens
  ( 346 )...( 357 ): >Z226_HUMAN
RRSALNVHCKVH

SEQ ID NO: 23436 - protein, 12 aa, Homo sapiens
  ( 593 )...( 604 ): >Z226_HUMAN
GKGFSRRADLKI

SEQ ID NO: 23437 - protein, 12 aa, Homo sapiens
  ( 781 )...( 792 ): >Z226_HUMAN
KSYKSNRGGKNI

SEQ ID NO: 23438 - protein, 12 aa, Homo sapiens
  ( 516 )...( 527 ): >Z228_HUMAN
QRVHTGQKPYKC

SEQ ID NO: 23439 - protein, 12 aa, Homo sapiens
  ( 736 )...( 747 ): >Z228_HUMAN
LQGHQRVHTRVK

SEQ ID NO: 23440 - protein, 12 aa, Homo sapiens
  ( 737 )...( 748 ): >Z228_HUMAN
QGHQRVHTRVKP

SEQ ID NO: 23441 - protein, 12 aa, Homo sapiens
  ( 766 )...( 777 ): >Z228_HUMAN
AHRRVHTGGKPY

SEQ ID NO: 23442 - protein, 12 aa, Homo sapiens
  ( 768 )...( 779 ): >Z228_HUMAN
RRVHTGGKPYKC

SEQ ID NO: 23443 - protein, 12 aa, Homo sapiens
  ( 319 )...( 330 ): >Z229_HUMAN
KSVKSLERGRGV

SEQ ID NO: 23444 - protein, 12 aa, Homo sapiens
  ( 320 )...( 331 ): >Z229_HUMAN
SVKSLERGRGVR

SEQ ID NO: 23445 - protein, 12 aa, Homo sapiens
  ( 321 )...( 332 ): >Z229_HUMAN
VKSLERGRGVRQ

SEQ ID NO: 23446 - protein, 12 aa, Homo sapiens
  ( 322 )...( 333 ): >Z229_HUMAN
KSLERGRGVRQN

SEQ ID NO: 23447 - protein, 12 aa, Homo sapiens
  ( 326 )...( 337 ): >Z229_HUMAN
RGRGVRQNTHIR

SEQ ID NO: 23448 - protein, 12 aa, Homo sapiens
  ( 327 )...( 338 ): >Z229_HUMAN
GRGVRQNTHIRN

SEQ ID NO: 23449 - protein, 12 aa, Homo sapiens
  ( 355 )...( 366 ): >Z229_HUMAN
GKGFRYKSVLLI

SEQ ID NO: 23450 - protein, 12 aa, Homo sapiens
  ( 356 )...( 367 ): >Z229_HUMAN
KGFRYKSVLLIH

SEQ ID NO: 23451 - protein, 12 aa, Homo sapiens
  ( 368 )...( 379 ): >Z229_HUMAN
QGVHTGRRPYKC

SEQ ID NO: 23452 - protein, 12 aa, Homo sapiens
  ( 230 )...( 241 ): >Z230_HUMAN
GKGFRCRAILQV

SEQ ID NO: 23453 - protein, 12 aa, Homo sapiens
  ( 231 )...( 242 ): >Z230_HUMAN
KGFRCRAILQVH

SEQ ID NO: 23454 - protein, 12 aa, Homo sapiens
  ( 234 )...( 245 ): >Z230_HUMAN
RCRAILQVHCKL

SEQ ID NO: 23455 - protein, 12 aa, Homo sapiens
  ( 63 )...( 74 ): >Z234_HUMAN
KKLDIMKTATQR

SEQ ID NO: 23456 - protein, 12 aa, Homo sapiens
  ( 64 )...( 75 ): >Z234_HUMAN
KLDIMKTATQRK

SEQ ID NO: 23457 - protein, 12 aa, Homo sapiens
  ( 66 )...( 77 ): >Z234_HUMAN
DIMKTATQRKGK

SEQ ID NO: 23458 - protein, 12 aa, Homo sapiens
  ( 67 )...( 78 ): >Z234_HUMAN
IMKTATQRKGKS

SEQ ID NO: 23459 - protein, 12 aa, Homo sapiens
  ( 68 )...( 79 ): >Z234_HUMAN
MKTATQRKGKSA

SEQ ID NO: 23460 - protein, 12 aa, Homo sapiens
  ( 71 )...( 82 ): >Z234_HUMAN
ATQRKGKSADKI

SEQ ID NO: 23461 - protein, 12 aa, Homo sapiens
  ( 72 )...( 83 ): >Z234_HUMAN
TQRKGKSADKIQ

SEQ ID NO: 23462 - protein, 12 aa, Homo sapiens
  ( 73 )...( 84 ): >Z234_HUMAN
QRKGKSADKIQS

SEQ ID NO: 23463 - protein, 12 aa, Homo sapiens
  ( 238 )...( 249 ): >Z234_HUMAN
GKGFSRRSTLTV

SEQ ID NO: 23464 - protein, 12 aa, Homo sapiens
  ( 292 )...( 303 ): >Z234_HUMAN
TCGKNFRRRSAL

SEQ ID NO: 23465 - protein, 12 aa, Homo sapiens
  ( 434 )...( 445 ): >Z234_HUMAN
GKAFRQSSYLKI

SEQ ID NO: 23466 - protein, 12 aa, Homo sapiens
  ( 490 )...( 501 ): >Z234_HUMAN
GKGFNRRADLKI

SEQ ID NO: 23467 - protein, 12 aa, Homo sapiens
  ( 99 )...( 110 ): >Z236_HUMAN
NKKFSRVASLKA

SEQ ID NO: 23468 - protein, 12 aa, Homo sapiens
  ( 100 )...( 111 ): >Z236_HUMAN
KKFSRVASLKAH

SEQ ID NO: 23469 - protein, 12 aa, Homo sapiens
  ( 203 )...( 214 ): >Z236_HUMAN
GKTFQKPSQLTR

SEQ ID NO: 23470 - protein, 12 aa, Homo sapiens
  ( 463 )...( 474 ): >Z236_HUMAN
KKKSPFLPGSIR

SEQ ID NO: 23471 - protein, 12 aa, Homo sapiens
  ( 553 )...( 564 ): >Z236_HUMAN
LKVHIRLHTGVR

SEQ ID NO: 23472 - protein, 12 aa, Homo sapiens
  ( 554 )...( 565 ): >Z236_HUMAN
KVHIRLHTGVRP

SEQ ID NO: 23473 - protein, 12 aa, Homo sapiens
  ( 599 )...( 610 ): >Z236_HUMAN
HQRKPAKVRVGK

SEQ ID NO: 23474 - protein, 12 aa, Homo sapiens
  ( 600 )...( 611 ): >Z236_HUMAN
QRKPAKVRVGKT

SEQ ID NO: 23475 - protein, 12 aa, Homo sapiens
  ( 601 )...( 612 ): >Z236_HUMAN
RKPAKVRVGKTN

SEQ ID NO: 23476 - protein, 12 aa, Homo sapiens
  ( 602 )...( 613 ): >Z236_HUMAN
KPAKVRVGKTNV

SEQ ID NO: 23477 - protein, 12 aa, Homo sapiens
  ( 603 )...( 614 ): >Z236_HUMAN
PAKVRVGKTNVP

SEQ ID NO: 23478 - protein, 12 aa, Homo sapiens
  ( 604 )...( 615 ): >Z236_HUMAN
AKVRVGKTNVPV

SEQ ID NO: 23479 - protein, 12 aa, Homo sapiens
  ( 605 )...( 616 ): >Z236_HUMAN
KVRVGKTNVPVP

SEQ ID NO: 23480 - protein, 12 aa, Homo sapiens
  ( 747 )...( 758 ): >Z236_HUMAN
QKTFKTSLNCKK

SEQ ID NO: 23481 - protein, 12 aa, Homo sapiens
  ( 1280 )...( 1291 ): >Z236_HUMAN
KARKPMTRSSSE

SEQ ID NO: 23482 - protein, 12 aa, Homo sapiens
  ( 1690 )...( 1701 ): >Z236_HUMAN
VCRKAFKRATHL

SEQ ID NO: 23483 - protein, 12 aa, Homo sapiens
  ( 109 )...( 120 ): >Z253_HUMAN
NLQLKKGCKSVG

SEQ ID NO: 23484 - protein, 12 aa, Homo sapiens
  ( 105 )...( 116 ): >Z254_HUMAN
QKAILRRYGKYG

SEQ ID NO: 23485 - protein, 12 aa, Homo sapiens
  ( 183 )...( 194 ): >Z254_HUMAN
KCKKRVKLFCML

SEQ ID NO: 23486 - protein, 12 aa, Homo sapiens
  ( 154 )...( 165 ): >Z255_HUMAN
GKGFSRRSALNV

SEQ ID NO: 23487 - protein, 12 aa, Homo sapiens
  ( 155 )...( 166 ): >Z255_HUMAN
KGFSRRSALNVH

SEQ ID NO: 23488 - protein, 12 aa, Homo sapiens
  ( 345 )...( 356 ): >Z255_HUMAN
KCVECGKGYKRR

SEQ ID NO: 23489 - protein, 12 aa, Homo sapiens
  ( 38 )...( 49 ): >Z256_HUMAN
TRKKSNRTKSAV

SEQ ID NO: 23490 - protein, 12 aa, Homo sapiens
  ( 39 )...( 50 ): >Z256_HUMAN
RKKSNRTKSAVA

SEQ ID NO: 23491 - protein, 12 aa, Homo sapiens
  ( 40 )...( 51 ): >Z256_HUMAN
KKSNRTKSAVAF

SEQ ID NO: 23492 - protein, 12 aa, Homo sapiens
  ( 64 )...( 75 ): >Z256_HUMAN
VKAFSYKHVRVQ

SEQ ID NO: 23493 - protein, 12 aa, Homo sapiens
  ( 124 )...( 135 ): >Z256_HUMAN
RQSSSLITHRRI

SEQ ID NO: 23494 - protein, 12 aa, Homo sapiens
  ( 129 )...( 140 ): >Z256_HUMAN
LITHRRIHTGVR

SEQ ID NO: 23495 - protein, 12 aa, Homo sapiens
  ( 130 )...( 141 ): >Z256_HUMAN
ITHRRIHTGVRP

SEQ ID NO: 23496 - protein, 12 aa, Homo sapiens
  ( 133 )...( 144 ): >Z256_HUMAN
RRIHTGVRPHQC

SEQ ID NO: 23497 - protein, 12 aa, Homo sapiens
  ( 409 )...( 420 ): >Z256_HUMAN
LVKHRRVHTGER

SEQ ID NO: 23498 - protein, 12 aa, Homo sapiens
  ( 410 )...( 421 ): >Z256_HUMAN
VKHRRVHTGERL

SEQ ID NO: 23499 - protein, 12 aa, Homo sapiens
  ( 164 )...( 175 ): >Z257_HUMAN
KIRHTEKKTCKC

SEQ ID NO: 23500 - protein, 12 aa, Homo sapiens
  ( 165 )...( 176 ): >Z257_HUMAN
IRHTEKKTCKCK

SEQ ID NO: 23501 - protein, 12 aa, Homo sapiens
  ( 265 )...( 276 ): >Z264_HUMAN
GKAFNRKSYLTQ

SEQ ID NO: 23502 - protein, 12 aa, Homo sapiens
  ( 489 )...( 500 ): >Z264_HUMAN
GKAFTRMSGLTR

SEQ ID NO: 23503 - protein, 12 aa, Homo sapiens
  ( 490 )...( 501 ): >Z264_HUMAN
KAFTRMSGLTRH

SEQ ID NO: 23504 - protein, 12 aa, Homo sapiens
  ( 491 )...( 502 ): >Z264_HUMAN
AFTRMSGLTRHK

SEQ ID NO: 23505 - protein, 12 aa, Homo sapiens
  ( 493 )...( 504 ): >Z264_HUMAN
TRMSGLTRHKRI

SEQ ID NO: 23506 - protein, 12 aa, Homo sapiens
  ( 93 )...( 104 ): >Z267_HUMAN
ASFQKVISRRHG

SEQ ID NO: 23507 - protein, 12 aa, Homo sapiens
  ( 94 )...( 105 ): >Z267_HUMAN
SFQKVISRRHGS

SEQ ID NO: 23508 - protein, 12 aa, Homo sapiens
  ( 43 )...( 54 ): >Z268_HUMAN
QPLPGTPRQKQK

SEQ ID NO: 23509 - protein, 12 aa, Homo sapiens
  ( 44 )...( 55 ): >Z268_HUMAN
PLPGTPRQKQKS

SEQ ID NO: 23510 - protein, 12 aa, Homo sapiens
  ( 45 )...( 56 ): >Z268_HUMAN
LPGTPRQKQKSR

SEQ ID NO: 23511 - protein, 12 aa, Homo sapiens
  ( 186 )...( 197 ): >Z268_HUMAN
KLCLLSTKYLSR

SEQ ID NO: 23512 - protein, 12 aa, Homo sapiens
  ( 188 )...( 199 ): >Z268_HUMAN
CLLSTKYLSRQK

SEQ ID NO: 23513 - protein, 12 aa, Homo sapiens
  ( 189 )...( 200 ): >Z268_HUMAN
LLSTKYLSRQKP

SEQ ID NO: 23514 - protein, 12 aa, Homo sapiens
  ( 197 )...( 208 ): >Z268_HUMAN
RQKPHKCGTHGK

SEQ ID NO: 23515 - protein, 12 aa, Homo sapiens
  ( 506 )...( 517 ): >Z268_HUMAN
GKAFRSKSYLII

SEQ ID NO: 23516 - protein, 12 aa, Homo sapiens
  ( 562 )...( 573 ): >Z268_HUMAN
GKAFSRKYQLIS

SEQ ID NO: 23517 - protein, 12 aa, Homo sapiens
  ( 702 )...( 713 ): >Z268_HUMAN
GKAFRSKSYLII

SEQ ID NO: 23518 - protein, 12 aa, Homo sapiens
  ( 845 )...( 856 ): >Z268_HUMAN
FSGKLRLLVHQR

SEQ ID NO: 23519 - protein, 12 aa, Homo sapiens
  ( 846 )...( 857 ): >Z268_HUMAN
SGKLRLLVHQRM

SEQ ID NO: 23520 - protein, 12 aa, Homo sapiens
  ( 847 )...( 858 ): >Z268_HUMAN
GKLRLLVHQRMH

SEQ ID NO: 23521 - protein, 12 aa, Homo sapiens
  ( 44 )...( 55 ): >Z271_HUMAN
SSSLRMFSRILK

SEQ ID NO: 23522 - protein, 12 aa, Homo sapiens
  ( 45 )...( 56 ): >Z271_HUMAN
SSLRMFSRILKA

SEQ ID NO: 23523 - protein, 12 aa, Homo sapiens
  ( 46 )...( 57 ): >Z271_HUMAN
SLRMFSRILKAK

SEQ ID NO: 23524 - protein, 12 aa, Homo sapiens
  ( 49 )...( 60 ): >Z271_HUMAN
MFSRILKAKNSV

SEQ ID NO: 23525 - protein, 12 aa, Homo sapiens
  ( 50 )...( 61 ): >Z271_HUMAN
FSRILKAKNSVN

SEQ ID NO: 23526 - protein, 12 aa, Homo sapiens
  ( 51 )...( 62 ): >Z271_HUMAN
SRILKAKNSVNL

SEQ ID NO: 23527 - protein, 12 aa, Homo sapiens
  ( 52 )...( 63 ): >Z271_HUMAN
RILKAKNSVNLG

SEQ ID NO: 23528 - protein, 12 aa, Homo sapiens
  ( 10 )...( 21 ): >Z272_HUMAN
GKAFSIRKDLIR

SEQ ID NO: 23529 - protein, 12 aa, Homo sapiens
  ( 38 )...( 49 ): >Z272_HUMAN
GKAFTRMSGLTR

SEQ ID NO: 23530 - protein, 12 aa, Homo sapiens
  ( 39 )...( 50 ): >Z272_HUMAN
KAFTRMSGLTRH

SEQ ID NO: 23531 - protein, 12 aa, Homo sapiens
  ( 66 )...( 77 ): >Z272_HUMAN
GKAFCRTTNLIR

SEQ ID NO: 23532 - protein, 12 aa, Homo sapiens
  ( 86 )...( 97 ): >Z273_HUMAN
CGKAFKRSTTLK

SEQ ID NO: 23533 - protein, 12 aa, Homo sapiens
  ( 87 )...( 98 ): >Z273_HUMAN
GKAFKRSTTLKH

SEQ ID NO: 23534 - protein, 12 aa, Homo sapiens
  ( 93 )...( 104 ): >Z273_HUMAN
STTLKHKRIYTK

SEQ ID NO: 23535 - protein, 12 aa, Homo sapiens
  ( 140 )...( 151 ): >Z275_HUMAN
RLKVLLVQHQRV

SEQ ID NO: 23536 - protein, 12 aa, Homo sapiens
  ( 216 )...( 227 ): >Z275_HUMAN
GKRFKKNAGLSQ

SEQ ID NO: 23537 - protein, 12 aa, Homo sapiens
  ( 220 )...( 231 ): >Z275_HUMAN
KKNAGLSQHLRV

SEQ ID NO: 23538 - protein, 12 aa, Homo sapiens
  ( 328 )...( 339 ): >Z275_HUMAN
GKLFRRSSELTK

SEQ ID NO: 23539 - protein, 12 aa, Homo sapiens
  ( 393 )...( 404 ): >Z275_HUMAN
LIKHRRIHSGLK

SEQ ID NO: 23540 - protein, 12 aa, Homo sapiens
  ( 412 )...( 423 ): >Z275_HUMAN
GKAFRRSSGLSR

SEQ ID NO: 23541 - protein, 12 aa, Homo sapiens
  ( 419 )...( 430 ): >Z275_HUMAN
SGLSRHRRIHSG

SEQ ID NO: 23542 - protein, 12 aa, Homo sapiens
  ( 420 )...( 431 ): >Z275_HUMAN
GLSRHRRIHSGA

SEQ ID NO: 23543 - protein, 12 aa, Homo sapiens
  ( 437 )...( 448 ): >Z275_HUMAN
SQCGRVFKRRSA

SEQ ID NO: 23544 - protein, 12 aa, Homo sapiens
  ( 438 )...( 449 ): >Z275_HUMAN
QCGRVFKRRSAL

SEQ ID NO: 23545 - protein, 12 aa, Homo sapiens
  ( 439 )...( 450 ): >Z275_HUMAN
CGRVFKRRSALQ

SEQ ID NO: 23546 - protein, 12 aa, Homo sapiens
  ( 331 )...( 342 ): >Z277_HUMAN
QVKLVNFIRRQV

SEQ ID NO: 23547 - protein, 12 aa, Homo sapiens
  ( 98 )...( 109 ): >Z286_HUMAN
PLKLERKAPKSS

SEQ ID NO: 23548 - protein, 12 aa, Homo sapiens
  ( 458 )...( 469 ): >Z286_HUMAN
RIHIGKKPYKCS

SEQ ID NO: 23549 - protein, 12 aa, Homo sapiens
  ( 504 )...( 515 ): >Z286_HUMAN
KCSSSLIRHQRV

SEQ ID NO: 23550 - protein, 12 aa, Homo sapiens
  ( 53 )...( 64 ): >Z287_HUMAN
LAGPRKALSQLR

SEQ ID NO: 23551 - protein, 12 aa, Homo sapiens
  ( 269 )...( 280 ): >Z287_HUMAN
LERRGKGGFWKI

SEQ ID NO: 23552 - protein, 12 aa, Homo sapiens
  ( 271 )...( 282 ): >Z287_HUMAN
RRGKGGFWKIHT

SEQ ID NO: 23553 - protein, 12 aa, Homo sapiens
  ( 520 )...( 531 ): >Z287_HUMAN
QKIHTGKKPYKC

SEQ ID NO: 23554 - protein, 12 aa, Homo sapiens
  ( 108 )...( 119 ): >Z288_HUMAN
VRIHGSMLRAHR

SEQ ID NO: 23555 - protein, 12 aa, Homo sapiens
  ( 109 )...( 120 ): >Z288_HUMAN
RIHGSMLRAHRC

SEQ ID NO: 23556 - protein, 12 aa, Homo sapiens
  ( 313 )...( 324 ): >Z288_HUMAN
KQPRPVRIQTLV

SEQ ID NO: 23557 - protein, 12 aa, Homo sapiens
  ( 666 )...( 677 ): >Z288_HUMAN
ICKKKFSHKTLL

SEQ ID NO: 23558 - protein, 12 aa, Homo sapiens
  ( 374 )...( 385 ): >Z292_HUMAN
AAFKMQRKSKKG

SEQ ID NO: 23559 - protein, 12 aa, Homo sapiens
  ( 584 )...( 595 ): >Z292_HUMAN
SAPEKVKKDRGR

SEQ ID NO: 23560 - protein, 12 aa, Homo sapiens
  ( 585 )...( 596 ): >Z292_HUMAN
APEKVKKDRGRG

SEQ ID NO: 23561 - protein, 12 aa, Homo sapiens
  ( 586 )...( 597 ): >Z292_HUMAN
PEKVKKDRGRGP

SEQ ID NO: 23562 - protein, 12 aa, Homo sapiens
  ( 588 )...( 599 ): >Z292_HUMAN
KVKKDRGRGPNG

SEQ ID NO: 23563 - protein, 12 aa, Homo sapiens
  ( 589 )...( 600 ): >Z292_HUMAN
VKKDRGRGPNGK

SEQ ID NO: 23564 - protein, 12 aa, Homo sapiens
  ( 594 )...( 605 ): >Z292_HUMAN
GRGPNGKERKPK

SEQ ID NO: 23565 - protein, 12 aa, Homo sapiens
  ( 608 )...( 619 ): >Z292_HUMAN
KRAKWPAIIRDG

SEQ ID NO: 23566 - protein, 12 aa, Homo sapiens
  ( 609 )...( 620 ): >Z292_HUMAN
RAKWPAIIRDGK

SEQ ID NO: 23567 - protein, 12 aa, Homo sapiens
  ( 634 )...( 645 ): >Z292_HUMAN
RSLGGHLSKRSY

SEQ ID NO: 23568 - protein, 12 aa, Homo sapiens
  ( 870 )...( 881 ): >Z292_HUMAN
GNSASKRRKKVA

SEQ ID NO: 23569 - protein, 12 aa, Homo sapiens
  ( 872 )...( 883 ): >Z292_HUMAN
SASKRRKKVAPP

SEQ ID NO: 23570 - protein, 12 aa, Homo sapiens
  ( 873 )...( 884 ): >Z292_HUMAN
ASKRRKKVAPPL

SEQ ID NO: 23571 - protein, 12 aa, Homo sapiens
  ( 874 )...( 885 ): >Z292_HUMAN
SKRRKKVAPPLI

SEQ ID NO: 23572 - protein, 12 aa, Homo sapiens
  ( 876 )...( 887 ): >Z292_HUMAN
RRKKVAPPLIAP

SEQ ID NO: 23573 - protein, 12 aa, Homo sapiens
  ( 1201 )...( 1212 ): >Z292_HUMAN
TKTFTRNSNLRA

SEQ ID NO: 23574 - protein, 12 aa, Homo sapiens
  ( 1224 )...( 1235 ): >Z292_HUMAN
EMVKLKIKRPYG

SEQ ID NO: 23575 - protein, 12 aa, Homo sapiens
  ( 1242 )...( 1253 ): >Z292_HUMAN
NVPASRSTQVKK

SEQ ID NO: 23576 - protein, 12 aa, Homo sapiens
  ( 1243 )...( 1254 ): >Z292_HUMAN
VPASRSTQVKKQ

SEQ ID NO: 23577 - protein, 12 aa, Homo sapiens
  ( 1244 )...( 1255 ): >Z292_HUMAN
PASRSTQVKKQL

SEQ ID NO: 23578 - protein, 12 aa, Homo sapiens
  ( 1245 )...( 1256 ): >Z292_HUMAN
ASRSTQVKKQLA

SEQ ID NO: 23579 - protein, 12 aa, Homo sapiens
  ( 1246 )...( 1257 ): >Z292_HUMAN
SRSTQVKKQLAM

SEQ ID NO: 23580 - protein, 12 aa, Homo sapiens
  ( 1247 )...( 1258 ): >Z292_HUMAN
RSTQVKKQLAMT

SEQ ID NO: 23581 - protein, 12 aa, Homo sapiens
  ( 1316 )...( 1327 ): >Z292_HUMAN
NALTNTQTKGRK

SEQ ID NO: 23582 - protein, 12 aa, Homo sapiens
  ( 1317 )...( 1328 ): >Z292_HUMAN
ALTNTQTKGRKI

SEQ ID NO: 23583 - protein, 12 aa, Homo sapiens
  ( 1318 )...( 1329 ): >Z292_HUMAN
LTNTQTKGRKIR

SEQ ID NO: 23584 - protein, 12 aa, Homo sapiens
  ( 1319 )...( 1330 ): >Z292_HUMAN
TNTQTKGRKIRR

SEQ ID NO: 23585 - protein, 12 aa, Homo sapiens
  ( 1533 )...( 1544 ): >Z292_HUMAN
AHLIRPRRLTPG

SEQ ID NO: 23586 - protein, 12 aa, Homo sapiens
  ( 1534 )...( 1545 ): >Z292_HUMAN
HLIRPRRLTPGQ

SEQ ID NO: 23587 - protein, 12 aa, Homo sapiens
  ( 1568 )...( 1579 ): >Z292_HUMAN
RCGKEGIKMPKT

SEQ ID NO: 23588 - protein, 12 aa, Homo sapiens
  ( 1570 )...( 1581 ): >Z292_HUMAN
GKEGIKMPKTKR

SEQ ID NO: 23589 - protein, 12 aa, Homo sapiens
  ( 1571 )...( 1582 ): >Z292_HUMAN
KEGIKMPKTKRK

SEQ ID NO: 23590 - protein, 12 aa, Homo sapiens
  ( 1572 )...( 1583 ): >Z292_HUMAN
EGIKMPKTKRKK

SEQ ID NO: 23591 - protein, 12 aa, Homo sapiens
  ( 1604 )...( 1615 ): >Z292_HUMAN
SLKRGKHVYSIK

SEQ ID NO: 23592 - protein, 12 aa, Homo sapiens
  ( 1605 )...( 1616 ): >Z292_HUMAN
LKRGKHVYSIKA

SEQ ID NO: 23593 - protein, 12 aa, Homo sapiens
  ( 1785 )...( 1796 ): >Z292_HUMAN
VSQNKKRKVEKA

SEQ ID NO: 23594 - protein, 12 aa, Homo sapiens
  ( 1789 )...( 1800 ): >Z292_HUMAN
KKRKVEKAEPAS

SEQ ID NO: 23595 - protein, 12 aa, Homo sapiens
  ( 39 )...( 50 ): >Z295_HUMAN
QKFRAHKNVLAA

SEQ ID NO: 23596 - protein, 12 aa, Homo sapiens
  ( 144 )...( 155 ): >Z295_HUMAN
SQKRSVIVCQSR

SEQ ID NO: 23597 - protein, 12 aa, Homo sapiens
  ( 145 )...( 156 ): >Z295_HUMAN
QKRSVIVCQSRN

SEQ ID NO: 23598 - protein, 12 aa, Homo sapiens
  ( 229 )...( 240 ): >Z295_HUMAN
PNRISLVKRNAV

SEQ ID NO: 23599 - protein, 12 aa, Homo sapiens
  ( 230 )...( 241 ): >Z295_HUMAN
NRISLVKRNAVL

SEQ ID NO: 23600 - protein, 12 aa, Homo sapiens
  ( 231 )...( 242 ): >Z295_HUMAN
RISLVKRNAVLP

SEQ ID NO: 23601 - protein, 12 aa, Homo sapiens
  ( 233 )...( 244 ): >Z295_HUMAN
SLVKRNAVLPSK

SEQ ID NO: 23602 - protein, 12 aa, Homo sapiens
  ( 234 )...( 245 ): >Z295_HUMAN
LVKRNAVLPSKP

SEQ ID NO: 23603 - protein, 12 aa, Homo sapiens
  ( 235 )...( 246 ): >Z295_HUMAN
VKRNAVLPSKPL

SEQ ID NO: 23604 - protein, 12 aa, Homo sapiens
  ( 236 )...( 247 ): >Z295_HUMAN
KRNAVLPSKPLQ

SEQ ID NO: 23605 - protein, 12 aa, Homo sapiens
  ( 263 )...( 274 ): >Z295_HUMAN
PKGKALELALKR

SEQ ID NO: 23606 - protein, 12 aa, Homo sapiens
  ( 264 )...( 275 ): >Z295_HUMAN
KGKALELALKRP

SEQ ID NO: 23607 - protein, 12 aa, Homo sapiens
  ( 265 )...( 276 ): >Z295_HUMAN
GKALELALKRPR

SEQ ID NO: 23608 - protein, 12 aa, Homo sapiens
  ( 266 )...( 277 ): >Z295_HUMAN
KALELALKRPRP

SEQ ID NO: 23609 - protein, 12 aa, Homo sapiens
  ( 270 )...( 281 ): >Z295_HUMAN
LALKRPRPPVLS

SEQ ID NO: 23610 - protein, 12 aa, Homo sapiens
  ( 271 )...( 282 ): >Z295_HUMAN
ALKRPRPPVLSV

SEQ ID NO: 23611 - protein, 12 aa, Homo sapiens
  ( 331 )...( 342 ): >Z295_HUMAN
RSGPLVKSLLRR

SEQ ID NO: 23612 - protein, 12 aa, Homo sapiens
  ( 332 )...( 343 ): >Z295_HUMAN
SGPLVKSLLRRS

SEQ ID NO: 23613 - protein, 12 aa, Homo sapiens
  ( 333 )...( 344 ): >Z295_HUMAN
GPLVKSLLRRSL

SEQ ID NO: 23614 - protein, 12 aa, Homo sapiens
  ( 334 )...( 345 ): >Z295_HUMAN
PLVKSLLRRSLS

SEQ ID NO: 23615 - protein, 12 aa, Homo sapiens
  ( 335 )...( 346 ): >Z295_HUMAN
LVKSLLRRSLSM

SEQ ID NO: 23616 - protein, 12 aa, Homo sapiens
  ( 552 )...( 563 ): >Z295_HUMAN
LKIFRSTAGLHR

SEQ ID NO: 23617 - protein, 12 aa, Homo sapiens
  ( 627 )...( 638 ): >Z295_HUMAN
REREIKKALIIK

SEQ ID NO: 23618 - protein, 12 aa, Homo sapiens
  ( 629 )...( 640 ): >Z295_HUMAN
REIKKALIIKLR

SEQ ID NO: 23619 - protein, 12 aa, Homo sapiens
  ( 630 )...( 641 ): >Z295_HUMAN
EIKKALIIKLRR

SEQ ID NO: 23620 - protein, 12 aa, Homo sapiens
  ( 634 )...( 645 ): >Z295_HUMAN
ALIIKLRRGKPG

SEQ ID NO: 23621 - protein, 12 aa, Homo sapiens
  ( 635 )...( 646 ): >Z295_HUMAN
LIIKLRRGKPGF

SEQ ID NO: 23622 - protein, 12 aa, Homo sapiens
  ( 636 )...( 647 ): >Z295_HUMAN
IIKLRRGKPGFQ

SEQ ID NO: 23623 - protein, 12 aa, Homo sapiens
  ( 637 )...( 648 ): >Z295_HUMAN
IKLRRGKPGFQG

SEQ ID NO: 23624 - protein, 12 aa, Homo sapiens
  ( 638 )...( 649 ): >Z295_HUMAN
KLRRGKPGFQGQ

SEQ ID NO: 23625 - protein, 12 aa, Homo sapiens
  ( 639 )...( 650 ): >Z295_HUMAN
LRRGKPGFQGQS

SEQ ID NO: 23626 - protein, 12 aa, Homo sapiens
  ( 652 )...( 663 ): >Z295_HUMAN
SQAQQVIKRNLR

SEQ ID NO: 23627 - protein, 12 aa, Homo sapiens
  ( 653 )...( 664 ): >Z295_HUMAN
QAQQVIKRNLRS

SEQ ID NO: 23628 - protein, 12 aa, Homo sapiens
  ( 660 )...( 671 ): >Z295_HUMAN
RNLRSRAKGAYI

SEQ ID NO: 23629 - protein, 12 aa, Homo sapiens
  ( 662 )...( 673 ): >Z295_HUMAN
LRSRAKGAYICT

SEQ ID NO: 23630 - protein, 12 aa, Homo sapiens
  ( 696 )...( 707 ): >Z295_HUMAN
KPLGVNKVAKPK

SEQ ID NO: 23631 - protein, 12 aa, Homo sapiens
  ( 1036 )...( 1047 ): >Z295_HUMAN
AITFKRQFMCKL

SEQ ID NO: 23632 - protein, 12 aa, Homo sapiens
  ( 293 )...( 304 ): >Z297_HUMAN
PQKHWVYVKRGG

SEQ ID NO: 23633 - protein, 12 aa, Homo sapiens
  ( 565 )...( 576 ): >Z297_HUMAN
RRHRLGGVGAVP

SEQ ID NO: 23634 - protein, 12 aa, Homo sapiens
  ( 61 )...( 72 ): >Z29B_HUMAN
QVLLKNSRRIVL

SEQ ID NO: 23635 - protein, 12 aa, Homo sapiens
  ( 62 )...( 73 ): >Z29B_HUMAN
VLLKNSRRIVLP

SEQ ID NO: 23636 - protein, 12 aa, Homo sapiens
  ( 404 )...( 415 ): >Z29B_HUMAN
VCGKKFKMKHHL

SEQ ID NO: 23637 - protein, 12 aa, Homo sapiens
  ( 405 )...( 416 ): >Z29B_HUMAN
CGKKFKMKHHLV

SEQ ID NO: 23638 - protein, 12 aa, Homo sapiens
  ( 406 )...( 417 ): >Z29B_HUMAN
GKKFKMKHHLVG

SEQ ID NO: 23639 - protein, 12 aa, Homo sapiens
  ( 275 )...( 286 ): >Z300_HUMAN
GKAFAKKSQLIV

SEQ ID NO: 23640 - protein, 12 aa, Homo sapiens
  ( 279 )...( 290 ): >Z300_HUMAN
AKKSQLIVHQRI

SEQ ID NO: 23641 - protein, 12 aa, Homo sapiens
  ( 470 )...( 481 ): >Z300_HUMAN
CGKTFSRKSQLI

SEQ ID NO: 23642 - protein, 12 aa, Homo sapiens
  ( 471 )...( 482 ): >Z300_HUMAN
GKTFSRKSQLII

SEQ ID NO: 23643 - protein, 12 aa, Homo sapiens
  ( 475 )...( 486 ): >Z300_HUMAN
SRKSQLIIHQRT

SEQ ID NO: 23644 - protein, 12 aa, Homo sapiens
  ( 124 )...( 135 ): >Z302_HUMAN
TVEAFSRSKKKK

SEQ ID NO: 23645 - protein, 12 aa, Homo sapiens
  ( 148 )...( 159 ): >Z302_HUMAN
IYFRLGIKMGKQ

SEQ ID NO: 23646 - protein, 12 aa, Homo sapiens
  ( 149 )...( 160 ): >Z302_HUMAN
YFRLGIKMGKQG

SEQ ID NO: 23647 - protein, 12 aa, Homo sapiens
  ( 150 )...( 161 ): >Z302_HUMAN
FRLGIKMGKQGI

SEQ ID NO: 23648 - protein, 12 aa, Homo sapiens
  ( 153 )...( 164 ): >Z302_HUMAN
GIKMGKQGIINK

SEQ ID NO: 23649 - protein, 12 aa, Homo sapiens
  ( 230 )...( 241 ): >Z302_HUMAN
ILKKNLSKKSVI

SEQ ID NO: 23650 - protein, 12 aa, Homo sapiens
  ( 231 )...( 242 ): >Z302_HUMAN
LKKNLSKKSVIK

SEQ ID NO: 23651 - protein, 12 aa, Homo sapiens
  ( 232 )...( 243 ): >Z302_HUMAN
KKNLSKKSVIKS

SEQ ID NO: 23652 - protein, 12 aa, Homo sapiens
  ( 237 )...( 248 ): >Z302_HUMAN
KKSVIKSERING

SEQ ID NO: 23653 - protein, 12 aa, Homo sapiens
  ( 240 )...( 251 ): >Z302_HUMAN
VIKSERINGGKK

SEQ ID NO: 23654 - protein, 12 aa, Homo sapiens
  ( 241 )...( 252 ): >Z302_HUMAN
IKSERINGGKKL

SEQ ID NO: 23655 - protein, 12 aa, Homo sapiens
  ( 242 )...( 253 ): >Z302_HUMAN
KSERINGGKKLL

SEQ ID NO: 23656 - protein, 12 aa, Homo sapiens
  ( 245 )...( 256 ): >Z302_HUMAN
RINGGKKLLNSN

SEQ ID NO: 23657 - protein, 12 aa, Homo sapiens
  ( 246 )...( 257 ): >Z302_HUMAN
INGGKKLLNSNK

SEQ ID NO: 23658 - protein, 12 aa, Homo sapiens
  ( 286 )...( 297 ): >Z302_HUMAN
GKAFGKQSILSR

SEQ ID NO: 23659 - protein, 12 aa, Homo sapiens
  ( 112 )...( 123 ): >Z304_HUMAN
LTQKLCTRGLCR

SEQ ID NO: 23660 - protein, 12 aa, Homo sapiens
  ( 113 )...( 124 ): >Z304_HUMAN
TQKLCTRGLCRR

SEQ ID NO: 23661 - protein, 12 aa, Homo sapiens
  ( 116 )...( 127 ): >Z304_HUMAN
LCTRGLCRRRFS

SEQ ID NO: 23662 - protein, 12 aa, Homo sapiens
  ( 187 )...( 198 ): >Z304_HUMAN
TTYNRVSPCRRT

SEQ ID NO: 23663 - protein, 12 aa, Homo sapiens
  ( 621 )...( 632 ): >Z304_HUMAN
GKAYSRSSHLVR

SEQ ID NO: 23664 - protein, 12 aa, Homo sapiens
  ( 298 )...( 309 ): >Z306_HUMAN
EGRLQRKQKNAT

SEQ ID NO: 23665 - protein, 12 aa, Homo sapiens
  ( 299 )...( 310 ): >Z306_HUMAN
GRLQRKQKNATG

SEQ ID NO: 23666 - protein, 12 aa, Homo sapiens
  ( 300 )...( 311 ): >Z306_HUMAN
RLQRKQKNATGG

SEQ ID NO: 23667 - protein, 12 aa, Homo sapiens
  ( 301 )...( 312 ): >Z306_HUMAN
LQRKQKNATGGR

SEQ ID NO: 23668 - protein, 12 aa, Homo sapiens
  ( 304 )...( 315 ): >Z306_HUMAN
KQKNATGGRRHI

SEQ ID NO: 23669 - protein, 12 aa, Homo sapiens
  ( 305 )...( 316 ): >Z306_HUMAN
QKNATGGRRHIC

SEQ ID NO: 23670 - protein, 12 aa, Homo sapiens
  ( 323 )...( 334 ): >Z306_HUMAN
FAQSSGLSKHRR

SEQ ID NO: 23671 - protein, 12 aa, Homo sapiens
  ( 324 )...( 335 ): >Z306_HUMAN
AQSSGLSKHRRI

SEQ ID NO: 23672 - protein, 12 aa, Homo sapiens
  ( 264 )...( 275 ): >Z307_HUMAN
QTKSRDLPPVKK

SEQ ID NO: 23673 - protein, 12 aa, Homo sapiens
  ( 265 )...( 276 ): >Z307_HUMAN
TKSRDLPPVKKL

SEQ ID NO: 23674 - protein, 12 aa, Homo sapiens
  ( 305 )...( 316 ): >Z307_HUMAN
GRLQRKQKNAIG

SEQ ID NO: 23675 - protein, 12 aa, Homo sapiens
  ( 306 )...( 317 ): >Z307_HUMAN
RLQRKQKNAIGS

SEQ ID NO: 23676 - protein, 12 aa, Homo sapiens
  ( 307 )...( 318 ): >Z307_HUMAN
LQRKQKNAIGSR

SEQ ID NO: 23677 - protein, 12 aa, Homo sapiens
  ( 329 )...( 340 ): >Z307_HUMAN
FAQSSGLTKHRR

SEQ ID NO: 23678 - protein, 12 aa, Homo sapiens
  ( 330 )...( 341 ): >Z307_HUMAN
AQSSGLTKHRRI

SEQ ID NO: 23679 - protein, 12 aa, Homo sapiens
  ( 181 )...( 192 ): >Z317_HUMAN
LTQPMGRHAGKR

SEQ ID NO: 23680 - protein, 12 aa, Homo sapiens
  ( 231 )...( 242 ): >Z317_HUMAN
FTTSASLTRHRR

SEQ ID NO: 23681 - protein, 12 aa, Homo sapiens
  ( 232 )...( 243 ): >Z317_HUMAN
TTSASLTRHRRI

SEQ ID NO: 23682 - protein, 12 aa, Homo sapiens
  ( 235 )...( 246 ): >Z317_HUMAN
ASLTRHRRIHTG

SEQ ID NO: 23683 - protein, 12 aa, Homo sapiens
  ( 287 )...( 298 ): >Z317_HUMAN
FRTLSALKIHMR

SEQ ID NO: 23684 - protein, 12 aa, Homo sapiens
  ( 288 )...( 299 ): >Z317_HUMAN
RTLSALKIHMRV

SEQ ID NO: 23685 - protein, 12 aa, Homo sapiens
  ( 396 )...( 407 ): >Z317_HUMAN
GKSFGDLVSRRK

SEQ ID NO: 23686 - protein, 12 aa, Homo sapiens
  ( 400 )...( 411 ): >Z317_HUMAN
GDLVSRRKHIRI

SEQ ID NO: 23687 - protein, 12 aa, Homo sapiens
  ( 407 )...( 418 ): >Z317_HUMAN
KHIRIHIVKKPV

SEQ ID NO: 23688 - protein, 12 aa, Homo sapiens
  ( 410 )...( 421 ): >Z317_HUMAN
RIHIVKKPVECR

SEQ ID NO: 23689 - protein, 12 aa, Homo sapiens
  ( 421 )...( 432 ): >Z317_HUMAN
RQCGKTFRNQSI

SEQ ID NO: 23690 - protein, 12 aa, Homo sapiens
  ( 423 )...( 434 ): >Z317_HUMAN
CGKTFRNQSILK

SEQ ID NO: 23691 - protein, 12 aa, Homo sapiens
  ( 424 )...( 435 ): >Z317_HUMAN
GKTFRNQSILKT

SEQ ID NO: 23692 - protein, 12 aa, Homo sapiens
  ( 494 )...( 505 ): >Z317_HUMAN
SVHLVKKRVECR

SEQ ID NO: 23693 - protein, 12 aa, Homo sapiens
  ( 495 )...( 506 ): >Z317_HUMAN
VHLVKKRVECRQ

SEQ ID NO: 23694 - protein, 12 aa, Homo sapiens
  ( 496 )...( 507 ): >Z317_HUMAN
HLVKKRVECRQC

SEQ ID NO: 23695 - protein, 12 aa, Homo sapiens
  ( 497 )...( 508 ): >Z317_HUMAN
LVKKRVECRQCG

SEQ ID NO: 23696 - protein, 12 aa, Homo sapiens
  ( 498 )...( 509 ): >Z317_HUMAN
VKKRVECRQCGK

SEQ ID NO: 23697 - protein, 12 aa, Homo sapiens
  ( 499 )...( 510 ): >Z317_HUMAN
KKRVECRQCGKA

SEQ ID NO: 23698 - protein, 12 aa, Homo sapiens
  ( 501 )...( 512 ): >Z317_HUMAN
RVECRQCGKAFR

SEQ ID NO: 23699 - protein, 12 aa, Homo sapiens
  ( 508 )...( 519 ): >Z317_HUMAN
GKAFRNQSTLKT

SEQ ID NO: 23700 - protein, 12 aa, Homo sapiens
  ( 438 )...( 449 ): >Z319_HUMAN
KRASALQKHQLA

SEQ ID NO: 23701 - protein, 12 aa, Homo sapiens
  ( 305 )...( 316 ): >Z323_HUMAN
SASNGLTRHRRI

SEQ ID NO: 23702 - protein, 12 aa, Homo sapiens
  ( 308 )...( 319 ): >Z323_HUMAN
NGLTRHRRIHTG

SEQ ID NO: 23703 - protein, 12 aa, Homo sapiens
  ( 383 )...( 394 ): >Z323_HUMAN
QCSKLFSKRTLL

SEQ ID NO: 23704 - protein, 12 aa, Homo sapiens
  ( 384 )...( 395 ): >Z323_HUMAN
CSKLFSKRTLLK

SEQ ID NO: 23705 - protein, 12 aa, Homo sapiens
  ( 385 )...( 396 ): >Z323_HUMAN
SKLFSKRTLLKK

SEQ ID NO: 23706 - protein, 12 aa, Homo sapiens
  ( 20 )...( 31 ): >Z324_HUMAN
TAQRALYRRVML

SEQ ID NO: 23707 - protein, 12 aa, Homo sapiens
  ( 115 )...( 126 ): >Z324_HUMAN
ACHSVKSLQRQR

SEQ ID NO: 23708 - protein, 12 aa, Homo sapiens
  ( 116 )...( 127 ): >Z324_HUMAN
CHSVKSLQRQRG

SEQ ID NO: 23709 - protein, 12 aa, Homo sapiens
  ( 117 )...( 128 ): >Z324_HUMAN
HSVKSLQRQRGA

SEQ ID NO: 23710 - protein, 12 aa, Homo sapiens
  ( 118 )...( 129 ): >Z324_HUMAN
SVKSLQRQRGAS

SEQ ID NO: 23711 - protein, 12 aa, Homo sapiens
  ( 119 )...( 130 ): >Z324_HUMAN
VKSLQRQRGASP

SEQ ID NO: 23712 - protein, 12 aa, Homo sapiens
  ( 120 )...( 131 ): >Z324_HUMAN
KSLQRQRGASPS

SEQ ID NO: 23713 - protein, 12 aa, Homo sapiens
  ( 121 )...( 132 ): >Z324_HUMAN
SLQRQRGASPSR

SEQ ID NO: 23714 - protein, 12 aa, Homo sapiens
  ( 126 )...( 137 ): >Z324_HUMAN
RGASPSRERKPT

SEQ ID NO: 23715 - protein, 12 aa, Homo sapiens
  ( 319 )...( 330 ): >Z324_HUMAN
GKAFRHSSSLVR

SEQ ID NO: 23716 - protein, 12 aa, Homo sapiens
  ( 356 )...( 367 ): >Z324_HUMAN
LSQHRKIHAGGR

SEQ ID NO: 23717 - protein, 12 aa, Homo sapiens
  ( 357 )...( 368 ): >Z324_HUMAN
SQHRKIHAGGRP

SEQ ID NO: 23718 - protein, 12 aa, Homo sapiens
  ( 462 )...( 473 ): >Z324_HUMAN
FAKGAVLLSHRR

SEQ ID NO: 23719 - protein, 12 aa, Homo sapiens
  ( 463 )...( 474 ): >Z324_HUMAN
AKGAVLLSHRRI

SEQ ID NO: 23720 - protein, 12 aa, Homo sapiens
  ( 464 )...( 475 ): >Z324_HUMAN
KGAVLLSHRRIH

SEQ ID NO: 23721 - protein, 12 aa, Homo sapiens
  ( 500 )...( 511 ): >Z324_HUMAN
QRIHTGEKTVRR

SEQ ID NO: 23722 - protein, 12 aa, Homo sapiens
  ( 501 )...( 512 ): >Z324_HUMAN
RIHTGEKTVRRS

SEQ ID NO: 23723 - protein, 12 aa, Homo sapiens
  ( 502 )...( 513 ): >Z324_HUMAN
IHTGEKTVRRSR

SEQ ID NO: 23724 - protein, 12 aa, Homo sapiens
  ( 503 )...( 514 ): >Z324_HUMAN
HTGEKTVRRSRA

SEQ ID NO: 23725 - protein, 12 aa, Homo sapiens
  ( 504 )...( 515 ): >Z324_HUMAN
TGEKTVRRSRAS

SEQ ID NO: 23726 - protein, 12 aa, Homo sapiens
  ( 505 )...( 516 ): >Z324_HUMAN
GEKTVRRSRASL

SEQ ID NO: 23727 - protein, 12 aa, Homo sapiens
  ( 508 )...( 519 ): >Z324_HUMAN
TVRRSRASLHPQ

SEQ ID NO: 23728 - protein, 12 aa, Homo sapiens
  ( 509 )...( 520 ): >Z324_HUMAN
VRRSRASLHPQA

SEQ ID NO: 23729 - protein, 12 aa, Homo sapiens
  ( 128 )...( 139 ): >Z325_HUMAN
VPSRKIAYKNSL

SEQ ID NO: 23730 - protein, 12 aa, Homo sapiens
  ( 432 )...( 443 ): >Z328_HUMAN
KCGKVFRNRSAL

SEQ ID NO: 23731 - protein, 12 aa, Homo sapiens
  ( 434 )...( 445 ): >Z328_HUMAN
GKVFRNRSALTK

SEQ ID NO: 23732 - protein, 12 aa, Homo sapiens
  ( 602 )...( 613 ): >Z328_HUMAN
GKAFRERSALTK

SEQ ID NO: 23733 - protein, 12 aa, Homo sapiens
  ( 576 )...( 587 ): >Z333_HUMAN
SLRKHARTHSGK

SEQ ID NO: 23734 - protein, 12 aa, Homo sapiens
  ( 636 )...( 647 ): >Z333_HUMAN
HKRTHVGRETIR

SEQ ID NO: 23735 - protein, 12 aa, Homo sapiens
  ( 637 )...( 648 ): >Z333_HUMAN
KRTHVGRETIRN

SEQ ID NO: 23736 - protein, 12 aa, Homo sapiens
  ( 149 )...( 160 ): >Z334_HUMAN
VIVAKKSKENRK

SEQ ID NO: 23737 - protein, 12 aa, Homo sapiens
  ( 150 )...( 161 ): >Z334_HUMAN
IVAKKSKENRKI

SEQ ID NO: 23738 - protein, 12 aa, Homo sapiens
  ( 213 )...( 224 ): >Z334_HUMAN
KCGKTFFKRAIL

SEQ ID NO: 23739 - protein, 12 aa, Homo sapiens
  ( 214 )...( 225 ): >Z334_HUMAN
CGKTFFKRAILI

SEQ ID NO: 23740 - protein, 12 aa, Homo sapiens
  ( 215 )...( 226 ): >Z334_HUMAN
GKTFFKRAILIT

SEQ ID NO: 23741 - protein, 12 aa, Homo sapiens
  ( 216 )...( 227 ): >Z334_HUMAN
KTFFKRAILITQ

SEQ ID NO: 23742 - protein, 12 aa, Homo sapiens
  ( 217 )...( 228 ): >Z334_HUMAN
TFFKRAILITQK

SEQ ID NO: 23743 - protein, 12 aa, Homo sapiens
  ( 218 )...( 229 ): >Z334_HUMAN
FFKRAILITQKG

SEQ ID NO: 23744 - protein, 12 aa, Homo sapiens
  ( 219 )...( 230 ): >Z334_HUMAN
FKRAILITQKGR

SEQ ID NO: 23745 - protein, 12 aa, Homo sapiens
  ( 220 )...( 231 ): >Z334_HUMAN
KRAILITQKGRQ

SEQ ID NO: 23746 - protein, 12 aa, Homo sapiens
  ( 221 )...( 232 ): >Z334_HUMAN
RAILITQKGRQT

SEQ ID NO: 23747 - protein, 12 aa, Homo sapiens
  ( 224 )...( 235 ): >Z334_HUMAN
LITQKGRQTERK

SEQ ID NO: 23748 - protein, 12 aa, Homo sapiens
  ( 225 )...( 236 ): >Z334_HUMAN
ITQKGRQTERKP

SEQ ID NO: 23749 - protein, 12 aa, Homo sapiens
  ( 241 )...( 252 ): >Z334_HUMAN
ECRKTFSKRSTL

SEQ ID NO: 23750 - protein, 12 aa, Homo sapiens
  ( 242 )...( 253 ): >Z334_HUMAN
CRKTFSKRSTLI

SEQ ID NO: 23751 - protein, 12 aa, Homo sapiens
  ( 243 )...( 254 ): >Z334_HUMAN
RKTFSKRSTLIV

SEQ ID NO: 23752 - protein, 12 aa, Homo sapiens
  ( 247 )...( 258 ): >Z334_HUMAN
SKRSTLIVHQRI

SEQ ID NO: 23753 - protein, 12 aa, Homo sapiens
  ( 268 )...( 279 ): >Z334_HUMAN
SDCRKTFRVKTS

SEQ ID NO: 23754 - protein, 12 aa, Homo sapiens
  ( 269 )...( 280 ): >Z334_HUMAN
DCRKTFRVKTSL

SEQ ID NO: 23755 - protein, 12 aa, Homo sapiens
  ( 270 )...( 281 ): >Z334_HUMAN
CRKTFRVKTSLT

SEQ ID NO: 23756 - protein, 12 aa, Homo sapiens
  ( 271 )...( 282 ): >Z334_HUMAN
RKTFRVKTSLTR

SEQ ID NO: 23757 - protein, 12 aa, Homo sapiens
  ( 272 )...( 283 ): >Z334_HUMAN
KTFRVKTSLTRH

SEQ ID NO: 23758 - protein, 12 aa, Homo sapiens
  ( 490 )...( 501 ): >Z334_HUMAN
VFNKCGRISIVK

SEQ ID NO: 23759 - protein, 12 aa, Homo sapiens
  ( 550 )...( 561 ): >Z334_HUMAN
GRTYCRKSALTH

SEQ ID NO: 23760 - protein, 12 aa, Homo sapiens
  ( 613 )...( 624 ): >Z334_HUMAN
SAFRVHRRIHTG

SEQ ID NO: 23761 - protein, 12 aa, Homo sapiens
  ( 633 )...( 644 ): >Z334_HUMAN
CGKTYRRLWTLT

SEQ ID NO: 23762 - protein, 12 aa, Homo sapiens
  ( 251 )...( 262 ): >Z335_HUMAN
QYRSSTKATLLR

SEQ ID NO: 23763 - protein, 12 aa, Homo sapiens
  ( 279 )...( 290 ): >Z335_HUMAN
AGKKGRLRKWST

SEQ ID NO: 23764 - protein, 12 aa, Homo sapiens
  ( 280 )...( 291 ): >Z335_HUMAN
GKKGRLRKWSTS

SEQ ID NO: 23765 - protein, 12 aa, Homo sapiens
  ( 281 )...( 292 ): >Z335_HUMAN
KKGRLRKWSTST

SEQ ID NO: 23766 - protein, 12 aa, Homo sapiens
  ( 282 )...( 293 ): >Z335_HUMAN
KGRLRKWSTSTK

SEQ ID NO: 23767 - protein, 12 aa, Homo sapiens
  ( 283 )...( 294 ): >Z335_HUMAN
GRLRKWSTSTKS

SEQ ID NO: 23768 - protein, 12 aa, Homo sapiens
  ( 332 )...( 343 ): >Z335_HUMAN
GRQLRLQRPTPS

SEQ ID NO: 23769 - protein, 12 aa, Homo sapiens
  ( 352 )...( 363 ): >Z335_HUMAN
GRPRKLPRLEIS

SEQ ID NO: 23770 - protein, 12 aa, Homo sapiens
  ( 566 )...( 577 ): >Z335_HUMAN
VCGRVYPMQKRL

SEQ ID NO: 23771 - protein, 12 aa, Homo sapiens
  ( 567 )...( 578 ): >Z335_HUMAN
CGRVYPMQKRLT

SEQ ID NO: 23772 - protein, 12 aa, Homo sapiens
  ( 568 )...( 579 ): >Z335_HUMAN
GRVYPMQKRLTQ

SEQ ID NO: 23773 - protein, 12 aa, Homo sapiens
  ( 216 )...( 227 ): >Z336_HUMAN
YPKIRRASGRLA

SEQ ID NO: 23774 - protein, 12 aa, Homo sapiens
  ( 217 )...( 228 ): >Z336_HUMAN
PKIRRASGRLAG

SEQ ID NO: 23775 - protein, 12 aa, Homo sapiens
  ( 221 )...( 232 ): >Z336_HUMAN
RASGRLAGRKVF

SEQ ID NO: 23776 - protein, 12 aa, Homo sapiens
  ( 222 )...( 233 ): >Z336_HUMAN
ASGRLAGRKVFV

SEQ ID NO: 23777 - protein, 12 aa, Homo sapiens
  ( 227 )...( 238 ): >Z336_HUMAN
AGRKVFVEIPKK

SEQ ID NO: 23778 - protein, 12 aa, Homo sapiens
  ( 228 )...( 239 ): >Z336_HUMAN
GRKVFVEIPKKK

SEQ ID NO: 23779 - protein, 12 aa, Homo sapiens
  ( 581 )...( 592 ): >Z336_HUMAN
GRTFTDKSTLRR

SEQ ID NO: 23780 - protein, 12 aa, Homo sapiens
  ( 74 )...( 85 ): >Z337_HUMAN
ERRRRPGPCAGI

SEQ ID NO: 23781 - protein, 12 aa, Homo sapiens
  ( 91 )...( 102 ): >Z337_HUMAN
LRPKNLGLAHQR

SEQ ID NO: 23782 - protein, 12 aa, Homo sapiens
  ( 139 )...( 150 ): >Z337_HUMAN
HAVSSRRRNSVV

SEQ ID NO: 23783 - protein, 12 aa, Homo sapiens
  ( 190 )...( 201 ): >Z337_HUMAN
SRKMMVIIHKKA

SEQ ID NO: 23784 - protein, 12 aa, Homo sapiens
  ( 242 )...( 253 ): >Z337_HUMAN
GRGFSLKANLLR

SEQ ID NO: 23785 - protein, 12 aa, Homo sapiens
  ( 382 )...( 393 ): >Z337_HUMAN
KQSFSVKGSLLR

SEQ ID NO: 23786 - protein, 12 aa, Homo sapiens
  ( 385 )...( 396 ): >Z337_HUMAN
FSVKGSLLRHQR

SEQ ID NO: 23787 - protein, 12 aa, Homo sapiens
  ( 386 )...( 397 ): >Z337_HUMAN
SVKGSLLRHQRT

SEQ ID NO: 23788 - protein, 12 aa, Homo sapiens
  ( 662 )...( 673 ): >Z337_HUMAN
GQGFSWKRSLTR

SEQ ID NO: 23789 - protein, 12 aa, Homo sapiens
  ( 289 )...( 300 ): >Z338_HUMAN
AALRVHSRVHCK

SEQ ID NO: 23790 - protein, 12 aa, Homo sapiens
  ( 351 )...( 362 ): >Z338_HUMAN
HVAKIVTQRAFR

SEQ ID NO: 23791 - protein, 12 aa, Homo sapiens
  ( 352 )...( 363 ): >Z338_HUMAN
VAKIVTQRAFRC

SEQ ID NO: 23792 - protein, 12 aa, Homo sapiens
  ( 1 )...( 12 ): >Z339_HUMAN
MPKVFLVKRRSL

SEQ ID NO: 23793 - protein, 12 aa, Homo sapiens
  ( 2 )...( 13 ): >Z339_HUMAN
PKVFLVKRRSLG

SEQ ID NO: 23794 - protein, 12 aa, Homo sapiens
  ( 3 )...( 14 ): >Z339_HUMAN
KVFLVKRRSLGV

SEQ ID NO: 23795 - protein, 12 aa, Homo sapiens
  ( 4 )...( 15 ): >Z339_HUMAN
VFLVKRRSLGVS

SEQ ID NO: 23796 - protein, 12 aa, Homo sapiens
  ( 5 )...( 16 ): >Z339_HUMAN
FLVKRRSLGVSV

SEQ ID NO: 23797 - protein, 12 aa, Homo sapiens
  ( 6 )...( 17 ): >Z339_HUMAN
LVKRRSLGVSVR

SEQ ID NO: 23798 - protein, 12 aa, Homo sapiens
  ( 7 )...( 18 ): >Z339_HUMAN
VKRRSLGVSVRS

SEQ ID NO: 23799 - protein, 12 aa, Homo sapiens
  ( 8 )...( 19 ): >Z339_HUMAN
KRRSLGVSVRSW

SEQ ID NO: 23800 - protein, 12 aa, Homo sapiens
  ( 92 )...( 103 ): >Z339_HUMAN
GHLATKQRPVAR

SEQ ID NO: 23801 - protein, 12 aa, Homo sapiens
  ( 93 )...( 104 ): >Z339_HUMAN
HLATKQRPVARS

SEQ ID NO: 23802 - protein, 12 aa, Homo sapiens
  ( 94 )...( 105 ): >Z339_HUMAN
LATKQRPVARSK

SEQ ID NO: 23803 - protein, 12 aa, Homo sapiens
  ( 95 )...( 106 ): >Z339_HUMAN
ATKQRPVARSKI

SEQ ID NO: 23804 - protein, 12 aa, Homo sapiens
  ( 96 )...( 107 ): >Z339_HUMAN
TKQRPVARSKIK

SEQ ID NO: 23805 - protein, 12 aa, Homo sapiens
  ( 98 )...( 109 ): >Z339_HUMAN
QRPVARSKIKFT

SEQ ID NO: 23806 - protein, 12 aa, Homo sapiens
  ( 99 )...( 110 ): >Z339_HUMAN
RPVARSKIKFTT

SEQ ID NO: 23807 - protein, 12 aa, Homo sapiens
  ( 100 )...( 111 ): >Z339_HUMAN
PVARSKIKFTTG

SEQ ID NO: 23808 - protein, 12 aa, Homo sapiens
  ( 123 )...( 134 ): >Z339_HUMAN
LCGKGFRLQRML

SEQ ID NO: 23809 - protein, 12 aa, Homo sapiens
  ( 124 )...( 135 ): >Z339_HUMAN
CGKGFRLQRMLN

SEQ ID NO: 23810 - protein, 12 aa, Homo sapiens
  ( 162 )...( 173 ): >Z339_HUMAN
LKRHVRTHTGIR

SEQ ID NO: 23811 - protein, 12 aa, Homo sapiens
  ( 163 )...( 174 ): >Z339_HUMAN
KRHVRTHTGIRP

SEQ ID NO: 23812 - protein, 12 aa, Homo sapiens
  ( 166 )...( 177 ): >Z339_HUMAN
VRTHTGIRPYKC

SEQ ID NO: 23813 - protein, 12 aa, Homo sapiens
  ( 239 )...( 250 ): >Z339_HUMAN
GSSFLKKTSKKL

SEQ ID NO: 23814 - protein, 12 aa, Homo sapiens
  ( 240 )...( 251 ): >Z339_HUMAN
SSFLKKTSKKLA

SEQ ID NO: 23815 - protein, 12 aa, Homo sapiens
  ( 241 )...( 252 ): >Z339_HUMAN
SFLKKTSKKLAA

SEQ ID NO: 23816 - protein, 12 aa, Homo sapiens
  ( 242 )...( 253 ): >Z339_HUMAN
FLKKTSKKLAAL

SEQ ID NO: 23817 - protein, 12 aa, Homo sapiens
  ( 243 )...( 254 ): >Z339_HUMAN
LKKTSKKLAALL

SEQ ID NO: 23818 - protein, 12 aa, Homo sapiens
  ( 244 )...( 255 ): >Z339_HUMAN
KKTSKKLAALLQ

SEQ ID NO: 23819 - protein, 12 aa, Homo sapiens
  ( 247 )...( 258 ): >Z339_HUMAN
SKKLAALLQGKL

SEQ ID NO: 23820 - protein, 12 aa, Homo sapiens
  ( 248 )...( 259 ): >Z339_HUMAN
KKLAALLQGKLT

SEQ ID NO: 23821 - protein, 12 aa, Homo sapiens
  ( 199 )...( 210 ): >Z341_HUMAN
DSPATLKTRRAK

SEQ ID NO: 23822 - protein, 12 aa, Homo sapiens
  ( 200 )...( 211 ): >Z341_HUMAN
SPATLKTRRAKG

SEQ ID NO: 23823 - protein, 12 aa, Homo sapiens
  ( 201 )...( 212 ): >Z341_HUMAN
PATLKTRRAKGA

SEQ ID NO: 23824 - protein, 12 aa, Homo sapiens
  ( 206 )...( 217 ): >Z341_HUMAN
TRRAKGARGLPE

SEQ ID NO: 23825 - protein, 12 aa, Homo sapiens
  ( 207 )...( 218 ): >Z341_HUMAN
RRAKGARGLPEA

SEQ ID NO: 23826 - protein, 12 aa, Homo sapiens
  ( 217 )...( 228 ): >Z341_HUMAN
EAAGKPKAQKLK

SEQ ID NO: 23827 - protein, 12 aa, Homo sapiens
  ( 275 )...( 286 ): >Z341_HUMAN
GRAFAQKSNVKK

SEQ ID NO: 23828 - protein, 12 aa, Homo sapiens
  ( 501 )...( 512 ): >Z341_HUMAN
RRHLPTHGSGGR

SEQ ID NO: 23829 - protein, 12 aa, Homo sapiens
  ( 3 )...( 14 ): >Z342_HUMAN
RRKAGSAPRRVE

SEQ ID NO: 23830 - protein, 12 aa, Homo sapiens
  ( 4 )...( 15 ): >Z342_HUMAN
RKAGSAPRRVEP

SEQ ID NO: 23831 - protein, 12 aa, Homo sapiens
  ( 160 )...( 171 ): >Z342_HUMAN
LRCGKQFTVAWK

SEQ ID NO: 23832 - protein, 12 aa, Homo sapiens
  ( 161 )...( 172 ): >Z342_HUMAN
RCGKQFTVAWKL

SEQ ID NO: 23833 - protein, 12 aa, Homo sapiens
  ( 163 )...( 174 ): >Z342_HUMAN
GKQFTVAWKLLR

SEQ ID NO: 23834 - protein, 12 aa, Homo sapiens
  ( 433 )...( 444 ): >Z342_HUMAN
RRMHGMTPGSTR

SEQ ID NO: 23835 - protein, 12 aa, Homo sapiens
  ( 324 )...( 335 ): >Z345_HUMAN
RSGSKLIQHQRM

SEQ ID NO: 23836 - protein, 12 aa, Homo sapiens
  ( 175 )...( 186 ): >Z347_HUMAN
ARNKLIKNQLGL

SEQ ID NO: 23837 - protein, 12 aa, Homo sapiens
  ( 176 )...( 187 ): >Z347_HUMAN
RNKLIKNQLGLS

SEQ ID NO: 23838 - protein, 12 aa, Homo sapiens
  ( 295 )...( 306 ): >Z347_HUMAN
GKAFRTRSNLTT

SEQ ID NO: 23839 - protein, 12 aa, Homo sapiens
  ( 379 )...( 390 ): >Z347_HUMAN
GKAFRARSSLAI

SEQ ID NO: 23840 - protein, 12 aa, Homo sapiens
  ( 380 )...( 391 ): >Z347_HUMAN
KAFRARSSLAIH

SEQ ID NO: 23841 - protein, 12 aa, Homo sapiens
  ( 667 )...( 678 ): >Z347_HUMAN
HLARHRRVHTGG

SEQ ID NO: 23842 - protein, 12 aa, Homo sapiens
  ( 668 )...( 679 ): >Z347_HUMAN
LARHRRVHTGGK

SEQ ID NO: 23843 - protein, 12 aa, Homo sapiens
  ( 669 )...( 680 ): >Z347_HUMAN
ARHRRVHTGGKP

SEQ ID NO: 23844 - protein, 12 aa, Homo sapiens
  ( 672 )...( 683 ): >Z347_HUMAN
RRVHTGGKPYQC

SEQ ID NO: 23845 - protein, 12 aa, Homo sapiens
  ( 687 )...( 698 ): >Z347_HUMAN
GKAFSQTSKLAR

SEQ ID NO: 23846 - protein, 12 aa, Homo sapiens
  ( 691 )...( 702 ): >Z347_HUMAN
SQTSKLARHQRV

SEQ ID NO: 23847 - protein, 12 aa, Homo sapiens
  ( 771 )...( 782 ): >Z347_HUMAN
GKAFSQTSKLAR

SEQ ID NO: 23848 - protein, 12 aa, Homo sapiens
  ( 775 )...( 786 ): >Z347_HUMAN
SQTSKLARHQRI

SEQ ID NO: 23849 - protein, 12 aa, Homo sapiens
  ( 70 )...( 81 ): >Z358_HUMAN
GRAFRRSSGLSQ

SEQ ID NO: 23850 - protein, 12 aa, Homo sapiens
  ( 126 )...( 137 ): >Z358_HUMAN
GKAFGWRSTLLK

SEQ ID NO: 23851 - protein, 12 aa, Homo sapiens
  ( 127 )...( 138 ): >Z358_HUMAN
KAFGWRSTLLKH

SEQ ID NO: 23852 - protein, 12 aa, Homo sapiens
  ( 130 )...( 141 ): >Z358_HUMAN
GWRSTLLKHRSS

SEQ ID NO: 23853 - protein, 12 aa, Homo sapiens
  ( 30 )...( 41 ): >Z366_HUMAN
QPVASRGKAPQR

SEQ ID NO: 23854 - protein, 12 aa, Homo sapiens
  ( 69 )...( 80 ): >Z366_HUMAN
GVFEGAGSRKRK

SEQ ID NO: 23855 - protein, 12 aa, Homo sapiens
  ( 70 )...( 81 ): >Z366_HUMAN
VFEGAGSRKRKS

SEQ ID NO: 23856 - protein, 12 aa, Homo sapiens
  ( 71 )...( 82 ): >Z366_HUMAN
FEGAGSRKRKSM

SEQ ID NO: 23857 - protein, 12 aa, Homo sapiens
  ( 73 )...( 84 ): >Z366_HUMAN
GAGSRKRKSMPT

SEQ ID NO: 23858 - protein, 12 aa, Homo sapiens
  ( 74 )...( 85 ): >Z366_HUMAN
AGSRKRKSMPTK

SEQ ID NO: 23859 - protein, 12 aa, Homo sapiens
  ( 75 )...( 86 ): >Z366_HUMAN
GSRKRKSMPTKM

SEQ ID NO: 23860 - protein, 12 aa, Homo sapiens
  ( 465 )...( 476 ): >Z366_HUMAN
KRHVLIHTNIRA

SEQ ID NO: 23861 - protein, 12 aa, Homo sapiens
  ( 539 )...( 550 ): >Z366_HUMAN
PSKFTLKGNLTR

SEQ ID NO: 23862 - protein, 12 aa, Homo sapiens
  ( 544 )...( 555 ): >Z366_HUMAN
LKGNLTRHMKVK

SEQ ID NO: 23863 - protein, 12 aa, Homo sapiens
  ( 561 )...( 572 ): >Z366_HUMAN
RGLHSQGLGRGR

SEQ ID NO: 23864 - protein, 12 aa, Homo sapiens
  ( 592 )...( 603 ): >Z366_HUMAN
DLSQKRRAKVPV

SEQ ID NO: 23865 - protein, 12 aa, Homo sapiens
  ( 593 )...( 604 ): >Z366_HUMAN
LSQKRRAKVPVF

SEQ ID NO: 23866 - protein, 12 aa, Homo sapiens
  ( 699 )...( 710 ): >Z366_HUMAN
CLSLRAFQSTRR

SEQ ID NO: 23867 - protein, 12 aa, Homo sapiens
  ( 700 )...( 711 ): >Z366_HUMAN
LSLRAFQSTRRG

SEQ ID NO: 23868 - protein, 12 aa, Homo sapiens
  ( 701 )...( 712 ): >Z366_HUMAN
SLRAFQSTRRGP

SEQ ID NO: 23869 - protein, 12 aa, Homo sapiens
  ( 702 )...( 713 ): >Z366_HUMAN
LRAFQSTRRGPS

SEQ ID NO: 23870 - protein, 12 aa, Homo sapiens
  ( 107 )...( 118 ): >Z382_HUMAN
KKLIKERSNIYG

SEQ ID NO: 23871 - protein, 12 aa, Homo sapiens
  ( 108 )...( 119 ): >Z382_HUMAN
KLIKERSNIYGK

SEQ ID NO: 23872 - protein, 12 aa, Homo sapiens
  ( 116 )...( 127 ): >Z382_HUMAN
IYGKTFTLGKNR

SEQ ID NO: 23873 - protein, 12 aa, Homo sapiens
  ( 117 )...( 128 ): >Z382_HUMAN
YGKTFTLGKNRI

SEQ ID NO: 23874 - protein, 12 aa, Homo sapiens
  ( 118 )...( 129 ): >Z382_HUMAN
GKTFTLGKNRIT

SEQ ID NO: 23875 - protein, 12 aa, Homo sapiens
  ( 119 )...( 130 ): >Z382_HUMAN
KTFTLGKNRITI

SEQ ID NO: 23876 - protein, 12 aa, Homo sapiens
  ( 326 )...( 337 ): >Z382_HUMAN
QCGKAFRQKTAL

SEQ ID NO: 23877 - protein, 12 aa, Homo sapiens
  ( 327 )...( 338 ): >Z382_HUMAN
CGKAFRQKTALT

SEQ ID NO: 23878 - protein, 12 aa, Homo sapiens
  ( 328 )...( 339 ): >Z382_HUMAN
GKAFRQKTALTL

SEQ ID NO: 23879 - protein, 12 aa, Homo sapiens
  ( 355 )...( 366 ): >Z382_HUMAN
CGKSFRQKATLT

SEQ ID NO: 23880 - protein, 12 aa, Homo sapiens
  ( 356 )...( 367 ): >Z382_HUMAN
GKSFRQKATLTR

SEQ ID NO: 23881 - protein, 12 aa, Homo sapiens
  ( 467 )...( 478 ): >Z382_HUMAN
CGKSFRQKAILT

SEQ ID NO: 23882 - protein, 12 aa, Homo sapiens
  ( 468 )...( 479 ): >Z382_HUMAN
GKSFRQKAILTV

SEQ ID NO: 23883 - protein, 12 aa, Homo sapiens
  ( 472 )...( 483 ): >Z382_HUMAN
RQKAILTVHHRI

SEQ ID NO: 23884 - protein, 12 aa, Homo sapiens
  ( 496 )...( 507 ): >Z382_HUMAN
GKAFSRKSNLIR

SEQ ID NO: 23885 - protein, 12 aa, Homo sapiens
  ( 100 )...( 111 ): >Z384_HUMAN
TAGVSCSQRWRR

SEQ ID NO: 23886 - protein, 12 aa, Homo sapiens
  ( 185 )...( 196 ): >Z384_HUMAN
SVAPKPPRGRKK

SEQ ID NO: 23887 - protein, 12 aa, Homo sapiens
  ( 193 )...( 204 ): >Z384_HUMAN
GRKKKRMLESGL

SEQ ID NO: 23888 - protein, 12 aa, Homo sapiens
  ( 192 )...( 203 ): >Z396_HUMAN
KTTNVKSASRQK

SEQ ID NO: 23889 - protein, 12 aa, Homo sapiens
  ( 289 )...( 300 ): >Z396_HUMAN
SRSAILIQHRRT

SEQ ID NO: 23890 - protein, 12 aa, Homo sapiens
  ( 320 )...( 331 ): >Z396_HUMAN
KTRLKCPRSLSG

SEQ ID NO: 23891 - protein, 12 aa, Homo sapiens
  ( 322 )...( 333 ): >Z396_HUMAN
RLKCPRSLSGGR

SEQ ID NO: 23892 - protein, 12 aa, Homo sapiens
  ( 170 )...( 181 ): >Z397_HUMAN
LKTQLKSWKPCL

SEQ ID NO: 23893 - protein, 12 aa, Homo sapiens
  ( 245 )...( 256 ): >Z397_HUMAN
QVIFTNKSLGKR

SEQ ID NO: 23894 - protein, 12 aa, Homo sapiens
  ( 487 )...( 498 ): >Z397_HUMAN
GKTFKRSSALVQ

SEQ ID NO: 23895 - protein, 12 aa, Homo sapiens
  ( 491 )...( 502 ): >Z397_HUMAN
KRSSALVQHQRI

SEQ ID NO: 23896 - protein, 12 aa, Homo sapiens
  ( 523 )...( 534 ): >Z397_HUMAN
VLMRHQRVHTIK

SEQ ID NO: 23897 - protein, 12 aa, Homo sapiens
  ( 2 )...( 13 ): >ZF36_HUMAN
PRERRPGRSVSA

SEQ ID NO: 23898 - protein, 12 aa, Homo sapiens
  ( 3 )...( 14 ): >ZF36_HUMAN
RERRPGRSVSAS

SEQ ID NO: 23899 - protein, 12 aa, Homo sapiens
  ( 204 )...( 215 ): >ZF36_HUMAN
AKTFSSLGNLRR

SEQ ID NO: 23900 - protein, 12 aa, Homo sapiens
  ( 456 )...( 467 ): >ZF36_HUMAN
GKAFSLAGSLRR

SEQ ID NO: 23901 - protein, 12 aa, Homo sapiens
  ( 457 )...( 468 ): >ZF36_HUMAN
KAFSLAGSLRRH

SEQ ID NO: 23902 - protein, 12 aa, Homo sapiens
  ( 30 )...( 41 ): >ZF64_HUMAN
PWVLDRKGAKKS

SEQ ID NO: 23903 - protein, 12 aa, Homo sapiens
  ( 31 )...( 42 ): >ZF64_HUMAN
WVLDRKGAKKSQ

SEQ ID NO: 23904 - protein, 12 aa, Homo sapiens
  ( 32 )...( 43 ): >ZF64_HUMAN
VLDRKGAKKSQG

SEQ ID NO: 23905 - protein, 12 aa, Homo sapiens
  ( 33 )...( 44 ): >ZF64_HUMAN
LDRKGAKKSQGL

SEQ ID NO: 23906 - protein, 12 aa, Homo sapiens
  ( 34 )...( 45 ): >ZF64_HUMAN
DRKGAKKSQGLW

SEQ ID NO: 23907 - protein, 12 aa, Homo sapiens
  ( 35 )...( 46 ): >ZF64_HUMAN
RKGAKKSQGLWS

SEQ ID NO: 23908 - protein, 12 aa, Homo sapiens
  ( 294 )...( 305 ): >ZF64_HUMAN
CGKTFSVKRTLL

SEQ ID NO: 23909 - protein, 12 aa, Homo sapiens
  ( 295 )...( 306 ): >ZF64_HUMAN
GKTFSVKRTLLQ

SEQ ID NO: 23910 - protein, 12 aa, Homo sapiens
  ( 299 )...( 310 ): >ZF64_HUMAN
SVKRTLLQHQRI

SEQ ID NO: 23911 - protein, 12 aa, Homo sapiens
  ( 306 )...( 317 ): >ZIC3_HUMAN
GKSFKAKYKLVN

SEQ ID NO: 23912 - protein, 12 aa, Homo sapiens
  ( 333 )...( 344 ): >ZIM2_HUMAN
CKRTFSTQVALR

SEQ ID NO: 23913 - protein, 12 aa, Homo sapiens
  ( 334 )...( 345 ): >ZIM2_HUMAN
KRTFSTQVALRR

SEQ ID NO: 23914 - protein, 12 aa, Homo sapiens
  ( 424 )...( 435 ): >ZIM3_HUMAN
CGKTFIRKLNLS

SEQ ID NO: 23915 - protein, 12 aa, Homo sapiens
  ( 425 )...( 436 ): >ZIM3_HUMAN
GKTFIRKLNLSL

SEQ ID NO: 23916 - protein, 12 aa, Homo sapiens
  ( 429 )...( 440 ): >ZIM3_HUMAN
IRKLNLSLHKKT

SEQ ID NO: 23917 - protein, 12 aa, Homo sapiens
  ( 355 )...( 366 ): >ZN06_HUMAN
GINTNKVLKQKA

SEQ ID NO: 23918 - protein, 12 aa, Homo sapiens
  ( 356 )...( 367 ): >ZN06_HUMAN
INTNKVLKQKAK

SEQ ID NO: 23919 - protein, 12 aa, Homo sapiens
  ( 357 )...( 368 ): >ZN06_HUMAN
NTNKVLKQKAKK

SEQ ID NO: 23920 - protein, 12 aa, Homo sapiens
  ( 397 )...( 408 ): >ZN06_HUMAN
ICTKKFKSRGFL

SEQ ID NO: 23921 - protein, 12 aa, Homo sapiens
  ( 398 )...( 409 ): >ZN06_HUMAN
CTKKFKSRGFLK

SEQ ID NO: 23922 - protein, 12 aa, Homo sapiens
  ( 702 )...( 713 ): >ZN06_HUMAN
KKHMKTHTGRKI

SEQ ID NO: 23923 - protein, 12 aa, Homo sapiens
  ( 221 )...( 232 ): >ZN07_HUMAN
KISRCQECQKKL

SEQ ID NO: 23924 - protein, 12 aa, Homo sapiens
  ( 284 )...( 295 ): >ZN07_HUMAN
GKAFRLSSKLIQ

SEQ ID NO: 23925 - protein, 12 aa, Homo sapiens
  ( 451 )...( 462 ): >ZN07_HUMAN
GCSSRLIRHQRT

SEQ ID NO: 23926 - protein, 12 aa, Homo sapiens
  ( 454 )...( 465 ): >ZN07_HUMAN
SRLIRHQRTHTG

SEQ ID NO: 23927 - protein, 12 aa, Homo sapiens
  ( 620 )...( 631 ): >ZN07_HUMAN
TFVSRKKVNTIK

SEQ ID NO: 23928 - protein, 12 aa, Homo sapiens
  ( 621 )...( 632 ): >ZN07_HUMAN
FVSRKKVNTIKK

SEQ ID NO: 23929 - protein, 12 aa, Homo sapiens
  ( 622 )...( 633 ): >ZN07_HUMAN
VSRKKVNTIKKL

SEQ ID NO: 23930 - protein, 12 aa, Homo sapiens
  ( 625 )...( 636 ): >ZN07_HUMAN
KKVNTIKKLHQC

SEQ ID NO: 23931 - protein, 12 aa, Homo sapiens
  ( 668 )...( 679 ): >ZN07_HUMAN
GKAFNRSSRLTQ

SEQ ID NO: 23932 - protein, 12 aa, Homo sapiens
  ( 221 )...( 232 ): >ZN10_HUMAN
GKSFVHSSRLIR

SEQ ID NO: 23933 - protein, 12 aa, Homo sapiens
  ( 228 )...( 239 ): >ZN10_HUMAN
SRLIRHQRTHTG

SEQ ID NO: 23934 - protein, 12 aa, Homo sapiens
  ( 361 )...( 372 ): >ZN10_HUMAN
GKAFIRKNDLIK

SEQ ID NO: 23935 - protein, 12 aa, Homo sapiens
  ( 315 )...( 326 ): >ZN16_HUMAN
GKAFRRSSNLIQ

SEQ ID NO: 23936 - protein, 12 aa, Homo sapiens
  ( 343 )...( 354 ): >ZN16_HUMAN
GKAFRRSSNLIK

SEQ ID NO: 23937 - protein, 12 aa, Homo sapiens
  ( 399 )...( 410 ): >ZN16_HUMAN
GKPFSRVSNLIK

SEQ ID NO: 23938 - protein, 12 aa, Homo sapiens
  ( 651 )...( 662 ): >ZN16_HUMAN
GKAFSQRSKLIK

SEQ ID NO: 23939 - protein, 12 aa, Homo sapiens
  ( 141 )...( 152 ): >ZN24_HUMAN
VSLRRRKREVLV

SEQ ID NO: 23940 - protein, 12 aa, Homo sapiens
  ( 219 )...( 230 ): >ZNFE_HUMAN
KSLIIAIVVRKP

SEQ ID NO: 23941 - protein, 12 aa, Homo sapiens
  ( 222 )...( 233 ): >ZNFE_HUMAN
IIAIVVRKPSVR

SEQ ID NO: 23942 - protein, 12 aa, Homo sapiens
  ( 223 )...( 234 ): >ZNFE_HUMAN
IAIVVRKPSVRV

SEQ ID NO: 23943 - protein, 12 aa, Homo sapiens
  ( 224 )...( 235 ): >ZNFE_HUMAN
AIVVRKPSVRVL

SEQ ID NO: 23944 - protein, 12 aa, Homo sapiens
  ( 225 )...( 236 ): >ZNFE_HUMAN
IVVRKPSVRVLT

SEQ ID NO: 23945 - protein, 12 aa, Homo sapiens
  ( 226 )...( 237 ): >ZNFE_HUMAN
VVRKPSVRVLTL

SEQ ID NO: 23946 - protein, 12 aa, Homo sapiens
  ( 227 )...( 238 ): >ZNFE_HUMAN
VRKPSVRVLTLF

SEQ ID NO: 23947 - protein, 12 aa, Homo sapiens
  ( 228 )...( 239 ): >ZNFE_HUMAN
RKPSVRVLTLFF

SEQ ID NO: 23948 - protein, 12 aa, Homo sapiens
  ( 174 )...( 185 ): >O14948
MRWNKGTILKAS

SEQ ID NO: 23949 - protein, 12 aa, Homo sapiens
  ( 175 )...( 186 ): >O14948
RWNKGTILKASV

SEQ ID NO: 23950 - protein, 12 aa, Homo sapiens
  ( 180 )...( 191 ): >Q9NY94
ITPGPHTKVVRR

SEQ ID NO: 23951 - protein, 12 aa, Homo sapiens
  ( 181 )...( 192 ): >Q9NY94
TPGPHTKVVRRI

SEQ ID NO: 23952 - protein, 12 aa, Homo sapiens
  ( 182 )...( 193 ): >Q9NY94
PGPHTKVVRRIF

SEQ ID NO: 23953 - protein, 12 aa, Homo sapiens
  ( 183 )...( 194 ): >Q9NY94
GPHTKVVRRIFT

SEQ ID NO: 23954 - protein, 12 aa, Homo sapiens
  ( 185 )...( 196 ): >Q9NY94
HTKVVRRIFTNS

SEQ ID NO: 23955 - protein, 12 aa, Homo sapiens
  ( 186 )...( 197 ): >Q9NY94
TKVVRRIFTNSR

SEQ ID NO: 23956 - protein, 12 aa, Homo sapiens
  ( 223 )...( 234 ): >Q9NY94
KKLSKNEILRLA

SEQ ID NO: 23957 - protein, 12 aa, Homo sapiens
  ( 31 )...( 42 ): >Q8N100
GAGRLESAARRR

SEQ ID NO: 23958 - protein, 12 aa, Homo sapiens
  ( 32 )...( 43 ): >Q8N100
AGRLESAARRRL

SEQ ID NO: 23959 - protein, 12 aa, Homo sapiens
  ( 33 )...( 44 ): >Q8N100
GRLESAARRRLA

SEQ ID NO: 23960 - protein, 12 aa, Homo sapiens
  ( 34 )...( 45 ): >Q8N100
RLESAARRRLAA

SEQ ID NO: 23961 - protein, 12 aa, Homo sapiens
  ( 38 )...( 49 ): >Q8N100
AARRRLAANARE

SEQ ID NO: 23962 - protein, 12 aa, Homo sapiens
  ( 13 )...( 24 ): >Q9HAP2
PRSRGRQVLLKP

SEQ ID NO: 23963 - protein, 12 aa, Homo sapiens
  ( 14 )...( 25 ): >Q9HAP2
RSRGRQVLLKPQ

SEQ ID NO: 23964 - protein, 12 aa, Homo sapiens
  ( 15 )...( 26 ): >Q9HAP2
SRGRQVLLKPQV

SEQ ID NO: 23965 - protein, 12 aa, Homo sapiens
  ( 16 )...( 27 ): >Q9HAP2
RGRQVLLKPQVS

SEQ ID NO: 23966 - protein, 12 aa, Homo sapiens
  ( 542 )...( 553 ): >Q9HAP2
KPVSLTGGRPKQ

SEQ ID NO: 23967 - protein, 12 aa, Homo sapiens
  ( 546 )...( 557 ): >Q9HAP2
LTGGRPKQPHKI

SEQ ID NO: 23968 - protein, 12 aa, Homo sapiens
  ( 547 )...( 558 ): >Q9HAP2
TGGRPKQPHKIV

SEQ ID NO: 23969 - protein, 12 aa, Homo sapiens
  ( 548 )...( 559 ): >Q9HAP2
GGRPKQPHKIVP

SEQ ID NO: 23970 - protein, 12 aa, Homo sapiens
  ( 711 )...( 722 ): >Q9HAP2
PKNVAALKNRQM

SEQ ID NO: 23971 - protein, 12 aa, Homo sapiens
  ( 714 )...( 725 ): >Q9HAP2
VAALKNRQMKHI

SEQ ID NO: 23972 - protein, 12 aa, Homo sapiens
  ( 715 )...( 726 ): >Q9HAP2
AALKNRQMKHIS

SEQ ID NO: 23973 - protein, 12 aa, Homo sapiens
  ( 716 )...( 727 ): >Q9HAP2
ALKNRQMKHISA

SEQ ID NO: 23974 - protein, 12 aa, Homo sapiens
  ( 904 )...( 915 ): >Q9HAP2
QASKAVTRIGKR

SEQ ID NO: 23975 - protein, 12 aa, Homo sapiens
  ( 905 )...( 916 ): >Q9HAP2
ASKAVTRIGKRL

SEQ ID NO: 23976 - protein, 12 aa, Homo sapiens
  ( 906 )...( 917 ): >Q9HAP2
SKAVTRIGKRLG

SEQ ID NO: 23977 - protein, 12 aa, Homo sapiens
  ( 907 )...( 918 ): >Q9HAP2
KAVTRIGKRLGE

SEQ ID NO: 23978 - protein, 12 aa, Homo sapiens
  ( 89 )...( 100 ): >Q9NYQ5
MARKLDKLTVLR

SEQ ID NO: 23979 - protein, 12 aa, Homo sapiens
  ( 90 )...( 101 ): >Q9NYQ5
ARKLDKLTVLRM

SEQ ID NO: 23980 - protein, 12 aa, Homo sapiens
  ( 91 )...( 102 ): >Q9NYQ5
RKLDKLTVLRMA

SEQ ID NO: 23981 - protein, 12 aa, Homo sapiens
  ( 99 )...( 110 ): >Q9NYQ5
LRMAVQHLRSLK

SEQ ID NO: 23982 - protein, 12 aa, Homo sapiens
  ( 100 )...( 111 ): >Q9NYQ5
RMAVQHLRSLKG

SEQ ID NO: 23983 - protein, 12 aa, Homo sapiens
  ( 150 )...( 161 ): >Q9NYQ5
RGKILFVSKSVS

SEQ ID NO: 23984 - protein, 12 aa, Homo sapiens
  ( 217 )...( 228 ): >Q9NYQ5
HAGRTRVYFGSR

SEQ ID NO: 23985 - protein, 12 aa, Homo sapiens
  ( 218 )...( 229 ): >Q9NYQ5
AGRTRVYFGSRR

SEQ ID NO: 23986 - protein, 12 aa, Homo sapiens
  ( 219 )...( 230 ): >Q9NYQ5
GRTRVYFGSRRS

SEQ ID NO: 23987 - protein, 12 aa, Homo sapiens
  ( 240 )...( 251 ): >Q99718
GKKSKHAPRGTH

SEQ ID NO: 23988 - protein, 12 aa, Homo sapiens
  ( 241 )...( 252 ): >Q99718
KKSKHAPRGTHL

SEQ ID NO: 23989 - protein, 12 aa, Homo sapiens
  ( 287 )...( 298 ): >Q99718
AVAQLWGQKKKN

SEQ ID NO: 23990 - protein, 12 aa, Homo sapiens
  ( 288 )...( 299 ): >Q99718
VAQLWGQKKKNS

SEQ ID NO: 23991 - protein, 12 aa, Homo sapiens
  ( 321 )...( 332 ): >Q99718
RVDGRRLVYKFG

SEQ ID NO: 23992 - protein, 12 aa, Homo sapiens
  ( 322 )...( 333 ): >Q99718
VDGRRLVYKFGK

SEQ ID NO: 23993 - protein, 12 aa, Homo sapiens
  ( 324 )...( 335 ): >Q99718
GRRLVYKFGKNS

SEQ ID NO: 23994 - protein, 12 aa, Homo sapiens
  ( 81 )...( 92 ): >Q96QX4
LEAIKLIRFGKK

SEQ ID NO: 23995 - protein, 12 aa, Homo sapiens
  ( 82 )...( 93 ): >Q96QX4
EAIKLIRFGKKK

SEQ ID NO: 23996 - protein, 12 aa, Homo sapiens
  ( 83 )...( 94 ): >Q96QX4
AIKLIRFGKKKN

SEQ ID NO: 23997 - protein, 12 aa, Homo sapiens
  ( 84 )...( 95 ): >Q96QX4
IKLIRFGKKKNT

SEQ ID NO: 23998 - protein, 12 aa, Homo sapiens
  ( 223 )...( 234 ): >Q96QX4
QLRTLLPYVKGR

SEQ ID NO: 23999 - protein, 12 aa, Homo sapiens
  ( 224 )...( 235 ): >Q96QX4
LRTLLPYVKGRK

SEQ ID NO: 24000 - protein, 12 aa, Homo sapiens
  ( 225 )...( 236 ): >Q96QX4
RTLLPYVKGRKN

SEQ ID NO: 24001 - protein, 12 aa, Homo sapiens
  ( 124 )...( 135 ): >Q9UEC8
LRKVVPCYSKTQ

SEQ ID NO: 24002 - protein, 12 aa, Homo sapiens
  ( 125 )...( 136 ): >Q9UEC8
RKVVPCYSKTQK

SEQ ID NO: 24003 - protein, 12 aa, Homo sapiens
  ( 136 )...( 147 ): >Q9UEC8
KLSKIETLRLAK

SEQ ID NO: 24004 - protein, 12 aa, Homo sapiens
  ( 81 )...( 92 ): >Q9NX45
LEAIKLIRFGKK

SEQ ID NO: 24005 - protein, 12 aa, Homo sapiens
  ( 82 )...( 93 ): >Q9NX45
EAIKLIRFGKKK

SEQ ID NO: 24006 - protein, 12 aa, Homo sapiens
  ( 83 )...( 94 ): >Q9NX45
AIKLIRFGKKKN

SEQ ID NO: 24007 - protein, 12 aa, Homo sapiens
  ( 84 )...( 95 ): >Q9NX45
IKLIRFGKKKNT

SEQ ID NO: 24008 - protein, 12 aa, Homo sapiens
  ( 223 )...( 234 ): >Q9NX45
QLRTLLPYVKGR

SEQ ID NO: 24009 - protein, 12 aa, Homo sapiens
  ( 224 )...( 235 ): >Q9NX45
LRTLLPYVKGRK

SEQ ID NO: 24010 - protein, 12 aa, Homo sapiens
  ( 225 )...( 236 ): >Q9NX45
RTLLPYVKGRKN

SEQ ID NO: 24011 - protein, 12 aa, Homo sapiens
  ( 126 )...( 137 ): >Q8WYA3
MARKLDKLTVLR

SEQ ID NO: 24012 - protein, 12 aa, Homo sapiens
  ( 127 )...( 138 ): >Q8WYA3
ARKLDKLTVLRM

SEQ ID NO: 24013 - protein, 12 aa, Homo sapiens
  ( 128 )...( 139 ): >Q8WYA3
RKLDKLTVLRMA

SEQ ID NO: 24014 - protein, 12 aa, Homo sapiens
  ( 136 )...( 147 ): >Q8WYA3
LRMAVQHLRSLK

SEQ ID NO: 24015 - protein, 12 aa, Homo sapiens
  ( 137 )...( 148 ): >Q8WYA3
RMAVQHLRSLKG

SEQ ID NO: 24016 - protein, 12 aa, Homo sapiens
  ( 187 )...( 198 ): >Q8WYA3
RGKILFVSKSVS

SEQ ID NO: 24017 - protein, 12 aa, Homo sapiens
  ( 254 )...( 265 ): >Q8WYA3
HAGRTRVYSGSR

SEQ ID NO: 24018 - protein, 12 aa, Homo sapiens
  ( 255 )...( 266 ): >Q8WYA3
AGRTRVYSGSRR

SEQ ID NO: 24019 - protein, 12 aa, Homo sapiens
  ( 256 )...( 267 ): >Q8WYA3
GRTRVYSGSRRS

SEQ ID NO: 24020 - protein, 12 aa, Homo sapiens
  ( 5 )...( 16 ): >Q8TAP5
LQRARSTTELRK

SEQ ID NO: 24021 - protein, 12 aa, Homo sapiens
  ( 144 )...( 155 ): >Q8TAP5
ALTPQQTLSRRK

SEQ ID NO: 24022 - protein, 12 aa, Homo sapiens
  ( 145 )...( 156 ): >Q8TAP5
LTPQQTLSRRKV

SEQ ID NO: 24023 - protein, 12 aa, Homo sapiens
  ( 149 )...( 160 ): >Q8TAP5
QTLSRRKVEART

SEQ ID NO: 24024 - protein, 12 aa, Homo sapiens
  ( 162 )...( 173 ): >Q8TAP5
RCFSLRMKSTLT

SEQ ID NO: 24025 - protein, 12 aa, Homo sapiens
  ( 164 )...( 175 ): >Q8TAP5
FSLRMKSTLTSR

SEQ ID NO: 24026 - protein, 12 aa, Homo sapiens
  ( 165 )...( 176 ): >Q8TAP5
SLRMKSTLTSRG

SEQ ID NO: 24027 - protein, 12 aa, Homo sapiens
  ( 166 )...( 177 ): >Q8TAP5
LRMKSTLTSRGR

SEQ ID NO: 24028 - protein, 12 aa, Homo sapiens
  ( 167 )...( 178 ): >Q8TAP5
RMKSTLTSRGRT

SEQ ID NO: 24029 - protein, 12 aa, Homo sapiens
  ( 168 )...( 179 ): >Q8TAP5
MKSTLTSRGRTL

SEQ ID NO: 24030 - protein, 12 aa, Homo sapiens
  ( 169 )...( 180 ): >Q8TAP5
KSTLTSRGRTLN

SEQ ID NO: 24031 - protein, 12 aa, Homo sapiens
  ( 171 )...( 182 ): >Q8TAP5
TLTSRGRTLNLK

SEQ ID NO: 24032 - protein, 12 aa, Homo sapiens
  ( 172 )...( 183 ): >Q8TAP5
LTSRGRTLNLKA

SEQ ID NO: 24033 - protein, 12 aa, Homo sapiens
  ( 173 )...( 184 ): >Q8TAP5
TSRGRTLNLKAA

SEQ ID NO: 24034 - protein, 12 aa, Homo sapiens
  ( 174 )...( 185 ): >Q8TAP5
SRGRTLNLKAAT

SEQ ID NO: 24035 - protein, 12 aa, Homo sapiens
  ( 175 )...( 186 ): >Q8TAP5
RGRTLNLKAATW

SEQ ID NO: 24036 - protein, 12 aa, Homo sapiens
  ( 176 )...( 187 ): >Q8TAP5
GRTLNLKAATWK

SEQ ID NO: 24037 - protein, 12 aa, Homo sapiens
  ( 177 )...( 188 ): >Q8TAP5
RTLNLKAATWKV

SEQ ID NO: 24038 - protein, 12 aa, Homo sapiens
  ( 265 )...( 276 ): >Q8N0Y2
LVRHRKTHSGAR

SEQ ID NO: 24039 - protein, 12 aa, Homo sapiens
  ( 284 )...( 295 ): >Q8N0Y2
GKGFGRREHVLR

SEQ ID NO: 24040 - protein, 12 aa, Homo sapiens
  ( 293 )...( 304 ): >Q8N0Y2
VLRHQRIHGRAA

SEQ ID NO: 24041 - protein, 12 aa, Homo sapiens
  ( 294 )...( 305 ): >Q8N0Y2
LRHQRIHGRAAA

SEQ ID NO: 24042 - protein, 12 aa, Homo sapiens
  ( 295 )...( 306 ): >Q8N0Y2
RHQRIHGRAAAS

SEQ ID NO: 24043 - protein, 12 aa, Homo sapiens
  ( 1 )...( 12 ): >Q14211
MQLRKMQTVKKE

SEQ ID NO: 24044 - protein, 12 aa, Homo sapiens
  ( 3 )...( 14 ): >Q14211
LRKMQTVKKEQA

SEQ ID NO: 24045 - protein, 12 aa, Homo sapiens
  ( 4 )...( 15 ): >Q14211
RKMQTVKKEQAS

SEQ ID NO: 24046 - protein, 12 aa, Homo sapiens
  ( 52 )...( 63 ): >Q14211
VGKNKSSACRRK

SEQ ID NO: 24047 - protein, 12 aa, Homo sapiens
  ( 321 )...( 332 ): >Q14211
SALPHKLRIKAK

SEQ ID NO: 24048 - protein, 12 aa, Homo sapiens
  ( 322 )...( 333 ): >Q14211
ALPHKLRIKAKA

SEQ ID NO: 24049 - protein, 12 aa, Homo sapiens
  ( 323 )...( 334 ): >Q14211
LPHKLRIKAKAM

SEQ ID NO: 24050 - protein, 12 aa, Homo sapiens
  ( 325 )...( 336 ): >Q14211
HKLRIKAKAMQI

SEQ ID NO: 24051 - protein, 12 aa, Homo sapiens
  ( 326 )...( 337 ): >Q14211
KLRIKAKAMQIK

SEQ ID NO: 24052 - protein, 12 aa, Homo sapiens
  ( 327 )...( 338 ): >Q14211
LRIKAKAMQIKV

SEQ ID NO: 24053 - protein, 12 aa, Homo sapiens
  ( 328 )...( 339 ): >Q14211
RIKAKAMQIKVE

SEQ ID NO: 24054 - protein, 12 aa, Homo sapiens
  ( 5 )...( 16 ): >Q96K34
LQRARSTTELRK

SEQ ID NO: 24055 - protein, 12 aa, Homo sapiens
  ( 144 )...( 155 ): >Q96K34
ALTPQQTLSRRK

SEQ ID NO: 24056 - protein, 12 aa, Homo sapiens
  ( 145 )...( 156 ): >Q96K34
LTPQQTLSRRKV

SEQ ID NO: 24057 - protein, 12 aa, Homo sapiens
  ( 162 )...( 173 ): >Q96K34
RCFSLRMKSTLT

SEQ ID NO: 24058 - protein, 12 aa, Homo sapiens
  ( 164 )...( 175 ): >Q96K34
FSLRMKSTLTSR

SEQ ID NO: 24059 - protein, 12 aa, Homo sapiens
  ( 165 )...( 176 ): >Q96K34
SLRMKSTLTSRG

SEQ ID NO: 24060 - protein, 12 aa, Homo sapiens
  ( 166 )...( 177 ): >Q96K34
LRMKSTLTSRGR

SEQ ID NO: 24061 - protein, 12 aa, Homo sapiens
  ( 167 )...( 178 ): >Q96K34
RMKSTLTSRGRT

SEQ ID NO: 24062 - protein, 12 aa, Homo sapiens
  ( 168 )...( 179 ): >Q96K34
MKSTLTSRGRTL

SEQ ID NO: 24063 - protein, 12 aa, Homo sapiens
  ( 169 )...( 180 ): >Q96K34
KSTLTSRGRTLN

SEQ ID NO: 24064 - protein, 12 aa, Homo sapiens
  ( 171 )...( 182 ): >Q96K34
TLTSRGRTLNLK

SEQ ID NO: 24065 - protein, 12 aa, Homo sapiens
  ( 172 )...( 183 ): >Q96K34
LTSRGRTLNLKA

SEQ ID NO: 24066 - protein, 12 aa, Homo sapiens
  ( 173 )...( 184 ): >Q96K34
TSRGRTLNLKAA

SEQ ID NO: 24067 - protein, 12 aa, Homo sapiens
  ( 174 )...( 185 ): >Q96K34
SRGRTLNLKAAT

SEQ ID NO: 24068 - protein, 12 aa, Homo sapiens
  ( 175 )...( 186 ): >Q96K34
RGRTLNLKAATW

SEQ ID NO: 24069 - protein, 12 aa, Homo sapiens
  ( 176 )...( 187 ): >Q96K34
GRTLNLKAATWK

SEQ ID NO: 24070 - protein, 12 aa, Homo sapiens
  ( 177 )...( 188 ): >Q96K34
RTLNLKAATWKV

SEQ ID NO: 24071 - protein, 12 aa, Homo sapiens
  ( 360 )...( 371 ): >Q96K34
SRRPIQRGAPSQ

SEQ ID NO: 24072 - protein, 12 aa, Homo sapiens
  ( 510 )...( 521 ): >Q96K34
RAYHRPLGAVPR

SEQ ID NO: 24073 - protein, 12 aa, Homo sapiens
  ( 564 )...( 575 ): >Q96K34
PMAGARKRTLAQ

SEQ ID NO: 24074 - protein, 12 aa, Homo sapiens
  ( 565 )...( 576 ): >Q96K34
MAGARKRTLAQS

SEQ ID NO: 24075 - protein, 12 aa, Homo sapiens
  ( 33 )...( 44 ): >O43392
GGAIVQRAIKRR

SEQ ID NO: 24076 - protein, 12 aa, Homo sapiens
  ( 34 )...( 45 ): >O43392
GAIVQRAIKRRP

SEQ ID NO: 24077 - protein, 12 aa, Homo sapiens
  ( 35 )...( 46 ): >O43392
AIVQRAIKRRPG

SEQ ID NO: 24078 - protein, 12 aa, Homo sapiens
  ( 36 )...( 47 ): >O43392
IVQRAIKRRPGL

SEQ ID NO: 24079 - protein, 12 aa, Homo sapiens
  ( 37 )...( 48 ): >O43392
VQRAIKRRPGLD

SEQ ID NO: 24080 - protein, 12 aa, Homo sapiens
  ( 122 )...( 133 ): >O43392
LARKPDKLTILR

SEQ ID NO: 24081 - protein, 12 aa, Homo sapiens
  ( 123 )...( 134 ): >O43392
ARKPDKLTILRM

SEQ ID NO: 24082 - protein, 12 aa, Homo sapiens
  ( 124 )...( 135 ): >O43392
RKPDKLTILRMA

SEQ ID NO: 24083 - protein, 12 aa, Homo sapiens
  ( 132 )...( 143 ): >O43392
LRMAVSHMKSLR

SEQ ID NO: 24084 - protein, 12 aa, Homo sapiens
  ( 133 )...( 144 ): >O43392
RMAVSHMKSLRG

SEQ ID NO: 24085 - protein, 12 aa, Homo sapiens
  ( 235 )...( 246 ): >O43392
RILDLKTGTVKK

SEQ ID NO: 24086 - protein, 12 aa, Homo sapiens
  ( 285 )...( 296 ): >O43392
VRNRCRNGLGSV

SEQ ID NO: 24087 - protein, 12 aa, Homo sapiens
  ( 286 )...( 297 ): >O43392
RNRCRNGLGSVK

SEQ ID NO: 24088 - protein, 12 aa, Homo sapiens
  ( 92 )...( 103 ): >Q8WYA1
MARKLDKLTVLR

SEQ ID NO: 24089 - protein, 12 aa, Homo sapiens
  ( 93 )...( 104 ): >Q8WYA1
ARKLDKLTVLRM

SEQ ID NO: 24090 - protein, 12 aa, Homo sapiens
  ( 94 )...( 105 ): >Q8WYA1
RKLDKLTVLRMA

SEQ ID NO: 24091 - protein, 12 aa, Homo sapiens
  ( 102 )...( 113 ): >Q8WYA1
LRMAVQHLRSLK

SEQ ID NO: 24092 - protein, 12 aa, Homo sapiens
  ( 103 )...( 114 ): >Q8WYA1
RMAVQHLRSLKG

SEQ ID NO: 24093 - protein, 12 aa, Homo sapiens
  ( 153 )...( 164 ): >Q8WYA1
RGKILFVSKSVS

SEQ ID NO: 24094 - protein, 12 aa, Homo sapiens
  ( 220 )...( 231 ): >Q8WYA1
HAGRTRVYSGSR

SEQ ID NO: 24095 - protein, 12 aa, Homo sapiens
  ( 221 )...( 232 ): >Q8WYA1
AGRTRVYSGSRR

SEQ ID NO: 24096 - protein, 12 aa, Homo sapiens
  ( 222 )...( 233 ): >Q8WYA1
GRTRVYSGSRRS

SEQ ID NO: 24097 - protein, 12 aa, Homo sapiens
  ( 59 )...( 70 ): >Q9UPB1
VMRLTISYLRVR

SEQ ID NO: 24098 - protein, 12 aa, Homo sapiens
  ( 147 )...( 158 ): >Q9UPB1
MLTHRNGLVKKG

SEQ ID NO: 24099 - protein, 12 aa, Homo sapiens
  ( 148 )...( 159 ): >Q9UPB1
LTHRNGLVKKGK

SEQ ID NO: 24100 - protein, 12 aa, Homo sapiens
  ( 150 )...( 161 ): >Q9UPB1
HRNGLVKKGKEQ

SEQ ID NO: 24101 - protein, 12 aa, Homo sapiens
  ( 151 )...( 162 ): >Q9UPB1
RNGLVKKGKEQN

SEQ ID NO: 24102 - protein, 12 aa, Homo sapiens
  ( 154 )...( 165 ): >Q9UPB1
LVKKGKEQNTQR

SEQ ID NO: 24103 - protein, 12 aa, Homo sapiens
  ( 155 )...( 166 ): >Q9UPB1
VKKGKEQNTQRS

SEQ ID NO: 24104 - protein, 12 aa, Homo sapiens
  ( 165 )...( 176 ): >Q9UPB1
RSFFLRMKCTLT

SEQ ID NO: 24105 - protein, 12 aa, Homo sapiens
  ( 167 )...( 178 ): >Q9UPB1
FFLRMKCTLTSR

SEQ ID NO: 24106 - protein, 12 aa, Homo sapiens
  ( 168 )...( 179 ): >Q9UPB1
FLRMKCTLTSRG

SEQ ID NO: 24107 - protein, 12 aa, Homo sapiens
  ( 169 )...( 180 ): >Q9UPB1
LRMKCTLTSRGR

SEQ ID NO: 24108 - protein, 12 aa, Homo sapiens
  ( 170 )...( 181 ): >Q9UPB1
RMKCTLTSRGRT

SEQ ID NO: 24109 - protein, 12 aa, Homo sapiens
  ( 171 )...( 182 ): >Q9UPB1
MKCTLTSRGRTM

SEQ ID NO: 24110 - protein, 12 aa, Homo sapiens
  ( 172 )...( 183 ): >Q9UPB1
KCTLTSRGRTMN

SEQ ID NO: 24111 - protein, 12 aa, Homo sapiens
  ( 174 )...( 185 ): >Q9UPB1
TLTSRGRTMNIK

SEQ ID NO: 24112 - protein, 12 aa, Homo sapiens
  ( 175 )...( 186 ): >Q9UPB1
LTSRGRTMNIKS

SEQ ID NO: 24113 - protein, 12 aa, Homo sapiens
  ( 176 )...( 187 ): >Q9UPB1
TSRGRTMNIKSA

SEQ ID NO: 24114 - protein, 12 aa, Homo sapiens
  ( 177 )...( 188 ): >Q9UPB1
SRGRTMNIKSAT

SEQ ID NO: 24115 - protein, 12 aa, Homo sapiens
  ( 178 )...( 189 ): >Q9UPB1
RGRTMNIKSATW

SEQ ID NO: 24116 - protein, 12 aa, Homo sapiens
  ( 179 )...( 190 ): >Q9UPB1
GRTMNIKSATWK

SEQ ID NO: 24117 - protein, 12 aa, Homo sapiens
  ( 180 )...( 191 ): >Q9UPB1
RTMNIKSATWKV

SEQ ID NO: 24118 - protein, 12 aa, Homo sapiens
  ( 300 )...( 311 ): >Q9UPB1
VTTGQYRMLAKR

SEQ ID NO: 24119 - protein, 12 aa, Homo sapiens
  ( 301 )...( 312 ): >Q9UPB1
TTGQYRMLAKRG

SEQ ID NO: 24120 - protein, 12 aa, Homo sapiens
  ( 302 )...( 313 ): >Q9UPB1
TGQYRMLAKRGG

SEQ ID NO: 24121 - protein, 12 aa, Homo sapiens
  ( 303 )...( 314 ): >Q9UPB1
GQYRMLAKRGGY

SEQ ID NO: 24122 - protein, 12 aa, Homo sapiens
  ( 304 )...( 315 ): >Q9UPB1
QYRMLAKRGGYV

SEQ ID NO: 24123 - protein, 12 aa, Homo sapiens
  ( 306 )...( 317 ): >Q9UPB1
RMLAKRGGYVWV

SEQ ID NO: 24124 - protein, 12 aa, Homo sapiens
  ( 708 )...( 719 ): >Q9UPB1
PKILALQNAQRK

SEQ ID NO: 24125 - protein, 12 aa, Homo sapiens
  ( 745 )...( 756 ): >Q9UPB1
AATTSLSWKRVK

SEQ ID NO: 24126 - protein, 12 aa, Homo sapiens
  ( 746 )...( 757 ): >Q9UPB1
ATTSLSWKRVKG

SEQ ID NO: 24127 - protein, 12 aa, Homo sapiens
  ( 747 )...( 758 ): >Q9UPB1
TTSLSWKRVKGC

SEQ ID NO: 24128 - protein, 12 aa, Homo sapiens
  ( 748 )...( 759 ): >Q9UPB1
TSLSWKRVKGCK

SEQ ID NO: 24129 - protein, 12 aa, Homo sapiens
  ( 752 )...( 763 ): >Q9UPB1
WKRVKGCKSSEQ

SEQ ID NO: 24130 - protein, 12 aa, Homo sapiens
  ( 76 )...( 87 ): >Q9NYQ4
MARKLDKLTVLR

SEQ ID NO: 24131 - protein, 12 aa, Homo sapiens
  ( 77 )...( 88 ): >Q9NYQ4
ARKLDKLTVLRM

SEQ ID NO: 24132 - protein, 12 aa, Homo sapiens
  ( 78 )...( 89 ): >Q9NYQ4
RKLDKLTVLRMA

SEQ ID NO: 24133 - protein, 12 aa, Homo sapiens
  ( 86 )...( 97 ): >Q9NYQ4
LRMAVQHLRSLK

SEQ ID NO: 24134 - protein, 12 aa, Homo sapiens
  ( 87 )...( 98 ): >Q9NYQ4
RMAVQHLRSLKG

SEQ ID NO: 24135 - protein, 12 aa, Homo sapiens
  ( 137 )...( 148 ): >Q9NYQ4
RGKILFVSKSVS

SEQ ID NO: 24136 - protein, 12 aa, Homo sapiens
  ( 204 )...( 215 ): >Q9NYQ4
HAGRTRVYFGSR

SEQ ID NO: 24137 - protein, 12 aa, Homo sapiens
  ( 205 )...( 216 ): >Q9NYQ4
AGRTRVYFGSRR

SEQ ID NO: 24138 - protein, 12 aa, Homo sapiens
  ( 206 )...( 217 ): >Q9NYQ4
GRTRVYFGSRRS

SEQ ID NO: 24139 - protein, 12 aa, Homo sapiens
  ( 16 )...( 27 ): >Q9ULI6
PGECTYAGRKRR

SEQ ID NO: 24140 - protein, 12 aa, Homo sapiens
  ( 17 )...( 28 ): >Q9ULI6
GECTYAGRKRRR

SEQ ID NO: 24141 - protein, 12 aa, Homo sapiens
  ( 27 )...( 38 ): >Q9ULI6
RRPLQKQRPAVG

SEQ ID NO: 24142 - protein, 12 aa, Homo sapiens
  ( 28 )...( 39 ): >Q9ULI6
RPLQKQRPAVGA

SEQ ID NO: 24143 - protein, 12 aa, Homo sapiens
  ( 78 )...( 89 ): >Q9ULI6
VLRLSVSYLRVK

SEQ ID NO: 24144 - protein, 12 aa, Homo sapiens
  ( 79 )...( 90 ): >Q9ULI6
LRLSVSYLRVKS

SEQ ID NO: 24145 - protein, 12 aa, Homo sapiens
  ( 80 )...( 91 ): >Q9ULI6
RLSVSYLRVKSF

SEQ ID NO: 24146 - protein, 12 aa, Homo sapiens
  ( 270 )...( 281 ): >Q9ULI6
FQGKLKFLFGQK

SEQ ID NO: 24147 - protein, 12 aa, Homo sapiens
  ( 271 )...( 282 ): >Q9ULI6
QGKLKFLFGQKK

SEQ ID NO: 24148 - protein, 12 aa, Homo sapiens
  ( 272 )...( 283 ): >Q9ULI6
GKLKFLFGQKKK

SEQ ID NO: 24149 - protein, 12 aa, Homo sapiens
  ( 273 )...( 284 ): >Q9ULI6
KLKFLFGQKKKA

SEQ ID NO: 24150 - protein, 12 aa, Homo sapiens
  ( 274 )...( 285 ): >Q9ULI6
LKFLFGQKKKAP

SEQ ID NO: 24151 - protein, 12 aa, Homo sapiens
  ( 275 )...( 286 ): >Q9ULI6
KFLFGQKKKAPS

SEQ ID NO: 24152 - protein, 12 aa, Homo sapiens
  ( 310 )...( 321 ): >Q9ULI6
EMKMRSALLRAK

SEQ ID NO: 24153 - protein, 12 aa, Homo sapiens
  ( 311 )...( 322 ): >Q9ULI6
MKMRSALLRAKP

SEQ ID NO: 24154 - protein, 12 aa, Homo sapiens
  ( 313 )...( 324 ): >Q9ULI6
MRSALLRAKPRA

SEQ ID NO: 24155 - protein, 12 aa, Homo sapiens
  ( 314 )...( 325 ): >Q9ULI6
RSALLRAKPRAD

SEQ ID NO: 24156 - protein, 12 aa, Homo sapiens
  ( 409 )...( 420 ): >Q9ULI6
RMLSRASGVTGR

SEQ ID NO: 24157 - protein, 12 aa, Homo sapiens
  ( 410 )...( 421 ): >Q9ULI6
MLSRASGVTGRR

SEQ ID NO: 24158 - protein, 12 aa, Homo sapiens
  ( 625 )...( 636 ): >Q9ULI6
QPHGRATAGRSR

SEQ ID NO: 24159 - protein, 12 aa, Homo sapiens
  ( 145 )...( 156 ): >Q8N6J9
MRWNKGTILKAS

SEQ ID NO: 24160 - protein, 12 aa, Homo sapiens
  ( 146 )...( 157 ): >Q8N6J9
RWNKGTILKASV

SEQ ID NO: 24161 - protein, 12 aa, Homo sapiens
  ( 182 )...( 193 ): >Q8N6J9
QANRRLLLRIQV

SEQ ID NO: 24162 - protein, 12 aa, Homo sapiens
  ( 61 )...( 72 ): >O43792
SVKPDKCKILKK

SEQ ID NO: 24163 - protein, 12 aa, Homo sapiens
  ( 62 )...( 73 ): >O43792
VKPDKCKILKKT

SEQ ID NO: 24164 - protein, 12 aa, Homo sapiens
  ( 63 )...( 74 ): >O43792
KPDKCKILKKTV

SEQ ID NO: 24165 - protein, 12 aa, Homo sapiens
  ( 71 )...( 82 ): >O43792
KKTVDQIQLMKR

SEQ ID NO: 24166 - protein, 12 aa, Homo sapiens
  ( 243 )...( 254 ): >O43792
LICIARRLPRPP

SEQ ID NO: 24167 - protein, 12 aa, Homo sapiens
  ( 246 )...( 257 ): >O43792
IARRLPRPPAIT

SEQ ID NO: 24168 - protein, 12 aa, Homo sapiens
  ( 247 )...( 258 ): >O43792
ARRLPRPPAITG

SEQ ID NO: 24169 - protein, 12 aa, Homo sapiens
  ( 248 )...( 259 ): >O43792
RRLPRPPAITGV

SEQ ID NO: 24170 - protein, 12 aa, Homo sapiens
  ( 489 )...( 500 ): >O43792
PRRQVTSGLATR

SEQ ID NO: 24171 - protein, 12 aa, Homo sapiens
  ( 490 )...( 501 ): >O43792
RRQVTSGLATRP

SEQ ID NO: 24172 - protein, 12 aa, Homo sapiens
  ( 491 )...( 502 ): >O43792
RQVTSGLATRPR

SEQ ID NO: 24173 - protein, 12 aa, Homo sapiens
  ( 856 )...( 867 ): >O43792
SATARPTSRLNR

SEQ ID NO: 24174 - protein, 12 aa, Homo sapiens
  ( 857 )...( 868 ): >O43792
ATARPTSRLNRL

SEQ ID NO: 24175 - protein, 12 aa, Homo sapiens
  ( 858 )...( 869 ): >O43792
TARPTSRLNRLP

SEQ ID NO: 24176 - protein, 12 aa, Homo sapiens
  ( 23 )...( 34 ): >Q8WYR3
TRKLTLCLFSRS

SEQ ID NO: 24177 - protein, 12 aa, Homo sapiens
  ( 24 )...( 35 ): >Q8WYR3
RKLTLCLFSRSS

SEQ ID NO: 24178 - protein, 12 aa, Homo sapiens
  ( 53 )...( 64 ): >Q8WYR3
TSRILLRQQLMR

SEQ ID NO: 24179 - protein, 12 aa, Homo sapiens
  ( 489 )...( 500 ): >Q8NHD2
AIPRTSSLARAK

SEQ ID NO: 24180 - protein, 12 aa, Homo sapiens
  ( 490 )...( 501 ): >Q8NHD2
IPRTSSLARAKR

SEQ ID NO: 24181 - protein, 12 aa, Homo sapiens
  ( 491 )...( 502 ): >Q8NHD2
PRTSSLARAKRP

SEQ ID NO: 24182 - protein, 12 aa, Homo sapiens
  ( 492 )...( 503 ): >Q8NHD2
RTSSLARAKRPS

SEQ ID NO: 24183 - protein, 12 aa, Homo sapiens
  ( 493 )...( 504 ): >Q8NHD2
TSSLARAKRPSV

SEQ ID NO: 24184 - protein, 12 aa, Homo sapiens
  ( 521 )...( 532 ): >Q8NHD2
GELSSPLRKPKR

SEQ ID NO: 24185 - protein, 12 aa, Homo sapiens
  ( 529 )...( 540 ): >Q8NHD2
KPKRLSRGAQSG

SEQ ID NO: 24186 - protein, 12 aa, Homo sapiens
  ( 571 )...( 582 ): >Q8NHD2
ATGHRRPPLGSR

SEQ ID NO: 24187 - protein, 12 aa, Homo sapiens
  ( 572 )...( 583 ): >Q8NHD2
TGHRRPPLGSRT

SEQ ID NO: 24188 - protein, 12 aa, Homo sapiens
  ( 573 )...( 584 ): >Q8NHD2
GHRRPPLGSRTV

SEQ ID NO: 24189 - protein, 12 aa, Homo sapiens
  ( 574 )...( 585 ): >Q8NHD2
HRRPPLGSRTVA

SEQ ID NO: 24190 - protein, 12 aa, Homo sapiens
  ( 629 )...( 640 ): >Q8NHD2
FQKGQAEAKVKR

SEQ ID NO: 24191 - protein, 12 aa, Homo sapiens
  ( 630 )...( 641 ): >Q8NHD2
QKGQAEAKVKRA

SEQ ID NO: 24192 - protein, 12 aa, Homo sapiens
  ( 631 )...( 642 ): >Q8NHD2
KGQAEAKVKRAI

SEQ ID NO: 24193 - protein, 12 aa, Homo sapiens
  ( 633 )...( 644 ): >Q8NHD2
QAEAKVKRAIPK

SEQ ID NO: 24194 - protein, 12 aa, Homo sapiens
  ( 634 )...( 645 ): >Q8NHD2
AEAKVKRAIPKP

SEQ ID NO: 24195 - protein, 12 aa, Homo sapiens
  ( 635 )...( 646 ): >Q8NHD2
EAKVKRAIPKPP

SEQ ID NO: 24196 - protein, 12 aa, Homo sapiens
  ( 638 )...( 649 ): >Q8NHD2
VKRAIPKPPRQA

SEQ ID NO: 24197 - protein, 12 aa, Homo sapiens
  ( 647 )...( 658 ): >Q8NHD2
RQALNRKKGSPG

SEQ ID NO: 24198 - protein, 12 aa, Homo sapiens
  ( 648 )...( 659 ): >Q8NHD2
QALNRKKGSPGL

SEQ ID NO: 24199 - protein, 12 aa, Homo sapiens
  ( 41 )...( 52 ): >Q8NAM2
PTTSSQILARKR

SEQ ID NO: 24200 - protein, 12 aa, Homo sapiens
  ( 42 )...( 53 ): >Q8NAM2
TTSSQILARKRR

SEQ ID NO: 24201 - protein, 12 aa, Homo sapiens
  ( 149 )...( 160 ): >O94945
KPVSLTGGRPKQ

SEQ ID NO: 24202 - protein, 12 aa, Homo sapiens
  ( 153 )...( 164 ): >O94945
LTGGRPKQPHKI

SEQ ID NO: 24203 - protein, 12 aa, Homo sapiens
  ( 154 )...( 165 ): >O94945
TGGRPKQPHKIV

SEQ ID NO: 24204 - protein, 12 aa, Homo sapiens
  ( 155 )...( 166 ): >O94945
GGRPKQPHKIVP

SEQ ID NO: 24205 - protein, 12 aa, Homo sapiens
  ( 318 )...( 329 ): >O94945
PKNVAALKNRQM

SEQ ID NO: 24206 - protein, 12 aa, Homo sapiens
  ( 321 )...( 332 ): >O94945
VAALKNRQMKHI

SEQ ID NO: 24207 - protein, 12 aa, Homo sapiens
  ( 322 )...( 333 ): >O94945
AALKNRQMKHIS

SEQ ID NO: 24208 - protein, 12 aa, Homo sapiens
  ( 323 )...( 334 ): >O94945
ALKNRQMKHISA

SEQ ID NO: 24209 - protein, 12 aa, Homo sapiens
  ( 511 )...( 522 ): >O94945
QASKAVTRIGKR

SEQ ID NO: 24210 - protein, 12 aa, Homo sapiens
  ( 512 )...( 523 ): >O94945
ASKAVTRIGKRL

SEQ ID NO: 24211 - protein, 12 aa, Homo sapiens
  ( 513 )...( 524 ): >O94945
SKAVTRIGKRLG

SEQ ID NO: 24212 - protein, 12 aa, Homo sapiens
  ( 514 )...( 525 ): >O94945
KAVTRIGKRLGE

SEQ ID NO: 24213 - protein, 12 aa, Homo sapiens
  ( 167 )...( 178 ): >O43372
VTVKKRQSLSTR

SEQ ID NO: 24214 - protein, 12 aa, Homo sapiens
  ( 168 )...( 179 ): >O43372
TVKKRQSLSTRK

SEQ ID NO: 24215 - protein, 12 aa, Homo sapiens
  ( 171 )...( 182 ): >O43372
KRQSLSTRKPVI

SEQ ID NO: 24216 - protein, 12 aa, Homo sapiens
  ( 172 )...( 183 ): >O43372
RQSLSTRKPVII

SEQ ID NO: 24217 - protein, 12 aa, Homo sapiens
  ( 175 )...( 186 ): >O43372
LSTRKPVIIAVR

SEQ ID NO: 24218 - protein, 12 aa, Homo sapiens
  ( 176 )...( 187 ): >O43372
STRKPVIIAVRA

SEQ ID NO: 24219 - protein, 12 aa, Homo sapiens
  ( 308 )...( 319 ): >O43372
CSRVSKVMILVK

SEQ ID NO: 24220 - protein, 12 aa, Homo sapiens
  ( 309 )...( 320 ): >O43372
SRVSKVMILVKA

SEQ ID NO: 24221 - protein, 12 aa, Homo sapiens
  ( 310 )...( 321 ): >O43372
RVSKVMILVKAT

SEQ ID NO: 24222 - protein, 12 aa, Homo sapiens
  ( 142 )...( 153 ): >Q9Y2N7
ALTPQQTLSRRK

SEQ ID NO: 24223 - protein, 12 aa, Homo sapiens
  ( 143 )...( 154 ): >Q9Y2N7
LTPQQTLSRRKV

SEQ ID NO: 24224 - protein, 12 aa, Homo sapiens
  ( 160 )...( 171 ): >Q9Y2N7
RCFSLRMKSTLT

SEQ ID NO: 24225 - protein, 12 aa, Homo sapiens
  ( 162 )...( 173 ): >Q9Y2N7
FSLRMKSTLTSR

SEQ ID NO: 24226 - protein, 12 aa, Homo sapiens
  ( 163 )...( 174 ): >Q9Y2N7
SLRMKSTLTSRG

SEQ ID NO: 24227 - protein, 12 aa, Homo sapiens
  ( 164 )...( 175 ): >Q9Y2N7
LRMKSTLTSRGR

SEQ ID NO: 24228 - protein, 12 aa, Homo sapiens
  ( 165 )...( 176 ): >Q9Y2N7
RMKSTLTSRGRT

SEQ ID NO: 24229 - protein, 12 aa, Homo sapiens
  ( 166 )...( 177 ): >Q9Y2N7
MKSTLTSRGRTL

SEQ ID NO: 24230 - protein, 12 aa, Homo sapiens
  ( 167 )...( 178 ): >Q9Y2N7
KSTLTSRGRTLN

SEQ ID NO: 24231 - protein, 12 aa, Homo sapiens
  ( 169 )...( 180 ): >Q9Y2N7
TLTSRGRTLNLK

SEQ ID NO: 24232 - protein, 12 aa, Homo sapiens
  ( 170 )...( 181 ): >Q9Y2N7
LTSRGRTLNLKA

SEQ ID NO: 24233 - protein, 12 aa, Homo sapiens
  ( 171 )...( 182 ): >Q9Y2N7
TSRGRTLNLKAA

SEQ ID NO: 24234 - protein, 12 aa, Homo sapiens
  ( 172 )...( 183 ): >Q9Y2N7
SRGRTLNLKAAT

SEQ ID NO: 24235 - protein, 12 aa, Homo sapiens
  ( 173 )...( 184 ): >Q9Y2N7
RGRTLNLKAATW

SEQ ID NO: 24236 - protein, 12 aa, Homo sapiens
  ( 174 )...( 185 ): >Q9Y2N7
GRTLNLKAATWK

SEQ ID NO: 24237 - protein, 12 aa, Homo sapiens
  ( 175 )...( 186 ): >Q9Y2N7
RTLNLKAATWKV

SEQ ID NO: 24238 - protein, 12 aa, Homo sapiens
  ( 358 )...( 369 ): >Q9Y2N7
SRRPIQRGAPSQ

SEQ ID NO: 24239 - protein, 12 aa, Homo sapiens
  ( 508 )...( 519 ): >Q9Y2N7
RAYHRPLGAVPR

SEQ ID NO: 24240 - protein, 12 aa, Homo sapiens
  ( 562 )...( 573 ): >Q9Y2N7
PMAGARKRTLAQ

SEQ ID NO: 24241 - protein, 12 aa, Homo sapiens
  ( 563 )...( 574 ): >Q9Y2N7
MAGARKRTLAQS

SEQ ID NO: 24242 - protein, 12 aa, Homo sapiens
  ( 61 )...( 72 ): >O43793
SVKPDKCKILKK

SEQ ID NO: 24243 - protein, 12 aa, Homo sapiens
  ( 62 )...( 73 ): >O43793
VKPDKCKILKKT

SEQ ID NO: 24244 - protein, 12 aa, Homo sapiens
  ( 63 )...( 74 ): >O43793
KPDKCKILKKTV

SEQ ID NO: 24245 - protein, 12 aa, Homo sapiens
  ( 71 )...( 82 ): >O43793
KKTVDQIQLMKR

SEQ ID NO: 24246 - protein, 12 aa, Homo sapiens
  ( 243 )...( 254 ): >O43793
LICIARRLPRPP

SEQ ID NO: 24247 - protein, 12 aa, Homo sapiens
  ( 246 )...( 257 ): >O43793
IARRLPRPPAIT

SEQ ID NO: 24248 - protein, 12 aa, Homo sapiens
  ( 247 )...( 258 ): >O43793
ARRLPRPPAITG

SEQ ID NO: 24249 - protein, 12 aa, Homo sapiens
  ( 248 )...( 259 ): >O43793
RRLPRPPAITGV

SEQ ID NO: 24250 - protein, 12 aa, Homo sapiens
  ( 489 )...( 500 ): >O43793
PRRQVTSGLATR

SEQ ID NO: 24251 - protein, 12 aa, Homo sapiens
  ( 490 )...( 501 ): >O43793
RRQVTSGLATRP

SEQ ID NO: 24252 - protein, 12 aa, Homo sapiens
  ( 491 )...( 502 ): >O43793
RQVTSGLATRPR

SEQ ID NO: 24253 - protein, 12 aa, Homo sapiens
  ( 856 )...( 867 ): >O43793
SATARPTSRLNR

SEQ ID NO: 24254 - protein, 12 aa, Homo sapiens
  ( 857 )...( 868 ): >O43793
ATARPTSRLNRL

SEQ ID NO: 24255 - protein, 12 aa, Homo sapiens
  ( 858 )...( 869 ): >O43793
TARPTSRLNRLP

SEQ ID NO: 24256 - protein, 12 aa, Homo sapiens
  ( 87 )...( 98 ): >Q9HCC6
HLRSLRRVQVTA

SEQ ID NO: 24257 - protein, 12 aa, Homo sapiens
  ( 88 )...( 99 ): >Q9HCC6
LRSLRRVQVTAA

SEQ ID NO: 24258 - protein, 12 aa, Homo sapiens
  ( 89 )...( 100 ): >Q9HCC6
RSLRRVQVTAAL

SEQ ID NO: 24259 - protein, 12 aa, Homo sapiens
  ( 144 )...( 155 ): >Q9HCC6
AACLRQLGPSRR

SEQ ID NO: 24260 - protein, 12 aa, Homo sapiens
  ( 147 )...( 158 ): >Q9HCC6
LRQLGPSRRPAS

SEQ ID NO: 24261 - protein, 12 aa, Homo sapiens
  ( 148 )...( 159 ): >Q9HCC6
RQLGPSRRPASL

SEQ ID NO: 24262 - protein, 12 aa, Homo sapiens
  ( 55 )...( 66 ): >Q9NS70
MARKLDKLTVLR

SEQ ID NO: 24263 - protein, 12 aa, Homo sapiens
  ( 56 )...( 67 ): >Q9NS70
ARKLDKLTVLRM

SEQ ID NO: 24264 - protein, 12 aa, Homo sapiens
  ( 57 )...( 68 ): >Q9NS70
RKLDKLTVLRMA

SEQ ID NO: 24265 - protein, 12 aa, Homo sapiens
  ( 65 )...( 76 ): >Q9NS70
LRMAVQHLRSLK

SEQ ID NO: 24266 - protein, 12 aa, Homo sapiens
  ( 66 )...( 77 ): >Q9NS70
RMAVQHLRSLKG

SEQ ID NO: 24267 - protein, 12 aa, Homo sapiens
  ( 116 )...( 127 ): >Q9NS70
RGKILFVSKSVS

SEQ ID NO: 24268 - protein, 12 aa, Homo sapiens
  ( 183 )...( 194 ): >Q9NS70
HAGRTRVYSGSR

SEQ ID NO: 24269 - protein, 12 aa, Homo sapiens
  ( 184 )...( 195 ): >Q9NS70
AGRTRVYSGSRR

SEQ ID NO: 24270 - protein, 12 aa, Homo sapiens
  ( 185 )...( 196 ): >Q9NS70
GRTRVYSGSRRS

SEQ ID NO: 24271 - protein, 12 aa, Homo sapiens
  ( 78 )...( 89 ): >Q8N416
RLLGLVHDCKRR

SEQ ID NO: 24272 - protein, 12 aa, Homo sapiens
  ( 89 )...( 100 ): >Q8N416
RPSRARAVSRGA

SEQ ID NO: 24273 - protein, 12 aa, Homo sapiens
  ( 90 )...( 101 ): >Q8N416
PSRARAVSRGAK

SEQ ID NO: 24274 - protein, 12 aa, Homo sapiens
  ( 91 )...( 102 ): >Q8N416
SRARAVSRGAKT

SEQ ID NO: 24275 - protein, 12 aa, Homo sapiens
  ( 100 )...( 111 ): >Q8N416
AKTAETVQRIKK

SEQ ID NO: 24276 - protein, 12 aa, Homo sapiens
  ( 102 )...( 113 ): >Q8N416
TAETVQRIKKTR

SEQ ID NO: 24277 - protein, 12 aa, Homo sapiens
  ( 103 )...( 114 ): >Q8N416
AETVQRIKKTRR

SEQ ID NO: 24278 - protein, 12 aa, Homo sapiens
  ( 219 )...( 230 ): >Q8NI33
KPVHRAYCQIKV

SEQ ID NO: 24279 - protein, 12 aa, Homo sapiens
  ( 246 )...( 257 ): >Q8NI33
KQSKRKVSDVKV

SEQ ID NO: 24280 - protein, 12 aa, Homo sapiens
  ( 247 )...( 258 ): >Q8NI33
QSKRKVSDVKVP

SEQ ID NO: 24281 - protein, 12 aa, Homo sapiens
  ( 248 )...( 259 ): >Q8NI33
SKRKVSDVKVPL

SEQ ID NO: 24282 - protein, 12 aa, Homo sapiens
  ( 249 )...( 260 ): >Q8NI33
KRKVSDVKVPLL

SEQ ID NO: 24283 - protein, 12 aa, Homo sapiens
  ( 255 )...( 266 ): >Q8NI33
VKVPLLPSHKRM

SEQ ID NO: 24284 - protein, 12 aa, Homo sapiens
  ( 380 )...( 391 ): >Q8NI33
DKIGKIFKKCKK

SEQ ID NO: 24285 - protein, 12 aa, Homo sapiens
  ( 381 )...( 392 ): >Q8NI33
KIGKIFKKCKKG

SEQ ID NO: 24286 - protein, 12 aa, Homo sapiens
  ( 382 )...( 393 ): >Q8NI33
IGKIFKKCKKGI

SEQ ID NO: 24287 - protein, 12 aa, Homo sapiens
  ( 383 )...( 394 ): >Q8NI33
GKIFKKCKKGIL

SEQ ID NO: 24288 - protein, 12 aa, Homo sapiens
  ( 384 )...( 395 ): >Q8NI33
KIFKKCKKGILV

SEQ ID NO: 24289 - protein, 12 aa, Homo sapiens
  ( 385 )...( 396 ): >Q8NI33
IFKKCKKGILVN

SEQ ID NO: 24290 - protein, 12 aa, Homo sapiens
  ( 386 )...( 397 ): >Q8NI33
FKKCKKGILVNM

SEQ ID NO: 24291 - protein, 12 aa, Homo sapiens
  ( 387 )...( 398 ): >Q8NI33
KKCKKGILVNMD

SEQ ID NO: 24292 - protein, 12 aa, Homo sapiens
  ( 42 )...( 53 ): >Q9Y4E9
KVSKSLILTRAF

SEQ ID NO: 24293 - protein, 12 aa, Homo sapiens
  ( 65 )...( 76 ): >Q9Y4E9
KLIGQKNLLTRK

SEQ ID NO: 24294 - protein, 12 aa, Homo sapiens
  ( 66 )...( 77 ): >Q9Y4E9
LIGQKNLLTRKR

SEQ ID NO: 24295 - protein, 12 aa, Homo sapiens
  ( 67 )...( 78 ): >Q9Y4E9
IGQKNLLTRKRN

SEQ ID NO: 24296 - protein, 12 aa, Homo sapiens
  ( 68 )...( 79 ): >Q9Y4E9
GQKNLLTRKRNI

SEQ ID NO: 24297 - protein, 12 aa, Homo sapiens
  ( 76 )...( 87 ): >Q9Y4E9
KRNILIRKVSSL

SEQ ID NO: 24298 - protein, 12 aa, Homo sapiens
  ( 77 )...( 88 ): >Q9Y4E9
RNILIRKVSSLS

SEQ ID NO: 24299 - protein, 12 aa, Homo sapiens
  ( 79 )...( 90 ): >Q9Y4E9
ILIRKVSSLSGK

SEQ ID NO: 24300 - protein, 12 aa, Homo sapiens
  ( 104 )...( 115 ): >Q9Y4E9
AKQQALEAQKRK

SEQ ID NO: 24301 - protein, 12 aa, Homo sapiens
  ( 108 )...( 119 ): >Q9Y4E9
ALEAQKRKKKMG

SEQ ID NO: 24302 - protein, 12 aa, Homo sapiens
  ( 109 )...( 120 ): >Q9Y4E9
LEAQKRKKKMGS

SEQ ID NO: 24303 - protein, 12 aa, Homo sapiens
  ( 148 )...( 159 ): >Q9Y4E9
INNRRGKPLILS

SEQ ID NO: 24304 - protein, 12 aa, Homo sapiens
  ( 152 )...( 163 ): >Q9Y4E9
RGKPLILSRKKD

SEQ ID NO: 24305 - protein, 12 aa, Homo sapiens
  ( 153 )...( 164 ): >Q9Y4E9
GKPLILSRKKDQ

SEQ ID NO: 24306 - protein, 12 aa, Homo sapiens
  ( 154 )...( 165 ): >Q9Y4E9
KPLILSRKKDQA

SEQ ID NO: 24307 - protein, 12 aa, Homo sapiens
  ( 21 )...( 32 ): >Q9UMQ5
KRRSSSNTKAVT

SEQ ID NO: 24308 - protein, 12 aa, Homo sapiens
  ( 85 )...( 96 ): >Q9UMQ5
KKIKSEASPRPL

SEQ ID NO: 24309 - protein, 12 aa, Homo sapiens
  ( 86 )...( 97 ): >Q9UMQ5
KIKSEASPRPLK

SEQ ID NO: 24310 - protein, 12 aa, Homo sapiens
  ( 94 )...( 105 ): >Q9UMQ5
RPLKSVIPPKAK

SEQ ID NO: 24311 - protein, 12 aa, Homo sapiens
  ( 150 )...( 161 ): >Q9UMQ5
KNEKAAKVVILK

SEQ ID NO: 24312 - protein, 12 aa, Homo sapiens
  ( 151 )...( 162 ): >Q9UMQ5
NEKAAKVVILKK

SEQ ID NO: 24313 - protein, 12 aa, Homo sapiens
  ( 152 )...( 163 ): >Q9UMQ5
EKAAKVVILKKA

SEQ ID NO: 24314 - protein, 12 aa, Homo sapiens
  ( 184 )...( 195 ): >Q9UMQ5
LQARQQQLLKKI

SEQ ID NO: 24315 - protein, 12 aa, Homo sapiens
  ( 149 )...( 160 ): >Q8WYA5
KPVSLTGGRPKQ

SEQ ID NO: 24316 - protein, 12 aa, Homo sapiens
  ( 153 )...( 164 ): >Q8WYA5
LTGGRPKQPHKI

SEQ ID NO: 24317 - protein, 12 aa, Homo sapiens
  ( 154 )...( 165 ): >Q8WYA5
TGGRPKQPHKIV

SEQ ID NO: 24318 - protein, 12 aa, Homo sapiens
  ( 155 )...( 166 ): >Q8WYA5
GGRPKQPHKIVP

SEQ ID NO: 24319 - protein, 12 aa, Homo sapiens
  ( 318 )...( 329 ): >Q8WYA5
PKNVAALKNRQM

SEQ ID NO: 24320 - protein, 12 aa, Homo sapiens
  ( 321 )...( 332 ): >Q8WYA5
VAALKNRQMKHI

SEQ ID NO: 24321 - protein, 12 aa, Homo sapiens
  ( 322 )...( 333 ): >Q8WYA5
AALKNRQMKHIS

SEQ ID NO: 24322 - protein, 12 aa, Homo sapiens
  ( 323 )...( 334 ): >Q8WYA5
ALKNRQMKHISA

SEQ ID NO: 24323 - protein, 12 aa, Homo sapiens
  ( 181 )...( 192 ): >Q16509
GPHTKVVRRIFT

SEQ ID NO: 24324 - protein, 12 aa, Homo sapiens
  ( 183 )...( 194 ): >Q16509
HTKVVRRIFTNS

SEQ ID NO: 24325 - protein, 12 aa, Homo sapiens
  ( 184 )...( 195 ): >Q16509
TKVVRRIFTNSR

SEQ ID NO: 24326 - protein, 12 aa, Homo sapiens
  ( 221 )...( 232 ): >Q16509
KKLSKNEILRLA

SEQ ID NO: 24327 - protein, 12 aa, Homo sapiens
  ( 41 )...( 52 ): >Q96PR6
PTTSSQILARKR

SEQ ID NO: 24328 - protein, 12 aa, Homo sapiens
  ( 42 )...( 53 ): >Q96PR6
TTSSQILARKRR

SEQ ID NO: 24329 - protein, 12 aa, Homo sapiens
  ( 264 )...( 275 ): >Q8WU35
LVRHRKTHSGAR

SEQ ID NO: 24330 - protein, 12 aa, Homo sapiens
  ( 283 )...( 294 ): >Q8WU35
GKGFGRREHVLR

SEQ ID NO: 24331 - protein, 12 aa, Homo sapiens
  ( 292 )...( 303 ): >Q8WU35
VLRHQRIHGRAA

SEQ ID NO: 24332 - protein, 12 aa, Homo sapiens
  ( 293 )...( 304 ): >Q8WU35
LRHQRIHGRAAA

SEQ ID NO: 24333 - protein, 12 aa, Homo sapiens
  ( 294 )...( 305 ): >Q8WU35
RHQRIHGRAAAS

SEQ ID NO: 24334 - protein, 12 aa, Homo sapiens
  ( 27 )...( 38 ): >Q8NEV2
RNGLKFCKQILS

SEQ ID NO: 24335 - protein, 12 aa, Homo sapiens
  ( 51 )...( 62 ): >Q8NEV2
MKGLTLNCLGKK

SEQ ID NO: 24336 - protein, 12 aa, Homo sapiens
  ( 68 )...( 79 ): >Q8NEV2
LVRRGLRNDLKS

SEQ ID NO: 24337 - protein, 12 aa, Homo sapiens
  ( 285 )...( 296 ): >Q8NEV2
TKYPRGLVPRRL

SEQ ID NO: 24338 - protein, 12 aa, Homo sapiens
  ( 288 )...( 299 ): >Q8NEV2
PRGLVPRRLPLN

SEQ ID NO: 24339 - protein, 12 aa, Homo sapiens
  ( 414 )...( 425 ): >Q8NEV2
KAKIYKHAGNIR

SEQ ID NO: 24340 - protein, 12 aa, Homo sapiens
  ( 496 )...( 507 ): >Q8NEV2
KAMNKFGEALKK

SEQ ID NO: 24341 - protein, 12 aa, Homo sapiens
  ( 526 )...( 537 ): >Q8NEV2
HTYCMRKITLRS

SEQ ID NO: 24342 - protein, 12 aa, Homo sapiens
  ( 528 )...( 539 ): >Q8NEV2
YCMRKITLRSYV

SEQ ID NO: 24343 - protein, 12 aa, Homo sapiens
  ( 659 )...( 670 ): >Q8NEV2
KFLTPLKNLVKN

SEQ ID NO: 24344 - protein, 12 aa, Homo sapiens
  ( 660 )...( 671 ): >Q8NEV2
FLTPLKNLVKNK

SEQ ID NO: 24345 - protein, 12 aa, Homo sapiens
  ( 661 )...( 672 ): >Q8NEV2
LTPLKNLVKNKI

SEQ ID NO: 24346 - protein, 12 aa, Homo sapiens
  ( 687 )...( 698 ): >Q8NEV2
KFLLMLQSVKRA

SEQ ID NO: 24347 - protein, 12 aa, Homo sapiens
  ( 103 )...( 114 ): >Q8WYA2
MARKLDKLTVLR

SEQ ID NO: 24348 - protein, 12 aa, Homo sapiens
  ( 104 )...( 115 ): >Q8WYA2
ARKLDKLTVLRM

SEQ ID NO: 24349 - protein, 12 aa, Homo sapiens
  ( 105 )...( 116 ): >Q8WYA2
RKLDKLTVLRMA

SEQ ID NO: 24350 - protein, 12 aa, Homo sapiens
  ( 113 )...( 124 ): >Q8WYA2
LRMAVQHLRSLK

SEQ ID NO: 24351 - protein, 12 aa, Homo sapiens
  ( 114 )...( 125 ): >Q8WYA2
RMAVQHLRSLKG

SEQ ID NO: 24352 - protein, 12 aa, Homo sapiens
  ( 164 )...( 175 ): >Q8WYA2
RGKILFVSKSVS

SEQ ID NO: 24353 - protein, 12 aa, Homo sapiens
  ( 231 )...( 242 ): >Q8WYA2
HAGRTRVYSGSR

SEQ ID NO: 24354 - protein, 12 aa, Homo sapiens
  ( 232 )...( 243 ): >Q8WYA2
AGRTRVYSGSRR

SEQ ID NO: 24355 - protein, 12 aa, Homo sapiens
  ( 233 )...( 244 ): >Q8WYA2
GRTRVYSGSRRS

SEQ ID NO: 24356 - protein, 12 aa, Homo sapiens
  ( 115 )...( 126 ): >Q8N8Q0
GPSVRKLSKIAT

SEQ ID NO: 24357 - protein, 12 aa, Homo sapiens
  ( 116 )...( 127 ): >Q8N8Q0
PSVRKLSKIATL

SEQ ID NO: 24358 - protein, 12 aa, Homo sapiens
  ( 117 )...( 128 ): >Q8N8Q0
SVRKLSKIATLL

SEQ ID NO: 24359 - protein, 12 aa, Homo sapiens
  ( 118 )...( 129 ): >Q8N8Q0
VRKLSKIATLLL

SEQ ID NO: 24360 - protein, 12 aa, Homo sapiens
  ( 119 )...( 130 ): >Q8N8Q0
RKLSKIATLLLA

SEQ ID NO: 24361 - protein, 12 aa, Homo sapiens
  ( 120 )...( 131 ): >Q8N8Q0
KLSKIATLLLAR

SEQ ID NO: 24362 - protein, 12 aa, Homo sapiens
  ( 87 )...( 98 ): >Q8WX40
KRMSLSCERLRA

SEQ ID NO: 24363 - protein, 12 aa, Homo sapiens
  ( 133 )...( 144 ): >Q8WX40
QHAVSCKGRRRQ

SEQ ID NO: 24364 - protein, 12 aa, Homo sapiens
  ( 134 )...( 145 ): >Q8WX40
HAVSCKGRRRQS

SEQ ID NO: 24365 - protein, 12 aa, Homo sapiens
  ( 135 )...( 146 ): >Q8WX40
AVSCKGRRRQSS

SEQ ID NO: 24366 - protein, 12 aa, Homo sapiens
  ( 137 )...( 148 ): >Q8WX40
SCKGRRRQSSGI

SEQ ID NO: 24367 - protein, 12 aa, Homo sapiens
  ( 138 )...( 149 ): >Q8WX40
CKGRRRQSSGIT

SEQ ID NO: 24368 - protein, 12 aa, Homo sapiens
  ( 139 )...( 150 ): >Q8WX40
KGRRRQSSGITV

SEQ ID NO: 24369 - protein, 12 aa, Homo sapiens
  ( 140 )...( 151 ): >Q8WX40
GRRRQSSGITVM

SEQ ID NO: 24370 - protein, 12 aa, Homo sapiens
  ( 141 )...( 152 ): >Q8WX40
RRRQSSGITVMG

SEQ ID NO: 24371 - protein, 12 aa, Homo sapiens
  ( 22 )...( 33 ): >Q96T93
TRGDRKARKPLV

SEQ ID NO: 24372 - protein, 12 aa, Homo sapiens
  ( 24 )...( 35 ): >Q96T93
GDRKARKPLVEK

SEQ ID NO: 24373 - protein, 12 aa, Homo sapiens
  ( 67 )...( 78 ): >Q96T93
LTVRRVQGVLRG

SEQ ID NO: 24374 - protein, 12 aa, Homo sapiens
  ( 71 )...( 82 ): >Q96T93
RVQGVLRGRARE

SEQ ID NO: 24375 - protein, 12 aa, Homo sapiens
  ( 72 )...( 83 ): >Q96T93
VQGVLRGRARER

SEQ ID NO: 24376 - protein, 12 aa, Homo sapiens
  ( 94 )...( 105 ): >Q9BY81
NTSVKVIGAQRR

SEQ ID NO: 24377 - protein, 12 aa, Homo sapiens
  ( 95 )...( 106 ): >Q9BY81
TSVKVIGAQRRR

SEQ ID NO: 24378 - protein, 12 aa, Homo sapiens
  ( 96 )...( 107 ): >Q9BY81
SVKVIGAQRRRS

SEQ ID NO: 24379 - protein, 12 aa, Homo sapiens
  ( 97 )...( 108 ): >Q9BY81
VKVIGAQRRRSP

SEQ ID NO: 24380 - protein, 12 aa, Homo sapiens
  ( 98 )...( 109 ): >Q9BY81
KVIGAQRRRSPS

SEQ ID NO: 24381 - protein, 12 aa, Homo sapiens
  ( 99 )...( 110 ): >Q9BY81
VIGAQRRRSPSA

SEQ ID NO: 24382 - protein, 12 aa, Homo sapiens
  ( 100 )...( 111 ): >Q9BY81
IGAQRRRSPSAL

SEQ ID NO: 24383 - protein, 12 aa, Homo sapiens
  ( 101 )...( 112 ): >Q9BY81
GAQRRRSPSALA

SEQ ID NO: 24384 - protein, 12 aa, Homo sapiens
  ( 102 )...( 113 ): >Q9BY81
AQRRRSPSALAI

SEQ ID NO: 24385 - protein, 12 aa, Homo sapiens
  ( 234 )...( 245 ): >Q9BY81
FIRMKSTLTKRG

SEQ ID NO: 24386 - protein, 12 aa, Homo sapiens
  ( 235 )...( 246 ): >Q9BY81
IRMKSTLTKRGV

SEQ ID NO: 24387 - protein, 12 aa, Homo sapiens
  ( 236 )...( 247 ): >Q9BY81
RMKSTLTKRGVH

SEQ ID NO: 24388 - protein, 12 aa, Homo sapiens
  ( 238 )...( 249 ): >Q9BY81
KSTLTKRGVHIK

SEQ ID NO: 24389 - protein, 12 aa, Homo sapiens
  ( 243 )...( 254 ): >Q9BY81
KRGVHIKSSGYK

SEQ ID NO: 24390 - protein, 12 aa, Homo sapiens
  ( 252 )...( 263 ): >Q9BY81
GYKVIHITGRLR

SEQ ID NO: 24391 - protein, 12 aa, Homo sapiens
  ( 253 )...( 264 ): >Q9BY81
YKVIHITGRLRL

SEQ ID NO: 24392 - protein, 12 aa, Homo sapiens
  ( 254 )...( 265 ): >Q9BY81
KVIHITGRLRLR

SEQ ID NO: 24393 - protein, 12 aa, Homo sapiens
  ( 255 )...( 266 ): >Q9BY81
VIHITGRLRLRV

SEQ ID NO: 24394 - protein, 12 aa, Homo sapiens
  ( 256 )...( 267 ): >Q9BY81
IHITGRLRLRVS

SEQ ID NO: 24395 - protein, 12 aa, Homo sapiens
  ( 257 )...( 268 ): >Q9BY81
HITGRLRLRVSL

SEQ ID NO: 24396 - protein, 12 aa, Homo sapiens
  ( 258 )...( 269 ): >Q9BY81
ITGRLRLRVSLS

SEQ ID NO: 24397 - protein, 12 aa, Homo sapiens
  ( 259 )...( 270 ): >Q9BY81
TGRLRLRVSLSH

SEQ ID NO: 24398 - protein, 12 aa, Homo sapiens
  ( 260 )...( 271 ): >Q9BY81
GRLRLRVSLSHG

SEQ ID NO: 24399 - protein, 12 aa, Homo sapiens
  ( 261 )...( 272 ): >Q9BY81
RLRLRVSLSHGR

SEQ ID NO: 24400 - protein, 12 aa, Homo sapiens
  ( 262 )...( 273 ): >Q9BY81
LRLRVSLSHGRT

SEQ ID NO: 24401 - protein, 12 aa, Homo sapiens
  ( 263 )...( 274 ): >Q9BY81
RLRVSLSHGRTV

SEQ ID NO: 24402 - protein, 12 aa, Homo sapiens
  ( 356 )...( 367 ): >Q9BY81
LNKGQCVTKYYR

SEQ ID NO: 24403 - protein, 12 aa, Homo sapiens
  ( 577 )...( 588 ): >Q9BY81
QKGGSASRRRLS

SEQ ID NO: 24404 - protein, 12 aa, Homo sapiens
  ( 578 )...( 589 ): >Q9BY81
KGGSASRRRLSS

SEQ ID NO: 24405 - protein, 12 aa, Homo sapiens
  ( 44 )...( 55 ): >Q9BW11
RKKRPPQAPGAQ

SEQ ID NO: 24406 - protein, 12 aa, Homo sapiens
  ( 90 )...( 101 ): >Q9BW11
CARYTTLSLLRR

SEQ ID NO: 24407 - protein, 12 aa, Homo sapiens
  ( 91 )...( 102 ): >Q9BW11
ARYTTLSLLRRA

SEQ ID NO: 24408 - protein, 12 aa, Homo sapiens
  ( 93 )...( 104 ): >Q9BW11
YTTLSLLRRARM

SEQ ID NO: 24409 - protein, 12 aa, Homo sapiens
  ( 94 )...( 105 ): >Q9BW11
TTLSLLRRARMH

SEQ ID NO: 24410 - protein, 12 aa, Homo sapiens
  ( 95 )...( 106 ): >Q9BW11
TLSLLRRARMHI

SEQ ID NO: 24411 - protein, 12 aa, Homo sapiens
  ( 22 )...( 33 ): >Q9P2S3
TRGDRKARKPLV

SEQ ID NO: 24412 - protein, 12 aa, Homo sapiens
  ( 24 )...( 35 ): >Q9P2S3
GDRKARKPLVEK

SEQ ID NO: 24413 - protein, 12 aa, Homo sapiens
  ( 69 )...( 80 ): >Q9P2S3
LTVRRVQGVLRG

SEQ ID NO: 24414 - protein, 12 aa, Homo sapiens
  ( 73 )...( 84 ): >Q9P2S3
RVQGVLRGRARE

SEQ ID NO: 24415 - protein, 12 aa, Homo sapiens
  ( 74 )...( 85 ): >Q9P2S3
VQGVLRGRARER

SEQ ID NO: 24416 - protein, 12 aa, Homo sapiens
  ( 233 )...( 244 ): >Q8NFJ8
SSKKSKEQKALR

SEQ ID NO: 24417 - protein, 12 aa, Homo sapiens
  ( 234 )...( 245 ): >Q8NFJ8
SKKSKEQKALRL

SEQ ID NO: 24418 - protein, 12 aa, Homo sapiens
  ( 236 )...( 247 ): >Q8NFJ8
KSKEQKALRLNI

SEQ ID NO: 24419 - protein, 12 aa, Homo sapiens
  ( 275 )...( 286 ): >Q8NFJ8
PSVRKLSKIATL

SEQ ID NO: 24420 - protein, 12 aa, Homo sapiens
  ( 276 )...( 287 ): >Q8NFJ8
SVRKLSKIATLL

SEQ ID NO: 24421 - protein, 12 aa, Homo sapiens
  ( 277 )...( 288 ): >Q8NFJ8
VRKLSKIATLLL

SEQ ID NO: 24422 - protein, 12 aa, Homo sapiens
  ( 278 )...( 289 ): >Q8NFJ8
RKLSKIATLLLA

SEQ ID NO: 24423 - protein, 12 aa, Homo sapiens
  ( 96 )...( 107 ): >Q9UQC6
AEGERPKKRGPK

SEQ ID NO: 24424 - protein, 12 aa, Homo sapiens
  ( 110 )...( 121 ): >Q9UQC6
KMTKARLERSKL

SEQ ID NO: 24425 - protein, 12 aa, Homo sapiens
  ( 144 )...( 155 ): >Q9UQC6
LRKVVPCYSKTQ

SEQ ID NO: 24426 - protein, 12 aa, Homo sapiens
  ( 145 )...( 156 ): >Q9UQC6
RKVVPCYSKTQK

SEQ ID NO: 24427 - protein, 12 aa, Homo sapiens
  ( 156 )...( 167 ): >Q9UQC6
KLSKIETLRLAK

SEQ ID NO: 24428 - protein, 12 aa, Homo sapiens
  ( 30 )...( 41 ): >Q9HC25
KRLSKVDTLRLA

SEQ ID NO: 24429 - protein, 12 aa, Homo sapiens
  ( 62 )...( 73 ): >Q9BRJ9
RDPRAPSVGRRG

SEQ ID NO: 24430 - protein, 12 aa, Homo sapiens
  ( 65 )...( 76 ): >Q9BRJ9
RAPSVGRRGARS

SEQ ID NO: 24431 - protein, 12 aa, Homo sapiens
  ( 67 )...( 78 ): >Q9BRJ9
PSVGRRGARSSR

SEQ ID NO: 24432 - protein, 12 aa, Homo sapiens
  ( 68 )...( 79 ): >Q9BRJ9
SVGRRGARSSRL

SEQ ID NO: 24433 - protein, 12 aa, Homo sapiens
  ( 69 )...( 80 ): >Q9BRJ9
VGRRGARSSRLG

SEQ ID NO: 24434 - protein, 12 aa, Homo sapiens
  ( 74 )...( 85 ): >Q9BRJ9
ARSSRLGSGQRQ

SEQ ID NO: 24435 - protein, 12 aa, Homo sapiens
  ( 91 )...( 102 ): >Q9BRJ9
EKLRMRTLARAL

SEQ ID NO: 24436 - protein, 12 aa, Homo sapiens
  ( 92 )...( 103 ): >Q9BRJ9
KLRMRTLARALH

SEQ ID NO: 24437 - protein, 12 aa, Homo sapiens
  ( 147 )...( 158 ): >Q9BRJ9
LQRRCRQRGDAG

SEQ ID NO: 24438 - protein, 12 aa, Homo sapiens
  ( 32 )...( 43 ): >Q96FL2
STRKGSVVSRAN

SEQ ID NO: 24439 - protein, 12 aa, Homo sapiens
  ( 33 )...( 44 ): >Q96FL2
TRKGSVVSRANS

SEQ ID NO: 24440 - protein, 12 aa, Homo sapiens
  ( 34 )...( 45 ): >Q96FL2
RKGSVVSRANSI

SEQ ID NO: 24441 - protein, 12 aa, Homo sapiens
  ( 147 )...( 158 ): >Q96FL2
LRKDVTALKIMK

SEQ ID NO: 24442 - protein, 12 aa, Homo sapiens
  ( 148 )...( 159 ): >Q96FL2
RKDVTALKIMKV

SEQ ID NO: 24443 - protein, 12 aa, Homo sapiens
  ( 55 )...( 66 ): >Q14959
KKIKSEASPRPL

SEQ ID NO: 24444 - protein, 12 aa, Homo sapiens
  ( 56 )...( 67 ): >Q14959
KIKSEASPRPLK

SEQ ID NO: 24445 - protein, 12 aa, Homo sapiens
  ( 64 )...( 75 ): >Q14959
RPLKSVIPPKAK

SEQ ID NO: 24446 - protein, 12 aa, Homo sapiens
  ( 119 )...( 130 ): >Q14959
KNEKAAKVVILK

SEQ ID NO: 24447 - protein, 12 aa, Homo sapiens
  ( 120 )...( 131 ): >Q14959
NEKAAKVVILKK

SEQ ID NO: 24448 - protein, 12 aa, Homo sapiens
  ( 121 )...( 132 ): >Q14959
EKAAKVVILKKA

SEQ ID NO: 24449 - protein, 12 aa, Homo sapiens
  ( 153 )...( 164 ): >Q14959
LQARQQQLLKKI

SEQ ID NO: 24450 - protein, 12 aa, Homo sapiens
  ( 8 )...( 19 ): >Q8NDC7
AAVRRRFWGVAF

SEQ ID NO: 24451 - protein, 12 aa, Homo sapiens
  ( 25 )...( 36 ): >Q8NDC7
PVRWRRLLPLGG

SEQ ID NO: 24452 - protein, 12 aa, Homo sapiens
  ( 26 )...( 37 ): >Q8NDC7
VRWRRLLPLGGG

SEQ ID NO: 24453 - protein, 12 aa, Homo sapiens
  ( 27 )...( 38 ): >Q8NDC7
RWRRLLPLGGGW

SEQ ID NO: 24454 - protein, 12 aa, Homo sapiens
  ( 28 )...( 39 ): >Q8NDC7
WRRLLPLGGGWR

SEQ ID NO: 24455 - protein, 12 aa, Homo sapiens
  ( 29 )...( 40 ): >Q8NDC7
RRLLPLGGGWRG

SEQ ID NO: 24456 - protein, 12 aa, Homo sapiens
  ( 98 )...( 109 ): >Q8NDC7
GGAIVQRAIKRR

SEQ ID NO: 24457 - protein, 12 aa, Homo sapiens
  ( 99 )...( 110 ): >Q8NDC7
GAIVQRAIKRRP

SEQ ID NO: 24458 - protein, 12 aa, Homo sapiens
  ( 100 )...( 111 ): >Q8NDC7
AIVQRAIKRRPG

SEQ ID NO: 24459 - protein, 12 aa, Homo sapiens
  ( 101 )...( 112 ): >Q8NDC7
IVQRAIKRRPGL

SEQ ID NO: 24460 - protein, 12 aa, Homo sapiens
  ( 102 )...( 113 ): >Q8NDC7
VQRAIKRRPGLD

SEQ ID NO: 24461 - protein, 12 aa, Homo sapiens
  ( 187 )...( 198 ): >Q8NDC7
LARKPDKLTILR

SEQ ID NO: 24462 - protein, 12 aa, Homo sapiens
  ( 188 )...( 199 ): >Q8NDC7
ARKPDKLTILRM

SEQ ID NO: 24463 - protein, 12 aa, Homo sapiens
  ( 189 )...( 200 ): >Q8NDC7
RKPDKLTILRMA

SEQ ID NO: 24464 - protein, 12 aa, Homo sapiens
  ( 197 )...( 208 ): >Q8NDC7
LRMAVSHMKSLR

SEQ ID NO: 24465 - protein, 12 aa, Homo sapiens
  ( 198 )...( 209 ): >Q8NDC7
RMAVSHMKSLRG

SEQ ID NO: 24466 - protein, 12 aa, Homo sapiens
  ( 300 )...( 311 ): >Q8NDC7
RILDLKTGTVKK

SEQ ID NO: 24467 - protein, 12 aa, Homo sapiens
  ( 350 )...( 361 ): >Q8NDC7
VRNRCRNGLGSV

SEQ ID NO: 24468 - protein, 12 aa, Homo sapiens
  ( 351 )...( 362 ): >Q8NDC7
RNRCRNGLGSVK

SEQ ID NO: 24469 - protein, 12 aa, Homo sapiens
  ( 477 )...( 488 ): >Q8NDC7
KLKGQVLSVMFR

SEQ ID NO: 24470 - protein, 12 aa, Homo sapiens
  ( 479 )...( 490 ): >Q8NDC7
KGQVLSVMFRFR

SEQ ID NO: 24471 - protein, 12 aa, Homo sapiens
  ( 71 )...( 82 ): >Q9HCA4
KVCKRKSVSVDR

SEQ ID NO: 24472 - protein, 12 aa, Homo sapiens
  ( 72 )...( 83 ): >Q9HCA4
VCKRKSVSVDRR

SEQ ID NO: 24473 - protein, 12 aa, Homo sapiens
  ( 75 )...( 86 ): >Q9HCA4
RKSVSVDRRRAA

SEQ ID NO: 24474 - protein, 12 aa, Homo sapiens
  ( 76 )...( 87 ): >Q9HCA4
KSVSVDRRRAAT

SEQ ID NO: 24475 - protein, 12 aa, Homo sapiens
  ( 78 )...( 89 ): >Q9HCA4
VSVDRRRAATLR

SEQ ID NO: 24476 - protein, 12 aa, Homo sapiens
  ( 55 )...( 66 ): >Q96J63
MARKLDKLTVLR

SEQ ID NO: 24477 - protein, 12 aa, Homo sapiens
  ( 56 )...( 67 ): >Q96J63
ARKLDKLTVLRM

SEQ ID NO: 24478 - protein, 12 aa, Homo sapiens
  ( 57 )...( 68 ): >Q96J63
RKLDKLTVLRMA

SEQ ID NO: 24479 - protein, 12 aa, Homo sapiens
  ( 65 )...( 76 ): >Q96J63
LRMAVQHLRSLK

SEQ ID NO: 24480 - protein, 12 aa, Homo sapiens
  ( 66 )...( 77 ): >Q96J63
RMAVQHLRSLKG

SEQ ID NO: 24481 - protein, 12 aa, Homo sapiens
  ( 116 )...( 127 ): >Q96J63
RGKILFVSKSVS

SEQ ID NO: 24482 - protein, 12 aa, Homo sapiens
  ( 183 )...( 194 ): >Q96J63
HAGRTRVYSGSR

SEQ ID NO: 24483 - protein, 12 aa, Homo sapiens
  ( 184 )...( 195 ): >Q96J63
AGRTRVYSGSRR

SEQ ID NO: 24484 - protein, 12 aa, Homo sapiens
  ( 185 )...( 196 ): >Q96J63
GRTRVYSGSRRS

SEQ ID NO: 24485 - protein, 12 aa, Homo sapiens
  ( 22 )...( 33 ): >Q96HZ4
TRGDRKARKPLV

SEQ ID NO: 24486 - protein, 12 aa, Homo sapiens
  ( 24 )...( 35 ): >Q96HZ4
GDRKARKPLVEK

SEQ ID NO: 24487 - protein, 12 aa, Homo sapiens
  ( 69 )...( 80 ): >Q96HZ4
LTVRRVQGVLRG

SEQ ID NO: 24488 - protein, 12 aa, Homo sapiens
  ( 73 )...( 84 ): >Q96HZ4
RVQGVLRGRARE

SEQ ID NO: 24489 - protein, 12 aa, Homo sapiens
  ( 74 )...( 85 ): >Q96HZ4
VQGVLRGRARER

SEQ ID NO: 24490 - protein, 12 aa, Homo sapiens
  ( 106 )...( 117 ): >Q9H2M4
MARKLDKLTVLR

SEQ ID NO: 24491 - protein, 12 aa, Homo sapiens
  ( 107 )...( 118 ): >Q9H2M4
ARKLDKLTVLRM

SEQ ID NO: 24492 - protein, 12 aa, Homo sapiens
  ( 108 )...( 119 ): >Q9H2M4
RKLDKLTVLRMA

SEQ ID NO: 24493 - protein, 12 aa, Homo sapiens
  ( 116 )...( 127 ): >Q9H2M4
LRMAVQHLRSLK

SEQ ID NO: 24494 - protein, 12 aa, Homo sapiens
  ( 117 )...( 128 ): >Q9H2M4
RMAVQHLRSLKG

SEQ ID NO: 24495 - protein, 12 aa, Homo sapiens
  ( 167 )...( 178 ): >Q9H2M4
RGKILFVSKSVS

SEQ ID NO: 24496 - protein, 12 aa, Homo sapiens
  ( 234 )...( 245 ): >Q9H2M4
HAGRTRVYSGSR

SEQ ID NO: 24497 - protein, 12 aa, Homo sapiens
  ( 235 )...( 246 ): >Q9H2M4
AGRTRVYSGSRR

SEQ ID NO: 24498 - protein, 12 aa, Homo sapiens
  ( 236 )...( 247 ): >Q9H2M4
GRTRVYSGSRRS

SEQ ID NO: 24499 - protein, 12 aa, Homo sapiens
  ( 13 )...( 24 ): >Q96E53
RRLSRAQKHSSG

SEQ ID NO: 24500 - protein, 12 aa, Homo sapiens
  ( 28 )...( 39 ): >Q96E53
TSTANRRAHLRL

SEQ ID NO: 24501 - protein, 12 aa, Homo sapiens
  ( 29 )...( 40 ): >Q96E53
STANRRAHLRLC

SEQ ID NO: 24502 - protein, 12 aa, Homo sapiens
  ( 30 )...( 41 ): >Q96E53
TANRRAHLRLCL

SEQ ID NO: 24503 - protein, 12 aa, Homo sapiens
  ( 61 )...( 72 ): >Q96E53
GLLNKAKAHIKK

SEQ ID NO: 24504 - protein, 12 aa, Homo sapiens
  ( 62 )...( 73 ): >Q96E53
LLNKAKAHIKKL

SEQ ID NO: 24505 - protein, 12 aa, Homo sapiens
  ( 19 )...( 30 ): >Q15355
KRKATDAAYQAR

SEQ ID NO: 24506 - protein, 12 aa, Homo sapiens
  ( 29 )...( 40 ): >Q15355
ARQAVKTPPRRL

SEQ ID NO: 24507 - protein, 12 aa, Homo sapiens
  ( 31 )...( 42 ): >Q15355
QAVKTPPRRLPT

SEQ ID NO: 24508 - protein, 12 aa, Homo sapiens
  ( 32 )...( 43 ): >Q15355
AVKTPPRRLPTV

SEQ ID NO: 24509 - protein, 12 aa, Homo sapiens
  ( 33 )...( 44 ): >Q15355
VKTPPRRLPTVM

SEQ ID NO: 24510 - protein, 12 aa, Homo sapiens
  ( 34 )...( 45 ): >Q15355
KTPPRRLPTVMV

SEQ ID NO: 24511 - protein, 12 aa, Homo sapiens
  ( 35 )...( 46 ): >Q15355
TPPRRLPTVMVR

SEQ ID NO: 24512 - protein, 12 aa, Homo sapiens
  ( 36 )...( 47 ): >Q15355
PPRRLPTVMVRS

SEQ ID NO: 24513 - protein, 12 aa, Homo sapiens
  ( 37 )...( 48 ): >Q15355
PRRLPTVMVRSP

SEQ ID NO: 24514 - protein, 12 aa, Homo sapiens
  ( 38 )...( 49 ): >Q15355
RRLPTVMVRSPI

SEQ ID NO: 24515 - protein, 12 aa, Homo sapiens
  ( 114 )...( 125 ): >Q15355
PQKKMLGQKATP

SEQ ID NO: 24516 - protein, 12 aa, Homo sapiens
  ( 115 )...( 126 ): >Q15355
QKKMLGQKATPP

SEQ ID NO: 24517 - protein, 12 aa, Homo sapiens
  ( 135 )...( 146 ): >Q15355
LKKGSLLPTSPR

SEQ ID NO: 24518 - protein, 12 aa, Homo sapiens
  ( 136 )...( 147 ): >Q15355
KKGSLLPTSPRL

SEQ ID NO: 24519 - protein, 12 aa, Homo sapiens
  ( 599 )...( 610 ): >Q15355
AIQAQKIWKKAI

SEQ ID NO: 24520 - protein, 12 aa, Homo sapiens
  ( 600 )...( 611 ): >Q15355
IQAQKIWKKAIM

SEQ ID NO: 24521 - protein, 12 aa, Homo sapiens
  ( 601 )...( 612 ): >Q15355
QAQKIWKKAIML

SEQ ID NO: 24522 - protein, 12 aa, Homo sapiens
  ( 602 )...( 613 ): >Q15355
AQKIWKKAIMLV

SEQ ID NO: 24523 - protein, 12 aa, Homo sapiens
  ( 607 )...( 618 ): >Q15355
KKAIMLVWRAAA

SEQ ID NO: 24524 - protein, 12 aa, Homo sapiens
  ( 720 )...( 731 ): >Q15355
SAKSLRGRDSTR

SEQ ID NO: 24525 - protein, 12 aa, Homo sapiens
  ( 721 )...( 732 ): >Q15355
AKSLRGRDSTRK

SEQ ID NO: 24526 - protein, 12 aa, Homo sapiens
  ( 738 )...( 749 ): >Q15355
KDGGTRGRRCAI

SEQ ID NO: 24527 - protein, 12 aa, Homo sapiens
  ( 73 )...( 84 ): >Q9H7H9
GSVSGSFRRAKL

SEQ ID NO: 24528 - protein, 12 aa, Homo sapiens
  ( 74 )...( 85 ): >Q9H7H9
SVSGSFRRAKLR

SEQ ID NO: 24529 - protein, 12 aa, Homo sapiens
  ( 75 )...( 86 ): >Q9H7H9
VSGSFRRAKLRL

SEQ ID NO: 24530 - protein, 12 aa, Homo sapiens
  ( 103 )...( 114 ): >Q9H7H9
RHTTLSLLKRAK

SEQ ID NO: 24531 - protein, 12 aa, Homo sapiens
  ( 107 )...( 118 ): >Q9H7H9
LSLLKRAKVHIK

SEQ ID NO: 24532 - protein, 12 aa, Homo sapiens
  ( 108 )...( 119 ): >Q9H7H9
SLLKRAKVHIKK

SEQ ID NO: 24533 - protein, 12 aa, Homo sapiens
  ( 109 )...( 120 ): >Q9H7H9
LLKRAKVHIKKL

SEQ ID NO: 24534 - protein, 12 aa, Homo sapiens
  ( 110 )...( 121 ): >Q9H7H9
LKRAKVHIKKLE

SEQ ID NO: 24535 - protein, 12 aa, Homo sapiens
  ( 59 )...( 70 ): >Q96PT9
VMRLTISYLRVR

SEQ ID NO: 24536 - protein, 12 aa, Homo sapiens
  ( 147 )...( 158 ): >Q96PT9
MLTHRNGLVKKG

SEQ ID NO: 24537 - protein, 12 aa, Homo sapiens
  ( 148 )...( 159 ): >Q96PT9
LTHRNGLVKKGK

SEQ ID NO: 24538 - protein, 12 aa, Homo sapiens
  ( 150 )...( 161 ): >Q96PT9
HRNGLVKKGKEQ

SEQ ID NO: 24539 - protein, 12 aa, Homo sapiens
  ( 151 )...( 162 ): >Q96PT9
RNGLVKKGKEQN

SEQ ID NO: 24540 - protein, 12 aa, Homo sapiens
  ( 154 )...( 165 ): >Q96PT9
LVKKGKEQNTQR

SEQ ID NO: 24541 - protein, 12 aa, Homo sapiens
  ( 155 )...( 166 ): >Q96PT9
VKKGKEQNTQRS

SEQ ID NO: 24542 - protein, 12 aa, Homo sapiens
  ( 165 )...( 176 ): >Q96PT9
RSFFLRMKCTLT

SEQ ID NO: 24543 - protein, 12 aa, Homo sapiens
  ( 167 )...( 178 ): >Q96PT9
FFLRMKCTLTSR

SEQ ID NO: 24544 - protein, 12 aa, Homo sapiens
  ( 168 )...( 179 ): >Q96PT9
FLRMKCTLTSRG

SEQ ID NO: 24545 - protein, 12 aa, Homo sapiens
  ( 169 )...( 180 ): >Q96PT9
LRMKCTLTSRGR

SEQ ID NO: 24546 - protein, 12 aa, Homo sapiens
  ( 170 )...( 181 ): >Q96PT9
RMKCTLTSRGRT

SEQ ID NO: 24547 - protein, 12 aa, Homo sapiens
  ( 171 )...( 182 ): >Q96PT9
MKCTLTSRGRTM

SEQ ID NO: 24548 - protein, 12 aa, Homo sapiens
  ( 172 )...( 183 ): >Q96PT9
KCTLTSRGRTMN

SEQ ID NO: 24549 - protein, 12 aa, Homo sapiens
  ( 174 )...( 185 ): >Q96PT9
TLTSRGRTMNIK

SEQ ID NO: 24550 - protein, 12 aa, Homo sapiens
  ( 175 )...( 186 ): >Q96PT9
LTSRGRTMNIKS

SEQ ID NO: 24551 - protein, 12 aa, Homo sapiens
  ( 176 )...( 187 ): >Q96PT9
TSRGRTMNIKSA

SEQ ID NO: 24552 - protein, 12 aa, Homo sapiens
  ( 177 )...( 188 ): >Q96PT9
SRGRTMNIKSAT

SEQ ID NO: 24553 - protein, 12 aa, Homo sapiens
  ( 178 )...( 189 ): >Q96PT9
RGRTMNIKSATW

SEQ ID NO: 24554 - protein, 12 aa, Homo sapiens
  ( 179 )...( 190 ): >Q96PT9
GRTMNIKSATWK

SEQ ID NO: 24555 - protein, 12 aa, Homo sapiens
  ( 180 )...( 191 ): >Q96PT9
RTMNIKSATWKV

SEQ ID NO: 24556 - protein, 12 aa, Homo sapiens
  ( 300 )...( 311 ): >Q96PT9
VTTGQYRMLAKR

SEQ ID NO: 24557 - protein, 12 aa, Homo sapiens
  ( 301 )...( 312 ): >Q96PT9
TTGQYRMLAKRG

SEQ ID NO: 24558 - protein, 12 aa, Homo sapiens
  ( 302 )...( 313 ): >Q96PT9
TGQYRMLAKRGG

SEQ ID NO: 24559 - protein, 12 aa, Homo sapiens
  ( 303 )...( 314 ): >Q96PT9
GQYRMLAKRGGY

SEQ ID NO: 24560 - protein, 12 aa, Homo sapiens
  ( 304 )...( 315 ): >Q96PT9
QYRMLAKRGGYV

SEQ ID NO: 24561 - protein, 12 aa, Homo sapiens
  ( 306 )...( 317 ): >Q96PT9
RMLAKRGGYVWV

SEQ ID NO: 24562 - protein, 12 aa, Homo sapiens
  ( 708 )...( 719 ): >Q96PT9
PKILALQNAQRK

SEQ ID NO: 24563 - protein, 12 aa, Homo sapiens
  ( 133 )...( 144 ): >Q8NDY6
PSVRKLSKIATL

SEQ ID NO: 24564 - protein, 12 aa, Homo sapiens
  ( 134 )...( 145 ): >Q8NDY6
SVRKLSKIATLL

SEQ ID NO: 24565 - protein, 12 aa, Homo sapiens
  ( 135 )...( 146 ): >Q8NDY6
VRKLSKIATLLL

SEQ ID NO: 24566 - protein, 12 aa, Homo sapiens
  ( 136 )...( 147 ): >Q8NDY6
RKLSKIATLLLA

SEQ ID NO: 24567 - protein, 12 aa, Homo sapiens
  ( 22 )...( 33 ): >Q8N2J2
TRGDRKARKPLV

SEQ ID NO: 24568 - protein, 12 aa, Homo sapiens
  ( 24 )...( 35 ): >Q8N2J2
GDRKARKPLVEK

SEQ ID NO: 24569 - protein, 12 aa, Homo sapiens
  ( 69 )...( 80 ): >Q8N2J2
LTVRRVQGVLRG

SEQ ID NO: 24570 - protein, 12 aa, Homo sapiens
  ( 76 )...( 87 ): >Q8N2J2
GVLRGRARGEWR

SEQ ID NO: 24571 - protein, 12 aa, Homo sapiens
  ( 95 )...( 106 ): >Q8N2J2
PRAPVTPARRRT

SEQ ID NO: 24572 - protein, 12 aa, Homo sapiens
  ( 96 )...( 107 ): >Q8N2J2
RAPVTPARRRTS

SEQ ID NO: 24573 - protein, 12 aa, Homo sapiens
  ( 97 )...( 108 ): >Q8N2J2
APVTPARRRTSL

SEQ ID NO: 24574 - protein, 12 aa, Homo sapiens
  ( 98 )...( 109 ): >Q8N2J2
PVTPARRRTSLP

SEQ ID NO: 24575 - protein, 12 aa, Homo sapiens
  ( 99 )...( 110 ): >Q8N2J2
VTPARRRTSLPA

SEQ ID NO: 24576 - protein, 12 aa, Homo sapiens
  ( 101 )...( 112 ): >Q8N2J2
PARRRTSLPAPL

SEQ ID NO: 24577 - protein, 12 aa, Homo sapiens
  ( 102 )...( 113 ): >Q8N2J2
ARRRTSLPAPLS

SEQ ID NO: 24578 - protein, 12 aa, Homo sapiens
  ( 174 )...( 185 ): >Q8N2J2
LRCRLHPVHARG

SEQ ID NO: 24579 - protein, 12 aa, Homo sapiens
  ( 186 )...( 197 ): >Q8N2J2
AHVRVHVPGHRR

SEQ ID NO: 24580 - protein, 12 aa, Homo sapiens
  ( 243 )...( 254 ): >Q9H8R3
RNRKSSKEKVAV

SEQ ID NO: 24581 - protein, 12 aa, Homo sapiens
  ( 244 )...( 255 ): >Q9H8R3
NRKSSKEKVAVL

SEQ ID NO: 24582 - protein, 12 aa, Homo sapiens
  ( 346 )...( 357 ): >Q9H8R3
RKHLKGPLTRKC

SEQ ID NO: 24583 - protein, 12 aa, Homo sapiens
  ( 347 )...( 358 ): >Q9H8R3
KHLKGPLTRKCV

SEQ ID NO: 24584 - protein, 12 aa, Homo sapiens
  ( 348 )...( 359 ): >Q9H8R3
HLKGPLTRKCVG

SEQ ID NO: 24585 - protein, 12 aa, Homo sapiens
  ( 424 )...( 435 ): >Q9H8R3
SIVPRRAAKSSR

SEQ ID NO: 24586 - protein, 12 aa, Homo sapiens
  ( 425 )...( 436 ): >Q9H8R3
IVPRRAAKSSRG

SEQ ID NO: 24587 - protein, 12 aa, Homo sapiens
  ( 426 )...( 437 ): >Q9H8R3
VPRRAAKSSRGN

SEQ ID NO: 24588 - protein, 12 aa, Homo sapiens
  ( 450 )...( 461 ): >Q9H8R3
QIQPKQEKKGGR

SEQ ID NO: 24589 - protein, 12 aa, Homo sapiens
  ( 451 )...( 462 ): >Q9H8R3
IQPKQEKKGGRS

SEQ ID NO: 24590 - protein, 12 aa, Homo sapiens
  ( 453 )...( 464 ): >Q9H8R3
PKQEKKGGRSSA

SEQ ID NO: 24591 - protein, 12 aa, Homo sapiens
  ( 560 )...( 571 ): >Q9H8R3
KAAERSRKAPPI

SEQ ID NO: 24592 - protein, 12 aa, Homo sapiens
  ( 564 )...( 575 ): >Q9H8R3
RSRKAPPIPLKL

SEQ ID NO: 24593 - protein, 12 aa, Homo sapiens
  ( 565 )...( 576 ): >Q9H8R3
SRKAPPIPLKLK

SEQ ID NO: 24594 - protein, 12 aa, Homo sapiens
  ( 566 )...( 577 ): >Q9H8R3
RKAPPIPLKLKP

SEQ ID NO: 24595 - protein, 12 aa, Homo sapiens
  ( 627 )...( 638 ): >Q9H8R3
KVSKSLILTRAF

SEQ ID NO: 24596 - protein, 12 aa, Homo sapiens
  ( 650 )...( 661 ): >Q9H8R3
KLIGQKNLLTRK

SEQ ID NO: 24597 - protein, 12 aa, Homo sapiens
  ( 651 )...( 662 ): >Q9H8R3
LIGQKNLLTRKR

SEQ ID NO: 24598 - protein, 12 aa, Homo sapiens
  ( 652 )...( 663 ): >Q9H8R3
IGQKNLLTRKRN

SEQ ID NO: 24599 - protein, 12 aa, Homo sapiens
  ( 653 )...( 664 ): >Q9H8R3
GQKNLLTRKRNI

SEQ ID NO: 24600 - protein, 12 aa, Homo sapiens
  ( 661 )...( 672 ): >Q9H8R3
KRNILIRKVSSL

SEQ ID NO: 24601 - protein, 12 aa, Homo sapiens
  ( 662 )...( 673 ): >Q9H8R3
RNILIRKVSSLS

SEQ ID NO: 24602 - protein, 12 aa, Homo sapiens
  ( 664 )...( 675 ): >Q9H8R3
ILIRKVSSLSGK

SEQ ID NO: 24603 - protein, 12 aa, Homo sapiens
  ( 41 )...( 52 ): >Q9NQ87
MQARKKRRGIIE

SEQ ID NO: 24604 - protein, 12 aa, Homo sapiens
  ( 213 )...( 224 ): >Q9NQ87
PIPALRTAPLRR

SEQ ID NO: 24605 - protein, 12 aa, Homo sapiens
  ( 214 )...( 225 ): >Q9NQ87
IPALRTAPLRRA

SEQ ID NO: 24606 - protein, 12 aa, Homo sapiens
  ( 215 )...( 226 ): >Q9NQ87
PALRTAPLRRAT

SEQ ID NO: 24607 - protein, 12 aa, Homo sapiens
  ( 216 )...( 227 ): >Q9NQ87
ALRTAPLRRATG

SEQ ID NO: 24608 - protein, 12 aa, Homo sapiens
  ( 217 )...( 228 ): >Q9NQ87
LRTAPLRRATGI

SEQ ID NO: 24609 - protein, 12 aa, Homo sapiens
  ( 218 )...( 229 ): >Q9NQ87
RTAPLRRATGII

SEQ ID NO: 24610 - protein, 12 aa, Homo sapiens
  ( 222 )...( 233 ): >Q9NQ87
LRRATGIILPAR

SEQ ID NO: 24611 - protein, 12 aa, Homo sapiens
  ( 224 )...( 235 ): >Q9NQ87
RATGIILPARRN

SEQ ID NO: 24612 - protein, 12 aa, Homo sapiens
  ( 229 )...( 240 ): >Q9NQ87
ILPARRNVLPSR

SEQ ID NO: 24613 - protein, 12 aa, Homo sapiens
  ( 230 )...( 241 ): >Q9NQ87
LPARRNVLPSRG

SEQ ID NO: 24614 - protein, 12 aa, Homo sapiens
  ( 232 )...( 243 ): >Q9NQ87
ARRNVLPSRGAS

SEQ ID NO: 24615 - protein, 12 aa, Homo sapiens
  ( 236 )...( 247 ): >Q9NQ87
VLPSRGASSTRR

SEQ ID NO: 24616 - protein, 12 aa, Homo sapiens
  ( 238 )...( 249 ): >Q9NQ87
PSRGASSTRRAR

SEQ ID NO: 24617 - protein, 12 aa, Homo sapiens
  ( 239 )...( 250 ): >Q9NQ87
SRGASSTRRARP

SEQ ID NO: 24618 - protein, 12 aa, Homo sapiens
  ( 240 )...( 251 ): >Q9NQ87
RGASSTRRARPL

SEQ ID NO: 24619 - protein, 12 aa, Homo sapiens
  ( 12 )...( 23 ): >Q9BYE0
GPKMLKPLVEKR

SEQ ID NO: 24620 - protein, 12 aa, Homo sapiens
  ( 44 )...( 55 ): >Q96ME3
RKKRPPQAPGAQ

SEQ ID NO: 24621 - protein, 12 aa, Homo sapiens
  ( 90 )...( 101 ): >Q96ME3
CARYTTLSLLRR

SEQ ID NO: 24622 - protein, 12 aa, Homo sapiens
  ( 91 )...( 102 ): >Q96ME3
ARYTTLSLLRRA

SEQ ID NO: 24623 - protein, 12 aa, Homo sapiens
  ( 93 )...( 104 ): >Q96ME3
YTTLSLLRRARM

SEQ ID NO: 24624 - protein, 12 aa, Homo sapiens
  ( 94 )...( 105 ): >Q96ME3
TTLSLLRRARMH

SEQ ID NO: 24625 - protein, 12 aa, Homo sapiens
  ( 95 )...( 106 ): >Q96ME3
TLSLLRRARMHI

SEQ ID NO: 24626 - protein, 12 aa, Homo sapiens
  ( 104 )...( 115 ): >O75321
KTTNADRRKAAT

SEQ ID NO: 24627 - protein, 12 aa, Homo sapiens
  ( 106 )...( 117 ): >O75321
TNADRRKAATMR

SEQ ID NO: 24628 - protein, 12 aa, Homo sapiens
  ( 97 )...( 108 ): >Q8TBI7
EGERPKKGGPKK

SEQ ID NO: 24629 - protein, 12 aa, Homo sapiens
  ( 98 )...( 109 ): >Q8TBI7
GERPKKGGPKKR

SEQ ID NO: 24630 - protein, 12 aa, Homo sapiens
  ( 110 )...( 121 ): >Q8TBI7
KMTKARLERSKL

SEQ ID NO: 24631 - protein, 12 aa, Homo sapiens
  ( 144 )...( 155 ): >Q8TBI7
LRKVVPCYSKTQ

SEQ ID NO: 24632 - protein, 12 aa, Homo sapiens
  ( 145 )...( 156 ): >Q8TBI7
RKVVPCYSKTQK

SEQ ID NO: 24633 - protein, 12 aa, Homo sapiens
  ( 156 )...( 167 ): >Q8TBI7
KLSKIETLRLAK

SEQ ID NO: 24634 - protein, 12 aa, Homo sapiens
  ( 521 )...( 532 ): >Q8WWU4
HQEGKRLRRVAC

SEQ ID NO: 24635 - protein, 12 aa, Homo sapiens
  ( 522 )...( 533 ): >Q8WWU4
QEGKRLRRVACT

SEQ ID NO: 24636 - protein, 12 aa, Homo sapiens
  ( 523 )...( 534 ): >Q8WWU4
EGKRLRRVACTC

SEQ ID NO: 24637 - protein, 12 aa, Homo sapiens
  ( 524 )...( 535 ): >Q8WWU4
GKRLRRVACTCP

SEQ ID NO: 24638 - protein, 12 aa, Homo sapiens
  ( 542 )...( 553 ): >Q8WWU4
GRGTNLGKKKQH

SEQ ID NO: 24639 - protein, 12 aa, Homo sapiens
  ( 543 )...( 554 ): >Q8WWU4
RGTNLGKKKQHI

SEQ ID NO: 24640 - protein, 12 aa, Homo sapiens
  ( 604 )...( 615 ): >Q8WWU4
RRTHTGEKKFVC

SEQ ID NO: 24641 - protein, 12 aa, Homo sapiens
  ( 5 )...( 16 ): >Q8WXA1
LQRARSTTELRK

SEQ ID NO: 24642 - protein, 12 aa, Homo sapiens
  ( 144 )...( 155 ): >Q8WXA1
ALTPQQTLSRRK

SEQ ID NO: 24643 - protein, 12 aa, Homo sapiens
  ( 145 )...( 156 ): >Q8WXA1
LTPQQTLSRRKV

SEQ ID NO: 24644 - protein, 12 aa, Homo sapiens
  ( 162 )...( 173 ): >Q8WXA1
RCFSLRMKSTLT

SEQ ID NO: 24645 - protein, 12 aa, Homo sapiens
  ( 164 )...( 175 ): >Q8WXA1
FSLRMKSTLTSR

SEQ ID NO: 24646 - protein, 12 aa, Homo sapiens
  ( 165 )...( 176 ): >Q8WXA1
SLRMKSTLTSRG

SEQ ID NO: 24647 - protein, 12 aa, Homo sapiens
  ( 166 )...( 177 ): >Q8WXA1
LRMKSTLTSRGR

SEQ ID NO: 24648 - protein, 12 aa, Homo sapiens
  ( 167 )...( 178 ): >Q8WXA1
RMKSTLTSRGRT

SEQ ID NO: 24649 - protein, 12 aa, Homo sapiens
  ( 168 )...( 179 ): >Q8WXA1
MKSTLTSRGRTL

SEQ ID NO: 24650 - protein, 12 aa, Homo sapiens
  ( 169 )...( 180 ): >Q8WXA1
KSTLTSRGRTLN

SEQ ID NO: 24651 - protein, 12 aa, Homo sapiens
  ( 171 )...( 182 ): >Q8WXA1
TLTSRGRTLNLK

SEQ ID NO: 24652 - protein, 12 aa, Homo sapiens
  ( 172 )...( 183 ): >Q8WXA1
LTSRGRTLNLKA

SEQ ID NO: 24653 - protein, 12 aa, Homo sapiens
  ( 173 )...( 184 ): >Q8WXA1
TSRGRTLNLKAA

SEQ ID NO: 24654 - protein, 12 aa, Homo sapiens
  ( 174 )...( 185 ): >Q8WXA1
SRGRTLNLKAAT

SEQ ID NO: 24655 - protein, 12 aa, Homo sapiens
  ( 175 )...( 186 ): >Q8WXA1
RGRTLNLKAATW

SEQ ID NO: 24656 - protein, 12 aa, Homo sapiens
  ( 176 )...( 187 ): >Q8WXA1
GRTLNLKAATWK

SEQ ID NO: 24657 - protein, 12 aa, Homo sapiens
  ( 177 )...( 188 ): >Q8WXA1
RTLNLKAATWKV

SEQ ID NO: 24658 - protein, 12 aa, Homo sapiens
  ( 360 )...( 371 ): >Q8WXA1
SRRPIQRGAPSQ

SEQ ID NO: 24659 - protein, 12 aa, Homo sapiens
  ( 510 )...( 521 ): >Q8WXA1
RAYHRPLGAVPR

SEQ ID NO: 24660 - protein, 12 aa, Homo sapiens
  ( 564 )...( 575 ): >Q8WXA1
PMAGARKRTLAQ

SEQ ID NO: 24661 - protein, 12 aa, Homo sapiens
  ( 565 )...( 576 ): >Q8WXA1
MAGARKRTLAQS

SEQ ID NO: 24662 - protein, 12 aa, Homo sapiens
  ( 4 )...( 15 ): >Q9HAZ3
PGECTYAGRKRR

SEQ ID NO: 24663 - protein, 12 aa, Homo sapiens
  ( 5 )...( 16 ): >Q9HAZ3
GECTYAGRKRRR

SEQ ID NO: 24664 - protein, 12 aa, Homo sapiens
  ( 15 )...( 26 ): >Q9HAZ3
RRPLQKQRPAVG

SEQ ID NO: 24665 - protein, 12 aa, Homo sapiens
  ( 16 )...( 27 ): >Q9HAZ3
RPLQKQRPAVGA

SEQ ID NO: 24666 - protein, 12 aa, Homo sapiens
  ( 66 )...( 77 ): >Q9HAZ3
VLRLSVSYLRVK

SEQ ID NO: 24667 - protein, 12 aa, Homo sapiens
  ( 67 )...( 78 ): >Q9HAZ3
LRLSVSYLRVKS

SEQ ID NO: 24668 - protein, 12 aa, Homo sapiens
  ( 68 )...( 79 ): >Q9HAZ3
RLSVSYLRVKSF

SEQ ID NO: 24669 - protein, 12 aa, Homo sapiens
  ( 258 )...( 269 ): >Q9HAZ3
FQGKLKFLFGQK

SEQ ID NO: 24670 - protein, 12 aa, Homo sapiens
  ( 259 )...( 270 ): >Q9HAZ3
QGKLKFLFGQKK

SEQ ID NO: 24671 - protein, 12 aa, Homo sapiens
  ( 260 )...( 271 ): >Q9HAZ3
GKLKFLFGQKKK

SEQ ID NO: 24672 - protein, 12 aa, Homo sapiens
  ( 261 )...( 272 ): >Q9HAZ3
KLKFLFGQKKKA

SEQ ID NO: 24673 - protein, 12 aa, Homo sapiens
  ( 262 )...( 273 ): >Q9HAZ3
LKFLFGQKKKAP

SEQ ID NO: 24674 - protein, 12 aa, Homo sapiens
  ( 263 )...( 274 ): >Q9HAZ3
KFLFGQKKKAPS

SEQ ID NO: 24675 - protein, 12 aa, Homo sapiens
  ( 298 )...( 309 ): >Q9HAZ3
EMKMRSALLRAK

SEQ ID NO: 24676 - protein, 12 aa, Homo sapiens
  ( 299 )...( 310 ): >Q9HAZ3
MKMRSALLRAKP

SEQ ID NO: 24677 - protein, 12 aa, Homo sapiens
  ( 301 )...( 312 ): >Q9HAZ3
MRSALLRAKPRA

SEQ ID NO: 24678 - protein, 12 aa, Homo sapiens
  ( 302 )...( 313 ): >Q9HAZ3
RSALLRAKPRAD

SEQ ID NO: 24679 - protein, 12 aa, Homo sapiens
  ( 397 )...( 408 ): >Q9HAZ3
RMLSRASGVTGR

SEQ ID NO: 24680 - protein, 12 aa, Homo sapiens
  ( 398 )...( 409 ): >Q9HAZ3
MLSRASGVTGRR

SEQ ID NO: 24681 - protein, 12 aa, Homo sapiens
  ( 613 )...( 624 ): >Q9HAZ3
QPHGRATAGRSR

SEQ ID NO: 24682 - protein, 12 aa, Homo sapiens
  ( 276 )...( 287 ): >Q8TAT1
APKRMKLDSRGG

SEQ ID NO: 24683 - protein, 12 aa, Homo sapiens
  ( 277 )...( 288 ): >Q8TAT1
PKRMKLDSRGGG

SEQ ID NO: 24684 - protein, 12 aa, Homo sapiens
  ( 278 )...( 289 ): >Q8TAT1
KRMKLDSRGGGS

SEQ ID NO: 24685 - protein, 12 aa, Homo sapiens
  ( 140 )...( 151 ): >Q8WYA4
MARKLDKLTVLR

SEQ ID NO: 24686 - protein, 12 aa, Homo sapiens
  ( 141 )...( 152 ): >Q8WYA4
ARKLDKLTVLRM

SEQ ID NO: 24687 - protein, 12 aa, Homo sapiens
  ( 142 )...( 153 ): >Q8WYA4
RKLDKLTVLRMA

SEQ ID NO: 24688 - protein, 12 aa, Homo sapiens
  ( 150 )...( 161 ): >Q8WYA4
LRMAVQHLRSLK

SEQ ID NO: 24689 - protein, 12 aa, Homo sapiens
  ( 151 )...( 162 ): >Q8WYA4
RMAVQHLRSLKG

SEQ ID NO: 24690 - protein, 12 aa, Homo sapiens
  ( 201 )...( 212 ): >Q8WYA4
RGKILFVSKSVS

SEQ ID NO: 24691 - protein, 12 aa, Homo sapiens
  ( 268 )...( 279 ): >Q8WYA4
HAGRTRVYSGSR

SEQ ID NO: 24692 - protein, 12 aa, Homo sapiens
  ( 269 )...( 280 ): >Q8WYA4
AGRTRVYSGSRR

SEQ ID NO: 24693 - protein, 12 aa, Homo sapiens
  ( 270 )...( 281 ): >Q8WYA4
GRTRVYSGSRRS

SEQ ID NO: 24694 - protein, 12 aa, Homo sapiens
  ( 62 )...( 73 ): >Q9UIG2
SSTPGRRKPRVH

SEQ ID NO: 24695 - protein, 12 aa, Homo sapiens
  ( 505 )...( 516 ): >Q9UIG2
ASGSTRIITRLR

SEQ ID NO: 24696 - protein, 12 aa, Homo sapiens
  ( 506 )...( 517 ): >Q9UIG2
SGSTRIITRLRN

SEQ ID NO: 24697 - protein, 12 aa, Homo sapiens
  ( 507 )...( 518 ): >Q9UIG2
GSTRIITRLRNP

SEQ ID NO: 24698 - protein, 12 aa, Homo sapiens
  ( 558 )...( 569 ): >Q9UIG2
RLSTKKEVIMKG

SEQ ID NO: 24699 - protein, 12 aa, Homo sapiens
  ( 814 )...( 825 ): >Q9UIG2
KCSRSPKKIKIE

SEQ ID NO: 24700 - protein, 12 aa, Homo sapiens
  ( 908 )...( 919 ): >Q9UIG2
LRTSYKKKTKSS

SEQ ID NO: 24701 - protein, 12 aa, Homo sapiens
  ( 910 )...( 921 ): >Q9UIG2
TSYKKKTKSSKL

SEQ ID NO: 24702 - protein, 12 aa, Homo sapiens
  ( 912 )...( 923 ): >Q9UIG2
YKKKTKSSKLDG

SEQ ID NO: 24703 - protein, 12 aa, Homo sapiens
  ( 913 )...( 924 ): >Q9UIG2
KKKTKSSKLDGL

SEQ ID NO: 24704 - protein, 12 aa, Homo sapiens
  ( 1087 )...( 1098 ): >Q9UIG2
IGTLICKNKKPL

SEQ ID NO: 24705 - protein, 12 aa, Homo sapiens
  ( 1088 )...( 1099 ): >Q9UIG2
GTLICKNKKPLI

SEQ ID NO: 24706 - protein, 12 aa, Homo sapiens
  ( 1089 )...( 1100 ): >Q9UIG2
TLICKNKKPLIQ

SEQ ID NO: 24707 - protein, 12 aa, Homo sapiens
  ( 1217 )...( 1228 ): >Q9UIG2
ANGKKPSQQKKL

SEQ ID NO: 24708 - protein, 12 aa, Homo sapiens
  ( 1258 )...( 1269 ): >Q9UIG2
KKGQRTSTFQIN

SEQ ID NO: 24709 - protein, 12 aa, Homo sapiens
  ( 1270 )...( 1281 ): >Q9UIG2
GKDNKPKIYLKG

SEQ ID NO: 24710 - protein, 12 aa, Homo sapiens
  ( 1274 )...( 1285 ): >Q9UIG2
KPKIYLKGECLK

SEQ ID NO: 24711 - protein, 12 aa, Homo sapiens
  ( 1553 )...( 1564 ): >Q9UIG2
KFSRPKKTRSGT

SEQ ID NO: 24712 - protein, 12 aa, Homo sapiens
  ( 1554 )...( 1565 ): >Q9UIG2
FSRPKKTRSGTA

SEQ ID NO: 24713 - protein, 12 aa, Homo sapiens
  ( 1555 )...( 1566 ): >Q9UIG2
SRPKKTRSGTAL

SEQ ID NO: 24714 - protein, 12 aa, Homo sapiens
  ( 1556 )...( 1567 ): >Q9UIG2
RPKKTRSGTALP

SEQ ID NO: 24715 - protein, 12 aa, Homo sapiens
  ( 1559 )...( 1570 ): >Q9UIG2
KTRSGTALPSYR

SEQ ID NO: 24716 - protein, 12 aa, Homo sapiens
  ( 1560 )...( 1571 ): >Q9UIG2
TRSGTALPSYRK

SEQ ID NO: 24717 - protein, 12 aa, Homo sapiens
  ( 1564 )...( 1575 ): >Q9UIG2
TALPSYRKFVTK

SEQ ID NO: 24718 - protein, 12 aa, Homo sapiens
  ( 1570 )...( 1581 ): >Q9UIG2
RKFVTKSTKKSI

SEQ ID NO: 24719 - protein, 12 aa, Homo sapiens
  ( 1571 )...( 1582 ): >Q9UIG2
KFVTKSTKKSIF

SEQ ID NO: 24720 - protein, 12 aa, Homo sapiens
  ( 1588 )...( 1599 ): >Q9UIG2
DLKKLARKGGIR

SEQ ID NO: 24721 - protein, 12 aa, Homo sapiens
  ( 1589 )...( 1600 ): >Q9UIG2
LKKLARKGGIRE

SEQ ID NO: 24722 - protein, 12 aa, Homo sapiens
  ( 1590 )...( 1601 ): >Q9UIG2
KKLARKGGIREV

SEQ ID NO: 24723 - protein, 12 aa, Homo sapiens
  ( 1591 )...( 1602 ): >Q9UIG2
KLARKGGIREVP

SEQ ID NO: 24724 - protein, 12 aa, Homo sapiens
  ( 1629 )...( 1640 ): >Q9UIG2
RYRLQTVKSLAG

SEQ ID NO: 24725 - protein, 12 aa, Homo sapiens
  ( 1683 )...( 1694 ): >Q9UIG2
IKRRDVGPYGIR

SEQ ID NO: 24726 - protein, 12 aa, Homo sapiens
  ( 1713 )...( 1724 ): >Q9UIG2
KETPTPQRKGLR

SEQ ID NO: 24727 - protein, 12 aa, Homo sapiens
  ( 1715 )...( 1726 ): >Q9UIG2
TPTPQRKGLRSS

SEQ ID NO: 24728 - protein, 12 aa, Homo sapiens
  ( 1717 )...( 1728 ): >Q9UIG2
TPQRKGLRSSAL

SEQ ID NO: 24729 - protein, 12 aa, Homo sapiens
  ( 1718 )...( 1729 ): >Q9UIG2
PQRKGLRSSALR

SEQ ID NO: 24730 - protein, 12 aa, Homo sapiens
  ( 1719 )...( 1730 ): >Q9UIG2
QRKGLRSSALRP

SEQ ID NO: 24731 - protein, 12 aa, Homo sapiens
  ( 1722 )...( 1733 ): >Q9UIG2
GLRSSALRPKRP

SEQ ID NO: 24732 - protein, 12 aa, Homo sapiens
  ( 1729 )...( 1740 ): >Q9UIG2
RPKRPETPKQTG

SEQ ID NO: 24733 - protein, 12 aa, Homo sapiens
  ( 1769 )...( 1780 ): >Q9UIG2
KAQAVEQQAKKR

SEQ ID NO: 24734 - protein, 12 aa, Homo sapiens
  ( 1777 )...( 1788 ): >Q9UIG2
AKKRLEQQKPTV

SEQ ID NO: 24735 - protein, 12 aa, Homo sapiens
  ( 1778 )...( 1789 ): >Q9UIG2
KKRLEQQKPTVI

SEQ ID NO: 24736 - protein, 12 aa, Homo sapiens
  ( 2202 )...( 2213 ): >Q9UIG2
VRVQSPSQTRIR

SEQ ID NO: 24737 - protein, 12 aa, Homo sapiens
  ( 2412 )...( 2423 ): >Q9UIG2
LKQKKSMTPAER

SEQ ID NO: 24738 - protein, 12 aa, Homo sapiens
  ( 2460 )...( 2471 ): >Q9UIG2
VEQKRSKQNATK

SEQ ID NO: 24739 - protein, 12 aa, Homo sapiens
  ( 2462 )...( 2473 ): >Q9UIG2
QKRSKQNATKLS

SEQ ID NO: 24740 - protein, 12 aa, Homo sapiens
  ( 2463 )...( 2474 ): >Q9UIG2
KRSKQNATKLSA

SEQ ID NO: 24741 - protein, 12 aa, Homo sapiens
  ( 2464 )...( 2475 ): >Q9UIG2
RSKQNATKLSAL

SEQ ID NO: 24742 - protein, 12 aa, Homo sapiens
  ( 2482 )...( 2493 ): >Q9UIG2
QLRAEILKKRAL

SEQ ID NO: 24743 - protein, 12 aa, Homo sapiens
  ( 2483 )...( 2494 ): >Q9UIG2
LRAEILKKRALL

SEQ ID NO: 24744 - protein, 12 aa, Homo sapiens
  ( 2562 )...( 2573 ): >Q9UIG2
TPTLPVASQKRK

SEQ ID NO: 24745 - protein, 12 aa, Homo sapiens
  ( 2563 )...( 2574 ): >Q9UIG2
PTLPVASQKRKR

SEQ ID NO: 24746 - protein, 12 aa, Homo sapiens
  ( 2564 )...( 2575 ): >Q9UIG2
TLPVASQKRKRE

SEQ ID NO: 24747 - protein, 12 aa, Homo sapiens
  ( 2580 )...( 2591 ): >Q9UIG2
SSSKSKKKKMIS

SEQ ID NO: 24748 - protein, 12 aa, Homo sapiens
  ( 2581 )...( 2592 ): >Q9UIG2
SSKSKKKKMIST

SEQ ID NO: 24749 - protein, 12 aa, Homo sapiens
  ( 2582 )...( 2593 ): >Q9UIG2
SKSKKKKMISTT

SEQ ID NO: 24750 - protein, 12 aa, Homo sapiens
  ( 2583 )...( 2594 ): >Q9UIG2
KSKKKKMISTTS

SEQ ID NO: 24751 - protein, 12 aa, Homo sapiens
  ( 2584 )...( 2595 ): >Q9UIG2
SKKKKMISTTSK

SEQ ID NO: 24752 - protein, 12 aa, Homo sapiens
  ( 2670 )...( 2681 ): >Q9UIG2
GLKRVLRSLQAH

SEQ ID NO: 24753 - protein, 12 aa, Homo sapiens
  ( 2671 )...( 2682 ): >Q9UIG2
LKRVLRSLQAHK

SEQ ID NO: 24754 - protein, 12 aa, Homo sapiens
  ( 2673 )...( 2684 ): >Q9UIG2
RVLRSLQAHKMA

SEQ ID NO: 24755 - protein, 12 aa, Homo sapiens
  ( 2757 )...( 2768 ): >Q9UIG2
SFFVQKLKGFKA

SEQ ID NO: 24756 - protein, 12 aa, Homo sapiens
  ( 2758 )...( 2769 ): >Q9UIG2
FFVQKLKGFKAS

SEQ ID NO: 24757 - protein, 12 aa, Homo sapiens
  ( 2759 )...( 2770 ): >Q9UIG2
FVQKLKGFKASR

SEQ ID NO: 24758 - protein, 12 aa, Homo sapiens
  ( 2760 )...( 2771 ): >Q9UIG2
VQKLKGFKASRS

SEQ ID NO: 24759 - protein, 12 aa, Homo sapiens
  ( 2761 )...( 2772 ): >Q9UIG2
QKLKGFKASRSH

SEQ ID NO: 24760 - protein, 12 aa, Homo sapiens
  ( 304 )...( 315 ): >Q8WWU3
HQEGKRLRRVAC

SEQ ID NO: 24761 - protein, 12 aa, Homo sapiens
  ( 305 )...( 316 ): >Q8WWU3
QEGKRLRRVACT

SEQ ID NO: 24762 - protein, 12 aa, Homo sapiens
  ( 306 )...( 317 ): >Q8WWU3
EGKRLRRVACTC

SEQ ID NO: 24763 - protein, 12 aa, Homo sapiens
  ( 307 )...( 318 ): >Q8WWU3
GKRLRRVACTCP

SEQ ID NO: 24764 - protein, 12 aa, Homo sapiens
  ( 325 )...( 336 ): >Q8WWU3
GRGTNLGKKKQH

SEQ ID NO: 24765 - protein, 12 aa, Homo sapiens
  ( 326 )...( 337 ): >Q8WWU3
RGTNLGKKKQHI

SEQ ID NO: 24766 - protein, 12 aa, Homo sapiens
  ( 387 )...( 398 ): >Q8WWU3
RRTHTGEKKFVC

SEQ ID NO: 24767 - protein, 12 aa, Homo sapiens
  ( 287 )...( 298 ): >Q8WWU2
HQEGKRLRRVAC

SEQ ID NO: 24768 - protein, 12 aa, Homo sapiens
  ( 288 )...( 299 ): >Q8WWU2
QEGKRLRRVACT

SEQ ID NO: 24769 - protein, 12 aa, Homo sapiens
  ( 289 )...( 300 ): >Q8WWU2
EGKRLRRVACTC

SEQ ID NO: 24770 - protein, 12 aa, Homo sapiens
  ( 290 )...( 301 ): >Q8WWU2
GKRLRRVACTCP

SEQ ID NO: 24771 - protein, 12 aa, Homo sapiens
  ( 308 )...( 319 ): >Q8WWU2
GRGTNLGKKKQH

SEQ ID NO: 24772 - protein, 12 aa, Homo sapiens
  ( 309 )...( 320 ): >Q8WWU2
RGTNLGKKKQHI

SEQ ID NO: 24773 - protein, 12 aa, Homo sapiens
  ( 370 )...( 381 ): >Q8WWU2
RRTHTGEKKFVC

SEQ ID NO: 24774 - protein, 12 aa, Homo sapiens
  ( 92 )...( 103 ): >Q9H323
PPNTSVKGAQRR

SEQ ID NO: 24775 - protein, 12 aa, Homo sapiens
  ( 93 )...( 104 ): >Q9H323
PNTSVKGAQRRR

SEQ ID NO: 24776 - protein, 12 aa, Homo sapiens
  ( 94 )...( 105 ): >Q9H323
NTSVKGAQRRRS

SEQ ID NO: 24777 - protein, 12 aa, Homo sapiens
  ( 95 )...( 106 ): >Q9H323
TSVKGAQRRRSP

SEQ ID NO: 24778 - protein, 12 aa, Homo sapiens
  ( 96 )...( 107 ): >Q9H323
SVKGAQRRRSPS

SEQ ID NO: 24779 - protein, 12 aa, Homo sapiens
  ( 97 )...( 108 ): >Q9H323
VKGAQRRRSPSA

SEQ ID NO: 24780 - protein, 12 aa, Homo sapiens
  ( 98 )...( 109 ): >Q9H323
KGAQRRRSPSAL

SEQ ID NO: 24781 - protein, 12 aa, Homo sapiens
  ( 99 )...( 110 ): >Q9H323
GAQRRRSPSALA

SEQ ID NO: 24782 - protein, 12 aa, Homo sapiens
  ( 100 )...( 111 ): >Q9H323
AQRRRSPSALAI

SEQ ID NO: 24783 - protein, 12 aa, Homo sapiens
  ( 232 )...( 243 ): >Q9H323
FIRMKSTLTKRG

SEQ ID NO: 24784 - protein, 12 aa, Homo sapiens
  ( 233 )...( 244 ): >Q9H323
IRMKSTLTKRGV

SEQ ID NO: 24785 - protein, 12 aa, Homo sapiens
  ( 234 )...( 245 ): >Q9H323
RMKSTLTKRGVH

SEQ ID NO: 24786 - protein, 12 aa, Homo sapiens
  ( 236 )...( 247 ): >Q9H323
KSTLTKRGVHIK

SEQ ID NO: 24787 - protein, 12 aa, Homo sapiens
  ( 241 )...( 252 ): >Q9H323
KRGVHIKSSGYK

SEQ ID NO: 24788 - protein, 12 aa, Homo sapiens
  ( 250 )...( 261 ): >Q9H323
GYKVIHITGRLR

SEQ ID NO: 24789 - protein, 12 aa, Homo sapiens
  ( 251 )...( 262 ): >Q9H323
YKVIHITGRLRL

SEQ ID NO: 24790 - protein, 12 aa, Homo sapiens
  ( 252 )...( 263 ): >Q9H323
KVIHITGRLRLR

SEQ ID NO: 24791 - protein, 12 aa, Homo sapiens
  ( 253 )...( 264 ): >Q9H323
VIHITGRLRLRV

SEQ ID NO: 24792 - protein, 12 aa, Homo sapiens
  ( 254 )...( 265 ): >Q9H323
IHITGRLRLRVS

SEQ ID NO: 24793 - protein, 12 aa, Homo sapiens
  ( 255 )...( 266 ): >Q9H323
HITGRLRLRVSL

SEQ ID NO: 24794 - protein, 12 aa, Homo sapiens
  ( 256 )...( 267 ): >Q9H323
ITGRLRLRVSLS

SEQ ID NO: 24795 - protein, 12 aa, Homo sapiens
  ( 257 )...( 268 ): >Q9H323
TGRLRLRVSLSH

SEQ ID NO: 24796 - protein, 12 aa, Homo sapiens
  ( 258 )...( 269 ): >Q9H323
GRLRLRVSLSHG

SEQ ID NO: 24797 - protein, 12 aa, Homo sapiens
  ( 259 )...( 270 ): >Q9H323
RLRLRVSLSHGR

SEQ ID NO: 24798 - protein, 12 aa, Homo sapiens
  ( 260 )...( 271 ): >Q9H323
LRLRVSLSHGRT

SEQ ID NO: 24799 - protein, 12 aa, Homo sapiens
  ( 261 )...( 272 ): >Q9H323
RLRVSLSHGRTV

SEQ ID NO: 24800 - protein, 12 aa, Homo sapiens
  ( 354 )...( 365 ): >Q9H323
LNKGQCVTKYYR

SEQ ID NO: 24801 - protein, 12 aa, Homo sapiens
  ( 575 )...( 586 ): >Q9H323
QKGGSASRRRLS

SEQ ID NO: 24802 - protein, 12 aa, Homo sapiens
  ( 576 )...( 587 ): >Q9H323
KGGSASRRRLSS

SEQ ID NO: 24803 - protein, 12 aa, Homo sapiens
  ( 114 )...( 125 ): >Q8N2W9
KYLNGLGRLPAK

SEQ ID NO: 24804 - protein, 12 aa, Homo sapiens
  ( 117 )...( 128 ): >Q8N2W9
NGLGRLPAKTLK

SEQ ID NO: 24805 - protein, 12 aa, Homo sapiens
  ( 118 )...( 129 ): >Q8N2W9
GLGRLPAKTLKP

SEQ ID NO: 24806 - protein, 12 aa, Homo sapiens
  ( 121 )...( 132 ): >Q8N2W9
RLPAKTLKPEVR

SEQ ID NO: 24807 - protein, 12 aa, Homo sapiens
  ( 124 )...( 135 ): >Q8N2W9
AKTLKPEVRLVK

SEQ ID NO: 24808 - protein, 12 aa, Homo sapiens
  ( 125 )...( 136 ): >Q8N2W9
KTLKPEVRLVKL

SEQ ID NO: 24809 - protein, 12 aa, Homo sapiens
  ( 284 )...( 295 ): >Q8N2W9
LLQRLKTIGVKH

SEQ ID NO: 24810 - protein, 12 aa, Homo sapiens
  ( 285 )...( 296 ): >Q8N2W9
LQRLKTIGVKHP

SEQ ID NO: 24811 - protein, 12 aa, Homo sapiens
  ( 298 )...( 309 ): >Q8N2W9
LCKALVKEKLRL

SEQ ID NO: 24812 - protein, 12 aa, Homo sapiens
  ( 321 )...( 332 ): >Q8N2W9
RVSLICPLVKMR

SEQ ID NO: 24813 - protein, 12 aa, Homo sapiens
  ( 328 )...( 339 ): >Q8N2W9
LVKMRLSVPCRA

SEQ ID NO: 24814 - protein, 12 aa, Homo sapiens
  ( 87 )...( 98 ): >Q9BY83
IVRLSVTYLRLR

SEQ ID NO: 24815 - protein, 12 aa, Homo sapiens
  ( 90 )...( 101 ): >Q9BY83
LSVTYLRLRRFA

SEQ ID NO: 24816 - protein, 12 aa, Homo sapiens
  ( 91 )...( 102 ): >Q9BY83
SVTYLRLRRFAA

SEQ ID NO: 24817 - protein, 12 aa, Homo sapiens
  ( 92 )...( 103 ): >Q9BY83
VTYLRLRRFAAL

SEQ ID NO: 24818 - protein, 12 aa, Homo sapiens
  ( 93 )...( 104 ): >Q9BY83
TYLRLRRFAALG

SEQ ID NO: 24819 - protein, 12 aa, Homo sapiens
  ( 94 )...( 105 ): >Q9BY83
YLRLRRFAALGA

SEQ ID NO: 24820 - protein, 12 aa, Homo sapiens
  ( 95 )...( 106 ): >Q9BY83
LRLRRFAALGAP

SEQ ID NO: 24821 - protein, 12 aa, Homo sapiens
  ( 245 )...( 256 ): >Q9BY83
RSFFVRMKSTLT

SEQ ID NO: 24822 - protein, 12 aa, Homo sapiens
  ( 248 )...( 259 ): >Q9BY83
FVRMKSTLTKRG

SEQ ID NO: 24823 - protein, 12 aa, Homo sapiens
  ( 249 )...( 260 ): >Q9BY83
VRMKSTLTKRGL

SEQ ID NO: 24824 - protein, 12 aa, Homo sapiens
  ( 250 )...( 261 ): >Q9BY83
RMKSTLTKRGLH

SEQ ID NO: 24825 - protein, 12 aa, Homo sapiens
  ( 252 )...( 263 ): >Q9BY83
KSTLTKRGLHVK

SEQ ID NO: 24826 - protein, 12 aa, Homo sapiens
  ( 257 )...( 268 ): >Q9BY83
KRGLHVKASGYK

SEQ ID NO: 24827 - protein, 12 aa, Homo sapiens
  ( 258 )...( 269 ): >Q9BY83
RGLHVKASGYKV

SEQ ID NO: 24828 - protein, 12 aa, Homo sapiens
  ( 266 )...( 277 ): >Q9BY83
GYKVIHVTGRLR

SEQ ID NO: 24829 - protein, 12 aa, Homo sapiens
  ( 267 )...( 278 ): >Q9BY83
YKVIHVTGRLRA

SEQ ID NO: 24830 - protein, 12 aa, Homo sapiens
  ( 268 )...( 279 ): >Q9BY83
KVIHVTGRLRAH

SEQ ID NO: 24831 - protein, 12 aa, Homo sapiens
  ( 459 )...( 470 ): >Q9BY83
QGKRIKVEPGPR

SEQ ID NO: 24832 - protein, 12 aa, Homo sapiens
  ( 41 )...( 52 ): >Q9UBP5
TTTSQIMARKKR

SEQ ID NO: 24833 - protein, 12 aa, Homo sapiens
  ( 46 )...( 57 ): >Q9UBP5
IMARKKRRGIIE

SEQ ID NO: 24834 - protein, 12 aa, Homo sapiens
  ( 61 )...( 72 ): >O00150
SVKPDKCKILKK

SEQ ID NO: 24835 - protein, 12 aa, Homo sapiens
  ( 62 )...( 73 ): >O00150
VKPDKCKILKKT

SEQ ID NO: 24836 - protein, 12 aa, Homo sapiens
  ( 63 )...( 74 ): >O00150
KPDKCKILKKTV

SEQ ID NO: 24837 - protein, 12 aa, Homo sapiens
  ( 71 )...( 82 ): >O00150
KKTVDQIQLMKR

SEQ ID NO: 24838 - protein, 12 aa, Homo sapiens
  ( 243 )...( 254 ): >O00150
LICIARRLPRPP

SEQ ID NO: 24839 - protein, 12 aa, Homo sapiens
  ( 246 )...( 257 ): >O00150
IARRLPRPPAIT

SEQ ID NO: 24840 - protein, 12 aa, Homo sapiens
  ( 247 )...( 258 ): >O00150
ARRLPRPPAITG

SEQ ID NO: 24841 - protein, 12 aa, Homo sapiens
  ( 248 )...( 259 ): >O00150
RRLPRPPAITGV

SEQ ID NO: 24842 - protein, 12 aa, Homo sapiens
  ( 489 )...( 500 ): >O00150
PRRQVTSGLATR

SEQ ID NO: 24843 - protein, 12 aa, Homo sapiens
  ( 490 )...( 501 ): >O00150
RRQVTSGLATRP

SEQ ID NO: 24844 - protein, 12 aa, Homo sapiens
  ( 491 )...( 502 ): >O00150
RQVTSGLATRPR

SEQ ID NO: 24845 - protein, 12 aa, Homo sapiens
  ( 683 )...( 694 ): >O00150
LTARHKILHRLL

SEQ ID NO: 24846 - protein, 12 aa, Homo sapiens
  ( 856 )...( 867 ): >O00150
SATARPTSRLNR

SEQ ID NO: 24847 - protein, 12 aa, Homo sapiens
  ( 857 )...( 868 ): >O00150
ATARPTSRLNRL

SEQ ID NO: 24848 - protein, 12 aa, Homo sapiens
  ( 858 )...( 869 ): >O00150
TARPTSRLNRLP

SEQ ID NO: 24849 - protein, 12 aa, Homo sapiens
  ( 21 )...( 32 ): >Q15170
RGLRWSTLPKSS

SEQ ID NO: 24850 - protein, 12 aa, Homo sapiens
  ( 63 )...( 74 ): >Q15170
SRRTPSAGLSRK

SEQ ID NO: 24851 - protein, 12 aa, Homo sapiens
  ( 64 )...( 75 ): >Q15170
RRTPSAGLSRKD

SEQ ID NO: 24852 - protein, 12 aa, Homo sapiens
  ( 142 )...( 153 ): >Q15170
LMIMHWRAKRGG

SEQ ID NO: 24853 - protein, 12 aa, Homo sapiens
  ( 68 )...( 79 ): >Q9NP62
NSRILKKSCLGV

SEQ ID NO: 24854 - protein, 12 aa, Homo sapiens
  ( 96 )...( 107 ): >Q9NP62
LRPAICDKARQK

SEQ ID NO: 24855 - protein, 12 aa, Homo sapiens
  ( 160 )...( 171 ): >Q9NP62
KLEAEARRAMKK

SEQ ID NO: 24856 - protein, 12 aa, Homo sapiens
  ( 163 )...( 174 ): >Q9NP62
AEARRAMKKVNT

SEQ ID NO: 24857 - protein, 12 aa, Homo sapiens
  ( 164 )...( 175 ): >Q9NP62
EARRAMKKVNTA

SEQ ID NO: 24858 - protein, 12 aa, Homo sapiens
  ( 165 )...( 176 ): >Q9NP62
ARRAMKKVNTAP

SEQ ID NO: 24859 - protein, 12 aa, Homo sapiens
  ( 166 )...( 177 ): >Q9NP62
RRAMKKVNTAPS

SEQ ID NO: 24860 - protein, 12 aa, Homo sapiens
  ( 16 )...( 27 ): >Q9Y2Y4
RLVQLAARLRPA

SEQ ID NO: 24861 - protein, 12 aa, Homo sapiens
  ( 189 )...( 200 ): >Q9Y2Y4
TRSKEKRLQAPV

SEQ ID NO: 24862 - protein, 12 aa, Homo sapiens
  ( 190 )...( 201 ): >Q9Y2Y4
RSKEKRLQAPVG

SEQ ID NO: 24863 - protein, 12 aa, Homo sapiens
  ( 192 )...( 203 ): >Q9Y2Y4
KEKRLQAPVGQR

SEQ ID NO: 24864 - protein, 12 aa, Homo sapiens
  ( 194 )...( 205 ): >Q9Y2Y4
KRLQAPVGQRGA

SEQ ID NO: 24865 - protein, 12 aa, Homo sapiens
  ( 4 )...( 15 ): >Q9UKY1
RRKSTTPCMVLA

SEQ ID NO: 24866 - protein, 12 aa, Homo sapiens
  ( 132 )...( 143 ): >Q9UKY1
KLTMVKRNNQTI

SEQ ID NO: 24867 - protein, 12 aa, Homo sapiens
  ( 179 )...( 190 ): >Q9UKY1
SKTPIMKMMKNK

SEQ ID NO: 24868 - protein, 12 aa, Homo sapiens
  ( 180 )...( 191 ): >Q9UKY1
KTPIMKMMKNKV

SEQ ID NO: 24869 - protein, 12 aa, Homo sapiens
  ( 187 )...( 198 ): >Q9UKY1
MKNKVENKRIAV

SEQ ID NO: 24870 - protein, 12 aa, Homo sapiens
  ( 351 )...( 362 ): >Q9UKY1
ARRKQFNGTVHT

SEQ ID NO: 24871 - protein, 12 aa, Homo sapiens
  ( 352 )...( 363 ): >Q9UKY1
RRKQFNGTVHTV

SEQ ID NO: 24872 - protein, 12 aa, Homo sapiens
  ( 462 )...( 473 ): >Q9UKY1
PDSFGIRAKKTK

SEQ ID NO: 24873 - protein, 12 aa, Homo sapiens
  ( 464 )...( 475 ): >Q9UKY1
SFGIRAKKTKEQ

SEQ ID NO: 24874 - protein, 12 aa, Homo sapiens
  ( 465 )...( 476 ): >Q9UKY1
FGIRAKKTKEQL

SEQ ID NO: 24875 - protein, 12 aa, Homo sapiens
  ( 466 )...( 477 ): >Q9UKY1
GIRAKKTKEQLA

SEQ ID NO: 24876 - protein, 12 aa, Homo sapiens
  ( 494 )...( 505 ): >Q9UKY1
IIRLMKITGLTK

SEQ ID NO: 24877 - protein, 12 aa, Homo sapiens
  ( 598 )...( 609 ): >Q9UKY1
LNRLRAQTKLTR

SEQ ID NO: 24878 - protein, 12 aa, Homo sapiens
  ( 601 )...( 612 ): >Q9UKY1
LRAQTKLTRREI

SEQ ID NO: 24879 - protein, 12 aa, Homo sapiens
  ( 733 )...( 744 ): >Q9UKY1
SMNGLSSLRKRG

SEQ ID NO: 24880 - protein, 12 aa, Homo sapiens
  ( 734 )...( 745 ): >Q9UKY1
MNGLSSLRKRGR

SEQ ID NO: 24881 - protein, 12 aa, Homo sapiens
  ( 735 )...( 746 ): >Q9UKY1
NGLSSLRKRGRG

SEQ ID NO: 24882 - protein, 12 aa, Homo sapiens
  ( 771 )...( 782 ): >Q9UKY1
RGPSLIKFKTGT

SEQ ID NO: 24883 - protein, 12 aa, Homo sapiens
  ( 492 )...( 503 ): >Q8IZE0
ASVPNVGAIRRR

SEQ ID NO: 24884 - protein, 12 aa, Homo sapiens
  ( 493 )...( 504 ): >Q8IZE0
SVPNVGAIRRRH

SEQ ID NO: 24885 - protein, 12 aa, Homo sapiens
  ( 494 )...( 505 ): >Q8IZE0
VPNVGAIRRRHS

SEQ ID NO: 24886 - protein, 12 aa, Homo sapiens
  ( 606 )...( 617 ): >Q8IZE0
QKRRSQKITGSP

SEQ ID NO: 24887 - protein, 12 aa, Homo sapiens
  ( 607 )...( 618 ): >Q8IZE0
KRRSQKITGSPT

SEQ ID NO: 24888 - protein, 12 aa, Homo sapiens
  ( 608 )...( 619 ): >Q8IZE0
RRSQKITGSPTL

SEQ ID NO: 24889 - protein, 16 aa, Homo sapiens
  ( 1 )...( 16 ): >ADNP_HUMAN
MFQLPVNNLGSLRKAR

SEQ ID NO: 24890 - protein, 16 aa, Homo sapiens
  ( 2 )...( 17 ): >ADNP_HUMAN
FQLPVNNLGSLRKARK

SEQ ID NO: 24891 - protein, 16 aa, Homo sapiens
  ( 3 )...( 18 ): >ADNP_HUMAN
QLPVNNLGSLRKARKT

SEQ ID NO: 24892 - protein, 16 aa, Homo sapiens
  ( 4 )...( 19 ): >ADNP_HUMAN
LPVNNLGSLRKARKTV

SEQ ID NO: 24893 - protein, 16 aa, Homo sapiens
  ( 5 )...( 20 ): >ADNP_HUMAN
PVNNLGSLRKARKTVK

SEQ ID NO: 24894 - protein, 16 aa, Homo sapiens
  ( 6 )...( 21 ): >ADNP_HUMAN
VNNLGSLRKARKTVKK

SEQ ID NO: 24895 - protein, 16 aa, Homo sapiens
  ( 7 )...( 22 ): >ADNP_HUMAN
NNLGSLRKARKTVKKI

SEQ ID NO: 24896 - protein, 16 aa, Homo sapiens
  ( 8 )...( 23 ): >ADNP_HUMAN
NLGSLRKARKTVKKIL

SEQ ID NO: 24897 - protein, 16 aa, Homo sapiens
  ( 9 )...( 24 ): >ADNP_HUMAN
LGSLRKARKTVKKILS

SEQ ID NO: 24898 - protein, 16 aa, Homo sapiens
  ( 10 )...( 25 ): >ADNP_HUMAN
GSLRKARKTVKKILSD

SEQ ID NO: 24899 - protein, 16 aa, Homo sapiens
  ( 11 )...( 26 ): >ADNP_HUMAN
SLRKARKTVKKILSDI

SEQ ID NO: 24900 - protein, 16 aa, Homo sapiens
  ( 12 )...( 27 ): >ADNP_HUMAN
LRKARKTVKKILSDIG

SEQ ID NO: 24901 - protein, 16 aa, Homo sapiens
  ( 13 )...( 28 ): >ADNP_HUMAN
RKARKTVKKILSDIGL

SEQ ID NO: 24902 - protein, 16 aa, Homo sapiens
  ( 259 )...( 274 ): >ADNP_HUMAN
NVVVPRSKPLMLIAPK

SEQ ID NO: 24903 - protein, 16 aa, Homo sapiens
  ( 296 )...( 311 ): >ADNP_HUMAN
RSLPSQQMVNRLSIPK

SEQ ID NO: 24904 - protein, 16 aa, Homo sapiens
  ( 808 )...( 823 ): >ADNP_HUMAN
RKKCVRDCEKYKPGVL

SEQ ID NO: 24905 - protein, 16 aa, Homo sapiens
  ( 855 )...( 870 ): >ADNP_HUMAN
RVNASKTADKKLNLGK

SEQ ID NO: 24906 - protein, 16 aa, Homo sapiens
  ( 1010 )...( 1025 ): >ADNP_HUMAN
KPAAKKKATMQGDREQ

SEQ ID NO: 24907 - protein, 16 aa, Homo sapiens
  ( 1012 )...( 1027 ): >ADNP_HUMAN
AAKKKATMQGDREQLK

SEQ ID NO: 24908 - protein, 16 aa, Homo sapiens
  ( 1013 )...( 1028 ): >ADNP_HUMAN
AKKKATMQGDREQLKW

SEQ ID NO: 24909 - protein, 16 aa, Homo sapiens
  ( 4 )...( 19 ): >AHR_HUMAN
SSANITYASRKRRKPV

SEQ ID NO: 24910 - protein, 16 aa, Homo sapiens
  ( 8 )...( 23 ): >AHR_HUMAN
ITYASRKRRKPVQKTV

SEQ ID NO: 24911 - protein, 16 aa, Homo sapiens
  ( 14 )...( 29 ): >AHR_HUMAN
KRRKPVQKTVKPIPAE

SEQ ID NO: 24912 - protein, 16 aa, Homo sapiens
  ( 15 )...( 30 ): >AHR_HUMAN
RRKPVQKTVKPIPAEG

SEQ ID NO: 24913 - protein, 16 aa, Homo sapiens
  ( 16 )...( 31 ): >AHR_HUMAN
RKPVQKTVKPIPAEGI

SEQ ID NO: 24914 - protein, 16 aa, Homo sapiens
  ( 63 )...( 78 ): >AHR_HUMAN
KLDKLSVLRLSVSYLR

SEQ ID NO: 24915 - protein, 16 aa, Homo sapiens
  ( 65 )...( 80 ): >AHR_HUMAN
DKLSVLRLSVSYLRAK

SEQ ID NO: 24916 - protein, 16 aa, Homo sapiens
  ( 66 )...( 81 ): >AHR_HUMAN
KLSVLRLSVSYLRAKS

SEQ ID NO: 24917 - protein, 16 aa, Homo sapiens
  ( 67 )...( 82 ): >AHR_HUMAN
LSVLRLSVSYLRAKSF

SEQ ID NO: 24918 - protein, 16 aa, Homo sapiens
  ( 68 )...( 83 ): >AHR_HUMAN
SVLRLSVSYLRAKSFF

SEQ ID NO: 24919 - protein, 16 aa, Homo sapiens
  ( 236 )...( 251 ): >AHR_HUMAN
AMNFQGKLKYLHGQKK

SEQ ID NO: 24920 - protein, 16 aa, Homo sapiens
  ( 238 )...( 253 ): >AHR_HUMAN
NFQGKLKYLHGQKKKG

SEQ ID NO: 24921 - protein, 16 aa, Homo sapiens
  ( 239 )...( 254 ): >AHR_HUMAN
FQGKLKYLHGQKKKGK

SEQ ID NO: 24922 - protein, 16 aa, Homo sapiens
  ( 240 )...( 255 ): >AHR_HUMAN
QGKLKYLHGQKKKGKD

SEQ ID NO: 24923 - protein, 16 aa, Homo sapiens
  ( 241 )...( 256 ): >AHR_HUMAN
GKLKYLHGQKKKGKDG

SEQ ID NO: 24924 - protein, 16 aa, Homo sapiens
  ( 242 )...( 257 ): >AHR_HUMAN
KLKYLHGQKKKGKDGS

SEQ ID NO: 24925 - protein, 16 aa, Homo sapiens
  ( 243 )...( 258 ): >AHR_HUMAN
LKYLHGQKKKGKDGSI

SEQ ID NO: 24926 - protein, 16 aa, Homo sapiens
  ( 244 )...( 259 ): >AHR_HUMAN
KYLHGQKKKGKDGSIL

SEQ ID NO: 24927 - protein, 16 aa, Homo sapiens
  ( 346 )...( 361 ): >AHR_HUMAN
SGMIVFRLLTKNNRWT

SEQ ID NO: 24928 - protein, 16 aa, Homo sapiens
  ( 395 )...( 410 ): >AHR_HUMAN
LRKRNTKLPFMFTTGE

SEQ ID NO: 24929 - protein, 16 aa, Homo sapiens
  ( 396 )...( 411 ): >AHR_HUMAN
RKRNTKLPFMFTTGEA

SEQ ID NO: 24930 - protein, 16 aa, Homo sapiens
  ( 252 )...( 267 ): >AIOL_HUMAN
RALVLDRLASNVAKRK

SEQ ID NO: 24931 - protein, 16 aa, Homo sapiens
  ( 253 )...( 268 ): >AIOL_HUMAN
ALVLDRLASNVAKRKS

SEQ ID NO: 24932 - protein, 16 aa, Homo sapiens
  ( 254 )...( 269 ): >AIOL_HUMAN
LVLDRLASNVAKRKSS

SEQ ID NO: 24933 - protein, 16 aa, Homo sapiens
  ( 255 )...( 270 ): >AIOL_HUMAN
VLDRLASNVAKRKSSM

SEQ ID NO: 24934 - protein, 16 aa, Homo sapiens
  ( 258 )...( 273 ): >AIOL_HUMAN
RLASNVAKRKSSMPQK

SEQ ID NO: 24935 - protein, 16 aa, Homo sapiens
  ( 263 )...( 278 ): >AIOL_HUMAN
VAKRKSSMPQKFIGEK

SEQ ID NO: 24936 - protein, 16 aa, Homo sapiens
  ( 408 )...( 423 ): >AIOL_HUMAN
LSRARNGMPLLKEVPR

SEQ ID NO: 24937 - protein, 16 aa, Homo sapiens
  ( 409 )...( 424 ): >AIOL_HUMAN
SRARNGMPLLKEVPRS

SEQ ID NO: 24938 - protein, 16 aa, Homo sapiens
  ( 386 )...( 401 ): >ALX4_HUMAN
PDRKTSSIAALRMKAK

SEQ ID NO: 24939 - protein, 16 aa, Homo sapiens
  ( 387 )...( 402 ): >ALX4_HUMAN
DRKTSSIAALRMKAKE

SEQ ID NO: 24940 - protein, 16 aa, Homo sapiens
  ( 388 )...( 403 ): >ALX4_HUMAN
RKTSSIAALRMKAKEH

SEQ ID NO: 24941 - protein, 16 aa, Homo sapiens
  ( 263 )...( 278 ): >AP1_HUMAN
RIAASKCRKRKLERIA

SEQ ID NO: 24942 - protein, 16 aa, Homo sapiens
  ( 264 )...( 279 ): >AP1_HUMAN
IAASKCRKRKLERIAR

SEQ ID NO: 24943 - protein, 16 aa, Homo sapiens
  ( 265 )...( 280 ): >AP1_HUMAN
AASKCRKRKLERIARL

SEQ ID NO: 24944 - protein, 16 aa, Homo sapiens
  ( 272 )...( 287 ): >AP1_HUMAN
RKLERIARLEEKVKTL

SEQ ID NO: 24945 - protein, 16 aa, Homo sapiens
  ( 273 )...( 288 ): >AP1_HUMAN
KLERIARLEEKVKTLK

SEQ ID NO: 24946 - protein, 16 aa, Homo sapiens
  ( 276 )...( 291 ): >AP1_HUMAN
RIARLEEKVKTLKAQN

SEQ ID NO: 24947 - protein, 16 aa, Homo sapiens
  ( 223 )...( 238 ): >AP2A_HUMAN
STSKYKVTVAEVQRRL

SEQ ID NO: 24948 - protein, 16 aa, Homo sapiens
  ( 224 )...( 239 ): >AP2A_HUMAN
TSKYKVTVAEVQRRLS

SEQ ID NO: 24949 - protein, 16 aa, Homo sapiens
  ( 225 )...( 240 ): >AP2A_HUMAN
SKYKVTVAEVQRRLSP

SEQ ID NO: 24950 - protein, 16 aa, Homo sapiens
  ( 226 )...( 241 ): >AP2A_HUMAN
KYKVTVAEVQRRLSPP

SEQ ID NO: 24951 - protein, 16 aa, Homo sapiens
  ( 244 )...( 259 ): >AP2A_HUMAN
LNASLLGGVLRRAKSK

SEQ ID NO: 24952 - protein, 16 aa, Homo sapiens
  ( 245 )...( 260 ): >AP2A_HUMAN
NASLLGGVLRRAKSKN

SEQ ID NO: 24953 - protein, 16 aa, Homo sapiens
  ( 248 )...( 263 ): >AP2A_HUMAN
LLGGVLRRAKSKNGGR

SEQ ID NO: 24954 - protein, 16 aa, Homo sapiens
  ( 251 )...( 266 ): >AP2A_HUMAN
GVLRRAKSKNGGRSLR

SEQ ID NO: 24955 - protein, 16 aa, Homo sapiens
  ( 252 )...( 267 ): >AP2A_HUMAN
VLRRAKSKNGGRSLRE

SEQ ID NO: 24956 - protein, 16 aa, Homo sapiens
  ( 253 )...( 268 ): >AP2A_HUMAN
LRRAKSKNGGRSLREK

SEQ ID NO: 24957 - protein, 16 aa, Homo sapiens
  ( 254 )...( 269 ): >AP2A_HUMAN
RRAKSKNGGRSLREKL

SEQ ID NO: 24958 - protein, 16 aa, Homo sapiens
  ( 255 )...( 270 ): >AP2A_HUMAN
RAKSKNGGRSLREKLD

SEQ ID NO: 24959 - protein, 16 aa, Homo sapiens
  ( 256 )...( 271 ): >AP2A_HUMAN
AKSKNGGRSLREKLDK

SEQ ID NO: 24960 - protein, 16 aa, Homo sapiens
  ( 257 )...( 272 ): >AP2A_HUMAN
KSKNGGRSLREKLDKI

SEQ ID NO: 24961 - protein, 16 aa, Homo sapiens
  ( 258 )...( 273 ): >AP2A_HUMAN
SKNGGRSLREKLDKIG

SEQ ID NO: 24962 - protein, 16 aa, Homo sapiens
  ( 259 )...( 274 ): >AP2A_HUMAN
KNGGRSLREKLDKIGL

SEQ ID NO: 24963 - protein, 16 aa, Homo sapiens
  ( 266 )...( 281 ): >AP2A_HUMAN
REKLDKIGLNLPAGRR

SEQ ID NO: 24964 - protein, 16 aa, Homo sapiens
  ( 267 )...( 282 ): >AP2A_HUMAN
EKLDKIGLNLPAGRRK

SEQ ID NO: 24965 - protein, 16 aa, Homo sapiens
  ( 268 )...( 283 ): >AP2A_HUMAN
KLDKIGLNLPAGRRKA

SEQ ID NO: 24966 - protein, 16 aa, Homo sapiens
  ( 269 )...( 284 ): >AP2A_HUMAN
LDKIGLNLPAGRRKAA

SEQ ID NO: 24967 - protein, 16 aa, Homo sapiens
  ( 271 )...( 286 ): >AP2A_HUMAN
KIGLNLPAGRRKAANV

SEQ ID NO: 24968 - protein, 16 aa, Homo sapiens
  ( 274 )...( 289 ): >AP2A_HUMAN
LNLPAGRRKAANVTLL

SEQ ID NO: 24969 - protein, 16 aa, Homo sapiens
  ( 275 )...( 290 ): >AP2A_HUMAN
NLPAGRRKAANVTLLT

SEQ ID NO: 24970 - protein, 16 aa, Homo sapiens
  ( 276 )...( 291 ): >AP2A_HUMAN
LPAGRRKAANVTLLTS

SEQ ID NO: 24971 - protein, 16 aa, Homo sapiens
  ( 277 )...( 292 ): >AP2A_HUMAN
PAGRRKAANVTLLTSL

SEQ ID NO: 24972 - protein, 16 aa, Homo sapiens
  ( 331 )...( 346 ): >AP2A_HUMAN
QVTRKNMLLATKQICK

SEQ ID NO: 24973 - protein, 16 aa, Homo sapiens
  ( 332 )...( 347 ): >AP2A_HUMAN
VTRKNMLLATKQICKE

SEQ ID NO: 24974 - protein, 16 aa, Homo sapiens
  ( 333 )...( 348 ): >AP2A_HUMAN
TRKNMLLATKQICKEF

SEQ ID NO: 24975 - protein, 16 aa, Homo sapiens
  ( 334 )...( 349 ): >AP2A_HUMAN
RKNMLLATKQICKEFT

SEQ ID NO: 24976 - protein, 16 aa, Homo sapiens
  ( 21 )...( 36 ): >ARN2_HUMAN
QVRMAGAMPARGGKRR

SEQ ID NO: 24977 - protein, 16 aa, Homo sapiens
  ( 22 )...( 37 ): >ARN2_HUMAN
VRMAGAMPARGGKRRS

SEQ ID NO: 24978 - protein, 16 aa, Homo sapiens
  ( 81 )...( 96 ): >ARN2_HUMAN
TCSALARKPDKLTILR

SEQ ID NO: 24979 - protein, 16 aa, Homo sapiens
  ( 82 )...( 97 ): >ARN2_HUMAN
CSALARKPDKLTILRM

SEQ ID NO: 24980 - protein, 16 aa, Homo sapiens
  ( 83 )...( 98 ): >ARN2_HUMAN
SALARKPDKLTILRMA

SEQ ID NO: 24981 - protein, 16 aa, Homo sapiens
  ( 84 )...( 99 ): >ARN2_HUMAN
ALARKPDKLTILRMAV

SEQ ID NO: 24982 - protein, 16 aa, Homo sapiens
  ( 85 )...( 100 ): >ARN2_HUMAN
LARKPDKLTILRMAVS

SEQ ID NO: 24983 - protein, 16 aa, Homo sapiens
  ( 86 )...( 101 ): >ARN2_HUMAN
ARKPDKLTILRMAVSH

SEQ ID NO: 24984 - protein, 16 aa, Homo sapiens
  ( 87 )...( 102 ): >ARN2_HUMAN
RKPDKLTILRMAVSHM

SEQ ID NO: 24985 - protein, 16 aa, Homo sapiens
  ( 91 )...( 106 ): >ARN2_HUMAN
KLTILRMAVSHMKSMR

SEQ ID NO: 24986 - protein, 16 aa, Homo sapiens
  ( 92 )...( 107 ): >ARN2_HUMAN
LTILRMAVSHMKSMRG

SEQ ID NO: 24987 - protein, 16 aa, Homo sapiens
  ( 94 )...( 109 ): >ARN2_HUMAN
ILRMAVSHMKSMRGTG

SEQ ID NO: 24988 - protein, 16 aa, Homo sapiens
  ( 242 )...( 257 ): >ARN2_HUMAN
LNRITTMRKRFRNGLG

SEQ ID NO: 24989 - protein, 16 aa, Homo sapiens
  ( 244 )...( 259 ): >ARN2_HUMAN
RITTMRKRFRNGLGPV

SEQ ID NO: 24990 - protein, 16 aa, Homo sapiens
  ( 245 )...( 260 ): >ARN2_HUMAN
ITTMRKRFRNGLGPVK

SEQ ID NO: 24991 - protein, 16 aa, Homo sapiens
  ( 246 )...( 261 ): >ARN2_HUMAN
TTMRKRFRNGLGPVKE

SEQ ID NO: 24992 - protein, 16 aa, Homo sapiens
  ( 247 )...( 262 ): >ARN2_HUMAN
TMRKRFRNGLGPVKEG

SEQ ID NO: 24993 - protein, 16 aa, Homo sapiens
  ( 248 )...( 263 ): >ARN2_HUMAN
MRKRFRNGLGPVKEGE

SEQ ID NO: 24994 - protein, 16 aa, Homo sapiens
  ( 249 )...( 264 ): >ARN2_HUMAN
RKRFRNGLGPVKEGEA

SEQ ID NO: 24995 - protein, 16 aa, Homo sapiens
  ( 376 )...( 391 ): >ARN2_HUMAN
QQVVKLKGQVLSVMYR

SEQ ID NO: 24996 - protein, 16 aa, Homo sapiens
  ( 377 )...( 392 ): >ARN2_HUMAN
QVVKLKGQVLSVMYRF

SEQ ID NO: 24997 - protein, 16 aa, Homo sapiens
  ( 378 )...( 393 ): >ARN2_HUMAN
VVKLKGQVLSVMYRFR

SEQ ID NO: 24998 - protein, 16 aa, Homo sapiens
  ( 379 )...( 394 ): >ARN2_HUMAN
VKLKGQVLSVMYRFRT

SEQ ID NO: 24999 - protein, 16 aa, Homo sapiens
  ( 380 )...( 395 ): >ARN2_HUMAN
KLKGQVLSVMYRFRTK

SEQ ID NO: 25000 - protein, 16 aa, Homo sapiens
  ( 381 )...( 396 ): >ARN2_HUMAN
LKGQVLSVMYRFRTKN

SEQ ID NO: 25001 - protein, 16 aa, Homo sapiens
  ( 30 )...( 45 ): >ARNT_HUMAN
IQGGGAIVQRAIKRRP

SEQ ID NO: 25002 - protein, 16 aa, Homo sapiens
  ( 31 )...( 46 ): >ARNT_HUMAN
QGGGAIVQRAIKRRPG

SEQ ID NO: 25003 - protein, 16 aa, Homo sapiens
  ( 33 )...( 48 ): >ARNT_HUMAN
GGAIVQRAIKRRPGLD

SEQ ID NO: 25004 - protein, 16 aa, Homo sapiens
  ( 34 )...( 49 ): >ARNT_HUMAN
GAIVQRAIKRRPGLDF

SEQ ID NO: 25005 - protein, 16 aa, Homo sapiens
  ( 118 )...( 133 ): >ARNT_HUMAN
TCSALARKPDKLTILR

SEQ ID NO: 25006 - protein, 16 aa, Homo sapiens
  ( 119 )...( 134 ): >ARNT_HUMAN
CSALARKPDKLTILRM

SEQ ID NO: 25007 - protein, 16 aa, Homo sapiens
  ( 120 )...( 135 ): >ARNT_HUMAN
SALARKPDKLTILRMA

SEQ ID NO: 25008 - protein, 16 aa, Homo sapiens
  ( 121 )...( 136 ): >ARNT_HUMAN
ALARKPDKLTILRMAV

SEQ ID NO: 25009 - protein, 16 aa, Homo sapiens
  ( 122 )...( 137 ): >ARNT_HUMAN
LARKPDKLTILRMAVS

SEQ ID NO: 25010 - protein, 16 aa, Homo sapiens
  ( 123 )...( 138 ): >ARNT_HUMAN
ARKPDKLTILRMAVSH

SEQ ID NO: 25011 - protein, 16 aa, Homo sapiens
  ( 124 )...( 139 ): >ARNT_HUMAN
RKPDKLTILRMAVSHM

SEQ ID NO: 25012 - protein, 16 aa, Homo sapiens
  ( 128 )...( 143 ): >ARNT_HUMAN
KLTILRMAVSHMKSLR

SEQ ID NO: 25013 - protein, 16 aa, Homo sapiens
  ( 129 )...( 144 ): >ARNT_HUMAN
LTILRMAVSHMKSLRG

SEQ ID NO: 25014 - protein, 16 aa, Homo sapiens
  ( 131 )...( 146 ): >ARNT_HUMAN
ILRMAVSHMKSLRGTG

SEQ ID NO: 25015 - protein, 16 aa, Homo sapiens
  ( 132 )...( 147 ): >ARNT_HUMAN
LRMAVSHMKSLRGTGN

SEQ ID NO: 25016 - protein, 16 aa, Homo sapiens
  ( 277 )...( 292 ): >ARNT_HUMAN
VSVNRLSFVRNRCRNG

SEQ ID NO: 25017 - protein, 16 aa, Homo sapiens
  ( 279 )...( 294 ): >ARNT_HUMAN
VNRLSFVRNRCRNGLG

SEQ ID NO: 25018 - protein, 16 aa, Homo sapiens
  ( 281 )...( 296 ): >ARNT_HUMAN
RLSFVRNRCRNGLGSV

SEQ ID NO: 25019 - protein, 16 aa, Homo sapiens
  ( 282 )...( 297 ): >ARNT_HUMAN
LSFVRNRCRNGLGSVK

SEQ ID NO: 25020 - protein, 16 aa, Homo sapiens
  ( 413 )...( 428 ): >ARNT_HUMAN
QQVVKLKGQVLSVMFR

SEQ ID NO: 25021 - protein, 16 aa, Homo sapiens
  ( 414 )...( 429 ): >ARNT_HUMAN
QVVKLKGQVLSVMFRF

SEQ ID NO: 25022 - protein, 16 aa, Homo sapiens
  ( 415 )...( 430 ): >ARNT_HUMAN
VVKLKGQVLSVMFRFR

SEQ ID NO: 25023 - protein, 16 aa, Homo sapiens
  ( 416 )...( 431 ): >ARNT_HUMAN
VKLKGQVLSVMFRFRS

SEQ ID NO: 25024 - protein, 16 aa, Homo sapiens
  ( 417 )...( 432 ): >ARNT_HUMAN
KLKGQVLSVMFRFRSK

SEQ ID NO: 25025 - protein, 16 aa, Homo sapiens
  ( 418 )...( 433 ): >ARNT_HUMAN
LKGQVLSVMFRFRSKN

SEQ ID NO: 25026 - protein, 16 aa, Homo sapiens
  ( 75 )...( 90 ): >ASH1_HUMAN
SGGGHKSAPKQVKRQR

SEQ ID NO: 25027 - protein, 16 aa, Homo sapiens
  ( 76 )...( 91 ): >ASH1_HUMAN
GGGHKSAPKQVKRQRS

SEQ ID NO: 25028 - protein, 16 aa, Homo sapiens
  ( 77 )...( 92 ): >ASH1_HUMAN
GGHKSAPKQVKRQRSS

SEQ ID NO: 25029 - protein, 16 aa, Homo sapiens
  ( 78 )...( 93 ): >ASH1_HUMAN
GHKSAPKQVKRQRSSS

SEQ ID NO: 25030 - protein, 16 aa, Homo sapiens
  ( 81 )...( 96 ): >ASH1_HUMAN
SAPKQVKRQRSSSPEL

SEQ ID NO: 25031 - protein, 16 aa, Homo sapiens
  ( 82 )...( 97 ): >ASH1_HUMAN
APKQVKRQRSSSPELM

SEQ ID NO: 25032 - protein, 16 aa, Homo sapiens
  ( 126 )...( 141 ): >ASH1_HUMAN
RERNRVKLVNLGFATL

SEQ ID NO: 25033 - protein, 16 aa, Homo sapiens
  ( 127 )...( 142 ): >ASH1_HUMAN
ERNRVKLVNLGFATLR

SEQ ID NO: 25034 - protein, 16 aa, Homo sapiens
  ( 128 )...( 143 ): >ASH1_HUMAN
RNRVKLVNLGFATLRE

SEQ ID NO: 25035 - protein, 16 aa, Homo sapiens
  ( 21 )...( 36 ): >ASH2_HUMAN
AARRRPASPELLRCSR

SEQ ID NO: 25036 - protein, 16 aa, Homo sapiens
  ( 30 )...( 45 ): >ASH2_HUMAN
ELLRCSRRRRPATAET

SEQ ID NO: 25037 - protein, 16 aa, Homo sapiens
  ( 31 )...( 46 ): >ASH2_HUMAN
LLRCSRRRRPATAETG

SEQ ID NO: 25038 - protein, 16 aa, Homo sapiens
  ( 32 )...( 47 ): >ASH2_HUMAN
LRCSRRRRPATAETGG

SEQ ID NO: 25039 - protein, 16 aa, Homo sapiens
  ( 33 )...( 48 ): >ASH2_HUMAN
RCSRRRRPATAETGGG

SEQ ID NO: 25040 - protein, 16 aa, Homo sapiens
  ( 48 )...( 63 ): >ASH2_HUMAN
GAAAVARRNERERNRV

SEQ ID NO: 25041 - protein, 16 aa, Homo sapiens
  ( 58 )...( 73 ): >ASH2_HUMAN
RERNRVKLVNLGFQAL

SEQ ID NO: 25042 - protein, 16 aa, Homo sapiens
  ( 59 )...( 74 ): >ASH2_HUMAN
ERNRVKLVNLGFQALR

SEQ ID NO: 25043 - protein, 16 aa, Homo sapiens
  ( 60 )...( 75 ): >ASH2_HUMAN
RNRVKLVNLGFQALRQ

SEQ ID NO: 25044 - protein, 16 aa, Homo sapiens
  ( 61 )...( 76 ): >ASH2_HUMAN
NRVKLVNLGFQALRQH

SEQ ID NO: 25045 - protein, 16 aa, Homo sapiens
  ( 62 )...( 77 ): >ASH2_HUMAN
RVKLVNLGFQALRQHV

SEQ ID NO: 25046 - protein, 16 aa, Homo sapiens
  ( 73 )...( 88 ): >ASH2_HUMAN
LRQHVPHGGASKKLSK

SEQ ID NO: 25047 - protein, 16 aa, Homo sapiens
  ( 74 )...( 89 ): >ASH2_HUMAN
RQHVPHGGASKKLSKV

SEQ ID NO: 25048 - protein, 16 aa, Homo sapiens
  ( 112 )...( 127 ): >ASH2_HUMAN
VRNALAGGLRPQAVRP

SEQ ID NO: 25049 - protein, 16 aa, Homo sapiens
  ( 124 )...( 139 ): >ASH3_HUMAN
LEKRLSKVETLRAAIK

SEQ ID NO: 25050 - protein, 16 aa, Homo sapiens
  ( 125 )...( 140 ): >ASH3_HUMAN
EKRLSKVETLRAAIKY

SEQ ID NO: 25051 - protein, 16 aa, Homo sapiens
  ( 126 )...( 141 ): >ASH3_HUMAN
KRLSKVETLRAAIKYI

SEQ ID NO: 25052 - protein, 16 aa, Homo sapiens
  ( 127 )...( 142 ): >ASH3_HUMAN
RLSKVETLRAAIKYIN

SEQ ID NO: 25053 - protein, 16 aa, Homo sapiens
  ( 155 )...( 170 ): >AT6A_HUMAN
TGSRNKTENGLTPKKK

SEQ ID NO: 25054 - protein, 16 aa, Homo sapiens
  ( 156 )...( 171 ): >AT6A_HUMAN
GSRNKTENGLTPKKKI

SEQ ID NO: 25055 - protein, 16 aa, Homo sapiens
  ( 157 )...( 172 ): >AT6A_HUMAN
SRNKTENGLTPKKKIQ

SEQ ID NO: 25056 - protein, 16 aa, Homo sapiens
  ( 158 )...( 173 ): >AT6A_HUMAN
RNKTENGLTPKKKIQV

SEQ ID NO: 25057 - protein, 16 aa, Homo sapiens
  ( 163 )...( 178 ): >AT6A_HUMAN
NGLTPKKKIQVNSKPS

SEQ ID NO: 25058 - protein, 16 aa, Homo sapiens
  ( 164 )...( 179 ): >AT6A_HUMAN
GLTPKKKIQVNSKPSI

SEQ ID NO: 25059 - protein, 16 aa, Homo sapiens
  ( 165 )...( 180 ): >AT6A_HUMAN
LTPKKKIQVNSKPSIQ

SEQ ID NO: 25060 - protein, 16 aa, Homo sapiens
  ( 166 )...( 181 ): >AT6A_HUMAN
TPKKKIQVNSKPSIQP

SEQ ID NO: 25061 - protein, 16 aa, Homo sapiens
  ( 167 )...( 182 ): >AT6A_HUMAN
PKKKIQVNSKPSIQPK

SEQ ID NO: 25062 - protein, 16 aa, Homo sapiens
  ( 168 )...( 183 ): >AT6A_HUMAN
KKKIQVNSKPSIQPKP

SEQ ID NO: 25063 - protein, 16 aa, Homo sapiens
  ( 169 )...( 184 ): >AT6A_HUMAN
KKIQVNSKPSIQPKPL

SEQ ID NO: 25064 - protein, 16 aa, Homo sapiens
  ( 297 )...( 312 ): >AT6A_HUMAN
MRNVGSDIAVLRRQQR

SEQ ID NO: 25065 - protein, 16 aa, Homo sapiens
  ( 298 )...( 313 ): >AT6A_HUMAN
RNVGSDIAVLRRQQRM

SEQ ID NO: 25066 - protein, 16 aa, Homo sapiens
  ( 300 )...( 315 ): >AT6A_HUMAN
VGSDIAVLRRQQRMIK

SEQ ID NO: 25067 - protein, 16 aa, Homo sapiens
  ( 301 )...( 316 ): >AT6A_HUMAN
GSDIAVLRRQQRMIKN

SEQ ID NO: 25068 - protein, 16 aa, Homo sapiens
  ( 319 )...( 334 ): >AT6A_HUMAN
SACQSRKKKKEYMLGL

SEQ ID NO: 25069 - protein, 16 aa, Homo sapiens
  ( 320 )...( 335 ): >AT6A_HUMAN
ACQSRKKKKEYMLGLE

SEQ ID NO: 25070 - protein, 16 aa, Homo sapiens
  ( 321 )...( 336 ): >AT6A_HUMAN
CQSRKKKKEYMLGLEA

SEQ ID NO: 25071 - protein, 16 aa, Homo sapiens
  ( 323 )...( 338 ): >AT6A_HUMAN
SRKKKKEYMLGLEARL

SEQ ID NO: 25072 - protein, 16 aa, Homo sapiens
  ( 325 )...( 340 ): >AT6A_HUMAN
KKKKEYMLGLEARLKA

SEQ ID NO: 25073 - protein, 16 aa, Homo sapiens
  ( 326 )...( 341 ): >AT6A_HUMAN
KKKEYMLGLEARLKAA

SEQ ID NO: 25074 - protein, 16 aa, Homo sapiens
  ( 366 )...( 381 ): >AT6A_HUMAN
NQRLKVPSPKRRVVCV

SEQ ID NO: 25075 - protein, 16 aa, Homo sapiens
  ( 367 )...( 382 ): >AT6A_HUMAN
QRLKVPSPKRRVVCVM

SEQ ID NO: 25076 - protein, 16 aa, Homo sapiens
  ( 368 )...( 383 ): >AT6A_HUMAN
RLKVPSPKRRVVCVMI

SEQ ID NO: 25077 - protein, 16 aa, Homo sapiens
  ( 369 )...( 384 ): >AT6A_HUMAN
LKVPSPKRRVVCVMIV

SEQ ID NO: 25078 - protein, 16 aa, Homo sapiens
  ( 370 )...( 385 ): >AT6A_HUMAN
KVPSPKRRVVCVMIVL

SEQ ID NO: 25079 - protein, 16 aa, Homo sapiens
  ( 371 )...( 386 ): >AT6A_HUMAN
VPSPKRRVVCVMIVLA

SEQ ID NO: 25080 - protein, 16 aa, Homo sapiens
  ( 498 )...( 513 ): >AT6A_HUMAN
RRMTNNQQKTRILQGV

SEQ ID NO: 25081 - protein, 16 aa, Homo sapiens
  ( 499 )...( 514 ): >AT6A_HUMAN
RMTNNQQKTRILQGVV

SEQ ID NO: 25082 - protein, 16 aa, Homo sapiens
  ( 584 )...( 599 ): >AT6A_HUMAN
NKTTRPKMSIVLPAIN

SEQ ID NO: 25083 - protein, 16 aa, Homo sapiens
  ( 585 )...( 600 ): >AT6A_HUMAN
KTTRPKMSIVLPAINI

SEQ ID NO: 25084 - protein, 16 aa, Homo sapiens
  ( 235 )...( 250 ): >AT6B_HUMAN
KALPTRKPPLQPKPVV

SEQ ID NO: 25085 - protein, 16 aa, Homo sapiens
  ( 237 )...( 252 ): >AT6B_HUMAN
LPTRKPPLQPKPVVLT

SEQ ID NO: 25086 - protein, 16 aa, Homo sapiens
  ( 238 )...( 253 ): >AT6B_HUMAN
PTRKPPLQPKPVVLTT

SEQ ID NO: 25087 - protein, 16 aa, Homo sapiens
  ( 239 )...( 254 ): >AT6B_HUMAN
TRKPPLQPKPVVLTTV

SEQ ID NO: 25088 - protein, 16 aa, Homo sapiens
  ( 240 )...( 255 ): >AT6B_HUMAN
RKPPLQPKPVVLTTVP

SEQ ID NO: 25089 - protein, 16 aa, Homo sapiens
  ( 338 )...( 353 ): >AT6B_HUMAN
SACQSRRKKKEYLQGL

SEQ ID NO: 25090 - protein, 16 aa, Homo sapiens
  ( 339 )...( 354 ): >AT6B_HUMAN
ACQSRRKKKEYLQGLE

SEQ ID NO: 25091 - protein, 16 aa, Homo sapiens
  ( 340 )...( 355 ): >AT6B_HUMAN
CQSRRKKKEYLQGLEA

SEQ ID NO: 25092 - protein, 16 aa, Homo sapiens
  ( 344 )...( 359 ): >AT6B_HUMAN
RKKKEYLQGLEARLQA

SEQ ID NO: 25093 - protein, 16 aa, Homo sapiens
  ( 388 )...( 403 ): >AT6B_HUMAN
LKLGSGNRKVVCIMVF

SEQ ID NO: 25094 - protein, 16 aa, Homo sapiens
  ( 389 )...( 404 ): >AT6B_HUMAN
KLGSGNRKVVCIMVFL

SEQ ID NO: 25095 - protein, 16 aa, Homo sapiens
  ( 538 )...( 553 ): >AT6B_HUMAN
QKSQPRKKSPPVKAVP

SEQ ID NO: 25096 - protein, 16 aa, Homo sapiens
  ( 539 )...( 554 ): >AT6B_HUMAN
KSQPRKKSPPVKAVPI

SEQ ID NO: 25097 - protein, 16 aa, Homo sapiens
  ( 653 )...( 668 ): >AT6B_HUMAN
RVIHIKTSTVPPSLRK

SEQ ID NO: 25098 - protein, 16 aa, Homo sapiens
  ( 50 )...( 65 ): >ATF1_HUMAN
SSQKAHGILARRPSYR

SEQ ID NO: 25099 - protein, 16 aa, Homo sapiens
  ( 52 )...( 67 ): >ATF1_HUMAN
QKAHGILARRPSYRKI

SEQ ID NO: 25100 - protein, 16 aa, Homo sapiens
  ( 53 )...( 68 ): >ATF1_HUMAN
KAHGILARRPSYRKIL

SEQ ID NO: 25101 - protein, 16 aa, Homo sapiens
  ( 54 )...( 69 ): >ATF1_HUMAN
AHGILARRPSYRKILK

SEQ ID NO: 25102 - protein, 16 aa, Homo sapiens
  ( 56 )...( 71 ): >ATF1_HUMAN
GILARRPSYRKILKDL

SEQ ID NO: 25103 - protein, 16 aa, Homo sapiens
  ( 65 )...( 80 ): >ATF1_HUMAN
RKILKDLSSEDTRGRK

SEQ ID NO: 25104 - protein, 16 aa, Homo sapiens
  ( 232 )...( 247 ): >ATF1_HUMAN
RKKKEYVKCLENRVAV

SEQ ID NO: 25105 - protein, 16 aa, Homo sapiens
  ( 233 )...( 248 ): >ATF1_HUMAN
KKKEYVKCLENRVAVL

SEQ ID NO: 25106 - protein, 16 aa, Homo sapiens
  ( 96 )...( 111 ): >ATF3_HUMAN
NKIAAAKCRNKKKEKT

SEQ ID NO: 25107 - protein, 16 aa, Homo sapiens
  ( 97 )...( 112 ): >ATF3_HUMAN
KIAAAKCRNKKKEKTE

SEQ ID NO: 25108 - protein, 16 aa, Homo sapiens
  ( 100 )...( 115 ): >ATF3_HUMAN
AAKCRNKKKEKTECLQ

SEQ ID NO: 25109 - protein, 16 aa, Homo sapiens
  ( 146 )...( 161 ): >ATF3_HUMAN
LNLHRPTCIVRAQNGR

SEQ ID NO: 25110 - protein, 16 aa, Homo sapiens
  ( 147 )...( 162 ): >ATF3_HUMAN
NLHRPTCIVRAQNGRT

SEQ ID NO: 25111 - protein, 16 aa, Homo sapiens
  ( 148 )...( 163 ): >ATF3_HUMAN
LHRPTCIVRAQNGRTP

SEQ ID NO: 25112 - protein, 16 aa, Homo sapiens
  ( 267 )...( 282 ): >ATF4_HUMAN
KMVAAKVKGEKLDKKL

SEQ ID NO: 25113 - protein, 16 aa, Homo sapiens
  ( 268 )...( 283 ): >ATF4_HUMAN
MVAAKVKGEKLDKKLK

SEQ ID NO: 25114 - protein, 16 aa, Homo sapiens
  ( 269 )...( 284 ): >ATF4_HUMAN
VAAKVKGEKLDKKLKK

SEQ ID NO: 25115 - protein, 16 aa, Homo sapiens
  ( 270 )...( 285 ): >ATF4_HUMAN
AAKVKGEKLDKKLKKM

SEQ ID NO: 25116 - protein, 16 aa, Homo sapiens
  ( 271 )...( 286 ): >ATF4_HUMAN
AKVKGEKLDKKLKKME

SEQ ID NO: 25117 - protein, 16 aa, Homo sapiens
  ( 272 )...( 287 ): >ATF4_HUMAN
KVKGEKLDKKLKKMEQ

SEQ ID NO: 25118 - protein, 16 aa, Homo sapiens
  ( 277 )...( 292 ): >ATF4_HUMAN
KLDKKLKKMEQNKTAA

SEQ ID NO: 25119 - protein, 16 aa, Homo sapiens
  ( 279 )...( 294 ): >ATF4_HUMAN
DKKLKKMEQNKTAATR

SEQ ID NO: 25120 - protein, 16 aa, Homo sapiens
  ( 290 )...( 305 ): >ATF4_HUMAN
TAATRYRQKKRAEQEA

SEQ ID NO: 25121 - protein, 16 aa, Homo sapiens
  ( 293 )...( 308 ): >ATF4_HUMAN
TRYRQKKRAEQEALTG

SEQ ID NO: 25122 - protein, 16 aa, Homo sapiens
  ( 333 )...( 348 ): >ATF4_HUMAN
YLKDLIEEVRKARGKK

SEQ ID NO: 25123 - protein, 16 aa, Homo sapiens
  ( 334 )...( 349 ): >ATF4_HUMAN
LKDLIEEVRKARGKKR

SEQ ID NO: 25124 - protein, 16 aa, Homo sapiens
  ( 335 )...( 350 ): >ATF4_HUMAN
KDLIEEVRKARGKKRV

SEQ ID NO: 25125 - protein, 16 aa, Homo sapiens
  ( 336 )...( 351 ): >ATF4_HUMAN
DLIEEVRKARGKKRVP

SEQ ID NO: 25126 - protein, 15 aa, Homo sapiens
  ( 337 )...( 352 ): >ATF4_HUMAN
LIEEVRKARGKKRVP

SEQ ID NO: 25127 - protein, 14 aa, Homo sapiens
  ( 338 )...( 353 ): >ATF4_HUMAN
IEEVRKARGKKRVP

SEQ ID NO: 25128 - protein, 13 aa, Homo sapiens
  ( 339 )...( 354 ): >ATF4_HUMAN
EEVRKARGKKRVP

SEQ ID NO: 25129 - protein, 16 aa, Homo sapiens
  ( 117 )...( 132 ): >ATH1_HUMAN
KSPGPVKVREQLCKLK

SEQ ID NO: 25130 - protein, 16 aa, Homo sapiens
  ( 118 )...( 133 ): >ATH1_HUMAN
SPGPVKVREQLCKLKG

SEQ ID NO: 25131 - protein, 16 aa, Homo sapiens
  ( 119 )...( 134 ): >ATH1_HUMAN
PGPVKVREQLCKLKGG

SEQ ID NO: 25132 - protein, 16 aa, Homo sapiens
  ( 121 )...( 136 ): >ATH1_HUMAN
PVKVREQLCKLKGGVV

SEQ ID NO: 25133 - protein, 16 aa, Homo sapiens
  ( 143 )...( 158 ): >ATH1_HUMAN
SRQRAPSSKQVNGVQK

SEQ ID NO: 25134 - protein, 16 aa, Homo sapiens
  ( 144 )...( 159 ): >ATH1_HUMAN
RQRAPSSKQVNGVQKQ

SEQ ID NO: 25135 - protein, 16 aa, Homo sapiens
  ( 145 )...( 160 ): >ATH1_HUMAN
QRAPSSKQVNGVQKQR

SEQ ID NO: 25136 - protein, 16 aa, Homo sapiens
  ( 146 )...( 161 ): >ATH1_HUMAN
RAPSSKQVNGVQKQRR

SEQ ID NO: 25137 - protein, 16 aa, Homo sapiens
  ( 147 )...( 162 ): >ATH1_HUMAN
APSSKQVNGVQKQRRL

SEQ ID NO: 25138 - protein, 16 aa, Homo sapiens
  ( 148 )...( 163 ): >ATH1_HUMAN
PSSKQVNGVQKQRRLA

SEQ ID NO: 25139 - protein, 16 aa, Homo sapiens
  ( 149 )...( 164 ): >ATH1_HUMAN
SSKQVNGVQKQRRLAA

SEQ ID NO: 25140 - protein, 16 aa, Homo sapiens
  ( 150 )...( 165 ): >ATH1_HUMAN
SKQVNGVQKQRRLAAN

SEQ ID NO: 25141 - protein, 16 aa, Homo sapiens
  ( 151 )...( 166 ): >ATH1_HUMAN
KQVNGVQKQRRLAANA

SEQ ID NO: 25142 - protein, 16 aa, Homo sapiens
  ( 152 )...( 167 ): >ATH1_HUMAN
QVNGVQKQRRLAANAR

SEQ ID NO: 25143 - protein, 16 aa, Homo sapiens
  ( 153 )...( 168 ): >ATH1_HUMAN
VNGVQKQRRLAANARE

SEQ ID NO: 25144 - protein, 16 aa, Homo sapiens
  ( 204 )...( 219 ): >BA1A_HUMAN
SAIVKATQISRRKHLF

SEQ ID NO: 25145 - protein, 16 aa, Homo sapiens
  ( 205 )...( 220 ): >BA1A_HUMAN
AIVKATQISRRKHLFS

SEQ ID NO: 25146 - protein, 16 aa, Homo sapiens
  ( 206 )...( 221 ): >BA1A_HUMAN
IVKATQISRRKHLFSR

SEQ ID NO: 25147 - protein, 16 aa, Homo sapiens
  ( 291 )...( 306 ): >BA1A_HUMAN
VANKQTLASYRSKATK

SEQ ID NO: 25148 - protein, 16 aa, Homo sapiens
  ( 297 )...( 312 ): >BA1A_HUMAN
LASYRSKATKERDKLL

SEQ ID NO: 25149 - protein, 16 aa, Homo sapiens
  ( 317 )...( 332 ): >BA1A_HUMAN
MKSLAFEKAKLKREKA

SEQ ID NO: 25150 - protein, 16 aa, Homo sapiens
  ( 324 )...( 339 ): >BA1A_HUMAN
KAKLKREKADALEAKK

SEQ ID NO: 25151 - protein, 16 aa, Homo sapiens
  ( 325 )...( 340 ): >BA1A_HUMAN
AKLKREKADALEAKKK

SEQ ID NO: 25152 - protein, 16 aa, Homo sapiens
  ( 561 )...( 576 ): >BA1A_HUMAN
GADVTSANAKYRYQKR

SEQ ID NO: 25153 - protein, 16 aa, Homo sapiens
  ( 562 )...( 577 ): >BA1A_HUMAN
ADVTSANAKYRYQKRG

SEQ ID NO: 25154 - protein, 16 aa, Homo sapiens
  ( 563 )...( 578 ): >BA1A_HUMAN
DVTSANAKYRYQKRGG

SEQ ID NO: 25155 - protein, 16 aa, Homo sapiens
  ( 564 )...( 579 ): >BA1A_HUMAN
VTSANAKYRYQKRGGF

SEQ ID NO: 25156 - protein, 16 aa, Homo sapiens
  ( 742 )...( 757 ): >BA1A_HUMAN
RGRRGKRGQNGFKEFT

SEQ ID NO: 25157 - protein, 16 aa, Homo sapiens
  ( 743 )...( 758 ): >BA1A_HUMAN
GRRGKRGQNGFKEFTR

SEQ ID NO: 25158 - protein, 16 aa, Homo sapiens
  ( 1138 )...( 1153 ): >BA1A_HUMAN
RSVIWSKSILNARCKI

SEQ ID NO: 25159 - protein, 16 aa, Homo sapiens
  ( 1141 )...( 1156 ): >BA1A_HUMAN
IWSKSILNARCKICRK

SEQ ID NO: 25160 - protein, 16 aa, Homo sapiens
  ( 1143 )...( 1158 ): >BA1A_HUMAN
SKSILNARCKICRKKG

SEQ ID NO: 25161 - protein, 16 aa, Homo sapiens
  ( 1144 )...( 1159 ): >BA1A_HUMAN
KSILNARCKICRKKGD

SEQ ID NO: 25162 - protein, 16 aa, Homo sapiens
  ( 1171 )...( 1186 ): >BA1A_HUMAN
RGHHTYCVRPKLKTVP

SEQ ID NO: 25163 - protein, 16 aa, Homo sapiens
  ( 1257 )...( 1272 ): >BA1A_HUMAN
EVSLPKRGRPQVRLPV

SEQ ID NO: 25164 - protein, 16 aa, Homo sapiens
  ( 1258 )...( 1273 ): >BA1A_HUMAN
VSLPKRGRPQVRLPVK

SEQ ID NO: 25165 - protein, 16 aa, Homo sapiens
  ( 1259 )...( 1274 ): >BA1A_HUMAN
SLPKRGRPQVRLPVKT

SEQ ID NO: 25166 - protein, 16 aa, Homo sapiens
  ( 1264 )...( 1279 ): >BA1A_HUMAN
GRPQVRLPVKTRGKLS

SEQ ID NO: 25167 - protein, 16 aa, Homo sapiens
  ( 1265 )...( 1280 ): >BA1A_HUMAN
RPQVRLPVKTRGKLSS

SEQ ID NO: 25168 - protein, 16 aa, Homo sapiens
  ( 1266 )...( 1281 ): >BA1A_HUMAN
PQVRLPVKTRGKLSSS

SEQ ID NO: 25169 - protein, 16 aa, Homo sapiens
  ( 1267 )...( 1282 ): >BA1A_HUMAN
QVRLPVKTRGKLSSSF

SEQ ID NO: 25170 - protein, 16 aa, Homo sapiens
  ( 1268 )...( 1283 ): >BA1A_HUMAN
VRLPVKTRGKLSSSFS

SEQ ID NO: 25171 - protein, 16 aa, Homo sapiens
  ( 1272 )...( 1287 ): >BA1A_HUMAN
VKTRGKLSSSFSSRGQ

SEQ ID NO: 25172 - protein, 16 aa, Homo sapiens
  ( 1273 )...( 1288 ): >BA1A_HUMAN
KTRGKLSSSFSSRGQQ

SEQ ID NO: 25173 - protein, 16 aa, Homo sapiens
  ( 1301 )...( 1316 ): >BA1A_HUMAN
STPKTTVSSKTGRSLR

SEQ ID NO: 25174 - protein, 16 aa, Homo sapiens
  ( 1302 )...( 1317 ): >BA1A_HUMAN
TPKTTVSSKTGRSLRK

SEQ ID NO: 25175 - protein, 16 aa, Homo sapiens
  ( 1303 )...( 1318 ): >BA1A_HUMAN
PKTTVSSKTGRSLRKI

SEQ ID NO: 25176 - protein, 16 aa, Homo sapiens
  ( 1304 )...( 1319 ): >BA1A_HUMAN
KTTVSSKTGRSLRKIN

SEQ ID NO: 25177 - protein, 16 aa, Homo sapiens
  ( 1305 )...( 1320 ): >BA1A_HUMAN
TTVSSKTGRSLRKINS

SEQ ID NO: 25178 - protein, 16 aa, Homo sapiens
  ( 1306 )...( 1321 ): >BA1A_HUMAN
TVSSKTGRSLRKINSA

SEQ ID NO: 25179 - protein, 16 aa, Homo sapiens
  ( 1307 )...( 1322 ): >BA1A_HUMAN
VSSKTGRSLRKINSAP

SEQ ID NO: 25180 - protein, 16 aa, Homo sapiens
  ( 1310 )...( 1325 ): >BA1A_HUMAN
KTGRSLRKINSAPPTE

SEQ ID NO: 25181 - protein, 16 aa, Homo sapiens
  ( 1312 )...( 1327 ): >BA1A_HUMAN
GRSLRKINSAPPTETK

SEQ ID NO: 25182 - protein, 16 aa, Homo sapiens
  ( 1315 )...( 1330 ): >BA1A_HUMAN
LRKINSAPPTETKSLR

SEQ ID NO: 25183 - protein, 16 aa, Homo sapiens
  ( 1316 )...( 1331 ): >BA1A_HUMAN
RKINSAPPTETKSLRI

SEQ ID NO: 25184 - protein, 16 aa, Homo sapiens
  ( 1322 )...( 1337 ): >BA1A_HUMAN
PPTETKSLRIASRSTR

SEQ ID NO: 25185 - protein, 16 aa, Homo sapiens
  ( 1326 )...( 1341 ): >BA1A_HUMAN
TKSLRIASRSTRHSHG

SEQ ID NO: 25186 - protein, 16 aa, Homo sapiens
  ( 1327 )...( 1342 ): >BA1A_HUMAN
KSLRIASRSTRHSHGP

SEQ ID NO: 25187 - protein, 16 aa, Homo sapiens
  ( 1345 )...( 1360 ): >BA1A_HUMAN
ADVFVELLSPRRKRRG

SEQ ID NO: 25188 - protein, 16 aa, Homo sapiens
  ( 1409 )...( 1424 ): >BA1A_HUMAN
KKRQSPEPSPVTLGRR

SEQ ID NO: 25189 - protein, 16 aa, Homo sapiens
  ( 1410 )...( 1425 ): >BA1A_HUMAN
KRQSPEPSPVTLGRRS

SEQ ID NO: 25190 - protein, 16 aa, Homo sapiens
  ( 1418 )...( 1433 ): >BA1A_HUMAN
PVTLGRRSSGRQGGVH

SEQ ID NO: 25191 - protein, 16 aa, Homo sapiens
  ( 1469 )...( 1484 ): >BA1A_HUMAN
IIKKPIALNIIREKVN

SEQ ID NO: 25192 - protein, 16 aa, Homo sapiens
  ( 1470 )...( 1485 ): >BA1A_HUMAN
IKKPIALNIIREKVNK

SEQ ID NO: 25193 - protein, 16 aa, Homo sapiens
  ( 1471 )...( 1486 ): >BA1A_HUMAN
KKPIALNIIREKVNKC

SEQ ID NO: 25194 - protein, 16 aa, Homo sapiens
  ( 1517 )...( 1532 ): >BA1A_HUMAN
KAGTRLQAFFHIQAQK

SEQ ID NO: 25195 - protein, 16 aa, Homo sapiens
  ( 613 )...( 628 ): >BA2A_HUMAN
EIPSRIQAITGKRGRP

SEQ ID NO: 25196 - protein, 16 aa, Homo sapiens
  ( 614 )...( 629 ): >BA2A_HUMAN
IPSRIQAITGKRGRPR

SEQ ID NO: 25197 - protein, 16 aa, Homo sapiens
  ( 615 )...( 630 ): >BA2A_HUMAN
PSRIQAITGKRGRPRN

SEQ ID NO: 25198 - protein, 16 aa, Homo sapiens
  ( 616 )...( 631 ): >BA2A_HUMAN
SRIQAITGKRGRPRNT

SEQ ID NO: 25199 - protein, 16 aa, Homo sapiens
  ( 617 )...( 632 ): >BA2A_HUMAN
RIQAITGKRGRPRNTE

SEQ ID NO: 25200 - protein, 16 aa, Homo sapiens
  ( 618 )...( 633 ): >BA2A_HUMAN
IQAITGKRGRPRNTEK

SEQ ID NO: 25201 - protein, 16 aa, Homo sapiens
  ( 619 )...( 634 ): >BA2A_HUMAN
QAITGKRGRPRNTEKA

SEQ ID NO: 25202 - protein, 16 aa, Homo sapiens
  ( 620 )...( 635 ): >BA2A_HUMAN
AITGKRGRPRNTEKAK

SEQ ID NO: 25203 - protein, 16 aa, Homo sapiens
  ( 621 )...( 636 ): >BA2A_HUMAN
ITGKRGRPRNTEKAKT

SEQ ID NO: 25204 - protein, 16 aa, Homo sapiens
  ( 625 )...( 640 ): >BA2A_HUMAN
RGRPRNTEKAKTKEVP

SEQ ID NO: 25205 - protein, 16 aa, Homo sapiens
  ( 626 )...( 641 ): >BA2A_HUMAN
GRPRNTEKAKTKEVPK

SEQ ID NO: 25206 - protein, 16 aa, Homo sapiens
  ( 627 )...( 642 ): >BA2A_HUMAN
RPRNTEKAKTKEVPKV

SEQ ID NO: 25207 - protein, 16 aa, Homo sapiens
  ( 628 )...( 643 ): >BA2A_HUMAN
PRNTEKAKTKEVPKVK

SEQ ID NO: 25208 - protein, 16 aa, Homo sapiens
  ( 629 )...( 644 ): >BA2A_HUMAN
RNTEKAKTKEVPKVKR

SEQ ID NO: 25209 - protein, 16 aa, Homo sapiens
  ( 630 )...( 645 ): >BA2A_HUMAN
NTEKAKTKEVPKVKRG

SEQ ID NO: 25210 - protein, 16 aa, Homo sapiens
  ( 631 )...( 646 ): >BA2A_HUMAN
TEKAKTKEVPKVKRGR

SEQ ID NO: 25211 - protein, 16 aa, Homo sapiens
  ( 632 )...( 647 ): >BA2A_HUMAN
EKAKTKEVPKVKRGRG

SEQ ID NO: 25212 - protein, 16 aa, Homo sapiens
  ( 634 )...( 649 ): >BA2A_HUMAN
AKTKEVPKVKRGRGRP

SEQ ID NO: 25213 - protein, 16 aa, Homo sapiens
  ( 635 )...( 650 ): >BA2A_HUMAN
KTKEVPKVKRGRGRPP

SEQ ID NO: 25214 - protein, 16 aa, Homo sapiens
  ( 636 )...( 651 ): >BA2A_HUMAN
TKEVPKVKRGRGRPPK

SEQ ID NO: 25215 - protein, 16 aa, Homo sapiens
  ( 637 )...( 652 ): >BA2A_HUMAN
KEVPKVKRGRGRPPKV

SEQ ID NO: 25216 - protein, 16 aa, Homo sapiens
  ( 638 )...( 653 ): >BA2A_HUMAN
EVPKVKRGRGRPPKVK

SEQ ID NO: 25217 - protein, 16 aa, Homo sapiens
  ( 641 )...( 656 ): >BA2A_HUMAN
KVKRGRGRPPKVKITE

SEQ ID NO: 25218 - protein, 16 aa, Homo sapiens
  ( 642 )...( 657 ): >BA2A_HUMAN
VKRGRGRPPKVKITEL

SEQ ID NO: 25219 - protein, 16 aa, Homo sapiens
  ( 643 )...( 658 ): >BA2A_HUMAN
KRGRGRPPKVKITELL

SEQ ID NO: 25220 - protein, 16 aa, Homo sapiens
  ( 644 )...( 659 ): >BA2A_HUMAN
RGRGRPPKVKITELLN

SEQ ID NO: 25221 - protein, 16 aa, Homo sapiens
  ( 645 )...( 660 ): >BA2A_HUMAN
GRGRPPKVKITELLNK

SEQ ID NO: 25222 - protein, 16 aa, Homo sapiens
  ( 646 )...( 661 ): >BA2A_HUMAN
RGRPPKVKITELLNKT

SEQ ID NO: 25223 - protein, 16 aa, Homo sapiens
  ( 679 )...( 694 ): >BA2A_HUMAN
DKAKIAKSKKKMRQKV

SEQ ID NO: 25224 - protein, 16 aa, Homo sapiens
  ( 683 )...( 698 ): >BA2A_HUMAN
IAKSKKKMRQKVQRGE

SEQ ID NO: 25225 - protein, 16 aa, Homo sapiens
  ( 684 )...( 699 ): >BA2A_HUMAN
AKSKKKMRQKVQRGEC

SEQ ID NO: 25226 - protein, 16 aa, Homo sapiens
  ( 685 )...( 700 ): >BA2A_HUMAN
KSKKKMRQKVQRGECL

SEQ ID NO: 25227 - protein, 16 aa, Homo sapiens
  ( 686 )...( 701 ): >BA2A_HUMAN
SKKKMRQKVQRGECLT

SEQ ID NO: 25228 - protein, 16 aa, Homo sapiens
  ( 687 )...( 702 ): >BA2A_HUMAN
KKKMRQKVQRGECLTT

SEQ ID NO: 25229 - protein, 16 aa, Homo sapiens
  ( 688 )...( 703 ): >BA2A_HUMAN
KKMRQKVQRGECLTTI

SEQ ID NO: 25230 - protein, 16 aa, Homo sapiens
  ( 689 )...( 704 ): >BA2A_HUMAN
KMRQKVQRGECLTTIQ

SEQ ID NO: 25231 - protein, 16 aa, Homo sapiens
  ( 696 )...( 711 ): >BA2A_HUMAN
RGECLTTIQGQARNKR

SEQ ID NO: 25232 - protein, 16 aa, Homo sapiens
  ( 697 )...( 712 ): >BA2A_HUMAN
GECLTTIQGQARNKRK

SEQ ID NO: 25233 - protein, 16 aa, Homo sapiens
  ( 698 )...( 713 ): >BA2A_HUMAN
ECLTTIQGQARNKRKQ

SEQ ID NO: 25234 - protein, 16 aa, Homo sapiens
  ( 699 )...( 714 ): >BA2A_HUMAN
CLTTIQGQARNKRKQE

SEQ ID NO: 25235 - protein, 16 aa, Homo sapiens
  ( 700 )...( 715 ): >BA2A_HUMAN
LTTIQGQARNKRKQET

SEQ ID NO: 25236 - protein, 16 aa, Homo sapiens
  ( 701 )...( 716 ): >BA2A_HUMAN
TTIQGQARNKRKQETK

SEQ ID NO: 25237 - protein, 16 aa, Homo sapiens
  ( 702 )...( 717 ): >BA2A_HUMAN
TIQGQARNKRKQETKS

SEQ ID NO: 25238 - protein, 16 aa, Homo sapiens
  ( 703 )...( 718 ): >BA2A_HUMAN
IQGQARNKRKQETKSL

SEQ ID NO: 25239 - protein, 16 aa, Homo sapiens
  ( 714 )...( 729 ): >BA2A_HUMAN
ETKSLKHKEAKKKSKA

SEQ ID NO: 25240 - protein, 16 aa, Homo sapiens
  ( 715 )...( 730 ): >BA2A_HUMAN
TKSLKHKEAKKKSKAE

SEQ ID NO: 25241 - protein, 16 aa, Homo sapiens
  ( 731 )...( 746 ): >BA2A_HUMAN
KEKGKTKQEKLKEKVK

SEQ ID NO: 25242 - protein, 16 aa, Homo sapiens
  ( 732 )...( 747 ): >BA2A_HUMAN
EKGKTKQEKLKEKVKR

SEQ ID NO: 25243 - protein, 16 aa, Homo sapiens
  ( 733 )...( 748 ): >BA2A_HUMAN
KGKTKQEKLKEKVKRE

SEQ ID NO: 25244 - protein, 16 aa, Homo sapiens
  ( 734 )...( 749 ): >BA2A_HUMAN
GKTKQEKLKEKVKREK

SEQ ID NO: 25245 - protein, 16 aa, Homo sapiens
  ( 764 )...( 779 ): >BA2A_HUMAN
AKPACKADKTLATQRR

SEQ ID NO: 25246 - protein, 16 aa, Homo sapiens
  ( 765 )...( 780 ): >BA2A_HUMAN
KPACKADKTLATQRRL

SEQ ID NO: 25247 - protein, 16 aa, Homo sapiens
  ( 978 )...( 993 ): >BA2A_HUMAN
NKWIVEGRLRRLKTVL

SEQ ID NO: 25248 - protein, 16 aa, Homo sapiens
  ( 979 )...( 994 ): >BA2A_HUMAN
KWIVEGRLRRLKTVLA

SEQ ID NO: 25249 - protein, 16 aa, Homo sapiens
  ( 980 )...( 995 ): >BA2A_HUMAN
WIVEGRLRRLKTVLAK

SEQ ID NO: 25250 - protein, 16 aa, Homo sapiens
  ( 981 )...( 996 ): >BA2A_HUMAN
IVEGRLRRLKTVLAKR

SEQ ID NO: 25251 - protein, 16 aa, Homo sapiens
  ( 982 )...( 997 ): >BA2A_HUMAN
VEGRLRRLKTVLAKRT

SEQ ID NO: 25252 - protein, 16 aa, Homo sapiens
  ( 983 )...( 998 ): >BA2A_HUMAN
EGRLRRLKTVLAKRTG

SEQ ID NO: 25253 - protein, 16 aa, Homo sapiens
  ( 986 )...( 1001 ): >BA2A_HUMAN
LRRLKTVLAKRTGRSE

SEQ ID NO: 25254 - protein, 16 aa, Homo sapiens
  ( 987 )...( 1002 ): >BA2A_HUMAN
RRLKTVLAKRTGRSEV

SEQ ID NO: 25255 - protein, 16 aa, Homo sapiens
  ( 988 )...( 1003 ): >BA2A_HUMAN
RLKTVLAKRTGRSEVE

SEQ ID NO: 25256 - protein, 16 aa, Homo sapiens
  ( 1004 )...( 1019 ): >BA2A_HUMAN
MGRPEECLGRRRSSRI

SEQ ID NO: 25257 - protein, 16 aa, Homo sapiens
  ( 1005 )...( 1020 ): >BA2A_HUMAN
GRPEECLGRRRSSRIM

SEQ ID NO: 25258 - protein, 16 aa, Homo sapiens
  ( 1073 )...( 1088 ): >BA2A_HUMAN
FRKKLLHSSQMLRAVS

SEQ ID NO: 25259 - protein, 16 aa, Homo sapiens
  ( 1074 )...( 1089 ): >BA2A_HUMAN
RKKLLHSSQMLRAVSL

SEQ ID NO: 25260 - protein, 16 aa, Homo sapiens
  ( 1152 )...( 1167 ): >BA2A_HUMAN
NTTASSPARARGRPRK

SEQ ID NO: 25261 - protein, 16 aa, Homo sapiens
  ( 1153 )...( 1168 ): >BA2A_HUMAN
TTASSPARARGRPRKT

SEQ ID NO: 25262 - protein, 16 aa, Homo sapiens
  ( 1154 )...( 1169 ): >BA2A_HUMAN
TASSPARARGRPRKTK

SEQ ID NO: 25263 - protein, 16 aa, Homo sapiens
  ( 1155 )...( 1170 ): >BA2A_HUMAN
ASSPARARGRPRKTKP

SEQ ID NO: 25264 - protein, 16 aa, Homo sapiens
  ( 1156 )...( 1171 ): >BA2A_HUMAN
SSPARARGRPRKTKPG

SEQ ID NO: 25265 - protein, 16 aa, Homo sapiens
  ( 1157 )...( 1172 ): >BA2A_HUMAN
SPARARGRPRKTKPGS

SEQ ID NO: 25266 - protein, 16 aa, Homo sapiens
  ( 1158 )...( 1173 ): >BA2A_HUMAN
PARARGRPRKTKPGSM

SEQ ID NO: 25267 - protein, 16 aa, Homo sapiens
  ( 1159 )...( 1174 ): >BA2A_HUMAN
ARARGRPRKTKPGSMQ

SEQ ID NO: 25268 - protein, 16 aa, Homo sapiens
  ( 1160 )...( 1175 ): >BA2A_HUMAN
RARGRPRKTKPGSMQP

SEQ ID NO: 25269 - protein, 16 aa, Homo sapiens
  ( 1161 )...( 1176 ): >BA2A_HUMAN
ARGRPRKTKPGSMQPR

SEQ ID NO: 25270 - protein, 16 aa, Homo sapiens
  ( 1163 )...( 1178 ): >BA2A_HUMAN
GRPRKTKPGSMQPRHL

SEQ ID NO: 25271 - protein, 16 aa, Homo sapiens
  ( 1367 )...( 1382 ): >BA2A_HUMAN
MPQSPTGLGQPKRRGR

SEQ ID NO: 25272 - protein, 16 aa, Homo sapiens
  ( 1368 )...( 1383 ): >BA2A_HUMAN
PQSPTGLGQPKRRGRP

SEQ ID NO: 25273 - protein, 16 aa, Homo sapiens
  ( 1369 )...( 1384 ): >BA2A_HUMAN
QSPTGLGQPKRRGRPP

SEQ ID NO: 25274 - protein, 16 aa, Homo sapiens
  ( 1371 )...( 1386 ): >BA2A_HUMAN
PTGLGQPKRRGRPPSK

SEQ ID NO: 25275 - protein, 16 aa, Homo sapiens
  ( 1372 )...( 1387 ): >BA2A_HUMAN
TGLGQPKRRGRPPSKF

SEQ ID NO: 25276 - protein, 16 aa, Homo sapiens
  ( 1423 )...( 1438 ): >BA2A_HUMAN
AMLKALHPRGIREKAL

SEQ ID NO: 25277 - protein, 16 aa, Homo sapiens
  ( 1424 )...( 1439 ): >BA2A_HUMAN
MLKALHPRGIREKALH

SEQ ID NO: 25278 - protein, 16 aa, Homo sapiens
  ( 1425 )...( 1440 ): >BA2A_HUMAN
LKALHPRGIREKALHK

SEQ ID NO: 25279 - protein, 16 aa, Homo sapiens
  ( 1536 )...( 1551 ): >BA2A_HUMAN
ITWRGRGREGLAPQRK

SEQ ID NO: 25280 - protein, 16 aa, Homo sapiens
  ( 1537 )...( 1552 ): >BA2A_HUMAN
TWRGRGREGLAPQRKT

SEQ ID NO: 25281 - protein, 16 aa, Homo sapiens
  ( 1538 )...( 1553 ): >BA2A_HUMAN
WRGRGREGLAPQRKTT

SEQ ID NO: 25282 - protein, 16 aa, Homo sapiens
  ( 1539 )...( 1554 ): >BA2A_HUMAN
RGRGREGLAPQRKTTN

SEQ ID NO: 25283 - protein, 16 aa, Homo sapiens
  ( 1540 )...( 1555 ): >BA2A_HUMAN
GRGREGLAPQRKTTNP

SEQ ID NO: 25284 - protein, 16 aa, Homo sapiens
  ( 1541 )...( 1556 ): >BA2A_HUMAN
RGREGLAPQRKTTNPL

SEQ ID NO: 25285 - protein, 16 aa, Homo sapiens
  ( 1614 )...( 1629 ): >BA2A_HUMAN
IRVWRQTLERCRSAAQ

SEQ ID NO: 25286 - protein, 16 aa, Homo sapiens
  ( 1615 )...( 1630 ): >BA2A_HUMAN
RVWRQTLERCRSAAQV

SEQ ID NO: 25287 - protein, 16 aa, Homo sapiens
  ( 1703 )...( 1718 ): >BA2A_HUMAN
GEFTQKPGFPKRGQKR

SEQ ID NO: 25288 - protein, 16 aa, Homo sapiens
  ( 1706 )...( 1721 ): >BA2A_HUMAN
TQKPGFPKRGQKRKSG

SEQ ID NO: 25289 - protein, 16 aa, Homo sapiens
  ( 1708 )...( 1723 ): >BA2A_HUMAN
KPGFPKRGQKRKSGYS

SEQ ID NO: 25290 - protein, 16 aa, Homo sapiens
  ( 1709 )...( 1724 ): >BA2A_HUMAN
PGFPKRGQKRKSGYSL

SEQ ID NO: 25291 - protein, 16 aa, Homo sapiens
  ( 1710 )...( 1725 ): >BA2A_HUMAN
GFPKRGQKRKSGYSLN

SEQ ID NO: 25292 - protein, 16 aa, Homo sapiens
  ( 1725 )...( 1740 ): >BA2A_HUMAN
NFSEGDGRRRRVLLRG

SEQ ID NO: 25293 - protein, 16 aa, Homo sapiens
  ( 1726 )...( 1741 ): >BA2A_HUMAN
FSEGDGRRRRVLLRGR

SEQ ID NO: 25294 - protein, 16 aa, Homo sapiens
  ( 1727 )...( 1742 ): >BA2A_HUMAN
SEGDGRRRRVLLRGRE

SEQ ID NO: 25295 - protein, 16 aa, Homo sapiens
  ( 1728 )...( 1743 ): >BA2A_HUMAN
EGDGRRRRVLLRGRES

SEQ ID NO: 25296 - protein, 16 aa, Homo sapiens
  ( 1729 )...( 1744 ): >BA2A_HUMAN
GDGRRRRVLLRGRESP

SEQ ID NO: 25297 - protein, 16 aa, Homo sapiens
  ( 1730 )...( 1745 ): >BA2A_HUMAN
DGRRRRVLLRGRESPA

SEQ ID NO: 25298 - protein, 16 aa, Homo sapiens
  ( 1733 )...( 1748 ): >BA2A_HUMAN
RRRVLLRGRESPAAGP

SEQ ID NO: 25299 - protein, 16 aa, Homo sapiens
  ( 1734 )...( 1749 ): >BA2A_HUMAN
RRVLLRGRESPAAGPR

SEQ ID NO: 25300 - protein, 16 aa, Homo sapiens
  ( 1735 )...( 1750 ): >BA2A_HUMAN
RVLLRGRESPAAGPRY

SEQ ID NO: 25301 - protein, 16 aa, Homo sapiens
  ( 1793 )...( 1808 ): >BA2A_HUMAN
EPVNPRLVSGYRRIIK

SEQ ID NO: 25302 - protein, 16 aa, Homo sapiens
  ( 1794 )...( 1809 ): >BA2A_HUMAN
PVNPRLVSGYRRIIKN

SEQ ID NO: 25303 - protein, 16 aa, Homo sapiens
  ( 1795 )...( 1810 ): >BA2A_HUMAN
VNPRLVSGYRRIIKNP

SEQ ID NO: 25304 - protein, 16 aa, Homo sapiens
  ( 1 )...( 16 ): >BACH_HUMAN
MKLLARALRLCEFGRQ

SEQ ID NO: 25305 - protein, 16 aa, Homo sapiens
  ( 2 )...( 17 ): >BACH_HUMAN
KLLARALRLCEFGRQA

SEQ ID NO: 25306 - protein, 16 aa, Homo sapiens
  ( 5 )...( 20 ): >BACH_HUMAN
ARALRLCEFGRQASSR

SEQ ID NO: 25307 - protein, 16 aa, Homo sapiens
  ( 7 )...( 22 ): >BACH_HUMAN
ALRLCEFGRQASSRRL

SEQ ID NO: 25308 - protein, 16 aa, Homo sapiens
  ( 8 )...( 23 ): >BACH_HUMAN
LRLCEFGRQASSRRLV

SEQ ID NO: 25309 - protein, 16 aa, Homo sapiens
  ( 9 )...( 24 ): >BACH_HUMAN
RLCEFGRQASSRRLVA

SEQ ID NO: 25310 - protein, 16 aa, Homo sapiens
  ( 18 )...( 33 ): >BACH_HUMAN
SSRRLVAGQGCVGPRR

SEQ ID NO: 25311 - protein, 16 aa, Homo sapiens
  ( 150 )...( 165 ): >BACH_HUMAN
GAKKLTNKATLWYVPL

SEQ ID NO: 25312 - protein, 16 aa, Homo sapiens
  ( 280 )...( 295 ): >BACH_HUMAN
FHDKIRKGCVITISGR

SEQ ID NO: 25313 - protein, 16 aa, Homo sapiens
  ( 281 )...( 296 ): >BACH_HUMAN
HDKIRKGCVITISGRM

SEQ ID NO: 25314 - protein, 16 aa, Homo sapiens
  ( 282 )...( 297 ): >BACH_HUMAN
DKIRKGCVITISGRMT

SEQ ID NO: 25315 - protein, 16 aa, Homo sapiens
  ( 283 )...( 298 ): >BACH_HUMAN
KIRKGCVITISGRMTF

SEQ ID NO: 25316 - protein, 16 aa, Homo sapiens
  ( 285 )...( 300 ): >BACH_HUMAN
RKGCVITISGRMTFTS

SEQ ID NO: 25317 - protein, 16 aa, Homo sapiens
  ( 359 )...( 374 ): >BACH_HUMAN
EEGKGRYLQMKAKRQG

SEQ ID NO: 25318 - protein, 16 aa, Homo sapiens
  ( 360 )...( 375 ): >BACH_HUMAN
EGKGRYLQMKAKRQGH

SEQ ID NO: 25319 - protein, 16 aa, Homo sapiens
  ( 361 )...( 376 ): >BACH_HUMAN
GKGRYLQMKAKRQGHA

SEQ ID NO: 25320 - protein, 16 aa, Homo sapiens
  ( 362 )...( 377 ): >BACH_HUMAN
KGRYLQMKAKRQGHAE

SEQ ID NO: 25321 - protein, 16 aa, Homo sapiens
  ( 363 )...( 378 ): >BACH_HUMAN
GRYLQMKAKRQGHAEP

SEQ ID NO: 25322 - protein, 16 aa, Homo sapiens
  ( 4 )...( 19 ): >BASO_HUMAN
RPPSRGGRGAARARET

SEQ ID NO: 25323 - protein, 16 aa, Homo sapiens
  ( 5 )...( 20 ): >BASO_HUMAN
PPSRGGRGAARARETR

SEQ ID NO: 25324 - protein, 16 aa, Homo sapiens
  ( 24 )...( 39 ): >BASO_HUMAN
RHRSGRRMAEAISCTL

SEQ ID NO: 25325 - protein, 16 aa, Homo sapiens
  ( 106 )...( 121 ): >BASO_HUMAN
VRLKILLDRLFSVLKQ

SEQ ID NO: 25326 - protein, 16 aa, Homo sapiens
  ( 341 )...( 356 ): >BASO_HUMAN
AKVKPERNSLGTKKGR

SEQ ID NO: 25327 - protein, 16 aa, Homo sapiens
  ( 342 )...( 357 ): >BASO_HUMAN
KVKPERNSLGTKKGRV

SEQ ID NO: 25328 - protein, 16 aa, Homo sapiens
  ( 343 )...( 358 ): >BASO_HUMAN
VKPERNSLGTKKGRVF

SEQ ID NO: 25329 - protein, 16 aa, Homo sapiens
  ( 344 )...( 359 ): >BASO_HUMAN
KPERNSLGTKKGRVFC

SEQ ID NO: 25330 - protein, 16 aa, Homo sapiens
  ( 346 )...( 361 ): >BASO_HUMAN
ERNSLGTKKGRVFCTA

SEQ ID NO: 25331 - protein, 16 aa, Homo sapiens
  ( 530 )...( 545 ): >BASO_HUMAN
DALPKKKSRKSSMPIK

SEQ ID NO: 25332 - protein, 16 aa, Homo sapiens
  ( 531 )...( 546 ): >BASO_HUMAN
ALPKKKSRKSSMPIKI

SEQ ID NO: 25333 - protein, 16 aa, Homo sapiens
  ( 532 )...( 547 ): >BASO_HUMAN
LPKKKSRKSSMPIKIE

SEQ ID NO: 25334 - protein, 16 aa, Homo sapiens
  ( 535 )...( 550 ): >BASO_HUMAN
KKSRKSSMPIKIEKEA

SEQ ID NO: 25335 - protein, 16 aa, Homo sapiens
  ( 935 )...( 950 ): >BASO_HUMAN
KTYSNKGTFRAHYKTV

SEQ ID NO: 25336 - protein, 16 aa, Homo sapiens
  ( 940 )...( 955 ): >BASO_HUMAN
KGTFRAHYKTVHLRQL

SEQ ID NO: 25337 - protein, 16 aa, Homo sapiens
  ( 947 )...( 962 ): >BASO_HUMAN
YKTVHLRQLHKCKVPG

SEQ ID NO: 25338 - protein, 16 aa, Homo sapiens
  ( 948 )...( 963 ): >BASO_HUMAN
KTVHLRQLHKCKVPGC

SEQ ID NO: 25339 - protein, 16 aa, Homo sapiens
  ( 265 )...( 280 ): >BHB2_HUMAN
HGRRFTMGERIGAIKQ

SEQ ID NO: 25340 - protein, 16 aa, Homo sapiens
  ( 249 )...( 264 ): >BHB3_HUMAN
RPDREKGKGAGASRVT

SEQ ID NO: 25341 - protein, 16 aa, Homo sapiens
  ( 251 )...( 266 ): >BHB3_HUMAN
DREKGKGAGASRVTIK

SEQ ID NO: 25342 - protein, 16 aa, Homo sapiens
  ( 252 )...( 267 ): >BHB3_HUMAN
REKGKGAGASRVTIKQ

SEQ ID NO: 25343 - protein, 16 aa, Homo sapiens
  ( 58 )...( 73 ): >BMAL_HUMAN
TCNAMSRKLDKLTVLR

SEQ ID NO: 25344 - protein, 16 aa, Homo sapiens
  ( 59 )...( 74 ): >BMAL_HUMAN
CNAMSRKLDKLTVLRM

SEQ ID NO: 25345 - protein, 16 aa, Homo sapiens
  ( 60 )...( 75 ): >BMAL_HUMAN
NAMSRKLDKLTVLRMA

SEQ ID NO: 25346 - protein, 16 aa, Homo sapiens
  ( 61 )...( 76 ): >BMAL_HUMAN
AMSRKLDKLTVLRMAV

SEQ ID NO: 25347 - protein, 16 aa, Homo sapiens
  ( 62 )...( 77 ): >BMAL_HUMAN
MSRKLDKLTVLRMAVQ

SEQ ID NO: 25348 - protein, 16 aa, Homo sapiens
  ( 63 )...( 78 ): >BMAL_HUMAN
SRKLDKLTVLRMAVQH

SEQ ID NO: 25349 - protein, 16 aa, Homo sapiens
  ( 64 )...( 79 ): >BMAL_HUMAN
RKLDKLTVLRMAVQHM

SEQ ID NO: 25350 - protein, 16 aa, Homo sapiens
  ( 68 )...( 83 ): >BMAL_HUMAN
KLTVLRMAVQHMKTLR

SEQ ID NO: 25351 - protein, 16 aa, Homo sapiens
  ( 69 )...( 84 ): >BMAL_HUMAN
LTVLRMAVQHMKTLRG

SEQ ID NO: 25352 - protein, 16 aa, Homo sapiens
  ( 70 )...( 85 ): >BMAL_HUMAN
TVLRMAVQHMKTLRGA

SEQ ID NO: 25353 - protein, 16 aa, Homo sapiens
  ( 71 )...( 86 ): >BMAL_HUMAN
VLRMAVQHMKTLRGAT

SEQ ID NO: 25354 - protein, 16 aa, Homo sapiens
  ( 72 )...( 87 ): >BMAL_HUMAN
LRMAVQHMKTLRGATN

SEQ ID NO: 25355 - protein, 16 aa, Homo sapiens
  ( 73 )...( 88 ): >BMAL_HUMAN
RMAVQHMKTLRGATNP

SEQ ID NO: 25356 - protein, 16 aa, Homo sapiens
  ( 347 )...( 362 ): >BMAL_HUMAN
RQVLQTREKITTNCYK

SEQ ID NO: 25357 - protein, 16 aa, Homo sapiens
  ( 102 )...( 117 ): >BRX1_HUMAN
GPGEPGTKAKKGRRSR

SEQ ID NO: 25358 - protein, 16 aa, Homo sapiens
  ( 103 )...( 118 ): >BRX1_HUMAN
PGEPGTKAKKGRRSRT

SEQ ID NO: 25359 - protein, 16 aa, Homo sapiens
  ( 104 )...( 119 ): >BRX1_HUMAN
GEPGTKAKKGRRSRTV

SEQ ID NO: 25360 - protein, 16 aa, Homo sapiens
  ( 105 )...( 120 ): >BRX1_HUMAN
EPGTKAKKGRRSRTVF

SEQ ID NO: 25361 - protein, 16 aa, Homo sapiens
  ( 106 )...( 121 ): >BRX1_HUMAN
PGTKAKKGRRSRTVFT

SEQ ID NO: 25362 - protein, 16 aa, Homo sapiens
  ( 107 )...( 122 ): >BRX1_HUMAN
GTKAKKGRRSRTVFTE

SEQ ID NO: 25363 - protein, 16 aa, Homo sapiens
  ( 108 )...( 123 ): >BRX1_HUMAN
TKAKKGRRSRTVFTEL

SEQ ID NO: 25364 - protein, 16 aa, Homo sapiens
  ( 109 )...( 124 ): >BRX1_HUMAN
KAKKGRRSRTVFTELQ

SEQ ID NO: 25365 - protein, 16 aa, Homo sapiens
  ( 110 )...( 125 ): >BRX1_HUMAN
AKKGRRSRTVFTELQL

SEQ ID NO: 25366 - protein, 16 aa, Homo sapiens
  ( 111 )...( 126 ): >BRX1_HUMAN
KKGRRSRTVFTELQLM

SEQ ID NO: 25367 - protein, 16 aa, Homo sapiens
  ( 112 )...( 127 ): >BRX1_HUMAN
KGRRSRTVFTELQLMG

SEQ ID NO: 25368 - protein, 16 aa, Homo sapiens
  ( 162 )...( 177 ): >BRX1_HUMAN
QNRRMKWKKIVLQGGG

SEQ ID NO: 25369 - protein, 16 aa, Homo sapiens
  ( 163 )...( 178 ): >BRX1_HUMAN
NRRMKWKKIVLQGGGL

SEQ ID NO: 25370 - protein, 16 aa, Homo sapiens
  ( 164 )...( 179 ): >BRX1_HUMAN
RRMKWKKIVLQGGGLE

SEQ ID NO: 25371 - protein, 16 aa, Homo sapiens
  ( 165 )...( 180 ): >BRX1_HUMAN
RMKWKKIVLQGGGLES

SEQ ID NO: 25372 - protein, 16 aa, Homo sapiens
  ( 107 )...( 122 ): >BRX2_HUMAN
KPRRSRTIFTELQLMG

SEQ ID NO: 25373 - protein, 16 aa, Homo sapiens
  ( 159 )...( 174 ): >BRX2_HUMAN
RRMKWKKMVLKGGQEA

SEQ ID NO: 25374 - protein, 16 aa, Homo sapiens
  ( 160 )...( 175 ): >BRX2_HUMAN
RMKWKKMVLKGGQEAP

SEQ ID NO: 25375 - protein, 16 aa, Homo sapiens
  ( 161 )...( 176 ): >BRX2_HUMAN
MKWKKMVLKGGQEAPT

SEQ ID NO: 25376 - protein, 16 aa, Homo sapiens
  ( 162 )...( 177 ): >BRX2_HUMAN
KWKKMVLKGGQEAPTK

SEQ ID NO: 25377 - protein, 16 aa, Homo sapiens
  ( 163 )...( 178 ): >BRX2_HUMAN
WKKMVLKGGQEAPTKP

SEQ ID NO: 25378 - protein, 16 aa, Homo sapiens
  ( 164 )...( 179 ): >BRX2_HUMAN
KKMVLKGGQEAPTKPK

SEQ ID NO: 25379 - protein, 16 aa, Homo sapiens
  ( 166 )...( 181 ): >BRX2_HUMAN
MVLKGGQEAPTKPKGR

SEQ ID NO: 25380 - protein, 16 aa, Homo sapiens
  ( 167 )...( 182 ): >BRX2_HUMAN
VLKGGQEAPTKPKGRP

SEQ ID NO: 25381 - protein, 16 aa, Homo sapiens
  ( 168 )...( 183 ): >BRX2_HUMAN
LKGGQEAPTKPKGRPK

SEQ ID NO: 25382 - protein, 16 aa, Homo sapiens
  ( 169 )...( 184 ): >BRX2_HUMAN
KGGQEAPTKPKGRPKK

SEQ ID NO: 25383 - protein, 16 aa, Homo sapiens
  ( 172 )...( 187 ): >BRX2_HUMAN
QEAPTKPKGRPKKNSI

SEQ ID NO: 25384 - protein, 16 aa, Homo sapiens
  ( 6 )...( 21 ): >BT31_HUMAN
MNQKLTKRQAEVHTGR

SEQ ID NO: 25385 - protein, 16 aa, Homo sapiens
  ( 7 )...( 22 ): >BT31_HUMAN
NQKLTKRQAEVHTGRK

SEQ ID NO: 25386 - protein, 16 aa, Homo sapiens
  ( 8 )...( 23 ): >BT31_HUMAN
QKLTKRQAEVHTGRKG

SEQ ID NO: 25387 - protein, 16 aa, Homo sapiens
  ( 9 )...( 24 ): >BT31_HUMAN
KLTKRQAEVHTGRKGT

SEQ ID NO: 25388 - protein, 16 aa, Homo sapiens
  ( 12 )...( 27 ): >BT31_HUMAN
KRQAEVHTGRKGTAHR

SEQ ID NO: 25389 - protein, 16 aa, Homo sapiens
  ( 13 )...( 28 ): >BT31_HUMAN
RQAEVHTGRKGTAHRK

SEQ ID NO: 25390 - protein, 16 aa, Homo sapiens
  ( 14 )...( 29 ): >BT31_HUMAN
QAEVHTGRKGTAHRKK

SEQ ID NO: 25391 - protein, 16 aa, Homo sapiens
  ( 15 )...( 30 ): >BT31_HUMAN
AEVHTGRKGTAHRKKV

SEQ ID NO: 25392 - protein, 16 aa, Homo sapiens
  ( 16 )...( 31 ): >BT31_HUMAN
EVHTGRKGTAHRKKVV

SEQ ID NO: 25393 - protein, 16 aa, Homo sapiens
  ( 17 )...( 32 ): >BT31_HUMAN
VHTGRKGTAHRKKVVH

SEQ ID NO: 25394 - protein, 16 aa, Homo sapiens
  ( 18 )...( 33 ): >BT31_HUMAN
HTGRKGTAHRKKVVHT

SEQ ID NO: 25395 - protein, 16 aa, Homo sapiens
  ( 19 )...( 34 ): >BT31_HUMAN
TGRKGTAHRKKVVHTT

SEQ ID NO: 25396 - protein, 16 aa, Homo sapiens
  ( 20 )...( 35 ): >BT31_HUMAN
GRKGTAHRKKVVHTTA

SEQ ID NO: 25397 - protein, 16 aa, Homo sapiens
  ( 21 )...( 36 ): >BT31_HUMAN
RKGTAHRKKVVHTTAE

SEQ ID NO: 25398 - protein, 16 aa, Homo sapiens
  ( 38 )...( 53 ): >BT31_HUMAN
KKFQFSLKKLGVNNIP

SEQ ID NO: 25399 - protein, 16 aa, Homo sapiens
  ( 11 )...( 26 ): >BT32_HUMAN
LAKLQAKVPIGGTAHR

SEQ ID NO: 25400 - protein, 16 aa, Homo sapiens
  ( 12 )...( 27 ): >BT32_HUMAN
AKLQAKVPIGGTAHRK

SEQ ID NO: 25401 - protein, 16 aa, Homo sapiens
  ( 13 )...( 28 ): >BT32_HUMAN
KLQAKVPIGGTAHRKK

SEQ ID NO: 25402 - protein, 16 aa, Homo sapiens
  ( 14 )...( 29 ): >BT32_HUMAN
LQAKVPIGGTAHRKKV

SEQ ID NO: 25403 - protein, 16 aa, Homo sapiens
  ( 15 )...( 30 ): >BT32_HUMAN
QAKVPIGGTAHRKKVV

SEQ ID NO: 25404 - protein, 16 aa, Homo sapiens
  ( 16 )...( 31 ): >BT32_HUMAN
AKVPIGGTAHRKKVVH

SEQ ID NO: 25405 - protein, 16 aa, Homo sapiens
  ( 17 )...( 32 ): >BT32_HUMAN
KVPIGGTAHRKKVVHR

SEQ ID NO: 25406 - protein, 16 aa, Homo sapiens
  ( 18 )...( 33 ): >BT32_HUMAN
VPIGGTAHRKKVVHRT

SEQ ID NO: 25407 - protein, 16 aa, Homo sapiens
  ( 19 )...( 34 ): >BT32_HUMAN
PIGGTAHRKKVVHRTA

SEQ ID NO: 25408 - protein, 16 aa, Homo sapiens
  ( 20 )...( 35 ): >BT32_HUMAN
IGGTAHRKKVVHRTAT

SEQ ID NO: 25409 - protein, 16 aa, Homo sapiens
  ( 21 )...( 36 ): >BT32_HUMAN
GGTAHRKKVVHRTATA

SEQ ID NO: 25410 - protein, 16 aa, Homo sapiens
  ( 22 )...( 37 ): >BT32_HUMAN
GTAHRKKVVHRTATAN

SEQ ID NO: 25411 - protein, 16 aa, Homo sapiens
  ( 24 )...( 39 ): >BT32_HUMAN
AHRKKVVHRTATANDK

SEQ ID NO: 25412 - protein, 16 aa, Homo sapiens
  ( 27 )...( 42 ): >BT32_HUMAN
KKVVHRTATANDKKRQ

SEQ ID NO: 25413 - protein, 16 aa, Homo sapiens
  ( 33 )...( 48 ): >BT32_HUMAN
TATANDKKRQFSLKKL

SEQ ID NO: 25414 - protein, 16 aa, Homo sapiens
  ( 1 )...( 16 ): >BT33_HUMAN
MVLSRGSLLNTRPRIT

SEQ ID NO: 25415 - protein, 16 aa, Homo sapiens
  ( 2 )...( 17 ): >BT33_HUMAN
VLSRGSLLNTRPRITS

SEQ ID NO: 25416 - protein, 16 aa, Homo sapiens
  ( 3 )...( 18 ): >BT33_HUMAN
LSRGSLLNTRPRITSG

SEQ ID NO: 25417 - protein, 16 aa, Homo sapiens
  ( 4 )...( 19 ): >BT33_HUMAN
SRGSLLNTRPRITSGS

SEQ ID NO: 25418 - protein, 16 aa, Homo sapiens
  ( 5 )...( 20 ): >BT33_HUMAN
RGSLLNTRPRITSGSG

SEQ ID NO: 25419 - protein, 16 aa, Homo sapiens
  ( 11 )...( 26 ): >BT33_HUMAN
TRPRITSGSGSTGRPR

SEQ ID NO: 25420 - protein, 16 aa, Homo sapiens
  ( 38 )...( 53 ): >BT33_HUMAN
PGKLAKLQAQVRIGGK

SEQ ID NO: 25421 - protein, 16 aa, Homo sapiens
  ( 43 )...( 58 ): >BT33_HUMAN
KLQAQVRIGGKGTAHR

SEQ ID NO: 25422 - protein, 16 aa, Homo sapiens
  ( 44 )...( 59 ): >BT33_HUMAN
LQAQVRIGGKGTAHRK

SEQ ID NO: 25423 - protein, 16 aa, Homo sapiens
  ( 45 )...( 60 ): >BT33_HUMAN
QAQVRIGGKGTAHRKK

SEQ ID NO: 25424 - protein, 16 aa, Homo sapiens
  ( 46 )...( 61 ): >BT33_HUMAN
AQVRIGGKGTAHRKKK

SEQ ID NO: 25425 - protein, 16 aa, Homo sapiens
  ( 47 )...( 62 ): >BT33_HUMAN
QVRIGGKGTAHRKKKV

SEQ ID NO: 25426 - protein, 16 aa, Homo sapiens
  ( 48 )...( 63 ): >BT33_HUMAN
VRIGGKGTAHRKKKVF

SEQ ID NO: 25427 - protein, 16 aa, Homo sapiens
  ( 49 )...( 64 ): >BT33_HUMAN
RIGGKGTAHRKKKVFH

SEQ ID NO: 25428 - protein, 16 aa, Homo sapiens
  ( 50 )...( 65 ): >BT33_HUMAN
IGGKGTAHRKKKVFHR

SEQ ID NO: 25429 - protein, 16 aa, Homo sapiens
  ( 51 )...( 66 ): >BT33_HUMAN
GGKGTAHRKKKVFHRT

SEQ ID NO: 25430 - protein, 16 aa, Homo sapiens
  ( 52 )...( 67 ): >BT33_HUMAN
GKGTAHRKKKVFHRTA

SEQ ID NO: 25431 - protein, 16 aa, Homo sapiens
  ( 53 )...( 68 ): >BT33_HUMAN
KGTAHRKKKVFHRTAT

SEQ ID NO: 25432 - protein, 16 aa, Homo sapiens
  ( 54 )...( 69 ): >BT33_HUMAN
GTAHRKKKVFHRTATA

SEQ ID NO: 25433 - protein, 16 aa, Homo sapiens
  ( 55 )...( 70 ): >BT33_HUMAN
TAHRKKKVFHRTATAD

SEQ ID NO: 25434 - protein, 16 aa, Homo sapiens
  ( 59 )...( 74 ): >BT33_HUMAN
KKKVFHRTATADDKKL

SEQ ID NO: 25435 - protein, 16 aa, Homo sapiens
  ( 72 )...( 87 ): >BT33_HUMAN
KKLQFSLKKLQVNNIS

SEQ ID NO: 25436 - protein, 16 aa, Homo sapiens
  ( 181 )...( 196 ): >BT33_HUMAN
RILMRLPGMRQAELSR

SEQ ID NO: 25437 - protein, 16 aa, Homo sapiens
  ( 184 )...( 199 ): >BT33_HUMAN
MRLPGMRQAELSRLLK

SEQ ID NO: 25438 - protein, 16 aa, Homo sapiens
  ( 185 )...( 200 ): >BT33_HUMAN
RLPGMRQAELSRLLKK

SEQ ID NO: 25439 - protein, 16 aa, Homo sapiens
  ( 186 )...( 201 ): >BT33_HUMAN
LPGMRQAELSRLLKKI

SEQ ID NO: 25440 - protein, 16 aa, Homo sapiens
  ( 187 )...( 202 ): >BT33_HUMAN
PGMRQAELSRLLKKIK

SEQ ID NO: 25441 - protein, 16 aa, Homo sapiens
  ( 188 )...( 203 ): >BT33_HUMAN
GMRQAELSRLLKKIKL

SEQ ID NO: 25442 - protein, 16 aa, Homo sapiens
  ( 189 )...( 204 ): >BT33_HUMAN
MRQAELSRLLKKIKLE

SEQ ID NO: 25443 - protein, 16 aa, Homo sapiens
  ( 129 )...( 144 ): >BTE1_HUMAN
PGVAAKGKHASEKRHK

SEQ ID NO: 25444 - protein, 16 aa, Homo sapiens
  ( 151 )...( 166 ): >BTE1_HUMAN
GKVYGKSSHLKAHYRV

SEQ ID NO: 25445 - protein, 16 aa, Homo sapiens
  ( 52 )...( 67 ): >BTF3_HUMAN
QEKLAKLQAQVRIGGK

SEQ ID NO: 25446 - protein, 16 aa, Homo sapiens
  ( 53 )...( 68 ): >BTF3_HUMAN
EKLAKLQAQVRIGGKG

SEQ ID NO: 25447 - protein, 16 aa, Homo sapiens
  ( 57 )...( 72 ): >BTF3_HUMAN
KLQAQVRIGGKGTARR

SEQ ID NO: 25448 - protein, 16 aa, Homo sapiens
  ( 58 )...( 73 ): >BTF3_HUMAN
LQAQVRIGGKGTARRK

SEQ ID NO: 25449 - protein, 16 aa, Homo sapiens
  ( 59 )...( 74 ): >BTF3_HUMAN
QAQVRIGGKGTARRKK

SEQ ID NO: 25450 - protein, 16 aa, Homo sapiens
  ( 63 )...( 78 ): >BTF3_HUMAN
RIGGKGTARRKKKVVH

SEQ ID NO: 25451 - protein, 16 aa, Homo sapiens
  ( 64 )...( 79 ): >BTF3_HUMAN
IGGKGTARRKKKVVHR

SEQ ID NO: 25452 - protein, 16 aa, Homo sapiens
  ( 65 )...( 80 ): >BTF3_HUMAN
GGKGTARRKKKVVHRT

SEQ ID NO: 25453 - protein, 16 aa, Homo sapiens
  ( 66 )...( 81 ): >BTF3_HUMAN
GKGTARRKKKVVHRTA

SEQ ID NO: 25454 - protein, 16 aa, Homo sapiens
  ( 67 )...( 82 ): >BTF3_HUMAN
KGTARRKKKVVHRTAT

SEQ ID NO: 25455 - protein, 16 aa, Homo sapiens
  ( 68 )...( 83 ): >BTF3_HUMAN
GTARRKKKVVHRTATA

SEQ ID NO: 25456 - protein, 16 aa, Homo sapiens
  ( 69 )...( 84 ): >BTF3_HUMAN
TARRKKKVVHRTATAD

SEQ ID NO: 25457 - protein, 16 aa, Homo sapiens
  ( 70 )...( 85 ): >BTF3_HUMAN
ARRKKKVVHRTATADD

SEQ ID NO: 25458 - protein, 16 aa, Homo sapiens
  ( 72 )...( 87 ): >BTF3_HUMAN
RKKKVVHRTATADDKK

SEQ ID NO: 25459 - protein, 16 aa, Homo sapiens
  ( 73 )...( 88 ): >BTF3_HUMAN
KKKVVHRTATADDKKL

SEQ ID NO: 25460 - protein, 16 aa, Homo sapiens
  ( 86 )...( 101 ): >BTF3_HUMAN
KKLQFSLKKLGVNNIS

SEQ ID NO: 25461 - protein, 16 aa, Homo sapiens
  ( 273 )...( 288 ): >CAR8_HUMAN
SANLKVMPKELKLSYR

SEQ ID NO: 25462 - protein, 16 aa, Homo sapiens
  ( 274 )...( 289 ): >CAR8_HUMAN
ANLKVMPKELKLSYRS

SEQ ID NO: 25463 - protein, 16 aa, Homo sapiens
  ( 276 )...( 291 ): >CAR8_HUMAN
LKVMPKELKLSYRSPG

SEQ ID NO: 25464 - protein, 16 aa, Homo sapiens
  ( 62 )...( 77 ): >CBFA_HUMAN
ANVARIMKNAIPQTGK

SEQ ID NO: 25465 - protein, 16 aa, Homo sapiens
  ( 63 )...( 78 ): >CBFA_HUMAN
NVARIMKNAIPQTGKI

SEQ ID NO: 25466 - protein, 16 aa, Homo sapiens
  ( 64 )...( 79 ): >CBFA_HUMAN
VARIMKNAIPQTGKIA

SEQ ID NO: 25467 - protein, 16 aa, Homo sapiens
  ( 65 )...( 80 ): >CBFA_HUMAN
ARIMKNAIPQTGKIAK

SEQ ID NO: 25468 - protein, 16 aa, Homo sapiens
  ( 66 )...( 81 ): >CBFA_HUMAN
RIMKNAIPQTGKIAKD

SEQ ID NO: 25469 - protein, 16 aa, Homo sapiens
  ( 135 )...( 150 ): >CBFA_HUMAN
KLYLQKFREAMKGEKG

SEQ ID NO: 25470 - protein, 16 aa, Homo sapiens
  ( 274 )...( 289 ): >CBFB_HUMAN
RILKRRQARAKLEAEG

SEQ ID NO: 25471 - protein, 16 aa, Homo sapiens
  ( 275 )...( 290 ): >CBFB_HUMAN
ILKRRQARAKLEAEGK

SEQ ID NO: 25472 - protein, 16 aa, Homo sapiens
  ( 276 )...( 291 ): >CBFB_HUMAN
LKRRQARAKLEAEGKI

SEQ ID NO: 25473 - protein, 16 aa, Homo sapiens
  ( 277 )...( 292 ): >CBFB_HUMAN
KRRQARAKLEAEGKIP

SEQ ID NO: 25474 - protein, 16 aa, Homo sapiens
  ( 278 )...( 293 ): >CBFB_HUMAN
RRQARAKLEAEGKIPK

SEQ ID NO: 25475 - protein, 16 aa, Homo sapiens
  ( 281 )...( 296 ): >CBFB_HUMAN
ARAKLEAEGKIPKERR

SEQ ID NO: 25476 - protein, 16 aa, Homo sapiens
  ( 305 )...( 320 ): >CBFB_HUMAN
RHAMARKRGEGGRFFS

SEQ ID NO: 25477 - protein, 16 aa, Homo sapiens
  ( 309 )...( 324 ): >CBFB_HUMAN
ARKRGEGGRFFSPKEK

SEQ ID NO: 25478 - protein, 16 aa, Homo sapiens
  ( 35 )...( 50 ): >CBFC_HUMAN
VKDFRVQELPLARIKK

SEQ ID NO: 25479 - protein, 16 aa, Homo sapiens
  ( 38 )...( 53 ): >CBFC_HUMAN
FRVQELPLARIKKIMK

SEQ ID NO: 25480 - protein, 16 aa, Homo sapiens
  ( 39 )...( 54 ): >CBFC_HUMAN
RVQELPLARIKKIMKL

SEQ ID NO: 25481 - protein, 16 aa, Homo sapiens
  ( 91 )...( 106 ): >CBFC_HUMAN
NKRRTLQRNDIAMAIT

SEQ ID NO: 25482 - protein, 16 aa, Homo sapiens
  ( 92 )...( 107 ): >CBFC_HUMAN
KRRTLQRNDIAMAITK

SEQ ID NO: 25483 - protein, 16 aa, Homo sapiens
  ( 93 )...( 108 ): >CBFC_HUMAN
RRTLQRNDIAMAITKF

SEQ ID NO: 25484 - protein, 16 aa, Homo sapiens
  ( 272 )...( 287 ): >CBFC_HUMAN
TNAQQGQRNASQGKPR

SEQ ID NO: 25485 - protein, 16 aa, Homo sapiens
  ( 274 )...( 289 ): >CBFC_HUMAN
AQQGQRNASQGKPRRC

SEQ ID NO: 25486 - protein, 16 aa, Homo sapiens
  ( 275 )...( 290 ): >CBFC_HUMAN
QQGQRNASQGKPRRCL

SEQ ID NO: 25487 - protein, 16 aa, Homo sapiens
  ( 276 )...( 291 ): >CBFC_HUMAN
QGQRNASQGKPRRCLK

SEQ ID NO: 25488 - protein, 16 aa, Homo sapiens
  ( 277 )...( 292 ): >CBFC_HUMAN
GQRNASQGKPRRCLKE

SEQ ID NO: 25489 - protein, 16 aa, Homo sapiens
  ( 278 )...( 293 ): >CBFC_HUMAN
QRNASQGKPRRCLKET

SEQ ID NO: 25490 - protein, 16 aa, Homo sapiens
  ( 279 )...( 294 ): >CBFC_HUMAN
RNASQGKPRRCLKETL

SEQ ID NO: 25491 - protein, 16 aa, Homo sapiens
  ( 280 )...( 295 ): >CBFC_HUMAN
NASQGKPRRCLKETLQ

SEQ ID NO: 25492 - protein, 16 aa, Homo sapiens
  ( 281 )...( 296 ): >CBFC_HUMAN
ASQGKPRRCLKETLQI

SEQ ID NO: 25493 - protein, 16 aa, Homo sapiens
  ( 282 )...( 297 ): >CBFC_HUMAN
SQGKPRRCLKETLQIT

SEQ ID NO: 25494 - protein, 16 aa, Homo sapiens
  ( 283 )...( 298 ): >CBFC_HUMAN
QGKPRRCLKETLQITQ

SEQ ID NO: 25495 - protein, 16 aa, Homo sapiens
  ( 284 )...( 299 ): >CBFC_HUMAN
GKPRRCLKETLQITQT

SEQ ID NO: 25496 - protein, 16 aa, Homo sapiens
  ( 306 )...( 321 ): >CD19_HUMAN
SLVGILHLQRALVLRR

SEQ ID NO: 25497 - protein, 16 aa, Homo sapiens
  ( 307 )...( 322 ): >CD19_HUMAN
LVGILHLQRALVLRRK

SEQ ID NO: 25498 - protein, 16 aa, Homo sapiens
  ( 308 )...( 323 ): >CD19_HUMAN
VGILHLQRALVLRRKR

SEQ ID NO: 25499 - protein, 16 aa, Homo sapiens
  ( 309 )...( 324 ): >CD19_HUMAN
GILHLQRALVLRRKRK

SEQ ID NO: 25500 - protein, 16 aa, Homo sapiens
  ( 26 )...( 41 ): >CDK7_HUMAN
VYKARDKNTNQIVAIK

SEQ ID NO: 25501 - protein, 16 aa, Homo sapiens
  ( 28 )...( 43 ): >CDK7_HUMAN
KARDKNTNQIVAIKKI

SEQ ID NO: 25502 - protein, 16 aa, Homo sapiens
  ( 29 )...( 44 ): >CDK7_HUMAN
ARDKNTNQIVAIKKIK

SEQ ID NO: 25503 - protein, 16 aa, Homo sapiens
  ( 30 )...( 45 ): >CDK7_HUMAN
RDKNTNQIVAIKKIKL

SEQ ID NO: 25504 - protein, 16 aa, Homo sapiens
  ( 32 )...( 47 ): >CDK7_HUMAN
KNTNQIVAIKKIKLGH

SEQ ID NO: 25505 - protein, 16 aa, Homo sapiens
  ( 33 )...( 48 ): >CDK7_HUMAN
NTNQIVAIKKIKLGHR

SEQ ID NO: 25506 - protein, 16 aa, Homo sapiens
  ( 34 )...( 49 ): >CDK7_HUMAN
TNQIVAIKKIKLGHRS

SEQ ID NO: 25507 - protein, 16 aa, Homo sapiens
  ( 37 )...( 52 ): >CDK7_HUMAN
IVAIKKIKLGHRSEAK

SEQ ID NO: 25508 - protein, 16 aa, Homo sapiens
  ( 42 )...( 57 ): >CDK7_HUMAN
KIKLGHRSEAKDGINR

SEQ ID NO: 25509 - protein, 16 aa, Homo sapiens
  ( 282 )...( 297 ): >CDK7_HUMAN
ARITATQALKMKYFSN

SEQ ID NO: 25510 - protein, 16 aa, Homo sapiens
  ( 283 )...( 298 ): >CDK7_HUMAN
RITATQALKMKYFSNR

SEQ ID NO: 25511 - protein, 16 aa, Homo sapiens
  ( 316 )...( 331 ): >CDK7_HUMAN
TLKEQSNPALAIKRKR

SEQ ID NO: 25512 - protein, 16 aa, Homo sapiens
  ( 317 )...( 332 ): >CDK7_HUMAN
LKEQSNPALAIKRKRT

SEQ ID NO: 25513 - protein, 16 aa, Homo sapiens
  ( 318 )...( 333 ): >CDK7_HUMAN
KEQSNPALAIKRKRTE

SEQ ID NO: 25514 - protein, 16 aa, Homo sapiens
  ( 320 )...( 335 ): >CDK7_HUMAN
QSNPALAIKRKRTEAL

SEQ ID NO: 25515 - protein, 16 aa, Homo sapiens
  ( 327 )...( 342 ): >CDK7_HUMAN
IKRKRTEALEQGGLPK

SEQ ID NO: 25516 - protein, 16 aa, Homo sapiens
  ( 328 )...( 343 ): >CDK7_HUMAN
KRKRTEALEQGGLPKK

SEQ ID NO: 25517 - protein, 16 aa, Homo sapiens
  ( 329 )...( 344 ): >CDK7_HUMAN
RKRTEALEQGGLPKKL

SEQ ID NO: 25518 - protein, 16 aa, Homo sapiens
  ( 72 )...( 87 ): >CEBG_HUMAN
NNMAVKKSRLKSKQKA

SEQ ID NO: 25519 - protein, 16 aa, Homo sapiens
  ( 73 )...( 88 ): >CEBG_HUMAN
NMAVKKSRLKSKQKAQ

SEQ ID NO: 25520 - protein, 16 aa, Homo sapiens
  ( 74 )...( 89 ): >CEBG_HUMAN
MAVKKSRLKSKQKAQD

SEQ ID NO: 25521 - protein, 16 aa, Homo sapiens
  ( 75 )...( 90 ): >CEBG_HUMAN
AVKKSRLKSKQKAQDT

SEQ ID NO: 25522 - protein, 16 aa, Homo sapiens
  ( 76 )...( 91 ): >CEBG_HUMAN
VKKSRLKSKQKAQDTL

SEQ ID NO: 25523 - protein, 16 aa, Homo sapiens
  ( 79 )...( 94 ): >CEBG_HUMAN
SRLKSKQKAQDTLQRV

SEQ ID NO: 25524 - protein, 16 aa, Homo sapiens
  ( 81 )...( 96 ): >CEBG_HUMAN
LKSKQKAQDTLQRVNQ

SEQ ID NO: 25525 - protein, 16 aa, Homo sapiens
  ( 82 )...( 97 ): >CEBG_HUMAN
KSKQKAQDTLQRVNQL

SEQ ID NO: 25526 - protein, 16 aa, Homo sapiens
  ( 83 )...( 98 ): >CEBG_HUMAN
SKQKAQDTLQRVNQLK

SEQ ID NO: 25527 - protein, 16 aa, Homo sapiens
  ( 80 )...( 95 ): >CGA1_HUMAN
QRTVLGLLTANGQYRR

SEQ ID NO: 25528 - protein, 16 aa, Homo sapiens
  ( 81 )...( 96 ): >CGA1_HUMAN
RTVLGLLTANGQYRRT

SEQ ID NO: 25529 - protein, 16 aa, Homo sapiens
  ( 88 )...( 103 ): >CGA1_HUMAN
TANGQYRRTCGQGITR

SEQ ID NO: 25530 - protein, 16 aa, Homo sapiens
  ( 89 )...( 104 ): >CGA1_HUMAN
ANGQYRRTCGQGITRI

SEQ ID NO: 25531 - protein, 16 aa, Homo sapiens
  ( 90 )...( 105 ): >CGA1_HUMAN
NGQYRRTCGQGITRIR

SEQ ID NO: 25532 - protein, 16 aa, Homo sapiens
  ( 91 )...( 106 ): >CGA1_HUMAN
GQYRRTCGQGITRIRC

SEQ ID NO: 25533 - protein, 16 aa, Homo sapiens
  ( 92 )...( 107 ): >CGA1_HUMAN
QYRRTCGQGITRIRCY

SEQ ID NO: 25534 - protein, 16 aa, Homo sapiens
  ( 93 )...( 108 ): >CGA1_HUMAN
YRRTCGQGITRIRCYS

SEQ ID NO: 25535 - protein, 16 aa, Homo sapiens
  ( 94 )...( 109 ): >CGA1_HUMAN
RRTCGQGITRIRCYSG

SEQ ID NO: 25536 - protein, 16 aa, Homo sapiens
  ( 274 )...( 289 ): >CGA1_HUMAN
RFLSCMSVLRGKLQLV

SEQ ID NO: 25537 - protein, 16 aa, Homo sapiens
  ( 321 )...( 336 ): >CGA1_HUMAN
KRQLLKMEHLLLKVLA

SEQ ID NO: 25538 - protein, 16 aa, Homo sapiens
  ( 346 )...( 361 ): >CGA1_HUMAN
QFLLQYLRRQGVCVRT

SEQ ID NO: 25539 - protein, 16 aa, Homo sapiens
  ( 351 )...( 366 ): >CGA1_HUMAN
YLRRQGVCVRTENLAK

SEQ ID NO: 25540 - protein, 16 aa, Homo sapiens
  ( 352 )...( 367 ): >CGA1_HUMAN
LRRQGVCVRTENLAKY

SEQ ID NO: 25541 - protein, 16 aa, Homo sapiens
  ( 353 )...( 368 ): >CGA1_HUMAN
RRQGVCVRTENLAKYV

SEQ ID NO: 25542 - protein, 16 aa, Homo sapiens
  ( 438 )...( 453 ): >CGA1_HUMAN
QQAIREKYKASKYLCV

SEQ ID NO: 25543 - protein, 16 aa, Homo sapiens
  ( 439 )...( 454 ): >CGA1_HUMAN
QAIREKYKASKYLCVS

SEQ ID NO: 25544 - protein, 16 aa, Homo sapiens
  ( 440 )...( 455 ): >CGA1_HUMAN
AIREKYKASKYLCVSL

SEQ ID NO: 25545 - protein, 16 aa, Homo sapiens
  ( 441 )...( 456 ): >CGA1_HUMAN
IREKYKASKYLCVSLM

SEQ ID NO: 25546 - protein, 16 aa, Homo sapiens
  ( 61 )...( 76 ): >CLOC_HUMAN
LPGNARKMDKSTVLQK

SEQ ID NO: 25547 - protein, 16 aa, Homo sapiens
  ( 699 )...( 714 ): >CLOC_HUMAN
RQIRFSQGQQLVTKLV

SEQ ID NO: 25548 - protein, 16 aa, Homo sapiens
  ( 195 )...( 210 ): >CNO7_HUMAN
VKYLMKSCKNLKGGLQ

SEQ ID NO: 25549 - protein, 16 aa, Homo sapiens
  ( 195 )...( 210 ): >CNT8_HUMAN
VKYLMKSCKNLKGGLQ

SEQ ID NO: 25550 - protein, 16 aa, Homo sapiens
  ( 1 )...( 16 ): >CUT2_HUMAN
VQPLRKAKLLCVRVSI

SEQ ID NO: 25551 - protein, 16 aa, Homo sapiens
  ( 2 )...( 17 ): >CUT2_HUMAN
QPLRKAKLLCVRVSIA

SEQ ID NO: 25552 - protein, 16 aa, Homo sapiens
  ( 3 )...( 18 ): >CUT2_HUMAN
PLRKAKLLCVRVSIAP

SEQ ID NO: 25553 - protein, 16 aa, Homo sapiens
  ( 4 )...( 19 ): >CUT2_HUMAN
LRKAKLLCVRVSIAPK

SEQ ID NO: 25554 - protein, 16 aa, Homo sapiens
  ( 5 )...( 20 ): >CUT2_HUMAN
RKAKLLCVRVSIAPKM

SEQ ID NO: 25555 - protein, 16 aa, Homo sapiens
  ( 6 )...( 21 ): >CUT2_HUMAN
KAKLLCVRVSIAPKMA

SEQ ID NO: 25556 - protein, 16 aa, Homo sapiens
  ( 604 )...( 619 ): >CUT2_HUMAN
QGSVSEILARPKPWRK

SEQ ID NO: 25557 - protein, 16 aa, Homo sapiens
  ( 605 )...( 620 ): >CUT2_HUMAN
GSVSEILARPKPWRKL

SEQ ID NO: 25558 - protein, 16 aa, Homo sapiens
  ( 606 )...( 621 ): >CUT2_HUMAN
SVSEILARPKPWRKLT

SEQ ID NO: 25559 - protein, 16 aa, Homo sapiens
  ( 607 )...( 622 ): >CUT2_HUMAN
VSEILARPKPWRKLTV

SEQ ID NO: 25560 - protein, 16 aa, Homo sapiens
  ( 608 )...( 623 ): >CUT2_HUMAN
SEILARPKPWRKLTVK

SEQ ID NO: 25561 - protein, 16 aa, Homo sapiens
  ( 609 )...( 624 ): >CUT2_HUMAN
EILARPKPWRKLTVKG

SEQ ID NO: 25562 - protein, 16 aa, Homo sapiens
  ( 610 )...( 625 ): >CUT2_HUMAN
ILARPKPWRKLTVKGK

SEQ ID NO: 25563 - protein, 16 aa, Homo sapiens
  ( 611 )...( 626 ): >CUT2_HUMAN
LARPKPWRKLTVKGKE

SEQ ID NO: 25564 - protein, 16 aa, Homo sapiens
  ( 618 )...( 633 ): >CUT2_HUMAN
RKLTVKGKEPFIKMKQ

SEQ ID NO: 25565 - protein, 16 aa, Homo sapiens
  ( 619 )...( 634 ): >CUT2_HUMAN
KLTVKGKEPFIKMKQF

SEQ ID NO: 25566 - protein, 16 aa, Homo sapiens
  ( 639 )...( 654 ): >CUT2_HUMAN
QNVLALRTIQVRQRGS

SEQ ID NO: 25567 - protein, 16 aa, Homo sapiens
  ( 640 )...( 655 ): >CUT2_HUMAN
NVLALRTIQVRQRGSI

SEQ ID NO: 25568 - protein, 16 aa, Homo sapiens
  ( 641 )...( 656 ): >CUT2_HUMAN
VLALRTIQVRQRGSIT

SEQ ID NO: 25569 - protein, 16 aa, Homo sapiens
  ( 642 )...( 657 ): >CUT2_HUMAN
LALRTIQVRQRGSITP

SEQ ID NO: 25570 - protein, 16 aa, Homo sapiens
  ( 643 )...( 658 ): >CUT2_HUMAN
ALRTIQVRQRGSITPR

SEQ ID NO: 25571 - protein, 16 aa, Homo sapiens
  ( 644 )...( 659 ): >CUT2_HUMAN
LRTIQVRQRGSITPRI

SEQ ID NO: 25572 - protein, 16 aa, Homo sapiens
  ( 645 )...( 660 ): >CUT2_HUMAN
RTIQVRQRGSITPRIR

SEQ ID NO: 25573 - protein, 16 aa, Homo sapiens
  ( 646 )...( 661 ): >CUT2_HUMAN
TIQVRQRGSITPRIRT

SEQ ID NO: 25574 - protein, 16 aa, Homo sapiens
  ( 647 )...( 662 ): >CUT2_HUMAN
IQVRQRGSITPRIRTP

SEQ ID NO: 25575 - protein, 16 aa, Homo sapiens
  ( 648 )...( 663 ): >CUT2_HUMAN
QVRQRGSITPRIRTPE

SEQ ID NO: 25576 - protein, 16 aa, Homo sapiens
  ( 649 )...( 664 ): >CUT2_HUMAN
VRQRGSITPRIRTPET

SEQ ID NO: 25577 - protein, 16 aa, Homo sapiens
  ( 650 )...( 665 ): >CUT2_HUMAN
RQRGSITPRIRTPETG

SEQ ID NO: 25578 - protein, 16 aa, Homo sapiens
  ( 780 )...( 795 ): >CUT2_HUMAN
VLSPAAFVQSIIRKVK

SEQ ID NO: 25579 - protein, 16 aa, Homo sapiens
  ( 781 )...( 796 ): >CUT2_HUMAN
LSPAAFVQSIIRKVKS

SEQ ID NO: 25580 - protein, 16 aa, Homo sapiens
  ( 920 )...( 935 ): >CUT2_HUMAN
LTRQVKEKLAKNGICQ

SEQ ID NO: 25581 - protein, 16 aa, Homo sapiens
  ( 921 )...( 936 ): >CUT2_HUMAN
TRQVKEKLAKNGICQR

SEQ ID NO: 25582 - protein, 16 aa, Homo sapiens
  ( 922 )...( 937 ): >CUT2_HUMAN
RQVKEKLAKNGICQRI

SEQ ID NO: 25583 - protein, 16 aa, Homo sapiens
  ( 923 )...( 938 ): >CUT2_HUMAN
QVKEKLAKNGICQRIF

SEQ ID NO: 25584 - protein, 16 aa, Homo sapiens
  ( 924 )...( 939 ): >CUT2_HUMAN
VKEKLAKNGICQRIFG

SEQ ID NO: 25585 - protein, 16 aa, Homo sapiens
  ( 927 )...( 942 ): >CUT2_HUMAN
KLAKNGICQRIFGEKV

SEQ ID NO: 25586 - protein, 16 aa, Homo sapiens
  ( 961 )...( 976 ): >CUT2_HUMAN
SKLTQKGREPFIRMQL

SEQ ID NO: 25587 - protein, 16 aa, Homo sapiens
  ( 1112 )...( 1127 ): >CUT2_HUMAN
HKLSLKGREPFVRMQL

SEQ ID NO: 25588 - protein, 16 aa, Homo sapiens
  ( 1144 )...( 1159 ): >CUT2_HUMAN
LEKKAYLKRRYGLIST

SEQ ID NO: 25589 - protein, 16 aa, Homo sapiens
  ( 1145 )...( 1160 ): >CUT2_HUMAN
EKKAYLKRRYGLISTG

SEQ ID NO: 25590 - protein, 16 aa, Homo sapiens
  ( 1146 )...( 1161 ): >CUT2_HUMAN
KKAYLKRRYGLISTGS

SEQ ID NO: 25591 - protein, 16 aa, Homo sapiens
  ( 1147 )...( 1162 ): >CUT2_HUMAN
KAYLKRRYGLISTGSD

SEQ ID NO: 25592 - protein, 16 aa, Homo sapiens
  ( 26 )...( 41 ): >CYCH_HUMAN
ANRKFRCKAVANGKVL

SEQ ID NO: 25593 - protein, 16 aa, Homo sapiens
  ( 246 )...( 261 ): >CYCH_HUMAN
SQLLDIMKSMRNLVKK

SEQ ID NO: 25594 - protein, 16 aa, Homo sapiens
  ( 279 )...( 294 ): >CYCH_HUMAN
RCHSAELALNVITKKR

SEQ ID NO: 25595 - protein, 16 aa, Homo sapiens
  ( 282 )...( 297 ): >CYCH_HUMAN
SAELALNVITKKRKGY

SEQ ID NO: 25596 - protein, 16 aa, Homo sapiens
  ( 203 )...( 218 ): >DEAF_HUMAN
LPVRCRNISGTLYKNR

SEQ ID NO: 25597 - protein, 16 aa, Homo sapiens
  ( 204 )...( 219 ): >DEAF_HUMAN
PVRCRNISGTLYKNRL

SEQ ID NO: 25598 - protein, 16 aa, Homo sapiens
  ( 205 )...( 220 ): >DEAF_HUMAN
VRCRNISGTLYKNRLG

SEQ ID NO: 25599 - protein, 16 aa, Homo sapiens
  ( 206 )...( 221 ): >DEAF_HUMAN
RCRNISGTLYKNRLGS

SEQ ID NO: 25600 - protein, 16 aa, Homo sapiens
  ( 208 )...( 223 ): >DEAF_HUMAN
RNISGTLYKNRLGSGG

SEQ ID NO: 25601 - protein, 16 aa, Homo sapiens
  ( 209 )...( 224 ): >DEAF_HUMAN
NISGTLYKNRLGSGGR

SEQ ID NO: 25602 - protein, 16 aa, Homo sapiens
  ( 211 )...( 226 ): >DEAF_HUMAN
SGTLYKNRLGSGGRGR

SEQ ID NO: 25603 - protein, 16 aa, Homo sapiens
  ( 212 )...( 227 ): >DEAF_HUMAN
GTLYKNRLGSGGRGRC

SEQ ID NO: 25604 - protein, 16 aa, Homo sapiens
  ( 213 )...( 228 ): >DEAF_HUMAN
TLYKNRLGSGGRGRCI

SEQ ID NO: 25605 - protein, 16 aa, Homo sapiens
  ( 214 )...( 229 ): >DEAF_HUMAN
LYKNRLGSGGRGRCIK

SEQ ID NO: 25606 - protein, 16 aa, Homo sapiens
  ( 215 )...( 230 ): >DEAF_HUMAN
YKNRLGSGGRGRCIKQ

SEQ ID NO: 25607 - protein, 16 aa, Homo sapiens
  ( 216 )...( 231 ): >DEAF_HUMAN
KNRLGSGGRGRCIKQG

SEQ ID NO: 25608 - protein, 16 aa, Homo sapiens
  ( 217 )...( 232 ): >DEAF_HUMAN
NRLGSGGRGRCIKQGE

SEQ ID NO: 25609 - protein, 16 aa, Homo sapiens
  ( 218 )...( 233 ): >DEAF_HUMAN
RLGSGGRGRCIKQGEN

SEQ ID NO: 25610 - protein, 16 aa, Homo sapiens
  ( 245 )...( 260 ): >DEAF_HUMAN
GRASSKDWKRSIRYAG

SEQ ID NO: 25611 - protein, 16 aa, Homo sapiens
  ( 253 )...( 268 ): >DEAF_HUMAN
KRSIRYAGRPLQCLIQ

SEQ ID NO: 25612 - protein, 16 aa, Homo sapiens
  ( 288 )...( 303 ): >DEAF_HUMAN
MTLSGPVRLFVPYKRR

SEQ ID NO: 25613 - protein, 16 aa, Homo sapiens
  ( 289 )...( 304 ): >DEAF_HUMAN
TLSGPVRLFVPYKRRK

SEQ ID NO: 25614 - protein, 16 aa, Homo sapiens
  ( 77 )...( 92 ): >E2F1_HUMAN
SAPRPALGRPPVKRRL

SEQ ID NO: 25615 - protein, 16 aa, Homo sapiens
  ( 78 )...( 93 ): >E2F1_HUMAN
APRPALGRPPVKRRLD

SEQ ID NO: 25616 - protein, 16 aa, Homo sapiens
  ( 79 )...( 94 ): >E2F1_HUMAN
PRPALGRPPVKRRLDL

SEQ ID NO: 25617 - protein, 16 aa, Homo sapiens
  ( 80 )...( 95 ): >E2F1_HUMAN
RPALGRPPVKRRLDLE

SEQ ID NO: 25618 - protein, 16 aa, Homo sapiens
  ( 109 )...( 124 ): >E2F1_HUMAN
RGRGRHPGKGVKSPGE

SEQ ID NO: 25619 - protein, 16 aa, Homo sapiens
  ( 159 )...( 174 ): >E2F1_HUMAN
VLKVQKRRIYDITNVL

SEQ ID NO: 25620 - protein, 16 aa, Homo sapiens
  ( 72 )...( 87 ): >E2F2_HUMAN
GQVVRCLPAGRLPAKR

SEQ ID NO: 25621 - protein, 16 aa, Homo sapiens
  ( 73 )...( 88 ): >E2F2_HUMAN
QVVRCLPAGRLPAKRK

SEQ ID NO: 25622 - protein, 16 aa, Homo sapiens
  ( 74 )...( 89 ): >E2F2_HUMAN
VVRCLPAGRLPAKRKL

SEQ ID NO: 25623 - protein, 16 aa, Homo sapiens
  ( 75 )...( 90 ): >E2F2_HUMAN
VRCLPAGRLPAKRKLD

SEQ ID NO: 25624 - protein, 16 aa, Homo sapiens
  ( 76 )...( 91 ): >E2F2_HUMAN
RCLPAGRLPAKRKLDL

SEQ ID NO: 25625 - protein, 16 aa, Homo sapiens
  ( 81 )...( 96 ): >E2F2_HUMAN
GRLPAKRKLDLEGIGR

SEQ ID NO: 25626 - protein, 16 aa, Homo sapiens
  ( 82 )...( 97 ): >E2F2_HUMAN
RLPAKRKLDLEGIGRP

SEQ ID NO: 25627 - protein, 16 aa, Homo sapiens
  ( 172 )...( 187 ): >E2F2_HUMAN
ITNVLEGIQLIRKKAK

SEQ ID NO: 25628 - protein, 16 aa, Homo sapiens
  ( 173 )...( 188 ): >E2F2_HUMAN
TNVLEGIQLIRKKAKN

SEQ ID NO: 25629 - protein, 16 aa, Homo sapiens
  ( 174 )...( 189 ): >E2F2_HUMAN
NVLEGIQLIRKKAKNN

SEQ ID NO: 25630 - protein, 16 aa, Homo sapiens
  ( 175 )...( 190 ): >E2F2_HUMAN
VLEGIQLIRKKAKNNI

SEQ ID NO: 25631 - protein, 16 aa, Homo sapiens
  ( 176 )...( 191 ): >E2F2_HUMAN
LEGIQLIRKKAKNNIQ

SEQ ID NO: 25632 - protein, 16 aa, Homo sapiens
  ( 178 )...( 193 ): >E2F2_HUMAN
GIQLIRKKAKNNIQWV

SEQ ID NO: 25633 - protein, 16 aa, Homo sapiens
  ( 179 )...( 194 ): >E2F2_HUMAN
IQLIRKKAKNNIQWVG

SEQ ID NO: 25634 - protein, 16 aa, Homo sapiens
  ( 181 )...( 196 ): >E2F2_HUMAN
LIRKKAKNNIQWVGRG

SEQ ID NO: 25635 - protein, 16 aa, Homo sapiens
  ( 182 )...( 197 ): >E2F2_HUMAN
IRKKAKNNIQWVGRGM

SEQ ID NO: 25636 - protein, 16 aa, Homo sapiens
  ( 242 )...( 257 ): >E2F2_HUMAN
KANKRLAYVTYQDIRA

SEQ ID NO: 25637 - protein, 16 aa, Homo sapiens
  ( 144 )...( 159 ): >E2F3_HUMAN
QYLSDGLKTPKGKGRA

SEQ ID NO: 25638 - protein, 16 aa, Homo sapiens
  ( 150 )...( 165 ): >E2F3_HUMAN
LKTPKGKGRAALRSPD

SEQ ID NO: 25639 - protein, 16 aa, Homo sapiens
  ( 202 )...( 217 ): >E2F3_HUMAN
LDLNKAAEVLKVQKRR

SEQ ID NO: 25640 - protein, 16 aa, Homo sapiens
  ( 203 )...( 218 ): >E2F3_HUMAN
DLNKAAEVLKVQKRRI

SEQ ID NO: 25641 - protein, 16 aa, Homo sapiens
  ( 204 )...( 219 ): >E2F3_HUMAN
LNKAAEVLKVQKRRIY

SEQ ID NO: 25642 - protein, 16 aa, Homo sapiens
  ( 206 )...( 221 ): >E2F3_HUMAN
KAAEVLKVQKRRIYDI

SEQ ID NO: 25643 - protein, 16 aa, Homo sapiens
  ( 210 )...( 225 ): >E2F3_HUMAN
VLKVQKRRIYDITNVL

SEQ ID NO: 25644 - protein, 16 aa, Homo sapiens
  ( 304 )...( 319 ): >E2F3_HUMAN
IRKISGLKDQTVIVVK

SEQ ID NO: 25645 - protein, 16 aa, Homo sapiens
  ( 305 )...( 320 ): >E2F3_HUMAN
RKISGLKDQTVIVVKA

SEQ ID NO: 25646 - protein, 16 aa, Homo sapiens
  ( 42 )...( 57 ): >E2F4_HUMAN
DLKLAADTLAVRQKRR

SEQ ID NO: 25647 - protein, 16 aa, Homo sapiens
  ( 43 )...( 58 ): >E2F4_HUMAN
LKLAADTLAVRQKRRI

SEQ ID NO: 25648 - protein, 16 aa, Homo sapiens
  ( 44 )...( 59 ): >E2F4_HUMAN
KLAADTLAVRQKRRIY

SEQ ID NO: 25649 - protein, 16 aa, Homo sapiens
  ( 49 )...( 64 ): >E2F4_HUMAN
TLAVRQKRRIYDITNV

SEQ ID NO: 25650 - protein, 16 aa, Homo sapiens
  ( 50 )...( 65 ): >E2F4_HUMAN
LAVRQKRRIYDITNVL

SEQ ID NO: 25651 - protein, 16 aa, Homo sapiens
  ( 75 )...( 90 ): >E2F5_HUMAN
DLKAAADTLAVRQKRR

SEQ ID NO: 25652 - protein, 16 aa, Homo sapiens
  ( 76 )...( 91 ): >E2F5_HUMAN
LKAAADTLAVRQKRRI

SEQ ID NO: 25653 - protein, 16 aa, Homo sapiens
  ( 77 )...( 92 ): >E2F5_HUMAN
KAAADTLAVRQKRRIY

SEQ ID NO: 25654 - protein, 16 aa, Homo sapiens
  ( 82 )...( 97 ): >E2F5_HUMAN
TLAVRQKRRIYDITNV

SEQ ID NO: 25655 - protein, 16 aa, Homo sapiens
  ( 83 )...( 98 ): >E2F5_HUMAN
LAVRQKRRIYDITNVL

SEQ ID NO: 25656 - protein, 16 aa, Homo sapiens
  ( 47 )...( 62 ): >E2F6_HUMAN
NVQYVSMRKALKVKRP

SEQ ID NO: 25657 - protein, 16 aa, Homo sapiens
  ( 54 )...( 69 ): >E2F6_HUMAN
RKALKVKRPRFDVSLV

SEQ ID NO: 25658 - protein, 16 aa, Homo sapiens
  ( 55 )...( 70 ): >E2F6_HUMAN
KALKVKRPRFDVSLVY

SEQ ID NO: 25659 - protein, 16 aa, Homo sapiens
  ( 56 )...( 71 ): >E2F6_HUMAN
ALKVKRPRFDVSLVYL

SEQ ID NO: 25660 - protein, 16 aa, Homo sapiens
  ( 57 )...( 72 ): >E2F6_HUMAN
LKVKRPRFDVSLVYLT

SEQ ID NO: 25661 - protein, 16 aa, Homo sapiens
  ( 85 )...( 100 ): >E2F6_HUMAN
GILDLNKVATKLGVRK

SEQ ID NO: 25662 - protein, 16 aa, Homo sapiens
  ( 86 )...( 101 ): >E2F6_HUMAN
ILDLNKVATKLGVRKR

SEQ ID NO: 25663 - protein, 16 aa, Homo sapiens
  ( 87 )...( 102 ): >E2F6_HUMAN
LDLNKVATKLGVRKRR

SEQ ID NO: 25664 - protein, 16 aa, Homo sapiens
  ( 88 )...( 103 ): >E2F6_HUMAN
DLNKVATKLGVRKRRV

SEQ ID NO: 25665 - protein, 16 aa, Homo sapiens
  ( 89 )...( 104 ): >E2F6_HUMAN
LNKVATKLGVRKRRVY

SEQ ID NO: 25666 - protein, 16 aa, Homo sapiens
  ( 90 )...( 105 ): >E2F6_HUMAN
NKVATKLGVRKRRVYD

SEQ ID NO: 25667 - protein, 16 aa, Homo sapiens
  ( 91 )...( 106 ): >E2F6_HUMAN
KVATKLGVRKRRVYDI

SEQ ID NO: 25668 - protein, 16 aa, Homo sapiens
  ( 92 )...( 107 ): >E2F6_HUMAN
VATKLGVRKRRVYDIT

SEQ ID NO: 25669 - protein, 16 aa, Homo sapiens
  ( 93 )...( 108 ): >E2F6_HUMAN
ATKLGVRKRRVYDITN

SEQ ID NO: 25670 - protein, 16 aa, Homo sapiens
  ( 94 )...( 109 ): >E2F6_HUMAN
TKLGVRKRRVYDITNV

SEQ ID NO: 25671 - protein, 16 aa, Homo sapiens
  ( 95 )...( 110 ): >E2F6_HUMAN
KLGVRKRRVYDITNVL

SEQ ID NO: 25672 - protein, 16 aa, Homo sapiens
  ( 417 )...( 432 ): >EGR2_HUMAN
TKIHLRQKERKSSAPS

SEQ ID NO: 25673 - protein, 16 aa, Homo sapiens
  ( 418 )...( 433 ): >EGR2_HUMAN
KIHLRQKERKSSAPSA

SEQ ID NO: 25674 - protein, 16 aa, Homo sapiens
  ( 245 )...( 260 ): >EGR3_HUMAN
SLPQPPLTLKPIRPRK

SEQ ID NO: 25675 - protein, 16 aa, Homo sapiens
  ( 352 )...( 367 ): >EGR3_HUMAN
AKIHLKQKEKKAEKGG

SEQ ID NO: 25676 - protein, 16 aa, Homo sapiens
  ( 353 )...( 368 ): >EGR3_HUMAN
KIHLKQKEKKAEKGGA

SEQ ID NO: 25677 - protein, 16 aa, Homo sapiens
  ( 164 )...( 179 ): >ELF1_HUMAN
PGASSPEQPKRKKGRK

SEQ ID NO: 25678 - protein, 16 aa, Homo sapiens
  ( 165 )...( 180 ): >ELF1_HUMAN
GASSPEQPKRKKGRKT

SEQ ID NO: 25679 - protein, 16 aa, Homo sapiens
  ( 189 )...( 204 ): >ELF1_HUMAN
ATTPNISVKKKNKDGK

SEQ ID NO: 25680 - protein, 16 aa, Homo sapiens
  ( 190 )...( 205 ): >ELF1_HUMAN
TTPNISVKKKNKDGKG

SEQ ID NO: 25681 - protein, 16 aa, Homo sapiens
  ( 193 )...( 208 ): >ELF1_HUMAN
NISVKKKNKDGKGNTI

SEQ ID NO: 25682 - protein, 16 aa, Homo sapiens
  ( 194 )...( 209 ): >ELF1_HUMAN
ISVKKKNKDGKGNTIY

SEQ ID NO: 25683 - protein, 16 aa, Homo sapiens
  ( 195 )...( 210 ): >ELF1_HUMAN
SVKKKNKDGKGNTIYL

SEQ ID NO: 25684 - protein, 16 aa, Homo sapiens
  ( 196 )...( 211 ): >ELF1_HUMAN
VKKKNKDGKGNTIYLW

SEQ ID NO: 25685 - protein, 16 aa, Homo sapiens
  ( 221 )...( 236 ): >ELF1_HUMAN
KATCPKYIKWTQREKG

SEQ ID NO: 25686 - protein, 16 aa, Homo sapiens
  ( 222 )...( 237 ): >ELF1_HUMAN
ATCPKYIKWTQREKGI

SEQ ID NO: 25687 - protein, 16 aa, Homo sapiens
  ( 233 )...( 248 ): >ELF1_HUMAN
REKGIFKLVDSKAVSR

SEQ ID NO: 25688 - protein, 16 aa, Homo sapiens
  ( 235 )...( 250 ): >ELF1_HUMAN
KGIFKLVDSKAVSRLW

SEQ ID NO: 25689 - protein, 16 aa, Homo sapiens
  ( 237 )...( 252 ): >ELF1_HUMAN
IFKLVDSKAVSRLWGK

SEQ ID NO: 25690 - protein, 16 aa, Homo sapiens
  ( 239 )...( 254 ): >ELF1_HUMAN
KLVDSKAVSRLWGKHK

SEQ ID NO: 25691 - protein, 16 aa, Homo sapiens
  ( 241 )...( 256 ): >ELF1_HUMAN
VDSKAVSRLWGKHKNK

SEQ ID NO: 25692 - protein, 16 aa, Homo sapiens
  ( 263 )...( 278 ): >ELF1_HUMAN
TMGRALRYYYQRGILA

SEQ ID NO: 25693 - protein, 16 aa, Homo sapiens
  ( 264 )...( 279 ): >ELF1_HUMAN
MGRALRYYYQRGILAK

SEQ ID NO: 25694 - protein, 16 aa, Homo sapiens
  ( 265 )...( 280 ): >ELF1_HUMAN
GRALRYYYQRGILAKV

SEQ ID NO: 25695 - protein, 16 aa, Homo sapiens
  ( 323 )...( 338 ): >ELF1_HUMAN
RNQTSRSRVSSSPGVK

SEQ ID NO: 25696 - protein, 16 aa, Homo sapiens
  ( 400 )...( 415 ): >ETS1_HUMAN
NIIHKTAGKRYVYRFV

SEQ ID NO: 25697 - protein, 16 aa, Homo sapiens
  ( 401 )...( 416 ): >ETS1_HUMAN
IIHKTAGKRYVYRFVC

SEQ ID NO: 25698 - protein, 16 aa, Homo sapiens
  ( 402 )...( 417 ): >ETS1_HUMAN
IHKTAGKRYVYRFVCD

SEQ ID NO: 25699 - protein, 16 aa, Homo sapiens
  ( 403 )...( 418 ): >ETS1_HUMAN
HKTAGKRYVYRFVCDL

SEQ ID NO: 25700 - protein, 16 aa, Homo sapiens
  ( 404 )...( 419 ): >ETS1_HUMAN
KTAGKRYVYRFVCDLQ

SEQ ID NO: 25701 - protein, 16 aa, Homo sapiens
  ( 380 )...( 395 ): >EWS_HUMAN
FFKQCGVVKMNKRTGQ

SEQ ID NO: 25702 - protein, 16 aa, Homo sapiens
  ( 381 )...( 396 ): >EWS_HUMAN
FKQCGVVKMNKRTGQP

SEQ ID NO: 25703 - protein, 16 aa, Homo sapiens
  ( 382 )...( 397 ): >EWS_HUMAN
KQCGVVKMNKRTGQPM

SEQ ID NO: 25704 - protein, 16 aa, Homo sapiens
  ( 383 )...( 398 ): >EWS_HUMAN
QCGVVKMNKRTGQPMI

SEQ ID NO: 25705 - protein, 16 aa, Homo sapiens
  ( 385 )...( 400 ): >EWS_HUMAN
GVVKMNKRTGQPMIHI

SEQ ID NO: 25706 - protein, 16 aa, Homo sapiens
  ( 386 )...( 401 ): >EWS_HUMAN
VVKMNKRTGQPMIHIY

SEQ ID NO: 25707 - protein, 16 aa, Homo sapiens
  ( 387 )...( 402 ): >EWS_HUMAN
VKMNKRTGQPMIHIYL

SEQ ID NO: 25708 - protein, 16 aa, Homo sapiens
  ( 432 )...( 447 ): >EWS_HUMAN
GKDFQGSKLKVSLARK

SEQ ID NO: 25709 - protein, 16 aa, Homo sapiens
  ( 433 )...( 448 ): >EWS_HUMAN
KDFQGSKLKVSLARKK

SEQ ID NO: 25710 - protein, 16 aa, Homo sapiens
  ( 434 )...( 449 ): >EWS_HUMAN
DFQGSKLKVSLARKKP

SEQ ID NO: 25711 - protein, 16 aa, Homo sapiens
  ( 435 )...( 450 ): >EWS_HUMAN
FQGSKLKVSLARKKPP

SEQ ID NO: 25712 - protein, 16 aa, Homo sapiens
  ( 436 )...( 451 ): >EWS_HUMAN
QGSKLKVSLARKKPPM

SEQ ID NO: 25713 - protein, 16 aa, Homo sapiens
  ( 437 )...( 452 ): >EWS_HUMAN
GSKLKVSLARKKPPMN

SEQ ID NO: 25714 - protein, 16 aa, Homo sapiens
  ( 439 )...( 454 ): >EWS_HUMAN
KLKVSLARKKPPMNSM

SEQ ID NO: 25715 - protein, 16 aa, Homo sapiens
  ( 440 )...( 455 ): >EWS_HUMAN
LKVSLARKKPPMNSMR

SEQ ID NO: 25716 - protein, 16 aa, Homo sapiens
  ( 588 )...( 603 ): >EWS_HUMAN
FRGGRGGDRGGFRGGR

SEQ ID NO: 25717 - protein, 16 aa, Homo sapiens
  ( 113 )...( 128 ): >FOS_HUMAN
KTMTGGRAQSIGRRGK

SEQ ID NO: 25718 - protein, 16 aa, Homo sapiens
  ( 115 )...( 130 ): >FOS_HUMAN
MTGGRAQSIGRRGKVE

SEQ ID NO: 25719 - protein, 16 aa, Homo sapiens
  ( 116 )...( 131 ): >FOS_HUMAN
TGGRAQSIGRRGKVEQ

SEQ ID NO: 25720 - protein, 16 aa, Homo sapiens
  ( 117 )...( 132 ): >FOS_HUMAN
GGRAQSIGRRGKVEQL

SEQ ID NO: 25721 - protein, 16 aa, Homo sapiens
  ( 118 )...( 133 ): >FOS_HUMAN
GRAQSIGRRGKVEQLS

SEQ ID NO: 25722 - protein, 16 aa, Homo sapiens
  ( 119 )...( 134 ): >FOS_HUMAN
RAQSIGRRGKVEQLSP

SEQ ID NO: 25723 - protein, 16 aa, Homo sapiens
  ( 149 )...( 164 ): >FOS_HUMAN
MAAAKCRNRRRELTDT

SEQ ID NO: 25724 - protein, 16 aa, Homo sapiens
  ( 150 )...( 165 ): >FOS_HUMAN
AAAKCRNRRRELTDTL

SEQ ID NO: 25725 - protein, 16 aa, Homo sapiens
  ( 132 )...( 147 ): >FXD2_HUMAN
YIALITMAILQSPKKR

SEQ ID NO: 25726 - protein, 16 aa, Homo sapiens
  ( 133 )...( 148 ): >FXD2_HUMAN
IALITMAILQSPKKRL

SEQ ID NO: 25727 - protein, 16 aa, Homo sapiens
  ( 134 )...( 149 ): >FXD2_HUMAN
ALITMAILQSPKKRLT

SEQ ID NO: 25728 - protein, 16 aa, Homo sapiens
  ( 135 )...( 150 ): >FXD2_HUMAN
LITMAILQSPKKRLTL

SEQ ID NO: 25729 - protein, 16 aa, Homo sapiens
  ( 34 )...( 49 ): >FXE1_HUMAN
EATGRGAGGRRRKRPL

SEQ ID NO: 25730 - protein, 16 aa, Homo sapiens
  ( 47 )...( 62 ): >FXE1_HUMAN
RPLQRGKPPYSYIALI

SEQ ID NO: 25731 - protein, 16 aa, Homo sapiens
  ( 72 )...( 87 ): >FXE1_HUMAN
RRLTLGGIYKFITERF

SEQ ID NO: 25732 - protein, 16 aa, Homo sapiens
  ( 105 )...( 120 ): >FXE2_HUMAN
RASPRPRTLSLQRAPA

SEQ ID NO: 25733 - protein, 16 aa, Homo sapiens
  ( 203 )...( 218 ): >FXE2_HUMAN
SYIRRHAMAIGSPRLT

SEQ ID NO: 25734 - protein, 16 aa, Homo sapiens
  ( 204 )...( 219 ): >FXE2_HUMAN
YIRRHAMAIGSPRLTL

SEQ ID NO: 25735 - protein, 16 aa, Homo sapiens
  ( 205 )...( 220 ): >FXE2_HUMAN
IRRHAMAIGSPRLTLG

SEQ ID NO: 25736 - protein, 16 aa, Homo sapiens
  ( 206 )...( 221 ): >FXE2_HUMAN
RRHAMAIGSPRLTLGG

SEQ ID NO: 25737 - protein, 16 aa, Homo sapiens
  ( 281 )...( 296 ): >FXE2_HUMAN
ESGSFLRRRKASSVGL

SEQ ID NO: 25738 - protein, 16 aa, Homo sapiens
  ( 282 )...( 297 ): >FXE2_HUMAN
SGSFLRRRKASSVGLS

SEQ ID NO: 25739 - protein, 16 aa, Homo sapiens
  ( 283 )...( 298 ): >FXE2_HUMAN
GSFLRRRKASSVGLST

SEQ ID NO: 25740 - protein, 16 aa, Homo sapiens
  ( 284 )...( 299 ): >FXE2_HUMAN
SFLRRRKASSVGLSTY

SEQ ID NO: 25741 - protein, 16 aa, Homo sapiens
  ( 285 )...( 300 ): >FXE2_HUMAN
FLRRRKASSVGLSTYP

SEQ ID NO: 25742 - protein, 16 aa, Homo sapiens
  ( 286 )...( 301 ): >FXE2_HUMAN
LRRRKASSVGLSTYPA

SEQ ID NO: 25743 - protein, 16 aa, Homo sapiens
  ( 287 )...( 302 ): >FXE2_HUMAN
RRRKASSVGLSTYPAY

SEQ ID NO: 25744 - protein, 16 aa, Homo sapiens
  ( 330 )...( 345 ): >FXE2_HUMAN
NRAPSIQAKRAAVAGR

SEQ ID NO: 25745 - protein, 16 aa, Homo sapiens
  ( 335 )...( 350 ): >FXE2_HUMAN
IQAKRAAVAGRPPHLL

SEQ ID NO: 25746 - protein, 16 aa, Homo sapiens
  ( 159 )...( 174 ): >FXF2_HUMAN
IKLPKGLGRPGKGHYW

SEQ ID NO: 25747 - protein, 16 aa, Homo sapiens
  ( 198 )...( 213 ): >FXF2_HUMAN
RKCQALKPMYHRVVSG

SEQ ID NO: 25748 - protein, 16 aa, Homo sapiens
  ( 187 )...( 202 ): >FXI1_HUMAN
RKRKRKSDVSSSTASL

SEQ ID NO: 25749 - protein, 16 aa, Homo sapiens
  ( 188 )...( 203 ): >FXI1_HUMAN
KRKRKSDVSSSTASLA

SEQ ID NO: 25750 - protein, 16 aa, Homo sapiens
  ( 261 )...( 276 ): >FXO1_HUMAN
SKFAKSRSRAAKKKAS

SEQ ID NO: 25751 - protein, 16 aa, Homo sapiens
  ( 262 )...( 277 ): >FXO1_HUMAN
KFAKSRSRAAKKKASL

SEQ ID NO: 25752 - protein, 16 aa, Homo sapiens
  ( 263 )...( 278 ): >FXO1_HUMAN
FAKSRSRAAKKKASLQ

SEQ ID NO: 25753 - protein, 16 aa, Homo sapiens
  ( 264 )...( 279 ): >FXO1_HUMAN
AKSRSRAAKKKASLQS

SEQ ID NO: 25754 - protein, 16 aa, Homo sapiens
  ( 265 )...( 280 ): >FXO1_HUMAN
KSRSRAAKKKASLQSG

SEQ ID NO: 25755 - protein, 16 aa, Homo sapiens
  ( 266 )...( 281 ): >FXO1_HUMAN
SRSRAAKKKASLQSGQ

SEQ ID NO: 25756 - protein, 16 aa, Homo sapiens
  ( 267 )...( 282 ): >FXO1_HUMAN
RSRAAKKKASLQSGQE

SEQ ID NO: 25757 - protein, 16 aa, Homo sapiens
  ( 235 )...( 250 ): >FXO3_HUMAN
IINPDGGKSGKAPRRR

SEQ ID NO: 25758 - protein, 16 aa, Homo sapiens
  ( 257 )...( 272 ): >FXO3_HUMAN
SNKYTKSRGRAAKKKA

SEQ ID NO: 25759 - protein, 16 aa, Homo sapiens
  ( 258 )...( 273 ): >FXO3_HUMAN
NKYTKSRGRAAKKKAA

SEQ ID NO: 25760 - protein, 16 aa, Homo sapiens
  ( 259 )...( 274 ): >FXO3_HUMAN
KYTKSRGRAAKKKAAL

SEQ ID NO: 25761 - protein, 16 aa, Homo sapiens
  ( 260 )...( 275 ): >FXO3_HUMAN
YTKSRGRAAKKKAALQ

SEQ ID NO: 25762 - protein, 16 aa, Homo sapiens
  ( 261 )...( 276 ): >FXO3_HUMAN
TKSRGRAAKKKAALQT

SEQ ID NO: 25763 - protein, 16 aa, Homo sapiens
  ( 262 )...( 277 ): >FXO3_HUMAN
KSRGRAAKKKAALQTA

SEQ ID NO: 25764 - protein, 16 aa, Homo sapiens
  ( 264 )...( 279 ): >FXO3_HUMAN
RGRAAKKKAALQTAPE

SEQ ID NO: 25765 - protein, 16 aa, Homo sapiens
  ( 497 )...( 512 ): >FXO3_HUMAN
STAVSAQNSRRNVMLR

SEQ ID NO: 25766 - protein, 16 aa, Homo sapiens
  ( 498 )...( 513 ): >FXO3_HUMAN
TAVSAQNSRRNVMLRN

SEQ ID NO: 25767 - protein, 16 aa, Homo sapiens
  ( 283 )...( 298 ): >GABA_HUMAN
TIKVINSSAKAAKVQR

SEQ ID NO: 25768 - protein, 16 aa, Homo sapiens
  ( 284 )...( 299 ): >GABA_HUMAN
IKVINSSAKAAKVQRA

SEQ ID NO: 25769 - protein, 16 aa, Homo sapiens
  ( 285 )...( 300 ): >GABA_HUMAN
KVINSSAKAAKVQRAP

SEQ ID NO: 25770 - protein, 16 aa, Homo sapiens
  ( 286 )...( 301 ): >GABA_HUMAN
VINSSAKAAKVQRAPR

SEQ ID NO: 25771 - protein, 16 aa, Homo sapiens
  ( 287 )...( 302 ): >GABA_HUMAN
INSSAKAAKVQRAPRI

SEQ ID NO: 25772 - protein, 16 aa, Homo sapiens
  ( 290 )...( 305 ): >GABA_HUMAN
SAKAAKVQRAPRISGE

SEQ ID NO: 25773 - protein, 16 aa, Homo sapiens
  ( 292 )...( 307 ): >GABA_HUMAN
KAAKVQRAPRISGEDR

SEQ ID NO: 25774 - protein, 16 aa, Homo sapiens
  ( 354 )...( 369 ): >GABA_HUMAN
ELVAQKWGQRKNKPTM

SEQ ID NO: 25775 - protein, 16 aa, Homo sapiens
  ( 385 )...( 400 ): >GABA_HUMAN
DMICKVQGKRFVYKFV

SEQ ID NO: 25776 - protein, 16 aa, Homo sapiens
  ( 389 )...( 404 ): >GABA_HUMAN
KVQGKRFVYKFVCDLK

SEQ ID NO: 25777 - protein, 16 aa, Homo sapiens
  ( 390 )...( 405 ): >GABA_HUMAN
VQGKRFVYKFVCDLKT

SEQ ID NO: 25778 - protein, 16 aa, Homo sapiens
  ( 391 )...( 406 ): >GABA_HUMAN
QGKRFVYKFVCDLKTL

SEQ ID NO: 25779 - protein, 16 aa, Homo sapiens
  ( 392 )...( 407 ): >GABA_HUMAN
GKRFVYKFVCDLKTLI

SEQ ID NO: 25780 - protein, 16 aa, Homo sapiens
  ( 393 )...( 408 ): >GABA_HUMAN
KRFVYKFVCDLKTLIG

SEQ ID NO: 25781 - protein, 16 aa, Homo sapiens
  ( 57 )...( 72 ): >GABB_HUMAN
LLRAGVSRDARTKVDR

SEQ ID NO: 25782 - protein, 16 aa, Homo sapiens
  ( 58 )...( 73 ): >GABB_HUMAN
LRAGVSRDARTKVDRT

SEQ ID NO: 25783 - protein, 16 aa, Homo sapiens
  ( 59 )...( 74 ): >GABB_HUMAN
RAGVSRDARTKVDRTP

SEQ ID NO: 25784 - protein, 16 aa, Homo sapiens
  ( 57 )...( 72 ): >GABC_HUMAN
LLRAGVSRDARTKVDR

SEQ ID NO: 25785 - protein, 16 aa, Homo sapiens
  ( 58 )...( 73 ): >GABC_HUMAN
LRAGVSRDARTKVDRT

SEQ ID NO: 25786 - protein, 16 aa, Homo sapiens
  ( 59 )...( 74 ): >GABC_HUMAN
RAGVSRDARTKVDRTP

SEQ ID NO: 25787 - protein, 16 aa, Homo sapiens
  ( 239 )...( 254 ): >GBX2_HUMAN
GSTTSTGKNRRRRTAF

SEQ ID NO: 25788 - protein, 16 aa, Homo sapiens
  ( 240 )...( 255 ): >GBX2_HUMAN
STTSTGKNRRRRTAFT

SEQ ID NO: 25789 - protein, 16 aa, Homo sapiens
  ( 241 )...( 256 ): >GBX2_HUMAN
TTSTGKNRRRRTAFTS

SEQ ID NO: 25790 - protein, 16 aa, Homo sapiens
  ( 242 )...( 257 ): >GBX2_HUMAN
TSTGKNRRRRTAFTSE

SEQ ID NO: 25791 - protein, 16 aa, Homo sapiens
  ( 244 )...( 259 ): >GBX2_HUMAN
TGKNRRRRTAFTSEQL

SEQ ID NO: 25792 - protein, 16 aa, Homo sapiens
  ( 299 )...( 314 ): >GBX2_HUMAN
RAKWKRVKAGNANSKT

SEQ ID NO: 25793 - protein, 16 aa, Homo sapiens
  ( 300 )...( 315 ): >GBX2_HUMAN
AKWKRVKAGNANSKTG

SEQ ID NO: 25794 - protein, 16 aa, Homo sapiens
  ( 301 )...( 316 ): >GBX2_HUMAN
KWKRVKAGNANSKTGE

SEQ ID NO: 25795 - protein, 16 aa, Homo sapiens
  ( 318 )...( 333 ): >GBX2_HUMAN
SRNPKIVVPIPVHVSR

SEQ ID NO: 25796 - protein, 16 aa, Homo sapiens
  ( 319 )...( 334 ): >GBX2_HUMAN
RNPKIVVPIPVHVSRF

SEQ ID NO: 25797 - protein, 16 aa, Homo sapiens
  ( 322 )...( 337 ): >GBX2_HUMAN
KIVVPIPVHVSRFAIR

SEQ ID NO: 25798 - protein, 16 aa, Homo sapiens
  ( 82 )...( 97 ): >GCFC_HUMAN
GAEPGNGLKPRKRPRE

SEQ ID NO: 25799 - protein, 16 aa, Homo sapiens
  ( 118 )...( 133 ): >GCFC_HUMAN
EVFKVKKSSYSKKIVK

SEQ ID NO: 25800 - protein, 16 aa, Homo sapiens
  ( 119 )...( 134 ): >GCFC_HUMAN
VFKVKKSSYSKKIVKL

SEQ ID NO: 25801 - protein, 16 aa, Homo sapiens
  ( 120 )...( 135 ): >GCFC_HUMAN
FKVKKSSYSKKIVKLL

SEQ ID NO: 25802 - protein, 16 aa, Homo sapiens
  ( 121 )...( 136 ): >GCFC_HUMAN
KVKKSSYSKKIVKLLK

SEQ ID NO: 25803 - protein, 16 aa, Homo sapiens
  ( 122 )...( 137 ): >GCFC_HUMAN
VKKSSYSKKIVKLLKK

SEQ ID NO: 25804 - protein, 16 aa, Homo sapiens
  ( 123 )...( 138 ): >GCFC_HUMAN
KKSSYSKKIVKLLKKE

SEQ ID NO: 25805 - protein, 16 aa, Homo sapiens
  ( 219 )...( 234 ): >GCFC_HUMAN
IPDAAFIHAARKKRQM

SEQ ID NO: 25806 - protein, 16 aa, Homo sapiens
  ( 224 )...( 239 ): >GCFC_HUMAN
FIHAARKKRQMARELG

SEQ ID NO: 25807 - protein, 16 aa, Homo sapiens
  ( 225 )...( 240 ): >GCFC_HUMAN
IHAARKKRQMARELGD

SEQ ID NO: 25808 - protein, 16 aa, Homo sapiens
  ( 227 )...( 242 ): >GCFC_HUMAN
AARKKRQMARELGDFT

SEQ ID NO: 25809 - protein, 16 aa, Homo sapiens
  ( 272 )...( 287 ): >GCFC_HUMAN
RIVFSVKEKSQRQKIA

SEQ ID NO: 25810 - protein, 16 aa, Homo sapiens
  ( 470 )...( 485 ): >GCFC_HUMAN
SAIHQLYKQRASRLVQ

SEQ ID NO: 25811 - protein, 16 aa, Homo sapiens
  ( 728 )...( 743 ): >GCFC_HUMAN
NTQVYLKALLLRMRRT

SEQ ID NO: 25812 - protein, 16 aa, Homo sapiens
  ( 729 )...( 744 ): >GCFC_HUMAN
TQVYLKALLLRMRRTL

SEQ ID NO: 25813 - protein, 16 aa, Homo sapiens
  ( 730 )...( 745 ): >GCFC_HUMAN
QVYLKALLLRMRRTLD

SEQ ID NO: 25814 - protein, 16 aa, Homo sapiens
  ( 873 )...( 888 ): >GCFC_HUMAN
VEKRNARENIKQIVKL

SEQ ID NO: 25815 - protein, 16 aa, Homo sapiens
  ( 875 )...( 890 ): >GCFC_HUMAN
KRNARENIKQIVKLLA

SEQ ID NO: 25816 - protein, 16 aa, Homo sapiens
  ( 876 )...( 891 ): >GCFC_HUMAN
RNARENIKQIVKLLAS

SEQ ID NO: 25817 - protein, 16 aa, Homo sapiens
  ( 878 )...( 893 ): >GCFC_HUMAN
ARENIKQIVKLLASVR

SEQ ID NO: 25818 - protein, 16 aa, Homo sapiens
  ( 879 )...( 894 ): >GCFC_HUMAN
RENIKQIVKLLASVRA

SEQ ID NO: 25819 - protein, 16 aa, Homo sapiens
  ( 223 )...( 238 ): >GFI1_HUMAN
PERGHRLHANKGAGVK

SEQ ID NO: 25820 - protein, 16 aa, Homo sapiens
  ( 224 )...( 239 ): >GFI1_HUMAN
ERGHRLHANKGAGVKV

SEQ ID NO: 25821 - protein, 16 aa, Homo sapiens
  ( 225 )...( 240 ): >GFI1_HUMAN
RGHRLHANKGAGVKVE

SEQ ID NO: 25822 - protein, 16 aa, Homo sapiens
  ( 198 )...( 213 ): >GSH2_HUMAN
QVPNGKRMRTAFTSTQ

SEQ ID NO: 25823 - protein, 16 aa, Homo sapiens
  ( 199 )...( 214 ): >GSH2_HUMAN
VPNGKRMRTAFTSTQL

SEQ ID NO: 25824 - protein, 16 aa, Homo sapiens
  ( 200 )...( 215 ): >GSH2_HUMAN
PNGKRMRTAFTSTQLL

SEQ ID NO: 25825 - protein, 16 aa, Homo sapiens
  ( 87 )...( 102 ): >GT4R_HUMAN
HIPVPAQRATPGKARL

SEQ ID NO: 25826 - protein, 16 aa, Homo sapiens
  ( 179 )...( 194 ): >GT4R_HUMAN
AAHFLFGEPTLRKRKS

SEQ ID NO: 25827 - protein, 16 aa, Homo sapiens
  ( 182 )...( 197 ): >GT4R_HUMAN
FLFGEPTLRKRKSPAQ

SEQ ID NO: 25828 - protein, 16 aa, Homo sapiens
  ( 183 )...( 198 ): >GT4R_HUMAN
LFGEPTLRKRKSPAQV

SEQ ID NO: 25829 - protein, 16 aa, Homo sapiens
  ( 184 )...( 199 ): >GT4R_HUMAN
FGEPTLRKRKSPAQVM

SEQ ID NO: 25830 - protein, 16 aa, Homo sapiens
  ( 185 )...( 200 ): >GT4R_HUMAN
GEPTLRKRKSPAQVMF

SEQ ID NO: 25831 - protein, 16 aa, Homo sapiens
  ( 188 )...( 203 ): >GT4R_HUMAN
TLRKRKSPAQVMFQCL

SEQ ID NO: 25832 - protein, 16 aa, Homo sapiens
  ( 208 )...( 223 ): >GT4R_HUMAN
GKVLSTASAMQRHIRL

SEQ ID NO: 25833 - protein, 16 aa, Homo sapiens
  ( 209 )...( 224 ): >GT4R_HUMAN
KVLSTASAMQRHIRLV

SEQ ID NO: 25834 - protein, 16 aa, Homo sapiens
  ( 213 )...( 228 ): >GT4R_HUMAN
TASAMQRHIRLVHLGR

SEQ ID NO: 25835 - protein, 16 aa, Homo sapiens
  ( 214 )...( 229 ): >GT4R_HUMAN
ASAMQRHIRLVHLGRQ

SEQ ID NO: 25836 - protein, 16 aa, Homo sapiens
  ( 215 )...( 230 ): >GT4R_HUMAN
SAMQRHIRLVHLGRQA

SEQ ID NO: 25837 - protein, 16 aa, Homo sapiens
  ( 339 )...( 354 ): >GT4R_HUMAN
PPALSSRIGVTLRKPR

SEQ ID NO: 25838 - protein, 16 aa, Homo sapiens
  ( 340 )...( 355 ): >GT4R_HUMAN
PALSSRIGVTLRKPRG

SEQ ID NO: 25839 - protein, 16 aa, Homo sapiens
  ( 341 )...( 356 ): >GT4R_HUMAN
ALSSRIGVTLRKPRGD

SEQ ID NO: 25840 - protein, 16 aa, Homo sapiens
  ( 342 )...( 357 ): >GT4R_HUMAN
LSSRIGVTLRKPRGDA

SEQ ID NO: 25841 - protein, 16 aa, Homo sapiens
  ( 343 )...( 358 ): >GT4R_HUMAN
SSRIGVTLRKPRGDAK

SEQ ID NO: 25842 - protein, 16 aa, Homo sapiens
  ( 344 )...( 359 ): >GT4R_HUMAN
SRIGVTLRKPRGDAKK

SEQ ID NO: 25843 - protein, 16 aa, Homo sapiens
  ( 345 )...( 360 ): >GT4R_HUMAN
RIGVTLRKPRGDAKKC

SEQ ID NO: 25844 - protein, 16 aa, Homo sapiens
  ( 346 )...( 361 ): >GT4R_HUMAN
IGVTLRKPRGDAKKCR

SEQ ID NO: 25845 - protein, 16 aa, Homo sapiens
  ( 347 )...( 362 ): >GT4R_HUMAN
GVTLRKPRGDAKKCRK

SEQ ID NO: 25846 - protein, 16 aa, Homo sapiens
  ( 348 )...( 363 ): >GT4R_HUMAN
VTLRKPRGDAKKCRKV

SEQ ID NO: 25847 - protein, 16 aa, Homo sapiens
  ( 350 )...( 365 ): >GT4R_HUMAN
LRKPRGDAKKCRKVYG

SEQ ID NO: 25848 - protein, 16 aa, Homo sapiens
  ( 351 )...( 366 ): >GT4R_HUMAN
RKPRGDAKKCRKVYGM

SEQ ID NO: 25849 - protein, 16 aa, Homo sapiens
  ( 352 )...( 367 ): >GT4R_HUMAN
KPRGDAKKCRKVYGME

SEQ ID NO: 25850 - protein, 16 aa, Homo sapiens
  ( 353 )...( 368 ): >GT4R_HUMAN
PRGDAKKCRKVYGMER

SEQ ID NO: 25851 - protein, 16 aa, Homo sapiens
  ( 355 )...( 370 ): >GT4R_HUMAN
GDAKKCRKVYGMERRD

SEQ ID NO: 25852 - protein, 16 aa, Homo sapiens
  ( 400 )...( 415 ): >HAIR_HUMAN
VEERPVARLRALKRAG

SEQ ID NO: 25853 - protein, 16 aa, Homo sapiens
  ( 401 )...( 416 ): >HAIR_HUMAN
EERPVARLRALKRAGS

SEQ ID NO: 25854 - protein, 16 aa, Homo sapiens
  ( 402 )...( 417 ): >HAIR_HUMAN
ERPVARLRALKRAGSP

SEQ ID NO: 25855 - protein, 16 aa, Homo sapiens
  ( 403 )...( 418 ): >HAIR_HUMAN
RPVARLRALKRAGSPE

SEQ ID NO: 25856 - protein, 16 aa, Homo sapiens
  ( 404 )...( 419 ): >HAIR_HUMAN
PVARLRALKRAGSPEV

SEQ ID NO: 25857 - protein, 16 aa, Homo sapiens
  ( 405 )...( 420 ): >HAIR_HUMAN
VARLRALKRAGSPEVQ

SEQ ID NO: 25858 - protein, 16 aa, Homo sapiens
  ( 406 )...( 421 ): >HAIR_HUMAN
ARLRALKRAGSPEVQG

SEQ ID NO: 25859 - protein, 16 aa, Homo sapiens
  ( 407 )...( 422 ): >HAIR_HUMAN
RLRALKRAGSPEVQGA

SEQ ID NO: 25860 - protein, 16 aa, Homo sapiens
  ( 556 )...( 571 ): >HAIR_HUMAN
KHLLSGLGDRLCRLLR

SEQ ID NO: 25861 - protein, 16 aa, Homo sapiens
  ( 557 )...( 572 ): >HAIR_HUMAN
HLLSGLGDRLCRLLRR

SEQ ID NO: 25862 - protein, 16 aa, Homo sapiens
  ( 559 )...( 574 ): >HAIR_HUMAN
LSGLGDRLCRLLRRER

SEQ ID NO: 25863 - protein, 16 aa, Homo sapiens
  ( 626 )...( 641 ): >HAIR_HUMAN
GRVAGTGRAREKAGFQ

SEQ ID NO: 25864 - protein, 16 aa, Homo sapiens
  ( 807 )...( 822 ): >HAIR_HUMAN
RKIQEKALGPGLRAGP

SEQ ID NO: 25865 - protein, 16 aa, Homo sapiens
  ( 823 )...( 838 ): >HAIR_HUMAN
GLRKGLGLPLSPVRPR

SEQ ID NO: 25866 - protein, 16 aa, Homo sapiens
  ( 824 )...( 839 ): >HAIR_HUMAN
LRKGLGLPLSPVRPRL

SEQ ID NO: 25867 - protein, 16 aa, Homo sapiens
  ( 825 )...( 840 ): >HAIR_HUMAN
RKGLGLPLSPVRPRLP

SEQ ID NO: 25868 - protein, 16 aa, Homo sapiens
  ( 1062 )...( 1077 ): >HAIR_HUMAN
AQRIRRFLQMVCPAGA

SEQ ID NO: 25869 - protein, 16 aa, Homo sapiens
  ( 1063 )...( 1078 ): >HAIR_HUMAN
QRIRRFLQMVCPAGAG

SEQ ID NO: 25870 - protein, 16 aa, Homo sapiens
  ( 80 )...( 95 ): >HAN1_HUMAN
QSPGRLEALGGRLGRR

SEQ ID NO: 25871 - protein, 16 aa, Homo sapiens
  ( 81 )...( 96 ): >HAN1_HUMAN
SPGRLEALGGRLGRRK

SEQ ID NO: 25872 - protein, 16 aa, Homo sapiens
  ( 82 )...( 97 ): >HAN1_HUMAN
PGRLEALGGRLGRRKG

SEQ ID NO: 25873 - protein, 16 aa, Homo sapiens
  ( 83 )...( 98 ): >HAN1_HUMAN
GRLEALGGRLGRRKGS

SEQ ID NO: 25874 - protein, 16 aa, Homo sapiens
  ( 84 )...( 99 ): >HAN1_HUMAN
RLEALGGRLGRRKGSG

SEQ ID NO: 25875 - protein, 16 aa, Homo sapiens
  ( 88 )...( 103 ): >HAN1_HUMAN
LGGRLGRRKGSGPKKE

SEQ ID NO: 25876 - protein, 16 aa, Homo sapiens
  ( 96 )...( 111 ): >HAN1_HUMAN
KGSGPKKERRRTESIN

SEQ ID NO: 25877 - protein, 16 aa, Homo sapiens
  ( 98 )...( 113 ): >HAN1_HUMAN
SGPKKERRRTESINSA

SEQ ID NO: 25878 - protein, 16 aa, Homo sapiens
  ( 128 )...( 143 ): >HAN1_HUMAN
TKLSKIKTLRLATSYI

SEQ ID NO: 25879 - protein, 16 aa, Homo sapiens
  ( 129 )...( 144 ): >HAN1_HUMAN
KLSKIKTLRLATSYIA

SEQ ID NO: 25880 - protein, 16 aa, Homo sapiens
  ( 132 )...( 147 ): >HAN1_HUMAN
KIKTLRLATSYIAYLM

SEQ ID NO: 25881 - protein, 16 aa, Homo sapiens
  ( 162 )...( 177 ): >HAN1_HUMAN
FKAELKKADGGRESKR

SEQ ID NO: 25882 - protein, 16 aa, Homo sapiens
  ( 166 )...( 181 ): >HAN1_HUMAN
LKKADGGRESKRKREL

SEQ ID NO: 25883 - protein, 16 aa, Homo sapiens
  ( 187 )...( 202 ): >HAN1_HUMAN
FPPALGPVEKRIKGRT

SEQ ID NO: 25884 - protein, 16 aa, Homo sapiens
  ( 188 )...( 203 ): >HAN1_HUMAN
PPALGPVEKRIKGRTG

SEQ ID NO: 25885 - protein, 16 aa, Homo sapiens
  ( 189 )...( 204 ): >HAN1_HUMAN
PALGPVEKRIKGRTGW

SEQ ID NO: 25886 - protein, 16 aa, Homo sapiens
  ( 190 )...( 205 ): >HAN1_HUMAN
ALGPVEKRIKGRTGWP

SEQ ID NO: 25887 - protein, 16 aa, Homo sapiens
  ( 191 )...( 206 ): >HAN1_HUMAN
LGPVEKRIKGRTGWPQ

SEQ ID NO: 25888 - protein, 16 aa, Homo sapiens
  ( 192 )...( 207 ): >HAN1_HUMAN
GPVEKRIKGRTGWPQQ

SEQ ID NO: 25889 - protein, 16 aa, Homo sapiens
  ( 193 )...( 208 ): >HAN1_HUMAN
PVEKRIKGRTGWPQQV

SEQ ID NO: 25890 - protein, 16 aa, Homo sapiens
  ( 194 )...( 209 ): >HAN1_HUMAN
VEKRIKGRTGWPQQVW

SEQ ID NO: 25891 - protein, 16 aa, Homo sapiens
  ( 195 )...( 210 ): >HAN1_HUMAN
EKRIKGRTGWPQQVWA

SEQ ID NO: 25892 - protein, 16 aa, Homo sapiens
  ( 196 )...( 211 ): >HAN1_HUMAN
KRIKGRTGWPQQVWAL

SEQ ID NO: 25893 - protein, 16 aa, Homo sapiens
  ( 91 )...( 106 ): >HAN2_HUMAN
GLGGPRPVKRRGTANR

SEQ ID NO: 25894 - protein, 16 aa, Homo sapiens
  ( 93 )...( 108 ): >HAN2_HUMAN
GGPRPVKRRGTANRKE

SEQ ID NO: 25895 - protein, 16 aa, Homo sapiens
  ( 133 )...( 148 ): >HAN2_HUMAN
TKLSKIKTLRLATSYI

SEQ ID NO: 25896 - protein, 16 aa, Homo sapiens
  ( 134 )...( 149 ): >HAN2_HUMAN
KLSKIKTLRLATSYIA

SEQ ID NO: 25897 - protein, 16 aa, Homo sapiens
  ( 137 )...( 152 ): >HAN2_HUMAN
KIKTLRLATSYIAYLM

SEQ ID NO: 25898 - protein, 16 aa, Homo sapiens
  ( 188 )...( 203 ): >HAN2_HUMAN
ILKSTVSSNDKKTKGR

SEQ ID NO: 25899 - protein, 16 aa, Homo sapiens
  ( 197 )...( 212 ): >HAN2_HUMAN
DKKTKGRTGWPQHVWA

SEQ ID NO: 25900 - protein, 16 aa, Homo sapiens
  ( 198 )...( 213 ): >HAN2_HUMAN
KKTKGRTGWPQHVWAL

SEQ ID NO: 25901 - protein, 16 aa, Homo sapiens
  ( 232 )...( 247 ): >HB9_HUMAN
SQAQSNLLGKCRRPRT

SEQ ID NO: 25902 - protein, 16 aa, Homo sapiens
  ( 233 )...( 248 ): >HB9_HUMAN
QAQSNLLGKCRRPRTA

SEQ ID NO: 25903 - protein, 16 aa, Homo sapiens
  ( 235 )...( 250 ): >HB9_HUMAN
QSNLLGKCRRPRTAFT

SEQ ID NO: 25904 - protein, 16 aa, Homo sapiens
  ( 237 )...( 252 ): >HB9_HUMAN
NLLGKCRRPRTAFTSQ

SEQ ID NO: 25905 - protein, 16 aa, Homo sapiens
  ( 238 )...( 253 ): >HB9_HUMAN
LLGKCRRPRTAFTSQQ

SEQ ID NO: 25906 - protein, 16 aa, Homo sapiens
  ( 239 )...( 254 ): >HB9_HUMAN
LGKCRRPRTAFTSQQL

SEQ ID NO: 25907 - protein, 16 aa, Homo sapiens
  ( 240 )...( 255 ): >HB9_HUMAN
GKCRRPRTAFTSQQLL

SEQ ID NO: 25908 - protein, 16 aa, Homo sapiens
  ( 241 )...( 256 ): >HB9_HUMAN
KCRRPRTAFTSQQLLE

SEQ ID NO: 25909 - protein, 16 aa, Homo sapiens
  ( 265 )...( 280 ): >HB9_HUMAN
KYLSRPKRFEVATSLM

SEQ ID NO: 25910 - protein, 16 aa, Homo sapiens
  ( 71 )...( 86 ): >HEN1_HUMAN
RATAKYRTAHATRERI

SEQ ID NO: 25911 - protein, 16 aa, Homo sapiens
  ( 72 )...( 87 ): >HEN1_HUMAN
ATAKYRTAHATRERIR

SEQ ID NO: 25912 - protein, 16 aa, Homo sapiens
  ( 73 )...( 88 ): >HEN1_HUMAN
TAKYRTAHATRERIRV

SEQ ID NO: 25913 - protein, 16 aa, Homo sapiens
  ( 98 )...( 113 ): >HEN1_HUMAN
LRKLLPTLPPDKKLSK

SEQ ID NO: 25914 - protein, 16 aa, Homo sapiens
  ( 99 )...( 114 ): >HEN1_HUMAN
RKLLPTLPPDKKLSKI

SEQ ID NO: 25915 - protein, 16 aa, Homo sapiens
  ( 109 )...( 124 ): >HEN1_HUMAN
KKLSKIEILRLAICYI

SEQ ID NO: 25916 - protein, 16 aa, Homo sapiens
  ( 73 )...( 88 ): >HEN2_HUMAN
RATAKYRSAHATRERI

SEQ ID NO: 25917 - protein, 16 aa, Homo sapiens
  ( 74 )...( 89 ): >HEN2_HUMAN
ATAKYRSAHATRERIR

SEQ ID NO: 25918 - protein, 16 aa, Homo sapiens
  ( 75 )...( 90 ): >HEN2_HUMAN
TAKYRSAHATRERIRV

SEQ ID NO: 25919 - protein, 16 aa, Homo sapiens
  ( 100 )...( 115 ): >HEN2_HUMAN
LRKLLPTLPPDKKLSK

SEQ ID NO: 25920 - protein, 16 aa, Homo sapiens
  ( 101 )...( 116 ): >HEN2_HUMAN
RKLLPTLPPDKKLSKI

SEQ ID NO: 25921 - protein, 16 aa, Homo sapiens
  ( 111 )...( 126 ): >HEN2_HUMAN
KKLSKIEILRLAICYI

SEQ ID NO: 25922 - protein, 16 aa, Homo sapiens
  ( 3 )...( 18 ): >HES2_HUMAN
LPRRAGDAAELRKSLK

SEQ ID NO: 25923 - protein, 16 aa, Homo sapiens
  ( 4 )...( 19 ): >HES2_HUMAN
PRRAGDAAELRKSLKP

SEQ ID NO: 25924 - protein, 16 aa, Homo sapiens
  ( 5 )...( 20 ): >HES2_HUMAN
RRAGDAAELRKSLKPL

SEQ ID NO: 25925 - protein, 16 aa, Homo sapiens
  ( 24 )...( 39 ): >HES2_HUMAN
RRRARINQSLSQLKGL

SEQ ID NO: 25926 - protein, 16 aa, Homo sapiens
  ( 25 )...( 40 ): >HES2_HUMAN
RRARINQSLSQLKGLI

SEQ ID NO: 25927 - protein, 16 aa, Homo sapiens
  ( 26 )...( 41 ): >HES2_HUMAN
RARINQSLSQLKGLIL

SEQ ID NO: 25928 - protein, 16 aa, Homo sapiens
  ( 38 )...( 53 ): >HEY1_HUMAN
SMSPTTSSQILARKRR

SEQ ID NO: 25929 - protein, 16 aa, Homo sapiens
  ( 39 )...( 54 ): >HEY1_HUMAN
MSPTTSSQILARKRRR

SEQ ID NO: 25930 - protein, 16 aa, Homo sapiens
  ( 40 )...( 55 ): >HEY1_HUMAN
SPTTSSQILARKRRRG

SEQ ID NO: 25931 - protein, 16 aa, Homo sapiens
  ( 41 )...( 56 ): >HEY1_HUMAN
PTTSSQILARKRRRGI

SEQ ID NO: 25932 - protein, 16 aa, Homo sapiens
  ( 42 )...( 57 ): >HEY1_HUMAN
TTSSQILARKRRRGII

SEQ ID NO: 25933 - protein, 16 aa, Homo sapiens
  ( 43 )...( 58 ): >HEY1_HUMAN
TSSQILARKRRRGIIE

SEQ ID NO: 25934 - protein, 16 aa, Homo sapiens
  ( 44 )...( 59 ): >HEY1_HUMAN
SSQILARKRRRGIIEK

SEQ ID NO: 25935 - protein, 16 aa, Homo sapiens
  ( 72 )...( 87 ): >HEY1_HUMAN
LRRLVPSAFEKQGSAK

SEQ ID NO: 25936 - protein, 16 aa, Homo sapiens
  ( 73 )...( 88 ): >HEY1_HUMAN
RRLVPSAFEKQGSAKL

SEQ ID NO: 25937 - protein, 16 aa, Homo sapiens
  ( 31 )...( 46 ): >HIC1_HUMAN
RQLLLQLNNQRTKGFL

SEQ ID NO: 25938 - protein, 16 aa, Homo sapiens
  ( 135 )...( 150 ): >HIC1_HUMAN
YLQIPDLVALCKKRLK

SEQ ID NO: 25939 - protein, 16 aa, Homo sapiens
  ( 136 )...( 151 ): >HIC1_HUMAN
LQIPDLVALCKKRLKR

SEQ ID NO: 25940 - protein, 16 aa, Homo sapiens
  ( 137 )...( 152 ): >HIC1_HUMAN
QIPDLVALCKKRLKRH

SEQ ID NO: 25941 - protein, 16 aa, Homo sapiens
  ( 138 )...( 153 ): >HIC1_HUMAN
IPDLVALCKKRLKRHG

SEQ ID NO: 25942 - protein, 16 aa, Homo sapiens
  ( 139 )...( 154 ): >HIC1_HUMAN
PDLVALCKKRLKRHGK

SEQ ID NO: 25943 - protein, 16 aa, Homo sapiens
  ( 140 )...( 155 ): >HIC1_HUMAN
DLVALCKKRLKRHGKY

SEQ ID NO: 25944 - protein, 16 aa, Homo sapiens
  ( 141 )...( 156 ): >HIC1_HUMAN
LVALCKKRLKRHGKYC

SEQ ID NO: 25945 - protein, 16 aa, Homo sapiens
  ( 142 )...( 157 ): >HIC1_HUMAN
VALCKKRLKRHGKYCH

SEQ ID NO: 25946 - protein, 16 aa, Homo sapiens
  ( 147 )...( 162 ): >HIC1_HUMAN
KRLKRHGKYCHLRGGG

SEQ ID NO: 25947 - protein, 16 aa, Homo sapiens
  ( 148 )...( 163 ): >HIC1_HUMAN
RLKRHGKYCHLRGGGG

SEQ ID NO: 25948 - protein, 16 aa, Homo sapiens
  ( 171 )...( 186 ): >HIC1_HUMAN
YGRPGRGLRAATPVIQ

SEQ ID NO: 25949 - protein, 16 aa, Homo sapiens
  ( 175 )...( 190 ): >HIC1_HUMAN
GRGLRAATPVIQACYR

SEQ ID NO: 25950 - protein, 16 aa, Homo sapiens
  ( 537 )...( 552 ): >HIC1_HUMAN
CTICGKKFTQRGTMTR

SEQ ID NO: 25951 - protein, 16 aa, Homo sapiens
  ( 538 )...( 553 ): >HIC1_HUMAN
TICGKKFTQRGTMTRH

SEQ ID NO: 25952 - protein, 16 aa, Homo sapiens
  ( 539 )...( 554 ): >HIC1_HUMAN
ICGKKFTQRGTMTRHM

SEQ ID NO: 25953 - protein, 16 aa, Homo sapiens
  ( 540 )...( 555 ): >HIC1_HUMAN
CGKKFTQRGTMTRHMR

SEQ ID NO: 25954 - protein, 16 aa, Homo sapiens
  ( 541 )...( 556 ): >HIC1_HUMAN
GKKFTQRGTMTRHMRS

SEQ ID NO: 25955 - protein, 16 aa, Homo sapiens
  ( 546 )...( 561 ): >HIC1_HUMAN
QRGTMTRHMRSHLGLK

SEQ ID NO: 25956 - protein, 16 aa, Homo sapiens
  ( 547 )...( 562 ): >HIC1_HUMAN
RGTMTRHMRSHLGLKP

SEQ ID NO: 25957 - protein, 16 aa, Homo sapiens
  ( 29 )...( 44 ): >HIC2_HUMAN
SKQLLLQLNQQRTKGF

SEQ ID NO: 25958 - protein, 16 aa, Homo sapiens
  ( 30 )...( 45 ): >HIC2_HUMAN
KQLLLQLNQQRTKGFL

SEQ ID NO: 25959 - protein, 16 aa, Homo sapiens
  ( 125 )...( 140 ): >HIC2_HUMAN
YLQLPELAALCRRKLK

SEQ ID NO: 25960 - protein, 16 aa, Homo sapiens
  ( 126 )...( 141 ): >HIC2_HUMAN
LQLPELAALCRRKLKR

SEQ ID NO: 25961 - protein, 16 aa, Homo sapiens
  ( 127 )...( 142 ): >HIC2_HUMAN
QLPELAALCRRKLKRA

SEQ ID NO: 25962 - protein, 16 aa, Homo sapiens
  ( 128 )...( 143 ): >HIC2_HUMAN
LPELAALCRRKLKRAG

SEQ ID NO: 25963 - protein, 16 aa, Homo sapiens
  ( 129 )...( 144 ): >HIC2_HUMAN
PELAALCRRKLKRAGK

SEQ ID NO: 25964 - protein, 16 aa, Homo sapiens
  ( 130 )...( 145 ): >HIC2_HUMAN
ELAALCRRKLKRAGKP

SEQ ID NO: 25965 - protein, 16 aa, Homo sapiens
  ( 131 )...( 146 ): >HIC2_HUMAN
LAALCRRKLKRAGKPF

SEQ ID NO: 25966 - protein, 16 aa, Homo sapiens
  ( 132 )...( 147 ): >HIC2_HUMAN
AALCRRKLKRAGKPFG

SEQ ID NO: 25967 - protein, 16 aa, Homo sapiens
  ( 133 )...( 148 ): >HIC2_HUMAN
ALCRRKLKRAGKPFGS

SEQ ID NO: 25968 - protein, 16 aa, Homo sapiens
  ( 134 )...( 149 ): >HIC2_HUMAN
LCRRKLKRAGKPFGSG

SEQ ID NO: 25969 - protein, 16 aa, Homo sapiens
  ( 137 )...( 152 ): >HIC2_HUMAN
RKLKRAGKPFGSGRAG

SEQ ID NO: 25970 - protein, 16 aa, Homo sapiens
  ( 150 )...( 165 ): >HIC2_HUMAN
RAGSTGMGRPPRSQRL

SEQ ID NO: 25971 - protein, 16 aa, Homo sapiens
  ( 156 )...( 171 ): >HIC2_HUMAN
MGRPPRSQRLSTASVI

SEQ ID NO: 25972 - protein, 16 aa, Homo sapiens
  ( 157 )...( 172 ): >HIC2_HUMAN
GRPPRSQRLSTASVIQ

SEQ ID NO: 25973 - protein, 16 aa, Homo sapiens
  ( 158 )...( 173 ): >HIC2_HUMAN
RPPRSQRLSTASVIQA

SEQ ID NO: 25974 - protein, 16 aa, Homo sapiens
  ( 159 )...( 174 ): >HIC2_HUMAN
PPRSQRLSTASVIQAR

SEQ ID NO: 25975 - protein, 16 aa, Homo sapiens
  ( 160 )...( 175 ): >HIC2_HUMAN
PRSQRLSTASVIQARY

SEQ ID NO: 25976 - protein, 16 aa, Homo sapiens
  ( 161 )...( 176 ): >HIC2_HUMAN
RSQRLSTASVIQARYQ

SEQ ID NO: 25977 - protein, 16 aa, Homo sapiens
  ( 320 )...( 335 ): >HIC2_HUMAN
EAPGGQPRKSLRHSTR

SEQ ID NO: 25978 - protein, 16 aa, Homo sapiens
  ( 321 )...( 336 ): >HIC2_HUMAN
APGGQPRKSLRHSTRK

SEQ ID NO: 25979 - protein, 16 aa, Homo sapiens
  ( 322 )...( 337 ): >HIC2_HUMAN
PGGQPRKSLRHSTRKK

SEQ ID NO: 25980 - protein, 16 aa, Homo sapiens
  ( 323 )...( 338 ): >HIC2_HUMAN
GGQPRKSLRHSTRKKE

SEQ ID NO: 25981 - protein, 16 aa, Homo sapiens
  ( 334 )...( 349 ): >HIC2_HUMAN
TRKKEWGKKEPVAGSP

SEQ ID NO: 25982 - protein, 16 aa, Homo sapiens
  ( 537 )...( 552 ): >HIC2_HUMAN
ICGKMFTQRGTMTRHM

SEQ ID NO: 25983 - protein, 16 aa, Homo sapiens
  ( 538 )...( 553 ): >HIC2_HUMAN
CGKMFTQRGTMTRHMR

SEQ ID NO: 25984 - protein, 16 aa, Homo sapiens
  ( 539 )...( 554 ): >HIC2_HUMAN
GKMFTQRGTMTRHMRS

SEQ ID NO: 25985 - protein, 16 aa, Homo sapiens
  ( 544 )...( 559 ): >HIC2_HUMAN
QRGTMTRHMRSHLGLK

SEQ ID NO: 25986 - protein, 16 aa, Homo sapiens
  ( 545 )...( 560 ): >HIC2_HUMAN
RGTMTRHMRSHLGLKP

SEQ ID NO: 25987 - protein, 16 aa, Homo sapiens
  ( 594 )...( 609 ): >HIC2_HUMAN
CGGKFTQQRNLISHLR

SEQ ID NO: 25988 - protein, 16 aa, Homo sapiens
  ( 595 )...( 610 ): >HIC2_HUMAN
GGKFTQQRNLISHLRM

SEQ ID NO: 25989 - protein, 16 aa, Homo sapiens
  ( 55 )...( 70 ): >HIFA_HUMAN
DKASVMRLTISYLRVR

SEQ ID NO: 25990 - protein, 16 aa, Homo sapiens
  ( 56 )...( 71 ): >HIFA_HUMAN
KASVMRLTISYLRVRK

SEQ ID NO: 25991 - protein, 16 aa, Homo sapiens
  ( 57 )...( 72 ): >HIFA_HUMAN
ASVMRLTISYLRVRKL

SEQ ID NO: 25992 - protein, 16 aa, Homo sapiens
  ( 58 )...( 73 ): >HIFA_HUMAN
SVMRLTISYLRVRKLL

SEQ ID NO: 25993 - protein, 16 aa, Homo sapiens
  ( 59 )...( 74 ): >HIFA_HUMAN
VMRLTISYLRVRKLLD

SEQ ID NO: 25994 - protein, 16 aa, Homo sapiens
  ( 60 )...( 75 ): >HIFA_HUMAN
MRLTISYLRVRKLLDA

SEQ ID NO: 25995 - protein, 16 aa, Homo sapiens
  ( 61 )...( 76 ): >HIFA_HUMAN
RLTISYLRVRKLLDAG

SEQ ID NO: 25996 - protein, 16 aa, Homo sapiens
  ( 144 )...( 159 ): >HIFA_HUMAN
MREMLTHRNGLVKKGK

SEQ ID NO: 25997 - protein, 16 aa, Homo sapiens
  ( 145 )...( 160 ): >HIFA_HUMAN
REMLTHRNGLVKKGKE

SEQ ID NO: 25998 - protein, 16 aa, Homo sapiens
  ( 150 )...( 165 ): >HIFA_HUMAN
HRNGLVKKGKEQNTQR

SEQ ID NO: 25999 - protein, 16 aa, Homo sapiens
  ( 151 )...( 166 ): >HIFA_HUMAN
RNGLVKKGKEQNTQRS

SEQ ID NO: 26000 - protein, 16 aa, Homo sapiens
  ( 152 )...( 167 ): >HIFA_HUMAN
NGLVKKGKEQNTQRSF

SEQ ID NO: 26001 - protein, 16 aa, Homo sapiens
  ( 153 )...( 168 ): >HIFA_HUMAN
GLVKKGKEQNTQRSFF

SEQ ID NO: 26002 - protein, 16 aa, Homo sapiens
  ( 154 )...( 169 ): >HIFA_HUMAN
LVKKGKEQNTQRSFFL

SEQ ID NO: 26003 - protein, 16 aa, Homo sapiens
  ( 163 )...( 178 ): >HIFA_HUMAN
TQRSFFLRMKCTLTSR

SEQ ID NO: 26004 - protein, 16 aa, Homo sapiens
  ( 164 )...( 179 ): >HIFA_HUMAN
QRSFFLRMKCTLTSRG

SEQ ID NO: 26005 - protein, 16 aa, Homo sapiens
  ( 165 )...( 180 ): >HIFA_HUMAN
RSFFLRMKCTLTSRGR

SEQ ID NO: 26006 - protein, 16 aa, Homo sapiens
  ( 166 )...( 181 ): >HIFA_HUMAN
SFFLRMKCTLTSRGRT

SEQ ID NO: 26007 - protein, 16 aa, Homo sapiens
  ( 167 )...( 182 ): >HIFA_HUMAN
FFLRMKCTLTSRGRTM

SEQ ID NO: 26008 - protein, 16 aa, Homo sapiens
  ( 168 )...( 183 ): >HIFA_HUMAN
FLRMKCTLTSRGRTMN

SEQ ID NO: 26009 - protein, 16 aa, Homo sapiens
  ( 169 )...( 184 ): >HIFA_HUMAN
LRMKCTLTSRGRTMNI

SEQ ID NO: 26010 - protein, 16 aa, Homo sapiens
  ( 170 )...( 185 ): >HIFA_HUMAN
RMKCTLTSRGRTMNIK

SEQ ID NO: 26011 - protein, 16 aa, Homo sapiens
  ( 171 )...( 186 ): >HIFA_HUMAN
MKCTLTSRGRTMNIKS

SEQ ID NO: 26012 - protein, 16 aa, Homo sapiens
  ( 172 )...( 187 ): >HIFA_HUMAN
KCTLTSRGRTMNIKSA

SEQ ID NO: 26013 - protein, 16 aa, Homo sapiens
  ( 174 )...( 189 ): >HIFA_HUMAN
TLTSRGRTMNIKSATW

SEQ ID NO: 26014 - protein, 16 aa, Homo sapiens
  ( 175 )...( 190 ): >HIFA_HUMAN
LTSRGRTMNIKSATWK

SEQ ID NO: 26015 - protein, 16 aa, Homo sapiens
  ( 176 )...( 191 ): >HIFA_HUMAN
TSRGRTMNIKSATWKV

SEQ ID NO: 26016 - protein, 16 aa, Homo sapiens
  ( 177 )...( 192 ): >HIFA_HUMAN
SRGRTMNIKSATWKVL

SEQ ID NO: 26017 - protein, 16 aa, Homo sapiens
  ( 178 )...( 193 ): >HIFA_HUMAN
RGRTMNIKSATWKVLH

SEQ ID NO: 26018 - protein, 16 aa, Homo sapiens
  ( 295 )...( 310 ): >HIFA_HUMAN
FTKGQVTTGQYRMLAK

SEQ ID NO: 26019 - protein, 16 aa, Homo sapiens
  ( 296 )...( 311 ): >HIFA_HUMAN
TKGQVTTGQYRMLAKR

SEQ ID NO: 26020 - protein, 16 aa, Homo sapiens
  ( 297 )...( 312 ): >HIFA_HUMAN
KGQVTTGQYRMLAKRG

SEQ ID NO: 26021 - protein, 16 aa, Homo sapiens
  ( 299 )...( 314 ): >HIFA_HUMAN
QVTTGQYRMLAKRGGY

SEQ ID NO: 26022 - protein, 16 aa, Homo sapiens
  ( 300 )...( 315 ): >HIFA_HUMAN
VTTGQYRMLAKRGGYV

SEQ ID NO: 26023 - protein, 16 aa, Homo sapiens
  ( 301 )...( 316 ): >HIFA_HUMAN
TTGQYRMLAKRGGYVW

SEQ ID NO: 26024 - protein, 16 aa, Homo sapiens
  ( 302 )...( 317 ): >HIFA_HUMAN
TGQYRMLAKRGGYVWV

SEQ ID NO: 26025 - protein, 16 aa, Homo sapiens
  ( 204 )...( 219 ): >HIK2_HUMAN
FLGRGTFGQVVKCWKR

SEQ ID NO: 26026 - protein, 16 aa, Homo sapiens
  ( 205 )...( 220 ): >HIK2_HUMAN
LGRGTFGQVVKCWKRG

SEQ ID NO: 26027 - protein, 16 aa, Homo sapiens
  ( 206 )...( 221 ): >HIK2_HUMAN
GRGTFGQVVKCWKRGT

(The sequence listing continues in the following parts.)

1. Method for identifying a cell-penetrating peptide or protein and/or a cell-penetrating fragment of a peptide or protein, the method comprising the steps of
a) obtaining the amino acid sequence of said protein or peptide,
b) selecting the amino acid sequence of at least one candidate fragment,
d) assessing the bulk property value Z_{Σ} of said sequence, Z_{Σ} comprising at least 5 individual average interval values Z_{Σ1}; Z_{Σ2}; Z_{Σ3}; Z_{Σ4} and Z_{Σ5},
wherein Z_{Σ1}, Z_{Σ2}, Z_{Σ3}, Z_{Σ4} and Z_{Σ5} are average values of the respective descriptor values for the residues in said amino acid sequence, calculated with the formula
Z_{Σx}=(Zₓᵣₑₛ₁+Zₓᵣₑₛ₂ . . . +Zₓᵣₑₛₙ)/n
Z_{xresy} being the respective descriptor value for amino acid residue y comprised in the selected candidate fragment, and wherein the descriptor value of each residue corresponds to a Z₁, Z₂, Z₃, Z₄, and Z₅ descriptor value in a descriptor value scale as listed in table 1A, and
e) identifying a cell-penetrating fragment from said at least one candidate fragment(s) based on its Z_{Σ} bulk property value,
a cell-penetrating fragment being characterised by having a Z_{Σ} bulk property value essentially consisting of individual average interval values, wherein Z_{Σ1}<0.2; Z_{Σ2}<1.1; Z_{Σ3}<−0.49;
Z_{Σ4}<0.33; and Z_{Σ5}<1.1 and Z_{Σ5}>0.12,
f) optionally verifying the cell-penetrating capacity of said identified peptide or protein and/or said fragment by in vitro and/or in vivo methods.

2. Method for checking cellular penetration properties of a peptide, the method comprising the steps of
a) obtaining the amino acid sequence of the peptide,
d) assessing the bulk property value Z_{Σ} of said sequence, Z_{Σ} comprising at least 5 individual average interval values Z_{Σ1}: Z_{Σ2}; Z_{Σ3}; Z_{Σ4} and Z_{Σ5},
wherein Z_{Σ1}, Z_{Σ2}, Z_{Σ3}, Z_{Σ4} and Z_{Σ5} are average values of the respective descriptor values for the residues in said amino acid sequence, calculated with the formula
Z_{Σx}=(Zₓᵣₑₛ₁+Zₓᵣₑₛ₂ . . . +Zₓᵣₑₛₙ)/n
Z_{xresy} being the respective descriptor value for amino acid residue y comprised in the selected candidate fragment, and wherein the descriptor value of each residue corresponds to a Z₁, Z₂, Z₃, Z₄, and Z₅ descriptor value in a descriptor value scale as listed in table 1A, and
e) checking the cell-penetrating properties of said peptide based on its Z_{Σ} bulk property value,
a cell-penetrating fragment being characterised by having a Z_{Σ} bulk property value essentially consisting of individual average interval values, wherein Z_{Σ1}<0.2; Z_{Σ2}<1.1; Z_{Σ3}<−0.49; Z_{Σ4}<0.33; and Z_{Σ5}<1.1 and Z_{Σ5}>0.12,
f) synthesizing or isolating a peptide comprising the amino acid sequence of said identified cell-penetrating peptide, and
g) optionally verifying the protein-mimicking functionality and/or the cell-penetrating capacity of the synthesized or isolated peptide by in vitro and/or in vivo methods.

3. Method for producing a cell-penetrating and functional protein-mimicking peptide, the method comprising the steps of
a) selecting a functional protein of interest,
b) obtaining the amino acid sequence of said selected protein,
c) selecting the amino acid sequence of at least one candidate fragment corresponding to an intracellular part of said protein,
d) assessing the bulk property value Z_{Σ} of said sequence, Z_{Σ} comprising at least 5 individual average interval values Z_{Σ1}; Z_{Σ2}; Z_{Σ3}; Z_{Σ4} and Z_{Σ5},
wherein Z_{Σ1}, Z_{Σ2}, Z_{Σ3}, Z_{Σ4} and Zs are average values of the respective descriptor values for the residues in said amino acid sequence, calculated with the formula
Z_{Σx}=((Zₓᵣₑₛ₁+Zₓᵣₑₛ₂ . . . +Zₓᵣₑₛₙ)/n
Z_{xresy} being the respective descriptor value for amino acid residue y comprised in the selected candidate fragment, and wherein the descriptor value of each residue corresponds to a Z₁, Z₂, Z₃, Z₄, and Z₅ descriptor value in a descriptor value scale as listed in table 1A, and
e) identifying a cell-penetrating fragment from said at least one candidate fragment(s) based on its Z_{Σ} bulk property value,
a cell-penetrating fragment being characterised by having a Z_{Σ} bulk property value essentially consisting of individual average interval values, wherein Z_{Σ1}<0.2; Z_{Σ2}<1.1; Z_{Σ3}<−0.49; Z_{Σ4}<0.33; and Z_{Σ5}<1.1 and Z_{Σ5}>0.12,
f) synthesizing or isolating a peptide comprising the amino acid sequence of said identified cell-penetrating peptide, and
g) optionally verifying the protein-mimicking functionality and/or the cell-penetrating capacity of the synthesized or isolated peptide by in vitro and/or in vivo methods.

4. Method for de novo designing and producing an artificial cell-penetrating and/or an artificial cell-penetrating and functional protein-mimicking peptide, the method comprising the steps of
a) designing at least one artificial peptide and/or peptide fragment,
d) assessing the bulk property value Z_of the amino acid sequence of said artificial peptide or peptide fragment, Z_comprising at least 5 individual average interval values Z_{Σ1}; Z_{Σ2}; Z_{Σ3}; Z_{Σ4} and Z_{Σ5},
wherein Z_{Σ1}, Z_{Σ2}, Z_{Σ3}, Z_{Σ4} and Z_{Σ5} are average values of the respective descriptor values for the residues in said amino acid sequence, calculated with the formula
Z_{Σx}=(Zₓᵣₑₛ₁+Zₓᵣₑₛ₂ . . . +Zₓᵣₑₛₙ)/n
Z_{xresy} being the respective descriptor value for amino acid residue y comprised in the selected candidate fragment, and wherein the descriptor value of each residue corresponds to a Z₁, Z₂, Z₃, Z₄, and Z₅ descriptor value in a descriptor value scale as listed in table 1A, and
e) checking the cell-penetrating properties of said artificial peptide and/or peptide fragment based on its Z_{Σ} bulk property value,
a cell-penetrating fragment being characterised by having a Z_{Σ} bulk property value essentially consisting of individual average interval values, wherein Z_{Σ1}<0.2; Z_{Σ2}<1.1; Z_{Σ3}<−0.49; Z_{Σ4}<0.33; and Z_{Σ5}<1.1 and Z_{Σ5}>0.12,
f) synthesizing said peptide and/or peptide fragment comprising the amino acid sequence identified as cell penetrating, and
g) optionally verifying the protein-mimicking functionality and/or the cell-penetrating capacity of the synthesized peptide and/or peptide fragment by in vitro and/or in vivo methods.

5. Method according to any of claims 1-4, wherein said amino acid sequence after step e) is additionally
h) assessed and selected for having a property value essentially consisting of individual average interval values, wherein Z_{ΣBukha}>3.1 and Z_{ΣBulkha}<8.13 and Z_{Σ1}>−1.25 and Z_{Σ1}<3.52 and Z_{Σ2}>−3.9 and Z_{Σ2}<3.1 and Z_{Σ3}<−0.5 and Z_{Σ3}>−3.51 and Z_{Σhdb}>−0.1 5 and Z_{Σhdb}<5.1 and hdb>0 and hdb<84.

6. Method according to any of claims 1-4, wherein said amino acid sequence after step e) is additionally
h) assessed and selected for having a property value essentially consisting of individual average interval values, wherein Z_{ΣBulkha}>3.2 and Z_{ΣBulkha}<5.9 and Z_{Σ1}>−1.25 and Z_{Σ1}<1.92 and Z_{Σ2}>−1.22 and Z_{Σ2}<1.29 and Z_{Σ3}<−0.5 and Z_{Σ3}>−1.94 and Z_{Σhdb}>0.28 and Z_{Σhdb}<2 and hdb>5 and hdb<30.

7. Method according to any of claims 1-4, wherein said amino acid sequence after step e) is additionally
h) assessed and selected for having a property value essentially consisting of individual average interval values, wherein Z_{ΣBulkha}>3.2 and Z_{ΣBulkha}<4.8 and Z_{Σ1}>−1.1 and Z_{Σ1}<1.92 and Z_{Σ2}>−1.1 and Z_{Σ2}<0 and Z_{Σ3}<−0.55 and Z_{Σ3}>−1.94 and Z_{Σhdb}>−0.28 and Z_{Σhdb}<1.57 and hdb>7 and hdb<25.

8. Method according to any of claims 1-4, wherein steps d) and e) are exchanged for
h) assessing and selecting an amino acid sequence for having a property value essentially consisting of individual average interval values, wherein Z_{ΣBulkha}>3.1 and Z_{ΣBulkha}<8.13 and Z_{Σ1}>−1.25 and Z_{Σ1}<3.52 and Z_{Σ2}>−3.9 and Z_{Σ2}<3.1 and Z_{Σ3}<−0.5 and Z_{Σ3}>−3.51 and Z_{Σhdb}>−0.115 and Z_{Σhdb}<5.1 and hdb>0 and hdb<84.

9. Method according to any of claims 1-4, wherein steps d) and e) are exchanged for
h) assessing and selecting an amino acid sequence for having a property value essentially consisting of individual average interval values, wherein Z_{ΣBulkha}>3.2 and Z_{ΣBulkha}<5.9 and Z_{Σ1}>−1.25 and Z_{Σ1}<1.92 and Z_{Σ2}>−1.22 and Z_{Σ2}<1.29 and Z_{Σ3}<−0.5 and Z_{Σ3}>−1.94 and Z_{Σhdb}>0.28 and Z_{Σhdh}<2 and hdb>5 and hdb<30.

10. Method according to any of claims 1-4, wherein steps d) and e) are exchanged for
h) assessing and selecting an amino acid sequence for having a property value essentially consisting of individual average interval values, wherein Z_{ΣBulkha}>3.2 and Z_{ΣBulkha}<4.8 and Z_{Σ1}>−1.1 and Z_{Σ1}<1.92 and Z_{Σ2}>−1.1 and Z_{Σ2}<0 and Z_{Σ3}<−0.55 and Z_{Σ3}>−1.94 and Z_{Σhdb}>−0.28 and Z_{Σhdb}<1.57 and hdb>7 and hdb<25.

11. A method according to any of claims 1 to 4, wherein said protein is a transmembranal protein.

12. A method according to claim 11, wherein said protein is a protein selected from the group consisting of human PrpC, bovine PrpC, amyloid precursor protein (APP) and presenilin-1 (PS-1).

13. A method according to claim 11, wherein said protein is a mammalian receptor, such as a receptor belonging to the superfamily of tyrosine kinase receptors, a 7™ recptor and/or a G-protein coupled receptor.

14. A method according to claim 13, wherein said protein is a protein selected from the group consisting of the GLP-1 receptor, AT1A receptor, and Dopamine-2 receptor.

15. A method according to any of claims 1 to 4, wherein the cell-penetrating capacity of said peptide and/or peptide fragment is verified by monitoring the cellular uptake rate of a detectable dye into said cell after exposure to said peptide and/or peptide fragment.

16. A method according to claim 15, wherein said dye is fluorescein.

17. A cell-penetrating peptide and/or a non-peptide analogue thereof obtained by a method according to any of claims 1 to 4.

18. A cell-penetrating peptide essentially consisting of a peptide obtained by a method according to any of claims 1 to 4.

19. A cell-penetrating peptide selected from a 8 to 50 amino acid residues long peptide, or a fragment thereof with cell-penetrating capacity.

20. A cell-penetrating peptide according to claim 19, wherein the peptide is 14 to 30 amino acid residues long.

21. A cell-penetrating peptide according to claim 19, wherein the peptide is 16 to 20 amino acid residues long.

22. A cell-penetrating peptide selected from a 8 amino acid residues long peptide or a fragment of a peptide corresponding to one of the amino acid sequences listed in SEQ.ID.NO. 6234-7420.

23. A cell-penetrating peptide selected from a 12 to 50 amino acid residues long peptide or a fragment of a peptide corresponding to one of the amino acid sequences listed in SEQ.ID.NO. 1-150.

24. A cell-penetrating peptide selected from a 12 amino acid residues long peptide or a fragment of a peptide corresponding to one of the amino acid sequences listed in SEQ.ID.NO. 151-2684.

25. A cell-penetrating peptide selected from a 12 amino acid residues long peptide or a fragment of a peptide corresponding to one of the amino acid sequences listed in SEQ.ID.NO. 7421-11649.

26. A cell-penetrating peptide selected from a 16 amino acid residues long peptide or a fragment of a peptide corresponding to one of the amino acid sequences listed in SEQ.ID.NO. 2685-6233.

27. A cell-penetrating peptide selected from a 16 amino acid residues long peptide or a fragment of a peptide corresponding to one of the amino acid sequences listed in SEQ.ID.NO. 11650-18398.

28. A cell-penetrating functional protein-mimicking peptide that is derived from a transcription factor or designed to closely resemble a transcription factor or at least a functional fragment of a transcription factor.

29. A cell-penetrating peptide selected from a 8-16 amino acid residues long peptide or a fragment of a peptide corresponding to one of the amino acid sequences listed in SEQ.ID.NO. 18399-31839.

30. A cell-penetrating functional protein-mimicking peptide that is derived from a secretase or designed to closely resemble a secretase or at least a functional fragment of a secretease.

31. A cell-penetrating peptide selected from a peptide or a fragment of a peptide corresponding to one of the amino acid sequences listed in SEQ.ID.NO. 31840-31864.

32. A cell-penetrating functional protein-mimicking peptide that is derived from a GLP-1 receptor or designed to closely resemble a GLP-1 receptor or at least a functional fragment of a GLP-1 receptor.

33. A cell-penetrating peptide selected from a peptide or a fragment of a peptide corresponding to one of the amino acid sequences listed in SEQ.ID.NO. 31865-31886.

34. A cell-penetrating functional protein-mimicking peptide that is derived from a CGRP receptor or designed to closely resemble a CGRP receptor or at least a functional fragment of a CGRP receptor.

35. A cell-penetrating peptide selected from a peptide or a fragment of a peptide corresponding to the amino acid sequence listed in SEQ.ID.NO. 31895.

36. A cell-penetrating functional protein-mimicking peptide that is derived from an AT2 type receptor or designed to closely resemble an AT2 type receptor or at least a functional fragment of an AT2 type receptor.

37. A cell-penetrating peptide selected from a peptide or a fragment of a peptide corresponding to one of the amino acid sequences listed in SEQ.ID.NO. 31887-31894.

38. A cell-penetrating functional protein-mimicking peptide that is derived from a PrpC or designed to closely resemble a PrpC or at least a functional fragment of a PrpC.

39. A cell-penetrating peptide selected from a peptide or a fragment of a peptide corresponding to one of the amino acid sequences listed in SEQ.ID.NO. 31896-31899.

40. A cell-penetrating functional protein-mimicking peptide that is derived from amyloid precursor protein (APP) or presenilin-1 (PS-1) or designed to closely resemble amyloid precursor protein (APP) or presenilin-1 (PS-1) or at least a functional fragment of amyloid precursor protein (APP) or presenilin-1 (PS-1).

41. A cell-penetrating peptide selected from a peptide or a fragment of a peptide corresponding to one of the amino acid sequences listed in SEQ.ID.NO. 31900-31906.

42. A functional analogue of a cell-penetrating peptide according to any of claims 19 to 41.

43. A cell-penetrating peptide and/or a non-peptide analogue thereof being at least 75% identical to a cell-penetrating peptide and/or a non-peptide-analogue thereof according to any of claims 19 to 41.

44. A cell-penetrating peptide and/or a non-peptide analogue thereof comprising a cell-penetrating peptide and/or a non-peptide analogue thereof according to any of claims 19 to 41.

45. A cell-penetrating peptide and/or a non-peptide analogue thereof according to any of claims 19 to 41, selected from the group consisting of peptides comprising the amino acid sequence IVIAKLKA and/or a cell membrane penetrating functional analogue thereof.

46. A cell-penetrating peptide and/or a non-peptide analogue thereof according to claim 45, comprising the amino acid sequence IVIAKLKANLMCKTCRLAK.

47. A cell-penetrating peptide and/or a non-peptide analogue thereof according to any of claims 19 to 41, wherein the peptide is coupled to a cargo.

48. A cell-penetrating peptide and/or a non-peptide analogue thereof according to claim 47, wherein the peptide is coupled to a cargo by a S—S bridge.

49. A cell-penetrating peptide and/or a non-peptide analogue thereof according to claim 47, wherein the cargo is a cellular effector.

50. A cell-penetrating peptide and/or a non-peptide analogue thereof according to claim 47, wherein the cargo is a pharmaceutically active component.

51. A cell-penetrating peptide and/or a non-peptide analogue thereof according to claim 47, wherein the cargo is selected from the group consisting of a small molecule, peptide, protein, saccharide, single and/or double stranded oligonucleotide, plasmid, antibiotic substance, cytotoxic and/or antiviral agent.

52. A cell-penetrating peptide and/or a non-peptide analogue thereof according to claim 47, wherein the cargo is a marker molecule.

53. A cell-penetrating peptide and/or a non-peptide analogue thereof according to claim 47, selected from a peptide or a fragment of a peptide corresponding to one of the amino acid sequences listed in SEQ.ID.NO. 31907-31922.

54. A cell-selective delivery system for a cytostatic and/or cytotoxic agent, comprising
a) a cell-penetrating peptide and/or a non-peptide analogue thereof comprising a protease consensus site for a protease specifically overexpressed in and/or secreted by a target cell and
b) a cytostatic and/or cytotoxic agent, wherein said cell-selective delivery system additionally comprises an inactivation sequence repressing the activity of said cell-penetrating peptide, and which is cleaved by said protease upon introducing said cell-selective delivery system in the near vicinity of said target cell.

55. A vector for transfecting a cell, the vector comprising
a) a nucleic acid component,
b) a polycation conjugate, and
c) a cell-penetrating peptide and/or a non-peptide analogue thereof, wherein the average rate of transfection per cell at identical transfection conditions is enhanced by a factor of at least 2, compared to a vector comprising only components a) and b), or only components a) and c).

56. A vector according to claim 55, wherein said vector is used in a transient transfection and/or a stable transfection of a cell.

57. A vector according to claim 56, wherein said vector is used in an in vivo and/or in an in vitro transfection of a cell.

58. A vector according to claim 57, wherein said vector is used for a non-viral transfection of a cell.

59. A vector according to any of claims 55-58, wherein said polycation conjugate is polyethylene imine (PEI).

60. A vector according to claim 55, selected from a peptide or a fragment of a peptide corresponding to the amino acid sequence listed in SEQ.ID.NO. 31913.

61. A vector according to any of claims 55-58, wherein said cell-penetrating peptide is a peptide or a peptide fragment is selected from the group consisting of an 8 amino acid residues long peptide or a fragment of a peptide corresponding to one of the amino acid sequences listed in SEQ ID NOS:6234-7420, a 12 to 50 amino acid residues long peptide or a fragment of a peptide corresponding to one of the amino acid sequences listed in SEQ ID NOS:1-150, a 12 amino acid residues long peptide or a fragment of a peptide corresponding to one of the amino acid sequences listed in SEQ ID NOS:151-2684, a 12 amino acid residues long peptide or a fragment of a peptide corresponding to one of the amino acid sequences listed in SEQ ID NOS:7421-11649, a 16 amino acid residues long peptide or a fragment of a peptide corresponding to one of the amino acid sequences listed in SEQ ID NOS:2685-6233, a 16 amino acid residues long peptide or a fragment of a peptide corresponding to one of the amino acid sequences listed in SEQ ID NOS: 11650-18398, an 8-16 amino acid residues long peptide or a fragment of a peptide corresponding to one of the amino acid sequences listed in SEQ ID NOS: 18399-31839, a peptide or a fragment of a peptide corresponding to one of the amino acid sequences listed in SEQ ID NOS:31840-31864, a peptide or a fragment of a peptide corresponding to one of the amino acid sequences listed in SEQ ID NOS:31865-31886, a peptide or a fragment of a peptide corresponding to the amino acid sequence of SEQ ID NO:31895, a peptide or a fragment of a peptide corresponding to one of the amino acid sequences listed in SEQ ID NOS:31887-31894, a peptide or a fragment of a peptide corresponding to one of the amino acid sequences listed in SEQ ID NOS:31896-31899, a peptide or a fragment of a peptide corresponding to one of the amino acid sequences listed in SEQ ID NOS:31900-31906, a peptide comprising the amino acid sequence IVIAKLKA, a peptide comprising the amino acid sequence IVIAKLKANLMCKTCRLAK, and a peptide or a fragment of a peptide corresponding to one of the amino acid sequences listed in SEQ ID NOS:31907-31922.

62. A cell-penetrating peptide and/or a non-peptide analogue thereof and/or a vector according to any of claims 22-27, 29, 31, 33, 35, 37, 39, 41, 45, 46, 52, 59 and 55-60, further characterised by being cell and/or cell-type and/or tissue specific.

63. A cell-penetrating peptide and/or a non-peptide analogue thereof and/or a vector according to claim 62, wherein said peptide and/or a non-peptide analogue thereof and/or vector selectively interacts with a cell surface protein, thus mediating the cell and/or cell-type and/or tissue specific cellular penetration.

64. A cell-penetrating peptide and/or a non-peptide analogue thereof and/or a vector according to claim 63, wherein said cell surface protein is over-expressed in said specific cell and/or cell-type and/or tissue.

65. A cell-penetrating peptide and/or a non-peptide analogue thereof and/or a vector according to claim 63 or 64, wherein said cell surface protein is selected from the group consisting of receptor tyrosine kinase type receptors, glycosphingolipids, CD44, erbB2, erbB3, and neuropeptide receptors.

66. A cell-penetrating peptide and/or a non-peptide analogue thereof and/or a vector according to claim 62, wherein said peptide and/or vector selectively interacts with an over-expressed cellular and/or extracellular protein, thus mediating the cell and/or cell-type and/or tissue specific cellular penetration.

67. A cell-penetrating peptide and/or a non-peptide analogue thereof and/or a vector according to claim 62, wherein said over-expressed protein is selected from the group consisting of agonists and antagonists to cell and/or cell-type and/or tissue specific receptors.

68. A cell-penetrating peptide and/or a non-peptide analogue thereof and/or a vector according to claim 62 or 63, wherein said over-expressed protein is selected from the group consisting of proteases, protease inhibitors and protease activators.

69. Use of a cell-penetrating peptide and/or a non-peptide analogue thereof and/or a vector according to any of claims 17-68 and/or a cell-selective delivery system according to claim 54 for the manufacture of a pharmaceutical composition.

70. A pharmaceutical composition manufactured according to claim 69.

71. Use of a cell-penetrating peptide and/or a non-peptide analogue thereof and/or a vector and/or a cell-selective delivery system and/or a pharmaceutical composition according to any of claims 17-68 for gene therapy.

72. Use of a cell-penetrating peptide and/or a non-peptide analogue thereof and/or a vector and/or a cell-selective delivery system according to any of claims 17-68 for the manufacture of a pharmaceutical composition for gene therapy.

73. Use of a cell-penetrating peptide and/or a non-peptide analogue thereof and/or a vector and/or a cell-selective delivery system according to any of claims 17-68 for the manufacture of a drug delivery system for transmembrane transport across an epithelial membrane, such as across the epithelium in the intestinal/buccal system, the mucosa in the mouth, lung, rectum or nose, or the blood brain barrier of a mammal.

74. Use of a cell-penetrating peptide and/or a non-peptide analogue thereof and/or a vector, a pharmaceutical composition and/or a drug delivery system according to any of claims 17-68 for the manufacture of a pharmaceutical composition for treating and/or preventing a medical condition selected from the group consisting of infectious diseases, diabetes type I, diabetes type II, Alzheimers Disease, Parkinssons Disease, cancer.

75. Method for treating a patient who suffers from a medical condition, the method comprising administering a pharmaceutical composition comprising a cell-penetrating peptide and/or a non-peptide analogue thereof and/or a vector, a pharmaceutical composition and/or a drug delivery system according to any of claims 17-68 to a patient in need thereof.

76. Method of treating a patient who suffers from a medical condition selected from the group consisting of diabetes type I and II, Alzheimers Disease, Parkinssons Disease, a prion disease, a cardiovascular disease, an infectious disease, disorders resulting from perturbed signal transduction, or cancer, the method comprising administering a pharmaceutical composition comprising a cell-penetrating peptide and/or a non-peptide analogue thereof and/or a vector, a pharmaceutical composition and/or a drug delivery system according to any of claims 17-68 is administered to a patient in need thereof.
